United States Patent Application Publication US 2007/0042381 A1 - sequence listing, part 36

SEQ ID NO: 1597893 - RNA, 14 nt, Human
uuugagaguucuaa

SEQ ID NO: 1597894 - RNA, 21 nt, Human
uuugacagaauauguuucaaa

SEQ ID NO: 1597895 - RNA, 20 nt, Human
uuugacagaauauguuucaa

SEQ ID NO: 1597896 - RNA, 19 nt, Human
uuugacagaauauguuuca

SEQ ID NO: 1597897 - RNA, 18 nt, Human
uuugacagaauauguuuc

SEQ ID NO: 1597898 - RNA, 22 nt, Human
auucaaacagucucaggaaauc

SEQ ID NO: 1597899 - RNA, 20 nt, Human
auuauauggcuugaguuuaa

SEQ ID NO: 1597900 - RNA, 17 nt, Human
auuccaagugauugaaa

SEQ ID NO: 1597901 - RNA, 22 nt, Human
auucaggagaguagaacagaua

SEQ ID NO: 1597902 - RNA, 21 nt, Human
auucaggagaguagaacagau

SEQ ID NO: 1597903 - RNA, 15 nt, Human
auuacuguaagaaaa

SEQ ID NO: 1597904 - RNA, 16 nt, Human
auuacuguaagaaaau

SEQ ID NO: 1597905 - RNA, 15 nt, Human
uuuuguuuucauuau

SEQ ID NO: 1597906 - RNA, 14 nt, Human
uuuugugaagcaaa

SEQ ID NO: 1597907 - RNA, 17 nt, Human
uuuuuauauuugaaaua

SEQ ID NO: 1597908 - RNA, 15 nt, Human
uuuuugaagcuguau

SEQ ID NO: 1597909 - RNA, 13 nt, Human
uuuuugacagaau

SEQ ID NO: 1597910 - RNA, 12 nt, Human
uuuuugacagaa

SEQ ID NO: 1597911 - RNA, 19 nt, Human
uuuuuguagcacugacaga

SEQ ID NO: 1597912 - RNA, 21 nt, Human
uuuuuguagcacugacagauu

SEQ ID NO: 1597913 - RNA, 20 nt, Human
uuuuuguagcacugacagau

SEQ ID NO: 1597914 - RNA, 16 nt, Human
auuggagcucguggaa

SEQ ID NO: 1597915 - RNA, 17 nt, Human
auuggagcucgugggac

SEQ ID NO: 1597916 - RNA, 17 nt, Human
auuguacgaagaguauu

SEQ ID NO: 1597917 - RNA, 19 nt, Human
auugauguguuuauuuaua

SEQ ID NO: 1597918 - RNA, 12 nt, Human
auugauguguuu

SEQ ID NO: 1597919 - RNA, 15 nt, Human
auuuaccacuugugu

SEQ ID NO: 1597920 - RNA, 22 nt, Human
auuuaccacuuguguuuugcaa

SEQ ID NO: 1597921 - RNA, 16 nt, Human
auuguaguccuguaau

SEQ ID NO: 1597922 - RNA, 17 nt, Human
auuuaaaaaaaaaccug

SEQ ID NO: 1597923 - RNA, 19 nt, Human
auuuauuacuguaagaaaa

SEQ ID NO: 1597924 - RNA, 20 nt, Human
auuuauuacuguaagaaaau

SEQ ID NO: 1597925 - RNA, 21 nt, Human
auuuauuuuaauaauguuuca

SEQ ID NO: 1597926 - RNA, 18 nt, Human
auuugaauguuaagcaga

SEQ ID NO: 1597927 - RNA, 13 nt, Human
auuugaauguuaa

SEQ ID NO: 1597928 - RNA, 19 nt, Human
auuugaauguuaagcagau

SEQ ID NO: 1597929 - RNA, 20 nt, Human
augccuuuucccaacuccag

SEQ ID NO: 1597930 - RNA, 22 nt, Human
augccuuuucccaacuccagaa

SEQ ID NO: 1597931 - RNA, 18 nt, Human
augcuacaggauuugaaa

SEQ ID NO: 1597932 - RNA, 21 nt, Human
uuuauaugcuucuguuuuaua

SEQ ID NO: 1597933 - RNA, 23 nt, Human
augcuguauuuuaaaagaaugau

SEQ ID NO: 1597934 - RNA, 22 nt, Human
augcuguauuuuaaaagaauga

SEQ ID NO: 1597935 - RNA, 21 nt, Human
augcuucuguuuuauaauuuu

SEQ ID NO: 1597936 - RNA, 17 nt, Human
auggaaugcuguguuaa

SEQ ID NO: 1597937 - RNA, 21 nt, Human
auggaaugcuguguuaaauaa

SEQ ID NO: 1597938 - RNA, 19 nt, Human
uuucaaacauauauaacaa

SEQ ID NO: 1597939 - RNA, 22 nt, Human
uuucacauaucuaguaugaaau

SEQ ID NO: 1597940 - RNA, 20 nt, Human
uuuaaaaaagaaacauuugg

SEQ ID NO: 1597941 - RNA, 21 nt, Human
uuuaaauauaugcuaagucuu

SEQ ID NO: 1597942 - RNA, 18 nt, Human
uuuaaaaaaauuccaagu

SEQ ID NO: 1597943 - RNA, 12 nt, Human
augcaaagcacu

SEQ ID NO: 1597944 - RNA, 13 nt, Human
augcaaagcacug

SEQ ID NO: 1597945 - RNA, 14 nt, Human
augcaaagcacuga

SEQ ID NO: 1597946 - RNA, 15 nt, Human
augcaaagcacugac

SEQ ID NO: 1597947 - RNA, 13 nt, Human
augauuucauuca

SEQ ID NO: 1597948 - RNA, 18 nt, Human
uuguucauacauauuuuu

SEQ ID NO: 1597949 - RNA, 16 nt, Human
uuguucauacauauuu

SEQ ID NO: 1597950 - RNA, 22 nt, Human
uuguucaauaauaaauauuuuu

SEQ ID NO: 1597951 - RNA, 13 nt, Human
uuguucauacaua

SEQ ID NO: 1597952 - RNA, 20 nt, Human
uuguucaauaauaaauauuu

SEQ ID NO: 1597953 - RNA, 20 nt, Human
uugucaauaaaauccauaca

SEQ ID NO: 1597954 - RNA, 17 nt, Human
augagguacugagagug

SEQ ID NO: 1597955 - RNA, 18 nt, Human
augagguacugagaguga

SEQ ID NO: 1597956 - RNA, 15 nt, Human
augagguacugagag

SEQ ID NO: 1597957 - RNA, 17 nt, Human
uuguagcuuuaucaaag

SEQ ID NO: 1597958 - RNA, 16 nt, Human
uuguagcuuuaucaaa

SEQ ID NO: 1597959 - RNA, 13 nt, Human
uugacaugggaca

SEQ ID NO: 1597960 - RNA, 12 nt, Human
uugacuuuuuau

SEQ ID NO: 1597961 - RNA, 15 nt, Human
aucucaaaacugcac

SEQ ID NO: 1597962 - RNA, 19 nt, Human
aucucaaaacugcacuguc

SEQ ID NO: 1597963 - RNA, 20 nt, Human
aucucaaaacugcacuguca

SEQ ID NO: 1597964 - RNA, 22 nt, Human
uugcaagccagauuuuccugaa

SEQ ID NO: 1597965 - RNA, 14 nt, Human
aucugacuaugaca

SEQ ID NO: 1597966 - RNA, 17 nt, Human
aucugacuaugacauaa

SEQ ID NO: 1597967 - RNA, 15 nt, Human
aucuuauaauuuaaa

SEQ ID NO: 1597968 - RNA, 16 nt, Human
aucuuauaauuuaaaa

SEQ ID NO: 1597969 - RNA, 12 nt, Human
aucuuuaaaaua

SEQ ID NO: 1597970 - RNA, 15 nt, Human
aucuuuaaaauacac

SEQ ID NO: 1597971 - RNA, 17 nt, Human
uuggagaagaacugaaa

SEQ ID NO: 1597972 - RNA, 22 nt, Human
uuggagaagaacugaaaucaua

SEQ ID NO: 1597973 - RNA, 15 nt, Human
uuggagaagaacuga

SEQ ID NO: 1597974 - RNA, 18 nt, Human
uuggagacacaacuauuu

SEQ ID NO: 1597975 - RNA, 23 nt, Human
auaugcaaagcacugacuucuaa

SEQ ID NO: 1597976 - RNA, 16 nt, Human
auaugcaaagcacuga

SEQ ID NO: 1597977 - RNA, 21 nt, Human
uucagaaaauauuauguguuu

SEQ ID NO: 1597978 - RNA, 20 nt, Human
uucagaaaauauuauguguu

SEQ ID NO: 1597979 - RNA, 14 nt, Human
uucagaaaauauua

SEQ ID NO: 1597980 - RNA, 13 nt, Human
uucagaaaauauu

SEQ ID NO: 1597981 - RNA, 17 nt, Human
auagucaaauuguguga

SEQ ID NO: 1597982 - RNA, 18 nt, Human
auagucaaauugugugaa

SEQ ID NO: 1597983 - RNA, 17 nt, Human
auauauaacaaugcugu

SEQ ID NO: 1597984 - RNA, 18 nt, Human
auauauaacaaugcugua

SEQ ID NO: 1597985 - RNA, 19 nt, Human
auauauaacaaugcuguau

SEQ ID NO: 1597986 - RNA, 19 nt, Human
auauaaguauucuaaauuu

SEQ ID NO: 1597987 - RNA, 12 nt, Human
auauaacaaugc

SEQ ID NO: 1597988 - RNA, 15 nt, Human
auauaacaaugcugu

SEQ ID NO: 1597989 - RNA, 17 nt, Human
auauaacaaugcuguau

SEQ ID NO: 1597990 - RNA, 19 nt, Human
auauaagcuuguauuccuu

SEQ ID NO: 1597991 - RNA, 17 nt, Human
auauaaguauucuaaau

SEQ ID NO: 1597992 - RNA, 17 nt, Human
auagcuacuaauuuuaa

SEQ ID NO: 1597993 - RNA, 14 nt, Human
auagcuacuaauuu

SEQ ID NO: 1597994 - RNA, 18 nt, Human
auagcuacuaauuuuaaa

SEQ ID NO: 1597995 - RNA, 17 nt, Human
uuauuguuuaaaaucau

SEQ ID NO: 1597996 - RNA, 22 nt, Human
auaggaauugacccacaagaaa

SEQ ID NO: 1597997 - RNA, 21 nt, Human
auaggaauugacccacaagaa

SEQ ID NO: 1597998 - RNA, 21 nt, Human
uucacauaucuaguaugaaau

SEQ ID NO: 1597999 - RNA, 20 nt, Human
uucacauaucuaguaugaaa

SEQ ID NO: 1598000 - RNA, 22 nt, Human
uucaagaaaacaacuucaauau

SEQ ID NO: 1598001 - RNA, 15 nt, Human
uucaaacauauauaa

SEQ ID NO: 1598002 - RNA, 16 nt, Human
uucaaacuuuggaaca

SEQ ID NO: 1598003 - RNA, 14 nt, Human
uucugaagaagaug

SEQ ID NO: 1598004 - RNA, 23 nt, Human
uucugcaucagcugcugaaacaa

SEQ ID NO: 1598005 - RNA, 12 nt, Human
uucugaagaaga

SEQ ID NO: 1598006 - RNA, 13 nt, Human
uucugaagaagau

SEQ ID NO: 1598007 - RNA, 13 nt, Human
aucccucccucca

SEQ ID NO: 1598008 - RNA, 11 nt, Human
aucccucccuc

SEQ ID NO: 1598009 - RNA, 23 nt, Human
aucccucccuccaccucccugca

SEQ ID NO: 1598010 - RNA, 14 nt, Human
aucccucccuccac

SEQ ID NO: 1598011 - RNA, 14 nt, Human
uucucaacuccaaa

SEQ ID NO: 1598012 - RNA, 18 nt, Human
uucucaacuccaaacuga

SEQ ID NO: 1598013 - RNA, 19 nt, Human
aucagugugucuaaauuug

SEQ ID NO: 1598014 - RNA, 20 nt, Human
aucagugugucuaaauuuga

SEQ ID NO: 1598015 - RNA, 14 nt, Human
auauuugaaauauu

SEQ ID NO: 1598016 - RNA, 19 nt, Human
auauuugaaauauugacuu

SEQ ID NO: 1598017 - RNA, 23 nt, Human
auauuugaaauauugacuuuuua

SEQ ID NO: 1598018 - RNA, 12 nt, Human
auauuuuaacuu

SEQ ID NO: 1598019 - RNA, 22 nt, Human
auauuuguaucacaaaucuuaa

SEQ ID NO: 1598020 - RNA, 13 nt, Human
auauuugaaauau

SEQ ID NO: 1598021 - RNA, 18 nt, Human
auauuguguugugaaugu

SEQ ID NO: 1598022 - RNA, 17 nt, Human
auauuguguugugaaug

SEQ ID NO: 1598023 - RNA, 17 nt, Human
auauguuucaaacuuug

SEQ ID NO: 1598024 - RNA, 17 nt, Human
agugaaagaaaauaaca

SEQ ID NO: 1598025 - RNA, 15 nt, Human
agugaaagaaaauaa

SEQ ID NO: 1598026 - RNA, 16 nt, Human
agugaacaaauuuaca

SEQ ID NO: 1598027 - RNA, 20 nt, Human
agugaacaaauuuacagaga

SEQ ID NO: 1598028 - RNA, 14 nt, Human
ugugauguauucua

SEQ ID NO: 1598029 - RNA, 16 nt, Human
ugugauguauucuagc

SEQ ID NO: 1598030 - RNA, 15 nt, Human
ugugagaugcuagaa

SEQ ID NO: 1598031 - RNA, 19 nt, Human
ugugagaugcuagaacucc

SEQ ID NO: 1598032 - RNA, 22 nt, Human
ugugagaugcuagaacucccuu

SEQ ID NO: 1598033 - RNA, 22 nt, Human
agucucaggaaaucaaauaugc

SEQ ID NO: 1598034 - RNA, 18 nt, Human
agucacuaccuucaugca

SEQ ID NO: 1598035 - RNA, 17 nt, Human
aguguacuuaacuauuc

SEQ ID NO: 1598036 - RNA, 14 nt, Human
uguuccuagugaaa

SEQ ID NO: 1598037 - RNA, 18 nt, Human
uguuccuagugaaagagg

SEQ ID NO: 1598038 - RNA, 15 nt, Human
uguuauaaucuuuca

SEQ ID NO: 1598039 - RNA, 14 nt, Human
agugugucuaaauu

SEQ ID NO: 1598040 - RNA, 20 nt, Human
ugugugaaagguacuucaaa

SEQ ID NO: 1598041 - RNA, 13 nt, Human
uguguaaguagau

SEQ ID NO: 1598042 - RNA, 16 nt, Human
uguuaaguauguguaa

SEQ ID NO: 1598043 - RNA, 15 nt, Human
uguuaaguaugugua

SEQ ID NO: 1598044 - RNA, 19 nt, Human
uguguuaaguauguguaaa

SEQ ID NO: 1598045 - RNA, 20 nt, Human
uguggucacaggaaguagag

SEQ ID NO: 1598046 - RNA, 22 nt, Human
aguugcauagguuuaauaauuu

SEQ ID NO: 1598047 - RNA, 14 nt, Human
uguuuugcaagcca

SEQ ID NO: 1598048 - RNA, 21 nt, Human
aguucugcagauaaacaguag

SEQ ID NO: 1598049 - RNA, 16 nt, Human
aguucugcagauaaac

SEQ ID NO: 1598050 - RNA, 19 nt, Human
uguuuucauuaucucaaaa

SEQ ID NO: 1598051 - RNA, 19 nt, Human
uguuuugaaucucauaauu

SEQ ID NO: 1598052 - RNA, 24 nt, Human
uguuuauuuauagaguguacuuaa

SEQ ID NO: 1598053 - RNA, 14 nt, Human
uguuuauuuauaga

SEQ ID NO: 1598054 - RNA, 15 nt, Human
uuacuguaagaaaau

SEQ ID NO: 1598055 - RNA, 14 nt, Human
uuaccuuacagaag

SEQ ID NO: 1598056 - RNA, 16 nt, Human
auaaaauaauuuuuau

SEQ ID NO: 1598057 - RNA, 21 nt, Human
auaaaauaauuuuuauauuug

SEQ ID NO: 1598058 - RNA, 22 nt, Human
auaaaauaauuuuuauauuuga

SEQ ID NO: 1598059 - RNA, 18 nt, Human
auaaaauccauacauuug

SEQ ID NO: 1598060 - RNA, 19 nt, Human
auaaaauccauacauuugu

SEQ ID NO: 1598061 - RNA, 18 nt, Human
uuaaguaaugauaacugg

SEQ ID NO: 1598062 - RNA, 22 nt, Human
uuaagaagacugcauuauauuu

SEQ ID NO: 1598063 - RNA, 17 nt, Human
uuaauuccaauuauaug

SEQ ID NO: 1598064 - RNA, 23 nt, Human
agggaggacgcucucuggccuuc

SEQ ID NO: 1598065 - RNA, 21 nt, Human
agggaggacgcucucuggccu

SEQ ID NO: 1598066 - RNA, 22 nt, Human
agggaggacgcucucuggccuu

SEQ ID NO: 1598067 - RNA, 16 nt, Human
aggggaauugaggaca

SEQ ID NO: 1598068 - RNA, 18 nt, Human
aggggagcaugggaagug

SEQ ID NO: 1598069 - RNA, 16 nt, Human
aguacauuuggagaca

SEQ ID NO: 1598070 - RNA, 15 nt, Human
aguaauucaagaaaa

SEQ ID NO: 1598071 - RNA, 16 nt, Human
uguagaggagaaacug

SEQ ID NO: 1598072 - RNA, 13 nt, Human
aguaaaauccaca

SEQ ID NO: 1598073 - RNA, 18 nt, Human
aguaaugauaacuggaaa

SEQ ID NO: 1598074 - RNA, 20 nt, Human
aguaaugauaacuggaaacu

SEQ ID NO: 1598075 - RNA, 17 nt, Human
aguaaugauaacuggaa

SEQ ID NO: 1598076 - RNA, 14 nt, Human
aguaauagagcaaa

SEQ ID NO: 1598077 - RNA, 17 nt, Human
aguauuucuaugaaaua

SEQ ID NO: 1598078 - RNA, 16 nt, Human
aguauuucuaugaaau

SEQ ID NO: 1598079 - RNA, 18 nt, Human
aguauuucuaugaaauau

SEQ ID NO: 1598080 - RNA, 21 nt, Human
aguauuagaauaccacaggaa

SEQ ID NO: 1598081 - RNA, 14 nt, Human
agucaccucaugga

SEQ ID NO: 1598082 - RNA, 15 nt, Human
agucaccucauggaa

SEQ ID NO: 1598083 - RNA, 17 nt, Human
agucaccucauggaauu

SEQ ID NO: 1598084 - RNA, 18 nt, Human
aguauuagaauaccacag

SEQ ID NO: 1598085 - RNA, 16 nt, Human
aguaguaauagagcaa

SEQ ID NO: 1598086 - RNA, 14 nt, Human
uguaguguuggaga

SEQ ID NO: 1598087 - RNA, 15 nt, Human
uguaguguuggagaa

SEQ ID NO: 1598088 - RNA, 15 nt, Human
uguaucacaaaucuu

SEQ ID NO: 1598089 - RNA, 18 nt, Human
uguaucacaaaucuuaac

SEQ ID NO: 1598090 - RNA, 22 nt, Human
uguauucuagcuaauguaauaa

SEQ ID NO: 1598091 - RNA, 13 nt, Human
uguauuacaaauc

SEQ ID NO: 1598092 - RNA, 22 nt, Human
uguauuacaaauccaaugaaau

SEQ ID NO: 1598093 - RNA, 20 nt, Human
uguauucuagcuaauguaau

SEQ ID NO: 1598094 - RNA, 23 nt, Human
uggugugaccacugcagaagaca

SEQ ID NO: 1598095 - RNA, 16 nt, Human
uguaaauaguauuuga

SEQ ID NO: 1598096 - RNA, 23 nt, Human
aggaaaucaaauaugcaaagcac

SEQ ID NO: 1598097 - RNA, 21 nt, Human
aggaaaucaaauaugcaaagc

SEQ ID NO: 1598098 - RNA, 22 nt, Human
aggaaaucaaauaugcaaagca

SEQ ID NO: 1598099 - RNA, 20 nt, Human
aggaaaucaaauaugcaaag

SEQ ID NO: 1598100 - RNA, 14 nt, Human
ugcuacaaaaacac

SEQ ID NO: 1598101 - RNA, 15 nt, Human
ugcuacaaaaacaca

SEQ ID NO: 1598102 - RNA, 17 nt, Human
ugccuuuucccaacucc

SEQ ID NO: 1598103 - RNA, 19 nt, Human
ugccuuuucccaacuccag

SEQ ID NO: 1598104 - RNA, 16 nt, Human
agcuugcccuguuaaa

SEQ ID NO: 1598105 - RNA, 18 nt, Human
agcuugcccuguuaaaag

SEQ ID NO: 1598106 - RNA, 19 nt, Human
agcuugcccuguuaaaaga

SEQ ID NO: 1598107 - RNA, 20 nt, Human
agcuugcccuggugccucac

SEQ ID NO: 1598108 - RNA, 14 nt, Human
agcuguucacagcc

SEQ ID NO: 1598109 - RNA, 16 nt, Human
agcugcccucuccugg

SEQ ID NO: 1598110 - RNA, 15 nt, Human
agcugcccucuccug

SEQ ID NO: 1598111 - RNA, 14 nt, Human
agcugcccucuccu

SEQ ID NO: 1598112 - RNA, 13 nt, Human
agcugcccucucc

SEQ ID NO: 1598113 - RNA, 20 nt, Human
ugcccuguuaaaagaugaaa

SEQ ID NO: 1598114 - RNA, 17 nt, Human
uggagcucguggaacag

SEQ ID NO: 1598115 - RNA, 21 nt, Human
uggagcucguggaacaguuac

SEQ ID NO: 1598116 - RNA, 21 nt, Human
uggagcucgugggacagucac

SEQ ID NO: 1598117 - RNA, 15 nt, Human
aggcagcuugaaacu

SEQ ID NO: 1598118 - RNA, 20 nt, Human
aggcauuuaggccaugggac

SEQ ID NO: 1598119 - RNA, 15 nt, Human
aggcccccaggugcc

SEQ ID NO: 1598120 - RNA, 14 nt, Human
uggaguugaaaauc

SEQ ID NO: 1598121 - RNA, 13 nt, Human
aggacgcucucug

SEQ ID NO: 1598122 - RNA, 14 nt, Human
aggacgcucucugg

SEQ ID NO: 1598123 - RNA, 16 nt, Human
aggacgcucucuggcc

SEQ ID NO: 1598124 - RNA, 17 nt, Human
aggacgcucucuggccu

SEQ ID NO: 1598125 - RNA, 19 nt, Human
aggacgcucucuggccuuc

SEQ ID NO: 1598126 - RNA, 20 nt, Human
aggacgcucucuggccuucg

SEQ ID NO: 1598127 - RNA, 18 nt, Human
aggagaaacuggaacucu

SEQ ID NO: 1598128 - RNA, 19 nt, Human
aggagaaacuggaacucuc

SEQ ID NO: 1598129 - RNA, 17 nt, Human
aggagaguagaacagau

SEQ ID NO: 1598130 - RNA, 17 nt, Human
ugcuuuuaaaaaaaaau

SEQ ID NO: 1598131 - RNA, 20 nt, Human
ugcauagauucccugagcag

SEQ ID NO: 1598132 - RNA, 19 nt, Human
ugcauacucauuaggaugg

SEQ ID NO: 1598133 - RNA, 13 nt, Human
ugccauaauuacu

SEQ ID NO: 1598134 - RNA, 17 nt, Human
ugccaguuauggcuaua

SEQ ID NO: 1598135 - RNA, 22 nt, Human
ugcagaagacaguauggcagcu

SEQ ID NO: 1598136 - RNA, 17 nt, Human
ugcacuccagccugagc

SEQ ID NO: 1598137 - RNA, 15 nt, Human
ugcacuccagccuga

SEQ ID NO: 1598138 - RNA, 18 nt, Human
agccccgugggguuccuc

SEQ ID NO: 1598139 - RNA, 21 nt, Human
ugcaauaaaauggguuuuacu

SEQ ID NO: 1598140 - RNA, 17 nt, Human
ugcaauaaaauggguuu

SEQ ID NO: 1598141 - RNA, 15 nt, Human
ugcaagccagauuuu

SEQ ID NO: 1598142 - RNA, 21 nt, Human
ugcaagccagauuuuccugaa

SEQ ID NO: 1598143 - RNA, 13 nt, Human
ugauuucauucaa

SEQ ID NO: 1598144 - RNA, 18 nt, Human
ugcaaagcacugacuucu

SEQ ID NO: 1598145 - RNA, 20 nt, Human
ugcaaagcacugacuucuaa

SEQ ID NO: 1598146 - RNA, 22 nt, Human
ugcaaagcacugacuucuaagu

SEQ ID NO: 1598147 - RNA, 15 nt, Human
ugauuaaguaaugau

SEQ ID NO: 1598148 - RNA, 16 nt, Human
ugauuaaguaaugaua

SEQ ID NO: 1598149 - RNA, 14 nt, Human
ugaugggaaagcau

SEQ ID NO: 1598150 - RNA, 22 nt, Human
agcauuuagauguauagguuga

SEQ ID NO: 1598151 - RNA, 19 nt, Human
agcagggcauggcugggaa

SEQ ID NO: 1598152 - RNA, 14 nt, Human
agcaggcuacuguc

SEQ ID NO: 1598153 - RNA, 16 nt, Human
agcaggcuacugucag

SEQ ID NO: 1598154 - RNA, 17 nt, Human
agcaggcuacugucagc

SEQ ID NO: 1598155 - RNA, 19 nt, Human
agcaggcuacugucagcuc

SEQ ID NO: 1598156 - RNA, 20 nt, Human
agcaggcuacugucagcucc

SEQ ID NO: 1598157 - RNA, 17 nt, Human
agcagucaggaaagaga

SEQ ID NO: 1598158 - RNA, 18 nt, Human
agcagucaggaaagagaa

SEQ ID NO: 1598159 - RNA, 19 nt, Human
agcagucaggaaagagaac

SEQ ID NO: 1598160 - RNA, 19 nt, Human
agcauaccaacacgagcag

SEQ ID NO: 1598161 - RNA, 22 nt, Human
agcauaccaacacgagcaggcu

SEQ ID NO: 1598162 - RNA, 13 nt, Human
agcauaccaacac

SEQ ID NO: 1598163 - RNA, 19 nt, Human
ugauaaguucauacauugu

SEQ ID NO: 1598164 - RNA, 17 nt, Human
ugauaaguucauacauu

SEQ ID NO: 1598165 - RNA, 15 nt, Human
ugauaaguucauaca

SEQ ID NO: 1598166 - RNA, 13 nt, Human
ugauaaguucaua

SEQ ID NO: 1598167 - RNA, 16 nt, Human
ugauaaguaaaugcua

SEQ ID NO: 1598168 - RNA, 22 nt, Human
ugaguucuacauaaguaauuca

SEQ ID NO: 1598169 - RNA, 20 nt, Human
ugaguucuacauaaguaauu

SEQ ID NO: 1598170 - RNA, 15 nt, Human
ugaguucuacauaag

SEQ ID NO: 1598171 - RNA, 16 nt, Human
agaguuuagcuggaaa

SEQ ID NO: 1598172 - RNA, 17 nt, Human
agaguuuagcuggaaaa

SEQ ID NO: 1598173 - RNA, 14 nt, Human
agagugaacaaauu

SEQ ID NO: 1598174 - RNA, 18 nt, Human
agaugcaguucugaagaa

SEQ ID NO: 1598175 - RNA, 19 nt, Human
agaugcaguucugaagaag

SEQ ID NO: 1598176 - RNA, 20 nt, Human
agaugcaguucugaagaaga

SEQ ID NO: 1598177 - RNA, 14 nt, Human
agaugcuagaacuc

SEQ ID NO: 1598178 - RNA, 15 nt, Human
agaugcuagaacucc

SEQ ID NO: 1598179 - RNA, 17 nt, Human
ugacccacaagaaauga

SEQ ID NO: 1598180 - RNA, 17 nt, Human
ugacauaaaaacaacuu

SEQ ID NO: 1598181 - RNA, 20 nt, Human
ugacauaaaaacaacuuuau

SEQ ID NO: 1598182 - RNA, 18 nt, Human
ugacauaaaaacaacuuu

SEQ ID NO: 1598183 - RNA, 15 nt, Human
agagguugcagugag

SEQ ID NO: 1598184 - RNA, 21 nt, Human
agagcuguucacagccagacu

SEQ ID NO: 1598185 - RNA, 22 nt, Human
agagcugcccucuccugggcag

SEQ ID NO: 1598186 - RNA, 19 nt, Human
ugaacaaauuuacagagac

SEQ ID NO: 1598187 - RNA, 20 nt, Human
ugaacaaauuuacagagaca

SEQ ID NO: 1598188 - RNA, 15 nt, Human
ugaaauuguauuaca

SEQ ID NO: 1598189 - RNA, 18 nt, Human
ugaaauauuauguuaaaa

SEQ ID NO: 1598190 - RNA, 14 nt, Human
agagcugcccucuc

SEQ ID NO: 1598191 - RNA, 13 nt, Human
agagcugcccucu

SEQ ID NO: 1598192 - RNA, 15 nt, Human
agagcugcccucucc

SEQ ID NO: 1598193 - RNA, 17 nt, Human
ugaaauaagccagacau

SEQ ID NO: 1598194 - RNA, 18 nt, Human
ugaaauaagccagacauc

SEQ ID NO: 1598195 - RNA, 20 nt, Human
ugaaauaagccagacaucaa

SEQ ID NO: 1598196 - RNA, 23 nt, Human
ugaaauaagccagacaucaacag

SEQ ID NO: 1598197 - RNA, 20 nt, Human
agagcaaaauugauguguuu

SEQ ID NO: 1598198 - RNA, 14 nt, Human
agagcaaaauugau

SEQ ID NO: 1598199 - RNA, 14 nt, Human
agacauagaauuaa

SEQ ID NO: 1598200 - RNA, 16 nt, Human
ucuuauuucauuucuu

SEQ ID NO: 1598201 - RNA, 15 nt, Human
ucuuauuucauuucu

SEQ ID NO: 1598202 - RNA, 24 nt, Human
agagacagaaagcagaacagugau

SEQ ID NO: 1598203 - RNA, 23 nt, Human
ucuuagaugcaguucugaagaag

SEQ ID NO: 1598204 - RNA, 14 nt, Human
ucuuaauuaaaaga

SEQ ID NO: 1598205 - RNA, 16 nt, Human
agacacacugaagaag

SEQ ID NO: 1598206 - RNA, 17 nt, Human
agacacacugaagaagc

SEQ ID NO: 1598207 - RNA, 20 nt, Human
agacacaacuauuuuuccaa

SEQ ID NO: 1598208 - RNA, 19 nt, Human
agacacaacuauuuuucca

SEQ ID NO: 1598209 - RNA, 12 nt, Human
ucucaggaaauc

SEQ ID NO: 1598210 - RNA, 16 nt, Human
acuuguguuuugcaag

SEQ ID NO: 1598211 - RNA, 23 nt, Human
acuucuaaguaaaaccacagcag

SEQ ID NO: 1598212 - RNA, 16 nt, Human
acuugucaauaaaauc

SEQ ID NO: 1598213 - RNA, 21 nt, Human
acuugaacccauauuuguaca

SEQ ID NO: 1598214 - RNA, 19 nt, Human
acuugaacccgggaggcag

SEQ ID NO: 1598215 - RNA, 20 nt, Human
acuugaacccgggaggcaga

SEQ ID NO: 1598216 - RNA, 21 nt, Human
acuugaacccgggaggcagag

SEQ ID NO: 1598217 - RNA, 12 nt, Human
ucucuggccuuc

SEQ ID NO: 1598218 - RNA, 21 nt, Human
ucucuggccuucggccuccau

SEQ ID NO: 1598219 - RNA, 22 nt, Human
ucucuggccuucggccuccauc

SEQ ID NO: 1598220 - RNA, 23 nt, Human
ucucuggccuucggccuccaucc

SEQ ID NO: 1598221 - RNA, 13 nt, Human
ucucuggccuucg

SEQ ID NO: 1598222 - RNA, 14 nt, Human
agaaaugaaagcag

SEQ ID NO: 1598223 - RNA, 12 nt, Human
ucugaagaagau

SEQ ID NO: 1598224 - RNA, 14 nt, Human
agaaagaaaaucag

SEQ ID NO: 1598225 - RNA, 17 nt, Human
agaaaucaaagagagaa

SEQ ID NO: 1598226 - RNA, 16 nt, Human
ucugacuaugacauaa

SEQ ID NO: 1598227 - RNA, 14 nt, Human
ucugacuaugacau

SEQ ID NO: 1598228 - RNA, 13 nt, Human
acugccuucucaa

SEQ ID NO: 1598229 - RNA, 19 nt, Human
acugccuucucaacuccaa

SEQ ID NO: 1598230 - RNA, 20 nt, Human
acugccuucucaacuccaaa

SEQ ID NO: 1598231 - RNA, 21 nt, Human
acuggcacaguuuucugagaa

SEQ ID NO: 1598232 - RNA, 19 nt, Human
acuggcacaguuuucugag

SEQ ID NO: 1598233 - RNA, 20 nt, Human
acuggcacaguuuucugaga

SEQ ID NO: 1598234 - RNA, 13 nt, Human
acuggcacaguuu

SEQ ID NO: 1598235 - RNA, 15 nt, Human
acugcauuauauuua

SEQ ID NO: 1598236 - RNA, 14 nt, Human
acugcauuauauuu

SEQ ID NO: 1598237 - RNA, 18 nt, Human
acuguggguagacacaca

SEQ ID NO: 1598238 - RNA, 21 nt, Human
acugucagcuccccucggaga

SEQ ID NO: 1598239 - RNA, 18 nt, Human
acugggacaggggagaac

SEQ ID NO: 1598240 - RNA, 22 nt, Human
acugucagcuccccucggagaa

SEQ ID NO: 1598241 - RNA, 22 nt, Human
ucggguuuuauuguuuaaaauc

SEQ ID NO: 1598242 - RNA, 22 nt, Human
ucuacauaaguaauucaagaaa

SEQ ID NO: 1598243 - RNA, 20 nt, Human
ucuaaagccauuguaguccu

SEQ ID NO: 1598244 - RNA, 21 nt, Human
ucuaaguaaaaccacagcagu

SEQ ID NO: 1598245 - RNA, 22 nt, Human
ucuaaguaaaaccacagcaguu

SEQ ID NO: 1598246 - RNA, 23 nt, Human
ucuaaguaaaaccacagcaguug

SEQ ID NO: 1598247 - RNA, 16 nt, Human
ucuacauacuauggaa

SEQ ID NO: 1598248 - RNA, 20 nt, Human
ucuacauaaguaauucaaga

SEQ ID NO: 1598249 - RNA, 17 nt, Human
ucuacauaaguaauuca

SEQ ID NO: 1598250 - RNA, 18 nt, Human
ucccagccagcaguucag

SEQ ID NO: 1598251 - RNA, 17 nt, Human
ucccagccagcaguuca

SEQ ID NO: 1598252 - RNA, 14 nt, Human
ucccagucauuuaa

SEQ ID NO: 1598253 - RNA, 22 nt, Human
ucccagucauuuaauaaaugug

SEQ ID NO: 1598254 - RNA, 13 nt, Human
uccaugaagaugu

SEQ ID NO: 1598255 - RNA, 21 nt, Human
uccaugaagauguagaggaga

SEQ ID NO: 1598256 - RNA, 20 nt, Human
uccauccugaggcuccacuu

SEQ ID NO: 1598257 - RNA, 21 nt, Human
uccauccugaggcuccacuug

SEQ ID NO: 1598258 - RNA, 16 nt, Human
uccccucggagaagag

SEQ ID NO: 1598259 - RNA, 17 nt, Human
uccccucggagaagagc

SEQ ID NO: 1598260 - RNA, 14 nt, Human
ucccucccuccacc

SEQ ID NO: 1598261 - RNA, 13 nt, Human
ucccucccuccac

SEQ ID NO: 1598262 - RNA, 23 nt, Human
ucccuccaccucccugcaauaaa

SEQ ID NO: 1598263 - RNA, 21 nt, Human
ucccuccaccucccugcaaua

SEQ ID NO: 1598264 - RNA, 17 nt, Human
ucccucccuccaccucc

SEQ ID NO: 1598265 - RNA, 16 nt, Human
ucccucccuccaccuc

SEQ ID NO: 1598266 - RNA, 15 nt, Human
ucccucccuccaccu

SEQ ID NO: 1598267 - RNA, 16 nt, Human
ucccugcaauaaaaug

SEQ ID NO: 1598268 - RNA, 11 nt, Human
ucccugagcag

SEQ ID NO: 1598269 - RNA, 14 nt, Human
acuccaaagaaaug

SEQ ID NO: 1598270 - RNA, 15 nt, Human
acuccaaagaaaugu

SEQ ID NO: 1598271 - RNA, 18 nt, Human
acuccaaagaaauguaag

SEQ ID NO: 1598272 - RNA, 21 nt, Human
acuccaaagaaauguaaggga

SEQ ID NO: 1598273 - RNA, 19 nt, Human
ucccuuucugcuuguguua

SEQ ID NO: 1598274 - RNA, 14 nt, Human
acgagaaaacaaua

SEQ ID NO: 1598275 - RNA, 19 nt, Human
acgagcaggcuacugucag

SEQ ID NO: 1598276 - RNA, 20 nt, Human
acgagcaggcuacugucagc

SEQ ID NO: 1598277 - RNA, 21 nt, Human
ucaugaauuaguuuuauaugc

SEQ ID NO: 1598278 - RNA, 16 nt, Human
ucaugaauuaguuuua

SEQ ID NO: 1598279 - RNA, 13 nt, Human
accucccugcaau

SEQ ID NO: 1598280 - RNA, 12 nt, Human
accucccugcaa

SEQ ID NO: 1598281 - RNA, 22 nt, Human
ucaggaaaucaaauaugcaaag

SEQ ID NO: 1598282 - RNA, 23 nt, Human
ucaggaaaucaaauaugcaaagc

SEQ ID NO: 1598283 - RNA, 21 nt, Human
accuagggugauauuaaccag

SEQ ID NO: 1598284 - RNA, 19 nt, Human
accucaaaaugucuaagau

SEQ ID NO: 1598285 - RNA, 21 nt, Human
uaugaaauauuauguuaaaac

SEQ ID NO: 1598286 - RNA, 21 nt, Human
uauuuccauuaaaaaaucagu

SEQ ID NO: 1598287 - RNA, 13 nt, Human
uauuucauuucuu

SEQ ID NO: 1598288 - RNA, 15 nt, Human
acaguuuucugagaa

SEQ ID NO: 1598289 - RNA, 16 nt, Human
acaguuuucugagaaa

SEQ ID NO: 1598290 - RNA, 17 nt, Human
acaguuuucugagaaag

SEQ ID NO: 1598291 - RNA, 18 nt, Human
acaguuuucugagaaaga

SEQ ID NO: 1598292 - RNA, 19 nt, Human
acaguuuucugagaaagac

SEQ ID NO: 1598293 - RNA, 20 nt, Human
acaguuuucugagaaagacu

SEQ ID NO: 1598294 - RNA, 21 nt, Human
acaguuuucugagaaagacua

SEQ ID NO: 1598295 - RNA, 21 nt, Human
acauaaaaacaacuuuauacc

SEQ ID NO: 1598296 - RNA, 19 nt, Human
acauaaaaacaacuuuaua

SEQ ID NO: 1598297 - RNA, 16 nt, Human
acauaaaaacaacuuu

SEQ ID NO: 1598298 - RNA, 13 nt, Human
acaucaacagaua

SEQ ID NO: 1598299 - RNA, 19 nt, Human
acauauauaacaaugcugu

SEQ ID NO: 1598300 - RNA, 14 nt, Human
acauagaauuaaca

SEQ ID NO: 1598301 - RNA, 18 nt, Human
acauagaauuaacacaug

SEQ ID NO: 1598302 - RNA, 17 nt, Human
acauaucuaguaugaaa

SEQ ID NO: 1598303 - RNA, 22 nt, Human
acauaucuaguaugaaauuaua

SEQ ID NO: 1598304 - RNA, 20 nt, Human
acauaucuaguaugaaauua

SEQ ID NO: 1598305 - RNA, 23 nt, Human
acauaucuaguaugaaauuauau

SEQ ID NO: 1598306 - RNA, 22 nt, Human
ucaagaugaugaugaucuuuaa

SEQ ID NO: 1598307 - RNA, 16 nt, Human
acaugaaguccaagca

SEQ ID NO: 1598308 - RNA, 19 nt, Human
acaugauccugcaauucca

SEQ ID NO: 1598309 - RNA, 14 nt, Human
ucaaagcugaaaug

SEQ ID NO: 1598310 - RNA, 17 nt, Human
ucaaagggugaaaauua

SEQ ID NO: 1598311 - RNA, 18 nt, Human
ucaaaagaaagaaaauca

SEQ ID NO: 1598312 - RNA, 23 nt, Human
uauuuuugacagaauauguuuca

SEQ ID NO: 1598313 - RNA, 19 nt, Human
uauuuuugacagaauaugu

SEQ ID NO: 1598314 - RNA, 15 nt, Human
uauuuuugacagaau

SEQ ID NO: 1598315 - RNA, 14 nt, Human
uauuuuugacagaa

SEQ ID NO: 1598316 - RNA, 13 nt, Human
uauuuuugacaga

SEQ ID NO: 1598317 - RNA, 21 nt, Human
ucaaaauaugccccauucaac

SEQ ID NO: 1598318 - RNA, 23 nt, Human
ucaaaauaccaugccauuuaaag

SEQ ID NO: 1598319 - RNA, 21 nt, Human
ucaaaauaccaugccauuuaa

SEQ ID NO: 1598320 - RNA, 14 nt, Human
ucaaaaugucuaag

SEQ ID NO: 1598321 - RNA, 12 nt, Human
ucagagcugccc

SEQ ID NO: 1598322 - RNA, 13 nt, Human
ucaggaaagagaa

SEQ ID NO: 1598323 - RNA, 19 nt, Human
ucaggaaagagaacuucca

SEQ ID NO: 1598324 - RNA, 20 nt, Human
ucaggaaaucaaauaugcaa

SEQ ID NO: 1598325 - RNA, 21 nt, Human
ucaggaaaucaaauaugcaaa

SEQ ID NO: 1598326 - RNA, 23 nt, Human
accauuucuugagguaaaagcau

SEQ ID NO: 1598327 - RNA, 18 nt, Human
accacuuguguuuugcaa

SEQ ID NO: 1598328 - RNA, 13 nt, Human
accacugcagaag

SEQ ID NO: 1598329 - RNA, 14 nt, Human
accagggacugagg

SEQ ID NO: 1598330 - RNA, 17 nt, Human
ucacuaccuucaugcau

SEQ ID NO: 1598331 - RNA, 15 nt, Human
ucaauucuugccaaa

SEQ ID NO: 1598332 - RNA, 20 nt, Human
ucaauuuuucuuauuucauu

SEQ ID NO: 1598333 - RNA, 23 nt, Human
ucaauuuuucuuauuucauuucu

SEQ ID NO: 1598334 - RNA, 13 nt, Human
accaaucaugaau

SEQ ID NO: 1598335 - RNA, 15 nt, Human
accaaucaugaauua

SEQ ID NO: 1598336 - RNA, 21 nt, Human
ucacaacagauuauuaccuua

SEQ ID NO: 1598337 - RNA, 22 nt, Human
ucacauaucuaguaugaaauua

SEQ ID NO: 1598338 - RNA, 21 nt, Human
ucacauaucuaguaugaaauu

SEQ ID NO: 1598339 - RNA, 17 nt, Human
ucacauaucuaguauga

SEQ ID NO: 1598340 - RNA, 18 nt, Human
acacuaagagagaaugag

SEQ ID NO: 1598341 - RNA, 19 nt, Human
acacuaagagagaaugaga

SEQ ID NO: 1598342 - RNA, 17 nt, Human
acacuaagagagaauga

SEQ ID NO: 1598343 - RNA, 13 nt, Human
acacacugaagaa

SEQ ID NO: 1598344 - RNA, 14 nt, Human
acaaugcuguauuu

SEQ ID NO: 1598345 - RNA, 17 nt, Human
acaaugcuguauuuuaa

SEQ ID NO: 1598346 - RNA, 18 nt, Human
acaaugcuguauuuuaaa

SEQ ID NO: 1598347 - RNA, 14 nt, Human
acacaacuauauug

SEQ ID NO: 1598348 - RNA, 17 nt, Human
acacaacuauauuguuu

SEQ ID NO: 1598349 - RNA, 18 nt, Human
acacaacuauuuuuccaa

SEQ ID NO: 1598350 - RNA, 12 nt, Human
uaguguuggaga

SEQ ID NO: 1598351 - RNA, 16 nt, Human
uaguguuggagaagaa

SEQ ID NO: 1598352 - RNA, 17 nt, Human
uaguguuggagaagaac

SEQ ID NO: 1598353 - RNA, 20 nt, Human
uaguaauagagcaaaauuga

SEQ ID NO: 1598354 - RNA, 14 nt, Human
acacacugaagaag

SEQ ID NO: 1598355 - RNA, 14 nt, Human
uaguaauagagcaa

SEQ ID NO: 1598356 - RNA, 15 nt, Human
uauauuuauuacugu

SEQ ID NO: 1598357 - RNA, 19 nt, Human
uauauuuauuacuguaaga

SEQ ID NO: 1598358 - RNA, 14 nt, Human
acagauaaucagug

SEQ ID NO: 1598359 - RNA, 20 nt, Human
acagcccuucuuuccacaga

SEQ ID NO: 1598360 - RNA, 21 nt, Human
acagcccuucuuuccacagaa

SEQ ID NO: 1598361 - RNA, 16 nt, Human
uaucuuguagcuuuau

SEQ ID NO: 1598362 - RNA, 13 nt, Human
acacuuaaaaaug

SEQ ID NO: 1598363 - RNA, 15 nt, Human
acacuuaaaaauggu

SEQ ID NO: 1598364 - RNA, 19 nt, Human
acagaaagcagaacaguga

SEQ ID NO: 1598365 - RNA, 12 nt, Human
uauauuuacaaa

SEQ ID NO: 1598366 - RNA, 15 nt, Human
uauauuuaaugauaa

SEQ ID NO: 1598367 - RNA, 12 nt, Human
acacugaagaag

SEQ ID NO: 1598368 - RNA, 14 nt, Human
acacugaagaagca

SEQ ID NO: 1598369 - RNA, 14 nt, Human
acacuccagugaga

SEQ ID NO: 1598370 - RNA, 16 nt, Human
uauaaguauucuaaau

SEQ ID NO: 1598371 - RNA, 21 nt, Human
aauuuuucuuauuucauuucu

SEQ ID NO: 1598372 - RNA, 22 nt, Human
aauuuuuucucuaggaaauauu

SEQ ID NO: 1598373 - RNA, 22 nt, Human
uagauaggucagugcaaauacu

SEQ ID NO: 1598374 - RNA, 17 nt, Human
uagauaggccaugggca

SEQ ID NO: 1598375 - RNA, 21 nt, Human
uagaugcaguucugaagaaga

SEQ ID NO: 1598376 - RNA, 20 nt, Human
uagaugcaguucugaagaag

SEQ ID NO: 1598377 - RNA, 17 nt, Human
acaaauuuacagagaca

SEQ ID NO: 1598378 - RNA, 22 nt, Human
acaagcucacagaccuuugaac

SEQ ID NO: 1598379 - RNA, 17 nt, Human
acaagaugguucuagca

SEQ ID NO: 1598380 - RNA, 16 nt, Human
uagcuacuaauuuuaa

SEQ ID NO: 1598381 - RNA, 18 nt, Human
acaaugaagauaaaaaga

SEQ ID NO: 1598382 - RNA, 17 nt, Human
uacugagagugaacaaa

SEQ ID NO: 1598383 - RNA, 19 nt, Human
uacugagagugaacaaauu

SEQ ID NO: 1598384 - RNA, 18 nt, Human
aauugaggacacugauau

SEQ ID NO: 1598385 - RNA, 18 nt, Human
uacuaaaaauacaaaaaa

SEQ ID NO: 1598386 - RNA, 14 nt, Human
uacuaaaaauacaa

SEQ ID NO: 1598387 - RNA, 13 nt, Human
aauugacccacaa

SEQ ID NO: 1598388 - RNA, 19 nt, Human
uacuucuuaggguuaugau

SEQ ID NO: 1598389 - RNA, 15 nt, Human
aauuggagcucgugg

SEQ ID NO: 1598390 - RNA, 17 nt, Human
aauuuacagagacagaa

SEQ ID NO: 1598391 - RNA, 18 nt, Human
aauuuacagagacagaaa

SEQ ID NO: 1598392 - RNA, 19 nt, Human
aauuucucccagucauuua

SEQ ID NO: 1598393 - RNA, 17 nt, Human
aauuuauacaggucaua

SEQ ID NO: 1598394 - RNA, 16 nt, Human
aauuuauacaggucau

SEQ ID NO: 1598395 - RNA, 21 nt, Human
aauaacaaugaaaguugauaa

SEQ ID NO: 1598396 - RNA, 15 nt, Human
aauaacgauaaaaga

SEQ ID NO: 1598397 - RNA, 13 nt, Human
aauaacugugaag

SEQ ID NO: 1598398 - RNA, 15 nt, Human
uaaauguugacaugg

SEQ ID NO: 1598399 - RNA, 17 nt, Human
uaaauuuugaguucuac

SEQ ID NO: 1598400 - RNA, 20 nt, Human
aauaauuuuuauauuugaaa

SEQ ID NO: 1598401 - RNA, 16 nt, Human
aauaacugugaaguuu

SEQ ID NO: 1598402 - RNA, 14 nt, Human
aauaacugugaagu

SEQ ID NO: 1598403 - RNA, 20 nt, Human
aauaacugugaaguuuacau

SEQ ID NO: 1598404 - RNA, 16 nt, Human
aauaauuuuuauauuu

SEQ ID NO: 1598405 - RNA, 17 nt, Human
aauaauuuuuauauuug

SEQ ID NO: 1598406 - RNA, 19 nt, Human
aauaauuuuuauauuugaa

SEQ ID NO: 1598407 - RNA, 21 nt, Human
aauaauuuuaagaaaucaaag

SEQ ID NO: 1598408 - RNA, 19 nt, Human
aauaucuuuuuuuuaauaa

SEQ ID NO: 1598409 - RNA, 15 nt, Human
aauaugcaaagcacu

SEQ ID NO: 1598410 - RNA, 17 nt, Human
aauaugcaaagcacuga

SEQ ID NO: 1598411 - RNA, 24 nt, Human
aauaugcaaagcacugacuucuaa

SEQ ID NO: 1598412 - RNA, 15 nt, Human
aauauuucagauaau

SEQ ID NO: 1598413 - RNA, 18 nt, Human
aauauuguguugugaaug

SEQ ID NO: 1598414 - RNA, 20 nt, Human
aauauugcuuuggucauaug

SEQ ID NO: 1598415 - RNA, 15 nt, Human
aauaucacuugucaa

SEQ ID NO: 1598416 - RNA, 12 nt, Human
aauaucacuugu

SEQ ID NO: 1598417 - RNA, 15 nt, Human
aauaguauuugagag

SEQ ID NO: 1598418 - RNA, 18 nt, Human
aauaggcguaacuaauuu

SEQ ID NO: 1598419 - RNA, 20 nt, Human
uaaauuuugucuuuaacuca

SEQ ID NO: 1598420 - RNA, 19 nt, Human
uaaauuuugaguucuacau

SEQ ID NO: 1598421 - RNA, 18 nt, Human
uaaauuuugaguucuaca

SEQ ID NO: 1598422 - RNA, 20 nt, Human
aauccucaguuuuugugaaa

SEQ ID NO: 1598423 - RNA, 22 nt, Human
aaucauuucugcaucagcugcu

SEQ ID NO: 1598424 - RNA, 13 nt, Human
aauccuugaagau

SEQ ID NO: 1598425 - RNA, 16 nt, Human
aaucuuauaauuuaaa

SEQ ID NO: 1598426 - RNA, 14 nt, Human
aaucuuauaauuua

SEQ ID NO: 1598427 - RNA, 15 nt, Human
aaucaucaagucuuu

SEQ ID NO: 1598428 - RNA, 19 nt, Human
aaucaugaauuaguuuuau

SEQ ID NO: 1598429 - RNA, 17 nt, Human
aaucaugaauuaguuuu

SEQ ID NO: 1598430 - RNA, 23 nt, Human
aaucaugaauuaguuuuauaugc

SEQ ID NO: 1598431 - RNA, 12 nt, Human
uaaguucauaca

SEQ ID NO: 1598432 - RNA, 18 nt, Human
uaaguuuuuuuuuaaaaa

SEQ ID NO: 1598433 - RNA, 14 nt, Human
uaaguucauacauu

SEQ ID NO: 1598434 - RNA, 13 nt, Human
uaaguucauacau

SEQ ID NO: 1598435 - RNA, 20 nt, Human
uaaguauguguaaaauguga

SEQ ID NO: 1598436 - RNA, 23 nt, Human
uaaucagugugucuaaauuugaa

SEQ ID NO: 1598437 - RNA, 21 nt, Human
aaugagagacacacugaagaa

SEQ ID NO: 1598438 - RNA, 16 nt, Human
uaaugauaacuggaaa

SEQ ID NO: 1598439 - RNA, 14 nt, Human
uaaugguguuuuaa

SEQ ID NO: 1598440 - RNA, 19 nt, Human
uacacuaagagagaaugag

SEQ ID NO: 1598441 - RNA, 14 nt, Human
uacacuccagugag

SEQ ID NO: 1598442 - RNA, 19 nt, Human
aauggacuuuuguacauag

SEQ ID NO: 1598443 - RNA, 11 nt, Human
aaugugauaug

SEQ ID NO: 1598444 - RNA, 18 nt, Human
uacauauuuuuguagcac

SEQ ID NO: 1598445 - RNA, 17 nt, Human
uacauauuuuuguagca

SEQ ID NO: 1598446 - RNA, 13 nt, Human
uacaaaaacacag

SEQ ID NO: 1598447 - RNA, 14 nt, Human
uacaaaaacacagc

SEQ ID NO: 1598448 - RNA, 15 nt, Human
uacaaaaacacagca

SEQ ID NO: 1598449 - RNA, 16 nt, Human
uacaaaaacacagcaa

SEQ ID NO: 1598450 - RNA, 17 nt, Human
uaauuuauacaggucau

SEQ ID NO: 1598451 - RNA, 13 nt, Human
uaauucaagaaaa

SEQ ID NO: 1598452 - RNA, 12 nt, Human
aaugcuguguua

SEQ ID NO: 1598453 - RNA, 16 nt, Human
aagaaugauuaugaau

SEQ ID NO: 1598454 - RNA, 18 nt, Human
aagaaugauuaugaauua

SEQ ID NO: 1598455 - RNA, 18 nt, Human
gugcuaguaauuggaaag

SEQ ID NO: 1598456 - RNA, 16 nt, Human
aagaagugaaaaucua

SEQ ID NO: 1598457 - RNA, 22 nt, Human
aagaagugaaaaucuacacucc

SEQ ID NO: 1598458 - RNA, 13 nt, Human
aagaaagaaaauc

SEQ ID NO: 1598459 - RNA, 21 nt, Human
gugggacagucaccucaugga

SEQ ID NO: 1598460 - RNA, 14 nt, Human
guggguagacacac

SEQ ID NO: 1598461 - RNA, 13 nt, Human
aagacuauucaaa

SEQ ID NO: 1598462 - RNA, 18 nt, Human
guguuuccauauuuuaua

SEQ ID NO: 1598463 - RNA, 23 nt, Human
guuuucugagaaagacuauucaa

SEQ ID NO: 1598464 - RNA, 21 nt, Human
guuucaaacauauauaacaau

SEQ ID NO: 1598465 - RNA, 13 nt, Human
aagguacuucaaa

SEQ ID NO: 1598466 - RNA, 10 nt, Human
guuuaaaauc

SEQ ID NO: 1598467 - RNA, 16 nt, Human
guuuaaaaucauuucu

SEQ ID NO: 1598468 - RNA, 18 nt, Human
guuguaccgcaaugugac

SEQ ID NO: 1598469 - RNA, 14 nt, Human
guugacaugggaca

SEQ ID NO: 1598470 - RNA, 18 nt, Human
guugacaugggacauuug

SEQ ID NO: 1598471 - RNA, 18 nt, Human
guucuagcauggcauauu

SEQ ID NO: 1598472 - RNA, 14 nt, Human
guuaaguaugugua

SEQ ID NO: 1598473 - RNA, 23 nt, Human
guucauacauauuuuuguagcac

SEQ ID NO: 1598474 - RNA, 14 nt, Human
guucauacauauuu

SEQ ID NO: 1598475 - RNA, 13 nt, Human
guucauacauauu

SEQ ID NO: 1598476 - RNA, 10 nt, Human
guucauacau

SEQ ID NO: 1598477 - RNA, 9 nt, Human
guucauaca

SEQ ID NO: 1598478 - RNA, 14 nt, Human
guucauacauugua

SEQ ID NO: 1598479 - RNA, 11 nt, Human
guucauacauu

SEQ ID NO: 1598480 - RNA, 22 nt, Human
aacaguagugauaguuguaccg

SEQ ID NO: 1598481 - RNA, 18 nt, Human
aacauuugguaaggggaa

SEQ ID NO: 1598482 - RNA, 21 nt, Human
guccaagcauuuagauguaua

SEQ ID NO: 1598483 - RNA, 24 nt, Human
guccaagcauaccaacacgagcag

SEQ ID NO: 1598484 - RNA, 15 nt, Human
aacaaggaugaauua

SEQ ID NO: 1598485 - RNA, 21 nt, Human
aacaagccuccuuuuaaagua

SEQ ID NO: 1598486 - RNA, 18 nt, Human
aacaaugaagauaaaaag

SEQ ID NO: 1598487 - RNA, 14 nt, Human
aacaaugaagauaa

SEQ ID NO: 1598488 - RNA, 14 nt, Human
aacuccagaaagug

SEQ ID NO: 1598489 - RNA, 21 nt, Human
aacuccagaaagugacaagcu

SEQ ID NO: 1598490 - RNA, 18 nt, Human
aacucguuaauuuguagu

SEQ ID NO: 1598491 - RNA, 13 nt, Human
aacucccuuucaa

SEQ ID NO: 1598492 - RNA, 14 nt, Human
aacucccuuucaac

SEQ ID NO: 1598493 - RNA, 19 nt, Human
gucuuauauauuguagaua

SEQ ID NO: 1598494 - RNA, 22 nt, Human
gucuuaauuaaaagaauauuuu

SEQ ID NO: 1598495 - RNA, 19 nt, Human
gucuuaauuaaaagaauau

SEQ ID NO: 1598496 - RNA, 21 nt, Human
gucuuaauuaaaagaauauuu

SEQ ID NO: 1598497 - RNA, 12 nt, Human
aaccacagcagu

SEQ ID NO: 1598498 - RNA, 20 nt, Human
aacccauauuuguacaccaa

SEQ ID NO: 1598499 - RNA, 13 nt, Human
aacccaaauguuc

SEQ ID NO: 1598500 - RNA, 18 nt, Human
aacccaaauguucaucaa

SEQ ID NO: 1598501 - RNA, 20 nt, Human
aaccuagggugauauuaacc

SEQ ID NO: 1598502 - RNA, 17 nt, Human
aaccucaaaaugucuaa

SEQ ID NO: 1598503 - RNA, 14 nt, Human
aaauccuugaagau

SEQ ID NO: 1598504 - RNA, 19 nt, Human
aaaucuacacuccagugag

SEQ ID NO: 1598505 - RNA, 21 nt, Human
aaaugaaagcagggacuugaa

SEQ ID NO: 1598506 - RNA, 22 nt, Human
aaaugaaagcagggacuugaac

SEQ ID NO: 1598507 - RNA, 19 nt, Human
aaauggcuuccuggcaaua

SEQ ID NO: 1598508 - RNA, 14 nt, Human
aaaugcauuucuaa

SEQ ID NO: 1598509 - RNA, 14 nt, Human
guaugauucccagc

SEQ ID NO: 1598510 - RNA, 22 nt, Human
aaauguaagggaaacugccagc

SEQ ID NO: 1598511 - RNA, 16 nt, Human
gucaaauugugugaaa

SEQ ID NO: 1598512 - RNA, 18 nt, Human
aaauuucagcagcugcag

SEQ ID NO: 1598513 - RNA, 17 nt, Human
aaauuucagcagcugca

SEQ ID NO: 1598514 - RNA, 20 nt, Human
guauuuuugacagaauaugu

SEQ ID NO: 1598515 - RNA, 18 nt, Human
aaauuauauaaguauucu

SEQ ID NO: 1598516 - RNA, 16 nt, Human
aaauuauauaaguauu

SEQ ID NO: 1598517 - RNA, 19 nt, Human
aaauuauuuuguucauaca

SEQ ID NO: 1598518 - RNA, 17 nt, Human
aaauuauuuuguucaua

SEQ ID NO: 1598519 - RNA, 22 nt, Human
aaauuauauaaguauucuaaau

SEQ ID NO: 1598520 - RNA, 21 nt, Human
aaauuauuuuguucauacaua

SEQ ID NO: 1598521 - RNA, 20 nt, Human
aaauuauuuuguucauacau

SEQ ID NO: 1598522 - RNA, 22 nt, Human
aaauuauuuuguucauacauau

SEQ ID NO: 1598523 - RNA, 10 nt, Human
aaaaucauuu

SEQ ID NO: 1598524 - RNA, 11 nt, Human
aaaaucauuuc

SEQ ID NO: 1598525 - RNA, 12 nt, Human
aaaaucauuucu

SEQ ID NO: 1598526 - RNA, 17 nt, Human
aaaagaaagaaaaucag

SEQ ID NO: 1598527 - RNA, 12 nt, Human
aaaagaauauuu

SEQ ID NO: 1598528 - RNA, 20 nt, Human
aaaagacaaggaaaaaauaa

SEQ ID NO: 1598529 - RNA, 13 nt, Human
aaaagaauauuuu

SEQ ID NO: 1598530 - RNA, 11 nt, Human
aaaagaaugau

SEQ ID NO: 1598531 - RNA, 13 nt, Human
aaaagacuccaaa

SEQ ID NO: 1598532 - RNA, 15 nt, Human
aaacugcacugucaa

SEQ ID NO: 1598533 - RNA, 21 nt, Human
aaaaucauuucugcaucagcu

SEQ ID NO: 1598534 - RNA, 15 nt, Human
aaagcauuguaaaug

SEQ ID NO: 1598535 - RNA, 17 nt, Human
aaagcauuguaaaugug

SEQ ID NO: 1598536 - RNA, 19 nt, Human
aaagcauuguaaaugugcu

SEQ ID NO: 1598537 - RNA, 18 nt, Human
aaagccugcaauuucaua

SEQ ID NO: 1598538 - RNA, 13 nt, Human
aaagccugcaauu

SEQ ID NO: 1598539 - RNA, 22 nt, Human
aaauguugacaugggacauuug

SEQ ID NO: 1598540 - RNA, 17 nt, Human
aaauguucaucaaugaa

SEQ ID NO: 1598541 - RNA, 13 nt, Human
aaauguucaucaa

SEQ ID NO: 1598542 - RNA, 23 nt, Human
aaauguugacaugggacauuugc

SEQ ID NO: 1598543 - RNA, 21 nt, Human
aaauauuuauuuuaauaaugu

SEQ ID NO: 1598544 - RNA, 18 nt, Human
aaaucucaauauuucaga

SEQ ID NO: 1598545 - RNA, 23 nt, Human
aaaucucaaauuuggauugcuaa

SEQ ID NO: 1598546 - RNA, 19 nt, Human
aagaguauuuuugacagaa

SEQ ID NO: 1598547 - RNA, 16 nt, Human
aagaguaguaauagag

SEQ ID NO: 1598548 - RNA, 20 nt, Human
aacgcaggcccccaggugcc

SEQ ID NO: 1598549 - RNA, 11 nt, Human
aagaacugaaa

SEQ ID NO: 1598550 - RNA, 12 nt, Human
aagaacugaaau

SEQ ID NO: 1598551 - RNA, 13 nt, Human
aagaacugaaauc

SEQ ID NO: 1598552 - RNA, 15 nt, Human
aagaacugaaaucau

SEQ ID NO: 1598553 - RNA, 21 nt, Human
aagacaaggaaaaaauaacaa

SEQ ID NO: 1598554 - RNA, 20 nt, Human
aagaagacugcauuauauuu

SEQ ID NO: 1598555 - RNA, 15 nt, Human
aagaagacugcauua

SEQ ID NO: 1598556 - RNA, 14 nt, Human
aagagagaaaauaa

SEQ ID NO: 1598557 - RNA, 20 nt, Human
aaugaauacuuuauaaagga

SEQ ID NO: 1598558 - RNA, 16 nt, Human
aaucucaauauuucag

SEQ ID NO: 1598559 - RNA, 16 nt, Human
aaucucauaauuuaua

SEQ ID NO: 1598560 - RNA, 19 nt, Human
acagugauuaccagggacu

SEQ ID NO: 1598561 - RNA, 20 nt, Human
acagugauuaccagggacug

SEQ ID NO: 1598562 - RNA, 24 nt, Human
acaggaugguucccuugaugaaga

SEQ ID NO: 1598563 - RNA, 22 nt, Human
acaggaugguucccuugaugaa

SEQ ID NO: 1598564 - RNA, 15 nt, Human
acauuugcucaugga

SEQ ID NO: 1598565 - RNA, 16 nt, Human
acauuugcucauggaa

SEQ ID NO: 1598566 - RNA, 16 nt, Human
acauuuguauaaaaua

SEQ ID NO: 1598567 - RNA, 19 nt, Human
acauuuguauaaaauaauu

SEQ ID NO: 1598568 - RNA, 21 nt, Human
acauuuguauaaaauaauuuu

SEQ ID NO: 1598569 - RNA, 20 nt, Human
acaucccuuaccugggaaag

SEQ ID NO: 1598570 - RNA, 21 nt, Human
acauaaguaauucaagaaaac

SEQ ID NO: 1598571 - RNA, 20 nt, Human
acauaaguaauucaagaaaa

SEQ ID NO: 1598572 - RNA, 15 nt, Human
acaccaauauucaua

SEQ ID NO: 1598573 - RNA, 11 nt, Human
aauuguaauag

SEQ ID NO: 1598574 - RNA, 18 nt, Human
aauuucauaugcuguaua

SEQ ID NO: 1598575 - RNA, 16 nt, Human
aauuucauaugcugua

SEQ ID NO: 1598576 - RNA, 17 nt, Human
aauuauauaaguauucu

SEQ ID NO: 1598577 - RNA, 16 nt, Human
aauuauauaaguauuc

SEQ ID NO: 1598578 - RNA, 15 nt, Human
aauuauauaaguauu

SEQ ID NO: 1598579 - RNA, 21 nt, Human
acccugucucuacuaaaaaua

SEQ ID NO: 1598580 - RNA, 19 nt, Human
acgcaggcccccaggugcc

SEQ ID NO: 1598581 - RNA, 17 nt, Human
acuucagcgguuuauau

SEQ ID NO: 1598582 - RNA, 21 nt, Human
acuucagacauagaauuaaca

SEQ ID NO: 1598583 - RNA, 13 nt, Human
acuuggucuguga

SEQ ID NO: 1598584 - RNA, 17 nt, Human
acuucaaauccuugaag

SEQ ID NO: 1598585 - RNA, 18 nt, Human
acuucaaauccuugaaga

SEQ ID NO: 1598586 - RNA, 19 nt, Human
acuucaaauccuugaagau

SEQ ID NO: 1598587 - RNA, 22 nt, Human
acuuaaaaaugguuuaaauggu

SEQ ID NO: 1598588 - RNA, 17 nt, Human
acuguaaaauaauaacu

SEQ ID NO: 1598589 - RNA, 12 nt, Human
acuggaacucuc

SEQ ID NO: 1598590 - RNA, 14 nt, Human
acucguuaauuugu

SEQ ID NO: 1598591 - RNA, 19 nt, Human
acucguuaauuuguagugu

SEQ ID NO: 1598592 - RNA, 14 nt, Human
acucccuuucaaca

SEQ ID NO: 1598593 - RNA, 19 nt, Human
acugauaugggucuugaua

SEQ ID NO: 1598594 - RNA, 16 nt, Human
acugacagauuuccau

SEQ ID NO: 1598595 - RNA, 17 nt, Human
agcuguaugauucccag

SEQ ID NO: 1598596 - RNA, 18 nt, Human
agcuguaugauucccagc

SEQ ID NO: 1598597 - RNA, 18 nt, Human
aggaaaaaauaacaauga

SEQ ID NO: 1598598 - RNA, 14 nt, Human
agcugcugaaacaa

SEQ ID NO: 1598599 - RNA, 15 nt, Human
agcugcugaaacaac

SEQ ID NO: 1598600 - RNA, 16 nt, Human
agcugcugaaacaaca

SEQ ID NO: 1598601 - RNA, 20 nt, Human
agcugcugaaacaacaaaua

SEQ ID NO: 1598602 - RNA, 13 nt, Human
agcgacagugaga

SEQ ID NO: 1598603 - RNA, 15 nt, Human
agcgacagugagacu

SEQ ID NO: 1598604 - RNA, 17 nt, Human
agcgacagugagacucu

SEQ ID NO: 1598605 - RNA, 13 nt, Human
agcuacaaaugca

SEQ ID NO: 1598606 - RNA, 13 nt, Human
aggaaguagagga

SEQ ID NO: 1598607 - RNA, 20 nt, Human
aggcagagguugcagugagc

SEQ ID NO: 1598608 - RNA, 17 nt, Human
agggacaggauaagagg

SEQ ID NO: 1598609 - RNA, 19 nt, Human
agcacugacuucuaaguaa

SEQ ID NO: 1598610 - RNA, 17 nt, Human
agcacugacuucuaagu

SEQ ID NO: 1598611 - RNA, 15 nt, Human
agccagcaguucaga

SEQ ID NO: 1598612 - RNA, 14 nt, Human
agccagcaguucag

SEQ ID NO: 1598613 - RNA, 20 nt, Human
agauagauaggucagugcaa

SEQ ID NO: 1598614 - RNA, 23 nt, Human
agcaaaauuuuuucucuaggaaa

SEQ ID NO: 1598615 - RNA, 23 nt, Human
agcaaaauugauguguuuauuua

SEQ ID NO: 1598616 - RNA, 19 nt, Human
agcaaaauugauguguuua

SEQ ID NO: 1598617 - RNA, 13 nt, Human
agcaaaauugaug

SEQ ID NO: 1598618 - RNA, 17 nt, Human
agacccaaaaggcagaa

SEQ ID NO: 1598619 - RNA, 19 nt, Human
agacaaggaaaaaauaaca

SEQ ID NO: 1598620 - RNA, 21 nt, Human
agaagacugcauuauauuuau

SEQ ID NO: 1598621 - RNA, 20 nt, Human
agaagagcuguucacagcca

SEQ ID NO: 1598622 - RNA, 21 nt, Human
agaagagcuguucacagccag

SEQ ID NO: 1598623 - RNA, 13 nt, Human
agaagagcuguuc

SEQ ID NO: 1598624 - RNA, 22 nt, Human
agaacagugauuaccagggacu

SEQ ID NO: 1598625 - RNA, 19 nt, Human
agaacagauaaucagugug

SEQ ID NO: 1598626 - RNA, 17 nt, Human
auaaguaauucaagaaa

SEQ ID NO: 1598627 - RNA, 15 nt, Human
auaaguaaaugcuag

SEQ ID NO: 1598628 - RNA, 14 nt, Human
aguugaaaagacuc

SEQ ID NO: 1598629 - RNA, 20 nt, Human
aguuguucaauaauaaauau

SEQ ID NO: 1598630 - RNA, 15 nt, Human
auaaaagacagugaa

SEQ ID NO: 1598631 - RNA, 16 nt, Human
auaaaagacagugaaa

SEQ ID NO: 1598632 - RNA, 23 nt, Human
auaaaaauauuguguugugaaug

SEQ ID NO: 1598633 - RNA, 14 nt, Human
auaaaaacaacuuu

SEQ ID NO: 1598634 - RNA, 20 nt, Human
auaaaaagacauucuuccaa

SEQ ID NO: 1598635 - RNA, 13 nt, Human
agucauuuaauaa

SEQ ID NO: 1598636 - RNA, 15 nt, Human
agugauuaccaggga

SEQ ID NO: 1598637 - RNA, 13 nt, Human
agugauuaccagg

SEQ ID NO: 1598638 - RNA, 19 nt, Human
agugaugucacuagggcag

SEQ ID NO: 1598639 - RNA, 13 nt, Human
agugaaugaaaca

SEQ ID NO: 1598640 - RNA, 13 nt, Human
augaaguacucau

SEQ ID NO: 1598641 - RNA, 20 nt, Human
augggacauuugcucaugga

SEQ ID NO: 1598642 - RNA, 15 nt, Human
augggacagggagga

SEQ ID NO: 1598643 - RNA, 14 nt, Human
augggaaagcauug

SEQ ID NO: 1598644 - RNA, 20 nt, Human
augggaaagcauuguaaaug

SEQ ID NO: 1598645 - RNA, 23 nt, Human
auggcuuccuggcaauagucaaa

SEQ ID NO: 1598646 - RNA, 12 nt, Human
auccuugaagau

SEQ ID NO: 1598647 - RNA, 21 nt, Human
aucaugaauuaguuuuauaug

SEQ ID NO: 1598648 - RNA, 14 nt, Human
aucaaaagaaagaa

SEQ ID NO: 1598649 - RNA, 20 nt, Human
aucaaagggugaaaauuauu

SEQ ID NO: 1598650 - RNA, 18 nt, Human
aucaaagagagaaaauaa

SEQ ID NO: 1598651 - RNA, 15 nt, Human
caagaaaugaaagca

SEQ ID NO: 1598652 - RNA, 13 nt, Human
caagaaaugaaag

SEQ ID NO: 1598653 - RNA, 16 nt, Human
caagcauuuagaugua

SEQ ID NO: 1598654 - RNA, 19 nt, Human
caagcauuuagauguauag

SEQ ID NO: 1598655 - RNA, 21 nt, Human
caagcauaccaacacgagcag

SEQ ID NO: 1598656 - RNA, 16 nt, Human
caagcauaccaacacg

SEQ ID NO: 1598657 - RNA, 17 nt, Human
caaauuuacagagacag

SEQ ID NO: 1598658 - RNA, 23 nt, Human
caaauuuacagagacagaaagca

SEQ ID NO: 1598659 - RNA, 18 nt, Human
auuuuaauaauguuucaa

SEQ ID NO: 1598660 - RNA, 19 nt, Human
auuuuaauaauguuucaaa

SEQ ID NO: 1598661 - RNA, 14 nt, Human
caaagaaauguaag

SEQ ID NO: 1598662 - RNA, 13 nt, Human
cacaagaaaugaa

SEQ ID NO: 1598663 - RNA, 15 nt, Human
cacaagaaaugaaag

SEQ ID NO: 1598664 - RNA, 23 nt, Human
cacaagaaaugaaagcagggacu

SEQ ID NO: 1598665 - RNA, 23 nt, Human
cacaagacccaaaaggcagaagc

SEQ ID NO: 1598666 - RNA, 16 nt, Human
cacaugaaguccaagc

SEQ ID NO: 1598667 - RNA, 17 nt, Human
cacaugaaguccaagca

SEQ ID NO: 1598668 - RNA, 20 nt, Human
cacaugaaguccaagcauuu

SEQ ID NO: 1598669 - RNA, 21 nt, Human
cacaguuuucugagaaagacu

SEQ ID NO: 1598670 - RNA, 22 nt, Human
cacaguuuucugagaaagacua

SEQ ID NO: 1598671 - RNA, 21 nt, Human
uuugcauagauucccugagca

SEQ ID NO: 1598672 - RNA, 23 nt, Human
uuuggaacaagaugguucuagca

SEQ ID NO: 1598673 - RNA, 21 nt, Human
uuuguauaaaauaauuuuuau

SEQ ID NO: 1598674 - RNA, 13 nt, Human
uuuguucauacau

SEQ ID NO: 1598675 - RNA, 16 nt, Human
uuuguucauacauauu

SEQ ID NO: 1598676 - RNA, 15 nt, Human
uuuuauaugcuucug

SEQ ID NO: 1598677 - RNA, 20 nt, Human
uuuuauaugcuucuguuuua

SEQ ID NO: 1598678 - RNA, 20 nt, Human
uuuuauaucaauuuaaaaaa

SEQ ID NO: 1598679 - RNA, 10 nt, Human
uuuuauauuu

SEQ ID NO: 1598680 - RNA, 13 nt, Human
uuuucacauaucu

SEQ ID NO: 1598681 - RNA, 16 nt, Human
uuuucacauaucuagu

SEQ ID NO: 1598682 - RNA, 15 nt, Human
uuuucagaaaauauu

SEQ ID NO: 1598683 - RNA, 13 nt, Human
uuuuccugaaaac

SEQ ID NO: 1598684 - RNA, 16 nt, Human
uuuucagaaaauauua

SEQ ID NO: 1598685 - RNA, 22 nt, Human
uuucugagaaagacuauucaaa

SEQ ID NO: 1598686 - RNA, 22 nt, Human
uuuccucaaaacuucagacaua

SEQ ID NO: 1598687 - RNA, 15 nt, Human
uuucagauaaucaca

SEQ ID NO: 1598688 - RNA, 15 nt, Human
uuucagcagcugcag

SEQ ID NO: 1598689 - RNA, 21 nt, Human
uuucagauaaucacaauacau

SEQ ID NO: 1598690 - RNA, 14 nt, Human
uuuccaaaauaauu

SEQ ID NO: 1598691 - RNA, 22 nt, Human
uuuauuguuuaaaaucauuucu

SEQ ID NO: 1598692 - RNA, 20 nt, Human
uuuagaaacacaacuauauu

SEQ ID NO: 1598693 - RNA, 12 nt, Human
uuuagaaacaca

SEQ ID NO: 1598694 - RNA, 15 nt, Human
uuuacauuguaaaua

SEQ ID NO: 1598695 - RNA, 20 nt, Human
uuuacauuguaaauaguauu

SEQ ID NO: 1598696 - RNA, 13 nt, Human
uuuacauuguaaa

SEQ ID NO: 1598697 - RNA, 23 nt, Human
uucucuccucuccccaugauguu

SEQ ID NO: 1598698 - RNA, 12 nt, Human
uuccuagugaaa

SEQ ID NO: 1598699 - RNA, 22 nt, Human
uucggccuccauccugaggcuc

SEQ ID NO: 1598700 - RNA, 18 nt, Human
uucggccuccauccugag

SEQ ID NO: 1598701 - RNA, 19 nt, Human
uucggccuccauccugagg

SEQ ID NO: 1598702 - RNA, 20 nt, Human
uuccuucugugaaaguacau

SEQ ID NO: 1598703 - RNA, 17 nt, Human
uuccuucugugaaagua

SEQ ID NO: 1598704 - RNA, 23 nt, Human
uucagagcugcccucuccugggc

SEQ ID NO: 1598705 - RNA, 22 nt, Human
uucagagcugcccucuccuggg

SEQ ID NO: 1598706 - RNA, 21 nt, Human
uucagagcugcccucuccugg

SEQ ID NO: 1598707 - RNA, 17 nt, Human
uucaucugacuaugaca

SEQ ID NO: 1598708 - RNA, 20 nt, Human
uucaucugacuaugacauaa

SEQ ID NO: 1598709 - RNA, 19 nt, Human
uuccacuuauaggaauuga

SEQ ID NO: 1598710 - RNA, 21 nt, Human
uuccauccuagucacuaccuu

SEQ ID NO: 1598711 - RNA, 12 nt, Human
uugggaggcuga

SEQ ID NO: 1598712 - RNA, 16 nt, Human
uuguaaaggaauuuaa

SEQ ID NO: 1598713 - RNA, 11 nt, Human
uuguaaaugug

SEQ ID NO: 1598714 - RNA, 14 nt, Human
uuguaaaugugcuu

SEQ ID NO: 1598715 - RNA, 18 nt, Human
uuguaaaugugcuuuuaa

SEQ ID NO: 1598716 - RNA, 19 nt, Human
uuguaucacaaaucuuaac

SEQ ID NO: 1598717 - RNA, 14 nt, Human
uugaggacacugau

SEQ ID NO: 1598718 - RNA, 15 nt, Human
uugaggacacugaua

SEQ ID NO: 1598719 - RNA, 12 nt, Human
uugaugaagaag

SEQ ID NO: 1598720 - RNA, 13 nt, Human
uugaugaagaagu

SEQ ID NO: 1598721 - RNA, 18 nt, Human
uugcauagauucccugag

SEQ ID NO: 1598722 - RNA, 14 nt, Human
uucugagcauuuaa

SEQ ID NO: 1598723 - RNA, 15 nt, Human
uucugagaaagacua

SEQ ID NO: 1598724 - RNA, 15 nt, Human
uucuuauuucauuuc

SEQ ID NO: 1598725 - RNA, 23 nt, Human
uugaaacugagaugugaacacau

SEQ ID NO: 1598726 - RNA, 18 nt, Human
uugaaaagacuccaaaga

SEQ ID NO: 1598727 - RNA, 22 nt, Human
uugaaaagacuccaaagaaaug

SEQ ID NO: 1598728 - RNA, 23 nt, Human
uugaaaagacuccaaagaaaugu

SEQ ID NO: 1598729 - RNA, 15 nt, Human
uugaaucucauaauu

SEQ ID NO: 1598730 - RNA, 21 nt, Human
uugaaucucauaauuuauaca

SEQ ID NO: 1598731 - RNA, 22 nt, Human
ugugaccacugcagaagacagu

SEQ ID NO: 1598732 - RNA, 21 nt, Human
ugucucaguccaugaagaugu

SEQ ID NO: 1598733 - RNA, 22 nt, Human
ugucucaguccaugaagaugua

SEQ ID NO: 1598734 - RNA, 14 nt, Human
ugugaaguuuacau

SEQ ID NO: 1598735 - RNA, 20 nt, Human
ugugaaguuuacauuguaaa

SEQ ID NO: 1598736 - RNA, 17 nt, Human
uguagauaauacaguuc

SEQ ID NO: 1598737 - RNA, 15 nt, Human
uguaccgcaauguga

SEQ ID NO: 1598738 - RNA, 15 nt, Human
uguaaucacagcuac

SEQ ID NO: 1598739 - RNA, 20 nt, Human
uguaaaaugugaagugaaug

SEQ ID NO: 1598740 - RNA, 16 nt, Human
uguagcacugacagau

SEQ ID NO: 1598741 - RNA, 22 nt, Human
uguagcacugacagauuuccau

SEQ ID NO: 1598742 - RNA, 17 nt, Human
uguagcacugacagauu

SEQ ID NO: 1598743 - RNA, 12 nt, Human
uguuauaaucuu

SEQ ID NO: 1598744 - RNA, 16 nt, Human
uguucacagccagacu

SEQ ID NO: 1598745 - RNA, 21 nt, Human
uguuggagaagaacugaaauc

SEQ ID NO: 1598746 - RNA, 14 nt, Human
uguuuaaaaucauu

SEQ ID NO: 1598747 - RNA, 13 nt, Human
uguuuaaaaucau

SEQ ID NO: 1598748 - RNA, 14 nt, Human
uuacauuuguauaa

SEQ ID NO: 1598749 - RNA, 15 nt, Human
uuacauuuguauaaa

SEQ ID NO: 1598750 - RNA, 21 nt, Human
uuaccacuuguguuuugcaag

SEQ ID NO: 1598751 - RNA, 18 nt, Human
uuaauaauguuucaaaca

SEQ ID NO: 1598752 - RNA, 19 nt, Human
uuaaaagaaugauuaugaa

SEQ ID NO: 1598753 - RNA, 20 nt, Human
uuaaagcuuauuaaaacuca

SEQ ID NO: 1598754 - RNA, 12 nt, Human
uguuuuaaaaaa

SEQ ID NO: 1598755 - RNA, 19 nt, Human
ugggacauuugcucaugga

SEQ ID NO: 1598756 - RNA, 20 nt, Human
ugggacauuugcucauggaa

SEQ ID NO: 1598757 - RNA, 18 nt, Human
ugggacagucaccucaug

SEQ ID NO: 1598758 - RNA, 20 nt, Human
ugggacagucaccucaugga

SEQ ID NO: 1598759 - RNA, 21 nt, Human
ugggacagucaccucauggaa

SEQ ID NO: 1598760 - RNA, 20 nt, Human
uggccuucggccuccauccu

SEQ ID NO: 1598761 - RNA, 17 nt, Human
uggccuucggccuccau

SEQ ID NO: 1598762 - RNA, 18 nt, Human
uggccuucggccuccauc

SEQ ID NO: 1598763 - RNA, 17 nt, Human
uggguagacacacauga

SEQ ID NO: 1598764 - RNA, 16 nt, Human
uggguagacacacaug

SEQ ID NO: 1598765 - RNA, 14 nt, Human
uggaacucucgagc

SEQ ID NO: 1598766 - RNA, 14 nt, Human
ugcuucuguuuuau

SEQ ID NO: 1598767 - RNA, 15 nt, Human
uggagcaaagcugau

SEQ ID NO: 1598768 - RNA, 15 nt, Human
ugcacaucaaaauau

SEQ ID NO: 1598769 - RNA, 16 nt, Human
ugcagauaaacaguag

SEQ ID NO: 1598770 - RNA, 17 nt, Human
ugcagauaaacaguagu

SEQ ID NO: 1598771 - RNA, 15 nt, Human
ugcauuauauuuauu

SEQ ID NO: 1598772 - RNA, 20 nt, Human
ugcauuauauuuauuacugu

SEQ ID NO: 1598773 - RNA, 21 nt, Human
ugcauuauauuuauuacugua

SEQ ID NO: 1598774 - RNA, 22 nt, Human
ugcaucagcugcugaaacaaca

SEQ ID NO: 1598775 - RNA, 22 nt, Human
ugccaucccucccuccaccucc

SEQ ID NO: 1598776 - RNA, 21 nt, Human
ugccaucccucccuccaccuc

SEQ ID NO: 1598777 - RNA, 20 nt, Human
ugccaucccucccuccaccu

SEQ ID NO: 1598778 - RNA, 19 nt, Human
ugccaucccucccuccacc

SEQ ID NO: 1598779 - RNA, 15 nt, Human
ugccaucccucccuc

SEQ ID NO: 1598780 - RNA, 22 nt, Human
ugccuucucaacuccaaacuga

SEQ ID NO: 1598781 - RNA, 22 nt, Human
ugccuccccuccucugcuugcc

SEQ ID NO: 1598782 - RNA, 19 nt, Human
ugccuccccuccucugcuu

SEQ ID NO: 1598783 - RNA, 23 nt, Human
ugccuccccuccucugcuugcca

SEQ ID NO: 1598784 - RNA, 18 nt, Human
ugccuccccuccucugcu

SEQ ID NO: 1598785 - RNA, 17 nt, Human
ugcugaaacaacaaaua

SEQ ID NO: 1598786 - RNA, 19 nt, Human
ugcuagaacucccuuucaa

SEQ ID NO: 1598787 - RNA, 20 nt, Human
ugcuagaacucccuuucaac

SEQ ID NO: 1598788 - RNA, 21 nt, Human
ugcuagaacucccuuucaaca

SEQ ID NO: 1598789 - RNA, 11 nt, Human
ugcucauggaa

SEQ ID NO: 1598790 - RNA, 16 nt, Human
ugcuagguuaauucca

SEQ ID NO: 1598791 - RNA, 23 nt, Human
ugcuagguuaauuccaauuauau

SEQ ID NO: 1598792 - RNA, 22 nt, Human
ucuguuuuauaauuuugugaag

SEQ ID NO: 1598793 - RNA, 17 nt, Human
ucuuucacauuuaaaua

SEQ ID NO: 1598794 - RNA, 19 nt, Human
ugaaaacuuuaugcuaagu

SEQ ID NO: 1598795 - RNA, 15 nt, Human
ugaaaagacuccaaa

SEQ ID NO: 1598796 - RNA, 16 nt, Human
ugaaaagacuccaaag

SEQ ID NO: 1598797 - RNA, 17 nt, Human
ugaaaagacuccaaaga

SEQ ID NO: 1598798 - RNA, 19 nt, Human
ugaaaagacuccaaagaaa

SEQ ID NO: 1598799 - RNA, 18 nt, Human
ugaaagcagggacuugaa

SEQ ID NO: 1598800 - RNA, 19 nt, Human
ugaaagcagggacuugaac

SEQ ID NO: 1598801 - RNA, 23 nt, Human
ugaaagcagggacuugaacccau

SEQ ID NO: 1598802 - RNA, 22 nt, Human
ugaaaagacuccaaagaaaugu

SEQ ID NO: 1598803 - RNA, 19 nt, Human
ugaaauggacuuuuguaca

SEQ ID NO: 1598804 - RNA, 14 nt, Human
ugaacacaucagcu

SEQ ID NO: 1598805 - RNA, 17 nt, Human
ugaagauguagaggaga

SEQ ID NO: 1598806 - RNA, 21 nt, Human
ugaaguccaagcauuuagaug

SEQ ID NO: 1598807 - RNA, 22 nt, Human
ugaaguccaagcauuuagaugu

SEQ ID NO: 1598808 - RNA, 22 nt, Human
ugaacuuguaaaggaauuuaaa

SEQ ID NO: 1598809 - RNA, 21 nt, Human
ucucagugucaaugcagcccc

SEQ ID NO: 1598810 - RNA, 18 nt, Human
ucuccugggcagcugccu

SEQ ID NO: 1598811 - RNA, 17 nt, Human
ucuccugggcagcugcc

SEQ ID NO: 1598812 - RNA, 16 nt, Human
ucuccugggcagcugc

SEQ ID NO: 1598813 - RNA, 15 nt, Human
ucuccugggcagcug

SEQ ID NO: 1598814 - RNA, 14 nt, Human
ucuccugggcagcu

SEQ ID NO: 1598815 - RNA, 13 nt, Human
ucuccugggcagc

SEQ ID NO: 1598816 - RNA, 13 nt, Human
ucucuaggaaaua

SEQ ID NO: 1598817 - RNA, 19 nt, Human
ucucuaggaaauauuuauu

SEQ ID NO: 1598818 - RNA, 21 nt, Human
ucuccugggcagcugccuccc

SEQ ID NO: 1598819 - RNA, 20 nt, Human
ucuccugggcagcugccucc

SEQ ID NO: 1598820 - RNA, 19 nt, Human
ucuccugggcagcugccuc

SEQ ID NO: 1598821 - RNA, 18 nt, Human
ucucuucacagucacauu

SEQ ID NO: 1598822 - RNA, 15 nt, Human
uccuugcaucaauuu

SEQ ID NO: 1598823 - RNA, 20 nt, Human
uccuucugugaaaguacauu

SEQ ID NO: 1598824 - RNA, 15 nt, Human
ucucaacuccaaacu

SEQ ID NO: 1598825 - RNA, 17 nt, Human
ucuaguaugaaauuaua

SEQ ID NO: 1598826 - RNA, 15 nt, Human
ucuaguaugaaauua

SEQ ID NO: 1598827 - RNA, 21 nt, Human
ucucaaauuuggauugcuaau

SEQ ID NO: 1598828 - RNA, 17 nt, Human
ucuacacuccagugaga

SEQ ID NO: 1598829 - RNA, 21 nt, Human
ucuacacuaagagagaaugag

SEQ ID NO: 1598830 - RNA, 23 nt, Human
ucuaaauuuuauaucuuguagcu

SEQ ID NO: 1598831 - RNA, 18 nt, Human
ucuaaauuuuauaucuug

SEQ ID NO: 1598832 - RNA, 23 nt, Human
ucuaaauuugaauguuaagcaga

SEQ ID NO: 1598833 - RNA, 22 nt, Human
ucuaaauuugaauguuaagcag

SEQ ID NO: 1598834 - RNA, 19 nt, Human
ucuaacaaaaaaauauauu

SEQ ID NO: 1598835 - RNA, 17 nt, Human
ucuaaauuugaauguua

SEQ ID NO: 1598836 - RNA, 13 nt, Human
ucuaaauuugaau

SEQ ID NO: 1598837 - RNA, 19 nt, Human
ucaacuccaaacugacucu

SEQ ID NO: 1598838 - RNA, 23 nt, Human
ucacaggacagcccuucuuucca

SEQ ID NO: 1598839 - RNA, 19 nt, Human
ucacaggaaguagaggagg

SEQ ID NO: 1598840 - RNA, 13 nt, Human
ucaaugcagcccc

SEQ ID NO: 1598841 - RNA, 13 nt, Human
ucaaaacugcacu

SEQ ID NO: 1598842 - RNA, 13 nt, Human
uauuuauuacugu

SEQ ID NO: 1598843 - RNA, 22 nt, Human
uauuucuaugaaauauuauguu

SEQ ID NO: 1598844 - RNA, 21 nt, Human
uauuucuaugaaauauuaugu

SEQ ID NO: 1598845 - RNA, 19 nt, Human
uauuugagaguucuaaauu

SEQ ID NO: 1598846 - RNA, 18 nt, Human
uauuugagaguucuaaau

SEQ ID NO: 1598847 - RNA, 16 nt, Human
uauuugagaguucuaa

SEQ ID NO: 1598848 - RNA, 15 nt, Human
uauuugagaguucua

SEQ ID NO: 1598849 - RNA, 22 nt, Human
ucagacauagaauuaacacaug

SEQ ID NO: 1598850 - RNA, 19 nt, Human
ucagacauagaauuaacac

SEQ ID NO: 1598851 - RNA, 17 nt, Human
ucacuugucaauaaaau

SEQ ID NO: 1598852 - RNA, 20 nt, Human
ucagaaaauauuauguguuu

SEQ ID NO: 1598853 - RNA, 19 nt, Human
ucagaaaauauuauguguu

SEQ ID NO: 1598854 - RNA, 17 nt, Human
ucagaaaauauuaugug

SEQ ID NO: 1598855 - RNA, 16 nt, Human
ucccaaauuucauacc

SEQ ID NO: 1598856 - RNA, 14 nt, Human
ucauuucuuugagu

SEQ ID NO: 1598857 - RNA, 16 nt, Human
ucauuucugcaucagc

SEQ ID NO: 1598858 - RNA, 22 nt, Human
ucauuucugcaucagcugcuga

SEQ ID NO: 1598859 - RNA, 23 nt, Human
uccaaacugacucuuaagaagac

SEQ ID NO: 1598860 - RNA, 12 nt, Human
uccaaagaaaug

SEQ ID NO: 1598861 - RNA, 17 nt, Human
uccaagcauuuagaugu

SEQ ID NO: 1598862 - RNA, 23 nt, Human
uccaagcauaccaacacgagcag

SEQ ID NO: 1598863 - RNA, 16 nt, Human
uccagauccuggaaau

SEQ ID NO: 1598864 - RNA, 17 nt, Human
uccagauccuggaaauc

SEQ ID NO: 1598865 - RNA, 14 nt, Human
uccagauccuggaa

SEQ ID NO: 1598866 - RNA, 14 nt, Human
uccacuuggucugu

SEQ ID NO: 1598867 - RNA, 12 nt, Human
uccacuuggucu

SEQ ID NO: 1598868 - RNA, 13 nt, Human
uccacuuggucug

SEQ ID NO: 1598869 - RNA, 14 nt, Human
uccaccuacaugag

SEQ ID NO: 1598870 - RNA, 12 nt, Human
uccaccucccug

SEQ ID NO: 1598871 - RNA, 23 nt, Human
uccaccucccugcaauaaaaugg

SEQ ID NO: 1598872 - RNA, 20 nt, Human
uccaagcauuuagauguaua

SEQ ID NO: 1598873 - RNA, 16 nt, Human
ucauacauuguacgaa

SEQ ID NO: 1598874 - RNA, 15 nt, Human
ucauacauuguacga

SEQ ID NO: 1598875 - RNA, 13 nt, Human
ucauacauuguac

SEQ ID NO: 1598876 - RNA, 15 nt, Human
ucauaauuuauacag

SEQ ID NO: 1598877 - RNA, 13 nt, Human
ucaguuguacagu

SEQ ID NO: 1598878 - RNA, 16 nt, Human
uaaaaaagaaacauuu

SEQ ID NO: 1598879 - RNA, 15 nt, Human
guuuucugagaaaga

SEQ ID NO: 1598880 - RNA, 18 nt, Human
guuuucaggcuagaugua

SEQ ID NO: 1598881 - RNA, 16 nt, Human
guuuucauuaucucaa

SEQ ID NO: 1598882 - RNA, 13 nt, Human
guuuagaaagcuu

SEQ ID NO: 1598883 - RNA, 17 nt, Human
guuuagaaagcuugccc

SEQ ID NO: 1598884 - RNA, 13 nt, Human
guuuagcaguaua

SEQ ID NO: 1598885 - RNA, 19 nt, Human
uaaaauccauacauuugug

SEQ ID NO: 1598886 - RNA, 18 nt, Human
uaaaauccauacauuugu

SEQ ID NO: 1598887 - RNA, 15 nt, Human
uaaaaaugguuuaaa

SEQ ID NO: 1598888 - RNA, 14 nt, Human
uaaaagaugaaaau

SEQ ID NO: 1598889 - RNA, 17 nt, Human
uaaaauggguuuuacug

SEQ ID NO: 1598890 - RNA, 17 nt, Human
uaaauaaaaauaauccu

SEQ ID NO: 1598891 - RNA, 18 nt, Human
uaaauauaugcuaagucu

SEQ ID NO: 1598892 - RNA, 22 nt, Human
uaaauaaaccucaaaaugucua

SEQ ID NO: 1598893 - RNA, 16 nt, Human
uaagcauuccaacuau

SEQ ID NO: 1598894 - RNA, 18 nt, Human
uaagcauuccaacuaucu

SEQ ID NO: 1598895 - RNA, 20 nt, Human
uaagcauuccaacuaucuca

SEQ ID NO: 1598896 - RNA, 13 nt, Human
uaagccagacauc

SEQ ID NO: 1598897 - RNA, 20 nt, Human
uaagccagacaucaacagau

SEQ ID NO: 1598898 - RNA, 21 nt, Human
uaagccagacaucaacagaua

SEQ ID NO: 1598899 - RNA, 23 nt, Human
uaagagggauuagggagagaaga

SEQ ID NO: 1598900 - RNA, 19 nt, Human
uaagaaaucaaagagagaa

SEQ ID NO: 1598901 - RNA, 13 nt, Human
uaacugugaaguu

SEQ ID NO: 1598902 - RNA, 19 nt, Human
uaaugccacuaaauugaca

SEQ ID NO: 1598903 - RNA, 19 nt, Human
uaaugauaaguaaaugcua

SEQ ID NO: 1598904 - RNA, 14 nt, Human
uaauauauuuccau

SEQ ID NO: 1598905 - RNA, 15 nt, Human
uaauaauguuucaaa

SEQ ID NO: 1598906 - RNA, 15 nt, Human
uaauaacugugaagu

SEQ ID NO: 1598907 - RNA, 22 nt, Human
uaauuggaaaggcagcucuaaa

SEQ ID NO: 1598908 - RNA, 20 nt, Human
uaauuuguaguguuggagaa

SEQ ID NO: 1598909 - RNA, 23 nt, Human
uaauuuguaguguuggagaagaa

SEQ ID NO: 1598910 - RNA, 13 nt, Human
uaauuuuaagaaa

SEQ ID NO: 1598911 - RNA, 14 nt, Human
uaauguuucaaaca

SEQ ID NO: 1598912 - RNA, 15 nt, Human
uaauguuucaaacau

SEQ ID NO: 1598913 - RNA, 20 nt, Human
uaauuaaaagaauauuuuaa

SEQ ID NO: 1598914 - RNA, 23 nt, Human
uaauuaaauuuugaguucuacau

SEQ ID NO: 1598915 - RNA, 13 nt, Human
uacagaauuuuau

SEQ ID NO: 1598916 - RNA, 23 nt, Human
uaccacaggaaccacaagacugc

SEQ ID NO: 1598917 - RNA, 18 nt, Human
uaccaccagucugacugu

SEQ ID NO: 1598918 - RNA, 15 nt, Human
uacauaaguaauuca

SEQ ID NO: 1598919 - RNA, 16 nt, Human
uaccaacacgagcagg

SEQ ID NO: 1598920 - RNA, 21 nt, Human
uacaugagguacugagaguga

SEQ ID NO: 1598921 - RNA, 22 nt, Human
uacaugagguacugagagugaa

SEQ ID NO: 1598922 - RNA, 17 nt, Human
uacauuuguauaaaaua

SEQ ID NO: 1598923 - RNA, 11 nt, Human
uacauuugugu

SEQ ID NO: 1598924 - RNA, 16 nt, Human
uacauuuguauaaaau

SEQ ID NO: 1598925 - RNA, 23 nt, Human
uacauuuggagacacaacuauuu

SEQ ID NO: 1598926 - RNA, 17 nt, Human
uagaacagauaaucagu

SEQ ID NO: 1598927 - RNA, 23 nt, Human
uacugauguuccuagugaaagag

SEQ ID NO: 1598928 - RNA, 23 nt, Human
uacgaagaguauuuuugacagaa

SEQ ID NO: 1598929 - RNA, 23 nt, Human
uaccuuuguucccaaauuucaua

SEQ ID NO: 1598930 - RNA, 22 nt, Human
uacgaagaguauuuuugacaga

SEQ ID NO: 1598931 - RNA, 20 nt, Human
uacgaagaguauuuuugaca

SEQ ID NO: 1598932 - RNA, 16 nt, Human
uagauguauguacuuc

SEQ ID NO: 1598933 - RNA, 20 nt, Human
uagauguauguacuucaugc

SEQ ID NO: 1598934 - RNA, 20 nt, Human
uagcagggcauggcugggaa

SEQ ID NO: 1598935 - RNA, 17 nt, Human
uagaguuuagcuggaaa

SEQ ID NO: 1598936 - RNA, 18 nt, Human
uagaguuuagcuggaaaa

SEQ ID NO: 1598937 - RNA, 23 nt, Human
uaggaauugacccacaagaaaug

SEQ ID NO: 1598938 - RNA, 20 nt, Human
uaggaauugacccacaagaa

SEQ ID NO: 1598939 - RNA, 13 nt, Human
uaggccaugggac

SEQ ID NO: 1598940 - RNA, 16 nt, Human
uaggccaugggacagg

SEQ ID NO: 1598941 - RNA, 13 nt, Human
uauauuugaaaua

SEQ ID NO: 1598942 - RNA, 14 nt, Human
uauauuugaaauau

SEQ ID NO: 1598943 - RNA, 20 nt, Human
uauauuuauuacuguaagaa

SEQ ID NO: 1598944 - RNA, 23 nt, Human
uauauuuauuacuguaagaaaau

SEQ ID NO: 1598945 - RNA, 19 nt, Human
uauauuuuuuguuaaauga

SEQ ID NO: 1598946 - RNA, 18 nt, Human
uagucaaauugugugaaa

SEQ ID NO: 1598947 - RNA, 21 nt, Human
uaguuguaccgcaaugugacu

SEQ ID NO: 1598948 - RNA, 15 nt, Human
uaguuuuauaugcuu

SEQ ID NO: 1598949 - RNA, 18 nt, Human
uauaacaaugcuguauuu

SEQ ID NO: 1598950 - RNA, 21 nt, Human
uauaauucagaaggaucuuca

SEQ ID NO: 1598951 - RNA, 16 nt, Human
uauacccagaaaguua

SEQ ID NO: 1598952 - RNA, 12 nt, Human
ggaaauauuuau

SEQ ID NO: 1598953 - RNA, 13 nt, Human
ggaaauauuuauu

SEQ ID NO: 1598954 - RNA, 15 nt, Human
ggaaauauuuauuuu

SEQ ID NO: 1598955 - RNA, 17 nt, Human
ggaaauauuuauuuuaa

SEQ ID NO: 1598956 - RNA, 18 nt, Human
ggaaauauuuauuuuaau

SEQ ID NO: 1598957 - RNA, 16 nt, Human
ggaaaucaaauaugca

SEQ ID NO: 1598958 - RNA, 17 nt, Human
gcuuuuaaaaaaaaaua

SEQ ID NO: 1598959 - RNA, 20 nt, Human
ggaaaaaauaacaaugaaag

SEQ ID NO: 1598960 - RNA, 23 nt, Human
gcuguucacagccagacuggcac

SEQ ID NO: 1598961 - RNA, 15 nt, Human
gcuguucacagccag

SEQ ID NO: 1598962 - RNA, 16 nt, Human
gcuguucacagccaga

SEQ ID NO: 1598963 - RNA, 16 nt, Human
gcuugccaucccuccc

SEQ ID NO: 1598964 - RNA, 18 nt, Human
gcuugcccuguuaaaaga

SEQ ID NO: 1598965 - RNA, 21 nt, Human
gcuugccaucccucccuccac

SEQ ID NO: 1598966 - RNA, 18 nt, Human
gcuugccaucccucccuc

SEQ ID NO: 1598967 - RNA, 17 nt, Human
gcuugcccuggugccuc

SEQ ID NO: 1598968 - RNA, 19 nt, Human
gcuugcccuggugccucac

SEQ ID NO: 1598969 - RNA, 22 nt, Human
gcuguauuuuaaaagaaugauu

SEQ ID NO: 1598970 - RNA, 18 nt, Human
gcuagauguauguacuuc

SEQ ID NO: 1598971 - RNA, 22 nt, Human
ggccaugggacagggaggacgc

SEQ ID NO: 1598972 - RNA, 22 nt, Human
ggcagcugccuccccuccucug

SEQ ID NO: 1598973 - RNA, 21 nt, Human
ggcagcugccuccccuccucu

SEQ ID NO: 1598974 - RNA, 18 nt, Human
ggcagcugccuccccucc

SEQ ID NO: 1598975 - RNA, 20 nt, Human
ggaggacgcucucuggccuu

SEQ ID NO: 1598976 - RNA, 21 nt, Human
ggaggacgcucucuggccuuc

SEQ ID NO: 1598977 - RNA, 19 nt, Human
ggaggacgcucucuggccu

SEQ ID NO: 1598978 - RNA, 22 nt, Human
ggcuugaguuuaaauuguaaua

SEQ ID NO: 1598979 - RNA, 23 nt, Human
ggugcuacaaaaacacagcaagg

SEQ ID NO: 1598980 - RNA, 17 nt, Human
gccccgugggguuccuc

SEQ ID NO: 1598981 - RNA, 19 nt, Human
gccccugcacuccagccug

SEQ ID NO: 1598982 - RNA, 16 nt, Human
gcccucuccugggcag

SEQ ID NO: 1598983 - RNA, 15 nt, Human
gcccucuccugggca

SEQ ID NO: 1598984 - RNA, 21 nt, Human
gcccucuccugggcagcugcc

SEQ ID NO: 1598985 - RNA, 19 nt, Human
gcccucuccugggcagcug

SEQ ID NO: 1598986 - RNA, 18 nt, Human
gcccucuccugggcagcu

SEQ ID NO: 1598987 - RNA, 16 nt, Human
gcccacagcuguauga

SEQ ID NO: 1598988 - RNA, 22 nt, Human
gccaugggacagggaggacgcu

SEQ ID NO: 1598989 - RNA, 22 nt, Human
gccauuuaaagcuuauuaaaac

SEQ ID NO: 1598990 - RNA, 16 nt, Human
gccaucccucccucca

SEQ ID NO: 1598991 - RNA, 15 nt, Human
gccaucccucccucc

SEQ ID NO: 1598992 - RNA, 14 nt, Human
gccaugggacaggg

SEQ ID NO: 1598993 - RNA, 19 nt, Human
gccaugggacagggaggac

SEQ ID NO: 1598994 - RNA, 14 nt, Human
gccaucccucccuc

SEQ ID NO: 1598995 - RNA, 13 nt, Human
gccaucccucccu

SEQ ID NO: 1598996 - RNA, 11 nt, Human
gccaucccucc

SEQ ID NO: 1598997 - RNA, 22 nt, Human
gccacguucuuacuaguuuccc

SEQ ID NO: 1598998 - RNA, 18 nt, Human
gccuuggggcugaugcag

SEQ ID NO: 1598999 - RNA, 19 nt, Human
gccuucggccuccauccug

SEQ ID NO: 1599000 - RNA, 18 nt, Human
gccuucggccuccauccu

SEQ ID NO: 1599001 - RNA, 18 nt, Human
gccuguaaucacagcuac

SEQ ID NO: 1599002 - RNA, 14 nt, Human
gccuccccuccucu

SEQ ID NO: 1599003 - RNA, 13 nt, Human
gccuccccuccuc

SEQ ID NO: 1599004 - RNA, 12 nt, Human
gccuccccuccu

SEQ ID NO: 1599005 - RNA, 11 nt, Human
gccuccccucc

SEQ ID NO: 1599006 - RNA, 16 nt, Human
gccuccccuccucugc

SEQ ID NO: 1599007 - RNA, 19 nt, Human
gcccuucuuuccacagaag

SEQ ID NO: 1599008 - RNA, 15 nt, Human
gcaggcuacugucag

SEQ ID NO: 1599009 - RNA, 18 nt, Human
gcauagauucccugagca

SEQ ID NO: 1599010 - RNA, 13 nt, Human
gcaguucugaaga

SEQ ID NO: 1599011 - RNA, 14 nt, Human
gcaguucugaagaa

SEQ ID NO: 1599012 - RNA, 15 nt, Human
gcacugucaagauga

SEQ ID NO: 1599013 - RNA, 14 nt, Human
gcagaagacaguau

SEQ ID NO: 1599014 - RNA, 20 nt, Human
gcacagccucuuagaugcag

SEQ ID NO: 1599015 - RNA, 18 nt, Human
gcagauggaaugcugugu

SEQ ID NO: 1599016 - RNA, 22 nt, Human
gcagauggaaugcuguguuaaa

SEQ ID NO: 1599017 - RNA, 22 nt, Human
gauuaaguaaugauaacuggaa

SEQ ID NO: 1599018 - RNA, 14 nt, Human
gauuaaguaaugau

SEQ ID NO: 1599019 - RNA, 16 nt, Human
gaugcuagaacucccu

SEQ ID NO: 1599020 - RNA, 12 nt, Human
gcaagauguggg

SEQ ID NO: 1599021 - RNA, 16 nt, Human
gcaagaugugggcagu

SEQ ID NO: 1599022 - RNA, 14 nt, Human
gauccuggaaauca

SEQ ID NO: 1599023 - RNA, 13 nt, Human
gaucuuuaaaaua

SEQ ID NO: 1599024 - RNA, 23 nt, Human
gaucagcuuauugucuagugaaa

SEQ ID NO: 1599025 - RNA, 17 nt, Human
gauaggucagugcaaau

SEQ ID NO: 1599026 - RNA, 13 nt, Human
gauaaacaguagu

SEQ ID NO: 1599027 - RNA, 11 nt, Human
gaguucuacau

SEQ ID NO: 1599028 - RNA, 23 nt, Human
gaauucuugaaggaaaaugauac

SEQ ID NO: 1599029 - RNA, 12 nt, Human
gaaguccaagca

SEQ ID NO: 1599030 - RNA, 22 nt, Human
gaaguccaagcauuuagaugua

SEQ ID NO: 1599031 - RNA, 16 nt, Human
gaaguauccuucagcc

SEQ ID NO: 1599032 - RNA, 14 nt, Human
gaaguauccuucag

SEQ ID NO: 1599033 - RNA, 16 nt, Human
gaauauuuuaacuucc

SEQ ID NO: 1599034 - RNA, 15 nt, Human
gaacauaaaauacaa

SEQ ID NO: 1599035 - RNA, 16 nt, Human
gaacagugauuaccag

SEQ ID NO: 1599036 - RNA, 20 nt, Human
gaacagugauuaccagggac

SEQ ID NO: 1599037 - RNA, 16 nt, Human
gaaauuguauuacaaa

SEQ ID NO: 1599038 - RNA, 18 nt, Human
gaaauuguauuacaaauc

SEQ ID NO: 1599039 - RNA, 21 nt, Human
gaacuagaguuuagcuggaaa

SEQ ID NO: 1599040 - RNA, 12 nt, Human
gaagaacugaaa

SEQ ID NO: 1599041 - RNA, 19 nt, Human
gaagacugcauuauauuua

SEQ ID NO: 1599042 - RNA, 18 nt, Human
gaagauguagaggagaaa

SEQ ID NO: 1599043 - RNA, 14 nt, Human
gacuggcacaguuu

SEQ ID NO: 1599044 - RNA, 18 nt, Human
gacuggcacaguuuucug

SEQ ID NO: 1599045 - RNA, 22 nt, Human
gacuggcacaguuuucugagaa

SEQ ID NO: 1599046 - RNA, 16 nt, Human
gacugaggggagggga

SEQ ID NO: 1599047 - RNA, 20 nt, Human
gacccaaaaggcagaagcaa

SEQ ID NO: 1599048 - RNA, 18 nt, Human
gacccaaaaggcagaagc

SEQ ID NO: 1599049 - RNA, 19 nt, Human
gacccaaaaggcagaagca

SEQ ID NO: 1599050 - RNA, 16 nt, Human
gaccacugcagaagac

SEQ ID NO: 1599051 - RNA, 18 nt, Human
gaccacugcagaagacag

SEQ ID NO: 1599052 - RNA, 23 nt, Human
gacaggaugguucccuugaugaa

SEQ ID NO: 1599053 - RNA, 17 nt, Human
gacauaaaaacaacuuu

SEQ ID NO: 1599054 - RNA, 20 nt, Human
cuugcuugauuguauggugg

SEQ ID NO: 1599055 - RNA, 22 nt, Human
cuugcccuguuaaaagaugaaa

SEQ ID NO: 1599056 - RNA, 14 nt, Human
cuugccaucccucc

SEQ ID NO: 1599057 - RNA, 17 nt, Human
cuugccaucccucccuc

SEQ ID NO: 1599058 - RNA, 19 nt, Human
cuugccaucccucccucca

SEQ ID NO: 1599059 - RNA, 16 nt, Human
cuugccaucccucccu

SEQ ID NO: 1599060 - RNA, 15 nt, Human
cuugccaucccuccc

SEQ ID NO: 1599061 - RNA, 14 nt, Human
cuugcccuguuaaa

SEQ ID NO: 1599062 - RNA, 18 nt, Human
cuugcccuggugccucac

SEQ ID NO: 1599063 - RNA, 16 nt, Human
cuuggggcugaugcag

SEQ ID NO: 1599064 - RNA, 18 nt, Human
cuuggggcugaugcaguu

SEQ ID NO: 1599065 - RNA, 16 nt, Human
cuuggacucauuuuaa

SEQ ID NO: 1599066 - RNA, 14 nt, Human
gaaaacaaggauga

SEQ ID NO: 1599067 - RNA, 19 nt, Human
gaaaauaacaauaaaagac

SEQ ID NO: 1599068 - RNA, 14 nt, Human
gaaaaguauguuag

SEQ ID NO: 1599069 - RNA, 20 nt, Human
gaaaaguauguuagugcaaa

SEQ ID NO: 1599070 - RNA, 20 nt, Human
cuuccuuggacucauuuuaa

SEQ ID NO: 1599071 - RNA, 19 nt, Human
cuuccuuggacucauuuua

SEQ ID NO: 1599072 - RNA, 18 nt, Human
cuucggccuccauccuga

SEQ ID NO: 1599073 - RNA, 19 nt, Human
cuucggccuccauccugag

SEQ ID NO: 1599074 - RNA, 17 nt, Human
cuucggccuccauccug

SEQ ID NO: 1599075 - RNA, 18 nt, Human
cuucagcgguuuauauaa

SEQ ID NO: 1599076 - RNA, 19 nt, Human
cuuccagauccuggaaauc

SEQ ID NO: 1599077 - RNA, 19 nt, Human
cuuagaugcaguucugaag

SEQ ID NO: 1599078 - RNA, 20 nt, Human
cuuagaugcaguucugaaga

SEQ ID NO: 1599079 - RNA, 19 nt, Human
cuuacuaguuucccuugca

SEQ ID NO: 1599080 - RNA, 14 nt, Human
cuuauaauuuaaaa

SEQ ID NO: 1599081 - RNA, 13 nt, Human
cuuauaauuuaaa

SEQ ID NO: 1599082 - RNA, 21 nt, Human
cuuaggguuaugauuaaguaa

SEQ ID NO: 1599083 - RNA, 15 nt, Human
cuuaugauugcagau

SEQ ID NO: 1599084 - RNA, 21 nt, Human
cuuaagaagacugcauuauau

SEQ ID NO: 1599085 - RNA, 18 nt, Human
cuuaaugccacuaaauug

SEQ ID NO: 1599086 - RNA, 11 nt, Human
cuuaacuauuc

SEQ ID NO: 1599087 - RNA, 19 nt, Human
cuguuuuauaauuuuguga

SEQ ID NO: 1599088 - RNA, 18 nt, Human
cuguuuugaaucucauaa

SEQ ID NO: 1599089 - RNA, 13 nt, Human
cucuuaagaagac

SEQ ID NO: 1599090 - RNA, 21 nt, Human
cucuccugggcagcugccucc

SEQ ID NO: 1599091 - RNA, 23 nt, Human
cucugcauacucauuaggauggc

SEQ ID NO: 1599092 - RNA, 12 nt, Human
cucggagaagag

SEQ ID NO: 1599093 - RNA, 13 nt, Human
cucggagaagagc

SEQ ID NO: 1599094 - RNA, 20 nt, Human
cucggagaagagcuguucac

SEQ ID NO: 1599095 - RNA, 13 nt, Human
cucccuuucaaca

SEQ ID NO: 1599096 - RNA, 16 nt, Human
cucccuucucuucaca

SEQ ID NO: 1599097 - RNA, 17 nt, Human
cuccaccucccugcaau

SEQ ID NO: 1599098 - RNA, 16 nt, Human
cuccaccucccugcaa

SEQ ID NO: 1599099 - RNA, 15 nt, Human
cuccaccucccugca

SEQ ID NO: 1599100 - RNA, 14 nt, Human
cuccaccucccugc

SEQ ID NO: 1599101 - RNA, 23 nt, Human
cuccaccucccugcaauaaaaug

SEQ ID NO: 1599102 - RNA, 23 nt, Human
cuccauccugaggcuccacuugg

SEQ ID NO: 1599103 - RNA, 21 nt, Human
cuccauccugaggcuccacuu

SEQ ID NO: 1599104 - RNA, 17 nt, Human
cucccagucauuuaaua

SEQ ID NO: 1599105 - RNA, 17 nt, Human
cucauuaggauggcuag

SEQ ID NO: 1599106 - RNA, 18 nt, Human
cucauuaggauggcuagu

SEQ ID NO: 1599107 - RNA, 15 nt, Human
cucauaauuuauaca

SEQ ID NO: 1599108 - RNA, 13 nt, Human
cucauaauuuaua

SEQ ID NO: 1599109 - RNA, 22 nt, Human
cucauaauuuauacaggucaua

SEQ ID NO: 1599110 - RNA, 18 nt, Human
cuggcacaguuuucugag

SEQ ID NO: 1599111 - RNA, 19 nt, Human
cuggcacaguuuucugaga

SEQ ID NO: 1599112 - RNA, 20 nt, Human
cuggcacaguuuucugagaa

SEQ ID NO: 1599113 - RNA, 16 nt, Human
cuggccaacgggguga

SEQ ID NO: 1599114 - RNA, 12 nt, Human
cuggagcucugc

SEQ ID NO: 1599115 - RNA, 23 nt, Human
cuggaauaauccuaaacauauga

SEQ ID NO: 1599116 - RNA, 18 nt, Human
cugcugaaacaacaaaua

SEQ ID NO: 1599117 - RNA, 13 nt, Human
cugcugaaacaac

SEQ ID NO: 1599118 - RNA, 22 nt, Human
cugggaacccaaguccaagcau

SEQ ID NO: 1599119 - RNA, 21 nt, Human
cuggucccagccagcaguuca

SEQ ID NO: 1599120 - RNA, 15 nt, Human
cugccuaagugcagc

SEQ ID NO: 1599121 - RNA, 13 nt, Human
cugauguuccuag

SEQ ID NO: 1599122 - RNA, 18 nt, Human
cugauguuccuagugaaa

SEQ ID NO: 1599123 - RNA, 20 nt, Human
cugauguuccuagugaaaga

SEQ ID NO: 1599124 - RNA, 21 nt, Human
cugauguuccuagugaaagag

SEQ ID NO: 1599125 - RNA, 23 nt, Human
cugcagaagacaguauggcagcu

SEQ ID NO: 1599126 - RNA, 13 nt, Human
cugcagaagacag

SEQ ID NO: 1599127 - RNA, 20 nt, Human
cugcaauuucauaugcugua

SEQ ID NO: 1599128 - RNA, 18 nt, Human
cugcaauuucauaugcug

SEQ ID NO: 1599129 - RNA, 16 nt, Human
cccuugaugaagaagu

SEQ ID NO: 1599130 - RNA, 21 nt, Human
ccucugcuugccaucccuccc

SEQ ID NO: 1599131 - RNA, 20 nt, Human
ccucugcuugccaucccucc

SEQ ID NO: 1599132 - RNA, 13 nt, Human
ccucuccugggca

SEQ ID NO: 1599133 - RNA, 12 nt, Human
ccucuccugggc

SEQ ID NO: 1599134 - RNA, 11 nt, Human
ccucuccuggg

SEQ ID NO: 1599135 - RNA, 14 nt, Human
ccucuccugggcag

SEQ ID NO: 1599136 - RNA, 13 nt, Human
ccuccucugcuug

SEQ ID NO: 1599137 - RNA, 11 nt, Human
ccuccucugcu

SEQ ID NO: 1599138 - RNA, 18 nt, Human
ccuccccuccucugcuug

SEQ ID NO: 1599139 - RNA, 17 nt, Human
ccuccccuccucugcuu

SEQ ID NO: 1599140 - RNA, 16 nt, Human
ccucccugcaauaaaa

SEQ ID NO: 1599141 - RNA, 12 nt, Human
ccucccugcaau

SEQ ID NO: 1599142 - RNA, 20 nt, Human
ccucagaaaacaaggaugaa

SEQ ID NO: 1599143 - RNA, 15 nt, Human
ccuccccuccucugc

SEQ ID NO: 1599144 - RNA, 18 nt, Human
ccugaggcuccacuuggu

SEQ ID NO: 1599145 - RNA, 20 nt, Human
ccugaggcuccacuuggucu

SEQ ID NO: 1599146 - RNA, 23 nt, Human
ccucuuagaugcaguucugaaga

SEQ ID NO: 1599147 - RNA, 18 nt, Human
ccugaaagaggaaugaag

SEQ ID NO: 1599148 - RNA, 23 nt, Human
ccugaaagaggaaugaaguacuc

SEQ ID NO: 1599149 - RNA, 18 nt, Human
ccugggcagcugccuccc

SEQ ID NO: 1599150 - RNA, 17 nt, Human
ccugggcagcugccucc

SEQ ID NO: 1599151 - RNA, 16 nt, Human
ccugggcagcugccuc

SEQ ID NO: 1599152 - RNA, 15 nt, Human
ccugggcagcugccu

SEQ ID NO: 1599153 - RNA, 22 nt, Human
ccugggcagcugccuccccucc

SEQ ID NO: 1599154 - RNA, 20 nt, Human
ccugggcagcugccuccccu

SEQ ID NO: 1599155 - RNA, 14 nt, Human
ccuugaugaagaag

SEQ ID NO: 1599156 - RNA, 20 nt, Human
ccuugaaaacuuuaugcuaa

SEQ ID NO: 1599157 - RNA, 11 nt, Human
cgcaaugugac

SEQ ID NO: 1599158 - RNA, 16 nt, Human
cggccuccauccugag

SEQ ID NO: 1599159 - RNA, 17 nt, Human
cggccuccauccugagg

SEQ ID NO: 1599160 - RNA, 13 nt, Human
cccaggugccagu

SEQ ID NO: 1599161 - RNA, 18 nt, Human
cccaaaaggcagaagcaa

SEQ ID NO: 1599162 - RNA, 13 nt, Human
cccaaaaggcaga

SEQ ID NO: 1599163 - RNA, 18 nt, Human
ccaucaaggguacacugc

SEQ ID NO: 1599164 - RNA, 16 nt, Human
ccaugauguuuagaaa

SEQ ID NO: 1599165 - RNA, 14 nt, Human
ccaugaagauguag

SEQ ID NO: 1599166 - RNA, 17 nt, Human
ccaggugccaguuaugg

SEQ ID NO: 1599167 - RNA, 20 nt, Human
ccagugaauucuugaaggaa

SEQ ID NO: 1599168 - RNA, 16 nt, Human
ccagugaauucuugaa

SEQ ID NO: 1599169 - RNA, 13 nt, Human
ccacugcagaaga

SEQ ID NO: 1599170 - RNA, 18 nt, Human
ccacugcagaagacagua

SEQ ID NO: 1599171 - RNA, 16 nt, Human
ccaauauucauagcag

SEQ ID NO: 1599172 - RNA, 20 nt, Human
ccacaggaaccacaagacug

SEQ ID NO: 1599173 - RNA, 17 nt, Human
cauuuaggccaugggac

SEQ ID NO: 1599174 - RNA, 13 nt, Human
cauuugcucaugg

SEQ ID NO: 1599175 - RNA, 18 nt, Human
cauuugcucauggaauug

SEQ ID NO: 1599176 - RNA, 14 nt, Human
ccaagcaaguauua

SEQ ID NO: 1599177 - RNA, 17 nt, Human
ccaagcauuuagaugua

SEQ ID NO: 1599178 - RNA, 22 nt, Human
ccaagcauaccaacacgagcag

SEQ ID NO: 1599179 - RNA, 22 nt, Human
ccaaacugacucuuaagaagac

SEQ ID NO: 1599180 - RNA, 16 nt, Human
ccaaaggcucucuccu

SEQ ID NO: 1599181 - RNA, 23 nt, Human
ccaaauuucauaccuaucaucuu

SEQ ID NO: 1599182 - RNA, 19 nt, Human
acuaguauuucuaugaaau

SEQ ID NO: 1599183 - RNA, 18 nt, Human
acuaguauuucuaugaaa

SEQ ID NO: 1599184 - RNA, 19 nt, Human
acggacgaaccuugaaaac

SEQ ID NO: 1599185 - RNA, 17 nt, Human
accucugccucagaaaa

SEQ ID NO: 1599186 - RNA, 18 nt, Human
accucugccucagaaaac

SEQ ID NO: 1599187 - RNA, 20 nt, Human
accucugccucagaaaacaa

SEQ ID NO: 1599188 - RNA, 20 nt, Human
acuucaaauccuugaagauu

SEQ ID NO: 1599189 - RNA, 18 nt, Human
acuucagcgguuuauaua

SEQ ID NO: 1599190 - RNA, 19 nt, Human
acuucagcgguuuauauaa

SEQ ID NO: 1599191 - RNA, 21 nt, Human
acuuaaaaaugguuuaaaugg

SEQ ID NO: 1599192 - RNA, 13 nt, Human
acuuaaaaauggu

SEQ ID NO: 1599193 - RNA, 14 nt, Human
acuuaaaaaugguu

SEQ ID NO: 1599194 - RNA, 12 nt, Human
acuuuaugcuaa

SEQ ID NO: 1599195 - RNA, 17 nt, Human
acuuuaugcuaagugaa

SEQ ID NO: 1599196 - RNA, 22 nt, Human
acuugggaggcugagaugggag

SEQ ID NO: 1599197 - RNA, 14 nt, Human
acucuuaagaagac

SEQ ID NO: 1599198 - RNA, 15 nt, Human
acucuuaagaagacu

SEQ ID NO: 1599199 - RNA, 20 nt, Human
acucuuaagaagacugcauu

SEQ ID NO: 1599200 - RNA, 15 nt, Human
acucugucucagucc

SEQ ID NO: 1599201 - RNA, 17 nt, Human
acucugucucaguccau

SEQ ID NO: 1599202 - RNA, 22 nt, Human
aauuucauaccuaucaucuuaa

SEQ ID NO: 1599203 - RNA, 21 nt, Human
acaaggaugaauuaaguuuuu

SEQ ID NO: 1599204 - RNA, 22 nt, Human
acaagaaaugaaagcagggacu

SEQ ID NO: 1599205 - RNA, 15 nt, Human
acaagaaaugaaagc

SEQ ID NO: 1599206 - RNA, 16 nt, Human
acaagaaaugaaagca

SEQ ID NO: 1599207 - RNA, 17 nt, Human
aauuuugugaagcaaaa

SEQ ID NO: 1599208 - RNA, 18 nt, Human
aauuuugugaagcaaaau

SEQ ID NO: 1599209 - RNA, 16 nt, Human
acagaagcuccaggua

SEQ ID NO: 1599210 - RNA, 19 nt, Human
accaaggcugauuaaacca

SEQ ID NO: 1599211 - RNA, 20 nt, Human
accaaggcugauuaaaccaa

SEQ ID NO: 1599212 - RNA, 21 nt, Human
acagugauuaccagggacuga

SEQ ID NO: 1599213 - RNA, 19 nt, Human
acauaauuaaauuuugagu

SEQ ID NO: 1599214 - RNA, 15 nt, Human
acauaaguaauucaa

SEQ ID NO: 1599215 - RNA, 12 nt, Human
aaguagaggagg

SEQ ID NO: 1599216 - RNA, 14 nt, Human
aagggauggcaaga

SEQ ID NO: 1599217 - RNA, 17 nt, Human
aagggauggcaagaugu

SEQ ID NO: 1599218 - RNA, 19 nt, Human
aagccagauuuuccugaaa

SEQ ID NO: 1599219 - RNA, 15 nt, Human
aagagaacuuccaga

SEQ ID NO: 1599220 - RNA, 23 nt, Human
aagacagugaaagaaaauaacaa

SEQ ID NO: 1599221 - RNA, 21 nt, Human
aagacauucuuccaaaaagau

SEQ ID NO: 1599222 - RNA, 14 nt, Human
aagauagcagggca

SEQ ID NO: 1599223 - RNA, 15 nt, Human
aagcagggacuugaa

SEQ ID NO: 1599224 - RNA, 13 nt, Human
aagauuuucagaa

SEQ ID NO: 1599225 - RNA, 16 nt, Human
aauccauacauuugug

SEQ ID NO: 1599226 - RNA, 17 nt, Human
aauccauacauuugugu

SEQ ID NO: 1599227 - RNA, 14 nt, Human
aaugauaacuggaa

SEQ ID NO: 1599228 - RNA, 15 nt, Human
aaugauaacuggaaa

SEQ ID NO: 1599229 - RNA, 16 nt, Human
aaugauaacuggaaac

SEQ ID NO: 1599230 - RNA, 22 nt, Human
aaucaaauaugcaaagcacuga

SEQ ID NO: 1599231 - RNA, 15 nt, Human
aaucaaauaugcaaa

SEQ ID NO: 1599232 - RNA, 16 nt, Human
aaucaaauaugcaaag

SEQ ID NO: 1599233 - RNA, 14 nt, Human
aauaauguuucaaa

SEQ ID NO: 1599234 - RNA, 19 nt, Human
aauaauguuucaaacauau

SEQ ID NO: 1599235 - RNA, 12 nt, Human
aauaauguuuca

SEQ ID NO: 1599236 - RNA, 22 nt, Human
aaguugauaugccuuuucccaa

SEQ ID NO: 1599237 - RNA, 20 nt, Human
aauaaaccucaaaaugucua

SEQ ID NO: 1599238 - RNA, 14 nt, Human
aauaauaaauauuu

SEQ ID NO: 1599239 - RNA, 10 nt, Human
aauaaaccau

SEQ ID NO: 1599240 - RNA, 17 nt, Human
aauaaaccucaaaaugu

SEQ ID NO: 1599241 - RNA, 14 nt, Human
aaaucuuaacuuga

SEQ ID NO: 1599242 - RNA, 20 nt, Human
aaaugcuagguuaauuccaa

SEQ ID NO: 1599243 - RNA, 20 nt, Human
aaauguucaucaaugaauga

SEQ ID NO: 1599244 - RNA, 12 nt, Human
aacacaucagcu

SEQ ID NO: 1599245 - RNA, 21 nt, Human
aaauugauguguuuauuuaua

SEQ ID NO: 1599246 - RNA, 14 nt, Human
aaauugauguguuu

SEQ ID NO: 1599247 - RNA, 23 nt, Human
aacugagaugugaacacaucagc

SEQ ID NO: 1599248 - RNA, 19 nt, Human
aaaauccauacauuugugu

SEQ ID NO: 1599249 - RNA, 18 nt, Human
aaaauuauuuuguucaua

SEQ ID NO: 1599250 - RNA, 16 nt, Human
aaaauuauuuuguuca

SEQ ID NO: 1599251 - RNA, 20 nt, Human
aaaauuauuuuguucauaca

SEQ ID NO: 1599252 - RNA, 13 nt, Human
aaagaaacauuug

SEQ ID NO: 1599253 - RNA, 21 nt, Human
aaacccugucucuacuaaaaa

SEQ ID NO: 1599254 - RNA, 19 nt, Human
aaacccuugccaugugcua

SEQ ID NO: 1599255 - RNA, 22 nt, Human
aaaccucaaaaugucuaagaua

SEQ ID NO: 1599256 - RNA, 17 nt, Human
aaaccucaaaaugucua

SEQ ID NO: 1599257 - RNA, 20 nt, Human
aaagcauuguaaaugugcuu

SEQ ID NO: 1599258 - RNA, 20 nt, Human
aaauaaaaauauuguguugu

SEQ ID NO: 1599259 - RNA, 19 nt, Human
aaauaaaccucaaaauguc

SEQ ID NO: 1599260 - RNA, 20 nt, Human
agggauuagggagagaagau

SEQ ID NO: 1599261 - RNA, 15 nt, Human
agggauuagggagag

SEQ ID NO: 1599262 - RNA, 21 nt, Human
aggccaugggcacugugggua

SEQ ID NO: 1599263 - RNA, 23 nt, Human
aggccaugggcacuguggguaga

SEQ ID NO: 1599264 - RNA, 15 nt, Human
agggacugaggggag

SEQ ID NO: 1599265 - RNA, 18 nt, Human
agcuucacuguaaaauaa

SEQ ID NO: 1599266 - RNA, 20 nt, Human
agcuccccucggagaagagc

SEQ ID NO: 1599267 - RNA, 17 nt, Human
agcuccccucggagaag

SEQ ID NO: 1599268 - RNA, 19 nt, Human
agcuccccucggagaagag

SEQ ID NO: 1599269 - RNA, 12 nt, Human
agcuacaaaugc

SEQ ID NO: 1599270 - RNA, 23 nt, Human
agcuaauguaauaacugugaagu

SEQ ID NO: 1599271 - RNA, 13 nt, Human
agaggaaugaagu

SEQ ID NO: 1599272 - RNA, 18 nt, Human
agacucugucucagucca

SEQ ID NO: 1599273 - RNA, 13 nt, Human
agaagauagcagg

SEQ ID NO: 1599274 - RNA, 18 nt, Human
agaagacugcauuauauu

SEQ ID NO: 1599275 - RNA, 22 nt, Human
agaagagcuguucacagccaga

SEQ ID NO: 1599276 - RNA, 21 nt, Human
agaagugaaaaucuacacucc

SEQ ID NO: 1599277 - RNA, 17 nt, Human
agaaugagagacacacu

SEQ ID NO: 1599278 - RNA, 22 nt, Human
agaaugagagacacacugaaga

SEQ ID NO: 1599279 - RNA, 17 nt, Human
agaaugauuaugaauua

SEQ ID NO: 1599280 - RNA, 19 nt, Human
agacccaaaaggcagaagc

SEQ ID NO: 1599281 - RNA, 24 nt, Human
agcaaaauuuuuucucuaggaaau

SEQ ID NO: 1599282 - RNA, 21 nt, Human
agcaaagcugaugacaacuuc

SEQ ID NO: 1599283 - RNA, 23 nt, Human
agcaaagcugaugacaacuuccc

SEQ ID NO: 1599284 - RNA, 19 nt, Human
agauguagaggagaaacug

SEQ ID NO: 1599285 - RNA, 19 nt, Human
agaugaugaugaucuuuaa

SEQ ID NO: 1599286 - RNA, 14 nt, Human
agaugguucuagca

SEQ ID NO: 1599287 - RNA, 20 nt, Human
aguucagagcugcccucucc

SEQ ID NO: 1599288 - RNA, 22 nt, Human
aguucagagcugcccucuccug

SEQ ID NO: 1599289 - RNA, 21 nt, Human
aguucagagcugcccucuccu

SEQ ID NO: 1599290 - RNA, 23 nt, Human
aguucagagcugcccucuccugg

SEQ ID NO: 1599291 - RNA, 21 nt, Human
aguugaaaagacuccaaagaa

SEQ ID NO: 1599292 - RNA, 18 nt, Human
aguugaaaagacuccaaa

SEQ ID NO: 1599293 - RNA, 19 nt, Human
aguugaaaagacuccaaag

SEQ ID NO: 1599294 - RNA, 20 nt, Human
aguugaaaagacuccaaaga

SEQ ID NO: 1599295 - RNA, 19 nt, Human
agugucaaugcagccccca

SEQ ID NO: 1599296 - RNA, 13 nt, Human
aguacucauacau

SEQ ID NO: 1599297 - RNA, 22 nt, Human
aguaaaugcuagguuaauucca

SEQ ID NO: 1599298 - RNA, 11 nt, Human
aguaaaugcua

SEQ ID NO: 1599299 - RNA, 23 nt, Human
aguaaaugcuagguuaauuccaa

SEQ ID NO: 1599300 - RNA, 19 nt, Human
aguaacaaugaagauaaaa

SEQ ID NO: 1599301 - RNA, 17 nt, Human
aguauuuuugacagaau

SEQ ID NO: 1599302 - RNA, 16 nt, Human
aguauuuuugacagaa

SEQ ID NO: 1599303 - RNA, 18 nt, Human
aguauuuuugacagaaua

SEQ ID NO: 1599304 - RNA, 13 nt, Human
aguauuuuugaca

SEQ ID NO: 1599305 - RNA, 11 nt, Human
aguccaagcau

SEQ ID NO: 1599306 - RNA, 20 nt, Human
agugaauucuugaaggaaaa

SEQ ID NO: 1599307 - RNA, 14 nt, Human
auaacaaugaaagu

SEQ ID NO: 1599308 - RNA, 15 nt, Human
auaacaaugcuguau

SEQ ID NO: 1599309 - RNA, 17 nt, Human
auaacaaugcuguauuu

SEQ ID NO: 1599310 - RNA, 19 nt, Human
auaacaaugcuguauuuua

SEQ ID NO: 1599311 - RNA, 20 nt, Human
auaacaaugcuguauuuuaa

SEQ ID NO: 1599312 - RNA, 21 nt, Human
auaacaaugcuguauuuuaaa

SEQ ID NO: 1599313 - RNA, 20 nt, Human
auaaaaagccugcaauuuca

SEQ ID NO: 1599314 - RNA, 22 nt, Human
auaaaaagccugcaauuucaua

SEQ ID NO: 1599315 - RNA, 13 nt, Human
auaauguuucaaa

SEQ ID NO: 1599316 - RNA, 21 nt, Human
auaagccagacaucaacagau

SEQ ID NO: 1599317 - RNA, 22 nt, Human
auaagccagacaucaacagaua

SEQ ID NO: 1599318 - RNA, 18 nt, Human
auaauguuucaaacauau

SEQ ID NO: 1599319 - RNA, 17 nt, Human
auacccagaaaguuauu

SEQ ID NO: 1599320 - RNA, 18 nt, Human
auagcagcuuauucacaa

SEQ ID NO: 1599321 - RNA, 15 nt, Human
auagcagcuuauuca

SEQ ID NO: 1599322 - RNA, 14 nt, Human
auauuauguuaaaa

SEQ ID NO: 1599323 - RNA, 16 nt, Human
auauuauguuaaaacu

SEQ ID NO: 1599324 - RNA, 13 nt, Human
auauuauguuaaa

SEQ ID NO: 1599325 - RNA, 17 nt, Human
auauuauguguuuccau

SEQ ID NO: 1599326 - RNA, 19 nt, Human
auccucaguuuuugugaaa

SEQ ID NO: 1599327 - RNA, 14 nt, Human
aucaaauaugcaaa

SEQ ID NO: 1599328 - RNA, 15 nt, Human
aucaaauaugcaaag

SEQ ID NO: 1599329 - RNA, 13 nt, Human
aucagcuuauugu

SEQ ID NO: 1599330 - RNA, 22 nt, Human
aucagcuugcccuguuaaaaga

SEQ ID NO: 1599331 - RNA, 17 nt, Human
aucaugaauuaguuuua

SEQ ID NO: 1599332 - RNA, 20 nt, Human
augaaguccaagcauuuaga

SEQ ID NO: 1599333 - RNA, 23 nt, Human
augaaguccaagcauuuagaugu

SEQ ID NO: 1599334 - RNA, 21 nt, Human
augaaguacucauacauguua

SEQ ID NO: 1599335 - RNA, 14 nt, Human
aucuaguaugaaau

SEQ ID NO: 1599336 - RNA, 18 nt, Human
aucuaguaugaaauuaua

SEQ ID NO: 1599337 - RNA, 17 nt, Human
aucuaguaugaaauuau

SEQ ID NO: 1599338 - RNA, 16 nt, Human
aucuaguaugaaauua

SEQ ID NO: 1599339 - RNA, 15 nt, Human
aucuaguaugaaauu

SEQ ID NO: 1599340 - RNA, 19 nt, Human
aucuaguaugaaauuauau

SEQ ID NO: 1599341 - RNA, 18 nt, Human
augaugaucuuuaaaaua

SEQ ID NO: 1599342 - RNA, 21 nt, Human
augaugaucuuuaaaauacac

SEQ ID NO: 1599343 - RNA, 16 nt, Human
augaucuuuaaaauac

SEQ ID NO: 1599344 - RNA, 15 nt, Human
augugaacacaucag

SEQ ID NO: 1599345 - RNA, 21 nt, Human
augucaaucagccuaguugau

SEQ ID NO: 1599346 - RNA, 17 nt, Human
auguuccuagugaaaga

SEQ ID NO: 1599347 - RNA, 15 nt, Human
auguuccuagugaaa

SEQ ID NO: 1599348 - RNA, 16 nt, Human
auguuccuagugaaag

SEQ ID NO: 1599349 - RNA, 15 nt, Human
auguguaaaauguga

SEQ ID NO: 1599350 - RNA, 21 nt, Human
cuggaaaucaggguuaguauu

SEQ ID NO: 1599351 - RNA, 10 nt, Human
cugggacagg

SEQ ID NO: 1599352 - RNA, 19 nt, Human
cugggcagcugccuccccu

SEQ ID NO: 1599353 - RNA, 21 nt, Human
cugggcagcugccuccccucc

SEQ ID NO: 1599354 - RNA, 20 nt, Human
cugggcagcugccuccccuc

SEQ ID NO: 1599355 - RNA, 22 nt, Human
cugggcagcugccuccccuccu

SEQ ID NO: 1599356 - RNA, 23 nt, Human
cugucagcuccccucggagaaga

SEQ ID NO: 1599357 - RNA, 21 nt, Human
cugucagcuccccucggagaa

SEQ ID NO: 1599358 - RNA, 16 nt, Human
cugugagaugcuagaa

SEQ ID NO: 1599359 - RNA, 21 nt, Human
cugugagaugcuagaacuccc

SEQ ID NO: 1599360 - RNA, 18 nt, Human
cugugaaguuuacauugu

SEQ ID NO: 1599361 - RNA, 14 nt, Human
gaaagacuauucaa

SEQ ID NO: 1599362 - RNA, 15 nt, Human
gaaagacuauucaaa

SEQ ID NO: 1599363 - RNA, 17 nt, Human
gaaagacuauucaaaca

SEQ ID NO: 1599364 - RNA, 18 nt, Human
gaaauauuuauuuuaaua

SEQ ID NO: 1599365 - RNA, 22 nt, Human
gaaauauuuauuuuaauaaugu

SEQ ID NO: 1599366 - RNA, 18 nt, Human
gaaaucaaauaugcaaag

SEQ ID NO: 1599367 - RNA, 21 nt, Human
gaaaucaaauaugcaaagcac

SEQ ID NO: 1599368 - RNA, 19 nt, Human
gaaaucaaauaugcaaagc

SEQ ID NO: 1599369 - RNA, 20 nt, Human
gaaaucaaauaugcaaagca

SEQ ID NO: 1599370 - RNA, 17 nt, Human
gaaauauuuauuuuaau

SEQ ID NO: 1599371 - RNA, 22 nt, Human
cuucuaaguaaaaccacagcag

SEQ ID NO: 1599372 - RNA, 23 nt, Human
cuucuaaguaaaaccacagcagu

SEQ ID NO: 1599373 - RNA, 13 nt, Human
cuugaugaagaag

SEQ ID NO: 1599374 - RNA, 12 nt, Human
cuugaugaagaa

SEQ ID NO: 1599375 - RNA, 15 nt, Human
cuucacuguaaaaua

SEQ ID NO: 1599376 - RNA, 20 nt, Human
cuucaugcauagguuuagca

SEQ ID NO: 1599377 - RNA, 21 nt, Human
cuucaucugacuaugacauaa

SEQ ID NO: 1599378 - RNA, 19 nt, Human
cuucaucugacuaugacau

SEQ ID NO: 1599379 - RNA, 20 nt, Human
gauauguaccuaacgaagua

SEQ ID NO: 1599380 - RNA, 16 nt, Human
gaguuuagcuggaaaa

SEQ ID NO: 1599381 - RNA, 14 nt, Human
gaugugaacacauc

SEQ ID NO: 1599382 - RNA, 16 nt, Human
gaugugaacacaucag

SEQ ID NO: 1599383 - RNA, 14 nt, Human
gauuaccagggacu

SEQ ID NO: 1599384 - RNA, 17 nt, Human
gauuagggagagaagau

SEQ ID NO: 1599385 - RNA, 19 nt, Human
gcagggacuugaacccaua

SEQ ID NO: 1599386 - RNA, 22 nt, Human
gcagcugccuccccuccucugc

SEQ ID NO: 1599387 - RNA, 18 nt, Human
gcagcugccuccccuccu

SEQ ID NO: 1599388 - RNA, 17 nt, Human
gcagcugccuccccucc

SEQ ID NO: 1599389 - RNA, 16 nt, Human
gcagcugccuccccuc

SEQ ID NO: 1599390 - RNA, 15 nt, Human
gcagcugccuccccu

SEQ ID NO: 1599391 - RNA, 13 nt, Human
gcagcugccuccc

SEQ ID NO: 1599392 - RNA, 12 nt, Human
gcagcugccucc

SEQ ID NO: 1599393 - RNA, 20 nt, Human
gcacaguuuucugagaaaga

SEQ ID NO: 1599394 - RNA, 18 nt, Human
gcacaguuuucugagaaa

SEQ ID NO: 1599395 - RNA, 14 nt, Human
gcacaguuuucuga

SEQ ID NO: 1599396 - RNA, 17 nt, Human
gcacaguuuucugagaa

SEQ ID NO: 1599397 - RNA, 12 nt, Human
gcacugacagau

SEQ ID NO: 1599398 - RNA, 17 nt, Human
gcacugacagauuucca

SEQ ID NO: 1599399 - RNA, 22 nt, Human
gaaugagagacacacugaagaa

SEQ ID NO: 1599400 - RNA, 23 nt, Human
gaaugagagacacacugaagaag

SEQ ID NO: 1599401 - RNA, 20 nt, Human
gaaugagagacacacugaag

SEQ ID NO: 1599402 - RNA, 16 nt, Human
gacacuuaaaaauggu

SEQ ID NO: 1599403 - RNA, 16 nt, Human
gacagaauauguuuca

SEQ ID NO: 1599404 - RNA, 14 nt, Human
gacagugaaagaaa

SEQ ID NO: 1599405 - RNA, 17 nt, Human
gacagucaccucaugga

SEQ ID NO: 1599406 - RNA, 13 nt, Human
gacacacugaaga

SEQ ID NO: 1599407 - RNA, 12 nt, Human
gacacacaugaa

SEQ ID NO: 1599408 - RNA, 14 nt, Human
gacacacugaagaa

SEQ ID NO: 1599409 - RNA, 11 nt, Human
gaauuaguuuu

SEQ ID NO: 1599410 - RNA, 13 nt, Human
gagcgacagugag

SEQ ID NO: 1599411 - RNA, 13 nt, Human
gacuaugacauaa

SEQ ID NO: 1599412 - RNA, 17 nt, Human
gacucuuaagaagacug

SEQ ID NO: 1599413 - RNA, 18 nt, Human
gacucuuaagaagacugc

SEQ ID NO: 1599414 - RNA, 16 nt, Human
gacucuuaagaagacu

SEQ ID NO: 1599415 - RNA, 15 nt, Human
gagaaucacuugaac

SEQ ID NO: 1599416 - RNA, 14 nt, Human
gagaaucacuugaa

SEQ ID NO: 1599417 - RNA, 22 nt, Human
gagacguuuuuggaagaguagu

SEQ ID NO: 1599418 - RNA, 22 nt, Human
gccaguuauggcuauaggugcu

SEQ ID NO: 1599419 - RNA, 16 nt, Human
gccauaugaaaaggcu

SEQ ID NO: 1599420 - RNA, 21 nt, Human
gccagcaguucagagcugccc

SEQ ID NO: 1599421 - RNA, 20 nt, Human
gccagcaguucagagcugcc

SEQ ID NO: 1599422 - RNA, 19 nt, Human
gccagcaguucagagcugc

SEQ ID NO: 1599423 - RNA, 14 nt, Human
gccagcaguucaga

SEQ ID NO: 1599424 - RNA, 13 nt, Human
gccagcaguucag

SEQ ID NO: 1599425 - RNA, 22 nt, Human
gccaugugcuaguaauuggaaa

SEQ ID NO: 1599426 - RNA, 17 nt, Human
gcuacaaaaacacagca

SEQ ID NO: 1599427 - RNA, 18 nt, Human
gcuacaaaaacacagcaa

SEQ ID NO: 1599428 - RNA, 19 nt, Human
gcuacaaaaacacagcaag

SEQ ID NO: 1599429 - RNA, 15 nt, Human
gcuacugucagcucc

SEQ ID NO: 1599430 - RNA, 17 nt, Human
gcuacuugggaggcuga

SEQ ID NO: 1599431 - RNA, 16 nt, Human
gccuccauccugaggc

SEQ ID NO: 1599432 - RNA, 20 nt, Human
gccuccauccugaggcucca

SEQ ID NO: 1599433 - RNA, 12 nt, Human
gcuguauuuuaa

SEQ ID NO: 1599434 - RNA, 13 nt, Human
gcuguauuuuaaa

SEQ ID NO: 1599435 - RNA, 14 nt, Human
gcuggagcucugcc

SEQ ID NO: 1599436 - RNA, 19 nt, Human
gcuuccuggcaauagucaa

SEQ ID NO: 1599437 - RNA, 20 nt, Human
gcuccacuuggucugugaga

SEQ ID NO: 1599438 - RNA, 21 nt, Human
gcucugcccauccugccccug

SEQ ID NO: 1599439 - RNA, 15 nt, Human
gcucugcccauccug

SEQ ID NO: 1599440 - RNA, 16 nt, Human
gcugaaacaacaaaua

SEQ ID NO: 1599441 - RNA, 22 nt, Human
ggauguugaaaaaguucugcag

SEQ ID NO: 1599442 - RNA, 12 nt, Human
ggauggcaagau

SEQ ID NO: 1599443 - RNA, 22 nt, Human
ggaucuucaucugacuaugaca

SEQ ID NO: 1599444 - RNA, 17 nt, Human
ggcauauuuuucacaua

SEQ ID NO: 1599445 - RNA, 15 nt, Human
ggcauauuuuucaca

SEQ ID NO: 1599446 - RNA, 23 nt, Human
ggccuucggccuccauccugagg

SEQ ID NO: 1599447 - RNA, 13 nt, Human
ggccuccauccug

SEQ ID NO: 1599448 - RNA, 12 nt, Human
gggcagcugccu

SEQ ID NO: 1599449 - RNA, 16 nt, Human
gggauuguaaaauggu

SEQ ID NO: 1599450 - RNA, 17 nt, Human
gggauuguaaaauggug

SEQ ID NO: 1599451 - RNA, 14 nt, Human
aaaaccacagcagu

SEQ ID NO: 1599452 - RNA, 13 nt, Human
aaaaccacagcag

SEQ ID NO: 1599453 - RNA, 13 nt, Human
aaaacucauuuuu

SEQ ID NO: 1599454 - RNA, 17 nt, Human
aaaagaugaaaauauuu

SEQ ID NO: 1599455 - RNA, 12 nt, Human
aaaaccacagca

SEQ ID NO: 1599456 - RNA, 22 nt, Human
aaaaauggaacauaaaauacaa

SEQ ID NO: 1599457 - RNA, 20 nt, Human
gggacauuugcucauggaau

SEQ ID NO: 1599458 - RNA, 21 nt, Human
gggacauuugcucauggaauu

SEQ ID NO: 1599459 - RNA, 19 nt, Human
aaaaauauauuuaaugaua

SEQ ID NO: 1599460 - RNA, 15 nt, Human
aaaaauauauuuaau

SEQ ID NO: 1599461 - RNA, 13 nt, Human
aaaaauauauuua

SEQ ID NO: 1599462 - RNA, 19 nt, Human
aaaaguauguuagugcaaa

SEQ ID NO: 1599463 - RNA, 20 nt, Human
aaacaagcacuaaacaaaga

SEQ ID NO: 1599464 - RNA, 20 nt, Human
aaacagucucaggaaaucaa

SEQ ID NO: 1599465 - RNA, 22 nt, Human
aaaauuuuuucucuaggaaaua

SEQ ID NO: 1599466 - RNA, 15 nt, Human
aaaaugugauaugua

SEQ ID NO: 1599467 - RNA, 12 nt, Human
aaaaugugaagu

SEQ ID NO: 1599468 - RNA, 14 nt, Human
aaagacuauucaaa

SEQ ID NO: 1599469 - RNA, 20 nt, Human
ggguuuuauuguuuaaaauc

SEQ ID NO: 1599470 - RNA, 15 nt, Human
ggugccaguuauggc

SEQ ID NO: 1599471 - RNA, 17 nt, Human
aaagcagggacuugaac

SEQ ID NO: 1599472 - RNA, 17 nt, Human
aaagacuauucaaacag

SEQ ID NO: 1599473 - RNA, 15 nt, Human
aaagacuauucaaac

SEQ ID NO: 1599474 - RNA, 13 nt, Human
aaagauuuucaga

SEQ ID NO: 1599475 - RNA, 16 nt, Human
gguuuagaaagcuugc

SEQ ID NO: 1599476 - RNA, 16 nt, Human
ggugugaccacugcag

SEQ ID NO: 1599477 - RNA, 23 nt, Human
aaaguuauugauaaguucauaca

SEQ ID NO: 1599478 - RNA, 15 nt, Human
aaauaauuuuuauau

SEQ ID NO: 1599479 - RNA, 18 nt, Human
aaauaauuuuuauauuug

SEQ ID NO: 1599480 - RNA, 20 nt, Human
aaauaauuuuuauauuugaa

SEQ ID NO: 1599481 - RNA, 22 nt, Human
guaaaaugugaagugaaugaaa

SEQ ID NO: 1599482 - RNA, 20 nt, Human
guaaaaugugaagugaauga

SEQ ID NO: 1599483 - RNA, 19 nt, Human
guaaaaugugaagugaaug

SEQ ID NO: 1599484 - RNA, 12 nt, Human
guaaaaugugaa

SEQ ID NO: 1599485 - RNA, 17 nt, Human
guaacaaugaagauaaa

SEQ ID NO: 1599486 - RNA, 20 nt, Human
cucuuagaugcaguucugaa

SEQ ID NO: 1599487 - RNA, 21 nt, Human
cucuuagaugcaguucugaag

SEQ ID NO: 1599488 - RNA, 15 nt, Human
cucuuagaugcaguu

SEQ ID NO: 1599489 - RNA, 12 nt, Human
cucucuggccuu

SEQ ID NO: 1599490 - RNA, 11 nt, Human
cucucuggccu

SEQ ID NO: 1599491 - RNA, 14 nt, Human
cucccugcaauaaa

SEQ ID NO: 1599492 - RNA, 16 nt, Human
cucccugcaauaaaau

SEQ ID NO: 1599493 - RNA, 21 nt, Human
cuccagugagacagcucugca

SEQ ID NO: 1599494 - RNA, 15 nt, Human
cgacagugagacucu

SEQ ID NO: 1599495 - RNA, 16 nt, Human
cgacagugagacucug

SEQ ID NO: 1599496 - RNA, 23 nt, Human
cuaguugaucagcuuauugucua

SEQ ID NO: 1599497 - RNA, 16 nt, Human
cuagaacucccuuuca

SEQ ID NO: 1599498 - RNA, 17 nt, Human
cuagaacucccuuucaa

SEQ ID NO: 1599499 - RNA, 18 nt, Human
cuagaacucccuuucaac

SEQ ID NO: 1599500 - RNA, 19 nt, Human
cuagaacucccuuucaaca

SEQ ID NO: 1599501 - RNA, 20 nt, Human
cuaacgaaguauccuucagc

SEQ ID NO: 1599502 - RNA, 20 nt, Human
cuaagugaaauaagccagac

SEQ ID NO: 1599503 - RNA, 23 nt, Human
cuaagugaaauaagccagacauc

SEQ ID NO: 1599504 - RNA, 15 nt, Human
cuacaaaaacacagc

SEQ ID NO: 1599505 - RNA, 18 nt, Human
cuacaugagguacugaga

SEQ ID NO: 1599506 - RNA, 15 nt, Human
cuacaugagguacug

SEQ ID NO: 1599507 - RNA, 22 nt, Human
cuacauaaguaauucaagaaaa

SEQ ID NO: 1599508 - RNA, 23 nt, Human
cuacauaaguaauucaagaaaac

SEQ ID NO: 1599509 - RNA, 17 nt, Human
cccuucuuuccacagaa

SEQ ID NO: 1599510 - RNA, 16 nt, Human
ccguagguuauuuuca

SEQ ID NO: 1599511 - RNA, 15 nt, Human
ccucauguccacugg

SEQ ID NO: 1599512 - RNA, 20 nt, Human
ccucauguccacugguucuu

SEQ ID NO: 1599513 - RNA, 13 nt, Human
ccucugcuugcca

SEQ ID NO: 1599514 - RNA, 17 nt, Human
ccucugcuugccauccc

SEQ ID NO: 1599515 - RNA, 20 nt, Human
cccauauuuguacaccaaua

SEQ ID NO: 1599516 - RNA, 24 nt, Human
cccagccagcaguucagagcugcc

SEQ ID NO: 1599517 - RNA, 16 nt, Human
cccagccagcaguuca

SEQ ID NO: 1599518 - RNA, 20 nt, Human
cccagccagcaguucagagc

SEQ ID NO: 1599519 - RNA, 17 nt, Human
cccagccagcaguucag

SEQ ID NO: 1599520 - RNA, 22 nt, Human
cccauuguggucacaggaagua

SEQ ID NO: 1599521 - RNA, 23 nt, Human
cccauuguggucacaggaaguag

SEQ ID NO: 1599522 - RNA, 23 nt, Human
cccgggaggcagagguugcagug

SEQ ID NO: 1599523 - RNA, 15 nt, Human
ccagauccuggaaau

SEQ ID NO: 1599524 - RNA, 22 nt, Human
cagggaggacgcucucuggccu

SEQ ID NO: 1599525 - RNA, 23 nt, Human
caggacagcccuucuuuccacag

SEQ ID NO: 1599526 - RNA, 24 nt, Human
caggacagcccuucuuuccacaga

SEQ ID NO: 1599527 - RNA, 16 nt, Human
cagcuuauucacaaga

SEQ ID NO: 1599528 - RNA, 17 nt, Human
cagcuuauucacaagac

SEQ ID NO: 1599529 - RNA, 22 nt, Human
caggaaaucaaauaugcaaagc

SEQ ID NO: 1599530 - RNA, 21 nt, Human
caggaaaucaaauaugcaaag

SEQ ID NO: 1599531 - RNA, 19 nt, Human
caggaaaucaaauaugcaa

SEQ ID NO: 1599532 - RNA, 16 nt, Human
cagagguugcagugag

SEQ ID NO: 1599533 - RNA, 22 nt, Human
cagcaguucagagcugcccucu

SEQ ID NO: 1599534 - RNA, 21 nt, Human
cagcaguucagagcugcccuc

SEQ ID NO: 1599535 - RNA, 20 nt, Human
cagcaguucagagcugcccu

SEQ ID NO: 1599536 - RNA, 19 nt, Human
cagcaguucagagcugccc

SEQ ID NO: 1599537 - RNA, 19 nt, Human
cagccccgugggguuccuc

SEQ ID NO: 1599538 - RNA, 23 nt, Human
cagccugagcgacagugagacuc

SEQ ID NO: 1599539 - RNA, 20 nt, Human
caucagcuugcccuguuaaa

SEQ ID NO: 1599540 - RNA, 15 nt, Human
caucagcugcugaaa

SEQ ID NO: 1599541 - RNA, 17 nt, Human
caucagcugcugaaaca

SEQ ID NO: 1599542 - RNA, 18 nt, Human
caucagcugcugaaacaa

SEQ ID NO: 1599543 - RNA, 16 nt, Human
caugaauuaguuuuau

SEQ ID NO: 1599544 - RNA, 17 nt, Human
cauagauucccugagca

SEQ ID NO: 1599545 - RNA, 18 nt, Human
cauagauucccugagcag

SEQ ID NO: 1599546 - RNA, 22 nt, Human
ccaauuauaugagacguuuuug

SEQ ID NO: 1599547 - RNA, 15 nt, Human
cauuaggauggcuag

SEQ ID NO: 1599548 - RNA, 12 nt, Human
cauuuccaagca

SEQ ID NO: 1599549 - RNA, 19 nt, Human
ccaaaaagauuuucagaaa

SEQ ID NO: 1599550 - RNA, 17 nt, Human
cacacaugaaguccaag

SEQ ID NO: 1599551 - RNA, 22 nt, Human
cacacaugaaguccaagcauuu

SEQ ID NO: 1599552 - RNA, 17 nt, Human
cacagccucuuagaugc

SEQ ID NO: 1599553 - RNA, 21 nt, Human
cacagccucuuagaugcaguu

SEQ ID NO: 1599554 - RNA, 15 nt, Human
caaugcuguauuuua

SEQ ID NO: 1599555 - RNA, 16 nt, Human
caaugcuguauuuuaa

SEQ ID NO: 1599556 - RNA, 17 nt, Human
caaugcuguauuuuaaa

SEQ ID NO: 1599557 - RNA, 15 nt, Human
caauucuugccaaau

SEQ ID NO: 1599558 - RNA, 18 nt, Human
cacaagacugcacaucaa

SEQ ID NO: 1599559 - RNA, 14 nt, Human
caaguccaagcaua

SEQ ID NO: 1599560 - RNA, 21 nt, Human
cacugcagaagacaguauggc

SEQ ID NO: 1599561 - RNA, 22 nt, Human
cacuuguguuuugcaagccaga

SEQ ID NO: 1599562 - RNA, 16 nt, Human
cacuugucaauaaaau

SEQ ID NO: 1599563 - RNA, 19 nt, Human
cacuuguguuuugcaagcc

SEQ ID NO: 1599564 - RNA, 22 nt, Human
cacugguucuucuuggucucag

SEQ ID NO: 1599565 - RNA, 16 nt, Human
cacuccagugagacag

SEQ ID NO: 1599566 - RNA, 20 nt, Human
cacuagggcagggacaggau

SEQ ID NO: 1599567 - RNA, 21 nt, Human
cacuagggcagggacaggaua

SEQ ID NO: 1599568 - RNA, 11 nt, Human
cacugacagau

SEQ ID NO: 1599569 - RNA, 19 nt, Human
auuuuauagcuacuaauuu

SEQ ID NO: 1599570 - RNA, 14 nt, Human
auuugcucauggaa

SEQ ID NO: 1599571 - RNA, 17 nt, Human
auuugcucauggaauug

SEQ ID NO: 1599572 - RNA, 15 nt, Human
caaacagucucagga

SEQ ID NO: 1599573 - RNA, 15 nt, Human
caaaaggcagaagca

SEQ ID NO: 1599574 - RNA, 20 nt, Human
caaaaaaaaaaaaaaauuag

SEQ ID NO: 1599575 - RNA, 23 nt, Human
caacacgagcaggcuacugucag

SEQ ID NO: 1599576 - RNA, 15 nt, Human
caaauccuugaagau

SEQ ID NO: 1599577 - RNA, 20 nt, Human
caaagcacugacuucuaagu

SEQ ID NO: 1599578 - RNA, 22 nt, Human
caaagcacugacuucuaaguaa

SEQ ID NO: 1599579 - RNA, 19 nt, Human
auucacaagacccaaaagg

SEQ ID NO: 1599580 - RNA, 18 nt, Human
auuaugaauuacauuugu

SEQ ID NO: 1599581 - RNA, 14 nt, Human
auuaugaauuacau

SEQ ID NO: 1599582 - RNA, 17 nt, Human
auuaugaauuacauuug

SEQ ID NO: 1599583 - RNA, 16 nt, Human
auuagggagagaagau

SEQ ID NO: 1599584 - RNA, 19 nt, Human
auucauagcagcuuauuca

SEQ ID NO: 1599585 - RNA, 22 nt, Human
auucauagcagcuuauucacaa

SEQ ID NO: 1599586 - RNA, 14 nt, Human
auuguaaaauggug

SEQ ID NO: 1599587 - RNA, 14 nt, Human
auuguaaauaguau

SEQ ID NO: 1599588 - RNA, 22 nt, Human
auugauaaguucauacauugua

SEQ ID NO: 1599589 - RNA, 18 nt, Human
auucuugaaggaaaauga

SEQ ID NO: 1599590 - RNA, 15 nt, Human
auucuugaaggaaaa

SEQ ID NO: 1599591 - RNA, 16 nt, Human
uuguauaaaauaauuu

SEQ ID NO: 1599592 - RNA, 15 nt, Human
uuguauaaaauaauu

SEQ ID NO: 1599593 - RNA, 17 nt, Human
uuguauaaaauaauuuu

SEQ ID NO: 1599594 - RNA, 23 nt, Human
uuguaguguuggagaagaacuga

SEQ ID NO: 1599595 - RNA, 19 nt, Human
uuguauaaaauaauuuuua

SEQ ID NO: 1599596 - RNA, 16 nt, Human
uuguaucacaaaucuu

SEQ ID NO: 1599597 - RNA, 13 nt, Human
augagagacacac

SEQ ID NO: 1599598 - RNA, 14 nt, Human
augagagacacacu

SEQ ID NO: 1599599 - RNA, 17 nt, Human
augagagacacacugaa

SEQ ID NO: 1599600 - RNA, 19 nt, Human
augagagacacacugaaga

SEQ ID NO: 1599601 - RNA, 18 nt, Human
augaagauguagaggaga

SEQ ID NO: 1599602 - RNA, 13 nt, Human
augaaugaauggc

SEQ ID NO: 1599603 - RNA, 13 nt, Human
augaaauauuaug

SEQ ID NO: 1599604 - RNA, 17 nt, Human
augaaauauuauguuaa

SEQ ID NO: 1599605 - RNA, 18 nt, Human
augaaauauuauguuaaa

SEQ ID NO: 1599606 - RNA, 15 nt, Human
augaauuaaguuuuu

SEQ ID NO: 1599607 - RNA, 13 nt, Human
aucuuuuucuaac

SEQ ID NO: 1599608 - RNA, 15 nt, Human
augaaagcagggacu

SEQ ID NO: 1599609 - RNA, 13 nt, Human
uugcccuguuaaa

SEQ ID NO: 1599610 - RNA, 18 nt, Human
uugauggugguauguuuu

SEQ ID NO: 1599611 - RNA, 19 nt, Human
uugauggugguauguuuuc

SEQ ID NO: 1599612 - RNA, 20 nt, Human
uugauguguuuauuuauaga

SEQ ID NO: 1599613 - RNA, 11 nt, Human
uugauguguuu

SEQ ID NO: 1599614 - RNA, 13 nt, Human
aucucaauauuuc

SEQ ID NO: 1599615 - RNA, 23 nt, Human
aucucauuuccaagcaaguauua

SEQ ID NO: 1599616 - RNA, 17 nt, Human
aucucauaauuuauaca

SEQ ID NO: 1599617 - RNA, 21 nt, Human
aucucauuuccaagcaaguau

SEQ ID NO: 1599618 - RNA, 18 nt, Human
aucucauaauuuauacag

SEQ ID NO: 1599619 - RNA, 22 nt, Human
uuuagcuggaaaaguauguuag

SEQ ID NO: 1599620 - RNA, 20 nt, Human
uuuagcuggaaaaguauguu

SEQ ID NO: 1599621 - RNA, 13 nt, Human
uuuauauaagcuu

SEQ ID NO: 1599622 - RNA, 22 nt, Human
augcugucuacacuaagagaga

SEQ ID NO: 1599623 - RNA, 16 nt, Human
uuuauuacuguaagaa

SEQ ID NO: 1599624 - RNA, 16 nt, Human
augcuagaacucccuu

SEQ ID NO: 1599625 - RNA, 19 nt, Human
augcuagaacucccuuuca

SEQ ID NO: 1599626 - RNA, 15 nt, Human
augcuagaacucccu

SEQ ID NO: 1599627 - RNA, 20 nt, Human
auggcuaguaucaaaagaaa

SEQ ID NO: 1599628 - RNA, 16 nt, Human
auggaaugcuguguua

SEQ ID NO: 1599629 - RNA, 18 nt, Human
augcaguucugaagaaga

SEQ ID NO: 1599630 - RNA, 19 nt, Human
augcaguucugaagaagau

SEQ ID NO: 1599631 - RNA, 15 nt, Human
augccacuaaauuga

SEQ ID NO: 1599632 - RNA, 17 nt, Human
augccacuaaauugaca

SEQ ID NO: 1599633 - RNA, 15 nt, Human
augcaguucugaaga

SEQ ID NO: 1599634 - RNA, 17 nt, Human
augcaguucugaagaag

SEQ ID NO: 1599635 - RNA, 14 nt, Human
uuguuuucauuauc

SEQ ID NO: 1599636 - RNA, 12 nt, Human
augauucccagc

SEQ ID NO: 1599637 - RNA, 22 nt, Human
augauuaugaauuacauuugua

SEQ ID NO: 1599638 - RNA, 20 nt, Human
augagagacacacugaagaa

SEQ ID NO: 1599639 - RNA, 21 nt, Human
augagagacacacugaagaag

SEQ ID NO: 1599640 - RNA, 23 nt, Human
augagagacacacugaagaagca

SEQ ID NO: 1599641 - RNA, 23 nt, Human
uugugugaaagguacuucaaauc

SEQ ID NO: 1599642 - RNA, 20 nt, Human
uuguguuaaguauguguaaa

SEQ ID NO: 1599643 - RNA, 20 nt, Human
aucaaauaugcaaagcacug

SEQ ID NO: 1599644 - RNA, 21 nt, Human
uucuaaguaaaaccacagcag

SEQ ID NO: 1599645 - RNA, 14 nt, Human
uucuauaauuuaaa

SEQ ID NO: 1599646 - RNA, 13 nt, Human
uucuauaauuuaa

SEQ ID NO: 1599647 - RNA, 13 nt, Human
uucuaagaaguga

SEQ ID NO: 1599648 - RNA, 19 nt, Human
uucuaaguaaaaccacagc

SEQ ID NO: 1599649 - RNA, 20 nt, Human
uucuaaguaaaaccacagca

SEQ ID NO: 1599650 - RNA, 20 nt, Human
uucuaacaaaaaaauauauu

SEQ ID NO: 1599651 - RNA, 19 nt, Human
uucuaacaaaaaaauauau

SEQ ID NO: 1599652 - RNA, 14 nt, Human
auccauacauuugu

SEQ ID NO: 1599653 - RNA, 20 nt, Human
aucauuucugcaucagcugc

SEQ ID NO: 1599654 - RNA, 19 nt, Human
uugaaauauugacuuuuua

SEQ ID NO: 1599655 - RNA, 18 nt, Human
uugaacccgggaggcaga

SEQ ID NO: 1599656 - RNA, 20 nt, Human
auccuagucacuaccuucau

SEQ ID NO: 1599657 - RNA, 17 nt, Human
auaggcguaacuaauuu

SEQ ID NO: 1599658 - RNA, 23 nt, Human
uucacaagacccaaaaggcagaa

SEQ ID NO: 1599659 - RNA, 14 nt, Human
uucaaacauauaua

SEQ ID NO: 1599660 - RNA, 18 nt, Human
uucaaacagucucaggaa

SEQ ID NO: 1599661 - RNA, 17 nt, Human
uuauuuuguucauacau

SEQ ID NO: 1599662 - RNA, 21 nt, Human
uuauuuuguucauacauauuu

SEQ ID NO: 1599663 - RNA, 14 nt, Human
auauauaacaaugc

SEQ ID NO: 1599664 - RNA, 20 nt, Human
auaguuguaccgcaauguga

SEQ ID NO: 1599665 - RNA, 13 nt, Human
auagucuuucagu

SEQ ID NO: 1599666 - RNA, 18 nt, Human
uucccaacuccagaaagu

SEQ ID NO: 1599667 - RNA, 12 nt, Human
uucccaaauuuc

SEQ ID NO: 1599668 - RNA, 15 nt, Human
auauauuuaaugaua

SEQ ID NO: 1599669 - RNA, 13 nt, Human
auauauuuaauga

SEQ ID NO: 1599670 - RNA, 19 nt, Human
uucauacauuguacgaaga

SEQ ID NO: 1599671 - RNA, 13 nt, Human
uucauacauugua

SEQ ID NO: 1599672 - RNA, 13 nt, Human
uucauaugcugua

SEQ ID NO: 1599673 - RNA, 23 nt, Human
uucauacauauuuuuguagcacu

SEQ ID NO: 1599674 - RNA, 12 nt, Human
uucauacauauu

SEQ ID NO: 1599675 - RNA, 13 nt, Human
auaucuuguagcu

SEQ ID NO: 1599676 - RNA, 17 nt, Human
auaucuaguaugaaauu

SEQ ID NO: 1599677 - RNA, 15 nt, Human
auaucuaguaugaaa

SEQ ID NO: 1599678 - RNA, 14 nt, Human
auaucuaguaugaa

SEQ ID NO: 1599679 - RNA, 19 nt, Human
auuuguaguguuggagaag

SEQ ID NO: 1599680 - RNA, 15 nt, Human
auuuguaucacaaau

SEQ ID NO: 1599681 - RNA, 14 nt, Human
auuuuaauaauguu

SEQ ID NO: 1599682 - RNA, 15 nt, Human
auuuuaauaauguuu

SEQ ID NO: 1599683 - RNA, 16 nt, Human
auuuuaauaauguuuc

SEQ ID NO: 1599684 - RNA, 22 nt, Human
auuuauuacuguaagaaaauau

SEQ ID NO: 1599685 - RNA, 18 nt, Human
auuuguaguguuggagaa

SEQ ID NO: 1599686 - RNA, 23 nt, Human
auuugguaaggggaauugaggac

SEQ ID NO: 1599687 - RNA, 21 nt, Human
auuuggagacacaacuauuuu

SEQ ID NO: 1599688 - RNA, 20 nt, Human
auuuggagacacaacuauuu

SEQ ID NO: 1599689 - RNA, 20 nt, Human
auugacacuuaaaaaugguu

SEQ ID NO: 1599690 - RNA, 16 nt, Human
auuuacaaaugggaaa

SEQ ID NO: 1599691 - RNA, 19 nt, Human
auuuaaagcuuauuaaaac

SEQ ID NO: 1599692 - RNA, 15 nt, Human
auuguauuacaaauc

SEQ ID NO: 1599693 - RNA, 14 nt, Human
auuguauuacaaau

SEQ ID NO: 1599694 - RNA, 13 nt, Human
auugugccccugc

SEQ ID NO: 1599695 - RNA, 21 nt, Human
auugcuaaucaccaaaggcuc

SEQ ID NO: 1599696 - RNA, 20 nt, Human
auuccacuuauaggaauuga

SEQ ID NO: 1599697 - RNA, 14 nt, Human
auucaaacagucuc

SEQ ID NO: 1599698 - RNA, 15 nt, Human
auucaaacagucuca

SEQ ID NO: 1599699 - RNA, 16 nt, Human
auucaaacagucucag

SEQ ID NO: 1599700 - RNA, 16 nt, Human
auuauauuuacaaaug

SEQ ID NO: 1599701 - RNA, 18 nt, Human
auuaucucaaaacugcac

SEQ ID NO: 1599702 - RNA, 23 nt, Human
auuaucucaaaacugcacuguca

SEQ ID NO: 1599703 - RNA, 17 nt, Human
auuauauuuacaaaugg

SEQ ID NO: 1599704 - RNA, 20 nt, Human
auuauuaccuuacagaaguu

SEQ ID NO: 1599705 - RNA, 13 nt, Human
auuacauuuguau

SEQ ID NO: 1599706 - RNA, 15 nt, Human
auuacauuuguauaa

SEQ ID NO: 1599707 - RNA, 16 nt, Human
auuacauuuguauaaa

SEQ ID NO: 1599708 - RNA, 12 nt, Human
auuaccagggac

SEQ ID NO: 1599709 - RNA, 23 nt, Human
uuuuuuaaaaaagaaacauuugg

SEQ ID NO: 1599710 - RNA, 13 nt, Human
auuaaguaaugau

SEQ ID NO: 1599711 - RNA, 15 nt, Human
auuaaguaaugauaa

SEQ ID NO: 1599712 - RNA, 21 nt, Human
auuaaguaaugauaacuggaa

SEQ ID NO: 1599713 - RNA, 15 nt, Human
auuaauauauuucca

SEQ ID NO: 1599714 - RNA, 22 nt, Human
uuuuauggcacuaguauuucua

SEQ ID NO: 1599715 - RNA, 19 nt, Human
uuuuauggcacuaguauuu

SEQ ID NO: 1599716 - RNA, 23 nt, Human
uuuuauggaggcuuugcauagau

SEQ ID NO: 1599717 - RNA, 14 nt, Human
uuuuauaauuuugu

SEQ ID NO: 1599718 - RNA, 15 nt, Human
auguugacaugggac

SEQ ID NO: 1599719 - RNA, 19 nt, Human
auguucaucaaugaaugaa

SEQ ID NO: 1599720 - RNA, 16 nt, Human
auuaaaagaauauuuu

SEQ ID NO: 1599721 - RNA, 20 nt, Human
auuaaaaaaucaguuguaca

SEQ ID NO: 1599722 - RNA, 18 nt, Human
auguuucaaacauauaua

SEQ ID NO: 1599723 - RNA, 21 nt, Human
auguuucaaacauauauaaca

SEQ ID NO: 1599724 - RNA, 15 nt, Human
auguugugauguauu

SEQ ID NO: 1599725 - RNA, 16 nt, Human
auguccacugguucuu

SEQ ID NO: 1599726 - RNA, 11 nt, Human
uuugcucaugg

SEQ ID NO: 1599727 - RNA, 12 nt, Human
uuugcucaugga

SEQ ID NO: 1599728 - RNA, 15 nt, Human
auggcuauaggugcu

SEQ ID NO: 1599729 - RNA, 13 nt, Human
uuugcucauggaa

SEQ ID NO: 1599730 - RNA, 14 nt, Human
uuuuaaaagaauga

SEQ ID NO: 1599731 - RNA, 15 nt, Human
uuuuaaaagaaugau

SEQ ID NO: 1599732 - RNA, 13 nt, Human
uuuuaaaaaagaa

SEQ ID NO: 1599733 - RNA, 11 nt, Human
uuuuaagaaau

SEQ ID NO: 1599734 - RNA, 19 nt, Human
uuuguagcacugacagauu

SEQ ID NO: 1599735 - RNA, 17 nt, Human
uuuguagcacugacaga

SEQ ID NO: 1599736 - RNA, 18 nt, Human
auaauccuaaacauauga

SEQ ID NO: 1599737 - RNA, 14 nt, Human
uuagggagagaaga

SEQ ID NO: 1599738 - RNA, 22 nt, Human
auaacgauaaaagacagugaaa

SEQ ID NO: 1599739 - RNA, 13 nt, Human
auaacugugaagu

SEQ ID NO: 1599740 - RNA, 13 nt, Human
auaaauaaaaaua

SEQ ID NO: 1599741 - RNA, 14 nt, Human
auaaauaaaaauaa

SEQ ID NO: 1599742 - RNA, 15 nt, Human
auaaauaguuuauga

SEQ ID NO: 1599743 - RNA, 18 nt, Human
auaaauauuuuugccaua

SEQ ID NO: 1599744 - RNA, 12 nt, Human
auaaaauaauuu

SEQ ID NO: 1599745 - RNA, 15 nt, Human
auaaaauaauuuuua

SEQ ID NO: 1599746 - RNA, 19 nt, Human
aguuuucugagaaagacua

SEQ ID NO: 1599747 - RNA, 23 nt, Human
aguuuucugagaaagacuauuca

SEQ ID NO: 1599748 - RNA, 20 nt, Human
uuaagaagacugcauuauau

SEQ ID NO: 1599749 - RNA, 14 nt, Human
uuaaguauguguaa

SEQ ID NO: 1599750 - RNA, 13 nt, Human
uguuucaaacaua

SEQ ID NO: 1599751 - RNA, 14 nt, Human
aguuuaaauuguaa

SEQ ID NO: 1599752 - RNA, 23 nt, Human
aguguuggagaagaacugaaauc

SEQ ID NO: 1599753 - RNA, 17 nt, Human
aguguuggagaagaacu

SEQ ID NO: 1599754 - RNA, 18 nt, Human
aguguuggagaagaacug

SEQ ID NO: 1599755 - RNA, 14 nt, Human
aguguuggagaaga

SEQ ID NO: 1599756 - RNA, 16 nt, Human
aguguuggagaagaac

SEQ ID NO: 1599757 - RNA, 14 nt, Human
aguucagagcugcc

SEQ ID NO: 1599758 - RNA, 19 nt, Human
aguucggugagcuacaaau

SEQ ID NO: 1599759 - RNA, 20 nt, Human
aguucggugagcuacaaaug

SEQ ID NO: 1599760 - RNA, 15 nt, Human
aguucuacauaagua

SEQ ID NO: 1599761 - RNA, 20 nt, Human
uguugugauguauucuagcu

SEQ ID NO: 1599762 - RNA, 14 nt, Human
uguugugauguauu

SEQ ID NO: 1599763 - RNA, 13 nt, Human
uguugugaauguu

SEQ ID NO: 1599764 - RNA, 12 nt, Human
uguugugaaugu

SEQ ID NO: 1599765 - RNA, 22 nt, Human
agugcaaauugucacaggacag

SEQ ID NO: 1599766 - RNA, 18 nt, Human
agugcaaauugucacagg

SEQ ID NO: 1599767 - RNA, 21 nt, Human
agugcaaauugucacaggaca

SEQ ID NO: 1599768 - RNA, 21 nt, Human
agugccuguaaucacagcuac

SEQ ID NO: 1599769 - RNA, 13 nt, Human
uguguugugaaug

SEQ ID NO: 1599770 - RNA, 16 nt, Human
agucaggaaagagaac

SEQ ID NO: 1599771 - RNA, 15 nt, Human
agucaggaaagagaa

SEQ ID NO: 1599772 - RNA, 20 nt, Human
ugucaaucagccuaguugau

SEQ ID NO: 1599773 - RNA, 21 nt, Human
ugucaauaaaauccauacauu

SEQ ID NO: 1599774 - RNA, 23 nt, Human
ugucauuugcuggagcucugccc

SEQ ID NO: 1599775 - RNA, 22 nt, Human
aguauuucuaugaaauauuaug

SEQ ID NO: 1599776 - RNA, 16 nt, Human
aguauuugagaguucu

SEQ ID NO: 1599777 - RNA, 13 nt, Human
aguauuucuauga

SEQ ID NO: 1599778 - RNA, 15 nt, Human
aguauuucuaugaaa

SEQ ID NO: 1599779 - RNA, 14 nt, Human
aguauguguaaaau

SEQ ID NO: 1599780 - RNA, 17 nt, Human
uguaagaaaauaucacu

SEQ ID NO: 1599781 - RNA, 14 nt, Human
agguugcagugagc

SEQ ID NO: 1599782 - RNA, 15 nt, Human
aguaaaaccacagca

SEQ ID NO: 1599783 - RNA, 18 nt, Human
uguagaggagaaacugga

SEQ ID NO: 1599784 - RNA, 19 nt, Human
aguagauaggccaugggca

SEQ ID NO: 1599785 - RNA, 19 nt, Human
aguagaacagauaaucagu

SEQ ID NO: 1599786 - RNA, 13 nt, Human
aguagaacagaua

SEQ ID NO: 1599787 - RNA, 14 nt, Human
ugggaguacaaaag

SEQ ID NO: 1599788 - RNA, 17 nt, Human
agggcagggacaggaua

SEQ ID NO: 1599789 - RNA, 20 nt, Human
ugguaaggggaauugaggac

SEQ ID NO: 1599790 - RNA, 17 nt, Human
aggguuaugauuaagua

SEQ ID NO: 1599791 - RNA, 23 nt, Human
agguacuucaaauccuugaagau

SEQ ID NO: 1599792 - RNA, 19 nt, Human
aggucauauuaauauauuu

SEQ ID NO: 1599793 - RNA, 18 nt, Human
aggucauauuaauauauu

SEQ ID NO: 1599794 - RNA, 23 nt, Human
aggacagcccuucuuuccacaga

SEQ ID NO: 1599795 - RNA, 14 nt, Human
uggagcucguggaa

SEQ ID NO: 1599796 - RNA, 14 nt, Human
uggagaagaacuga

SEQ ID NO: 1599797 - RNA, 13 nt, Human
uggagaagaacug

SEQ ID NO: 1599798 - RNA, 18 nt, Human
uggcacaguuuucugaga

SEQ ID NO: 1599799 - RNA, 19 nt, Human
uggcacaguuuucugagaa

SEQ ID NO: 1599800 - RNA, 20 nt, Human
uggcacaguuuucugagaaa

SEQ ID NO: 1599801 - RNA, 14 nt, Human
uggccuucggccuc

SEQ ID NO: 1599802 - RNA, 17 nt, Human
uggcauauuuuucacau

SEQ ID NO: 1599803 - RNA, 16 nt, Human
uggcauauuuuucaca

SEQ ID NO: 1599804 - RNA, 16 nt, Human
agcuguucacagccag

SEQ ID NO: 1599805 - RNA, 19 nt, Human
agcuguucacagccagacu

SEQ ID NO: 1599806 - RNA, 22 nt, Human
agcugcccucuccugggcagcu

SEQ ID NO: 1599807 - RNA, 15 nt, Human
agcugccuccccucc

SEQ ID NO: 1599808 - RNA, 17 nt, Human
agcugccuccccuccuc

SEQ ID NO: 1599809 - RNA, 16 nt, Human
agcugccuccccuccu

SEQ ID NO: 1599810 - RNA, 20 nt, Human
ugcuacaaaaacacagcaag

SEQ ID NO: 1599811 - RNA, 16 nt, Human
ugcuacaaaaacacag

SEQ ID NO: 1599812 - RNA, 17 nt, Human
ugcuacaaaaacacagc

SEQ ID NO: 1599813 - RNA, 18 nt, Human
ugcuacaaaaacacagca

SEQ ID NO: 1599814 - RNA, 19 nt, Human
ugcuacaaaaacacagcaa

SEQ ID NO: 1599815 - RNA, 17 nt, Human
agcuugaaacugagaug

SEQ ID NO: 1599816 - RNA, 21 nt, Human
ugcuguauuuuaaaagaauga

SEQ ID NO: 1599817 - RNA, 22 nt, Human
ugcuguauuuuaaaagaaugau

SEQ ID NO: 1599818 - RNA, 13 nt, Human
ugcuguauuuuaa

SEQ ID NO: 1599819 - RNA, 23 nt, Human
ugcuguauuuuaaaagaaugauu

SEQ ID NO: 1599820 - RNA, 13 nt, Human
aggaaauauuuau

SEQ ID NO: 1599821 - RNA, 12 nt, Human
aggaaauauuua

SEQ ID NO: 1599822 - RNA, 14 nt, Human
ugcucauggaauug

SEQ ID NO: 1599823 - RNA, 23 nt, Human
agcuuuaucaaagggugaaaauu

SEQ ID NO: 1599824 - RNA, 18 nt, Human
agcccauggcacucuaug

SEQ ID NO: 1599825 - RNA, 17 nt, Human
agcccuucuuuccacag

SEQ ID NO: 1599826 - RNA, 20 nt, Human
agccucauguccacugguuc

SEQ ID NO: 1599827 - RNA, 15 nt, Human
agccucauguccacu

SEQ ID NO: 1599828 - RNA, 22 nt, Human
agccugaaagaggaaugaagua

SEQ ID NO: 1599829 - RNA, 19 nt, Human
agcuacuaauuuuaaaaug

SEQ ID NO: 1599830 - RNA, 17 nt, Human
agcuacuugggaggcug

SEQ ID NO: 1599831 - RNA, 18 nt, Human
agcuacuugggaggcuga

SEQ ID NO: 1599832 - RNA, 20 nt, Human
agccuuggggcugaugcagu

SEQ ID NO: 1599833 - RNA, 19 nt, Human
agccagacuggcacaguuu

SEQ ID NO: 1599834 - RNA, 14 nt, Human
agccagacuggcac

SEQ ID NO: 1599835 - RNA, 15 nt, Human
ugauggugguauguu

SEQ ID NO: 1599836 - RNA, 14 nt, Human
ugaugaucuuuaaa

SEQ ID NO: 1599837 - RNA, 17 nt, Human
ugaugaucuuuaaaaua

SEQ ID NO: 1599838 - RNA, 12 nt, Human
ugauuaaaccaa

SEQ ID NO: 1599839 - RNA, 16 nt, Human
ugauuaccagggacug

SEQ ID NO: 1599840 - RNA, 14 nt, Human
ugauuaccagggac

SEQ ID NO: 1599841 - RNA, 17 nt, Human
ugaugaagaaguugaua

SEQ ID NO: 1599842 - RNA, 23 nt, Human
agcauaaauguugacaugggaca

SEQ ID NO: 1599843 - RNA, 22 nt, Human
ugaguaacugauuuguaacaag

SEQ ID NO: 1599844 - RNA, 18 nt, Human
ugagugucuuaauuaaaa

SEQ ID NO: 1599845 - RNA, 12 nt, Human
ugauaaguaaau

SEQ ID NO: 1599846 - RNA, 19 nt, Human
ugauacgcaacauaauuaa

SEQ ID NO: 1599847 - RNA, 12 nt, Human
ugauaugggucu

SEQ ID NO: 1599848 - RNA, 20 nt, Human
agcaucacaugaacuuguaa

SEQ ID NO: 1599849 - RNA, 17 nt, Human
agcauuguaaaugugcu

SEQ ID NO: 1599850 - RNA, 18 nt, Human
agcauuguaaaugugcuu

SEQ ID NO: 1599851 - RNA, 20 nt, Human
agcaugucgucaaagcugaa

SEQ ID NO: 1599852 - RNA, 17 nt, Human
agcaugucgucaaagcu

SEQ ID NO: 1599853 - RNA, 22 nt, Human
agcauggcauauuuuucacaua

SEQ ID NO: 1599854 - RNA, 21 nt, Human
agcauggcauauuuuucacau

SEQ ID NO: 1599855 - RNA, 19 nt, Human
agcauggcauauuuuucac

SEQ ID NO: 1599856 - RNA, 18 nt, Human
agcauggcauauuuuuca

SEQ ID NO: 1599857 - RNA, 23 nt, Human
agcaacgcaggcccccaggugcc

SEQ ID NO: 1599858 - RNA, 15 nt, Human
agauucccugagcag

SEQ ID NO: 1599859 - RNA, 15 nt, Human
ugacuucuaaguaaa

SEQ ID NO: 1599860 - RNA, 22 nt, Human
ugacuucuaaguaaaaccacag

SEQ ID NO: 1599861 - RNA, 23 nt, Human
ugacuucuaaguaaaaccacagc

SEQ ID NO: 1599862 - RNA, 24 nt, Human
ugacuucuaaguaaaaccacagca

SEQ ID NO: 1599863 - RNA, 16 nt, Human
agaugcaguucugaag

SEQ ID NO: 1599864 - RNA, 17 nt, Human
agaugcaguucugaaga

SEQ ID NO: 1599865 - RNA, 17 nt, Human
ugacacuuaaaaauggu

SEQ ID NO: 1599866 - RNA, 15 nt, Human
agauggaaugcugug

SEQ ID NO: 1599867 - RNA, 13 nt, Human
agauggaaugcug

SEQ ID NO: 1599868 - RNA, 18 nt, Human
agauggaaugcuguguua

SEQ ID NO: 1599869 - RNA, 20 nt, Human
agaguauuuuugacagaaua

SEQ ID NO: 1599870 - RNA, 15 nt, Human
ugaauacuuuauaaa

SEQ ID NO: 1599871 - RNA, 18 nt, Human
agaguauuuuugacagaa

SEQ ID NO: 1599872 - RNA, 17 nt, Human
agaguauuuuugacaga

SEQ ID NO: 1599873 - RNA, 23 nt, Human
ugaaaguacauuuggagacacaa

SEQ ID NO: 1599874 - RNA, 14 nt, Human
ugaaaguacauuug

SEQ ID NO: 1599875 - RNA, 15 nt, Human
agaguauuuuugaca

SEQ ID NO: 1599876 - RNA, 14 nt, Human
agaguauuuuugac

SEQ ID NO: 1599877 - RNA, 19 nt, Human
ugaaacucguuaauuugua

SEQ ID NO: 1599878 - RNA, 22 nt, Human
ugaaacugagaugugaacacau

SEQ ID NO: 1599879 - RNA, 20 nt, Human
ugaaaaucuuauaauuuaaa

SEQ ID NO: 1599880 - RNA, 22 nt, Human
ugaaaaaguucugcagauaaac

SEQ ID NO: 1599881 - RNA, 22 nt, Human
ugaaaaagaccuuuggagcaaa

SEQ ID NO: 1599882 - RNA, 14 nt, Human
agagagaaaauaaa

SEQ ID NO: 1599883 - RNA, 14 nt, Human
agaaucacuugaac

SEQ ID NO: 1599884 - RNA, 15 nt, Human
ucuucacaacagauu

SEQ ID NO: 1599885 - RNA, 21 nt, Human
agacauagaauuaacacauga

SEQ ID NO: 1599886 - RNA, 17 nt, Human
agacaucaacagauaaa

SEQ ID NO: 1599887 - RNA, 18 nt, Human
agacaucaacagauaaau

SEQ ID NO: 1599888 - RNA, 19 nt, Human
agacauucuuccaaaaaga

SEQ ID NO: 1599889 - RNA, 16 nt, Human
agacuauucaaacagu

SEQ ID NO: 1599890 - RNA, 15 nt, Human
agacuauucaaacag

SEQ ID NO: 1599891 - RNA, 12 nt, Human
agacuauucaaa

SEQ ID NO: 1599892 - RNA, 14 nt, Human
agacuauucaaaca

SEQ ID NO: 1599893 - RNA, 15 nt, Human
ucuuuaacucauaaa

SEQ ID NO: 1599894 - RNA, 19 nt, Human
agaagcaccaaucaugaau

SEQ ID NO: 1599895 - RNA, 20 nt, Human
ucugcccauccugccccuga

SEQ ID NO: 1599896 - RNA, 17 nt, Human
agaacucccuuucaaca

SEQ ID NO: 1599897 - RNA, 16 nt, Human
agaacucccuuucaac

SEQ ID NO: 1599898 - RNA, 10 nt, Human
ucuggccuuc

SEQ ID NO: 1599899 - RNA, 13 nt, Human
agaaguugauaug

SEQ ID NO: 1599900 - RNA, 16 nt, Human
agaaggaucuucaucu

SEQ ID NO: 1599901 - RNA, 20 nt, Human
agaaagcagaacagugauua

SEQ ID NO: 1599902 - RNA, 17 nt, Human
agaaagcagaacaguga

SEQ ID NO: 1599903 - RNA, 18 nt, Human
agaaagcagaacagugau

SEQ ID NO: 1599904 - RNA, 18 nt, Human
agaaagacuauucaaaca

SEQ ID NO: 1599905 - RNA, 16 nt, Human
agaaagacuauucaaa

SEQ ID NO: 1599906 - RNA, 16 nt, Human
agaaaacaaggaugaa

SEQ ID NO: 1599907 - RNA, 16 nt, Human
agaaacacaacuauau

SEQ ID NO: 1599908 - RNA, 23 nt, Human
agaaacuuaagguuaccuuuguu

SEQ ID NO: 1599909 - RNA, 15 nt, Human
agaaacauuugguaa

SEQ ID NO: 1599910 - RNA, 23 nt, Human
acugucagcuccccucggagaag

SEQ ID NO: 1599911 - RNA, 22 nt, Human
acugaagaagcaccaaucauga

SEQ ID NO: 1599912 - RNA, 13 nt, Human
acuguggguagac

SEQ ID NO: 1599913 - RNA, 17 nt, Human
ucuaccaaaaaucucaa

SEQ ID NO: 1599914 - RNA, 21 nt, Human
ucuaagauaguaacaaugaag

SEQ ID NO: 1599915 - RNA, 23 nt, Human
acuugaacccgggaggcagaggu

SEQ ID NO: 1599916 - RNA, 17 nt, Human
ucucaaaacugcacugu

SEQ ID NO: 1599917 - RNA, 13 nt, Human
acuucuaaguaaa

SEQ ID NO: 1599918 - RNA, 18 nt, Human
acuucuaaguaaaaccac

SEQ ID NO: 1599919 - RNA, 19 nt, Human
acuucuaaguaaaaccaca

SEQ ID NO: 1599920 - RNA, 21 nt, Human
acuucuaaguaaaaccacagc

SEQ ID NO: 1599921 - RNA, 22 nt, Human
acuucccuuucugcuuguguua

SEQ ID NO: 1599922 - RNA, 14 nt, Human
acuucccuuucugc

SEQ ID NO: 1599923 - RNA, 20 nt, Human
acuuccagauccuggaaauc

SEQ ID NO: 1599924 - RNA, 13 nt, Human
ucuauaauuuaaa

SEQ ID NO: 1599925 - RNA, 17 nt, Human
acuucccagugaauucu

SEQ ID NO: 1599926 - RNA, 18 nt, Human
ucuagcauggcauauuuu

SEQ ID NO: 1599927 - RNA, 17 nt, Human
ucuagcauggcauauuu

SEQ ID NO: 1599928 - RNA, 15 nt, Human
acccgggaggcagag

SEQ ID NO: 1599929 - RNA, 16 nt, Human
acccaaauguucauca

SEQ ID NO: 1599930 - RNA, 20 nt, Human
acccaaauguucaucaauga

SEQ ID NO: 1599931 - RNA, 14 nt, Human
ucagagcugcccuc

SEQ ID NO: 1599932 - RNA, 13 nt, Human
ucagagcugcccu

SEQ ID NO: 1599933 - RNA, 16 nt, Human
ucagagcugcccucuc

SEQ ID NO: 1599934 - RNA, 15 nt, Human
ucagagcugcccucu

SEQ ID NO: 1599935 - RNA, 17 nt, Human
ucagagcugcccucucc

SEQ ID NO: 1599936 - RNA, 18 nt, Human
ucagagcugcccucuccu

SEQ ID NO: 1599937 - RNA, 16 nt, Human
ucacagaccuuugaac

SEQ ID NO: 1599938 - RNA, 12 nt, Human
ucaauuuaaaaa

SEQ ID NO: 1599939 - RNA, 13 nt, Human
ucaauuuaaaaaa

SEQ ID NO: 1599940 - RNA, 17 nt, Human
ucacagccagacuggca

SEQ ID NO: 1599941 - RNA, 23 nt, Human
ucacagccagacuggcacaguuu

SEQ ID NO: 1599942 - RNA, 14 nt, Human
ucacaggaaguaga

SEQ ID NO: 1599943 - RNA, 16 nt, Human
accacaagacugcaca

SEQ ID NO: 1599944 - RNA, 14 nt, Human
accaacacgagcag

SEQ ID NO: 1599945 - RNA, 19 nt, Human
accaacacgagcaggcuac

SEQ ID NO: 1599946 - RNA, 23 nt, Human
accaaaaaucucaauauuucaga

SEQ ID NO: 1599947 - RNA, 18 nt, Human
accaaauaaaaauauugu

SEQ ID NO: 1599948 - RNA, 16 nt, Human
accaaauaaaaauauu

SEQ ID NO: 1599949 - RNA, 23 nt, Human
ucaauauuucagauaaucacaau

SEQ ID NO: 1599950 - RNA, 21 nt, Human
acauuguaaauaguauuugag

SEQ ID NO: 1599951 - RNA, 19 nt, Human
acauuguaaauaguauuug

SEQ ID NO: 1599952 - RNA, 17 nt, Human
acauuguaaauaguauu

SEQ ID NO: 1599953 - RNA, 19 nt, Human
acauuguacgaagaguauu

SEQ ID NO: 1599954 - RNA, 16 nt, Human
acaugagguacugaga

SEQ ID NO: 1599955 - RNA, 13 nt, Human
ucaaacagucuca

SEQ ID NO: 1599956 - RNA, 20 nt, Human
ucaaacagucucaggaaauc

SEQ ID NO: 1599957 - RNA, 21 nt, Human
ucaaacagucucaggaaauca

SEQ ID NO: 1599958 - RNA, 19 nt, Human
uauuuuuguagcacugaca

SEQ ID NO: 1599959 - RNA, 15 nt, Human
uauuuuuguagcacu

SEQ ID NO: 1599960 - RNA, 19 nt, Human
uauuuuaauaauguuucaa

SEQ ID NO: 1599961 - RNA, 22 nt, Human
uauuuuaauaauguuucaaaca

SEQ ID NO: 1599962 - RNA, 13 nt, Human
uauuuuuguagca

SEQ ID NO: 1599963 - RNA, 13 nt, Human
uauuuuucacaua

SEQ ID NO: 1599964 - RNA, 12 nt, Human
uauuuuucacau

SEQ ID NO: 1599965 - RNA, 16 nt, Human
uauuuuguucauacau

SEQ ID NO: 1599966 - RNA, 15 nt, Human
uauuuuguucauaca

SEQ ID NO: 1599967 - RNA, 14 nt, Human
uauuuuaaaagaau

SEQ ID NO: 1599968 - RNA, 18 nt, Human
uauuuuaaaagaaugauu

SEQ ID NO: 1599969 - RNA, 17 nt, Human
uauguguaaaaugugaa

SEQ ID NO: 1599970 - RNA, 14 nt, Human
uauguguaaaaugu

SEQ ID NO: 1599971 - RNA, 20 nt, Human
acuagaguuuagcuggaaaa

SEQ ID NO: 1599972 - RNA, 13 nt, Human
acuauucaaacag

SEQ ID NO: 1599973 - RNA, 14 nt, Human
acuauucaaacagu

SEQ ID NO: 1599974 - RNA, 16 nt, Human
acuauucaaacagucu

SEQ ID NO: 1599975 - RNA, 18 nt, Human
acuauucaaacagucuca

SEQ ID NO: 1599976 - RNA, 22 nt, Human
acuaugacauaaaaacaacuuu

SEQ ID NO: 1599977 - RNA, 24 nt, Human
uccccuccucugcuugccaucccu

SEQ ID NO: 1599978 - RNA, 18 nt, Human
uccccuccucugcuugcc

SEQ ID NO: 1599979 - RNA, 15 nt, Human
uccccuccucugcuu

SEQ ID NO: 1599980 - RNA, 19 nt, Human
ucccuccaccucccugcaa

SEQ ID NO: 1599981 - RNA, 17 nt, Human
ucccuccaccucccugc

SEQ ID NO: 1599982 - RNA, 15 nt, Human
ucccuccaccucccu

SEQ ID NO: 1599983 - RNA, 14 nt, Human
ucccuccaccuccc

SEQ ID NO: 1599984 - RNA, 21 nt, Human
acuccaaacugacucuuaaga

SEQ ID NO: 1599985 - RNA, 14 nt, Human
acucagaauauugc

SEQ ID NO: 1599986 - RNA, 14 nt, Human
acuccagaaaguga

SEQ ID NO: 1599987 - RNA, 18 nt, Human
acuccagaaagugacaag

SEQ ID NO: 1599988 - RNA, 17 nt, Human
uccucuccccaugaugu

SEQ ID NO: 1599989 - RNA, 21 nt, Human
uccugaaaacccuugccaugu

SEQ ID NO: 1599990 - RNA, 22 nt, Human
uccugaaaacccuugccaugug

SEQ ID NO: 1599991 - RNA, 13 nt, Human
acugaaacuuccc

SEQ ID NO: 1599992 - RNA, 14 nt, Human
uccagugagacagc

SEQ ID NO: 1599993 - RNA, 11 nt, Human
uccauccugag

SEQ ID NO: 1599994 - RNA, 22 nt, Human
uccaugaagauguagaggagaa

SEQ ID NO: 1599995 - RNA, 17 nt, Human
acgcucucuggccuucg

SEQ ID NO: 1599996 - RNA, 15 nt, Human
acgcucucuggccuu

SEQ ID NO: 1599997 - RNA, 16 nt, Human
acgcucucuggccuuc

SEQ ID NO: 1599998 - RNA, 20 nt, Human
acgaagaguauuuuugacag

SEQ ID NO: 1599999 - RNA, 22 nt, Human
acgaagaguauuuuugacagaa

SEQ ID NO: 1600000 - RNA, 16 nt, Human
ucauaauaaguugcau

SEQ ID NO: 1600001 - RNA, 12 nt, Human
accugagcccca

SEQ ID NO: 1600002 - RNA, 17 nt, Human
accugagccccaaaagg

SEQ ID NO: 1600003 - RNA, 19 nt, Human
uccaaaaagauuuucagaa

SEQ ID NO: 1600004 - RNA, 20 nt, Human
uccaaaaagauuuucagaaa

SEQ ID NO: 1600005 - RNA, 15 nt, Human
uagaaacacaacuau

SEQ ID NO: 1600006 - RNA, 17 nt, Human
uagaacucccuuucaac

SEQ ID NO: 1600007 - RNA, 18 nt, Human
uagaacucccuuucaaca

SEQ ID NO: 1600008 - RNA, 16 nt, Human
uagaacucccuuucaa

SEQ ID NO: 1600009 - RNA, 17 nt, Human
aauuccaauuauaugag

SEQ ID NO: 1600010 - RNA, 13 nt, Human
uagacacacauga

SEQ ID NO: 1600011 - RNA, 16 nt, Human
aauuuggauugcuaau

SEQ ID NO: 1600012 - RNA, 13 nt, Human
acaaaaacacagc

SEQ ID NO: 1600013 - RNA, 16 nt, Human
acaaaaacacagcaag

SEQ ID NO: 1600014 - RNA, 14 nt, Human
acaaaaacacagca

SEQ ID NO: 1600015 - RNA, 15 nt, Human
acaaaaacacagcaa

SEQ ID NO: 1600016 - RNA, 14 nt, Human
uagaggguguguaa

SEQ ID NO: 1600017 - RNA, 19 nt, Human
uagcacugacagauuucca

SEQ ID NO: 1600018 - RNA, 14 nt, Human
uagcacugacagau

SEQ ID NO: 1600019 - RNA, 13 nt, Human
acacaacuauauu

SEQ ID NO: 1600020 - RNA, 13 nt, Human
uaggauguugaaa

SEQ ID NO: 1600021 - RNA, 15 nt, Human
uaugccccauucaac

SEQ ID NO: 1600022 - RNA, 19 nt, Human
acagcccuucuuuccacag

SEQ ID NO: 1600023 - RNA, 14 nt, Human
acagcuguaugauu

SEQ ID NO: 1600024 - RNA, 19 nt, Human
acagcuguaugauucccag

SEQ ID NO: 1600025 - RNA, 20 nt, Human
acagcuguaugauucccagc

SEQ ID NO: 1600026 - RNA, 23 nt, Human
acagcuguaugauucccagccag

SEQ ID NO: 1600027 - RNA, 22 nt, Human
acaggaaccacaagacugcaca

SEQ ID NO: 1600028 - RNA, 13 nt, Human
acacucaaaucaa

SEQ ID NO: 1600029 - RNA, 18 nt, Human
acacucaaaucaagaaac

SEQ ID NO: 1600030 - RNA, 17 nt, Human
acacucaaaucaagaaa

SEQ ID NO: 1600031 - RNA, 21 nt, Human
uauacaggucauauuaauaua

SEQ ID NO: 1600032 - RNA, 16 nt, Human
uauacaggucauauua

SEQ ID NO: 1600033 - RNA, 15 nt, Human
uauacaggucauauu

SEQ ID NO: 1600034 - RNA, 16 nt, Human
uauaggugcuacaaaa

SEQ ID NO: 1600035 - RNA, 12 nt, Human
uauaggaauuga

SEQ ID NO: 1600036 - RNA, 16 nt, Human
acacucaguuguucaa

SEQ ID NO: 1600037 - RNA, 20 nt, Human
uauauccuuucuaacaaaaa

SEQ ID NO: 1600038 - RNA, 14 nt, Human
uaucacaaaucuua

SEQ ID NO: 1600039 - RNA, 16 nt, Human
uaucacaaaucuuaac

SEQ ID NO: 1600040 - RNA, 20 nt, Human
uaucacaaaucuuaacuuga

SEQ ID NO: 1600041 - RNA, 14 nt, Human
acagaccuuugaac

SEQ ID NO: 1600042 - RNA, 19 nt, Human
uaucaaagggugaaaauua

SEQ ID NO: 1600043 - RNA, 18 nt, Human
uaucaaagggugaaaauu

SEQ ID NO: 1600044 - RNA, 22 nt, Human
uaucaaagggugaaaauuauuu

SEQ ID NO: 1600045 - RNA, 13 nt, Human
aauguucaucaau

SEQ ID NO: 1600046 - RNA, 16 nt, Human
aauguucaucaaugaa

SEQ ID NO: 1600047 - RNA, 20 nt, Human
aauguucaucaaugaaugaa

SEQ ID NO: 1600048 - RNA, 19 nt, Human
uaccagggacugaggggag

SEQ ID NO: 1600049 - RNA, 13 nt, Human
aauuacauuugua

SEQ ID NO: 1600050 - RNA, 14 nt, Human
aauuacauuuguau

SEQ ID NO: 1600051 - RNA, 21 nt, Human
aauucagaaggaucuucaucu

SEQ ID NO: 1600052 - RNA, 20 nt, Human
aauucaagaaaacaacuuca

SEQ ID NO: 1600053 - RNA, 12 nt, Human
aauucaagaaaa

SEQ ID NO: 1600054 - RNA, 17 nt, Human
uacagagacagaaagca

SEQ ID NO: 1600055 - RNA, 20 nt, Human
aauguaagggaaacugccag

SEQ ID NO: 1600056 - RNA, 22 nt, Human
aaugcuguauuuuaaaagaaug

SEQ ID NO: 1600057 - RNA, 20 nt, Human
aaugcuguauuuuaaaagaa

SEQ ID NO: 1600058 - RNA, 21 nt, Human
aaugcuguauuuuaaaagaau

SEQ ID NO: 1600059 - RNA, 21 nt, Human
uacaaaaaaaaaaaaaaauua

SEQ ID NO: 1600060 - RNA, 22 nt, Human
aaugagagacacacugaagaag

SEQ ID NO: 1600061 - RNA, 20 nt, Human
aaugacucagaauauugcuu

SEQ ID NO: 1600062 - RNA, 16 nt, Human
aaugauuucauucaau

SEQ ID NO: 1600063 - RNA, 22 nt, Human
uaauuccguagguuauuuucag

SEQ ID NO: 1600064 - RNA, 19 nt, Human
uaauuuuuauauuugaaau

SEQ ID NO: 1600065 - RNA, 21 nt, Human
uaauuuuuauauuugaaauau

SEQ ID NO: 1600066 - RNA, 18 nt, Human
uaauuuuuauauuugaaa

SEQ ID NO: 1600067 - RNA, 16 nt, Human
uaauuuauacagguca

SEQ ID NO: 1600068 - RNA, 15 nt, Human
aauauuuauuuuaau

SEQ ID NO: 1600069 - RNA, 16 nt, Human
aaucagccuaguugau

SEQ ID NO: 1600070 - RNA, 15 nt, Human
uaagcaaaaugugau

SEQ ID NO: 1600071 - RNA, 21 nt, Human
uaagcaaaaugugauauguac

SEQ ID NO: 1600072 - RNA, 14 nt, Human
uaagcaaaauguga

SEQ ID NO: 1600073 - RNA, 14 nt, Human
aaucagugugucua

SEQ ID NO: 1600074 - RNA, 13 nt, Human
uaaguaaaaccac

SEQ ID NO: 1600075 - RNA, 15 nt, Human
uaaguaaaaccacag

SEQ ID NO: 1600076 - RNA, 16 nt, Human
uaaguaaaaccacagc

SEQ ID NO: 1600077 - RNA, 17 nt, Human
uaaguaaaaccacagca

SEQ ID NO: 1600078 - RNA, 18 nt, Human
uaaguaaaaccacagcag

SEQ ID NO: 1600079 - RNA, 19 nt, Human
uaaguaaaaccacagcagu

SEQ ID NO: 1600080 - RNA, 20 nt, Human
uaaguaaugauaacuggaaa

SEQ ID NO: 1600081 - RNA, 16 nt, Human
uaaguaauucaagaaa

SEQ ID NO: 1600082 - RNA, 22 nt, Human
aaucagugugucuaaauuugaa

SEQ ID NO: 1600083 - RNA, 18 nt, Human
aaucagugugucuaaauu

SEQ ID NO: 1600084 - RNA, 17 nt, Human
aaucagugugucuaaau

SEQ ID NO: 1600085 - RNA, 13 nt, Human
uaacaaugcugua

SEQ ID NO: 1600086 - RNA, 17 nt, Human
uaacaaugaagauaaaa

SEQ ID NO: 1600087 - RNA, 23 nt, Human
aauaccacaggaaccacaagacu

SEQ ID NO: 1600088 - RNA, 18 nt, Human
aauaccaugccauuuaaa

SEQ ID NO: 1600089 - RNA, 23 nt, Human
aauacaucccuuaccugggaaag

SEQ ID NO: 1600090 - RNA, 22 nt, Human
aauagagcaaaauugauguguu

SEQ ID NO: 1600091 - RNA, 20 nt, Human
aauagagcaaaauugaugug

SEQ ID NO: 1600092 - RNA, 13 nt, Human
uaagaagugaaaa

SEQ ID NO: 1600093 - RNA, 21 nt, Human
uaacuuccuuggacucauuuu

SEQ ID NO: 1600094 - RNA, 14 nt, Human
aauauauuuaauga

SEQ ID NO: 1600095 - RNA, 19 nt, Human
aauagucaaauugugugaa

SEQ ID NO: 1600096 - RNA, 16 nt, Human
aagcauuuagauguau

SEQ ID NO: 1600097 - RNA, 18 nt, Human
aagcauuguaaaugugcu

SEQ ID NO: 1600098 - RNA, 13 nt, Human
aagcauuguaaau

SEQ ID NO: 1600099 - RNA, 13 nt, Human
aagcuccagguag

SEQ ID NO: 1600100 - RNA, 14 nt, Human
aagcuccagguaga

SEQ ID NO: 1600101 - RNA, 20 nt, Human
aagcucacagaccuuugaac

SEQ ID NO: 1600102 - RNA, 22 nt, Human
aagccugcaauuucauaugcug

SEQ ID NO: 1600103 - RNA, 17 nt, Human
aagccugcaauuucaua

SEQ ID NO: 1600104 - RNA, 18 nt, Human
guuauugauaaguucaua

SEQ ID NO: 1600105 - RNA, 13 nt, Human
aagaugaaaauau

SEQ ID NO: 1600106 - RNA, 14 nt, Human
aagaugaaaauauu

SEQ ID NO: 1600107 - RNA, 21 nt, Human
gugugaccacugcagaagaca

SEQ ID NO: 1600108 - RNA, 13 nt, Human
aagauguagagga

SEQ ID NO: 1600109 - RNA, 19 nt, Human
aagauguagaggagaaacu

SEQ ID NO: 1600110 - RNA, 23 nt, Human
aagaggaaugaaguacucauaca

SEQ ID NO: 1600111 - RNA, 16 nt, Human
aagacugcacaucaaa

SEQ ID NO: 1600112 - RNA, 17 nt, Human
aagacugcauuauauuu

SEQ ID NO: 1600113 - RNA, 21 nt, Human
aagaccuuuggagcaaagcug

SEQ ID NO: 1600114 - RNA, 23 nt, Human
aagaccuugcuuaugauugcaga

SEQ ID NO: 1600115 - RNA, 12 nt, Human
uaaaagaaugau

SEQ ID NO: 1600116 - RNA, 23 nt, Human
uaaaagaauauuuuaacuuccuu

SEQ ID NO: 1600117 - RNA, 20 nt, Human
uaaaagacagugaaagaaaa

SEQ ID NO: 1600118 - RNA, 20 nt, Human
uaaaauaauuuuuauauuug

SEQ ID NO: 1600119 - RNA, 13 nt, Human
aaguauuagaaua

SEQ ID NO: 1600120 - RNA, 14 nt, Human
aaguaaugauaacu

SEQ ID NO: 1600121 - RNA, 19 nt, Human
aaguaaugauaacuggaaa

SEQ ID NO: 1600122 - RNA, 16 nt, Human
aagucuuucacauuua

SEQ ID NO: 1600123 - RNA, 12 nt, Human
guuucaaacuuu

SEQ ID NO: 1600124 - RNA, 14 nt, Human
aagguacuucaaau

SEQ ID NO: 1600125 - RNA, 19 nt, Human
aagggugaugggaaagcau

SEQ ID NO: 1600126 - RNA, 16 nt, Human
aagggugaaaauuauu

SEQ ID NO: 1600127 - RNA, 15 nt, Human
aagggugaaaauuau

SEQ ID NO: 1600128 - RNA, 15 nt, Human
guauaaaauaauuuu

SEQ ID NO: 1600129 - RNA, 21 nt, Human
guauaaaauaauuuuuauauu

SEQ ID NO: 1600130 - RNA, 16 nt, Human
guauauuuuauaucaa

SEQ ID NO: 1600131 - RNA, 20 nt, Human
guaguguuggagaagaacug

SEQ ID NO: 1600132 - RNA, 16 nt, Human
aaauguaagggaaacu

SEQ ID NO: 1600133 - RNA, 14 nt, Human
aaauggguuuuacu

SEQ ID NO: 1600134 - RNA, 15 nt, Human
aaauggguuuuacug

SEQ ID NO: 1600135 - RNA, 18 nt, Human
guauguacuucaugcugu

SEQ ID NO: 1600136 - RNA, 15 nt, Human
guauuuuugacagaa

SEQ ID NO: 1600137 - RNA, 12 nt, Human
guauuuuugaca

SEQ ID NO: 1600138 - RNA, 16 nt, Human
guauuuuugacagaau

SEQ ID NO: 1600139 - RNA, 17 nt, Human
aacacaacuauauuguu

SEQ ID NO: 1600140 - RNA, 15 nt, Human
aacacagcaagggug

SEQ ID NO: 1600141 - RNA, 18 nt, Human
aacacagcaagggugaug

SEQ ID NO: 1600142 - RNA, 15 nt, Human
aacagugauuaccag

SEQ ID NO: 1600143 - RNA, 22 nt, Human
aacagugauuaccagggacuga

SEQ ID NO: 1600144 - RNA, 13 nt, Human
aacagauaaucag

SEQ ID NO: 1600145 - RNA, 17 nt, Human
aacaaugcuguauuuua

SEQ ID NO: 1600146 - RNA, 22 nt, Human
aacaaugcuguauuuuaaaaga

SEQ ID NO: 1600147 - RNA, 15 nt, Human
aacacaacuauauug

SEQ ID NO: 1600148 - RNA, 16 nt, Human
aacacaacuauauugu

SEQ ID NO: 1600149 - RNA, 12 nt, Human
aacaauaaaaga

SEQ ID NO: 1600150 - RNA, 14 nt, Human
aacaaugcuguauu

SEQ ID NO: 1600151 - RNA, 15 nt, Human
aacaaugcuguauuu

SEQ ID NO: 1600152 - RNA, 20 nt, Human
aaauuuuuucucuaggaaau

SEQ ID NO: 1600153 - RNA, 19 nt, Human
aacaagaugguucuagcau

SEQ ID NO: 1600154 - RNA, 20 nt, Human
aaccugagccccaaaaggua

SEQ ID NO: 1600155 - RNA, 16 nt, Human
gucuuucacauuuaaa

SEQ ID NO: 1600156 - RNA, 21 nt, Human
aacuagaguuuagcuggaaaa

SEQ ID NO: 1600157 - RNA, 18 nt, Human
aaccuugaaaacuuuaug

SEQ ID NO: 1600158 - RNA, 18 nt, Human
aacccaaguccaagcaua

SEQ ID NO: 1600159 - RNA, 23 nt, Human
aacccaaauguucaucaaugaau

SEQ ID NO: 1600160 - RNA, 16 nt, Human
aacccgggaggcagag

SEQ ID NO: 1600161 - RNA, 18 nt, Human
aaccugagccccaaaagg

SEQ ID NO: 1600162 - RNA, 17 nt, Human
aacugggacaggggaga

SEQ ID NO: 1600163 - RNA, 19 nt, Human
aacuggacugguucaaaug

SEQ ID NO: 1600164 - RNA, 19 nt, Human
aacugcacugucaagauga

SEQ ID NO: 1600165 - RNA, 21 nt, Human
gugagaugcuagaacucccuu

SEQ ID NO: 1600166 - RNA, 12 nt, Human
aacugaaaucau

SEQ ID NO: 1600167 - RNA, 13 nt, Human
aacugaaaucaua

SEQ ID NO: 1600168 - RNA, 17 nt, Human
gugaugggaaagcauug

SEQ ID NO: 1600169 - RNA, 18 nt, Human
aacuuccagauccuggaa

SEQ ID NO: 1600170 - RNA, 18 nt, Human
aacuucccagugaauucu

SEQ ID NO: 1600171 - RNA, 20 nt, Human
cacaagaaaugaaagcaggg

SEQ ID NO: 1600172 - RNA, 21 nt, Human
cacaagaaaugaaagcaggga

SEQ ID NO: 1600173 - RNA, 18 nt, Human
cacaagaaaugaaagcag

SEQ ID NO: 1600174 - RNA, 22 nt, Human
caaugugacuuaaugccacuaa

SEQ ID NO: 1600175 - RNA, 21 nt, Human
caauaucuuuuuuuuaauaaa

SEQ ID NO: 1600176 - RNA, 22 nt, Human
caauuuuucuuauuucauuucu

SEQ ID NO: 1600177 - RNA, 17 nt, Human
cacagccagacuggcac

SEQ ID NO: 1600178 - RNA, 18 nt, Human
cacagccagacuggcaca

SEQ ID NO: 1600179 - RNA, 21 nt, Human
cacagcaguugaaaagacucc

SEQ ID NO: 1600180 - RNA, 19 nt, Human
cacagcaguugaaaagacu

SEQ ID NO: 1600181 - RNA, 13 nt, Human
cacacugaagaag

SEQ ID NO: 1600182 - RNA, 14 nt, Human
cacacugaagaagc

SEQ ID NO: 1600183 - RNA, 20 nt, Human
caaggaaaaaauaacaauga

SEQ ID NO: 1600184 - RNA, 18 nt, Human
caaggaaaaaauaacaau

SEQ ID NO: 1600185 - RNA, 23 nt, Human
caagggugaugggaaagcauugu

SEQ ID NO: 1600186 - RNA, 21 nt, Human
caagggugaugggaaagcauu

SEQ ID NO: 1600187 - RNA, 17 nt, Human
caauagucaaauugugu

SEQ ID NO: 1600188 - RNA, 19 nt, Human
caauagucaaauuguguga

SEQ ID NO: 1600189 - RNA, 19 nt, Human
caauaauaaauauuuuugc

SEQ ID NO: 1600190 - RNA, 17 nt, Human
caaacugacucuuaaga

SEQ ID NO: 1600191 - RNA, 21 nt, Human
caaacugacucuuaagaagac

SEQ ID NO: 1600192 - RNA, 16 nt, Human
caaacugacucuuaag

SEQ ID NO: 1600193 - RNA, 14 nt, Human
caaaacugcacugu

SEQ ID NO: 1600194 - RNA, 17 nt, Human
caaaacugcacugucaa

SEQ ID NO: 1600195 - RNA, 18 nt, Human
caaaacugcacugucaag

SEQ ID NO: 1600196 - RNA, 22 nt, Human
caaaauaauuuuaagaaaucaa

SEQ ID NO: 1600197 - RNA, 18 nt, Human
caaaauaauuuuaagaaa

SEQ ID NO: 1600198 - RNA, 17 nt, Human
caagaaaugaaagcagg

SEQ ID NO: 1600199 - RNA, 19 nt, Human
caagaaaugaaagcaggga

SEQ ID NO: 1600200 - RNA, 14 nt, Human
caaauaugcaaagc

SEQ ID NO: 1600201 - RNA, 13 nt, Human
caaauaugcaaag

SEQ ID NO: 1600202 - RNA, 12 nt, Human
caaauaugcaaa

SEQ ID NO: 1600203 - RNA, 20 nt, Human
caaauguucaucaaugaaug

SEQ ID NO: 1600204 - RNA, 18 nt, Human
caaauguucaucaaugaa

SEQ ID NO: 1600205 - RNA, 14 nt, Human
caaauguucaucaa

SEQ ID NO: 1600206 - RNA, 18 nt, Human
caaauaaaaauauugugu

SEQ ID NO: 1600207 - RNA, 16 nt, Human
caaauaaaaauauugu

SEQ ID NO: 1600208 - RNA, 15 nt, Human
caaauaaaaauauug

SEQ ID NO: 1600209 - RNA, 19 nt, Human
caaagagagaaaauaaaga

SEQ ID NO: 1600210 - RNA, 16 nt, Human
caaagagagaaaauaa

SEQ ID NO: 1600211 - RNA, 16 nt, Human
uuaauaauguuucaaa

SEQ ID NO: 1600212 - RNA, 20 nt, Human
uuacauuuguauaaaauaau

SEQ ID NO: 1600213 - RNA, 20 nt, Human
uuacagagacagaaagcaga

SEQ ID NO: 1600214 - RNA, 13 nt, Human
uuacauuguaaau

SEQ ID NO: 1600215 - RNA, 12 nt, Human
uuacauuguaaa

SEQ ID NO: 1600216 - RNA, 16 nt, Human
uuaaugauaaguaaau

SEQ ID NO: 1600217 - RNA, 17 nt, Human
uuaaugauaaguaaaug

SEQ ID NO: 1600218 - RNA, 18 nt, Human
uuaaaauacacacucaaa

SEQ ID NO: 1600219 - RNA, 19 nt, Human
uuaaaauacacacucaaau

SEQ ID NO: 1600220 - RNA, 22 nt, Human
uuaaaaaaaaaccugagcccca

SEQ ID NO: 1600221 - RNA, 19 nt, Human
uguuuccauauuuuauagg

SEQ ID NO: 1600222 - RNA, 20 nt, Human
uguugacaugggacauuugc

SEQ ID NO: 1600223 - RNA, 17 nt, Human
uguuuaaaaucauuucu

SEQ ID NO: 1600224 - RNA, 18 nt, Human
uguuuaaaaucauuucug

SEQ ID NO: 1600225 - RNA, 14 nt, Human
uguuggagaagaac

SEQ ID NO: 1600226 - RNA, 16 nt, Human
uguuggagaagaacug

SEQ ID NO: 1600227 - RNA, 17 nt, Human
uguuggagaagaacuga

SEQ ID NO: 1600228 - RNA, 19 nt, Human
uguuggagaagaacugaaa

SEQ ID NO: 1600229 - RNA, 20 nt, Human
uguuggagaagaacugaaau

SEQ ID NO: 1600230 - RNA, 21 nt, Human
ugugugaaagguacuucaaau

SEQ ID NO: 1600231 - RNA, 22 nt, Human
ugugugaaagguacuucaaauc

SEQ ID NO: 1600232 - RNA, 13 nt, Human
uguguuuugcaag

SEQ ID NO: 1600233 - RNA, 19 nt, Human
uguguuuugcaagccagau

SEQ ID NO: 1600234 - RNA, 21 nt, Human
uguuaaaagaugaaaauauuu

SEQ ID NO: 1600235 - RNA, 14 nt, Human
uguuagugcaaauu

SEQ ID NO: 1600236 - RNA, 23 nt, Human
uguucauacauauuuuuguagca

SEQ ID NO: 1600237 - RNA, 14 nt, Human
uguucauacauauu

SEQ ID NO: 1600238 - RNA, 12 nt, Human
uguucauacaua

SEQ ID NO: 1600239 - RNA, 19 nt, Human
ugugcuaguaauuggaaag

SEQ ID NO: 1600240 - RNA, 21 nt, Human
ugugaauguugugauguauuc

SEQ ID NO: 1600241 - RNA, 18 nt, Human
ugugaagugaaugaaaca

SEQ ID NO: 1600242 - RNA, 15 nt, Human
uguaugauucccagc

SEQ ID NO: 1600243 - RNA, 16 nt, Human
uguaugauucccagcc

SEQ ID NO: 1600244 - RNA, 14 nt, Human
uguaaucacagcua

SEQ ID NO: 1600245 - RNA, 17 nt, Human
uggucacaggaaguaga

SEQ ID NO: 1600246 - RNA, 16 nt, Human
uguaccgcaaugugac

SEQ ID NO: 1600247 - RNA, 22 nt, Human
uguaguguuggagaagaacuga

SEQ ID NO: 1600248 - RNA, 14 nt, Human
uguacgaagaguau

SEQ ID NO: 1600249 - RNA, 22 nt, Human
uguacgaagaguauuuuugaca

SEQ ID NO: 1600250 - RNA, 20 nt, Human
ugccacuaaauugacacuua

SEQ ID NO: 1600251 - RNA, 18 nt, Human
ugccaaauauaaauaaaa

SEQ ID NO: 1600252 - RNA, 17 nt, Human
ugccaaauauaaauaaa

SEQ ID NO: 1600253 - RNA, 22 nt, Human
ugccaaauauaaauaaaaauaa

SEQ ID NO: 1600254 - RNA, 19 nt, Human
ugccaaauauaaauaaaaa

SEQ ID NO: 1600255 - RNA, 12 nt, Human
ugccaucccucc

SEQ ID NO: 1600256 - RNA, 11 nt, Human
ugccaucccuc

SEQ ID NO: 1600257 - RNA, 14 nt, Human
ugccaucccucccu

SEQ ID NO: 1600258 - RNA, 16 nt, Human
ugcacugucaagauga

SEQ ID NO: 1600259 - RNA, 15 nt, Human
ugcaguucugaagaa

SEQ ID NO: 1600260 - RNA, 16 nt, Human
ugcaguucugaagaag

SEQ ID NO: 1600261 - RNA, 17 nt, Human
ugcaguucugaagaaga

SEQ ID NO: 1600262 - RNA, 18 nt, Human
ugcaguucugaagaagau

SEQ ID NO: 1600263 - RNA, 19 nt, Human
ugcaguucugaagaagaug

SEQ ID NO: 1600264 - RNA, 22 nt, Human
ugcaguucugaagaagauggua

SEQ ID NO: 1600265 - RNA, 15 nt, Human
ugcuaagcauuccaa

SEQ ID NO: 1600266 - RNA, 19 nt, Human
ugcuaagcauuccaacuau

SEQ ID NO: 1600267 - RNA, 18 nt, Human
ugccuguaaucacagcua

SEQ ID NO: 1600268 - RNA, 15 nt, Human
ugccuucucaacucc

SEQ ID NO: 1600269 - RNA, 17 nt, Human
ugccuucucaacuccaa

SEQ ID NO: 1600270 - RNA, 16 nt, Human
uggcuuccuggcaaua

SEQ ID NO: 1600271 - RNA, 21 nt, Human
uggcuugaguuuaaauuguaa

SEQ ID NO: 1600272 - RNA, 11 nt, Human
uggagggaagc

SEQ ID NO: 1600273 - RNA, 23 nt, Human
uggaaacuucagcgguuuauaua

SEQ ID NO: 1600274 - RNA, 20 nt, Human
uggaacauaaaauacaaugu

SEQ ID NO: 1600275 - RNA, 21 nt, Human
uggaacauaaaauacaauguu

SEQ ID NO: 1600276 - RNA, 22 nt, Human
uggaauaauccuaaacauauga

SEQ ID NO: 1600277 - RNA, 16 nt, Human
uggaaugcuguguuaa

SEQ ID NO: 1600278 - RNA, 17 nt, Human
uccucugcuugccaucc

SEQ ID NO: 1600279 - RNA, 16 nt, Human
uccucugcuugccauc

SEQ ID NO: 1600280 - RNA, 15 nt, Human
uccucugcuugccau

SEQ ID NO: 1600281 - RNA, 14 nt, Human
uccucugcuugcca

SEQ ID NO: 1600282 - RNA, 19 nt, Human
uccucugcuugccaucccu

SEQ ID NO: 1600283 - RNA, 15 nt, Human
uccugaggcuccacu

SEQ ID NO: 1600284 - RNA, 16 nt, Human
uccugaggcuccacuu

SEQ ID NO: 1600285 - RNA, 17 nt, Human
uccugaggcuccacuug

SEQ ID NO: 1600286 - RNA, 20 nt, Human
uccucaaaacuucagacaua

SEQ ID NO: 1600287 - RNA, 15 nt, Human
ucggccuccauccug

SEQ ID NO: 1600288 - RNA, 16 nt, Human
ucggccuccauccuga

SEQ ID NO: 1600289 - RNA, 17 nt, Human
ucggccuccauccugag

SEQ ID NO: 1600290 - RNA, 17 nt, Human
uccuugcaucaauuuuu

SEQ ID NO: 1600291 - RNA, 12 nt, Human
ucuacuaaaaau

SEQ ID NO: 1600292 - RNA, 15 nt, Human
ucuacuaaaaauaca

SEQ ID NO: 1600293 - RNA, 19 nt, Human
ucuacuaaaaauacaaaaa

SEQ ID NO: 1600294 - RNA, 22 nt, Human
ucucauaauuuauacaggucau

SEQ ID NO: 1600295 - RNA, 16 nt, Human
ucucauaauuuauaca

SEQ ID NO: 1600296 - RNA, 12 nt, Human
uccauacauuug

SEQ ID NO: 1600297 - RNA, 21 nt, Human
ucauggaauuggagcucgugg

SEQ ID NO: 1600298 - RNA, 19 nt, Human
ucauggaauuggagcucgu

SEQ ID NO: 1600299 - RNA, 18 nt, Human
ucaguccaugaagaugua

SEQ ID NO: 1600300 - RNA, 19 nt, Human
ucagugugucuaaauuuga

SEQ ID NO: 1600301 - RNA, 22 nt, Human
ucagcuccccucggagaagagc

SEQ ID NO: 1600302 - RNA, 16 nt, Human
ucagcugcugaaacaa

SEQ ID NO: 1600303 - RNA, 22 nt, Human
ucaggagaguagaacagauaau

SEQ ID NO: 1600304 - RNA, 14 nt, Human
ucugucucagucca

SEQ ID NO: 1600305 - RNA, 23 nt, Human
ucucauaauuuauacaggucaua

SEQ ID NO: 1600306 - RNA, 17 nt, Human
ucuuuccacagaagcuc

SEQ ID NO: 1600307 - RNA, 19 nt, Human
ugaaaauuauuuuguucau

SEQ ID NO: 1600308 - RNA, 23 nt, Human
ugaaaauuauuuuguucauacau

SEQ ID NO: 1600309 - RNA, 22 nt, Human
ugaaaauuauuuuguucauaca

SEQ ID NO: 1600310 - RNA, 23 nt, Human
ugaaacacucaguuguucaauaa

SEQ ID NO: 1600311 - RNA, 14 nt, Human
ucuuauaauuuaaa

SEQ ID NO: 1600312 - RNA, 13 nt, Human
ucuuauaauuuaa

SEQ ID NO: 1600313 - RNA, 16 nt, Human
ucuucuuggucucagu

SEQ ID NO: 1600314 - RNA, 18 nt, Human
ucuuguagcuuuaucaaa

SEQ ID NO: 1600315 - RNA, 19 nt, Human
ucuugccaaauauaaauaa

SEQ ID NO: 1600316 - RNA, 19 nt, Human
ucuugaaggaaaaugauac

SEQ ID NO: 1600317 - RNA, 14 nt, Human
ugacucuuaagaag

SEQ ID NO: 1600318 - RNA, 15 nt, Human
ugacucuuaagaaga

SEQ ID NO: 1600319 - RNA, 16 nt, Human
ugacucuuaagaagac

SEQ ID NO: 1600320 - RNA, 15 nt, Human
ugagaaagacuauuc

SEQ ID NO: 1600321 - RNA, 20 nt, Human
ugagcaggauuuuaaucuuu

SEQ ID NO: 1600322 - RNA, 15 nt, Human
ugagcaggauuuuaa

SEQ ID NO: 1600323 - RNA, 16 nt, Human
ugaccacugcagaaga

SEQ ID NO: 1600324 - RNA, 17 nt, Human
ugaccacugcagaagac

SEQ ID NO: 1600325 - RNA, 18 nt, Human
ugaccacugcagaagaca

SEQ ID NO: 1600326 - RNA, 23 nt, Human
ugacagaauauguuucaaacuuu

SEQ ID NO: 1600327 - RNA, 14 nt, Human
ugaauuaaguuuuu

SEQ ID NO: 1600328 - RNA, 13 nt, Human
ugaauuacauuug

SEQ ID NO: 1600329 - RNA, 14 nt, Human
ugaauuacauuugu

SEQ ID NO: 1600330 - RNA, 18 nt, Human
ugacagaauauguuucaa

SEQ ID NO: 1600331 - RNA, 22 nt, Human
ugacagaauauguuucaaacuu

SEQ ID NO: 1600332 - RNA, 21 nt, Human
ugacagaauauguuucaaacu

SEQ ID NO: 1600333 - RNA, 22 nt, Human
ugacaacuucccagugaauucu

SEQ ID NO: 1600334 - RNA, 20 nt, Human
ugaaguuuacauuguaaaua

SEQ ID NO: 1600335 - RNA, 16 nt, Human
ugaaguuuacauugua

SEQ ID NO: 1600336 - RNA, 14 nt, Human
ugaaguuuacauug

SEQ ID NO: 1600337 - RNA, 15 nt, Human
ugaaugaauggcuaa

SEQ ID NO: 1600338 - RNA, 20 nt, Human
ugaaugaauggcuaagcaaa

SEQ ID NO: 1600339 - RNA, 20 nt, Human
ugaaucucauaauuuauaca

SEQ ID NO: 1600340 - RNA, 13 nt, Human
ugaaucucauaau

SEQ ID NO: 1600341 - RNA, 15 nt, Human
ugaaggaaaaugaua

SEQ ID NO: 1600342 - RNA, 17 nt, Human
uacacacucaaaucaag

SEQ ID NO: 1600343 - RNA, 16 nt, Human
uacacacucaaaucaa

SEQ ID NO: 1600344 - RNA, 18 nt, Human
uaauuuugugaagcaaaa

SEQ ID NO: 1600345 - RNA, 12 nt, Human
uaauuuuuauau

SEQ ID NO: 1600346 - RNA, 16 nt, Human
uaauuuuuauauuuga

SEQ ID NO: 1600347 - RNA, 17 nt, Human
uaauuuuuauauuugaa

SEQ ID NO: 1600348 - RNA, 13 nt, Human
uaauuuugugaag

SEQ ID NO: 1600349 - RNA, 23 nt, Human
uacaguucggugagcuacaaaug

SEQ ID NO: 1600350 - RNA, 14 nt, Human
uacaggauuugaaa

SEQ ID NO: 1600351 - RNA, 23 nt, Human
uacugucagcuccccucggagaa

SEQ ID NO: 1600352 - RNA, 13 nt, Human
uacuuaacuauuc

SEQ ID NO: 1600353 - RNA, 16 nt, Human
uaccuaucaucuuaag

SEQ ID NO: 1600354 - RNA, 22 nt, Human
uaccuaacgaaguauccuucag

SEQ ID NO: 1600355 - RNA, 22 nt, Human
uaccaaaaaucucaauauuuca

SEQ ID NO: 1600356 - RNA, 14 nt, Human
uacccagaaaguua

SEQ ID NO: 1600357 - RNA, 23 nt, Human
uagaauaccacaggaaccacaag

SEQ ID NO: 1600358 - RNA, 15 nt, Human
uagaauuaacacaug

SEQ ID NO: 1600359 - RNA, 16 nt, Human
uagaauuaacacauga

SEQ ID NO: 1600360 - RNA, 18 nt, Human
uagaauuaacacaugauc

SEQ ID NO: 1600361 - RNA, 14 nt, Human
uagauaggccaugg

SEQ ID NO: 1600362 - RNA, 18 nt, Human
uagcauggcauauuuuuc

SEQ ID NO: 1600363 - RNA, 17 nt, Human
uagcauggcauauuuuu

SEQ ID NO: 1600364 - RNA, 15 nt, Human
uagcauggcauauuu

SEQ ID NO: 1600365 - RNA, 17 nt, Human
uaguauuguccaggucu

SEQ ID NO: 1600366 - RNA, 23 nt, Human
uaggugcuacaaaaacacagcaa

SEQ ID NO: 1600367 - RNA, 20 nt, Human
uaggugcuacaaaaacacag

SEQ ID NO: 1600368 - RNA, 22 nt, Human
uaggugcuacaaaaacacagca

SEQ ID NO: 1600369 - RNA, 22 nt, Human
uagguuaauuccaauuauauga

SEQ ID NO: 1600370 - RNA, 21 nt, Human
uauauuuuuuguuaaaugauu

SEQ ID NO: 1600371 - RNA, 20 nt, Human
uauauuugaaauauugacuu

SEQ ID NO: 1600372 - RNA, 14 nt, Human
uauaugcuucuguu

SEQ ID NO: 1600373 - RNA, 16 nt, Human
uauaugcuucuguuuu

SEQ ID NO: 1600374 - RNA, 14 nt, Human
uaucaaaagaaaga

SEQ ID NO: 1600375 - RNA, 17 nt, Human
uauauaacaaugcugua

SEQ ID NO: 1600376 - RNA, 19 nt, Human
uauauaacaaugcuguauu

SEQ ID NO: 1600377 - RNA, 18 nt, Human
uauauaaguauucuaaau

SEQ ID NO: 1600378 - RNA, 14 nt, Human
uauaucuuguagcu

SEQ ID NO: 1600379 - RNA, 14 nt, Human
uaauaauguuucaa

SEQ ID NO: 1600380 - RNA, 17 nt, Human
uaaugauaacuggaaac

SEQ ID NO: 1600381 - RNA, 22 nt, Human
uaaugauaacuggaaacuucag

SEQ ID NO: 1600382 - RNA, 23 nt, Human
uaaugauaacuggaaacuucagc

SEQ ID NO: 1600383 - RNA, 22 nt, Human
uaauguuucaaacauauauaac

SEQ ID NO: 1600384 - RNA, 18 nt, Human
uaagguuaccuuuguucc

SEQ ID NO: 1600385 - RNA, 13 nt, Human
uaagugaaauaag

SEQ ID NO: 1600386 - RNA, 21 nt, Human
uaauaacugugaaguuuacau

SEQ ID NO: 1600387 - RNA, 19 nt, Human
uaauaaauauuuuugccau

SEQ ID NO: 1600388 - RNA, 17 nt, Human
uaaccaggggccaugaa

SEQ ID NO: 1600389 - RNA, 14 nt, Human
uaagagagaaugag

SEQ ID NO: 1600390 - RNA, 23 nt, Human
uaagagagaaugagagacacacu

SEQ ID NO: 1600391 - RNA, 13 nt, Human
uaagagagaauga

SEQ ID NO: 1600392 - RNA, 21 nt, Human
uaagaaaauaucacuugucaa

SEQ ID NO: 1600393 - RNA, 18 nt, Human
uaacugugaaguuuacau

SEQ ID NO: 1600394 - RNA, 15 nt, Human
uaacuggaaacuuca

SEQ ID NO: 1600395 - RNA, 17 nt, Human
uaacugugaaguuuaca

SEQ ID NO: 1600396 - RNA, 20 nt, Human
uaaauggcuuccuggcaaua

SEQ ID NO: 1600397 - RNA, 16 nt, Human
uaaaugugccuucauu

SEQ ID NO: 1600398 - RNA, 16 nt, Human
uaaaugugcuuuuaaa

SEQ ID NO: 1600399 - RNA, 20 nt, Human
uaaauugacacuuaaaaaug

SEQ ID NO: 1600400 - RNA, 23 nt, Human
uaaauugacacuuaaaaaugguu

SEQ ID NO: 1600401 - RNA, 14 nt, Human
uaaauuugaauguu

SEQ ID NO: 1600402 - RNA, 22 nt, Human
uaaauuugaauguuaagcagau

SEQ ID NO: 1600403 - RNA, 19 nt, Human
uaaaccaaggcuagaacca

SEQ ID NO: 1600404 - RNA, 14 nt, Human
uaaaggaauuuaaa

SEQ ID NO: 1600405 - RNA, 14 nt, Human
uaaaguguuugaaa

SEQ ID NO: 1600406 - RNA, 15 nt, Human
uaaaauccauacauu

SEQ ID NO: 1600407 - RNA, 17 nt, Human
uaaaauccauacauuug

SEQ ID NO: 1600408 - RNA, 18 nt, Human
uaaaaucauuucugcauc

SEQ ID NO: 1600409 - RNA, 22 nt, Human
uaaaaucauuucugcaucagcu

SEQ ID NO: 1600410 - RNA, 10 nt, Human
uaaaaucauu

SEQ ID NO: 1600411 - RNA, 13 nt, Human
uaaaaucauuucu

SEQ ID NO: 1600412 - RNA, 13 nt, Human
uaaaaccacagca

SEQ ID NO: 1600413 - RNA, 22 nt, Human
uaaaacaagcacuaaacaaaga

SEQ ID NO: 1600414 - RNA, 19 nt, Human
uaaaaaugguuuaaauggu

SEQ ID NO: 1600415 - RNA, 18 nt, Human
uaaaaaugguuuaaaugg

SEQ ID NO: 1600416 - RNA, 21 nt, Human
uaaaaagacauucuuccaaaa

SEQ ID NO: 1600417 - RNA, 19 nt, Human
uaaaaacaacuuuauaccc

SEQ ID NO: 1600418 - RNA, 18 nt, Human
uaaaaacaacuuuauacc

SEQ ID NO: 1600419 - RNA, 13 nt, Human
uaaaaacaacuuu

SEQ ID NO: 1600420 - RNA, 20 nt, Human
guuuagcuggaaaaguaugu

SEQ ID NO: 1600421 - RNA, 21 nt, Human
guuuagcuggaaaaguauguu

SEQ ID NO: 1600422 - RNA, 20 nt, Human
guuuaggauguugaaaaagu

SEQ ID NO: 1600423 - RNA, 20 nt, Human
guuuauauaagcuuguauuc

SEQ ID NO: 1600424 - RNA, 14 nt, Human
guugugaauguugu

SEQ ID NO: 1600425 - RNA, 12 nt, Human
guucugaagaag

SEQ ID NO: 1600426 - RNA, 13 nt, Human
guucugaagaaga

SEQ ID NO: 1600427 - RNA, 14 nt, Human
guucugaagaagau

SEQ ID NO: 1600428 - RNA, 15 nt, Human
guucugaagaagaug

SEQ ID NO: 1600429 - RNA, 23 nt, Human
guugaaaagacuccaaagaaaug

SEQ ID NO: 1600430 - RNA, 17 nt, Human
guugaaaagacuccaaa

SEQ ID NO: 1600431 - RNA, 22 nt, Human
guugaaaagacuccaaagaaau

SEQ ID NO: 1600432 - RNA, 20 nt, Human
guugauggugguauguuuuc

SEQ ID NO: 1600433 - RNA, 21 nt, Human
guugauggugguauguuuuca

SEQ ID NO: 1600434 - RNA, 16 nt, Human
guucaucaaugaauga

SEQ ID NO: 1600435 - RNA, 19 nt, Human
guucagagcugcccucucc

SEQ ID NO: 1600436 - RNA, 17 nt, Human
guucagagcugcccucu

SEQ ID NO: 1600437 - RNA, 16 nt, Human
guucagagcugcccuc

SEQ ID NO: 1600438 - RNA, 15 nt, Human
guucagagcugcccu

SEQ ID NO: 1600439 - RNA, 22 nt, Human
guucagagcugcccucuccugg

SEQ ID NO: 1600440 - RNA, 20 nt, Human
guucagagcugcccucuccu

SEQ ID NO: 1600441 - RNA, 23 nt, Human
guucagagcugcccucuccuggg

SEQ ID NO: 1600442 - RNA, 14 nt, Human
guucagagcugccc

SEQ ID NO: 1600443 - RNA, 13 nt, Human
guucagagcugcc

SEQ ID NO: 1600444 - RNA, 23 nt, Human
guuaccucugccucagaaaacaa

SEQ ID NO: 1600445 - RNA, 17 nt, Human
guuauuauauuuacaaa

SEQ ID NO: 1600446 - RNA, 18 nt, Human
guucaauaauaaauauuu

SEQ ID NO: 1600447 - RNA, 20 nt, Human
guuaaaagaugaaaauauuu

SEQ ID NO: 1600448 - RNA, 14 nt, Human
guuaaaagaugaaa

SEQ ID NO: 1600449 - RNA, 16 nt, Human
guuaaaagaugaaaau

SEQ ID NO: 1600450 - RNA, 15 nt, Human
gugcuacaaaaacac

SEQ ID NO: 1600451 - RNA, 20 nt, Human
gugcuacaaaaacacagcaa

SEQ ID NO: 1600452 - RNA, 21 nt, Human
gugcuacaaaaacacagcaag

SEQ ID NO: 1600453 - RNA, 21 nt, Human
guguaaguagauaggccaugg

SEQ ID NO: 1600454 - RNA, 15 nt, Human
guguacuuaacuauu

SEQ ID NO: 1600455 - RNA, 14 nt, Human
gugagcuacaaaug

SEQ ID NO: 1600456 - RNA, 21 nt, Human
gugaacaaauuuacagagaca

SEQ ID NO: 1600457 - RNA, 15 nt, Human
gugaacacaucagcu

SEQ ID NO: 1600458 - RNA, 13 nt, Human
gugaacacaucag

SEQ ID NO: 1600459 - RNA, 18 nt, Human
gugaauucuugaaggaaa

SEQ ID NO: 1600460 - RNA, 22 nt, Human
gugaauucuugaaggaaaauga

SEQ ID NO: 1600461 - RNA, 22 nt, Human
gucugugagaugcuagaacucc

SEQ ID NO: 1600462 - RNA, 23 nt, Human
gucugugagaugcuagaacuccc

SEQ ID NO: 1600463 - RNA, 15 nt, Human
gucugugagaugcua

SEQ ID NO: 1600464 - RNA, 16 nt, Human
gucugugagaugcuag

SEQ ID NO: 1600465 - RNA, 17 nt, Human
gucugugagaugcuaga

SEQ ID NO: 1600466 - RNA, 21 nt, Human
gucugugagaugcuagaacuc

SEQ ID NO: 1600467 - RNA, 23 nt, Human
gucggguuuuauuguuuaaaauc

SEQ ID NO: 1600468 - RNA, 18 nt, Human
gucgucaaagcugaaaug

SEQ ID NO: 1600469 - RNA, 13 nt, Human
gucuaaauuugaa

SEQ ID NO: 1600470 - RNA, 21 nt, Human
gucuaagauaguaacaaugaa

SEQ ID NO: 1600471 - RNA, 13 nt, Human
gucaggaaagaga

SEQ ID NO: 1600472 - RNA, 21 nt, Human
gucagcuccccucggagaaga

SEQ ID NO: 1600473 - RNA, 22 nt, Human
gucagcuccccucggagaagag

SEQ ID NO: 1600474 - RNA, 23 nt, Human
gucagcuccccucggagaagagc

SEQ ID NO: 1600475 - RNA, 19 nt, Human
gucagcuccccucggagaa

SEQ ID NO: 1600476 - RNA, 20 nt, Human
guauuuuaaaagaaugauua

SEQ ID NO: 1600477 - RNA, 13 nt, Human
guauuuuaaucac

SEQ ID NO: 1600478 - RNA, 23 nt, Human
gucaauaaaauccauacauuugu

SEQ ID NO: 1600479 - RNA, 22 nt, Human
gucaauaaaauccauacauuug

SEQ ID NO: 1600480 - RNA, 15 nt, Human
gucaaugcagccccc

SEQ ID NO: 1600481 - RNA, 17 nt, Human
guauguuagugcaaauu

SEQ ID NO: 1600482 - RNA, 23 nt, Human
guaugaaauuauauaaguauucu

SEQ ID NO: 1600483 - RNA, 13 nt, Human
guaugaaauuaua

SEQ ID NO: 1600484 - RNA, 14 nt, Human
guaguguuggagaa

SEQ ID NO: 1600485 - RNA, 15 nt, Human
guaguguuggagaag

SEQ ID NO: 1600486 - RNA, 17 nt, Human
guaguguuggagaagaa

SEQ ID NO: 1600487 - RNA, 19 nt, Human
gcuauaggugcuacaaaaa

SEQ ID NO: 1600488 - RNA, 18 nt, Human
gcuauaggugcuacaaaa

SEQ ID NO: 1600489 - RNA, 15 nt, Human
guagcacugacagau

SEQ ID NO: 1600490 - RNA, 14 nt, Human
guagcacugacaga

SEQ ID NO: 1600491 - RNA, 13 nt, Human
uuuguauaaaaua

SEQ ID NO: 1600492 - RNA, 14 nt, Human
uuuguauaaaauaa

SEQ ID NO: 1600493 - RNA, 16 nt, Human
uuuguauaaaauaauu

SEQ ID NO: 1600494 - RNA, 21 nt, Human
uuuuaaaagaaugauuaugaa

SEQ ID NO: 1600495 - RNA, 20 nt, Human
uuuuaauaauguuucaaaca

SEQ ID NO: 1600496 - RNA, 15 nt, Human
uuucugagaaagacu

SEQ ID NO: 1600497 - RNA, 13 nt, Human
uuucugagaaaga

SEQ ID NO: 1600498 - RNA, 17 nt, Human
uuucuuauuucauuucu

SEQ ID NO: 1600499 - RNA, 18 nt, Human
uuugaaucaucaagucuu

SEQ ID NO: 1600500 - RNA, 20 nt, Human
uuugaaucucauaauuuaua

SEQ ID NO: 1600501 - RNA, 19 nt, Human
uuugaaucucauaauuuau

SEQ ID NO: 1600502 - RNA, 16 nt, Human
uuugaaucucauaauu

SEQ ID NO: 1600503 - RNA, 22 nt, Human
uuugaaucucauaauuuauaca

SEQ ID NO: 1600504 - RNA, 21 nt, Human
uuugaaucucauaauuuauac

SEQ ID NO: 1600505 - RNA, 19 nt, Human
uuuuucucuaggaaauauu

SEQ ID NO: 1600506 - RNA, 14 nt, Human
uuuuccugaaaacc

SEQ ID NO: 1600507 - RNA, 18 nt, Human
uuuuggucuggagggaag

SEQ ID NO: 1600508 - RNA, 11 nt, Human
uuuugacagaa

SEQ ID NO: 1600509 - RNA, 20 nt, Human
uuuugaaucucauaauuuau

SEQ ID NO: 1600510 - RNA, 18 nt, Human
uuuuuaaaaaagaaacau

SEQ ID NO: 1600511 - RNA, 18 nt, Human
uuuuguagcacugacaga

SEQ ID NO: 1600512 - RNA, 19 nt, Human
uuuuguagcacugacagau

SEQ ID NO: 1600513 - RNA, 23 nt, Human
gccaucccucccuccaccucccu

SEQ ID NO: 1600514 - RNA, 18 nt, Human
gccaucccucccuccacc

SEQ ID NO: 1600515 - RNA, 20 nt, Human
gccgggcgugguggugagug

SEQ ID NO: 1600516 - RNA, 23 nt, Human
gccuccccuccucugcuugccau

SEQ ID NO: 1600517 - RNA, 22 nt, Human
gccuccccuccucugcuugcca

SEQ ID NO: 1600518 - RNA, 20 nt, Human
gccuccccuccucugcuugc

SEQ ID NO: 1600519 - RNA, 19 nt, Human
gccuccccuccucugcuug

SEQ ID NO: 1600520 - RNA, 17 nt, Human
gccuccccuccucugcu

SEQ ID NO: 1600521 - RNA, 19 nt, Human
gcuagaacucccuuucaac

SEQ ID NO: 1600522 - RNA, 13 nt, Human
gcuauaggugcua

SEQ ID NO: 1600523 - RNA, 22 nt, Human
gcgacagugagacucugucuca

SEQ ID NO: 1600524 - RNA, 12 nt, Human
gcgacagugaga

SEQ ID NO: 1600525 - RNA, 15 nt, Human
gccugcaauuucaua

SEQ ID NO: 1600526 - RNA, 15 nt, Human
gauuuuccugaaaac

SEQ ID NO: 1600527 - RNA, 14 nt, Human
gcaagggugauggg

SEQ ID NO: 1600528 - RNA, 10 nt, Human
gcaagccaga

SEQ ID NO: 1600529 - RNA, 17 nt, Human
gcaaaauugauguguuu

SEQ ID NO: 1600530 - RNA, 14 nt, Human
gauagucuuucagu

SEQ ID NO: 1600531 - RNA, 15 nt, Human
gauaguaacaaugaa

SEQ ID NO: 1600532 - RNA, 22 nt, Human
gauagucuuucaguuaaggaga

SEQ ID NO: 1600533 - RNA, 23 nt, Human
gauagauaggucagugcaaauac

SEQ ID NO: 1600534 - RNA, 13 nt, Human
gauagcagggcau

SEQ ID NO: 1600535 - RNA, 22 nt, Human
gauaaauaguuuaugauuccac

SEQ ID NO: 1600536 - RNA, 16 nt, Human
gauaaguucauacauu

SEQ ID NO: 1600537 - RNA, 14 nt, Human
gauaaguucauaca

SEQ ID NO: 1600538 - RNA, 12 nt, Human
gauaaguucaua

SEQ ID NO: 1600539 - RNA, 13 nt, Human
gauccuggaaauc

SEQ ID NO: 1600540 - RNA, 14 nt, Human
gaugaaaauauuug

SEQ ID NO: 1600541 - RNA, 21 nt, Human
gauggcuaguaucaaaagaaa

SEQ ID NO: 1600542 - RNA, 17 nt, Human
gaugacaacuucccagu

SEQ ID NO: 1600543 - RNA, 18 nt, Human
gcagauaaacaguaguga

SEQ ID NO: 1600544 - RNA, 20 nt, Human
gcagccccgugggguuccuc

SEQ ID NO: 1600545 - RNA, 12 nt, Human
gcaucagcugcu

SEQ ID NO: 1600546 - RNA, 13 nt, Human
gcauuauauuuau

SEQ ID NO: 1600547 - RNA, 13 nt, Human
gcauagaaguaaa

SEQ ID NO: 1600548 - RNA, 17 nt, Human
gcaguucugaagaagau

SEQ ID NO: 1600549 - RNA, 18 nt, Human
gcaguucagagcugcccu

SEQ ID NO: 1600550 - RNA, 17 nt, Human
gcaguucagagcugccc

SEQ ID NO: 1600551 - RNA, 15 nt, Human
gcaguucugaagaag

SEQ ID NO: 1600552 - RNA, 16 nt, Human
gcaguucagagcugcc

SEQ ID NO: 1600553 - RNA, 17 nt, Human
gcauagguuuaauaauu

SEQ ID NO: 1600554 - RNA, 15 nt, Human
gcaguugaaaagacu

SEQ ID NO: 1600555 - RNA, 19 nt, Human
gcauauuuuucacauaucu

SEQ ID NO: 1600556 - RNA, 16 nt, Human
gcauauuuuucacaua

SEQ ID NO: 1600557 - RNA, 15 nt, Human
gcauauuuuucacau

SEQ ID NO: 1600558 - RNA, 14 nt, Human
gcauauuuuucaca

SEQ ID NO: 1600559 - RNA, 20 nt, Human
gcauauuuuucacauaucua

SEQ ID NO: 1600560 - RNA, 15 nt, Human
gacaagcucacagac

SEQ ID NO: 1600561 - RNA, 14 nt, Human
gacaucaacagaua

SEQ ID NO: 1600562 - RNA, 22 nt, Human
gacaugggacauuugcucaugg

SEQ ID NO: 1600563 - RNA, 23 nt, Human
gaccugauuucugagcauuuaau

SEQ ID NO: 1600564 - RNA, 13 nt, Human
gagaagaacugaa

SEQ ID NO: 1600565 - RNA, 14 nt, Human
gagaagaacugaaa

SEQ ID NO: 1600566 - RNA, 16 nt, Human
gagaagaacugaaauc

SEQ ID NO: 1600567 - RNA, 15 nt, Human
gagaagagcuguuca

SEQ ID NO: 1600568 - RNA, 22 nt, Human
gagaagagcuguucacagccag

SEQ ID NO: 1600569 - RNA, 18 nt, Human
gagacacacugaagaagc

SEQ ID NO: 1600570 - RNA, 13 nt, Human
gagaaagacuauu

SEQ ID NO: 1600571 - RNA, 15 nt, Human
gagaaagacuauuca

SEQ ID NO: 1600572 - RNA, 17 nt, Human
gagaaagacuauucaaa

SEQ ID NO: 1600573 - RNA, 18 nt, Human
gagaaagacuauucaaac

SEQ ID NO: 1600574 - RNA, 19 nt, Human
gagagacacacugaagaag

SEQ ID NO: 1600575 - RNA, 17 nt, Human
gagauacagaauuuuau

SEQ ID NO: 1600576 - RNA, 19 nt, Human
gagagugaacaaauuuaca

SEQ ID NO: 1600577 - RNA, 15 nt, Human
gagagugaacaaauu

SEQ ID NO: 1600578 - RNA, 15 nt, Human
gagacagcucugcau

SEQ ID NO: 1600579 - RNA, 18 nt, Human
gagacagcucugcauacu

SEQ ID NO: 1600580 - RNA, 13 nt, Human
gagacagcucugc

SEQ ID NO: 1600581 - RNA, 16 nt, Human
gagcucgugggacagu

SEQ ID NO: 1600582 - RNA, 23 nt, Human
gagcugcccucuccugggcagcu

SEQ ID NO: 1600583 - RNA, 21 nt, Human
gagcugcccucuccugggcag

SEQ ID NO: 1600584 - RNA, 19 nt, Human
gagcugcccucuccugggc

SEQ ID NO: 1600585 - RNA, 18 nt, Human
gagcugcccucuccuggg

SEQ ID NO: 1600586 - RNA, 15 nt, Human
gaaauauuuauuuua

SEQ ID NO: 1600587 - RNA, 16 nt, Human
gaaauauuuauuuuaa

SEQ ID NO: 1600588 - RNA, 13 nt, Human
gaaauauuuauuu

SEQ ID NO: 1600589 - RNA, 23 nt, Human
gaaauuauauaaguauucuaaau

SEQ ID NO: 1600590 - RNA, 17 nt, Human
gaaauuauauaaguauu

SEQ ID NO: 1600591 - RNA, 24 nt, Human
gaacaguuaccucugccucagaaa

SEQ ID NO: 1600592 - RNA, 18 nt, Human
gaacagauaaucagugug

SEQ ID NO: 1600593 - RNA, 13 nt, Human
gaaacugccagca

SEQ ID NO: 1600594 - RNA, 15 nt, Human
gaaacugccagcaac

SEQ ID NO: 1600595 - RNA, 19 nt, Human
gaaagacuauucaaacagu

SEQ ID NO: 1600596 - RNA, 22 nt, Human
gaaagacuauucaaacagucuc

SEQ ID NO: 1600597 - RNA, 23 nt, Human
gaaagacuauucaaacagucuca

SEQ ID NO: 1600598 - RNA, 13 nt, Human
gaaagcagaacag

SEQ ID NO: 1600599 - RNA, 14 nt, Human
gaaagcagaacagu

SEQ ID NO: 1600600 - RNA, 23 nt, Human
gaaaguuauugauaaguucauac

SEQ ID NO: 1600601 - RNA, 23 nt, Human
gaaguccaagcauuuagauguau

SEQ ID NO: 1600602 - RNA, 14 nt, Human
gaaccacaagacug

SEQ ID NO: 1600603 - RNA, 15 nt, Human
gaaccacaagacugc

SEQ ID NO: 1600604 - RNA, 16 nt, Human
gaacucccuuucaaca

SEQ ID NO: 1600605 - RNA, 22 nt, Human
gaacuuguaaaggaauuuaaaa

SEQ ID NO: 1600606 - RNA, 17 nt, Human
gaagauguagaggagaa

SEQ ID NO: 1600607 - RNA, 13 nt, Human
gaagagcuguuca

SEQ ID NO: 1600608 - RNA, 15 nt, Human
gaagagcuguucaca

SEQ ID NO: 1600609 - RNA, 20 nt, Human
gaagagcuguucacagccag

SEQ ID NO: 1600610 - RNA, 23 nt, Human
gaagagcuguucacagccagacu

SEQ ID NO: 1600611 - RNA, 20 nt, Human
gaagaguauuuuugacagaa

SEQ ID NO: 1600612 - RNA, 18 nt, Human
cuuguaaaggaauuuaaa

SEQ ID NO: 1600613 - RNA, 17 nt, Human
cuugccaaauauaaaua

SEQ ID NO: 1600614 - RNA, 13 nt, Human
cuucuuuccacag

SEQ ID NO: 1600615 - RNA, 19 nt, Human
cuucuuuccacagaagcuc

SEQ ID NO: 1600616 - RNA, 19 nt, Human
cuugaacccgggaggcaga

SEQ ID NO: 1600617 - RNA, 20 nt, Human
cuugaacccgggaggcagag

SEQ ID NO: 1600618 - RNA, 21 nt, Human
cuugcaugguuuagaaagcuu

SEQ ID NO: 1600619 - RNA, 23 nt, Human
cuugcaucaauuuuucuuauuuc

SEQ ID NO: 1600620 - RNA, 19 nt, Human
cuuuccucaaaacuucaga

SEQ ID NO: 1600621 - RNA, 16 nt, Human
cuuuggaacaagaugg

SEQ ID NO: 1600622 - RNA, 12 nt, Human
cugcacugucaa

SEQ ID NO: 1600623 - RNA, 15 nt, Human
cugccagcaacgcag

SEQ ID NO: 1600624 - RNA, 20 nt, Human
cugcaucagcugcugaaaca

SEQ ID NO: 1600625 - RNA, 15 nt, Human
cugcccucuccuggg

SEQ ID NO: 1600626 - RNA, 14 nt, Human
cugcccucuccugg

SEQ ID NO: 1600627 - RNA, 13 nt, Human
cugcccucuccug

SEQ ID NO: 1600628 - RNA, 12 nt, Human
cugcccucuccu

SEQ ID NO: 1600629 - RNA, 15 nt, Human
cugcuugccaucccu

SEQ ID NO: 1600630 - RNA, 16 nt, Human
cugcuugccaucccuc

SEQ ID NO: 1600631 - RNA, 22 nt, Human
cugcuugccaucccucccucca

SEQ ID NO: 1600632 - RNA, 20 nt, Human
cugcuugccaucccucccuc

SEQ ID NO: 1600633 - RNA, 19 nt, Human
cugcuugccaucccucccu

SEQ ID NO: 1600634 - RNA, 18 nt, Human
cugcuugccaucccuccc

SEQ ID NO: 1600635 - RNA, 16 nt, Human
cuggccuucggccucc

SEQ ID NO: 1600636 - RNA, 17 nt, Human
cuggccuucggccucca

SEQ ID NO: 1600637 - RNA, 18 nt, Human
cuggccuucggccuccau

SEQ ID NO: 1600638 - RNA, 21 nt, Human
cuggccuucggccuccauccu

SEQ ID NO: 1600639 - RNA, 15 nt, Human
cuggccuucggccuc

SEQ ID NO: 1600640 - RNA, 15 nt, Human
cuguaugauucccag

SEQ ID NO: 1600641 - RNA, 13 nt, Human
cuguauuuuaaaa

SEQ ID NO: 1600642 - RNA, 16 nt, Human
cuguauuuuaaaagaa

SEQ ID NO: 1600643 - RNA, 19 nt, Human
cuguauuuuaaaagaauga

SEQ ID NO: 1600644 - RNA, 18 nt, Human
cugucucuacuaaaaaua

SEQ ID NO: 1600645 - RNA, 22 nt, Human
cucuucuuuaaagggauggcaa

SEQ ID NO: 1600646 - RNA, 23 nt, Human
cugaagaagcaccaaucaugaau

SEQ ID NO: 1600647 - RNA, 12 nt, Human
cucuggccuucg

SEQ ID NO: 1600648 - RNA, 19 nt, Human
cucuggccuucggccucca

SEQ ID NO: 1600649 - RNA, 20 nt, Human
cucugcuugccaucccuccc

SEQ ID NO: 1600650 - RNA, 17 nt, Human
cucugcuugccaucccu

SEQ ID NO: 1600651 - RNA, 14 nt, Human
cucugcuugccauc

SEQ ID NO: 1600652 - RNA, 12 nt, Human
cucugcuugcca

SEQ ID NO: 1600653 - RNA, 16 nt, Human
cugagcgacagugaga

SEQ ID NO: 1600654 - RNA, 20 nt, Human
cugagcgacagugagacucu

SEQ ID NO: 1600655 - RNA, 15 nt, Human
cugacagauuuccau

SEQ ID NO: 1600656 - RNA, 11 nt, Human
cugacagauuu

SEQ ID NO: 1600657 - RNA, 23 nt, Human
cugagaaagacuauucaaacagu

SEQ ID NO: 1600658 - RNA, 16 nt, Human
cugacuucuaaguaaa

SEQ ID NO: 1600659 - RNA, 13 nt, Human
cugacuucuaagu

SEQ ID NO: 1600660 - RNA, 15 nt, Human
cugacuucuaaguaa

SEQ ID NO: 1600661 - RNA, 17 nt, Human
cugacucuuaagaagac

SEQ ID NO: 1600662 - RNA, 15 nt, Human
cugacuaugacauaa

SEQ ID NO: 1600663 - RNA, 17 nt, Human
cucccuccaccucccug

SEQ ID NO: 1600664 - RNA, 15 nt, Human
cucccuccaccuccc

SEQ ID NO: 1600665 - RNA, 11 nt, Human
cuccauccuga

SEQ ID NO: 1600666 - RNA, 16 nt, Human
cuccauccugaggcuc

SEQ ID NO: 1600667 - RNA, 18 nt, Human
cuccauccugaggcucca

SEQ ID NO: 1600668 - RNA, 20 nt, Human
cuccauccugaggcuccacu

SEQ ID NO: 1600669 - RNA, 15 nt, Human
cucuaggaaauauuu

SEQ ID NO: 1600670 - RNA, 17 nt, Human
cucuaggaaauauuuau

SEQ ID NO: 1600671 - RNA, 19 nt, Human
cucuccugggcagcugccu

SEQ ID NO: 1600672 - RNA, 18 nt, Human
cucuccugggcagcugcc

SEQ ID NO: 1600673 - RNA, 16 nt, Human
cucuccugggcagcug

SEQ ID NO: 1600674 - RNA, 15 nt, Human
cucuccugggcagcu

SEQ ID NO: 1600675 - RNA, 12 nt, Human
cucuccugggca

SEQ ID NO: 1600676 - RNA, 20 nt, Human
cucuccugggcagcugccuc

SEQ ID NO: 1600677 - RNA, 21 nt, Human
cucuccugauagucuuucagu

SEQ ID NO: 1600678 - RNA, 14 nt, Human
cgcucucuggccuu

SEQ ID NO: 1600679 - RNA, 15 nt, Human
cgcucucuggccuuc

SEQ ID NO: 1600680 - RNA, 18 nt, Human
cgcucucuggccuucggc

SEQ ID NO: 1600681 - RNA, 12 nt, Human
cggccuccaucc

SEQ ID NO: 1600682 - RNA, 14 nt, Human
cggccuccauccug

SEQ ID NO: 1600683 - RNA, 21 nt, Human
cggguuuuauuguuuaaaauc

SEQ ID NO: 1600684 - RNA, 17 nt, Human
cggugagcuacaaaugc

SEQ ID NO: 1600685 - RNA, 22 nt, Human
cggucggguuuuauuguuuaaa

SEQ ID NO: 1600686 - RNA, 23 nt, Human
cuaaauugacacuuaaaaauggu

SEQ ID NO: 1600687 - RNA, 23 nt, Human
cuaaauuugaauguuaagcagau

SEQ ID NO: 1600688 - RNA, 13 nt, Human
cucacauuuauau

SEQ ID NO: 1600689 - RNA, 17 nt, Human
cucaccccuugccauaa

SEQ ID NO: 1600690 - RNA, 21 nt, Human
cuaugacauaaaaacaacuuu

SEQ ID NO: 1600691 - RNA, 19 nt, Human
cuauauuguuugcuaagca

SEQ ID NO: 1600692 - RNA, 20 nt, Human
cuauauuuuuuguuaaauga

SEQ ID NO: 1600693 - RNA, 22 nt, Human
cuauauuuuuuguuaaaugauu

SEQ ID NO: 1600694 - RNA, 13 nt, Human
cuaugaaauauua

SEQ ID NO: 1600695 - RNA, 18 nt, Human
cuaugaaauauuauguua

SEQ ID NO: 1600696 - RNA, 18 nt, Human
cuaugacauaaaaacaac

SEQ ID NO: 1600697 - RNA, 22 nt, Human
cuaguauuucuaugaaauauua

SEQ ID NO: 1600698 - RNA, 19 nt, Human
cuaguauuucuaugaaaua

SEQ ID NO: 1600699 - RNA, 20 nt, Human
cuaguauuucuaugaaauau

SEQ ID NO: 1600700 - RNA, 15 nt, Human
cuaguaucaaaagaa

SEQ ID NO: 1600701 - RNA, 17 nt, Human
cuaguaucaaaagaaag

SEQ ID NO: 1600702 - RNA, 23 nt, Human
cuaguaucaaaagaaagaaaauc

SEQ ID NO: 1600703 - RNA, 16 nt, Human
cuaguaugaaauuaua

SEQ ID NO: 1600704 - RNA, 15 nt, Human
cuacuugggaggcug

SEQ ID NO: 1600705 - RNA, 18 nt, Human
cuacuugggaggcugaga

SEQ ID NO: 1600706 - RNA, 19 nt, Human
cuacuugggaggcugagau

SEQ ID NO: 1600707 - RNA, 15 nt, Human
cuaagcaaaauguga

SEQ ID NO: 1600708 - RNA, 18 nt, Human
cuaagcaaaaugugauau

SEQ ID NO: 1600709 - RNA, 14 nt, Human
cuaagcaaaaugug

SEQ ID NO: 1600710 - RNA, 16 nt, Human
cuacacuccagugaga

SEQ ID NO: 1600711 - RNA, 17 nt, Human
cuacacuccagugagac

SEQ ID NO: 1600712 - RNA, 19 nt, Human
cuaauguaauaacugugaa

SEQ ID NO: 1600713 - RNA, 14 nt, Human
ccuccauccugagg

SEQ ID NO: 1600714 - RNA, 12 nt, Human
ccuccauccuga

SEQ ID NO: 1600715 - RNA, 13 nt, Human
ccuccauccugag

SEQ ID NO: 1600716 - RNA, 14 nt, Human
ccuccccuccucug

SEQ ID NO: 1600717 - RNA, 13 nt, Human
ccuccccuccucu

SEQ ID NO: 1600718 - RNA, 12 nt, Human
ccuccccuccuc

SEQ ID NO: 1600719 - RNA, 22 nt, Human
ccgggaggcagagguugcagug

SEQ ID NO: 1600720 - RNA, 13 nt, Human
ccuaaacauauga

SEQ ID NO: 1600721 - RNA, 15 nt, Human
cccugcaauaaaaug

SEQ ID NO: 1600722 - RNA, 14 nt, Human
cccugcaauaaaau

SEQ ID NO: 1600723 - RNA, 13 nt, Human
cccucccuccacc

SEQ ID NO: 1600724 - RNA, 20 nt, Human
cccucccuccaccucccugc

SEQ ID NO: 1600725 - RNA, 14 nt, Human
ccccaggugccagu

SEQ ID NO: 1600726 - RNA, 23 nt, Human
ccauggcacucuauguucuaaga

SEQ ID NO: 1600727 - RNA, 19 nt, Human
ccagccugagcgacaguga

SEQ ID NO: 1600728 - RNA, 16 nt, Human
ccauccugaggcucca

SEQ ID NO: 1600729 - RNA, 15 nt, Human
ccauccugaggcucc

SEQ ID NO: 1600730 - RNA, 23 nt, Human
cauuucugcaucagcugcugaaa

SEQ ID NO: 1600731 - RNA, 19 nt, Human
cauuuaaagcuuauuaaaa

SEQ ID NO: 1600732 - RNA, 15 nt, Human
cauuugcucauggaa

SEQ ID NO: 1600733 - RNA, 14 nt, Human
cauuugcucaugga

SEQ ID NO: 1600734 - RNA, 16 nt, Human
cauuugcucauggaau

SEQ ID NO: 1600735 - RNA, 17 nt, Human
ccaaagaaauguaaggg

SEQ ID NO: 1600736 - RNA, 21 nt, Human
ccaacacgagcaggcuacugu

SEQ ID NO: 1600737 - RNA, 14 nt, Human
ccaacacgagcagg

SEQ ID NO: 1600738 - RNA, 18 nt, Human
ccaaggcuagaaccaccu

SEQ ID NO: 1600739 - RNA, 16 nt, Human
ccacaagaaaugaaag

SEQ ID NO: 1600740 - RNA, 22 nt, Human
ccacaagaaaugaaagcaggga

SEQ ID NO: 1600741 - RNA, 19 nt, Human
ccaaggcugauuaaaccaa

SEQ ID NO: 1600742 - RNA, 20 nt, Human
ccaauauucauagcagcuua

SEQ ID NO: 1600743 - RNA, 23 nt, Human
caugcugucuacacuaagagaga

SEQ ID NO: 1600744 - RNA, 23 nt, Human
caugggacagggaggacgcucuc

SEQ ID NO: 1600745 - RNA, 17 nt, Human
caugggacagggaggac

SEQ ID NO: 1600746 - RNA, 21 nt, Human
caguuaccucugccucagaaa

SEQ ID NO: 1600747 - RNA, 15 nt, Human
caguucugaagaaga

SEQ ID NO: 1600748 - RNA, 16 nt, Human
caguucugaagaagau

SEQ ID NO: 1600749 - RNA, 22 nt, Human
caguucugaagaagaugguacc

SEQ ID NO: 1600750 - RNA, 13 nt, Human
caguucugaagaa

SEQ ID NO: 1600751 - RNA, 14 nt, Human
caguucugaagaag

SEQ ID NO: 1600752 - RNA, 12 nt, Human
caguucugaaga

SEQ ID NO: 1600753 - RNA, 22 nt, Human
caguucggugagcuacaaaugc

SEQ ID NO: 1600754 - RNA, 14 nt, Human
cagugucaaugcag

SEQ ID NO: 1600755 - RNA, 14 nt, Human
cagugugucuaaau

SEQ ID NO: 1600756 - RNA, 23 nt, Human
cagugugucuaaauuugaauguu

SEQ ID NO: 1600757 - RNA, 23 nt, Human
caguugaaaagacuccaaagaaa

SEQ ID NO: 1600758 - RNA, 21 nt, Human
caguugaaaagacuccaaaga

SEQ ID NO: 1600759 - RNA, 22 nt, Human
caguugaaaagacuccaaagaa

SEQ ID NO: 1600760 - RNA, 18 nt, Human
caguugaaaagacuccaa

SEQ ID NO: 1600761 - RNA, 14 nt, Human
caguugaaaagacu

SEQ ID NO: 1600762 - RNA, 14 nt, Human
caguuuucugagaa

SEQ ID NO: 1600763 - RNA, 15 nt, Human
caguuuucugagaaa

SEQ ID NO: 1600764 - RNA, 19 nt, Human
caguuuucugagaaagacu

SEQ ID NO: 1600765 - RNA, 20 nt, Human
caguuuucugagaaagacua

SEQ ID NO: 1600766 - RNA, 15 nt, Human
cauaaaaacaacuuu

SEQ ID NO: 1600767 - RNA, 23 nt, Human
cauaaaaacaacuuuauacccag

SEQ ID NO: 1600768 - RNA, 21 nt, Human
cauaaaaacaacuuuauaccc

SEQ ID NO: 1600769 - RNA, 20 nt, Human
cauaaaaacaacuuuauacc

SEQ ID NO: 1600770 - RNA, 17 nt, Human
cauaaaaacaacuuuau

SEQ ID NO: 1600771 - RNA, 23 nt, Human
cauaaaaagccugcaauuucaua

SEQ ID NO: 1600772 - RNA, 22 nt, Human
cauaaguaauucaagaaaacaa

SEQ ID NO: 1600773 - RNA, 18 nt, Human
cauaaguaauucaagaaa

SEQ ID NO: 1600774 - RNA, 17 nt, Human
cauaaguaauucaagaa

SEQ ID NO: 1600775 - RNA, 16 nt, Human
cauaaguaauucaaga

SEQ ID NO: 1600776 - RNA, 11 nt, Human
cauacauauuu

SEQ ID NO: 1600777 - RNA, 17 nt, Human
cauaccaacacgagcag

SEQ ID NO: 1600778 - RNA, 19 nt, Human
cauacauauuuuuguagca

SEQ ID NO: 1600779 - RNA, 12 nt, Human
cauacauauuuu

SEQ ID NO: 1600780 - RNA, 15 nt, Human
cauacauuguacgaa

SEQ ID NO: 1600781 - RNA, 14 nt, Human
caucuagugagcag

SEQ ID NO: 1600782 - RNA, 22 nt, Human
caucuagugagcagucaggaaa

SEQ ID NO: 1600783 - RNA, 13 nt, Human
caucccucccucc

SEQ ID NO: 1600784 - RNA, 12 nt, Human
caucccucccuc

SEQ ID NO: 1600785 - RNA, 14 nt, Human
caucccucccucca

SEQ ID NO: 1600786 - RNA, 20 nt, Human
caucccucccuccaccuccc

SEQ ID NO: 1600787 - RNA, 18 nt, Human
cauauuuuucacauaucu

SEQ ID NO: 1600788 - RNA, 22 nt, Human
caucaagucuuucacauuuaaa

SEQ ID NO: 1600789 - RNA, 18 nt, Human
caucaaugaaugaaugaa

SEQ ID NO: 1600790 - RNA, 21 nt, Human
cauauuuuucacauaucuagu

SEQ ID NO: 1600791 - RNA, 14 nt, Human
cauauuuuucacau

SEQ ID NO: 1600792 - RNA, 12 nt, Human
aaaaacacagca

SEQ ID NO: 1600793 - RNA, 12 nt, Human
aaaaacaacuuu

SEQ ID NO: 1600794 - RNA, 17 nt, Human
aaaacaaggaugaauua

SEQ ID NO: 1600795 - RNA, 18 nt, Human
aaaacacagcaaggguga

SEQ ID NO: 1600796 - RNA, 12 nt, Human
aaaacacagcaa

SEQ ID NO: 1600797 - RNA, 13 nt, Human
aaaacacagcaag

SEQ ID NO: 1600798 - RNA, 14 nt, Human
aaaacaaggaugaa

SEQ ID NO: 1600799 - RNA, 12 nt, Human
aaaacaacuuua

SEQ ID NO: 1600800 - RNA, 17 nt, Human
aggauguugaaaaaguu

SEQ ID NO: 1600801 - RNA, 14 nt, Human
aggauguugaaaaa

SEQ ID NO: 1600802 - RNA, 14 nt, Human
agcuguaugauucc

SEQ ID NO: 1600803 - RNA, 19 nt, Human
agcuuccuucugugaaagu

SEQ ID NO: 1600804 - RNA, 22 nt, Human
agguuaauuccaauuauaugag

SEQ ID NO: 1600805 - RNA, 15 nt, Human
agguuaauuccaauu

SEQ ID NO: 1600806 - RNA, 18 nt, Human
agcaguucagagcugccc

SEQ ID NO: 1600807 - RNA, 17 nt, Human
agcaguucagagcugcc

SEQ ID NO: 1600808 - RNA, 16 nt, Human
agcaguucagagcugc

SEQ ID NO: 1600809 - RNA, 23 nt, Human
agcaguugaaaagacuccaaaga

SEQ ID NO: 1600810 - RNA, 21 nt, Human
agcaguugaaaagacuccaaa

SEQ ID NO: 1600811 - RNA, 14 nt, Human
agauguagaggaga

SEQ ID NO: 1600812 - RNA, 21 nt, Human
agaugggagaaucacuugaac

SEQ ID NO: 1600813 - RNA, 16 nt, Human
agauguagaggagaaa

SEQ ID NO: 1600814 - RNA, 19 nt, Human
agcaguucagagcugcccu

SEQ ID NO: 1600815 - RNA, 20 nt, Human
agcaguucagagcugcccuc

SEQ ID NO: 1600816 - RNA, 15 nt, Human
agccagauuuuccug

SEQ ID NO: 1600817 - RNA, 19 nt, Human
agccagauuuuccugaaaa

SEQ ID NO: 1600818 - RNA, 21 nt, Human
agauaggucagugcaaauacu

SEQ ID NO: 1600819 - RNA, 17 nt, Human
agacugcauuauauuua

SEQ ID NO: 1600820 - RNA, 14 nt, Human
agacacaacuauuu

SEQ ID NO: 1600821 - RNA, 17 nt, Human
aucagcugcugaaacaa

SEQ ID NO: 1600822 - RNA, 13 nt, Human
auccuuucuaaca

SEQ ID NO: 1600823 - RNA, 22 nt, Human
aucuuauaauuuaaaauaugcu

SEQ ID NO: 1600824 - RNA, 14 nt, Human
augacucagaauau

SEQ ID NO: 1600825 - RNA, 20 nt, Human
augaaacacucaguuguuca

SEQ ID NO: 1600826 - RNA, 14 nt, Human
augccuuuucccaa

SEQ ID NO: 1600827 - RNA, 16 nt, Human
augucaaucagccuag

SEQ ID NO: 1600828 - RNA, 21 nt, Human
auguaagggaaacugccagca

SEQ ID NO: 1600829 - RNA, 22 nt, Human
auguaagggaaacugccagcaa

SEQ ID NO: 1600830 - RNA, 20 nt, Human
auguaagggaaacugccagc

SEQ ID NO: 1600831 - RNA, 17 nt, Human
auguaauaacugugaag

SEQ ID NO: 1600832 - RNA, 19 nt, Human
aguuguaccgcaaugugac

SEQ ID NO: 1600833 - RNA, 18 nt, Human
aguuguaccgcaauguga

SEQ ID NO: 1600834 - RNA, 18 nt, Human
agugauuaccagggacug

SEQ ID NO: 1600835 - RNA, 16 nt, Human
aguccaagcauuuaga

SEQ ID NO: 1600836 - RNA, 21 nt, Human
aguccaagcauuuagauguau

SEQ ID NO: 1600837 - RNA, 15 nt, Human
agucaaauuguguga

SEQ ID NO: 1600838 - RNA, 17 nt, Human
agucaaauugugugaaa

SEQ ID NO: 1600839 - RNA, 13 nt, Human
agucaaauugugu

SEQ ID NO: 1600840 - RNA, 14 nt, Human
auaauuacuauguc

SEQ ID NO: 1600841 - RNA, 22 nt, Human
auauaaguauucuaaauuuuau

SEQ ID NO: 1600842 - RNA, 23 nt, Human
auauuucagauaaucacaauaca

SEQ ID NO: 1600843 - RNA, 14 nt, Human
auauuuauuacugu

SEQ ID NO: 1600844 - RNA, 19 nt, Human
auauuuauuacuguaagaa

SEQ ID NO: 1600845 - RNA, 18 nt, Human
auauuuauuuuaauaaug

SEQ ID NO: 1600846 - RNA, 22 nt, Human
auauuuauuacuguaagaaaau

SEQ ID NO: 1600847 - RNA, 18 nt, Human
auaucacuugucaauaaa

SEQ ID NO: 1600848 - RNA, 16 nt, Human
auauccuuucuaacaa

SEQ ID NO: 1600849 - RNA, 15 nt, Human
auauccuuucuaaca

SEQ ID NO: 1600850 - RNA, 13 nt, Human
acauguuacaaca

SEQ ID NO: 1600851 - RNA, 18 nt, Human
acauuugcucauggaauu

SEQ ID NO: 1600852 - RNA, 14 nt, Human
acauuuguauaaaa

SEQ ID NO: 1600853 - RNA, 16 nt, Human
acccaaguccaagcau

SEQ ID NO: 1600854 - RNA, 15 nt, Human
acccacaagaaauga

SEQ ID NO: 1600855 - RNA, 20 nt, Human
acagcucugcauacucauua

SEQ ID NO: 1600856 - RNA, 19 nt, Human
acaggucauauuaauauau

SEQ ID NO: 1600857 - RNA, 16 nt, Human
acagccagacuggcac

SEQ ID NO: 1600858 - RNA, 13 nt, Human
acagccagacugg

SEQ ID NO: 1600859 - RNA, 15 nt, Human
acagccagacuggca

SEQ ID NO: 1600860 - RNA, 15 nt, Human
acagcaguugaaaag

SEQ ID NO: 1600861 - RNA, 18 nt, Human
acagcaguugaaaagacu

SEQ ID NO: 1600862 - RNA, 21 nt, Human
acagaauauguuucaaacuuu

SEQ ID NO: 1600863 - RNA, 19 nt, Human
acagaauauguuucaaacu

SEQ ID NO: 1600864 - RNA, 17 nt, Human
acagaauauguuucaaa

SEQ ID NO: 1600865 - RNA, 16 nt, Human
acagaauauguuucaa

SEQ ID NO: 1600866 - RNA, 13 nt, Human
acaacuauauugu

SEQ ID NO: 1600867 - RNA, 20 nt, Human
aauuuugaguucuacauaag

SEQ ID NO: 1600868 - RNA, 15 nt, Human
aauuuuauaucuugu

SEQ ID NO: 1600869 - RNA, 16 nt, Human
acaacuauuuuuccaa

SEQ ID NO: 1600870 - RNA, 18 nt, Human
acaacuucccagugaauu

SEQ ID NO: 1600871 - RNA, 17 nt, Human
acaacuucaauauccaa

SEQ ID NO: 1600872 - RNA, 14 nt, Human
acaacuuuauaccc

SEQ ID NO: 1600873 - RNA, 13 nt, Human
acaacuuuauacc

SEQ ID NO: 1600874 - RNA, 19 nt, Human
acuuuauacccagaaaguu

SEQ ID NO: 1600875 - RNA, 14 nt, Human
agaaaauaacaaua

SEQ ID NO: 1600876 - RNA, 23 nt, Human
agaaaauauuauguguuuccaua

SEQ ID NO: 1600877 - RNA, 20 nt, Human
acuuguaaaggaauuuaaaa

SEQ ID NO: 1600878 - RNA, 19 nt, Human
acuuguaaaggaauuuaaa

SEQ ID NO: 1600879 - RNA, 14 nt, Human
acuuggucugugag

SEQ ID NO: 1600880 - RNA, 15 nt, Human
acuuggucugugaga

SEQ ID NO: 1600881 - RNA, 21 nt, Human
acuuggucugugagaugcuag

SEQ ID NO: 1600882 - RNA, 12 nt, Human
acuguuuugaau

SEQ ID NO: 1600883 - RNA, 16 nt, Human
acuaagagagaaugag

SEQ ID NO: 1600884 - RNA, 12 nt, Human
acucccuuucaa

SEQ ID NO: 1600885 - RNA, 13 nt, Human
acucccuuucaac

SEQ ID NO: 1600886 - RNA, 14 nt, Human
acuagcuauggugu

SEQ ID NO: 1600887 - RNA, 14 nt, Human
acucaaaucaagaa

SEQ ID NO: 1600888 - RNA, 21 nt, Human
acucauaaaaagccugcaauu

SEQ ID NO: 1600889 - RNA, 22 nt, Human
aaccacuggaaaguuuaugguu

SEQ ID NO: 1600890 - RNA, 15 nt, Human
aacacgagcaggcua

SEQ ID NO: 1600891 - RNA, 13 nt, Human
aagaaauguaagg

SEQ ID NO: 1600892 - RNA, 14 nt, Human
aagaaauguaaggg

SEQ ID NO: 1600893 - RNA, 16 nt, Human
aacuuuggaacaagau

SEQ ID NO: 1600894 - RNA, 19 nt, Human
aaacugccagcaacgcagg

SEQ ID NO: 1600895 - RNA, 16 nt, Human
aaacugacucuuaaga

SEQ ID NO: 1600896 - RNA, 17 nt, Human
aaacugacucuuaagaa

SEQ ID NO: 1600897 - RNA, 14 nt, Human
aaacugccagcaac

SEQ ID NO: 1600898 - RNA, 15 nt, Human
aaacugccagcaacg

SEQ ID NO: 1600899 - RNA, 17 nt, Human
aaagaugaaaauauuug

SEQ ID NO: 1600900 - RNA, 13 nt, Human
aaagaugaaaaua

SEQ ID NO: 1600901 - RNA, 16 nt, Human
aaagaugaaaauauuu

SEQ ID NO: 1600902 - RNA, 21 nt, Human
aaaauuauuuuguucauacau

SEQ ID NO: 1600903 - RNA, 12 nt, Human
aaauaacaauga

SEQ ID NO: 1600904 - RNA, 18 nt, Human
aaauggcuuccuggcaau

SEQ ID NO: 1600905 - RNA, 18 nt, Human
aaaucaaauaugcaaagc

SEQ ID NO: 1600906 - RNA, 19 nt, Human
aaaucaaauaugcaaagca

SEQ ID NO: 1600907 - RNA, 14 nt, Human
aaauaguauuugag

SEQ ID NO: 1600908 - RNA, 16 nt, Human
aagauuuaccacuugu

SEQ ID NO: 1600909 - RNA, 13 nt, Human
aagccagauuuuc

SEQ ID NO: 1600910 - RNA, 14 nt, Human
aauaaaauggguuu

SEQ ID NO: 1600911 - RNA, 19 nt, Human
aauaaaauggguuuuacug

SEQ ID NO: 1600912 - RNA, 21 nt, Human
aauaauccuaaacauaugaau

SEQ ID NO: 1600913 - RNA, 18 nt, Human
aaguauguguaaaaugug

SEQ ID NO: 1600914 - RNA, 13 nt, Human
aaucacaauacau

SEQ ID NO: 1600915 - RNA, 15 nt, Human
aaucaagaaacuuaa

SEQ ID NO: 1600916 - RNA, 16 nt, Human
aauauuauguuaaaac

SEQ ID NO: 1600917 - RNA, 14 nt, Human
aauauuauguguuu

SEQ ID NO: 1600918 - RNA, 13 nt, Human
aauccauacauuu

SEQ ID NO: 1600919 - RNA, 14 nt, Human
aauccauacauuug

SEQ ID NO: 1600920 - RNA, 18 nt, Human
aaucucauaauuuauaca

SEQ ID NO: 1600921 - RNA, 17 nt, Human
aaugauaacuggaaacu

SEQ ID NO: 1600922 - RNA, 21 nt, Human
aaugauaaguaaaugcuaggu

SEQ ID NO: 1600923 - RNA, 20 nt, Human
aaugauaacuggaaacuuca

SEQ ID NO: 1600924 - RNA, 18 nt, Human
aaugauaaguaaaugcua

SEQ ID NO: 1600925 - RNA, 14 nt, Human
aauuaguuuuauau

SEQ ID NO: 1600926 - RNA, 17 nt, Human
aauuaguuuuauaugcu

SEQ ID NO: 1600927 - RNA, 20 nt, Human
aauuaguuuuauaugcuucu

SEQ ID NO: 1600928 - RNA, 22 nt, Human
aauuaaauuuugaguucuacau

SEQ ID NO: 1600929 - RNA, 14 nt, Human
aauuaaauuuugag

SEQ ID NO: 1600930 - RNA, 23 nt, Human
cuuggucucagugucaaugcagc

SEQ ID NO: 1600931 - RNA, 20 nt, Human
gaaaagacuccaaagaaaug

SEQ ID NO: 1600932 - RNA, 21 nt, Human
gaaaagacuccaaagaaaugu

SEQ ID NO: 1600933 - RNA, 23 nt, Human
gaaacuucagcgguuuauauaag

SEQ ID NO: 1600934 - RNA, 17 nt, Human
gaaaucaaauaugcaaa

SEQ ID NO: 1600935 - RNA, 16 nt, Human
gaaaucaaauaugcaa

SEQ ID NO: 1600936 - RNA, 19 nt, Human
gaaaucaaagagagaaaau

SEQ ID NO: 1600937 - RNA, 23 nt, Human
gaaaucaaauaugcaaagcacug

SEQ ID NO: 1600938 - RNA, 18 nt, Human
gaaaugaaagcagggacu

SEQ ID NO: 1600939 - RNA, 17 nt, Human
gaacaaauuuacagaga

SEQ ID NO: 1600940 - RNA, 18 nt, Human
gaacaaauuuacagagac

SEQ ID NO: 1600941 - RNA, 23 nt, Human
gaacaaauuuacagagacagaaa

SEQ ID NO: 1600942 - RNA, 16 nt, Human
gaacaagaugguucua

SEQ ID NO: 1600943 - RNA, 23 nt, Human
cuggaaaaguauguuagugcaaa

SEQ ID NO: 1600944 - RNA, 18 nt, Human
cugccuccccuccucugc

SEQ ID NO: 1600945 - RNA, 17 nt, Human
cugccuccccuccucug

SEQ ID NO: 1600946 - RNA, 20 nt, Human
cugccuccccuccucugcuu

SEQ ID NO: 1600947 - RNA, 19 nt, Human
cugccuccccuccucugcu

SEQ ID NO: 1600948 - RNA, 21 nt, Human
cugccuccccuccucugcuug

SEQ ID NO: 1600949 - RNA, 20 nt, Human
cuguaagaaaauaucacuug

SEQ ID NO: 1600950 - RNA, 20 nt, Human
cugucuacacuaagagagaa

SEQ ID NO: 1600951 - RNA, 12 nt, Human
cuggugccucac

SEQ ID NO: 1600952 - RNA, 21 nt, Human
cuuaaaaaugguuuaaauggu

SEQ ID NO: 1600953 - RNA, 13 nt, Human
cuuaaaaaugguu

SEQ ID NO: 1600954 - RNA, 20 nt, Human
cuuaaaaaugguuuaaaugg

SEQ ID NO: 1600955 - RNA, 23 nt, Human
cugugaaguuuacauuguaaaua

SEQ ID NO: 1600956 - RNA, 23 nt, Human
cugugagaugcuagaacucccuu

SEQ ID NO: 1600957 - RNA, 19 nt, Human
cuguucacagccagacugg

SEQ ID NO: 1600958 - RNA, 22 nt, Human
cuguucacagccagacuggcac

SEQ ID NO: 1600959 - RNA, 22 nt, Human
gagcuguucacagccagacugg

SEQ ID NO: 1600960 - RNA, 20 nt, Human
gagcuguucacagccagacu

SEQ ID NO: 1600961 - RNA, 14 nt, Human
gagcagucaggaaa

SEQ ID NO: 1600962 - RNA, 18 nt, Human
gaggcugagaugggagaa

SEQ ID NO: 1600963 - RNA, 17 nt, Human
gaggcuccacuuggucu

SEQ ID NO: 1600964 - RNA, 18 nt, Human
gaggcuccacuuggucug

SEQ ID NO: 1600965 - RNA, 15 nt, Human
gaggcuccacuuggu

SEQ ID NO: 1600966 - RNA, 21 nt, Human
gaggacgcucucuggccuucg

SEQ ID NO: 1600967 - RNA, 12 nt, Human
gaggagaaacug

SEQ ID NO: 1600968 - RNA, 14 nt, Human
gaggagaaacugga

SEQ ID NO: 1600969 - RNA, 22 nt, Human
gacuuuuuauggcacuaguauu

SEQ ID NO: 1600970 - RNA, 21 nt, Human
gagauugugccccugcacucc

SEQ ID NO: 1600971 - RNA, 20 nt, Human
gagaugcuagaacucccuuu

SEQ ID NO: 1600972 - RNA, 16 nt, Human
gagaugcuagaacucc

SEQ ID NO: 1600973 - RNA, 18 nt, Human
gacagucaccucauggaa

SEQ ID NO: 1600974 - RNA, 12 nt, Human
gacagcucugca

SEQ ID NO: 1600975 - RNA, 14 nt, Human
gacgcucucuggcc

SEQ ID NO: 1600976 - RNA, 14 nt, Human
gaaugaauggcuaa

SEQ ID NO: 1600977 - RNA, 22 nt, Human
gaauauugcuuuggucauauga

SEQ ID NO: 1600978 - RNA, 13 nt, Human
gaauuacauuugu

SEQ ID NO: 1600979 - RNA, 15 nt, Human
gaauuacauuuguau

SEQ ID NO: 1600980 - RNA, 18 nt, Human
gaauuacauuuguauaaa

SEQ ID NO: 1600981 - RNA, 20 nt, Human
gaauuacauuuguauaaaau

SEQ ID NO: 1600982 - RNA, 14 nt, Human
gaauuaacacauga

SEQ ID NO: 1600983 - RNA, 15 nt, Human
gaauuaacacaugau

SEQ ID NO: 1600984 - RNA, 22 nt, Human
gaaugauuaugaauuacauuug

SEQ ID NO: 1600985 - RNA, 14 nt, Human
gaaugauuaugaau

SEQ ID NO: 1600986 - RNA, 15 nt, Human
gaaugaauggcuaag

SEQ ID NO: 1600987 - RNA, 20 nt, Human
gaaugaauggcuaagcaaaa

SEQ ID NO: 1600988 - RNA, 12 nt, Human
gcagaacaguga

SEQ ID NO: 1600989 - RNA, 13 nt, Human
gcagaacagugau

SEQ ID NO: 1600990 - RNA, 18 nt, Human
gcagaacagugauuacca

SEQ ID NO: 1600991 - RNA, 22 nt, Human
gcagaacagugauuaccaggga

SEQ ID NO: 1600992 - RNA, 11 nt, Human
gcagcugccuc

SEQ ID NO: 1600993 - RNA, 22 nt, Human
gcaguuguugcccacagcugua

SEQ ID NO: 1600994 - RNA, 13 nt, Human
gcagugaugucac

SEQ ID NO: 1600995 - RNA, 20 nt, Human
gcaucuagcaugucgucaaa

SEQ ID NO: 1600996 - RNA, 22 nt, Human
gccucauguccacugguucuuc

SEQ ID NO: 1600997 - RNA, 13 nt, Human
gccuccauccuga

SEQ ID NO: 1600998 - RNA, 14 nt, Human
gccuccauccugag

SEQ ID NO: 1600999 - RNA, 15 nt, Human
gccuccauccugagg

SEQ ID NO: 1601000 - RNA, 11 nt, Human
gccccaaaagg

SEQ ID NO: 1601001 - RNA, 13 nt, Human
gcauuuagaugua

SEQ ID NO: 1601002 - RNA, 19 nt, Human
gcauuuaggccaugggaca

SEQ ID NO: 1601003 - RNA, 12 nt, Human
gcauuuagaugu

SEQ ID NO: 1601004 - RNA, 16 nt, Human
ggaaaaaauaacaaug

SEQ ID NO: 1601005 - RNA, 13 nt, Human
ggaaacugccagc

SEQ ID NO: 1601006 - RNA, 19 nt, Human
ggaaaucaggguuaguauu

SEQ ID NO: 1601007 - RNA, 17 nt, Human
ggacagucaccucaugg

SEQ ID NO: 1601008 - RNA, 18 nt, Human
ggacagucaccucaugga

SEQ ID NO: 1601009 - RNA, 21 nt, Human
ggacagucaccucauggaauu

SEQ ID NO: 1601010 - RNA, 13 nt, Human
gcugcugaaacaa

SEQ ID NO: 1601011 - RNA, 20 nt, Human
gcuguauuuuaaaagaauga

SEQ ID NO: 1601012 - RNA, 18 nt, Human
gcuguauuuuaaaagaau

SEQ ID NO: 1601013 - RNA, 21 nt, Human
gcuguauuuuaaaagaaugau

SEQ ID NO: 1601014 - RNA, 14 nt, Human
gcugccuccccucc

SEQ ID NO: 1601015 - RNA, 23 nt, Human
ggaucuucaucugacuaugacau

SEQ ID NO: 1601016 - RNA, 20 nt, Human
ggcuaagcuucacuguaaaa

SEQ ID NO: 1601017 - RNA, 18 nt, Human
ggccuucggccuccaucc

SEQ ID NO: 1601018 - RNA, 22 nt, Human
ggccuucggccuccauccugag

SEQ ID NO: 1601019 - RNA, 16 nt, Human
ggccuucggccuccau

SEQ ID NO: 1601020 - RNA, 23 nt, Human
aaaaagauuuucagaaaauauua

SEQ ID NO: 1601021 - RNA, 13 nt, Human
aaaaauacaaaaa

SEQ ID NO: 1601022 - RNA, 20 nt, Human
aaaaagccugcaauuucaua

SEQ ID NO: 1601023 - RNA, 20 nt, Human
aaagggcuguuauaaucuuu

SEQ ID NO: 1601024 - RNA, 22 nt, Human
aaagggcuguuauaaucuuuca

SEQ ID NO: 1601025 - RNA, 13 nt, Human
aaagcuuauuaaa

SEQ ID NO: 1601026 - RNA, 16 nt, Human
aaagcagaacagugau

SEQ ID NO: 1601027 - RNA, 12 nt, Human
aaacuuuaugcu

SEQ ID NO: 1601028 - RNA, 19 nt, Human
aaacuuuaugcuaagugaa

SEQ ID NO: 1601029 - RNA, 19 nt, Human
gguuuuauuguuuaaaauc

SEQ ID NO: 1601030 - RNA, 17 nt, Human
aaaguauguuagugcaa

SEQ ID NO: 1601031 - RNA, 20 nt, Human
gguucuagcauggcauauuu

SEQ ID NO: 1601032 - RNA, 17 nt, Human
gguguuuuaaaaaaucu

SEQ ID NO: 1601033 - RNA, 15 nt, Human
guaauagagcaaaau

SEQ ID NO: 1601034 - RNA, 19 nt, Human
guaauagagcaaaauugau

SEQ ID NO: 1601035 - RNA, 13 nt, Human
aaauaugcaaagc

SEQ ID NO: 1601036 - RNA, 15 nt, Human
aaauaugcaaagcac

SEQ ID NO: 1601037 - RNA, 16 nt, Human
aaauaugcaaagcacu

SEQ ID NO: 1601038 - RNA, 17 nt, Human
aaauaugcaaagcacug

SEQ ID NO: 1601039 - RNA, 20 nt, Human
aaauauuguguugugaaugu

SEQ ID NO: 1601040 - RNA, 21 nt, Human
aaauaccaugccauuuaaagc

SEQ ID NO: 1601041 - RNA, 22 nt, Human
aaauaucacuugucaauaaaau

SEQ ID NO: 1601042 - RNA, 15 nt, Human
aaauauauuuaauga

SEQ ID NO: 1601043 - RNA, 18 nt, Human
aaauauaugcuaagucuu

SEQ ID NO: 1601044 - RNA, 14 nt, Human
aaauauauuuaaug

SEQ ID NO: 1601045 - RNA, 19 nt, Human
aaacuucagacauagaauu

SEQ ID NO: 1601046 - RNA, 21 nt, Human
aaacuucccuuucugcuugug

SEQ ID NO: 1601047 - RNA, 14 nt, Human
ggucagugcaaaua

SEQ ID NO: 1601048 - RNA, 18 nt, Human
ggucauauuaauauauuu

SEQ ID NO: 1601049 - RNA, 16 nt, Human
aaaaugguuuaaaugg

SEQ ID NO: 1601050 - RNA, 18 nt, Human
aaaaugguuuaaaugguc

SEQ ID NO: 1601051 - RNA, 16 nt, Human
aaaauggguuuuacug

SEQ ID NO: 1601052 - RNA, 15 nt, Human
gggcgugguggugag

SEQ ID NO: 1601053 - RNA, 11 nt, Human
aaaauaauuuu

SEQ ID NO: 1601054 - RNA, 16 nt, Human
aaaauaauuuuuauau

SEQ ID NO: 1601055 - RNA, 17 nt, Human
aaaauaauuuuuauauu

SEQ ID NO: 1601056 - RNA, 20 nt, Human
aaaauaauuuuuauauuuga

SEQ ID NO: 1601057 - RNA, 14 nt, Human
aaaauacacacuca

SEQ ID NO: 1601058 - RNA, 15 nt, Human
aaaauauauuuaaug

SEQ ID NO: 1601059 - RNA, 16 nt, Human
aaaauauauuuaauga

SEQ ID NO: 1601060 - RNA, 15 nt, Human
cugaaacaacaaaua

SEQ ID NO: 1601061 - RNA, 13 nt, Human
cugaaacuucccu

SEQ ID NO: 1601062 - RNA, 22 nt, Human
cucuuagaugcaguucugaaga

SEQ ID NO: 1601063 - RNA, 16 nt, Human
cugagaugugaacaca

SEQ ID NO: 1601064 - RNA, 14 nt, Human
cucguuaauuugua

SEQ ID NO: 1601065 - RNA, 20 nt, Human
cuccucugcuugccaucccu

SEQ ID NO: 1601066 - RNA, 17 nt, Human
cuccucugcuugccauc

SEQ ID NO: 1601067 - RNA, 16 nt, Human
cuccucugcuugccau

SEQ ID NO: 1601068 - RNA, 15 nt, Human
cuccucugcuugcca

SEQ ID NO: 1601069 - RNA, 22 nt, Human
cuccucugcuugccaucccucc

SEQ ID NO: 1601070 - RNA, 21 nt, Human
cuccucugcuugccaucccuc

SEQ ID NO: 1601071 - RNA, 22 nt, Human
cuccugggcagcugccuccccu

SEQ ID NO: 1601072 - RNA, 19 nt, Human
cuccugggcagcugccucc

SEQ ID NO: 1601073 - RNA, 18 nt, Human
cuccugggcagcugccuc

SEQ ID NO: 1601074 - RNA, 17 nt, Human
cuccugggcagcugccu

SEQ ID NO: 1601075 - RNA, 16 nt, Human
cuccugggcagcugcc

SEQ ID NO: 1601076 - RNA, 15 nt, Human
cuccugggcagcugc

SEQ ID NO: 1601077 - RNA, 14 nt, Human
cuccugggcagcug

SEQ ID NO: 1601078 - RNA, 12 nt, Human
cuccugggcagc

SEQ ID NO: 1601079 - RNA, 14 nt, Human
cuccucugcuugcc

SEQ ID NO: 1601080 - RNA, 12 nt, Human
cuccucugcuug

SEQ ID NO: 1601081 - RNA, 13 nt, Human
cuccacuuggucu

SEQ ID NO: 1601082 - RNA, 15 nt, Human
cuccacuuggucugu

SEQ ID NO: 1601083 - RNA, 16 nt, Human
cuccacuuggucugug

SEQ ID NO: 1601084 - RNA, 17 nt, Human
cuccacuuggucuguga

SEQ ID NO: 1601085 - RNA, 21 nt, Human
cuccacuuggucugugagaug

SEQ ID NO: 1601086 - RNA, 22 nt, Human
cuccacuuggucugugagaugc

SEQ ID NO: 1601087 - RNA, 23 nt, Human
cuccacuuggucugugagaugcu

SEQ ID NO: 1601088 - RNA, 23 nt, Human
cucaaaauaccaugccauuuaaa

SEQ ID NO: 1601089 - RNA, 12 nt, Human
cuagaacucccu

SEQ ID NO: 1601090 - RNA, 13 nt, Human
cuagaacucccuu

SEQ ID NO: 1601091 - RNA, 22 nt, Human
cuaaguaaaaccacagcaguug

SEQ ID NO: 1601092 - RNA, 23 nt, Human
cuaaguaaaaccacagcaguuga

SEQ ID NO: 1601093 - RNA, 20 nt, Human
cuaaguaaaaccacagcagu

SEQ ID NO: 1601094 - RNA, 20 nt, Human
cuacaugagguacugagagu

SEQ ID NO: 1601095 - RNA, 18 nt, Human
cuacauacuauggaauuu

SEQ ID NO: 1601096 - RNA, 18 nt, Human
cuacaaaaacacagcaag

SEQ ID NO: 1601097 - RNA, 16 nt, Human
cuacaaaaacacagca

SEQ ID NO: 1601098 - RNA, 17 nt, Human
cuacaaaaacacagcaa

SEQ ID NO: 1601099 - RNA, 18 nt, Human
cgcaggcccccaggugcc

SEQ ID NO: 1601100 - RNA, 23 nt, Human
cgccacuguuuugaaucucauaa

SEQ ID NO: 1601101 - RNA, 15 nt, Human
ccuguaaucacagcu

SEQ ID NO: 1601102 - RNA, 23 nt, Human
ccucauggaauuggagcucgugg

SEQ ID NO: 1601103 - RNA, 18 nt, Human
ccccugcacuccagccug

SEQ ID NO: 1601104 - RNA, 13 nt, Human
ccauacauuugug

SEQ ID NO: 1601105 - RNA, 14 nt, Human
ccauacauuugugu

SEQ ID NO: 1601106 - RNA, 22 nt, Human
ccauuuaaagcuuauuaaaacu

SEQ ID NO: 1601107 - RNA, 13 nt, Human
cagauccuggaaa

SEQ ID NO: 1601108 - RNA, 12 nt, Human
cagauccuggaa

SEQ ID NO: 1601109 - RNA, 17 nt, Human
cagagguugcagugagc

SEQ ID NO: 1601110 - RNA, 18 nt, Human
cagcaguucagagcugcc

SEQ ID NO: 1601111 - RNA, 13 nt, Human
cagcaguucagag

SEQ ID NO: 1601112 - RNA, 21 nt, Human
cagcuccccucggagaagagc

SEQ ID NO: 1601113 - RNA, 22 nt, Human
cagcuccccucggagaagagcu

SEQ ID NO: 1601114 - RNA, 16 nt, Human
cagucaccucauggaa

SEQ ID NO: 1601115 - RNA, 15 nt, Human
cagucacauuccaag

SEQ ID NO: 1601116 - RNA, 19 nt, Human
cagucaccucauggaauug

SEQ ID NO: 1601117 - RNA, 19 nt, Human
caggugccaguuauggcua

SEQ ID NO: 1601118 - RNA, 20 nt, Human
cagucugacuguuuccauca

SEQ ID NO: 1601119 - RNA, 23 nt, Human
ccacagcaguugaaaagacucca

SEQ ID NO: 1601120 - RNA, 17 nt, Human
ccacagcaguugaaaag

SEQ ID NO: 1601121 - RNA, 18 nt, Human
ccacagcaguugaaaaga

SEQ ID NO: 1601122 - RNA, 12 nt, Human
ccacagcaguug

SEQ ID NO: 1601123 - RNA, 19 nt, Human
cauuuguauaaaauaauuu

SEQ ID NO: 1601124 - RNA, 20 nt, Human
cauuuguauaaaauaauuuu

SEQ ID NO: 1601125 - RNA, 18 nt, Human
ccaaauguucaucaauga

SEQ ID NO: 1601126 - RNA, 17 nt, Human
ccaaauguucaucaaug

SEQ ID NO: 1601127 - RNA, 14 nt, Human
caugauguuuagaa

SEQ ID NO: 1601128 - RNA, 19 nt, Human
cauuauauuuauuacugua

SEQ ID NO: 1601129 - RNA, 23 nt, Human
cauaugcuguauauccuuucuaa

SEQ ID NO: 1601130 - RNA, 19 nt, Human
cauauuaauauauuuccau

SEQ ID NO: 1601131 - RNA, 15 nt, Human
cauauuaauauauuu

SEQ ID NO: 1601132 - RNA, 14 nt, Human
cauauuaauauauu

SEQ ID NO: 1601133 - RNA, 14 nt, Human
caaguauuagaaua

SEQ ID NO: 1601134 - RNA, 20 nt, Human
caaguauuagaauaccacag

SEQ ID NO: 1601135 - RNA, 16 nt, Human
cacaagacugcacauc

SEQ ID NO: 1601136 - RNA, 12 nt, Human
caauuuaaaaaa

SEQ ID NO: 1601137 - RNA, 12 nt, Human
caauauuucaga

SEQ ID NO: 1601138 - RNA, 20 nt, Human
caauauuucagauaaucaca

SEQ ID NO: 1601139 - RNA, 21 nt, Human
caauauuucagauaaucacaa

SEQ ID NO: 1601140 - RNA, 14 nt, Human
caaugcuguauuuu

SEQ ID NO: 1601141 - RNA, 23 nt, Human
caaugcuguauuuuaaaagaaug

SEQ ID NO: 1601142 - RNA, 11 nt, Human
cacugaagaag

SEQ ID NO: 1601143 - RNA, 21 nt, Human
caccuacaugagguacugaga

SEQ ID NO: 1601144 - RNA, 23 nt, Human
caccucaaaauaccaugccauuu

SEQ ID NO: 1601145 - RNA, 20 nt, Human
cacuuggucugugagaugcu

SEQ ID NO: 1601146 - RNA, 12 nt, Human
cagaauauguuu

SEQ ID NO: 1601147 - RNA, 17 nt, Human
cagaauauguuucaaac

SEQ ID NO: 1601148 - RNA, 15 nt, Human
cagaauauguuucaa

SEQ ID NO: 1601149 - RNA, 14 nt, Human
cagaauauguuuca

SEQ ID NO: 1601150 - RNA, 13 nt, Human
cagaauauguuuc

SEQ ID NO: 1601151 - RNA, 20 nt, Human
cagaauauguuucaaacuuu

SEQ ID NO: 1601152 - RNA, 18 nt, Human
cagaauauguuucaaacu

SEQ ID NO: 1601153 - RNA, 13 nt, Human
cagaauauugcuu

SEQ ID NO: 1601154 - RNA, 15 nt, Human
caacacgagcaggcu

SEQ ID NO: 1601155 - RNA, 21 nt, Human
caacuaucucauuuccaagca

SEQ ID NO: 1601156 - RNA, 19 nt, Human
caacccaaauguucaucaa

SEQ ID NO: 1601157 - RNA, 17 nt, Human
auuuuauagcuacuaau

SEQ ID NO: 1601158 - RNA, 18 nt, Human
caaaaaaauauauuuaau

SEQ ID NO: 1601159 - RNA, 13 nt, Human
auuguaaaauggu

SEQ ID NO: 1601160 - RNA, 23 nt, Human
auuguaauaggcguaacuaauuu

SEQ ID NO: 1601161 - RNA, 14 nt, Human
auuguaaaugugcu

SEQ ID NO: 1601162 - RNA, 15 nt, Human
auuguaaaugugcuu

SEQ ID NO: 1601163 - RNA, 17 nt, Human
auuguaaaugugcuuuu

SEQ ID NO: 1601164 - RNA, 19 nt, Human
auuguuuaaaaucauuucu

SEQ ID NO: 1601165 - RNA, 15 nt, Human
auuucuaugaaauau

SEQ ID NO: 1601166 - RNA, 18 nt, Human
auuucuaugaaauauuau

SEQ ID NO: 1601167 - RNA, 20 nt, Human
auuucuaugaaauauuaugu

SEQ ID NO: 1601168 - RNA, 22 nt, Human
auuuaaugauaaguaaaugcua

SEQ ID NO: 1601169 - RNA, 16 nt, Human
auuucagcagcugcag

SEQ ID NO: 1601170 - RNA, 19 nt, Human
auuuauacaggucauauua

SEQ ID NO: 1601171 - RNA, 17 nt, Human
auucuugccaaauauaa

SEQ ID NO: 1601172 - RNA, 18 nt, Human
auucacaagacccaaaag

SEQ ID NO: 1601173 - RNA, 22 nt, Human
auucaagaaaacaacuucaaua

SEQ ID NO: 1601174 - RNA, 18 nt, Human
auuaaauuuugaguucua

SEQ ID NO: 1601175 - RNA, 20 nt, Human
auuaaauuuugaguucuaca

SEQ ID NO: 1601176 - RNA, 19 nt, Human
uuuuuauauuugaaauauu

SEQ ID NO: 1601177 - RNA, 17 nt, Human
uuuuguucauacauauu

SEQ ID NO: 1601178 - RNA, 14 nt, Human
uuuuguucauacau

SEQ ID NO: 1601179 - RNA, 14 nt, Human
uuuugaguucuaca

SEQ ID NO: 1601180 - RNA, 17 nt, Human
auuauauaaguauucua

SEQ ID NO: 1601181 - RNA, 14 nt, Human
auuauauaaguauu

SEQ ID NO: 1601182 - RNA, 20 nt, Human
auuauauaaguauucuaaau

SEQ ID NO: 1601183 - RNA, 17 nt, Human
auuacauuuguauaaaa

SEQ ID NO: 1601184 - RNA, 18 nt, Human
auuacauuuguauaaaau

SEQ ID NO: 1601185 - RNA, 20 nt, Human
auuacauuuguauaaaauaa

SEQ ID NO: 1601186 - RNA, 19 nt, Human
uuuuugugaaaagcuccau

SEQ ID NO: 1601187 - RNA, 23 nt, Human
auuaaguaaugauaacuggaaac

SEQ ID NO: 1601188 - RNA, 17 nt, Human
uuuuuguagcacugaca

SEQ ID NO: 1601189 - RNA, 20 nt, Human
augugcuaguaauuggaaag

SEQ ID NO: 1601190 - RNA, 19 nt, Human
augugcuaguaauuggaaa

SEQ ID NO: 1601191 - RNA, 16 nt, Human
uuuuaauaauguuuca

SEQ ID NO: 1601192 - RNA, 12 nt, Human
uuuuaauaaugu

SEQ ID NO: 1601193 - RNA, 13 nt, Human
uuuuaauaauguu

SEQ ID NO: 1601194 - RNA, 14 nt, Human
uuuuaauaauguuu

SEQ ID NO: 1601195 - RNA, 18 nt, Human
auguucaucaaugaauga

SEQ ID NO: 1601196 - RNA, 15 nt, Human
auguuuucaggcuag

SEQ ID NO: 1601197 - RNA, 17 nt, Human
auguuuucaggcuagau

SEQ ID NO: 1601198 - RNA, 21 nt, Human
auguuuucaggcuagauguau

SEQ ID NO: 1601199 - RNA, 15 nt, Human
auuaaaagaauauuu

SEQ ID NO: 1601200 - RNA, 14 nt, Human
uuuucucuaggaaa

SEQ ID NO: 1601201 - RNA, 16 nt, Human
uuuucucuaggaaaua

SEQ ID NO: 1601202 - RNA, 15 nt, Human
uuuucugagaaagac

SEQ ID NO: 1601203 - RNA, 18 nt, Human
uuuucugagaaagacuau

SEQ ID NO: 1601204 - RNA, 15 nt, Human
uuuuccaaaauaauu

SEQ ID NO: 1601205 - RNA, 14 nt, Human
auucuaaauuuuau

SEQ ID NO: 1601206 - RNA, 18 nt, Human
auugacccacaagaaaug

SEQ ID NO: 1601207 - RNA, 21 nt, Human
auugacccacaagaaaugaaa

SEQ ID NO: 1601208 - RNA, 14 nt, Human
auuugaaauauuga

SEQ ID NO: 1601209 - RNA, 19 nt, Human
auuuauuuuaauaauguuu

SEQ ID NO: 1601210 - RNA, 20 nt, Human
auuuauuuuaauaauguuuc

SEQ ID NO: 1601211 - RNA, 12 nt, Human
auuucauuucuu

SEQ ID NO: 1601212 - RNA, 17 nt, Human
auuuauuuuaauaaugu

SEQ ID NO: 1601213 - RNA, 13 nt, Human
auuuagauguaua

SEQ ID NO: 1601214 - RNA, 18 nt, Human
auuuuaaaagaaugauua

SEQ ID NO: 1601215 - RNA, 22 nt, Human
auuuuaaaagaaugauuaugaa

SEQ ID NO: 1601216 - RNA, 18 nt, Human
auuuguauaaaauaauuu

SEQ ID NO: 1601217 - RNA, 19 nt, Human
auuuguauaaaauaauuuu

SEQ ID NO: 1601218 - RNA, 21 nt, Human
auuuguauaaaauaauuuuua

SEQ ID NO: 1601219 - RNA, 17 nt, Human
auuuuaaaagaaugauu

SEQ ID NO: 1601220 - RNA, 22 nt, Human
auuuucaguuauuauauuuaca

SEQ ID NO: 1601221 - RNA, 17 nt, Human
auuuucagaaaauauua

SEQ ID NO: 1601222 - RNA, 14 nt, Human
auuuucagaaaaua

SEQ ID NO: 1601223 - RNA, 11 nt, Human
uugcucaugga

SEQ ID NO: 1601224 - RNA, 12 nt, Human
uugcucauggaa

SEQ ID NO: 1601225 - RNA, 21 nt, Human
augaaauauuauguuaaaacu

SEQ ID NO: 1601226 - RNA, 20 nt, Human
augaaauauuauguuaaaac

SEQ ID NO: 1601227 - RNA, 13 nt, Human
uuguauaaaauaa

SEQ ID NO: 1601228 - RNA, 21 nt, Human
augaauuaguuuuauaugcuu

SEQ ID NO: 1601229 - RNA, 23 nt, Human
augaauuaguuuuauaugcuucu

SEQ ID NO: 1601230 - RNA, 18 nt, Human
augaauuacauuuguaua

SEQ ID NO: 1601231 - RNA, 19 nt, Human
augaauuacauuuguauaa

SEQ ID NO: 1601232 - RNA, 22 nt, Human
augaauuacauuuguauaaaau

SEQ ID NO: 1601233 - RNA, 18 nt, Human
uugugaagcaaaauuuuu

SEQ ID NO: 1601234 - RNA, 14 nt, Human
augauaacuggaaa

SEQ ID NO: 1601235 - RNA, 19 nt, Human
augacauaaaaacaacuuu

SEQ ID NO: 1601236 - RNA, 22 nt, Human
augggacauuugcucauggaau

SEQ ID NO: 1601237 - RNA, 21 nt, Human
augggacauuugcucauggaa

SEQ ID NO: 1601238 - RNA, 21 nt, Human
auggcuauaggugcuacaaaa

SEQ ID NO: 1601239 - RNA, 23 nt, Human
auggcuauaggugcuacaaaaac

SEQ ID NO: 1601240 - RNA, 16 nt, Human
auggcuauaggugcua

SEQ ID NO: 1601241 - RNA, 19 nt, Human
auggcuauaggugcuacaa

SEQ ID NO: 1601242 - RNA, 17 nt, Human
auggaauuucucccagu

SEQ ID NO: 1601243 - RNA, 13 nt, Human
uuucuaugaaaua

SEQ ID NO: 1601244 - RNA, 14 nt, Human
uuucuaugaaauau

SEQ ID NO: 1601245 - RNA, 20 nt, Human
uuucuaugaaauauuauguu

SEQ ID NO: 1601246 - RNA, 14 nt, Human
uuucugcaucagcu

SEQ ID NO: 1601247 - RNA, 14 nt, Human
uuugaaauauugac

SEQ ID NO: 1601248 - RNA, 15 nt, Human
uuugaaauauugacu

SEQ ID NO: 1601249 - RNA, 24 nt, Human
uuuaaagcuuauuaaaacucauuu

SEQ ID NO: 1601250 - RNA, 17 nt, Human
uuuauaugcuucuguuu

SEQ ID NO: 1601251 - RNA, 19 nt, Human
uuuauaugcuucuguuuua

SEQ ID NO: 1601252 - RNA, 16 nt, Human
uuuauuuuaauaaugu

SEQ ID NO: 1601253 - RNA, 16 nt, Human
auggaacauaaaauac

SEQ ID NO: 1601254 - RNA, 14 nt, Human
augcuguauuuuaa

SEQ ID NO: 1601255 - RNA, 19 nt, Human
augcuguauuuuaaaagaa

SEQ ID NO: 1601256 - RNA, 23 nt, Human
augcugucuacacuaagagagaa

SEQ ID NO: 1601257 - RNA, 19 nt, Human
uuuauuacuguaagaaaau

SEQ ID NO: 1601258 - RNA, 19 nt, Human
augcuguauauccuuucua

SEQ ID NO: 1601259 - RNA, 22 nt, Human
uuucagaaaauauuauguguuu

SEQ ID NO: 1601260 - RNA, 23 nt, Human
auggaauuggagcucgugggaca

SEQ ID NO: 1601261 - RNA, 15 nt, Human
uuucauaugcuguau

SEQ ID NO: 1601262 - RNA, 17 nt, Human
uucagcgguuuauauaa

SEQ ID NO: 1601263 - RNA, 13 nt, Human
auauaugcuaagu

SEQ ID NO: 1601264 - RNA, 15 nt, Human
uucaucaaugaauga

SEQ ID NO: 1601265 - RNA, 16 nt, Human
auauauuuaaugauaa

SEQ ID NO: 1601266 - RNA, 14 nt, Human
uucauuaucucaaa

SEQ ID NO: 1601267 - RNA, 23 nt, Human
auauguaccuaacgaaguauccu

SEQ ID NO: 1601268 - RNA, 15 nt, Human
auaugcaaagcacug

SEQ ID NO: 1601269 - RNA, 13 nt, Human
auaugcaaagcac

SEQ ID NO: 1601270 - RNA, 14 nt, Human
auaugcaaagcacu

SEQ ID NO: 1601271 - RNA, 21 nt, Human
auaugagcuuccuucugugaa

SEQ ID NO: 1601272 - RNA, 22 nt, Human
auaugagcuuccuucugugaaa

SEQ ID NO: 1601273 - RNA, 14 nt, Human
aucaauuuuucuua

SEQ ID NO: 1601274 - RNA, 19 nt, Human
aucaauuuuucuuauuuca

SEQ ID NO: 1601275 - RNA, 21 nt, Human
aucaaggguacacugccuucu

SEQ ID NO: 1601276 - RNA, 13 nt, Human
aucaauuuaaaaa

SEQ ID NO: 1601277 - RNA, 16 nt, Human
aucaaggguacacugc

SEQ ID NO: 1601278 - RNA, 16 nt, Human
aucaaauaugcaaagc

SEQ ID NO: 1601279 - RNA, 17 nt, Human
aucaaauaugcaaagca

SEQ ID NO: 1601280 - RNA, 18 nt, Human
aucaaauaugcaaagcac

SEQ ID NO: 1601281 - RNA, 23 nt, Human
auauuuuuguagcacugacagau

SEQ ID NO: 1601282 - RNA, 16 nt, Human
auauuuuuguagcacu

SEQ ID NO: 1601283 - RNA, 15 nt, Human
auauuuuuguagcac

SEQ ID NO: 1601284 - RNA, 18 nt, Human
auauuuuucacauaucua

SEQ ID NO: 1601285 - RNA, 17 nt, Human
uucccagugaauucuug

SEQ ID NO: 1601286 - RNA, 16 nt, Human
auauguuucaaacuuu

SEQ ID NO: 1601287 - RNA, 14 nt, Human
auauguuucaaacu

SEQ ID NO: 1601288 - RNA, 13 nt, Human
auauguuucaaac

SEQ ID NO: 1601289 - RNA, 14 nt, Human
auauuguuugcuaa

SEQ ID NO: 1601290 - RNA, 13 nt, Human
auauuuacaaaug

SEQ ID NO: 1601291 - RNA, 23 nt, Human
auauuuaaugauaaguaaaugcu

SEQ ID NO: 1601292 - RNA, 13 nt, Human
auauuuaaugaua

SEQ ID NO: 1601293 - RNA, 12 nt, Human
auauuuaaugau

SEQ ID NO: 1601294 - RNA, 16 nt, Human
auccugcaauuccacu

SEQ ID NO: 1601295 - RNA, 22 nt, Human
auccugaggcuccacuuggucu

SEQ ID NO: 1601296 - RNA, 13 nt, Human
auccugccccuga

SEQ ID NO: 1601297 - RNA, 11 nt, Human
auccugaggcu

SEQ ID NO: 1601298 - RNA, 13 nt, Human
auccugaggcucc

SEQ ID NO: 1601299 - RNA, 16 nt, Human
auccugaggcuccacu

SEQ ID NO: 1601300 - RNA, 18 nt, Human
auccugaggcuccacuug

SEQ ID NO: 1601301 - RNA, 19 nt, Human
uugacacuuaaaaaugguu

SEQ ID NO: 1601302 - RNA, 14 nt, Human
uugacccacaagaa

SEQ ID NO: 1601303 - RNA, 14 nt, Human
uugagaguucuaaa

SEQ ID NO: 1601304 - RNA, 16 nt, Human
uugauaaguucauaca

SEQ ID NO: 1601305 - RNA, 17 nt, Human
uugauaaguucauacau

SEQ ID NO: 1601306 - RNA, 17 nt, Human
uugacacuuaaaaaugg

SEQ ID NO: 1601307 - RNA, 17 nt, Human
uugaaggaaaaugauac

SEQ ID NO: 1601308 - RNA, 21 nt, Human
aucccucccuccaccucccug

SEQ ID NO: 1601309 - RNA, 20 nt, Human
aucccucccuccaccucccu

SEQ ID NO: 1601310 - RNA, 18 nt, Human
aucccucccuccaccucc

SEQ ID NO: 1601311 - RNA, 17 nt, Human
aucccucccuccaccuc

SEQ ID NO: 1601312 - RNA, 16 nt, Human
aucccucccuccaccu

SEQ ID NO: 1601313 - RNA, 16 nt, Human
uucuguuuuauaauuu

SEQ ID NO: 1601314 - RNA, 17 nt, Human
uucuguuuuauaauuuu

SEQ ID NO: 1601315 - RNA, 16 nt, Human
uucugcaucagcugcu

SEQ ID NO: 1601316 - RNA, 23 nt, Human
aucacuugaacccgggaggcaga

SEQ ID NO: 1601317 - RNA, 23 nt, Human
aucagugugucuaaauuugaaug

SEQ ID NO: 1601318 - RNA, 13 nt, Human
ugcuggagcucug

SEQ ID NO: 1601319 - RNA, 14 nt, Human
ugcuggagcucugc

SEQ ID NO: 1601320 - RNA, 14 nt, Human
aggacacugauaug

SEQ ID NO: 1601321 - RNA, 17 nt, Human
aggacacugauaugggu

SEQ ID NO: 1601322 - RNA, 11 nt, Human
aggaauuuaaa

SEQ ID NO: 1601323 - RNA, 11 nt, Human
aggagaaacug

SEQ ID NO: 1601324 - RNA, 17 nt, Human
aggagaaacuggaacuc

SEQ ID NO: 1601325 - RNA, 16 nt, Human
ugcuugccaucccucc

SEQ ID NO: 1601326 - RNA, 15 nt, Human
ugcuugccaucccuc

SEQ ID NO: 1601327 - RNA, 13 nt, Human
uggaaaggcagcu

SEQ ID NO: 1601328 - RNA, 18 nt, Human
uggaauuggagcucgugg

SEQ ID NO: 1601329 - RNA, 22 nt, Human
uggaauuucucccagucauuua

SEQ ID NO: 1601330 - RNA, 18 nt, Human
uggacgagaaaacaauaa

SEQ ID NO: 1601331 - RNA, 22 nt, Human
uggcacaguuuucugagaaaga

SEQ ID NO: 1601332 - RNA, 21 nt, Human
agcugcccucuccugggcagc

SEQ ID NO: 1601333 - RNA, 20 nt, Human
agcugcccucuccugggcag

SEQ ID NO: 1601334 - RNA, 19 nt, Human
agcugcccucuccugggca

SEQ ID NO: 1601335 - RNA, 18 nt, Human
agcugcccucuccugggc

SEQ ID NO: 1601336 - RNA, 17 nt, Human
agcugcccucuccuggg

SEQ ID NO: 1601337 - RNA, 15 nt, Human
ugccuccccuccucu

SEQ ID NO: 1601338 - RNA, 14 nt, Human
ugccuccccuccuc

SEQ ID NO: 1601339 - RNA, 13 nt, Human
ugccuccccuccu

SEQ ID NO: 1601340 - RNA, 12 nt, Human
ugccuccccucc

SEQ ID NO: 1601341 - RNA, 11 nt, Human
ugccuccccuc

SEQ ID NO: 1601342 - RNA, 16 nt, Human
ugccuccccuccucug

SEQ ID NO: 1601343 - RNA, 18 nt, Human
ugccucagaaaacaagga

SEQ ID NO: 1601344 - RNA, 15 nt, Human
ugccucaccccuugc

SEQ ID NO: 1601345 - RNA, 19 nt, Human
ugcccuguuaaaagaugaa

SEQ ID NO: 1601346 - RNA, 20 nt, Human
ugcccucuccugggcagcug

SEQ ID NO: 1601347 - RNA, 18 nt, Human
ugcccucuccugggcagc

SEQ ID NO: 1601348 - RNA, 17 nt, Human
ugcccucuccugggcag

SEQ ID NO: 1601349 - RNA, 16 nt, Human
ugcccucuccugggca

SEQ ID NO: 1601350 - RNA, 23 nt, Human
ugcccucuccugggcagcugccu

SEQ ID NO: 1601351 - RNA, 22 nt, Human
ugcccucuccugggcagcugcc

SEQ ID NO: 1601352 - RNA, 15 nt, Human
ugcccucuccugggc

SEQ ID NO: 1601353 - RNA, 14 nt, Human
ugcccucuccuggg

SEQ ID NO: 1601354 - RNA, 13 nt, Human
ugcccucuccugg

SEQ ID NO: 1601355 - RNA, 12 nt, Human
ugcccucuccug

SEQ ID NO: 1601356 - RNA, 23 nt, Human
agcucugcccauccugccccuga

SEQ ID NO: 1601357 - RNA, 22 nt, Human
ugccauuuaaagcuuauuaaaa

SEQ ID NO: 1601358 - RNA, 16 nt, Human
ugccccauucaacauc

SEQ ID NO: 1601359 - RNA, 19 nt, Human
ugaugggaaagcauuguaa

SEQ ID NO: 1601360 - RNA, 11 nt, Human
ugaugaagaag

SEQ ID NO: 1601361 - RNA, 12 nt, Human
ugaugaagaagu

SEQ ID NO: 1601362 - RNA, 23 nt, Human
ugauuaaguaaugauaacuggaa

SEQ ID NO: 1601363 - RNA, 18 nt, Human
ugauuaaguaaugauaac

SEQ ID NO: 1601364 - RNA, 21 nt, Human
agccagcaguucagagcugcc

SEQ ID NO: 1601365 - RNA, 20 nt, Human
agccagcaguucagagcugc

SEQ ID NO: 1601366 - RNA, 22 nt, Human
agccagcaguucagagcugccc

SEQ ID NO: 1601367 - RNA, 19 nt, Human
agccagcaguucagagcug

SEQ ID NO: 1601368 - RNA, 17 nt, Human
agccagcaguucagagc

SEQ ID NO: 1601369 - RNA, 14 nt, Human
ugcagaagacagua

SEQ ID NO: 1601370 - RNA, 15 nt, Human
ugcagaagacaguau

SEQ ID NO: 1601371 - RNA, 13 nt, Human
uguuuuauaauuu

SEQ ID NO: 1601372 - RNA, 20 nt, Human
uguuuuauaauuuugugaag

SEQ ID NO: 1601373 - RNA, 19 nt, Human
uguuugcuaagcauuccaa

SEQ ID NO: 1601374 - RNA, 15 nt, Human
uguuugcuaagcauu

SEQ ID NO: 1601375 - RNA, 21 nt, Human
aguugauaugccuuuucccaa

SEQ ID NO: 1601376 - RNA, 13 nt, Human
aguucugaagaag

SEQ ID NO: 1601377 - RNA, 14 nt, Human
aguucugaagaaga

SEQ ID NO: 1601378 - RNA, 15 nt, Human
aguucugaagaagau

SEQ ID NO: 1601379 - RNA, 16 nt, Human
aguucugaagaagaug

SEQ ID NO: 1601380 - RNA, 19 nt, Human
uuaaaaaagaaacauuugg

SEQ ID NO: 1601381 - RNA, 15 nt, Human
uuaaaaaagaaacau

SEQ ID NO: 1601382 - RNA, 18 nt, Human
uuaaaaaagaaacauuug

SEQ ID NO: 1601383 - RNA, 14 nt, Human
uuaaaaucauuucu

SEQ ID NO: 1601384 - RNA, 19 nt, Human
aguucagagcugcccucuc

SEQ ID NO: 1601385 - RNA, 18 nt, Human
aguucagagcugcccucu

SEQ ID NO: 1601386 - RNA, 17 nt, Human
aguucagagcugcccuc

SEQ ID NO: 1601387 - RNA, 16 nt, Human
aguucagagcugcccu

SEQ ID NO: 1601388 - RNA, 15 nt, Human
aguucagagcugccc

SEQ ID NO: 1601389 - RNA, 15 nt, Human
aguucuaaauuuugu

SEQ ID NO: 1601390 - RNA, 20 nt, Human
aguuauuauauuuacaaaug

SEQ ID NO: 1601391 - RNA, 19 nt, Human
aguuauggcuauaggugcu

SEQ ID NO: 1601392 - RNA, 22 nt, Human
aguuauugauaaguucauacau

SEQ ID NO: 1601393 - RNA, 21 nt, Human
aguuauugauaaguucauaca

SEQ ID NO: 1601394 - RNA, 19 nt, Human
aguuauugauaaguucaua

SEQ ID NO: 1601395 - RNA, 17 nt, Human
aguuauugauaaguuca

SEQ ID NO: 1601396 - RNA, 23 nt, Human
aguuauugauaaguucauacauu

SEQ ID NO: 1601397 - RNA, 22 nt, Human
auacauuguacgaagaguauuu

SEQ ID NO: 1601398 - RNA, 21 nt, Human
auacauuguacgaagaguauu

SEQ ID NO: 1601399 - RNA, 14 nt, Human
auacauuguacgaa

SEQ ID NO: 1601400 - RNA, 20 nt, Human
auacaucccuuaccugggaa

SEQ ID NO: 1601401 - RNA, 19 nt, Human
auacauauuuuuguagcac

SEQ ID NO: 1601402 - RNA, 21 nt, Human
auacaguucggugagcuacaa

SEQ ID NO: 1601403 - RNA, 21 nt, Human
auacaggucauauuaauauau

SEQ ID NO: 1601404 - RNA, 15 nt, Human
auacaggucauauua

SEQ ID NO: 1601405 - RNA, 22 nt, Human
auaccacaggaaccacaagacu

SEQ ID NO: 1601406 - RNA, 22 nt, Human
uuaucaaagggugaaaauuauu

SEQ ID NO: 1601407 - RNA, 13 nt, Human
auaauuuugugaa

SEQ ID NO: 1601408 - RNA, 14 nt, Human
auaauuuugugaag

SEQ ID NO: 1601409 - RNA, 15 nt, Human
auaauuuugugaagc

SEQ ID NO: 1601410 - RNA, 20 nt, Human
auaauuuugugaagcaaaau

SEQ ID NO: 1601411 - RNA, 14 nt, Human
auaauuuuuauauu

SEQ ID NO: 1601412 - RNA, 16 nt, Human
auaauuuuuauauuug

SEQ ID NO: 1601413 - RNA, 19 nt, Human
auaauuuuuauauuugaaa

SEQ ID NO: 1601414 - RNA, 21 nt, Human
auaauuuuuauauuugaaaua

SEQ ID NO: 1601415 - RNA, 22 nt, Human
auaauuuuuauauuugaaauau

SEQ ID NO: 1601416 - RNA, 22 nt, Human
auacaaaaaaaaaaaaaaauua

SEQ ID NO: 1601417 - RNA, 21 nt, Human
auaauuuuaagaaaucaaaga

SEQ ID NO: 1601418 - RNA, 15 nt, Human
auaauuuuaagaaau

SEQ ID NO: 1601419 - RNA, 18 nt, Human
uuauauaagcuuguauuc

SEQ ID NO: 1601420 - RNA, 16 nt, Human
uuauauaaguauucua

SEQ ID NO: 1601421 - RNA, 14 nt, Human
uuauauaaguauuc

SEQ ID NO: 1601422 - RNA, 13 nt, Human
uuauauaaguauu

SEQ ID NO: 1601423 - RNA, 19 nt, Human
uuauacccagaaaguuauu

SEQ ID NO: 1601424 - RNA, 18 nt, Human
uuauacccagaaaguuau

SEQ ID NO: 1601425 - RNA, 23 nt, Human
uuauacccagaaaguuauugaua

SEQ ID NO: 1601426 - RNA, 23 nt, Human
uuauagaguguacuuaacuauuc

SEQ ID NO: 1601427 - RNA, 18 nt, Human
aguuuucugagaaagacu

SEQ ID NO: 1601428 - RNA, 14 nt, Human
aguuuucugagaaa

SEQ ID NO: 1601429 - RNA, 17 nt, Human
aguuuucugagaaagac

SEQ ID NO: 1601430 - RNA, 12 nt, Human
aguuuucugaga

SEQ ID NO: 1601431 - RNA, 13 nt, Human
aguuuucugagaa

SEQ ID NO: 1601432 - RNA, 16 nt, Human
auaaaccucaaaaugu

SEQ ID NO: 1601433 - RNA, 19 nt, Human
auaaaugugccuucauuuu

SEQ ID NO: 1601434 - RNA, 12 nt, Human
auaacuggaaac

SEQ ID NO: 1601435 - RNA, 12 nt, Human
auaacugugaag

SEQ ID NO: 1601436 - RNA, 23 nt, Human
uuagaugcaguucugaagaagau

SEQ ID NO: 1601437 - RNA, 22 nt, Human
uuagaugcaguucugaagaaga

SEQ ID NO: 1601438 - RNA, 14 nt, Human
auaaugaauacuuu

SEQ ID NO: 1601439 - RNA, 21 nt, Human
auaaucuuucacaggggacag

SEQ ID NO: 1601440 - RNA, 20 nt, Human
auaaucagugugucuaaauu

SEQ ID NO: 1601441 - RNA, 12 nt, Human
uuaccugggaaa

SEQ ID NO: 1601442 - RNA, 15 nt, Human
auaaguucauacauu

SEQ ID NO: 1601443 - RNA, 14 nt, Human
auaaguucauacau

SEQ ID NO: 1601444 - RNA, 13 nt, Human
auaaguucauaca

SEQ ID NO: 1601445 - RNA, 11 nt, Human
auaaguucaua

SEQ ID NO: 1601446 - RNA, 21 nt, Human
auaaguucauacauuguacga

SEQ ID NO: 1601447 - RNA, 21 nt, Human
agggugaugggaaagcauugu

SEQ ID NO: 1601448 - RNA, 22 nt, Human
agggugaugggaaagcauugua

SEQ ID NO: 1601449 - RNA, 15 nt, Human
agggugaaaauuauu

SEQ ID NO: 1601450 - RNA, 22 nt, Human
ugguccaugggccauaugaaaa

SEQ ID NO: 1601451 - RNA, 22 nt, Human
uggucugugagaugcuagaacu

SEQ ID NO: 1601452 - RNA, 20 nt, Human
aggguuuauguuuaggaugu

SEQ ID NO: 1601453 - RNA, 15 nt, Human
aggucagugcaaaua

SEQ ID NO: 1601454 - RNA, 16 nt, Human
aggucauauuaauaua

SEQ ID NO: 1601455 - RNA, 16 nt, Human
uguaaaggaauuuaaa

SEQ ID NO: 1601456 - RNA, 18 nt, Human
uguaagaaaauaucacuu

SEQ ID NO: 1601457 - RNA, 15 nt, Human
uguacuuaacuauuc

SEQ ID NO: 1601458 - RNA, 17 nt, Human
ugucucuacuaaaaaua

SEQ ID NO: 1601459 - RNA, 14 nt, Human
ugucuuaauuaaaa

SEQ ID NO: 1601460 - RNA, 14 nt, Human
ugucuucacaacag

SEQ ID NO: 1601461 - RNA, 21 nt, Human
agugagcagucaggaaagaga

SEQ ID NO: 1601462 - RNA, 16 nt, Human
agugagccgagauugu

SEQ ID NO: 1601463 - RNA, 20 nt, Human
agugaaacucguuaauuugu

SEQ ID NO: 1601464 - RNA, 14 nt, Human
agugagacagcucu

SEQ ID NO: 1601465 - RNA, 22 nt, Human
agugaaagaggcagcuugaaac

SEQ ID NO: 1601466 - RNA, 16 nt, Human
agugaaagaggcagcu

SEQ ID NO: 1601467 - RNA, 14 nt, Human
ugugaagcaaaauu

SEQ ID NO: 1601468 - RNA, 15 nt, Human
aguauuguccagguc

SEQ ID NO: 1601469 - RNA, 16 nt, Human
aguauuguccaggucu

SEQ ID NO: 1601470 - RNA, 20 nt, Human
agucacauuccaagccucau

SEQ ID NO: 1601471 - RNA, 18 nt, Human
aguauguuagugcaaauu

SEQ ID NO: 1601472 - RNA, 21 nt, Human
aguauguuagugcaaauuguc

SEQ ID NO: 1601473 - RNA, 23 nt, Human
ugucagcuccccucggagaagag

SEQ ID NO: 1601474 - RNA, 20 nt, Human
ugucagcuccccucggagaa

SEQ ID NO: 1601475 - RNA, 21 nt, Human
ugucagcuccccucggagaag

SEQ ID NO: 1601476 - RNA, 18 nt, Human
ugucuaaauuugaauguu

SEQ ID NO: 1601477 - RNA, 15 nt, Human
ugucuaagauaguaa

SEQ ID NO: 1601478 - RNA, 14 nt, Human
ugucuaagauagua

SEQ ID NO: 1601479 - RNA, 16 nt, Human
agagacacacugaaga

SEQ ID NO: 1601480 - RNA, 14 nt, Human
agagacagaaagca

SEQ ID NO: 1601481 - RNA, 15 nt, Human
agagacagaaagcag

SEQ ID NO: 1601482 - RNA, 23 nt, Human
agacuggcacaguuuucugagaa

SEQ ID NO: 1601483 - RNA, 20 nt, Human
agacuggcacaguuuucuga

SEQ ID NO: 1601484 - RNA, 21 nt, Human
agacuggcacaguuuucugag

SEQ ID NO: 1601485 - RNA, 13 nt, Human
ugaaagaaaauaa

SEQ ID NO: 1601486 - RNA, 21 nt, Human
ugaaaauauuuguaucacaaa

SEQ ID NO: 1601487 - RNA, 22 nt, Human
ugaaaauauuuguaucacaaau

SEQ ID NO: 1601488 - RNA, 17 nt, Human
ugaaaauauuuguauca

SEQ ID NO: 1601489 - RNA, 18 nt, Human
ugaaagaggaaugaagua

SEQ ID NO: 1601490 - RNA, 17 nt, Human
ugaaagaggaaugaagu

SEQ ID NO: 1601491 - RNA, 18 nt, Human
agagcuguucacagccag

SEQ ID NO: 1601492 - RNA, 19 nt, Human
agagcuguucacagccaga

SEQ ID NO: 1601493 - RNA, 17 nt, Human
ugaaguacucauacaug

SEQ ID NO: 1601494 - RNA, 17 nt, Human
ugaagauuuaccacuug

SEQ ID NO: 1601495 - RNA, 20 nt, Human
ugaagauuuaccacuugugu

SEQ ID NO: 1601496 - RNA, 23 nt, Human
ugaacuagaguuuagcuggaaaa

SEQ ID NO: 1601497 - RNA, 22 nt, Human
ugaacccauauuuguacaccaa

SEQ ID NO: 1601498 - RNA, 18 nt, Human
ugaacccgggaggcagag

SEQ ID NO: 1601499 - RNA, 18 nt, Human
ugaacaaauuuacagaga

SEQ ID NO: 1601500 - RNA, 13 nt, Human
ugaacaaauuuac

SEQ ID NO: 1601501 - RNA, 14 nt, Human
ugaaauaagccaga

SEQ ID NO: 1601502 - RNA, 18 nt, Human
agagcugcccucuccugg

SEQ ID NO: 1601503 - RNA, 17 nt, Human
agagcugcccucuccug

SEQ ID NO: 1601504 - RNA, 16 nt, Human
agagcugcccucuccu

SEQ ID NO: 1601505 - RNA, 20 nt, Human
agagcugcccucuccugggc

SEQ ID NO: 1601506 - RNA, 19 nt, Human
agagcugcccucuccuggg

SEQ ID NO: 1601507 - RNA, 21 nt, Human
ugagagacacacugaagaagc

SEQ ID NO: 1601508 - RNA, 22 nt, Human
ugagagacacacugaagaagca

SEQ ID NO: 1601509 - RNA, 24 nt, Human
ugagaugugaacacaucagcuugc

SEQ ID NO: 1601510 - RNA, 18 nt, Human
ugagaugugaacacauca

SEQ ID NO: 1601511 - RNA, 19 nt, Human
ugagaugugaacacaucag

SEQ ID NO: 1601512 - RNA, 13 nt, Human
ugagaugugaaca

SEQ ID NO: 1601513 - RNA, 16 nt, Human
ugagagacacacugaa

SEQ ID NO: 1601514 - RNA, 17 nt, Human
ugagagacacacugaag

SEQ ID NO: 1601515 - RNA, 19 nt, Human
ugagagacacacugaagaa

SEQ ID NO: 1601516 - RNA, 20 nt, Human
ugagagacacacugaagaag

SEQ ID NO: 1601517 - RNA, 20 nt, Human
ugagacucugucucagucca

SEQ ID NO: 1601518 - RNA, 12 nt, Human
ugagacagcucu

SEQ ID NO: 1601519 - RNA, 15 nt, Human
agauuuuccugaaaa

SEQ ID NO: 1601520 - RNA, 16 nt, Human
agauuuuccugaaaac

SEQ ID NO: 1601521 - RNA, 20 nt, Human
agcaagggugaugggaaagc

SEQ ID NO: 1601522 - RNA, 22 nt, Human
agcaagggugaugggaaagcau

SEQ ID NO: 1601523 - RNA, 16 nt, Human
agcaagggugauggga

SEQ ID NO: 1601524 - RNA, 21 nt, Human
agaugcaguucugaagaagau

SEQ ID NO: 1601525 - RNA, 19 nt, Human
agaugcuagaacucccuuu

SEQ ID NO: 1601526 - RNA, 21 nt, Human
agaugcuagaacucccuuuca

SEQ ID NO: 1601527 - RNA, 22 nt, Human
agaugcuagaacucccuuucaa

SEQ ID NO: 1601528 - RNA, 13 nt, Human
agauccuggaaau

SEQ ID NO: 1601529 - RNA, 14 nt, Human
agauccuggaaauc

SEQ ID NO: 1601530 - RNA, 15 nt, Human
ugacacuuaaaaaug

SEQ ID NO: 1601531 - RNA, 16 nt, Human
ugacacuuaaaaaugg

SEQ ID NO: 1601532 - RNA, 22 nt, Human
agaugugaacacaucagcuugc

SEQ ID NO: 1601533 - RNA, 22 nt, Human
agauguauguacuucaugcugu

SEQ ID NO: 1601534 - RNA, 17 nt, Human
agaugugaacacaucag

SEQ ID NO: 1601535 - RNA, 14 nt, Human
ugacuaugacauaa

SEQ ID NO: 1601536 - RNA, 22 nt, Human
acuuuuuauggcacuaguauuu

SEQ ID NO: 1601537 - RNA, 15 nt, Human
acuuuggaacaagau

SEQ ID NO: 1601538 - RNA, 15 nt, Human
ucucauuuccaagca

SEQ ID NO: 1601539 - RNA, 23 nt, Human
ucucaggaaaucaaauaugcaaa

SEQ ID NO: 1601540 - RNA, 14 nt, Human
ucucaggaaaucaa

SEQ ID NO: 1601541 - RNA, 21 nt, Human
ucucaggaaaucaaauaugca

SEQ ID NO: 1601542 - RNA, 15 nt, Human
acuugucaauaaaau

SEQ ID NO: 1601543 - RNA, 14 nt, Human
uccugggcagcugc

SEQ ID NO: 1601544 - RNA, 13 nt, Human
uccugggcagcug

SEQ ID NO: 1601545 - RNA, 12 nt, Human
uccugggcagcu

SEQ ID NO: 1601546 - RNA, 20 nt, Human
ucuaaguaaaaccacagcag

SEQ ID NO: 1601547 - RNA, 19 nt, Human
ucuaaguaaaaccacagca

SEQ ID NO: 1601548 - RNA, 14 nt, Human
ucuaaguaaaacca

SEQ ID NO: 1601549 - RNA, 15 nt, Human
ucuaaguaaaaccac

SEQ ID NO: 1601550 - RNA, 23 nt, Human
acuuaacuauucaggagaguaga

SEQ ID NO: 1601551 - RNA, 17 nt, Human
ucuaggaaauauuuauu

SEQ ID NO: 1601552 - RNA, 16 nt, Human
ucuaggaaauauuuau

SEQ ID NO: 1601553 - RNA, 23 nt, Human
ucuagcauggcauauuuuucaca

SEQ ID NO: 1601554 - RNA, 22 nt, Human
ucuagcauggcauauuuuucac

SEQ ID NO: 1601555 - RNA, 21 nt, Human
ucuagcauggcauauuuuuca

SEQ ID NO: 1601556 - RNA, 18 nt, Human
ucugcagauaaacaguag

SEQ ID NO: 1601557 - RNA, 18 nt, Human
agaagaugguaccaccag

SEQ ID NO: 1601558 - RNA, 13 nt, Human
agaagaacugaaa

SEQ ID NO: 1601559 - RNA, 14 nt, Human
agaagaacugaaau

SEQ ID NO: 1601560 - RNA, 19 nt, Human
agaagcaacccaaauguuc

SEQ ID NO: 1601561 - RNA, 23 nt, Human
ucugcuugccaucccucccucca

SEQ ID NO: 1601562 - RNA, 20 nt, Human
ucugcuugccaucccucccu

SEQ ID NO: 1601563 - RNA, 17 nt, Human
ucugcuugccaucccuc

SEQ ID NO: 1601564 - RNA, 16 nt, Human
ucugcuugccaucccu

SEQ ID NO: 1601565 - RNA, 12 nt, Human
agacacacauga

SEQ ID NO: 1601566 - RNA, 15 nt, Human
agacacacaugaagu

SEQ ID NO: 1601567 - RNA, 23 nt, Human
ucugugagaugcuagaacucccu

SEQ ID NO: 1601568 - RNA, 17 nt, Human
ucugugagaugcuagaa

SEQ ID NO: 1601569 - RNA, 22 nt, Human
ucugugagaugcuagaacuccc

SEQ ID NO: 1601570 - RNA, 14 nt, Human
ucugugagaugcua

SEQ ID NO: 1601571 - RNA, 16 nt, Human
ucugugaaaguacauu

SEQ ID NO: 1601572 - RNA, 23 nt, Human
agaauuaacacaugauccugcaa

SEQ ID NO: 1601573 - RNA, 15 nt, Human
agaauuaacacauga

SEQ ID NO: 1601574 - RNA, 14 nt, Human
ucugcuuguguuaa

SEQ ID NO: 1601575 - RNA, 21 nt, Human
agaauauguuucaaacuuugg

SEQ ID NO: 1601576 - RNA, 19 nt, Human
agaauauguuucaaacuuu

SEQ ID NO: 1601577 - RNA, 18 nt, Human
agaauauguuucaaacuu

SEQ ID NO: 1601578 - RNA, 17 nt, Human
agaauauguuucaaacu

SEQ ID NO: 1601579 - RNA, 13 nt, Human
agaauauguuuca

SEQ ID NO: 1601580 - RNA, 21 nt, Human
acucuuaagaagacugcauua

SEQ ID NO: 1601581 - RNA, 12 nt, Human
acugaagaagca

SEQ ID NO: 1601582 - RNA, 13 nt, Human
acugacucuuaag

SEQ ID NO: 1601583 - RNA, 14 nt, Human
acugacucuuaaga

SEQ ID NO: 1601584 - RNA, 15 nt, Human
acugacucuuaagaa

SEQ ID NO: 1601585 - RNA, 16 nt, Human
acugacucuuaagaag

SEQ ID NO: 1601586 - RNA, 17 nt, Human
acugacucuuaagaaga

SEQ ID NO: 1601587 - RNA, 18 nt, Human
acugacucuuaagaagac

SEQ ID NO: 1601588 - RNA, 20 nt, Human
acugacucuuaagaagacug

SEQ ID NO: 1601589 - RNA, 13 nt, Human
acugacuucuaag

SEQ ID NO: 1601590 - RNA, 15 nt, Human
acugacuucuaagua

SEQ ID NO: 1601591 - RNA, 16 nt, Human
acugacuucuaaguaa

SEQ ID NO: 1601592 - RNA, 22 nt, Human
acugacuucuaaguaaaaccac

SEQ ID NO: 1601593 - RNA, 18 nt, Human
acugagagugaacaaauu

SEQ ID NO: 1601594 - RNA, 22 nt, Human
acugagaugugaacacaucagc

SEQ ID NO: 1601595 - RNA, 17 nt, Human
acugagaugugaacaca

SEQ ID NO: 1601596 - RNA, 16 nt, Human
uccuggaaaucagggu

SEQ ID NO: 1601597 - RNA, 16 nt, Human
acuaucucauuuccaa

SEQ ID NO: 1601598 - RNA, 17 nt, Human
acuaucucauuuccaag

SEQ ID NO: 1601599 - RNA, 15 nt, Human
acuaucucauuucca

SEQ ID NO: 1601600 - RNA, 17 nt, Human
acuauauuguuugcuaa

SEQ ID NO: 1601601 - RNA, 22 nt, Human
acuauauuguuugcuaagcauu

SEQ ID NO: 1601602 - RNA, 19 nt, Human
uccauccugaggcuccacu

SEQ ID NO: 1601603 - RNA, 12 nt, Human
uccauccugagg

SEQ ID NO: 1601604 - RNA, 15 nt, Human
uccauccugaggcuc

SEQ ID NO: 1601605 - RNA, 15 nt, Human
acuaauuuuaaaaug

SEQ ID NO: 1601606 - RNA, 18 nt, Human
uccagugagacagcucug

SEQ ID NO: 1601607 - RNA, 11 nt, Human
acgcucucugg

SEQ ID NO: 1601608 - RNA, 14 nt, Human
acgcucucuggccu

SEQ ID NO: 1601609 - RNA, 20 nt, Human
accuuuuggucuggagggaa

SEQ ID NO: 1601610 - RNA, 22 nt, Human
uccacugguucuucuuggucuc

SEQ ID NO: 1601611 - RNA, 19 nt, Human
accuugaaaacuuuaugcu

SEQ ID NO: 1601612 - RNA, 18 nt, Human
accuuuggagcaaagcug

SEQ ID NO: 1601613 - RNA, 15 nt, Human
ucaguuuuugugaaa

SEQ ID NO: 1601614 - RNA, 17 nt, Human
ucaguuuuugugaaaag

SEQ ID NO: 1601615 - RNA, 22 nt, Human
ucauaaaaagccugcaauuuca

SEQ ID NO: 1601616 - RNA, 16 nt, Human
accuagggugauauua

SEQ ID NO: 1601617 - RNA, 16 nt, Human
accucaaaaugucuaa

SEQ ID NO: 1601618 - RNA, 17 nt, Human
acccgggaggcagaggu

SEQ ID NO: 1601619 - RNA, 14 nt, Human
accccugcuucuga

SEQ ID NO: 1601620 - RNA, 18 nt, Human
ucaaauugugugaaaggu

SEQ ID NO: 1601621 - RNA, 15 nt, Human
acaugggacauuugc

SEQ ID NO: 1601622 - RNA, 20 nt, Human
acaugggacauuugcucaug

SEQ ID NO: 1601623 - RNA, 21 nt, Human
acaugggacauuugcucaugg

SEQ ID NO: 1601624 - RNA, 11 nt, Human
acaugggacau

SEQ ID NO: 1601625 - RNA, 14 nt, Human
acaugggacauuug

SEQ ID NO: 1601626 - RNA, 23 nt, Human
acaugagguacugagagugaaca

SEQ ID NO: 1601627 - RNA, 20 nt, Human
acaugagguacugagaguga

SEQ ID NO: 1601628 - RNA, 17 nt, Human
ucaagaaaacaacuuca

SEQ ID NO: 1601629 - RNA, 22 nt, Human
ucaauaucuuuuuuuuaauaaa

SEQ ID NO: 1601630 - RNA, 18 nt, Human
ucaauauccaaaccaaau

SEQ ID NO: 1601631 - RNA, 15 nt, Human
ucaauauuucagaua

SEQ ID NO: 1601632 - RNA, 19 nt, Human
ucaauauuucagauaauca

SEQ ID NO: 1601633 - RNA, 23 nt, Human
ucaaugaaugaaugaauggcuaa

SEQ ID NO: 1601634 - RNA, 19 nt, Human
acauucuuccaaaaagauu

SEQ ID NO: 1601635 - RNA, 12 nt, Human
ucaccucaugga

SEQ ID NO: 1601636 - RNA, 13 nt, Human
ucaccucauggaa

SEQ ID NO: 1601637 - RNA, 14 nt, Human
ucaccucauggaau

SEQ ID NO: 1601638 - RNA, 14 nt, Human
accagucugacugu

SEQ ID NO: 1601639 - RNA, 23 nt, Human
ucacuugaacccgggaggcagag

SEQ ID NO: 1601640 - RNA, 16 nt, Human
ucaauucuugccaaau

SEQ ID NO: 1601641 - RNA, 14 nt, Human
ucacauaucuagua

SEQ ID NO: 1601642 - RNA, 22 nt, Human
aaucaggguuaguauuguccag

SEQ ID NO: 1601643 - RNA, 16 nt, Human
aaucaggguuaguauu

SEQ ID NO: 1601644 - RNA, 21 nt, Human
aaucaggguuaguauugucca

SEQ ID NO: 1601645 - RNA, 22 nt, Human
uaagcagauggaaugcuguguu

SEQ ID NO: 1601646 - RNA, 21 nt, Human
aauaugccccauucaacaucu

SEQ ID NO: 1601647 - RNA, 24 nt, Human
aauaugccccauucaacaucuagu

SEQ ID NO: 1601648 - RNA, 18 nt, Human
aauauuuauuuuaauaau

SEQ ID NO: 1601649 - RNA, 19 nt, Human
aauauuuauuuuaauaaug

SEQ ID NO: 1601650 - RNA, 14 nt, Human
aauauuucagauaa

SEQ ID NO: 1601651 - RNA, 17 nt, Human
aauauuguguugugaau

SEQ ID NO: 1601652 - RNA, 20 nt, Human
uaacgauaaaagacagugaa

SEQ ID NO: 1601653 - RNA, 18 nt, Human
uaagaagugaaaaucuac

SEQ ID NO: 1601654 - RNA, 22 nt, Human
aauaucacuugucaauaaaauc

SEQ ID NO: 1601655 - RNA, 20 nt, Human
aauaucacuugucaauaaaa

SEQ ID NO: 1601656 - RNA, 23 nt, Human
aauaguauuugagaguucuaaau

SEQ ID NO: 1601657 - RNA, 16 nt, Human
aauagucaaauugugu

SEQ ID NO: 1601658 - RNA, 22 nt, Human
aauaguauuugagaguucuaaa

SEQ ID NO: 1601659 - RNA, 20 nt, Human
aauaguauuugagaguucua

SEQ ID NO: 1601660 - RNA, 19 nt, Human
aaucuuauaauuuaaaaua

SEQ ID NO: 1601661 - RNA, 19 nt, Human
aaucuacacuccagugaga

SEQ ID NO: 1601662 - RNA, 12 nt, Human
aaucaugaauua

SEQ ID NO: 1601663 - RNA, 15 nt, Human
aaucaugaauuaguu

SEQ ID NO: 1601664 - RNA, 16 nt, Human
uaaguauucuaaauuu

SEQ ID NO: 1601665 - RNA, 16 nt, Human
uaagcuuguauuccuu

SEQ ID NO: 1601666 - RNA, 19 nt, Human
uaaguaaugauaacuggaa

SEQ ID NO: 1601667 - RNA, 13 nt, Human
uaaguaaaugcua

SEQ ID NO: 1601668 - RNA, 21 nt, Human
uaauagagcaaaauugaugug

SEQ ID NO: 1601669 - RNA, 12 nt, Human
uaauagagcaaa

SEQ ID NO: 1601670 - RNA, 22 nt, Human
aaugaauggcuaagcaaaaugu

SEQ ID NO: 1601671 - RNA, 19 nt, Human
aaugaaacacucaguuguu

SEQ ID NO: 1601672 - RNA, 20 nt, Human
aauuauuuuguucauacaua

SEQ ID NO: 1601673 - RNA, 19 nt, Human
aauuauuuuguucauacau

SEQ ID NO: 1601674 - RNA, 18 nt, Human
aauuauuuuguucauaca

SEQ ID NO: 1601675 - RNA, 16 nt, Human
aauuauuuuguucaua

SEQ ID NO: 1601676 - RNA, 22 nt, Human
aauuauuuuguucauacauauu

SEQ ID NO: 1601677 - RNA, 21 nt, Human
aauuauuuuguucauacauau

SEQ ID NO: 1601678 - RNA, 22 nt, Human
aauuccacuuauaggaauugac

SEQ ID NO: 1601679 - RNA, 18 nt, Human
aauuccaagugauugaaa

SEQ ID NO: 1601680 - RNA, 15 nt, Human
aauucagaaggaucu

SEQ ID NO: 1601681 - RNA, 19 nt, Human
uacauuguacgaagaguau

SEQ ID NO: 1601682 - RNA, 14 nt, Human
uacuguaagaaaau

SEQ ID NO: 1601683 - RNA, 22 nt, Human
aauugacccacaagaaaugaaa

SEQ ID NO: 1601684 - RNA, 21 nt, Human
aauugacccacaagaaaugaa

SEQ ID NO: 1601685 - RNA, 14 nt, Human
aauugauguguuua

SEQ ID NO: 1601686 - RNA, 13 nt, Human
aauugauguguuu

SEQ ID NO: 1601687 - RNA, 14 nt, Human
uacacuaagagaga

SEQ ID NO: 1601688 - RNA, 18 nt, Human
uacacuaagagagaauga

SEQ ID NO: 1601689 - RNA, 16 nt, Human
aaugcuguauuuuaaa

SEQ ID NO: 1601690 - RNA, 13 nt, Human
aaugcuguguuaa

SEQ ID NO: 1601691 - RNA, 13 nt, Human
aauguuaagcaga

SEQ ID NO: 1601692 - RNA, 17 nt, Human
uacauuguaaauaguau

SEQ ID NO: 1601693 - RNA, 20 nt, Human
uacaucccuuaccugggaaa

SEQ ID NO: 1601694 - RNA, 23 nt, Human
uacaggucauauuaauauauuuc

SEQ ID NO: 1601695 - RNA, 23 nt, Human
uauucaaacagucucaggaaauc

SEQ ID NO: 1601696 - RNA, 15 nt, Human
uauucaaacagucuc

SEQ ID NO: 1601697 - RNA, 15 nt, Human
uauuagaauaccaca

SEQ ID NO: 1601698 - RNA, 14 nt, Human
uauuacuguaagaa

SEQ ID NO: 1601699 - RNA, 16 nt, Human
acagucaccucaugga

SEQ ID NO: 1601700 - RNA, 17 nt, Human
acagucaccucauggaa

SEQ ID NO: 1601701 - RNA, 18 nt, Human
acagucaccucauggaau

SEQ ID NO: 1601702 - RNA, 20 nt, Human
acagggaggacgcucucugg

SEQ ID NO: 1601703 - RNA, 21 nt, Human
acagggaggacgcucucuggc

SEQ ID NO: 1601704 - RNA, 17 nt, Human
acaggaaguagaggagg

SEQ ID NO: 1601705 - RNA, 15 nt, Human
uauauuguuugcuaa

SEQ ID NO: 1601706 - RNA, 17 nt, Human
uaucucaaaacugcacu

SEQ ID NO: 1601707 - RNA, 19 nt, Human
uauccaaaccaaauaaaaa

SEQ ID NO: 1601708 - RNA, 16 nt, Human
acagccucuuagaugc

SEQ ID NO: 1601709 - RNA, 19 nt, Human
uaugccccauucaacaucu

SEQ ID NO: 1601710 - RNA, 16 nt, Human
uaugauuaaguaauga

SEQ ID NO: 1601711 - RNA, 20 nt, Human
uaugauuaaguaaugauaac

SEQ ID NO: 1601712 - RNA, 21 nt, Human
uaugauuaaguaaugauaacu

SEQ ID NO: 1601713 - RNA, 20 nt, Human
acagauuuccauccuaguca

SEQ ID NO: 1601714 - RNA, 18 nt, Human
acagcaagggugauggga

SEQ ID NO: 1601715 - RNA, 19 nt, Human
uaugaaauuauauaaguau

SEQ ID NO: 1601716 - RNA, 20 nt, Human
acacacucaaaucaagaaac

SEQ ID NO: 1601717 - RNA, 15 nt, Human
acacacucaaaucaa

SEQ ID NO: 1601718 - RNA, 22 nt, Human
acaaugcuguauuuuaaaagaa

SEQ ID NO: 1601719 - RNA, 22 nt, Human
uagugaaacucguuaauuugua

SEQ ID NO: 1601720 - RNA, 23 nt, Human
uaguguuggagaagaacugaaau

SEQ ID NO: 1601721 - RNA, 13 nt, Human
acacuaagagaga

SEQ ID NO: 1601722 - RNA, 14 nt, Human
acacuaagagagaa

SEQ ID NO: 1601723 - RNA, 19 nt, Human
acacucaaaucaagaaacu

SEQ ID NO: 1601724 - RNA, 15 nt, Human
acacaugaaguccaa

SEQ ID NO: 1601725 - RNA, 15 nt, Human
acacaucagcuugcc

SEQ ID NO: 1601726 - RNA, 18 nt, Human
acacaugauccugcaauu

SEQ ID NO: 1601727 - RNA, 19 nt, Human
uaggaaauauuuauuuuaa

SEQ ID NO: 1601728 - RNA, 18 nt, Human
uaggaaauauuuauuuua

SEQ ID NO: 1601729 - RNA, 18 nt, Human
uaggcaaccuuuauuuuu

SEQ ID NO: 1601730 - RNA, 14 nt, Human
uagggagagaagau

SEQ ID NO: 1601731 - RNA, 15 nt, Human
uagggagagaagaua

SEQ ID NO: 1601732 - RNA, 13 nt, Human
acaagacugcaca

SEQ ID NO: 1601733 - RNA, 14 nt, Human
acaagacugcacau

SEQ ID NO: 1601734 - RNA, 23 nt, Human
acaauacaucccuuaccugggaa

SEQ ID NO: 1601735 - RNA, 19 nt, Human
uagcuaauguaauaacugu

SEQ ID NO: 1601736 - RNA, 12 nt, Human
uagcuaauguaa

SEQ ID NO: 1601737 - RNA, 19 nt, Human
acaaauuuacagagacaga

SEQ ID NO: 1601738 - RNA, 18 nt, Human
acaaauuuacagagacag

SEQ ID NO: 1601739 - RNA, 20 nt, Human
acaagacccaaaaggcagaa

SEQ ID NO: 1601740 - RNA, 18 nt, Human
uagcaugucgucaaagcu

SEQ ID NO: 1601741 - RNA, 15 nt, Human
uagaugcaguucuga

SEQ ID NO: 1601742 - RNA, 21 nt, Human
uagcauggcauauuuuucaca

SEQ ID NO: 1601743 - RNA, 22 nt, Human
uagcauggcauauuuuucacau

SEQ ID NO: 1601744 - RNA, 18 nt, Human
acaaaaggauaaugaaua

SEQ ID NO: 1601745 - RNA, 22 nt, Human
uagaggagaaacuggaacucuc

SEQ ID NO: 1601746 - RNA, 21 nt, Human
uagagcaaaauugauguguuu

SEQ ID NO: 1601747 - RNA, 14 nt, Human
uagagcaaaauuga

SEQ ID NO: 1601748 - RNA, 22 nt, Human
uagagcaaaauugauguguuua

SEQ ID NO: 1601749 - RNA, 22 nt, Human
gugcuacaaaaacacagcaagg

SEQ ID NO: 1601750 - RNA, 14 nt, Human
aagaaagaaaauca

SEQ ID NO: 1601751 - RNA, 16 nt, Human
aagaaagaaaaucagg

SEQ ID NO: 1601752 - RNA, 11 nt, Human
aagaaacauuu

SEQ ID NO: 1601753 - RNA, 14 nt, Human
aagaaaacaacuuc

SEQ ID NO: 1601754 - RNA, 11 nt, Human
gugauuaccag

SEQ ID NO: 1601755 - RNA, 16 nt, Human
gugauuaccagggacu

SEQ ID NO: 1601756 - RNA, 17 nt, Human
gugauuaccagggacug

SEQ ID NO: 1601757 - RNA, 22 nt, Human
aacuuccuuggacucauuuuaa

SEQ ID NO: 1601758 - RNA, 18 nt, Human
aacuucagcgguuuauau

SEQ ID NO: 1601759 - RNA, 13 nt, Human
aacuucagacaua

SEQ ID NO: 1601760 - RNA, 21 nt, Human
aacuucagcgguuuauauaag

SEQ ID NO: 1601761 - RNA, 23 nt, Human
aacuuccuuggacucauuuuaaa

SEQ ID NO: 1601762 - RNA, 19 nt, Human
aacugugaaguuuacauug

SEQ ID NO: 1601763 - RNA, 17 nt, Human
aacugugaaguuuacau

SEQ ID NO: 1601764 - RNA, 14 nt, Human
gugaaguuuacauu

SEQ ID NO: 1601765 - RNA, 13 nt, Human
gucuucacaacag

SEQ ID NO: 1601766 - RNA, 14 nt, Human
gucuuaauuaaaag

SEQ ID NO: 1601767 - RNA, 21 nt, Human
aacucauuuuuguuuucauua

SEQ ID NO: 1601768 - RNA, 24 nt, Human
aacucauuuuuguuuucauuaucu

SEQ ID NO: 1601769 - RNA, 23 nt, Human
aacuauucaggagaguagaacag

SEQ ID NO: 1601770 - RNA, 14 nt, Human
aacauaaaauacaa

SEQ ID NO: 1601771 - RNA, 14 nt, Human
aacagucucaggaa

SEQ ID NO: 1601772 - RNA, 12 nt, Human
aacauauauaac

SEQ ID NO: 1601773 - RNA, 13 nt, Human
aacagucucagga

SEQ ID NO: 1601774 - RNA, 20 nt, Human
aacacagcaagggugauggg

SEQ ID NO: 1601775 - RNA, 22 nt, Human
guccaugaagauguagaggaga

SEQ ID NO: 1601776 - RNA, 23 nt, Human
guccaugaagauguagaggagaa

SEQ ID NO: 1601777 - RNA, 20 nt, Human
gucacaggaaguagaggagg

SEQ ID NO: 1601778 - RNA, 21 nt, Human
gucaauuuuguuauguauauu

SEQ ID NO: 1601779 - RNA, 13 nt, Human
gucacaggaagua

SEQ ID NO: 1601780 - RNA, 15 nt, Human
gucacaggaaguaga

SEQ ID NO: 1601781 - RNA, 14 nt, Human
gucaggaaagagaa

SEQ ID NO: 1601782 - RNA, 18 nt, Human
aaaugugccuucauuuuu

SEQ ID NO: 1601783 - RNA, 15 nt, Human
aaaugugcuuuuaaa

SEQ ID NO: 1601784 - RNA, 17 nt, Human
aaauuguauuacaaauc

SEQ ID NO: 1601785 - RNA, 17 nt, Human
aaauuccaagugauuga

SEQ ID NO: 1601786 - RNA, 11 nt, Human
aaaucauuucu

SEQ ID NO: 1601787 - RNA, 19 nt, Human
guauucuagcuaauguaau

SEQ ID NO: 1601788 - RNA, 24 nt, Human
guauucuaaauuuuauaucuugua

SEQ ID NO: 1601789 - RNA, 21 nt, Human
guauucuaaauuuuauaucuu

SEQ ID NO: 1601790 - RNA, 22 nt, Human
uaaaauaauuuuuauauuugaa

SEQ ID NO: 1601791 - RNA, 21 nt, Human
uaaaauacacacucaaaucaa

SEQ ID NO: 1601792 - RNA, 13 nt, Human
uaaaagaauauuu

SEQ ID NO: 1601793 - RNA, 16 nt, Human
uaaaagaauauuuuaa

SEQ ID NO: 1601794 - RNA, 15 nt, Human
uaaaaccacagcagu

SEQ ID NO: 1601795 - RNA, 14 nt, Human
uaaaaccacagcag

SEQ ID NO: 1601796 - RNA, 22 nt, Human
uaaaaauauuguguugugaaug

SEQ ID NO: 1601797 - RNA, 21 nt, Human
uaaaaauauuguguugugaau

SEQ ID NO: 1601798 - RNA, 21 nt, Human
uaaaaaaaaaccugagcccca

SEQ ID NO: 1601799 - RNA, 22 nt, Human
uaaaaagccugcaauuucauau

SEQ ID NO: 1601800 - RNA, 19 nt, Human
uaaaaagccugcaauuuca

SEQ ID NO: 1601801 - RNA, 14 nt, Human
uaaaaauauugugu

SEQ ID NO: 1601802 - RNA, 9 nt, Human
uaaaauggu

SEQ ID NO: 1601803 - RNA, 11 nt, Human
uaaaaugugaa

SEQ ID NO: 1601804 - RNA, 13 nt, Human
uaaaaugugaagu

SEQ ID NO: 1601805 - RNA, 15 nt, Human
aagggcuguuauaau

SEQ ID NO: 1601806 - RNA, 17 nt, Human
aagggcuguuauaaucu

SEQ ID NO: 1601807 - RNA, 17 nt, Human
aaggggaauugaggaca

SEQ ID NO: 1601808 - RNA, 12 nt, Human
aaguaaaugcua

SEQ ID NO: 1601809 - RNA, 14 nt, Human
guuuaugauuccac

SEQ ID NO: 1601810 - RNA, 18 nt, Human
aaguauguuagugcaaau

SEQ ID NO: 1601811 - RNA, 19 nt, Human
aaguauguuagugcaaauu

SEQ ID NO: 1601812 - RNA, 19 nt, Human
aaguauguguaaaauguga

SEQ ID NO: 1601813 - RNA, 23 nt, Human
aagcuuguauuccuuuuucucuc

SEQ ID NO: 1601814 - RNA, 18 nt, Human
aagcuuauuaaaacucau

SEQ ID NO: 1601815 - RNA, 18 nt, Human
guucccuugaugaagaag

SEQ ID NO: 1601816 - RNA, 22 nt, Human
guucuagcauggcauauuuuuc

SEQ ID NO: 1601817 - RNA, 19 nt, Human
guucuagcauggcauauuu

SEQ ID NO: 1601818 - RNA, 21 nt, Human
aagccuuggggcugaugcagu

SEQ ID NO: 1601819 - RNA, 19 nt, Human
guuaauuccaauuauauga

SEQ ID NO: 1601820 - RNA, 19 nt, Human
guuauuauauuuacaaaug

SEQ ID NO: 1601821 - RNA, 20 nt, Human
guuauuauauuuacaaaugg

SEQ ID NO: 1601822 - RNA, 22 nt, Human
guuauugauaaguucauacauu

SEQ ID NO: 1601823 - RNA, 21 nt, Human
guuauugauaaguucauacau

SEQ ID NO: 1601824 - RNA, 16 nt, Human
aagcacuaaacaaaga

SEQ ID NO: 1601825 - RNA, 16 nt, Human
aagcacugacuucuaa

SEQ ID NO: 1601826 - RNA, 17 nt, Human
aagcacugacuucuaag

SEQ ID NO: 1601827 - RNA, 19 nt, Human
aagcacugacuucuaagua

SEQ ID NO: 1601828 - RNA, 20 nt, Human
aagcacugacuucuaaguaa

SEQ ID NO: 1601829 - RNA, 19 nt, Human
aagcauuguaaaugugcuu

SEQ ID NO: 1601830 - RNA, 13 nt, Human
aagcaaaauguga

SEQ ID NO: 1601831 - RNA, 17 nt, Human
aagcaacccaaauguuc

SEQ ID NO: 1601832 - RNA, 22 nt, Human
gugucuuaauuaaaagaauauu

SEQ ID NO: 1601833 - RNA, 15 nt, Human
aagauagcagggcau

SEQ ID NO: 1601834 - RNA, 15 nt, Human
guguaaaaugugaag

SEQ ID NO: 1601835 - RNA, 16 nt, Human
cacaguuuucugagaa

SEQ ID NO: 1601836 - RNA, 17 nt, Human
cacaguuuucugagaaa

SEQ ID NO: 1601837 - RNA, 19 nt, Human
cacaguuuucugagaaaga

SEQ ID NO: 1601838 - RNA, 20 nt, Human
cacaguuuucugagaaagac

SEQ ID NO: 1601839 - RNA, 19 nt, Human
caaaaaucucaauauuuca

SEQ ID NO: 1601840 - RNA, 23 nt, Human
caaaacuucagacauagaauuaa

SEQ ID NO: 1601841 - RNA, 15 nt, Human
caaaaacacagcaag

SEQ ID NO: 1601842 - RNA, 17 nt, Human
caaaaacacagcaaggg

SEQ ID NO: 1601843 - RNA, 13 nt, Human
caaaaacacagca

SEQ ID NO: 1601844 - RNA, 14 nt, Human
caaaaacacagcaa

SEQ ID NO: 1601845 - RNA, 13 nt, Human
auuuuccugaaaa

SEQ ID NO: 1601846 - RNA, 21 nt, Human
caaauaugcaaagcacugacu

SEQ ID NO: 1601847 - RNA, 15 nt, Human
caaauugugugaaag

SEQ ID NO: 1601848 - RNA, 16 nt, Human
caaaauuuuuucucua

SEQ ID NO: 1601849 - RNA, 21 nt, Human
caaaauuuuuucucuaggaaa

SEQ ID NO: 1601850 - RNA, 22 nt, Human
caaaauuuuuucucuaggaaau

SEQ ID NO: 1601851 - RNA, 16 nt, Human
caaaauugauguguuu

SEQ ID NO: 1601852 - RNA, 15 nt, Human
caaaauugauguguu

SEQ ID NO: 1601853 - RNA, 22 nt, Human
caaaauugauguguuuauuuau

SEQ ID NO: 1601854 - RNA, 19 nt, Human
caaagcugaugacaacuuc

SEQ ID NO: 1601855 - RNA, 23 nt, Human
caauacaucccuuaccugggaaa

SEQ ID NO: 1601856 - RNA, 21 nt, Human
caagccagauuuuccugaaaa

SEQ ID NO: 1601857 - RNA, 17 nt, Human
caaggcugauuaaacca

SEQ ID NO: 1601858 - RNA, 19 nt, Human
caagacugcacaucaaaau

SEQ ID NO: 1601859 - RNA, 15 nt, Human
caagaaaacaacuuc

SEQ ID NO: 1601860 - RNA, 18 nt, Human
caagaaaacaacuucaau

SEQ ID NO: 1601861 - RNA, 16 nt, Human
uuauauuuacaaaugg

SEQ ID NO: 1601862 - RNA, 20 nt, Human
uuauauuuauuacuguaaga

SEQ ID NO: 1601863 - RNA, 12 nt, Human
uuauauuugaaa

SEQ ID NO: 1601864 - RNA, 13 nt, Human
uuauauuugaaau

SEQ ID NO: 1601865 - RNA, 15 nt, Human
uuauauuugaaauau

SEQ ID NO: 1601866 - RNA, 11 nt, Human
uuaucucaaaa

SEQ ID NO: 1601867 - RNA, 18 nt, Human
uuauggcuauaggugcua

SEQ ID NO: 1601868 - RNA, 12 nt, Human
uuauaauuuaaa

SEQ ID NO: 1601869 - RNA, 14 nt, Human
uuauaauuuuguga

SEQ ID NO: 1601870 - RNA, 15 nt, Human
uuauaauuuugugaa

SEQ ID NO: 1601871 - RNA, 11 nt, Human
uuauaaucuuu

SEQ ID NO: 1601872 - RNA, 15 nt, Human
uuauaucuuguagcu

SEQ ID NO: 1601873 - RNA, 22 nt, Human
uuauaucuuguagcuuuaucaa

SEQ ID NO: 1601874 - RNA, 22 nt, Human
uuauacaggucauauuaauaua

SEQ ID NO: 1601875 - RNA, 16 nt, Human
uuauaauuuugugaag

SEQ ID NO: 1601876 - RNA, 17 nt, Human
uuauaauuuugugaagc

SEQ ID NO: 1601877 - RNA, 18 nt, Human
uuauaauuuugugaagca

SEQ ID NO: 1601878 - RNA, 14 nt, Human
uuauacaggucaua

SEQ ID NO: 1601879 - RNA, 23 nt, Human
uucaguuauuauauuuacaaaug

SEQ ID NO: 1601880 - RNA, 18 nt, Human
uuccagauccuggaaauc

SEQ ID NO: 1601881 - RNA, 21 nt, Human
uuccaaaaagauuuucagaaa

SEQ ID NO: 1601882 - RNA, 22 nt, Human
uucacaagacccaaaaggcaga

SEQ ID NO: 1601883 - RNA, 20 nt, Human
uucagagcugcccucuccug

SEQ ID NO: 1601884 - RNA, 19 nt, Human
uucagagcugcccucuccu

SEQ ID NO: 1601885 - RNA, 18 nt, Human
uucagagcugcccucucc

SEQ ID NO: 1601886 - RNA, 17 nt, Human
uucagagcugcccucuc

SEQ ID NO: 1601887 - RNA, 15 nt, Human
uucagagcugcccuc

SEQ ID NO: 1601888 - RNA, 19 nt, Human
uuauuuuaauaauguuuca

SEQ ID NO: 1601889 - RNA, 20 nt, Human
uuauuuuaauaauguuucaa

SEQ ID NO: 1601890 - RNA, 16 nt, Human
uuauuuuguucauaca

SEQ ID NO: 1601891 - RNA, 14 nt, Human
uuauuuuguucaua

SEQ ID NO: 1601892 - RNA, 16 nt, Human
uucaauaauaaauauu

SEQ ID NO: 1601893 - RNA, 17 nt, Human
uugacccacaagaaaug

SEQ ID NO: 1601894 - RNA, 14 nt, Human
uugaugaagaaguu

SEQ ID NO: 1601895 - RNA, 23 nt, Human
uugaugaagaaguugauaugccu

SEQ ID NO: 1601896 - RNA, 17 nt, Human
uucugucuucacaacag

SEQ ID NO: 1601897 - RNA, 18 nt, Human
uucugcuuguguuaagua

SEQ ID NO: 1601898 - RNA, 16 nt, Human
uugaaaagacuccaaa

SEQ ID NO: 1601899 - RNA, 17 nt, Human
uucuuccaaaaagauuu

SEQ ID NO: 1601900 - RNA, 14 nt, Human
uucuaugaaauauu

SEQ ID NO: 1601901 - RNA, 21 nt, Human
uucuaugaaauauuauguuaa

SEQ ID NO: 1601902 - RNA, 16 nt, Human
uucugagaaagacuau

SEQ ID NO: 1601903 - RNA, 21 nt, Human
uucugagaaagacuauucaaa

SEQ ID NO: 1601904 - RNA, 18 nt, Human
uucggugagcuacaaaug

SEQ ID NO: 1601905 - RNA, 17 nt, Human
uuccuuggacucauuuu

SEQ ID NO: 1601906 - RNA, 15 nt, Human
uucuacauacuaugg

SEQ ID NO: 1601907 - RNA, 22 nt, Human
uucuacauaaguaauucaagaa

SEQ ID NO: 1601908 - RNA, 22 nt, Human
uuuauaauuuugugaagcaaaa

SEQ ID NO: 1601909 - RNA, 13 nt, Human
uuuaccacuugug

SEQ ID NO: 1601910 - RNA, 14 nt, Human
uuuaauaauguuuc

SEQ ID NO: 1601911 - RNA, 19 nt, Human
uuuaacucuauaauguguu

SEQ ID NO: 1601912 - RNA, 13 nt, Human
uuuaauaauguuu

SEQ ID NO: 1601913 - RNA, 16 nt, Human
uuggucugugagaugc

SEQ ID NO: 1601914 - RNA, 17 nt, Human
uuguaaauaguauuuga

SEQ ID NO: 1601915 - RNA, 15 nt, Human
uugucuagugaaacu

SEQ ID NO: 1601916 - RNA, 14 nt, Human
uuguauuacaaauc

SEQ ID NO: 1601917 - RNA, 23 nt, Human
uuguacgaagaguauuuuugaca

SEQ ID NO: 1601918 - RNA, 21 nt, Human
uuguacgaagaguauuuuuga

SEQ ID NO: 1601919 - RNA, 18 nt, Human
uuguguuuugcaagccag

SEQ ID NO: 1601920 - RNA, 14 nt, Human
uuguuuaaaaucau

SEQ ID NO: 1601921 - RNA, 12 nt, Human
uugugccccugc

SEQ ID NO: 1601922 - RNA, 13 nt, Human
uuguguugugaau

SEQ ID NO: 1601923 - RNA, 22 nt, Human
uuuugacagaauauguuucaaa

SEQ ID NO: 1601924 - RNA, 23 nt, Human
uuuugacagaauauguuucaaac

SEQ ID NO: 1601925 - RNA, 18 nt, Human
uuuguauaaaauaauuuu

SEQ ID NO: 1601926 - RNA, 19 nt, Human
uuuguauaaaauaauuuuu

SEQ ID NO: 1601927 - RNA, 17 nt, Human
uuuguauaaaauaauuu

SEQ ID NO: 1601928 - RNA, 15 nt, Human
uuuccacagaagcuc

SEQ ID NO: 1601929 - RNA, 12 nt, Human
uuugaguucuac

SEQ ID NO: 1601930 - RNA, 13 nt, Human
uuuuauauuugaa

SEQ ID NO: 1601931 - RNA, 18 nt, Human
uuuuauauuugaaauauu

SEQ ID NO: 1601932 - RNA, 21 nt, Human
uuuuaaaguaacccuacaaaa

SEQ ID NO: 1601933 - RNA, 23 nt, Human
uuuuauaauuuugugaagcaaaa

SEQ ID NO: 1601934 - RNA, 21 nt, Human
uuuuauaauuuugugaagcaa

SEQ ID NO: 1601935 - RNA, 13 nt, Human
uuuucuuauuuca

SEQ ID NO: 1601936 - RNA, 23 nt, Human
uuuucagaaaauauuauguguuu

SEQ ID NO: 1601937 - RNA, 22 nt, Human
uuuucagaaaauauuauguguu

SEQ ID NO: 1601938 - RNA, 19 nt, Human
ugcagauaaacaguaguga

SEQ ID NO: 1601939 - RNA, 14 nt, Human
ugcauuauauuuau

SEQ ID NO: 1601940 - RNA, 20 nt, Human
ugcaauuucauaugcuguau

SEQ ID NO: 1601941 - RNA, 14 nt, Human
ugcaauuucauaug

SEQ ID NO: 1601942 - RNA, 17 nt, Human
ugagcagucaggaaaga

SEQ ID NO: 1601943 - RNA, 15 nt, Human
ugagcagucaggaaa

SEQ ID NO: 1601944 - RNA, 20 nt, Human
ugagcagucaggaaagagaa

SEQ ID NO: 1601945 - RNA, 14 nt, Human
ugagaugcuagaac

SEQ ID NO: 1601946 - RNA, 16 nt, Human
ugagaugcuagaacuc

SEQ ID NO: 1601947 - RNA, 20 nt, Human
ugagaugcuagaacucccuu

SEQ ID NO: 1601948 - RNA, 13 nt, Human
ugagccccaaaag

SEQ ID NO: 1601949 - RNA, 20 nt, Human
ugagaaagacuauucaaaca

SEQ ID NO: 1601950 - RNA, 18 nt, Human
ugagaaagacuauucaaa

SEQ ID NO: 1601951 - RNA, 16 nt, Human
ugagaaagacuauuca

SEQ ID NO: 1601952 - RNA, 17 nt, Human
ugagaaagacuauucaa

SEQ ID NO: 1601953 - RNA, 14 nt, Human
ugagacagcucugc

SEQ ID NO: 1601954 - RNA, 16 nt, Human
ugagacagcucugcau

SEQ ID NO: 1601955 - RNA, 13 nt, Human
ugacucuuaagaa

SEQ ID NO: 1601956 - RNA, 12 nt, Human
ugacucuuaaga

SEQ ID NO: 1601957 - RNA, 24 nt, Human
ugauaguuguaccgcaaugugacu

SEQ ID NO: 1601958 - RNA, 21 nt, Human
ugauguauucuagcuaaugua

SEQ ID NO: 1601959 - RNA, 20 nt, Human
ugauguauucuagcuaaugu

SEQ ID NO: 1601960 - RNA, 14 nt, Human
ugauguauucuagc

SEQ ID NO: 1601961 - RNA, 13 nt, Human
ugauguauucuag

SEQ ID NO: 1601962 - RNA, 23 nt, Human
ugggcagcugccuccccuccucu

SEQ ID NO: 1601963 - RNA, 22 nt, Human
ugggcagcugccuccccuccuc

SEQ ID NO: 1601964 - RNA, 20 nt, Human
ugggcagcugccuccccucc

SEQ ID NO: 1601965 - RNA, 12 nt, Human
ugggcagcugcc

SEQ ID NO: 1601966 - RNA, 14 nt, Human
ugggacagggagga

SEQ ID NO: 1601967 - RNA, 23 nt, Human
uggccuucggccuccauccugag

SEQ ID NO: 1601968 - RNA, 22 nt, Human
uggccuucggccuccauccuga

SEQ ID NO: 1601969 - RNA, 17 nt, Human
uggagacacaacuauuu

SEQ ID NO: 1601970 - RNA, 17 nt, Human
ugcuucuguuuuauaau

SEQ ID NO: 1601971 - RNA, 22 nt, Human
uggaaaaguauguuagugcaaa

SEQ ID NO: 1601972 - RNA, 15 nt, Human
ugcuuguguuaagua

SEQ ID NO: 1601973 - RNA, 22 nt, Human
ugcuucuguuuuauaauuuugu

SEQ ID NO: 1601974 - RNA, 12 nt, Human
ugcuuguguuaa

SEQ ID NO: 1601975 - RNA, 17 nt, Human
ugucuacacuaagagag

SEQ ID NO: 1601976 - RNA, 22 nt, Human
ugucuacacuaagagagaauga

SEQ ID NO: 1601977 - RNA, 12 nt, Human
ugucuuaauuaa

SEQ ID NO: 1601978 - RNA, 18 nt, Human
uguauuuuaaaagaauga

SEQ ID NO: 1601979 - RNA, 19 nt, Human
uguauuuuaaaagaaugau

SEQ ID NO: 1601980 - RNA, 20 nt, Human
uguaguguuggagaagaacu

SEQ ID NO: 1601981 - RNA, 21 nt, Human
uguaguguuggagaagaacug

SEQ ID NO: 1601982 - RNA, 19 nt, Human
uguaguguuggagaagaac

SEQ ID NO: 1601983 - RNA, 14 nt, Human
uguauaaaauaauu

SEQ ID NO: 1601984 - RNA, 13 nt, Human
uguauaaaauaau

SEQ ID NO: 1601985 - RNA, 15 nt, Human
uguagcuuuaucaaa

SEQ ID NO: 1601986 - RNA, 14 nt, Human
uguagcuuuaucaa

SEQ ID NO: 1601987 - RNA, 16 nt, Human
ugguucccuugaugaa

SEQ ID NO: 1601988 - RNA, 17 nt, Human
ugguucccuugaugaag

SEQ ID NO: 1601989 - RNA, 20 nt, Human
ugguucccuugaugaagaag

SEQ ID NO: 1601990 - RNA, 14 nt, Human
uggguagacacaca

SEQ ID NO: 1601991 - RNA, 11 nt, Human
uguaaaauggu

SEQ ID NO: 1601992 - RNA, 12 nt, Human
uguaaaauggug

SEQ ID NO: 1601993 - RNA, 22 nt, Human
uguaauaacugugaaguuuaca

SEQ ID NO: 1601994 - RNA, 14 nt, Human
uguaauaacuguga

SEQ ID NO: 1601995 - RNA, 15 nt, Human
ucccuugaugaagaa

SEQ ID NO: 1601996 - RNA, 16 nt, Human
ucccuugaugaagaag

SEQ ID NO: 1601997 - RNA, 22 nt, Human
uccucugcuugccaucccuccc

SEQ ID NO: 1601998 - RNA, 21 nt, Human
uccucugcuugccaucccucc

SEQ ID NO: 1601999 - RNA, 20 nt, Human
uccucugcuugccaucccuc

SEQ ID NO: 1602000 - RNA, 16 nt, Human
uccuuggacucauuuu

SEQ ID NO: 1602001 - RNA, 20 nt, Human
uccugccuaagugcagcccc

SEQ ID NO: 1602002 - RNA, 22 nt, Human
ucuagugagcagucaggaaaga

SEQ ID NO: 1602003 - RNA, 19 nt, Human
ucuagugagcagucaggaa

SEQ ID NO: 1602004 - RNA, 13 nt, Human
ucuaugaaauauu

SEQ ID NO: 1602005 - RNA, 14 nt, Human
ucuaugaaauauua

SEQ ID NO: 1602006 - RNA, 17 nt, Human
ucuaugaaauauuaugu

SEQ ID NO: 1602007 - RNA, 18 nt, Human
ucuaugaaauauuauguu

SEQ ID NO: 1602008 - RNA, 13 nt, Human
ucguuaauuugua

SEQ ID NO: 1602009 - RNA, 18 nt, Human
ucggccuccauccugagg

SEQ ID NO: 1602010 - RNA, 21 nt, Human
ucguggaacaguuaccucugc

SEQ ID NO: 1602011 - RNA, 22 nt, Human
ucgugggacagucaccucaugg

SEQ ID NO: 1602012 - RNA, 14 nt, Human
ucugcaucagcugc

SEQ ID NO: 1602013 - RNA, 19 nt, Human
ucugcaucagcugcugaaa

SEQ ID NO: 1602014 - RNA, 21 nt, Human
ucugcaucagcugcugaaaca

SEQ ID NO: 1602015 - RNA, 17 nt, Human
ucuggccuucggccucc

SEQ ID NO: 1602016 - RNA, 18 nt, Human
ucuggccuucggccucca

SEQ ID NO: 1602017 - RNA, 23 nt, Human
ucuggccuucggccuccauccug

SEQ ID NO: 1602018 - RNA, 12 nt, Human
ucuuaagaagac

SEQ ID NO: 1602019 - RNA, 18 nt, Human
ucuuaagaagacugcauu

SEQ ID NO: 1602020 - RNA, 15 nt, Human
ucugucuucacaaca

SEQ ID NO: 1602021 - RNA, 22 nt, Human
ucuuaggguuaugauuaaguaa

SEQ ID NO: 1602022 - RNA, 19 nt, Human
ucuucaucugacuaugaca

SEQ ID NO: 1602023 - RNA, 16 nt, Human
ucaaauaugcaaagca

SEQ ID NO: 1602024 - RNA, 14 nt, Human
ucaaauaugcaaag

SEQ ID NO: 1602025 - RNA, 20 nt, Human
ucaaaucaagaaacuuaagg

SEQ ID NO: 1602026 - RNA, 15 nt, Human
ucaaauccuugaaga

SEQ ID NO: 1602027 - RNA, 14 nt, Human
ucaaauugugugaa

SEQ ID NO: 1602028 - RNA, 15 nt, Human
ucaaauugugugaaa

SEQ ID NO: 1602029 - RNA, 21 nt, Human
ucaauaaaauccauacauuug

SEQ ID NO: 1602030 - RNA, 14 nt, Human
ucaccaaggcugau

SEQ ID NO: 1602031 - RNA, 13 nt, Human
ucacaagacccaa

SEQ ID NO: 1602032 - RNA, 17 nt, Human
ucacaagacccaaaagg

SEQ ID NO: 1602033 - RNA, 18 nt, Human
ucacaagacccaaaaggc

SEQ ID NO: 1602034 - RNA, 16 nt, Human
ucacagucacauucca

SEQ ID NO: 1602035 - RNA, 16 nt, Human
uauuauucccauucua

SEQ ID NO: 1602036 - RNA, 14 nt, Human
uauucuaaauuuua

SEQ ID NO: 1602037 - RNA, 19 nt, Human
uauucuagcuaauguaaua

SEQ ID NO: 1602038 - RNA, 19 nt, Human
uauucuaaauuuuauaucu

SEQ ID NO: 1602039 - RNA, 15 nt, Human
uauucuaaauuuuau

SEQ ID NO: 1602040 - RNA, 20 nt, Human
uauucuaaauuuuauaucuu

SEQ ID NO: 1602041 - RNA, 13 nt, Human
uauguacuucaug

SEQ ID NO: 1602042 - RNA, 17 nt, Human
uauguacuucaugcugu

SEQ ID NO: 1602043 - RNA, 12 nt, Human
uauuaauauauu

SEQ ID NO: 1602044 - RNA, 16 nt, Human
uauguuucaaacuuug

SEQ ID NO: 1602045 - RNA, 15 nt, Human
uauguuucaaacuuu

SEQ ID NO: 1602046 - RNA, 13 nt, Human
uauguuucaaacu

SEQ ID NO: 1602047 - RNA, 21 nt, Human
ucagagcugcccucuccuggg

SEQ ID NO: 1602048 - RNA, 20 nt, Human
ucagagcugcccucuccugg

SEQ ID NO: 1602049 - RNA, 19 nt, Human
ucagagcugcccucuccug

SEQ ID NO: 1602050 - RNA, 23 nt, Human
ucagagcugcccucuccugggca

SEQ ID NO: 1602051 - RNA, 22 nt, Human
ucagagcugcccucuccugggc

SEQ ID NO: 1602052 - RNA, 17 nt, Human
ucagcuccccucggaga

SEQ ID NO: 1602053 - RNA, 18 nt, Human
ucagcuccccucggagaa

SEQ ID NO: 1602054 - RNA, 21 nt, Human
ucagcuccccucggagaagag

SEQ ID NO: 1602055 - RNA, 13 nt, Human
ucaggcuagaugu

SEQ ID NO: 1602056 - RNA, 17 nt, Human
ucaggcuagauguaugu

SEQ ID NO: 1602057 - RNA, 17 nt, Human
uccacuuggucugugag

SEQ ID NO: 1602058 - RNA, 15 nt, Human
uccacuuggucugug

SEQ ID NO: 1602059 - RNA, 16 nt, Human
uccacuuggucuguga

SEQ ID NO: 1602060 - RNA, 19 nt, Human
uccacagaagcuccaggua

SEQ ID NO: 1602061 - RNA, 14 nt, Human
uccaccucccugca

SEQ ID NO: 1602062 - RNA, 13 nt, Human
uccaccucccugc

SEQ ID NO: 1602063 - RNA, 17 nt, Human
uccaccucccugcaaua

SEQ ID NO: 1602064 - RNA, 16 nt, Human
uccaccucccugcaau

SEQ ID NO: 1602065 - RNA, 15 nt, Human
uccaccucccugcaa

SEQ ID NO: 1602066 - RNA, 15 nt, Human
uccaaaauaauuuua

SEQ ID NO: 1602067 - RNA, 19 nt, Human
uccaaaauaauuuuaagaa

SEQ ID NO: 1602068 - RNA, 19 nt, Human
ucauuaucucaaaacugca

SEQ ID NO: 1602069 - RNA, 20 nt, Human
ucauuaucucaaaacugcac

SEQ ID NO: 1602070 - RNA, 13 nt, Human
ucauuaucucaaa

SEQ ID NO: 1602071 - RNA, 13 nt, Human
ucauuuccaagca

SEQ ID NO: 1602072 - RNA, 16 nt, Human
ucauuuccaagcaagu

SEQ ID NO: 1602073 - RNA, 18 nt, Human
ucauaccuaucaucuuaa

SEQ ID NO: 1602074 - RNA, 18 nt, Human
ucaucugacuaugacaua

SEQ ID NO: 1602075 - RNA, 17 nt, Human
ucaucugacuaugacau

SEQ ID NO: 1602076 - RNA, 16 nt, Human
ggaggacgcucucugg

SEQ ID NO: 1602077 - RNA, 19 nt, Human
ggaggggagcaugggaagu

SEQ ID NO: 1602078 - RNA, 11 nt, Human
ggagaagaacu

SEQ ID NO: 1602079 - RNA, 14 nt, Human
ggagaagaacugaa

SEQ ID NO: 1602080 - RNA, 15 nt, Human
ggagaagagcuguuc

SEQ ID NO: 1602081 - RNA, 23 nt, Human
ggagaagagcuguucacagccag

SEQ ID NO: 1602082 - RNA, 16 nt, Human
ggacgcucucuggccu

SEQ ID NO: 1602083 - RNA, 19 nt, Human
ggacgcucucuggccuucg

SEQ ID NO: 1602084 - RNA, 17 nt, Human
ggacauuugcucaugga

SEQ ID NO: 1602085 - RNA, 20 nt, Human
ggacauuugcucauggaauu

SEQ ID NO: 1602086 - RNA, 21 nt, Human
ggcagagguugcagugagccg

SEQ ID NO: 1602087 - RNA, 16 nt, Human
ggcagcugccuccccu

SEQ ID NO: 1602088 - RNA, 13 nt, Human
ggcagcugccucc

SEQ ID NO: 1602089 - RNA, 12 nt, Human
ggcagcugccuc

SEQ ID NO: 1602090 - RNA, 11 nt, Human
ggcagcugccu

SEQ ID NO: 1602091 - RNA, 16 nt, Human
ggcuccacuuggucug

SEQ ID NO: 1602092 - RNA, 20 nt, Human
ggcuaguaucaaaagaaaga

SEQ ID NO: 1602093 - RNA, 23 nt, Human
ggcuauaggugcuacaaaaacac

SEQ ID NO: 1602094 - RNA, 17 nt, Human
gggaggacgcucucugg

SEQ ID NO: 1602095 - RNA, 20 nt, Human
gggaggacgcucucuggccu

SEQ ID NO: 1602096 - RNA, 11 nt, Human
gggaggcagag

SEQ ID NO: 1602097 - RNA, 14 nt, Human
gggaauugaggaca

SEQ ID NO: 1602098 - RNA, 21 nt, Human
gggacugaggggaggggagca

SEQ ID NO: 1602099 - RNA, 21 nt, Human
gcuauaggugcuacaaaaaca

SEQ ID NO: 1602100 - RNA, 14 nt, Human
gcuagauguaugua

SEQ ID NO: 1602101 - RNA, 16 nt, Human
gcuagauguauguacu

SEQ ID NO: 1602102 - RNA, 13 nt, Human
gcuagauguaugu

SEQ ID NO: 1602103 - RNA, 17 nt, Human
gccugagcgacagugag

SEQ ID NO: 1602104 - RNA, 20 nt, Human
gccugagcgacagugagacu

SEQ ID NO: 1602105 - RNA, 21 nt, Human
gcugauuaaaccaaggcuaga

SEQ ID NO: 1602106 - RNA, 12 nt, Human
gcugcccucucc

SEQ ID NO: 1602107 - RNA, 21 nt, Human
gcuggaaaaguauguuagugc

SEQ ID NO: 1602108 - RNA, 23 nt, Human
gcuggaaaaguauguuagugcaa

SEQ ID NO: 1602109 - RNA, 22 nt, Human
gcugcccucuccugggcagcug

SEQ ID NO: 1602110 - RNA, 20 nt, Human
gcugcccucuccugggcagc

SEQ ID NO: 1602111 - RNA, 18 nt, Human
gcugcccucuccugggca

SEQ ID NO: 1602112 - RNA, 17 nt, Human
gcugcccucuccugggc

SEQ ID NO: 1602113 - RNA, 16 nt, Human
gcugcccucuccuggg

SEQ ID NO: 1602114 - RNA, 15 nt, Human
gcugcccucuccugg

SEQ ID NO: 1602115 - RNA, 14 nt, Human
gcugcccucuccug

SEQ ID NO: 1602116 - RNA, 13 nt, Human
gcugcccucuccu

SEQ ID NO: 1602117 - RNA, 23 nt, Human
gcugcccucuccugggcagcugc

SEQ ID NO: 1602118 - RNA, 19 nt, Human
gcuucuguuuuauaauuuu

SEQ ID NO: 1602119 - RNA, 12 nt, Human
gcuuguguuaag

SEQ ID NO: 1602120 - RNA, 23 nt, Human
gcuggucccagccagcaguucag

SEQ ID NO: 1602121 - RNA, 18 nt, Human
gcuguguuaaauaaaccu

SEQ ID NO: 1602122 - RNA, 19 nt, Human
gccagacuggcacaguuuu

SEQ ID NO: 1602123 - RNA, 15 nt, Human
gccagacuggcacag

SEQ ID NO: 1602124 - RNA, 18 nt, Human
gccagacuggcacaguuu

SEQ ID NO: 1602125 - RNA, 19 nt, Human
gccaugggcacugugggua

SEQ ID NO: 1602126 - RNA, 23 nt, Human
gccaugggacagggaggacgcuc

SEQ ID NO: 1602127 - RNA, 19 nt, Human
gccagauuuuccugaaaac

SEQ ID NO: 1602128 - RNA, 23 nt, Human
gcagagguugcagugagccgaga

SEQ ID NO: 1602129 - RNA, 18 nt, Human
gcagagguugcagugagc

SEQ ID NO: 1602130 - RNA, 15 nt, Human
gcacagccucuuaga

SEQ ID NO: 1602131 - RNA, 18 nt, Human
gcacagccucuuagaugc

SEQ ID NO: 1602132 - RNA, 23 nt, Human
gcaucagcugcugaaacaacaaa

SEQ ID NO: 1602133 - RNA, 22 nt, Human
gcaucagcugcugaaacaacaa

SEQ ID NO: 1602134 - RNA, 23 nt, Human
gcaguucagagcugcccucuccu

SEQ ID NO: 1602135 - RNA, 22 nt, Human
gcaguucagagcugcccucucc

SEQ ID NO: 1602136 - RNA, 20 nt, Human
gcaguucagagcugcccucu

SEQ ID NO: 1602137 - RNA, 19 nt, Human
gcaguucagagcugcccuc

SEQ ID NO: 1602138 - RNA, 16 nt, Human
gcaguugaaaagacuc

SEQ ID NO: 1602139 - RNA, 19 nt, Human
gcaguugaaaagacuccaa

SEQ ID NO: 1602140 - RNA, 21 nt, Human
gcaguugaaaagacuccaaag

SEQ ID NO: 1602141 - RNA, 22 nt, Human
gcaguugaaaagacuccaaaga

SEQ ID NO: 1602142 - RNA, 17 nt, Human
gaguauuuuugacagaa

SEQ ID NO: 1602143 - RNA, 16 nt, Human
gaguauuuuugacaga

SEQ ID NO: 1602144 - RNA, 14 nt, Human
gaguauuuuugaca

SEQ ID NO: 1602145 - RNA, 18 nt, Human
gaguauuuuugacagaau

SEQ ID NO: 1602146 - RNA, 21 nt, Human
gaguugaaaaucuuauaauuu

SEQ ID NO: 1602147 - RNA, 22 nt, Human
gagugaacaaauuuacagagac

SEQ ID NO: 1602148 - RNA, 23 nt, Human
gagugaacaaauuuacagagaca

SEQ ID NO: 1602149 - RNA, 19 nt, Human
gagugaacaaauuuacaga

SEQ ID NO: 1602150 - RNA, 21 nt, Human
gauaaucagugugucuaaauu

SEQ ID NO: 1602151 - RNA, 19 nt, Human
gauguugaaaaaguucugc

SEQ ID NO: 1602152 - RNA, 13 nt, Human
gauugugccccug

SEQ ID NO: 1602153 - RNA, 18 nt, Human
gaugcaguucugaagaag

SEQ ID NO: 1602154 - RNA, 16 nt, Human
gaugggaaagcauugu

SEQ ID NO: 1602155 - RNA, 16 nt, Human
gaucuucaucugacua

SEQ ID NO: 1602156 - RNA, 14 nt, Human
gaucuuuaaaauac

SEQ ID NO: 1602157 - RNA, 23 nt, Human
gaucuucaucugacuaugacaua

SEQ ID NO: 1602158 - RNA, 14 nt, Human
gagcuacaaaugca

SEQ ID NO: 1602159 - RNA, 17 nt, Human
gagcugcccucuccugg

SEQ ID NO: 1602160 - RNA, 16 nt, Human
gagcugcccucuccug

SEQ ID NO: 1602161 - RNA, 15 nt, Human
gagcugcccucuccu

SEQ ID NO: 1602162 - RNA, 14 nt, Human
gagcugcccucucc

SEQ ID NO: 1602163 - RNA, 13 nt, Human
gagcuacaaaugc

SEQ ID NO: 1602164 - RNA, 12 nt, Human
gagcuacaaaug

SEQ ID NO: 1602165 - RNA, 21 nt, Human
gagcaggcuacugucagcucc

SEQ ID NO: 1602166 - RNA, 13 nt, Human
gagcaaagcugau

SEQ ID NO: 1602167 - RNA, 23 nt, Human
cuauucaaacagucucaggaaau

SEQ ID NO: 1602168 - RNA, 18 nt, Human
cuauucaaacagucucag

SEQ ID NO: 1602169 - RNA, 16 nt, Human
cuauucaaacagucuc

SEQ ID NO: 1602170 - RNA, 18 nt, Human
cuauauuguuugcuaagc

SEQ ID NO: 1602171 - RNA, 20 nt, Human
cuauaggugcuacaaaaaca

SEQ ID NO: 1602172 - RNA, 21 nt, Human
cuauaggugcuacaaaaacac

SEQ ID NO: 1602173 - RNA, 22 nt, Human
cuauaggugcuacaaaaacaca

SEQ ID NO: 1602174 - RNA, 16 nt, Human
cuaguaauuggaaagg

SEQ ID NO: 1602175 - RNA, 20 nt, Human
cuagugaaacucguuaauuu

SEQ ID NO: 1602176 - RNA, 18 nt, Human
cuagugaaagaggcagcu

SEQ ID NO: 1602177 - RNA, 19 nt, Human
cuagugaaagaggcagcuu

SEQ ID NO: 1602178 - RNA, 21 nt, Human
cuagugagcagucaggaaaga

SEQ ID NO: 1602179 - RNA, 21 nt, Human
cuccaaacugacucuuaagaa

SEQ ID NO: 1602180 - RNA, 12 nt, Human
cuccaaagaaau

SEQ ID NO: 1602181 - RNA, 13 nt, Human
cuccaaagaaaug

SEQ ID NO: 1602182 - RNA, 21 nt, Human
cucauuuccaagcaaguauua

SEQ ID NO: 1602183 - RNA, 12 nt, Human
cuccauccugag

SEQ ID NO: 1602184 - RNA, 13 nt, Human
cuccccuccucug

SEQ ID NO: 1602185 - RNA, 11 nt, Human
cuccccuccuc

SEQ ID NO: 1602186 - RNA, 14 nt, Human
cuccauccugaggc

SEQ ID NO: 1602187 - RNA, 13 nt, Human
cuccauccugagg

SEQ ID NO: 1602188 - RNA, 20 nt, Human
cuccccuccucugcuugcca

SEQ ID NO: 1602189 - RNA, 12 nt, Human
cucccuuucaac

SEQ ID NO: 1602190 - RNA, 19 nt, Human
cucuuaagaagacugcauu

SEQ ID NO: 1602191 - RNA, 21 nt, Human
cucuggccuucggccuccauc

SEQ ID NO: 1602192 - RNA, 22 nt, Human
cucuggccuucggccuccaucc

SEQ ID NO: 1602193 - RNA, 12 nt, Human
cugagaaagacu

SEQ ID NO: 1602194 - RNA, 13 nt, Human
cugagaaagacua

SEQ ID NO: 1602195 - RNA, 15 nt, Human
cugagaaagacuauu

SEQ ID NO: 1602196 - RNA, 18 nt, Human
cugagaaagacuauucaa

SEQ ID NO: 1602197 - RNA, 16 nt, Human
cugagcaggauuuuaa

SEQ ID NO: 1602198 - RNA, 21 nt, Human
cugagaugugaacacaucagc

SEQ ID NO: 1602199 - RNA, 22 nt, Human
cugagaaagacuauucaaacag

SEQ ID NO: 1602200 - RNA, 19 nt, Human
cugagaaagacuauucaaa

SEQ ID NO: 1602201 - RNA, 20 nt, Human
cugagaaagacuauucaaac

SEQ ID NO: 1602202 - RNA, 20 nt, Human
cugagaugugaacacaucag

SEQ ID NO: 1602203 - RNA, 14 nt, Human
cugaagaagauggu

SEQ ID NO: 1602204 - RNA, 15 nt, Human
cugaggcuccacuug

SEQ ID NO: 1602205 - RNA, 21 nt, Human
cugaggcuccacuuggucugu

SEQ ID NO: 1602206 - RNA, 15 nt, Human
cugcaauaaaauggg

SEQ ID NO: 1602207 - RNA, 22 nt, Human
cugcaauaaaauggguuuuacu

SEQ ID NO: 1602208 - RNA, 13 nt, Human
gaaauauuauguu

SEQ ID NO: 1602209 - RNA, 16 nt, Human
gaaauauuauguuaaa

SEQ ID NO: 1602210 - RNA, 22 nt, Human
gaaauguaagggaaacugccag

SEQ ID NO: 1602211 - RNA, 11 nt, Human
gaaacauuugg

SEQ ID NO: 1602212 - RNA, 21 nt, Human
gaagaagcaccaaucaugaau

SEQ ID NO: 1602213 - RNA, 21 nt, Human
gaacuuguaaaggaauuuaaa

SEQ ID NO: 1602214 - RNA, 15 nt, Human
gaacucccuuucaac

SEQ ID NO: 1602215 - RNA, 14 nt, Human
gaacucccuuucaa

SEQ ID NO: 1602216 - RNA, 22 nt, Human
gaacuuccagauccuggaaauc

SEQ ID NO: 1602217 - RNA, 22 nt, Human
gaacuagaguuuagcuggaaaa

SEQ ID NO: 1602218 - RNA, 14 nt, Human
gaauacuuuauaaa

SEQ ID NO: 1602219 - RNA, 20 nt, Human
gaauaauccuaaacauauga

SEQ ID NO: 1602220 - RNA, 17 nt, Human
gaaguuuacauuguaaa

SEQ ID NO: 1602221 - RNA, 16 nt, Human
gaaguuuacauuguaa

SEQ ID NO: 1602222 - RNA, 17 nt, Human
gaagacugcauuauauu

SEQ ID NO: 1602223 - RNA, 21 nt, Human
gaagccuuggggcugaugcag

SEQ ID NO: 1602224 - RNA, 14 nt, Human
gaaggaaaaugaua

SEQ ID NO: 1602225 - RNA, 22 nt, Human
gaaaacaauaacgauaaaagac

SEQ ID NO: 1602226 - RNA, 20 nt, Human
gaaaaucuuauaauuuaaaa

SEQ ID NO: 1602227 - RNA, 19 nt, Human
gaaaauaacgauaaaagac

SEQ ID NO: 1602228 - RNA, 19 nt, Human
gaaaaucuuauaauuuaaa

SEQ ID NO: 1602229 - RNA, 12 nt, Human
gaaaauaucacu

SEQ ID NO: 1602230 - RNA, 17 nt, Human
gaaaauauuauguguuu

SEQ ID NO: 1602231 - RNA, 19 nt, Human
cuuguaaaggaauuuaaaa

SEQ ID NO: 1602232 - RNA, 22 nt, Human
cuugccaucccucccuccaccu

SEQ ID NO: 1602233 - RNA, 21 nt, Human
cuugccaucccucccuccacc

SEQ ID NO: 1602234 - RNA, 13 nt, Human
cuuuccacagaag

SEQ ID NO: 1602235 - RNA, 21 nt, Human
cuuuauuuucuauaauuuaaa

SEQ ID NO: 1602236 - RNA, 20 nt, Human
cuuuaaagggauggcaagau

SEQ ID NO: 1602237 - RNA, 18 nt, Human
cuuuaaagggauggcaag

SEQ ID NO: 1602238 - RNA, 19 nt, Human
cuuguguuaaguaugugua

SEQ ID NO: 1602239 - RNA, 16 nt, Human
cuucagcgguuuauau

SEQ ID NO: 1602240 - RNA, 15 nt, Human
cuucagccugaaaga

SEQ ID NO: 1602241 - RNA, 17 nt, Human
cuucaaauccuugaaga

SEQ ID NO: 1602242 - RNA, 12 nt, Human
cuucacaacaga

SEQ ID NO: 1602243 - RNA, 14 nt, Human
cuucacaacagauu

SEQ ID NO: 1602244 - RNA, 20 nt, Human
cuucggccuccauccugagg

SEQ ID NO: 1602245 - RNA, 23 nt, Human
cuuaagaagacugcauuauauuu

SEQ ID NO: 1602246 - RNA, 12 nt, Human
cuuaaaaauggu

SEQ ID NO: 1602247 - RNA, 19 nt, Human
cuuaauuaaaagaauauuu

SEQ ID NO: 1602248 - RNA, 20 nt, Human
cuuaauuaaaagaauauuuu

SEQ ID NO: 1602249 - RNA, 16 nt, Human
cuuaauuaaaagaaua

SEQ ID NO: 1602250 - RNA, 17 nt, Human
cuuaauuaaaagaauau

SEQ ID NO: 1602251 - RNA, 14 nt, Human
cuguuuuauaauuu

SEQ ID NO: 1602252 - RNA, 15 nt, Human
cuguuuuauaauuuu

SEQ ID NO: 1602253 - RNA, 19 nt, Human
cuguuaaaagaugaaaaua

SEQ ID NO: 1602254 - RNA, 15 nt, Human
cuguuaaaagaugaa

SEQ ID NO: 1602255 - RNA, 16 nt, Human
cuguuaaaagaugaaa

SEQ ID NO: 1602256 - RNA, 18 nt, Human
cugucuucacaacagauu

SEQ ID NO: 1602257 - RNA, 18 nt, Human
cugugaaaguacauuugg

SEQ ID NO: 1602258 - RNA, 20 nt, Human
cccacaagaaaugaaagcag

SEQ ID NO: 1602259 - RNA, 13 nt, Human
cccacaagaaaug

SEQ ID NO: 1602260 - RNA, 17 nt, Human
cccuccaccucccugca

SEQ ID NO: 1602261 - RNA, 15 nt, Human
cccuccaccucccug

SEQ ID NO: 1602262 - RNA, 19 nt, Human
cccuccaccucccugcaau

SEQ ID NO: 1602263 - RNA, 12 nt, Human
cccuccaccucc

SEQ ID NO: 1602264 - RNA, 14 nt, Human
cccuccaccucccu

SEQ ID NO: 1602265 - RNA, 13 nt, Human
cccucuccugggc

SEQ ID NO: 1602266 - RNA, 12 nt, Human
cccucuccuggg

SEQ ID NO: 1602267 - RNA, 11 nt, Human
cccucuccugg

SEQ ID NO: 1602268 - RNA, 15 nt, Human
cccucuccugggcag

SEQ ID NO: 1602269 - RNA, 14 nt, Human
cccucuccugggca

SEQ ID NO: 1602270 - RNA, 15 nt, Human
cccgugggguuccuc

SEQ ID NO: 1602271 - RNA, 18 nt, Human
ccuccucugcuugccauc

SEQ ID NO: 1602272 - RNA, 16 nt, Human
ccuccucugcuugcca

SEQ ID NO: 1602273 - RNA, 20 nt, Human
ccucccuccaccucccugca

SEQ ID NO: 1602274 - RNA, 17 nt, Human
ccucccuccaccucccu

SEQ ID NO: 1602275 - RNA, 22 nt, Human
ccuccaccucccugcaauaaaa

SEQ ID NO: 1602276 - RNA, 17 nt, Human
ccuccaccucccugcaa

SEQ ID NO: 1602277 - RNA, 15 nt, Human
ccuccaccucccugc

SEQ ID NO: 1602278 - RNA, 14 nt, Human
ccuccaccucccug

SEQ ID NO: 1602279 - RNA, 13 nt, Human
ccuccaccucccu

SEQ ID NO: 1602280 - RNA, 16 nt, Human
ccgggcguggugguga

SEQ ID NO: 1602281 - RNA, 20 nt, Human
ccuguuaaaagaugaaaaua

SEQ ID NO: 1602282 - RNA, 21 nt, Human
ccuguuaaaagaugaaaauau

SEQ ID NO: 1602283 - RNA, 12 nt, Human
ccuucagccuga

SEQ ID NO: 1602284 - RNA, 14 nt, Human
ccuucggccuccau

SEQ ID NO: 1602285 - RNA, 20 nt, Human
ccuucggccuccauccugag

SEQ ID NO: 1602286 - RNA, 19 nt, Human
ccuuggggcugaugcaguu

SEQ ID NO: 1602287 - RNA, 16 nt, Human
ccuucggccuccaucc

SEQ ID NO: 1602288 - RNA, 15 nt, Human
ccuucugugaaagua

SEQ ID NO: 1602289 - RNA, 18 nt, Human
cgagcaggcuacugucag

SEQ ID NO: 1602290 - RNA, 21 nt, Human
cgaagaguauuuuugacagaa

SEQ ID NO: 1602291 - RNA, 23 nt, Human
cgaagaguauuuuugacagaaua

SEQ ID NO: 1602292 - RNA, 23 nt, Human
ccuggaaaucaggguuaguauug

SEQ ID NO: 1602293 - RNA, 11 nt, Human
ccugagcccca

SEQ ID NO: 1602294 - RNA, 16 nt, Human
ccugcaauaaaauggg

SEQ ID NO: 1602295 - RNA, 19 nt, Human
ccugcaauuucauaugcug

SEQ ID NO: 1602296 - RNA, 14 nt, Human
ccaccucccugcaa

SEQ ID NO: 1602297 - RNA, 22 nt, Human
ccagccagcaguucagagcugc

SEQ ID NO: 1602298 - RNA, 22 nt, Human
ccagcaguucagagcugcccuc

SEQ ID NO: 1602299 - RNA, 21 nt, Human
ccagcaguucagagcugcccu

SEQ ID NO: 1602300 - RNA, 20 nt, Human
ccagcaguucagagcugccc

SEQ ID NO: 1602301 - RNA, 19 nt, Human
ccagcaguucagagcugcc

SEQ ID NO: 1602302 - RNA, 18 nt, Human
ccagcaguucagagcugc

SEQ ID NO: 1602303 - RNA, 13 nt, Human
ccagcaguucaga

SEQ ID NO: 1602304 - RNA, 23 nt, Human
ccagcaguucagagcugcccucu

SEQ ID NO: 1602305 - RNA, 21 nt, Human
ccaguuauggcuauaggugcu

SEQ ID NO: 1602306 - RNA, 14 nt, Human
ccaguuauggcuau

SEQ ID NO: 1602307 - RNA, 16 nt, Human
ccaugggacagggagg

SEQ ID NO: 1602308 - RNA, 19 nt, Human
ccaugggacagggaggacg

SEQ ID NO: 1602309 - RNA, 13 nt, Human
cauucuggaauaa

SEQ ID NO: 1602310 - RNA, 22 nt, Human
cauuccaacuaucucauuucca

SEQ ID NO: 1602311 - RNA, 21 nt, Human
cauuguaaaugugcuuuuaaa

SEQ ID NO: 1602312 - RNA, 19 nt, Human
cauuguacgaagaguauuu

SEQ ID NO: 1602313 - RNA, 20 nt, Human
cauuguacgaagaguauuuu

SEQ ID NO: 1602314 - RNA, 20 nt, Human
cauggaauuggagcucgugg

SEQ ID NO: 1602315 - RNA, 13 nt, Human
cauggcauauuuu

SEQ ID NO: 1602316 - RNA, 19 nt, Human
cauggcauauuuuucacau

SEQ ID NO: 1602317 - RNA, 15 nt, Human
cauggcauauuuuuc

SEQ ID NO: 1602318 - RNA, 23 nt, Human
cauggcauauuuuucacauaucu

SEQ ID NO: 1602319 - RNA, 20 nt, Human
caugugcuaguaauuggaaa

SEQ ID NO: 1602320 - RNA, 21 nt, Human
cauuaaaaaaucaguuguaca

SEQ ID NO: 1602321 - RNA, 18 nt, Human
caucccuuaccugggaaa

SEQ ID NO: 1602322 - RNA, 23 nt, Human
caucccucccuccaccucccugc

SEQ ID NO: 1602323 - RNA, 22 nt, Human
caucccucccuccaccucccug

SEQ ID NO: 1602324 - RNA, 13 nt, Human
cauauauaacaau

SEQ ID NO: 1602325 - RNA, 15 nt, Human
cauauauaacaaugc

SEQ ID NO: 1602326 - RNA, 20 nt, Human
cauauauaacaaugcuguau

SEQ ID NO: 1602327 - RNA, 18 nt, Human
cauaucuaguaugaaauu

SEQ ID NO: 1602328 - RNA, 17 nt, Human
cauaucuaguaugaaau

SEQ ID NO: 1602329 - RNA, 15 nt, Human
cauaucuaguaugaa

SEQ ID NO: 1602330 - RNA, 21 nt, Human
cauaucuaguaugaaauuaua

SEQ ID NO: 1602331 - RNA, 19 nt, Human
caugagguacugagaguga

SEQ ID NO: 1602332 - RNA, 16 nt, Human
caugagguacugagag

SEQ ID NO: 1602333 - RNA, 18 nt, Human
caugaagauguagaggag

SEQ ID NO: 1602334 - RNA, 19 nt, Human
caugaagauguagaggaga

SEQ ID NO: 1602335 - RNA, 17 nt, Human
caucugacuaugacaua

SEQ ID NO: 1602336 - RNA, 13 nt, Human
caggcuagaugua

SEQ ID NO: 1602337 - RNA, 19 nt, Human
caggcuagauguauguacu

SEQ ID NO: 1602338 - RNA, 14 nt, Human
caggcuacugucag

SEQ ID NO: 1602339 - RNA, 18 nt, Human
cagggacaggauaagagg

SEQ ID NO: 1602340 - RNA, 17 nt, Human
cagggcauggcugggaa

SEQ ID NO: 1602341 - RNA, 11 nt, Human
caggggacagg

SEQ ID NO: 1602342 - RNA, 16 nt, Human
caggggacaggauggu

SEQ ID NO: 1602343 - RNA, 16 nt, Human
caggauuuuaaucuuu

SEQ ID NO: 1602344 - RNA, 21 nt, Human
caggaugguucccuugaugaa

SEQ ID NO: 1602345 - RNA, 23 nt, Human
caggaugguucccuugaugaaga

SEQ ID NO: 1602346 - RNA, 14 nt, Human
caggcccccaggug

SEQ ID NO: 1602347 - RNA, 19 nt, Human
caggcccccaggugccagu

SEQ ID NO: 1602348 - RNA, 20 nt, Human
caggcccccaggugccaguu

SEQ ID NO: 1602349 - RNA, 12 nt, Human
caggagaguaga

SEQ ID NO: 1602350 - RNA, 15 nt, Human
cagucaggaaagaga

SEQ ID NO: 1602351 - RNA, 18 nt, Human
cagucaggaaagagaacu

SEQ ID NO: 1602352 - RNA, 22 nt, Human
cagucaggaaagagaacuucca

SEQ ID NO: 1602353 - RNA, 13 nt, Human
caguccaugaaga

SEQ ID NO: 1602354 - RNA, 12 nt, Human
caguagugauag

SEQ ID NO: 1602355 - RNA, 12 nt, Human
caguauggcagc

SEQ ID NO: 1602356 - RNA, 17 nt, Human
cagugauuaccagggac

SEQ ID NO: 1602357 - RNA, 18 nt, Human
cagugauuaccagggacu

SEQ ID NO: 1602358 - RNA, 20 nt, Human
cagugaaagaaaauaacaau

SEQ ID NO: 1602359 - RNA, 16 nt, Human
cagugaaagaaaauaa

SEQ ID NO: 1602360 - RNA, 15 nt, Human
cagugagacagcucu

SEQ ID NO: 1602361 - RNA, 12 nt, Human
cagugaauucuu

SEQ ID NO: 1602362 - RNA, 21 nt, Human
caggucauauuaauauauuuc

SEQ ID NO: 1602363 - RNA, 20 nt, Human
caggucauauuaauauauuu

SEQ ID NO: 1602364 - RNA, 19 nt, Human
cagcuacuugggaggcuga

SEQ ID NO: 1602365 - RNA, 16 nt, Human
cagccuaguugaucag

SEQ ID NO: 1602366 - RNA, 20 nt, Human
cagcucugcauacucauuag

SEQ ID NO: 1602367 - RNA, 18 nt, Human
cagcuguaugauucccag

SEQ ID NO: 1602368 - RNA, 20 nt, Human
cagcugcugaaacaacaaau

SEQ ID NO: 1602369 - RNA, 21 nt, Human
cagcugcugaaacaacaaaua

SEQ ID NO: 1602370 - RNA, 19 nt, Human
cagcuguaugauucccagc

SEQ ID NO: 1602371 - RNA, 18 nt, Human
cagcuugaaacugagaug

SEQ ID NO: 1602372 - RNA, 18 nt, Human
caggaaccacaagacugc

SEQ ID NO: 1602373 - RNA, 23 nt, Human
cagcuuuccucaaaacuucagac

SEQ ID NO: 1602374 - RNA, 16 nt, Human
caggaaguagaggagg

SEQ ID NO: 1602375 - RNA, 15 nt, Human
caggaaguagaggag

SEQ ID NO: 1602376 - RNA, 22 nt, Human
cagcaagggugaugggaaagca

SEQ ID NO: 1602377 - RNA, 23 nt, Human
cagcaagggugaugggaaagcau

SEQ ID NO: 1602378 - RNA, 19 nt, Human
cagcaagggugaugggaaa

SEQ ID NO: 1602379 - RNA, 23 nt, Human
cagcaacgcaggcccccaggugc

SEQ ID NO: 1602380 - RNA, 14 nt, Human
cagauuuuccugaa

SEQ ID NO: 1602381 - RNA, 15 nt, Human
cagauuuuccugaaa

SEQ ID NO: 1602382 - RNA, 21 nt, Human
cagauggaaugcuguguuaaa

SEQ ID NO: 1602383 - RNA, 19 nt, Human
cagauggaaugcuguguua

SEQ ID NO: 1602384 - RNA, 17 nt, Human
cagauggaaugcugugu

SEQ ID NO: 1602385 - RNA, 16 nt, Human
cagauggaaugcugug

SEQ ID NO: 1602386 - RNA, 17 nt, Human
cagacauagaauuaaca

SEQ ID NO: 1602387 - RNA, 19 nt, Human
cagacauagaauuaacaca

SEQ ID NO: 1602388 - RNA, 19 nt, Human
cagaagcaacccaaauguu

SEQ ID NO: 1602389 - RNA, 20 nt, Human
cagaagcaacccaaauguuc

SEQ ID NO: 1602390 - RNA, 17 nt, Human
cagaaggaucuucaucu

SEQ ID NO: 1602391 - RNA, 18 nt, Human
cagaaagcagaacaguga

SEQ ID NO: 1602392 - RNA, 19 nt, Human
cagaaagcagaacagugau

SEQ ID NO: 1602393 - RNA, 23 nt, Human
cagaacagugauuaccagggacu

SEQ ID NO: 1602394 - RNA, 19 nt, Human
cagaaaauauuauguguuu

SEQ ID NO: 1602395 - RNA, 14 nt, Human
cagauccuggaaau

SEQ ID NO: 1602396 - RNA, 23 nt, Human
cagauaaauaguuuaugauucca

SEQ ID NO: 1602397 - RNA, 14 nt, Human
cagauaaacaguag

SEQ ID NO: 1602398 - RNA, 14 nt, Human
cagauaaucacaau

SEQ ID NO: 1602399 - RNA, 14 nt, Human
cagauaaucagugu

SEQ ID NO: 1602400 - RNA, 10 nt, Human
caccucccug

SEQ ID NO: 1602401 - RNA, 11 nt, Human
caccucaugga

SEQ ID NO: 1602402 - RNA, 12 nt, Human
caccucauggaa

SEQ ID NO: 1602403 - RNA, 14 nt, Human
caccucauggaauu

SEQ ID NO: 1602404 - RNA, 14 nt, Human
caccucccugcaau

SEQ ID NO: 1602405 - RNA, 13 nt, Human
caccucccugcaa

SEQ ID NO: 1602406 - RNA, 17 nt, Human
cacuaagagagaaugag

SEQ ID NO: 1602407 - RNA, 21 nt, Human
cacuaaauugacacuuaaaaa

SEQ ID NO: 1602408 - RNA, 14 nt, Human
cacuaguauuucua

SEQ ID NO: 1602409 - RNA, 19 nt, Human
cacuaguauuucuaugaaa

SEQ ID NO: 1602410 - RNA, 16 nt, Human
cacucaaaucaagaaa

SEQ ID NO: 1602411 - RNA, 13 nt, Human
cacuaaacaaaga

SEQ ID NO: 1602412 - RNA, 22 nt, Human
cacguucuuacuaguuucccuu

SEQ ID NO: 1602413 - RNA, 17 nt, Human
cacgagcaggcuacugu

SEQ ID NO: 1602414 - RNA, 19 nt, Human
cacgagcaggcuacuguca

SEQ ID NO: 1602415 - RNA, 20 nt, Human
cacgagcaggcuacugucag

SEQ ID NO: 1602416 - RNA, 22 nt, Human
cacgagcaggcuacugucagcu

SEQ ID NO: 1602417 - RNA, 14 nt, Human
cacugucaagauga

SEQ ID NO: 1602418 - RNA, 22 nt, Human
cacuguggguagacacacauga

SEQ ID NO: 1602419 - RNA, 24 nt, Human
cacuguggguagacacacaugaag

SEQ ID NO: 1602420 - RNA, 19 nt, Human
cacuguggguagacacaca

SEQ ID NO: 1602421 - RNA, 15 nt, Human
cacuuggucugugag

SEQ ID NO: 1602422 - RNA, 17 nt, Human
cacuuggucugugagau

SEQ ID NO: 1602423 - RNA, 20 nt, Human
cacuugaacccgggaggcag

SEQ ID NO: 1602424 - RNA, 21 nt, Human
cacuugaacccgggaggcaga

SEQ ID NO: 1602425 - RNA, 23 nt, Human
cacuugaacccgggaggcagagg

SEQ ID NO: 1602426 - RNA, 20 nt, Human
cacugccuucucaacuccaa

SEQ ID NO: 1602427 - RNA, 21 nt, Human
cacugacuucuaaguaaaacc

SEQ ID NO: 1602428 - RNA, 14 nt, Human
cacugacuucuaag

SEQ ID NO: 1602429 - RNA, 15 nt, Human
cacugacuucuaagu

SEQ ID NO: 1602430 - RNA, 16 nt, Human
cacugacuucuaagua

SEQ ID NO: 1602431 - RNA, 20 nt, Human
cacugacuucuaaguaaaac

SEQ ID NO: 1602432 - RNA, 22 nt, Human
cacugacagauuuccauccuag

SEQ ID NO: 1602433 - RNA, 17 nt, Human
cacugacagauuuccau

SEQ ID NO: 1602434 - RNA, 13 nt, Human
cacugacagauuu

SEQ ID NO: 1602435 - RNA, 13 nt, Human
aaaaacacagcaa

SEQ ID NO: 1602436 - RNA, 18 nt, Human
aaaaacacagcaagggug

SEQ ID NO: 1602437 - RNA, 21 nt, Human
agugucuuaauuaaaagaaua

SEQ ID NO: 1602438 - RNA, 17 nt, Human
agugucuuaauuaaaag

SEQ ID NO: 1602439 - RNA, 18 nt, Human
agugucuuaauuaaaaga

SEQ ID NO: 1602440 - RNA, 15 nt, Human
agugucuuaauuaaa

SEQ ID NO: 1602441 - RNA, 23 nt, Human
aguugaaaaucuuauaauuuaaa

SEQ ID NO: 1602442 - RNA, 22 nt, Human
aguugaaaagacuccaaagaaa

SEQ ID NO: 1602443 - RNA, 11 nt, Human
aguucauacau

SEQ ID NO: 1602444 - RNA, 10 nt, Human
aguucauaca

SEQ ID NO: 1602445 - RNA, 22 nt, Human
aguugaaaaucuuauaauuuaa

SEQ ID NO: 1602446 - RNA, 15 nt, Human
aguucauacauugua

SEQ ID NO: 1602447 - RNA, 12 nt, Human
aguccuguaaug

SEQ ID NO: 1602448 - RNA, 23 nt, Human
agucaaauugugugaaagguacu

SEQ ID NO: 1602449 - RNA, 19 nt, Human
agucaaauugugugaaagg

SEQ ID NO: 1602450 - RNA, 16 nt, Human
aguaugaaauuauaua

SEQ ID NO: 1602451 - RNA, 14 nt, Human
aguaugaaauuaua

SEQ ID NO: 1602452 - RNA, 18 nt, Human
auaaaggauuaaugucaa

SEQ ID NO: 1602453 - RNA, 14 nt, Human
auaaaaauauugug

SEQ ID NO: 1602454 - RNA, 22 nt, Human
auaaaaauauuguguugugaau

SEQ ID NO: 1602455 - RNA, 17 nt, Human
auacacacucaaaucaa

SEQ ID NO: 1602456 - RNA, 18 nt, Human
auacacacucaaaucaag

SEQ ID NO: 1602457 - RNA, 20 nt, Human
auacacacucaaaucaagaa

SEQ ID NO: 1602458 - RNA, 23 nt, Human
auaauguuucaaacauauauaac

SEQ ID NO: 1602459 - RNA, 20 nt, Human
auaauuaaauuuugaguucu

SEQ ID NO: 1602460 - RNA, 15 nt, Human
auaucaauuuaaaaa

SEQ ID NO: 1602461 - RNA, 23 nt, Human
auaugcuucuguuuuauaauuuu

SEQ ID NO: 1602462 - RNA, 20 nt, Human
auaugcuucuguuuuauaau

SEQ ID NO: 1602463 - RNA, 22 nt, Human
auaugcuucuguuuuauaauuu

SEQ ID NO: 1602464 - RNA, 13 nt, Human
auauuuauuuuaa

SEQ ID NO: 1602465 - RNA, 13 nt, Human
auauuauguguuu

SEQ ID NO: 1602466 - RNA, 14 nt, Human
auaggugcuacaaa

SEQ ID NO: 1602467 - RNA, 23 nt, Human
auaggugcuacaaaaacacagca

SEQ ID NO: 1602468 - RNA, 15 nt, Human
auaggugcuacaaaa

SEQ ID NO: 1602469 - RNA, 21 nt, Human
auaggugcuacaaaaacacag

SEQ ID NO: 1602470 - RNA, 15 nt, Human
auagguuuaauaauu

SEQ ID NO: 1602471 - RNA, 21 nt, Human
auaguauuugagaguucuaaa

SEQ ID NO: 1602472 - RNA, 20 nt, Human
auaguauuugagaguucuaa

SEQ ID NO: 1602473 - RNA, 14 nt, Human
auagucaaauugug

SEQ ID NO: 1602474 - RNA, 23 nt, Human
auaguauuugagaguucuaaauu

SEQ ID NO: 1602475 - RNA, 17 nt, Human
auauuuauuuuaauaau

SEQ ID NO: 1602476 - RNA, 14 nt, Human
auauuuauuuuaau

SEQ ID NO: 1602477 - RNA, 15 nt, Human
auauuuauuuuaaua

SEQ ID NO: 1602478 - RNA, 21 nt, Human
aucagcugcugaaacaacaaa

SEQ ID NO: 1602479 - RNA, 22 nt, Human
aucagcugcugaaacaacaaau

SEQ ID NO: 1602480 - RNA, 23 nt, Human
aucagcugcugaaacaacaaaua

SEQ ID NO: 1602481 - RNA, 17 nt, Human
augcauagguuuagcag

SEQ ID NO: 1602482 - RNA, 21 nt, Human
augcauagguuuagcaguaua

SEQ ID NO: 1602483 - RNA, 18 nt, Human
augugggcagugauguca

SEQ ID NO: 1602484 - RNA, 17 nt, Human
auguucuaagaagugaa

SEQ ID NO: 1602485 - RNA, 13 nt, Human
auguuucaaacuu

SEQ ID NO: 1602486 - RNA, 12 nt, Human
auguuucaaacu

SEQ ID NO: 1602487 - RNA, 17 nt, Human
auguuucaaacuuugga

SEQ ID NO: 1602488 - RNA, 14 nt, Human
auguuucaaacuuu

SEQ ID NO: 1602489 - RNA, 14 nt, Human
auguaagggaaacu

SEQ ID NO: 1602490 - RNA, 16 nt, Human
auguaagggaaacugc

SEQ ID NO: 1602491 - RNA, 19 nt, Human
auguaagggaaacugccag

SEQ ID NO: 1602492 - RNA, 19 nt, Human
auguauucuagcuaaugua

SEQ ID NO: 1602493 - RNA, 20 nt, Human
auguauucuagcuaauguaa

SEQ ID NO: 1602494 - RNA, 23 nt, Human
aggaugguucccuugaugaagaa

SEQ ID NO: 1602495 - RNA, 22 nt, Human
agcuccccucggagaagagcug

SEQ ID NO: 1602496 - RNA, 20 nt, Human
agguaaaagcaucacaugaa

SEQ ID NO: 1602497 - RNA, 18 nt, Human
aggugcuacaaaaacaca

SEQ ID NO: 1602498 - RNA, 19 nt, Human
aggugcuacaaaaacacag

SEQ ID NO: 1602499 - RNA, 20 nt, Human
aggugcuacaaaaacacagc

SEQ ID NO: 1602500 - RNA, 21 nt, Human
aggugcuacaaaaacacagca

SEQ ID NO: 1602501 - RNA, 22 nt, Human
aggugcuacaaaaacacagcaa

SEQ ID NO: 1602502 - RNA, 23 nt, Human
aggugcuacaaaaacacagcaag

SEQ ID NO: 1602503 - RNA, 24 nt, Human
aggugcuacaaaaacacagcaagg

SEQ ID NO: 1602504 - RNA, 17 nt, Human
aggcuacugucagcucc

SEQ ID NO: 1602505 - RNA, 21 nt, Human
aggcuagaaccaccugccuau

SEQ ID NO: 1602506 - RNA, 15 nt, Human
aggcuagauguaugu

SEQ ID NO: 1602507 - RNA, 16 nt, Human
aggcuagauguaugua

SEQ ID NO: 1602508 - RNA, 17 nt, Human
aggcuagauguauguac

SEQ ID NO: 1602509 - RNA, 17 nt, Human
agagaacuuccagaucc

SEQ ID NO: 1602510 - RNA, 21 nt, Human
agacugcauuauauuuauuac

SEQ ID NO: 1602511 - RNA, 21 nt, Human
agccgggcgugguggugagug

SEQ ID NO: 1602512 - RNA, 16 nt, Human
agcaguugaaaagacu

SEQ ID NO: 1602513 - RNA, 23 nt, Human
agcaguucagagcugcccucucc

SEQ ID NO: 1602514 - RNA, 15 nt, Human
agcaguucagagcug

SEQ ID NO: 1602515 - RNA, 13 nt, Human
agcaguugaaaag

SEQ ID NO: 1602516 - RNA, 16 nt, Human
agcacugacuucuaag

SEQ ID NO: 1602517 - RNA, 18 nt, Human
agcacugacagauuucca

SEQ ID NO: 1602518 - RNA, 14 nt, Human
agcacugacagauu

SEQ ID NO: 1602519 - RNA, 13 nt, Human
agcacugacagau

SEQ ID NO: 1602520 - RNA, 21 nt, Human
aaugauuaugaauuacauuug

SEQ ID NO: 1602521 - RNA, 23 nt, Human
aaugauuaugaauuacauuugua

SEQ ID NO: 1602522 - RNA, 15 nt, Human
aaugauuaugaauua

SEQ ID NO: 1602523 - RNA, 15 nt, Human
aauccaaugaaauga

SEQ ID NO: 1602524 - RNA, 15 nt, Human
aaucaccaaaggcuc

SEQ ID NO: 1602525 - RNA, 17 nt, Human
aauauguuucaaacuuu

SEQ ID NO: 1602526 - RNA, 16 nt, Human
aauauguuucaaacuu

SEQ ID NO: 1602527 - RNA, 15 nt, Human
aauauguuucaaacu

SEQ ID NO: 1602528 - RNA, 13 nt, Human
aauauguuucaaa

SEQ ID NO: 1602529 - RNA, 19 nt, Human
aaugcuagguuaauuccaa

SEQ ID NO: 1602530 - RNA, 18 nt, Human
aaugcuagguuaauucca

SEQ ID NO: 1602531 - RNA, 23 nt, Human
aauguuucaaacauauauaacaa

SEQ ID NO: 1602532 - RNA, 21 nt, Human
aaugcuagguuaauuccaauu

SEQ ID NO: 1602533 - RNA, 21 nt, Human
aaguagggacuucugucuuca

SEQ ID NO: 1602534 - RNA, 18 nt, Human
aaguccaagcauuuagau

SEQ ID NO: 1602535 - RNA, 17 nt, Human
aaguccaagcauaccaa

SEQ ID NO: 1602536 - RNA, 23 nt, Human
aagggaaacugccagcaacgcag

SEQ ID NO: 1602537 - RNA, 16 nt, Human
aagggaaacugccagc

SEQ ID NO: 1602538 - RNA, 17 nt, Human
aagggaaacugccagca

SEQ ID NO: 1602539 - RNA, 20 nt, Human
aaggcagcucuaaaugucaa

SEQ ID NO: 1602540 - RNA, 20 nt, Human
aagcagauggaaugcugugu

SEQ ID NO: 1602541 - RNA, 19 nt, Human
aagcagauggaaugcugug

SEQ ID NO: 1602542 - RNA, 17 nt, Human
aagcagauggaaugcug

SEQ ID NO: 1602543 - RNA, 17 nt, Human
aaccuagggugauauua

SEQ ID NO: 1602544 - RNA, 16 nt, Human
aacacaucagcuugcc

SEQ ID NO: 1602545 - RNA, 18 nt, Human
aacaaauuuacagagaca

SEQ ID NO: 1602546 - RNA, 17 nt, Human
aaaucuuauaauuuaaa

SEQ ID NO: 1602547 - RNA, 22 nt, Human
aaauguuguucucuucuuuaaa

SEQ ID NO: 1602548 - RNA, 22 nt, Human
aaauugacacuuaaaaaugguu

SEQ ID NO: 1602549 - RNA, 19 nt, Human
aaauugacacuuaaaaaug

SEQ ID NO: 1602550 - RNA, 15 nt, Human
aacugacucuuaaga

SEQ ID NO: 1602551 - RNA, 18 nt, Human
aacugacucuuaagaaga

SEQ ID NO: 1602552 - RNA, 19 nt, Human
aacugacucuuaagaagac

SEQ ID NO: 1602553 - RNA, 20 nt, Human
aacugacucuuaagaagacu

SEQ ID NO: 1602554 - RNA, 20 nt, Human
aacugagaugugaacacauc

SEQ ID NO: 1602555 - RNA, 21 nt, Human
aacuuuaugcuaagugaaaua

SEQ ID NO: 1602556 - RNA, 20 nt, Human
aacuuuaugcuaagugaaau

SEQ ID NO: 1602557 - RNA, 23 nt, Human
aacuuuauacccagaaaguuauu

SEQ ID NO: 1602558 - RNA, 22 nt, Human
aacuuuauacccagaaaguuau

SEQ ID NO: 1602559 - RNA, 15 nt, Human
aaauauuuauuuuaa

SEQ ID NO: 1602560 - RNA, 13 nt, Human
aaauauuuauuuu

SEQ ID NO: 1602561 - RNA, 20 nt, Human
aaauauuuauuuuaauaaug

SEQ ID NO: 1602562 - RNA, 12 nt, Human
aaaucaaauaug

SEQ ID NO: 1602563 - RNA, 14 nt, Human
aaaucaaauaugca

SEQ ID NO: 1602564 - RNA, 15 nt, Human
aaaucaaauaugcaa

SEQ ID NO: 1602565 - RNA, 16 nt, Human
aaaucaaauaugcaaa

SEQ ID NO: 1602566 - RNA, 14 nt, Human
aaaggcagaagcaa

SEQ ID NO: 1602567 - RNA, 19 nt, Human
aaaggcagaagcaacccaa

SEQ ID NO: 1602568 - RNA, 21 nt, Human
aaacugagaugugaacacauc

SEQ ID NO: 1602569 - RNA, 23 nt, Human
aaacugagaugugaacacaucag

SEQ ID NO: 1602570 - RNA, 15 nt, Human
aaagaaauguaaggg

SEQ ID NO: 1602571 - RNA, 16 nt, Human
aaaaucucaauauuuc

SEQ ID NO: 1602572 - RNA, 17 nt, Human
aaaaucucaauauuuca

SEQ ID NO: 1602573 - RNA, 21 nt, Human
aaaauugauguguuuauuuau

SEQ ID NO: 1602574 - RNA, 14 nt, Human
aaaauugauguguu

SEQ ID NO: 1602575 - RNA, 12 nt, Human
aaaauugaugug

SEQ ID NO: 1602576 - RNA, 24 nt, Human
aaacacucaguuguucaauaauaa

SEQ ID NO: 1602577 - RNA, 16 nt, Human
aaaaagaaacauuugg

SEQ ID NO: 1602578 - RNA, 18 nt, Human
aaaaguucugcagauaaa

SEQ ID NO: 1602579 - RNA, 21 nt, Human
aaaaucuacacuccagugaga

SEQ ID NO: 1602580 - RNA, 17 nt, Human
aaaaucaguuguacagu

SEQ ID NO: 1602581 - RNA, 21 nt, Human
acccacaagaaaugaaagcag

SEQ ID NO: 1602582 - RNA, 17 nt, Human
acccacaagaaaugaaa

SEQ ID NO: 1602583 - RNA, 21 nt, Human
acagcaguugaaaagacucca

SEQ ID NO: 1602584 - RNA, 22 nt, Human
acagcaguugaaaagacuccaa

SEQ ID NO: 1602585 - RNA, 23 nt, Human
acagcaguugaaaagacuccaaa

SEQ ID NO: 1602586 - RNA, 13 nt, Human
aauuuugugaagc

SEQ ID NO: 1602587 - RNA, 13 nt, Human
acaagaaaugaaa

SEQ ID NO: 1602588 - RNA, 14 nt, Human
acacgagcaggcua

SEQ ID NO: 1602589 - RNA, 19 nt, Human
acacgagcaggcuacuguc

SEQ ID NO: 1602590 - RNA, 21 nt, Human
acacgagcaggcuacugucag

SEQ ID NO: 1602591 - RNA, 11 nt, Human
agaaaguuauu

SEQ ID NO: 1602592 - RNA, 23 nt, Human
agaaaguuauugauaaguucaua

SEQ ID NO: 1602593 - RNA, 16 nt, Human
agaaaaucaggcuggc

SEQ ID NO: 1602594 - RNA, 22 nt, Human
acuuuauuuucuauaauuuaaa

SEQ ID NO: 1602595 - RNA, 22 nt, Human
acuuuauacccagaaaguuauu

SEQ ID NO: 1602596 - RNA, 20 nt, Human
acuuuauacccagaaaguua

SEQ ID NO: 1602597 - RNA, 18 nt, Human
acuuguaaaggaauuuaa

SEQ ID NO: 1602598 - RNA, 22 nt, Human
acuucugucuucacaacagauu

SEQ ID NO: 1602599 - RNA, 12 nt, Human
acuucagacaua

SEQ ID NO: 1602600 - RNA, 21 nt, Human
acuucugucuucacaacagau

SEQ ID NO: 1602601 - RNA, 13 nt, Human
acugccagcaacg

SEQ ID NO: 1602602 - RNA, 20 nt, Human
acucugucucaguccaugaa

SEQ ID NO: 1602603 - RNA, 18 nt, Human
acucugucucaguccaug

SEQ ID NO: 1602604 - RNA, 19 nt, Human
acuguaagaaaauaucacu

SEQ ID NO: 1602605 - RNA, 13 nt, Human
acuguaagaaaau

SEQ ID NO: 1602606 - RNA, 22 nt, Human
acuguaagaaaauaucacuugu

SEQ ID NO: 1602607 - RNA, 22 nt, Human
acugugaaguuuacauuguaaa

SEQ ID NO: 1602608 - RNA, 22 nt, Human
acgcaggcccccaggugccagu

SEQ ID NO: 1602609 - RNA, 13 nt, Human
acuaagagagaau

SEQ ID NO: 1602610 - RNA, 15 nt, Human
acuaagagagaauga

SEQ ID NO: 1602611 - RNA, 17 nt, Human
acucuauguucuaagaa

SEQ ID NO: 1602612 - RNA, 20 nt, Human
acuaguauuucuaugaaaua

SEQ ID NO: 1602613 - RNA, 21 nt, Human
acuauucaaacagucucagga

SEQ ID NO: 1602614 - RNA, 22 nt, Human
acuauucaggagaguagaacag

SEQ ID NO: 1602615 - RNA, 13 nt, Human
ggagaaacuggaa

SEQ ID NO: 1602616 - RNA, 22 nt, Human
ggacucauuuuaaaaaauggaa

SEQ ID NO: 1602617 - RNA, 15 nt, Human
gccucuuagaugcag

SEQ ID NO: 1602618 - RNA, 12 nt, Human
gccuccauccug

SEQ ID NO: 1602619 - RNA, 21 nt, Human
gccuucggccuccauccugag

SEQ ID NO: 1602620 - RNA, 23 nt, Human
gccuucggccuccauccugaggc

SEQ ID NO: 1602621 - RNA, 20 nt, Human
gccuucggccuccauccuga

SEQ ID NO: 1602622 - RNA, 15 nt, Human
gcuccacuuggucug

SEQ ID NO: 1602623 - RNA, 18 nt, Human
gcuccacuuggucuguga

SEQ ID NO: 1602624 - RNA, 19 nt, Human
gcuccacuuggucugugag

SEQ ID NO: 1602625 - RNA, 21 nt, Human
gcuccccucggagaagagcug

SEQ ID NO: 1602626 - RNA, 16 nt, Human
gcuagaacucccuuuc

SEQ ID NO: 1602627 - RNA, 18 nt, Human
gcuagaacucccuuucaa

SEQ ID NO: 1602628 - RNA, 12 nt, Human
gcuagaacuccc

SEQ ID NO: 1602629 - RNA, 13 nt, Human
gcuagaacucccu

SEQ ID NO: 1602630 - RNA, 14 nt, Human
gcuagaacucccuu

SEQ ID NO: 1602631 - RNA, 15 nt, Human
gcuagaacucccuuu

SEQ ID NO: 1602632 - RNA, 21 nt, Human
ggcacaguuuucugagaaaga

SEQ ID NO: 1602633 - RNA, 14 nt, Human
ggccuccauccuga

SEQ ID NO: 1602634 - RNA, 15 nt, Human
ggccuccauccugag

SEQ ID NO: 1602635 - RNA, 16 nt, Human
ggccuccauccugagg

SEQ ID NO: 1602636 - RNA, 14 nt, Human
ggcuccacuugguc

SEQ ID NO: 1602637 - RNA, 20 nt, Human
gggacagucaccucauggaa

SEQ ID NO: 1602638 - RNA, 21 nt, Human
gggacagucaccucauggaau

SEQ ID NO: 1602639 - RNA, 22 nt, Human
gggacagucaccucauggaauu

SEQ ID NO: 1602640 - RNA, 20 nt, Human
gggaacccaaguccaagcau

SEQ ID NO: 1602641 - RNA, 14 nt, Human
aaaaauaacaauga

SEQ ID NO: 1602642 - RNA, 19 nt, Human
gggacauuugcucauggaa

SEQ ID NO: 1602643 - RNA, 17 nt, Human
aaaaaugguuuaaaugg

SEQ ID NO: 1602644 - RNA, 15 nt, Human
aaaacuucagacaua

SEQ ID NO: 1602645 - RNA, 21 nt, Human
aaaagauuuucagaaaauauu

SEQ ID NO: 1602646 - RNA, 19 nt, Human
aaaucauuucugcaucagc

SEQ ID NO: 1602647 - RNA, 21 nt, Human
aaaucauuucugcaucagcug

SEQ ID NO: 1602648 - RNA, 22 nt, Human
aaaucauuucugcaucagcugc

SEQ ID NO: 1602649 - RNA, 23 nt, Human
aaaucauuucugcaucagcugcu

SEQ ID NO: 1602650 - RNA, 12 nt, Human
aaaucauuucug

SEQ ID NO: 1602651 - RNA, 17 nt, Human
aaauauuauguuaaaac

SEQ ID NO: 1602652 - RNA, 14 nt, Human
aaauauuauguguu

SEQ ID NO: 1602653 - RNA, 15 nt, Human
aaauauuauguguuu

SEQ ID NO: 1602654 - RNA, 15 nt, Human
aaauccauacauuug

SEQ ID NO: 1602655 - RNA, 18 nt, Human
aaauccauacauuugugu

SEQ ID NO: 1602656 - RNA, 15 nt, Human
guacauuuggagaca

SEQ ID NO: 1602657 - RNA, 21 nt, Human
guacuucaaauccuugaagau

SEQ ID NO: 1602658 - RNA, 22 nt, Human
guacuucaaauccuugaagauu

SEQ ID NO: 1602659 - RNA, 15 nt, Human
guacuucaugcuguc

SEQ ID NO: 1602660 - RNA, 14 nt, Human
guacuuaacuauuc

SEQ ID NO: 1602661 - RNA, 18 nt, Human
aaaguauguuagugcaaa

SEQ ID NO: 1602662 - RNA, 20 nt, Human
aaagguauuuuaaucaccaa

SEQ ID NO: 1602663 - RNA, 23 nt, Human
aaaguucugcagauaaacaguag

SEQ ID NO: 1602664 - RNA, 20 nt, Human
aaaguuauugauaaguucau

SEQ ID NO: 1602665 - RNA, 14 nt, Human
aaauaaaaauauug

SEQ ID NO: 1602666 - RNA, 19 nt, Human
aaauacacacucaaaucaa

SEQ ID NO: 1602667 - RNA, 22 nt, Human
aaauaauuuuuauauuugaaau

SEQ ID NO: 1602668 - RNA, 23 nt, Human
aaauaauuuuuauauuugaaaua

SEQ ID NO: 1602669 - RNA, 15 nt, Human
aaauacacacucaaa

SEQ ID NO: 1602670 - RNA, 23 nt, Human
guacacugccuucucaacuccaa

SEQ ID NO: 1602671 - RNA, 21 nt, Human
aaauaauuuuuauauuugaaa

SEQ ID NO: 1602672 - RNA, 20 nt, Human
guaauaggcguaacuaauuu

SEQ ID NO: 1602673 - RNA, 22 nt, Human
guaauaacugugaaguuuacau

SEQ ID NO: 1602674 - RNA, 16 nt, Human
guaauaacugugaagu

SEQ ID NO: 1602675 - RNA, 15 nt, Human
guaauaacugugaag

SEQ ID NO: 1602676 - RNA, 12 nt, Human
aaaccacagcag

SEQ ID NO: 1602677 - RNA, 15 nt, Human
aaacucguuaauuug

SEQ ID NO: 1602678 - RNA, 11 nt, Human
aaacacagcaa

SEQ ID NO: 1602679 - RNA, 12 nt, Human
aaacacagcaag

SEQ ID NO: 1602680 - RNA, 14 nt, Human
aaacacagcaaggg

SEQ ID NO: 1602681 - RNA, 19 nt, Human
ggggaauugaggacacuga

SEQ ID NO: 1602682 - RNA, 14 nt, Human
aaacaguagugaua

SEQ ID NO: 1602683 - RNA, 15 nt, Human
aaacagucucaggaa

SEQ ID NO: 1602684 - RNA, 15 nt, Human
aaagaggaaugaagu

SEQ ID NO: 1602685 - RNA, 15 nt, Human
aaagaggcagcuuga

SEQ ID NO: 1602686 - RNA, 23 nt, Human
aaacuucagcgguuuauauaagc

SEQ ID NO: 1602687 - RNA, 13 nt, Human
aaagacagugaaa

SEQ ID NO: 1602688 - RNA, 21 nt, Human
aaagacuauucaaacagucuc

SEQ ID NO: 1602689 - RNA, 15 nt, Human
aaagacuccaaagaa

SEQ ID NO: 1602690 - RNA, 21 nt, Human
aaagacuccaaagaaauguaa

SEQ ID NO: 1602691 - RNA, 18 nt, Human
aaagacuauucaaacagu

SEQ ID NO: 1602692 - RNA, 19 nt, Human
aaagacuauucaaacaguc

SEQ ID NO: 1602693 - RNA, 22 nt, Human
aaagaccuuuggagcaaagcug

SEQ ID NO: 1602694 - RNA, 17 nt, Human
aaagcacugacuucuaa

SEQ ID NO: 1602695 - RNA, 21 nt, Human
aaagcacugacuucuaaguaa

SEQ ID NO: 1602696 - RNA, 20 nt, Human
aaagggauggcaagaugugg

SEQ ID NO: 1602697 - RNA, 14 nt, Human
aaagguacuucaaa

SEQ ID NO: 1602698 - RNA, 17 nt, Human
aaagggugaaaauuauu

SEQ ID NO: 1602699 - RNA, 13 nt, Human
ggugaaaauuauu

SEQ ID NO: 1602700 - RNA, 22 nt, Human
ggugaaaauuauuuuguucaua

SEQ ID NO: 1602701 - RNA, 14 nt, Human
ggugaaaauuauuu

SEQ ID NO: 1602702 - RNA, 22 nt, Human
gacuauucaaacagucucagga

SEQ ID NO: 1602703 - RNA, 15 nt, Human
gacuauucaaacagu

SEQ ID NO: 1602704 - RNA, 16 nt, Human
gacuauucaaacaguc

SEQ ID NO: 1602705 - RNA, 21 nt, Human
gacagcccuucuuuccacaga

SEQ ID NO: 1602706 - RNA, 20 nt, Human
gacagaaagcagaacaguga

SEQ ID NO: 1602707 - RNA, 14 nt, Human
gacagaaagcagaa

SEQ ID NO: 1602708 - RNA, 20 nt, Human
gacaguauggcagcuuuccu

SEQ ID NO: 1602709 - RNA, 17 nt, Human
gagcuguucacagccag

SEQ ID NO: 1602710 - RNA, 15 nt, Human
gagcgacagugagac

SEQ ID NO: 1602711 - RNA, 18 nt, Human
gcaauagucaaauugugu

SEQ ID NO: 1602712 - RNA, 16 nt, Human
gcaauaaaauggguuu

SEQ ID NO: 1602713 - RNA, 17 nt, Human
gauguagaggagaaacu

SEQ ID NO: 1602714 - RNA, 15 nt, Human
gcagcuuauucacaa

SEQ ID NO: 1602715 - RNA, 16 nt, Human
gcauuguaaaugugcu

SEQ ID NO: 1602716 - RNA, 18 nt, Human
gcauggcauauuuuucac

SEQ ID NO: 1602717 - RNA, 20 nt, Human
cuucucacauuuauauuuuu

SEQ ID NO: 1602718 - RNA, 13 nt, Human
cuucucacauuua

SEQ ID NO: 1602719 - RNA, 13 nt, Human
cuucuaaguaaaa

SEQ ID NO: 1602720 - RNA, 17 nt, Human
cuucuaaguaaaaccac

SEQ ID NO: 1602721 - RNA, 21 nt, Human
cuucuaaguaaaaccacagca

SEQ ID NO: 1602722 - RNA, 19 nt, Human
cuuggucugugagaugcua

SEQ ID NO: 1602723 - RNA, 16 nt, Human
cuuggucugugagaug

SEQ ID NO: 1602724 - RNA, 16 nt, Human
gaacccaaguccaagc

SEQ ID NO: 1602725 - RNA, 17 nt, Human
gaacccaaguccaagca

SEQ ID NO: 1602726 - RNA, 13 nt, Human
gaacugaaaucau

SEQ ID NO: 1602727 - RNA, 17 nt, Human
gaacccgggaggcagag

SEQ ID NO: 1602728 - RNA, 19 nt, Human
gaacccgggaggcagaggu

SEQ ID NO: 1602729 - RNA, 23 nt, Human
gaaaauuauuuuguucauacaua

SEQ ID NO: 1602730 - RNA, 21 nt, Human
gaaaacuuuaugcuaagugaa

SEQ ID NO: 1602731 - RNA, 14 nt, Human
gaaaagacuccaaa

SEQ ID NO: 1602732 - RNA, 18 nt, Human
gaaaagacuccaaagaaa

SEQ ID NO: 1602733 - RNA, 16 nt, Human
gaaaagacuccaaaga

SEQ ID NO: 1602734 - RNA, 17 nt, Human
gaaaagacuccaaagaa

SEQ ID NO: 1602735 - RNA, 22 nt, Human
gaaaauuauuuuguucauacau

SEQ ID NO: 1602736 - RNA, 21 nt, Human
gaaaauuauuuuguucauaca

SEQ ID NO: 1602737 - RNA, 20 nt, Human
gaaaauuauuuuguucauac

SEQ ID NO: 1602738 - RNA, 17 nt, Human
gaaaugaaagcagggac

SEQ ID NO: 1602739 - RNA, 18 nt, Human
gaaagaaaaucaggcugg

SEQ ID NO: 1602740 - RNA, 12 nt, Human
cuguucacagcc

SEQ ID NO: 1602741 - RNA, 13 nt, Human
cuguuauaaucuu

SEQ ID NO: 1602742 - RNA, 19 nt, Human
cuguuauaaucuuucacag

SEQ ID NO: 1602743 - RNA, 19 nt, Human
cucucuggccuucggccuc

SEQ ID NO: 1602744 - RNA, 22 nt, Human
cucucuggccuucggccuccau

SEQ ID NO: 1602745 - RNA, 17 nt, Human
cucucuggccuucggcc

SEQ ID NO: 1602746 - RNA, 19 nt, Human
cuccccaugauguuuagaa

SEQ ID NO: 1602747 - RNA, 13 nt, Human
cugaaagaggaau

SEQ ID NO: 1602748 - RNA, 17 nt, Human
cugaaagaggaaugaag

SEQ ID NO: 1602749 - RNA, 15 nt, Human
cgguuuauauaagcu

SEQ ID NO: 1602750 - RNA, 23 nt, Human
cggagaagagcuguucacagcca

SEQ ID NO: 1602751 - RNA, 24 nt, Human
cggagaagagcuguucacagccag

SEQ ID NO: 1602752 - RNA, 14 nt, Human
cuaacuggacuggu

SEQ ID NO: 1602753 - RNA, 17 nt, Human
cucaaaacugcacuguc

SEQ ID NO: 1602754 - RNA, 13 nt, Human
cucaaaacugcac

SEQ ID NO: 1602755 - RNA, 23 nt, Human
cuaugucauuugcuggagcucug

SEQ ID NO: 1602756 - RNA, 19 nt, Human
cucagaaaacaaggaugaa

SEQ ID NO: 1602757 - RNA, 23 nt, Human
cucagaaaacaaggaugaauuaa

SEQ ID NO: 1602758 - RNA, 12 nt, Human
cucagaauauug

SEQ ID NO: 1602759 - RNA, 13 nt, Human
cccaacuccagaa

SEQ ID NO: 1602760 - RNA, 13 nt, Human
ccaucccucccuc

SEQ ID NO: 1602761 - RNA, 15 nt, Human
ccaucccucccucca

SEQ ID NO: 1602762 - RNA, 14 nt, Human
ccaucccucccucc

SEQ ID NO: 1602763 - RNA, 22 nt, Human
cccuccucugcuugccaucccu

SEQ ID NO: 1602764 - RNA, 13 nt, Human
cccuccucugcuu

SEQ ID NO: 1602765 - RNA, 13 nt, Human
ccccugcacucca

SEQ ID NO: 1602766 - RNA, 12 nt, Human
ccucggagaaga

SEQ ID NO: 1602767 - RNA, 14 nt, Human
ccucggagaagagc

SEQ ID NO: 1602768 - RNA, 16 nt, Human
ccucccuucucuucac

SEQ ID NO: 1602769 - RNA, 17 nt, Human
ccugucucuacuaaaaa

SEQ ID NO: 1602770 - RNA, 15 nt, Human
caauaaaauggguuu

SEQ ID NO: 1602771 - RNA, 20 nt, Human
caauaaaauccauacauuug

SEQ ID NO: 1602772 - RNA, 23 nt, Human
caauaaaauccauacauuugugu

SEQ ID NO: 1602773 - RNA, 23 nt, Human
cacuccagccugagcgacaguga

SEQ ID NO: 1602774 - RNA, 13 nt, Human
cacuccagccuga

SEQ ID NO: 1602775 - RNA, 12 nt, Human
cacuccagccug

SEQ ID NO: 1602776 - RNA, 11 nt, Human
cagaacaguga

SEQ ID NO: 1602777 - RNA, 12 nt, Human
cagaacagugau

SEQ ID NO: 1602778 - RNA, 17 nt, Human
cagaacagugauuacca

SEQ ID NO: 1602779 - RNA, 18 nt, Human
cagaacagugauuaccag

SEQ ID NO: 1602780 - RNA, 16 nt, Human
cagaaaguuauugaua

SEQ ID NO: 1602781 - RNA, 11 nt, Human
cagaaaguuau

SEQ ID NO: 1602782 - RNA, 17 nt, Human
cacuuguguuuugcaag

SEQ ID NO: 1602783 - RNA, 15 nt, Human
cacuuaaaaaugguu

SEQ ID NO: 1602784 - RNA, 22 nt, Human
cacuguuuugaaucucauaauu

SEQ ID NO: 1602785 - RNA, 15 nt, Human
auuuuuauauuugaa

SEQ ID NO: 1602786 - RNA, 16 nt, Human
auuuuuauauuugaaa

SEQ ID NO: 1602787 - RNA, 21 nt, Human
caaaaggauaaugaauacuuu

SEQ ID NO: 1602788 - RNA, 17 nt, Human
caaacauauauaacaau

SEQ ID NO: 1602789 - RNA, 16 nt, Human
caaacagucucaggaa

SEQ ID NO: 1602790 - RNA, 17 nt, Human
caaacagucucaggaaa

SEQ ID NO: 1602791 - RNA, 15 nt, Human
caaaccaaauaaaaa

SEQ ID NO: 1602792 - RNA, 14 nt, Human
caaaccaaauaaaa

SEQ ID NO: 1602793 - RNA, 21 nt, Human
auuuuauaucaauuuaaaaaa

SEQ ID NO: 1602794 - RNA, 12 nt, Human
auuuuauaucuu

SEQ ID NO: 1602795 - RNA, 16 nt, Human
auuuuauaucuuguag

SEQ ID NO: 1602796 - RNA, 14 nt, Human
auuuuauaucuugu

SEQ ID NO: 1602797 - RNA, 21 nt, Human
caaaucuuaacuugaaggagu

SEQ ID NO: 1602798 - RNA, 18 nt, Human
caaagggugaaaauuauu

SEQ ID NO: 1602799 - RNA, 19 nt, Human
caagacccaaaaggcagaa

SEQ ID NO: 1602800 - RNA, 16 nt, Human
caagaugguucuagca

SEQ ID NO: 1602801 - RNA, 13 nt, Human
caagaugguucua

SEQ ID NO: 1602802 - RNA, 19 nt, Human
auuaugaauuacauuugua

SEQ ID NO: 1602803 - RNA, 20 nt, Human
auuaugaauuacauuuguau

SEQ ID NO: 1602804 - RNA, 22 nt, Human
auuaugaauuacauuuguauaa

SEQ ID NO: 1602805 - RNA, 16 nt, Human
auuuaauaaaugugcc

SEQ ID NO: 1602806 - RNA, 20 nt, Human
auuucauaccuaucaucuua

SEQ ID NO: 1602807 - RNA, 14 nt, Human
auuucuaugaaaua

SEQ ID NO: 1602808 - RNA, 16 nt, Human
auuucauaugcuguau

SEQ ID NO: 1602809 - RNA, 15 nt, Human
auuguuuaaaaucau

SEQ ID NO: 1602810 - RNA, 17 nt, Human
auuguguugugaauguu

SEQ ID NO: 1602811 - RNA, 14 nt, Human
auuguguugugaau

SEQ ID NO: 1602812 - RNA, 22 nt, Human
cagcugccuccccuccucugcu

SEQ ID NO: 1602813 - RNA, 21 nt, Human
cagcugccuccccuccucugc

SEQ ID NO: 1602814 - RNA, 24 nt, Human
cagcugccuccccuccucugcuug

SEQ ID NO: 1602815 - RNA, 23 nt, Human
cagcugccuccccuccucugcuu

SEQ ID NO: 1602816 - RNA, 16 nt, Human
cagcuccccucggaga

SEQ ID NO: 1602817 - RNA, 17 nt, Human
cagcuccccucggagaa

SEQ ID NO: 1602818 - RNA, 18 nt, Human
cagcuccccucggagaag

SEQ ID NO: 1602819 - RNA, 20 nt, Human
cagcuccccucggagaagag

SEQ ID NO: 1602820 - RNA, 23 nt, Human
caggaaaucaaauaugcaaagca

SEQ ID NO: 1602821 - RNA, 15 nt, Human
cagcccuucuuucca

SEQ ID NO: 1602822 - RNA, 19 nt, Human
cagcccuucuuuccacaga

SEQ ID NO: 1602823 - RNA, 20 nt, Human
cagcccuucuuuccacagaa

SEQ ID NO: 1602824 - RNA, 18 nt, Human
cagccugagcgacaguga

SEQ ID NO: 1602825 - RNA, 19 nt, Human
cagccugagcgacagugag

SEQ ID NO: 1602826 - RNA, 22 nt, Human
cagccugagcgacagugagacu

SEQ ID NO: 1602827 - RNA, 22 nt, Human
cagcacagccucuuagaugcag

SEQ ID NO: 1602828 - RNA, 14 nt, Human
cagccagcaguuca

SEQ ID NO: 1602829 - RNA, 21 nt, Human
cagccagcaguucagagcugc

SEQ ID NO: 1602830 - RNA, 15 nt, Human
cagccagcaguucag

SEQ ID NO: 1602831 - RNA, 22 nt, Human
cagccagcaguucagagcugcc

SEQ ID NO: 1602832 - RNA, 22 nt, Human
cagcaguugaaaagacuccaaa

SEQ ID NO: 1602833 - RNA, 17 nt, Human
cagcaguugaaaagacu

SEQ ID NO: 1602834 - RNA, 20 nt, Human
cagcaguugaaaagacucca

SEQ ID NO: 1602835 - RNA, 21 nt, Human
cagcaguugaaaagacuccaa

SEQ ID NO: 1602836 - RNA, 15 nt, Human
cagagcugcccucuc

SEQ ID NO: 1602837 - RNA, 13 nt, Human
cagagcugcccuc

SEQ ID NO: 1602838 - RNA, 17 nt, Human
cagagcugcccucuccu

SEQ ID NO: 1602839 - RNA, 19 nt, Human
cagggaggacgcucucugg

SEQ ID NO: 1602840 - RNA, 17 nt, Human
cagggaggacgcucucu

SEQ ID NO: 1602841 - RNA, 18 nt, Human
cagggaggacgcucucug

SEQ ID NO: 1602842 - RNA, 15 nt, Human
cagucucaggaaauc

SEQ ID NO: 1602843 - RNA, 15 nt, Human
cagucaccucaugga

SEQ ID NO: 1602844 - RNA, 12 nt, Human
cauuaucucaaa

SEQ ID NO: 1602845 - RNA, 13 nt, Human
cauuaucucaaaa

SEQ ID NO: 1602846 - RNA, 20 nt, Human
cauaauuuauacaggucaua

SEQ ID NO: 1602847 - RNA, 13 nt, Human
cauaauuuauaca

SEQ ID NO: 1602848 - RNA, 16 nt, Human
ccacagaagcuccagg

SEQ ID NO: 1602849 - RNA, 18 nt, Human
ccaccagucugacuguuu

SEQ ID NO: 1602850 - RNA, 18 nt, Human
ccacagaagcuccaggua

SEQ ID NO: 1602851 - RNA, 19 nt, Human
cauuguaaauaguauuuga

SEQ ID NO: 1602852 - RNA, 21 nt, Human
cauuuggagacacaacuauuu

SEQ ID NO: 1602853 - RNA, 22 nt, Human
auuuguaguguuggagaagaac

SEQ ID NO: 1602854 - RNA, 14 nt, Human
auuuguauaaaaua

SEQ ID NO: 1602855 - RNA, 15 nt, Human
auuuguauaaaauaa

SEQ ID NO: 1602856 - RNA, 23 nt, Human
auuuuaaaagaaugauuaugaau

SEQ ID NO: 1602857 - RNA, 16 nt, Human
auuuuaaaagaaugau

SEQ ID NO: 1602858 - RNA, 20 nt, Human
auuucuugagguaaaagcau

SEQ ID NO: 1602859 - RNA, 14 nt, Human
auuuauuuuaauaa

SEQ ID NO: 1602860 - RNA, 13 nt, Human
auugucuagugaa

SEQ ID NO: 1602861 - RNA, 16 nt, Human
auuguacgaagaguau

SEQ ID NO: 1602862 - RNA, 19 nt, Human
auuggacaguaaaauccac

SEQ ID NO: 1602863 - RNA, 19 nt, Human
auuggagcucgugggacag

SEQ ID NO: 1602864 - RNA, 13 nt, Human
auugacuuuuuau

SEQ ID NO: 1602865 - RNA, 18 nt, Human
auugacuuuuuauggcac

SEQ ID NO: 1602866 - RNA, 14 nt, Human
auugcuuuggucau

SEQ ID NO: 1602867 - RNA, 18 nt, Human
auugcuuuggucauauga

SEQ ID NO: 1602868 - RNA, 12 nt, Human
auuuuaauaaug

SEQ ID NO: 1602869 - RNA, 15 nt, Human
auuuucuauaauuua

SEQ ID NO: 1602870 - RNA, 14 nt, Human
auuuucuauaauuu

SEQ ID NO: 1602871 - RNA, 14 nt, Human
auuuuccugaaaac

SEQ ID NO: 1602872 - RNA, 18 nt, Human
auuuuguucauacauauu

SEQ ID NO: 1602873 - RNA, 16 nt, Human
auuuuguucauacaua

SEQ ID NO: 1602874 - RNA, 15 nt, Human
auuuuguucauacau

SEQ ID NO: 1602875 - RNA, 14 nt, Human
auuuuguucauaca

SEQ ID NO: 1602876 - RNA, 12 nt, Human
auuuuguucaua

SEQ ID NO: 1602877 - RNA, 21 nt, Human
auuuuucacauaucuaguaug

SEQ ID NO: 1602878 - RNA, 18 nt, Human
auuuuucacauaucuagu

SEQ ID NO: 1602879 - RNA, 15 nt, Human
auuuuucacauaucu

SEQ ID NO: 1602880 - RNA, 15 nt, Human
auuuuuccaaaauaa

SEQ ID NO: 1602881 - RNA, 15 nt, Human
auuuuucuuauuuca

SEQ ID NO: 1602882 - RNA, 19 nt, Human
auuuuucuuauuucauuuc

SEQ ID NO: 1602883 - RNA, 20 nt, Human
auuuuucuuauuucauuucu

SEQ ID NO: 1602884 - RNA, 15 nt, Human
auuuuugacagaaua

SEQ ID NO: 1602885 - RNA, 14 nt, Human
auuuuugacagaau

SEQ ID NO: 1602886 - RNA, 13 nt, Human
auuuuugacagaa

SEQ ID NO: 1602887 - RNA, 12 nt, Human
auuuuugacaga

SEQ ID NO: 1602888 - RNA, 22 nt, Human
auuuuugacagaauauguuuca

SEQ ID NO: 1602889 - RNA, 20 nt, Human
auuuuuucucuaggaaauau

SEQ ID NO: 1602890 - RNA, 23 nt, Human
auuuuuucucuaggaaauauuua

SEQ ID NO: 1602891 - RNA, 18 nt, Human
auuuuuuguuaaaugauu

SEQ ID NO: 1602892 - RNA, 21 nt, Human
auuuuuguuuucauuaucuca

SEQ ID NO: 1602893 - RNA, 22 nt, Human
auuuuugugauuuugugauuga

SEQ ID NO: 1602894 - RNA, 20 nt, Human
auuuuuguagcacugacaga

SEQ ID NO: 1602895 - RNA, 21 nt, Human
auuuuuguagcacugacagau

SEQ ID NO: 1602896 - RNA, 15 nt, Human
auugacacuuaaaaa

SEQ ID NO: 1602897 - RNA, 17 nt, Human
auugacacuuaaaaaug

SEQ ID NO: 1602898 - RNA, 19 nt, Human
auugacacuuaaaaauggu

SEQ ID NO: 1602899 - RNA, 18 nt, Human
auucuagcuaauguaaua

SEQ ID NO: 1602900 - RNA, 15 nt, Human
auucuagcuaaugua

SEQ ID NO: 1602901 - RNA, 15 nt, Human
auuauauuuacaaau

SEQ ID NO: 1602902 - RNA, 15 nt, Human
auuauauuuauuacu

SEQ ID NO: 1602903 - RNA, 18 nt, Human
auuauauuuauuacugua

SEQ ID NO: 1602904 - RNA, 21 nt, Human
auuauguuaaaacugggacag

SEQ ID NO: 1602905 - RNA, 16 nt, Human
auuauuuuguucauac

SEQ ID NO: 1602906 - RNA, 15 nt, Human
auuauuuuguucaua

SEQ ID NO: 1602907 - RNA, 19 nt, Human
auucaaacagucucaggaa

SEQ ID NO: 1602908 - RNA, 20 nt, Human
auucaaacagucucaggaaa

SEQ ID NO: 1602909 - RNA, 18 nt, Human
auucaaacagucucagga

SEQ ID NO: 1602910 - RNA, 21 nt, Human
auuauuuuguucauacauauu

SEQ ID NO: 1602911 - RNA, 19 nt, Human
auuauuuuguucauacaua

SEQ ID NO: 1602912 - RNA, 18 nt, Human
auuauuuuguucauacau

SEQ ID NO: 1602913 - RNA, 17 nt, Human
auuauuuuguucauaca

SEQ ID NO: 1602914 - RNA, 24 nt, Human
auucagaaggaucuucaucugacu

SEQ ID NO: 1602915 - RNA, 18 nt, Human
auucagaaggaucuucau

SEQ ID NO: 1602916 - RNA, 17 nt, Human
uuucucccagucauuua

SEQ ID NO: 1602917 - RNA, 18 nt, Human
uuucucccagucauuuaa

SEQ ID NO: 1602918 - RNA, 21 nt, Human
augguucccuugaugaagaag

SEQ ID NO: 1602919 - RNA, 17 nt, Human
auguccacugguucuuc

SEQ ID NO: 1602920 - RNA, 19 nt, Human
uuuguaguguuggagaaga

SEQ ID NO: 1602921 - RNA, 21 nt, Human
uuuguaguguuggagaagaac

SEQ ID NO: 1602922 - RNA, 17 nt, Human
uuugugaagcaaaauuu

SEQ ID NO: 1602923 - RNA, 14 nt, Human
uuugcaagccagau

SEQ ID NO: 1602924 - RNA, 16 nt, Human
auguacuucaugcugu

SEQ ID NO: 1602925 - RNA, 17 nt, Human
auguagaggagaaacug

SEQ ID NO: 1602926 - RNA, 19 nt, Human
auguagaggagaaacugga

SEQ ID NO: 1602927 - RNA, 12 nt, Human
auguagaggaga

SEQ ID NO: 1602928 - RNA, 13 nt, Human
auguagaggagaa

SEQ ID NO: 1602929 - RNA, 22 nt, Human
uuugacagaauauguuucaaac

SEQ ID NO: 1602930 - RNA, 18 nt, Human
uuuaaauauaugcuaagu

SEQ ID NO: 1602931 - RNA, 13 nt, Human
augcaguucugaa

SEQ ID NO: 1602932 - RNA, 17 nt, Human
augccauuuaaagcuua

SEQ ID NO: 1602933 - RNA, 21 nt, Human
augccauuuaaagcuuauuaa

SEQ ID NO: 1602934 - RNA, 14 nt, Human
augauuaaguaaug

SEQ ID NO: 1602935 - RNA, 18 nt, Human
augauuaaguaaugauaa

SEQ ID NO: 1602936 - RNA, 15 nt, Human
augauaacuggaaac

SEQ ID NO: 1602937 - RNA, 17 nt, Human
augauaaguaaaugcua

SEQ ID NO: 1602938 - RNA, 19 nt, Human
auggcuaagcaaaauguga

SEQ ID NO: 1602939 - RNA, 14 nt, Human
auggcacuaguauu

SEQ ID NO: 1602940 - RNA, 16 nt, Human
auggcacuaguauuuc

SEQ ID NO: 1602941 - RNA, 23 nt, Human
auggcauauuuuucacauaucua

SEQ ID NO: 1602942 - RNA, 22 nt, Human
auggcauauuuuucacauaucu

SEQ ID NO: 1602943 - RNA, 21 nt, Human
auggcauauuuuucacauauc

SEQ ID NO: 1602944 - RNA, 20 nt, Human
auggcauauuuuucacauau

SEQ ID NO: 1602945 - RNA, 18 nt, Human
auggcauauuuuucacau

SEQ ID NO: 1602946 - RNA, 14 nt, Human
uuucaaacuuugga

SEQ ID NO: 1602947 - RNA, 16 nt, Human
uuucaaacauauauaa

SEQ ID NO: 1602948 - RNA, 17 nt, Human
uuucaaacauauauaac

SEQ ID NO: 1602949 - RNA, 20 nt, Human
augcuagaacucccuuucaa

SEQ ID NO: 1602950 - RNA, 21 nt, Human
augcuagaacucccuuucaac

SEQ ID NO: 1602951 - RNA, 22 nt, Human
augcuagaacucccuuucaaca

SEQ ID NO: 1602952 - RNA, 18 nt, Human
augcuagguuaauuccaa

SEQ ID NO: 1602953 - RNA, 13 nt, Human
augcuaagugaaa

SEQ ID NO: 1602954 - RNA, 21 nt, Human
uuuaucaaagggugaaaauua

SEQ ID NO: 1602955 - RNA, 12 nt, Human
uucucuaggaaa

SEQ ID NO: 1602956 - RNA, 17 nt, Human
uugaaauuguauuacaa

SEQ ID NO: 1602957 - RNA, 19 nt, Human
uugaacccgggaggcagag

SEQ ID NO: 1602958 - RNA, 19 nt, Human
uuccguagguuauuuucag

SEQ ID NO: 1602959 - RNA, 14 nt, Human
aucaacagauaaau

SEQ ID NO: 1602960 - RNA, 20 nt, Human
auauuuuuuguuaaaugauu

SEQ ID NO: 1602961 - RNA, 18 nt, Human
auauuuuuuguuaaauga

SEQ ID NO: 1602962 - RNA, 17 nt, Human
auauuuuucacauaucu

SEQ ID NO: 1602963 - RNA, 15 nt, Human
auauuuuucacauau

SEQ ID NO: 1602964 - RNA, 14 nt, Human
auauuuuucacaua

SEQ ID NO: 1602965 - RNA, 13 nt, Human
auauuuuucacau

SEQ ID NO: 1602966 - RNA, 12 nt, Human
auauuuuucaca

SEQ ID NO: 1602967 - RNA, 17 nt, Human
aucaggguuaguauugu

SEQ ID NO: 1602968 - RNA, 22 nt, Human
aucacuugucaauaaaauccau

SEQ ID NO: 1602969 - RNA, 15 nt, Human
uucggccuccauccu

SEQ ID NO: 1602970 - RNA, 14 nt, Human
uucggccuccaucc

SEQ ID NO: 1602971 - RNA, 15 nt, Human
uucuaaguaaaacca

SEQ ID NO: 1602972 - RNA, 17 nt, Human
uucuaaguaaaaccaca

SEQ ID NO: 1602973 - RNA, 16 nt, Human
uucuaaguaaaaccac

SEQ ID NO: 1602974 - RNA, 23 nt, Human
uucuaagaagugaaaaucuacac

SEQ ID NO: 1602975 - RNA, 14 nt, Human
uucuaaauuuuaua

SEQ ID NO: 1602976 - RNA, 21 nt, Human
uucuagcauggcauauuuuuc

SEQ ID NO: 1602977 - RNA, 20 nt, Human
uucuagcauggcauauuuuu

SEQ ID NO: 1602978 - RNA, 18 nt, Human
uucuagcauggcauauuu

SEQ ID NO: 1602979 - RNA, 15 nt, Human
uucuagcauggcaua

SEQ ID NO: 1602980 - RNA, 14 nt, Human
uucuagcauggcau

SEQ ID NO: 1602981 - RNA, 22 nt, Human
uucuagcauggcauauuuuuca

SEQ ID NO: 1602982 - RNA, 17 nt, Human
uucuagcuaauguaaua

SEQ ID NO: 1602983 - RNA, 14 nt, Human
aucucauuuccaag

SEQ ID NO: 1602984 - RNA, 13 nt, Human
uugcaucaauuuu

SEQ ID NO: 1602985 - RNA, 17 nt, Human
uugaagggaaauuucag

SEQ ID NO: 1602986 - RNA, 17 nt, Human
uugacagaauauguuuc

SEQ ID NO: 1602987 - RNA, 18 nt, Human
aucuacacuccagugaga

SEQ ID NO: 1602988 - RNA, 19 nt, Human
aucuacacuccagugagac

SEQ ID NO: 1602989 - RNA, 20 nt, Human
uugacagaauauguuucaaa

SEQ ID NO: 1602990 - RNA, 20 nt, Human
uuggagacacaacuauuuuu

SEQ ID NO: 1602991 - RNA, 15 nt, Human
augaauuacauuugu

SEQ ID NO: 1602992 - RNA, 23 nt, Human
augaauggcuaagcaaaauguga

SEQ ID NO: 1602993 - RNA, 16 nt, Human
augaauuacauuugua

SEQ ID NO: 1602994 - RNA, 17 nt, Human
augaauuacauuuguau

SEQ ID NO: 1602995 - RNA, 18 nt, Human
augaacuuguaaaggaau

SEQ ID NO: 1602996 - RNA, 21 nt, Human
augaaauuauauaaguauucu

SEQ ID NO: 1602997 - RNA, 19 nt, Human
augaaauuauauaaguauu

SEQ ID NO: 1602998 - RNA, 20 nt, Human
aucuuguagcuuuaucaaag

SEQ ID NO: 1602999 - RNA, 19 nt, Human
aucuuguagcuuuaucaaa

SEQ ID NO: 1603000 - RNA, 14 nt, Human
aucuuauaauuuaa

SEQ ID NO: 1603001 - RNA, 18 nt, Human
aucuuguagcuuuaucaa

SEQ ID NO: 1603002 - RNA, 14 nt, Human
uuaggguuaugauu

SEQ ID NO: 1603003 - RNA, 16 nt, Human
uuaggguuaugauuaa

SEQ ID NO: 1603004 - RNA, 15 nt, Human
uuagggagagaagau

SEQ ID NO: 1603005 - RNA, 14 nt, Human
auaagccagacauc

SEQ ID NO: 1603006 - RNA, 14 nt, Human
auaaucuuucacag

SEQ ID NO: 1603007 - RNA, 17 nt, Human
auaauucagaaggaucu

SEQ ID NO: 1603008 - RNA, 21 nt, Human
auaauuuauacaggucauauu

SEQ ID NO: 1603009 - RNA, 19 nt, Human
auaauuuauacaggucaua

SEQ ID NO: 1603010 - RNA, 14 nt, Human
auaauuuuaagaaa

SEQ ID NO: 1603011 - RNA, 16 nt, Human
aguuuuauaugcuucu

SEQ ID NO: 1603012 - RNA, 16 nt, Human
uuaaaaaauggaacau

SEQ ID NO: 1603013 - RNA, 20 nt, Human
uuaaaaaugguuuaaauggu

SEQ ID NO: 1603014 - RNA, 22 nt, Human
uuaaaaucauuucugcaucagc

SEQ ID NO: 1603015 - RNA, 16 nt, Human
aguuuagcuggaaaag

SEQ ID NO: 1603016 - RNA, 15 nt, Human
aguuuagcuggaaaa

SEQ ID NO: 1603017 - RNA, 20 nt, Human
aguuuaaauuguaauaggcg

SEQ ID NO: 1603018 - RNA, 17 nt, Human
aguuuaaauuguaauag

SEQ ID NO: 1603019 - RNA, 17 nt, Human
aguuuacauuguaaaua

SEQ ID NO: 1603020 - RNA, 15 nt, Human
aguuuacauuguaaa

SEQ ID NO: 1603021 - RNA, 13 nt, Human
aguuuacauugua

SEQ ID NO: 1603022 - RNA, 20 nt, Human
uuaaauuuugaguucuacau

SEQ ID NO: 1603023 - RNA, 15 nt, Human
uuaaauuuugaguuc

SEQ ID NO: 1603024 - RNA, 19 nt, Human
uuaugauuaaguaaugaua

SEQ ID NO: 1603025 - RNA, 22 nt, Human
uuaugauuaaguaaugauaacu

SEQ ID NO: 1603026 - RNA, 14 nt, Human
uuaugaauuacauu

SEQ ID NO: 1603027 - RNA, 16 nt, Human
uuaugaauuacauuug

SEQ ID NO: 1603028 - RNA, 17 nt, Human
uuaugaauuacauuugu

SEQ ID NO: 1603029 - RNA, 21 nt, Human
uuaugaauuacauuuguauaa

SEQ ID NO: 1603030 - RNA, 19 nt, Human
uuauauuugaaauauugac

SEQ ID NO: 1603031 - RNA, 17 nt, Human
auacuauggaauuucuc

SEQ ID NO: 1603032 - RNA, 23 nt, Human
auacgcaacauaauuaaauuuug

SEQ ID NO: 1603033 - RNA, 16 nt, Human
auacucauuaggaugg

SEQ ID NO: 1603034 - RNA, 14 nt, Human
uuauuauauuuaca

SEQ ID NO: 1603035 - RNA, 19 nt, Human
uuauguuaaaacugggaca

SEQ ID NO: 1603036 - RNA, 15 nt, Human
uuauuauauuuacaa

SEQ ID NO: 1603037 - RNA, 13 nt, Human
auagaaguaaaaa

SEQ ID NO: 1603038 - RNA, 17 nt, Human
auagaauuaacacauga

SEQ ID NO: 1603039 - RNA, 22 nt, Human
auagagcaaaauugauguguuu

SEQ ID NO: 1603040 - RNA, 21 nt, Human
auagagcaaaauugauguguu

SEQ ID NO: 1603041 - RNA, 17 nt, Human
auagagcaaaauugaug

SEQ ID NO: 1603042 - RNA, 15 nt, Human
auagagcaaaauuga

SEQ ID NO: 1603043 - RNA, 18 nt, Human
auagauaggucagugcaa

SEQ ID NO: 1603044 - RNA, 21 nt, Human
auagaguguacuuaacuauuc

SEQ ID NO: 1603045 - RNA, 19 nt, Human
auagaguguacuuaacuau

SEQ ID NO: 1603046 - RNA, 14 nt, Human
auagaguguacuua

SEQ ID NO: 1603047 - RNA, 14 nt, Human
agugcaaauuguca

SEQ ID NO: 1603048 - RNA, 18 nt, Human
agucuuucacauuuaaau

SEQ ID NO: 1603049 - RNA, 21 nt, Human
agugaacaaauuuacagagac

SEQ ID NO: 1603050 - RNA, 16 nt, Human
agucuuucacauuuaa

SEQ ID NO: 1603051 - RNA, 22 nt, Human
agugaacaaauuuacagagaca

SEQ ID NO: 1603052 - RNA, 23 nt, Human
agugaacaaauuuacagagacag

SEQ ID NO: 1603053 - RNA, 15 nt, Human
uguucuaagaaguga

SEQ ID NO: 1603054 - RNA, 22 nt, Human
uguugcccacagcuguaugauu

SEQ ID NO: 1603055 - RNA, 22 nt, Human
ugugucuaaauuugaauguuaa

SEQ ID NO: 1603056 - RNA, 19 nt, Human
ugugucuaaauuugaaugu

SEQ ID NO: 1603057 - RNA, 14 nt, Human
uguguaaaauguga

SEQ ID NO: 1603058 - RNA, 22 nt, Human
uguguuaaguauguguaaaaug

SEQ ID NO: 1603059 - RNA, 23 nt, Human
uguuaagcagauggaaugcugug

SEQ ID NO: 1603060 - RNA, 14 nt, Human
agucaggaaagaga

SEQ ID NO: 1603061 - RNA, 13 nt, Human
agucucaggaaau

SEQ ID NO: 1603062 - RNA, 16 nt, Human
agucucaggaaaucaa

SEQ ID NO: 1603063 - RNA, 16 nt, Human
aggugcuacaaaaaca

SEQ ID NO: 1603064 - RNA, 13 nt, Human
uguaagggaaacu

SEQ ID NO: 1603065 - RNA, 18 nt, Human
uguaagggaaacugccag

SEQ ID NO: 1603066 - RNA, 19 nt, Human
uguaagggaaacugccagc

SEQ ID NO: 1603067 - RNA, 19 nt, Human
aguacauuuggagacacaa

SEQ ID NO: 1603068 - RNA, 13 nt, Human
aguaaugauaacu

SEQ ID NO: 1603069 - RNA, 12 nt, Human
aguaauuggaaa

SEQ ID NO: 1603070 - RNA, 13 nt, Human
aguaauuggaaag

SEQ ID NO: 1603071 - RNA, 19 nt, Human
aguaauucaagaaaacaac

SEQ ID NO: 1603072 - RNA, 16 nt, Human
aguaaaaccacagcag

SEQ ID NO: 1603073 - RNA, 17 nt, Human
aguaaaaccacagcagu

SEQ ID NO: 1603074 - RNA, 19 nt, Human
aguaaaaccacagcaguug

SEQ ID NO: 1603075 - RNA, 20 nt, Human
aguaaaaccacagcaguuga

SEQ ID NO: 1603076 - RNA, 13 nt, Human
aguaauagagcaa

SEQ ID NO: 1603077 - RNA, 17 nt, Human
uguaguguuggagaaga

SEQ ID NO: 1603078 - RNA, 18 nt, Human
uguaguguuggagaagaa

SEQ ID NO: 1603079 - RNA, 18 nt, Human
uguauauccuuucuaaca

SEQ ID NO: 1603080 - RNA, 16 nt, Human
uguaguguuggagaag

SEQ ID NO: 1603081 - RNA, 16 nt, Human
uggagaagaacugaaa

SEQ ID NO: 1603082 - RNA, 20 nt, Human
aggcagcucuaaaugucaau

SEQ ID NO: 1603083 - RNA, 21 nt, Human
uggaacaagaugguucuagca

SEQ ID NO: 1603084 - RNA, 11 nt, Human
aggcuccacuu

SEQ ID NO: 1603085 - RNA, 17 nt, Human
aggcuccacuuggucug

SEQ ID NO: 1603086 - RNA, 21 nt, Human
aggcuccacuuggucugugag

SEQ ID NO: 1603087 - RNA, 22 nt, Human
aggcuccacuuggucugugaga

SEQ ID NO: 1603088 - RNA, 18 nt, Human
ugggaaacaaaaggauaa

SEQ ID NO: 1603089 - RNA, 14 nt, Human
ugggaaagcauugu

SEQ ID NO: 1603090 - RNA, 16 nt, Human
ugggaaagcauuguaa

SEQ ID NO: 1603091 - RNA, 21 nt, Human
ugggaaagcauuguaaaugug

SEQ ID NO: 1603092 - RNA, 17 nt, Human
ugggaaagcauuguaaa

SEQ ID NO: 1603093 - RNA, 18 nt, Human
ugggaaagcauuguaaau

SEQ ID NO: 1603094 - RNA, 23 nt, Human
uggcuauaggugcuacaaaaaca

SEQ ID NO: 1603095 - RNA, 18 nt, Human
uggcuaagcaaaauguga

SEQ ID NO: 1603096 - RNA, 15 nt, Human
uggcuauaggugcua

SEQ ID NO: 1603097 - RNA, 19 nt, Human
uggcuauaggugcuacaaa

SEQ ID NO: 1603098 - RNA, 20 nt, Human
ugggaacccaaguccaagca

SEQ ID NO: 1603099 - RNA, 14 nt, Human
agggaaacugccag

SEQ ID NO: 1603100 - RNA, 15 nt, Human
agggaaacugccagc

SEQ ID NO: 1603101 - RNA, 16 nt, Human
agggaaacugccagca

SEQ ID NO: 1603102 - RNA, 19 nt, Human
agggaaacugccagcaacg

SEQ ID NO: 1603103 - RNA, 21 nt, Human
agggaaacugccagcaacgca

SEQ ID NO: 1603104 - RNA, 23 nt, Human
agggaaacugccagcaacgcagg

SEQ ID NO: 1603105 - RNA, 22 nt, Human
agggcuguuauaaucuuucaca

SEQ ID NO: 1603106 - RNA, 19 nt, Human
ugggaggcugagaugggag

SEQ ID NO: 1603107 - RNA, 13 nt, Human
agggagagaagau

SEQ ID NO: 1603108 - RNA, 14 nt, Human
agggagagaagaua

SEQ ID NO: 1603109 - RNA, 13 nt, Human
agggaaauuucag

SEQ ID NO: 1603110 - RNA, 23 nt, Human
agggacuucugucuucacaacag

SEQ ID NO: 1603111 - RNA, 14 nt, Human
aggaaauauuuauu

SEQ ID NO: 1603112 - RNA, 18 nt, Human
aggaaauauuuauuuuaa

SEQ ID NO: 1603113 - RNA, 19 nt, Human
aggaaaucaaauaugcaaa

SEQ ID NO: 1603114 - RNA, 19 nt, Human
aggaauugacccacaagaa

SEQ ID NO: 1603115 - RNA, 23 nt, Human
aggaauugacccacaagaaauga

SEQ ID NO: 1603116 - RNA, 21 nt, Human
agcuuauugucuagugaaacu

SEQ ID NO: 1603117 - RNA, 15 nt, Human
agcuuauuaaaacuc

SEQ ID NO: 1603118 - RNA, 20 nt, Human
agcuuauuaaaacucauuuu

SEQ ID NO: 1603119 - RNA, 13 nt, Human
aggaaagagaacu

SEQ ID NO: 1603120 - RNA, 19 nt, Human
aggaaagagaacuuccaga

SEQ ID NO: 1603121 - RNA, 16 nt, Human
ugcuaguaauuggaaa

SEQ ID NO: 1603122 - RNA, 14 nt, Human
ugcuaguaauugga

SEQ ID NO: 1603123 - RNA, 22 nt, Human
agcugccuccccuccucugcuu

SEQ ID NO: 1603124 - RNA, 21 nt, Human
agcugccuccccuccucugcu

SEQ ID NO: 1603125 - RNA, 23 nt, Human
agcugccuccccuccucugcuug

SEQ ID NO: 1603126 - RNA, 20 nt, Human
agcugccuccccuccucugc

SEQ ID NO: 1603127 - RNA, 19 nt, Human
agcugccuccccuccucug

SEQ ID NO: 1603128 - RNA, 18 nt, Human
agcugccuccccuccucu

SEQ ID NO: 1603129 - RNA, 13 nt, Human
agcuggaaaagua

SEQ ID NO: 1603130 - RNA, 19 nt, Human
agcuauggugucauaggcu

SEQ ID NO: 1603131 - RNA, 18 nt, Human
agcccuucuuuccacaga

SEQ ID NO: 1603132 - RNA, 19 nt, Human
agcccuucuuuccacagaa

SEQ ID NO: 1603133 - RNA, 19 nt, Human
agccugagcgacagugaga

SEQ ID NO: 1603134 - RNA, 18 nt, Human
agccugagcgacagugag

SEQ ID NO: 1603135 - RNA, 14 nt, Human
ugcagugagccgag

SEQ ID NO: 1603136 - RNA, 19 nt, Human
ugcagugagccgagauugu

SEQ ID NO: 1603137 - RNA, 13 nt, Human
ugcauacucauua

SEQ ID NO: 1603138 - RNA, 21 nt, Human
agccugcaauuucauaugcug

SEQ ID NO: 1603139 - RNA, 19 nt, Human
agccugcaauuucauaugc

SEQ ID NO: 1603140 - RNA, 14 nt, Human
agaagcuccaggua

SEQ ID NO: 1603141 - RNA, 14 nt, Human
ucugcuugccaucc

SEQ ID NO: 1603142 - RNA, 12 nt, Human
ucugcuugccau

SEQ ID NO: 1603143 - RNA, 21 nt, Human
agaagaacugaaaucauacuu

SEQ ID NO: 1603144 - RNA, 11 nt, Human
ucugcuugcca

SEQ ID NO: 1603145 - RNA, 23 nt, Human
ucugagaaagacuauucaaacag

SEQ ID NO: 1603146 - RNA, 21 nt, Human
ucugagaaagacuauucaaac

SEQ ID NO: 1603147 - RNA, 22 nt, Human
ucugagaaagacuauucaaaca

SEQ ID NO: 1603148 - RNA, 21 nt, Human
ucugacuguuuccaucaaggg

SEQ ID NO: 1603149 - RNA, 14 nt, Human
ucugagaaagacua

SEQ ID NO: 1603150 - RNA, 15 nt, Human
ucugagaaagacuau

SEQ ID NO: 1603151 - RNA, 19 nt, Human
ucugagaaagacuauucaa

SEQ ID NO: 1603152 - RNA, 20 nt, Human
ucugagaaagacuauucaaa

SEQ ID NO: 1603153 - RNA, 19 nt, Human
agaaagacuauucaaacag

SEQ ID NO: 1603154 - RNA, 20 nt, Human
agaaagacuauucaaacagu

SEQ ID NO: 1603155 - RNA, 23 nt, Human
agaaagacuauucaaacagucuc

SEQ ID NO: 1603156 - RNA, 15 nt, Human
ucugcagauaaacag

SEQ ID NO: 1603157 - RNA, 14 nt, Human
agaacucccuuuca

SEQ ID NO: 1603158 - RNA, 15 nt, Human
agaacucccuuucaa

SEQ ID NO: 1603159 - RNA, 15 nt, Human
ucucccagucauuua

SEQ ID NO: 1603160 - RNA, 13 nt, Human
agaaacuggaacu

SEQ ID NO: 1603161 - RNA, 15 nt, Human
agaaacuggaacucu

SEQ ID NO: 1603162 - RNA, 19 nt, Human
agaaaacaaggaugaauua

SEQ ID NO: 1603163 - RNA, 12 nt, Human
ucucuucuuuaa

SEQ ID NO: 1603164 - RNA, 13 nt, Human
ucucuucuuuaaa

SEQ ID NO: 1603165 - RNA, 16 nt, Human
ucucuggccuucggcc

SEQ ID NO: 1603166 - RNA, 17 nt, Human
ucucuggccuucggccu

SEQ ID NO: 1603167 - RNA, 22 nt, Human
agacuccaaagaaauguaaggg

SEQ ID NO: 1603168 - RNA, 23 nt, Human
agacuauucaaacagucucagga

SEQ ID NO: 1603169 - RNA, 16 nt, Human
agacuccaaagaaaug

SEQ ID NO: 1603170 - RNA, 19 nt, Human
agacuccaaagaaauguaa

SEQ ID NO: 1603171 - RNA, 21 nt, Human
agacuauucaaacagucucag

SEQ ID NO: 1603172 - RNA, 18 nt, Human
agacuauucaaacagucu

SEQ ID NO: 1603173 - RNA, 20 nt, Human
agacuauucaaacagucuca

SEQ ID NO: 1603174 - RNA, 12 nt, Human
agacuccaaaga

SEQ ID NO: 1603175 - RNA, 13 nt, Human
agacuccaaagaa

SEQ ID NO: 1603176 - RNA, 14 nt, Human
agacuccaaagaaa

SEQ ID NO: 1603177 - RNA, 17 nt, Human
ucuuuaaaauacacacu

SEQ ID NO: 1603178 - RNA, 21 nt, Human
ucuuuaaagggauggcaagau

SEQ ID NO: 1603179 - RNA, 18 nt, Human
agagacacacugaagaag

SEQ ID NO: 1603180 - RNA, 20 nt, Human
agagacacacugaagaagca

SEQ ID NO: 1603181 - RNA, 17 nt, Human
agagacacacugaagaa

SEQ ID NO: 1603182 - RNA, 15 nt, Human
agagaaugagagaca

SEQ ID NO: 1603183 - RNA, 18 nt, Human
agacuggcacaguuuucu

SEQ ID NO: 1603184 - RNA, 14 nt, Human
agacuggcacaguu

SEQ ID NO: 1603185 - RNA, 15 nt, Human
agacuggcacaguuu

SEQ ID NO: 1603186 - RNA, 22 nt, Human
ucuuagaugcaguucugaagaa

SEQ ID NO: 1603187 - RNA, 18 nt, Human
ucuuaauuaaaagaauau

SEQ ID NO: 1603188 - RNA, 21 nt, Human
ucuuaauuaaaagaauauuuu

SEQ ID NO: 1603189 - RNA, 20 nt, Human
ucuguuuuauaauuuuguga

SEQ ID NO: 1603190 - RNA, 18 nt, Human
ucuguuuuauaauuuugu

SEQ ID NO: 1603191 - RNA, 18 nt, Human
ugaagauguagaggagaa

SEQ ID NO: 1603192 - RNA, 22 nt, Human
ugaagaagcaccaaucaugaau

SEQ ID NO: 1603193 - RNA, 14 nt, Human
ugaagaagauggua

SEQ ID NO: 1603194 - RNA, 20 nt, Human
ugaagaagcaccaaucauga

SEQ ID NO: 1603195 - RNA, 22 nt, Human
agagugaacaaauuuacagaga

SEQ ID NO: 1603196 - RNA, 19 nt, Human
agauaaucagugugucuaa

SEQ ID NO: 1603197 - RNA, 23 nt, Human
agaugcuagaacucccuuucaac

SEQ ID NO: 1603198 - RNA, 15 nt, Human
ugacuguuuccauca

SEQ ID NO: 1603199 - RNA, 16 nt, Human
agauuuaccacuugug

SEQ ID NO: 1603200 - RNA, 16 nt, Human
agauugugccccugca

SEQ ID NO: 1603201 - RNA, 21 nt, Human
agauugugccccugcacucca

SEQ ID NO: 1603202 - RNA, 12 nt, Human
agauuuucagaa

SEQ ID NO: 1603203 - RNA, 14 nt, Human
agauuuuccugaaa

SEQ ID NO: 1603204 - RNA, 17 nt, Human
agauuuucagaaaauau

SEQ ID NO: 1603205 - RNA, 22 nt, Human
agcacagccucuuagaugcagu

SEQ ID NO: 1603206 - RNA, 16 nt, Human
agcaccaaucaugaau

SEQ ID NO: 1603207 - RNA, 14 nt, Human
agcaacgcaggccc

SEQ ID NO: 1603208 - RNA, 14 nt, Human
agcagaacagugau

SEQ ID NO: 1603209 - RNA, 13 nt, Human
ugagcgacaguga

SEQ ID NO: 1603210 - RNA, 14 nt, Human
ugagcgacagugag

SEQ ID NO: 1603211 - RNA, 16 nt, Human
ugagcgacagugagac

SEQ ID NO: 1603212 - RNA, 20 nt, Human
ugagcgacagugagacucug

SEQ ID NO: 1603213 - RNA, 16 nt, Human
ugagcuacaaaugcau

SEQ ID NO: 1603214 - RNA, 14 nt, Human
ugagcuacaaaugc

SEQ ID NO: 1603215 - RNA, 13 nt, Human
ugagcuacaaaug

SEQ ID NO: 1603216 - RNA, 15 nt, Human
ugaggacacugauau

SEQ ID NO: 1603217 - RNA, 17 nt, Human
ugagguacugagaguga

SEQ ID NO: 1603218 - RNA, 22 nt, Human
ugagguacugagagugaacaaa

SEQ ID NO: 1603219 - RNA, 21 nt, Human
agcagauggaaugcuguguua

SEQ ID NO: 1603220 - RNA, 21 nt, Human
acccaaauguucaucaaugaa

SEQ ID NO: 1603221 - RNA, 18 nt, Human
acccaaaaggcagaagca

SEQ ID NO: 1603222 - RNA, 13 nt, Human
acccaaaaggcag

SEQ ID NO: 1603223 - RNA, 15 nt, Human
acccaaaaggcagaa

SEQ ID NO: 1603224 - RNA, 19 nt, Human
accacuuguguuuugcaag

SEQ ID NO: 1603225 - RNA, 23 nt, Human
accacuuguguuuugcaagccag

SEQ ID NO: 1603226 - RNA, 14 nt, Human
accacugcagaaga

SEQ ID NO: 1603227 - RNA, 19 nt, Human
accacugcagaagacagua

SEQ ID NO: 1603228 - RNA, 11 nt, Human
accacagcagu

SEQ ID NO: 1603229 - RNA, 12 nt, Human
uauuucauuucu

SEQ ID NO: 1603230 - RNA, 21 nt, Human
uccagccugagcgacagugag

SEQ ID NO: 1603231 - RNA, 20 nt, Human
uccagccugagcgacaguga

SEQ ID NO: 1603232 - RNA, 21 nt, Human
uccaacuaucucauuuccaag

SEQ ID NO: 1603233 - RNA, 22 nt, Human
ucaugaauuaguuuuauaugcu

SEQ ID NO: 1603234 - RNA, 19 nt, Human
ucauauuaauauauuucca

SEQ ID NO: 1603235 - RNA, 23 nt, Human
uccugggcagcugccuccccucc

SEQ ID NO: 1603236 - RNA, 22 nt, Human
uccugggcagcugccuccccuc

SEQ ID NO: 1603237 - RNA, 19 nt, Human
uccugggcagcugccuccc

SEQ ID NO: 1603238 - RNA, 18 nt, Human
uccugggcagcugccucc

SEQ ID NO: 1603239 - RNA, 17 nt, Human
uccugggcagcugccuc

SEQ ID NO: 1603240 - RNA, 16 nt, Human
uccugggcagcugccu

SEQ ID NO: 1603241 - RNA, 15 nt, Human
uccugggcagcugcc

SEQ ID NO: 1603242 - RNA, 17 nt, Human
acugaggggaggggagc

SEQ ID NO: 1603243 - RNA, 22 nt, Human
acugaggggaggggagcauggg

SEQ ID NO: 1603244 - RNA, 13 nt, Human
uccuucagccuga

SEQ ID NO: 1603245 - RNA, 22 nt, Human
acuggcacaguuuucugagaaa

SEQ ID NO: 1603246 - RNA, 22 nt, Human
acugccuucucaacuccaaacu

SEQ ID NO: 1603247 - RNA, 22 nt, Human
uccuuucuaacaaaaaaauaua

SEQ ID NO: 1603248 - RNA, 19 nt, Human
acuccagugagacagcucu

SEQ ID NO: 1603249 - RNA, 20 nt, Human
acucauuuuaaaaaauggaa

SEQ ID NO: 1603250 - RNA, 13 nt, Human
acuaaaaauacaa

SEQ ID NO: 1603251 - RNA, 15 nt, Human
ucccagugaauucuu

SEQ ID NO: 1603252 - RNA, 12 nt, Human
uccccuccucug

SEQ ID NO: 1603253 - RNA, 14 nt, Human
uccccuccucugcu

SEQ ID NO: 1603254 - RNA, 17 nt, Human
uauggcuauaggugcua

SEQ ID NO: 1603255 - RNA, 16 nt, Human
uauggcuauaggugcu

SEQ ID NO: 1603256 - RNA, 21 nt, Human
uaugagcuuccuucugugaaa

SEQ ID NO: 1603257 - RNA, 18 nt, Human
uaugagcuuccuucugug

SEQ ID NO: 1603258 - RNA, 14 nt, Human
uauauuuacaaaug

SEQ ID NO: 1603259 - RNA, 15 nt, Human
uauauuuacaaaugg

SEQ ID NO: 1603260 - RNA, 17 nt, Human
uaucuaguaugaaauua

SEQ ID NO: 1603261 - RNA, 16 nt, Human
uaucuaguaugaaauu

SEQ ID NO: 1603262 - RNA, 14 nt, Human
uaucuaguaugaaa

SEQ ID NO: 1603263 - RNA, 16 nt, Human
uaguuuuauaugcuuc

SEQ ID NO: 1603264 - RNA, 22 nt, Human
uagugagcagucaggaaagaga

SEQ ID NO: 1603265 - RNA, 21 nt, Human
uauaaaauaauuuuuauauuu

SEQ ID NO: 1603266 - RNA, 22 nt, Human
uauaaaauaauuuuuauauuug

SEQ ID NO: 1603267 - RNA, 22 nt, Human
acacaucagcuugcccuguuaa

SEQ ID NO: 1603268 - RNA, 23 nt, Human
uauaaaauaauuuuuauauuuga

SEQ ID NO: 1603269 - RNA, 14 nt, Human
uauaauuuugugaa

SEQ ID NO: 1603270 - RNA, 19 nt, Human
uauaauuuugugaagcaaa

SEQ ID NO: 1603271 - RNA, 23 nt, Human
uauaggugcuacaaaaacacagc

SEQ ID NO: 1603272 - RNA, 21 nt, Human
uauaggugcuacaaaaacaca

SEQ ID NO: 1603273 - RNA, 20 nt, Human
uauaggugcuacaaaaacac

SEQ ID NO: 1603274 - RNA, 13 nt, Human
uauaggaauugac

SEQ ID NO: 1603275 - RNA, 14 nt, Human
uauaggaauugacc

SEQ ID NO: 1603276 - RNA, 19 nt, Human
uauaggaauugacccacaa

SEQ ID NO: 1603277 - RNA, 17 nt, Human
uauauccuuucuaacaa

SEQ ID NO: 1603278 - RNA, 16 nt, Human
uauauccuuucuaaca

SEQ ID NO: 1603279 - RNA, 22 nt, Human
acaguucggugagcuacaaaug

SEQ ID NO: 1603280 - RNA, 19 nt, Human
acaguucggugagcuacaa

SEQ ID NO: 1603281 - RNA, 23 nt, Human
acaguucggugagcuacaaaugc

SEQ ID NO: 1603282 - RNA, 17 nt, Human
uauugucuagugaaacu

SEQ ID NO: 1603283 - RNA, 14 nt, Human
uauuuauuuuaaua

SEQ ID NO: 1603284 - RNA, 16 nt, Human
uauuuauuuuaauaau

SEQ ID NO: 1603285 - RNA, 18 nt, Human
uauuuauuuuaauaaugu

SEQ ID NO: 1603286 - RNA, 19 nt, Human
uauuuaaugauaaguaaau

SEQ ID NO: 1603287 - RNA, 21 nt, Human
acaguuaccucugccucagaa

SEQ ID NO: 1603288 - RNA, 14 nt, Human
acagugagacucug

SEQ ID NO: 1603289 - RNA, 18 nt, Human
acagugagacucugucuc

SEQ ID NO: 1603290 - RNA, 20 nt, Human
acagugaaagaaaauaacaa

SEQ ID NO: 1603291 - RNA, 17 nt, Human
acagucucaggaaauca

SEQ ID NO: 1603292 - RNA, 13 nt, Human
acagucucaggaa

SEQ ID NO: 1603293 - RNA, 14 nt, Human
acagucucaggaaa

SEQ ID NO: 1603294 - RNA, 15 nt, Human
acagucucaggaaau

SEQ ID NO: 1603295 - RNA, 16 nt, Human
acagucucaggaaauc

SEQ ID NO: 1603296 - RNA, 21 nt, Human
acaguauggcagcuuuccuca

SEQ ID NO: 1603297 - RNA, 21 nt, Human
uauguuuucaggcuagaugua

SEQ ID NO: 1603298 - RNA, 12 nt, Human
uauuaaaacuca

SEQ ID NO: 1603299 - RNA, 16 nt, Human
uauuaaaacucauuuu

SEQ ID NO: 1603300 - RNA, 23 nt, Human
uauucauagcagcuuauucacaa

SEQ ID NO: 1603301 - RNA, 16 nt, Human
uauucaggagaguaga

SEQ ID NO: 1603302 - RNA, 23 nt, Human
aauugugugaaagguacuucaaa

SEQ ID NO: 1603303 - RNA, 13 nt, Human
uacuguaagaaaa

SEQ ID NO: 1603304 - RNA, 14 nt, Human
uacuucaaauccuu

SEQ ID NO: 1603305 - RNA, 19 nt, Human
uacuucaaauccuugaaga

SEQ ID NO: 1603306 - RNA, 20 nt, Human
aauuucucccagucauuuaa

SEQ ID NO: 1603307 - RNA, 16 nt, Human
aauugacccacaagaa

SEQ ID NO: 1603308 - RNA, 19 nt, Human
aauugacccacaagaaaug

SEQ ID NO: 1603309 - RNA, 21 nt, Human
aauucuugccaaauauaaaua

SEQ ID NO: 1603310 - RNA, 21 nt, Human
aauucuugaaggaaaaugaua

SEQ ID NO: 1603311 - RNA, 16 nt, Human
aauucuugaaggaaaa

SEQ ID NO: 1603312 - RNA, 15 nt, Human
aauucuugaaggaaa

SEQ ID NO: 1603313 - RNA, 18 nt, Human
acaagcacuaaacaaaga

SEQ ID NO: 1603314 - RNA, 21 nt, Human
uagcaugucgucaaagcugaa

SEQ ID NO: 1603315 - RNA, 17 nt, Human
uagaugcaguucugaag

SEQ ID NO: 1603316 - RNA, 19 nt, Human
uagaugcaguucugaagaa

SEQ ID NO: 1603317 - RNA, 16 nt, Human
uagaugcaguucugaa

SEQ ID NO: 1603318 - RNA, 19 nt, Human
uagaggagaaacuggaacu

SEQ ID NO: 1603319 - RNA, 21 nt, Human
uacuucaaauccuugaagauu

SEQ ID NO: 1603320 - RNA, 16 nt, Human
uacuucaugcugucua

SEQ ID NO: 1603321 - RNA, 15 nt, Human
uagaacucccuuuca

SEQ ID NO: 1603322 - RNA, 19 nt, Human
aauuuuuauauuugaaaua

SEQ ID NO: 1603323 - RNA, 19 nt, Human
aauuuuuucucuaggaaau

SEQ ID NO: 1603324 - RNA, 20 nt, Human
acaaaaaaauauauuuaaug

SEQ ID NO: 1603325 - RNA, 17 nt, Human
acaaaaaaauauauuua

SEQ ID NO: 1603326 - RNA, 13 nt, Human
acaaaaaaauaua

SEQ ID NO: 1603327 - RNA, 17 nt, Human
uacaaaaacacagcaag

SEQ ID NO: 1603328 - RNA, 18 nt, Human
uacaaaaacacagcaagg

SEQ ID NO: 1603329 - RNA, 19 nt, Human
uaacaaugcuguauuuuaa

SEQ ID NO: 1603330 - RNA, 18 nt, Human
uaaucagugugucuaaau

SEQ ID NO: 1603331 - RNA, 17 nt, Human
uaaucagugugucuaaa

SEQ ID NO: 1603332 - RNA, 13 nt, Human
uaaucuuucacag

SEQ ID NO: 1603333 - RNA, 15 nt, Human
aaugaaugaaugaau

SEQ ID NO: 1603334 - RNA, 17 nt, Human
uaauguaauaacuguga

SEQ ID NO: 1603335 - RNA, 18 nt, Human
uaauguaauaacugugaa

SEQ ID NO: 1603336 - RNA, 16 nt, Human
aaugguuuaaaugguc

SEQ ID NO: 1603337 - RNA, 19 nt, Human
uacauaaguaauucaagaa

SEQ ID NO: 1603338 - RNA, 17 nt, Human
uacauaaguaauucaag

SEQ ID NO: 1603339 - RNA, 16 nt, Human
uacauaaguaauucaa

SEQ ID NO: 1603340 - RNA, 16 nt, Human
uaccaugccauuuaaa

SEQ ID NO: 1603341 - RNA, 18 nt, Human
aauguugacaugggacau

SEQ ID NO: 1603342 - RNA, 22 nt, Human
uacauuguacgaagaguauuuu

SEQ ID NO: 1603343 - RNA, 20 nt, Human
uacauuguacgaagaguauu

SEQ ID NO: 1603344 - RNA, 23 nt, Human
uacauuguacgaagaguauuuuu

SEQ ID NO: 1603345 - RNA, 13 nt, Human
aaggauaaugaau

SEQ ID NO: 1603346 - RNA, 14 nt, Human
aaggaucuucaucu

SEQ ID NO: 1603347 - RNA, 12 nt, Human
aaggaaaaugau

SEQ ID NO: 1603348 - RNA, 14 nt, Human
aaggaaaaugauac

SEQ ID NO: 1603349 - RNA, 13 nt, Human
guugacaugggac

SEQ ID NO: 1603350 - RNA, 19 nt, Human
aaggaaaaaauaacaauga

SEQ ID NO: 1603351 - RNA, 16 nt, Human
aaggaaaaaauaacaa

SEQ ID NO: 1603352 - RNA, 13 nt, Human
guguuuauuuaua

SEQ ID NO: 1603353 - RNA, 22 nt, Human
aagucuuauauauuguagauaa

SEQ ID NO: 1603354 - RNA, 23 nt, Human
guuuuuuuuuaaaaaagaaacau

SEQ ID NO: 1603355 - RNA, 16 nt, Human
guuuucugagaaagac

SEQ ID NO: 1603356 - RNA, 17 nt, Human
guuuucugagaaagacu

SEQ ID NO: 1603357 - RNA, 22 nt, Human
guuuucugagaaagacuauuca

SEQ ID NO: 1603358 - RNA, 23 nt, Human
aaguauguuagugcaaauuguca

SEQ ID NO: 1603359 - RNA, 21 nt, Human
aaguauguuagugcaaauugu

SEQ ID NO: 1603360 - RNA, 13 nt, Human
aaguauucuaaau

SEQ ID NO: 1603361 - RNA, 15 nt, Human
aaguauucuaaauuu

SEQ ID NO: 1603362 - RNA, 15 nt, Human
guuuuauaauuuugu

SEQ ID NO: 1603363 - RNA, 22 nt, Human
guuuuauaauuuugugaagcaa

SEQ ID NO: 1603364 - RNA, 14 nt, Human
aaguaaaaccacag

SEQ ID NO: 1603365 - RNA, 15 nt, Human
aaguaaaaccacagc

SEQ ID NO: 1603366 - RNA, 16 nt, Human
aaguaaaaccacagca

SEQ ID NO: 1603367 - RNA, 21 nt, Human
aagggugaugggaaagcauug

SEQ ID NO: 1603368 - RNA, 17 nt, Human
aaguaaaaccacagcag

SEQ ID NO: 1603369 - RNA, 18 nt, Human
aaguaaaaccacagcagu

SEQ ID NO: 1603370 - RNA, 20 nt, Human
aaguuauugauaaguucaua

SEQ ID NO: 1603371 - RNA, 19 nt, Human
aaguuauugauaaguucau

SEQ ID NO: 1603372 - RNA, 17 nt, Human
aaguucugcagauaaac

SEQ ID NO: 1603373 - RNA, 19 nt, Human
aaguuuacauuguaaauag

SEQ ID NO: 1603374 - RNA, 18 nt, Human
aaguuuacauuguaaaua

SEQ ID NO: 1603375 - RNA, 13 nt, Human
aaguucauacauu

SEQ ID NO: 1603376 - RNA, 12 nt, Human
aaguucauacau

SEQ ID NO: 1603377 - RNA, 15 nt, Human
aaguucauacauugu

SEQ ID NO: 1603378 - RNA, 23 nt, Human
aaguuauugauaaguucauacau

SEQ ID NO: 1603379 - RNA, 22 nt, Human
aaguuauugauaaguucauaca

SEQ ID NO: 1603380 - RNA, 19 nt, Human
uaaaccucaaaaugucuaa

SEQ ID NO: 1603381 - RNA, 18 nt, Human
uaaaccucaaaaugucua

SEQ ID NO: 1603382 - RNA, 17 nt, Human
uaaaugauuucauucaa

SEQ ID NO: 1603383 - RNA, 15 nt, Human
uaacaaugcuguauu

SEQ ID NO: 1603384 - RNA, 17 nt, Human
uaacaaugcuguauuuu

SEQ ID NO: 1603385 - RNA, 23 nt, Human
uaacaaaaaaauauauuuaauga

SEQ ID NO: 1603386 - RNA, 20 nt, Human
uaacaaaaaaauauauuuaa

SEQ ID NO: 1603387 - RNA, 16 nt, Human
uaaauuuugaguucua

SEQ ID NO: 1603388 - RNA, 14 nt, Human
uaaauuuuauaucu

SEQ ID NO: 1603389 - RNA, 14 nt, Human
aauacacacucaaa

SEQ ID NO: 1603390 - RNA, 18 nt, Human
uaaauaguauuugagagu

SEQ ID NO: 1603391 - RNA, 15 nt, Human
aauaacaauaaaaga

SEQ ID NO: 1603392 - RNA, 12 nt, Human
aauaaaugugcc

SEQ ID NO: 1603393 - RNA, 21 nt, Human
aauaaaugugccuucauuuuu

SEQ ID NO: 1603394 - RNA, 22 nt, Human
aauaaaauccauacauuugugu

SEQ ID NO: 1603395 - RNA, 12 nt, Human
aauaaaaauaau

SEQ ID NO: 1603396 - RNA, 22 nt, Human
aauaaaaauauuguguugugaa

SEQ ID NO: 1603397 - RNA, 13 nt, Human
aagacccaaaagg

SEQ ID NO: 1603398 - RNA, 13 nt, Human
aagaauauuuuaa

SEQ ID NO: 1603399 - RNA, 13 nt, Human
aagaaaauaucac

SEQ ID NO: 1603400 - RNA, 22 nt, Human
aagaagcaccaaucaugaauua

SEQ ID NO: 1603401 - RNA, 18 nt, Human
aagagcuguucacagcca

SEQ ID NO: 1603402 - RNA, 19 nt, Human
aagagcuguucacagccag

SEQ ID NO: 1603403 - RNA, 14 nt, Human
aagacuccaaagaa

SEQ ID NO: 1603404 - RNA, 16 nt, Human
aagacuccaaagaaau

SEQ ID NO: 1603405 - RNA, 17 nt, Human
aagacuccaaagaaaug

SEQ ID NO: 1603406 - RNA, 14 nt, Human
aagacuauucaaac

SEQ ID NO: 1603407 - RNA, 22 nt, Human
aagauguagaggagaaacugga

SEQ ID NO: 1603408 - RNA, 19 nt, Human
aagcaaaauuuuuucucua

SEQ ID NO: 1603409 - RNA, 16 nt, Human
aagcaaguauuagaau

SEQ ID NO: 1603410 - RNA, 23 nt, Human
gucucaguccaugaagauguaga

SEQ ID NO: 1603411 - RNA, 19 nt, Human
aacagucucaggaaaucaa

SEQ ID NO: 1603412 - RNA, 17 nt, Human
aacagucucaggaaauc

SEQ ID NO: 1603413 - RNA, 16 nt, Human
aacagauaaauaguuu

SEQ ID NO: 1603414 - RNA, 19 nt, Human
aacagauuauuaccuuaca

SEQ ID NO: 1603415 - RNA, 16 nt, Human
aacauauauaacaaug

SEQ ID NO: 1603416 - RNA, 12 nt, Human
aacauaauuaaa

SEQ ID NO: 1603417 - RNA, 20 nt, Human
aacugaaaucauacuucuua

SEQ ID NO: 1603418 - RNA, 13 nt, Human
aacuauauuguuu

SEQ ID NO: 1603419 - RNA, 20 nt, Human
aacuaucucauuuccaagca

SEQ ID NO: 1603420 - RNA, 23 nt, Human
aacuaucucauuuccaagcaagu

SEQ ID NO: 1603421 - RNA, 16 nt, Human
gugaagugaaugaaac

SEQ ID NO: 1603422 - RNA, 19 nt, Human
caaauaugcaaagcacuga

SEQ ID NO: 1603423 - RNA, 18 nt, Human
caaauaugcaaagcacug

SEQ ID NO: 1603424 - RNA, 16 nt, Human
caaauaugcaaagcac

SEQ ID NO: 1603425 - RNA, 17 nt, Human
caaauaugcaaagcacu

SEQ ID NO: 1603426 - RNA, 21 nt, Human
caaauguucaucaaugaauga

SEQ ID NO: 1603427 - RNA, 23 nt, Human
caaaaaaauauauuuaaugauaa

SEQ ID NO: 1603428 - RNA, 17 nt, Human
caagcacuaaacaaaga

SEQ ID NO: 1603429 - RNA, 14 nt, Human
caaauuuacagaga

SEQ ID NO: 1603430 - RNA, 16 nt, Human
caaauuuacagagaca

SEQ ID NO: 1603431 - RNA, 15 nt, Human
caaauuuacagagac

SEQ ID NO: 1603432 - RNA, 12 nt, Human
caacuuuauacc

SEQ ID NO: 1603433 - RNA, 22 nt, Human
caaugaaugaaugaauggcuaa

SEQ ID NO: 1603434 - RNA, 11 nt, Human
cacaacagauu

SEQ ID NO: 1603435 - RNA, 19 nt, Human
cacacucaaaucaagaaac

SEQ ID NO: 1603436 - RNA, 13 nt, Human
cacaacuauauug

SEQ ID NO: 1603437 - RNA, 19 nt, Human
cacaacuauuuuuccaaaa

SEQ ID NO: 1603438 - RNA, 14 nt, Human
cacaacuauuuuuc

SEQ ID NO: 1603439 - RNA, 19 nt, Human
cacaggaaccacaagacug

SEQ ID NO: 1603440 - RNA, 20 nt, Human
cacaggaaccacaagacugc

SEQ ID NO: 1603441 - RNA, 15 nt, Human
cacaggaaguagagg

SEQ ID NO: 1603442 - RNA, 15 nt, Human
cacaguuuucugaga

SEQ ID NO: 1603443 - RNA, 14 nt, Human
cacaguuuucugag

SEQ ID NO: 1603444 - RNA, 23 nt, Human
cacauaucuaguaugaaauuaua

SEQ ID NO: 1603445 - RNA, 22 nt, Human
cacagcaguugaaaagacucca

SEQ ID NO: 1603446 - RNA, 20 nt, Human
uugauaugccuuuucccaac

SEQ ID NO: 1603447 - RNA, 13 nt, Human
uugccaucccucc

SEQ ID NO: 1603448 - RNA, 18 nt, Human
uugccaucccucccucca

SEQ ID NO: 1603449 - RNA, 17 nt, Human
uugccaucccucccucc

SEQ ID NO: 1603450 - RNA, 16 nt, Human
uugccaucccucccuc

SEQ ID NO: 1603451 - RNA, 14 nt, Human
uugccaucccuccc

SEQ ID NO: 1603452 - RNA, 23 nt, Human
uugccaucccucccuccaccucc

SEQ ID NO: 1603453 - RNA, 22 nt, Human
uugccaucccucccuccaccuc

SEQ ID NO: 1603454 - RNA, 19 nt, Human
uucuuaggguuaugauuaa

SEQ ID NO: 1603455 - RNA, 24 nt, Human
uucuaaguaaaaccacagcaguug

SEQ ID NO: 1603456 - RNA, 18 nt, Human
uucuuuccacagaagcuc

SEQ ID NO: 1603457 - RNA, 21 nt, Human
uugaaaaucuuauaauuuaaa

SEQ ID NO: 1603458 - RNA, 17 nt, Human
uugaauguuaagcagau

SEQ ID NO: 1603459 - RNA, 14 nt, Human
uugaauguuaagca

SEQ ID NO: 1603460 - RNA, 16 nt, Human
uugcuaagcauuccaa

SEQ ID NO: 1603461 - RNA, 18 nt, Human
uugcuaagcauuccaacu

SEQ ID NO: 1603462 - RNA, 20 nt, Human
uugguaaggggaauugagga

SEQ ID NO: 1603463 - RNA, 15 nt, Human
uuggucugugagaug

SEQ ID NO: 1603464 - RNA, 12 nt, Human
uuguaaaauggu

SEQ ID NO: 1603465 - RNA, 13 nt, Human
uuguaaaauggug

SEQ ID NO: 1603466 - RNA, 20 nt, Human
uuguaaaauggugugaccac

SEQ ID NO: 1603467 - RNA, 16 nt, Human
uuguaccgcaauguga

SEQ ID NO: 1603468 - RNA, 19 nt, Human
uuguacgaagaguauuuuu

SEQ ID NO: 1603469 - RNA, 16 nt, Human
uuguacgaagaguauu

SEQ ID NO: 1603470 - RNA, 18 nt, Human
uuguagcacugacagauu

SEQ ID NO: 1603471 - RNA, 17 nt, Human
uuguagcacugacagau

SEQ ID NO: 1603472 - RNA, 16 nt, Human
uuguagcacugacaga

SEQ ID NO: 1603473 - RNA, 14 nt, Human
uuguagcacugaca

SEQ ID NO: 1603474 - RNA, 22 nt, Human
uuguagcacugacagauuucca

SEQ ID NO: 1603475 - RNA, 12 nt, Human
uuuaaaaugucu

SEQ ID NO: 1603476 - RNA, 19 nt, Human
uuuaaaauacacacucaaa

SEQ ID NO: 1603477 - RNA, 16 nt, Human
uuuaaaaucauuucug

SEQ ID NO: 1603478 - RNA, 14 nt, Human
uuuaaaagaaugau

SEQ ID NO: 1603479 - RNA, 17 nt, Human
uuuaaaagaaugauuau

SEQ ID NO: 1603480 - RNA, 18 nt, Human
uuguuuaaaaucauuucu

SEQ ID NO: 1603481 - RNA, 17 nt, Human
uuguuuaaaaucauuuc

SEQ ID NO: 1603482 - RNA, 19 nt, Human
uuguucaauaauaaauauu

SEQ ID NO: 1603483 - RNA, 13 nt, Human
uuuaauaaaccau

SEQ ID NO: 1603484 - RNA, 15 nt, Human
uuuaauaauguuuca

SEQ ID NO: 1603485 - RNA, 19 nt, Human
uuuaauaauguuucaaaca

SEQ ID NO: 1603486 - RNA, 13 nt, Human
uuuacagagacag

SEQ ID NO: 1603487 - RNA, 15 nt, Human
uuuauacaggucaua

SEQ ID NO: 1603488 - RNA, 12 nt, Human
uuucucuaggaa

SEQ ID NO: 1603489 - RNA, 21 nt, Human
uuucuaacaaaaaaauauauu

SEQ ID NO: 1603490 - RNA, 17 nt, Human
uuuauggcacuaguauu

SEQ ID NO: 1603491 - RNA, 21 nt, Human
uuucacauaucuaguaugaaa

SEQ ID NO: 1603492 - RNA, 15 nt, Human
uuucacauaucuagu

SEQ ID NO: 1603493 - RNA, 18 nt, Human
uuugguaaggggaauuga

SEQ ID NO: 1603494 - RNA, 21 nt, Human
uuugaaauuguauuacaaauc

SEQ ID NO: 1603495 - RNA, 13 nt, Human
uuugaguucuaca

SEQ ID NO: 1603496 - RNA, 16 nt, Human
uuugagaguucuaaau

SEQ ID NO: 1603497 - RNA, 14 nt, Human
uucagagcugcccu

SEQ ID NO: 1603498 - RNA, 13 nt, Human
uucagagcugccc

SEQ ID NO: 1603499 - RNA, 20 nt, Human
uucagauaaucacaauacau

SEQ ID NO: 1603500 - RNA, 16 nt, Human
uucagacauagaauua

SEQ ID NO: 1603501 - RNA, 20 nt, Human
uucagacauagaauuaacac

SEQ ID NO: 1603502 - RNA, 17 nt, Human
uucaaauccuugaagau

SEQ ID NO: 1603503 - RNA, 17 nt, Human
uuauuuuaauaauguuu

SEQ ID NO: 1603504 - RNA, 15 nt, Human
uuauuuuaauaaugu

SEQ ID NO: 1603505 - RNA, 16 nt, Human
uuauuuuaauaauguu

SEQ ID NO: 1603506 - RNA, 15 nt, Human
uuauugucuagugaa

SEQ ID NO: 1603507 - RNA, 21 nt, Human
uuauggcacuaguauuucuau

SEQ ID NO: 1603508 - RNA, 16 nt, Human
uuauuacuguaagaaa

SEQ ID NO: 1603509 - RNA, 17 nt, Human
uuauuacuguaagaaaa

SEQ ID NO: 1603510 - RNA, 18 nt, Human
uuauuacuguaagaaaau

SEQ ID NO: 1603511 - RNA, 17 nt, Human
uuauggcuauaggugcu

SEQ ID NO: 1603512 - RNA, 20 nt, Human
uuauugauaaguucauacau

SEQ ID NO: 1603513 - RNA, 19 nt, Human
uuauugauaaguucauaca

SEQ ID NO: 1603514 - RNA, 15 nt, Human
uuauugauaaguuca

SEQ ID NO: 1603515 - RNA, 17 nt, Human
uucccuugaugaagaag

SEQ ID NO: 1603516 - RNA, 18 nt, Human
uucccuugaugaagaagu

SEQ ID NO: 1603517 - RNA, 20 nt, Human
uuccuuggacucauuuuaaa

SEQ ID NO: 1603518 - RNA, 12 nt, Human
uuccaaaauaau

SEQ ID NO: 1603519 - RNA, 19 nt, Human
uucaugcauagguuuagca

SEQ ID NO: 1603520 - RNA, 21 nt, Human
uuccaaaauaauuuuaagaaa

SEQ ID NO: 1603521 - RNA, 13 nt, Human
uuccaaaauaauu

SEQ ID NO: 1603522 - RNA, 19 nt, Human
uuccagauccuggaaauca

SEQ ID NO: 1603523 - RNA, 17 nt, Human
uuacuaguuucccuugc

SEQ ID NO: 1603524 - RNA, 19 nt, Human
uuagaaacacaacuauauu

SEQ ID NO: 1603525 - RNA, 18 nt, Human
uuaggauguugaaaaagu

SEQ ID NO: 1603526 - RNA, 12 nt, Human
uuagcuggaaaa

SEQ ID NO: 1603527 - RNA, 13 nt, Human
uuagcuggaaaag

SEQ ID NO: 1603528 - RNA, 20 nt, Human
uuagaugcaguucugaagaa

SEQ ID NO: 1603529 - RNA, 21 nt, Human
uuagaugcaguucugaagaag

SEQ ID NO: 1603530 - RNA, 21 nt, Human
uguuucaaacauauauaacaa

SEQ ID NO: 1603531 - RNA, 22 nt, Human
uguuucaaacauauauaacaau

SEQ ID NO: 1603532 - RNA, 19 nt, Human
uguuucaaacauauauaac

SEQ ID NO: 1603533 - RNA, 13 nt, Human
uuaaaagaaugau

SEQ ID NO: 1603534 - RNA, 15 nt, Human
uuaaaagaugaaaau

SEQ ID NO: 1603535 - RNA, 18 nt, Human
uuaaaagaugaaaauauu

SEQ ID NO: 1603536 - RNA, 21 nt, Human
uuaaaagaauauuuuaacuuc

SEQ ID NO: 1603537 - RNA, 22 nt, Human
uuaaaagaauauuuuaacuucc

SEQ ID NO: 1603538 - RNA, 22 nt, Human
uuaaugucaauucuugccaaau

SEQ ID NO: 1603539 - RNA, 21 nt, Human
uuaaugauaaguaaaugcuag

SEQ ID NO: 1603540 - RNA, 14 nt, Human
uuaauauauuucca

SEQ ID NO: 1603541 - RNA, 13 nt, Human
uuaauauauuucc

SEQ ID NO: 1603542 - RNA, 21 nt, Human
uuaagcagauggaaugcugug

SEQ ID NO: 1603543 - RNA, 20 nt, Human
uggcaauagucaaauugugu

SEQ ID NO: 1603544 - RNA, 15 nt, Human
uggcacuaguauuuc

SEQ ID NO: 1603545 - RNA, 19 nt, Human
ugggcagcugccuccccuc

SEQ ID NO: 1603546 - RNA, 17 nt, Human
ugggcagcugccucccc

SEQ ID NO: 1603547 - RNA, 15 nt, Human
ugggcagcugccucc

SEQ ID NO: 1603548 - RNA, 14 nt, Human
ugggcagcugccuc

SEQ ID NO: 1603549 - RNA, 13 nt, Human
ugggcagcugccu

SEQ ID NO: 1603550 - RNA, 16 nt, Human
uggucccagccagcag

SEQ ID NO: 1603551 - RNA, 22 nt, Human
uggucacaggaaguagaggagg

SEQ ID NO: 1603552 - RNA, 13 nt, Human
ugguauguuuuca

SEQ ID NO: 1603553 - RNA, 21 nt, Human
ugguauguuuucaggcuagau

SEQ ID NO: 1603554 - RNA, 16 nt, Human
ugccacuaaauugaca

SEQ ID NO: 1603555 - RNA, 17 nt, Human
ugcaugguuuagaaagc

SEQ ID NO: 1603556 - RNA, 13 nt, Human
ugcaucagcugcu

SEQ ID NO: 1603557 - RNA, 19 nt, Human
ugcaucagcugcugaaaca

SEQ ID NO: 1603558 - RNA, 22 nt, Human
ugcaucaauuuuucuuauuuca

SEQ ID NO: 1603559 - RNA, 12 nt, Human
ugcaguucugaa

SEQ ID NO: 1603560 - RNA, 14 nt, Human
ugcaguucugaaga

SEQ ID NO: 1603561 - RNA, 16 nt, Human
ugcauagguuuagcag

SEQ ID NO: 1603562 - RNA, 18 nt, Human
ugcuagaacucccuuuca

SEQ ID NO: 1603563 - RNA, 13 nt, Human
ugcuagaacuccc

SEQ ID NO: 1603564 - RNA, 14 nt, Human
ugcuagaacucccu

SEQ ID NO: 1603565 - RNA, 15 nt, Human
ugcuagaacucccuu

SEQ ID NO: 1603566 - RNA, 17 nt, Human
ugcuagaacucccuuuc

SEQ ID NO: 1603567 - RNA, 20 nt, Human
ugcugggggggauuguaaaa

SEQ ID NO: 1603568 - RNA, 18 nt, Human
ugcuguguuaaauaaacc

SEQ ID NO: 1603569 - RNA, 11 nt, Human
ugcuguguuaa

SEQ ID NO: 1603570 - RNA, 13 nt, Human
ugauuauauguca

SEQ ID NO: 1603571 - RNA, 17 nt, Human
ugauuaugaauuacauu

SEQ ID NO: 1603572 - RNA, 19 nt, Human
ugauuaugaauuacauuug

SEQ ID NO: 1603573 - RNA, 22 nt, Human
ugauguuuagaaacacaacuau

SEQ ID NO: 1603574 - RNA, 21 nt, Human
ugauuaugaauuacauuugua

SEQ ID NO: 1603575 - RNA, 22 nt, Human
ugauuaugaauuacauuuguau

SEQ ID NO: 1603576 - RNA, 17 nt, Human
ugaucagcuuauugucu

SEQ ID NO: 1603577 - RNA, 24 nt, Human
ugaucagcuuauugucuagugaaa

SEQ ID NO: 1603578 - RNA, 14 nt, Human
ugaucuuuaaaaua

SEQ ID NO: 1603579 - RNA, 20 nt, Human
ugaugcuacaggauuugaaa

SEQ ID NO: 1603580 - RNA, 23 nt, Human
ugaugcuacaggauuugaaauug

SEQ ID NO: 1603581 - RNA, 17 nt, Human
ugaucuuuaaaauacac

SEQ ID NO: 1603582 - RNA, 18 nt, Human
ugauguguuuauuuauag

SEQ ID NO: 1603583 - RNA, 14 nt, Human
ugauguguuuauuu

SEQ ID NO: 1603584 - RNA, 18 nt, Human
ugaggcuccacuuggucu

SEQ ID NO: 1603585 - RNA, 20 nt, Human
ugaggcuccacuuggucugu

SEQ ID NO: 1603586 - RNA, 16 nt, Human
ugauaacuggaaacuu

SEQ ID NO: 1603587 - RNA, 16 nt, Human
ugagagugaacaaauu

SEQ ID NO: 1603588 - RNA, 23 nt, Human
ugagacguuuuuggaagaguagu

SEQ ID NO: 1603589 - RNA, 19 nt, Human
ucuuuccacagaagcucca

SEQ ID NO: 1603590 - RNA, 12 nt, Human
ucuuugccaagu

SEQ ID NO: 1603591 - RNA, 16 nt, Human
ugaaauauugacuuuu

SEQ ID NO: 1603592 - RNA, 20 nt, Human
ugaaaagcuccauuuuuagu

SEQ ID NO: 1603593 - RNA, 22 nt, Human
ugaaacaacaaauaggaauugu

SEQ ID NO: 1603594 - RNA, 16 nt, Human
ugaaagguacuucaaa

SEQ ID NO: 1603595 - RNA, 15 nt, Human
ugaaagguacuucaa

SEQ ID NO: 1603596 - RNA, 18 nt, Human
ugaaacccugucucuacu

SEQ ID NO: 1603597 - RNA, 18 nt, Human
ugaaagaggcagcuugaa

SEQ ID NO: 1603598 - RNA, 13 nt, Human
ugaaguccaagca

SEQ ID NO: 1603599 - RNA, 11 nt, Human
ugaaguccaag

SEQ ID NO: 1603600 - RNA, 15 nt, Human
ugaauuacauuugua

SEQ ID NO: 1603601 - RNA, 16 nt, Human
ugaauuacauuuguau

SEQ ID NO: 1603602 - RNA, 18 nt, Human
ugaauuacauuuguauaa

SEQ ID NO: 1603603 - RNA, 16 nt, Human
ugacaugggacauuug

SEQ ID NO: 1603604 - RNA, 17 nt, Human
ugacaugggacauuugc

SEQ ID NO: 1603605 - RNA, 18 nt, Human
ugacaugggacauuugcu

SEQ ID NO: 1603606 - RNA, 20 nt, Human
ugaccacugcagaagacagu

SEQ ID NO: 1603607 - RNA, 12 nt, Human
ugacaagcucac

SEQ ID NO: 1603608 - RNA, 15 nt, Human
ugacaagcucacaga

SEQ ID NO: 1603609 - RNA, 20 nt, Human
ugacaagcucacagaccuuu

SEQ ID NO: 1603610 - RNA, 16 nt, Human
ugacagaauauguuuc

SEQ ID NO: 1603611 - RNA, 17 nt, Human
uccuggcaauagucaaa

SEQ ID NO: 1603612 - RNA, 21 nt, Human
uccugaggcuccacuuggucu

SEQ ID NO: 1603613 - RNA, 19 nt, Human
uccugaggcuccacuuggu

SEQ ID NO: 1603614 - RNA, 20 nt, Human
uccugaggcuccacuugguc

SEQ ID NO: 1603615 - RNA, 17 nt, Human
uccugccccugagccca

SEQ ID NO: 1603616 - RNA, 18 nt, Human
uccugccccugagcccau

SEQ ID NO: 1603617 - RNA, 14 nt, Human
uccuagugaaagag

SEQ ID NO: 1603618 - RNA, 23 nt, Human
uccuagugaaagaggcagcuuga

SEQ ID NO: 1603619 - RNA, 23 nt, Human
ucucaguccaugaagauguagag

SEQ ID NO: 1603620 - RNA, 12 nt, Human
ucggagaagagc

SEQ ID NO: 1603621 - RNA, 14 nt, Human
ucggagaagagcug

SEQ ID NO: 1603622 - RNA, 16 nt, Human
ucggagaagagcuguu

SEQ ID NO: 1603623 - RNA, 17 nt, Human
ucuacacuaagagagaa

SEQ ID NO: 1603624 - RNA, 21 nt, Human
uccacuuggucugugagaugc

SEQ ID NO: 1603625 - RNA, 23 nt, Human
uccacuuggucugugagaugcua

SEQ ID NO: 1603626 - RNA, 20 nt, Human
uccaugggccauaugaaaag

SEQ ID NO: 1603627 - RNA, 15 nt, Human
uccauacauuugugu

SEQ ID NO: 1603628 - RNA, 19 nt, Human
uccagguagagggugugua

SEQ ID NO: 1603629 - RNA, 17 nt, Human
ucaucaaugaaugaaug

SEQ ID NO: 1603630 - RNA, 12 nt, Human
ucauagcagcuu

SEQ ID NO: 1603631 - RNA, 11 nt, Human
ucauagcagcu

SEQ ID NO: 1603632 - RNA, 16 nt, Human
ucauuaggauggcuag

SEQ ID NO: 1603633 - RNA, 14 nt, Human
uccaaagaaaugua

SEQ ID NO: 1603634 - RNA, 17 nt, Human
uccaaagaaauguaagg

SEQ ID NO: 1603635 - RNA, 16 nt, Human
uccaaaccaaauaaaa

SEQ ID NO: 1603636 - RNA, 22 nt, Human
uccaaaaagauuuucagaaaau

SEQ ID NO: 1603637 - RNA, 19 nt, Human
uauggaggcuuugcauaga

SEQ ID NO: 1603638 - RNA, 12 nt, Human
uauguuaaaacu

SEQ ID NO: 1603639 - RNA, 19 nt, Human
uauguuagugcaaauuguc

SEQ ID NO: 1603640 - RNA, 17 nt, Human
uauguucuaagaaguga

SEQ ID NO: 1603641 - RNA, 17 nt, Human
uauuauauuuacaaaug

SEQ ID NO: 1603642 - RNA, 16 nt, Human
uauuauguuaaaacug

SEQ ID NO: 1603643 - RNA, 12 nt, Human
uauuauguguuu

SEQ ID NO: 1603644 - RNA, 14 nt, Human
uauuucuaugaaau

SEQ ID NO: 1603645 - RNA, 15 nt, Human
uauuucuaugaaaua

SEQ ID NO: 1603646 - RNA, 13 nt, Human
uauuucuaugaaa

SEQ ID NO: 1603647 - RNA, 14 nt, Human
uauuuauuacugua

SEQ ID NO: 1603648 - RNA, 20 nt, Human
uauuguuuaaaaucauuucu

SEQ ID NO: 1603649 - RNA, 15 nt, Human
uauuguuuaaaauca

SEQ ID NO: 1603650 - RNA, 16 nt, Human
uauuguuuaaaaucau

SEQ ID NO: 1603651 - RNA, 17 nt, Human
uauuguuuaaaaucauu

SEQ ID NO: 1603652 - RNA, 14 nt, Human
uauuguguugugaa

SEQ ID NO: 1603653 - RNA, 23 nt, Human
uauugauaaguucauacauugua

SEQ ID NO: 1603654 - RNA, 16 nt, Human
uauugauaaguucaua

SEQ ID NO: 1603655 - RNA, 14 nt, Human
uauugauaaguuca

SEQ ID NO: 1603656 - RNA, 14 nt, Human
ucaauaaaauccau

SEQ ID NO: 1603657 - RNA, 22 nt, Human
ucacaagacccaaaaggcagaa

SEQ ID NO: 1603658 - RNA, 12 nt, Human
ucacauuuaaau

SEQ ID NO: 1603659 - RNA, 22 nt, Human
ucaacuccaaacugacucuuaa

SEQ ID NO: 1603660 - RNA, 22 nt, Human
ucaaacagucucaggaaaucaa

SEQ ID NO: 1603661 - RNA, 17 nt, Human
ucaaacauauauaacaa

SEQ ID NO: 1603662 - RNA, 16 nt, Human
ucaaauccuugaagau

SEQ ID NO: 1603663 - RNA, 18 nt, Human
ucaaauaugcaaagcacu

SEQ ID NO: 1603664 - RNA, 19 nt, Human
ucaaauaugcaaagcacug

SEQ ID NO: 1603665 - RNA, 17 nt, Human
ucaaauaugcaaagcac

SEQ ID NO: 1603666 - RNA, 15 nt, Human
ucaaagagagaaaau

SEQ ID NO: 1603667 - RNA, 20 nt, Human
ucaaagagagaaaauaaaga

SEQ ID NO: 1603668 - RNA, 13 nt, Human
uauauaacaaugc

SEQ ID NO: 1603669 - RNA, 13 nt, Human
uauaugcuucugu

SEQ ID NO: 1603670 - RNA, 16 nt, Human
uaggucagugcaaaua

SEQ ID NO: 1603671 - RNA, 12 nt, Human
uaggaauugacc

SEQ ID NO: 1603672 - RNA, 18 nt, Human
uaggccaugggacaggga

SEQ ID NO: 1603673 - RNA, 13 nt, Human
uagucaaauugug

SEQ ID NO: 1603674 - RNA, 14 nt, Human
uagucaaauugugu

SEQ ID NO: 1603675 - RNA, 14 nt, Human
uagugcaaauuguc

SEQ ID NO: 1603676 - RNA, 15 nt, Human
uagugcaaauuguca

SEQ ID NO: 1603677 - RNA, 13 nt, Human
uaguaucaaaaga

SEQ ID NO: 1603678 - RNA, 18 nt, Human
uaggugcuacaaaaacac

SEQ ID NO: 1603679 - RNA, 18 nt, Human
uaguauuucuaugaaaua

SEQ ID NO: 1603680 - RNA, 19 nt, Human
uaguauuucuaugaaauau

SEQ ID NO: 1603681 - RNA, 13 nt, Human
uaguaugaaauua

SEQ ID NO: 1603682 - RNA, 16 nt, Human
uaguauuucuaugaaa

SEQ ID NO: 1603683 - RNA, 23 nt, Human
uaguaugaaauuauauaaguauu

SEQ ID NO: 1603684 - RNA, 15 nt, Human
uaguaugaaauuaua

SEQ ID NO: 1603685 - RNA, 16 nt, Human
uaugauucccagccag

SEQ ID NO: 1603686 - RNA, 15 nt, Human
uaugcaaagcacuga

SEQ ID NO: 1603687 - RNA, 12 nt, Human
uaugcaaagcac

SEQ ID NO: 1603688 - RNA, 13 nt, Human
uaugcaaagcacu

SEQ ID NO: 1603689 - RNA, 14 nt, Human
uaugcaaagcacug

SEQ ID NO: 1603690 - RNA, 15 nt, Human
uaugcuucuguuuua

SEQ ID NO: 1603691 - RNA, 16 nt, Human
uaugcuucuguuuuau

SEQ ID NO: 1603692 - RNA, 15 nt, Human
uauccuucagccuga

SEQ ID NO: 1603693 - RNA, 14 nt, Human
uauccuucagccug

SEQ ID NO: 1603694 - RNA, 17 nt, Human
uauccuuucuaacaaaa

SEQ ID NO: 1603695 - RNA, 17 nt, Human
uaugaauuacauuugua

SEQ ID NO: 1603696 - RNA, 23 nt, Human
uaugaauuacauuuguauaaaau

SEQ ID NO: 1603697 - RNA, 22 nt, Human
uaugacauaaaaacaacuuuau

SEQ ID NO: 1603698 - RNA, 19 nt, Human
uaugacauaaaaacaacuu

SEQ ID NO: 1603699 - RNA, 23 nt, Human
uaugacauaaaaacaacuuuaua

SEQ ID NO: 1603700 - RNA, 18 nt, Human
gugcaaauugucacagga

SEQ ID NO: 1603701 - RNA, 16 nt, Human
gugacaagcucacaga

SEQ ID NO: 1603702 - RNA, 16 nt, Human
gugagcagucaggaaa

SEQ ID NO: 1603703 - RNA, 19 nt, Human
gugaaagaaaauaacaaua

SEQ ID NO: 1603704 - RNA, 20 nt, Human
gugaaacucguuaauuugua

SEQ ID NO: 1603705 - RNA, 15 nt, Human
gugaaaauuauuuug

SEQ ID NO: 1603706 - RNA, 12 nt, Human
gugaaaauuauu

SEQ ID NO: 1603707 - RNA, 17 nt, Human
gugaaaguacauuugga

SEQ ID NO: 1603708 - RNA, 17 nt, Human
gucuacacuaagagaga

SEQ ID NO: 1603709 - RNA, 23 nt, Human
gucuaagauaguaacaaugaaga

SEQ ID NO: 1603710 - RNA, 23 nt, Human
gucuacacuaagagagaaugaga

SEQ ID NO: 1603711 - RNA, 13 nt, Human
gucugacuguuuc

SEQ ID NO: 1603712 - RNA, 20 nt, Human
gucccagccagcaguucaga

SEQ ID NO: 1603713 - RNA, 14 nt, Human
gucaccucauggaa

SEQ ID NO: 1603714 - RNA, 15 nt, Human
gucaauaaaauccau

SEQ ID NO: 1603715 - RNA, 21 nt, Human
gucaauaaaauccauacauuu

SEQ ID NO: 1603716 - RNA, 16 nt, Human
guauuuuaaaagaaug

SEQ ID NO: 1603717 - RNA, 17 nt, Human
guauuuuaaaagaauga

SEQ ID NO: 1603718 - RNA, 18 nt, Human
guauuuuaaaagaaugau

SEQ ID NO: 1603719 - RNA, 17 nt, Human
guauuucuaugaaauau

SEQ ID NO: 1603720 - RNA, 22 nt, Human
guauuucuaugaaauauuaugu

SEQ ID NO: 1603721 - RNA, 21 nt, Human
guauuugagaguucuaaauuu

SEQ ID NO: 1603722 - RNA, 19 nt, Human
guauuugagaguucuaaau

SEQ ID NO: 1603723 - RNA, 21 nt, Human
ggugcuacaaaaacacagcaa

SEQ ID NO: 1603724 - RNA, 19 nt, Human
ggugcuacaaaaacacagc

SEQ ID NO: 1603725 - RNA, 22 nt, Human
gguacuucaaauccuugaagau

SEQ ID NO: 1603726 - RNA, 15 nt, Human
gguagacacacauga

SEQ ID NO: 1603727 - RNA, 22 nt, Human
gguagacacacaugaaguccaa

SEQ ID NO: 1603728 - RNA, 14 nt, Human
guaaaaccacagca

SEQ ID NO: 1603729 - RNA, 15 nt, Human
guaaaaccacagcag

SEQ ID NO: 1603730 - RNA, 16 nt, Human
guaaaaccacagcagu

SEQ ID NO: 1603731 - RNA, 18 nt, Human
guaaaaccacagcaguug

SEQ ID NO: 1603732 - RNA, 23 nt, Human
guaaaaccacagcaguugaaaag

SEQ ID NO: 1603733 - RNA, 17 nt, Human
guaagggaaacugccag

SEQ ID NO: 1603734 - RNA, 18 nt, Human
guaagggaaacugccagc

SEQ ID NO: 1603735 - RNA, 17 nt, Human
guaaauaguauuugaga

SEQ ID NO: 1603736 - RNA, 16 nt, Human
guaaauaguauuugag

SEQ ID NO: 1603737 - RNA, 15 nt, Human
guaaauaguauuuga

SEQ ID NO: 1603738 - RNA, 19 nt, Human
guaaugauaacuggaaacu

SEQ ID NO: 1603739 - RNA, 15 nt, Human
guaauuggaaaggca

SEQ ID NO: 1603740 - RNA, 14 nt, Human
guaauucaagaaaa

SEQ ID NO: 1603741 - RNA, 13 nt, Human
guaauucaagaaa

SEQ ID NO: 1603742 - RNA, 23 nt, Human
guacuuuauuuucuauaauuuaa

SEQ ID NO: 1603743 - RNA, 15 nt, Human
guagaggagaaacug

SEQ ID NO: 1603744 - RNA, 15 nt, Human
guaccgcaaugugac

SEQ ID NO: 1603745 - RNA, 15 nt, Human
guacgaagaguauuu

SEQ ID NO: 1603746 - RNA, 22 nt, Human
gccuauauuuuuuguuaaauga

SEQ ID NO: 1603747 - RNA, 17 nt, Human
gccuaagugcagccccg

SEQ ID NO: 1603748 - RNA, 23 nt, Human
gcccucuccugggcagcugccuc

SEQ ID NO: 1603749 - RNA, 22 nt, Human
gcccucuccugggcagcugccu

SEQ ID NO: 1603750 - RNA, 14 nt, Human
gcccucuccugggc

SEQ ID NO: 1603751 - RNA, 13 nt, Human
gcccucuccuggg

SEQ ID NO: 1603752 - RNA, 12 nt, Human
gcccucuccugg

SEQ ID NO: 1603753 - RNA, 20 nt, Human
gcuccauuuuuagugaaaua

SEQ ID NO: 1603754 - RNA, 14 nt, Human
gcuaagcauuccaa

SEQ ID NO: 1603755 - RNA, 17 nt, Human
gcuaagcaaaaugugau

SEQ ID NO: 1603756 - RNA, 11 nt, Human
gcucucuggcc

SEQ ID NO: 1603757 - RNA, 12 nt, Human
gcucucuggccu

SEQ ID NO: 1603758 - RNA, 13 nt, Human
gcucucuggccuu

SEQ ID NO: 1603759 - RNA, 14 nt, Human
gcucucuggccuuc

SEQ ID NO: 1603760 - RNA, 15 nt, Human
gcucucuggccuucg

SEQ ID NO: 1603761 - RNA, 19 nt, Human
gcucucuggccuucggccu

SEQ ID NO: 1603762 - RNA, 20 nt, Human
gcucucuggccuucggccuc

SEQ ID NO: 1603763 - RNA, 17 nt, Human
ggauuagggagagaaga

SEQ ID NO: 1603764 - RNA, 15 nt, Human
ggauuguaaaauggu

SEQ ID NO: 1603765 - RNA, 14 nt, Human
ggcauggcugggaa

SEQ ID NO: 1603766 - RNA, 20 nt, Human
gcugucuacacuaagagaga

SEQ ID NO: 1603767 - RNA, 17 nt, Human
ggaaaucaaauaugcaa

SEQ ID NO: 1603768 - RNA, 14 nt, Human
gcuuuaucaaaggg

SEQ ID NO: 1603769 - RNA, 15 nt, Human
ggagaaucacuugaa

SEQ ID NO: 1603770 - RNA, 19 nt, Human
ggagaaucacuugaacccg

SEQ ID NO: 1603771 - RNA, 15 nt, Human
ggacgcucucuggcc

SEQ ID NO: 1603772 - RNA, 13 nt, Human
ggacgcucucugg

SEQ ID NO: 1603773 - RNA, 14 nt, Human
ggacgcucucuggc

SEQ ID NO: 1603774 - RNA, 16 nt, Human
ggacauuugcucaugg

SEQ ID NO: 1603775 - RNA, 20 nt, Human
ggaagugacgguuuaauggg

SEQ ID NO: 1603776 - RNA, 16 nt, Human
ggaauuggagcucgug

SEQ ID NO: 1603777 - RNA, 22 nt, Human
ggaauuggagcucgugggacag

SEQ ID NO: 1603778 - RNA, 23 nt, Human
ggaauuucucccagucauuuaau

SEQ ID NO: 1603779 - RNA, 14 nt, Human
ggaaugcuguguua

SEQ ID NO: 1603780 - RNA, 19 nt, Human
gaggcagagguugcaguga

SEQ ID NO: 1603781 - RNA, 22 nt, Human
gauaaauggcuuccuggcaaua

SEQ ID NO: 1603782 - RNA, 19 nt, Human
gagugucuuaauuaaaaga

SEQ ID NO: 1603783 - RNA, 18 nt, Human
gaguguacuuaacuauuc

SEQ ID NO: 1603784 - RNA, 19 nt, Human
gcacuguggguagacacac

SEQ ID NO: 1603785 - RNA, 15 nt, Human
gcacugacuucuaag

SEQ ID NO: 1603786 - RNA, 18 nt, Human
gcacugacuucuaaguaa

SEQ ID NO: 1603787 - RNA, 14 nt, Human
gcaauuucauaugc

SEQ ID NO: 1603788 - RNA, 18 nt, Human
gaugcuagaacucccuuu

SEQ ID NO: 1603789 - RNA, 20 nt, Human
gaugcuagaacucccuuuca

SEQ ID NO: 1603790 - RNA, 22 nt, Human
gaugcuagaacucccuuucaac

SEQ ID NO: 1603791 - RNA, 22 nt, Human
gaugguucccuugaugaagaag

SEQ ID NO: 1603792 - RNA, 16 nt, Human
gcaaauugucacagga

SEQ ID NO: 1603793 - RNA, 23 nt, Human
gcaaagcacugacuucuaaguaa

SEQ ID NO: 1603794 - RNA, 21 nt, Human
gcaaagcugaugacaacuucc

SEQ ID NO: 1603795 - RNA, 17 nt, Human
gacaugggacauuugcu

SEQ ID NO: 1603796 - RNA, 16 nt, Human
gacaugggacauuugc

SEQ ID NO: 1603797 - RNA, 21 nt, Human
gaccacugcagaagacaguau

SEQ ID NO: 1603798 - RNA, 16 nt, Human
gacccaaaaggcagaa

SEQ ID NO: 1603799 - RNA, 15 nt, Human
gacccacaagaaaug

SEQ ID NO: 1603800 - RNA, 22 nt, Human
gacccacaagaaaugaaagcag

SEQ ID NO: 1603801 - RNA, 20 nt, Human
gacauagaauuaacacauga

SEQ ID NO: 1603802 - RNA, 18 nt, Human
gacagggaggacgcucuc

SEQ ID NO: 1603803 - RNA, 17 nt, Human
gacagggaggacgcucu

SEQ ID NO: 1603804 - RNA, 16 nt, Human
gacaaggaaaaaauaa

SEQ ID NO: 1603805 - RNA, 13 nt, Human
gacacaacuauuu

SEQ ID NO: 1603806 - RNA, 18 nt, Human
gaaucucauaauuuauac

SEQ ID NO: 1603807 - RNA, 14 nt, Human
gaaugcuguguuaa

SEQ ID NO: 1603808 - RNA, 13 nt, Human
gaaugcuguguua

SEQ ID NO: 1603809 - RNA, 19 nt, Human
gaaucucauaauuuauaca

SEQ ID NO: 1603810 - RNA, 14 nt, Human
gaauguuaagcaga

SEQ ID NO: 1603811 - RNA, 15 nt, Human
gaauguuaagcagau

SEQ ID NO: 1603812 - RNA, 16 nt, Human
gaauuggagcucgugg

SEQ ID NO: 1603813 - RNA, 16 nt, Human
gaauugacccacaaga

SEQ ID NO: 1603814 - RNA, 21 nt, Human
gaauugacccacaagaaauga

SEQ ID NO: 1603815 - RNA, 18 nt, Human
gaauucuugaaggaaaau

SEQ ID NO: 1603816 - RNA, 17 nt, Human
gagaaugagagacacac

SEQ ID NO: 1603817 - RNA, 13 nt, Human
gagaagagcuguu

SEQ ID NO: 1603818 - RNA, 22 nt, Human
gagaacuuccagauccuggaaa

SEQ ID NO: 1603819 - RNA, 23 nt, Human
gagaacuuccagauccuggaaau

SEQ ID NO: 1603820 - RNA, 21 nt, Human
gagaaccuagggugauauuaa

SEQ ID NO: 1603821 - RNA, 22 nt, Human
gagaaccuagggugauauuaac

SEQ ID NO: 1603822 - RNA, 16 nt, Human
gacuucuaaguaaaac

SEQ ID NO: 1603823 - RNA, 17 nt, Human
gacuucuaaguaaaacc

SEQ ID NO: 1603824 - RNA, 18 nt, Human
gacuucuaaguaaaacca

SEQ ID NO: 1603825 - RNA, 24 nt, Human
gacuucuaaguaaaaccacagcag

SEQ ID NO: 1603826 - RNA, 19 nt, Human
gacuucuaaguaaaaccac

SEQ ID NO: 1603827 - RNA, 23 nt, Human
gacuucuaaguaaaaccacagca

SEQ ID NO: 1603828 - RNA, 20 nt, Human
gacuucugucuucacaacag

SEQ ID NO: 1603829 - RNA, 23 nt, Human
gacuucugucuucacaacagauu

SEQ ID NO: 1603830 - RNA, 24 nt, Human
gacugcauuauauuuauuacugua

SEQ ID NO: 1603831 - RNA, 14 nt, Human
gacugcauuauauu

SEQ ID NO: 1603832 - RNA, 16 nt, Human
gacugcauuauauuua

SEQ ID NO: 1603833 - RNA, 16 nt, Human
gacuccaaagaaaugu

SEQ ID NO: 1603834 - RNA, 18 nt, Human
gacuccaaagaaauguaa

SEQ ID NO: 1603835 - RNA, 21 nt, Human
gacucauuuuaaaaaauggaa

SEQ ID NO: 1603836 - RNA, 11 nt, Human
gacuccaaaga

SEQ ID NO: 1603837 - RNA, 12 nt, Human
gacuccaaagaa

SEQ ID NO: 1603838 - RNA, 15 nt, Human
gacuccaaagaaaug

SEQ ID NO: 1603839 - RNA, 20 nt, Human
gagaaugagagacacacuga

SEQ ID NO: 1603840 - RNA, 21 nt, Human
gagaaugagagacacacugaa

SEQ ID NO: 1603841 - RNA, 20 nt, Human
gagacagcucugcauacuca

SEQ ID NO: 1603842 - RNA, 15 nt, Human
gagaguagaacagau

SEQ ID NO: 1603843 - RNA, 21 nt, Human
cuggcacaguuuucugagaaa

SEQ ID NO: 1603844 - RNA, 22 nt, Human
cuggcacaguuuucugagaaag

SEQ ID NO: 1603845 - RNA, 22 nt, Human
cuggccuucggccuccauccug

SEQ ID NO: 1603846 - RNA, 23 nt, Human
cuggccuucggccuccauccuga

SEQ ID NO: 1603847 - RNA, 16 nt, Human
cuggagcucugcccau

SEQ ID NO: 1603848 - RNA, 13 nt, Human
cuggagcucugcc

SEQ ID NO: 1603849 - RNA, 21 nt, Human
cugcccucuccugggcagcug

SEQ ID NO: 1603850 - RNA, 20 nt, Human
cugcccucuccugggcagcu

SEQ ID NO: 1603851 - RNA, 19 nt, Human
cugcccucuccugggcagc

SEQ ID NO: 1603852 - RNA, 18 nt, Human
cugcccucuccugggcag

SEQ ID NO: 1603853 - RNA, 16 nt, Human
cugcccucuccugggc

SEQ ID NO: 1603854 - RNA, 13 nt, Human
cugccuccccucc

SEQ ID NO: 1603855 - RNA, 14 nt, Human
cugccuccccuccu

SEQ ID NO: 1603856 - RNA, 22 nt, Human
cugggggggauuguaaaauggu

SEQ ID NO: 1603857 - RNA, 23 nt, Human
cuguaaucacagcuacuugggag

SEQ ID NO: 1603858 - RNA, 22 nt, Human
cuguauuuuaaaagaaugauua

SEQ ID NO: 1603859 - RNA, 20 nt, Human
cuguauuuuaaaagaaugau

SEQ ID NO: 1603860 - RNA, 21 nt, Human
cuguuaaaagaugaaaauauu

SEQ ID NO: 1603861 - RNA, 23 nt, Human
cuguuaaaagaugaaaauauuug

SEQ ID NO: 1603862 - RNA, 20 nt, Human
cuguuaaaagaugaaaauau

SEQ ID NO: 1603863 - RNA, 18 nt, Human
cuucugucuucacaacag

SEQ ID NO: 1603864 - RNA, 21 nt, Human
cuucugucuucacaacagauu

SEQ ID NO: 1603865 - RNA, 22 nt, Human
cuucugucuucacaacagauua

SEQ ID NO: 1603866 - RNA, 14 nt, Human
cuugaacccgggag

SEQ ID NO: 1603867 - RNA, 14 nt, Human
cuucugugaaagua

SEQ ID NO: 1603868 - RNA, 19 nt, Human
cuuauaggaauugacccac

SEQ ID NO: 1603869 - RNA, 22 nt, Human
cuuagaugcaguucugaagaag

SEQ ID NO: 1603870 - RNA, 14 nt, Human
cuuauuucauuucu

SEQ ID NO: 1603871 - RNA, 15 nt, Human
cuuauuucauuucuu

SEQ ID NO: 1603872 - RNA, 13 nt, Human
cuucccuuucugc

SEQ ID NO: 1603873 - RNA, 16 nt, Human
cuuucugcuuguguua

SEQ ID NO: 1603874 - RNA, 17 nt, Human
cuuguacuuuauuuucu

SEQ ID NO: 1603875 - RNA, 23 nt, Human
cuugucaauaaaauccauacauu

SEQ ID NO: 1603876 - RNA, 19 nt, Human
cuugaguuuaaauuguaau

SEQ ID NO: 1603877 - RNA, 22 nt, Human
cuuuaucaaagggugaaaauua

SEQ ID NO: 1603878 - RNA, 21 nt, Human
cuuuaucaaagggugaaaauu

SEQ ID NO: 1603879 - RNA, 21 nt, Human
gaaagcuugcccuggugccuc

SEQ ID NO: 1603880 - RNA, 14 nt, Human
gaaagcagggacuu

SEQ ID NO: 1603881 - RNA, 22 nt, Human
gaaagcagaacagugauuacca

SEQ ID NO: 1603882 - RNA, 17 nt, Human
gaaagcagaacagugau

SEQ ID NO: 1603883 - RNA, 20 nt, Human
gaaagaggcagcuugaaacu

SEQ ID NO: 1603884 - RNA, 21 nt, Human
gaaagaggaaugaaguacuca

SEQ ID NO: 1603885 - RNA, 17 nt, Human
gaaagagaacuuccaga

SEQ ID NO: 1603886 - RNA, 23 nt, Human
gaaacucguuaauuuguaguguu

SEQ ID NO: 1603887 - RNA, 14 nt, Human
gaaacccugucucu

SEQ ID NO: 1603888 - RNA, 16 nt, Human
gaaacacaacuauauu

SEQ ID NO: 1603889 - RNA, 20 nt, Human
gaaaaugauacgcaacauaa

SEQ ID NO: 1603890 - RNA, 18 nt, Human
gaaaaucuuauaauuuaa

SEQ ID NO: 1603891 - RNA, 22 nt, Human
gaaaaucuacacuccagugaga

SEQ ID NO: 1603892 - RNA, 18 nt, Human
gaaaauauuuguaucaca

SEQ ID NO: 1603893 - RNA, 21 nt, Human
gaaaauauuauguguuuccau

SEQ ID NO: 1603894 - RNA, 17 nt, Human
ccugccccugagcccau

SEQ ID NO: 1603895 - RNA, 13 nt, Human
ccugaaagaggaa

SEQ ID NO: 1603896 - RNA, 17 nt, Human
ccugaggcuccacuugg

SEQ ID NO: 1603897 - RNA, 13 nt, Human
ccugaggcuccac

SEQ ID NO: 1603898 - RNA, 14 nt, Human
ccugaggcuccacu

SEQ ID NO: 1603899 - RNA, 14 nt, Human
ccugggcagcugcc

SEQ ID NO: 1603900 - RNA, 13 nt, Human
ccugggcagcugc

SEQ ID NO: 1603901 - RNA, 17 nt, Human
ccuucggccuccauccu

SEQ ID NO: 1603902 - RNA, 19 nt, Human
ccuucggccuccauccuga

SEQ ID NO: 1603903 - RNA, 18 nt, Human
ccuucggccuccauccug

SEQ ID NO: 1603904 - RNA, 15 nt, Human
ccuuggacucauuuu

SEQ ID NO: 1603905 - RNA, 22 nt, Human
cucaggaaaucaaauaugcaaa

SEQ ID NO: 1603906 - RNA, 14 nt, Human
cuccccucggagaa

SEQ ID NO: 1603907 - RNA, 12 nt, Human
cucauuuccaag

SEQ ID NO: 1603908 - RNA, 13 nt, Human
cucauuuccaagc

SEQ ID NO: 1603909 - RNA, 14 nt, Human
cucauuuccaagca

SEQ ID NO: 1603910 - RNA, 17 nt, Human
cucauuuccaagcaagu

SEQ ID NO: 1603911 - RNA, 21 nt, Human
cucauaaaaagccugcaauuu

SEQ ID NO: 1603912 - RNA, 12 nt, Human
cucaaauuugga

SEQ ID NO: 1603913 - RNA, 19 nt, Human
cuaugaaauauuauguuaa

SEQ ID NO: 1603914 - RNA, 13 nt, Human
cuauaauuuaaau

SEQ ID NO: 1603915 - RNA, 12 nt, Human
cuauaauuuaaa

SEQ ID NO: 1603916 - RNA, 21 nt, Human
cuauucaggagaguagaacag

SEQ ID NO: 1603917 - RNA, 18 nt, Human
cuagaguuuagcuggaaa

SEQ ID NO: 1603918 - RNA, 19 nt, Human
cuagaguuuagcuggaaaa

SEQ ID NO: 1603919 - RNA, 15 nt, Human
cuauaggugcuacaa

SEQ ID NO: 1603920 - RNA, 14 nt, Human
cuaggaaauauuua

SEQ ID NO: 1603921 - RNA, 15 nt, Human
cuaggaaauauuuau

SEQ ID NO: 1603922 - RNA, 19 nt, Human
cuaggaaauauuuauuuua

SEQ ID NO: 1603923 - RNA, 20 nt, Human
cuaggaaauauuuauuuuaa

SEQ ID NO: 1603924 - RNA, 22 nt, Human
cuagcuaauguaauaacuguga

SEQ ID NO: 1603925 - RNA, 22 nt, Human
cuaggaaauauuuauuuuaaua

SEQ ID NO: 1603926 - RNA, 19 nt, Human
cuaaguaaaaccacagcag

SEQ ID NO: 1603927 - RNA, 14 nt, Human
cuaaguaaaaccac

SEQ ID NO: 1603928 - RNA, 18 nt, Human
cuaaguaaaaccacagca

SEQ ID NO: 1603929 - RNA, 21 nt, Human
cuaagcuucacuguaaaauaa

SEQ ID NO: 1603930 - RNA, 23 nt, Human
cuacacgagauacagaauuuuau

SEQ ID NO: 1603931 - RNA, 14 nt, Human
cuacacuaagagag

SEQ ID NO: 1603932 - RNA, 20 nt, Human
cgggaggcagagguugcagu

SEQ ID NO: 1603933 - RNA, 19 nt, Human
cuaaauugacacuuaaaaa

SEQ ID NO: 1603934 - RNA, 13 nt, Human
cuaaauuuuauau

SEQ ID NO: 1603935 - RNA, 16 nt, Human
cuaaauuuuauaucuu

SEQ ID NO: 1603936 - RNA, 15 nt, Human
cuaaauuuuauaucu

SEQ ID NO: 1603937 - RNA, 20 nt, Human
cuaaauuuuauaucuuguag

SEQ ID NO: 1603938 - RNA, 14 nt, Human
cuaagagagaauga

SEQ ID NO: 1603939 - RNA, 15 nt, Human
cuaagagagaaugag

SEQ ID NO: 1603940 - RNA, 16 nt, Human
cuaagauaguaacaau

SEQ ID NO: 1603941 - RNA, 17 nt, Human
ccccuccucugcuugcc

SEQ ID NO: 1603942 - RNA, 14 nt, Human
ccccuccucugcuu

SEQ ID NO: 1603943 - RNA, 13 nt, Human
ccccuccucugcu

SEQ ID NO: 1603944 - RNA, 15 nt, Human
ccccucggagaagag

SEQ ID NO: 1603945 - RNA, 15 nt, Human
cccuugaugaagaag

SEQ ID NO: 1603946 - RNA, 12 nt, Human
cccucccuccac

SEQ ID NO: 1603947 - RNA, 22 nt, Human
cccucuccugggcagcugccuc

SEQ ID NO: 1603948 - RNA, 21 nt, Human
cccucuccugggcagcugccu

SEQ ID NO: 1603949 - RNA, 20 nt, Human
cccucuccugggcagcugcc

SEQ ID NO: 1603950 - RNA, 23 nt, Human
cccucuccugggcagcugccucc

SEQ ID NO: 1603951 - RNA, 15 nt, Human
ccuaacgaaguaucc

SEQ ID NO: 1603952 - RNA, 14 nt, Human
ccagacaucaacag

SEQ ID NO: 1603953 - RNA, 15 nt, Human
ccacugguucuucuu

SEQ ID NO: 1603954 - RNA, 21 nt, Human
ccaccucccugcaauaaaaug

SEQ ID NO: 1603955 - RNA, 19 nt, Human
ccaccucccugcaauaaaa

SEQ ID NO: 1603956 - RNA, 15 nt, Human
ccaccucccugcaau

SEQ ID NO: 1603957 - RNA, 20 nt, Human
ccagguagaggguguguaag

SEQ ID NO: 1603958 - RNA, 20 nt, Human
ccauccugaggcuccacuug

SEQ ID NO: 1603959 - RNA, 18 nt, Human
ccauccugaggcuccacu

SEQ ID NO: 1603960 - RNA, 12 nt, Human
ccaggugccagu

SEQ ID NO: 1603961 - RNA, 13 nt, Human
ccaggugccaguu

SEQ ID NO: 1603962 - RNA, 23 nt, Human
ccagugaauucuugaaggaaaau

SEQ ID NO: 1603963 - RNA, 17 nt, Human coronavirus OC43 [HCoV-OC43]
acuaguuauauuaauga

SEQ ID NO: 1603964 - RNA, 15 nt, Human coronavirus OC43 [HCoV-OC43]
caacuugauguguau

SEQ ID NO: 1603965 - RNA, 14 nt, Human coronavirus OC43 [HCoV-OC43]
ucuauuuauguguu

SEQ ID NO: 1603966 - RNA, 19 nt, Human coronavirus OC43 [HCoV-OC43]
ccagcauugcuauuucgga

SEQ ID NO: 1603967 - RNA, 21 nt, Human coronavirus OC43 [HCoV-OC43]
acagacauaauucuugguguu

SEQ ID NO: 1603968 - RNA, 16 nt, Human coronavirus OC43 [HCoV-OC43]
guacagguuguugauu

SEQ ID NO: 1603969 - RNA, 17 nt, Human coronavirus OC43 [HCoV-OC43]
auaaaggcuuguuuuau

SEQ ID NO: 1603970 - RNA, 18 nt, Human coronavirus OC43 [HCoV-OC43]
agaacucgcacccacagc

SEQ ID NO: 1603971 - RNA, 16 nt, Human coronavirus OC43 [HCoV-OC43]
aggcagacucauuuac

SEQ ID NO: 1603972 - RNA, 17 nt, Human coronavirus OC43 [HCoV-OC43]
guagagccaauucuggc

SEQ ID NO: 1603973 - RNA, 15 nt, Human coronavirus OC43 [HCoV-OC43]
guaugaugaauauga

SEQ ID NO: 1603974 - RNA, 15 nt, Human coronavirus OC43 [HCoV-OC43]
uugaauaauguguau

SEQ ID NO: 1603975 - RNA, 22 nt, Human coronavirus OC43 [HCoV-OC43]
ugcaggaucgcguaguagagcc

SEQ ID NO: 1603976 - RNA, 13 nt, Human coronavirus OC43 [HCoV-OC43]
gaagcugauuuuu

SEQ ID NO: 1603977 - RNA, 19 nt, Human coronavirus OC43 [HCoV-OC43]
caggaguuaaauguuuaug

SEQ ID NO: 1603978 - RNA, 12 nt, Human coronavirus OC43 [HCoV-OC43]
cagugcccaaaa

SEQ ID NO: 1603979 - RNA, 22 nt, Human coronavirus OC43 [HCoV-OC43]
guaucagguuguuuauuagaac

SEQ ID NO: 1603980 - RNA, 22 nt, Human coronavirus OC43 [HCoV-OC43]
uauaaguguugcagugcccaaa

SEQ ID NO: 1603981 - RNA, 22 nt, Human coronavirus OC43 [HCoV-OC43]
auuucaaaugagcuauuguuaa

SEQ ID NO: 1603982 - RNA, 16 nt, Human coronavirus OC43 [HCoV-OC43]
uuaauuucaauguaga

SEQ ID NO: 1603983 - RNA, 18 nt, Human coronavirus OC43 [HCoV-OC43]
uacaggaaaaguuuucau

SEQ ID NO: 1603984 - RNA, 14 nt, Human coronavirus OC43 [HCoV-OC43]
uuuuaugcauauuu

SEQ ID NO: 1603985 - RNA, 19 nt, Human coronavirus OC43 [HCoV-OC43]
gauuauauaaauguuacau

SEQ ID NO: 1603986 - RNA, 13 nt, Human coronavirus OC43 [HCoV-OC43]
augcauaguuuua

SEQ ID NO: 1603987 - RNA, 18 nt, Human coronavirus OC43 [HCoV-OC43]
gcagacucuuguuuacaa

SEQ ID NO: 1603988 - RNA, 16 nt, Human coronavirus OC43 [HCoV-OC43]
uacuaaguaugucaca

SEQ ID NO: 1603989 - RNA, 19 nt, Human coronavirus OC43 [HCoV-OC43]
auuaugcagcauguaaauc

SEQ ID NO: 1603990 - RNA, 22 nt, Human coronavirus OC43 [HCoV-OC43]
agagaguugacugcagaggaca

SEQ ID NO: 1603991 - RNA, 17 nt, Human coronavirus OC43 [HCoV-OC43]
acagcucuuuguaaauc

SEQ ID NO: 1603992 - RNA, 21 nt, Human coronavirus OC43 [HCoV-OC43]
acacugguaaaauuuagugca

SEQ ID NO: 1603993 - RNA, 18 nt, Human coronavirus OC43 [HCoV-OC43]
gauuauuuguauuuucau

SEQ ID NO: 1603994 - RNA, 22 nt, Human coronavirus OC43 [HCoV-OC43]
uuauauggaccuuaauccuguu

SEQ ID NO: 1603995 - RNA, 16 nt, Human coronavirus OC43 [HCoV-OC43]
acccccauaauuauuc

SEQ ID NO: 1603996 - RNA, 14 nt, Human coronavirus OC43 [HCoV-OC43]
auuaguugaaaguu

SEQ ID NO: 1603997 - RNA, 21 nt, Human coronavirus OC43 [HCoV-OC43]
aaagcuccuaaaaauuucugu

SEQ ID NO: 1603998 - RNA, 17 nt, Human coronavirus OC43 [HCoV-OC43]
gucccagcuacugaagc

SEQ ID NO: 1603999 - RNA, 19 nt, Human coronavirus OC43 [HCoV-OC43]
cucucuaucagaauggaug

SEQ ID NO: 1604000 - RNA, 19 nt, Human coronavirus OC43 [HCoV-OC43]
caguguuuugguaagagag

SEQ ID NO: 1604001 - RNA, 13 nt, Human coronavirus OC43 [HCoV-OC43]
cuugauguggaug

SEQ ID NO: 1604002 - RNA, 12 nt, Human coronavirus OC43 [HCoV-OC43]
agggaagagcca

SEQ ID NO: 1604003 - RNA, 20 nt, Human coronavirus OC43 [HCoV-OC43]
guaauccaaacauuaugagu

SEQ ID NO: 1604004 - RNA, 16 nt, Human coronavirus OC43 [HCoV-OC43]
caggaguuaaauguuu

SEQ ID NO: 1604005 - RNA, 18 nt, Human coronavirus OC43 [HCoV-OC43]
aggugguuuguaugaaau

SEQ ID NO: 1604006 - RNA, 19 nt, Human coronavirus OC43 [HCoV-OC43]
gguuuuaaugucucagaau

SEQ ID NO: 1604007 - RNA, 20 nt, Human coronavirus OC43 [HCoV-OC43]
uuugauaaaguaaaguuauc

SEQ ID NO: 1604008 - RNA, 19 nt, Human coronavirus OC43 [HCoV-OC43]
gaugcaacuaauucugcuu

SEQ ID NO: 1604009 - RNA, 23 nt, Human coronavirus OC43 [HCoV-OC43]
uuuaacggcaaguuuuugucgaa

SEQ ID NO: 1604010 - RNA, 23 nt, Human coronavirus OC43 [HCoV-OC43]
aucagaauggaugucuugcugcu

SEQ ID NO: 1604011 - RNA, 20 nt, Human coronavirus OC43 [HCoV-OC43]
aggcacucucuaucagaaug

SEQ ID NO: 1604012 - RNA, 14 nt, Human coronavirus OC43 [HCoV-OC43]
ggaaaauguugauu

SEQ ID NO: 1604013 - RNA, 15 nt, Human coronavirus OC43 [HCoV-OC43]
guaugagugauuuua

SEQ ID NO: 1604014 - RNA, 20 nt, Human coronavirus OC43 [HCoV-OC43]
aauuguuugggguuuuauga

SEQ ID NO: 1604015 - RNA, 14 nt, Human coronavirus OC43 [HCoV-OC43]
agccccgccagaag

SEQ ID NO: 1604016 - RNA, 16 nt, Human coronavirus OC43 [HCoV-OC43]
agucaauauuauuuua

SEQ ID NO: 1604017 - RNA, 15 nt, Human coronavirus OC43 [HCoV-OC43]
uagugacccacaguu

SEQ ID NO: 1604018 - RNA, 16 nt, Human coronavirus OC43 [HCoV-OC43]
gaggcaauucuuguac

SEQ ID NO: 1604019 - RNA, 15 nt, Human coronavirus OC43 [HCoV-OC43]
ccauuauuaugugga

SEQ ID NO: 1604020 - RNA, 19 nt, Human coronavirus OC43 [HCoV-OC43]
guagagcguccucuggaaa

SEQ ID NO: 1604021 - RNA, 19 nt, Human coronavirus OC43 [HCoV-OC43]
agacaggaguuaaauguuu

SEQ ID NO: 1604022 - RNA, 22 nt, Human coronavirus OC43 [HCoV-OC43]
ggaugccacuaaaccucagcaa

SEQ ID NO: 1604023 - RNA, 15 nt, Human coronavirus OC43 [HCoV-OC43]
guggucauaagaaug

SEQ ID NO: 1604024 - RNA, 15 nt, Human coronavirus OC43 [HCoV-OC43]
uaauauuuuugcuaa

SEQ ID NO: 1604025 - RNA, 13 nt, Human coronavirus OC43 [HCoV-OC43]
uguucuacugauu

SEQ ID NO: 1604026 - RNA, 18 nt, Human coronavirus OC43 [HCoV-OC43]
auaagccccgccagaaga

SEQ ID NO: 1604027 - RNA, 20 nt, Human coronavirus OC43 [HCoV-OC43]
agcuccuaaaaauuucuguc

SEQ ID NO: 1604028 - RNA, 19 nt, Human coronavirus OC43 [HCoV-OC43]
aguagagcguccucuggaa

SEQ ID NO: 1604029 - RNA, 18 nt, Human coronavirus OC43 [HCoV-OC43]
ugagcccuauacugaaga

SEQ ID NO: 1604030 - RNA, 23 nt, Human coronavirus OC43 [HCoV-OC43]
aggcgaaggucaacaaauuauuu

SEQ ID NO: 1604031 - RNA, 15 nt, Human coronavirus OC43 [HCoV-OC43]
acagacacugguguu

SEQ ID NO: 1604032 - RNA, 14 nt, Human coronavirus OC43 [HCoV-OC43]
aaauguuuuugcuu

SEQ ID NO: 1604033 - RNA, 17 nt, Human coronavirus OC43 [HCoV-OC43]
ugcccaagggaagagcc

SEQ ID NO: 1604034 - RNA, 13 nt, Human coronavirus OC43 [HCoV-OC43]
cuagguacuggcu

SEQ ID NO: 1604035 - RNA, 16 nt, Human coronavirus OC43 [HCoV-OC43]
ucauaagaauggacaa

SEQ ID NO: 1604036 - RNA, 20 nt, Human coronavirus OC43 [HCoV-OC43]
uaaauacuacguuguuucuu

SEQ ID NO: 1604037 - RNA, 23 nt, Human coronavirus OC43 [HCoV-OC43]
cauuaugauaaauauuuuggagu

SEQ ID NO: 1604038 - RNA, 14 nt, Human coronavirus OC43 [HCoV-OC43]
gcauccucaagugg

SEQ ID NO: 1604039 - RNA, 14 nt, Human coronavirus OC43 [HCoV-OC43]
accaagguuauuaa

SEQ ID NO: 1604040 - RNA, 16 nt, Human coronavirus OC43 [HCoV-OC43]
ugugguaguacaacca

SEQ ID NO: 1604041 - RNA, 14 nt, Human coronavirus OC43 [HCoV-OC43]
acuaggcugcauga

SEQ ID NO: 1604042 - RNA, 17 nt, Human coronavirus OC43 [HCoV-OC43]
cuauguugguguuuaug

SEQ ID NO: 1604043 - RNA, 20 nt, Human coronavirus OC43 [HCoV-OC43]
aagugaaagacuugcggaag

SEQ ID NO: 1604044 - RNA, 19 nt, Human coronavirus OC43 [HCoV-OC43]
guuuauuagaacuggaagu

SEQ ID NO: 1604045 - RNA, 17 nt, Human coronavirus OC43 [HCoV-OC43]
aagucgcaguauguuug

SEQ ID NO: 1604046 - RNA, 19 nt, Human coronavirus OC43 [HCoV-OC43]
uauauugaaggcucaggaa

SEQ ID NO: 1604047 - RNA, 14 nt, Human coronavirus OC43 [HCoV-OC43]
uugcgauuguaauu

SEQ ID NO: 1604048 - RNA, 16 nt, Human coronavirus OC43 [HCoV-OC43]
gaugugaaugcugauu

SEQ ID NO: 1604049 - RNA, 16 nt, Human coronavirus OC43 [HCoV-OC43]
uucuaaugguaaucuc

SEQ ID NO: 1604050 - RNA, 21 nt, Human coronavirus OC43 [HCoV-OC43]
caagaaauucuaucuagacuu

SEQ ID NO: 1604051 - RNA, 22 nt, Human coronavirus OC43 [HCoV-OC43]
cuugguguuuguguuaauuaug

SEQ ID NO: 1604052 - RNA, 12 nt, Human coronavirus OC43 [HCoV-OC43]
gauuauuauuau

SEQ ID NO: 1604053 - RNA, 19 nt, Human coronavirus OC43 [HCoV-OC43]
gcagaauuuaucugggaau

SEQ ID NO: 1604054 - RNA, 19 nt, Human coronavirus OC43 [HCoV-OC43]
guaccacuuuguauuuuua

SEQ ID NO: 1604055 - RNA, 20 nt, Human coronavirus OC43 [HCoV-OC43]
gauuguguauuuugugaaua

SEQ ID NO: 1604056 - RNA, 17 nt, Human coronavirus OC43 [HCoV-OC43]
uaaugguauuuuugcua

SEQ ID NO: 1604057 - RNA, 14 nt, Human coronavirus OC43 [HCoV-OC43]
aucauauugcaauu

SEQ ID NO: 1604058 - RNA, 20 nt, Human coronavirus OC43 [HCoV-OC43]
uaauuauggccaauuggaag

SEQ ID NO: 1604059 - RNA, 15 nt, Human coronavirus OC43 [HCoV-OC43]
auuauuguaguuuug

SEQ ID NO: 1604060 - RNA, 14 nt, Human coronavirus OC43 [HCoV-OC43]
aaagugauuauugu

SEQ ID NO: 1604061 - RNA, 20 nt, Human coronavirus OC43 [HCoV-OC43]
gcucuccuaaaguuacuauu

SEQ ID NO: 1604062 - RNA, 16 nt, Human coronavirus OC43 [HCoV-OC43]
gccacuaaaccucagc

SEQ ID NO: 1604063 - RNA, 21 nt, Human coronavirus OC43 [HCoV-OC43]
gauacagguguuguuuccugu

SEQ ID NO: 1604064 - RNA, 20 nt, Human coronavirus OC43 [HCoV-OC43]
auauugacggagucuacugg

SEQ ID NO: 1604065 - RNA, 19 nt, Human coronavirus OC43 [HCoV-OC43]
uguacuucagauacuaguu

SEQ ID NO: 1604066 - RNA, 15 nt, Human coronavirus OC43 [HCoV-OC43]
gucaauauuauuuua

SEQ ID NO: 1604067 - RNA, 15 nt, Human coronavirus OC43 [HCoV-OC43]
cugauacuguugaug

SEQ ID NO: 1604068 - RNA, 13 nt, Human coronavirus OC43 [HCoV-OC43]
ugauuauuuguau

SEQ ID NO: 1604069 - RNA, 15 nt, Human coronavirus OC43 [HCoV-OC43]
auuugggcuauuugc

SEQ ID NO: 1604070 - RNA, 22 nt, Human coronavirus OC43 [HCoV-OC43]
uucaacuuugcgguauguguaa

SEQ ID NO: 1604071 - RNA, 13 nt, Human coronavirus OC43 [HCoV-OC43]
uauuaauggacau

SEQ ID NO: 1604072 - RNA, 13 nt, Human coronavirus OC43 [HCoV-OC43]
uuucuuucugauu

SEQ ID NO: 1604073 - RNA, 19 nt, Human coronavirus OC43 [HCoV-OC43]
auaagaauggacaaggaga

SEQ ID NO: 1604074 - RNA, 13 nt, Human coronavirus OC43 [HCoV-OC43]
ugagguuaaugcg

SEQ ID NO: 1604075 - RNA, 20 nt, Human coronavirus OC43 [HCoV-OC43]
augaggguguuaauuuuacg

SEQ ID NO: 1604076 - RNA, 20 nt, Human coronavirus OC43 [HCoV-OC43]
augauguaaaaccaccaguc

SEQ ID NO: 1604077 - RNA, 14 nt, Human coronavirus OC43 [HCoV-OC43]
augcaauucaauua

SEQ ID NO: 1604078 - RNA, 11 nt, Human coronavirus OC43 [HCoV-OC43]
acuguuaauuc

SEQ ID NO: 1604079 - RNA, 15 nt, Human coronavirus OC43 [HCoV-OC43]
ucagcaaccaucagg

SEQ ID NO: 1604080 - RNA, 23 nt, Human coronavirus OC43 [HCoV-OC43]
uauugcaacaacucucuaauaga

SEQ ID NO: 1604081 - RNA, 23 nt, Human coronavirus OC43 [HCoV-OC43]
uguaguuuaugcacaacacuguu

SEQ ID NO: 1604082 - RNA, 22 nt, Human coronavirus OC43 [HCoV-OC43]
agguguaccauuuuauuuaaau

SEQ ID NO: 1604083 - RNA, 15 nt, Human coronavirus OC43 [HCoV-OC43]
agguacuaauuauuu

SEQ ID NO: 1604084 - RNA, 16 nt, Human coronavirus OC43 [HCoV-OC43]
caacuauguugguguu

SEQ ID NO: 1604085 - RNA, 17 nt, Human coronavirus OC43 [HCoV-OC43]
ugucucagaauuagaag

SEQ ID NO: 1604086 - RNA, 17 nt, Human coronavirus OC43 [HCoV-OC43]
auuauaauuuaccugcu

SEQ ID NO: 1604087 - RNA, 14 nt, Human coronavirus OC43 [HCoV-OC43]
aauggcauccucaa

SEQ ID NO: 1604088 - RNA, 19 nt, Human coronavirus OC43 [HCoV-OC43]
cacccaguaauuaguaaau

SEQ ID NO: 1604089 - RNA, 15 nt, Human coronavirus OC43 [HCoV-OC43]
agccuuacuuuuguu

SEQ ID NO: 1604090 - RNA, 15 nt, Human coronavirus OC43 [HCoV-OC43]
cuugcuguuaaaagu

SEQ ID NO: 1604091 - RNA, 21 nt, Human coronavirus OC43 [HCoV-OC43]
auaaguacugauacuguugau

SEQ ID NO: 1604092 - RNA, 20 nt, Human coronavirus OC43 [HCoV-OC43]
auuaugauaaauauuuugga

SEQ ID NO: 1604093 - RNA, 11 nt, Human coronavirus OC43 [HCoV-OC43]
aggguucuggc

SEQ ID NO: 1604094 - RNA, 16 nt, Human coronavirus OC43 [HCoV-OC43]
cuaaucagaauuuugg

SEQ ID NO: 1604095 - RNA, 19 nt, Human coronavirus OC43 [HCoV-OC43]
ugucccacugcugcugaua

SEQ ID NO: 1604096 - RNA, 15 nt, Human coronavirus OC43 [HCoV-OC43]
cucuuguuuacaagg

SEQ ID NO: 1604097 - RNA, 14 nt, Human coronavirus OC43 [HCoV-OC43]
acuuuagaauauug

SEQ ID NO: 1604098 - RNA, 16 nt, Human coronavirus OC43 [HCoV-OC43]
caaaauaagaguagag

SEQ ID NO: 1604099 - RNA, 15 nt, Human coronavirus OC43 [HCoV-OC43]
guucugguaauggca

SEQ ID NO: 1604100 - RNA, 14 nt, Human coronavirus OC43 [HCoV-OC43]
gggguagaagagcu

SEQ ID NO: 1604101 - RNA, 12 nt, Human coronavirus OC43 [HCoV-OC43]
augauauuugga

SEQ ID NO: 1604102 - RNA, 18 nt, Human coronavirus OC43 [HCoV-OC43]
aucgguuuacuaauuuug

SEQ ID NO: 1604103 - RNA, 12 nt, Human coronavirus OC43 [HCoV-OC43]
caggagggaaug

SEQ ID NO: 1604104 - RNA, 19 nt, Human coronavirus OC43 [HCoV-OC43]
agcuccuaaaaauuucugu

SEQ ID NO: 1604105 - RNA, 18 nt, Human coronavirus OC43 [HCoV-OC43]
uauaauaguacugcuauu

SEQ ID NO: 1604106 - RNA, 17 nt, Human coronavirus OC43 [HCoV-OC43]
ucuacaggaaaaguuuu

SEQ ID NO: 1604107 - RNA, 17 nt, Human coronavirus OC43 [HCoV-OC43]
uguguauuuaaauacua

SEQ ID NO: 1604108 - RNA, 19 nt, Human coronavirus OC43 [HCoV-OC43]
aucauuagugcagaaugcu

SEQ ID NO: 1604109 - RNA, 22 nt, Human coronavirus OC43 [HCoV-OC43]
auauagaagcuuggcuuaauga

SEQ ID NO: 1604110 - RNA, 20 nt, Human coronavirus OC43 [HCoV-OC43]
gugcccaagggaagagccag

SEQ ID NO: 1604111 - RNA, 16 nt, Human coronavirus OC43 [HCoV-OC43]
uuuacaauuucaaauu

SEQ ID NO: 1604112 - RNA, 15 nt, Human coronavirus OC43 [HCoV-OC43]
aucuagacuugaugc

SEQ ID NO: 1604113 - RNA, 14 nt, Human coronavirus OC43 [HCoV-OC43]
augcauauuuuaca

SEQ ID NO: 1604114 - RNA, 13 nt, Human coronavirus OC43 [HCoV-OC43]
agugacccacagu

SEQ ID NO: 1604115 - RNA, 12 nt, Human coronavirus OC43 [HCoV-OC43]
agagccagcaug

SEQ ID NO: 1604116 - RNA, 21 nt, Human coronavirus OC43 [HCoV-OC43]
uauagugaguucccugcuaua

SEQ ID NO: 1604117 - RNA, 12 nt, Human coronavirus OC43 [HCoV-OC43]
gcuauuucuguu

SEQ ID NO: 1604118 - RNA, 12 nt, Human coronavirus OC43 [HCoV-OC43]
uuaauguaaaua

SEQ ID NO: 1604119 - RNA, 13 nt, Human coronavirus OC43 [HCoV-OC43]
agacaccucagaa

SEQ ID NO: 1604120 - RNA, 20 nt, Human coronavirus OC43 [HCoV-OC43]
uccuaaccuggguaaucauc

SEQ ID NO: 1604121 - RNA, 20 nt, Human coronavirus OC43 [HCoV-OC43]
cgcauugaauaauguguauc

SEQ ID NO: 1604122 - RNA, 11 nt, Human coronavirus OC43 [HCoV-OC43]
uaaugcuguug

SEQ ID NO: 1604123 - RNA, 19 nt, Human coronavirus OC43 [HCoV-OC43]
aauaaugguauaggcacuu

SEQ ID NO: 1604124 - RNA, 21 nt, Human coronavirus OC43 [HCoV-OC43]
aauauuauguaaaauggccuu

SEQ ID NO: 1604125 - RNA, 22 nt, Human coronavirus OC43 [HCoV-OC43]
uuugcaaucuagcauuuguuaa

SEQ ID NO: 1604126 - RNA, 16 nt, Human coronavirus OC43 [HCoV-OC43]
aaguuaauuauggcca

SEQ ID NO: 1604127 - RNA, 20 nt, Human coronavirus OC43 [HCoV-OC43]
uccuuaccaacggcuuuugc

SEQ ID NO: 1604128 - RNA, 17 nt, Human coronavirus OC43 [HCoV-OC43]
cuaaucaugauguaguu

SEQ ID NO: 1604129 - RNA, 17 nt, Human coronavirus OC43 [HCoV-OC43]
gcagcaaaauaagagua

SEQ ID NO: 1604130 - RNA, 21 nt, Human coronavirus OC43 [HCoV-OC43]
auuuugcaugauguuaauagu

SEQ ID NO: 1604131 - RNA, 17 nt, Human coronavirus OC43 [HCoV-OC43]
auaaguacugauacugu

SEQ ID NO: 1604132 - RNA, 16 nt, Human coronavirus OC43 [HCoV-OC43]
cuccugguaagcaauc

SEQ ID NO: 1604133 - RNA, 16 nt, Human coronavirus OC43 [HCoV-OC43]
gugcugaaugagaauu

SEQ ID NO: 1604134 - RNA, 20 nt, Human coronavirus OC43 [HCoV-OC43]
aauaagagauuugguuuuau

SEQ ID NO: 1604135 - RNA, 22 nt, Human coronavirus OC43 [HCoV-OC43]
agucgcaguauguuuguuuaug

SEQ ID NO: 1604136 - RNA, 13 nt, Human coronavirus OC43 [HCoV-OC43]
uuguauuauaauu

SEQ ID NO: 1604137 - RNA, 14 nt, Human coronavirus OC43 [HCoV-OC43]
auacaaaguauuau

SEQ ID NO: 1604138 - RNA, 17 nt, Human coronavirus OC43 [HCoV-OC43]
agacacugguguuauuu

SEQ ID NO: 1604139 - RNA, 14 nt, Human coronavirus OC43 [HCoV-OC43]
ugagccauuuacug

SEQ ID NO: 1604140 - RNA, 24 nt, Human coronavirus OC43 [HCoV-OC43]
guaaauaauacuuggauguacacu

SEQ ID NO: 1604141 - RNA, 22 nt, Human coronavirus OC43 [HCoV-OC43]
auaguaagguuaagaaugguuu

SEQ ID NO: 1604142 - RNA, 17 nt, Human coronavirus OC43 [HCoV-OC43]
gcuagucuuguucuggc

SEQ ID NO: 1604143 - RNA, 22 nt, Human coronavirus OC43 [HCoV-OC43]
cauaaugaaggugcugaaugag

SEQ ID NO: 1604144 - RNA, 18 nt, Human coronavirus OC43 [HCoV-OC43]
uacugaagacaccucaga

SEQ ID NO: 1604145 - RNA, 17 nt, Human coronavirus OC43 [HCoV-OC43]
agaauauuggguuacac

SEQ ID NO: 1604146 - RNA, 23 nt, Human coronavirus OC43 [HCoV-OC43]
auaaagacacugguguuauuuau

SEQ ID NO: 1604147 - RNA, 16 nt, Human coronavirus OC43 [HCoV-OC43]
caguagaucugcuaua

SEQ ID NO: 1604148 - RNA, 20 nt, Human coronavirus OC43 [HCoV-OC43]
ccuauuaauggacauuugga

SEQ ID NO: 1604149 - RNA, 20 nt, Human coronavirus OC43 [HCoV-OC43]
ccgccagaagaggagcccca

SEQ ID NO: 1604150 - RNA, 17 nt, Human coronavirus OC43 [HCoV-OC43]
gcaccagauuugucacu

SEQ ID NO: 1604151 - RNA, 15 nt, Human coronavirus OC43 [HCoV-OC43]
acucucuaucagaau

SEQ ID NO: 1604152 - RNA, 19 nt, Human coronavirus OC43 [HCoV-OC43]
cuauggagaagguuaauga

SEQ ID NO: 1604153 - RNA, 22 nt, Human coronavirus OC43 [HCoV-OC43]
gugcacauauaagcgugguuuu

SEQ ID NO: 1604154 - RNA, 14 nt, Human coronavirus OC43 [HCoV-OC43]
uguugcagugccca

SEQ ID NO: 1604155 - RNA, 15 nt, Human coronavirus OC43 [HCoV-OC43]
uuucaaauuguaauu

SEQ ID NO: 1604156 - RNA, 18 nt, Human coronavirus OC43 [HCoV-OC43]
cuuguuuuacuauucuuc

SEQ ID NO: 1604157 - RNA, 14 nt, Human coronavirus OC43 [HCoV-OC43]
auuauuuaguuuua

SEQ ID NO: 1604158 - RNA, 22 nt, Human coronavirus OC43 [HCoV-OC43]
uuauguggauuguguauuuugu

SEQ ID NO: 1604159 - RNA, 15 nt, Human coronavirus OC43 [HCoV-OC43]
ugcuuguuuuacuau

SEQ ID NO: 1604160 - RNA, 13 nt, Human coronavirus OC43 [HCoV-OC43]
guucuuuuaaaac

SEQ ID NO: 1604161 - RNA, 12 nt, Human coronavirus OC43 [HCoV-OC43]
acucuuguuuac

SEQ ID NO: 1604162 - RNA, 14 nt, Human coronavirus OC43 [HCoV-OC43]
uaauuaguugaaag

SEQ ID NO: 1604163 - RNA, 18 nt, Human coronavirus OC43 [HCoV-OC43]
aguguugcagugcccaaa

SEQ ID NO: 1604164 - RNA, 16 nt, Human coronavirus OC43 [HCoV-OC43]
aaaacuuggaacuagu

SEQ ID NO: 1604165 - RNA, 21 nt, Human coronavirus OC43 [HCoV-OC43]
cauuaugauaaauauuuugga

SEQ ID NO: 1604166 - RNA, 22 nt, Human coronavirus OC43 [HCoV-OC43]
caaacugguuuucuuagcuguu

SEQ ID NO: 1604167 - RNA, 17 nt, Human coronavirus OC43 [HCoV-OC43]
gcacaacacuguuucaa

SEQ ID NO: 1604168 - RNA, 14 nt, Human coronavirus OC43 [HCoV-OC43]
uuucuuucugauuu

SEQ ID NO: 1604169 - RNA, 19 nt, Human coronavirus OC43 [HCoV-OC43]
guuuaugauauuaaucaug

SEQ ID NO: 1604170 - RNA, 19 nt, Human coronavirus OC43 [HCoV-OC43]
guaucgcagccuuacuuuu

SEQ ID NO: 1604171 - RNA, 23 nt, Human coronavirus OC43 [HCoV-OC43]
cucaguuucaaaagggaaaggag

SEQ ID NO: 1604172 - RNA, 19 nt, Human coronavirus OC43 [HCoV-OC43]
aaaugcaaccguucuggua

SEQ ID NO: 1604173 - RNA, 12 nt, Human coronavirus OC43 [HCoV-OC43]
cuaauguuucug

SEQ ID NO: 1604174 - RNA, 21 nt, Human coronavirus OC43 [HCoV-OC43]
auaaagacacugguguuauuu

SEQ ID NO: 1604175 - RNA, 17 nt, Human coronavirus OC43 [HCoV-OC43]
cauauugcaauuuggau

SEQ ID NO: 1604176 - RNA, 14 nt, Human coronavirus OC43 [HCoV-OC43]
guuaauguaaauaa

SEQ ID NO: 1604177 - RNA, 19 nt, Human coronavirus OC43 [HCoV-OC43]
accagggguagaagagcuc

SEQ ID NO: 1604178 - RNA, 13 nt, Human coronavirus OC43 [HCoV-OC43]
caagugcccaagg

SEQ ID NO: 1604179 - RNA, 16 nt, Human coronavirus OC43 [HCoV-OC43]
gcagugcccaaaagcc

SEQ ID NO: 1604180 - RNA, 11 nt, Human coronavirus OC43 [HCoV-OC43]
acuauaaucuu

SEQ ID NO: 1604181 - RNA, 17 nt, Human coronavirus OC43 [HCoV-OC43]
uccugacgagccccaga

SEQ ID NO: 1604182 - RNA, 15 nt, Human coronavirus OC43 [HCoV-OC43]
auuaaacgguuacac

SEQ ID NO: 1604183 - RNA, 21 nt, Human coronavirus OC43 [HCoV-OC43]
auuuaacaaugcccuuuaugc

SEQ ID NO: 1604184 - RNA, 15 nt, Human coronavirus OC43 [HCoV-OC43]
caucuggugguaacc

SEQ ID NO: 1604185 - RNA, 17 nt, Human coronavirus OC43 [HCoV-OC43]
ugauucguaguugcuau

SEQ ID NO: 1604186 - RNA, 22 nt, Human coronavirus OC43 [HCoV-OC43]
aacaaguugucaguuguauuau

SEQ ID NO: 1604187 - RNA, 20 nt, Human coronavirus OC43 [HCoV-OC43]
auaucuaaauuuuaaggaug

SEQ ID NO: 1604188 - RNA, 16 nt, Human coronavirus OC43 [HCoV-OC43]
augaggguguuaauuu

SEQ ID NO: 1604189 - RNA, 14 nt, Human coronavirus OC43 [HCoV-OC43]
cuaccucucagcaa

SEQ ID NO: 1604190 - RNA, 17 nt, Human coronavirus OC43 [HCoV-OC43]
guaaucauauuguuaau

SEQ ID NO: 1604191 - RNA, 12 nt, Human coronavirus OC43 [HCoV-OC43]
uggcauggacac

SEQ ID NO: 1604192 - RNA, 14 nt, Human coronavirus OC43 [HCoV-OC43]
gccauuuacuguua

SEQ ID NO: 1604193 - RNA, 16 nt, Human coronavirus OC43 [HCoV-OC43]
gaaaauguugauuuua

SEQ ID NO: 1604194 - RNA, 23 nt, Human coronavirus OC43 [HCoV-OC43]
uccagcagagccucuagugcagg

SEQ ID NO: 1604195 - RNA, 15 nt, Human coronavirus OC43 [HCoV-OC43]
aagaaugguuuuacu

SEQ ID NO: 1604196 - RNA, 19 nt, Human coronavirus OC43 [HCoV-OC43]
gcagccugaugucuuuuau

SEQ ID NO: 1604197 - RNA, 22 nt, Human coronavirus OC43 [HCoV-OC43]
uuugaauaagccccgccagaag

SEQ ID NO: 1604198 - RNA, 16 nt, Human coronavirus OC43 [HCoV-OC43]
aaucaagguagauuuu

SEQ ID NO: 1604199 - RNA, 20 nt, Human coronavirus OC43 [HCoV-OC43]
gcaauaaaagucuuaaauca

SEQ ID NO: 1604200 - RNA, 15 nt, Human coronavirus OC43 [HCoV-OC43]
uuguuacuaaguuuu

SEQ ID NO: 1604201 - RNA, 18 nt, Human coronavirus OC43 [HCoV-OC43]
ugacgagccccagaagga

SEQ ID NO: 1604202 - RNA, 22 nt, Human coronavirus OC43 [HCoV-OC43]
gugugccuauugcaccaggagu

SEQ ID NO: 1604203 - RNA, 13 nt, Human coronavirus OC43 [HCoV-OC43]
gaccaguacggca

SEQ ID NO: 1604204 - RNA, 16 nt, Human coronavirus OC43 [HCoV-OC43]
gacaagccuaaucauu

SEQ ID NO: 1604205 - RNA, 15 nt, Human coronavirus OC43 [HCoV-OC43]
uuaauuauggccaau

SEQ ID NO: 1604206 - RNA, 18 nt, Human coronavirus OC43 [HCoV-OC43]
aaacaacuugauguguau

SEQ ID NO: 1604207 - RNA, 22 nt, Human coronavirus OC43 [HCoV-OC43]
guuacacaccugugcacauaua

SEQ ID NO: 1604208 - RNA, 19 nt, Human coronavirus OC43 [HCoV-OC43]
cugcagguacuaauuauuu

SEQ ID NO: 1604209 - RNA, 17 nt, Human coronavirus OC43 [HCoV-OC43]
augaauauuauguaaaa

SEQ ID NO: 1604210 - RNA, 18 nt, Human coronavirus OC43 [HCoV-OC43]
agagugguuauuuuguua

SEQ ID NO: 1604211 - RNA, 15 nt, Human coronavirus OC43 [HCoV-OC43]
auauaagcguaauuu

SEQ ID NO: 1604212 - RNA, 15 nt, Human coronavirus OC43 [HCoV-OC43]
ugguauuuuugcuaa

SEQ ID NO: 1604213 - RNA, 20 nt, Human coronavirus OC43 [HCoV-OC43]
agauuagaguuggccaaagu

SEQ ID NO: 1604214 - RNA, 18 nt, Human coronavirus OC43 [HCoV-OC43]
gaucuuaauuguuauuau

SEQ ID NO: 1604215 - RNA, 15 nt, Human coronavirus OC43 [HCoV-OC43]
agcgccguauguaau

SEQ ID NO: 1604216 - RNA, 21 nt, Human coronavirus OC43 [HCoV-OC43]
agccccagaaggauguuuaug

SEQ ID NO: 1604217 - RNA, 13 nt, Human coronavirus OC43 [HCoV-OC43]
uggagaaauguua

SEQ ID NO: 1604218 - RNA, 13 nt, Human coronavirus OC43 [HCoV-OC43]
ugucucagaauua

SEQ ID NO: 1604219 - RNA, 14 nt, Human coronavirus OC43 [HCoV-OC43]
auaguaagguuaag

SEQ ID NO: 1604220 - RNA, 21 nt, Human coronavirus OC43 [HCoV-OC43]
uauucaaacaagcucuccuaa

SEQ ID NO: 1604221 - RNA, 16 nt, Human coronavirus OC43 [HCoV-OC43]
guucuuacuaaucaug

SEQ ID NO: 1604222 - RNA, 15 nt, Human coronavirus OC43 [HCoV-OC43]
caacuaauucugcuu

SEQ ID NO: 1604223 - RNA, 17 nt, Human coronavirus OC43 [HCoV-OC43]
auccuauuacauuuaaa

SEQ ID NO: 1604224 - RNA, 21 nt, Human coronavirus OC43 [HCoV-OC43]
auggagaagguuaaugaaugu

SEQ ID NO: 1604225 - RNA, 17 nt, Human coronavirus OC43 [HCoV-OC43]
guaggauauuguagagu

SEQ ID NO: 1604226 - RNA, 21 nt, Human coronavirus OC43 [HCoV-OC43]
auauuaauaucccugauuuac

SEQ ID NO: 1604227 - RNA, 14 nt, Human coronavirus OC43 [HCoV-OC43]
guggcauuuuuggc

SEQ ID NO: 1604228 - RNA, 12 nt, Human coronavirus OC43 [HCoV-OC43]
aguguuuuggua

SEQ ID NO: 1604229 - RNA, 18 nt, Human coronavirus OC43 [HCoV-OC43]
caguccuugauguggaug

SEQ ID NO: 1604230 - RNA, 14 nt, Human coronavirus OC43 [HCoV-OC43]
cucgcacccacagc

SEQ ID NO: 1604231 - RNA, 16 nt, Human coronavirus OC43 [HCoV-OC43]
uguacagguuguugau

SEQ ID NO: 1604232 - RNA, 15 nt, Human coronavirus OC43 [HCoV-OC43]
augucccacugcugc

SEQ ID NO: 1604233 - RNA, 17 nt, Human coronavirus OC43 [HCoV-OC43]
guaaaauuuagugcagc

SEQ ID NO: 1604234 - RNA, 16 nt, Human coronavirus OC43 [HCoV-OC43]
ucgaauacaaaguauu

SEQ ID NO: 1604235 - RNA, 15 nt, Human coronavirus OC43 [HCoV-OC43]
uuagaguuggccaaa

SEQ ID NO: 1604236 - RNA, 16 nt, Human coronavirus OC43 [HCoV-OC43]
cagcuuauaugacugu

SEQ ID NO: 1604237 - RNA, 17 nt, Human coronavirus OC43 [HCoV-OC43]
accugcgcuguuaauua

SEQ ID NO: 1604238 - RNA, 14 nt, Human coronavirus OC43 [HCoV-OC43]
uaaugguuugggua

SEQ ID NO: 1604239 - RNA, 14 nt, Human coronavirus OC43 [HCoV-OC43]
cuuguucuggcaaa

SEQ ID NO: 1604240 - RNA, 16 nt, Human coronavirus OC43 [HCoV-OC43]
agucagacagaaaauu

SEQ ID NO: 1604241 - RNA, 13 nt, Human coronavirus OC43 [HCoV-OC43]
ccauuuguuuauu

SEQ ID NO: 1604242 - RNA, 13 nt, Human coronavirus OC43 [HCoV-OC43]
ccauauguuuaua

SEQ ID NO: 1604243 - RNA, 21 nt, Human coronavirus OC43 [HCoV-OC43]
aaucaugauguaguuuaugca

SEQ ID NO: 1604244 - RNA, 23 nt, Human coronavirus OC43 [HCoV-OC43]
uccacauaucguaauauggcacu

SEQ ID NO: 1604245 - RNA, 19 nt, Human coronavirus OC43 [HCoV-OC43]
gaaugcugauuauuuguau

SEQ ID NO: 1604246 - RNA, 14 nt, Human coronavirus OC43 [HCoV-OC43]
gguucucuggaauu

SEQ ID NO: 1604247 - RNA, 18 nt, Human coronavirus OC43 [HCoV-OC43]
uuaaacgguuacacuguu

SEQ ID NO: 1604248 - RNA, 23 nt, Human coronavirus OC43 [HCoV-OC43]
auuuuggugguggagaaauguua

SEQ ID NO: 1604249 - RNA, 23 nt, Human coronavirus OC43 [HCoV-OC43]
gcguaguagagccaauucuggca

SEQ ID NO: 1604250 - RNA, 20 nt, Human coronavirus OC43 [HCoV-OC43]
cuguucgggucuugcuguua

SEQ ID NO: 1604251 - RNA, 17 nt, Human coronavirus OC43 [HCoV-OC43]
ucuggcaauagaacccc

SEQ ID NO: 1604252 - RNA, 17 nt, Human coronavirus OC43 [HCoV-OC43]
gccgacaagugcccaag

SEQ ID NO: 1604253 - RNA, 14 nt, Human coronavirus OC43 [HCoV-OC43]
gucuuguucuggca

SEQ ID NO: 1604254 - RNA, 14 nt, Human coronavirus OC43 [HCoV-OC43]
caguggauacacuu

SEQ ID NO: 1604255 - RNA, 16 nt, Human coronavirus OC43 [HCoV-OC43]
aaagaacuauggcauu

SEQ ID NO: 1604256 - RNA, 17 nt, Human coronavirus OC43 [HCoV-OC43]
cuggaaaucguucuggu

SEQ ID NO: 1604257 - RNA, 12 nt, Human coronavirus OC43 [HCoV-OC43]
auucugcuuuag

SEQ ID NO: 1604258 - RNA, 23 nt, Human coronavirus OC43 [HCoV-OC43]
caguaauuaguaaaugaaugaag

SEQ ID NO: 1604259 - RNA, 12 nt, Human coronavirus OC43 [HCoV-OC43]
gagaagaaauau

SEQ ID NO: 1604260 - RNA, 15 nt, Human coronavirus OC43 [HCoV-OC43]
gcuaccucucagcaa

SEQ ID NO: 1604261 - RNA, 16 nt, Human coronavirus OC43 [HCoV-OC43]
aacagaacuuuuauga

SEQ ID NO: 1604262 - RNA, 12 nt, Human coronavirus OC43 [HCoV-OC43]
gacaagugccca

SEQ ID NO: 1604263 - RNA, 22 nt, Human coronavirus OC43 [HCoV-OC43]
auacugaagacaccucagaaau

SEQ ID NO: 1604264 - RNA, 20 nt, Human coronavirus OC43 [HCoV-OC43]
auggacaccgcauuguugag

SEQ ID NO: 1604265 - RNA, 13 nt, Human coronavirus OC43 [HCoV-OC43]
agaucguguguau

SEQ ID NO: 1604266 - RNA, 13 nt, Human coronavirus OC43 [HCoV-OC43]
agcuuauaugacu

SEQ ID NO: 1604267 - RNA, 19 nt, Human coronavirus OC43 [HCoV-OC43]
guaaauccaaacauuauga

SEQ ID NO: 1604268 - RNA, 20 nt, Human coronavirus OC43 [HCoV-OC43]
ugucaaccuccguacuguua

SEQ ID NO: 1604269 - RNA, 15 nt, Human coronavirus OC43 [HCoV-OC43]
auuugguuuuauaga

SEQ ID NO: 1604270 - RNA, 16 nt, Human coronavirus OC43 [HCoV-OC43]
augguaugaugaauau

SEQ ID NO: 1604271 - RNA, 17 nt, Human coronavirus OC43 [HCoV-OC43]
acaaugcccuuuaugcu

SEQ ID NO: 1604272 - RNA, 22 nt, Human coronavirus OC43 [HCoV-OC43]
caaaagccgcgugcagcaaaau

SEQ ID NO: 1604273 - RNA, 21 nt, Human coronavirus OC43 [HCoV-OC43]
auuuuuggguuggucugcaga

SEQ ID NO: 1604274 - RNA, 12 nt, Human coronavirus OC43 [HCoV-OC43]
ggacaaggugug

SEQ ID NO: 1604275 - RNA, 14 nt, Human coronavirus OC43 [HCoV-OC43]
uuaacuugugauaa

SEQ ID NO: 1604276 - RNA, 18 nt, Human coronavirus OC43 [HCoV-OC43]
gcuccauaugguuuguau

SEQ ID NO: 1604277 - RNA, 15 nt, Human coronavirus OC43 [HCoV-OC43]
acucgcacccacagc

SEQ ID NO: 1604278 - RNA, 20 nt, Human coronavirus OC43 [HCoV-OC43]
augaaaacaauucuugguuc

SEQ ID NO: 1604279 - RNA, 20 nt, Human coronavirus OC43 [HCoV-OC43]
agcgccacacauuagucuua

SEQ ID NO: 1604280 - RNA, 21 nt, Human coronavirus OC43 [HCoV-OC43]
cucuuaaugcuuauguuucuc

SEQ ID NO: 1604281 - RNA, 21 nt, Human coronavirus OC43 [HCoV-OC43]
caaccagcgucaacugcugcc

SEQ ID NO: 1604282 - RNA, 17 nt, Human coronavirus OC43 [HCoV-OC43]
cuauaaaaguguugaug

SEQ ID NO: 1604283 - RNA, 12 nt, Human coronavirus OC43 [HCoV-OC43]
aaggauuuuacg

SEQ ID NO: 1604284 - RNA, 22 nt, Human coronavirus OC43 [HCoV-OC43]
auuuauucuaguuagcugcaua

SEQ ID NO: 1604285 - RNA, 23 nt, Human coronavirus OC43 [HCoV-OC43]
guacugauacuguugauguuacu

SEQ ID NO: 1604286 - RNA, 17 nt, Human coronavirus OC43 [HCoV-OC43]
uauaacuauagguagua

SEQ ID NO: 1604287 - RNA, 17 nt, Human coronavirus OC43 [HCoV-OC43]
aggucaacaaauuauuu

SEQ ID NO: 1604288 - RNA, 18 nt, Human coronavirus OC43 [HCoV-OC43]
caacggcuuuugcuguua

SEQ ID NO: 1604289 - RNA, 18 nt, Human coronavirus OC43 [HCoV-OC43]
auuaaagaucguguaaug

SEQ ID NO: 1604290 - RNA, 16 nt, Human coronavirus OC43 [HCoV-OC43]
gcgcacauccagcaga

SEQ ID NO: 1604291 - RNA, 16 nt, Human coronavirus OC43 [HCoV-OC43]
guagaaggacaaggug

SEQ ID NO: 1604292 - RNA, 15 nt, Human coronavirus OC43 [HCoV-OC43]
cuuacuaaucaugau

SEQ ID NO: 1604293 - RNA, 16 nt, Human coronavirus OC43 [HCoV-OC43]
cagaaggauguuuaug

SEQ ID NO: 1604294 - RNA, 20 nt, Human coronavirus OC43 [HCoV-OC43]
uagauaugaaaggaacaaug

SEQ ID NO: 1604295 - RNA, 14 nt, Human coronavirus OC43 [HCoV-OC43]
aaaucguucuggua

SEQ ID NO: 1604296 - RNA, 16 nt, Human coronavirus OC43 [HCoV-OC43]
gaauggaauuuuucuu

SEQ ID NO: 1604297 - RNA, 20 nt, Human coronavirus OC43 [HCoV-OC43]
aaucugccuugcugguguag

SEQ ID NO: 1604298 - RNA, 19 nt, Human coronavirus OC43 [HCoV-OC43]
ggaauccugacgagcccca

SEQ ID NO: 1604299 - RNA, 19 nt, Human coronavirus OC43 [HCoV-OC43]
auggcacugaagggaagug

SEQ ID NO: 1604300 - RNA, 20 nt, Human coronavirus OC43 [HCoV-OC43]
uggauuguaaaauacaaaca

SEQ ID NO: 1604301 - RNA, 12 nt, Human coronavirus OC43 [HCoV-OC43]
cauugcuauuuc

SEQ ID NO: 1604302 - RNA, 22 nt, Human coronavirus OC43 [HCoV-OC43]
guucagcaguguuuugguaaga

SEQ ID NO: 1604303 - RNA, 14 nt, Human coronavirus OC43 [HCoV-OC43]
aucauuagugcaga

SEQ ID NO: 1604304 - RNA, 14 nt, Human coronavirus OC43 [HCoV-OC43]
cuuuuuaugcauau

SEQ ID NO: 1604305 - RNA, 21 nt, Human coronavirus OC43 [HCoV-OC43]
uuaauuguuauuauuuaguuu

SEQ ID NO: 1604306 - RNA, 21 nt, Human coronavirus OC43 [HCoV-OC43]
cgcgcacauccagcagagccu

SEQ ID NO: 1604307 - RNA, 20 nt, Human coronavirus OC43 [HCoV-OC43]
gauaugaaaggaacaaugua

SEQ ID NO: 1604308 - RNA, 15 nt, Human coronavirus OC43 [HCoV-OC43]
cguuuuucuuuggau

SEQ ID NO: 1604309 - RNA, 21 nt, Human coronavirus OC43 [HCoV-OC43]
cuagugguuuugcuguuuaug

SEQ ID NO: 1604310 - RNA, 13 nt, Human coronavirus OC43 [HCoV-OC43]
auauaaguguugc

SEQ ID NO: 1604311 - RNA, 19 nt, Human coronavirus OC43 [HCoV-OC43]
uaauguguaucuuggccuu

SEQ ID NO: 1604312 - RNA, 13 nt, Human coronavirus OC43 [HCoV-OC43]
uuauuuugcauga

SEQ ID NO: 1604313 - RNA, 19 nt, Human coronavirus OC43 [HCoV-OC43]
aucaugauguaguuuaugc

SEQ ID NO: 1604314 - RNA, 21 nt, Human coronavirus OC43 [HCoV-OC43]
caggaucgcguaguagagcca

SEQ ID NO: 1604315 - RNA, 19 nt, Human coronavirus OC43 [HCoV-OC43]
cugugauaacauuaaugcc

SEQ ID NO: 1604316 - RNA, 18 nt, Human coronavirus OC43 [HCoV-OC43]
uacugaagcuaaggggua

SEQ ID NO: 1604317 - RNA, 14 nt, Human coronavirus OC43 [HCoV-OC43]
aggcugaugucaau

SEQ ID NO: 1604318 - RNA, 23 nt, Human coronavirus OC43 [HCoV-OC43]
auaaucuaaacauguuuuugaua

SEQ ID NO: 1604319 - RNA, 21 nt, Human coronavirus OC43 [HCoV-OC43]
uaucaacccccauaauuauuc

SEQ ID NO: 1604320 - RNA, 19 nt, Human coronavirus OC43 [HCoV-OC43]
cugguacagacacaacaga

SEQ ID NO: 1604321 - RNA, 19 nt, Human coronavirus OC43 [HCoV-OC43]
agcuguuguuaaugcaaau

SEQ ID NO: 1604322 - RNA, 15 nt, Human coronavirus OC43 [HCoV-OC43]
uggccaaagugcaga

SEQ ID NO: 1604323 - RNA, 20 nt, Human coronavirus OC43 [HCoV-OC43]
gcuaugcuuguuuuacuauu

SEQ ID NO: 1604324 - RNA, 14 nt, Human coronavirus OC43 [HCoV-OC43]
uucaacccagaaac

SEQ ID NO: 1604325 - RNA, 17 nt, Human coronavirus OC43 [HCoV-OC43]
ugccaggcagucugaua

SEQ ID NO: 1604326 - RNA, 23 nt, Human coronavirus OC43 [HCoV-OC43]
cuuguacuugccgaccacaagca

SEQ ID NO: 1604327 - RNA, 15 nt, Human coronavirus OC43 [HCoV-OC43]
agaauuuugguggug

SEQ ID NO: 1604328 - RNA, 15 nt, Human coronavirus OC43 [HCoV-OC43]
gauacuagugguuuu

SEQ ID NO: 1604329 - RNA, 17 nt, Human coronavirus OC43 [HCoV-OC43]
gcauuguugagaaauaa

SEQ ID NO: 1604330 - RNA, 23 nt, Human coronavirus OC43 [HCoV-OC43]
acaccucagaaauauaagagaau

SEQ ID NO: 1604331 - RNA, 19 nt, Human coronavirus OC43 [HCoV-OC43]
auuaaacucagugaaaaug

SEQ ID NO: 1604332 - RNA, 16 nt, Human coronavirus OC43 [HCoV-OC43]
cauuauuauguggauu

SEQ ID NO: 1604333 - RNA, 17 nt, Human coronavirus OC43 [HCoV-OC43]
caaugcccuuuaugcua

SEQ ID NO: 1604334 - RNA, 16 nt, Human coronavirus OC43 [HCoV-OC43]
aaguuuuguguuguaa

SEQ ID NO: 1604335 - RNA, 19 nt, Human coronavirus OC43 [HCoV-OC43]
auucaagcuguuguuaaug

SEQ ID NO: 1604336 - RNA, 13 nt, Human coronavirus OC43 [HCoV-OC43]
cagguuguuuauu

SEQ ID NO: 1604337 - RNA, 19 nt, Human coronavirus OC43 [HCoV-OC43]
cuaagcauacugccaaaga

SEQ ID NO: 1604338 - RNA, 17 nt, Human coronavirus OC43 [HCoV-OC43]
uuaagaugauuauuuug

SEQ ID NO: 1604339 - RNA, 18 nt, Human coronavirus OC43 [HCoV-OC43]
auaguguuggagaaagug

SEQ ID NO: 1604340 - RNA, 20 nt, Human coronavirus OC43 [HCoV-OC43]
uaugaguccaaaaccacagc

SEQ ID NO: 1604341 - RNA, 13 nt, Human coronavirus OC43 [HCoV-OC43]
ucgcacccacagc

SEQ ID NO: 1604342 - RNA, 21 nt, Human coronavirus OC43 [HCoV-OC43]
aauggaauuuuucuuugggua

SEQ ID NO: 1604343 - RNA, 15 nt, Human coronavirus OC43 [HCoV-OC43]
aacuagguacuggcu

SEQ ID NO: 1604344 - RNA, 18 nt, Human coronavirus OC43 [HCoV-OC43]
uacuccugguaagcaauc

SEQ ID NO: 1604345 - RNA, 18 nt, Human coronavirus OC43 [HCoV-OC43]
ggaucgcguaguagagcc

SEQ ID NO: 1604346 - RNA, 19 nt, Human coronavirus OC43 [HCoV-OC43]
ucaagcuguuguuaaugca

SEQ ID NO: 1604347 - RNA, 17 nt, Human coronavirus OC43 [HCoV-OC43]
cagaaauauaagagaau

SEQ ID NO: 1604348 - RNA, 23 nt, Human coronavirus OC43 [HCoV-OC43]
guaguacaaccacguacaaucaa

SEQ ID NO: 1604349 - RNA, 17 nt, Human coronavirus OC43 [HCoV-OC43]
caaccuuccugauuuua

SEQ ID NO: 1604350 - RNA, 16 nt, Human coronavirus OC43 [HCoV-OC43]
aguacuuuuguaaaua

SEQ ID NO: 1604351 - RNA, 22 nt, Human coronavirus OC43 [HCoV-OC43]
auacgcauugaauaauguguau

SEQ ID NO: 1604352 - RNA, 14 nt, Human coronavirus OC43 [HCoV-OC43]
agcgugguuuucuu

SEQ ID NO: 1604353 - RNA, 17 nt, Human coronavirus OC43 [HCoV-OC43]
cugguaauggcauccuc

SEQ ID NO: 1604354 - RNA, 22 nt, Human coronavirus OC43 [HCoV-OC43]
auguuuuugauacuuuuaauuu

SEQ ID NO: 1604355 - RNA, 11 nt, Human coronavirus OC43 [HCoV-OC43]
cucauuuacuu

SEQ ID NO: 1604356 - RNA, 16 nt, Human coronavirus OC43 [HCoV-OC43]
cuaaguuuuuguuuaa

SEQ ID NO: 1604357 - RNA, 17 nt, Human coronavirus OC43 [HCoV-OC43]
agagccaauucuggcaa

SEQ ID NO: 1604358 - RNA, 15 nt, Human coronavirus OC43 [HCoV-OC43]
cagauagauagacuu

SEQ ID NO: 1604359 - RNA, 23 nt, Human coronavirus OC43 [HCoV-OC43]
accaucaggagggaauguuguac

SEQ ID NO: 1604360 - RNA, 11 nt, Human coronavirus OC43 [HCoV-OC43]
augauguaaaa

SEQ ID NO: 1604361 - RNA, 22 nt, Human coronavirus OC43 [HCoV-OC43]
agaugguauuauuuuuaaugcu

SEQ ID NO: 1604362 - RNA, 21 nt, Human coronavirus OC43 [HCoV-OC43]
acaguagguagugguuacugu

SEQ ID NO: 1604363 - RNA, 20 nt, Human coronavirus OC43 [HCoV-OC43]
uuccuagauuuauucuaguu

SEQ ID NO: 1604364 - RNA, 21 nt, Human coronavirus OC43 [HCoV-OC43]
uguguuaaauuauaaagguuu

SEQ ID NO: 1604365 - RNA, 20 nt, Human coronavirus OC43 [HCoV-OC43]
uacauccuauagugugguag

SEQ ID NO: 1604366 - RNA, 13 nt, Human coronavirus OC43 [HCoV-OC43]
uuauguggccccu

SEQ ID NO: 1604367 - RNA, 23 nt, Human coronavirus OC43 [HCoV-OC43]
aaacaaugcacuguucagcagug

SEQ ID NO: 1604368 - RNA, 14 nt, Human coronavirus OC43 [HCoV-OC43]
augaugugaaugcu

SEQ ID NO: 1604369 - RNA, 18 nt, Human coronavirus OC43 [HCoV-OC43]
guucagauuguaaucaua

SEQ ID NO: 1604370 - RNA, 23 nt, Human coronavirus OC43 [HCoV-OC43]
gcauggacaccgcauuguugaga

SEQ ID NO: 1604371 - RNA, 18 nt, Human coronavirus OC43 [HCoV-OC43]
auacgcauugaauaaugu

SEQ ID NO: 1604372 - RNA, 16 nt, Human coronavirus OC43 [HCoV-OC43]
auaaacaaugcacugu

SEQ ID NO: 1604373 - RNA, 13 nt, Human coronavirus OC43 [HCoV-OC43]
gguuucacagcau

SEQ ID NO: 1604374 - RNA, 19 nt, Human coronavirus OC43 [HCoV-OC43]
auuguggaggcaauucuug

SEQ ID NO: 1604375 - RNA, 18 nt, Human coronavirus OC43 [HCoV-OC43]
acacaggaugguuauaau

SEQ ID NO: 1604376 - RNA, 21 nt, Human coronavirus OC43 [HCoV-OC43]
caacaagaugguaugaugaau

SEQ ID NO: 1604377 - RNA, 21 nt, Human coronavirus OC43 [HCoV-OC43]
cgucuuaccgcucuuaaugcu

SEQ ID NO: 1604378 - RNA, 15 nt, Human coronavirus OC43 [HCoV-OC43]
gcagcauguaaauca

SEQ ID NO: 1604379 - RNA, 23 nt, Human coronavirus OC43 [HCoV-OC43]
aauaugagcagccugaugucuuu

SEQ ID NO: 1604380 - RNA, 16 nt, Human coronavirus OC43 [HCoV-OC43]
auuccgacuagguuuc

SEQ ID NO: 1604381 - RNA, 14 nt, Human coronavirus OC43 [HCoV-OC43]
uauguuuguuuaug

SEQ ID NO: 1604382 - RNA, 15 nt, Human coronavirus OC43 [HCoV-OC43]
augaguuuuacaaug

SEQ ID NO: 1604383 - RNA, 19 nt, Human coronavirus OC43 [HCoV-OC43]
uccugacgagccccagaag

SEQ ID NO: 1604384 - RNA, 17 nt, Human coronavirus OC43 [HCoV-OC43]
ucacacuauuaugucau

SEQ ID NO: 1604385 - RNA, 19 nt, Human coronavirus OC43 [HCoV-OC43]
ggugcccucuccauuaaau

SEQ ID NO: 1604386 - RNA, 20 nt, Human coronavirus OC43 [HCoV-OC43]
cugcuauagaggauuuacuu

SEQ ID NO: 1604387 - RNA, 16 nt, Human coronavirus OC43 [HCoV-OC43]
gcuacagguacuuaua

SEQ ID NO: 1604388 - RNA, 20 nt, Human coronavirus OC43 [HCoV-OC43]
gcuagucuuguucuggcaaa

SEQ ID NO: 1604389 - RNA, 20 nt, Human coronavirus OC43 [HCoV-OC43]
ugcagaacucgcacccacag

SEQ ID NO: 1604390 - RNA, 16 nt, Human coronavirus OC43 [HCoV-OC43]
auagauagagaagguu

SEQ ID NO: 1604391 - RNA, 17 nt, Human coronavirus OC43 [HCoV-OC43]
agagcguccucuggaaa

SEQ ID NO: 1604392 - RNA, 22 nt, Human coronavirus OC43 [HCoV-OC43]
caccaccuacugguguuuauga

SEQ ID NO: 1604393 - RNA, 16 nt, Human coronavirus OC43 [HCoV-OC43]
uucagcaguguuuugg

SEQ ID NO: 1604394 - RNA, 20 nt, Human coronavirus OC43 [HCoV-OC43]
acaaguguaauauuuuugcu

SEQ ID NO: 1604395 - RNA, 22 nt, Human coronavirus OC43 [HCoV-OC43]
ccagcaccaguuuauaucugga

SEQ ID NO: 1604396 - RNA, 16 nt, Human coronavirus OC43 [HCoV-OC43]
cuugguucucuggaau

SEQ ID NO: 1604397 - RNA, 15 nt, Human coronavirus OC43 [HCoV-OC43]
aagauggaugagccc

SEQ ID NO: 1604398 - RNA, 23 nt, Human coronavirus OC43 [HCoV-OC43]
cuaauuuugagccauuuacuguu

SEQ ID NO: 1604399 - RNA, 15 nt, Human coronavirus OC43 [HCoV-OC43]
guauaaaacuaggua

SEQ ID NO: 1604400 - RNA, 20 nt, Human coronavirus OC43 [HCoV-OC43]
aaggaaaauguugauuuuau

SEQ ID NO: 1604401 - RNA, 16 nt, Human coronavirus OC43 [HCoV-OC43]
auaagaguagagaguu

SEQ ID NO: 1604402 - RNA, 14 nt, Human coronavirus OC43 [HCoV-OC43]
uucgcauguaaaug

SEQ ID NO: 1604403 - RNA, 17 nt, Human coronavirus OC43 [HCoV-OC43]
gucugcagacucuuguu

SEQ ID NO: 1604404 - RNA, 16 nt, Human coronavirus OC43 [HCoV-OC43]
ccuacugguguuuaug

SEQ ID NO: 1604405 - RNA, 21 nt, Human coronavirus OC43 [HCoV-OC43]
uugucauccuaaccuggguaa

SEQ ID NO: 1604406 - RNA, 20 nt, Human coronavirus OC43 [HCoV-OC43]
augaguccaaaaccacagcg

SEQ ID NO: 1604407 - RNA, 17 nt, Human coronavirus OC43 [HCoV-OC43]
cuuaauaacccugcaua

SEQ ID NO: 1604408 - RNA, 15 nt, Human coronavirus OC43 [HCoV-OC43]
guuacuauauugaag

SEQ ID NO: 1604409 - RNA, 22 nt, Human coronavirus OC43 [HCoV-OC43]
guuguacccuacuauucuuggu

SEQ ID NO: 1604410 - RNA, 17 nt, Human coronavirus OC43 [HCoV-OC43]
auaauauugaugcugcu

SEQ ID NO: 1604411 - RNA, 15 nt, Human coronavirus OC43 [HCoV-OC43]
gccaauucuggcaau

SEQ ID NO: 1604412 - RNA, 19 nt, Human coronavirus OC43 [HCoV-OC43]
cauuuguuuauugguuaca

SEQ ID NO: 1604413 - RNA, 13 nt, Human coronavirus OC43 [HCoV-OC43]
acaagugcccaag

SEQ ID NO: 1604414 - RNA, 21 nt, Human coronavirus OC43 [HCoV-OC43]
auguauagugaguucccugcu

SEQ ID NO: 1604415 - RNA, 16 nt, Human coronavirus OC43 [HCoV-OC43]
accaguuauuuugcuu

SEQ ID NO: 1604416 - RNA, 16 nt, Human coronavirus OC43 [HCoV-OC43]
acuacguuuuuaauaa

SEQ ID NO: 1604417 - RNA, 13 nt, Human coronavirus OC43 [HCoV-OC43]
ccaauucuggcaa

SEQ ID NO: 1604418 - RNA, 15 nt, Human coronavirus OC43 [HCoV-OC43]
aauuauuuuuuauga

SEQ ID NO: 1604419 - RNA, 14 nt, Human coronavirus OC43 [HCoV-OC43]
cauacucugacggu

SEQ ID NO: 1604420 - RNA, 17 nt, Human coronavirus OC43 [HCoV-OC43]
agaauuagaagaugcuu

SEQ ID NO: 1604421 - RNA, 14 nt, Human coronavirus OC43 [HCoV-OC43]
uagugacccacagu

SEQ ID NO: 1604422 - RNA, 15 nt, Human coronavirus OC43 [HCoV-OC43]
gugugcaaaguuaua

SEQ ID NO: 1604423 - RNA, 14 nt, Human coronavirus OC43 [HCoV-OC43]
cuuguuuacaagga

SEQ ID NO: 1604424 - RNA, 20 nt, Human coronavirus OC43 [HCoV-OC43]
cuauagauaaguuugcuaua

SEQ ID NO: 1604425 - RNA, 17 nt, Human coronavirus OC43 [HCoV-OC43]
agagugguuauuuuguu

SEQ ID NO: 1604426 - RNA, 17 nt, Human coronavirus OC43 [HCoV-OC43]
gccuuacuuuuguuaau

SEQ ID NO: 1604427 - RNA, 14 nt, Human coronavirus OC43 [HCoV-OC43]
uaguaaaugaauga

SEQ ID NO: 1604428 - RNA, 21 nt, Human coronavirus OC43 [HCoV-OC43]
cuuguuagaucuuuuugcaau

SEQ ID NO: 1604429 - RNA, 23 nt, Human coronavirus OC43 [HCoV-OC43]
auuacucaguuucaaaagggaaa

SEQ ID NO: 1604430 - RNA, 12 nt, Human coronavirus OC43 [HCoV-OC43]
uugcuaaugcau

SEQ ID NO: 1604431 - RNA, 17 nt, Human coronavirus OC43 [HCoV-OC43]
aaugaaggugcugaaug

SEQ ID NO: 1604432 - RNA, 22 nt, Human coronavirus OC43 [HCoV-OC43]
gcauucgcuaauacuguagagg

SEQ ID NO: 1604433 - RNA, 22 nt, Human coronavirus OC43 [HCoV-OC43]
augauuauggguuauuguuguu

SEQ ID NO: 1604434 - RNA, 17 nt, Human coronavirus OC43 [HCoV-OC43]
agaauauggcuguguau

SEQ ID NO: 1604435 - RNA, 15 nt, Human coronavirus OC43 [HCoV-OC43]
acuacaccagcacca

SEQ ID NO: 1604436 - RNA, 15 nt, Human coronavirus OC43 [HCoV-OC43]
agaaugguuuuacuu

SEQ ID NO: 1604437 - RNA, 22 nt, Human coronavirus OC43 [HCoV-OC43]
auguaaaucacaguugguugaa

SEQ ID NO: 1604438 - RNA, 12 nt, Human coronavirus OC43 [HCoV-OC43]
ugguaauuauuu

SEQ ID NO: 1604439 - RNA, 12 nt, Human coronavirus OC43 [HCoV-OC43]
aguuaaauguuu

SEQ ID NO: 1604440 - RNA, 23 nt, Human coronavirus OC43 [HCoV-OC43]
acuaauuuugagccauuuacugu

SEQ ID NO: 1604441 - RNA, 22 nt, Human coronavirus OC43 [HCoV-OC43]
uugaauaagccccgccagaaga

SEQ ID NO: 1604442 - RNA, 17 nt, Human coronavirus OC43 [HCoV-OC43]
ugcgauuguaauuauug

SEQ ID NO: 1604443 - RNA, 22 nt, Human coronavirus OC43 [HCoV-OC43]
cacuucuagacaauauuuacuc

SEQ ID NO: 1604444 - RNA, 15 nt, Human coronavirus OC43 [HCoV-OC43]
aucagaauuuuggug

SEQ ID NO: 1604445 - RNA, 23 nt, Human coronavirus OC43 [HCoV-OC43]
auguuaaaacuuggaacuaguga

SEQ ID NO: 1604446 - RNA, 22 nt, Human coronavirus OC43 [HCoV-OC43]
uuacaaugauguaaaaccacca

SEQ ID NO: 1604447 - RNA, 13 nt, Human coronavirus OC43 [HCoV-OC43]
agcauaacuauag

SEQ ID NO: 1604448 - RNA, 15 nt, Human coronavirus OC43 [HCoV-OC43]
uuaggccaaggcauu

SEQ ID NO: 1604449 - RNA, 14 nt, Human coronavirus OC43 [HCoV-OC43]
uucagcaguguuuu

SEQ ID NO: 1604450 - RNA, 13 nt, Human coronavirus OC43 [HCoV-OC43]
uuaaauuccuaaa

SEQ ID NO: 1604451 - RNA, 20 nt, Human coronavirus OC43 [HCoV-OC43]
cuaaguuuuuguuuaauguu

SEQ ID NO: 1604452 - RNA, 13 nt, Human coronavirus OC43 [HCoV-OC43]
gauugugcugcau

SEQ ID NO: 1604453 - RNA, 18 nt, Human coronavirus OC43 [HCoV-OC43]
gugcuauaagugcuucuu

SEQ ID NO: 1604454 - RNA, 18 nt, Human coronavirus OC43 [HCoV-OC43]
guuaaugcgacuuauuau

SEQ ID NO: 1604455 - RNA, 21 nt, Human coronavirus OC43 [HCoV-OC43]
aaugaugaugaugcuugguuu

SEQ ID NO: 1604456 - RNA, 22 nt, Human coronavirus OC43 [HCoV-OC43]
auugggaacguaagacauuuuc

SEQ ID NO: 1604457 - RNA, 17 nt, Human coronavirus OC43 [HCoV-OC43]
ggcccuaaucagaauuu

SEQ ID NO: 1604458 - RNA, 14 nt, Human coronavirus OC43 [HCoV-OC43]
auuaauuaguugaa

SEQ ID NO: 1604459 - RNA, 15 nt, Human coronavirus OC43 [HCoV-OC43]
agaauggaugucuug

SEQ ID NO: 1604460 - RNA, 13 nt, Human coronavirus OC43 [HCoV-OC43]
auuguaauuauug

SEQ ID NO: 1604461 - RNA, 13 nt, Human coronavirus OC43 [HCoV-OC43]
cucugguguaaca

SEQ ID NO: 1604462 - RNA, 19 nt, Human coronavirus OC43 [HCoV-OC43]
caaguaacuaagcauacug

SEQ ID NO: 1604463 - RNA, 20 nt, Human coronavirus OC43 [HCoV-OC43]
agaguuccuagucaugcuug

SEQ ID NO: 1604464 - RNA, 15 nt, Human coronavirus OC43 [HCoV-OC43]
uccugacgagcccca

SEQ ID NO: 1604465 - RNA, 11 nt, Human coronavirus OC43 [HCoV-OC43]
uagaaauguuc

SEQ ID NO: 1604466 - RNA, 22 nt, Human coronavirus OC43 [HCoV-OC43]
acuauugauugugcugcauuug

SEQ ID NO: 1604467 - RNA, 22 nt, Human coronavirus OC43 [HCoV-OC43]
agacaggaguuaaauguuuaug

SEQ ID NO: 1604468 - RNA, 22 nt, Human coronavirus OC43 [HCoV-OC43]
uuagaccauaaucuaaacaugu

SEQ ID NO: 1604469 - RNA, 18 nt, Human coronavirus OC43 [HCoV-OC43]
uaaauuccuaaaggaaug

SEQ ID NO: 1604470 - RNA, 19 nt, Human coronavirus OC43 [HCoV-OC43]
auaucguaccacuuuguau

SEQ ID NO: 1604471 - RNA, 17 nt, Human coronavirus OC43 [HCoV-OC43]
ggaacuagugacccaca

SEQ ID NO: 1604472 - RNA, 14 nt, Human coronavirus OC43 [HCoV-OC43]
auaaaaguguugau

SEQ ID NO: 1604473 - RNA, 14 nt, Human coronavirus OC43 [HCoV-OC43]
cgccagaagaggag

SEQ ID NO: 1604474 - RNA, 17 nt, Human coronavirus OC43 [HCoV-OC43]
uuacuaggcugcaugau

SEQ ID NO: 1604475 - RNA, 13 nt, Human coronavirus OC43 [HCoV-OC43]
gcuauaacuauag

SEQ ID NO: 1604476 - RNA, 22 nt, Human coronavirus OC43 [HCoV-OC43]
uaacuauagauaaguuugcuau

SEQ ID NO: 1604477 - RNA, 17 nt, Human coronavirus OC43 [HCoV-OC43]
cuuccaguagaucugcu

SEQ ID NO: 1604478 - RNA, 12 nt, Human coronavirus OC43 [HCoV-OC43]
cauaugcuguug

SEQ ID NO: 1604479 - RNA, 16 nt, Human coronavirus OC43 [HCoV-OC43]
ugagccauuuacuguu

SEQ ID NO: 1604480 - RNA, 12 nt, Human coronavirus OC43 [HCoV-OC43]
uuguuaaugcaa

SEQ ID NO: 1604481 - RNA, 13 nt, Human coronavirus OC43 [HCoV-OC43]
ugcagaauuuauc

SEQ ID NO: 1604482 - RNA, 20 nt, Human coronavirus OC43 [HCoV-OC43]
guuuuacuagcauacuuagu

SEQ ID NO: 1604483 - RNA, 15 nt, Human coronavirus OC43 [HCoV-OC43]
aacagccgauggcaa

SEQ ID NO: 1604484 - RNA, 19 nt, Human coronavirus OC43 [HCoV-OC43]
uuacccucugguaauuauu

SEQ ID NO: 1604485 - RNA, 14 nt, Human coronavirus OC43 [HCoV-OC43]
aacggcuuuugcug

SEQ ID NO: 1604486 - RNA, 19 nt, Human coronavirus OC43 [HCoV-OC43]
uguauagauaugaaaggaa

SEQ ID NO: 1604487 - RNA, 15 nt, Human coronavirus OC43 [HCoV-OC43]
auuuuuacuaucugg

SEQ ID NO: 1604488 - RNA, 16 nt, Human coronavirus OC43 [HCoV-OC43]
gcuaagucaaaaucaa

SEQ ID NO: 1604489 - RNA, 16 nt, Human coronavirus OC43 [HCoV-OC43]
aaccagcgucaacugc

SEQ ID NO: 1604490 - RNA, 20 nt, Human coronavirus OC43 [HCoV-OC43]
aaaacuacaccagcaccagu

SEQ ID NO: 1604491 - RNA, 18 nt, Human coronavirus OC43 [HCoV-OC43]
guaggcaguuuuaugagu

SEQ ID NO: 1604492 - RNA, 17 nt, Human coronavirus OC43 [HCoV-OC43]
auggcauuuggauacag

SEQ ID NO: 1604493 - RNA, 15 nt, Human coronavirus OC43 [HCoV-OC43]
auuuaccugcugcua

SEQ ID NO: 1604494 - RNA, 19 nt, Human coronavirus OC43 [HCoV-OC43]
agaacucgcacccacagcu

SEQ ID NO: 1604495 - RNA, 15 nt, Human coronavirus OC43 [HCoV-OC43]
gcccuauacugaaga

SEQ ID NO: 1604496 - RNA, 17 nt, Human coronavirus OC43 [HCoV-OC43]
auugguuuuuauuuggu

SEQ ID NO: 1604497 - RNA, 12 nt, Human coronavirus OC43 [HCoV-OC43]
gguucucuggaa

SEQ ID NO: 1604498 - RNA, 12 nt, Human coronavirus OC43 [HCoV-OC43]
aaugguuauuac

SEQ ID NO: 1604499 - RNA, 18 nt, Human coronavirus OC43 [HCoV-OC43]
uauaaguacugauacugu

SEQ ID NO: 1604500 - RNA, 17 nt, Human coronavirus OC43 [HCoV-OC43]
cugaaaagaaagauggu

SEQ ID NO: 1604501 - RNA, 20 nt, Human coronavirus OC43 [HCoV-OC43]
caaucauauugcaauuugga

SEQ ID NO: 1604502 - RNA, 15 nt, Human coronavirus OC43 [HCoV-OC43]
uuugaguuuguagaa

SEQ ID NO: 1604503 - RNA, 15 nt, Human coronavirus OC43 [HCoV-OC43]
cucugguaauuauuu

SEQ ID NO: 1604504 - RNA, 22 nt, Human coronavirus OC43 [HCoV-OC43]
acuauagauaaguuugcuauac

SEQ ID NO: 1604505 - RNA, 13 nt, Human coronavirus OC43 [HCoV-OC43]
auuuuaucaauuu

SEQ ID NO: 1604506 - RNA, 12 nt, Human coronavirus OC43 [HCoV-OC43]
gcuauuguuaac

SEQ ID NO: 1604507 - RNA, 15 nt, Human coronavirus OC43 [HCoV-OC43]
uaucagguuguuuau

SEQ ID NO: 1604508 - RNA, 15 nt, Human coronavirus OC43 [HCoV-OC43]
uguaaucauauuguu

SEQ ID NO: 1604509 - RNA, 16 nt, Human coronavirus OC43 [HCoV-OC43]
uaaauuucugugguaa

SEQ ID NO: 1604510 - RNA, 19 nt, Human coronavirus OC43 [HCoV-OC43]
uguugacuuuauuaccugg

SEQ ID NO: 1604511 - RNA, 16 nt, Human coronavirus OC43 [HCoV-OC43]
uaagaauggacaagga

SEQ ID NO: 1604512 - RNA, 15 nt, Human coronavirus OC43 [HCoV-OC43]
gcucaacccaagcaa

SEQ ID NO: 1604513 - RNA, 22 nt, Human coronavirus OC43 [HCoV-OC43]
uaauuauuguaguuuuguuguu

SEQ ID NO: 1604514 - RNA, 18 nt, Human coronavirus OC43 [HCoV-OC43]
auucaagaaguuauugau

SEQ ID NO: 1604515 - RNA, 16 nt, Human coronavirus OC43 [HCoV-OC43]
agaucuuuuugcaauc

SEQ ID NO: 1604516 - RNA, 19 nt, Human coronavirus OC43 [HCoV-OC43]
cagcgucaacugcugccac

SEQ ID NO: 1604517 - RNA, 20 nt, Human coronavirus OC43 [HCoV-OC43]
cuugguguuuguguuaauua

SEQ ID NO: 1604518 - RNA, 14 nt, Human coronavirus OC43 [HCoV-OC43]
ggcaucugguggua

SEQ ID NO: 1604519 - RNA, 20 nt, Human coronavirus OC43 [HCoV-OC43]
uaaacauguuuuugauacuu

SEQ ID NO: 1604520 - RNA, 19 nt, Human coronavirus OC43 [HCoV-OC43]
auucuugguucucuggaau

SEQ ID NO: 1604521 - RNA, 16 nt, Human coronavirus OC43 [HCoV-OC43]
cugggucgcuagcaac

SEQ ID NO: 1604522 - RNA, 18 nt, Human coronavirus OC43 [HCoV-OC43]
cagggguagaagagcuca

SEQ ID NO: 1604523 - RNA, 20 nt, Human coronavirus OC43 [HCoV-OC43]
auggagaugcugguuuuacu

SEQ ID NO: 1604524 - RNA, 14 nt, Human coronavirus OC43 [HCoV-OC43]
acuaagcuuaaaga

SEQ ID NO: 1604525 - RNA, 19 nt, Human coronavirus OC43 [HCoV-OC43]
uggaacuagugacccacag

SEQ ID NO: 1604526 - RNA, 20 nt, Human coronavirus OC43 [HCoV-OC43]
augguauuauuuuuaaugcu

SEQ ID NO: 1604527 - RNA, 17 nt, Human coronavirus OC43 [HCoV-OC43]
uaguggcauuuuuggca

SEQ ID NO: 1604528 - RNA, 13 nt, Human coronavirus OC43 [HCoV-OC43]
gcagucauuuaac

SEQ ID NO: 1604529 - RNA, 17 nt, Human coronavirus OC43 [HCoV-OC43]
uccuauaaguacugaua

SEQ ID NO: 1604530 - RNA, 18 nt, Human coronavirus OC43 [HCoV-OC43]
ugaaugaaguuaauuaug

SEQ ID NO: 1604531 - RNA, 16 nt, Human coronavirus OC43 [HCoV-OC43]
acuagugacccacagu

SEQ ID NO: 1604532 - RNA, 22 nt, Human coronavirus OC43 [HCoV-OC43]
acugcugaugaagcuauuaaau

SEQ ID NO: 1604533 - RNA, 15 nt, Human coronavirus OC43 [HCoV-OC43]
gcaaccaucaggagg

SEQ ID NO: 1604534 - RNA, 17 nt, Human coronavirus OC43 [HCoV-OC43]
agaaagaugguuuuuau

SEQ ID NO: 1604535 - RNA, 16 nt, Human coronavirus OC43 [HCoV-OC43]
aagauggcguuaauuu

SEQ ID NO: 1604536 - RNA, 16 nt, Human coronavirus OC43 [HCoV-OC43]
auagauuuggugcuau

SEQ ID NO: 1604537 - RNA, 21 nt, Human coronavirus OC43 [HCoV-OC43]
cuuuggcugccaccucugcua

SEQ ID NO: 1604538 - RNA, 20 nt, Human coronavirus OC43 [HCoV-OC43]
agguuauagcagacuauaga

SEQ ID NO: 1604539 - RNA, 16 nt, Human coronavirus OC43 [HCoV-OC43]
gaugguaugaugaaua

SEQ ID NO: 1604540 - RNA, 14 nt, Human coronavirus OC43 [HCoV-OC43]
aaacugguuuucuu

SEQ ID NO: 1604541 - RNA, 21 nt, Human coronavirus OC43 [HCoV-OC43]
agcuuauugcuaaugcauuua

SEQ ID NO: 1604542 - RNA, 17 nt, Human coronavirus OC43 [HCoV-OC43]
uagagcguccucuggaa

SEQ ID NO: 1604543 - RNA, 15 nt, Human coronavirus OC43 [HCoV-OC43]
aacuaagcauacugc

SEQ ID NO: 1604544 - RNA, 20 nt, Human coronavirus OC43 [HCoV-OC43]
uuaaaacagccgauggcaac

SEQ ID NO: 1604545 - RNA, 19 nt, Human coronavirus OC43 [HCoV-OC43]
auuguaaucauauuguuaa

SEQ ID NO: 1604546 - RNA, 12 nt, Human coronavirus OC43 [HCoV-OC43]
aauuguuauuau

SEQ ID NO: 1604547 - RNA, 20 nt, Human coronavirus OC43 [HCoV-OC43]
uauaacggcgcaauuagguu

SEQ ID NO: 1604548 - RNA, 16 nt, Human coronavirus OC43 [HCoV-OC43]
gaugucuuuuauucag

SEQ ID NO: 1604549 - RNA, 15 nt, Human coronavirus OC43 [HCoV-OC43]
gcguaguagagccaa

SEQ ID NO: 1604550 - RNA, 20 nt, Human coronavirus OC43 [HCoV-OC43]
auguggaugacguuuaggua

SEQ ID NO: 1604551 - RNA, 18 nt, Human coronavirus OC43 [HCoV-OC43]
guuaucgguuuacuaauu

SEQ ID NO: 1604552 - RNA, 17 nt, Human coronavirus OC43 [HCoV-OC43]
ccaguuuagaaauguuc

SEQ ID NO: 1604553 - RNA, 23 nt, Human coronavirus OC43 [HCoV-OC43]
caaugcuuauaauaguacugcua

SEQ ID NO: 1604554 - RNA, 16 nt, Human coronavirus OC43 [HCoV-OC43]
guuaaugcgacuuauu

SEQ ID NO: 1604555 - RNA, 21 nt, Human coronavirus OC43 [HCoV-OC43]
cugauacuguugauguuacua

SEQ ID NO: 1604556 - RNA, 15 nt, Human coronavirus OC43 [HCoV-OC43]
gagaaauaauaucua

SEQ ID NO: 1604557 - RNA, 19 nt, Human coronavirus OC43 [HCoV-OC43]
ggcuauuccgacuagguuu

SEQ ID NO: 1604558 - RNA, 16 nt, Human coronavirus OC43 [HCoV-OC43]
gagcguccucuggaaa

SEQ ID NO: 1604559 - RNA, 17 nt, Human coronavirus OC43 [HCoV-OC43]
auuguguauuuugugaa

SEQ ID NO: 1604560 - RNA, 16 nt, Human coronavirus OC43 [HCoV-OC43]
aacccaagcaaacugc

SEQ ID NO: 1604561 - RNA, 14 nt, Human coronavirus OC43 [HCoV-OC43]
uguucuacugauuu

SEQ ID NO: 1604562 - RNA, 14 nt, Human coronavirus OC43 [HCoV-OC43]
ccacuaaaccucag

SEQ ID NO: 1604563 - RNA, 13 nt, Human coronavirus OC43 [HCoV-OC43]
ucauuagugcaga

SEQ ID NO: 1604564 - RNA, 16 nt, Human coronavirus OC43 [HCoV-OC43]
agucauuuaacuauag

SEQ ID NO: 1604565 - RNA, 15 nt, Human coronavirus OC43 [HCoV-OC43]
augaauagguuacag

SEQ ID NO: 1604566 - RNA, 16 nt, Human coronavirus OC43 [HCoV-OC43]
uguaauguauaguguu

SEQ ID NO: 1604567 - RNA, 17 nt, Human coronavirus OC43 [HCoV-OC43]
acaguuccccauucuug

SEQ ID NO: 1604568 - RNA, 16 nt, Human coronavirus OC43 [HCoV-OC43]
acuuguaauaauauug

SEQ ID NO: 1604569 - RNA, 19 nt, Human coronavirus OC43 [HCoV-OC43]
cuucuuaagaagauggaug

SEQ ID NO: 1604570 - RNA, 16 nt, Human coronavirus OC43 [HCoV-OC43]
aucaagaugguauuau

SEQ ID NO: 1604571 - RNA, 21 nt, Human coronavirus OC43 [HCoV-OC43]
aauuuuucuuuggguauuaua

SEQ ID NO: 1604572 - RNA, 16 nt, Human coronavirus OC43 [HCoV-OC43]
uuuucagauuaaauuu

SEQ ID NO: 1604573 - RNA, 22 nt, Human coronavirus OC43 [HCoV-OC43]
cucuaccccuauggcagauguc

SEQ ID NO: 1604574 - RNA, 17 nt, Human coronavirus OC43 [HCoV-OC43]
gcuaagggguacuggua

SEQ ID NO: 1604575 - RNA, 16 nt, Human coronavirus OC43 [HCoV-OC43]
uuuauaugauucuaau

SEQ ID NO: 1604576 - RNA, 22 nt, Human coronavirus OC43 [HCoV-OC43]
guuaauuauggccaauuggaag

SEQ ID NO: 1604577 - RNA, 18 nt, Human coronavirus OC43 [HCoV-OC43]
gcagcaaaauaagaguag

SEQ ID NO: 1604578 - RNA, 12 nt, Human coronavirus OC43 [HCoV-OC43]
auguauggcuuu

SEQ ID NO: 1604579 - RNA, 20 nt, Human coronavirus OC43 [HCoV-OC43]
uuguccugcagguacuaauu

SEQ ID NO: 1604580 - RNA, 19 nt, Human coronavirus OC43 [HCoV-OC43]
guacuggcuauucuuuggc

SEQ ID NO: 1604581 - RNA, 18 nt, Human coronavirus OC43 [HCoV-OC43]
cagaaaauuuugaauaag

SEQ ID NO: 1604582 - RNA, 15 nt, Human coronavirus OC43 [HCoV-OC43]
cugguuuuacuagca

SEQ ID NO: 1604583 - RNA, 21 nt, Human coronavirus OC43 [HCoV-OC43]
uaacaaugcccuuuaugcuau

SEQ ID NO: 1604584 - RNA, 21 nt, Human coronavirus OC43 [HCoV-OC43]
auuuuuaggaguuuucacuuu

SEQ ID NO: 1604585 - RNA, 14 nt, Human coronavirus OC43 [HCoV-OC43]
cauuaacuauuuug

SEQ ID NO: 1604586 - RNA, 15 nt, Human coronavirus OC43 [HCoV-OC43]
uauuuugcaugaugu

SEQ ID NO: 1604587 - RNA, 19 nt, Human coronavirus OC43 [HCoV-OC43]
uuauguuaaguccaaaguc

SEQ ID NO: 1604588 - RNA, 19 nt, Human coronavirus OC43 [HCoV-OC43]
ugucaaccuccguacuguu

SEQ ID NO: 1604589 - RNA, 16 nt, Human coronavirus OC43 [HCoV-OC43]
aaggaacaauguaugu

SEQ ID NO: 1604590 - RNA, 21 nt, Human coronavirus OC43 [HCoV-OC43]
uggcuauucuuuggcagauuu

SEQ ID NO: 1604591 - RNA, 18 nt, Human coronavirus OC43 [HCoV-OC43]
guuuagaaauguucaaac

SEQ ID NO: 1604592 - RNA, 13 nt, Human coronavirus OC43 [HCoV-OC43]
gaaaaguuuucau

SEQ ID NO: 1604593 - RNA, 21 nt, Human coronavirus OC43 [HCoV-OC43]
uguucuuacuaaucaugaugu

SEQ ID NO: 1604594 - RNA, 17 nt, Human coronavirus OC43 [HCoV-OC43]
gcccaagggaagagcca

SEQ ID NO: 1604595 - RNA, 17 nt, Human coronavirus OC43 [HCoV-OC43]
cuaguuagcugcauaau

SEQ ID NO: 1604596 - RNA, 15 nt, Human coronavirus OC43 [HCoV-OC43]
acuagugguuuugcu

SEQ ID NO: 1604597 - RNA, 18 nt, Human coronavirus OC43 [HCoV-OC43]
ugaguccaaaaccacagc

SEQ ID NO: 1604598 - RNA, 18 nt, Human coronavirus OC43 [HCoV-OC43]
auagguaguacuuuugua

SEQ ID NO: 1604599 - RNA, 13 nt, Human coronavirus OC43 [HCoV-OC43]
ucaguuucaaaag

SEQ ID NO: 1604600 - RNA, 21 nt, Human coronavirus OC43 [HCoV-OC43]
auuauuauguggauuguguau

SEQ ID NO: 1604601 - RNA, 21 nt, Human coronavirus OC43 [HCoV-OC43]
guuaauuuuacgccuuaucau

SEQ ID NO: 1604602 - RNA, 21 nt, Human coronavirus OC43 [HCoV-OC43]
cagacacugguguuguuacua

SEQ ID NO: 1604603 - RNA, 23 nt, Human coronavirus OC43 [HCoV-OC43]
acaagcucuccuaaaguuacuau

SEQ ID NO: 1604604 - RNA, 13 nt, Human coronavirus OC43 [HCoV-OC43]
auuauuuuaauaa

SEQ ID NO: 1604605 - RNA, 23 nt, Human coronavirus OC43 [HCoV-OC43]
uugcuaauuuuauuuugcaugau

SEQ ID NO: 1604606 - RNA, 14 nt, Human coronavirus OC43 [HCoV-OC43]
uucuacugauuuac

SEQ ID NO: 1604607 - RNA, 14 nt, Human coronavirus OC43 [HCoV-OC43]
ucuuucugauuuua

SEQ ID NO: 1604608 - RNA, 20 nt, Human coronavirus OC43 [HCoV-OC43]
ucugggaauccugacgagcc

SEQ ID NO: 1604609 - RNA, 22 nt, Human coronavirus OC43 [HCoV-OC43]
agaaggugguacuuuuuaugca

SEQ ID NO: 1604610 - RNA, 22 nt, Human coronavirus OC43 [HCoV-OC43]
auagaggauuuacuuuuugaua

SEQ ID NO: 1604611 - RNA, 12 nt, Human coronavirus OC43 [HCoV-OC43]
auuuuuguugag

SEQ ID NO: 1604612 - RNA, 16 nt, Human coronavirus OC43 [HCoV-OC43]
ugaaggugcugaauga

SEQ ID NO: 1604613 - RNA, 20 nt, Human coronavirus OC43 [HCoV-OC43]
uuacuagcauacuuaguggu

SEQ ID NO: 1604614 - RNA, 15 nt, Human coronavirus OC43 [HCoV-OC43]
agaagaggagcccca

SEQ ID NO: 1604615 - RNA, 20 nt, Human coronavirus OC43 [HCoV-OC43]
cuauagcggucguguuucug

SEQ ID NO: 1604616 - RNA, 15 nt, Human coronavirus OC43 [HCoV-OC43]
aucgcagauguuuac

SEQ ID NO: 1604617 - RNA, 21 nt, Human coronavirus OC43 [HCoV-OC43]
auugcguauacgcauugaaua

SEQ ID NO: 1604618 - RNA, 17 nt, Human coronavirus OC43 [HCoV-OC43]
uugcagugcccaaaagc

SEQ ID NO: 1604619 - RNA, 18 nt, Human coronavirus OC43 [HCoV-OC43]
uuaugauaaauauuuugg

SEQ ID NO: 1604620 - RNA, 10 nt, Human coronavirus OC43 [HCoV-OC43]
gcagugccca

SEQ ID NO: 1604621 - RNA, 24 nt, Human coronavirus OC43 [HCoV-OC43]
gcuauuucggaauauuaaaugcaa

SEQ ID NO: 1604622 - RNA, 14 nt, Human coronavirus OC43 [HCoV-OC43]
cauccagcagagcc

SEQ ID NO: 1604623 - RNA, 19 nt, Human coronavirus OC43 [HCoV-OC43]
agguuuacaauuucaaauu

SEQ ID NO: 1604624 - RNA, 16 nt, Human coronavirus OC43 [HCoV-OC43]
aaugguauuuuugcua

SEQ ID NO: 1604625 - RNA, 22 nt, Human coronavirus OC43 [HCoV-OC43]
uuaucaagaaggugguacuuuu

SEQ ID NO: 1604626 - RNA, 18 nt, Human coronavirus OC43 [HCoV-OC43]
uagguagugguuacugug

SEQ ID NO: 1604627 - RNA, 16 nt, Human coronavirus OC43 [HCoV-OC43]
aacuaauucugcuuua

SEQ ID NO: 1604628 - RNA, 19 nt, Human coronavirus OC43 [HCoV-OC43]
gugucaaaagccaaucauc

SEQ ID NO: 1604629 - RNA, 23 nt, Human coronavirus OC43 [HCoV-OC43]
guaauauggaggaguuuauucaa

SEQ ID NO: 1604630 - RNA, 19 nt, Human coronavirus OC43 [HCoV-OC43]
uugaccuacaauuggguaa

SEQ ID NO: 1604631 - RNA, 15 nt, Human coronavirus OC43 [HCoV-OC43]
gcuaauguuucuguu

SEQ ID NO: 1604632 - RNA, 15 nt, Human coronavirus OC43 [HCoV-OC43]
cuauagguaguacuu

SEQ ID NO: 1604633 - RNA, 12 nt, Human coronavirus OC43 [HCoV-OC43]
cugcugaugaag

SEQ ID NO: 1604634 - RNA, 16 nt, Human coronavirus OC43 [HCoV-OC43]
uuaucuugguuguguu

SEQ ID NO: 1604635 - RNA, 20 nt, Human coronavirus OC43 [HCoV-OC43]
uuaacuaucaauuuccuaaa

SEQ ID NO: 1604636 - RNA, 13 nt, Human coronavirus OC43 [HCoV-OC43]
guuuugagaccau

SEQ ID NO: 1604637 - RNA, 18 nt, Human coronavirus OC43 [HCoV-OC43]
gcuagucuuguucuggca

SEQ ID NO: 1604638 - RNA, 22 nt, Human coronavirus OC43 [HCoV-OC43]
aaugguguuacucuuagcacua

SEQ ID NO: 1604639 - RNA, 22 nt, Human coronavirus OC43 [HCoV-OC43]
ggacccaaguagcgaugaggcu

SEQ ID NO: 1604640 - RNA, 21 nt, Human coronavirus OC43 [HCoV-OC43]
gcuauaagugcuucuuuacaa

SEQ ID NO: 1604641 - RNA, 16 nt, Human coronavirus OC43 [HCoV-OC43]
gcugcaugaugcuuag

SEQ ID NO: 1604642 - RNA, 23 nt, Human coronavirus OC43 [HCoV-OC43]
acuuuuuaugcauauuuuacaga

SEQ ID NO: 1604643 - RNA, 17 nt, Human coronavirus OC43 [HCoV-OC43]
aacuggaaguuuuugga

SEQ ID NO: 1604644 - RNA, 18 nt, Human coronavirus OC43 [HCoV-OC43]
ucuuaccgcucuuaaugc

SEQ ID NO: 1604645 - RNA, 18 nt, Human coronavirus OC43 [HCoV-OC43]
gagccaauucuggcaaua

SEQ ID NO: 1604646 - RNA, 19 nt, Human coronavirus OC43 [HCoV-OC43]
uaggcagcgaauguaguaa

SEQ ID NO: 1604647 - RNA, 15 nt, Human coronavirus OC43 [HCoV-OC43]
augcagcauguaaau

SEQ ID NO: 1604648 - RNA, 17 nt, Human coronavirus OC43 [HCoV-OC43]
auuuuguuaauguaaau

SEQ ID NO: 1604649 - RNA, 18 nt, Human coronavirus OC43 [HCoV-OC43]
augggaauucguuuugaa

SEQ ID NO: 1604650 - RNA, 20 nt, Human coronavirus OC43 [HCoV-OC43]
aacugcugccacgaugguau

SEQ ID NO: 1604651 - RNA, 22 nt, Human coronavirus OC43 [HCoV-OC43]
cagguguuguuuccuguuuaua

SEQ ID NO: 1604652 - RNA, 16 nt, Human coronavirus OC43 [HCoV-OC43]
cguuuuucuuuggauc

SEQ ID NO: 1604653 - RNA, 21 nt, Human coronavirus OC43 [HCoV-OC43]
uuaaagaucguguaauguaua

SEQ ID NO: 1604654 - RNA, 14 nt, Human coronavirus OC43 [HCoV-OC43]
cucagaauuagaag

SEQ ID NO: 1604655 - RNA, 11 nt, Human coronavirus OC43 [HCoV-OC43]
aggaugucuuu

SEQ ID NO: 1604656 - RNA, 19 nt, Human coronavirus OC43 [HCoV-OC43]
cagagccucuagugcagga

SEQ ID NO: 1604657 - RNA, 22 nt, Human coronavirus OC43 [HCoV-OC43]
cccuauacugaagacaccucag

SEQ ID NO: 1604658 - RNA, 18 nt, Human coronavirus OC43 [HCoV-OC43]
guuacuauauugaaggcu

SEQ ID NO: 1604659 - RNA, 19 nt, Human coronavirus OC43 [HCoV-OC43]
aauuguaauuuuaauauga

SEQ ID NO: 1604660 - RNA, 18 nt, Human coronavirus OC43 [HCoV-OC43]
guaauccaaacauuauga

SEQ ID NO: 1604661 - RNA, 20 nt, Human coronavirus OC43 [HCoV-OC43]
aauuuugagccauuuacugu

SEQ ID NO: 1604662 - RNA, 17 nt, Human coronavirus OC43 [HCoV-OC43]
aaggauguuuaugaauu

SEQ ID NO: 1604663 - RNA, 21 nt, Human coronavirus OC43 [HCoV-OC43]
auacuuagugguuuguuauau

SEQ ID NO: 1604664 - RNA, 21 nt, Human coronavirus OC43 [HCoV-OC43]
auagcuccuaagagugguuau

SEQ ID NO: 1604665 - RNA, 16 nt, Human coronavirus OC43 [HCoV-OC43]
ggcucaggaaggucug

SEQ ID NO: 1604666 - RNA, 15 nt, Human coronavirus OC43 [HCoV-OC43]
acaauuggguaauuu

SEQ ID NO: 1604667 - RNA, 13 nt, Human coronavirus OC43 [HCoV-OC43]
cauacugccaaag

SEQ ID NO: 1604668 - RNA, 19 nt, Human coronavirus OC43 [HCoV-OC43]
uguuaauguaccauauguu

SEQ ID NO: 1604669 - RNA, 20 nt, Human coronavirus OC43 [HCoV-OC43]
uacucaguuucaaaagggaa

SEQ ID NO: 1604670 - RNA, 14 nt, Human coronavirus OC43 [HCoV-OC43]
ugccacgaugguau

SEQ ID NO: 1604671 - RNA, 16 nt, Human coronavirus OC43 [HCoV-OC43]
gacaccucagaaauau

SEQ ID NO: 1604672 - RNA, 16 nt, Human coronavirus OC43 [HCoV-OC43]
ugccgacaagugccca

SEQ ID NO: 1604673 - RNA, 13 nt, Human coronavirus OC43 [HCoV-OC43]
ugaaaauaauguu

SEQ ID NO: 1604674 - RNA, 19 nt, Human coronavirus OC43 [HCoV-OC43]
cucaggaaggucugcuccu

SEQ ID NO: 1604675 - RNA, 19 nt, Human coronavirus OC43 [HCoV-OC43]
uguagaagaauugcaugac

SEQ ID NO: 1604676 - RNA, 20 nt, Human coronavirus OC43 [HCoV-OC43]
ucuaggcagcgaauguagua

SEQ ID NO: 1604677 - RNA, 11 nt, Human coronavirus OC43 [HCoV-OC43]
ugcuguugauu

SEQ ID NO: 1604678 - RNA, 14 nt, Human coronavirus OC43 [HCoV-OC43]
auacagguguuguu

SEQ ID NO: 1604679 - RNA, 20 nt, Human coronavirus OC43 [HCoV-OC43]
gacaccgcauuguugagaaa

SEQ ID NO: 1604680 - RNA, 17 nt, Human coronavirus OC43 [HCoV-OC43]
ugccacuaaaccucagc

SEQ ID NO: 1604681 - RNA, 23 nt, Human coronavirus OC43 [HCoV-OC43]
agcuuauugcuaaugcauuuaac

SEQ ID NO: 1604682 - RNA, 19 nt, Human coronavirus OC43 [HCoV-OC43]
uggccaaagugcagaauuu

SEQ ID NO: 1604683 - RNA, 15 nt, Human coronavirus OC43 [HCoV-OC43]
gcgcaauuagguuug

SEQ ID NO: 1604684 - RNA, 22 nt, Human coronavirus OC43 [HCoV-OC43]
cagaauuuaucugggaauccug

SEQ ID NO: 1604685 - RNA, 23 nt, Human coronavirus OC43 [HCoV-OC43]
uuguauuuuuaacggcaaguuuu

SEQ ID NO: 1604686 - RNA, 13 nt, Human coronavirus OC43 [HCoV-OC43]
auugaugcugcua

SEQ ID NO: 1604687 - RNA, 15 nt, Human coronavirus OC43 [HCoV-OC43]
gaaaaugauaauaua

SEQ ID NO: 1604688 - RNA, 17 nt, Human coronavirus OC43 [HCoV-OC43]
augcaaaugcugaagcu

SEQ ID NO: 1604689 - RNA, 12 nt, Human coronavirus OC43 [HCoV-OC43]
cuaucugggaac

SEQ ID NO: 1604690 - RNA, 17 nt, Human coronavirus OC43 [HCoV-OC43]
aaggaaaauguugauuu

SEQ ID NO: 1604691 - RNA, 16 nt, Human coronavirus OC43 [HCoV-OC43]
uuugauacuuuuaauu

SEQ ID NO: 1604692 - RNA, 21 nt, Human coronavirus OC43 [HCoV-OC43]
ccauaauuauucuuauaugga

SEQ ID NO: 1604693 - RNA, 18 nt, Human coronavirus OC43 [HCoV-OC43]
ucaacaacaagaugguau

SEQ ID NO: 1604694 - RNA, 21 nt, Human coronavirus OC43 [HCoV-OC43]
aacuauagaauugauacuacu

SEQ ID NO: 1604695 - RNA, 17 nt, Human coronavirus OC43 [HCoV-OC43]
ccacuaaaccucagcaa

SEQ ID NO: 1604696 - RNA, 17 nt, Human coronavirus OC43 [HCoV-OC43]
aguccaaaaccacagcg

SEQ ID NO: 1604697 - RNA, 16 nt, Human coronavirus OC43 [HCoV-OC43]
acucgcacccacagcu

SEQ ID NO: 1604698 - RNA, 15 nt, Human coronavirus OC43 [HCoV-OC43]
aagccgcgugcagca

SEQ ID NO: 1604699 - RNA, 18 nt, Human coronavirus OC43 [HCoV-OC43]
gugguaaugguaaucaua

SEQ ID NO: 1604700 - RNA, 15 nt, Human coronavirus OC43 [HCoV-OC43]
cuccuauaaguacug

SEQ ID NO: 1604701 - RNA, 17 nt, Human coronavirus OC43 [HCoV-OC43]
ugacgagccccagaagg

SEQ ID NO: 1604702 - RNA, 19 nt, Human coronavirus OC43 [HCoV-OC43]
gacaagugcccaagggaag

SEQ ID NO: 1604703 - RNA, 15 nt, Human coronavirus OC43 [HCoV-OC43]
guuuggguacuuauu

SEQ ID NO: 1604704 - RNA, 19 nt, Human coronavirus OC43 [HCoV-OC43]
auuucuguccguguaaauu

SEQ ID NO: 1604705 - RNA, 17 nt, Human
cugcccuuaccugccag

SEQ ID NO: 1604706 - RNA, 16 nt, Human
cugcccuuaccugcca

SEQ ID NO: 1604707 - RNA, 12 nt, Human
cugcccuuaccu

SEQ ID NO: 1604708 - RNA, 19 nt, Human
cugccccuccucucugccc

SEQ ID NO: 1604709 - RNA, 20 nt, Human
cugccccuccucucugcccu

SEQ ID NO: 1604710 - RNA, 18 nt, Human
cugccccuccucucugcc

SEQ ID NO: 1604711 - RNA, 17 nt, Human
cugccccuccucucugc

SEQ ID NO: 1604712 - RNA, 13 nt, Human
cugccccucccuu

SEQ ID NO: 1604713 - RNA, 17 nt, Human
cugccccucccuucaac

SEQ ID NO: 1604714 - RNA, 14 nt, Human
cugccccucccuuc

SEQ ID NO: 1604715 - RNA, 23 nt, Human
cugccagggacagaggggguggc

SEQ ID NO: 1604716 - RNA, 22 nt, Human
cugccagggacagagggggugg

SEQ ID NO: 1604717 - RNA, 20 nt, Human
cugccagggacagagggggu

SEQ ID NO: 1604718 - RNA, 17 nt, Human
cugcauuuaaaagauac

SEQ ID NO: 1604719 - RNA, 18 nt, Human
cugcauuuaaaagauaca

SEQ ID NO: 1604720 - RNA, 17 nt, Human
cugccagucccccugcc

SEQ ID NO: 1604721 - RNA, 21 nt, Human
cugccagucccccugccccag

SEQ ID NO: 1604722 - RNA, 20 nt, Human
cugccagucccccugcccca

SEQ ID NO: 1604723 - RNA, 22 nt, Human
cugccagucccccugccccagg

SEQ ID NO: 1604724 - RNA, 13 nt, Human
cugccccccagcc

SEQ ID NO: 1604725 - RNA, 19 nt, Human
cugccauccagguucagcu

SEQ ID NO: 1604726 - RNA, 18 nt, Human
cugccauccagguucagc

SEQ ID NO: 1604727 - RNA, 16 nt, Human
cugccauccagguuca

SEQ ID NO: 1604728 - RNA, 16 nt, Human
cugccauauucuguug

SEQ ID NO: 1604729 - RNA, 14 nt, Human
cugcauuuaaaaga

SEQ ID NO: 1604730 - RNA, 13 nt, Human
cugcauuggcuuu

SEQ ID NO: 1604731 - RNA, 16 nt, Human
cugcacuccagccuga

SEQ ID NO: 1604732 - RNA, 15 nt, Human
cugcacuccagccug

SEQ ID NO: 1604733 - RNA, 20 nt, Human
cugcacuccagccugagcga

SEQ ID NO: 1604734 - RNA, 17 nt, Human
cugcacuccagccugag

SEQ ID NO: 1604735 - RNA, 23 nt, Human
cugcacuauagccuaggugacag

SEQ ID NO: 1604736 - RNA, 22 nt, Human
cugcacuauagccuaggugaca

SEQ ID NO: 1604737 - RNA, 13 nt, Human
cugcacuccagcc

SEQ ID NO: 1604738 - RNA, 20 nt, Human
cugcacuauagccuagguga

SEQ ID NO: 1604739 - RNA, 18 nt, Human
cugcacuauagccuaggu

SEQ ID NO: 1604740 - RNA, 17 nt, Human
cugcacuauagccuagg

SEQ ID NO: 1604741 - RNA, 16 nt, Human
cugcacuauagccuag

SEQ ID NO: 1604742 - RNA, 20 nt, Human
cugcacggugaauggcuuug

SEQ ID NO: 1604743 - RNA, 17 nt, Human
cugcacggugaauggcu

SEQ ID NO: 1604744 - RNA, 15 nt, Human
cugcacggugaaugg

SEQ ID NO: 1604745 - RNA, 14 nt, Human
cugcacggugaaug

SEQ ID NO: 1604746 - RNA, 23 nt, Human
cugcagccucaaccuccugggcu

SEQ ID NO: 1604747 - RNA, 19 nt, Human
cugcacuccagccugggug

SEQ ID NO: 1604748 - RNA, 24 nt, Human
cugcagccucaaccuccugggcua

SEQ ID NO: 1604749 - RNA, 17 nt, Human
cugcacuccagccuggg

SEQ ID NO: 1604750 - RNA, 16 nt, Human
cugcacuccagccugg

SEQ ID NO: 1604751 - RNA, 18 nt, Human
cugcacuccagccugggu

SEQ ID NO: 1604752 - RNA, 20 nt, Human
cugcaggcagccaggccaca

SEQ ID NO: 1604753 - RNA, 19 nt, Human
cugcaggcagccaggccac

SEQ ID NO: 1604754 - RNA, 18 nt, Human
cugcaggcagccaggcca

SEQ ID NO: 1604755 - RNA, 17 nt, Human
cugcaggcagccaggcc

SEQ ID NO: 1604756 - RNA, 16 nt, Human
cugcaggcagccaggc

SEQ ID NO: 1604757 - RNA, 15 nt, Human
cugcaggcagccagg

SEQ ID NO: 1604758 - RNA, 14 nt, Human
cugcaggcagccag

SEQ ID NO: 1604759 - RNA, 13 nt, Human
cugcaggcagcca

SEQ ID NO: 1604760 - RNA, 12 nt, Human
cugcagcuuugu

SEQ ID NO: 1604761 - RNA, 22 nt, Human
cugcaaaggguaucaggugcug

SEQ ID NO: 1604762 - RNA, 21 nt, Human
cugcaaaggguaucaggugcu

SEQ ID NO: 1604763 - RNA, 18 nt, Human
cugcaaagcccagcuuga

SEQ ID NO: 1604764 - RNA, 23 nt, Human
cugaugggcaacccccagccugc

SEQ ID NO: 1604765 - RNA, 22 nt, Human
cugaugggcaacccccagccug

SEQ ID NO: 1604766 - RNA, 24 nt, Human
cugaugggcaacccccagccugcu

SEQ ID NO: 1604767 - RNA, 20 nt, Human
cugaugcuucuucagagacu

SEQ ID NO: 1604768 - RNA, 19 nt, Human
cugaugcuucuucagagac

SEQ ID NO: 1604769 - RNA, 18 nt, Human
cugaugcuucuucagaga

SEQ ID NO: 1604770 - RNA, 21 nt, Human
cugaugggcaacccccagccu

SEQ ID NO: 1604771 - RNA, 18 nt, Human
cugaugggcaacccccag

SEQ ID NO: 1604772 - RNA, 17 nt, Human
cugaugcuucuucagag

SEQ ID NO: 1604773 - RNA, 16 nt, Human
cugaugcuucuucaga

SEQ ID NO: 1604774 - RNA, 15 nt, Human
cucuuaugggcuggg

SEQ ID NO: 1604775 - RNA, 14 nt, Human
cucuuaugggcugg

SEQ ID NO: 1604776 - RNA, 18 nt, Human
cucuuauaucuauauuuu

SEQ ID NO: 1604777 - RNA, 15 nt, Human
cucuuauaucuauau

SEQ ID NO: 1604778 - RNA, 20 nt, Human
cugcaagaauugaagcagga

SEQ ID NO: 1604779 - RNA, 12 nt, Human
cugcaagggagu

SEQ ID NO: 1604780 - RNA, 23 nt, Human
cugcaccgggccacagagaaagu

SEQ ID NO: 1604781 - RNA, 21 nt, Human
cugcaaccugauugugucucu

SEQ ID NO: 1604782 - RNA, 19 nt, Human
cugcaaccugauugugucu

SEQ ID NO: 1604783 - RNA, 14 nt, Human
cugcaaccugauug

SEQ ID NO: 1604784 - RNA, 22 nt, Human
cugcaaccuccgccucuugggu

SEQ ID NO: 1604785 - RNA, 20 nt, Human
cugcaaccuccgccucuugg

SEQ ID NO: 1604786 - RNA, 18 nt, Human
cugcaagaauugaagcag

SEQ ID NO: 1604787 - RNA, 19 nt, Human
cugcaacuuguaaaugugg

SEQ ID NO: 1604788 - RNA, 18 nt, Human
cugcaacuuguaaaugug

SEQ ID NO: 1604789 - RNA, 22 nt, Human
cugcaaccugauugugucucuu

SEQ ID NO: 1604790 - RNA, 22 nt, Human
cugcaaccuucgccaccugggu

SEQ ID NO: 1604791 - RNA, 20 nt, Human
cugcaaccuucgccaccugg

SEQ ID NO: 1604792 - RNA, 19 nt, Human
cugcaaccuucgccaccug

SEQ ID NO: 1604793 - RNA, 17 nt, Human
cugcaaccuucgccacc

SEQ ID NO: 1604794 - RNA, 15 nt, Human
cuggaugcagccuca

SEQ ID NO: 1604795 - RNA, 15 nt, Human
cuggaguucugguuc

SEQ ID NO: 1604796 - RNA, 17 nt, Human
cuggaguucugguuccu

SEQ ID NO: 1604797 - RNA, 16 nt, Human
cuggaguucugguucc

SEQ ID NO: 1604798 - RNA, 23 nt, Human
cuggacugugugcucaggagccc

SEQ ID NO: 1604799 - RNA, 22 nt, Human
cuggacugugugcucaggagcc

SEQ ID NO: 1604800 - RNA, 19 nt, Human
cuggacugugugcucagga

SEQ ID NO: 1604801 - RNA, 19 nt, Human
cugcucacauaucugucau

SEQ ID NO: 1604802 - RNA, 16 nt, Human
cugcucacauaucugu

SEQ ID NO: 1604803 - RNA, 12 nt, Human
cugcugacagug

SEQ ID NO: 1604804 - RNA, 15 nt, Human
cugcugaaggcucga

SEQ ID NO: 1604805 - RNA, 14 nt, Human
cugcugaaggcucg

SEQ ID NO: 1604806 - RNA, 13 nt, Human
cugcugaaggcuc

SEQ ID NO: 1604807 - RNA, 15 nt, Human
cugcugacaguguug

SEQ ID NO: 1604808 - RNA, 13 nt, Human
cugcugacagugu

SEQ ID NO: 1604809 - RNA, 23 nt, Human
cugcugagucccaggcugagccu

SEQ ID NO: 1604810 - RNA, 19 nt, Human
cugcugagucccaggcuga

SEQ ID NO: 1604811 - RNA, 12 nt, Human
cuggcccuuccu

SEQ ID NO: 1604812 - RNA, 22 nt, Human
cuggcuaugcauuugaaaauuu

SEQ ID NO: 1604813 - RNA, 15 nt, Human
cuggcuaugcauuug

SEQ ID NO: 1604814 - RNA, 16 nt, Human
cuggcuaugcauuuga

SEQ ID NO: 1604815 - RNA, 13 nt, Human
cuggcuaugcauu

SEQ ID NO: 1604816 - RNA, 14 nt, Human
cuggcuaugcauuu

SEQ ID NO: 1604817 - RNA, 22 nt, Human
cugggacaugggaaaggggaag

SEQ ID NO: 1604818 - RNA, 18 nt, Human
cugggacaugggaaaggg

SEQ ID NO: 1604819 - RNA, 14 nt, Human
cugggacaugggaa

SEQ ID NO: 1604820 - RNA, 16 nt, Human
cugggacuacaggcac

SEQ ID NO: 1604821 - RNA, 15 nt, Human
cugggacuacaggca

SEQ ID NO: 1604822 - RNA, 13 nt, Human
cugggacuacagg

SEQ ID NO: 1604823 - RNA, 22 nt, Human
cugggagaaccaaaaagaggcu

SEQ ID NO: 1604824 - RNA, 17 nt, Human
cugggagaaaugaaaaa

SEQ ID NO: 1604825 - RNA, 16 nt, Human
cugggagaaaugaaaa

SEQ ID NO: 1604826 - RNA, 12 nt, Human
cugggcagagga

SEQ ID NO: 1604827 - RNA, 16 nt, Human
cugggcagaggaaagc

SEQ ID NO: 1604828 - RNA, 13 nt, Human
cugggcagaggaa

SEQ ID NO: 1604829 - RNA, 13 nt, Human
cugggcagcugcc

SEQ ID NO: 1604830 - RNA, 20 nt, Human
cugggcagaggaaagcaaag

SEQ ID NO: 1604831 - RNA, 16 nt, Human
cugggcagcugccucc

SEQ ID NO: 1604832 - RNA, 14 nt, Human
cugggcagcugccu

SEQ ID NO: 1604833 - RNA, 15 nt, Human
cugggcagcugccuc

SEQ ID NO: 1604834 - RNA, 20 nt, Human
cugggcagguuggugggggc

SEQ ID NO: 1604835 - RNA, 14 nt, Human
cuggggagaaagua

SEQ ID NO: 1604836 - RNA, 13 nt, Human
cuggggagaaagu

SEQ ID NO: 1604837 - RNA, 20 nt, Human
cuggguggcaccagcagccu

SEQ ID NO: 1604838 - RNA, 18 nt, Human
cuggguggcaccagcagc

SEQ ID NO: 1604839 - RNA, 21 nt, Human
cuggugccucaccccuugcca

SEQ ID NO: 1604840 - RNA, 21 nt, Human
cuggguggcaccagcagccug

SEQ ID NO: 1604841 - RNA, 22 nt, Human
cuggguggcaccagcagccugg

SEQ ID NO: 1604842 - RNA, 14 nt, Human
cuggguguggcgca

SEQ ID NO: 1604843 - RNA, 15 nt, Human
cuggguguggcgcag

SEQ ID NO: 1604844 - RNA, 13 nt, Human
cuugcucugcuga

SEQ ID NO: 1604845 - RNA, 23 nt, Human
cuugccgucuaccugaggggccu

SEQ ID NO: 1604846 - RNA, 20 nt, Human
cuugccgucuaccugagggg

SEQ ID NO: 1604847 - RNA, 12 nt, Human
cuugacagggca

SEQ ID NO: 1604848 - RNA, 23 nt, Human
cuugaaugaugccaugaggaaca

SEQ ID NO: 1604849 - RNA, 12 nt, Human
cuugcucugcug

SEQ ID NO: 1604850 - RNA, 20 nt, Human
cuugaaugaugccaugagga

SEQ ID NO: 1604851 - RNA, 22 nt, Human
cuucuucagagacuccugcagg

SEQ ID NO: 1604852 - RNA, 20 nt, Human
cuucuguuuuauaauuuugu

SEQ ID NO: 1604853 - RNA, 15 nt, Human
cuucuguuuuauaau

SEQ ID NO: 1604854 - RNA, 21 nt, Human
cuucuucagagacuccugcag

SEQ ID NO: 1604855 - RNA, 20 nt, Human
cuucuucagagacuccugca

SEQ ID NO: 1604856 - RNA, 15 nt, Human
cuuuucaaaacauuu

SEQ ID NO: 1604857 - RNA, 19 nt, Human
cuuuuauuuagcaccaggg

SEQ ID NO: 1604858 - RNA, 19 nt, Human
cuuuuauaaacuuuaccuu

SEQ ID NO: 1604859 - RNA, 16 nt, Human
cuuuuauaaacuuuac

SEQ ID NO: 1604860 - RNA, 18 nt, Human
cuuuuauaaacuuuaccu

SEQ ID NO: 1604861 - RNA, 15 nt, Human
cuuuuauaaacuuua

SEQ ID NO: 1604862 - RNA, 16 nt, Human
cuuuggucuacacugu

SEQ ID NO: 1604863 - RNA, 20 nt, Human
cuuuggucuacacugugcug

SEQ ID NO: 1604864 - RNA, 22 nt, Human
cuuucggggagaggcugaggac

SEQ ID NO: 1604865 - RNA, 17 nt, Human
cuuucuaaugugugaau

SEQ ID NO: 1604866 - RNA, 21 nt, Human
cuuugagugucuuaauuaaaa

SEQ ID NO: 1604867 - RNA, 22 nt, Human
cuuugacgccaucccagcccca

SEQ ID NO: 1604868 - RNA, 21 nt, Human
cuuugacgccaucccagcccc

SEQ ID NO: 1604869 - RNA, 19 nt, Human
cuuugacgccaucccagcc

SEQ ID NO: 1604870 - RNA, 16 nt, Human
cuuugagcuuaagaau

SEQ ID NO: 1604871 - RNA, 13 nt, Human
cuuucagauacug

SEQ ID NO: 1604872 - RNA, 13 nt, Human
cuuguggacacag

SEQ ID NO: 1604873 - RNA, 15 nt, Human
cuuguggacacagcu

SEQ ID NO: 1604874 - RNA, 14 nt, Human
cuuguggacacagc

SEQ ID NO: 1604875 - RNA, 16 nt, Human
cuuguggacacagcuc

SEQ ID NO: 1604876 - RNA, 15 nt, Human
cuuuaaaugcugcuu

SEQ ID NO: 1604877 - RNA, 14 nt, Human
cuuuaaaugcugcu

SEQ ID NO: 1604878 - RNA, 22 nt, Human
cuuucaauaggaaaaacugauu

SEQ ID NO: 1604879 - RNA, 21 nt, Human
cuuucaauaggaaaaacugau

SEQ ID NO: 1604880 - RNA, 20 nt, Human
cuuucaauaggaaaaacuga

SEQ ID NO: 1604881 - RNA, 23 nt, Human
cuuucaauaggaaaaacugauuu

SEQ ID NO: 1604882 - RNA, 16 nt, Human
cuuuaauuuuggaauu

SEQ ID NO: 1604883 - RNA, 13 nt, Human
cuuuaauuuugga

SEQ ID NO: 1604884 - RNA, 15 nt, Human
cuuuaauuuuggaau

SEQ ID NO: 1604885 - RNA, 14 nt, Human
cuuuaauuuuggaa

SEQ ID NO: 1604886 - RNA, 14 nt, Human
cuguucagcuccag

SEQ ID NO: 1604887 - RNA, 13 nt, Human
cuguucagcucca

SEQ ID NO: 1604888 - RNA, 19 nt, Human
cugugucuugcaauggcag

SEQ ID NO: 1604889 - RNA, 16 nt, Human
cugugucuugcaaugg

SEQ ID NO: 1604890 - RNA, 20 nt, Human
cugugucuugcaauggcagc

SEQ ID NO: 1604891 - RNA, 15 nt, Human
cuguucacucuacuu

SEQ ID NO: 1604892 - RNA, 17 nt, Human
cugugacuucagcucug

SEQ ID NO: 1604893 - RNA, 22 nt, Human
cugugacuucagcucuguuuua

SEQ ID NO: 1604894 - RNA, 19 nt, Human
cugugucucccuucauccu

SEQ ID NO: 1604895 - RNA, 14 nt, Human
cugugucucccuuc

SEQ ID NO: 1604896 - RNA, 14 nt, Human
cugugucuugcaau

SEQ ID NO: 1604897 - RNA, 19 nt, Human
cugugucagguggggcagc

SEQ ID NO: 1604898 - RNA, 20 nt, Human
cugugucagcauagaaguaa

SEQ ID NO: 1604899 - RNA, 21 nt, Human
cugugucagguggggcagcuu

SEQ ID NO: 1604900 - RNA, 22 nt, Human
cugugucagguggggcagcuug

SEQ ID NO: 1604901 - RNA, 11 nt, Human
cugugcugccc

SEQ ID NO: 1604902 - RNA, 22 nt, Human
cugugcugagucugaaggcugg

SEQ ID NO: 1604903 - RNA, 20 nt, Human
cugugcugagucugaaggcu

SEQ ID NO: 1604904 - RNA, 17 nt, Human
cuguugcugccucaugc

SEQ ID NO: 1604905 - RNA, 16 nt, Human
cuguugcugccucaug

SEQ ID NO: 1604906 - RNA, 15 nt, Human
cuguugcugccucau

SEQ ID NO: 1604907 - RNA, 13 nt, Human
cuuaccugccagg

SEQ ID NO: 1604908 - RNA, 21 nt, Human
cuuaccucggugccuuccucu

SEQ ID NO: 1604909 - RNA, 19 nt, Human
cuuaccucggugccuuccu

SEQ ID NO: 1604910 - RNA, 13 nt, Human
cuuaccucggugc

SEQ ID NO: 1604911 - RNA, 17 nt, Human
cuuacccucauguucuu

SEQ ID NO: 1604912 - RNA, 18 nt, Human
cuuacccucauguucuua

SEQ ID NO: 1604913 - RNA, 19 nt, Human
cuuacccucauguucuuaa

SEQ ID NO: 1604914 - RNA, 15 nt, Human
cuuaaagaguguggc

SEQ ID NO: 1604915 - RNA, 21 nt, Human
cuuaaagaguguggcaaaaua

SEQ ID NO: 1604916 - RNA, 13 nt, Human
cuuacacaauggu

SEQ ID NO: 1604917 - RNA, 13 nt, Human
cuuaaaguugaau

SEQ ID NO: 1604918 - RNA, 11 nt, Human
cuuaaaguuga

SEQ ID NO: 1604919 - RNA, 14 nt, Human
cuuaaaguugaauu

SEQ ID NO: 1604920 - RNA, 20 nt, Human
cuguugggccaggagccucc

SEQ ID NO: 1604921 - RNA, 17 nt, Human
cuguugggccaggagcc

SEQ ID NO: 1604922 - RNA, 16 nt, Human
cuguugggccaggagc

SEQ ID NO: 1604923 - RNA, 20 nt, Human
cuuaaaauauuccugcauuu

SEQ ID NO: 1604924 - RNA, 18 nt, Human
cuuaaaauauuccugcau

SEQ ID NO: 1604925 - RNA, 21 nt, Human
cuuaugggcuggguucuaccc

SEQ ID NO: 1604926 - RNA, 14 nt, Human
cuuaugggcugggu

SEQ ID NO: 1604927 - RNA, 23 nt, Human
cuuaugggcuggguucuacccag

SEQ ID NO: 1604928 - RNA, 22 nt, Human
cuuaugggcuggguucuaccca

SEQ ID NO: 1604929 - RNA, 13 nt, Human
cuuauugcccacg

SEQ ID NO: 1604930 - RNA, 12 nt, Human
cuuauugcccac

SEQ ID NO: 1604931 - RNA, 21 nt, Human
cuuagcagggaaacagcuaau

SEQ ID NO: 1604932 - RNA, 18 nt, Human
cuuagcagggaaacagcu

SEQ ID NO: 1604933 - RNA, 20 nt, Human
cuuccaugucgccucugcau

SEQ ID NO: 1604934 - RNA, 19 nt, Human
cuuccaugucgccucugca

SEQ ID NO: 1604935 - RNA, 18 nt, Human
cuuccaugucgccucugc

SEQ ID NO: 1604936 - RNA, 17 nt, Human
cuuccaugucgccucug

SEQ ID NO: 1604937 - RNA, 20 nt, Human
cuuccagugaggcucugccc

SEQ ID NO: 1604938 - RNA, 19 nt, Human
cuuccagugaggcucugcc

SEQ ID NO: 1604939 - RNA, 18 nt, Human
cuuccagugaggcucugc

SEQ ID NO: 1604940 - RNA, 17 nt, Human
cuuccauggacuuuguu

SEQ ID NO: 1604941 - RNA, 16 nt, Human
cuuccauggacuuugu

SEQ ID NO: 1604942 - RNA, 16 nt, Human
cuuccaugucgccucu

SEQ ID NO: 1604943 - RNA, 15 nt, Human
cuuccaugucgccuc

SEQ ID NO: 1604944 - RNA, 23 nt, Human
cuucaugcugucuacacuaagag

SEQ ID NO: 1604945 - RNA, 22 nt, Human
cuucaucucccaaagugcuggg

SEQ ID NO: 1604946 - RNA, 16 nt, Human
cuucauccuccucaga

SEQ ID NO: 1604947 - RNA, 24 nt, Human
cuucagagacuccugcaggcagcc

SEQ ID NO: 1604948 - RNA, 23 nt, Human
cuucagagacuccugcaggcagc

SEQ ID NO: 1604949 - RNA, 18 nt, Human
cuucaguggcagcugcuu

SEQ ID NO: 1604950 - RNA, 17 nt, Human
cuucaguuaagccuuug

SEQ ID NO: 1604951 - RNA, 15 nt, Human
cuucauccuccucag

SEQ ID NO: 1604952 - RNA, 13 nt, Human
cuucaucccucug

SEQ ID NO: 1604953 - RNA, 18 nt, Human
cuucaguuaagccuuugg

SEQ ID NO: 1604954 - RNA, 11 nt, Human
cuucagacaua

SEQ ID NO: 1604955 - RNA, 22 nt, Human
cuucagagacuccugcaggcag

SEQ ID NO: 1604956 - RNA, 21 nt, Human
cuucagagacuccugcaggca

SEQ ID NO: 1604957 - RNA, 16 nt, Human
cuucagagacuccugc

SEQ ID NO: 1604958 - RNA, 18 nt, Human
cuuauugcccacgcugga

SEQ ID NO: 1604959 - RNA, 14 nt, Human
cuucaccuuugucc

SEQ ID NO: 1604960 - RNA, 20 nt, Human
cuucaccuuuguccccaccg

SEQ ID NO: 1604961 - RNA, 17 nt, Human
cuucaccuuugucccca

SEQ ID NO: 1604962 - RNA, 16 nt, Human
gacacacugaagaagc

SEQ ID NO: 1604963 - RNA, 15 nt, Human
gacacacugaagaag

SEQ ID NO: 1604964 - RNA, 16 nt, Human
gacacagcucuucucc

SEQ ID NO: 1604965 - RNA, 14 nt, Human
gacacagcucuucu

SEQ ID NO: 1604966 - RNA, 12 nt, Human
gacacaggcccg

SEQ ID NO: 1604967 - RNA, 23 nt, Human
gacacagcucuucuccaggcugu

SEQ ID NO: 1604968 - RNA, 22 nt, Human
gacacagcucuucuccaggcug

SEQ ID NO: 1604969 - RNA, 17 nt, Human
gacacagcucuucucca

SEQ ID NO: 1604970 - RNA, 21 nt, Human
gacagaaagcagaacagugau

SEQ ID NO: 1604971 - RNA, 17 nt, Human
gacagcccgggcucugc

SEQ ID NO: 1604972 - RNA, 18 nt, Human
gaccagggauuuccauga

SEQ ID NO: 1604973 - RNA, 19 nt, Human
gaccaucccugaaggcccc

SEQ ID NO: 1604974 - RNA, 18 nt, Human
gaccaucccugaaggccc

SEQ ID NO: 1604975 - RNA, 13 nt, Human
gaccaucccugaa

SEQ ID NO: 1604976 - RNA, 12 nt, Human
gaccaucccuga

SEQ ID NO: 1604977 - RNA, 20 nt, Human
gaccagggauuuccaugaug

SEQ ID NO: 1604978 - RNA, 13 nt, Human
gaccauacuaauu

SEQ ID NO: 1604979 - RNA, 21 nt, Human
gacagugagacucugucucag

SEQ ID NO: 1604980 - RNA, 19 nt, Human
gacagcccgggcucugccu

SEQ ID NO: 1604981 - RNA, 18 nt, Human
gacagcccgggcucugcc

SEQ ID NO: 1604982 - RNA, 20 nt, Human
gacagcccgggcucugccuc

SEQ ID NO: 1604983 - RNA, 17 nt, Human
gacauugcggacagcca

SEQ ID NO: 1604984 - RNA, 15 nt, Human
gacauugcggacagc

SEQ ID NO: 1604985 - RNA, 14 nt, Human
gacauugcggacag

SEQ ID NO: 1604986 - RNA, 17 nt, Human
gacauuugcucauggaa

SEQ ID NO: 1604987 - RNA, 16 nt, Human
gacauuugcucaugga

SEQ ID NO: 1604988 - RNA, 19 nt, Human
gacauuguuggccaaagcc

SEQ ID NO: 1604989 - RNA, 21 nt, Human
gacucuuaagaagacugcauu

SEQ ID NO: 1604990 - RNA, 15 nt, Human
gacucuuaagaagac

SEQ ID NO: 1604991 - RNA, 14 nt, Human
gacucuuaagaaga

SEQ ID NO: 1604992 - RNA, 22 nt, Human
gacucaccucccccaucucuuc

SEQ ID NO: 1604993 - RNA, 15 nt, Human
gacucaccuccccca

SEQ ID NO: 1604994 - RNA, 16 nt, Human
gacucugccuccucuu

SEQ ID NO: 1604995 - RNA, 12 nt, Human
gacucugccucc

SEQ ID NO: 1604996 - RNA, 14 nt, Human
gacugaauuucuuu

SEQ ID NO: 1604997 - RNA, 14 nt, Human
gacugaauuaugaa

SEQ ID NO: 1604998 - RNA, 16 nt, Human
gacugaauuucuuuug

SEQ ID NO: 1604999 - RNA, 20 nt, Human
gacugaauuaugaaacuuuu

SEQ ID NO: 1605000 - RNA, 23 nt, Human
gacuguacuccucccaggcgccc

SEQ ID NO: 1605001 - RNA, 18 nt, Human
gacuguacuccucccagg

SEQ ID NO: 1605002 - RNA, 22 nt, Human
gacugugugcucaggagcccug

SEQ ID NO: 1605003 - RNA, 14 nt, Human
gacuguggugacuu

SEQ ID NO: 1605004 - RNA, 13 nt, Human
gacuguggugacu

SEQ ID NO: 1605005 - RNA, 17 nt, Human
gacuguggugacuuugg

SEQ ID NO: 1605006 - RNA, 17 nt, Human
gacgcucucuggccuuc

SEQ ID NO: 1605007 - RNA, 16 nt, Human
gacgcucucuggccuu

SEQ ID NO: 1605008 - RNA, 15 nt, Human
gacgcucucuggccu

SEQ ID NO: 1605009 - RNA, 19 nt, Human
gacgcuacccgggaagggg

SEQ ID NO: 1605010 - RNA, 18 nt, Human
gacgcuacccgggaaggg

SEQ ID NO: 1605011 - RNA, 16 nt, Human
gacgcuacccgggaag

SEQ ID NO: 1605012 - RNA, 18 nt, Human
gacgccaucccagcccca

SEQ ID NO: 1605013 - RNA, 17 nt, Human
gacgccaucccagcccc

SEQ ID NO: 1605014 - RNA, 19 nt, Human
gacgccaucccagccccaa

SEQ ID NO: 1605015 - RNA, 14 nt, Human
gaccaucccugaag

SEQ ID NO: 1605016 - RNA, 20 nt, Human
gaccaucccugaaggccccg

SEQ ID NO: 1605017 - RNA, 14 nt, Human
gaccucugcagcaa

SEQ ID NO: 1605018 - RNA, 16 nt, Human
gacgccaucccagccc

SEQ ID NO: 1605019 - RNA, 14 nt, Human
gaccugaggcccuu

SEQ ID NO: 1605020 - RNA, 13 nt, Human
gaccugaggcccu

SEQ ID NO: 1605021 - RNA, 11 nt, Human
gaccugaggcc

SEQ ID NO: 1605022 - RNA, 15 nt, Human
gaagcagaggaagga

SEQ ID NO: 1605023 - RNA, 21 nt, Human
gaagcacaugccucucucagg

SEQ ID NO: 1605024 - RNA, 14 nt, Human
gaagcaaaauuuuu

SEQ ID NO: 1605025 - RNA, 16 nt, Human
gaagacaaugacuuac

SEQ ID NO: 1605026 - RNA, 23 nt, Human
gaagacaaugugaaaagaaaaau

SEQ ID NO: 1605027 - RNA, 22 nt, Human
gaagacaaugacuuacuguaca

SEQ ID NO: 1605028 - RNA, 23 nt, Human
gaagcaacccaaauguucaucaa

SEQ ID NO: 1605029 - RNA, 20 nt, Human
gaagcaaugcuucaucccuu

SEQ ID NO: 1605030 - RNA, 20 nt, Human
gaagcacaugccucucucag

SEQ ID NO: 1605031 - RNA, 17 nt, Human
gaagcacaugccucucu

SEQ ID NO: 1605032 - RNA, 15 nt, Human
gaagcacaugccucu

SEQ ID NO: 1605033 - RNA, 14 nt, Human
gaacugaaaucaua

SEQ ID NO: 1605034 - RNA, 20 nt, Human
gaacucugacaacagacuuc

SEQ ID NO: 1605035 - RNA, 12 nt, Human
gaacuggcugca

SEQ ID NO: 1605036 - RNA, 11 nt, Human
gaacuggcugc

SEQ ID NO: 1605037 - RNA, 20 nt, Human
gaagcuaucguaaaauuaag

SEQ ID NO: 1605038 - RNA, 19 nt, Human
gaagcuccgcuuucuaccc

SEQ ID NO: 1605039 - RNA, 22 nt, Human
gaagcuccgcuuucuacccagc

SEQ ID NO: 1605040 - RNA, 19 nt, Human
gaaggcuggguucugaucc

SEQ ID NO: 1605041 - RNA, 15 nt, Human
gaaggcuggguucug

SEQ ID NO: 1605042 - RNA, 21 nt, Human
gaaggcucgagcaugccugga

SEQ ID NO: 1605043 - RNA, 19 nt, Human
gaaggccccgcccaggcuu

SEQ ID NO: 1605044 - RNA, 18 nt, Human
gaaggccccgcccaggcu

SEQ ID NO: 1605045 - RNA, 22 nt, Human
gaaggcuggguucugauccuag

SEQ ID NO: 1605046 - RNA, 20 nt, Human
gaaggcuggguucugauccu

SEQ ID NO: 1605047 - RNA, 20 nt, Human
gaauauuagugaccucagcu

SEQ ID NO: 1605048 - RNA, 15 nt, Human
gaauauugcugaugg

SEQ ID NO: 1605049 - RNA, 14 nt, Human
gaauauugcugaug

SEQ ID NO: 1605050 - RNA, 20 nt, Human
gaauauugcugauggugcaa

SEQ ID NO: 1605051 - RNA, 19 nt, Human
gaauauugcugauggugca

SEQ ID NO: 1605052 - RNA, 22 nt, Human
gaaggggagauaaggguaucug

SEQ ID NO: 1605053 - RNA, 15 nt, Human
gaggucgaggcagga

SEQ ID NO: 1605054 - RNA, 23 nt, Human
gaggugaccccagguuucuaugu

SEQ ID NO: 1605055 - RNA, 17 nt, Human
gaguugauucagcucug

SEQ ID NO: 1605056 - RNA, 16 nt, Human
gaguugauucagcucu

SEQ ID NO: 1605057 - RNA, 15 nt, Human
gaguugauucagcuc

SEQ ID NO: 1605058 - RNA, 20 nt, Human
gagugacagaggcagcccca

SEQ ID NO: 1605059 - RNA, 21 nt, Human
gagugaguuggguguauugug

SEQ ID NO: 1605060 - RNA, 18 nt, Human
gagugacagaggcagccc

SEQ ID NO: 1605061 - RNA, 13 nt, Human
gagucccaccuug

SEQ ID NO: 1605062 - RNA, 12 nt, Human
gagucccaccuu

SEQ ID NO: 1605063 - RNA, 22 nt, Human
gagucagaaguuucugccgcag

SEQ ID NO: 1605064 - RNA, 16 nt, Human
gagucaccaagcccag

SEQ ID NO: 1605065 - RNA, 17 nt, Human
gagucaccaagcccagu

SEQ ID NO: 1605066 - RNA, 16 nt, Human
gaguuuaaauuguaau

SEQ ID NO: 1605067 - RNA, 22 nt, Human
gaguuguuacauuuuuaagugc

SEQ ID NO: 1605068 - RNA, 18 nt, Human
gaguugauucagcucugc

SEQ ID NO: 1605069 - RNA, 20 nt, Human
gagccuuccaggggugggac

SEQ ID NO: 1605070 - RNA, 19 nt, Human
gagccuugaacuuugaccu

SEQ ID NO: 1605071 - RNA, 23 nt, Human
gagccuuccaggggugggacacc

SEQ ID NO: 1605072 - RNA, 13 nt, Human
gagccuugaacuu

SEQ ID NO: 1605073 - RNA, 21 nt, Human
gagcgcccacuagacccacug

SEQ ID NO: 1605074 - RNA, 15 nt, Human
gaggacgcucucugg

SEQ ID NO: 1605075 - RNA, 20 nt, Human
gaggacgcucucuggccuuc

SEQ ID NO: 1605076 - RNA, 14 nt, Human
gaggcagggucuca

SEQ ID NO: 1605077 - RNA, 18 nt, Human
gaggcagggucucacucu

SEQ ID NO: 1605078 - RNA, 15 nt, Human
gaggcagggucucac

SEQ ID NO: 1605079 - RNA, 22 nt, Human
gaggccaaggugggaggauugc

SEQ ID NO: 1605080 - RNA, 23 nt, Human
gaggcuccacuuggucugugaga

SEQ ID NO: 1605081 - RNA, 12 nt, Human
gaggcuccacuu

SEQ ID NO: 1605082 - RNA, 19 nt, Human
gaggcuccacuuggucugu

SEQ ID NO: 1605083 - RNA, 22 nt, Human
gaggcuagugugguguuuccug

SEQ ID NO: 1605084 - RNA, 19 nt, Human
gaggccagagacacaagcc

SEQ ID NO: 1605085 - RNA, 14 nt, Human
gaggccagagacac

SEQ ID NO: 1605086 - RNA, 13 nt, Human
gaggccagagaca

SEQ ID NO: 1605087 - RNA, 17 nt, Human
gaggcaucgcaauguaa

SEQ ID NO: 1605088 - RNA, 12 nt, Human
gaggggccucuu

SEQ ID NO: 1605089 - RNA, 22 nt, Human
gcacaucagcacgauuucuguu

SEQ ID NO: 1605090 - RNA, 23 nt, Human
gcacaucagcacgauuucuguuu

SEQ ID NO: 1605091 - RNA, 14 nt, Human
gcaccgggccacag

SEQ ID NO: 1605092 - RNA, 23 nt, Human
gcaccgggccacagagaaaguac

SEQ ID NO: 1605093 - RNA, 21 nt, Human
gcaccuaccaccacgcccggc

SEQ ID NO: 1605094 - RNA, 22 nt, Human
gcaccuaccaccacgcccggcu

SEQ ID NO: 1605095 - RNA, 17 nt, Human
gcacuccccugcugggu

SEQ ID NO: 1605096 - RNA, 17 nt, Human
gcacucagaagacacug

SEQ ID NO: 1605097 - RNA, 16 nt, Human
gcacucagaagacacu

SEQ ID NO: 1605098 - RNA, 13 nt, Human
gcacucagaagac

SEQ ID NO: 1605099 - RNA, 22 nt, Human
gcacuccccugcuggguguggc

SEQ ID NO: 1605100 - RNA, 21 nt, Human
gauuuuuuuguuguuuguuua

SEQ ID NO: 1605101 - RNA, 18 nt, Human
gauuuuuuuguuguuugu

SEQ ID NO: 1605102 - RNA, 20 nt, Human
gcaaguauuagaauaccaca

SEQ ID NO: 1605103 - RNA, 18 nt, Human
gcaagucagaauagaaau

SEQ ID NO: 1605104 - RNA, 22 nt, Human
gcaauagucaaauugugugaaa

SEQ ID NO: 1605105 - RNA, 22 nt, Human
gcacaguuuucugagaaagacu

SEQ ID NO: 1605106 - RNA, 20 nt, Human
gcacaguuuucugagaaaga

SEQ ID NO: 1605107 - RNA, 23 nt, Human
gcacaguuuucugagaaagacua

SEQ ID NO: 1605108 - RNA, 20 nt, Human
gcacaccgggcacucagaag

SEQ ID NO: 1605109 - RNA, 19 nt, Human
gcacagugcaucucagccc

SEQ ID NO: 1605110 - RNA, 21 nt, Human
gcacagugcaucucagcccac

SEQ ID NO: 1605111 - RNA, 20 nt, Human
gcacagugcaucucagccca

SEQ ID NO: 1605112 - RNA, 14 nt, Human
gcacaccgggcacu

SEQ ID NO: 1605113 - RNA, 22 nt, Human
gcacaagcugcacccucaggca

SEQ ID NO: 1605114 - RNA, 17 nt, Human
gauucuccugccucagc

SEQ ID NO: 1605115 - RNA, 15 nt, Human
gauucuccugccuca

SEQ ID NO: 1605116 - RNA, 18 nt, Human
gauucuccugccucagcc

SEQ ID NO: 1605117 - RNA, 15 nt, Human
gauuuaccacuugug

SEQ ID NO: 1605118 - RNA, 12 nt, Human
gauucuucugcu

SEQ ID NO: 1605119 - RNA, 18 nt, Human
gauucuuccucccucccu

SEQ ID NO: 1605120 - RNA, 17 nt, Human
gauucuuccucccuccc

SEQ ID NO: 1605121 - RNA, 23 nt, Human
gauucuucagcaaaaauauuuua

SEQ ID NO: 1605122 - RNA, 16 nt, Human
gauuuaccacuugugu

SEQ ID NO: 1605123 - RNA, 20 nt, Human
gauuuuuuacagcugccugc

SEQ ID NO: 1605124 - RNA, 12 nt, Human
gauuauuggaaa

SEQ ID NO: 1605125 - RNA, 22 nt, Human
gauuauucacugauuugacaua

SEQ ID NO: 1605126 - RNA, 14 nt, Human
gauuauauuaugaa

SEQ ID NO: 1605127 - RNA, 20 nt, Human
gauuauaggcaccuaccacc

SEQ ID NO: 1605128 - RNA, 20 nt, Human
gauguauguugaagccuuug

SEQ ID NO: 1605129 - RNA, 21 nt, Human
gauguauguugaagccuuugu

SEQ ID NO: 1605130 - RNA, 16 nt, Human
gaugaucuuuaaaaua

SEQ ID NO: 1605131 - RNA, 21 nt, Human
gaugaucuaggaagacuuugg

SEQ ID NO: 1605132 - RNA, 15 nt, Human
gaugaucuaggaaga

SEQ ID NO: 1605133 - RNA, 16 nt, Human
gaugagugagcaugcc

SEQ ID NO: 1605134 - RNA, 18 nt, Human
gauguagaggagaaacug

SEQ ID NO: 1605135 - RNA, 14 nt, Human
gaugaucuuugcag

SEQ ID NO: 1605136 - RNA, 23 nt, Human
gaucugccuaaggacuucuuuaa

SEQ ID NO: 1605137 - RNA, 21 nt, Human
gaucugccuaaggacuucuuu

SEQ ID NO: 1605138 - RNA, 20 nt, Human
gaucugccuaaggacuucuu

SEQ ID NO: 1605139 - RNA, 18 nt, Human
gaucugccuaaggacuuc

SEQ ID NO: 1605140 - RNA, 22 nt, Human
gcucagguggggucacucuggc

SEQ ID NO: 1605141 - RNA, 21 nt, Human
gcucagguggggucacucugg

SEQ ID NO: 1605142 - RNA, 15 nt, Human
gcucagagagggugg

SEQ ID NO: 1605143 - RNA, 20 nt, Human
gcucagagagggugggagug

SEQ ID NO: 1605144 - RNA, 18 nt, Human
gcucagagagggugggag

SEQ ID NO: 1605145 - RNA, 22 nt, Human
gcucagagagggugggaguggg

SEQ ID NO: 1605146 - RNA, 14 nt, Human
gcucaggagcccug

SEQ ID NO: 1605147 - RNA, 16 nt, Human
gcucagggccuggcuc

SEQ ID NO: 1605148 - RNA, 13 nt, Human
gcucagggccugg

SEQ ID NO: 1605149 - RNA, 17 nt, Human
gcucagggccuggcuca

SEQ ID NO: 1605150 - RNA, 12 nt, Human
gcucagggccug

SEQ ID NO: 1605151 - RNA, 21 nt, Human
gcucaggagcccugggaggcu

SEQ ID NO: 1605152 - RNA, 18 nt, Human
gcucaggagcccugggag

SEQ ID NO: 1605153 - RNA, 15 nt, Human
gcucaggagcccugg

SEQ ID NO: 1605154 - RNA, 18 nt, Human
gcuaggaacacuccuuca

SEQ ID NO: 1605155 - RNA, 21 nt, Human
gcuaggaacacuccuucacag

SEQ ID NO: 1605156 - RNA, 19 nt, Human
gcuaggaacacuccuucac

SEQ ID NO: 1605157 - RNA, 16 nt, Human
gcuaguaucaaaagaa

SEQ ID NO: 1605158 - RNA, 21 nt, Human
gcuaguaauuggaaaggcagc

SEQ ID NO: 1605159 - RNA, 15 nt, Human
gcuaggccuggccag

SEQ ID NO: 1605160 - RNA, 14 nt, Human
gcuaggccuggcca

SEQ ID NO: 1605161 - RNA, 21 nt, Human
gcuauugucaccagggcugga

SEQ ID NO: 1605162 - RNA, 20 nt, Human
gcuauugucaccagggcugg

SEQ ID NO: 1605163 - RNA, 16 nt, Human
gcuauugucaccaggg

SEQ ID NO: 1605164 - RNA, 19 nt, Human
gccuguucagcuccagcuc

SEQ ID NO: 1605165 - RNA, 14 nt, Human
gccugugucuuuaa

SEQ ID NO: 1605166 - RNA, 20 nt, Human
gccuguucagcuccagcuca

SEQ ID NO: 1605167 - RNA, 14 nt, Human
gccuguucagcucc

SEQ ID NO: 1605168 - RNA, 23 nt, Human
gcucuggagcccacuguacuugc

SEQ ID NO: 1605169 - RNA, 21 nt, Human
gcucugagcaaauguggcucc

SEQ ID NO: 1605170 - RNA, 20 nt, Human
gcucugagcaaauguggcuc

SEQ ID NO: 1605171 - RNA, 15 nt, Human
gcucuguccugggag

SEQ ID NO: 1605172 - RNA, 16 nt, Human
gcucuguccugggagu

SEQ ID NO: 1605173 - RNA, 23 nt, Human
gcucugucgcccaggcuggagug

SEQ ID NO: 1605174 - RNA, 19 nt, Human
gcucugucgcccaggcugg

SEQ ID NO: 1605175 - RNA, 12 nt, Human
gcucuuccaggc

SEQ ID NO: 1605176 - RNA, 16 nt, Human
gcucuuccaggcuggg

SEQ ID NO: 1605177 - RNA, 15 nt, Human
gcucuuccaggcugg

SEQ ID NO: 1605178 - RNA, 17 nt, Human
gcugaaugguuuucaaa

SEQ ID NO: 1605179 - RNA, 23 nt, Human
gcugaaggcucgagcaugccugg

SEQ ID NO: 1605180 - RNA, 20 nt, Human
gcugaaggcucgagcaugcc

SEQ ID NO: 1605181 - RNA, 12 nt, Human
gcugaaggcucg

SEQ ID NO: 1605182 - RNA, 15 nt, Human
gcugacagacacagg

SEQ ID NO: 1605183 - RNA, 14 nt, Human
gcugacagacacag

SEQ ID NO: 1605184 - RNA, 16 nt, Human
gcugacagacacaggc

SEQ ID NO: 1605185 - RNA, 17 nt, Human
gcugacagacacaggcc

SEQ ID NO: 1605186 - RNA, 16 nt, Human
gcucucaggccagcug

SEQ ID NO: 1605187 - RNA, 15 nt, Human
gcucucaggccagcu

SEQ ID NO: 1605188 - RNA, 14 nt, Human
gcucucaggccagc

SEQ ID NO: 1605189 - RNA, 13 nt, Human
gcucucaggccag

SEQ ID NO: 1605190 - RNA, 22 nt, Human
gcucuacagcuaaucagcauuc

SEQ ID NO: 1605191 - RNA, 20 nt, Human
gcucuacagcuaaucagcau

SEQ ID NO: 1605192 - RNA, 21 nt, Human
gcucccaggcauuccccagga

SEQ ID NO: 1605193 - RNA, 20 nt, Human
gcucccaggcauuccccagg

SEQ ID NO: 1605194 - RNA, 23 nt, Human
gcucccaggcauuccccaggagg

SEQ ID NO: 1605195 - RNA, 22 nt, Human
gcucccaggcauuccccaggag

SEQ ID NO: 1605196 - RNA, 14 nt, Human
gcuccccagcccca

SEQ ID NO: 1605197 - RNA, 15 nt, Human
gcuccccucggagaa

SEQ ID NO: 1605198 - RNA, 18 nt, Human
gcuccccucggagaagag

SEQ ID NO: 1605199 - RNA, 22 nt, Human
gcuccugccaccacgcccggcu

SEQ ID NO: 1605200 - RNA, 18 nt, Human
gcugccugggaucccuca

SEQ ID NO: 1605201 - RNA, 16 nt, Human
gcugccugggaucccu

SEQ ID NO: 1605202 - RNA, 19 nt, Human
gcugccugggaucccucau

SEQ ID NO: 1605203 - RNA, 16 nt, Human
gcugccuccccuccuc

SEQ ID NO: 1605204 - RNA, 17 nt, Human
gcugccuccccuccucu

SEQ ID NO: 1605205 - RNA, 20 nt, Human
gcugccuccccuccucugcu

SEQ ID NO: 1605206 - RNA, 21 nt, Human
gcugccuccccuccucugcuu

SEQ ID NO: 1605207 - RNA, 22 nt, Human
gcugccuccccuccucugcuug

SEQ ID NO: 1605208 - RNA, 13 nt, Human
gcugccugggauc

SEQ ID NO: 1605209 - RNA, 18 nt, Human
gcugagggugagugggug

SEQ ID NO: 1605210 - RNA, 17 nt, Human
gcugcaccggcuggccu

SEQ ID NO: 1605211 - RNA, 16 nt, Human
gcugcaccggcuggcc

SEQ ID NO: 1605212 - RNA, 22 nt, Human
gcugcaccggcuggccuggccc

SEQ ID NO: 1605213 - RNA, 19 nt, Human
gcugcaccggcuggccugg

SEQ ID NO: 1605214 - RNA, 18 nt, Human
gcugcaccggcuggccug

SEQ ID NO: 1605215 - RNA, 23 nt, Human
gcugccauccagguucagcuugu

SEQ ID NO: 1605216 - RNA, 22 nt, Human
gcugccaucucaccuccugcug

SEQ ID NO: 1605217 - RNA, 23 nt, Human
gcugccaucucaccuccugcugg

SEQ ID NO: 1605218 - RNA, 21 nt, Human
gcugccauccagguucagcuu

SEQ ID NO: 1605219 - RNA, 21 nt, Human
gcugccagccgagauagccaa

SEQ ID NO: 1605220 - RNA, 19 nt, Human
gcugccagccgagauagcc

SEQ ID NO: 1605221 - RNA, 17 nt, Human
gcuggagcucugcccau

SEQ ID NO: 1605222 - RNA, 12 nt, Human
gcuggagugcag

SEQ ID NO: 1605223 - RNA, 14 nt, Human
gcuggagcucugcc

SEQ ID NO: 1605224 - RNA, 19 nt, Human
gcugggauuacagguguga

SEQ ID NO: 1605225 - RNA, 18 nt, Human
gcugggauuacaggugug

SEQ ID NO: 1605226 - RNA, 17 nt, Human
gcugggauuacaggugu

SEQ ID NO: 1605227 - RNA, 15 nt, Human
gcugggcagaggaaa

SEQ ID NO: 1605228 - RNA, 14 nt, Human
gcugggcagaggaa

SEQ ID NO: 1605229 - RNA, 13 nt, Human
gcugggcagagga

SEQ ID NO: 1605230 - RNA, 19 nt, Human
gcuggccuggccccucagg

SEQ ID NO: 1605231 - RNA, 18 nt, Human
gcuggccuggccccucag

SEQ ID NO: 1605232 - RNA, 16 nt, Human
gcugggauuacaggug

SEQ ID NO: 1605233 - RNA, 23 nt, Human
gcugggauuacaggcuccugcca

SEQ ID NO: 1605234 - RNA, 22 nt, Human
gcugggauuacaggcuccugcc

SEQ ID NO: 1605235 - RNA, 17 nt, Human
gcuggccuggccccuca

SEQ ID NO: 1605236 - RNA, 16 nt, Human
gcuggccuggccccuc

SEQ ID NO: 1605237 - RNA, 15 nt, Human
gcuggagugcaguga

SEQ ID NO: 1605238 - RNA, 14 nt, Human
gcuggagugcagug

SEQ ID NO: 1605239 - RNA, 20 nt, Human
gcugggcucccuucccaccu

SEQ ID NO: 1605240 - RNA, 17 nt, Human
gcugggcucccuuccca

SEQ ID NO: 1605241 - RNA, 16 nt, Human
gcugggcucccuuccc

SEQ ID NO: 1605242 - RNA, 19 nt, Human
gcugggcagaggaaagcaa

SEQ ID NO: 1605243 - RNA, 17 nt, Human
gcugggcagaggaaagc

SEQ ID NO: 1605244 - RNA, 16 nt, Human
gcugggcagaggaaag

SEQ ID NO: 1605245 - RNA, 14 nt, Human
gcugggcagguugg

SEQ ID NO: 1605246 - RNA, 16 nt, Human
gcugggucgcccugga

SEQ ID NO: 1605247 - RNA, 18 nt, Human
gcugggucgcccuggacu

SEQ ID NO: 1605248 - RNA, 17 nt, Human
gcugggucgcccuggac

SEQ ID NO: 1605249 - RNA, 15 nt, Human
gcuggguguggcgca

SEQ ID NO: 1605250 - RNA, 19 nt, Human
gcugggucgcccuggacug

SEQ ID NO: 1605251 - RNA, 20 nt, Human
gcuucacggaagagccuugc

SEQ ID NO: 1605252 - RNA, 15 nt, Human
gcuucacggaagagc

SEQ ID NO: 1605253 - RNA, 14 nt, Human
gcuuaacuucacau

SEQ ID NO: 1605254 - RNA, 22 nt, Human
gcuucaaggauccugagccaga

SEQ ID NO: 1605255 - RNA, 14 nt, Human
gcugugcugcccug

SEQ ID NO: 1605256 - RNA, 13 nt, Human
gcugugcugcccu

SEQ ID NO: 1605257 - RNA, 12 nt, Human
gcugugcugccc

SEQ ID NO: 1605258 - RNA, 21 nt, Human
gcugugcucuggacaggcaug

SEQ ID NO: 1605259 - RNA, 22 nt, Human
gcugugcugcccugcccaccug

SEQ ID NO: 1605260 - RNA, 19 nt, Human
gcugugcugcccugcccac

SEQ ID NO: 1605261 - RNA, 22 nt, Human
gcuguuggcugggggccucagu

SEQ ID NO: 1605262 - RNA, 21 nt, Human
gcuguuggcugggggccucag

SEQ ID NO: 1605263 - RNA, 23 nt, Human
gcuguaucccaugagccucagca

SEQ ID NO: 1605264 - RNA, 20 nt, Human
gcuguaucccaugagccuca

SEQ ID NO: 1605265 - RNA, 17 nt, Human
gcuggguucuacccagg

SEQ ID NO: 1605266 - RNA, 21 nt, Human
gcuggguuggaggguguccca

SEQ ID NO: 1605267 - RNA, 14 nt, Human
gcuggguuggaggg

SEQ ID NO: 1605268 - RNA, 15 nt, Human
gcuggguucugaucc

SEQ ID NO: 1605269 - RNA, 15 nt, Human
gcuggguucuaccca

SEQ ID NO: 1605270 - RNA, 23 nt, Human
gcuucccgcucagcccucccugc

SEQ ID NO: 1605271 - RNA, 18 nt, Human
gcuucccgcucagcccuc

SEQ ID NO: 1605272 - RNA, 17 nt, Human
gcuucccgcucagcccu

SEQ ID NO: 1605273 - RNA, 16 nt, Human
gcuucccgcucagccc

SEQ ID NO: 1605274 - RNA, 15 nt, Human
gcuucccgcucagcc

SEQ ID NO: 1605275 - RNA, 14 nt, Human
gcuuguacauaaug

SEQ ID NO: 1605276 - RNA, 16 nt, Human
gcuuguacauaaugcg

SEQ ID NO: 1605277 - RNA, 19 nt, Human
gcuugggcuucauccuccu

SEQ ID NO: 1605278 - RNA, 19 nt, Human
gcuugaaacccguggcgcu

SEQ ID NO: 1605279 - RNA, 15 nt, Human
gccuggccccucagg

SEQ ID NO: 1605280 - RNA, 17 nt, Human
gccuggccccucagggu

SEQ ID NO: 1605281 - RNA, 16 nt, Human
gccuggccccucaggg

SEQ ID NO: 1605282 - RNA, 10 nt, Human
gccuggccug

SEQ ID NO: 1605283 - RNA, 22 nt, Human
gccuggccccucagggucccug

SEQ ID NO: 1605284 - RNA, 20 nt, Human
gccuggccccucaggguccc

SEQ ID NO: 1605285 - RNA, 18 nt, Human
gccugggaucccucaucc

SEQ ID NO: 1605286 - RNA, 21 nt, Human
gccugggaucccucauccuca

SEQ ID NO: 1605287 - RNA, 22 nt, Human
gccugugucuuuaaaugcugcu

SEQ ID NO: 1605288 - RNA, 13 nt, Human
gccugugucuuua

SEQ ID NO: 1605289 - RNA, 14 nt, Human
gccugggaucccuc

SEQ ID NO: 1605290 - RNA, 22 nt, Human
gccugggaggucaaggcugcag

SEQ ID NO: 1605291 - RNA, 21 nt, Human
gccugggaggucaaggcugca

SEQ ID NO: 1605292 - RNA, 16 nt, Human
gccugccucuucucua

SEQ ID NO: 1605293 - RNA, 17 nt, Human
gccugccuguucccauu

SEQ ID NO: 1605294 - RNA, 13 nt, Human
gccuccuccagcc

SEQ ID NO: 1605295 - RNA, 13 nt, Human
gccuccugugugu

SEQ ID NO: 1605296 - RNA, 12 nt, Human
gccucugggacu

SEQ ID NO: 1605297 - RNA, 14 nt, Human
gccucugggacugg

SEQ ID NO: 1605298 - RNA, 20 nt, Human
gccugcccaggccccugcca

SEQ ID NO: 1605299 - RNA, 19 nt, Human
gccugcccaggccccugcc

SEQ ID NO: 1605300 - RNA, 18 nt, Human
gccugcccaggccccugc

SEQ ID NO: 1605301 - RNA, 23 nt, Human
gccucuucucuacucuagggaaa

SEQ ID NO: 1605302 - RNA, 12 nt, Human
gccucuucucua

SEQ ID NO: 1605303 - RNA, 12 nt, Human
gccucuuccucc

SEQ ID NO: 1605304 - RNA, 22 nt, Human
gccucuuccucccucauuccac

SEQ ID NO: 1605305 - RNA, 16 nt, Human
gcccccaggugccagu

SEQ ID NO: 1605306 - RNA, 19 nt, Human
gccccaaaacucuccucug

SEQ ID NO: 1605307 - RNA, 18 nt, Human
gccccaaaacucuccucu

SEQ ID NO: 1605308 - RNA, 14 nt, Human
gccccugcccggcu

SEQ ID NO: 1605309 - RNA, 13 nt, Human
gccccugcccggc

SEQ ID NO: 1605310 - RNA, 14 nt, Human
gcccccucugcccu

SEQ ID NO: 1605311 - RNA, 22 nt, Human
gccccuggaugcagccucacag

SEQ ID NO: 1605312 - RNA, 18 nt, Human
gccccuggaugcagccuc

SEQ ID NO: 1605313 - RNA, 16 nt, Human
gccccuggaugcagcc

SEQ ID NO: 1605314 - RNA, 15 nt, Human
gccccugcccggcug

SEQ ID NO: 1605315 - RNA, 22 nt, Human
gcccuaaaguguauuuuuuuac

SEQ ID NO: 1605316 - RNA, 15 nt, Human
gcccacucccugcaa

SEQ ID NO: 1605317 - RNA, 14 nt, Human
gcccacucccugca

SEQ ID NO: 1605318 - RNA, 19 nt, Human
gcccacucccugcaaccug

SEQ ID NO: 1605319 - RNA, 13 nt, Human
gcccacucccugc

SEQ ID NO: 1605320 - RNA, 23 nt, Human
gcccacuagacccacuggacuca

SEQ ID NO: 1605321 - RNA, 17 nt, Human
gcccacuagacccacug

SEQ ID NO: 1605322 - RNA, 13 nt, Human
gcccuguuaaaag

SEQ ID NO: 1605323 - RNA, 23 nt, Human
gcccugcugagucccaggcugag

SEQ ID NO: 1605324 - RNA, 22 nt, Human
gcccugcugagucccaggcuga

SEQ ID NO: 1605325 - RNA, 21 nt, Human
gcccugcugagucccaggcug

SEQ ID NO: 1605326 - RNA, 17 nt, Human
gcccuguuaaaagauga

SEQ ID NO: 1605327 - RNA, 14 nt, Human
gcccuguuaaaaga

SEQ ID NO: 1605328 - RNA, 22 nt, Human
gcccugccuccuuugugaggaa

SEQ ID NO: 1605329 - RNA, 16 nt, Human
gcccugccuccuuugu

SEQ ID NO: 1605330 - RNA, 16 nt, Human
gcccugcugaguccca

SEQ ID NO: 1605331 - RNA, 16 nt, Human
gccgccaugcuccugg

SEQ ID NO: 1605332 - RNA, 15 nt, Human
gccgccaugcuccug

SEQ ID NO: 1605333 - RNA, 21 nt, Human
gcccuuaccugccaggaagcc

SEQ ID NO: 1605334 - RNA, 20 nt, Human
gcccuuaccugccaggaagc

SEQ ID NO: 1605335 - RNA, 16 nt, Human
gcccuuaccugccagg

SEQ ID NO: 1605336 - RNA, 20 nt, Human
gccauauucuguuggccagu

SEQ ID NO: 1605337 - RNA, 19 nt, Human
gccauauucuguuggccag

SEQ ID NO: 1605338 - RNA, 14 nt, Human
gccauguuggccag

SEQ ID NO: 1605339 - RNA, 18 nt, Human
gccauguuggccaggcug

SEQ ID NO: 1605340 - RNA, 17 nt, Human
gccauguuggccaggcu

SEQ ID NO: 1605341 - RNA, 16 nt, Human
gccauguuggccaggc

SEQ ID NO: 1605342 - RNA, 15 nt, Human
gccauguuggccagg

SEQ ID NO: 1605343 - RNA, 24 nt, Human
gccauguuggccaggcuggucuca

SEQ ID NO: 1605344 - RNA, 22 nt, Human
gccauguuggccaggcuggucu

SEQ ID NO: 1605345 - RNA, 20 nt, Human
gccauguuggccaggcuggu

SEQ ID NO: 1605346 - RNA, 19 nt, Human
gccauguuggccaggcugg

SEQ ID NO: 1605347 - RNA, 11 nt, Human
gccauguuuau

SEQ ID NO: 1605348 - RNA, 18 nt, Human
gccauuccccgucucugg

SEQ ID NO: 1605349 - RNA, 17 nt, Human
gccauuccccgucucug

SEQ ID NO: 1605350 - RNA, 17 nt, Human
gcccacgcuggagugca

SEQ ID NO: 1605351 - RNA, 16 nt, Human
gcccacgcuggagugc

SEQ ID NO: 1605352 - RNA, 15 nt, Human
gcccacgcuggagug

SEQ ID NO: 1605353 - RNA, 15 nt, Human
gcccacgcccccacu

SEQ ID NO: 1605354 - RNA, 14 nt, Human
gcccacgcccccac

SEQ ID NO: 1605355 - RNA, 13 nt, Human
gcccacgccccca

SEQ ID NO: 1605356 - RNA, 18 nt, Human
gcccaccuuggcucaagu

SEQ ID NO: 1605357 - RNA, 13 nt, Human
gccaggccagagg

SEQ ID NO: 1605358 - RNA, 17 nt, Human
gccaggcccucugccca

SEQ ID NO: 1605359 - RNA, 16 nt, Human
gccaggcccucugccc

SEQ ID NO: 1605360 - RNA, 21 nt, Human
gccaggcccucugcccacucc

SEQ ID NO: 1605361 - RNA, 20 nt, Human
gccaggcccucugcccacuc

SEQ ID NO: 1605362 - RNA, 19 nt, Human
gccaggcccucugcccacu

SEQ ID NO: 1605363 - RNA, 12 nt, Human
gccaggccagag

SEQ ID NO: 1605364 - RNA, 22 nt, Human
gccagcaguucagagcugcccu

SEQ ID NO: 1605365 - RNA, 23 nt, Human
gccagcaguucagagcugcccuc

SEQ ID NO: 1605366 - RNA, 23 nt, Human
gccagcaggcucucaggccagcu

SEQ ID NO: 1605367 - RNA, 21 nt, Human
gccagcaggcucucaggccag

SEQ ID NO: 1605368 - RNA, 20 nt, Human
gccagcaggcucucaggcca

SEQ ID NO: 1605369 - RNA, 19 nt, Human
gccagcaggcucucaggcc

SEQ ID NO: 1605370 - RNA, 18 nt, Human
gccagcaggcucucaggc

SEQ ID NO: 1605371 - RNA, 17 nt, Human
gccagcaggcucucagg

SEQ ID NO: 1605372 - RNA, 16 nt, Human
gccagcaggcucucag

SEQ ID NO: 1605373 - RNA, 13 nt, Human
gccagcaggcucu

SEQ ID NO: 1605374 - RNA, 22 nt, Human
gccagacaucaacagauaaaua

SEQ ID NO: 1605375 - RNA, 15 nt, Human
gccagaauuucaaac

SEQ ID NO: 1605376 - RNA, 18 nt, Human
gcacuuggagacuuguau

SEQ ID NO: 1605377 - RNA, 20 nt, Human
gccacauuccugaugcuucu

SEQ ID NO: 1605378 - RNA, 16 nt, Human
gccacauuccugaugc

SEQ ID NO: 1605379 - RNA, 21 nt, Human
gccaccaacauacucccaucu

SEQ ID NO: 1605380 - RNA, 20 nt, Human
gccaccaacauacucccauc

SEQ ID NO: 1605381 - RNA, 19 nt, Human
gccaccaacauacucccau

SEQ ID NO: 1605382 - RNA, 22 nt, Human
gccaccaacauacucccaucug

SEQ ID NO: 1605383 - RNA, 13 nt, Human
gccaccacgcccg

SEQ ID NO: 1605384 - RNA, 14 nt, Human
gccaccacgcccgg

SEQ ID NO: 1605385 - RNA, 19 nt, Human
gccacugugaagagaacca

SEQ ID NO: 1605386 - RNA, 18 nt, Human
gccacugugaagagaacc

SEQ ID NO: 1605387 - RNA, 17 nt, Human
gccacugccucuuccuc

SEQ ID NO: 1605388 - RNA, 16 nt, Human
gccacugccucuuccu

SEQ ID NO: 1605389 - RNA, 13 nt, Human
gccacugccucuu

SEQ ID NO: 1605390 - RNA, 12 nt, Human
gccacugccucu

SEQ ID NO: 1605391 - RNA, 21 nt, Human
gccacuugaugacccccaacc

SEQ ID NO: 1605392 - RNA, 23 nt, Human
gccacugcaccgggccacagaga

SEQ ID NO: 1605393 - RNA, 19 nt, Human
gccacccuggggagaaagu

SEQ ID NO: 1605394 - RNA, 13 nt, Human
gccacccugggga

SEQ ID NO: 1605395 - RNA, 21 nt, Human
gccacugcacuauagccuagg

SEQ ID NO: 1605396 - RNA, 15 nt, Human
ggagagcuagcagca

SEQ ID NO: 1605397 - RNA, 18 nt, Human
ggagagccuuccaggggu

SEQ ID NO: 1605398 - RNA, 17 nt, Human
ggagagccuuccagggg

SEQ ID NO: 1605399 - RNA, 22 nt, Human
ggagagccuuccagggguggga

SEQ ID NO: 1605400 - RNA, 16 nt, Human
ggagagccuuccaggg

SEQ ID NO: 1605401 - RNA, 13 nt, Human
ggagagccuucca

SEQ ID NO: 1605402 - RNA, 14 nt, Human
ggagagagacucca

SEQ ID NO: 1605403 - RNA, 22 nt, Human
ggagaaccaaaaagaggcuaug

SEQ ID NO: 1605404 - RNA, 13 nt, Human
ggagaacuagaga

SEQ ID NO: 1605405 - RNA, 16 nt, Human
ggagacugucucaaga

SEQ ID NO: 1605406 - RNA, 17 nt, Human
ggacuuggaagcuccgc

SEQ ID NO: 1605407 - RNA, 18 nt, Human
ggacuucuuuaauuuugg

SEQ ID NO: 1605408 - RNA, 15 nt, Human
ggacuuggaagcucc

SEQ ID NO: 1605409 - RNA, 19 nt, Human
ggagaaaauggacguguua

SEQ ID NO: 1605410 - RNA, 18 nt, Human
ggacuuuuauuuccagug

SEQ ID NO: 1605411 - RNA, 12 nt, Human
ggacuuguuaga

SEQ ID NO: 1605412 - RNA, 22 nt, Human
ggacucaaugcacugacauugu

SEQ ID NO: 1605413 - RNA, 16 nt, Human
ggacuaggguccuggg

SEQ ID NO: 1605414 - RNA, 12 nt, Human
ggaccucaggcc

SEQ ID NO: 1605415 - RNA, 20 nt, Human
ggacuacaggugugagucac

SEQ ID NO: 1605416 - RNA, 23 nt, Human
ggacugugugcucaggagcccug

SEQ ID NO: 1605417 - RNA, 22 nt, Human
ggacugugugcucaggagcccu

SEQ ID NO: 1605418 - RNA, 17 nt, Human
ggacuuagcugggagaa

SEQ ID NO: 1605419 - RNA, 19 nt, Human
gcuuguacauaaugcgugc

SEQ ID NO: 1605420 - RNA, 18 nt, Human
ggacccugaggcccagag

SEQ ID NO: 1605421 - RNA, 15 nt, Human
ggacccugaggccca

SEQ ID NO: 1605422 - RNA, 14 nt, Human
ggacccugaggccc

SEQ ID NO: 1605423 - RNA, 21 nt, Human
ggacccggaggggccuggcag

SEQ ID NO: 1605424 - RNA, 20 nt, Human
ggacccggaggggccuggca

SEQ ID NO: 1605425 - RNA, 19 nt, Human
ggacccugaggcccagagg

SEQ ID NO: 1605426 - RNA, 21 nt, Human
ggagcagccacauuccugaug

SEQ ID NO: 1605427 - RNA, 13 nt, Human
ggagcagccacau

SEQ ID NO: 1605428 - RNA, 15 nt, Human
ggagcccacuguacu

SEQ ID NO: 1605429 - RNA, 19 nt, Human
ggaggcugagaugggagaa

SEQ ID NO: 1605430 - RNA, 15 nt, Human
ggaggcugagauggg

SEQ ID NO: 1605431 - RNA, 21 nt, Human
ggaggcucuggagcccacugu

SEQ ID NO: 1605432 - RNA, 16 nt, Human
ggaggucgaggcagga

SEQ ID NO: 1605433 - RNA, 15 nt, Human
ggaggucgaggcagg

SEQ ID NO: 1605434 - RNA, 18 nt, Human
ggaggucgaggcaggagg

SEQ ID NO: 1605435 - RNA, 21 nt, Human
ggaggcaugugaugagaggaa

SEQ ID NO: 1605436 - RNA, 12 nt, Human
ggaggaagagaa

SEQ ID NO: 1605437 - RNA, 20 nt, Human
ggaggaaaaccaagccgugg

SEQ ID NO: 1605438 - RNA, 22 nt, Human
ggaggaaaaccaagccguggcu

SEQ ID NO: 1605439 - RNA, 21 nt, Human
ggaggaaaaccaagccguggc

SEQ ID NO: 1605440 - RNA, 13 nt, Human
ggaggccagccuu

SEQ ID NO: 1605441 - RNA, 20 nt, Human
ggaggccaaggugggaggau

SEQ ID NO: 1605442 - RNA, 18 nt, Human
ggaggccaaggugggagg

SEQ ID NO: 1605443 - RNA, 20 nt, Human
ggaggcucuggagcccacug

SEQ ID NO: 1605444 - RNA, 17 nt, Human
ggaggcucuggagccca

SEQ ID NO: 1605445 - RNA, 16 nt, Human
ggagcugaguggggga

SEQ ID NO: 1605446 - RNA, 22 nt, Human
ggagcugccuguucagcuccag

SEQ ID NO: 1605447 - RNA, 22 nt, Human
ggagcccacuguacuugcucuu

SEQ ID NO: 1605448 - RNA, 18 nt, Human
ggagcccacuguacuugc

SEQ ID NO: 1605449 - RNA, 14 nt, Human
ggccucccaacuca

SEQ ID NO: 1605450 - RNA, 13 nt, Human
ggccucccaacuc

SEQ ID NO: 1605451 - RNA, 14 nt, Human
ggcccuuccuuuuc

SEQ ID NO: 1605452 - RNA, 22 nt, Human
ggcccuuccucuccacugccuu

SEQ ID NO: 1605453 - RNA, 19 nt, Human
ggcccuuccucuccacugc

SEQ ID NO: 1605454 - RNA, 23 nt, Human
ggcccuuccucuccacugccuuc

SEQ ID NO: 1605455 - RNA, 17 nt, Human
ggcccgacagccuggca

SEQ ID NO: 1605456 - RNA, 16 nt, Human
ggcccgacagccuggc

SEQ ID NO: 1605457 - RNA, 19 nt, Human
ggccagguggccacuccag

SEQ ID NO: 1605458 - RNA, 12 nt, Human
ggcauuguggga

SEQ ID NO: 1605459 - RNA, 12 nt, Human
ggccaaaggaag

SEQ ID NO: 1605460 - RNA, 15 nt, Human
ggccaaagccaaagc

SEQ ID NO: 1605461 - RNA, 13 nt, Human
ggccaaaggaagc

SEQ ID NO: 1605462 - RNA, 20 nt, Human
ggccagaugcaccagcccuu

SEQ ID NO: 1605463 - RNA, 19 nt, Human
ggccagaugcaccagcccu

SEQ ID NO: 1605464 - RNA, 23 nt, Human
ggccagagggagugacagaggca

SEQ ID NO: 1605465 - RNA, 13 nt, Human
ggccaagguggga

SEQ ID NO: 1605466 - RNA, 21 nt, Human
ggccaaggaugccccgucccc

SEQ ID NO: 1605467 - RNA, 12 nt, Human
ggcagaaggaag

SEQ ID NO: 1605468 - RNA, 17 nt, Human
ggcagccaggccacaag

SEQ ID NO: 1605469 - RNA, 15 nt, Human
ggcagccaggccaca

SEQ ID NO: 1605470 - RNA, 12 nt, Human
ggcagagcagag

SEQ ID NO: 1605471 - RNA, 10 nt, Human
ggcagagcag

SEQ ID NO: 1605472 - RNA, 18 nt, Human
ggcagccgugccuucagc

SEQ ID NO: 1605473 - RNA, 21 nt, Human
ggcagccgugccuucagcucu

SEQ ID NO: 1605474 - RNA, 19 nt, Human
ggcagccgugccuucagcu

SEQ ID NO: 1605475 - RNA, 22 nt, Human
ggcagccgugccuucagcucua

SEQ ID NO: 1605476 - RNA, 21 nt, Human
ggaugaauuccaaauucugcu

SEQ ID NO: 1605477 - RNA, 22 nt, Human
ggaugagaaagguugaagcacc

SEQ ID NO: 1605478 - RNA, 12 nt, Human
ggaugagaaagg

SEQ ID NO: 1605479 - RNA, 13 nt, Human
ggauguucuggga

SEQ ID NO: 1605480 - RNA, 23 nt, Human
ggaugguucccuugaugaagaag

SEQ ID NO: 1605481 - RNA, 22 nt, Human
ggaugguucccuugaugaagaa

SEQ ID NO: 1605482 - RNA, 23 nt, Human
ggauuaaacuuaaucuaaaugga

SEQ ID NO: 1605483 - RNA, 21 nt, Human
ggauuuugauccaagcugguc

SEQ ID NO: 1605484 - RNA, 11 nt, Human
ggcaaaauaau

SEQ ID NO: 1605485 - RNA, 17 nt, Human
aaacaaggaugaauuaa

SEQ ID NO: 1605486 - RNA, 18 nt, Human
aaacaagaccacguuucu

SEQ ID NO: 1605487 - RNA, 13 nt, Human
aaacaaagaaauu

SEQ ID NO: 1605488 - RNA, 19 nt, Human
aaaauuuuuucucuaggaa

SEQ ID NO: 1605489 - RNA, 19 nt, Human
aaaauuuuuaaucuuuaau

SEQ ID NO: 1605490 - RNA, 16 nt, Human
aaaauuuuuaaucuuu

SEQ ID NO: 1605491 - RNA, 21 nt, Human
aaaauguaggguuauaauaau

SEQ ID NO: 1605492 - RNA, 23 nt, Human
aaaauuggggauucuuaaaguug

SEQ ID NO: 1605493 - RNA, 21 nt, Human
aaaauuggggauucuuaaagu

SEQ ID NO: 1605494 - RNA, 21 nt, Human
aaaauggacguguuaugacuc

SEQ ID NO: 1605495 - RNA, 12 nt, Human
aaaauggaauac

SEQ ID NO: 1605496 - RNA, 22 nt, Human
aaaauggacuguggugacuuug

SEQ ID NO: 1605497 - RNA, 21 nt, Human
aaacauauauaacaaugcugu

SEQ ID NO: 1605498 - RNA, 16 nt, Human
aaacaugcuacacacu

SEQ ID NO: 1605499 - RNA, 22 nt, Human
aaacaugcuacacacugcaugu

SEQ ID NO: 1605500 - RNA, 19 nt, Human
aaacauauauaacaaugcu

SEQ ID NO: 1605501 - RNA, 16 nt, Human
aaacauauauaacaau

SEQ ID NO: 1605502 - RNA, 13 nt, Human
aaacauauauaac

SEQ ID NO: 1605503 - RNA, 14 nt, Human
aaacacaacuauau

SEQ ID NO: 1605504 - RNA, 19 nt, Human
aaacaagucagucauucag

SEQ ID NO: 1605505 - RNA, 17 nt, Human
ggggaccucaggccugg

SEQ ID NO: 1605506 - RNA, 16 nt, Human
ggggaccucaggccug

SEQ ID NO: 1605507 - RNA, 15 nt, Human
ggggaccucaggccu

SEQ ID NO: 1605508 - RNA, 13 nt, Human
ggggaccucaggc

SEQ ID NO: 1605509 - RNA, 23 nt, Human
ggggcccugccuccuuugugagg

SEQ ID NO: 1605510 - RNA, 19 nt, Human
ggggcccugccuccuuugu

SEQ ID NO: 1605511 - RNA, 16 nt, Human
ggggcccugccuccuu

SEQ ID NO: 1605512 - RNA, 19 nt, Human
ggggccaguuggucccccu

SEQ ID NO: 1605513 - RNA, 17 nt, Human
ggggccaguuggucccc

SEQ ID NO: 1605514 - RNA, 16 nt, Human
ggggccaggcuggguc

SEQ ID NO: 1605515 - RNA, 14 nt, Human
ggggccaggcuggg

SEQ ID NO: 1605516 - RNA, 13 nt, Human
ggggccaggcugg

SEQ ID NO: 1605517 - RNA, 15 nt, Human
aaaccacagcaguug

SEQ ID NO: 1605518 - RNA, 16 nt, Human
aaaccacagcaguuga

SEQ ID NO: 1605519 - RNA, 21 nt, Human
aaaccacauuggagauguuua

SEQ ID NO: 1605520 - RNA, 23 nt, Human
aaacggccucacuaggcuucugg

SEQ ID NO: 1605521 - RNA, 18 nt, Human
aaacggaugauuucuaug

SEQ ID NO: 1605522 - RNA, 16 nt, Human
aaacggaugauuucua

SEQ ID NO: 1605523 - RNA, 20 nt, Human
aaacguggcugcuucaagga

SEQ ID NO: 1605524 - RNA, 17 nt, Human
aaacguggcugcuucaa

SEQ ID NO: 1605525 - RNA, 16 nt, Human
aaacguggcugcuuca

SEQ ID NO: 1605526 - RNA, 15 nt, Human
aaacgucuuaaauau

SEQ ID NO: 1605527 - RNA, 12 nt, Human
aaacgugaaaau

SEQ ID NO: 1605528 - RNA, 16 nt, Human
aaacuggauuaaacuu

SEQ ID NO: 1605529 - RNA, 21 nt, Human
aaacugcccccucugcccugc

SEQ ID NO: 1605530 - RNA, 20 nt, Human
aaacugcccccucugcccug

SEQ ID NO: 1605531 - RNA, 19 nt, Human
aaacugcccccucugcccu

SEQ ID NO: 1605532 - RNA, 17 nt, Human
aaacugcccccucugcc

SEQ ID NO: 1605533 - RNA, 13 nt, Human
aaacugcccccuc

SEQ ID NO: 1605534 - RNA, 12 nt, Human
aaacugcccccu

SEQ ID NO: 1605535 - RNA, 23 nt, Human
gggucucacuauguugcccaggc

SEQ ID NO: 1605536 - RNA, 12 nt, Human
gggucucacucu

SEQ ID NO: 1605537 - RNA, 22 nt, Human
gggucucacuauguugcccagg

SEQ ID NO: 1605538 - RNA, 23 nt, Human
aaacauguuucuuuguaaugaaa

SEQ ID NO: 1605539 - RNA, 22 nt, Human
aaacauguuucuuuguaaugaa

SEQ ID NO: 1605540 - RNA, 19 nt, Human
aaacauguuucuuuguaau

SEQ ID NO: 1605541 - RNA, 16 nt, Human
aaaccaagccguggcu

SEQ ID NO: 1605542 - RNA, 14 nt, Human
aaaccaagccgugg

SEQ ID NO: 1605543 - RNA, 20 nt, Human
ggguaucaggugcugccauc

SEQ ID NO: 1605544 - RNA, 20 nt, Human
aaagaggcagcuugaaacug

SEQ ID NO: 1605545 - RNA, 18 nt, Human
aaagaggcuaugugagca

SEQ ID NO: 1605546 - RNA, 13 nt, Human
aaagaggcuaugu

SEQ ID NO: 1605547 - RNA, 15 nt, Human
aaagaugagugagca

SEQ ID NO: 1605548 - RNA, 23 nt, Human
aaagacuauucaaacagucucag

SEQ ID NO: 1605549 - RNA, 13 nt, Human
aaagacuccaaag

SEQ ID NO: 1605550 - RNA, 14 nt, Human
aaagacuccaaaga

SEQ ID NO: 1605551 - RNA, 15 nt, Human
aaagacuguacaaag

SEQ ID NO: 1605552 - RNA, 22 nt, Human
aaagacuauucaaacagucuca

SEQ ID NO: 1605553 - RNA, 17 nt, Human
aaagaauggaaggugga

SEQ ID NO: 1605554 - RNA, 18 nt, Human
aaagagaacuuccagauc

SEQ ID NO: 1605555 - RNA, 19 nt, Human
aaagacuuuuccaacccuc

SEQ ID NO: 1605556 - RNA, 23 nt, Human
gguauuggcuagagguucaaaga

SEQ ID NO: 1605557 - RNA, 18 nt, Human
gguauaaguggugugugu

SEQ ID NO: 1605558 - RNA, 16 nt, Human
aaagaaugauuaugaa

SEQ ID NO: 1605559 - RNA, 17 nt, Human
aaacuuuucugauagag

SEQ ID NO: 1605560 - RNA, 16 nt, Human
aaacuuuucugauaga

SEQ ID NO: 1605561 - RNA, 14 nt, Human
aaacuuuaccuuuu

SEQ ID NO: 1605562 - RNA, 14 nt, Human
aaacuuuucugaua

SEQ ID NO: 1605563 - RNA, 13 nt, Human
aaacuuuucugau

SEQ ID NO: 1605564 - RNA, 22 nt, Human
gguccacccaggagccccgagg

SEQ ID NO: 1605565 - RNA, 20 nt, Human
gguccacccaggagccccga

SEQ ID NO: 1605566 - RNA, 12 nt, Human
ggucccacccca

SEQ ID NO: 1605567 - RNA, 14 nt, Human
ggucccaccccaca

SEQ ID NO: 1605568 - RNA, 17 nt, Human
aaacuuguguaaauaca

SEQ ID NO: 1605569 - RNA, 24 nt, Human
ggucugugagaugcuagaacuccc

SEQ ID NO: 1605570 - RNA, 14 nt, Human
ggucugugagaugc

SEQ ID NO: 1605571 - RNA, 12 nt, Human
ggucuguucuuu

SEQ ID NO: 1605572 - RNA, 22 nt, Human
ggucuugaacuccuggccucaa

SEQ ID NO: 1605573 - RNA, 21 nt, Human
ggucuugaacuccuggccuca

SEQ ID NO: 1605574 - RNA, 17 nt, Human
ggucuguucuuuccaaa

SEQ ID NO: 1605575 - RNA, 19 nt, Human
ggucuguucuuuccaaagu

SEQ ID NO: 1605576 - RNA, 21 nt, Human
ggugauccacucgccuucauc

SEQ ID NO: 1605577 - RNA, 22 nt, Human
ggugcacaagcuccaagcuccc

SEQ ID NO: 1605578 - RNA, 16 nt, Human
ggugcacaagcuccaa

SEQ ID NO: 1605579 - RNA, 18 nt, Human
ggugcaaaguucccuacu

SEQ ID NO: 1605580 - RNA, 13 nt, Human
aaaggaauuuaaa

SEQ ID NO: 1605581 - RNA, 11 nt, Human
aaaggaaagag

SEQ ID NO: 1605582 - RNA, 17 nt, Human
aaagcagugcaugcugu

SEQ ID NO: 1605583 - RNA, 22 nt, Human
aaagcagugcaugcugucccuu

SEQ ID NO: 1605584 - RNA, 21 nt, Human
aaagcagugcaugcugucccu

SEQ ID NO: 1605585 - RNA, 18 nt, Human
aaagcuaggccuggccag

SEQ ID NO: 1605586 - RNA, 17 nt, Human
aaagcuacuuauuguag

SEQ ID NO: 1605587 - RNA, 16 nt, Human
aaagcuacuuauugua

SEQ ID NO: 1605588 - RNA, 18 nt, Human
aaaauauauaucaaauau

SEQ ID NO: 1605589 - RNA, 12 nt, Human
aaaauagccugc

SEQ ID NO: 1605590 - RNA, 18 nt, Human
aaaauaguggugugauuu

SEQ ID NO: 1605591 - RNA, 23 nt, Human
aaaauaauuuuuauauuugaaau

SEQ ID NO: 1605592 - RNA, 21 nt, Human
aaaauaauuuuuauauuugaa

SEQ ID NO: 1605593 - RNA, 14 nt, Human
aaaauaccagccag

SEQ ID NO: 1605594 - RNA, 15 nt, Human
aaaauaccagccagu

SEQ ID NO: 1605595 - RNA, 12 nt, Human
aaaauaaauuau

SEQ ID NO: 1605596 - RNA, 20 nt, Human
gggcagcugccuccccuccu

SEQ ID NO: 1605597 - RNA, 23 nt, Human
gggcagcugccuccccuccucug

SEQ ID NO: 1605598 - RNA, 13 nt, Human
gggcagcugccuc

SEQ ID NO: 1605599 - RNA, 14 nt, Human
gggcagcugccucc

SEQ ID NO: 1605600 - RNA, 19 nt, Human
gggcagcugccuccccucc

SEQ ID NO: 1605601 - RNA, 19 nt, Human
aaaagggacugagaaauuu

SEQ ID NO: 1605602 - RNA, 16 nt, Human
aaaagggacugagaaa

SEQ ID NO: 1605603 - RNA, 15 nt, Human
gggauuuccaugaug

SEQ ID NO: 1605604 - RNA, 14 nt, Human
gggcagaggaaagc

SEQ ID NO: 1605605 - RNA, 20 nt, Human
gggauucuuaaaguugaauu

SEQ ID NO: 1605606 - RNA, 15 nt, Human
gggauucuuaaaguu

SEQ ID NO: 1605607 - RNA, 18 nt, Human
aaaagccuguuuaagaga

SEQ ID NO: 1605608 - RNA, 16 nt, Human
aaaagccuguuuaaga

SEQ ID NO: 1605609 - RNA, 21 nt, Human
aaaacuuuaugcuaagugaaa

SEQ ID NO: 1605610 - RNA, 22 nt, Human
aaaagcuccauuuuuagugaaa

SEQ ID NO: 1605611 - RNA, 14 nt, Human
aaaagcugggcagg

SEQ ID NO: 1605612 - RNA, 20 nt, Human
gggaggcagagguugcagug

SEQ ID NO: 1605613 - RNA, 19 nt, Human
gggaggccaaggugggagg

SEQ ID NO: 1605614 - RNA, 13 nt, Human
gggagggcuccag

SEQ ID NO: 1605615 - RNA, 11 nt, Human
gggagggcucc

SEQ ID NO: 1605616 - RNA, 13 nt, Human
gggagggccuggg

SEQ ID NO: 1605617 - RNA, 21 nt, Human
aaaacguggcugcuucaagga

SEQ ID NO: 1605618 - RNA, 19 nt, Human
aaaaccaagccguggcuuc

SEQ ID NO: 1605619 - RNA, 22 nt, Human
aaaacugauuuuuuuuuccuuc

SEQ ID NO: 1605620 - RNA, 18 nt, Human
aaaacugauuuuuuuuuc

SEQ ID NO: 1605621 - RNA, 20 nt, Human
aaaacugcugacuguuuucu

SEQ ID NO: 1605622 - RNA, 19 nt, Human
aaaacugcucauaugaugu

SEQ ID NO: 1605623 - RNA, 18 nt, Human
aaaacguggcugcuucaa

SEQ ID NO: 1605624 - RNA, 17 nt, Human
aaaacguggcugcuuca

SEQ ID NO: 1605625 - RNA, 16 nt, Human
aaaacguggcugcuuc

SEQ ID NO: 1605626 - RNA, 21 nt, Human
aaaaccaauguucucucuucu

SEQ ID NO: 1605627 - RNA, 14 nt, Human
aaaacguggcugcu

SEQ ID NO: 1605628 - RNA, 15 nt, Human
aaaaccaauguucuc

SEQ ID NO: 1605629 - RNA, 22 nt, Human
gggaacagacuggaagcacagc

SEQ ID NO: 1605630 - RNA, 19 nt, Human
aaaaaucucaaauuucuaa

SEQ ID NO: 1605631 - RNA, 20 nt, Human
aaaaaucucaaauuucuaaa

SEQ ID NO: 1605632 - RNA, 14 nt, Human
gggaacagacugga

SEQ ID NO: 1605633 - RNA, 13 nt, Human
aaaaaaacacaaa

SEQ ID NO: 1605634 - RNA, 20 nt, Human
aaaaagcuccaaaugcagcu

SEQ ID NO: 1605635 - RNA, 23 nt, Human
gggaaaaucagccugcuccagcu

SEQ ID NO: 1605636 - RNA, 13 nt, Human
gggaaaaucagcc

SEQ ID NO: 1605637 - RNA, 16 nt, Human
ggcuucaguggcagcu

SEQ ID NO: 1605638 - RNA, 17 nt, Human
ggcuucaguggcagcug

SEQ ID NO: 1605639 - RNA, 15 nt, Human
ggcugucaauuacag

SEQ ID NO: 1605640 - RNA, 23 nt, Human
ggcuguaucccaugagccucagc

SEQ ID NO: 1605641 - RNA, 22 nt, Human
ggcuguaucccaugagccucag

SEQ ID NO: 1605642 - RNA, 20 nt, Human
ggcuguaucccaugagccuc

SEQ ID NO: 1605643 - RNA, 15 nt, Human
ggcuucaguggcagc

SEQ ID NO: 1605644 - RNA, 16 nt, Human
ggcuggugucaccuga

SEQ ID NO: 1605645 - RNA, 19 nt, Human
ggcuguaucccaugagccu

SEQ ID NO: 1605646 - RNA, 13 nt, Human
ggcugggagagcc

SEQ ID NO: 1605647 - RNA, 22 nt, Human
ggcuggccuggccccucagggu

SEQ ID NO: 1605648 - RNA, 17 nt, Human
ggcuggccuggccccuc

SEQ ID NO: 1605649 - RNA, 15 nt, Human
ggcuggcccugcccu

SEQ ID NO: 1605650 - RNA, 14 nt, Human
ggcuggcccugccc

SEQ ID NO: 1605651 - RNA, 13 nt, Human
ggcuggcccugcc

SEQ ID NO: 1605652 - RNA, 20 nt, Human
ggcuggcgugcaguggugcg

SEQ ID NO: 1605653 - RNA, 16 nt, Human
ggcuggcgugcagugg

SEQ ID NO: 1605654 - RNA, 14 nt, Human
ggcuggcgugcagu

SEQ ID NO: 1605655 - RNA, 17 nt, Human
ggcuggcccugcccugg

SEQ ID NO: 1605656 - RNA, 16 nt, Human
ggcuggcccugcccug

SEQ ID NO: 1605657 - RNA, 23 nt, Human
ggcugccaucucaccuccugcug

SEQ ID NO: 1605658 - RNA, 22 nt, Human
ggcugccaucucaccuccugcu

SEQ ID NO: 1605659 - RNA, 21 nt, Human
ggcugccaucucaccuccugc

SEQ ID NO: 1605660 - RNA, 16 nt, Human
ggcucccuucccaccu

SEQ ID NO: 1605661 - RNA, 18 nt, Human
ggcucccuucccaccucu

SEQ ID NO: 1605662 - RNA, 17 nt, Human
ggcucccuucccaccuc

SEQ ID NO: 1605663 - RNA, 22 nt, Human
ggcucccuucccaccucucuca

SEQ ID NO: 1605664 - RNA, 20 nt, Human
ggcucccuucccaccucucu

SEQ ID NO: 1605665 - RNA, 17 nt, Human
ggcuccucccggugccc

SEQ ID NO: 1605666 - RNA, 12 nt, Human
ggcuccugccac

SEQ ID NO: 1605667 - RNA, 13 nt, Human
ggcuccugccacc

SEQ ID NO: 1605668 - RNA, 24 nt, Human
ggcucuuccaggcugggagagccu

SEQ ID NO: 1605669 - RNA, 23 nt, Human
ggcucuuccaggcugggagagcc

SEQ ID NO: 1605670 - RNA, 18 nt, Human
ggcucgagcaugccugga

SEQ ID NO: 1605671 - RNA, 20 nt, Human
ggcugcaugcgggcuuccuc

SEQ ID NO: 1605672 - RNA, 22 nt, Human
ggcugcaugcgggcuuccuccu

SEQ ID NO: 1605673 - RNA, 17 nt, Human
ggcugcagggaguccga

SEQ ID NO: 1605674 - RNA, 12 nt, Human
caacuccagaaa

SEQ ID NO: 1605675 - RNA, 14 nt, Human
caacuauggccugu

SEQ ID NO: 1605676 - RNA, 20 nt, Human
caacucccugccccccagcc

SEQ ID NO: 1605677 - RNA, 19 nt, Human
caacucccugccccccagc

SEQ ID NO: 1605678 - RNA, 15 nt, Human
caagaagcccaggaa

SEQ ID NO: 1605679 - RNA, 21 nt, Human
caacucccugccccccagccc

SEQ ID NO: 1605680 - RNA, 17 nt, Human
caagaaggaugauucaa

SEQ ID NO: 1605681 - RNA, 18 nt, Human
caagaagcccaggaaagg

SEQ ID NO: 1605682 - RNA, 18 nt, Human
caagaauagaugcugacu

SEQ ID NO: 1605683 - RNA, 19 nt, Human
caacuaucucauuuccaag

SEQ ID NO: 1605684 - RNA, 19 nt, Human
caacuauauuguuugcuaa

SEQ ID NO: 1605685 - RNA, 13 nt, Human
caacuauggccug

SEQ ID NO: 1605686 - RNA, 16 nt, Human
caaccccuucgcuccu

SEQ ID NO: 1605687 - RNA, 14 nt, Human
caaccccuucgcuc

SEQ ID NO: 1605688 - RNA, 17 nt, Human
caaccccuucgcuccug

SEQ ID NO: 1605689 - RNA, 14 nt, Human
caacccccagccug

SEQ ID NO: 1605690 - RNA, 14 nt, Human
caagcaaguauuag

SEQ ID NO: 1605691 - RNA, 18 nt, Human
caagcaagaaacacuggg

SEQ ID NO: 1605692 - RNA, 13 nt, Human
caagcaagaaaca

SEQ ID NO: 1605693 - RNA, 19 nt, Human
caagcaaaugugaaucauu

SEQ ID NO: 1605694 - RNA, 17 nt, Human
caagcaaaugugaauca

SEQ ID NO: 1605695 - RNA, 15 nt, Human
caagcaaaugugaau

SEQ ID NO: 1605696 - RNA, 14 nt, Human
caagaccacguuuc

SEQ ID NO: 1605697 - RNA, 16 nt, Human
caagaccacguuucua

SEQ ID NO: 1605698 - RNA, 13 nt, Human
caagcaccuccug

SEQ ID NO: 1605699 - RNA, 14 nt, Human
caagcaccuccugc

SEQ ID NO: 1605700 - RNA, 18 nt, Human
caagcaccuagccucgcu

SEQ ID NO: 1605701 - RNA, 17 nt, Human
caaucagccuaguugau

SEQ ID NO: 1605702 - RNA, 14 nt, Human
caaucaaaucugcu

SEQ ID NO: 1605703 - RNA, 15 nt, Human
caauggcagccuugg

SEQ ID NO: 1605704 - RNA, 14 nt, Human
caauggcagccuug

SEQ ID NO: 1605705 - RNA, 13 nt, Human
caauggcagccuu

SEQ ID NO: 1605706 - RNA, 16 nt, Human
caauggcagccuuggc

SEQ ID NO: 1605707 - RNA, 12 nt, Human
caaugcuggcug

SEQ ID NO: 1605708 - RNA, 20 nt, Human
caauuuauuauggcacauca

SEQ ID NO: 1605709 - RNA, 18 nt, Human
caagcuccaagcucccag

SEQ ID NO: 1605710 - RNA, 21 nt, Human
caagcuccaagcucccaggca

SEQ ID NO: 1605711 - RNA, 19 nt, Human
caagcuccaagcucccagg

SEQ ID NO: 1605712 - RNA, 17 nt, Human
caagcuccaucuccacu

SEQ ID NO: 1605713 - RNA, 21 nt, Human
caagcuccaucuccacuccag

SEQ ID NO: 1605714 - RNA, 17 nt, Human
caagcucccaggcauuc

SEQ ID NO: 1605715 - RNA, 15 nt, Human
caagcucccaggcau

SEQ ID NO: 1605716 - RNA, 14 nt, Human
caagcucccaggca

SEQ ID NO: 1605717 - RNA, 12 nt, Human
caagcucccagg

SEQ ID NO: 1605718 - RNA, 16 nt, Human
caagcucugcuccucu

SEQ ID NO: 1605719 - RNA, 15 nt, Human
caagcucugcuccuc

SEQ ID NO: 1605720 - RNA, 16 nt, Human
caaggcaaggcuguca

SEQ ID NO: 1605721 - RNA, 14 nt, Human
caaggcaaggcugu

SEQ ID NO: 1605722 - RNA, 20 nt, Human
caaggauugcuacuguccua

SEQ ID NO: 1605723 - RNA, 13 nt, Human
caagcugcacccu

SEQ ID NO: 1605724 - RNA, 17 nt, Human
caaguauuauaccuuuu

SEQ ID NO: 1605725 - RNA, 22 nt, Human
caaguauuauaccuuuuuuaga

SEQ ID NO: 1605726 - RNA, 20 nt, Human
caaguuauuuuuaauuuggu

SEQ ID NO: 1605727 - RNA, 13 nt, Human
cacaucagcuugc

SEQ ID NO: 1605728 - RNA, 23 nt, Human
cacaucagcuugcccuguuaaaa

SEQ ID NO: 1605729 - RNA, 22 nt, Human
cacaucuugcucugcugacaga

SEQ ID NO: 1605730 - RNA, 21 nt, Human
cacaucuugcucugcugacag

SEQ ID NO: 1605731 - RNA, 20 nt, Human
cacaucuugcucugcugaca

SEQ ID NO: 1605732 - RNA, 15 nt, Human
cacaucuugcucugc

SEQ ID NO: 1605733 - RNA, 14 nt, Human
cacaucuugcucug

SEQ ID NO: 1605734 - RNA, 13 nt, Human
cacaucuugcucu

SEQ ID NO: 1605735 - RNA, 12 nt, Human
cacccagcccac

SEQ ID NO: 1605736 - RNA, 16 nt, Human
cacccagcccacuucu

SEQ ID NO: 1605737 - RNA, 22 nt, Human
caccagccccagugcccacagg

SEQ ID NO: 1605738 - RNA, 21 nt, Human
caccagccccagugcccacag

SEQ ID NO: 1605739 - RNA, 18 nt, Human
caccagccccagugccca

SEQ ID NO: 1605740 - RNA, 19 nt, Human
caccagcccuuagcaggga

SEQ ID NO: 1605741 - RNA, 21 nt, Human
caccagcccuuagcagggaaa

SEQ ID NO: 1605742 - RNA, 17 nt, Human
caccagccccagugccc

SEQ ID NO: 1605743 - RNA, 18 nt, Human
cacauuuauucugcucac

SEQ ID NO: 1605744 - RNA, 17 nt, Human
cacauuuauucugcuca

SEQ ID NO: 1605745 - RNA, 16 nt, Human
cacaucuugcucugcu

SEQ ID NO: 1605746 - RNA, 23 nt, Human
cacaucuugcucugcugacagac

SEQ ID NO: 1605747 - RNA, 21 nt, Human
cacuccagugagacagcucug

SEQ ID NO: 1605748 - RNA, 17 nt, Human
cacuccagaccccuggc

SEQ ID NO: 1605749 - RNA, 23 nt, Human
cacugaagaagcaccaaucauga

SEQ ID NO: 1605750 - RNA, 13 nt, Human
cacuacauucugu

SEQ ID NO: 1605751 - RNA, 14 nt, Human
cacuacauucuguu

SEQ ID NO: 1605752 - RNA, 22 nt, Human
cacggaagagccuugcggaagg

SEQ ID NO: 1605753 - RNA, 16 nt, Human
cacggaagagccuugc

SEQ ID NO: 1605754 - RNA, 15 nt, Human
cacuacauucuguua

SEQ ID NO: 1605755 - RNA, 16 nt, Human
cacuagacccacugga

SEQ ID NO: 1605756 - RNA, 16 nt, Human
cacuccagaccccugg

SEQ ID NO: 1605757 - RNA, 14 nt, Human
cacuccagaccccu

SEQ ID NO: 1605758 - RNA, 15 nt, Human
cacgcuggagugcag

SEQ ID NO: 1605759 - RNA, 20 nt, Human
cacgcuggagugcagugagc

SEQ ID NO: 1605760 - RNA, 18 nt, Human
cacgcuggagugcaguga

SEQ ID NO: 1605761 - RNA, 17 nt, Human
cacgcuggagugcagug

SEQ ID NO: 1605762 - RNA, 16 nt, Human
cacgcuggagugcagu

SEQ ID NO: 1605763 - RNA, 21 nt, Human
cacgcuggagugcagugagcc

SEQ ID NO: 1605764 - RNA, 20 nt, Human
caccugcggugcuaucuccc

SEQ ID NO: 1605765 - RNA, 19 nt, Human
caccugcggugcuaucucc

SEQ ID NO: 1605766 - RNA, 17 nt, Human
caccugcggugcuaucu

SEQ ID NO: 1605767 - RNA, 16 nt, Human
caccugcggugcuauc

SEQ ID NO: 1605768 - RNA, 12 nt, Human
cacccuccuuuc

SEQ ID NO: 1605769 - RNA, 12 nt, Human
cacccugcucuc

SEQ ID NO: 1605770 - RNA, 12 nt, Human
caccugccaggg

SEQ ID NO: 1605771 - RNA, 11 nt, Human
caccugccagg

SEQ ID NO: 1605772 - RNA, 21 nt, Human
caccugccccucaacucuccu

SEQ ID NO: 1605773 - RNA, 18 nt, Human
caccugccccucaacucu

SEQ ID NO: 1605774 - RNA, 13 nt, Human
caccugccaggga

SEQ ID NO: 1605775 - RNA, 14 nt, Human
auuucacucuccuu

SEQ ID NO: 1605776 - RNA, 12 nt, Human
auuucacucucc

SEQ ID NO: 1605777 - RNA, 22 nt, Human
auuuaauagguuuggacaaaau

SEQ ID NO: 1605778 - RNA, 18 nt, Human
auuuaauaauuauaugcu

SEQ ID NO: 1605779 - RNA, 15 nt, Human
auuuaauaauuauau

SEQ ID NO: 1605780 - RNA, 20 nt, Human
auuucuguuuagauaauaca

SEQ ID NO: 1605781 - RNA, 19 nt, Human
auuucuguuuagauaauac

SEQ ID NO: 1605782 - RNA, 21 nt, Human
auuucuguuuagauaauacac

SEQ ID NO: 1605783 - RNA, 17 nt, Human
auuuucuauaauuuaaa

SEQ ID NO: 1605784 - RNA, 18 nt, Human
auuuucuauaauuuaaau

SEQ ID NO: 1605785 - RNA, 19 nt, Human
auuuucuauaauuuaaaua

SEQ ID NO: 1605786 - RNA, 15 nt, Human
auuuugaaaaacugc

SEQ ID NO: 1605787 - RNA, 13 nt, Human
auuuugaaaaacu

SEQ ID NO: 1605788 - RNA, 14 nt, Human
auuuguuauaauga

SEQ ID NO: 1605789 - RNA, 22 nt, Human
auuuguguugaagagguuuuaa

SEQ ID NO: 1605790 - RNA, 18 nt, Human
auuuguguugaagagguu

SEQ ID NO: 1605791 - RNA, 15 nt, Human
auuuguguugaagag

SEQ ID NO: 1605792 - RNA, 14 nt, Human
auuuguguugaaga

SEQ ID NO: 1605793 - RNA, 19 nt, Human
auuuguucuauagcuuuuc

SEQ ID NO: 1605794 - RNA, 21 nt, Human
caaaagguauuuuaaucacca

SEQ ID NO: 1605795 - RNA, 19 nt, Human
caaaagcaucuaugugaga

SEQ ID NO: 1605796 - RNA, 13 nt, Human
caaaagcauguga

SEQ ID NO: 1605797 - RNA, 20 nt, Human
caaaagguuaauaaaguaau

SEQ ID NO: 1605798 - RNA, 19 nt, Human
auuuuuauauuugaaauau

SEQ ID NO: 1605799 - RNA, 22 nt, Human
auuuuguuuuugucuuaaaaag

SEQ ID NO: 1605800 - RNA, 16 nt, Human
auuuuuauuaaauuau

SEQ ID NO: 1605801 - RNA, 17 nt, Human
auuuuuuucugaaauuu

SEQ ID NO: 1605802 - RNA, 16 nt, Human
auuuuuuucugaaauu

SEQ ID NO: 1605803 - RNA, 15 nt, Human
auuuuuuucugaauu

SEQ ID NO: 1605804 - RNA, 17 nt, Human
caaaccaucauugaaau

SEQ ID NO: 1605805 - RNA, 16 nt, Human
caaaccaucauugaaa

SEQ ID NO: 1605806 - RNA, 14 nt, Human
caaaccaucauuga

SEQ ID NO: 1605807 - RNA, 22 nt, Human
auugaggacacugauauggguc

SEQ ID NO: 1605808 - RNA, 15 nt, Human
auucucuuauccaac

SEQ ID NO: 1605809 - RNA, 16 nt, Human
auucucuccuguaccu

SEQ ID NO: 1605810 - RNA, 20 nt, Human
auucucuaguuugauuaaau

SEQ ID NO: 1605811 - RNA, 14 nt, Human
auucucuuauccaa

SEQ ID NO: 1605812 - RNA, 12 nt, Human
auucucuuaucc

SEQ ID NO: 1605813 - RNA, 23 nt, Human
auucucuaguuugauuaaauucu

SEQ ID NO: 1605814 - RNA, 16 nt, Human
auuacaggugugaacc

SEQ ID NO: 1605815 - RNA, 14 nt, Human
auuauguaaauccc

SEQ ID NO: 1605816 - RNA, 13 nt, Human
auuauguaaaucc

SEQ ID NO: 1605817 - RNA, 23 nt, Human
auuauguaaaucccauuauucaa

SEQ ID NO: 1605818 - RNA, 22 nt, Human
auuauguaaaucccauuauuca

SEQ ID NO: 1605819 - RNA, 17 nt, Human
auuauguaaaucccauu

SEQ ID NO: 1605820 - RNA, 15 nt, Human
auuauguaaauccca

SEQ ID NO: 1605821 - RNA, 23 nt, Human
auuaugugccagauuuaugcaua

SEQ ID NO: 1605822 - RNA, 21 nt, Human
auuaugugccagauuuaugca

SEQ ID NO: 1605823 - RNA, 13 nt, Human
auuaugugccaga

SEQ ID NO: 1605824 - RNA, 14 nt, Human
auucauauuuacuu

SEQ ID NO: 1605825 - RNA, 21 nt, Human
auuaacaugaauauuuagugu

SEQ ID NO: 1605826 - RNA, 16 nt, Human
auuacaggcuccugcc

SEQ ID NO: 1605827 - RNA, 15 nt, Human
auuacaggcuccugc

SEQ ID NO: 1605828 - RNA, 13 nt, Human
auuacagguguga

SEQ ID NO: 1605829 - RNA, 19 nt, Human
auuacaggcuccugccacc

SEQ ID NO: 1605830 - RNA, 17 nt, Human
auuacaggcuccugcca

SEQ ID NO: 1605831 - RNA, 15 nt, Human
auuaauggaaauguu

SEQ ID NO: 1605832 - RNA, 19 nt, Human
cauagcagcuuauucacaa

SEQ ID NO: 1605833 - RNA, 23 nt, Human
cauagcagagaaugaaagggccc

SEQ ID NO: 1605834 - RNA, 20 nt, Human
cauagcagcuuauucacaag

SEQ ID NO: 1605835 - RNA, 16 nt, Human
cauagguuuaauaauu

SEQ ID NO: 1605836 - RNA, 21 nt, Human
cauauuauuuuauguugcaua

SEQ ID NO: 1605837 - RNA, 23 nt, Human
cauaaugcgugcauaccacuuuu

SEQ ID NO: 1605838 - RNA, 16 nt, Human
cauacaguuugcacuu

SEQ ID NO: 1605839 - RNA, 23 nt, Human
cauacaggaagguagaaauaucu

SEQ ID NO: 1605840 - RNA, 18 nt, Human
cauaauuauuauuuggcc

SEQ ID NO: 1605841 - RNA, 22 nt, Human
caguuguuagugugucuuagug

SEQ ID NO: 1605842 - RNA, 23 nt, Human
caguuuguuaguaugaggcauuu

SEQ ID NO: 1605843 - RNA, 13 nt, Human
caucagcugcuga

SEQ ID NO: 1605844 - RNA, 19 nt, Human
caucccaaacccuucagug

SEQ ID NO: 1605845 - RNA, 21 nt, Human
caucagcacgauuucuguuua

SEQ ID NO: 1605846 - RNA, 22 nt, Human
cauccucuguacagagcccacg

SEQ ID NO: 1605847 - RNA, 12 nt, Human
caucccagcccc

SEQ ID NO: 1605848 - RNA, 11 nt, Human
caucccagccc

SEQ ID NO: 1605849 - RNA, 20 nt, Human
caucccaaacccuucagugc

SEQ ID NO: 1605850 - RNA, 19 nt, Human
cauccugaggcuccacuug

SEQ ID NO: 1605851 - RNA, 18 nt, Human
cauccugaggcuccacuu

SEQ ID NO: 1605852 - RNA, 21 nt, Human
caucuaaacugcccccucugc

SEQ ID NO: 1605853 - RNA, 15 nt, Human
caucuaaacugcccc

SEQ ID NO: 1605854 - RNA, 22 nt, Human
cagugauuaccagggacugagg

SEQ ID NO: 1605855 - RNA, 23 nt, Human
cagucugauucccaagcucugcu

SEQ ID NO: 1605856 - RNA, 22 nt, Human
cagugcccacaggaucagucug

SEQ ID NO: 1605857 - RNA, 21 nt, Human
cagugcccacaggaucagucu

SEQ ID NO: 1605858 - RNA, 18 nt, Human
cagugggagcugccuguu

SEQ ID NO: 1605859 - RNA, 17 nt, Human
cagugggagcugccugu

SEQ ID NO: 1605860 - RNA, 16 nt, Human
cagugggagcugccug

SEQ ID NO: 1605861 - RNA, 20 nt, Human
cagugguaugaucacggcuc

SEQ ID NO: 1605862 - RNA, 20 nt, Human
caguuauggcuauaggugcu

SEQ ID NO: 1605863 - RNA, 19 nt, Human
caguuauggcuauaggugc

SEQ ID NO: 1605864 - RNA, 13 nt, Human
caguuauggcuau

SEQ ID NO: 1605865 - RNA, 17 nt, Human
caguuauuauauuuaca

SEQ ID NO: 1605866 - RNA, 21 nt, Human
caguuauuauauuuacaaaug

SEQ ID NO: 1605867 - RNA, 20 nt, Human
caguggugcgaucuggguuc

SEQ ID NO: 1605868 - RNA, 19 nt, Human
caguggugcgaucuggguu

SEQ ID NO: 1605869 - RNA, 21 nt, Human
cagugguaugaucacggcuca

SEQ ID NO: 1605870 - RNA, 20 nt, Human
caguuacucagaauucucua

SEQ ID NO: 1605871 - RNA, 22 nt, Human
cagucugauucccaagcucugc

SEQ ID NO: 1605872 - RNA, 21 nt, Human
cagucugauucccaagcucug

SEQ ID NO: 1605873 - RNA, 22 nt, Human
caguuauuauauuuacaaaugg

SEQ ID NO: 1605874 - RNA, 15 nt, Human
caguucagagcugcc

SEQ ID NO: 1605875 - RNA, 16 nt, Human
caguucagagcugccc

SEQ ID NO: 1605876 - RNA, 17 nt, Human
caguucagagcugcccu

SEQ ID NO: 1605877 - RNA, 23 nt, Human
caguucagagcugcccucuccug

SEQ ID NO: 1605878 - RNA, 24 nt, Human
caguucagagcugcccucuccugg

SEQ ID NO: 1605879 - RNA, 18 nt, Human
caguucagagcugcccuc

SEQ ID NO: 1605880 - RNA, 19 nt, Human
caguucagagcugcccucu

SEQ ID NO: 1605881 - RNA, 21 nt, Human
caguucagagcugcccucucc

SEQ ID NO: 1605882 - RNA, 22 nt, Human
caguucagagcugcccucuccu

SEQ ID NO: 1605883 - RNA, 14 nt, Human
ccaaugggagcuca

SEQ ID NO: 1605884 - RNA, 23 nt, Human
ccaauggacuaacuugucuuugg

SEQ ID NO: 1605885 - RNA, 21 nt, Human
ccaauggagacugucucaaga

SEQ ID NO: 1605886 - RNA, 21 nt, Human
ccaacuccagaaagugacaag

SEQ ID NO: 1605887 - RNA, 21 nt, Human
ccaacucaccccagccccaaa

SEQ ID NO: 1605888 - RNA, 15 nt, Human
ccaagcucugcuccu

SEQ ID NO: 1605889 - RNA, 14 nt, Human
ccaagcucugcucc

SEQ ID NO: 1605890 - RNA, 16 nt, Human
ccaagcucugcuccuc

SEQ ID NO: 1605891 - RNA, 17 nt, Human
ccaagcucugcuccucu

SEQ ID NO: 1605892 - RNA, 16 nt, Human
ccaaaucauaguggcu

SEQ ID NO: 1605893 - RNA, 23 nt, Human
ccaaaucagcugcuacuacuccu

SEQ ID NO: 1605894 - RNA, 15 nt, Human
ccaaaucagcugcua

SEQ ID NO: 1605895 - RNA, 13 nt, Human
ccaacucacccca

SEQ ID NO: 1605896 - RNA, 16 nt, Human
ccaacuauggccugug

SEQ ID NO: 1605897 - RNA, 15 nt, Human
ccaacuauggccugu

SEQ ID NO: 1605898 - RNA, 14 nt, Human
ccaacuauggccug

SEQ ID NO: 1605899 - RNA, 22 nt, Human
ccaaaguacacuguuucaaacu

SEQ ID NO: 1605900 - RNA, 14 nt, Human
ccaaagugcuggga

SEQ ID NO: 1605901 - RNA, 16 nt, Human
cauuuguauaaaauaa

SEQ ID NO: 1605902 - RNA, 14 nt, Human
cauuuguauaaaau

SEQ ID NO: 1605903 - RNA, 17 nt, Human
cauuuguauaaaauaau

SEQ ID NO: 1605904 - RNA, 23 nt, Human
cauuuuuuuuaagaaaaaggaug

SEQ ID NO: 1605905 - RNA, 21 nt, Human
cauuuggugguuucagaaaug

SEQ ID NO: 1605906 - RNA, 14 nt, Human
ccaaaaggcagaag

SEQ ID NO: 1605907 - RNA, 17 nt, Human
ccaaaaaaugcuugcuu

SEQ ID NO: 1605908 - RNA, 16 nt, Human
cauuuaggugaggaag

SEQ ID NO: 1605909 - RNA, 17 nt, Human
cauugguguuguacuca

SEQ ID NO: 1605910 - RNA, 18 nt, Human
cauuuaggugaggaagca

SEQ ID NO: 1605911 - RNA, 16 nt, Human
cauuggagauguuuag

SEQ ID NO: 1605912 - RNA, 21 nt, Human
cauucuccaccugccagggac

SEQ ID NO: 1605913 - RNA, 19 nt, Human
cauucuccaccugccaggg

SEQ ID NO: 1605914 - RNA, 18 nt, Human
cauucuccaccugccagg

SEQ ID NO: 1605915 - RNA, 17 nt, Human
cauucuccaccugccag

SEQ ID NO: 1605916 - RNA, 14 nt, Human
cauuauucaaaguu

SEQ ID NO: 1605917 - RNA, 16 nt, Human
cauuauucaaaguugc

SEQ ID NO: 1605918 - RNA, 15 nt, Human
cauuauucaaaguug

SEQ ID NO: 1605919 - RNA, 19 nt, Human
cauguuggccaggcugguc

SEQ ID NO: 1605920 - RNA, 19 nt, Human
cauuauauuuauuacugua

SEQ ID NO: 1605921 - RNA, 17 nt, Human
cauguuggccaggcugg

SEQ ID NO: 1605922 - RNA, 18 nt, Human
cauguuggccaggcuggu

SEQ ID NO: 1605923 - RNA, 18 nt, Human
cauguucuuaauucuuag

SEQ ID NO: 1605924 - RNA, 17 nt, Human
cauguuacauaagauaa

SEQ ID NO: 1605925 - RNA, 16 nt, Human
cauguuacauaagaua

SEQ ID NO: 1605926 - RNA, 16 nt, Human
cauguccaagaagccc

SEQ ID NO: 1605927 - RNA, 15 nt, Human
cauguccaagaagcc

SEQ ID NO: 1605928 - RNA, 13 nt, Human
cauguucuuaauu

SEQ ID NO: 1605929 - RNA, 16 nt, Human
cauguucuuaauucuu

SEQ ID NO: 1605930 - RNA, 21 nt, Human
cauguuacauaagauaaaugu

SEQ ID NO: 1605931 - RNA, 18 nt, Human
caugggaaaggggaaguu

SEQ ID NO: 1605932 - RNA, 20 nt, Human
caugggaaaugucaacaagu

SEQ ID NO: 1605933 - RNA, 21 nt, Human
cauggccucuucagaucucua

SEQ ID NO: 1605934 - RNA, 14 nt, Human
cauggccgugaacu

SEQ ID NO: 1605935 - RNA, 22 nt, Human
cauggccucuucagaucucuaa

SEQ ID NO: 1605936 - RNA, 16 nt, Human
caugcuccuggcccac

SEQ ID NO: 1605937 - RNA, 14 nt, Human
caugcuccuggccc

SEQ ID NO: 1605938 - RNA, 17 nt, Human
caugcuccuggcccacu

SEQ ID NO: 1605939 - RNA, 20 nt, Human
caugcuccuggcccacugca

SEQ ID NO: 1605940 - RNA, 15 nt, Human
cauggccagguggcc

SEQ ID NO: 1605941 - RNA, 12 nt, Human
caugcaagguca

SEQ ID NO: 1605942 - RNA, 15 nt, Human
caugcaaggucauuu

SEQ ID NO: 1605943 - RNA, 14 nt, Human
caugaugcgggcca

SEQ ID NO: 1605944 - RNA, 20 nt, Human
caugaugcgggccagugcuc

SEQ ID NO: 1605945 - RNA, 15 nt, Human
caugaugcgggccag

SEQ ID NO: 1605946 - RNA, 13 nt, Human
caugacaaagacu

SEQ ID NO: 1605947 - RNA, 16 nt, Human
caugaauuugugaagg

SEQ ID NO: 1605948 - RNA, 21 nt, Human
caugaauauuuaguguucaua

SEQ ID NO: 1605949 - RNA, 11 nt, Human
caggcuacugu

SEQ ID NO: 1605950 - RNA, 21 nt, Human
caggcugggagagccuuccag

SEQ ID NO: 1605951 - RNA, 21 nt, Human
caggcgugagccaccgugccu

SEQ ID NO: 1605952 - RNA, 14 nt, Human
caggccuccuacag

SEQ ID NO: 1605953 - RNA, 12 nt, Human
caggccuccuac

SEQ ID NO: 1605954 - RNA, 16 nt, Human
caggggaaaagaggag

SEQ ID NO: 1605955 - RNA, 14 nt, Human
caggggaaaagagg

SEQ ID NO: 1605956 - RNA, 17 nt, Human
caggggaaaaucagccu

SEQ ID NO: 1605957 - RNA, 23 nt, Human
caggcugggagagccuuccaggg

SEQ ID NO: 1605958 - RNA, 22 nt, Human
caggcugggagagccuuccagg

SEQ ID NO: 1605959 - RNA, 19 nt, Human
caggaggaucacuugaguc

SEQ ID NO: 1605960 - RNA, 19 nt, Human
caggaggccagccuugacc

SEQ ID NO: 1605961 - RNA, 18 nt, Human
caggaggccagccuugac

SEQ ID NO: 1605962 - RNA, 22 nt, Human
caggaggccagccuugaccauu

SEQ ID NO: 1605963 - RNA, 17 nt, Human
caggcaaugcuggcugu

SEQ ID NO: 1605964 - RNA, 16 nt, Human
caggcaaugcuggcug

SEQ ID NO: 1605965 - RNA, 15 nt, Human
caggcaaugcuggcu

SEQ ID NO: 1605966 - RNA, 23 nt, Human
caggaccucaggugagaagcaga

SEQ ID NO: 1605967 - RNA, 16 nt, Human
caggaccucaggugag

SEQ ID NO: 1605968 - RNA, 12 nt, Human
caggccaggccc

SEQ ID NO: 1605969 - RNA, 11 nt, Human
caggccaggcc

SEQ ID NO: 1605970 - RNA, 10 nt, Human
cagcugccuc

SEQ ID NO: 1605971 - RNA, 19 nt, Human
cagcugagggugagugggu

SEQ ID NO: 1605972 - RNA, 11 nt, Human
cagcugccucc

SEQ ID NO: 1605973 - RNA, 9 nt, Human
cagcugccu

SEQ ID NO: 1605974 - RNA, 14 nt, Human
cagcugccuccccu

SEQ ID NO: 1605975 - RNA, 15 nt, Human
cagcugccuccccuc

SEQ ID NO: 1605976 - RNA, 16 nt, Human
cagcugccuccccucc

SEQ ID NO: 1605977 - RNA, 17 nt, Human
cagcugccuccccuccu

SEQ ID NO: 1605978 - RNA, 18 nt, Human
cagcugccuccccuccuc

SEQ ID NO: 1605979 - RNA, 19 nt, Human
cagcugccuccccuccucu

SEQ ID NO: 1605980 - RNA, 20 nt, Human
cagcugccuccccuccucug

SEQ ID NO: 1605981 - RNA, 21 nt, Human
cagcugacuuuucuguccgag

SEQ ID NO: 1605982 - RNA, 20 nt, Human
caggaaagagaacuuccaga

SEQ ID NO: 1605983 - RNA, 16 nt, Human
caggaaagagaacuuc

SEQ ID NO: 1605984 - RNA, 17 nt, Human
caggaaaggcuccagga

SEQ ID NO: 1605985 - RNA, 16 nt, Human
caggaaaggcuccagg

SEQ ID NO: 1605986 - RNA, 20 nt, Human
caggaaaggcuccaggagca

SEQ ID NO: 1605987 - RNA, 19 nt, Human
caggaaaggcuccaggagc

SEQ ID NO: 1605988 - RNA, 20 nt, Human
cagcuuauugucuagugaaa

SEQ ID NO: 1605989 - RNA, 14 nt, Human
cagcuuauugucua

SEQ ID NO: 1605990 - RNA, 20 nt, Human
cagcuguaugauucccagcc

SEQ ID NO: 1605991 - RNA, 16 nt, Human
cagccugcuccagcug

SEQ ID NO: 1605992 - RNA, 19 nt, Human
cagccugcuccagcuguuc

SEQ ID NO: 1605993 - RNA, 17 nt, Human
cagccugcuccagcugu

SEQ ID NO: 1605994 - RNA, 15 nt, Human
cagcuaacauggaag

SEQ ID NO: 1605995 - RNA, 21 nt, Human
cagcggaaagcccugugcucc

SEQ ID NO: 1605996 - RNA, 18 nt, Human
cagacuggcacaguuuuc

SEQ ID NO: 1605997 - RNA, 17 nt, Human
cagacuggcacaguuuu

SEQ ID NO: 1605998 - RNA, 21 nt, Human
cagacuggaagcacagcuuca

SEQ ID NO: 1605999 - RNA, 20 nt, Human
cagacuggaagcacagcuuc

SEQ ID NO: 1606000 - RNA, 23 nt, Human
cagacuggcacaguuuucugaga

SEQ ID NO: 1606001 - RNA, 22 nt, Human
cagacuggcacaguuuucugag

SEQ ID NO: 1606002 - RNA, 18 nt, Human
cagacuggaagcacagcu

SEQ ID NO: 1606003 - RNA, 17 nt, Human
cagacuggaagcacagc

SEQ ID NO: 1606004 - RNA, 16 nt, Human
cagacuggaagcacag

SEQ ID NO: 1606005 - RNA, 14 nt, Human
cagacuggaagcac

SEQ ID NO: 1606006 - RNA, 13 nt, Human
cagacuggaagca

SEQ ID NO: 1606007 - RNA, 23 nt, Human
cagacaggcaagcaccuccugcc

SEQ ID NO: 1606008 - RNA, 22 nt, Human
cagacaggcaagcaccuccugc

SEQ ID NO: 1606009 - RNA, 17 nt, Human
cagacucuacagaggcc

SEQ ID NO: 1606010 - RNA, 21 nt, Human
cagacucuacagaggccaugg

SEQ ID NO: 1606011 - RNA, 20 nt, Human
cagacucuacagaggccaug

SEQ ID NO: 1606012 - RNA, 19 nt, Human
cagacucuacagaggccau

SEQ ID NO: 1606013 - RNA, 18 nt, Human
cagacucuacagaggcca

SEQ ID NO: 1606014 - RNA, 23 nt, Human
cagacucuacagaggccaugggc

SEQ ID NO: 1606015 - RNA, 21 nt, Human
cagacaggcaagcaccuccug

SEQ ID NO: 1606016 - RNA, 20 nt, Human
cagacaggcaagcaccuccu

SEQ ID NO: 1606017 - RNA, 18 nt, Human
cagacaggcaagcaccuc

SEQ ID NO: 1606018 - RNA, 13 nt, Human
cagacaggcaagc

SEQ ID NO: 1606019 - RNA, 11 nt, Human
cagacaggcaa

SEQ ID NO: 1606020 - RNA, 24 nt, Human
cagacaggaccagggauuuccaug

SEQ ID NO: 1606021 - RNA, 17 nt, Human
cagacaggaccagggau

SEQ ID NO: 1606022 - RNA, 18 nt, Human
cagacagcugccugggau

SEQ ID NO: 1606023 - RNA, 17 nt, Human
cagacagcugccuggga

SEQ ID NO: 1606024 - RNA, 16 nt, Human
cagacagcugccuggg

SEQ ID NO: 1606025 - RNA, 15 nt, Human
cagacagcugccugg

SEQ ID NO: 1606026 - RNA, 16 nt, Human
cagacaggaccaggga

SEQ ID NO: 1606027 - RNA, 15 nt, Human
cagacaggaccaggg

SEQ ID NO: 1606028 - RNA, 13 nt, Human
cagacaggaccag

SEQ ID NO: 1606029 - RNA, 14 nt, Human
cagacagcugccug

SEQ ID NO: 1606030 - RNA, 13 nt, Human
cagacagcugccu

SEQ ID NO: 1606031 - RNA, 14 nt, Human
cagacagcccucca

SEQ ID NO: 1606032 - RNA, 23 nt, Human
cagagcugcccucuccugggcag

SEQ ID NO: 1606033 - RNA, 18 nt, Human
cagagcugcccucuccug

SEQ ID NO: 1606034 - RNA, 19 nt, Human
cagagcugcccucuccugg

SEQ ID NO: 1606035 - RNA, 20 nt, Human
cagagcugcccucuccuggg

SEQ ID NO: 1606036 - RNA, 21 nt, Human
cagagcugcccucuccugggc

SEQ ID NO: 1606037 - RNA, 19 nt, Human
cagaggaaagcaaaggaga

SEQ ID NO: 1606038 - RNA, 17 nt, Human
cagaggaaagcaaagga

SEQ ID NO: 1606039 - RNA, 13 nt, Human
cagaggggguggc

SEQ ID NO: 1606040 - RNA, 20 nt, Human
cagaggaaagcaaaggagau

SEQ ID NO: 1606041 - RNA, 23 nt, Human
cagagaggguggugaccucugcc

SEQ ID NO: 1606042 - RNA, 20 nt, Human
cagagagguuaaggugggua

SEQ ID NO: 1606043 - RNA, 13 nt, Human
cagagcugccacc

SEQ ID NO: 1606044 - RNA, 16 nt, Human
cagagcugccaccugc

SEQ ID NO: 1606045 - RNA, 22 nt, Human
cagagaggguggugaccucugc

SEQ ID NO: 1606046 - RNA, 20 nt, Human
cagagaggguggugaccucu

SEQ ID NO: 1606047 - RNA, 17 nt, Human
cagagaggguggugacc

SEQ ID NO: 1606048 - RNA, 13 nt, Human
cagagaggguggg

SEQ ID NO: 1606049 - RNA, 12 nt, Human
cagagagggugg

SEQ ID NO: 1606050 - RNA, 16 nt, Human
cagaggggguggccuc

SEQ ID NO: 1606051 - RNA, 14 nt, Human
cagaggggguggcc

SEQ ID NO: 1606052 - RNA, 19 nt, Human
cagauacuuggggggcuga

SEQ ID NO: 1606053 - RNA, 17 nt, Human
cagaggggguggccucc

SEQ ID NO: 1606054 - RNA, 14 nt, Human
cagauacuggauug

SEQ ID NO: 1606055 - RNA, 19 nt, Human
cagauagauauaugcucug

SEQ ID NO: 1606056 - RNA, 18 nt, Human
cagauacuggauuguacu

SEQ ID NO: 1606057 - RNA, 14 nt, Human
cagauaugauucaa

SEQ ID NO: 1606058 - RNA, 15 nt, Human
cagauccccaagccu

SEQ ID NO: 1606059 - RNA, 14 nt, Human
cagauccccaagcc

SEQ ID NO: 1606060 - RNA, 18 nt, Human
cagccagacuggcacagu

SEQ ID NO: 1606061 - RNA, 15 nt, Human
cagccagacuggcac

SEQ ID NO: 1606062 - RNA, 20 nt, Human
cagccagacuggcacaguuu

SEQ ID NO: 1606063 - RNA, 23 nt, Human
cagccagcaguucagagcugccc

SEQ ID NO: 1606064 - RNA, 14 nt, Human
cagccagacuggca

SEQ ID NO: 1606065 - RNA, 14 nt, Human
cagcacgauuucug

SEQ ID NO: 1606066 - RNA, 15 nt, Human
cagcacgauuucugu

SEQ ID NO: 1606067 - RNA, 18 nt, Human
cagcacgggggccaagga

SEQ ID NO: 1606068 - RNA, 18 nt, Human
cagauugcaacaggcugg

SEQ ID NO: 1606069 - RNA, 20 nt, Human
cagauugcaacaggcugggc

SEQ ID NO: 1606070 - RNA, 19 nt, Human
cagauugcaacaggcuggg

SEQ ID NO: 1606071 - RNA, 21 nt, Human
cagauugcaacaggcugggcu

SEQ ID NO: 1606072 - RNA, 20 nt, Human
cagauuucacucuccuuggu

SEQ ID NO: 1606073 - RNA, 13 nt, Human
cagauuucacucu

SEQ ID NO: 1606074 - RNA, 13 nt, Human
cagauuuaugcau

SEQ ID NO: 1606075 - RNA, 19 nt, Human
cagcaccaucucuccuccu

SEQ ID NO: 1606076 - RNA, 17 nt, Human
cagcaccaucucuccuc

SEQ ID NO: 1606077 - RNA, 19 nt, Human
cagauuugaacucuucaau

SEQ ID NO: 1606078 - RNA, 19 nt, Human
ccacuuggucugugagaug

SEQ ID NO: 1606079 - RNA, 17 nt, Human
ccacuuggucugugaga

SEQ ID NO: 1606080 - RNA, 16 nt, Human
ccacuuggucugugag

SEQ ID NO: 1606081 - RNA, 15 nt, Human
ccacuuggucuguga

SEQ ID NO: 1606082 - RNA, 22 nt, Human
ccacuuggucugugagaugcua

SEQ ID NO: 1606083 - RNA, 20 nt, Human
ccacuuggucugugagaugc

SEQ ID NO: 1606084 - RNA, 19 nt, Human
ccacuuucuagccagagga

SEQ ID NO: 1606085 - RNA, 18 nt, Human
ccacuuucuagccagagg

SEQ ID NO: 1606086 - RNA, 13 nt, Human
ccacuuucuagcc

SEQ ID NO: 1606087 - RNA, 20 nt, Human
ccacuuucuagccagaggag

SEQ ID NO: 1606088 - RNA, 17 nt, Human
ccagacccggcugcgug

SEQ ID NO: 1606089 - RNA, 14 nt, Human
ccacuuuuguucuu

SEQ ID NO: 1606090 - RNA, 15 nt, Human
ccacuuuuguucuug

SEQ ID NO: 1606091 - RNA, 21 nt, Human
ccacuuuuguucuugguuugu

SEQ ID NO: 1606092 - RNA, 22 nt, Human
ccacuuuuguucuugguuugua

SEQ ID NO: 1606093 - RNA, 12 nt, Human
ccacuuggucug

SEQ ID NO: 1606094 - RNA, 19 nt, Human
ccacugcaccgggccacag

SEQ ID NO: 1606095 - RNA, 17 nt, Human
ccacugcaccgggccac

SEQ ID NO: 1606096 - RNA, 14 nt, Human
ccacugcaccgggc

SEQ ID NO: 1606097 - RNA, 13 nt, Human
ccacugcaccggg

SEQ ID NO: 1606098 - RNA, 20 nt, Human
ccacugcacuauagccuagg

SEQ ID NO: 1606099 - RNA, 19 nt, Human
ccacugcacuauagccuag

SEQ ID NO: 1606100 - RNA, 18 nt, Human
ccacugcacuccagccug

SEQ ID NO: 1606101 - RNA, 18 nt, Human
ccagagacacaagccuuc

SEQ ID NO: 1606102 - RNA, 16 nt, Human
ccagagacacaagccu

SEQ ID NO: 1606103 - RNA, 14 nt, Human
ccagaugcaccagc

SEQ ID NO: 1606104 - RNA, 13 nt, Human
ccagaugcaccag

SEQ ID NO: 1606105 - RNA, 13 nt, Human
ccagagagggugg

SEQ ID NO: 1606106 - RNA, 15 nt, Human
ccaggggccaugaau

SEQ ID NO: 1606107 - RNA, 13 nt, Human
ccaggcugagccu

SEQ ID NO: 1606108 - RNA, 16 nt, Human
ccaggcugagccucag

SEQ ID NO: 1606109 - RNA, 14 nt, Human
ccaggcugagccuc

SEQ ID NO: 1606110 - RNA, 22 nt, Human
ccaggcugagccucagucuccc

SEQ ID NO: 1606111 - RNA, 19 nt, Human
ccaggcugagccucagucu

SEQ ID NO: 1606112 - RNA, 17 nt, Human
ccaggcugagccucagu

SEQ ID NO: 1606113 - RNA, 23 nt, Human
ccaggggugggacacccugugau

SEQ ID NO: 1606114 - RNA, 22 nt, Human
ccaggggugggacacccuguga

SEQ ID NO: 1606115 - RNA, 21 nt, Human
ccaggggugggacacccugug

SEQ ID NO: 1606116 - RNA, 20 nt, Human
ccaggggugggacacccugu

SEQ ID NO: 1606117 - RNA, 22 nt, Human
ccaguaucuugaagacuuuucu

SEQ ID NO: 1606118 - RNA, 19 nt, Human
ccaguaucuugaagacuuu

SEQ ID NO: 1606119 - RNA, 16 nt, Human
ccagucaccccggcca

SEQ ID NO: 1606120 - RNA, 14 nt, Human
ccaguauuguacaa

SEQ ID NO: 1606121 - RNA, 18 nt, Human
ccagucaccccggccacc

SEQ ID NO: 1606122 - RNA, 17 nt, Human
ccagucaccccggccac

SEQ ID NO: 1606123 - RNA, 19 nt, Human
ccagucaccccggccaccu

SEQ ID NO: 1606124 - RNA, 19 nt, Human
ccaggaaaggcuccaggag

SEQ ID NO: 1606125 - RNA, 18 nt, Human
ccaggaaaggcuccagga

SEQ ID NO: 1606126 - RNA, 17 nt, Human
ccaggaaaggcuccagg

SEQ ID NO: 1606127 - RNA, 20 nt, Human
ccaggaaaggcuccaggagc

SEQ ID NO: 1606128 - RNA, 17 nt, Human
ccagccccuucugaccc

SEQ ID NO: 1606129 - RNA, 16 nt, Human
ccagccccuucugacc

SEQ ID NO: 1606130 - RNA, 15 nt, Human
ccagccccuucugac

SEQ ID NO: 1606131 - RNA, 18 nt, Human
ccagccccuggaugcagc

SEQ ID NO: 1606132 - RNA, 18 nt, Human
ccagccccuucugaccca

SEQ ID NO: 1606133 - RNA, 15 nt, Human
ccagccccuggaugc

SEQ ID NO: 1606134 - RNA, 14 nt, Human
ccagccccuggaug

SEQ ID NO: 1606135 - RNA, 13 nt, Human
ccagccccuggau

SEQ ID NO: 1606136 - RNA, 23 nt, Human
ccagccccauccucuguacagag

SEQ ID NO: 1606137 - RNA, 13 nt, Human
ccagcagccugga

SEQ ID NO: 1606138 - RNA, 14 nt, Human
ccagcagccuggac

SEQ ID NO: 1606139 - RNA, 12 nt, Human
ccagcagccugg

SEQ ID NO: 1606140 - RNA, 11 nt, Human
ccagcagccug

SEQ ID NO: 1606141 - RNA, 16 nt, Human
ccagcagaaaugccuu

SEQ ID NO: 1606142 - RNA, 17 nt, Human
ccagcagaaaugccuua

SEQ ID NO: 1606143 - RNA, 22 nt, Human
ccagcagaaaugccuuacccuc

SEQ ID NO: 1606144 - RNA, 15 nt, Human
ccccauuguggucac

SEQ ID NO: 1606145 - RNA, 14 nt, Human
cccccuuccaugga

SEQ ID NO: 1606146 - RNA, 12 nt, Human
ccccgcccaggc

SEQ ID NO: 1606147 - RNA, 14 nt, Human
ccccgcccaggcuu

SEQ ID NO: 1606148 - RNA, 18 nt, Human
ccccggccaccugcggug

SEQ ID NO: 1606149 - RNA, 14 nt, Human
ccccggccaccugc

SEQ ID NO: 1606150 - RNA, 21 nt, Human
ccccaaaacucuccucugcug

SEQ ID NO: 1606151 - RNA, 20 nt, Human
ccccaaaacucuccucugcu

SEQ ID NO: 1606152 - RNA, 18 nt, Human
ccccaaaacucuccucug

SEQ ID NO: 1606153 - RNA, 14 nt, Human
ccccagccccaaaa

SEQ ID NO: 1606154 - RNA, 14 nt, Human
ccccagccccaucc

SEQ ID NO: 1606155 - RNA, 21 nt, Human
ccccauucugccugcccaggc

SEQ ID NO: 1606156 - RNA, 12 nt, Human
ccccagccccaa

SEQ ID NO: 1606157 - RNA, 23 nt, Human
cccagccccaaaacucuccucug

SEQ ID NO: 1606158 - RNA, 21 nt, Human
cccagccccaaaacucuccuc

SEQ ID NO: 1606159 - RNA, 19 nt, Human
cccagcccacuucugccau

SEQ ID NO: 1606160 - RNA, 19 nt, Human
cccauccucuguacagagc

SEQ ID NO: 1606161 - RNA, 15 nt, Human
cccauccucuguaca

SEQ ID NO: 1606162 - RNA, 20 nt, Human
cccauccucuguacagagcc

SEQ ID NO: 1606163 - RNA, 14 nt, Human
cccauccucuguac

SEQ ID NO: 1606164 - RNA, 20 nt, Human
cccaggcuggcgugcagugg

SEQ ID NO: 1606165 - RNA, 19 nt, Human
cccaggcuggcgugcagug

SEQ ID NO: 1606166 - RNA, 21 nt, Human
cccaggcuggcgugcaguggu

SEQ ID NO: 1606167 - RNA, 18 nt, Human
cccaggcuggcgugcagu

SEQ ID NO: 1606168 - RNA, 23 nt, Human
cccagcuggggccaggcuggguc

SEQ ID NO: 1606169 - RNA, 22 nt, Human
cccagcuggggccaggcugggu

SEQ ID NO: 1606170 - RNA, 18 nt, Human
ccaugggcacugugggua

SEQ ID NO: 1606171 - RNA, 19 nt, Human
ccaugggauaaaugccauc

SEQ ID NO: 1606172 - RNA, 18 nt, Human
ccaugaggaacaaggcaa

SEQ ID NO: 1606173 - RNA, 17 nt, Human
ccaugaggaacaaggca

SEQ ID NO: 1606174 - RNA, 16 nt, Human
ccaugaggaacaaggc

SEQ ID NO: 1606175 - RNA, 13 nt, Human
ccaugagccucag

SEQ ID NO: 1606176 - RNA, 20 nt, Human
ccaugucucugagcauuaga

SEQ ID NO: 1606177 - RNA, 15 nt, Human
ccaugucucgacuca

SEQ ID NO: 1606178 - RNA, 14 nt, Human
ccaugucucgacuc

SEQ ID NO: 1606179 - RNA, 13 nt, Human
ccauuuaaagcuu

SEQ ID NO: 1606180 - RNA, 14 nt, Human
cccaaccugcucuc

SEQ ID NO: 1606181 - RNA, 13 nt, Human
cccaaccugcucu

SEQ ID NO: 1606182 - RNA, 21 nt, Human
cccaaccugcucuccucuugc

SEQ ID NO: 1606183 - RNA, 23 nt, Human
cccaaccugcucuccucuugcca

SEQ ID NO: 1606184 - RNA, 22 nt, Human
ccauuguggucacaggaaguag

SEQ ID NO: 1606185 - RNA, 15 nt, Human
cccacccaagggccu

SEQ ID NO: 1606186 - RNA, 18 nt, Human
cccacccaagggccuggc

SEQ ID NO: 1606187 - RNA, 17 nt, Human
cccaagcucugcuccuc

SEQ ID NO: 1606188 - RNA, 12 nt, Human
cccaagcucugc

SEQ ID NO: 1606189 - RNA, 21 nt, Human
cccaagaauagaugcugacug

SEQ ID NO: 1606190 - RNA, 20 nt, Human
cccaagaauagaugcugacu

SEQ ID NO: 1606191 - RNA, 23 nt, Human
cccaagccuacuuuugccauuga

SEQ ID NO: 1606192 - RNA, 16 nt, Human
cccaagccuggcaagg

SEQ ID NO: 1606193 - RNA, 18 nt, Human
cccaccgcagacaggacc

SEQ ID NO: 1606194 - RNA, 15 nt, Human
cccaccgcagacagg

SEQ ID NO: 1606195 - RNA, 23 nt, Human
cccacuguacuugcucuugaugc

SEQ ID NO: 1606196 - RNA, 19 nt, Human
cccacuguacuugcucuug

SEQ ID NO: 1606197 - RNA, 18 nt, Human
cccacuguacuugcucuu

SEQ ID NO: 1606198 - RNA, 21 nt, Human
ccucuccugggcagcugccuc

SEQ ID NO: 1606199 - RNA, 22 nt, Human
ccucuccugggcagcugccucc

SEQ ID NO: 1606200 - RNA, 15 nt, Human
ccucuccugggcagc

SEQ ID NO: 1606201 - RNA, 16 nt, Human
ccucuccugggcagcu

SEQ ID NO: 1606202 - RNA, 17 nt, Human
ccucuccugggcagcug

SEQ ID NO: 1606203 - RNA, 18 nt, Human
ccucuccugggcagcugc

SEQ ID NO: 1606204 - RNA, 19 nt, Human
ccucuccugggcagcugcc

SEQ ID NO: 1606205 - RNA, 20 nt, Human
ccucuccugggcagcugccu

SEQ ID NO: 1606206 - RNA, 20 nt, Human
ccucugccugaagucacaca

SEQ ID NO: 1606207 - RNA, 11 nt, Human
ccucugccuga

SEQ ID NO: 1606208 - RNA, 23 nt, Human
ccucugccucugacacacagcuc

SEQ ID NO: 1606209 - RNA, 21 nt, Human
ccucugccucugacacacagc

SEQ ID NO: 1606210 - RNA, 20 nt, Human
ccucugccucugacacacag

SEQ ID NO: 1606211 - RNA, 14 nt, Human
ccucugcccugcgg

SEQ ID NO: 1606212 - RNA, 13 nt, Human
ccucugcccugcg

SEQ ID NO: 1606213 - RNA, 12 nt, Human
ccucugcccugc

SEQ ID NO: 1606214 - RNA, 11 nt, Human
ccucugcccug

SEQ ID NO: 1606215 - RNA, 12 nt, Human
ccucucucacuc

SEQ ID NO: 1606216 - RNA, 20 nt, Human
ccucucugcaggucccuaau

SEQ ID NO: 1606217 - RNA, 19 nt, Human
ccucucugcaggucccuaa

SEQ ID NO: 1606218 - RNA, 18 nt, Human
ccucucugcaggucccua

SEQ ID NO: 1606219 - RNA, 17 nt, Human
ccucucugcaggucccu

SEQ ID NO: 1606220 - RNA, 16 nt, Human
ccucucugcagguccc

SEQ ID NO: 1606221 - RNA, 13 nt, Human
ccuccgccucuug

SEQ ID NO: 1606222 - RNA, 16 nt, Human
ccuccgccucccgggu

SEQ ID NO: 1606223 - RNA, 13 nt, Human
ccuccgccucccg

SEQ ID NO: 1606224 - RNA, 15 nt, Human
ccucgaacuggcugc

SEQ ID NO: 1606225 - RNA, 16 nt, Human
ccucgaacuggcugca

SEQ ID NO: 1606226 - RNA, 20 nt, Human
ccuccuuugugaggaagccg

SEQ ID NO: 1606227 - RNA, 19 nt, Human
ccuccuuugugaggaagcc

SEQ ID NO: 1606228 - RNA, 18 nt, Human
ccuccuuugugaggaagc

SEQ ID NO: 1606229 - RNA, 18 nt, Human
ccucagccuccugaguag

SEQ ID NO: 1606230 - RNA, 23 nt, Human
ccucccaacucaccccagcccca

SEQ ID NO: 1606231 - RNA, 21 nt, Human
ccucccaacucaccccagccc

SEQ ID NO: 1606232 - RNA, 20 nt, Human
ccucccaacucaccccagcc

SEQ ID NO: 1606233 - RNA, 17 nt, Human
ccucccaacucacccca

SEQ ID NO: 1606234 - RNA, 11 nt, Human
ccucaggcagg

SEQ ID NO: 1606235 - RNA, 16 nt, Human
ccugaggggccucuua

SEQ ID NO: 1606236 - RNA, 12 nt, Human
ccugaggggccu

SEQ ID NO: 1606237 - RNA, 21 nt, Human
ccugaggcugggcucccuucc

SEQ ID NO: 1606238 - RNA, 19 nt, Human
ccugaggcugggcucccuu

SEQ ID NO: 1606239 - RNA, 17 nt, Human
ccugaggcugggcuccc

SEQ ID NO: 1606240 - RNA, 21 nt, Human
ccugcaggcagccaggccaca

SEQ ID NO: 1606241 - RNA, 20 nt, Human
ccugcaggcagccaggccac

SEQ ID NO: 1606242 - RNA, 19 nt, Human
ccugcaggcagccaggcca

SEQ ID NO: 1606243 - RNA, 18 nt, Human
ccugcaggcagccaggcc

SEQ ID NO: 1606244 - RNA, 23 nt, Human
ccugcaggcagccaggccacaag

SEQ ID NO: 1606245 - RNA, 14 nt, Human
ccugcagagggcac

SEQ ID NO: 1606246 - RNA, 17 nt, Human
ccugcaggcagccaggc

SEQ ID NO: 1606247 - RNA, 16 nt, Human
ccugcaggcagccagg

SEQ ID NO: 1606248 - RNA, 12 nt, Human
ccugcagagggc

SEQ ID NO: 1606249 - RNA, 21 nt, Human
ccucugccugaagucacacag

SEQ ID NO: 1606250 - RNA, 15 nt, Human
ccucugccugucucc

SEQ ID NO: 1606251 - RNA, 19 nt, Human
ccucugccugucuccccca

SEQ ID NO: 1606252 - RNA, 19 nt, Human
ccucuuuggucuacacugu

SEQ ID NO: 1606253 - RNA, 16 nt, Human
ccucuuugagugaagc

SEQ ID NO: 1606254 - RNA, 20 nt, Human
ccugccuccuuugugaggaa

SEQ ID NO: 1606255 - RNA, 19 nt, Human
ccugccuccuuugugagga

SEQ ID NO: 1606256 - RNA, 15 nt, Human
ccugccuccuuugug

SEQ ID NO: 1606257 - RNA, 13 nt, Human
ccugccuccuuug

SEQ ID NO: 1606258 - RNA, 22 nt, Human
ccugccuccuuugugaggaagc

SEQ ID NO: 1606259 - RNA, 21 nt, Human
ccugccuccuuugugaggaag

SEQ ID NO: 1606260 - RNA, 23 nt, Human
ccugccuccuuugugaggaagcc

SEQ ID NO: 1606261 - RNA, 17 nt, Human
ccugccucucugcaggu

SEQ ID NO: 1606262 - RNA, 16 nt, Human
ccugcugcaguugcca

SEQ ID NO: 1606263 - RNA, 12 nt, Human
ccugcugcaguu

SEQ ID NO: 1606264 - RNA, 11 nt, Human
ccugcugcagu

SEQ ID NO: 1606265 - RNA, 22 nt, Human
ccugcugcaguugccagucacc

SEQ ID NO: 1606266 - RNA, 15 nt, Human
ccugccucuucucua

SEQ ID NO: 1606267 - RNA, 21 nt, Human
ccugccucucugcaggucccu

SEQ ID NO: 1606268 - RNA, 20 nt, Human
ccugccucucugcagguccc

SEQ ID NO: 1606269 - RNA, 14 nt, Human
cccugagcaggauu

SEQ ID NO: 1606270 - RNA, 16 nt, Human
cccugagcuuucugcu

SEQ ID NO: 1606271 - RNA, 20 nt, Human
cccugcccaccuggccucug

SEQ ID NO: 1606272 - RNA, 17 nt, Human
cccugcccggcugcgga

SEQ ID NO: 1606273 - RNA, 14 nt, Human
cccugcccggcugc

SEQ ID NO: 1606274 - RNA, 17 nt, Human
cccugccccucccuuca

SEQ ID NO: 1606275 - RNA, 23 nt, Human
cccugccccucccuucaaccauu

SEQ ID NO: 1606276 - RNA, 19 nt, Human
cccugccccucccuucaac

SEQ ID NO: 1606277 - RNA, 18 nt, Human
cccugccccucccuucaa

SEQ ID NO: 1606278 - RNA, 14 nt, Human
cccugccccccagc

SEQ ID NO: 1606279 - RNA, 15 nt, Human
cccugccccccagcc

SEQ ID NO: 1606280 - RNA, 20 nt, Human
cccugccccccagcccuccu

SEQ ID NO: 1606281 - RNA, 22 nt, Human
cccugcccaccuggccucugca

SEQ ID NO: 1606282 - RNA, 19 nt, Human
cccuggauccaucaggcca

SEQ ID NO: 1606283 - RNA, 21 nt, Human
cccuggaugcagccucacagu

SEQ ID NO: 1606284 - RNA, 17 nt, Human
cccuggaugcagccuca

SEQ ID NO: 1606285 - RNA, 13 nt, Human
cccuggaugcagc

SEQ ID NO: 1606286 - RNA, 11 nt, Human
cccugcccugu

SEQ ID NO: 1606287 - RNA, 23 nt, Human
cccugcccugguuuccugcccug

SEQ ID NO: 1606288 - RNA, 22 nt, Human
cccugcccugguuuccugcccu

SEQ ID NO: 1606289 - RNA, 12 nt, Human
cccugcccuggu

SEQ ID NO: 1606290 - RNA, 11 nt, Human
cccugcccugg

SEQ ID NO: 1606291 - RNA, 20 nt, Human
cccuggcucccacaggcccu

SEQ ID NO: 1606292 - RNA, 13 nt, Human
cccucggagaaga

SEQ ID NO: 1606293 - RNA, 18 nt, Human
cccugaaagcccugagcu

SEQ ID NO: 1606294 - RNA, 14 nt, Human
cccuccucucugcc

SEQ ID NO: 1606295 - RNA, 18 nt, Human
cccuccuccuggacuccu

SEQ ID NO: 1606296 - RNA, 16 nt, Human
cccuccuccuggacuc

SEQ ID NO: 1606297 - RNA, 11 nt, Human
cccuccuccug

SEQ ID NO: 1606298 - RNA, 20 nt, Human
cccugaauuuaaauagcuuu

SEQ ID NO: 1606299 - RNA, 22 nt, Human
cccugacaacacucauugaccu

SEQ ID NO: 1606300 - RNA, 16 nt, Human
cccugacaacacucau

SEQ ID NO: 1606301 - RNA, 22 nt, Human
cccugaaggccccgcccaggcu

SEQ ID NO: 1606302 - RNA, 20 nt, Human
cccugaaggccccgcccagg

SEQ ID NO: 1606303 - RNA, 14 nt, Human
cccugacaacacuc

SEQ ID NO: 1606304 - RNA, 19 nt, Human
cccugaaggccccgcccag

SEQ ID NO: 1606305 - RNA, 16 nt, Human
cccugaaggccccgcc

SEQ ID NO: 1606306 - RNA, 14 nt, Human
cccugaaggccccg

SEQ ID NO: 1606307 - RNA, 13 nt, Human
cccugaaggcccc

SEQ ID NO: 1606308 - RNA, 12 nt, Human
cccugaaggccc

SEQ ID NO: 1606309 - RNA, 20 nt, Human
ccuaacgaaguauccuucag

SEQ ID NO: 1606310 - RNA, 16 nt, Human
ccgugaggccagagac

SEQ ID NO: 1606311 - RNA, 14 nt, Human
ccgugaggccagag

SEQ ID NO: 1606312 - RNA, 13 nt, Human
ccgugaggccaga

SEQ ID NO: 1606313 - RNA, 12 nt, Human
ccgugaggccag

SEQ ID NO: 1606314 - RNA, 17 nt, Human
ccgucuaccugaggggc

SEQ ID NO: 1606315 - RNA, 14 nt, Human
ccggcuccaggcuc

SEQ ID NO: 1606316 - RNA, 13 nt, Human
ccggcuccaggcu

SEQ ID NO: 1606317 - RNA, 15 nt, Human
ccgucuaccugaggg

SEQ ID NO: 1606318 - RNA, 14 nt, Human
ccgucuaccugagg

SEQ ID NO: 1606319 - RNA, 15 nt, Human
ccggcuccaggcucc

SEQ ID NO: 1606320 - RNA, 14 nt, Human
ccuaaucuucugaa

SEQ ID NO: 1606321 - RNA, 12 nt, Human
ccuaaggacuuc

SEQ ID NO: 1606322 - RNA, 11 nt, Human
ccuaaggacuu

SEQ ID NO: 1606323 - RNA, 23 nt, Human
ccuaaggacuucuuuaauuuugg

SEQ ID NO: 1606324 - RNA, 18 nt, Human
ccuaaggacuucuuuaau

SEQ ID NO: 1606325 - RNA, 17 nt, Human
ccuaaggacuucuuuaa

SEQ ID NO: 1606326 - RNA, 16 nt, Human
ccuaaggacuucuuua

SEQ ID NO: 1606327 - RNA, 19 nt, Human
ccuagcauacguacacauu

SEQ ID NO: 1606328 - RNA, 20 nt, Human
ccuaaugcgcaggcuggccc

SEQ ID NO: 1606329 - RNA, 20 nt, Human
ccuagccugugccucuggga

SEQ ID NO: 1606330 - RNA, 21 nt, Human
ccuagcauacguacacauuuu

SEQ ID NO: 1606331 - RNA, 16 nt, Human
ccggccaccugcggug

SEQ ID NO: 1606332 - RNA, 22 nt, Human
cccugugauggggcccugccuc

SEQ ID NO: 1606333 - RNA, 21 nt, Human
cccugugauggggcccugccu

SEQ ID NO: 1606334 - RNA, 23 nt, Human
cccugugauggggcccugccucc

SEQ ID NO: 1606335 - RNA, 13 nt, Human
cccugucuaauga

SEQ ID NO: 1606336 - RNA, 17 nt, Human
ccgcagacaggaccagg

SEQ ID NO: 1606337 - RNA, 16 nt, Human
ccgcagacaggaccag

SEQ ID NO: 1606338 - RNA, 12 nt, Human
ccgcccaggcuu

SEQ ID NO: 1606339 - RNA, 15 nt, Human
cccuuccucuuucca

SEQ ID NO: 1606340 - RNA, 17 nt, Human
ccgaaaacguggcugcu

SEQ ID NO: 1606341 - RNA, 16 nt, Human
ccgaaaacguggcugc

SEQ ID NO: 1606342 - RNA, 19 nt, Human
ccgaaagggacuuggaagc

SEQ ID NO: 1606343 - RNA, 17 nt, Human
ccgaccagacaccuuga

SEQ ID NO: 1606344 - RNA, 13 nt, Human
ccgaccagacacc

SEQ ID NO: 1606345 - RNA, 18 nt, Human
ccgaccagacaccuugac

SEQ ID NO: 1606346 - RNA, 15 nt, Human
ccgaccaccugccca

SEQ ID NO: 1606347 - RNA, 17 nt, Human
ccgaauagcugggacua

SEQ ID NO: 1606348 - RNA, 16 nt, Human
ccgaauagcugggacu

SEQ ID NO: 1606349 - RNA, 23 nt, Human
ccgaaggugaggagcuugaaacc

SEQ ID NO: 1606350 - RNA, 12 nt, Human
ccuuuucccaac

SEQ ID NO: 1606351 - RNA, 20 nt, Human
ccuuuucgcaggauucuucc

SEQ ID NO: 1606352 - RNA, 22 nt, Human
cgcaggcuggcccugcccuggu

SEQ ID NO: 1606353 - RNA, 21 nt, Human
cgagucucuucuccacuggau

SEQ ID NO: 1606354 - RNA, 20 nt, Human
cgagucucuucuccacugga

SEQ ID NO: 1606355 - RNA, 18 nt, Human
cgagucucuucuccacug

SEQ ID NO: 1606356 - RNA, 17 nt, Human
cgagucucuucuccacu

SEQ ID NO: 1606357 - RNA, 18 nt, Human
cgcuggagugcagugagc

SEQ ID NO: 1606358 - RNA, 17 nt, Human
cgcuggagugcagugag

SEQ ID NO: 1606359 - RNA, 20 nt, Human
cgcugccccuggcagccccu

SEQ ID NO: 1606360 - RNA, 19 nt, Human
cgcugccccuggcagcccc

SEQ ID NO: 1606361 - RNA, 19 nt, Human
cgcugauaagcguucaugg

SEQ ID NO: 1606362 - RNA, 21 nt, Human
cgcucuuggcagguacucagc

SEQ ID NO: 1606363 - RNA, 20 nt, Human
cgcucugucgcccaggcugg

SEQ ID NO: 1606364 - RNA, 18 nt, Human
cggcuaauuuuuguauuu

SEQ ID NO: 1606365 - RNA, 23 nt, Human
cggagucccaccuuggcugcagg

SEQ ID NO: 1606366 - RNA, 15 nt, Human
cggaggggccuggca

SEQ ID NO: 1606367 - RNA, 22 nt, Human
cggagucccaccuuggcugcag

SEQ ID NO: 1606368 - RNA, 21 nt, Human
cggagucccaccuuggcugca

SEQ ID NO: 1606369 - RNA, 17 nt, Human
cggagacggagucccac

SEQ ID NO: 1606370 - RNA, 20 nt, Human
cggagacggagucccaccuu

SEQ ID NO: 1606371 - RNA, 14 nt, Human
cggcucacugcagc

SEQ ID NO: 1606372 - RNA, 14 nt, Human
cgggccagugcucc

SEQ ID NO: 1606373 - RNA, 18 nt, Human
cgggccagugcuccagcc

SEQ ID NO: 1606374 - RNA, 13 nt, Human
cgggcucugccuc

SEQ ID NO: 1606375 - RNA, 12 nt, Human
cgggcucugccu

SEQ ID NO: 1606376 - RNA, 20 nt, Human
cgggcugggagcucugcaga

SEQ ID NO: 1606377 - RNA, 16 nt, Human
cgggcugggagcucug

SEQ ID NO: 1606378 - RNA, 19 nt, Human
cgggcucagcaaaagaugc

SEQ ID NO: 1606379 - RNA, 20 nt, Human
cgggccuggagaacuagaga

SEQ ID NO: 1606380 - RNA, 16 nt, Human
cgggccuggagaacua

SEQ ID NO: 1606381 - RNA, 22 nt, Human
cguacacauuuuauuuuauuau

SEQ ID NO: 1606382 - RNA, 20 nt, Human
cgguggcucacgccuguaau

SEQ ID NO: 1606383 - RNA, 20 nt, Human
cuacaaaaacacagcaaggg

SEQ ID NO: 1606384 - RNA, 19 nt, Human
cuacaaaaagcauaaaaau

SEQ ID NO: 1606385 - RNA, 20 nt, Human
cuaauaaaauuuaaaagucu

SEQ ID NO: 1606386 - RNA, 14 nt, Human
cuaaguuuuuaugg

SEQ ID NO: 1606387 - RNA, 15 nt, Human
cgugacaacacuugu

SEQ ID NO: 1606388 - RNA, 14 nt, Human
cgugacaacacuug

SEQ ID NO: 1606389 - RNA, 20 nt, Human
cgugagccacugcaccgggc

SEQ ID NO: 1606390 - RNA, 15 nt, Human
cgugagccacugcac

SEQ ID NO: 1606391 - RNA, 14 nt, Human
cgugagccacugca

SEQ ID NO: 1606392 - RNA, 14 nt, Human
cgugaggccagaga

SEQ ID NO: 1606393 - RNA, 22 nt, Human
cgugagccacugcaccgggcca

SEQ ID NO: 1606394 - RNA, 16 nt, Human
cuaacuuuccuucauu

SEQ ID NO: 1606395 - RNA, 22 nt, Human
cuaacuugucuuuggacccuga

SEQ ID NO: 1606396 - RNA, 14 nt, Human
cuaacuugucuuug

SEQ ID NO: 1606397 - RNA, 19 nt, Human
cuaaaguguauuuuuuuac

SEQ ID NO: 1606398 - RNA, 23 nt, Human
cuaaaguaaaaacaaagaaauua

SEQ ID NO: 1606399 - RNA, 19 nt, Human
cguguuaugacuccagaau

SEQ ID NO: 1606400 - RNA, 15 nt, Human
cguguuaugacucca

SEQ ID NO: 1606401 - RNA, 19 nt, Human
cgugaguccuggcauggga

SEQ ID NO: 1606402 - RNA, 16 nt, Human
cgugaggccagagaca

SEQ ID NO: 1606403 - RNA, 11 nt, Human
cuaaagcugcc

SEQ ID NO: 1606404 - RNA, 21 nt, Human
cguucauggaacgcguugaaa

SEQ ID NO: 1606405 - RNA, 17 nt, Human
ccuucucuucacaguca

SEQ ID NO: 1606406 - RNA, 21 nt, Human
ccuucuguccuacucuguguc

SEQ ID NO: 1606407 - RNA, 20 nt, Human
ccuucuguccuacucugugu

SEQ ID NO: 1606408 - RNA, 22 nt, Human
ccuucuguccuacucuguguca

SEQ ID NO: 1606409 - RNA, 19 nt, Human
ccuucccccuccaauccca

SEQ ID NO: 1606410 - RNA, 18 nt, Human
ccuuccuaauuccacagc

SEQ ID NO: 1606411 - RNA, 20 nt, Human
ccuuccuaauuccacagcug

SEQ ID NO: 1606412 - RNA, 19 nt, Human
ccuuccuaauuccacagcu

SEQ ID NO: 1606413 - RNA, 16 nt, Human
ccuucucugaaggaca

SEQ ID NO: 1606414 - RNA, 14 nt, Human
ccuucucugaagga

SEQ ID NO: 1606415 - RNA, 23 nt, Human
ccuucucuccagccccuggaugc

SEQ ID NO: 1606416 - RNA, 21 nt, Human
ccuucucuccagccccuggau

SEQ ID NO: 1606417 - RNA, 20 nt, Human
ccuuccucuccacugccuuc

SEQ ID NO: 1606418 - RNA, 20 nt, Human
ccuucucuccagccccugga

SEQ ID NO: 1606419 - RNA, 17 nt, Human
ccuuccucuccacugcc

SEQ ID NO: 1606420 - RNA, 16 nt, Human
ccuuccucuccacugc

SEQ ID NO: 1606421 - RNA, 15 nt, Human
ccuuccucuccacug

SEQ ID NO: 1606422 - RNA, 14 nt, Human
ccuuccucuccacu

SEQ ID NO: 1606423 - RNA, 21 nt, Human
ccuuccuaauuccacagcugc

SEQ ID NO: 1606424 - RNA, 15 nt, Human
ccuuucaauaggaaa

SEQ ID NO: 1606425 - RNA, 14 nt, Human
ccuuuauucuggca

SEQ ID NO: 1606426 - RNA, 17 nt, Human
ccuuucaauaggaaaaa

SEQ ID NO: 1606427 - RNA, 18 nt, Human
ccuuucaauaggaaaaac

SEQ ID NO: 1606428 - RNA, 14 nt, Human
ccuugcauaauggu

SEQ ID NO: 1606429 - RNA, 19 nt, Human
ccuguucagcuccagcuca

SEQ ID NO: 1606430 - RNA, 16 nt, Human
ccuguucagcuccagc

SEQ ID NO: 1606431 - RNA, 15 nt, Human
ccuguucagcuccag

SEQ ID NO: 1606432 - RNA, 14 nt, Human
ccuguucagcucca

SEQ ID NO: 1606433 - RNA, 21 nt, Human
ccuguucagcuccagcucacc

SEQ ID NO: 1606434 - RNA, 20 nt, Human
ccuguucagcuccagcucac

SEQ ID NO: 1606435 - RNA, 23 nt, Human
ccuguucagcuccagcucaccag

SEQ ID NO: 1606436 - RNA, 17 nt, Human
ccuguucuggcagaguu

SEQ ID NO: 1606437 - RNA, 12 nt, Human
ccuguucuggca

SEQ ID NO: 1606438 - RNA, 16 nt, Human
ccuguucugcuuuccu

SEQ ID NO: 1606439 - RNA, 18 nt, Human
ccuguucccaugagauga

SEQ ID NO: 1606440 - RNA, 12 nt, Human
ccuguucccauu

SEQ ID NO: 1606441 - RNA, 20 nt, Human
ccuguugggccaggagccuc

SEQ ID NO: 1606442 - RNA, 19 nt, Human
ccuguugggccaggagccu

SEQ ID NO: 1606443 - RNA, 18 nt, Human
ccuguugggccaggagcc

SEQ ID NO: 1606444 - RNA, 17 nt, Human
ccuguugggccaggagc

SEQ ID NO: 1606445 - RNA, 16 nt, Human
ccuguugggccaggag

SEQ ID NO: 1606446 - RNA, 20 nt, Human
ccuuagcagggaaacagcua

SEQ ID NO: 1606447 - RNA, 19 nt, Human
ccuuagcagggaaacagcu

SEQ ID NO: 1606448 - RNA, 16 nt, Human
ccuuagcaaauucugu

SEQ ID NO: 1606449 - RNA, 12 nt, Human
ccuuauggaaca

SEQ ID NO: 1606450 - RNA, 18 nt, Human
ccuuaucaaaggacacca

SEQ ID NO: 1606451 - RNA, 14 nt, Human
ccuuaucaaaggac

SEQ ID NO: 1606452 - RNA, 20 nt, Human
ccuuaggugauccacucgcc

SEQ ID NO: 1606453 - RNA, 13 nt, Human
ccuuaucaaagga

SEQ ID NO: 1606454 - RNA, 18 nt, Human
ccuuauggaacacucuga

SEQ ID NO: 1606455 - RNA, 17 nt, Human
ccuuauggaacacucug

SEQ ID NO: 1606456 - RNA, 16 nt, Human
ccuuauggaacacucu

SEQ ID NO: 1606457 - RNA, 14 nt, Human
ccuuauggaacacu

SEQ ID NO: 1606458 - RNA, 20 nt, Human
ccuuauggaacacucugaga

SEQ ID NO: 1606459 - RNA, 19 nt, Human
ccuuauggaacacucugag

SEQ ID NO: 1606460 - RNA, 22 nt, Human
ccuuauggaacacucugagacu

SEQ ID NO: 1606461 - RNA, 19 nt, Human
ccuucccaccucucucacu

SEQ ID NO: 1606462 - RNA, 14 nt, Human
ccuucccaccucuc

SEQ ID NO: 1606463 - RNA, 12 nt, Human
ccuucccaccuc

SEQ ID NO: 1606464 - RNA, 15 nt, Human
ccuucccaugcccug

SEQ ID NO: 1606465 - RNA, 13 nt, Human
ccuguucagcucc

SEQ ID NO: 1606466 - RNA, 21 nt, Human
ccuguucacucuacuuagcau

SEQ ID NO: 1606467 - RNA, 18 nt, Human
cuauguucuaagaaguga

SEQ ID NO: 1606468 - RNA, 14 nt, Human
cuauguugcccagg

SEQ ID NO: 1606469 - RNA, 17 nt, Human
cuaugugagcacaaagg

SEQ ID NO: 1606470 - RNA, 22 nt, Human
cuauguugcccaggcaggucuu

SEQ ID NO: 1606471 - RNA, 21 nt, Human
cuauguugcccaggcaggucu

SEQ ID NO: 1606472 - RNA, 19 nt, Human
cuauguugcccaggcaggu

SEQ ID NO: 1606473 - RNA, 18 nt, Human
cuauguugcccaggcagg

SEQ ID NO: 1606474 - RNA, 18 nt, Human
cuaucucauuuccaagca

SEQ ID NO: 1606475 - RNA, 14 nt, Human
cuaucucccccagc

SEQ ID NO: 1606476 - RNA, 13 nt, Human
cuaucucccccag

SEQ ID NO: 1606477 - RNA, 14 nt, Human
cuaugugagaccau

SEQ ID NO: 1606478 - RNA, 18 nt, Human
cuaucaugucaaacguga

SEQ ID NO: 1606479 - RNA, 17 nt, Human
cuauccuacuuccccuu

SEQ ID NO: 1606480 - RNA, 23 nt, Human
cucaauuauuuugcauuuuuucu

SEQ ID NO: 1606481 - RNA, 16 nt, Human
cucaguccaugaagau

SEQ ID NO: 1606482 - RNA, 17 nt, Human
cucaguccauagcagag

SEQ ID NO: 1606483 - RNA, 15 nt, Human
cucaguccauagcag

SEQ ID NO: 1606484 - RNA, 14 nt, Human
cucagguugucuga

SEQ ID NO: 1606485 - RNA, 22 nt, Human
cucagucuggcccuuccuuuuc

SEQ ID NO: 1606486 - RNA, 23 nt, Human
cucaggugucccugcacuugcag

SEQ ID NO: 1606487 - RNA, 22 nt, Human
cucagguugucugaagucacug

SEQ ID NO: 1606488 - RNA, 22 nt, Human
cucagaagacacugaugggcaa

SEQ ID NO: 1606489 - RNA, 20 nt, Human
cucagaagacacugaugggc

SEQ ID NO: 1606490 - RNA, 17 nt, Human
cucagaagacacugaug

SEQ ID NO: 1606491 - RNA, 15 nt, Human
cucagaagacacuga

SEQ ID NO: 1606492 - RNA, 13 nt, Human
cucagaagacacu

SEQ ID NO: 1606493 - RNA, 17 nt, Human
cucaccuuucccaucuu

SEQ ID NO: 1606494 - RNA, 23 nt, Human
cucagaagacacugaugggcaac

SEQ ID NO: 1606495 - RNA, 23 nt, Human
cucagccucccgaauagcuggga

SEQ ID NO: 1606496 - RNA, 22 nt, Human
cucagccucccgaauagcuggg

SEQ ID NO: 1606497 - RNA, 21 nt, Human
cucagccucccgaauagcugg

SEQ ID NO: 1606498 - RNA, 19 nt, Human
cucagccucccgaauagcu

SEQ ID NO: 1606499 - RNA, 13 nt, Human
cucaggccugggg

SEQ ID NO: 1606500 - RNA, 20 nt, Human
cucaggccagcugcuugggc

SEQ ID NO: 1606501 - RNA, 18 nt, Human
cucaggccagcugcuugg

SEQ ID NO: 1606502 - RNA, 17 nt, Human
cucaggccagcugcuug

SEQ ID NO: 1606503 - RNA, 16 nt, Human
cucaggccagcugcuu

SEQ ID NO: 1606504 - RNA, 11 nt, Human
cucaggccugg

SEQ ID NO: 1606505 - RNA, 22 nt, Human
cucaggccugggggcugggcag

SEQ ID NO: 1606506 - RNA, 20 nt, Human
cucaggccaaacucaccugc

SEQ ID NO: 1606507 - RNA, 19 nt, Human
cucaggccaaacucaccug

SEQ ID NO: 1606508 - RNA, 21 nt, Human
cucaggccaaacucaccugcc

SEQ ID NO: 1606509 - RNA, 20 nt, Human
cucccuccaccucccugcaa

SEQ ID NO: 1606510 - RNA, 21 nt, Human
cucccuccaccucccugcaau

SEQ ID NO: 1606511 - RNA, 22 nt, Human
cucccuccaccucccugcaaua

SEQ ID NO: 1606512 - RNA, 19 nt, Human
cucccuccaccucccugca

SEQ ID NO: 1606513 - RNA, 15 nt, Human
cucccaggcauuccc

SEQ ID NO: 1606514 - RNA, 20 nt, Human
cucccucuuucccucccuuc

SEQ ID NO: 1606515 - RNA, 20 nt, Human
cucccugaaguaagcaaaga

SEQ ID NO: 1606516 - RNA, 22 nt, Human
cuccaggcuguaucccaugagc

SEQ ID NO: 1606517 - RNA, 20 nt, Human
cuccaggcuguaucccauga

SEQ ID NO: 1606518 - RNA, 23 nt, Human
cuccaggcuccuuuagcgcccag

SEQ ID NO: 1606519 - RNA, 23 nt, Human
cuccaggugcacaagcuccaagc

SEQ ID NO: 1606520 - RNA, 21 nt, Human
cucccacaggcccuuccucuc

SEQ ID NO: 1606521 - RNA, 20 nt, Human
cucccacaggcccuuccucu

SEQ ID NO: 1606522 - RNA, 16 nt, Human
cucccacaggcccuuc

SEQ ID NO: 1606523 - RNA, 14 nt, Human
cucccacaggcccu

SEQ ID NO: 1606524 - RNA, 15 nt, Human
cucccacaggcccuu

SEQ ID NO: 1606525 - RNA, 13 nt, Human
cuccuaccuggua

SEQ ID NO: 1606526 - RNA, 18 nt, Human
cuccugggcuaagugauc

SEQ ID NO: 1606527 - RNA, 19 nt, Human
cuccuggccucaagugauu

SEQ ID NO: 1606528 - RNA, 19 nt, Human
cuccuggcccacugcaucg

SEQ ID NO: 1606529 - RNA, 18 nt, Human
cuccucuugccacugccu

SEQ ID NO: 1606530 - RNA, 12 nt, Human
cuccucuugcca

SEQ ID NO: 1606531 - RNA, 16 nt, Human
cuccucuugccacugc

SEQ ID NO: 1606532 - RNA, 15 nt, Human
cuccucuugccacug

SEQ ID NO: 1606533 - RNA, 14 nt, Human
cuccucugcugcug

SEQ ID NO: 1606534 - RNA, 13 nt, Human
cuccucugcugcu

SEQ ID NO: 1606535 - RNA, 15 nt, Human
cuccucugcugcugg

SEQ ID NO: 1606536 - RNA, 15 nt, Human
cuccucuguccaggc

SEQ ID NO: 1606537 - RNA, 12 nt, Human
cuccucugucca

SEQ ID NO: 1606538 - RNA, 16 nt, Human
cuccuguaccucuuga

SEQ ID NO: 1606539 - RNA, 14 nt, Human
cuccuggggguucu

SEQ ID NO: 1606540 - RNA, 15 nt, Human
cuccuuucaccacau

SEQ ID NO: 1606541 - RNA, 17 nt, Human
cuccuuucacaaccuuc

SEQ ID NO: 1606542 - RNA, 16 nt, Human
cuccuuucacaaccuu

SEQ ID NO: 1606543 - RNA, 13 nt, Human
cuccuuucacaac

SEQ ID NO: 1606544 - RNA, 14 nt, Human
cuccuuguguuacu

SEQ ID NO: 1606545 - RNA, 13 nt, Human
cucucuggccuuc

SEQ ID NO: 1606546 - RNA, 16 nt, Human
cucuccuccagaguca

SEQ ID NO: 1606547 - RNA, 16 nt, Human
cucucuggccuucggc

SEQ ID NO: 1606548 - RNA, 14 nt, Human
cucucuggccuucg

SEQ ID NO: 1606549 - RNA, 15 nt, Human
cucuccuccagaguc

SEQ ID NO: 1606550 - RNA, 13 nt, Human
cucuccuccagag

SEQ ID NO: 1606551 - RNA, 19 nt, Human
cucuauguucuaagaagug

SEQ ID NO: 1606552 - RNA, 15 nt, Human
cucuccccaugaugu

SEQ ID NO: 1606553 - RNA, 16 nt, Human
cucuccccaugauguu

SEQ ID NO: 1606554 - RNA, 16 nt, Human
cucgguguggagaagc

SEQ ID NO: 1606555 - RNA, 23 nt, Human
cucgguguggagaagcggcuggc

SEQ ID NO: 1606556 - RNA, 17 nt, Human
cucgguguggagaagcg

SEQ ID NO: 1606557 - RNA, 23 nt, Human
cuccuuugugaggaagccgcugg

SEQ ID NO: 1606558 - RNA, 18 nt, Human
cuccuuugugaggaagcc

SEQ ID NO: 1606559 - RNA, 17 nt, Human
cuccuuugugaggaagc

SEQ ID NO: 1606560 - RNA, 20 nt, Human
cuccuuucacaaccuucugu

SEQ ID NO: 1606561 - RNA, 21 nt, Human
cucugcacaagcugcacccuc

SEQ ID NO: 1606562 - RNA, 20 nt, Human
cucugcacaagcugcacccu

SEQ ID NO: 1606563 - RNA, 16 nt, Human
cucugcacuccccugc

SEQ ID NO: 1606564 - RNA, 15 nt, Human
cucugcacuccccug

SEQ ID NO: 1606565 - RNA, 13 nt, Human
cucuguacagagc

SEQ ID NO: 1606566 - RNA, 15 nt, Human
cucuguacagagccc

SEQ ID NO: 1606567 - RNA, 14 nt, Human
cucuguacagagcc

SEQ ID NO: 1606568 - RNA, 15 nt, Human
cucugcugcuggcug

SEQ ID NO: 1606569 - RNA, 14 nt, Human
cucugcugcuggcu

SEQ ID NO: 1606570 - RNA, 16 nt, Human
cucugcugcuggcugg

SEQ ID NO: 1606571 - RNA, 16 nt, Human
cucuguacagagccca

SEQ ID NO: 1606572 - RNA, 13 nt, Human
cucuguccuggga

SEQ ID NO: 1606573 - RNA, 13 nt, Human
cucugcugcuggc

SEQ ID NO: 1606574 - RNA, 23 nt, Human
cucugcugacagacacaggcccg

SEQ ID NO: 1606575 - RNA, 22 nt, Human
cucugcugacagacacaggccc

SEQ ID NO: 1606576 - RNA, 21 nt, Human
cucugcugacagacacaggcc

SEQ ID NO: 1606577 - RNA, 18 nt, Human
cucugcacuccccugcug

SEQ ID NO: 1606578 - RNA, 17 nt, Human
cucugcacuccccugcu

SEQ ID NO: 1606579 - RNA, 21 nt, Human
cucugcuccucuccccagcaa

SEQ ID NO: 1606580 - RNA, 13 nt, Human
cucugcagguccc

SEQ ID NO: 1606581 - RNA, 14 nt, Human
aaauucaugcugcu

SEQ ID NO: 1606582 - RNA, 22 nt, Human
aaauuaacuuuuauaaacuuua

SEQ ID NO: 1606583 - RNA, 23 nt, Human
aaauuaacuuuuauaaacuuuac

SEQ ID NO: 1606584 - RNA, 21 nt, Human
aaauuaacuuuuauaaacuuu

SEQ ID NO: 1606585 - RNA, 20 nt, Human
aaauguuaaguugaugguga

SEQ ID NO: 1606586 - RNA, 22 nt, Human
guauuggcuagagguucaaaga

SEQ ID NO: 1606587 - RNA, 20 nt, Human
guauuuaauagguuuggaca

SEQ ID NO: 1606588 - RNA, 16 nt, Human
guauuuaauucauguu

SEQ ID NO: 1606589 - RNA, 12 nt, Human
aaauuucuaaau

SEQ ID NO: 1606590 - RNA, 22 nt, Human
aaauuuccugggagcuuuugua

SEQ ID NO: 1606591 - RNA, 14 nt, Human
guauuuuuuuacua

SEQ ID NO: 1606592 - RNA, 15 nt, Human
guauuuuuuuacuaa

SEQ ID NO: 1606593 - RNA, 17 nt, Human
aaauuucagcagcugca

SEQ ID NO: 1606594 - RNA, 18 nt, Human
aaauuucagcagcugcag

SEQ ID NO: 1606595 - RNA, 20 nt, Human
aaauuuaguauuuuguuuca

SEQ ID NO: 1606596 - RNA, 16 nt, Human
gucaaauugugugaaa

SEQ ID NO: 1606597 - RNA, 20 nt, Human
gucacacaguauuacuucug

SEQ ID NO: 1606598 - RNA, 16 nt, Human
gucacacacuuuggcu

SEQ ID NO: 1606599 - RNA, 19 nt, Human
gucaacucauauuuucaug

SEQ ID NO: 1606600 - RNA, 17 nt, Human
guauuuuuuuacuaaua

SEQ ID NO: 1606601 - RNA, 21 nt, Human
guauuuuuuuacuaauagaca

SEQ ID NO: 1606602 - RNA, 19 nt, Human
gucaaaguggugagaggca

SEQ ID NO: 1606603 - RNA, 22 nt, Human
aaauguaagggaaacugccagc

SEQ ID NO: 1606604 - RNA, 19 nt, Human
aaaugggggugcauuugag

SEQ ID NO: 1606605 - RNA, 17 nt, Human
aaaugggggugcauuug

SEQ ID NO: 1606606 - RNA, 18 nt, Human
aaaugggggugcauuuga

SEQ ID NO: 1606607 - RNA, 15 nt, Human
aaaugggggugcauu

SEQ ID NO: 1606608 - RNA, 16 nt, Human
aaaugggggugcauuu

SEQ ID NO: 1606609 - RNA, 17 nt, Human
guauaaaagccuguuua

SEQ ID NO: 1606610 - RNA, 22 nt, Human
guauauugauccagaaagaaaa

SEQ ID NO: 1606611 - RNA, 18 nt, Human
guauaaaagggacugaga

SEQ ID NO: 1606612 - RNA, 21 nt, Human
guauaaaagccuguuuaagag

SEQ ID NO: 1606613 - RNA, 18 nt, Human
guauaaaagccuguuuaa

SEQ ID NO: 1606614 - RNA, 14 nt, Human
guaugauucccagc

SEQ ID NO: 1606615 - RNA, 14 nt, Human
guaugggagagaag

SEQ ID NO: 1606616 - RNA, 15 nt, Human
guaucccuacuguaa

SEQ ID NO: 1606617 - RNA, 15 nt, Human
guauucuuauuuaau

SEQ ID NO: 1606618 - RNA, 21 nt, Human
guaugugugaagugagugagu

SEQ ID NO: 1606619 - RNA, 17 nt, Human
guaugugugaagugagu

SEQ ID NO: 1606620 - RNA, 13 nt, Human
guaugugugaagu

SEQ ID NO: 1606621 - RNA, 13 nt, Human
guaugguggcugg

SEQ ID NO: 1606622 - RNA, 15 nt, Human
guaugggagagaaga

SEQ ID NO: 1606623 - RNA, 16 nt, Human
guaugggacuggccuc

SEQ ID NO: 1606624 - RNA, 14 nt, Human
aaaugcauuucuaa

SEQ ID NO: 1606625 - RNA, 13 nt, Human
aaaugcccagccc

SEQ ID NO: 1606626 - RNA, 13 nt, Human
aaaugcccagcuu

SEQ ID NO: 1606627 - RNA, 18 nt, Human
aaaugcccagccccuucu

SEQ ID NO: 1606628 - RNA, 15 nt, Human
aaaugcccagccccu

SEQ ID NO: 1606629 - RNA, 14 nt, Human
aaaugcccagcccc

SEQ ID NO: 1606630 - RNA, 19 nt, Human
aaauggcuuccuggcaaua

SEQ ID NO: 1606631 - RNA, 23 nt, Human
aaaugccuuacccucauguucuu

SEQ ID NO: 1606632 - RNA, 20 nt, Human
aaaugggcagagcagagacc

SEQ ID NO: 1606633 - RNA, 18 nt, Human
aaaugggcagagcagaga

SEQ ID NO: 1606634 - RNA, 15 nt, Human
aaaugggcagagcag

SEQ ID NO: 1606635 - RNA, 14 nt, Human
aaaugcaccuggaa

SEQ ID NO: 1606636 - RNA, 18 nt, Human
aaaugcaccuggaauaua

SEQ ID NO: 1606637 - RNA, 22 nt, Human
aaaugcaccuggaauauauaac

SEQ ID NO: 1606638 - RNA, 13 nt, Human
aaaugcauguugc

SEQ ID NO: 1606639 - RNA, 22 nt, Human
aaaugaaagcagggacuugaac

SEQ ID NO: 1606640 - RNA, 21 nt, Human
aaaugaaagcagggacuugaa

SEQ ID NO: 1606641 - RNA, 11 nt, Human
aaaugagaaau

SEQ ID NO: 1606642 - RNA, 19 nt, Human
aaaugaggucagagccugc

SEQ ID NO: 1606643 - RNA, 17 nt, Human
aaaugaggucagagccu

SEQ ID NO: 1606644 - RNA, 23 nt, Human
aaaugagguacucuccuggaaau

SEQ ID NO: 1606645 - RNA, 16 nt, Human
aaaugagguacucucc

SEQ ID NO: 1606646 - RNA, 19 nt, Human
aaaugagccuggcaagaau

SEQ ID NO: 1606647 - RNA, 13 nt, Human
aaaugagccuggc

SEQ ID NO: 1606648 - RNA, 16 nt, Human
aaaugagaaaucuaaa

SEQ ID NO: 1606649 - RNA, 14 nt, Human
aaaugagaaaucua

SEQ ID NO: 1606650 - RNA, 13 nt, Human
aaaugagaaaucu

SEQ ID NO: 1606651 - RNA, 19 nt, Human
aaaucuacacuccagugag

SEQ ID NO: 1606652 - RNA, 17 nt, Human
aaaugaaaaucgugaca

SEQ ID NO: 1606653 - RNA, 11 nt, Human
aaaugaaaauu

SEQ ID NO: 1606654 - RNA, 15 nt, Human
aaaucucaaauuucu

SEQ ID NO: 1606655 - RNA, 16 nt, Human
aaaucucaaauuucua

SEQ ID NO: 1606656 - RNA, 17 nt, Human
aaaucucaaauuucuaa

SEQ ID NO: 1606657 - RNA, 19 nt, Human
aaaucucaaauuucuaaau

SEQ ID NO: 1606658 - RNA, 14 nt, Human
aaauccuugaagau

SEQ ID NO: 1606659 - RNA, 13 nt, Human
aaaucgaugcagu

SEQ ID NO: 1606660 - RNA, 18 nt, Human
aaaucccuuaccucggug

SEQ ID NO: 1606661 - RNA, 15 nt, Human
aaaucccauuuaaaa

SEQ ID NO: 1606662 - RNA, 22 nt, Human
aaaucccauuauucaaaguugc

SEQ ID NO: 1606663 - RNA, 21 nt, Human
aaaucccauuauucaaaguug

SEQ ID NO: 1606664 - RNA, 20 nt, Human
aaaucccauuauucaaaguu

SEQ ID NO: 1606665 - RNA, 19 nt, Human
aaaucccauuauucaaagu

SEQ ID NO: 1606666 - RNA, 17 nt, Human
aaaucccauuauucaaa

SEQ ID NO: 1606667 - RNA, 16 nt, Human
aaaucccauuauucaa

SEQ ID NO: 1606668 - RNA, 15 nt, Human
aaaucccauuauuca

SEQ ID NO: 1606669 - RNA, 13 nt, Human
aaaucccauuauu

SEQ ID NO: 1606670 - RNA, 23 nt, Human
aaauccauuuggaaaucuuuaaa

SEQ ID NO: 1606671 - RNA, 22 nt, Human
aaauccauuuggaaaucuuuaa

SEQ ID NO: 1606672 - RNA, 21 nt, Human
aaauccauuuggaaaucuuua

SEQ ID NO: 1606673 - RNA, 18 nt, Human
aaauccauuuggaaaucu

SEQ ID NO: 1606674 - RNA, 21 nt, Human
guagcugggacuacaggcacc

SEQ ID NO: 1606675 - RNA, 18 nt, Human
guagcugggauuacaggc

SEQ ID NO: 1606676 - RNA, 19 nt, Human
guagcugggacuacaggca

SEQ ID NO: 1606677 - RNA, 18 nt, Human
guagcugggacuacaggc

SEQ ID NO: 1606678 - RNA, 12 nt, Human
guagcugggacu

SEQ ID NO: 1606679 - RNA, 14 nt, Human
aaaggaugcacaga

SEQ ID NO: 1606680 - RNA, 17 nt, Human
aaaggagagcuagcagc

SEQ ID NO: 1606681 - RNA, 18 nt, Human
guaggaagguuaauguuc

SEQ ID NO: 1606682 - RNA, 15 nt, Human
guaggaagacuuugg

SEQ ID NO: 1606683 - RNA, 14 nt, Human
aaauccauuuggaa

SEQ ID NO: 1606684 - RNA, 16 nt, Human
aaauccauuuggaaau

SEQ ID NO: 1606685 - RNA, 15 nt, Human
aaauccauuuggaaa

SEQ ID NO: 1606686 - RNA, 20 nt, Human
aaccuagggugauauuaacc

SEQ ID NO: 1606687 - RNA, 15 nt, Human
aacccccagccugcu

SEQ ID NO: 1606688 - RNA, 14 nt, Human
aacccccagccugc

SEQ ID NO: 1606689 - RNA, 13 nt, Human
aacccccagccug

SEQ ID NO: 1606690 - RNA, 14 nt, Human
aaccuccugggcua

SEQ ID NO: 1606691 - RNA, 17 nt, Human
aaccuccgccucuuggg

SEQ ID NO: 1606692 - RNA, 18 nt, Human
aacccaaauguucaucaa

SEQ ID NO: 1606693 - RNA, 11 nt, Human
aacccagcucu

SEQ ID NO: 1606694 - RNA, 14 nt, Human
aacccagcucuggu

SEQ ID NO: 1606695 - RNA, 13 nt, Human
aacccagcucugg

SEQ ID NO: 1606696 - RNA, 13 nt, Human
aacccaaauguuc

SEQ ID NO: 1606697 - RNA, 21 nt, Human
aaccaugggauaaaugccauc

SEQ ID NO: 1606698 - RNA, 20 nt, Human
aacccauauuuguacaccaa

SEQ ID NO: 1606699 - RNA, 17 nt, Human
aacccagcucuggucca

SEQ ID NO: 1606700 - RNA, 12 nt, Human
aaccacagcagu

SEQ ID NO: 1606701 - RNA, 20 nt, Human
aaccaucauugaaaucuuuu

SEQ ID NO: 1606702 - RNA, 19 nt, Human
aaccaucauugaaaucuuu

SEQ ID NO: 1606703 - RNA, 22 nt, Human
aaccacaucuugcucugcugac

SEQ ID NO: 1606704 - RNA, 20 nt, Human
aaccacaucuugcucugcug

SEQ ID NO: 1606705 - RNA, 21 nt, Human
aaccaucauugaaaucuuuuu

SEQ ID NO: 1606706 - RNA, 23 nt, Human
aaccaucauugaaaucuuuuugc

SEQ ID NO: 1606707 - RNA, 20 nt, Human
aaccacauuggagauguuua

SEQ ID NO: 1606708 - RNA, 20 nt, Human
aaccaugggauaaaugccau

SEQ ID NO: 1606709 - RNA, 18 nt, Human
aaccaugggauaaaugcc

SEQ ID NO: 1606710 - RNA, 17 nt, Human
aaccaugggauaaaugc

SEQ ID NO: 1606711 - RNA, 15 nt, Human
aaccaugggauaaau

SEQ ID NO: 1606712 - RNA, 16 nt, Human
gucucccucccuuggg

SEQ ID NO: 1606713 - RNA, 21 nt, Human
gucuuaauuaaaagaauauuu

SEQ ID NO: 1606714 - RNA, 19 nt, Human
gucuuaauuaaaagaauau

SEQ ID NO: 1606715 - RNA, 22 nt, Human
gucuuaauuaaaagaauauuuu

SEQ ID NO: 1606716 - RNA, 15 nt, Human
gucuggcuucacaga

SEQ ID NO: 1606717 - RNA, 19 nt, Human
gucuuauauauuguagaua

SEQ ID NO: 1606718 - RNA, 15 nt, Human
gucuuagauguauau

SEQ ID NO: 1606719 - RNA, 15 nt, Human
gucuuuggacccuga

SEQ ID NO: 1606720 - RNA, 14 nt, Human
gucuuuggacccug

SEQ ID NO: 1606721 - RNA, 17 nt, Human
gucuuuggacccugagg

SEQ ID NO: 1606722 - RNA, 18 nt, Human
gucuuuggacccugaggc

SEQ ID NO: 1606723 - RNA, 19 nt, Human
gucuuuucuugcaugaggc

SEQ ID NO: 1606724 - RNA, 14 nt, Human
gucuuuucuugcau

SEQ ID NO: 1606725 - RNA, 24 nt, Human
gucuuuucuugcaugaggcuagug

SEQ ID NO: 1606726 - RNA, 14 nt, Human
aacucccuuucaac

SEQ ID NO: 1606727 - RNA, 13 nt, Human
aacucccuuucaa

SEQ ID NO: 1606728 - RNA, 18 nt, Human
aacucguuaauuuguagu

SEQ ID NO: 1606729 - RNA, 19 nt, Human
gugaaccaccacacccagc

SEQ ID NO: 1606730 - RNA, 15 nt, Human
gugaacacaucagcu

SEQ ID NO: 1606731 - RNA, 21 nt, Human
aacuccagaaagugacaagcu

SEQ ID NO: 1606732 - RNA, 19 nt, Human
aacucccugccccccagcc

SEQ ID NO: 1606733 - RNA, 13 nt, Human
aacucccugcccc

SEQ ID NO: 1606734 - RNA, 14 nt, Human
aacuccagaaagug

SEQ ID NO: 1606735 - RNA, 15 nt, Human
aacguggcugcuuca

SEQ ID NO: 1606736 - RNA, 20 nt, Human
aaccugcucuccucuugcca

SEQ ID NO: 1606737 - RNA, 11 nt, Human
aaccugcucuc

SEQ ID NO: 1606738 - RNA, 15 nt, Human
aaccugcucuccucu

SEQ ID NO: 1606739 - RNA, 19 nt, Human
aacguggcugcuucaagga

SEQ ID NO: 1606740 - RNA, 16 nt, Human
aacguggcugcuucaa

SEQ ID NO: 1606741 - RNA, 22 nt, Human
aacguggcugcuucaaggaucc

SEQ ID NO: 1606742 - RNA, 18 nt, Human
aacaagucagucauucag

SEQ ID NO: 1606743 - RNA, 15 nt, Human
aacaagucagucauu

SEQ ID NO: 1606744 - RNA, 23 nt, Human
aacaaggcaaggcugucaauuac

SEQ ID NO: 1606745 - RNA, 21 nt, Human
aacaagccuccuuuuaaagua

SEQ ID NO: 1606746 - RNA, 15 nt, Human
aacaaggaugaauua

SEQ ID NO: 1606747 - RNA, 15 nt, Human
aacaaggcaaggcug

SEQ ID NO: 1606748 - RNA, 16 nt, Human
aacaagaccacguuuc

SEQ ID NO: 1606749 - RNA, 17 nt, Human
aacaagaccacguuucu

SEQ ID NO: 1606750 - RNA, 19 nt, Human
aacaagaccacguuucuaa

SEQ ID NO: 1606751 - RNA, 20 nt, Human
aacaagaccacguuucuaaa

SEQ ID NO: 1606752 - RNA, 15 nt, Human
gucacaggcaggucc

SEQ ID NO: 1606753 - RNA, 13 nt, Human
gucacaggcaggu

SEQ ID NO: 1606754 - RNA, 16 nt, Human
gucacaggcaggucca

SEQ ID NO: 1606755 - RNA, 21 nt, Human
gucacacaguauuacuucugc

SEQ ID NO: 1606756 - RNA, 23 nt, Human
aaauuuuuaaucuuuaauuuuac

SEQ ID NO: 1606757 - RNA, 24 nt, Human
guccaagcauaccaacacgagcag

SEQ ID NO: 1606758 - RNA, 22 nt, Human
gucauuugagcagggcucagcg

SEQ ID NO: 1606759 - RNA, 21 nt, Human
aacacuguucucugcccucca

SEQ ID NO: 1606760 - RNA, 21 nt, Human
gucauuugagcagggcucagc

SEQ ID NO: 1606761 - RNA, 11 nt, Human
aacacuuccau

SEQ ID NO: 1606762 - RNA, 21 nt, Human
guccaagcauuuagauguaua

SEQ ID NO: 1606763 - RNA, 15 nt, Human
guccacaacacacag

SEQ ID NO: 1606764 - RNA, 11 nt, Human
aacacucugag

SEQ ID NO: 1606765 - RNA, 12 nt, Human
aacacuccuuca

SEQ ID NO: 1606766 - RNA, 21 nt, Human
aacacucauugaccugaggcc

SEQ ID NO: 1606767 - RNA, 13 nt, Human
aacacucugagac

SEQ ID NO: 1606768 - RNA, 12 nt, Human
aacacucugaga

SEQ ID NO: 1606769 - RNA, 14 nt, Human
aacacucugagacu

SEQ ID NO: 1606770 - RNA, 20 nt, Human
aacacuguucucugcccucc

SEQ ID NO: 1606771 - RNA, 15 nt, Human
aacacuguucucugc

SEQ ID NO: 1606772 - RNA, 18 nt, Human
aacauuugguaaggggaa

SEQ ID NO: 1606773 - RNA, 20 nt, Human
aacauuuguucuauagcuuu

SEQ ID NO: 1606774 - RNA, 15 nt, Human
aacauacucccaucu

SEQ ID NO: 1606775 - RNA, 14 nt, Human
aacauacucccauc

SEQ ID NO: 1606776 - RNA, 16 nt, Human
aacauacucccaucug

SEQ ID NO: 1606777 - RNA, 22 nt, Human
aacauuuguucuauagcuuuuc

SEQ ID NO: 1606778 - RNA, 22 nt, Human
aacaguagugauaguuguaccg

SEQ ID NO: 1606779 - RNA, 23 nt, Human
aacaggcugggcuucaguggcag

SEQ ID NO: 1606780 - RNA, 13 nt, Human
aacaggcugggcu

SEQ ID NO: 1606781 - RNA, 22 nt, Human
aacaggcugggcuucaguggca

SEQ ID NO: 1606782 - RNA, 20 nt, Human
aacagacuggaagcacagcu

SEQ ID NO: 1606783 - RNA, 19 nt, Human
aacagacuggaagcacagc

SEQ ID NO: 1606784 - RNA, 19 nt, Human
aacaguuguguuugaagca

SEQ ID NO: 1606785 - RNA, 21 nt, Human
guccggucccugucccagugc

SEQ ID NO: 1606786 - RNA, 15 nt, Human
gucccaacuuguaaa

SEQ ID NO: 1606787 - RNA, 10 nt, Human
aacagaaaug

SEQ ID NO: 1606788 - RNA, 11 nt, Human
aacagaaaugu

SEQ ID NO: 1606789 - RNA, 21 nt, Human
aacagaaauguacagcaagga

SEQ ID NO: 1606790 - RNA, 22 nt, Human
aagcuaggccuggccagaugca

SEQ ID NO: 1606791 - RNA, 18 nt, Human
aagcuaggccuggccaga

SEQ ID NO: 1606792 - RNA, 17 nt, Human
aagcuaggccuggccag

SEQ ID NO: 1606793 - RNA, 19 nt, Human
guucaggguuggccccugc

SEQ ID NO: 1606794 - RNA, 18 nt, Human
guucaggguuggccccug

SEQ ID NO: 1606795 - RNA, 17 nt, Human
guucaggguuggccccu

SEQ ID NO: 1606796 - RNA, 17 nt, Human
guucagcuccagcucac

SEQ ID NO: 1606797 - RNA, 16 nt, Human
guucagcuccagcuca

SEQ ID NO: 1606798 - RNA, 18 nt, Human
guucagcuccagcucacc

SEQ ID NO: 1606799 - RNA, 22 nt, Human
guuaaguugauggugaugaaau

SEQ ID NO: 1606800 - RNA, 18 nt, Human
guuaaugauagcuacugu

SEQ ID NO: 1606801 - RNA, 18 nt, Human
guguuuuaaaaugagaaa

SEQ ID NO: 1606802 - RNA, 16 nt, Human
guuaagccuuuggaaa

SEQ ID NO: 1606803 - RNA, 13 nt, Human
guuaagccuuugg

SEQ ID NO: 1606804 - RNA, 12 nt, Human
guuaagccuuug

SEQ ID NO: 1606805 - RNA, 20 nt, Human
guuaguaugaggcauuuguu

SEQ ID NO: 1606806 - RNA, 17 nt, Human
guuaguaugaggcauuu

SEQ ID NO: 1606807 - RNA, 12 nt, Human
guuagaucuagu

SEQ ID NO: 1606808 - RNA, 16 nt, Human
guucuacccaggugcu

SEQ ID NO: 1606809 - RNA, 22 nt, Human
guucccuuugacgccaucccag

SEQ ID NO: 1606810 - RNA, 21 nt, Human
guucccuuugacgccauccca

SEQ ID NO: 1606811 - RNA, 20 nt, Human
guucccuuugacgccauccc

SEQ ID NO: 1606812 - RNA, 13 nt, Human
guucucuccuucu

SEQ ID NO: 1606813 - RNA, 18 nt, Human
guugacaugggacauuug

SEQ ID NO: 1606814 - RNA, 14 nt, Human
guugacaugggaca

SEQ ID NO: 1606815 - RNA, 22 nt, Human
guugaugaucuuugcagacagg

SEQ ID NO: 1606816 - RNA, 21 nt, Human
guucuugguuuguaaauuaac

SEQ ID NO: 1606817 - RNA, 17 nt, Human
guucuuaguuugcaguu

SEQ ID NO: 1606818 - RNA, 13 nt, Human
guugacaugggac

SEQ ID NO: 1606819 - RNA, 20 nt, Human
guuccauggccucuucagau

SEQ ID NO: 1606820 - RNA, 20 nt, Human
guucccauuugcuccuuucu

SEQ ID NO: 1606821 - RNA, 16 nt, Human
guucccauuugcuccu

SEQ ID NO: 1606822 - RNA, 20 nt, Human
guucccuacuuccugugacu

SEQ ID NO: 1606823 - RNA, 21 nt, Human
aagcucuacugaggugcuaug

SEQ ID NO: 1606824 - RNA, 22 nt, Human
aagcuauucaguaauaacucua

SEQ ID NO: 1606825 - RNA, 17 nt, Human
aagcuaucguaaaauua

SEQ ID NO: 1606826 - RNA, 18 nt, Human
guuguaccgcaaugugac

SEQ ID NO: 1606827 - RNA, 18 nt, Human
guuggucccccuuccaug

SEQ ID NO: 1606828 - RNA, 13 nt, Human
guuggguggaugc

SEQ ID NO: 1606829 - RNA, 17 nt, Human
guugccuaaauccauuu

SEQ ID NO: 1606830 - RNA, 16 nt, Human
guuuaaaaucauuucu

SEQ ID NO: 1606831 - RNA, 10 nt, Human
guuuaaaauc

SEQ ID NO: 1606832 - RNA, 20 nt, Human
guuuaagacauuuuuggaag

SEQ ID NO: 1606833 - RNA, 23 nt, Human
aaggaugaucuaggaagacuuug

SEQ ID NO: 1606834 - RNA, 18 nt, Human
aaggaugaucuaggaaga

SEQ ID NO: 1606835 - RNA, 17 nt, Human
aaggauccugagccaga

SEQ ID NO: 1606836 - RNA, 15 nt, Human
aaggauccugagcca

SEQ ID NO: 1606837 - RNA, 14 nt, Human
aaggauccugagcc

SEQ ID NO: 1606838 - RNA, 23 nt, Human
guugaugaucuuugcagacaggc

SEQ ID NO: 1606839 - RNA, 21 nt, Human
guugaugccugugaacugaac

SEQ ID NO: 1606840 - RNA, 20 nt, Human
aaggauccugagccagauuu

SEQ ID NO: 1606841 - RNA, 22 nt, Human
aaggaugcacagaguuguuaca

SEQ ID NO: 1606842 - RNA, 18 nt, Human
aaggaugcacagaguugu

SEQ ID NO: 1606843 - RNA, 15 nt, Human
aaggaugcuuguaca

SEQ ID NO: 1606844 - RNA, 16 nt, Human
aaggaugcuuguacau

SEQ ID NO: 1606845 - RNA, 17 nt, Human
aaggaugcuuguacaua

SEQ ID NO: 1606846 - RNA, 19 nt, Human
aaggaugcuuguacauaau

SEQ ID NO: 1606847 - RNA, 19 nt, Human
aaggaugccccgucccccu

SEQ ID NO: 1606848 - RNA, 19 nt, Human
aaggcuaccuuuguauucu

SEQ ID NO: 1606849 - RNA, 18 nt, Human
aaggccaaaggaagcaca

SEQ ID NO: 1606850 - RNA, 19 nt, Human
guugcccaggcaggucuug

SEQ ID NO: 1606851 - RNA, 18 nt, Human
guugcccaggcaggucuu

SEQ ID NO: 1606852 - RNA, 17 nt, Human
guugcccaggcaggucu

SEQ ID NO: 1606853 - RNA, 14 nt, Human
aaggcuccaggagc

SEQ ID NO: 1606854 - RNA, 21 nt, Human
guugcccaggcuggcgugcag

SEQ ID NO: 1606855 - RNA, 14 nt, Human
guugccuaaaucca

SEQ ID NO: 1606856 - RNA, 16 nt, Human
guugccuaaauccauu

SEQ ID NO: 1606857 - RNA, 15 nt, Human
guugccuaaauccau

SEQ ID NO: 1606858 - RNA, 13 nt, Human
aagguacuucaaa

SEQ ID NO: 1606859 - RNA, 16 nt, Human
aaggguaucaggugcu

SEQ ID NO: 1606860 - RNA, 17 nt, Human
aaggguaucaggugcug

SEQ ID NO: 1606861 - RNA, 15 nt, Human
aaguaauaugcacac

SEQ ID NO: 1606862 - RNA, 16 nt, Human
aaguaauaugcacaca

SEQ ID NO: 1606863 - RNA, 19 nt, Human
guuucuaaaggcuaccuuu

SEQ ID NO: 1606864 - RNA, 12 nt, Human
aaguaauaugca

SEQ ID NO: 1606865 - RNA, 22 nt, Human
aaguaaaaacaaagaaauuaug

SEQ ID NO: 1606866 - RNA, 20 nt, Human
aaguaaaaacaaagaaauua

SEQ ID NO: 1606867 - RNA, 13 nt, Human
aaguaaaaacaaa

SEQ ID NO: 1606868 - RNA, 21 nt, Human
guuucaaacauauauaacaau

SEQ ID NO: 1606869 - RNA, 23 nt, Human
aaggggaauguuugccucugccu

SEQ ID NO: 1606870 - RNA, 22 nt, Human
aaggggaauguuugccucugcc

SEQ ID NO: 1606871 - RNA, 17 nt, Human
aagggccuggccugagc

SEQ ID NO: 1606872 - RNA, 14 nt, Human
aagggccuggccug

SEQ ID NO: 1606873 - RNA, 19 nt, Human
aagggccuggccugagcug

SEQ ID NO: 1606874 - RNA, 23 nt, Human
guuuucugagaaagacuauucaa

SEQ ID NO: 1606875 - RNA, 11 nt, Human
guuuucuguuc

SEQ ID NO: 1606876 - RNA, 12 nt, Human
guuuucuguucu

SEQ ID NO: 1606877 - RNA, 20 nt, Human
guuuucuuaaccagaucauu

SEQ ID NO: 1606878 - RNA, 15 nt, Human
guuuuacugcagcuu

SEQ ID NO: 1606879 - RNA, 18 nt, Human
guuuggggaugagaaagg

SEQ ID NO: 1606880 - RNA, 20 nt, Human
guuugggccccagaggcugg

SEQ ID NO: 1606881 - RNA, 23 nt, Human
guuuuacaauaaaaucuugaaaa

SEQ ID NO: 1606882 - RNA, 22 nt, Human
guuugauucagacagcugccug

SEQ ID NO: 1606883 - RNA, 22 nt, Human
guuucuaaaggcuaccuuugua

SEQ ID NO: 1606884 - RNA, 23 nt, Human
guuucuaaaggcuaccuuuguau

SEQ ID NO: 1606885 - RNA, 20 nt, Human
guuucuguacuuuuuggcau

SEQ ID NO: 1606886 - RNA, 16 nt, Human
guuugccucugccucu

SEQ ID NO: 1606887 - RNA, 13 nt, Human
guuugccucugcc

SEQ ID NO: 1606888 - RNA, 23 nt, Human
guguuuccuggcacugcuuccag

SEQ ID NO: 1606889 - RNA, 19 nt, Human
guguuguacucaauuuuaa

SEQ ID NO: 1606890 - RNA, 18 nt, Human
guguguaugcgugugugu

SEQ ID NO: 1606891 - RNA, 17 nt, Human
gugugacuacuccccca

SEQ ID NO: 1606892 - RNA, 18 nt, Human
gugucuuuuuucacuaca

SEQ ID NO: 1606893 - RNA, 17 nt, Human
gugugaaaaugugugug

SEQ ID NO: 1606894 - RNA, 18 nt, Human
gugucuugcaauggcagc

SEQ ID NO: 1606895 - RNA, 17 nt, Human
gugucuugcaauggcag

SEQ ID NO: 1606896 - RNA, 18 nt, Human
aagaugugacauguuuua

SEQ ID NO: 1606897 - RNA, 14 nt, Human
aagaugugacaugu

SEQ ID NO: 1606898 - RNA, 22 nt, Human
aagcaaagacuuuccucuuagu

SEQ ID NO: 1606899 - RNA, 13 nt, Human
aagcaaaggagau

SEQ ID NO: 1606900 - RNA, 12 nt, Human
aagcaaaggaga

SEQ ID NO: 1606901 - RNA, 12 nt, Human
aagaugcagccg

SEQ ID NO: 1606902 - RNA, 20 nt, Human
guggugguuuucuguucuuu

SEQ ID NO: 1606903 - RNA, 17 nt, Human
gugguuuucuguucuuu

SEQ ID NO: 1606904 - RNA, 18 nt, Human
aagagguuuuaaaaaaau

SEQ ID NO: 1606905 - RNA, 18 nt, Human
aagagguuuuaaagcuuc

SEQ ID NO: 1606906 - RNA, 14 nt, Human
aagagguuuuaaag

SEQ ID NO: 1606907 - RNA, 13 nt, Human
aagacuauucaaa

SEQ ID NO: 1606908 - RNA, 18 nt, Human
aagacuaucuaaauguug

SEQ ID NO: 1606909 - RNA, 17 nt, Human
aagacugaguacguugu

SEQ ID NO: 1606910 - RNA, 17 nt, Human
aagacuguacaaaguag

SEQ ID NO: 1606911 - RNA, 21 nt, Human
aagacugaguacguugugcau

SEQ ID NO: 1606912 - RNA, 22 nt, Human
aagacugaguacguugugcauu

SEQ ID NO: 1606913 - RNA, 17 nt, Human
aagacuaucuaaauguu

SEQ ID NO: 1606914 - RNA, 16 nt, Human
aagacuaucuaaaugu

SEQ ID NO: 1606915 - RNA, 21 nt, Human
aagacccuuguggucccaccc

SEQ ID NO: 1606916 - RNA, 18 nt, Human
aagacccuugugguccca

SEQ ID NO: 1606917 - RNA, 22 nt, Human
aagacccuuguggucccacccc

SEQ ID NO: 1606918 - RNA, 19 nt, Human
guggcccgacagccuggca

SEQ ID NO: 1606919 - RNA, 18 nt, Human
guggcccgacagccuggc

SEQ ID NO: 1606920 - RNA, 16 nt, Human
aagagcuuaacagugu

SEQ ID NO: 1606921 - RNA, 14 nt, Human
guggguagacacac

SEQ ID NO: 1606922 - RNA, 16 nt, Human
gugguuucagaaaugu

SEQ ID NO: 1606923 - RNA, 14 nt, Human
guggugguuuucug

SEQ ID NO: 1606924 - RNA, 14 nt, Human
guggguacgggagg

SEQ ID NO: 1606925 - RNA, 20 nt, Human
gugggggaucacagccucug

SEQ ID NO: 1606926 - RNA, 21 nt, Human
gugggacagucaccucaugga

SEQ ID NO: 1606927 - RNA, 22 nt, Human
gugggacacccugugauggggc

SEQ ID NO: 1606928 - RNA, 23 nt, Human
guggcgcagcauauucaggaagc

SEQ ID NO: 1606929 - RNA, 13 nt, Human
gugggauccucca

SEQ ID NO: 1606930 - RNA, 14 nt, Human
gugggagugggccc

SEQ ID NO: 1606931 - RNA, 13 nt, Human
gugggagugggcc

SEQ ID NO: 1606932 - RNA, 13 nt, Human
aagaaagaaaauc

SEQ ID NO: 1606933 - RNA, 22 nt, Human
aagaaagacuaucuaaauguug

SEQ ID NO: 1606934 - RNA, 20 nt, Human
aagaaagacuaucuaaaugu

SEQ ID NO: 1606935 - RNA, 13 nt, Human
aagaaauauaccu

SEQ ID NO: 1606936 - RNA, 15 nt, Human
aagaaaaaggaugca

SEQ ID NO: 1606937 - RNA, 17 nt, Human
aagaaaaaggaugcaca

SEQ ID NO: 1606938 - RNA, 18 nt, Human
aagaaaaaggaugcacag

SEQ ID NO: 1606939 - RNA, 22 nt, Human
aagaagugaaaaucuacacucc

SEQ ID NO: 1606940 - RNA, 16 nt, Human
aagaagugaaaaucua

SEQ ID NO: 1606941 - RNA, 18 nt, Human
gugcuaguaauuggaaag

SEQ ID NO: 1606942 - RNA, 21 nt, Human
gugcuaucucccccagcccca

SEQ ID NO: 1606943 - RNA, 22 nt, Human
gugcuaggaacacuccuucaca

SEQ ID NO: 1606944 - RNA, 18 nt, Human
gugcuaggaacacuccuu

SEQ ID NO: 1606945 - RNA, 21 nt, Human
gugaaccaccacacccagccc

SEQ ID NO: 1606946 - RNA, 15 nt, Human
gugccucaagagaag

SEQ ID NO: 1606947 - RNA, 23 nt, Human
gugccuuauggaacacucugaga

SEQ ID NO: 1606948 - RNA, 21 nt, Human
gugccuuauggaacacucuga

SEQ ID NO: 1606949 - RNA, 14 nt, Human
gugccuuauggaac

SEQ ID NO: 1606950 - RNA, 14 nt, Human
gugccucugggacu

SEQ ID NO: 1606951 - RNA, 15 nt, Human
gugccucugccuguc

SEQ ID NO: 1606952 - RNA, 13 nt, Human
gugccucugggac

SEQ ID NO: 1606953 - RNA, 12 nt, Human
gugccucuggga

SEQ ID NO: 1606954 - RNA, 13 nt, Human
gugccucugccug

SEQ ID NO: 1606955 - RNA, 13 nt, Human
aacuuuaccuuuu

SEQ ID NO: 1606956 - RNA, 18 nt, Human
aacuugucuuuggacccu

SEQ ID NO: 1606957 - RNA, 22 nt, Human
aacuugucuuuggacccugagg

SEQ ID NO: 1606958 - RNA, 16 nt, Human
aacuuguauuaugugu

SEQ ID NO: 1606959 - RNA, 15 nt, Human
aacuuguauuaugug

SEQ ID NO: 1606960 - RNA, 12 nt, Human
aacuugggaacu

SEQ ID NO: 1606961 - RNA, 18 nt, Human
aagaaugauuaugaauua

SEQ ID NO: 1606962 - RNA, 16 nt, Human
aagaauugaagcagga

SEQ ID NO: 1606963 - RNA, 22 nt, Human
aagaaugguccgugcuaaggac

SEQ ID NO: 1606964 - RNA, 19 nt, Human
aagaaugguccgugcuaag

SEQ ID NO: 1606965 - RNA, 23 nt, Human
aagacaaaaagcuacuuauugua

SEQ ID NO: 1606966 - RNA, 20 nt, Human
aagacaaaaagcuacuuauu

SEQ ID NO: 1606967 - RNA, 16 nt, Human
aagaaugauuaugaau

SEQ ID NO: 1606968 - RNA, 16 nt, Human
guggcagcucaccucu

SEQ ID NO: 1606969 - RNA, 14 nt, Human
guggcagcucaccu

SEQ ID NO: 1606970 - RNA, 20 nt, Human
guggcagcucaccucucccu

SEQ ID NO: 1606971 - RNA, 19 nt, Human
guggcaccagcagccugga

SEQ ID NO: 1606972 - RNA, 20 nt, Human
guggauuuaacagaaaugua

SEQ ID NO: 1606973 - RNA, 18 nt, Human
guggauuuaacagaaaug

SEQ ID NO: 1606974 - RNA, 19 nt, Human
guggauuuaacagaaaugu

SEQ ID NO: 1606975 - RNA, 21 nt, Human
guggaugccugguggcagcug

SEQ ID NO: 1606976 - RNA, 21 nt, Human
guggauggaaggggcugacag

SEQ ID NO: 1606977 - RNA, 22 nt, Human
guggacacagcucuucuccagg

SEQ ID NO: 1606978 - RNA, 18 nt, Human
guggacacagcucuucuc

SEQ ID NO: 1606979 - RNA, 23 nt, Human
guggacacagcucuucuccaggc

SEQ ID NO: 1606980 - RNA, 20 nt, Human
gugcugggauuacaggugug

SEQ ID NO: 1606981 - RNA, 20 nt, Human
gugcugggauuacaggcgug

SEQ ID NO: 1606982 - RNA, 22 nt, Human
gugcugggauuacaagcgugag

SEQ ID NO: 1606983 - RNA, 21 nt, Human
gugcugggauuacaagcguga

SEQ ID NO: 1606984 - RNA, 22 nt, Human
gugcuaucucccccagccccau

SEQ ID NO: 1606985 - RNA, 12 nt, Human
gugcuauguucu

SEQ ID NO: 1606986 - RNA, 16 nt, Human
gugcucaggagcccug

SEQ ID NO: 1606987 - RNA, 15 nt, Human
gugcucaggagcccu

SEQ ID NO: 1606988 - RNA, 16 nt, Human
aauggacguguuauga

SEQ ID NO: 1606989 - RNA, 24 nt, Human
aaugcccagccccuucugacccau

SEQ ID NO: 1606990 - RNA, 23 nt, Human
aaugcccagccccuucugaccca

SEQ ID NO: 1606991 - RNA, 22 nt, Human
aaugcccagccccuucugaccc

SEQ ID NO: 1606992 - RNA, 20 nt, Human
aaugcccagccccuucugac

SEQ ID NO: 1606993 - RNA, 20 nt, Human
aaugcugugcccuaaagugu

SEQ ID NO: 1606994 - RNA, 21 nt, Human
aaugcugugcccuaaagugua

SEQ ID NO: 1606995 - RNA, 13 nt, Human
aaugcugugcccu

SEQ ID NO: 1606996 - RNA, 21 nt, Human
aaugccccugaauuuaaauag

SEQ ID NO: 1606997 - RNA, 15 nt, Human
aaugcccagccccuu

SEQ ID NO: 1606998 - RNA, 14 nt, Human
aaugcccagccccu

SEQ ID NO: 1606999 - RNA, 16 nt, Human
aaugcauaaaauguua

SEQ ID NO: 1607000 - RNA, 14 nt, Human
uacaaggacagccc

SEQ ID NO: 1607001 - RNA, 13 nt, Human
aaugcauaaaaug

SEQ ID NO: 1607002 - RNA, 13 nt, Human
uaauuccacagcu

SEQ ID NO: 1607003 - RNA, 17 nt, Human
uaauuccacagcugcuc

SEQ ID NO: 1607004 - RNA, 14 nt, Human
uaauuccacagcug

SEQ ID NO: 1607005 - RNA, 16 nt, Human
uacaaaaacacagcaa

SEQ ID NO: 1607006 - RNA, 15 nt, Human
uacaaaaacacagca

SEQ ID NO: 1607007 - RNA, 20 nt, Human
uacaaaaagcauaaaaauua

SEQ ID NO: 1607008 - RNA, 15 nt, Human
uacaaaagcauguga

SEQ ID NO: 1607009 - RNA, 14 nt, Human
uacaaaaacacagc

SEQ ID NO: 1607010 - RNA, 13 nt, Human
uacaaaaacacag

SEQ ID NO: 1607011 - RNA, 12 nt, Human
aauguacugcau

SEQ ID NO: 1607012 - RNA, 22 nt, Human
uacauauaagugauugcugguu

SEQ ID NO: 1607013 - RNA, 19 nt, Human
uacauauaagugauugcug

SEQ ID NO: 1607014 - RNA, 15 nt, Human
uacaguaucucaggg

SEQ ID NO: 1607015 - RNA, 17 nt, Human
uacauaaugcgugcaua

SEQ ID NO: 1607016 - RNA, 23 nt, Human
uacaguauaauuaacauguuaaa

SEQ ID NO: 1607017 - RNA, 19 nt, Human
uacaguauaauuaacaugu

SEQ ID NO: 1607018 - RNA, 18 nt, Human
uacaguauaauuaacaug

SEQ ID NO: 1607019 - RNA, 19 nt, Human
uacauaaugcgugcauacc

SEQ ID NO: 1607020 - RNA, 20 nt, Human
uacauaaugcgugcauacca

SEQ ID NO: 1607021 - RNA, 21 nt, Human
uacauaaugcgugcauaccac

SEQ ID NO: 1607022 - RNA, 11 nt, Human
aaugugauaug

SEQ ID NO: 1607023 - RNA, 14 nt, Human
aauguggcuccugg

SEQ ID NO: 1607024 - RNA, 14 nt, Human
aauguauguguaag

SEQ ID NO: 1607025 - RNA, 12 nt, Human
aauguaugugua

SEQ ID NO: 1607026 - RNA, 18 nt, Human
aauguacugcauaugaaa

SEQ ID NO: 1607027 - RNA, 14 nt, Human
aauguacugcauau

SEQ ID NO: 1607028 - RNA, 19 nt, Human
aauggacuuuuguacauag

SEQ ID NO: 1607029 - RNA, 21 nt, Human
aauggacguguuaugacucca

SEQ ID NO: 1607030 - RNA, 20 nt, Human
aauggacuguggugacuuug

SEQ ID NO: 1607031 - RNA, 19 nt, Human
uacaccacuacauucuguu

SEQ ID NO: 1607032 - RNA, 20 nt, Human
uacaccacuacauucuguua

SEQ ID NO: 1607033 - RNA, 15 nt, Human
uacaccacuacauuc

SEQ ID NO: 1607034 - RNA, 16 nt, Human
uacaccacuacauucu

SEQ ID NO: 1607035 - RNA, 17 nt, Human
uacaccacuacauucug

SEQ ID NO: 1607036 - RNA, 18 nt, Human
uacaccacuacauucugu

SEQ ID NO: 1607037 - RNA, 14 nt, Human
uacacuccagugag

SEQ ID NO: 1607038 - RNA, 19 nt, Human
uacacuaagagagaaugag

SEQ ID NO: 1607039 - RNA, 14 nt, Human
uacaccauuaugug

SEQ ID NO: 1607040 - RNA, 18 nt, Human
uacagaggccaugggccu

SEQ ID NO: 1607041 - RNA, 22 nt, Human
uacaggcgugagccaccgugcc

SEQ ID NO: 1607042 - RNA, 15 nt, Human
uacaggcuccugcca

SEQ ID NO: 1607043 - RNA, 14 nt, Human
uacaggcuccugcc

SEQ ID NO: 1607044 - RNA, 17 nt, Human
uacaggcuccugccacc

SEQ ID NO: 1607045 - RNA, 14 nt, Human
uacaguauaauuaa

SEQ ID NO: 1607046 - RNA, 17 nt, Human
uacaguauaauuaacau

SEQ ID NO: 1607047 - RNA, 16 nt, Human
uacaguauaauuaaca

SEQ ID NO: 1607048 - RNA, 16 nt, Human
uaaugauaacuggaaa

SEQ ID NO: 1607049 - RNA, 13 nt, Human
uaaugaggaaacu

SEQ ID NO: 1607050 - RNA, 20 nt, Human
aaucuuuaaaaaaaaaauug

SEQ ID NO: 1607051 - RNA, 19 nt, Human
aaucuuuaaaaaaaaaauu

SEQ ID NO: 1607052 - RNA, 21 nt, Human
aaugagagacacacugaagaa

SEQ ID NO: 1607053 - RNA, 15 nt, Human
aaugagccuggcaag

SEQ ID NO: 1607054 - RNA, 18 nt, Human
aaugacuuacuguacaug

SEQ ID NO: 1607055 - RNA, 14 nt, Human
aaugacuuacugua

SEQ ID NO: 1607056 - RNA, 17 nt, Human
aaugacuuacuguacau

SEQ ID NO: 1607057 - RNA, 15 nt, Human
aaugaaaaccacauu

SEQ ID NO: 1607058 - RNA, 14 nt, Human
uaauagguuuggac

SEQ ID NO: 1607059 - RNA, 19 nt, Human
uaauagguuuggacaaaau

SEQ ID NO: 1607060 - RNA, 20 nt, Human
aaucuucugaacuuggcgcu

SEQ ID NO: 1607061 - RNA, 13 nt, Human
aaucuucugaacu

SEQ ID NO: 1607062 - RNA, 23 nt, Human
uaaugaaagacuguacaaaguag

SEQ ID NO: 1607063 - RNA, 22 nt, Human
uaaugaaagacuguacaaagua

SEQ ID NO: 1607064 - RNA, 21 nt, Human
uaaugacuuaagcacacuuga

SEQ ID NO: 1607065 - RNA, 15 nt, Human
uaaugacuuaagcac

SEQ ID NO: 1607066 - RNA, 19 nt, Human
uaaugaaagacuguacaaa

SEQ ID NO: 1607067 - RNA, 18 nt, Human
uaaugaaagacuguacaa

SEQ ID NO: 1607068 - RNA, 17 nt, Human
uaaugaaagacuguaca

SEQ ID NO: 1607069 - RNA, 14 nt, Human
uaaugaaagacugu

SEQ ID NO: 1607070 - RNA, 12 nt, Human
aaucagcauucu

SEQ ID NO: 1607071 - RNA, 17 nt, Human
aaucagacuaugaaguu

SEQ ID NO: 1607072 - RNA, 14 nt, Human
aaucagacuaugaa

SEQ ID NO: 1607073 - RNA, 18 nt, Human
uaaguuuuuuuuuaaaaa

SEQ ID NO: 1607074 - RNA, 20 nt, Human
uaaguuuuuauggcuuuugu

SEQ ID NO: 1607075 - RNA, 23 nt, Human
aaucaugaauuaguuuuauaugc

SEQ ID NO: 1607076 - RNA, 17 nt, Human
aaucaugaauuaguuuu

SEQ ID NO: 1607077 - RNA, 19 nt, Human
aaucaugaauuaguuuuau

SEQ ID NO: 1607078 - RNA, 17 nt, Human
aaucauggugcucagag

SEQ ID NO: 1607079 - RNA, 15 nt, Human
aaucaucaagucuuu

SEQ ID NO: 1607080 - RNA, 14 nt, Human
aaucuuauaauuua

SEQ ID NO: 1607081 - RNA, 16 nt, Human
aaucuuauaauuuaaa

SEQ ID NO: 1607082 - RNA, 19 nt, Human
aaucugugaacuugaaauu

SEQ ID NO: 1607083 - RNA, 18 nt, Human
aaucugugaacuugaaau

SEQ ID NO: 1607084 - RNA, 17 nt, Human
aaucugugaacuugaaa

SEQ ID NO: 1607085 - RNA, 15 nt, Human
aaucugugaacuuga

SEQ ID NO: 1607086 - RNA, 13 nt, Human
aaucugugaacuu

SEQ ID NO: 1607087 - RNA, 15 nt, Human
aaucucaaauuucua

SEQ ID NO: 1607088 - RNA, 14 nt, Human
aaucucaaauuucu

SEQ ID NO: 1607089 - RNA, 15 nt, Human
aaucucaaauaacua

SEQ ID NO: 1607090 - RNA, 12 nt, Human
aaucucaaauuu

SEQ ID NO: 1607091 - RNA, 13 nt, Human
aauccuugaagau

SEQ ID NO: 1607092 - RNA, 18 nt, Human
aaucuaaauggaaccacu

SEQ ID NO: 1607093 - RNA, 13 nt, Human
aaucuaaauggaa

SEQ ID NO: 1607094 - RNA, 15 nt, Human
aaucuaaauggaacc

SEQ ID NO: 1607095 - RNA, 20 nt, Human
aauccucaguuuuugugaaa

SEQ ID NO: 1607096 - RNA, 18 nt, Human
aauagacaauuuauuaug

SEQ ID NO: 1607097 - RNA, 23 nt, Human
aauagacaauuuauuauggcaca

SEQ ID NO: 1607098 - RNA, 18 nt, Human
aauagacccacaagaggc

SEQ ID NO: 1607099 - RNA, 14 nt, Human
aauagcugggacua

SEQ ID NO: 1607100 - RNA, 13 nt, Human
aauagcugggacu

SEQ ID NO: 1607101 - RNA, 20 nt, Human
aauagccugccucuucucua

SEQ ID NO: 1607102 - RNA, 16 nt, Human
aauagaugcugacugu

SEQ ID NO: 1607103 - RNA, 18 nt, Human
aauaggcguaacuaauuu

SEQ ID NO: 1607104 - RNA, 16 nt, Human
aauaggaaaaacugau

SEQ ID NO: 1607105 - RNA, 15 nt, Human
aauaggaaaaacuga

SEQ ID NO: 1607106 - RNA, 18 nt, Human
aauaggaaaaacugauuu

SEQ ID NO: 1607107 - RNA, 17 nt, Human
aauaggaaaaacugauu

SEQ ID NO: 1607108 - RNA, 19 nt, Human
aauaggaaaaacugauuuu

SEQ ID NO: 1607109 - RNA, 24 nt, Human
aauagcuuuuuucucugauacaga

SEQ ID NO: 1607110 - RNA, 12 nt, Human
aauaucacuugu

SEQ ID NO: 1607111 - RNA, 15 nt, Human
aauaucacuugucaa

SEQ ID NO: 1607112 - RNA, 14 nt, Human
uaacauggaaguac

SEQ ID NO: 1607113 - RNA, 14 nt, Human
uaacaugauuuggg

SEQ ID NO: 1607114 - RNA, 15 nt, Human
uaacauaaaucugug

SEQ ID NO: 1607115 - RNA, 20 nt, Human
uaacauaaaucugugaacuu

SEQ ID NO: 1607116 - RNA, 18 nt, Human
uaacauaaaucugugaac

SEQ ID NO: 1607117 - RNA, 17 nt, Human
uaacauaaaucugugaa

SEQ ID NO: 1607118 - RNA, 16 nt, Human
uaacauaaaucuguga

SEQ ID NO: 1607119 - RNA, 15 nt, Human
uaacuaaaagguaug

SEQ ID NO: 1607120 - RNA, 16 nt, Human
uaacauggaaguacua

SEQ ID NO: 1607121 - RNA, 15 nt, Human
uaacauggaaguacu

SEQ ID NO: 1607122 - RNA, 16 nt, Human
uaaccucuaaauucuu

SEQ ID NO: 1607123 - RNA, 15 nt, Human
aauauuucagauaau

SEQ ID NO: 1607124 - RNA, 18 nt, Human
aauauuuuaugauccagc

SEQ ID NO: 1607125 - RNA, 17 nt, Human
aauauuuuaugauccag

SEQ ID NO: 1607126 - RNA, 24 nt, Human
aauaugcaaagcacugacuucuaa

SEQ ID NO: 1607127 - RNA, 15 nt, Human
aauaugcacacauuu

SEQ ID NO: 1607128 - RNA, 18 nt, Human
aauauugauaugcuuaua

SEQ ID NO: 1607129 - RNA, 17 nt, Human
aauaugcaaagcacuga

SEQ ID NO: 1607130 - RNA, 15 nt, Human
aauaugcaaagcacu

SEQ ID NO: 1607131 - RNA, 22 nt, Human
aauauugcugauggugcaauga

SEQ ID NO: 1607132 - RNA, 21 nt, Human
aauauugcugauggugcaaug

SEQ ID NO: 1607133 - RNA, 18 nt, Human
aauauugcugauggugca

SEQ ID NO: 1607134 - RNA, 15 nt, Human
aauauugcugauggu

SEQ ID NO: 1607135 - RNA, 13 nt, Human
aauauugcugaug

SEQ ID NO: 1607136 - RNA, 12 nt, Human
aauauugcugau

SEQ ID NO: 1607137 - RNA, 11 nt, Human
aauauugcuga

SEQ ID NO: 1607138 - RNA, 19 nt, Human
aauaucuuuuuuuuaauaa

SEQ ID NO: 1607139 - RNA, 20 nt, Human
aauaucugaaaauguaugug

SEQ ID NO: 1607140 - RNA, 19 nt, Human
aauaucugaaaauguaugu

SEQ ID NO: 1607141 - RNA, 18 nt, Human
aauaucugaaaauguaug

SEQ ID NO: 1607142 - RNA, 17 nt, Human
aauaucugaaaauguau

SEQ ID NO: 1607143 - RNA, 16 nt, Human
aauaucugaaaaugua

SEQ ID NO: 1607144 - RNA, 21 nt, Human
aauaucuccgucaacucauau

SEQ ID NO: 1607145 - RNA, 16 nt, Human
aauaucuccgucaacu

SEQ ID NO: 1607146 - RNA, 15 nt, Human
uaacuuuuauaaacu

SEQ ID NO: 1607147 - RNA, 17 nt, Human
uaacuuuuauaaacuuu

SEQ ID NO: 1607148 - RNA, 18 nt, Human
uaacuuuuauaaacuuua

SEQ ID NO: 1607149 - RNA, 19 nt, Human
uaacuuuuauaaacuuuac

SEQ ID NO: 1607150 - RNA, 17 nt, Human
uaagacauuuuuggaag

SEQ ID NO: 1607151 - RNA, 19 nt, Human
aauaauuuuuauauuugaa

SEQ ID NO: 1607152 - RNA, 17 nt, Human
aauaauuuuuauauuug

SEQ ID NO: 1607153 - RNA, 16 nt, Human
aauaauuuuuauauuu

SEQ ID NO: 1607154 - RNA, 20 nt, Human
aauaauuuuuauauuugaaa

SEQ ID NO: 1607155 - RNA, 21 nt, Human
uaaauaaaguuuguugaaaca

SEQ ID NO: 1607156 - RNA, 12 nt, Human
uaaauaaaguuu

SEQ ID NO: 1607157 - RNA, 14 nt, Human
uaaauaaauagcua

SEQ ID NO: 1607158 - RNA, 17 nt, Human
uaaauaaauaaauagcu

SEQ ID NO: 1607159 - RNA, 19 nt, Human
uaaauaaugugaaacugga

SEQ ID NO: 1607160 - RNA, 18 nt, Human
uaaauuaacuuuuauaaa

SEQ ID NO: 1607161 - RNA, 17 nt, Human
uaaauuaacuuuuauaa

SEQ ID NO: 1607162 - RNA, 15 nt, Human
uaaauuaacuuuuau

SEQ ID NO: 1607163 - RNA, 16 nt, Human
uaaauuaacuuuuaua

SEQ ID NO: 1607164 - RNA, 12 nt, Human
uaaauuaacuuu

SEQ ID NO: 1607165 - RNA, 14 nt, Human
uaaauuaacuuuua

SEQ ID NO: 1607166 - RNA, 24 nt, Human
uaaauguuuuuuuuuaaagacuuu

SEQ ID NO: 1607167 - RNA, 15 nt, Human
uaaauguugacaugg

SEQ ID NO: 1607168 - RNA, 20 nt, Human
uaaauguugaaagaucaaaa

SEQ ID NO: 1607169 - RNA, 15 nt, Human
uaaauguugaaagau

SEQ ID NO: 1607170 - RNA, 23 nt, Human
uaaaugcaccuggaauauauaac

SEQ ID NO: 1607171 - RNA, 14 nt, Human
uaaaucuccaaaau

SEQ ID NO: 1607172 - RNA, 19 nt, Human
uaaauagcuagacugguga

SEQ ID NO: 1607173 - RNA, 15 nt, Human
uaaaucuccaaaaua

SEQ ID NO: 1607174 - RNA, 18 nt, Human
uaaaucuccaaaauaaaa

SEQ ID NO: 1607175 - RNA, 18 nt, Human
uaaauagcuagacuggug

SEQ ID NO: 1607176 - RNA, 22 nt, Human
uaaaucugugaacuugaaauuu

SEQ ID NO: 1607177 - RNA, 21 nt, Human
uaaaucugugaacuugaaauu

SEQ ID NO: 1607178 - RNA, 19 nt, Human
uaaaucugugaacuugaaa

SEQ ID NO: 1607179 - RNA, 18 nt, Human
uaaaucugugaacuugaa

SEQ ID NO: 1607180 - RNA, 17 nt, Human
uaaaucugugaacuuga

SEQ ID NO: 1607181 - RNA, 16 nt, Human
uaaaucugugaacuug

SEQ ID NO: 1607182 - RNA, 15 nt, Human
uaaaucugugaacuu

SEQ ID NO: 1607183 - RNA, 15 nt, Human
aauaacgauaaaaga

SEQ ID NO: 1607184 - RNA, 21 nt, Human
aauaacaaugaaaguugauaa

SEQ ID NO: 1607185 - RNA, 20 nt, Human
aauaaauugcuccuugacau

SEQ ID NO: 1607186 - RNA, 16 nt, Human
aauaaauugcuccuug

SEQ ID NO: 1607187 - RNA, 18 nt, Human
aauaaaacuuuuuaaaau

SEQ ID NO: 1607188 - RNA, 12 nt, Human
aauaaaacuuuu

SEQ ID NO: 1607189 - RNA, 14 nt, Human
aauaaaacuuuuua

SEQ ID NO: 1607190 - RNA, 15 nt, Human
aauaaaacuuuuuaa

SEQ ID NO: 1607191 - RNA, 16 nt, Human
aauaaaucauaaaacu

SEQ ID NO: 1607192 - RNA, 20 nt, Human
aaguuuuuauggcuuuugug

SEQ ID NO: 1607193 - RNA, 22 nt, Human
uaaaguaaaaacaaagaaauua

SEQ ID NO: 1607194 - RNA, 21 nt, Human
uaaaguaaaaacaaagaaauu

SEQ ID NO: 1607195 - RNA, 19 nt, Human
uaaaguaaaaacaaagaaa

SEQ ID NO: 1607196 - RNA, 22 nt, Human
uaaagguucaugcaaacuuuau

SEQ ID NO: 1607197 - RNA, 22 nt, Human
aauuuauaaacuuuuuucuuac

SEQ ID NO: 1607198 - RNA, 19 nt, Human
aauuucucccagucauuua

SEQ ID NO: 1607199 - RNA, 23 nt, Human
aauuucuaggacugaauuaugaa

SEQ ID NO: 1607200 - RNA, 13 nt, Human
aauuuauuauggc

SEQ ID NO: 1607201 - RNA, 14 nt, Human
aauuuauuauggca

SEQ ID NO: 1607202 - RNA, 17 nt, Human
aauuuauuauggcacau

SEQ ID NO: 1607203 - RNA, 17 nt, Human
aauuucuaggacugaau

SEQ ID NO: 1607204 - RNA, 22 nt, Human
aauuucuaggacugaauuauga

SEQ ID NO: 1607205 - RNA, 18 nt, Human
aauuucuaggacugaauu

SEQ ID NO: 1607206 - RNA, 18 nt, Human
aauuuacagagacagaaa

SEQ ID NO: 1607207 - RNA, 17 nt, Human
aauuuacagagacagaa

SEQ ID NO: 1607208 - RNA, 17 nt, Human
aauuuaccugaagucuu

SEQ ID NO: 1607209 - RNA, 15 nt, Human
aauuuacauacucug

SEQ ID NO: 1607210 - RNA, 13 nt, Human
aauuuaguauuuu

SEQ ID NO: 1607211 - RNA, 15 nt, Human
aauuggagcucgugg

SEQ ID NO: 1607212 - RNA, 19 nt, Human
uacuucuuaggguuaugau

SEQ ID NO: 1607213 - RNA, 15 nt, Human
uacuucugcuacaua

SEQ ID NO: 1607214 - RNA, 20 nt, Human
uacuucuccacccugcucuc

SEQ ID NO: 1607215 - RNA, 15 nt, Human
uacuucuuauacauu

SEQ ID NO: 1607216 - RNA, 14 nt, Human
uacuucuuauacau

SEQ ID NO: 1607217 - RNA, 16 nt, Human
uacuucuuauacauuu

SEQ ID NO: 1607218 - RNA, 15 nt, Human
uacuugaaaauuaac

SEQ ID NO: 1607219 - RNA, 23 nt, Human
uacuuugauauuuucaacgcagc

SEQ ID NO: 1607220 - RNA, 18 nt, Human
uacuucuccacccugcuc

SEQ ID NO: 1607221 - RNA, 13 nt, Human
uacuucuccaccc

SEQ ID NO: 1607222 - RNA, 23 nt, Human
uacuuccugugacuucagcucug

SEQ ID NO: 1607223 - RNA, 20 nt, Human
uacuuccccuuccuaauucc

SEQ ID NO: 1607224 - RNA, 18 nt, Human
uacuuccccuuccuaauu

SEQ ID NO: 1607225 - RNA, 15 nt, Human
uacuuccccuuccua

SEQ ID NO: 1607226 - RNA, 14 nt, Human
uacuuccccuuccu

SEQ ID NO: 1607227 - RNA, 15 nt, Human
aauuugaaacacuuu

SEQ ID NO: 1607228 - RNA, 13 nt, Human
aauugacccacaa

SEQ ID NO: 1607229 - RNA, 24 nt, Human
uacgcuccaucgcugucaucucag

SEQ ID NO: 1607230 - RNA, 15 nt, Human
uacgucugacaggca

SEQ ID NO: 1607231 - RNA, 14 nt, Human
uacuaaaaauacaa

SEQ ID NO: 1607232 - RNA, 13 nt, Human
uacgugaguccug

SEQ ID NO: 1607233 - RNA, 16 nt, Human
uacgucugacaggcaa

SEQ ID NO: 1607234 - RNA, 18 nt, Human
uacgggaggguaaggcug

SEQ ID NO: 1607235 - RNA, 18 nt, Human
uacuaaaaauacaaaaaa

SEQ ID NO: 1607236 - RNA, 15 nt, Human
uacuaaaauggacug

SEQ ID NO: 1607237 - RNA, 22 nt, Human
uacucuacccucuuagaaaaac

SEQ ID NO: 1607238 - RNA, 18 nt, Human
uacuagggaaaugccuuu

SEQ ID NO: 1607239 - RNA, 18 nt, Human
aauugaggacacugauau

SEQ ID NO: 1607240 - RNA, 18 nt, Human
uacuguacaugaaaacac

SEQ ID NO: 1607241 - RNA, 23 nt, Human
uacuguacagacagaaaaaacug

SEQ ID NO: 1607242 - RNA, 19 nt, Human
uacuguacagacagaaaaa

SEQ ID NO: 1607243 - RNA, 12 nt, Human
aauugcauuucc

SEQ ID NO: 1607244 - RNA, 19 nt, Human
uacugagagugaacaaauu

SEQ ID NO: 1607245 - RNA, 16 nt, Human
uacuguaauuugugau

SEQ ID NO: 1607246 - RNA, 17 nt, Human
uacuguaauuugugaua

SEQ ID NO: 1607247 - RNA, 15 nt, Human
uacuguaauuuguga

SEQ ID NO: 1607248 - RNA, 17 nt, Human
uacugagagugaacaaa

SEQ ID NO: 1607249 - RNA, 22 nt, Human
uacugaaauaaacgucuuaaau

SEQ ID NO: 1607250 - RNA, 19 nt, Human
uacugaaauaaacgucuua

SEQ ID NO: 1607251 - RNA, 16 nt, Human
uagcuacuaauuuuaa

SEQ ID NO: 1607252 - RNA, 16 nt, Human
uagcucaggugucccu

SEQ ID NO: 1607253 - RNA, 18 nt, Human
uagcuagacuggugacug

SEQ ID NO: 1607254 - RNA, 15 nt, Human
uagcuagacugguga

SEQ ID NO: 1607255 - RNA, 19 nt, Human
acaagcuccaagcucccag

SEQ ID NO: 1607256 - RNA, 17 nt, Human
acaagcuccaagcuccc

SEQ ID NO: 1607257 - RNA, 16 nt, Human
acaagcuccaagcucc

SEQ ID NO: 1607258 - RNA, 15 nt, Human
acaagcuccaagcuc

SEQ ID NO: 1607259 - RNA, 22 nt, Human
acaagcuccaagcucccaggca

SEQ ID NO: 1607260 - RNA, 18 nt, Human
acaagcgugagccacugc

SEQ ID NO: 1607261 - RNA, 20 nt, Human
acaaucucggcucacugcau

SEQ ID NO: 1607262 - RNA, 18 nt, Human
acaaucucggcucacugc

SEQ ID NO: 1607263 - RNA, 22 nt, Human
acaagagcccaggccuccuaca

SEQ ID NO: 1607264 - RNA, 19 nt, Human
acaagagcuuaacagugug

SEQ ID NO: 1607265 - RNA, 18 nt, Human
acaagagcuuaacagugu

SEQ ID NO: 1607266 - RNA, 16 nt, Human
acaagaccacguuucu

SEQ ID NO: 1607267 - RNA, 14 nt, Human
acaagacacaguga

SEQ ID NO: 1607268 - RNA, 17 nt, Human
acaagaccacguuucua

SEQ ID NO: 1607269 - RNA, 18 nt, Human
acaagaccacguuucuaa

SEQ ID NO: 1607270 - RNA, 22 nt, Human
acaagcucacagaccuuugaac

SEQ ID NO: 1607271 - RNA, 13 nt, Human
acaagcuccaagc

SEQ ID NO: 1607272 - RNA, 17 nt, Human
acaagcgugagccacug

SEQ ID NO: 1607273 - RNA, 17 nt, Human
acaaauuuacagagaca

SEQ ID NO: 1607274 - RNA, 17 nt, Human
acaacaucuuuuucuac

SEQ ID NO: 1607275 - RNA, 13 nt, Human
acaagacacagug

SEQ ID NO: 1607276 - RNA, 15 nt, Human
acaacagcuggugcc

SEQ ID NO: 1607277 - RNA, 21 nt, Human
acaaauucugucucuggauua

SEQ ID NO: 1607278 - RNA, 20 nt, Human
uagaugcaguucugaagaag

SEQ ID NO: 1607279 - RNA, 21 nt, Human
uagaugcaguucugaagaaga

SEQ ID NO: 1607280 - RNA, 14 nt, Human
uagaucuaguucac

SEQ ID NO: 1607281 - RNA, 17 nt, Human
uagauaggccaugggca

SEQ ID NO: 1607282 - RNA, 22 nt, Human
uagauaggucagugcaaauacu

SEQ ID NO: 1607283 - RNA, 21 nt, Human
acaaagcgugguggacaugca

SEQ ID NO: 1607284 - RNA, 18 nt, Human
acaaagcccuuccauguc

SEQ ID NO: 1607285 - RNA, 14 nt, Human
acaaaacuuuucua

SEQ ID NO: 1607286 - RNA, 20 nt, Human
acaaaguauuaagcauauau

SEQ ID NO: 1607287 - RNA, 22 nt, Human
aauuuuuucucuaggaaauauu

SEQ ID NO: 1607288 - RNA, 22 nt, Human
aauuuuuuuaucgucacugcuu

SEQ ID NO: 1607289 - RNA, 21 nt, Human
aauuuuucuuauuucauuucu

SEQ ID NO: 1607290 - RNA, 22 nt, Human
aauuuuuaaucuuuaauuuuac

SEQ ID NO: 1607291 - RNA, 16 nt, Human
aauuuuguuucuguac

SEQ ID NO: 1607292 - RNA, 16 nt, Human
aauuuguuauaaugaa

SEQ ID NO: 1607293 - RNA, 21 nt, Human
aauuugguuuucacauuggaa

SEQ ID NO: 1607294 - RNA, 15 nt, Human
aauuugguuuucaca

SEQ ID NO: 1607295 - RNA, 13 nt, Human
aauuugguuuuca

SEQ ID NO: 1607296 - RNA, 22 nt, Human
uacuuugugcugggguuaucug

SEQ ID NO: 1607297 - RNA, 16 nt, Human
uacuuugugcuggggu

SEQ ID NO: 1607298 - RNA, 14 nt, Human
uacuuuuuggcaua

SEQ ID NO: 1607299 - RNA, 20 nt, Human
uacuuuuuggcauaacauaa

SEQ ID NO: 1607300 - RNA, 19 nt, Human
uacuuuuuggcauaacaua

SEQ ID NO: 1607301 - RNA, 14 nt, Human
acacuccagugaga

SEQ ID NO: 1607302 - RNA, 13 nt, Human
acacucugagacu

SEQ ID NO: 1607303 - RNA, 11 nt, Human
acacucugaga

SEQ ID NO: 1607304 - RNA, 14 nt, Human
acacugaagaagca

SEQ ID NO: 1607305 - RNA, 12 nt, Human
acacugaagaag

SEQ ID NO: 1607306 - RNA, 15 nt, Human
acacuguucucugcc

SEQ ID NO: 1607307 - RNA, 14 nt, Human
acacuguucucugc

SEQ ID NO: 1607308 - RNA, 20 nt, Human
acacuguucucugcccucca

SEQ ID NO: 1607309 - RNA, 18 nt, Human
acacuguucucugcccuc

SEQ ID NO: 1607310 - RNA, 17 nt, Human
acacuguucucugcccu

SEQ ID NO: 1607311 - RNA, 16 nt, Human
acacuguucucugccc

SEQ ID NO: 1607312 - RNA, 23 nt, Human
acacuguucucugcccuccaaga

SEQ ID NO: 1607313 - RNA, 22 nt, Human
acacuguucucugcccuccaag

SEQ ID NO: 1607314 - RNA, 12 nt, Human
uauauuuacaaa

SEQ ID NO: 1607315 - RNA, 19 nt, Human
acagaaagcagaacaguga

SEQ ID NO: 1607316 - RNA, 17 nt, Human
acagacacaggcccggc

SEQ ID NO: 1607317 - RNA, 22 nt, Human
acagacacaggcccggcuccag

SEQ ID NO: 1607318 - RNA, 18 nt, Human
acagacacaggcccggcu

SEQ ID NO: 1607319 - RNA, 22 nt, Human
acagacuggaagcacagcuuca

SEQ ID NO: 1607320 - RNA, 21 nt, Human
acagacuggaagcacagcuuc

SEQ ID NO: 1607321 - RNA, 19 nt, Human
acagacuggaagcacagcu

SEQ ID NO: 1607322 - RNA, 15 nt, Human
acacuuaaaaauggu

SEQ ID NO: 1607323 - RNA, 13 nt, Human
acacuuaaaaaug

SEQ ID NO: 1607324 - RNA, 16 nt, Human
acacuguuucaaacuu

SEQ ID NO: 1607325 - RNA, 15 nt, Human
acacuguuucaaacu

SEQ ID NO: 1607326 - RNA, 23 nt, Human
acacuuguugauuaauggaaaug

SEQ ID NO: 1607327 - RNA, 20 nt, Human
acacuuguugauuaauggaa

SEQ ID NO: 1607328 - RNA, 23 nt, Human
uaugaaagauggcugugccucug

SEQ ID NO: 1607329 - RNA, 22 nt, Human
uaugaaagauggcugugccucu

SEQ ID NO: 1607330 - RNA, 20 nt, Human
uaugaaagauggcugugccu

SEQ ID NO: 1607331 - RNA, 21 nt, Human
acagcccuucuuuccacagaa

SEQ ID NO: 1607332 - RNA, 20 nt, Human
acagcccuucuuuccacaga

SEQ ID NO: 1607333 - RNA, 23 nt, Human
acagcccgggcucugccucccau

SEQ ID NO: 1607334 - RNA, 22 nt, Human
acagcccgggcucugccuccca

SEQ ID NO: 1607335 - RNA, 21 nt, Human
acagcccgggcucugccuccc

SEQ ID NO: 1607336 - RNA, 16 nt, Human
acagcaaggagauuua

SEQ ID NO: 1607337 - RNA, 21 nt, Human
acagaguuguuacauuuuuaa

SEQ ID NO: 1607338 - RNA, 22 nt, Human
acagaguuguuacauuuuuaag

SEQ ID NO: 1607339 - RNA, 20 nt, Human
acagauagauauaugcucug

SEQ ID NO: 1607340 - RNA, 20 nt, Human
acagauacuccuccaagguu

SEQ ID NO: 1607341 - RNA, 23 nt, Human
acagaugggugcuuggaggaagg

SEQ ID NO: 1607342 - RNA, 19 nt, Human
uauauuuauuacuguaaga

SEQ ID NO: 1607343 - RNA, 15 nt, Human
uauauuuauuacugu

SEQ ID NO: 1607344 - RNA, 19 nt, Human
uaucccuacuguaauuugu

SEQ ID NO: 1607345 - RNA, 20 nt, Human
uaucccuacuguaauuugug

SEQ ID NO: 1607346 - RNA, 16 nt, Human
uaucccggcugcccuu

SEQ ID NO: 1607347 - RNA, 15 nt, Human
uaucucagggccugg

SEQ ID NO: 1607348 - RNA, 13 nt, Human
uaucucagggccu

SEQ ID NO: 1607349 - RNA, 17 nt, Human
uauccuacuuccccuuc

SEQ ID NO: 1607350 - RNA, 14 nt, Human
uauccuacuucccc

SEQ ID NO: 1607351 - RNA, 14 nt, Human
acagagcccacgcc

SEQ ID NO: 1607352 - RNA, 21 nt, Human
acagagcaagugagacccugu

SEQ ID NO: 1607353 - RNA, 17 nt, Human
acagaguuguuacauuu

SEQ ID NO: 1607354 - RNA, 18 nt, Human
acagaguuguuacauuuu

SEQ ID NO: 1607355 - RNA, 19 nt, Human
acagaguuguuacauuuuu

SEQ ID NO: 1607356 - RNA, 20 nt, Human
acagaguuguuacauuuuua

SEQ ID NO: 1607357 - RNA, 16 nt, Human
acagaguuguuacauu

SEQ ID NO: 1607358 - RNA, 22 nt, Human
uagguuuggacaaaauggaaua

SEQ ID NO: 1607359 - RNA, 21 nt, Human
uagguuggcaaaaaggcagga

SEQ ID NO: 1607360 - RNA, 13 nt, Human
acacagugagucg

SEQ ID NO: 1607361 - RNA, 17 nt, Human
acacagugaccauacua

SEQ ID NO: 1607362 - RNA, 14 nt, Human
acacacugaagaag

SEQ ID NO: 1607363 - RNA, 11 nt, Human
acacagugagu

SEQ ID NO: 1607364 - RNA, 13 nt, Human
uaguagagacagg

SEQ ID NO: 1607365 - RNA, 14 nt, Human
uaguagagacaggg

SEQ ID NO: 1607366 - RNA, 17 nt, Human
uaguguuggagaagaac

SEQ ID NO: 1607367 - RNA, 16 nt, Human
uaguguuggagaagaa

SEQ ID NO: 1607368 - RNA, 12 nt, Human
uaguguuggaga

SEQ ID NO: 1607369 - RNA, 22 nt, Human
uagucuugucucagauuuuauu

SEQ ID NO: 1607370 - RNA, 17 nt, Human
uagucuugucucagauu

SEQ ID NO: 1607371 - RNA, 17 nt, Human
acacaacuauauuguuu

SEQ ID NO: 1607372 - RNA, 14 nt, Human
acacaacuauauug

SEQ ID NO: 1607373 - RNA, 21 nt, Human
acaaugguuuucuuguguguu

SEQ ID NO: 1607374 - RNA, 18 nt, Human
acaaugcuguauuuuaaa

SEQ ID NO: 1607375 - RNA, 15 nt, Human
acaaugguuuucuug

SEQ ID NO: 1607376 - RNA, 17 nt, Human
acaaugcuguauuuuaa

SEQ ID NO: 1607377 - RNA, 14 nt, Human
acaaugcuguauuu

SEQ ID NO: 1607378 - RNA, 13 nt, Human
acacacugaagaa

SEQ ID NO: 1607379 - RNA, 14 nt, Human
acacacacauacac

SEQ ID NO: 1607380 - RNA, 12 nt, Human
acacacagcucu

SEQ ID NO: 1607381 - RNA, 11 nt, Human
acacacagcuc

SEQ ID NO: 1607382 - RNA, 17 nt, Human
acacuaagagagaauga

SEQ ID NO: 1607383 - RNA, 19 nt, Human
acacuaaccacgcuggacc

SEQ ID NO: 1607384 - RNA, 17 nt, Human
acacuaaccacgcugga

SEQ ID NO: 1607385 - RNA, 16 nt, Human
acacuaaccacgcugg

SEQ ID NO: 1607386 - RNA, 19 nt, Human
acacuaagagagaaugaga

SEQ ID NO: 1607387 - RNA, 18 nt, Human
acacuaagagagaaugag

SEQ ID NO: 1607388 - RNA, 20 nt, Human
acacuaaccacgcuggaccu

SEQ ID NO: 1607389 - RNA, 22 nt, Human
uauaaccaguguuguggauuua

SEQ ID NO: 1607390 - RNA, 19 nt, Human
uauaacuauguugauaaaa

SEQ ID NO: 1607391 - RNA, 19 nt, Human
acaccucugcacaagcugc

SEQ ID NO: 1607392 - RNA, 16 nt, Human
acaccuugacagggca

SEQ ID NO: 1607393 - RNA, 15 nt, Human
acaccuugacagggc

SEQ ID NO: 1607394 - RNA, 14 nt, Human
acaccuugacaggg

SEQ ID NO: 1607395 - RNA, 18 nt, Human
acaccucugcacaagcug

SEQ ID NO: 1607396 - RNA, 18 nt, Human
uaguucagguaacaggca

SEQ ID NO: 1607397 - RNA, 21 nt, Human
uauaaaaauaaaaaacacugg

SEQ ID NO: 1607398 - RNA, 20 nt, Human
uauaaaaauaaaaaacacug

SEQ ID NO: 1607399 - RNA, 22 nt, Human
acacauguccaagaagcccagg

SEQ ID NO: 1607400 - RNA, 21 nt, Human
acacauguccaagaagcccag

SEQ ID NO: 1607401 - RNA, 13 nt, Human
acacccagcccac

SEQ ID NO: 1607402 - RNA, 12 nt, Human
acacccagccca

SEQ ID NO: 1607403 - RNA, 13 nt, Human
acacauuuuauuu

SEQ ID NO: 1607404 - RNA, 19 nt, Human
acacauguccaagaagccc

SEQ ID NO: 1607405 - RNA, 18 nt, Human
acacauguccaagaagcc

SEQ ID NO: 1607406 - RNA, 13 nt, Human
acacauguccaag

SEQ ID NO: 1607407 - RNA, 15 nt, Human
ucacaguucucuccu

SEQ ID NO: 1607408 - RNA, 15 nt, Human
ucacauaucugucau

SEQ ID NO: 1607409 - RNA, 12 nt, Human
ucacauaucugu

SEQ ID NO: 1607410 - RNA, 21 nt, Human
ucacaacagauuauuaccuua

SEQ ID NO: 1607411 - RNA, 22 nt, Human
ucacacgucuggcuucacagau

SEQ ID NO: 1607412 - RNA, 16 nt, Human
ucacaacaaccugguc

SEQ ID NO: 1607413 - RNA, 15 nt, Human
ucaccccggccaccu

SEQ ID NO: 1607414 - RNA, 20 nt, Human
ucaccccagccccaaaacuc

SEQ ID NO: 1607415 - RNA, 14 nt, Human
ucaccccagcccca

SEQ ID NO: 1607416 - RNA, 13 nt, Human
ucaccccagcccc

SEQ ID NO: 1607417 - RNA, 15 nt, Human
accaaucaugaauua

SEQ ID NO: 1607418 - RNA, 15 nt, Human
accaauguucucucu

SEQ ID NO: 1607419 - RNA, 13 nt, Human
accaaucaugaau

SEQ ID NO: 1607420 - RNA, 22 nt, Human
accaacauacucccaucuguga

SEQ ID NO: 1607421 - RNA, 21 nt, Human
accaacauacucccaucugug

SEQ ID NO: 1607422 - RNA, 19 nt, Human
accaacauacucccaucug

SEQ ID NO: 1607423 - RNA, 20 nt, Human
ucaagugauucucaugccuc

SEQ ID NO: 1607424 - RNA, 23 nt, Human
ucaagugaaaaaggaggaagaga

SEQ ID NO: 1607425 - RNA, 17 nt, Human
ucaagugauucucaugc

SEQ ID NO: 1607426 - RNA, 15 nt, Human
ucaagugaaaaagga

SEQ ID NO: 1607427 - RNA, 22 nt, Human
ucaaguccucuuuucugagagg

SEQ ID NO: 1607428 - RNA, 23 nt, Human
ucaauuuuucuuauuucauuucu

SEQ ID NO: 1607429 - RNA, 20 nt, Human
ucaauuuuucuuauuucauu

SEQ ID NO: 1607430 - RNA, 15 nt, Human
ucaauucuugccaaa

SEQ ID NO: 1607431 - RNA, 14 nt, Human
accacacuccagcu

SEQ ID NO: 1607432 - RNA, 20 nt, Human
ucacuauguugcccaggcag

SEQ ID NO: 1607433 - RNA, 19 nt, Human
ucacuauguugcccaggca

SEQ ID NO: 1607434 - RNA, 18 nt, Human
ucacuauguugcccaggc

SEQ ID NO: 1607435 - RNA, 14 nt, Human
accagggacugagg

SEQ ID NO: 1607436 - RNA, 17 nt, Human
accagagcccaccuugg

SEQ ID NO: 1607437 - RNA, 21 nt, Human
accagccuccaugcugccucc

SEQ ID NO: 1607438 - RNA, 20 nt, Human
accagccuccaugcugccuc

SEQ ID NO: 1607439 - RNA, 19 nt, Human
accagccuccaugcugccu

SEQ ID NO: 1607440 - RNA, 14 nt, Human
accagccuccaugc

SEQ ID NO: 1607441 - RNA, 16 nt, Human
ucaccugaagacucau

SEQ ID NO: 1607442 - RNA, 15 nt, Human
ucaccucucccuugg

SEQ ID NO: 1607443 - RNA, 15 nt, Human
ucaccugccccucaa

SEQ ID NO: 1607444 - RNA, 16 nt, Human
ucaccugccccucaac

SEQ ID NO: 1607445 - RNA, 13 nt, Human
ucaccugccccuc

SEQ ID NO: 1607446 - RNA, 13 nt, Human
accacugcagaag

SEQ ID NO: 1607447 - RNA, 22 nt, Human
ucaccccggccaccugcggugc

SEQ ID NO: 1607448 - RNA, 21 nt, Human
accacugcacuccagccuggg

SEQ ID NO: 1607449 - RNA, 23 nt, Human
accacugcucugaugaagaggag

SEQ ID NO: 1607450 - RNA, 17 nt, Human
accacugcucugaugaa

SEQ ID NO: 1607451 - RNA, 15 nt, Human
accacugcucugaug

SEQ ID NO: 1607452 - RNA, 20 nt, Human
accacugcacuccagccugg

SEQ ID NO: 1607453 - RNA, 17 nt, Human
accacugcacuccagcc

SEQ ID NO: 1607454 - RNA, 18 nt, Human
ucaccccggccaccugcg

SEQ ID NO: 1607455 - RNA, 17 nt, Human
ucaccccggccaccugc

SEQ ID NO: 1607456 - RNA, 18 nt, Human
accacuuguguuuugcaa

SEQ ID NO: 1607457 - RNA, 15 nt, Human
accacuuuuguucuu

SEQ ID NO: 1607458 - RNA, 16 nt, Human
accacuuuuguucuug

SEQ ID NO: 1607459 - RNA, 21 nt, Human
accacuuuuguucuugguuug

SEQ ID NO: 1607460 - RNA, 17 nt, Human
accagacaccuugacag

SEQ ID NO: 1607461 - RNA, 14 nt, Human
accagacaccuuga

SEQ ID NO: 1607462 - RNA, 16 nt, Human
accagagcccaccuug

SEQ ID NO: 1607463 - RNA, 14 nt, Human
accagagcccaccu

SEQ ID NO: 1607464 - RNA, 12 nt, Human
accagagcccac

SEQ ID NO: 1607465 - RNA, 22 nt, Human
accacuuuuguucuugguuugu

SEQ ID NO: 1607466 - RNA, 23 nt, Human
accauuucuugagguaaaagcau

SEQ ID NO: 1607467 - RNA, 11 nt, Human
acccacugcuc

SEQ ID NO: 1607468 - RNA, 10 nt, Human
acccacugcu

SEQ ID NO: 1607469 - RNA, 11 nt, Human
acccacugcuu

SEQ ID NO: 1607470 - RNA, 15 nt, Human
acccacugcucuggu

SEQ ID NO: 1607471 - RNA, 14 nt, Human
acccacugcucugg

SEQ ID NO: 1607472 - RNA, 13 nt, Human
acccacugcucug

SEQ ID NO: 1607473 - RNA, 21 nt, Human
acccagauaaagguucaugca

SEQ ID NO: 1607474 - RNA, 12 nt, Human
accauuccccau

SEQ ID NO: 1607475 - RNA, 23 nt, Human
ucacucuuauugcccacgcugga

SEQ ID NO: 1607476 - RNA, 21 nt, Human
ucacucuuauugcccacgcug

SEQ ID NO: 1607477 - RNA, 15 nt, Human
ucacuccuaccuggu

SEQ ID NO: 1607478 - RNA, 22 nt, Human
accauggucggaaaacaugcua

SEQ ID NO: 1607479 - RNA, 19 nt, Human
accaugggauaaaugccau

SEQ ID NO: 1607480 - RNA, 22 nt, Human
ucagaaguuucugccgcagccc

SEQ ID NO: 1607481 - RNA, 19 nt, Human
ucagaaguuucugccgcag

SEQ ID NO: 1607482 - RNA, 19 nt, Human
ucagaaguuucucagcucc

SEQ ID NO: 1607483 - RNA, 14 nt, Human
ucagaagacacuga

SEQ ID NO: 1607484 - RNA, 18 nt, Human
ucagagccugcaguuauu

SEQ ID NO: 1607485 - RNA, 15 nt, Human
ucagagccugcaguu

SEQ ID NO: 1607486 - RNA, 14 nt, Human
ucagagccugcagu

SEQ ID NO: 1607487 - RNA, 13 nt, Human
ucagagccugcag

SEQ ID NO: 1607488 - RNA, 12 nt, Human
ucagagccugca

SEQ ID NO: 1607489 - RNA, 23 nt, Human
ucagagagggugggagugggccc

SEQ ID NO: 1607490 - RNA, 21 nt, Human
ucagagagggugggagugggc

SEQ ID NO: 1607491 - RNA, 16 nt, Human
ucagagagggugggag

SEQ ID NO: 1607492 - RNA, 20 nt, Human
ucagagacuccugcaggcag

SEQ ID NO: 1607493 - RNA, 17 nt, Human
ucagagacuccugcagg

SEQ ID NO: 1607494 - RNA, 21 nt, Human
ucagagacuccugcaggcagc

SEQ ID NO: 1607495 - RNA, 22 nt, Human
ucagagacuccugcaggcagcc

SEQ ID NO: 1607496 - RNA, 19 nt, Human
ucagaaucucaaauaacua

SEQ ID NO: 1607497 - RNA, 18 nt, Human
ucagaaucucaaauaacu

SEQ ID NO: 1607498 - RNA, 23 nt, Human
ucagaaguuucugccgcagcccu

SEQ ID NO: 1607499 - RNA, 21 nt, Human
ucaggaaaucaaauaugcaaa

SEQ ID NO: 1607500 - RNA, 20 nt, Human
ucaggaaaucaaauaugcaa

SEQ ID NO: 1607501 - RNA, 19 nt, Human
ucaggaaagagaacuucca

SEQ ID NO: 1607502 - RNA, 13 nt, Human
ucaggaaagagaa

SEQ ID NO: 1607503 - RNA, 14 nt, Human
ucagcggggacagc

SEQ ID NO: 1607504 - RNA, 16 nt, Human
ucagcucacugcaacc

SEQ ID NO: 1607505 - RNA, 13 nt, Human
ucagcucacugca

SEQ ID NO: 1607506 - RNA, 20 nt, Human
ucagcuuguaaauagcucag

SEQ ID NO: 1607507 - RNA, 12 nt, Human
ucagcucaugga

SEQ ID NO: 1607508 - RNA, 15 nt, Human
accccuucgcuccug

SEQ ID NO: 1607509 - RNA, 14 nt, Human
accccuucgcuccu

SEQ ID NO: 1607510 - RNA, 16 nt, Human
accccuucgcuccugu

SEQ ID NO: 1607511 - RNA, 12 nt, Human
acccccacccaa

SEQ ID NO: 1607512 - RNA, 12 nt, Human
ucagagcugccc

SEQ ID NO: 1607513 - RNA, 22 nt, Human
ucagccaagaauucuuaaauau

SEQ ID NO: 1607514 - RNA, 23 nt, Human
ucagccguguaaccauggaccca

SEQ ID NO: 1607515 - RNA, 23 nt, Human
acccagcgagcccugguggcagu

SEQ ID NO: 1607516 - RNA, 19 nt, Human
acccagcgagcccuggugg

SEQ ID NO: 1607517 - RNA, 24 nt, Human
acccagcgagcccugguggcagug

SEQ ID NO: 1607518 - RNA, 23 nt, Human
accccagcuggggccaggcuggg

SEQ ID NO: 1607519 - RNA, 19 nt, Human
ucaaaauuguuacaaauug

SEQ ID NO: 1607520 - RNA, 16 nt, Human
ucaaaauuguuacaaa

SEQ ID NO: 1607521 - RNA, 21 nt, Human
ucaaaauaccaugccauuuaa

SEQ ID NO: 1607522 - RNA, 23 nt, Human
ucaaaauaccaugccauuuaaag

SEQ ID NO: 1607523 - RNA, 21 nt, Human
ucaaaauaugccccauucaac

SEQ ID NO: 1607524 - RNA, 16 nt, Human
uauuuuuauauuuacu

SEQ ID NO: 1607525 - RNA, 18 nt, Human
ucaaaagaaagaaaauca

SEQ ID NO: 1607526 - RNA, 21 nt, Human
ucaaaguugccuaaauccauu

SEQ ID NO: 1607527 - RNA, 19 nt, Human
ucaaaguugccuaaaucca

SEQ ID NO: 1607528 - RNA, 22 nt, Human
ucaaaguugccuaaauccauuu

SEQ ID NO: 1607529 - RNA, 14 nt, Human
ucaaagcugaaaug

SEQ ID NO: 1607530 - RNA, 19 nt, Human
acaugauccugcaauucca

SEQ ID NO: 1607531 - RNA, 19 nt, Human
acaugagcaucaggccagg

SEQ ID NO: 1607532 - RNA, 18 nt, Human
acaugagcaucaggccag

SEQ ID NO: 1607533 - RNA, 17 nt, Human
acaugagcaucaggcca

SEQ ID NO: 1607534 - RNA, 17 nt, Human
acaugaucuucuuuaua

SEQ ID NO: 1607535 - RNA, 15 nt, Human
acaugaucuucuuua

SEQ ID NO: 1607536 - RNA, 19 nt, Human
acaugaucuucuuuauaau

SEQ ID NO: 1607537 - RNA, 20 nt, Human
acaugagcaucaggccaggc

SEQ ID NO: 1607538 - RNA, 16 nt, Human
acaugaaguccaagca

SEQ ID NO: 1607539 - RNA, 20 nt, Human
ucaaauacgugggcauucaa

SEQ ID NO: 1607540 - RNA, 18 nt, Human
ucaaauaacuaaaaggua

SEQ ID NO: 1607541 - RNA, 22 nt, Human
ucaagaugaugaugaucuuuaa

SEQ ID NO: 1607542 - RNA, 23 nt, Human
ucaaguauuauaccuuuuuuaga

SEQ ID NO: 1607543 - RNA, 16 nt, Human
ucaaguauuauaccuu

SEQ ID NO: 1607544 - RNA, 21 nt, Human
ucaaguauuauaccuuuuuua

SEQ ID NO: 1607545 - RNA, 15 nt, Human
ucaaguauuauaccu

SEQ ID NO: 1607546 - RNA, 11 nt, Human
ucaaguauuau

SEQ ID NO: 1607547 - RNA, 15 nt, Human
acauucuguuaauca

SEQ ID NO: 1607548 - RNA, 15 nt, Human
ucaaauuucuaaauc

SEQ ID NO: 1607549 - RNA, 16 nt, Human
ucaaauuucuaaaucu

SEQ ID NO: 1607550 - RNA, 12 nt, Human
acauucuguuaa

SEQ ID NO: 1607551 - RNA, 16 nt, Human
ucaacagguuuuccug

SEQ ID NO: 1607552 - RNA, 17 nt, Human
ucaaauuucuaaaucuc

SEQ ID NO: 1607553 - RNA, 21 nt, Human
acauguccaagaagcccagga

SEQ ID NO: 1607554 - RNA, 22 nt, Human
acauuagcaguuugcuuuguau

SEQ ID NO: 1607555 - RNA, 18 nt, Human
acauuagcaguuugcuuu

SEQ ID NO: 1607556 - RNA, 14 nt, Human
acauauugauuucc

SEQ ID NO: 1607557 - RNA, 16 nt, Human
acauauugauuuccgu

SEQ ID NO: 1607558 - RNA, 18 nt, Human
acauauugauuuccguua

SEQ ID NO: 1607559 - RNA, 22 nt, Human
acauauugauuuccguuaaaau

SEQ ID NO: 1607560 - RNA, 23 nt, Human
acauauugauuuccguuaaaaua

SEQ ID NO: 1607561 - RNA, 18 nt, Human
acauagaauuaacacaug

SEQ ID NO: 1607562 - RNA, 14 nt, Human
acauagaauuaaca

SEQ ID NO: 1607563 - RNA, 19 nt, Human
acauauauaacaaugcugu

SEQ ID NO: 1607564 - RNA, 20 nt, Human
acauagucuggcuguaccca

SEQ ID NO: 1607565 - RNA, 21 nt, Human
acauagugaugguuccccugu

SEQ ID NO: 1607566 - RNA, 16 nt, Human
acauagugaugguucc

SEQ ID NO: 1607567 - RNA, 15 nt, Human
acauagucuggcugu

SEQ ID NO: 1607568 - RNA, 14 nt, Human
acauagucuggcug

SEQ ID NO: 1607569 - RNA, 13 nt, Human
acaucaacagaua

SEQ ID NO: 1607570 - RNA, 18 nt, Human
acaucaacaucuugguca

SEQ ID NO: 1607571 - RNA, 16 nt, Human
acaucaacaucuuggu

SEQ ID NO: 1607572 - RNA, 14 nt, Human
acaucuugcucugc

SEQ ID NO: 1607573 - RNA, 13 nt, Human
acaucuugcucug

SEQ ID NO: 1607574 - RNA, 19 nt, Human
acaucuugcucugcugaca

SEQ ID NO: 1607575 - RNA, 18 nt, Human
acaucuugcucugcugac

SEQ ID NO: 1607576 - RNA, 21 nt, Human
acaucuugcucugcugacaga

SEQ ID NO: 1607577 - RNA, 17 nt, Human
acaugaaaacacauuuu

SEQ ID NO: 1607578 - RNA, 18 nt, Human
acaugaaaacacauuuuu

SEQ ID NO: 1607579 - RNA, 19 nt, Human
acaugaaaacacauuuuuc

SEQ ID NO: 1607580 - RNA, 22 nt, Human
acaucuugcucugcugacagac

SEQ ID NO: 1607581 - RNA, 22 nt, Human
acaugaaaacacauuuuucuua

SEQ ID NO: 1607582 - RNA, 21 nt, Human
acaguuuucugagaaagacua

SEQ ID NO: 1607583 - RNA, 20 nt, Human
acaguuuucugagaaagacu

SEQ ID NO: 1607584 - RNA, 19 nt, Human
acaguuuucugagaaagac

SEQ ID NO: 1607585 - RNA, 18 nt, Human
acaguuuucugagaaaga

SEQ ID NO: 1607586 - RNA, 17 nt, Human
acaguuuucugagaaag

SEQ ID NO: 1607587 - RNA, 16 nt, Human
acaguuuucugagaaa

SEQ ID NO: 1607588 - RNA, 15 nt, Human
acaguuuucugagaa

SEQ ID NO: 1607589 - RNA, 16 nt, Human
acaguuuguuaguaug

SEQ ID NO: 1607590 - RNA, 20 nt, Human
acaguuuguuaguaugaggc

SEQ ID NO: 1607591 - RNA, 13 nt, Human
acauacuaaccag

SEQ ID NO: 1607592 - RNA, 21 nt, Human
acauacuaaccagcagaaaug

SEQ ID NO: 1607593 - RNA, 22 nt, Human
acauacuaaccagcagaaaugc

SEQ ID NO: 1607594 - RNA, 13 nt, Human
acauacucccauc

SEQ ID NO: 1607595 - RNA, 14 nt, Human
acauacucugcuua

SEQ ID NO: 1607596 - RNA, 17 nt, Human
acauacucccaucugug

SEQ ID NO: 1607597 - RNA, 13 nt, Human
uauuucauuucuu

SEQ ID NO: 1607598 - RNA, 21 nt, Human
uaugaaauauuauguuaaaac

SEQ ID NO: 1607599 - RNA, 23 nt, Human
uauuuccuauauuguuuucagug

SEQ ID NO: 1607600 - RNA, 22 nt, Human
uauuucccucaccuuucccauc

SEQ ID NO: 1607601 - RNA, 20 nt, Human
acaguugaaaaacagcugag

SEQ ID NO: 1607602 - RNA, 16 nt, Human
acaguugaaaaacagc

SEQ ID NO: 1607603 - RNA, 15 nt, Human
acaguugaaaaacag

SEQ ID NO: 1607604 - RNA, 18 nt, Human
uauuucuauauuuucauu

SEQ ID NO: 1607605 - RNA, 17 nt, Human
uauuucuauauuuucau

SEQ ID NO: 1607606 - RNA, 16 nt, Human
uauuucuauauuuuca

SEQ ID NO: 1607607 - RNA, 21 nt, Human
accuagggugauauuaaccag

SEQ ID NO: 1607608 - RNA, 20 nt, Human
accuaccaccacgcccggcu

SEQ ID NO: 1607609 - RNA, 16 nt, Human
accuaccaccacgccc

SEQ ID NO: 1607610 - RNA, 23 nt, Human
ucaggaaaucaaauaugcaaagc

SEQ ID NO: 1607611 - RNA, 22 nt, Human
ucaggaaaucaaauaugcaaag

SEQ ID NO: 1607612 - RNA, 16 nt, Human
ucaggaagcucagggc

SEQ ID NO: 1607613 - RNA, 15 nt, Human
ucaggaagcucaggg

SEQ ID NO: 1607614 - RNA, 14 nt, Human
ucaggaagcucagg

SEQ ID NO: 1607615 - RNA, 13 nt, Human
ucaggaagcucag

SEQ ID NO: 1607616 - RNA, 12 nt, Human
accucccugcaa

SEQ ID NO: 1607617 - RNA, 13 nt, Human
accucccugcaau

SEQ ID NO: 1607618 - RNA, 12 nt, Human
accuccugccuc

SEQ ID NO: 1607619 - RNA, 13 nt, Human
accuccugccucg

SEQ ID NO: 1607620 - RNA, 23 nt, Human
accuccugccucgaacuggcugc

SEQ ID NO: 1607621 - RNA, 13 nt, Human
accuccugcuggg

SEQ ID NO: 1607622 - RNA, 12 nt, Human
accuccugcugg

SEQ ID NO: 1607623 - RNA, 11 nt, Human
accuccugcug

SEQ ID NO: 1607624 - RNA, 15 nt, Human
ucauccuaagcuauu

SEQ ID NO: 1607625 - RNA, 16 nt, Human
ucaugaauuaguuuua

SEQ ID NO: 1607626 - RNA, 22 nt, Human
ucauccuucuggaauaaggaga

SEQ ID NO: 1607627 - RNA, 14 nt, Human
ucaucuaggauuuu

SEQ ID NO: 1607628 - RNA, 18 nt, Human
ucaucuagguaaauuaca

SEQ ID NO: 1607629 - RNA, 19 nt, Human
ucauccuccucagaucuuc

SEQ ID NO: 1607630 - RNA, 13 nt, Human
ucauccuccucag

SEQ ID NO: 1607631 - RNA, 18 nt, Human
ucauccucauacccaccc

SEQ ID NO: 1607632 - RNA, 14 nt, Human
ucauccuucuggaa

SEQ ID NO: 1607633 - RNA, 21 nt, Human
ucaugaauuaguuuuauaugc

SEQ ID NO: 1607634 - RNA, 13 nt, Human
ucauugaaaucuu

SEQ ID NO: 1607635 - RNA, 12 nt, Human
ucauugaaaucu

SEQ ID NO: 1607636 - RNA, 12 nt, Human
ucauucuucugu

SEQ ID NO: 1607637 - RNA, 19 nt, Human
accucggugccuuccucuu

SEQ ID NO: 1607638 - RNA, 13 nt, Human
accuccugggcua

SEQ ID NO: 1607639 - RNA, 16 nt, Human
accuccugcugggcag

SEQ ID NO: 1607640 - RNA, 14 nt, Human
accuccugcugggc

SEQ ID NO: 1607641 - RNA, 15 nt, Human
ucauugaccugaggc

SEQ ID NO: 1607642 - RNA, 14 nt, Human
ucauugaccugagg

SEQ ID NO: 1607643 - RNA, 12 nt, Human
ucauugaccuga

SEQ ID NO: 1607644 - RNA, 22 nt, Human
ucauugaaaucuuuuugcuuug

SEQ ID NO: 1607645 - RNA, 19 nt, Human
ucauugaccugaggcccuu

SEQ ID NO: 1607646 - RNA, 18 nt, Human
accugauugugucucuug

SEQ ID NO: 1607647 - RNA, 17 nt, Human
accugauugugucucuu

SEQ ID NO: 1607648 - RNA, 15 nt, Human
accugauugugucuc

SEQ ID NO: 1607649 - RNA, 21 nt, Human
accugaggcccuucucuccag

SEQ ID NO: 1607650 - RNA, 20 nt, Human
accugaggcccuucucucca

SEQ ID NO: 1607651 - RNA, 16 nt, Human
accugaggcccuucuc

SEQ ID NO: 1607652 - RNA, 15 nt, Human
accugaggcccuucu

SEQ ID NO: 1607653 - RNA, 22 nt, Human
accugaggcccuucucuccagc

SEQ ID NO: 1607654 - RNA, 14 nt, Human
accugaggcccuuc

SEQ ID NO: 1607655 - RNA, 14 nt, Human
accucuaaauucuu

SEQ ID NO: 1607656 - RNA, 20 nt, Human
acgagcaggcuacugucagc

SEQ ID NO: 1607657 - RNA, 19 nt, Human
acgagcaggcuacugucag

SEQ ID NO: 1607658 - RNA, 19 nt, Human
acgccagauucuuuccuga

SEQ ID NO: 1607659 - RNA, 16 nt, Human
acgagcaggcuucuuc

SEQ ID NO: 1607660 - RNA, 14 nt, Human
acgagaaaacaaua

SEQ ID NO: 1607661 - RNA, 21 nt, Human
accuuuuuuauacauaaacaa

SEQ ID NO: 1607662 - RNA, 22 nt, Human
accuuuuuuauacauaaacaag

SEQ ID NO: 1607663 - RNA, 19 nt, Human
accuuuuuuauacauaaac

SEQ ID NO: 1607664 - RNA, 20 nt, Human
accuuuuuuauacauaaaca

SEQ ID NO: 1607665 - RNA, 21 nt, Human
uccaggcuguaucccaugagc

SEQ ID NO: 1607666 - RNA, 12 nt, Human
uccagccccugg

SEQ ID NO: 1607667 - RNA, 15 nt, Human
uccagagaguggcuc

SEQ ID NO: 1607668 - RNA, 17 nt, Human
uccagagaguggcuccu

SEQ ID NO: 1607669 - RNA, 16 nt, Human
uccagagaguggcucc

SEQ ID NO: 1607670 - RNA, 13 nt, Human
uccagccccugga

SEQ ID NO: 1607671 - RNA, 14 nt, Human
uccagccccuggau

SEQ ID NO: 1607672 - RNA, 20 nt, Human
accuuuugagugccuuacac

SEQ ID NO: 1607673 - RNA, 17 nt, Human
accuuuugagugccuua

SEQ ID NO: 1607674 - RNA, 14 nt, Human
accuuuugagugcc

SEQ ID NO: 1607675 - RNA, 19 nt, Human
uccaccuucccaugcccug

SEQ ID NO: 1607676 - RNA, 18 nt, Human
uccaccuucccaugcccu

SEQ ID NO: 1607677 - RNA, 16 nt, Human
uccaccuucccaugcc

SEQ ID NO: 1607678 - RNA, 13 nt, Human
uccagacacaugu

SEQ ID NO: 1607679 - RNA, 22 nt, Human
uccagaauuucccaaagcagug

SEQ ID NO: 1607680 - RNA, 20 nt, Human
uccagaauuucccaaagcag

SEQ ID NO: 1607681 - RNA, 22 nt, Human
uccacugccuucgauacaccgg

SEQ ID NO: 1607682 - RNA, 15 nt, Human
uccacugccuucgau

SEQ ID NO: 1607683 - RNA, 13 nt, Human
uccacugccuucg

SEQ ID NO: 1607684 - RNA, 18 nt, Human
uccagacccggcugcgug

SEQ ID NO: 1607685 - RNA, 15 nt, Human
uccagacccggcugc

SEQ ID NO: 1607686 - RNA, 19 nt, Human
uccagacccggcugcgugg

SEQ ID NO: 1607687 - RNA, 17 nt, Human
accuggccucugcacuc

SEQ ID NO: 1607688 - RNA, 16 nt, Human
accuggccucugcacu

SEQ ID NO: 1607689 - RNA, 14 nt, Human
accuggccucugca

SEQ ID NO: 1607690 - RNA, 17 nt, Human
uccacccaggagccccg

SEQ ID NO: 1607691 - RNA, 15 nt, Human
uccacccaggagccc

SEQ ID NO: 1607692 - RNA, 14 nt, Human
uccacccaggagcc

SEQ ID NO: 1607693 - RNA, 12 nt, Human
uccacccaggag

SEQ ID NO: 1607694 - RNA, 19 nt, Human
uccacccaccucagccucc

SEQ ID NO: 1607695 - RNA, 18 nt, Human
uccacccaccucagccuc

SEQ ID NO: 1607696 - RNA, 20 nt, Human
accuuagacagucccugcca

SEQ ID NO: 1607697 - RNA, 19 nt, Human
accuuagacagucccugcc

SEQ ID NO: 1607698 - RNA, 18 nt, Human
accuuagacagucccugc

SEQ ID NO: 1607699 - RNA, 19 nt, Human
accuguuucugcagccacu

SEQ ID NO: 1607700 - RNA, 21 nt, Human
accuggucacaggacucugcc

SEQ ID NO: 1607701 - RNA, 20 nt, Human
accuggccucugcacucccc

SEQ ID NO: 1607702 - RNA, 18 nt, Human
accuggccucugcacucc

SEQ ID NO: 1607703 - RNA, 23 nt, Human
accuggccucugcacuccccugc

SEQ ID NO: 1607704 - RNA, 21 nt, Human
uccaagcuggucccacucagu

SEQ ID NO: 1607705 - RNA, 18 nt, Human
uccaaucccaccaacccu

SEQ ID NO: 1607706 - RNA, 20 nt, Human
uccaagcuggucccacucag

SEQ ID NO: 1607707 - RNA, 12 nt, Human
uccaagaagccc

SEQ ID NO: 1607708 - RNA, 15 nt, Human
accugccaggaagcc

SEQ ID NO: 1607709 - RNA, 14 nt, Human
accugccaggaagc

SEQ ID NO: 1607710 - RNA, 12 nt, Human
accugccaggaa

SEQ ID NO: 1607711 - RNA, 14 nt, Human
uccaacccucauca

SEQ ID NO: 1607712 - RNA, 17 nt, Human
uccaacccucaucacca

SEQ ID NO: 1607713 - RNA, 16 nt, Human
uccaacccucaucacc

SEQ ID NO: 1607714 - RNA, 23 nt, Human
uccaacccucaucaccaacgucu

SEQ ID NO: 1607715 - RNA, 12 nt, Human
ucccuuuuccuu

SEQ ID NO: 1607716 - RNA, 16 nt, Human
uccuagaaauucccca

SEQ ID NO: 1607717 - RNA, 14 nt, Human
uccuacuuccccuu

SEQ ID NO: 1607718 - RNA, 17 nt, Human
uccggucccugucccag

SEQ ID NO: 1607719 - RNA, 19 nt, Human
uccuaaauauauuuuaaga

SEQ ID NO: 1607720 - RNA, 12 nt, Human
ucccugucccag

SEQ ID NO: 1607721 - RNA, 15 nt, Human
ucccugguggcagcu

SEQ ID NO: 1607722 - RNA, 21 nt, Human
acuccugcaggcagccaggcc

SEQ ID NO: 1607723 - RNA, 17 nt, Human
ucccuuacgugaguccu

SEQ ID NO: 1607724 - RNA, 21 nt, Human
acuccaaagaaauguaaggga

SEQ ID NO: 1607725 - RNA, 17 nt, Human
acuccagaauuucccaa

SEQ ID NO: 1607726 - RNA, 15 nt, Human
acuccagaauuuccc

SEQ ID NO: 1607727 - RNA, 18 nt, Human
acuccaaagaaauguaag

SEQ ID NO: 1607728 - RNA, 15 nt, Human
acuccaaagaaaugu

SEQ ID NO: 1607729 - RNA, 14 nt, Human
acuccaaagaaaug

SEQ ID NO: 1607730 - RNA, 15 nt, Human
acucauugaccugag

SEQ ID NO: 1607731 - RNA, 14 nt, Human
acucauugaccuga

SEQ ID NO: 1607732 - RNA, 15 nt, Human
acucauucuucugua

SEQ ID NO: 1607733 - RNA, 13 nt, Human
acuccagccuggg

SEQ ID NO: 1607734 - RNA, 12 nt, Human
acuccagccugg

SEQ ID NO: 1607735 - RNA, 23 nt, Human
acuccagaauuucccaaagcagu

SEQ ID NO: 1607736 - RNA, 13 nt, Human
acuccagaccccu

SEQ ID NO: 1607737 - RNA, 19 nt, Human
acuccugcaggcagccagg

SEQ ID NO: 1607738 - RNA, 18 nt, Human
acuccugcaggcagccag

SEQ ID NO: 1607739 - RNA, 13 nt, Human
acuccucugucca

SEQ ID NO: 1607740 - RNA, 14 nt, Human
acuccucuguccag

SEQ ID NO: 1607741 - RNA, 11 nt, Human
ucccugagcag

SEQ ID NO: 1607742 - RNA, 17 nt, Human
ucccugaaggccccgcc

SEQ ID NO: 1607743 - RNA, 16 nt, Human
ucccugaaggccccgc

SEQ ID NO: 1607744 - RNA, 16 nt, Human
ucccugcaauaaaaug

SEQ ID NO: 1607745 - RNA, 15 nt, Human
ucccucccuccaccu

SEQ ID NO: 1607746 - RNA, 16 nt, Human
ucccucccuccaccuc

SEQ ID NO: 1607747 - RNA, 20 nt, Human
ucccucuuucccucccuucc

SEQ ID NO: 1607748 - RNA, 18 nt, Human
ucccucuuucccucccuu

SEQ ID NO: 1607749 - RNA, 17 nt, Human
ucccucccuccaccucc

SEQ ID NO: 1607750 - RNA, 21 nt, Human
ucccucuuucccucccuuccu

SEQ ID NO: 1607751 - RNA, 15 nt, Human
ucccugaaggccccg

SEQ ID NO: 1607752 - RNA, 11 nt, Human
ucccugaaggc

SEQ ID NO: 1607753 - RNA, 21 nt, Human
ucccuccaccucccugcaaua

SEQ ID NO: 1607754 - RNA, 23 nt, Human
ucccuccaccucccugcaauaaa

SEQ ID NO: 1607755 - RNA, 22 nt, Human
ucccggcugcccuuucugggca

SEQ ID NO: 1607756 - RNA, 18 nt, Human
ucccggcugcccuuucug

SEQ ID NO: 1607757 - RNA, 15 nt, Human
ucccggcugcccuuu

SEQ ID NO: 1607758 - RNA, 14 nt, Human
ucccggcugcccuu

SEQ ID NO: 1607759 - RNA, 13 nt, Human
ucccggcugcccu

SEQ ID NO: 1607760 - RNA, 13 nt, Human
ucccucccuccac

SEQ ID NO: 1607761 - RNA, 14 nt, Human
ucccucccuccacc

SEQ ID NO: 1607762 - RNA, 17 nt, Human
uccccucggagaagagc

SEQ ID NO: 1607763 - RNA, 16 nt, Human
uccccucggagaagag

SEQ ID NO: 1607764 - RNA, 17 nt, Human
ucccgaguagcugggac

SEQ ID NO: 1607765 - RNA, 16 nt, Human
ucccgaguagcuggga

SEQ ID NO: 1607766 - RNA, 18 nt, Human
ucccgaguagcugggacu

SEQ ID NO: 1607767 - RNA, 20 nt, Human
ucccgaguagcugggacuac

SEQ ID NO: 1607768 - RNA, 20 nt, Human
ucccgaguagcugagauuau

SEQ ID NO: 1607769 - RNA, 15 nt, Human
ucccgaguagcuggg

SEQ ID NO: 1607770 - RNA, 20 nt, Human
ucccgaauagcugggacuac

SEQ ID NO: 1607771 - RNA, 12 nt, Human
acucaccccagc

SEQ ID NO: 1607772 - RNA, 17 nt, Human
acuacucccccaggugg

SEQ ID NO: 1607773 - RNA, 21 nt, Human
acuacuagggaaaugccuuug

SEQ ID NO: 1607774 - RNA, 21 nt, Human
uccauccugaggcuccacuug

SEQ ID NO: 1607775 - RNA, 20 nt, Human
uccauccugaggcuccacuu

SEQ ID NO: 1607776 - RNA, 23 nt, Human
acgccagauucuuuccugaggcu

SEQ ID NO: 1607777 - RNA, 22 nt, Human
acgccagauucuuuccugaggc

SEQ ID NO: 1607778 - RNA, 16 nt, Human
uccaucuaaacugccc

SEQ ID NO: 1607779 - RNA, 18 nt, Human
uccaucuaaacugccccc

SEQ ID NO: 1607780 - RNA, 21 nt, Human
uccaugaagauguagaggaga

SEQ ID NO: 1607781 - RNA, 13 nt, Human
uccaugaagaugu

SEQ ID NO: 1607782 - RNA, 18 nt, Human
uccauuuaauaauuauau

SEQ ID NO: 1607783 - RNA, 18 nt, Human
ucccaaacccuucagugc

SEQ ID NO: 1607784 - RNA, 16 nt, Human
ucccaaagcagugcau

SEQ ID NO: 1607785 - RNA, 18 nt, Human
ucccaaagcagugcaugc

SEQ ID NO: 1607786 - RNA, 17 nt, Human
ucccaaagcagugcaug

SEQ ID NO: 1607787 - RNA, 21 nt, Human
ucccaaagcagugcaugcugu

SEQ ID NO: 1607788 - RNA, 14 nt, Human
ucccaaagugcugg

SEQ ID NO: 1607789 - RNA, 13 nt, Human
ucccaaagugcug

SEQ ID NO: 1607790 - RNA, 20 nt, Human
acgggaggguaaggcugugg

SEQ ID NO: 1607791 - RNA, 20 nt, Human
ucccaccccacacacgccag

SEQ ID NO: 1607792 - RNA, 15 nt, Human
ucccaccccacacac

SEQ ID NO: 1607793 - RNA, 16 nt, Human
ucccacaaaggagagc

SEQ ID NO: 1607794 - RNA, 23 nt, Human
acguggcugcuucaaggauccug

SEQ ID NO: 1607795 - RNA, 17 nt, Human
acgguuuuacugcagcu

SEQ ID NO: 1607796 - RNA, 15 nt, Human
acgguuuuacugcag

SEQ ID NO: 1607797 - RNA, 22 nt, Human
acguauaaaagccuguuuaaga

SEQ ID NO: 1607798 - RNA, 20 nt, Human
acgugggcauucaaauguau

SEQ ID NO: 1607799 - RNA, 17 nt, Human
acgugggcauucaaaug

SEQ ID NO: 1607800 - RNA, 22 nt, Human
ucccagucauuuaauaaaugug

SEQ ID NO: 1607801 - RNA, 14 nt, Human
ucccagucauuuaa

SEQ ID NO: 1607802 - RNA, 22 nt, Human
ucccauaugccugggcagaagg

SEQ ID NO: 1607803 - RNA, 15 nt, Human
ucccaucacccgcua

SEQ ID NO: 1607804 - RNA, 21 nt, Human
uccccaccgcagacaggacca

SEQ ID NO: 1607805 - RNA, 18 nt, Human
uccccaccgcagacagga

SEQ ID NO: 1607806 - RNA, 17 nt, Human
uccccaccgcagacagg

SEQ ID NO: 1607807 - RNA, 22 nt, Human
uccccaccgcagacaggaccag

SEQ ID NO: 1607808 - RNA, 12 nt, Human
uccccacccuga

SEQ ID NO: 1607809 - RNA, 17 nt, Human
uccccaugucucgacuc

SEQ ID NO: 1607810 - RNA, 15 nt, Human
acuacauucuguuaa

SEQ ID NO: 1607811 - RNA, 17 nt, Human
ucccagccagcaguuca

SEQ ID NO: 1607812 - RNA, 18 nt, Human
ucccagccagcaguucag

SEQ ID NO: 1607813 - RNA, 17 nt, Human
ucccagcugugcucugg

SEQ ID NO: 1607814 - RNA, 12 nt, Human
ucccagccccaa

SEQ ID NO: 1607815 - RNA, 15 nt, Human
acuacaguuuguuag

SEQ ID NO: 1607816 - RNA, 11 nt, Human
acuacauucug

SEQ ID NO: 1607817 - RNA, 12 nt, Human
acuacauucugu

SEQ ID NO: 1607818 - RNA, 13 nt, Human
acuacauucuguu

SEQ ID NO: 1607819 - RNA, 14 nt, Human
acuacauucuguua

SEQ ID NO: 1607820 - RNA, 12 nt, Human
acuaaccacgcu

SEQ ID NO: 1607821 - RNA, 11 nt, Human
acuacaggcac

SEQ ID NO: 1607822 - RNA, 13 nt, Human
acuacaguuuguu

SEQ ID NO: 1607823 - RNA, 14 nt, Human
acuacaguuuguua

SEQ ID NO: 1607824 - RNA, 15 nt, Human
acuacaggcacccac

SEQ ID NO: 1607825 - RNA, 16 nt, Human
ucuacauacuauggaa

SEQ ID NO: 1607826 - RNA, 23 nt, Human
ucuaaguaaaaccacagcaguug

SEQ ID NO: 1607827 - RNA, 22 nt, Human
ucuaaguaaaaccacagcaguu

SEQ ID NO: 1607828 - RNA, 21 nt, Human
ucuaaguaaaaccacagcagu

SEQ ID NO: 1607829 - RNA, 20 nt, Human
ucuaaagccauuguaguccu

SEQ ID NO: 1607830 - RNA, 14 nt, Human
ucuaaagcugccag

SEQ ID NO: 1607831 - RNA, 13 nt, Human
ucuaaagcugcca

SEQ ID NO: 1607832 - RNA, 15 nt, Human
ucuaaagcugccagc

SEQ ID NO: 1607833 - RNA, 16 nt, Human
ucuaaagcugccagcc

SEQ ID NO: 1607834 - RNA, 14 nt, Human
acuguucucugccc

SEQ ID NO: 1607835 - RNA, 20 nt, Human
acuguucucugcccuccaag

SEQ ID NO: 1607836 - RNA, 15 nt, Human
acuguucucugcccu

SEQ ID NO: 1607837 - RNA, 21 nt, Human
acuguucucugcccuccaaga

SEQ ID NO: 1607838 - RNA, 14 nt, Human
acuucagcucuguu

SEQ ID NO: 1607839 - RNA, 16 nt, Human
acuuagaaauugcauu

SEQ ID NO: 1607840 - RNA, 13 nt, Human
acuuaaucuaaau

SEQ ID NO: 1607841 - RNA, 15 nt, Human
acuuaaucuaaaugg

SEQ ID NO: 1607842 - RNA, 16 nt, Human
acuuaaucuaaaugga

SEQ ID NO: 1607843 - RNA, 18 nt, Human
acuguugcccaggcuggc

SEQ ID NO: 1607844 - RNA, 17 nt, Human
acuguugcccaggcugg

SEQ ID NO: 1607845 - RNA, 14 nt, Human
acuguugcccaggc

SEQ ID NO: 1607846 - RNA, 13 nt, Human
acuguugcccagg

SEQ ID NO: 1607847 - RNA, 12 nt, Human
acuguugcccag

SEQ ID NO: 1607848 - RNA, 17 nt, Human
acuuaaauaaugugaaa

SEQ ID NO: 1607849 - RNA, 18 nt, Human
acuuaaauaaugugaaac

SEQ ID NO: 1607850 - RNA, 16 nt, Human
acuuaaauaaugugaa

SEQ ID NO: 1607851 - RNA, 22 nt, Human
ucggguuuuauuguuuaaaauc

SEQ ID NO: 1607852 - RNA, 12 nt, Human
ucgggcaugaca

SEQ ID NO: 1607853 - RNA, 11 nt, Human
ucgggcaugac

SEQ ID NO: 1607854 - RNA, 21 nt, Human
ucgggaggucgaggcaggagg

SEQ ID NO: 1607855 - RNA, 19 nt, Human
ucgggaggucgaggcagga

SEQ ID NO: 1607856 - RNA, 17 nt, Human
ucgggaggucgaggcag

SEQ ID NO: 1607857 - RNA, 18 nt, Human
ucggcucacugcauccuc

SEQ ID NO: 1607858 - RNA, 13 nt, Human
ucguaaaauuaag

SEQ ID NO: 1607859 - RNA, 16 nt, Human
ucguaaaauuaagaaa

SEQ ID NO: 1607860 - RNA, 22 nt, Human
ucguuuucaaaauuguuacaaa

SEQ ID NO: 1607861 - RNA, 17 nt, Human
ucguuugaaucacagua

SEQ ID NO: 1607862 - RNA, 22 nt, Human
acugucagcuccccucggagaa

SEQ ID NO: 1607863 - RNA, 17 nt, Human
acuguccuacccacccu

SEQ ID NO: 1607864 - RNA, 23 nt, Human
acuguccuacccacccuccuuuc

SEQ ID NO: 1607865 - RNA, 18 nt, Human
acuguccuacccacccuc

SEQ ID NO: 1607866 - RNA, 18 nt, Human
acugggacaggggagaac

SEQ ID NO: 1607867 - RNA, 16 nt, Human
acugggagaaaugaaa

SEQ ID NO: 1607868 - RNA, 21 nt, Human
acugucagcuccccucggaga

SEQ ID NO: 1607869 - RNA, 17 nt, Human
acugggagaaaugaaaa

SEQ ID NO: 1607870 - RNA, 18 nt, Human
acuguggguagacacaca

SEQ ID NO: 1607871 - RNA, 15 nt, Human
acuguggugacuuug

SEQ ID NO: 1607872 - RNA, 14 nt, Human
acuguggugacuuu

SEQ ID NO: 1607873 - RNA, 12 nt, Human
acuguggugacu

SEQ ID NO: 1607874 - RNA, 21 nt, Human
acuguggugacuuuggauaau

SEQ ID NO: 1607875 - RNA, 20 nt, Human
acuguggugacuuuggauaa

SEQ ID NO: 1607876 - RNA, 18 nt, Human
acuguggugacuuuggau

SEQ ID NO: 1607877 - RNA, 21 nt, Human
acugugugcucaggagcccug

SEQ ID NO: 1607878 - RNA, 20 nt, Human
acugugugcucaggagcccu

SEQ ID NO: 1607879 - RNA, 19 nt, Human
acugugugcucaggagccc

SEQ ID NO: 1607880 - RNA, 15 nt, Human
acugugugcucagga

SEQ ID NO: 1607881 - RNA, 12 nt, Human
acugugugcuca

SEQ ID NO: 1607882 - RNA, 14 nt, Human
acugcauuauauuu

SEQ ID NO: 1607883 - RNA, 15 nt, Human
acugcauuauauuua

SEQ ID NO: 1607884 - RNA, 21 nt, Human
acugccuauuuuaauaaacac

SEQ ID NO: 1607885 - RNA, 16 nt, Human
acugccuauuuuaaua

SEQ ID NO: 1607886 - RNA, 15 nt, Human
acugccucuuccucc

SEQ ID NO: 1607887 - RNA, 14 nt, Human
acugccucuuccuc

SEQ ID NO: 1607888 - RNA, 22 nt, Human
uccuagaaauuccccacccuga

SEQ ID NO: 1607889 - RNA, 21 nt, Human
uccuagaaauuccccacccug

SEQ ID NO: 1607890 - RNA, 16 nt, Human
acugcauaugaaagga

SEQ ID NO: 1607891 - RNA, 15 nt, Human
acugcauguuuguga

SEQ ID NO: 1607892 - RNA, 16 nt, Human
acugcauguuugugau

SEQ ID NO: 1607893 - RNA, 23 nt, Human
acugcauccuccgccucccgggu

SEQ ID NO: 1607894 - RNA, 22 nt, Human
acugcaucaagaugugacaugu

SEQ ID NO: 1607895 - RNA, 20 nt, Human
acugcaucaagaugugacau

SEQ ID NO: 1607896 - RNA, 20 nt, Human
acugcauccuccgccucccg

SEQ ID NO: 1607897 - RNA, 17 nt, Human
acugcauccuccgccuc

SEQ ID NO: 1607898 - RNA, 13 nt, Human
acuggcacaguuu

SEQ ID NO: 1607899 - RNA, 22 nt, Human
acuggauuaaacuuaaucuaaa

SEQ ID NO: 1607900 - RNA, 15 nt, Human
acuggauuaaacuua

SEQ ID NO: 1607901 - RNA, 20 nt, Human
acuggcacaguuuucugaga

SEQ ID NO: 1607902 - RNA, 19 nt, Human
acuggcacaguuuucugag

SEQ ID NO: 1607903 - RNA, 21 nt, Human
acuggcacaguuuucugagaa

SEQ ID NO: 1607904 - RNA, 14 nt, Human
acugcuuuuggucu

SEQ ID NO: 1607905 - RNA, 20 nt, Human
acugcuuaacuucacauauu

SEQ ID NO: 1607906 - RNA, 17 nt, Human
acugcuuccagugaggc

SEQ ID NO: 1607907 - RNA, 20 nt, Human
acugccuucucaacuccaaa

SEQ ID NO: 1607908 - RNA, 19 nt, Human
acugccuucucaacuccaa

SEQ ID NO: 1607909 - RNA, 13 nt, Human
acugccuucucaa

SEQ ID NO: 1607910 - RNA, 18 nt, Human
acugcuuaacuucacaua

SEQ ID NO: 1607911 - RNA, 15 nt, Human
acugcuggcugccuu

SEQ ID NO: 1607912 - RNA, 14 nt, Human
acugcuggcugccu

SEQ ID NO: 1607913 - RNA, 16 nt, Human
ucgcgacaaugcaaac

SEQ ID NO: 1607914 - RNA, 13 nt, Human
ucgaggacaggga

SEQ ID NO: 1607915 - RNA, 19 nt, Human
ucgcgacaaugcaaaccau

SEQ ID NO: 1607916 - RNA, 18 nt, Human
ucgagcaugccuggaugg

SEQ ID NO: 1607917 - RNA, 16 nt, Human
ucgagcaugccuggau

SEQ ID NO: 1607918 - RNA, 18 nt, Human
ucgcuauugucaccaggg

SEQ ID NO: 1607919 - RNA, 18 nt, Human
ucgagaaacagccugugu

SEQ ID NO: 1607920 - RNA, 23 nt, Human
uccuuuagcgcccaguugggugg

SEQ ID NO: 1607921 - RNA, 22 nt, Human
uccuuuagcgcccaguugggug

SEQ ID NO: 1607922 - RNA, 19 nt, Human
uccuuuagcgcccaguugg

SEQ ID NO: 1607923 - RNA, 15 nt, Human
uccuuuagcgcccag

SEQ ID NO: 1607924 - RNA, 14 nt, Human
uccuuguguuacua

SEQ ID NO: 1607925 - RNA, 23 nt, Human
uccuuguguuacuaaguuuuuau

SEQ ID NO: 1607926 - RNA, 17 nt, Human
uccuucagugccuuaug

SEQ ID NO: 1607927 - RNA, 16 nt, Human
uccuucagugccuuau

SEQ ID NO: 1607928 - RNA, 20 nt, Human
uccuucagugccuuauggaa

SEQ ID NO: 1607929 - RNA, 15 nt, Human
uccuucagugccuua

SEQ ID NO: 1607930 - RNA, 16 nt, Human
acuggccucugcugau

SEQ ID NO: 1607931 - RNA, 14 nt, Human
acuggccucugcug

SEQ ID NO: 1607932 - RNA, 23 nt, Human
ucugagacucgcgacaaugcaaa

SEQ ID NO: 1607933 - RNA, 19 nt, Human
ucugcacuccccugcuggg

SEQ ID NO: 1607934 - RNA, 18 nt, Human
ucugcacuccccugcugg

SEQ ID NO: 1607935 - RNA, 18 nt, Human
ucugauucccaagcucug

SEQ ID NO: 1607936 - RNA, 13 nt, Human
ucugauacagaaa

SEQ ID NO: 1607937 - RNA, 23 nt, Human
ucugaugcaagcaagaaacacug

SEQ ID NO: 1607938 - RNA, 22 nt, Human
ucugcacuccccugcugggugu

SEQ ID NO: 1607939 - RNA, 20 nt, Human
ucugcacuccccugcugggu

SEQ ID NO: 1607940 - RNA, 17 nt, Human
ucugcaggucccuaaua

SEQ ID NO: 1607941 - RNA, 16 nt, Human
ucugcaggucccuaau

SEQ ID NO: 1607942 - RNA, 15 nt, Human
ucugcaggucccuaa

SEQ ID NO: 1607943 - RNA, 17 nt, Human
agaaauuuauaaacuuu

SEQ ID NO: 1607944 - RNA, 16 nt, Human
agaaauuuauaaacuu

SEQ ID NO: 1607945 - RNA, 22 nt, Human
agaaauuaugugccagauuuau

SEQ ID NO: 1607946 - RNA, 21 nt, Human
agaaauuaugugccagauuua

SEQ ID NO: 1607947 - RNA, 13 nt, Human
agaaauuaugugc

SEQ ID NO: 1607948 - RNA, 18 nt, Human
ucugcaggucccuaauaa

SEQ ID NO: 1607949 - RNA, 20 nt, Human
agaaauaucugaaaauguau

SEQ ID NO: 1607950 - RNA, 19 nt, Human
agaaauaucugaaaaugua

SEQ ID NO: 1607951 - RNA, 14 nt, Human
agaaauauaauuga

SEQ ID NO: 1607952 - RNA, 17 nt, Human
agaaaugaaaaaauaua

SEQ ID NO: 1607953 - RNA, 15 nt, Human
agaaaucuaaaaaac

SEQ ID NO: 1607954 - RNA, 12 nt, Human
agaaaucuaaaa

SEQ ID NO: 1607955 - RNA, 14 nt, Human
agaaagaaaaucag

SEQ ID NO: 1607956 - RNA, 12 nt, Human
ucugaagaagau

SEQ ID NO: 1607957 - RNA, 14 nt, Human
agaaaugaaagcag

SEQ ID NO: 1607958 - RNA, 23 nt, Human
agaaaugaaaaaauauauaucaa

SEQ ID NO: 1607959 - RNA, 18 nt, Human
agaaaugaaaaaauauau

SEQ ID NO: 1607960 - RNA, 12 nt, Human
ucugacacacag

SEQ ID NO: 1607961 - RNA, 16 nt, Human
ucugacaacagacuuc

SEQ ID NO: 1607962 - RNA, 15 nt, Human
ucugacaacagacuu

SEQ ID NO: 1607963 - RNA, 19 nt, Human
ucugaagucagaucugccu

SEQ ID NO: 1607964 - RNA, 16 nt, Human
ucugaagucacugcac

SEQ ID NO: 1607965 - RNA, 15 nt, Human
ucugaagucacugca

SEQ ID NO: 1607966 - RNA, 18 nt, Human
ucugaagucacugcacag

SEQ ID NO: 1607967 - RNA, 15 nt, Human
ucugaagucagaucu

SEQ ID NO: 1607968 - RNA, 18 nt, Human
ucucuugagccugggagg

SEQ ID NO: 1607969 - RNA, 16 nt, Human
ucucuugauucauaau

SEQ ID NO: 1607970 - RNA, 14 nt, Human
ucucuugauucaua

SEQ ID NO: 1607971 - RNA, 23 nt, Human
ucucuggccuucggccuccaucc

SEQ ID NO: 1607972 - RNA, 22 nt, Human
ucucuggccuucggccuccauc

SEQ ID NO: 1607973 - RNA, 21 nt, Human
ucucuggccuucggccuccau

SEQ ID NO: 1607974 - RNA, 21 nt, Human
ucucuuuaaugucacaggcag

SEQ ID NO: 1607975 - RNA, 20 nt, Human
ucucuuuaaugucacaggca

SEQ ID NO: 1607976 - RNA, 13 nt, Human
agaaaaagaaaaa

SEQ ID NO: 1607977 - RNA, 16 nt, Human
ucucuugguccugcug

SEQ ID NO: 1607978 - RNA, 17 nt, Human
agaaaaaggaugcacag

SEQ ID NO: 1607979 - RNA, 18 nt, Human
agaaaaaggaugcacaga

SEQ ID NO: 1607980 - RNA, 21 nt, Human
agaaaacuuguauuaugugug

SEQ ID NO: 1607981 - RNA, 12 nt, Human
ucucuggccuuc

SEQ ID NO: 1607982 - RNA, 19 nt, Human
ucucuggaauuugaaacac

SEQ ID NO: 1607983 - RNA, 15 nt, Human
ucucuggaauuugaa

SEQ ID NO: 1607984 - RNA, 17 nt, Human
ucucugcccuccaagac

SEQ ID NO: 1607985 - RNA, 16 nt, Human
ucucugcccuccaaga

SEQ ID NO: 1607986 - RNA, 15 nt, Human
ucucugcccuccaag

SEQ ID NO: 1607987 - RNA, 11 nt, Human
ucucugcccuc

SEQ ID NO: 1607988 - RNA, 14 nt, Human
ucucuccuguaccu

SEQ ID NO: 1607989 - RNA, 16 nt, Human
ucucuccuguaccucu

SEQ ID NO: 1607990 - RNA, 17 nt, Human
ucucuccuguaccucuu

SEQ ID NO: 1607991 - RNA, 19 nt, Human
ucucuccagccccuggaug

SEQ ID NO: 1607992 - RNA, 18 nt, Human
ucucuccagccccuggau

SEQ ID NO: 1607993 - RNA, 17 nt, Human
ucucuccagccccugga

SEQ ID NO: 1607994 - RNA, 15 nt, Human
acuuugaccucugca

SEQ ID NO: 1607995 - RNA, 16 nt, Human
acuuugaccucugcag

SEQ ID NO: 1607996 - RNA, 18 nt, Human
acuuugaccucugcagca

SEQ ID NO: 1607997 - RNA, 14 nt, Human
acuuucugaaauaa

SEQ ID NO: 1607998 - RNA, 15 nt, Human
ucucucacuccuuga

SEQ ID NO: 1607999 - RNA, 13 nt, Human
ucucucacuccuu

SEQ ID NO: 1608000 - RNA, 21 nt, Human
ucucucacuuguuuuauuuaa

SEQ ID NO: 1608001 - RNA, 17 nt, Human
ucucucacuuguuuuau

SEQ ID NO: 1608002 - RNA, 21 nt, Human
acuugaacccgggaggcagag

SEQ ID NO: 1608003 - RNA, 19 nt, Human
acuugagcccagagugaac

SEQ ID NO: 1608004 - RNA, 20 nt, Human
acuugaacccgggaggcaga

SEQ ID NO: 1608005 - RNA, 19 nt, Human
acuugaacccgggaggcag

SEQ ID NO: 1608006 - RNA, 21 nt, Human
acuugaacccauauuuguaca

SEQ ID NO: 1608007 - RNA, 16 nt, Human
acuucuccacccugcu

SEQ ID NO: 1608008 - RNA, 15 nt, Human
acuucuccacccugc

SEQ ID NO: 1608009 - RNA, 18 nt, Human
acuucuccacccugcucu

SEQ ID NO: 1608010 - RNA, 19 nt, Human
acuugaaauuugaauuuug

SEQ ID NO: 1608011 - RNA, 20 nt, Human
acuugaaauuugaauuuugu

SEQ ID NO: 1608012 - RNA, 16 nt, Human
acuugucaauaaaauc

SEQ ID NO: 1608013 - RNA, 18 nt, Human
acuuguggacacagcucu

SEQ ID NO: 1608014 - RNA, 17 nt, Human
acuuguggacacagcuc

SEQ ID NO: 1608015 - RNA, 16 nt, Human
acuuguggacacagcu

SEQ ID NO: 1608016 - RNA, 14 nt, Human
acuugcucuugaug

SEQ ID NO: 1608017 - RNA, 23 nt, Human
acuucuaaguaaaaccacagcag

SEQ ID NO: 1608018 - RNA, 14 nt, Human
acuucuccacccug

SEQ ID NO: 1608019 - RNA, 12 nt, Human
ucucacucuguc

SEQ ID NO: 1608020 - RNA, 16 nt, Human
ucucacucugucgccc

SEQ ID NO: 1608021 - RNA, 13 nt, Human
ucucacuccuuga

SEQ ID NO: 1608022 - RNA, 16 nt, Human
ucucacuauguugccc

SEQ ID NO: 1608023 - RNA, 15 nt, Human
acuuccugugacuuc

SEQ ID NO: 1608024 - RNA, 16 nt, Human
acuucagcugacuuuu

SEQ ID NO: 1608025 - RNA, 11 nt, Human
acuucagcuga

SEQ ID NO: 1608026 - RNA, 16 nt, Human
acuucaggcucuucuc

SEQ ID NO: 1608027 - RNA, 14 nt, Human
acuucaggcucuuc

SEQ ID NO: 1608028 - RNA, 11 nt, Human
ucucacuccuu

SEQ ID NO: 1608029 - RNA, 21 nt, Human
ucucacagcuccaagaauuuc

SEQ ID NO: 1608030 - RNA, 16 nt, Human
acuuguguuuugcaag

SEQ ID NO: 1608031 - RNA, 15 nt, Human
acuuguuagaucuag

SEQ ID NO: 1608032 - RNA, 14 nt, Human
acuuguuagaucua

SEQ ID NO: 1608033 - RNA, 23 nt, Human
acuuguuagaucuaguucacucu

SEQ ID NO: 1608034 - RNA, 21 nt, Human
ucuccuccuuuucacaguucu

SEQ ID NO: 1608035 - RNA, 17 nt, Human
acuuucuagccagagga

SEQ ID NO: 1608036 - RNA, 14 nt, Human
acuuugaccucugc

SEQ ID NO: 1608037 - RNA, 16 nt, Human
ucuccauguuugaugu

SEQ ID NO: 1608038 - RNA, 12 nt, Human
ucucaggaaauc

SEQ ID NO: 1608039 - RNA, 13 nt, Human
ucucagggccugg

SEQ ID NO: 1608040 - RNA, 12 nt, Human
ucucagggccug

SEQ ID NO: 1608041 - RNA, 15 nt, Human
ucucagggccugguc

SEQ ID NO: 1608042 - RNA, 14 nt, Human
ucucagggccuggu

SEQ ID NO: 1608043 - RNA, 19 nt, Human
ucucagggccuggucguuu

SEQ ID NO: 1608044 - RNA, 16 nt, Human
ucuccaggcuguaucc

SEQ ID NO: 1608045 - RNA, 15 nt, Human
ucuccaagcaggaca

SEQ ID NO: 1608046 - RNA, 17 nt, Human
ucuccaaaauaaaacuu

SEQ ID NO: 1608047 - RNA, 19 nt, Human
ucuccaaaauaaaacuuuu

SEQ ID NO: 1608048 - RNA, 22 nt, Human
ucuccaaaauaaaacuuuuuaa

SEQ ID NO: 1608049 - RNA, 13 nt, Human
agacacaagccuu

SEQ ID NO: 1608050 - RNA, 14 nt, Human
agacacaagccuuc

SEQ ID NO: 1608051 - RNA, 12 nt, Human
agaauucuguau

SEQ ID NO: 1608052 - RNA, 17 nt, Human
agaauucucuuauccaa

SEQ ID NO: 1608053 - RNA, 19 nt, Human
agaauucucuaguuugauu

SEQ ID NO: 1608054 - RNA, 17 nt, Human
agacacacugaagaagc

SEQ ID NO: 1608055 - RNA, 17 nt, Human
agacacaggcccggcuc

SEQ ID NO: 1608056 - RNA, 16 nt, Human
agacacacugaagaag

SEQ ID NO: 1608057 - RNA, 22 nt, Human
agacacaggcccggcuccaggc

SEQ ID NO: 1608058 - RNA, 21 nt, Human
agacacaggcccggcuccagg

SEQ ID NO: 1608059 - RNA, 20 nt, Human
agacacaggcccggcuccag

SEQ ID NO: 1608060 - RNA, 19 nt, Human
agacacaggcccggcucca

SEQ ID NO: 1608061 - RNA, 24 nt, Human
agacacauguccaagaagcccagg

SEQ ID NO: 1608062 - RNA, 22 nt, Human
agacaccuugacagggcacacc

SEQ ID NO: 1608063 - RNA, 22 nt, Human
agacacauguccaagaagccca

SEQ ID NO: 1608064 - RNA, 21 nt, Human
agacacauguccaagaagccc

SEQ ID NO: 1608065 - RNA, 23 nt, Human
agacacaggcccggcuccaggcu

SEQ ID NO: 1608066 - RNA, 14 nt, Human
agacagcugccugg

SEQ ID NO: 1608067 - RNA, 13 nt, Human
agacagcugccug

SEQ ID NO: 1608068 - RNA, 12 nt, Human
agacagaaaaaa

SEQ ID NO: 1608069 - RNA, 14 nt, Human
ucuuaauuaaaaga

SEQ ID NO: 1608070 - RNA, 12 nt, Human
agacagucccug

SEQ ID NO: 1608071 - RNA, 16 nt, Human
agacagcugccuggga

SEQ ID NO: 1608072 - RNA, 15 nt, Human
agacagcugccuggg

SEQ ID NO: 1608073 - RNA, 14 nt, Human
agacagucccugcc

SEQ ID NO: 1608074 - RNA, 13 nt, Human
agacagucccugc

SEQ ID NO: 1608075 - RNA, 23 nt, Human
ucuuagaugcaguucugaagaag

SEQ ID NO: 1608076 - RNA, 12 nt, Human
ucuuagauguau

SEQ ID NO: 1608077 - RNA, 14 nt, Human
ucuuagauguauau

SEQ ID NO: 1608078 - RNA, 19 nt, Human
ucuuacugucuuuuuucua

SEQ ID NO: 1608079 - RNA, 20 nt, Human
agaauucucagaaucucaaa

SEQ ID NO: 1608080 - RNA, 20 nt, Human
agaauuauaauuaguuccuc

SEQ ID NO: 1608081 - RNA, 18 nt, Human
agaauucucuaguuugau

SEQ ID NO: 1608082 - RNA, 14 nt, Human
agaauucucuaguu

SEQ ID NO: 1608083 - RNA, 23 nt, Human
ucuggguuccuuccucugagccu

SEQ ID NO: 1608084 - RNA, 22 nt, Human
ucuggguuccuuccucugagcc

SEQ ID NO: 1608085 - RNA, 19 nt, Human
agaauuaguggcacuugcu

SEQ ID NO: 1608086 - RNA, 21 nt, Human
agaauguguuuaaacuugguu

SEQ ID NO: 1608087 - RNA, 23 nt, Human
agaaccccaggguccuguagccc

SEQ ID NO: 1608088 - RNA, 23 nt, Human
ucuguuuagauaauacaccacua

SEQ ID NO: 1608089 - RNA, 16 nt, Human
ucuguuuagauaauac

SEQ ID NO: 1608090 - RNA, 19 nt, Human
ucuguuuagauaauacacc

SEQ ID NO: 1608091 - RNA, 19 nt, Human
ucuguucugcacacagcac

SEQ ID NO: 1608092 - RNA, 18 nt, Human
ucuguucugcacacagca

SEQ ID NO: 1608093 - RNA, 17 nt, Human
ucuguucugcacacagc

SEQ ID NO: 1608094 - RNA, 19 nt, Human
ucugugaacuugaaauuug

SEQ ID NO: 1608095 - RNA, 22 nt, Human
ucugugaacuugaaauuugaau

SEQ ID NO: 1608096 - RNA, 13 nt, Human
ucuguacuuuuug

SEQ ID NO: 1608097 - RNA, 17 nt, Human
ucuguacuuuuuggcau

SEQ ID NO: 1608098 - RNA, 14 nt, Human
ucuguacuuuuugg

SEQ ID NO: 1608099 - RNA, 24 nt, Human
agagacagaaagcagaacagugau

SEQ ID NO: 1608100 - RNA, 15 nt, Human
agagacacaagccuu

SEQ ID NO: 1608101 - RNA, 22 nt, Human
agagaaaaaauauuuuccugcc

SEQ ID NO: 1608102 - RNA, 19 nt, Human
agacuuuuuuuaaauagua

SEQ ID NO: 1608103 - RNA, 18 nt, Human
agacuuguaugaaagaug

SEQ ID NO: 1608104 - RNA, 16 nt, Human
agacuguacaaaguag

SEQ ID NO: 1608105 - RNA, 15 nt, Human
agacuguacaaagua

SEQ ID NO: 1608106 - RNA, 19 nt, Human
agacuggugacugauucuu

SEQ ID NO: 1608107 - RNA, 17 nt, Human
agacuggugacugauuc

SEQ ID NO: 1608108 - RNA, 16 nt, Human
agacuggugacugauu

SEQ ID NO: 1608109 - RNA, 20 nt, Human
agacucgcgacaaugcaaac

SEQ ID NO: 1608110 - RNA, 14 nt, Human
agacuggugacuga

SEQ ID NO: 1608111 - RNA, 13 nt, Human
agacuggugacug

SEQ ID NO: 1608112 - RNA, 12 nt, Human
agacuggugacu

SEQ ID NO: 1608113 - RNA, 14 nt, Human
agacugucucaaga

SEQ ID NO: 1608114 - RNA, 19 nt, Human
agacucgcgacaaugcaaa

SEQ ID NO: 1608115 - RNA, 18 nt, Human
agacucgcgacaaugcaa

SEQ ID NO: 1608116 - RNA, 17 nt, Human
agacucgcgacaaugca

SEQ ID NO: 1608117 - RNA, 15 nt, Human
agacucgcgacaaug

SEQ ID NO: 1608118 - RNA, 17 nt, Human
ucuuucuuccucugcug

SEQ ID NO: 1608119 - RNA, 16 nt, Human
ucuuucuuccucugcu

SEQ ID NO: 1608120 - RNA, 15 nt, Human
ucuuucuuccucugc

SEQ ID NO: 1608121 - RNA, 13 nt, Human
ucuuucugcuuug

SEQ ID NO: 1608122 - RNA, 20 nt, Human
ucuuuauaauucuacuuuga

SEQ ID NO: 1608123 - RNA, 18 nt, Human
ucuuucuggcuaugcauu

SEQ ID NO: 1608124 - RNA, 19 nt, Human
ucuuucuggcuaugcauuu

SEQ ID NO: 1608125 - RNA, 14 nt, Human
ucuuucuuccucug

SEQ ID NO: 1608126 - RNA, 14 nt, Human
ucuugguuuguaaa

SEQ ID NO: 1608127 - RNA, 20 nt, Human
ucuuuaaugucacaggcagg

SEQ ID NO: 1608128 - RNA, 16 nt, Human
ucuugguuuguaaauu

SEQ ID NO: 1608129 - RNA, 22 nt, Human
ucuuuaaugucacaggcagguc

SEQ ID NO: 1608130 - RNA, 14 nt, Human
ucuuuaauuuuaca

SEQ ID NO: 1608131 - RNA, 15 nt, Human
ucuuauuucauuucu

SEQ ID NO: 1608132 - RNA, 16 nt, Human
ucuuauuucauuucuu

SEQ ID NO: 1608133 - RNA, 22 nt, Human
ucuucugcuucagccucccgag

SEQ ID NO: 1608134 - RNA, 22 nt, Human
ucuucuguacgucugacaggca

SEQ ID NO: 1608135 - RNA, 21 nt, Human
ucuucuguacgucugacaggc

SEQ ID NO: 1608136 - RNA, 14 nt, Human
agacauagaauuaa

SEQ ID NO: 1608137 - RNA, 23 nt, Human
agacauacuaaccagcagaaaug

SEQ ID NO: 1608138 - RNA, 23 nt, Human
ucuucuguacgucugacaggcaa

SEQ ID NO: 1608139 - RNA, 20 nt, Human
ucuugagccuugaacuuuga

SEQ ID NO: 1608140 - RNA, 18 nt, Human
ucuugagccuugaacuuu

SEQ ID NO: 1608141 - RNA, 19 nt, Human
ucuugagccuugaacuuug

SEQ ID NO: 1608142 - RNA, 15 nt, Human
agacucauucuucug

SEQ ID NO: 1608143 - RNA, 17 nt, Human
ucuugagccuugaacuu

SEQ ID NO: 1608144 - RNA, 21 nt, Human
agacucaguggggaggggcug

SEQ ID NO: 1608145 - RNA, 16 nt, Human
agaccugccccuccuc

SEQ ID NO: 1608146 - RNA, 23 nt, Human
agaccugccccuccucucugccc

SEQ ID NO: 1608147 - RNA, 22 nt, Human
agaccugccccuccucucugcc

SEQ ID NO: 1608148 - RNA, 14 nt, Human
agacccggcugcgu

SEQ ID NO: 1608149 - RNA, 21 nt, Human
agaccccuggcuuuucacugc

SEQ ID NO: 1608150 - RNA, 15 nt, Human
agaccccuggcuuuu

SEQ ID NO: 1608151 - RNA, 12 nt, Human
agagcagagacc

SEQ ID NO: 1608152 - RNA, 21 nt, Human
agagcaccuuagacagucccu

SEQ ID NO: 1608153 - RNA, 21 nt, Human
ucuuuggacccugaggcccag

SEQ ID NO: 1608154 - RNA, 17 nt, Human
ucuuuggacccugaggc

SEQ ID NO: 1608155 - RNA, 22 nt, Human
agagauuuuuuuguuguuuguu

SEQ ID NO: 1608156 - RNA, 23 nt, Human
agagauuuuuuuguuguuuguuu

SEQ ID NO: 1608157 - RNA, 18 nt, Human
agagcagagaccaucccu

SEQ ID NO: 1608158 - RNA, 17 nt, Human
agagcagagaccauccc

SEQ ID NO: 1608159 - RNA, 20 nt, Human
agagcagagaccaucccuga

SEQ ID NO: 1608160 - RNA, 21 nt, Human
agagccuugcggaagguucua

SEQ ID NO: 1608161 - RNA, 11 nt, Human
agagccuugcg

SEQ ID NO: 1608162 - RNA, 23 nt, Human
ugaaauaagccagacaucaacag

SEQ ID NO: 1608163 - RNA, 20 nt, Human
ugaaauaagccagacaucaa

SEQ ID NO: 1608164 - RNA, 18 nt, Human
ugaaauaagccagacauc

SEQ ID NO: 1608165 - RNA, 17 nt, Human
ugaaauaagccagacau

SEQ ID NO: 1608166 - RNA, 15 nt, Human
agagcugcccucucc

SEQ ID NO: 1608167 - RNA, 13 nt, Human
agagcugcccucu

SEQ ID NO: 1608168 - RNA, 14 nt, Human
agagcugcccucuc

SEQ ID NO: 1608169 - RNA, 18 nt, Human
agagcugccaccugccug

SEQ ID NO: 1608170 - RNA, 18 nt, Human
ugaaauauuauguuaaaa

SEQ ID NO: 1608171 - RNA, 15 nt, Human
ugaaauuguauuaca

SEQ ID NO: 1608172 - RNA, 23 nt, Human
ugaaauuuccugggagcuuuugu

SEQ ID NO: 1608173 - RNA, 21 nt, Human
ugaaauuguaauuauaucuga

SEQ ID NO: 1608174 - RNA, 16 nt, Human
ugaaauuugaauuuug

SEQ ID NO: 1608175 - RNA, 15 nt, Human
ugaaauuugaauuuu

SEQ ID NO: 1608176 - RNA, 14 nt, Human
ugaaauuugaauuu

SEQ ID NO: 1608177 - RNA, 17 nt, Human
ugaaauuugaauuuugu

SEQ ID NO: 1608178 - RNA, 20 nt, Human
ugaacaaauuuacagagaca

SEQ ID NO: 1608179 - RNA, 19 nt, Human
ugaacaaauuuacagagac

SEQ ID NO: 1608180 - RNA, 15 nt, Human
ugaaauuuuuauuaa

SEQ ID NO: 1608181 - RNA, 15 nt, Human
ugaacuccuggccuc

SEQ ID NO: 1608182 - RNA, 14 nt, Human
ugaacuccuggccu

SEQ ID NO: 1608183 - RNA, 12 nt, Human
ugaacuccuggc

SEQ ID NO: 1608184 - RNA, 21 nt, Human
ugaacuaggauuguaguccca

SEQ ID NO: 1608185 - RNA, 22 nt, Human
agagcugcccucuccugggcag

SEQ ID NO: 1608186 - RNA, 19 nt, Human
ugaacuuugaccucugcag

SEQ ID NO: 1608187 - RNA, 20 nt, Human
ugaacuuugaccucugcagc

SEQ ID NO: 1608188 - RNA, 22 nt, Human
ugaacuuugaccucugcagcaa

SEQ ID NO: 1608189 - RNA, 21 nt, Human
agagcuguucacagccagacu

SEQ ID NO: 1608190 - RNA, 15 nt, Human
agagcuuaacagugu

SEQ ID NO: 1608191 - RNA, 15 nt, Human
agagguugcagugag

SEQ ID NO: 1608192 - RNA, 19 nt, Human
agagguccacaacacacag

SEQ ID NO: 1608193 - RNA, 13 nt, Human
agaggcugaggac

SEQ ID NO: 1608194 - RNA, 22 nt, Human
ugaagcacagugaucaaguuau

SEQ ID NO: 1608195 - RNA, 12 nt, Human
agagguuuuaaa

SEQ ID NO: 1608196 - RNA, 19 nt, Human
agaggcagccccauucugc

SEQ ID NO: 1608197 - RNA, 13 nt, Human
agaggcagcccca

SEQ ID NO: 1608198 - RNA, 13 nt, Human
agaggcagggucu

SEQ ID NO: 1608199 - RNA, 10 nt, Human
agaggcaggg

SEQ ID NO: 1608200 - RNA, 21 nt, Human
agaggcagggucucacucugu

SEQ ID NO: 1608201 - RNA, 19 nt, Human
agaggccaugggccuccug

SEQ ID NO: 1608202 - RNA, 21 nt, Human
ugacauuguuggccaaagcca

SEQ ID NO: 1608203 - RNA, 20 nt, Human
ugacauuguuggccaaagcc

SEQ ID NO: 1608204 - RNA, 18 nt, Human
ugaccaaugauggucacc

SEQ ID NO: 1608205 - RNA, 15 nt, Human
agaucagccugggca

SEQ ID NO: 1608206 - RNA, 13 nt, Human
agaucagccuggg

SEQ ID NO: 1608207 - RNA, 12 nt, Human
agaucauuguga

SEQ ID NO: 1608208 - RNA, 20 nt, Human
ugacagggcacaccgggcac

SEQ ID NO: 1608209 - RNA, 21 nt, Human
ugacagggcacaccgggcacu

SEQ ID NO: 1608210 - RNA, 16 nt, Human
ugacagggcacaccgg

SEQ ID NO: 1608211 - RNA, 11 nt, Human
ugacagggcac

SEQ ID NO: 1608212 - RNA, 21 nt, Human
ugacacacagcucuguccugg

SEQ ID NO: 1608213 - RNA, 20 nt, Human
ugacaggcaaugcuggcugu

SEQ ID NO: 1608214 - RNA, 17 nt, Human
ugacccacaagaaauga

SEQ ID NO: 1608215 - RNA, 13 nt, Human
ugacccacugcuu

SEQ ID NO: 1608216 - RNA, 12 nt, Human
ugacccacugcu

SEQ ID NO: 1608217 - RNA, 15 nt, Human
agaugcuucucacug

SEQ ID NO: 1608218 - RNA, 16 nt, Human
agaugcuucucacugc

SEQ ID NO: 1608219 - RNA, 15 nt, Human
agaugcuagaacucc

SEQ ID NO: 1608220 - RNA, 14 nt, Human
agaugcuagaacuc

SEQ ID NO: 1608221 - RNA, 20 nt, Human
agaugcaguucugaagaaga

SEQ ID NO: 1608222 - RNA, 19 nt, Human
agaugcaguucugaagaag

SEQ ID NO: 1608223 - RNA, 18 nt, Human
agaugcaguucugaagaa

SEQ ID NO: 1608224 - RNA, 15 nt, Human
agaugcaccagcccu

SEQ ID NO: 1608225 - RNA, 14 nt, Human
agaugcaccagccc

SEQ ID NO: 1608226 - RNA, 14 nt, Human
agagugaacaaauu

SEQ ID NO: 1608227 - RNA, 17 nt, Human
agaguugauacuacagu

SEQ ID NO: 1608228 - RNA, 20 nt, Human
agaguugauacuacaguuug

SEQ ID NO: 1608229 - RNA, 22 nt, Human
agaguugauacuacaguuuguu

SEQ ID NO: 1608230 - RNA, 17 nt, Human
agaguuuagcuggaaaa

SEQ ID NO: 1608231 - RNA, 16 nt, Human
agaguuuagcuggaaa

SEQ ID NO: 1608232 - RNA, 16 nt, Human
agaguuguuacauuuu

SEQ ID NO: 1608233 - RNA, 12 nt, Human
agaguuguuaca

SEQ ID NO: 1608234 - RNA, 20 nt, Human
agaguugaugguuguacaua

SEQ ID NO: 1608235 - RNA, 20 nt, Human
ugaaugguuuucaaaauaaa

SEQ ID NO: 1608236 - RNA, 19 nt, Human
ugaaugucagugugacuga

SEQ ID NO: 1608237 - RNA, 18 nt, Human
agaucacgccacugcacu

SEQ ID NO: 1608238 - RNA, 17 nt, Human
agaucacgccacugcac

SEQ ID NO: 1608239 - RNA, 21 nt, Human
ugaauuuauuggcuuuucuga

SEQ ID NO: 1608240 - RNA, 15 nt, Human
ugaauuucuuuugcc

SEQ ID NO: 1608241 - RNA, 16 nt, Human
ugaauuuuacauggcu

SEQ ID NO: 1608242 - RNA, 23 nt, Human
ugaauuuauuggcuuuucugauc

SEQ ID NO: 1608243 - RNA, 22 nt, Human
ugaauuuauuggcuuuucugau

SEQ ID NO: 1608244 - RNA, 16 nt, Human
agaucacgccacugca

SEQ ID NO: 1608245 - RNA, 15 nt, Human
agaucacgccacugc

SEQ ID NO: 1608246 - RNA, 14 nt, Human
agaucacgccacug

SEQ ID NO: 1608247 - RNA, 14 nt, Human
agauacuggauugu

SEQ ID NO: 1608248 - RNA, 12 nt, Human
agauaaaugugc

SEQ ID NO: 1608249 - RNA, 17 nt, Human
agauaaagguucaugca

SEQ ID NO: 1608250 - RNA, 15 nt, Human
agauacugaaauaaa

SEQ ID NO: 1608251 - RNA, 13 nt, Human
agauacugaaaua

SEQ ID NO: 1608252 - RNA, 12 nt, Human
agauacugaaau

SEQ ID NO: 1608253 - RNA, 14 nt, Human
ugauacaaugcugu

SEQ ID NO: 1608254 - RNA, 15 nt, Human
ugauacaaugcugug

SEQ ID NO: 1608255 - RNA, 23 nt, Human
ugagugggggaucacagccucug

SEQ ID NO: 1608256 - RNA, 21 nt, Human
ugagugggggaucacagccuc

SEQ ID NO: 1608257 - RNA, 14 nt, Human
ugagugccuuacac

SEQ ID NO: 1608258 - RNA, 13 nt, Human
ugagugccuuaca

SEQ ID NO: 1608259 - RNA, 17 nt, Human
ugagugcagcucuggag

SEQ ID NO: 1608260 - RNA, 16 nt, Human
ugagugccuuacacaa

SEQ ID NO: 1608261 - RNA, 13 nt, Human
ugaguccagaagu

SEQ ID NO: 1608262 - RNA, 14 nt, Human
ugaguacuacaguc

SEQ ID NO: 1608263 - RNA, 20 nt, Human
ugaguacguugugcauuugg

SEQ ID NO: 1608264 - RNA, 18 nt, Human
ugagucaccaagcccagu

SEQ ID NO: 1608265 - RNA, 13 nt, Human
agcauaccaacac

SEQ ID NO: 1608266 - RNA, 23 nt, Human
agcauaaaaauuagccaagugug

SEQ ID NO: 1608267 - RNA, 22 nt, Human
agcauaccaacacgagcaggcu

SEQ ID NO: 1608268 - RNA, 19 nt, Human
agcauaccaacacgagcag

SEQ ID NO: 1608269 - RNA, 15 nt, Human
agcauauauuuuuau

SEQ ID NO: 1608270 - RNA, 16 nt, Human
ugaguacguugugcau

SEQ ID NO: 1608271 - RNA, 17 nt, Human
ugaguacguugugcauu

SEQ ID NO: 1608272 - RNA, 18 nt, Human
ugaguacguugugcauuu

SEQ ID NO: 1608273 - RNA, 19 nt, Human
ugaguacguugugcauuug

SEQ ID NO: 1608274 - RNA, 22 nt, Human
agcauauauuuuuauauuuacu

SEQ ID NO: 1608275 - RNA, 20 nt, Human
agcauauauuuuuauauuua

SEQ ID NO: 1608276 - RNA, 18 nt, Human
agcauauauuuuuauauu

SEQ ID NO: 1608277 - RNA, 19 nt, Human
agcagucaggaaagagaac

SEQ ID NO: 1608278 - RNA, 19 nt, Human
agcauaaaaauuagccaag

SEQ ID NO: 1608279 - RNA, 14 nt, Human
agcaguuugcuuug

SEQ ID NO: 1608280 - RNA, 18 nt, Human
agcagucaggaaagagaa

SEQ ID NO: 1608281 - RNA, 17 nt, Human
agcagucaggaaagaga

SEQ ID NO: 1608282 - RNA, 20 nt, Human
agcaggcuacugucagcucc

SEQ ID NO: 1608283 - RNA, 19 nt, Human
agcaggcuacugucagcuc

SEQ ID NO: 1608284 - RNA, 17 nt, Human
agcaggcuacugucagc

SEQ ID NO: 1608285 - RNA, 16 nt, Human
agcaggcuacugucag

SEQ ID NO: 1608286 - RNA, 14 nt, Human
agcaggcuacuguc

SEQ ID NO: 1608287 - RNA, 11 nt, Human
agcagccacau

SEQ ID NO: 1608288 - RNA, 15 nt, Human
agcagccacauuccu

SEQ ID NO: 1608289 - RNA, 13 nt, Human
agcaggacaugga

SEQ ID NO: 1608290 - RNA, 16 nt, Human
agcagcagggagggcu

SEQ ID NO: 1608291 - RNA, 19 nt, Human
ugacccaugcugcccugug

SEQ ID NO: 1608292 - RNA, 18 nt, Human
ugacccaugcugcccugu

SEQ ID NO: 1608293 - RNA, 20 nt, Human
ugacccaugcugcccuguga

SEQ ID NO: 1608294 - RNA, 19 nt, Human
agcagggcauggcugggaa

SEQ ID NO: 1608295 - RNA, 20 nt, Human
agcagggagggcuucugcca

SEQ ID NO: 1608296 - RNA, 15 nt, Human
agcagggcucagcgg

SEQ ID NO: 1608297 - RNA, 14 nt, Human
agcagggcucagcg

SEQ ID NO: 1608298 - RNA, 13 nt, Human
agcagggcucagc

SEQ ID NO: 1608299 - RNA, 22 nt, Human
agcagggcucagcggggacagc

SEQ ID NO: 1608300 - RNA, 19 nt, Human
agcaggcucucaggccagc

SEQ ID NO: 1608301 - RNA, 18 nt, Human
agcaggcucucaggccag

SEQ ID NO: 1608302 - RNA, 17 nt, Human
agcaggcucucaggcca

SEQ ID NO: 1608303 - RNA, 16 nt, Human
agcaggcucucaggcc

SEQ ID NO: 1608304 - RNA, 15 nt, Human
agcaggcucucaggc

SEQ ID NO: 1608305 - RNA, 14 nt, Human
agcaggcucucagg

SEQ ID NO: 1608306 - RNA, 13 nt, Human
agcaggcucucag

SEQ ID NO: 1608307 - RNA, 17 nt, Human
agcaggcucgggcuccc

SEQ ID NO: 1608308 - RNA, 23 nt, Human
agcaggcucucaggccagcugcu

SEQ ID NO: 1608309 - RNA, 22 nt, Human
agcaggcucucaggccagcugc

SEQ ID NO: 1608310 - RNA, 21 nt, Human
agcaggcucucaggccagcug

SEQ ID NO: 1608311 - RNA, 15 nt, Human
agcagggaaacagcu

SEQ ID NO: 1608312 - RNA, 14 nt, Human
agcagggaaacagc

SEQ ID NO: 1608313 - RNA, 13 nt, Human
agcagggaaacag

SEQ ID NO: 1608314 - RNA, 15 nt, Human
agcaggcugugaguu

SEQ ID NO: 1608315 - RNA, 22 nt, Human
agcauuuagauguauagguuga

SEQ ID NO: 1608316 - RNA, 22 nt, Human
agcauucucacuccuaccuggu

SEQ ID NO: 1608317 - RNA, 20 nt, Human
agcauucucacuccuaccug

SEQ ID NO: 1608318 - RNA, 18 nt, Human
agcauucucacuccuacc

SEQ ID NO: 1608319 - RNA, 19 nt, Human
agcauggcugccaauggga

SEQ ID NO: 1608320 - RNA, 17 nt, Human
agcauuagauuucucau

SEQ ID NO: 1608321 - RNA, 15 nt, Human
agcauuuugcuaaau

SEQ ID NO: 1608322 - RNA, 22 nt, Human
agcauuuugcuaaaugugaaug

SEQ ID NO: 1608323 - RNA, 18 nt, Human
agccaaacauccuacaag

SEQ ID NO: 1608324 - RNA, 18 nt, Human
agcauuuguguugaagag

SEQ ID NO: 1608325 - RNA, 17 nt, Human
agcauuuguguugaaga

SEQ ID NO: 1608326 - RNA, 21 nt, Human
agcauauucaggaagcucagg

SEQ ID NO: 1608327 - RNA, 19 nt, Human
agcauauucaggaagcuca

SEQ ID NO: 1608328 - RNA, 17 nt, Human
agcauauucaggaagcu

SEQ ID NO: 1608329 - RNA, 14 nt, Human
ugaucacggcucac

SEQ ID NO: 1608330 - RNA, 13 nt, Human
ugaucacggcuca

SEQ ID NO: 1608331 - RNA, 15 nt, Human
ugaucacggcucacu

SEQ ID NO: 1608332 - RNA, 18 nt, Human
ugaucacggcucacugca

SEQ ID NO: 1608333 - RNA, 14 nt, Human
ugaucaccugcccu

SEQ ID NO: 1608334 - RNA, 18 nt, Human
ugauacaaugcugugccc

SEQ ID NO: 1608335 - RNA, 12 nt, Human
agcaucaggcca

SEQ ID NO: 1608336 - RNA, 21 nt, Human
agcaucaggccaggcccucug

SEQ ID NO: 1608337 - RNA, 22 nt, Human
agcaucaggccaggcccucugc

SEQ ID NO: 1608338 - RNA, 23 nt, Human
agcaucaggccaggcccucugcc

SEQ ID NO: 1608339 - RNA, 13 nt, Human
agcauccuggaau

SEQ ID NO: 1608340 - RNA, 15 nt, Human
agcauccuggaauau

SEQ ID NO: 1608341 - RNA, 14 nt, Human
agcauccuggaaua

SEQ ID NO: 1608342 - RNA, 13 nt, Human
agcauggcugcca

SEQ ID NO: 1608343 - RNA, 14 nt, Human
ugaugggaaagcau

SEQ ID NO: 1608344 - RNA, 13 nt, Human
ugauggggcccug

SEQ ID NO: 1608345 - RNA, 22 nt, Human
ugaugggcaacccccagccugc

SEQ ID NO: 1608346 - RNA, 21 nt, Human
ugaugaucuuugcagacaggc

SEQ ID NO: 1608347 - RNA, 20 nt, Human
ugaugaucuuugcagacagg

SEQ ID NO: 1608348 - RNA, 19 nt, Human
ugaugaucuuugcagacag

SEQ ID NO: 1608349 - RNA, 23 nt, Human
ugaugaaaugaggucagagccug

SEQ ID NO: 1608350 - RNA, 18 nt, Human
ugaugaaauguaaauacu

SEQ ID NO: 1608351 - RNA, 15 nt, Human
ugaucuaggaagacu

SEQ ID NO: 1608352 - RNA, 14 nt, Human
ugaucuaggaagac

SEQ ID NO: 1608353 - RNA, 22 nt, Human
ugaugaaaugaggucagagccu

SEQ ID NO: 1608354 - RNA, 16 nt, Human
ugauuaaguaaugaua

SEQ ID NO: 1608355 - RNA, 16 nt, Human
agccacggccaggcca

SEQ ID NO: 1608356 - RNA, 15 nt, Human
ugauuaaguaaugau

SEQ ID NO: 1608357 - RNA, 17 nt, Human
ugauuaaauucuugcaa

SEQ ID NO: 1608358 - RNA, 13 nt, Human
ugauuaaauucuu

SEQ ID NO: 1608359 - RNA, 16 nt, Human
ugauuaaauucuugca

SEQ ID NO: 1608360 - RNA, 22 nt, Human
ugauggggcccugccuccuuug

SEQ ID NO: 1608361 - RNA, 23 nt, Human
ugauggguuaguggauggaaggg

SEQ ID NO: 1608362 - RNA, 19 nt, Human
ugauggguuaguggaugga

SEQ ID NO: 1608363 - RNA, 19 nt, Human
ugauguuuuccaugagucc

SEQ ID NO: 1608364 - RNA, 23 nt, Human
ugauguuuuccaugaguccccug

SEQ ID NO: 1608365 - RNA, 17 nt, Human
ugauguuuuccaugagu

SEQ ID NO: 1608366 - RNA, 21 nt, Human
ugauguuuuaaggaugcuugu

SEQ ID NO: 1608367 - RNA, 13 nt, Human
agccaccacgccc

SEQ ID NO: 1608368 - RNA, 20 nt, Human
ugauccucccaccucagccu

SEQ ID NO: 1608369 - RNA, 19 nt, Human
ugauccucccaccucagcc

SEQ ID NO: 1608370 - RNA, 13 nt, Human
ugaucuaggaaga

SEQ ID NO: 1608371 - RNA, 22 nt, Human
ugauccuaaugaaugcauaaaa

SEQ ID NO: 1608372 - RNA, 18 nt, Human
ugauccucccaccucagc

SEQ ID NO: 1608373 - RNA, 23 nt, Human
ugauccagaaagaaaacuuguau

SEQ ID NO: 1608374 - RNA, 19 nt, Human
ugauccagcagauuauuca

SEQ ID NO: 1608375 - RNA, 20 nt, Human
ugauccagcagauuauucac

SEQ ID NO: 1608376 - RNA, 13 nt, Human
ugauccagaaaga

SEQ ID NO: 1608377 - RNA, 14 nt, Human
ugauccacucgccu

SEQ ID NO: 1608378 - RNA, 18 nt, Human
ugauccacucgccuucau

SEQ ID NO: 1608379 - RNA, 22 nt, Human
ugcaaagcacugacuucuaagu

SEQ ID NO: 1608380 - RNA, 20 nt, Human
ugcaaagcacugacuucuaa

SEQ ID NO: 1608381 - RNA, 18 nt, Human
ugcaaagcacugacuucu

SEQ ID NO: 1608382 - RNA, 20 nt, Human
ugcaaaccaucauugaaauc

SEQ ID NO: 1608383 - RNA, 18 nt, Human
ugcaaaccaucauugaaa

SEQ ID NO: 1608384 - RNA, 21 nt, Human
ugcaaaggguaucaggugcug

SEQ ID NO: 1608385 - RNA, 17 nt, Human
ugcaaagcccagcuuga

SEQ ID NO: 1608386 - RNA, 15 nt, Human
ugcaaagcccagcuu

SEQ ID NO: 1608387 - RNA, 14 nt, Human
ugcaaagcccagcu

SEQ ID NO: 1608388 - RNA, 20 nt, Human
ugcaaaguaucccuacugua

SEQ ID NO: 1608389 - RNA, 23 nt, Human
ugcaaaguucccuacuuccugug

SEQ ID NO: 1608390 - RNA, 13 nt, Human
ugauuucauucaa

SEQ ID NO: 1608391 - RNA, 18 nt, Human
agccacggccaggccaga

SEQ ID NO: 1608392 - RNA, 17 nt, Human
agccacggccaggccag

SEQ ID NO: 1608393 - RNA, 13 nt, Human
ugcaaaccaucau

SEQ ID NO: 1608394 - RNA, 12 nt, Human
ugcaaaccauca

SEQ ID NO: 1608395 - RNA, 12 nt, Human
ugauuuggaaaa

SEQ ID NO: 1608396 - RNA, 18 nt, Human
ugauuuccguuaaaauac

SEQ ID NO: 1608397 - RNA, 23 nt, Human
ugauuugacauagucuggcugua

SEQ ID NO: 1608398 - RNA, 21 nt, Human
ugcaagccagauuuuccugaa

SEQ ID NO: 1608399 - RNA, 15 nt, Human
ugcaagccagauuuu

SEQ ID NO: 1608400 - RNA, 13 nt, Human
ugcaacaggcugg

SEQ ID NO: 1608401 - RNA, 17 nt, Human
ugcaauaaaauggguuu

SEQ ID NO: 1608402 - RNA, 21 nt, Human
ugcaauaaaauggguuuuacu

SEQ ID NO: 1608403 - RNA, 12 nt, Human
agcccaggccuc

SEQ ID NO: 1608404 - RNA, 15 nt, Human
ugcaaggucauuuuu

SEQ ID NO: 1608405 - RNA, 18 nt, Human
agccccgugggguuccuc

SEQ ID NO: 1608406 - RNA, 21 nt, Human
agcccaggccuccuacagcuu

SEQ ID NO: 1608407 - RNA, 19 nt, Human
agcccaggccuccuacagc

SEQ ID NO: 1608408 - RNA, 14 nt, Human
agcccaggccuccu

SEQ ID NO: 1608409 - RNA, 14 nt, Human
agccccgaggccuu

SEQ ID NO: 1608410 - RNA, 16 nt, Human
agccccgaggccuucu

SEQ ID NO: 1608411 - RNA, 15 nt, Human
agcccgggcucugcc

SEQ ID NO: 1608412 - RNA, 14 nt, Human
agcccgggcucugc

SEQ ID NO: 1608413 - RNA, 13 nt, Human
agcccgggcucug

SEQ ID NO: 1608414 - RNA, 19 nt, Human
agccccuucugacccaugc

SEQ ID NO: 1608415 - RNA, 16 nt, Human
agccccuucugaccca

SEQ ID NO: 1608416 - RNA, 15 nt, Human
agccccuucugaccc

SEQ ID NO: 1608417 - RNA, 14 nt, Human
agccccuucugacc

SEQ ID NO: 1608418 - RNA, 19 nt, Human
agcccugcagagggcacag

SEQ ID NO: 1608419 - RNA, 16 nt, Human
agcccugcagagggca

SEQ ID NO: 1608420 - RNA, 15 nt, Human
agcccugcagagggc

SEQ ID NO: 1608421 - RNA, 14 nt, Human
agcccugcagaggg

SEQ ID NO: 1608422 - RNA, 16 nt, Human
agcccgggcucugccu

SEQ ID NO: 1608423 - RNA, 15 nt, Human
ugcacuccagccuga

SEQ ID NO: 1608424 - RNA, 14 nt, Human
ugcacuccagccug

SEQ ID NO: 1608425 - RNA, 18 nt, Human
ugcaccggcuggccuggc

SEQ ID NO: 1608426 - RNA, 16 nt, Human
ugcaccggcuggccug

SEQ ID NO: 1608427 - RNA, 15 nt, Human
ugcaccggcuggccu

SEQ ID NO: 1608428 - RNA, 14 nt, Human
ugcaccggcuggcc

SEQ ID NO: 1608429 - RNA, 17 nt, Human
ugcacuccagccugagc

SEQ ID NO: 1608430 - RNA, 15 nt, Human
ugcacuccagccugg

SEQ ID NO: 1608431 - RNA, 16 nt, Human
ugcacuccagccuggg

SEQ ID NO: 1608432 - RNA, 22 nt, Human
ugcagaagacaguauggcagcu

SEQ ID NO: 1608433 - RNA, 13 nt, Human
ugcaccagcccuu

SEQ ID NO: 1608434 - RNA, 21 nt, Human
ugcaccacugcacuccagccu

SEQ ID NO: 1608435 - RNA, 20 nt, Human
agcccugggaggcucuggag

SEQ ID NO: 1608436 - RNA, 18 nt, Human
agcccugggaggcucugg

SEQ ID NO: 1608437 - RNA, 17 nt, Human
agcccugggaggcucug

SEQ ID NO: 1608438 - RNA, 17 nt, Human
ugccaguuauggcuaua

SEQ ID NO: 1608439 - RNA, 13 nt, Human
ugccauaauuacu

SEQ ID NO: 1608440 - RNA, 22 nt, Human
ugccagccgagauagccaaggc

SEQ ID NO: 1608441 - RNA, 17 nt, Human
ugccagccgagauagcc

SEQ ID NO: 1608442 - RNA, 16 nt, Human
ugcauuuaaaagauac

SEQ ID NO: 1608443 - RNA, 14 nt, Human
ugccaaugggagcu

SEQ ID NO: 1608444 - RNA, 13 nt, Human
ugccaauggacua

SEQ ID NO: 1608445 - RNA, 18 nt, Human
ugccaaugggagcucaug

SEQ ID NO: 1608446 - RNA, 19 nt, Human
agccuugcggaagguucua

SEQ ID NO: 1608447 - RNA, 21 nt, Human
agccuugaccauucuccaccu

SEQ ID NO: 1608448 - RNA, 19 nt, Human
agccuugaccauucuccac

SEQ ID NO: 1608449 - RNA, 18 nt, Human
agccuugaccauucucca

SEQ ID NO: 1608450 - RNA, 22 nt, Human
agccuugaccauucuccaccug

SEQ ID NO: 1608451 - RNA, 16 nt, Human
agccuugggaccccug

SEQ ID NO: 1608452 - RNA, 20 nt, Human
agccuuagaagucacacagu

SEQ ID NO: 1608453 - RNA, 22 nt, Human
agccuuagaagucacacaguau

SEQ ID NO: 1608454 - RNA, 15 nt, Human
agccuguuuaagaga

SEQ ID NO: 1608455 - RNA, 13 nt, Human
agccuugaacuuu

SEQ ID NO: 1608456 - RNA, 19 nt, Human
agccugugccucugggacu

SEQ ID NO: 1608457 - RNA, 18 nt, Human
agccugugccucugggac

SEQ ID NO: 1608458 - RNA, 17 nt, Human
agccugugccucuggga

SEQ ID NO: 1608459 - RNA, 19 nt, Human
ugcauacucauuaggaugg

SEQ ID NO: 1608460 - RNA, 21 nt, Human
ugcauaccacuuuuguucuug

SEQ ID NO: 1608461 - RNA, 13 nt, Human
ugcauacucauua

SEQ ID NO: 1608462 - RNA, 20 nt, Human
ugcauagauucccugagcag

SEQ ID NO: 1608463 - RNA, 17 nt, Human
ugcauagaauaaaauuu

SEQ ID NO: 1608464 - RNA, 16 nt, Human
ugcauaccacuuuugu

SEQ ID NO: 1608465 - RNA, 18 nt, Human
ugcauaccacuuuuguuc

SEQ ID NO: 1608466 - RNA, 20 nt, Human
ugcauaccacuuuuguucuu

SEQ ID NO: 1608467 - RNA, 15 nt, Human
ugcaucucagcccac

SEQ ID NO: 1608468 - RNA, 14 nt, Human
ugcaucucagccca

SEQ ID NO: 1608469 - RNA, 13 nt, Human
ugcaucucagccc

SEQ ID NO: 1608470 - RNA, 18 nt, Human
ugcaugcugucccuuacg

SEQ ID NO: 1608471 - RNA, 21 nt, Human
ugcaugcugucccuuacguga

SEQ ID NO: 1608472 - RNA, 19 nt, Human
ugcaugcugucccuuacgu

SEQ ID NO: 1608473 - RNA, 18 nt, Human
ugcagccucacaguccuu

SEQ ID NO: 1608474 - RNA, 21 nt, Human
ugcagccucacaguccuuacc

SEQ ID NO: 1608475 - RNA, 22 nt, Human
ugcaggucccuaauaaagcugu

SEQ ID NO: 1608476 - RNA, 11 nt, Human
ugcaggucccu

SEQ ID NO: 1608477 - RNA, 18 nt, Human
agccuccugcccuuaccu

SEQ ID NO: 1608478 - RNA, 14 nt, Human
agccuccugcccuu

SEQ ID NO: 1608479 - RNA, 13 nt, Human
agccuccugcccu

SEQ ID NO: 1608480 - RNA, 21 nt, Human
ugcagacaggcaagcaccucc

SEQ ID NO: 1608481 - RNA, 13 nt, Human
ugcagacaggcaa

SEQ ID NO: 1608482 - RNA, 12 nt, Human
ugcagacaggca

SEQ ID NO: 1608483 - RNA, 17 nt, Human
ugcuuuuaaaaaaaaau

SEQ ID NO: 1608484 - RNA, 18 nt, Human
ugcuuuuggucuguguga

SEQ ID NO: 1608485 - RNA, 23 nt, Human
ugcuuuuuaauauugauaugcuu

SEQ ID NO: 1608486 - RNA, 20 nt, Human
ugcuuuugucuaugggacuc

SEQ ID NO: 1608487 - RNA, 22 nt, Human
ugcuuugugauuuuuguaauuu

SEQ ID NO: 1608488 - RNA, 17 nt, Human
ugcuuugggcugcccug

SEQ ID NO: 1608489 - RNA, 16 nt, Human
ugcuuugggcugcccu

SEQ ID NO: 1608490 - RNA, 15 nt, Human
ugcuugagcucagga

SEQ ID NO: 1608491 - RNA, 17 nt, Human
aggagccuccugcccuu

SEQ ID NO: 1608492 - RNA, 15 nt, Human
ugcuuugggcugccc

SEQ ID NO: 1608493 - RNA, 14 nt, Human
ugcuuugggcugcc

SEQ ID NO: 1608494 - RNA, 16 nt, Human
uggaagacagcucuua

SEQ ID NO: 1608495 - RNA, 23 nt, Human
uggaaauuuguuauaaugaauga

SEQ ID NO: 1608496 - RNA, 21 nt, Human
uggaaauuuguuauaaugaau

SEQ ID NO: 1608497 - RNA, 16 nt, Human
ugcuuuuuauggccug

SEQ ID NO: 1608498 - RNA, 17 nt, Human
ugcuuuuucucaaaaug

SEQ ID NO: 1608499 - RNA, 19 nt, Human
aggauucuuccucccuccc

SEQ ID NO: 1608500 - RNA, 17 nt, Human
aggauucuuccucccuc

SEQ ID NO: 1608501 - RNA, 23 nt, Human
aggaugaucuaggaagacuuugg

SEQ ID NO: 1608502 - RNA, 22 nt, Human
aggaugaucuaggaagacuuug

SEQ ID NO: 1608503 - RNA, 22 nt, Human
aggaugcacagaguuguuacau

SEQ ID NO: 1608504 - RNA, 13 nt, Human
aggaucagucuga

SEQ ID NO: 1608505 - RNA, 13 nt, Human
aggagcagccaca

SEQ ID NO: 1608506 - RNA, 12 nt, Human
aggagcagccac

SEQ ID NO: 1608507 - RNA, 16 nt, Human
aggagccuccugcccu

SEQ ID NO: 1608508 - RNA, 17 nt, Human
aggagccccgaggccuu

SEQ ID NO: 1608509 - RNA, 14 nt, Human
aggagcagccacau

SEQ ID NO: 1608510 - RNA, 19 nt, Human
aggagaaacuggaacucuc

SEQ ID NO: 1608511 - RNA, 18 nt, Human
aggagaaacuggaacucu

SEQ ID NO: 1608512 - RNA, 23 nt, Human
aggacuuuucuuuguggcuuccu

SEQ ID NO: 1608513 - RNA, 22 nt, Human
aggacuuuucuuuguggcuucc

SEQ ID NO: 1608514 - RNA, 19 nt, Human
aggacuuuucuuuguggcu

SEQ ID NO: 1608515 - RNA, 17 nt, Human
aggacuuuucuuugugg

SEQ ID NO: 1608516 - RNA, 23 nt, Human
aggacuucuuuaauuuuggaauu

SEQ ID NO: 1608517 - RNA, 22 nt, Human
aggacuucuuuaauuuuggaau

SEQ ID NO: 1608518 - RNA, 21 nt, Human
aggacuucuuuaauuuuggaa

SEQ ID NO: 1608519 - RNA, 16 nt, Human
aggacuucuuuaauuu

SEQ ID NO: 1608520 - RNA, 14 nt, Human
aggacuucuuuaau

SEQ ID NO: 1608521 - RNA, 19 nt, Human
aggacucugccuccucuuc

SEQ ID NO: 1608522 - RNA, 18 nt, Human
aggacucugccuccucuu

SEQ ID NO: 1608523 - RNA, 17 nt, Human
aggacucugccuccucu

SEQ ID NO: 1608524 - RNA, 16 nt, Human
aggacucugccuccuc

SEQ ID NO: 1608525 - RNA, 14 nt, Human
aggacucugccucc

SEQ ID NO: 1608526 - RNA, 13 nt, Human
aggacucugccuc

SEQ ID NO: 1608527 - RNA, 12 nt, Human
aggacucugccu

SEQ ID NO: 1608528 - RNA, 20 nt, Human
aggacgcucucuggccuucg

SEQ ID NO: 1608529 - RNA, 19 nt, Human
aggacgcucucuggccuuc

SEQ ID NO: 1608530 - RNA, 17 nt, Human
aggacgcucucuggccu

SEQ ID NO: 1608531 - RNA, 16 nt, Human
aggacgcucucuggcc

SEQ ID NO: 1608532 - RNA, 14 nt, Human
aggacgcucucugg

SEQ ID NO: 1608533 - RNA, 13 nt, Human
aggacgcucucug

SEQ ID NO: 1608534 - RNA, 15 nt, Human
aggaauucuguauag

SEQ ID NO: 1608535 - RNA, 14 nt, Human
aggaauucuguaua

SEQ ID NO: 1608536 - RNA, 13 nt, Human
aggaauucuguau

SEQ ID NO: 1608537 - RNA, 15 nt, Human
aggacuaggguccug

SEQ ID NO: 1608538 - RNA, 18 nt, Human
aggacuaggguccugggg

SEQ ID NO: 1608539 - RNA, 16 nt, Human
aggacuaggguccugg

SEQ ID NO: 1608540 - RNA, 19 nt, Human
aggacuaggguccugggga

SEQ ID NO: 1608541 - RNA, 14 nt, Human
uggaguugaaaauc

SEQ ID NO: 1608542 - RNA, 14 nt, Human
uggagugcagugag

SEQ ID NO: 1608543 - RNA, 20 nt, Human
aggcauuugcugaauacaga

SEQ ID NO: 1608544 - RNA, 16 nt, Human
aggcauuugcugaaua

SEQ ID NO: 1608545 - RNA, 13 nt, Human
uggauggaagggg

SEQ ID NO: 1608546 - RNA, 23 nt, Human
uggaugccugguggcagcugcgg

SEQ ID NO: 1608547 - RNA, 21 nt, Human
uggaugccugguggcagcugc

SEQ ID NO: 1608548 - RNA, 23 nt, Human
uggcacaucagcacgauuucugu

SEQ ID NO: 1608549 - RNA, 15 nt, Human
aggcccccaggugcc

SEQ ID NO: 1608550 - RNA, 14 nt, Human
aggccccgcccagg

SEQ ID NO: 1608551 - RNA, 13 nt, Human
aggcccggcucca

SEQ ID NO: 1608552 - RNA, 15 nt, Human
aggcccggccucuca

SEQ ID NO: 1608553 - RNA, 14 nt, Human
aggcccggccucuc

SEQ ID NO: 1608554 - RNA, 13 nt, Human
aggcccggccucu

SEQ ID NO: 1608555 - RNA, 13 nt, Human
aggcccagagggc

SEQ ID NO: 1608556 - RNA, 15 nt, Human
aggccagccuugacc

SEQ ID NO: 1608557 - RNA, 12 nt, Human
aggccagcugcu

SEQ ID NO: 1608558 - RNA, 13 nt, Human
aggccagccuuga

SEQ ID NO: 1608559 - RNA, 22 nt, Human
uggcagcucaccucucccuugg

SEQ ID NO: 1608560 - RNA, 21 nt, Human
uggcagcucaccucucccuug

SEQ ID NO: 1608561 - RNA, 23 nt, Human
uggcagcucaccucucccuugga

SEQ ID NO: 1608562 - RNA, 13 nt, Human
uggcagcucagag

SEQ ID NO: 1608563 - RNA, 20 nt, Human
uggcacccggccccugcugg

SEQ ID NO: 1608564 - RNA, 19 nt, Human
uggcacccggccccugcug

SEQ ID NO: 1608565 - RNA, 18 nt, Human
uggcacccggccccugcu

SEQ ID NO: 1608566 - RNA, 20 nt, Human
aggcauuuaggccaugggac

SEQ ID NO: 1608567 - RNA, 18 nt, Human
aggcauugugggaagggg

SEQ ID NO: 1608568 - RNA, 22 nt, Human
aggcauaaagucagggguuccc

SEQ ID NO: 1608569 - RNA, 22 nt, Human
aggcaggucuugaacuccuggc

SEQ ID NO: 1608570 - RNA, 18 nt, Human
aggcagggucucacucug

SEQ ID NO: 1608571 - RNA, 12 nt, Human
aggcagggucuc

SEQ ID NO: 1608572 - RNA, 17 nt, Human
aggcaggugggauggau

SEQ ID NO: 1608573 - RNA, 15 nt, Human
aggcauaaagucagg

SEQ ID NO: 1608574 - RNA, 15 nt, Human
aggcagcuugaaacu

SEQ ID NO: 1608575 - RNA, 21 nt, Human
uggagcucgugggacagucac

SEQ ID NO: 1608576 - RNA, 21 nt, Human
uggagcucguggaacaguuac

SEQ ID NO: 1608577 - RNA, 17 nt, Human
uggagcucguggaacag

SEQ ID NO: 1608578 - RNA, 17 nt, Human
uggagccaauggagacu

SEQ ID NO: 1608579 - RNA, 19 nt, Human
aggcaagcaccuccugccu

SEQ ID NO: 1608580 - RNA, 18 nt, Human
aggcaagcaccuccugcc

SEQ ID NO: 1608581 - RNA, 20 nt, Human
aggcaagcaccuccugccuc

SEQ ID NO: 1608582 - RNA, 16 nt, Human
aggcaaggcugucaau

SEQ ID NO: 1608583 - RNA, 17 nt, Human
aggcaaggcugucaauu

SEQ ID NO: 1608584 - RNA, 17 nt, Human
aggauugcuacuguccu

SEQ ID NO: 1608585 - RNA, 15 nt, Human
aggauugcuacuguc

SEQ ID NO: 1608586 - RNA, 18 nt, Human
aggauugcuacuguccua

SEQ ID NO: 1608587 - RNA, 22 nt, Human
aggauugcuacuguccuaccca

SEQ ID NO: 1608588 - RNA, 20 nt, Human
ugcccuguuaaaagaugaaa

SEQ ID NO: 1608589 - RNA, 13 nt, Human
agcugcccucucc

SEQ ID NO: 1608590 - RNA, 14 nt, Human
agcugcccucuccu

SEQ ID NO: 1608591 - RNA, 15 nt, Human
agcugcccucuccug

SEQ ID NO: 1608592 - RNA, 16 nt, Human
agcugcccucuccugg

SEQ ID NO: 1608593 - RNA, 19 nt, Human
ugcccuuaccugccaggaa

SEQ ID NO: 1608594 - RNA, 18 nt, Human
ugcccuuaccugccagga

SEQ ID NO: 1608595 - RNA, 13 nt, Human
ugccucagccucc

SEQ ID NO: 1608596 - RNA, 12 nt, Human
ugccucagccuc

SEQ ID NO: 1608597 - RNA, 14 nt, Human
ugccgcagcccugc

SEQ ID NO: 1608598 - RNA, 12 nt, Human
ugccgcagcccu

SEQ ID NO: 1608599 - RNA, 23 nt, Human
agcucuguccugggagugagcug

SEQ ID NO: 1608600 - RNA, 21 nt, Human
agcucuguccugggagugagc

SEQ ID NO: 1608601 - RNA, 16 nt, Human
agcucuguccugggag

SEQ ID NO: 1608602 - RNA, 20 nt, Human
agcugccagccgagauagcc

SEQ ID NO: 1608603 - RNA, 15 nt, Human
agcuccuucuguccu

SEQ ID NO: 1608604 - RNA, 23 nt, Human
agcucccaggcauuccccaggag

SEQ ID NO: 1608605 - RNA, 13 nt, Human
agcucccaggcau

SEQ ID NO: 1608606 - RNA, 16 nt, Human
agcuccaucuccacuc

SEQ ID NO: 1608607 - RNA, 15 nt, Human
agcuccaucuccacu

SEQ ID NO: 1608608 - RNA, 13 nt, Human
agcuccaucucca

SEQ ID NO: 1608609 - RNA, 22 nt, Human
ugccaucaauaaaaaauuauga

SEQ ID NO: 1608610 - RNA, 14 nt, Human
ugccaucaauaaaa

SEQ ID NO: 1608611 - RNA, 21 nt, Human
agcuccuucuguccuacucug

SEQ ID NO: 1608612 - RNA, 16 nt, Human
agcuccuucuguccua

SEQ ID NO: 1608613 - RNA, 22 nt, Human
agcuccuucuguccuacucugu

SEQ ID NO: 1608614 - RNA, 20 nt, Human
agcucugguccauagagagc

SEQ ID NO: 1608615 - RNA, 17 nt, Human
agcucugguccauagag

SEQ ID NO: 1608616 - RNA, 12 nt, Human
agcucuggucca

SEQ ID NO: 1608617 - RNA, 14 nt, Human
agcuguucacagcc

SEQ ID NO: 1608618 - RNA, 19 nt, Human
agcuguuacugucuucagu

SEQ ID NO: 1608619 - RNA, 14 nt, Human
ugccuguucccauu

SEQ ID NO: 1608620 - RNA, 17 nt, Human
ugccuguugggccagga

SEQ ID NO: 1608621 - RNA, 16 nt, Human
ugccuguugggccagg

SEQ ID NO: 1608622 - RNA, 19 nt, Human
ugccuguugggccaggagc

SEQ ID NO: 1608623 - RNA, 20 nt, Human
ugccuuacccucauguucuu

SEQ ID NO: 1608624 - RNA, 16 nt, Human
ugccuuggggacaaga

SEQ ID NO: 1608625 - RNA, 21 nt, Human
ugccuuacccucauguucuua

SEQ ID NO: 1608626 - RNA, 20 nt, Human
agcugggguggggaccucag

SEQ ID NO: 1608627 - RNA, 16 nt, Human
agcugggacuacaggu

SEQ ID NO: 1608628 - RNA, 23 nt, Human
agcugggacuacaggcacccacc

SEQ ID NO: 1608629 - RNA, 20 nt, Human
agcugggacuacaggcaccc

SEQ ID NO: 1608630 - RNA, 23 nt, Human
agcugggguggggaccucaggcc

SEQ ID NO: 1608631 - RNA, 22 nt, Human
agcugggguggggaccucaggc

SEQ ID NO: 1608632 - RNA, 18 nt, Human
agcugugcucuggacagg

SEQ ID NO: 1608633 - RNA, 17 nt, Human
agcugugcucuggacag

SEQ ID NO: 1608634 - RNA, 19 nt, Human
agcugugcucuggacaggc

SEQ ID NO: 1608635 - RNA, 18 nt, Human
agcuguuacugucuucag

SEQ ID NO: 1608636 - RNA, 19 nt, Human
agcuggccgggagccugau

SEQ ID NO: 1608637 - RNA, 18 nt, Human
agcuggccgggagccuga

SEQ ID NO: 1608638 - RNA, 16 nt, Human
agcugcuugggcuuca

SEQ ID NO: 1608639 - RNA, 20 nt, Human
agcugcuugggcuucauccu

SEQ ID NO: 1608640 - RNA, 21 nt, Human
ugccuggauggggcugcaccg

SEQ ID NO: 1608641 - RNA, 20 nt, Human
ugccuggauggggcugcacc

SEQ ID NO: 1608642 - RNA, 17 nt, Human
ugccuggauggggcugc

SEQ ID NO: 1608643 - RNA, 16 nt, Human
ugccuggauggggcug

SEQ ID NO: 1608644 - RNA, 16 nt, Human
agcugccuguucagcu

SEQ ID NO: 1608645 - RNA, 14 nt, Human
agcugccuguucag

SEQ ID NO: 1608646 - RNA, 18 nt, Human
agcugccuguucagcucc

SEQ ID NO: 1608647 - RNA, 19 nt, Human
agcugccuguucagcucca

SEQ ID NO: 1608648 - RNA, 17 nt, Human
ugccucugccucugaca

SEQ ID NO: 1608649 - RNA, 20 nt, Human
ugccucugccucugacacac

SEQ ID NO: 1608650 - RNA, 18 nt, Human
ugccucugccucugacac

SEQ ID NO: 1608651 - RNA, 14 nt, Human
ugccucagccuccc

SEQ ID NO: 1608652 - RNA, 23 nt, Human
ugccugcccaggccccugccacc

SEQ ID NO: 1608653 - RNA, 22 nt, Human
ugccugcccaggccccugccac

SEQ ID NO: 1608654 - RNA, 12 nt, Human
ugccucugccug

SEQ ID NO: 1608655 - RNA, 24 nt, Human
ugccugcccaggccccugccaccc

SEQ ID NO: 1608656 - RNA, 22 nt, Human
ugccugcuuuuuauggccugug

SEQ ID NO: 1608657 - RNA, 21 nt, Human
ugccugcuuuuuauggccugu

SEQ ID NO: 1608658 - RNA, 20 nt, Human
ugccugcuuuuuauggccug

SEQ ID NO: 1608659 - RNA, 20 nt, Human
agcuugcccuggugccucac

SEQ ID NO: 1608660 - RNA, 23 nt, Human
agcuugaccgugaggccagagac

SEQ ID NO: 1608661 - RNA, 22 nt, Human
agcuugaccgugaggccagaga

SEQ ID NO: 1608662 - RNA, 20 nt, Human
agcuugaccgugaggccaga

SEQ ID NO: 1608663 - RNA, 19 nt, Human
agcuugcccuguuaaaaga

SEQ ID NO: 1608664 - RNA, 18 nt, Human
agcuugcccuguuaaaag

SEQ ID NO: 1608665 - RNA, 16 nt, Human
agcuugcccuguuaaa

SEQ ID NO: 1608666 - RNA, 14 nt, Human
aggaaaagcugcug

SEQ ID NO: 1608667 - RNA, 22 nt, Human
agcuuuccccaugucucgacuc

SEQ ID NO: 1608668 - RNA, 19 nt, Human
ugccuuuucccaacuccag

SEQ ID NO: 1608669 - RNA, 17 nt, Human
ugccuuuucccaacucc

SEQ ID NO: 1608670 - RNA, 15 nt, Human
ugcgguccacccagg

SEQ ID NO: 1608671 - RNA, 14 nt, Human
ugcgguccacccag

SEQ ID NO: 1608672 - RNA, 17 nt, Human
ugcgguccacccaggag

SEQ ID NO: 1608673 - RNA, 15 nt, Human
ugcuacaaaaacaca

SEQ ID NO: 1608674 - RNA, 14 nt, Human
ugcuacaaaaacac

SEQ ID NO: 1608675 - RNA, 20 nt, Human
ugcuaauuuugaaaaacugc

SEQ ID NO: 1608676 - RNA, 19 nt, Human
ugcuaauuuugaaaaacug

SEQ ID NO: 1608677 - RNA, 18 nt, Human
ugcuaauuuugaaaaacu

SEQ ID NO: 1608678 - RNA, 16 nt, Human
ugcuaauuuugaaaaa

SEQ ID NO: 1608679 - RNA, 13 nt, Human
agcuuaacagugu

SEQ ID NO: 1608680 - RNA, 20 nt, Human
aggaaaucaaauaugcaaag

SEQ ID NO: 1608681 - RNA, 22 nt, Human
aggaaaucaaauaugcaaagca

SEQ ID NO: 1608682 - RNA, 21 nt, Human
aggaaaucaaauaugcaaagc

SEQ ID NO: 1608683 - RNA, 23 nt, Human
aggaaaucaaauaugcaaagcac

SEQ ID NO: 1608684 - RNA, 14 nt, Human
aggaagcucagggc

SEQ ID NO: 1608685 - RNA, 13 nt, Human
aggaagcucaggg

SEQ ID NO: 1608686 - RNA, 13 nt, Human
aggaagccagcag

SEQ ID NO: 1608687 - RNA, 18 nt, Human
aggaagcagcuuucccca

SEQ ID NO: 1608688 - RNA, 16 nt, Human
aggaagcucagggccu

SEQ ID NO: 1608689 - RNA, 15 nt, Human
aggaagcucagggcc

SEQ ID NO: 1608690 - RNA, 15 nt, Human
aggaaggcugagagg

SEQ ID NO: 1608691 - RNA, 19 nt, Human
ugcucugaucauccacugu

SEQ ID NO: 1608692 - RNA, 21 nt, Human
ugcuccagcuguucagcuggu

SEQ ID NO: 1608693 - RNA, 15 nt, Human
ugcucugcugacaga

SEQ ID NO: 1608694 - RNA, 14 nt, Human
ugcucugcugacag

SEQ ID NO: 1608695 - RNA, 16 nt, Human
ugcucugcugacagac

SEQ ID NO: 1608696 - RNA, 17 nt, Human
ugcucuugaugccuggc

SEQ ID NO: 1608697 - RNA, 22 nt, Human
ugcucuugaacuccugaccuca

SEQ ID NO: 1608698 - RNA, 20 nt, Human
ugcucuugaacuccugaccu

SEQ ID NO: 1608699 - RNA, 15 nt, Human
ugcucuugaacuccu

SEQ ID NO: 1608700 - RNA, 18 nt, Human
ugcuaucucccccagccc

SEQ ID NO: 1608701 - RNA, 22 nt, Human
ugcuauuucuauauuuucauuc

SEQ ID NO: 1608702 - RNA, 16 nt, Human
aggaaaagcugcugac

SEQ ID NO: 1608703 - RNA, 17 nt, Human
ugcuaucucccccagcc

SEQ ID NO: 1608704 - RNA, 14 nt, Human
ugcuaucuccccca

SEQ ID NO: 1608705 - RNA, 13 nt, Human
ugcuaucuccccc

SEQ ID NO: 1608706 - RNA, 23 nt, Human
aggaaaccaguuaggucucaaua

SEQ ID NO: 1608707 - RNA, 21 nt, Human
uguaaauacuguuuuuaacaa

SEQ ID NO: 1608708 - RNA, 16 nt, Human
uguaaauagcucaggu

SEQ ID NO: 1608709 - RNA, 15 nt, Human
uguaaauagcucagg

SEQ ID NO: 1608710 - RNA, 15 nt, Human
uguaaauacaauuuu

SEQ ID NO: 1608711 - RNA, 19 nt, Human
uguaaauaaagaacuagca

SEQ ID NO: 1608712 - RNA, 14 nt, Human
ugguuauggagagg

SEQ ID NO: 1608713 - RNA, 13 nt, Human
ugguuuccugccc

SEQ ID NO: 1608714 - RNA, 12 nt, Human
ugguuuccugcc

SEQ ID NO: 1608715 - RNA, 20 nt, Human
ugguuuccugcccugggagg

SEQ ID NO: 1608716 - RNA, 15 nt, Human
ugguuuccugcccug

SEQ ID NO: 1608717 - RNA, 14 nt, Human
ugguuuccugcccu

SEQ ID NO: 1608718 - RNA, 17 nt, Human
ugguuuucaaaauaaaa

SEQ ID NO: 1608719 - RNA, 15 nt, Human
ugguuuucaaaauaa

SEQ ID NO: 1608720 - RNA, 21 nt, Human
ugguuuguaaauuaacuuuua

SEQ ID NO: 1608721 - RNA, 14 nt, Human
ugguuuucaaaaua

SEQ ID NO: 1608722 - RNA, 15 nt, Human
ugguuuguaaauuaa

SEQ ID NO: 1608723 - RNA, 21 nt, Human
aggugauccacccaccucagc

SEQ ID NO: 1608724 - RNA, 20 nt, Human
aggugcauauuuauaaaaau

SEQ ID NO: 1608725 - RNA, 20 nt, Human
aggugauccacccaccucag

SEQ ID NO: 1608726 - RNA, 14 nt, Human
aggugauccaccca

SEQ ID NO: 1608727 - RNA, 23 nt, Human
agguggggcagcuugaggguugg

SEQ ID NO: 1608728 - RNA, 18 nt, Human
aggugggauccuccaggu

SEQ ID NO: 1608729 - RNA, 17 nt, Human
aggugggauccuccagg

SEQ ID NO: 1608730 - RNA, 16 nt, Human
aggugggauccuccag

SEQ ID NO: 1608731 - RNA, 18 nt, Human
aggugccucaagagaagg

SEQ ID NO: 1608732 - RNA, 15 nt, Human
aggugggauccucca

SEQ ID NO: 1608733 - RNA, 20 nt, Human
aggugugcucugaucaucca

SEQ ID NO: 1608734 - RNA, 15 nt, Human
aggugugcucugauc

SEQ ID NO: 1608735 - RNA, 17 nt, Human
aggugugaaccaccaca

SEQ ID NO: 1608736 - RNA, 23 nt, Human
agguggggucacucuggcagcuc

SEQ ID NO: 1608737 - RNA, 19 nt, Human
agguggggucacucuggca

SEQ ID NO: 1608738 - RNA, 14 nt, Human
agguuuaagcuguu

SEQ ID NO: 1608739 - RNA, 23 nt, Human
uggugugaccacugcagaagaca

SEQ ID NO: 1608740 - RNA, 20 nt, Human
ugguuaggcauugugggaag

SEQ ID NO: 1608741 - RNA, 18 nt, Human
ugguuaggcauuguggga

SEQ ID NO: 1608742 - RNA, 12 nt, Human
ugguggcagugg

SEQ ID NO: 1608743 - RNA, 15 nt, Human
ugguggcagcugcgg

SEQ ID NO: 1608744 - RNA, 14 nt, Human
ugguggcagcugcg

SEQ ID NO: 1608745 - RNA, 21 nt, Human
ugguggagaggcccggccucu

SEQ ID NO: 1608746 - RNA, 20 nt, Human
uggugcccugcuuucagaua

SEQ ID NO: 1608747 - RNA, 19 nt, Human
uggugcccugcuuucagau

SEQ ID NO: 1608748 - RNA, 16 nt, Human
uggugcccugcuuuca

SEQ ID NO: 1608749 - RNA, 17 nt, Human
uggugcgaucuggguuc

SEQ ID NO: 1608750 - RNA, 16 nt, Human
uggugcgaucuggguu

SEQ ID NO: 1608751 - RNA, 18 nt, Human
uggugcugccacacuuca

SEQ ID NO: 1608752 - RNA, 13 nt, Human
uggugcugccaca

SEQ ID NO: 1608753 - RNA, 18 nt, Human
aggucagagccugcaguu

SEQ ID NO: 1608754 - RNA, 17 nt, Human
aggucagagccugcagu

SEQ ID NO: 1608755 - RNA, 15 nt, Human
aggucagagccugca

SEQ ID NO: 1608756 - RNA, 14 nt, Human
aggucagagccugc

SEQ ID NO: 1608757 - RNA, 13 nt, Human
aggucagagccug

SEQ ID NO: 1608758 - RNA, 16 nt, Human
uggucagauuugaacu

SEQ ID NO: 1608759 - RNA, 15 nt, Human
uggucagauuugaac

SEQ ID NO: 1608760 - RNA, 16 nt, Human
aggucuugaacuccug

SEQ ID NO: 1608761 - RNA, 19 nt, Human
agguccacaacacacagau

SEQ ID NO: 1608762 - RNA, 15 nt, Human
aggugacagagugag

SEQ ID NO: 1608763 - RNA, 13 nt, Human
aggugacagagug

SEQ ID NO: 1608764 - RNA, 17 nt, Human
aggucuugaacuccugg

SEQ ID NO: 1608765 - RNA, 18 nt, Human
aggucuugaacuccuggc

SEQ ID NO: 1608766 - RNA, 13 nt, Human
aggugaccccagg

SEQ ID NO: 1608767 - RNA, 22 nt, Human
aggugacagagugagacucugu

SEQ ID NO: 1608768 - RNA, 16 nt, Human
aggugagaagcagagg

SEQ ID NO: 1608769 - RNA, 23 nt, Human
aggugagaagcagaggaaggaga

SEQ ID NO: 1608770 - RNA, 21 nt, Human
aggugagaagcagaggaagga

SEQ ID NO: 1608771 - RNA, 22 nt, Human
uguauuacaaauccaaugaaau

SEQ ID NO: 1608772 - RNA, 13 nt, Human
uguauuacaaauc

SEQ ID NO: 1608773 - RNA, 19 nt, Human
uguauucucuccuguaccu

SEQ ID NO: 1608774 - RNA, 20 nt, Human
uguauucucuccuguaccuc

SEQ ID NO: 1608775 - RNA, 18 nt, Human
uguaucacaaaucuuaac

SEQ ID NO: 1608776 - RNA, 15 nt, Human
uguaucacaaaucuu

SEQ ID NO: 1608777 - RNA, 17 nt, Human
uguaucaaugaguaaca

SEQ ID NO: 1608778 - RNA, 15 nt, Human
uguaguguuggagaa

SEQ ID NO: 1608779 - RNA, 14 nt, Human
uguaguguuggaga

SEQ ID NO: 1608780 - RNA, 17 nt, Human
ugucaauuacaggaagu

SEQ ID NO: 1608781 - RNA, 19 nt, Human
ugucaauuacaggaaguac

SEQ ID NO: 1608782 - RNA, 15 nt, Human
ugucaauuacaggaa

SEQ ID NO: 1608783 - RNA, 14 nt, Human
ugucaauuacagga

SEQ ID NO: 1608784 - RNA, 18 nt, Human
aguauuagaauaccacag

SEQ ID NO: 1608785 - RNA, 18 nt, Human
aguauuacuucugcuaca

SEQ ID NO: 1608786 - RNA, 17 nt, Human
aguaugguggcuggguu

SEQ ID NO: 1608787 - RNA, 15 nt, Human
aguauuacuucugcu

SEQ ID NO: 1608788 - RNA, 16 nt, Human
aguaugguggcugggu

SEQ ID NO: 1608789 - RNA, 15 nt, Human
aguaugguggcuggg

SEQ ID NO: 1608790 - RNA, 17 nt, Human
agucaccucauggaauu

SEQ ID NO: 1608791 - RNA, 15 nt, Human
agucaccucauggaa

SEQ ID NO: 1608792 - RNA, 14 nt, Human
agucaccucaugga

SEQ ID NO: 1608793 - RNA, 23 nt, Human
agucacacagugagucgaggaca

SEQ ID NO: 1608794 - RNA, 15 nt, Human
agucacacagugagu

SEQ ID NO: 1608795 - RNA, 19 nt, Human
agucaccccggccaccugc

SEQ ID NO: 1608796 - RNA, 18 nt, Human
aguauuucuaugaaauau

SEQ ID NO: 1608797 - RNA, 16 nt, Human
aguauuucuaugaaau

SEQ ID NO: 1608798 - RNA, 17 nt, Human
aguauuucuaugaaaua

SEQ ID NO: 1608799 - RNA, 14 nt, Human
aguaauaugcacac

SEQ ID NO: 1608800 - RNA, 15 nt, Human
aguaauaugcacaca

SEQ ID NO: 1608801 - RNA, 17 nt, Human
aguaaugauaacuggaa

SEQ ID NO: 1608802 - RNA, 17 nt, Human
aguaauaugcacacauu

SEQ ID NO: 1608803 - RNA, 20 nt, Human
aguaaugauaacuggaaacu

SEQ ID NO: 1608804 - RNA, 18 nt, Human
aguaaugauaacuggaaa

SEQ ID NO: 1608805 - RNA, 13 nt, Human
aguaaaauccaca

SEQ ID NO: 1608806 - RNA, 16 nt, Human
uguagaggagaaacug

SEQ ID NO: 1608807 - RNA, 14 nt, Human
uguagagcuucugg

SEQ ID NO: 1608808 - RNA, 18 nt, Human
uguagagccagggucuca

SEQ ID NO: 1608809 - RNA, 16 nt, Human
uguagagccagggucu

SEQ ID NO: 1608810 - RNA, 23 nt, Human
uguacuugcucuugaugccuggc

SEQ ID NO: 1608811 - RNA, 22 nt, Human
uguacuugcucuugaugccugg

SEQ ID NO: 1608812 - RNA, 20 nt, Human
aguagaagucuuagauguau

SEQ ID NO: 1608813 - RNA, 19 nt, Human
aguagaagucuuagaugua

SEQ ID NO: 1608814 - RNA, 21 nt, Human
aguagaagucuuagauguaua

SEQ ID NO: 1608815 - RNA, 20 nt, Human
uguaggcauaaagucagggg

SEQ ID NO: 1608816 - RNA, 17 nt, Human
uguaggcauaaagucag

SEQ ID NO: 1608817 - RNA, 11 nt, Human
aguagagacag

SEQ ID NO: 1608818 - RNA, 18 nt, Human
aggggagcaugggaagug

SEQ ID NO: 1608819 - RNA, 16 nt, Human
aggggaauugaggaca

SEQ ID NO: 1608820 - RNA, 21 nt, Human
aggggaauguuugccucugcc

SEQ ID NO: 1608821 - RNA, 20 nt, Human
aggggaauguuugccucugc

SEQ ID NO: 1608822 - RNA, 19 nt, Human
aggggaauguuugccucug

SEQ ID NO: 1608823 - RNA, 18 nt, Human
aggggugggacacccugu

SEQ ID NO: 1608824 - RNA, 20 nt, Human
aggggguggccucccaacuc

SEQ ID NO: 1608825 - RNA, 13 nt, Human
agggggcugggac

SEQ ID NO: 1608826 - RNA, 15 nt, Human
aggguaaggcugugg

SEQ ID NO: 1608827 - RNA, 15 nt, Human
agggucucacucugu

SEQ ID NO: 1608828 - RNA, 14 nt, Human
agggucucacucug

SEQ ID NO: 1608829 - RNA, 16 nt, Human
agggucucacucuguc

SEQ ID NO: 1608830 - RNA, 21 nt, Human
agggucucacucugucgccca

SEQ ID NO: 1608831 - RNA, 22 nt, Human
uggguggcaccagcagccugga

SEQ ID NO: 1608832 - RNA, 21 nt, Human
uggguggcaccagcagccugg

SEQ ID NO: 1608833 - RNA, 20 nt, Human
uggguggcaccagcagccug

SEQ ID NO: 1608834 - RNA, 17 nt, Human
uggguggcaccagcagc

SEQ ID NO: 1608835 - RNA, 20 nt, Human
ugguagagugugccugaagu

SEQ ID NO: 1608836 - RNA, 17 nt, Human
ugguagcuuuucccuuc

SEQ ID NO: 1608837 - RNA, 16 nt, Human
aggguggugaccucug

SEQ ID NO: 1608838 - RNA, 18 nt, Human
ugggucgcccuggacugu

SEQ ID NO: 1608839 - RNA, 16 nt, Human
ugggucgcccuggacu

SEQ ID NO: 1608840 - RNA, 15 nt, Human
uggggaggggcugug

SEQ ID NO: 1608841 - RNA, 12 nt, Human
uggggcccugcc

SEQ ID NO: 1608842 - RNA, 23 nt, Human
uggggcugcaccggcuggccugg

SEQ ID NO: 1608843 - RNA, 15 nt, Human
uggggaccucaggcc

SEQ ID NO: 1608844 - RNA, 14 nt, Human
uggggaccucaggc

SEQ ID NO: 1608845 - RNA, 15 nt, Human
agggcuccagacaca

SEQ ID NO: 1608846 - RNA, 12 nt, Human
agggcuccagac

SEQ ID NO: 1608847 - RNA, 17 nt, Human
uggggaccucaggccug

SEQ ID NO: 1608848 - RNA, 16 nt, Human
uggggaccucaggccu

SEQ ID NO: 1608849 - RNA, 22 nt, Human
uggggucacucuggcagcucag

SEQ ID NO: 1608850 - RNA, 16 nt, Human
uggggucacucuggca

SEQ ID NO: 1608851 - RNA, 14 nt, Human
uggggucacucugg

SEQ ID NO: 1608852 - RNA, 13 nt, Human
uggggucacucug

SEQ ID NO: 1608853 - RNA, 20 nt, Human
ugggguacccacugcucugg

SEQ ID NO: 1608854 - RNA, 19 nt, Human
ugggguacccacugcucug

SEQ ID NO: 1608855 - RNA, 18 nt, Human
ugggguacccacugcucu

SEQ ID NO: 1608856 - RNA, 17 nt, Human
ugggguacccacugcuc

SEQ ID NO: 1608857 - RNA, 13 nt, Human
aggggaaaagagg

SEQ ID NO: 1608858 - RNA, 14 nt, Human
aggggaacagacug

SEQ ID NO: 1608859 - RNA, 22 nt, Human
aggggaaaaucagccugcucca

SEQ ID NO: 1608860 - RNA, 18 nt, Human
aggggaaaaucagccugc

SEQ ID NO: 1608861 - RNA, 13 nt, Human
aggggaauguuug

SEQ ID NO: 1608862 - RNA, 21 nt, Human
aggggaauaaacuguugaguc

SEQ ID NO: 1608863 - RNA, 22 nt, Human
agggaggacgcucucuggccuu

SEQ ID NO: 1608864 - RNA, 21 nt, Human
agggaggacgcucucuggccu

SEQ ID NO: 1608865 - RNA, 23 nt, Human
agggaggacgcucucuggccuuc

SEQ ID NO: 1608866 - RNA, 16 nt, Human
ugggacuacaggcacc

SEQ ID NO: 1608867 - RNA, 15 nt, Human
ugggacuacaggcac

SEQ ID NO: 1608868 - RNA, 14 nt, Human
ugggacuacaggca

SEQ ID NO: 1608869 - RNA, 20 nt, Human
ugggacucaaugcacugaca

SEQ ID NO: 1608870 - RNA, 16 nt, Human
ugggagagccuuccag

SEQ ID NO: 1608871 - RNA, 18 nt, Human
ugggagacugcugaguca

SEQ ID NO: 1608872 - RNA, 21 nt, Human
ugggagagaagagaaugcaca

SEQ ID NO: 1608873 - RNA, 19 nt, Human
ugggagagaagagaaugca

SEQ ID NO: 1608874 - RNA, 20 nt, Human
aggcccggcuccaggcuccu

SEQ ID NO: 1608875 - RNA, 18 nt, Human
aggcccggcuccaggcuc

SEQ ID NO: 1608876 - RNA, 21 nt, Human
aggcccggcuccaggcuccuu

SEQ ID NO: 1608877 - RNA, 22 nt, Human
agggaaggauacaaaagcaugu

SEQ ID NO: 1608878 - RNA, 22 nt, Human
agggaaggggacaaggacuagg

SEQ ID NO: 1608879 - RNA, 13 nt, Human
agggaaggggaca

SEQ ID NO: 1608880 - RNA, 21 nt, Human
agggaauuucuucaacucccu

SEQ ID NO: 1608881 - RNA, 17 nt, Human
agggagggagggcucca

SEQ ID NO: 1608882 - RNA, 15 nt, Human
agggagggagggcuc

SEQ ID NO: 1608883 - RNA, 19 nt, Human
ugggccccugccucucugc

SEQ ID NO: 1608884 - RNA, 15 nt, Human
ugggccccugccucu

SEQ ID NO: 1608885 - RNA, 20 nt, Human
ugggccccugccucucugca

SEQ ID NO: 1608886 - RNA, 21 nt, Human
ugggcccccaaauggaaaugg

SEQ ID NO: 1608887 - RNA, 16 nt, Human
ugggcccccaaaugga

SEQ ID NO: 1608888 - RNA, 22 nt, Human
ugggccccaguuguauuuauuu

SEQ ID NO: 1608889 - RNA, 18 nt, Human
ugggccccaguuguauuu

SEQ ID NO: 1608890 - RNA, 20 nt, Human
ugggaggccaaggugggagg

SEQ ID NO: 1608891 - RNA, 19 nt, Human
ugggaggccaaggugggag

SEQ ID NO: 1608892 - RNA, 22 nt, Human
ugggaggaucucuugagccugg

SEQ ID NO: 1608893 - RNA, 21 nt, Human
ugggaggaucucuugagccug

SEQ ID NO: 1608894 - RNA, 20 nt, Human
ugggaggaucucuugagccu

SEQ ID NO: 1608895 - RNA, 13 nt, Human
ugggcagagcaga

SEQ ID NO: 1608896 - RNA, 18 nt, Human
ugggccaggagccuccug

SEQ ID NO: 1608897 - RNA, 12 nt, Human
ugggcagagcag

SEQ ID NO: 1608898 - RNA, 11 nt, Human
ugggcagagca

SEQ ID NO: 1608899 - RNA, 12 nt, Human
ugggcagaagga

SEQ ID NO: 1608900 - RNA, 23 nt, Human
agggcucagcggggacagcuccu

SEQ ID NO: 1608901 - RNA, 22 nt, Human
agggcucagcggggacagcucc

SEQ ID NO: 1608902 - RNA, 20 nt, Human
agggcucagcggggacagcu

SEQ ID NO: 1608903 - RNA, 19 nt, Human
agggcucagcggggacagc

SEQ ID NO: 1608904 - RNA, 15 nt, Human
agggagggcuccaga

SEQ ID NO: 1608905 - RNA, 14 nt, Human
agggagggcuccag

SEQ ID NO: 1608906 - RNA, 16 nt, Human
agggagggcuccagac

SEQ ID NO: 1608907 - RNA, 17 nt, Human
agggagggcuccagaca

SEQ ID NO: 1608908 - RNA, 14 nt, Human
agggcacugguggc

SEQ ID NO: 1608909 - RNA, 16 nt, Human
agggcacugguggccc

SEQ ID NO: 1608910 - RNA, 17 nt, Human
agggcauggccaggugg

SEQ ID NO: 1608911 - RNA, 15 nt, Human
uuaauucuuagcuca

SEQ ID NO: 1608912 - RNA, 20 nt, Human
uuaaugaaagacuguacaaa

SEQ ID NO: 1608913 - RNA, 23 nt, Human
uuaaugaaagacuguacaaagua

SEQ ID NO: 1608914 - RNA, 17 nt, Human
uuaauaaacacucuuga

SEQ ID NO: 1608915 - RNA, 13 nt, Human
uuaauaaacacuc

SEQ ID NO: 1608916 - RNA, 19 nt, Human
uuaauuuuuuugagacaga

SEQ ID NO: 1608917 - RNA, 16 nt, Human
auaaaauuaaagcuga

SEQ ID NO: 1608918 - RNA, 23 nt, Human
auaaacaagaccacguuucuaaa

SEQ ID NO: 1608919 - RNA, 15 nt, Human
auaaacaagaccacg

SEQ ID NO: 1608920 - RNA, 22 nt, Human
auaaacaagaccacguuucuaa

SEQ ID NO: 1608921 - RNA, 20 nt, Human
auaaaauuuuuaaucuuuaa

SEQ ID NO: 1608922 - RNA, 22 nt, Human
uuaagaagacugcauuauauuu

SEQ ID NO: 1608923 - RNA, 13 nt, Human
uuaagaggcaggg

SEQ ID NO: 1608924 - RNA, 16 nt, Human
uuaagaggcagggucu

SEQ ID NO: 1608925 - RNA, 15 nt, Human
uuaagaggcaggguc

SEQ ID NO: 1608926 - RNA, 18 nt, Human
uuaaguaaggaauuuuau

SEQ ID NO: 1608927 - RNA, 18 nt, Human
uuaaguaaugauaacugg

SEQ ID NO: 1608928 - RNA, 17 nt, Human
uuaaguacuauguauca

SEQ ID NO: 1608929 - RNA, 14 nt, Human
uuaagugcugcauu

SEQ ID NO: 1608930 - RNA, 22 nt, Human
uuaagugcugcauuuaaaagau

SEQ ID NO: 1608931 - RNA, 19 nt, Human
auaaaauccauacauuugu

SEQ ID NO: 1608932 - RNA, 18 nt, Human
auaaaauccauacauuug

SEQ ID NO: 1608933 - RNA, 22 nt, Human
auaaaauaauuuuuauauuuga

SEQ ID NO: 1608934 - RNA, 21 nt, Human
auaaaauaauuuuuauauuug

SEQ ID NO: 1608935 - RNA, 16 nt, Human
auaaaauaauuuuuau

SEQ ID NO: 1608936 - RNA, 14 nt, Human
uuaccuuacagaag

SEQ ID NO: 1608937 - RNA, 18 nt, Human
uuacucagaauucucuag

SEQ ID NO: 1608938 - RNA, 23 nt, Human
uuacucagaauucucuaguuuga

SEQ ID NO: 1608939 - RNA, 15 nt, Human
uuacuguaagaaaau

SEQ ID NO: 1608940 - RNA, 14 nt, Human
uuagaaauauaauu

SEQ ID NO: 1608941 - RNA, 12 nt, Human
uuagaaauauaa

SEQ ID NO: 1608942 - RNA, 11 nt, Human
uuagaaauaua

SEQ ID NO: 1608943 - RNA, 11 nt, Human
uuagacagagu

SEQ ID NO: 1608944 - RNA, 13 nt, Human
uuagaaccuuucu

SEQ ID NO: 1608945 - RNA, 14 nt, Human
uuacaggaaguacu

SEQ ID NO: 1608946 - RNA, 14 nt, Human
uuacagcugccugc

SEQ ID NO: 1608947 - RNA, 13 nt, Human
uuacagcugccug

SEQ ID NO: 1608948 - RNA, 13 nt, Human
uuacaguauaauu

SEQ ID NO: 1608949 - RNA, 17 nt, Human
uuacaguauaauuaaca

SEQ ID NO: 1608950 - RNA, 16 nt, Human
uuacaguauaauuaac

SEQ ID NO: 1608951 - RNA, 20 nt, Human
uuacaguauaauuaacaugu

SEQ ID NO: 1608952 - RNA, 19 nt, Human
uuacaguauaauuaacaug

SEQ ID NO: 1608953 - RNA, 18 nt, Human
uuacaguauaauuaacau

SEQ ID NO: 1608954 - RNA, 18 nt, Human
auaaacacucuugaaaaa

SEQ ID NO: 1608955 - RNA, 21 nt, Human
auaaauagcuagacuggugac

SEQ ID NO: 1608956 - RNA, 18 nt, Human
auaaauagcuagacuggu

SEQ ID NO: 1608957 - RNA, 16 nt, Human
auaaauagcuagacug

SEQ ID NO: 1608958 - RNA, 22 nt, Human
auaaaucugugaacuugaaauu

SEQ ID NO: 1608959 - RNA, 21 nt, Human
auaaaucugugaacuugaaau

SEQ ID NO: 1608960 - RNA, 20 nt, Human
auaaaucugugaacuugaaa

SEQ ID NO: 1608961 - RNA, 19 nt, Human
uguuucuuuguaaugaaaa

SEQ ID NO: 1608962 - RNA, 18 nt, Human
uguuucuuuguaaugaaa

SEQ ID NO: 1608963 - RNA, 22 nt, Human
uguuugauucagacagcugccu

SEQ ID NO: 1608964 - RNA, 17 nt, Human
uguuugauucagacagc

SEQ ID NO: 1608965 - RNA, 19 nt, Human
uguuuauugucaaaguggu

SEQ ID NO: 1608966 - RNA, 14 nt, Human
uguuuauuacagua

SEQ ID NO: 1608967 - RNA, 18 nt, Human
uguuuauuacaguauaau

SEQ ID NO: 1608968 - RNA, 19 nt, Human
uguugcccaggcaggucuu

SEQ ID NO: 1608969 - RNA, 19 nt, Human
uguugccuugcauaauggu

SEQ ID NO: 1608970 - RNA, 22 nt, Human
uguuuagucuugucucagauuu

SEQ ID NO: 1608971 - RNA, 23 nt, Human
uguuuagucuugucucagauuuu

SEQ ID NO: 1608972 - RNA, 19 nt, Human
uguuuucauuaucucaaaa

SEQ ID NO: 1608973 - RNA, 20 nt, Human
uguuuuccaugaguccccug

SEQ ID NO: 1608974 - RNA, 21 nt, Human
uguuuuauuuuaauucaguug

SEQ ID NO: 1608975 - RNA, 21 nt, Human
uguuuuauuuaaccucuaaau

SEQ ID NO: 1608976 - RNA, 13 nt, Human
uguuuggagacag

SEQ ID NO: 1608977 - RNA, 19 nt, Human
uguuuggaccaaaaaccag

SEQ ID NO: 1608978 - RNA, 16 nt, Human
aguucugcagauaaac

SEQ ID NO: 1608979 - RNA, 21 nt, Human
aguucugcagauaaacaguag

SEQ ID NO: 1608980 - RNA, 14 nt, Human
uguuuugcaagcca

SEQ ID NO: 1608981 - RNA, 14 nt, Human
aguucugguuccua

SEQ ID NO: 1608982 - RNA, 22 nt, Human
aguugcauagguuuaauaauuu

SEQ ID NO: 1608983 - RNA, 23 nt, Human
aguugccuaaauccauuuggaaa

SEQ ID NO: 1608984 - RNA, 22 nt, Human
aguugccuaaauccauuuggaa

SEQ ID NO: 1608985 - RNA, 13 nt, Human
aguugggcuuccu

SEQ ID NO: 1608986 - RNA, 13 nt, Human
aguuggcuucuaa

SEQ ID NO: 1608987 - RNA, 21 nt, Human
aguuggguggaugccuggugg

SEQ ID NO: 1608988 - RNA, 16 nt, Human
aguuggguguauugug

SEQ ID NO: 1608989 - RNA, 16 nt, Human
aguuggcuaggacccc

SEQ ID NO: 1608990 - RNA, 23 nt, Human
aguuguuugauucagacagcugc

SEQ ID NO: 1608991 - RNA, 21 nt, Human
aguuguuugauucagacagcu

SEQ ID NO: 1608992 - RNA, 18 nt, Human
aguuggucccccuuccau

SEQ ID NO: 1608993 - RNA, 20 nt, Human
aguuggguguauugugcgcu

SEQ ID NO: 1608994 - RNA, 17 nt, Human
aguuggguguauugugc

SEQ ID NO: 1608995 - RNA, 20 nt, Human
aguuuaauauuaaagccaug

SEQ ID NO: 1608996 - RNA, 19 nt, Human
aguuuaauauuaaagccau

SEQ ID NO: 1608997 - RNA, 18 nt, Human
aguuuaauauuaaagcca

SEQ ID NO: 1608998 - RNA, 16 nt, Human
aguuuaauauuaaagc

SEQ ID NO: 1608999 - RNA, 15 nt, Human
aguuuaauauuaaag

SEQ ID NO: 1609000 - RNA, 13 nt, Human
uuaaauaauguga

SEQ ID NO: 1609001 - RNA, 14 nt, Human
uuaacaacagcugg

SEQ ID NO: 1609002 - RNA, 20 nt, Human
uguggucacaggaaguagag

SEQ ID NO: 1609003 - RNA, 23 nt, Human
uguggguuucuaaagcugccagc

SEQ ID NO: 1609004 - RNA, 21 nt, Human
uguggguuucuaaagcugcca

SEQ ID NO: 1609005 - RNA, 15 nt, Human
uguggucccacccca

SEQ ID NO: 1609006 - RNA, 13 nt, Human
uguggucccaccc

SEQ ID NO: 1609007 - RNA, 16 nt, Human
uguggucccaccccac

SEQ ID NO: 1609008 - RNA, 16 nt, Human
ugugguguuuccuggc

SEQ ID NO: 1609009 - RNA, 14 nt, Human
ugugguguuuccug

SEQ ID NO: 1609010 - RNA, 20 nt, Human
ugugguguuuccuggcacug

SEQ ID NO: 1609011 - RNA, 18 nt, Human
uguguaagacaaaaagcu

SEQ ID NO: 1609012 - RNA, 21 nt, Human
agugcugggauuacaggugug

SEQ ID NO: 1609013 - RNA, 16 nt, Human
agugcugcauuuaaaa

SEQ ID NO: 1609014 - RNA, 17 nt, Human
agugcugcauuuaaaag

SEQ ID NO: 1609015 - RNA, 20 nt, Human
agugcugggauuacaggugu

SEQ ID NO: 1609016 - RNA, 19 nt, Human
agugcugcauuuaaaagau

SEQ ID NO: 1609017 - RNA, 23 nt, Human
agugaguugauagcacagacccu

SEQ ID NO: 1609018 - RNA, 22 nt, Human
agugaguugauagcacagaccc

SEQ ID NO: 1609019 - RNA, 20 nt, Human
agugaguuggguguauugug

SEQ ID NO: 1609020 - RNA, 19 nt, Human
agugaguuggguguauugu

SEQ ID NO: 1609021 - RNA, 12 nt, Human
agugcugcauuu

SEQ ID NO: 1609022 - RNA, 13 nt, Human
agugcugcauuua

SEQ ID NO: 1609023 - RNA, 13 nt, Human
uguguugaagagg

SEQ ID NO: 1609024 - RNA, 13 nt, Human
uguguaaguagau

SEQ ID NO: 1609025 - RNA, 20 nt, Human
ugugucucuugguccugcug

SEQ ID NO: 1609026 - RNA, 17 nt, Human
ugugucucuugguccug

SEQ ID NO: 1609027 - RNA, 22 nt, Human
ugugucucuugguccugcugca

SEQ ID NO: 1609028 - RNA, 21 nt, Human
ugugucucuugguccugcugc

SEQ ID NO: 1609029 - RNA, 21 nt, Human
ugugucuugcaauggcagccu

SEQ ID NO: 1609030 - RNA, 19 nt, Human
ugugucuuuaaaugcugcu

SEQ ID NO: 1609031 - RNA, 20 nt, Human
ugugugaaagguacuucaaa

SEQ ID NO: 1609032 - RNA, 23 nt, Human
uguguguuuauugucaaaguggu

SEQ ID NO: 1609033 - RNA, 19 nt, Human
uguguguuuauugucaaag

SEQ ID NO: 1609034 - RNA, 11 nt, Human
ugugugugugc

SEQ ID NO: 1609035 - RNA, 20 nt, Human
agugugucuuagugugugca

SEQ ID NO: 1609036 - RNA, 15 nt, Human
uguuauaaucuuuca

SEQ ID NO: 1609037 - RNA, 20 nt, Human
uguuccacaaguuaaauaaa

SEQ ID NO: 1609038 - RNA, 18 nt, Human
uguuccuagugaaagagg

SEQ ID NO: 1609039 - RNA, 14 nt, Human
uguuccuagugaaa

SEQ ID NO: 1609040 - RNA, 16 nt, Human
uguucugggacacagu

SEQ ID NO: 1609041 - RNA, 18 nt, Human
uguugcccaggcaggucu

SEQ ID NO: 1609042 - RNA, 17 nt, Human
uguugcccaggcagguc

SEQ ID NO: 1609043 - RNA, 16 nt, Human
uguugcccaggcaggu

SEQ ID NO: 1609044 - RNA, 15 nt, Human
uguugcccaggcagg

SEQ ID NO: 1609045 - RNA, 13 nt, Human
uguugcccaggca

SEQ ID NO: 1609046 - RNA, 18 nt, Human
uguucugugauauaagug

SEQ ID NO: 1609047 - RNA, 15 nt, Human
uguucugugauauaa

SEQ ID NO: 1609048 - RNA, 20 nt, Human
agugugguguuuccuggcac

SEQ ID NO: 1609049 - RNA, 19 nt, Human
agugugguguuuccuggca

SEQ ID NO: 1609050 - RNA, 17 nt, Human
agugugguguuuccugg

SEQ ID NO: 1609051 - RNA, 20 nt, Human
agugugccugaagucccaga

SEQ ID NO: 1609052 - RNA, 16 nt, Human
agugugguguuuccug

SEQ ID NO: 1609053 - RNA, 21 nt, Human
agugguggugaacagaacaaa

SEQ ID NO: 1609054 - RNA, 17 nt, Human
aguggugguuuucuguu

SEQ ID NO: 1609055 - RNA, 18 nt, Human
aguggugguuuucuguuc

SEQ ID NO: 1609056 - RNA, 19 nt, Human
aguggugguuuucuguucu

SEQ ID NO: 1609057 - RNA, 20 nt, Human
aguggugguuuucuguucuu

SEQ ID NO: 1609058 - RNA, 21 nt, Human
aguggugguuuucuguucuuu

SEQ ID NO: 1609059 - RNA, 23 nt, Human
aguggugguuuucuguucuuucu

SEQ ID NO: 1609060 - RNA, 17 nt, Human
aguggugcgaucugggu

SEQ ID NO: 1609061 - RNA, 14 nt, Human
uguuacaaauugua

SEQ ID NO: 1609062 - RNA, 21 nt, Human
ugugaaaggaaagagggaggu

SEQ ID NO: 1609063 - RNA, 18 nt, Human
ugugaaaggaaagaggcu

SEQ ID NO: 1609064 - RNA, 15 nt, Human
ugugaaaggaaagag

SEQ ID NO: 1609065 - RNA, 12 nt, Human
ugugaaauuauu

SEQ ID NO: 1609066 - RNA, 14 nt, Human
ugugaagagaacca

SEQ ID NO: 1609067 - RNA, 21 nt, Human
ugugaaccaccacacccagcc

SEQ ID NO: 1609068 - RNA, 20 nt, Human
ugugaaccaccacacccagc

SEQ ID NO: 1609069 - RNA, 19 nt, Human
ugugaaccaccacacccag

SEQ ID NO: 1609070 - RNA, 20 nt, Human
ugugaacaguuguguuugaa

SEQ ID NO: 1609071 - RNA, 12 nt, Human
ugugaacuugaa

SEQ ID NO: 1609072 - RNA, 16 nt, Human
ugugaacuugaaauuu

SEQ ID NO: 1609073 - RNA, 15 nt, Human
ugugaacuugaaauu

SEQ ID NO: 1609074 - RNA, 14 nt, Human
ugugaacuugaaau

SEQ ID NO: 1609075 - RNA, 22 nt, Human
agucucaggaaaucaaauaugc

SEQ ID NO: 1609076 - RNA, 22 nt, Human
ugugagaugcuagaacucccuu

SEQ ID NO: 1609077 - RNA, 19 nt, Human
ugugagaugcuagaacucc

SEQ ID NO: 1609078 - RNA, 15 nt, Human
ugugagaugcuagaa

SEQ ID NO: 1609079 - RNA, 16 nt, Human
ugugacugaucucucg

SEQ ID NO: 1609080 - RNA, 16 nt, Human
ugugacugaauuucuu

SEQ ID NO: 1609081 - RNA, 15 nt, Human
ugugacugaauuucu

SEQ ID NO: 1609082 - RNA, 14 nt, Human
agucucuucuccac

SEQ ID NO: 1609083 - RNA, 13 nt, Human
agucucuucucca

SEQ ID NO: 1609084 - RNA, 14 nt, Human
agucuuuguacaga

SEQ ID NO: 1609085 - RNA, 17 nt, Human
agucucuucuccacugg

SEQ ID NO: 1609086 - RNA, 18 nt, Human
agucucuucuccacugga

SEQ ID NO: 1609087 - RNA, 16 nt, Human
agucucuucuccacug

SEQ ID NO: 1609088 - RNA, 15 nt, Human
agucucuucuccacu

SEQ ID NO: 1609089 - RNA, 20 nt, Human
ugugauggggcccugccucc

SEQ ID NO: 1609090 - RNA, 19 nt, Human
ugugauggggcccugccuc

SEQ ID NO: 1609091 - RNA, 18 nt, Human
ugugaugagaggaaauca

SEQ ID NO: 1609092 - RNA, 20 nt, Human
agugaacaaauuuacagaga

SEQ ID NO: 1609093 - RNA, 16 nt, Human
agugaacaaauuuaca

SEQ ID NO: 1609094 - RNA, 15 nt, Human
agugaaagaaaauaa

SEQ ID NO: 1609095 - RNA, 17 nt, Human
agugaaagaaaauaaca

SEQ ID NO: 1609096 - RNA, 18 nt, Human
ugugccagauuuaugcau

SEQ ID NO: 1609097 - RNA, 16 nt, Human
ugugccaugugccagg

SEQ ID NO: 1609098 - RNA, 12 nt, Human
ugugccaugugc

SEQ ID NO: 1609099 - RNA, 20 nt, Human
ugugccagguuuuuggucug

SEQ ID NO: 1609100 - RNA, 20 nt, Human
ugugccagauuuaugcauau

SEQ ID NO: 1609101 - RNA, 17 nt, Human
uguggaguucaucuuga

SEQ ID NO: 1609102 - RNA, 18 nt, Human
ugugcugggguuaucuga

SEQ ID NO: 1609103 - RNA, 21 nt, Human
uguggaguucaucuugaauug

SEQ ID NO: 1609104 - RNA, 21 nt, Human
ugugcccccauguaagcaccc

SEQ ID NO: 1609105 - RNA, 15 nt, Human
agugagucgaggaca

SEQ ID NO: 1609106 - RNA, 20 nt, Human
agugaggcucugcccuuggu

SEQ ID NO: 1609107 - RNA, 19 nt, Human
agugaggcucugcccuugg

SEQ ID NO: 1609108 - RNA, 21 nt, Human
agugaggcucugcccuugguu

SEQ ID NO: 1609109 - RNA, 14 nt, Human
agugagggauuauc

SEQ ID NO: 1609110 - RNA, 17 nt, Human
agugaggcucugcccuu

SEQ ID NO: 1609111 - RNA, 16 nt, Human
agugaggcucugcccu

SEQ ID NO: 1609112 - RNA, 15 nt, Human
agugaggcucugccc

SEQ ID NO: 1609113 - RNA, 18 nt, Human
auauguuuuaagaggcag

SEQ ID NO: 1609114 - RNA, 20 nt, Human
auauguuuuaagaggcaggg

SEQ ID NO: 1609115 - RNA, 22 nt, Human
auauuaaggaagacaaugugaa

SEQ ID NO: 1609116 - RNA, 24 nt, Human
auauuaagaaagacuaucuaaaug

SEQ ID NO: 1609117 - RNA, 23 nt, Human
auauuaaagccauguuuauuaca

SEQ ID NO: 1609118 - RNA, 18 nt, Human
auauuaaagccauguuua

SEQ ID NO: 1609119 - RNA, 15 nt, Human
auauuaaagccaugu

SEQ ID NO: 1609120 - RNA, 19 nt, Human
auauugauuuccguuaaaa

SEQ ID NO: 1609121 - RNA, 21 nt, Human
auauugauuuccguuaaaaua

SEQ ID NO: 1609122 - RNA, 22 nt, Human
auauugauuuccguuaaaauac

SEQ ID NO: 1609123 - RNA, 22 nt, Human
auauugauccagaaagaaaacu

SEQ ID NO: 1609124 - RNA, 15 nt, Human
auauugauccagaaa

SEQ ID NO: 1609125 - RNA, 16 nt, Human
auauucuguuggccag

SEQ ID NO: 1609126 - RNA, 23 nt, Human
auauucucacagcuccaagaauu

SEQ ID NO: 1609127 - RNA, 22 nt, Human
auauucucacagcuccaagaau

SEQ ID NO: 1609128 - RNA, 21 nt, Human
auauugcugauggugcaauga

SEQ ID NO: 1609129 - RNA, 17 nt, Human
auauugcugauggugca

SEQ ID NO: 1609130 - RNA, 13 nt, Human
auauuugaaauau

SEQ ID NO: 1609131 - RNA, 20 nt, Human
auauuguuuucaguguacau

SEQ ID NO: 1609132 - RNA, 22 nt, Human
auauuuguaucacaaaucuuaa

SEQ ID NO: 1609133 - RNA, 12 nt, Human
auauuuuaacuu

SEQ ID NO: 1609134 - RNA, 23 nt, Human
auauuugaaauauugacuuuuua

SEQ ID NO: 1609135 - RNA, 19 nt, Human
auauuugaaauauugacuu

SEQ ID NO: 1609136 - RNA, 14 nt, Human
auauuugaaauauu

SEQ ID NO: 1609137 - RNA, 21 nt, Human
aucaagaugugacauguuuua

SEQ ID NO: 1609138 - RNA, 13 nt, Human
aucaaguauuaua

SEQ ID NO: 1609139 - RNA, 14 nt, Human
aucaaguauuauac

SEQ ID NO: 1609140 - RNA, 18 nt, Human
aucaaguauuauaccuuu

SEQ ID NO: 1609141 - RNA, 13 nt, Human
auauuuucauucu

SEQ ID NO: 1609142 - RNA, 22 nt, Human
aucacggcucacugcagccuca

SEQ ID NO: 1609143 - RNA, 20 nt, Human
uuccuuuuaaaacacuucca

SEQ ID NO: 1609144 - RNA, 22 nt, Human
uuccuuuuaaaacacuuccaua

SEQ ID NO: 1609145 - RNA, 21 nt, Human
uuccuuuuaaaacacuuccau

SEQ ID NO: 1609146 - RNA, 15 nt, Human
uuccuaauccucuag

SEQ ID NO: 1609147 - RNA, 13 nt, Human
uuccuaauccucu

SEQ ID NO: 1609148 - RNA, 14 nt, Human
auauuuuaagacga

SEQ ID NO: 1609149 - RNA, 13 nt, Human
auauuuuaugauc

SEQ ID NO: 1609150 - RNA, 12 nt, Human
auauuuuaugau

SEQ ID NO: 1609151 - RNA, 22 nt, Human
auauuuuaugauccagcagauu

SEQ ID NO: 1609152 - RNA, 17 nt, Human
auauuuuaugauccagc

SEQ ID NO: 1609153 - RNA, 17 nt, Human
uuccuaauccucuagga

SEQ ID NO: 1609154 - RNA, 17 nt, Human
uuccuguucccaugaga

SEQ ID NO: 1609155 - RNA, 11 nt, Human
uuccucuuucc

SEQ ID NO: 1609156 - RNA, 15 nt, Human
uuccugggagcuuuu

SEQ ID NO: 1609157 - RNA, 16 nt, Human
uuccugggagcuuuug

SEQ ID NO: 1609158 - RNA, 14 nt, Human
uuccuucagugccu

SEQ ID NO: 1609159 - RNA, 11 nt, Human
uuccuucagug

SEQ ID NO: 1609160 - RNA, 15 nt, Human
uuccuucagugccuu

SEQ ID NO: 1609161 - RNA, 20 nt, Human
auauuuucaacgcagcccug

SEQ ID NO: 1609162 - RNA, 19 nt, Human
auauuuucaacgcagcccu

SEQ ID NO: 1609163 - RNA, 21 nt, Human
auauuuucaugcuguucauga

SEQ ID NO: 1609164 - RNA, 18 nt, Human
auauuuucaugcuguuca

SEQ ID NO: 1609165 - RNA, 17 nt, Human
aucagcacgauuucugu

SEQ ID NO: 1609166 - RNA, 18 nt, Human
aucagcacgauuucuguu

SEQ ID NO: 1609167 - RNA, 15 nt, Human
aucagcacgauuucu

SEQ ID NO: 1609168 - RNA, 16 nt, Human
aucagcacgauuucug

SEQ ID NO: 1609169 - RNA, 23 nt, Human
aucauaguggcuuaaaacaacac

SEQ ID NO: 1609170 - RNA, 15 nt, Human
aucauugaaaucuuu

SEQ ID NO: 1609171 - RNA, 14 nt, Human
aucauugaaaucuu

SEQ ID NO: 1609172 - RNA, 22 nt, Human
aucauuaaagccugaguuugcu

SEQ ID NO: 1609173 - RNA, 14 nt, Human
aucauucauuuucu

SEQ ID NO: 1609174 - RNA, 18 nt, Human
uucucaacuccaaacuga

SEQ ID NO: 1609175 - RNA, 14 nt, Human
uucucaacuccaaa

SEQ ID NO: 1609176 - RNA, 13 nt, Human
uucuaggccuggg

SEQ ID NO: 1609177 - RNA, 23 nt, Human
uucucagaaucucaaauaacuaa

SEQ ID NO: 1609178 - RNA, 22 nt, Human
uucucagaaucucaaauaacua

SEQ ID NO: 1609179 - RNA, 19 nt, Human
uucucagaaucucaaauaa

SEQ ID NO: 1609180 - RNA, 20 nt, Human
uucucacagcuccaagaauu

SEQ ID NO: 1609181 - RNA, 14 nt, Human
aucccucccuccac

SEQ ID NO: 1609182 - RNA, 23 nt, Human
aucccucccuccaccucccugca

SEQ ID NO: 1609183 - RNA, 11 nt, Human
aucccucccuc

SEQ ID NO: 1609184 - RNA, 13 nt, Human
aucccucccucca

SEQ ID NO: 1609185 - RNA, 16 nt, Human
aucccauaugccuggg

SEQ ID NO: 1609186 - RNA, 17 nt, Human
aucccauaugccugggc

SEQ ID NO: 1609187 - RNA, 16 nt, Human
auccagguucagcuug

SEQ ID NO: 1609188 - RNA, 15 nt, Human
auccagguucagcuu

SEQ ID NO: 1609189 - RNA, 17 nt, Human
auccaggguggugguga

SEQ ID NO: 1609190 - RNA, 17 nt, Human
aucccaggauguacaag

SEQ ID NO: 1609191 - RNA, 13 nt, Human
uucugaagaagau

SEQ ID NO: 1609192 - RNA, 12 nt, Human
uucugaagaaga

SEQ ID NO: 1609193 - RNA, 21 nt, Human
uucugaaauuuccugggagcu

SEQ ID NO: 1609194 - RNA, 23 nt, Human
uucugcaucagcugcugaaacaa

SEQ ID NO: 1609195 - RNA, 14 nt, Human
uucugaagaagaug

SEQ ID NO: 1609196 - RNA, 15 nt, Human
uucugaaagggacgc

SEQ ID NO: 1609197 - RNA, 19 nt, Human
aucauugaaaucuuuuugc

SEQ ID NO: 1609198 - RNA, 20 nt, Human
aucauugaaaucuuuuugcu

SEQ ID NO: 1609199 - RNA, 22 nt, Human
uucugggacacaguucaauucu

SEQ ID NO: 1609200 - RNA, 11 nt, Human
uucugggacac

SEQ ID NO: 1609201 - RNA, 10 nt, Human
uucugggaca

SEQ ID NO: 1609202 - RNA, 23 nt, Human
uucugccgcagcccugcagaggg

SEQ ID NO: 1609203 - RNA, 15 nt, Human
uucaaacauauauaa

SEQ ID NO: 1609204 - RNA, 16 nt, Human
uucaaaauuguuacaa

SEQ ID NO: 1609205 - RNA, 15 nt, Human
uucaaggauccugag

SEQ ID NO: 1609206 - RNA, 21 nt, Human
uucaaggauccugagccagau

SEQ ID NO: 1609207 - RNA, 19 nt, Human
uucaaggauccugagccag

SEQ ID NO: 1609208 - RNA, 18 nt, Human
uucaaggauccugagcca

SEQ ID NO: 1609209 - RNA, 16 nt, Human
uucaaggauccugagc

SEQ ID NO: 1609210 - RNA, 22 nt, Human
uucaagugauucucaugccuca

SEQ ID NO: 1609211 - RNA, 20 nt, Human
uucaagugauucucaugccu

SEQ ID NO: 1609212 - RNA, 17 nt, Human
uucacauauugauuucc

SEQ ID NO: 1609213 - RNA, 13 nt, Human
uucacauuggaaa

SEQ ID NO: 1609214 - RNA, 19 nt, Human
uucacauuguauucagagu

SEQ ID NO: 1609215 - RNA, 22 nt, Human
uucaccacaugugcacaugcac

SEQ ID NO: 1609216 - RNA, 14 nt, Human
uucacauuggaaac

SEQ ID NO: 1609217 - RNA, 13 nt, Human
uucacaguucucu

SEQ ID NO: 1609218 - RNA, 21 nt, Human
auaggaauugacccacaagaa

SEQ ID NO: 1609219 - RNA, 19 nt, Human
auaggaacuuaaauaaugu

SEQ ID NO: 1609220 - RNA, 22 nt, Human
uucaccauguuggccaggcugg

SEQ ID NO: 1609221 - RNA, 22 nt, Human
uucaccauguuggccaggcugc

SEQ ID NO: 1609222 - RNA, 22 nt, Human
auaggaauugacccacaagaaa

SEQ ID NO: 1609223 - RNA, 17 nt, Human
auaggcacaggaaacca

SEQ ID NO: 1609224 - RNA, 22 nt, Human
auaggcaccuaccaccacgccc

SEQ ID NO: 1609225 - RNA, 17 nt, Human
uuauuguuuaaaaucau

SEQ ID NO: 1609226 - RNA, 17 nt, Human
auagcugggacuacagg

SEQ ID NO: 1609227 - RNA, 22 nt, Human
auagcuggucuuauuuguaaag

SEQ ID NO: 1609228 - RNA, 23 nt, Human
auagcuggucuuauuuguaaagc

SEQ ID NO: 1609229 - RNA, 14 nt, Human
uuauuuaaauuuua

SEQ ID NO: 1609230 - RNA, 22 nt, Human
uuauuuaaugaaagacuguaca

SEQ ID NO: 1609231 - RNA, 18 nt, Human
uuauuuaaugaaagacug

SEQ ID NO: 1609232 - RNA, 16 nt, Human
uuauuuaguuccuuga

SEQ ID NO: 1609233 - RNA, 15 nt, Human
uuauuuaguauuuau

SEQ ID NO: 1609234 - RNA, 17 nt, Human
uuauuuagcaccaggga

SEQ ID NO: 1609235 - RNA, 18 nt, Human
auagcuacuaauuuuaaa

SEQ ID NO: 1609236 - RNA, 16 nt, Human
auagcuagacugguga

SEQ ID NO: 1609237 - RNA, 15 nt, Human
auagcuagacuggug

SEQ ID NO: 1609238 - RNA, 14 nt, Human
auagcuagacuggu

SEQ ID NO: 1609239 - RNA, 19 nt, Human
auagcucaggugucccugc

SEQ ID NO: 1609240 - RNA, 23 nt, Human
auagcuagacuggugacugauuc

SEQ ID NO: 1609241 - RNA, 19 nt, Human
auagcuagacuggugacug

SEQ ID NO: 1609242 - RNA, 18 nt, Human
auagcuagacuggugacu

SEQ ID NO: 1609243 - RNA, 21 nt, Human
auagcucaggugucccugcac

SEQ ID NO: 1609244 - RNA, 20 nt, Human
auagcucaggugucccugca

SEQ ID NO: 1609245 - RNA, 22 nt, Human
auagcucaggugucccugcacu

SEQ ID NO: 1609246 - RNA, 12 nt, Human
auagcugggacu

SEQ ID NO: 1609247 - RNA, 14 nt, Human
auagcuacuaauuu

SEQ ID NO: 1609248 - RNA, 17 nt, Human
auagcuacuaauuuuaa

SEQ ID NO: 1609249 - RNA, 17 nt, Human
auaagauaaaugugcug

SEQ ID NO: 1609250 - RNA, 13 nt, Human
auaagauaaaugu

SEQ ID NO: 1609251 - RNA, 18 nt, Human
auagccugccucuucucu

SEQ ID NO: 1609252 - RNA, 19 nt, Human
auauaagcuuguauuccuu

SEQ ID NO: 1609253 - RNA, 17 nt, Human
auauaacaaugcuguau

SEQ ID NO: 1609254 - RNA, 15 nt, Human
auauaacaaugcugu

SEQ ID NO: 1609255 - RNA, 12 nt, Human
auauaacaaugc

SEQ ID NO: 1609256 - RNA, 19 nt, Human
auauauaacaaugcuguau

SEQ ID NO: 1609257 - RNA, 18 nt, Human
auauauaacaaugcugua

SEQ ID NO: 1609258 - RNA, 17 nt, Human
auauauaacaaugcugu

SEQ ID NO: 1609259 - RNA, 18 nt, Human
auagucaaauugugugaa

SEQ ID NO: 1609260 - RNA, 17 nt, Human
auagucaaauuguguga

SEQ ID NO: 1609261 - RNA, 15 nt, Human
uucagaaagaagugg

SEQ ID NO: 1609262 - RNA, 19 nt, Human
uucacugcuggcugccuua

SEQ ID NO: 1609263 - RNA, 18 nt, Human
uucacugcuggcugccuu

SEQ ID NO: 1609264 - RNA, 17 nt, Human
uucacugcuggcugccu

SEQ ID NO: 1609265 - RNA, 16 nt, Human
uucacugcuggcugcc

SEQ ID NO: 1609266 - RNA, 15 nt, Human
uucacugcuggcugc

SEQ ID NO: 1609267 - RNA, 13 nt, Human
uucacugcuggcu

SEQ ID NO: 1609268 - RNA, 14 nt, Human
uucagacagcugcc

SEQ ID NO: 1609269 - RNA, 17 nt, Human
uucagaucucuaacuuc

SEQ ID NO: 1609270 - RNA, 21 nt, Human
uucagcaaaaauauuuuauga

SEQ ID NO: 1609271 - RNA, 19 nt, Human
uucagccaagaauucuuaa

SEQ ID NO: 1609272 - RNA, 16 nt, Human
auaugcaaagcacuga

SEQ ID NO: 1609273 - RNA, 23 nt, Human
auaugcaaagcacugacuucuaa

SEQ ID NO: 1609274 - RNA, 13 nt, Human
auaugcacacauu

SEQ ID NO: 1609275 - RNA, 14 nt, Human
auaugucaagccau

SEQ ID NO: 1609276 - RNA, 13 nt, Human
auaugugaacagu

SEQ ID NO: 1609277 - RNA, 22 nt, Human
auaucugaaaauguauguguaa

SEQ ID NO: 1609278 - RNA, 18 nt, Human
auaucugaggaauucugu

SEQ ID NO: 1609279 - RNA, 17 nt, Human
auaucugaggaauucug

SEQ ID NO: 1609280 - RNA, 16 nt, Human
auaucugaggaauucu

SEQ ID NO: 1609281 - RNA, 15 nt, Human
auaucugaggaauuc

SEQ ID NO: 1609282 - RNA, 23 nt, Human
auaucugaggaauucuguauaga

SEQ ID NO: 1609283 - RNA, 22 nt, Human
auaucugaggaauucuguauag

SEQ ID NO: 1609284 - RNA, 21 nt, Human
auaucugaggaauucuguaua

SEQ ID NO: 1609285 - RNA, 20 nt, Human
auaucugaggaauucuguau

SEQ ID NO: 1609286 - RNA, 19 nt, Human
auaucugaggaauucugua

SEQ ID NO: 1609287 - RNA, 12 nt, Human
auaugauucaaa

SEQ ID NO: 1609288 - RNA, 20 nt, Human
auaugauuuaaaucagccgu

SEQ ID NO: 1609289 - RNA, 22 nt, Human
auaugauucaaaugucuauaaa

SEQ ID NO: 1609290 - RNA, 13 nt, Human
auaugauucaaau

SEQ ID NO: 1609291 - RNA, 14 nt, Human
uucaguaauaacuc

SEQ ID NO: 1609292 - RNA, 15 nt, Human
uucagccugccuucu

SEQ ID NO: 1609293 - RNA, 14 nt, Human
uucagccugccuuc

SEQ ID NO: 1609294 - RNA, 21 nt, Human
uucauauuuacuucuuauaca

SEQ ID NO: 1609295 - RNA, 16 nt, Human
uucauauuuacuucuu

SEQ ID NO: 1609296 - RNA, 18 nt, Human
uucaucauccuaagcuau

SEQ ID NO: 1609297 - RNA, 21 nt, Human
uucaucauccuaagcuauuca

SEQ ID NO: 1609298 - RNA, 22 nt, Human
auaucuauauuuuacauaaauu

SEQ ID NO: 1609299 - RNA, 20 nt, Human
auaucuauauuuuacauaaa

SEQ ID NO: 1609300 - RNA, 16 nt, Human
auaucuauauuuuaca

SEQ ID NO: 1609301 - RNA, 17 nt, Human
auaucuauauuuuacau

SEQ ID NO: 1609302 - RNA, 18 nt, Human
auauauucagccuggcuu

SEQ ID NO: 1609303 - RNA, 15 nt, Human
uuggagaagaacuga

SEQ ID NO: 1609304 - RNA, 22 nt, Human
uuggagaagaacugaaaucaua

SEQ ID NO: 1609305 - RNA, 17 nt, Human
uuggagaagaacugaaa

SEQ ID NO: 1609306 - RNA, 17 nt, Human
uuggaaaauaaauuauu

SEQ ID NO: 1609307 - RNA, 15 nt, Human
uuggaaaauaaauca

SEQ ID NO: 1609308 - RNA, 12 nt, Human
uuggaaaauaaa

SEQ ID NO: 1609309 - RNA, 20 nt, Human
uugcuuugugauuuuuguaa

SEQ ID NO: 1609310 - RNA, 16 nt, Human
uugcuuuguaugcacu

SEQ ID NO: 1609311 - RNA, 16 nt, Human
uugcuuuuaaaaucca

SEQ ID NO: 1609312 - RNA, 15 nt, Human
aucuuuaaaauacac

SEQ ID NO: 1609313 - RNA, 12 nt, Human
aucuuuaaaaua

SEQ ID NO: 1609314 - RNA, 18 nt, Human
uugcucuugaugccuggc

SEQ ID NO: 1609315 - RNA, 17 nt, Human
uugcucuugaugccugg

SEQ ID NO: 1609316 - RNA, 14 nt, Human
uugcucuugaugcc

SEQ ID NO: 1609317 - RNA, 15 nt, Human
uugcuuugugauuuu

SEQ ID NO: 1609318 - RNA, 13 nt, Human
uugcuuuguaugc

SEQ ID NO: 1609319 - RNA, 16 nt, Human
aucuuauaauuuaaaa

SEQ ID NO: 1609320 - RNA, 14 nt, Human
aucuugcucugcug

SEQ ID NO: 1609321 - RNA, 15 nt, Human
aucuuauaauuuaaa

SEQ ID NO: 1609322 - RNA, 16 nt, Human
aucuugcucugcugac

SEQ ID NO: 1609323 - RNA, 15 nt, Human
aucuugcucugcuga

SEQ ID NO: 1609324 - RNA, 17 nt, Human
aucuugcucugcugaca

SEQ ID NO: 1609325 - RNA, 22 nt, Human
aucugucauuugagcagggcuc

SEQ ID NO: 1609326 - RNA, 17 nt, Human
aucugucauuugagcag

SEQ ID NO: 1609327 - RNA, 12 nt, Human
aucugucauuug

SEQ ID NO: 1609328 - RNA, 17 nt, Human
augaaugaaacauuuug

SEQ ID NO: 1609329 - RNA, 15 nt, Human
augaagcaaugcuuc

SEQ ID NO: 1609330 - RNA, 14 nt, Human
augaagcaaugcuu

SEQ ID NO: 1609331 - RNA, 23 nt, Human
augaaccacaucuugcucugcug

SEQ ID NO: 1609332 - RNA, 18 nt, Human
augaaugucagugugacu

SEQ ID NO: 1609333 - RNA, 16 nt, Human
augaaugucaguguga

SEQ ID NO: 1609334 - RNA, 18 nt, Human
uuggugguuucagaaaug

SEQ ID NO: 1609335 - RNA, 19 nt, Human
uuggugguuucagaaaugu

SEQ ID NO: 1609336 - RNA, 19 nt, Human
uuggugucgggcaugacac

SEQ ID NO: 1609337 - RNA, 18 nt, Human
uuggugucgggcaugaca

SEQ ID NO: 1609338 - RNA, 17 nt, Human
uuggugucgggcaugac

SEQ ID NO: 1609339 - RNA, 14 nt, Human
uugguuuguaaauu

SEQ ID NO: 1609340 - RNA, 20 nt, Human
uugguuuucacauuggaaac

SEQ ID NO: 1609341 - RNA, 13 nt, Human
uuguaaauuguca

SEQ ID NO: 1609342 - RNA, 12 nt, Human
uuguaaugaaaa

SEQ ID NO: 1609343 - RNA, 22 nt, Human
uuguaagcaugcacaaauucug

SEQ ID NO: 1609344 - RNA, 23 nt, Human
uugauguucuuucacccuuuucu

SEQ ID NO: 1609345 - RNA, 22 nt, Human
uugcaagccagauuuuccugaa

SEQ ID NO: 1609346 - RNA, 18 nt, Human
uugcaacuuuguauaaaa

SEQ ID NO: 1609347 - RNA, 17 nt, Human
uugcaacuuuguauaaa

SEQ ID NO: 1609348 - RNA, 16 nt, Human
uugcaacuuuguauaa

SEQ ID NO: 1609349 - RNA, 15 nt, Human
uugauuaaauucuug

SEQ ID NO: 1609350 - RNA, 16 nt, Human
uugauuaaauucuugc

SEQ ID NO: 1609351 - RNA, 20 nt, Human
uugauuaaauucuugcaaag

SEQ ID NO: 1609352 - RNA, 21 nt, Human
uugauuaaauucuugcaaagu

SEQ ID NO: 1609353 - RNA, 23 nt, Human
aucucacacaugagcaucaggcc

SEQ ID NO: 1609354 - RNA, 16 nt, Human
aucucaaauuucuaaa

SEQ ID NO: 1609355 - RNA, 17 nt, Human
aucucaaauuucuaaau

SEQ ID NO: 1609356 - RNA, 16 nt, Human
aucucaccuccugcug

SEQ ID NO: 1609357 - RNA, 15 nt, Human
aucucaccuccugcu

SEQ ID NO: 1609358 - RNA, 12 nt, Human
aucugaaaaugu

SEQ ID NO: 1609359 - RNA, 16 nt, Human
aucucuuguuuaaauu

SEQ ID NO: 1609360 - RNA, 23 nt, Human
aucugaagucagaucugccuaag

SEQ ID NO: 1609361 - RNA, 18 nt, Human
aucugaagucagaucugc

SEQ ID NO: 1609362 - RNA, 17 nt, Human
aucugaagucagaucug

SEQ ID NO: 1609363 - RNA, 16 nt, Human
aucugaagucagaucu

SEQ ID NO: 1609364 - RNA, 23 nt, Human
uugcccaggcuggcgugcagugg

SEQ ID NO: 1609365 - RNA, 14 nt, Human
uugcccaggcuggc

SEQ ID NO: 1609366 - RNA, 12 nt, Human
uugcccaggcug

SEQ ID NO: 1609367 - RNA, 11 nt, Human
uugcccaggcu

SEQ ID NO: 1609368 - RNA, 18 nt, Human
uugcccaggcaggucuug

SEQ ID NO: 1609369 - RNA, 16 nt, Human
uugcccaggcaggucu

SEQ ID NO: 1609370 - RNA, 14 nt, Human
uugcccaggcaggu

SEQ ID NO: 1609371 - RNA, 13 nt, Human
uugcccaggcagg

SEQ ID NO: 1609372 - RNA, 14 nt, Human
uugcaauggcagcc

SEQ ID NO: 1609373 - RNA, 21 nt, Human
uugcaccacugcacuccagcc

SEQ ID NO: 1609374 - RNA, 14 nt, Human
uugcaugaggcuag

SEQ ID NO: 1609375 - RNA, 20 nt, Human
aucucaaaacugcacuguca

SEQ ID NO: 1609376 - RNA, 19 nt, Human
aucucaaaacugcacuguc

SEQ ID NO: 1609377 - RNA, 15 nt, Human
aucucaaaacugcac

SEQ ID NO: 1609378 - RNA, 21 nt, Human
aucucaaauaacuaaaaggua

SEQ ID NO: 1609379 - RNA, 14 nt, Human
aucucaaauaacua

SEQ ID NO: 1609380 - RNA, 23 nt, Human
aucucaaauaacuaaaagguaug

SEQ ID NO: 1609381 - RNA, 14 nt, Human
aucucaaauuucua

SEQ ID NO: 1609382 - RNA, 19 nt, Human
aucuaggaagacuuuggaa

SEQ ID NO: 1609383 - RNA, 18 nt, Human
aucuaggaagacuuugga

SEQ ID NO: 1609384 - RNA, 17 nt, Human
aucuaggaagacuuugg

SEQ ID NO: 1609385 - RNA, 19 nt, Human
aucuagauacuguaucaug

SEQ ID NO: 1609386 - RNA, 21 nt, Human
uugagugcugucuccauguuu

SEQ ID NO: 1609387 - RNA, 17 nt, Human
uugauacuacaguuugu

SEQ ID NO: 1609388 - RNA, 18 nt, Human
uugauagcacagacccug

SEQ ID NO: 1609389 - RNA, 18 nt, Human
aucuagauacuguaucau

SEQ ID NO: 1609390 - RNA, 23 nt, Human
aucuaauauguaacaagccaccc

SEQ ID NO: 1609391 - RNA, 12 nt, Human
uugacuuuuuau

SEQ ID NO: 1609392 - RNA, 17 nt, Human
uugaccauucuccaccu

SEQ ID NO: 1609393 - RNA, 11 nt, Human
uugagacagag

SEQ ID NO: 1609394 - RNA, 10 nt, Human
uugagacaga

SEQ ID NO: 1609395 - RNA, 12 nt, Human
uugagcagggcu

SEQ ID NO: 1609396 - RNA, 12 nt, Human
uugagacagagu

SEQ ID NO: 1609397 - RNA, 16 nt, Human
uugagcagggcucagc

SEQ ID NO: 1609398 - RNA, 13 nt, Human
uugacaugggaca

SEQ ID NO: 1609399 - RNA, 16 nt, Human
uugacaucaacugcau

SEQ ID NO: 1609400 - RNA, 19 nt, Human
uugacagggcacaccgggc

SEQ ID NO: 1609401 - RNA, 12 nt, Human
uugacagggcac

SEQ ID NO: 1609402 - RNA, 10 nt, Human
uugacagggc

SEQ ID NO: 1609403 - RNA, 19 nt, Human
uugacaggauuauuggaaa

SEQ ID NO: 1609404 - RNA, 15 nt, Human
augagguacugagag

SEQ ID NO: 1609405 - RNA, 18 nt, Human
augagguacugagaguga

SEQ ID NO: 1609406 - RNA, 17 nt, Human
augagguacugagagug

SEQ ID NO: 1609407 - RNA, 18 nt, Human
uuguagcauccuggaaua

SEQ ID NO: 1609408 - RNA, 16 nt, Human
uuguagcauccuggaa

SEQ ID NO: 1609409 - RNA, 18 nt, Human
augaggucagagccugca

SEQ ID NO: 1609410 - RNA, 16 nt, Human
augaggucagagccug

SEQ ID NO: 1609411 - RNA, 15 nt, Human
augaggucagagccu

SEQ ID NO: 1609412 - RNA, 21 nt, Human
augagguacaaccuguucugc

SEQ ID NO: 1609413 - RNA, 20 nt, Human
augaggucagagccugcagu

SEQ ID NO: 1609414 - RNA, 19 nt, Human
augaggucagagccugcag

SEQ ID NO: 1609415 - RNA, 22 nt, Human
augaggucagagccugcaguua

SEQ ID NO: 1609416 - RNA, 20 nt, Human
uugucaauaaaauccauaca

SEQ ID NO: 1609417 - RNA, 23 nt, Human
augaguccccuguuuguuucuga

SEQ ID NO: 1609418 - RNA, 13 nt, Human
augaguccccugu

SEQ ID NO: 1609419 - RNA, 21 nt, Human
uugucauauaagauucauauu

SEQ ID NO: 1609420 - RNA, 18 nt, Human
uugucacacacuuuggcu

SEQ ID NO: 1609421 - RNA, 17 nt, Human
uugucacacacuuuggc

SEQ ID NO: 1609422 - RNA, 22 nt, Human
uugugaugucccaacuuguaaa

SEQ ID NO: 1609423 - RNA, 18 nt, Human
uugugaugucccaacuug

SEQ ID NO: 1609424 - RNA, 20 nt, Human
uuguccccaccgcagacagg

SEQ ID NO: 1609425 - RNA, 18 nt, Human
uuguccccaccgcagaca

SEQ ID NO: 1609426 - RNA, 16 nt, Human
uuguccccgacccuug

SEQ ID NO: 1609427 - RNA, 15 nt, Human
uuguccccgacccuu

SEQ ID NO: 1609428 - RNA, 18 nt, Human
uugugaggaagccgcugg

SEQ ID NO: 1609429 - RNA, 17 nt, Human
uugugaggaagccgcug

SEQ ID NO: 1609430 - RNA, 20 nt, Human
uugugauacaaugcugugcc

SEQ ID NO: 1609431 - RNA, 13 nt, Human
uugugaggaagcc

SEQ ID NO: 1609432 - RNA, 17 nt, Human
uuguucuugguuuguaa

SEQ ID NO: 1609433 - RNA, 19 nt, Human
uuguucuugguuuguaaau

SEQ ID NO: 1609434 - RNA, 20 nt, Human
uuguucuugguuuguaaauu

SEQ ID NO: 1609435 - RNA, 13 nt, Human
augauuucauuca

SEQ ID NO: 1609436 - RNA, 14 nt, Human
augcaaagcacuga

SEQ ID NO: 1609437 - RNA, 13 nt, Human
augcaaagcacug

SEQ ID NO: 1609438 - RNA, 12 nt, Human
augcaaagcacu

SEQ ID NO: 1609439 - RNA, 18 nt, Human
uuuaaaaaaauuccaagu

SEQ ID NO: 1609440 - RNA, 18 nt, Human
augcagagguccacaaca

SEQ ID NO: 1609441 - RNA, 17 nt, Human
augcagagguccacaac

SEQ ID NO: 1609442 - RNA, 23 nt, Human
augcacuuuguucuggcucuucc

SEQ ID NO: 1609443 - RNA, 21 nt, Human
uuuaaauauaugcuaagucuu

SEQ ID NO: 1609444 - RNA, 11 nt, Human
uuuaaaugcac

SEQ ID NO: 1609445 - RNA, 14 nt, Human
uuuaaaugcugcuu

SEQ ID NO: 1609446 - RNA, 23 nt, Human
uuuaaaaauacagauagauauau

SEQ ID NO: 1609447 - RNA, 16 nt, Human
uuuaaugaaagacugu

SEQ ID NO: 1609448 - RNA, 22 nt, Human
uuuaaggguuuguggaaaauga

SEQ ID NO: 1609449 - RNA, 20 nt, Human
uuuaaggguuuguggaaaau

SEQ ID NO: 1609450 - RNA, 17 nt, Human
uuuaaggguuuguggaa

SEQ ID NO: 1609451 - RNA, 20 nt, Human
uuuaaggaugcuuguacaua

SEQ ID NO: 1609452 - RNA, 21 nt, Human
uuuaaggaugcuuguacauaa

SEQ ID NO: 1609453 - RNA, 22 nt, Human
uuuaaggaugcuuguacauaau

SEQ ID NO: 1609454 - RNA, 21 nt, Human
uuuaagcuguuacugucuuca

SEQ ID NO: 1609455 - RNA, 19 nt, Human
uuuaaggaugcuuguacau

SEQ ID NO: 1609456 - RNA, 12 nt, Human
uuuaagagaaau

SEQ ID NO: 1609457 - RNA, 14 nt, Human
uuuaagaggcaggg

SEQ ID NO: 1609458 - RNA, 14 nt, Human
uuuaagagacagcc

SEQ ID NO: 1609459 - RNA, 15 nt, Human
uuucaaacuuuacua

SEQ ID NO: 1609460 - RNA, 19 nt, Human
uuucaaacauauauaacaa

SEQ ID NO: 1609461 - RNA, 12 nt, Human
uuucaaacuuua

SEQ ID NO: 1609462 - RNA, 19 nt, Human
uuucacauuggaaacaagu

SEQ ID NO: 1609463 - RNA, 14 nt, Human
uuucacauuggaaa

SEQ ID NO: 1609464 - RNA, 13 nt, Human
uuucacauuggaa

SEQ ID NO: 1609465 - RNA, 21 nt, Human
uuucagaaagaaguggggaca

SEQ ID NO: 1609466 - RNA, 16 nt, Human
uuucccuauuagagaa

SEQ ID NO: 1609467 - RNA, 11 nt, Human
uuucagaaaug

SEQ ID NO: 1609468 - RNA, 12 nt, Human
uuucagaaaugu

SEQ ID NO: 1609469 - RNA, 13 nt, Human
uuucagaaaugug

SEQ ID NO: 1609470 - RNA, 19 nt, Human
uuucaugcuguucaugaaa

SEQ ID NO: 1609471 - RNA, 21 nt, Human
uuucaugcuguucaugaaaga

SEQ ID NO: 1609472 - RNA, 21 nt, Human
augcuucuguuuuauaauuuu

SEQ ID NO: 1609473 - RNA, 20 nt, Human
augcuucucacugccaugcc

SEQ ID NO: 1609474 - RNA, 16 nt, Human
augcuucucacugcca

SEQ ID NO: 1609475 - RNA, 18 nt, Human
auggaagacagcucuuau

SEQ ID NO: 1609476 - RNA, 17 nt, Human
auggaagacagcucuua

SEQ ID NO: 1609477 - RNA, 14 nt, Human
auggaaggggcuga

SEQ ID NO: 1609478 - RNA, 22 nt, Human
augcuguauuuuaaaagaauga

SEQ ID NO: 1609479 - RNA, 19 nt, Human
augcuguauuuuaaaagaa

SEQ ID NO: 1609480 - RNA, 20 nt, Human
augcuggcuguuggcugggg

SEQ ID NO: 1609481 - RNA, 19 nt, Human
augcuggcuguuggcuggg

SEQ ID NO: 1609482 - RNA, 23 nt, Human
augcuguauuuuaaaagaaugau

SEQ ID NO: 1609483 - RNA, 18 nt, Human
augcuggcuguuggcugg

SEQ ID NO: 1609484 - RNA, 19 nt, Human
augcuccuggcccacugca

SEQ ID NO: 1609485 - RNA, 14 nt, Human
augcuccuggccca

SEQ ID NO: 1609486 - RNA, 14 nt, Human
uuuaucagaauucu

SEQ ID NO: 1609487 - RNA, 21 nt, Human
uuuauaugcuucuguuuuaua

SEQ ID NO: 1609488 - RNA, 23 nt, Human
uuuagucuugucucagauuuuau

SEQ ID NO: 1609489 - RNA, 17 nt, Human
uuuagucuugucucaga

SEQ ID NO: 1609490 - RNA, 17 nt, Human
uuuagggguagcauuug

SEQ ID NO: 1609491 - RNA, 15 nt, Human
uuuagucuugucuca

SEQ ID NO: 1609492 - RNA, 15 nt, Human
uuuacuucuuauaca

SEQ ID NO: 1609493 - RNA, 14 nt, Human
uuuacuucuuauac

SEQ ID NO: 1609494 - RNA, 13 nt, Human
uuuacuucuuaua

SEQ ID NO: 1609495 - RNA, 11 nt, Human
uuuacuuaaac

SEQ ID NO: 1609496 - RNA, 16 nt, Human
uuuacugcagcuuugu

SEQ ID NO: 1609497 - RNA, 18 nt, Human
uuuaccugaagucuuugu

SEQ ID NO: 1609498 - RNA, 22 nt, Human
uuuaccugaagucuuuguacag

SEQ ID NO: 1609499 - RNA, 16 nt, Human
augcgugugugugugu

SEQ ID NO: 1609500 - RNA, 18 nt, Human
augcuacaggauuugaaa

SEQ ID NO: 1609501 - RNA, 22 nt, Human
augcgugcauaccacuuuuguu

SEQ ID NO: 1609502 - RNA, 12 nt, Human
augcgugugugu

SEQ ID NO: 1609503 - RNA, 17 nt, Human
augccucucucaggcca

SEQ ID NO: 1609504 - RNA, 13 nt, Human
augcgcaggcugg

SEQ ID NO: 1609505 - RNA, 22 nt, Human
augcgcaggcuggcccugcccu

SEQ ID NO: 1609506 - RNA, 20 nt, Human
augcgcaggcuggcccugcc

SEQ ID NO: 1609507 - RNA, 18 nt, Human
augcgcaggcuggcccug

SEQ ID NO: 1609508 - RNA, 14 nt, Human
augcgcaggcuggc

SEQ ID NO: 1609509 - RNA, 22 nt, Human
augccuuuucccaacuccagaa

SEQ ID NO: 1609510 - RNA, 20 nt, Human
augccuuuucccaacuccag

SEQ ID NO: 1609511 - RNA, 15 nt, Human
augccucucucaggc

SEQ ID NO: 1609512 - RNA, 14 nt, Human
augccucucucagg

SEQ ID NO: 1609513 - RNA, 13 nt, Human
augccucucucag

SEQ ID NO: 1609514 - RNA, 23 nt, Human
uuuaaugaaagacuguacaaagu

SEQ ID NO: 1609515 - RNA, 21 nt, Human
uuuaaugaaagacuguacaaa

SEQ ID NO: 1609516 - RNA, 14 nt, Human
augccaucaauaaa

SEQ ID NO: 1609517 - RNA, 16 nt, Human
augcccagccccuucu

SEQ ID NO: 1609518 - RNA, 21 nt, Human
augccaugaggaacaaggcaa

SEQ ID NO: 1609519 - RNA, 17 nt, Human
augcccagccccuucug

SEQ ID NO: 1609520 - RNA, 20 nt, Human
augccccugaauuuaaauag

SEQ ID NO: 1609521 - RNA, 15 nt, Human
augccccugaauuua

SEQ ID NO: 1609522 - RNA, 21 nt, Human
augccccgucccccucuggcu

SEQ ID NO: 1609523 - RNA, 13 nt, Human
auuugaauuuugu

SEQ ID NO: 1609524 - RNA, 15 nt, Human
auuugaauuuugugu

SEQ ID NO: 1609525 - RNA, 16 nt, Human
auuugagcagggcuca

SEQ ID NO: 1609526 - RNA, 15 nt, Human
auuugagcagggcuc

SEQ ID NO: 1609527 - RNA, 17 nt, Human
auuugaggucuguucuu

SEQ ID NO: 1609528 - RNA, 18 nt, Human
auuugaggucuguucuuu

SEQ ID NO: 1609529 - RNA, 16 nt, Human
auuucuuccacaagag

SEQ ID NO: 1609530 - RNA, 21 nt, Human
auuugaggucuguucuuucca

SEQ ID NO: 1609531 - RNA, 22 nt, Human
auuugaggucuguucuuuccaa

SEQ ID NO: 1609532 - RNA, 19 nt, Human
auuugauaugugaacaguu

SEQ ID NO: 1609533 - RNA, 18 nt, Human
auuugauaugugaacagu

SEQ ID NO: 1609534 - RNA, 21 nt, Human
auuuggugguuucagaaaugu

SEQ ID NO: 1609535 - RNA, 14 nt, Human
auuugguuuucaca

SEQ ID NO: 1609536 - RNA, 12 nt, Human
auuugguuuuca

SEQ ID NO: 1609537 - RNA, 21 nt, Human
auuuauuuuaauaauguuuca

SEQ ID NO: 1609538 - RNA, 23 nt, Human
auuuauuggcuuuucugauccag

SEQ ID NO: 1609539 - RNA, 20 nt, Human
auuuauuggcuuuucugauc

SEQ ID NO: 1609540 - RNA, 16 nt, Human
auuucccaaagcagug

SEQ ID NO: 1609541 - RNA, 14 nt, Human
auuucccaaagcag

SEQ ID NO: 1609542 - RNA, 14 nt, Human
auuuccuaaauaua

SEQ ID NO: 1609543 - RNA, 21 nt, Human
auuuccuaaauauauuuuaag

SEQ ID NO: 1609544 - RNA, 20 nt, Human
auuuauuacuguaagaaaau

SEQ ID NO: 1609545 - RNA, 19 nt, Human
auuuauuacuguaagaaaa

SEQ ID NO: 1609546 - RNA, 18 nt, Human
auuuauuggcuuuucuga

SEQ ID NO: 1609547 - RNA, 14 nt, Human
auuuauuggcuuuu

SEQ ID NO: 1609548 - RNA, 17 nt, Human
auuuaaaaaaaaaccug

SEQ ID NO: 1609549 - RNA, 19 nt, Human
auuguuuucaguguacaug

SEQ ID NO: 1609550 - RNA, 18 nt, Human
auuguuuucaguguacau

SEQ ID NO: 1609551 - RNA, 14 nt, Human
auuuaaaaaaaauc

SEQ ID NO: 1609552 - RNA, 16 nt, Human
auuguaguccuguaau

SEQ ID NO: 1609553 - RNA, 17 nt, Human
auuguagcauccuggaa

SEQ ID NO: 1609554 - RNA, 15 nt, Human
auuguacuuugugcu

SEQ ID NO: 1609555 - RNA, 17 nt, Human
auuguuuucaguguaca

SEQ ID NO: 1609556 - RNA, 20 nt, Human
auuguagcauccuggaauau

SEQ ID NO: 1609557 - RNA, 22 nt, Human
auuuaccacuuguguuuugcaa

SEQ ID NO: 1609558 - RNA, 15 nt, Human
auuuaccacuugugu

SEQ ID NO: 1609559 - RNA, 20 nt, Human
auuuacuaaaauggacugug

SEQ ID NO: 1609560 - RNA, 19 nt, Human
auuuacuaaaauggacugu

SEQ ID NO: 1609561 - RNA, 16 nt, Human
auuuacuaaaauggac

SEQ ID NO: 1609562 - RNA, 16 nt, Human
auuuaaauagcuuuuu

SEQ ID NO: 1609563 - RNA, 20 nt, Human
auuuacuucuuauacauuug

SEQ ID NO: 1609564 - RNA, 19 nt, Human
auuuacuucuuauacauuu

SEQ ID NO: 1609565 - RNA, 16 nt, Human
auuuaguguucauaaa

SEQ ID NO: 1609566 - RNA, 17 nt, Human
auuuaguguucauaaau

SEQ ID NO: 1609567 - RNA, 15 nt, Human
auuuauaaacuuuuu

SEQ ID NO: 1609568 - RNA, 12 nt, Human
auugcaccacug

SEQ ID NO: 1609569 - RNA, 19 nt, Human
auugcaacaggcugggcuu

SEQ ID NO: 1609570 - RNA, 18 nt, Human
auugcaacaggcugggcu

SEQ ID NO: 1609571 - RNA, 17 nt, Human
auugcaacaggcugggc

SEQ ID NO: 1609572 - RNA, 22 nt, Human
auuggggauucuuaaaguugaa

SEQ ID NO: 1609573 - RNA, 21 nt, Human
auuggggauucuuaaaguuga

SEQ ID NO: 1609574 - RNA, 20 nt, Human
auuggggauucuuaaaguug

SEQ ID NO: 1609575 - RNA, 16 nt, Human
auuggggauucuuaaa

SEQ ID NO: 1609576 - RNA, 15 nt, Human
auuggggauucuuaa

SEQ ID NO: 1609577 - RNA, 23 nt, Human
auuggcuagagguucaaagauau

SEQ ID NO: 1609578 - RNA, 14 nt, Human
auuggggauucuua

SEQ ID NO: 1609579 - RNA, 17 nt, Human
auuggagcucgugggac

SEQ ID NO: 1609580 - RNA, 16 nt, Human
auuggagcucguggaa

SEQ ID NO: 1609581 - RNA, 19 nt, Human
auuggcuagagguucaaag

SEQ ID NO: 1609582 - RNA, 20 nt, Human
auuggcuagagguucaaaga

SEQ ID NO: 1609583 - RNA, 22 nt, Human
auuggcuagagguucaaagaua

SEQ ID NO: 1609584 - RNA, 16 nt, Human
auugcauuuccugaca

SEQ ID NO: 1609585 - RNA, 13 nt, Human
auuggaaacaagu

SEQ ID NO: 1609586 - RNA, 14 nt, Human
auuggaaacaaguc

SEQ ID NO: 1609587 - RNA, 22 nt, Human
uuuuugggaaaagaaaagucaa

SEQ ID NO: 1609588 - RNA, 24 nt, Human
uuuuuggcauaacauaaaucugug

SEQ ID NO: 1609589 - RNA, 23 nt, Human
uuuuuggcauaacauaaaucugu

SEQ ID NO: 1609590 - RNA, 19 nt, Human
auuaaguacuauguaucaa

SEQ ID NO: 1609591 - RNA, 18 nt, Human
auuaaguacuauguauca

SEQ ID NO: 1609592 - RNA, 13 nt, Human
auuaaggaagaca

SEQ ID NO: 1609593 - RNA, 11 nt, Human
uuuuuguauuu

SEQ ID NO: 1609594 - RNA, 15 nt, Human
uuuuugaagcuguau

SEQ ID NO: 1609595 - RNA, 17 nt, Human
uuuuuauauuugaaaua

SEQ ID NO: 1609596 - RNA, 14 nt, Human
uuuugugaagcaaa

SEQ ID NO: 1609597 - RNA, 15 nt, Human
uuuuggaauuuuccu

SEQ ID NO: 1609598 - RNA, 15 nt, Human
uuuuguuuucauuau

SEQ ID NO: 1609599 - RNA, 16 nt, Human
uuuuguuuuugucuua

SEQ ID NO: 1609600 - RNA, 20 nt, Human
uuuuuauauuuacuaaaaug

SEQ ID NO: 1609601 - RNA, 16 nt, Human
auuacuguaagaaaau

SEQ ID NO: 1609602 - RNA, 15 nt, Human
auuacuguaagaaaa

SEQ ID NO: 1609603 - RNA, 13 nt, Human
auuacuucugcua

SEQ ID NO: 1609604 - RNA, 14 nt, Human
auuacuucugcuac

SEQ ID NO: 1609605 - RNA, 13 nt, Human
auuagagaagaga

SEQ ID NO: 1609606 - RNA, 17 nt, Human
auuauaugcuauuucua

SEQ ID NO: 1609607 - RNA, 16 nt, Human
auucaguuguuagugu

SEQ ID NO: 1609608 - RNA, 14 nt, Human
auucagccuggcuu

SEQ ID NO: 1609609 - RNA, 17 nt, Human
auucacugauuugacau

SEQ ID NO: 1609610 - RNA, 12 nt, Human
auucacugauuu

SEQ ID NO: 1609611 - RNA, 17 nt, Human
auuccaagugauugaaa

SEQ ID NO: 1609612 - RNA, 12 nt, Human
auuccacagcug

SEQ ID NO: 1609613 - RNA, 13 nt, Human
auuccacagcugc

SEQ ID NO: 1609614 - RNA, 18 nt, Human
auuccagagaguggcucc

SEQ ID NO: 1609615 - RNA, 19 nt, Human
auucccaagcucugcuccu

SEQ ID NO: 1609616 - RNA, 18 nt, Human
auucccaagcucugcucc

SEQ ID NO: 1609617 - RNA, 20 nt, Human
auuccccaggaggccagccu

SEQ ID NO: 1609618 - RNA, 22 nt, Human
auuccccaggaggccagccuug

SEQ ID NO: 1609619 - RNA, 20 nt, Human
auuauauggcuugaguuuaa

SEQ ID NO: 1609620 - RNA, 19 nt, Human
auuauaugcuauuucuaua

SEQ ID NO: 1609621 - RNA, 18 nt, Human
auuauaugcuauuucuau

SEQ ID NO: 1609622 - RNA, 19 nt, Human
auuauucacugauuugaca

SEQ ID NO: 1609623 - RNA, 24 nt, Human
auuauucaaaguugccuaaaucca

SEQ ID NO: 1609624 - RNA, 18 nt, Human
auuauucaaaguugccua

SEQ ID NO: 1609625 - RNA, 22 nt, Human
auuauucaaaguugccuaaauc

SEQ ID NO: 1609626 - RNA, 19 nt, Human
auuauucaaaguugccuaa

SEQ ID NO: 1609627 - RNA, 19 nt, Human
auuauaucugaggaauucu

SEQ ID NO: 1609628 - RNA, 18 nt, Human
auuauaucugaggaauuc

SEQ ID NO: 1609629 - RNA, 16 nt, Human
auuauaugcuauuucu

SEQ ID NO: 1609630 - RNA, 22 nt, Human
auuauaucugaggaauucugua

SEQ ID NO: 1609631 - RNA, 21 nt, Human
auuauaucugaggaauucugu

SEQ ID NO: 1609632 - RNA, 20 nt, Human
auuauaucugaggaauucug

SEQ ID NO: 1609633 - RNA, 22 nt, Human
auucaaacagucucaggaaauc

SEQ ID NO: 1609634 - RNA, 15 nt, Human
auucagccuggcuuc

SEQ ID NO: 1609635 - RNA, 19 nt, Human
uuugaccucugcagcaaua

SEQ ID NO: 1609636 - RNA, 21 nt, Human
uuugaccucugcagcaauaaa

SEQ ID NO: 1609637 - RNA, 14 nt, Human
uuugacaaggggca

SEQ ID NO: 1609638 - RNA, 18 nt, Human
uuugacaaagguaaauca

SEQ ID NO: 1609639 - RNA, 23 nt, Human
uuucccucccuuccucuuuccau

SEQ ID NO: 1609640 - RNA, 14 nt, Human
uuugaauuuugugu

SEQ ID NO: 1609641 - RNA, 12 nt, Human
uuugaauuuugu

SEQ ID NO: 1609642 - RNA, 15 nt, Human
uuugauccaagcugg

SEQ ID NO: 1609643 - RNA, 15 nt, Human
uuugauucagacagc

SEQ ID NO: 1609644 - RNA, 13 nt, Human
uuugagacagagu

SEQ ID NO: 1609645 - RNA, 20 nt, Human
uuugcuggagcucugcccau

SEQ ID NO: 1609646 - RNA, 19 nt, Human
uuugcuaagcauuccaacu

SEQ ID NO: 1609647 - RNA, 19 nt, Human
uuugcuggggccgaaagaa

SEQ ID NO: 1609648 - RNA, 22 nt, Human
uuugcuggggccgaaagaacag

SEQ ID NO: 1609649 - RNA, 22 nt, Human
uuuggauuggaugaauuccaaa

SEQ ID NO: 1609650 - RNA, 18 nt, Human
uuugauucagacagcugc

SEQ ID NO: 1609651 - RNA, 13 nt, Human
uuuggcugcugaa

SEQ ID NO: 1609652 - RNA, 12 nt, Human
uuuggcugcuga

SEQ ID NO: 1609653 - RNA, 14 nt, Human
uuugggcugcccug

SEQ ID NO: 1609654 - RNA, 22 nt, Human
uuugggguacccacugcucugg

SEQ ID NO: 1609655 - RNA, 21 nt, Human
uuugggguacccacugcucug

SEQ ID NO: 1609656 - RNA, 13 nt, Human
uuuggggaagaac

SEQ ID NO: 1609657 - RNA, 19 nt, Human
auguauauuuuauaucaau

SEQ ID NO: 1609658 - RNA, 12 nt, Human
auguaucaauga

SEQ ID NO: 1609659 - RNA, 18 nt, Human
auguccaagaagcccagg

SEQ ID NO: 1609660 - RNA, 17 nt, Human
auguccaagaagcccag

SEQ ID NO: 1609661 - RNA, 16 nt, Human
auguccaagaagccca

SEQ ID NO: 1609662 - RNA, 23 nt, Human
augucgucaaagcugaaauggac

SEQ ID NO: 1609663 - RNA, 13 nt, Human
augugagaccauu

SEQ ID NO: 1609664 - RNA, 14 nt, Human
augugagacugguu

SEQ ID NO: 1609665 - RNA, 17 nt, Human
uuuguaguguuggagaa

SEQ ID NO: 1609666 - RNA, 14 nt, Human
uuuguacagacaac

SEQ ID NO: 1609667 - RNA, 16 nt, Human
uuuguaauuuuuuuau

SEQ ID NO: 1609668 - RNA, 15 nt, Human
augugaugagaggaa

SEQ ID NO: 1609669 - RNA, 18 nt, Human
augugauccuuuuggagu

SEQ ID NO: 1609670 - RNA, 14 nt, Human
uuugucuuaaaaag

SEQ ID NO: 1609671 - RNA, 13 nt, Human
uuugucuuaaaaa

SEQ ID NO: 1609672 - RNA, 23 nt, Human
uuugucuuaaaaaguggaaaaau

SEQ ID NO: 1609673 - RNA, 16 nt, Human
uuugugauacaaugcu

SEQ ID NO: 1609674 - RNA, 22 nt, Human
uuugugauacaaugcugugccc

SEQ ID NO: 1609675 - RNA, 19 nt, Human
uuugugcauuaucuagaua

SEQ ID NO: 1609676 - RNA, 22 nt, Human
uuugugcauuaucuagauacug

SEQ ID NO: 1609677 - RNA, 16 nt, Human
uuuguuucugaaaggg

SEQ ID NO: 1609678 - RNA, 14 nt, Human
uuuguuucugaaag

SEQ ID NO: 1609679 - RNA, 15 nt, Human
auguguguuuuaaaa

SEQ ID NO: 1609680 - RNA, 21 nt, Human
augugcuaguaauuggaaagg

SEQ ID NO: 1609681 - RNA, 21 nt, Human
augugccagguuuuuggucug

SEQ ID NO: 1609682 - RNA, 18 nt, Human
uuuuaaaaaacugcugac

SEQ ID NO: 1609683 - RNA, 21 nt, Human
uuuuaaaaaacugcugacugu

SEQ ID NO: 1609684 - RNA, 19 nt, Human
auguuacauaagauaaaug

SEQ ID NO: 1609685 - RNA, 20 nt, Human
auguuacauaagauaaaugu

SEQ ID NO: 1609686 - RNA, 13 nt, Human
auguuggccaggc

SEQ ID NO: 1609687 - RNA, 21 nt, Human
uuuuagacccuauugcugcuu

SEQ ID NO: 1609688 - RNA, 17 nt, Human
uuuuagaguugauacua

SEQ ID NO: 1609689 - RNA, 16 nt, Human
auguugcccaggcagg

SEQ ID NO: 1609690 - RNA, 15 nt, Human
auguugaagccuuug

SEQ ID NO: 1609691 - RNA, 15 nt, Human
auguugcccaggcag

SEQ ID NO: 1609692 - RNA, 14 nt, Human
auguugcccaggca

SEQ ID NO: 1609693 - RNA, 13 nt, Human
auguugcccaggc

SEQ ID NO: 1609694 - RNA, 18 nt, Human
auguugaaagaucaaaag

SEQ ID NO: 1609695 - RNA, 12 nt, Human
auguugaaagau

SEQ ID NO: 1609696 - RNA, 20 nt, Human
uuuucaggcuagauguaugu

SEQ ID NO: 1609697 - RNA, 14 nt, Human
uuuucaguguacau

SEQ ID NO: 1609698 - RNA, 16 nt, Human
uuuucuauaauuuaaa

SEQ ID NO: 1609699 - RNA, 17 nt, Human
uuuucucugauacagaa

SEQ ID NO: 1609700 - RNA, 12 nt, Human
uuuuauuaaauu

SEQ ID NO: 1609701 - RNA, 21 nt, Human
uuuuauggcuuuugugcauua

SEQ ID NO: 1609702 - RNA, 15 nt, Human
uuuuaguagagacag

SEQ ID NO: 1609703 - RNA, 23 nt, Human
uuuuagaguugauacuacaguuu

SEQ ID NO: 1609704 - RNA, 18 nt, Human
uuuuauggcuuuugugca

SEQ ID NO: 1609705 - RNA, 19 nt, Human
uuuuauggcuuuugugcau

SEQ ID NO: 1609706 - RNA, 17 nt, Human
auguuggccaggcuggu

SEQ ID NO: 1609707 - RNA, 12 nt, Human
auguuuauuaca

SEQ ID NO: 1609708 - RNA, 13 nt, Human
uuuucuguucuuu

SEQ ID NO: 1609709 - RNA, 21 nt, Human
uuuucuuaaccagaucauugu

SEQ ID NO: 1609710 - RNA, 19 nt, Human
uuuucugauccaguuuugu

SEQ ID NO: 1609711 - RNA, 19 nt, Human
auuaaaacacaacaucuuu

SEQ ID NO: 1609712 - RNA, 23 nt, Human
auuaaaaaucucaaauuucuaaa

SEQ ID NO: 1609713 - RNA, 15 nt, Human
auguuuuuuuuuaaa

SEQ ID NO: 1609714 - RNA, 23 nt, Human
auguuuauuacaguauaauuaac

SEQ ID NO: 1609715 - RNA, 22 nt, Human
auguuuauuacaguauaauuaa

SEQ ID NO: 1609716 - RNA, 19 nt, Human
auguuuauuacaguauaau

SEQ ID NO: 1609717 - RNA, 18 nt, Human
auguuuauuacaguauaa

SEQ ID NO: 1609718 - RNA, 16 nt, Human
auguuuauuacaguau

SEQ ID NO: 1609719 - RNA, 15 nt, Human
auguuuauuacagua

SEQ ID NO: 1609720 - RNA, 12 nt, Human
aucaaaggacac

SEQ ID NO: 1609721 - RNA, 19 nt, Human
aucaaagagguuuuaaaaa

SEQ ID NO: 1609722 - RNA, 20 nt, Human
aucaaaagguuaauaaagua

SEQ ID NO: 1609723 - RNA, 24 nt, Human
aucaaaagguuaauaaaguaauua

SEQ ID NO: 1609724 - RNA, 14 nt, Human
aucaaaagaaagaa

SEQ ID NO: 1609725 - RNA, 19 nt, Human
auauuuuuuucugaaauuu

SEQ ID NO: 1609726 - RNA, 18 nt, Human
auauuuuuuucuuuucuu

SEQ ID NO: 1609727 - RNA, 18 nt, Human
auauuuuuuucugaaauu

SEQ ID NO: 1609728 - RNA, 16 nt, Human
auauuuuuuucugaaa

SEQ ID NO: 1609729 - RNA, 14 nt, Human
auauuuuuuucuga

SEQ ID NO: 1609730 - RNA, 14 nt, Human
auagcacagacccu

SEQ ID NO: 1609731 - RNA, 15 nt, Human
auagcacagacccug

SEQ ID NO: 1609732 - RNA, 21 nt, Human
aucaugaauuaguuuuauaug

SEQ ID NO: 1609733 - RNA, 20 nt, Human
aucaugacaaagacugagua

SEQ ID NO: 1609734 - RNA, 15 nt, Human
aucauccuaagcuau

SEQ ID NO: 1609735 - RNA, 19 nt, Human
aucauggagguuugaagau

SEQ ID NO: 1609736 - RNA, 21 nt, Human
auccacugugccaugugccag

SEQ ID NO: 1609737 - RNA, 23 nt, Human
auccacuuuaucuugaauaaugu

SEQ ID NO: 1609738 - RNA, 18 nt, Human
auccagcagauuauucac

SEQ ID NO: 1609739 - RNA, 12 nt, Human
auccuugaagau

SEQ ID NO: 1609740 - RNA, 14 nt, Human
aucgaccugccucg

SEQ ID NO: 1609741 - RNA, 22 nt, Human
aucuaggaagacuuuggaaaga

SEQ ID NO: 1609742 - RNA, 23 nt, Human
auggcuuccuggcaauagucaaa

SEQ ID NO: 1609743 - RNA, 18 nt, Human
auggcuuuguauagaacc

SEQ ID NO: 1609744 - RNA, 16 nt, Human
auggcuuuguauagaa

SEQ ID NO: 1609745 - RNA, 15 nt, Human
auggcuuuguauaga

SEQ ID NO: 1609746 - RNA, 20 nt, Human
augggaaagcauuguaaaug

SEQ ID NO: 1609747 - RNA, 14 nt, Human
augggaaagcauug

SEQ ID NO: 1609748 - RNA, 15 nt, Human
augggacagggagga

SEQ ID NO: 1609749 - RNA, 20 nt, Human
augggacauuugcucaugga

SEQ ID NO: 1609750 - RNA, 22 nt, Human
augcuucuucagagacuccugc

SEQ ID NO: 1609751 - RNA, 20 nt, Human
augcuucuucagagacuccu

SEQ ID NO: 1609752 - RNA, 17 nt, Human
augcuucuucagagacu

SEQ ID NO: 1609753 - RNA, 14 nt, Human
augcuucuucagag

SEQ ID NO: 1609754 - RNA, 19 nt, Human
augcucugcauguuacaua

SEQ ID NO: 1609755 - RNA, 18 nt, Human
augcucugcauguuacau

SEQ ID NO: 1609756 - RNA, 16 nt, Human
augcuuugaucccuuc

SEQ ID NO: 1609757 - RNA, 24 nt, Human
augcauauuauuuuauguugcaua

SEQ ID NO: 1609758 - RNA, 21 nt, Human
augccugguggcagcugcggu

SEQ ID NO: 1609759 - RNA, 19 nt, Human
augccugguggcagcugcg

SEQ ID NO: 1609760 - RNA, 14 nt, Human
augccugguggcag

SEQ ID NO: 1609761 - RNA, 13 nt, Human
augccugguggca

SEQ ID NO: 1609762 - RNA, 12 nt, Human
augccugguggc

SEQ ID NO: 1609763 - RNA, 13 nt, Human
augaaguacucau

SEQ ID NO: 1609764 - RNA, 23 nt, Human
augaaguaauaugcacacauuuu

SEQ ID NO: 1609765 - RNA, 14 nt, Human
augaaguaauaugc

SEQ ID NO: 1609766 - RNA, 21 nt, Human
augaaguaauaugcacacauu

SEQ ID NO: 1609767 - RNA, 17 nt, Human
augaauaaagacaccua

SEQ ID NO: 1609768 - RNA, 23 nt, Human
augaagcauuuacuuuguguuca

SEQ ID NO: 1609769 - RNA, 12 nt, Human
augaaagacugu

SEQ ID NO: 1609770 - RNA, 16 nt, Human
augaaacuuuuggaag

SEQ ID NO: 1609771 - RNA, 18 nt, Human
augaaacuuguguaaaua

SEQ ID NO: 1609772 - RNA, 12 nt, Human
augagccuggca

SEQ ID NO: 1609773 - RNA, 11 nt, Human
augagccuggc

SEQ ID NO: 1609774 - RNA, 21 nt, Human
augagccucagcauccuggca

SEQ ID NO: 1609775 - RNA, 18 nt, Human
augaccuuucaauaggaa

SEQ ID NO: 1609776 - RNA, 15 nt, Human
augaccuuucaauag

SEQ ID NO: 1609777 - RNA, 13 nt, Human
augaccuuucaau

SEQ ID NO: 1609778 - RNA, 23 nt, Human
aucuaggaagacuuuggaaagag

SEQ ID NO: 1609779 - RNA, 11 nt, Human
aucuaggauuu

SEQ ID NO: 1609780 - RNA, 19 nt, Human
aucuaggauuuuaagggaa

SEQ ID NO: 1609781 - RNA, 14 nt, Human
agugacagaggcag

SEQ ID NO: 1609782 - RNA, 19 nt, Human
agugacagaggcagcccca

SEQ ID NO: 1609783 - RNA, 16 nt, Human
agugacagaggcagcc

SEQ ID NO: 1609784 - RNA, 19 nt, Human
agugaugucacuagggcag

SEQ ID NO: 1609785 - RNA, 23 nt, Human
agugauccucccaccucagccuc

SEQ ID NO: 1609786 - RNA, 13 nt, Human
agugauuaccagg

SEQ ID NO: 1609787 - RNA, 22 nt, Human
agugauccucccaccucagccu

SEQ ID NO: 1609788 - RNA, 20 nt, Human
agugauccucccaccucagc

SEQ ID NO: 1609789 - RNA, 15 nt, Human
agugauuaccaggga

SEQ ID NO: 1609790 - RNA, 20 nt, Human
agugauucuccugccucagc

SEQ ID NO: 1609791 - RNA, 19 nt, Human
agugauucuccugccucag

SEQ ID NO: 1609792 - RNA, 18 nt, Human
agugauucuccugccuca

SEQ ID NO: 1609793 - RNA, 22 nt, Human
agugccuuauggaacacucuga

SEQ ID NO: 1609794 - RNA, 21 nt, Human
agugccuuauggaacacucug

SEQ ID NO: 1609795 - RNA, 20 nt, Human
agugccuuauggaacacucu

SEQ ID NO: 1609796 - RNA, 19 nt, Human
agugccuuauggaacacuc

SEQ ID NO: 1609797 - RNA, 13 nt, Human
agucauuuaauaa

SEQ ID NO: 1609798 - RNA, 18 nt, Human
aguccuuaccagcagagc

SEQ ID NO: 1609799 - RNA, 16 nt, Human
aguccuuaccagcaga

SEQ ID NO: 1609800 - RNA, 14 nt, Human
aguccucuuuucug

SEQ ID NO: 1609801 - RNA, 16 nt, Human
agucgaggacagggag

SEQ ID NO: 1609802 - RNA, 19 nt, Human
aguccuuaccagcagagca

SEQ ID NO: 1609803 - RNA, 22 nt, Human
agucugauucccaagcucugcu

SEQ ID NO: 1609804 - RNA, 21 nt, Human
agucugauucccaagcucugc

SEQ ID NO: 1609805 - RNA, 18 nt, Human
agucuggcccuuccuuuu

SEQ ID NO: 1609806 - RNA, 21 nt, Human
agucuggcuguacccaggaau

SEQ ID NO: 1609807 - RNA, 19 nt, Human
agucuggcuguacccagga

SEQ ID NO: 1609808 - RNA, 21 nt, Human
aguaaaugggggugcauuuga

SEQ ID NO: 1609809 - RNA, 19 nt, Human
aguaaaugggggugcauuu

SEQ ID NO: 1609810 - RNA, 20 nt, Human
aguaaaugggggugcauuug

SEQ ID NO: 1609811 - RNA, 17 nt, Human
aguaacuuacuuaggug

SEQ ID NO: 1609812 - RNA, 15 nt, Human
aguacuggagaaaau

SEQ ID NO: 1609813 - RNA, 22 nt, Human
aguacuucuccacccugcucuc

SEQ ID NO: 1609814 - RNA, 21 nt, Human
aguacuucuccacccugcucu

SEQ ID NO: 1609815 - RNA, 20 nt, Human
aguacuucuccacccugcuc

SEQ ID NO: 1609816 - RNA, 22 nt, Human
aguauauugauccagaaagaaa

SEQ ID NO: 1609817 - RNA, 16 nt, Human
auaaaaaauuaugaca

SEQ ID NO: 1609818 - RNA, 16 nt, Human
auaaaagacagugaaa

SEQ ID NO: 1609819 - RNA, 15 nt, Human
auaaaagacagugaa

SEQ ID NO: 1609820 - RNA, 11 nt, Human
aguuugcaguu

SEQ ID NO: 1609821 - RNA, 16 nt, Human
aguuugauuaaauucu

SEQ ID NO: 1609822 - RNA, 14 nt, Human
aguuugauuaaauu

SEQ ID NO: 1609823 - RNA, 22 nt, Human
aguuguuagugugucuuagugu

SEQ ID NO: 1609824 - RNA, 17 nt, Human
aguuguuagugugucuu

SEQ ID NO: 1609825 - RNA, 14 nt, Human
aguugaaaagacuc

SEQ ID NO: 1609826 - RNA, 18 nt, Human
aguugaaaaacagcugag

SEQ ID NO: 1609827 - RNA, 17 nt, Human
aguugaagacagagcua

SEQ ID NO: 1609828 - RNA, 16 nt, Human
aguugaagacagagcu

SEQ ID NO: 1609829 - RNA, 17 nt, Human
aguugaaaaacagcuga

SEQ ID NO: 1609830 - RNA, 18 nt, Human
aguuacacuaaaagguga

SEQ ID NO: 1609831 - RNA, 14 nt, Human
aguucauacccugu

SEQ ID NO: 1609832 - RNA, 21 nt, Human
aguuccaccaucaagccacca

SEQ ID NO: 1609833 - RNA, 18 nt, Human
aguuccaccaucaagcca

SEQ ID NO: 1609834 - RNA, 12 nt, Human
agugcuccagcc

SEQ ID NO: 1609835 - RNA, 15 nt, Human
auaaguggugugugu

SEQ ID NO: 1609836 - RNA, 15 nt, Human
auacaccacuacauu

SEQ ID NO: 1609837 - RNA, 18 nt, Human
auacaauuuuguuucugu

SEQ ID NO: 1609838 - RNA, 17 nt, Human
auacaauuuuguuucug

SEQ ID NO: 1609839 - RNA, 16 nt, Human
auacaauuuuguuucu

SEQ ID NO: 1609840 - RNA, 14 nt, Human
auacaauuuuguuu

SEQ ID NO: 1609841 - RNA, 12 nt, Human
auaauguuaaca

SEQ ID NO: 1609842 - RNA, 23 nt, Human
auacaaugcugugcccuaaagug

SEQ ID NO: 1609843 - RNA, 21 nt, Human
auaaagaugagugagcaugcc

SEQ ID NO: 1609844 - RNA, 17 nt, Human
auacaccacuacauucu

SEQ ID NO: 1609845 - RNA, 18 nt, Human
auacaccacuacauucug

SEQ ID NO: 1609846 - RNA, 18 nt, Human
auacaccgggccuggaga

SEQ ID NO: 1609847 - RNA, 14 nt, Human
auacaccgggccug

SEQ ID NO: 1609848 - RNA, 22 nt, Human
agaacagugauuaccagggacu

SEQ ID NO: 1609849 - RNA, 18 nt, Human
agaaccaaaaagaggcua

SEQ ID NO: 1609850 - RNA, 17 nt, Human
agaaccaaaaagaggcu

SEQ ID NO: 1609851 - RNA, 17 nt, Human
agaacaucccuccuggg

SEQ ID NO: 1609852 - RNA, 13 nt, Human
agaacaucccucc

SEQ ID NO: 1609853 - RNA, 13 nt, Human
agaagagcuguuc

SEQ ID NO: 1609854 - RNA, 23 nt, Human
agaagagaaugcacaaacagagg

SEQ ID NO: 1609855 - RNA, 15 nt, Human
agaagagaaugcaca

SEQ ID NO: 1609856 - RNA, 21 nt, Human
agaagagcuguucacagccag

SEQ ID NO: 1609857 - RNA, 20 nt, Human
agaagagcuguucacagcca

SEQ ID NO: 1609858 - RNA, 21 nt, Human
agaagacugcauuauauuuau

SEQ ID NO: 1609859 - RNA, 20 nt, Human
agaaccaggcaacuugggaa

SEQ ID NO: 1609860 - RNA, 21 nt, Human
agaaccaaaaagaggcuaugu

SEQ ID NO: 1609861 - RNA, 17 nt, Human
agaaccaggcaacuugg

SEQ ID NO: 1609862 - RNA, 14 nt, Human
agaagucacacagu

SEQ ID NO: 1609863 - RNA, 19 nt, Human
agaagucuuagauguauau

SEQ ID NO: 1609864 - RNA, 17 nt, Human
agaagucuuagauguau

SEQ ID NO: 1609865 - RNA, 23 nt, Human
agaaugcacaaacagaggccgcc

SEQ ID NO: 1609866 - RNA, 18 nt, Human
agaaugcucuuuacuuca

SEQ ID NO: 1609867 - RNA, 17 nt, Human
agaaucucaaauaacua

SEQ ID NO: 1609868 - RNA, 16 nt, Human
agaaugaaagggccca

SEQ ID NO: 1609869 - RNA, 19 nt, Human
agacaaggaaaaaauaaca

SEQ ID NO: 1609870 - RNA, 20 nt, Human
agacaaugugaaaagaaaaa

SEQ ID NO: 1609871 - RNA, 15 nt, Human
agaauuuugagcagg

SEQ ID NO: 1609872 - RNA, 17 nt, Human
agacccaaaaggcagaa

SEQ ID NO: 1609873 - RNA, 18 nt, Human
agacgaaacauuuguucu

SEQ ID NO: 1609874 - RNA, 23 nt, Human
agaccaucccugaaggccccgcc

SEQ ID NO: 1609875 - RNA, 14 nt, Human
agaccacguuucua

SEQ ID NO: 1609876 - RNA, 15 nt, Human
agaccacguuucuaa

SEQ ID NO: 1609877 - RNA, 23 nt, Human
agacagcccgggcucugccuccc

SEQ ID NO: 1609878 - RNA, 22 nt, Human
agacagcccgggcucugccucc

SEQ ID NO: 1609879 - RNA, 14 nt, Human
agacaauuuauuau

SEQ ID NO: 1609880 - RNA, 13 nt, Human
agacagcccucca

SEQ ID NO: 1609881 - RNA, 15 nt, Human
agacuaucuaaaugu

SEQ ID NO: 1609882 - RNA, 19 nt, Human
agacgcugugcugcccugc

SEQ ID NO: 1609883 - RNA, 18 nt, Human
agacgcugugcugcccug

SEQ ID NO: 1609884 - RNA, 17 nt, Human
agacgcugugcugcccu

SEQ ID NO: 1609885 - RNA, 20 nt, Human
agacgcugugcugcccugcc

SEQ ID NO: 1609886 - RNA, 16 nt, Human
agacucuuuggacacu

SEQ ID NO: 1609887 - RNA, 23 nt, Human
agagagcaagacgcugugcugcc

SEQ ID NO: 1609888 - RNA, 19 nt, Human
agagagcaagacgcugugc

SEQ ID NO: 1609889 - RNA, 11 nt, Human
agagagcaaga

SEQ ID NO: 1609890 - RNA, 18 nt, Human
agagcccacgcccccacu

SEQ ID NO: 1609891 - RNA, 19 nt, Human
agauugcaacaggcugggc

SEQ ID NO: 1609892 - RNA, 17 nt, Human
agauugcaacaggcugg

SEQ ID NO: 1609893 - RNA, 16 nt, Human
agauugcaccacugca

SEQ ID NO: 1609894 - RNA, 16 nt, Human
agauucuuuccugagg

SEQ ID NO: 1609895 - RNA, 15 nt, Human
agauucuuuccugag

SEQ ID NO: 1609896 - RNA, 18 nt, Human
agauucuuuccugaggcu

SEQ ID NO: 1609897 - RNA, 16 nt, Human
agauugcaacaggcug

SEQ ID NO: 1609898 - RNA, 17 nt, Human
agauugagauguguuca

SEQ ID NO: 1609899 - RNA, 23 nt, Human
agcaaaauuuuuucucuaggaaa

SEQ ID NO: 1609900 - RNA, 19 nt, Human
agcaaauucuguuuuucua

SEQ ID NO: 1609901 - RNA, 14 nt, Human
agauucuuuccuga

SEQ ID NO: 1609902 - RNA, 20 nt, Human
agaugggugcuuggaggaag

SEQ ID NO: 1609903 - RNA, 22 nt, Human
agaugggugcuuggaggaagga

SEQ ID NO: 1609904 - RNA, 18 nt, Human
agaugacaucugucuagg

SEQ ID NO: 1609905 - RNA, 22 nt, Human
agauggcugugccucugccugu

SEQ ID NO: 1609906 - RNA, 21 nt, Human
agauggcugugccucugccug

SEQ ID NO: 1609907 - RNA, 20 nt, Human
agauggcugugccucugccu

SEQ ID NO: 1609908 - RNA, 19 nt, Human
agauggcugugccucugcc

SEQ ID NO: 1609909 - RNA, 18 nt, Human
agauggcugugccucugc

SEQ ID NO: 1609910 - RNA, 17 nt, Human
agauggcugugccucug

SEQ ID NO: 1609911 - RNA, 18 nt, Human
agaucugccuaaggacuu

SEQ ID NO: 1609912 - RNA, 13 nt, Human
agaucugccuaag

SEQ ID NO: 1609913 - RNA, 23 nt, Human
agaucucugcuuuggaaaucaca

SEQ ID NO: 1609914 - RNA, 18 nt, Human
agaucucugcuuuggaaa

SEQ ID NO: 1609915 - RNA, 20 nt, Human
agauagauaggucagugcaa

SEQ ID NO: 1609916 - RNA, 20 nt, Human
agauagccaaggccaaagga

SEQ ID NO: 1609917 - RNA, 13 nt, Human
agaguugaagaca

SEQ ID NO: 1609918 - RNA, 15 nt, Human
agaguugaagacaga

SEQ ID NO: 1609919 - RNA, 14 nt, Human
agaguugaagacag

SEQ ID NO: 1609920 - RNA, 19 nt, Human
agaggguggugaccucugc

SEQ ID NO: 1609921 - RNA, 20 nt, Human
agagggucugaggaauccag

SEQ ID NO: 1609922 - RNA, 15 nt, Human
agaguggcuccuccc

SEQ ID NO: 1609923 - RNA, 14 nt, Human
agaguggcuccucc

SEQ ID NO: 1609924 - RNA, 13 nt, Human
agaguggcuccuc

SEQ ID NO: 1609925 - RNA, 12 nt, Human
agaguggcuccu

SEQ ID NO: 1609926 - RNA, 16 nt, Human
agauaugauucaaaug

SEQ ID NO: 1609927 - RNA, 15 nt, Human
agauaugauucaaau

SEQ ID NO: 1609928 - RNA, 14 nt, Human
agauaugauucaaa

SEQ ID NO: 1609929 - RNA, 14 nt, Human
agccagcaguucag

SEQ ID NO: 1609930 - RNA, 23 nt, Human
agccagcaggcucucaggccagc

SEQ ID NO: 1609931 - RNA, 21 nt, Human
agccagcaggcucucaggcca

SEQ ID NO: 1609932 - RNA, 22 nt, Human
agccagcaggcucucaggccag

SEQ ID NO: 1609933 - RNA, 20 nt, Human
agcccacgcccccacuggug

SEQ ID NO: 1609934 - RNA, 14 nt, Human
agcccaccuuggcu

SEQ ID NO: 1609935 - RNA, 19 nt, Human
agcccacgcccccacuggu

SEQ ID NO: 1609936 - RNA, 18 nt, Human
agcccacgcccccacugg

SEQ ID NO: 1609937 - RNA, 17 nt, Human
agcccacgcccccacug

SEQ ID NO: 1609938 - RNA, 13 nt, Human
agcccaccuuggc

SEQ ID NO: 1609939 - RNA, 23 nt, Human
agcccaccccucaacaccucugc

SEQ ID NO: 1609940 - RNA, 22 nt, Human
agccagauuucacucuccuugg

SEQ ID NO: 1609941 - RNA, 20 nt, Human
agccagauuucacucuccuu

SEQ ID NO: 1609942 - RNA, 17 nt, Human
agccagauuucacucuc

SEQ ID NO: 1609943 - RNA, 14 nt, Human
agccagauuucacu

SEQ ID NO: 1609944 - RNA, 17 nt, Human
agccaacuauggccugu

SEQ ID NO: 1609945 - RNA, 16 nt, Human
agcaucuaugugagac

SEQ ID NO: 1609946 - RNA, 17 nt, Human
agcacugacuucuaagu

SEQ ID NO: 1609947 - RNA, 19 nt, Human
agcacugacuucuaaguaa

SEQ ID NO: 1609948 - RNA, 16 nt, Human
agcagccuggacccug

SEQ ID NO: 1609949 - RNA, 16 nt, Human
agcagugcaugcuguc

SEQ ID NO: 1609950 - RNA, 13 nt, Human
agcagugcaugcu

SEQ ID NO: 1609951 - RNA, 19 nt, Human
agcagcguuucuaugacac

SEQ ID NO: 1609952 - RNA, 20 nt, Human
agcagccuggacccugugga

SEQ ID NO: 1609953 - RNA, 18 nt, Human
agcagugcaugcuguccc

SEQ ID NO: 1609954 - RNA, 17 nt, Human
agcagugcaugcugucc

SEQ ID NO: 1609955 - RNA, 21 nt, Human
agcacagacccugcccugugg

SEQ ID NO: 1609956 - RNA, 20 nt, Human
agcaauucuccugccucagc

SEQ ID NO: 1609957 - RNA, 19 nt, Human
agcaauucuccugccucag

SEQ ID NO: 1609958 - RNA, 18 nt, Human
agcaauucuccugccuca

SEQ ID NO: 1609959 - RNA, 17 nt, Human
agcaauucuccugccuc

SEQ ID NO: 1609960 - RNA, 15 nt, Human
agcaauucuccugcc

SEQ ID NO: 1609961 - RNA, 17 nt, Human
agggacaggauaagagg

SEQ ID NO: 1609962 - RNA, 19 nt, Human
aggcugcagugagccgaga

SEQ ID NO: 1609963 - RNA, 17 nt, Human
aggcugcagugagccga

SEQ ID NO: 1609964 - RNA, 12 nt, Human
aggcugucaauu

SEQ ID NO: 1609965 - RNA, 19 nt, Human
aggcugucaauuacaggaa

SEQ ID NO: 1609966 - RNA, 24 nt, Human
aggcuguaucccaugagccucagc

SEQ ID NO: 1609967 - RNA, 22 nt, Human
aggcucuggagcccacuguacu

SEQ ID NO: 1609968 - RNA, 13 nt, Human
aggcugaggacuu

SEQ ID NO: 1609969 - RNA, 11 nt, Human
aggcugaggac

SEQ ID NO: 1609970 - RNA, 14 nt, Human
aggcucuucuccuu

SEQ ID NO: 1609971 - RNA, 13 nt, Human
aggcugagccuca

SEQ ID NO: 1609972 - RNA, 11 nt, Human
aggcugagccu

SEQ ID NO: 1609973 - RNA, 13 nt, Human
aggcucuucuccu

SEQ ID NO: 1609974 - RNA, 20 nt, Human
aggcccucugcccacucccu

SEQ ID NO: 1609975 - RNA, 19 nt, Human
aggcccucugcccacuccc

SEQ ID NO: 1609976 - RNA, 21 nt, Human
aggcccucugcccacucccug

SEQ ID NO: 1609977 - RNA, 14 nt, Human
agggccuggcucag

SEQ ID NO: 1609978 - RNA, 13 nt, Human
agggccuggcuca

SEQ ID NO: 1609979 - RNA, 18 nt, Human
agggccuggcucaggugg

SEQ ID NO: 1609980 - RNA, 14 nt, Human
agggacugagaaau

SEQ ID NO: 1609981 - RNA, 13 nt, Human
agggacugagaaa

SEQ ID NO: 1609982 - RNA, 15 nt, Human
agggacugagaaauu

SEQ ID NO: 1609983 - RNA, 17 nt, Human
agggacugagaaauuua

SEQ ID NO: 1609984 - RNA, 20 nt, Human
aggcagagguugcagugagc

SEQ ID NO: 1609985 - RNA, 13 nt, Human
aggcagauacagg

SEQ ID NO: 1609986 - RNA, 22 nt, Human
aggcagaacucaucuagguaaa

SEQ ID NO: 1609987 - RNA, 16 nt, Human
aggcagccaggccaca

SEQ ID NO: 1609988 - RNA, 15 nt, Human
aggcagccaggccac

SEQ ID NO: 1609989 - RNA, 14 nt, Human
aggcagccaggcca

SEQ ID NO: 1609990 - RNA, 23 nt, Human
aggccaggcccucugcccacucc

SEQ ID NO: 1609991 - RNA, 19 nt, Human
aggccaggcccucugccca

SEQ ID NO: 1609992 - RNA, 18 nt, Human
aggccaggcccucugccc

SEQ ID NO: 1609993 - RNA, 17 nt, Human
aggccaggcccucugcc

SEQ ID NO: 1609994 - RNA, 16 nt, Human
aggccagcugcuuggg

SEQ ID NO: 1609995 - RNA, 14 nt, Human
aggccagcugcuug

SEQ ID NO: 1609996 - RNA, 13 nt, Human
aggccagcugcuu

SEQ ID NO: 1609997 - RNA, 17 nt, Human
aggcccucugcccacuc

SEQ ID NO: 1609998 - RNA, 17 nt, Human
aggccaugggccuccug

SEQ ID NO: 1609999 - RNA, 16 nt, Human
aggccaugggccuccu

SEQ ID NO: 1610000 - RNA, 14 nt, Human
aggccaugggccuc

SEQ ID NO: 1610001 - RNA, 23 nt, Human
aggccagcugcuugggcuucauc

SEQ ID NO: 1610002 - RNA, 23 nt, Human
aggcauuccccaggaggccagcc

SEQ ID NO: 1610003 - RNA, 22 nt, Human
aggcauuccccaggaggccagc

SEQ ID NO: 1610004 - RNA, 17 nt, Human
aggcauuccccaggagg

SEQ ID NO: 1610005 - RNA, 22 nt, Human
aggcauguucucugaggacacu

SEQ ID NO: 1610006 - RNA, 20 nt, Human
aggcauguucucugaggaca

SEQ ID NO: 1610007 - RNA, 21 nt, Human
aggcauuccccaggaggccag

SEQ ID NO: 1610008 - RNA, 18 nt, Human
aggcagccaggccacaag

SEQ ID NO: 1610009 - RNA, 17 nt, Human
aggcaucgcaauguaag

SEQ ID NO: 1610010 - RNA, 24 nt, Human
aggcaugugaugagaggaaaucac

SEQ ID NO: 1610011 - RNA, 23 nt, Human
aggcaugugaugagaggaaauca

SEQ ID NO: 1610012 - RNA, 12 nt, Human
aggcauguucuc

SEQ ID NO: 1610013 - RNA, 13 nt, Human
aggaaguagagga

SEQ ID NO: 1610014 - RNA, 19 nt, Human
aggaaguacuggagaaaau

SEQ ID NO: 1610015 - RNA, 16 nt, Human
aggagagcccuucauu

SEQ ID NO: 1610016 - RNA, 14 nt, Human
aggaggucucuaag

SEQ ID NO: 1610017 - RNA, 12 nt, Human
aggagugagcac

SEQ ID NO: 1610018 - RNA, 15 nt, Human
aggaggucucuaaga

SEQ ID NO: 1610019 - RNA, 14 nt, Human
aggagugagcacua

SEQ ID NO: 1610020 - RNA, 18 nt, Human
aggaguuucguuuucaaa

SEQ ID NO: 1610021 - RNA, 22 nt, Human
aggauguucuagcauggcugcc

SEQ ID NO: 1610022 - RNA, 13 nt, Human
agcuacaaaugca

SEQ ID NO: 1610023 - RNA, 21 nt, Human
agcucaccagccccagugccc

SEQ ID NO: 1610024 - RNA, 15 nt, Human
agcucaccagcccca

SEQ ID NO: 1610025 - RNA, 14 nt, Human
agcucaccagcccc

SEQ ID NO: 1610026 - RNA, 13 nt, Human
agcucaccagccc

SEQ ID NO: 1610027 - RNA, 15 nt, Human
agcuaaugggacacu

SEQ ID NO: 1610028 - RNA, 14 nt, Human
agcuaaugggacac

SEQ ID NO: 1610029 - RNA, 13 nt, Human
agcuaaugggaca

SEQ ID NO: 1610030 - RNA, 17 nt, Human
agcgacagugagacucu

SEQ ID NO: 1610031 - RNA, 15 nt, Human
agcgauucuucugcu

SEQ ID NO: 1610032 - RNA, 19 nt, Human
agcgauucuucugcuucag

SEQ ID NO: 1610033 - RNA, 17 nt, Human
agcgauucuucugcuuc

SEQ ID NO: 1610034 - RNA, 15 nt, Human
agcgacagugagacu

SEQ ID NO: 1610035 - RNA, 13 nt, Human
agcgacagugaga

SEQ ID NO: 1610036 - RNA, 20 nt, Human
agcuaacauggaaguacuau

SEQ ID NO: 1610037 - RNA, 19 nt, Human
agcuaacauggaaguacua

SEQ ID NO: 1610038 - RNA, 18 nt, Human
agccugggcaaugugaua

SEQ ID NO: 1610039 - RNA, 14 nt, Human
agccuggacccugu

SEQ ID NO: 1610040 - RNA, 18 nt, Human
agccuggcacagggcagu

SEQ ID NO: 1610041 - RNA, 17 nt, Human
agccuggcacagggcag

SEQ ID NO: 1610042 - RNA, 20 nt, Human
agccuggcacagggcagugg

SEQ ID NO: 1610043 - RNA, 17 nt, Human
agccugcugccugcuuu

SEQ ID NO: 1610044 - RNA, 20 nt, Human
agcugcugaaacaacaaaua

SEQ ID NO: 1610045 - RNA, 16 nt, Human
agcugcugaaacaaca

SEQ ID NO: 1610046 - RNA, 15 nt, Human
agcugcugaaacaac

SEQ ID NO: 1610047 - RNA, 14 nt, Human
agcugcugaaacaa

SEQ ID NO: 1610048 - RNA, 15 nt, Human
agcuggucccacuca

SEQ ID NO: 1610049 - RNA, 16 nt, Human
agcuggucccacucag

SEQ ID NO: 1610050 - RNA, 16 nt, Human
agcuggguuggaaaac

SEQ ID NO: 1610051 - RNA, 20 nt, Human
agcuggguuggaaaacagua

SEQ ID NO: 1610052 - RNA, 16 nt, Human
agcugguugagguuuc

SEQ ID NO: 1610053 - RNA, 21 nt, Human
agcugacuuuucuguccgagc

SEQ ID NO: 1610054 - RNA, 15 nt, Human
agcugacuuuucugu

SEQ ID NO: 1610055 - RNA, 23 nt, Human
agcucaccagccccagugcccac

SEQ ID NO: 1610056 - RNA, 22 nt, Human
agcucaccagccccagugccca

SEQ ID NO: 1610057 - RNA, 18 nt, Human
aggaaaaaauaacaauga

SEQ ID NO: 1610058 - RNA, 19 nt, Human
aggaaaaccaagccguggc

SEQ ID NO: 1610059 - RNA, 23 nt, Human
agcuuuuuucucugauacagaaa

SEQ ID NO: 1610060 - RNA, 22 nt, Human
agcuuuuuucucugauacagaa

SEQ ID NO: 1610061 - RNA, 20 nt, Human
agcuuuuuucucugauacag

SEQ ID NO: 1610062 - RNA, 19 nt, Human
agcuuuuuucucugauaca

SEQ ID NO: 1610063 - RNA, 22 nt, Human
agcuuuguuuguugucagcuga

SEQ ID NO: 1610064 - RNA, 21 nt, Human
agcuuuguuuguugucagcug

SEQ ID NO: 1610065 - RNA, 15 nt, Human
aggaaguacuggaga

SEQ ID NO: 1610066 - RNA, 11 nt, Human
aggaaguacug

SEQ ID NO: 1610067 - RNA, 14 nt, Human
aggaagguagaaau

SEQ ID NO: 1610068 - RNA, 12 nt, Human
aggaacacuccu

SEQ ID NO: 1610069 - RNA, 23 nt, Human
aggaaaaccaagccguggcuucc

SEQ ID NO: 1610070 - RNA, 22 nt, Human
aggaaaaccaagccguggcuuc

SEQ ID NO: 1610071 - RNA, 21 nt, Human
aggaaaaccaagccguggcuu

SEQ ID NO: 1610072 - RNA, 20 nt, Human
aggaaaaccaagccguggcu

SEQ ID NO: 1610073 - RNA, 15 nt, Human
aggaacacuccuuca

SEQ ID NO: 1610074 - RNA, 18 nt, Human
agcuguaugauucccagc

SEQ ID NO: 1610075 - RNA, 17 nt, Human
agcuguaugauucccag

SEQ ID NO: 1610076 - RNA, 18 nt, Human
acugacauuguuggccaa

SEQ ID NO: 1610077 - RNA, 17 nt, Human
acugacauuguuggcca

SEQ ID NO: 1610078 - RNA, 23 nt, Human
acugaauuucuuuugccguuauu

SEQ ID NO: 1610079 - RNA, 13 nt, Human
acucuacccucuu

SEQ ID NO: 1610080 - RNA, 12 nt, Human
acugaauuucuu

SEQ ID NO: 1610081 - RNA, 20 nt, Human
acugaauuaugaaacuuuug

SEQ ID NO: 1610082 - RNA, 15 nt, Human
acugaauuaugaaac

SEQ ID NO: 1610083 - RNA, 14 nt, Human
acugaauuaugaaa

SEQ ID NO: 1610084 - RNA, 13 nt, Human
acugaauuaugaa

SEQ ID NO: 1610085 - RNA, 19 nt, Human
acugauaugggucuugaua

SEQ ID NO: 1610086 - RNA, 22 nt, Human
acugacauuguuggccaaagcc

SEQ ID NO: 1610087 - RNA, 14 nt, Human
acugauuacugccu

SEQ ID NO: 1610088 - RNA, 20 nt, Human
acugauuuuuuuuuccuuca

SEQ ID NO: 1610089 - RNA, 19 nt, Human
acugauuuuuuuuuccuuc

SEQ ID NO: 1610090 - RNA, 18 nt, Human
acugauuuuuuuuuccuu

SEQ ID NO: 1610091 - RNA, 17 nt, Human
acugauuuuuuuuuccu

SEQ ID NO: 1610092 - RNA, 16 nt, Human
acugauuuuuuuuucc

SEQ ID NO: 1610093 - RNA, 22 nt, Human
acugauuugacauagucuggcu

SEQ ID NO: 1610094 - RNA, 14 nt, Human
acucccuuucaaca

SEQ ID NO: 1610095 - RNA, 18 nt, Human
acucccugccccccagcc

SEQ ID NO: 1610096 - RNA, 22 nt, Human
acucccaucugugaaaggaaag

SEQ ID NO: 1610097 - RNA, 15 nt, Human
acucccaagcuggac

SEQ ID NO: 1610098 - RNA, 19 nt, Human
acucguuaauuuguagugu

SEQ ID NO: 1610099 - RNA, 14 nt, Human
acucguuaauuugu

SEQ ID NO: 1610100 - RNA, 15 nt, Human
acucuacagaggcca

SEQ ID NO: 1610101 - RNA, 12 nt, Human
acuggaacucuc

SEQ ID NO: 1610102 - RNA, 15 nt, Human
acugccuauuuuaau

SEQ ID NO: 1610103 - RNA, 17 nt, Human
acuguaaaauaauaacu

SEQ ID NO: 1610104 - RNA, 12 nt, Human
acugguggcccg

SEQ ID NO: 1610105 - RNA, 20 nt, Human
acuggugacugauucuucag

SEQ ID NO: 1610106 - RNA, 19 nt, Human
acuggugacugauucuuca

SEQ ID NO: 1610107 - RNA, 18 nt, Human
acuggugacugauucuuc

SEQ ID NO: 1610108 - RNA, 19 nt, Human
acugcccaggccugccugu

SEQ ID NO: 1610109 - RNA, 14 nt, Human
acugccaugccagc

SEQ ID NO: 1610110 - RNA, 18 nt, Human
acugugccaugugccagg

SEQ ID NO: 1610111 - RNA, 17 nt, Human
acugugccaugugccag

SEQ ID NO: 1610112 - RNA, 16 nt, Human
acugugaagagaacca

SEQ ID NO: 1610113 - RNA, 23 nt, Human
acugucuuuuuucuaaaguaaaa

SEQ ID NO: 1610114 - RNA, 22 nt, Human
acugucuuuuuucuaaaguaaa

SEQ ID NO: 1610115 - RNA, 16 nt, Human
acugucuuuuuucuaa

SEQ ID NO: 1610116 - RNA, 20 nt, Human
acugguggcccgacagccug

SEQ ID NO: 1610117 - RNA, 22 nt, Human
acuuaaaaaugguuuaaauggu

SEQ ID NO: 1610118 - RNA, 19 nt, Human
acuucaaauccuugaagau

SEQ ID NO: 1610119 - RNA, 18 nt, Human
acuucaaauccuugaaga

SEQ ID NO: 1610120 - RNA, 17 nt, Human
acuucaaauccuugaag

SEQ ID NO: 1610121 - RNA, 20 nt, Human
acuuaaaauauuccugcauu

SEQ ID NO: 1610122 - RNA, 15 nt, Human
acuguuucaaacuuu

SEQ ID NO: 1610123 - RNA, 18 nt, Human
acuguuucaaacuuuacu

SEQ ID NO: 1610124 - RNA, 19 nt, Human
acuguuucaaacuuuacua

SEQ ID NO: 1610125 - RNA, 13 nt, Human
acuuggucuguga

SEQ ID NO: 1610126 - RNA, 23 nt, Human
acuuggggggcugaggugggagg

SEQ ID NO: 1610127 - RNA, 16 nt, Human
acuugaaaauuaacau

SEQ ID NO: 1610128 - RNA, 14 nt, Human
acuugaaaauuaac

SEQ ID NO: 1610129 - RNA, 12 nt, Human
acuugaaaauua

SEQ ID NO: 1610130 - RNA, 21 nt, Human
acuucagacauagaauuaaca

SEQ ID NO: 1610131 - RNA, 17 nt, Human
acuucagcgguuuauau

SEQ ID NO: 1610132 - RNA, 18 nt, Human
acuucuuuaauuuuggaa

SEQ ID NO: 1610133 - RNA, 20 nt, Human
acuucuuuaauuuuggaauu

SEQ ID NO: 1610134 - RNA, 19 nt, Human
acuucuuuaauuuuggaau

SEQ ID NO: 1610135 - RNA, 19 nt, Human
acgcaggcccccaggugcc

SEQ ID NO: 1610136 - RNA, 19 nt, Human
acgcugugcugcccugccc

SEQ ID NO: 1610137 - RNA, 22 nt, Human
acgcugugcugcccugcccacc

SEQ ID NO: 1610138 - RNA, 23 nt, Human
acgcagcccugcuuugggcugcc

SEQ ID NO: 1610139 - RNA, 22 nt, Human
acgcagcccugcuuugggcugc

SEQ ID NO: 1610140 - RNA, 12 nt, Human
acgcagcccugc

SEQ ID NO: 1610141 - RNA, 19 nt, Human
acggacacucaaaagcugg

SEQ ID NO: 1610142 - RNA, 17 nt, Human
acggacacucaaaagcu

SEQ ID NO: 1610143 - RNA, 19 nt, Human
acggaauaguuggcuagga

SEQ ID NO: 1610144 - RNA, 13 nt, Human
acgucugugccau

SEQ ID NO: 1610145 - RNA, 14 nt, Human
acgucuuaaauauu

SEQ ID NO: 1610146 - RNA, 13 nt, Human
acgucuuaaauau

SEQ ID NO: 1610147 - RNA, 20 nt, Human
acgauuucuguuuagauaau

SEQ ID NO: 1610148 - RNA, 23 nt, Human
acgauuucuguuuagauaauaca

SEQ ID NO: 1610149 - RNA, 19 nt, Human
acgauuucuguuuagauaa

SEQ ID NO: 1610150 - RNA, 18 nt, Human
acuaauggggcggugaga

SEQ ID NO: 1610151 - RNA, 20 nt, Human
acuaauguguaagacaaaaa

SEQ ID NO: 1610152 - RNA, 12 nt, Human
accuuggcucaa

SEQ ID NO: 1610153 - RNA, 23 nt, Human
accucugccugaagucacacagu

SEQ ID NO: 1610154 - RNA, 20 nt, Human
accucugccugaagucacac

SEQ ID NO: 1610155 - RNA, 12 nt, Human
accucugccuga

SEQ ID NO: 1610156 - RNA, 20 nt, Human
accugccccucaacucuccu

SEQ ID NO: 1610157 - RNA, 15 nt, Human
accugccccucaacu

SEQ ID NO: 1610158 - RNA, 12 nt, Human
accugccccuca

SEQ ID NO: 1610159 - RNA, 23 nt, Human
accugccaggaagccagcaggcu

SEQ ID NO: 1610160 - RNA, 22 nt, Human
accugccaggaagccagcaggc

SEQ ID NO: 1610161 - RNA, 21 nt, Human
accugccaggaagccagcagg

SEQ ID NO: 1610162 - RNA, 21 nt, Human
acccugucucuacuaaaaaua

SEQ ID NO: 1610163 - RNA, 16 nt, Human
acccugugauggggcc

SEQ ID NO: 1610164 - RNA, 16 nt, Human
acccuggggagaaagu

SEQ ID NO: 1610165 - RNA, 16 nt, Human
acccucaggcaggugg

SEQ ID NO: 1610166 - RNA, 15 nt, Human
acccucaggcaggug

SEQ ID NO: 1610167 - RNA, 13 nt, Human
acccucaucacca

SEQ ID NO: 1610168 - RNA, 14 nt, Human
acccucaggcaggu

SEQ ID NO: 1610169 - RNA, 13 nt, Human
acccucaggcagg

SEQ ID NO: 1610170 - RNA, 18 nt, Human
acccucagagccaccccu

SEQ ID NO: 1610171 - RNA, 23 nt, Human
acccuggcacuauaauguaagcu

SEQ ID NO: 1610172 - RNA, 18 nt, Human
acccuggcacccagggug

SEQ ID NO: 1610173 - RNA, 23 nt, Human
acccucaucaccaacgucugugc

SEQ ID NO: 1610174 - RNA, 13 nt, Human
acccuauugcugc

SEQ ID NO: 1610175 - RNA, 19 nt, Human
acccuauugcugcuugagg

SEQ ID NO: 1610176 - RNA, 14 nt, Human
acccuauugcugcu

SEQ ID NO: 1610177 - RNA, 11 nt, Human
acccucagagc

SEQ ID NO: 1610178 - RNA, 21 nt, Human
accucaggugauccacccacc

SEQ ID NO: 1610179 - RNA, 20 nt, Human
accucaggugauccacccac

SEQ ID NO: 1610180 - RNA, 11 nt, Human
accucaggccu

SEQ ID NO: 1610181 - RNA, 16 nt, Human
accgggcacucagaag

SEQ ID NO: 1610182 - RNA, 14 nt, Human
accgggcacucaga

SEQ ID NO: 1610183 - RNA, 12 nt, Human
accgggcacuca

SEQ ID NO: 1610184 - RNA, 21 nt, Human
acccugugauggggcccugcc

SEQ ID NO: 1610185 - RNA, 20 nt, Human
acccugugauggggcccugc

SEQ ID NO: 1610186 - RNA, 19 nt, Human
acccugugauggggcccug

SEQ ID NO: 1610187 - RNA, 17 nt, Human
acccugugauggggccc

SEQ ID NO: 1610188 - RNA, 23 nt, Human
accgugaggccagagacacaagc

SEQ ID NO: 1610189 - RNA, 19 nt, Human
accgugccuggccacgccc

SEQ ID NO: 1610190 - RNA, 12 nt, Human
accucagccucc

SEQ ID NO: 1610191 - RNA, 18 nt, Human
accgugaggccagagaca

SEQ ID NO: 1610192 - RNA, 23 nt, Human
accgggcugggagcucugcagag

SEQ ID NO: 1610193 - RNA, 21 nt, Human
accgggcugggagcucugcag

SEQ ID NO: 1610194 - RNA, 21 nt, Human
aauuauaugcuauuucuauau

SEQ ID NO: 1610195 - RNA, 20 nt, Human
aauuauaugcuauuucuaua

SEQ ID NO: 1610196 - RNA, 19 nt, Human
aauuauaugcuauuucuau

SEQ ID NO: 1610197 - RNA, 23 nt, Human
aauuauaucugaggaauucugua

SEQ ID NO: 1610198 - RNA, 22 nt, Human
aauuauaucugaggaauucugu

SEQ ID NO: 1610199 - RNA, 20 nt, Human
aauuauaucugaggaauucu

SEQ ID NO: 1610200 - RNA, 19 nt, Human
aauuauacccccugcaaag

SEQ ID NO: 1610201 - RNA, 19 nt, Human
aauuaugaguuauuuuuau

SEQ ID NO: 1610202 - RNA, 18 nt, Human
aauuaugaaacuuuugga

SEQ ID NO: 1610203 - RNA, 15 nt, Human
aauuaugaaacuuuu

SEQ ID NO: 1610204 - RNA, 13 nt, Human
aauuaugaaacuu

SEQ ID NO: 1610205 - RNA, 12 nt, Human
aauuaugaaacu

SEQ ID NO: 1610206 - RNA, 13 nt, Human
aauucuuaaauau

SEQ ID NO: 1610207 - RNA, 18 nt, Human
aauucuguuuuucuaggc

SEQ ID NO: 1610208 - RNA, 14 nt, Human
aauucuguuuuucu

SEQ ID NO: 1610209 - RNA, 22 nt, Human
aauuguaaggaaugauuaauua

SEQ ID NO: 1610210 - RNA, 15 nt, Human
aauuggggauucuua

SEQ ID NO: 1610211 - RNA, 12 nt, Human
aauucuguauag

SEQ ID NO: 1610212 - RNA, 20 nt, Human
aauucuguauagauuagaga

SEQ ID NO: 1610213 - RNA, 14 nt, Human
aauucuguauagau

SEQ ID NO: 1610214 - RNA, 13 nt, Human
aauucuguauaga

SEQ ID NO: 1610215 - RNA, 21 nt, Human
aauucucauuugucacacacu

SEQ ID NO: 1610216 - RNA, 14 nt, Human
aauucuccugccuc

SEQ ID NO: 1610217 - RNA, 16 nt, Human
aauucuccugccucag

SEQ ID NO: 1610218 - RNA, 15 nt, Human
aauucuccugccuca

SEQ ID NO: 1610219 - RNA, 15 nt, Human
aauucucuuauccaa

SEQ ID NO: 1610220 - RNA, 15 nt, Human
aauucucuaguuuga

SEQ ID NO: 1610221 - RNA, 17 nt, Human
aauucucuaguuugauu

SEQ ID NO: 1610222 - RNA, 19 nt, Human
aauucucagaaucucaaau

SEQ ID NO: 1610223 - RNA, 14 nt, Human
aauucuacuuugag

SEQ ID NO: 1610224 - RNA, 22 nt, Human
aauucuagcuuugagcuuaaga

SEQ ID NO: 1610225 - RNA, 17 nt, Human
aauuucccaaagcagug

SEQ ID NO: 1610226 - RNA, 15 nt, Human
aauuucccaaagcag

SEQ ID NO: 1610227 - RNA, 11 nt, Human
aauuguaauag

SEQ ID NO: 1610228 - RNA, 14 nt, Human
aauuguaauuauau

SEQ ID NO: 1610229 - RNA, 16 nt, Human
aauuguaauuauaucu

SEQ ID NO: 1610230 - RNA, 15 nt, Human
aauuguaauuauauc

SEQ ID NO: 1610231 - RNA, 17 nt, Human
aauuguaauuauaucug

SEQ ID NO: 1610232 - RNA, 15 nt, Human
aauuuccugggagcu

SEQ ID NO: 1610233 - RNA, 12 nt, Human
aauuuccuggga

SEQ ID NO: 1610234 - RNA, 17 nt, Human
aauuuccugggagcuuu

SEQ ID NO: 1610235 - RNA, 15 nt, Human
acaccaauauucaua

SEQ ID NO: 1610236 - RNA, 23 nt, Human
acaccagagcccaccuuggcuca

SEQ ID NO: 1610237 - RNA, 18 nt, Human
acaccagagcccaccuug

SEQ ID NO: 1610238 - RNA, 18 nt, Human
acacagcucuucuccagg

SEQ ID NO: 1610239 - RNA, 19 nt, Human
acacagcucuucuccaggc

SEQ ID NO: 1610240 - RNA, 16 nt, Human
acacagcucuucucca

SEQ ID NO: 1610241 - RNA, 14 nt, Human
acacagcucuucuc

SEQ ID NO: 1610242 - RNA, 15 nt, Human
acaaguuaaauaaau

SEQ ID NO: 1610243 - RNA, 20 nt, Human
acaaggcaaggcugucaauu

SEQ ID NO: 1610244 - RNA, 19 nt, Human
acaaggcaaggcugucaau

SEQ ID NO: 1610245 - RNA, 17 nt, Human
acaaggcaaggcuguca

SEQ ID NO: 1610246 - RNA, 16 nt, Human
acaaggcaaggcuguc

SEQ ID NO: 1610247 - RNA, 15 nt, Human
acauaagauaaaugu

SEQ ID NO: 1610248 - RNA, 20 nt, Human
acauaaguauuuaauucaug

SEQ ID NO: 1610249 - RNA, 20 nt, Human
acauacaggaagguagaaau

SEQ ID NO: 1610250 - RNA, 21 nt, Human
acauaaugcgugcauaccacu

SEQ ID NO: 1610251 - RNA, 16 nt, Human
acauacaauuccaaac

SEQ ID NO: 1610252 - RNA, 20 nt, Human
acaucccuuaccugggaaag

SEQ ID NO: 1610253 - RNA, 13 nt, Human
acaugcacgugug

SEQ ID NO: 1610254 - RNA, 19 nt, Human
acauguuuuucuucucccu

SEQ ID NO: 1610255 - RNA, 17 nt, Human
acauguguuggcagccu

SEQ ID NO: 1610256 - RNA, 14 nt, Human
acauguuaaaccau

SEQ ID NO: 1610257 - RNA, 23 nt, Human
acauguuaaaccaugggauaaau

SEQ ID NO: 1610258 - RNA, 21 nt, Human
acauguuaaaccaugggauaa

SEQ ID NO: 1610259 - RNA, 16 nt, Human
acauguuaaaccaugg

SEQ ID NO: 1610260 - RNA, 21 nt, Human
acauuuguauaaaauaauuuu

SEQ ID NO: 1610261 - RNA, 17 nt, Human
accaacgucugugccau

SEQ ID NO: 1610262 - RNA, 14 nt, Human
accaacgucugugc

SEQ ID NO: 1610263 - RNA, 19 nt, Human
acauuuguauaaaauaauu

SEQ ID NO: 1610264 - RNA, 16 nt, Human
acauuuguauaaaaua

SEQ ID NO: 1610265 - RNA, 16 nt, Human
acauuugcucauggaa

SEQ ID NO: 1610266 - RNA, 15 nt, Human
acauuugcucaugga

SEQ ID NO: 1610267 - RNA, 13 nt, Human
accacguuucuaa

SEQ ID NO: 1610268 - RNA, 14 nt, Human
accacguuucuaaa

SEQ ID NO: 1610269 - RNA, 16 nt, Human
accacgcuggaccuug

SEQ ID NO: 1610270 - RNA, 14 nt, Human
accacgcuggaccu

SEQ ID NO: 1610271 - RNA, 18 nt, Human
accacgcuggaccuugaa

SEQ ID NO: 1610272 - RNA, 21 nt, Human
accaacgucugugccauuuug

SEQ ID NO: 1610273 - RNA, 14 nt, Human
accaagccguggcu

SEQ ID NO: 1610274 - RNA, 18 nt, Human
accaagccguggcuuccc

SEQ ID NO: 1610275 - RNA, 17 nt, Human
accaagccguggcuucc

SEQ ID NO: 1610276 - RNA, 16 nt, Human
accaagccguggcuuc

SEQ ID NO: 1610277 - RNA, 15 nt, Human
accaagccguggcuu

SEQ ID NO: 1610278 - RNA, 16 nt, Human
accagagcugccaccu

SEQ ID NO: 1610279 - RNA, 14 nt, Human
accagagcugccac

SEQ ID NO: 1610280 - RNA, 13 nt, Human
accagagcugcca

SEQ ID NO: 1610281 - RNA, 19 nt, Human
accagagcugccaccugcc

SEQ ID NO: 1610282 - RNA, 22 nt, Human
acaggaugguucccuugaugaa

SEQ ID NO: 1610283 - RNA, 24 nt, Human
acaggaugguucccuugaugaaga

SEQ ID NO: 1610284 - RNA, 14 nt, Human
acaggauuauugga

SEQ ID NO: 1610285 - RNA, 17 nt, Human
acaggcaaugcuggcug

SEQ ID NO: 1610286 - RNA, 14 nt, Human
acaggcacccacca

SEQ ID NO: 1610287 - RNA, 16 nt, Human
acaggcaaugcuggcu

SEQ ID NO: 1610288 - RNA, 15 nt, Human
acaggcaaugcuggc

SEQ ID NO: 1610289 - RNA, 20 nt, Human
acagcucuucuccaggcugu

SEQ ID NO: 1610290 - RNA, 19 nt, Human
acagcucuucuccaggcug

SEQ ID NO: 1610291 - RNA, 20 nt, Human
acagugauuaccagggacug

SEQ ID NO: 1610292 - RNA, 19 nt, Human
acagugauuaccagggacu

SEQ ID NO: 1610293 - RNA, 18 nt, Human
acagugcaucucagccca

SEQ ID NO: 1610294 - RNA, 17 nt, Human
acagugcaucucagccc

SEQ ID NO: 1610295 - RNA, 15 nt, Human
acagugcaucucagc

SEQ ID NO: 1610296 - RNA, 23 nt, Human
acaggcacccaccaucaugucug

SEQ ID NO: 1610297 - RNA, 18 nt, Human
acaggcaaugcuggcugu

SEQ ID NO: 1610298 - RNA, 23 nt, Human
acagugaucaaguuauuuuuaau

SEQ ID NO: 1610299 - RNA, 16 nt, Human
aaucucaauauuucag

SEQ ID NO: 1610300 - RNA, 20 nt, Human
aaugaauacuuuauaaagga

SEQ ID NO: 1610301 - RNA, 20 nt, Human
aaugaugccaugaggaacaa

SEQ ID NO: 1610302 - RNA, 20 nt, Human
aaugauguauguugaagccu

SEQ ID NO: 1610303 - RNA, 20 nt, Human
aaugaaagacuguacaaagu

SEQ ID NO: 1610304 - RNA, 18 nt, Human
aaugaaagacuguacaaa

SEQ ID NO: 1610305 - RNA, 21 nt, Human
aaugaaagacuguacaaagua

SEQ ID NO: 1610306 - RNA, 20 nt, Human
aaugaagauacugaaauaaa

SEQ ID NO: 1610307 - RNA, 14 nt, Human
aaugaagcaaugcu

SEQ ID NO: 1610308 - RNA, 21 nt, Human
aaucaccgaaaacguggcugc

SEQ ID NO: 1610309 - RNA, 22 nt, Human
aaucaaugcuauaacuauguug

SEQ ID NO: 1610310 - RNA, 23 nt, Human
aaucaccgaaaacguggcugcuu

SEQ ID NO: 1610311 - RNA, 13 nt, Human
aauauuaagaaag

SEQ ID NO: 1610312 - RNA, 23 nt, Human
aauauguggaguucaucuugaau

SEQ ID NO: 1610313 - RNA, 16 nt, Human
aauauauaucaaauau

SEQ ID NO: 1610314 - RNA, 19 nt, Human
aauaauguuaacauggaca

SEQ ID NO: 1610315 - RNA, 14 nt, Human
aauaaagcagcguu

SEQ ID NO: 1610316 - RNA, 17 nt, Human
aauaaugugaaacugga

SEQ ID NO: 1610317 - RNA, 22 nt, Human
aauaaugugaaacuggauuaaa

SEQ ID NO: 1610318 - RNA, 12 nt, Human
aagugcugggau

SEQ ID NO: 1610319 - RNA, 22 nt, Human
aagugcugggauuacaggugug

SEQ ID NO: 1610320 - RNA, 17 nt, Human
aaguugaauuuauuggc

SEQ ID NO: 1610321 - RNA, 15 nt, Human
aaguugaauuuauug

SEQ ID NO: 1610322 - RNA, 14 nt, Human
aaguugaauuuauu

SEQ ID NO: 1610323 - RNA, 22 nt, Human
aagugcugcauuuaaaagauac

SEQ ID NO: 1610324 - RNA, 22 nt, Human
aaguuguaggcauaaagucagg

SEQ ID NO: 1610325 - RNA, 24 nt, Human
aaguugaauuuauuggcuuuucug

SEQ ID NO: 1610326 - RNA, 23 nt, Human
aaguugaauuuauuggcuuuucu

SEQ ID NO: 1610327 - RNA, 16 nt, Human
aauaaacacucuugaa

SEQ ID NO: 1610328 - RNA, 11 nt, Human
aauaaacacuc

SEQ ID NO: 1610329 - RNA, 15 nt, Human
aaguuuaauauuaaa

SEQ ID NO: 1610330 - RNA, 18 nt, Human
aaguuuaauauuaaagcc

SEQ ID NO: 1610331 - RNA, 17 nt, Human
aaguuuaauauuaaagc

SEQ ID NO: 1610332 - RNA, 19 nt, Human
aauaaacacucuugaaaaa

SEQ ID NO: 1610333 - RNA, 13 nt, Human
aagagaaaaaaua

SEQ ID NO: 1610334 - RNA, 19 nt, Human
aagacuuuucuuucagcca

SEQ ID NO: 1610335 - RNA, 12 nt, Human
aagacuuuucuu

SEQ ID NO: 1610336 - RNA, 21 nt, Human
aagacuuuuccaacccucauc

SEQ ID NO: 1610337 - RNA, 15 nt, Human
aagaccacguuucua

SEQ ID NO: 1610338 - RNA, 17 nt, Human
aagaccacguuucuaaa

SEQ ID NO: 1610339 - RNA, 23 nt, Human
aagacagauacuccuccaagguu

SEQ ID NO: 1610340 - RNA, 15 nt, Human
aagaagacugcauua

SEQ ID NO: 1610341 - RNA, 20 nt, Human
aagaagacugcauuauauuu

SEQ ID NO: 1610342 - RNA, 21 nt, Human
aagacaaggaaaaaauaacaa

SEQ ID NO: 1610343 - RNA, 20 nt, Human
aagacaaugugaaaagaaaa

SEQ ID NO: 1610344 - RNA, 19 nt, Human
aagacaaugugaaaagaaa

SEQ ID NO: 1610345 - RNA, 22 nt, Human
aagacaaugacuuacuguacau

SEQ ID NO: 1610346 - RNA, 15 nt, Human
aagaacugaaaucau

SEQ ID NO: 1610347 - RNA, 13 nt, Human
aagaacugaaauc

SEQ ID NO: 1610348 - RNA, 12 nt, Human
aagaacugaaau

SEQ ID NO: 1610349 - RNA, 11 nt, Human
aagaacugaaa

SEQ ID NO: 1610350 - RNA, 20 nt, Human
aacgcaggcccccaggugcc

SEQ ID NO: 1610351 - RNA, 16 nt, Human
aacgcagcccugcuuu

SEQ ID NO: 1610352 - RNA, 12 nt, Human
aacgcagcccug

SEQ ID NO: 1610353 - RNA, 14 nt, Human
aagaacuagcauaa

SEQ ID NO: 1610354 - RNA, 12 nt, Human
aagaguguggca

SEQ ID NO: 1610355 - RNA, 19 nt, Human
aagcugcacccucaggcag

SEQ ID NO: 1610356 - RNA, 13 nt, Human
aagcugcacccuc

SEQ ID NO: 1610357 - RNA, 21 nt, Human
aaggacuuguuagaucuaguu

SEQ ID NO: 1610358 - RNA, 15 nt, Human
aaggacuuguuagau

SEQ ID NO: 1610359 - RNA, 22 nt, Human
aagcuagacgagcaggcuucuu

SEQ ID NO: 1610360 - RNA, 13 nt, Human
aaggcaaggcugu

SEQ ID NO: 1610361 - RNA, 23 nt, Human
aaggacuuguuagaucuaguuca

SEQ ID NO: 1610362 - RNA, 15 nt, Human
aaggcaaggcuguca

SEQ ID NO: 1610363 - RNA, 16 nt, Human
aaggcaaggcugucaa

SEQ ID NO: 1610364 - RNA, 22 nt, Human
aaggcagggagggccugggccc

SEQ ID NO: 1610365 - RNA, 19 nt, Human
aaggcagggagggccuggg

SEQ ID NO: 1610366 - RNA, 17 nt, Human
aagauacaguuacucag

SEQ ID NO: 1610367 - RNA, 23 nt, Human
aagauacaguuacucagaauucu

SEQ ID NO: 1610368 - RNA, 21 nt, Human
aagauaauauuaaggaagaca

SEQ ID NO: 1610369 - RNA, 19 nt, Human
aagauaauauuaaggaaga

SEQ ID NO: 1610370 - RNA, 18 nt, Human
aagccauaauuguucuua

SEQ ID NO: 1610371 - RNA, 14 nt, Human
aagcggcuggcagc

SEQ ID NO: 1610372 - RNA, 15 nt, Human
aagcgugagccacug

SEQ ID NO: 1610373 - RNA, 16 nt, Human
aagcgugagccacugc

SEQ ID NO: 1610374 - RNA, 13 nt, Human
aagcuacuuauug

SEQ ID NO: 1610375 - RNA, 10 nt, Human
aagccuuugu

SEQ ID NO: 1610376 - RNA, 18 nt, Human
aaaucucaauauuucaga

SEQ ID NO: 1610377 - RNA, 14 nt, Human
aaaucuuuuugcuu

SEQ ID NO: 1610378 - RNA, 13 nt, Human
aaaucuuuuugcu

SEQ ID NO: 1610379 - RNA, 19 nt, Human
aaaucuccaaaauaaaacu

SEQ ID NO: 1610380 - RNA, 19 nt, Human
aaaugcuguaacuuucuga

SEQ ID NO: 1610381 - RNA, 14 nt, Human
aaaugaaaaaauau

SEQ ID NO: 1610382 - RNA, 23 nt, Human
aaaugcugcuuuuucucaaaaug

SEQ ID NO: 1610383 - RNA, 10 nt, Human
aaaugcugcu

SEQ ID NO: 1610384 - RNA, 23 nt, Human
aaauggacuguggugacuuugga

SEQ ID NO: 1610385 - RNA, 21 nt, Human
aaauggacuguggugacuuug

SEQ ID NO: 1610386 - RNA, 21 nt, Human
aaauauuuauuuuaauaaugu

SEQ ID NO: 1610387 - RNA, 20 nt, Human
aaaggaugcccaaagaugca

SEQ ID NO: 1610388 - RNA, 23 nt, Human
aaauguugacaugggacauuugc

SEQ ID NO: 1610389 - RNA, 13 nt, Human
aaauguucaucaa

SEQ ID NO: 1610390 - RNA, 17 nt, Human
aaauguucaucaaugaa

SEQ ID NO: 1610391 - RNA, 22 nt, Human
aaauguugacaugggacauuug

SEQ ID NO: 1610392 - RNA, 23 nt, Human
aacauggccuuugcuugaaagaa

SEQ ID NO: 1610393 - RNA, 19 nt, Human
aacccucagagccaccccu

SEQ ID NO: 1610394 - RNA, 23 nt, Human
aaccuuuugagugccuuacacaa

SEQ ID NO: 1610395 - RNA, 16 nt, Human
aaccuuuugagugccu

SEQ ID NO: 1610396 - RNA, 18 nt, Human
aaccuuuguuugcaucug

SEQ ID NO: 1610397 - RNA, 23 nt, Human
aaauucuucuccacuuucuagcc

SEQ ID NO: 1610398 - RNA, 15 nt, Human
aaauucuugcaaagu

SEQ ID NO: 1610399 - RNA, 18 nt, Human
aaauucuugcaaaguauc

SEQ ID NO: 1610400 - RNA, 11 nt, Human
aacaggcagau

SEQ ID NO: 1610401 - RNA, 15 nt, Human
aacagccugugucuu

SEQ ID NO: 1610402 - RNA, 12 nt, Human
aacagccugugu

SEQ ID NO: 1610403 - RNA, 22 nt, Human
aacauggccuuugcuugaaaga

SEQ ID NO: 1610404 - RNA, 16 nt, Human
aaagccauguuuauua

SEQ ID NO: 1610405 - RNA, 14 nt, Human
aaagccauguuuau

SEQ ID NO: 1610406 - RNA, 23 nt, Human
aaagccauguuuauuacaguaua

SEQ ID NO: 1610407 - RNA, 18 nt, Human
aaagccauguuuauuaca

SEQ ID NO: 1610408 - RNA, 17 nt, Human
aaagccauguuuauuac

SEQ ID NO: 1610409 - RNA, 17 nt, Human
aaagcauuguaaaugug

SEQ ID NO: 1610410 - RNA, 15 nt, Human
aaagcauuguaaaug

SEQ ID NO: 1610411 - RNA, 21 nt, Human
aaaaucauuucugcaucagcu

SEQ ID NO: 1610412 - RNA, 15 nt, Human
aaaaucucaaauuuc

SEQ ID NO: 1610413 - RNA, 16 nt, Human
aaaaucucaaauuucu

SEQ ID NO: 1610414 - RNA, 18 nt, Human
aaaaucucaaauuucuaa

SEQ ID NO: 1610415 - RNA, 15 nt, Human
aaacugcacugucaa

SEQ ID NO: 1610416 - RNA, 23 nt, Human
aaacugauuuuuuuuuccuucag

SEQ ID NO: 1610417 - RNA, 23 nt, Human
aaacucuuaaaacccaagugccu

SEQ ID NO: 1610418 - RNA, 12 nt, Human
aaacucuuaaaa

SEQ ID NO: 1610419 - RNA, 16 nt, Human
aaaccgccaaggcugg

SEQ ID NO: 1610420 - RNA, 15 nt, Human
aaaccgccaaggcug

SEQ ID NO: 1610421 - RNA, 16 nt, Human
aaacccagcucugguc

SEQ ID NO: 1610422 - RNA, 12 nt, Human
aaacccagcucu

SEQ ID NO: 1610423 - RNA, 18 nt, Human
aaacccagcucuggucca

SEQ ID NO: 1610424 - RNA, 22 nt, Human
aaaccgaacugauguaaguaaa

SEQ ID NO: 1610425 - RNA, 22 nt, Human
aaaccaguauuguacaaaguau

SEQ ID NO: 1610426 - RNA, 18 nt, Human
aaaccaguauuguacaaa

SEQ ID NO: 1610427 - RNA, 17 nt, Human
aaaccaguauuguacaa

SEQ ID NO: 1610428 - RNA, 16 nt, Human
aaaccaguauuguaca

SEQ ID NO: 1610429 - RNA, 14 nt, Human
aaaccaguauugua

SEQ ID NO: 1610430 - RNA, 13 nt, Human
aaaagacuccaaa

SEQ ID NO: 1610431 - RNA, 11 nt, Human
aaaagaaugau

SEQ ID NO: 1610432 - RNA, 13 nt, Human
aaaagaauauuuu

SEQ ID NO: 1610433 - RNA, 20 nt, Human
aaaagacaaggaaaaaauaa

SEQ ID NO: 1610434 - RNA, 12 nt, Human
aaaagaauauuu

SEQ ID NO: 1610435 - RNA, 17 nt, Human
aaaagaaagaaaaucag

SEQ ID NO: 1610436 - RNA, 16 nt, Human
aaaagaaaagucaagg

SEQ ID NO: 1610437 - RNA, 17 nt, Human
aaaacacauuuuucuua

SEQ ID NO: 1610438 - RNA, 19 nt, Human
aaaacacuguucucugccc

SEQ ID NO: 1610439 - RNA, 11 nt, Human
aaaagaaaaag

SEQ ID NO: 1610440 - RNA, 12 nt, Human
aaaaucauuucu

SEQ ID NO: 1610441 - RNA, 11 nt, Human
aaaaucauuuc

SEQ ID NO: 1610442 - RNA, 10 nt, Human
aaaaucauuu

SEQ ID NO: 1610443 - RNA, 21 nt, Human
aaaaucagccugcuccagcug

SEQ ID NO: 1610444 - RNA, 17 nt, Human
aaaaucagccugcucca

SEQ ID NO: 1610445 - RNA, 13 nt, Human
aaaaucagccugc

SEQ ID NO: 1610446 - RNA, 16 nt, Human
aaaauaaaacuuuuua

SEQ ID NO: 1610447 - RNA, 14 nt, Human
aaaauaaaacuuuu

SEQ ID NO: 1610448 - RNA, 18 nt, Human
aaaaguuuaauauuaaag

SEQ ID NO: 1610449 - RNA, 20 nt, Human
aaaaguuuaauauuaaagcc

SEQ ID NO: 1610450 - RNA, 18 nt, Human
aaaaguugaauuuuacau

SEQ ID NO: 1610451 - RNA, 16 nt, Human
aaaaguuuaauauuaa

SEQ ID NO: 1610452 - RNA, 14 nt, Human
aaaaguuuaauauu

SEQ ID NO: 1610453 - RNA, 22 nt, Human
cacaguuuucugagaaagacua

SEQ ID NO: 1610454 - RNA, 21 nt, Human
cacaguuuucugagaaagacu

SEQ ID NO: 1610455 - RNA, 20 nt, Human
cacaugaaguccaagcauuu

SEQ ID NO: 1610456 - RNA, 17 nt, Human
cacaugaaguccaagca

SEQ ID NO: 1610457 - RNA, 16 nt, Human
cacaugaaguccaagc

SEQ ID NO: 1610458 - RNA, 21 nt, Human
cacaugagcaucaggccaggc

SEQ ID NO: 1610459 - RNA, 20 nt, Human
cacaugagcaucaggccagg

SEQ ID NO: 1610460 - RNA, 19 nt, Human
cacaugagcaucaggccag

SEQ ID NO: 1610461 - RNA, 18 nt, Human
cacaugagcaucaggcca

SEQ ID NO: 1610462 - RNA, 17 nt, Human
cacaugagcaucaggcc

SEQ ID NO: 1610463 - RNA, 13 nt, Human
cacaugagcauca

SEQ ID NO: 1610464 - RNA, 21 nt, Human
cacaugccucucucaggccaa

SEQ ID NO: 1610465 - RNA, 20 nt, Human
cacaugccucucucaggcca

SEQ ID NO: 1610466 - RNA, 17 nt, Human
cacauguccaagaagcc

SEQ ID NO: 1610467 - RNA, 16 nt, Human
cacauguccaagaagc

SEQ ID NO: 1610468 - RNA, 18 nt, Human
cacaugcacgugugugca

SEQ ID NO: 1610469 - RNA, 20 nt, Human
cacaugcaaggucauuuuuu

SEQ ID NO: 1610470 - RNA, 17 nt, Human
cacaugcaaggucauuu

SEQ ID NO: 1610471 - RNA, 19 nt, Human
cacaugcaaggucauuuuu

SEQ ID NO: 1610472 - RNA, 20 nt, Human
cacagcucuucuccaggcug

SEQ ID NO: 1610473 - RNA, 19 nt, Human
cacagcucuucuccaggcu

SEQ ID NO: 1610474 - RNA, 21 nt, Human
cacagcucuucuccaggcugu

SEQ ID NO: 1610475 - RNA, 16 nt, Human
cacaggacucugccuc

SEQ ID NO: 1610476 - RNA, 15 nt, Human
cacaggacucugccu

SEQ ID NO: 1610477 - RNA, 23 nt, Human
cacaguccuuaccagcagagcac

SEQ ID NO: 1610478 - RNA, 14 nt, Human
cacaggcccggcuc

SEQ ID NO: 1610479 - RNA, 22 nt, Human
cacacggacacucaaaagcugg

SEQ ID NO: 1610480 - RNA, 15 nt, Human
caccagagcccaccu

SEQ ID NO: 1610481 - RNA, 22 nt, Human
caccagagcccaccuuggcuca

SEQ ID NO: 1610482 - RNA, 20 nt, Human
caccagagcccaccuuggcu

SEQ ID NO: 1610483 - RNA, 18 nt, Human
caccagagcccaccuugg

SEQ ID NO: 1610484 - RNA, 17 nt, Human
caccagagcccaccuug

SEQ ID NO: 1610485 - RNA, 19 nt, Human
caccacacccagcccacuu

SEQ ID NO: 1610486 - RNA, 15 nt, Human
caccacgcccggcua

SEQ ID NO: 1610487 - RNA, 14 nt, Human
caccacgcccggcu

SEQ ID NO: 1610488 - RNA, 22 nt, Human
cacauguccaagaagcccagga

SEQ ID NO: 1610489 - RNA, 21 nt, Human
cacauguccaagaagcccagg

SEQ ID NO: 1610490 - RNA, 19 nt, Human
cacauguccaagaagccca

SEQ ID NO: 1610491 - RNA, 18 nt, Human
cacauguccaagaagccc

SEQ ID NO: 1610492 - RNA, 17 nt, Human
caccaacgucugugcca

SEQ ID NO: 1610493 - RNA, 23 nt, Human
cacauguccaagaagcccaggaa

SEQ ID NO: 1610494 - RNA, 12 nt, Human
caccaagcccag

SEQ ID NO: 1610495 - RNA, 13 nt, Human
caccaagcccagu

SEQ ID NO: 1610496 - RNA, 15 nt, Human
caccaagcccaguua

SEQ ID NO: 1610497 - RNA, 18 nt, Human
caccaucaugucuggcua

SEQ ID NO: 1610498 - RNA, 17 nt, Human
caccaucaugucuggcu

SEQ ID NO: 1610499 - RNA, 15 nt, Human
caccaucaugucugg

SEQ ID NO: 1610500 - RNA, 24 nt, Human
caccaucaagccaccaacauacuc

SEQ ID NO: 1610501 - RNA, 19 nt, Human
caccaucaagccaccaaca

SEQ ID NO: 1610502 - RNA, 17 nt, Human
caccaucaagccaccaa

SEQ ID NO: 1610503 - RNA, 16 nt, Human
caccaucaagccacca

SEQ ID NO: 1610504 - RNA, 20 nt, Human
caccauguuggccaggcugg

SEQ ID NO: 1610505 - RNA, 20 nt, Human
caccauguuggccaggcugc

SEQ ID NO: 1610506 - RNA, 19 nt, Human
caccauguuggccaggcug

SEQ ID NO: 1610507 - RNA, 12 nt, Human
caccagcagccu

SEQ ID NO: 1610508 - RNA, 21 nt, Human
caccauauuaccacagacaua

SEQ ID NO: 1610509 - RNA, 18 nt, Human
caccauaggucaccuuua

SEQ ID NO: 1610510 - RNA, 15 nt, Human
caccaucaagccacc

SEQ ID NO: 1610511 - RNA, 14 nt, Human
caccaucaagccac

SEQ ID NO: 1610512 - RNA, 13 nt, Human
caccaucaagcca

SEQ ID NO: 1610513 - RNA, 13 nt, Human
cacccaagggccu

SEQ ID NO: 1610514 - RNA, 23 nt, Human
cacaagacccaaaaggcagaagc

SEQ ID NO: 1610515 - RNA, 23 nt, Human
cacaagaaaugaaagcagggacu

SEQ ID NO: 1610516 - RNA, 19 nt, Human
cacaaucucggcucacugc

SEQ ID NO: 1610517 - RNA, 15 nt, Human
cacaagaaaugaaag

SEQ ID NO: 1610518 - RNA, 13 nt, Human
cacaagaaaugaa

SEQ ID NO: 1610519 - RNA, 17 nt, Human
cacaaacgggcucagca

SEQ ID NO: 1610520 - RNA, 13 nt, Human
caauuuuguuucu

SEQ ID NO: 1610521 - RNA, 17 nt, Human
caauuuuguuucuguac

SEQ ID NO: 1610522 - RNA, 16 nt, Human
caauuuuguuucugua

SEQ ID NO: 1610523 - RNA, 14 nt, Human
caauuuuguuucug

SEQ ID NO: 1610524 - RNA, 18 nt, Human
caaugguuuucuugugug

SEQ ID NO: 1610525 - RNA, 14 nt, Human
caaugcacuuuguu

SEQ ID NO: 1610526 - RNA, 14 nt, Human
cacacacuuuggcu

SEQ ID NO: 1610527 - RNA, 20 nt, Human
cacacagauuugagcucagc

SEQ ID NO: 1610528 - RNA, 18 nt, Human
cacacagauuugagcuca

SEQ ID NO: 1610529 - RNA, 20 nt, Human
cacacaccagagcccaccuu

SEQ ID NO: 1610530 - RNA, 16 nt, Human
cacacaccagagccca

SEQ ID NO: 1610531 - RNA, 15 nt, Human
cacacaccagagccc

SEQ ID NO: 1610532 - RNA, 24 nt, Human
cacaaucucggcucacugcauccu

SEQ ID NO: 1610533 - RNA, 23 nt, Human
cacaaucucggcucacugcaucc

SEQ ID NO: 1610534 - RNA, 22 nt, Human
cacaaucucggcucacugcauc

SEQ ID NO: 1610535 - RNA, 20 nt, Human
cacaaucucggcucacugca

SEQ ID NO: 1610536 - RNA, 15 nt, Human
cacacagcucugucc

SEQ ID NO: 1610537 - RNA, 14 nt, Human
cacacagcucuguc

SEQ ID NO: 1610538 - RNA, 13 nt, Human
cacacagcucugu

SEQ ID NO: 1610539 - RNA, 22 nt, Human
cacacagauuugagcucagccc

SEQ ID NO: 1610540 - RNA, 22 nt, Human
cacaccagagcccaccuuggcu

SEQ ID NO: 1610541 - RNA, 21 nt, Human
cacaccagagcccaccuuggc

SEQ ID NO: 1610542 - RNA, 16 nt, Human
cacacagcucuguccu

SEQ ID NO: 1610543 - RNA, 20 nt, Human
cacacccagcccacuucugc

SEQ ID NO: 1610544 - RNA, 14 nt, Human
cacacccagcccac

SEQ ID NO: 1610545 - RNA, 13 nt, Human
caaugcacuuugu

SEQ ID NO: 1610546 - RNA, 14 nt, Human
caaugcacugacau

SEQ ID NO: 1610547 - RNA, 23 nt, Human
caaugcaaaccaucauugaaauc

SEQ ID NO: 1610548 - RNA, 22 nt, Human
caaugcaaaccaucauugaaau

SEQ ID NO: 1610549 - RNA, 21 nt, Human
caaugcaaaccaucauugaaa

SEQ ID NO: 1610550 - RNA, 14 nt, Human
caaugcaaaccauc

SEQ ID NO: 1610551 - RNA, 14 nt, Human
caaugauggucacc

SEQ ID NO: 1610552 - RNA, 14 nt, Human
caaugaccuuucaa

SEQ ID NO: 1610553 - RNA, 16 nt, Human
caaugaccuuucaaua

SEQ ID NO: 1610554 - RNA, 15 nt, Human
caaugaccuuucaau

SEQ ID NO: 1610555 - RNA, 13 nt, Human
caaugauggucac

SEQ ID NO: 1610556 - RNA, 21 nt, Human
caaugaccuuucaauaggaaa

SEQ ID NO: 1610557 - RNA, 18 nt, Human
caaucucggcucacugca

SEQ ID NO: 1610558 - RNA, 14 nt, Human
caaagaaauguaag

SEQ ID NO: 1610559 - RNA, 12 nt, Human
caaagaaauuau

SEQ ID NO: 1610560 - RNA, 15 nt, Human
caaagaaauuaugug

SEQ ID NO: 1610561 - RNA, 13 nt, Human
caaagaaauuaug

SEQ ID NO: 1610562 - RNA, 21 nt, Human
caaagagguuuuaaaaaaauc

SEQ ID NO: 1610563 - RNA, 14 nt, Human
caaagagguuuuaa

SEQ ID NO: 1610564 - RNA, 13 nt, Human
caaagcccagcuu

SEQ ID NO: 1610565 - RNA, 19 nt, Human
auuuuaauaauguuucaaa

SEQ ID NO: 1610566 - RNA, 18 nt, Human
auuuuaauaauguuucaa

SEQ ID NO: 1610567 - RNA, 17 nt, Human
auuuuaacaacagcugg

SEQ ID NO: 1610568 - RNA, 14 nt, Human
caaaggagauugga

SEQ ID NO: 1610569 - RNA, 18 nt, Human
caaagcccuuccaugucg

SEQ ID NO: 1610570 - RNA, 20 nt, Human
caaaggagauuggaaggaac

SEQ ID NO: 1610571 - RNA, 17 nt, Human
caaaguggugagaggca

SEQ ID NO: 1610572 - RNA, 16 nt, Human
caaaguggugagaggc

SEQ ID NO: 1610573 - RNA, 23 nt, Human
caaaggguaucaggugcugccau

SEQ ID NO: 1610574 - RNA, 21 nt, Human
caaaggguaucaggugcugcc

SEQ ID NO: 1610575 - RNA, 20 nt, Human
caaaggguaucaggugcugc

SEQ ID NO: 1610576 - RNA, 19 nt, Human
caaaguggugagaggcauc

SEQ ID NO: 1610577 - RNA, 22 nt, Human
caaaguucccuacuuccuguga

SEQ ID NO: 1610578 - RNA, 14 nt, Human
caaaguugccuaaa

SEQ ID NO: 1610579 - RNA, 17 nt, Human
caaaguugccuaaaucc

SEQ ID NO: 1610580 - RNA, 15 nt, Human
caaaguugccuaaau

SEQ ID NO: 1610581 - RNA, 17 nt, Human
caaauuguaagcaugca

SEQ ID NO: 1610582 - RNA, 20 nt, Human
caacaggcugggcuucagug

SEQ ID NO: 1610583 - RNA, 18 nt, Human
caaaguugccuaaaucca

SEQ ID NO: 1610584 - RNA, 23 nt, Human
caaauuuacagagacagaaagca

SEQ ID NO: 1610585 - RNA, 14 nt, Human
caacaggcugggcu

SEQ ID NO: 1610586 - RNA, 17 nt, Human
caaauuuacagagacag

SEQ ID NO: 1610587 - RNA, 17 nt, Human
caacaggcugggcuuca

SEQ ID NO: 1610588 - RNA, 15 nt, Human
caacauacucccauc

SEQ ID NO: 1610589 - RNA, 14 nt, Human
caacauacucccau

SEQ ID NO: 1610590 - RNA, 16 nt, Human
caacauacucccaucu

SEQ ID NO: 1610591 - RNA, 23 nt, Human
caacugcaucaagaugugacaug

SEQ ID NO: 1610592 - RNA, 20 nt, Human
caacugcaucaagaugugac

SEQ ID NO: 1610593 - RNA, 17 nt, Human
caacugcaucaagaugu

SEQ ID NO: 1610594 - RNA, 16 nt, Human
caacugcauuggcuuu

SEQ ID NO: 1610595 - RNA, 21 nt, Human
caaccugauugugucucuugg

SEQ ID NO: 1610596 - RNA, 19 nt, Human
caaccugauugugucucuu

SEQ ID NO: 1610597 - RNA, 17 nt, Human
caaccugauugugucuc

SEQ ID NO: 1610598 - RNA, 16 nt, Human
caagcauaccaacacg

SEQ ID NO: 1610599 - RNA, 21 nt, Human
caagcauaccaacacgagcag

SEQ ID NO: 1610600 - RNA, 19 nt, Human
caagcauuuagauguauag

SEQ ID NO: 1610601 - RNA, 16 nt, Human
caagcauuuagaugua

SEQ ID NO: 1610602 - RNA, 21 nt, Human
caaggcugucaauuacaggaa

SEQ ID NO: 1610603 - RNA, 14 nt, Human
caaggcugucaauu

SEQ ID NO: 1610604 - RNA, 13 nt, Human
caaggcugucaau

SEQ ID NO: 1610605 - RNA, 21 nt, Human
caaggcugggggaagaagcuc

SEQ ID NO: 1610606 - RNA, 17 nt, Human
caaggauccugagccag

SEQ ID NO: 1610607 - RNA, 16 nt, Human
caaggauccugagcca

SEQ ID NO: 1610608 - RNA, 15 nt, Human
caaggauccugagcc

SEQ ID NO: 1610609 - RNA, 14 nt, Human
caaggauccugagc

SEQ ID NO: 1610610 - RNA, 21 nt, Human
caaggacuaggguccugggga

SEQ ID NO: 1610611 - RNA, 20 nt, Human
caaggacuaggguccugggg

SEQ ID NO: 1610612 - RNA, 19 nt, Human
caaggacuaggguccuggg

SEQ ID NO: 1610613 - RNA, 18 nt, Human
caaggacuaggguccugg

SEQ ID NO: 1610614 - RNA, 16 nt, Human
caaggacuaggguccu

SEQ ID NO: 1610615 - RNA, 13 nt, Human
caagaaaugaaag

SEQ ID NO: 1610616 - RNA, 15 nt, Human
caagaaaugaaagca

SEQ ID NO: 1610617 - RNA, 13 nt, Human
caagaccuucucc

SEQ ID NO: 1610618 - RNA, 20 nt, Human
caagacgcugugcugcccug

SEQ ID NO: 1610619 - RNA, 22 nt, Human
caagacgcugugcugcccugcc

SEQ ID NO: 1610620 - RNA, 21 nt, Human
caagacgcugugcugcccugc

SEQ ID NO: 1610621 - RNA, 23 nt, Human
caagacgcugugcugcccugccc

SEQ ID NO: 1610622 - RNA, 17 nt, Human
caagagggucugaggaa

SEQ ID NO: 1610623 - RNA, 16 nt, Human
caagagggucugagga

SEQ ID NO: 1610624 - RNA, 12 nt, Human
caagagggucug

SEQ ID NO: 1610625 - RNA, 20 nt, Human
caagagggcacugguggccc

SEQ ID NO: 1610626 - RNA, 19 nt, Human
caagagggcacugguggcc

SEQ ID NO: 1610627 - RNA, 18 nt, Human
caagagggcacugguggc

SEQ ID NO: 1610628 - RNA, 16 nt, Human
caagggccuggccuga

SEQ ID NO: 1610629 - RNA, 21 nt, Human
caaggggaauguuugccucug

SEQ ID NO: 1610630 - RNA, 15 nt, Human
caagggccuggccug

SEQ ID NO: 1610631 - RNA, 14 nt, Human
caagggccuggccu

SEQ ID NO: 1610632 - RNA, 13 nt, Human
caagggccuggcc

SEQ ID NO: 1610633 - RNA, 13 nt, Human
caaggucauuuuu

SEQ ID NO: 1610634 - RNA, 17 nt, Human
caaggggcccaaauucu

SEQ ID NO: 1610635 - RNA, 23 nt, Human
caaggggaauguuugccucugcc

SEQ ID NO: 1610636 - RNA, 19 nt, Human
caagugauucuccugccuc

SEQ ID NO: 1610637 - RNA, 19 nt, Human
caagugagacccugucuca

SEQ ID NO: 1610638 - RNA, 15 nt, Human
caagugagacccugu

SEQ ID NO: 1610639 - RNA, 20 nt, Human
caagugauucuccugccuca

SEQ ID NO: 1610640 - RNA, 21 nt, Human
caagugauucuccugccucag

SEQ ID NO: 1610641 - RNA, 14 nt, Human
caagugagacccug

SEQ ID NO: 1610642 - RNA, 23 nt, Human
caagugaaaaaggaggaagagaa

SEQ ID NO: 1610643 - RNA, 22 nt, Human
caagugaaaaaggaggaagaga

SEQ ID NO: 1610644 - RNA, 23 nt, Human
ccaaauuucauaccuaucaucuu

SEQ ID NO: 1610645 - RNA, 20 nt, Human
ccaaaguacacuguuucaaa

SEQ ID NO: 1610646 - RNA, 15 nt, Human
ccaaaguacacuguu

SEQ ID NO: 1610647 - RNA, 18 nt, Human
ccaaaguacacuguuuca

SEQ ID NO: 1610648 - RNA, 20 nt, Human
ccaacauacucccaucugug

SEQ ID NO: 1610649 - RNA, 19 nt, Human
ccaacauacucccaucugu

SEQ ID NO: 1610650 - RNA, 18 nt, Human
ccaacauacucccaucug

SEQ ID NO: 1610651 - RNA, 17 nt, Human
ccaacauacucccaucu

SEQ ID NO: 1610652 - RNA, 22 nt, Human
ccaacauacucccaucugugaa

SEQ ID NO: 1610653 - RNA, 21 nt, Human
ccaacauacucccaucuguga

SEQ ID NO: 1610654 - RNA, 13 nt, Human
ccaacaucaacau

SEQ ID NO: 1610655 - RNA, 20 nt, Human
ccaaccaaguggcucccaca

SEQ ID NO: 1610656 - RNA, 23 nt, Human
ccaaaggaagcacaugccucucu

SEQ ID NO: 1610657 - RNA, 15 nt, Human
ccaaaggaagcacau

SEQ ID NO: 1610658 - RNA, 15 nt, Human
ccaaagcuaggccug

SEQ ID NO: 1610659 - RNA, 17 nt, Human
ccaaagcuaggccuggc

SEQ ID NO: 1610660 - RNA, 16 nt, Human
ccaaagcuaggccugg

SEQ ID NO: 1610661 - RNA, 21 nt, Human
ccaaagcuaggccuggccaga

SEQ ID NO: 1610662 - RNA, 22 nt, Human
ccaaacugacucuuaagaagac

SEQ ID NO: 1610663 - RNA, 19 nt, Human
ccaaagccaaagcuaggcc

SEQ ID NO: 1610664 - RNA, 23 nt, Human
ccaaagcagugcaugcugucccu

SEQ ID NO: 1610665 - RNA, 22 nt, Human
ccaaagccuccuccagccgcca

SEQ ID NO: 1610666 - RNA, 17 nt, Human
ccaaagccuccuccagc

SEQ ID NO: 1610667 - RNA, 20 nt, Human
ccaaacucaccugccccuca

SEQ ID NO: 1610668 - RNA, 23 nt, Human
ccaagcagagguugggaggccau

SEQ ID NO: 1610669 - RNA, 20 nt, Human
ccaagaagcccaggaaaggc

SEQ ID NO: 1610670 - RNA, 19 nt, Human
ccaagaagcccaggaaagg

SEQ ID NO: 1610671 - RNA, 19 nt, Human
ccaagaauagaugcugacu

SEQ ID NO: 1610672 - RNA, 20 nt, Human
ccaagaauagaugcugacug

SEQ ID NO: 1610673 - RNA, 12 nt, Human
ccaacccucauc

SEQ ID NO: 1610674 - RNA, 15 nt, Human
ccaagaagcccagga

SEQ ID NO: 1610675 - RNA, 15 nt, Human
ccaacccucagagcc

SEQ ID NO: 1610676 - RNA, 14 nt, Human
ccaacccucagagc

SEQ ID NO: 1610677 - RNA, 22 nt, Human
ccaagcauaccaacacgagcag

SEQ ID NO: 1610678 - RNA, 17 nt, Human
ccaagcauuuagaugua

SEQ ID NO: 1610679 - RNA, 17 nt, Human
ccaaggccaaaggaagc

SEQ ID NO: 1610680 - RNA, 22 nt, Human
ccaagcucccaggcauucccca

SEQ ID NO: 1610681 - RNA, 16 nt, Human
ccaagcucccaggcau

SEQ ID NO: 1610682 - RNA, 15 nt, Human
ccaagcucccaggca

SEQ ID NO: 1610683 - RNA, 14 nt, Human
ccaagcucccaggc

SEQ ID NO: 1610684 - RNA, 22 nt, Human
ccaagccuacuuuugccauuga

SEQ ID NO: 1610685 - RNA, 13 nt, Human
ccaagccguggcu

SEQ ID NO: 1610686 - RNA, 15 nt, Human
ccaagccuggcaagg

SEQ ID NO: 1610687 - RNA, 14 nt, Human
ccaagccguggcuu

SEQ ID NO: 1610688 - RNA, 21 nt, Human
ccaaggccaaaggaagcacau

SEQ ID NO: 1610689 - RNA, 18 nt, Human
ccaaggccaaaggaagca

SEQ ID NO: 1610690 - RNA, 15 nt, Human
ccaagggccuggccu

SEQ ID NO: 1610691 - RNA, 18 nt, Human
ccaagggccuggccugag

SEQ ID NO: 1610692 - RNA, 16 nt, Human
ccaagggccuggccug

SEQ ID NO: 1610693 - RNA, 19 nt, Human
ccaagggccuggccugagc

SEQ ID NO: 1610694 - RNA, 22 nt, Human
ccaaggggaauguuugccucug

SEQ ID NO: 1610695 - RNA, 23 nt, Human
ccaagguuuggggaagaacgaag

SEQ ID NO: 1610696 - RNA, 13 nt, Human
ccaaggugggagg

SEQ ID NO: 1610697 - RNA, 18 nt, Human
ccaaggugggaggauugc

SEQ ID NO: 1610698 - RNA, 20 nt, Human
ccaagucaagugaaaaagga

SEQ ID NO: 1610699 - RNA, 22 nt, Human
ccaauaguuguugauuggcagg

SEQ ID NO: 1610700 - RNA, 14 nt, Human
ccaagcaaguauua

SEQ ID NO: 1610701 - RNA, 18 nt, Human
cauuugcucauggaauug

SEQ ID NO: 1610702 - RNA, 13 nt, Human
cauuugcucaugg

SEQ ID NO: 1610703 - RNA, 14 nt, Human
cauuugcuccuuuc

SEQ ID NO: 1610704 - RNA, 13 nt, Human
cauuugcuccuuu

SEQ ID NO: 1610705 - RNA, 17 nt, Human
cauuuguuugaacugau

SEQ ID NO: 1610706 - RNA, 13 nt, Human
cauuugcugaaua

SEQ ID NO: 1610707 - RNA, 20 nt, Human
cauuuguuugaacugauaaa

SEQ ID NO: 1610708 - RNA, 22 nt, Human
cauuuguuugaacugauaaaga

SEQ ID NO: 1610709 - RNA, 18 nt, Human
cauuugagcagggcucag

SEQ ID NO: 1610710 - RNA, 17 nt, Human
cauuugagcagggcuca

SEQ ID NO: 1610711 - RNA, 20 nt, Human
cauuugagcagggcucagcg

SEQ ID NO: 1610712 - RNA, 22 nt, Human
cauuugaaaauuuugauguuuu

SEQ ID NO: 1610713 - RNA, 20 nt, Human
cauuugaaaauuuugauguu

SEQ ID NO: 1610714 - RNA, 23 nt, Human
cauuuuucuuagggaaggauaca

SEQ ID NO: 1610715 - RNA, 20 nt, Human
ccaaacauccuacaagacac

SEQ ID NO: 1610716 - RNA, 19 nt, Human
ccaaacauccuacaagaca

SEQ ID NO: 1610717 - RNA, 19 nt, Human
cauuuuagggguagcauuu

SEQ ID NO: 1610718 - RNA, 17 nt, Human
cauuuaggccaugggac

SEQ ID NO: 1610719 - RNA, 23 nt, Human
cauuuaauaauuauaugcuauuu

SEQ ID NO: 1610720 - RNA, 20 nt, Human
cauuuccugacagaaggacu

SEQ ID NO: 1610721 - RNA, 13 nt, Human
cauuuccugacag

SEQ ID NO: 1610722 - RNA, 21 nt, Human
cauuuaaaagauacaguuacu

SEQ ID NO: 1610723 - RNA, 14 nt, Human
cauuuaauaauuau

SEQ ID NO: 1610724 - RNA, 12 nt, Human
cauuuaauaauu

SEQ ID NO: 1610725 - RNA, 19 nt, Human
cauuuaauaauuauaugcu

SEQ ID NO: 1610726 - RNA, 17 nt, Human
cauuuaauaauuauaug

SEQ ID NO: 1610727 - RNA, 16 nt, Human
cauuuaauaauuauau

SEQ ID NO: 1610728 - RNA, 15 nt, Human
cauuuaauaauuaua

SEQ ID NO: 1610729 - RNA, 12 nt, Human
cauuuaaaagau

SEQ ID NO: 1610730 - RNA, 15 nt, Human
cauuuaaaagauaca

SEQ ID NO: 1610731 - RNA, 16 nt, Human
cauuuaaaagauacag

SEQ ID NO: 1610732 - RNA, 13 nt, Human
cauuuccuguguc

SEQ ID NO: 1610733 - RNA, 12 nt, Human
cauuuccugugu

SEQ ID NO: 1610734 - RNA, 15 nt, Human
cacccaagggccugg

SEQ ID NO: 1610735 - RNA, 14 nt, Human
cacccaagggccug

SEQ ID NO: 1610736 - RNA, 21 nt, Human
cauuguagagcuucuggcacu

SEQ ID NO: 1610737 - RNA, 19 nt, Human
cauuguagagcuucuggca

SEQ ID NO: 1610738 - RNA, 17 nt, Human
cauuguagagcuucugg

SEQ ID NO: 1610739 - RNA, 16 nt, Human
cauuguagagcuucug

SEQ ID NO: 1610740 - RNA, 15 nt, Human
cauuguagagcuucu

SEQ ID NO: 1610741 - RNA, 18 nt, Human
cauuguuggccaaagcca

SEQ ID NO: 1610742 - RNA, 17 nt, Human
cauuguuggccaaagcc

SEQ ID NO: 1610743 - RNA, 13 nt, Human
cauugugggaagg

SEQ ID NO: 1610744 - RNA, 23 nt, Human
cauuguauucagaguugaugguu

SEQ ID NO: 1610745 - RNA, 20 nt, Human
ccacaggaaccacaagacug

SEQ ID NO: 1610746 - RNA, 12 nt, Human
ccacacuccagc

SEQ ID NO: 1610747 - RNA, 16 nt, Human
ccacaggaucagucug

SEQ ID NO: 1610748 - RNA, 16 nt, Human
ccacaggcccuuccuc

SEQ ID NO: 1610749 - RNA, 15 nt, Human
ccacaggcccuuccu

SEQ ID NO: 1610750 - RNA, 23 nt, Human
ccacaggcccuuccucuccacug

SEQ ID NO: 1610751 - RNA, 22 nt, Human
ccacaggcccuuccucuccacu

SEQ ID NO: 1610752 - RNA, 19 nt, Human
ccacaggcccuuccucucc

SEQ ID NO: 1610753 - RNA, 18 nt, Human
ccacaggcccuuccucuc

SEQ ID NO: 1610754 - RNA, 17 nt, Human
ccacaggcccuuccucu

SEQ ID NO: 1610755 - RNA, 22 nt, Human
ccacacccagcccacuucugcc

SEQ ID NO: 1610756 - RNA, 21 nt, Human
ccacacccagcccacuucugc

SEQ ID NO: 1610757 - RNA, 20 nt, Human
ccacacccagcccacuucug

SEQ ID NO: 1610758 - RNA, 21 nt, Human
ccaccaacauacucccaucug

SEQ ID NO: 1610759 - RNA, 15 nt, Human
ccaccaacccucaga

SEQ ID NO: 1610760 - RNA, 16 nt, Human
ccacauuccugaugcu

SEQ ID NO: 1610761 - RNA, 16 nt, Human
ccacaugugcacaugc

SEQ ID NO: 1610762 - RNA, 18 nt, Human
ccacaucuugcucugcug

SEQ ID NO: 1610763 - RNA, 19 nt, Human
ccacaucuugcucugcuga

SEQ ID NO: 1610764 - RNA, 20 nt, Human
ccacaucuugcucugcugac

SEQ ID NO: 1610765 - RNA, 16 nt, Human
ccaauauucauagcag

SEQ ID NO: 1610766 - RNA, 17 nt, Human
ccacccccacccaaggg

SEQ ID NO: 1610767 - RNA, 23 nt, Human
ccacccaggagccccgaggccuu

SEQ ID NO: 1610768 - RNA, 18 nt, Human
ccacugcagaagacagua

SEQ ID NO: 1610769 - RNA, 13 nt, Human
ccacugcagaaga

SEQ ID NO: 1610770 - RNA, 19 nt, Human
ccacuuagaaauugcauuu

SEQ ID NO: 1610771 - RNA, 14 nt, Human
ccacuucagcugac

SEQ ID NO: 1610772 - RNA, 13 nt, Human
ccacuucagcuga

SEQ ID NO: 1610773 - RNA, 21 nt, Human
ccacuuagaaauugcauuucc

SEQ ID NO: 1610774 - RNA, 18 nt, Human
ccagaauuucccaaagca

SEQ ID NO: 1610775 - RNA, 22 nt, Human
ccagaaguuugagaucagccug

SEQ ID NO: 1610776 - RNA, 23 nt, Human
ccagaaguuugagaucagccugg

SEQ ID NO: 1610777 - RNA, 19 nt, Human
ccagaauuucccaaagcag

SEQ ID NO: 1610778 - RNA, 12 nt, Human
ccagaauuuccc

SEQ ID NO: 1610779 - RNA, 13 nt, Human
ccagaauuucaaa

SEQ ID NO: 1610780 - RNA, 23 nt, Human
ccagaauggucuuucuaaugugu

SEQ ID NO: 1610781 - RNA, 16 nt, Human
ccagaaugcuuuagga

SEQ ID NO: 1610782 - RNA, 21 nt, Human
ccagacaccuugacagggcac

SEQ ID NO: 1610783 - RNA, 21 nt, Human
ccagaauuucccaaagcagug

SEQ ID NO: 1610784 - RNA, 14 nt, Human
ccagaccccuggcu

SEQ ID NO: 1610785 - RNA, 18 nt, Human
ccagaccccuggcuuuuc

SEQ ID NO: 1610786 - RNA, 17 nt, Human
ccagaccccuggcuuuu

SEQ ID NO: 1610787 - RNA, 16 nt, Human
ccagaccccuggcuuu

SEQ ID NO: 1610788 - RNA, 15 nt, Human
ccagaccccuggcuu

SEQ ID NO: 1610789 - RNA, 18 nt, Human
ccacucaguccauagcag

SEQ ID NO: 1610790 - RNA, 22 nt, Human
ccacuccagaccccuggcuuuu

SEQ ID NO: 1610791 - RNA, 21 nt, Human
ccacuccagaccccuggcuuu

SEQ ID NO: 1610792 - RNA, 16 nt, Human
ccacuacauucuguua

SEQ ID NO: 1610793 - RNA, 17 nt, Human
ccacuacauucuguuaa

SEQ ID NO: 1610794 - RNA, 17 nt, Human
ccacuagacccacugga

SEQ ID NO: 1610795 - RNA, 15 nt, Human
ccacuagacccacug

SEQ ID NO: 1610796 - RNA, 11 nt, Human
ccacuacauuc

SEQ ID NO: 1610797 - RNA, 15 nt, Human
ccacuacauucuguu

SEQ ID NO: 1610798 - RNA, 14 nt, Human
ccacuacauucugu

SEQ ID NO: 1610799 - RNA, 15 nt, Human
ccaccccacacacgc

SEQ ID NO: 1610800 - RNA, 15 nt, Human
ccacccccacccaag

SEQ ID NO: 1610801 - RNA, 16 nt, Human
ccacgcuggagugcag

SEQ ID NO: 1610802 - RNA, 18 nt, Human
ccacggccaggccagagg

SEQ ID NO: 1610803 - RNA, 16 nt, Human
ccacggccaggccaga

SEQ ID NO: 1610804 - RNA, 19 nt, Human
ccacgcuggagugcaguga

SEQ ID NO: 1610805 - RNA, 18 nt, Human
ccacgcuggagugcagug

SEQ ID NO: 1610806 - RNA, 23 nt, Human
ccacggccaggccagagggagug

SEQ ID NO: 1610807 - RNA, 14 nt, Human
ccacgguguucugu

SEQ ID NO: 1610808 - RNA, 20 nt, Human
ccagugaaaucaguuacucu

SEQ ID NO: 1610809 - RNA, 13 nt, Human
ccaguaucuugaa

SEQ ID NO: 1610810 - RNA, 14 nt, Human
ccagguucagcuug

SEQ ID NO: 1610811 - RNA, 21 nt, Human
ccaggugcuaggaacacuccu

SEQ ID NO: 1610812 - RNA, 15 nt, Human
ccagguucagcuugu

SEQ ID NO: 1610813 - RNA, 17 nt, Human
ccaggugccaguuaugg

SEQ ID NO: 1610814 - RNA, 18 nt, Human
ccaggugcacaagcucca

SEQ ID NO: 1610815 - RNA, 19 nt, Human
ccaggugcuaggaacacuc

SEQ ID NO: 1610816 - RNA, 13 nt, Human
ccaggccccugcc

SEQ ID NO: 1610817 - RNA, 19 nt, Human
ccaggcuggucucaaacuc

SEQ ID NO: 1610818 - RNA, 21 nt, Human
ccaggcuggucucgaacuccu

SEQ ID NO: 1610819 - RNA, 20 nt, Human
ccaggcuguaucccaugagc

SEQ ID NO: 1610820 - RNA, 12 nt, Human
ccagggaagggg

SEQ ID NO: 1610821 - RNA, 19 nt, Human
ccaggcuuuuuuaucaugu

SEQ ID NO: 1610822 - RNA, 16 nt, Human
ccaggagcagccacau

SEQ ID NO: 1610823 - RNA, 15 nt, Human
ccaggagccccgagg

SEQ ID NO: 1610824 - RNA, 19 nt, Human
ccaggagccuccugcccuu

SEQ ID NO: 1610825 - RNA, 16 nt, Human
ccaggagccccgaggc

SEQ ID NO: 1610826 - RNA, 18 nt, Human
ccaggagccuccugcccu

SEQ ID NO: 1610827 - RNA, 14 nt, Human
ccaggagccuccug

SEQ ID NO: 1610828 - RNA, 13 nt, Human
ccaggagccuccu

SEQ ID NO: 1610829 - RNA, 12 nt, Human
ccaggaggccag

SEQ ID NO: 1610830 - RNA, 13 nt, Human
ccaggaggccagc

SEQ ID NO: 1610831 - RNA, 14 nt, Human
ccaggaggccagcc

SEQ ID NO: 1610832 - RNA, 23 nt, Human
ccaggcauuccccaggaggccag

SEQ ID NO: 1610833 - RNA, 24 nt, Human
ccaggcauuccccaggaggccagc

SEQ ID NO: 1610834 - RNA, 21 nt, Human
ccaggccacaagacccuugug

SEQ ID NO: 1610835 - RNA, 14 nt, Human
ccaggcauucccca

SEQ ID NO: 1610836 - RNA, 17 nt, Human
ccaggcauuccccagga

SEQ ID NO: 1610837 - RNA, 13 nt, Human
ccaggcauggugg

SEQ ID NO: 1610838 - RNA, 16 nt, Human
ccagcgagcccuggug

SEQ ID NO: 1610839 - RNA, 15 nt, Human
ccagcgagcccuggu

SEQ ID NO: 1610840 - RNA, 14 nt, Human
ccagcgagcccugg

SEQ ID NO: 1610841 - RNA, 22 nt, Human
ccagccuugaccauucuccacc

SEQ ID NO: 1610842 - RNA, 13 nt, Human
ccagcucuggucc

SEQ ID NO: 1610843 - RNA, 12 nt, Human
ccagcucugguc

SEQ ID NO: 1610844 - RNA, 11 nt, Human
ccagcucuggu

SEQ ID NO: 1610845 - RNA, 21 nt, Human
ccagcgagcccugguggcagu

SEQ ID NO: 1610846 - RNA, 20 nt, Human
ccagccuugaccauucucca

SEQ ID NO: 1610847 - RNA, 19 nt, Human
ccagccuugaccauucucc

SEQ ID NO: 1610848 - RNA, 16 nt, Human
ccagagcccaccuugg

SEQ ID NO: 1610849 - RNA, 22 nt, Human
ccagagcccaccuuggcucaag

SEQ ID NO: 1610850 - RNA, 13 nt, Human
ccagcugcuuggg

SEQ ID NO: 1610851 - RNA, 23 nt, Human
ccagcugcuugggcuucauccuc

SEQ ID NO: 1610852 - RNA, 20 nt, Human
ccagcugcuugggcuucauc

SEQ ID NO: 1610853 - RNA, 22 nt, Human
ccagcucugguccauagagagc

SEQ ID NO: 1610854 - RNA, 21 nt, Human
ccagcucugguccauagagag

SEQ ID NO: 1610855 - RNA, 17 nt, Human
ccagcucugguccauag

SEQ ID NO: 1610856 - RNA, 14 nt, Human
ccagcucuggucca

SEQ ID NO: 1610857 - RNA, 22 nt, Human
ccaggaagccagcaggcucuca

SEQ ID NO: 1610858 - RNA, 20 nt, Human
ccaggaauggagccugcacg

SEQ ID NO: 1610859 - RNA, 23 nt, Human
ccagcuggggccaggcugggucg

SEQ ID NO: 1610860 - RNA, 22 nt, Human
ccagcuggggccaggcuggguc

SEQ ID NO: 1610861 - RNA, 21 nt, Human
ccagcuggggccaggcugggu

SEQ ID NO: 1610862 - RNA, 20 nt, Human
ccagcuggggccaggcuggg

SEQ ID NO: 1610863 - RNA, 19 nt, Human
ccagcuggggccaggcugg

SEQ ID NO: 1610864 - RNA, 18 nt, Human
ccagcuggggccaggcug

SEQ ID NO: 1610865 - RNA, 17 nt, Human
ccagcuggggccaggcu

SEQ ID NO: 1610866 - RNA, 14 nt, Human
ccaugaagauguag

SEQ ID NO: 1610867 - RNA, 16 nt, Human
ccaugauguuuagaaa

SEQ ID NO: 1610868 - RNA, 18 nt, Human
ccaugauguuuuccauga

SEQ ID NO: 1610869 - RNA, 21 nt, Human
ccaugauuaaccacuucagcu

SEQ ID NO: 1610870 - RNA, 19 nt, Human
ccaugauuaaccacuucag

SEQ ID NO: 1610871 - RNA, 13 nt, Human
ccaugcugcccug

SEQ ID NO: 1610872 - RNA, 11 nt, Human
ccaugcugccc

SEQ ID NO: 1610873 - RNA, 13 nt, Human
ccaugcuccuggc

SEQ ID NO: 1610874 - RNA, 14 nt, Human
ccaugcugcccugu

SEQ ID NO: 1610875 - RNA, 15 nt, Human
ccaugcugcccugug

SEQ ID NO: 1610876 - RNA, 18 nt, Human
ccaucaaggguacacugc

SEQ ID NO: 1610877 - RNA, 20 nt, Human
ccaucaauaaaaaauuauga

SEQ ID NO: 1610878 - RNA, 19 nt, Human
ccaucaauaaaaaauuaug

SEQ ID NO: 1610879 - RNA, 13 nt, Human
ccaucaccagaca

SEQ ID NO: 1610880 - RNA, 19 nt, Human
ccagugaggcucugcccuu

SEQ ID NO: 1610881 - RNA, 18 nt, Human
ccagugaggcucugcccu

SEQ ID NO: 1610882 - RNA, 20 nt, Human
ccagugaggcucugcccuug

SEQ ID NO: 1610883 - RNA, 23 nt, Human
ccauacuaauuauacccccugca

SEQ ID NO: 1610884 - RNA, 13 nt, Human
ccauacuaauuau

SEQ ID NO: 1610885 - RNA, 12 nt, Human
ccauacuaauua

SEQ ID NO: 1610886 - RNA, 19 nt, Human
ccauccucuguacagagcc

SEQ ID NO: 1610887 - RNA, 12 nt, Human
ccauccucugua

SEQ ID NO: 1610888 - RNA, 22 nt, Human
ccaucauugaaaucuuuuugcu

SEQ ID NO: 1610889 - RNA, 20 nt, Human
ccauccucuguacagagccc

SEQ ID NO: 1610890 - RNA, 13 nt, Human
cccaaaaggcaga

SEQ ID NO: 1610891 - RNA, 18 nt, Human
cccaaaaggcagaagcaa

SEQ ID NO: 1610892 - RNA, 20 nt, Human
ccauuuugggguacccacug

SEQ ID NO: 1610893 - RNA, 23 nt, Human
ccauuuuggauucuuauggacaa

SEQ ID NO: 1610894 - RNA, 22 nt, Human
ccauuuugggguacccacugcu

SEQ ID NO: 1610895 - RNA, 15 nt, Human
cccaaagaugcagcc

SEQ ID NO: 1610896 - RNA, 12 nt, Human
cccaaagaugca

SEQ ID NO: 1610897 - RNA, 16 nt, Human
cccaaagcagugcaug

SEQ ID NO: 1610898 - RNA, 18 nt, Human
ccauucugccugcccagg

SEQ ID NO: 1610899 - RNA, 17 nt, Human
ccauucugccugcccag

SEQ ID NO: 1610900 - RNA, 18 nt, Human
ccauucuccaccugccag

SEQ ID NO: 1610901 - RNA, 17 nt, Human
ccauucuccaccugcca

SEQ ID NO: 1610902 - RNA, 20 nt, Human
ccauucugccugcccaggcc

SEQ ID NO: 1610903 - RNA, 19 nt, Human
ccauucugccugcccaggc

SEQ ID NO: 1610904 - RNA, 21 nt, Human
ccauucugccugcccaggccc

SEQ ID NO: 1610905 - RNA, 16 nt, Human
ccauucuccaccugcc

SEQ ID NO: 1610906 - RNA, 15 nt, Human
ccauucuccaccugc

SEQ ID NO: 1610907 - RNA, 14 nt, Human
ccauggacuuuguu

SEQ ID NO: 1610908 - RNA, 13 nt, Human
ccauggacuuugu

SEQ ID NO: 1610909 - RNA, 21 nt, Human
cccacaaaggagagcuagcag

SEQ ID NO: 1610910 - RNA, 13 nt, Human
cccaggugccagu

SEQ ID NO: 1610911 - RNA, 22 nt, Human
cccaggugcuaggaacacuccu

SEQ ID NO: 1610912 - RNA, 23 nt, Human
cccaggugcuaggaacacuccuu

SEQ ID NO: 1610913 - RNA, 20 nt, Human
cccagucuggaaugcagugg

SEQ ID NO: 1610914 - RNA, 13 nt, Human
cccagugcccaca

SEQ ID NO: 1610915 - RNA, 18 nt, Human
cccaggccuccuacagcu

SEQ ID NO: 1610916 - RNA, 17 nt, Human
cccaggccuccuacagc

SEQ ID NO: 1610917 - RNA, 15 nt, Human
cccaggcugagccuc

SEQ ID NO: 1610918 - RNA, 14 nt, Human
cccaggcugagccu

SEQ ID NO: 1610919 - RNA, 18 nt, Human
cccaggcgccccuucccc

SEQ ID NO: 1610920 - RNA, 16 nt, Human
cccaggccugccuguu

SEQ ID NO: 1610921 - RNA, 15 nt, Human
cccaggccugccugu

SEQ ID NO: 1610922 - RNA, 22 nt, Human
cccaggaggccagccuugacca

SEQ ID NO: 1610923 - RNA, 13 nt, Human
cccaggaggccag

SEQ ID NO: 1610924 - RNA, 21 nt, Human
cccaggagccccgaggccuuc

SEQ ID NO: 1610925 - RNA, 13 nt, Human
cccaggcaggucu

SEQ ID NO: 1610926 - RNA, 11 nt, Human
cccaggcaggu

SEQ ID NO: 1610927 - RNA, 22 nt, Human
cccaggccccugccacccuggg

SEQ ID NO: 1610928 - RNA, 21 nt, Human
cccaggccccugccacccugg

SEQ ID NO: 1610929 - RNA, 18 nt, Human
cccaggccccugccaccc

SEQ ID NO: 1610930 - RNA, 16 nt, Human
cccaggccccugccac

SEQ ID NO: 1610931 - RNA, 11 nt, Human
cccaggccccu

SEQ ID NO: 1610932 - RNA, 21 nt, Human
cccaggcauuccccaggaggc

SEQ ID NO: 1610933 - RNA, 20 nt, Human
cccaggcauuccccaggagg

SEQ ID NO: 1610934 - RNA, 17 nt, Human
cccaggcaggucuugaa

SEQ ID NO: 1610935 - RNA, 23 nt, Human
cccaggcauuccccaggaggcca

SEQ ID NO: 1610936 - RNA, 22 nt, Human
cccaggcauuccccaggaggcc

SEQ ID NO: 1610937 - RNA, 18 nt, Human
cccagcgagcccuggugg

SEQ ID NO: 1610938 - RNA, 17 nt, Human
cccagcgagcccuggug

SEQ ID NO: 1610939 - RNA, 23 nt, Human
cccagcgagcccugguggcagug

SEQ ID NO: 1610940 - RNA, 19 nt, Human
cccagcgagcccugguggc

SEQ ID NO: 1610941 - RNA, 11 nt, Human
cccagccccuu

SEQ ID NO: 1610942 - RNA, 23 nt, Human
cccagauugcaacaggcugggcu

SEQ ID NO: 1610943 - RNA, 23 nt, Human
cccagcaagugagagcugggugu

SEQ ID NO: 1610944 - RNA, 22 nt, Human
cccagcaagugagagcugggug

SEQ ID NO: 1610945 - RNA, 21 nt, Human
cccagcaagugagagcugggu

SEQ ID NO: 1610946 - RNA, 20 nt, Human
cccagcaagugagagcuggg

SEQ ID NO: 1610947 - RNA, 19 nt, Human
cccagcaagugagagcugg

SEQ ID NO: 1610948 - RNA, 12 nt, Human
cccagccugcua

SEQ ID NO: 1610949 - RNA, 18 nt, Human
cccagccccuucugaccc

SEQ ID NO: 1610950 - RNA, 18 nt, Human
cccagcaagugagagcug

SEQ ID NO: 1610951 - RNA, 16 nt, Human
cccagcaagugagagc

SEQ ID NO: 1610952 - RNA, 22 nt, Human
cccagauugcaacaggcugggc

SEQ ID NO: 1610953 - RNA, 21 nt, Human
cccagauugcaacaggcuggg

SEQ ID NO: 1610954 - RNA, 20 nt, Human
cccagauugcaacaggcugg

SEQ ID NO: 1610955 - RNA, 20 nt, Human
cccagagggccugcaaggga

SEQ ID NO: 1610956 - RNA, 23 nt, Human
cccaagggccuggccugagcugg

SEQ ID NO: 1610957 - RNA, 19 nt, Human
cccaagggccuggccugag

SEQ ID NO: 1610958 - RNA, 18 nt, Human
cccaagggccuggccuga

SEQ ID NO: 1610959 - RNA, 22 nt, Human
ccccucagggucccugguggca

SEQ ID NO: 1610960 - RNA, 17 nt, Human
ccccaggaggccagccu

SEQ ID NO: 1610961 - RNA, 21 nt, Human
ccccacccaagggccuggccu

SEQ ID NO: 1610962 - RNA, 20 nt, Human
ccccacccaagggccuggcc

SEQ ID NO: 1610963 - RNA, 14 nt, Human
ccccacccaagggc

SEQ ID NO: 1610964 - RNA, 14 nt, Human
ccccaagccuggca

SEQ ID NO: 1610965 - RNA, 13 nt, Human
ccccaagccuggc

SEQ ID NO: 1610966 - RNA, 22 nt, Human
ccccaaauggaaaugggcagag

SEQ ID NO: 1610967 - RNA, 13 nt, Human
cccauucugccug

SEQ ID NO: 1610968 - RNA, 18 nt, Human
cccagugccgagaaggaa

SEQ ID NO: 1610969 - RNA, 20 nt, Human
cccagugcccacaggaucag

SEQ ID NO: 1610970 - RNA, 15 nt, Human
cccagugcccacagg

SEQ ID NO: 1610971 - RNA, 16 nt, Human
cccaugcugcccugug

SEQ ID NO: 1610972 - RNA, 15 nt, Human
cccaugcugcccugu

SEQ ID NO: 1610973 - RNA, 18 nt, Human
cccaugcugcccugugag

SEQ ID NO: 1610974 - RNA, 17 nt, Human
cccaugcugcccuguga

SEQ ID NO: 1610975 - RNA, 17 nt, Human
cggccuccauccugagg

SEQ ID NO: 1610976 - RNA, 16 nt, Human
cggccuccauccugag

SEQ ID NO: 1610977 - RNA, 19 nt, Human
cggcuggccuggccccuca

SEQ ID NO: 1610978 - RNA, 18 nt, Human
cggcuggccuggccccuc

SEQ ID NO: 1610979 - RNA, 16 nt, Human
cggcuggccuggcccc

SEQ ID NO: 1610980 - RNA, 15 nt, Human
cggcuggccuggccc

SEQ ID NO: 1610981 - RNA, 15 nt, Human
cggccuuuggcuuca

SEQ ID NO: 1610982 - RNA, 12 nt, Human
cgggcaugacac

SEQ ID NO: 1610983 - RNA, 15 nt, Human
cgggcaugacacgaa

SEQ ID NO: 1610984 - RNA, 17 nt, Human
cgggaggucgaggcagg

SEQ ID NO: 1610985 - RNA, 16 nt, Human
cgggaggucgaggcag

SEQ ID NO: 1610986 - RNA, 20 nt, Human
cgggaggauguucugggaca

SEQ ID NO: 1610987 - RNA, 22 nt, Human
cgggagccugaucaccugcccu

SEQ ID NO: 1610988 - RNA, 21 nt, Human
cgggaggauguucugggacac

SEQ ID NO: 1610989 - RNA, 20 nt, Human
cggacagccacggccaggcc

SEQ ID NO: 1610990 - RNA, 14 nt, Human
cggaugauuucuau

SEQ ID NO: 1610991 - RNA, 13 nt, Human
cggaugauuucua

SEQ ID NO: 1610992 - RNA, 13 nt, Human
cgcuccugugucu

SEQ ID NO: 1610993 - RNA, 17 nt, Human
cgcuauugucaccaggg

SEQ ID NO: 1610994 - RNA, 17 nt, Human
cggaaagcccugugcuc

SEQ ID NO: 1610995 - RNA, 18 nt, Human
cggacagccacggccagg

SEQ ID NO: 1610996 - RNA, 16 nt, Human
cggacagccacggcca

SEQ ID NO: 1610997 - RNA, 15 nt, Human
cggacagccacggcc

SEQ ID NO: 1610998 - RNA, 20 nt, Human
cggaaugaaccacaucuugc

SEQ ID NO: 1610999 - RNA, 11 nt, Human
cgcaaugugac

SEQ ID NO: 1611000 - RNA, 12 nt, Human
cgauuucuguuu

SEQ ID NO: 1611001 - RNA, 19 nt, Human
cgauucuucugcuucagcc

SEQ ID NO: 1611002 - RNA, 13 nt, Human
cgauucuucugcu

SEQ ID NO: 1611003 - RNA, 21 nt, Human
cgauucuucugcuucagccuc

SEQ ID NO: 1611004 - RNA, 19 nt, Human
cgaucuggguucacugcaa

SEQ ID NO: 1611005 - RNA, 19 nt, Human
cgaggccuucucugaagga

SEQ ID NO: 1611006 - RNA, 18 nt, Human
cgaggccuucucugaagg

SEQ ID NO: 1611007 - RNA, 12 nt, Human
cgaggacaggga

SEQ ID NO: 1611008 - RNA, 13 nt, Human
cgaggacagggag

SEQ ID NO: 1611009 - RNA, 14 nt, Human
cgaggacagggagg

SEQ ID NO: 1611010 - RNA, 15 nt, Human
ccuuuguauucucuc

SEQ ID NO: 1611011 - RNA, 18 nt, Human
ccuuuguauucucuccug

SEQ ID NO: 1611012 - RNA, 20 nt, Human
ccuuuguauucucuccugua

SEQ ID NO: 1611013 - RNA, 16 nt, Human
ccuuugcuugaaagaa

SEQ ID NO: 1611014 - RNA, 14 nt, Human
ccuuugacaaaggu

SEQ ID NO: 1611015 - RNA, 14 nt, Human
ccuuuaagagaaau

SEQ ID NO: 1611016 - RNA, 16 nt, Human
ccuuucucuuucguua

SEQ ID NO: 1611017 - RNA, 13 nt, Human
ccuuuaagagaaa

SEQ ID NO: 1611018 - RNA, 19 nt, Human
ccuuguggucccaccccac

SEQ ID NO: 1611019 - RNA, 16 nt, Human
ccuuguggucccaccc

SEQ ID NO: 1611020 - RNA, 20 nt, Human
ccuuguggucccaccccaca

SEQ ID NO: 1611021 - RNA, 14 nt, Human
ccuuggcugcaggg

SEQ ID NO: 1611022 - RNA, 13 nt, Human
ccuuggcugcagg

SEQ ID NO: 1611023 - RNA, 12 nt, Human
ccuuggcugcag

SEQ ID NO: 1611024 - RNA, 17 nt, Human
cgcgacaaugcaaacca

SEQ ID NO: 1611025 - RNA, 16 nt, Human
cgcgacaaugcaaacc

SEQ ID NO: 1611026 - RNA, 15 nt, Human
cgcccccacugguga

SEQ ID NO: 1611027 - RNA, 12 nt, Human
cgcccaggcugg

SEQ ID NO: 1611028 - RNA, 20 nt, Human
cgcccaggcuggagugcaau

SEQ ID NO: 1611029 - RNA, 19 nt, Human
cgcccaggcuggagugcaa

SEQ ID NO: 1611030 - RNA, 14 nt, Human
cgcagacaggacca

SEQ ID NO: 1611031 - RNA, 13 nt, Human
cgcagacaggacc

SEQ ID NO: 1611032 - RNA, 16 nt, Human
cgcuaagagggaggga

SEQ ID NO: 1611033 - RNA, 15 nt, Human
cgcuaagagggaggg

SEQ ID NO: 1611034 - RNA, 14 nt, Human
cgcuaagagggagg

SEQ ID NO: 1611035 - RNA, 21 nt, Human
cgcguugaaauuguaauuaua

SEQ ID NO: 1611036 - RNA, 17 nt, Human
cgcguugaaauuguaau

SEQ ID NO: 1611037 - RNA, 21 nt, Human
cgcuaagagggagggagggcu

SEQ ID NO: 1611038 - RNA, 22 nt, Human
cgcguugaaauuguaauuauau

SEQ ID NO: 1611039 - RNA, 19 nt, Human
cgcgugcacacaccagagc

SEQ ID NO: 1611040 - RNA, 16 nt, Human
cgcgugcacacaccag

SEQ ID NO: 1611041 - RNA, 20 nt, Human
cgcgugcacacaccagagcc

SEQ ID NO: 1611042 - RNA, 13 nt, Human
cgcguugaaauug

SEQ ID NO: 1611043 - RNA, 14 nt, Human
cgucuaccugaggg

SEQ ID NO: 1611044 - RNA, 14 nt, Human
cgucugacaggcaa

SEQ ID NO: 1611045 - RNA, 13 nt, Human
cgucugacaggca

SEQ ID NO: 1611046 - RNA, 14 nt, Human
cguccccugucccc

SEQ ID NO: 1611047 - RNA, 11 nt, Human
cguccccuguc

SEQ ID NO: 1611048 - RNA, 22 nt, Human
cgucccccucuggcuccagcug

SEQ ID NO: 1611049 - RNA, 23 nt, Human
cgugcauaccacuuuuguucuug

SEQ ID NO: 1611050 - RNA, 19 nt, Human
cgugcauaccacuuuuguu

SEQ ID NO: 1611051 - RNA, 22 nt, Human
cgugcacacaccagagcccacc

SEQ ID NO: 1611052 - RNA, 14 nt, Human
cgugcauaccacuu

SEQ ID NO: 1611053 - RNA, 18 nt, Human
cgugcauaccacuuuugu

SEQ ID NO: 1611054 - RNA, 21 nt, Human
cgugcacacaccagagcccac

SEQ ID NO: 1611055 - RNA, 20 nt, Human
cgugcacacaccagagccca

SEQ ID NO: 1611056 - RNA, 12 nt, Human
cgugacaacacu

SEQ ID NO: 1611057 - RNA, 23 nt, Human
cggugcuaucucccccagcccca

SEQ ID NO: 1611058 - RNA, 22 nt, Human
cguauaaaagccuguuuaagag

SEQ ID NO: 1611059 - RNA, 21 nt, Human
cguauaaaagccuguuuaaga

SEQ ID NO: 1611060 - RNA, 17 nt, Human
cguauaaaagccuguuu

SEQ ID NO: 1611061 - RNA, 16 nt, Human
cguauaaaagccuguu

SEQ ID NO: 1611062 - RNA, 20 nt, Human
cgucaacucauauuuucaug

SEQ ID NO: 1611063 - RNA, 16 nt, Human
cgucaacucauauuuu

SEQ ID NO: 1611064 - RNA, 22 nt, Human
cguauaugucucaggucccugc

SEQ ID NO: 1611065 - RNA, 21 nt, Human
cgucccccucuggcuccagcu

SEQ ID NO: 1611066 - RNA, 14 nt, Human
cgucccccucuggc

SEQ ID NO: 1611067 - RNA, 15 nt, Human
cguggcugcuucaag

SEQ ID NO: 1611068 - RNA, 14 nt, Human
cguggcugcuucaa

SEQ ID NO: 1611069 - RNA, 12 nt, Human
cguggcugcuuc

SEQ ID NO: 1611070 - RNA, 17 nt, Human
cguggcugcuucaagga

SEQ ID NO: 1611071 - RNA, 22 nt, Human
cguucauggaacgcguugaaau

SEQ ID NO: 1611072 - RNA, 23 nt, Human
cguucauggaacgcguugaaauu

SEQ ID NO: 1611073 - RNA, 16 nt, Human
cgugccuggccacgcc

SEQ ID NO: 1611074 - RNA, 12 nt, Human
cgugccuggcca

SEQ ID NO: 1611075 - RNA, 18 nt, Human
cgugccuucagcucuaca

SEQ ID NO: 1611076 - RNA, 16 nt, Human
cgugccuucagcucua

SEQ ID NO: 1611077 - RNA, 15 nt, Human
cgugccuucagcucu

SEQ ID NO: 1611078 - RNA, 13 nt, Human
cgugccuucagcu

SEQ ID NO: 1611079 - RNA, 20 nt, Human
cguuucuaugacacaugcaa

SEQ ID NO: 1611080 - RNA, 19 nt, Human
cguuucuaaaggcuaccuu

SEQ ID NO: 1611081 - RNA, 21 nt, Human
cguuucuaaaggcuaccuuug

SEQ ID NO: 1611082 - RNA, 18 nt, Human
cguugaaauuguaauuau

SEQ ID NO: 1611083 - RNA, 13 nt, Human
cguugaaauugua

SEQ ID NO: 1611084 - RNA, 22 nt, Human
cguuccuucaaagcaaaugucu

SEQ ID NO: 1611085 - RNA, 20 nt, Human
ccuugaaaacuuuaugcuaa

SEQ ID NO: 1611086 - RNA, 19 nt, Human
ccuugaacuuugaccucug

SEQ ID NO: 1611087 - RNA, 17 nt, Human
ccuugaaugaugccaug

SEQ ID NO: 1611088 - RNA, 16 nt, Human
ccuugaacuggguacu

SEQ ID NO: 1611089 - RNA, 17 nt, Human
ccuugaacuuugaccuc

SEQ ID NO: 1611090 - RNA, 14 nt, Human
ccuugaacugggua

SEQ ID NO: 1611091 - RNA, 22 nt, Human
ccuugaaaacacuguucucugc

SEQ ID NO: 1611092 - RNA, 21 nt, Human
ccuugaaaacacuguucucug

SEQ ID NO: 1611093 - RNA, 19 nt, Human
ccuugaaaacacuguucuc

SEQ ID NO: 1611094 - RNA, 18 nt, Human
ccuucgcuccugugucuu

SEQ ID NO: 1611095 - RNA, 15 nt, Human
ccuucgcuccugugu

SEQ ID NO: 1611096 - RNA, 14 nt, Human
ccuucgcuccugug

SEQ ID NO: 1611097 - RNA, 13 nt, Human
ccuucgcuccugu

SEQ ID NO: 1611098 - RNA, 15 nt, Human
ccuugaaaacacugu

SEQ ID NO: 1611099 - RNA, 16 nt, Human
ccuucuuuuucuucuu

SEQ ID NO: 1611100 - RNA, 14 nt, Human
ccuucuuuuucuuc

SEQ ID NO: 1611101 - RNA, 14 nt, Human
ccuugaugaagaag

SEQ ID NO: 1611102 - RNA, 23 nt, Human
ccuugaguugauucagcucugca

SEQ ID NO: 1611103 - RNA, 22 nt, Human
ccuugaguugauucagcucugc

SEQ ID NO: 1611104 - RNA, 21 nt, Human
ccuugaccauucuccaccugc

SEQ ID NO: 1611105 - RNA, 22 nt, Human
ccuugaccauucuccaccugcc

SEQ ID NO: 1611106 - RNA, 20 nt, Human
ccuugaccauucuccaccug

SEQ ID NO: 1611107 - RNA, 19 nt, Human
ccuugaccauucuccaccu

SEQ ID NO: 1611108 - RNA, 17 nt, Human
ccuugacagggcacacc

SEQ ID NO: 1611109 - RNA, 15 nt, Human
ccuugacagggcaca

SEQ ID NO: 1611110 - RNA, 14 nt, Human
ccuugacagggcac

SEQ ID NO: 1611111 - RNA, 13 nt, Human
ccuugacagggca

SEQ ID NO: 1611112 - RNA, 11 nt, Human
ccuuuggcuuc

SEQ ID NO: 1611113 - RNA, 19 nt, Human
ccuucagugccuuauggaa

SEQ ID NO: 1611114 - RNA, 17 nt, Human
ccuuagacagucccugc

SEQ ID NO: 1611115 - RNA, 16 nt, Human
ccuuagacagucccug

SEQ ID NO: 1611116 - RNA, 18 nt, Human
ccuuagaaccuuucuuac

SEQ ID NO: 1611117 - RNA, 16 nt, Human
ccuuagaaccuuucuu

SEQ ID NO: 1611118 - RNA, 15 nt, Human
ccuuagaaccuuucu

SEQ ID NO: 1611119 - RNA, 14 nt, Human
ccuuagaaccuuuc

SEQ ID NO: 1611120 - RNA, 19 nt, Human
ccuuagacagucccugcca

SEQ ID NO: 1611121 - RNA, 18 nt, Human
ccuuagacagucccugcc

SEQ ID NO: 1611122 - RNA, 21 nt, Human
ccuuagacagucccugccaau

SEQ ID NO: 1611123 - RNA, 14 nt, Human
ccuucaaccauucc

SEQ ID NO: 1611124 - RNA, 19 nt, Human
ccuucaaagcaaaugucuu

SEQ ID NO: 1611125 - RNA, 15 nt, Human
ccuucaaagcaaaug

SEQ ID NO: 1611126 - RNA, 14 nt, Human
ccuuaccugccagg

SEQ ID NO: 1611127 - RNA, 20 nt, Human
ccuuaccucggugccuuccu

SEQ ID NO: 1611128 - RNA, 16 nt, Human
ccuuaccagcagagca

SEQ ID NO: 1611129 - RNA, 15 nt, Human
ccuuaccagcagagc

SEQ ID NO: 1611130 - RNA, 17 nt, Human
ccuuaccagcagagcac

SEQ ID NO: 1611131 - RNA, 14 nt, Human
ccuuaccagcagag

SEQ ID NO: 1611132 - RNA, 14 nt, Human
ccuuccucuuucca

SEQ ID NO: 1611133 - RNA, 13 nt, Human
ccuucgccaccug

SEQ ID NO: 1611134 - RNA, 23 nt, Human
ccuucgauacaccgggccuggag

SEQ ID NO: 1611135 - RNA, 22 nt, Human
ccuucgauacaccgggccugga

SEQ ID NO: 1611136 - RNA, 20 nt, Human
ccuucgauacaccgggccug

SEQ ID NO: 1611137 - RNA, 22 nt, Human
ccuuccaggggugggacacccu

SEQ ID NO: 1611138 - RNA, 18 nt, Human
ccuuccaggggugggaca

SEQ ID NO: 1611139 - RNA, 23 nt, Human
ccuuccaugucgccucugcauuc

SEQ ID NO: 1611140 - RNA, 21 nt, Human
ccuuccaugucgccucugcau

SEQ ID NO: 1611141 - RNA, 20 nt, Human
ccuuccaugucgccucugca

SEQ ID NO: 1611142 - RNA, 19 nt, Human
ccuuccaugucgccucugc

SEQ ID NO: 1611143 - RNA, 16 nt, Human
ccuuccagggguggga

SEQ ID NO: 1611144 - RNA, 15 nt, Human
ccuuccagggguggg

SEQ ID NO: 1611145 - RNA, 14 nt, Human
ccuucagugccuua

SEQ ID NO: 1611146 - RNA, 13 nt, Human
ccuucagugccuu

SEQ ID NO: 1611147 - RNA, 10 nt, Human
ccuucagugc

SEQ ID NO: 1611148 - RNA, 15 nt, Human
ccuucagugccuuau

SEQ ID NO: 1611149 - RNA, 20 nt, Human
ccuucagugccuuauggaac

SEQ ID NO: 1611150 - RNA, 20 nt, Human
ccugggcagcugccuccccu

SEQ ID NO: 1611151 - RNA, 15 nt, Human
ccuggugcugccaca

SEQ ID NO: 1611152 - RNA, 21 nt, Human
ccuggugcugccacacuucag

SEQ ID NO: 1611153 - RNA, 18 nt, Human
ccuggugcugccacacuu

SEQ ID NO: 1611154 - RNA, 13 nt, Human
ccugguggcagcu

SEQ ID NO: 1611155 - RNA, 12 nt, Human
ccugguggcagc

SEQ ID NO: 1611156 - RNA, 20 nt, Human
ccuguaauccuagcacuuug

SEQ ID NO: 1611157 - RNA, 18 nt, Human
ccugguggcagcucaccu

SEQ ID NO: 1611158 - RNA, 17 nt, Human
ccugguggcagcucacc

SEQ ID NO: 1611159 - RNA, 16 nt, Human
ccugguggcagcucac

SEQ ID NO: 1611160 - RNA, 14 nt, Human
ccugguggcagcuc

SEQ ID NO: 1611161 - RNA, 23 nt, Human
ccuguagagugggagcugagugg

SEQ ID NO: 1611162 - RNA, 21 nt, Human
ccuguagagugggagcugagu

SEQ ID NO: 1611163 - RNA, 22 nt, Human
ccugggcagcugccuccccucc

SEQ ID NO: 1611164 - RNA, 19 nt, Human
ccugugauggggcccugcc

SEQ ID NO: 1611165 - RNA, 18 nt, Human
ccugugauggggcccugc

SEQ ID NO: 1611166 - RNA, 17 nt, Human
ccugugauggggcccug

SEQ ID NO: 1611167 - RNA, 21 nt, Human
ccugugauggggcccugccuc

SEQ ID NO: 1611168 - RNA, 20 nt, Human
ccugugauggggcccugccu

SEQ ID NO: 1611169 - RNA, 22 nt, Human
ccugugauggggcccugccucc

SEQ ID NO: 1611170 - RNA, 17 nt, Human
ccugugccucugggacu

SEQ ID NO: 1611171 - RNA, 15 nt, Human
ccugugccucuggga

SEQ ID NO: 1611172 - RNA, 19 nt, Human
ccugugccucugggacugg

SEQ ID NO: 1611173 - RNA, 18 nt, Human
ccuguccccgcacugggc

SEQ ID NO: 1611174 - RNA, 17 nt, Human
ccugucccccugacaac

SEQ ID NO: 1611175 - RNA, 20 nt, Human
ccugugaguacuacaguccu

SEQ ID NO: 1611176 - RNA, 22 nt, Human
ccugugagcuaggaauuguguu

SEQ ID NO: 1611177 - RNA, 15 nt, Human
ccugggcagcugccu

SEQ ID NO: 1611178 - RNA, 16 nt, Human
ccugggcagcugccuc

SEQ ID NO: 1611179 - RNA, 17 nt, Human
ccugggcagcugccucc

SEQ ID NO: 1611180 - RNA, 18 nt, Human
ccugggcagcugccuccc

SEQ ID NO: 1611181 - RNA, 15 nt, Human
ccugggcagaaggaa

SEQ ID NO: 1611182 - RNA, 14 nt, Human
ccugggcagaagga

SEQ ID NO: 1611183 - RNA, 12 nt, Human
ccugggcagaag

SEQ ID NO: 1611184 - RNA, 20 nt, Human
ccugggaucccucauccuca

SEQ ID NO: 1611185 - RNA, 16 nt, Human
ccugggaucccucauc

SEQ ID NO: 1611186 - RNA, 20 nt, Human
ccugggaggucaaggcugca

SEQ ID NO: 1611187 - RNA, 21 nt, Human
ccugggaggcucuggagccca

SEQ ID NO: 1611188 - RNA, 13 nt, Human
ccugggaggcucu

SEQ ID NO: 1611189 - RNA, 13 nt, Human
ccugggaggcagu

SEQ ID NO: 1611190 - RNA, 23 nt, Human
ccuggcaugggaaugaaugucag

SEQ ID NO: 1611191 - RNA, 18 nt, Human
ccuggcaugggaaugaau

SEQ ID NO: 1611192 - RNA, 16 nt, Human
ccuggccccucagggu

SEQ ID NO: 1611193 - RNA, 14 nt, Human
ccuggccccucagg

SEQ ID NO: 1611194 - RNA, 12 nt, Human
ccuggcggggug

SEQ ID NO: 1611195 - RNA, 17 nt, Human
ccuggcaugggaaugaa

SEQ ID NO: 1611196 - RNA, 16 nt, Human
ccuggcaugggaauga

SEQ ID NO: 1611197 - RNA, 19 nt, Human
ccuggcagccgugccuuca

SEQ ID NO: 1611198 - RNA, 18 nt, Human
ccuggcagccgugccuuc

SEQ ID NO: 1611199 - RNA, 12 nt, Human
ccuggcagccgu

SEQ ID NO: 1611200 - RNA, 21 nt, Human
ccuggcacugcuuccagugag

SEQ ID NO: 1611201 - RNA, 16 nt, Human
ccuggcagccccuguu

SEQ ID NO: 1611202 - RNA, 20 nt, Human
ccuggcacugcuuccaguga

SEQ ID NO: 1611203 - RNA, 14 nt, Human
ccuggacccugugg

SEQ ID NO: 1611204 - RNA, 13 nt, Human
ccuggacccugug

SEQ ID NO: 1611205 - RNA, 20 nt, Human
ccuggacugugugcucagga

SEQ ID NO: 1611206 - RNA, 17 nt, Human
ccuggacugugugcuca

SEQ ID NO: 1611207 - RNA, 14 nt, Human
ccuggacuccugca

SEQ ID NO: 1611208 - RNA, 22 nt, Human
ccugcuccagcuguucagcugg

SEQ ID NO: 1611209 - RNA, 14 nt, Human
ccugcuccagcugu

SEQ ID NO: 1611210 - RNA, 13 nt, Human
ccugcuccagcug

SEQ ID NO: 1611211 - RNA, 12 nt, Human
ccugcuccagcu

SEQ ID NO: 1611212 - RNA, 17 nt, Human
ccugcuaauuccccaga

SEQ ID NO: 1611213 - RNA, 23 nt, Human
ccugcgucucauacucaccucac

SEQ ID NO: 1611214 - RNA, 16 nt, Human
ccugcaaccugauugu

SEQ ID NO: 1611215 - RNA, 19 nt, Human
ccugcaacaccuuguuucc

SEQ ID NO: 1611216 - RNA, 18 nt, Human
ccugcaacaccuuguuuc

SEQ ID NO: 1611217 - RNA, 19 nt, Human
ccugcugguucaggguugg

SEQ ID NO: 1611218 - RNA, 13 nt, Human
ccugcugguucag

SEQ ID NO: 1611219 - RNA, 20 nt, Human
ccugcuuuuuauggccugug

SEQ ID NO: 1611220 - RNA, 19 nt, Human
ccugcuuugggcugcccug

SEQ ID NO: 1611221 - RNA, 18 nt, Human
ccugcuuugggcugcccu

SEQ ID NO: 1611222 - RNA, 17 nt, Human
ccugcuuugggcugccc

SEQ ID NO: 1611223 - RNA, 21 nt, Human
ccugcuuucagauacuggauu

SEQ ID NO: 1611224 - RNA, 16 nt, Human
ccugcuuucagauacu

SEQ ID NO: 1611225 - RNA, 15 nt, Human
ccugcuuucagauac

SEQ ID NO: 1611226 - RNA, 21 nt, Human
ccuggcagccgugccuucagc

SEQ ID NO: 1611227 - RNA, 23 nt, Human
ccugaaagaggaaugaaguacuc

SEQ ID NO: 1611228 - RNA, 18 nt, Human
ccugaaagaggaaugaag

SEQ ID NO: 1611229 - RNA, 22 nt, Human
ccucuuuggucuacacugugcu

SEQ ID NO: 1611230 - RNA, 19 nt, Human
ccucuuccucccucauucc

SEQ ID NO: 1611231 - RNA, 16 nt, Human
ccucuuccucccucau

SEQ ID NO: 1611232 - RNA, 15 nt, Human
ccucuuccucccuca

SEQ ID NO: 1611233 - RNA, 17 nt, Human
ccucuuaugggcugggu

SEQ ID NO: 1611234 - RNA, 20 nt, Human
ccugaagcuaucguaaaauu

SEQ ID NO: 1611235 - RNA, 21 nt, Human
ccugaagacucauucuucugu

SEQ ID NO: 1611236 - RNA, 23 nt, Human
ccugaagcuaucguaaaauuaag

SEQ ID NO: 1611237 - RNA, 22 nt, Human
ccugaagcuaucguaaaauuaa

SEQ ID NO: 1611238 - RNA, 20 nt, Human
ccugaacaggauauucucac

SEQ ID NO: 1611239 - RNA, 17 nt, Human
ccugaagucacacagug

SEQ ID NO: 1611240 - RNA, 16 nt, Human
ccugaagucacacagu

SEQ ID NO: 1611241 - RNA, 15 nt, Human
ccugaagucacacag

SEQ ID NO: 1611242 - RNA, 13 nt, Human
ccugaaggccccg

SEQ ID NO: 1611243 - RNA, 19 nt, Human
ccugaagucacacagugag

SEQ ID NO: 1611244 - RNA, 14 nt, Human
ccugaaggccccgc

SEQ ID NO: 1611245 - RNA, 23 nt, Human
ccucuuagaugcaguucugaaga

SEQ ID NO: 1611246 - RNA, 14 nt, Human
ccucuuaugggcug

SEQ ID NO: 1611247 - RNA, 16 nt, Human
ccucuuaugggcuggg

SEQ ID NO: 1611248 - RNA, 15 nt, Human
ccucuuaugggcugg

SEQ ID NO: 1611249 - RNA, 14 nt, Human
ccucuuagaaaaac

SEQ ID NO: 1611250 - RNA, 21 nt, Human
ccucuguucugcacacagcac

SEQ ID NO: 1611251 - RNA, 23 nt, Human
ccucuguacagagcccacgcccc

SEQ ID NO: 1611252 - RNA, 18 nt, Human
ccucuguacagagcccac

SEQ ID NO: 1611253 - RNA, 17 nt, Human
ccucuguacagagccca

SEQ ID NO: 1611254 - RNA, 16 nt, Human
ccucuguacagagccc

SEQ ID NO: 1611255 - RNA, 15 nt, Human
ccucuguacagagcc

SEQ ID NO: 1611256 - RNA, 14 nt, Human
ccucuguacagagc

SEQ ID NO: 1611257 - RNA, 17 nt, Human
ccucuguccaggcacug

SEQ ID NO: 1611258 - RNA, 20 nt, Human
ccugaggcuccacuuggucu

SEQ ID NO: 1611259 - RNA, 18 nt, Human
ccugaggcuccacuuggu

SEQ ID NO: 1611260 - RNA, 14 nt, Human
ccugaugcuucuuc

SEQ ID NO: 1611261 - RNA, 23 nt, Human
ccugauugugucucuugguccug

SEQ ID NO: 1611262 - RNA, 13 nt, Human
ccugauuaaagaa

SEQ ID NO: 1611263 - RNA, 12 nt, Human
ccugauuaaaga

SEQ ID NO: 1611264 - RNA, 18 nt, Human
ccugaugcuucuucagag

SEQ ID NO: 1611265 - RNA, 17 nt, Human
ccugaugcuucuucaga

SEQ ID NO: 1611266 - RNA, 20 nt, Human
ccugaggcccuucucuccag

SEQ ID NO: 1611267 - RNA, 19 nt, Human
ccugaggcccuucucucca

SEQ ID NO: 1611268 - RNA, 17 nt, Human
ccugaggcccuucucuc

SEQ ID NO: 1611269 - RNA, 16 nt, Human
ccugaggcccuucucu

SEQ ID NO: 1611270 - RNA, 22 nt, Human
ccugaggcccuucucuccagcc

SEQ ID NO: 1611271 - RNA, 21 nt, Human
ccugaggcccuucucuccagc

SEQ ID NO: 1611272 - RNA, 23 nt, Human
ccugaggcccuucucuccagccc

SEQ ID NO: 1611273 - RNA, 16 nt, Human
ccugacaacacucauu

SEQ ID NO: 1611274 - RNA, 15 nt, Human
ccugacaacacucau

SEQ ID NO: 1611275 - RNA, 14 nt, Human
ccugacaacacuca

SEQ ID NO: 1611276 - RNA, 12 nt, Human
ccugacaacacu

SEQ ID NO: 1611277 - RNA, 14 nt, Human
ccugaggcccagag

SEQ ID NO: 1611278 - RNA, 13 nt, Human
ccugaggcccaga

SEQ ID NO: 1611279 - RNA, 12 nt, Human
ccugaggcccag

SEQ ID NO: 1611280 - RNA, 23 nt, Human
ccugacaacacucauugaccuga

SEQ ID NO: 1611281 - RNA, 15 nt, Human
ccuccccuccucugc

SEQ ID NO: 1611282 - RNA, 14 nt, Human
ccucagucucccuc

SEQ ID NO: 1611283 - RNA, 19 nt, Human
ccucagucuggcccuuccu

SEQ ID NO: 1611284 - RNA, 15 nt, Human
ccucagucuggcccu

SEQ ID NO: 1611285 - RNA, 15 nt, Human
ccucagggucccugg

SEQ ID NO: 1611286 - RNA, 21 nt, Human
ccucagguaaucgaccugccu

SEQ ID NO: 1611287 - RNA, 16 nt, Human
ccucaggugagaagca

SEQ ID NO: 1611288 - RNA, 23 nt, Human
ccucagguaaucgaccugccucg

SEQ ID NO: 1611289 - RNA, 22 nt, Human
ccucagguaaucgaccugccuc

SEQ ID NO: 1611290 - RNA, 19 nt, Human
ccucaggugauccacccac

SEQ ID NO: 1611291 - RNA, 17 nt, Human
ccucaggugauccaccc

SEQ ID NO: 1611292 - RNA, 22 nt, Human
ccucaggugauccacccaccuc

SEQ ID NO: 1611293 - RNA, 20 nt, Human
ccucagaaaacaaggaugaa

SEQ ID NO: 1611294 - RNA, 21 nt, Human
ccucacuaucccggcugcccu

SEQ ID NO: 1611295 - RNA, 21 nt, Human
ccucacuaggcuucugguuga

SEQ ID NO: 1611296 - RNA, 22 nt, Human
ccucacuaucccggcugcccuu

SEQ ID NO: 1611297 - RNA, 17 nt, Human
ccucagcauccuggcac

SEQ ID NO: 1611298 - RNA, 16 nt, Human
ccucagcauccuggca

SEQ ID NO: 1611299 - RNA, 14 nt, Human
ccucagggucccug

SEQ ID NO: 1611300 - RNA, 23 nt, Human
ccucaggccugggggcugggcag

SEQ ID NO: 1611301 - RNA, 21 nt, Human
ccucaggccugggggcugggc

SEQ ID NO: 1611302 - RNA, 14 nt, Human
ccucaggccugggg

SEQ ID NO: 1611303 - RNA, 11 nt, Human
ccucaggccug

SEQ ID NO: 1611304 - RNA, 12 nt, Human
ccucccugcaau

SEQ ID NO: 1611305 - RNA, 16 nt, Human
ccucccugcaauaaaa

SEQ ID NO: 1611306 - RNA, 16 nt, Human
ccucccucccucuuuc

SEQ ID NO: 1611307 - RNA, 13 nt, Human
ccucccugccccu

SEQ ID NO: 1611308 - RNA, 17 nt, Human
ccuccccuccucugcuu

SEQ ID NO: 1611309 - RNA, 18 nt, Human
ccuccccuccucugcuug

SEQ ID NO: 1611310 - RNA, 13 nt, Human
ccucccggugccc

SEQ ID NO: 1611311 - RNA, 15 nt, Human
ccucccucccucuuu

SEQ ID NO: 1611312 - RNA, 13 nt, Human
ccucccucccucu

SEQ ID NO: 1611313 - RNA, 16 nt, Human
ccucccggugcccaag

SEQ ID NO: 1611314 - RNA, 11 nt, Human
ccuccucugcu

SEQ ID NO: 1611315 - RNA, 13 nt, Human
ccuccugccucga

SEQ ID NO: 1611316 - RNA, 14 nt, Human
ccuccuccuggacu

SEQ ID NO: 1611317 - RNA, 22 nt, Human
ccuccugugugugcgccuacag

SEQ ID NO: 1611318 - RNA, 15 nt, Human
ccuccugugugugcg

SEQ ID NO: 1611319 - RNA, 13 nt, Human
ccuccugugugug

SEQ ID NO: 1611320 - RNA, 13 nt, Human
ccuccugggcuaa

SEQ ID NO: 1611321 - RNA, 17 nt, Human
ccuccugggaaugaagc

SEQ ID NO: 1611322 - RNA, 13 nt, Human
ccuccuggacucc

SEQ ID NO: 1611323 - RNA, 14 nt, Human
ccucuccugggcag

SEQ ID NO: 1611324 - RNA, 13 nt, Human
ccucucugcccua

SEQ ID NO: 1611325 - RNA, 11 nt, Human
ccucuccuggg

SEQ ID NO: 1611326 - RNA, 12 nt, Human
ccucuccugggc

SEQ ID NO: 1611327 - RNA, 13 nt, Human
ccucuccugggca

SEQ ID NO: 1611328 - RNA, 16 nt, Human
ccucugacacacagcu

SEQ ID NO: 1611329 - RNA, 23 nt, Human
ccucugaaaaccaauguucucuc

SEQ ID NO: 1611330 - RNA, 12 nt, Human
ccucucccauca

SEQ ID NO: 1611331 - RNA, 19 nt, Human
ccucuccacugccuucgau

SEQ ID NO: 1611332 - RNA, 16 nt, Human
ccucuccacugccuuc

SEQ ID NO: 1611333 - RNA, 14 nt, Human
ccucuccacugccu

SEQ ID NO: 1611334 - RNA, 13 nt, Human
ccucuccacugcc

SEQ ID NO: 1611335 - RNA, 12 nt, Human
ccucuccacugc

SEQ ID NO: 1611336 - RNA, 23 nt, Human
ccuccugugugugcgccuacagg

SEQ ID NO: 1611337 - RNA, 20 nt, Human
ccuccuuaucaaaggacacc

SEQ ID NO: 1611338 - RNA, 18 nt, Human
ccuccuuaucaaaggaca

SEQ ID NO: 1611339 - RNA, 20 nt, Human
ccucugcuugccaucccucc

SEQ ID NO: 1611340 - RNA, 21 nt, Human
ccucugcuugccaucccuccc

SEQ ID NO: 1611341 - RNA, 12 nt, Human
ccucugggacug

SEQ ID NO: 1611342 - RNA, 17 nt, Human
ccucuggcuccagcugg

SEQ ID NO: 1611343 - RNA, 16 nt, Human
ccucuggcuccagcug

SEQ ID NO: 1611344 - RNA, 15 nt, Human
ccucugcacaagcug

SEQ ID NO: 1611345 - RNA, 11 nt, Human
ccucugcacaa

SEQ ID NO: 1611346 - RNA, 18 nt, Human
ccucugacacacagcucu

SEQ ID NO: 1611347 - RNA, 17 nt, Human
ccucugacacacagcuc

SEQ ID NO: 1611348 - RNA, 19 nt, Human
ccucugcacaagcugcacc

SEQ ID NO: 1611349 - RNA, 17 nt, Human
ccucugcacaagcugca

SEQ ID NO: 1611350 - RNA, 20 nt, Human
ccucugcacaagcugcaccc

SEQ ID NO: 1611351 - RNA, 21 nt, Human
ccucugcacuccccugcuggg

SEQ ID NO: 1611352 - RNA, 20 nt, Human
ccucugcacuccccugcugg

SEQ ID NO: 1611353 - RNA, 15 nt, Human
ccucugcacuccccu

SEQ ID NO: 1611354 - RNA, 14 nt, Human
ccucugcacucccc

SEQ ID NO: 1611355 - RNA, 22 nt, Human
ccucugcacuccccugcugggu

SEQ ID NO: 1611356 - RNA, 16 nt, Human
cccuugaugaagaagu

SEQ ID NO: 1611357 - RNA, 20 nt, Human
cccuuccucuccacugccuu

SEQ ID NO: 1611358 - RNA, 21 nt, Human
cccuuccucuccacugccuuc

SEQ ID NO: 1611359 - RNA, 17 nt, Human
cccuuccucuccacugc

SEQ ID NO: 1611360 - RNA, 16 nt, Human
cccuuccucuccacug

SEQ ID NO: 1611361 - RNA, 19 nt, Human
cccuuaccucggugccuuc

SEQ ID NO: 1611362 - RNA, 21 nt, Human
cccuuaccacugcucugauga

SEQ ID NO: 1611363 - RNA, 17 nt, Human
cccuuaccacugcucug

SEQ ID NO: 1611364 - RNA, 13 nt, Human
cccuuccucucca

SEQ ID NO: 1611365 - RNA, 18 nt, Human
cccuugccgucuaccuga

SEQ ID NO: 1611366 - RNA, 17 nt, Human
cccuugccgucuaccug

SEQ ID NO: 1611367 - RNA, 22 nt, Human
cccuugccgucuaccugagggg

SEQ ID NO: 1611368 - RNA, 20 nt, Human
cccuuugacgccaucccagc

SEQ ID NO: 1611369 - RNA, 22 nt, Human
cccuuucugggcaccggggccu

SEQ ID NO: 1611370 - RNA, 16 nt, Human
cccuuguggucccacc

SEQ ID NO: 1611371 - RNA, 14 nt, Human
cccuugugguccca

SEQ ID NO: 1611372 - RNA, 18 nt, Human
cccuuggggagcaggcuc

SEQ ID NO: 1611373 - RNA, 18 nt, Human
cccuuguggucccacccc

SEQ ID NO: 1611374 - RNA, 20 nt, Human
cccuuguggucccaccccac

SEQ ID NO: 1611375 - RNA, 18 nt, Human
ccgagaucacgccacugc

SEQ ID NO: 1611376 - RNA, 22 nt, Human
ccgagucucuucuccacuggau

SEQ ID NO: 1611377 - RNA, 13 nt, Human
cccuuuucuguuu

SEQ ID NO: 1611378 - RNA, 11 nt, Human
cccuuuuccuu

SEQ ID NO: 1611379 - RNA, 18 nt, Human
cccuuuuuuggcugcuga

SEQ ID NO: 1611380 - RNA, 17 nt, Human
cccuuuuuuggcugcug

SEQ ID NO: 1611381 - RNA, 22 nt, Human
ccgagauagccaaggccaaagg

SEQ ID NO: 1611382 - RNA, 19 nt, Human
ccgagauagccaaggccaa

SEQ ID NO: 1611383 - RNA, 17 nt, Human
ccgagaaggaagccucc

SEQ ID NO: 1611384 - RNA, 19 nt, Human
cccuuuuuuggcugcugaa

SEQ ID NO: 1611385 - RNA, 23 nt, Human
cccccaaccaaguggcucccaca

SEQ ID NO: 1611386 - RNA, 22 nt, Human
ccccaggaggccagccuugacc

SEQ ID NO: 1611387 - RNA, 21 nt, Human
ccccaggaggccagccuugac

SEQ ID NO: 1611388 - RNA, 15 nt, Human
ccccaggaggccagc

SEQ ID NO: 1611389 - RNA, 14 nt, Human
ccccaggaggccag

SEQ ID NO: 1611390 - RNA, 13 nt, Human
ccccaggaggcca

SEQ ID NO: 1611391 - RNA, 14 nt, Human
ccccacuggugaca

SEQ ID NO: 1611392 - RNA, 13 nt, Human
ccccacuggugac

SEQ ID NO: 1611393 - RNA, 12 nt, Human
ccccacugguga

SEQ ID NO: 1611394 - RNA, 21 nt, Human
cccccgcugucagccauuccu

SEQ ID NO: 1611395 - RNA, 16 nt, Human
cccccucugcccugcg

SEQ ID NO: 1611396 - RNA, 14 nt, Human
cccccucugcccug

SEQ ID NO: 1611397 - RNA, 13 nt, Human
cccccucugcccu

SEQ ID NO: 1611398 - RNA, 21 nt, Human
ccccgucucugguuccucccc

SEQ ID NO: 1611399 - RNA, 20 nt, Human
ccccgucccccucuggcucc

SEQ ID NO: 1611400 - RNA, 16 nt, Human
ccccgucccccucugg

SEQ ID NO: 1611401 - RNA, 12 nt, Human
cccccagcccca

SEQ ID NO: 1611402 - RNA, 16 nt, Human
cccccaucucuucugg

SEQ ID NO: 1611403 - RNA, 16 nt, Human
cccuguuuguuucuga

SEQ ID NO: 1611404 - RNA, 15 nt, Human
cccuguuuguuucug

SEQ ID NO: 1611405 - RNA, 18 nt, Human
cccugugggcccccaaau

SEQ ID NO: 1611406 - RNA, 16 nt, Human
cccugugggcccccaa

SEQ ID NO: 1611407 - RNA, 21 nt, Human
cccuguagagugggagcugag

SEQ ID NO: 1611408 - RNA, 23 nt, Human
cccugguuuccugcccugggagg

SEQ ID NO: 1611409 - RNA, 22 nt, Human
cccugguuuccugcccugggag

SEQ ID NO: 1611410 - RNA, 19 nt, Human
cccugguggcagugggagc

SEQ ID NO: 1611411 - RNA, 16 nt, Human
cccugguggcaguggg

SEQ ID NO: 1611412 - RNA, 21 nt, Human
cccugguggcagugggagcug

SEQ ID NO: 1611413 - RNA, 21 nt, Human
cccugguuuccugcccuggga

SEQ ID NO: 1611414 - RNA, 20 nt, Human
ccccucagggucccuggugg

SEQ ID NO: 1611415 - RNA, 18 nt, Human
ccccucagggucccuggu

SEQ ID NO: 1611416 - RNA, 17 nt, Human
ccccucagggucccugg

SEQ ID NO: 1611417 - RNA, 17 nt, Human
ccucaccuuucccaucu

SEQ ID NO: 1611418 - RNA, 22 nt, Human
ccucacaguccuuaccagcaga

SEQ ID NO: 1611419 - RNA, 20 nt, Human
ccucacaguccuuaccagca

SEQ ID NO: 1611420 - RNA, 12 nt, Human
ccucaccccacu

SEQ ID NO: 1611421 - RNA, 21 nt, Human
ccucacccacccuuuuuuaaa

SEQ ID NO: 1611422 - RNA, 15 nt, Human
ccucaccccacugug

SEQ ID NO: 1611423 - RNA, 17 nt, Human
ccucacaguccuuacca

SEQ ID NO: 1611424 - RNA, 17 nt, Human
ccuaucagaaguuucuc

SEQ ID NO: 1611425 - RNA, 15 nt, Human
ccgggcacucagaag

SEQ ID NO: 1611426 - RNA, 15 nt, Human
ccggcuggccuggcc

SEQ ID NO: 1611427 - RNA, 13 nt, Human
ccggcuggccugg

SEQ ID NO: 1611428 - RNA, 12 nt, Human
ccggcuggccug

SEQ ID NO: 1611429 - RNA, 12 nt, Human
ccggcugcccuu

SEQ ID NO: 1611430 - RNA, 20 nt, Human
ccgggcacucagaagacacu

SEQ ID NO: 1611431 - RNA, 19 nt, Human
ccgggccuggagaacuaga

SEQ ID NO: 1611432 - RNA, 15 nt, Human
ccgugccuucagcuc

SEQ ID NO: 1611433 - RNA, 14 nt, Human
ccgugccuucagcu

SEQ ID NO: 1611434 - RNA, 17 nt, Human
ccgugccuucagcucua

SEQ ID NO: 1611435 - RNA, 16 nt, Human
ccgugccuucagcucu

SEQ ID NO: 1611436 - RNA, 14 nt, Human
ccgugcuaaggacu

SEQ ID NO: 1611437 - RNA, 13 nt, Human
ccgugcuaaggac

SEQ ID NO: 1611438 - RNA, 23 nt, Human
ccguggcuucccgcucagcccuc

SEQ ID NO: 1611439 - RNA, 21 nt, Human
ccguggcuucccgcucagccc

SEQ ID NO: 1611440 - RNA, 15 nt, Human
ccguggcuucccgcu

SEQ ID NO: 1611441 - RNA, 14 nt, Human
ccuaaaguguauuu

SEQ ID NO: 1611442 - RNA, 12 nt, Human
ccuaaagagaua

SEQ ID NO: 1611443 - RNA, 17 nt, Human
ccuaauuccacagcugc

SEQ ID NO: 1611444 - RNA, 16 nt, Human
ccuaauuccacagcug

SEQ ID NO: 1611445 - RNA, 15 nt, Human
ccuaauuccacagcu

SEQ ID NO: 1611446 - RNA, 14 nt, Human
ccuaauuccacagc

SEQ ID NO: 1611447 - RNA, 12 nt, Human
ccuaccugguaa

SEQ ID NO: 1611448 - RNA, 13 nt, Human
cugcacaaagccc

SEQ ID NO: 1611449 - RNA, 21 nt, Human
cugcacaaagcccuuccaugu

SEQ ID NO: 1611450 - RNA, 20 nt, Human
cugcacaaagcccuuccaug

SEQ ID NO: 1611451 - RNA, 18 nt, Human
cugcacaaagcccuucca

SEQ ID NO: 1611452 - RNA, 15 nt, Human
cugauucuucagcaa

SEQ ID NO: 1611453 - RNA, 16 nt, Human
cugcacaagcugcacc

SEQ ID NO: 1611454 - RNA, 15 nt, Human
cugcacaagcugcac

SEQ ID NO: 1611455 - RNA, 14 nt, Human
cugcacaagcugca

SEQ ID NO: 1611456 - RNA, 13 nt, Human
cugcacaagcugc

SEQ ID NO: 1611457 - RNA, 18 nt, Human
cugcacaagcugcacccu

SEQ ID NO: 1611458 - RNA, 18 nt, Human
cugcacagugcaucucag

SEQ ID NO: 1611459 - RNA, 18 nt, Human
cugcacccucaggcaggu

SEQ ID NO: 1611460 - RNA, 17 nt, Human
cugcacccucaggcagg

SEQ ID NO: 1611461 - RNA, 22 nt, Human
cugcacagugcaucucagccca

SEQ ID NO: 1611462 - RNA, 21 nt, Human
cugcacagugcaucucagccc

SEQ ID NO: 1611463 - RNA, 13 nt, Human
cugcagaagacag

SEQ ID NO: 1611464 - RNA, 23 nt, Human
cugcagaagacaguauggcagcu

SEQ ID NO: 1611465 - RNA, 20 nt, Human
cugcagagcaggaaacauga

SEQ ID NO: 1611466 - RNA, 20 nt, Human
cugcaccggcuggccuggcc

SEQ ID NO: 1611467 - RNA, 19 nt, Human
cugcaccggcuggccuggc

SEQ ID NO: 1611468 - RNA, 18 nt, Human
cugcaccggcuggccugg

SEQ ID NO: 1611469 - RNA, 17 nt, Human
cugcaccggcuggccug

SEQ ID NO: 1611470 - RNA, 17 nt, Human
cugcacuugcagacucu

SEQ ID NO: 1611471 - RNA, 16 nt, Human
cugcacuugcagacuc

SEQ ID NO: 1611472 - RNA, 14 nt, Human
cugcacuugcagac

SEQ ID NO: 1611473 - RNA, 11 nt, Human
cugcagccuca

SEQ ID NO: 1611474 - RNA, 20 nt, Human
cugcagccucaaccuccugg

SEQ ID NO: 1611475 - RNA, 19 nt, Human
cugcagccucaaccuccug

SEQ ID NO: 1611476 - RNA, 22 nt, Human
cugcagccucaaccuccugggc

SEQ ID NO: 1611477 - RNA, 22 nt, Human
cugcagggaguccgaaagggac

SEQ ID NO: 1611478 - RNA, 16 nt, Human
cugcagggccaagcac

SEQ ID NO: 1611479 - RNA, 17 nt, Human
cugcagggacugccagu

SEQ ID NO: 1611480 - RNA, 15 nt, Human
cugcagggacugcca

SEQ ID NO: 1611481 - RNA, 21 nt, Human
cugauguuccuagugaaagag

SEQ ID NO: 1611482 - RNA, 20 nt, Human
cugauguuccuagugaaaga

SEQ ID NO: 1611483 - RNA, 18 nt, Human
cugauguuccuagugaaa

SEQ ID NO: 1611484 - RNA, 13 nt, Human
cugauguuccuag

SEQ ID NO: 1611485 - RNA, 18 nt, Human
cugauucccaagcucugc

SEQ ID NO: 1611486 - RNA, 17 nt, Human
cugauucccaagcucug

SEQ ID NO: 1611487 - RNA, 15 nt, Human
cugauucccaagcuc

SEQ ID NO: 1611488 - RNA, 20 nt, Human
cugauucccaagcucugcuc

SEQ ID NO: 1611489 - RNA, 19 nt, Human
cugauucccaagcucugcu

SEQ ID NO: 1611490 - RNA, 22 nt, Human
cugauucccaagcucugcuccu

SEQ ID NO: 1611491 - RNA, 14 nt, Human
cugaucucucguga

SEQ ID NO: 1611492 - RNA, 21 nt, Human
cugauaaagaugagugagcau

SEQ ID NO: 1611493 - RNA, 20 nt, Human
cugauagaggaagccugauu

SEQ ID NO: 1611494 - RNA, 20 nt, Human
cugauccaguuuuguuugga

SEQ ID NO: 1611495 - RNA, 16 nt, Human
cugagucugaaggcug

SEQ ID NO: 1611496 - RNA, 15 nt, Human
cugagucugaaggcu

SEQ ID NO: 1611497 - RNA, 14 nt, Human
cugagucugaaggc

SEQ ID NO: 1611498 - RNA, 13 nt, Human
cugagucugaagg

SEQ ID NO: 1611499 - RNA, 17 nt, Human
cugagucugaaggcugg

SEQ ID NO: 1611500 - RNA, 14 nt, Human
cugagugccuuuug

SEQ ID NO: 1611501 - RNA, 13 nt, Human
cugauaaagauga

SEQ ID NO: 1611502 - RNA, 22 nt, Human
cugagugggggaucacagccuc

SEQ ID NO: 1611503 - RNA, 16 nt, Human
cugagugccuuuuggu

SEQ ID NO: 1611504 - RNA, 15 nt, Human
cugagugccuuuugg

SEQ ID NO: 1611505 - RNA, 12 nt, Human
cugacccacugc

SEQ ID NO: 1611506 - RNA, 15 nt, Human
cugccuaagugcagc

SEQ ID NO: 1611507 - RNA, 21 nt, Human
cugccuaaggacuucuuuaau

SEQ ID NO: 1611508 - RNA, 20 nt, Human
cugccuaaggacuucuuuaa

SEQ ID NO: 1611509 - RNA, 22 nt, Human
cugccuaaggacuucuuuaauu

SEQ ID NO: 1611510 - RNA, 17 nt, Human
cugcccugcccaccugg

SEQ ID NO: 1611511 - RNA, 11 nt, Human
cugcccuggga

SEQ ID NO: 1611512 - RNA, 13 nt, Human
cugcccugggagg

SEQ ID NO: 1611513 - RNA, 12 nt, Human
cugcccugggag

SEQ ID NO: 1611514 - RNA, 22 nt, Human
cugcccugggaggcagugaugg

SEQ ID NO: 1611515 - RNA, 15 nt, Human
cugcccugggaggca

SEQ ID NO: 1611516 - RNA, 13 nt, Human
cugccucagccuc

SEQ ID NO: 1611517 - RNA, 14 nt, Human
cugccucagccucc

SEQ ID NO: 1611518 - RNA, 15 nt, Human
cugccugcccaggcc

SEQ ID NO: 1611519 - RNA, 14 nt, Human
cugccugcccaggc

SEQ ID NO: 1611520 - RNA, 13 nt, Human
cugccugcccagg

SEQ ID NO: 1611521 - RNA, 14 nt, Human
cugccucuucucua

SEQ ID NO: 1611522 - RNA, 13 nt, Human
cugccucuucucu

SEQ ID NO: 1611523 - RNA, 12 nt, Human
cugccucuuccu

SEQ ID NO: 1611524 - RNA, 14 nt, Human
cugccucucugcag

SEQ ID NO: 1611525 - RNA, 13 nt, Human
cugccucucugca

SEQ ID NO: 1611526 - RNA, 12 nt, Human
cugccucucugc

SEQ ID NO: 1611527 - RNA, 18 nt, Human
cugcuccucuccccagca

SEQ ID NO: 1611528 - RNA, 17 nt, Human
cugcuccucuccccagc

SEQ ID NO: 1611529 - RNA, 16 nt, Human
cugcuccucuccccag

SEQ ID NO: 1611530 - RNA, 15 nt, Human
cugcuccagcuguuc

SEQ ID NO: 1611531 - RNA, 14 nt, Human
cugcuccagcuguu

SEQ ID NO: 1611532 - RNA, 16 nt, Human
cugcgguccacccagg

SEQ ID NO: 1611533 - RNA, 17 nt, Human
cugcgguccacccagga

SEQ ID NO: 1611534 - RNA, 21 nt, Human
cugcggaaugaaccacaucuu

SEQ ID NO: 1611535 - RNA, 15 nt, Human
cugcgguccacccag

SEQ ID NO: 1611536 - RNA, 20 nt, Human
cugcggaaugaaccacaucu

SEQ ID NO: 1611537 - RNA, 20 nt, Human
cugccacccuggggagaaag

SEQ ID NO: 1611538 - RNA, 16 nt, Human
cugccacccuggggag

SEQ ID NO: 1611539 - RNA, 15 nt, Human
cugccacccugggga

SEQ ID NO: 1611540 - RNA, 19 nt, Human
cugccaccacgcccggcua

SEQ ID NO: 1611541 - RNA, 22 nt, Human
cugccacacuucaggcucuucu

SEQ ID NO: 1611542 - RNA, 17 nt, Human
cugccacacuucaggcu

SEQ ID NO: 1611543 - RNA, 13 nt, Human
cugccacacuuca

SEQ ID NO: 1611544 - RNA, 19 nt, Human
cugccaggaagccagcagg

SEQ ID NO: 1611545 - RNA, 18 nt, Human
cugccaggaagccagcag

SEQ ID NO: 1611546 - RNA, 16 nt, Human
cugccaggaagccagc

SEQ ID NO: 1611547 - RNA, 15 nt, Human
cugccaggaagccag

SEQ ID NO: 1611548 - RNA, 19 nt, Human
cugccagccgagauagcca

SEQ ID NO: 1611549 - RNA, 19 nt, Human
cugccaugccagcuuaucu

SEQ ID NO: 1611550 - RNA, 17 nt, Human
cugccaugccagcuuau

SEQ ID NO: 1611551 - RNA, 16 nt, Human
cugccauuucugagau

SEQ ID NO: 1611552 - RNA, 17 nt, Human
cugcccaaccugcucuc

SEQ ID NO: 1611553 - RNA, 13 nt, Human
cugcccaggcccc

SEQ ID NO: 1611554 - RNA, 19 nt, Human
cugcccaaccugcucuccu

SEQ ID NO: 1611555 - RNA, 17 nt, Human
cugccccuggcagcccc

SEQ ID NO: 1611556 - RNA, 16 nt, Human
cugccccuggcagccc

SEQ ID NO: 1611557 - RNA, 15 nt, Human
cugccccuggcagcc

SEQ ID NO: 1611558 - RNA, 14 nt, Human
cugccccuggcagc

SEQ ID NO: 1611559 - RNA, 18 nt, Human
cugcccaggccugccugu

SEQ ID NO: 1611560 - RNA, 19 nt, Human
cugcccaggccugccuguu

SEQ ID NO: 1611561 - RNA, 15 nt, Human
cugcccggcugcgga

SEQ ID NO: 1611562 - RNA, 11 nt, Human
cugcccggcug

SEQ ID NO: 1611563 - RNA, 16 nt, Human
cugcccugcccaccug

SEQ ID NO: 1611564 - RNA, 15 nt, Human
cugcccugcccaccu

SEQ ID NO: 1611565 - RNA, 14 nt, Human
cugcccugcccacc

SEQ ID NO: 1611566 - RNA, 13 nt, Human
cugcccugcccac

SEQ ID NO: 1611567 - RNA, 21 nt, Human
cuggucccagccagcaguuca

SEQ ID NO: 1611568 - RNA, 18 nt, Human
cuggucccacucagucca

SEQ ID NO: 1611569 - RNA, 15 nt, Human
cuggucccacucagu

SEQ ID NO: 1611570 - RNA, 21 nt, Human
cugguccauagagagcaagac

SEQ ID NO: 1611571 - RNA, 18 nt, Human
cugguccauagagagcaa

SEQ ID NO: 1611572 - RNA, 17 nt, Human
cugguccauagagagca

SEQ ID NO: 1611573 - RNA, 15 nt, Human
cugguccauagagag

SEQ ID NO: 1611574 - RNA, 13 nt, Human
cuggguuggaggg

SEQ ID NO: 1611575 - RNA, 18 nt, Human
cuggguuggaaaacagua

SEQ ID NO: 1611576 - RNA, 13 nt, Human
cuggguuggaaaa

SEQ ID NO: 1611577 - RNA, 20 nt, Human
cugguggcccgacagccugg

SEQ ID NO: 1611578 - RNA, 23 nt, Human
cugguggcagugggagcugccug

SEQ ID NO: 1611579 - RNA, 19 nt, Human
cugggcucccuucccaccu

SEQ ID NO: 1611580 - RNA, 21 nt, Human
cugggcuuggggaccagagcu

SEQ ID NO: 1611581 - RNA, 20 nt, Human
cugggcuuggggaccagagc

SEQ ID NO: 1611582 - RNA, 17 nt, Human
cugggcuuggggaccag

SEQ ID NO: 1611583 - RNA, 13 nt, Human
cugggcuugggga

SEQ ID NO: 1611584 - RNA, 23 nt, Human
cugggcuucaguggcagcugcuu

SEQ ID NO: 1611585 - RNA, 22 nt, Human
cugggcuucaguggcagcugcu

SEQ ID NO: 1611586 - RNA, 21 nt, Human
cugggcuucaguggcagcugc

SEQ ID NO: 1611587 - RNA, 20 nt, Human
cugggcuucaguggcagcug

SEQ ID NO: 1611588 - RNA, 19 nt, Human
cugggcuucaguggcagcu

SEQ ID NO: 1611589 - RNA, 18 nt, Human
cugggcuucaguggcagc

SEQ ID NO: 1611590 - RNA, 19 nt, Human
cugggccccugccucucug

SEQ ID NO: 1611591 - RNA, 18 nt, Human
cugggggccucagugcca

SEQ ID NO: 1611592 - RNA, 17 nt, Human
cugggggccucagugcc

SEQ ID NO: 1611593 - RNA, 13 nt, Human
cugggggccucag

SEQ ID NO: 1611594 - RNA, 19 nt, Human
cugggguggggaccucagg

SEQ ID NO: 1611595 - RNA, 18 nt, Human
cugggguggggaccucag

SEQ ID NO: 1611596 - RNA, 17 nt, Human
cugggguggggaccuca

SEQ ID NO: 1611597 - RNA, 20 nt, Human
cuggguacuuguggacacag

SEQ ID NO: 1611598 - RNA, 23 nt, Human
cugggguggggaccucaggccug

SEQ ID NO: 1611599 - RNA, 22 nt, Human
cugggguggggaccucaggccu

SEQ ID NO: 1611600 - RNA, 21 nt, Human
cugggguggggaccucaggcc

SEQ ID NO: 1611601 - RNA, 23 nt, Human
cuggguacuuguggacacagcuc

SEQ ID NO: 1611602 - RNA, 21 nt, Human
cuggguacuuguggacacagc

SEQ ID NO: 1611603 - RNA, 22 nt, Human
cugggaacccaaguccaagcau

SEQ ID NO: 1611604 - RNA, 16 nt, Human
cugggagcuuuuguag

SEQ ID NO: 1611605 - RNA, 15 nt, Human
cugggagcucugcag

SEQ ID NO: 1611606 - RNA, 14 nt, Human
cugggagcucugca

SEQ ID NO: 1611607 - RNA, 13 nt, Human
cugggagcucugc

SEQ ID NO: 1611608 - RNA, 18 nt, Human
cugggaggucaaggcugc

SEQ ID NO: 1611609 - RNA, 16 nt, Human
cugggaggcucuggag

SEQ ID NO: 1611610 - RNA, 15 nt, Human
cugggaggcucugga

SEQ ID NO: 1611611 - RNA, 16 nt, Human
cugggaggcagugaug

SEQ ID NO: 1611612 - RNA, 13 nt, Human
cugggagugagcu

SEQ ID NO: 1611613 - RNA, 16 nt, Human
cugggagugagcuggu

SEQ ID NO: 1611614 - RNA, 20 nt, Human
cugggaucacauguggacuu

SEQ ID NO: 1611615 - RNA, 23 nt, Human
cugggauuacaggcuccugccac

SEQ ID NO: 1611616 - RNA, 22 nt, Human
cugggauuacaggcuccugcca

SEQ ID NO: 1611617 - RNA, 21 nt, Human
cugggauuacaggcuccugcc

SEQ ID NO: 1611618 - RNA, 21 nt, Human
cugggauuacaggcgugagcc

SEQ ID NO: 1611619 - RNA, 20 nt, Human
cugggauuacaggcuccugc

SEQ ID NO: 1611620 - RNA, 19 nt, Human
cugggauuacaggcuccug

SEQ ID NO: 1611621 - RNA, 20 nt, Human
cugggcaaugugauaaaacc

SEQ ID NO: 1611622 - RNA, 20 nt, Human
cugggcaccggggccucgga

SEQ ID NO: 1611623 - RNA, 10 nt, Human
cugggccccu

SEQ ID NO: 1611624 - RNA, 17 nt, Human
cugggccccugccucuc

SEQ ID NO: 1611625 - RNA, 16 nt, Human
cugggccccugccucu

SEQ ID NO: 1611626 - RNA, 12 nt, Human
cugggccccugc

SEQ ID NO: 1611627 - RNA, 15 nt, Human
cuggccugagcuggg

SEQ ID NO: 1611628 - RNA, 17 nt, Human
cuggcucuuccaggcug

SEQ ID NO: 1611629 - RNA, 13 nt, Human
cuggccugagcug

SEQ ID NO: 1611630 - RNA, 19 nt, Human
cuggcucuuccaggcuggg

SEQ ID NO: 1611631 - RNA, 18 nt, Human
cuggcucuuccaggcugg

SEQ ID NO: 1611632 - RNA, 20 nt, Human
cuggcucuuccaggcuggga

SEQ ID NO: 1611633 - RNA, 19 nt, Human
cuggcugccuuagaaccuu

SEQ ID NO: 1611634 - RNA, 14 nt, Human
cuggcugccuuaga

SEQ ID NO: 1611635 - RNA, 19 nt, Human
cuggcuguuggcugggggc

SEQ ID NO: 1611636 - RNA, 22 nt, Human
cuggcuggguggcaccagcagc

SEQ ID NO: 1611637 - RNA, 21 nt, Human
cuggcuggguggcaccagcag

SEQ ID NO: 1611638 - RNA, 20 nt, Human
cuggcuguuggcugggggcc

SEQ ID NO: 1611639 - RNA, 14 nt, Human
cuggcuucacagau

SEQ ID NO: 1611640 - RNA, 16 nt, Human
cuggcuuuucacugcu

SEQ ID NO: 1611641 - RNA, 15 nt, Human
cuggcuuuucacugc

SEQ ID NO: 1611642 - RNA, 19 nt, Human
cugggaacaccauagguca

SEQ ID NO: 1611643 - RNA, 22 nt, Human
cuggcuuuucacugcuggcugc

SEQ ID NO: 1611644 - RNA, 20 nt, Human
cuggcuuuucacugcuggcu

SEQ ID NO: 1611645 - RNA, 19 nt, Human
cuggcuuuucacugcuggc

SEQ ID NO: 1611646 - RNA, 17 nt, Human
cuggcuuuucacugcug

SEQ ID NO: 1611647 - RNA, 13 nt, Human
cugcugaaacaac

SEQ ID NO: 1611648 - RNA, 18 nt, Human
cugcugaaacaacaaaua

SEQ ID NO: 1611649 - RNA, 21 nt, Human
cugcuuucagauacuggauug

SEQ ID NO: 1611650 - RNA, 18 nt, Human
cugcuuucagauacugga

SEQ ID NO: 1611651 - RNA, 12 nt, Human
cugcucugauga

SEQ ID NO: 1611652 - RNA, 20 nt, Human
cugcucugaugaagaggagu

SEQ ID NO: 1611653 - RNA, 18 nt, Human
cugcuuugggcugcccug

SEQ ID NO: 1611654 - RNA, 20 nt, Human
cugcuuugggcugcccuggu

SEQ ID NO: 1611655 - RNA, 19 nt, Human
cugcuuugggcugcccugg

SEQ ID NO: 1611656 - RNA, 23 nt, Human
cugcuuugggcugcccuggugcu

SEQ ID NO: 1611657 - RNA, 22 nt, Human
cugcuuugggcugcccuggugc

SEQ ID NO: 1611658 - RNA, 21 nt, Human
cugcuuugggcugcccuggug

SEQ ID NO: 1611659 - RNA, 23 nt, Human
cuggaauaauccuaaacauauga

SEQ ID NO: 1611660 - RNA, 21 nt, Human
cuggaagugcuaauuuugaaa

SEQ ID NO: 1611661 - RNA, 18 nt, Human
cuggaagcacagcuucau

SEQ ID NO: 1611662 - RNA, 15 nt, Human
cuggaagcacagcuu

SEQ ID NO: 1611663 - RNA, 15 nt, Human
cuggaaugcaguggu

SEQ ID NO: 1611664 - RNA, 22 nt, Human
cuggagcuagaauuugauaugu

SEQ ID NO: 1611665 - RNA, 17 nt, Human
cuggagcuagaauuuga

SEQ ID NO: 1611666 - RNA, 16 nt, Human
cuggagcuagaauuug

SEQ ID NO: 1611667 - RNA, 21 nt, Human
cuggagcccacuguacuugcu

SEQ ID NO: 1611668 - RNA, 20 nt, Human
cuggagcccacuguacuugc

SEQ ID NO: 1611669 - RNA, 17 nt, Human
cuggagcccacuguacu

SEQ ID NO: 1611670 - RNA, 16 nt, Human
cuggagcccacuguac

SEQ ID NO: 1611671 - RNA, 15 nt, Human
cuggagcccacugua

SEQ ID NO: 1611672 - RNA, 13 nt, Human
cuggagcccacug

SEQ ID NO: 1611673 - RNA, 16 nt, Human
cuggacucaccucccc

SEQ ID NO: 1611674 - RNA, 16 nt, Human
cuggccaacgggguga

SEQ ID NO: 1611675 - RNA, 16 nt, Human
cuggccagaugcacca

SEQ ID NO: 1611676 - RNA, 18 nt, Human
cuggcacugcuuccagug

SEQ ID NO: 1611677 - RNA, 17 nt, Human
cuggcacugcuuccagu

SEQ ID NO: 1611678 - RNA, 16 nt, Human
cuggcacugcuuccag

SEQ ID NO: 1611679 - RNA, 15 nt, Human
cuggcacugcuucca

SEQ ID NO: 1611680 - RNA, 20 nt, Human
cuggccagaugcaccagccc

SEQ ID NO: 1611681 - RNA, 19 nt, Human
cuggccagaugcaccagcc

SEQ ID NO: 1611682 - RNA, 18 nt, Human
cuggccagaugcaccagc

SEQ ID NO: 1611683 - RNA, 17 nt, Human
cuggccagaugcaccag

SEQ ID NO: 1611684 - RNA, 21 nt, Human
cuggccagaugcaccagcccu

SEQ ID NO: 1611685 - RNA, 22 nt, Human
cuggccagaugcaccagcccuu

SEQ ID NO: 1611686 - RNA, 17 nt, Human
cuggccuagcauacgua

SEQ ID NO: 1611687 - RNA, 13 nt, Human
cuggcccacugca

SEQ ID NO: 1611688 - RNA, 12 nt, Human
cuggcccacugc

SEQ ID NO: 1611689 - RNA, 23 nt, Human
cuggccuagcauacguacacauu

SEQ ID NO: 1611690 - RNA, 22 nt, Human
cuggccucaagugauucuccug

SEQ ID NO: 1611691 - RNA, 20 nt, Human
cuggcacaguuuucugagaa

SEQ ID NO: 1611692 - RNA, 23 nt, Human
cuggcacuauaauguaagcucua

SEQ ID NO: 1611693 - RNA, 14 nt, Human
cuggcacugcuucc

SEQ ID NO: 1611694 - RNA, 13 nt, Human
cuggcacugcuuc

SEQ ID NO: 1611695 - RNA, 19 nt, Human
cuggcacaguuuucugaga

SEQ ID NO: 1611696 - RNA, 18 nt, Human
cuggcacaguuuucugag

SEQ ID NO: 1611697 - RNA, 17 nt, Human
cuggcacagggcagugg

SEQ ID NO: 1611698 - RNA, 20 nt, Human
cuggauuguacuuugugcug

SEQ ID NO: 1611699 - RNA, 19 nt, Human
cuggauuguacuuugugcu

SEQ ID NO: 1611700 - RNA, 15 nt, Human
cuggauggggcugca

SEQ ID NO: 1611701 - RNA, 21 nt, Human
cuggauggaggaaaaccaagc

SEQ ID NO: 1611702 - RNA, 16 nt, Human
cuggauggggcugcac

SEQ ID NO: 1611703 - RNA, 13 nt, Human
cuggauuaaacuu

SEQ ID NO: 1611704 - RNA, 23 nt, Human
cuggauuaaacuuaaucuaaaug

SEQ ID NO: 1611705 - RNA, 17 nt, Human
cuggauuauauuaugaa

SEQ ID NO: 1611706 - RNA, 23 nt, Human
cuggauuauucaaaaugauguau

SEQ ID NO: 1611707 - RNA, 15 nt, Human
cucauacccaccccc

SEQ ID NO: 1611708 - RNA, 19 nt, Human
cucauaguaugguggcugg

SEQ ID NO: 1611709 - RNA, 18 nt, Human
cucauaguaugguggcug

SEQ ID NO: 1611710 - RNA, 20 nt, Human
cucauaguaugguggcuggg

SEQ ID NO: 1611711 - RNA, 14 nt, Human
cucaggugagaagc

SEQ ID NO: 1611712 - RNA, 19 nt, Human
cucaggugucccugcacuu

SEQ ID NO: 1611713 - RNA, 18 nt, Human
cucaggugucccugcacu

SEQ ID NO: 1611714 - RNA, 17 nt, Human
cucaggugucccugcac

SEQ ID NO: 1611715 - RNA, 16 nt, Human
cucaggugucccugca

SEQ ID NO: 1611716 - RNA, 15 nt, Human
cucaggugucccugc

SEQ ID NO: 1611717 - RNA, 23 nt, Human
cucagguggggucacucuggcag

SEQ ID NO: 1611718 - RNA, 22 nt, Human
cucagguggggucacucuggca

SEQ ID NO: 1611719 - RNA, 14 nt, Human
cucagggucccugg

SEQ ID NO: 1611720 - RNA, 18 nt, Human
cucaggucccugcagggc

SEQ ID NO: 1611721 - RNA, 17 nt, Human
cucaggucccugcaggg

SEQ ID NO: 1611722 - RNA, 12 nt, Human
cucagggucccu

SEQ ID NO: 1611723 - RNA, 23 nt, Human
cuaaaagguaugcaaucaaaucu

SEQ ID NO: 1611724 - RNA, 18 nt, Human
cucauuaggauggcuagu

SEQ ID NO: 1611725 - RNA, 17 nt, Human
cucauuaggauggcuag

SEQ ID NO: 1611726 - RNA, 21 nt, Human
cucauuagcauuuugcuaaau

SEQ ID NO: 1611727 - RNA, 17 nt, Human
cucaucuccccaucauu

SEQ ID NO: 1611728 - RNA, 21 nt, Human
cucaucuagguaaauuacagu

SEQ ID NO: 1611729 - RNA, 14 nt, Human
cucauauuuucaug

SEQ ID NO: 1611730 - RNA, 14 nt, Human
cucauucuucugua

SEQ ID NO: 1611731 - RNA, 13 nt, Human
cucauucuucugu

SEQ ID NO: 1611732 - RNA, 18 nt, Human
cucauuccaccuucccau

SEQ ID NO: 1611733 - RNA, 21 nt, Human
cucauuccaccuucccaugcc

SEQ ID NO: 1611734 - RNA, 15 nt, Human
cucauugaccugagg

SEQ ID NO: 1611735 - RNA, 13 nt, Human
cucauugaccuga

SEQ ID NO: 1611736 - RNA, 23 nt, Human
cucauucuucuguacgucugaca

SEQ ID NO: 1611737 - RNA, 16 nt, Human
cucauugaccugaggc

SEQ ID NO: 1611738 - RNA, 17 nt, Human
cucccagucauuuaaua

SEQ ID NO: 1611739 - RNA, 14 nt, Human
cucccaggcgcccc

SEQ ID NO: 1611740 - RNA, 22 nt, Human
cucccaggcauuccccaggagg

SEQ ID NO: 1611741 - RNA, 21 nt, Human
cucccaggcauuccccaggag

SEQ ID NO: 1611742 - RNA, 20 nt, Human
cucccaggcauuccccagga

SEQ ID NO: 1611743 - RNA, 19 nt, Human
cucccaggcauuccccagg

SEQ ID NO: 1611744 - RNA, 17 nt, Human
cucccaggcauucccca

SEQ ID NO: 1611745 - RNA, 22 nt, Human
cucccaaggggcccaaauucuu

SEQ ID NO: 1611746 - RNA, 21 nt, Human
cucccaaggggcccaaauucu

SEQ ID NO: 1611747 - RNA, 14 nt, Human
cuccaucuccacuc

SEQ ID NO: 1611748 - RNA, 21 nt, Human
cuccauccugaggcuccacuu

SEQ ID NO: 1611749 - RNA, 15 nt, Human
cuccaggcuccuuua

SEQ ID NO: 1611750 - RNA, 11 nt, Human
cuccaggcucc

SEQ ID NO: 1611751 - RNA, 23 nt, Human
cuccauccugaggcuccacuugg

SEQ ID NO: 1611752 - RNA, 17 nt, Human
cuccaucuaaacugccc

SEQ ID NO: 1611753 - RNA, 20 nt, Human
cuccaucgcugucaucucag

SEQ ID NO: 1611754 - RNA, 13 nt, Human
cuccaucuccacu

SEQ ID NO: 1611755 - RNA, 18 nt, Human
cuccaucuaaacugcccc

SEQ ID NO: 1611756 - RNA, 19 nt, Human
cuccagcuguucagcuggu

SEQ ID NO: 1611757 - RNA, 18 nt, Human
cuccagcuguucagcugg

SEQ ID NO: 1611758 - RNA, 13 nt, Human
cuccagcuguuca

SEQ ID NO: 1611759 - RNA, 23 nt, Human
cuccaccucccugcaauaaaaug

SEQ ID NO: 1611760 - RNA, 17 nt, Human
cuccaccugccagggac

SEQ ID NO: 1611761 - RNA, 21 nt, Human
cuccaccugccagggacagag

SEQ ID NO: 1611762 - RNA, 18 nt, Human
cuccaccugccagggaca

SEQ ID NO: 1611763 - RNA, 14 nt, Human
cuccaccucccugc

SEQ ID NO: 1611764 - RNA, 15 nt, Human
cuccaccucccugca

SEQ ID NO: 1611765 - RNA, 16 nt, Human
cuccaccucccugcaa

SEQ ID NO: 1611766 - RNA, 17 nt, Human
cuccaccucccugcaau

SEQ ID NO: 1611767 - RNA, 12 nt, Human
cuccacccugcu

SEQ ID NO: 1611768 - RNA, 11 nt, Human
cuccacccugc

SEQ ID NO: 1611769 - RNA, 20 nt, Human
cuccagcucaccagccccag

SEQ ID NO: 1611770 - RNA, 19 nt, Human
cuccagcucaccagcccca

SEQ ID NO: 1611771 - RNA, 11 nt, Human
cuccacugccu

SEQ ID NO: 1611772 - RNA, 21 nt, Human
cuccagaccccuggcuuuuca

SEQ ID NO: 1611773 - RNA, 20 nt, Human
cuccagaccccuggcuuuuc

SEQ ID NO: 1611774 - RNA, 19 nt, Human
cuccagaccccuggcuuuu

SEQ ID NO: 1611775 - RNA, 18 nt, Human
cuccagaccccuggcuuu

SEQ ID NO: 1611776 - RNA, 17 nt, Human
cuccagaccccuggcuu

SEQ ID NO: 1611777 - RNA, 15 nt, Human
cuccagaccccuggc

SEQ ID NO: 1611778 - RNA, 16 nt, Human
cucccuucucuucaca

SEQ ID NO: 1611779 - RNA, 13 nt, Human
cucccuuccucuu

SEQ ID NO: 1611780 - RNA, 14 nt, Human
cucccuuccucuuu

SEQ ID NO: 1611781 - RNA, 13 nt, Human
cucccuuucaaca

SEQ ID NO: 1611782 - RNA, 20 nt, Human
cucccuuggauuguccccga

SEQ ID NO: 1611783 - RNA, 17 nt, Human
cucccuuggauuguccc

SEQ ID NO: 1611784 - RNA, 17 nt, Human
cucccuuucuucccuac

SEQ ID NO: 1611785 - RNA, 10 nt, Human
cucccuuccu

SEQ ID NO: 1611786 - RNA, 20 nt, Human
cucccuucaaccauucccca

SEQ ID NO: 1611787 - RNA, 19 nt, Human
cucccuucaaccauucccc

SEQ ID NO: 1611788 - RNA, 18 nt, Human
cucccuucaaccauuccc

SEQ ID NO: 1611789 - RNA, 12 nt, Human
cucccuucaacc

SEQ ID NO: 1611790 - RNA, 18 nt, Human
cucccaucucacacauga

SEQ ID NO: 1611791 - RNA, 15 nt, Human
cucccaucucacaca

SEQ ID NO: 1611792 - RNA, 21 nt, Human
cucccaucucacacaugagca

SEQ ID NO: 1611793 - RNA, 14 nt, Human
cucccaucucacac

SEQ ID NO: 1611794 - RNA, 14 nt, Human
cucccaucacccgc

SEQ ID NO: 1611795 - RNA, 12 nt, Human
cuccucagaucu

SEQ ID NO: 1611796 - RNA, 22 nt, Human
cuccuaucagaaguuucucagc

SEQ ID NO: 1611797 - RNA, 18 nt, Human
cuccuaucaccugucuug

SEQ ID NO: 1611798 - RNA, 14 nt, Human
cuccucagaucuuc

SEQ ID NO: 1611799 - RNA, 19 nt, Human
cuccucuugccacugccuc

SEQ ID NO: 1611800 - RNA, 14 nt, Human
cuccugcaggcagc

SEQ ID NO: 1611801 - RNA, 13 nt, Human
cuccugcaggcag

SEQ ID NO: 1611802 - RNA, 22 nt, Human
cuccugaguagcugggauuaca

SEQ ID NO: 1611803 - RNA, 17 nt, Human
cuccugaguagcuggga

SEQ ID NO: 1611804 - RNA, 14 nt, Human
cuccugaccuuagg

SEQ ID NO: 1611805 - RNA, 14 nt, Human
cuccugaccucagg

SEQ ID NO: 1611806 - RNA, 20 nt, Human
cucggagaagagcuguucac

SEQ ID NO: 1611807 - RNA, 13 nt, Human
cucggagaagagc

SEQ ID NO: 1611808 - RNA, 12 nt, Human
cucggagaagag

SEQ ID NO: 1611809 - RNA, 19 nt, Human
cucggacuuagcugggaga

SEQ ID NO: 1611810 - RNA, 18 nt, Human
cucggacuuagcugggag

SEQ ID NO: 1611811 - RNA, 21 nt, Human
cucgcuauugucaccagggcu

SEQ ID NO: 1611812 - RNA, 22 nt, Human
cucgcuauugucaccagggcug

SEQ ID NO: 1611813 - RNA, 17 nt, Human
cucuaaauucuuucauu

SEQ ID NO: 1611814 - RNA, 13 nt, Human
cucuaaauucuuu

SEQ ID NO: 1611815 - RNA, 22 nt, Human
cucggccucccaaagugcuggg

SEQ ID NO: 1611816 - RNA, 23 nt, Human
cucggccucccaaagugcuggga

SEQ ID NO: 1611817 - RNA, 20 nt, Human
cucgaguuacagacaaagcg

SEQ ID NO: 1611818 - RNA, 16 nt, Human
cucgaguuacagacaa

SEQ ID NO: 1611819 - RNA, 15 nt, Human
cucgcgacaaugcaa

SEQ ID NO: 1611820 - RNA, 19 nt, Human
cucgcuauugucaccaggg

SEQ ID NO: 1611821 - RNA, 20 nt, Human
cuccuucuguccuacucugu

SEQ ID NO: 1611822 - RNA, 15 nt, Human
cuccuucuguccuac

SEQ ID NO: 1611823 - RNA, 14 nt, Human
cuccuucuguccua

SEQ ID NO: 1611824 - RNA, 21 nt, Human
cuccuugaaaacacuguucuc

SEQ ID NO: 1611825 - RNA, 11 nt, Human
cuccuucuucc

SEQ ID NO: 1611826 - RNA, 11 nt, Human
cuccugugugu

SEQ ID NO: 1611827 - RNA, 23 nt, Human
cuccugugucuugcaauggcagc

SEQ ID NO: 1611828 - RNA, 15 nt, Human
cuccugugucuugca

SEQ ID NO: 1611829 - RNA, 11 nt, Human
cuccugccacc

SEQ ID NO: 1611830 - RNA, 21 nt, Human
cuccugcaggcagccaggcca

SEQ ID NO: 1611831 - RNA, 15 nt, Human
cuccugcaggcagcc

SEQ ID NO: 1611832 - RNA, 22 nt, Human
cuccugcaggcagccaggccac

SEQ ID NO: 1611833 - RNA, 16 nt, Human
cuccugcaggcagcca

SEQ ID NO: 1611834 - RNA, 21 nt, Human
cuccuucaccuuuguccccac

SEQ ID NO: 1611835 - RNA, 19 nt, Human
cuccuucaccuuugucccc

SEQ ID NO: 1611836 - RNA, 16 nt, Human
cuccuucaccuuuguc

SEQ ID NO: 1611837 - RNA, 14 nt, Human
cuccuucaccuuug

SEQ ID NO: 1611838 - RNA, 14 nt, Human
cuccugugugugcg

SEQ ID NO: 1611839 - RNA, 23 nt, Human
cucugcauacucauuaggauggc

SEQ ID NO: 1611840 - RNA, 23 nt, Human
cucugcaggucccuaauaaagcu

SEQ ID NO: 1611841 - RNA, 10 nt, Human
cucugcacaa

SEQ ID NO: 1611842 - RNA, 22 nt, Human
cucugcaagaauugaagcagga

SEQ ID NO: 1611843 - RNA, 17 nt, Human
cucugaugaagaggagu

SEQ ID NO: 1611844 - RNA, 20 nt, Human
cucugagacucgcgacaaug

SEQ ID NO: 1611845 - RNA, 21 nt, Human
cucucugcccuaaugcgcagg

SEQ ID NO: 1611846 - RNA, 13 nt, Human
cucucugcccuaa

SEQ ID NO: 1611847 - RNA, 12 nt, Human
cucucugcccua

SEQ ID NO: 1611848 - RNA, 16 nt, Human
cucugagcaaaugugg

SEQ ID NO: 1611849 - RNA, 15 nt, Human
cucugagccuuggga

SEQ ID NO: 1611850 - RNA, 23 nt, Human
cucugcccuccaagaccuucucc

SEQ ID NO: 1611851 - RNA, 16 nt, Human
cucugcccuccaagac

SEQ ID NO: 1611852 - RNA, 15 nt, Human
cucugcccuccaaga

SEQ ID NO: 1611853 - RNA, 14 nt, Human
cucugcccuccaag

SEQ ID NO: 1611854 - RNA, 12 nt, Human
cucugcccuugg

SEQ ID NO: 1611855 - RNA, 12 nt, Human
cucugcccugcg

SEQ ID NO: 1611856 - RNA, 14 nt, Human
cucugccuccucuu

SEQ ID NO: 1611857 - RNA, 11 nt, Human
cucugcccugc

SEQ ID NO: 1611858 - RNA, 23 nt, Human
cucugcccuaaugcgcaggcugg

SEQ ID NO: 1611859 - RNA, 16 nt, Human
cucugccucugacaca

SEQ ID NO: 1611860 - RNA, 14 nt, Human
cucugccucugaca

SEQ ID NO: 1611861 - RNA, 16 nt, Human
cucugccuccucuuca

SEQ ID NO: 1611862 - RNA, 15 nt, Human
cucugccuccucuuc

SEQ ID NO: 1611863 - RNA, 14 nt, Human
cucuggaauuugaa

SEQ ID NO: 1611864 - RNA, 15 nt, Human
cucugcuuuggaaau

SEQ ID NO: 1611865 - RNA, 14 nt, Human
cucuggacaggcau

SEQ ID NO: 1611866 - RNA, 12 nt, Human
cucuggagccca

SEQ ID NO: 1611867 - RNA, 21 nt, Human
cucuccugggcagcugccucc

SEQ ID NO: 1611868 - RNA, 13 nt, Human
cucuccuguaccu

SEQ ID NO: 1611869 - RNA, 14 nt, Human
cucuccuguaccuc

SEQ ID NO: 1611870 - RNA, 15 nt, Human
cucuccuguaccucu

SEQ ID NO: 1611871 - RNA, 13 nt, Human
cucuccccagcaa

SEQ ID NO: 1611872 - RNA, 22 nt, Human
cucuccuguaccucuugagccu

SEQ ID NO: 1611873 - RNA, 17 nt, Human
cucuccuguaccucuug

SEQ ID NO: 1611874 - RNA, 18 nt, Human
cucuccuguaccucuuga

SEQ ID NO: 1611875 - RNA, 13 nt, Human
cucucucaggcca

SEQ ID NO: 1611876 - RNA, 12 nt, Human
cucucucaggcc

SEQ ID NO: 1611877 - RNA, 16 nt, Human
cucucucacuccuuga

SEQ ID NO: 1611878 - RNA, 15 nt, Human
cucucucacuccuug

SEQ ID NO: 1611879 - RNA, 22 nt, Human
cucucugcaggucccuaauaaa

SEQ ID NO: 1611880 - RNA, 19 nt, Human
cucucugcaggucccuaau

SEQ ID NO: 1611881 - RNA, 17 nt, Human
cucucugcaggucccua

SEQ ID NO: 1611882 - RNA, 16 nt, Human
cucucugcaggucccu

SEQ ID NO: 1611883 - RNA, 14 nt, Human
cucucugcaggucc

SEQ ID NO: 1611884 - RNA, 13 nt, Human
cucucugcagguc

SEQ ID NO: 1611885 - RNA, 12 nt, Human
cucucugcaggu

SEQ ID NO: 1611886 - RNA, 18 nt, Human
cucucccaucacuucccu

SEQ ID NO: 1611887 - RNA, 14 nt, Human
cucucccaucacuu

SEQ ID NO: 1611888 - RNA, 20 nt, Human
cucucccaucacuucccuac

SEQ ID NO: 1611889 - RNA, 13 nt, Human
cucucccaucacu

SEQ ID NO: 1611890 - RNA, 13 nt, Human
cucuccagccccu

SEQ ID NO: 1611891 - RNA, 12 nt, Human
cucuccagcccc

SEQ ID NO: 1611892 - RNA, 13 nt, Human
cucuccauuuaau

SEQ ID NO: 1611893 - RNA, 23 nt, Human
cucucaggccagcugcuugggcu

SEQ ID NO: 1611894 - RNA, 16 nt, Human
cucuccacugccuucg

SEQ ID NO: 1611895 - RNA, 13 nt, Human
cucuuaagaagac

SEQ ID NO: 1611896 - RNA, 23 nt, Human
cucuucaguuaagccuuuggaaa

SEQ ID NO: 1611897 - RNA, 20 nt, Human
cucuucaguuaagccuuugg

SEQ ID NO: 1611898 - RNA, 19 nt, Human
cucuucaguuaagccuuug

SEQ ID NO: 1611899 - RNA, 24 nt, Human
cucuuaaaacccaagugccuuagc

SEQ ID NO: 1611900 - RNA, 13 nt, Human
cucuuaaaaccca

SEQ ID NO: 1611901 - RNA, 19 nt, Human
cucuggcagcucagagagg

SEQ ID NO: 1611902 - RNA, 20 nt, Human
cucuggcagcucagagaggg

SEQ ID NO: 1611903 - RNA, 19 nt, Human
cucuguucugcacacagca

SEQ ID NO: 1611904 - RNA, 21 nt, Human
cucuguucugcacacagcacg

SEQ ID NO: 1611905 - RNA, 20 nt, Human
cucuguucugcacacagcac

SEQ ID NO: 1611906 - RNA, 18 nt, Human
cucuggcagcucagagag

SEQ ID NO: 1611907 - RNA, 17 nt, Human
cucuggcagcucagaga

SEQ ID NO: 1611908 - RNA, 19 nt, Human
cucuggagcccacuguacu

SEQ ID NO: 1611909 - RNA, 15 nt, Human
cucuggagcccacug

SEQ ID NO: 1611910 - RNA, 12 nt, Human
cucuucuccagg

SEQ ID NO: 1611911 - RNA, 13 nt, Human
cucuucuccaggc

SEQ ID NO: 1611912 - RNA, 19 nt, Human
cucuucuccacuggaugga

SEQ ID NO: 1611913 - RNA, 14 nt, Human
cucuucuccacugg

SEQ ID NO: 1611914 - RNA, 17 nt, Human
cucuucuccacuggaug

SEQ ID NO: 1611915 - RNA, 15 nt, Human
cucuucuccacugga

SEQ ID NO: 1611916 - RNA, 21 nt, Human
cucuuccaggcugggagagcc

SEQ ID NO: 1611917 - RNA, 22 nt, Human
cucuuccaggcugggagagccu

SEQ ID NO: 1611918 - RNA, 23 nt, Human
cucuuccaggcugggagagccuu

SEQ ID NO: 1611919 - RNA, 16 nt, Human
cucuucuccuuucaca

SEQ ID NO: 1611920 - RNA, 15 nt, Human
cucuucuccuuucac

SEQ ID NO: 1611921 - RNA, 13 nt, Human
cucuucuccuuuc

SEQ ID NO: 1611922 - RNA, 18 nt, Human
cucuuuggacacucacac

SEQ ID NO: 1611923 - RNA, 15 nt, Human
cucuuuggacacuca

SEQ ID NO: 1611924 - RNA, 13 nt, Human
cucuuucccuccc

SEQ ID NO: 1611925 - RNA, 17 nt, Human
cucuuuccaucuacccu

SEQ ID NO: 1611926 - RNA, 15 nt, Human
cucuugaccucaggu

SEQ ID NO: 1611927 - RNA, 13 nt, Human
cucuugaccucag

SEQ ID NO: 1611928 - RNA, 16 nt, Human
cucuugaccucaggug

SEQ ID NO: 1611929 - RNA, 18 nt, Human
cucuucuggguuccuucc

SEQ ID NO: 1611930 - RNA, 18 nt, Human
cucuugaacuccugaccu

SEQ ID NO: 1611931 - RNA, 13 nt, Human
cucuugagccugg

SEQ ID NO: 1611932 - RNA, 19 nt, Human
cucuugguccugcugcagu

SEQ ID NO: 1611933 - RNA, 18 nt, Human
cucuugguccugcugcag

SEQ ID NO: 1611934 - RNA, 16 nt, Human
cugaauacagaggcaa

SEQ ID NO: 1611935 - RNA, 21 nt, Human
cugaagucagaucugccuaag

SEQ ID NO: 1611936 - RNA, 24 nt, Human
cugaagucuuuguacagacaacaa

SEQ ID NO: 1611937 - RNA, 16 nt, Human
cugaagucagaucugc

SEQ ID NO: 1611938 - RNA, 15 nt, Human
cugaagucagaucug

SEQ ID NO: 1611939 - RNA, 16 nt, Human
cugaagucacugcaca

SEQ ID NO: 1611940 - RNA, 17 nt, Human
cugaagucacugcacag

SEQ ID NO: 1611941 - RNA, 22 nt, Human
cugaagucacugcacagugcau

SEQ ID NO: 1611942 - RNA, 14 nt, Human
cugaagucagaucu

SEQ ID NO: 1611943 - RNA, 15 nt, Human
cugaagucacacagu

SEQ ID NO: 1611944 - RNA, 16 nt, Human
cugaagucacacagug

SEQ ID NO: 1611945 - RNA, 14 nt, Human
cugaagucacacag

SEQ ID NO: 1611946 - RNA, 21 nt, Human
cugaacuuggcgcugccccug

SEQ ID NO: 1611947 - RNA, 16 nt, Human
cugaacuuggcgcugc

SEQ ID NO: 1611948 - RNA, 15 nt, Human
cugaacuuggcgcug

SEQ ID NO: 1611949 - RNA, 21 nt, Human
cugaagacucauucuucugua

SEQ ID NO: 1611950 - RNA, 21 nt, Human
cucuuuggucuacacugugcu

SEQ ID NO: 1611951 - RNA, 19 nt, Human
cucuuuggucuacacugug

SEQ ID NO: 1611952 - RNA, 18 nt, Human
cucuuugggccuggcucc

SEQ ID NO: 1611953 - RNA, 21 nt, Human
cugaaccuggguaacuaggga

SEQ ID NO: 1611954 - RNA, 11 nt, Human
cugacccacug

SEQ ID NO: 1611955 - RNA, 21 nt, Human
cugacauuguuggccaaagcc

SEQ ID NO: 1611956 - RNA, 19 nt, Human
cugacaggcaaugcuggcu

SEQ ID NO: 1611957 - RNA, 18 nt, Human
cugacaggcaaugcuggc

SEQ ID NO: 1611958 - RNA, 17 nt, Human
cugacaggcaaugcugg

SEQ ID NO: 1611959 - RNA, 16 nt, Human
cugacaggcaaugcug

SEQ ID NO: 1611960 - RNA, 20 nt, Human
cugacaggcaaugcuggcug

SEQ ID NO: 1611961 - RNA, 21 nt, Human
cugacaggcaaugcuggcugu

SEQ ID NO: 1611962 - RNA, 17 nt, Human
cugacauuguuggccaa

SEQ ID NO: 1611963 - RNA, 21 nt, Human
cugacagacacaggcccggcu

SEQ ID NO: 1611964 - RNA, 19 nt, Human
cugacagacagcccuccau

SEQ ID NO: 1611965 - RNA, 17 nt, Human
cugacagacagcccucc

SEQ ID NO: 1611966 - RNA, 11 nt, Human
cugacaggcaa

SEQ ID NO: 1611967 - RNA, 19 nt, Human
cugacagacacaggcccgg

SEQ ID NO: 1611968 - RNA, 23 nt, Human
cugaauuuaaauagcuuuuuucu

SEQ ID NO: 1611969 - RNA, 18 nt, Human
cugaauuuaaauagcuuu

SEQ ID NO: 1611970 - RNA, 14 nt, Human
cugaauuuaaauag

SEQ ID NO: 1611971 - RNA, 17 nt, Human
cuguuuucucuugagag

SEQ ID NO: 1611972 - RNA, 19 nt, Human
cuguuuuauaauuuuguga

SEQ ID NO: 1611973 - RNA, 23 nt, Human
cuguuuguuucugaaagggacgc

SEQ ID NO: 1611974 - RNA, 21 nt, Human
cuguuuguuucugaaagggac

SEQ ID NO: 1611975 - RNA, 14 nt, Human
cuguuuucucuuga

SEQ ID NO: 1611976 - RNA, 21 nt, Human
cuguuuuauuuuaauucaguu

SEQ ID NO: 1611977 - RNA, 18 nt, Human
cuguuuguuucugaaagg

SEQ ID NO: 1611978 - RNA, 12 nt, Human
cuguuuagauaa

SEQ ID NO: 1611979 - RNA, 14 nt, Human
cuguuuagauaaua

SEQ ID NO: 1611980 - RNA, 17 nt, Human
cugguugaugccuguga

SEQ ID NO: 1611981 - RNA, 12 nt, Human
cuuaacuucaca

SEQ ID NO: 1611982 - RNA, 14 nt, Human
cuuaacuucacaua

SEQ ID NO: 1611983 - RNA, 15 nt, Human
cuuaacuucacauau

SEQ ID NO: 1611984 - RNA, 16 nt, Human
cuuaacuucacauauu

SEQ ID NO: 1611985 - RNA, 17 nt, Human
cuuaacuucacauauug

SEQ ID NO: 1611986 - RNA, 22 nt, Human
cuuaacuucacauauugauuuc

SEQ ID NO: 1611987 - RNA, 18 nt, Human
cuuaaugccacuaaauug

SEQ ID NO: 1611988 - RNA, 14 nt, Human
cuuaaucuaaaugg

SEQ ID NO: 1611989 - RNA, 16 nt, Human
cuuaaucuaaauggaa

SEQ ID NO: 1611990 - RNA, 16 nt, Human
cuuaaguuuauacucu

SEQ ID NO: 1611991 - RNA, 21 nt, Human
cuuaagaagacugcauuauau

SEQ ID NO: 1611992 - RNA, 15 nt, Human
cuuauuuaaugaaag

SEQ ID NO: 1611993 - RNA, 16 nt, Human
cuuaucaaaggacacc

SEQ ID NO: 1611994 - RNA, 14 nt, Human
cuuaucaaaggaca

SEQ ID NO: 1611995 - RNA, 21 nt, Human
cuuaggguuaugauuaaguaa

SEQ ID NO: 1611996 - RNA, 20 nt, Human
cuuaggugauccacucgccu

SEQ ID NO: 1611997 - RNA, 21 nt, Human
cuuagguuggcaaaaaggcag

SEQ ID NO: 1611998 - RNA, 17 nt, Human
cuuagguuggcaaaaag

SEQ ID NO: 1611999 - RNA, 13 nt, Human
cuuauaauuuaaa

SEQ ID NO: 1612000 - RNA, 14 nt, Human
cuuauaauuuaaaa

SEQ ID NO: 1612001 - RNA, 15 nt, Human
cuuauacauuugaua

SEQ ID NO: 1612002 - RNA, 19 nt, Human
cuuacuaguuucccuugca

SEQ ID NO: 1612003 - RNA, 15 nt, Human
cuuacgugaguccug

SEQ ID NO: 1612004 - RNA, 16 nt, Human
cuuacuguacaugaaa

SEQ ID NO: 1612005 - RNA, 20 nt, Human
cuuagaugcaguucugaaga

SEQ ID NO: 1612006 - RNA, 19 nt, Human
cuuagaugcaguucugaag

SEQ ID NO: 1612007 - RNA, 18 nt, Human
cuuagacagucccugcca

SEQ ID NO: 1612008 - RNA, 17 nt, Human
cuuagacagucccugcc

SEQ ID NO: 1612009 - RNA, 19 nt, Human
cuuagacagucccugccaa

SEQ ID NO: 1612010 - RNA, 16 nt, Human
cuuagacagucccugc

SEQ ID NO: 1612011 - RNA, 15 nt, Human
cuuagacagucccug

SEQ ID NO: 1612012 - RNA, 14 nt, Human
cuuagacagucccu

SEQ ID NO: 1612013 - RNA, 15 nt, Human
cuuagaagucacaca

SEQ ID NO: 1612014 - RNA, 17 nt, Human
cuuagaaauugcauuuc

SEQ ID NO: 1612015 - RNA, 15 nt, Human
cuuagaaccuuucuu

SEQ ID NO: 1612016 - RNA, 19 nt, Human
cuuccagauccuggaaauc

SEQ ID NO: 1612017 - RNA, 24 nt, Human
cuuccaggggugggacacccugug

SEQ ID NO: 1612018 - RNA, 22 nt, Human
cuuccaggggugggacacccug

SEQ ID NO: 1612019 - RNA, 14 nt, Human
cuuccagugaggcu

SEQ ID NO: 1612020 - RNA, 15 nt, Human
cuuccagugaggcuc

SEQ ID NO: 1612021 - RNA, 17 nt, Human
cuuccagugaggcucug

SEQ ID NO: 1612022 - RNA, 18 nt, Human
cuucccgcucagcccucc

SEQ ID NO: 1612023 - RNA, 17 nt, Human
cuucccgcucagcccuc

SEQ ID NO: 1612024 - RNA, 16 nt, Human
cuucccgcucagcccu

SEQ ID NO: 1612025 - RNA, 15 nt, Human
cuucccgcucagccc

SEQ ID NO: 1612026 - RNA, 18 nt, Human
cuucagcgguuuauauaa

SEQ ID NO: 1612027 - RNA, 11 nt, Human
cuucagcugac

SEQ ID NO: 1612028 - RNA, 14 nt, Human
cuucaggcucuucu

SEQ ID NO: 1612029 - RNA, 18 nt, Human
cuucaggcucuucuccuu

SEQ ID NO: 1612030 - RNA, 17 nt, Human
cuucaggcucuucuccu

SEQ ID NO: 1612031 - RNA, 16 nt, Human
cuucaggcucuucucc

SEQ ID NO: 1612032 - RNA, 15 nt, Human
cuucaggcucuucuc

SEQ ID NO: 1612033 - RNA, 12 nt, Human
cuucagugccuu

SEQ ID NO: 1612034 - RNA, 11 nt, Human
cuucagugccu

SEQ ID NO: 1612035 - RNA, 14 nt, Human
cuucagugccuuau

SEQ ID NO: 1612036 - RNA, 13 nt, Human
cuucagugccuua

SEQ ID NO: 1612037 - RNA, 18 nt, Human
cuucauuuccugugucuu

SEQ ID NO: 1612038 - RNA, 23 nt, Human
cuuccacaagagcccaggccucc

SEQ ID NO: 1612039 - RNA, 14 nt, Human
cuucauuuggagau

SEQ ID NO: 1612040 - RNA, 13 nt, Human
cuucauuuggaga

SEQ ID NO: 1612041 - RNA, 17 nt, Human
cuucggccuccauccug

SEQ ID NO: 1612042 - RNA, 16 nt, Human
cuucgcuccugugucu

SEQ ID NO: 1612043 - RNA, 19 nt, Human
cuucggccuccauccugag

SEQ ID NO: 1612044 - RNA, 18 nt, Human
cuucggccuccauccuga

SEQ ID NO: 1612045 - RNA, 21 nt, Human
cuucgggaggucgaggcagga

SEQ ID NO: 1612046 - RNA, 20 nt, Human
cuucgggaggucgaggcagg

SEQ ID NO: 1612047 - RNA, 16 nt, Human
cuucgauacaccgggc

SEQ ID NO: 1612048 - RNA, 19 nt, Human
cuuccuuggacucauuuua

SEQ ID NO: 1612049 - RNA, 20 nt, Human
cuuccuuggacucauuuuaa

SEQ ID NO: 1612050 - RNA, 15 nt, Human
cuucgcuccuguguc

SEQ ID NO: 1612051 - RNA, 14 nt, Human
cuucgcuccugugu

SEQ ID NO: 1612052 - RNA, 13 nt, Human
cuucgcuccugug

SEQ ID NO: 1612053 - RNA, 17 nt, Human
cuucugccauauucugu

SEQ ID NO: 1612054 - RNA, 12 nt, Human
cuucucuccagc

SEQ ID NO: 1612055 - RNA, 20 nt, Human
cuucugccauuucugagauc

SEQ ID NO: 1612056 - RNA, 21 nt, Human
cuucugccauauucuguuggc

SEQ ID NO: 1612057 - RNA, 17 nt, Human
cuucugcuucagccucc

SEQ ID NO: 1612058 - RNA, 16 nt, Human
cuucugcuucagccuc

SEQ ID NO: 1612059 - RNA, 18 nt, Human
cuucugcuucagccuccc

SEQ ID NO: 1612060 - RNA, 22 nt, Human
cuucuccuucaccuuugucccc

SEQ ID NO: 1612061 - RNA, 17 nt, Human
cuucuccuuucacaacc

SEQ ID NO: 1612062 - RNA, 14 nt, Human
cuucuccuuucaca

SEQ ID NO: 1612063 - RNA, 22 nt, Human
cuucuccuuucacaaccuucug

SEQ ID NO: 1612064 - RNA, 20 nt, Human
cuucuccuuucacaaccuuc

SEQ ID NO: 1612065 - RNA, 15 nt, Human
cuucuccacccugcu

SEQ ID NO: 1612066 - RNA, 14 nt, Human
cuucuccacccugc

SEQ ID NO: 1612067 - RNA, 16 nt, Human
cuucuccacccugcuc

SEQ ID NO: 1612068 - RNA, 17 nt, Human
cuucuccaggcuguauc

SEQ ID NO: 1612069 - RNA, 20 nt, Human
gaaaaguauguuagugcaaa

SEQ ID NO: 1612070 - RNA, 14 nt, Human
gaaaaguauguuag

SEQ ID NO: 1612071 - RNA, 19 nt, Human
gaaaauaacaauaaaagac

SEQ ID NO: 1612072 - RNA, 22 nt, Human
gaaaagucaaggguaggguggg

SEQ ID NO: 1612073 - RNA, 14 nt, Human
gaaaacguggcugc

SEQ ID NO: 1612074 - RNA, 19 nt, Human
gaaaacaugcuacacacug

SEQ ID NO: 1612075 - RNA, 22 nt, Human
gaaaacacuguucucugcccuc

SEQ ID NO: 1612076 - RNA, 14 nt, Human
gaaaacaaggauga

SEQ ID NO: 1612077 - RNA, 19 nt, Human
gaaaacacuguucucugcc

SEQ ID NO: 1612078 - RNA, 21 nt, Human
gaaaacacuguucucugcccu

SEQ ID NO: 1612079 - RNA, 20 nt, Human
gaaaacacuguucucugccc

SEQ ID NO: 1612080 - RNA, 18 nt, Human
gaaaacaugcuacacacu

SEQ ID NO: 1612081 - RNA, 16 nt, Human
cuuuuuuagaguugau

SEQ ID NO: 1612082 - RNA, 15 nt, Human
cuuuucuguuugcua

SEQ ID NO: 1612083 - RNA, 18 nt, Human
cuuuucugauccaguuuu

SEQ ID NO: 1612084 - RNA, 16 nt, Human
cuuuucugauccaguu

SEQ ID NO: 1612085 - RNA, 21 nt, Human
cuuuguuuguugucagcugaa

SEQ ID NO: 1612086 - RNA, 17 nt, Human
cuuuguuuuacugucuu

SEQ ID NO: 1612087 - RNA, 11 nt, Human
cuuuucugauc

SEQ ID NO: 1612088 - RNA, 15 nt, Human
cuuuucugauccagu

SEQ ID NO: 1612089 - RNA, 14 nt, Human
cuuuucugauccag

SEQ ID NO: 1612090 - RNA, 22 nt, Human
cuuuuguucuugguuuguaaau

SEQ ID NO: 1612091 - RNA, 15 nt, Human
cuuuuuuaaauaaau

SEQ ID NO: 1612092 - RNA, 21 nt, Human
cuuuuucauuauuuuauuaug

SEQ ID NO: 1612093 - RNA, 14 nt, Human
cuuuuucauuauuu

SEQ ID NO: 1612094 - RNA, 13 nt, Human
cuuuuucauuauu

SEQ ID NO: 1612095 - RNA, 12 nt, Human
cuuuuucauuau

SEQ ID NO: 1612096 - RNA, 12 nt, Human
cuuuggaaagac

SEQ ID NO: 1612097 - RNA, 23 nt, Human
cuuuggaaagacuuuuccaaccc

SEQ ID NO: 1612098 - RNA, 16 nt, Human
cuuuggauaauaagga

SEQ ID NO: 1612099 - RNA, 14 nt, Human
cuuugcuugaaaga

SEQ ID NO: 1612100 - RNA, 13 nt, Human
cuuugaccucugc

SEQ ID NO: 1612101 - RNA, 19 nt, Human
cuuugacaaagguaaauca

SEQ ID NO: 1612102 - RNA, 12 nt, Human
cuuugugauuuu

SEQ ID NO: 1612103 - RNA, 13 nt, Human
cuuuguggcuucc

SEQ ID NO: 1612104 - RNA, 21 nt, Human
cuuuguucuggcucuuccagg

SEQ ID NO: 1612105 - RNA, 16 nt, Human
cuuuguucuggcucuu

SEQ ID NO: 1612106 - RNA, 23 nt, Human
cuuugugaggaagccgcuggggc

SEQ ID NO: 1612107 - RNA, 17 nt, Human
cuuugggccuggcuccc

SEQ ID NO: 1612108 - RNA, 16 nt, Human
cuuuccucuuuggucu

SEQ ID NO: 1612109 - RNA, 13 nt, Human
cuuucugaaauaa

SEQ ID NO: 1612110 - RNA, 17 nt, Human
cuuugacaaagguaaau

SEQ ID NO: 1612111 - RNA, 19 nt, Human
cuuucuuuuuuuuuuuuga

SEQ ID NO: 1612112 - RNA, 16 nt, Human
cuuucuuccucugcug

SEQ ID NO: 1612113 - RNA, 16 nt, Human
cuuggacucauuuuaa

SEQ ID NO: 1612114 - RNA, 22 nt, Human
cuuggagccaauggagacuguc

SEQ ID NO: 1612115 - RNA, 20 nt, Human
cuugggccacugugaagaga

SEQ ID NO: 1612116 - RNA, 18 nt, Human
cuuggggcugaugcaguu

SEQ ID NO: 1612117 - RNA, 16 nt, Human
cuuggggcugaugcag

SEQ ID NO: 1612118 - RNA, 20 nt, Human
cuugguuuguaaauuaacuu

SEQ ID NO: 1612119 - RNA, 14 nt, Human
cuugguuuguaaau

SEQ ID NO: 1612120 - RNA, 15 nt, Human
cuugguuuguaaauu

SEQ ID NO: 1612121 - RNA, 15 nt, Human
cuuguggucccaccc

SEQ ID NO: 1612122 - RNA, 19 nt, Human
cuuguggucccaccccaca

SEQ ID NO: 1612123 - RNA, 16 nt, Human
cuuguggucccacccc

SEQ ID NO: 1612124 - RNA, 16 nt, Human
cuuguuaagauaguua

SEQ ID NO: 1612125 - RNA, 16 nt, Human
cuuguuagaucuaguu

SEQ ID NO: 1612126 - RNA, 13 nt, Human
cuuguuagaucua

SEQ ID NO: 1612127 - RNA, 19 nt, Human
cuuuaccuuuuuuauacau

SEQ ID NO: 1612128 - RNA, 20 nt, Human
cuuuaccuuuuuuauacaua

SEQ ID NO: 1612129 - RNA, 17 nt, Human
cuuuaccuuuuuuauac

SEQ ID NO: 1612130 - RNA, 21 nt, Human
cuuuaaaaagcuccaaaugca

SEQ ID NO: 1612131 - RNA, 22 nt, Human
cuuuaaaaaauuaaucugggcc

SEQ ID NO: 1612132 - RNA, 18 nt, Human
cuugcccuggugccucac

SEQ ID NO: 1612133 - RNA, 14 nt, Human
cuugcccuguuaaa

SEQ ID NO: 1612134 - RNA, 15 nt, Human
cuugccaucccuccc

SEQ ID NO: 1612135 - RNA, 16 nt, Human
cuugccaucccucccu

SEQ ID NO: 1612136 - RNA, 19 nt, Human
cuugccaucccucccucca

SEQ ID NO: 1612137 - RNA, 17 nt, Human
cuugccaucccucccuc

SEQ ID NO: 1612138 - RNA, 14 nt, Human
cuugccaucccucc

SEQ ID NO: 1612139 - RNA, 13 nt, Human
cuugccacugccu

SEQ ID NO: 1612140 - RNA, 14 nt, Human
cuugcaugaggcua

SEQ ID NO: 1612141 - RNA, 13 nt, Human
cuugcaugaggcu

SEQ ID NO: 1612142 - RNA, 17 nt, Human
cuugcaugaggcuagug

SEQ ID NO: 1612143 - RNA, 22 nt, Human
cuugcccuguuaaaagaugaaa

SEQ ID NO: 1612144 - RNA, 22 nt, Human
cuugcucugcugacagacacag

SEQ ID NO: 1612145 - RNA, 19 nt, Human
cuugcucuugaugccuggc

SEQ ID NO: 1612146 - RNA, 18 nt, Human
cuugcucuugaugccugg

SEQ ID NO: 1612147 - RNA, 17 nt, Human
cuugcucuugaugccug

SEQ ID NO: 1612148 - RNA, 20 nt, Human
cuugcuugauuguauggugg

SEQ ID NO: 1612149 - RNA, 20 nt, Human
cuuggaagcuccgcuuucua

SEQ ID NO: 1612150 - RNA, 15 nt, Human
cuugagccugggagg

SEQ ID NO: 1612151 - RNA, 12 nt, Human
cuugagccuggg

SEQ ID NO: 1612152 - RNA, 17 nt, Human
cuugaggguugggcugg

SEQ ID NO: 1612153 - RNA, 15 nt, Human
cuugaggguugggcu

SEQ ID NO: 1612154 - RNA, 16 nt, Human
cuugagccugggaggu

SEQ ID NO: 1612155 - RNA, 17 nt, Human
cuucuggcacuuggaga

SEQ ID NO: 1612156 - RNA, 21 nt, Human
cuugcagacucuacagaggcc

SEQ ID NO: 1612157 - RNA, 18 nt, Human
cuugcaauggcagccuug

SEQ ID NO: 1612158 - RNA, 17 nt, Human
cuugcaauggcagccuu

SEQ ID NO: 1612159 - RNA, 16 nt, Human
cuugcaauggcagccu

SEQ ID NO: 1612160 - RNA, 15 nt, Human
cuugcaauggcagcc

SEQ ID NO: 1612161 - RNA, 19 nt, Human
cuugaguugauucagcucu

SEQ ID NO: 1612162 - RNA, 18 nt, Human
cuugaguugauucagcuc

SEQ ID NO: 1612163 - RNA, 20 nt, Human
cuugaguugauucagcucug

SEQ ID NO: 1612164 - RNA, 21 nt, Human
cuugaguugauucagcucugc

SEQ ID NO: 1612165 - RNA, 16 nt, Human
gacaucaacugcauca

SEQ ID NO: 1612166 - RNA, 23 nt, Human
gacaucaacugcaucaagaugug

SEQ ID NO: 1612167 - RNA, 22 nt, Human
gacaggcauguucucugaggac

SEQ ID NO: 1612168 - RNA, 14 nt, Human
gacagggcauggcc

SEQ ID NO: 1612169 - RNA, 22 nt, Human
gacagggcauggccagguggcc

SEQ ID NO: 1612170 - RNA, 20 nt, Human
gacagggcauggccaggugg

SEQ ID NO: 1612171 - RNA, 15 nt, Human
gacagggcauggcca

SEQ ID NO: 1612172 - RNA, 23 nt, Human
gacaggaugguucccuugaugaa

SEQ ID NO: 1612173 - RNA, 18 nt, Human
gacaggcaagcaccuccu

SEQ ID NO: 1612174 - RNA, 17 nt, Human
gacaggcaagcaccucc

SEQ ID NO: 1612175 - RNA, 13 nt, Human
gacaggcaagcac

SEQ ID NO: 1612176 - RNA, 19 nt, Human
gacaggcaaugcuggcugu

SEQ ID NO: 1612177 - RNA, 21 nt, Human
gacaggcaagcaccuccugcc

SEQ ID NO: 1612178 - RNA, 20 nt, Human
gacaggcaagcaccuccugc

SEQ ID NO: 1612179 - RNA, 21 nt, Human
gacaggcauguucucugagga

SEQ ID NO: 1612180 - RNA, 23 nt, Human
gacaggcaaugcuggcuguuggc

SEQ ID NO: 1612181 - RNA, 24 nt, Human
gacaggcaaugcuggcuguuggcu

SEQ ID NO: 1612182 - RNA, 16 nt, Human
gacagagugagacucu

SEQ ID NO: 1612183 - RNA, 21 nt, Human
gacagagucucacuguugccc

SEQ ID NO: 1612184 - RNA, 19 nt, Human
gacagagugagacucuguc

SEQ ID NO: 1612185 - RNA, 13 nt, Human
gacagagggggug

SEQ ID NO: 1612186 - RNA, 23 nt, Human
gacagaggcagccccauucugcc

SEQ ID NO: 1612187 - RNA, 20 nt, Human
gacagagcuacacaggggaa

SEQ ID NO: 1612188 - RNA, 12 nt, Human
gacagaggcagc

SEQ ID NO: 1612189 - RNA, 16 nt, Human
gacagacagcccucca

SEQ ID NO: 1612190 - RNA, 18 nt, Human
gaauuucccaaagcagug

SEQ ID NO: 1612191 - RNA, 16 nt, Human
gaauuucccaaagcag

SEQ ID NO: 1612192 - RNA, 22 nt, Human
gaauuucccaaagcagugcaug

SEQ ID NO: 1612193 - RNA, 22 nt, Human
gacacgaauauugcugauggug

SEQ ID NO: 1612194 - RNA, 22 nt, Human
gacagacacaggcccggcucca

SEQ ID NO: 1612195 - RNA, 20 nt, Human
gacagacacaggcccggcuc

SEQ ID NO: 1612196 - RNA, 17 nt, Human
gacagacacaggcccgg

SEQ ID NO: 1612197 - RNA, 16 nt, Human
gacacuagaagauuuu

SEQ ID NO: 1612198 - RNA, 18 nt, Human
gaccacugcagaagacag

SEQ ID NO: 1612199 - RNA, 16 nt, Human
gaccacugcagaagac

SEQ ID NO: 1612200 - RNA, 22 nt, Human
gaccagacaccuugacagggca

SEQ ID NO: 1612201 - RNA, 21 nt, Human
gaccagcaccaucucuccucc

SEQ ID NO: 1612202 - RNA, 20 nt, Human
gaccagcaccaucucuccuc

SEQ ID NO: 1612203 - RNA, 24 nt, Human
gaccagacaccuugacagggcaca

SEQ ID NO: 1612204 - RNA, 23 nt, Human
gaccagacaccuugacagggcac

SEQ ID NO: 1612205 - RNA, 21 nt, Human
gaccagagcugccaccugccu

SEQ ID NO: 1612206 - RNA, 18 nt, Human
gaccacaaaacuuuucua

SEQ ID NO: 1612207 - RNA, 22 nt, Human
gaccacacuccagcugggauca

SEQ ID NO: 1612208 - RNA, 16 nt, Human
gaccacacuccagcug

SEQ ID NO: 1612209 - RNA, 14 nt, Human
gaccacacuccagc

SEQ ID NO: 1612210 - RNA, 19 nt, Human
gacccaaaaggcagaagca

SEQ ID NO: 1612211 - RNA, 18 nt, Human
gacccaaaaggcagaagc

SEQ ID NO: 1612212 - RNA, 20 nt, Human
gacccaaaaggcagaagcaa

SEQ ID NO: 1612213 - RNA, 19 nt, Human
gacccacuggacucaccuc

SEQ ID NO: 1612214 - RNA, 20 nt, Human
gacccaugcugcccugugag

SEQ ID NO: 1612215 - RNA, 19 nt, Human
gacccaugcugcccuguga

SEQ ID NO: 1612216 - RNA, 18 nt, Human
gacccaugcugcccugug

SEQ ID NO: 1612217 - RNA, 13 nt, Human
gacccaugcugcc

SEQ ID NO: 1612218 - RNA, 22 nt, Human
gacccugcccugugggccccca

SEQ ID NO: 1612219 - RNA, 20 nt, Human
gacccugcccugugggcccc

SEQ ID NO: 1612220 - RNA, 18 nt, Human
gacccugaggcccagagg

SEQ ID NO: 1612221 - RNA, 16 nt, Human
gacccugaggcccaga

SEQ ID NO: 1612222 - RNA, 12 nt, Human
gacccugaggcc

SEQ ID NO: 1612223 - RNA, 11 nt, Human
gacccugaggc

SEQ ID NO: 1612224 - RNA, 16 nt, Human
gacugaggggagggga

SEQ ID NO: 1612225 - RNA, 18 nt, Human
gacugaguacguugugca

SEQ ID NO: 1612226 - RNA, 13 nt, Human
gacugagaaauuu

SEQ ID NO: 1612227 - RNA, 20 nt, Human
gacugccagucccccugccc

SEQ ID NO: 1612228 - RNA, 24 nt, Human
gacugcauuauauuuauuacugua

SEQ ID NO: 1612229 - RNA, 16 nt, Human
gacugauucuucagca

SEQ ID NO: 1612230 - RNA, 13 nt, Human
gacugauucuuca

SEQ ID NO: 1612231 - RNA, 21 nt, Human
gacuccugcaggcagccaggc

SEQ ID NO: 1612232 - RNA, 20 nt, Human
gacuccugcaggcagccagg

SEQ ID NO: 1612233 - RNA, 19 nt, Human
gacuccugcaggcagccag

SEQ ID NO: 1612234 - RNA, 18 nt, Human
gacuccugcaggcagcca

SEQ ID NO: 1612235 - RNA, 15 nt, Human
gacuacaggcaccca

SEQ ID NO: 1612236 - RNA, 13 nt, Human
gacuacaggcacc

SEQ ID NO: 1612237 - RNA, 18 nt, Human
gacuacaggcacccacca

SEQ ID NO: 1612238 - RNA, 15 nt, Human
gacucuacagaggcc

SEQ ID NO: 1612239 - RNA, 21 nt, Human
gacucuacagaggccaugggc

SEQ ID NO: 1612240 - RNA, 11 nt, Human
gacugagaaau

SEQ ID NO: 1612241 - RNA, 22 nt, Human
gacuggcacaguuuucugagaa

SEQ ID NO: 1612242 - RNA, 18 nt, Human
gacuggcacaguuuucug

SEQ ID NO: 1612243 - RNA, 14 nt, Human
gacuggcacaguuu

SEQ ID NO: 1612244 - RNA, 23 nt, Human
gacuggccaagguuuggggaaga

SEQ ID NO: 1612245 - RNA, 15 nt, Human
gacuuacuguacaug

SEQ ID NO: 1612246 - RNA, 16 nt, Human
gacuuacuguacauga

SEQ ID NO: 1612247 - RNA, 12 nt, Human
gacuuacuguac

SEQ ID NO: 1612248 - RNA, 18 nt, Human
gacuuacuguacaugaaa

SEQ ID NO: 1612249 - RNA, 23 nt, Human
gacuuacuguacaugaaaacaca

SEQ ID NO: 1612250 - RNA, 20 nt, Human
gacuucaucccucuggggcu

SEQ ID NO: 1612251 - RNA, 12 nt, Human
gacuucaucccu

SEQ ID NO: 1612252 - RNA, 14 nt, Human
gacuucagcucugu

SEQ ID NO: 1612253 - RNA, 15 nt, Human
gacuuagcugggaga

SEQ ID NO: 1612254 - RNA, 14 nt, Human
gaccuugaacuggg

SEQ ID NO: 1612255 - RNA, 21 nt, Human
gaccuucuccuucaccuuugu

SEQ ID NO: 1612256 - RNA, 20 nt, Human
gaccuucuccuucaccuuug

SEQ ID NO: 1612257 - RNA, 16 nt, Human
gaccuucuccuucacc

SEQ ID NO: 1612258 - RNA, 15 nt, Human
gaccuucuccuucac

SEQ ID NO: 1612259 - RNA, 14 nt, Human
gaccuucuccuuca

SEQ ID NO: 1612260 - RNA, 15 nt, Human
gacccuugugguccc

SEQ ID NO: 1612261 - RNA, 23 nt, Human
gacccuugccgucuaccugaggg

SEQ ID NO: 1612262 - RNA, 20 nt, Human
gacccuugccgucuaccuga

SEQ ID NO: 1612263 - RNA, 19 nt, Human
gacccuugccgucuaccug

SEQ ID NO: 1612264 - RNA, 14 nt, Human
gacggagucccacc

SEQ ID NO: 1612265 - RNA, 13 nt, Human
gacggagucccac

SEQ ID NO: 1612266 - RNA, 22 nt, Human
gacgcugugcugcccugcccac

SEQ ID NO: 1612267 - RNA, 20 nt, Human
gaccuuucaauaggaaaaac

SEQ ID NO: 1612268 - RNA, 19 nt, Human
gaccuuucaauaggaaaaa

SEQ ID NO: 1612269 - RNA, 11 nt, Human
gaccuuucaau

SEQ ID NO: 1612270 - RNA, 15 nt, Human
gacguguuaugacuc

SEQ ID NO: 1612271 - RNA, 14 nt, Human
gacguguuaugacu

SEQ ID NO: 1612272 - RNA, 11 nt, Human
gacguguuaug

SEQ ID NO: 1612273 - RNA, 23 nt, Human
gacuaacuugucuuuggacccug

SEQ ID NO: 1612274 - RNA, 16 nt, Human
gacuaacuugucuuug

SEQ ID NO: 1612275 - RNA, 18 nt, Human
gaagauguagaggagaaa

SEQ ID NO: 1612276 - RNA, 15 nt, Human
gaagauacugaaaua

SEQ ID NO: 1612277 - RNA, 20 nt, Human
gaagauaauauuaaggaaga

SEQ ID NO: 1612278 - RNA, 20 nt, Human
gaagagguuuuaaagcuucc

SEQ ID NO: 1612279 - RNA, 18 nt, Human
gaagcauuuacuuugugu

SEQ ID NO: 1612280 - RNA, 17 nt, Human
gaagcauuuacuuugug

SEQ ID NO: 1612281 - RNA, 23 nt, Human
gaagcccuucuaccuuccugcaa

SEQ ID NO: 1612282 - RNA, 19 nt, Human
gaagcccaggaaaggcucc

SEQ ID NO: 1612283 - RNA, 16 nt, Human
gaagcccaggaaaggc

SEQ ID NO: 1612284 - RNA, 15 nt, Human
gaagcccaggaaagg

SEQ ID NO: 1612285 - RNA, 13 nt, Human
gaagcccaggaaa

SEQ ID NO: 1612286 - RNA, 22 nt, Human
gaagccagcaggcucucaggcc

SEQ ID NO: 1612287 - RNA, 21 nt, Human
gaagccagcaggcucucaggc

SEQ ID NO: 1612288 - RNA, 20 nt, Human
gaagccagcaggcucucagg

SEQ ID NO: 1612289 - RNA, 19 nt, Human
gaagacugcauuauauuua

SEQ ID NO: 1612290 - RNA, 12 nt, Human
gaagaacugaaa

SEQ ID NO: 1612291 - RNA, 13 nt, Human
gaagacuuuggaa

SEQ ID NO: 1612292 - RNA, 11 nt, Human
gaagacuuugg

SEQ ID NO: 1612293 - RNA, 23 nt, Human
gaacuuugaccucugcagcaaua

SEQ ID NO: 1612294 - RNA, 21 nt, Human
gaacucaucuagguaaauuac

SEQ ID NO: 1612295 - RNA, 20 nt, Human
gaacucaucuagguaaauua

SEQ ID NO: 1612296 - RNA, 22 nt, Human
gaacucaucuagguaaauuaca

SEQ ID NO: 1612297 - RNA, 17 nt, Human
gaagacuuuggaaagag

SEQ ID NO: 1612298 - RNA, 14 nt, Human
gaagacuuuggaaa

SEQ ID NO: 1612299 - RNA, 20 nt, Human
gaagacuuuucuuucagcca

SEQ ID NO: 1612300 - RNA, 19 nt, Human
gaagagaaugcacaaacag

SEQ ID NO: 1612301 - RNA, 14 nt, Human
gaacuacugaggau

SEQ ID NO: 1612302 - RNA, 22 nt, Human
gaaccuuuugagugccuuacac

SEQ ID NO: 1612303 - RNA, 15 nt, Human
gaacgcguugaaauu

SEQ ID NO: 1612304 - RNA, 21 nt, Human
gaaccuuuugagugccuuaca

SEQ ID NO: 1612305 - RNA, 19 nt, Human
gaaccuuuugagugccuua

SEQ ID NO: 1612306 - RNA, 18 nt, Human
gaaccuuuugagugccuu

SEQ ID NO: 1612307 - RNA, 14 nt, Human
gaacaucccuccug

SEQ ID NO: 1612308 - RNA, 18 nt, Human
gaaauuguauuacaaauc

SEQ ID NO: 1612309 - RNA, 17 nt, Human
gaaauuuauaaacuuuu

SEQ ID NO: 1612310 - RNA, 16 nt, Human
gaaauuuauaaacuuu

SEQ ID NO: 1612311 - RNA, 14 nt, Human
gaacacucugagac

SEQ ID NO: 1612312 - RNA, 13 nt, Human
gaacacucugaga

SEQ ID NO: 1612313 - RNA, 16 nt, Human
gaaauuguauuacaaa

SEQ ID NO: 1612314 - RNA, 23 nt, Human
gaaaauaaaucaaugcuauaacu

SEQ ID NO: 1612315 - RNA, 20 nt, Human
gaacagugauuaccagggac

SEQ ID NO: 1612316 - RNA, 16 nt, Human
gaacagugauuaccag

SEQ ID NO: 1612317 - RNA, 15 nt, Human
gaacacucugagacu

SEQ ID NO: 1612318 - RNA, 15 nt, Human
gaacauaaaauacaa

SEQ ID NO: 1612319 - RNA, 16 nt, Human
gaauauuuuaacuucc

SEQ ID NO: 1612320 - RNA, 13 nt, Human
gaauaccuguccc

SEQ ID NO: 1612321 - RNA, 15 nt, Human
gaauaccuguccccc

SEQ ID NO: 1612322 - RNA, 23 nt, Human
gaauagcugggacuacaggugug

SEQ ID NO: 1612323 - RNA, 22 nt, Human
gaauagcugggacuacaggugu

SEQ ID NO: 1612324 - RNA, 20 nt, Human
gaauacucuuauaucuauau

SEQ ID NO: 1612325 - RNA, 21 nt, Human
gaauacagaggcaacugcauu

SEQ ID NO: 1612326 - RNA, 17 nt, Human
gaauaauacaguaucuc

SEQ ID NO: 1612327 - RNA, 19 nt, Human
gaauaacauguaauuaagu

SEQ ID NO: 1612328 - RNA, 18 nt, Human
gaauaacauguaauuaag

SEQ ID NO: 1612329 - RNA, 20 nt, Human
gaaguuugagaucagccugg

SEQ ID NO: 1612330 - RNA, 14 nt, Human
gaaguauccuucag

SEQ ID NO: 1612331 - RNA, 16 nt, Human
gaaguauccuucagcc

SEQ ID NO: 1612332 - RNA, 22 nt, Human
gaaguccaagcauuuagaugua

SEQ ID NO: 1612333 - RNA, 12 nt, Human
gaaguccaagca

SEQ ID NO: 1612334 - RNA, 15 nt, Human
gaagucuuagaugua

SEQ ID NO: 1612335 - RNA, 21 nt, Human
gaaguuucugccgcagcccug

SEQ ID NO: 1612336 - RNA, 18 nt, Human
gaagucuuagauguauau

SEQ ID NO: 1612337 - RNA, 19 nt, Human
gaagggggcugggacaugg

SEQ ID NO: 1612338 - RNA, 16 nt, Human
gaagggggcugggaca

SEQ ID NO: 1612339 - RNA, 22 nt, Human
gaaguaauaugcacacauuuuu

SEQ ID NO: 1612340 - RNA, 18 nt, Human
gaaguacuauaauuuacc

SEQ ID NO: 1612341 - RNA, 15 nt, Human
gaaguacuggagaaa

SEQ ID NO: 1612342 - RNA, 11 nt, Human
gaauucuguau

SEQ ID NO: 1612343 - RNA, 19 nt, Human
gaauucucuaguuugauua

SEQ ID NO: 1612344 - RNA, 14 nt, Human
gaauugaagcagga

SEQ ID NO: 1612345 - RNA, 14 nt, Human
gaauugaaaaacca

SEQ ID NO: 1612346 - RNA, 17 nt, Human
gaauucucagaaucuca

SEQ ID NO: 1612347 - RNA, 17 nt, Human
gaauucucuaguuugau

SEQ ID NO: 1612348 - RNA, 21 nt, Human
gaaugucagugugacugaucu

SEQ ID NO: 1612349 - RNA, 20 nt, Human
gaaugucagugugacugauc

SEQ ID NO: 1612350 - RNA, 15 nt, Human
gaauuucccaaagca

SEQ ID NO: 1612351 - RNA, 22 nt, Human
gaauuuauuggcuuuucugauc

SEQ ID NO: 1612352 - RNA, 21 nt, Human
gaauuuauuggcuuuucugau

SEQ ID NO: 1612353 - RNA, 20 nt, Human
gaauuuauuggcuuuucuga

SEQ ID NO: 1612354 - RNA, 16 nt, Human
gaauuuauuggcuuuu

SEQ ID NO: 1612355 - RNA, 14 nt, Human
gaauuuauuggcuu

SEQ ID NO: 1612356 - RNA, 22 nt, Human
gaauuguaaggaaugauuaauu

SEQ ID NO: 1612357 - RNA, 22 nt, Human
gaauuuaaauagcuuuuuucuc

SEQ ID NO: 1612358 - RNA, 23 nt, Human
gaauuguguuuauaauuuuaaau

SEQ ID NO: 1612359 - RNA, 15 nt, Human
gaauuguguuuauaa

SEQ ID NO: 1612360 - RNA, 14 nt, Human
gaaugucaguguga

SEQ ID NO: 1612361 - RNA, 22 nt, Human
gaaugguuuucaaaauaaaaau

SEQ ID NO: 1612362 - RNA, 23 nt, Human
gaaugguccgugcuaaggacuug

SEQ ID NO: 1612363 - RNA, 22 nt, Human
gaaugguccgugcuaaggacuu

SEQ ID NO: 1612364 - RNA, 20 nt, Human
gaaugguccgugcuaaggac

SEQ ID NO: 1612365 - RNA, 23 nt, Human
gaaugaaccacaucuugcucugc

SEQ ID NO: 1612366 - RNA, 22 nt, Human
gaaugaaccacaucuugcucug

SEQ ID NO: 1612367 - RNA, 19 nt, Human
gaaugaagauacugaaaua

SEQ ID NO: 1612368 - RNA, 21 nt, Human
gaaugaagauacugaaauaaa

SEQ ID NO: 1612369 - RNA, 18 nt, Human
gaaugaagauacugaaau

SEQ ID NO: 1612370 - RNA, 17 nt, Human
gaaugaagauacugaaa

SEQ ID NO: 1612371 - RNA, 14 nt, Human
gaaugcauaaaaug

SEQ ID NO: 1612372 - RNA, 13 nt, Human
gaaugcuuuagga

SEQ ID NO: 1612373 - RNA, 20 nt, Human
gaguucauacccuguuacca

SEQ ID NO: 1612374 - RNA, 12 nt, Human
gaguguugaaac

SEQ ID NO: 1612375 - RNA, 13 nt, Human
gauaaacaguagu

SEQ ID NO: 1612376 - RNA, 13 nt, Human
gaguucugguucc

SEQ ID NO: 1612377 - RNA, 14 nt, Human
gauaauacaccacu

SEQ ID NO: 1612378 - RNA, 22 nt, Human
gauaauaaggaaaaguuuaaua

SEQ ID NO: 1612379 - RNA, 12 nt, Human
gauaauacacca

SEQ ID NO: 1612380 - RNA, 23 nt, Human
gauaauacaccacuacauucugu

SEQ ID NO: 1612381 - RNA, 24 nt, Human
gauaauacaccacuacauucuguu

SEQ ID NO: 1612382 - RNA, 21 nt, Human
gauaauaaggaaaaguuuaau

SEQ ID NO: 1612383 - RNA, 20 nt, Human
gauaauaaggaaaaguuuaa

SEQ ID NO: 1612384 - RNA, 17 nt, Human
gauaggucagugcaaau

SEQ ID NO: 1612385 - RNA, 17 nt, Human
gauacaaaagcauguga

SEQ ID NO: 1612386 - RNA, 16 nt, Human
gauacaaaagcaugug

SEQ ID NO: 1612387 - RNA, 18 nt, Human
gauaauucuagcuuugag

SEQ ID NO: 1612388 - RNA, 20 nt, Human
gauagugucccacggugccu

SEQ ID NO: 1612389 - RNA, 18 nt, Human
gauauaugcucugcaugu

SEQ ID NO: 1612390 - RNA, 23 nt, Human
gaucagcuuauugucuagugaaa

SEQ ID NO: 1612391 - RNA, 23 nt, Human
gaucacggcucacugcagccuca

SEQ ID NO: 1612392 - RNA, 16 nt, Human
gaucacauguggacuu

SEQ ID NO: 1612393 - RNA, 13 nt, Human
gaucuuuaaaaua

SEQ ID NO: 1612394 - RNA, 16 nt, Human
gaugaaauguaaauac

SEQ ID NO: 1612395 - RNA, 21 nt, Human
gaugaaaugaggucagagccu

SEQ ID NO: 1612396 - RNA, 15 nt, Human
gaugaaaugagguca

SEQ ID NO: 1612397 - RNA, 19 nt, Human
gaucuucuuuauaauucua

SEQ ID NO: 1612398 - RNA, 22 nt, Human
gaucuucuguggguuucuaaag

SEQ ID NO: 1612399 - RNA, 23 nt, Human
gaugcaccagcccuuagcaggga

SEQ ID NO: 1612400 - RNA, 15 nt, Human
gaugcaccagcccuu

SEQ ID NO: 1612401 - RNA, 14 nt, Human
gaugagaggaaauc

SEQ ID NO: 1612402 - RNA, 20 nt, Human
gaugaccuugaaugaugcca

SEQ ID NO: 1612403 - RNA, 18 nt, Human
gaugaccuugaaugaugc

SEQ ID NO: 1612404 - RNA, 16 nt, Human
gaugccugguggcagc

SEQ ID NO: 1612405 - RNA, 15 nt, Human
gaugccugguggcag

SEQ ID NO: 1612406 - RNA, 14 nt, Human
gaugcagugcuucc

SEQ ID NO: 1612407 - RNA, 16 nt, Human
gaugagaggaaaucac

SEQ ID NO: 1612408 - RNA, 14 nt, Human
gauccuggaaauca

SEQ ID NO: 1612409 - RNA, 12 nt, Human
gauccugagcca

SEQ ID NO: 1612410 - RNA, 13 nt, Human
gauccugagccag

SEQ ID NO: 1612411 - RNA, 16 nt, Human
gauccucccaggcuuc

SEQ ID NO: 1612412 - RNA, 20 nt, Human
gaucuaggaagacuuuggaa

SEQ ID NO: 1612413 - RNA, 17 nt, Human
gaucuaguucacucucc

SEQ ID NO: 1612414 - RNA, 18 nt, Human
gaucuaggaagacuuugg

SEQ ID NO: 1612415 - RNA, 14 nt, Human
gaucuaggaagacu

SEQ ID NO: 1612416 - RNA, 13 nt, Human
gaucuaggaagac

SEQ ID NO: 1612417 - RNA, 16 nt, Human
gaucauccacugugcc

SEQ ID NO: 1612418 - RNA, 13 nt, Human
gaucauccacugu

SEQ ID NO: 1612419 - RNA, 18 nt, Human
gauccucccaccucagcc

SEQ ID NO: 1612420 - RNA, 17 nt, Human
gauccucccaccucagc

SEQ ID NO: 1612421 - RNA, 16 nt, Human
gauccucccaccucag

SEQ ID NO: 1612422 - RNA, 14 nt, Human
gauccuccaggugc

SEQ ID NO: 1612423 - RNA, 18 nt, Human
gauccuaggcauuugcug

SEQ ID NO: 1612424 - RNA, 23 nt, Human
gauccuaaugaaugcauaaaaug

SEQ ID NO: 1612425 - RNA, 16 nt, Human
gcaagaugugggcagu

SEQ ID NO: 1612426 - RNA, 12 nt, Human
gcaagauguggg

SEQ ID NO: 1612427 - RNA, 22 nt, Human
gcaacuuuguauaaaagggacu

SEQ ID NO: 1612428 - RNA, 20 nt, Human
gcaagcaccuccugccucga

SEQ ID NO: 1612429 - RNA, 18 nt, Human
gcaagcaccuccugccuc

SEQ ID NO: 1612430 - RNA, 16 nt, Human
gcaagcaccuccugcc

SEQ ID NO: 1612431 - RNA, 15 nt, Human
gcaagcaccuccugc

SEQ ID NO: 1612432 - RNA, 18 nt, Human
gcaagcaagaaacacugg

SEQ ID NO: 1612433 - RNA, 18 nt, Human
gcaaggcugucaauuaca

SEQ ID NO: 1612434 - RNA, 14 nt, Human
gcaaggcugucaau

SEQ ID NO: 1612435 - RNA, 21 nt, Human
gcaagggaauuucuucaacuc

SEQ ID NO: 1612436 - RNA, 17 nt, Human
gcaauccugcaagaaca

SEQ ID NO: 1612437 - RNA, 18 nt, Human
gcaacugcauuggcuuug

SEQ ID NO: 1612438 - RNA, 23 nt, Human
gcaaaugugaaucauuuuaccuu

SEQ ID NO: 1612439 - RNA, 12 nt, Human
gcaaaugugaau

SEQ ID NO: 1612440 - RNA, 20 nt, Human
gcaaacuuuauuuuguguuu

SEQ ID NO: 1612441 - RNA, 23 nt, Human
gcaaaguucccuacuuccuguga

SEQ ID NO: 1612442 - RNA, 21 nt, Human
gcaaaccaucauugaaaucuu

SEQ ID NO: 1612443 - RNA, 20 nt, Human
gcaaaccaucauugaaaucu

SEQ ID NO: 1612444 - RNA, 19 nt, Human
gcaaaccaucauugaaauc

SEQ ID NO: 1612445 - RNA, 17 nt, Human
gcaaaccaucauugaaa

SEQ ID NO: 1612446 - RNA, 16 nt, Human
gcaaaccaucauugaa

SEQ ID NO: 1612447 - RNA, 18 nt, Human
gcaaacuuuauuuugugu

SEQ ID NO: 1612448 - RNA, 16 nt, Human
gaugcuagaacucccu

SEQ ID NO: 1612449 - RNA, 20 nt, Human
gaugcgggccagugcuccag

SEQ ID NO: 1612450 - RNA, 17 nt, Human
gaugccugguggcagcu

SEQ ID NO: 1612451 - RNA, 20 nt, Human
gaugccugugaacugaacuc

SEQ ID NO: 1612452 - RNA, 18 nt, Human
gauguucuagcauggcug

SEQ ID NO: 1612453 - RNA, 22 nt, Human
gaugcgggccagugcuccagcc

SEQ ID NO: 1612454 - RNA, 14 nt, Human
gauuaaguaaugau

SEQ ID NO: 1612455 - RNA, 21 nt, Human
gauguuuuaaggaugcuugua

SEQ ID NO: 1612456 - RNA, 22 nt, Human
gauuaaguaaugauaacuggaa

SEQ ID NO: 1612457 - RNA, 14 nt, Human
gauguucugggaca

SEQ ID NO: 1612458 - RNA, 18 nt, Human
gauucagacagcugccug

SEQ ID NO: 1612459 - RNA, 17 nt, Human
gauucagacagcugccu

SEQ ID NO: 1612460 - RNA, 14 nt, Human
gauucagacagcug

SEQ ID NO: 1612461 - RNA, 13 nt, Human
gauucagacagcu

SEQ ID NO: 1612462 - RNA, 21 nt, Human
gauuacaagcgugagccacug

SEQ ID NO: 1612463 - RNA, 13 nt, Human
gauuacaagcgug

SEQ ID NO: 1612464 - RNA, 15 nt, Human
gauucccaagcucug

SEQ ID NO: 1612465 - RNA, 16 nt, Human
gauugcaacaggcugg

SEQ ID NO: 1612466 - RNA, 22 nt, Human
gauucuuuccugaggcugggcu

SEQ ID NO: 1612467 - RNA, 20 nt, Human
gauucuuuccugaggcuggg

SEQ ID NO: 1612468 - RNA, 18 nt, Human
gauucccaagcucugcuc

SEQ ID NO: 1612469 - RNA, 19 nt, Human
gauucuuuccugaggcugg

SEQ ID NO: 1612470 - RNA, 17 nt, Human
gauucccaagcucugcu

SEQ ID NO: 1612471 - RNA, 16 nt, Human
gauucccaagcucugc

SEQ ID NO: 1612472 - RNA, 18 nt, Human
gauugcuugagcucagga

SEQ ID NO: 1612473 - RNA, 18 nt, Human
gauugcaacaggcugggc

SEQ ID NO: 1612474 - RNA, 17 nt, Human
gauugcaacaggcuggg

SEQ ID NO: 1612475 - RNA, 22 nt, Human
gauuucuguuuagauaauacac

SEQ ID NO: 1612476 - RNA, 21 nt, Human
gauuucuguuuagauaauaca

SEQ ID NO: 1612477 - RNA, 12 nt, Human
gauuuaaaucag

SEQ ID NO: 1612478 - RNA, 16 nt, Human
gauugggaauccgccc

SEQ ID NO: 1612479 - RNA, 17 nt, Human
gcagaguugaagacaga

SEQ ID NO: 1612480 - RNA, 16 nt, Human
gcagaguugaagacag

SEQ ID NO: 1612481 - RNA, 19 nt, Human
gcagaguugaagacagagc

SEQ ID NO: 1612482 - RNA, 20 nt, Human
gcagaguugaagacagagcu

SEQ ID NO: 1612483 - RNA, 12 nt, Human
gcagcaauaaag

SEQ ID NO: 1612484 - RNA, 19 nt, Human
gcagagaccaucccugaag

SEQ ID NO: 1612485 - RNA, 17 nt, Human
gcagagaccaucccuga

SEQ ID NO: 1612486 - RNA, 15 nt, Human
gcagagaccaucccu

SEQ ID NO: 1612487 - RNA, 14 nt, Human
gcagagaccauccc

SEQ ID NO: 1612488 - RNA, 15 nt, Human
gcagaguugaagaca

SEQ ID NO: 1612489 - RNA, 21 nt, Human
gcagagaauucucuuauccaa

SEQ ID NO: 1612490 - RNA, 23 nt, Human
gcagagaaugaaagggcccagag

SEQ ID NO: 1612491 - RNA, 22 nt, Human
gcagagaaugaaagggcccaga

SEQ ID NO: 1612492 - RNA, 21 nt, Human
gcagagaaugaaagggcccag

SEQ ID NO: 1612493 - RNA, 20 nt, Human
gcagagaaugaaagggccca

SEQ ID NO: 1612494 - RNA, 19 nt, Human
gcagagaaugaaagggccc

SEQ ID NO: 1612495 - RNA, 18 nt, Human
gcagaaggaagacuucau

SEQ ID NO: 1612496 - RNA, 20 nt, Human
gcaggaggaucacuugaguc

SEQ ID NO: 1612497 - RNA, 21 nt, Human
gcaggaguuucguuuucaaaa

SEQ ID NO: 1612498 - RNA, 20 nt, Human
gcaggaguuucguuuucaaa

SEQ ID NO: 1612499 - RNA, 18 nt, Human
gcagccgugccuucagcu

SEQ ID NO: 1612500 - RNA, 22 nt, Human
gcagccucaaccuccugggcua

SEQ ID NO: 1612501 - RNA, 21 nt, Human
gcagccucaaccuccugggcu

SEQ ID NO: 1612502 - RNA, 14 nt, Human
gcagccuggacccu

SEQ ID NO: 1612503 - RNA, 20 nt, Human
gcagccucaaccuccugggc

SEQ ID NO: 1612504 - RNA, 19 nt, Human
gcagccucaaccuccuggg

SEQ ID NO: 1612505 - RNA, 14 nt, Human
gcagccgugccuuc

SEQ ID NO: 1612506 - RNA, 17 nt, Human
gcagccgugccuucagc

SEQ ID NO: 1612507 - RNA, 15 nt, Human
gcagccgugccuuca

SEQ ID NO: 1612508 - RNA, 20 nt, Human
gcacagccucuuagaugcag

SEQ ID NO: 1612509 - RNA, 15 nt, Human
gcaaugaccuuucaa

SEQ ID NO: 1612510 - RNA, 14 nt, Human
gcaaugaccuuuca

SEQ ID NO: 1612511 - RNA, 13 nt, Human
gcaaugaccuuuc

SEQ ID NO: 1612512 - RNA, 19 nt, Human
gcacagcuaacauggaagu

SEQ ID NO: 1612513 - RNA, 16 nt, Human
gcacagcuucauuucc

SEQ ID NO: 1612514 - RNA, 21 nt, Human
gcacagcuucauuuccugugu

SEQ ID NO: 1612515 - RNA, 20 nt, Human
gcaccacugcacuccagccu

SEQ ID NO: 1612516 - RNA, 19 nt, Human
gcaccacugcacuccagcc

SEQ ID NO: 1612517 - RNA, 15 nt, Human
gcaccuccugccucg

SEQ ID NO: 1612518 - RNA, 14 nt, Human
gcaccuccugccuc

SEQ ID NO: 1612519 - RNA, 17 nt, Human
gcacccggccccugcug

SEQ ID NO: 1612520 - RNA, 15 nt, Human
gcacccggccccugc

SEQ ID NO: 1612521 - RNA, 14 nt, Human
gcacccggccccug

SEQ ID NO: 1612522 - RNA, 14 nt, Human
gcagaagacaguau

SEQ ID NO: 1612523 - RNA, 14 nt, Human
gcagaaggaagacu

SEQ ID NO: 1612524 - RNA, 13 nt, Human
gcagaaggaagac

SEQ ID NO: 1612525 - RNA, 12 nt, Human
gcagaaggaaga

SEQ ID NO: 1612526 - RNA, 15 nt, Human
gcacugucaagauga

SEQ ID NO: 1612527 - RNA, 23 nt, Human
gcacugggcuuggggaccagagc

SEQ ID NO: 1612528 - RNA, 22 nt, Human
gcacugggcuuggggaccagag

SEQ ID NO: 1612529 - RNA, 18 nt, Human
gcacccggccccugcugg

SEQ ID NO: 1612530 - RNA, 17 nt, Human
gcacuaaggugugcucu

SEQ ID NO: 1612531 - RNA, 18 nt, Human
gcacuaaggugugcucug

SEQ ID NO: 1612532 - RNA, 19 nt, Human
gcacuaaggugugcucuga

SEQ ID NO: 1612533 - RNA, 17 nt, Human
gcacugaggaccagcca

SEQ ID NO: 1612534 - RNA, 14 nt, Human
gcaguucugaagaa

SEQ ID NO: 1612535 - RNA, 13 nt, Human
gcaguucugaaga

SEQ ID NO: 1612536 - RNA, 18 nt, Human
gcauagauucccugagca

SEQ ID NO: 1612537 - RNA, 18 nt, Human
gcagugggagcugccugu

SEQ ID NO: 1612538 - RNA, 17 nt, Human
gcagugggagcugccug

SEQ ID NO: 1612539 - RNA, 15 nt, Human
gcauauucaggaagc

SEQ ID NO: 1612540 - RNA, 23 nt, Human
gcauauuauuuuauguugcauag

SEQ ID NO: 1612541 - RNA, 18 nt, Human
gcauauuauuuuauguug

SEQ ID NO: 1612542 - RNA, 20 nt, Human
gcauauauuuuuauauuuac

SEQ ID NO: 1612543 - RNA, 16 nt, Human
gcauauauuuuuauau

SEQ ID NO: 1612544 - RNA, 11 nt, Human
gcauauauuuu

SEQ ID NO: 1612545 - RNA, 15 nt, Human
gcauauauuuuuaua

SEQ ID NO: 1612546 - RNA, 14 nt, Human
gcauauauuuuuau

SEQ ID NO: 1612547 - RNA, 20 nt, Human
gcauauucaggaagcucagg

SEQ ID NO: 1612548 - RNA, 18 nt, Human
gcauauucaggaagcuca

SEQ ID NO: 1612549 - RNA, 17 nt, Human
gcauauucaggaagcuc

SEQ ID NO: 1612550 - RNA, 21 nt, Human
gcaucaagaugugacauguuu

SEQ ID NO: 1612551 - RNA, 19 nt, Human
gcauauuuauaaaaauaaa

SEQ ID NO: 1612552 - RNA, 15 nt, Human
gcaggcuacugucag

SEQ ID NO: 1612553 - RNA, 17 nt, Human
gcagggagggccugggc

SEQ ID NO: 1612554 - RNA, 14 nt, Human
gcagggagggccug

SEQ ID NO: 1612555 - RNA, 20 nt, Human
gcaggauucuuccucccucc

SEQ ID NO: 1612556 - RNA, 12 nt, Human
gcagggcucagc

SEQ ID NO: 1612557 - RNA, 14 nt, Human
gcagggcucagcgg

SEQ ID NO: 1612558 - RNA, 16 nt, Human
gcagggagggcuucug

SEQ ID NO: 1612559 - RNA, 22 nt, Human
gcagggagggccugggccccag

SEQ ID NO: 1612560 - RNA, 18 nt, Human
gcagggagggccugggcc

SEQ ID NO: 1612561 - RNA, 16 nt, Human
gcagugggagcugccu

SEQ ID NO: 1612562 - RNA, 23 nt, Human
gcagugcuuccaaggauggacca

SEQ ID NO: 1612563 - RNA, 11 nt, Human
gcaggucccua

SEQ ID NO: 1612564 - RNA, 10 nt, Human
gcaggucccu

SEQ ID NO: 1612565 - RNA, 13 nt, Human
gcaggucccuaau

SEQ ID NO: 1612566 - RNA, 12 nt, Human
gcaggucccuaa

SEQ ID NO: 1612567 - RNA, 20 nt, Human
gcaugacacgaauauugcug

SEQ ID NO: 1612568 - RNA, 17 nt, Human
gcaugaauuugugaagg

SEQ ID NO: 1612569 - RNA, 22 nt, Human
gcaugccuggauggggcugcac

SEQ ID NO: 1612570 - RNA, 17 nt, Human
gcaugccuggauggggc

SEQ ID NO: 1612571 - RNA, 15 nt, Human
gcaucaggccaggcc

SEQ ID NO: 1612572 - RNA, 17 nt, Human
gcaucaggccaggcccu

SEQ ID NO: 1612573 - RNA, 16 nt, Human
gcaucaggccaggccc

SEQ ID NO: 1612574 - RNA, 15 nt, Human
gcaugaauuugugaa

SEQ ID NO: 1612575 - RNA, 15 nt, Human
gcaugcugucccuua

SEQ ID NO: 1612576 - RNA, 17 nt, Human
gcauguuugugauugac

SEQ ID NO: 1612577 - RNA, 20 nt, Human
gcauuagauuucucauuugc

SEQ ID NO: 1612578 - RNA, 22 nt, Human
gcauuuugcuaaaugugaauga

SEQ ID NO: 1612579 - RNA, 20 nt, Human
gccaaaggaagcacaugccu

SEQ ID NO: 1612580 - RNA, 16 nt, Human
gccaaaggaagcacau

SEQ ID NO: 1612581 - RNA, 14 nt, Human
gccaaaggaagcac

SEQ ID NO: 1612582 - RNA, 21 nt, Human
gccaaacucaccugccccuca

SEQ ID NO: 1612583 - RNA, 12 nt, Human
gcauuccccacu

SEQ ID NO: 1612584 - RNA, 12 nt, Human
gcauuccccagg

SEQ ID NO: 1612585 - RNA, 15 nt, Human
gcauucucacuccua

SEQ ID NO: 1612586 - RNA, 13 nt, Human
gcauucucacucc

SEQ ID NO: 1612587 - RNA, 18 nt, Human
gcauucucacuccuaccu

SEQ ID NO: 1612588 - RNA, 21 nt, Human
gcauuuggugguuucagaaau

SEQ ID NO: 1612589 - RNA, 23 nt, Human
gcauuugcugaauacagaggcaa

SEQ ID NO: 1612590 - RNA, 17 nt, Human
gcauuuuacuguacaga

SEQ ID NO: 1612591 - RNA, 16 nt, Human
gcauuuuacuguacag

SEQ ID NO: 1612592 - RNA, 19 nt, Human
gcccuucuuuccacagaag

SEQ ID NO: 1612593 - RNA, 13 nt, Human
gcccuucucucca

SEQ ID NO: 1612594 - RNA, 22 nt, Human
gcccuuccucuccacugccuuc

SEQ ID NO: 1612595 - RNA, 16 nt, Human
gccgagauagccaagg

SEQ ID NO: 1612596 - RNA, 19 nt, Human
gccgcagcccugcagaggg

SEQ ID NO: 1612597 - RNA, 17 nt, Human
gccgcagcccugcagag

SEQ ID NO: 1612598 - RNA, 16 nt, Human
gccgcagcccugcaga

SEQ ID NO: 1612599 - RNA, 15 nt, Human
gccgcagcccugcag

SEQ ID NO: 1612600 - RNA, 19 nt, Human
gccgagauagccaaggcca

SEQ ID NO: 1612601 - RNA, 17 nt, Human
gccgagauagccaaggc

SEQ ID NO: 1612602 - RNA, 23 nt, Human
gccgucuaccugaggggccucuu

SEQ ID NO: 1612603 - RNA, 22 nt, Human
gccgucuaccugaggggccucu

SEQ ID NO: 1612604 - RNA, 20 nt, Human
gccgucuaccugaggggccu

SEQ ID NO: 1612605 - RNA, 18 nt, Human
gccgucuaccugaggggc

SEQ ID NO: 1612606 - RNA, 11 nt, Human
gccuaaaucca

SEQ ID NO: 1612607 - RNA, 15 nt, Human
gccguggcuucccgc

SEQ ID NO: 1612608 - RNA, 13 nt, Human
gccguggcuuccc

SEQ ID NO: 1612609 - RNA, 12 nt, Human
gccguggcuucc

SEQ ID NO: 1612610 - RNA, 11 nt, Human
gccguggcuuc

SEQ ID NO: 1612611 - RNA, 21 nt, Human
gccucagcauccuggcacccg

SEQ ID NO: 1612612 - RNA, 18 nt, Human
gccucagcauccuggcac

SEQ ID NO: 1612613 - RNA, 24 nt, Human
gccucaagugauucuccugccuca

SEQ ID NO: 1612614 - RNA, 22 nt, Human
gccucaagugauucuccugccu

SEQ ID NO: 1612615 - RNA, 17 nt, Human
gccuauuuuaauaaaca

SEQ ID NO: 1612616 - RNA, 13 nt, Human
gccuaaggacuuc

SEQ ID NO: 1612617 - RNA, 12 nt, Human
gccuaaggacuu

SEQ ID NO: 1612618 - RNA, 14 nt, Human
gccuaaggcugaac

SEQ ID NO: 1612619 - RNA, 18 nt, Human
gccuaaggacuucuuuaa

SEQ ID NO: 1612620 - RNA, 15 nt, Human
gccuaaggacuucuu

SEQ ID NO: 1612621 - RNA, 14 nt, Human
gccuaaggacuucu

SEQ ID NO: 1612622 - RNA, 16 nt, Human
gccuccccuccucugc

SEQ ID NO: 1612623 - RNA, 21 nt, Human
gccucccgaauagcugggacu

SEQ ID NO: 1612624 - RNA, 20 nt, Human
gccucccgaauagcugggac

SEQ ID NO: 1612625 - RNA, 23 nt, Human
gccucccgaguagcugggacuac

SEQ ID NO: 1612626 - RNA, 21 nt, Human
gccucccgaguagcugggacu

SEQ ID NO: 1612627 - RNA, 11 nt, Human
gccuccccucc

SEQ ID NO: 1612628 - RNA, 12 nt, Human
gccuccccuccu

SEQ ID NO: 1612629 - RNA, 13 nt, Human
gccuccccuccuc

SEQ ID NO: 1612630 - RNA, 14 nt, Human
gccuccccuccucu

SEQ ID NO: 1612631 - RNA, 19 nt, Human
gccucccgaauagcuggga

SEQ ID NO: 1612632 - RNA, 18 nt, Human
gccucccgaauagcuggg

SEQ ID NO: 1612633 - RNA, 22 nt, Human
gccucagccucccaaagugcug

SEQ ID NO: 1612634 - RNA, 14 nt, Human
gccucagccuccca

SEQ ID NO: 1612635 - RNA, 12 nt, Human
gccucagccucc

SEQ ID NO: 1612636 - RNA, 15 nt, Human
gccucucccaucacu

SEQ ID NO: 1612637 - RNA, 18 nt, Human
gccucucugcaggucccu

SEQ ID NO: 1612638 - RNA, 17 nt, Human
gccucucugcagguccc

SEQ ID NO: 1612639 - RNA, 16 nt, Human
gccucucugcaggucc

SEQ ID NO: 1612640 - RNA, 14 nt, Human
gccucucugcaggu

SEQ ID NO: 1612641 - RNA, 10 nt, Human
gccucucugc

SEQ ID NO: 1612642 - RNA, 12 nt, Human
gccugcccaggc

SEQ ID NO: 1612643 - RNA, 11 nt, Human
gccugcccagg

SEQ ID NO: 1612644 - RNA, 14 nt, Human
gccuggacccugug

SEQ ID NO: 1612645 - RNA, 20 nt, Human
gccucugcacuccccugcug

SEQ ID NO: 1612646 - RNA, 19 nt, Human
gccucugcacuccccugcu

SEQ ID NO: 1612647 - RNA, 18 nt, Human
gccucugcacuccccugc

SEQ ID NO: 1612648 - RNA, 17 nt, Human
gccucugcacuccccug

SEQ ID NO: 1612649 - RNA, 16 nt, Human
gccucugcacuccccu

SEQ ID NO: 1612650 - RNA, 16 nt, Human
gccucugacacacagc

SEQ ID NO: 1612651 - RNA, 15 nt, Human
gccucugacacacag

SEQ ID NO: 1612652 - RNA, 15 nt, Human
gccugaagucacaca

SEQ ID NO: 1612653 - RNA, 21 nt, Human
gccucugcacuccccugcugg

SEQ ID NO: 1612654 - RNA, 12 nt, Human
gccucugcauuc

SEQ ID NO: 1612655 - RNA, 15 nt, Human
gccucugcauucagg

SEQ ID NO: 1612656 - RNA, 18 nt, Human
gccuguaaucacagcuac

SEQ ID NO: 1612657 - RNA, 17 nt, Human
gccugguggcagcugcg

SEQ ID NO: 1612658 - RNA, 16 nt, Human
gccugguggcagcugc

SEQ ID NO: 1612659 - RNA, 15 nt, Human
gccugguggcagcug

SEQ ID NO: 1612660 - RNA, 22 nt, Human
gccuuauggaacacucugagac

SEQ ID NO: 1612661 - RNA, 21 nt, Human
gccuuauggaacacucugaga

SEQ ID NO: 1612662 - RNA, 23 nt, Human
gccuuauggaacacucugagacu

SEQ ID NO: 1612663 - RNA, 17 nt, Human
gccuuagaaccuuucuu

SEQ ID NO: 1612664 - RNA, 20 nt, Human
gccuuagaagucacacagua

SEQ ID NO: 1612665 - RNA, 16 nt, Human
gccuuagaaccuuucu

SEQ ID NO: 1612666 - RNA, 18 nt, Human
gccuucggccuccauccu

SEQ ID NO: 1612667 - RNA, 13 nt, Human
gccuucagcucua

SEQ ID NO: 1612668 - RNA, 16 nt, Human
gccuucagcucuacag

SEQ ID NO: 1612669 - RNA, 19 nt, Human
gccuucggccuccauccug

SEQ ID NO: 1612670 - RNA, 18 nt, Human
gccuuggggcugaugcag

SEQ ID NO: 1612671 - RNA, 23 nt, Human
gccuuuuucauuauuuuauuaug

SEQ ID NO: 1612672 - RNA, 22 nt, Human
gccuuuuucauuauuuuauuau

SEQ ID NO: 1612673 - RNA, 20 nt, Human
gccuuuuucauuauuuuauu

SEQ ID NO: 1612674 - RNA, 16 nt, Human
gccuuuuucauuauuu

SEQ ID NO: 1612675 - RNA, 12 nt, Human
gccuuuuucauu

SEQ ID NO: 1612676 - RNA, 23 nt, Human
gcgguccacccaggagccccgag

SEQ ID NO: 1612677 - RNA, 23 nt, Human
gcggggacagcuccuucuguccu

SEQ ID NO: 1612678 - RNA, 19 nt, Human
gcggggacagcuccuucug

SEQ ID NO: 1612679 - RNA, 23 nt, Human
gcggacagccacggccaggccag

SEQ ID NO: 1612680 - RNA, 19 nt, Human
gcggacagccacggccagg

SEQ ID NO: 1612681 - RNA, 19 nt, Human
gcggaaugaaccacaucuu

SEQ ID NO: 1612682 - RNA, 17 nt, Human
gcgcugccccuggcagc

SEQ ID NO: 1612683 - RNA, 14 nt, Human
gcgcugccccuggc

SEQ ID NO: 1612684 - RNA, 21 nt, Human
gcgccuacaggagugagcacu

SEQ ID NO: 1612685 - RNA, 20 nt, Human
gcgccuacaggagugagcac

SEQ ID NO: 1612686 - RNA, 22 nt, Human
gcuagacgagcaggcuucuucc

SEQ ID NO: 1612687 - RNA, 21 nt, Human
gcuagacgagcaggcuucuuc

SEQ ID NO: 1612688 - RNA, 22 nt, Human
gcuagacuggugacugauucuu

SEQ ID NO: 1612689 - RNA, 20 nt, Human
gcuagacuggugacugauuc

SEQ ID NO: 1612690 - RNA, 19 nt, Human
gcuagacuggugacugauu

SEQ ID NO: 1612691 - RNA, 16 nt, Human
gcuagacuggugacug

SEQ ID NO: 1612692 - RNA, 15 nt, Human
gcuagacuggugacu

SEQ ID NO: 1612693 - RNA, 13 nt, Human
gcuagacugguga

SEQ ID NO: 1612694 - RNA, 18 nt, Human
gcuaacauggaaguacua

SEQ ID NO: 1612695 - RNA, 17 nt, Human
gcuaacauggaaguacu

SEQ ID NO: 1612696 - RNA, 15 nt, Human
gcgugagccacugca

SEQ ID NO: 1612697 - RNA, 16 nt, Human
gcgugagccacugcac

SEQ ID NO: 1612698 - RNA, 16 nt, Human
gcgugagaccugcccc

SEQ ID NO: 1612699 - RNA, 14 nt, Human
gcgugagccacugc

SEQ ID NO: 1612700 - RNA, 22 nt, Human
gccacguucuuacuaguuuccc

SEQ ID NO: 1612701 - RNA, 16 nt, Human
gccacggccaggccag

SEQ ID NO: 1612702 - RNA, 17 nt, Human
gccacggccaggccaga

SEQ ID NO: 1612703 - RNA, 21 nt, Human
gccacuauuguuagucucuug

SEQ ID NO: 1612704 - RNA, 15 nt, Human
gccacggccaggcca

SEQ ID NO: 1612705 - RNA, 14 nt, Human
gccacggccaggcc

SEQ ID NO: 1612706 - RNA, 13 nt, Human
gccaaagccaaag

SEQ ID NO: 1612707 - RNA, 18 nt, Human
gccacugcaccgggccac

SEQ ID NO: 1612708 - RNA, 17 nt, Human
gccacugcaccgggcca

SEQ ID NO: 1612709 - RNA, 19 nt, Human
gccacugcaccgggccaca

SEQ ID NO: 1612710 - RNA, 19 nt, Human
gccacuccagaccccuggc

SEQ ID NO: 1612711 - RNA, 18 nt, Human
gccacuccagaccccugg

SEQ ID NO: 1612712 - RNA, 16 nt, Human
gccacuccagaccccu

SEQ ID NO: 1612713 - RNA, 18 nt, Human
gccagagggagugacaga

SEQ ID NO: 1612714 - RNA, 15 nt, Human
gccagagacacaagc

SEQ ID NO: 1612715 - RNA, 12 nt, Human
gccagagacaca

SEQ ID NO: 1612716 - RNA, 15 nt, Human
gccagcugcuugggc

SEQ ID NO: 1612717 - RNA, 16 nt, Human
gccagcugcuugggcu

SEQ ID NO: 1612718 - RNA, 14 nt, Human
gccagcugcuuggg

SEQ ID NO: 1612719 - RNA, 22 nt, Human
gccagccuugaccauucuccac

SEQ ID NO: 1612720 - RNA, 21 nt, Human
gccagccuugaccauucucca

SEQ ID NO: 1612721 - RNA, 20 nt, Human
gccagccuugaccauucucc

SEQ ID NO: 1612722 - RNA, 14 nt, Human
gccagccuugacca

SEQ ID NO: 1612723 - RNA, 12 nt, Human
gccagccuugac

SEQ ID NO: 1612724 - RNA, 20 nt, Human
gccagccgagauagccaagg

SEQ ID NO: 1612725 - RNA, 21 nt, Human
gccagccgagauagccaaggc

SEQ ID NO: 1612726 - RNA, 16 nt, Human
gccagauucuuuccug

SEQ ID NO: 1612727 - RNA, 20 nt, Human
gccagagggagugacagagg

SEQ ID NO: 1612728 - RNA, 19 nt, Human
gccagagggagugacagag

SEQ ID NO: 1612729 - RNA, 19 nt, Human
gccagauucuuuccugagg

SEQ ID NO: 1612730 - RNA, 17 nt, Human
gccagauucuuuccuga

SEQ ID NO: 1612731 - RNA, 11 nt, Human
gccaucccucc

SEQ ID NO: 1612732 - RNA, 13 nt, Human
gccaucccucccu

SEQ ID NO: 1612733 - RNA, 14 nt, Human
gccaucccucccuc

SEQ ID NO: 1612734 - RNA, 17 nt, Human
gccaucccagccccaau

SEQ ID NO: 1612735 - RNA, 16 nt, Human
gccaucccagccccaa

SEQ ID NO: 1612736 - RNA, 15 nt, Human
gccaucccagcccca

SEQ ID NO: 1612737 - RNA, 14 nt, Human
gccaucccagcccc

SEQ ID NO: 1612738 - RNA, 13 nt, Human
gccaucccagccc

SEQ ID NO: 1612739 - RNA, 20 nt, Human
gccauccagguucagcuugu

SEQ ID NO: 1612740 - RNA, 19 nt, Human
gccauccagguucagcuug

SEQ ID NO: 1612741 - RNA, 18 nt, Human
gccagguggccacuccag

SEQ ID NO: 1612742 - RNA, 22 nt, Human
gccaggggaaaaucagccugcu

SEQ ID NO: 1612743 - RNA, 21 nt, Human
gccaggggaaaaucagccugc

SEQ ID NO: 1612744 - RNA, 17 nt, Human
gccaggggaaaaucagc

SEQ ID NO: 1612745 - RNA, 23 nt, Human
gccaggggaaaaucagccugcuc

SEQ ID NO: 1612746 - RNA, 18 nt, Human
gccaggaagccagcaggc

SEQ ID NO: 1612747 - RNA, 17 nt, Human
gccaggaagccagcagg

SEQ ID NO: 1612748 - RNA, 11 nt, Human
gccaggaagcc

SEQ ID NO: 1612749 - RNA, 19 nt, Human
gccaggaagccagcaggcu

SEQ ID NO: 1612750 - RNA, 20 nt, Human
gccaggaagccagcaggcuc

SEQ ID NO: 1612751 - RNA, 19 nt, Human
gccaugggacagggaggac

SEQ ID NO: 1612752 - RNA, 14 nt, Human
gccaugggacaggg

SEQ ID NO: 1612753 - RNA, 15 nt, Human
gccaucccucccucc

SEQ ID NO: 1612754 - RNA, 16 nt, Human
gccaucccucccucca

SEQ ID NO: 1612755 - RNA, 22 nt, Human
gccauuuaaagcuuauuaaaac

SEQ ID NO: 1612756 - RNA, 22 nt, Human
gccaugggacagggaggacgcu

SEQ ID NO: 1612757 - RNA, 17 nt, Human
gccauuucuuccacaag

SEQ ID NO: 1612758 - RNA, 22 nt, Human
gccauuucuuccacaagagccc

SEQ ID NO: 1612759 - RNA, 20 nt, Human
gccauuucuuccacaagagc

SEQ ID NO: 1612760 - RNA, 16 nt, Human
gcccacagcuguauga

SEQ ID NO: 1612761 - RNA, 16 nt, Human
gcccaaagaugcagcc

SEQ ID NO: 1612762 - RNA, 16 nt, Human
gccauuuguguuuaua

SEQ ID NO: 1612763 - RNA, 15 nt, Human
gcccaccccucaaca

SEQ ID NO: 1612764 - RNA, 18 nt, Human
gcccacaggaucagucug

SEQ ID NO: 1612765 - RNA, 13 nt, Human
gcccacaggauca

SEQ ID NO: 1612766 - RNA, 19 nt, Human
gcccacaggaucagucuga

SEQ ID NO: 1612767 - RNA, 18 nt, Human
gcccucuccugggcagcu

SEQ ID NO: 1612768 - RNA, 19 nt, Human
gcccucuccugggcagcug

SEQ ID NO: 1612769 - RNA, 21 nt, Human
gcccucuccugggcagcugcc

SEQ ID NO: 1612770 - RNA, 22 nt, Human
gcccucugcccacucccugcaa

SEQ ID NO: 1612771 - RNA, 15 nt, Human
gcccucuccugggca

SEQ ID NO: 1612772 - RNA, 16 nt, Human
gcccucuccugggcag

SEQ ID NO: 1612773 - RNA, 20 nt, Human
gcccgggcucugccucccau

SEQ ID NO: 1612774 - RNA, 19 nt, Human
gcccgggcucugccuccca

SEQ ID NO: 1612775 - RNA, 21 nt, Human
gcccgggcucugccucccauc

SEQ ID NO: 1612776 - RNA, 15 nt, Human
gcccucccugccccu

SEQ ID NO: 1612777 - RNA, 18 nt, Human
gcccgggcucugccuccc

SEQ ID NO: 1612778 - RNA, 15 nt, Human
gcccgggcucugccu

SEQ ID NO: 1612779 - RNA, 14 nt, Human
gcccgggcucugcc

SEQ ID NO: 1612780 - RNA, 13 nt, Human
gcccgggcucugc

SEQ ID NO: 1612781 - RNA, 15 nt, Human
gcccggcuccaggcu

SEQ ID NO: 1612782 - RNA, 14 nt, Human
gcccggcuccaggc

SEQ ID NO: 1612783 - RNA, 13 nt, Human
gcccggcuccagg

SEQ ID NO: 1612784 - RNA, 20 nt, Human
gccccuucugacccaugcug

SEQ ID NO: 1612785 - RNA, 19 nt, Human
gccccuucugacccaugcu

SEQ ID NO: 1612786 - RNA, 19 nt, Human
gccccugcacuccagccug

SEQ ID NO: 1612787 - RNA, 23 nt, Human
gccccuggcagccccuguucugg

SEQ ID NO: 1612788 - RNA, 13 nt, Human
gccccugcacaaa

SEQ ID NO: 1612789 - RNA, 17 nt, Human
gccccuucccccuccaa

SEQ ID NO: 1612790 - RNA, 21 nt, Human
gccccucagggucccuggugg

SEQ ID NO: 1612791 - RNA, 19 nt, Human
gccccucagggucccuggu

SEQ ID NO: 1612792 - RNA, 23 nt, Human
gccccucaacucuccuccagagu

SEQ ID NO: 1612793 - RNA, 17 nt, Human
gccccgugggguuccuc

SEQ ID NO: 1612794 - RNA, 21 nt, Human
gccccgucccccucuggcucc

SEQ ID NO: 1612795 - RNA, 17 nt, Human
gccccgucccccucugg

SEQ ID NO: 1612796 - RNA, 23 nt, Human
gccccgaggccuucucugaagga

SEQ ID NO: 1612797 - RNA, 23 nt, Human
gccccauucugccugcccaggcc

SEQ ID NO: 1612798 - RNA, 22 nt, Human
gccccauucugccugcccaggc

SEQ ID NO: 1612799 - RNA, 14 nt, Human
gccccgcccaggcu

SEQ ID NO: 1612800 - RNA, 18 nt, Human
gcccaggccuccuacagc

SEQ ID NO: 1612801 - RNA, 16 nt, Human
gcccaggaaaggcucc

SEQ ID NO: 1612802 - RNA, 15 nt, Human
gcccaggaaaggcuc

SEQ ID NO: 1612803 - RNA, 12 nt, Human
gcccaggaaagg

SEQ ID NO: 1612804 - RNA, 11 nt, Human
gcccaggcugg

SEQ ID NO: 1612805 - RNA, 17 nt, Human
gcccaggccugccuguu

SEQ ID NO: 1612806 - RNA, 15 nt, Human
gcccaggcuggcgug

SEQ ID NO: 1612807 - RNA, 14 nt, Human
gcccaggcuggcgu

SEQ ID NO: 1612808 - RNA, 16 nt, Human
gcccaggcuggcgugc

SEQ ID NO: 1612809 - RNA, 22 nt, Human
gcccagucuggaaugcaguggu

SEQ ID NO: 1612810 - RNA, 15 nt, Human
gcccaguugggugga

SEQ ID NO: 1612811 - RNA, 21 nt, Human
gccccauucugccugcccagg

SEQ ID NO: 1612812 - RNA, 20 nt, Human
gccccauucugccugcccag

SEQ ID NO: 1612813 - RNA, 18 nt, Human
gccccauucugccugccc

SEQ ID NO: 1612814 - RNA, 17 nt, Human
gccccauucugccugcc

SEQ ID NO: 1612815 - RNA, 23 nt, Human
gccccauccucuguacagagccc

SEQ ID NO: 1612816 - RNA, 21 nt, Human
gccccagugcccacaggauca

SEQ ID NO: 1612817 - RNA, 17 nt, Human
gccccagugcccacagg

SEQ ID NO: 1612818 - RNA, 16 nt, Human
gccccagugcccacag

SEQ ID NO: 1612819 - RNA, 22 nt, Human
gcccaucugggggccucuucug

SEQ ID NO: 1612820 - RNA, 23 nt, Human
ggugcuacaaaaacacagcaagg

SEQ ID NO: 1612821 - RNA, 15 nt, Human
ggugcgaucuggguu

SEQ ID NO: 1612822 - RNA, 20 nt, Human
ggugcuaucucccccagccc

SEQ ID NO: 1612823 - RNA, 19 nt, Human
ggugcuaucucccccagcc

SEQ ID NO: 1612824 - RNA, 17 nt, Human
ggugcuaucucccccag

SEQ ID NO: 1612825 - RNA, 16 nt, Human
ggugcuaucuccccca

SEQ ID NO: 1612826 - RNA, 16 nt, Human
ggugagaggggaacag

SEQ ID NO: 1612827 - RNA, 15 nt, Human
ggugagaagcagagg

SEQ ID NO: 1612828 - RNA, 22 nt, Human
gguggccucccaacucacccca

SEQ ID NO: 1612829 - RNA, 23 nt, Human
gguggccacuccagaccccuggc

SEQ ID NO: 1612830 - RNA, 22 nt, Human
gguggccacuccagaccccugg

SEQ ID NO: 1612831 - RNA, 21 nt, Human
gguggccacuccagaccccug

SEQ ID NO: 1612832 - RNA, 20 nt, Human
gguggccacuccagaccccu

SEQ ID NO: 1612833 - RNA, 23 nt, Human
gguggccucccaacucaccccag

SEQ ID NO: 1612834 - RNA, 22 nt, Human
gguggcagugggagcugccugu

SEQ ID NO: 1612835 - RNA, 19 nt, Human
gguggcagugggagcugcc

SEQ ID NO: 1612836 - RNA, 21 nt, Human
ggugcugccauccagguucag

SEQ ID NO: 1612837 - RNA, 21 nt, Human
ggugcuaucucccccagcccc

SEQ ID NO: 1612838 - RNA, 15 nt, Human
ggugcugccauccag

SEQ ID NO: 1612839 - RNA, 14 nt, Human
ggucugacccacug

SEQ ID NO: 1612840 - RNA, 22 nt, Human
ggugaccagcaccaucucuccu

SEQ ID NO: 1612841 - RNA, 21 nt, Human
ggugacuuuggauaauaagga

SEQ ID NO: 1612842 - RNA, 20 nt, Human
ggugacuuuggauaauaagg

SEQ ID NO: 1612843 - RNA, 19 nt, Human
ggugacuuuggauaauaag

SEQ ID NO: 1612844 - RNA, 18 nt, Human
ggugacuuuggauaauaa

SEQ ID NO: 1612845 - RNA, 14 nt, Human
ggugacuuuggaua

SEQ ID NO: 1612846 - RNA, 23 nt, Human
ggucucacucugucgcccagucu

SEQ ID NO: 1612847 - RNA, 22 nt, Human
ggucucacucugucgcccaguc

SEQ ID NO: 1612848 - RNA, 21 nt, Human
ggucucacuauguugcccagg

SEQ ID NO: 1612849 - RNA, 17 nt, Human
ggucccaccccacacac

SEQ ID NO: 1612850 - RNA, 15 nt, Human
ggugguuuucuguuc

SEQ ID NO: 1612851 - RNA, 18 nt, Human
ggugguuuucuguucuuu

SEQ ID NO: 1612852 - RNA, 21 nt, Human
ggugguuauggagaggguguc

SEQ ID NO: 1612853 - RNA, 17 nt, Human
ggugguuucagaaaugu

SEQ ID NO: 1612854 - RNA, 18 nt, Human
ggugguuucagaaaugug

SEQ ID NO: 1612855 - RNA, 19 nt, Human
ggugucaccugaagacuca

SEQ ID NO: 1612856 - RNA, 19 nt, Human
ggugucaagagggucugag

SEQ ID NO: 1612857 - RNA, 17 nt, Human
ggugucaagagggucug

SEQ ID NO: 1612858 - RNA, 16 nt, Human
gguguaugugugaagu

SEQ ID NO: 1612859 - RNA, 12 nt, Human
gguggcuggguu

SEQ ID NO: 1612860 - RNA, 15 nt, Human
gguggugaccucugc

SEQ ID NO: 1612861 - RNA, 14 nt, Human
gguggugaccucug

SEQ ID NO: 1612862 - RNA, 16 nt, Human
gguggugaccucugcc

SEQ ID NO: 1612863 - RNA, 21 nt, Human
gguucaaagauauuuugcuuu

SEQ ID NO: 1612864 - RNA, 13 nt, Human
gguucaaagauau

SEQ ID NO: 1612865 - RNA, 13 nt, Human
gguugagguuuca

SEQ ID NO: 1612866 - RNA, 17 nt, Human
gguucuuucuuccucug

SEQ ID NO: 1612867 - RNA, 16 nt, Human
gguucuuucuuccucu

SEQ ID NO: 1612868 - RNA, 14 nt, Human
gguucuuucuuccu

SEQ ID NO: 1612869 - RNA, 21 nt, Human
gguuacccaguuagcucucaa

SEQ ID NO: 1612870 - RNA, 13 nt, Human
gguuauggagagg

SEQ ID NO: 1612871 - RNA, 20 nt, Human
gguuaucugaagucagaucu

SEQ ID NO: 1612872 - RNA, 22 nt, Human
gguuaguggauggaaggggcug

SEQ ID NO: 1612873 - RNA, 21 nt, Human
gguuaguggauggaaggggcu

SEQ ID NO: 1612874 - RNA, 17 nt, Human
gguuaggcauuguggga

SEQ ID NO: 1612875 - RNA, 17 nt, Human
gggggaucacagccucu

SEQ ID NO: 1612876 - RNA, 12 nt, Human
gggguggccucc

SEQ ID NO: 1612877 - RNA, 18 nt, Human
ggggugcugggccccugc

SEQ ID NO: 1612878 - RNA, 17 nt, Human
gggguggggaccucagg

SEQ ID NO: 1612879 - RNA, 20 nt, Human
gggguggggggggugcuggg

SEQ ID NO: 1612880 - RNA, 22 nt, Human
ggggcugcaccggcuggccugg

SEQ ID NO: 1612881 - RNA, 21 nt, Human
ggggcugcaccggcuggccug

SEQ ID NO: 1612882 - RNA, 12 nt, Human
ggggcugcaccg

SEQ ID NO: 1612883 - RNA, 19 nt, Human
ggggcugaggugggaggau

SEQ ID NO: 1612884 - RNA, 23 nt, Human
ggggcugcaccggcuggccuggc

SEQ ID NO: 1612885 - RNA, 22 nt, Human
gggggaggugggauccuccagg

SEQ ID NO: 1612886 - RNA, 21 nt, Human
gggucugaggaauccagaccc

SEQ ID NO: 1612887 - RNA, 12 nt, Human
gggucugaggaa

SEQ ID NO: 1612888 - RNA, 14 nt, Human
gggucucacucugu

SEQ ID NO: 1612889 - RNA, 17 nt, Human
ggguaagugagagaggg

SEQ ID NO: 1612890 - RNA, 24 nt, Human
ggggaaaaucagccugcuccagcu

SEQ ID NO: 1612891 - RNA, 21 nt, Human
ggggaaaaucagccugcucca

SEQ ID NO: 1612892 - RNA, 18 nt, Human
ggggaggggcugugggcg

SEQ ID NO: 1612893 - RNA, 15 nt, Human
ggggauucuuaaagu

SEQ ID NO: 1612894 - RNA, 11 nt, Human
ggggauucuua

SEQ ID NO: 1612895 - RNA, 19 nt, Human
ggggaaaaucagccugcuc

SEQ ID NO: 1612896 - RNA, 17 nt, Human
ggggaaaaucagccugc

SEQ ID NO: 1612897 - RNA, 16 nt, Human
ggggaaaaucagccug

SEQ ID NO: 1612898 - RNA, 11 nt, Human
gggccugggcc

SEQ ID NO: 1612899 - RNA, 16 nt, Human
ggggcaacccugguga

SEQ ID NO: 1612900 - RNA, 17 nt, Human
ggggcugaggugggagg

SEQ ID NO: 1612901 - RNA, 19 nt, Human
gggugacagagcaagugag

SEQ ID NO: 1612902 - RNA, 17 nt, Human
gggugaagugaagacaa

SEQ ID NO: 1612903 - RNA, 12 nt, Human
ggguucuaccca

SEQ ID NO: 1612904 - RNA, 21 nt, Human
ggguuccuuccucugagccuu

SEQ ID NO: 1612905 - RNA, 20 nt, Human
ggguuccuuccucugagccu

SEQ ID NO: 1612906 - RNA, 19 nt, Human
ggguuccuuccucugagcc

SEQ ID NO: 1612907 - RNA, 17 nt, Human
ggguucuacccaggugc

SEQ ID NO: 1612908 - RNA, 17 nt, Human
ggguucuuucuuccucu

SEQ ID NO: 1612909 - RNA, 19 nt, Human
ggguucuuucuuccucugc

SEQ ID NO: 1612910 - RNA, 16 nt, Human
ggguuggccccugccc

SEQ ID NO: 1612911 - RNA, 23 nt, Human
ggguucaagcgauucuucugcuu

SEQ ID NO: 1612912 - RNA, 22 nt, Human
ggguucaagcgauucuucugcu

SEQ ID NO: 1612913 - RNA, 18 nt, Human
gggugcugggccccugcc

SEQ ID NO: 1612914 - RNA, 17 nt, Human
gggugcugggccccugc

SEQ ID NO: 1612915 - RNA, 12 nt, Human
ggucacucuggc

SEQ ID NO: 1612916 - RNA, 18 nt, Human
ggucacaggacucugccu

SEQ ID NO: 1612917 - RNA, 16 nt, Human
ggucacaggacucugc

SEQ ID NO: 1612918 - RNA, 11 nt, Human
ggucagagccu

SEQ ID NO: 1612919 - RNA, 16 nt, Human
ggucccaccccacaca

SEQ ID NO: 1612920 - RNA, 15 nt, Human
ggucccaccccacac

SEQ ID NO: 1612921 - RNA, 17 nt, Human
gguacuuguggacacag

SEQ ID NO: 1612922 - RNA, 16 nt, Human
gguacuuguggacaca

SEQ ID NO: 1612923 - RNA, 22 nt, Human
gguagaaauaucugaaaaugua

SEQ ID NO: 1612924 - RNA, 20 nt, Human
gguacuuguggacacagcuc

SEQ ID NO: 1612925 - RNA, 13 nt, Human
gguacccacugcu

SEQ ID NO: 1612926 - RNA, 16 nt, Human
gguacccacugcucug

SEQ ID NO: 1612927 - RNA, 11 nt, Human
gguacccacug

SEQ ID NO: 1612928 - RNA, 22 nt, Human
gguagaagcccuucuaccuucc

SEQ ID NO: 1612929 - RNA, 23 nt, Human
gguagaaauaucugaaaauguau

SEQ ID NO: 1612930 - RNA, 18 nt, Human
gguagcauuuguguugaa

SEQ ID NO: 1612931 - RNA, 22 nt, Human
ggcuugaguuuaaauuguaaua

SEQ ID NO: 1612932 - RNA, 21 nt, Human
ggcuuggggaccagagcugcc

SEQ ID NO: 1612933 - RNA, 10 nt, Human
ggcuuuugug

SEQ ID NO: 1612934 - RNA, 16 nt, Human
ggcuuuucugauccag

SEQ ID NO: 1612935 - RNA, 13 nt, Human
ggcuuuucugauc

SEQ ID NO: 1612936 - RNA, 22 nt, Human
ggcuuuucacugcuggcugccu

SEQ ID NO: 1612937 - RNA, 19 nt, Human
ggcuuuucacugcuggcug

SEQ ID NO: 1612938 - RNA, 12 nt, Human
ggcuuuucugau

SEQ ID NO: 1612939 - RNA, 17 nt, Human
ggcuuuucacugcuggc

SEQ ID NO: 1612940 - RNA, 15 nt, Human
ggcuuuucacugcug

SEQ ID NO: 1612941 - RNA, 14 nt, Human
ggcuuuucacugcu

SEQ ID NO: 1612942 - RNA, 21 nt, Human
ggcuuagucacugagacagcc

SEQ ID NO: 1612943 - RNA, 12 nt, Human
ggcugggcuuca

SEQ ID NO: 1612944 - RNA, 18 nt, Human
ggcugggcucccuuccca

SEQ ID NO: 1612945 - RNA, 17 nt, Human
ggcugggcucccuuccc

SEQ ID NO: 1612946 - RNA, 17 nt, Human
ggcugggcuucaguggc

SEQ ID NO: 1612947 - RNA, 13 nt, Human
ggcugggcuucag

SEQ ID NO: 1612948 - RNA, 18 nt, Human
ggcugggcuucaguggca

SEQ ID NO: 1612949 - RNA, 15 nt, Human
gggaccucaggccug

SEQ ID NO: 1612950 - RNA, 13 nt, Human
gggaccucaggcc

SEQ ID NO: 1612951 - RNA, 12 nt, Human
gggaccucaggc

SEQ ID NO: 1612952 - RNA, 16 nt, Human
gggacucaaugcacug

SEQ ID NO: 1612953 - RNA, 17 nt, Human
gggacuacaggcaccca

SEQ ID NO: 1612954 - RNA, 14 nt, Human
gggaccccugagcu

SEQ ID NO: 1612955 - RNA, 17 nt, Human
gggaauuucuucaacuc

SEQ ID NO: 1612956 - RNA, 23 nt, Human
gggacaaggacuaggguccuggg

SEQ ID NO: 1612957 - RNA, 14 nt, Human
ggcuuuugugcauu

SEQ ID NO: 1612958 - RNA, 17 nt, Human
ggcuuuucugauccagu

SEQ ID NO: 1612959 - RNA, 21 nt, Human
gggaaggauacaaaagcaugu

SEQ ID NO: 1612960 - RNA, 23 nt, Human
gggaaggauacaaaagcauguga

SEQ ID NO: 1612961 - RNA, 22 nt, Human
gggaaggcagggagggccuggg

SEQ ID NO: 1612962 - RNA, 16 nt, Human
gggaagggggcuggga

SEQ ID NO: 1612963 - RNA, 14 nt, Human
gggaagggggcugg

SEQ ID NO: 1612964 - RNA, 17 nt, Human
gggaagggggcugggac

SEQ ID NO: 1612965 - RNA, 13 nt, Human
gggaaugaagaua

SEQ ID NO: 1612966 - RNA, 15 nt, Human
ggcugaggugggagg

SEQ ID NO: 1612967 - RNA, 13 nt, Human
ggcugagguggga

SEQ ID NO: 1612968 - RNA, 17 nt, Human
ggccccugcccggcugc

SEQ ID NO: 1612969 - RNA, 16 nt, Human
ggccccugcccggcug

SEQ ID NO: 1612970 - RNA, 20 nt, Human
ggccccugcccggcugcgga

SEQ ID NO: 1612971 - RNA, 14 nt, Human
ggcucuggagccca

SEQ ID NO: 1612972 - RNA, 13 nt, Human
ggcucuggagccc

SEQ ID NO: 1612973 - RNA, 23 nt, Human
ggcugcaaaggguaucaggugcu

SEQ ID NO: 1612974 - RNA, 22 nt, Human
ggcugcaaaggguaucaggugc

SEQ ID NO: 1612975 - RNA, 18 nt, Human
ggcugcaaaggguaucag

SEQ ID NO: 1612976 - RNA, 19 nt, Human
ggcugcaccggcuggccug

SEQ ID NO: 1612977 - RNA, 18 nt, Human
ggcugcaccggcuggccu

SEQ ID NO: 1612978 - RNA, 17 nt, Human
ggcugcaccggcuggcc

SEQ ID NO: 1612979 - RNA, 24 nt, Human
ggcugcaaaggguaucaggugcug

SEQ ID NO: 1612980 - RNA, 23 nt, Human
ggcugcuucaaggauccugagcc

SEQ ID NO: 1612981 - RNA, 19 nt, Human
ggcugggagagccuuccag

SEQ ID NO: 1612982 - RNA, 23 nt, Human
ggcugggagagccuuccaggggu

SEQ ID NO: 1612983 - RNA, 20 nt, Human
ggcugggagagccuuccagg

SEQ ID NO: 1612984 - RNA, 14 nt, Human
ggcugggcagagga

SEQ ID NO: 1612985 - RNA, 13 nt, Human
ggcugggcagagg

SEQ ID NO: 1612986 - RNA, 19 nt, Human
ggcugggcagaggaaagca

SEQ ID NO: 1612987 - RNA, 15 nt, Human
ggcugggcagaggaa

SEQ ID NO: 1612988 - RNA, 17 nt, Human
ggcugcugaaggcucga

SEQ ID NO: 1612989 - RNA, 15 nt, Human
ggcugcugaaggcuc

SEQ ID NO: 1612990 - RNA, 18 nt, Human
ggcugcugaaggcucgag

SEQ ID NO: 1612991 - RNA, 14 nt, Human
ggcugcugaaggcu

SEQ ID NO: 1612992 - RNA, 13 nt, Human
ggcugcagggagu

SEQ ID NO: 1612993 - RNA, 12 nt, Human
ggcugcagggag

SEQ ID NO: 1612994 - RNA, 22 nt, Human
ggcugcuucaaggauccugagc

SEQ ID NO: 1612995 - RNA, 14 nt, Human
ggcugcuucaagga

SEQ ID NO: 1612996 - RNA, 12 nt, Human
ggcugcuucaag

SEQ ID NO: 1612997 - RNA, 11 nt, Human
ggcugcuucaa

SEQ ID NO: 1612998 - RNA, 21 nt, Human
gggcacagaaaauggaagaca

SEQ ID NO: 1612999 - RNA, 20 nt, Human
gggcacagaaaauggaagac

SEQ ID NO: 1613000 - RNA, 18 nt, Human
gggcacagaaaauggaag

SEQ ID NO: 1613001 - RNA, 23 nt, Human
gggcacaccgggcacucagaaga

SEQ ID NO: 1613002 - RNA, 16 nt, Human
gggcacagggucucua

SEQ ID NO: 1613003 - RNA, 13 nt, Human
gggcacagggucu

SEQ ID NO: 1613004 - RNA, 19 nt, Human
gggcacucagaagacacug

SEQ ID NO: 1613005 - RNA, 16 nt, Human
gggcacucagaagaca

SEQ ID NO: 1613006 - RNA, 14 nt, Human
gggcaccggggccu

SEQ ID NO: 1613007 - RNA, 18 nt, Human
gggcagaaggaagacuuc

SEQ ID NO: 1613008 - RNA, 14 nt, Human
gggcagaaggaaga

SEQ ID NO: 1613009 - RNA, 20 nt, Human
gggcacucagaagacacuga

SEQ ID NO: 1613010 - RNA, 16 nt, Human
gggcacugguggcccg

SEQ ID NO: 1613011 - RNA, 13 nt, Human
gggcacugguggc

SEQ ID NO: 1613012 - RNA, 12 nt, Human
gggcagagcaga

SEQ ID NO: 1613013 - RNA, 11 nt, Human
gggcagagcag

SEQ ID NO: 1613014 - RNA, 17 nt, Human
gggcagguugguggggg

SEQ ID NO: 1613015 - RNA, 14 nt, Human
gggagugagcuggu

SEQ ID NO: 1613016 - RNA, 11 nt, Human
gggagugagcu

SEQ ID NO: 1613017 - RNA, 18 nt, Human
gggagugacagaggcagc

SEQ ID NO: 1613018 - RNA, 16 nt, Human
gggaggugaccccagg

SEQ ID NO: 1613019 - RNA, 17 nt, Human
gggaggugggauccucc

SEQ ID NO: 1613020 - RNA, 13 nt, Human
gggacugagaaau

SEQ ID NO: 1613021 - RNA, 13 nt, Human
gggauagagagag

SEQ ID NO: 1613022 - RNA, 21 nt, Human
gggauaugauuuaaaucagcc

SEQ ID NO: 1613023 - RNA, 16 nt, Human
gggauccuccaggugc

SEQ ID NO: 1613024 - RNA, 15 nt, Human
gggauccuccaggug

SEQ ID NO: 1613025 - RNA, 18 nt, Human
gggcaacccuggugacca

SEQ ID NO: 1613026 - RNA, 23 nt, Human
gggauccuggaguucugguuccu

SEQ ID NO: 1613027 - RNA, 17 nt, Human
gggcccagagagggugg

SEQ ID NO: 1613028 - RNA, 16 nt, Human
gggccacagagaaagu

SEQ ID NO: 1613029 - RNA, 23 nt, Human
gggccacagagaaaguacuucuc

SEQ ID NO: 1613030 - RNA, 12 nt, Human
gggcaugacacg

SEQ ID NO: 1613031 - RNA, 20 nt, Human
gggcauggccagguggccac

SEQ ID NO: 1613032 - RNA, 17 nt, Human
gggcauggccagguggc

SEQ ID NO: 1613033 - RNA, 15 nt, Human
gggcauggccaggug

SEQ ID NO: 1613034 - RNA, 13 nt, Human
gggccuggcuccc

SEQ ID NO: 1613035 - RNA, 17 nt, Human
gggccuggcucaggugg

SEQ ID NO: 1613036 - RNA, 18 nt, Human
gggccuggccugagcugg

SEQ ID NO: 1613037 - RNA, 14 nt, Human
gggccuggccugag

SEQ ID NO: 1613038 - RNA, 19 nt, Human
gggccuggccugagcuggg

SEQ ID NO: 1613039 - RNA, 13 nt, Human
gggccuggccuga

SEQ ID NO: 1613040 - RNA, 13 nt, Human
gggcccugccucc

SEQ ID NO: 1613041 - RNA, 22 nt, Human
gggccccugccucucugcaggu

SEQ ID NO: 1613042 - RNA, 21 nt, Human
gggccccugccucucugcagg

SEQ ID NO: 1613043 - RNA, 19 nt, Human
gggccccugccucucugca

SEQ ID NO: 1613044 - RNA, 18 nt, Human
gggccccugccucucugc

SEQ ID NO: 1613045 - RNA, 17 nt, Human
gggccccugccucucug

SEQ ID NO: 1613046 - RNA, 15 nt, Human
gggccccugccucuc

SEQ ID NO: 1613047 - RNA, 13 nt, Human
gggccccugccuc

SEQ ID NO: 1613048 - RNA, 14 nt, Human
gggccccagaggcu

SEQ ID NO: 1613049 - RNA, 19 nt, Human
ggaggacgcucucuggccu

SEQ ID NO: 1613050 - RNA, 21 nt, Human
ggaggacgcucucuggccuuc

SEQ ID NO: 1613051 - RNA, 20 nt, Human
ggaggacgcucucuggccuu

SEQ ID NO: 1613052 - RNA, 21 nt, Human
ggaggaucucuugagccuggg

SEQ ID NO: 1613053 - RNA, 17 nt, Human
ggaggaucucuugagcc

SEQ ID NO: 1613054 - RNA, 23 nt, Human
ggaggaucacuugaguccagaag

SEQ ID NO: 1613055 - RNA, 15 nt, Human
ggaggauguucuggg

SEQ ID NO: 1613056 - RNA, 12 nt, Human
ggagggagggcu

SEQ ID NO: 1613057 - RNA, 13 nt, Human
ggagggcuccaga

SEQ ID NO: 1613058 - RNA, 12 nt, Human
ggagggcuccag

SEQ ID NO: 1613059 - RNA, 21 nt, Human
ggagugaguugauagcacaga

SEQ ID NO: 1613060 - RNA, 14 nt, Human
ggagugagcugguu

SEQ ID NO: 1613061 - RNA, 12 nt, Human
ggagugagcugg

SEQ ID NO: 1613062 - RNA, 21 nt, Human
ggagugacagaggcagcccca

SEQ ID NO: 1613063 - RNA, 19 nt, Human
ggagugacagaggcagccc

SEQ ID NO: 1613064 - RNA, 18 nt, Human
ggagugacagaggcagcc

SEQ ID NO: 1613065 - RNA, 17 nt, Human
ggagugacagaggcagc

SEQ ID NO: 1613066 - RNA, 23 nt, Human
ggagugaguugauagcacagacc

SEQ ID NO: 1613067 - RNA, 16 nt, Human
ggaucacagccucuga

SEQ ID NO: 1613068 - RNA, 15 nt, Human
ggagggcuccagaca

SEQ ID NO: 1613069 - RNA, 14 nt, Human
ggagggcuccagac

SEQ ID NO: 1613070 - RNA, 17 nt, Human
ggagggcuccagacaca

SEQ ID NO: 1613071 - RNA, 21 nt, Human
ggagucccaccuuggcugcag

SEQ ID NO: 1613072 - RNA, 20 nt, Human
ggagucccaccuuggcugca

SEQ ID NO: 1613073 - RNA, 16 nt, Human
ggagugacagaggcag

SEQ ID NO: 1613074 - RNA, 11 nt, Human
ggagugacaga

SEQ ID NO: 1613075 - RNA, 20 nt, Human
ggaagccagcaggcucucag

SEQ ID NO: 1613076 - RNA, 12 nt, Human
ggacuccucugu

SEQ ID NO: 1613077 - RNA, 14 nt, Human
ggacuccucugucc

SEQ ID NO: 1613078 - RNA, 15 nt, Human
ggacuccucugucca

SEQ ID NO: 1613079 - RNA, 11 nt, Human
ggacucugccu

SEQ ID NO: 1613080 - RNA, 21 nt, Human
ggagagcuagcagcagggagg

SEQ ID NO: 1613081 - RNA, 17 nt, Human
ggagagcuagcagcagg

SEQ ID NO: 1613082 - RNA, 21 nt, Human
ggacugccagucccccugccc

SEQ ID NO: 1613083 - RNA, 21 nt, Human
ggagaccccuuggggagcagg

SEQ ID NO: 1613084 - RNA, 15 nt, Human
ggagaggggcacagg

SEQ ID NO: 1613085 - RNA, 20 nt, Human
ggagauuuacaacuggggga

SEQ ID NO: 1613086 - RNA, 20 nt, Human
ggagcaaaaucgaugcagug

SEQ ID NO: 1613087 - RNA, 13 nt, Human
ggagcccugggag

SEQ ID NO: 1613088 - RNA, 12 nt, Human
ggagcccuggga

SEQ ID NO: 1613089 - RNA, 18 nt, Human
ggcagcugccuccccucc

SEQ ID NO: 1613090 - RNA, 21 nt, Human
ggcagcugccuccccuccucu

SEQ ID NO: 1613091 - RNA, 19 nt, Human
ggcagcugcgguccaccca

SEQ ID NO: 1613092 - RNA, 22 nt, Human
ggcagcugccuccccuccucug

SEQ ID NO: 1613093 - RNA, 21 nt, Human
ggcagcugcgguccacccagg

SEQ ID NO: 1613094 - RNA, 21 nt, Human
ggcagcuugaggguugggcug

SEQ ID NO: 1613095 - RNA, 21 nt, Human
ggcagcucaccucucccuugg

SEQ ID NO: 1613096 - RNA, 18 nt, Human
ggcagcucaccucucccu

SEQ ID NO: 1613097 - RNA, 22 nt, Human
ggcagcucaccucucccuugga

SEQ ID NO: 1613098 - RNA, 13 nt, Human
ggcagcucagaga

SEQ ID NO: 1613099 - RNA, 23 nt, Human
ggcaggucuugaacuccuggccu

SEQ ID NO: 1613100 - RNA, 13 nt, Human
ggcagguccaggg

SEQ ID NO: 1613101 - RNA, 14 nt, Human
ggcaggaaggcuga

SEQ ID NO: 1613102 - RNA, 23 nt, Human
ggcagauacaggaaaagcugcug

SEQ ID NO: 1613103 - RNA, 23 nt, Human
ggcagaguugaagacagagcuac

SEQ ID NO: 1613104 - RNA, 17 nt, Human
ggcagaggaaagcaaag

SEQ ID NO: 1613105 - RNA, 16 nt, Human
ggcagagcagagacca

SEQ ID NO: 1613106 - RNA, 15 nt, Human
ggcagagcagagacc

SEQ ID NO: 1613107 - RNA, 20 nt, Human
ggcagagcagagaccauccc

SEQ ID NO: 1613108 - RNA, 22 nt, Human
ggcagagcagagaccaucccug

SEQ ID NO: 1613109 - RNA, 16 nt, Human
ggcacccggccccugc

SEQ ID NO: 1613110 - RNA, 15 nt, Human
ggcacccggccccug

SEQ ID NO: 1613111 - RNA, 17 nt, Human
ggcacccggccccugcu

SEQ ID NO: 1613112 - RNA, 16 nt, Human
ggcaaggcugucaauu

SEQ ID NO: 1613113 - RNA, 19 nt, Human
ggcaacugcauuggcuuug

SEQ ID NO: 1613114 - RNA, 23 nt, Human
ggcaacuugggaacuagacuccc

SEQ ID NO: 1613115 - RNA, 18 nt, Human
ggcaacuugggaacuaga

SEQ ID NO: 1613116 - RNA, 18 nt, Human
ggcaacugcauuggcuuu

SEQ ID NO: 1613117 - RNA, 21 nt, Human
ggaucagucugauucccaagc

SEQ ID NO: 1613118 - RNA, 22 nt, Human
ggccaugggacagggaggacgc

SEQ ID NO: 1613119 - RNA, 13 nt, Human
ggccaugggccuc

SEQ ID NO: 1613120 - RNA, 12 nt, Human
ggccaggcuggu

SEQ ID NO: 1613121 - RNA, 12 nt, Human
ggccccugccac

SEQ ID NO: 1613122 - RNA, 16 nt, Human
ggccccugccacccug

SEQ ID NO: 1613123 - RNA, 13 nt, Human
ggccccugccacc

SEQ ID NO: 1613124 - RNA, 13 nt, Human
ggccccugcccgg

SEQ ID NO: 1613125 - RNA, 18 nt, Human
ggccccugccacccuggg

SEQ ID NO: 1613126 - RNA, 17 nt, Human
ggccccugccacccugg

SEQ ID NO: 1613127 - RNA, 21 nt, Human
ggccccucagggucccuggug

SEQ ID NO: 1613128 - RNA, 20 nt, Human
ggccccucagggucccuggu

SEQ ID NO: 1613129 - RNA, 19 nt, Human
ggccccucagggucccugg

SEQ ID NO: 1613130 - RNA, 16 nt, Human
ggccccucaggguccc

SEQ ID NO: 1613131 - RNA, 17 nt, Human
ggccacaagacccuugu

SEQ ID NO: 1613132 - RNA, 16 nt, Human
ggccacaagacccuug

SEQ ID NO: 1613133 - RNA, 15 nt, Human
ggcauuccccaggag

SEQ ID NO: 1613134 - RNA, 16 nt, Human
ggcauuccccaggagg

SEQ ID NO: 1613135 - RNA, 22 nt, Human
ggccaccugcggugcuaucucc

SEQ ID NO: 1613136 - RNA, 16 nt, Human
ggccaccugcggugcu

SEQ ID NO: 1613137 - RNA, 23 nt, Human
ggcauguucucugaggacacuaa

SEQ ID NO: 1613138 - RNA, 15 nt, Human
ggcagguuggugggg

SEQ ID NO: 1613139 - RNA, 17 nt, Human
ggcagguuggugggggc

SEQ ID NO: 1613140 - RNA, 11 nt, Human
ggccacuguga

SEQ ID NO: 1613141 - RNA, 14 nt, Human
ggccaggagccucc

SEQ ID NO: 1613142 - RNA, 16 nt, Human
ggccacugugaagaga

SEQ ID NO: 1613143 - RNA, 16 nt, Human
ggccaggagccuccug

SEQ ID NO: 1613144 - RNA, 11 nt, Human
ggccaggcugg

SEQ ID NO: 1613145 - RNA, 22 nt, Human
ggccaggcugggucgcccugga

SEQ ID NO: 1613146 - RNA, 18 nt, Human
ggccaggcugggucgccc

SEQ ID NO: 1613147 - RNA, 16 nt, Human
ggccaggccagaggga

SEQ ID NO: 1613148 - RNA, 14 nt, Human
ggccaggccagagg

SEQ ID NO: 1613149 - RNA, 18 nt, Human
gcuagauguauguacuuc

SEQ ID NO: 1613150 - RNA, 22 nt, Human
gcuagcagcagggagggcuucu

SEQ ID NO: 1613151 - RNA, 19 nt, Human
gcugcccuggugcugccac

SEQ ID NO: 1613152 - RNA, 18 nt, Human
gcugcccuggugcugcca

SEQ ID NO: 1613153 - RNA, 11 nt, Human
gcugcccugug

SEQ ID NO: 1613154 - RNA, 22 nt, Human
gcugcccuggugcugccacacu

SEQ ID NO: 1613155 - RNA, 20 nt, Human
gcugcccuggugcugccaca

SEQ ID NO: 1613156 - RNA, 14 nt, Human
gcugcccugugagu

SEQ ID NO: 1613157 - RNA, 12 nt, Human
gcugcccuguga

SEQ ID NO: 1613158 - RNA, 23 nt, Human
gcugcccuggugcugccacacuu

SEQ ID NO: 1613159 - RNA, 17 nt, Human
gcugcccuuucugggca

SEQ ID NO: 1613160 - RNA, 16 nt, Human
gcugcuugggcuucau

SEQ ID NO: 1613161 - RNA, 22 nt, Human
gcugcuucaaggauccugagcc

SEQ ID NO: 1613162 - RNA, 21 nt, Human
gcugcuucaaggauccugagc

SEQ ID NO: 1613163 - RNA, 23 nt, Human
gcugcuucaaggauccugagcca

SEQ ID NO: 1613164 - RNA, 18 nt, Human
gcugcgguccacccagga

SEQ ID NO: 1613165 - RNA, 17 nt, Human
gcugcgguccacccagg

SEQ ID NO: 1613166 - RNA, 19 nt, Human
gcugcgguccacccaggag

SEQ ID NO: 1613167 - RNA, 13 nt, Human
gcugcuucaagga

SEQ ID NO: 1613168 - RNA, 22 nt, Human
gcuggaccuugaacuggguacu

SEQ ID NO: 1613169 - RNA, 21 nt, Human
gcuggaccuugaacuggguac

SEQ ID NO: 1613170 - RNA, 22 nt, Human
gcugcuugggcuucauccuccu

SEQ ID NO: 1613171 - RNA, 17 nt, Human
gcugcuugggcuucauc

SEQ ID NO: 1613172 - RNA, 18 nt, Human
gcuggaccuugaacuggg

SEQ ID NO: 1613173 - RNA, 20 nt, Human
gcugggacuacaggcaccca

SEQ ID NO: 1613174 - RNA, 19 nt, Human
gcugggacuacaggcaccc

SEQ ID NO: 1613175 - RNA, 18 nt, Human
gcugggacuacaggcacc

SEQ ID NO: 1613176 - RNA, 13 nt, Human
gcugggacuacag

SEQ ID NO: 1613177 - RNA, 19 nt, Human
gcugggacuacagguguga

SEQ ID NO: 1613178 - RNA, 20 nt, Human
gcugggacaugggaaagggg

SEQ ID NO: 1613179 - RNA, 12 nt, Human
gcuggccuggcc

SEQ ID NO: 1613180 - RNA, 17 nt, Human
gcuggccgggagccuga

SEQ ID NO: 1613181 - RNA, 13 nt, Human
gcuggcccugccc

SEQ ID NO: 1613182 - RNA, 12 nt, Human
gcuggcccugcc

SEQ ID NO: 1613183 - RNA, 22 nt, Human
gcuguauuuuaaaagaaugauu

SEQ ID NO: 1613184 - RNA, 22 nt, Human
gcugguucaggguuggccccug

SEQ ID NO: 1613185 - RNA, 16 nt, Human
gcugucaauuacagga

SEQ ID NO: 1613186 - RNA, 15 nt, Human
gcugguucaggguug

SEQ ID NO: 1613187 - RNA, 21 nt, Human
gcugguuagagguucccuuug

SEQ ID NO: 1613188 - RNA, 18 nt, Human
gcuggugucaccugaaga

SEQ ID NO: 1613189 - RNA, 20 nt, Human
gcuggucccacucaguccau

SEQ ID NO: 1613190 - RNA, 22 nt, Human
gcuggugcccugcuuucagaua

SEQ ID NO: 1613191 - RNA, 24 nt, Human
gcuggugcccugcuuucagauacu

SEQ ID NO: 1613192 - RNA, 23 nt, Human
gcugucaauuacaggaaguacug

SEQ ID NO: 1613193 - RNA, 22 nt, Human
gcugucaauuacaggaaguacu

SEQ ID NO: 1613194 - RNA, 19 nt, Human
gcugucaauuacaggaagu

SEQ ID NO: 1613195 - RNA, 17 nt, Human
gcugucaauuacaggaa

SEQ ID NO: 1613196 - RNA, 21 nt, Human
gcugucccuuacgugaguccu

SEQ ID NO: 1613197 - RNA, 22 nt, Human
gcugucccuuacgugaguccug

SEQ ID NO: 1613198 - RNA, 19 nt, Human
gcugucccuuacgugaguc

SEQ ID NO: 1613199 - RNA, 18 nt, Human
gcugggagagccuuccag

SEQ ID NO: 1613200 - RNA, 17 nt, Human
gcugggagagccuucca

SEQ ID NO: 1613201 - RNA, 13 nt, Human
gcugggagagccu

SEQ ID NO: 1613202 - RNA, 12 nt, Human
gcugggagagcc

SEQ ID NO: 1613203 - RNA, 22 nt, Human
gcugggagagccuuccaggggu

SEQ ID NO: 1613204 - RNA, 19 nt, Human
gcugggagagccuuccagg

SEQ ID NO: 1613205 - RNA, 17 nt, Human
gcugggcuucaguggca

SEQ ID NO: 1613206 - RNA, 21 nt, Human
gcugggauuacaggcuccugc

SEQ ID NO: 1613207 - RNA, 20 nt, Human
gcugggauuacaggcuccug

SEQ ID NO: 1613208 - RNA, 19 nt, Human
gcugggauuacaggcuccu

SEQ ID NO: 1613209 - RNA, 18 nt, Human
gcugggauuacaggcgug

SEQ ID NO: 1613210 - RNA, 17 nt, Human
gcugggauuacaggcgu

SEQ ID NO: 1613211 - RNA, 15 nt, Human
gcugggagcucugca

SEQ ID NO: 1613212 - RNA, 16 nt, Human
gcugggagcucugcag

SEQ ID NO: 1613213 - RNA, 20 nt, Human
gcugggggccucagugccac

SEQ ID NO: 1613214 - RNA, 19 nt, Human
gcugggggccucagugcca

SEQ ID NO: 1613215 - RNA, 19 nt, Human
gcuggucccacucagucca

SEQ ID NO: 1613216 - RNA, 15 nt, Human
gcuggucccacucag

SEQ ID NO: 1613217 - RNA, 13 nt, Human
gcugggggccuca

SEQ ID NO: 1613218 - RNA, 23 nt, Human
gcugggggaagaagcucucuccu

SEQ ID NO: 1613219 - RNA, 12 nt, Human
gcuggggccagu

SEQ ID NO: 1613220 - RNA, 19 nt, Human
gcugggcuucaguggcagc

SEQ ID NO: 1613221 - RNA, 18 nt, Human
gcugggcuucaguggcag

SEQ ID NO: 1613222 - RNA, 19 nt, Human
gcuggggccaggcuggguc

SEQ ID NO: 1613223 - RNA, 16 nt, Human
gcuggggccaggcugg

SEQ ID NO: 1613224 - RNA, 19 nt, Human
gcuugcccuggugccucac

SEQ ID NO: 1613225 - RNA, 17 nt, Human
gcuugcccuggugccuc

SEQ ID NO: 1613226 - RNA, 18 nt, Human
gcuugccaucccucccuc

SEQ ID NO: 1613227 - RNA, 21 nt, Human
gcuugccaucccucccuccac

SEQ ID NO: 1613228 - RNA, 18 nt, Human
gcuugcccuguuaaaaga

SEQ ID NO: 1613229 - RNA, 13 nt, Human
gcuuggaggaagg

SEQ ID NO: 1613230 - RNA, 15 nt, Human
gcuuggaggaaggaa

SEQ ID NO: 1613231 - RNA, 14 nt, Human
gcuuggaggaagga

SEQ ID NO: 1613232 - RNA, 16 nt, Human
gcuugccaucccuccc

SEQ ID NO: 1613233 - RNA, 22 nt, Human
gcuugcagagaugaggccgcca

SEQ ID NO: 1613234 - RNA, 16 nt, Human
gcuucuguugcugccu

SEQ ID NO: 1613235 - RNA, 16 nt, Human
gcuguucacagccaga

SEQ ID NO: 1613236 - RNA, 15 nt, Human
gcuguucacagccag

SEQ ID NO: 1613237 - RNA, 23 nt, Human
gcuguucacagccagacuggcac

SEQ ID NO: 1613238 - RNA, 13 nt, Human
gcuguucagcugg

SEQ ID NO: 1613239 - RNA, 20 nt, Human
gcuuccagugaggcucugcc

SEQ ID NO: 1613240 - RNA, 19 nt, Human
gcuuccagugaggcucugc

SEQ ID NO: 1613241 - RNA, 21 nt, Human
gcuuccagugaggcucugccc

SEQ ID NO: 1613242 - RNA, 17 nt, Human
gcuucucacugccaugc

SEQ ID NO: 1613243 - RNA, 22 nt, Human
gcuuccagugaggcucugcccu

SEQ ID NO: 1613244 - RNA, 20 nt, Human
ggaaaaaauaacaaugaaag

SEQ ID NO: 1613245 - RNA, 14 nt, Human
gcuuuuacuuaaac

SEQ ID NO: 1613246 - RNA, 17 nt, Human
gcuuuuaaaaaaaaaua

SEQ ID NO: 1613247 - RNA, 16 nt, Human
gcuuugggcugcccug

SEQ ID NO: 1613248 - RNA, 15 nt, Human
gcuuugggcugcccu

SEQ ID NO: 1613249 - RNA, 18 nt, Human
gcuuugggcugcccuggu

SEQ ID NO: 1613250 - RNA, 15 nt, Human
ggaaaaauagccugc

SEQ ID NO: 1613251 - RNA, 22 nt, Human
ggaaaaccaagccguggcuucc

SEQ ID NO: 1613252 - RNA, 14 nt, Human
ggaaaaacugauuu

SEQ ID NO: 1613253 - RNA, 13 nt, Human
ggaaaaauagccu

SEQ ID NO: 1613254 - RNA, 14 nt, Human
gcuuugggcugccc

SEQ ID NO: 1613255 - RNA, 16 nt, Human
ggaaaucaaauaugca

SEQ ID NO: 1613256 - RNA, 20 nt, Human
ggaacagacuggaagcacag

SEQ ID NO: 1613257 - RNA, 19 nt, Human
ggaacagacuggaagcaca

SEQ ID NO: 1613258 - RNA, 17 nt, Human
ggaacgcguugaaauug

SEQ ID NO: 1613259 - RNA, 21 nt, Human
ggaacgcguugaaauuguaau

SEQ ID NO: 1613260 - RNA, 23 nt, Human
ggaacuagacucccaagcuggac

SEQ ID NO: 1613261 - RNA, 18 nt, Human
ggaaauauuuauuuuaau

SEQ ID NO: 1613262 - RNA, 17 nt, Human
ggaaauauuuauuuuaa

SEQ ID NO: 1613263 - RNA, 15 nt, Human
ggaaauauuuauuuu

SEQ ID NO: 1613264 - RNA, 13 nt, Human
ggaaauauuuauu

SEQ ID NO: 1613265 - RNA, 12 nt, Human
ggaaauauuuau

SEQ ID NO: 1613266 - RNA, 14 nt, Human
ggaaaauaaauuau

SEQ ID NO: 1613267 - RNA, 19 nt, Human
ggaaaaguuuaauauuaaa

SEQ ID NO: 1613268 - RNA, 15 nt, Human
ggaaaaucagccugc

SEQ ID NO: 1613269 - RNA, 22 nt, Human
ggaagcacaugccucucucagg

SEQ ID NO: 1613270 - RNA, 21 nt, Human
ggaagcacaugccucucucag

SEQ ID NO: 1613271 - RNA, 23 nt, Human
ggaagcacaugccucucucaggc

SEQ ID NO: 1613272 - RNA, 13 nt, Human
ggaagcagcuuuc

SEQ ID NO: 1613273 - RNA, 18 nt, Human
ggaagccagcaggcucuc

SEQ ID NO: 1613274 - RNA, 17 nt, Human
ggaagccagcaggcucu

SEQ ID NO: 1613275 - RNA, 16 nt, Human
ggaagccagcaggcuc

SEQ ID NO: 1613276 - RNA, 15 nt, Human
ggaagccagcaggcu

SEQ ID NO: 1613277 - RNA, 14 nt, Human
ggaagccagcaggc

SEQ ID NO: 1613278 - RNA, 13 nt, Human
ggaagccagcagg

SEQ ID NO: 1613279 - RNA, 17 nt, Human
ggaagcacaugccucuc

SEQ ID NO: 1613280 - RNA, 15 nt, Human
ggaagcacaugccuc

SEQ ID NO: 1613281 - RNA, 14 nt, Human
ggaagcacaugccu

SEQ ID NO: 1613282 - RNA, 13 nt, Human
ggaagcacaugcc

SEQ ID NO: 1613283 - RNA, 17 nt, Human
ggaagcacagcuucauu

SEQ ID NO: 1613284 - RNA, 13 nt, Human
ggaagagccuugc

SEQ ID NO: 1613285 - RNA, 17 nt, Human
uauacccccugcaaagc

SEQ ID NO: 1613286 - RNA, 20 nt, Human
uauacucuuauagacaacau

SEQ ID NO: 1613287 - RNA, 17 nt, Human
uauaauucuacuuugag

SEQ ID NO: 1613288 - RNA, 20 nt, Human
uauaauguaagcucuacuga

SEQ ID NO: 1613289 - RNA, 19 nt, Human
uauaauguaagcucuacug

SEQ ID NO: 1613290 - RNA, 14 nt, Human
uauaauguaagcuc

SEQ ID NO: 1613291 - RNA, 18 nt, Human
uauaacaaugcuguauuu

SEQ ID NO: 1613292 - RNA, 18 nt, Human
uauaaugaaugaaacauu

SEQ ID NO: 1613293 - RNA, 20 nt, Human
uauaaugaaugaaacauuuu

SEQ ID NO: 1613294 - RNA, 15 nt, Human
uaguuuuauaugcuu

SEQ ID NO: 1613295 - RNA, 21 nt, Human
uaguuguaccgcaaugugacu

SEQ ID NO: 1613296 - RNA, 12 nt, Human
uaguuugcaguu

SEQ ID NO: 1613297 - RNA, 23 nt, Human
uaguuugauuaaauucuugcaaa

SEQ ID NO: 1613298 - RNA, 13 nt, Human
uaguuucuccaag

SEQ ID NO: 1613299 - RNA, 15 nt, Human
uaguggauguucuga

SEQ ID NO: 1613300 - RNA, 15 nt, Human
uaguggauggaaggg

SEQ ID NO: 1613301 - RNA, 18 nt, Human
uaguggauggaaggggcu

SEQ ID NO: 1613302 - RNA, 18 nt, Human
uagucaaauugugugaaa

SEQ ID NO: 1613303 - RNA, 18 nt, Human
uagugaugguuccccugu

SEQ ID NO: 1613304 - RNA, 14 nt, Human
uagugaugguuccc

SEQ ID NO: 1613305 - RNA, 19 nt, Human
uauauuuuuuguuaaauga

SEQ ID NO: 1613306 - RNA, 19 nt, Human
uauauuuuuauauuuacua

SEQ ID NO: 1613307 - RNA, 17 nt, Human
uaucaggugcugccauc

SEQ ID NO: 1613308 - RNA, 17 nt, Human
uaucaugacaaagacug

SEQ ID NO: 1613309 - RNA, 16 nt, Human
uaucaugucaaacgug

SEQ ID NO: 1613310 - RNA, 16 nt, Human
uaucaugacaaagacu

SEQ ID NO: 1613311 - RNA, 22 nt, Human
uaucaugugaaaucauucauuu

SEQ ID NO: 1613312 - RNA, 17 nt, Human
uaucaugugaaaucauu

SEQ ID NO: 1613313 - RNA, 21 nt, Human
uaucaugucaaacgugaaaau

SEQ ID NO: 1613314 - RNA, 19 nt, Human
uaucgucacugcuuaacuu

SEQ ID NO: 1613315 - RNA, 15 nt, Human
uaucuaaauguugaa

SEQ ID NO: 1613316 - RNA, 16 nt, Human
uaucuaaauguugaaa

SEQ ID NO: 1613317 - RNA, 23 nt, Human
uauauuuauuacuguaagaaaau

SEQ ID NO: 1613318 - RNA, 20 nt, Human
uauauuuauuacuguaagaa

SEQ ID NO: 1613319 - RNA, 14 nt, Human
uauauuugaaauau

SEQ ID NO: 1613320 - RNA, 13 nt, Human
uauauuugaaaua

SEQ ID NO: 1613321 - RNA, 18 nt, Human
uauauuuuuauauuuacu

SEQ ID NO: 1613322 - RNA, 14 nt, Human
uauauuuuaagacg

SEQ ID NO: 1613323 - RNA, 13 nt, Human
uauauuuuaagac

SEQ ID NO: 1613324 - RNA, 20 nt, Human
uauaugcucugcauguuaca

SEQ ID NO: 1613325 - RNA, 18 nt, Human
uauaugcuauuucuauau

SEQ ID NO: 1613326 - RNA, 16 nt, Human
uauaugcuauuucuau

SEQ ID NO: 1613327 - RNA, 16 nt, Human
uaggccaugggacagg

SEQ ID NO: 1613328 - RNA, 13 nt, Human
uaggccaugggac

SEQ ID NO: 1613329 - RNA, 13 nt, Human
uaggccuggccag

SEQ ID NO: 1613330 - RNA, 14 nt, Human
uaggccuggccaga

SEQ ID NO: 1613331 - RNA, 20 nt, Human
uaggaauugacccacaagaa

SEQ ID NO: 1613332 - RNA, 23 nt, Human
uaggaauugacccacaagaaaug

SEQ ID NO: 1613333 - RNA, 16 nt, Human
uaggaauuguguuuau

SEQ ID NO: 1613334 - RNA, 14 nt, Human
uaggaauuguguuu

SEQ ID NO: 1613335 - RNA, 15 nt, Human
uaggaagguuaaugu

SEQ ID NO: 1613336 - RNA, 17 nt, Human
uaggaagacuuuggaaa

SEQ ID NO: 1613337 - RNA, 16 nt, Human
uaggaagacuuuggaa

SEQ ID NO: 1613338 - RNA, 15 nt, Human
uaggaagacuuugga

SEQ ID NO: 1613339 - RNA, 14 nt, Human
uaggaagacuuugg

SEQ ID NO: 1613340 - RNA, 13 nt, Human
uaggaagacuuug

SEQ ID NO: 1613341 - RNA, 17 nt, Human
uaggaacacuccuucac

SEQ ID NO: 1613342 - RNA, 21 nt, Human
uaggaacuuaaauaaugugaa

SEQ ID NO: 1613343 - RNA, 14 nt, Human
uaggaacacuccuu

SEQ ID NO: 1613344 - RNA, 13 nt, Human
uaggaacacuccu

SEQ ID NO: 1613345 - RNA, 17 nt, Human
uagccugccucuucucu

SEQ ID NO: 1613346 - RNA, 22 nt, Human
uagcucauucuccuuguguuac

SEQ ID NO: 1613347 - RNA, 21 nt, Human
uagcucuaggagggcuggcaa

SEQ ID NO: 1613348 - RNA, 20 nt, Human
uagcugggacuacaggcacc

SEQ ID NO: 1613349 - RNA, 12 nt, Human
uagcugggacua

SEQ ID NO: 1613350 - RNA, 18 nt, Human
uagcugggacuacaggug

SEQ ID NO: 1613351 - RNA, 22 nt, Human
uagcugggagaaagagagagcu

SEQ ID NO: 1613352 - RNA, 11 nt, Human
uagcugggacu

SEQ ID NO: 1613353 - RNA, 14 nt, Human
uagcccaaaaccaa

SEQ ID NO: 1613354 - RNA, 18 nt, Human
uagcccucacccuggggc

SEQ ID NO: 1613355 - RNA, 13 nt, Human
uagccccauaauu

SEQ ID NO: 1613356 - RNA, 18 nt, Human
uagaguuuagcuggaaaa

SEQ ID NO: 1613357 - RNA, 17 nt, Human
uagaguuuagcuggaaa

SEQ ID NO: 1613358 - RNA, 19 nt, Human
uagagguucaaagauauuu

SEQ ID NO: 1613359 - RNA, 16 nt, Human
uagagguucaaagaua

SEQ ID NO: 1613360 - RNA, 21 nt, Human
uagagguucaaagauauuuug

SEQ ID NO: 1613361 - RNA, 16 nt, Human
uagagagagaccacuu

SEQ ID NO: 1613362 - RNA, 14 nt, Human
uagagaguguugaa

SEQ ID NO: 1613363 - RNA, 15 nt, Human
uagagaguguugaaa

SEQ ID NO: 1613364 - RNA, 23 nt, Human
uagaaccaggcaacuugggaacu

SEQ ID NO: 1613365 - RNA, 12 nt, Human
uagaaccaggca

SEQ ID NO: 1613366 - RNA, 18 nt, Human
uagacuggugacugauuc

SEQ ID NO: 1613367 - RNA, 17 nt, Human
uagacuggugacugauu

SEQ ID NO: 1613368 - RNA, 14 nt, Human
uagacuggugacug

SEQ ID NO: 1613369 - RNA, 13 nt, Human
uagacuggugacu

SEQ ID NO: 1613370 - RNA, 20 nt, Human
uagcagggcauggcugggaa

SEQ ID NO: 1613371 - RNA, 23 nt, Human
uagcagagaaugaaagggcccag

SEQ ID NO: 1613372 - RNA, 19 nt, Human
uagcagagaaugaaagggc

SEQ ID NO: 1613373 - RNA, 16 nt, Human
uagcacuuugggaggc

SEQ ID NO: 1613374 - RNA, 20 nt, Human
uagauguauguacuucaugc

SEQ ID NO: 1613375 - RNA, 16 nt, Human
uagauguauguacuuc

SEQ ID NO: 1613376 - RNA, 12 nt, Human
uagauguauaua

SEQ ID NO: 1613377 - RNA, 18 nt, Human
uagauaauacaccacuac

SEQ ID NO: 1613378 - RNA, 23 nt, Human
uaccuuuguucccaaauuucaua

SEQ ID NO: 1613379 - RNA, 22 nt, Human
uaccuuuuuuauacauaaacaa

SEQ ID NO: 1613380 - RNA, 19 nt, Human
uacuaaccagcagaaaugc

SEQ ID NO: 1613381 - RNA, 18 nt, Human
uacuaaccagcagaaaug

SEQ ID NO: 1613382 - RNA, 17 nt, Human
uacuacaguccucccau

SEQ ID NO: 1613383 - RNA, 12 nt, Human
uacuacaguccu

SEQ ID NO: 1613384 - RNA, 20 nt, Human
uacuaauagacaauuuauua

SEQ ID NO: 1613385 - RNA, 13 nt, Human
uacuaacuuuccu

SEQ ID NO: 1613386 - RNA, 15 nt, Human
uacuaauagacaauu

SEQ ID NO: 1613387 - RNA, 17 nt, Human
uacuaauagacaauuua

SEQ ID NO: 1613388 - RNA, 22 nt, Human
uacccaucccauaugccugggc

SEQ ID NO: 1613389 - RNA, 18 nt, Human
uaccuuuuuuauacauaa

SEQ ID NO: 1613390 - RNA, 19 nt, Human
uaccuuuuuuauacauaaa

SEQ ID NO: 1613391 - RNA, 20 nt, Human
uaccuuuuuuauacauaaac

SEQ ID NO: 1613392 - RNA, 20 nt, Human
uaccuuuguauucucuccug

SEQ ID NO: 1613393 - RNA, 19 nt, Human
uaccuuugacaaagguaaa

SEQ ID NO: 1613394 - RNA, 23 nt, Human
uacugauguuccuagugaaagag

SEQ ID NO: 1613395 - RNA, 15 nt, Human
uacugaggugcuaug

SEQ ID NO: 1613396 - RNA, 17 nt, Human
uacucccaucugugaaa

SEQ ID NO: 1613397 - RNA, 16 nt, Human
uacucccaucugugaa

SEQ ID NO: 1613398 - RNA, 14 nt, Human
uacucccaucugug

SEQ ID NO: 1613399 - RNA, 20 nt, Human
uacuacaguccucccaucuc

SEQ ID NO: 1613400 - RNA, 12 nt, Human
uacucaccucac

SEQ ID NO: 1613401 - RNA, 13 nt, Human
uacuacuccugua

SEQ ID NO: 1613402 - RNA, 14 nt, Human
uacucaccucaccc

SEQ ID NO: 1613403 - RNA, 16 nt, Human
uacucagaauucucua

SEQ ID NO: 1613404 - RNA, 22 nt, Human
uacucagaauucucuaguuuga

SEQ ID NO: 1613405 - RNA, 23 nt, Human
uagaaauaucugaaaauguaugu

SEQ ID NO: 1613406 - RNA, 21 nt, Human
uagaaauaucugaaaauguau

SEQ ID NO: 1613407 - RNA, 20 nt, Human
uagaaauaucugaaaaugua

SEQ ID NO: 1613408 - RNA, 15 nt, Human
uagaaauauaauuga

SEQ ID NO: 1613409 - RNA, 21 nt, Human
uacuugcucuugaugccuggc

SEQ ID NO: 1613410 - RNA, 18 nt, Human
uacuuguggacacagcuc

SEQ ID NO: 1613411 - RNA, 15 nt, Human
uacuuguggacacag

SEQ ID NO: 1613412 - RNA, 19 nt, Human
uacuuguggacacagcucu

SEQ ID NO: 1613413 - RNA, 21 nt, Human
uacuguaucaugacaaagacu

SEQ ID NO: 1613414 - RNA, 17 nt, Human
uacugcauaugaaagga

SEQ ID NO: 1613415 - RNA, 16 nt, Human
uacauuuguauaaaau

SEQ ID NO: 1613416 - RNA, 11 nt, Human
uacauuugugu

SEQ ID NO: 1613417 - RNA, 17 nt, Human
uacauuuguauaaaaua

SEQ ID NO: 1613418 - RNA, 22 nt, Human
uacaugagguacugagagugaa

SEQ ID NO: 1613419 - RNA, 21 nt, Human
uacaugagguacugagaguga

SEQ ID NO: 1613420 - RNA, 16 nt, Human
uaccaacacgagcagg

SEQ ID NO: 1613421 - RNA, 22 nt, Human
uacauaagauaaaugugcugaa

SEQ ID NO: 1613422 - RNA, 19 nt, Human
uacaguuacucagaauucu

SEQ ID NO: 1613423 - RNA, 23 nt, Human
uacaguuacucagaauucucuag

SEQ ID NO: 1613424 - RNA, 19 nt, Human
uacauaagauaaaugugcu

SEQ ID NO: 1613425 - RNA, 18 nt, Human
uacauaagauaaaugugc

SEQ ID NO: 1613426 - RNA, 18 nt, Human
uacaguuccuagguauaa

SEQ ID NO: 1613427 - RNA, 18 nt, Human
uaccaccagucugacugu

SEQ ID NO: 1613428 - RNA, 23 nt, Human
uaccacaggaaccacaagacugc

SEQ ID NO: 1613429 - RNA, 15 nt, Human
uaccaccacgcccgg

SEQ ID NO: 1613430 - RNA, 23 nt, Human
uaccauuuugggguacccacugc

SEQ ID NO: 1613431 - RNA, 13 nt, Human
uaccacagacaua

SEQ ID NO: 1613432 - RNA, 22 nt, Human
uacccaggugcuaggaacacuc

SEQ ID NO: 1613433 - RNA, 18 nt, Human
uacccagcgagcccuggu

SEQ ID NO: 1613434 - RNA, 15 nt, Human
uacccacugcucugg

SEQ ID NO: 1613435 - RNA, 14 nt, Human
uacccacugcucug

SEQ ID NO: 1613436 - RNA, 13 nt, Human
uacccacugcucu

SEQ ID NO: 1613437 - RNA, 12 nt, Human
uacccacugcuc

SEQ ID NO: 1613438 - RNA, 11 nt, Human
uacccacugcu

SEQ ID NO: 1613439 - RNA, 19 nt, Human
uacccacccccacccaagg

SEQ ID NO: 1613440 - RNA, 17 nt, Human
uacccacccccacccaa

SEQ ID NO: 1613441 - RNA, 23 nt, Human
uacccacccccacccaagggccu

SEQ ID NO: 1613442 - RNA, 15 nt, Human
uacccacccccaccc

SEQ ID NO: 1613443 - RNA, 12 nt, Human
uacccaccccca

SEQ ID NO: 1613444 - RNA, 15 nt, Human
uacccaaauuaagag

SEQ ID NO: 1613445 - RNA, 13 nt, Human
uacagaauuuuau

SEQ ID NO: 1613446 - RNA, 24 nt, Human
uacagcaaggagauuuacaacugg

SEQ ID NO: 1613447 - RNA, 17 nt, Human
uacacuguuucaaacuu

SEQ ID NO: 1613448 - RNA, 18 nt, Human
uacacuguuucaaacuuu

SEQ ID NO: 1613449 - RNA, 19 nt, Human
uacacuguuucaaacuuua

SEQ ID NO: 1613450 - RNA, 13 nt, Human
uacacuuuaugca

SEQ ID NO: 1613451 - RNA, 22 nt, Human
uacagaaaaguugaauuuuaca

SEQ ID NO: 1613452 - RNA, 18 nt, Human
uacagaaaaguugaauuu

SEQ ID NO: 1613453 - RNA, 22 nt, Human
uacagcuugaccgugaggccag

SEQ ID NO: 1613454 - RNA, 18 nt, Human
uacaggaaaagcugcuga

SEQ ID NO: 1613455 - RNA, 17 nt, Human
uacaggaaaagcugcug

SEQ ID NO: 1613456 - RNA, 23 nt, Human
uacagcuugaccgugaggccaga

SEQ ID NO: 1613457 - RNA, 16 nt, Human
uacaggcacccaccau

SEQ ID NO: 1613458 - RNA, 19 nt, Human
uacaggaaaagcugcugac

SEQ ID NO: 1613459 - RNA, 15 nt, Human
uacaggcauagaguu

SEQ ID NO: 1613460 - RNA, 13 nt, Human
uaauuuuggaauu

SEQ ID NO: 1613461 - RNA, 12 nt, Human
uaauuuuggaau

SEQ ID NO: 1613462 - RNA, 17 nt, Human
uaauuuugaaaaacugc

SEQ ID NO: 1613463 - RNA, 13 nt, Human
uaauuuugaaaaa

SEQ ID NO: 1613464 - RNA, 15 nt, Human
uacaagacacaguga

SEQ ID NO: 1613465 - RNA, 18 nt, Human
uacaauuuuguuucugua

SEQ ID NO: 1613466 - RNA, 19 nt, Human
uacaagagcuuaacagugu

SEQ ID NO: 1613467 - RNA, 21 nt, Human
uacaauuuuguuucuguacuu

SEQ ID NO: 1613468 - RNA, 19 nt, Human
uacaauuuuguuucuguac

SEQ ID NO: 1613469 - RNA, 22 nt, Human
uacacacugcauguuugugauu

SEQ ID NO: 1613470 - RNA, 16 nt, Human
uacacugugcugaguc

SEQ ID NO: 1613471 - RNA, 14 nt, Human
uacacuguuucaaa

SEQ ID NO: 1613472 - RNA, 15 nt, Human
uacacacacauacac

SEQ ID NO: 1613473 - RNA, 21 nt, Human
uacacacacacgcgugcacac

SEQ ID NO: 1613474 - RNA, 23 nt, Human
uacacaaugguuuucuugugugu

SEQ ID NO: 1613475 - RNA, 21 nt, Human
uacacaaugguuuucuugugu

SEQ ID NO: 1613476 - RNA, 17 nt, Human
uacacaaugguuuucuu

SEQ ID NO: 1613477 - RNA, 20 nt, Human
uaauuaaaagaauauuuuaa

SEQ ID NO: 1613478 - RNA, 17 nt, Human
uaauuaaaacacaacau

SEQ ID NO: 1613479 - RNA, 20 nt, Human
uaauuaacauguuaaaccau

SEQ ID NO: 1613480 - RNA, 19 nt, Human
uaauuaacauguuaaacca

SEQ ID NO: 1613481 - RNA, 18 nt, Human
uaauuaacauguuaaacc

SEQ ID NO: 1613482 - RNA, 17 nt, Human
uaauuaacauguuaaac

SEQ ID NO: 1613483 - RNA, 15 nt, Human
uaauuaacauguuaa

SEQ ID NO: 1613484 - RNA, 14 nt, Human
uaauuaacauguua

SEQ ID NO: 1613485 - RNA, 12 nt, Human
uaauuaacaugu

SEQ ID NO: 1613486 - RNA, 15 nt, Human
uaauguuucaaacau

SEQ ID NO: 1613487 - RNA, 14 nt, Human
uaauguuucaaaca

SEQ ID NO: 1613488 - RNA, 23 nt, Human
uaaugcgcaggcuggcccugccc

SEQ ID NO: 1613489 - RNA, 14 nt, Human
uaaugcgugcauac

SEQ ID NO: 1613490 - RNA, 22 nt, Human
uaaugcgcaggcuggcccugcc

SEQ ID NO: 1613491 - RNA, 19 nt, Human
uaaugcgcaggcuggcccu

SEQ ID NO: 1613492 - RNA, 20 nt, Human
uaauugacaggauuauugga

SEQ ID NO: 1613493 - RNA, 22 nt, Human
uaauugacaggauuauuggaaa

SEQ ID NO: 1613494 - RNA, 18 nt, Human
uaauucuuagcucauucu

SEQ ID NO: 1613495 - RNA, 19 nt, Human
uaauuugugauacaaugcu

SEQ ID NO: 1613496 - RNA, 22 nt, Human
uaauuugugauacaaugcugug

SEQ ID NO: 1613497 - RNA, 23 nt, Human
uaauuuguaguguuggagaagaa

SEQ ID NO: 1613498 - RNA, 14 nt, Human
uaauuugugauaca

SEQ ID NO: 1613499 - RNA, 15 nt, Human
uaauuugugauacaa

SEQ ID NO: 1613500 - RNA, 18 nt, Human
uaauuugugauacaaugc

SEQ ID NO: 1613501 - RNA, 20 nt, Human
uaauuuguaguguuggagaa

SEQ ID NO: 1613502 - RNA, 18 nt, Human
uaauuugguuuucacauu

SEQ ID NO: 1613503 - RNA, 17 nt, Human
uaauuugguuuucacau

SEQ ID NO: 1613504 - RNA, 15 nt, Human
uaauuugguuuucac

SEQ ID NO: 1613505 - RNA, 22 nt, Human
uaauuggaaaggcagcucuaaa

SEQ ID NO: 1613506 - RNA, 20 nt, Human
uaauaaggaaaaguuuaaua

SEQ ID NO: 1613507 - RNA, 11 nt, Human
uaauaaagcug

SEQ ID NO: 1613508 - RNA, 20 nt, Human
uaagugguacuaacuuuccu

SEQ ID NO: 1613509 - RNA, 15 nt, Human
uaauaauguuucaaa

SEQ ID NO: 1613510 - RNA, 23 nt, Human
uaauaauuauaugcuauuucuau

SEQ ID NO: 1613511 - RNA, 22 nt, Human
uaauaauuauaugcuauuucua

SEQ ID NO: 1613512 - RNA, 20 nt, Human
uaauaauuauaugcuauuuc

SEQ ID NO: 1613513 - RNA, 19 nt, Human
uaauaauuauaugcuauuu

SEQ ID NO: 1613514 - RNA, 16 nt, Human
uaauaauuauaugcua

SEQ ID NO: 1613515 - RNA, 15 nt, Human
uaauaauuauaugcu

SEQ ID NO: 1613516 - RNA, 21 nt, Human
uaauaguucagguaacaggca

SEQ ID NO: 1613517 - RNA, 14 nt, Human
uaauacaccacuac

SEQ ID NO: 1613518 - RNA, 16 nt, Human
uaaucguguccccuau

SEQ ID NO: 1613519 - RNA, 16 nt, Human
uaaucgaccugccucg

SEQ ID NO: 1613520 - RNA, 14 nt, Human
uaaucgaccugccu

SEQ ID NO: 1613521 - RNA, 13 nt, Human
uaaucgaccugcc

SEQ ID NO: 1613522 - RNA, 15 nt, Human
uaauauuaaagccau

SEQ ID NO: 1613523 - RNA, 14 nt, Human
uaauauuaaagcca

SEQ ID NO: 1613524 - RNA, 13 nt, Human
uaauauuaaagcc

SEQ ID NO: 1613525 - RNA, 12 nt, Human
uaauauuaaagc

SEQ ID NO: 1613526 - RNA, 19 nt, Human
uaaugccacuaaauugaca

SEQ ID NO: 1613527 - RNA, 23 nt, Human
uaaugaugucguuugaaucacag

SEQ ID NO: 1613528 - RNA, 17 nt, Human
uaaugaugucguuugaa

SEQ ID NO: 1613529 - RNA, 11 nt, Human
uaaucuaaaug

SEQ ID NO: 1613530 - RNA, 12 nt, Human
uaaucuaaaugg

SEQ ID NO: 1613531 - RNA, 21 nt, Human
uaacuuuuauaaacuuuaccu

SEQ ID NO: 1613532 - RNA, 22 nt, Human
uaacuuuuauaaacuuuaccuu

SEQ ID NO: 1613533 - RNA, 22 nt, Human
uaagaaccuuuugagugccuua

SEQ ID NO: 1613534 - RNA, 17 nt, Human
uaagagagucuauuuac

SEQ ID NO: 1613535 - RNA, 23 nt, Human
uaagagggauuagggagagaaga

SEQ ID NO: 1613536 - RNA, 23 nt, Human
uaagagggagggagggcuccaga

SEQ ID NO: 1613537 - RNA, 22 nt, Human
uaagagggagggagggcuccag

SEQ ID NO: 1613538 - RNA, 12 nt, Human
uaagagggaggg

SEQ ID NO: 1613539 - RNA, 14 nt, Human
uaagauaaaugugc

SEQ ID NO: 1613540 - RNA, 17 nt, Human
uaagauaaaugugcuga

SEQ ID NO: 1613541 - RNA, 16 nt, Human
uaagauaaaugugcug

SEQ ID NO: 1613542 - RNA, 21 nt, Human
uaagccagacaucaacagaua

SEQ ID NO: 1613543 - RNA, 20 nt, Human
uaagccagacaucaacagau

SEQ ID NO: 1613544 - RNA, 19 nt, Human
uaaggaugcuuguacauaa

SEQ ID NO: 1613545 - RNA, 21 nt, Human
uaagccuuuggaaacagcucg

SEQ ID NO: 1613546 - RNA, 17 nt, Human
uaagccuuuggaaacag

SEQ ID NO: 1613547 - RNA, 14 nt, Human
uaagccuuuggaaa

SEQ ID NO: 1613548 - RNA, 20 nt, Human
uaaggaugcuuguacauaau

SEQ ID NO: 1613549 - RNA, 21 nt, Human
uaaggaugcuuguacauaaug

SEQ ID NO: 1613550 - RNA, 22 nt, Human
uaaggaugcuuguacauaaugc

SEQ ID NO: 1613551 - RNA, 23 nt, Human
uaaggaugcuuguacauaaugcg

SEQ ID NO: 1613552 - RNA, 16 nt, Human
uaaggauguucuagca

SEQ ID NO: 1613553 - RNA, 15 nt, Human
uaaggcaaucauggu

SEQ ID NO: 1613554 - RNA, 13 nt, Human
uaagccagacauc

SEQ ID NO: 1613555 - RNA, 20 nt, Human
uaagcauuccaacuaucuca

SEQ ID NO: 1613556 - RNA, 18 nt, Human
uaagcauuccaacuaucu

SEQ ID NO: 1613557 - RNA, 16 nt, Human
uaagcauuccaacuau

SEQ ID NO: 1613558 - RNA, 15 nt, Human
uaagcaugcacaaau

SEQ ID NO: 1613559 - RNA, 23 nt, Human
uaagcauauauuuuuauauuuac

SEQ ID NO: 1613560 - RNA, 19 nt, Human
uaagcauauauuuuuauau

SEQ ID NO: 1613561 - RNA, 22 nt, Human
uaagcauauauuuuuauauuua

SEQ ID NO: 1613562 - RNA, 21 nt, Human
uaagcauauauuuuuauauuu

SEQ ID NO: 1613563 - RNA, 20 nt, Human
uaacuuuuauaaacuuuacc

SEQ ID NO: 1613564 - RNA, 17 nt, Human
uaacugagugccuuuug

SEQ ID NO: 1613565 - RNA, 16 nt, Human
uaacugagugccuuuu

SEQ ID NO: 1613566 - RNA, 19 nt, Human
uaacaggcagauacaggaa

SEQ ID NO: 1613567 - RNA, 17 nt, Human
uaacauguuaaaccaug

SEQ ID NO: 1613568 - RNA, 18 nt, Human
uaacauguuaaaccaugg

SEQ ID NO: 1613569 - RNA, 14 nt, Human
uaaccagcagaaau

SEQ ID NO: 1613570 - RNA, 16 nt, Human
uaaccagcagaaaugc

SEQ ID NO: 1613571 - RNA, 19 nt, Human
uaaccagcagaaaugccuu

SEQ ID NO: 1613572 - RNA, 14 nt, Human
uaacagaaauguac

SEQ ID NO: 1613573 - RNA, 15 nt, Human
uaacagaaauguaca

SEQ ID NO: 1613574 - RNA, 13 nt, Human
uaacagaaaugua

SEQ ID NO: 1613575 - RNA, 14 nt, Human
uaaauuuaguauuu

SEQ ID NO: 1613576 - RNA, 15 nt, Human
uaaauugcuccuuga

SEQ ID NO: 1613577 - RNA, 19 nt, Human
uaaaucccauuauucaaag

SEQ ID NO: 1613578 - RNA, 17 nt, Human
uaaaucccauuauucaa

SEQ ID NO: 1613579 - RNA, 16 nt, Human
uaaaucccauuauuca

SEQ ID NO: 1613580 - RNA, 23 nt, Human
uaaauccauuuggaaaucuuuaa

SEQ ID NO: 1613581 - RNA, 22 nt, Human
uaaauccauuuggaaaucuuua

SEQ ID NO: 1613582 - RNA, 19 nt, Human
uaaauccauuuggaaaucu

SEQ ID NO: 1613583 - RNA, 18 nt, Human
uaaauccauuuggaaauc

SEQ ID NO: 1613584 - RNA, 18 nt, Human
uaaauauaugcuaagucu

SEQ ID NO: 1613585 - RNA, 22 nt, Human
uaaauauauuuuaagacgaaac

SEQ ID NO: 1613586 - RNA, 16 nt, Human
uaaauauauuuuaaga

SEQ ID NO: 1613587 - RNA, 19 nt, Human
uaaaucagccguguaacca

SEQ ID NO: 1613588 - RNA, 20 nt, Human
uaaaucagacuaugaaguuu

SEQ ID NO: 1613589 - RNA, 19 nt, Human
uaaaucaaguuggcuucua

SEQ ID NO: 1613590 - RNA, 14 nt, Human
uaaauccauuugga

SEQ ID NO: 1613591 - RNA, 16 nt, Human
uaaauccauuuggaaa

SEQ ID NO: 1613592 - RNA, 15 nt, Human
uaaauccauuuggaa

SEQ ID NO: 1613593 - RNA, 17 nt, Human
uaaauaaaaauaauccu

SEQ ID NO: 1613594 - RNA, 13 nt, Human
uaaaguuucuguu

SEQ ID NO: 1613595 - RNA, 14 nt, Human
uaaaguuuguugaa

SEQ ID NO: 1613596 - RNA, 22 nt, Human
uaaaguguauuuuuuuacuaau

SEQ ID NO: 1613597 - RNA, 23 nt, Human
uaaaguguauuuuuuuacuaaua

SEQ ID NO: 1613598 - RNA, 21 nt, Human
uaaaguguauuuuuuuacuaa

SEQ ID NO: 1613599 - RNA, 23 nt, Human
uaaaguugaauuuauuggcuuuu

SEQ ID NO: 1613600 - RNA, 21 nt, Human
uaaaguugaauuuauuggcuu

SEQ ID NO: 1613601 - RNA, 19 nt, Human
uaaaguugaauuuauuggc

SEQ ID NO: 1613602 - RNA, 17 nt, Human
uaaaguugaauuuauug

SEQ ID NO: 1613603 - RNA, 15 nt, Human
uaaaguugaauuuau

SEQ ID NO: 1613604 - RNA, 14 nt, Human
uaaaguugaauuua

SEQ ID NO: 1613605 - RNA, 13 nt, Human
uaaaguugaauuu

SEQ ID NO: 1613606 - RNA, 20 nt, Human
uaaacuuuuuucuuacuguc

SEQ ID NO: 1613607 - RNA, 15 nt, Human
uaaacuuuucugaua

SEQ ID NO: 1613608 - RNA, 14 nt, Human
uaaacuuuucugau

SEQ ID NO: 1613609 - RNA, 13 nt, Human
uaaacuuuucuga

SEQ ID NO: 1613610 - RNA, 17 nt, Human
uaaaauggguuuuacug

SEQ ID NO: 1613611 - RNA, 18 nt, Human
uaaacaagaccacguuuc

SEQ ID NO: 1613612 - RNA, 23 nt, Human
uaaacaagaccacguuucuaaag

SEQ ID NO: 1613613 - RNA, 19 nt, Human
uaaacaagaccacguuucu

SEQ ID NO: 1613614 - RNA, 21 nt, Human
uaaacacucuugaaaaaugca

SEQ ID NO: 1613615 - RNA, 22 nt, Human
uaaacuuuaccuuuuuuauaca

SEQ ID NO: 1613616 - RNA, 16 nt, Human
uaaacuuuaccuuuuu

SEQ ID NO: 1613617 - RNA, 14 nt, Human
uaaacuuaaucuaa

SEQ ID NO: 1613618 - RNA, 18 nt, Human
uaaacuuaaucuaaaugg

SEQ ID NO: 1613619 - RNA, 19 nt, Human
uaaacuuaaucuaaaugga

SEQ ID NO: 1613620 - RNA, 23 nt, Human
uaaacugcccccucugcccugcg

SEQ ID NO: 1613621 - RNA, 22 nt, Human
uaaacugcccccucugcccugc

SEQ ID NO: 1613622 - RNA, 21 nt, Human
uaaacugcccccucugcccug

SEQ ID NO: 1613623 - RNA, 20 nt, Human
uaaacugcccccucugcccu

SEQ ID NO: 1613624 - RNA, 14 nt, Human
uaaaagaugaaaau

SEQ ID NO: 1613625 - RNA, 15 nt, Human
uaaaaaugguuuaaa

SEQ ID NO: 1613626 - RNA, 21 nt, Human
uaaaagggacugagaaauuua

SEQ ID NO: 1613627 - RNA, 20 nt, Human
uaaaagggacugagaaauuu

SEQ ID NO: 1613628 - RNA, 19 nt, Human
uaaaagggacugagaaauu

SEQ ID NO: 1613629 - RNA, 17 nt, Human
uaaaagggacugagaaa

SEQ ID NO: 1613630 - RNA, 18 nt, Human
uaaaauccauacauuugu

SEQ ID NO: 1613631 - RNA, 19 nt, Human
uaaaauccauacauuugug

SEQ ID NO: 1613632 - RNA, 16 nt, Human
uaaaaugagaaaucua

SEQ ID NO: 1613633 - RNA, 15 nt, Human
uaaaaugagaaaucu

SEQ ID NO: 1613634 - RNA, 13 nt, Human
uaaaaugagaaau

SEQ ID NO: 1613635 - RNA, 16 nt, Human
guuuaguaaucauauu

SEQ ID NO: 1613636 - RNA, 18 nt, Human
guuuagucuugucucaga

SEQ ID NO: 1613637 - RNA, 14 nt, Human
guuuagucuugucu

SEQ ID NO: 1613638 - RNA, 17 nt, Human
guuuagaaagcuugccc

SEQ ID NO: 1613639 - RNA, 13 nt, Human
guuuagaaagcuu

SEQ ID NO: 1613640 - RNA, 21 nt, Human
gguuggccccugcccggcugc

SEQ ID NO: 1613641 - RNA, 14 nt, Human
guuucagaaaugug

SEQ ID NO: 1613642 - RNA, 18 nt, Human
guuucagaaauguguuau

SEQ ID NO: 1613643 - RNA, 20 nt, Human
guuuccuggcacugcuucca

SEQ ID NO: 1613644 - RNA, 16 nt, Human
guuuccuggcacugcu

SEQ ID NO: 1613645 - RNA, 17 nt, Human
guuuccugcccugggag

SEQ ID NO: 1613646 - RNA, 13 nt, Human
guuuccugcccug

SEQ ID NO: 1613647 - RNA, 22 nt, Human
guuuccuggcacugcuuccagu

SEQ ID NO: 1613648 - RNA, 21 nt, Human
guuuccuggcacugcuuccag

SEQ ID NO: 1613649 - RNA, 16 nt, Human
guuuccuuauauuaug

SEQ ID NO: 1613650 - RNA, 22 nt, Human
guuuccugcccugggaggcagu

SEQ ID NO: 1613651 - RNA, 17 nt, Human
guuuguaaauuaacuuu

SEQ ID NO: 1613652 - RNA, 19 nt, Human
guuuguaaauuaacuuuua

SEQ ID NO: 1613653 - RNA, 20 nt, Human
guuuguaaauuaacuuuuau

SEQ ID NO: 1613654 - RNA, 23 nt, Human
guuugugcugguguaugugugaa

SEQ ID NO: 1613655 - RNA, 19 nt, Human
guuuguggaaaaugaaaau

SEQ ID NO: 1613656 - RNA, 18 nt, Human
guuuguuccccaagacau

SEQ ID NO: 1613657 - RNA, 17 nt, Human
guuugauuaaauucuug

SEQ ID NO: 1613658 - RNA, 19 nt, Human
guuugauuaaauucuugca

SEQ ID NO: 1613659 - RNA, 22 nt, Human
guuugauuaaauucuugcaaag

SEQ ID NO: 1613660 - RNA, 15 nt, Human
guuucuaaagcugcc

SEQ ID NO: 1613661 - RNA, 14 nt, Human
guuucuaaagcugc

SEQ ID NO: 1613662 - RNA, 16 nt, Human
guuucuaaagcugcca

SEQ ID NO: 1613663 - RNA, 20 nt, Human
guuucuaaagcugccagccg

SEQ ID NO: 1613664 - RNA, 16 nt, Human
guuugaaccaagaacu

SEQ ID NO: 1613665 - RNA, 17 nt, Human
guuucuuuguaaugaaa

SEQ ID NO: 1613666 - RNA, 14 nt, Human
guuucuuuguaaug

SEQ ID NO: 1613667 - RNA, 16 nt, Human
guuuucauuaucucaa

SEQ ID NO: 1613668 - RNA, 20 nt, Human
guuuuccagguuuaagcugu

SEQ ID NO: 1613669 - RNA, 18 nt, Human
guuuucaggcuagaugua

SEQ ID NO: 1613670 - RNA, 16 nt, Human
guuuucaguguacaug

SEQ ID NO: 1613671 - RNA, 17 nt, Human
guuuucaguguacaugg

SEQ ID NO: 1613672 - RNA, 18 nt, Human
guuuguuucugaaaggga

SEQ ID NO: 1613673 - RNA, 16 nt, Human
guuuguugugaggauu

SEQ ID NO: 1613674 - RNA, 12 nt, Human
guuuguuuaguc

SEQ ID NO: 1613675 - RNA, 15 nt, Human
guuuucugagaaaga

SEQ ID NO: 1613676 - RNA, 19 nt, Human
guuuucucuugagagggug

SEQ ID NO: 1613677 - RNA, 12 nt, Human
guuuucucuuga

SEQ ID NO: 1613678 - RNA, 19 nt, Human
guuuuuauggcuuuugugc

SEQ ID NO: 1613679 - RNA, 22 nt, Human
guuuuuauggcuuuugugcauu

SEQ ID NO: 1613680 - RNA, 23 nt, Human
guuuuuauggcuuuugugcauua

SEQ ID NO: 1613681 - RNA, 16 nt, Human
uaaaaaagaaacauuu

SEQ ID NO: 1613682 - RNA, 23 nt, Human
uaaaaaacugcugacuguuuucu

SEQ ID NO: 1613683 - RNA, 20 nt, Human
uaaaaaacugcugacuguuu

SEQ ID NO: 1613684 - RNA, 12 nt, Human
uaaaaaacacug

SEQ ID NO: 1613685 - RNA, 17 nt, Human
uaaaaacaaagaaauua

SEQ ID NO: 1613686 - RNA, 11 nt, Human
uaaaaaacacu

SEQ ID NO: 1613687 - RNA, 15 nt, Human
ucaguuacucuucag

SEQ ID NO: 1613688 - RNA, 17 nt, Human
ucaguuguuaguguguc

SEQ ID NO: 1613689 - RNA, 15 nt, Human
ucauaauuauuauuu

SEQ ID NO: 1613690 - RNA, 13 nt, Human
ucauacccacccc

SEQ ID NO: 1613691 - RNA, 17 nt, Human
ucagugugacugaucuc

SEQ ID NO: 1613692 - RNA, 13 nt, Human
ucagugugacuga

SEQ ID NO: 1613693 - RNA, 11 nt, Human
ucaguguacau

SEQ ID NO: 1613694 - RNA, 23 nt, Human
ucagugguuggcaauuguuucaa

SEQ ID NO: 1613695 - RNA, 15 nt, Human
ucagucuggcccuuc

SEQ ID NO: 1613696 - RNA, 24 nt, Human
ucagucugauucccaagcucugcu

SEQ ID NO: 1613697 - RNA, 18 nt, Human
ucauuaggugugacugaa

SEQ ID NO: 1613698 - RNA, 21 nt, Human
ucauuaggugugacugaauuu

SEQ ID NO: 1613699 - RNA, 22 nt, Human
ucauuaggugugacugaauuuc

SEQ ID NO: 1613700 - RNA, 13 nt, Human
ucauuauuuuauu

SEQ ID NO: 1613701 - RNA, 15 nt, Human
ucauuauuuuauuau

SEQ ID NO: 1613702 - RNA, 14 nt, Human
ucauuauuuuauua

SEQ ID NO: 1613703 - RNA, 22 nt, Human
ucauuauuuuauuaugaaacuu

SEQ ID NO: 1613704 - RNA, 19 nt, Human
ucauuauuuuauuaugaaa

SEQ ID NO: 1613705 - RNA, 18 nt, Human
ucauuauuuuauuaugaa

SEQ ID NO: 1613706 - RNA, 16 nt, Human
ucauuauuuuauuaug

SEQ ID NO: 1613707 - RNA, 16 nt, Human
ucauuaggugugacug

SEQ ID NO: 1613708 - RNA, 15 nt, Human
ucauacccaccccca

SEQ ID NO: 1613709 - RNA, 14 nt, Human
ucauacccaccccc

SEQ ID NO: 1613710 - RNA, 20 nt, Human
ucauacccacccccacccaa

SEQ ID NO: 1613711 - RNA, 21 nt, Human
ucauacccacccccacccaag

SEQ ID NO: 1613712 - RNA, 20 nt, Human
uccaagcauuuagauguaua

SEQ ID NO: 1613713 - RNA, 14 nt, Human
uccacaacacacag

SEQ ID NO: 1613714 - RNA, 14 nt, Human
uccacaagagccca

SEQ ID NO: 1613715 - RNA, 15 nt, Human
uccacaagagcccag

SEQ ID NO: 1613716 - RNA, 23 nt, Human
uccaccucccugcaauaaaaugg

SEQ ID NO: 1613717 - RNA, 12 nt, Human
uccaccugccag

SEQ ID NO: 1613718 - RNA, 12 nt, Human
uccaccucccug

SEQ ID NO: 1613719 - RNA, 14 nt, Human
uccaccuacaugag

SEQ ID NO: 1613720 - RNA, 13 nt, Human
uccacuuggucug

SEQ ID NO: 1613721 - RNA, 12 nt, Human
uccacuuggucu

SEQ ID NO: 1613722 - RNA, 13 nt, Human
uccaccugccagg

SEQ ID NO: 1613723 - RNA, 14 nt, Human
uccacuuggucugu

SEQ ID NO: 1613724 - RNA, 14 nt, Human
uccagauccuggaa

SEQ ID NO: 1613725 - RNA, 17 nt, Human
uccagauccuggaaauc

SEQ ID NO: 1613726 - RNA, 16 nt, Human
uccagauccuggaaau

SEQ ID NO: 1613727 - RNA, 23 nt, Human
uccagccaaagccuccuccagcc

SEQ ID NO: 1613728 - RNA, 22 nt, Human
uccagcagauuauucacugauu

SEQ ID NO: 1613729 - RNA, 20 nt, Human
uccagcagauuauucacuga

SEQ ID NO: 1613730 - RNA, 23 nt, Human
uccaagcauaccaacacgagcag

SEQ ID NO: 1613731 - RNA, 17 nt, Human
uccaagcauuuagaugu

SEQ ID NO: 1613732 - RNA, 13 nt, Human
uccaagcaaaugu

SEQ ID NO: 1613733 - RNA, 19 nt, Human
uccaagaccuucuccuuca

SEQ ID NO: 1613734 - RNA, 20 nt, Human
uccaagaagcccaggaaagg

SEQ ID NO: 1613735 - RNA, 22 nt, Human
uccaagaagcccaggaaaggcu

SEQ ID NO: 1613736 - RNA, 14 nt, Human
uccaagaauuucua

SEQ ID NO: 1613737 - RNA, 12 nt, Human
uccaaagaaaug

SEQ ID NO: 1613738 - RNA, 23 nt, Human
uccaaacugacucuuaagaagac

SEQ ID NO: 1613739 - RNA, 16 nt, Human
uccaaaauaaaacuuu

SEQ ID NO: 1613740 - RNA, 17 nt, Human
uccaaaauaaaacuuuu

SEQ ID NO: 1613741 - RNA, 19 nt, Human
uccaaacuaccuuccaguu

SEQ ID NO: 1613742 - RNA, 22 nt, Human
ucauuucugcaucagcugcuga

SEQ ID NO: 1613743 - RNA, 16 nt, Human
ucauuucugcaucagc

SEQ ID NO: 1613744 - RNA, 14 nt, Human
ucauuucuuugagu

SEQ ID NO: 1613745 - RNA, 22 nt, Human
ucauucagauaugauucaaaug

SEQ ID NO: 1613746 - RNA, 16 nt, Human
ucccaaauuucauacc

SEQ ID NO: 1613747 - RNA, 13 nt, Human
ucccaacucaccc

SEQ ID NO: 1613748 - RNA, 15 nt, Human
ucccaacucacccca

SEQ ID NO: 1613749 - RNA, 14 nt, Human
ucccaacucacccc

SEQ ID NO: 1613750 - RNA, 16 nt, Human
ucccaacucaccccag

SEQ ID NO: 1613751 - RNA, 15 nt, Human
ucccaagcucugcuc

SEQ ID NO: 1613752 - RNA, 14 nt, Human
ucccaagcucugcu

SEQ ID NO: 1613753 - RNA, 13 nt, Human
ucccaagcucugc

SEQ ID NO: 1613754 - RNA, 12 nt, Human
ucccaagcucug

SEQ ID NO: 1613755 - RNA, 17 nt, Human
ucccaagcucugcuccu

SEQ ID NO: 1613756 - RNA, 18 nt, Human
ucccaaggcucugagcaa

SEQ ID NO: 1613757 - RNA, 23 nt, Human
uccagcucaccagccccagugcc

SEQ ID NO: 1613758 - RNA, 16 nt, Human
uccauccaggccauuc

SEQ ID NO: 1613759 - RNA, 15 nt, Human
uccauggacuuuguu

SEQ ID NO: 1613760 - RNA, 14 nt, Human
uccauggacuuugu

SEQ ID NO: 1613761 - RNA, 23 nt, Human
ucccaucucacacaugagcauca

SEQ ID NO: 1613762 - RNA, 20 nt, Human
ucccaucucacacaugagca

SEQ ID NO: 1613763 - RNA, 18 nt, Human
ucccaggcugagccucag

SEQ ID NO: 1613764 - RNA, 16 nt, Human
ucccaggcugagccuc

SEQ ID NO: 1613765 - RNA, 21 nt, Human
ucccaucugugaaaggaaaga

SEQ ID NO: 1613766 - RNA, 22 nt, Human
ucccaggcauuccccaggaggc

SEQ ID NO: 1613767 - RNA, 23 nt, Human
ucccaggcauuccccaggaggcc

SEQ ID NO: 1613768 - RNA, 16 nt, Human
ucccaggauguacaag

SEQ ID NO: 1613769 - RNA, 15 nt, Human
ucccaggcugagccu

SEQ ID NO: 1613770 - RNA, 21 nt, Human
ucccaggcgccccuucccccu

SEQ ID NO: 1613771 - RNA, 18 nt, Human
ucccaggcgccccuuccc

SEQ ID NO: 1613772 - RNA, 20 nt, Human
ucccaggcgccccuuccccc

SEQ ID NO: 1613773 - RNA, 21 nt, Human
ucccaggcauuccccaggagg

SEQ ID NO: 1613774 - RNA, 20 nt, Human
ucccaggcauuccccaggag

SEQ ID NO: 1613775 - RNA, 15 nt, Human
ucccaccucagccuc

SEQ ID NO: 1613776 - RNA, 14 nt, Human
ucccaccucagccu

SEQ ID NO: 1613777 - RNA, 13 nt, Human
ucccaccucagcc

SEQ ID NO: 1613778 - RNA, 22 nt, Human
ucccaaggcucugagcaaaugu

SEQ ID NO: 1613779 - RNA, 21 nt, Human
ucccccuuccauggacuuugu

SEQ ID NO: 1613780 - RNA, 20 nt, Human
uccccgcacugggcuugggg

SEQ ID NO: 1613781 - RNA, 13 nt, Human
uccccaggaggcc

SEQ ID NO: 1613782 - RNA, 13 nt, Human
ucccccucuggcu

SEQ ID NO: 1613783 - RNA, 13 nt, Human
ucccccugcccca

SEQ ID NO: 1613784 - RNA, 17 nt, Human
ucccccaucucuucugg

SEQ ID NO: 1613785 - RNA, 21 nt, Human
uccccugcuggguguggcgca

SEQ ID NO: 1613786 - RNA, 20 nt, Human
uccccugcuggguguggcgc

SEQ ID NO: 1613787 - RNA, 15 nt, Human
uccccugcugggugu

SEQ ID NO: 1613788 - RNA, 14 nt, Human
uccccugcugggug

SEQ ID NO: 1613789 - RNA, 23 nt, Human
uccccuguccccgcacugggcuu

SEQ ID NO: 1613790 - RNA, 22 nt, Human
uccccuguagagugggagcuga

SEQ ID NO: 1613791 - RNA, 15 nt, Human
uccccuguucacucu

SEQ ID NO: 1613792 - RNA, 19 nt, Human
uccccuguagagugggagc

SEQ ID NO: 1613793 - RNA, 24 nt, Human
uccccugcuggguguggcgcagca

SEQ ID NO: 1613794 - RNA, 18 nt, Human
uccccuguuuguuucuga

SEQ ID NO: 1613795 - RNA, 22 nt, Human
uccccuuccuaauuccacagcu

SEQ ID NO: 1613796 - RNA, 21 nt, Human
uccccuuccuaauuccacagc

SEQ ID NO: 1613797 - RNA, 12 nt, Human
ucccuaauaaag

SEQ ID NO: 1613798 - RNA, 11 nt, Human
ucccuaauaaa

SEQ ID NO: 1613799 - RNA, 15 nt, Human
ucccucccucuuucc

SEQ ID NO: 1613800 - RNA, 16 nt, Human
ucccuacuuccuguga

SEQ ID NO: 1613801 - RNA, 15 nt, Human
ucccuacuuccugug

SEQ ID NO: 1613802 - RNA, 17 nt, Human
ucccucccucuuucccu

SEQ ID NO: 1613803 - RNA, 15 nt, Human
ucccuacuguaauuu

SEQ ID NO: 1613804 - RNA, 14 nt, Human
ucccuaauaaagcu

SEQ ID NO: 1613805 - RNA, 13 nt, Human
ucccuaauaaagc

SEQ ID NO: 1613806 - RNA, 22 nt, Human
ucacuuuuauuuagcaccaggg

SEQ ID NO: 1613807 - RNA, 12 nt, Human
ucacuuuuauuu

SEQ ID NO: 1613808 - RNA, 17 nt, Human
ucacuugucaauaaaau

SEQ ID NO: 1613809 - RNA, 15 nt, Human
ucacugcuuaacuuc

SEQ ID NO: 1613810 - RNA, 17 nt, Human
ucacugcuuaacuucac

SEQ ID NO: 1613811 - RNA, 18 nt, Human
ucacugcuuaacuucaca

SEQ ID NO: 1613812 - RNA, 20 nt, Human
ucacugcuuaacuucacaua

SEQ ID NO: 1613813 - RNA, 16 nt, Human
ucacucugucgcccag

SEQ ID NO: 1613814 - RNA, 12 nt, Human
ucacucugucgc

SEQ ID NO: 1613815 - RNA, 19 nt, Human
ucacucugucgcccagucu

SEQ ID NO: 1613816 - RNA, 22 nt, Human
ucacucugucgcccagucugga

SEQ ID NO: 1613817 - RNA, 19 nt, Human
ucagacauagaauuaacac

SEQ ID NO: 1613818 - RNA, 20 nt, Human
ucagacagcugccugggauc

SEQ ID NO: 1613819 - RNA, 19 nt, Human
ucagacagcugccugggau

SEQ ID NO: 1613820 - RNA, 18 nt, Human
ucagacagcugccuggga

SEQ ID NO: 1613821 - RNA, 17 nt, Human
ucagacagcugccuggg

SEQ ID NO: 1613822 - RNA, 16 nt, Human
ucagacagcugccugg

SEQ ID NO: 1613823 - RNA, 15 nt, Human
ucagacagcugccug

SEQ ID NO: 1613824 - RNA, 22 nt, Human
ucagacauagaauuaacacaug

SEQ ID NO: 1613825 - RNA, 19 nt, Human
ucagcacgauuucuguuua

SEQ ID NO: 1613826 - RNA, 22 nt, Human
ucagaguugaugguuguacaua

SEQ ID NO: 1613827 - RNA, 21 nt, Human
ucagaggggaauaaacuguug

SEQ ID NO: 1613828 - RNA, 22 nt, Human
ucacucuggcagcucagagagg

SEQ ID NO: 1613829 - RNA, 20 nt, Human
ucacucuggcagcucagaga

SEQ ID NO: 1613830 - RNA, 19 nt, Human
ucacucuggcagcucagag

SEQ ID NO: 1613831 - RNA, 18 nt, Human
ucacucuggcagcucaga

SEQ ID NO: 1613832 - RNA, 17 nt, Human
ucacucuggcagcucag

SEQ ID NO: 1613833 - RNA, 16 nt, Human
ucacucuggcagcuca

SEQ ID NO: 1613834 - RNA, 15 nt, Human
ucacucuggcagcuc

SEQ ID NO: 1613835 - RNA, 14 nt, Human
ucacucuggcagcu

SEQ ID NO: 1613836 - RNA, 14 nt, Human
ucacucuccuuggu

SEQ ID NO: 1613837 - RNA, 12 nt, Human
ucacucuccuug

SEQ ID NO: 1613838 - RNA, 18 nt, Human
ucacucuccauuuaauaa

SEQ ID NO: 1613839 - RNA, 20 nt, Human
ucacucuacuuagcaugucc

SEQ ID NO: 1613840 - RNA, 19 nt, Human
ucacucuacuuagcauguc

SEQ ID NO: 1613841 - RNA, 13 nt, Human
ucacucuggcagc

SEQ ID NO: 1613842 - RNA, 12 nt, Human
ucacucuggcag

SEQ ID NO: 1613843 - RNA, 23 nt, Human
ucacucuccuuggugucgggcau

SEQ ID NO: 1613844 - RNA, 13 nt, Human
ucacuccuugaaa

SEQ ID NO: 1613845 - RNA, 18 nt, Human
ucacuccuaccugguaau

SEQ ID NO: 1613846 - RNA, 17 nt, Human
ucacggaagagccuugc

SEQ ID NO: 1613847 - RNA, 16 nt, Human
ucacggaagagccuug

SEQ ID NO: 1613848 - RNA, 14 nt, Human
ucacggaagagccu

SEQ ID NO: 1613849 - RNA, 20 nt, Human
ucacggcucacugcagccuc

SEQ ID NO: 1613850 - RNA, 15 nt, Human
ucacggcucacugca

SEQ ID NO: 1613851 - RNA, 13 nt, Human
ucacggcucacug

SEQ ID NO: 1613852 - RNA, 12 nt, Human
ucaccuuugucc

SEQ ID NO: 1613853 - RNA, 14 nt, Human
ucaccuuucccauc

SEQ ID NO: 1613854 - RNA, 13 nt, Human
ucaccuuuauucu

SEQ ID NO: 1613855 - RNA, 15 nt, Human
ucacaggcaggucca

SEQ ID NO: 1613856 - RNA, 12 nt, Human
ucacaggcaggu

SEQ ID NO: 1613857 - RNA, 16 nt, Human
ucacaggacucugccu

SEQ ID NO: 1613858 - RNA, 22 nt, Human
ucaccuuuguccccaccgcaga

SEQ ID NO: 1613859 - RNA, 18 nt, Human
ucaccuuuguccccaccg

SEQ ID NO: 1613860 - RNA, 17 nt, Human
ucaccuuuguccccacc

SEQ ID NO: 1613861 - RNA, 15 nt, Human
ucaccuuugucccca

SEQ ID NO: 1613862 - RNA, 14 nt, Human
ucaccuuugucccc

SEQ ID NO: 1613863 - RNA, 20 nt, Human
ucacgccuguaauccuagca

SEQ ID NO: 1613864 - RNA, 19 nt, Human
ucacgccuguaauccuagc

SEQ ID NO: 1613865 - RNA, 14 nt, Human
ucacgccacugcac

SEQ ID NO: 1613866 - RNA, 13 nt, Human
ucacgccacugca

SEQ ID NO: 1613867 - RNA, 16 nt, Human
ucacgccacugcacua

SEQ ID NO: 1613868 - RNA, 21 nt, Human
uauuucuaugaaauauuaugu

SEQ ID NO: 1613869 - RNA, 22 nt, Human
uauuucuaugaaauauuauguu

SEQ ID NO: 1613870 - RNA, 13 nt, Human
uauuuauuacugu

SEQ ID NO: 1613871 - RNA, 20 nt, Human
uaucugaaaauguaugugua

SEQ ID NO: 1613872 - RNA, 15 nt, Human
uaucugaaaauguau

SEQ ID NO: 1613873 - RNA, 14 nt, Human
uaucugaaaaugua

SEQ ID NO: 1613874 - RNA, 23 nt, Human
uauuuauuaaaugcccagccccu

SEQ ID NO: 1613875 - RNA, 16 nt, Human
uaucugaggaauucug

SEQ ID NO: 1613876 - RNA, 15 nt, Human
uaucugaggaauucu

SEQ ID NO: 1613877 - RNA, 18 nt, Human
uaucugaagucagaucug

SEQ ID NO: 1613878 - RNA, 17 nt, Human
uaucugaagucagaucu

SEQ ID NO: 1613879 - RNA, 13 nt, Human
ucaaaacugcacu

SEQ ID NO: 1613880 - RNA, 23 nt, Human
ucaaacggccucacuaggcuucu

SEQ ID NO: 1613881 - RNA, 22 nt, Human
ucaaaacgguuuuacugcagcu

SEQ ID NO: 1613882 - RNA, 14 nt, Human
ucaaacucuuaaaa

SEQ ID NO: 1613883 - RNA, 16 nt, Human
ucaaacgugaaaaugc

SEQ ID NO: 1613884 - RNA, 15 nt, Human
ucaaacgugaaaaug

SEQ ID NO: 1613885 - RNA, 15 nt, Human
uauuuuuuuacuaau

SEQ ID NO: 1613886 - RNA, 17 nt, Human
uauuuuuuucugaaauu

SEQ ID NO: 1613887 - RNA, 16 nt, Human
uauuuuuuucugaaau

SEQ ID NO: 1613888 - RNA, 22 nt, Human
uauuuuuuucugaauuauuuuc

SEQ ID NO: 1613889 - RNA, 12 nt, Human
uauuuuaugauc

SEQ ID NO: 1613890 - RNA, 16 nt, Human
uauuuuauguugcaua

SEQ ID NO: 1613891 - RNA, 15 nt, Human
uauuuuauguugcau

SEQ ID NO: 1613892 - RNA, 21 nt, Human
uauuuucaacgcagcccugcu

SEQ ID NO: 1613893 - RNA, 13 nt, Human
ucaaugcagcccc

SEQ ID NO: 1613894 - RNA, 17 nt, Human
ucaaugcuauaacuaug

SEQ ID NO: 1613895 - RNA, 18 nt, Human
ucaaugcacugacauugu

SEQ ID NO: 1613896 - RNA, 18 nt, Human
ucaauuacaggaaguacu

SEQ ID NO: 1613897 - RNA, 13 nt, Human
ucaauuacaggaa

SEQ ID NO: 1613898 - RNA, 14 nt, Human
ucaaugcacugaca

SEQ ID NO: 1613899 - RNA, 14 nt, Human
ucaauaggaaaaac

SEQ ID NO: 1613900 - RNA, 17 nt, Human
ucaauaggaaaaacuga

SEQ ID NO: 1613901 - RNA, 13 nt, Human
ucaauaggaaaaa

SEQ ID NO: 1613902 - RNA, 19 nt, Human
ucacaggaaguagaggagg

SEQ ID NO: 1613903 - RNA, 23 nt, Human
ucacaggacagcccuucuuucca

SEQ ID NO: 1613904 - RNA, 11 nt, Human
ucacaggcagg

SEQ ID NO: 1613905 - RNA, 23 nt, Human
ucacacagugagucgaggacagg

SEQ ID NO: 1613906 - RNA, 22 nt, Human
ucacacagugagucgaggacag

SEQ ID NO: 1613907 - RNA, 21 nt, Human
ucacacaugagcaucaggcca

SEQ ID NO: 1613908 - RNA, 13 nt, Human
ucacacagugagu

SEQ ID NO: 1613909 - RNA, 22 nt, Human
ucacacaguauuacuucugcua

SEQ ID NO: 1613910 - RNA, 21 nt, Human
ucacacaguauuacuucugcu

SEQ ID NO: 1613911 - RNA, 20 nt, Human
ucaauuacaggaaguacugg

SEQ ID NO: 1613912 - RNA, 19 nt, Human
ucaauuacaggaaguacug

SEQ ID NO: 1613913 - RNA, 19 nt, Human
ucaacuccaaacugacucu

SEQ ID NO: 1613914 - RNA, 14 nt, Human
ucaaccuccugggc

SEQ ID NO: 1613915 - RNA, 13 nt, Human
ucaaccuccuggg

SEQ ID NO: 1613916 - RNA, 15 nt, Human
ucaaacuuuacuaug

SEQ ID NO: 1613917 - RNA, 13 nt, Human
ucaaacuuuacua

SEQ ID NO: 1613918 - RNA, 22 nt, Human
ucaaacucuugaccucagguga

SEQ ID NO: 1613919 - RNA, 16 nt, Human
ucaaacuuuacuaugg

SEQ ID NO: 1613920 - RNA, 22 nt, Human
ucaagugauucuccugccucag

SEQ ID NO: 1613921 - RNA, 20 nt, Human
ucaaggauccugagccagau

SEQ ID NO: 1613922 - RNA, 23 nt, Human
ucaaggauccugagccagauuuc

SEQ ID NO: 1613923 - RNA, 19 nt, Human
ucaaggauccugagccaga

SEQ ID NO: 1613924 - RNA, 18 nt, Human
ucaaggauccugagccag

SEQ ID NO: 1613925 - RNA, 17 nt, Human
ucaagcgauucuucugc

SEQ ID NO: 1613926 - RNA, 16 nt, Human
ucaagcgauucuucug

SEQ ID NO: 1613927 - RNA, 16 nt, Human
ucuaaauucuuucauu

SEQ ID NO: 1613928 - RNA, 18 nt, Human
ucggacuuagcugggaga

SEQ ID NO: 1613929 - RNA, 21 nt, Human
ucuacacuaagagagaaugag

SEQ ID NO: 1613930 - RNA, 22 nt, Human
ucuaacuucaccauauuaccac

SEQ ID NO: 1613931 - RNA, 15 nt, Human
ucuaacuucaccaua

SEQ ID NO: 1613932 - RNA, 16 nt, Human
ucuaacuucaccauau

SEQ ID NO: 1613933 - RNA, 17 nt, Human
ucuacacuccagugaga

SEQ ID NO: 1613934 - RNA, 14 nt, Human
ucuacacugugcug

SEQ ID NO: 1613935 - RNA, 12 nt, Human
ucuacacugugc

SEQ ID NO: 1613936 - RNA, 19 nt, Human
ucuacugaggugcuauguu

SEQ ID NO: 1613937 - RNA, 18 nt, Human
ucuacugaggugcuaugu

SEQ ID NO: 1613938 - RNA, 15 nt, Human
ucuacacugugcuga

SEQ ID NO: 1613939 - RNA, 21 nt, Human
ucuacacugugcugagucuga

SEQ ID NO: 1613940 - RNA, 22 nt, Human
ucuagggaaaaaccagcgugug

SEQ ID NO: 1613941 - RNA, 22 nt, Human
ucuacugaggugcuauguucuu

SEQ ID NO: 1613942 - RNA, 21 nt, Human
ucucaaacucuugaccucagg

SEQ ID NO: 1613943 - RNA, 13 nt, Human
ucucaaacucuug

SEQ ID NO: 1613944 - RNA, 22 nt, Human
ucucaaacucuugaccucaggu

SEQ ID NO: 1613945 - RNA, 17 nt, Human
ucucacucugucgccca

SEQ ID NO: 1613946 - RNA, 22 nt, Human
ucucacucugucgcccagucug

SEQ ID NO: 1613947 - RNA, 18 nt, Human
ucucacucugucgcccag

SEQ ID NO: 1613948 - RNA, 21 nt, Human
ucucacuguugcccaggcugg

SEQ ID NO: 1613949 - RNA, 20 nt, Human
ucucacuguugcccaggcug

SEQ ID NO: 1613950 - RNA, 19 nt, Human
ucucacuguugcccaggcu

SEQ ID NO: 1613951 - RNA, 18 nt, Human
ucucacuguugcccaggc

SEQ ID NO: 1613952 - RNA, 21 nt, Human
ucucagaaucucaaauaacua

SEQ ID NO: 1613953 - RNA, 17 nt, Human
ucucagaaucucaaaua

SEQ ID NO: 1613954 - RNA, 19 nt, Human
uccuucuguccuacucugu

SEQ ID NO: 1613955 - RNA, 12 nt, Human
uccuucuguccu

SEQ ID NO: 1613956 - RNA, 15 nt, Human
uccuugcaucaauuu

SEQ ID NO: 1613957 - RNA, 14 nt, Human
uccuuaccagcaga

SEQ ID NO: 1613958 - RNA, 16 nt, Human
uccuucaaagcaaaug

SEQ ID NO: 1613959 - RNA, 17 nt, Human
uccuggcccacugcauc

SEQ ID NO: 1613960 - RNA, 22 nt, Human
uccuggcaugggaaugaauguc

SEQ ID NO: 1613961 - RNA, 10 nt, Human
ucccucccuu

SEQ ID NO: 1613962 - RNA, 15 nt, Human
uccugguguggaaga

SEQ ID NO: 1613963 - RNA, 17 nt, Human
ucgaguuacagacaaag

SEQ ID NO: 1613964 - RNA, 15 nt, Human
ucgaguuacagacaa

SEQ ID NO: 1613965 - RNA, 23 nt, Human
uccuuuuggagucagacagaugu

SEQ ID NO: 1613966 - RNA, 14 nt, Human
uccuuuuggaguca

SEQ ID NO: 1613967 - RNA, 14 nt, Human
ucgcccaggcugga

SEQ ID NO: 1613968 - RNA, 12 nt, Human
ucgcccaggcug

SEQ ID NO: 1613969 - RNA, 19 nt, Human
ucgcccaggcuggagugca

SEQ ID NO: 1613970 - RNA, 17 nt, Human
ucgcaauguaagacucg

SEQ ID NO: 1613971 - RNA, 18 nt, Human
ucucuucacagucacauu

SEQ ID NO: 1613972 - RNA, 11 nt, Human
ucucugcaggu

SEQ ID NO: 1613973 - RNA, 11 nt, Human
ucucuucucca

SEQ ID NO: 1613974 - RNA, 16 nt, Human
ucucuucuccacugga

SEQ ID NO: 1613975 - RNA, 15 nt, Human
ucucuucuccacugg

SEQ ID NO: 1613976 - RNA, 14 nt, Human
ucucuucuccacug

SEQ ID NO: 1613977 - RNA, 13 nt, Human
ucucuucuccacu

SEQ ID NO: 1613978 - RNA, 16 nt, Human
ucugaaaauguaugug

SEQ ID NO: 1613979 - RNA, 16 nt, Human
ucucuuuucaaaacau

SEQ ID NO: 1613980 - RNA, 15 nt, Human
ucucuuuucaaaaca

SEQ ID NO: 1613981 - RNA, 13 nt, Human
ucugaaagggacg

SEQ ID NO: 1613982 - RNA, 23 nt, Human
ucugaaaauguauguguaaguau

SEQ ID NO: 1613983 - RNA, 14 nt, Human
ucugaaauuuccug

SEQ ID NO: 1613984 - RNA, 17 nt, Human
ucugaggaauccagacc

SEQ ID NO: 1613985 - RNA, 16 nt, Human
ucugaggaauccagac

SEQ ID NO: 1613986 - RNA, 22 nt, Human
ucugagcauuagauuucucauu

SEQ ID NO: 1613987 - RNA, 23 nt, Human
ucugaggacacuaaccacgcugg

SEQ ID NO: 1613988 - RNA, 20 nt, Human
ucugaggacacuaaccacgc

SEQ ID NO: 1613989 - RNA, 20 nt, Human
ucugaggaauucuguauaga

SEQ ID NO: 1613990 - RNA, 14 nt, Human
ucugcacaagcugc

SEQ ID NO: 1613991 - RNA, 19 nt, Human
ucugcacaagcugcacccu

SEQ ID NO: 1613992 - RNA, 23 nt, Human
ucugauucccaagcucugcuccu

SEQ ID NO: 1613993 - RNA, 18 nt, Human
ucugacccaugcugcccu

SEQ ID NO: 1613994 - RNA, 17 nt, Human
ucugacccaugcugccc

SEQ ID NO: 1613995 - RNA, 16 nt, Human
ucugacccaugcugcc

SEQ ID NO: 1613996 - RNA, 15 nt, Human
ucugacccaugcugc

SEQ ID NO: 1613997 - RNA, 19 nt, Human
ucugacccaugcugcccug

SEQ ID NO: 1613998 - RNA, 20 nt, Human
ucugagcauuagauuucuca

SEQ ID NO: 1613999 - RNA, 20 nt, Human
ucugaacuuggcgcugcccc

SEQ ID NO: 1614000 - RNA, 21 nt, Human
ucugaacuuggcgcugccccu

SEQ ID NO: 1614001 - RNA, 14 nt, Human
ucugacccaugcug

SEQ ID NO: 1614002 - RNA, 19 nt, Human
ucuccugggcagcugccuc

SEQ ID NO: 1614003 - RNA, 20 nt, Human
ucuccugggcagcugccucc

SEQ ID NO: 1614004 - RNA, 21 nt, Human
ucuccugggcagcugccuccc

SEQ ID NO: 1614005 - RNA, 15 nt, Human
ucucuacaaaaagca

SEQ ID NO: 1614006 - RNA, 13 nt, Human
ucuccuguaccuc

SEQ ID NO: 1614007 - RNA, 19 nt, Human
ucucuaggaaauauuuauu

SEQ ID NO: 1614008 - RNA, 13 nt, Human
ucucuaggaaaua

SEQ ID NO: 1614009 - RNA, 18 nt, Human
ucucuaguuugauuaaau

SEQ ID NO: 1614010 - RNA, 19 nt, Human
ucucuaguuugauuaaauu

SEQ ID NO: 1614011 - RNA, 13 nt, Human
ucucugaggacac

SEQ ID NO: 1614012 - RNA, 14 nt, Human
ucucugaggacacu

SEQ ID NO: 1614013 - RNA, 15 nt, Human
ucucucgugaguaua

SEQ ID NO: 1614014 - RNA, 13 nt, Human
ucuccugggcagc

SEQ ID NO: 1614015 - RNA, 14 nt, Human
ucuccugggcagcu

SEQ ID NO: 1614016 - RNA, 15 nt, Human
ucuccugggcagcug

SEQ ID NO: 1614017 - RNA, 16 nt, Human
ucuccugggcagcugc

SEQ ID NO: 1614018 - RNA, 17 nt, Human
ucuccugggcagcugcc

SEQ ID NO: 1614019 - RNA, 18 nt, Human
ucuccugggcagcugccu

SEQ ID NO: 1614020 - RNA, 22 nt, Human
ucuccugccucagccucccaaa

SEQ ID NO: 1614021 - RNA, 21 nt, Human
ucucagugucaaugcagcccc

SEQ ID NO: 1614022 - RNA, 15 nt, Human
ucucaggucccugca

SEQ ID NO: 1614023 - RNA, 17 nt, Human
ucucccccagccccauc

SEQ ID NO: 1614024 - RNA, 15 nt, Human
ucucccccagcccca

SEQ ID NO: 1614025 - RNA, 14 nt, Human
ucucccccagcccc

SEQ ID NO: 1614026 - RNA, 20 nt, Human
ucucccccagccccauccuc

SEQ ID NO: 1614027 - RNA, 18 nt, Human
ucucccccagccccaucc

SEQ ID NO: 1614028 - RNA, 22 nt, Human
ucucccccagccccauccucug

SEQ ID NO: 1614029 - RNA, 22 nt, Human
ugaacuuguaaaggaauuuaaa

SEQ ID NO: 1614030 - RNA, 16 nt, Human
ugaagacagagcuaca

SEQ ID NO: 1614031 - RNA, 14 nt, Human
ugaagacagagcua

SEQ ID NO: 1614032 - RNA, 12 nt, Human
ugaacuugguuc

SEQ ID NO: 1614033 - RNA, 14 nt, Human
ugaacuuggcgcug

SEQ ID NO: 1614034 - RNA, 19 nt, Human
ugaacuggguacuugugga

SEQ ID NO: 1614035 - RNA, 23 nt, Human
ugaacuggguacuuguggacaca

SEQ ID NO: 1614036 - RNA, 14 nt, Human
ugaagacuuuucuu

SEQ ID NO: 1614037 - RNA, 22 nt, Human
ugaagacuuuucuuucagccaa

SEQ ID NO: 1614038 - RNA, 17 nt, Human
ugaagacuuuucuuuca

SEQ ID NO: 1614039 - RNA, 22 nt, Human
ugaaguccaagcauuuagaugu

SEQ ID NO: 1614040 - RNA, 21 nt, Human
ugaaguccaagcauuuagaug

SEQ ID NO: 1614041 - RNA, 21 nt, Human
ugaaggcucgagcaugccugg

SEQ ID NO: 1614042 - RNA, 20 nt, Human
ugaaggcucgagcaugccug

SEQ ID NO: 1614043 - RNA, 17 nt, Human
ugaagauguagaggaga

SEQ ID NO: 1614044 - RNA, 14 nt, Human
ugaacacaucagcu

SEQ ID NO: 1614045 - RNA, 19 nt, Human
ugaaauggacuuuuguaca

SEQ ID NO: 1614046 - RNA, 15 nt, Human
ugaacucuucaaucu

SEQ ID NO: 1614047 - RNA, 22 nt, Human
ugaaccacaucuugcucugcug

SEQ ID NO: 1614048 - RNA, 21 nt, Human
ugaaccacaucuugcucugcu

SEQ ID NO: 1614049 - RNA, 20 nt, Human
ugaaccacaucuugcucugc

SEQ ID NO: 1614050 - RNA, 18 nt, Human
ugaacucuucaaucucuu

SEQ ID NO: 1614051 - RNA, 14 nt, Human
ugaacugaacucug

SEQ ID NO: 1614052 - RNA, 15 nt, Human
ugaacugauaaagau

SEQ ID NO: 1614053 - RNA, 13 nt, Human
ugaacugauaaag

SEQ ID NO: 1614054 - RNA, 19 nt, Human
ugaacugaacucugacaac

SEQ ID NO: 1614055 - RNA, 17 nt, Human
ugaacugaacucugaca

SEQ ID NO: 1614056 - RNA, 22 nt, Human
ugaaaagacuccaaagaaaugu

SEQ ID NO: 1614057 - RNA, 18 nt, Human
ugaaacccugucucuacu

SEQ ID NO: 1614058 - RNA, 16 nt, Human
ugaaacgcaaccacca

SEQ ID NO: 1614059 - RNA, 21 nt, Human
ugaaagauggcugugccucug

SEQ ID NO: 1614060 - RNA, 23 nt, Human
ugaaagauggcugugccucugcc

SEQ ID NO: 1614061 - RNA, 22 nt, Human
ugaaagauggcugugccucugc

SEQ ID NO: 1614062 - RNA, 23 nt, Human
ugaaagcagggacuugaacccau

SEQ ID NO: 1614063 - RNA, 19 nt, Human
ugaaagcagggacuugaac

SEQ ID NO: 1614064 - RNA, 18 nt, Human
ugaaagcagggacuugaa

SEQ ID NO: 1614065 - RNA, 17 nt, Human
ugaaaggaaagaggcuc

SEQ ID NO: 1614066 - RNA, 12 nt, Human
ugaaaggaaaga

SEQ ID NO: 1614067 - RNA, 13 nt, Human
ugaaagauucaau

SEQ ID NO: 1614068 - RNA, 18 nt, Human
ugaaagggcccagagagg

SEQ ID NO: 1614069 - RNA, 17 nt, Human
ugaaagggcccagagag

SEQ ID NO: 1614070 - RNA, 16 nt, Human
ugaaagggcccagaga

SEQ ID NO: 1614071 - RNA, 17 nt, Human
ugaaaucuuuuugcuuu

SEQ ID NO: 1614072 - RNA, 20 nt, Human
ugaaaugaggucagagccug

SEQ ID NO: 1614073 - RNA, 19 nt, Human
ugaaaugaggucagagccu

SEQ ID NO: 1614074 - RNA, 22 nt, Human
ugaaaugaggucagagccugca

SEQ ID NO: 1614075 - RNA, 21 nt, Human
ugaaaugaggucagagccugc

SEQ ID NO: 1614076 - RNA, 23 nt, Human
ugaaaugaggucagagccugcag

SEQ ID NO: 1614077 - RNA, 19 nt, Human
ugaaaagacuccaaagaaa

SEQ ID NO: 1614078 - RNA, 17 nt, Human
ugaaaagacuccaaaga

SEQ ID NO: 1614079 - RNA, 16 nt, Human
ugaaaagacuccaaag

SEQ ID NO: 1614080 - RNA, 15 nt, Human
ugaaaagacuccaaa

SEQ ID NO: 1614081 - RNA, 19 nt, Human
ugaaaacuuuaugcuaagu

SEQ ID NO: 1614082 - RNA, 15 nt, Human
ugaaaagaaaaauga

SEQ ID NO: 1614083 - RNA, 16 nt, Human
ucuuuuugcuuugcuu

SEQ ID NO: 1614084 - RNA, 17 nt, Human
ucuuucacauuuaaaua

SEQ ID NO: 1614085 - RNA, 21 nt, Human
ucuuuucucccuuuuaauccu

SEQ ID NO: 1614086 - RNA, 17 nt, Human
ucuuuugccguuauuaa

SEQ ID NO: 1614087 - RNA, 19 nt, Human
ucuuuugccguuauuaaaa

SEQ ID NO: 1614088 - RNA, 22 nt, Human
ucuguuuuauaauuuugugaag

SEQ ID NO: 1614089 - RNA, 18 nt, Human
ucuuaaaaaguggaaaaa

SEQ ID NO: 1614090 - RNA, 23 nt, Human
ucuguggguuucuaaagcugcca

SEQ ID NO: 1614091 - RNA, 18 nt, Human
ucuguacgucugacaggc

SEQ ID NO: 1614092 - RNA, 17 nt, Human
ucuguacgucugacagg

SEQ ID NO: 1614093 - RNA, 19 nt, Human
ucuguccgagcuuugaaaa

SEQ ID NO: 1614094 - RNA, 22 nt, Human
ucuguggguuucuaaagcugcc

SEQ ID NO: 1614095 - RNA, 14 nt, Human
ucuguccuacucug

SEQ ID NO: 1614096 - RNA, 18 nt, Human
ucuggagguacgaaaaga

SEQ ID NO: 1614097 - RNA, 14 nt, Human
ucuggcuaugcauu

SEQ ID NO: 1614098 - RNA, 17 nt, Human
ucuggcuaugcauuuga

SEQ ID NO: 1614099 - RNA, 23 nt, Human
ucuggagcccacuguacuugcuc

SEQ ID NO: 1614100 - RNA, 12 nt, Human
ucugggacacag

SEQ ID NO: 1614101 - RNA, 13 nt, Human
ucugggacacagu

SEQ ID NO: 1614102 - RNA, 16 nt, Human
ucuggcucuuccaggc

SEQ ID NO: 1614103 - RNA, 15 nt, Human
ucuggcucuuccagg

SEQ ID NO: 1614104 - RNA, 17 nt, Human
ucuggcucuuccaggcu

SEQ ID NO: 1614105 - RNA, 21 nt, Human
ucuucuccacuuucuagccag

SEQ ID NO: 1614106 - RNA, 19 nt, Human
ucuucuccacuuucuagcc

SEQ ID NO: 1614107 - RNA, 13 nt, Human
ucuucuccacugg

SEQ ID NO: 1614108 - RNA, 16 nt, Human
ucuucaguaagccgug

SEQ ID NO: 1614109 - RNA, 21 nt, Human
ucuuccacaagagcccaggcc

SEQ ID NO: 1614110 - RNA, 14 nt, Human
ucuuccaggcuggg

SEQ ID NO: 1614111 - RNA, 15 nt, Human
ucuucaguaagccgu

SEQ ID NO: 1614112 - RNA, 13 nt, Human
ucuuaugggcugg

SEQ ID NO: 1614113 - RNA, 15 nt, Human
ucuuauacauuugau

SEQ ID NO: 1614114 - RNA, 16 nt, Human
ucuuaguggauguucu

SEQ ID NO: 1614115 - RNA, 14 nt, Human
ucuuagugugugca

SEQ ID NO: 1614116 - RNA, 18 nt, Human
ucuugaacuccuggccuc

SEQ ID NO: 1614117 - RNA, 17 nt, Human
ucuugaacuccuggccu

SEQ ID NO: 1614118 - RNA, 16 nt, Human
ucuugaacuccuggcc

SEQ ID NO: 1614119 - RNA, 15 nt, Human
ucuucuccaggcugu

SEQ ID NO: 1614120 - RNA, 14 nt, Human
ucuucuccaggcug

SEQ ID NO: 1614121 - RNA, 13 nt, Human
ucuucuccaggcu

SEQ ID NO: 1614122 - RNA, 12 nt, Human
ucuucuccaggc

SEQ ID NO: 1614123 - RNA, 16 nt, Human
ucuucuccacuggaug

SEQ ID NO: 1614124 - RNA, 21 nt, Human
ucuugaauuguaaggaaugau

SEQ ID NO: 1614125 - RNA, 13 nt, Human
ucuugcucugcug

SEQ ID NO: 1614126 - RNA, 12 nt, Human
ucuugcucugcu

SEQ ID NO: 1614127 - RNA, 11 nt, Human
ucuugcucugc

SEQ ID NO: 1614128 - RNA, 15 nt, Human
ucuugccuuuuucau

SEQ ID NO: 1614129 - RNA, 19 nt, Human
ucuuuaaaaaaaaaauugg

SEQ ID NO: 1614130 - RNA, 18 nt, Human
ucuuguuuuuuuuuucca

SEQ ID NO: 1614131 - RNA, 21 nt, Human
ucuuguuuuuuuuuuccacuu

SEQ ID NO: 1614132 - RNA, 18 nt, Human
ucuuuaaaaaaaaaauug

SEQ ID NO: 1614133 - RNA, 19 nt, Human
ucuugucucagauuuuauu

SEQ ID NO: 1614134 - RNA, 20 nt, Human
ugcuaggaacacuccuucac

SEQ ID NO: 1614135 - RNA, 14 nt, Human
ugcucaggagcccu

SEQ ID NO: 1614136 - RNA, 11 nt, Human
ugcucauggaa

SEQ ID NO: 1614137 - RNA, 19 nt, Human
ugcuccucuccccagcaag

SEQ ID NO: 1614138 - RNA, 21 nt, Human
ugcuagaacucccuuucaaca

SEQ ID NO: 1614139 - RNA, 20 nt, Human
ugcuagaacucccuuucaac

SEQ ID NO: 1614140 - RNA, 19 nt, Human
ugcuaggaacacuccuuca

SEQ ID NO: 1614141 - RNA, 17 nt, Human
ugcuaggaacacuccuu

SEQ ID NO: 1614142 - RNA, 16 nt, Human
ugcuaggaacacuccu

SEQ ID NO: 1614143 - RNA, 19 nt, Human
ugcuagaacucccuuucaa

SEQ ID NO: 1614144 - RNA, 15 nt, Human
ugcgugcauaccacu

SEQ ID NO: 1614145 - RNA, 17 nt, Human
ugcugaaacaacaaaua

SEQ ID NO: 1614146 - RNA, 23 nt, Human
ugcugaauacagaggcaacugca

SEQ ID NO: 1614147 - RNA, 18 nt, Human
ugcugaauacagaggcaa

SEQ ID NO: 1614148 - RNA, 22 nt, Human
ugcugaaugguuuucaaaauaa

SEQ ID NO: 1614149 - RNA, 18 nt, Human
ugcugaaugguuuucaaa

SEQ ID NO: 1614150 - RNA, 17 nt, Human
ugcugaaugguuuucaa

SEQ ID NO: 1614151 - RNA, 19 nt, Human
ugcuccuggcccacugcau

SEQ ID NO: 1614152 - RNA, 19 nt, Human
ugcugacagacacaggccc

SEQ ID NO: 1614153 - RNA, 16 nt, Human
ugcugacagacacagg

SEQ ID NO: 1614154 - RNA, 15 nt, Human
ugcugacagacacag

SEQ ID NO: 1614155 - RNA, 17 nt, Human
ugcugaguuugugcugg

SEQ ID NO: 1614156 - RNA, 15 nt, Human
ugcugaguuugugcu

SEQ ID NO: 1614157 - RNA, 16 nt, Human
ugcugcaguugccagu

SEQ ID NO: 1614158 - RNA, 15 nt, Human
ugcugcaguugccag

SEQ ID NO: 1614159 - RNA, 23 nt, Human
ugcugauggugcaaugaccuuuc

SEQ ID NO: 1614160 - RNA, 20 nt, Human
ugcugauggugcaaugaccu

SEQ ID NO: 1614161 - RNA, 18 nt, Human
ugccuccccuccucugcu

SEQ ID NO: 1614162 - RNA, 23 nt, Human
ugccuccccuccucugcuugcca

SEQ ID NO: 1614163 - RNA, 19 nt, Human
ugccuccccuccucugcuu

SEQ ID NO: 1614164 - RNA, 22 nt, Human
ugccuccccuccucugcuugcc

SEQ ID NO: 1614165 - RNA, 23 nt, Human
ugcccaggcuggcgugcaguggu

SEQ ID NO: 1614166 - RNA, 12 nt, Human
ugcccagccccu

SEQ ID NO: 1614167 - RNA, 11 nt, Human
ugcccagcccc

SEQ ID NO: 1614168 - RNA, 19 nt, Human
ugccuaaggcugaacuugu

SEQ ID NO: 1614169 - RNA, 23 nt, Human
ugccuaaggacuucuuuaauuuu

SEQ ID NO: 1614170 - RNA, 18 nt, Human
ugccuccuuugugaggaa

SEQ ID NO: 1614171 - RNA, 17 nt, Human
ugccuccuuugugagga

SEQ ID NO: 1614172 - RNA, 16 nt, Human
ugccuccuuugugagg

SEQ ID NO: 1614173 - RNA, 18 nt, Human
ugccugaagucacacagu

SEQ ID NO: 1614174 - RNA, 22 nt, Human
ugccugaagucacacagugagu

SEQ ID NO: 1614175 - RNA, 22 nt, Human
ugccuucucaacuccaaacuga

SEQ ID NO: 1614176 - RNA, 23 nt, Human
ugcggugcuaucucccccagccc

SEQ ID NO: 1614177 - RNA, 13 nt, Human
ugcgccuacagga

SEQ ID NO: 1614178 - RNA, 19 nt, Human
ugcgcaggcuggcccugcc

SEQ ID NO: 1614179 - RNA, 17 nt, Human
ugcgcaggcuggcccug

SEQ ID NO: 1614180 - RNA, 16 nt, Human
ugcgcaggcuggcccu

SEQ ID NO: 1614181 - RNA, 13 nt, Human
ugcgcaggcuggc

SEQ ID NO: 1614182 - RNA, 22 nt, Human
ugccuuauggaacacucugaga

SEQ ID NO: 1614183 - RNA, 21 nt, Human
ugccuuauggaacacucugag

SEQ ID NO: 1614184 - RNA, 20 nt, Human
ugccuuauggaacacucuga

SEQ ID NO: 1614185 - RNA, 18 nt, Human
ugccuuauggaacacucu

SEQ ID NO: 1614186 - RNA, 15 nt, Human
ugccuggcggggugg

SEQ ID NO: 1614187 - RNA, 18 nt, Human
ugccuucagcucuacagc

SEQ ID NO: 1614188 - RNA, 17 nt, Human
ugccuucagcucuacag

SEQ ID NO: 1614189 - RNA, 13 nt, Human
ugccuucagcucu

SEQ ID NO: 1614190 - RNA, 15 nt, Human
ugccaucccucccuc

SEQ ID NO: 1614191 - RNA, 19 nt, Human
ugccaucccucccuccacc

SEQ ID NO: 1614192 - RNA, 20 nt, Human
ugccaucccucccuccaccu

SEQ ID NO: 1614193 - RNA, 21 nt, Human
ugccaucccucccuccaccuc

SEQ ID NO: 1614194 - RNA, 22 nt, Human
ugccaucccucccuccaccucc

SEQ ID NO: 1614195 - RNA, 14 nt, Human
ugccagucaccccg

SEQ ID NO: 1614196 - RNA, 22 nt, Human
ugccagggacagaggggguggc

SEQ ID NO: 1614197 - RNA, 11 nt, Human
ugccagggaca

SEQ ID NO: 1614198 - RNA, 10 nt, Human
ugcccagccc

SEQ ID NO: 1614199 - RNA, 19 nt, Human
ugcccaccuggccucugca

SEQ ID NO: 1614200 - RNA, 18 nt, Human
ugcccaccuggccucugc

SEQ ID NO: 1614201 - RNA, 17 nt, Human
ugcccaccuggccucug

SEQ ID NO: 1614202 - RNA, 15 nt, Human
ugcccaccuggccuc

SEQ ID NO: 1614203 - RNA, 23 nt, Human
ugccaucucaccuccugcugggc

SEQ ID NO: 1614204 - RNA, 22 nt, Human
ugccaucucaccuccugcuggg

SEQ ID NO: 1614205 - RNA, 21 nt, Human
ugccaucucaccuccugcugg

SEQ ID NO: 1614206 - RNA, 20 nt, Human
ugccaucucaccuccugcug

SEQ ID NO: 1614207 - RNA, 22 nt, Human
ugcaucagcugcugaaacaaca

SEQ ID NO: 1614208 - RNA, 19 nt, Human
ugcaggcagccaggccaca

SEQ ID NO: 1614209 - RNA, 18 nt, Human
ugcaggcagccaggccac

SEQ ID NO: 1614210 - RNA, 17 nt, Human
ugcaggcagccaggcca

SEQ ID NO: 1614211 - RNA, 16 nt, Human
ugcaggcagccaggcc

SEQ ID NO: 1614212 - RNA, 15 nt, Human
ugcaucguuucaucu

SEQ ID NO: 1614213 - RNA, 17 nt, Human
ugcaucguuucaucuuc

SEQ ID NO: 1614214 - RNA, 21 nt, Human
ugcauccuccgccucccgggu

SEQ ID NO: 1614215 - RNA, 18 nt, Human
ugcauccuccgccucccg

SEQ ID NO: 1614216 - RNA, 21 nt, Human
ugcauuauauuuauuacugua

SEQ ID NO: 1614217 - RNA, 20 nt, Human
ugcauuauauuuauuacugu

SEQ ID NO: 1614218 - RNA, 15 nt, Human
ugcauuauauuuauu

SEQ ID NO: 1614219 - RNA, 19 nt, Human
ugcauguuacauaagauaa

SEQ ID NO: 1614220 - RNA, 17 nt, Human
ugcagauaaacaguagu

SEQ ID NO: 1614221 - RNA, 16 nt, Human
ugcagauaaacaguag

SEQ ID NO: 1614222 - RNA, 20 nt, Human
ugcacuuuguucuggcucuu

SEQ ID NO: 1614223 - RNA, 19 nt, Human
ugcacuuuguucuggcucu

SEQ ID NO: 1614224 - RNA, 18 nt, Human
ugcacuuuguucuggcuc

SEQ ID NO: 1614225 - RNA, 15 nt, Human
ugcacuuuguucugg

SEQ ID NO: 1614226 - RNA, 16 nt, Human
ugcacguacacacaca

SEQ ID NO: 1614227 - RNA, 19 nt, Human
ugcacguacacacacauac

SEQ ID NO: 1614228 - RNA, 23 nt, Human
ugcacggugaauggcuuuguaua

SEQ ID NO: 1614229 - RNA, 22 nt, Human
ugcacggugaauggcuuuguau

SEQ ID NO: 1614230 - RNA, 21 nt, Human
ugcacuugcagacucuacaga

SEQ ID NO: 1614231 - RNA, 14 nt, Human
ugcaggaccucagg

SEQ ID NO: 1614232 - RNA, 22 nt, Human
ugcagcuuuaaaaaauuaaucu

SEQ ID NO: 1614233 - RNA, 16 nt, Human
ugcaggaccucaggug

SEQ ID NO: 1614234 - RNA, 15 nt, Human
ugcaggaccucaggu

SEQ ID NO: 1614235 - RNA, 18 nt, Human
ugcaggaccucaggugag

SEQ ID NO: 1614236 - RNA, 14 nt, Human
ugcagcaauaaagc

SEQ ID NO: 1614237 - RNA, 15 nt, Human
ugcagcaauaaagca

SEQ ID NO: 1614238 - RNA, 16 nt, Human
ugcagcaauaaagcag

SEQ ID NO: 1614239 - RNA, 20 nt, Human
ugcagcaauaaagcagcguu

SEQ ID NO: 1614240 - RNA, 13 nt, Human
ugcagcuuuaaaa

SEQ ID NO: 1614241 - RNA, 15 nt, Human
ugcacaucaaaauau

SEQ ID NO: 1614242 - RNA, 20 nt, Human
ugcacagcuaacauggaagu

SEQ ID NO: 1614243 - RNA, 18 nt, Human
ugcacagcuaacauggaa

SEQ ID NO: 1614244 - RNA, 23 nt, Human
ugcacagcuaacauggaaguacu

SEQ ID NO: 1614245 - RNA, 18 nt, Human
ugcacagugcaucucagc

SEQ ID NO: 1614246 - RNA, 20 nt, Human
ugcacagugcaucucagccc

SEQ ID NO: 1614247 - RNA, 19 nt, Human
ugcacagugcaucucagcc

SEQ ID NO: 1614248 - RNA, 20 nt, Human
ugaagucuuuguacagacaa

SEQ ID NO: 1614249 - RNA, 17 nt, Human
ugaagucuuuguacaga

SEQ ID NO: 1614250 - RNA, 16 nt, Human
ugaaggcuggguucug

SEQ ID NO: 1614251 - RNA, 22 nt, Human
ugaagucuuuguacagacaaca

SEQ ID NO: 1614252 - RNA, 21 nt, Human
ugcacagaguuguuacauuuu

SEQ ID NO: 1614253 - RNA, 22 nt, Human
ugcacagaguuguuacauuuuu

SEQ ID NO: 1614254 - RNA, 23 nt, Human
ugcacagaguuguuacauuuuua

SEQ ID NO: 1614255 - RNA, 17 nt, Human
ugcacagcuaacaugga

SEQ ID NO: 1614256 - RNA, 22 nt, Human
uggaggcaugugaugagaggaa

SEQ ID NO: 1614257 - RNA, 17 nt, Human
uggacaggcauguucuc

SEQ ID NO: 1614258 - RNA, 16 nt, Human
uggacaggcauguucu

SEQ ID NO: 1614259 - RNA, 12 nt, Human
uggacaggcaug

SEQ ID NO: 1614260 - RNA, 13 nt, Human
uggagauguuuag

SEQ ID NO: 1614261 - RNA, 20 nt, Human
uggagaggcccggccucuca

SEQ ID NO: 1614262 - RNA, 15 nt, Human
uggaugccugguggc

SEQ ID NO: 1614263 - RNA, 14 nt, Human
uggaugccuggugg

SEQ ID NO: 1614264 - RNA, 18 nt, Human
uggcacugcuuccaguga

SEQ ID NO: 1614265 - RNA, 16 nt, Human
uggcacugcuuccagu

SEQ ID NO: 1614266 - RNA, 14 nt, Human
uggcacugcuucca

SEQ ID NO: 1614267 - RNA, 22 nt, Human
uggcagcugcgguccacccagg

SEQ ID NO: 1614268 - RNA, 21 nt, Human
uggcagcugcgguccacccag

SEQ ID NO: 1614269 - RNA, 23 nt, Human
uggcagcugcgguccacccagga

SEQ ID NO: 1614270 - RNA, 20 nt, Human
uggcagugggagcugccugu

SEQ ID NO: 1614271 - RNA, 22 nt, Human
uggccacuccagaccccuggcu

SEQ ID NO: 1614272 - RNA, 17 nt, Human
uggcauaacauaaaucu

SEQ ID NO: 1614273 - RNA, 15 nt, Human
uggcauaacauaaau

SEQ ID NO: 1614274 - RNA, 19 nt, Human
uggcagugggagcugccug

SEQ ID NO: 1614275 - RNA, 16 nt, Human
uggcagugggagcugc

SEQ ID NO: 1614276 - RNA, 15 nt, Human
uggcagugggagcug

SEQ ID NO: 1614277 - RNA, 14 nt, Human
uggcagugggagcu

SEQ ID NO: 1614278 - RNA, 14 nt, Human
ugcuucuguuuuau

SEQ ID NO: 1614279 - RNA, 16 nt, Human
ugcuucuucagagacu

SEQ ID NO: 1614280 - RNA, 12 nt, Human
ugcuucucacug

SEQ ID NO: 1614281 - RNA, 18 nt, Human
ugcuuccagugaggcucu

SEQ ID NO: 1614282 - RNA, 14 nt, Human
ugcugccuccagaa

SEQ ID NO: 1614283 - RNA, 13 nt, Human
ugcugccucaugc

SEQ ID NO: 1614284 - RNA, 20 nt, Human
ugcuuccagugaggcucugc

SEQ ID NO: 1614285 - RNA, 19 nt, Human
ugcuuccagugaggcucug

SEQ ID NO: 1614286 - RNA, 21 nt, Human
ugcuuccagugaggcucugcc

SEQ ID NO: 1614287 - RNA, 12 nt, Human
ugcuuucagaua

SEQ ID NO: 1614288 - RNA, 21 nt, Human
ugcuuucagauacuggauugu

SEQ ID NO: 1614289 - RNA, 20 nt, Human
ugcuuucagauacuggauug

SEQ ID NO: 1614290 - RNA, 17 nt, Human
ugcuuucagauacugga

SEQ ID NO: 1614291 - RNA, 16 nt, Human
ugcuuucagauacugg

SEQ ID NO: 1614292 - RNA, 18 nt, Human
ugcuuguuaacugagugc

SEQ ID NO: 1614293 - RNA, 14 nt, Human
uggaacucucgagc

SEQ ID NO: 1614294 - RNA, 12 nt, Human
uggaagacagcu

SEQ ID NO: 1614295 - RNA, 11 nt, Human
uggaagacagc

SEQ ID NO: 1614296 - RNA, 17 nt, Human
uggaaaaauagccugcc

SEQ ID NO: 1614297 - RNA, 15 nt, Human
uggaaaauaaaucaa

SEQ ID NO: 1614298 - RNA, 11 nt, Human
uggaaaauaaa

SEQ ID NO: 1614299 - RNA, 16 nt, Human
uggaaaauaaauuauu

SEQ ID NO: 1614300 - RNA, 15 nt, Human
uggaaaauaaauuau

SEQ ID NO: 1614301 - RNA, 15 nt, Human
uggaagacagcucuu

SEQ ID NO: 1614302 - RNA, 14 nt, Human
uggaagacagcucu

SEQ ID NO: 1614303 - RNA, 21 nt, Human
uggaagugugugaucuguggg

SEQ ID NO: 1614304 - RNA, 16 nt, Human
uggaauacucuuauau

SEQ ID NO: 1614305 - RNA, 16 nt, Human
uggguagacacacaug

SEQ ID NO: 1614306 - RNA, 17 nt, Human
uggguagacacacauga

SEQ ID NO: 1614307 - RNA, 22 nt, Human
ugggguggggggggugcugggc

SEQ ID NO: 1614308 - RNA, 21 nt, Human
ugggguggggggggugcuggg

SEQ ID NO: 1614309 - RNA, 17 nt, Human
ugggguggggaccucag

SEQ ID NO: 1614310 - RNA, 19 nt, Human
ugggguggggggggugcug

SEQ ID NO: 1614311 - RNA, 17 nt, Human
uggguuggaaaacagua

SEQ ID NO: 1614312 - RNA, 21 nt, Human
uggguuccagcaauucuccug

SEQ ID NO: 1614313 - RNA, 22 nt, Human
uggguuccuuccucugagccuu

SEQ ID NO: 1614314 - RNA, 21 nt, Human
uggguuccuuccucugagccu

SEQ ID NO: 1614315 - RNA, 16 nt, Human
uggguucacugcaacc

SEQ ID NO: 1614316 - RNA, 23 nt, Human
uggguucaagcgauucuucugcu

SEQ ID NO: 1614317 - RNA, 14 nt, Human
uggguguggcgcag

SEQ ID NO: 1614318 - RNA, 23 nt, Human
ugggugucaagagggucugagga

SEQ ID NO: 1614319 - RNA, 21 nt, Human
ugggugucaagagggucugag

SEQ ID NO: 1614320 - RNA, 22 nt, Human
ugggcuuggggaccagagcugc

SEQ ID NO: 1614321 - RNA, 21 nt, Human
ugggcuuggggaccagagcug

SEQ ID NO: 1614322 - RNA, 16 nt, Human
uggggcagcuugaggg

SEQ ID NO: 1614323 - RNA, 20 nt, Human
ugggcuucaguggcagcugc

SEQ ID NO: 1614324 - RNA, 21 nt, Human
ugggcuucaguggcagcugcu

SEQ ID NO: 1614325 - RNA, 19 nt, Human
ugggcuuggggaccagagc

SEQ ID NO: 1614326 - RNA, 19 nt, Human
ugggcuucaguggcagcug

SEQ ID NO: 1614327 - RNA, 18 nt, Human
ugggcuucaguggcagcu

SEQ ID NO: 1614328 - RNA, 19 nt, Human
ugggcgugagaccugcccc

SEQ ID NO: 1614329 - RNA, 18 nt, Human
ugggcgugagaccugccc

SEQ ID NO: 1614330 - RNA, 17 nt, Human
ugggcgugagaccugcc

SEQ ID NO: 1614331 - RNA, 24 nt, Human
ugggagcugccuguucagcuccag

SEQ ID NO: 1614332 - RNA, 16 nt, Human
ugggagcuuuuguaga

SEQ ID NO: 1614333 - RNA, 22 nt, Human
ugggccuccugugugugcgccu

SEQ ID NO: 1614334 - RNA, 16 nt, Human
ugggccuccugugugu

SEQ ID NO: 1614335 - RNA, 18 nt, Human
ugggccuucagggaguga

SEQ ID NO: 1614336 - RNA, 14 nt, Human
ugggccuccugugu

SEQ ID NO: 1614337 - RNA, 18 nt, Human
uggccuucggccuccauc

SEQ ID NO: 1614338 - RNA, 17 nt, Human
uggccuucggccuccau

SEQ ID NO: 1614339 - RNA, 15 nt, Human
uggccagaugcacca

SEQ ID NO: 1614340 - RNA, 20 nt, Human
uggccuucggccuccauccu

SEQ ID NO: 1614341 - RNA, 22 nt, Human
uggcgugcaguggugcgaucug

SEQ ID NO: 1614342 - RNA, 14 nt, Human
uggcgcugccccug

SEQ ID NO: 1614343 - RNA, 15 nt, Human
uggcgcugccccugg

SEQ ID NO: 1614344 - RNA, 20 nt, Human
uggcucagguggggucacuc

SEQ ID NO: 1614345 - RNA, 22 nt, Human
uggcucagguggggucacucug

SEQ ID NO: 1614346 - RNA, 14 nt, Human
uggcuaaauucaug

SEQ ID NO: 1614347 - RNA, 15 nt, Human
uggcucuuccaggcu

SEQ ID NO: 1614348 - RNA, 13 nt, Human
uggcucuuccagg

SEQ ID NO: 1614349 - RNA, 12 nt, Human
uggcugggggcc

SEQ ID NO: 1614350 - RNA, 16 nt, Human
uggcucuuccaggcug

SEQ ID NO: 1614351 - RNA, 19 nt, Human
uggcucuuccaggcuggga

SEQ ID NO: 1614352 - RNA, 21 nt, Human
ugggacagucaccucauggaa

SEQ ID NO: 1614353 - RNA, 20 nt, Human
ugggacagucaccucaugga

SEQ ID NO: 1614354 - RNA, 18 nt, Human
ugggacagucaccucaug

SEQ ID NO: 1614355 - RNA, 22 nt, Human
ugggaaugaaugucagugugac

SEQ ID NO: 1614356 - RNA, 15 nt, Human
uggcuuuucacugcu

SEQ ID NO: 1614357 - RNA, 14 nt, Human
uggcuuuucacugc

SEQ ID NO: 1614358 - RNA, 22 nt, Human
uggcugguuagagguucccuuu

SEQ ID NO: 1614359 - RNA, 14 nt, Human
uggcugggggccuc

SEQ ID NO: 1614360 - RNA, 15 nt, Human
uggcugggggccuca

SEQ ID NO: 1614361 - RNA, 15 nt, Human
uggcuguacccagga

SEQ ID NO: 1614362 - RNA, 22 nt, Human
uggcuuuguauagaaccucuuu

SEQ ID NO: 1614363 - RNA, 14 nt, Human
uggcuuuguauaga

SEQ ID NO: 1614364 - RNA, 20 nt, Human
ugggacauuugcucauggaa

SEQ ID NO: 1614365 - RNA, 19 nt, Human
ugggacauuugcucaugga

SEQ ID NO: 1614366 - RNA, 16 nt, Human
ugggacaugggaaagg

SEQ ID NO: 1614367 - RNA, 16 nt, Human
ugggacagggcauggc

SEQ ID NO: 1614368 - RNA, 21 nt, Human
uguuuguuuagucuugucuca

SEQ ID NO: 1614369 - RNA, 18 nt, Human
uguuuuaaaaugagaaau

SEQ ID NO: 1614370 - RNA, 17 nt, Human
uguuuguugucagcuga

SEQ ID NO: 1614371 - RNA, 12 nt, Human
uguuuguuuagu

SEQ ID NO: 1614372 - RNA, 22 nt, Human
uguuuccuggcacugcuuccag

SEQ ID NO: 1614373 - RNA, 21 nt, Human
uguuuccuggcacugcuucca

SEQ ID NO: 1614374 - RNA, 20 nt, Human
uguuuccuggcacugcuucc

SEQ ID NO: 1614375 - RNA, 23 nt, Human
uguuuccuggcacugcuuccagu

SEQ ID NO: 1614376 - RNA, 13 nt, Human
uguuuuugucuua

SEQ ID NO: 1614377 - RNA, 23 nt, Human
uguuuuaaaaugagaaaucuaaa

SEQ ID NO: 1614378 - RNA, 20 nt, Human
uuaaagcuuauuaaaacuca

SEQ ID NO: 1614379 - RNA, 20 nt, Human
uuaaacuuaaucuaaaugga

SEQ ID NO: 1614380 - RNA, 22 nt, Human
uuaaacuuaaucuaaauggaac

SEQ ID NO: 1614381 - RNA, 19 nt, Human
uuaaaagaaugauuaugaa

SEQ ID NO: 1614382 - RNA, 16 nt, Human
uuaaacuuaaucuaaa

SEQ ID NO: 1614383 - RNA, 18 nt, Human
uuaaacuuaaucuaaaug

SEQ ID NO: 1614384 - RNA, 18 nt, Human
uuaaaugcccagccccuu

SEQ ID NO: 1614385 - RNA, 13 nt, Human
uuaaaugcccagc

SEQ ID NO: 1614386 - RNA, 12 nt, Human
uuaaaugcugcu

SEQ ID NO: 1614387 - RNA, 19 nt, Human
uuaacauguuaaaccaugg

SEQ ID NO: 1614388 - RNA, 18 nt, Human
uuaacauguuaaaccaug

SEQ ID NO: 1614389 - RNA, 12 nt, Human
uuaacauguuaa

SEQ ID NO: 1614390 - RNA, 16 nt, Human
uuaaaugcaccuggaa

SEQ ID NO: 1614391 - RNA, 17 nt, Human
uuaaaugcaccuggaau

SEQ ID NO: 1614392 - RNA, 18 nt, Human
uuaaaugcaccuggaaua

SEQ ID NO: 1614393 - RNA, 19 nt, Human
uuaaauagcuuuuuucucu

SEQ ID NO: 1614394 - RNA, 20 nt, Human
uuaaagcuuccauuguuguc

SEQ ID NO: 1614395 - RNA, 15 nt, Human
uuaaagcuuccauug

SEQ ID NO: 1614396 - RNA, 18 nt, Human
uuaaauaguaaaaauaaa

SEQ ID NO: 1614397 - RNA, 18 nt, Human
uuaauaauguuucaaaca

SEQ ID NO: 1614398 - RNA, 18 nt, Human
uuaauaauuauaugcuau

SEQ ID NO: 1614399 - RNA, 16 nt, Human
uuaauagguuuggaca

SEQ ID NO: 1614400 - RNA, 23 nt, Human
uuaauaauuauaugcuauuucua

SEQ ID NO: 1614401 - RNA, 20 nt, Human
uuaauaauuauaugcuauuu

SEQ ID NO: 1614402 - RNA, 22 nt, Human
uuaaggaugcuuguacauaaug

SEQ ID NO: 1614403 - RNA, 17 nt, Human
uuaaggaugcuuguaca

SEQ ID NO: 1614404 - RNA, 18 nt, Human
uuaaggaugcuuguacau

SEQ ID NO: 1614405 - RNA, 19 nt, Human
uuaaggaugcuuguacaua

SEQ ID NO: 1614406 - RNA, 20 nt, Human
uuaaggaugcuuguacauaa

SEQ ID NO: 1614407 - RNA, 21 nt, Human
uuaaggaagacaaugugaaaa

SEQ ID NO: 1614408 - RNA, 17 nt, Human
uuaaugucacaggcagg

SEQ ID NO: 1614409 - RNA, 14 nt, Human
uuaauggaaauguu

SEQ ID NO: 1614410 - RNA, 18 nt, Human
uuaaugucacaggcaggu

SEQ ID NO: 1614411 - RNA, 21 nt, Human
uuaauagguuuggacaaaaug

SEQ ID NO: 1614412 - RNA, 21 nt, Human
uuaccacuuguguuuugcaag

SEQ ID NO: 1614413 - RNA, 14 nt, Human
uuaccagcagagca

SEQ ID NO: 1614414 - RNA, 20 nt, Human
uuacauuuuuaagugcugca

SEQ ID NO: 1614415 - RNA, 21 nt, Human
uuacauuuuuaagugcugcau

SEQ ID NO: 1614416 - RNA, 22 nt, Human
uuacauuuuuaagugcugcauu

SEQ ID NO: 1614417 - RNA, 23 nt, Human
uuacauuuuuaagugcugcauuu

SEQ ID NO: 1614418 - RNA, 19 nt, Human
uuaccuuuuuuauacauaa

SEQ ID NO: 1614419 - RNA, 20 nt, Human
uuaccuuuuuuauacauaaa

SEQ ID NO: 1614420 - RNA, 22 nt, Human
uuaccuuuuuuauacauaaaca

SEQ ID NO: 1614421 - RNA, 20 nt, Human
uuacgguuuuccagguuuaa

SEQ ID NO: 1614422 - RNA, 16 nt, Human
uuacggaacucaaaua

SEQ ID NO: 1614423 - RNA, 15 nt, Human
uuacauuuguauaaa

SEQ ID NO: 1614424 - RNA, 14 nt, Human
uuacauuuguauaa

SEQ ID NO: 1614425 - RNA, 14 nt, Human
uuacauuuccuaaa

SEQ ID NO: 1614426 - RNA, 23 nt, Human
uuacauggcuggagcuagaauuu

SEQ ID NO: 1614427 - RNA, 22 nt, Human
uuacauggcuggagcuagaauu

SEQ ID NO: 1614428 - RNA, 23 nt, Human
uuacaauaaaaucuugaaaaugc

SEQ ID NO: 1614429 - RNA, 13 nt, Human
uguuuaaaaucau

SEQ ID NO: 1614430 - RNA, 14 nt, Human
uguuuaaaaucauu

SEQ ID NO: 1614431 - RNA, 17 nt, Human
uguuuacagauccccaa

SEQ ID NO: 1614432 - RNA, 14 nt, Human
uguuguuuguuuag

SEQ ID NO: 1614433 - RNA, 14 nt, Human
uguuggccaggcug

SEQ ID NO: 1614434 - RNA, 18 nt, Human
uguuggccaggcugcucu

SEQ ID NO: 1614435 - RNA, 13 nt, Human
uguuggccaggcu

SEQ ID NO: 1614436 - RNA, 21 nt, Human
uguuggagaagaacugaaauc

SEQ ID NO: 1614437 - RNA, 14 nt, Human
uguugcugccucau

SEQ ID NO: 1614438 - RNA, 11 nt, Human
uguuggccagg

SEQ ID NO: 1614439 - RNA, 19 nt, Human
uguugaagagguuuuaaag

SEQ ID NO: 1614440 - RNA, 13 nt, Human
uguugcugccuca

SEQ ID NO: 1614441 - RNA, 11 nt, Human
uguugaaagau

SEQ ID NO: 1614442 - RNA, 23 nt, Human
uguugaaacggaugauuucuaug

SEQ ID NO: 1614443 - RNA, 22 nt, Human
uguugaaacggaugauuucuau

SEQ ID NO: 1614444 - RNA, 21 nt, Human
uguugaaacggaugauuucua

SEQ ID NO: 1614445 - RNA, 20 nt, Human
uguucuuucuggcuaugcau

SEQ ID NO: 1614446 - RNA, 22 nt, Human
uguucuuucuggcuaugcauuu

SEQ ID NO: 1614447 - RNA, 20 nt, Human
uguugaaacggaugauuucu

SEQ ID NO: 1614448 - RNA, 15 nt, Human
uguucugacccugcu

SEQ ID NO: 1614449 - RNA, 19 nt, Human
uguucucugcccuccaaga

SEQ ID NO: 1614450 - RNA, 14 nt, Human
uguucuuucuggcu

SEQ ID NO: 1614451 - RNA, 17 nt, Human
uguucugcacacagcac

SEQ ID NO: 1614452 - RNA, 18 nt, Human
uguucugacccugcuuca

SEQ ID NO: 1614453 - RNA, 12 nt, Human
uguucucugccc

SEQ ID NO: 1614454 - RNA, 18 nt, Human
uguucucugaggacacua

SEQ ID NO: 1614455 - RNA, 16 nt, Human
uguucucugaggacac

SEQ ID NO: 1614456 - RNA, 12 nt, Human
uguucuauagcu

SEQ ID NO: 1614457 - RNA, 20 nt, Human
uguucaugaaagauucaaug

SEQ ID NO: 1614458 - RNA, 13 nt, Human
uguucauaaauaa

SEQ ID NO: 1614459 - RNA, 16 nt, Human
uguucacagccagacu

SEQ ID NO: 1614460 - RNA, 14 nt, Human
uguucagcuccagc

SEQ ID NO: 1614461 - RNA, 11 nt, Human
uguucagcugg

SEQ ID NO: 1614462 - RNA, 18 nt, Human
uguucagcuccagcucac

SEQ ID NO: 1614463 - RNA, 16 nt, Human
uguucagcuccagcuc

SEQ ID NO: 1614464 - RNA, 15 nt, Human
uguucagcuccagcu

SEQ ID NO: 1614465 - RNA, 12 nt, Human
uguuauaaucuu

SEQ ID NO: 1614466 - RNA, 16 nt, Human
uguuagaucuaguuca

SEQ ID NO: 1614467 - RNA, 16 nt, Human
uguuacugucuucagu

SEQ ID NO: 1614468 - RNA, 15 nt, Human
uguuacugucuucag

SEQ ID NO: 1614469 - RNA, 22 nt, Human
uguuacauuuuuaagugcugca

SEQ ID NO: 1614470 - RNA, 13 nt, Human
uguuacauuuuua

SEQ ID NO: 1614471 - RNA, 23 nt, Human
uguuaaaccaugggauaaaugcc

SEQ ID NO: 1614472 - RNA, 21 nt, Human
uguuaaaccaugggauaaaug

SEQ ID NO: 1614473 - RNA, 20 nt, Human
uguuaaaccaugggauaaau

SEQ ID NO: 1614474 - RNA, 18 nt, Human
uguuaaaccaugggauaa

SEQ ID NO: 1614475 - RNA, 19 nt, Human
ugugucagcauagaaguaa

SEQ ID NO: 1614476 - RNA, 17 nt, Human
ugugugaagugagugag

SEQ ID NO: 1614477 - RNA, 13 nt, Human
uguguuuauuguc

SEQ ID NO: 1614478 - RNA, 22 nt, Human
uguguuuaggaacuacugagga

SEQ ID NO: 1614479 - RNA, 23 nt, Human
uguaucccaugagccucagcauc

SEQ ID NO: 1614480 - RNA, 19 nt, Human
uguaucccaugagccucag

SEQ ID NO: 1614481 - RNA, 16 nt, Human
uguauagaaccucuuu

SEQ ID NO: 1614482 - RNA, 14 nt, Human
uguaugcacuuugu

SEQ ID NO: 1614483 - RNA, 20 nt, Human
ugucagugugacugaucucu

SEQ ID NO: 1614484 - RNA, 12 nt, Human
ugucagugugac

SEQ ID NO: 1614485 - RNA, 23 nt, Human
ugucccaaaaagaaaggagggga

SEQ ID NO: 1614486 - RNA, 13 nt, Human
uguaaauuaacuu

SEQ ID NO: 1614487 - RNA, 14 nt, Human
uguaaauuaacuuu

SEQ ID NO: 1614488 - RNA, 15 nt, Human
uguaaauuaacuuuu

SEQ ID NO: 1614489 - RNA, 16 nt, Human
uguaaauuaacuuuua

SEQ ID NO: 1614490 - RNA, 17 nt, Human
uguaaauuaacuuuuau

SEQ ID NO: 1614491 - RNA, 15 nt, Human
uguaaucacagcuac

SEQ ID NO: 1614492 - RNA, 15 nt, Human
uguaccgcaauguga

SEQ ID NO: 1614493 - RNA, 23 nt, Human
uguaccucuugagccuugaacuu

SEQ ID NO: 1614494 - RNA, 22 nt, Human
uguaccucuugagccuugaacu

SEQ ID NO: 1614495 - RNA, 14 nt, Human
uguaccucuugagc

SEQ ID NO: 1614496 - RNA, 17 nt, Human
uguagauaauacaguuc

SEQ ID NO: 1614497 - RNA, 19 nt, Human
uguacugcauaugaaagga

SEQ ID NO: 1614498 - RNA, 13 nt, Human
uguacucaauuuu

SEQ ID NO: 1614499 - RNA, 13 nt, Human
uguacuccuccca

SEQ ID NO: 1614500 - RNA, 12 nt, Human
uguacuccuccc

SEQ ID NO: 1614501 - RNA, 17 nt, Human
uguacgucugacaggca

SEQ ID NO: 1614502 - RNA, 14 nt, Human
ugugaaaggaaaga

SEQ ID NO: 1614503 - RNA, 13 nt, Human
ugugaaaggaaag

SEQ ID NO: 1614504 - RNA, 13 nt, Human
ugugaaacauguu

SEQ ID NO: 1614505 - RNA, 18 nt, Human
ugucuuuggacccugagg

SEQ ID NO: 1614506 - RNA, 22 nt, Human
ugucuuuggacccugaggccca

SEQ ID NO: 1614507 - RNA, 19 nt, Human
ugucuuuggacccugaggc

SEQ ID NO: 1614508 - RNA, 14 nt, Human
ugucuuuuuucuaa

SEQ ID NO: 1614509 - RNA, 22 nt, Human
ugucucaguccaugaagaugua

SEQ ID NO: 1614510 - RNA, 21 nt, Human
ugucucaguccaugaagaugu

SEQ ID NO: 1614511 - RNA, 13 nt, Human
uguccccaccgca

SEQ ID NO: 1614512 - RNA, 23 nt, Human
ugucucaagagggcacugguggc

SEQ ID NO: 1614513 - RNA, 21 nt, Human
ugucucaagagggcacuggug

SEQ ID NO: 1614514 - RNA, 20 nt, Human
ugucucaagagggcacuggu

SEQ ID NO: 1614515 - RNA, 17 nt, Human
ugucucaggucccugca

SEQ ID NO: 1614516 - RNA, 16 nt, Human
ugucucaggucccugc

SEQ ID NO: 1614517 - RNA, 22 nt, Human
ugugaccacugcagaagacagu

SEQ ID NO: 1614518 - RNA, 15 nt, Human
ugugacauguuuuau

SEQ ID NO: 1614519 - RNA, 21 nt, Human
ugugacaaggauugcuacugu

SEQ ID NO: 1614520 - RNA, 16 nt, Human
ugugaaucauuuuacc

SEQ ID NO: 1614521 - RNA, 23 nt, Human
ugugaguacuacaguccucccau

SEQ ID NO: 1614522 - RNA, 20 nt, Human
ugugaguacuacaguccucc

SEQ ID NO: 1614523 - RNA, 19 nt, Human
ugugaguacuacaguccuc

SEQ ID NO: 1614524 - RNA, 18 nt, Human
ugugaguacuacaguccu

SEQ ID NO: 1614525 - RNA, 15 nt, Human
ugugagucaccaagc

SEQ ID NO: 1614526 - RNA, 21 nt, Human
ugugauacaaugcugugcccu

SEQ ID NO: 1614527 - RNA, 13 nt, Human
ugugauauaagug

SEQ ID NO: 1614528 - RNA, 12 nt, Human
ugugggaagggg

SEQ ID NO: 1614529 - RNA, 14 nt, Human
uguggacacagcuc

SEQ ID NO: 1614530 - RNA, 17 nt, Human
uguggaaaaugaaaauu

SEQ ID NO: 1614531 - RNA, 21 nt, Human
uguggagaagcggcuggcagc

SEQ ID NO: 1614532 - RNA, 12 nt, Human
uguggagaagcg

SEQ ID NO: 1614533 - RNA, 21 nt, Human
uguggcuccuggggguucuuu

SEQ ID NO: 1614534 - RNA, 16 nt, Human
uguggacacagcucuu

SEQ ID NO: 1614535 - RNA, 15 nt, Human
uguggacacagcucu

SEQ ID NO: 1614536 - RNA, 20 nt, Human
ugugcgugcauguguguuca

SEQ ID NO: 1614537 - RNA, 23 nt, Human
ugugcgcuaaacuuuucugauag

SEQ ID NO: 1614538 - RNA, 22 nt, Human
ugugcgcuaaacuuuucugaua

SEQ ID NO: 1614539 - RNA, 19 nt, Human
ugugcgcuaaacuuuucug

SEQ ID NO: 1614540 - RNA, 17 nt, Human
ugugccucugggacugg

SEQ ID NO: 1614541 - RNA, 15 nt, Human
ugugccucugccugu

SEQ ID NO: 1614542 - RNA, 14 nt, Human
ugugcgcuaaacuu

SEQ ID NO: 1614543 - RNA, 22 nt, Human
ugugcuuauguaugagguacaa

SEQ ID NO: 1614544 - RNA, 16 nt, Human
ugugccucugggacug

SEQ ID NO: 1614545 - RNA, 15 nt, Human
ugugccucugggacu

SEQ ID NO: 1614546 - RNA, 13 nt, Human
ugugccucuggga

SEQ ID NO: 1614547 - RNA, 14 nt, Human
ugugccucugccug

SEQ ID NO: 1614548 - RNA, 22 nt, Human
ugugcacaugcacgugugugca

SEQ ID NO: 1614549 - RNA, 14 nt, Human
ugugcacguacaca

SEQ ID NO: 1614550 - RNA, 17 nt, Human
uugaagacagagcuaca

SEQ ID NO: 1614551 - RNA, 19 nt, Human
uugaagacuuuucuuucag

SEQ ID NO: 1614552 - RNA, 22 nt, Human
uugaacuuugaccucugcagca

SEQ ID NO: 1614553 - RNA, 16 nt, Human
uugaacugauaaagau

SEQ ID NO: 1614554 - RNA, 19 nt, Human
uugaacucuucaaucucuu

SEQ ID NO: 1614555 - RNA, 23 nt, Human
uugaaaagacuccaaagaaaugu

SEQ ID NO: 1614556 - RNA, 22 nt, Human
uugaaaagacuccaaagaaaug

SEQ ID NO: 1614557 - RNA, 18 nt, Human
uugaaaagacuccaaaga

SEQ ID NO: 1614558 - RNA, 23 nt, Human
uugaaacugagaugugaacacau

SEQ ID NO: 1614559 - RNA, 22 nt, Human
uugaaaacacuguucucugccc

SEQ ID NO: 1614560 - RNA, 21 nt, Human
uugaaacggaugauuucuaug

SEQ ID NO: 1614561 - RNA, 22 nt, Human
uugaaacggaugauuucuaugc

SEQ ID NO: 1614562 - RNA, 21 nt, Human
uugaaaacacuguucucugcc

SEQ ID NO: 1614563 - RNA, 19 nt, Human
uugaaaacacuguucucug

SEQ ID NO: 1614564 - RNA, 18 nt, Human
uucuuuauaauucuacuu

SEQ ID NO: 1614565 - RNA, 15 nt, Human
uucuuauuucauuuc

SEQ ID NO: 1614566 - RNA, 14 nt, Human
uucuucaacucccu

SEQ ID NO: 1614567 - RNA, 23 nt, Human
uucuuauuuaaugaaagacugua

SEQ ID NO: 1614568 - RNA, 19 nt, Human
uucuuauuuaaugaaagac

SEQ ID NO: 1614569 - RNA, 11 nt, Human
uucuguucuuu

SEQ ID NO: 1614570 - RNA, 23 nt, Human
uucuugguuuguaaauuaacuuu

SEQ ID NO: 1614571 - RNA, 17 nt, Human
uucuugguuuguaaauu

SEQ ID NO: 1614572 - RNA, 18 nt, Human
uucuugguuuguaaauua

SEQ ID NO: 1614573 - RNA, 13 nt, Human
uucuugguuugua

SEQ ID NO: 1614574 - RNA, 16 nt, Human
uucuugguuuguaaau

SEQ ID NO: 1614575 - RNA, 15 nt, Human
uucugagaaagacua

SEQ ID NO: 1614576 - RNA, 14 nt, Human
uucugagcauuuaa

SEQ ID NO: 1614577 - RNA, 21 nt, Human
uucuguccgagcuuugaaaau

SEQ ID NO: 1614578 - RNA, 17 nt, Human
uucuguccgagcuuuga

SEQ ID NO: 1614579 - RNA, 23 nt, Human
uucuguggguuucuaaagcugcc

SEQ ID NO: 1614580 - RNA, 16 nt, Human
uucuguggcucacaga

SEQ ID NO: 1614581 - RNA, 12 nt, Human
uucuguggcuca

SEQ ID NO: 1614582 - RNA, 17 nt, Human
uucuguccuacucugug

SEQ ID NO: 1614583 - RNA, 19 nt, Human
uucuguccuacucuguguc

SEQ ID NO: 1614584 - RNA, 18 nt, Human
uugcauagauucccugag

SEQ ID NO: 1614585 - RNA, 15 nt, Human
uugccacugccucuu

SEQ ID NO: 1614586 - RNA, 14 nt, Human
uugccacugccucu

SEQ ID NO: 1614587 - RNA, 14 nt, Human
uugcauagaauaaa

SEQ ID NO: 1614588 - RNA, 22 nt, Human
uugcagacaggcaagcaccucc

SEQ ID NO: 1614589 - RNA, 16 nt, Human
uugcagacaggcaagc

SEQ ID NO: 1614590 - RNA, 12 nt, Human
uugaugaagaag

SEQ ID NO: 1614591 - RNA, 23 nt, Human
uugauagcacagacccugcccug

SEQ ID NO: 1614592 - RNA, 21 nt, Human
uugauagcacagacccugccc

SEQ ID NO: 1614593 - RNA, 17 nt, Human
uugcaacaggcugggcu

SEQ ID NO: 1614594 - RNA, 14 nt, Human
uugcaacaggcugg

SEQ ID NO: 1614595 - RNA, 18 nt, Human
uugauuuccguuaaaaua

SEQ ID NO: 1614596 - RNA, 15 nt, Human
uugaggacacugaua

SEQ ID NO: 1614597 - RNA, 14 nt, Human
uugaggacacugau

SEQ ID NO: 1614598 - RNA, 20 nt, Human
uugauagcacagacccugcc

SEQ ID NO: 1614599 - RNA, 19 nt, Human
uugauagcacagacccugc

SEQ ID NO: 1614600 - RNA, 21 nt, Human
uugaccucaggugauccaccc

SEQ ID NO: 1614601 - RNA, 15 nt, Human
uugaccucaggugau

SEQ ID NO: 1614602 - RNA, 21 nt, Human
uugaccgugaggccagagaca

SEQ ID NO: 1614603 - RNA, 20 nt, Human
uugaccgugaggccagagac

SEQ ID NO: 1614604 - RNA, 19 nt, Human
uugaccugaggcccuucuc

SEQ ID NO: 1614605 - RNA, 12 nt, Human
uugaccugaggc

SEQ ID NO: 1614606 - RNA, 22 nt, Human
uugaccugaggcccuucucucc

SEQ ID NO: 1614607 - RNA, 22 nt, Human
uugacgccaucccagccccaau

SEQ ID NO: 1614608 - RNA, 15 nt, Human
uugacgccaucccag

SEQ ID NO: 1614609 - RNA, 14 nt, Human
uugacgccauccca

SEQ ID NO: 1614610 - RNA, 19 nt, Human
uuguaucacaaaucuuaac

SEQ ID NO: 1614611 - RNA, 15 nt, Human
uuguagagccagggu

SEQ ID NO: 1614612 - RNA, 14 nt, Human
uuguagagccaggg

SEQ ID NO: 1614613 - RNA, 14 nt, Human
uuguacauaaugcg

SEQ ID NO: 1614614 - RNA, 21 nt, Human
uuguauucucuccuguaccuc

SEQ ID NO: 1614615 - RNA, 14 nt, Human
uuguauucagaguu

SEQ ID NO: 1614616 - RNA, 18 nt, Human
uuguaaaugugcuuuuaa

SEQ ID NO: 1614617 - RNA, 14 nt, Human
uuguaaaugugcuu

SEQ ID NO: 1614618 - RNA, 11 nt, Human
uuguaaaugug

SEQ ID NO: 1614619 - RNA, 13 nt, Human
uuguacagacaac

SEQ ID NO: 1614620 - RNA, 12 nt, Human
uuguacagacaa

SEQ ID NO: 1614621 - RNA, 16 nt, Human
uuguaaaggaauuuaa

SEQ ID NO: 1614622 - RNA, 13 nt, Human
uugguccugcugc

SEQ ID NO: 1614623 - RNA, 12 nt, Human
uugguccugcug

SEQ ID NO: 1614624 - RNA, 22 nt, Human
uuggucccccuuccauggacuu

SEQ ID NO: 1614625 - RNA, 12 nt, Human
uugggaggcuga

SEQ ID NO: 1614626 - RNA, 16 nt, Human
uugggaggccauuugu

SEQ ID NO: 1614627 - RNA, 22 nt, Human
uuggcuuuggguugcaggaccu

SEQ ID NO: 1614628 - RNA, 15 nt, Human
uuggcuuuucugauc

SEQ ID NO: 1614629 - RNA, 22 nt, Human
uuggcuuuucugauccaguuuu

SEQ ID NO: 1614630 - RNA, 19 nt, Human
uuggcuuuucugauccagu

SEQ ID NO: 1614631 - RNA, 16 nt, Human
uuggguggaugccugg

SEQ ID NO: 1614632 - RNA, 14 nt, Human
uugguaaaccuuuu

SEQ ID NO: 1614633 - RNA, 12 nt, Human
uugguaaaccuu

SEQ ID NO: 1614634 - RNA, 22 nt, Human
uuggcugggggccucagugcca

SEQ ID NO: 1614635 - RNA, 21 nt, Human
uuggcugggggccucagugcc

SEQ ID NO: 1614636 - RNA, 18 nt, Human
uuggcugggggccucagu

SEQ ID NO: 1614637 - RNA, 24 nt, Human
uuggccaaagccaaagcuaggccu

SEQ ID NO: 1614638 - RNA, 14 nt, Human
uuggccaggcuggu

SEQ ID NO: 1614639 - RNA, 13 nt, Human
uuggcauucccca

SEQ ID NO: 1614640 - RNA, 17 nt, Human
uuggcaaaaaggcagga

SEQ ID NO: 1614641 - RNA, 14 nt, Human
uuggauuguccccg

SEQ ID NO: 1614642 - RNA, 19 nt, Human
uuggaaggaacguccccug

SEQ ID NO: 1614643 - RNA, 11 nt, Human
uuggaaggaac

SEQ ID NO: 1614644 - RNA, 21 nt, Human
uuggaccaaaaaccaguauug

SEQ ID NO: 1614645 - RNA, 20 nt, Human
uugcuggggccgaaagaaca

SEQ ID NO: 1614646 - RNA, 15 nt, Human
uuggaaaucuuuaaa

SEQ ID NO: 1614647 - RNA, 12 nt, Human
uuggaaaucuuu

SEQ ID NO: 1614648 - RNA, 11 nt, Human
uugcccaggca

SEQ ID NO: 1614649 - RNA, 23 nt, Human
uugcccacgcuggagugcaguga

SEQ ID NO: 1614650 - RNA, 18 nt, Human
uugccagucaccccggcc

SEQ ID NO: 1614651 - RNA, 18 nt, Human
uugccacugccucuuccu

SEQ ID NO: 1614652 - RNA, 14 nt, Human
uugccucugccucu

SEQ ID NO: 1614653 - RNA, 11 nt, Human
uugccucugcc

SEQ ID NO: 1614654 - RNA, 18 nt, Human
uugccucugccucugaca

SEQ ID NO: 1614655 - RNA, 16 nt, Human
uugccucugccucuga

SEQ ID NO: 1614656 - RNA, 22 nt, Human
uugcugauggugcaaugaccuu

SEQ ID NO: 1614657 - RNA, 20 nt, Human
uugcugauggugcaaugacc

SEQ ID NO: 1614658 - RNA, 11 nt, Human
uugcugccuca

SEQ ID NO: 1614659 - RNA, 15 nt, Human
uugcugccucaugcu

SEQ ID NO: 1614660 - RNA, 12 nt, Human
uugcugccucau

SEQ ID NO: 1614661 - RNA, 19 nt, Human
uuccacuuauaggaauuga

SEQ ID NO: 1614662 - RNA, 21 nt, Human
uuccacuuagaaauugcauuu

SEQ ID NO: 1614663 - RNA, 17 nt, Human
uuccaugaguccccugu

SEQ ID NO: 1614664 - RNA, 19 nt, Human
uuccaugucgccucugcau

SEQ ID NO: 1614665 - RNA, 18 nt, Human
uuccaugucgccucugca

SEQ ID NO: 1614666 - RNA, 17 nt, Human
uuccaugucgccucugc

SEQ ID NO: 1614667 - RNA, 14 nt, Human
uuccccaagacauu

SEQ ID NO: 1614668 - RNA, 21 nt, Human
uuccaugucgccucugcauuc

SEQ ID NO: 1614669 - RNA, 20 nt, Human
uuccaugucgccucugcauu

SEQ ID NO: 1614670 - RNA, 17 nt, Human
uucaucuugaauuguaa

SEQ ID NO: 1614671 - RNA, 12 nt, Human
uucaucuugaau

SEQ ID NO: 1614672 - RNA, 18 nt, Human
uucaugaaagauucaaug

SEQ ID NO: 1614673 - RNA, 11 nt, Human
uucaucuugaa

SEQ ID NO: 1614674 - RNA, 20 nt, Human
uucaucuuccaacucaaacu

SEQ ID NO: 1614675 - RNA, 19 nt, Human
uucauuuaggugaggaagc

SEQ ID NO: 1614676 - RNA, 13 nt, Human
uucaguggcagcu

SEQ ID NO: 1614677 - RNA, 21 nt, Human
uucagugccuuauggaacacu

SEQ ID NO: 1614678 - RNA, 19 nt, Human
uucagugccuuauggaaca

SEQ ID NO: 1614679 - RNA, 16 nt, Human
uucaggcucuucuccu

SEQ ID NO: 1614680 - RNA, 23 nt, Human
uucauaaugacuuaagcacacuu

SEQ ID NO: 1614681 - RNA, 13 nt, Human
uucauaaugacuu

SEQ ID NO: 1614682 - RNA, 15 nt, Human
uucaucuaggauuuu

SEQ ID NO: 1614683 - RNA, 21 nt, Human
uucagagcugcccucuccugg

SEQ ID NO: 1614684 - RNA, 19 nt, Human
uucagagacuccugcaggc

SEQ ID NO: 1614685 - RNA, 22 nt, Human
uucagagcugcccucuccuggg

SEQ ID NO: 1614686 - RNA, 23 nt, Human
uucagagcugcccucuccugggc

SEQ ID NO: 1614687 - RNA, 15 nt, Human
uucagagacuccugc

SEQ ID NO: 1614688 - RNA, 11 nt, Human
uucacugauuu

SEQ ID NO: 1614689 - RNA, 14 nt, Human
uucacucuccuugg

SEQ ID NO: 1614690 - RNA, 19 nt, Human
uucaggaagcucagggccu

SEQ ID NO: 1614691 - RNA, 17 nt, Human
uucaggaagcucagggc

SEQ ID NO: 1614692 - RNA, 20 nt, Human
uucaggaagcucagggccug

SEQ ID NO: 1614693 - RNA, 15 nt, Human
uucaggcucuucucc

SEQ ID NO: 1614694 - RNA, 17 nt, Human
uucagcugacuuuucug

SEQ ID NO: 1614695 - RNA, 18 nt, Human
uucagcugcauacaguuu

SEQ ID NO: 1614696 - RNA, 16 nt, Human
uucaggaagcucaggg

SEQ ID NO: 1614697 - RNA, 21 nt, Human
uucagcugguugagguuucaa

SEQ ID NO: 1614698 - RNA, 24 nt, Human
uucagcucugcaagaauugaagca

SEQ ID NO: 1614699 - RNA, 17 nt, Human
uucagcucugcaagaau

SEQ ID NO: 1614700 - RNA, 23 nt, Human
uucagcuccagcucaccagcccc

SEQ ID NO: 1614701 - RNA, 13 nt, Human
uucaaagauauuu

SEQ ID NO: 1614702 - RNA, 15 nt, Human
uucaaagcaaauguc

SEQ ID NO: 1614703 - RNA, 23 nt, Human
uucaaauuguaagcaugcacaaa

SEQ ID NO: 1614704 - RNA, 14 nt, Human
uuacgugaguccug

SEQ ID NO: 1614705 - RNA, 13 nt, Human
uuacgugaguccu

SEQ ID NO: 1614706 - RNA, 15 nt, Human
uuacuaaaauggacu

SEQ ID NO: 1614707 - RNA, 18 nt, Human
uuacuaaaauggacugug

SEQ ID NO: 1614708 - RNA, 17 nt, Human
uuacuaaaauggacugu

SEQ ID NO: 1614709 - RNA, 16 nt, Human
uuacuaaaauggacug

SEQ ID NO: 1614710 - RNA, 21 nt, Human
uucaacagguuuuccugaaga

SEQ ID NO: 1614711 - RNA, 13 nt, Human
uucaacgcagccc

SEQ ID NO: 1614712 - RNA, 20 nt, Human
uucaaccauuccccauggga

SEQ ID NO: 1614713 - RNA, 17 nt, Human
uucaaccauuccccaug

SEQ ID NO: 1614714 - RNA, 16 nt, Human
uucaaucccaggaugu

SEQ ID NO: 1614715 - RNA, 15 nt, Human
uucaacgcagcccug

SEQ ID NO: 1614716 - RNA, 14 nt, Human
uucaacgcagcccu

SEQ ID NO: 1614717 - RNA, 18 nt, Human
uucaauucucauuuguca

SEQ ID NO: 1614718 - RNA, 19 nt, Human
uucaaugccccugaauuua

SEQ ID NO: 1614719 - RNA, 17 nt, Human
uuccuuccucugagccu

SEQ ID NO: 1614720 - RNA, 13 nt, Human
uuccuuccucuga

SEQ ID NO: 1614721 - RNA, 19 nt, Human
uuccuucauucaacccacc

SEQ ID NO: 1614722 - RNA, 23 nt, Human
uuccuucagugccuuauggaaca

SEQ ID NO: 1614723 - RNA, 19 nt, Human
uuccuucagugccuuaugg

SEQ ID NO: 1614724 - RNA, 16 nt, Human
uuccuucagugccuua

SEQ ID NO: 1614725 - RNA, 11 nt, Human
uuccugcccug

SEQ ID NO: 1614726 - RNA, 22 nt, Human
uuccugcccugggaggcaguga

SEQ ID NO: 1614727 - RNA, 16 nt, Human
uuccugcccugggagg

SEQ ID NO: 1614728 - RNA, 13 nt, Human
uuccugcccuggg

SEQ ID NO: 1614729 - RNA, 19 nt, Human
uucggccuccauccugagg

SEQ ID NO: 1614730 - RNA, 18 nt, Human
uucggccuccauccugag

SEQ ID NO: 1614731 - RNA, 22 nt, Human
uucggccuccauccugaggcuc

SEQ ID NO: 1614732 - RNA, 19 nt, Human
uucuaaaggcuaccuuugu

SEQ ID NO: 1614733 - RNA, 17 nt, Human
uucuaaaggcuaccuuu

SEQ ID NO: 1614734 - RNA, 18 nt, Human
uucuaaaggcuaccuuug

SEQ ID NO: 1614735 - RNA, 16 nt, Human
uucuaaaggcuaccuu

SEQ ID NO: 1614736 - RNA, 12 nt, Human
uuccuagugaaa

SEQ ID NO: 1614737 - RNA, 20 nt, Human
uuccuagguauaauucacau

SEQ ID NO: 1614738 - RNA, 23 nt, Human
uuccucauaguaugguggcuggg

SEQ ID NO: 1614739 - RNA, 21 nt, Human
uuccucccucccucuuucccu

SEQ ID NO: 1614740 - RNA, 19 nt, Human
uuccucccucccucuuucc

SEQ ID NO: 1614741 - RNA, 12 nt, Human
uuccucccuccc

SEQ ID NO: 1614742 - RNA, 22 nt, Human
uuccucccucccucuuucccuc

SEQ ID NO: 1614743 - RNA, 22 nt, Human
uuccccacuugagaauuacccu

SEQ ID NO: 1614744 - RNA, 19 nt, Human
uucccuuugacgccauccc

SEQ ID NO: 1614745 - RNA, 23 nt, Human
uucucuccucuccccaugauguu

SEQ ID NO: 1614746 - RNA, 18 nt, Human
uucucuccagccccugga

SEQ ID NO: 1614747 - RNA, 13 nt, Human
uucuccacccugc

SEQ ID NO: 1614748 - RNA, 16 nt, Human
uucuccaagcaggaca

SEQ ID NO: 1614749 - RNA, 11 nt, Human
uucuccaggcu

SEQ ID NO: 1614750 - RNA, 16 nt, Human
uucuccacccugcucu

SEQ ID NO: 1614751 - RNA, 20 nt, Human
uucugacccaugcugcccug

SEQ ID NO: 1614752 - RNA, 18 nt, Human
uucugacccaugcugccc

SEQ ID NO: 1614753 - RNA, 21 nt, Human
uucugacccaugcugcccugu

SEQ ID NO: 1614754 - RNA, 17 nt, Human
uucucugauacagaaaa

SEQ ID NO: 1614755 - RNA, 16 nt, Human
uucucugauacagaaa

SEQ ID NO: 1614756 - RNA, 15 nt, Human
uucucugauacagaa

SEQ ID NO: 1614757 - RNA, 14 nt, Human
uucucugauacaga

SEQ ID NO: 1614758 - RNA, 16 nt, Human
uucuaugacacaugca

SEQ ID NO: 1614759 - RNA, 17 nt, Human
uucuaugacacaugcaa

SEQ ID NO: 1614760 - RNA, 21 nt, Human
uucuauauuuucauucuccua

SEQ ID NO: 1614761 - RNA, 18 nt, Human
uucuauauuuucauucuc

SEQ ID NO: 1614762 - RNA, 16 nt, Human
uucuauauuuucauuc

SEQ ID NO: 1614763 - RNA, 15 nt, Human
uucuauauuuucauu

SEQ ID NO: 1614764 - RNA, 14 nt, Human
uucuauauuuucau

SEQ ID NO: 1614765 - RNA, 11 nt, Human
uucuauauuuu

SEQ ID NO: 1614766 - RNA, 17 nt, Human
uucuaugcugaguuugu

SEQ ID NO: 1614767 - RNA, 14 nt, Human
uucuauuguuucuu

SEQ ID NO: 1614768 - RNA, 12 nt, Human
uucucaugccuc

SEQ ID NO: 1614769 - RNA, 11 nt, Human
uucucaugccu

SEQ ID NO: 1614770 - RNA, 21 nt, Human
uucucaugccucagccuccug

SEQ ID NO: 1614771 - RNA, 14 nt, Human
uucucaugccucag

SEQ ID NO: 1614772 - RNA, 22 nt, Human
uuuacauggcuggagcuagaau

SEQ ID NO: 1614773 - RNA, 15 nt, Human
uuuacuuuguguuca

SEQ ID NO: 1614774 - RNA, 12 nt, Human
uuuagaaacaca

SEQ ID NO: 1614775 - RNA, 20 nt, Human
uuuagaaacacaacuauauu

SEQ ID NO: 1614776 - RNA, 20 nt, Human
uuguauuuuacuaauaaaau

SEQ ID NO: 1614777 - RNA, 15 nt, Human
uuguauuuauuuagu

SEQ ID NO: 1614778 - RNA, 17 nt, Human
uuuacauggcuggagcu

SEQ ID NO: 1614779 - RNA, 22 nt, Human
uuuauuguuuaaaaucauuucu

SEQ ID NO: 1614780 - RNA, 16 nt, Human
uuuauugucaaagugg

SEQ ID NO: 1614781 - RNA, 14 nt, Human
uuuauugucaaagu

SEQ ID NO: 1614782 - RNA, 21 nt, Human
uuuauuggcuuuucugaucca

SEQ ID NO: 1614783 - RNA, 17 nt, Human
uuuauuggcuuuucuga

SEQ ID NO: 1614784 - RNA, 14 nt, Human
uuuaugcauauuau

SEQ ID NO: 1614785 - RNA, 14 nt, Human
uuuauaaacuuuac

SEQ ID NO: 1614786 - RNA, 16 nt, Human
uuuaucgucacugcuu

SEQ ID NO: 1614787 - RNA, 16 nt, Human
uuuauaaacuuuaccu

SEQ ID NO: 1614788 - RNA, 21 nt, Human
uuuaucgucacugcuuaacuu

SEQ ID NO: 1614789 - RNA, 18 nt, Human
uuuauaaacuuuaccuuu

SEQ ID NO: 1614790 - RNA, 13 nt, Human
uuuaugauccagc

SEQ ID NO: 1614791 - RNA, 12 nt, Human
uuuccaaaguac

SEQ ID NO: 1614792 - RNA, 15 nt, Human
uuuccaaaguacacu

SEQ ID NO: 1614793 - RNA, 13 nt, Human
uuuccaggaaggc

SEQ ID NO: 1614794 - RNA, 22 nt, Human
uuucauugcugggcuugucugu

SEQ ID NO: 1614795 - RNA, 16 nt, Human
uuucagccaagaauuc

SEQ ID NO: 1614796 - RNA, 15 nt, Human
uuucagccaagaauu

SEQ ID NO: 1614797 - RNA, 21 nt, Human
uuucagauaaucacaauacau

SEQ ID NO: 1614798 - RNA, 15 nt, Human
uuucagcagcugcag

SEQ ID NO: 1614799 - RNA, 15 nt, Human
uuucagauaaucaca

SEQ ID NO: 1614800 - RNA, 22 nt, Human
uuucaauaggaaaaacugauuu

SEQ ID NO: 1614801 - RNA, 20 nt, Human
uuucaauaggaaaaacugau

SEQ ID NO: 1614802 - RNA, 13 nt, Human
uuuauuuccagug

SEQ ID NO: 1614803 - RNA, 22 nt, Human
uuuccucaaaacuucagacaua

SEQ ID NO: 1614804 - RNA, 21 nt, Human
uuuccucuuuggucuacacug

SEQ ID NO: 1614805 - RNA, 23 nt, Human
uuuccugacagaaggacucaggu

SEQ ID NO: 1614806 - RNA, 17 nt, Human
uuucuaaagcugccagc

SEQ ID NO: 1614807 - RNA, 14 nt, Human
uuucuaaagcugcc

SEQ ID NO: 1614808 - RNA, 14 nt, Human
uuucuaaaggcuac

SEQ ID NO: 1614809 - RNA, 18 nt, Human
uuucuaaaggcuaccuuu

SEQ ID NO: 1614810 - RNA, 22 nt, Human
uuucugagaaagacuauucaaa

SEQ ID NO: 1614811 - RNA, 14 nt, Human
uuucucuuucguua

SEQ ID NO: 1614812 - RNA, 15 nt, Human
uuucuagccagagga

SEQ ID NO: 1614813 - RNA, 15 nt, Human
uuucuaaugugugaa

SEQ ID NO: 1614814 - RNA, 16 nt, Human
uuucuaggacugaauu

SEQ ID NO: 1614815 - RNA, 19 nt, Human
uuuuccaugaguccccugu

SEQ ID NO: 1614816 - RNA, 18 nt, Human
uuuuccaugaguccccug

SEQ ID NO: 1614817 - RNA, 13 nt, Human
uuuuccugaaaac

SEQ ID NO: 1614818 - RNA, 17 nt, Human
uuuucuugcaugaggcu

SEQ ID NO: 1614819 - RNA, 15 nt, Human
uuuuccuucagugcc

SEQ ID NO: 1614820 - RNA, 20 nt, Human
uuuucacugcuggcugccuu

SEQ ID NO: 1614821 - RNA, 19 nt, Human
uuuucacugcuggcugccu

SEQ ID NO: 1614822 - RNA, 15 nt, Human
uuuucacaguucucu

SEQ ID NO: 1614823 - RNA, 13 nt, Human
uuuuaugauccag

SEQ ID NO: 1614824 - RNA, 15 nt, Human
uuuuaugauccagca

SEQ ID NO: 1614825 - RNA, 22 nt, Human
uuuucaacgcagcccugcuuug

SEQ ID NO: 1614826 - RNA, 21 nt, Human
uuuucaacgcagcccugcuuu

SEQ ID NO: 1614827 - RNA, 17 nt, Human
uuuucaacgcagcccug

SEQ ID NO: 1614828 - RNA, 10 nt, Human
uuuuauauuu

SEQ ID NO: 1614829 - RNA, 19 nt, Human
uuuuaucgucacugcuuaa

SEQ ID NO: 1614830 - RNA, 18 nt, Human
uuuuaucgucacugcuua

SEQ ID NO: 1614831 - RNA, 20 nt, Human
uuuuaugauacuugaaaauu

SEQ ID NO: 1614832 - RNA, 16 nt, Human
uuuuaugauacuugaa

SEQ ID NO: 1614833 - RNA, 20 nt, Human
uuuuauaucaauuuaaaaaa

SEQ ID NO: 1614834 - RNA, 20 nt, Human
uuuuauaugcuucuguuuua

SEQ ID NO: 1614835 - RNA, 15 nt, Human
uuuuauaugcuucug

SEQ ID NO: 1614836 - RNA, 14 nt, Human
uuuuacuguacaga

SEQ ID NO: 1614837 - RNA, 21 nt, Human
uuuuaauuugguuuucacauu

SEQ ID NO: 1614838 - RNA, 17 nt, Human
uuuuaauuugguuuuca

SEQ ID NO: 1614839 - RNA, 22 nt, Human
uuuuacauaaauuuaguauuuu

SEQ ID NO: 1614840 - RNA, 16 nt, Human
uuuuacagcugccugc

SEQ ID NO: 1614841 - RNA, 22 nt, Human
uuuuaaaaugagaaaucuaaaa

SEQ ID NO: 1614842 - RNA, 15 nt, Human
uuuuaaaaugagaaa

SEQ ID NO: 1614843 - RNA, 19 nt, Human
uuuguuguuuguuuagucu

SEQ ID NO: 1614844 - RNA, 14 nt, Human
uuuguuguuuguuu

SEQ ID NO: 1614845 - RNA, 12 nt, Human
uuuguuguuugu

SEQ ID NO: 1614846 - RNA, 21 nt, Human
uuuguccccaccgcagacagg

SEQ ID NO: 1614847 - RNA, 13 nt, Human
uuuguccccaccg

SEQ ID NO: 1614848 - RNA, 12 nt, Human
uuuguguuagag

SEQ ID NO: 1614849 - RNA, 21 nt, Human
uuuguauaaaauaauuuuuau

SEQ ID NO: 1614850 - RNA, 22 nt, Human
uuuguaaauuaacuuuuauaaa

SEQ ID NO: 1614851 - RNA, 11 nt, Human
uuuguauagaa

SEQ ID NO: 1614852 - RNA, 15 nt, Human
uuuguaaauuaacuu

SEQ ID NO: 1614853 - RNA, 16 nt, Human
uuuguaaauuaacuuu

SEQ ID NO: 1614854 - RNA, 17 nt, Human
uuuguaaauuaacuuuu

SEQ ID NO: 1614855 - RNA, 18 nt, Human
uuugccauguuggccagg

SEQ ID NO: 1614856 - RNA, 22 nt, Human
uuugccauguuggccaggcugg

SEQ ID NO: 1614857 - RNA, 16 nt, Human
uuuggaaaucuuuaaa

SEQ ID NO: 1614858 - RNA, 21 nt, Human
uuugcauagauucccugagca

SEQ ID NO: 1614859 - RNA, 16 nt, Human
uuugccagugggaacu

SEQ ID NO: 1614860 - RNA, 15 nt, Human
uuugccagugggaac

SEQ ID NO: 1614861 - RNA, 14 nt, Human
uuugcagacaggca

SEQ ID NO: 1614862 - RNA, 23 nt, Human
uuugcauaacguauaaaagccug

SEQ ID NO: 1614863 - RNA, 19 nt, Human
uuugcauaacguauaaaag

SEQ ID NO: 1614864 - RNA, 17 nt, Human
uuugaggucuguucuuu

SEQ ID NO: 1614865 - RNA, 22 nt, Human
uuugaggucuguucuuuccaaa

SEQ ID NO: 1614866 - RNA, 14 nt, Human
uuugagcucagccc

SEQ ID NO: 1614867 - RNA, 13 nt, Human
uuugagugccuua

SEQ ID NO: 1614868 - RNA, 15 nt, Human
uuugagcagggcuca

SEQ ID NO: 1614869 - RNA, 22 nt, Human
uuucuuacugucuuuuuucuaa

SEQ ID NO: 1614870 - RNA, 12 nt, Human
uuuuuucugaaa

SEQ ID NO: 1614871 - RNA, 20 nt, Human
uuuuuuauacaggaugauga

SEQ ID NO: 1614872 - RNA, 12 nt, Human
uuuuuuacuaau

SEQ ID NO: 1614873 - RNA, 13 nt, Human
uuuugaaaaacug

SEQ ID NO: 1614874 - RNA, 13 nt, Human
uuuuuucuuacug

SEQ ID NO: 1614875 - RNA, 17 nt, Human
auguguaagacaaaaag

SEQ ID NO: 1614876 - RNA, 19 nt, Human
auguguaagacaaaaagcu

SEQ ID NO: 1614877 - RNA, 16 nt, Human
auguuccuagugaaag

SEQ ID NO: 1614878 - RNA, 15 nt, Human
auguuccuagugaaa

SEQ ID NO: 1614879 - RNA, 13 nt, Human
auguguaaguauu

SEQ ID NO: 1614880 - RNA, 17 nt, Human
auguuccuagugaaaga

SEQ ID NO: 1614881 - RNA, 13 nt, Human
auguucucugagg

SEQ ID NO: 1614882 - RNA, 17 nt, Human
auguucucucuucucca

SEQ ID NO: 1614883 - RNA, 14 nt, Human
auguucugggacac

SEQ ID NO: 1614884 - RNA, 17 nt, Human
auguucucugaggacac

SEQ ID NO: 1614885 - RNA, 15 nt, Human
auguucugggacaca

SEQ ID NO: 1614886 - RNA, 17 nt, Human
auguuugccucugccuc

SEQ ID NO: 1614887 - RNA, 15 nt, Human
auguuugccucugcc

SEQ ID NO: 1614888 - RNA, 14 nt, Human
auguucuuaauucu

SEQ ID NO: 1614889 - RNA, 21 nt, Human
augucaaucagccuaguugau

SEQ ID NO: 1614890 - RNA, 13 nt, Human
augucacaggcag

SEQ ID NO: 1614891 - RNA, 19 nt, Human
augguccgugcuaaggacu

SEQ ID NO: 1614892 - RNA, 18 nt, Human
augguccgugcuaaggac

SEQ ID NO: 1614893 - RNA, 15 nt, Human
augguccgugcuaag

SEQ ID NO: 1614894 - RNA, 15 nt, Human
augugaacacaucag

SEQ ID NO: 1614895 - RNA, 18 nt, Human
augugaaaucauucauuu

SEQ ID NO: 1614896 - RNA, 17 nt, Human
augugaaaucauucauu

SEQ ID NO: 1614897 - RNA, 19 nt, Human
augucacaggcagguccag

SEQ ID NO: 1614898 - RNA, 14 nt, Human
augucacaggcagg

SEQ ID NO: 1614899 - RNA, 14 nt, Human
augugaaacauguu

SEQ ID NO: 1614900 - RNA, 23 nt, Human
augggugcuuggaggaaggaaac

SEQ ID NO: 1614901 - RNA, 21 nt, Human
augggugcuuggaggaaggaa

SEQ ID NO: 1614902 - RNA, 16 nt, Human
augaucuuuaaaauac

SEQ ID NO: 1614903 - RNA, 17 nt, Human
augaucuuugcagacag

SEQ ID NO: 1614904 - RNA, 21 nt, Human
augaucuuugcagacaggcaa

SEQ ID NO: 1614905 - RNA, 19 nt, Human
augaucuuugcagacaggc

SEQ ID NO: 1614906 - RNA, 18 nt, Human
augaucuuugcagacagg

SEQ ID NO: 1614907 - RNA, 21 nt, Human
augaugaucuuuaaaauacac

SEQ ID NO: 1614908 - RNA, 18 nt, Human
augaugaucuuuaaaaua

SEQ ID NO: 1614909 - RNA, 15 nt, Human
augaugauccuaggc

SEQ ID NO: 1614910 - RNA, 18 nt, Human
augaugaaaugaggucag

SEQ ID NO: 1614911 - RNA, 23 nt, Human
augaugaaaugaggucagagccu

SEQ ID NO: 1614912 - RNA, 18 nt, Human
augcacaaacagaggccg

SEQ ID NO: 1614913 - RNA, 22 nt, Human
augcacaaauucugucucugga

SEQ ID NO: 1614914 - RNA, 15 nt, Human
augcacaaauucugu

SEQ ID NO: 1614915 - RNA, 23 nt, Human
augcacaaauucugucucuggau

SEQ ID NO: 1614916 - RNA, 13 nt, Human
augcacacauuuu

SEQ ID NO: 1614917 - RNA, 14 nt, Human
augcacacauuuuu

SEQ ID NO: 1614918 - RNA, 15 nt, Human
augcacacauuuuuu

SEQ ID NO: 1614919 - RNA, 19 nt, Human
augcacagaguuguuacau

SEQ ID NO: 1614920 - RNA, 21 nt, Human
augcacagaguuguuacauuu

SEQ ID NO: 1614921 - RNA, 22 nt, Human
augcacagaguuguuacauuuu

SEQ ID NO: 1614922 - RNA, 23 nt, Human
augcacagaguuguuacauuuuu

SEQ ID NO: 1614923 - RNA, 20 nt, Human
augccuggauggggcugcac

SEQ ID NO: 1614924 - RNA, 19 nt, Human
augccuggauggggcugca

SEQ ID NO: 1614925 - RNA, 15 nt, Human
augcugcccugugag

SEQ ID NO: 1614926 - RNA, 14 nt, Human
augcugcccuguga

SEQ ID NO: 1614927 - RNA, 13 nt, Human
augcugcccugug

SEQ ID NO: 1614928 - RNA, 16 nt, Human
augcugcccugugagu

SEQ ID NO: 1614929 - RNA, 15 nt, Human
augcugccuccagaa

SEQ ID NO: 1614930 - RNA, 12 nt, Human
augcugccucca

SEQ ID NO: 1614931 - RNA, 20 nt, Human
augcugaguuugugcuggug

SEQ ID NO: 1614932 - RNA, 19 nt, Human
augcugacuguacuccucc

SEQ ID NO: 1614933 - RNA, 21 nt, Human
augcugacuguacuccuccca

SEQ ID NO: 1614934 - RNA, 20 nt, Human
augcugacuguacuccuccc

SEQ ID NO: 1614935 - RNA, 16 nt, Human
auggcuuuugugcauu

SEQ ID NO: 1614936 - RNA, 17 nt, Human
auggcuuuugugcauua

SEQ ID NO: 1614937 - RNA, 18 nt, Human
auggcuuuugugcauuau

SEQ ID NO: 1614938 - RNA, 19 nt, Human
auggcuuuguauagaaccu

SEQ ID NO: 1614939 - RNA, 16 nt, Human
augcuuguacauaaug

SEQ ID NO: 1614940 - RNA, 15 nt, Human
augcuuguacauaau

SEQ ID NO: 1614941 - RNA, 18 nt, Human
augcuuuaggauguacag

SEQ ID NO: 1614942 - RNA, 21 nt, Human
augcuuuaggauguacaguua

SEQ ID NO: 1614943 - RNA, 17 nt, Human
auggauaggcacaggaa

SEQ ID NO: 1614944 - RNA, 18 nt, Human
auggauaggcacaggaaa

SEQ ID NO: 1614945 - RNA, 18 nt, Human
auggcugugccucugccu

SEQ ID NO: 1614946 - RNA, 17 nt, Human
auggcugugccucugcc

SEQ ID NO: 1614947 - RNA, 16 nt, Human
auggcugugccucugc

SEQ ID NO: 1614948 - RNA, 15 nt, Human
auggcugugccucug

SEQ ID NO: 1614949 - RNA, 20 nt, Human
aucuccgucaacucauauuu

SEQ ID NO: 1614950 - RNA, 17 nt, Human
aucuggguucacugcaa

SEQ ID NO: 1614951 - RNA, 18 nt, Human
aucugggggccucuucug

SEQ ID NO: 1614952 - RNA, 16 nt, Human
aucucugcuuuggaaa

SEQ ID NO: 1614953 - RNA, 21 nt, Human
augaaguacucauacauguua

SEQ ID NO: 1614954 - RNA, 23 nt, Human
augaaguccaagcauuuagaugu

SEQ ID NO: 1614955 - RNA, 20 nt, Human
augaaguccaagcauuuaga

SEQ ID NO: 1614956 - RNA, 15 nt, Human
augaccacacuccag

SEQ ID NO: 1614957 - RNA, 18 nt, Human
augaccacacuccagcug

SEQ ID NO: 1614958 - RNA, 13 nt, Human
augaggcauuugu

SEQ ID NO: 1614959 - RNA, 14 nt, Human
augaggcauuuguu

SEQ ID NO: 1614960 - RNA, 21 nt, Human
augaggcauuuguuugaacug

SEQ ID NO: 1614961 - RNA, 22 nt, Human
augaggcauuuguuugaacuga

SEQ ID NO: 1614962 - RNA, 16 nt, Human
augaaaacacauuuuu

SEQ ID NO: 1614963 - RNA, 14 nt, Human
augaaaacacauuu

SEQ ID NO: 1614964 - RNA, 15 nt, Human
augaaaacacauuuu

SEQ ID NO: 1614965 - RNA, 17 nt, Human
aucaugaauuaguuuua

SEQ ID NO: 1614966 - RNA, 14 nt, Human
aucaugucuggcua

SEQ ID NO: 1614967 - RNA, 12 nt, Human
aucaugugaaau

SEQ ID NO: 1614968 - RNA, 14 nt, Human
aucaugugaaauca

SEQ ID NO: 1614969 - RNA, 22 nt, Human
aucagcuugcccuguuaaaaga

SEQ ID NO: 1614970 - RNA, 13 nt, Human
aucagcuuauugu

SEQ ID NO: 1614971 - RNA, 14 nt, Human
aucaaauaugcaaa

SEQ ID NO: 1614972 - RNA, 22 nt, Human
aucaaauauauucagccuggcu

SEQ ID NO: 1614973 - RNA, 13 nt, Human
aucacagccucug

SEQ ID NO: 1614974 - RNA, 13 nt, Human
aucaccagacagg

SEQ ID NO: 1614975 - RNA, 23 nt, Human
aucacccgcuaagagggagggag

SEQ ID NO: 1614976 - RNA, 23 nt, Human
aucaaagagguuuuaaaaaaauc

SEQ ID NO: 1614977 - RNA, 20 nt, Human
aucaaagagguuuuaaaaaa

SEQ ID NO: 1614978 - RNA, 14 nt, Human
aucaaauauauuca

SEQ ID NO: 1614979 - RNA, 19 nt, Human
auccucaguuuuugugaaa

SEQ ID NO: 1614980 - RNA, 15 nt, Human
aucccggcugcccuu

SEQ ID NO: 1614981 - RNA, 19 nt, Human
aucccaugagccucagcau

SEQ ID NO: 1614982 - RNA, 18 nt, Human
auccccaagccuggcaag

SEQ ID NO: 1614983 - RNA, 20 nt, Human
aucccauuauucaaaguugc

SEQ ID NO: 1614984 - RNA, 15 nt, Human
aucccauuauucaaa

SEQ ID NO: 1614985 - RNA, 14 nt, Human
aucccauuauucaa

SEQ ID NO: 1614986 - RNA, 19 nt, Human
auccagacccggcugcgug

SEQ ID NO: 1614987 - RNA, 13 nt, Human
auccacucgccuu

SEQ ID NO: 1614988 - RNA, 17 nt, Human
auccucauacccacccc

SEQ ID NO: 1614989 - RNA, 13 nt, Human
auauuauguuaaa

SEQ ID NO: 1614990 - RNA, 20 nt, Human
auaugcucugcauguuacau

SEQ ID NO: 1614991 - RNA, 17 nt, Human
auaugcucugcauguua

SEQ ID NO: 1614992 - RNA, 16 nt, Human
auaugcucugcauguu

SEQ ID NO: 1614993 - RNA, 16 nt, Human
auauuauguuaaaacu

SEQ ID NO: 1614994 - RNA, 14 nt, Human
auauuauguuaaaa

SEQ ID NO: 1614995 - RNA, 22 nt, Human
auauuauuuuauguugcauaga

SEQ ID NO: 1614996 - RNA, 15 nt, Human
auauuauuuuauguu

SEQ ID NO: 1614997 - RNA, 19 nt, Human
auauucaggaagcucaggg

SEQ ID NO: 1614998 - RNA, 18 nt, Human
auauauuuuuuucugaaa

SEQ ID NO: 1614999 - RNA, 19 nt, Human
auauauuuuuauauuuacu

SEQ ID NO: 1615000 - RNA, 18 nt, Human
auauauuuuuauauuuac

SEQ ID NO: 1615001 - RNA, 20 nt, Human
auauauuuuuauauuuacua

SEQ ID NO: 1615002 - RNA, 15 nt, Human
auagcagcuuauuca

SEQ ID NO: 1615003 - RNA, 18 nt, Human
auagcagcuuauucacaa

SEQ ID NO: 1615004 - RNA, 18 nt, Human
auagcacagacccugccc

SEQ ID NO: 1615005 - RNA, 17 nt, Human
auagcacagacccugcc

SEQ ID NO: 1615006 - RNA, 17 nt, Human
auagccuaggugacaga

SEQ ID NO: 1615007 - RNA, 15 nt, Human
auagccuaggugaca

SEQ ID NO: 1615008 - RNA, 24 nt, Human
auagguuuggacaaaauggaauac

SEQ ID NO: 1615009 - RNA, 14 nt, Human
auaguaaaaauaaa

SEQ ID NO: 1615010 - RNA, 13 nt, Human
auaguaaaaauaa

SEQ ID NO: 1615011 - RNA, 13 nt, Human
auacagaaaaguu

SEQ ID NO: 1615012 - RNA, 17 nt, Human
auacccacccccaccca

SEQ ID NO: 1615013 - RNA, 19 nt, Human
auacccccugcaaagccca

SEQ ID NO: 1615014 - RNA, 17 nt, Human
auacccccugcaaagcc

SEQ ID NO: 1615015 - RNA, 16 nt, Human
auacccacccccaccc

SEQ ID NO: 1615016 - RNA, 14 nt, Human
auacccacccccac

SEQ ID NO: 1615017 - RNA, 13 nt, Human
auacccaccccca

SEQ ID NO: 1615018 - RNA, 18 nt, Human
auaauguuucaaacauau

SEQ ID NO: 1615019 - RNA, 22 nt, Human
auacacuuacacuuuaugcaca

SEQ ID NO: 1615020 - RNA, 13 nt, Human
auacacuuacacu

SEQ ID NO: 1615021 - RNA, 14 nt, Human
auacaaugcugugc

SEQ ID NO: 1615022 - RNA, 17 nt, Human
auacaaugcugugcccu

SEQ ID NO: 1615023 - RNA, 17 nt, Human
auaccugucccccugac

SEQ ID NO: 1615024 - RNA, 20 nt, Human
auacccccugcaaagcccag

SEQ ID NO: 1615025 - RNA, 16 nt, Human
auaccugucccccuga

SEQ ID NO: 1615026 - RNA, 15 nt, Human
auaccugucccccug

SEQ ID NO: 1615027 - RNA, 14 nt, Human
auaccugucccccu

SEQ ID NO: 1615028 - RNA, 21 nt, Human
auacccccugcaaagcccagc

SEQ ID NO: 1615029 - RNA, 22 nt, Human
auaagccagacaucaacagaua

SEQ ID NO: 1615030 - RNA, 21 nt, Human
auaagccagacaucaacagau

SEQ ID NO: 1615031 - RNA, 13 nt, Human
auaauguuucaaa

SEQ ID NO: 1615032 - RNA, 14 nt, Human
auaauguaagcucu

SEQ ID NO: 1615033 - RNA, 15 nt, Human
auaauguaaauaaag

SEQ ID NO: 1615034 - RNA, 18 nt, Human
auaaggguaucuggugac

SEQ ID NO: 1615035 - RNA, 13 nt, Human
auaauggucagag

SEQ ID NO: 1615036 - RNA, 23 nt, Human
aguuugauuaaauucuugcaaag

SEQ ID NO: 1615037 - RNA, 19 nt, Human
aguuugagaucagccuggg

SEQ ID NO: 1615038 - RNA, 18 nt, Human
aguuugagaucagccugg

SEQ ID NO: 1615039 - RNA, 20 nt, Human
aguuugagaucagccugggc

SEQ ID NO: 1615040 - RNA, 17 nt, Human
aguuugauuaaauucuu

SEQ ID NO: 1615041 - RNA, 18 nt, Human
aguuugauuaaauucuug

SEQ ID NO: 1615042 - RNA, 20 nt, Human
aguuugauuaaauucuugca

SEQ ID NO: 1615043 - RNA, 22 nt, Human
aguuugauuaaauucuugcaaa

SEQ ID NO: 1615044 - RNA, 20 nt, Human
aguuguuacauuuuuaagug

SEQ ID NO: 1615045 - RNA, 22 nt, Human
aguuguuacauuuuuaagugcu

SEQ ID NO: 1615046 - RNA, 21 nt, Human
auaacaaugcuguauuuuaaa

SEQ ID NO: 1615047 - RNA, 20 nt, Human
auaacaaugcuguauuuuaa

SEQ ID NO: 1615048 - RNA, 19 nt, Human
auaacaaugcuguauuuua

SEQ ID NO: 1615049 - RNA, 17 nt, Human
auaacaaugcuguauuu

SEQ ID NO: 1615050 - RNA, 15 nt, Human
auaacaaugcuguau

SEQ ID NO: 1615051 - RNA, 14 nt, Human
auaacaaugaaagu

SEQ ID NO: 1615052 - RNA, 20 nt, Human
auaacauguaauuaaguacu

SEQ ID NO: 1615053 - RNA, 18 nt, Human
auaacauguaauuaagua

SEQ ID NO: 1615054 - RNA, 13 nt, Human
auaacauguaauu

SEQ ID NO: 1615055 - RNA, 12 nt, Human
auaacauguaau

SEQ ID NO: 1615056 - RNA, 17 nt, Human
agugaccucagcuuuga

SEQ ID NO: 1615057 - RNA, 18 nt, Human
agugaccucagcuuugau

SEQ ID NO: 1615058 - RNA, 11 nt, Human
aguccaagcau

SEQ ID NO: 1615059 - RNA, 19 nt, Human
aguccucuuuucugagagg

SEQ ID NO: 1615060 - RNA, 20 nt, Human
aguccuuaccagcagagcac

SEQ ID NO: 1615061 - RNA, 22 nt, Human
aguccucuuuucugagaggacu

SEQ ID NO: 1615062 - RNA, 19 nt, Human
agucaugcguuuaaucaca

SEQ ID NO: 1615063 - RNA, 17 nt, Human
aguauuuuguuucagug

SEQ ID NO: 1615064 - RNA, 23 nt, Human
aguaugaggcauuuguuugaacu

SEQ ID NO: 1615065 - RNA, 14 nt, Human
aguauuuuguuuca

SEQ ID NO: 1615066 - RNA, 15 nt, Human
aguaucucagggccu

SEQ ID NO: 1615067 - RNA, 20 nt, Human
aguaugaggcauuuguuuga

SEQ ID NO: 1615068 - RNA, 21 nt, Human
aguaugaggcauuuguuugaa

SEQ ID NO: 1615069 - RNA, 22 nt, Human
agucacacaguauuacuucugc

SEQ ID NO: 1615070 - RNA, 23 nt, Human
agucacacaguauuacuucugcu

SEQ ID NO: 1615071 - RNA, 18 nt, Human
aguaaaugggggugcauu

SEQ ID NO: 1615072 - RNA, 13 nt, Human
aggucuguucuuu

SEQ ID NO: 1615073 - RNA, 15 nt, Human
aggucuguucuuucc

SEQ ID NO: 1615074 - RNA, 16 nt, Human
aggucuguucuuucca

SEQ ID NO: 1615075 - RNA, 15 nt, Human
aguacguugugcauu

SEQ ID NO: 1615076 - RNA, 14 nt, Human
aguacguugugcau

SEQ ID NO: 1615077 - RNA, 13 nt, Human
aguacucauacau

SEQ ID NO: 1615078 - RNA, 14 nt, Human
aguacuauguauca

SEQ ID NO: 1615079 - RNA, 12 nt, Human
aguacuauguau

SEQ ID NO: 1615080 - RNA, 12 nt, Human
aguacuucuuuu

SEQ ID NO: 1615081 - RNA, 19 nt, Human
aguacuucuccacccugcu

SEQ ID NO: 1615082 - RNA, 17 nt, Human
aguacuucuccacccug

SEQ ID NO: 1615083 - RNA, 16 nt, Human
aguacguugugcauuu

SEQ ID NO: 1615084 - RNA, 17 nt, Human
aguacguugugcauuug

SEQ ID NO: 1615085 - RNA, 18 nt, Human
aguacguugugcauuugg

SEQ ID NO: 1615086 - RNA, 22 nt, Human
aguacuacaguccucccaucuc

SEQ ID NO: 1615087 - RNA, 19 nt, Human
aguacuacaguccucccau

SEQ ID NO: 1615088 - RNA, 14 nt, Human
aguacuauaauuua

SEQ ID NO: 1615089 - RNA, 20 nt, Human
aguaagccgugauuuucauu

SEQ ID NO: 1615090 - RNA, 19 nt, Human
agugucaaugcagccccca

SEQ ID NO: 1615091 - RNA, 22 nt, Human
agugggcccaaugcacuuuguu

SEQ ID NO: 1615092 - RNA, 21 nt, Human
agugggacagggcauggccag

SEQ ID NO: 1615093 - RNA, 19 nt, Human
agugggacagggcauggcc

SEQ ID NO: 1615094 - RNA, 24 nt, Human
agugauccucccaccucagccucc

SEQ ID NO: 1615095 - RNA, 19 nt, Human
agugauccucccaccucag

SEQ ID NO: 1615096 - RNA, 18 nt, Human
agugauccucccaccuca

SEQ ID NO: 1615097 - RNA, 15 nt, Human
agugauccucccacc

SEQ ID NO: 1615098 - RNA, 14 nt, Human
agugauccucccac

SEQ ID NO: 1615099 - RNA, 18 nt, Human
agugccuuacacaauggu

SEQ ID NO: 1615100 - RNA, 17 nt, Human
agugauucuccugccuc

SEQ ID NO: 1615101 - RNA, 15 nt, Human
agugauucuccugcc

SEQ ID NO: 1615102 - RNA, 14 nt, Human
agugauucuccugc

SEQ ID NO: 1615103 - RNA, 21 nt, Human
agugauucucaugccucagcc

SEQ ID NO: 1615104 - RNA, 20 nt, Human
agugauggguuaguggaugg

SEQ ID NO: 1615105 - RNA, 15 nt, Human
agugccuuauggaac

SEQ ID NO: 1615106 - RNA, 14 nt, Human
agugccuuauggaa

SEQ ID NO: 1615107 - RNA, 13 nt, Human
agugccuuaugga

SEQ ID NO: 1615108 - RNA, 10 nt, Human
agugccuuau

SEQ ID NO: 1615109 - RNA, 18 nt, Human
agugccuuauggaacacu

SEQ ID NO: 1615110 - RNA, 16 nt, Human
agugccuuauggaaca

SEQ ID NO: 1615111 - RNA, 15 nt, Human
agugcuaauuuugaa

SEQ ID NO: 1615112 - RNA, 20 nt, Human
agugcuaauuuugaaaaacu

SEQ ID NO: 1615113 - RNA, 18 nt, Human
agugcuaauuuugaaaaa

SEQ ID NO: 1615114 - RNA, 20 nt, Human
aguugaaaagacuccaaaga

SEQ ID NO: 1615115 - RNA, 19 nt, Human
aguugaaaagacuccaaag

SEQ ID NO: 1615116 - RNA, 18 nt, Human
aguugaaaagacuccaaa

SEQ ID NO: 1615117 - RNA, 22 nt, Human
aguucaucuugaauuguaagga

SEQ ID NO: 1615118 - RNA, 21 nt, Human
aguugaaaagacuccaaagaa

SEQ ID NO: 1615119 - RNA, 16 nt, Human
aguugauacuacaguu

SEQ ID NO: 1615120 - RNA, 14 nt, Human
aguugauagcacag

SEQ ID NO: 1615121 - RNA, 23 nt, Human
aguucagagcugcccucuccugg

SEQ ID NO: 1615122 - RNA, 21 nt, Human
aguucagagcugcccucuccu

SEQ ID NO: 1615123 - RNA, 22 nt, Human
aguucagagcugcccucuccug

SEQ ID NO: 1615124 - RNA, 20 nt, Human
aguucagagcugcccucucc

SEQ ID NO: 1615125 - RNA, 19 nt, Human
aguucaucuugaauuguaa

SEQ ID NO: 1615126 - RNA, 15 nt, Human
aguucaucuugaauu

SEQ ID NO: 1615127 - RNA, 13 nt, Human
aguucaucuugaa

SEQ ID NO: 1615128 - RNA, 18 nt, Human
aguucagguaacaggcag

SEQ ID NO: 1615129 - RNA, 19 nt, Human
agaugaugaugaucuuuaa

SEQ ID NO: 1615130 - RNA, 14 nt, Human
agaugagugagcau

SEQ ID NO: 1615131 - RNA, 19 nt, Human
agauguagaggagaaacug

SEQ ID NO: 1615132 - RNA, 16 nt, Human
agauguagaggagaaa

SEQ ID NO: 1615133 - RNA, 21 nt, Human
agauguagccccucuccugga

SEQ ID NO: 1615134 - RNA, 23 nt, Human
agaggggguggccucccaacuca

SEQ ID NO: 1615135 - RNA, 19 nt, Human
agaucugccuaaggacuuc

SEQ ID NO: 1615136 - RNA, 20 nt, Human
agcaaaggagauuggaagga

SEQ ID NO: 1615137 - RNA, 16 nt, Human
agcaaauguggcuccu

SEQ ID NO: 1615138 - RNA, 20 nt, Human
agcaaaugucuuccuggauu

SEQ ID NO: 1615139 - RNA, 17 nt, Human
agcaaaugucuuccugg

SEQ ID NO: 1615140 - RNA, 24 nt, Human
agcaaaauuuuuucucuaggaaau

SEQ ID NO: 1615141 - RNA, 18 nt, Human
agcaaaagaugcuucuca

SEQ ID NO: 1615142 - RNA, 21 nt, Human
agauugcaacaggcugggcuu

SEQ ID NO: 1615143 - RNA, 20 nt, Human
agauugcaacaggcugggcu

SEQ ID NO: 1615144 - RNA, 23 nt, Human
agauugcaacaggcugggcuuca

SEQ ID NO: 1615145 - RNA, 21 nt, Human
agauucuuuccugaggcuggg

SEQ ID NO: 1615146 - RNA, 19 nt, Human
agauucuuuccugaggcug

SEQ ID NO: 1615147 - RNA, 16 nt, Human
agcacagacccugccc

SEQ ID NO: 1615148 - RNA, 17 nt, Human
agcacgauuucuguuua

SEQ ID NO: 1615149 - RNA, 19 nt, Human
agcacgauuucuguuuaga

SEQ ID NO: 1615150 - RNA, 21 nt, Human
agcacgauuucuguuuagaua

SEQ ID NO: 1615151 - RNA, 15 nt, Human
agcacagacccugcc

SEQ ID NO: 1615152 - RNA, 14 nt, Human
agcacagacccugc

SEQ ID NO: 1615153 - RNA, 21 nt, Human
agcccgggcucugccucccau

SEQ ID NO: 1615154 - RNA, 20 nt, Human
agcccgggcucugccuccca

SEQ ID NO: 1615155 - RNA, 18 nt, Human
agcccgggcucugccucc

SEQ ID NO: 1615156 - RNA, 17 nt, Human
agcccgggcucugccuc

SEQ ID NO: 1615157 - RNA, 20 nt, Human
agccccauucugccugccca

SEQ ID NO: 1615158 - RNA, 21 nt, Human
agcccuccaucuaaacugccc

SEQ ID NO: 1615159 - RNA, 23 nt, Human
agcccuccaucuaaacugccccc

SEQ ID NO: 1615160 - RNA, 13 nt, Human
agcccucccugcc

SEQ ID NO: 1615161 - RNA, 12 nt, Human
agcccucccugc

SEQ ID NO: 1615162 - RNA, 23 nt, Human
agccccauccucuguacagagcc

SEQ ID NO: 1615163 - RNA, 17 nt, Human
agccccauccucuguac

SEQ ID NO: 1615164 - RNA, 15 nt, Human
agccccauccucugu

SEQ ID NO: 1615165 - RNA, 19 nt, Human
agccccauucugccugccc

SEQ ID NO: 1615166 - RNA, 18 nt, Human
agccccauucugccugcc

SEQ ID NO: 1615167 - RNA, 17 nt, Human
agccccauucugccugc

SEQ ID NO: 1615168 - RNA, 13 nt, Human
agcauccuggcac

SEQ ID NO: 1615169 - RNA, 15 nt, Human
agcccacgcccccac

SEQ ID NO: 1615170 - RNA, 14 nt, Human
agcccacgccccca

SEQ ID NO: 1615171 - RNA, 23 nt, Human
agcccacgcccccacuggugaca

SEQ ID NO: 1615172 - RNA, 17 nt, Human
agccagcaggcucucag

SEQ ID NO: 1615173 - RNA, 16 nt, Human
agccagcaggcucuca

SEQ ID NO: 1615174 - RNA, 16 nt, Human
agcccaccuuggcuca

SEQ ID NO: 1615175 - RNA, 15 nt, Human
agcccaccccucaac

SEQ ID NO: 1615176 - RNA, 18 nt, Human
agccaaagcuaggccugg

SEQ ID NO: 1615177 - RNA, 16 nt, Human
agccaaagcuaggccu

SEQ ID NO: 1615178 - RNA, 17 nt, Human
agcauccuggcacccgg

SEQ ID NO: 1615179 - RNA, 14 nt, Human
agcauccuggcacc

SEQ ID NO: 1615180 - RNA, 18 nt, Human
agcauccuggcacccggc

SEQ ID NO: 1615181 - RNA, 15 nt, Human
agccagaggagagag

SEQ ID NO: 1615182 - RNA, 13 nt, Human
agccagaggagag

SEQ ID NO: 1615183 - RNA, 20 nt, Human
agccaaggccaaaggaagca

SEQ ID NO: 1615184 - RNA, 18 nt, Human
agccagaggagagaggac

SEQ ID NO: 1615185 - RNA, 17 nt, Human
agccagaggagagagga

SEQ ID NO: 1615186 - RNA, 14 nt, Human
agccagcaggcucu

SEQ ID NO: 1615187 - RNA, 19 nt, Human
agacccaaaaggcagaagc

SEQ ID NO: 1615188 - RNA, 21 nt, Human
agacagagucucacuguugcc

SEQ ID NO: 1615189 - RNA, 23 nt, Human
agacagagucucacuguugccca

SEQ ID NO: 1615190 - RNA, 22 nt, Human
agacagccaacuauggccugug

SEQ ID NO: 1615191 - RNA, 20 nt, Human
agacagagucucacuguugc

SEQ ID NO: 1615192 - RNA, 19 nt, Human
agacagagucucacuguug

SEQ ID NO: 1615193 - RNA, 11 nt, Human
agacagagucu

SEQ ID NO: 1615194 - RNA, 21 nt, Human
agacaaugacuuacuguacau

SEQ ID NO: 1615195 - RNA, 22 nt, Human
agacaaugacuuacuguacaug

SEQ ID NO: 1615196 - RNA, 15 nt, Human
agacagagcuacaca

SEQ ID NO: 1615197 - RNA, 23 nt, Human
agacaaugacuuacuguacauga

SEQ ID NO: 1615198 - RNA, 20 nt, Human
agacaaugacuuacuguaca

SEQ ID NO: 1615199 - RNA, 17 nt, Human
agaaugauuaugaauua

SEQ ID NO: 1615200 - RNA, 22 nt, Human
agaaugcacaaacagaggccgc

SEQ ID NO: 1615201 - RNA, 19 nt, Human
agaaugcacaaacagaggc

SEQ ID NO: 1615202 - RNA, 22 nt, Human
agaaugagagacacacugaaga

SEQ ID NO: 1615203 - RNA, 17 nt, Human
agaaugagagacacacu

SEQ ID NO: 1615204 - RNA, 21 nt, Human
agaagugaaaaucuacacucc

SEQ ID NO: 1615205 - RNA, 22 nt, Human
agaagucacauuccugaacagg

SEQ ID NO: 1615206 - RNA, 18 nt, Human
agaaugaaagggcccaga

SEQ ID NO: 1615207 - RNA, 22 nt, Human
agaagagcuguucacagccaga

SEQ ID NO: 1615208 - RNA, 21 nt, Human
agaagagauugugguuucauu

SEQ ID NO: 1615209 - RNA, 18 nt, Human
agaagacugcauuauauu

SEQ ID NO: 1615210 - RNA, 21 nt, Human
acuuuccucuuuggucuacac

SEQ ID NO: 1615211 - RNA, 21 nt, Human
acuuuccucuuagucgagcca

SEQ ID NO: 1615212 - RNA, 21 nt, Human
agaagacacugaugggcaacc

SEQ ID NO: 1615213 - RNA, 13 nt, Human
agaagacacugau

SEQ ID NO: 1615214 - RNA, 13 nt, Human
agaagauagcagg

SEQ ID NO: 1615215 - RNA, 14 nt, Human
agaaguaacuuacu

SEQ ID NO: 1615216 - RNA, 18 nt, Human
agaagguuucagaaagaa

SEQ ID NO: 1615217 - RNA, 21 nt, Human
agaagucacauuccugaacag

SEQ ID NO: 1615218 - RNA, 20 nt, Human
agaagucacauuccugaaca

SEQ ID NO: 1615219 - RNA, 18 nt, Human
agaagucacauuccugaa

SEQ ID NO: 1615220 - RNA, 18 nt, Human
agacucugucucagucca

SEQ ID NO: 1615221 - RNA, 20 nt, Human
agacugaguacguugugcau

SEQ ID NO: 1615222 - RNA, 22 nt, Human
agacugaguacguugugcauuu

SEQ ID NO: 1615223 - RNA, 23 nt, Human
agacugaguacguugugcauuug

SEQ ID NO: 1615224 - RNA, 18 nt, Human
agacucugucucaaaaaa

SEQ ID NO: 1615225 - RNA, 16 nt, Human
agacgcugugcugccc

SEQ ID NO: 1615226 - RNA, 16 nt, Human
agagagaccacuuuuc

SEQ ID NO: 1615227 - RNA, 16 nt, Human
agacuggaagcacagc

SEQ ID NO: 1615228 - RNA, 13 nt, Human
agagccagggucu

SEQ ID NO: 1615229 - RNA, 13 nt, Human
agagcccaccuug

SEQ ID NO: 1615230 - RNA, 13 nt, Human
agaggaaugaagu

SEQ ID NO: 1615231 - RNA, 19 nt, Human
agaggggguggccucccaa

SEQ ID NO: 1615232 - RNA, 17 nt, Human
agaggggguggccuccc

SEQ ID NO: 1615233 - RNA, 16 nt, Human
agagggccugcaaggg

SEQ ID NO: 1615234 - RNA, 13 nt, Human
agagggccugcaa

SEQ ID NO: 1615235 - RNA, 23 nt, Human
agaggacuuuucuuuguggcuuc

SEQ ID NO: 1615236 - RNA, 23 nt, Human
agaggagggagcaucagugcccu

SEQ ID NO: 1615237 - RNA, 22 nt, Human
agaggacuuuucuuuguggcuu

SEQ ID NO: 1615238 - RNA, 21 nt, Human
agaggacuuuucuuuguggcu

SEQ ID NO: 1615239 - RNA, 12 nt, Human
agcuacaaaugc

SEQ ID NO: 1615240 - RNA, 16 nt, Human
agcucaccagccccag

SEQ ID NO: 1615241 - RNA, 16 nt, Human
agcuaaucagcauucu

SEQ ID NO: 1615242 - RNA, 21 nt, Human
agcuaaucagcauucucacuc

SEQ ID NO: 1615243 - RNA, 19 nt, Human
agcucaccucucccuugga

SEQ ID NO: 1615244 - RNA, 18 nt, Human
agcucaccucucccuugg

SEQ ID NO: 1615245 - RNA, 15 nt, Human
agcucaccucucccu

SEQ ID NO: 1615246 - RNA, 20 nt, Human
agcucaccagccccagugcc

SEQ ID NO: 1615247 - RNA, 19 nt, Human
agcucaccagccccagugc

SEQ ID NO: 1615248 - RNA, 12 nt, Human
agcucaccucuc

SEQ ID NO: 1615249 - RNA, 14 nt, Human
agcucagagagggu

SEQ ID NO: 1615250 - RNA, 18 nt, Human
agcucagagaggguggga

SEQ ID NO: 1615251 - RNA, 12 nt, Human
agcucagagagg

SEQ ID NO: 1615252 - RNA, 19 nt, Human
agcgagcccugguggcagu

SEQ ID NO: 1615253 - RNA, 13 nt, Human
agcgagcccuggu

SEQ ID NO: 1615254 - RNA, 15 nt, Human
agccuuuggaaacag

SEQ ID NO: 1615255 - RNA, 20 nt, Human
agccugggaggucaaggcug

SEQ ID NO: 1615256 - RNA, 12 nt, Human
agccugggaggu

SEQ ID NO: 1615257 - RNA, 18 nt, Human
agccuggcuucaaauugu

SEQ ID NO: 1615258 - RNA, 17 nt, Human
agccuggcuucaaauug

SEQ ID NO: 1615259 - RNA, 23 nt, Human
agcccucccugccccucccuuca

SEQ ID NO: 1615260 - RNA, 22 nt, Human
agcccucccugccccucccuuc

SEQ ID NO: 1615261 - RNA, 19 nt, Human
agcccucccugccccuccc

SEQ ID NO: 1615262 - RNA, 17 nt, Human
agcccucccugccccuc

SEQ ID NO: 1615263 - RNA, 16 nt, Human
agcccucccugccccu

SEQ ID NO: 1615264 - RNA, 15 nt, Human
agcccucccugcccc

SEQ ID NO: 1615265 - RNA, 19 nt, Human
agcuccccucggagaagag

SEQ ID NO: 1615266 - RNA, 17 nt, Human
agcuccccucggagaag

SEQ ID NO: 1615267 - RNA, 20 nt, Human
agcuccccucggagaagagc

SEQ ID NO: 1615268 - RNA, 15 nt, Human
agcugaaccugggua

SEQ ID NO: 1615269 - RNA, 18 nt, Human
agcugcgguccacccagg

SEQ ID NO: 1615270 - RNA, 17 nt, Human
agcugcgguccacccag

SEQ ID NO: 1615271 - RNA, 16 nt, Human
agcugcgguccaccca

SEQ ID NO: 1615272 - RNA, 13 nt, Human
agcugcgguccac

SEQ ID NO: 1615273 - RNA, 20 nt, Human
agcugcgguccacccaggag

SEQ ID NO: 1615274 - RNA, 19 nt, Human
agcugcgguccacccagga

SEQ ID NO: 1615275 - RNA, 12 nt, Human
agcugcugacag

SEQ ID NO: 1615276 - RNA, 21 nt, Human
agcugcgguccacccaggagc

SEQ ID NO: 1615277 - RNA, 17 nt, Human
agcuggucccacucagu

SEQ ID NO: 1615278 - RNA, 14 nt, Human
agcugcugacagug

SEQ ID NO: 1615279 - RNA, 13 nt, Human
agcugcugacagu

SEQ ID NO: 1615280 - RNA, 19 nt, Human
agcuggucccacucagucc

SEQ ID NO: 1615281 - RNA, 18 nt, Human
agcuggucccacucaguc

SEQ ID NO: 1615282 - RNA, 22 nt, Human
agcugguuuuuagcggagacgg

SEQ ID NO: 1615283 - RNA, 18 nt, Human
agcuucacuguaaaauaa

SEQ ID NO: 1615284 - RNA, 18 nt, Human
agcuucauuuccuguguc

SEQ ID NO: 1615285 - RNA, 19 nt, Human
agcuucauuuccugugucu

SEQ ID NO: 1615286 - RNA, 23 nt, Human
agcuuuguuuguugucagcugaa

SEQ ID NO: 1615287 - RNA, 16 nt, Human
agcuuuuaaacccuau

SEQ ID NO: 1615288 - RNA, 23 nt, Human
aggaacuuaaauaaugugaaacu

SEQ ID NO: 1615289 - RNA, 22 nt, Human
aggaaggcugagaggagagaga

SEQ ID NO: 1615290 - RNA, 18 nt, Human
aggaauaccugucccccu

SEQ ID NO: 1615291 - RNA, 15 nt, Human
aggaauaccuguccc

SEQ ID NO: 1615292 - RNA, 22 nt, Human
aggaauaccugucccccugaca

SEQ ID NO: 1615293 - RNA, 20 nt, Human
aggaauaaauugcuccuuga

SEQ ID NO: 1615294 - RNA, 19 nt, Human
aggaauaaauugcuccuug

SEQ ID NO: 1615295 - RNA, 23 nt, Human
aggaacaaggcaaggcugucaau

SEQ ID NO: 1615296 - RNA, 20 nt, Human
aggaacaaggcaaggcuguc

SEQ ID NO: 1615297 - RNA, 21 nt, Human
aggaacuuaaauaaugugaaa

SEQ ID NO: 1615298 - RNA, 19 nt, Human
aggaacaaggcaaggcugu

SEQ ID NO: 1615299 - RNA, 17 nt, Human
aggaacaaggcaaggcu

SEQ ID NO: 1615300 - RNA, 16 nt, Human
aggaacaaggcaaggc

SEQ ID NO: 1615301 - RNA, 13 nt, Human
aggaacaaggcaa

SEQ ID NO: 1615302 - RNA, 12 nt, Human
aggaacaaggca

SEQ ID NO: 1615303 - RNA, 21 nt, Human
agcuuuuaugugaaacauguu

SEQ ID NO: 1615304 - RNA, 15 nt, Human
agcuuuuaugugaaa

SEQ ID NO: 1615305 - RNA, 22 nt, Human
aggacccggaggggccuggcag

SEQ ID NO: 1615306 - RNA, 21 nt, Human
aggacccggaggggccuggca

SEQ ID NO: 1615307 - RNA, 20 nt, Human
aggacccggaggggccuggc

SEQ ID NO: 1615308 - RNA, 18 nt, Human
aggacccggaggggccug

SEQ ID NO: 1615309 - RNA, 15 nt, Human
agggacugaggggag

SEQ ID NO: 1615310 - RNA, 23 nt, Human
agggacugccagucccccugccc

SEQ ID NO: 1615311 - RNA, 15 nt, Human
agggacccuccacca

SEQ ID NO: 1615312 - RNA, 21 nt, Human
aggcuuagucacugagacagc

SEQ ID NO: 1615313 - RNA, 18 nt, Human
aggcuuagucacugagac

SEQ ID NO: 1615314 - RNA, 17 nt, Human
aggcuuagucacugaga

SEQ ID NO: 1615315 - RNA, 23 nt, Human
aggcuguaucccaugagccucag

SEQ ID NO: 1615316 - RNA, 22 nt, Human
aggcuguaucccaugagccuca

SEQ ID NO: 1615317 - RNA, 21 nt, Human
aggcuguaucccaugagccuc

SEQ ID NO: 1615318 - RNA, 20 nt, Human
aggcuguaucccaugagccu

SEQ ID NO: 1615319 - RNA, 23 nt, Human
aggcuggucucgaacuccugacc

SEQ ID NO: 1615320 - RNA, 18 nt, Human
aggcuggguucugauccu

SEQ ID NO: 1615321 - RNA, 15 nt, Human
aggcuaccuuuguau

SEQ ID NO: 1615322 - RNA, 13 nt, Human
aggcuaccuuugu

SEQ ID NO: 1615323 - RNA, 14 nt, Human
aggcuaccuuugua

SEQ ID NO: 1615324 - RNA, 23 nt, Human
aggccaugggcacuguggguaga

SEQ ID NO: 1615325 - RNA, 21 nt, Human
aggccaugggcacugugggua

SEQ ID NO: 1615326 - RNA, 23 nt, Human
aggcccucugcccacucccugca

SEQ ID NO: 1615327 - RNA, 22 nt, Human
aggcccucugcccacucccugc

SEQ ID NO: 1615328 - RNA, 19 nt, Human
aggcccuucucuccagccc

SEQ ID NO: 1615329 - RNA, 15 nt, Human
aggcccuucucucca

SEQ ID NO: 1615330 - RNA, 12 nt, Human
aggcccuucucu

SEQ ID NO: 1615331 - RNA, 22 nt, Human
aggcccuuccucuccacugccu

SEQ ID NO: 1615332 - RNA, 15 nt, Human
aggccaggcccucug

SEQ ID NO: 1615333 - RNA, 16 nt, Human
aggccaggcccucugc

SEQ ID NO: 1615334 - RNA, 14 nt, Human
aggccaggcccucu

SEQ ID NO: 1615335 - RNA, 13 nt, Human
aggccaggcccuc

SEQ ID NO: 1615336 - RNA, 20 nt, Human
aggcauuccccaggaggcca

SEQ ID NO: 1615337 - RNA, 19 nt, Human
aggcauuccccaggaggcc

SEQ ID NO: 1615338 - RNA, 18 nt, Human
aggcauuccccaggaggc

SEQ ID NO: 1615339 - RNA, 19 nt, Human
aggcauguucucugaggac

SEQ ID NO: 1615340 - RNA, 18 nt, Human
aggcauguucucugagga

SEQ ID NO: 1615341 - RNA, 17 nt, Human
aggcauguucucugagg

SEQ ID NO: 1615342 - RNA, 21 nt, Human
aggcaugugaugagaggaaau

SEQ ID NO: 1615343 - RNA, 20 nt, Human
aggcaugugaugagaggaaa

SEQ ID NO: 1615344 - RNA, 19 nt, Human
aggcaugugaugagaggaa

SEQ ID NO: 1615345 - RNA, 15 nt, Human
aggcaugguggccca

SEQ ID NO: 1615346 - RNA, 17 nt, Human
aggcaugugaugagagg

SEQ ID NO: 1615347 - RNA, 14 nt, Human
aggagaggggcaca

SEQ ID NO: 1615348 - RNA, 15 nt, Human
agggauuagggagag

SEQ ID NO: 1615349 - RNA, 20 nt, Human
agggauuagggagagaagau

SEQ ID NO: 1615350 - RNA, 14 nt, Human
agggccugcaaggg

SEQ ID NO: 1615351 - RNA, 13 nt, Human
agggccuggccug

SEQ ID NO: 1615352 - RNA, 12 nt, Human
agggccuggccu

SEQ ID NO: 1615353 - RNA, 15 nt, Human
agggccugcaaggga

SEQ ID NO: 1615354 - RNA, 22 nt, Human
agggucccugguggcagcucac

SEQ ID NO: 1615355 - RNA, 20 nt, Human
agggucccugguggcagcuc

SEQ ID NO: 1615356 - RNA, 17 nt, Human
agggucccugguggcag

SEQ ID NO: 1615357 - RNA, 16 nt, Human
agggucccugguggca

SEQ ID NO: 1615358 - RNA, 13 nt, Human
aggguauuccaga

SEQ ID NO: 1615359 - RNA, 21 nt, Human
aggguaucuggugacuuuccu

SEQ ID NO: 1615360 - RNA, 12 nt, Human
aggggccuggca

SEQ ID NO: 1615361 - RNA, 15 nt, Human
aggggccuggcagcc

SEQ ID NO: 1615362 - RNA, 13 nt, Human
aggggccuggcag

SEQ ID NO: 1615363 - RNA, 14 nt, Human
agggucccuggugg

SEQ ID NO: 1615364 - RNA, 12 nt, Human
agggucccuggu

SEQ ID NO: 1615365 - RNA, 22 nt, Human
aggggcccaaauucuuucagug

SEQ ID NO: 1615366 - RNA, 14 nt, Human
agggccuggccuga

SEQ ID NO: 1615367 - RNA, 20 nt, Human
agggucucacuauguugccc

SEQ ID NO: 1615368 - RNA, 14 nt, Human
agguaacaggcaga

SEQ ID NO: 1615369 - RNA, 13 nt, Human
agguaacaggcag

SEQ ID NO: 1615370 - RNA, 16 nt, Human
agguaacaggcagaua

SEQ ID NO: 1615371 - RNA, 14 nt, Human
agguacucuccugg

SEQ ID NO: 1615372 - RNA, 13 nt, Human
agguacucuccug

SEQ ID NO: 1615373 - RNA, 23 nt, Human
aggguuuugccauguuggccagg

SEQ ID NO: 1615374 - RNA, 22 nt, Human
aggguuuugccauguuggccag

SEQ ID NO: 1615375 - RNA, 16 nt, Human
aaauaaacgucuuaaa

SEQ ID NO: 1615376 - RNA, 15 nt, Human
aaauaaacgucuuaa

SEQ ID NO: 1615377 - RNA, 11 nt, Human
aaauaaauuau

SEQ ID NO: 1615378 - RNA, 17 nt, Human
aaauaaacgucuuaaau

SEQ ID NO: 1615379 - RNA, 20 nt, Human
aaagcauuguaaaugugcuu

SEQ ID NO: 1615380 - RNA, 19 nt, Human
aaagcauuguaaaugugcu

SEQ ID NO: 1615381 - RNA, 15 nt, Human
aaagccaaagcuagg

SEQ ID NO: 1615382 - RNA, 17 nt, Human
aaaggcuaccuuuguau

SEQ ID NO: 1615383 - RNA, 14 nt, Human
aaaggcuaccuuug

SEQ ID NO: 1615384 - RNA, 14 nt, Human
aaaggcuccaggag

SEQ ID NO: 1615385 - RNA, 22 nt, Human
aaaggcuccaggagcagccaca

SEQ ID NO: 1615386 - RNA, 21 nt, Human
aaaggcuccaggagcagccac

SEQ ID NO: 1615387 - RNA, 19 nt, Human
aaaggcagaagcaacccaa

SEQ ID NO: 1615388 - RNA, 17 nt, Human
aaacucuugaccucagg

SEQ ID NO: 1615389 - RNA, 19 nt, Human
aaacccuugccaugugcua

SEQ ID NO: 1615390 - RNA, 14 nt, Human
aaacccuucagugc

SEQ ID NO: 1615391 - RNA, 21 nt, Human
aaacccugucucuacuaaaaa

SEQ ID NO: 1615392 - RNA, 17 nt, Human
aaaccccaucucuacaa

SEQ ID NO: 1615393 - RNA, 13 nt, Human
aaagaaacauuug

SEQ ID NO: 1615394 - RNA, 19 nt, Human
aaacugauuuuuuuuuccu

SEQ ID NO: 1615395 - RNA, 13 nt, Human
aaacugauuuuuu

SEQ ID NO: 1615396 - RNA, 20 nt, Human
aaacugauuuuuuuuuccuu

SEQ ID NO: 1615397 - RNA, 22 nt, Human
aaacugauuuuuuuuuccuuca

SEQ ID NO: 1615398 - RNA, 11 nt, Human
aaagagguuuu

SEQ ID NO: 1615399 - RNA, 15 nt, Human
aaagauacaguuacu

SEQ ID NO: 1615400 - RNA, 15 nt, Human
aaacagccugugucu

SEQ ID NO: 1615401 - RNA, 17 nt, Human
aaacagcuaaugggaca

SEQ ID NO: 1615402 - RNA, 19 nt, Human
aaaauccauacauuugugu

SEQ ID NO: 1615403 - RNA, 12 nt, Human
aaaauuaagaaa

SEQ ID NO: 1615404 - RNA, 22 nt, Human
aaaauuaacaugaauauuuagu

SEQ ID NO: 1615405 - RNA, 22 nt, Human
aaaaucccuuaccucggugccu

SEQ ID NO: 1615406 - RNA, 23 nt, Human
aaaauuaaucugggccagaauuu

SEQ ID NO: 1615407 - RNA, 20 nt, Human
aaaauuaagaaaggauaaag

SEQ ID NO: 1615408 - RNA, 13 nt, Human
aaaauuaagaaag

SEQ ID NO: 1615409 - RNA, 15 nt, Human
aaaauuagccaagug

SEQ ID NO: 1615410 - RNA, 19 nt, Human
aaaauuaggauuucaugau

SEQ ID NO: 1615411 - RNA, 15 nt, Human
aaaauaaaaaacacu

SEQ ID NO: 1615412 - RNA, 22 nt, Human
aaaaguuuaauauuaaagccau

SEQ ID NO: 1615413 - RNA, 21 nt, Human
aaaaguuuaauauuaaagcca

SEQ ID NO: 1615414 - RNA, 23 nt, Human
aaaaguuuaauauuaaagccaug

SEQ ID NO: 1615415 - RNA, 21 nt, Human
aaaauccacuuuaucuugaau

SEQ ID NO: 1615416 - RNA, 23 nt, Human
aacugagaugugaacacaucagc

SEQ ID NO: 1615417 - RNA, 18 nt, Human
aacucauauuuucaugcu

SEQ ID NO: 1615418 - RNA, 16 nt, Human
aacucauauuuucaug

SEQ ID NO: 1615419 - RNA, 15 nt, Human
aacucauauuuucau

SEQ ID NO: 1615420 - RNA, 22 nt, Human
aacucaucuagguaaauuacag

SEQ ID NO: 1615421 - RNA, 18 nt, Human
aacucaccccagccccaa

SEQ ID NO: 1615422 - RNA, 17 nt, Human
aacucaccccagcccca

SEQ ID NO: 1615423 - RNA, 16 nt, Human
aacucaccccagcccc

SEQ ID NO: 1615424 - RNA, 17 nt, Human
aacucaaacucuuaaaa

SEQ ID NO: 1615425 - RNA, 13 nt, Human
aacgucugugcca

SEQ ID NO: 1615426 - RNA, 15 nt, Human
aacguauaaaagccu

SEQ ID NO: 1615427 - RNA, 17 nt, Human
aacgcguugaaauugua

SEQ ID NO: 1615428 - RNA, 15 nt, Human
aacgcguugaaauug

SEQ ID NO: 1615429 - RNA, 14 nt, Human
aacgcguugaaauu

SEQ ID NO: 1615430 - RNA, 13 nt, Human
aacgcguugaaau

SEQ ID NO: 1615431 - RNA, 19 nt, Human
aaccaguguuguggauuua

SEQ ID NO: 1615432 - RNA, 15 nt, Human
aaccaguauuguaca

SEQ ID NO: 1615433 - RNA, 14 nt, Human
aaccaguauuguac

SEQ ID NO: 1615434 - RNA, 13 nt, Human
aaccaguauugua

SEQ ID NO: 1615435 - RNA, 11 nt, Human
aaccaguauug

SEQ ID NO: 1615436 - RNA, 13 nt, Human
aacccuucagugc

SEQ ID NO: 1615437 - RNA, 15 nt, Human
aacauggaaguacua

SEQ ID NO: 1615438 - RNA, 16 nt, Human
aacagcuaaugggaca

SEQ ID NO: 1615439 - RNA, 22 nt, Human
aacauccuacaagacacaguga

SEQ ID NO: 1615440 - RNA, 15 nt, Human
aacauccuacaagac

SEQ ID NO: 1615441 - RNA, 18 nt, Human
aaauugaugggauuuggu

SEQ ID NO: 1615442 - RNA, 22 nt, Human
aaauuggggauucuuaaaguug

SEQ ID NO: 1615443 - RNA, 20 nt, Human
aaauuggggauucuuaaagu

SEQ ID NO: 1615444 - RNA, 19 nt, Human
aaauuggggauucuuaaag

SEQ ID NO: 1615445 - RNA, 18 nt, Human
aaauuggggauucuuaaa

SEQ ID NO: 1615446 - RNA, 23 nt, Human
aaauuggggauucuuaaaguuga

SEQ ID NO: 1615447 - RNA, 13 nt, Human
aaauuaacuuuua

SEQ ID NO: 1615448 - RNA, 14 nt, Human
aaauuaacuuuuau

SEQ ID NO: 1615449 - RNA, 19 nt, Human
aaauuaacuuuuauaaacu

SEQ ID NO: 1615450 - RNA, 12 nt, Human
aaauuaacuuuu

SEQ ID NO: 1615451 - RNA, 22 nt, Human
aaauguuuuuuuuuaaagacuu

SEQ ID NO: 1615452 - RNA, 12 nt, Human
aacacaucagcu

SEQ ID NO: 1615453 - RNA, 19 nt, Human
aacaccucugcacaagcug

SEQ ID NO: 1615454 - RNA, 17 nt, Human
aacacuaacaugauuug

SEQ ID NO: 1615455 - RNA, 21 nt, Human
aacacauacaggaagguagaa

SEQ ID NO: 1615456 - RNA, 22 nt, Human
aacaaaccuguuucugcagcca

SEQ ID NO: 1615457 - RNA, 20 nt, Human
aaauguucaucaaugaauga

SEQ ID NO: 1615458 - RNA, 21 nt, Human
aaauguuuuuuuuuaaagacu

SEQ ID NO: 1615459 - RNA, 18 nt, Human
aaauguuuuuuuuuaaag

SEQ ID NO: 1615460 - RNA, 14 nt, Human
aaaucuuaacuuga

SEQ ID NO: 1615461 - RNA, 18 nt, Human
aaaucugcuuuuuaaaga

SEQ ID NO: 1615462 - RNA, 21 nt, Human
aaaucugugaacuugaaauuu

SEQ ID NO: 1615463 - RNA, 20 nt, Human
aaaucugugaacuugaaauu

SEQ ID NO: 1615464 - RNA, 22 nt, Human
aaaucuccaaaauaaaacuuuu

SEQ ID NO: 1615465 - RNA, 17 nt, Human
aaauggacguguuauga

SEQ ID NO: 1615466 - RNA, 15 nt, Human
aaauggacguguuau

SEQ ID NO: 1615467 - RNA, 17 nt, Human
aaauggaauacucuuau

SEQ ID NO: 1615468 - RNA, 14 nt, Human
aaauggacguguua

SEQ ID NO: 1615469 - RNA, 10 nt, Human
aauaaaccau

SEQ ID NO: 1615470 - RNA, 12 nt, Human
aauaaaauuuuu

SEQ ID NO: 1615471 - RNA, 18 nt, Human
aaguugauggugaugaaa

SEQ ID NO: 1615472 - RNA, 15 nt, Human
aauaaacgucuuaaa

SEQ ID NO: 1615473 - RNA, 19 nt, Human
aauaaagcuguguggcagu

SEQ ID NO: 1615474 - RNA, 11 nt, Human
aauaaagcugu

SEQ ID NO: 1615475 - RNA, 22 nt, Human
aaguugauaugccuuuucccaa

SEQ ID NO: 1615476 - RNA, 15 nt, Human
aaguggggacagagc

SEQ ID NO: 1615477 - RNA, 14 nt, Human
aagugcugcauuua

SEQ ID NO: 1615478 - RNA, 13 nt, Human
aagugcugcauuu

SEQ ID NO: 1615479 - RNA, 12 nt, Human
aauaauguuuca

SEQ ID NO: 1615480 - RNA, 19 nt, Human
aauaauguuucaaacauau

SEQ ID NO: 1615481 - RNA, 14 nt, Human
aauaauguuucaaa

SEQ ID NO: 1615482 - RNA, 16 nt, Human
aauauaggaacuuaaa

SEQ ID NO: 1615483 - RNA, 20 nt, Human
aauauuaaagccauguuuau

SEQ ID NO: 1615484 - RNA, 19 nt, Human
aauauuaaagccauguuua

SEQ ID NO: 1615485 - RNA, 18 nt, Human
aauauuaaagccauguuu

SEQ ID NO: 1615486 - RNA, 16 nt, Human
aauauuaaagccaugu

SEQ ID NO: 1615487 - RNA, 15 nt, Human
aauauuaaagccaug

SEQ ID NO: 1615488 - RNA, 14 nt, Human
aauauuaaagccau

SEQ ID NO: 1615489 - RNA, 13 nt, Human
aauauuaaagcca

SEQ ID NO: 1615490 - RNA, 20 nt, Human
aauacgugggcauucaaaug

SEQ ID NO: 1615491 - RNA, 19 nt, Human
aauacgugggcauucaaau

SEQ ID NO: 1615492 - RNA, 16 nt, Human
aaucaaauaugcaaag

SEQ ID NO: 1615493 - RNA, 15 nt, Human
aaucaaauaugcaaa

SEQ ID NO: 1615494 - RNA, 22 nt, Human
aaucaaauaugcaaagcacuga

SEQ ID NO: 1615495 - RNA, 22 nt, Human
aauauuaaagccauguuuauua

SEQ ID NO: 1615496 - RNA, 22 nt, Human
aaucauuucugcaucagcugcu

SEQ ID NO: 1615497 - RNA, 16 nt, Human
aaugauaacuggaaac

SEQ ID NO: 1615498 - RNA, 15 nt, Human
aaugauaacuggaaa

SEQ ID NO: 1615499 - RNA, 14 nt, Human
aaugauaacuggaa

SEQ ID NO: 1615500 - RNA, 13 nt, Human
aaugauuaauuaa

SEQ ID NO: 1615501 - RNA, 12 nt, Human
aaugauuaauua

SEQ ID NO: 1615502 - RNA, 16 nt, Human
aaugauuaauuaaaac

SEQ ID NO: 1615503 - RNA, 15 nt, Human
aaugauagcuacugu

SEQ ID NO: 1615504 - RNA, 23 nt, Human
aaugauguauguugaagccuuug

SEQ ID NO: 1615505 - RNA, 17 nt, Human
aauccauacauuugugu

SEQ ID NO: 1615506 - RNA, 17 nt, Human
aauccagacccggcugc

SEQ ID NO: 1615507 - RNA, 16 nt, Human
aauccauacauuugug

SEQ ID NO: 1615508 - RNA, 23 nt, Human
aaucucgcucugucgcccaggcu

SEQ ID NO: 1615509 - RNA, 18 nt, Human
aaucucggcucacugcau

SEQ ID NO: 1615510 - RNA, 20 nt, Human
aaucuggacuccucugucca

SEQ ID NO: 1615511 - RNA, 18 nt, Human
aaucuggacuccucuguc

SEQ ID NO: 1615512 - RNA, 17 nt, Human
aaucuggacuccucugu

SEQ ID NO: 1615513 - RNA, 16 nt, Human
aaucuggacuccucug

SEQ ID NO: 1615514 - RNA, 15 nt, Human
aaucuggacuccucu

SEQ ID NO: 1615515 - RNA, 21 nt, Human
aaugcgugcauaccacuuuug

SEQ ID NO: 1615516 - RNA, 23 nt, Human
aaugcgugcauaccacuuuuguu

SEQ ID NO: 1615517 - RNA, 21 nt, Human
aaugcgcaggcuggcccugcc

SEQ ID NO: 1615518 - RNA, 14 nt, Human
aaugcgcaggcugg

SEQ ID NO: 1615519 - RNA, 15 nt, Human
aaugcgcaggcuggc

SEQ ID NO: 1615520 - RNA, 20 nt, Human
aaugcgcaggcuggcccugc

SEQ ID NO: 1615521 - RNA, 19 nt, Human
aaugcgcaggcuggcccug

SEQ ID NO: 1615522 - RNA, 18 nt, Human
aaugcgcaggcuggcccu

SEQ ID NO: 1615523 - RNA, 17 nt, Human
aaugcgcaggcuggccc

SEQ ID NO: 1615524 - RNA, 14 nt, Human
aaugggagcucaug

SEQ ID NO: 1615525 - RNA, 13 nt, Human
aaugggacacuaa

SEQ ID NO: 1615526 - RNA, 23 nt, Human
aaugcucuuuacuucauggacuu

SEQ ID NO: 1615527 - RNA, 15 nt, Human
aaugggggugcauuu

SEQ ID NO: 1615528 - RNA, 17 nt, Human
aaugggggugcauuuga

SEQ ID NO: 1615529 - RNA, 22 nt, Human
aaugguccgugcuaaggacuug

SEQ ID NO: 1615530 - RNA, 20 nt, Human
aaugguccgugcuaaggacu

SEQ ID NO: 1615531 - RNA, 19 nt, Human
aagauuuugaaauuuuuau

SEQ ID NO: 1615532 - RNA, 15 nt, Human
aagcagggacuugaa

SEQ ID NO: 1615533 - RNA, 19 nt, Human
aagccaccaacauacuccc

SEQ ID NO: 1615534 - RNA, 14 nt, Human
aagauagcagggca

SEQ ID NO: 1615535 - RNA, 17 nt, Human
aagauucaaucccagga

SEQ ID NO: 1615536 - RNA, 20 nt, Human
aagauacugaaauaaacguc

SEQ ID NO: 1615537 - RNA, 16 nt, Human
aagauacugaaauaaa

SEQ ID NO: 1615538 - RNA, 14 nt, Human
aagauacugaaaua

SEQ ID NO: 1615539 - RNA, 20 nt, Human
aagauucauauuuacuucuu

SEQ ID NO: 1615540 - RNA, 21 nt, Human
aagauucaaugccccugaauu

SEQ ID NO: 1615541 - RNA, 20 nt, Human
aagauucaaugccccugaau

SEQ ID NO: 1615542 - RNA, 16 nt, Human
aagacuuuggaaagag

SEQ ID NO: 1615543 - RNA, 23 nt, Human
aagacagugaaagaaaauaacaa

SEQ ID NO: 1615544 - RNA, 15 nt, Human
aagagaacuuccaga

SEQ ID NO: 1615545 - RNA, 17 nt, Human
aagacuuuuccaacccu

SEQ ID NO: 1615546 - RNA, 15 nt, Human
aagacuuuuaugaua

SEQ ID NO: 1615547 - RNA, 19 nt, Human
aagccagauuuuccugaaa

SEQ ID NO: 1615548 - RNA, 21 nt, Human
aagccaccaacauacucccau

SEQ ID NO: 1615549 - RNA, 18 nt, Human
aagccagcaggcucucag

SEQ ID NO: 1615550 - RNA, 19 nt, Human
aagccagcaggcucucagg

SEQ ID NO: 1615551 - RNA, 15 nt, Human
aagccagcaggcucu

SEQ ID NO: 1615552 - RNA, 17 nt, Human
aagcgauucuucugcuu

SEQ ID NO: 1615553 - RNA, 16 nt, Human
aagcgauucuucugcu

SEQ ID NO: 1615554 - RNA, 14 nt, Human
aagcgauucuucug

SEQ ID NO: 1615555 - RNA, 15 nt, Human
aagcgauucuucugc

SEQ ID NO: 1615556 - RNA, 13 nt, Human
aaggacacuagaa

SEQ ID NO: 1615557 - RNA, 13 nt, Human
aaggacuaggguc

SEQ ID NO: 1615558 - RNA, 15 nt, Human
aaggacuaggguccu

SEQ ID NO: 1615559 - RNA, 12 nt, Human
aaggaauuuuau

SEQ ID NO: 1615560 - RNA, 22 nt, Human
aaggacccggaggggccuggca

SEQ ID NO: 1615561 - RNA, 22 nt, Human
aagcugccagccgagauagcca

SEQ ID NO: 1615562 - RNA, 14 nt, Human
aagcugcugacagu

SEQ ID NO: 1615563 - RNA, 12 nt, Human
aagcugccagcc

SEQ ID NO: 1615564 - RNA, 11 nt, Human
aagcugccagc

SEQ ID NO: 1615565 - RNA, 20 nt, Human
aagcgugagccacugcaccg

SEQ ID NO: 1615566 - RNA, 17 nt, Human
aagcgugagccacugca

SEQ ID NO: 1615567 - RNA, 21 nt, Human
aagcgugagccacugcaccgg

SEQ ID NO: 1615568 - RNA, 23 nt, Human
aaggaaugauuaauuaaaacaca

SEQ ID NO: 1615569 - RNA, 16 nt, Human
aagcugcugacagugu

SEQ ID NO: 1615570 - RNA, 17 nt, Human
aagggauggcaagaugu

SEQ ID NO: 1615571 - RNA, 14 nt, Human
aagggauggcaaga

SEQ ID NO: 1615572 - RNA, 20 nt, Human
aagggacuuggaagcuccgc

SEQ ID NO: 1615573 - RNA, 17 nt, Human
aagggacugagaaauuu

SEQ ID NO: 1615574 - RNA, 15 nt, Human
aagggacugagaaau

SEQ ID NO: 1615575 - RNA, 12 nt, Human
aaguagaggagg

SEQ ID NO: 1615576 - RNA, 20 nt, Human
acauaauucaggaagcagcu

SEQ ID NO: 1615577 - RNA, 16 nt, Human
acauaagauaaaugug

SEQ ID NO: 1615578 - RNA, 18 nt, Human
acaugccucucucaggcc

SEQ ID NO: 1615579 - RNA, 17 nt, Human
acaugccucucucaggc

SEQ ID NO: 1615580 - RNA, 16 nt, Human
acaugccucucucagg

SEQ ID NO: 1615581 - RNA, 15 nt, Human
acaugccucucucag

SEQ ID NO: 1615582 - RNA, 18 nt, Human
acaugcaaggucauuuuu

SEQ ID NO: 1615583 - RNA, 17 nt, Human
acaugcaaggucauuuu

SEQ ID NO: 1615584 - RNA, 16 nt, Human
acaugcaaggucauuu

SEQ ID NO: 1615585 - RNA, 15 nt, Human
acauccuacaagaca

SEQ ID NO: 1615586 - RNA, 21 nt, Human
acagugauuaccagggacuga

SEQ ID NO: 1615587 - RNA, 23 nt, Human
acagugagucgaggacagggagg

SEQ ID NO: 1615588 - RNA, 19 nt, Human
acaguggggaaugaagaua

SEQ ID NO: 1615589 - RNA, 15 nt, Human
acaguggggaaugaa

SEQ ID NO: 1615590 - RNA, 13 nt, Human
acagugcaucuca

SEQ ID NO: 1615591 - RNA, 14 nt, Human
acaggcaaugcugg

SEQ ID NO: 1615592 - RNA, 23 nt, Human
acaggugugagucaccaagccca

SEQ ID NO: 1615593 - RNA, 22 nt, Human
acaggugugagucaccaagccc

SEQ ID NO: 1615594 - RNA, 19 nt, Human
acaggugugaaccaccaca

SEQ ID NO: 1615595 - RNA, 22 nt, Human
acagugagucgaggacagggag

SEQ ID NO: 1615596 - RNA, 14 nt, Human
acagcucuguccug

SEQ ID NO: 1615597 - RNA, 23 nt, Human
acagcuccuucuguccuacucug

SEQ ID NO: 1615598 - RNA, 18 nt, Human
acagcuccuucuguccua

SEQ ID NO: 1615599 - RNA, 16 nt, Human
acagcuccuucugucc

SEQ ID NO: 1615600 - RNA, 21 nt, Human
acagaggggguggccucccaa

SEQ ID NO: 1615601 - RNA, 19 nt, Human
acagaggggguggccuccc

SEQ ID NO: 1615602 - RNA, 18 nt, Human
acagaggggguggccucc

SEQ ID NO: 1615603 - RNA, 17 nt, Human
acagaggggguggccuc

SEQ ID NO: 1615604 - RNA, 17 nt, Human
acagcucuguccuggga

SEQ ID NO: 1615605 - RNA, 16 nt, Human
acagcucuguccuggg

SEQ ID NO: 1615606 - RNA, 23 nt, Human
acaggcaagcaccuccugccucg

SEQ ID NO: 1615607 - RNA, 20 nt, Human
acaggcaagcaccuccugcc

SEQ ID NO: 1615608 - RNA, 13 nt, Human
acagcugccuggg

SEQ ID NO: 1615609 - RNA, 16 nt, Human
acagcugccugcagua

SEQ ID NO: 1615610 - RNA, 12 nt, Human
acagcugccugc

SEQ ID NO: 1615611 - RNA, 20 nt, Human
accaaggcugauuaaaccaa

SEQ ID NO: 1615612 - RNA, 12 nt, Human
accaccugccca

SEQ ID NO: 1615613 - RNA, 19 nt, Human
accaaggcugauuaaacca

SEQ ID NO: 1615614 - RNA, 20 nt, Human
accagccccagugcccacag

SEQ ID NO: 1615615 - RNA, 19 nt, Human
accagccccagugcccaca

SEQ ID NO: 1615616 - RNA, 18 nt, Human
accagccccagugcccac

SEQ ID NO: 1615617 - RNA, 17 nt, Human
accagccccagugccca

SEQ ID NO: 1615618 - RNA, 16 nt, Human
accagccccagugccc

SEQ ID NO: 1615619 - RNA, 13 nt, Human
accagcagccugg

SEQ ID NO: 1615620 - RNA, 13 nt, Human
accagcagagcac

SEQ ID NO: 1615621 - RNA, 12 nt, Human
accagcagagca

SEQ ID NO: 1615622 - RNA, 14 nt, Human
accagcagaaaugc

SEQ ID NO: 1615623 - RNA, 20 nt, Human
acaugccucucucaggccaa

SEQ ID NO: 1615624 - RNA, 19 nt, Human
acaugccucucucaggcca

SEQ ID NO: 1615625 - RNA, 23 nt, Human
acaugucuuuucuugcaugaggc

SEQ ID NO: 1615626 - RNA, 14 nt, Human
acauuuauucugcu

SEQ ID NO: 1615627 - RNA, 17 nt, Human
acauuuccuaaauauau

SEQ ID NO: 1615628 - RNA, 16 nt, Human
acauuuccuaaauaua

SEQ ID NO: 1615629 - RNA, 23 nt, Human
accaucauugaaaucuuuuugcu

SEQ ID NO: 1615630 - RNA, 16 nt, Human
accaucccugaaggcc

SEQ ID NO: 1615631 - RNA, 15 nt, Human
accaucaagccacca

SEQ ID NO: 1615632 - RNA, 15 nt, Human
accaucauugaaauc

SEQ ID NO: 1615633 - RNA, 14 nt, Human
accaucaagccacc

SEQ ID NO: 1615634 - RNA, 17 nt, Human
accauaggucaccuuua

SEQ ID NO: 1615635 - RNA, 21 nt, Human
accauacuaauuauacccccu

SEQ ID NO: 1615636 - RNA, 16 nt, Human
accauacuaauuauac

SEQ ID NO: 1615637 - RNA, 13 nt, Human
accauacuaauua

SEQ ID NO: 1615638 - RNA, 15 nt, Human
acccacccuccuuuc

SEQ ID NO: 1615639 - RNA, 13 nt, Human
acccaugcugccc

SEQ ID NO: 1615640 - RNA, 15 nt, Human
acccacccccaccca

SEQ ID NO: 1615641 - RNA, 17 nt, Human
acccacccccacccaag

SEQ ID NO: 1615642 - RNA, 16 nt, Human
acagaagcuccaggua

SEQ ID NO: 1615643 - RNA, 14 nt, Human
acagacaaagcgug

SEQ ID NO: 1615644 - RNA, 23 nt, Human
acagaggccaugggccuccugug

SEQ ID NO: 1615645 - RNA, 21 nt, Human
acagaggccaugggccuccug

SEQ ID NO: 1615646 - RNA, 17 nt, Human
acagaggccaugggccu

SEQ ID NO: 1615647 - RNA, 14 nt, Human
acagaggcagcccc

SEQ ID NO: 1615648 - RNA, 13 nt, Human
acagaggcagccc

SEQ ID NO: 1615649 - RNA, 22 nt, Human
acacugugcugagucugaaggc

SEQ ID NO: 1615650 - RNA, 20 nt, Human
acacugggagaaaugaaaaa

SEQ ID NO: 1615651 - RNA, 16 nt, Human
acaaggauugcuacug

SEQ ID NO: 1615652 - RNA, 20 nt, Human
acaaggaugaucuaggaaga

SEQ ID NO: 1615653 - RNA, 14 nt, Human
acaauuuauuaugg

SEQ ID NO: 1615654 - RNA, 20 nt, Human
acaauuuuguuucuguacuu

SEQ ID NO: 1615655 - RNA, 13 nt, Human
acaauuuauuaug

SEQ ID NO: 1615656 - RNA, 21 nt, Human
acacgaauauugcugauggug

SEQ ID NO: 1615657 - RNA, 15 nt, Human
acacgaauauugcug

SEQ ID NO: 1615658 - RNA, 21 nt, Human
acaccacuacauucuguuaau

SEQ ID NO: 1615659 - RNA, 16 nt, Human
acacauuuuuuaaaug

SEQ ID NO: 1615660 - RNA, 18 nt, Human
acacauuuuuuaaaugca

SEQ ID NO: 1615661 - RNA, 19 nt, Human
acacauuuuuuaaaugcac

SEQ ID NO: 1615662 - RNA, 15 nt, Human
acaccacuacauucu

SEQ ID NO: 1615663 - RNA, 14 nt, Human
acacgaauauugcu

SEQ ID NO: 1615664 - RNA, 17 nt, Human
acaccacuacauucugu

SEQ ID NO: 1615665 - RNA, 20 nt, Human
acaccacuacauucuguuaa

SEQ ID NO: 1615666 - RNA, 21 nt, Human
acacagcucuucuccaggcug

SEQ ID NO: 1615667 - RNA, 20 nt, Human
acacagcucuucuccaggcu

SEQ ID NO: 1615668 - RNA, 22 nt, Human
acacagcucuucuccaggcugu

SEQ ID NO: 1615669 - RNA, 14 nt, Human
acacauuuuuuaaa

SEQ ID NO: 1615670 - RNA, 19 nt, Human
acacaaaaguuucucuuuu

SEQ ID NO: 1615671 - RNA, 18 nt, Human
aauuuugugaagcaaaau

SEQ ID NO: 1615672 - RNA, 16 nt, Human
aauuuugugcccccau

SEQ ID NO: 1615673 - RNA, 17 nt, Human
aauuuugugaagcaaaa

SEQ ID NO: 1615674 - RNA, 14 nt, Human
aauuuugauguuuu

SEQ ID NO: 1615675 - RNA, 11 nt, Human
aauuuuggaau

SEQ ID NO: 1615676 - RNA, 12 nt, Human
aauuuuggaauu

SEQ ID NO: 1615677 - RNA, 18 nt, Human
aauuuucaucuaggauuu

SEQ ID NO: 1615678 - RNA, 16 nt, Human
acaagaaaugaaagca

SEQ ID NO: 1615679 - RNA, 15 nt, Human
acaagaaaugaaagc

SEQ ID NO: 1615680 - RNA, 22 nt, Human
acaagaaaugaaagcagggacu

SEQ ID NO: 1615681 - RNA, 21 nt, Human
acaaggaugaauuaaguuuuu

SEQ ID NO: 1615682 - RNA, 18 nt, Human
acaaccuucuguggcuca

SEQ ID NO: 1615683 - RNA, 22 nt, Human
acaaaaugaaacgcaaccacca

SEQ ID NO: 1615684 - RNA, 13 nt, Human
acaaaaugaaacg

SEQ ID NO: 1615685 - RNA, 14 nt, Human
acaaaauggaauac

SEQ ID NO: 1615686 - RNA, 13 nt, Human
acaaaauggaaua

SEQ ID NO: 1615687 - RNA, 16 nt, Human
acaaagaaauuaugug

SEQ ID NO: 1615688 - RNA, 14 nt, Human
acaaagaaauuaug

SEQ ID NO: 1615689 - RNA, 12 nt, Human
acaaagaaauua

SEQ ID NO: 1615690 - RNA, 22 nt, Human
aauuucauaccuaucaucuuaa

SEQ ID NO: 1615691 - RNA, 21 nt, Human
aauuuccugggagcuuuugua

SEQ ID NO: 1615692 - RNA, 18 nt, Human
aauuuccugggagcuuuu

SEQ ID NO: 1615693 - RNA, 20 nt, Human
aauuuauuuaugggauccug

SEQ ID NO: 1615694 - RNA, 23 nt, Human
aauuuauuggcuuuucugaucca

SEQ ID NO: 1615695 - RNA, 21 nt, Human
aauuuauuggcuuuucugauc

SEQ ID NO: 1615696 - RNA, 20 nt, Human
aauuuauuggcuuuucugau

SEQ ID NO: 1615697 - RNA, 19 nt, Human
aauuuauuggcuuuucuga

SEQ ID NO: 1615698 - RNA, 17 nt, Human
aauuuauuggcuuuucu

SEQ ID NO: 1615699 - RNA, 19 nt, Human
aaugucacaggcaggucca

SEQ ID NO: 1615700 - RNA, 16 nt, Human
aaugucacaggcaggu

SEQ ID NO: 1615701 - RNA, 16 nt, Human
aauuggggauucuuaa

SEQ ID NO: 1615702 - RNA, 21 nt, Human
aaugguccgugcuaaggacuu

SEQ ID NO: 1615703 - RNA, 20 nt, Human
aauuggggauucuuaaaguu

SEQ ID NO: 1615704 - RNA, 17 nt, Human
aauuggggauucuuaaa

SEQ ID NO: 1615705 - RNA, 16 nt, Human
aauuguaaggaaugau

SEQ ID NO: 1615706 - RNA, 12 nt, Human
aauuguaaggaa

SEQ ID NO: 1615707 - RNA, 17 nt, Human
acucugucucaguccau

SEQ ID NO: 1615708 - RNA, 15 nt, Human
acucugucucagucc

SEQ ID NO: 1615709 - RNA, 21 nt, Human
acucugugucagguggggcag

SEQ ID NO: 1615710 - RNA, 19 nt, Human
acucugucucaaaaaaaca

SEQ ID NO: 1615711 - RNA, 20 nt, Human
acucuacuuagcaugucccu

SEQ ID NO: 1615712 - RNA, 21 nt, Human
acucuacuuagcaugucccua

SEQ ID NO: 1615713 - RNA, 20 nt, Human
acucuuaagaagacugcauu

SEQ ID NO: 1615714 - RNA, 15 nt, Human
acucuuaagaagacu

SEQ ID NO: 1615715 - RNA, 14 nt, Human
acucuuaagaagac

SEQ ID NO: 1615716 - RNA, 22 nt, Human
acugaugggcaacccccagccu

SEQ ID NO: 1615717 - RNA, 12 nt, Human
acugaugggcaa

SEQ ID NO: 1615718 - RNA, 22 nt, Human
acugauggcuaauguacugcau

SEQ ID NO: 1615719 - RNA, 13 nt, Human
acugaucucucgu

SEQ ID NO: 1615720 - RNA, 23 nt, Human
acugaccagccuccaugcugccu

SEQ ID NO: 1615721 - RNA, 23 nt, Human
acugacauuguuggccaaagcca

SEQ ID NO: 1615722 - RNA, 13 nt, Human
acugaccagccuc

SEQ ID NO: 1615723 - RNA, 20 nt, Human
acugaccagccuccaugcug

SEQ ID NO: 1615724 - RNA, 15 nt, Human
acugaccagccucca

SEQ ID NO: 1615725 - RNA, 22 nt, Human
acugauuuuuuuuuccuucagu

SEQ ID NO: 1615726 - RNA, 21 nt, Human
acugauuuuuuuuuccuucag

SEQ ID NO: 1615727 - RNA, 23 nt, Human
acugauuuuuuuuuccuucagug

SEQ ID NO: 1615728 - RNA, 23 nt, Human
acugaugggcaacccccagccug

SEQ ID NO: 1615729 - RNA, 13 nt, Human
acugauucuucag

SEQ ID NO: 1615730 - RNA, 12 nt, Human
acugauucuuca

SEQ ID NO: 1615731 - RNA, 22 nt, Human
acugauucuucagcaaaaauau

SEQ ID NO: 1615732 - RNA, 15 nt, Human
acugauucuucagca

SEQ ID NO: 1615733 - RNA, 15 nt, Human
acugcuuuuggucug

SEQ ID NO: 1615734 - RNA, 22 nt, Human
acugcccggcaggguccuagaa

SEQ ID NO: 1615735 - RNA, 20 nt, Human
acugcuuuuggucuguguga

SEQ ID NO: 1615736 - RNA, 16 nt, Human
acugcuuuuggucugu

SEQ ID NO: 1615737 - RNA, 15 nt, Human
acugcccggcagggu

SEQ ID NO: 1615738 - RNA, 18 nt, Human
acugccagucccccugcc

SEQ ID NO: 1615739 - RNA, 19 nt, Human
acugccagucccccugccc

SEQ ID NO: 1615740 - RNA, 22 nt, Human
acuugggaggcugagaugggag

SEQ ID NO: 1615741 - RNA, 17 nt, Human
acuuuaugcuaagugaa

SEQ ID NO: 1615742 - RNA, 12 nt, Human
acuuuaugcuaa

SEQ ID NO: 1615743 - RNA, 15 nt, Human
acuuuauuuuguguu

SEQ ID NO: 1615744 - RNA, 22 nt, Human
acuuucaggccacauggcuaaa

SEQ ID NO: 1615745 - RNA, 14 nt, Human
acuuaaaaaugguu

SEQ ID NO: 1615746 - RNA, 13 nt, Human
acuuaaaaauggu

SEQ ID NO: 1615747 - RNA, 21 nt, Human
acuuaaaaaugguuuaaaugg

SEQ ID NO: 1615748 - RNA, 14 nt, Human
acuuaaauaaugug

SEQ ID NO: 1615749 - RNA, 15 nt, Human
acuuaaauaauguga

SEQ ID NO: 1615750 - RNA, 22 nt, Human
acuuaaaauauuccugcauuug

SEQ ID NO: 1615751 - RNA, 19 nt, Human
acuucagcgguuuauauaa

SEQ ID NO: 1615752 - RNA, 20 nt, Human
acuucugccauauucuguug

SEQ ID NO: 1615753 - RNA, 13 nt, Human
acuucagcucugu

SEQ ID NO: 1615754 - RNA, 18 nt, Human
acuucagcgguuuauaua

SEQ ID NO: 1615755 - RNA, 20 nt, Human
acuucaaauccuugaagauu

SEQ ID NO: 1615756 - RNA, 18 nt, Human
acuucuuauacauuugau

SEQ ID NO: 1615757 - RNA, 17 nt, Human
acuucuuauacauuuga

SEQ ID NO: 1615758 - RNA, 20 nt, Human
accucugccucagaaaacaa

SEQ ID NO: 1615759 - RNA, 11 nt, Human
accugccaggg

SEQ ID NO: 1615760 - RNA, 13 nt, Human
accugccagggac

SEQ ID NO: 1615761 - RNA, 12 nt, Human
accugccaggga

SEQ ID NO: 1615762 - RNA, 18 nt, Human
accugccagggacagagg

SEQ ID NO: 1615763 - RNA, 16 nt, Human
accugccagggacaga

SEQ ID NO: 1615764 - RNA, 15 nt, Human
accugccagggacag

SEQ ID NO: 1615765 - RNA, 22 nt, Human
accugucuugccuuuuucauua

SEQ ID NO: 1615766 - RNA, 21 nt, Human
accugucuugccuuuuucauu

SEQ ID NO: 1615767 - RNA, 19 nt, Human
accugucuugccuuuuuca

SEQ ID NO: 1615768 - RNA, 23 nt, Human
accugccccuccucucugcccua

SEQ ID NO: 1615769 - RNA, 13 nt, Human
accugcccaaccu

SEQ ID NO: 1615770 - RNA, 18 nt, Human
accucugccucagaaaac

SEQ ID NO: 1615771 - RNA, 17 nt, Human
accucugccucagaaaa

SEQ ID NO: 1615772 - RNA, 17 nt, Human
accucuugagccuugaa

SEQ ID NO: 1615773 - RNA, 19 nt, Human
accucuugagccuugaacu

SEQ ID NO: 1615774 - RNA, 20 nt, Human
accucuugagccuugaacuu

SEQ ID NO: 1615775 - RNA, 21 nt, Human
accucuugagccuugaacuuu

SEQ ID NO: 1615776 - RNA, 13 nt, Human
accucaggccugg

SEQ ID NO: 1615777 - RNA, 12 nt, Human
accucaggccug

SEQ ID NO: 1615778 - RNA, 17 nt, Human
accgugaggccagagac

SEQ ID NO: 1615779 - RNA, 16 nt, Human
accgugaggccagaga

SEQ ID NO: 1615780 - RNA, 22 nt, Human
accucaggccugggggcugggc

SEQ ID NO: 1615781 - RNA, 14 nt, Human
accucaggccuggg

SEQ ID NO: 1615782 - RNA, 22 nt, Human
accucagguaaucgaccugccu

SEQ ID NO: 1615783 - RNA, 18 nt, Human
accucaggugagaagcag

SEQ ID NO: 1615784 - RNA, 23 nt, Human
accucagguaaucgaccugccuc

SEQ ID NO: 1615785 - RNA, 16 nt, Human
accccacacacgccag

SEQ ID NO: 1615786 - RNA, 22 nt, Human
acccugugauggggcccugccu

SEQ ID NO: 1615787 - RNA, 15 nt, Human
acccaugcugcccug

SEQ ID NO: 1615788 - RNA, 14 nt, Human
acccaugcugcccu

SEQ ID NO: 1615789 - RNA, 16 nt, Human
acccaugcugcccugu

SEQ ID NO: 1615790 - RNA, 17 nt, Human
acccuguuaccauuuug

SEQ ID NO: 1615791 - RNA, 14 nt, Human
accgugaggccaga

SEQ ID NO: 1615792 - RNA, 19 nt, Human
accgggccacagagaaagu

SEQ ID NO: 1615793 - RNA, 15 nt, Human
accgggccacagaga

SEQ ID NO: 1615794 - RNA, 20 nt, Human
accgggccacagagaaagua

SEQ ID NO: 1615795 - RNA, 19 nt, Human
accggcuggccuggccccu

SEQ ID NO: 1615796 - RNA, 20 nt, Human
accgggcacucagaagacac

SEQ ID NO: 1615797 - RNA, 18 nt, Human
accggcuggccuggcccc

SEQ ID NO: 1615798 - RNA, 17 nt, Human
accggcuggccuggccc

SEQ ID NO: 1615799 - RNA, 15 nt, Human
accggcuggccuggc

SEQ ID NO: 1615800 - RNA, 14 nt, Human
accggcuggccugg

SEQ ID NO: 1615801 - RNA, 19 nt, Human
acggacgaaccuugaaaac

SEQ ID NO: 1615802 - RNA, 15 nt, Human
acggaauaguuggcu

SEQ ID NO: 1615803 - RNA, 16 nt, Human
acggaagagccuugcg

SEQ ID NO: 1615804 - RNA, 15 nt, Human
acggaagagccuugc

SEQ ID NO: 1615805 - RNA, 19 nt, Human
acgcuggagugcagugagc

SEQ ID NO: 1615806 - RNA, 11 nt, Human
acguggcugcu

SEQ ID NO: 1615807 - RNA, 15 nt, Human
acuaauagacaauuu

SEQ ID NO: 1615808 - RNA, 12 nt, Human
acgucugugcca

SEQ ID NO: 1615809 - RNA, 23 nt, Human
acgucugacaggcaaugcuggcu

SEQ ID NO: 1615810 - RNA, 11 nt, Human
accugugucuc

SEQ ID NO: 1615811 - RNA, 18 nt, Human
acuaguauuucuaugaaa

SEQ ID NO: 1615812 - RNA, 19 nt, Human
acuaguauuucuaugaaau

SEQ ID NO: 1615813 - RNA, 16 nt, Human
acuauuguuagucucu

SEQ ID NO: 1615814 - RNA, 17 nt, Human
acuagggaagauaauau

SEQ ID NO: 1615815 - RNA, 19 nt, Human
cugagacucgcgacaaugc

SEQ ID NO: 1615816 - RNA, 17 nt, Human
cugagacucgcgacaau

SEQ ID NO: 1615817 - RNA, 20 nt, Human
cugagacucgcgacaaugca

SEQ ID NO: 1615818 - RNA, 13 nt, Human
cugcauguuacau

SEQ ID NO: 1615819 - RNA, 15 nt, Human
cugcauguuugugau

SEQ ID NO: 1615820 - RNA, 20 nt, Human
cugcauuuaaaagauacagu

SEQ ID NO: 1615821 - RNA, 22 nt, Human
cugcauuuaaaagauacaguua

SEQ ID NO: 1615822 - RNA, 13 nt, Human
cugcauuugugaa

SEQ ID NO: 1615823 - RNA, 20 nt, Human
cugcauucaggaucaaaccc

SEQ ID NO: 1615824 - RNA, 17 nt, Human
cugccaaugggagcuca

SEQ ID NO: 1615825 - RNA, 15 nt, Human
cugccaaugggagcu

SEQ ID NO: 1615826 - RNA, 22 nt, Human
cugcauuugugaaaugauggug

SEQ ID NO: 1615827 - RNA, 17 nt, Human
cugcauuugugaaauga

SEQ ID NO: 1615828 - RNA, 15 nt, Human
cugcauuugugaaau

SEQ ID NO: 1615829 - RNA, 14 nt, Human
cugcauuugugaaa

SEQ ID NO: 1615830 - RNA, 23 nt, Human
cugccauauucuguuggccagug

SEQ ID NO: 1615831 - RNA, 22 nt, Human
cugccauauucuguuggccagu

SEQ ID NO: 1615832 - RNA, 21 nt, Human
cugccauauucuguuggccag

SEQ ID NO: 1615833 - RNA, 20 nt, Human
cugccauauucuguuggcca

SEQ ID NO: 1615834 - RNA, 15 nt, Human
cugccagggacagag

SEQ ID NO: 1615835 - RNA, 12 nt, Human
cugccagggaca

SEQ ID NO: 1615836 - RNA, 11 nt, Human
cugccagggac

SEQ ID NO: 1615837 - RNA, 12 nt, Human
cugccauccagg

SEQ ID NO: 1615838 - RNA, 19 nt, Human
cugccccagggcucccggc

SEQ ID NO: 1615839 - RNA, 15 nt, Human
cugcccccucugccc

SEQ ID NO: 1615840 - RNA, 14 nt, Human
cugcccccucugcc

SEQ ID NO: 1615841 - RNA, 18 nt, Human
cugcccugugggccccca

SEQ ID NO: 1615842 - RNA, 16 nt, Human
cugcccugugggcccc

SEQ ID NO: 1615843 - RNA, 15 nt, Human
cugcccugugggccc

SEQ ID NO: 1615844 - RNA, 13 nt, Human
cugcccugugagu

SEQ ID NO: 1615845 - RNA, 12 nt, Human
cugcccugugag

SEQ ID NO: 1615846 - RNA, 23 nt, Human
cugcccugguuuccugcccuggg

SEQ ID NO: 1615847 - RNA, 22 nt, Human
cugcccugguuuccugcccugg

SEQ ID NO: 1615848 - RNA, 21 nt, Human
cugcccuggugcugccacacu

SEQ ID NO: 1615849 - RNA, 20 nt, Human
cugcccuggugcugccacac

SEQ ID NO: 1615850 - RNA, 22 nt, Human
cugccccucaacucuccuccag

SEQ ID NO: 1615851 - RNA, 14 nt, Human
cugccccucaacuc

SEQ ID NO: 1615852 - RNA, 19 nt, Human
cugcccccucugcccugcg

SEQ ID NO: 1615853 - RNA, 18 nt, Human
cugcccccucugcccugc

SEQ ID NO: 1615854 - RNA, 17 nt, Human
cugcccccucugcccug

SEQ ID NO: 1615855 - RNA, 16 nt, Human
cugcccccucugcccu

SEQ ID NO: 1615856 - RNA, 19 nt, Human
cugcccuggugcugccaca

SEQ ID NO: 1615857 - RNA, 18 nt, Human
cugcccuggugcugccac

SEQ ID NO: 1615858 - RNA, 17 nt, Human
cugcccuggugcugcca

SEQ ID NO: 1615859 - RNA, 19 nt, Human
cugcccugugggcccccaa

SEQ ID NO: 1615860 - RNA, 19 nt, Human
cugccucgaacuggcugca

SEQ ID NO: 1615861 - RNA, 18 nt, Human
cugccucgaacuggcugc

SEQ ID NO: 1615862 - RNA, 17 nt, Human
cugccucgaacuggcug

SEQ ID NO: 1615863 - RNA, 15 nt, Human
cugccucgaacuggc

SEQ ID NO: 1615864 - RNA, 23 nt, Human
cugccugggaucccucauccuca

SEQ ID NO: 1615865 - RNA, 15 nt, Human
cugccuguucagcuc

SEQ ID NO: 1615866 - RNA, 14 nt, Human
cugccuguucagcu

SEQ ID NO: 1615867 - RNA, 19 nt, Human
cugccuguugggccaggag

SEQ ID NO: 1615868 - RNA, 18 nt, Human
cugccuguugggccagga

SEQ ID NO: 1615869 - RNA, 16 nt, Human
cugccuguugggccag

SEQ ID NO: 1615870 - RNA, 16 nt, Human
cugcuaauuccccaga

SEQ ID NO: 1615871 - RNA, 15 nt, Human
cugcuacagagcaga

SEQ ID NO: 1615872 - RNA, 11 nt, Human
cugcugacagu

SEQ ID NO: 1615873 - RNA, 23 nt, Human
cugcugacagacacaggcccggc

SEQ ID NO: 1615874 - RNA, 21 nt, Human
cugcugacagacacaggcccg

SEQ ID NO: 1615875 - RNA, 20 nt, Human
cugcugacagacacaggccc

SEQ ID NO: 1615876 - RNA, 19 nt, Human
cugcugacagacacaggcc

SEQ ID NO: 1615877 - RNA, 18 nt, Human
cugcugacagacacaggc

SEQ ID NO: 1615878 - RNA, 15 nt, Human
cugcugacagacaca

SEQ ID NO: 1615879 - RNA, 21 nt, Human
cuggaaaucaggguuaguauu

SEQ ID NO: 1615880 - RNA, 16 nt, Human
cuggaaauauuaagaa

SEQ ID NO: 1615881 - RNA, 23 nt, Human
cugcuucagccucccgaguagcu

SEQ ID NO: 1615882 - RNA, 18 nt, Human
cugcuuuuuauggccugu

SEQ ID NO: 1615883 - RNA, 17 nt, Human
cuggaacacuaaugagg

SEQ ID NO: 1615884 - RNA, 13 nt, Human
cuggacugugugc

SEQ ID NO: 1615885 - RNA, 13 nt, Human
cugcuuaacuuca

SEQ ID NO: 1615886 - RNA, 13 nt, Human
cugcuucagccuc

SEQ ID NO: 1615887 - RNA, 20 nt, Human
cugcuuaacuucacauauug

SEQ ID NO: 1615888 - RNA, 15 nt, Human
cugcuuaacuucaca

SEQ ID NO: 1615889 - RNA, 17 nt, Human
cugcuuaacuucacaua

SEQ ID NO: 1615890 - RNA, 16 nt, Human
cugcuucagccucccg

SEQ ID NO: 1615891 - RNA, 14 nt, Human
cugcuucagccucc

SEQ ID NO: 1615892 - RNA, 22 nt, Human
cugcuuuuuaaagaaugcucuu

SEQ ID NO: 1615893 - RNA, 17 nt, Human
cugcuuuuuauggccug

SEQ ID NO: 1615894 - RNA, 10 nt, Human
cugggacagg

SEQ ID NO: 1615895 - RNA, 18 nt, Human
cuggcucccacaggcccu

SEQ ID NO: 1615896 - RNA, 13 nt, Human
cugggacacaguu

SEQ ID NO: 1615897 - RNA, 12 nt, Human
cugggacacagu

SEQ ID NO: 1615898 - RNA, 20 nt, Human
cuggcuccagcuggccggga

SEQ ID NO: 1615899 - RNA, 18 nt, Human
cuggcuccagcuggccgg

SEQ ID NO: 1615900 - RNA, 14 nt, Human
cuggcuccagcugg

SEQ ID NO: 1615901 - RNA, 13 nt, Human
cuggcuccagcug

SEQ ID NO: 1615902 - RNA, 15 nt, Human
cuggcucccacaggc

SEQ ID NO: 1615903 - RNA, 21 nt, Human
cuggccccucagggucccugg

SEQ ID NO: 1615904 - RNA, 20 nt, Human
cuggccccucagggucccug

SEQ ID NO: 1615905 - RNA, 18 nt, Human
cuggccccucaggguccc

SEQ ID NO: 1615906 - RNA, 17 nt, Human
cuggccccucagggucc

SEQ ID NO: 1615907 - RNA, 15 nt, Human
cuggcagcucagaga

SEQ ID NO: 1615908 - RNA, 13 nt, Human
cuggccccucagg

SEQ ID NO: 1615909 - RNA, 14 nt, Human
cuggcagcucagag

SEQ ID NO: 1615910 - RNA, 13 nt, Human
cuggcagcucaga

SEQ ID NO: 1615911 - RNA, 12 nt, Human
cuggcagcucag

SEQ ID NO: 1615912 - RNA, 16 nt, Human
cuggacugugugcuca

SEQ ID NO: 1615913 - RNA, 17 nt, Human
cugggcagaaggaagac

SEQ ID NO: 1615914 - RNA, 22 nt, Human
cugggcagcugccuccccuccu

SEQ ID NO: 1615915 - RNA, 20 nt, Human
cugggcagcugccuccccuc

SEQ ID NO: 1615916 - RNA, 21 nt, Human
cugggcagcugccuccccucc

SEQ ID NO: 1615917 - RNA, 17 nt, Human
cuggggaaccugacccc

SEQ ID NO: 1615918 - RNA, 16 nt, Human
cuggggaaccugaccc

SEQ ID NO: 1615919 - RNA, 15 nt, Human
cuggggaaccugacc

SEQ ID NO: 1615920 - RNA, 19 nt, Human
cugggcagcugccuccccu

SEQ ID NO: 1615921 - RNA, 18 nt, Human
cugggcagaaggaagacu

SEQ ID NO: 1615922 - RNA, 16 nt, Human
cuggggccgaaagaac

SEQ ID NO: 1615923 - RNA, 18 nt, Human
cuggggccaggcuggguc

SEQ ID NO: 1615924 - RNA, 23 nt, Human
cuggugacuuuccucuuuggucu

SEQ ID NO: 1615925 - RNA, 17 nt, Human
cuggguguggcgcagca

SEQ ID NO: 1615926 - RNA, 16 nt, Human
cuggguguggcgcagc

SEQ ID NO: 1615927 - RNA, 23 nt, Human
cuggguggcaccagcagccugga

SEQ ID NO: 1615928 - RNA, 14 nt, Human
cuggguucacugca

SEQ ID NO: 1615929 - RNA, 15 nt, Human
cuggguucacugcaa

SEQ ID NO: 1615930 - RNA, 22 nt, Human
cuggguuccagcaauucuccug

SEQ ID NO: 1615931 - RNA, 22 nt, Human
cuggguuccuuccucugagccu

SEQ ID NO: 1615932 - RNA, 18 nt, Human
cuggguuccuuccucuga

SEQ ID NO: 1615933 - RNA, 21 nt, Human
cuggugacuuuccucuuuggu

SEQ ID NO: 1615934 - RNA, 20 nt, Human
cuggugacuuuccucuuugg

SEQ ID NO: 1615935 - RNA, 15 nt, Human
cuggugacuuuccuc

SEQ ID NO: 1615936 - RNA, 14 nt, Human
cuggguucuaccca

SEQ ID NO: 1615937 - RNA, 23 nt, Human
cuggguuccuuccucugagccuu

SEQ ID NO: 1615938 - RNA, 21 nt, Human
cugguuuccugcccugggagg

SEQ ID NO: 1615939 - RNA, 18 nt, Human
cugguuuccugcccuggg

SEQ ID NO: 1615940 - RNA, 22 nt, Human
cugguuuccugcccugggaggc

SEQ ID NO: 1615941 - RNA, 21 nt, Human
cugucagcuccccucggagaa

SEQ ID NO: 1615942 - RNA, 18 nt, Human
cugucagccauuccuguu

SEQ ID NO: 1615943 - RNA, 23 nt, Human
cugucagcuccccucggagaaga

SEQ ID NO: 1615944 - RNA, 18 nt, Human
cugucauuugagcagggc

SEQ ID NO: 1615945 - RNA, 17 nt, Human
cugucauuugagcaggg

SEQ ID NO: 1615946 - RNA, 20 nt, Human
cugucauuugagcagggcuc

SEQ ID NO: 1615947 - RNA, 12 nt, Human
cuguccugccua

SEQ ID NO: 1615948 - RNA, 21 nt, Human
cuguaggaagguuaauguuca

SEQ ID NO: 1615949 - RNA, 15 nt, Human
cuguacuuuuuggca

SEQ ID NO: 1615950 - RNA, 14 nt, Human
cuguacuuuuuggc

SEQ ID NO: 1615951 - RNA, 23 nt, Human
cuguacuugcucuugaugccugg

SEQ ID NO: 1615952 - RNA, 22 nt, Human
cuguacuugcucuugaugccug

SEQ ID NO: 1615953 - RNA, 15 nt, Human
cugucgcccagucug

SEQ ID NO: 1615954 - RNA, 13 nt, Human
cugucgcccaguc

SEQ ID NO: 1615955 - RNA, 16 nt, Human
cugucgcccaggcugg

SEQ ID NO: 1615956 - RNA, 19 nt, Human
cugucgagaaacagccugu

SEQ ID NO: 1615957 - RNA, 15 nt, Human
cugugaagagaacca

SEQ ID NO: 1615958 - RNA, 21 nt, Human
cugugagaugcuagaacuccc

SEQ ID NO: 1615959 - RNA, 16 nt, Human
cugugagaugcuagaa

SEQ ID NO: 1615960 - RNA, 15 nt, Human
cugugcucuggacag

SEQ ID NO: 1615961 - RNA, 14 nt, Human
cugugcucuggaca

SEQ ID NO: 1615962 - RNA, 19 nt, Human
cugugcuccauggcugcca

SEQ ID NO: 1615963 - RNA, 18 nt, Human
cuuuuaugugaaacaugu

SEQ ID NO: 1615964 - RNA, 14 nt, Human
cuuuuaugugaaac

SEQ ID NO: 1615965 - RNA, 13 nt, Human
cuuuuauaaacuu

SEQ ID NO: 1615966 - RNA, 14 nt, Human
cuuuuauaaacuuu

SEQ ID NO: 1615967 - RNA, 20 nt, Human
cuuuguauagaaccucuuug

SEQ ID NO: 1615968 - RNA, 11 nt, Human
cuuuguauaga

SEQ ID NO: 1615969 - RNA, 16 nt, Human
cuuucuagccagagga

SEQ ID NO: 1615970 - RNA, 22 nt, Human
cuuugauauuuucaacgcagcc

SEQ ID NO: 1615971 - RNA, 15 nt, Human
cuuucuagccagagg

SEQ ID NO: 1615972 - RNA, 13 nt, Human
cuuuguaaugaaa

SEQ ID NO: 1615973 - RNA, 15 nt, Human
cuuuguaaauuguca

SEQ ID NO: 1615974 - RNA, 21 nt, Human
cuuugggcugcccuggugcug

SEQ ID NO: 1615975 - RNA, 20 nt, Human
cuuugggcugcccuggugcu

SEQ ID NO: 1615976 - RNA, 19 nt, Human
cuuugggcugcccuggugc

SEQ ID NO: 1615977 - RNA, 15 nt, Human
cuuugggcugcccug

SEQ ID NO: 1615978 - RNA, 14 nt, Human
cuuugggcugcccu

SEQ ID NO: 1615979 - RNA, 22 nt, Human
cuuuccugaggcugggcucccu

SEQ ID NO: 1615980 - RNA, 20 nt, Human
cuuucagccaagaauucuua

SEQ ID NO: 1615981 - RNA, 23 nt, Human
cuuucagccaagaauucuuaaau

SEQ ID NO: 1615982 - RNA, 16 nt, Human
cuuucacaaccuucug

SEQ ID NO: 1615983 - RNA, 14 nt, Human
cuuucacaaccuuc

SEQ ID NO: 1615984 - RNA, 13 nt, Human
cuuuugccauuga

SEQ ID NO: 1615985 - RNA, 23 nt, Human
cuuuugcccacacuugggagcaa

SEQ ID NO: 1615986 - RNA, 16 nt, Human
cuuuugccguuauuaa

SEQ ID NO: 1615987 - RNA, 18 nt, Human
cuuuuggaagguauuuaa

SEQ ID NO: 1615988 - RNA, 13 nt, Human
cuuuuggagucag

SEQ ID NO: 1615989 - RNA, 18 nt, Human
cuuuugucuaugggacuc

SEQ ID NO: 1615990 - RNA, 19 nt, Human
cuuuuguagaagucacauu

SEQ ID NO: 1615991 - RNA, 15 nt, Human
cuuuuggcauuuuac

SEQ ID NO: 1615992 - RNA, 23 nt, Human
cuuuuuuggcugcugaaggcucg

SEQ ID NO: 1615993 - RNA, 12 nt, Human
cuuuugugcauu

SEQ ID NO: 1615994 - RNA, 13 nt, Human
cuuuugugcauua

SEQ ID NO: 1615995 - RNA, 20 nt, Human
cuuuuuuuuuuuugagacag

SEQ ID NO: 1615996 - RNA, 21 nt, Human
cuuuuuuuuuuuugagacaga

SEQ ID NO: 1615997 - RNA, 14 nt, Human
gaaaauuuuaaaaa

SEQ ID NO: 1615998 - RNA, 14 nt, Human
gaaaaacugauuuu

SEQ ID NO: 1615999 - RNA, 21 nt, Human
gaaaauggaagacagcucuua

SEQ ID NO: 1616000 - RNA, 23 nt, Human
gaaaaugcuguauuagucacaga

SEQ ID NO: 1616001 - RNA, 18 nt, Human
gaaaagaaaaaugagccu

SEQ ID NO: 1616002 - RNA, 23 nt, Human
gaaaauggacguguuaugacucc

SEQ ID NO: 1616003 - RNA, 19 nt, Human
gaaaauggacguguuauga

SEQ ID NO: 1616004 - RNA, 15 nt, Human
gaaaauguaugugua

SEQ ID NO: 1616005 - RNA, 17 nt, Human
gaaauauuuauuuuaau

SEQ ID NO: 1616006 - RNA, 19 nt, Human
gaaagggacuuggaagcuc

SEQ ID NO: 1616007 - RNA, 20 nt, Human
gaaagggacgcuacccggga

SEQ ID NO: 1616008 - RNA, 22 nt, Human
gaaagggacuuggaagcuccgc

SEQ ID NO: 1616009 - RNA, 20 nt, Human
gaaaucaaauaugcaaagca

SEQ ID NO: 1616010 - RNA, 19 nt, Human
gaaaucaaauaugcaaagc

SEQ ID NO: 1616011 - RNA, 21 nt, Human
gaaaucaaauaugcaaagcac

SEQ ID NO: 1616012 - RNA, 18 nt, Human
gaaaucaaauaugcaaag

SEQ ID NO: 1616013 - RNA, 22 nt, Human
gaaauauuuauuuuaauaaugu

SEQ ID NO: 1616014 - RNA, 18 nt, Human
gaaauauuuauuuuaaua

SEQ ID NO: 1616015 - RNA, 17 nt, Human
gaaagacuauucaaaca

SEQ ID NO: 1616016 - RNA, 21 nt, Human
gaaaggcuccaggagcagcca

SEQ ID NO: 1616017 - RNA, 22 nt, Human
gaaaggcuccaggagcagccac

SEQ ID NO: 1616018 - RNA, 15 nt, Human
gaaagacuauucaaa

SEQ ID NO: 1616019 - RNA, 14 nt, Human
gaaagacuauucaa

SEQ ID NO: 1616020 - RNA, 20 nt, Human
gaaagacuaucuaaauguug

SEQ ID NO: 1616021 - RNA, 21 nt, Human
gaaagaaaauaccaaggaaca

SEQ ID NO: 1616022 - RNA, 15 nt, Human
gaaacuuuuggaagg

SEQ ID NO: 1616023 - RNA, 13 nt, Human
gaaacuuuuggaa

SEQ ID NO: 1616024 - RNA, 23 nt, Human
cuucugacccaugcugcccugug

SEQ ID NO: 1616025 - RNA, 22 nt, Human
cuucugacccaugcugcccugu

SEQ ID NO: 1616026 - RNA, 21 nt, Human
cuucugacccaugcugcccug

SEQ ID NO: 1616027 - RNA, 20 nt, Human
cuucugacccaugcugcccu

SEQ ID NO: 1616028 - RNA, 15 nt, Human
cuucugccauauucu

SEQ ID NO: 1616029 - RNA, 21 nt, Human
cuucuguugcugccucaugcu

SEQ ID NO: 1616030 - RNA, 23 nt, Human
cuucuucagagacuccugcaggc

SEQ ID NO: 1616031 - RNA, 20 nt, Human
cuucuguugcugccucaugc

SEQ ID NO: 1616032 - RNA, 19 nt, Human
cuucuguugcugccucaug

SEQ ID NO: 1616033 - RNA, 18 nt, Human
cuucuguugcugccucau

SEQ ID NO: 1616034 - RNA, 17 nt, Human
cuucuguugcugccuca

SEQ ID NO: 1616035 - RNA, 23 nt, Human
cuucuaaguaaaaccacagcagu

SEQ ID NO: 1616036 - RNA, 22 nt, Human
cuucuaaguaaaaccacagcag

SEQ ID NO: 1616037 - RNA, 17 nt, Human
cuuccugcaacaccuug

SEQ ID NO: 1616038 - RNA, 13 nt, Human
cuucuagaaccag

SEQ ID NO: 1616039 - RNA, 17 nt, Human
cuucuagaaccaggcaa

SEQ ID NO: 1616040 - RNA, 20 nt, Human
cuuggcgcugccccuggcag

SEQ ID NO: 1616041 - RNA, 17 nt, Human
cuuggcgcugccccugg

SEQ ID NO: 1616042 - RNA, 14 nt, Human
cuuggcgcugcccc

SEQ ID NO: 1616043 - RNA, 12 nt, Human
cuuggcgcugcc

SEQ ID NO: 1616044 - RNA, 13 nt, Human
cuugaugaagaag

SEQ ID NO: 1616045 - RNA, 12 nt, Human
cuugaugccugg

SEQ ID NO: 1616046 - RNA, 13 nt, Human
cuugaugccuggc

SEQ ID NO: 1616047 - RNA, 15 nt, Human
cuugccuuuuucauu

SEQ ID NO: 1616048 - RNA, 14 nt, Human
cuugccuuuuucau

SEQ ID NO: 1616049 - RNA, 23 nt, Human
cuugccuuuuucauuauuuuauu

SEQ ID NO: 1616050 - RNA, 22 nt, Human
cuugccuuuuucauuauuuuau

SEQ ID NO: 1616051 - RNA, 20 nt, Human
cuugccuuuuucauuauuuu

SEQ ID NO: 1616052 - RNA, 12 nt, Human
cuugaugaagaa

SEQ ID NO: 1616053 - RNA, 20 nt, Human
cuugacagggcacaccgggc

SEQ ID NO: 1616054 - RNA, 13 nt, Human
cuugacagggcac

SEQ ID NO: 1616055 - RNA, 15 nt, Human
cuugacagggcacac

SEQ ID NO: 1616056 - RNA, 14 nt, Human
cuugacagggcaca

SEQ ID NO: 1616057 - RNA, 19 nt, Human
cuugaauuguaaggaauga

SEQ ID NO: 1616058 - RNA, 16 nt, Human
cuuauggaacacucug

SEQ ID NO: 1616059 - RNA, 13 nt, Human
cuuauggaacacu

SEQ ID NO: 1616060 - RNA, 21 nt, Human
cuuauggaacacucugagacu

SEQ ID NO: 1616061 - RNA, 20 nt, Human
cuuauggaacacucugagac

SEQ ID NO: 1616062 - RNA, 19 nt, Human
cuuauggaacacucugaga

SEQ ID NO: 1616063 - RNA, 17 nt, Human
cuuauggaacacucuga

SEQ ID NO: 1616064 - RNA, 19 nt, Human
cuucacggaagagccuugc

SEQ ID NO: 1616065 - RNA, 15 nt, Human
cuucacggaagagcc

SEQ ID NO: 1616066 - RNA, 22 nt, Human
cuucaccuuuguccccaccgca

SEQ ID NO: 1616067 - RNA, 20 nt, Human
cuuauuguagcauccuggaa

SEQ ID NO: 1616068 - RNA, 21 nt, Human
cuucaccuuuguccccaccgc

SEQ ID NO: 1616069 - RNA, 23 nt, Human
cuuauuguagcauccuggaauau

SEQ ID NO: 1616070 - RNA, 19 nt, Human
cugugcugagucugaaggc

SEQ ID NO: 1616071 - RNA, 14 nt, Human
cugugcugagucug

SEQ ID NO: 1616072 - RNA, 12 nt, Human
cugugcugaguc

SEQ ID NO: 1616073 - RNA, 23 nt, Human
cuucccaccucucucacuccuug

SEQ ID NO: 1616074 - RNA, 21 nt, Human
cuucccaccucucucacuccu

SEQ ID NO: 1616075 - RNA, 11 nt, Human
cuucccaccuc

SEQ ID NO: 1616076 - RNA, 21 nt, Human
cuuccauaaucuggacuccuc

SEQ ID NO: 1616077 - RNA, 11 nt, Human
cuuccauaauc

SEQ ID NO: 1616078 - RNA, 21 nt, Human
cuuccagugaggcucugcccu

SEQ ID NO: 1616079 - RNA, 23 nt, Human
cuuccagugaggcucugcccuug

SEQ ID NO: 1616080 - RNA, 22 nt, Human
cuuccagugaggcucugcccuu

SEQ ID NO: 1616081 - RNA, 15 nt, Human
cuucacuguaaaaua

SEQ ID NO: 1616082 - RNA, 17 nt, Human
cuucagagacuccugca

SEQ ID NO: 1616083 - RNA, 19 nt, Human
cuucagagacuccugcagg

SEQ ID NO: 1616084 - RNA, 18 nt, Human
cuucagagacuccugcag

SEQ ID NO: 1616085 - RNA, 20 nt, Human
cuucagagacuccugcaggc

SEQ ID NO: 1616086 - RNA, 21 nt, Human
gaugaucuuugcagacaggca

SEQ ID NO: 1616087 - RNA, 20 nt, Human
gaugaucuuugcagacaggc

SEQ ID NO: 1616088 - RNA, 21 nt, Human
gaugaugaaaugaggucagag

SEQ ID NO: 1616089 - RNA, 16 nt, Human
gaucucuugagccugg

SEQ ID NO: 1616090 - RNA, 12 nt, Human
gaucucuugagc

SEQ ID NO: 1616091 - RNA, 17 nt, Human
gaucucuugagccuggg

SEQ ID NO: 1616092 - RNA, 18 nt, Human
gaucucuugagccuggga

SEQ ID NO: 1616093 - RNA, 15 nt, Human
gaucucuaacuucac

SEQ ID NO: 1616094 - RNA, 22 nt, Human
gauccaguuuuguuuggaccaa

SEQ ID NO: 1616095 - RNA, 17 nt, Human
gauccaguuuuguuugg

SEQ ID NO: 1616096 - RNA, 11 nt, Human
gauccaguuuu

SEQ ID NO: 1616097 - RNA, 16 nt, Human
gauauuuugcuuugug

SEQ ID NO: 1616098 - RNA, 15 nt, Human
gauauuuuuuucuuu

SEQ ID NO: 1616099 - RNA, 17 nt, Human
gauauuuuuuucuuuuc

SEQ ID NO: 1616100 - RNA, 17 nt, Human
gauuagggagagaagau

SEQ ID NO: 1616101 - RNA, 18 nt, Human
gauuagagaguguugaaa

SEQ ID NO: 1616102 - RNA, 14 nt, Human
gauuagagaguguu

SEQ ID NO: 1616103 - RNA, 21 nt, Human
gauuauucacugauuugacau

SEQ ID NO: 1616104 - RNA, 16 nt, Human
gauuauucacugauuu

SEQ ID NO: 1616105 - RNA, 15 nt, Human
gauuauucacugauu

SEQ ID NO: 1616106 - RNA, 13 nt, Human
gauuauucacuga

SEQ ID NO: 1616107 - RNA, 14 nt, Human
gauuaccagggacu

SEQ ID NO: 1616108 - RNA, 18 nt, Human
gauuacugccuauuuuaa

SEQ ID NO: 1616109 - RNA, 23 nt, Human
gauuagaauucuguauagauuag

SEQ ID NO: 1616110 - RNA, 15 nt, Human
gauuagaauucugua

SEQ ID NO: 1616111 - RNA, 14 nt, Human
gauuagaauucugu

SEQ ID NO: 1616112 - RNA, 16 nt, Human
gaugugaacacaucag

SEQ ID NO: 1616113 - RNA, 14 nt, Human
gaugugaacacauc

SEQ ID NO: 1616114 - RNA, 20 nt, Human
gauuacaggugugagccacc

SEQ ID NO: 1616115 - RNA, 20 nt, Human
gauuacaggugugaaccacc

SEQ ID NO: 1616116 - RNA, 16 nt, Human
gaguuuagcuggaaaa

SEQ ID NO: 1616117 - RNA, 16 nt, Human
gaguuguuacauuuuu

SEQ ID NO: 1616118 - RNA, 20 nt, Human
gaguuguuacauuuuuaagu

SEQ ID NO: 1616119 - RNA, 13 nt, Human
gagugcagugagc

SEQ ID NO: 1616120 - RNA, 20 nt, Human
gaguuugggguaugggagag

SEQ ID NO: 1616121 - RNA, 13 nt, Human
gaggucuguucuu

SEQ ID NO: 1616122 - RNA, 14 nt, Human
gaggucuguucuuu

SEQ ID NO: 1616123 - RNA, 11 nt, Human
gaggugggagg

SEQ ID NO: 1616124 - RNA, 12 nt, Human
gaggugggaucc

SEQ ID NO: 1616125 - RNA, 13 nt, Human
gaggugggauccu

SEQ ID NO: 1616126 - RNA, 12 nt, Human
gagugagcuggu

SEQ ID NO: 1616127 - RNA, 21 nt, Human
gagucccaccuuggcugcagg

SEQ ID NO: 1616128 - RNA, 12 nt, Human
gagugcagugag

SEQ ID NO: 1616129 - RNA, 11 nt, Human
gagugcaguga

SEQ ID NO: 1616130 - RNA, 14 nt, Human
gagucaccaagccc

SEQ ID NO: 1616131 - RNA, 13 nt, Human
gagucaccaagcc

SEQ ID NO: 1616132 - RNA, 15 nt, Human
gagucaccaagccca

SEQ ID NO: 1616133 - RNA, 20 nt, Human
gagucccaccuuggcugcag

SEQ ID NO: 1616134 - RNA, 16 nt, Human
gagucccaccuuggcu

SEQ ID NO: 1616135 - RNA, 20 nt, Human
gauauguaccuaacgaagua

SEQ ID NO: 1616136 - RNA, 14 nt, Human
gauaugugaacagu

SEQ ID NO: 1616137 - RNA, 13 nt, Human
gauaugugaacag

SEQ ID NO: 1616138 - RNA, 17 nt, Human
gauacuugaaaauuaac

SEQ ID NO: 1616139 - RNA, 16 nt, Human
gauacuugaaaauuaa

SEQ ID NO: 1616140 - RNA, 14 nt, Human
gauacccaucccau

SEQ ID NO: 1616141 - RNA, 13 nt, Human
gauacccauccca

SEQ ID NO: 1616142 - RNA, 16 nt, Human
gauacuacaguuuguu

SEQ ID NO: 1616143 - RNA, 11 nt, Human
gauacuacagu

SEQ ID NO: 1616144 - RNA, 14 nt, Human
gcagccaggccaca

SEQ ID NO: 1616145 - RNA, 13 nt, Human
gcagccaggccac

SEQ ID NO: 1616146 - RNA, 16 nt, Human
gcagccaggccacaag

SEQ ID NO: 1616147 - RNA, 12 nt, Human
gcagccaggcca

SEQ ID NO: 1616148 - RNA, 14 nt, Human
gcagccacuauugu

SEQ ID NO: 1616149 - RNA, 16 nt, Human
gcagccacauuccuga

SEQ ID NO: 1616150 - RNA, 14 nt, Human
gcauacguacacau

SEQ ID NO: 1616151 - RNA, 17 nt, Human
gcauaccacuuuuguuc

SEQ ID NO: 1616152 - RNA, 20 nt, Human
gcauaccacuuuuguucuug

SEQ ID NO: 1616153 - RNA, 22 nt, Human
gcauaacguauaaaagccuguu

SEQ ID NO: 1616154 - RNA, 23 nt, Human
gcauaacauaaaucugugaacuu

SEQ ID NO: 1616155 - RNA, 21 nt, Human
gcauaacauaaaucugugaac

SEQ ID NO: 1616156 - RNA, 12 nt, Human
gcagcugccucc

SEQ ID NO: 1616157 - RNA, 13 nt, Human
gcagcugccuccc

SEQ ID NO: 1616158 - RNA, 15 nt, Human
gcagcugccuccccu

SEQ ID NO: 1616159 - RNA, 16 nt, Human
gcagcugccuccccuc

SEQ ID NO: 1616160 - RNA, 17 nt, Human
gcagcugccuccccucc

SEQ ID NO: 1616161 - RNA, 18 nt, Human
gcagcugccuccccuccu

SEQ ID NO: 1616162 - RNA, 22 nt, Human
gcagcugccuccccuccucugc

SEQ ID NO: 1616163 - RNA, 22 nt, Human
gcaggcucucaggccagcugcu

SEQ ID NO: 1616164 - RNA, 20 nt, Human
gcaggcucucaggccagcug

SEQ ID NO: 1616165 - RNA, 19 nt, Human
gcagcugcgguccacccag

SEQ ID NO: 1616166 - RNA, 17 nt, Human
gcagcugcgguccaccc

SEQ ID NO: 1616167 - RNA, 23 nt, Human
gcaggcucucaggccagcugcuu

SEQ ID NO: 1616168 - RNA, 14 nt, Human
gcaggcuggcccug

SEQ ID NO: 1616169 - RNA, 18 nt, Human
gcaggcuggcccugcccu

SEQ ID NO: 1616170 - RNA, 17 nt, Human
gcaggcuggcccugccc

SEQ ID NO: 1616171 - RNA, 16 nt, Human
gcaggcuggcccugcc

SEQ ID NO: 1616172 - RNA, 15 nt, Human
gcaggcuggcccugc

SEQ ID NO: 1616173 - RNA, 21 nt, Human
gcaggcuggcccugcccuggu

SEQ ID NO: 1616174 - RNA, 20 nt, Human
gcaggcuggcccugcccugg

SEQ ID NO: 1616175 - RNA, 19 nt, Human
gcaggcuggcccugcccug

SEQ ID NO: 1616176 - RNA, 19 nt, Human
gcagggacuugaacccaua

SEQ ID NO: 1616177 - RNA, 13 nt, Human
gcagggaaacagc

SEQ ID NO: 1616178 - RNA, 13 nt, Human
gcagggagggccu

SEQ ID NO: 1616179 - RNA, 10 nt, Human
gcagggaggg

SEQ ID NO: 1616180 - RNA, 13 nt, Human
gcaagugagagcu

SEQ ID NO: 1616181 - RNA, 14 nt, Human
gcacaagcugcacc

SEQ ID NO: 1616182 - RNA, 23 nt, Human
gcacaagcuccaagcucccaggc

SEQ ID NO: 1616183 - RNA, 22 nt, Human
gcacaagcuccaagcucccagg

SEQ ID NO: 1616184 - RNA, 23 nt, Human
gcaauaaggggagaguaacccug

SEQ ID NO: 1616185 - RNA, 15 nt, Human
gcaagugagagcugg

SEQ ID NO: 1616186 - RNA, 17 nt, Human
gcacaguuuucugagaa

SEQ ID NO: 1616187 - RNA, 14 nt, Human
gcacaguuuucuga

SEQ ID NO: 1616188 - RNA, 18 nt, Human
gcacaguuuucugagaaa

SEQ ID NO: 1616189 - RNA, 21 nt, Human
gcacaaucucggcucacugca

SEQ ID NO: 1616190 - RNA, 22 nt, Human
gcacaaucucggcucacugcau

SEQ ID NO: 1616191 - RNA, 13 nt, Human
gcacaugccucuc

SEQ ID NO: 1616192 - RNA, 19 nt, Human
gcacaucagcacgauuucu

SEQ ID NO: 1616193 - RNA, 20 nt, Human
gcacaucagcacgauuucug

SEQ ID NO: 1616194 - RNA, 21 nt, Human
gcacaucagcacgauuucugu

SEQ ID NO: 1616195 - RNA, 22 nt, Human
gcacaugccucucucaggccaa

SEQ ID NO: 1616196 - RNA, 21 nt, Human
gcacaugccucucucaggcca

SEQ ID NO: 1616197 - RNA, 20 nt, Human
gcacaugccucucucaggcc

SEQ ID NO: 1616198 - RNA, 19 nt, Human
gcacaugccucucucaggc

SEQ ID NO: 1616199 - RNA, 18 nt, Human
gcacaugccucucucagg

SEQ ID NO: 1616200 - RNA, 17 nt, Human
gcacaugccucucucag

SEQ ID NO: 1616201 - RNA, 14 nt, Human
gcacaugccucucu

SEQ ID NO: 1616202 - RNA, 19 nt, Human
gcaccggcuggccuggccc

SEQ ID NO: 1616203 - RNA, 23 nt, Human
gcaccggcuggccuggccccuca

SEQ ID NO: 1616204 - RNA, 21 nt, Human
gcaccggcuggccuggccccu

SEQ ID NO: 1616205 - RNA, 12 nt, Human
gcacugacauug

SEQ ID NO: 1616206 - RNA, 23 nt, Human
gcagagcaccuuagacagucccu

SEQ ID NO: 1616207 - RNA, 22 nt, Human
gcagagcaccuuagacaguccc

SEQ ID NO: 1616208 - RNA, 19 nt, Human
gcagagcaccuuagacagu

SEQ ID NO: 1616209 - RNA, 15 nt, Human
gcagagcagagacca

SEQ ID NO: 1616210 - RNA, 14 nt, Human
gcagagcagagacc

SEQ ID NO: 1616211 - RNA, 12 nt, Human
gcagagcagaga

SEQ ID NO: 1616212 - RNA, 24 nt, Human
gcagagcaccuuagacagucccug

SEQ ID NO: 1616213 - RNA, 20 nt, Human
gcagagcagagaccaucccu

SEQ ID NO: 1616214 - RNA, 19 nt, Human
gcagagcagagaccauccc

SEQ ID NO: 1616215 - RNA, 15 nt, Human
gaagcucagggccug

SEQ ID NO: 1616216 - RNA, 14 nt, Human
gaagcucagggccu

SEQ ID NO: 1616217 - RNA, 19 nt, Human
gaagcucagggccuggcuc

SEQ ID NO: 1616218 - RNA, 18 nt, Human
gaagcucagggccuggcu

SEQ ID NO: 1616219 - RNA, 17 nt, Human
gaagcucagggccuggc

SEQ ID NO: 1616220 - RNA, 16 nt, Human
gaagcucagggccugg

SEQ ID NO: 1616221 - RNA, 21 nt, Human
gaagcucagggccuggcucag

SEQ ID NO: 1616222 - RNA, 20 nt, Human
gaagcucagggccuggcuca

SEQ ID NO: 1616223 - RNA, 23 nt, Human
gaagcucagggccuggcucaggu

SEQ ID NO: 1616224 - RNA, 18 nt, Human
gaaauccagggugguggu

SEQ ID NO: 1616225 - RNA, 13 nt, Human
gaaauccagggug

SEQ ID NO: 1616226 - RNA, 17 nt, Human
gaaggcucgagcaugcc

SEQ ID NO: 1616227 - RNA, 16 nt, Human
gaaggcucgagcaugc

SEQ ID NO: 1616228 - RNA, 19 nt, Human
gaaggcucgagcaugccug

SEQ ID NO: 1616229 - RNA, 18 nt, Human
gaagucuuuguacagaca

SEQ ID NO: 1616230 - RNA, 20 nt, Human
gaagucuuuguacagacaac

SEQ ID NO: 1616231 - RNA, 19 nt, Human
gaagucuuuguacagacaa

SEQ ID NO: 1616232 - RNA, 15 nt, Human
gaaguggggacagag

SEQ ID NO: 1616233 - RNA, 20 nt, Human
gaaugagagacacacugaag

SEQ ID NO: 1616234 - RNA, 23 nt, Human
gaaugagagacacacugaagaag

SEQ ID NO: 1616235 - RNA, 22 nt, Human
gaaugagagacacacugaagaa

SEQ ID NO: 1616236 - RNA, 22 nt, Human
gaaugaaugucagugugacuga

SEQ ID NO: 1616237 - RNA, 18 nt, Human
gaaugaaugucaguguga

SEQ ID NO: 1616238 - RNA, 14 nt, Human
gaaugaaugucagu

SEQ ID NO: 1616239 - RNA, 11 nt, Human
gaaugaauguc

SEQ ID NO: 1616240 - RNA, 14 nt, Human
gacacacugaagaa

SEQ ID NO: 1616241 - RNA, 12 nt, Human
gacacacaugaa

SEQ ID NO: 1616242 - RNA, 21 nt, Human
gacacacagcucuguccuggg

SEQ ID NO: 1616243 - RNA, 13 nt, Human
gacacacugaaga

SEQ ID NO: 1616244 - RNA, 11 nt, Human
gaauuaguuuu

SEQ ID NO: 1616245 - RNA, 12 nt, Human
gaauuaugaaac

SEQ ID NO: 1616246 - RNA, 19 nt, Human
gaauuuuggcugugucucc

SEQ ID NO: 1616247 - RNA, 21 nt, Human
gaauuuuauuuuuugggaaaa

SEQ ID NO: 1616248 - RNA, 20 nt, Human
gaauuuugugcccccaugua

SEQ ID NO: 1616249 - RNA, 23 nt, Human
gaauuuuggcugugucucccuuc

SEQ ID NO: 1616250 - RNA, 21 nt, Human
gaauuuugugcccccauguaa

SEQ ID NO: 1616251 - RNA, 13 nt, Human
gaauuuuguguua

SEQ ID NO: 1616252 - RNA, 22 nt, Human
gaauuuuguguuagagauuuuu

SEQ ID NO: 1616253 - RNA, 16 nt, Human
gaauuuuguguuagag

SEQ ID NO: 1616254 - RNA, 19 nt, Human
gacacacagcucuguccug

SEQ ID NO: 1616255 - RNA, 18 nt, Human
gacacacagcucuguccu

SEQ ID NO: 1616256 - RNA, 17 nt, Human
gacacacagcucugucc

SEQ ID NO: 1616257 - RNA, 15 nt, Human
gacacacagcucugu

SEQ ID NO: 1616258 - RNA, 14 nt, Human
gacacacagcucug

SEQ ID NO: 1616259 - RNA, 15 nt, Human
gacaaaauggaauac

SEQ ID NO: 1616260 - RNA, 17 nt, Human
gacagucaccucaugga

SEQ ID NO: 1616261 - RNA, 14 nt, Human
gacagugaaagaaa

SEQ ID NO: 1616262 - RNA, 11 nt, Human
gacagcuccuu

SEQ ID NO: 1616263 - RNA, 19 nt, Human
gacagccuggcacagggca

SEQ ID NO: 1616264 - RNA, 13 nt, Human
gacagccuggcac

SEQ ID NO: 1616265 - RNA, 13 nt, Human
gacagcccuccau

SEQ ID NO: 1616266 - RNA, 22 nt, Human
gacaggguuuugccauguuggc

SEQ ID NO: 1616267 - RNA, 20 nt, Human
gacaggguuuugccauguug

SEQ ID NO: 1616268 - RNA, 23 nt, Human
gacagcccgggcucugccuccca

SEQ ID NO: 1616269 - RNA, 22 nt, Human
gacagcccgggcucugccuccc

SEQ ID NO: 1616270 - RNA, 21 nt, Human
gacagcccgggcucugccucc

SEQ ID NO: 1616271 - RNA, 12 nt, Human
gacagacacagg

SEQ ID NO: 1616272 - RNA, 16 nt, Human
gacacuuaaaaauggu

SEQ ID NO: 1616273 - RNA, 15 nt, Human
gacacugaugggcaa

SEQ ID NO: 1616274 - RNA, 13 nt, Human
gacacugaugggc

SEQ ID NO: 1616275 - RNA, 13 nt, Human
gagauuuacaacu

SEQ ID NO: 1616276 - RNA, 18 nt, Human
gagauugcaccacugcac

SEQ ID NO: 1616277 - RNA, 21 nt, Human
gagauugcaccacugcacucc

SEQ ID NO: 1616278 - RNA, 14 nt, Human
gagauguagccccu

SEQ ID NO: 1616279 - RNA, 16 nt, Human
gagacuccugcaggca

SEQ ID NO: 1616280 - RNA, 15 nt, Human
gagacuccugcaggc

SEQ ID NO: 1616281 - RNA, 18 nt, Human
gagacuccugcaggcagc

SEQ ID NO: 1616282 - RNA, 17 nt, Human
gagacuccugcaggcag

SEQ ID NO: 1616283 - RNA, 14 nt, Human
gagaggcauccagu

SEQ ID NO: 1616284 - RNA, 22 nt, Human
gagaggcauccaguaucuugaa

SEQ ID NO: 1616285 - RNA, 21 nt, Human
gagaugaugccaugggcccuc

SEQ ID NO: 1616286 - RNA, 21 nt, Human
gagcggagaaaggaagggcug

SEQ ID NO: 1616287 - RNA, 18 nt, Human
gagcggagaaaggaaggg

SEQ ID NO: 1616288 - RNA, 22 nt, Human
gagcugccuguucagcuccagc

SEQ ID NO: 1616289 - RNA, 21 nt, Human
gagcugccuguucagcuccag

SEQ ID NO: 1616290 - RNA, 17 nt, Human
gagccuuccaggggugg

SEQ ID NO: 1616291 - RNA, 16 nt, Human
gagccuuccaggggug

SEQ ID NO: 1616292 - RNA, 15 nt, Human
gagccuuccaggggu

SEQ ID NO: 1616293 - RNA, 14 nt, Human
gagccuuccagggg

SEQ ID NO: 1616294 - RNA, 13 nt, Human
gagccccgaggcc

SEQ ID NO: 1616295 - RNA, 22 nt, Human
gagccuugaacuuugaccucug

SEQ ID NO: 1616296 - RNA, 18 nt, Human
gagcugggugucaagagg

SEQ ID NO: 1616297 - RNA, 14 nt, Human
gagcagggcucagc

SEQ ID NO: 1616298 - RNA, 21 nt, Human
gagcagggcucagcggggaca

SEQ ID NO: 1616299 - RNA, 12 nt, Human
gagcaucaggcc

SEQ ID NO: 1616300 - RNA, 22 nt, Human
gagcaugccuggauggggcugc

SEQ ID NO: 1616301 - RNA, 13 nt, Human
gagcaucaggcca

SEQ ID NO: 1616302 - RNA, 21 nt, Human
gacuuuucuuuguggcuuccu

SEQ ID NO: 1616303 - RNA, 23 nt, Human
gacuuuucuuucagccaagaauu

SEQ ID NO: 1616304 - RNA, 12 nt, Human
gacuggugacug

SEQ ID NO: 1616305 - RNA, 18 nt, Human
gacuggugacugauucuu

SEQ ID NO: 1616306 - RNA, 15 nt, Human
gacuggugacugauu

SEQ ID NO: 1616307 - RNA, 11 nt, Human
gacuuuccucu

SEQ ID NO: 1616308 - RNA, 15 nt, Human
gagaagcggcuggca

SEQ ID NO: 1616309 - RNA, 13 nt, Human
gagaagcggcugg

SEQ ID NO: 1616310 - RNA, 16 nt, Human
gagaagcggcuggcag

SEQ ID NO: 1616311 - RNA, 12 nt, Human
gagaaggaagcc

SEQ ID NO: 1616312 - RNA, 20 nt, Human
gagaaggacccggaggggcc

SEQ ID NO: 1616313 - RNA, 23 nt, Human
gagaaggacccggaggggccugg

SEQ ID NO: 1616314 - RNA, 22 nt, Human
gagaaggacccggaggggccug

SEQ ID NO: 1616315 - RNA, 13 nt, Human
gagaccugccccu

SEQ ID NO: 1616316 - RNA, 12 nt, Human
gagaccugcccc

SEQ ID NO: 1616317 - RNA, 11 nt, Human
gagaccugccc

SEQ ID NO: 1616318 - RNA, 21 nt, Human
gagacccugucucaaaaaaag

SEQ ID NO: 1616319 - RNA, 14 nt, Human
gagaaucacuugaa

SEQ ID NO: 1616320 - RNA, 15 nt, Human
gagaaucacuugaac

SEQ ID NO: 1616321 - RNA, 16 nt, Human
gacucuuaagaagacu

SEQ ID NO: 1616322 - RNA, 19 nt, Human
gacucugucucaaaaaaac

SEQ ID NO: 1616323 - RNA, 18 nt, Human
gacucuuaagaagacugc

SEQ ID NO: 1616324 - RNA, 17 nt, Human
gacucuuaagaagacug

SEQ ID NO: 1616325 - RNA, 12 nt, Human
gacucugucuca

SEQ ID NO: 1616326 - RNA, 22 nt, Human
gacuaucuaaauguugaaagau

SEQ ID NO: 1616327 - RNA, 18 nt, Human
gacuaggguccuggggaa

SEQ ID NO: 1616328 - RNA, 16 nt, Human
gacuaggguccugggg

SEQ ID NO: 1616329 - RNA, 15 nt, Human
gacuaggguccuggg

SEQ ID NO: 1616330 - RNA, 22 nt, Human
gccaguuauggcuauaggugcu

SEQ ID NO: 1616331 - RNA, 13 nt, Human
gccaguugguccc

SEQ ID NO: 1616332 - RNA, 13 nt, Human
gccagugugacaa

SEQ ID NO: 1616333 - RNA, 15 nt, Human
gccagugcuccagcc

SEQ ID NO: 1616334 - RNA, 16 nt, Human
gccauaugaaaaggcu

SEQ ID NO: 1616335 - RNA, 21 nt, Human
gccaguuggucccccuuccau

SEQ ID NO: 1616336 - RNA, 20 nt, Human
gccaguuggucccccuucca

SEQ ID NO: 1616337 - RNA, 18 nt, Human
gccaguuggucccccuuc

SEQ ID NO: 1616338 - RNA, 16 nt, Human
gccaguuggucccccu

SEQ ID NO: 1616339 - RNA, 23 nt, Human
gccaguuggucccccuuccaugg

SEQ ID NO: 1616340 - RNA, 22 nt, Human
gccaguuggucccccuuccaug

SEQ ID NO: 1616341 - RNA, 13 nt, Human
gccagcaguucag

SEQ ID NO: 1616342 - RNA, 14 nt, Human
gccagcaguucaga

SEQ ID NO: 1616343 - RNA, 19 nt, Human
gccagcaguucagagcugc

SEQ ID NO: 1616344 - RNA, 20 nt, Human
gccagcaguucagagcugcc

SEQ ID NO: 1616345 - RNA, 21 nt, Human
gccagcaguucagagcugccc

SEQ ID NO: 1616346 - RNA, 15 nt, Human
gccaggcccucugcc

SEQ ID NO: 1616347 - RNA, 14 nt, Human
gccaggcccucugc

SEQ ID NO: 1616348 - RNA, 13 nt, Human
gccaggcccucug

SEQ ID NO: 1616349 - RNA, 23 nt, Human
gccaggccacaagacccuugugg

SEQ ID NO: 1616350 - RNA, 22 nt, Human
gccaggccagagggagugacag

SEQ ID NO: 1616351 - RNA, 15 nt, Human
gccaggccagaggga

SEQ ID NO: 1616352 - RNA, 21 nt, Human
gccaggccacaagacccuugu

SEQ ID NO: 1616353 - RNA, 18 nt, Human
gccaggccacaagacccu

SEQ ID NO: 1616354 - RNA, 13 nt, Human
gccaggccacaag

SEQ ID NO: 1616355 - RNA, 22 nt, Human
gccaugugcuaguaauuggaaa

SEQ ID NO: 1616356 - RNA, 14 nt, Human
gccaugugccaggu

SEQ ID NO: 1616357 - RNA, 24 nt, Human
gccaucaauaaaaaauuaugacau

SEQ ID NO: 1616358 - RNA, 13 nt, Human
gcccaggccccug

SEQ ID NO: 1616359 - RNA, 15 nt, Human
gcccaggccccugcc

SEQ ID NO: 1616360 - RNA, 16 nt, Human
gcccaggcaggucuug

SEQ ID NO: 1616361 - RNA, 14 nt, Human
gcccaggcaggucu

SEQ ID NO: 1616362 - RNA, 13 nt, Human
gcccaggcagguc

SEQ ID NO: 1616363 - RNA, 18 nt, Human
gcccaggccccugccacc

SEQ ID NO: 1616364 - RNA, 17 nt, Human
gcccaggccccugccac

SEQ ID NO: 1616365 - RNA, 15 nt, Human
gccccuggaugcagc

SEQ ID NO: 1616366 - RNA, 16 nt, Human
gcccucacccuggggc

SEQ ID NO: 1616367 - RNA, 17 nt, Human
gcccucacccuggggcu

SEQ ID NO: 1616368 - RNA, 22 nt, Human
gccccugcugguucaggguugg

SEQ ID NO: 1616369 - RNA, 18 nt, Human
gccccugccucucugcag

SEQ ID NO: 1616370 - RNA, 17 nt, Human
gccccugccucucugca

SEQ ID NO: 1616371 - RNA, 16 nt, Human
gccccugccucucugc

SEQ ID NO: 1616372 - RNA, 15 nt, Human
gccccugccucucug

SEQ ID NO: 1616373 - RNA, 14 nt, Human
gcgauucuucugcu

SEQ ID NO: 1616374 - RNA, 17 nt, Human
gcgauucuucugcuuca

SEQ ID NO: 1616375 - RNA, 15 nt, Human
gcgagcccugguggc

SEQ ID NO: 1616376 - RNA, 13 nt, Human
gcgauucuucugc

SEQ ID NO: 1616377 - RNA, 16 nt, Human
gcggccuuuggcuuca

SEQ ID NO: 1616378 - RNA, 20 nt, Human
gcgugguggacaugcacagc

SEQ ID NO: 1616379 - RNA, 14 nt, Human
gcgugcacacacca

SEQ ID NO: 1616380 - RNA, 18 nt, Human
gcgugcacacaccagagc

SEQ ID NO: 1616381 - RNA, 19 nt, Human
gcgugcacacaccagagcc

SEQ ID NO: 1616382 - RNA, 17 nt, Human
gcuacuugggaggcuga

SEQ ID NO: 1616383 - RNA, 15 nt, Human
gcuacugucagcucc

SEQ ID NO: 1616384 - RNA, 19 nt, Human
gcuacuguaaggcaaucau

SEQ ID NO: 1616385 - RNA, 18 nt, Human
gcuacuguaaggcaauca

SEQ ID NO: 1616386 - RNA, 20 nt, Human
gcuacuguccuacccacccu

SEQ ID NO: 1616387 - RNA, 19 nt, Human
gcuacuguccuacccaccc

SEQ ID NO: 1616388 - RNA, 19 nt, Human
gcuacaaaaacacagcaag

SEQ ID NO: 1616389 - RNA, 18 nt, Human
gcuacaaaaacacagcaa

SEQ ID NO: 1616390 - RNA, 17 nt, Human
gcuacaaaaacacagca

SEQ ID NO: 1616391 - RNA, 17 nt, Human
gcguuucuaugacacau

SEQ ID NO: 1616392 - RNA, 24 nt, Human
gcguugaaauuguaauuauaucug

SEQ ID NO: 1616393 - RNA, 23 nt, Human
gcguugaaauuguaauuauaucu

SEQ ID NO: 1616394 - RNA, 16 nt, Human
gcuaauuuuucauuuu

SEQ ID NO: 1616395 - RNA, 18 nt, Human
gcuaauuuugaaaaacug

SEQ ID NO: 1616396 - RNA, 13 nt, Human
gccugcuccagcu

SEQ ID NO: 1616397 - RNA, 23 nt, Human
gccugcuaauuccccagauugca

SEQ ID NO: 1616398 - RNA, 17 nt, Human
gccugcuaauuccccag

SEQ ID NO: 1616399 - RNA, 13 nt, Human
gccucggacuuag

SEQ ID NO: 1616400 - RNA, 20 nt, Human
gccuccauccugaggcucca

SEQ ID NO: 1616401 - RNA, 16 nt, Human
gccuccauccugaggc

SEQ ID NO: 1616402 - RNA, 21 nt, Human
gccuccuuugugaggaagccg

SEQ ID NO: 1616403 - RNA, 20 nt, Human
gccuccuuugugaggaagcc

SEQ ID NO: 1616404 - RNA, 19 nt, Human
gccuccuuugugaggaagc

SEQ ID NO: 1616405 - RNA, 11 nt, Human
gccuccaugcu

SEQ ID NO: 1616406 - RNA, 17 nt, Human
gccuccaagcuccaucu

SEQ ID NO: 1616407 - RNA, 12 nt, Human
ggaagacuuugg

SEQ ID NO: 1616408 - RNA, 20 nt, Human
ggaagacuucaucccucugg

SEQ ID NO: 1616409 - RNA, 17 nt, Human
ggaagacuucaucccuc

SEQ ID NO: 1616410 - RNA, 22 nt, Human
ggaagacaaugugaaaagaaaa

SEQ ID NO: 1616411 - RNA, 21 nt, Human
ggaacaaggcaaggcugucaa

SEQ ID NO: 1616412 - RNA, 17 nt, Human
ggaacaaggcaaggcug

SEQ ID NO: 1616413 - RNA, 15 nt, Human
ggaacaaggcaaggc

SEQ ID NO: 1616414 - RNA, 17 nt, Human
ggaaaugucaacaagua

SEQ ID NO: 1616415 - RNA, 22 nt, Human
ggaaaugggcagagcagagacc

SEQ ID NO: 1616416 - RNA, 18 nt, Human
ggaaaugggcagagcaga

SEQ ID NO: 1616417 - RNA, 17 nt, Human
ggaaaugggcagagcag

SEQ ID NO: 1616418 - RNA, 16 nt, Human
ggaaaugggcagagca

SEQ ID NO: 1616419 - RNA, 14 nt, Human
ggaaaugggcagag

SEQ ID NO: 1616420 - RNA, 21 nt, Human
ggaaacuaggugcauauuuau

SEQ ID NO: 1616421 - RNA, 19 nt, Human
ggaacacuccuucacagau

SEQ ID NO: 1616422 - RNA, 15 nt, Human
ggaacacuccuucac

SEQ ID NO: 1616423 - RNA, 23 nt, Human
ggaacaaggcaaggcugucaauu

SEQ ID NO: 1616424 - RNA, 13 nt, Human
ggaacaccuccuc

SEQ ID NO: 1616425 - RNA, 17 nt, Human
ggaacaccauaggucac

SEQ ID NO: 1616426 - RNA, 16 nt, Human
ggaagacaaugugaaa

SEQ ID NO: 1616427 - RNA, 14 nt, Human
ggaagacaauguga

SEQ ID NO: 1616428 - RNA, 11 nt, Human
gcuuuucugau

SEQ ID NO: 1616429 - RNA, 18 nt, Human
gcuuuugucuaugggacu

SEQ ID NO: 1616430 - RNA, 15 nt, Human
gcuuuuggucugugu

SEQ ID NO: 1616431 - RNA, 16 nt, Human
gcuuuucugauccagu

SEQ ID NO: 1616432 - RNA, 15 nt, Human
gcuuuucugauccag

SEQ ID NO: 1616433 - RNA, 12 nt, Human
gcuuuucugauc

SEQ ID NO: 1616434 - RNA, 12 nt, Human
gcuuuugugcau

SEQ ID NO: 1616435 - RNA, 20 nt, Human
gcuuuuuuaucaugugaaau

SEQ ID NO: 1616436 - RNA, 18 nt, Human
gcuuuuuuaucaugugaa

SEQ ID NO: 1616437 - RNA, 15 nt, Human
gcuuuuuuaucaugu

SEQ ID NO: 1616438 - RNA, 16 nt, Human
ggaaacccagcucugg

SEQ ID NO: 1616439 - RNA, 18 nt, Human
ggaaaauuuuaaaaauac

SEQ ID NO: 1616440 - RNA, 22 nt, Human
gcuuuuuucucugauacagaaa

SEQ ID NO: 1616441 - RNA, 17 nt, Human
gcuuugaucccuucuua

SEQ ID NO: 1616442 - RNA, 14 nt, Human
gcuuugaucccuuc

SEQ ID NO: 1616443 - RNA, 19 nt, Human
gcuuccuggcaauagucaa

SEQ ID NO: 1616444 - RNA, 23 nt, Human
gcuuccagugaggcucugcccuu

SEQ ID NO: 1616445 - RNA, 12 nt, Human
gcuucuucagag

SEQ ID NO: 1616446 - RNA, 15 nt, Human
gcuucuucagagacu

SEQ ID NO: 1616447 - RNA, 17 nt, Human
gcuuguaaauagcucag

SEQ ID NO: 1616448 - RNA, 22 nt, Human
gcuugaccuuuaagagaaauga

SEQ ID NO: 1616449 - RNA, 16 nt, Human
gcuugaccgugaggcc

SEQ ID NO: 1616450 - RNA, 18 nt, Human
gcuugaccuuuaagagaa

SEQ ID NO: 1616451 - RNA, 23 nt, Human
gcuugaccgugaggccagagaca

SEQ ID NO: 1616452 - RNA, 19 nt, Human
gcuuguaaauagcucaggu

SEQ ID NO: 1616453 - RNA, 18 nt, Human
gcuuguaaauagcucagg

SEQ ID NO: 1616454 - RNA, 21 nt, Human
gcuuuccccaugucucgacuc

SEQ ID NO: 1616455 - RNA, 22 nt, Human
gcuuuccccaugucucgacuca

SEQ ID NO: 1616456 - RNA, 16 nt, Human
gcuuuccucuuccuga

SEQ ID NO: 1616457 - RNA, 13 nt, Human
gcuguauuuuaaa

SEQ ID NO: 1616458 - RNA, 12 nt, Human
gcuguauuuuaa

SEQ ID NO: 1616459 - RNA, 19 nt, Human
gcuguauuagucacagaga

SEQ ID NO: 1616460 - RNA, 23 nt, Human
gcugguucaggguuggccccugc

SEQ ID NO: 1616461 - RNA, 15 nt, Human
gcuucaguggcagcu

SEQ ID NO: 1616462 - RNA, 14 nt, Human
gcuucaguggcagc

SEQ ID NO: 1616463 - RNA, 14 nt, Human
gcuucaaggauccu

SEQ ID NO: 1616464 - RNA, 18 nt, Human
gcuucaaggauccugagc

SEQ ID NO: 1616465 - RNA, 16 nt, Human
gcuucaaauuguaagc

SEQ ID NO: 1616466 - RNA, 12 nt, Human
gcugugccucug

SEQ ID NO: 1616467 - RNA, 14 nt, Human
gcuguuggcugggg

SEQ ID NO: 1616468 - RNA, 13 nt, Human
gcuguuggcuggg

SEQ ID NO: 1616469 - RNA, 15 nt, Human
gcugcacccucaggc

SEQ ID NO: 1616470 - RNA, 13 nt, Human
gcugcacccucag

SEQ ID NO: 1616471 - RNA, 16 nt, Human
gcugcacccucaggca

SEQ ID NO: 1616472 - RNA, 13 nt, Human
gcugccauccagg

SEQ ID NO: 1616473 - RNA, 12 nt, Human
gcugccauccag

SEQ ID NO: 1616474 - RNA, 12 nt, Human
gcugcugacagu

SEQ ID NO: 1616475 - RNA, 16 nt, Human
gcugccccuggcagcc

SEQ ID NO: 1616476 - RNA, 15 nt, Human
gcugccccuggcagc

SEQ ID NO: 1616477 - RNA, 13 nt, Human
gcugccccuggca

SEQ ID NO: 1616478 - RNA, 17 nt, Human
gcugccauccagguuca

SEQ ID NO: 1616479 - RNA, 17 nt, Human
gcugccccuggcagccc

SEQ ID NO: 1616480 - RNA, 16 nt, Human
gcugaaacaacaaaua

SEQ ID NO: 1616481 - RNA, 14 nt, Human
gcucuguccuggga

SEQ ID NO: 1616482 - RNA, 17 nt, Human
gcucuggagcccacugu

SEQ ID NO: 1616483 - RNA, 13 nt, Human
gcugacagacaca

SEQ ID NO: 1616484 - RNA, 16 nt, Human
gcugagccucagucuc

SEQ ID NO: 1616485 - RNA, 12 nt, Human
gcugagccucag

SEQ ID NO: 1616486 - RNA, 22 nt, Human
gcugaauacagaggcaacugca

SEQ ID NO: 1616487 - RNA, 17 nt, Human
gcugaauacagaggcaa

SEQ ID NO: 1616488 - RNA, 20 nt, Human
gcugaacuuguuuucuggga

SEQ ID NO: 1616489 - RNA, 15 nt, Human
gcucugcccauccug

SEQ ID NO: 1616490 - RNA, 23 nt, Human
gcucugaucauccacugugccau

SEQ ID NO: 1616491 - RNA, 22 nt, Human
gcucugaucauccacugugcca

SEQ ID NO: 1616492 - RNA, 21 nt, Human
gcucugaucauccacugugcc

SEQ ID NO: 1616493 - RNA, 21 nt, Human
gcucugcccauccugccccug

SEQ ID NO: 1616494 - RNA, 16 nt, Human
gcucuggagcccacug

SEQ ID NO: 1616495 - RNA, 15 nt, Human
gcucuggagcccacu

SEQ ID NO: 1616496 - RNA, 20 nt, Human
gcucugaucauccacugugc

SEQ ID NO: 1616497 - RNA, 20 nt, Human
gcuccacuuggucugugaga

SEQ ID NO: 1616498 - RNA, 9 nt, Human
gcuccagac

SEQ ID NO: 1616499 - RNA, 23 nt, Human
gcuccagacacauguccaagaag

SEQ ID NO: 1616500 - RNA, 21 nt, Human
gcuccagacacauguccaaga

SEQ ID NO: 1616501 - RNA, 18 nt, Human
gcuccagacacaugucca

SEQ ID NO: 1616502 - RNA, 14 nt, Human
gcuccagcucacca

SEQ ID NO: 1616503 - RNA, 13 nt, Human
gcuccagcucacc

SEQ ID NO: 1616504 - RNA, 17 nt, Human
gcuccagcucaccagcc

SEQ ID NO: 1616505 - RNA, 15 nt, Human
gcuccucuccccagc

SEQ ID NO: 1616506 - RNA, 19 nt, Human
gcuccucccggugcccaag

SEQ ID NO: 1616507 - RNA, 20 nt, Human
gcucucaggccagcugcuug

SEQ ID NO: 1616508 - RNA, 19 nt, Human
gcucucaggccagcugcuu

SEQ ID NO: 1616509 - RNA, 18 nt, Human
gcucucaggccagcugcu

SEQ ID NO: 1616510 - RNA, 17 nt, Human
gcucucaggccagcugc

SEQ ID NO: 1616511 - RNA, 19 nt, Human
gcuccucuccccagcaagu

SEQ ID NO: 1616512 - RNA, 16 nt, Human
gcuccucuccccagca

SEQ ID NO: 1616513 - RNA, 19 nt, Human
gcucuacugaggugcuaug

SEQ ID NO: 1616514 - RNA, 18 nt, Human
gcucucaaguuaucaggg

SEQ ID NO: 1616515 - RNA, 16 nt, Human
ggagcaucagugcccu

SEQ ID NO: 1616516 - RNA, 20 nt, Human
ggaggucaaggcugcaguga

SEQ ID NO: 1616517 - RNA, 14 nt, Human
ggaggugaccccag

SEQ ID NO: 1616518 - RNA, 14 nt, Human
ggaggucgaggcag

SEQ ID NO: 1616519 - RNA, 16 nt, Human
ggaggggggagguggg

SEQ ID NO: 1616520 - RNA, 21 nt, Human
ggagcugccuguucagcucca

SEQ ID NO: 1616521 - RNA, 12 nt, Human
ggagcugccugu

SEQ ID NO: 1616522 - RNA, 22 nt, Human
ggagccccgaggccuucucuga

SEQ ID NO: 1616523 - RNA, 16 nt, Human
ggagccccgaggccuu

SEQ ID NO: 1616524 - RNA, 16 nt, Human
ggagccaauggagacu

SEQ ID NO: 1616525 - RNA, 19 nt, Human
ggaggaaggaaacccagcu

SEQ ID NO: 1616526 - RNA, 23 nt, Human
ggaggaaggaaacccagcucugg

SEQ ID NO: 1616527 - RNA, 20 nt, Human
ggaggaaggaaacccagcuc

SEQ ID NO: 1616528 - RNA, 11 nt, Human
ggaggccagcc

SEQ ID NO: 1616529 - RNA, 12 nt, Human
ggaggccagccu

SEQ ID NO: 1616530 - RNA, 22 nt, Human
ggauguugaaaaaguucugcag

SEQ ID NO: 1616531 - RNA, 16 nt, Human
ggauguucugggacac

SEQ ID NO: 1616532 - RNA, 15 nt, Human
ggauguucugggaca

SEQ ID NO: 1616533 - RNA, 24 nt, Human
ggcacagaaaauggaagacagcuc

SEQ ID NO: 1616534 - RNA, 22 nt, Human
ggcacaaucucggcucacugca

SEQ ID NO: 1616535 - RNA, 16 nt, Human
ggcacagggcaguggg

SEQ ID NO: 1616536 - RNA, 14 nt, Human
ggauccugagccag

SEQ ID NO: 1616537 - RNA, 13 nt, Human
ggauccugagcca

SEQ ID NO: 1616538 - RNA, 14 nt, Human
ggauccuccaggug

SEQ ID NO: 1616539 - RNA, 15 nt, Human
ggauccuccaggugc

SEQ ID NO: 1616540 - RNA, 12 nt, Human
ggauggcaagau

SEQ ID NO: 1616541 - RNA, 18 nt, Human
ggauggauuuccagccaa

SEQ ID NO: 1616542 - RNA, 16 nt, Human
ggauggggcugcaccg

SEQ ID NO: 1616543 - RNA, 21 nt, Human
ggauguacaaggacagccccu

SEQ ID NO: 1616544 - RNA, 14 nt, Human
ggaguggccacaga

SEQ ID NO: 1616545 - RNA, 15 nt, Human
ggaguucugguuccu

SEQ ID NO: 1616546 - RNA, 21 nt, Human
ggaguuggaagugugugaucu

SEQ ID NO: 1616547 - RNA, 22 nt, Human
ggauaauaaggaaaaguuuaau

SEQ ID NO: 1616548 - RNA, 12 nt, Human
ggauaaaugcca

SEQ ID NO: 1616549 - RNA, 18 nt, Human
ggcccuucucuccagccc

SEQ ID NO: 1616550 - RNA, 19 nt, Human
ggcccuucucuccagcccc

SEQ ID NO: 1616551 - RNA, 17 nt, Human
ggcccuuccucuccacu

SEQ ID NO: 1616552 - RNA, 17 nt, Human
ggcccuucucuccagcc

SEQ ID NO: 1616553 - RNA, 16 nt, Human
ggcccuucucuccagc

SEQ ID NO: 1616554 - RNA, 18 nt, Human
ggcccuuccucuccacug

SEQ ID NO: 1616555 - RNA, 15 nt, Human
ggcccuuccucucca

SEQ ID NO: 1616556 - RNA, 13 nt, Human
ggcccuuccucuc

SEQ ID NO: 1616557 - RNA, 15 nt, Human
ggcccgacagccugg

SEQ ID NO: 1616558 - RNA, 19 nt, Human
ggcagugggagcugccugu

SEQ ID NO: 1616559 - RNA, 18 nt, Human
ggcagugggagcugccug

SEQ ID NO: 1616560 - RNA, 18 nt, Human
ggcauccaguaucuugaa

SEQ ID NO: 1616561 - RNA, 17 nt, Human
ggcagugggagcugccu

SEQ ID NO: 1616562 - RNA, 24 nt, Human
ggcacugcuuccagugaggcucug

SEQ ID NO: 1616563 - RNA, 16 nt, Human
ggcaccagcagccugg

SEQ ID NO: 1616564 - RNA, 15 nt, Human
ggcaccagcagccug

SEQ ID NO: 1616565 - RNA, 15 nt, Human
ggccagugcuccagc

SEQ ID NO: 1616566 - RNA, 13 nt, Human
ggccagugcucca

SEQ ID NO: 1616567 - RNA, 16 nt, Human
ggccagugugacaagg

SEQ ID NO: 1616568 - RNA, 17 nt, Human
ggccaaacucaccugcc

SEQ ID NO: 1616569 - RNA, 21 nt, Human
ggccaaacucaccugccccuc

SEQ ID NO: 1616570 - RNA, 14 nt, Human
ggccaggcuggucu

SEQ ID NO: 1616571 - RNA, 18 nt, Human
ggccaggcuggucucaaa

SEQ ID NO: 1616572 - RNA, 16 nt, Human
ggccaggcuggucuca

SEQ ID NO: 1616573 - RNA, 23 nt, Human
ggcucagcggggacagcuccuuc

SEQ ID NO: 1616574 - RNA, 22 nt, Human
ggcucagcggggacagcuccuu

SEQ ID NO: 1616575 - RNA, 21 nt, Human
ggcucagcggggacagcuccu

SEQ ID NO: 1616576 - RNA, 23 nt, Human
ggcucagcaaaagaugcuucuca

SEQ ID NO: 1616577 - RNA, 19 nt, Human
ggcgugcaguggugcgauc

SEQ ID NO: 1616578 - RNA, 16 nt, Human
ggcucacugcagccuc

SEQ ID NO: 1616579 - RNA, 17 nt, Human
ggcucacugcagccuca

SEQ ID NO: 1616580 - RNA, 19 nt, Human
ggcucacugcauccuccgc

SEQ ID NO: 1616581 - RNA, 16 nt, Human
ggcucacugcauccuc

SEQ ID NO: 1616582 - RNA, 13 nt, Human
ggccuccauccug

SEQ ID NO: 1616583 - RNA, 15 nt, Human
ggccugagcugggau

SEQ ID NO: 1616584 - RNA, 23 nt, Human
ggccuucggccuccauccugagg

SEQ ID NO: 1616585 - RNA, 12 nt, Human
ggccuucucuga

SEQ ID NO: 1616586 - RNA, 21 nt, Human
ggccugugucuaguuguuuga

SEQ ID NO: 1616587 - RNA, 20 nt, Human
ggccuguggaucaaauccag

SEQ ID NO: 1616588 - RNA, 21 nt, Human
ggccuggccagaugcaccagc

SEQ ID NO: 1616589 - RNA, 14 nt, Human
ggccuuuggcuuca

SEQ ID NO: 1616590 - RNA, 13 nt, Human
ggccuuuggcuuc

SEQ ID NO: 1616591 - RNA, 16 nt, Human
ggccuucucugaagga

SEQ ID NO: 1616592 - RNA, 15 nt, Human
ggccuucucugaagg

SEQ ID NO: 1616593 - RNA, 23 nt, Human
gggacagaggggguggccuccca

SEQ ID NO: 1616594 - RNA, 22 nt, Human
gggacagaggggguggccuccc

SEQ ID NO: 1616595 - RNA, 13 nt, Human
gggacagaggggg

SEQ ID NO: 1616596 - RNA, 13 nt, Human
gggaaggauacaa

SEQ ID NO: 1616597 - RNA, 16 nt, Human
gggaaggauacaaaag

SEQ ID NO: 1616598 - RNA, 23 nt, Human
aaaaauaugaccacacuccagcu

SEQ ID NO: 1616599 - RNA, 21 nt, Human
aaaaauaugaccacacuccag

SEQ ID NO: 1616600 - RNA, 14 nt, Human
aaaaauauuuuaug

SEQ ID NO: 1616601 - RNA, 21 nt, Human
gggacauuugcucauggaauu

SEQ ID NO: 1616602 - RNA, 20 nt, Human
gggacauuugcucauggaau

SEQ ID NO: 1616603 - RNA, 21 nt, Human
gggacagcuccuucuguccua

SEQ ID NO: 1616604 - RNA, 22 nt, Human
aaaaauggaacauaaaauacaa

SEQ ID NO: 1616605 - RNA, 14 nt, Human
aaaaaucucaaauu

SEQ ID NO: 1616606 - RNA, 17 nt, Human
aaaaaucucaaauuucu

SEQ ID NO: 1616607 - RNA, 12 nt, Human
aaaaccacagca

SEQ ID NO: 1616608 - RNA, 15 nt, Human
aaaacaugcuacaca

SEQ ID NO: 1616609 - RNA, 17 nt, Human
aaaagaugaaaauauuu

SEQ ID NO: 1616610 - RNA, 13 nt, Human
aaaagaugcuucu

SEQ ID NO: 1616611 - RNA, 23 nt, Human
aaaacugcugacuguuuucucuu

SEQ ID NO: 1616612 - RNA, 13 nt, Human
aaaacucauuuuu

SEQ ID NO: 1616613 - RNA, 22 nt, Human
aaaacugcugacuguuuucucu

SEQ ID NO: 1616614 - RNA, 13 nt, Human
aaaaccacagcag

SEQ ID NO: 1616615 - RNA, 14 nt, Human
aaaaccacagcagu

SEQ ID NO: 1616616 - RNA, 15 nt, Human
aaaacccagauaaag

SEQ ID NO: 1616617 - RNA, 17 nt, Human
gggauuguaaaauggug

SEQ ID NO: 1616618 - RNA, 16 nt, Human
gggauuguaaaauggu

SEQ ID NO: 1616619 - RNA, 15 nt, Human
gggauuacaggugug

SEQ ID NO: 1616620 - RNA, 12 nt, Human
gggauuacaggu

SEQ ID NO: 1616621 - RNA, 21 nt, Human
gggauuacaggcuccugccac

SEQ ID NO: 1616622 - RNA, 16 nt, Human
gggauuacaggcuccu

SEQ ID NO: 1616623 - RNA, 13 nt, Human
gggauuacaggcu

SEQ ID NO: 1616624 - RNA, 14 nt, Human
gggauuacaggcgu

SEQ ID NO: 1616625 - RNA, 16 nt, Human
gggcagagcagagacc

SEQ ID NO: 1616626 - RNA, 20 nt, Human
gggcaacccccagccugcua

SEQ ID NO: 1616627 - RNA, 18 nt, Human
gggcaacccccagccugc

SEQ ID NO: 1616628 - RNA, 16 nt, Human
gggcaacccccagccu

SEQ ID NO: 1616629 - RNA, 22 nt, Human
gggcagagcagagaccaucccu

SEQ ID NO: 1616630 - RNA, 17 nt, Human
gggcagagcagagacca

SEQ ID NO: 1616631 - RNA, 23 nt, Human
gggcagagcagagaccaucccug

SEQ ID NO: 1616632 - RNA, 12 nt, Human
gggcagcugccu

SEQ ID NO: 1616633 - RNA, 19 nt, Human
aaaagguaugcaaucaaau

SEQ ID NO: 1616634 - RNA, 19 nt, Human
gggaggucgaggcaggagg

SEQ ID NO: 1616635 - RNA, 18 nt, Human
gggaggucgaggcaggag

SEQ ID NO: 1616636 - RNA, 17 nt, Human
gggaggucgaggcagga

SEQ ID NO: 1616637 - RNA, 18 nt, Human
gggagggcuccagacaca

SEQ ID NO: 1616638 - RNA, 17 nt, Human
gggagggcuccagacac

SEQ ID NO: 1616639 - RNA, 15 nt, Human
gggagggcuccagac

SEQ ID NO: 1616640 - RNA, 14 nt, Human
gggagggcuccaga

SEQ ID NO: 1616641 - RNA, 22 nt, Human
gggaggcucuggagcccacugu

SEQ ID NO: 1616642 - RNA, 15 nt, Human
aaaaugugauaugua

SEQ ID NO: 1616643 - RNA, 22 nt, Human
gggcuggguucuacccaggugc

SEQ ID NO: 1616644 - RNA, 22 nt, Human
aaaauuuuuucucuaggaaaua

SEQ ID NO: 1616645 - RNA, 12 nt, Human
aaaaugugugug

SEQ ID NO: 1616646 - RNA, 18 nt, Human
gggcugcaugcgggcuuc

SEQ ID NO: 1616647 - RNA, 21 nt, Human
gggcugcaugcgggcuuccuc

SEQ ID NO: 1616648 - RNA, 18 nt, Human
gggcucagcaaaagaugc

SEQ ID NO: 1616649 - RNA, 22 nt, Human
gggcugcaccggcuggccuggc

SEQ ID NO: 1616650 - RNA, 10 nt, Human
gggcucagca

SEQ ID NO: 1616651 - RNA, 20 nt, Human
gggcuggguucuacccaggu

SEQ ID NO: 1616652 - RNA, 12 nt, Human
gggcugggcaga

SEQ ID NO: 1616653 - RNA, 18 nt, Human
gggcugggagcucugcag

SEQ ID NO: 1616654 - RNA, 16 nt, Human
gggcugggagcucugc

SEQ ID NO: 1616655 - RNA, 21 nt, Human
gggcugcccuggugcugccac

SEQ ID NO: 1616656 - RNA, 15 nt, Human
gggcugcccuggugc

SEQ ID NO: 1616657 - RNA, 14 nt, Human
gggcugcccuggug

SEQ ID NO: 1616658 - RNA, 13 nt, Human
gggcugcccuggu

SEQ ID NO: 1616659 - RNA, 20 nt, Human
aaacagucucaggaaaucaa

SEQ ID NO: 1616660 - RNA, 20 nt, Human
aaacaagcacuaaacaaaga

SEQ ID NO: 1616661 - RNA, 16 nt, Human
aaacacauuuuucuua

SEQ ID NO: 1616662 - RNA, 20 nt, Human
aaacaagaccacguuucuaa

SEQ ID NO: 1616663 - RNA, 20 nt, Human
ggggacagcuccuucugucc

SEQ ID NO: 1616664 - RNA, 14 nt, Human
ggggacagcuccuu

SEQ ID NO: 1616665 - RNA, 12 nt, Human
ggggacagcucc

SEQ ID NO: 1616666 - RNA, 18 nt, Human
aaacauccuacaagacac

SEQ ID NO: 1616667 - RNA, 22 nt, Human
aaacauccuacaagacacagug

SEQ ID NO: 1616668 - RNA, 19 nt, Human
aaaaguauguuagugcaaa

SEQ ID NO: 1616669 - RNA, 21 nt, Human
aaaaugagccuggcaagaaug

SEQ ID NO: 1616670 - RNA, 14 nt, Human
aaaaugagccuggc

SEQ ID NO: 1616671 - RNA, 11 nt, Human
gggccaggagc

SEQ ID NO: 1616672 - RNA, 13 nt, Human
gggccaggcuggg

SEQ ID NO: 1616673 - RNA, 21 nt, Human
aaaaugcuguauuagucacag

SEQ ID NO: 1616674 - RNA, 12 nt, Human
gggccaggagcc

SEQ ID NO: 1616675 - RNA, 21 nt, Human
gggccaggcugggucgcccug

SEQ ID NO: 1616676 - RNA, 15 nt, Human
gggccaggcuggguc

SEQ ID NO: 1616677 - RNA, 14 nt, Human
gggccaggcugggu

SEQ ID NO: 1616678 - RNA, 14 nt, Human
gggccagugcucca

SEQ ID NO: 1616679 - RNA, 18 nt, Human
gggccagugcuccagcca

SEQ ID NO: 1616680 - RNA, 23 nt, Human
gggccaguuggucccccuuccau

SEQ ID NO: 1616681 - RNA, 22 nt, Human
gggccaguuggucccccuucca

SEQ ID NO: 1616682 - RNA, 18 nt, Human
gggccaguuggucccccu

SEQ ID NO: 1616683 - RNA, 14 nt, Human
gggccaguuggucc

SEQ ID NO: 1616684 - RNA, 20 nt, Human
gggccucuuaugggcugggu

SEQ ID NO: 1616685 - RNA, 13 nt, Human
gggccuccugugu

SEQ ID NO: 1616686 - RNA, 15 nt, Human
gggccuccugugugu

SEQ ID NO: 1616687 - RNA, 22 nt, Human
gggccucggacuuagcugggag

SEQ ID NO: 1616688 - RNA, 15 nt, Human
gggcgggaggauguu

SEQ ID NO: 1616689 - RNA, 23 nt, Human
gggcuacaccuuagccugcccuc

SEQ ID NO: 1616690 - RNA, 14 nt, Human
aaauaaugugaaac

SEQ ID NO: 1616691 - RNA, 20 nt, Human
aaauaauuuuuauauuugaa

SEQ ID NO: 1616692 - RNA, 18 nt, Human
aaauaauuuuuauauuug

SEQ ID NO: 1616693 - RNA, 15 nt, Human
aaauaauuuuuauau

SEQ ID NO: 1616694 - RNA, 13 nt, Human
aaauaaugugaaa

SEQ ID NO: 1616695 - RNA, 12 nt, Human
aaauaaugugaa

SEQ ID NO: 1616696 - RNA, 21 nt, Human
aaaguucccuacuuccuguga

SEQ ID NO: 1616697 - RNA, 20 nt, Human
gguuuggacaaaauggaaua

SEQ ID NO: 1616698 - RNA, 23 nt, Human
aaaguuucucuuuucaaaacauu

SEQ ID NO: 1616699 - RNA, 21 nt, Human
aaaguuucucuuuucaaaaca

SEQ ID NO: 1616700 - RNA, 16 nt, Human
aaaguuuguugaaaca

SEQ ID NO: 1616701 - RNA, 16 nt, Human
aaaguugaauuuuaca

SEQ ID NO: 1616702 - RNA, 22 nt, Human
aaaguugaauuuauuggcuuuu

SEQ ID NO: 1616703 - RNA, 16 nt, Human
aaaguugaauuuauug

SEQ ID NO: 1616704 - RNA, 23 nt, Human
aaaguucccuacuuccugugacu

SEQ ID NO: 1616705 - RNA, 13 nt, Human
aaaguugaauuua

SEQ ID NO: 1616706 - RNA, 19 nt, Human
aaaguuuaauauuaaagcc

SEQ ID NO: 1616707 - RNA, 16 nt, Human
aaaguuuaauauuaaa

SEQ ID NO: 1616708 - RNA, 22 nt, Human
aaaguuuaauauuaaagccaug

SEQ ID NO: 1616709 - RNA, 21 nt, Human
aaaguuuaauauuaaagccau

SEQ ID NO: 1616710 - RNA, 20 nt, Human
aaaguuuaauauuaaagcca

SEQ ID NO: 1616711 - RNA, 16 nt, Human
ggugugaccacugcag

SEQ ID NO: 1616712 - RNA, 16 nt, Human
ggugugacugaauuuc

SEQ ID NO: 1616713 - RNA, 18 nt, Human
ggugugagucaccaagcc

SEQ ID NO: 1616714 - RNA, 16 nt, Human
ggugucgggcaugaca

SEQ ID NO: 1616715 - RNA, 13 nt, Human
ggugucgggcaug

SEQ ID NO: 1616716 - RNA, 23 nt, Human
gguggggucacucuggcagcuca

SEQ ID NO: 1616717 - RNA, 15 nt, Human
gguggggucacucug

SEQ ID NO: 1616718 - RNA, 17 nt, Human
gguggggggggugcugg

SEQ ID NO: 1616719 - RNA, 17 nt, Human
gguggggcagcuugagg

SEQ ID NO: 1616720 - RNA, 13 nt, Human
gguggggcagcuu

SEQ ID NO: 1616721 - RNA, 19 nt, Human
ggugggauccuccaggugc

SEQ ID NO: 1616722 - RNA, 15 nt, Human
ggugggauccuccag

SEQ ID NO: 1616723 - RNA, 14 nt, Human
ggugggauccucca

SEQ ID NO: 1616724 - RNA, 20 nt, Human
ggugggaggauugcuugagc

SEQ ID NO: 1616725 - RNA, 18 nt, Human
aaagccuguuuaagagac

SEQ ID NO: 1616726 - RNA, 16 nt, Human
aaagccuguuuaagag

SEQ ID NO: 1616727 - RNA, 16 nt, Human
gguuuagaaagcuugc

SEQ ID NO: 1616728 - RNA, 20 nt, Human
gguuccuuccucugagccuu

SEQ ID NO: 1616729 - RNA, 19 nt, Human
gguuccuuccucugagccu

SEQ ID NO: 1616730 - RNA, 14 nt, Human
gguuucagaaaugu

SEQ ID NO: 1616731 - RNA, 15 nt, Human
gguuucagaaaugug

SEQ ID NO: 1616732 - RNA, 12 nt, Human
gguuucagaaau

SEQ ID NO: 1616733 - RNA, 13 nt, Human
gguuucagaaaug

SEQ ID NO: 1616734 - RNA, 21 nt, Human
gguucccuuugacgccauccc

SEQ ID NO: 1616735 - RNA, 22 nt, Human
gguucccuuugacgccauccca

SEQ ID NO: 1616736 - RNA, 16 nt, Human
gguuccuccccuccuc

SEQ ID NO: 1616737 - RNA, 24 nt, Human
gguuccagcaauucuccugccuca

SEQ ID NO: 1616738 - RNA, 15 nt, Human
gguuccccuguucac

SEQ ID NO: 1616739 - RNA, 23 nt, Human
gguuccagcaauucuccugccuc

SEQ ID NO: 1616740 - RNA, 21 nt, Human
gguucaggguuggccccugcc

SEQ ID NO: 1616741 - RNA, 18 nt, Human
gguucaggguuggccccu

SEQ ID NO: 1616742 - RNA, 22 nt, Human
gguucaggguuggccccugccc

SEQ ID NO: 1616743 - RNA, 13 nt, Human
ggugugcucugau

SEQ ID NO: 1616744 - RNA, 21 nt, Human
ggugugcggccuuuggcuuca

SEQ ID NO: 1616745 - RNA, 12 nt, Human
gguguggaagag

SEQ ID NO: 1616746 - RNA, 12 nt, Human
gguguggagaag

SEQ ID NO: 1616747 - RNA, 13 nt, Human
aaagcaaaggaga

SEQ ID NO: 1616748 - RNA, 15 nt, Human
aaagacuauucaaac

SEQ ID NO: 1616749 - RNA, 17 nt, Human
aaagacuauucaaacag

SEQ ID NO: 1616750 - RNA, 23 nt, Human
gguccugcugcaguugccaguca

SEQ ID NO: 1616751 - RNA, 21 nt, Human
gguccugcugcaguugccagu

SEQ ID NO: 1616752 - RNA, 13 nt, Human
aaagcaaaugucu

SEQ ID NO: 1616753 - RNA, 13 nt, Human
ggucggaaaacau

SEQ ID NO: 1616754 - RNA, 17 nt, Human
ggucuacacugugcuga

SEQ ID NO: 1616755 - RNA, 14 nt, Human
ggucggaaaacaug

SEQ ID NO: 1616756 - RNA, 17 nt, Human
aaagcagggacuugaac

SEQ ID NO: 1616757 - RNA, 19 nt, Human
aaagcaggcagaacucauc

SEQ ID NO: 1616758 - RNA, 17 nt, Human
aaagcaggcagaacuca

SEQ ID NO: 1616759 - RNA, 16 nt, Human
aaagcagcguuucuau

SEQ ID NO: 1616760 - RNA, 18 nt, Human
aaagcagcguuucuauga

SEQ ID NO: 1616761 - RNA, 22 nt, Human
aaagcagcguuucuaugacaca

SEQ ID NO: 1616762 - RNA, 21 nt, Human
gguggaugccugguggcagcu

SEQ ID NO: 1616763 - RNA, 14 nt, Human
gguggaugccuggu

SEQ ID NO: 1616764 - RNA, 15 nt, Human
ggugccaguuauggc

SEQ ID NO: 1616765 - RNA, 20 nt, Human
ggugcugggccccugccucu

SEQ ID NO: 1616766 - RNA, 20 nt, Human
ggugcaaugaccuuucaaua

SEQ ID NO: 1616767 - RNA, 19 nt, Human
ggugcaaugaccuuucaau

SEQ ID NO: 1616768 - RNA, 18 nt, Human
ggugcaaugaccuuucaa

SEQ ID NO: 1616769 - RNA, 20 nt, Human
ggguuuuauuguuuaaaauc

SEQ ID NO: 1616770 - RNA, 17 nt, Human
ggguuucuaaagcugcc

SEQ ID NO: 1616771 - RNA, 20 nt, Human
gguaacaggcagauacagga

SEQ ID NO: 1616772 - RNA, 14 nt, Human
gguaacaggcagau

SEQ ID NO: 1616773 - RNA, 18 nt, Human
gguaacuagggaagauaa

SEQ ID NO: 1616774 - RNA, 23 nt, Human
gguacaaccuguucugcuuuccu

SEQ ID NO: 1616775 - RNA, 24 nt, Human
gguacaaccuguucugcuuuccuc

SEQ ID NO: 1616776 - RNA, 18 nt, Human
gguaaucgaccugccucg

SEQ ID NO: 1616777 - RNA, 17 nt, Human
gguaaucgaccugccuc

SEQ ID NO: 1616778 - RNA, 14 nt, Human
gguaaucgaccugc

SEQ ID NO: 1616779 - RNA, 15 nt, Human
ggguggcaccagcag

SEQ ID NO: 1616780 - RNA, 17 nt, Human
ggguggaugccuggugg

SEQ ID NO: 1616781 - RNA, 13 nt, Human
ggguggaugccug

SEQ ID NO: 1616782 - RNA, 12 nt, Human
ggggccuggcag

SEQ ID NO: 1616783 - RNA, 11 nt, Human
ggggccuggca

SEQ ID NO: 1616784 - RNA, 20 nt, Human
ggguggggaccucaggccug

SEQ ID NO: 1616785 - RNA, 19 nt, Human
ggguggcaccagcagccug

SEQ ID NO: 1616786 - RNA, 17 nt, Human
ggguguggcgcagcaua

SEQ ID NO: 1616787 - RNA, 12 nt, Human
ggguggugaccu

SEQ ID NO: 1616788 - RNA, 18 nt, Human
ggguggggggggugcugg

SEQ ID NO: 1616789 - RNA, 14 nt, Human
aaagacuauucaaa

SEQ ID NO: 1616790 - RNA, 17 nt, Human
aaagacuaucuaaaugu

SEQ ID NO: 1616791 - RNA, 19 nt, Human
aaagacaccuacugagugg

SEQ ID NO: 1616792 - RNA, 13 nt, Human
aaagacaccuacu

SEQ ID NO: 1616793 - RNA, 15 nt, Human
gguccauagagagca

SEQ ID NO: 1616794 - RNA, 17 nt, Human
aaacuuuaccuuuuuua

SEQ ID NO: 1616795 - RNA, 22 nt, Human
aaacuuuaccuuuuuuauacau

SEQ ID NO: 1616796 - RNA, 18 nt, Human
aaacuuuacuauggcccu

SEQ ID NO: 1616797 - RNA, 12 nt, Human
aaacuuuacuau

SEQ ID NO: 1616798 - RNA, 18 nt, Human
aaagaaguggggacagag

SEQ ID NO: 1616799 - RNA, 16 nt, Human
gguccacccaggagcc

SEQ ID NO: 1616800 - RNA, 15 nt, Human
gguccacccaggagc

SEQ ID NO: 1616801 - RNA, 13 nt, Human
gguccacccagga

SEQ ID NO: 1616802 - RNA, 12 nt, Human
gguccacccagg

SEQ ID NO: 1616803 - RNA, 17 nt, Human
gguccacccaggagccc

SEQ ID NO: 1616804 - RNA, 19 nt, Human
gguccacccaggagccccg

SEQ ID NO: 1616805 - RNA, 14 nt, Human
gguaugcaaucaaa

SEQ ID NO: 1616806 - RNA, 22 nt, Human
gguaugaucacggcucacugca

SEQ ID NO: 1616807 - RNA, 16 nt, Human
gguccacaacacacag

SEQ ID NO: 1616808 - RNA, 14 nt, Human
gguagcuuuucccu

SEQ ID NO: 1616809 - RNA, 14 nt, Human
auucuucugcuuca

SEQ ID NO: 1616810 - RNA, 11 nt, Human
auucuuuccug

SEQ ID NO: 1616811 - RNA, 12 nt, Human
auucuucugcuu

SEQ ID NO: 1616812 - RNA, 11 nt, Human
auucuucugcu

SEQ ID NO: 1616813 - RNA, 13 nt, Human
auucuuuccugag

SEQ ID NO: 1616814 - RNA, 21 nt, Human
auugauaagaaccuuuugagu

SEQ ID NO: 1616815 - RNA, 15 nt, Human
auugcuacuguccua

SEQ ID NO: 1616816 - RNA, 17 nt, Human
auugauaugcuuauaca

SEQ ID NO: 1616817 - RNA, 22 nt, Human
auugcuacuguccuacccaccc

SEQ ID NO: 1616818 - RNA, 20 nt, Human
auugcuacuguccuacccac

SEQ ID NO: 1616819 - RNA, 13 nt, Human
auuguaauuauau

SEQ ID NO: 1616820 - RNA, 14 nt, Human
auuguaaaauggug

SEQ ID NO: 1616821 - RNA, 18 nt, Human
auugcuugagcucaggag

SEQ ID NO: 1616822 - RNA, 23 nt, Human
auugugucucuugguccugcugc

SEQ ID NO: 1616823 - RNA, 21 nt, Human
auugugucucuugguccugcu

SEQ ID NO: 1616824 - RNA, 14 nt, Human
auuguaauuauauc

SEQ ID NO: 1616825 - RNA, 16 nt, Human
auuguuagucucuuga

SEQ ID NO: 1616826 - RNA, 14 nt, Human
auugcuugagcuca

SEQ ID NO: 1616827 - RNA, 12 nt, Human
auugcugcuuga

SEQ ID NO: 1616828 - RNA, 23 nt, Human
auugcugauggugcaaugaccuu

SEQ ID NO: 1616829 - RNA, 19 nt, Human
auugcugauggugcaauga

SEQ ID NO: 1616830 - RNA, 18 nt, Human
auugcugauggugcaaug

SEQ ID NO: 1616831 - RNA, 16 nt, Human
auugcugauggugcaa

SEQ ID NO: 1616832 - RNA, 15 nt, Human
auugcugauggugca

SEQ ID NO: 1616833 - RNA, 12 nt, Human
auugcuccuuga

SEQ ID NO: 1616834 - RNA, 22 nt, Human
auucauagcagcuuauucacaa

SEQ ID NO: 1616835 - RNA, 19 nt, Human
auucauagcagcuuauuca

SEQ ID NO: 1616836 - RNA, 19 nt, Human
auucauaaugacuuaagca

SEQ ID NO: 1616837 - RNA, 21 nt, Human
auucauaauuauuauuuggcc

SEQ ID NO: 1616838 - RNA, 15 nt, Human
auucauaaugacuua

SEQ ID NO: 1616839 - RNA, 14 nt, Human
auucauaaugacuu

SEQ ID NO: 1616840 - RNA, 16 nt, Human
auuagggagagaagau

SEQ ID NO: 1616841 - RNA, 16 nt, Human
auuaggugugacugaa

SEQ ID NO: 1616842 - RNA, 18 nt, Human
auuaggugugacugaauu

SEQ ID NO: 1616843 - RNA, 17 nt, Human
auuaugaauuacauuug

SEQ ID NO: 1616844 - RNA, 14 nt, Human
auuaugaauuacau

SEQ ID NO: 1616845 - RNA, 18 nt, Human
auuaugaaacuuuuggaa

SEQ ID NO: 1616846 - RNA, 21 nt, Human
auuaugaaacuuguguaaaua

SEQ ID NO: 1616847 - RNA, 20 nt, Human
auuaugaaacuuguguaaau

SEQ ID NO: 1616848 - RNA, 18 nt, Human
auuaugaaacuuguguaa

SEQ ID NO: 1616849 - RNA, 21 nt, Human
auuaggugugacugaauuucu

SEQ ID NO: 1616850 - RNA, 15 nt, Human
auuaugaaacuugug

SEQ ID NO: 1616851 - RNA, 14 nt, Human
auuaugaaacuugu

SEQ ID NO: 1616852 - RNA, 18 nt, Human
auuaugaauuacauuugu

SEQ ID NO: 1616853 - RNA, 23 nt, Human
auuaugcaugaaguaauaugcac

SEQ ID NO: 1616854 - RNA, 17 nt, Human
auucaaaguugccuaaa

SEQ ID NO: 1616855 - RNA, 22 nt, Human
auucaaaguugccuaaauccau

SEQ ID NO: 1616856 - RNA, 21 nt, Human
auucaaaguugccuaaaucca

SEQ ID NO: 1616857 - RNA, 20 nt, Human
auucaaaguugccuaaaucc

SEQ ID NO: 1616858 - RNA, 18 nt, Human
auucaaaguugccuaaau

SEQ ID NO: 1616859 - RNA, 19 nt, Human
auucacaagacccaaaagg

SEQ ID NO: 1616860 - RNA, 20 nt, Human
auucaaugccccugaauuua

SEQ ID NO: 1616861 - RNA, 18 nt, Human
auucaaugccccugaauu

SEQ ID NO: 1616862 - RNA, 18 nt, Human
auucaaauguauuacagu

SEQ ID NO: 1616863 - RNA, 16 nt, Human
auucaaauguauuaca

SEQ ID NO: 1616864 - RNA, 18 nt, Human
auguuugccucugccucu

SEQ ID NO: 1616865 - RNA, 23 nt, Human
auguuugggagacugcugaguca

SEQ ID NO: 1616866 - RNA, 22 nt, Human
auuacaagcgugagccacugca

SEQ ID NO: 1616867 - RNA, 17 nt, Human
auuacaggaaguacugg

SEQ ID NO: 1616868 - RNA, 19 nt, Human
auuacaguggggaaugaag

SEQ ID NO: 1616869 - RNA, 16 nt, Human
auuacaguauaauuaa

SEQ ID NO: 1616870 - RNA, 15 nt, Human
auuacaguauaauua

SEQ ID NO: 1616871 - RNA, 14 nt, Human
auuacaguauaauu

SEQ ID NO: 1616872 - RNA, 12 nt, Human
auuacaguauaa

SEQ ID NO: 1616873 - RNA, 17 nt, Human
auuagcaguuugcuuug

SEQ ID NO: 1616874 - RNA, 23 nt, Human
auuagauuucucauuugccaaua

SEQ ID NO: 1616875 - RNA, 22 nt, Human
caaagcacugacuucuaaguaa

SEQ ID NO: 1616876 - RNA, 20 nt, Human
caaagcacugacuucuaagu

SEQ ID NO: 1616877 - RNA, 22 nt, Human
caaagauauuuugcuuugugau

SEQ ID NO: 1616878 - RNA, 23 nt, Human
caaagauauuuugcuuugugauu

SEQ ID NO: 1616879 - RNA, 17 nt, Human
caaagcagugcaugcug

SEQ ID NO: 1616880 - RNA, 15 nt, Human
caaagcagugcaugc

SEQ ID NO: 1616881 - RNA, 22 nt, Human
caaaguacacuguuucaaacuu

SEQ ID NO: 1616882 - RNA, 13 nt, Human
caaagugcuggga

SEQ ID NO: 1616883 - RNA, 21 nt, Human
caaaguagaagucuuagaugu

SEQ ID NO: 1616884 - RNA, 14 nt, Human
caaaguagaagucu

SEQ ID NO: 1616885 - RNA, 21 nt, Human
caaagucucuggaauuugaaa

SEQ ID NO: 1616886 - RNA, 15 nt, Human
caaauccuugaagau

SEQ ID NO: 1616887 - RNA, 20 nt, Human
caaauggaaaugggcagagc

SEQ ID NO: 1616888 - RNA, 22 nt, Human
caaauggaaaugggcagagcag

SEQ ID NO: 1616889 - RNA, 21 nt, Human
caaauggaaaugggcagagca

SEQ ID NO: 1616890 - RNA, 23 nt, Human
caacacgagcaggcuacugucag

SEQ ID NO: 1616891 - RNA, 20 nt, Human
caacaccucugcacaagcug

SEQ ID NO: 1616892 - RNA, 22 nt, Human
caacacucacauuuauucugcu

SEQ ID NO: 1616893 - RNA, 14 nt, Human
caacacuaacauga

SEQ ID NO: 1616894 - RNA, 20 nt, Human
caaaaaaaaaaaaaaauuag

SEQ ID NO: 1616895 - RNA, 16 nt, Human
caaaagaugcuucuca

SEQ ID NO: 1616896 - RNA, 15 nt, Human
caaaaggcagaagca

SEQ ID NO: 1616897 - RNA, 18 nt, Human
caaaagaugcuucucacu

SEQ ID NO: 1616898 - RNA, 15 nt, Human
caaacagucucagga

SEQ ID NO: 1616899 - RNA, 19 nt, Human
caaaccaucauugaaaucu

SEQ ID NO: 1616900 - RNA, 21 nt, Human
caaaccaucauugaaaucuuu

SEQ ID NO: 1616901 - RNA, 20 nt, Human
caaagauauuuugcuuugug

SEQ ID NO: 1616902 - RNA, 17 nt, Human
auuugcucauggaauug

SEQ ID NO: 1616903 - RNA, 14 nt, Human
auuugcucauggaa

SEQ ID NO: 1616904 - RNA, 13 nt, Human
auuugcuccuuuc

SEQ ID NO: 1616905 - RNA, 12 nt, Human
auuuggaaaaua

SEQ ID NO: 1616906 - RNA, 13 nt, Human
auuuggaaaauaa

SEQ ID NO: 1616907 - RNA, 17 nt, Human
auuugugauacaaugcu

SEQ ID NO: 1616908 - RNA, 17 nt, Human
auuuggaaaucuuuaaa

SEQ ID NO: 1616909 - RNA, 12 nt, Human
auuuggaaaucu

SEQ ID NO: 1616910 - RNA, 11 nt, Human
auuuggaaauc

SEQ ID NO: 1616911 - RNA, 20 nt, Human
auuugugauacaaugcugug

SEQ ID NO: 1616912 - RNA, 13 nt, Human
auuuggaaaucuu

SEQ ID NO: 1616913 - RNA, 14 nt, Human
auuugugccagaau

SEQ ID NO: 1616914 - RNA, 19 nt, Human
auuuuauagcuacuaauuu

SEQ ID NO: 1616915 - RNA, 16 nt, Human
auuuuaugauccagca

SEQ ID NO: 1616916 - RNA, 15 nt, Human
auuuuaugauccagc

SEQ ID NO: 1616917 - RNA, 14 nt, Human
auuuuaugauccag

SEQ ID NO: 1616918 - RNA, 22 nt, Human
auuuguuugaacugauaaagau

SEQ ID NO: 1616919 - RNA, 23 nt, Human
auuuguuugaacugauaaagaug

SEQ ID NO: 1616920 - RNA, 15 nt, Human
auuugccaauaauaa

SEQ ID NO: 1616921 - RNA, 16 nt, Human
auuugccaauaauaau

SEQ ID NO: 1616922 - RNA, 15 nt, Human
cacuccccugcuggg

SEQ ID NO: 1616923 - RNA, 14 nt, Human
cacuccccugcugg

SEQ ID NO: 1616924 - RNA, 13 nt, Human
cacuccccugcug

SEQ ID NO: 1616925 - RNA, 12 nt, Human
cacuccccugcu

SEQ ID NO: 1616926 - RNA, 21 nt, Human
cacuagggcagggacaggaua

SEQ ID NO: 1616927 - RNA, 20 nt, Human
cacuagggcagggacaggau

SEQ ID NO: 1616928 - RNA, 14 nt, Human
cacuaggcuucugg

SEQ ID NO: 1616929 - RNA, 16 nt, Human
cacuccagugagacag

SEQ ID NO: 1616930 - RNA, 15 nt, Human
cacuccagcugggau

SEQ ID NO: 1616931 - RNA, 12 nt, Human
cacuccagcugg

SEQ ID NO: 1616932 - RNA, 11 nt, Human
cacuccagcug

SEQ ID NO: 1616933 - RNA, 16 nt, Human
cacuccagccugggug

SEQ ID NO: 1616934 - RNA, 22 nt, Human
cacugguucuucuuggucucag

SEQ ID NO: 1616935 - RNA, 23 nt, Human
cacugguggcccgacagccuggc

SEQ ID NO: 1616936 - RNA, 18 nt, Human
cacuuacacuuuaugcac

SEQ ID NO: 1616937 - RNA, 16 nt, Human
cacuuacacuuuaugc

SEQ ID NO: 1616938 - RNA, 19 nt, Human
cacuuguguuuugcaagcc

SEQ ID NO: 1616939 - RNA, 16 nt, Human
cacuugucaauaaaau

SEQ ID NO: 1616940 - RNA, 24 nt, Human
cacuuagaaauugcauuuccugac

SEQ ID NO: 1616941 - RNA, 23 nt, Human
cacuuaggaacguaaucgugucc

SEQ ID NO: 1616942 - RNA, 22 nt, Human
cacuuguguuuugcaagccaga

SEQ ID NO: 1616943 - RNA, 21 nt, Human
cacugcagaagacaguauggc

SEQ ID NO: 1616944 - RNA, 12 nt, Human
cacugcagccuc

SEQ ID NO: 1616945 - RNA, 20 nt, Human
cacugcacuccagccugggu

SEQ ID NO: 1616946 - RNA, 19 nt, Human
cacugcacuccagccuggg

SEQ ID NO: 1616947 - RNA, 18 nt, Human
cacugcacuccagccugg

SEQ ID NO: 1616948 - RNA, 16 nt, Human
cacugcacuccagccu

SEQ ID NO: 1616949 - RNA, 15 nt, Human
cacugcacuccagcc

SEQ ID NO: 1616950 - RNA, 13 nt, Human
cacugcagccuca

SEQ ID NO: 1616951 - RNA, 16 nt, Human
cacugcauguuuguga

SEQ ID NO: 1616952 - RNA, 16 nt, Human
cacugcauccuccgcc

SEQ ID NO: 1616953 - RNA, 14 nt, Human
cacugcauccuccg

SEQ ID NO: 1616954 - RNA, 18 nt, Human
cacugcauccuccgccuc

SEQ ID NO: 1616955 - RNA, 18 nt, Human
cacugggagaaaugaaaa

SEQ ID NO: 1616956 - RNA, 11 nt, Human
caccccagccc

SEQ ID NO: 1616957 - RNA, 12 nt, Human
caccccagcccc

SEQ ID NO: 1616958 - RNA, 13 nt, Human
caccuuggcugca

SEQ ID NO: 1616959 - RNA, 15 nt, Human
caccuuggcucaagu

SEQ ID NO: 1616960 - RNA, 14 nt, Human
caccuuggcugcag

SEQ ID NO: 1616961 - RNA, 24 nt, Human
caccugccuguugggccaggagcc

SEQ ID NO: 1616962 - RNA, 19 nt, Human
caccugccuguugggccag

SEQ ID NO: 1616963 - RNA, 17 nt, Human
caccugccuguugggcc

SEQ ID NO: 1616964 - RNA, 14 nt, Human
cacccucaggcagg

SEQ ID NO: 1616965 - RNA, 16 nt, Human
cacccuggggagaaag

SEQ ID NO: 1616966 - RNA, 15 nt, Human
cacccuggggagaaa

SEQ ID NO: 1616967 - RNA, 17 nt, Human
cacccugaaagcccuga

SEQ ID NO: 1616968 - RNA, 13 nt, Human
caccucagccucc

SEQ ID NO: 1616969 - RNA, 14 nt, Human
caccucagccuccc

SEQ ID NO: 1616970 - RNA, 17 nt, Human
cacccuggggagaaagu

SEQ ID NO: 1616971 - RNA, 16 nt, Human
caccugccccucaacu

SEQ ID NO: 1616972 - RNA, 15 nt, Human
caccugccccucaac

SEQ ID NO: 1616973 - RNA, 14 nt, Human
caccugccccucaa

SEQ ID NO: 1616974 - RNA, 14 nt, Human
caaguccaagcaua

SEQ ID NO: 1616975 - RNA, 17 nt, Human
caagucaagugaaaaag

SEQ ID NO: 1616976 - RNA, 13 nt, Human
caagucaagugaa

SEQ ID NO: 1616977 - RNA, 21 nt, Human
caaguaugaauaaagacaccu

SEQ ID NO: 1616978 - RNA, 19 nt, Human
caaguaugaauaaagacac

SEQ ID NO: 1616979 - RNA, 16 nt, Human
caaggccaaaggaagc

SEQ ID NO: 1616980 - RNA, 15 nt, Human
caaggccaaaggaag

SEQ ID NO: 1616981 - RNA, 18 nt, Human
caaggccaaaggaagcac

SEQ ID NO: 1616982 - RNA, 17 nt, Human
caaggccaaaggaagca

SEQ ID NO: 1616983 - RNA, 16 nt, Human
caaguaugaauaaaga

SEQ ID NO: 1616984 - RNA, 18 nt, Human
caagcugcacccucaggc

SEQ ID NO: 1616985 - RNA, 14 nt, Human
caagcugcacccuc

SEQ ID NO: 1616986 - RNA, 14 nt, Human
caagcucugcuccu

SEQ ID NO: 1616987 - RNA, 20 nt, Human
caagcugcacccucaggcag

SEQ ID NO: 1616988 - RNA, 12 nt, Human
caagcuccaagc

SEQ ID NO: 1616989 - RNA, 17 nt, Human
caagcuccaagcuccca

SEQ ID NO: 1616990 - RNA, 13 nt, Human
caagcucugcucc

SEQ ID NO: 1616991 - RNA, 19 nt, Human
caagcucuaucaccaagga

SEQ ID NO: 1616992 - RNA, 19 nt, Human
caauaaagcagcguuucua

SEQ ID NO: 1616993 - RNA, 18 nt, Human
cacaagacugcacaucaa

SEQ ID NO: 1616994 - RNA, 14 nt, Human
cacaagagcccagg

SEQ ID NO: 1616995 - RNA, 13 nt, Human
caauuuauuaugg

SEQ ID NO: 1616996 - RNA, 15 nt, Human
cacaagcuccaagcu

SEQ ID NO: 1616997 - RNA, 14 nt, Human
cacaagcuccaagc

SEQ ID NO: 1616998 - RNA, 13 nt, Human
cacaagcuccaag

SEQ ID NO: 1616999 - RNA, 16 nt, Human
cacaagagcccaggcc

SEQ ID NO: 1617000 - RNA, 23 nt, Human
cacaagcugcacccucaggcagg

SEQ ID NO: 1617001 - RNA, 17 nt, Human
cacaagcugcacccuca

SEQ ID NO: 1617002 - RNA, 23 nt, Human
cacaagcuccaagcucccaggca

SEQ ID NO: 1617003 - RNA, 17 nt, Human
cacaagcuccaagcucc

SEQ ID NO: 1617004 - RNA, 17 nt, Human
cacaagagcccaggccu

SEQ ID NO: 1617005 - RNA, 15 nt, Human
caauucuugccaaau

SEQ ID NO: 1617006 - RNA, 12 nt, Human
caauggcagccu

SEQ ID NO: 1617007 - RNA, 11 nt, Human
caauggcagcc

SEQ ID NO: 1617008 - RNA, 17 nt, Human
caaugcuguauuuuaaa

SEQ ID NO: 1617009 - RNA, 16 nt, Human
caaugcuguauuuuaa

SEQ ID NO: 1617010 - RNA, 20 nt, Human
caauggagacugucucaaga

SEQ ID NO: 1617011 - RNA, 15 nt, Human
caaugcuguauuuua

SEQ ID NO: 1617012 - RNA, 20 nt, Human
cacacagcucuguccuggga

SEQ ID NO: 1617013 - RNA, 17 nt, Human
cacacagcucuguccug

SEQ ID NO: 1617014 - RNA, 21 nt, Human
cacagccucuuagaugcaguu

SEQ ID NO: 1617015 - RNA, 17 nt, Human
cacagccucuuagaugc

SEQ ID NO: 1617016 - RNA, 23 nt, Human
cacaggcccuuccucuccacugc

SEQ ID NO: 1617017 - RNA, 18 nt, Human
cacaggggaaaagaggag

SEQ ID NO: 1617018 - RNA, 17 nt, Human
cacaggggaaaagagga

SEQ ID NO: 1617019 - RNA, 19 nt, Human
cacaggggaaaagaggagu

SEQ ID NO: 1617020 - RNA, 21 nt, Human
cacaguauuacuucugcuaca

SEQ ID NO: 1617021 - RNA, 20 nt, Human
cacaguauuacuucugcuac

SEQ ID NO: 1617022 - RNA, 22 nt, Human
cacacaugaaguccaagcauuu

SEQ ID NO: 1617023 - RNA, 20 nt, Human
cacacaugagcaucaggcca

SEQ ID NO: 1617024 - RNA, 17 nt, Human
cacacaugaaguccaag

SEQ ID NO: 1617025 - RNA, 23 nt, Human
cacacagugagucgaggacaggg

SEQ ID NO: 1617026 - RNA, 21 nt, Human
cacacagugagucgaggacag

SEQ ID NO: 1617027 - RNA, 15 nt, Human
cacacauacacacac

SEQ ID NO: 1617028 - RNA, 23 nt, Human
cacacaguauuacuucugcuaca

SEQ ID NO: 1617029 - RNA, 20 nt, Human
cacacaguauuacuucugcu

SEQ ID NO: 1617030 - RNA, 18 nt, Human
cacacagugagucgagga

SEQ ID NO: 1617031 - RNA, 22 nt, Human
cacagaaaauggaagacagcuc

SEQ ID NO: 1617032 - RNA, 20 nt, Human
cacagaaaauggaagacagc

SEQ ID NO: 1617033 - RNA, 19 nt, Human
cacagaaaauggaagacag

SEQ ID NO: 1617034 - RNA, 18 nt, Human
cacagaaaauggaagaca

SEQ ID NO: 1617035 - RNA, 22 nt, Human
cacacaugagcaucaggccagg

SEQ ID NO: 1617036 - RNA, 21 nt, Human
cacacaugagcaucaggccag

SEQ ID NO: 1617037 - RNA, 19 nt, Human
cacagaaaauucuucucca

SEQ ID NO: 1617038 - RNA, 23 nt, Human
cacagaaaauggaagacagcucu

SEQ ID NO: 1617039 - RNA, 13 nt, Human
cacagacccugcc

SEQ ID NO: 1617040 - RNA, 11 nt, Human
cacagccucug

SEQ ID NO: 1617041 - RNA, 19 nt, Human
cacagacauacuaaccagc

SEQ ID NO: 1617042 - RNA, 21 nt, Human
cacagacauacuaaccagcag

SEQ ID NO: 1617043 - RNA, 17 nt, Human
ccaaaacucuccucugc

SEQ ID NO: 1617044 - RNA, 20 nt, Human
ccaaaaaccaguauuguaca

SEQ ID NO: 1617045 - RNA, 19 nt, Human
ccaaaaaccaguauuguac

SEQ ID NO: 1617046 - RNA, 16 nt, Human
ccaaaaaccaguauug

SEQ ID NO: 1617047 - RNA, 12 nt, Human
cauuuccaagca

SEQ ID NO: 1617048 - RNA, 22 nt, Human
cauuuggugguuucagaaaugu

SEQ ID NO: 1617049 - RNA, 23 nt, Human
cauuuggugguuucagaaaugug

SEQ ID NO: 1617050 - RNA, 20 nt, Human
cauuuuugaauacaggcaua

SEQ ID NO: 1617051 - RNA, 18 nt, Human
cauuuuugaauacaggca

SEQ ID NO: 1617052 - RNA, 16 nt, Human
cauuuauucugcucac

SEQ ID NO: 1617053 - RNA, 18 nt, Human
cauuucauuugugccaga

SEQ ID NO: 1617054 - RNA, 21 nt, Human
cauugcggacagccacggcca

SEQ ID NO: 1617055 - RNA, 17 nt, Human
cauugcggacagccacg

SEQ ID NO: 1617056 - RNA, 15 nt, Human
cauugcggacagcca

SEQ ID NO: 1617057 - RNA, 14 nt, Human
cauugcggacagcc

SEQ ID NO: 1617058 - RNA, 18 nt, Human
cauugcugggcuugucug

SEQ ID NO: 1617059 - RNA, 15 nt, Human
cauuaggauggcuag

SEQ ID NO: 1617060 - RNA, 12 nt, Human
cauuaucuagau

SEQ ID NO: 1617061 - RNA, 16 nt, Human
cauuaucuagauacug

SEQ ID NO: 1617062 - RNA, 17 nt, Human
cauuaucuagauacugu

SEQ ID NO: 1617063 - RNA, 15 nt, Human
cauguucucugagga

SEQ ID NO: 1617064 - RNA, 22 nt, Human
cauggcugccaaugggagcuca

SEQ ID NO: 1617065 - RNA, 22 nt, Human
cauggcuggagcuagaauuuga

SEQ ID NO: 1617066 - RNA, 18 nt, Human
cauuaucuagauacugua

SEQ ID NO: 1617067 - RNA, 13 nt, Human
cauuaugaugugu

SEQ ID NO: 1617068 - RNA, 16 nt, Human
cauucucacuccuacc

SEQ ID NO: 1617069 - RNA, 17 nt, Human
cauucucacuccuaccu

SEQ ID NO: 1617070 - RNA, 16 nt, Human
cauucuccuuguguua

SEQ ID NO: 1617071 - RNA, 20 nt, Human
cauucuccuuguguuacuaa

SEQ ID NO: 1617072 - RNA, 21 nt, Human
cauucuccuaucaccugucuu

SEQ ID NO: 1617073 - RNA, 20 nt, Human
ccaauguucucucuucucca

SEQ ID NO: 1617074 - RNA, 22 nt, Human
ccaaugcacuuuguucuggcuc

SEQ ID NO: 1617075 - RNA, 20 nt, Human
ccaaugcacuuuguucuggc

SEQ ID NO: 1617076 - RNA, 23 nt, Human
ccaaugcacuuuguucuggcucu

SEQ ID NO: 1617077 - RNA, 20 nt, Human
ccaaaacucuccucugcugc

SEQ ID NO: 1617078 - RNA, 22 nt, Human
ccaaagugcugggauuacaggc

SEQ ID NO: 1617079 - RNA, 19 nt, Human
ccaaagugcugggauuaca

SEQ ID NO: 1617080 - RNA, 12 nt, Human
ccaaauuaagag

SEQ ID NO: 1617081 - RNA, 12 nt, Human
ccaaaugcagcu

SEQ ID NO: 1617082 - RNA, 22 nt, Human
ccaaagugcugggauuacaggu

SEQ ID NO: 1617083 - RNA, 11 nt, Human
ccaacuuguaa

SEQ ID NO: 1617084 - RNA, 17 nt, Human
ccaccaucaagccacca

SEQ ID NO: 1617085 - RNA, 16 nt, Human
ccaccaucaagccacc

SEQ ID NO: 1617086 - RNA, 23 nt, Human
ccacagaaaagaaaguucaugcu

SEQ ID NO: 1617087 - RNA, 22 nt, Human
ccacacuucaggcucuucuccu

SEQ ID NO: 1617088 - RNA, 17 nt, Human
ccaccgcagacaggacc

SEQ ID NO: 1617089 - RNA, 14 nt, Human
ccaccgcagacagg

SEQ ID NO: 1617090 - RNA, 20 nt, Human
ccaccaucaagccaccaaca

SEQ ID NO: 1617091 - RNA, 18 nt, Human
ccaccaucaccagacagg

SEQ ID NO: 1617092 - RNA, 13 nt, Human
ccacccugcucuc

SEQ ID NO: 1617093 - RNA, 15 nt, Human
ccaccuuggcucaag

SEQ ID NO: 1617094 - RNA, 14 nt, Human
ccaccuuggcucaa

SEQ ID NO: 1617095 - RNA, 18 nt, Human
ccaccgcagacaggacca

SEQ ID NO: 1617096 - RNA, 19 nt, Human
ccaccgcagacaggaccag

SEQ ID NO: 1617097 - RNA, 23 nt, Human
ccaccgggcugggagcucugcag

SEQ ID NO: 1617098 - RNA, 18 nt, Human
cauagauucccugagcag

SEQ ID NO: 1617099 - RNA, 17 nt, Human
cauagauucccugagca

SEQ ID NO: 1617100 - RNA, 15 nt, Human
cauacaauuccaaac

SEQ ID NO: 1617101 - RNA, 21 nt, Human
cauaaugcgugcauaccacuu

SEQ ID NO: 1617102 - RNA, 12 nt, Human
cauagcccucac

SEQ ID NO: 1617103 - RNA, 19 nt, Human
cauagcccucacccugggg

SEQ ID NO: 1617104 - RNA, 15 nt, Human
cauagcccucacccu

SEQ ID NO: 1617105 - RNA, 17 nt, Human
cauauuaccacagacau

SEQ ID NO: 1617106 - RNA, 20 nt, Human
cauauuaccacagacauacu

SEQ ID NO: 1617107 - RNA, 21 nt, Human
cauauuaccacagacauacua

SEQ ID NO: 1617108 - RNA, 22 nt, Human
cauauuaccacagacauacuaa

SEQ ID NO: 1617109 - RNA, 21 nt, Human
caguuuguuaguaugaggcau

SEQ ID NO: 1617110 - RNA, 20 nt, Human
cauaaucuggacuccucugu

SEQ ID NO: 1617111 - RNA, 22 nt, Human
cauaaucuggacuccucugucc

SEQ ID NO: 1617112 - RNA, 21 nt, Human
cauaaucuggacuccucuguc

SEQ ID NO: 1617113 - RNA, 14 nt, Human
cauaaugcgugcau

SEQ ID NO: 1617114 - RNA, 17 nt, Human
cauaaugcgugcauacc

SEQ ID NO: 1617115 - RNA, 23 nt, Human
cauaaucuggacuccucugucca

SEQ ID NO: 1617116 - RNA, 12 nt, Human
caguuugcuuug

SEQ ID NO: 1617117 - RNA, 21 nt, Human
caguuugcuuuguaugcacuu

SEQ ID NO: 1617118 - RNA, 14 nt, Human
caguuugcuuugua

SEQ ID NO: 1617119 - RNA, 18 nt, Human
cagucaccccggccaccu

SEQ ID NO: 1617120 - RNA, 16 nt, Human
caugaauuaguuuuau

SEQ ID NO: 1617121 - RNA, 14 nt, Human
caugacacgaauau

SEQ ID NO: 1617122 - RNA, 14 nt, Human
caugaauuugugaa

SEQ ID NO: 1617123 - RNA, 18 nt, Human
caugacacgaauauugcu

SEQ ID NO: 1617124 - RNA, 17 nt, Human
caugacacgaauauugc

SEQ ID NO: 1617125 - RNA, 18 nt, Human
caugcugcccugugagua

SEQ ID NO: 1617126 - RNA, 16 nt, Human
caugcugcccugugag

SEQ ID NO: 1617127 - RNA, 19 nt, Human
cauggccuuugcuugaaag

SEQ ID NO: 1617128 - RNA, 22 nt, Human
cauggccuuugcuugaaagaaa

SEQ ID NO: 1617129 - RNA, 14 nt, Human
caugcugccuccag

SEQ ID NO: 1617130 - RNA, 12 nt, Human
caugcugccucc

SEQ ID NO: 1617131 - RNA, 17 nt, Human
caugcaaggucauuuuu

SEQ ID NO: 1617132 - RNA, 18 nt, Human
caugcaaggucauuuuuu

SEQ ID NO: 1617133 - RNA, 22 nt, Human
caugcaaggucauuuuuuuuaa

SEQ ID NO: 1617134 - RNA, 18 nt, Human
caucagcugcugaaacaa

SEQ ID NO: 1617135 - RNA, 17 nt, Human
caucagcugcugaaaca

SEQ ID NO: 1617136 - RNA, 15 nt, Human
caucagcugcugaaa

SEQ ID NO: 1617137 - RNA, 19 nt, Human
caucagcacgauuucuguu

SEQ ID NO: 1617138 - RNA, 20 nt, Human
caucagcuugcccuguuaaa

SEQ ID NO: 1617139 - RNA, 13 nt, Human
caucaggccaggc

SEQ ID NO: 1617140 - RNA, 17 nt, Human
caucagcacgauuucug

SEQ ID NO: 1617141 - RNA, 18 nt, Human
caucagcacgauuucugu

SEQ ID NO: 1617142 - RNA, 23 nt, Human
caucaggccaggcccucugccca

SEQ ID NO: 1617143 - RNA, 22 nt, Human
caucaggccaggcccucugccc

SEQ ID NO: 1617144 - RNA, 21 nt, Human
caucaggccaggcccucugcc

SEQ ID NO: 1617145 - RNA, 14 nt, Human
caucaggccaggcc

SEQ ID NO: 1617146 - RNA, 14 nt, Human
caucccagccccaa

SEQ ID NO: 1617147 - RNA, 13 nt, Human
caucccagcccca

SEQ ID NO: 1617148 - RNA, 16 nt, Human
caucccagccccaaug

SEQ ID NO: 1617149 - RNA, 17 nt, Human
caucccagccccaauga

SEQ ID NO: 1617150 - RNA, 22 nt, Human
caucuuagguuggcaaaaaggc

SEQ ID NO: 1617151 - RNA, 21 nt, Human
caucuuagguuggcaaaaagg

SEQ ID NO: 1617152 - RNA, 19 nt, Human
caucugugaaaggaaagag

SEQ ID NO: 1617153 - RNA, 18 nt, Human
caucugugaaaggaaaga

SEQ ID NO: 1617154 - RNA, 12 nt, Human
caucgcaaugua

SEQ ID NO: 1617155 - RNA, 23 nt, Human
cagccugagcgacagugagacuc

SEQ ID NO: 1617156 - RNA, 17 nt, Human
cagccucugaaaaccaa

SEQ ID NO: 1617157 - RNA, 23 nt, Human
cagccgccaugcuccuggcccac

SEQ ID NO: 1617158 - RNA, 15 nt, Human
cagcccuuagcaggg

SEQ ID NO: 1617159 - RNA, 13 nt, Human
cagcccuuagcag

SEQ ID NO: 1617160 - RNA, 14 nt, Human
cagcggggacagcu

SEQ ID NO: 1617161 - RNA, 19 nt, Human
cagcguuucuaugacacau

SEQ ID NO: 1617162 - RNA, 16 nt, Human
cagcguuucuaugaca

SEQ ID NO: 1617163 - RNA, 14 nt, Human
cagcguuucuauga

SEQ ID NO: 1617164 - RNA, 19 nt, Human
cagccccgugggguuccuc

SEQ ID NO: 1617165 - RNA, 13 nt, Human
cagccccugcaca

SEQ ID NO: 1617166 - RNA, 22 nt, Human
cagccccauucugccugcccag

SEQ ID NO: 1617167 - RNA, 20 nt, Human
cagccccauucugccugccc

SEQ ID NO: 1617168 - RNA, 19 nt, Human
cagccccauucugccugcc

SEQ ID NO: 1617169 - RNA, 24 nt, Human
cagccccauucugccugcccaggc

SEQ ID NO: 1617170 - RNA, 23 nt, Human
cagccccauucugccugcccagg

SEQ ID NO: 1617171 - RNA, 19 nt, Human
cagcaguucagagcugccc

SEQ ID NO: 1617172 - RNA, 20 nt, Human
cagcaguucagagcugcccu

SEQ ID NO: 1617173 - RNA, 18 nt, Human
cagcaguucagagcugcc

SEQ ID NO: 1617174 - RNA, 21 nt, Human
cagcaguucagagcugcccuc

SEQ ID NO: 1617175 - RNA, 22 nt, Human
cagcaguucagagcugcccucu

SEQ ID NO: 1617176 - RNA, 18 nt, Human
cagcauauucaggaagcu

SEQ ID NO: 1617177 - RNA, 17 nt, Human
cagcauauucaggaagc

SEQ ID NO: 1617178 - RNA, 16 nt, Human
cagcauauucaggaag

SEQ ID NO: 1617179 - RNA, 19 nt, Human
cagauuucacucuccuugg

SEQ ID NO: 1617180 - RNA, 18 nt, Human
cagauuucacucuccuug

SEQ ID NO: 1617181 - RNA, 16 nt, Human
cagauuucacucuccu

SEQ ID NO: 1617182 - RNA, 15 nt, Human
cagauuucacucucc

SEQ ID NO: 1617183 - RNA, 14 nt, Human
cagauuugagcuca

SEQ ID NO: 1617184 - RNA, 13 nt, Human
cagauuugagcuc

SEQ ID NO: 1617185 - RNA, 16 nt, Human
cagauuugagcucagc

SEQ ID NO: 1617186 - RNA, 16 nt, Human
cagagguugcagugag

SEQ ID NO: 1617187 - RNA, 23 nt, Human
cagauacaggaaaagcugcugac

SEQ ID NO: 1617188 - RNA, 16 nt, Human
cagaucauugugaaau

SEQ ID NO: 1617189 - RNA, 13 nt, Human
cagauacuggauu

SEQ ID NO: 1617190 - RNA, 22 nt, Human
cagaucauugugaaauuauuca

SEQ ID NO: 1617191 - RNA, 20 nt, Human
cagagacuccugcaggcagc

SEQ ID NO: 1617192 - RNA, 22 nt, Human
cagagacuccugcaggcagcca

SEQ ID NO: 1617193 - RNA, 21 nt, Human
cagagacuccugcaggcagcc

SEQ ID NO: 1617194 - RNA, 23 nt, Human
cagagacuccugcaggcagccag

SEQ ID NO: 1617195 - RNA, 22 nt, Human
cagagagggugggagugggccc

SEQ ID NO: 1617196 - RNA, 20 nt, Human
cagagagggugggagugggc

SEQ ID NO: 1617197 - RNA, 14 nt, Human
cagagccugcaguu

SEQ ID NO: 1617198 - RNA, 23 nt, Human
cagagagggugggagugggccca

SEQ ID NO: 1617199 - RNA, 16 nt, Human
cagagagggugggagu

SEQ ID NO: 1617200 - RNA, 22 nt, Human
cagagcuacacaggggaaaaga

SEQ ID NO: 1617201 - RNA, 17 nt, Human
cagagcuacacagggga

SEQ ID NO: 1617202 - RNA, 19 nt, Human
caggaaaucaaauaugcaa

SEQ ID NO: 1617203 - RNA, 21 nt, Human
caggaaaucaaauaugcaaag

SEQ ID NO: 1617204 - RNA, 22 nt, Human
caggaaaucaaauaugcaaagc

SEQ ID NO: 1617205 - RNA, 17 nt, Human
cagcuuauucacaagac

SEQ ID NO: 1617206 - RNA, 16 nt, Human
cagcuuauucacaaga

SEQ ID NO: 1617207 - RNA, 19 nt, Human
cagcuguucagcugguuga

SEQ ID NO: 1617208 - RNA, 16 nt, Human
cagcuguucagcuggu

SEQ ID NO: 1617209 - RNA, 15 nt, Human
cagcuguucagcugg

SEQ ID NO: 1617210 - RNA, 20 nt, Human
caggaaaagcugcugacagu

SEQ ID NO: 1617211 - RNA, 19 nt, Human
caggaaaagcugcugacag

SEQ ID NO: 1617212 - RNA, 22 nt, Human
caggaaaggcuccaggagcagc

SEQ ID NO: 1617213 - RNA, 21 nt, Human
caggaaaggcuccaggagcag

SEQ ID NO: 1617214 - RNA, 23 nt, Human
caggaaaggcuccaggagcagcc

SEQ ID NO: 1617215 - RNA, 24 nt, Human
caggacagcccuucuuuccacaga

SEQ ID NO: 1617216 - RNA, 23 nt, Human
caggacagcccuucuuuccacag

SEQ ID NO: 1617217 - RNA, 13 nt, Human
caggaccucaggu

SEQ ID NO: 1617218 - RNA, 21 nt, Human
caggaccagggauuuccauga

SEQ ID NO: 1617219 - RNA, 13 nt, Human
caggaccagggau

SEQ ID NO: 1617220 - RNA, 16 nt, Human
caggccaggcccucug

SEQ ID NO: 1617221 - RNA, 15 nt, Human
caggccaggcccucu

SEQ ID NO: 1617222 - RNA, 14 nt, Human
caggccaggcccuc

SEQ ID NO: 1617223 - RNA, 13 nt, Human
caggccaggcccu

SEQ ID NO: 1617224 - RNA, 15 nt, Human
caggccagcugcuug

SEQ ID NO: 1617225 - RNA, 13 nt, Human
caggccagcugcu

SEQ ID NO: 1617226 - RNA, 23 nt, Human
caggcacugcugcccagccucca

SEQ ID NO: 1617227 - RNA, 20 nt, Human
caggcaaugcuggcuguugg

SEQ ID NO: 1617228 - RNA, 19 nt, Human
caggcaaugcuggcuguug

SEQ ID NO: 1617229 - RNA, 13 nt, Human
caggaggccagcc

SEQ ID NO: 1617230 - RNA, 12 nt, Human
caggaggccagc

SEQ ID NO: 1617231 - RNA, 14 nt, Human
caggaggccagccu

SEQ ID NO: 1617232 - RNA, 21 nt, Human
caggcaaugcuggcuguuggc

SEQ ID NO: 1617233 - RNA, 17 nt, Human
caggcacugcugcccag

SEQ ID NO: 1617234 - RNA, 16 nt, Human
caggcacugcugccca

SEQ ID NO: 1617235 - RNA, 22 nt, Human
cagggaggacgcucucuggccu

SEQ ID NO: 1617236 - RNA, 15 nt, Human
caggcugggcuucag

SEQ ID NO: 1617237 - RNA, 14 nt, Human
caggcugggcuuca

SEQ ID NO: 1617238 - RNA, 15 nt, Human
cagggcucagcgggg

SEQ ID NO: 1617239 - RNA, 12 nt, Human
cagggcucagcg

SEQ ID NO: 1617240 - RNA, 20 nt, Human
cagggcucagcggggacagc

SEQ ID NO: 1617241 - RNA, 16 nt, Human
cagggagggcuucugc

SEQ ID NO: 1617242 - RNA, 18 nt, Human
cagggagggccugggccc

SEQ ID NO: 1617243 - RNA, 20 nt, Human
caggcugggagagccuucca

SEQ ID NO: 1617244 - RNA, 19 nt, Human
caggcugggagagccuucc

SEQ ID NO: 1617245 - RNA, 18 nt, Human
caggcugggagagccuuc

SEQ ID NO: 1617246 - RNA, 16 nt, Human
caggcugggagagccu

SEQ ID NO: 1617247 - RNA, 19 nt, Human
caggcuggcgugcaguggu

SEQ ID NO: 1617248 - RNA, 18 nt, Human
caggcuggcgugcagugg

SEQ ID NO: 1617249 - RNA, 17 nt, Human
caggcuggcgugcagug

SEQ ID NO: 1617250 - RNA, 23 nt, Human
caggccugggggcugggcagagg

SEQ ID NO: 1617251 - RNA, 22 nt, Human
caggccugggggcugggcagag

SEQ ID NO: 1617252 - RNA, 20 nt, Human
caggccugggggcugggcag

SEQ ID NO: 1617253 - RNA, 17 nt, Human
cagucaccccggccacc

SEQ ID NO: 1617254 - RNA, 16 nt, Human
cagucaccccggccac

SEQ ID NO: 1617255 - RNA, 22 nt, Human
caguauuguacaaaguauuaag

SEQ ID NO: 1617256 - RNA, 19 nt, Human
caguaaaugggggugcauu

SEQ ID NO: 1617257 - RNA, 20 nt, Human
caguaaaugggggugcauuu

SEQ ID NO: 1617258 - RNA, 18 nt, Human
caguaaaugggggugcau

SEQ ID NO: 1617259 - RNA, 21 nt, Human
caggguuggccccugcccggc

SEQ ID NO: 1617260 - RNA, 17 nt, Human
caggguuggccccugcc

SEQ ID NO: 1617261 - RNA, 14 nt, Human
caggugcugccauc

SEQ ID NO: 1617262 - RNA, 13 nt, Human
caggugcugccau

SEQ ID NO: 1617263 - RNA, 23 nt, Human
cagguuuuuggucugacccacug

SEQ ID NO: 1617264 - RNA, 23 nt, Human
cagggucucacucugucgcccag

SEQ ID NO: 1617265 - RNA, 21 nt, Human
cagggucucuaccauccccug

SEQ ID NO: 1617266 - RNA, 16 nt, Human
caggguuggccccugc

SEQ ID NO: 1617267 - RNA, 15 nt, Human
caggguuggccccug

SEQ ID NO: 1617268 - RNA, 15 nt, Human
ccagauccuggaaau

SEQ ID NO: 1617269 - RNA, 19 nt, Human
ccagagggccugcaaggga

SEQ ID NO: 1617270 - RNA, 18 nt, Human
ccagagggccugcaaggg

SEQ ID NO: 1617271 - RNA, 17 nt, Human
ccagagggccugcaagg

SEQ ID NO: 1617272 - RNA, 16 nt, Human
ccaccuuggcucaagu

SEQ ID NO: 1617273 - RNA, 20 nt, Human
ccagagggccugcaagggag

SEQ ID NO: 1617274 - RNA, 15 nt, Human
ccagaugcaccagcc

SEQ ID NO: 1617275 - RNA, 17 nt, Human
ccagaugcaccagcccu

SEQ ID NO: 1617276 - RNA, 18 nt, Human
ccagaugcaccagcccuu

SEQ ID NO: 1617277 - RNA, 23 nt, Human
ccagaugcaccagcccuuagcag

SEQ ID NO: 1617278 - RNA, 15 nt, Human
ccagcaggcucucag

SEQ ID NO: 1617279 - RNA, 13 nt, Human
ccagcaggcucuc

SEQ ID NO: 1617280 - RNA, 22 nt, Human
ccagcagauuauucacugauuu

SEQ ID NO: 1617281 - RNA, 21 nt, Human
ccagcagauuauucacugauu

SEQ ID NO: 1617282 - RNA, 22 nt, Human
ccagcucaccagccccagugcc

SEQ ID NO: 1617283 - RNA, 16 nt, Human
ccagcucaccagcccc

SEQ ID NO: 1617284 - RNA, 15 nt, Human
ccagcucaccagccc

SEQ ID NO: 1617285 - RNA, 19 nt, Human
ccagcuuaaaggggcuaga

SEQ ID NO: 1617286 - RNA, 16 nt, Human
ccagcuuaucucaggg

SEQ ID NO: 1617287 - RNA, 17 nt, Human
ccagcuguucagcuggu

SEQ ID NO: 1617288 - RNA, 12 nt, Human
ccagccccugga

SEQ ID NO: 1617289 - RNA, 11 nt, Human
ccagccccugg

SEQ ID NO: 1617290 - RNA, 13 nt, Human
ccaggaagccagc

SEQ ID NO: 1617291 - RNA, 14 nt, Human
ccaggaagccagca

SEQ ID NO: 1617292 - RNA, 12 nt, Human
ccaggaagccag

SEQ ID NO: 1617293 - RNA, 15 nt, Human
ccaggaaaggcucca

SEQ ID NO: 1617294 - RNA, 14 nt, Human
ccaggaaaggcucc

SEQ ID NO: 1617295 - RNA, 16 nt, Human
ccaggaaaggcuccag

SEQ ID NO: 1617296 - RNA, 20 nt, Human
ccauggucggaaaacaugcu

SEQ ID NO: 1617297 - RNA, 23 nt, Human
ccaugagccucagcauccuggca

SEQ ID NO: 1617298 - RNA, 21 nt, Human
ccaugagccucagcauccugg

SEQ ID NO: 1617299 - RNA, 20 nt, Human
ccaucccugaaggccccgcc

SEQ ID NO: 1617300 - RNA, 17 nt, Human
ccaucccugaaggcccc

SEQ ID NO: 1617301 - RNA, 15 nt, Human
ccaucccugaaggcc

SEQ ID NO: 1617302 - RNA, 14 nt, Human
ccaucccugaaggc

SEQ ID NO: 1617303 - RNA, 15 nt, Human
ccaucccagccccaa

SEQ ID NO: 1617304 - RNA, 14 nt, Human
ccaucccagcccca

SEQ ID NO: 1617305 - RNA, 23 nt, Human
ccaguuggucccccuuccaugga

SEQ ID NO: 1617306 - RNA, 23 nt, Human
ccaguuggguggaugccuggugg

SEQ ID NO: 1617307 - RNA, 20 nt, Human
ccaguuggguggaugccugg

SEQ ID NO: 1617308 - RNA, 19 nt, Human
ccaguuggguggaugccug

SEQ ID NO: 1617309 - RNA, 17 nt, Human
ccaguuggguggaugcc

SEQ ID NO: 1617310 - RNA, 17 nt, Human
ccaggggugggacaccc

SEQ ID NO: 1617311 - RNA, 14 nt, Human
ccaggggugggaca

SEQ ID NO: 1617312 - RNA, 19 nt, Human
ccaggggugggacacccug

SEQ ID NO: 1617313 - RNA, 13 nt, Human
ccaggggugggac

SEQ ID NO: 1617314 - RNA, 20 nt, Human
ccaggggaaaaucagccugc

SEQ ID NO: 1617315 - RNA, 19 nt, Human
ccaggggaaaaucagccug

SEQ ID NO: 1617316 - RNA, 18 nt, Human
ccaggcuggcgugcagug

SEQ ID NO: 1617317 - RNA, 17 nt, Human
ccaggcuggcgugcagu

SEQ ID NO: 1617318 - RNA, 19 nt, Human
ccaggcuggcgugcagugg

SEQ ID NO: 1617319 - RNA, 21 nt, Human
ccaggcuccuuuagcgcccag

SEQ ID NO: 1617320 - RNA, 20 nt, Human
ccaggcuccuuuagcgccca

SEQ ID NO: 1617321 - RNA, 18 nt, Human
ccaggcacugcugcccag

SEQ ID NO: 1617322 - RNA, 16 nt, Human
ccaggcacugcugccc

SEQ ID NO: 1617323 - RNA, 23 nt, Human
cccgggaggcagagguugcagug

SEQ ID NO: 1617324 - RNA, 18 nt, Human
cccuauuagagaagagau

SEQ ID NO: 1617325 - RNA, 17 nt, Human
cccuauugguaaagaau

SEQ ID NO: 1617326 - RNA, 17 nt, Human
cccggccaccugcggug

SEQ ID NO: 1617327 - RNA, 16 nt, Human
cccggcuccaggcucc

SEQ ID NO: 1617328 - RNA, 15 nt, Human
cccggcuccaggcuc

SEQ ID NO: 1617329 - RNA, 14 nt, Human
cccggcuccaggcu

SEQ ID NO: 1617330 - RNA, 13 nt, Human
cccggcuccaggc

SEQ ID NO: 1617331 - RNA, 12 nt, Human
cccggcuccagg

SEQ ID NO: 1617332 - RNA, 14 nt, Human
cccggccaccugcg

SEQ ID NO: 1617333 - RNA, 13 nt, Human
cccggccaccugc

SEQ ID NO: 1617334 - RNA, 14 nt, Human
cccgaauagcuggg

SEQ ID NO: 1617335 - RNA, 19 nt, Human
ccccucuggcuccagcugg

SEQ ID NO: 1617336 - RNA, 23 nt, Human
cccauuguggucacaggaaguag

SEQ ID NO: 1617337 - RNA, 22 nt, Human
ccccaaaacucuccucugcugc

SEQ ID NO: 1617338 - RNA, 22 nt, Human
cccauuguggucacaggaagua

SEQ ID NO: 1617339 - RNA, 23 nt, Human
ccccaaaacucuccucugcugcu

SEQ ID NO: 1617340 - RNA, 22 nt, Human
ccccagcaagugagagcugggu

SEQ ID NO: 1617341 - RNA, 13 nt, Human
ccccagaggcugg

SEQ ID NO: 1617342 - RNA, 22 nt, Human
cccccaaauggaaaugggcaga

SEQ ID NO: 1617343 - RNA, 23 nt, Human
ccccgacccuugccgucuaccug

SEQ ID NO: 1617344 - RNA, 13 nt, Human
ccccggccaccug

SEQ ID NO: 1617345 - RNA, 23 nt, Human
ccccgaggccuucucugaaggac

SEQ ID NO: 1617346 - RNA, 17 nt, Human
cccagccagcaguucag

SEQ ID NO: 1617347 - RNA, 20 nt, Human
cccagccagcaguucagagc

SEQ ID NO: 1617348 - RNA, 23 nt, Human
cccagcucugguccauagagagc

SEQ ID NO: 1617349 - RNA, 16 nt, Human
cccagccagcaguuca

SEQ ID NO: 1617350 - RNA, 24 nt, Human
cccagccagcaguucagagcugcc

SEQ ID NO: 1617351 - RNA, 20 nt, Human
cccauauuuguacaccaaua

SEQ ID NO: 1617352 - RNA, 17 nt, Human
cccaggcuggcgugcag

SEQ ID NO: 1617353 - RNA, 13 nt, Human
cccaggcuggcgu

SEQ ID NO: 1617354 - RNA, 15 nt, Human
cccaggaaaggcucc

SEQ ID NO: 1617355 - RNA, 15 nt, Human
cccagcuugaaaccu

SEQ ID NO: 1617356 - RNA, 13 nt, Human
cccauccucugua

SEQ ID NO: 1617357 - RNA, 12 nt, Human
cccacucccugc

SEQ ID NO: 1617358 - RNA, 18 nt, Human
cccacuagacccacugga

SEQ ID NO: 1617359 - RNA, 13 nt, Human
cccacugcucugg

SEQ ID NO: 1617360 - RNA, 12 nt, Human
cccacugcucug

SEQ ID NO: 1617361 - RNA, 19 nt, Human
cccacugcuuuuggucugu

SEQ ID NO: 1617362 - RNA, 22 nt, Human
cccacugcuuuuggucugugug

SEQ ID NO: 1617363 - RNA, 22 nt, Human
cccacccaagggccuggccuga

SEQ ID NO: 1617364 - RNA, 21 nt, Human
cccacccaagggccuggccug

SEQ ID NO: 1617365 - RNA, 20 nt, Human
cccacccaagggccuggccu

SEQ ID NO: 1617366 - RNA, 15 nt, Human
cccacccccacccaa

SEQ ID NO: 1617367 - RNA, 17 nt, Human
cccacccccacccaagg

SEQ ID NO: 1617368 - RNA, 18 nt, Human
cccacccugaaagcccug

SEQ ID NO: 1617369 - RNA, 17 nt, Human
ccucugcuugccauccc

SEQ ID NO: 1617370 - RNA, 13 nt, Human
ccucugcuugcca

SEQ ID NO: 1617371 - RNA, 18 nt, Human
ccucugcugcuggcuggu

SEQ ID NO: 1617372 - RNA, 17 nt, Human
ccucugcugcuggcugg

SEQ ID NO: 1617373 - RNA, 16 nt, Human
ccucugcugcuggcug

SEQ ID NO: 1617374 - RNA, 15 nt, Human
ccucugcugcuggcu

SEQ ID NO: 1617375 - RNA, 14 nt, Human
ccucugcugcuggc

SEQ ID NO: 1617376 - RNA, 13 nt, Human
ccucugcugcugg

SEQ ID NO: 1617377 - RNA, 18 nt, Human
ccucugcugauccuccca

SEQ ID NO: 1617378 - RNA, 15 nt, Human
ccucugcugauccuc

SEQ ID NO: 1617379 - RNA, 22 nt, Human
ccucugccugaagucacacagu

SEQ ID NO: 1617380 - RNA, 12 nt, Human
ccucugccuguc

SEQ ID NO: 1617381 - RNA, 22 nt, Human
ccucucugcaggucccuaauaa

SEQ ID NO: 1617382 - RNA, 21 nt, Human
ccucucugcaggucccuaaua

SEQ ID NO: 1617383 - RNA, 23 nt, Human
ccucucugcaggucccuaauaaa

SEQ ID NO: 1617384 - RNA, 12 nt, Human
ccucucugcccu

SEQ ID NO: 1617385 - RNA, 12 nt, Human
ccucucucaggc

SEQ ID NO: 1617386 - RNA, 17 nt, Human
ccucucucacuccuuga

SEQ ID NO: 1617387 - RNA, 15 nt, Human
ccucucucacuccuu

SEQ ID NO: 1617388 - RNA, 14 nt, Human
ccucucucacuccu

SEQ ID NO: 1617389 - RNA, 13 nt, Human
ccucucucacucc

SEQ ID NO: 1617390 - RNA, 14 nt, Human
ccucucucaggcca

SEQ ID NO: 1617391 - RNA, 15 nt, Human
ccucucugcaggucc

SEQ ID NO: 1617392 - RNA, 13 nt, Human
ccucucugcaggu

SEQ ID NO: 1617393 - RNA, 22 nt, Human
ccugcacuugcagacucuacag

SEQ ID NO: 1617394 - RNA, 13 nt, Human
ccucuugagccuu

SEQ ID NO: 1617395 - RNA, 19 nt, Human
ccucuugagccuugaacuu

SEQ ID NO: 1617396 - RNA, 13 nt, Human
ccucuuggguuca

SEQ ID NO: 1617397 - RNA, 14 nt, Human
ccucuugccacugc

SEQ ID NO: 1617398 - RNA, 15 nt, Human
ccuggccucugcacu

SEQ ID NO: 1617399 - RNA, 14 nt, Human
ccuggccucugcac

SEQ ID NO: 1617400 - RNA, 13 nt, Human
ccuggccugagcu

SEQ ID NO: 1617401 - RNA, 16 nt, Human
ccuggccucugcacuc

SEQ ID NO: 1617402 - RNA, 12 nt, Human
ccuggccucugc

SEQ ID NO: 1617403 - RNA, 18 nt, Human
ccuggcacccggccccug

SEQ ID NO: 1617404 - RNA, 18 nt, Human
ccuggcacagggcagugg

SEQ ID NO: 1617405 - RNA, 17 nt, Human
ccuggcacagggcagug

SEQ ID NO: 1617406 - RNA, 16 nt, Human
ccuggcacagggcagu

SEQ ID NO: 1617407 - RNA, 13 nt, Human
ccuggaugcagcc

SEQ ID NO: 1617408 - RNA, 21 nt, Human
ccuggauccaucaggccacuu

SEQ ID NO: 1617409 - RNA, 17 nt, Human
ccuggaugcagccucac

SEQ ID NO: 1617410 - RNA, 14 nt, Human
ccuggaugcagccu

SEQ ID NO: 1617411 - RNA, 19 nt, Human
ccuggaugcagccucacag

SEQ ID NO: 1617412 - RNA, 17 nt, Human
ccuggaguucugguucc

SEQ ID NO: 1617413 - RNA, 16 nt, Human
ccuggaguucugguuc

SEQ ID NO: 1617414 - RNA, 15 nt, Human
ccuggaguucugguu

SEQ ID NO: 1617415 - RNA, 18 nt, Human
ccugcccaggccccugcc

SEQ ID NO: 1617416 - RNA, 16 nt, Human
ccugcccaggccccug

SEQ ID NO: 1617417 - RNA, 15 nt, Human
ccugcccaggccccu

SEQ ID NO: 1617418 - RNA, 14 nt, Human
ccugcccaggcccc

SEQ ID NO: 1617419 - RNA, 20 nt, Human
ccugcuggguguggcgcagc

SEQ ID NO: 1617420 - RNA, 14 nt, Human
ccugcugggugugg

SEQ ID NO: 1617421 - RNA, 21 nt, Human
ccugcuggguguggcgcagca

SEQ ID NO: 1617422 - RNA, 12 nt, Human
ccugcugggugu

SEQ ID NO: 1617423 - RNA, 20 nt, Human
ccucauguccacugguucuu

SEQ ID NO: 1617424 - RNA, 13 nt, Human
ccucauguucuua

SEQ ID NO: 1617425 - RNA, 15 nt, Human
ccucauguccacugg

SEQ ID NO: 1617426 - RNA, 13 nt, Human
ccucagccuccug

SEQ ID NO: 1617427 - RNA, 22 nt, Human
ccucagccucccgaauagcugg

SEQ ID NO: 1617428 - RNA, 23 nt, Human
ccucagccucccaaagugcuggg

SEQ ID NO: 1617429 - RNA, 18 nt, Human
ccucauuagcauuuugcu

SEQ ID NO: 1617430 - RNA, 22 nt, Human
ccuccaagcuccaucuccacuc

SEQ ID NO: 1617431 - RNA, 21 nt, Human
ccuccaagcuccaucuccacu

SEQ ID NO: 1617432 - RNA, 19 nt, Human
ccucauguucuuaauucuu

SEQ ID NO: 1617433 - RNA, 22 nt, Human
ccucccaaggggcccaaauucu

SEQ ID NO: 1617434 - RNA, 22 nt, Human
ccuccaaucccaccaacccuca

SEQ ID NO: 1617435 - RNA, 20 nt, Human
ccucccaggcgccccuuccc

SEQ ID NO: 1617436 - RNA, 14 nt, Human
ccucccaggcgccc

SEQ ID NO: 1617437 - RNA, 22 nt, Human
ccucagccucccaaagugcugg

SEQ ID NO: 1617438 - RNA, 11 nt, Human
ccucagccucc

SEQ ID NO: 1617439 - RNA, 15 nt, Human
ccucaagagaaggca

SEQ ID NO: 1617440 - RNA, 15 nt, Human
ccucaacucuccucc

SEQ ID NO: 1617441 - RNA, 15 nt, Human
ccuauuuuaauaaac

SEQ ID NO: 1617442 - RNA, 16 nt, Human
ccguagguuauuuuca

SEQ ID NO: 1617443 - RNA, 19 nt, Human
ccggcuaauuuuuguauuu

SEQ ID NO: 1617444 - RNA, 17 nt, Human
ccggcuaugggggcacu

SEQ ID NO: 1617445 - RNA, 23 nt, Human
ccggcuaugggggcacugaggac

SEQ ID NO: 1617446 - RNA, 22 nt, Human
ccggcuaugggggcacugagga

SEQ ID NO: 1617447 - RNA, 12 nt, Human
ccggcuccaggc

SEQ ID NO: 1617448 - RNA, 23 nt, Human
ccuaauaaagcuguguggcaguc

SEQ ID NO: 1617449 - RNA, 14 nt, Human
ccuaauaaagcugu

SEQ ID NO: 1617450 - RNA, 18 nt, Human
ccgucucugguuccuccc

SEQ ID NO: 1617451 - RNA, 17 nt, Human
ccuagcacuuugggagg

SEQ ID NO: 1617452 - RNA, 23 nt, Human
ccuaggcauuugcugaauacaga

SEQ ID NO: 1617453 - RNA, 17 nt, Human
cccuucuuuccacagaa

SEQ ID NO: 1617454 - RNA, 20 nt, Human
ccgaauagcugggacuacag

SEQ ID NO: 1617455 - RNA, 17 nt, Human
ccgccaaggcuggggga

SEQ ID NO: 1617456 - RNA, 16 nt, Human
ccgacccuugccgucu

SEQ ID NO: 1617457 - RNA, 20 nt, Human
ccgcccaggcuuagucacug

SEQ ID NO: 1617458 - RNA, 16 nt, Human
ccgccaugcuccuggc

SEQ ID NO: 1617459 - RNA, 18 nt, Human
cccuucgcuccugugucu

SEQ ID NO: 1617460 - RNA, 16 nt, Human
cccuucgcuccugugu

SEQ ID NO: 1617461 - RNA, 16 nt, Human
cccuucuaccuuccug

SEQ ID NO: 1617462 - RNA, 23 nt, Human
cccuucugacccaugcugcccug

SEQ ID NO: 1617463 - RNA, 22 nt, Human
cccuucugacccaugcugcccu

SEQ ID NO: 1617464 - RNA, 21 nt, Human
cccuucugacccaugcugccc

SEQ ID NO: 1617465 - RNA, 16 nt, Human
cccuggcagccccugu

SEQ ID NO: 1617466 - RNA, 14 nt, Human
cccuggcagccccu

SEQ ID NO: 1617467 - RNA, 19 nt, Human
cccuggcucccacaggccc

SEQ ID NO: 1617468 - RNA, 17 nt, Human
cccuggcucccacaggc

SEQ ID NO: 1617469 - RNA, 17 nt, Human
cccuggcuuuucacugc

SEQ ID NO: 1617470 - RNA, 13 nt, Human
cccuggcuuuuca

SEQ ID NO: 1617471 - RNA, 20 nt, Human
cccugcccugugggccccca

SEQ ID NO: 1617472 - RNA, 16 nt, Human
cccugcccugugggcc

SEQ ID NO: 1617473 - RNA, 15 nt, Human
cccugcccugugggc

SEQ ID NO: 1617474 - RNA, 14 nt, Human
cccugcccuguggg

SEQ ID NO: 1617475 - RNA, 13 nt, Human
cccuggcagcccc

SEQ ID NO: 1617476 - RNA, 12 nt, Human
cccuggcagccc

SEQ ID NO: 1617477 - RNA, 21 nt, Human
cccugcccugugggcccccaa

SEQ ID NO: 1617478 - RNA, 13 nt, Human
cccugcccugugg

SEQ ID NO: 1617479 - RNA, 12 nt, Human
cccugcccugug

SEQ ID NO: 1617480 - RNA, 15 nt, Human
cccucacccuggggc

SEQ ID NO: 1617481 - RNA, 18 nt, Human
cuacauacaauuccaaac

SEQ ID NO: 1617482 - RNA, 15 nt, Human
cuacaugagguacug

SEQ ID NO: 1617483 - RNA, 18 nt, Human
cuacaugagguacugaga

SEQ ID NO: 1617484 - RNA, 19 nt, Human
cuacaguugaaaaacagcu

SEQ ID NO: 1617485 - RNA, 13 nt, Human
cuacaguugaaaa

SEQ ID NO: 1617486 - RNA, 18 nt, Human
cuacaguccucccaucuc

SEQ ID NO: 1617487 - RNA, 17 nt, Human
cuacaguccucccaucu

SEQ ID NO: 1617488 - RNA, 16 nt, Human
cuacaguccucccauc

SEQ ID NO: 1617489 - RNA, 15 nt, Human
cuacaguccucccau

SEQ ID NO: 1617490 - RNA, 15 nt, Human
cuacaaaaacacagc

SEQ ID NO: 1617491 - RNA, 15 nt, Human
cuacaagacacagug

SEQ ID NO: 1617492 - RNA, 22 nt, Human
cuaagugauccucccaccucag

SEQ ID NO: 1617493 - RNA, 20 nt, Human
cuaagugauccucccaccuc

SEQ ID NO: 1617494 - RNA, 18 nt, Human
cuaagugaggaugaaaaa

SEQ ID NO: 1617495 - RNA, 23 nt, Human
cuaagugaaauaagccagacauc

SEQ ID NO: 1617496 - RNA, 20 nt, Human
cuaagugaaauaagccagac

SEQ ID NO: 1617497 - RNA, 20 nt, Human
cuaacgaaguauccuucagc

SEQ ID NO: 1617498 - RNA, 15 nt, Human
cuaacuucaccauau

SEQ ID NO: 1617499 - RNA, 16 nt, Human
cuaacuucaccauauu

SEQ ID NO: 1617500 - RNA, 23 nt, Human
cgugagccaccgugccuggccac

SEQ ID NO: 1617501 - RNA, 16 nt, Human
cgugagaccugccccu

SEQ ID NO: 1617502 - RNA, 14 nt, Human
cgugagaccugccc

SEQ ID NO: 1617503 - RNA, 13 nt, Human
cgugagaccugcc

SEQ ID NO: 1617504 - RNA, 22 nt, Human
cuaaacugcccccucugcccug

SEQ ID NO: 1617505 - RNA, 13 nt, Human
cuaaacuuuucug

SEQ ID NO: 1617506 - RNA, 15 nt, Human
cuaaacuuuucugau

SEQ ID NO: 1617507 - RNA, 23 nt, Human
cuaaacugcccccucugcccugc

SEQ ID NO: 1617508 - RNA, 19 nt, Human
cuagaacucccuuucaaca

SEQ ID NO: 1617509 - RNA, 18 nt, Human
cuagaacucccuuucaac

SEQ ID NO: 1617510 - RNA, 17 nt, Human
cuagaacucccuuucaa

SEQ ID NO: 1617511 - RNA, 16 nt, Human
cuagaacucccuuuca

SEQ ID NO: 1617512 - RNA, 22 nt, Human
cuagcagcagggagggcuucug

SEQ ID NO: 1617513 - RNA, 17 nt, Human
cuagcauggcugccaau

SEQ ID NO: 1617514 - RNA, 23 nt, Human
cuagcagcagggagggcuucugc

SEQ ID NO: 1617515 - RNA, 19 nt, Human
cuagaaauuccccacccug

SEQ ID NO: 1617516 - RNA, 14 nt, Human
cuaccugaggggcc

SEQ ID NO: 1617517 - RNA, 11 nt, Human
cuaccugaggg

SEQ ID NO: 1617518 - RNA, 15 nt, Human
cuaccugaggggccu

SEQ ID NO: 1617519 - RNA, 23 nt, Human
cuaguugaucagcuuauugucua

SEQ ID NO: 1617520 - RNA, 22 nt, Human
cuaguuccaccaucaagccacc

SEQ ID NO: 1617521 - RNA, 20 nt, Human
cuaguuccaccaucaagcca

SEQ ID NO: 1617522 - RNA, 18 nt, Human
cuaguuccaccaucaagc

SEQ ID NO: 1617523 - RNA, 21 nt, Human
cuagggaaaaaccagcgugug

SEQ ID NO: 1617524 - RNA, 19 nt, Human
cuagggaaaaaccagcgug

SEQ ID NO: 1617525 - RNA, 16 nt, Human
cgacagugagacucug

SEQ ID NO: 1617526 - RNA, 15 nt, Human
cgacagugagacucu

SEQ ID NO: 1617527 - RNA, 17 nt, Human
ccuuuuuuauacauaaa

SEQ ID NO: 1617528 - RNA, 18 nt, Human
ccuuuuuuauacauaaac

SEQ ID NO: 1617529 - RNA, 23 nt, Human
cgaccagacaccuugacagggca

SEQ ID NO: 1617530 - RNA, 14 nt, Human
cgaccaccugccca

SEQ ID NO: 1617531 - RNA, 12 nt, Human
cgaccaccugcc

SEQ ID NO: 1617532 - RNA, 19 nt, Human
ccuuuuuuauacauaaaca

SEQ ID NO: 1617533 - RNA, 12 nt, Human
ccuuuuuuauac

SEQ ID NO: 1617534 - RNA, 17 nt, Human
ccuuuuucauuauuuua

SEQ ID NO: 1617535 - RNA, 20 nt, Human
ccuuuagcgcccaguugggu

SEQ ID NO: 1617536 - RNA, 14 nt, Human
ccuuuagcgcccag

SEQ ID NO: 1617537 - RNA, 20 nt, Human
ccuugccgucuaccugaggg

SEQ ID NO: 1617538 - RNA, 20 nt, Human
ccuucugacccaugcugccc

SEQ ID NO: 1617539 - RNA, 17 nt, Human
ccuucugacccaugcug

SEQ ID NO: 1617540 - RNA, 16 nt, Human
ccuucugacccaugcu

SEQ ID NO: 1617541 - RNA, 12 nt, Human
ccuucugaccca

SEQ ID NO: 1617542 - RNA, 15 nt, Human
ccuggccugagcugg

SEQ ID NO: 1617543 - RNA, 14 nt, Human
ccuggccugagcug

SEQ ID NO: 1617544 - RNA, 20 nt, Human
ccuggccugagcugggauga

SEQ ID NO: 1617545 - RNA, 22 nt, Human
ccuucugacccaugcugcccug

SEQ ID NO: 1617546 - RNA, 21 nt, Human
ccuucugacccaugcugcccu

SEQ ID NO: 1617547 - RNA, 23 nt, Human
ccuucugacccaugcugcccugu

SEQ ID NO: 1617548 - RNA, 22 nt, Human
ccuucuggaauaaggagaauga

SEQ ID NO: 1617549 - RNA, 18 nt, Human
cggcucacugcagccuca

SEQ ID NO: 1617550 - RNA, 17 nt, Human
cggcucacugcauccuc

SEQ ID NO: 1617551 - RNA, 19 nt, Human
cggcucacugcagccucaa

SEQ ID NO: 1617552 - RNA, 21 nt, Human
cggcucacugcauccuccgcc

SEQ ID NO: 1617553 - RNA, 14 nt, Human
cggagucccaccuu

SEQ ID NO: 1617554 - RNA, 18 nt, Human
cggaggggccuggcagcc

SEQ ID NO: 1617555 - RNA, 16 nt, Human
cggaggggccuggcag

SEQ ID NO: 1617556 - RNA, 16 nt, Human
cgaguagcugggacua

SEQ ID NO: 1617557 - RNA, 15 nt, Human
cgaguagcugggacu

SEQ ID NO: 1617558 - RNA, 14 nt, Human
cgaguagcugggac

SEQ ID NO: 1617559 - RNA, 18 nt, Human
cgaguuacagacaaagcg

SEQ ID NO: 1617560 - RNA, 17 nt, Human
cgaguuacagacaaagc

SEQ ID NO: 1617561 - RNA, 12 nt, Human
cgccaaggcugg

SEQ ID NO: 1617562 - RNA, 20 nt, Human
cgcaggcuggcccugcccug

SEQ ID NO: 1617563 - RNA, 19 nt, Human
cgcaggcuggcccugcccu

SEQ ID NO: 1617564 - RNA, 18 nt, Human
cgcaggcuggcccugccc

SEQ ID NO: 1617565 - RNA, 17 nt, Human
cgcaggcuggcccugcc

SEQ ID NO: 1617566 - RNA, 15 nt, Human
cgcaggcuggcccug

SEQ ID NO: 1617567 - RNA, 14 nt, Human
cgcaggcuggcccu

SEQ ID NO: 1617568 - RNA, 16 nt, Human
cgccaaggcuggggga

SEQ ID NO: 1617569 - RNA, 13 nt, Human
cgccaaggcuggg

SEQ ID NO: 1617570 - RNA, 23 nt, Human
cgccaaggcugggggaagaagcu

SEQ ID NO: 1617571 - RNA, 21 nt, Human
cgcaggcuggcccugcccugg

SEQ ID NO: 1617572 - RNA, 14 nt, Human
cgccuacaggagug

SEQ ID NO: 1617573 - RNA, 16 nt, Human
cgaccugccucggccu

SEQ ID NO: 1617574 - RNA, 21 nt, Human
cuccagugagacagcucugca

SEQ ID NO: 1617575 - RNA, 13 nt, Human
cucccaccucagc

SEQ ID NO: 1617576 - RNA, 12 nt, Human
cucccaccucag

SEQ ID NO: 1617577 - RNA, 16 nt, Human
cucccugcaauaaaau

SEQ ID NO: 1617578 - RNA, 14 nt, Human
cucccugcaauaaa

SEQ ID NO: 1617579 - RNA, 19 nt, Human
cuccgcuuucuacccagcg

SEQ ID NO: 1617580 - RNA, 19 nt, Human
cuccagacacauguccaag

SEQ ID NO: 1617581 - RNA, 17 nt, Human
cuccagacacaugucca

SEQ ID NO: 1617582 - RNA, 21 nt, Human
cuccagaauuucccaaagcag

SEQ ID NO: 1617583 - RNA, 18 nt, Human
cuccagaauuucccaaag

SEQ ID NO: 1617584 - RNA, 15 nt, Human
cuccagaauuuccca

SEQ ID NO: 1617585 - RNA, 22 nt, Human
cuccacuuucuagccagaggag

SEQ ID NO: 1617586 - RNA, 21 nt, Human
cuccaagaccuucuccuucac

SEQ ID NO: 1617587 - RNA, 18 nt, Human
cuccaagaccuucuccuu

SEQ ID NO: 1617588 - RNA, 17 nt, Human
cuccaagaccuucuccu

SEQ ID NO: 1617589 - RNA, 16 nt, Human
cuccaagaccuucucc

SEQ ID NO: 1617590 - RNA, 14 nt, Human
cuccagaccccugg

SEQ ID NO: 1617591 - RNA, 11 nt, Human
cuccaggugca

SEQ ID NO: 1617592 - RNA, 21 nt, Human
cucaggccugggggcugggca

SEQ ID NO: 1617593 - RNA, 20 nt, Human
cucaggccugggggcugggc

SEQ ID NO: 1617594 - RNA, 14 nt, Human
cucaggccuggggg

SEQ ID NO: 1617595 - RNA, 22 nt, Human
cucaggccagcugcuugggcuu

SEQ ID NO: 1617596 - RNA, 21 nt, Human
cucaggccagcugcuugggcu

SEQ ID NO: 1617597 - RNA, 15 nt, Human
cucaggccagcugcu

SEQ ID NO: 1617598 - RNA, 14 nt, Human
cucaggccagcugc

SEQ ID NO: 1617599 - RNA, 13 nt, Human
cucagcggggaca

SEQ ID NO: 1617600 - RNA, 14 nt, Human
cucagcgaaugaau

SEQ ID NO: 1617601 - RNA, 13 nt, Human
cucaggccagcug

SEQ ID NO: 1617602 - RNA, 13 nt, Human
cucagccuccuga

SEQ ID NO: 1617603 - RNA, 12 nt, Human
cucagccuccug

SEQ ID NO: 1617604 - RNA, 13 nt, Human
cucagccucccaa

SEQ ID NO: 1617605 - RNA, 16 nt, Human
cuaucccggcugcccu

SEQ ID NO: 1617606 - RNA, 15 nt, Human
cuaucccggcugccc

SEQ ID NO: 1617607 - RNA, 16 nt, Human
cucagccucccaaagu

SEQ ID NO: 1617608 - RNA, 14 nt, Human
cucagccucccaaa

SEQ ID NO: 1617609 - RNA, 21 nt, Human
cucagccucccaaagugcugg

SEQ ID NO: 1617610 - RNA, 17 nt, Human
cuaucccggcugcccuu

SEQ ID NO: 1617611 - RNA, 13 nt, Human
cucagccucccga

SEQ ID NO: 1617612 - RNA, 22 nt, Human
cucagccucccaaagugcuggg

SEQ ID NO: 1617613 - RNA, 18 nt, Human
cucagucuggcccuuccu

SEQ ID NO: 1617614 - RNA, 17 nt, Human
cucagucuggcccuucc

SEQ ID NO: 1617615 - RNA, 13 nt, Human
cucagugccacua

SEQ ID NO: 1617616 - RNA, 20 nt, Human
cucagucuggcccuuccuuu

SEQ ID NO: 1617617 - RNA, 12 nt, Human
cucauguucuua

SEQ ID NO: 1617618 - RNA, 14 nt, Human
cucauguucuuaau

SEQ ID NO: 1617619 - RNA, 18 nt, Human
cucauguucuuaauucuu

SEQ ID NO: 1617620 - RNA, 19 nt, Human
cucauguucuuaauucuua

SEQ ID NO: 1617621 - RNA, 20 nt, Human
cucaugccucagccuccuga

SEQ ID NO: 1617622 - RNA, 18 nt, Human
cucaugccucagccuccu

SEQ ID NO: 1617623 - RNA, 16 nt, Human
cuccaaagucucugga

SEQ ID NO: 1617624 - RNA, 11 nt, Human
cucucuggccu

SEQ ID NO: 1617625 - RNA, 12 nt, Human
cucuccuccaga

SEQ ID NO: 1617626 - RNA, 12 nt, Human
cucucuggccuu

SEQ ID NO: 1617627 - RNA, 15 nt, Human
cucugaaggacauug

SEQ ID NO: 1617628 - RNA, 14 nt, Human
cucucacuccuuga

SEQ ID NO: 1617629 - RNA, 12 nt, Human
cucucacuccuu

SEQ ID NO: 1617630 - RNA, 19 nt, Human
cucucagauuguaccauug

SEQ ID NO: 1617631 - RNA, 15 nt, Human
cucucacuccuugaa

SEQ ID NO: 1617632 - RNA, 21 nt, Human
cucucacuuguuuuauuuaac

SEQ ID NO: 1617633 - RNA, 20 nt, Human
cuccgcuuucuacccagcga

SEQ ID NO: 1617634 - RNA, 20 nt, Human
cucgggauuaguacacacuu

SEQ ID NO: 1617635 - RNA, 15 nt, Human
cucuuagaugcaguu

SEQ ID NO: 1617636 - RNA, 21 nt, Human
cucuguacagagcccacgccc

SEQ ID NO: 1617637 - RNA, 17 nt, Human
cucuguacagagcccac

SEQ ID NO: 1617638 - RNA, 20 nt, Human
cucugcugacagacacaggc

SEQ ID NO: 1617639 - RNA, 19 nt, Human
cucugcugacagacacagg

SEQ ID NO: 1617640 - RNA, 18 nt, Human
cucugcugacagacacag

SEQ ID NO: 1617641 - RNA, 17 nt, Human
cucugcugacagacaca

SEQ ID NO: 1617642 - RNA, 18 nt, Human
cucugguccauagagagc

SEQ ID NO: 1617643 - RNA, 16 nt, Human
cucugguccauagaga

SEQ ID NO: 1617644 - RNA, 19 nt, Human
cucugguccauagagagca

SEQ ID NO: 1617645 - RNA, 14 nt, Human
cucugguuccuccc

SEQ ID NO: 1617646 - RNA, 23 nt, Human
cucugcagcaauaaagcagcguu

SEQ ID NO: 1617647 - RNA, 18 nt, Human
cucugcagcaauaaagca

SEQ ID NO: 1617648 - RNA, 19 nt, Human
cucugcagcaauaaagcag

SEQ ID NO: 1617649 - RNA, 14 nt, Human
cucugcacuccccu

SEQ ID NO: 1617650 - RNA, 21 nt, Human
cucuuagaugcaguucugaag

SEQ ID NO: 1617651 - RNA, 20 nt, Human
cucuuagaugcaguucugaa

SEQ ID NO: 1617652 - RNA, 16 nt, Human
cucuugccacugccuc

SEQ ID NO: 1617653 - RNA, 20 nt, Human
cucuugccacugccucuucc

SEQ ID NO: 1617654 - RNA, 19 nt, Human
cucuugccacugccucuuc

SEQ ID NO: 1617655 - RNA, 18 nt, Human
cucuugccacugccucuu

SEQ ID NO: 1617656 - RNA, 17 nt, Human
cucuugccacugccucu

SEQ ID NO: 1617657 - RNA, 22 nt, Human
cucuugccacugccucuuccuc

SEQ ID NO: 1617658 - RNA, 18 nt, Human
cugaaggccccgcccagg

SEQ ID NO: 1617659 - RNA, 17 nt, Human
cugaaggccccgcccag

SEQ ID NO: 1617660 - RNA, 14 nt, Human
cugaaggccccgcc

SEQ ID NO: 1617661 - RNA, 13 nt, Human
cugaaggccccgc

SEQ ID NO: 1617662 - RNA, 21 nt, Human
cugaaggacauugcggacagc

SEQ ID NO: 1617663 - RNA, 20 nt, Human
cugaaggacauugcggacag

SEQ ID NO: 1617664 - RNA, 19 nt, Human
cugaaggacauugcggaca

SEQ ID NO: 1617665 - RNA, 16 nt, Human
cugaaaauguaugugu

SEQ ID NO: 1617666 - RNA, 22 nt, Human
cugaaggaauaaauugcuccuu

SEQ ID NO: 1617667 - RNA, 20 nt, Human
cugacccaugcugcccugug

SEQ ID NO: 1617668 - RNA, 19 nt, Human
cugacccaugcugcccugu

SEQ ID NO: 1617669 - RNA, 17 nt, Human
cugacccaugcugcccu

SEQ ID NO: 1617670 - RNA, 18 nt, Human
cugacccaugcugcccug

SEQ ID NO: 1617671 - RNA, 15 nt, Human
cugacagacacaggc

SEQ ID NO: 1617672 - RNA, 14 nt, Human
cugacagacacagg

SEQ ID NO: 1617673 - RNA, 12 nt, Human
cugacagacaca

SEQ ID NO: 1617674 - RNA, 14 nt, Human
cugacagaaggacu

SEQ ID NO: 1617675 - RNA, 18 nt, Human
aacuuccagauccuggaa

SEQ ID NO: 1617676 - RNA, 13 nt, Human
aacuuccaauuua

SEQ ID NO: 1617677 - RNA, 17 nt, Human
gugaugggaaagcauug

SEQ ID NO: 1617678 - RNA, 22 nt, Human
gugaugcgcaugucacggaggg

SEQ ID NO: 1617679 - RNA, 18 nt, Human
gugauggggcccugccuc

SEQ ID NO: 1617680 - RNA, 17 nt, Human
gugauggggcccugccu

SEQ ID NO: 1617681 - RNA, 16 nt, Human
gugauggggcccugcc

SEQ ID NO: 1617682 - RNA, 14 nt, Human
gugauggggcccug

SEQ ID NO: 1617683 - RNA, 16 nt, Human
gugaugagaggaaauc

SEQ ID NO: 1617684 - RNA, 14 nt, Human
gugaugagaggaaa

SEQ ID NO: 1617685 - RNA, 23 nt, Human
gugcauuaucuagauacuguauc

SEQ ID NO: 1617686 - RNA, 19 nt, Human
gugcauguguguucaugca

SEQ ID NO: 1617687 - RNA, 15 nt, Human
gugcauuaucuagau

SEQ ID NO: 1617688 - RNA, 19 nt, Human
gugcauuaucuagauacug

SEQ ID NO: 1617689 - RNA, 12 nt, Human
gugccucugccu

SEQ ID NO: 1617690 - RNA, 21 nt, Human
gugcacacaccagagcccacc

SEQ ID NO: 1617691 - RNA, 19 nt, Human
gugauggggcccugccucc

SEQ ID NO: 1617692 - RNA, 16 nt, Human
gugaugguuccccugu

SEQ ID NO: 1617693 - RNA, 14 nt, Human
gugaugguuccccu

SEQ ID NO: 1617694 - RNA, 22 nt, Human
gugaugguuccccuguucacuc

SEQ ID NO: 1617695 - RNA, 13 nt, Human
aacugaaaucaua

SEQ ID NO: 1617696 - RNA, 12 nt, Human
aacugaaaucau

SEQ ID NO: 1617697 - RNA, 21 nt, Human
aacucuucaaucucuugcacu

SEQ ID NO: 1617698 - RNA, 22 nt, Human
gugagucgaggacagggaggug

SEQ ID NO: 1617699 - RNA, 20 nt, Human
aacucugacaacagacuucu

SEQ ID NO: 1617700 - RNA, 23 nt, Human
aacucugacaacagacuucugaa

SEQ ID NO: 1617701 - RNA, 22 nt, Human
aacucugacaacagacuucuga

SEQ ID NO: 1617702 - RNA, 21 nt, Human
gugagaugcuagaacucccuu

SEQ ID NO: 1617703 - RNA, 19 nt, Human
gugaacuugggccacugug

SEQ ID NO: 1617704 - RNA, 17 nt, Human
gugaacuugggccacug

SEQ ID NO: 1617705 - RNA, 15 nt, Human
gugaacuugaaauuu

SEQ ID NO: 1617706 - RNA, 14 nt, Human
gugaacuugaaauu

SEQ ID NO: 1617707 - RNA, 22 nt, Human
gugaggccagagacacaagccu

SEQ ID NO: 1617708 - RNA, 17 nt, Human
gugaggccagagacaca

SEQ ID NO: 1617709 - RNA, 15 nt, Human
gugagcaauccugca

SEQ ID NO: 1617710 - RNA, 19 nt, Human
aacugcacugucaagauga

SEQ ID NO: 1617711 - RNA, 15 nt, Human
aacugcugacuguuu

SEQ ID NO: 1617712 - RNA, 21 nt, Human
aacugcugacuguuuucucuu

SEQ ID NO: 1617713 - RNA, 20 nt, Human
aacugcugacuguuuucucu

SEQ ID NO: 1617714 - RNA, 23 nt, Human
aacugcugacuguuuucucuuga

SEQ ID NO: 1617715 - RNA, 19 nt, Human
aacuggacugguucaaaug

SEQ ID NO: 1617716 - RNA, 15 nt, Human
aacuggauuaaacuu

SEQ ID NO: 1617717 - RNA, 16 nt, Human
aacuggauuaaacuua

SEQ ID NO: 1617718 - RNA, 11 nt, Human
aacuggcugca

SEQ ID NO: 1617719 - RNA, 17 nt, Human
aacugggacaggggaga

SEQ ID NO: 1617720 - RNA, 21 nt, Human
aacuggguacuuguggacaca

SEQ ID NO: 1617721 - RNA, 16 nt, Human
aacuggguacuugugg

SEQ ID NO: 1617722 - RNA, 21 nt, Human
aacugggggagggugaaguga

SEQ ID NO: 1617723 - RNA, 22 nt, Human
aacugggggagggugaagugaa

SEQ ID NO: 1617724 - RNA, 18 nt, Human
aaccugagccccaaaagg

SEQ ID NO: 1617725 - RNA, 11 nt, Human
aaccugacccc

SEQ ID NO: 1617726 - RNA, 24 nt, Human
aaccucuaaauucuuucauuuuag

SEQ ID NO: 1617727 - RNA, 12 nt, Human
aaccucuaaauu

SEQ ID NO: 1617728 - RNA, 16 nt, Human
aaccucuuugucuaca

SEQ ID NO: 1617729 - RNA, 16 nt, Human
aacccgggaggcagag

SEQ ID NO: 1617730 - RNA, 10 nt, Human
aacccagcuc

SEQ ID NO: 1617731 - RNA, 14 nt, Human
aacccagauaaagg

SEQ ID NO: 1617732 - RNA, 23 nt, Human
aacccaaauguucaucaaugaau

SEQ ID NO: 1617733 - RNA, 23 nt, Human
aaccauuuugcugucccuuuucc

SEQ ID NO: 1617734 - RNA, 18 nt, Human
aacccaaguccaagcaua

SEQ ID NO: 1617735 - RNA, 13 nt, Human
aacccaauaguug

SEQ ID NO: 1617736 - RNA, 21 nt, Human
aaccaccacacccagcccacu

SEQ ID NO: 1617737 - RNA, 12 nt, Human
aaccaucauuga

SEQ ID NO: 1617738 - RNA, 18 nt, Human
aaccaucauugaaaucuu

SEQ ID NO: 1617739 - RNA, 17 nt, Human
aaccaucauugaaaucu

SEQ ID NO: 1617740 - RNA, 15 nt, Human
aaccaagucaaguga

SEQ ID NO: 1617741 - RNA, 19 nt, Human
aaccaccacacccagccca

SEQ ID NO: 1617742 - RNA, 18 nt, Human
aaccaagccguggcuucc

SEQ ID NO: 1617743 - RNA, 19 nt, Human
gucucgaacuccugaccuu

SEQ ID NO: 1617744 - RNA, 18 nt, Human
gucucgaacuccugaccu

SEQ ID NO: 1617745 - RNA, 13 nt, Human
gucucgaacuccu

SEQ ID NO: 1617746 - RNA, 18 nt, Human
aaccuugaaaacuuuaug

SEQ ID NO: 1617747 - RNA, 12 nt, Human
aaccugugucuc

SEQ ID NO: 1617748 - RNA, 21 nt, Human
aacuagaguuuagcuggaaaa

SEQ ID NO: 1617749 - RNA, 20 nt, Human
aacuagacucccaagcugga

SEQ ID NO: 1617750 - RNA, 23 nt, Human
aacuagacucccaagcuggacua

SEQ ID NO: 1617751 - RNA, 21 nt, Human
aacuaugauuuggaaaauaaa

SEQ ID NO: 1617752 - RNA, 16 nt, Human
aacuaugauuuggaaa

SEQ ID NO: 1617753 - RNA, 23 nt, Human
gugaaccaccacacccagcccac

SEQ ID NO: 1617754 - RNA, 22 nt, Human
gugaaccaccacacccagccca

SEQ ID NO: 1617755 - RNA, 18 nt, Human
aacucuccuccagaguca

SEQ ID NO: 1617756 - RNA, 15 nt, Human
aacucuccuccagag

SEQ ID NO: 1617757 - RNA, 16 nt, Human
aacucuccucugcugc

SEQ ID NO: 1617758 - RNA, 17 nt, Human
aacucuccucugcugcu

SEQ ID NO: 1617759 - RNA, 16 nt, Human
gucuuucacauuuaaa

SEQ ID NO: 1617760 - RNA, 17 nt, Human
gucuuuaaaugcugcuu

SEQ ID NO: 1617761 - RNA, 15 nt, Human
gucuuuaaaugcugc

SEQ ID NO: 1617762 - RNA, 16 nt, Human
gucuuuuuucacuaca

SEQ ID NO: 1617763 - RNA, 20 nt, Human
aaccugagccccaaaaggua

SEQ ID NO: 1617764 - RNA, 14 nt, Human
gucuggcccuuccu

SEQ ID NO: 1617765 - RNA, 16 nt, Human
aacaaggcaaggcugu

SEQ ID NO: 1617766 - RNA, 20 nt, Human
aaauuuuuucucuaggaaau

SEQ ID NO: 1617767 - RNA, 18 nt, Human
aaauuuugauguuuuaag

SEQ ID NO: 1617768 - RNA, 23 nt, Human
aaauuuugauguuuuaaggaugc

SEQ ID NO: 1617769 - RNA, 15 nt, Human
aacaaugcuguauuu

SEQ ID NO: 1617770 - RNA, 14 nt, Human
aacaaugcuguauu

SEQ ID NO: 1617771 - RNA, 12 nt, Human
aacaauaaaaga

SEQ ID NO: 1617772 - RNA, 21 nt, Human
aacaaggcaaggcugucaauu

SEQ ID NO: 1617773 - RNA, 18 nt, Human
aacaaggcaaggcuguca

SEQ ID NO: 1617774 - RNA, 16 nt, Human
aacacaacuauauugu

SEQ ID NO: 1617775 - RNA, 15 nt, Human
aacacaacuauauug

SEQ ID NO: 1617776 - RNA, 22 nt, Human
aacaaugcuguauuuuaaaaga

SEQ ID NO: 1617777 - RNA, 17 nt, Human
aacaaugcuguauuuua

SEQ ID NO: 1617778 - RNA, 22 nt, Human
gucacacaguauuacuucugcu

SEQ ID NO: 1617779 - RNA, 17 nt, Human
gucagaauagaaauuag

SEQ ID NO: 1617780 - RNA, 13 nt, Human
gucagaauagaaa

SEQ ID NO: 1617781 - RNA, 18 nt, Human
aaauuuguuauaaugaau

SEQ ID NO: 1617782 - RNA, 13 nt, Human
guccuacucugug

SEQ ID NO: 1617783 - RNA, 22 nt, Human
aacagugauuaccagggacuga

SEQ ID NO: 1617784 - RNA, 15 nt, Human
aacagugauuaccag

SEQ ID NO: 1617785 - RNA, 18 nt, Human
gucccccuuccauggacu

SEQ ID NO: 1617786 - RNA, 16 nt, Human
gucccccuuccaugga

SEQ ID NO: 1617787 - RNA, 14 nt, Human
gucccccuuccaug

SEQ ID NO: 1617788 - RNA, 12 nt, Human
guccuacucugu

SEQ ID NO: 1617789 - RNA, 16 nt, Human
guccuacccacccucc

SEQ ID NO: 1617790 - RNA, 12 nt, Human
aacagaaaugua

SEQ ID NO: 1617791 - RNA, 13 nt, Human
aacagaaauguac

SEQ ID NO: 1617792 - RNA, 14 nt, Human
aacagaaauguaca

SEQ ID NO: 1617793 - RNA, 15 nt, Human
aacagaaauguacag

SEQ ID NO: 1617794 - RNA, 19 nt, Human
gucauuuuuuuuaagaaaa

SEQ ID NO: 1617795 - RNA, 21 nt, Human
gucauuuuuuuuaagaaaaag

SEQ ID NO: 1617796 - RNA, 15 nt, Human
aacacagcaagggug

SEQ ID NO: 1617797 - RNA, 17 nt, Human
aacacaacuauauuguu

SEQ ID NO: 1617798 - RNA, 18 nt, Human
guccaagaagcccaggaa

SEQ ID NO: 1617799 - RNA, 17 nt, Human
guccaagaagcccagga

SEQ ID NO: 1617800 - RNA, 20 nt, Human
guccaagaagcccaggaaag

SEQ ID NO: 1617801 - RNA, 16 nt, Human
guccaagaagcccagg

SEQ ID NO: 1617802 - RNA, 15 nt, Human
guccaagaagcccag

SEQ ID NO: 1617803 - RNA, 13 nt, Human
guccaagaagccc

SEQ ID NO: 1617804 - RNA, 16 nt, Human
gucccaccuuggcugc

SEQ ID NO: 1617805 - RNA, 15 nt, Human
gucccaccuuggcug

SEQ ID NO: 1617806 - RNA, 14 nt, Human
gucccaccuuggcu

SEQ ID NO: 1617807 - RNA, 21 nt, Human
gucccaccccacacacgccag

SEQ ID NO: 1617808 - RNA, 14 nt, Human
guccauagagagca

SEQ ID NO: 1617809 - RNA, 13 nt, Human
guccauagagagc

SEQ ID NO: 1617810 - RNA, 22 nt, Human
guauuuuguuuuugucuuaaaa

SEQ ID NO: 1617811 - RNA, 18 nt, Human
gucaaaguggugagaggc

SEQ ID NO: 1617812 - RNA, 17 nt, Human
gucaacacuaacaugau

SEQ ID NO: 1617813 - RNA, 21 nt, Human
gucaacaaguaugaauaaaga

SEQ ID NO: 1617814 - RNA, 14 nt, Human
gucaaacgugaaaa

SEQ ID NO: 1617815 - RNA, 17 nt, Human
gucaaacgugaaaaugc

SEQ ID NO: 1617816 - RNA, 15 nt, Human
gucaaacgugaaaau

SEQ ID NO: 1617817 - RNA, 15 nt, Human
aaauuguaauuauau

SEQ ID NO: 1617818 - RNA, 20 nt, Human
aaauuguaagcaugcacaaa

SEQ ID NO: 1617819 - RNA, 14 nt, Human
aaauuguaauuaua

SEQ ID NO: 1617820 - RNA, 18 nt, Human
aaauucugucucuggauu

SEQ ID NO: 1617821 - RNA, 19 nt, Human
aaauuguaagcaugcacaa

SEQ ID NO: 1617822 - RNA, 16 nt, Human
aaauucugucucugga

SEQ ID NO: 1617823 - RNA, 18 nt, Human
guauguacuucaugcugu

SEQ ID NO: 1617824 - RNA, 15 nt, Human
aaauguauuacagug

SEQ ID NO: 1617825 - RNA, 24 nt, Human
aaaugucuaguuguaacaccauga

SEQ ID NO: 1617826 - RNA, 19 nt, Human
aaaugucuaguuguaacac

SEQ ID NO: 1617827 - RNA, 14 nt, Human
aaauuaagaaagga

SEQ ID NO: 1617828 - RNA, 12 nt, Human
aaaugugugugu

SEQ ID NO: 1617829 - RNA, 15 nt, Human
aaauggguuuuacug

SEQ ID NO: 1617830 - RNA, 14 nt, Human
aaauggguuuuacu

SEQ ID NO: 1617831 - RNA, 12 nt, Human
guaacaggcaga

SEQ ID NO: 1617832 - RNA, 22 nt, Human
guaacaggaaaauuuuaaaaau

SEQ ID NO: 1617833 - RNA, 16 nt, Human
aaauguaagggaaacu

SEQ ID NO: 1617834 - RNA, 20 nt, Human
guaguguuggagaagaacug

SEQ ID NO: 1617835 - RNA, 19 nt, Human
guauaaaagggacugagaa

SEQ ID NO: 1617836 - RNA, 16 nt, Human
guauauuuuauaucaa

SEQ ID NO: 1617837 - RNA, 18 nt, Human
guaucaggugcugccauc

SEQ ID NO: 1617838 - RNA, 16 nt, Human
guaucaggugcugcca

SEQ ID NO: 1617839 - RNA, 21 nt, Human
guauaaaauaauuuuuauauu

SEQ ID NO: 1617840 - RNA, 15 nt, Human
guauaaaauaauuuu

SEQ ID NO: 1617841 - RNA, 15 nt, Human
guauaaguggugugu

SEQ ID NO: 1617842 - RNA, 10 nt, Human
guauaauuaa

SEQ ID NO: 1617843 - RNA, 14 nt, Human
guaugguggcuggg

SEQ ID NO: 1617844 - RNA, 16 nt, Human
guaugguggcuggguu

SEQ ID NO: 1617845 - RNA, 15 nt, Human
guaugguggcugggu

SEQ ID NO: 1617846 - RNA, 21 nt, Human
guaucccaugagccucagcau

SEQ ID NO: 1617847 - RNA, 15 nt, Human
guaugcgugugugug

SEQ ID NO: 1617848 - RNA, 22 nt, Human
guaucaggugcugccauccagg

SEQ ID NO: 1617849 - RNA, 19 nt, Human
guaucccaugagccucagc

SEQ ID NO: 1617850 - RNA, 19 nt, Human
aagggugaugggaaagcau

SEQ ID NO: 1617851 - RNA, 14 nt, Human
aagguacuucaaau

SEQ ID NO: 1617852 - RNA, 20 nt, Human
aagguagaaauaucugaaaa

SEQ ID NO: 1617853 - RNA, 22 nt, Human
aaggggcccaaauucuuucagu

SEQ ID NO: 1617854 - RNA, 23 nt, Human
aaggcucugagcaaauguggcuc

SEQ ID NO: 1617855 - RNA, 18 nt, Human
guuucugaaagggacgcu

SEQ ID NO: 1617856 - RNA, 19 nt, Human
guuucuauguguagggcgg

SEQ ID NO: 1617857 - RNA, 12 nt, Human
aaggucauuuuu

SEQ ID NO: 1617858 - RNA, 18 nt, Human
aagguauuuaauagguuu

SEQ ID NO: 1617859 - RNA, 16 nt, Human
aaguaaggaauuuuau

SEQ ID NO: 1617860 - RNA, 13 nt, Human
aaguaagcaaaga

SEQ ID NO: 1617861 - RNA, 17 nt, Human
guuucaaacuuuacuau

SEQ ID NO: 1617862 - RNA, 15 nt, Human
aaggcuccaggagca

SEQ ID NO: 1617863 - RNA, 18 nt, Human
aaggcuccaggagcagcc

SEQ ID NO: 1617864 - RNA, 16 nt, Human
aaggcuccaggagcag

SEQ ID NO: 1617865 - RNA, 14 nt, Human
guuucaaacuuuac

SEQ ID NO: 1617866 - RNA, 16 nt, Human
guuucaaacuuuacua

SEQ ID NO: 1617867 - RNA, 13 nt, Human
guuucaaacuuua

SEQ ID NO: 1617868 - RNA, 18 nt, Human
aaggcucgagcaugccug

SEQ ID NO: 1617869 - RNA, 16 nt, Human
aaggcucgagcaugcc

SEQ ID NO: 1617870 - RNA, 22 nt, Human
aaggcuccaggagcagccacau

SEQ ID NO: 1617871 - RNA, 19 nt, Human
aaggcuccaggagcagcca

SEQ ID NO: 1617872 - RNA, 20 nt, Human
aaggcucgagcaugccugga

SEQ ID NO: 1617873 - RNA, 19 nt, Human
aaggcucgagcaugccugg

SEQ ID NO: 1617874 - RNA, 22 nt, Human
aaggcucgagcaugccuggaug

SEQ ID NO: 1617875 - RNA, 17 nt, Human
guugggccaggagccuc

SEQ ID NO: 1617876 - RNA, 15 nt, Human
guugggccaggagcc

SEQ ID NO: 1617877 - RNA, 13 nt, Human
guugggcuggugu

SEQ ID NO: 1617878 - RNA, 15 nt, Human
guugggcugguguca

SEQ ID NO: 1617879 - RNA, 20 nt, Human
guuuaauauuaaagccaugu

SEQ ID NO: 1617880 - RNA, 13 nt, Human
guuuauugucaaa

SEQ ID NO: 1617881 - RNA, 13 nt, Human
guugcccaggcug

SEQ ID NO: 1617882 - RNA, 12 nt, Human
guugcccaggcu

SEQ ID NO: 1617883 - RNA, 23 nt, Human
guugcccaggcaggucuugaacu

SEQ ID NO: 1617884 - RNA, 14 nt, Human
guugcccaggcugg

SEQ ID NO: 1617885 - RNA, 22 nt, Human
guugccuaaauccauuuggaaa

SEQ ID NO: 1617886 - RNA, 16 nt, Human
aaggccaaaggaagca

SEQ ID NO: 1617887 - RNA, 13 nt, Human
aaggauacaaaag

SEQ ID NO: 1617888 - RNA, 21 nt, Human
aaggauacaaaagcaugugag

SEQ ID NO: 1617889 - RNA, 11 nt, Human
aaggauaaagu

SEQ ID NO: 1617890 - RNA, 17 nt, Human
aaggagauuuacaacug

SEQ ID NO: 1617891 - RNA, 14 nt, Human
aaggagauuuacaa

SEQ ID NO: 1617892 - RNA, 18 nt, Human
aaggaauaccuguccccc

SEQ ID NO: 1617893 - RNA, 11 nt, Human
aaggagagcua

SEQ ID NO: 1617894 - RNA, 18 nt, Human
aaggaggaagagaaaaaa

SEQ ID NO: 1617895 - RNA, 20 nt, Human
aaggaggggauagagagaga

SEQ ID NO: 1617896 - RNA, 13 nt, Human
aaggaagcacaug

SEQ ID NO: 1617897 - RNA, 15 nt, Human
aaggaagacuucauc

SEQ ID NO: 1617898 - RNA, 14 nt, Human
aaggaagacuucau

SEQ ID NO: 1617899 - RNA, 16 nt, Human
aaggaagcacaugccu

SEQ ID NO: 1617900 - RNA, 17 nt, Human
aaggaauaccugucccc

SEQ ID NO: 1617901 - RNA, 21 nt, Human
aaggaauaaauugcuccuuga

SEQ ID NO: 1617902 - RNA, 15 nt, Human
aaggaaagagggagg

SEQ ID NO: 1617903 - RNA, 20 nt, Human
aagcuccaucuccacuccag

SEQ ID NO: 1617904 - RNA, 14 nt, Human
aagcuccaucucca

SEQ ID NO: 1617905 - RNA, 16 nt, Human
aagucuuucacauuua

SEQ ID NO: 1617906 - RNA, 21 nt, Human
aagucaugcguuuaaucacau

SEQ ID NO: 1617907 - RNA, 21 nt, Human
aagugaaaaaggaggaagaga

SEQ ID NO: 1617908 - RNA, 17 nt, Human
aagugaagacaaugacu

SEQ ID NO: 1617909 - RNA, 19 nt, Human
aagugaagacaaugacuua

SEQ ID NO: 1617910 - RNA, 14 nt, Human
aagugagagcuggg

SEQ ID NO: 1617911 - RNA, 12 nt, Human
aagugagagagg

SEQ ID NO: 1617912 - RNA, 15 nt, Human
aagugagagcugggu

SEQ ID NO: 1617913 - RNA, 15 nt, Human
guuuuucauaaagca

SEQ ID NO: 1617914 - RNA, 19 nt, Human
aaguaaugauaacuggaaa

SEQ ID NO: 1617915 - RNA, 14 nt, Human
aaguaaugauaacu

SEQ ID NO: 1617916 - RNA, 13 nt, Human
aaguacacuguuu

SEQ ID NO: 1617917 - RNA, 18 nt, Human
aaguacacuguuucaaac

SEQ ID NO: 1617918 - RNA, 22 nt, Human
guuuugccauguuggccaggcu

SEQ ID NO: 1617919 - RNA, 21 nt, Human
guuuugccauguuggccaggc

SEQ ID NO: 1617920 - RNA, 20 nt, Human
guuuugccauguuggccagg

SEQ ID NO: 1617921 - RNA, 16 nt, Human
guuuugccauguuggc

SEQ ID NO: 1617922 - RNA, 15 nt, Human
guuucugccgcagcc

SEQ ID NO: 1617923 - RNA, 18 nt, Human
guuucugccgcagcccug

SEQ ID NO: 1617924 - RNA, 14 nt, Human
guuucugccgcagc

SEQ ID NO: 1617925 - RNA, 13 nt, Human
aaguauuagaaua

SEQ ID NO: 1617926 - RNA, 17 nt, Human
aaguauuaagcauauau

SEQ ID NO: 1617927 - RNA, 16 nt, Human
aaguauuaagcauaua

SEQ ID NO: 1617928 - RNA, 18 nt, Human
aaguauuaagcauauauu

SEQ ID NO: 1617929 - RNA, 23 nt, Human
aaguacacuguuucaaacuuuac

SEQ ID NO: 1617930 - RNA, 19 nt, Human
aaguacacuguuucaaacu

SEQ ID NO: 1617931 - RNA, 20 nt, Human
aaguacacuguuucaaacuu

SEQ ID NO: 1617932 - RNA, 15 nt, Human
aaguauuaagcauau

SEQ ID NO: 1617933 - RNA, 20 nt, Human
uaaaauaauuuuuauauuug

SEQ ID NO: 1617934 - RNA, 22 nt, Human
uaaaauaccagccaguaaaugg

SEQ ID NO: 1617935 - RNA, 20 nt, Human
uaaaagacagugaaagaaaa

SEQ ID NO: 1617936 - RNA, 18 nt, Human
aagugauucuccugccuc

SEQ ID NO: 1617937 - RNA, 17 nt, Human
aagugauucuccugccu

SEQ ID NO: 1617938 - RNA, 16 nt, Human
aagugauucuccugcc

SEQ ID NO: 1617939 - RNA, 15 nt, Human
aagugauucuccugc

SEQ ID NO: 1617940 - RNA, 19 nt, Human
aagugauucuccugccuca

SEQ ID NO: 1617941 - RNA, 20 nt, Human
aagugauucuccugccucag

SEQ ID NO: 1617942 - RNA, 21 nt, Human
aagugauucucaugccucagc

SEQ ID NO: 1617943 - RNA, 16 nt, Human
aagugaggaugaaaaa

SEQ ID NO: 1617944 - RNA, 20 nt, Human
aagugauucucaugccucag

SEQ ID NO: 1617945 - RNA, 22 nt, Human
uaaaauauuccugcauuuguga

SEQ ID NO: 1617946 - RNA, 13 nt, Human
uaaaauauuccug

SEQ ID NO: 1617947 - RNA, 23 nt, Human
uaaaagaauauuuuaacuuccuu

SEQ ID NO: 1617948 - RNA, 12 nt, Human
uaaaagaaugau

SEQ ID NO: 1617949 - RNA, 22 nt, Human
uaaaacuugauguguuaucucu

SEQ ID NO: 1617950 - RNA, 20 nt, Human
uaaaacuugauguguuaucu

SEQ ID NO: 1617951 - RNA, 19 nt, Human
uaaaaaucucaaauuucua

SEQ ID NO: 1617952 - RNA, 20 nt, Human
uaaaaaucucaaauuucuaa

SEQ ID NO: 1617953 - RNA, 21 nt, Human
uaaaaaucucaaauuucuaaa

SEQ ID NO: 1617954 - RNA, 15 nt, Human
guuuuucuucucccu

SEQ ID NO: 1617955 - RNA, 15 nt, Human
uaaaaaguggaaaaa

SEQ ID NO: 1617956 - RNA, 19 nt, Human
uaaaaauaaaaaacacugg

SEQ ID NO: 1617957 - RNA, 18 nt, Human
uaaaaauaaaaaacacug

SEQ ID NO: 1617958 - RNA, 15 nt, Human
uaaaaaucucaaauu

SEQ ID NO: 1617959 - RNA, 16 nt, Human
uaaaaaucucaaauuu

SEQ ID NO: 1617960 - RNA, 17 nt, Human
uaaaaaucucaaauuuc

SEQ ID NO: 1617961 - RNA, 21 nt, Human
uaaaaauaaaaaacacuggga

SEQ ID NO: 1617962 - RNA, 13 nt, Human
aagacgcugugcu

SEQ ID NO: 1617963 - RNA, 19 nt, Human
aagacgcugugcugcccug

SEQ ID NO: 1617964 - RNA, 18 nt, Human
aagacgcugugcugcccu

SEQ ID NO: 1617965 - RNA, 17 nt, Human
aagacgcugugcugccc

SEQ ID NO: 1617966 - RNA, 15 nt, Human
aagacgcugugcugc

SEQ ID NO: 1617967 - RNA, 11 nt, Human
gugccuuaugg

SEQ ID NO: 1617968 - RNA, 19 nt, Human
aagaccuucuccuucaccu

SEQ ID NO: 1617969 - RNA, 18 nt, Human
aagaccuucuccuucacc

SEQ ID NO: 1617970 - RNA, 15 nt, Human
aagaccuucuccuuc

SEQ ID NO: 1617971 - RNA, 17 nt, Human
aagacugcauuauauuu

SEQ ID NO: 1617972 - RNA, 16 nt, Human
aagacugcacaucaaa

SEQ ID NO: 1617973 - RNA, 23 nt, Human
aagacugaguacguugugcauuu

SEQ ID NO: 1617974 - RNA, 20 nt, Human
aagacgcugugcugcccugc

SEQ ID NO: 1617975 - RNA, 16 nt, Human
aagacuuuggaaagac

SEQ ID NO: 1617976 - RNA, 23 nt, Human
aagaggaaugaaguacucauaca

SEQ ID NO: 1617977 - RNA, 22 nt, Human
guggccucccaacucaccccag

SEQ ID NO: 1617978 - RNA, 21 nt, Human
guggccucccaacucacccca

SEQ ID NO: 1617979 - RNA, 23 nt, Human
gugggaggaucucuugagccugg

SEQ ID NO: 1617980 - RNA, 17 nt, Human
gugggaagggcuacacc

SEQ ID NO: 1617981 - RNA, 18 nt, Human
gugggagcugccuguuca

SEQ ID NO: 1617982 - RNA, 15 nt, Human
gugggagcugccugu

SEQ ID NO: 1617983 - RNA, 15 nt, Human
guggggucacucugg

SEQ ID NO: 1617984 - RNA, 22 nt, Human
guggcgcagcauauucaggaag

SEQ ID NO: 1617985 - RNA, 15 nt, Human
gugggacacccugug

SEQ ID NO: 1617986 - RNA, 14 nt, Human
gugggagcugccug

SEQ ID NO: 1617987 - RNA, 13 nt, Human
gugggacacccug

SEQ ID NO: 1617988 - RNA, 19 nt, Human
aagauguagaggagaaacu

SEQ ID NO: 1617989 - RNA, 13 nt, Human
aagauguagagga

SEQ ID NO: 1617990 - RNA, 20 nt, Human
gugucaagagggucugagga

SEQ ID NO: 1617991 - RNA, 17 nt, Human
guguauuuuuuuacuaa

SEQ ID NO: 1617992 - RNA, 23 nt, Human
guguauuuuuuuacuaauagaca

SEQ ID NO: 1617993 - RNA, 16 nt, Human
gugucagcauagaagu

SEQ ID NO: 1617994 - RNA, 21 nt, Human
gugugaccacugcagaagaca

SEQ ID NO: 1617995 - RNA, 22 nt, Human
gugugacaaggauugcuacugu

SEQ ID NO: 1617996 - RNA, 16 nt, Human
gugugguagagugugc

SEQ ID NO: 1617997 - RNA, 20 nt, Human
gugugugaaaaugugugugu

SEQ ID NO: 1617998 - RNA, 14 nt, Human
aagaugaaaauauu

SEQ ID NO: 1617999 - RNA, 13 nt, Human
aagaugaaaauau

SEQ ID NO: 1618000 - RNA, 14 nt, Human
aagaguaggaagac

SEQ ID NO: 1618001 - RNA, 13 nt, Human
aagaguaggaaga

SEQ ID NO: 1618002 - RNA, 16 nt, Human
aagaugcuucucacug

SEQ ID NO: 1618003 - RNA, 17 nt, Human
aagaugcuucucacugc

SEQ ID NO: 1618004 - RNA, 19 nt, Human
aagaugcuucucacugcca

SEQ ID NO: 1618005 - RNA, 23 nt, Human
aagauggcugugccucugccugu

SEQ ID NO: 1618006 - RNA, 21 nt, Human
aagauggcugugccucugccu

SEQ ID NO: 1618007 - RNA, 20 nt, Human
aagauggcugugccucugcc

SEQ ID NO: 1618008 - RNA, 22 nt, Human
guggggucacucuggcagcuca

SEQ ID NO: 1618009 - RNA, 21 nt, Human
guggggucacucuggcagcuc

SEQ ID NO: 1618010 - RNA, 20 nt, Human
guggggucacucuggcagcu

SEQ ID NO: 1618011 - RNA, 17 nt, Human
guggggucacucuggca

SEQ ID NO: 1618012 - RNA, 23 nt, Human
aagagggagggagggcuccagac

SEQ ID NO: 1618013 - RNA, 22 nt, Human
aagagggucugaggaauccaga

SEQ ID NO: 1618014 - RNA, 12 nt, Human
aagaguaggaag

SEQ ID NO: 1618015 - RNA, 23 nt, Human
guuauuuuuauuuauuuaaauuu

SEQ ID NO: 1618016 - RNA, 20 nt, Human
guucaaagauauuuugcuuu

SEQ ID NO: 1618017 - RNA, 21 nt, Human
guucaaagauauuuugcuuug

SEQ ID NO: 1618018 - RNA, 22 nt, Human
guucaaagauauuuugcuuugu

SEQ ID NO: 1618019 - RNA, 18 nt, Human
guucaagcgauucuucug

SEQ ID NO: 1618020 - RNA, 12 nt, Human
guuaagagaaau

SEQ ID NO: 1618021 - RNA, 11 nt, Human
guuaagagaaa

SEQ ID NO: 1618022 - RNA, 18 nt, Human
guuaagagaaaugagcuu

SEQ ID NO: 1618023 - RNA, 20 nt, Human
guuaggcauugugggaaggg

SEQ ID NO: 1618024 - RNA, 19 nt, Human
guuaggcauugugggaagg

SEQ ID NO: 1618025 - RNA, 20 nt, Human
aagccugaguuugcuuucaa

SEQ ID NO: 1618026 - RNA, 16 nt, Human
aagcuaggccuggcca

SEQ ID NO: 1618027 - RNA, 12 nt, Human
aagcuaggccug

SEQ ID NO: 1618028 - RNA, 13 nt, Human
guucagcuccagc

SEQ ID NO: 1618029 - RNA, 15 nt, Human
guucagcuccagcuc

SEQ ID NO: 1618030 - RNA, 13 nt, Human
guucagccugccu

SEQ ID NO: 1618031 - RNA, 20 nt, Human
aagcucacagaccuuugaac

SEQ ID NO: 1618032 - RNA, 17 nt, Human
aagcucagggccuggcu

SEQ ID NO: 1618033 - RNA, 16 nt, Human
aagcucagggccuggc

SEQ ID NO: 1618034 - RNA, 13 nt, Human
aagcucagggccu

SEQ ID NO: 1618035 - RNA, 12 nt, Human
aagcucagggcc

SEQ ID NO: 1618036 - RNA, 14 nt, Human
aagcuccagguaga

SEQ ID NO: 1618037 - RNA, 13 nt, Human
aagcuccagguag

SEQ ID NO: 1618038 - RNA, 18 nt, Human
aagcuccaagcucccagg

SEQ ID NO: 1618039 - RNA, 17 nt, Human
aagcuccaagcucccag

SEQ ID NO: 1618040 - RNA, 19 nt, Human
aagcucagggccuggcuca

SEQ ID NO: 1618041 - RNA, 18 nt, Human
aagcucagggccuggcuc

SEQ ID NO: 1618042 - RNA, 20 nt, Human
aagcucagggccuggcucag

SEQ ID NO: 1618043 - RNA, 13 nt, Human
aagcauuguaaau

SEQ ID NO: 1618044 - RNA, 18 nt, Human
aagcauuguaaaugugcu

SEQ ID NO: 1618045 - RNA, 16 nt, Human
aagcauuuagauguau

SEQ ID NO: 1618046 - RNA, 21 nt, Human
gugugugcgccuacaggagug

SEQ ID NO: 1618047 - RNA, 12 nt, Human
aagcagugcaug

SEQ ID NO: 1618048 - RNA, 20 nt, Human
aagcagugcaugcugucccu

SEQ ID NO: 1618049 - RNA, 15 nt, Human
aagcagugcaugcug

SEQ ID NO: 1618050 - RNA, 14 nt, Human
aagcagugcaugcu

SEQ ID NO: 1618051 - RNA, 22 nt, Human
aagcccaggaaaggcuccagga

SEQ ID NO: 1618052 - RNA, 19 nt, Human
aagcccaggaaaggcucca

SEQ ID NO: 1618053 - RNA, 17 nt, Human
aagcccaggaaaggcuc

SEQ ID NO: 1618054 - RNA, 14 nt, Human
aagcccaggaaagg

SEQ ID NO: 1618055 - RNA, 22 nt, Human
aagccaaagcuaggccuggcca

SEQ ID NO: 1618056 - RNA, 20 nt, Human
aagccgcuggggccaguugg

SEQ ID NO: 1618057 - RNA, 23 nt, Human
aagcccuuccaugucgccucugc

SEQ ID NO: 1618058 - RNA, 20 nt, Human
aagcccuuccaugucgccuc

SEQ ID NO: 1618059 - RNA, 15 nt, Human
aagcccuuccauguc

SEQ ID NO: 1618060 - RNA, 21 nt, Human
aagcccugugcuccauggcug

SEQ ID NO: 1618061 - RNA, 19 nt, Human
aagcccugagcuuucugcu

SEQ ID NO: 1618062 - RNA, 19 nt, Human
aauagucaaauugugugaa

SEQ ID NO: 1618063 - RNA, 21 nt, Human
aauagcuagacuggugacuga

SEQ ID NO: 1618064 - RNA, 20 nt, Human
aauagcuagacuggugacug

SEQ ID NO: 1618065 - RNA, 14 nt, Human
aauagcuagacugg

SEQ ID NO: 1618066 - RNA, 21 nt, Human
aauauauuuuaagacgaaaca

SEQ ID NO: 1618067 - RNA, 21 nt, Human
aauaguucagguaacaggcag

SEQ ID NO: 1618068 - RNA, 21 nt, Human
aauauauucagccuggcuuca

SEQ ID NO: 1618069 - RNA, 19 nt, Human
uaacauguaauuaaguacu

SEQ ID NO: 1618070 - RNA, 14 nt, Human
uaacaugaauauuu

SEQ ID NO: 1618071 - RNA, 21 nt, Human
uaacaugaauauuuaguguuc

SEQ ID NO: 1618072 - RNA, 20 nt, Human
uaacaugaauauuuaguguu

SEQ ID NO: 1618073 - RNA, 16 nt, Human
uaacauguuaaaccau

SEQ ID NO: 1618074 - RNA, 15 nt, Human
uaacauguuaaacca

SEQ ID NO: 1618075 - RNA, 12 nt, Human
uaacauguuaaa

SEQ ID NO: 1618076 - RNA, 19 nt, Human
uaacaugaauauuuagugu

SEQ ID NO: 1618077 - RNA, 21 nt, Human
uaacuuccuuggacucauuuu

SEQ ID NO: 1618078 - RNA, 20 nt, Human
uaacuugucuuuggacccug

SEQ ID NO: 1618079 - RNA, 16 nt, Human
uaacuugucuuuggac

SEQ ID NO: 1618080 - RNA, 13 nt, Human
uaagaagugaaaa

SEQ ID NO: 1618081 - RNA, 23 nt, Human
uaagacaaaaagcuacuuauugu

SEQ ID NO: 1618082 - RNA, 13 nt, Human
uaagacaaauaug

SEQ ID NO: 1618083 - RNA, 13 nt, Human
uaacuucacauau

SEQ ID NO: 1618084 - RNA, 14 nt, Human
uaacuaaaagguau

SEQ ID NO: 1618085 - RNA, 17 nt, Human
uaacguauaaaagccug

SEQ ID NO: 1618086 - RNA, 13 nt, Human
uaacguauaaaag

SEQ ID NO: 1618087 - RNA, 18 nt, Human
aauaccugucccccugac

SEQ ID NO: 1618088 - RNA, 15 nt, Human
aauaccugucccccu

SEQ ID NO: 1618089 - RNA, 19 nt, Human
aauaccugucccccugaca

SEQ ID NO: 1618090 - RNA, 21 nt, Human
aauaccugucccccugacaac

SEQ ID NO: 1618091 - RNA, 23 nt, Human
aauacaucccuuaccugggaaag

SEQ ID NO: 1618092 - RNA, 18 nt, Human
aauaccaugccauuuaaa

SEQ ID NO: 1618093 - RNA, 19 nt, Human
aauaccagccaguaaaugg

SEQ ID NO: 1618094 - RNA, 17 nt, Human
aauaccagccaguaaau

SEQ ID NO: 1618095 - RNA, 23 nt, Human
aauaccacaggaaccacaagacu

SEQ ID NO: 1618096 - RNA, 12 nt, Human
aauaccaaggaa

SEQ ID NO: 1618097 - RNA, 13 nt, Human
uaacaaugcugua

SEQ ID NO: 1618098 - RNA, 13 nt, Human
aauacagaggcaa

SEQ ID NO: 1618099 - RNA, 21 nt, Human
uaaauuaacuuuuauaaacuu

SEQ ID NO: 1618100 - RNA, 22 nt, Human
uaaauuaacuuuuauaaacuuu

SEQ ID NO: 1618101 - RNA, 18 nt, Human
aaguguauuuuuuuacua

SEQ ID NO: 1618102 - RNA, 21 nt, Human
aaguguauuuuuuuacuaaua

SEQ ID NO: 1618103 - RNA, 18 nt, Human
uaaaugaaaaucgugaca

SEQ ID NO: 1618104 - RNA, 19 nt, Human
uaaauuaacuuuuauaaac

SEQ ID NO: 1618105 - RNA, 20 nt, Human
uaaauuaacuuuuauaaacu

SEQ ID NO: 1618106 - RNA, 13 nt, Human
uaaaugugguaaa

SEQ ID NO: 1618107 - RNA, 17 nt, Human
aaucccauuuaaaaaaa

SEQ ID NO: 1618108 - RNA, 16 nt, Human
aaucccauuauucaaa

SEQ ID NO: 1618109 - RNA, 14 nt, Human
aaucccauuauuca

SEQ ID NO: 1618110 - RNA, 12 nt, Human
aaucccaggaug

SEQ ID NO: 1618111 - RNA, 21 nt, Human
aaucccauuauucaaaguugc

SEQ ID NO: 1618112 - RNA, 12 nt, Human
aaucuaaaugga

SEQ ID NO: 1618113 - RNA, 13 nt, Human
aaucucaaauaac

SEQ ID NO: 1618114 - RNA, 20 nt, Human
uaaguaaugauaacuggaaa

SEQ ID NO: 1618115 - RNA, 19 nt, Human
uaaguaaaaccacagcagu

SEQ ID NO: 1618116 - RNA, 18 nt, Human
uaaguaaaaccacagcag

SEQ ID NO: 1618117 - RNA, 17 nt, Human
uaaguaaaaccacagca

SEQ ID NO: 1618118 - RNA, 16 nt, Human
uaaguaaaaccacagc

SEQ ID NO: 1618119 - RNA, 15 nt, Human
uaaguaaaaccacag

SEQ ID NO: 1618120 - RNA, 13 nt, Human
uaaguaaaaccac

SEQ ID NO: 1618121 - RNA, 18 nt, Human
uaaggaugcuuguacaua

SEQ ID NO: 1618122 - RNA, 18 nt, Human
uaagguuaccuuuguucc

SEQ ID NO: 1618123 - RNA, 19 nt, Human
uaaggacuuguuagaucua

SEQ ID NO: 1618124 - RNA, 16 nt, Human
uaaggacuuguuagau

SEQ ID NO: 1618125 - RNA, 15 nt, Human
uaaggacuuguuaga

SEQ ID NO: 1618126 - RNA, 13 nt, Human
uaaggacuuguua

SEQ ID NO: 1618127 - RNA, 17 nt, Human
uaaguguguguuuuuca

SEQ ID NO: 1618128 - RNA, 14 nt, Human
uaagcaaaauguga

SEQ ID NO: 1618129 - RNA, 14 nt, Human
uaagauucauauuu

SEQ ID NO: 1618130 - RNA, 21 nt, Human
uaagcaaaaugugauauguac

SEQ ID NO: 1618131 - RNA, 15 nt, Human
uaagcaaaaugugau

SEQ ID NO: 1618132 - RNA, 21 nt, Human
uaagcuauucaguaauaacuc

SEQ ID NO: 1618133 - RNA, 16 nt, Human
uaagcauauauuuuua

SEQ ID NO: 1618134 - RNA, 13 nt, Human
uaagcauauauuu

SEQ ID NO: 1618135 - RNA, 9 nt, Human
uaaggaaua

SEQ ID NO: 1618136 - RNA, 13 nt, Human
uaaggaagacaau

SEQ ID NO: 1618137 - RNA, 21 nt, Human
uaaggaaaaguuuaauauuaa

SEQ ID NO: 1618138 - RNA, 19 nt, Human
uaaggaaaaguuuaauauu

SEQ ID NO: 1618139 - RNA, 17 nt, Human
uaaggaaaaguuuaaua

SEQ ID NO: 1618140 - RNA, 18 nt, Human
uaaggaauaccugucccc

SEQ ID NO: 1618141 - RNA, 17 nt, Human
uaaggaauaccuguccc

SEQ ID NO: 1618142 - RNA, 22 nt, Human
uaaggaauuuuauuuuuuucug

SEQ ID NO: 1618143 - RNA, 22 nt, Human
uaaggacuucuuuaauuuugga

SEQ ID NO: 1618144 - RNA, 16 nt, Human
uaaggacuucuuuaau

SEQ ID NO: 1618145 - RNA, 15 nt, Human
uaaggacuucuuuaa

SEQ ID NO: 1618146 - RNA, 14 nt, Human
uaaggacuucuuua

SEQ ID NO: 1618147 - RNA, 16 nt, Human
aaucagccuaguugau

SEQ ID NO: 1618148 - RNA, 11 nt, Human
aaucagccugc

SEQ ID NO: 1618149 - RNA, 19 nt, Human
aaucagcauucucacuccu

SEQ ID NO: 1618150 - RNA, 18 nt, Human
aaucagcauucucacucc

SEQ ID NO: 1618151 - RNA, 18 nt, Human
aaucagccugcuccagcu

SEQ ID NO: 1618152 - RNA, 13 nt, Human
aaucagccugcuc

SEQ ID NO: 1618153 - RNA, 19 nt, Human
aaucagccugcuccagcug

SEQ ID NO: 1618154 - RNA, 15 nt, Human
aauauuuauuuuaau

SEQ ID NO: 1618155 - RNA, 15 nt, Human
aauauuuauagguca

SEQ ID NO: 1618156 - RNA, 18 nt, Human
uaauuuuuauauuugaaa

SEQ ID NO: 1618157 - RNA, 21 nt, Human
uaauuuuuauauuugaaauau

SEQ ID NO: 1618158 - RNA, 19 nt, Human
uaauuuuuauauuugaaau

SEQ ID NO: 1618159 - RNA, 22 nt, Human
uaauuccguagguuauuuucag

SEQ ID NO: 1618160 - RNA, 16 nt, Human
aaugauuucauucaau

SEQ ID NO: 1618161 - RNA, 13 nt, Human
aaugauuuuuaaa

SEQ ID NO: 1618162 - RNA, 11 nt, Human
aaugcaaacca

SEQ ID NO: 1618163 - RNA, 12 nt, Human
aaugcaaaccau

SEQ ID NO: 1618164 - RNA, 14 nt, Human
aaugcaaaccauca

SEQ ID NO: 1618165 - RNA, 13 nt, Human
aaugcaccuggaa

SEQ ID NO: 1618166 - RNA, 23 nt, Human
uaauuauaucugaggaauucugu

SEQ ID NO: 1618167 - RNA, 22 nt, Human
uaauuauaucugaggaauucug

SEQ ID NO: 1618168 - RNA, 21 nt, Human
uaauuauaucugaggaauucu

SEQ ID NO: 1618169 - RNA, 19 nt, Human
uaauuauaucugaggaauu

SEQ ID NO: 1618170 - RNA, 20 nt, Human
uaauuauaugcuauuucuau

SEQ ID NO: 1618171 - RNA, 19 nt, Human
uaauuauaugcuauuucua

SEQ ID NO: 1618172 - RNA, 18 nt, Human
uaauuauaugcuauuucu

SEQ ID NO: 1618173 - RNA, 14 nt, Human
uaauuauaugcuau

SEQ ID NO: 1618174 - RNA, 21 nt, Human
aaugaccuuucaauaggaaaa

SEQ ID NO: 1618175 - RNA, 22 nt, Human
aaugagagacacacugaagaag

SEQ ID NO: 1618176 - RNA, 22 nt, Human
aaugagaaaucuaaaaaacgaa

SEQ ID NO: 1618177 - RNA, 12 nt, Human
aaugagaaaucu

SEQ ID NO: 1618178 - RNA, 11 nt, Human
aaugagccugg

SEQ ID NO: 1618179 - RNA, 13 nt, Human
aaugagccuggca

SEQ ID NO: 1618180 - RNA, 12 nt, Human
aaugagccuggc

SEQ ID NO: 1618181 - RNA, 14 nt, Human
aaugagccuggcaa

SEQ ID NO: 1618182 - RNA, 18 nt, Human
aaugaggucagagccugc

SEQ ID NO: 1618183 - RNA, 16 nt, Human
aaugaggucagagccu

SEQ ID NO: 1618184 - RNA, 24 nt, Human
aaugauuucagcucacugcaaccu

SEQ ID NO: 1618185 - RNA, 21 nt, Human
uacaaaaaaaaaaaaaaauua

SEQ ID NO: 1618186 - RNA, 22 nt, Human
uaauuuuuuuuuuccuuuuaaa

SEQ ID NO: 1618187 - RNA, 18 nt, Human
uaauuuuuuugagacaga

SEQ ID NO: 1618188 - RNA, 15 nt, Human
uaauuuuuguauuuu

SEQ ID NO: 1618189 - RNA, 13 nt, Human
uacaaugcugugc

SEQ ID NO: 1618190 - RNA, 14 nt, Human
uacaaugcugugcc

SEQ ID NO: 1618191 - RNA, 16 nt, Human
uacaaugcugugcccu

SEQ ID NO: 1618192 - RNA, 21 nt, Human
aaugcuguauuuuaaaagaau

SEQ ID NO: 1618193 - RNA, 20 nt, Human
aaugcuguauuuuaaaagaa

SEQ ID NO: 1618194 - RNA, 22 nt, Human
aaugcuggcuguuggcuggggg

SEQ ID NO: 1618195 - RNA, 21 nt, Human
aaugcuggcuguuggcugggg

SEQ ID NO: 1618196 - RNA, 22 nt, Human
aaugcuguauuuuaaaagaaug

SEQ ID NO: 1618197 - RNA, 13 nt, Human
aauggaagacagc

SEQ ID NO: 1618198 - RNA, 20 nt, Human
aauguaagggaaacugccag

SEQ ID NO: 1618199 - RNA, 12 nt, Human
aauguaaauaaa

SEQ ID NO: 1618200 - RNA, 16 nt, Human
aaugguuuucuugugu

SEQ ID NO: 1618201 - RNA, 16 nt, Human
aaugguuuucaaaaua

SEQ ID NO: 1618202 - RNA, 14 nt, Human
aaugguuuucaaaa

SEQ ID NO: 1618203 - RNA, 16 nt, Human
aauggaagacagcucu

SEQ ID NO: 1618204 - RNA, 18 nt, Human
aauggaagacagcucuua

SEQ ID NO: 1618205 - RNA, 17 nt, Human
uacagagacagaaagca

SEQ ID NO: 1618206 - RNA, 19 nt, Human
uacagacaaagcguggugg

SEQ ID NO: 1618207 - RNA, 22 nt, Human
uacagagcccacgcccccacug

SEQ ID NO: 1618208 - RNA, 19 nt, Human
uacagagcccacgccccca

SEQ ID NO: 1618209 - RNA, 23 nt, Human
uacagagcagacaguuaagagaa

SEQ ID NO: 1618210 - RNA, 15 nt, Human
uacagacaaagcgug

SEQ ID NO: 1618211 - RNA, 14 nt, Human
uacagacaaagcgu

SEQ ID NO: 1618212 - RNA, 13 nt, Human
uacagacaaagcg

SEQ ID NO: 1618213 - RNA, 17 nt, Human
uacaccgggccuggaga

SEQ ID NO: 1618214 - RNA, 15 nt, Human
uacaccgggccugga

SEQ ID NO: 1618215 - RNA, 22 nt, Human
aauuauuuauuaaaugcccagc

SEQ ID NO: 1618216 - RNA, 11 nt, Human
aauucaguugu

SEQ ID NO: 1618217 - RNA, 22 nt, Human
aauucaguuguuagugugucuu

SEQ ID NO: 1618218 - RNA, 17 nt, Human
aauucaguuguuagugu

SEQ ID NO: 1618219 - RNA, 22 nt, Human
aauuaugugccagauuuaugca

SEQ ID NO: 1618220 - RNA, 21 nt, Human
aauuauuuauuaaaugcccag

SEQ ID NO: 1618221 - RNA, 14 nt, Human
aauuacauuuguau

SEQ ID NO: 1618222 - RNA, 13 nt, Human
aauuacauuugua

SEQ ID NO: 1618223 - RNA, 20 nt, Human
aauuacaggaaguacuggag

SEQ ID NO: 1618224 - RNA, 19 nt, Human
aauuacaggaaguacugga

SEQ ID NO: 1618225 - RNA, 17 nt, Human
aauuacaggaaguacug

SEQ ID NO: 1618226 - RNA, 16 nt, Human
uaccugaggggccucu

SEQ ID NO: 1618227 - RNA, 16 nt, Human
uaccugccaggaagcc

SEQ ID NO: 1618228 - RNA, 15 nt, Human
uaccugaggggccuc

SEQ ID NO: 1618229 - RNA, 13 nt, Human
uaccugaggggcc

SEQ ID NO: 1618230 - RNA, 16 nt, Human
uaccugaagucuuugu

SEQ ID NO: 1618231 - RNA, 14 nt, Human
uaccugaagucuuu

SEQ ID NO: 1618232 - RNA, 13 nt, Human
uaccugaagucuu

SEQ ID NO: 1618233 - RNA, 23 nt, Human
uaccugaagcuaucguaaaauua

SEQ ID NO: 1618234 - RNA, 15 nt, Human
uacccucauguucuu

SEQ ID NO: 1618235 - RNA, 22 nt, Human
uaccucuugagccuugaacuuu

SEQ ID NO: 1618236 - RNA, 23 nt, Human
uaccucuugagccuugaacuuug

SEQ ID NO: 1618237 - RNA, 23 nt, Human
uacccgggaagggggcugggaca

SEQ ID NO: 1618238 - RNA, 19 nt, Human
uaccagggacugaggggag

SEQ ID NO: 1618239 - RNA, 23 nt, Human
uacccccugcaaagcccagcuug

SEQ ID NO: 1618240 - RNA, 19 nt, Human
uacccccugcaaagcccag

SEQ ID NO: 1618241 - RNA, 15 nt, Human
uacccccugcaaagc

SEQ ID NO: 1618242 - RNA, 12 nt, Human
uaccagcagagc

SEQ ID NO: 1618243 - RNA, 14 nt, Human
uaccagcagagcac

SEQ ID NO: 1618244 - RNA, 13 nt, Human
uaccagcagagca

SEQ ID NO: 1618245 - RNA, 22 nt, Human
uaccagcagagcaccuuagaca

SEQ ID NO: 1618246 - RNA, 18 nt, Human
uaccagccaguaaauggg

SEQ ID NO: 1618247 - RNA, 12 nt, Human
uacauucuguua

SEQ ID NO: 1618248 - RNA, 13 nt, Human
uacauuuccuaaa

SEQ ID NO: 1618249 - RNA, 20 nt, Human
aauguucaucaaugaaugaa

SEQ ID NO: 1618250 - RNA, 16 nt, Human
aauguucaucaaugaa

SEQ ID NO: 1618251 - RNA, 21 nt, Human
aauguucucucuucuccaccu

SEQ ID NO: 1618252 - RNA, 12 nt, Human
aauuaacuuuua

SEQ ID NO: 1618253 - RNA, 13 nt, Human
aauuaacuuuuau

SEQ ID NO: 1618254 - RNA, 17 nt, Human
aauuaaguacuauguau

SEQ ID NO: 1618255 - RNA, 16 nt, Human
aauuaaguacuaugua

SEQ ID NO: 1618256 - RNA, 15 nt, Human
aauuaacuuuuauaa

SEQ ID NO: 1618257 - RNA, 16 nt, Human
aauuaacuuuuauaaa

SEQ ID NO: 1618258 - RNA, 13 nt, Human
aauguucaucaau

SEQ ID NO: 1618259 - RNA, 23 nt, Human
uacagagcccacgcccccacugg

SEQ ID NO: 1618260 - RNA, 21 nt, Human
aaugugcugaaugguuuucaa

SEQ ID NO: 1618261 - RNA, 14 nt, Human
acagaccuuugaac

SEQ ID NO: 1618262 - RNA, 20 nt, Human
uaucacaaaucuuaacuuga

SEQ ID NO: 1618263 - RNA, 16 nt, Human
uaucacaaaucuuaac

SEQ ID NO: 1618264 - RNA, 14 nt, Human
uaucacaaaucuua

SEQ ID NO: 1618265 - RNA, 19 nt, Human
uaucacccagaagaaaaua

SEQ ID NO: 1618266 - RNA, 22 nt, Human
uaucacccagaagaaaauagug

SEQ ID NO: 1618267 - RNA, 17 nt, Human
uaucagaauucucagaa

SEQ ID NO: 1618268 - RNA, 19 nt, Human
uauccaacaucaacaucuu

SEQ ID NO: 1618269 - RNA, 15 nt, Human
uaucccggcugcccu

SEQ ID NO: 1618270 - RNA, 16 nt, Human
acacuuacacuuuaug

SEQ ID NO: 1618271 - RNA, 20 nt, Human
acacuguuucaaacuuuacu

SEQ ID NO: 1618272 - RNA, 23 nt, Human
acacuguuucaaacuuuacuaug

SEQ ID NO: 1618273 - RNA, 19 nt, Human
acacucauugaccugaggc

SEQ ID NO: 1618274 - RNA, 17 nt, Human
acacucauugaccugag

SEQ ID NO: 1618275 - RNA, 17 nt, Human
acacuguuucaaacuuu

SEQ ID NO: 1618276 - RNA, 18 nt, Human
acacuguuucaaacuuua

SEQ ID NO: 1618277 - RNA, 21 nt, Human
acacuuacacuuuaugcacaa

SEQ ID NO: 1618278 - RNA, 18 nt, Human
acacuuacacuuuaugca

SEQ ID NO: 1618279 - RNA, 14 nt, Human
acacuuccauaauc

SEQ ID NO: 1618280 - RNA, 22 nt, Human
acacuucaggcucuucuccuuu

SEQ ID NO: 1618281 - RNA, 19 nt, Human
acacuucaggcucuucucc

SEQ ID NO: 1618282 - RNA, 15 nt, Human
acacuucaggcucuu

SEQ ID NO: 1618283 - RNA, 18 nt, Human
acagacauacuaaccagc

SEQ ID NO: 1618284 - RNA, 19 nt, Human
acagacauacuaaccagca

SEQ ID NO: 1618285 - RNA, 13 nt, Human
acagaaauguaca

SEQ ID NO: 1618286 - RNA, 19 nt, Human
uauauauuuuuuucugaaa

SEQ ID NO: 1618287 - RNA, 16 nt, Human
acacucauugaccuga

SEQ ID NO: 1618288 - RNA, 21 nt, Human
uauaucuauauuuuacauaaa

SEQ ID NO: 1618289 - RNA, 12 nt, Human
uauaggaauuga

SEQ ID NO: 1618290 - RNA, 23 nt, Human
uauaggaacuuaaauaaugugaa

SEQ ID NO: 1618291 - RNA, 16 nt, Human
uauaggugcuacaaaa

SEQ ID NO: 1618292 - RNA, 15 nt, Human
uauaggcaccuacca

SEQ ID NO: 1618293 - RNA, 18 nt, Human
uauagccuaggugacaga

SEQ ID NO: 1618294 - RNA, 19 nt, Human
uauagauuagaauucugua

SEQ ID NO: 1618295 - RNA, 18 nt, Human
uauagauuagaauucugu

SEQ ID NO: 1618296 - RNA, 22 nt, Human
uauacacuuacacuuuaugcac

SEQ ID NO: 1618297 - RNA, 21 nt, Human
uauaauuuaccugaagucuuu

SEQ ID NO: 1618298 - RNA, 18 nt, Human
uauaauuuaccugaaguc

SEQ ID NO: 1618299 - RNA, 17 nt, Human
acacucaaaucaagaaa

SEQ ID NO: 1618300 - RNA, 18 nt, Human
acacucaaaucaagaaac

SEQ ID NO: 1618301 - RNA, 19 nt, Human
uauaagugauugcugguuu

SEQ ID NO: 1618302 - RNA, 13 nt, Human
acacucaaaucaa

SEQ ID NO: 1618303 - RNA, 21 nt, Human
acacucaaaagcugggcaggu

SEQ ID NO: 1618304 - RNA, 22 nt, Human
acacuaaugaggaaacugcacu

SEQ ID NO: 1618305 - RNA, 15 nt, Human
acacuaaugaggaaa

SEQ ID NO: 1618306 - RNA, 20 nt, Human
uagucacugagacagcccgg

SEQ ID NO: 1618307 - RNA, 17 nt, Human
uagucacugagacagcc

SEQ ID NO: 1618308 - RNA, 22 nt, Human
acaggaaccacaagacugcaca

SEQ ID NO: 1618309 - RNA, 20 nt, Human
acaggaaaauuuuaaaaaua

SEQ ID NO: 1618310 - RNA, 15 nt, Human
acaggcagauacagg

SEQ ID NO: 1618311 - RNA, 15 nt, Human
acaggacucugccuc

SEQ ID NO: 1618312 - RNA, 16 nt, Human
acaggacucugccucc

SEQ ID NO: 1618313 - RNA, 17 nt, Human
acaggcccggcuccagg

SEQ ID NO: 1618314 - RNA, 16 nt, Human
acaggcccggcuccag

SEQ ID NO: 1618315 - RNA, 13 nt, Human
acaggcaggucca

SEQ ID NO: 1618316 - RNA, 22 nt, Human
acaggcccggcuccaggcuccu

SEQ ID NO: 1618317 - RNA, 21 nt, Human
acaggcccggcuccaggcucc

SEQ ID NO: 1618318 - RNA, 20 nt, Human
acaggcccggcuccaggcuc

SEQ ID NO: 1618319 - RNA, 18 nt, Human
acaggcccggcuccaggc

SEQ ID NO: 1618320 - RNA, 22 nt, Human
acaggcccuuccucuccacugc

SEQ ID NO: 1618321 - RNA, 15 nt, Human
acaggcccuuccucu

SEQ ID NO: 1618322 - RNA, 13 nt, Human
acaggcccuuccu

SEQ ID NO: 1618323 - RNA, 23 nt, Human
acagcuguaugauucccagccag

SEQ ID NO: 1618324 - RNA, 20 nt, Human
acagcuguaugauucccagc

SEQ ID NO: 1618325 - RNA, 19 nt, Human
acagcuguaugauucccag

SEQ ID NO: 1618326 - RNA, 14 nt, Human
acagcuguaugauu

SEQ ID NO: 1618327 - RNA, 19 nt, Human
acagcuaaugggacacuaa

SEQ ID NO: 1618328 - RNA, 17 nt, Human
acagcuaaugggacacu

SEQ ID NO: 1618329 - RNA, 16 nt, Human
acagcuaaugggacac

SEQ ID NO: 1618330 - RNA, 15 nt, Human
acagcuaaugggaca

SEQ ID NO: 1618331 - RNA, 21 nt, Human
acagcuucauuuccugugucu

SEQ ID NO: 1618332 - RNA, 19 nt, Human
acagcuucauuuccugugu

SEQ ID NO: 1618333 - RNA, 17 nt, Human
acagcuucauuuccugu

SEQ ID NO: 1618334 - RNA, 21 nt, Human
acagcuugaccgugaggccag

SEQ ID NO: 1618335 - RNA, 20 nt, Human
acagcuugaccgugaggcca

SEQ ID NO: 1618336 - RNA, 17 nt, Human
acagcuugaccgugagg

SEQ ID NO: 1618337 - RNA, 21 nt, Human
acaggaaaagcugcugacagu

SEQ ID NO: 1618338 - RNA, 20 nt, Human
acaggaaaagcugcugacag

SEQ ID NO: 1618339 - RNA, 19 nt, Human
acaggaaaagcugcugaca

SEQ ID NO: 1618340 - RNA, 23 nt, Human
acagcuugaccgugaggccagag

SEQ ID NO: 1618341 - RNA, 22 nt, Human
acagcuugaccgugaggccaga

SEQ ID NO: 1618342 - RNA, 19 nt, Human
acagcccuucuuuccacag

SEQ ID NO: 1618343 - RNA, 21 nt, Human
uaugaaacuuguguaaauaca

SEQ ID NO: 1618344 - RNA, 19 nt, Human
uaugaaacuuguguaaaua

SEQ ID NO: 1618345 - RNA, 14 nt, Human
uaugaaacuugugu

SEQ ID NO: 1618346 - RNA, 14 nt, Human
uaugaggcauuugu

SEQ ID NO: 1618347 - RNA, 15 nt, Human
uaugaggcauuuguu

SEQ ID NO: 1618348 - RNA, 21 nt, Human
uaugaggcauuuguuugaacu

SEQ ID NO: 1618349 - RNA, 23 nt, Human
uaugaggcauuuguuugaacuga

SEQ ID NO: 1618350 - RNA, 23 nt, Human
uaugaagcuuuuaugugaaacau

SEQ ID NO: 1618351 - RNA, 22 nt, Human
uaugaagcuuuuaugugaaaca

SEQ ID NO: 1618352 - RNA, 20 nt, Human
uaugaagcuuuuaugugaaa

SEQ ID NO: 1618353 - RNA, 16 nt, Human
acagcccgggcucugc

SEQ ID NO: 1618354 - RNA, 23 nt, Human
acagcccuccaucuaaacugccc

SEQ ID NO: 1618355 - RNA, 15 nt, Human
acagcccgggcucug

SEQ ID NO: 1618356 - RNA, 16 nt, Human
acagccccuccuccau

SEQ ID NO: 1618357 - RNA, 14 nt, Human
acagccccuccucc

SEQ ID NO: 1618358 - RNA, 17 nt, Human
acagcagccccugcaca

SEQ ID NO: 1618359 - RNA, 19 nt, Human
acagcacgggggccaagga

SEQ ID NO: 1618360 - RNA, 15 nt, Human
uaucuauauuuuaca

SEQ ID NO: 1618361 - RNA, 22 nt, Human
acagauuugagcucagcccugg

SEQ ID NO: 1618362 - RNA, 15 nt, Human
uaugccccauucaac

SEQ ID NO: 1618363 - RNA, 14 nt, Human
uaugcucugcaugu

SEQ ID NO: 1618364 - RNA, 23 nt, Human
uaugcuauuucuauauuuucauu

SEQ ID NO: 1618365 - RNA, 22 nt, Human
uaugcuauuucuauauuuucau

SEQ ID NO: 1618366 - RNA, 18 nt, Human
uaugcuauuucuauauuu

SEQ ID NO: 1618367 - RNA, 16 nt, Human
uaugcuauuucuauau

SEQ ID NO: 1618368 - RNA, 15 nt, Human
uaugcuauuucuaua

SEQ ID NO: 1618369 - RNA, 14 nt, Human
uaugcuauuucuau

SEQ ID NO: 1618370 - RNA, 22 nt, Human
uaugcaugaaguaauaugcaca

SEQ ID NO: 1618371 - RNA, 14 nt, Human
uaugaucacggcuc

SEQ ID NO: 1618372 - RNA, 17 nt, Human
uaugauacuugaaaauu

SEQ ID NO: 1618373 - RNA, 10 nt, Human
uaugggagag

SEQ ID NO: 1618374 - RNA, 23 nt, Human
uaugggacucaaugcacugacau

SEQ ID NO: 1618375 - RNA, 16 nt, Human
uaugggacucaaugca

SEQ ID NO: 1618376 - RNA, 20 nt, Human
uauggcccuggccuagcaua

SEQ ID NO: 1618377 - RNA, 21 nt, Human
uauggcccuggccuagcauac

SEQ ID NO: 1618378 - RNA, 22 nt, Human
uauggcccuggccuagcauacg

SEQ ID NO: 1618379 - RNA, 13 nt, Human
uaggauguugaaa

SEQ ID NO: 1618380 - RNA, 17 nt, Human
uaggaaaaacugauuuu

SEQ ID NO: 1618381 - RNA, 16 nt, Human
uaggaaaaacugauuu

SEQ ID NO: 1618382 - RNA, 13 nt, Human
uagggaagauaau

SEQ ID NO: 1618383 - RNA, 21 nt, Human
uagggaaggauacaaaagcau

SEQ ID NO: 1618384 - RNA, 19 nt, Human
uagggauggggcugugggg

SEQ ID NO: 1618385 - RNA, 20 nt, Human
uagccuuagaagucacacag

SEQ ID NO: 1618386 - RNA, 14 nt, Human
uagcgcccaguugg

SEQ ID NO: 1618387 - RNA, 21 nt, Human
uagccuuagaagucacacagu

SEQ ID NO: 1618388 - RNA, 17 nt, Human
uagcgcccaguugggug

SEQ ID NO: 1618389 - RNA, 14 nt, Human
uaggaaaaacugau

SEQ ID NO: 1618390 - RNA, 13 nt, Human
uaggaaaaacuga

SEQ ID NO: 1618391 - RNA, 23 nt, Human
uagcuuuuuucucugauacagaa

SEQ ID NO: 1618392 - RNA, 13 nt, Human
uagcuuuuuucuc

SEQ ID NO: 1618393 - RNA, 13 nt, Human
uagcuuuucccuu

SEQ ID NO: 1618394 - RNA, 13 nt, Human
acacaacuauauu

SEQ ID NO: 1618395 - RNA, 21 nt, Human
acaaugcaaaccaucauugaa

SEQ ID NO: 1618396 - RNA, 19 nt, Human
acaaugcaaaccaucauug

SEQ ID NO: 1618397 - RNA, 23 nt, Human
acaaugcaaaccaucauugaaau

SEQ ID NO: 1618398 - RNA, 15 nt, Human
uaggguuauaauaau

SEQ ID NO: 1618399 - RNA, 15 nt, Human
uagggugggccuuca

SEQ ID NO: 1618400 - RNA, 17 nt, Human
uaggguuauaauaaugu

SEQ ID NO: 1618401 - RNA, 19 nt, Human
uaggguaagugagagaggg

SEQ ID NO: 1618402 - RNA, 13 nt, Human
uaggguccugggg

SEQ ID NO: 1618403 - RNA, 18 nt, Human
acaaugcaaaccaucauu

SEQ ID NO: 1618404 - RNA, 17 nt, Human
acaaugcaaaccaucau

SEQ ID NO: 1618405 - RNA, 16 nt, Human
acaaugcaaaccauca

SEQ ID NO: 1618406 - RNA, 11 nt, Human
acaaugcaaac

SEQ ID NO: 1618407 - RNA, 20 nt, Human
acaaugacuuacuguacaug

SEQ ID NO: 1618408 - RNA, 22 nt, Human
acaaugacuuacuguacaugaa

SEQ ID NO: 1618409 - RNA, 22 nt, Human
acacaggcccggcuccaggcuc

SEQ ID NO: 1618410 - RNA, 21 nt, Human
acacaggcccggcuccaggcu

SEQ ID NO: 1618411 - RNA, 20 nt, Human
acacaggcccggcuccaggc

SEQ ID NO: 1618412 - RNA, 19 nt, Human
acacaggcccggcuccagg

SEQ ID NO: 1618413 - RNA, 24 nt, Human
acacaggcccggcuccaggcuccu

SEQ ID NO: 1618414 - RNA, 23 nt, Human
acacaggcccggcuccaggcucc

SEQ ID NO: 1618415 - RNA, 18 nt, Human
acacaggcccggcuccag

SEQ ID NO: 1618416 - RNA, 17 nt, Human
acacaggcccggcucca

SEQ ID NO: 1618417 - RNA, 16 nt, Human
acacaggcccggcucc

SEQ ID NO: 1618418 - RNA, 23 nt, Human
acacacagauuugagcucagccc

SEQ ID NO: 1618419 - RNA, 16 nt, Human
acacaguauuacuucu

SEQ ID NO: 1618420 - RNA, 16 nt, Human
uaguaaaaauaaaauu

SEQ ID NO: 1618421 - RNA, 13 nt, Human
uaguaaaaauaaa

SEQ ID NO: 1618422 - RNA, 22 nt, Human
uaguagagacaggguuuugcca

SEQ ID NO: 1618423 - RNA, 15 nt, Human
uaguagagacagggu

SEQ ID NO: 1618424 - RNA, 14 nt, Human
uagucacugagaca

SEQ ID NO: 1618425 - RNA, 13 nt, Human
uaguagagacggg

SEQ ID NO: 1618426 - RNA, 12 nt, Human
uaguaaucauau

SEQ ID NO: 1618427 - RNA, 24 nt, Human
uagcacagacccugcccugugggc

SEQ ID NO: 1618428 - RNA, 22 nt, Human
uagcacagacccugcccugugg

SEQ ID NO: 1618429 - RNA, 12 nt, Human
uagccaaggcca

SEQ ID NO: 1618430 - RNA, 13 nt, Human
uagccaaggccaa

SEQ ID NO: 1618431 - RNA, 14 nt, Human
uagccaaggccaaa

SEQ ID NO: 1618432 - RNA, 14 nt, Human
uagaggguguguaa

SEQ ID NO: 1618433 - RNA, 14 nt, Human
uagcacagacccug

SEQ ID NO: 1618434 - RNA, 21 nt, Human
uagcacagacccugcccugug

SEQ ID NO: 1618435 - RNA, 20 nt, Human
uagcacagacccugcccugu

SEQ ID NO: 1618436 - RNA, 15 nt, Human
uagcacagacccugc

SEQ ID NO: 1618437 - RNA, 15 nt, Human
acaaaaacacagcaa

SEQ ID NO: 1618438 - RNA, 14 nt, Human
acaaaaacacagca

SEQ ID NO: 1618439 - RNA, 16 nt, Human
acaaaaacacagcaag

SEQ ID NO: 1618440 - RNA, 16 nt, Human
acaaaaagcuacuuau

SEQ ID NO: 1618441 - RNA, 13 nt, Human
acaaaaacacagc

SEQ ID NO: 1618442 - RNA, 20 nt, Human
aauuuuacauggcuggagcu

SEQ ID NO: 1618443 - RNA, 12 nt, Human
aauuuuacauuu

SEQ ID NO: 1618444 - RNA, 14 nt, Human
uagagccagggucu

SEQ ID NO: 1618445 - RNA, 22 nt, Human
uagagcggagaaaggaagggcu

SEQ ID NO: 1618446 - RNA, 18 nt, Human
acaaaguauuaagcauau

SEQ ID NO: 1618447 - RNA, 13 nt, Human
acaaaguauuaag

SEQ ID NO: 1618448 - RNA, 16 nt, Human
acaaaguauuaagcau

SEQ ID NO: 1618449 - RNA, 15 nt, Human
acaaaguauuaagca

SEQ ID NO: 1618450 - RNA, 18 nt, Human
aauuugggggaaaauuua

SEQ ID NO: 1618451 - RNA, 14 nt, Human
aauuugugauacaa

SEQ ID NO: 1618452 - RNA, 20 nt, Human
aauuugugauacaaugcugu

SEQ ID NO: 1618453 - RNA, 17 nt, Human
aauuugugauacaaugc

SEQ ID NO: 1618454 - RNA, 18 nt, Human
aauuugugauacaaugcu

SEQ ID NO: 1618455 - RNA, 21 nt, Human
uagacagucccugccaaugga

SEQ ID NO: 1618456 - RNA, 17 nt, Human
uagacagucccugccaa

SEQ ID NO: 1618457 - RNA, 21 nt, Human
uagacagagucucacuguugc

SEQ ID NO: 1618458 - RNA, 13 nt, Human
uagacacacauga

SEQ ID NO: 1618459 - RNA, 18 nt, Human
uagacaauuuauuauggc

SEQ ID NO: 1618460 - RNA, 10 nt, Human
uagacagagu

SEQ ID NO: 1618461 - RNA, 16 nt, Human
uagacagucccugcca

SEQ ID NO: 1618462 - RNA, 20 nt, Human
uagaauuugauaugugaaca

SEQ ID NO: 1618463 - RNA, 22 nt, Human
uagaauuugauaugugaacagu

SEQ ID NO: 1618464 - RNA, 14 nt, Human
aauuccacagcugc

SEQ ID NO: 1618465 - RNA, 13 nt, Human
aauuccacagcug

SEQ ID NO: 1618466 - RNA, 12 nt, Human
aauuccacagcu

SEQ ID NO: 1618467 - RNA, 16 nt, Human
uagaacucccuuucaa

SEQ ID NO: 1618468 - RNA, 18 nt, Human
uagaacucccuuucaaca

SEQ ID NO: 1618469 - RNA, 17 nt, Human
uagaacucccuuucaac

SEQ ID NO: 1618470 - RNA, 15 nt, Human
uagaaacacaacuau

SEQ ID NO: 1618471 - RNA, 19 nt, Human
uccaaaugcagcuuuaaaa

SEQ ID NO: 1618472 - RNA, 18 nt, Human
uccaaggguacuaaggaa

SEQ ID NO: 1618473 - RNA, 13 nt, Human
accuggccucugc

SEQ ID NO: 1618474 - RNA, 12 nt, Human
accuggccucug

SEQ ID NO: 1618475 - RNA, 20 nt, Human
uccacccaggagccccgagg

SEQ ID NO: 1618476 - RNA, 17 nt, Human
uccacccaccucagccu

SEQ ID NO: 1618477 - RNA, 13 nt, Human
uccacccaccuca

SEQ ID NO: 1618478 - RNA, 12 nt, Human
uccacccaccuc

SEQ ID NO: 1618479 - RNA, 14 nt, Human
accuuuuuuauaca

SEQ ID NO: 1618480 - RNA, 16 nt, Human
accuuuguccccaccg

SEQ ID NO: 1618481 - RNA, 15 nt, Human
accuuuguccccacc

SEQ ID NO: 1618482 - RNA, 14 nt, Human
accuuuguccccac

SEQ ID NO: 1618483 - RNA, 18 nt, Human
accuuuuuuauacauaaa

SEQ ID NO: 1618484 - RNA, 16 nt, Human
accuuuuuuauacaua

SEQ ID NO: 1618485 - RNA, 17 nt, Human
accuuuuuuauacauaa

SEQ ID NO: 1618486 - RNA, 13 nt, Human
accuuugucccca

SEQ ID NO: 1618487 - RNA, 22 nt, Human
accuucuccuucaccuuugucc

SEQ ID NO: 1618488 - RNA, 21 nt, Human
accuggguaacuagggaagau

SEQ ID NO: 1618489 - RNA, 17 nt, Human
accuucccaugcccugg

SEQ ID NO: 1618490 - RNA, 17 nt, Human
accuucgccaccugggu

SEQ ID NO: 1618491 - RNA, 15 nt, Human
accuucgccaccugg

SEQ ID NO: 1618492 - RNA, 18 nt, Human
ucauuuuuuuuaagaaaa

SEQ ID NO: 1618493 - RNA, 14 nt, Human
ucauuuuugaauac

SEQ ID NO: 1618494 - RNA, 19 nt, Human
ucauuuuuaguagagacag

SEQ ID NO: 1618495 - RNA, 14 nt, Human
ucauuugucacaca

SEQ ID NO: 1618496 - RNA, 16 nt, Human
ucauuugucacacacu

SEQ ID NO: 1618497 - RNA, 20 nt, Human
accuggaauauauaaccagu

SEQ ID NO: 1618498 - RNA, 12 nt, Human
accugcucuccu

SEQ ID NO: 1618499 - RNA, 23 nt, Human
accugccuguugggccaggagcc

SEQ ID NO: 1618500 - RNA, 21 nt, Human
accugcgucucauacucaccu

SEQ ID NO: 1618501 - RNA, 16 nt, Human
accugcggugcuaucu

SEQ ID NO: 1618502 - RNA, 18 nt, Human
accugcggugcuaucucc

SEQ ID NO: 1618503 - RNA, 17 nt, Human
accugagccccaaaagg

SEQ ID NO: 1618504 - RNA, 12 nt, Human
accugagcccca

SEQ ID NO: 1618505 - RNA, 23 nt, Human
accugaggcccuucucuccagcc

SEQ ID NO: 1618506 - RNA, 22 nt, Human
accugaagcuaucguaaaauua

SEQ ID NO: 1618507 - RNA, 17 nt, Human
accugaccccugacccc

SEQ ID NO: 1618508 - RNA, 16 nt, Human
ucauaauaaguugcau

SEQ ID NO: 1618509 - RNA, 12 nt, Human
ucauaaugacuu

SEQ ID NO: 1618510 - RNA, 13 nt, Human
ucauaaugacuua

SEQ ID NO: 1618511 - RNA, 18 nt, Human
accugaagacucauucuu

SEQ ID NO: 1618512 - RNA, 19 nt, Human
accugaauuuuggcugugu

SEQ ID NO: 1618513 - RNA, 14 nt, Human
accugaggggccuc

SEQ ID NO: 1618514 - RNA, 16 nt, Human
accugaggggccucuu

SEQ ID NO: 1618515 - RNA, 14 nt, Human
accugauugugucu

SEQ ID NO: 1618516 - RNA, 17 nt, Human
accugccaggaagccag

SEQ ID NO: 1618517 - RNA, 16 nt, Human
accugccaggaagcca

SEQ ID NO: 1618518 - RNA, 19 nt, Human
accugccaggaagccagca

SEQ ID NO: 1618519 - RNA, 18 nt, Human
accugccaggaagccagc

SEQ ID NO: 1618520 - RNA, 17 nt, Human
accugccucggccuccc

SEQ ID NO: 1618521 - RNA, 14 nt, Human
acgaauauugcuga

SEQ ID NO: 1618522 - RNA, 17 nt, Human
uccaggcugggagagcc

SEQ ID NO: 1618523 - RNA, 14 nt, Human
uccaggcugggaga

SEQ ID NO: 1618524 - RNA, 18 nt, Human
uccaggcugggagagccu

SEQ ID NO: 1618525 - RNA, 18 nt, Human
acgccaggggaaaaucag

SEQ ID NO: 1618526 - RNA, 15 nt, Human
acgacugcccggcag

SEQ ID NO: 1618527 - RNA, 18 nt, Human
acgccaucccagccccaa

SEQ ID NO: 1618528 - RNA, 17 nt, Human
acgccaucccagcccca

SEQ ID NO: 1618529 - RNA, 16 nt, Human
acgccaucccagcccc

SEQ ID NO: 1618530 - RNA, 15 nt, Human
acgccaucccagccc

SEQ ID NO: 1618531 - RNA, 14 nt, Human
acgccaucccagcc

SEQ ID NO: 1618532 - RNA, 11 nt, Human
acgccauccca

SEQ ID NO: 1618533 - RNA, 23 nt, Human
acgccaggggaaaaucagccugc

SEQ ID NO: 1618534 - RNA, 16 nt, Human
acgcucucuggccuuc

SEQ ID NO: 1618535 - RNA, 15 nt, Human
acgcucucuggccuu

SEQ ID NO: 1618536 - RNA, 18 nt, Human
acgcuacccgggaagggg

SEQ ID NO: 1618537 - RNA, 17 nt, Human
acgcuacccgggaaggg

SEQ ID NO: 1618538 - RNA, 13 nt, Human
acgcuacccggga

SEQ ID NO: 1618539 - RNA, 20 nt, Human
acgcguugaaauuguaauua

SEQ ID NO: 1618540 - RNA, 18 nt, Human
acgcguugaaauuguaau

SEQ ID NO: 1618541 - RNA, 14 nt, Human
acgcguugaaauug

SEQ ID NO: 1618542 - RNA, 13 nt, Human
acgcguugaaauu

SEQ ID NO: 1618543 - RNA, 23 nt, Human
acgcgugcacacaccagagccca

SEQ ID NO: 1618544 - RNA, 14 nt, Human
acgcccccacuggu

SEQ ID NO: 1618545 - RNA, 17 nt, Human
acgcucucuggccuucg

SEQ ID NO: 1618546 - RNA, 19 nt, Human
acggagucccaccuuggcu

SEQ ID NO: 1618547 - RNA, 21 nt, Human
acggagucccaccuuggcugc

SEQ ID NO: 1618548 - RNA, 15 nt, Human
acggaugauuucuau

SEQ ID NO: 1618549 - RNA, 16 nt, Human
acggccaggccagagg

SEQ ID NO: 1618550 - RNA, 22 nt, Human
uccaugaagauguagaggagaa

SEQ ID NO: 1618551 - RNA, 11 nt, Human
uccauccugag

SEQ ID NO: 1618552 - RNA, 20 nt, Human
uccaucucuuguuuaaauuc

SEQ ID NO: 1618553 - RNA, 17 nt, Human
uccaugaguccccuguu

SEQ ID NO: 1618554 - RNA, 16 nt, Human
uccaugaguccccugu

SEQ ID NO: 1618555 - RNA, 15 nt, Human
uccaugaguccccug

SEQ ID NO: 1618556 - RNA, 12 nt, Human
uccauuuaauaa

SEQ ID NO: 1618557 - RNA, 14 nt, Human
uccagugagacagc

SEQ ID NO: 1618558 - RNA, 19 nt, Human
uccagugaggcucugcccu

SEQ ID NO: 1618559 - RNA, 18 nt, Human
uccagugaggcucugccc

SEQ ID NO: 1618560 - RNA, 20 nt, Human
uccagugaggcucugcccuu

SEQ ID NO: 1618561 - RNA, 14 nt, Human
acggcucacugcag

SEQ ID NO: 1618562 - RNA, 15 nt, Human
acggcucacugcagc

SEQ ID NO: 1618563 - RNA, 14 nt, Human
ucccaccccacaca

SEQ ID NO: 1618564 - RNA, 11 nt, Human
ucccaccccac

SEQ ID NO: 1618565 - RNA, 19 nt, Human
ucccaccaacccucagagc

SEQ ID NO: 1618566 - RNA, 15 nt, Human
ucccaaagugcuggg

SEQ ID NO: 1618567 - RNA, 16 nt, Human
ucccaaagugcuggga

SEQ ID NO: 1618568 - RNA, 20 nt, Human
ucccaaagugcugggauuac

SEQ ID NO: 1618569 - RNA, 20 nt, Human
uccauuuggaaaucuuuaaa

SEQ ID NO: 1618570 - RNA, 19 nt, Human
uccauuuggaaaucuuuaa

SEQ ID NO: 1618571 - RNA, 12 nt, Human
uccauuuggaaa

SEQ ID NO: 1618572 - RNA, 17 nt, Human
uccauuuaauaauuaua

SEQ ID NO: 1618573 - RNA, 21 nt, Human
ucccaaagugcugggauuaca

SEQ ID NO: 1618574 - RNA, 14 nt, Human
ucccacaaaggaga

SEQ ID NO: 1618575 - RNA, 22 nt, Human
ucccacaggcccuuccucucca

SEQ ID NO: 1618576 - RNA, 21 nt, Human
ucccacaggcccuuccucucc

SEQ ID NO: 1618577 - RNA, 17 nt, Human
ucccacaggcccuuccu

SEQ ID NO: 1618578 - RNA, 15 nt, Human
ucccacaggcccuuc

SEQ ID NO: 1618579 - RNA, 15 nt, Human
uccugaagaauugaa

SEQ ID NO: 1618580 - RNA, 22 nt, Human
uccugaaaacccuugccaugug

SEQ ID NO: 1618581 - RNA, 21 nt, Human
uccugaaaacccuugccaugu

SEQ ID NO: 1618582 - RNA, 12 nt, Human
uccucugcugcu

SEQ ID NO: 1618583 - RNA, 19 nt, Human
uccucuugccacugccucu

SEQ ID NO: 1618584 - RNA, 14 nt, Human
uccucugaggcuga

SEQ ID NO: 1618585 - RNA, 17 nt, Human
uccucuccccaugaugu

SEQ ID NO: 1618586 - RNA, 18 nt, Human
uccucuccacugccuucg

SEQ ID NO: 1618587 - RNA, 17 nt, Human
uccucuccacugccuuc

SEQ ID NO: 1618588 - RNA, 15 nt, Human
uccucucugcccuaa

SEQ ID NO: 1618589 - RNA, 14 nt, Human
uccucucugcccua

SEQ ID NO: 1618590 - RNA, 13 nt, Human
uccucucugcccu

SEQ ID NO: 1618591 - RNA, 12 nt, Human
uccucucugccc

SEQ ID NO: 1618592 - RNA, 12 nt, Human
uccucugagccu

SEQ ID NO: 1618593 - RNA, 17 nt, Human
uccucugagccuuggga

SEQ ID NO: 1618594 - RNA, 13 nt, Human
uccucugagccuu

SEQ ID NO: 1618595 - RNA, 21 nt, Human
uccucccaccucagccucccg

SEQ ID NO: 1618596 - RNA, 20 nt, Human
uccucccaccucagccuccc

SEQ ID NO: 1618597 - RNA, 18 nt, Human
uccucccaccucagccuc

SEQ ID NO: 1618598 - RNA, 16 nt, Human
uccucccaccucagcc

SEQ ID NO: 1618599 - RNA, 15 nt, Human
uccucccaccucagc

SEQ ID NO: 1618600 - RNA, 14 nt, Human
uccucccaccucag

SEQ ID NO: 1618601 - RNA, 21 nt, Human
acucuugaaaaaugcauguug

SEQ ID NO: 1618602 - RNA, 19 nt, Human
acucuugaaaaaugcaugu

SEQ ID NO: 1618603 - RNA, 14 nt, Human
acucuugaaaaaug

SEQ ID NO: 1618604 - RNA, 18 nt, Human
acuccagaaagugacaag

SEQ ID NO: 1618605 - RNA, 14 nt, Human
acuccagaaaguga

SEQ ID NO: 1618606 - RNA, 18 nt, Human
uccgugcuaaggacuugu

SEQ ID NO: 1618607 - RNA, 17 nt, Human
uccgugcuaaggacuug

SEQ ID NO: 1618608 - RNA, 15 nt, Human
uccguuaaaauacca

SEQ ID NO: 1618609 - RNA, 13 nt, Human
uccguuaaaauac

SEQ ID NO: 1618610 - RNA, 23 nt, Human
uccgugcuaaggacuuguuagau

SEQ ID NO: 1618611 - RNA, 21 nt, Human
uccuagccugugccucuggga

SEQ ID NO: 1618612 - RNA, 12 nt, Human
uccuacucugug

SEQ ID NO: 1618613 - RNA, 16 nt, Human
acucgaguuacagaca

SEQ ID NO: 1618614 - RNA, 17 nt, Human
acucuggcagcucagag

SEQ ID NO: 1618615 - RNA, 16 nt, Human
acucuggcagcucaga

SEQ ID NO: 1618616 - RNA, 20 nt, Human
acucuggcagcucagagagg

SEQ ID NO: 1618617 - RNA, 19 nt, Human
acucuggcagcucagagag

SEQ ID NO: 1618618 - RNA, 21 nt, Human
acucuuauugcccacgcugga

SEQ ID NO: 1618619 - RNA, 13 nt, Human
acucuugaaaaau

SEQ ID NO: 1618620 - RNA, 21 nt, Human
acucuucaguuaagccuuugg

SEQ ID NO: 1618621 - RNA, 20 nt, Human
acucuucaguuaagccuuug

SEQ ID NO: 1618622 - RNA, 16 nt, Human
acucgcgacaaugcaa

SEQ ID NO: 1618623 - RNA, 15 nt, Human
acucgcgacaaugca

SEQ ID NO: 1618624 - RNA, 17 nt, Human
acucgcgacaaugcaaa

SEQ ID NO: 1618625 - RNA, 14 nt, Human
acucguauaugucu

SEQ ID NO: 1618626 - RNA, 23 nt, Human
acucugacaacagacuucugaaa

SEQ ID NO: 1618627 - RNA, 22 nt, Human
acucugacaacagacuucugaa

SEQ ID NO: 1618628 - RNA, 20 nt, Human
acucugacaacagacuucug

SEQ ID NO: 1618629 - RNA, 18 nt, Human
acucugacaacagacuuc

SEQ ID NO: 1618630 - RNA, 17 nt, Human
acucugacaacagacuu

SEQ ID NO: 1618631 - RNA, 14 nt, Human
acucagaauucucu

SEQ ID NO: 1618632 - RNA, 21 nt, Human
acucagaauucucuaguuuga

SEQ ID NO: 1618633 - RNA, 22 nt, Human
acucagaauucucuaguuugau

SEQ ID NO: 1618634 - RNA, 18 nt, Human
acucagaagacacugaug

SEQ ID NO: 1618635 - RNA, 17 nt, Human
acucagaagacacugau

SEQ ID NO: 1618636 - RNA, 16 nt, Human
acucagaagacacuga

SEQ ID NO: 1618637 - RNA, 15 nt, Human
acucagaagacacug

SEQ ID NO: 1618638 - RNA, 14 nt, Human
acucagaagacacu

SEQ ID NO: 1618639 - RNA, 19 nt, Human
acucaccugccccucaacu

SEQ ID NO: 1618640 - RNA, 14 nt, Human
acucaccugccccu

SEQ ID NO: 1618641 - RNA, 21 nt, Human
acucaccugccccucaacucu

SEQ ID NO: 1618642 - RNA, 21 nt, Human
acuccaaacugacucuuaaga

SEQ ID NO: 1618643 - RNA, 22 nt, Human
acucauugaccugaggcccuuc

SEQ ID NO: 1618644 - RNA, 18 nt, Human
acucauugaccugaggcc

SEQ ID NO: 1618645 - RNA, 17 nt, Human
acucauugaccugaggc

SEQ ID NO: 1618646 - RNA, 16 nt, Human
acucauugaccugagg

SEQ ID NO: 1618647 - RNA, 12 nt, Human
acucaucuuagg

SEQ ID NO: 1618648 - RNA, 23 nt, Human
acucaucuagguaaauuacaguu

SEQ ID NO: 1618649 - RNA, 14 nt, Human
ucccuccaccuccc

SEQ ID NO: 1618650 - RNA, 15 nt, Human
ucccuccaccucccu

SEQ ID NO: 1618651 - RNA, 17 nt, Human
ucccuccaccucccugc

SEQ ID NO: 1618652 - RNA, 20 nt, Human
ucccucagucuggcccuucc

SEQ ID NO: 1618653 - RNA, 18 nt, Human
ucccucagucuggcccuu

SEQ ID NO: 1618654 - RNA, 19 nt, Human
ucccuccaccucccugcaa

SEQ ID NO: 1618655 - RNA, 13 nt, Human
ucccucuuucccu

SEQ ID NO: 1618656 - RNA, 11 nt, Human
ucccucuuucc

SEQ ID NO: 1618657 - RNA, 22 nt, Human
ucccugaaggccccgcccaggc

SEQ ID NO: 1618658 - RNA, 21 nt, Human
ucccugaaggccccgcccagg

SEQ ID NO: 1618659 - RNA, 18 nt, Human
ucccugaaggccccgccc

SEQ ID NO: 1618660 - RNA, 14 nt, Human
ucccucuuucccuc

SEQ ID NO: 1618661 - RNA, 23 nt, Human
ucccugaaggccccgcccaggcu

SEQ ID NO: 1618662 - RNA, 17 nt, Human
acucaccccagccccaa

SEQ ID NO: 1618663 - RNA, 20 nt, Human
acucaccucccccaucucuu

SEQ ID NO: 1618664 - RNA, 19 nt, Human
acucaccucccccaucucu

SEQ ID NO: 1618665 - RNA, 15 nt, Human
uccccuccucugcuu

SEQ ID NO: 1618666 - RNA, 18 nt, Human
uccccuccucugcuugcc

SEQ ID NO: 1618667 - RNA, 14 nt, Human
uccccuccucugcu

SEQ ID NO: 1618668 - RNA, 24 nt, Human
uccccuccucugcuugccaucccu

SEQ ID NO: 1618669 - RNA, 14 nt, Human
acucaaugcacuga

SEQ ID NO: 1618670 - RNA, 20 nt, Human
acucacauuuauucugcuca

SEQ ID NO: 1618671 - RNA, 19 nt, Human
acucacauuuauucugcuc

SEQ ID NO: 1618672 - RNA, 21 nt, Human
acucacauuuauucugcucac

SEQ ID NO: 1618673 - RNA, 21 nt, Human
acuauaauguaagcucuacug

SEQ ID NO: 1618674 - RNA, 15 nt, Human
acuaugauuuggaaa

SEQ ID NO: 1618675 - RNA, 16 nt, Human
acuaugauuuggaaaa

SEQ ID NO: 1618676 - RNA, 14 nt, Human
acuauaauguaagc

SEQ ID NO: 1618677 - RNA, 13 nt, Human
acuauaauguaag

SEQ ID NO: 1618678 - RNA, 12 nt, Human
acuauaauguaa

SEQ ID NO: 1618679 - RNA, 18 nt, Human
acuauucaaacagucuca

SEQ ID NO: 1618680 - RNA, 16 nt, Human
acuauucaaacagucu

SEQ ID NO: 1618681 - RNA, 14 nt, Human
acuauucaaacagu

SEQ ID NO: 1618682 - RNA, 13 nt, Human
acuauucaaacag

SEQ ID NO: 1618683 - RNA, 12 nt, Human
acuauguaucaa

SEQ ID NO: 1618684 - RNA, 13 nt, Human
acuauguugauaa

SEQ ID NO: 1618685 - RNA, 20 nt, Human
acuagaguuuagcuggaaaa

SEQ ID NO: 1618686 - RNA, 18 nt, Human
acuacggaauaguuggcu

SEQ ID NO: 1618687 - RNA, 14 nt, Human
acuacuagggaaau

SEQ ID NO: 1618688 - RNA, 13 nt, Human
acguacacacaca

SEQ ID NO: 1618689 - RNA, 12 nt, Human
acguacacauuu

SEQ ID NO: 1618690 - RNA, 13 nt, Human
acguacacauuuu

SEQ ID NO: 1618691 - RNA, 14 nt, Human
acguacacauuuua

SEQ ID NO: 1618692 - RNA, 22 nt, Human
uccccacuugagaauuacccuu

SEQ ID NO: 1618693 - RNA, 16 nt, Human
acaucuugcucugcug

SEQ ID NO: 1618694 - RNA, 15 nt, Human
acaucuugcucugcu

SEQ ID NO: 1618695 - RNA, 19 nt, Human
uaugugccagauuuaugca

SEQ ID NO: 1618696 - RNA, 14 nt, Human
uaugugccagauuu

SEQ ID NO: 1618697 - RNA, 17 nt, Human
acaucuugcucugcuga

SEQ ID NO: 1618698 - RNA, 19 nt, Human
acaucuuggucagauuuga

SEQ ID NO: 1618699 - RNA, 18 nt, Human
uauuuuaaaagaaugauu

SEQ ID NO: 1618700 - RNA, 14 nt, Human
uauuuuaaaagaau

SEQ ID NO: 1618701 - RNA, 22 nt, Human
uauuuuaagacgaaacauuugu

SEQ ID NO: 1618702 - RNA, 14 nt, Human
uauuuuaagacgaa

SEQ ID NO: 1618703 - RNA, 15 nt, Human
acaugaaaacacauu

SEQ ID NO: 1618704 - RNA, 16 nt, Human
acaugaaaacacauuu

SEQ ID NO: 1618705 - RNA, 20 nt, Human
uauuuuguguuuaggaacua

SEQ ID NO: 1618706 - RNA, 17 nt, Human
uauuuuguguuuaggaa

SEQ ID NO: 1618707 - RNA, 17 nt, Human
uauuuuuguagagccag

SEQ ID NO: 1618708 - RNA, 22 nt, Human
uauuuuaauaauguuucaaaca

SEQ ID NO: 1618709 - RNA, 13 nt, Human
uauuuuacauaaa

SEQ ID NO: 1618710 - RNA, 19 nt, Human
uauuuuaauaauguuucaa

SEQ ID NO: 1618711 - RNA, 17 nt, Human
uauuuuaauaaacacuc

SEQ ID NO: 1618712 - RNA, 14 nt, Human
uauuuuaauaaaca

SEQ ID NO: 1618713 - RNA, 20 nt, Human
uauuuugcuuugugauuuuu

SEQ ID NO: 1618714 - RNA, 13 nt, Human
uauuuugcuuugu

SEQ ID NO: 1618715 - RNA, 15 nt, Human
uauuuugcuuuguga

SEQ ID NO: 1618716 - RNA, 16 nt, Human
ucaaaagcugggcagg

SEQ ID NO: 1618717 - RNA, 21 nt, Human
ucaaacagucucaggaaauca

SEQ ID NO: 1618718 - RNA, 20 nt, Human
ucaaacagucucaggaaauc

SEQ ID NO: 1618719 - RNA, 13 nt, Human
ucaaacagucuca

SEQ ID NO: 1618720 - RNA, 13 nt, Human
ucaaagauauuuu

SEQ ID NO: 1618721 - RNA, 20 nt, Human
ucaaagauauuuugcuuugu

SEQ ID NO: 1618722 - RNA, 22 nt, Human
ucaaagauauuuugcuuuguga

SEQ ID NO: 1618723 - RNA, 23 nt, Human
ucaaagcaaaugucuuccuggau

SEQ ID NO: 1618724 - RNA, 15 nt, Human
ucaaagcaaaugucu

SEQ ID NO: 1618725 - RNA, 13 nt, Human
acaugagcaucag

SEQ ID NO: 1618726 - RNA, 23 nt, Human
acaugaaaacacauuuuucuuag

SEQ ID NO: 1618727 - RNA, 23 nt, Human
ucaaauacgugggcauucaaaug

SEQ ID NO: 1618728 - RNA, 13 nt, Human
ucaaauauauuca

SEQ ID NO: 1618729 - RNA, 22 nt, Human
ucaaauacgugggcauucaaau

SEQ ID NO: 1618730 - RNA, 21 nt, Human
ucaaauacgugggcauucaaa

SEQ ID NO: 1618731 - RNA, 18 nt, Human
ucaaaguugccuaaaucc

SEQ ID NO: 1618732 - RNA, 15 nt, Human
ucaaaguugccuaaa

SEQ ID NO: 1618733 - RNA, 16 nt, Human
acaugagguacugaga

SEQ ID NO: 1618734 - RNA, 18 nt, Human
acauggaauaacauguaa

SEQ ID NO: 1618735 - RNA, 20 nt, Human
acauggaauaacauguaauu

SEQ ID NO: 1618736 - RNA, 23 nt, Human
acaugagcaucaggccaggcccu

SEQ ID NO: 1618737 - RNA, 19 nt, Human
acauggaguauaugucaag

SEQ ID NO: 1618738 - RNA, 15 nt, Human
acauggaguauaugu

SEQ ID NO: 1618739 - RNA, 14 nt, Human
acauggccuuugcu

SEQ ID NO: 1618740 - RNA, 22 nt, Human
acauggcuggagcuagaauuug

SEQ ID NO: 1618741 - RNA, 21 nt, Human
acaugucuuuucuugcaugag

SEQ ID NO: 1618742 - RNA, 23 nt, Human
acauugguguuguacucaauuuu

SEQ ID NO: 1618743 - RNA, 22 nt, Human
acauugguguuguacucaauuu

SEQ ID NO: 1618744 - RNA, 16 nt, Human
acauugguguuguacu

SEQ ID NO: 1618745 - RNA, 14 nt, Human
acauugguguugua

SEQ ID NO: 1618746 - RNA, 22 nt, Human
acauugcggacagccacggcca

SEQ ID NO: 1618747 - RNA, 21 nt, Human
acauugcggacagccacggcc

SEQ ID NO: 1618748 - RNA, 16 nt, Human
acauuggaaacaaguc

SEQ ID NO: 1618749 - RNA, 13 nt, Human
acauuuuucuuag

SEQ ID NO: 1618750 - RNA, 23 nt, Human
acauuuuucuuagggaaggauac

SEQ ID NO: 1618751 - RNA, 15 nt, Human
acauuuuuaagugcu

SEQ ID NO: 1618752 - RNA, 18 nt, Human
acauuuuuaagugcugca

SEQ ID NO: 1618753 - RNA, 19 nt, Human
acauuuuuaagugcugcau

SEQ ID NO: 1618754 - RNA, 23 nt, Human
ucaauauuucagauaaucacaau

SEQ ID NO: 1618755 - RNA, 22 nt, Human
ucaauaggaaaaacugauuuuu

SEQ ID NO: 1618756 - RNA, 19 nt, Human
ucaauaggaaaaacugauu

SEQ ID NO: 1618757 - RNA, 18 nt, Human
ucaauaggaaaaacugau

SEQ ID NO: 1618758 - RNA, 18 nt, Human
ucaagugauucuccugcc

SEQ ID NO: 1618759 - RNA, 17 nt, Human
ucaagugauucuccugc

SEQ ID NO: 1618760 - RNA, 16 nt, Human
ucaagugauucuccug

SEQ ID NO: 1618761 - RNA, 22 nt, Human
ucaagugauucucaugccucag

SEQ ID NO: 1618762 - RNA, 21 nt, Human
ucaagugauucucaugccuca

SEQ ID NO: 1618763 - RNA, 17 nt, Human
ucaagagggucugagga

SEQ ID NO: 1618764 - RNA, 21 nt, Human
ucaagagggcacugguggccc

SEQ ID NO: 1618765 - RNA, 20 nt, Human
ucaagagggcacugguggcc

SEQ ID NO: 1618766 - RNA, 23 nt, Human
accaaaaaucucaauauuucaga

SEQ ID NO: 1618767 - RNA, 13 nt, Human
accaaaaaccagu

SEQ ID NO: 1618768 - RNA, 12 nt, Human
accaaaaaccag

SEQ ID NO: 1618769 - RNA, 19 nt, Human
accaaaucagcugcuacua

SEQ ID NO: 1618770 - RNA, 16 nt, Human
accaaaucagcugcua

SEQ ID NO: 1618771 - RNA, 19 nt, Human
accaacacgagcaggcuac

SEQ ID NO: 1618772 - RNA, 14 nt, Human
accaacacgagcag

SEQ ID NO: 1618773 - RNA, 16 nt, Human
accaacauacucccau

SEQ ID NO: 1618774 - RNA, 17 nt, Human
accaacauacucccauc

SEQ ID NO: 1618775 - RNA, 20 nt, Human
accaaccacugcgaccacaa

SEQ ID NO: 1618776 - RNA, 16 nt, Human
accacaagacugcaca

SEQ ID NO: 1618777 - RNA, 15 nt, Human
accaacccucagagc

SEQ ID NO: 1618778 - RNA, 23 nt, Human
accacacccagcccacuucugcc

SEQ ID NO: 1618779 - RNA, 21 nt, Human
accacacccagcccacuucug

SEQ ID NO: 1618780 - RNA, 20 nt, Human
accacacccagcccacuucu

SEQ ID NO: 1618781 - RNA, 16 nt, Human
accacacccagcccac

SEQ ID NO: 1618782 - RNA, 15 nt, Human
accacacccagccca

SEQ ID NO: 1618783 - RNA, 17 nt, Human
accacacagaggcugcc

SEQ ID NO: 1618784 - RNA, 14 nt, Human
ucacaggaaguaga

SEQ ID NO: 1618785 - RNA, 16 nt, Human
ucacauauugauuucc

SEQ ID NO: 1618786 - RNA, 18 nt, Human
ucacauauugauuuccgu

SEQ ID NO: 1618787 - RNA, 20 nt, Human
ucacauauugauuuccguua

SEQ ID NO: 1618788 - RNA, 17 nt, Human
ucaccagccccagugcc

SEQ ID NO: 1618789 - RNA, 20 nt, Human
ucacauuccugaacaggaua

SEQ ID NO: 1618790 - RNA, 17 nt, Human
ucacauuccugaacagg

SEQ ID NO: 1618791 - RNA, 13 nt, Human
ucacauuccugaa

SEQ ID NO: 1618792 - RNA, 23 nt, Human
ucacagccagacuggcacaguuu

SEQ ID NO: 1618793 - RNA, 17 nt, Human
ucacagccagacuggca

SEQ ID NO: 1618794 - RNA, 19 nt, Human
ucacagcuccaagaauuuc

SEQ ID NO: 1618795 - RNA, 14 nt, Human
ucacagaugggugc

SEQ ID NO: 1618796 - RNA, 15 nt, Human
ucacagaugggugcu

SEQ ID NO: 1618797 - RNA, 13 nt, Human
ucaauuuaaaaaa

SEQ ID NO: 1618798 - RNA, 21 nt, Human
ucacagaacccuuggagccaa

SEQ ID NO: 1618799 - RNA, 12 nt, Human
ucaauuuaaaaa

SEQ ID NO: 1618800 - RNA, 16 nt, Human
ucacagaccuuugaac

SEQ ID NO: 1618801 - RNA, 18 nt, Human
ucagagcugcccucuccu

SEQ ID NO: 1618802 - RNA, 17 nt, Human
ucagagcugcccucucc

SEQ ID NO: 1618803 - RNA, 15 nt, Human
ucagagcugcccucu

SEQ ID NO: 1618804 - RNA, 16 nt, Human
ucagagcugcccucuc

SEQ ID NO: 1618805 - RNA, 16 nt, Human
ucagaucucuaacuuc

SEQ ID NO: 1618806 - RNA, 13 nt, Human
ucagaucugccua

SEQ ID NO: 1618807 - RNA, 21 nt, Human
ucagaugcugugcaaauguua

SEQ ID NO: 1618808 - RNA, 21 nt, Human
ucagaucugccuaaggacuuc

SEQ ID NO: 1618809 - RNA, 20 nt, Human
ucagaucugccuaaggacuu

SEQ ID NO: 1618810 - RNA, 18 nt, Human
ucagaucugccuaaggac

SEQ ID NO: 1618811 - RNA, 15 nt, Human
ucagaucugccuaag

SEQ ID NO: 1618812 - RNA, 13 nt, Human
ucagagcugcccu

SEQ ID NO: 1618813 - RNA, 14 nt, Human
ucagagcugcccuc

SEQ ID NO: 1618814 - RNA, 21 nt, Human
ucagagccaccccuaaagaga

SEQ ID NO: 1618815 - RNA, 23 nt, Human
ucagagacuccugcaggcagcca

SEQ ID NO: 1618816 - RNA, 16 nt, Human
ucagagacuccugcag

SEQ ID NO: 1618817 - RNA, 12 nt, Human
ucagaauucuca

SEQ ID NO: 1618818 - RNA, 10 nt, Human
ucagaauucu

SEQ ID NO: 1618819 - RNA, 20 nt, Human
ucagaauucucagaaucuca

SEQ ID NO: 1618820 - RNA, 16 nt, Human
ucagaauucucuaguu

SEQ ID NO: 1618821 - RNA, 15 nt, Human
acccagcccacuucu

SEQ ID NO: 1618822 - RNA, 16 nt, Human
ucagaauagaaauuag

SEQ ID NO: 1618823 - RNA, 22 nt, Human
accccagcuggggccaggcugg

SEQ ID NO: 1618824 - RNA, 19 nt, Human
accccagcuggggccaggc

SEQ ID NO: 1618825 - RNA, 23 nt, Human
acccaggugcuaggaacacuccu

SEQ ID NO: 1618826 - RNA, 11 nt, Human
acccaggugcu

SEQ ID NO: 1618827 - RNA, 13 nt, Human
accccagguuucu

SEQ ID NO: 1618828 - RNA, 17 nt, Human
acccagcgagcccuggu

SEQ ID NO: 1618829 - RNA, 16 nt, Human
acccagcgagcccugg

SEQ ID NO: 1618830 - RNA, 13 nt, Human
acccagcgagccc

SEQ ID NO: 1618831 - RNA, 15 nt, Human
acccaggagccccga

SEQ ID NO: 1618832 - RNA, 13 nt, Human
acccaggagcccc

SEQ ID NO: 1618833 - RNA, 20 nt, Human
acccaaauguucaucaauga

SEQ ID NO: 1618834 - RNA, 16 nt, Human
acccaaauguucauca

SEQ ID NO: 1618835 - RNA, 22 nt, Human
accauuuugggguacccacugc

SEQ ID NO: 1618836 - RNA, 20 nt, Human
acccacugcuuuuggucugu

SEQ ID NO: 1618837 - RNA, 17 nt, Human
acccacuggacucaccu

SEQ ID NO: 1618838 - RNA, 14 nt, Human
acccacuggacuca

SEQ ID NO: 1618839 - RNA, 21 nt, Human
acccacuggacucaccucccc

SEQ ID NO: 1618840 - RNA, 21 nt, Human
accauuuugggguacccacug

SEQ ID NO: 1618841 - RNA, 23 nt, Human
accauuuugcugucccuuuuccu

SEQ ID NO: 1618842 - RNA, 22 nt, Human
accauuuugcugucccuuuucc

SEQ ID NO: 1618843 - RNA, 21 nt, Human
accauucuccaccugccaggg

SEQ ID NO: 1618844 - RNA, 20 nt, Human
accauucuccaccugccagg

SEQ ID NO: 1618845 - RNA, 19 nt, Human
accauucuccaccugccag

SEQ ID NO: 1618846 - RNA, 18 nt, Human
accauguuggccaggcug

SEQ ID NO: 1618847 - RNA, 18 nt, Human
accaugggauaaaugcca

SEQ ID NO: 1618848 - RNA, 17 nt, Human
accaugggauaaaugcc

SEQ ID NO: 1618849 - RNA, 16 nt, Human
ucacuguugcccaggc

SEQ ID NO: 1618850 - RNA, 15 nt, Human
ucacuguugcccagg

SEQ ID NO: 1618851 - RNA, 14 nt, Human
ucacuguugcccag

SEQ ID NO: 1618852 - RNA, 15 nt, Human
ucacugcacagugca

SEQ ID NO: 1618853 - RNA, 18 nt, Human
ucacugcaaccuccgccu

SEQ ID NO: 1618854 - RNA, 21 nt, Human
ucacugcaaccuucgccaccu

SEQ ID NO: 1618855 - RNA, 21 nt, Human
ucacuauguugcccaggcagg

SEQ ID NO: 1618856 - RNA, 22 nt, Human
ucaccagccccagugcccacag

SEQ ID NO: 1618857 - RNA, 19 nt, Human
ucacauuccugaacaggau

SEQ ID NO: 1618858 - RNA, 23 nt, Human
ucacugagacagcccgggcucug

SEQ ID NO: 1618859 - RNA, 15 nt, Human
acccgggaggcagag

SEQ ID NO: 1618860 - RNA, 21 nt, Human
acccuccuuucaccacaugug

SEQ ID NO: 1618861 - RNA, 20 nt, Human
acccgggaagggggcuggga

SEQ ID NO: 1618862 - RNA, 19 nt, Human
acccgggaagggggcuggg

SEQ ID NO: 1618863 - RNA, 15 nt, Human
acccggaggggccug

SEQ ID NO: 1618864 - RNA, 22 nt, Human
acccgggaagggggcugggaca

SEQ ID NO: 1618865 - RNA, 14 nt, Human
acccucauguucuu

SEQ ID NO: 1618866 - RNA, 15 nt, Human
acccucauguucuua

SEQ ID NO: 1618867 - RNA, 17 nt, Human
acccucauguucuuaau

SEQ ID NO: 1618868 - RNA, 21 nt, Human
acccugaggcccagagggccu

SEQ ID NO: 1618869 - RNA, 19 nt, Human
acccugaggcccagagggc

SEQ ID NO: 1618870 - RNA, 13 nt, Human
acccugaggccca

SEQ ID NO: 1618871 - RNA, 11 nt, Human
acccugaggcc

SEQ ID NO: 1618872 - RNA, 23 nt, Human
acccugaggcccagagggccugc

SEQ ID NO: 1618873 - RNA, 18 nt, Human
ucaggcaggugggaugga

SEQ ID NO: 1618874 - RNA, 17 nt, Human
ucaggcaggugggaugg

SEQ ID NO: 1618875 - RNA, 13 nt, Human
acccccagccugc

SEQ ID NO: 1618876 - RNA, 14 nt, Human
acccccagccugcu

SEQ ID NO: 1618877 - RNA, 12 nt, Human
acccccagccug

SEQ ID NO: 1618878 - RNA, 16 nt, Human
ucaggccaggcccucu

SEQ ID NO: 1618879 - RNA, 15 nt, Human
ucaggccaggcccuc

SEQ ID NO: 1618880 - RNA, 14 nt, Human
ucaggccaggcccu

SEQ ID NO: 1618881 - RNA, 13 nt, Human
ucaggccaggccc

SEQ ID NO: 1618882 - RNA, 14 nt, Human
ucaggccagcugcu

SEQ ID NO: 1618883 - RNA, 13 nt, Human
ucaggccagcugc

SEQ ID NO: 1618884 - RNA, 13 nt, Human
ucaggccacuuga

SEQ ID NO: 1618885 - RNA, 23 nt, Human
ucaggggugugcggccuuuggcu

SEQ ID NO: 1618886 - RNA, 19 nt, Human
ucaggggugugcggccuuu

SEQ ID NO: 1618887 - RNA, 12 nt, Human
ucaggggugugc

SEQ ID NO: 1618888 - RNA, 18 nt, Human
ucaggccaggcccucugc

SEQ ID NO: 1618889 - RNA, 17 nt, Human
ucaggccaggcccucug

SEQ ID NO: 1618890 - RNA, 19 nt, Human
ucaggccaggcccucugcc

SEQ ID NO: 1618891 - RNA, 20 nt, Human
ucaggccaggcccucugccc

SEQ ID NO: 1618892 - RNA, 19 nt, Human
ucaggguuggccccugccc

SEQ ID NO: 1618893 - RNA, 18 nt, Human
ucaggguuggccccugcc

SEQ ID NO: 1618894 - RNA, 23 nt, Human
ucaggguuggccccugcccggcu

SEQ ID NO: 1618895 - RNA, 18 nt, Human
ucagguaaucgaccugcc

SEQ ID NO: 1618896 - RNA, 20 nt, Human
ucagguaaucgaccugccuc

SEQ ID NO: 1618897 - RNA, 19 nt, Human
ucagguaaucgaccugccu

SEQ ID NO: 1618898 - RNA, 19 nt, Human
acccgcuaagagggaggga

SEQ ID NO: 1618899 - RNA, 21 nt, Human
ucagguaaucgaccugccucg

SEQ ID NO: 1618900 - RNA, 23 nt, Human
ucagugccuuauggaacacucug

SEQ ID NO: 1618901 - RNA, 22 nt, Human
ucagugccuuauggaacacucu

SEQ ID NO: 1618902 - RNA, 20 nt, Human
ucagugccuuauggaacacu

SEQ ID NO: 1618903 - RNA, 19 nt, Human
ucagugccuuauggaacac

SEQ ID NO: 1618904 - RNA, 16 nt, Human
ucaguggcagcugcuu

SEQ ID NO: 1618905 - RNA, 15 nt, Human
ucaguggcagcugcu

SEQ ID NO: 1618906 - RNA, 14 nt, Human
ucaguggcagcugc

SEQ ID NO: 1618907 - RNA, 15 nt, Human
ucagugcuucgcaga

SEQ ID NO: 1618908 - RNA, 19 nt, Human
ucaguuguuagugugucuu

SEQ ID NO: 1618909 - RNA, 18 nt, Human
ucauaaauaaaguuuguu

SEQ ID NO: 1618910 - RNA, 24 nt, Human
ucauaaagcaggcagaacucaucu

SEQ ID NO: 1618911 - RNA, 22 nt, Human
ucaggugucccugcacuugcag

SEQ ID NO: 1618912 - RNA, 22 nt, Human
ucagguugucugaagucacugc

SEQ ID NO: 1618913 - RNA, 13 nt, Human
ucaguaagccgug

SEQ ID NO: 1618914 - RNA, 13 nt, Human
ucaguaauaacuc

SEQ ID NO: 1618915 - RNA, 15 nt, Human
acccuugugguccca

SEQ ID NO: 1618916 - RNA, 20 nt, Human
accgaaaacguggcugcuuc

SEQ ID NO: 1618917 - RNA, 20 nt, Human
acccuugccgucuaccugag

SEQ ID NO: 1618918 - RNA, 18 nt, Human
ucaggugucccugcacuu

SEQ ID NO: 1618919 - RNA, 17 nt, Human
ucaggugucccugcacu

SEQ ID NO: 1618920 - RNA, 15 nt, Human
ucaggugucccugca

SEQ ID NO: 1618921 - RNA, 23 nt, Human
ucagguggggucacucuggcagc

SEQ ID NO: 1618922 - RNA, 22 nt, Human
accgaaaacguggcugcuucaa

SEQ ID NO: 1618923 - RNA, 21 nt, Human
accgaaaacguggcugcuuca

SEQ ID NO: 1618924 - RNA, 22 nt, Human
ucagguggggucacucuggcag

SEQ ID NO: 1618925 - RNA, 21 nt, Human
accgaacugauguaaguaaac

SEQ ID NO: 1618926 - RNA, 24 nt, Human
ucuagauacuguaucaugacaaag

SEQ ID NO: 1618927 - RNA, 13 nt, Human
ucuauaauuuaaa

SEQ ID NO: 1618928 - RNA, 23 nt, Human
ucuaguuugauuaaauucuugca

SEQ ID NO: 1618929 - RNA, 19 nt, Human
ucuaguucacucuccauuu

SEQ ID NO: 1618930 - RNA, 16 nt, Human
ucuaguucacucucca

SEQ ID NO: 1618931 - RNA, 12 nt, Human
ucuaguucacuc

SEQ ID NO: 1618932 - RNA, 20 nt, Human
acuuccagauccuggaaauc

SEQ ID NO: 1618933 - RNA, 17 nt, Human
acuuccauaaucuggac

SEQ ID NO: 1618934 - RNA, 17 nt, Human
acuuccacugccauccu

SEQ ID NO: 1618935 - RNA, 18 nt, Human
acuuccaauuuacauacu

SEQ ID NO: 1618936 - RNA, 20 nt, Human
acuucaggcucuucuccuuu

SEQ ID NO: 1618937 - RNA, 18 nt, Human
acuucaggcucuucuccu

SEQ ID NO: 1618938 - RNA, 17 nt, Human
acuucaggcucuucucc

SEQ ID NO: 1618939 - RNA, 16 nt, Human
acuuacuguacaugaa

SEQ ID NO: 1618940 - RNA, 13 nt, Human
acuuacuguacau

SEQ ID NO: 1618941 - RNA, 14 nt, Human
acuuacuguacaug

SEQ ID NO: 1618942 - RNA, 20 nt, Human
acuuagagguggggagcaga

SEQ ID NO: 1618943 - RNA, 15 nt, Human
acuuacuguacauga

SEQ ID NO: 1618944 - RNA, 19 nt, Human
ucuaccugaggggccucuu

SEQ ID NO: 1618945 - RNA, 12 nt, Human
ucuaccugaggg

SEQ ID NO: 1618946 - RNA, 18 nt, Human
ucucacuccuaccuggua

SEQ ID NO: 1618947 - RNA, 17 nt, Human
ucucacuccuaccuggu

SEQ ID NO: 1618948 - RNA, 16 nt, Human
ucucacuccuaccugg

SEQ ID NO: 1618949 - RNA, 20 nt, Human
acuucgggaggucgaggcag

SEQ ID NO: 1618950 - RNA, 17 nt, Human
acuucgggaggucgagg

SEQ ID NO: 1618951 - RNA, 21 nt, Human
acuucuaaguaaaaccacagc

SEQ ID NO: 1618952 - RNA, 19 nt, Human
acuucuaaguaaaaccaca

SEQ ID NO: 1618953 - RNA, 18 nt, Human
acuucuaaguaaaaccac

SEQ ID NO: 1618954 - RNA, 13 nt, Human
acuucuaaguaaa

SEQ ID NO: 1618955 - RNA, 22 nt, Human
acuucgggaggucgaggcagga

SEQ ID NO: 1618956 - RNA, 17 nt, Human
ucucaaaacugcacugu

SEQ ID NO: 1618957 - RNA, 13 nt, Human
ucucacuccuacc

SEQ ID NO: 1618958 - RNA, 16 nt, Human
ucucaaaaaaagaaaa

SEQ ID NO: 1618959 - RNA, 16 nt, Human
ucuauuguuucuuuca

SEQ ID NO: 1618960 - RNA, 23 nt, Human
acuugaacccgggaggcagaggu

SEQ ID NO: 1618961 - RNA, 16 nt, Human
acuugaaauuugaauu

SEQ ID NO: 1618962 - RNA, 18 nt, Human
acuugaaaauuaacauga

SEQ ID NO: 1618963 - RNA, 17 nt, Human
acuugaaaauuaacaug

SEQ ID NO: 1618964 - RNA, 19 nt, Human
acuugagaauuacccuuuu

SEQ ID NO: 1618965 - RNA, 14 nt, Human
acuuggaagcuccg

SEQ ID NO: 1618966 - RNA, 14 nt, Human
acuugucuuuggac

SEQ ID NO: 1618967 - RNA, 15 nt, Human
acuuguauuaugugu

SEQ ID NO: 1618968 - RNA, 14 nt, Human
acuuguaugaaaga

SEQ ID NO: 1618969 - RNA, 14 nt, Human
acuuguauuaugug

SEQ ID NO: 1618970 - RNA, 13 nt, Human
acuuguauuaugu

SEQ ID NO: 1618971 - RNA, 13 nt, Human
ucuaaaggcuacc

SEQ ID NO: 1618972 - RNA, 16 nt, Human
ucuaaaggcuaccuuu

SEQ ID NO: 1618973 - RNA, 17 nt, Human
ucuaaagcugccagccg

SEQ ID NO: 1618974 - RNA, 23 nt, Human
ucuaaacugcccccucugcccug

SEQ ID NO: 1618975 - RNA, 22 nt, Human
ucuaaacugcccccucugcccu

SEQ ID NO: 1618976 - RNA, 16 nt, Human
ucuaaacugcccccuc

SEQ ID NO: 1618977 - RNA, 13 nt, Human
ucuaaacugcccc

SEQ ID NO: 1618978 - RNA, 17 nt, Human
ucuaccaaaaaucucaa

SEQ ID NO: 1618979 - RNA, 14 nt, Human
ucuacccuggcacu

SEQ ID NO: 1618980 - RNA, 21 nt, Human
ucuacccucuuagaaaaacca

SEQ ID NO: 1618981 - RNA, 13 nt, Human
acuguggguagac

SEQ ID NO: 1618982 - RNA, 21 nt, Human
acuguuaauaguucagguaac

SEQ ID NO: 1618983 - RNA, 17 nt, Human
acuguuaauaguucagg

SEQ ID NO: 1618984 - RNA, 23 nt, Human
ucgucacugcuuaacuucacaua

SEQ ID NO: 1618985 - RNA, 19 nt, Human
ucggggagaggcugaggac

SEQ ID NO: 1618986 - RNA, 22 nt, Human
acugaagaagcaccaaucauga

SEQ ID NO: 1618987 - RNA, 18 nt, Human
ucgcccuggacugugugc

SEQ ID NO: 1618988 - RNA, 23 nt, Human
ucgcugugucagcauagaaguaa

SEQ ID NO: 1618989 - RNA, 15 nt, Human
acuggguacuugugg

SEQ ID NO: 1618990 - RNA, 21 nt, Human
acugggcuuggggaccagagc

SEQ ID NO: 1618991 - RNA, 22 nt, Human
acugggcuuggggaccagagcu

SEQ ID NO: 1618992 - RNA, 23 nt, Human
acugucagcuccccucggagaag

SEQ ID NO: 1618993 - RNA, 16 nt, Human
acuguaucaugacaaa

SEQ ID NO: 1618994 - RNA, 20 nt, Human
acuguaucaugacaaagacu

SEQ ID NO: 1618995 - RNA, 20 nt, Human
acuguacaugaaaacacauu

SEQ ID NO: 1618996 - RNA, 21 nt, Human
acuguacaugaaaacacauuu

SEQ ID NO: 1618997 - RNA, 15 nt, Human
acuguacuugcucuu

SEQ ID NO: 1618998 - RNA, 20 nt, Human
acuguacuccucccaggcgc

SEQ ID NO: 1618999 - RNA, 14 nt, Human
acuguaucaugaca

SEQ ID NO: 1619000 - RNA, 23 nt, Human
acuguacuugcucuugaugccug

SEQ ID NO: 1619001 - RNA, 22 nt, Human
acuguacaaaguagaagucuua

SEQ ID NO: 1619002 - RNA, 16 nt, Human
acuguacaaaguagaa

SEQ ID NO: 1619003 - RNA, 18 nt, Human
acuggguacuuguggaca

SEQ ID NO: 1619004 - RNA, 17 nt, Human
acuggguacuuguggac

SEQ ID NO: 1619005 - RNA, 19 nt, Human
acuguacaugaaaacacau

SEQ ID NO: 1619006 - RNA, 16 nt, Human
acuguacaugaaaaca

SEQ ID NO: 1619007 - RNA, 18 nt, Human
acuguacagacagaaaaa

SEQ ID NO: 1619008 - RNA, 15 nt, Human
agaaacauuugguaa

SEQ ID NO: 1619009 - RNA, 23 nt, Human
agaaacuuaagguuaccuuuguu

SEQ ID NO: 1619010 - RNA, 16 nt, Human
agaaacacaacuauau

SEQ ID NO: 1619011 - RNA, 16 nt, Human
agaaaacaaggaugaa

SEQ ID NO: 1619012 - RNA, 23 nt, Human
agaaaaaauauuuuccugccagg

SEQ ID NO: 1619013 - RNA, 17 nt, Human
agaaaaaauauuuuccu

SEQ ID NO: 1619014 - RNA, 19 nt, Human
agaaaaaauauuuucccua

SEQ ID NO: 1619015 - RNA, 18 nt, Human
agaaaaaugagccuggca

SEQ ID NO: 1619016 - RNA, 18 nt, Human
ucucuugguccugcugca

SEQ ID NO: 1619017 - RNA, 17 nt, Human
ucucuugguccugcugc

SEQ ID NO: 1619018 - RNA, 22 nt, Human
ucucugcaggucccuaauaaag

SEQ ID NO: 1619019 - RNA, 21 nt, Human
ucucugcaggucccuaauaaa

SEQ ID NO: 1619020 - RNA, 20 nt, Human
ucucugcaggucccuaauaa

SEQ ID NO: 1619021 - RNA, 19 nt, Human
ucucugcaggucccuaaua

SEQ ID NO: 1619022 - RNA, 16 nt, Human
agaaagacuauucaaa

SEQ ID NO: 1619023 - RNA, 18 nt, Human
agaaagacuauucaaaca

SEQ ID NO: 1619024 - RNA, 22 nt, Human
agaaagacuaucuaaauguuga

SEQ ID NO: 1619025 - RNA, 20 nt, Human
agaaagacuaucuaaauguu

SEQ ID NO: 1619026 - RNA, 18 nt, Human
agaaagcagaacagugau

SEQ ID NO: 1619027 - RNA, 17 nt, Human
agaaagcagaacaguga

SEQ ID NO: 1619028 - RNA, 20 nt, Human
agaaagcagaacagugauua

SEQ ID NO: 1619029 - RNA, 15 nt, Human
agaaaugccuuaccc

SEQ ID NO: 1619030 - RNA, 18 nt, Human
ucugaaggcuggguucug

SEQ ID NO: 1619031 - RNA, 20 nt, Human
ucugaaggguaauuauauag

SEQ ID NO: 1619032 - RNA, 12 nt, Human
agaaaugaaaaa

SEQ ID NO: 1619033 - RNA, 13 nt, Human
agaaaugaaaaaa

SEQ ID NO: 1619034 - RNA, 16 nt, Human
agaaaugaaaaaauau

SEQ ID NO: 1619035 - RNA, 23 nt, Human
acuuuggaaagaguaggaagacu

SEQ ID NO: 1619036 - RNA, 19 nt, Human
acuuuguauaaaagggacu

SEQ ID NO: 1619037 - RNA, 14 nt, Human
acuuuggaaagagu

SEQ ID NO: 1619038 - RNA, 13 nt, Human
acuuuggaaagag

SEQ ID NO: 1619039 - RNA, 12 nt, Human
acuuuggaaaga

SEQ ID NO: 1619040 - RNA, 14 nt, Human
acuuguggacacag

SEQ ID NO: 1619041 - RNA, 18 nt, Human
acuugucuuuggacccug

SEQ ID NO: 1619042 - RNA, 16 nt, Human
acuuuaaaaggagcca

SEQ ID NO: 1619043 - RNA, 15 nt, Human
acuuguggacacagc

SEQ ID NO: 1619044 - RNA, 22 nt, Human
acuuguuuuauuuaaccucuaa

SEQ ID NO: 1619045 - RNA, 16 nt, Human
acuuguuuucugggaa

SEQ ID NO: 1619046 - RNA, 13 nt, Human
acuuuagggaagu

SEQ ID NO: 1619047 - RNA, 23 nt, Human
ucuccuuggugucgggcaugaca

SEQ ID NO: 1619048 - RNA, 21 nt, Human
ucuccuuggugucgggcauga

SEQ ID NO: 1619049 - RNA, 20 nt, Human
ucuccuuaaagaguguggca

SEQ ID NO: 1619050 - RNA, 18 nt, Human
acuuuguguucaccuugu

SEQ ID NO: 1619051 - RNA, 16 nt, Human
acuuuguguucaccuu

SEQ ID NO: 1619052 - RNA, 22 nt, Human
acuuugugcugggguuaucuga

SEQ ID NO: 1619053 - RNA, 21 nt, Human
ucucucaggccaaacucaccu

SEQ ID NO: 1619054 - RNA, 12 nt, Human
ucucucaggcca

SEQ ID NO: 1619055 - RNA, 22 nt, Human
ucucucacuuguuuuauuuaac

SEQ ID NO: 1619056 - RNA, 15 nt, Human
ucucggcucacugca

SEQ ID NO: 1619057 - RNA, 17 nt, Human
ucucgaacuccugaccu

SEQ ID NO: 1619058 - RNA, 20 nt, Human
ucucgcuauugucaccaggg

SEQ ID NO: 1619059 - RNA, 23 nt, Human
agaagcucccugaaguaagcaaa

SEQ ID NO: 1619060 - RNA, 13 nt, Human
agaaguugauaug

SEQ ID NO: 1619061 - RNA, 22 nt, Human
agaaguuugagaucagccuggg

SEQ ID NO: 1619062 - RNA, 10 nt, Human
ucuggccuuc

SEQ ID NO: 1619063 - RNA, 21 nt, Human
ucuggcagcucagagagggug

SEQ ID NO: 1619064 - RNA, 18 nt, Human
ucuggcagcucagagagg

SEQ ID NO: 1619065 - RNA, 23 nt, Human
ucuggcagaguugaagacagagc

SEQ ID NO: 1619066 - RNA, 20 nt, Human
ucuggcagaguugaagacag

SEQ ID NO: 1619067 - RNA, 17 nt, Human
ucuggcagcucagagag

SEQ ID NO: 1619068 - RNA, 23 nt, Human
ucugcuuuuuaaagaaugcucuu

SEQ ID NO: 1619069 - RNA, 22 nt, Human
ucugcuuugggguuuaucagaa

SEQ ID NO: 1619070 - RNA, 14 nt, Human
ucugccugucuccc

SEQ ID NO: 1619071 - RNA, 12 nt, Human
ucugccugucuc

SEQ ID NO: 1619072 - RNA, 16 nt, Human
agaacucccuuucaac

SEQ ID NO: 1619073 - RNA, 17 nt, Human
agaacucccuuucaaca

SEQ ID NO: 1619074 - RNA, 23 nt, Human
agaaccuuuugagugccuuacac

SEQ ID NO: 1619075 - RNA, 19 nt, Human
agaaccuuuugagugccuu

SEQ ID NO: 1619076 - RNA, 12 nt, Human
agaaauuaugug

SEQ ID NO: 1619077 - RNA, 23 nt, Human
ucugcaggucccuaauaaagcug

SEQ ID NO: 1619078 - RNA, 22 nt, Human
ucugcaggucccuaauaaagcu

SEQ ID NO: 1619079 - RNA, 19 nt, Human
ucugcaggucccuaauaaa

SEQ ID NO: 1619080 - RNA, 21 nt, Human
ucugcaggucccuaauaaagc

SEQ ID NO: 1619081 - RNA, 20 nt, Human
ucugcccauccugccccuga

SEQ ID NO: 1619082 - RNA, 21 nt, Human
agaagccccacccugccucac

SEQ ID NO: 1619083 - RNA, 23 nt, Human
ucugcccuugguuaggcauugug

SEQ ID NO: 1619084 - RNA, 12 nt, Human
ucugcccuuggu

SEQ ID NO: 1619085 - RNA, 22 nt, Human
ucugcccugcgggucacaggag

SEQ ID NO: 1619086 - RNA, 19 nt, Human
agaagcaccaaucaugaau

SEQ ID NO: 1619087 - RNA, 16 nt, Human
agaagcagaggaagga

SEQ ID NO: 1619088 - RNA, 19 nt, Human
ucuugguccugcugcaguu

SEQ ID NO: 1619089 - RNA, 16 nt, Human
ucuuuaaaugcugcuu

SEQ ID NO: 1619090 - RNA, 17 nt, Human
ucuugguccugcugcag

SEQ ID NO: 1619091 - RNA, 15 nt, Human
ucuugguccugcugc

SEQ ID NO: 1619092 - RNA, 17 nt, Human
ucuuuccugaggcuggg

SEQ ID NO: 1619093 - RNA, 19 nt, Human
ucuuucuaaugugugaauc

SEQ ID NO: 1619094 - RNA, 18 nt, Human
ucuuucuaaugugugaau

SEQ ID NO: 1619095 - RNA, 23 nt, Human
ucuugcaauggcagccuuggcaa

SEQ ID NO: 1619096 - RNA, 22 nt, Human
ucuugcaauggcagccuuggca

SEQ ID NO: 1619097 - RNA, 18 nt, Human
ucuugcaauggcagccuu

SEQ ID NO: 1619098 - RNA, 19 nt, Human
ucuugcaauggcagccuug

SEQ ID NO: 1619099 - RNA, 14 nt, Human
ucuugguccugcug

SEQ ID NO: 1619100 - RNA, 17 nt, Human
ucuuggucagauuugaa

SEQ ID NO: 1619101 - RNA, 14 nt, Human
agacuauucaaaca

SEQ ID NO: 1619102 - RNA, 12 nt, Human
agacuauucaaa

SEQ ID NO: 1619103 - RNA, 15 nt, Human
agacuauucaaacag

SEQ ID NO: 1619104 - RNA, 16 nt, Human
agacuauucaaacagu

SEQ ID NO: 1619105 - RNA, 23 nt, Human
agaccuucuccuucaccuuuguc

SEQ ID NO: 1619106 - RNA, 21 nt, Human
agaccuucuccuucaccuuug

SEQ ID NO: 1619107 - RNA, 18 nt, Human
agaccuucuccuucaccu

SEQ ID NO: 1619108 - RNA, 15 nt, Human
agaccuucuccuuca

SEQ ID NO: 1619109 - RNA, 11 nt, Human
agaccuucucc

SEQ ID NO: 1619110 - RNA, 14 nt, Human
agaccccuggcuuu

SEQ ID NO: 1619111 - RNA, 16 nt, Human
ucuugagccugggagg

SEQ ID NO: 1619112 - RNA, 13 nt, Human
ucuugagccuggg

SEQ ID NO: 1619113 - RNA, 16 nt, Human
ucuugagccuugaacu

SEQ ID NO: 1619114 - RNA, 13 nt, Human
ucuugauucauaa

SEQ ID NO: 1619115 - RNA, 21 nt, Human
ucuugaugccuggcggggugg

SEQ ID NO: 1619116 - RNA, 18 nt, Human
agacaucaacagauaaau

SEQ ID NO: 1619117 - RNA, 17 nt, Human
agacaucaacagauaaa

SEQ ID NO: 1619118 - RNA, 21 nt, Human
agacauagaauuaacacauga

SEQ ID NO: 1619119 - RNA, 19 nt, Human
agacauacuaaccagcaga

SEQ ID NO: 1619120 - RNA, 20 nt, Human
ucuucuguacgucugacagg

SEQ ID NO: 1619121 - RNA, 15 nt, Human
ucuucuguacgucug

SEQ ID NO: 1619122 - RNA, 18 nt, Human
ucuucuggguuccuuccu

SEQ ID NO: 1619123 - RNA, 20 nt, Human
ucuucuguggguuucuaaag

SEQ ID NO: 1619124 - RNA, 19 nt, Human
ucuucugcuucagccuccc

SEQ ID NO: 1619125 - RNA, 12 nt, Human
ucuucugcuuca

SEQ ID NO: 1619126 - RNA, 21 nt, Human
ucuucugaacuuggcgcugcc

SEQ ID NO: 1619127 - RNA, 15 nt, Human
ucuucacaacagauu

SEQ ID NO: 1619128 - RNA, 12 nt, Human
ucuucagagacu

SEQ ID NO: 1619129 - RNA, 18 nt, Human
ucuucagagacuccugca

SEQ ID NO: 1619130 - RNA, 17 nt, Human
ucuucagagacuccugc

SEQ ID NO: 1619131 - RNA, 14 nt, Human
agaaucacuugaac

SEQ ID NO: 1619132 - RNA, 15 nt, Human
ucuucaacucccugc

SEQ ID NO: 1619133 - RNA, 19 nt, Human
ucuucaacugaccagccuc

SEQ ID NO: 1619134 - RNA, 16 nt, Human
ucuucaacugaccagc

SEQ ID NO: 1619135 - RNA, 20 nt, Human
ucuuccaggcugggagagcc

SEQ ID NO: 1619136 - RNA, 17 nt, Human
ucuuccaggcugggaga

SEQ ID NO: 1619137 - RNA, 15 nt, Human
ucuuccaggcuggga

SEQ ID NO: 1619138 - RNA, 20 nt, Human
ucuucagagacuccugcagg

SEQ ID NO: 1619139 - RNA, 21 nt, Human
ucuuccaggcugggagagccu

SEQ ID NO: 1619140 - RNA, 22 nt, Human
ucuucccuacaguugaaaaaca

SEQ ID NO: 1619141 - RNA, 19 nt, Human
ucuucccuacaguugaaaa

SEQ ID NO: 1619142 - RNA, 14 nt, Human
ucuuccucccuccc

SEQ ID NO: 1619143 - RNA, 15 nt, Human
ucuuccucccucccu

SEQ ID NO: 1619144 - RNA, 14 nt, Human
ucuuccucugcuga

SEQ ID NO: 1619145 - RNA, 12 nt, Human
ucuuccucugcu

SEQ ID NO: 1619146 - RNA, 11 nt, Human
ucuuccucugc

SEQ ID NO: 1619147 - RNA, 23 nt, Human
agagacuccugcaggcagccagg

SEQ ID NO: 1619148 - RNA, 22 nt, Human
agagaucaaccccuucgcuccu

SEQ ID NO: 1619149 - RNA, 23 nt, Human
agagcaagacgcugugcugcccu

SEQ ID NO: 1619150 - RNA, 19 nt, Human
agagcaagacgcugugcug

SEQ ID NO: 1619151 - RNA, 22 nt, Human
agagacuccugcaggcagccag

SEQ ID NO: 1619152 - RNA, 21 nt, Human
agagacuccugcaggcagcca

SEQ ID NO: 1619153 - RNA, 20 nt, Human
agagacuccugcaggcagcc

SEQ ID NO: 1619154 - RNA, 19 nt, Human
agagacuccugcaggcagc

SEQ ID NO: 1619155 - RNA, 18 nt, Human
agagacuccugcaggcag

SEQ ID NO: 1619156 - RNA, 17 nt, Human
agagacuccugcaggca

SEQ ID NO: 1619157 - RNA, 11 nt, Human
agagacuccug

SEQ ID NO: 1619158 - RNA, 16 nt, Human
agagacuccagcuggg

SEQ ID NO: 1619159 - RNA, 15 nt, Human
ugaaagacuguacaa

SEQ ID NO: 1619160 - RNA, 13 nt, Human
ugaaagacuguac

SEQ ID NO: 1619161 - RNA, 12 nt, Human
ugaaacuuuugg

SEQ ID NO: 1619162 - RNA, 23 nt, Human
agagcaccuuagacagucccugc

SEQ ID NO: 1619163 - RNA, 22 nt, Human
agagcaccuuagacagucccug

SEQ ID NO: 1619164 - RNA, 22 nt, Human
agagccuuccaggggugggaca

SEQ ID NO: 1619165 - RNA, 17 nt, Human
agagccuuccaggggug

SEQ ID NO: 1619166 - RNA, 15 nt, Human
agagccuuccagggg

SEQ ID NO: 1619167 - RNA, 13 nt, Human
agagccuuccagg

SEQ ID NO: 1619168 - RNA, 20 nt, Human
agagcuagcagcagggaggg

SEQ ID NO: 1619169 - RNA, 14 nt, Human
agagcugccaccug

SEQ ID NO: 1619170 - RNA, 16 nt, Human
ugaaaaaggaggaaga

SEQ ID NO: 1619171 - RNA, 23 nt, Human
ugaaaaaauauauaucaaauaua

SEQ ID NO: 1619172 - RNA, 21 nt, Human
ucuuucuggcuaugcauuuga

SEQ ID NO: 1619173 - RNA, 20 nt, Human
ucuuucuggcuaugcauuug

SEQ ID NO: 1619174 - RNA, 22 nt, Human
ucuuuggucuacacugugcuga

SEQ ID NO: 1619175 - RNA, 22 nt, Human
ugaaaaaguucugcagauaaac

SEQ ID NO: 1619176 - RNA, 22 nt, Human
ugaaaaaggaggaagagaaaaa

SEQ ID NO: 1619177 - RNA, 20 nt, Human
ugaaaaaggaggaagagaaa

SEQ ID NO: 1619178 - RNA, 20 nt, Human
ugaaaaucuuauaauuuaaa

SEQ ID NO: 1619179 - RNA, 19 nt, Human
ugaaaaucgugacaacacu

SEQ ID NO: 1619180 - RNA, 17 nt, Human
ugaaaauguauguguaa

SEQ ID NO: 1619181 - RNA, 15 nt, Human
ugaaacggaugauuu

SEQ ID NO: 1619182 - RNA, 22 nt, Human
ugaaacugagaugugaacacau

SEQ ID NO: 1619183 - RNA, 19 nt, Human
ugaaacucguuaauuugua

SEQ ID NO: 1619184 - RNA, 23 nt, Human
ugaaacuuguguaaauacaauuu

SEQ ID NO: 1619185 - RNA, 17 nt, Human
ugaaacuuguguaaaua

SEQ ID NO: 1619186 - RNA, 20 nt, Human
ugaaacggaugauuucuaug

SEQ ID NO: 1619187 - RNA, 19 nt, Human
ugaaacggaugauuucuau

SEQ ID NO: 1619188 - RNA, 18 nt, Human
ugaaacggaugauuucua

SEQ ID NO: 1619189 - RNA, 17 nt, Human
ugaaacggaugauuucu

SEQ ID NO: 1619190 - RNA, 16 nt, Human
agagguggggagcaga

SEQ ID NO: 1619191 - RNA, 15 nt, Human
agagguuaagguggg

SEQ ID NO: 1619192 - RNA, 20 nt, Human
ugaagcuaucguaaaauuaa

SEQ ID NO: 1619193 - RNA, 12 nt, Human
ugaagccuuugu

SEQ ID NO: 1619194 - RNA, 16 nt, Human
agagggagggagggcu

SEQ ID NO: 1619195 - RNA, 20 nt, Human
agagggagggagggcuccag

SEQ ID NO: 1619196 - RNA, 22 nt, Human
ugaauggcuuuguauagaaccu

SEQ ID NO: 1619197 - RNA, 19 nt, Human
ugaauggcuuuguauagaa

SEQ ID NO: 1619198 - RNA, 18 nt, Human
ugaauggcuuuguauaga

SEQ ID NO: 1619199 - RNA, 17 nt, Human
ugaauggcuuuguauag

SEQ ID NO: 1619200 - RNA, 18 nt, Human
ugaauauuuaguguucau

SEQ ID NO: 1619201 - RNA, 15 nt, Human
ugaauggcuuuguau

SEQ ID NO: 1619202 - RNA, 12 nt, Human
ugaauggcuuug

SEQ ID NO: 1619203 - RNA, 15 nt, Human
ugaauacuuuauaaa

SEQ ID NO: 1619204 - RNA, 14 nt, Human
ugaagucacacagu

SEQ ID NO: 1619205 - RNA, 14 nt, Human
ugaagucacugcac

SEQ ID NO: 1619206 - RNA, 22 nt, Human
ugaaggguaauuauauaguuac

SEQ ID NO: 1619207 - RNA, 16 nt, Human
ugaauaaagacaccua

SEQ ID NO: 1619208 - RNA, 21 nt, Human
ugaagucacugcacagugcau

SEQ ID NO: 1619209 - RNA, 16 nt, Human
ugaagucacugcacag

SEQ ID NO: 1619210 - RNA, 15 nt, Human
ugaagucacugcaca

SEQ ID NO: 1619211 - RNA, 15 nt, Human
agagucacuggaaca

SEQ ID NO: 1619212 - RNA, 22 nt, Human
agagucagaaguuucugccgca

SEQ ID NO: 1619213 - RNA, 17 nt, Human
agaguuguuacauuuuu

SEQ ID NO: 1619214 - RNA, 21 nt, Human
agaguuguuacauuuuuaagu

SEQ ID NO: 1619215 - RNA, 19 nt, Human
agaguuguuacauuuuuaa

SEQ ID NO: 1619216 - RNA, 20 nt, Human
agaguuguuacauuuuuaag

SEQ ID NO: 1619217 - RNA, 17 nt, Human
agauaaggguaucuggu

SEQ ID NO: 1619218 - RNA, 22 nt, Human
agauaauauuaaggaagacaau

SEQ ID NO: 1619219 - RNA, 18 nt, Human
agauaauauuaaggaaga

SEQ ID NO: 1619220 - RNA, 20 nt, Human
agauacaggaaaagcugcug

SEQ ID NO: 1619221 - RNA, 13 nt, Human
agauacaguuacu

SEQ ID NO: 1619222 - RNA, 11 nt, Human
agauacuguau

SEQ ID NO: 1619223 - RNA, 17 nt, Human
agauacuggauuguacu

SEQ ID NO: 1619224 - RNA, 22 nt, Human
agauacaguuacucagaauucu

SEQ ID NO: 1619225 - RNA, 20 nt, Human
agauauuuugcuuugugauu

SEQ ID NO: 1619226 - RNA, 21 nt, Human
agauauuuugcuuugugauuu

SEQ ID NO: 1619227 - RNA, 18 nt, Human
agaucaaaagguuaauaa

SEQ ID NO: 1619228 - RNA, 15 nt, Human
agauacuguaucaug

SEQ ID NO: 1619229 - RNA, 16 nt, Human
agauacuguaucauga

SEQ ID NO: 1619230 - RNA, 23 nt, Human
ugaauuucuuuugccguuauuaa

SEQ ID NO: 1619231 - RNA, 21 nt, Human
ugaauuugugaagguggaaau

SEQ ID NO: 1619232 - RNA, 13 nt, Human
ugaauuugugaag

SEQ ID NO: 1619233 - RNA, 23 nt, Human
ugaauuugugaagguggaaauaa

SEQ ID NO: 1619234 - RNA, 21 nt, Human
ugaauuuuguguuagagauuu

SEQ ID NO: 1619235 - RNA, 17 nt, Human
ugaauuuuguguuagag

SEQ ID NO: 1619236 - RNA, 12 nt, Human
ugacacaugcaa

SEQ ID NO: 1619237 - RNA, 20 nt, Human
ugacacaugcaaggucauuu

SEQ ID NO: 1619238 - RNA, 18 nt, Human
ugacacacagcucugucc

SEQ ID NO: 1619239 - RNA, 16 nt, Human
ugacacacagcucugu

SEQ ID NO: 1619240 - RNA, 19 nt, Human
ugacaaagacugaguacgu

SEQ ID NO: 1619241 - RNA, 20 nt, Human
ugacacacagcucuguccug

SEQ ID NO: 1619242 - RNA, 19 nt, Human
ugacacacagcucuguccu

SEQ ID NO: 1619243 - RNA, 15 nt, Human
ugacccaugcugccc

SEQ ID NO: 1619244 - RNA, 14 nt, Human
ugacccaugcugcc

SEQ ID NO: 1619245 - RNA, 21 nt, Human
ugacccaugcugcccugugag

SEQ ID NO: 1619246 - RNA, 16 nt, Human
ugacccaugcugcccu

SEQ ID NO: 1619247 - RNA, 17 nt, Human
ugacccaugcugcccug

SEQ ID NO: 1619248 - RNA, 17 nt, Human
ugacacuuaaaaauggu

SEQ ID NO: 1619249 - RNA, 17 nt, Human
agaugcaguucugaaga

SEQ ID NO: 1619250 - RNA, 16 nt, Human
agaugcaguucugaag

SEQ ID NO: 1619251 - RNA, 16 nt, Human
agaugccgcauuugga

SEQ ID NO: 1619252 - RNA, 23 nt, Human
agaugcugacuguacuccuccca

SEQ ID NO: 1619253 - RNA, 20 nt, Human
agaugcugacuguacuccuc

SEQ ID NO: 1619254 - RNA, 19 nt, Human
ugaccugaggcccuucucu

SEQ ID NO: 1619255 - RNA, 18 nt, Human
ugaccugaggcccuucuc

SEQ ID NO: 1619256 - RNA, 13 nt, Human
ugacuuacuguac

SEQ ID NO: 1619257 - RNA, 15 nt, Human
ugacuuacuguacau

SEQ ID NO: 1619258 - RNA, 16 nt, Human
ugacuuacuguacaug

SEQ ID NO: 1619259 - RNA, 24 nt, Human
ugacuucuaaguaaaaccacagca

SEQ ID NO: 1619260 - RNA, 22 nt, Human
agauucauauuuacuucuuaua

SEQ ID NO: 1619261 - RNA, 18 nt, Human
agauuccagagaguggcu

SEQ ID NO: 1619262 - RNA, 23 nt, Human
ugacuucuaaguaaaaccacagc

SEQ ID NO: 1619263 - RNA, 22 nt, Human
ugacuucuaaguaaaaccacag

SEQ ID NO: 1619264 - RNA, 15 nt, Human
ugacuucuaaguaaa

SEQ ID NO: 1619265 - RNA, 19 nt, Human
ugacuuacuguacaugaaa

SEQ ID NO: 1619266 - RNA, 15 nt, Human
agauucccugagcag

SEQ ID NO: 1619267 - RNA, 19 nt, Human
agauuccagagaguggcuc

SEQ ID NO: 1619268 - RNA, 13 nt, Human
agauuggaaggaa

SEQ ID NO: 1619269 - RNA, 21 nt, Human
agauuuugaaauuuuuauuaa

SEQ ID NO: 1619270 - RNA, 20 nt, Human
agauuuuauuauguaaaucc

SEQ ID NO: 1619271 - RNA, 19 nt, Human
agauuuuauuauguaaauc

SEQ ID NO: 1619272 - RNA, 20 nt, Human
agauuucucauuugccaaua

SEQ ID NO: 1619273 - RNA, 17 nt, Human
agauuugaacucuucaa

SEQ ID NO: 1619274 - RNA, 18 nt, Human
agauuuuauuauguaaau

SEQ ID NO: 1619275 - RNA, 17 nt, Human
agauuuuauuauguaaa

SEQ ID NO: 1619276 - RNA, 16 nt, Human
agauuuuauuauguaa

SEQ ID NO: 1619277 - RNA, 15 nt, Human
agauuuuauuaugua

SEQ ID NO: 1619278 - RNA, 14 nt, Human
agauuuuauuaugu

SEQ ID NO: 1619279 - RNA, 23 nt, Human
agcaacgcaggcccccaggugcc

SEQ ID NO: 1619280 - RNA, 16 nt, Human
agauuuuuuuguuguu

SEQ ID NO: 1619281 - RNA, 15 nt, Human
agauuuuuuuguugu

SEQ ID NO: 1619282 - RNA, 23 nt, Human
agauuuuuuuguuguuuguuuag

SEQ ID NO: 1619283 - RNA, 19 nt, Human
agauuuuuuuguuguuugu

SEQ ID NO: 1619284 - RNA, 18 nt, Human
agauuuuuuuguuguuug

SEQ ID NO: 1619285 - RNA, 16 nt, Human
agcaagacgcugugcu

SEQ ID NO: 1619286 - RNA, 13 nt, Human
agcaagacgcugu

SEQ ID NO: 1619287 - RNA, 20 nt, Human
ugagaagcagaggaaggaga

SEQ ID NO: 1619288 - RNA, 22 nt, Human
agcaagacgcugugcugcccug

SEQ ID NO: 1619289 - RNA, 21 nt, Human
agcaagacgcugugcugcccu

SEQ ID NO: 1619290 - RNA, 20 nt, Human
agcaagacgcugugcugccc

SEQ ID NO: 1619291 - RNA, 17 nt, Human
agcaagacgcugugcug

SEQ ID NO: 1619292 - RNA, 23 nt, Human
agcaagacgcugugcugcccugc

SEQ ID NO: 1619293 - RNA, 20 nt, Human
agcaucaggccaggcccucu

SEQ ID NO: 1619294 - RNA, 19 nt, Human
agcaucaggccaggcccuc

SEQ ID NO: 1619295 - RNA, 18 nt, Human
agcaucaggccaggcccu

SEQ ID NO: 1619296 - RNA, 17 nt, Human
agcaucaggccaggccc

SEQ ID NO: 1619297 - RNA, 16 nt, Human
agcaucaggccaggcc

SEQ ID NO: 1619298 - RNA, 14 nt, Human
agcaucaggccagg

SEQ ID NO: 1619299 - RNA, 17 nt, Human
agcaugucgucaaagcu

SEQ ID NO: 1619300 - RNA, 20 nt, Human
agcaugucgucaaagcugaa

SEQ ID NO: 1619301 - RNA, 12 nt, Human
agcauggcugcc

SEQ ID NO: 1619302 - RNA, 18 nt, Human
agcauuguaaaugugcuu

SEQ ID NO: 1619303 - RNA, 17 nt, Human
agcauuguaaaugugcu

SEQ ID NO: 1619304 - RNA, 20 nt, Human
agcaucacaugaacuuguaa

SEQ ID NO: 1619305 - RNA, 13 nt, Human
agcaucaggccag

SEQ ID NO: 1619306 - RNA, 21 nt, Human
ugaucacggcucacugcagcc

SEQ ID NO: 1619307 - RNA, 20 nt, Human
ugaucacggcucacugcagc

SEQ ID NO: 1619308 - RNA, 22 nt, Human
agcauauucaggaagcucaggg

SEQ ID NO: 1619309 - RNA, 19 nt, Human
ugaucacggcucacugcag

SEQ ID NO: 1619310 - RNA, 12 nt, Human
ugauaugggucu

SEQ ID NO: 1619311 - RNA, 16 nt, Human
ugauaugugaacaguu

SEQ ID NO: 1619312 - RNA, 15 nt, Human
ugauaugugaacagu

SEQ ID NO: 1619313 - RNA, 23 nt, Human
ugauauuuucaacgcagcccugc

SEQ ID NO: 1619314 - RNA, 22 nt, Human
ugauauuuucaacgcagcccug

SEQ ID NO: 1619315 - RNA, 21 nt, Human
ugauauuuucaacgcagcccu

SEQ ID NO: 1619316 - RNA, 19 nt, Human
ugauauuuucaacgcagcc

SEQ ID NO: 1619317 - RNA, 14 nt, Human
ugauacuacaguuu

SEQ ID NO: 1619318 - RNA, 17 nt, Human
ugauacuacaguuuguu

SEQ ID NO: 1619319 - RNA, 20 nt, Human
ugauacaaugcugugcccua

SEQ ID NO: 1619320 - RNA, 21 nt, Human
ugauacaaugcugugcccuaa

SEQ ID NO: 1619321 - RNA, 21 nt, Human
ugauacagaaaaguugaauuu

SEQ ID NO: 1619322 - RNA, 12 nt, Human
ugauacagaaaa

SEQ ID NO: 1619323 - RNA, 17 nt, Human
ugaguucauacccuguu

SEQ ID NO: 1619324 - RNA, 18 nt, Human
ugaguucauacccuguua

SEQ ID NO: 1619325 - RNA, 18 nt, Human
ugagugucuuaauuaaaa

SEQ ID NO: 1619326 - RNA, 21 nt, Human
ugagugggugaauaauacagu

SEQ ID NO: 1619327 - RNA, 20 nt, Human
ugagugccuuacacaauggu

SEQ ID NO: 1619328 - RNA, 17 nt, Human
ugagugccuuacacaau

SEQ ID NO: 1619329 - RNA, 17 nt, Human
ugagucaccaagcccag

SEQ ID NO: 1619330 - RNA, 16 nt, Human
ugagucaccaagccca

SEQ ID NO: 1619331 - RNA, 14 nt, Human
ugagucaccaagcc

SEQ ID NO: 1619332 - RNA, 22 nt, Human
ugaguaacugauuuguaacaag

SEQ ID NO: 1619333 - RNA, 15 nt, Human
ugaguacuacagucc

SEQ ID NO: 1619334 - RNA, 14 nt, Human
agcauauucaggaa

SEQ ID NO: 1619335 - RNA, 16 nt, Human
agcauauucaggaagc

SEQ ID NO: 1619336 - RNA, 13 nt, Human
ugaguagcuggga

SEQ ID NO: 1619337 - RNA, 23 nt, Human
ugaguacuacaguccucccaucu

SEQ ID NO: 1619338 - RNA, 22 nt, Human
ugaguacuacaguccucccauc

SEQ ID NO: 1619339 - RNA, 21 nt, Human
ugaguacuacaguccucccau

SEQ ID NO: 1619340 - RNA, 17 nt, Human
ugaguacuacaguccuc

SEQ ID NO: 1619341 - RNA, 23 nt, Human
agcauaaauguugacaugggaca

SEQ ID NO: 1619342 - RNA, 15 nt, Human
agcauacguacacau

SEQ ID NO: 1619343 - RNA, 21 nt, Human
agcauaauacuugcuuuggaa

SEQ ID NO: 1619344 - RNA, 12 nt, Human
ugagaauuaccc

SEQ ID NO: 1619345 - RNA, 16 nt, Human
agcauacguacacauu

SEQ ID NO: 1619346 - RNA, 17 nt, Human
agcauacguacacauuu

SEQ ID NO: 1619347 - RNA, 18 nt, Human
agcauacguacacauuuu

SEQ ID NO: 1619348 - RNA, 19 nt, Human
agcauacguacacauuuua

SEQ ID NO: 1619349 - RNA, 20 nt, Human
agcauacguacacauuuuau

SEQ ID NO: 1619350 - RNA, 21 nt, Human
agcauacguacacauuuuauu

SEQ ID NO: 1619351 - RNA, 17 nt, Human
ugaugaagaaguugaua

SEQ ID NO: 1619352 - RNA, 14 nt, Human
ugaugaagaggagu

SEQ ID NO: 1619353 - RNA, 13 nt, Human
ugaugaagaggag

SEQ ID NO: 1619354 - RNA, 15 nt, Human
agccacggccaggcc

SEQ ID NO: 1619355 - RNA, 21 nt, Human
ugauccagcagauuauucacu

SEQ ID NO: 1619356 - RNA, 22 nt, Human
ugauccagcagauuauucacug

SEQ ID NO: 1619357 - RNA, 18 nt, Human
ugauccuuuuggagucag

SEQ ID NO: 1619358 - RNA, 22 nt, Human
ugauccaguuuuguuuggacca

SEQ ID NO: 1619359 - RNA, 18 nt, Human
agccacauuccugaugcu

SEQ ID NO: 1619360 - RNA, 14 nt, Human
agccacauuccuga

SEQ ID NO: 1619361 - RNA, 23 nt, Human
agccaccaacauacucccaucug

SEQ ID NO: 1619362 - RNA, 20 nt, Human
agccaccaacauacucccau

SEQ ID NO: 1619363 - RNA, 19 nt, Human
agccaccaacauacuccca

SEQ ID NO: 1619364 - RNA, 14 nt, Human
agccacggccaggc

SEQ ID NO: 1619365 - RNA, 18 nt, Human
agccaccgugccuggcca

SEQ ID NO: 1619366 - RNA, 14 nt, Human
ugauuaccagggac

SEQ ID NO: 1619367 - RNA, 16 nt, Human
ugauuaccagggacug

SEQ ID NO: 1619368 - RNA, 12 nt, Human
ugauuaaaccaa

SEQ ID NO: 1619369 - RNA, 22 nt, Human
agccacugcaccgggccacaga

SEQ ID NO: 1619370 - RNA, 21 nt, Human
agccacugcaccgggccacag

SEQ ID NO: 1619371 - RNA, 16 nt, Human
agccacugcaccgggc

SEQ ID NO: 1619372 - RNA, 13 nt, Human
agccacugcaccg

SEQ ID NO: 1619373 - RNA, 17 nt, Human
ugaugaucuuuaaaaua

SEQ ID NO: 1619374 - RNA, 16 nt, Human
ugauggugcaaugacc

SEQ ID NO: 1619375 - RNA, 23 nt, Human
ugauggugcaaugaccuuucaau

SEQ ID NO: 1619376 - RNA, 17 nt, Human
ugauggugcaaugaccu

SEQ ID NO: 1619377 - RNA, 14 nt, Human
ugaugaucuuuaaa

SEQ ID NO: 1619378 - RNA, 20 nt, Human
ugaugauccuaggcauuugc

SEQ ID NO: 1619379 - RNA, 14 nt, Human
ugaugauccuaggc

SEQ ID NO: 1619380 - RNA, 15 nt, Human
ugauggugguauguu

SEQ ID NO: 1619381 - RNA, 17 nt, Human
ugauguuuuaaggaugc

SEQ ID NO: 1619382 - RNA, 18 nt, Human
ugauguuuuaaggaugcu

SEQ ID NO: 1619383 - RNA, 14 nt, Human
agccagacuggcac

SEQ ID NO: 1619384 - RNA, 19 nt, Human
agccagacuggcacaguuu

SEQ ID NO: 1619385 - RNA, 14 nt, Human
agccaggccacaag

SEQ ID NO: 1619386 - RNA, 12 nt, Human
agccaggccaca

SEQ ID NO: 1619387 - RNA, 22 nt, Human
agccaggccacaagacccuugu

SEQ ID NO: 1619388 - RNA, 21 nt, Human
agccaggccacaagacccuug

SEQ ID NO: 1619389 - RNA, 12 nt, Human
agccagggucuc

SEQ ID NO: 1619390 - RNA, 23 nt, Human
agccaguaaaugggggugcauuu

SEQ ID NO: 1619391 - RNA, 21 nt, Human
agcccaggaaaggcuccagga

SEQ ID NO: 1619392 - RNA, 20 nt, Human
agcccaggaaaggcuccagg

SEQ ID NO: 1619393 - RNA, 19 nt, Human
agcccaggaaaggcuccag

SEQ ID NO: 1619394 - RNA, 14 nt, Human
agccauguuuauua

SEQ ID NO: 1619395 - RNA, 13 nt, Human
agccauguuuauu

SEQ ID NO: 1619396 - RNA, 16 nt, Human
agccauguuuauuaca

SEQ ID NO: 1619397 - RNA, 17 nt, Human
agccauguuuauuacag

SEQ ID NO: 1619398 - RNA, 23 nt, Human
agcccaggaaaggcuccaggagc

SEQ ID NO: 1619399 - RNA, 22 nt, Human
agcccaggaaaggcuccaggag

SEQ ID NO: 1619400 - RNA, 24 nt, Human
agcccaggaaaggcuccaggagca

SEQ ID NO: 1619401 - RNA, 14 nt, Human
ugauucagcucugc

SEQ ID NO: 1619402 - RNA, 13 nt, Human
ugauucagcucug

SEQ ID NO: 1619403 - RNA, 15 nt, Human
ugauucauaaugacu

SEQ ID NO: 1619404 - RNA, 18 nt, Human
ugauucccaagcucugcu

SEQ ID NO: 1619405 - RNA, 16 nt, Human
ugauucccaagcucug

SEQ ID NO: 1619406 - RNA, 15 nt, Human
ugauucccaagcucu

SEQ ID NO: 1619407 - RNA, 21 nt, Human
ugauucccaagcucugcuccu

SEQ ID NO: 1619408 - RNA, 19 nt, Human
ugauucccaagcucugcuc

SEQ ID NO: 1619409 - RNA, 20 nt, Human
agccuuggggcugaugcagu

SEQ ID NO: 1619410 - RNA, 17 nt, Human
agccuuccagggguggg

SEQ ID NO: 1619411 - RNA, 16 nt, Human
agccuuccaggggugg

SEQ ID NO: 1619412 - RNA, 14 nt, Human
agccuuccaggggu

SEQ ID NO: 1619413 - RNA, 11 nt, Human
agccuuccagg

SEQ ID NO: 1619414 - RNA, 18 nt, Human
agcggagacggaguccca

SEQ ID NO: 1619415 - RNA, 20 nt, Human
agcggagaaaggaagggcug

SEQ ID NO: 1619416 - RNA, 20 nt, Human
ugcauuaucuagauacugua

SEQ ID NO: 1619417 - RNA, 16 nt, Human
agcggagaaaggaagg

SEQ ID NO: 1619418 - RNA, 21 nt, Human
ugcauuaucuagauacuguau

SEQ ID NO: 1619419 - RNA, 22 nt, Human
ugcauuaucuagauacuguauc

SEQ ID NO: 1619420 - RNA, 22 nt, Human
ugccaauaauaauaccucccuu

SEQ ID NO: 1619421 - RNA, 21 nt, Human
ugccaauaauaauaccucccu

SEQ ID NO: 1619422 - RNA, 16 nt, Human
ugccacacuucaggcu

SEQ ID NO: 1619423 - RNA, 15 nt, Human
ugccacacuucaggc

SEQ ID NO: 1619424 - RNA, 14 nt, Human
ugccacacuucagg

SEQ ID NO: 1619425 - RNA, 13 nt, Human
ugccacacuucag

SEQ ID NO: 1619426 - RNA, 21 nt, Human
agccugugccucugggacugg

SEQ ID NO: 1619427 - RNA, 13 nt, Human
agccuguuuaaga

SEQ ID NO: 1619428 - RNA, 23 nt, Human
agccugugucuuuaaaugcugcu

SEQ ID NO: 1619429 - RNA, 16 nt, Human
agccugugucuuuaaa

SEQ ID NO: 1619430 - RNA, 12 nt, Human
ugcauaccacuu

SEQ ID NO: 1619431 - RNA, 17 nt, Human
agccugcuccagcuguu

SEQ ID NO: 1619432 - RNA, 16 nt, Human
agccugcuccagcugu

SEQ ID NO: 1619433 - RNA, 15 nt, Human
agccugcuccagcug

SEQ ID NO: 1619434 - RNA, 14 nt, Human
ugcauaccacuuuu

SEQ ID NO: 1619435 - RNA, 22 nt, Human
agccugcuccagcuguucagcu

SEQ ID NO: 1619436 - RNA, 19 nt, Human
agccugcuccagcuguuca

SEQ ID NO: 1619437 - RNA, 22 nt, Human
agccugggugacagagcaagug

SEQ ID NO: 1619438 - RNA, 18 nt, Human
agcuacuugggaggcuga

SEQ ID NO: 1619439 - RNA, 17 nt, Human
agcuacuugggaggcug

SEQ ID NO: 1619440 - RNA, 16 nt, Human
agcuagaauuugauau

SEQ ID NO: 1619441 - RNA, 13 nt, Human
agcuagaauuuga

SEQ ID NO: 1619442 - RNA, 18 nt, Human
agcuagacgagcaggcuu

SEQ ID NO: 1619443 - RNA, 13 nt, Human
agcuagacuggug

SEQ ID NO: 1619444 - RNA, 21 nt, Human
agcuagacuggugacugauuc

SEQ ID NO: 1619445 - RNA, 17 nt, Human
agcuagacuggugacug

SEQ ID NO: 1619446 - RNA, 16 nt, Human
agcuagacuggugacu

SEQ ID NO: 1619447 - RNA, 14 nt, Human
agcuagacugguga

SEQ ID NO: 1619448 - RNA, 19 nt, Human
agcuacuaauuuuaaaaug

SEQ ID NO: 1619449 - RNA, 15 nt, Human
agcgugcauaaguua

SEQ ID NO: 1619450 - RNA, 22 nt, Human
agcgugagccacugcaccgggc

SEQ ID NO: 1619451 - RNA, 19 nt, Human
agcgugagccacugcaccg

SEQ ID NO: 1619452 - RNA, 23 nt, Human
ugccacacuucaggcucuucucc

SEQ ID NO: 1619453 - RNA, 22 nt, Human
ugccacacuucaggcucuucuc

SEQ ID NO: 1619454 - RNA, 20 nt, Human
agcucauucuccuuguguua

SEQ ID NO: 1619455 - RNA, 21 nt, Human
agcucauucuccuuguguuac

SEQ ID NO: 1619456 - RNA, 21 nt, Human
ugcccaagaauagaugcugac

SEQ ID NO: 1619457 - RNA, 23 nt, Human
ugcccaagaauagaugcugacug

SEQ ID NO: 1619458 - RNA, 22 nt, Human
ugcccaagaauagaugcugacu

SEQ ID NO: 1619459 - RNA, 19 nt, Human
ugcccacaggaucagucug

SEQ ID NO: 1619460 - RNA, 20 nt, Human
ugcccacaggaucagucuga

SEQ ID NO: 1619461 - RNA, 21 nt, Human
ugcccagccccuucugaccca

SEQ ID NO: 1619462 - RNA, 21 nt, Human
agcucaggugucccugcacuu

SEQ ID NO: 1619463 - RNA, 20 nt, Human
agcucaggugucccugcacu

SEQ ID NO: 1619464 - RNA, 22 nt, Human
agcucaggugucccugcacuug

SEQ ID NO: 1619465 - RNA, 18 nt, Human
agcucaggugucccugca

SEQ ID NO: 1619466 - RNA, 15 nt, Human
agcuaggccuggcca

SEQ ID NO: 1619467 - RNA, 14 nt, Human
agcuaggccuggcc

SEQ ID NO: 1619468 - RNA, 16 nt, Human
agcuaggccuggccag

SEQ ID NO: 1619469 - RNA, 12 nt, Human
agcuaggccugg

SEQ ID NO: 1619470 - RNA, 18 nt, Human
agcuaggaauuguguuua

SEQ ID NO: 1619471 - RNA, 22 nt, Human
agccugaaagaggaaugaagua

SEQ ID NO: 1619472 - RNA, 17 nt, Human
agccucccaaagugcug

SEQ ID NO: 1619473 - RNA, 15 nt, Human
ugcagccucacaguc

SEQ ID NO: 1619474 - RNA, 13 nt, Human
ugcagccucacag

SEQ ID NO: 1619475 - RNA, 16 nt, Human
ugcagccucacagucc

SEQ ID NO: 1619476 - RNA, 17 nt, Human
ugcagccucacaguccu

SEQ ID NO: 1619477 - RNA, 17 nt, Human
ugcauaaguuaacuucc

SEQ ID NO: 1619478 - RNA, 14 nt, Human
ugcauaaguuaacu

SEQ ID NO: 1619479 - RNA, 23 nt, Human
ugcauaacguauaaaagccuguu

SEQ ID NO: 1619480 - RNA, 16 nt, Human
ugcaggucccuaauaa

SEQ ID NO: 1619481 - RNA, 15 nt, Human
ugcaggucccuaaua

SEQ ID NO: 1619482 - RNA, 14 nt, Human
ugcaggucccuaau

SEQ ID NO: 1619483 - RNA, 12 nt, Human
ugcaggucccua

SEQ ID NO: 1619484 - RNA, 17 nt, Human
ugcaggucccuaauaaa

SEQ ID NO: 1619485 - RNA, 18 nt, Human
ugcaguacuuuaccuccu

SEQ ID NO: 1619486 - RNA, 15 nt, Human
agccucauguccacu

SEQ ID NO: 1619487 - RNA, 23 nt, Human
agccucagcauccuggcacccgg

SEQ ID NO: 1619488 - RNA, 22 nt, Human
agccucagcauccuggcacccg

SEQ ID NO: 1619489 - RNA, 20 nt, Human
agccucauguccacugguuc

SEQ ID NO: 1619490 - RNA, 20 nt, Human
agccuccaugcugccuccag

SEQ ID NO: 1619491 - RNA, 18 nt, Human
agccuccaugcugccucc

SEQ ID NO: 1619492 - RNA, 16 nt, Human
agccucccaaagugcu

SEQ ID NO: 1619493 - RNA, 21 nt, Human
agccucagcauccuggcaccc

SEQ ID NO: 1619494 - RNA, 20 nt, Human
agccucagcauccuggcacc

SEQ ID NO: 1619495 - RNA, 19 nt, Human
agccucagcauccuggcac

SEQ ID NO: 1619496 - RNA, 17 nt, Human
agccucagcauccuggc

SEQ ID NO: 1619497 - RNA, 17 nt, Human
agcccuucuuuccacag

SEQ ID NO: 1619498 - RNA, 20 nt, Human
agccgagauagccaaggcca

SEQ ID NO: 1619499 - RNA, 21 nt, Human
agccguggcuucccgcucagc

SEQ ID NO: 1619500 - RNA, 14 nt, Human
agccguggcuuccc

SEQ ID NO: 1619501 - RNA, 19 nt, Human
agccguuuguuccccaaga

SEQ ID NO: 1619502 - RNA, 23 nt, Human
agccguggcuucccgcucagccc

SEQ ID NO: 1619503 - RNA, 22 nt, Human
agccguggcuucccgcucagcc

SEQ ID NO: 1619504 - RNA, 23 nt, Human
ugcacuauagccuaggugacaga

SEQ ID NO: 1619505 - RNA, 23 nt, Human
agcccuucuaccuuccugcaaca

SEQ ID NO: 1619506 - RNA, 18 nt, Human
agcccauggcacucuaug

SEQ ID NO: 1619507 - RNA, 20 nt, Human
agccccaaaacucuccucug

SEQ ID NO: 1619508 - RNA, 22 nt, Human
agccccaaaacucuccucugcu

SEQ ID NO: 1619509 - RNA, 21 nt, Human
agccccaaaacucuccucugc

SEQ ID NO: 1619510 - RNA, 20 nt, Human
ugauucuccugccucagccu

SEQ ID NO: 1619511 - RNA, 19 nt, Human
ugauucuccugccucagcc

SEQ ID NO: 1619512 - RNA, 15 nt, Human
ugauucuccugccuc

SEQ ID NO: 1619513 - RNA, 22 nt, Human
agccccgaggccuucucugaag

SEQ ID NO: 1619514 - RNA, 17 nt, Human
agccccgaggccuucuc

SEQ ID NO: 1619515 - RNA, 24 nt, Human
agccccaaaacucuccucugcugc

SEQ ID NO: 1619516 - RNA, 18 nt, Human
agccccuggaugcagccu

SEQ ID NO: 1619517 - RNA, 17 nt, Human
agccccuggaugcagcc

SEQ ID NO: 1619518 - RNA, 19 nt, Human
agccccuggaugcagccuc

SEQ ID NO: 1619519 - RNA, 22 nt, Human
agccccuggaugcagccucaca

SEQ ID NO: 1619520 - RNA, 21 nt, Human
ugcacaagcugcacccucagg

SEQ ID NO: 1619521 - RNA, 18 nt, Human
ugcacaagcugcacccuc

SEQ ID NO: 1619522 - RNA, 24 nt, Human
ugcacacagcacgggggccaagga

SEQ ID NO: 1619523 - RNA, 12 nt, Human
ugcacacagcac

SEQ ID NO: 1619524 - RNA, 23 nt, Human
agcccugguggcagugggagcug

SEQ ID NO: 1619525 - RNA, 22 nt, Human
agcccugguggcagugggagcu

SEQ ID NO: 1619526 - RNA, 15 nt, Human
ugcacaagcugcacc

SEQ ID NO: 1619527 - RNA, 24 nt, Human
agccccuucugacccaugcugccc

SEQ ID NO: 1619528 - RNA, 20 nt, Human
agccccuucugacccaugcu

SEQ ID NO: 1619529 - RNA, 21 nt, Human
agcccugcuuugggcugcccu

SEQ ID NO: 1619530 - RNA, 23 nt, Human
agcccugcuuugggcugcccugg

SEQ ID NO: 1619531 - RNA, 22 nt, Human
agcccugcuuugggcugcccug

SEQ ID NO: 1619532 - RNA, 17 nt, Human
ugcacccucaggcaggu

SEQ ID NO: 1619533 - RNA, 16 nt, Human
ugcacccucaggcagg

SEQ ID NO: 1619534 - RNA, 15 nt, Human
ugcacgugugugcac

SEQ ID NO: 1619535 - RNA, 14 nt, Human
ugcacgugugugca

SEQ ID NO: 1619536 - RNA, 10 nt, Human
ugcacacauu

SEQ ID NO: 1619537 - RNA, 20 nt, Human
ugcacacauuuuuuaaaugc

SEQ ID NO: 1619538 - RNA, 19 nt, Human
ugcuaucucccccagcccc

SEQ ID NO: 1619539 - RNA, 20 nt, Human
ugcuaucucccccagcccca

SEQ ID NO: 1619540 - RNA, 14 nt, Human
ugcucauggaauug

SEQ ID NO: 1619541 - RNA, 14 nt, Human
ugcucuggacaggc

SEQ ID NO: 1619542 - RNA, 16 nt, Human
ugcucuggacaggcau

SEQ ID NO: 1619543 - RNA, 15 nt, Human
ugcucuggacaggca

SEQ ID NO: 1619544 - RNA, 17 nt, Human
ugcucuggacaggcaug

SEQ ID NO: 1619545 - RNA, 19 nt, Human
ugcugacuguacuccuccc

SEQ ID NO: 1619546 - RNA, 16 nt, Human
ugcugacuguacuccu

SEQ ID NO: 1619547 - RNA, 12 nt, Human
aggaaauauuua

SEQ ID NO: 1619548 - RNA, 16 nt, Human
aggaaaggcuccagga

SEQ ID NO: 1619549 - RNA, 15 nt, Human
aggaaaggcuccagg

SEQ ID NO: 1619550 - RNA, 14 nt, Human
aggaaaggcuccag

SEQ ID NO: 1619551 - RNA, 13 nt, Human
aggaaaggcucca

SEQ ID NO: 1619552 - RNA, 16 nt, Human
ugcugacuguuuucuc

SEQ ID NO: 1619553 - RNA, 22 nt, Human
ugcugacuguacuccucccagg

SEQ ID NO: 1619554 - RNA, 21 nt, Human
ugcugacuguacuccucccag

SEQ ID NO: 1619555 - RNA, 13 nt, Human
aggaaauauuuau

SEQ ID NO: 1619556 - RNA, 19 nt, Human
aggaaaucaccgaaaacgu

SEQ ID NO: 1619557 - RNA, 15 nt, Human
aggaaaucaccgaaa

SEQ ID NO: 1619558 - RNA, 17 nt, Human
aggaagcacaugccucu

SEQ ID NO: 1619559 - RNA, 16 nt, Human
aggaagcacaugccuc

SEQ ID NO: 1619560 - RNA, 11 nt, Human
aggaagcacau

SEQ ID NO: 1619561 - RNA, 14 nt, Human
aggaaauccagggu

SEQ ID NO: 1619562 - RNA, 22 nt, Human
aggaaggaaacccagcucuggu

SEQ ID NO: 1619563 - RNA, 20 nt, Human
aggaaggaaacccagcucug

SEQ ID NO: 1619564 - RNA, 23 nt, Human
aggaaggaaacccagcucugguc

SEQ ID NO: 1619565 - RNA, 12 nt, Human
aggaagcucagg

SEQ ID NO: 1619566 - RNA, 21 nt, Human
aggaagccugauuaaagaaug

SEQ ID NO: 1619567 - RNA, 18 nt, Human
aggaagccugauuaaaga

SEQ ID NO: 1619568 - RNA, 17 nt, Human
aggaagccugauuaaag

SEQ ID NO: 1619569 - RNA, 23 nt, Human
aggaagccagcaggcucucaggc

SEQ ID NO: 1619570 - RNA, 22 nt, Human
aggaagccagcaggcucucagg

SEQ ID NO: 1619571 - RNA, 21 nt, Human
aggaagccagcaggcucucag

SEQ ID NO: 1619572 - RNA, 22 nt, Human
aggaagcacaugccucucucag

SEQ ID NO: 1619573 - RNA, 15 nt, Human
aggaaauccagggug

SEQ ID NO: 1619574 - RNA, 20 nt, Human
aggaagccgcuggggccagu

SEQ ID NO: 1619575 - RNA, 19 nt, Human
aggaagccgcuggggccag

SEQ ID NO: 1619576 - RNA, 18 nt, Human
aggaagccgcuggggcca

SEQ ID NO: 1619577 - RNA, 23 nt, Human
ugcuguauuuuaaaagaaugauu

SEQ ID NO: 1619578 - RNA, 17 nt, Human
ugcugucccuuacguga

SEQ ID NO: 1619579 - RNA, 15 nt, Human
ugcugucccuuuucc

SEQ ID NO: 1619580 - RNA, 19 nt, Human
ugcugucccuuacgugagu

SEQ ID NO: 1619581 - RNA, 17 nt, Human
ugcugucccuuuuccuu

SEQ ID NO: 1619582 - RNA, 13 nt, Human
ugcugugcaaaug

SEQ ID NO: 1619583 - RNA, 23 nt, Human
ugcuucaaggauccugagccaga

SEQ ID NO: 1619584 - RNA, 21 nt, Human
ugcuucaaggauccugagcca

SEQ ID NO: 1619585 - RNA, 12 nt, Human
ugcuucaaggau

SEQ ID NO: 1619586 - RNA, 19 nt, Human
aggacacuaaccacgcugg

SEQ ID NO: 1619587 - RNA, 17 nt, Human
aggacagccccuccucc

SEQ ID NO: 1619588 - RNA, 18 nt, Human
aggacacuaaccacgcug

SEQ ID NO: 1619589 - RNA, 16 nt, Human
ugcuuccagugaggcu

SEQ ID NO: 1619590 - RNA, 13 nt, Human
ugcuguauuuuaa

SEQ ID NO: 1619591 - RNA, 22 nt, Human
ugcuguauuuuaaaagaaugau

SEQ ID NO: 1619592 - RNA, 21 nt, Human
ugcuguauuuuaaaagaauga

SEQ ID NO: 1619593 - RNA, 17 nt, Human
ugcugggauuacaggug

SEQ ID NO: 1619594 - RNA, 21 nt, Human
ugcugggauuacaagcgugag

SEQ ID NO: 1619595 - RNA, 21 nt, Human
ugcuggcuguuggcugggggc

SEQ ID NO: 1619596 - RNA, 19 nt, Human
ugcuggcuguuggcugggg

SEQ ID NO: 1619597 - RNA, 19 nt, Human
ugcugggauuacaagcgug

SEQ ID NO: 1619598 - RNA, 13 nt, Human
ugcuggcugccuu

SEQ ID NO: 1619599 - RNA, 21 nt, Human
ugcugcccugcccaccuggcc

SEQ ID NO: 1619600 - RNA, 19 nt, Human
ugcugcccugcccaccugg

SEQ ID NO: 1619601 - RNA, 11 nt, Human
ugcugcccugu

SEQ ID NO: 1619602 - RNA, 12 nt, Human
ugcugcccugug

SEQ ID NO: 1619603 - RNA, 18 nt, Human
ugcugcccugcccaccug

SEQ ID NO: 1619604 - RNA, 17 nt, Human
ugcugcccugcccaccu

SEQ ID NO: 1619605 - RNA, 16 nt, Human
ugcugcccugcccacc

SEQ ID NO: 1619606 - RNA, 13 nt, Human
ugcugcccugccc

SEQ ID NO: 1619607 - RNA, 23 nt, Human
aggaauggagccugcacggugaa

SEQ ID NO: 1619608 - RNA, 17 nt, Human
agcuugaaacugagaug

SEQ ID NO: 1619609 - RNA, 19 nt, Human
agcuugaccgugaggccag

SEQ ID NO: 1619610 - RNA, 18 nt, Human
agcuuguaaauagcucag

SEQ ID NO: 1619611 - RNA, 22 nt, Human
agcuugaggguugggcuggugu

SEQ ID NO: 1619612 - RNA, 18 nt, Human
agcuugaggguugggcug

SEQ ID NO: 1619613 - RNA, 14 nt, Human
agcuugaggguugg

SEQ ID NO: 1619614 - RNA, 19 nt, Human
ugcuacaaaaacacagcaa

SEQ ID NO: 1619615 - RNA, 18 nt, Human
ugcuacaaaaacacagca

SEQ ID NO: 1619616 - RNA, 17 nt, Human
ugcuacaaaaacacagc

SEQ ID NO: 1619617 - RNA, 16 nt, Human
ugcuacaaaaacacag

SEQ ID NO: 1619618 - RNA, 22 nt, Human
ugcuaaggacuuguuagaucua

SEQ ID NO: 1619619 - RNA, 18 nt, Human
ugcuaaggacuuguuaga

SEQ ID NO: 1619620 - RNA, 13 nt, Human
ugcuaaggacuug

SEQ ID NO: 1619621 - RNA, 20 nt, Human
ugcuacaaaaacacagcaag

SEQ ID NO: 1619622 - RNA, 11 nt, Human
ugcuacacacu

SEQ ID NO: 1619623 - RNA, 19 nt, Human
ugcggccuuuggcuucacg

SEQ ID NO: 1619624 - RNA, 17 nt, Human
ugcggccuuuggcuuca

SEQ ID NO: 1619625 - RNA, 20 nt, Human
ugcgggcuuccuccuggugu

SEQ ID NO: 1619626 - RNA, 17 nt, Human
ugcggugcuaucucccc

SEQ ID NO: 1619627 - RNA, 21 nt, Human
ugcggugcuaucucccccagc

SEQ ID NO: 1619628 - RNA, 12 nt, Human
ugcuaaggacuu

SEQ ID NO: 1619629 - RNA, 18 nt, Human
ugcgguccacccaggagc

SEQ ID NO: 1619630 - RNA, 16 nt, Human
ugcgggucacaggagg

SEQ ID NO: 1619631 - RNA, 14 nt, Human
ugcgggucacagga

SEQ ID NO: 1619632 - RNA, 17 nt, Human
ugcgggucacaggaggg

SEQ ID NO: 1619633 - RNA, 23 nt, Human
ugcggacagccacggccaggcca

SEQ ID NO: 1619634 - RNA, 22 nt, Human
ugcggacagccacggccaggcc

SEQ ID NO: 1619635 - RNA, 16 nt, Human
agcugccuccccuccu

SEQ ID NO: 1619636 - RNA, 17 nt, Human
agcugccuccccuccuc

SEQ ID NO: 1619637 - RNA, 20 nt, Human
agcugccuguucagcuccag

SEQ ID NO: 1619638 - RNA, 15 nt, Human
agcugccuccccucc

SEQ ID NO: 1619639 - RNA, 22 nt, Human
agcugcccucuccugggcagcu

SEQ ID NO: 1619640 - RNA, 15 nt, Human
ugccuggauggggcu

SEQ ID NO: 1619641 - RNA, 14 nt, Human
ugccuggauggggc

SEQ ID NO: 1619642 - RNA, 22 nt, Human
agcugccuguucagcuccagcu

SEQ ID NO: 1619643 - RNA, 21 nt, Human
agcugccuguucagcuccagc

SEQ ID NO: 1619644 - RNA, 21 nt, Human
agcugcuugggcuucauccuc

SEQ ID NO: 1619645 - RNA, 22 nt, Human
agcugcuuuugucuaugggacu

SEQ ID NO: 1619646 - RNA, 21 nt, Human
agcugcuuuugucuaugggac

SEQ ID NO: 1619647 - RNA, 22 nt, Human
agcuggaucuccauucucucag

SEQ ID NO: 1619648 - RNA, 15 nt, Human
ugccucugccucuga

SEQ ID NO: 1619649 - RNA, 14 nt, Human
ugccucugccucug

SEQ ID NO: 1619650 - RNA, 13 nt, Human
ugccucugccucu

SEQ ID NO: 1619651 - RNA, 14 nt, Human
ugcccaggcagguc

SEQ ID NO: 1619652 - RNA, 13 nt, Human
ugcccaggcaggu

SEQ ID NO: 1619653 - RNA, 12 nt, Human
ugcccaggcagg

SEQ ID NO: 1619654 - RNA, 16 nt, Human
ugccugcccaggcccc

SEQ ID NO: 1619655 - RNA, 15 nt, Human
ugccugcccaggccc

SEQ ID NO: 1619656 - RNA, 14 nt, Human
ugccugcccaggcc

SEQ ID NO: 1619657 - RNA, 15 nt, Human
ugccugcccuauucu

SEQ ID NO: 1619658 - RNA, 19 nt, Human
agcuguucacagccagacu

SEQ ID NO: 1619659 - RNA, 16 nt, Human
agcuguucacagccag

SEQ ID NO: 1619660 - RNA, 14 nt, Human
agcuguuacugucu

SEQ ID NO: 1619661 - RNA, 20 nt, Human
ugccuguucagcuccagcuc

SEQ ID NO: 1619662 - RNA, 18 nt, Human
ugccuguucagcuccagc

SEQ ID NO: 1619663 - RNA, 14 nt, Human
agcuguucagcugg

SEQ ID NO: 1619664 - RNA, 13 nt, Human
agcuguucagcug

SEQ ID NO: 1619665 - RNA, 16 nt, Human
ugccuuauggaacacu

SEQ ID NO: 1619666 - RNA, 15 nt, Human
ugccuuauggaacac

SEQ ID NO: 1619667 - RNA, 21 nt, Human
ugccuguucagcuccagcuca

SEQ ID NO: 1619668 - RNA, 20 nt, Human
ugccuguugggccaggagcc

SEQ ID NO: 1619669 - RNA, 15 nt, Human
agcugggacuacagg

SEQ ID NO: 1619670 - RNA, 20 nt, Human
agcugugcucuggacaggca

SEQ ID NO: 1619671 - RNA, 23 nt, Human
agcugugcucuggacaggcaugu

SEQ ID NO: 1619672 - RNA, 21 nt, Human
agcugugcucuggacaggcau

SEQ ID NO: 1619673 - RNA, 16 nt, Human
agcuguguggcagucu

SEQ ID NO: 1619674 - RNA, 14 nt, Human
agcuguguggcagu

SEQ ID NO: 1619675 - RNA, 22 nt, Human
uggcauaacauaaaucugugaa

SEQ ID NO: 1619676 - RNA, 21 nt, Human
uggcauaacauaaaucuguga

SEQ ID NO: 1619677 - RNA, 17 nt, Human
aggccccgcccaggcuu

SEQ ID NO: 1619678 - RNA, 12 nt, Human
aggccccugcca

SEQ ID NO: 1619679 - RNA, 23 nt, Human
uggccagugugacaaggauugcu

SEQ ID NO: 1619680 - RNA, 19 nt, Human
uggccagguggccacucca

SEQ ID NO: 1619681 - RNA, 17 nt, Human
uggccagguggccacuc

SEQ ID NO: 1619682 - RNA, 16 nt, Human
uggccagguggccacu

SEQ ID NO: 1619683 - RNA, 23 nt, Human
uggccaaagccaaagcuaggccu

SEQ ID NO: 1619684 - RNA, 21 nt, Human
uggccaaagccaaagcuaggc

SEQ ID NO: 1619685 - RNA, 15 nt, Human
uggccagguggccac

SEQ ID NO: 1619686 - RNA, 11 nt, Human
uggccaggugg

SEQ ID NO: 1619687 - RNA, 14 nt, Human
uggccuucggccuc

SEQ ID NO: 1619688 - RNA, 18 nt, Human
aggccugggggcugggca

SEQ ID NO: 1619689 - RNA, 12 nt, Human
aggccuggggac

SEQ ID NO: 1619690 - RNA, 20 nt, Human
aggccugggggcugggcaga

SEQ ID NO: 1619691 - RNA, 21 nt, Human
uggccuggccccucagggucc

SEQ ID NO: 1619692 - RNA, 18 nt, Human
uggccuggccccucaggg

SEQ ID NO: 1619693 - RNA, 18 nt, Human
uggccugagcugggauga

SEQ ID NO: 1619694 - RNA, 13 nt, Human
uggcccacgcacu

SEQ ID NO: 1619695 - RNA, 14 nt, Human
uggcccugcccugg

SEQ ID NO: 1619696 - RNA, 13 nt, Human
uggccucuucaga

SEQ ID NO: 1619697 - RNA, 20 nt, Human
uggcacaguuuucugagaaa

SEQ ID NO: 1619698 - RNA, 19 nt, Human
uggcacaguuuucugagaa

SEQ ID NO: 1619699 - RNA, 18 nt, Human
uggcacaguuuucugaga

SEQ ID NO: 1619700 - RNA, 18 nt, Human
uggcacagggcaguggga

SEQ ID NO: 1619701 - RNA, 14 nt, Human
aggccagagggagu

SEQ ID NO: 1619702 - RNA, 19 nt, Human
aggccacaagacccuugug

SEQ ID NO: 1619703 - RNA, 18 nt, Human
aggccacaagacccuugu

SEQ ID NO: 1619704 - RNA, 17 nt, Human
aggccacaagacccuug

SEQ ID NO: 1619705 - RNA, 19 nt, Human
uggcagcucaccucucccu

SEQ ID NO: 1619706 - RNA, 15 nt, Human
uggcagcucaccucu

SEQ ID NO: 1619707 - RNA, 17 nt, Human
uggcagccuuggcaaac

SEQ ID NO: 1619708 - RNA, 21 nt, Human
aggcccagagggccugcaagg

SEQ ID NO: 1619709 - RNA, 20 nt, Human
aggccagagggagugacaga

SEQ ID NO: 1619710 - RNA, 16 nt, Human
aggccccgcccaggcu

SEQ ID NO: 1619711 - RNA, 20 nt, Human
uggagguacgaaaagagggg

SEQ ID NO: 1619712 - RNA, 18 nt, Human
aggccaaggugggaggau

SEQ ID NO: 1619713 - RNA, 16 nt, Human
aggccaaggugggagg

SEQ ID NO: 1619714 - RNA, 20 nt, Human
aggccaaaggaagcacaugc

SEQ ID NO: 1619715 - RNA, 19 nt, Human
aggccaaaggaagcacaug

SEQ ID NO: 1619716 - RNA, 18 nt, Human
aggccaaaggaagcacau

SEQ ID NO: 1619717 - RNA, 16 nt, Human
aggccaaaggaagcac

SEQ ID NO: 1619718 - RNA, 17 nt, Human
aggcagccccauucugc

SEQ ID NO: 1619719 - RNA, 16 nt, Human
aggcagccccauucug

SEQ ID NO: 1619720 - RNA, 14 nt, Human
uggaguauauguca

SEQ ID NO: 1619721 - RNA, 15 nt, Human
uggauggaaggggcu

SEQ ID NO: 1619722 - RNA, 13 nt, Human
uggauuguccccg

SEQ ID NO: 1619723 - RNA, 21 nt, Human
uggauuguccccgacccuugc

SEQ ID NO: 1619724 - RNA, 17 nt, Human
uggauuauauuaugaag

SEQ ID NO: 1619725 - RNA, 13 nt, Human
uggagaagaacug

SEQ ID NO: 1619726 - RNA, 14 nt, Human
uggagaacuagaga

SEQ ID NO: 1619727 - RNA, 15 nt, Human
uggacugugugcuca

SEQ ID NO: 1619728 - RNA, 14 nt, Human
uggagaagaacuga

SEQ ID NO: 1619729 - RNA, 22 nt, Human
uggagaagcggcuggcagccca

SEQ ID NO: 1619730 - RNA, 13 nt, Human
uggagaagcggcu

SEQ ID NO: 1619731 - RNA, 14 nt, Human
uggagcucguggaa

SEQ ID NO: 1619732 - RNA, 13 nt, Human
aggcaaucauggu

SEQ ID NO: 1619733 - RNA, 22 nt, Human
aggcacccaccaucaugucugg

SEQ ID NO: 1619734 - RNA, 21 nt, Human
aggcacccaccaucaugucug

SEQ ID NO: 1619735 - RNA, 20 nt, Human
aggcacccaccaucaugucu

SEQ ID NO: 1619736 - RNA, 14 nt, Human
aggcaaugcuggcu

SEQ ID NO: 1619737 - RNA, 20 nt, Human
aggcaccuaccaccacgccc

SEQ ID NO: 1619738 - RNA, 18 nt, Human
aggaucucuugagccugg

SEQ ID NO: 1619739 - RNA, 17 nt, Human
aggaucucuugagccug

SEQ ID NO: 1619740 - RNA, 19 nt, Human
aggaucucuugagccuggg

SEQ ID NO: 1619741 - RNA, 14 nt, Human
uggacacagcucuu

SEQ ID NO: 1619742 - RNA, 13 nt, Human
uggacacagcucu

SEQ ID NO: 1619743 - RNA, 22 nt, Human
uggacacagcucuucuccaggc

SEQ ID NO: 1619744 - RNA, 23 nt, Human
uggacccuguggaugauaaaaca

SEQ ID NO: 1619745 - RNA, 21 nt, Human
uggacccugaggcccagaggg

SEQ ID NO: 1619746 - RNA, 20 nt, Human
uggacccugaggcccagagg

SEQ ID NO: 1619747 - RNA, 19 nt, Human
uggacccugaggcccagag

SEQ ID NO: 1619748 - RNA, 18 nt, Human
uggacccugaggcccaga

SEQ ID NO: 1619749 - RNA, 16 nt, Human
uggacccugaggccca

SEQ ID NO: 1619750 - RNA, 23 nt, Human
uggacacagcucuucuccaggcu

SEQ ID NO: 1619751 - RNA, 20 nt, Human
uggaccuugaacuggguacu

SEQ ID NO: 1619752 - RNA, 16 nt, Human
uggacuguggugacuu

SEQ ID NO: 1619753 - RNA, 15 nt, Human
uggacuguggugacu

SEQ ID NO: 1619754 - RNA, 22 nt, Human
uggacuguggugacuuuggaua

SEQ ID NO: 1619755 - RNA, 21 nt, Human
uggacuguggugacuuuggau

SEQ ID NO: 1619756 - RNA, 19 nt, Human
uggacuguggugacuuugg

SEQ ID NO: 1619757 - RNA, 17 nt, Human
uggacuguggugacuuu

SEQ ID NO: 1619758 - RNA, 23 nt, Human
aggacagcccuucuuuccacaga

SEQ ID NO: 1619759 - RNA, 21 nt, Human
ugcuugaggcaacucaucuua

SEQ ID NO: 1619760 - RNA, 16 nt, Human
ugcuuggaggaaggaa

SEQ ID NO: 1619761 - RNA, 15 nt, Human
ugcuuggaggaagga

SEQ ID NO: 1619762 - RNA, 14 nt, Human
ugcuuggaggaagg

SEQ ID NO: 1619763 - RNA, 12 nt, Human
ugcuuguacaua

SEQ ID NO: 1619764 - RNA, 13 nt, Human
ugcuuguacauaa

SEQ ID NO: 1619765 - RNA, 17 nt, Human
ugcuuuuggucugugug

SEQ ID NO: 1619766 - RNA, 14 nt, Human
ugcuuuuggucugu

SEQ ID NO: 1619767 - RNA, 17 nt, Human
ugcuuugugauuuuugu

SEQ ID NO: 1619768 - RNA, 14 nt, Human
ugcuuguacauaau

SEQ ID NO: 1619769 - RNA, 16 nt, Human
ugcuuguacauaaugc

SEQ ID NO: 1619770 - RNA, 22 nt, Human
ugcuuguacauaaugcgugcau

SEQ ID NO: 1619771 - RNA, 12 nt, Human
ugcuuugugauu

SEQ ID NO: 1619772 - RNA, 14 nt, Human
ugcuuugugauuuu

SEQ ID NO: 1619773 - RNA, 16 nt, Human
ugcuuugugauuuuug

SEQ ID NO: 1619774 - RNA, 14 nt, Human
aggauccugagcca

SEQ ID NO: 1619775 - RNA, 13 nt, Human
aggauccugagcc

SEQ ID NO: 1619776 - RNA, 16 nt, Human
uggaagcacagcuuca

SEQ ID NO: 1619777 - RNA, 18 nt, Human
uggaaaugggcagagcag

SEQ ID NO: 1619778 - RNA, 17 nt, Human
uggaaaugggcagagca

SEQ ID NO: 1619779 - RNA, 15 nt, Human
uggaaaucuuuaaaa

SEQ ID NO: 1619780 - RNA, 14 nt, Human
uggaaaucuuuaaa

SEQ ID NO: 1619781 - RNA, 18 nt, Human
uggaaguacuauaauuua

SEQ ID NO: 1619782 - RNA, 17 nt, Human
uggaagguauuuaauag

SEQ ID NO: 1619783 - RNA, 13 nt, Human
uggaagguauuua

SEQ ID NO: 1619784 - RNA, 23 nt, Human
uggaaggggacacgugacagccg

SEQ ID NO: 1619785 - RNA, 12 nt, Human
aggucagagccu

SEQ ID NO: 1619786 - RNA, 17 nt, Human
aggucauuuuuuuuaag

SEQ ID NO: 1619787 - RNA, 20 nt, Human
aggucauuuuuuuuaagaaa

SEQ ID NO: 1619788 - RNA, 18 nt, Human
aggucaccuuuauucugg

SEQ ID NO: 1619789 - RNA, 19 nt, Human
aggucaccuuuauucuggc

SEQ ID NO: 1619790 - RNA, 23 nt, Human
agguacuucaaauccuugaagau

SEQ ID NO: 1619791 - RNA, 19 nt, Human
agguagaaauaucugaaaa

SEQ ID NO: 1619792 - RNA, 17 nt, Human
agguagaaauaucugaa

SEQ ID NO: 1619793 - RNA, 23 nt, Human
aggguuggccccugcccggcugc

SEQ ID NO: 1619794 - RNA, 18 nt, Human
aggguuggccccugcccg

SEQ ID NO: 1619795 - RNA, 13 nt, Human
aggguugggcugg

SEQ ID NO: 1619796 - RNA, 23 nt, Human
agguagaaauaucugaaaaugua

SEQ ID NO: 1619797 - RNA, 21 nt, Human
agguaugcaaucaaaucugcu

SEQ ID NO: 1619798 - RNA, 23 nt, Human
agguauaauucacauuguauuca

SEQ ID NO: 1619799 - RNA, 20 nt, Human
agguauaaguggugugugua

SEQ ID NO: 1619800 - RNA, 19 nt, Human
agguauaaguggugugugu

SEQ ID NO: 1619801 - RNA, 17 nt, Human
aggguuaugauuaagua

SEQ ID NO: 1619802 - RNA, 13 nt, Human
aggguuauaauaa

SEQ ID NO: 1619803 - RNA, 22 nt, Human
aggguguccggucccuguccca

SEQ ID NO: 1619804 - RNA, 18 nt, Human
uggucugacccacugcuu

SEQ ID NO: 1619805 - RNA, 17 nt, Human
uggucugacccacugcu

SEQ ID NO: 1619806 - RNA, 16 nt, Human
uggucugacccacugc

SEQ ID NO: 1619807 - RNA, 15 nt, Human
uggucucgaacuccu

SEQ ID NO: 1619808 - RNA, 20 nt, Human
uggucaccaaaucagcugcu

SEQ ID NO: 1619809 - RNA, 22 nt, Human
uggucagauuugaacucuucaa

SEQ ID NO: 1619810 - RNA, 18 nt, Human
uggucaccaaaucagcug

SEQ ID NO: 1619811 - RNA, 15 nt, Human
uggucccaccccaca

SEQ ID NO: 1619812 - RNA, 14 nt, Human
uggucccaccccac

SEQ ID NO: 1619813 - RNA, 13 nt, Human
uggucccacucag

SEQ ID NO: 1619814 - RNA, 16 nt, Human
uggucccaccccacac

SEQ ID NO: 1619815 - RNA, 16 nt, Human
uggucucaaacucuug

SEQ ID NO: 1619816 - RNA, 19 nt, Human
uggucuaucuuugagcgcc

SEQ ID NO: 1619817 - RNA, 23 nt, Human
uggucucaaacucuugaccucag

SEQ ID NO: 1619818 - RNA, 17 nt, Human
uggucucaaacucuuga

SEQ ID NO: 1619819 - RNA, 20 nt, Human
ugguaaggggaauugaggac

SEQ ID NO: 1619820 - RNA, 16 nt, Human
ugguacuaacuuuccu

SEQ ID NO: 1619821 - RNA, 20 nt, Human
ugguagcuuuucccuucuuu

SEQ ID NO: 1619822 - RNA, 21 nt, Human
ugguagcuuuucccuucuuuu

SEQ ID NO: 1619823 - RNA, 23 nt, Human
uggucacaggacucugccuccuc

SEQ ID NO: 1619824 - RNA, 22 nt, Human
uggucacaggacucugccuccu

SEQ ID NO: 1619825 - RNA, 19 nt, Human
ugggugcuuggaggaagga

SEQ ID NO: 1619826 - RNA, 15 nt, Human
ugggugcuuggagga

SEQ ID NO: 1619827 - RNA, 22 nt, Human
ugggugcuuggaggaaggaaac

SEQ ID NO: 1619828 - RNA, 15 nt, Human
agggugggagugggc

SEQ ID NO: 1619829 - RNA, 21 nt, Human
ugggucgcccuggacugugug

SEQ ID NO: 1619830 - RNA, 22 nt, Human
agggucucacucugucgcccag

SEQ ID NO: 1619831 - RNA, 23 nt, Human
agggucucacuauguugcccagg

SEQ ID NO: 1619832 - RNA, 22 nt, Human
agggucucacuauguugcccag

SEQ ID NO: 1619833 - RNA, 21 nt, Human
agggucucacuauguugccca

SEQ ID NO: 1619834 - RNA, 24 nt, Human
agggguucccuuuuuuggcugcug

SEQ ID NO: 1619835 - RNA, 18 nt, Human
aggggguggccucccaac

SEQ ID NO: 1619836 - RNA, 17 nt, Human
aggggguggccucccaa

SEQ ID NO: 1619837 - RNA, 15 nt, Human
aggggguggccuccc

SEQ ID NO: 1619838 - RNA, 22 nt, Human
aggggugggacacccugugaug

SEQ ID NO: 1619839 - RNA, 20 nt, Human
aggggugggacacccuguga

SEQ ID NO: 1619840 - RNA, 23 nt, Human
aggggagcaaaaucgaugcagug

SEQ ID NO: 1619841 - RNA, 23 nt, Human
aggggccuggcagccgugccuuc

SEQ ID NO: 1619842 - RNA, 18 nt, Human
aggggccuggcagccgug

SEQ ID NO: 1619843 - RNA, 19 nt, Human
uggggucacucuggcagcu

SEQ ID NO: 1619844 - RNA, 20 nt, Human
uggggucacucuggcagcuc

SEQ ID NO: 1619845 - RNA, 17 nt, Human
agggcagggacaggaua

SEQ ID NO: 1619846 - RNA, 23 nt, Human
agggcccagagaggguggugacc

SEQ ID NO: 1619847 - RNA, 15 nt, Human
agggagggcuucugc

SEQ ID NO: 1619848 - RNA, 19 nt, Human
agggagugacagaggcagc

SEQ ID NO: 1619849 - RNA, 20 nt, Human
agggagugacagaggcagcc

SEQ ID NO: 1619850 - RNA, 18 nt, Human
agggagugacagaggcag

SEQ ID NO: 1619851 - RNA, 17 nt, Human
agggagugacagaggca

SEQ ID NO: 1619852 - RNA, 17 nt, Human
agggaggugaccccagg

SEQ ID NO: 1619853 - RNA, 14 nt, Human
ugggaguacaaaag

SEQ ID NO: 1619854 - RNA, 16 nt, Human
ugggcaacccccagcc

SEQ ID NO: 1619855 - RNA, 16 nt, Human
ugggauuuggucaaca

SEQ ID NO: 1619856 - RNA, 23 nt, Human
ugggaggucaaggcugcagugag

SEQ ID NO: 1619857 - RNA, 20 nt, Human
ugggaggucaaggcugcagu

SEQ ID NO: 1619858 - RNA, 19 nt, Human
ugggaggucaaggcugcag

SEQ ID NO: 1619859 - RNA, 18 nt, Human
ugggaggucaaggcugca

SEQ ID NO: 1619860 - RNA, 16 nt, Human
ugggccaggagccucc

SEQ ID NO: 1619861 - RNA, 14 nt, Human
ugggccaggagccu

SEQ ID NO: 1619862 - RNA, 20 nt, Human
ugggcccaaugcacuuuguu

SEQ ID NO: 1619863 - RNA, 13 nt, Human
ugggccaggagcc

SEQ ID NO: 1619864 - RNA, 18 nt, Human
ugggccagaauuucaaac

SEQ ID NO: 1619865 - RNA, 21 nt, Human
ugggcaacccccagccugcua

SEQ ID NO: 1619866 - RNA, 20 nt, Human
ugggcaacccccagccugcu

SEQ ID NO: 1619867 - RNA, 17 nt, Human
ugggcaacccccagccu

SEQ ID NO: 1619868 - RNA, 17 nt, Human
ugggccagaauuucaaa

SEQ ID NO: 1619869 - RNA, 20 nt, Human
uggggcugcaccggcuggcc

SEQ ID NO: 1619870 - RNA, 22 nt, Human
uggggcugcaccggcuggccug

SEQ ID NO: 1619871 - RNA, 14 nt, Human
ugggguacccacug

SEQ ID NO: 1619872 - RNA, 15 nt, Human
ugggguaugggagag

SEQ ID NO: 1619873 - RNA, 18 nt, Human
uggggucacucuggcagc

SEQ ID NO: 1619874 - RNA, 17 nt, Human
uggggucacucuggcag

SEQ ID NO: 1619875 - RNA, 16 nt, Human
ugggguacccacugcu

SEQ ID NO: 1619876 - RNA, 15 nt, Human
ugggguacccacugc

SEQ ID NO: 1619877 - RNA, 18 nt, Human
uggggcggugagagggga

SEQ ID NO: 1619878 - RNA, 23 nt, Human
uggggcuaggaaauccagggugg

SEQ ID NO: 1619879 - RNA, 16 nt, Human
uggggcccugccuccu

SEQ ID NO: 1619880 - RNA, 15 nt, Human
uggggcccugccucc

SEQ ID NO: 1619881 - RNA, 23 nt, Human
uggggaccucaggccugggggcu

SEQ ID NO: 1619882 - RNA, 12 nt, Human
uggggagaaagu

SEQ ID NO: 1619883 - RNA, 14 nt, Human
uggggcccugccuc

SEQ ID NO: 1619884 - RNA, 19 nt, Human
ugggcucccuucccaccuc

SEQ ID NO: 1619885 - RNA, 18 nt, Human
ugggcucccuucccaccu

SEQ ID NO: 1619886 - RNA, 23 nt, Human
agggcuucugccauuucugagau

SEQ ID NO: 1619887 - RNA, 21 nt, Human
ugggcucccuucccaccucuc

SEQ ID NO: 1619888 - RNA, 20 nt, Human
ugggcucccuucccaccucu

SEQ ID NO: 1619889 - RNA, 21 nt, Human
ugggcugcccuggugcugcca

SEQ ID NO: 1619890 - RNA, 20 nt, Human
ugggcugcccuggugcugcc

SEQ ID NO: 1619891 - RNA, 19 nt, Human
ugggcugcccuggugcugc

SEQ ID NO: 1619892 - RNA, 17 nt, Human
ugggcugcccuggugcu

SEQ ID NO: 1619893 - RNA, 15 nt, Human
uggggaccagagcug

SEQ ID NO: 1619894 - RNA, 14 nt, Human
uggggaccagagcu

SEQ ID NO: 1619895 - RNA, 17 nt, Human
uggggacagagcagaac

SEQ ID NO: 1619896 - RNA, 18 nt, Human
uggggaccagagcugcca

SEQ ID NO: 1619897 - RNA, 17 nt, Human
uggggaccagagcugcc

SEQ ID NO: 1619898 - RNA, 13 nt, Human
uggggaccucagg

SEQ ID NO: 1619899 - RNA, 19 nt, Human
ugggcuggguucuacccag

SEQ ID NO: 1619900 - RNA, 18 nt, Human
ugggcuggguucuaccca

SEQ ID NO: 1619901 - RNA, 23 nt, Human
ugggcuggguucuacccaggugc

SEQ ID NO: 1619902 - RNA, 15 nt, Human
uggggaaugaagaua

SEQ ID NO: 1619903 - RNA, 14 nt, Human
uggggaaugaagau

SEQ ID NO: 1619904 - RNA, 12 nt, Human
aguagagacagg

SEQ ID NO: 1619905 - RNA, 17 nt, Human
aguagaagucuuagaug

SEQ ID NO: 1619906 - RNA, 19 nt, Human
aguagauaggccaugggca

SEQ ID NO: 1619907 - RNA, 20 nt, Human
uguaggaagguuaauguuca

SEQ ID NO: 1619908 - RNA, 16 nt, Human
aguacacuguuucaaa

SEQ ID NO: 1619909 - RNA, 20 nt, Human
aguacacuguuucaaacuuu

SEQ ID NO: 1619910 - RNA, 14 nt, Human
aguacacuguuuca

SEQ ID NO: 1619911 - RNA, 19 nt, Human
aguacuuuuggcauuuuac

SEQ ID NO: 1619912 - RNA, 21 nt, Human
aguaauccaagcaaaugugaa

SEQ ID NO: 1619913 - RNA, 15 nt, Human
aguaauccaagcaaa

SEQ ID NO: 1619914 - RNA, 18 nt, Human
uguagaggagaaacugga

SEQ ID NO: 1619915 - RNA, 17 nt, Human
uguacuuuuuggcauaa

SEQ ID NO: 1619916 - RNA, 14 nt, Human
uguagagugggagc

SEQ ID NO: 1619917 - RNA, 13 nt, Human
uguagagugggag

SEQ ID NO: 1619918 - RNA, 16 nt, Human
uguacuuuuuggcaua

SEQ ID NO: 1619919 - RNA, 15 nt, Human
uguacuuuuuggcau

SEQ ID NO: 1619920 - RNA, 12 nt, Human
uguacuuuuugg

SEQ ID NO: 1619921 - RNA, 14 nt, Human
uguaauuugugaua

SEQ ID NO: 1619922 - RNA, 15 nt, Human
aguaaaaccacagca

SEQ ID NO: 1619923 - RNA, 12 nt, Human
aguaaaaauaaa

SEQ ID NO: 1619924 - RNA, 15 nt, Human
aguaaaaauaaaauu

SEQ ID NO: 1619925 - RNA, 11 nt, Human
agguuuuccug

SEQ ID NO: 1619926 - RNA, 18 nt, Human
aguaauaugcacacauuu

SEQ ID NO: 1619927 - RNA, 19 nt, Human
aguaauaugcacacauuuu

SEQ ID NO: 1619928 - RNA, 20 nt, Human
aguaauaugcacacauuuuu

SEQ ID NO: 1619929 - RNA, 23 nt, Human
aguaaggaauuuuauuuuuuucu

SEQ ID NO: 1619930 - RNA, 14 nt, Human
agguugcagugagc

SEQ ID NO: 1619931 - RNA, 17 nt, Human
aggugguuauggagagg

SEQ ID NO: 1619932 - RNA, 17 nt, Human
uguaagaaaauaucacu

SEQ ID NO: 1619933 - RNA, 14 nt, Human
agguuggugggggc

SEQ ID NO: 1619934 - RNA, 17 nt, Human
uguaacuuucugaaaua

SEQ ID NO: 1619935 - RNA, 15 nt, Human
uguaaguaaacgguc

SEQ ID NO: 1619936 - RNA, 13 nt, Human
uguaauuauaucu

SEQ ID NO: 1619937 - RNA, 15 nt, Human
uguaauuauaucuga

SEQ ID NO: 1619938 - RNA, 14 nt, Human
uguaauuauaucug

SEQ ID NO: 1619939 - RNA, 21 nt, Human
aggugcacaagcuccaagcuc

SEQ ID NO: 1619940 - RNA, 14 nt, Human
agguggccacucca

SEQ ID NO: 1619941 - RNA, 17 nt, Human
agguggccacuccagac

SEQ ID NO: 1619942 - RNA, 20 nt, Human
aggugggauccuccaggugc

SEQ ID NO: 1619943 - RNA, 20 nt, Human
aggugcacaagcuccaagcu

SEQ ID NO: 1619944 - RNA, 18 nt, Human
aggugcacaagcuccaag

SEQ ID NO: 1619945 - RNA, 17 nt, Human
aggugcacaagcuccaa

SEQ ID NO: 1619946 - RNA, 16 nt, Human
aggugcacaagcucca

SEQ ID NO: 1619947 - RNA, 15 nt, Human
aggugcacaagcucc

SEQ ID NO: 1619948 - RNA, 22 nt, Human
uguaaaucccauuauucaaagu

SEQ ID NO: 1619949 - RNA, 20 nt, Human
uguaaaucccauuauucaaa

SEQ ID NO: 1619950 - RNA, 19 nt, Human
uguaaaucccauuauucaa

SEQ ID NO: 1619951 - RNA, 23 nt, Human
aggucuugaacuccuggccucaa

SEQ ID NO: 1619952 - RNA, 10 nt, Human
aggucccuaa

SEQ ID NO: 1619953 - RNA, 18 nt, Human
uguaaaucccauuauuca

SEQ ID NO: 1619954 - RNA, 16 nt, Human
uguaaaucccauuauu

SEQ ID NO: 1619955 - RNA, 13 nt, Human
uguaaaucccauu

SEQ ID NO: 1619956 - RNA, 15 nt, Human
aguauuucuaugaaa

SEQ ID NO: 1619957 - RNA, 13 nt, Human
aguauuucuauga

SEQ ID NO: 1619958 - RNA, 22 nt, Human
aguauuucuaugaaauauuaug

SEQ ID NO: 1619959 - RNA, 14 nt, Human
agucaccaagccca

SEQ ID NO: 1619960 - RNA, 13 nt, Human
agucaccaagccc

SEQ ID NO: 1619961 - RNA, 20 nt, Human
agucacauuccugaacagga

SEQ ID NO: 1619962 - RNA, 18 nt, Human
agucacauuccugaacag

SEQ ID NO: 1619963 - RNA, 19 nt, Human
agucacauuccugaacagg

SEQ ID NO: 1619964 - RNA, 23 nt, Human
ugucauuugcuggagcucugccc

SEQ ID NO: 1619965 - RNA, 16 nt, Human
ugucagguggggcagc

SEQ ID NO: 1619966 - RNA, 19 nt, Human
ugucagcugaaccugggua

SEQ ID NO: 1619967 - RNA, 16 nt, Human
ugucagcugaaccugg

SEQ ID NO: 1619968 - RNA, 13 nt, Human
agucacugcacag

SEQ ID NO: 1619969 - RNA, 19 nt, Human
agucacugagacagcccgg

SEQ ID NO: 1619970 - RNA, 21 nt, Human
ugucaauaaaauccauacauu

SEQ ID NO: 1619971 - RNA, 15 nt, Human
ugucaagccauaauu

SEQ ID NO: 1619972 - RNA, 19 nt, Human
ugucaagagggucugagga

SEQ ID NO: 1619973 - RNA, 16 nt, Human
uguauuuuuuuacuaa

SEQ ID NO: 1619974 - RNA, 14 nt, Human
uguauuuuuuuacu

SEQ ID NO: 1619975 - RNA, 20 nt, Human
ugucaaucagccuaguugau

SEQ ID NO: 1619976 - RNA, 16 nt, Human
aguaggaagacuuugg

SEQ ID NO: 1619977 - RNA, 22 nt, Human
aguaggaagacuuuggaaagac

SEQ ID NO: 1619978 - RNA, 19 nt, Human
aguaggaagacuuuggaaa

SEQ ID NO: 1619979 - RNA, 18 nt, Human
aguaggaagacuuuggaa

SEQ ID NO: 1619980 - RNA, 17 nt, Human
aguaggaagacuuugga

SEQ ID NO: 1619981 - RNA, 15 nt, Human
agucaggaaagagaa

SEQ ID NO: 1619982 - RNA, 16 nt, Human
agucaggaaagagaac

SEQ ID NO: 1619983 - RNA, 16 nt, Human
agucagacagaugugg

SEQ ID NO: 1619984 - RNA, 15 nt, Human
ugucgggcaugacac

SEQ ID NO: 1619985 - RNA, 14 nt, Human
ugucgggcaugaca

SEQ ID NO: 1619986 - RNA, 15 nt, Human
ugucgcccagucugg

SEQ ID NO: 1619987 - RNA, 14 nt, Human
ugucgcccagucug

SEQ ID NO: 1619988 - RNA, 12 nt, Human
ugucgggcauga

SEQ ID NO: 1619989 - RNA, 13 nt, Human
ugucgccucugca

SEQ ID NO: 1619990 - RNA, 16 nt, Human
uguccuacccacccuc

SEQ ID NO: 1619991 - RNA, 16 nt, Human
ugucgcccaggcugga

SEQ ID NO: 1619992 - RNA, 15 nt, Human
ugucgcccaggcugg

SEQ ID NO: 1619993 - RNA, 14 nt, Human
uguccgagcuuuga

SEQ ID NO: 1619994 - RNA, 13 nt, Human
uguccgagcuuug

SEQ ID NO: 1619995 - RNA, 23 nt, Human
aguccgaaagggacuuggaagcu

SEQ ID NO: 1619996 - RNA, 17 nt, Human
agucucacuguugccca

SEQ ID NO: 1619997 - RNA, 16 nt, Human
agucucacuguugccc

SEQ ID NO: 1619998 - RNA, 12 nt, Human
agucccugccaa

SEQ ID NO: 1619999 - RNA, 19 nt, Human
agucagggguucccuuuuu

SEQ ID NO: 1620000 - RNA, 17 nt, Human
agucagaucugccuaag

SEQ ID NO: 1620001 - RNA, 22 nt, Human
aguccaggcuuuuuuaucaugu

SEQ ID NO: 1620002 - RNA, 21 nt, Human
uguuaacauggacaugaucuu

SEQ ID NO: 1620003 - RNA, 19 nt, Human
uguuaaugauagcuacugu

SEQ ID NO: 1620004 - RNA, 19 nt, Human
aguggaaaaauagccugcc

SEQ ID NO: 1620005 - RNA, 18 nt, Human
aguggaaaaauagccugc

SEQ ID NO: 1620006 - RNA, 11 nt, Human
aguggaaaaau

SEQ ID NO: 1620007 - RNA, 16 nt, Human
ugugucucuugguccu

SEQ ID NO: 1620008 - RNA, 13 nt, Human
ugugucucuuggu

SEQ ID NO: 1620009 - RNA, 19 nt, Human
ugugucagguggggcagcu

SEQ ID NO: 1620010 - RNA, 17 nt, Human
ugugucagguggggcag

SEQ ID NO: 1620011 - RNA, 20 nt, Human
ugugucagguggggcagcuu

SEQ ID NO: 1620012 - RNA, 14 nt, Human
uguguuaugaagca

SEQ ID NO: 1620013 - RNA, 21 nt, Human
agugccuguaaucacagcuac

SEQ ID NO: 1620014 - RNA, 15 nt, Human
agugccuuacacaau

SEQ ID NO: 1620015 - RNA, 17 nt, Human
agugccuuacacaaugg

SEQ ID NO: 1620016 - RNA, 20 nt, Human
agugcugcauuuaaaagaua

SEQ ID NO: 1620017 - RNA, 19 nt, Human
agugcugggauuacaggug

SEQ ID NO: 1620018 - RNA, 20 nt, Human
agugcugggauuacaggcgu

SEQ ID NO: 1620019 - RNA, 22 nt, Human
agugcugcauuuaaaagauaca

SEQ ID NO: 1620020 - RNA, 20 nt, Human
agugcugggauuacaagcgu

SEQ ID NO: 1620021 - RNA, 16 nt, Human
agugcuuccaaggaug

SEQ ID NO: 1620022 - RNA, 12 nt, Human
ugugguuucauu

SEQ ID NO: 1620023 - RNA, 17 nt, Human
uguggugacuuuggaua

SEQ ID NO: 1620024 - RNA, 16 nt, Human
uguggugacuuuggau

SEQ ID NO: 1620025 - RNA, 21 nt, Human
agugcaaauugucacaggaca

SEQ ID NO: 1620026 - RNA, 18 nt, Human
agugcaaauugucacagg

SEQ ID NO: 1620027 - RNA, 21 nt, Human
agugaguugauagcacagacc

SEQ ID NO: 1620028 - RNA, 22 nt, Human
agugcaaauugucacaggacag

SEQ ID NO: 1620029 - RNA, 24 nt, Human
agugauucuccugccucagccucc

SEQ ID NO: 1620030 - RNA, 22 nt, Human
agugauucuccugccucagccu

SEQ ID NO: 1620031 - RNA, 16 nt, Human
agugagucgaggacag

SEQ ID NO: 1620032 - RNA, 14 nt, Human
agugcccacaggau

SEQ ID NO: 1620033 - RNA, 14 nt, Human
agugcaugcugucc

SEQ ID NO: 1620034 - RNA, 16 nt, Human
agugccaaaaacaaca

SEQ ID NO: 1620035 - RNA, 14 nt, Human
agugcacuaaugug

SEQ ID NO: 1620036 - RNA, 14 nt, Human
agugcaucucagcc

SEQ ID NO: 1620037 - RNA, 15 nt, Human
agugcaucucagccc

SEQ ID NO: 1620038 - RNA, 17 nt, Human
agugcaucucagcccac

SEQ ID NO: 1620039 - RNA, 16 nt, Human
agugcaucucagccca

SEQ ID NO: 1620040 - RNA, 15 nt, Human
ugugcucuggacagg

SEQ ID NO: 1620041 - RNA, 23 nt, Human
ugugcucugaucauccacugugc

SEQ ID NO: 1620042 - RNA, 22 nt, Human
ugugcucugaucauccacugug

SEQ ID NO: 1620043 - RNA, 13 nt, Human
ugugccucugccu

SEQ ID NO: 1620044 - RNA, 12 nt, Human
ugugccucugcc

SEQ ID NO: 1620045 - RNA, 20 nt, Human
ugugcccuaaaguguauuuu

SEQ ID NO: 1620046 - RNA, 21 nt, Human
ugugcccuaaaguguauuuuu

SEQ ID NO: 1620047 - RNA, 19 nt, Human
agucucacuguugcccagg

SEQ ID NO: 1620048 - RNA, 18 nt, Human
agucucacuguugcccag

SEQ ID NO: 1620049 - RNA, 20 nt, Human
agucucacuguugcccaggc

SEQ ID NO: 1620050 - RNA, 21 nt, Human
agucucacuguugcccaggcu

SEQ ID NO: 1620051 - RNA, 15 nt, Human
ugugcugcccugccc

SEQ ID NO: 1620052 - RNA, 14 nt, Human
ugugcugcccugcc

SEQ ID NO: 1620053 - RNA, 13 nt, Human
ugugcugcccugc

SEQ ID NO: 1620054 - RNA, 19 nt, Human
ugugcucuggacaggcaug

SEQ ID NO: 1620055 - RNA, 18 nt, Human
ugugcucuggacaggcau

SEQ ID NO: 1620056 - RNA, 16 nt, Human
ugugcucuggacaggc

SEQ ID NO: 1620057 - RNA, 16 nt, Human
uguugucugcaacucu

SEQ ID NO: 1620058 - RNA, 13 nt, Human
uguugucugcaac

SEQ ID NO: 1620059 - RNA, 17 nt, Human
uguuuauugucaaagug

SEQ ID NO: 1620060 - RNA, 14 nt, Human
uguuuauugucaaa

SEQ ID NO: 1620061 - RNA, 17 nt, Human
uguuuaguaaucauauu

SEQ ID NO: 1620062 - RNA, 14 nt, Human
uguuuaguaaucau

SEQ ID NO: 1620063 - RNA, 13 nt, Human
uguuuaguaauca

SEQ ID NO: 1620064 - RNA, 20 nt, Human
uguuuagucuugucucagau

SEQ ID NO: 1620065 - RNA, 19 nt, Human
uguuuagucuugucucaga

SEQ ID NO: 1620066 - RNA, 18 nt, Human
uguuuagucuugucucag

SEQ ID NO: 1620067 - RNA, 17 nt, Human
uguuuagucuugucuca

SEQ ID NO: 1620068 - RNA, 13 nt, Human
uguuuagucuugu

SEQ ID NO: 1620069 - RNA, 20 nt, Human
aguucggugagcuacaaaug

SEQ ID NO: 1620070 - RNA, 19 nt, Human
aguucggugagcuacaaau

SEQ ID NO: 1620071 - RNA, 12 nt, Human
aguucucuccuu

SEQ ID NO: 1620072 - RNA, 14 nt, Human
aguucagagcugcc

SEQ ID NO: 1620073 - RNA, 24 nt, Human
aguucacucuccauuuaauaauua

SEQ ID NO: 1620074 - RNA, 22 nt, Human
aguucacucuccauuuaauaau

SEQ ID NO: 1620075 - RNA, 23 nt, Human
aguuccucauuagcauuuugcua

SEQ ID NO: 1620076 - RNA, 15 nt, Human
aguucccuacuuccu

SEQ ID NO: 1620077 - RNA, 16 nt, Human
aguucaauucucauuu

SEQ ID NO: 1620078 - RNA, 16 nt, Human
aguguuggagaagaac

SEQ ID NO: 1620079 - RNA, 14 nt, Human
aguguuggagaaga

SEQ ID NO: 1620080 - RNA, 21 nt, Human
aguguugaaacggaugauuuc

SEQ ID NO: 1620081 - RNA, 18 nt, Human
aguguuggagaagaacug

SEQ ID NO: 1620082 - RNA, 17 nt, Human
aguguuggagaagaacu

SEQ ID NO: 1620083 - RNA, 23 nt, Human
aguguuggagaagaacugaaauc

SEQ ID NO: 1620084 - RNA, 21 nt, Human
aguuacucuucaguuaagccu

SEQ ID NO: 1620085 - RNA, 15 nt, Human
uguugcccaggcugg

SEQ ID NO: 1620086 - RNA, 13 nt, Human
uguugcccaggcu

SEQ ID NO: 1620087 - RNA, 19 nt, Human
uguucuuucacccuuuucu

SEQ ID NO: 1620088 - RNA, 22 nt, Human
uguucuugguuuguaaauuaac

SEQ ID NO: 1620089 - RNA, 20 nt, Human
uguucuugguuuguaaauua

SEQ ID NO: 1620090 - RNA, 21 nt, Human
aguguucauaaauaaaguuug

SEQ ID NO: 1620091 - RNA, 18 nt, Human
uguucuuaguuugcaguu

SEQ ID NO: 1620092 - RNA, 18 nt, Human
uguucuagcauggcugcc

SEQ ID NO: 1620093 - RNA, 14 nt, Human
aguuuaaauuguaa

SEQ ID NO: 1620094 - RNA, 13 nt, Human
aguuggucccccu

SEQ ID NO: 1620095 - RNA, 11 nt, Human
aguuggucccc

SEQ ID NO: 1620096 - RNA, 17 nt, Human
aguuggucccccuucca

SEQ ID NO: 1620097 - RNA, 13 nt, Human
uuaaaaaaaaucc

SEQ ID NO: 1620098 - RNA, 13 nt, Human
uguuucaaacaua

SEQ ID NO: 1620099 - RNA, 23 nt, Human
aguugccagucaccccggccacc

SEQ ID NO: 1620100 - RNA, 19 nt, Human
aguugccuaaauccauuug

SEQ ID NO: 1620101 - RNA, 17 nt, Human
aguugccuaaauccauu

SEQ ID NO: 1620102 - RNA, 16 nt, Human
aguugccuaaauccau

SEQ ID NO: 1620103 - RNA, 15 nt, Human
aguugccuaaaucca

SEQ ID NO: 1620104 - RNA, 11 nt, Human
aguugccuaaa

SEQ ID NO: 1620105 - RNA, 19 nt, Human
aguugggcuuccucauagu

SEQ ID NO: 1620106 - RNA, 17 nt, Human
aguuggguggaugccug

SEQ ID NO: 1620107 - RNA, 15 nt, Human
uuaaauaaugugaaa

SEQ ID NO: 1620108 - RNA, 14 nt, Human
uuaaaaaucucaaa

SEQ ID NO: 1620109 - RNA, 15 nt, Human
uuaaaaaucucaaau

SEQ ID NO: 1620110 - RNA, 16 nt, Human
uuaaaaaucucaaauu

SEQ ID NO: 1620111 - RNA, 17 nt, Human
uuaaaaaucucaaauuu

SEQ ID NO: 1620112 - RNA, 19 nt, Human
uuaaauaaugugaaacugg

SEQ ID NO: 1620113 - RNA, 16 nt, Human
uuaaauaaugugaaac

SEQ ID NO: 1620114 - RNA, 18 nt, Human
uuaaauaaugugaaacug

SEQ ID NO: 1620115 - RNA, 19 nt, Human
uuaacagaaauguacagca

SEQ ID NO: 1620116 - RNA, 20 nt, Human
uuaacagaaauguacagcaa

SEQ ID NO: 1620117 - RNA, 15 nt, Human
uuaagugcugcauuu

SEQ ID NO: 1620118 - RNA, 16 nt, Human
uuaagugcugcauuua

SEQ ID NO: 1620119 - RNA, 19 nt, Human
uuaagugcugcauuuaaaa

SEQ ID NO: 1620120 - RNA, 20 nt, Human
uuaagaagacugcauuauau

SEQ ID NO: 1620121 - RNA, 22 nt, Human
uuaagaaagacuaucuaaaugu

SEQ ID NO: 1620122 - RNA, 9 nt, Human
uuaaggugg

SEQ ID NO: 1620123 - RNA, 22 nt, Human
uuaaucauuaggugugacugaa

SEQ ID NO: 1620124 - RNA, 23 nt, Human
uuaaucauuaggugugacugaau

SEQ ID NO: 1620125 - RNA, 21 nt, Human
uuaaucugggccagaauuuca

SEQ ID NO: 1620126 - RNA, 13 nt, Human
uuaaucauuaggu

SEQ ID NO: 1620127 - RNA, 22 nt, Human
uuaauauuuauaggucacuuug

SEQ ID NO: 1620128 - RNA, 19 nt, Human
uuaaugaaagacuguacaa

SEQ ID NO: 1620129 - RNA, 18 nt, Human
uuaaugaaagacuguaca

SEQ ID NO: 1620130 - RNA, 22 nt, Human
uuaaucugguuuauuuuuguuc

SEQ ID NO: 1620131 - RNA, 23 nt, Human
aguuuucugagaaagacuauuca

SEQ ID NO: 1620132 - RNA, 19 nt, Human
aguuuucugagaaagacua

SEQ ID NO: 1620133 - RNA, 23 nt, Human
aguuuuuauggcuuuugugcauu

SEQ ID NO: 1620134 - RNA, 15 nt, Human
auaaaauaauuuuua

SEQ ID NO: 1620135 - RNA, 20 nt, Human
uuaagaaaaaggaugcacag

SEQ ID NO: 1620136 - RNA, 21 nt, Human
uuaagaaaaaggaugcacaga

SEQ ID NO: 1620137 - RNA, 12 nt, Human
auaaaauaauuu

SEQ ID NO: 1620138 - RNA, 18 nt, Human
auaaaagccuguuuaaga

SEQ ID NO: 1620139 - RNA, 13 nt, Human
auaaaagccuguu

SEQ ID NO: 1620140 - RNA, 15 nt, Human
auaaauaguuuauga

SEQ ID NO: 1620141 - RNA, 14 nt, Human
auaaauaaaaauaa

SEQ ID NO: 1620142 - RNA, 22 nt, Human
auaaauagcuagacuggugacu

SEQ ID NO: 1620143 - RNA, 13 nt, Human
auaaauaaaaaua

SEQ ID NO: 1620144 - RNA, 17 nt, Human
auaaagguucaugcaaa

SEQ ID NO: 1620145 - RNA, 15 nt, Human
auaaagguucaugca

SEQ ID NO: 1620146 - RNA, 16 nt, Human
auaacuaaaagguaug

SEQ ID NO: 1620147 - RNA, 22 nt, Human
auaacgauaaaagacagugaaa

SEQ ID NO: 1620148 - RNA, 14 nt, Human
auaacguauaaaag

SEQ ID NO: 1620149 - RNA, 11 nt, Human
auaaauuauuu

SEQ ID NO: 1620150 - RNA, 24 nt, Human
uuacaggcgugagccaccgugccu

SEQ ID NO: 1620151 - RNA, 18 nt, Human
uuacaggcuccugccacc

SEQ ID NO: 1620152 - RNA, 16 nt, Human
uuacaggcuccugcca

SEQ ID NO: 1620153 - RNA, 19 nt, Human
uuacccucauguucuuaau

SEQ ID NO: 1620154 - RNA, 20 nt, Human
uuaccuuugacaaagguaaa

SEQ ID NO: 1620155 - RNA, 13 nt, Human
uuaccuuugacaa

SEQ ID NO: 1620156 - RNA, 13 nt, Human
uuagacagucccu

SEQ ID NO: 1620157 - RNA, 20 nt, Human
uuagacagagucucacuguu

SEQ ID NO: 1620158 - RNA, 13 nt, Human
uuagacagagucu

SEQ ID NO: 1620159 - RNA, 17 nt, Human
uuagaaauugcauuucc

SEQ ID NO: 1620160 - RNA, 23 nt, Human
uuacucuucaguuaagccuuugg

SEQ ID NO: 1620161 - RNA, 14 nt, Human
uuagggagagaaga

SEQ ID NO: 1620162 - RNA, 20 nt, Human
uuagggaaggauacaaaagc

SEQ ID NO: 1620163 - RNA, 21 nt, Human
uuaggugugacugaauuucuu

SEQ ID NO: 1620164 - RNA, 16 nt, Human
uuaggugaggaagcaa

SEQ ID NO: 1620165 - RNA, 16 nt, Human
uuaggugugacugaau

SEQ ID NO: 1620166 - RNA, 22 nt, Human
uuaguuugcaguuacacuaaaa

SEQ ID NO: 1620167 - RNA, 15 nt, Human
uuaguuucuccaagc

SEQ ID NO: 1620168 - RNA, 18 nt, Human
uuagcaaauucuguuuuu

SEQ ID NO: 1620169 - RNA, 12 nt, Human
uuagcaccaggg

SEQ ID NO: 1620170 - RNA, 18 nt, Human
auaauuuaccugaagucu

SEQ ID NO: 1620171 - RNA, 18 nt, Human
uuagccaagugugguaga

SEQ ID NO: 1620172 - RNA, 14 nt, Human
uuagcggagacgga

SEQ ID NO: 1620173 - RNA, 18 nt, Human
auaauccuaaacauauga

SEQ ID NO: 1620174 - RNA, 22 nt, Human
auaaucuggacuccucugucca

SEQ ID NO: 1620175 - RNA, 20 nt, Human
auaaucuggacuccucuguc

SEQ ID NO: 1620176 - RNA, 19 nt, Human
auaaucuggacuccucugu

SEQ ID NO: 1620177 - RNA, 18 nt, Human
auaaucuggacuccucug

SEQ ID NO: 1620178 - RNA, 22 nt, Human
auaauugacaggauuauuggaa

SEQ ID NO: 1620179 - RNA, 15 nt, Human
auaaugaaugaaaca

SEQ ID NO: 1620180 - RNA, 15 nt, Human
auaaugcgugcauac

SEQ ID NO: 1620181 - RNA, 20 nt, Human
auaaugcgugcauaccacuu

SEQ ID NO: 1620182 - RNA, 14 nt, Human
uuagacagucccug

SEQ ID NO: 1620183 - RNA, 21 nt, Human
auaauacaccacuacauucug

SEQ ID NO: 1620184 - RNA, 19 nt, Human
auaauacuugcuuuggaaa

SEQ ID NO: 1620185 - RNA, 18 nt, Human
auaauacaccacuacauu

SEQ ID NO: 1620186 - RNA, 20 nt, Human
auaauacaccacuacauucu

SEQ ID NO: 1620187 - RNA, 12 nt, Human
auaauacaccac

SEQ ID NO: 1620188 - RNA, 17 nt, Human
uuuguagaagucacauu

SEQ ID NO: 1620189 - RNA, 16 nt, Human
uuugugagcaggcugu

SEQ ID NO: 1620190 - RNA, 15 nt, Human
uuugucuacaccauu

SEQ ID NO: 1620191 - RNA, 19 nt, Human
uuugugaggaagccgcugg

SEQ ID NO: 1620192 - RNA, 18 nt, Human
uuugugaggaagccgcug

SEQ ID NO: 1620193 - RNA, 15 nt, Human
uuugugauacaaugc

SEQ ID NO: 1620194 - RNA, 13 nt, Human
uuuguuucuguac

SEQ ID NO: 1620195 - RNA, 12 nt, Human
uuuguuucugua

SEQ ID NO: 1620196 - RNA, 12 nt, Human
uuuguuugaacu

SEQ ID NO: 1620197 - RNA, 18 nt, Human
uuuguuucuguacuuuuu

SEQ ID NO: 1620198 - RNA, 13 nt, Human
uuuguuugaacug

SEQ ID NO: 1620199 - RNA, 14 nt, Human
uuuguuugaacuga

SEQ ID NO: 1620200 - RNA, 13 nt, Human
uuuguagagccag

SEQ ID NO: 1620201 - RNA, 13 nt, Human
uuuguaaauuguc

SEQ ID NO: 1620202 - RNA, 15 nt, Human
uuuuaagaggcaggg

SEQ ID NO: 1620203 - RNA, 16 nt, Human
uuuuaagaggcagggu

SEQ ID NO: 1620204 - RNA, 15 nt, Human
uuuuaagugcugcau

SEQ ID NO: 1620205 - RNA, 16 nt, Human
uuuuaaguaaggaauu

SEQ ID NO: 1620206 - RNA, 23 nt, Human
uuuuaaggguuuguggaaaauga

SEQ ID NO: 1620207 - RNA, 20 nt, Human
uuuuaaggguuuguggaaaa

SEQ ID NO: 1620208 - RNA, 13 nt, Human
uuuuaaaaaagaa

SEQ ID NO: 1620209 - RNA, 18 nt, Human
uuuguuugaacugauaaa

SEQ ID NO: 1620210 - RNA, 15 nt, Human
uuuuaaaagaaugau

SEQ ID NO: 1620211 - RNA, 14 nt, Human
uuuuaaaagaauga

SEQ ID NO: 1620212 - RNA, 22 nt, Human
uuuuaaaacacuuccauaaucu

SEQ ID NO: 1620213 - RNA, 16 nt, Human
uuuuaaaacacuucca

SEQ ID NO: 1620214 - RNA, 13 nt, Human
uuugcucauggaa

SEQ ID NO: 1620215 - RNA, 22 nt, Human
uuugggaggccaaggugggagg

SEQ ID NO: 1620216 - RNA, 14 nt, Human
uuuggggauauuuu

SEQ ID NO: 1620217 - RNA, 15 nt, Human
auggcuauaggugcu

SEQ ID NO: 1620218 - RNA, 12 nt, Human
uuugcucaugga

SEQ ID NO: 1620219 - RNA, 11 nt, Human
uuugcucaugg

SEQ ID NO: 1620220 - RNA, 16 nt, Human
auguccacugguucuu

SEQ ID NO: 1620221 - RNA, 20 nt, Human
augucccaacuuguaaaaau

SEQ ID NO: 1620222 - RNA, 24 nt, Human
augucccuaccgagucucuucucc

SEQ ID NO: 1620223 - RNA, 22 nt, Human
augucuauaaaccgaacugaug

SEQ ID NO: 1620224 - RNA, 23 nt, Human
auguccaagaagcccaggaaagg

SEQ ID NO: 1620225 - RNA, 19 nt, Human
auguccaagaagcccagga

SEQ ID NO: 1620226 - RNA, 16 nt, Human
augucagugugacuga

SEQ ID NO: 1620227 - RNA, 15 nt, Human
augucagugugacug

SEQ ID NO: 1620228 - RNA, 21 nt, Human
augucagugugacugaucucu

SEQ ID NO: 1620229 - RNA, 15 nt, Human
auguauguguaagua

SEQ ID NO: 1620230 - RNA, 12 nt, Human
auguauguguaa

SEQ ID NO: 1620231 - RNA, 15 nt, Human
auguaucugagcagg

SEQ ID NO: 1620232 - RNA, 22 nt, Human
uuugggggaaaauuuagaaaua

SEQ ID NO: 1620233 - RNA, 15 nt, Human
auguaucaaugagua

SEQ ID NO: 1620234 - RNA, 21 nt, Human
auguuucaaacauauauaaca

SEQ ID NO: 1620235 - RNA, 14 nt, Human
auguuuuccaugag

SEQ ID NO: 1620236 - RNA, 18 nt, Human
auguuucaaacauauaua

SEQ ID NO: 1620237 - RNA, 18 nt, Human
auguuuuucuucucccuc

SEQ ID NO: 1620238 - RNA, 17 nt, Human
auguuuuucuucucccu

SEQ ID NO: 1620239 - RNA, 16 nt, Human
auuaaaagaauauuuu

SEQ ID NO: 1620240 - RNA, 17 nt, Human
auuaaccacuucagcug

SEQ ID NO: 1620241 - RNA, 19 nt, Human
auuaacauguuaaaccaug

SEQ ID NO: 1620242 - RNA, 17 nt, Human
auuaacauguuaaacca

SEQ ID NO: 1620243 - RNA, 15 nt, Human
auuaacauguuaaac

SEQ ID NO: 1620244 - RNA, 14 nt, Human
auuaacauguuaaa

SEQ ID NO: 1620245 - RNA, 13 nt, Human
auuaacauguuaa

SEQ ID NO: 1620246 - RNA, 20 nt, Human
auuaaccacuucagcugacu

SEQ ID NO: 1620247 - RNA, 18 nt, Human
auuaaccacuucagcuga

SEQ ID NO: 1620248 - RNA, 17 nt, Human
auuaaacuuaaucuaaa

SEQ ID NO: 1620249 - RNA, 16 nt, Human
auuaaacuuaaucuaa

SEQ ID NO: 1620250 - RNA, 19 nt, Human
auuaaacuuaaucuaaaug

SEQ ID NO: 1620251 - RNA, 21 nt, Human
auuaaacuuaaucuaaaugga

SEQ ID NO: 1620252 - RNA, 21 nt, Human
auuaaagccauguuuauuaca

SEQ ID NO: 1620253 - RNA, 17 nt, Human
auuaaagccauguuuau

SEQ ID NO: 1620254 - RNA, 16 nt, Human
auuaaagccauguuua

SEQ ID NO: 1620255 - RNA, 12 nt, Human
auuaaagccaug

SEQ ID NO: 1620256 - RNA, 16 nt, Human
auuaacuuuuauaaac

SEQ ID NO: 1620257 - RNA, 17 nt, Human
auuaacuuuuauaaacu

SEQ ID NO: 1620258 - RNA, 19 nt, Human
auuaacuuuuauaaacuuu

SEQ ID NO: 1620259 - RNA, 20 nt, Human
auuaacuuuuauaaacuuua

SEQ ID NO: 1620260 - RNA, 12 nt, Human
auuaacuuuuau

SEQ ID NO: 1620261 - RNA, 14 nt, Human
auuaagaaagacua

SEQ ID NO: 1620262 - RNA, 13 nt, Human
auuaagaaagacu

SEQ ID NO: 1620263 - RNA, 23 nt, Human
auuaacuuuuauaaacuuuaccu

SEQ ID NO: 1620264 - RNA, 19 nt, Human
auguucaucaaugaaugaa

SEQ ID NO: 1620265 - RNA, 21 nt, Human
auguucaucauccuaagcuau

SEQ ID NO: 1620266 - RNA, 15 nt, Human
auguugacaugggac

SEQ ID NO: 1620267 - RNA, 16 nt, Human
auguugaagccuuugu

SEQ ID NO: 1620268 - RNA, 16 nt, Human
uuuuaagugcugcauu

SEQ ID NO: 1620269 - RNA, 17 nt, Human
uuuuaagugcugcauuu

SEQ ID NO: 1620270 - RNA, 21 nt, Human
uuuuaagugcugcauuuaaaa

SEQ ID NO: 1620271 - RNA, 12 nt, Human
uuuuauaaacuu

SEQ ID NO: 1620272 - RNA, 13 nt, Human
uuuuauaaacuuu

SEQ ID NO: 1620273 - RNA, 19 nt, Human
uuuuaguugcaacuuugua

SEQ ID NO: 1620274 - RNA, 16 nt, Human
auguuggccaggcugg

SEQ ID NO: 1620275 - RNA, 16 nt, Human
auguuggccaggcugc

SEQ ID NO: 1620276 - RNA, 14 nt, Human
auguuggccaggcu

SEQ ID NO: 1620277 - RNA, 15 nt, Human
auguugcauagaaua

SEQ ID NO: 1620278 - RNA, 14 nt, Human
uuuuauaauuuugu

SEQ ID NO: 1620279 - RNA, 19 nt, Human
uuuuauaaacuuuaccuuu

SEQ ID NO: 1620280 - RNA, 14 nt, Human
uuuuauaaacuuua

SEQ ID NO: 1620281 - RNA, 17 nt, Human
uuuuauaaacuuuaccu

SEQ ID NO: 1620282 - RNA, 23 nt, Human
uuuuauggaggcuuugcauagau

SEQ ID NO: 1620283 - RNA, 19 nt, Human
uuuuauggcacuaguauuu

SEQ ID NO: 1620284 - RNA, 22 nt, Human
uuuuauggcacuaguauuucua

SEQ ID NO: 1620285 - RNA, 18 nt, Human
uuuuaugugaaacauguu

SEQ ID NO: 1620286 - RNA, 22 nt, Human
uuuuauguugcauagaauaaaa

SEQ ID NO: 1620287 - RNA, 12 nt, Human
uuuuauuaugua

SEQ ID NO: 1620288 - RNA, 19 nt, Human
uuuuaugugaaacauguuu

SEQ ID NO: 1620289 - RNA, 19 nt, Human
uuuuccagguuuaagcugu

SEQ ID NO: 1620290 - RNA, 22 nt, Human
uuuucauucuccuaucaccugu

SEQ ID NO: 1620291 - RNA, 21 nt, Human
uuuucauuauuuuauuaugaa

SEQ ID NO: 1620292 - RNA, 15 nt, Human
uuuucauuauuuuau

SEQ ID NO: 1620293 - RNA, 21 nt, Human
uuuuauucagcucauggacuu

SEQ ID NO: 1620294 - RNA, 14 nt, Human
uuuuauuauguaaa

SEQ ID NO: 1620295 - RNA, 13 nt, Human
uuuuauuauguaa

SEQ ID NO: 1620296 - RNA, 21 nt, Human
auuaaguaaugauaacuggaa

SEQ ID NO: 1620297 - RNA, 15 nt, Human
auuaaguaaugauaa

SEQ ID NO: 1620298 - RNA, 13 nt, Human
auuaaguaaugau

SEQ ID NO: 1620299 - RNA, 23 nt, Human
uuuuuuaaaaaagaaacauuugg

SEQ ID NO: 1620300 - RNA, 20 nt, Human
auuaagagagucuauuuacg

SEQ ID NO: 1620301 - RNA, 12 nt, Human
auuaccagggac

SEQ ID NO: 1620302 - RNA, 22 nt, Human
auuaccugaauuuuggcugugu

SEQ ID NO: 1620303 - RNA, 16 nt, Human
auuacauuuguauaaa

SEQ ID NO: 1620304 - RNA, 15 nt, Human
auuacauuuguauaa

SEQ ID NO: 1620305 - RNA, 19 nt, Human
auuaccacagacauacuaa

SEQ ID NO: 1620306 - RNA, 13 nt, Human
auuacauuuguau

SEQ ID NO: 1620307 - RNA, 20 nt, Human
auuauuaccuuacagaaguu

SEQ ID NO: 1620308 - RNA, 23 nt, Human
auuauuuauuaaaugcccagccc

SEQ ID NO: 1620309 - RNA, 18 nt, Human
auuauuuuauguugcaua

SEQ ID NO: 1620310 - RNA, 15 nt, Human
auuauuuuauuauga

SEQ ID NO: 1620311 - RNA, 16 nt, Human
auuauuuuauguugca

SEQ ID NO: 1620312 - RNA, 17 nt, Human
auuauauuuacaaaugg

SEQ ID NO: 1620313 - RNA, 23 nt, Human
auuaucucaaaacugcacuguca

SEQ ID NO: 1620314 - RNA, 18 nt, Human
auuaucucaaaacugcac

SEQ ID NO: 1620315 - RNA, 16 nt, Human
auuauauuuacaaaug

SEQ ID NO: 1620316 - RNA, 19 nt, Human
auuagagaguguugaaacg

SEQ ID NO: 1620317 - RNA, 18 nt, Human
auuagagaguguugaaac

SEQ ID NO: 1620318 - RNA, 17 nt, Human
auuagagaguguugaaa

SEQ ID NO: 1620319 - RNA, 16 nt, Human
auuagagaguguugaa

SEQ ID NO: 1620320 - RNA, 15 nt, Human
auuagagaguguuga

SEQ ID NO: 1620321 - RNA, 15 nt, Human
auucaaacagucuca

SEQ ID NO: 1620322 - RNA, 14 nt, Human
auucaaacagucuc

SEQ ID NO: 1620323 - RNA, 14 nt, Human
auucagcucaugga

SEQ ID NO: 1620324 - RNA, 22 nt, Human
auuauuuuauuaugaaacuugu

SEQ ID NO: 1620325 - RNA, 21 nt, Human
auuauuuuauuaugaaacuug

SEQ ID NO: 1620326 - RNA, 16 nt, Human
auucaaaaugauguau

SEQ ID NO: 1620327 - RNA, 22 nt, Human
auucaggaagcucagggccugg

SEQ ID NO: 1620328 - RNA, 21 nt, Human
auucaggaagcucagggccug

SEQ ID NO: 1620329 - RNA, 18 nt, Human
auucagcucugcaagaau

SEQ ID NO: 1620330 - RNA, 14 nt, Human
auucagcucugcaa

SEQ ID NO: 1620331 - RNA, 23 nt, Human
auucaggaagcucagggccuggc

SEQ ID NO: 1620332 - RNA, 21 nt, Human
auucaguuguuagugugucuu

SEQ ID NO: 1620333 - RNA, 20 nt, Human
auuccacuuauaggaauuga

SEQ ID NO: 1620334 - RNA, 16 nt, Human
auuccccaggaggcca

SEQ ID NO: 1620335 - RNA, 20 nt, Human
auuccccagauugcaacagg

SEQ ID NO: 1620336 - RNA, 19 nt, Human
auuccccaggaggccagcc

SEQ ID NO: 1620337 - RNA, 23 nt, Human
auuggcuuuggguugcaggaccu

SEQ ID NO: 1620338 - RNA, 13 nt, Human
auugugccccugc

SEQ ID NO: 1620339 - RNA, 15 nt, Human
auugugaaauuauuc

SEQ ID NO: 1620340 - RNA, 14 nt, Human
auuguauuacaaau

SEQ ID NO: 1620341 - RNA, 15 nt, Human
auuguauuacaaauc

SEQ ID NO: 1620342 - RNA, 23 nt, Human
auugugcgcuaaacuuuucugau

SEQ ID NO: 1620343 - RNA, 13 nt, Human
auuuaaaagauac

SEQ ID NO: 1620344 - RNA, 19 nt, Human
auuuaaagcuuauuaaaac

SEQ ID NO: 1620345 - RNA, 20 nt, Human
auuuaacagaaauguacagc

SEQ ID NO: 1620346 - RNA, 17 nt, Human
auuuaacagaaauguac

SEQ ID NO: 1620347 - RNA, 19 nt, Human
auuuaacagaaauguacag

SEQ ID NO: 1620348 - RNA, 16 nt, Human
auuuaacagaaaugua

SEQ ID NO: 1620349 - RNA, 16 nt, Human
auuuacaaaugggaaa

SEQ ID NO: 1620350 - RNA, 22 nt, Human
auuuacaacugggggaggguga

SEQ ID NO: 1620351 - RNA, 23 nt, Human
auuuaauuuuuuugagacagagu

SEQ ID NO: 1620352 - RNA, 19 nt, Human
auuuaauuuuuuugagaca

SEQ ID NO: 1620353 - RNA, 18 nt, Human
auuuaaccucuaaauucu

SEQ ID NO: 1620354 - RNA, 16 nt, Human
auuuaaccucuaaauu

SEQ ID NO: 1620355 - RNA, 20 nt, Human
auugacacuuaaaaaugguu

SEQ ID NO: 1620356 - RNA, 17 nt, Human
auucuccaccugccagg

SEQ ID NO: 1620357 - RNA, 16 nt, Human
auucuccaccugccag

SEQ ID NO: 1620358 - RNA, 13 nt, Human
auucuccaccugc

SEQ ID NO: 1620359 - RNA, 20 nt, Human
auucucagaaucucaaauaa

SEQ ID NO: 1620360 - RNA, 18 nt, Human
auucucagaaucucaaau

SEQ ID NO: 1620361 - RNA, 16 nt, Human
auucuacuuugagugc

SEQ ID NO: 1620362 - RNA, 13 nt, Human
auucuacuuugag

SEQ ID NO: 1620363 - RNA, 14 nt, Human
auucucagaaucuc

SEQ ID NO: 1620364 - RNA, 22 nt, Human
auucucacagcuccaagaauuu

SEQ ID NO: 1620365 - RNA, 21 nt, Human
auucucacagcuccaagaauu

SEQ ID NO: 1620366 - RNA, 19 nt, Human
auucucacagcuccaagaa

SEQ ID NO: 1620367 - RNA, 18 nt, Human
auucuccaccugccaggg

SEQ ID NO: 1620368 - RNA, 23 nt, Human
auugccauuucuuccacaagagc

SEQ ID NO: 1620369 - RNA, 17 nt, Human
auugcauuuccugacag

SEQ ID NO: 1620370 - RNA, 21 nt, Human
auugcccacgcuggagugcag

SEQ ID NO: 1620371 - RNA, 17 nt, Human
auugcccacgcuggagu

SEQ ID NO: 1620372 - RNA, 19 nt, Human
auugcggacagccacggcc

SEQ ID NO: 1620373 - RNA, 18 nt, Human
auugcggacagccacggc

SEQ ID NO: 1620374 - RNA, 16 nt, Human
auugcggacagccacg

SEQ ID NO: 1620375 - RNA, 21 nt, Human
auugcaacaggcugggcuuca

SEQ ID NO: 1620376 - RNA, 16 nt, Human
auugcaacaggcuggg

SEQ ID NO: 1620377 - RNA, 18 nt, Human
auugacaggauuauugga

SEQ ID NO: 1620378 - RNA, 15 nt, Human
auugcaacaggcugg

SEQ ID NO: 1620379 - RNA, 13 nt, Human
auugaccugaggc

SEQ ID NO: 1620380 - RNA, 17 nt, Human
auugaccugaggcccuu

SEQ ID NO: 1620381 - RNA, 14 nt, Human
auugcuacuguccu

SEQ ID NO: 1620382 - RNA, 23 nt, Human
auuugguaaggggaauugaggac

SEQ ID NO: 1620383 - RNA, 17 nt, Human
auuuggugguuucagaa

SEQ ID NO: 1620384 - RNA, 18 nt, Human
auuuguaguguuggagaa

SEQ ID NO: 1620385 - RNA, 18 nt, Human
auuuggugguuucagaaa

SEQ ID NO: 1620386 - RNA, 20 nt, Human
auuuggugguuucagaaaug

SEQ ID NO: 1620387 - RNA, 17 nt, Human
auuugguuuucacauug

SEQ ID NO: 1620388 - RNA, 15 nt, Human
auuugguuuucacau

SEQ ID NO: 1620389 - RNA, 22 nt, Human
auuugguuuucacauuggaaac

SEQ ID NO: 1620390 - RNA, 21 nt, Human
auuugguuuucacauuggaaa

SEQ ID NO: 1620391 - RNA, 20 nt, Human
auuucuuuugccguuauuaa

SEQ ID NO: 1620392 - RNA, 15 nt, Human
auuugaggucuguuc

SEQ ID NO: 1620393 - RNA, 23 nt, Human
auuugaggucuguucuuuccaaa

SEQ ID NO: 1620394 - RNA, 17 nt, Human
auuugagcagggcucag

SEQ ID NO: 1620395 - RNA, 20 nt, Human
auuuggaaaucuuuaaaaaa

SEQ ID NO: 1620396 - RNA, 22 nt, Human
auuuauuacuguaagaaaauau

SEQ ID NO: 1620397 - RNA, 20 nt, Human
auuuauuaaaugcccagccc

SEQ ID NO: 1620398 - RNA, 22 nt, Human
auuuauuaaaugcccagccccu

SEQ ID NO: 1620399 - RNA, 13 nt, Human
auuuauuauggca

SEQ ID NO: 1620400 - RNA, 15 nt, Human
auuuacuaaaaugga

SEQ ID NO: 1620401 - RNA, 21 nt, Human
auuucuaaaucuccaaaauaa

SEQ ID NO: 1620402 - RNA, 12 nt, Human
auuucuaaaucu

SEQ ID NO: 1620403 - RNA, 13 nt, Human
auuucuaaaucuc

SEQ ID NO: 1620404 - RNA, 14 nt, Human
auuuccugugucuu

SEQ ID NO: 1620405 - RNA, 16 nt, Human
auuuauuauggcacau

SEQ ID NO: 1620406 - RNA, 22 nt, Human
auuuccugggagcuuuuguaga

SEQ ID NO: 1620407 - RNA, 23 nt, Human
auuuccugggagcuuuuguagaa

SEQ ID NO: 1620408 - RNA, 16 nt, Human
auuuuaauaauguuuc

SEQ ID NO: 1620409 - RNA, 15 nt, Human
auuuuaauaauguuu

SEQ ID NO: 1620410 - RNA, 14 nt, Human
auuuuaauaauguu

SEQ ID NO: 1620411 - RNA, 15 nt, Human
auuuguaucacaaau

SEQ ID NO: 1620412 - RNA, 19 nt, Human
auuuguaguguuggagaag

SEQ ID NO: 1620413 - RNA, 13 nt, Human
auuuuacauaaau

SEQ ID NO: 1620414 - RNA, 20 nt, Human
auuuuacuguacagacagaa

SEQ ID NO: 1620415 - RNA, 22 nt, Human
auuuuacuguacagacagaaaa

SEQ ID NO: 1620416 - RNA, 17 nt, Human
auuuuauuaugcaugaa

SEQ ID NO: 1620417 - RNA, 13 nt, Human
auuuuauuaugua

SEQ ID NO: 1620418 - RNA, 14 nt, Human
auuuuauuaugcau

SEQ ID NO: 1620419 - RNA, 15 nt, Human
auuuuauuaugcaug

SEQ ID NO: 1620420 - RNA, 15 nt, Human
auuuuauuauguaaa

SEQ ID NO: 1620421 - RNA, 14 nt, Human
auuuuauuauguaa

SEQ ID NO: 1620422 - RNA, 13 nt, Human
auuuuauuaugca

SEQ ID NO: 1620423 - RNA, 21 nt, Human
auuuuauuaugaaacuugugu

SEQ ID NO: 1620424 - RNA, 18 nt, Human
auuuuauuaugaaacuug

SEQ ID NO: 1620425 - RNA, 12 nt, Human
auuuuauuauga

SEQ ID NO: 1620426 - RNA, 11 nt, Human
auuuuauuaug

SEQ ID NO: 1620427 - RNA, 14 nt, Human
auuuuauuaugaaa

SEQ ID NO: 1620428 - RNA, 13 nt, Human
auuuuauuaugaa

SEQ ID NO: 1620429 - RNA, 21 nt, Human
auuuuacuuuaaaaggagcca

SEQ ID NO: 1620430 - RNA, 18 nt, Human
auuuuauguugcauagaa

SEQ ID NO: 1620431 - RNA, 21 nt, Human
auuuuauguugcauagaauaa

SEQ ID NO: 1620432 - RNA, 23 nt, Human
auuucuuuugccguuauuaaaaa

SEQ ID NO: 1620433 - RNA, 15 nt, Human
auauauuuuaagacg

SEQ ID NO: 1620434 - RNA, 14 nt, Human
auauauuuuaagac

SEQ ID NO: 1620435 - RNA, 21 nt, Human
auaucuccgucaacucauauu

SEQ ID NO: 1620436 - RNA, 20 nt, Human
auaucuccgucaacucauau

SEQ ID NO: 1620437 - RNA, 19 nt, Human
auaucuccgucaacucaua

SEQ ID NO: 1620438 - RNA, 20 nt, Human
auaucugaaaauguaugugu

SEQ ID NO: 1620439 - RNA, 17 nt, Human
auaucugaaaauguaug

SEQ ID NO: 1620440 - RNA, 16 nt, Human
auaucugaaaauguau

SEQ ID NO: 1620441 - RNA, 14 nt, Human
auaugcacacauuu

SEQ ID NO: 1620442 - RNA, 15 nt, Human
auaugcacacauuuu

SEQ ID NO: 1620443 - RNA, 16 nt, Human
auaugcacacauuuuu

SEQ ID NO: 1620444 - RNA, 22 nt, Human
auaugcacacauuuuuuaaaug

SEQ ID NO: 1620445 - RNA, 16 nt, Human
auauguaacaagccac

SEQ ID NO: 1620446 - RNA, 17 nt, Human
auauguaacaagccacc

SEQ ID NO: 1620447 - RNA, 18 nt, Human
uucagugccuuauggaac

SEQ ID NO: 1620448 - RNA, 19 nt, Human
uucauaauuauuauuuggc

SEQ ID NO: 1620449 - RNA, 13 nt, Human
uucagugccuuau

SEQ ID NO: 1620450 - RNA, 12 nt, Human
uucagugccuua

SEQ ID NO: 1620451 - RNA, 11 nt, Human
uucagaaaugu

SEQ ID NO: 1620452 - RNA, 13 nt, Human
uucagaaaugugu

SEQ ID NO: 1620453 - RNA, 13 nt, Human
auauauuuuaaga

SEQ ID NO: 1620454 - RNA, 12 nt, Human
auauauuuuaag

SEQ ID NO: 1620455 - RNA, 17 nt, Human
uucaucccucuggggcu

SEQ ID NO: 1620456 - RNA, 21 nt, Human
uucaucccucuggggcuguuc

SEQ ID NO: 1620457 - RNA, 12 nt, Human
uucccaaauuuc

SEQ ID NO: 1620458 - RNA, 18 nt, Human
uucccaacuccagaaagu

SEQ ID NO: 1620459 - RNA, 16 nt, Human
uucccaagcucugcuc

SEQ ID NO: 1620460 - RNA, 15 nt, Human
uucccaagcucugcu

SEQ ID NO: 1620461 - RNA, 14 nt, Human
uucccaagcucugc

SEQ ID NO: 1620462 - RNA, 13 nt, Human
uucccaagcucug

SEQ ID NO: 1620463 - RNA, 18 nt, Human
uucccaagcucugcuccu

SEQ ID NO: 1620464 - RNA, 22 nt, Human
uucccaccucucucacuccuug

SEQ ID NO: 1620465 - RNA, 12 nt, Human
uucccaccucuc

SEQ ID NO: 1620466 - RNA, 22 nt, Human
uuccagugaggcucugcccuug

SEQ ID NO: 1620467 - RNA, 21 nt, Human
uuccagugaggcucugcccuu

SEQ ID NO: 1620468 - RNA, 20 nt, Human
uuccagugaggcucugcccu

SEQ ID NO: 1620469 - RNA, 19 nt, Human
uuccagugaggcucugccc

SEQ ID NO: 1620470 - RNA, 17 nt, Human
uuccagugaggcucugc

SEQ ID NO: 1620471 - RNA, 21 nt, Human
uuccaggggugggacacccug

SEQ ID NO: 1620472 - RNA, 13 nt, Human
uuccaggcuggga

SEQ ID NO: 1620473 - RNA, 17 nt, Human
uuccagguuuaagcugu

SEQ ID NO: 1620474 - RNA, 23 nt, Human
uuccauaaucuggacuccucugu

SEQ ID NO: 1620475 - RNA, 22 nt, Human
uuccauaaucuggacuccucug

SEQ ID NO: 1620476 - RNA, 19 nt, Human
uuccauaaucuggacuccu

SEQ ID NO: 1620477 - RNA, 23 nt, Human
uucccaaagcagugcaugcuguc

SEQ ID NO: 1620478 - RNA, 19 nt, Human
uuccaccaucaagccacca

SEQ ID NO: 1620479 - RNA, 22 nt, Human
uuccacaagagcccaggccucc

SEQ ID NO: 1620480 - RNA, 17 nt, Human
uuccaggggugggacac

SEQ ID NO: 1620481 - RNA, 17 nt, Human
uuccaaggguacuaagg

SEQ ID NO: 1620482 - RNA, 15 nt, Human
uuccaaggguacuaa

SEQ ID NO: 1620483 - RNA, 18 nt, Human
uucauuuaggugaggaag

SEQ ID NO: 1620484 - RNA, 16 nt, Human
auauguggaguucauc

SEQ ID NO: 1620485 - RNA, 15 nt, Human
auauguggaguucau

SEQ ID NO: 1620486 - RNA, 13 nt, Human
auagucuggcugu

SEQ ID NO: 1620487 - RNA, 21 nt, Human
auagugaggcaucgcaaugua

SEQ ID NO: 1620488 - RNA, 17 nt, Human
auaguggcuuaaaacaa

SEQ ID NO: 1620489 - RNA, 15 nt, Human
auaguggugugauuu

SEQ ID NO: 1620490 - RNA, 20 nt, Human
auaguuguaccgcaauguga

SEQ ID NO: 1620491 - RNA, 22 nt, Human
auaguuggcuaggaccccucca

SEQ ID NO: 1620492 - RNA, 22 nt, Human
auaguuaagcgugcauaaguua

SEQ ID NO: 1620493 - RNA, 14 nt, Human
auauauaacaaugc

SEQ ID NO: 1620494 - RNA, 13 nt, Human
auauauaaccagu

SEQ ID NO: 1620495 - RNA, 12 nt, Human
auauauaaccag

SEQ ID NO: 1620496 - RNA, 21 nt, Human
auauauauuuuuuucugaaau

SEQ ID NO: 1620497 - RNA, 15 nt, Human
uucacuuacagcacc

SEQ ID NO: 1620498 - RNA, 17 nt, Human
uuauuuuuagacagagu

SEQ ID NO: 1620499 - RNA, 18 nt, Human
uuauuuuuagacagaguc

SEQ ID NO: 1620500 - RNA, 17 nt, Human
uuauuuuuuucugaauu

SEQ ID NO: 1620501 - RNA, 13 nt, Human
uuauuuuuuucug

SEQ ID NO: 1620502 - RNA, 18 nt, Human
uucaaacagucucaggaa

SEQ ID NO: 1620503 - RNA, 14 nt, Human
uucaaacauauaua

SEQ ID NO: 1620504 - RNA, 17 nt, Human
uucaaaauaaaaaugag

SEQ ID NO: 1620505 - RNA, 21 nt, Human
uucaaaauuguuacaaauugu

SEQ ID NO: 1620506 - RNA, 21 nt, Human
uucaagcgauucuucugcuuc

SEQ ID NO: 1620507 - RNA, 23 nt, Human
uucacaagacccaaaaggcagaa

SEQ ID NO: 1620508 - RNA, 17 nt, Human
uucaagugauucucaug

SEQ ID NO: 1620509 - RNA, 20 nt, Human
uucacaguucucuccuucuu

SEQ ID NO: 1620510 - RNA, 15 nt, Human
uucacaguucucucc

SEQ ID NO: 1620511 - RNA, 20 nt, Human
uucacagaugggugcuugga

SEQ ID NO: 1620512 - RNA, 17 nt, Human
auaggcguaacuaauuu

SEQ ID NO: 1620513 - RNA, 17 nt, Human
auaggaaaaacugauuu

SEQ ID NO: 1620514 - RNA, 16 nt, Human
auaggaaaaacugauu

SEQ ID NO: 1620515 - RNA, 14 nt, Human
auaggaaaaacuga

SEQ ID NO: 1620516 - RNA, 12 nt, Human
auaggaaaaacu

SEQ ID NO: 1620517 - RNA, 15 nt, Human
auagcuuuuuucucu

SEQ ID NO: 1620518 - RNA, 22 nt, Human
auagcuuuucccuuuuuuuaag

SEQ ID NO: 1620519 - RNA, 13 nt, Human
auccuaguuccac

SEQ ID NO: 1620520 - RNA, 21 nt, Human
auccuaggcauuugcugaaua

SEQ ID NO: 1620521 - RNA, 19 nt, Human
auccuaaugaaugcauaaa

SEQ ID NO: 1620522 - RNA, 14 nt, Human
auccuacaagacac

SEQ ID NO: 1620523 - RNA, 13 nt, Human
auccuaaugaaug

SEQ ID NO: 1620524 - RNA, 12 nt, Human
auccuaaugaau

SEQ ID NO: 1620525 - RNA, 18 nt, Human
uugaacccgggaggcaga

SEQ ID NO: 1620526 - RNA, 19 nt, Human
uugaaauauugacuuuuua

SEQ ID NO: 1620527 - RNA, 20 nt, Human
uugaaauauaggaacuuaaa

SEQ ID NO: 1620528 - RNA, 11 nt, Human
uugaaaucuuu

SEQ ID NO: 1620529 - RNA, 21 nt, Human
uugaaauuuuuauuaaauuau

SEQ ID NO: 1620530 - RNA, 16 nt, Human
uugaaaguuuacagga

SEQ ID NO: 1620531 - RNA, 20 nt, Human
uucuguuuuucuaggccugg

SEQ ID NO: 1620532 - RNA, 21 nt, Human
uucuguuggccagugugacaa

SEQ ID NO: 1620533 - RNA, 17 nt, Human
uucuguugcugccucau

SEQ ID NO: 1620534 - RNA, 18 nt, Human
uucuguucuuucuggcua

SEQ ID NO: 1620535 - RNA, 16 nt, Human
uucuguugcugccuca

SEQ ID NO: 1620536 - RNA, 15 nt, Human
uucuguugcugccuc

SEQ ID NO: 1620537 - RNA, 13 nt, Human
uucuuaauucuua

SEQ ID NO: 1620538 - RNA, 13 nt, Human
uucuuccucugcu

SEQ ID NO: 1620539 - RNA, 12 nt, Human
uucuuccucugc

SEQ ID NO: 1620540 - RNA, 11 nt, Human
uucuuccucug

SEQ ID NO: 1620541 - RNA, 22 nt, Human
uucuuucuggcuaugcauuuga

SEQ ID NO: 1620542 - RNA, 15 nt, Human
uucuuucuuccucug

SEQ ID NO: 1620543 - RNA, 13 nt, Human
uucuuucuuccuc

SEQ ID NO: 1620544 - RNA, 12 nt, Human
uucuugcaaagu

SEQ ID NO: 1620545 - RNA, 13 nt, Human
uucuugcaaagua

SEQ ID NO: 1620546 - RNA, 20 nt, Human
aucauuucugcaucagcugc

SEQ ID NO: 1620547 - RNA, 14 nt, Human
uucuccugccucag

SEQ ID NO: 1620548 - RNA, 13 nt, Human
uucuccugccuca

SEQ ID NO: 1620549 - RNA, 12 nt, Human
uucuccugccuc

SEQ ID NO: 1620550 - RNA, 23 nt, Human
aucaggccaggcccucugcccac

SEQ ID NO: 1620551 - RNA, 22 nt, Human
aucaggccaggcccucugccca

SEQ ID NO: 1620552 - RNA, 21 nt, Human
aucaggccaggcccucugccc

SEQ ID NO: 1620553 - RNA, 21 nt, Human
aucauugaaaucuuuuugcuu

SEQ ID NO: 1620554 - RNA, 14 nt, Human
uucugacccaugcu

SEQ ID NO: 1620555 - RNA, 16 nt, Human
uucugacccaugcugc

SEQ ID NO: 1620556 - RNA, 15 nt, Human
uucugcacacagcac

SEQ ID NO: 1620557 - RNA, 13 nt, Human
uucugccgcagcc

SEQ ID NO: 1620558 - RNA, 19 nt, Human
uucugcagccacuauuguu

SEQ ID NO: 1620559 - RNA, 17 nt, Human
uucucuacucuagggaa

SEQ ID NO: 1620560 - RNA, 16 nt, Human
uucucuuuucaaaaca

SEQ ID NO: 1620561 - RNA, 14 nt, Human
auccauacauuugu

SEQ ID NO: 1620562 - RNA, 20 nt, Human
auccauuuggaaaucuuuaa

SEQ ID NO: 1620563 - RNA, 15 nt, Human
aucccaccaacccuc

SEQ ID NO: 1620564 - RNA, 13 nt, Human
auccauuuggaaa

SEQ ID NO: 1620565 - RNA, 19 nt, Human
auccauuuggaaaucuuua

SEQ ID NO: 1620566 - RNA, 17 nt, Human
auccauuuggaaaucuu

SEQ ID NO: 1620567 - RNA, 18 nt, Human
auccaguuuuguuuggac

SEQ ID NO: 1620568 - RNA, 21 nt, Human
auccaguuuuguuuggaccaa

SEQ ID NO: 1620569 - RNA, 20 nt, Human
auccaguuuuguuuggacca

SEQ ID NO: 1620570 - RNA, 15 nt, Human
uucuggcucuuccag

SEQ ID NO: 1620571 - RNA, 16 nt, Human
uucugccgcagcccug

SEQ ID NO: 1620572 - RNA, 15 nt, Human
uucugccgcagcccu

SEQ ID NO: 1620573 - RNA, 14 nt, Human
uucugccgcagccc

SEQ ID NO: 1620574 - RNA, 18 nt, Human
uucuggcuaugcauuuga

SEQ ID NO: 1620575 - RNA, 20 nt, Human
uucuggcuaugcauuugaaa

SEQ ID NO: 1620576 - RNA, 19 nt, Human
uucuguacuuuuuggcaua

SEQ ID NO: 1620577 - RNA, 18 nt, Human
uucuguacuuuuuggcau

SEQ ID NO: 1620578 - RNA, 22 nt, Human
uucugguugaugccugugaacu

SEQ ID NO: 1620579 - RNA, 13 nt, Human
uucuguacuuuuu

SEQ ID NO: 1620580 - RNA, 19 nt, Human
uucuaaaucuccaaaauaa

SEQ ID NO: 1620581 - RNA, 13 nt, Human
uucgcuccugugu

SEQ ID NO: 1620582 - RNA, 15 nt, Human
uucuaaaguaaaaac

SEQ ID NO: 1620583 - RNA, 20 nt, Human
uucuaaguaaaaccacagca

SEQ ID NO: 1620584 - RNA, 19 nt, Human
uucuaaguaaaaccacagc

SEQ ID NO: 1620585 - RNA, 17 nt, Human
uucuaaguaaaaccaca

SEQ ID NO: 1620586 - RNA, 13 nt, Human
uucuaagaaguga

SEQ ID NO: 1620587 - RNA, 18 nt, Human
aucaauaaaaaauuauga

SEQ ID NO: 1620588 - RNA, 17 nt, Human
aucaauaaaaaauuaug

SEQ ID NO: 1620589 - RNA, 15 nt, Human
aucaauaaaaaauua

SEQ ID NO: 1620590 - RNA, 20 nt, Human
uucgauacaccgggccugga

SEQ ID NO: 1620591 - RNA, 21 nt, Human
uucgcaggauucuuccucccu

SEQ ID NO: 1620592 - RNA, 13 nt, Human
uucuauaauuuaa

SEQ ID NO: 1620593 - RNA, 14 nt, Human
uucuauaauuuaaa

SEQ ID NO: 1620594 - RNA, 21 nt, Human
uucucacugccaugccagcuu

SEQ ID NO: 1620595 - RNA, 21 nt, Human
uucuaaguaaaaccacagcag

SEQ ID NO: 1620596 - RNA, 13 nt, Human
uucucagaaucuc

SEQ ID NO: 1620597 - RNA, 13 nt, Human
uucucagcuccca

SEQ ID NO: 1620598 - RNA, 14 nt, Human
aucaggccaggccc

SEQ ID NO: 1620599 - RNA, 13 nt, Human
aucaggccaggcc

SEQ ID NO: 1620600 - RNA, 19 nt, Human
aucagacuaugaaguuuuu

SEQ ID NO: 1620601 - RNA, 20 nt, Human
aucaaauaugcaaagcacug

SEQ ID NO: 1620602 - RNA, 16 nt, Human
auauuuuuauauuuac

SEQ ID NO: 1620603 - RNA, 20 nt, Human
aucaaccccuucgcuccugu

SEQ ID NO: 1620604 - RNA, 19 nt, Human
aucaaccccuucgcuccug

SEQ ID NO: 1620605 - RNA, 22 nt, Human
aucaaccccuucgcuccugugu

SEQ ID NO: 1620606 - RNA, 14 nt, Human
aucaaguuauuuuu

SEQ ID NO: 1620607 - RNA, 23 nt, Human
aucaaguuggcuucuaaucaaag

SEQ ID NO: 1620608 - RNA, 22 nt, Human
aucaaguuggcuucuaaucaaa

SEQ ID NO: 1620609 - RNA, 17 nt, Human
auauuuucauucuccua

SEQ ID NO: 1620610 - RNA, 20 nt, Human
uuccuucaaagcaaaugucu

SEQ ID NO: 1620611 - RNA, 12 nt, Human
uuccucuccacu

SEQ ID NO: 1620612 - RNA, 16 nt, Human
uuccucuccacugccu

SEQ ID NO: 1620613 - RNA, 15 nt, Human
uuccucuccacugcc

SEQ ID NO: 1620614 - RNA, 14 nt, Human
uuccucuccacugc

SEQ ID NO: 1620615 - RNA, 13 nt, Human
uuccucuccacug

SEQ ID NO: 1620616 - RNA, 20 nt, Human
uucccuuuuuuggcugcuga

SEQ ID NO: 1620617 - RNA, 19 nt, Human
uucccuuuuuuggcugcug

SEQ ID NO: 1620618 - RNA, 18 nt, Human
uucccuuuuuuggcugcu

SEQ ID NO: 1620619 - RNA, 15 nt, Human
uucccuauuagagaa

SEQ ID NO: 1620620 - RNA, 17 nt, Human
uucccuacuuccuguga

SEQ ID NO: 1620621 - RNA, 16 nt, Human
uucccuacuuccugug

SEQ ID NO: 1620622 - RNA, 14 nt, Human
uucccuacuuccug

SEQ ID NO: 1620623 - RNA, 22 nt, Human
uuccccuuccuaauuccacagc

SEQ ID NO: 1620624 - RNA, 17 nt, Human
uuccccuguucacucua

SEQ ID NO: 1620625 - RNA, 14 nt, Human
uuccccuguucacu

SEQ ID NO: 1620626 - RNA, 20 nt, Human
auauuuuacauaaauuuagu

SEQ ID NO: 1620627 - RNA, 16 nt, Human
auauuuuacauaaauu

SEQ ID NO: 1620628 - RNA, 15 nt, Human
auauuuuacauaaau

SEQ ID NO: 1620629 - RNA, 19 nt, Human
uuguucuggcucuuccagg

SEQ ID NO: 1620630 - RNA, 17 nt, Human
uuguguguuuauuguca

SEQ ID NO: 1620631 - RNA, 22 nt, Human
uuguucuggcucuuccaggcug

SEQ ID NO: 1620632 - RNA, 20 nt, Human
uuguucuggcucuuccaggc

SEQ ID NO: 1620633 - RNA, 23 nt, Human
uugugugaaagguacuucaaauc

SEQ ID NO: 1620634 - RNA, 19 nt, Human
uuguguaaauacaauuuug

SEQ ID NO: 1620635 - RNA, 13 nt, Human
uugugguuaaucu

SEQ ID NO: 1620636 - RNA, 23 nt, Human
augagagacacacugaagaagca

SEQ ID NO: 1620637 - RNA, 21 nt, Human
augagagacacacugaagaag

SEQ ID NO: 1620638 - RNA, 20 nt, Human
augagagacacacugaagaa

SEQ ID NO: 1620639 - RNA, 21 nt, Human
uugugaggaagccgcuggggc

SEQ ID NO: 1620640 - RNA, 19 nt, Human
uugugauacaaugcugugc

SEQ ID NO: 1620641 - RNA, 18 nt, Human
uugugauacaaugcugug

SEQ ID NO: 1620642 - RNA, 22 nt, Human
augauuaugaauuacauuugua

SEQ ID NO: 1620643 - RNA, 21 nt, Human
augauuaaccacuucagcuga

SEQ ID NO: 1620644 - RNA, 20 nt, Human
augauuaaccacuucagcug

SEQ ID NO: 1620645 - RNA, 19 nt, Human
augauuaaccacuucagcu

SEQ ID NO: 1620646 - RNA, 15 nt, Human
uuguugucugcaacu

SEQ ID NO: 1620647 - RNA, 12 nt, Human
augauucccagc

SEQ ID NO: 1620648 - RNA, 17 nt, Human
augauuucagcucacug

SEQ ID NO: 1620649 - RNA, 21 nt, Human
augauucaacagguuuuccug

SEQ ID NO: 1620650 - RNA, 21 nt, Human
augauucaaaugucuauaaac

SEQ ID NO: 1620651 - RNA, 12 nt, Human
augcacuuuguu

SEQ ID NO: 1620652 - RNA, 14 nt, Human
augcaccagcccuu

SEQ ID NO: 1620653 - RNA, 13 nt, Human
augcaccagcccu

SEQ ID NO: 1620654 - RNA, 19 nt, Human
augauuucagcucacugca

SEQ ID NO: 1620655 - RNA, 16 nt, Human
augauuucuaugcuga

SEQ ID NO: 1620656 - RNA, 13 nt, Human
augauuucuaugc

SEQ ID NO: 1620657 - RNA, 12 nt, Human
augauuucuaug

SEQ ID NO: 1620658 - RNA, 15 nt, Human
augcaaagcacugac

SEQ ID NO: 1620659 - RNA, 14 nt, Human
uuguuuucauuauc

SEQ ID NO: 1620660 - RNA, 15 nt, Human
uuguuuuacugucuu

SEQ ID NO: 1620661 - RNA, 14 nt, Human
uuuaaauguuuuuu

SEQ ID NO: 1620662 - RNA, 16 nt, Human
uuguuuucaguguaca

SEQ ID NO: 1620663 - RNA, 13 nt, Human
uuguuuucagugu

SEQ ID NO: 1620664 - RNA, 15 nt, Human
augcacuuuguucug

SEQ ID NO: 1620665 - RNA, 16 nt, Human
augcacuuuguucugg

SEQ ID NO: 1620666 - RNA, 17 nt, Human
uuuaagugcugcauuua

SEQ ID NO: 1620667 - RNA, 19 nt, Human
uuuaagugcugcauuuaaa

SEQ ID NO: 1620668 - RNA, 15 nt, Human
uuuaagugcugcauu

SEQ ID NO: 1620669 - RNA, 16 nt, Human
uuuaagugcugcauuu

SEQ ID NO: 1620670 - RNA, 12 nt, Human
uuuaauuuuaca

SEQ ID NO: 1620671 - RNA, 17 nt, Human
augcaguucugaagaag

SEQ ID NO: 1620672 - RNA, 15 nt, Human
augcaguucugaaga

SEQ ID NO: 1620673 - RNA, 13 nt, Human
augcagccucaca

SEQ ID NO: 1620674 - RNA, 19 nt, Human
uuuaauuuuuuugagacag

SEQ ID NO: 1620675 - RNA, 17 nt, Human
uuuaauuuuggaauuuu

SEQ ID NO: 1620676 - RNA, 15 nt, Human
uuuaauuuuggaauu

SEQ ID NO: 1620677 - RNA, 14 nt, Human
uuuaauuuuggaau

SEQ ID NO: 1620678 - RNA, 15 nt, Human
augcagccucacagu

SEQ ID NO: 1620679 - RNA, 14 nt, Human
augcagccucacag

SEQ ID NO: 1620680 - RNA, 17 nt, Human
augcagccucacagucc

SEQ ID NO: 1620681 - RNA, 17 nt, Human
augccacuaaauugaca

SEQ ID NO: 1620682 - RNA, 15 nt, Human
augccacuaaauuga

SEQ ID NO: 1620683 - RNA, 11 nt, Human
augcccagccc

SEQ ID NO: 1620684 - RNA, 19 nt, Human
augcaguucugaagaagau

SEQ ID NO: 1620685 - RNA, 18 nt, Human
augcaguucugaagaaga

SEQ ID NO: 1620686 - RNA, 17 nt, Human
auggaauacucuuauau

SEQ ID NO: 1620687 - RNA, 16 nt, Human
auggaagacagcucuu

SEQ ID NO: 1620688 - RNA, 16 nt, Human
auggaauacucuuaua

SEQ ID NO: 1620689 - RNA, 14 nt, Human
uuucacugcuggcu

SEQ ID NO: 1620690 - RNA, 18 nt, Human
uuucacugcuggcugccu

SEQ ID NO: 1620691 - RNA, 17 nt, Human
uuucacugcuggcugcc

SEQ ID NO: 1620692 - RNA, 22 nt, Human
uuucacugcuggcugccuuaga

SEQ ID NO: 1620693 - RNA, 20 nt, Human
uuucacugcuggcugccuua

SEQ ID NO: 1620694 - RNA, 14 nt, Human
auggacaugaucuu

SEQ ID NO: 1620695 - RNA, 19 nt, Human
auggacaugaucuucuuua

SEQ ID NO: 1620696 - RNA, 20 nt, Human
auggcuaguaucaaaagaaa

SEQ ID NO: 1620697 - RNA, 20 nt, Human
auggccuuugcuugaaagaa

SEQ ID NO: 1620698 - RNA, 21 nt, Human
auggccgggcgcgguggcuca

SEQ ID NO: 1620699 - RNA, 16 nt, Human
auggccagguggccac

SEQ ID NO: 1620700 - RNA, 22 nt, Human
auggccagguggccacuccaga

SEQ ID NO: 1620701 - RNA, 23 nt, Human
auggacguguuaugacuccagaa

SEQ ID NO: 1620702 - RNA, 18 nt, Human
auggauuuccagccaaag

SEQ ID NO: 1620703 - RNA, 20 nt, Human
auggacguguuaugacucca

SEQ ID NO: 1620704 - RNA, 19 nt, Human
auggacguguuaugacucc

SEQ ID NO: 1620705 - RNA, 19 nt, Human
auggacuaacuugucuuug

SEQ ID NO: 1620706 - RNA, 17 nt, Human
auggcacaucagcacga

SEQ ID NO: 1620707 - RNA, 23 nt, Human
auggcacaucagcacgauuucug

SEQ ID NO: 1620708 - RNA, 22 nt, Human
auggcacaaucucggcucacug

SEQ ID NO: 1620709 - RNA, 19 nt, Human
auggcaaggacugcaggga

SEQ ID NO: 1620710 - RNA, 15 nt, Human
augcuagaacucccu

SEQ ID NO: 1620711 - RNA, 23 nt, Human
uuuauuacaguauaauuaacaug

SEQ ID NO: 1620712 - RNA, 19 nt, Human
augcuagaacucccuuuca

SEQ ID NO: 1620713 - RNA, 16 nt, Human
augcuagaacucccuu

SEQ ID NO: 1620714 - RNA, 16 nt, Human
uuuauuacuguaagaa

SEQ ID NO: 1620715 - RNA, 22 nt, Human
augcuguaacuuucugaaauaa

SEQ ID NO: 1620716 - RNA, 15 nt, Human
augcucugcauguua

SEQ ID NO: 1620717 - RNA, 22 nt, Human
augcugucuacacuaagagaga

SEQ ID NO: 1620718 - RNA, 23 nt, Human
augcugucccuuacgugaguccu

SEQ ID NO: 1620719 - RNA, 19 nt, Human
augcugucccuuacgugag

SEQ ID NO: 1620720 - RNA, 15 nt, Human
auggaagacagcucu

SEQ ID NO: 1620721 - RNA, 16 nt, Human
auggaacacucugaga

SEQ ID NO: 1620722 - RNA, 15 nt, Human
auggaacacucugag

SEQ ID NO: 1620723 - RNA, 14 nt, Human
auggaacacucuga

SEQ ID NO: 1620724 - RNA, 11 nt, Human
auggaacacuc

SEQ ID NO: 1620725 - RNA, 13 nt, Human
uuuauauaagcuu

SEQ ID NO: 1620726 - RNA, 24 nt, Human
uuuauggcuuuugugcauuaucua

SEQ ID NO: 1620727 - RNA, 22 nt, Human
uuuauuacaguauaauuaacau

SEQ ID NO: 1620728 - RNA, 20 nt, Human
uuuagcuggaaaaguauguu

SEQ ID NO: 1620729 - RNA, 18 nt, Human
augccccgucccccucug

SEQ ID NO: 1620730 - RNA, 22 nt, Human
uuuagcuggaaaaguauguuag

SEQ ID NO: 1620731 - RNA, 16 nt, Human
uuuaguaucuuuuuau

SEQ ID NO: 1620732 - RNA, 14 nt, Human
uuuagucuugucuc

SEQ ID NO: 1620733 - RNA, 21 nt, Human
aucucauuuccaagcaaguau

SEQ ID NO: 1620734 - RNA, 23 nt, Human
aucucauuuccaagcaaguauua

SEQ ID NO: 1620735 - RNA, 13 nt, Human
aucuccaaaauaa

SEQ ID NO: 1620736 - RNA, 13 nt, Human
aucucccccagcc

SEQ ID NO: 1620737 - RNA, 12 nt, Human
aucucccccagc

SEQ ID NO: 1620738 - RNA, 14 nt, Human
aucucccccagccc

SEQ ID NO: 1620739 - RNA, 16 nt, Human
aucuccccaucauugg

SEQ ID NO: 1620740 - RNA, 13 nt, Human
aucucaauauuuc

SEQ ID NO: 1620741 - RNA, 15 nt, Human
aucucacacaugagc

SEQ ID NO: 1620742 - RNA, 16 nt, Human
aucucacacaugagca

SEQ ID NO: 1620743 - RNA, 17 nt, Human
aucucaccuccugcugg

SEQ ID NO: 1620744 - RNA, 19 nt, Human
auccuaguuccaccaucaa

SEQ ID NO: 1620745 - RNA, 15 nt, Human
auccuaguuccacca

SEQ ID NO: 1620746 - RNA, 14 nt, Human
aucucagggccugg

SEQ ID NO: 1620747 - RNA, 21 nt, Human
aucucaccuccugcugggcag

SEQ ID NO: 1620748 - RNA, 20 nt, Human
aucucaccuccugcugggca

SEQ ID NO: 1620749 - RNA, 11 nt, Human
aucucagccca

SEQ ID NO: 1620750 - RNA, 14 nt, Human
uugauucagacagc

SEQ ID NO: 1620751 - RNA, 19 nt, Human
uugauggugguauguuuuc

SEQ ID NO: 1620752 - RNA, 23 nt, Human
uugauggugaugaaauguaaaua

SEQ ID NO: 1620753 - RNA, 18 nt, Human
uugauggugguauguuuu

SEQ ID NO: 1620754 - RNA, 15 nt, Human
uugaugggauuuggu

SEQ ID NO: 1620755 - RNA, 12 nt, Human
uugaugccuggc

SEQ ID NO: 1620756 - RNA, 19 nt, Human
aucucuucuggguuccuuc

SEQ ID NO: 1620757 - RNA, 16 nt, Human
uugauucagacagcug

SEQ ID NO: 1620758 - RNA, 15 nt, Human
uugauucagacagcu

SEQ ID NO: 1620759 - RNA, 12 nt, Human
uugcaugaggcu

SEQ ID NO: 1620760 - RNA, 14 nt, Human
uugcaccacugcac

SEQ ID NO: 1620761 - RNA, 14 nt, Human
uugcaucugaaaau

SEQ ID NO: 1620762 - RNA, 13 nt, Human
uugcccuguuaaa

SEQ ID NO: 1620763 - RNA, 13 nt, Human
uugccgucuaccu

SEQ ID NO: 1620764 - RNA, 18 nt, Human
uugccgucuaccugaggg

SEQ ID NO: 1620765 - RNA, 15 nt, Human
uugccgucuaccuga

SEQ ID NO: 1620766 - RNA, 19 nt, Human
uugccgucuaccugagggg

SEQ ID NO: 1620767 - RNA, 14 nt, Human
uugccguuauuaaa

SEQ ID NO: 1620768 - RNA, 22 nt, Human
uugccuaaauccauuuggaaau

SEQ ID NO: 1620769 - RNA, 15 nt, Human
uugccuaaauccauu

SEQ ID NO: 1620770 - RNA, 14 nt, Human
uugccuaaauccau

SEQ ID NO: 1620771 - RNA, 13 nt, Human
uugccuaaaucca

SEQ ID NO: 1620772 - RNA, 18 nt, Human
aucugaugcaagcaagaa

SEQ ID NO: 1620773 - RNA, 21 nt, Human
aucugaggaauucuguauaga

SEQ ID NO: 1620774 - RNA, 20 nt, Human
aucugaggaauucuguauag

SEQ ID NO: 1620775 - RNA, 18 nt, Human
aucugaggaauucuguau

SEQ ID NO: 1620776 - RNA, 17 nt, Human
aucugaggaauucugua

SEQ ID NO: 1620777 - RNA, 16 nt, Human
aucugaggaauucugu

SEQ ID NO: 1620778 - RNA, 15 nt, Human
aucugaggaauucug

SEQ ID NO: 1620779 - RNA, 19 nt, Human
aucuggguucacugcaacc

SEQ ID NO: 1620780 - RNA, 20 nt, Human
aucugccuaaggacuucuuu

SEQ ID NO: 1620781 - RNA, 19 nt, Human
aucugccuaaggacuucuu

SEQ ID NO: 1620782 - RNA, 18 nt, Human
aucugccuaaggacuucu

SEQ ID NO: 1620783 - RNA, 13 nt, Human
aucugccuaagga

SEQ ID NO: 1620784 - RNA, 17 nt, Human
aucugccuaaggacuuc

SEQ ID NO: 1620785 - RNA, 16 nt, Human
aucugccuaaggacuu

SEQ ID NO: 1620786 - RNA, 15 nt, Human
aucugccuaaggacu

SEQ ID NO: 1620787 - RNA, 14 nt, Human
aucugccuaaggac

SEQ ID NO: 1620788 - RNA, 19 nt, Human
aucugugaacuugaaauuu

SEQ ID NO: 1620789 - RNA, 18 nt, Human
aucugugaacuugaaauu

SEQ ID NO: 1620790 - RNA, 17 nt, Human
aucugugaacuugaaau

SEQ ID NO: 1620791 - RNA, 13 nt, Human
aucugugaacuug

SEQ ID NO: 1620792 - RNA, 19 nt, Human
aucuugcucugcugacaga

SEQ ID NO: 1620793 - RNA, 18 nt, Human
aucuugaauuguaaggaa

SEQ ID NO: 1620794 - RNA, 15 nt, Human
augaaagcagggacu

SEQ ID NO: 1620795 - RNA, 12 nt, Human
augaaagauuca

SEQ ID NO: 1620796 - RNA, 13 nt, Human
aucuuuuucuaac

SEQ ID NO: 1620797 - RNA, 13 nt, Human
aucuuuuuauuca

SEQ ID NO: 1620798 - RNA, 13 nt, Human
uuggcugcaggga

SEQ ID NO: 1620799 - RNA, 22 nt, Human
aucuuuaauuuuacauuuccua

SEQ ID NO: 1620800 - RNA, 21 nt, Human
aucuuuaauuuuacauuuccu

SEQ ID NO: 1620801 - RNA, 16 nt, Human
aucuuuaauuuuacau

SEQ ID NO: 1620802 - RNA, 21 nt, Human
uuggauaauaaggaaaaguuu

SEQ ID NO: 1620803 - RNA, 19 nt, Human
uuggauaauaaggaaaagu

SEQ ID NO: 1620804 - RNA, 15 nt, Human
uuggauaauaaggaa

SEQ ID NO: 1620805 - RNA, 23 nt, Human
uuggcgcugccccuggcagcccc

SEQ ID NO: 1620806 - RNA, 18 nt, Human
uuggcuagagguucaaag

SEQ ID NO: 1620807 - RNA, 15 nt, Human
augaauuaaguuuuu

SEQ ID NO: 1620808 - RNA, 14 nt, Human
uuggggauauuuuu

SEQ ID NO: 1620809 - RNA, 13 nt, Human
uuggggauucuua

SEQ ID NO: 1620810 - RNA, 18 nt, Human
uugggccccagaggcugg

SEQ ID NO: 1620811 - RNA, 22 nt, Human
uuggggggcugaggugggagga

SEQ ID NO: 1620812 - RNA, 15 nt, Human
uuggggauucuuaaa

SEQ ID NO: 1620813 - RNA, 18 nt, Human
augaaauauuauguuaaa

SEQ ID NO: 1620814 - RNA, 15 nt, Human
augaaagggcccaga

SEQ ID NO: 1620815 - RNA, 17 nt, Human
augaaauauuauguuaa

SEQ ID NO: 1620816 - RNA, 13 nt, Human
augaaauauuaug

SEQ ID NO: 1620817 - RNA, 15 nt, Human
augaagauacugaaa

SEQ ID NO: 1620818 - RNA, 13 nt, Human
augaaugaauggc

SEQ ID NO: 1620819 - RNA, 18 nt, Human
augaagauguagaggaga

SEQ ID NO: 1620820 - RNA, 17 nt, Human
augaagauacugaaaua

SEQ ID NO: 1620821 - RNA, 16 nt, Human
augaagauacugaaau

SEQ ID NO: 1620822 - RNA, 20 nt, Human
augaaugucagugugacuga

SEQ ID NO: 1620823 - RNA, 19 nt, Human
augagagacacacugaaga

SEQ ID NO: 1620824 - RNA, 17 nt, Human
augagagacacacugaa

SEQ ID NO: 1620825 - RNA, 14 nt, Human
augagagacacacu

SEQ ID NO: 1620826 - RNA, 13 nt, Human
augagagacacac

SEQ ID NO: 1620827 - RNA, 22 nt, Human
augagaaagguugaagcaccaa

SEQ ID NO: 1620828 - RNA, 21 nt, Human
augagaaagguugaagcacca

SEQ ID NO: 1620829 - RNA, 18 nt, Human
augagaaaucuaaaaaac

SEQ ID NO: 1620830 - RNA, 15 nt, Human
augagaaaucuaaaa

SEQ ID NO: 1620831 - RNA, 23 nt, Human
augagaaaucuaaaaaacgaaaa

SEQ ID NO: 1620832 - RNA, 16 nt, Human
augacuuacuguacau

SEQ ID NO: 1620833 - RNA, 17 nt, Human
augacuuacuguacaug

SEQ ID NO: 1620834 - RNA, 18 nt, Human
augacacgaauauugcug

SEQ ID NO: 1620835 - RNA, 22 nt, Human
augacuuaagcacacuugacau

SEQ ID NO: 1620836 - RNA, 14 nt, Human
augacuuacuguac

SEQ ID NO: 1620837 - RNA, 16 nt, Human
uuguaucacaaaucuu

SEQ ID NO: 1620838 - RNA, 14 nt, Human
augacacaugcaag

SEQ ID NO: 1620839 - RNA, 22 nt, Human
augacacaugcaaggucauuuu

SEQ ID NO: 1620840 - RNA, 23 nt, Human
uuguaguguuggagaagaacuga

SEQ ID NO: 1620841 - RNA, 17 nt, Human
uuguauaaaauaauuuu

SEQ ID NO: 1620842 - RNA, 15 nt, Human
uuguauaaaauaauu

SEQ ID NO: 1620843 - RNA, 16 nt, Human
uuguauaaaauaauuu

SEQ ID NO: 1620844 - RNA, 22 nt, Human
uuguacaaaguauuaagcauau

SEQ ID NO: 1620845 - RNA, 21 nt, Human
uuguacaaaguauuaagcaua

SEQ ID NO: 1620846 - RNA, 20 nt, Human
uuguacaaaguauuaagcau

SEQ ID NO: 1620847 - RNA, 17 nt, Human
uuguacaaaguauuaag

SEQ ID NO: 1620848 - RNA, 15 nt, Human
uuguacaaaguauua

SEQ ID NO: 1620849 - RNA, 14 nt, Human
uuguacaaaguauu

SEQ ID NO: 1620850 - RNA, 13 nt, Human
uuguacaaaguau

SEQ ID NO: 1620851 - RNA, 19 nt, Human
caaagugcugggauuacaa

SEQ ID NO: 1620852 - RNA, 21 nt, Human
caaaguucccuacuuccugug

SEQ ID NO: 1620853 - RNA, 20 nt, Human
caaaguucccuacuuccugu

SEQ ID NO: 1620854 - RNA, 23 nt, Human
caaagugcugggauuacaagcgu

SEQ ID NO: 1620855 - RNA, 18 nt, Human
caaagugcugggauuaca

SEQ ID NO: 1620856 - RNA, 14 nt, Human
caaauguucaucaa

SEQ ID NO: 1620857 - RNA, 18 nt, Human
caaauguucaucaaugaa

SEQ ID NO: 1620858 - RNA, 20 nt, Human
caaauguucaucaaugaaug

SEQ ID NO: 1620859 - RNA, 23 nt, Human
caaauggaaaugggcagagcaga

SEQ ID NO: 1620860 - RNA, 12 nt, Human
caaauaugcaaa

SEQ ID NO: 1620861 - RNA, 23 nt, Human
caaauauauucagccuggcuuca

SEQ ID NO: 1620862 - RNA, 13 nt, Human
caaauaugcaaag

SEQ ID NO: 1620863 - RNA, 14 nt, Human
caaauaugcaaagc

SEQ ID NO: 1620864 - RNA, 15 nt, Human
caaauuucuaaaucu

SEQ ID NO: 1620865 - RNA, 22 nt, Human
caaauuucuaaaucuccaaaau

SEQ ID NO: 1620866 - RNA, 19 nt, Human
caacauacucccaucugug

SEQ ID NO: 1620867 - RNA, 17 nt, Human
caacauacucccaucug

SEQ ID NO: 1620868 - RNA, 12 nt, Human
caacaggcuggg

SEQ ID NO: 1620869 - RNA, 23 nt, Human
caacagcuggugcccugcuuuca

SEQ ID NO: 1620870 - RNA, 16 nt, Human
caaccuucuguggcuc

SEQ ID NO: 1620871 - RNA, 16 nt, Human
caaccuggucacagga

SEQ ID NO: 1620872 - RNA, 20 nt, Human
caaccuucuguggcucacag

SEQ ID NO: 1620873 - RNA, 19 nt, Human
caaccuucuguggcucaca

SEQ ID NO: 1620874 - RNA, 17 nt, Human
caaccuucuguggcuca

SEQ ID NO: 1620875 - RNA, 20 nt, Human
caacauacucccaucuguga

SEQ ID NO: 1620876 - RNA, 18 nt, Human
caaccugcucuccucuug

SEQ ID NO: 1620877 - RNA, 23 nt, Human
caaccugcucuccucuugccacu

SEQ ID NO: 1620878 - RNA, 21 nt, Human
caaccugcucuccucuugcca

SEQ ID NO: 1620879 - RNA, 19 nt, Human
caagaaaugaaagcaggga

SEQ ID NO: 1620880 - RNA, 17 nt, Human
caagaaaugaaagcagg

SEQ ID NO: 1620881 - RNA, 13 nt, Human
caagaagcccagg

SEQ ID NO: 1620882 - RNA, 14 nt, Human
caagaagcccagga

SEQ ID NO: 1620883 - RNA, 16 nt, Human
caacuuguaaaugugg

SEQ ID NO: 1620884 - RNA, 12 nt, Human
caacuugggaac

SEQ ID NO: 1620885 - RNA, 13 nt, Human
caagagcccaggc

SEQ ID NO: 1620886 - RNA, 17 nt, Human
caagagcuuaacagugu

SEQ ID NO: 1620887 - RNA, 15 nt, Human
caagacgcugugcug

SEQ ID NO: 1620888 - RNA, 13 nt, Human
caagacgcugugc

SEQ ID NO: 1620889 - RNA, 23 nt, Human
caagaccuucuccuucaccuuug

SEQ ID NO: 1620890 - RNA, 21 nt, Human
caagaccuucuccuucaccuu

SEQ ID NO: 1620891 - RNA, 23 nt, Human
caagggaauuucuucaacucccu

SEQ ID NO: 1620892 - RNA, 16 nt, Human
caaaauaaaacuuuuu

SEQ ID NO: 1620893 - RNA, 20 nt, Human
caaaauaaaacuuuuuaaaa

SEQ ID NO: 1620894 - RNA, 21 nt, Human
caaaaucgaugcagugcuucc

SEQ ID NO: 1620895 - RNA, 18 nt, Human
caaaacugcacugucaag

SEQ ID NO: 1620896 - RNA, 17 nt, Human
caaaacugcacugucaa

SEQ ID NO: 1620897 - RNA, 14 nt, Human
caaaacugcacugu

SEQ ID NO: 1620898 - RNA, 19 nt, Human
caaaacucuccucugcugc

SEQ ID NO: 1620899 - RNA, 14 nt, Human
caaaaguuucucuu

SEQ ID NO: 1620900 - RNA, 16 nt, Human
caaaacucuccucugc

SEQ ID NO: 1620901 - RNA, 15 nt, Human
caaaacucuccucug

SEQ ID NO: 1620902 - RNA, 21 nt, Human
caaaacgguuuuacugcagcu

SEQ ID NO: 1620903 - RNA, 15 nt, Human
caaaacgguuuuacu

SEQ ID NO: 1620904 - RNA, 18 nt, Human
auuuuauuuuauuaugca

SEQ ID NO: 1620905 - RNA, 16 nt, Human
caaacugacucuuaag

SEQ ID NO: 1620906 - RNA, 21 nt, Human
caaacucuugaccucagguga

SEQ ID NO: 1620907 - RNA, 21 nt, Human
caaacugacucuuaagaagac

SEQ ID NO: 1620908 - RNA, 17 nt, Human
caaacugacucuuaaga

SEQ ID NO: 1620909 - RNA, 20 nt, Human
caaacucuugaccucaggug

SEQ ID NO: 1620910 - RNA, 19 nt, Human
caaacucuugaccucaggu

SEQ ID NO: 1620911 - RNA, 17 nt, Human
caaacucuugaccucag

SEQ ID NO: 1620912 - RNA, 22 nt, Human
caaaaugaaacgcaaccaccac

SEQ ID NO: 1620913 - RNA, 11 nt, Human
caaaaugaaac

SEQ ID NO: 1620914 - RNA, 21 nt, Human
caaaaugagcccuguccugcc

SEQ ID NO: 1620915 - RNA, 15 nt, Human
caaacagaggccgcc

SEQ ID NO: 1620916 - RNA, 13 nt, Human
caaacagaggccg

SEQ ID NO: 1620917 - RNA, 13 nt, Human
caacaggcugggc

SEQ ID NO: 1620918 - RNA, 18 nt, Human
caauaauaauaccucccu

SEQ ID NO: 1620919 - RNA, 19 nt, Human
caauagucaaauuguguga

SEQ ID NO: 1620920 - RNA, 17 nt, Human
caauagucaaauugugu

SEQ ID NO: 1620921 - RNA, 17 nt, Human
caauaggaaaaacugau

SEQ ID NO: 1620922 - RNA, 16 nt, Human
caauaggaaaaacuga

SEQ ID NO: 1620923 - RNA, 15 nt, Human
caauaggaaaaacug

SEQ ID NO: 1620924 - RNA, 21 nt, Human
caagggugaugggaaagcauu

SEQ ID NO: 1620925 - RNA, 18 nt, Human
caaggcugggggaagaag

SEQ ID NO: 1620926 - RNA, 23 nt, Human
caagggugaugggaaagcauugu

SEQ ID NO: 1620927 - RNA, 18 nt, Human
caaggaaaaaauaacaau

SEQ ID NO: 1620928 - RNA, 23 nt, Human
caagcuggucccacucaguccau

SEQ ID NO: 1620929 - RNA, 22 nt, Human
caagcuggucccacucagucca

SEQ ID NO: 1620930 - RNA, 20 nt, Human
caaggaaaaaauaacaauga

SEQ ID NO: 1620931 - RNA, 22 nt, Human
caaggcugcagugagccgagau

SEQ ID NO: 1620932 - RNA, 17 nt, Human
caaggcugcagugagcc

SEQ ID NO: 1620933 - RNA, 20 nt, Human
caaggauccugagccagauu

SEQ ID NO: 1620934 - RNA, 22 nt, Human
caaggauccugagccagauuuc

SEQ ID NO: 1620935 - RNA, 14 nt, Human
caaggagccaaaca

SEQ ID NO: 1620936 - RNA, 19 nt, Human
caaggauccugagccagau

SEQ ID NO: 1620937 - RNA, 18 nt, Human
caaggauccugagccaga

SEQ ID NO: 1620938 - RNA, 16 nt, Human
caaggagauuuacaac

SEQ ID NO: 1620939 - RNA, 21 nt, Human
caagcugcacccucaggcagg

SEQ ID NO: 1620940 - RNA, 18 nt, Human
caagcgauucuucugcuu

SEQ ID NO: 1620941 - RNA, 17 nt, Human
caagcgauucuucugcu

SEQ ID NO: 1620942 - RNA, 15 nt, Human
caagcgauucuucug

SEQ ID NO: 1620943 - RNA, 21 nt, Human
caagcuggucccacucagucc

SEQ ID NO: 1620944 - RNA, 22 nt, Human
caagcugcacccucaggcaggu

SEQ ID NO: 1620945 - RNA, 18 nt, Human
caauaggaaaaacugauu

SEQ ID NO: 1620946 - RNA, 14 nt, Human
cacacugaagaagc

SEQ ID NO: 1620947 - RNA, 13 nt, Human
cacacugaagaag

SEQ ID NO: 1620948 - RNA, 14 nt, Human
cacacuccagcugg

SEQ ID NO: 1620949 - RNA, 21 nt, Human
cacagagaaaguacuucucca

SEQ ID NO: 1620950 - RNA, 20 nt, Human
cacagagaaaguacuucucc

SEQ ID NO: 1620951 - RNA, 19 nt, Human
cacagagaaaguacuucuc

SEQ ID NO: 1620952 - RNA, 13 nt, Human
cacagaggcugcc

SEQ ID NO: 1620953 - RNA, 22 nt, Human
cacagaguuguuacauuuuuaa

SEQ ID NO: 1620954 - RNA, 19 nt, Human
cacagcaguugaaaagacu

SEQ ID NO: 1620955 - RNA, 22 nt, Human
cacagauuugagcucagcccug

SEQ ID NO: 1620956 - RNA, 18 nt, Human
cacagauuugagcucagc

SEQ ID NO: 1620957 - RNA, 17 nt, Human
cacagauuugagcucag

SEQ ID NO: 1620958 - RNA, 16 nt, Human
cacagauuugagcuca

SEQ ID NO: 1620959 - RNA, 21 nt, Human
cacagcaguugaaaagacucc

SEQ ID NO: 1620960 - RNA, 18 nt, Human
cacagccagacuggcaca

SEQ ID NO: 1620961 - RNA, 17 nt, Human
cacagccagacuggcac

SEQ ID NO: 1620962 - RNA, 22 nt, Human
caauuuuucuuauuucauuucu

SEQ ID NO: 1620963 - RNA, 14 nt, Human
cacaaacagaggcc

SEQ ID NO: 1620964 - RNA, 15 nt, Human
cacaaacagaggccg

SEQ ID NO: 1620965 - RNA, 18 nt, Human
cacaaagcccuuccaugu

SEQ ID NO: 1620966 - RNA, 13 nt, Human
cacaaacagaggc

SEQ ID NO: 1620967 - RNA, 18 nt, Human
caauuacaggaaguacug

SEQ ID NO: 1620968 - RNA, 21 nt, Human
caauaucuuuuuuuuaauaaa

SEQ ID NO: 1620969 - RNA, 22 nt, Human
caaugugacuuaaugccacuaa

SEQ ID NO: 1620970 - RNA, 22 nt, Human
caaugugaaaagaaaaaugagc

SEQ ID NO: 1620971 - RNA, 18 nt, Human
cacaagaaaugaaagcag

SEQ ID NO: 1620972 - RNA, 13 nt, Human
cacaaaggagagc

SEQ ID NO: 1620973 - RNA, 21 nt, Human
cacaagaaaugaaagcaggga

SEQ ID NO: 1620974 - RNA, 20 nt, Human
cacaagaaaugaaagcaggg

SEQ ID NO: 1620975 - RNA, 17 nt, Human
cacaaagguagcuuuuc

SEQ ID NO: 1620976 - RNA, 17 nt, Human
cacacacgcgugcacac

SEQ ID NO: 1620977 - RNA, 17 nt, Human
cacaguucaauucucau

SEQ ID NO: 1620978 - RNA, 19 nt, Human
cacagugcaucucagccca

SEQ ID NO: 1620979 - RNA, 18 nt, Human
cacagugcaucucagccc

SEQ ID NO: 1620980 - RNA, 22 nt, Human
cacaggcccuuccucuccacug

SEQ ID NO: 1620981 - RNA, 21 nt, Human
cacaggcccuuccucuccacu

SEQ ID NO: 1620982 - RNA, 12 nt, Human
cacagcugcuca

SEQ ID NO: 1620983 - RNA, 22 nt, Human
cacagcugcucaauaaaguaca

SEQ ID NO: 1620984 - RNA, 13 nt, Human
cacaggaaaccag

SEQ ID NO: 1620985 - RNA, 19 nt, Human
cacaggcccuuccucucca

SEQ ID NO: 1620986 - RNA, 18 nt, Human
cacaggcccuuccucucc

SEQ ID NO: 1620987 - RNA, 17 nt, Human
cacaggcccuuccucuc

SEQ ID NO: 1620988 - RNA, 16 nt, Human
cacaggcccuuccucu

SEQ ID NO: 1620989 - RNA, 12 nt, Human
cauauuuucaug

SEQ ID NO: 1620990 - RNA, 18 nt, Human
caucaaugaaugaaugaa

SEQ ID NO: 1620991 - RNA, 22 nt, Human
caucaagucuuucacauuuaaa

SEQ ID NO: 1620992 - RNA, 14 nt, Human
caucaagaugugac

SEQ ID NO: 1620993 - RNA, 14 nt, Human
cauauuuacuucuu

SEQ ID NO: 1620994 - RNA, 13 nt, Human
cauaugccugggc

SEQ ID NO: 1620995 - RNA, 17 nt, Human
cauauuuacuucuuaua

SEQ ID NO: 1620996 - RNA, 16 nt, Human
cauauuuacuucuuau

SEQ ID NO: 1620997 - RNA, 20 nt, Human
cauauuuacuucuuauacau

SEQ ID NO: 1620998 - RNA, 12 nt, Human
cauauuuauaaa

SEQ ID NO: 1620999 - RNA, 17 nt, Human
cauauuuauaaaaauaa

SEQ ID NO: 1621000 - RNA, 21 nt, Human
cauagagagcaagacgcugug

SEQ ID NO: 1621001 - RNA, 19 nt, Human
cauagagagcaagacgcug

SEQ ID NO: 1621002 - RNA, 23 nt, Human
cauagagagcaagacgcugugcu

SEQ ID NO: 1621003 - RNA, 20 nt, Human
cauagaauaaaauuuuuaau

SEQ ID NO: 1621004 - RNA, 14 nt, Human
cauagaauaaaauu

SEQ ID NO: 1621005 - RNA, 20 nt, Human
cauacucccaucugugaaag

SEQ ID NO: 1621006 - RNA, 18 nt, Human
cauacucccaucugugaa

SEQ ID NO: 1621007 - RNA, 15 nt, Human
cauacucccaucugu

SEQ ID NO: 1621008 - RNA, 16 nt, Human
cauacucccaucugug

SEQ ID NO: 1621009 - RNA, 11 nt, Human
cauacucugcu

SEQ ID NO: 1621010 - RNA, 19 nt, Human
cauaguaugguggcugggu

SEQ ID NO: 1621011 - RNA, 18 nt, Human
cauaguaugguggcuggg

SEQ ID NO: 1621012 - RNA, 20 nt, Human
cauaguaugguggcuggguu

SEQ ID NO: 1621013 - RNA, 22 nt, Human
cauaguggcuuaaaacaacacu

SEQ ID NO: 1621014 - RNA, 22 nt, Human
cauauauauguuuuaagaggca

SEQ ID NO: 1621015 - RNA, 23 nt, Human
cauauauauguuuuaagaggcag

SEQ ID NO: 1621016 - RNA, 21 nt, Human
cauaugauguacauguacuga

SEQ ID NO: 1621017 - RNA, 17 nt, Human
cauaugauguacaugua

SEQ ID NO: 1621018 - RNA, 15 nt, Human
cauaugauguacaug

SEQ ID NO: 1621019 - RNA, 20 nt, Human
caucccucccuccaccuccc

SEQ ID NO: 1621020 - RNA, 14 nt, Human
caucccucccucca

SEQ ID NO: 1621021 - RNA, 19 nt, Human
caucccucuggggcuguuc

SEQ ID NO: 1621022 - RNA, 13 nt, Human
caucccugaaggc

SEQ ID NO: 1621023 - RNA, 11 nt, Human
caucccugaag

SEQ ID NO: 1621024 - RNA, 12 nt, Human
caucccucccuc

SEQ ID NO: 1621025 - RNA, 13 nt, Human
caucccucccucc

SEQ ID NO: 1621026 - RNA, 17 nt, Human
cauccagguucagcuug

SEQ ID NO: 1621027 - RNA, 15 nt, Human
cauccagguucagcu

SEQ ID NO: 1621028 - RNA, 21 nt, Human
caucauugaaaucuuuuugcu

SEQ ID NO: 1621029 - RNA, 20 nt, Human
caucauugaaaucuuuuugc

SEQ ID NO: 1621030 - RNA, 15 nt, Human
caucauugaaaucuu

SEQ ID NO: 1621031 - RNA, 14 nt, Human
caucauugaaaucu

SEQ ID NO: 1621032 - RNA, 15 nt, Human
caucaccaacgucug

SEQ ID NO: 1621033 - RNA, 13 nt, Human
caucauugaaauc

SEQ ID NO: 1621034 - RNA, 17 nt, Human
cauccuacaagacacag

SEQ ID NO: 1621035 - RNA, 21 nt, Human
caucccugaaggccccgccca

SEQ ID NO: 1621036 - RNA, 19 nt, Human
caucccugaaggccccgcc

SEQ ID NO: 1621037 - RNA, 18 nt, Human
caucccugaaggccccgc

SEQ ID NO: 1621038 - RNA, 17 nt, Human
caucccugaaggccccg

SEQ ID NO: 1621039 - RNA, 22 nt, Human
caucccugaaggccccgcccag

SEQ ID NO: 1621040 - RNA, 14 nt, Human
cauccuaacuccau

SEQ ID NO: 1621041 - RNA, 21 nt, Human
cauccuaacuccaugucucug

SEQ ID NO: 1621042 - RNA, 22 nt, Human
caucuagugagcagucaggaaa

SEQ ID NO: 1621043 - RNA, 17 nt, Human
caucucacacaugagca

SEQ ID NO: 1621044 - RNA, 16 nt, Human
caucucacacaugagc

SEQ ID NO: 1621045 - RNA, 20 nt, Human
caucucacacaugagcauca

SEQ ID NO: 1621046 - RNA, 18 nt, Human
caucucaccuccugcugg

SEQ ID NO: 1621047 - RNA, 17 nt, Human
caucucaccuccugcug

SEQ ID NO: 1621048 - RNA, 16 nt, Human
caucucaccuccugcu

SEQ ID NO: 1621049 - RNA, 13 nt, Human
caucucagcccac

SEQ ID NO: 1621050 - RNA, 14 nt, Human
caucuagugagcag

SEQ ID NO: 1621051 - RNA, 18 nt, Human
caucuagguaaauuacag

SEQ ID NO: 1621052 - RNA, 17 nt, Human
caucuagguaaauuaca

SEQ ID NO: 1621053 - RNA, 15 nt, Human
caucuacccuccgau

SEQ ID NO: 1621054 - RNA, 12 nt, Human
caucuaggauuu

SEQ ID NO: 1621055 - RNA, 18 nt, Human
cauccucuguacagagcc

SEQ ID NO: 1621056 - RNA, 15 nt, Human
cauccucuguacaga

SEQ ID NO: 1621057 - RNA, 19 nt, Human
cauccucuguacagagccc

SEQ ID NO: 1621058 - RNA, 21 nt, Human
cauccucuguacagagcccac

SEQ ID NO: 1621059 - RNA, 19 nt, Human
cauccuccucagaucuucu

SEQ ID NO: 1621060 - RNA, 18 nt, Human
cauccuccucagaucuuc

SEQ ID NO: 1621061 - RNA, 16 nt, Human
cauccuccucagaucu

SEQ ID NO: 1621062 - RNA, 15 nt, Human
cauccuccucagauc

SEQ ID NO: 1621063 - RNA, 12 nt, Human
cauccuccucag

SEQ ID NO: 1621064 - RNA, 11 nt, Human
cauccuccuca

SEQ ID NO: 1621065 - RNA, 20 nt, Human
cauccuccgccucccggguu

SEQ ID NO: 1621066 - RNA, 22 nt, Human
cauccucauacccacccccacc

SEQ ID NO: 1621067 - RNA, 21 nt, Human
cauccucauacccacccccac

SEQ ID NO: 1621068 - RNA, 18 nt, Human
cauccucauacccacccc

SEQ ID NO: 1621069 - RNA, 17 nt, Human
cauccucauacccaccc

SEQ ID NO: 1621070 - RNA, 13 nt, Human
cauccucccaagg

SEQ ID NO: 1621071 - RNA, 16 nt, Human
cauccucauacccacc

SEQ ID NO: 1621072 - RNA, 15 nt, Human
cauccucauacccac

SEQ ID NO: 1621073 - RNA, 16 nt, Human
cauccuacaagacaca

SEQ ID NO: 1621074 - RNA, 20 nt, Human
caucuugcucugcugacaga

SEQ ID NO: 1621075 - RNA, 14 nt, Human
caucuugcucugcu

SEQ ID NO: 1621076 - RNA, 15 nt, Human
caucuugcucugcug

SEQ ID NO: 1621077 - RNA, 13 nt, Human
caucuugcucugc

SEQ ID NO: 1621078 - RNA, 22 nt, Human
caucucuucuggguuccuuccu

SEQ ID NO: 1621079 - RNA, 14 nt, Human
caucuccacuccag

SEQ ID NO: 1621080 - RNA, 22 nt, Human
caucuuccaaggguacuaagga

SEQ ID NO: 1621081 - RNA, 16 nt, Human
caucucuuguuuaaau

SEQ ID NO: 1621082 - RNA, 19 nt, Human
cauaaucuggacuccucug

SEQ ID NO: 1621083 - RNA, 17 nt, Human
cauaccaacacgagcag

SEQ ID NO: 1621084 - RNA, 15 nt, Human
cauaauacuugcuuu

SEQ ID NO: 1621085 - RNA, 13 nt, Human
cauaccacuuuug

SEQ ID NO: 1621086 - RNA, 14 nt, Human
cauaccacuuuugu

SEQ ID NO: 1621087 - RNA, 15 nt, Human
cauaccacuuuuguu

SEQ ID NO: 1621088 - RNA, 18 nt, Human
cauaccacuuuuguucuu

SEQ ID NO: 1621089 - RNA, 12 nt, Human
cauacccacccc

SEQ ID NO: 1621090 - RNA, 11 nt, Human
cauacccaccc

SEQ ID NO: 1621091 - RNA, 19 nt, Human
cauaccacuuuuguucuug

SEQ ID NO: 1621092 - RNA, 14 nt, Human
cauaagauaaaugu

SEQ ID NO: 1621093 - RNA, 21 nt, Human
cauaaaaauuagccaagugug

SEQ ID NO: 1621094 - RNA, 22 nt, Human
cauaaacaagaccacguuucua

SEQ ID NO: 1621095 - RNA, 20 nt, Human
cauaaacaagaccacguuuc

SEQ ID NO: 1621096 - RNA, 21 nt, Human
cauaaacaagaccacguuucu

SEQ ID NO: 1621097 - RNA, 16 nt, Human
cauaaagcaggcagaa

SEQ ID NO: 1621098 - RNA, 14 nt, Human
cauaaagcaggcag

SEQ ID NO: 1621099 - RNA, 16 nt, Human
cauaaccuagccuuag

SEQ ID NO: 1621100 - RNA, 21 nt, Human
cauaacauaaaucugugaacu

SEQ ID NO: 1621101 - RNA, 20 nt, Human
cauaaauuuaguauuuuguu

SEQ ID NO: 1621102 - RNA, 19 nt, Human
cauaaauuuaguauuuugu

SEQ ID NO: 1621103 - RNA, 19 nt, Human
cauaacauaaaucugugaa

SEQ ID NO: 1621104 - RNA, 12 nt, Human
cauaacauaaau

SEQ ID NO: 1621105 - RNA, 14 nt, Human
cauaaaucugugaa

SEQ ID NO: 1621106 - RNA, 23 nt, Human
cauaaaucugugaacuugaaauu

SEQ ID NO: 1621107 - RNA, 22 nt, Human
cauaaaucugugaacuugaaau

SEQ ID NO: 1621108 - RNA, 18 nt, Human
cauaaaucugugaacuug

SEQ ID NO: 1621109 - RNA, 16 nt, Human
cauaaaucugugaacu

SEQ ID NO: 1621110 - RNA, 20 nt, Human
caguuuucugagaaagacua

SEQ ID NO: 1621111 - RNA, 19 nt, Human
caguuuucugagaaagacu

SEQ ID NO: 1621112 - RNA, 18 nt, Human
caguuguuagugugucuu

SEQ ID NO: 1621113 - RNA, 21 nt, Human
caguuuuguuuggaccaaaaa

SEQ ID NO: 1621114 - RNA, 15 nt, Human
caguuuucugagaaa

SEQ ID NO: 1621115 - RNA, 14 nt, Human
caguuuucugagaa

SEQ ID NO: 1621116 - RNA, 17 nt, Human
caguuguuagugugucu

SEQ ID NO: 1621117 - RNA, 22 nt, Human
caguuggucccccuuccaugga

SEQ ID NO: 1621118 - RNA, 21 nt, Human
caguuggucccccuuccaugg

SEQ ID NO: 1621119 - RNA, 20 nt, Human
caguuggucccccuuccaug

SEQ ID NO: 1621120 - RNA, 19 nt, Human
caguuggucccccuuccau

SEQ ID NO: 1621121 - RNA, 18 nt, Human
caguuggucccccuucca

SEQ ID NO: 1621122 - RNA, 19 nt, Human
caguuggguggaugccugg

SEQ ID NO: 1621123 - RNA, 18 nt, Human
caguuggguggaugccug

SEQ ID NO: 1621124 - RNA, 23 nt, Human
caguugccagucaccccggccac

SEQ ID NO: 1621125 - RNA, 16 nt, Human
caguuggguggaugcc

SEQ ID NO: 1621126 - RNA, 14 nt, Human
caguugaaaagacu

SEQ ID NO: 1621127 - RNA, 18 nt, Human
caguugaaaagacuccaa

SEQ ID NO: 1621128 - RNA, 22 nt, Human
caguugaaaagacuccaaagaa

SEQ ID NO: 1621129 - RNA, 21 nt, Human
caguugaaaagacuccaaaga

SEQ ID NO: 1621130 - RNA, 23 nt, Human
caguugaaaagacuccaaagaaa

SEQ ID NO: 1621131 - RNA, 21 nt, Human
cauacccacccccacccaagg

SEQ ID NO: 1621132 - RNA, 18 nt, Human
cauacccacccccaccca

SEQ ID NO: 1621133 - RNA, 17 nt, Human
cauacccacccccaccc

SEQ ID NO: 1621134 - RNA, 14 nt, Human
cauacccaccccca

SEQ ID NO: 1621135 - RNA, 13 nt, Human
cauacguacacau

SEQ ID NO: 1621136 - RNA, 15 nt, Human
cauacguacacauuu

SEQ ID NO: 1621137 - RNA, 16 nt, Human
cauacguacacauuuu

SEQ ID NO: 1621138 - RNA, 17 nt, Human
cauacguacacauuuua

SEQ ID NO: 1621139 - RNA, 18 nt, Human
cauacguacacauuuuau

SEQ ID NO: 1621140 - RNA, 14 nt, Human
cauacuaaccagca

SEQ ID NO: 1621141 - RNA, 21 nt, Human
cauacuaaccagcagaaaugc

SEQ ID NO: 1621142 - RNA, 20 nt, Human
cauacuaauuauacccccug

SEQ ID NO: 1621143 - RNA, 12 nt, Human
cagugugacuga

SEQ ID NO: 1621144 - RNA, 14 nt, Human
cagugugacaagga

SEQ ID NO: 1621145 - RNA, 14 nt, Human
cagugucaaugcag

SEQ ID NO: 1621146 - RNA, 23 nt, Human
caguguacauggaauaacaugua

SEQ ID NO: 1621147 - RNA, 20 nt, Human
caguguacauggaauaacau

SEQ ID NO: 1621148 - RNA, 16 nt, Human
caguguacauggaaua

SEQ ID NO: 1621149 - RNA, 22 nt, Human
cagugguuccuaauccucuagg

SEQ ID NO: 1621150 - RNA, 16 nt, Human
cagugggacagggcau

SEQ ID NO: 1621151 - RNA, 11 nt, Human
cagugggaacu

SEQ ID NO: 1621152 - RNA, 16 nt, Human
caguggcagcugcuuu

SEQ ID NO: 1621153 - RNA, 15 nt, Human
caguggcagcugcuu

SEQ ID NO: 1621154 - RNA, 14 nt, Human
caguggcagcugcu

SEQ ID NO: 1621155 - RNA, 13 nt, Human
caguggcagcugc

SEQ ID NO: 1621156 - RNA, 12 nt, Human
caguggcagcug

SEQ ID NO: 1621157 - RNA, 22 nt, Human
caguucggugagcuacaaaugc

SEQ ID NO: 1621158 - RNA, 15 nt, Human
caguucucuccuucu

SEQ ID NO: 1621159 - RNA, 14 nt, Human
caguucucuccuuc

SEQ ID NO: 1621160 - RNA, 13 nt, Human
caguucucuccuu

SEQ ID NO: 1621161 - RNA, 12 nt, Human
caguucugaaga

SEQ ID NO: 1621162 - RNA, 22 nt, Human
caguucucuccuucuucccccc

SEQ ID NO: 1621163 - RNA, 14 nt, Human
caguucugaagaag

SEQ ID NO: 1621164 - RNA, 13 nt, Human
caguucugaagaa

SEQ ID NO: 1621165 - RNA, 22 nt, Human
caguucugaagaagaugguacc

SEQ ID NO: 1621166 - RNA, 16 nt, Human
caguucugaagaagau

SEQ ID NO: 1621167 - RNA, 15 nt, Human
caguucugaagaaga

SEQ ID NO: 1621168 - RNA, 19 nt, Human
caguugaaaaacagcugag

SEQ ID NO: 1621169 - RNA, 18 nt, Human
caguugaaaaacagcuga

SEQ ID NO: 1621170 - RNA, 12 nt, Human
caguugaaaaac

SEQ ID NO: 1621171 - RNA, 21 nt, Human
caguuaccucugccucagaaa

SEQ ID NO: 1621172 - RNA, 14 nt, Human
caguuacucagaau

SEQ ID NO: 1621173 - RNA, 14 nt, Human
caguuaagagaaau

SEQ ID NO: 1621174 - RNA, 13 nt, Human
caguuaagagaaa

SEQ ID NO: 1621175 - RNA, 17 nt, Human
caguuaagccuuuggaa

SEQ ID NO: 1621176 - RNA, 15 nt, Human
caguuaagccuuugg

SEQ ID NO: 1621177 - RNA, 14 nt, Human
caguuaagccuuug

SEQ ID NO: 1621178 - RNA, 20 nt, Human
caguuaagccuuuggaaaca

SEQ ID NO: 1621179 - RNA, 19 nt, Human
caguguuguggauuuaaca

SEQ ID NO: 1621180 - RNA, 20 nt, Human
caguguuguggauuuaacag

SEQ ID NO: 1621181 - RNA, 22 nt, Human
caguguuguggauuuaacagaa

SEQ ID NO: 1621182 - RNA, 17 nt, Human
caugggacagggaggac

SEQ ID NO: 1621183 - RNA, 22 nt, Human
caugggaaugaaugucagugug

SEQ ID NO: 1621184 - RNA, 23 nt, Human
caugggacagggaggacgcucuc

SEQ ID NO: 1621185 - RNA, 15 nt, Human
caugggccuccugug

SEQ ID NO: 1621186 - RNA, 17 nt, Human
caugggccuccugugug

SEQ ID NO: 1621187 - RNA, 16 nt, Human
caugggccuccugugu

SEQ ID NO: 1621188 - RNA, 17 nt, Human
cauggagguuugaagau

SEQ ID NO: 1621189 - RNA, 13 nt, Human
cauggacuuuguu

SEQ ID NO: 1621190 - RNA, 11 nt, Human
cauggacuuug

SEQ ID NO: 1621191 - RNA, 18 nt, Human
caugggaaugaaugucag

SEQ ID NO: 1621192 - RNA, 16 nt, Human
cauggaguauauguca

SEQ ID NO: 1621193 - RNA, 23 nt, Human
caugcugucuacacuaagagaga

SEQ ID NO: 1621194 - RNA, 22 nt, Human
caugcugucccuuacgugaguc

SEQ ID NO: 1621195 - RNA, 20 nt, Human
caugcuguucaugaaagauu

SEQ ID NO: 1621196 - RNA, 23 nt, Human
caugccuggauggggcugcaccg

SEQ ID NO: 1621197 - RNA, 21 nt, Human
caugccuggauggggcugcac

SEQ ID NO: 1621198 - RNA, 18 nt, Human
caugccuggauggggcug

SEQ ID NO: 1621199 - RNA, 22 nt, Human
cauggaaguacuauaauuuacc

SEQ ID NO: 1621200 - RNA, 20 nt, Human
cauggaaguacuauaauuua

SEQ ID NO: 1621201 - RNA, 23 nt, Human
cauggaacgcguugaaauuguaa

SEQ ID NO: 1621202 - RNA, 20 nt, Human
cauggaacgcguugaaauug

SEQ ID NO: 1621203 - RNA, 19 nt, Human
cauggaacgcguugaaauu

SEQ ID NO: 1621204 - RNA, 18 nt, Human
cauggaacgcguugaaau

SEQ ID NO: 1621205 - RNA, 18 nt, Human
cauggacaugaucuucuu

SEQ ID NO: 1621206 - RNA, 16 nt, Human
cauggaauaacaugua

SEQ ID NO: 1621207 - RNA, 13 nt, Human
caugccuggaugg

SEQ ID NO: 1621208 - RNA, 19 nt, Human
caugccucucucaggccaa

SEQ ID NO: 1621209 - RNA, 18 nt, Human
caugccucucucaggcca

SEQ ID NO: 1621210 - RNA, 17 nt, Human
caugccucucucaggcc

SEQ ID NO: 1621211 - RNA, 16 nt, Human
caugccucucucaggc

SEQ ID NO: 1621212 - RNA, 15 nt, Human
caugccucucucagg

SEQ ID NO: 1621213 - RNA, 14 nt, Human
caugccucucucag

SEQ ID NO: 1621214 - RNA, 13 nt, Human
caugccccugaac

SEQ ID NO: 1621215 - RNA, 20 nt, Human
caugccagcuuaucucaggg

SEQ ID NO: 1621216 - RNA, 19 nt, Human
caugccagcuuaucucagg

SEQ ID NO: 1621217 - RNA, 18 nt, Human
cauguuuuucuucucccu

SEQ ID NO: 1621218 - RNA, 15 nt, Human
cauguuuuguuuacg

SEQ ID NO: 1621219 - RNA, 21 nt, Human
cauuaaagccugaguuugcuu

SEQ ID NO: 1621220 - RNA, 11 nt, Human
cauuauuuuau

SEQ ID NO: 1621221 - RNA, 18 nt, Human
cauuagcaguuugcuuug

SEQ ID NO: 1621222 - RNA, 17 nt, Human
cauuagcaguuugcuuu

SEQ ID NO: 1621223 - RNA, 22 nt, Human
caugugccagguuuuuggucug

SEQ ID NO: 1621224 - RNA, 21 nt, Human
caugugccagguuuuuggucu

SEQ ID NO: 1621225 - RNA, 15 nt, Human
caugugcacaugcac

SEQ ID NO: 1621226 - RNA, 23 nt, Human
cauguuugauguaucugagcagg

SEQ ID NO: 1621227 - RNA, 22 nt, Human
cauguuucuuuguaaugaaaac

SEQ ID NO: 1621228 - RNA, 21 nt, Human
cauguuucuuuguaaugaaaa

SEQ ID NO: 1621229 - RNA, 22 nt, Human
cauguuuauuacaguauaauua

SEQ ID NO: 1621230 - RNA, 20 nt, Human
cauguuuauuacaguauaau

SEQ ID NO: 1621231 - RNA, 19 nt, Human
cauguuuauuacaguauaa

SEQ ID NO: 1621232 - RNA, 18 nt, Human
cauguuuauuacaguaua

SEQ ID NO: 1621233 - RNA, 13 nt, Human
cauguuuauuaca

SEQ ID NO: 1621234 - RNA, 12 nt, Human
cauguuuauuac

SEQ ID NO: 1621235 - RNA, 16 nt, Human
cauggucggaaaacau

SEQ ID NO: 1621236 - RNA, 21 nt, Human
cauguaauuaaguacuaugua

SEQ ID NO: 1621237 - RNA, 18 nt, Human
cauguaauuaaguacuau

SEQ ID NO: 1621238 - RNA, 15 nt, Human
caugucgccucugca

SEQ ID NO: 1621239 - RNA, 14 nt, Human
caugucgccucugc

SEQ ID NO: 1621240 - RNA, 20 nt, Human
caugucgccucugcauucag

SEQ ID NO: 1621241 - RNA, 18 nt, Human
caugucgccucugcauuc

SEQ ID NO: 1621242 - RNA, 23 nt, Human
caugucuuuucuugcaugaggcu

SEQ ID NO: 1621243 - RNA, 21 nt, Human
caugucuuuucuugcaugagg

SEQ ID NO: 1621244 - RNA, 19 nt, Human
caugucuuuucuugcauga

SEQ ID NO: 1621245 - RNA, 14 nt, Human
caugucuuuucuug

SEQ ID NO: 1621246 - RNA, 17 nt, Human
caugugaaaucauucau

SEQ ID NO: 1621247 - RNA, 16 nt, Human
caugugaaaucauuca

SEQ ID NO: 1621248 - RNA, 15 nt, Human
caugugaaaucauuc

SEQ ID NO: 1621249 - RNA, 20 nt, Human
ccaauauucauagcagcuua

SEQ ID NO: 1621250 - RNA, 16 nt, Human
ccaaguggcucccaca

SEQ ID NO: 1621251 - RNA, 13 nt, Human
ccaaguggcuccc

SEQ ID NO: 1621252 - RNA, 19 nt, Human
ccaaggcugauuaaaccaa

SEQ ID NO: 1621253 - RNA, 16 nt, Human
ccaaggcucugagcaa

SEQ ID NO: 1621254 - RNA, 14 nt, Human
ccaaggcuggggga

SEQ ID NO: 1621255 - RNA, 22 nt, Human
ccacaagaaaugaaagcaggga

SEQ ID NO: 1621256 - RNA, 16 nt, Human
ccacaagaaaugaaag

SEQ ID NO: 1621257 - RNA, 13 nt, Human
ccacaagagccca

SEQ ID NO: 1621258 - RNA, 16 nt, Human
ccacaagacccuugug

SEQ ID NO: 1621259 - RNA, 18 nt, Human
ccacaaaggagagcuagc

SEQ ID NO: 1621260 - RNA, 13 nt, Human
ccacaacacacag

SEQ ID NO: 1621261 - RNA, 18 nt, Human
ccaaggcuagaaccaccu

SEQ ID NO: 1621262 - RNA, 14 nt, Human
ccaagcuccaucuc

SEQ ID NO: 1621263 - RNA, 13 nt, Human
ccaagcucccagg

SEQ ID NO: 1621264 - RNA, 12 nt, Human
ccaagcucccag

SEQ ID NO: 1621265 - RNA, 23 nt, Human
ccaagccguggcuucccgcucag

SEQ ID NO: 1621266 - RNA, 14 nt, Human
ccaagcaggacaug

SEQ ID NO: 1621267 - RNA, 21 nt, Human
ccaagccguggcuucccgcuc

SEQ ID NO: 1621268 - RNA, 17 nt, Human
ccaagccguggcuuccc

SEQ ID NO: 1621269 - RNA, 16 nt, Human
ccaagccguggcuucc

SEQ ID NO: 1621270 - RNA, 15 nt, Human
ccaagccguggcuuc

SEQ ID NO: 1621271 - RNA, 20 nt, Human
ccacaaguuaaauaaaucau

SEQ ID NO: 1621272 - RNA, 15 nt, Human
ccacaaguuaaauaa

SEQ ID NO: 1621273 - RNA, 19 nt, Human
ccacaagagcccaggccuc

SEQ ID NO: 1621274 - RNA, 18 nt, Human
ccacaagagcccaggccu

SEQ ID NO: 1621275 - RNA, 17 nt, Human
ccacaagagcccaggcc

SEQ ID NO: 1621276 - RNA, 16 nt, Human
ccacaagagcccaggc

SEQ ID NO: 1621277 - RNA, 21 nt, Human
ccacaagagcccaggccuccu

SEQ ID NO: 1621278 - RNA, 20 nt, Human
ccacaagagcccaggccucc

SEQ ID NO: 1621279 - RNA, 14 nt, Human
ccaacacgagcagg

SEQ ID NO: 1621280 - RNA, 19 nt, Human
ccaaagcagugcaugcugu

SEQ ID NO: 1621281 - RNA, 22 nt, Human
ccaaauucuuucaguggcuacc

SEQ ID NO: 1621282 - RNA, 15 nt, Human
ccaaauucuuucagu

SEQ ID NO: 1621283 - RNA, 21 nt, Human
ccaacacgagcaggcuacugu

SEQ ID NO: 1621284 - RNA, 14 nt, Human
ccaacauacuccca

SEQ ID NO: 1621285 - RNA, 16 nt, Human
ccaacauacucccauc

SEQ ID NO: 1621286 - RNA, 16 nt, Human
ccaacaucaacaucuu

SEQ ID NO: 1621287 - RNA, 15 nt, Human
ccaacccucaucacc

SEQ ID NO: 1621288 - RNA, 13 nt, Human
ccaacccucauca

SEQ ID NO: 1621289 - RNA, 18 nt, Human
ccaacccuggcacccagg

SEQ ID NO: 1621290 - RNA, 15 nt, Human
ccaagaccuucuccu

SEQ ID NO: 1621291 - RNA, 14 nt, Human
ccaaagaugcagcc

SEQ ID NO: 1621292 - RNA, 13 nt, Human
ccaaagaugcagc

SEQ ID NO: 1621293 - RNA, 17 nt, Human
ccaaagaaauguaaggg

SEQ ID NO: 1621294 - RNA, 17 nt, Human
ccaaacucaccugcccc

SEQ ID NO: 1621295 - RNA, 18 nt, Human
ccaaaauaaaacuuuuua

SEQ ID NO: 1621296 - RNA, 21 nt, Human
ccaaaauaaaacuuuuuaaaa

SEQ ID NO: 1621297 - RNA, 20 nt, Human
cauuuuuaguagagacaggg

SEQ ID NO: 1621298 - RNA, 16 nt, Human
cauuugcucauggaau

SEQ ID NO: 1621299 - RNA, 22 nt, Human
cauuugaggucuguucuuucca

SEQ ID NO: 1621300 - RNA, 14 nt, Human
cauuugcucaugga

SEQ ID NO: 1621301 - RNA, 15 nt, Human
cauuugcucauggaa

SEQ ID NO: 1621302 - RNA, 22 nt, Human
cauuuuauuuuauuaugcauga

SEQ ID NO: 1621303 - RNA, 21 nt, Human
cauuuuauuuuauuaugcaug

SEQ ID NO: 1621304 - RNA, 19 nt, Human
cauuuuauuuuauuaugca

SEQ ID NO: 1621305 - RNA, 24 nt, Human
cauuuugcuaaaugugaaugauga

SEQ ID NO: 1621306 - RNA, 21 nt, Human
cauuuugcuaaaugugaauga

SEQ ID NO: 1621307 - RNA, 18 nt, Human
cauuuugcuaaaugugaa

SEQ ID NO: 1621308 - RNA, 22 nt, Human
cauuuugggguacccacugcuc

SEQ ID NO: 1621309 - RNA, 21 nt, Human
cauuuugggguacccacugcu

SEQ ID NO: 1621310 - RNA, 20 nt, Human
cauuuugggguacccacugc

SEQ ID NO: 1621311 - RNA, 15 nt, Human
cauuuuuaagugcug

SEQ ID NO: 1621312 - RNA, 20 nt, Human
cauuuuuaagugcugcauuu

SEQ ID NO: 1621313 - RNA, 19 nt, Human
cauuuuuaguagagacagg

SEQ ID NO: 1621314 - RNA, 23 nt, Human
cauuuugggguacccacugcucu

SEQ ID NO: 1621315 - RNA, 23 nt, Human
cauuucuuccacaagagcccagg

SEQ ID NO: 1621316 - RNA, 14 nt, Human
cauuugagcagggc

SEQ ID NO: 1621317 - RNA, 16 nt, Human
cauuugagcagggcuc

SEQ ID NO: 1621318 - RNA, 17 nt, Human
cauuugaggucuguucu

SEQ ID NO: 1621319 - RNA, 18 nt, Human
cauuugaggucuguucuu

SEQ ID NO: 1621320 - RNA, 19 nt, Human
cauuugaggucuguucuuu

SEQ ID NO: 1621321 - RNA, 19 nt, Human
cauuuaaagcuuauuaaaa

SEQ ID NO: 1621322 - RNA, 21 nt, Human
cauuuacuuuguguucaccuu

SEQ ID NO: 1621323 - RNA, 17 nt, Human
cauuuacuuuguguuca

SEQ ID NO: 1621324 - RNA, 23 nt, Human
cauuucugcaucagcugcugaaa

SEQ ID NO: 1621325 - RNA, 21 nt, Human
cauuucuuccacaagagccca

SEQ ID NO: 1621326 - RNA, 15 nt, Human
cauuuccuaaauaua

SEQ ID NO: 1621327 - RNA, 19 nt, Human
cauugaaaucuuuuugcuu

SEQ ID NO: 1621328 - RNA, 16 nt, Human
cauuauuuuauuauga

SEQ ID NO: 1621329 - RNA, 14 nt, Human
cauuauuuuauuau

SEQ ID NO: 1621330 - RNA, 12 nt, Human
cauuauuuuauu

SEQ ID NO: 1621331 - RNA, 22 nt, Human
cauugaccugaggcccuucucu

SEQ ID NO: 1621332 - RNA, 13 nt, Human
cauugaccugagg

SEQ ID NO: 1621333 - RNA, 17 nt, Human
cauuauuuuauuaugaa

SEQ ID NO: 1621334 - RNA, 15 nt, Human
ccauccugaggcucc

SEQ ID NO: 1621335 - RNA, 21 nt, Human
ccauccucuguacagagccca

SEQ ID NO: 1621336 - RNA, 16 nt, Human
ccauccugaggcucca

SEQ ID NO: 1621337 - RNA, 16 nt, Human
ccaucaugucuggcua

SEQ ID NO: 1621338 - RNA, 14 nt, Human
ccaucaugucuggc

SEQ ID NO: 1621339 - RNA, 23 nt, Human
ccaucucaccuccugcugggcag

SEQ ID NO: 1621340 - RNA, 16 nt, Human
ccaucgcugucaucuc

SEQ ID NO: 1621341 - RNA, 21 nt, Human
ccaucucaccuccugcugggc

SEQ ID NO: 1621342 - RNA, 19 nt, Human
ccaucucaccuccugcugg

SEQ ID NO: 1621343 - RNA, 19 nt, Human
ccauauucuguuggccagu

SEQ ID NO: 1621344 - RNA, 18 nt, Human
ccauauucuguuggccag

SEQ ID NO: 1621345 - RNA, 15 nt, Human
ccauauucuguuggc

SEQ ID NO: 1621346 - RNA, 23 nt, Human
ccauagagagcaagacgcugugc

SEQ ID NO: 1621347 - RNA, 12 nt, Human
ccaucacccgcu

SEQ ID NO: 1621348 - RNA, 12 nt, Human
ccaucaagccac

SEQ ID NO: 1621349 - RNA, 23 nt, Human
ccagggacagaggggguggccuc

SEQ ID NO: 1621350 - RNA, 12 nt, Human
ccaggccugccu

SEQ ID NO: 1621351 - RNA, 21 nt, Human
ccagcugugcucuggacaggc

SEQ ID NO: 1621352 - RNA, 20 nt, Human
ccagcugugcucuggacagg

SEQ ID NO: 1621353 - RNA, 18 nt, Human
ccagcugugcucuggaca

SEQ ID NO: 1621354 - RNA, 17 nt, Human
ccagcuggguuggaaaa

SEQ ID NO: 1621355 - RNA, 16 nt, Human
ccagcuggguuggaaa

SEQ ID NO: 1621356 - RNA, 15 nt, Human
ccagcugcuugggcu

SEQ ID NO: 1621357 - RNA, 18 nt, Human
ccagcugcuugggcuuca

SEQ ID NO: 1621358 - RNA, 16 nt, Human
ccagcugcuugggcuu

SEQ ID NO: 1621359 - RNA, 12 nt, Human
ccagcuggccgg

SEQ ID NO: 1621360 - RNA, 20 nt, Human
ccagcuggccgggagccuga

SEQ ID NO: 1621361 - RNA, 14 nt, Human
ccagcuggccggga

SEQ ID NO: 1621362 - RNA, 19 nt, Human
ccaggccuccuacagcuug

SEQ ID NO: 1621363 - RNA, 18 nt, Human
ccaggccuccuacagcuu

SEQ ID NO: 1621364 - RNA, 13 nt, Human
ccaggccuccuac

SEQ ID NO: 1621365 - RNA, 20 nt, Human
ccaggcccucugcccacucc

SEQ ID NO: 1621366 - RNA, 19 nt, Human
ccaggcccucugcccacuc

SEQ ID NO: 1621367 - RNA, 18 nt, Human
ccaggcccucugcccacu

SEQ ID NO: 1621368 - RNA, 17 nt, Human
ccaggcccucugcccac

SEQ ID NO: 1621369 - RNA, 23 nt, Human
ccaggccccugccacccugggga

SEQ ID NO: 1621370 - RNA, 21 nt, Human
ccaggccccugccacccuggg

SEQ ID NO: 1621371 - RNA, 21 nt, Human
ccaggccagagggagugacag

SEQ ID NO: 1621372 - RNA, 14 nt, Human
ccaggccagaggga

SEQ ID NO: 1621373 - RNA, 14 nt, Human
ccaggagcagccac

SEQ ID NO: 1621374 - RNA, 15 nt, Human
ccaggagcagccaca

SEQ ID NO: 1621375 - RNA, 13 nt, Human
ccaggagcagcca

SEQ ID NO: 1621376 - RNA, 12 nt, Human
ccaggagcagcc

SEQ ID NO: 1621377 - RNA, 19 nt, Human
ccaggaagccagcaggcuc

SEQ ID NO: 1621378 - RNA, 17 nt, Human
ccaggaagccagcaggc

SEQ ID NO: 1621379 - RNA, 15 nt, Human
ccaggaagccagcag

SEQ ID NO: 1621380 - RNA, 16 nt, Human
ccagcuguucagcugg

SEQ ID NO: 1621381 - RNA, 23 nt, Human
ccagcugugcucuggacaggcau

SEQ ID NO: 1621382 - RNA, 22 nt, Human
ccagcugugcucuggacaggca

SEQ ID NO: 1621383 - RNA, 20 nt, Human
ccaggaagccagcaggcucu

SEQ ID NO: 1621384 - RNA, 23 nt, Human
ccauggcacucuauguucuaaga

SEQ ID NO: 1621385 - RNA, 13 nt, Human
ccaugugccaggu

SEQ ID NO: 1621386 - RNA, 14 nt, Human
ccauguuggccagg

SEQ ID NO: 1621387 - RNA, 13 nt, Human
ccauguuggccag

SEQ ID NO: 1621388 - RNA, 18 nt, Human
ccaugcuccuggcccacu

SEQ ID NO: 1621389 - RNA, 15 nt, Human
ccaugcuccuggccc

SEQ ID NO: 1621390 - RNA, 17 nt, Human
ccaugcugcccugugag

SEQ ID NO: 1621391 - RNA, 16 nt, Human
ccaugcugcccuguga

SEQ ID NO: 1621392 - RNA, 14 nt, Human
ccaugcugccucca

SEQ ID NO: 1621393 - RNA, 14 nt, Human
cccacgcccccacu

SEQ ID NO: 1621394 - RNA, 13 nt, Human
cccacgcccccac

SEQ ID NO: 1621395 - RNA, 15 nt, Human
cccacgcccccacug

SEQ ID NO: 1621396 - RNA, 20 nt, Human
cccaccuuggcugcagggag

SEQ ID NO: 1621397 - RNA, 19 nt, Human
cccaccuuggcugcaggga

SEQ ID NO: 1621398 - RNA, 17 nt, Human
cccaccuuggcugcagg

SEQ ID NO: 1621399 - RNA, 16 nt, Human
cccaccuggccucugc

SEQ ID NO: 1621400 - RNA, 15 nt, Human
cccaccuggccucug

SEQ ID NO: 1621401 - RNA, 12 nt, Human
cccaccuggccu

SEQ ID NO: 1621402 - RNA, 21 nt, Human
ccauguuggccaggcuggucu

SEQ ID NO: 1621403 - RNA, 19 nt, Human
ccauguuggccaggcuggu

SEQ ID NO: 1621404 - RNA, 15 nt, Human
ccauguuggccaggc

SEQ ID NO: 1621405 - RNA, 16 nt, Human
ccauguuggccaggcu

SEQ ID NO: 1621406 - RNA, 18 nt, Human
cccagcucugguccauag

SEQ ID NO: 1621407 - RNA, 16 nt, Human
cccagcucugguccau

SEQ ID NO: 1621408 - RNA, 15 nt, Human
cccagcucuggucca

SEQ ID NO: 1621409 - RNA, 12 nt, Human
cccagcucuggu

SEQ ID NO: 1621410 - RNA, 14 nt, Human
cccagcucuggucc

SEQ ID NO: 1621411 - RNA, 13 nt, Human
cccagcucugguc

SEQ ID NO: 1621412 - RNA, 14 nt, Human
cccagcgagcccug

SEQ ID NO: 1621413 - RNA, 15 nt, Human
cccagcgagcccugg

SEQ ID NO: 1621414 - RNA, 14 nt, Human
cccaggaggccagc

SEQ ID NO: 1621415 - RNA, 18 nt, Human
cccaggagccccgaggcc

SEQ ID NO: 1621416 - RNA, 14 nt, Human
cccaggagccccga

SEQ ID NO: 1621417 - RNA, 13 nt, Human
cccaggagccccg

SEQ ID NO: 1621418 - RNA, 15 nt, Human
cccagccccauccuc

SEQ ID NO: 1621419 - RNA, 14 nt, Human
cccagccccauccu

SEQ ID NO: 1621420 - RNA, 14 nt, Human
cccagccccauccc

SEQ ID NO: 1621421 - RNA, 13 nt, Human
cccagccccaucc

SEQ ID NO: 1621422 - RNA, 19 nt, Human
cccagccccauccucugua

SEQ ID NO: 1621423 - RNA, 18 nt, Human
cccagccccauccucugu

SEQ ID NO: 1621424 - RNA, 23 nt, Human
cccagcccuccuuaucaaaggac

SEQ ID NO: 1621425 - RNA, 20 nt, Human
cccagccuccaagcuccauc

SEQ ID NO: 1621426 - RNA, 18 nt, Human
cccagccuccaagcucca

SEQ ID NO: 1621427 - RNA, 12 nt, Human
cccagccccauc

SEQ ID NO: 1621428 - RNA, 11 nt, Human
cccagccccau

SEQ ID NO: 1621429 - RNA, 17 nt, Human
cccagccccaaugaaca

SEQ ID NO: 1621430 - RNA, 13 nt, Human
cccagccccaaug

SEQ ID NO: 1621431 - RNA, 16 nt, Human
cccagaggcuggguga

SEQ ID NO: 1621432 - RNA, 18 nt, Human
cccaggaggccagccuug

SEQ ID NO: 1621433 - RNA, 22 nt, Human
cccaugagccucagcauccugg

SEQ ID NO: 1621434 - RNA, 21 nt, Human
ccccaaauggaaaugggcaga

SEQ ID NO: 1621435 - RNA, 17 nt, Human
cccaugucucgacucau

SEQ ID NO: 1621436 - RNA, 16 nt, Human
cccaugucucgacuca

SEQ ID NO: 1621437 - RNA, 12 nt, Human
cccauuauucaa

SEQ ID NO: 1621438 - RNA, 20 nt, Human
cccaugagccucagcauccu

SEQ ID NO: 1621439 - RNA, 16 nt, Human
cccaugagccucagca

SEQ ID NO: 1621440 - RNA, 15 nt, Human
cccaugagccucagc

SEQ ID NO: 1621441 - RNA, 13 nt, Human
cccaugcugcccu

SEQ ID NO: 1621442 - RNA, 12 nt, Human
cccaugcugccc

SEQ ID NO: 1621443 - RNA, 14 nt, Human
cccaugcugcccug

SEQ ID NO: 1621444 - RNA, 20 nt, Human
cccaucugugaaaggaaaga

SEQ ID NO: 1621445 - RNA, 13 nt, Human
cccaucucacaca

SEQ ID NO: 1621446 - RNA, 18 nt, Human
cccaucucacacaugagc

SEQ ID NO: 1621447 - RNA, 14 nt, Human
cccaguuagcucuc

SEQ ID NO: 1621448 - RNA, 20 nt, Human
cccagugguuccuaauccuc

SEQ ID NO: 1621449 - RNA, 17 nt, Human
cccagugccgagaagga

SEQ ID NO: 1621450 - RNA, 19 nt, Human
cccagucuggaaugcagug

SEQ ID NO: 1621451 - RNA, 18 nt, Human
cccagucuggaaugcagu

SEQ ID NO: 1621452 - RNA, 10 nt, Human
cccagucugg

SEQ ID NO: 1621453 - RNA, 21 nt, Human
cccagugcccacaggaucagu

SEQ ID NO: 1621454 - RNA, 15 nt, Human
cccagugccgagaag

SEQ ID NO: 1621455 - RNA, 15 nt, Human
cccaggcauucccca

SEQ ID NO: 1621456 - RNA, 23 nt, Human
cccaggcaggucuugaacuccug

SEQ ID NO: 1621457 - RNA, 16 nt, Human
cccaggaggccagccu

SEQ ID NO: 1621458 - RNA, 15 nt, Human
cccaggaggccagcc

SEQ ID NO: 1621459 - RNA, 18 nt, Human
cccaggcauuccccagga

SEQ ID NO: 1621460 - RNA, 17 nt, Human
cccaggcauuccccagg

SEQ ID NO: 1621461 - RNA, 19 nt, Human
cccagggugggaagggcua

SEQ ID NO: 1621462 - RNA, 13 nt, Human
cccagguuucuau

SEQ ID NO: 1621463 - RNA, 14 nt, Human
ccccaggugccagu

SEQ ID NO: 1621464 - RNA, 22 nt, Human
ccccaggugguuauggagaggg

SEQ ID NO: 1621465 - RNA, 14 nt, Human
ccccuggcagcccc

SEQ ID NO: 1621466 - RNA, 12 nt, Human
ccccuggcagcc

SEQ ID NO: 1621467 - RNA, 15 nt, Human
ccccuggcagccccu

SEQ ID NO: 1621468 - RNA, 12 nt, Human
ccccaggaggcc

SEQ ID NO: 1621469 - RNA, 15 nt, Human
ccccagccccauccu

SEQ ID NO: 1621470 - RNA, 19 nt, Human
ccccagcccuccuuaucaa

SEQ ID NO: 1621471 - RNA, 16 nt, Human
ccccagccccauccca

SEQ ID NO: 1621472 - RNA, 13 nt, Human
ccccagccugcua

SEQ ID NO: 1621473 - RNA, 22 nt, Human
ccccagcuggggccaggcuggg

SEQ ID NO: 1621474 - RNA, 21 nt, Human
ccccagcuggggccaggcugg

SEQ ID NO: 1621475 - RNA, 22 nt, Human
ccccuguccccgcacugggcuu

SEQ ID NO: 1621476 - RNA, 23 nt, Human
ccccuggcuuuucacugcuggcu

SEQ ID NO: 1621477 - RNA, 14 nt, Human
ccccuuaccacugc

SEQ ID NO: 1621478 - RNA, 20 nt, Human
ccccuguucuggcagaguug

SEQ ID NO: 1621479 - RNA, 12 nt, Human
ccccuucccccu

SEQ ID NO: 1621480 - RNA, 22 nt, Human
ccccuuccuaauuccacagcug

SEQ ID NO: 1621481 - RNA, 21 nt, Human
ccccuuccuaauuccacagcu

SEQ ID NO: 1621482 - RNA, 20 nt, Human
ccccuuccuaauuccacagc

SEQ ID NO: 1621483 - RNA, 15 nt, Human
cccgaggccuucucu

SEQ ID NO: 1621484 - RNA, 20 nt, Human
cccgaggccuucucugaagg

SEQ ID NO: 1621485 - RNA, 21 nt, Human
cccgaggccuucucugaagga

SEQ ID NO: 1621486 - RNA, 22 nt, Human
cccgcuaagagggagggagggc

SEQ ID NO: 1621487 - RNA, 19 nt, Human
cccgcucagcccucccugc

SEQ ID NO: 1621488 - RNA, 23 nt, Human
cccgcucagcccucccugccccu

SEQ ID NO: 1621489 - RNA, 20 nt, Human
cccucccuccaccucccugc

SEQ ID NO: 1621490 - RNA, 13 nt, Human
cccucccucuuuc

SEQ ID NO: 1621491 - RNA, 13 nt, Human
cccucccuccacc

SEQ ID NO: 1621492 - RNA, 12 nt, Human
cccucccuccac

SEQ ID NO: 1621493 - RNA, 14 nt, Human
cccucccuucaacc

SEQ ID NO: 1621494 - RNA, 17 nt, Human
cccuccaugugggcuag

SEQ ID NO: 1621495 - RNA, 19 nt, Human
cccuccaucuaaacugccc

SEQ ID NO: 1621496 - RNA, 20 nt, Human
cccucauccucauacccacc

SEQ ID NO: 1621497 - RNA, 17 nt, Human
cccucauccucauaccc

SEQ ID NO: 1621498 - RNA, 22 nt, Human
cccucaucaccaacgucugugc

SEQ ID NO: 1621499 - RNA, 19 nt, Human
cccucauagcccucacccu

SEQ ID NO: 1621500 - RNA, 20 nt, Human
cccucagucuggcccuuccu

SEQ ID NO: 1621501 - RNA, 21 nt, Human
cccucagggucccugguggca

SEQ ID NO: 1621502 - RNA, 15 nt, Human
cccucauagcccuca

SEQ ID NO: 1621503 - RNA, 13 nt, Human
cccucauagcccu

SEQ ID NO: 1621504 - RNA, 21 nt, Human
cccuccaagaccuucuccuuc

SEQ ID NO: 1621505 - RNA, 22 nt, Human
cccucauuccaccuucccaugc

SEQ ID NO: 1621506 - RNA, 22 nt, Human
cccucauccucauacccacccc

SEQ ID NO: 1621507 - RNA, 16 nt, Human
cccggcaggguccuag

SEQ ID NO: 1621508 - RNA, 18 nt, Human
cccggaggggccuggcag

SEQ ID NO: 1621509 - RNA, 17 nt, Human
cccggaggggccuggca

SEQ ID NO: 1621510 - RNA, 17 nt, Human
cccuaaaguguauuuuu

SEQ ID NO: 1621511 - RNA, 22 nt, Human
cccuaaaguguauuuuuuuacu

SEQ ID NO: 1621512 - RNA, 19 nt, Human
cccucagggucccuggugg

SEQ ID NO: 1621513 - RNA, 18 nt, Human
cccucagggucccuggug

SEQ ID NO: 1621514 - RNA, 17 nt, Human
cccucagggucccuggu

SEQ ID NO: 1621515 - RNA, 16 nt, Human
cccucagggucccugg

SEQ ID NO: 1621516 - RNA, 15 nt, Human
cccucagggucccug

SEQ ID NO: 1621517 - RNA, 18 nt, Human
cccuaauaaagcugugug

SEQ ID NO: 1621518 - RNA, 15 nt, Human
cccuaauaaagcugu

SEQ ID NO: 1621519 - RNA, 14 nt, Human
cccuaauaaagcug

SEQ ID NO: 1621520 - RNA, 13 nt, Human
cccuaauaaagcu

SEQ ID NO: 1621521 - RNA, 12 nt, Human
cccuaauaaagc

SEQ ID NO: 1621522 - RNA, 14 nt, Human
cccugcaauaaaau

SEQ ID NO: 1621523 - RNA, 15 nt, Human
cccugcaauaaaaug

SEQ ID NO: 1621524 - RNA, 16 nt, Human
cccugcaaccugauug

SEQ ID NO: 1621525 - RNA, 22 nt, Human
cccugcaaccugauugugucuc

SEQ ID NO: 1621526 - RNA, 18 nt, Human
cccugcagagggcacaga

SEQ ID NO: 1621527 - RNA, 20 nt, Human
cccugcagagggcacagaaa

SEQ ID NO: 1621528 - RNA, 12 nt, Human
cccugcagaggg

SEQ ID NO: 1621529 - RNA, 15 nt, Human
cccugccacccuggg

SEQ ID NO: 1621530 - RNA, 14 nt, Human
cccugccacccugg

SEQ ID NO: 1621531 - RNA, 12 nt, Human
cccugccacccu

SEQ ID NO: 1621532 - RNA, 18 nt, Human
cccugccacccuggggag

SEQ ID NO: 1621533 - RNA, 17 nt, Human
cccugccacccugggga

SEQ ID NO: 1621534 - RNA, 13 nt, Human
cccugcccaccug

SEQ ID NO: 1621535 - RNA, 23 nt, Human
cccugccuccuuugugaggaagc

SEQ ID NO: 1621536 - RNA, 16 nt, Human
cccugccuccuuugug

SEQ ID NO: 1621537 - RNA, 18 nt, Human
cccugccucucugcaggu

SEQ ID NO: 1621538 - RNA, 11 nt, Human
cccugccucuc

SEQ ID NO: 1621539 - RNA, 22 nt, Human
cccugguggcagugggagcugc

SEQ ID NO: 1621540 - RNA, 21 nt, Human
cccuggugcugccacacuuca

SEQ ID NO: 1621541 - RNA, 17 nt, Human
cccuggugcugccacac

SEQ ID NO: 1621542 - RNA, 18 nt, Human
cccugggaggcucuggag

SEQ ID NO: 1621543 - RNA, 17 nt, Human
cccugggaggcucugga

SEQ ID NO: 1621544 - RNA, 16 nt, Human
cccugggaggcucugg

SEQ ID NO: 1621545 - RNA, 20 nt, Human
cccugcugguucaggguugg

SEQ ID NO: 1621546 - RNA, 19 nt, Human
cccugcugguucaggguug

SEQ ID NO: 1621547 - RNA, 23 nt, Human
cccugcuuugggcugcccuggug

SEQ ID NO: 1621548 - RNA, 13 nt, Human
cccugcugguuca

SEQ ID NO: 1621549 - RNA, 22 nt, Human
cccugccucucugcaggucccu

SEQ ID NO: 1621550 - RNA, 21 nt, Human
cccugccucucugcagguccc

SEQ ID NO: 1621551 - RNA, 14 nt, Human
cccugguggcagcu

SEQ ID NO: 1621552 - RNA, 13 nt, Human
ccuaaacauauga

SEQ ID NO: 1621553 - RNA, 19 nt, Human
ccuaaauccauuuggaaau

SEQ ID NO: 1621554 - RNA, 16 nt, Human
ccuaaaauucagugga

SEQ ID NO: 1621555 - RNA, 19 nt, Human
ccuacagcuugaccgugag

SEQ ID NO: 1621556 - RNA, 22 nt, Human
ccuacaguugaaaaacagcuga

SEQ ID NO: 1621557 - RNA, 21 nt, Human
ccuaaauccauuuggaaaucu

SEQ ID NO: 1621558 - RNA, 20 nt, Human
ccuaaauccauuuggaaauc

SEQ ID NO: 1621559 - RNA, 13 nt, Human
ccuacccacccuc

SEQ ID NO: 1621560 - RNA, 18 nt, Human
ccuacaggagugagcacu

SEQ ID NO: 1621561 - RNA, 18 nt, Human
ccuacccacccuccuuuc

SEQ ID NO: 1621562 - RNA, 19 nt, Human
ccuacuguaauuugugaua

SEQ ID NO: 1621563 - RNA, 21 nt, Human
ccuagaaauuccccacccuga

SEQ ID NO: 1621564 - RNA, 13 nt, Human
ccuacuuccccuu

SEQ ID NO: 1621565 - RNA, 21 nt, Human
ccuacuuccccuuccuaauuc

SEQ ID NO: 1621566 - RNA, 16 nt, Human
ccuacuuccccuuccu

SEQ ID NO: 1621567 - RNA, 13 nt, Human
ccuaggugacaga

SEQ ID NO: 1621568 - RNA, 22 nt, Human
ccuagguauaauucacauugua

SEQ ID NO: 1621569 - RNA, 12 nt, Human
ccguuauuaaaa

SEQ ID NO: 1621570 - RNA, 22 nt, Human
ccgggaggcagagguugcagug

SEQ ID NO: 1621571 - RNA, 23 nt, Human
ccgggagccugaucaccugcccu

SEQ ID NO: 1621572 - RNA, 16 nt, Human
ccgggagccugaucac

SEQ ID NO: 1621573 - RNA, 17 nt, Human
ccgggaagggggcuggg

SEQ ID NO: 1621574 - RNA, 21 nt, Human
ccggaggggccuggcagccgu

SEQ ID NO: 1621575 - RNA, 17 nt, Human
ccggaggggccuggcag

SEQ ID NO: 1621576 - RNA, 17 nt, Human
cccuuggauuguccccg

SEQ ID NO: 1621577 - RNA, 19 nt, Human
cccuucuuuuucuucuuuu

SEQ ID NO: 1621578 - RNA, 11 nt, Human
cccuucuuuuu

SEQ ID NO: 1621579 - RNA, 21 nt, Human
cccuuccuaauuccacagcug

SEQ ID NO: 1621580 - RNA, 23 nt, Human
cccuugguuaggcauugugggaa

SEQ ID NO: 1621581 - RNA, 22 nt, Human
cccuugguuaggcauuguggga

SEQ ID NO: 1621582 - RNA, 22 nt, Human
cccuuguggucccaccccacac

SEQ ID NO: 1621583 - RNA, 13 nt, Human
cccuucccaccuc

SEQ ID NO: 1621584 - RNA, 12 nt, Human
cccuucccaccu

SEQ ID NO: 1621585 - RNA, 11 nt, Human
cccuucauuug

SEQ ID NO: 1621586 - RNA, 20 nt, Human
cccuuccuaauuccacagcu

SEQ ID NO: 1621587 - RNA, 19 nt, Human
cccuuccuaauuccacagc

SEQ ID NO: 1621588 - RNA, 14 nt, Human
cccuuccuaauucc

SEQ ID NO: 1621589 - RNA, 13 nt, Human
cccuuccuaauuc

SEQ ID NO: 1621590 - RNA, 13 nt, Human
cccuguucacucu

SEQ ID NO: 1621591 - RNA, 22 nt, Human
cccuguucacucuacuuagcau

SEQ ID NO: 1621592 - RNA, 14 nt, Human
cccuguucacucua

SEQ ID NO: 1621593 - RNA, 22 nt, Human
ccucaggugagaagcagaggaa

SEQ ID NO: 1621594 - RNA, 15 nt, Human
ccuaggugacagagu

SEQ ID NO: 1621595 - RNA, 18 nt, Human
ccuaggugacagagugag

SEQ ID NO: 1621596 - RNA, 23 nt, Human
ccucacaguccuuaccagcagag

SEQ ID NO: 1621597 - RNA, 24 nt, Human
ccucacaguccuuaccagcagagc

SEQ ID NO: 1621598 - RNA, 16 nt, Human
ccuauuagagaagaga

SEQ ID NO: 1621599 - RNA, 17 nt, Human
ccuauuagagaagagau

SEQ ID NO: 1621600 - RNA, 22 nt, Human
ccucagggucccugguggcagc

SEQ ID NO: 1621601 - RNA, 20 nt, Human
ccucagggucccugguggca

SEQ ID NO: 1621602 - RNA, 17 nt, Human
ccucagggucccuggug

SEQ ID NO: 1621603 - RNA, 16 nt, Human
ccucagggucccuggu

SEQ ID NO: 1621604 - RNA, 16 nt, Human
ccucagaucuucugug

SEQ ID NO: 1621605 - RNA, 14 nt, Human
ccucagcauccugg

SEQ ID NO: 1621606 - RNA, 14 nt, Human
ccucacccuggggc

SEQ ID NO: 1621607 - RNA, 16 nt, Human
ccucagagccaccccu

SEQ ID NO: 1621608 - RNA, 12 nt, Human
ccuccccuccuc

SEQ ID NO: 1621609 - RNA, 15 nt, Human
ccuccccuccuccug

SEQ ID NO: 1621610 - RNA, 13 nt, Human
ccuccccuccucu

SEQ ID NO: 1621611 - RNA, 14 nt, Human
ccuccccuccucug

SEQ ID NO: 1621612 - RNA, 18 nt, Human
ccucccgaauagcuggga

SEQ ID NO: 1621613 - RNA, 15 nt, Human
ccucccaacucaccc

SEQ ID NO: 1621614 - RNA, 12 nt, Human
ccuccuccagcc

SEQ ID NO: 1621615 - RNA, 11 nt, Human
ccuccucagau

SEQ ID NO: 1621616 - RNA, 13 nt, Human
ccucccucuuucc

SEQ ID NO: 1621617 - RNA, 20 nt, Human
ccucccgaauagcugggacu

SEQ ID NO: 1621618 - RNA, 19 nt, Human
ccucccgaauagcugggac

SEQ ID NO: 1621619 - RNA, 18 nt, Human
ccucccgaguagcuggga

SEQ ID NO: 1621620 - RNA, 17 nt, Human
ccucccgaguagcuggg

SEQ ID NO: 1621621 - RNA, 19 nt, Human
ccucccgaguagcugggac

SEQ ID NO: 1621622 - RNA, 13 nt, Human
ccuccauccugag

SEQ ID NO: 1621623 - RNA, 12 nt, Human
ccuccauccuga

SEQ ID NO: 1621624 - RNA, 14 nt, Human
ccuccauccugagg

SEQ ID NO: 1621625 - RNA, 19 nt, Human
ccuccaugcugccuccaga

SEQ ID NO: 1621626 - RNA, 14 nt, Human
ccucccaacucacc

SEQ ID NO: 1621627 - RNA, 17 nt, Human
ccucccaaagugcuggg

SEQ ID NO: 1621628 - RNA, 15 nt, Human
ccuccaugugggcua

SEQ ID NO: 1621629 - RNA, 12 nt, Human
ccuccauguggg

SEQ ID NO: 1621630 - RNA, 12 nt, Human
ccuccaggugca

SEQ ID NO: 1621631 - RNA, 11 nt, Human
ccuccaggugc

SEQ ID NO: 1621632 - RNA, 17 nt, Human
ccuccaggugcacaagc

SEQ ID NO: 1621633 - RNA, 20 nt, Human
ccucaggugagaagcagagg

SEQ ID NO: 1621634 - RNA, 18 nt, Human
ccucaggugagaagcaga

SEQ ID NO: 1621635 - RNA, 17 nt, Human
ccucaggugagaagcag

SEQ ID NO: 1621636 - RNA, 12 nt, Human
ccucauacccac

SEQ ID NO: 1621637 - RNA, 21 nt, Human
ccucccgaauagcugggacua

SEQ ID NO: 1621638 - RNA, 17 nt, Human
ccucugcacuccccugc

SEQ ID NO: 1621639 - RNA, 16 nt, Human
ccucugcacuccccug

SEQ ID NO: 1621640 - RNA, 12 nt, Human
ccucugagccuu

SEQ ID NO: 1621641 - RNA, 11 nt, Human
ccucugagccu

SEQ ID NO: 1621642 - RNA, 13 nt, Human
ccucugaggcuga

SEQ ID NO: 1621643 - RNA, 18 nt, Human
ccucugcacuccccugcu

SEQ ID NO: 1621644 - RNA, 23 nt, Human
ccucugcacuccccugcugggug

SEQ ID NO: 1621645 - RNA, 14 nt, Human
ccucugcagcaaua

SEQ ID NO: 1621646 - RNA, 18 nt, Human
ccucugcagcaauaaagc

SEQ ID NO: 1621647 - RNA, 16 nt, Human
ccucugcccacucccu

SEQ ID NO: 1621648 - RNA, 13 nt, Human
ccucugcccacuc

SEQ ID NO: 1621649 - RNA, 19 nt, Human
ccucugcacuccccugcug

SEQ ID NO: 1621650 - RNA, 19 nt, Human
ccucugcagcaauaaagca

SEQ ID NO: 1621651 - RNA, 20 nt, Human
ccucugacacacagcucugu

SEQ ID NO: 1621652 - RNA, 19 nt, Human
ccucugacacacagcucug

SEQ ID NO: 1621653 - RNA, 14 nt, Human
ccucugacacacag

SEQ ID NO: 1621654 - RNA, 15 nt, Human
ccucugacacacagc

SEQ ID NO: 1621655 - RNA, 13 nt, Human
ccucugacacaca

SEQ ID NO: 1621656 - RNA, 21 nt, Human
ccucugacacacagcucuguc

SEQ ID NO: 1621657 - RNA, 15 nt, Human
ccucuccccagcaag

SEQ ID NO: 1621658 - RNA, 22 nt, Human
ccucucccuuggauuguccccg

SEQ ID NO: 1621659 - RNA, 13 nt, Human
ccucucccuugga

SEQ ID NO: 1621660 - RNA, 20 nt, Human
ccucuccccagcaagugaga

SEQ ID NO: 1621661 - RNA, 21 nt, Human
ccuccuccagccgccaugcuc

SEQ ID NO: 1621662 - RNA, 15 nt, Human
ccuccucucugcccu

SEQ ID NO: 1621663 - RNA, 13 nt, Human
ccuccucucugcc

SEQ ID NO: 1621664 - RNA, 16 nt, Human
ccuccucucugcccua

SEQ ID NO: 1621665 - RNA, 14 nt, Human
cuaauguacugcau

SEQ ID NO: 1621666 - RNA, 16 nt, Human
cuaauguacugcauau

SEQ ID NO: 1621667 - RNA, 22 nt, Human
cuaaugaaugcauaaaauguua

SEQ ID NO: 1621668 - RNA, 19 nt, Human
cuaaugaaugcauaaaaug

SEQ ID NO: 1621669 - RNA, 16 nt, Human
cuaaggugugcucuga

SEQ ID NO: 1621670 - RNA, 21 nt, Human
cuaauaaaauuuaaaagucuu

SEQ ID NO: 1621671 - RNA, 12 nt, Human
cuaauaaagcug

SEQ ID NO: 1621672 - RNA, 13 nt, Human
cuaauaaagcugu

SEQ ID NO: 1621673 - RNA, 16 nt, Human
cuaauccucuuuuucu

SEQ ID NO: 1621674 - RNA, 19 nt, Human
cuaaucagcauucucacuc

SEQ ID NO: 1621675 - RNA, 17 nt, Human
cuaaucagcauucucac

SEQ ID NO: 1621676 - RNA, 17 nt, Human
cuacacuccagugagac

SEQ ID NO: 1621677 - RNA, 16 nt, Human
cuacacuccagugaga

SEQ ID NO: 1621678 - RNA, 21 nt, Human
cuacacacugcauguuuguga

SEQ ID NO: 1621679 - RNA, 13 nt, Human
cuacacacugcau

SEQ ID NO: 1621680 - RNA, 15 nt, Human
cuacacacugcaugu

SEQ ID NO: 1621681 - RNA, 15 nt, Human
cuacagaggccaugg

SEQ ID NO: 1621682 - RNA, 20 nt, Human
cuacccagcgagcccuggug

SEQ ID NO: 1621683 - RNA, 12 nt, Human
cuacccaggugc

SEQ ID NO: 1621684 - RNA, 22 nt, Human
cuacccacccuccuuucaccac

SEQ ID NO: 1621685 - RNA, 17 nt, Human
cuacccacccuccuuuc

SEQ ID NO: 1621686 - RNA, 18 nt, Human
cuaccauccccuguagag

SEQ ID NO: 1621687 - RNA, 17 nt, Human
cuacagaggccaugggc

SEQ ID NO: 1621688 - RNA, 14 nt, Human
cuaagcaaaaugug

SEQ ID NO: 1621689 - RNA, 17 nt, Human
cuaaccagcagaaaugc

SEQ ID NO: 1621690 - RNA, 17 nt, Human
cuaaccacgcuggaccu

SEQ ID NO: 1621691 - RNA, 16 nt, Human
cuaaccagcagaaaug

SEQ ID NO: 1621692 - RNA, 18 nt, Human
cuaagcaaaaugugauau

SEQ ID NO: 1621693 - RNA, 15 nt, Human
cuaagcaaaauguga

SEQ ID NO: 1621694 - RNA, 21 nt, Human
cuaagcuauucaguaauaacu

SEQ ID NO: 1621695 - RNA, 19 nt, Human
cuaagcuauucaguaauaa

SEQ ID NO: 1621696 - RNA, 11 nt, Human
cuaaggacuug

SEQ ID NO: 1621697 - RNA, 17 nt, Human
cuaaggacuuguuagau

SEQ ID NO: 1621698 - RNA, 16 nt, Human
cuaaggacuuguuaga

SEQ ID NO: 1621699 - RNA, 15 nt, Human
cuaaggugugcucug

SEQ ID NO: 1621700 - RNA, 14 nt, Human
cuaaggcugaacuu

SEQ ID NO: 1621701 - RNA, 19 nt, Human
cuacuugggaggcugagau

SEQ ID NO: 1621702 - RNA, 18 nt, Human
cuacuugggaggcugaga

SEQ ID NO: 1621703 - RNA, 15 nt, Human
cuacuugggaggcug

SEQ ID NO: 1621704 - RNA, 22 nt, Human
cuacuuauuguagcauccugga

SEQ ID NO: 1621705 - RNA, 20 nt, Human
cuacuuccccuuccuaauuc

SEQ ID NO: 1621706 - RNA, 15 nt, Human
cuacuuccccuuccu

SEQ ID NO: 1621707 - RNA, 14 nt, Human
cuacuuccccuucc

SEQ ID NO: 1621708 - RNA, 20 nt, Human
cuacuuccugugacuucagc

SEQ ID NO: 1621709 - RNA, 21 nt, Human
cuacccgggaagggggcuggg

SEQ ID NO: 1621710 - RNA, 20 nt, Human
cuacccgggaagggggcugg

SEQ ID NO: 1621711 - RNA, 15 nt, Human
cuacccgggaagggg

SEQ ID NO: 1621712 - RNA, 14 nt, Human
cuacccgggaaggg

SEQ ID NO: 1621713 - RNA, 21 nt, Human
cuacucugugucagguggggc

SEQ ID NO: 1621714 - RNA, 16 nt, Human
cuacucugugucaggu

SEQ ID NO: 1621715 - RNA, 14 nt, Human
cuacugaggugcua

SEQ ID NO: 1621716 - RNA, 17 nt, Human
cuacuguaauuugugau

SEQ ID NO: 1621717 - RNA, 16 nt, Human
cuacuguaauuuguga

SEQ ID NO: 1621718 - RNA, 21 nt, Human
cuacuguaaggcaaucauggu

SEQ ID NO: 1621719 - RNA, 21 nt, Human
cuagacgagcaggcuucuucc

SEQ ID NO: 1621720 - RNA, 20 nt, Human
cuagacgagcaggcuucuuc

SEQ ID NO: 1621721 - RNA, 18 nt, Human
cuagacucccaagcugga

SEQ ID NO: 1621722 - RNA, 15 nt, Human
cuagagguucaaaga

SEQ ID NO: 1621723 - RNA, 21 nt, Human
cuagagugaacuugggccacu

SEQ ID NO: 1621724 - RNA, 17 nt, Human
cuagagugaacuugggc

SEQ ID NO: 1621725 - RNA, 17 nt, Human
cuagcacuuugggaggc

SEQ ID NO: 1621726 - RNA, 21 nt, Human
cuacuguaauuugugauacaa

SEQ ID NO: 1621727 - RNA, 23 nt, Human
cuaguaucaaaagaaagaaaauc

SEQ ID NO: 1621728 - RNA, 17 nt, Human
cuaguaucaaaagaaag

SEQ ID NO: 1621729 - RNA, 15 nt, Human
cuaguaucaaaagaa

SEQ ID NO: 1621730 - RNA, 20 nt, Human
cuaguauuucuaugaaauau

SEQ ID NO: 1621731 - RNA, 19 nt, Human
cuaguauuucuaugaaaua

SEQ ID NO: 1621732 - RNA, 22 nt, Human
cuaguauuucuaugaaauauua

SEQ ID NO: 1621733 - RNA, 21 nt, Human
cuaggcauuugcugaauacag

SEQ ID NO: 1621734 - RNA, 22 nt, Human
cuagugugguguuuccuggcac

SEQ ID NO: 1621735 - RNA, 21 nt, Human
cuagugugguguuuccuggca

SEQ ID NO: 1621736 - RNA, 23 nt, Human
cuagugugguguuuccuggcacu

SEQ ID NO: 1621737 - RNA, 19 nt, Human
cuagugugguguuuccugg

SEQ ID NO: 1621738 - RNA, 12 nt, Human
cuagcagcaggg

SEQ ID NO: 1621739 - RNA, 15 nt, Human
cuaggaacacuccuu

SEQ ID NO: 1621740 - RNA, 13 nt, Human
cuaggaacacucc

SEQ ID NO: 1621741 - RNA, 21 nt, Human
cuaggaagacuuuggaaagag

SEQ ID NO: 1621742 - RNA, 17 nt, Human
cuaggaaauccagggug

SEQ ID NO: 1621743 - RNA, 16 nt, Human
cuaggaaauccagggu

SEQ ID NO: 1621744 - RNA, 17 nt, Human
cuaggaggucucuaaga

SEQ ID NO: 1621745 - RNA, 22 nt, Human
cuaggaccccuccaugugggcu

SEQ ID NO: 1621746 - RNA, 22 nt, Human
cuaggacugaauuaugaaacuu

SEQ ID NO: 1621747 - RNA, 14 nt, Human
cuaugacacaugca

SEQ ID NO: 1621748 - RNA, 18 nt, Human
cuaugaaauauuauguua

SEQ ID NO: 1621749 - RNA, 13 nt, Human
cuaugaaauauua

SEQ ID NO: 1621750 - RNA, 22 nt, Human
cuauauuuuuuguuaaaugauu

SEQ ID NO: 1621751 - RNA, 20 nt, Human
cuaucaaguauuauaccuuu

SEQ ID NO: 1621752 - RNA, 20 nt, Human
cuauauuuuuuguuaaauga

SEQ ID NO: 1621753 - RNA, 23 nt, Human
cuauauuguuuucaguguacaug

SEQ ID NO: 1621754 - RNA, 19 nt, Human
cuauauuguuugcuaagca

SEQ ID NO: 1621755 - RNA, 22 nt, Human
cuauauuguuuucaguguacau

SEQ ID NO: 1621756 - RNA, 12 nt, Human
cuaguucacucu

SEQ ID NO: 1621757 - RNA, 14 nt, Human
cuaguuccaccauc

SEQ ID NO: 1621758 - RNA, 11 nt, Human
cuaugcauuug

SEQ ID NO: 1621759 - RNA, 12 nt, Human
cuaugcauuuga

SEQ ID NO: 1621760 - RNA, 21 nt, Human
cuaugcauuugaaaauuuuga

SEQ ID NO: 1621761 - RNA, 17 nt, Human
cucaccccuugccauaa

SEQ ID NO: 1621762 - RNA, 16 nt, Human
cucacuaggcuucugg

SEQ ID NO: 1621763 - RNA, 13 nt, Human
cucacuaggcuuc

SEQ ID NO: 1621764 - RNA, 17 nt, Human
cucacuauguugcccag

SEQ ID NO: 1621765 - RNA, 16 nt, Human
cucacuauguugccca

SEQ ID NO: 1621766 - RNA, 20 nt, Human
cucacuaggcuucugguuga

SEQ ID NO: 1621767 - RNA, 21 nt, Human
cucacuaucccggcugcccuu

SEQ ID NO: 1621768 - RNA, 20 nt, Human
cucacuaucccggcugcccu

SEQ ID NO: 1621769 - RNA, 13 nt, Human
cucaccccagccc

SEQ ID NO: 1621770 - RNA, 12 nt, Human
cucaccccagcc

SEQ ID NO: 1621771 - RNA, 14 nt, Human
cucaccccagcccc

SEQ ID NO: 1621772 - RNA, 13 nt, Human
cucacauuuauau

SEQ ID NO: 1621773 - RNA, 19 nt, Human
cucaccagccccagugccc

SEQ ID NO: 1621774 - RNA, 21 nt, Human
cucaccagccccagugcccac

SEQ ID NO: 1621775 - RNA, 20 nt, Human
cucaccagccccagugccca

SEQ ID NO: 1621776 - RNA, 21 nt, Human
cucaagugauucuccugccuc

SEQ ID NO: 1621777 - RNA, 20 nt, Human
cucaagugauucuccugccu

SEQ ID NO: 1621778 - RNA, 19 nt, Human
cucaagugauucuccugcc

SEQ ID NO: 1621779 - RNA, 18 nt, Human
cucaagugauucuccugc

SEQ ID NO: 1621780 - RNA, 21 nt, Human
cucaacucuccuccagaguca

SEQ ID NO: 1621781 - RNA, 20 nt, Human
cucaacucuccuccagaguc

SEQ ID NO: 1621782 - RNA, 13 nt, Human
cucaaauuucuaa

SEQ ID NO: 1621783 - RNA, 17 nt, Human
cucaagagggcacuggu

SEQ ID NO: 1621784 - RNA, 21 nt, Human
cucaagagggcacugguggcc

SEQ ID NO: 1621785 - RNA, 19 nt, Human
cucaagagggcacuggugg

SEQ ID NO: 1621786 - RNA, 14 nt, Human
cuaugcauuugaaa

SEQ ID NO: 1621787 - RNA, 22 nt, Human
cuauuuuaauaaacacucuuga

SEQ ID NO: 1621788 - RNA, 18 nt, Human
cuauuuuaauaaacacuc

SEQ ID NO: 1621789 - RNA, 17 nt, Human
cuaacauggaaguacua

SEQ ID NO: 1621790 - RNA, 15 nt, Human
cuaacauggaaguac

SEQ ID NO: 1621791 - RNA, 15 nt, Human
cuaacaugauuuggg

SEQ ID NO: 1621792 - RNA, 23 nt, Human
cuaaauugacacuuaaaaauggu

SEQ ID NO: 1621793 - RNA, 16 nt, Human
cuaaauucaugcugcu

SEQ ID NO: 1621794 - RNA, 16 nt, Human
cuaaauguugaaagau

SEQ ID NO: 1621795 - RNA, 18 nt, Human
cuaaauggaaccacucua

SEQ ID NO: 1621796 - RNA, 16 nt, Human
cuaaauggaaccacuc

SEQ ID NO: 1621797 - RNA, 17 nt, Human
cuaaauggaaccacucu

SEQ ID NO: 1621798 - RNA, 15 nt, Human
cuaaauggaaccacu

SEQ ID NO: 1621799 - RNA, 20 nt, Human
cuaaaucuccaaaauaaaac

SEQ ID NO: 1621800 - RNA, 20 nt, Human
cuaaauauauuuuaagacga

SEQ ID NO: 1621801 - RNA, 18 nt, Human
cuaaauauauuuuaagac

SEQ ID NO: 1621802 - RNA, 16 nt, Human
cuaaauccauuuggaa

SEQ ID NO: 1621803 - RNA, 20 nt, Human
cuaaauccauuuggaaaucu

SEQ ID NO: 1621804 - RNA, 19 nt, Human
cuaaauccauuuggaaauc

SEQ ID NO: 1621805 - RNA, 17 nt, Human
cuaaauccauuuggaaa

SEQ ID NO: 1621806 - RNA, 15 nt, Human
cgugcuaaggacuug

SEQ ID NO: 1621807 - RNA, 14 nt, Human
cgugcuaaggacuu

SEQ ID NO: 1621808 - RNA, 13 nt, Human
cgugcuaaggacu

SEQ ID NO: 1621809 - RNA, 12 nt, Human
cgugcuaaggac

SEQ ID NO: 1621810 - RNA, 16 nt, Human
cgugcuaaggacuugu

SEQ ID NO: 1621811 - RNA, 19 nt, Human
cguggcuucccgcucagcc

SEQ ID NO: 1621812 - RNA, 18 nt, Human
cguggcuucccgcucagc

SEQ ID NO: 1621813 - RNA, 21 nt, Human
cguggcuucccgcucagcccu

SEQ ID NO: 1621814 - RNA, 20 nt, Human
cguggcuucccgcucagccc

SEQ ID NO: 1621815 - RNA, 23 nt, Human
cguugaaauuguaauuauaucug

SEQ ID NO: 1621816 - RNA, 19 nt, Human
cgugcacacaccagagccc

SEQ ID NO: 1621817 - RNA, 18 nt, Human
cgugcacacaccagagcc

SEQ ID NO: 1621818 - RNA, 22 nt, Human
cgugcaguggugcgaucugggu

SEQ ID NO: 1621819 - RNA, 21 nt, Human
cgugcaguggugcgaucuggg

SEQ ID NO: 1621820 - RNA, 22 nt, Human
cgucugacaggcaaugcuggcu

SEQ ID NO: 1621821 - RNA, 21 nt, Human
cgucugacaggcaaugcuggc

SEQ ID NO: 1621822 - RNA, 20 nt, Human
cgucugacaggcaaugcugg

SEQ ID NO: 1621823 - RNA, 16 nt, Human
cgugcacacaccagag

SEQ ID NO: 1621824 - RNA, 22 nt, Human
cggugcuaucucccccagcccc

SEQ ID NO: 1621825 - RNA, 21 nt, Human
cggugcuaucucccccagccc

SEQ ID NO: 1621826 - RNA, 20 nt, Human
cggugcuaucucccccagcc

SEQ ID NO: 1621827 - RNA, 18 nt, Human
cggugcuaucucccccag

SEQ ID NO: 1621828 - RNA, 16 nt, Human
cgucuaccugaggggc

SEQ ID NO: 1621829 - RNA, 16 nt, Human
cgucucauacucaccu

SEQ ID NO: 1621830 - RNA, 22 nt, Human
cggucggguuuuauuguuuaaa

SEQ ID NO: 1621831 - RNA, 16 nt, Human
cggugaauggcuuugu

SEQ ID NO: 1621832 - RNA, 15 nt, Human
cggugaauggcuuug

SEQ ID NO: 1621833 - RNA, 14 nt, Human
cggugaauggcuuu

SEQ ID NO: 1621834 - RNA, 13 nt, Human
cggugaauggcuu

SEQ ID NO: 1621835 - RNA, 17 nt, Human
cggugagcuacaaaugc

SEQ ID NO: 1621836 - RNA, 21 nt, Human
cggugagaggggaacagacug

SEQ ID NO: 1621837 - RNA, 20 nt, Human
cggugagaggggaacagacu

SEQ ID NO: 1621838 - RNA, 22 nt, Human
cggugaauggcuuuguauagaa

SEQ ID NO: 1621839 - RNA, 20 nt, Human
cggugaauggcuuuguauag

SEQ ID NO: 1621840 - RNA, 18 nt, Human
cggugaauggcuuuguau

SEQ ID NO: 1621841 - RNA, 21 nt, Human
cggguuuuauuguuuaaaauc

SEQ ID NO: 1621842 - RNA, 20 nt, Human
cgguccacccaggagccccg

SEQ ID NO: 1621843 - RNA, 16 nt, Human
cgguccacccaggagc

SEQ ID NO: 1621844 - RNA, 15 nt, Human
cgguccacccaggag

SEQ ID NO: 1621845 - RNA, 14 nt, Human
cgguccacccagga

SEQ ID NO: 1621846 - RNA, 11 nt, Human
cgggucacagg

SEQ ID NO: 1621847 - RNA, 19 nt, Human
cgggucacaggagggaggg

SEQ ID NO: 1621848 - RNA, 22 nt, Human
cgggcacucagaagacacugau

SEQ ID NO: 1621849 - RNA, 14 nt, Human
cgggcacucagaag

SEQ ID NO: 1621850 - RNA, 22 nt, Human
cggggacagcuccuucuguccu

SEQ ID NO: 1621851 - RNA, 20 nt, Human
cgggaggucgaggcaggagg

SEQ ID NO: 1621852 - RNA, 18 nt, Human
cgggaggucgaggcagga

SEQ ID NO: 1621853 - RNA, 17 nt, Human
cgggauuaguacacacu

SEQ ID NO: 1621854 - RNA, 22 nt, Human
cggcuggccuggccccucaggg

SEQ ID NO: 1621855 - RNA, 23 nt, Human
cggcuggccuggccccucagggu

SEQ ID NO: 1621856 - RNA, 21 nt, Human
cgggagccugaucaccugccc

SEQ ID NO: 1621857 - RNA, 15 nt, Human
cgggggcagagaggg

SEQ ID NO: 1621858 - RNA, 23 nt, Human
cggggacagcuccuucuguccua

SEQ ID NO: 1621859 - RNA, 14 nt, Human
cggccuccauccug

SEQ ID NO: 1621860 - RNA, 12 nt, Human
cggccuccaucc

SEQ ID NO: 1621861 - RNA, 12 nt, Human
cggcugcccuuu

SEQ ID NO: 1621862 - RNA, 11 nt, Human
cggcugcccuu

SEQ ID NO: 1621863 - RNA, 24 nt, Human
cggccaggccagagggagugacag

SEQ ID NO: 1621864 - RNA, 19 nt, Human
cggccccugcugguucagg

SEQ ID NO: 1621865 - RNA, 18 nt, Human
cggccccugcugguucag

SEQ ID NO: 1621866 - RNA, 13 nt, Human
cggccccugcugg

SEQ ID NO: 1621867 - RNA, 17 nt, Human
cggccaccugcggugcu

SEQ ID NO: 1621868 - RNA, 16 nt, Human
cggccaccugcggugc

SEQ ID NO: 1621869 - RNA, 15 nt, Human
cggccaccugcggug

SEQ ID NO: 1621870 - RNA, 11 nt, Human
cggccaccugc

SEQ ID NO: 1621871 - RNA, 14 nt, Human
cggaauaguuggcu

SEQ ID NO: 1621872 - RNA, 13 nt, Human
cggaagagccuug

SEQ ID NO: 1621873 - RNA, 18 nt, Human
cgcucucuggccuucggc

SEQ ID NO: 1621874 - RNA, 22 nt, Human
cgcugucagccauuccuguucc

SEQ ID NO: 1621875 - RNA, 17 nt, Human
cgcugugcugcccugcc

SEQ ID NO: 1621876 - RNA, 16 nt, Human
cgcugugcugcccugc

SEQ ID NO: 1621877 - RNA, 15 nt, Human
cgcugugcugcccug

SEQ ID NO: 1621878 - RNA, 15 nt, Human
cggaaaacaugcuac

SEQ ID NO: 1621879 - RNA, 20 nt, Human
cggaaaacaugcuacacacu

SEQ ID NO: 1621880 - RNA, 18 nt, Human
cgcugugcugcccugccc

SEQ ID NO: 1621881 - RNA, 15 nt, Human
cgcucucuggccuuc

SEQ ID NO: 1621882 - RNA, 14 nt, Human
cgcucucuggccuu

SEQ ID NO: 1621883 - RNA, 17 nt, Human
cgcuacccgggaagggg

SEQ ID NO: 1621884 - RNA, 12 nt, Human
cgcucagcccuc

SEQ ID NO: 1621885 - RNA, 21 nt, Human
cgcucagcccucccugccccu

SEQ ID NO: 1621886 - RNA, 16 nt, Human
cgcucagcccucccug

SEQ ID NO: 1621887 - RNA, 16 nt, Human
cgcuacccgggaaggg

SEQ ID NO: 1621888 - RNA, 22 nt, Human
cgcuaagagggagggagggcuc

SEQ ID NO: 1621889 - RNA, 17 nt, Human
cgccaucccagccccaa

SEQ ID NO: 1621890 - RNA, 16 nt, Human
cgccaucccagcccca

SEQ ID NO: 1621891 - RNA, 14 nt, Human
cgccaucccagccc

SEQ ID NO: 1621892 - RNA, 23 nt, Human
cgccaggggaaaaucagccugcu

SEQ ID NO: 1621893 - RNA, 20 nt, Human
ccucugcccacucccugcaa

SEQ ID NO: 1621894 - RNA, 19 nt, Human
ccucugcccacucccugca

SEQ ID NO: 1621895 - RNA, 17 nt, Human
ccucugcccacucccug

SEQ ID NO: 1621896 - RNA, 22 nt, Human
cgccagauucuuuccugaggcu

SEQ ID NO: 1621897 - RNA, 22 nt, Human
cgcccaggcuuagucacugaga

SEQ ID NO: 1621898 - RNA, 12 nt, Human
cgcccagucugg

SEQ ID NO: 1621899 - RNA, 16 nt, Human
cgcccuggacugugug

SEQ ID NO: 1621900 - RNA, 13 nt, Human
cgccccuuccccc

SEQ ID NO: 1621901 - RNA, 22 nt, Human
cucuccucuugccacugccucu

SEQ ID NO: 1621902 - RNA, 19 nt, Human
cucuccucuugccacugcc

SEQ ID NO: 1621903 - RNA, 17 nt, Human
cucuccucuugccacug

SEQ ID NO: 1621904 - RNA, 16 nt, Human
cucuccucuugccacu

SEQ ID NO: 1621905 - RNA, 15 nt, Human
cucuccucuugccac

SEQ ID NO: 1621906 - RNA, 14 nt, Human
cucuccucuugcca

SEQ ID NO: 1621907 - RNA, 18 nt, Human
cucuccucugcugcuggc

SEQ ID NO: 1621908 - RNA, 15 nt, Human
cucuccucugcugcu

SEQ ID NO: 1621909 - RNA, 14 nt, Human
cucuccucugcugc

SEQ ID NO: 1621910 - RNA, 13 nt, Human
cucuccucugcug

SEQ ID NO: 1621911 - RNA, 24 nt, Human
cucuccccagcaagugagagcugg

SEQ ID NO: 1621912 - RNA, 12 nt, Human
cucuccucugcu

SEQ ID NO: 1621913 - RNA, 22 nt, Human
cucuccccagcaagugagagcu

SEQ ID NO: 1621914 - RNA, 14 nt, Human
cucuccccagcaag

SEQ ID NO: 1621915 - RNA, 19 nt, Human
cucuccagccccuggaugc

SEQ ID NO: 1621916 - RNA, 15 nt, Human
cucuccacugccuuc

SEQ ID NO: 1621917 - RNA, 20 nt, Human
cucuccugggcagcugccuc

SEQ ID NO: 1621918 - RNA, 12 nt, Human
cucuccugggca

SEQ ID NO: 1621919 - RNA, 15 nt, Human
cucuccugggcagcu

SEQ ID NO: 1621920 - RNA, 16 nt, Human
cucuccugggcagcug

SEQ ID NO: 1621921 - RNA, 18 nt, Human
cucuccugggcagcugcc

SEQ ID NO: 1621922 - RNA, 19 nt, Human
cucuccugggcagcugccu

SEQ ID NO: 1621923 - RNA, 12 nt, Human
cucucucacucc

SEQ ID NO: 1621924 - RNA, 14 nt, Human
cucucucacuccuu

SEQ ID NO: 1621925 - RNA, 21 nt, Human
cucuaguuugauuaaauucuu

SEQ ID NO: 1621926 - RNA, 19 nt, Human
cucuaguuugauuaaauuc

SEQ ID NO: 1621927 - RNA, 20 nt, Human
cucuaguuugauuaaauucu

SEQ ID NO: 1621928 - RNA, 15 nt, Human
cucuaguuugauuaa

SEQ ID NO: 1621929 - RNA, 15 nt, Human
cucucaggccagcug

SEQ ID NO: 1621930 - RNA, 13 nt, Human
cucucaggccagc

SEQ ID NO: 1621931 - RNA, 23 nt, Human
cucucaggccaaacucaccugcc

SEQ ID NO: 1621932 - RNA, 22 nt, Human
cucucaggccaaacucaccugc

SEQ ID NO: 1621933 - RNA, 21 nt, Human
cucucaggccaaacucaccug

SEQ ID NO: 1621934 - RNA, 20 nt, Human
cucucaggccaaacucaccu

SEQ ID NO: 1621935 - RNA, 12 nt, Human
cucucaggccaa

SEQ ID NO: 1621936 - RNA, 18 nt, Human
cucuccagccccuggaug

SEQ ID NO: 1621937 - RNA, 17 nt, Human
cucuccagccccuggau

SEQ ID NO: 1621938 - RNA, 16 nt, Human
cucuccagccccugga

SEQ ID NO: 1621939 - RNA, 15 nt, Human
cucuccagccccugg

SEQ ID NO: 1621940 - RNA, 14 nt, Human
cucuccagccccug

SEQ ID NO: 1621941 - RNA, 14 nt, Human
cucuccacugccuu

SEQ ID NO: 1621942 - RNA, 12 nt, Human
cucuccacugcc

SEQ ID NO: 1621943 - RNA, 11 nt, Human
cucuccacugc

SEQ ID NO: 1621944 - RNA, 21 nt, Human
cucucaggccagcugcuuggg

SEQ ID NO: 1621945 - RNA, 19 nt, Human
cucucaggccagcugcuug

SEQ ID NO: 1621946 - RNA, 18 nt, Human
cucucaggccagcugcuu

SEQ ID NO: 1621947 - RNA, 17 nt, Human
cucucaggccagcugcu

SEQ ID NO: 1621948 - RNA, 22 nt, Human
cucucaggccagcugcuugggc

SEQ ID NO: 1621949 - RNA, 17 nt, Human
cucuaggaaauauuuau

SEQ ID NO: 1621950 - RNA, 23 nt, Human
cucuagggaaaaaccagcgugug

SEQ ID NO: 1621951 - RNA, 15 nt, Human
cucuaggaaauauuu

SEQ ID NO: 1621952 - RNA, 13 nt, Human
cucuacccuggca

SEQ ID NO: 1621953 - RNA, 20 nt, Human
cucuaccauccccuguagag

SEQ ID NO: 1621954 - RNA, 16 nt, Human
cucuacuuagcauguc

SEQ ID NO: 1621955 - RNA, 20 nt, Human
cucuacuuagcaugucccua

SEQ ID NO: 1621956 - RNA, 19 nt, Human
cucuacuuagcaugucccu

SEQ ID NO: 1621957 - RNA, 17 nt, Human
cucuacuuagcaugucc

SEQ ID NO: 1621958 - RNA, 17 nt, Human
cuccuucacagaugggu

SEQ ID NO: 1621959 - RNA, 16 nt, Human
cuccuucacagauggg

SEQ ID NO: 1621960 - RNA, 20 nt, Human
cuccugugugugcgccuaca

SEQ ID NO: 1621961 - RNA, 19 nt, Human
cuccuucacagaugggugc

SEQ ID NO: 1621962 - RNA, 13 nt, Human
cuccuucaccuuu

SEQ ID NO: 1621963 - RNA, 18 nt, Human
cucggcucacugcauccu

SEQ ID NO: 1621964 - RNA, 17 nt, Human
cucggcucacugcaucc

SEQ ID NO: 1621965 - RNA, 14 nt, Human
cucggcucacugca

SEQ ID NO: 1621966 - RNA, 16 nt, Human
cucuacagaggccaug

SEQ ID NO: 1621967 - RNA, 14 nt, Human
cucuacagaggcca

SEQ ID NO: 1621968 - RNA, 19 nt, Human
cucuacagaggccaugggc

SEQ ID NO: 1621969 - RNA, 21 nt, Human
cucuacagcuaaucagcauuc

SEQ ID NO: 1621970 - RNA, 13 nt, Human
cucuacagaggcc

SEQ ID NO: 1621971 - RNA, 13 nt, Human
cucuacaaaaagc

SEQ ID NO: 1621972 - RNA, 20 nt, Human
cuccauccugaggcuccacu

SEQ ID NO: 1621973 - RNA, 18 nt, Human
cuccauccugaggcucca

SEQ ID NO: 1621974 - RNA, 16 nt, Human
cuccauccugaggcuc

SEQ ID NO: 1621975 - RNA, 11 nt, Human
cuccauccuga

SEQ ID NO: 1621976 - RNA, 18 nt, Human
cucacuauguugcccagg

SEQ ID NO: 1621977 - RNA, 13 nt, Human
cuccaugugggcu

SEQ ID NO: 1621978 - RNA, 17 nt, Human
cucccaaagugcuggga

SEQ ID NO: 1621979 - RNA, 22 nt, Human
cuccaugucucugagcauuaga

SEQ ID NO: 1621980 - RNA, 13 nt, Human
cuccaugucucug

SEQ ID NO: 1621981 - RNA, 13 nt, Human
cuccaugcugccu

SEQ ID NO: 1621982 - RNA, 16 nt, Human
cuccaucuccacucca

SEQ ID NO: 1621983 - RNA, 23 nt, Human
cucccaucugugaaaggaaagag

SEQ ID NO: 1621984 - RNA, 18 nt, Human
cucccaucugugaaagga

SEQ ID NO: 1621985 - RNA, 15 nt, Human
cucccaucugugaaa

SEQ ID NO: 1621986 - RNA, 14 nt, Human
cucccaucugugaa

SEQ ID NO: 1621987 - RNA, 11 nt, Human
cucccaucugu

SEQ ID NO: 1621988 - RNA, 17 nt, Human
cucccaacucaccccag

SEQ ID NO: 1621989 - RNA, 14 nt, Human
cuccaugugggcua

SEQ ID NO: 1621990 - RNA, 18 nt, Human
cucccaaagugcugggau

SEQ ID NO: 1621991 - RNA, 22 nt, Human
cucccaaagugcugggauuaca

SEQ ID NO: 1621992 - RNA, 22 nt, Human
cucccaacucaccccagcccca

SEQ ID NO: 1621993 - RNA, 12 nt, Human
cuccccugcugg

SEQ ID NO: 1621994 - RNA, 21 nt, Human
cuccccagcaagugagagcug

SEQ ID NO: 1621995 - RNA, 20 nt, Human
cuccccagcaagugagagcu

SEQ ID NO: 1621996 - RNA, 12 nt, Human
cuccccagcaag

SEQ ID NO: 1621997 - RNA, 17 nt, Human
cucccgaguagcuggga

SEQ ID NO: 1621998 - RNA, 16 nt, Human
cucccgaguagcuggg

SEQ ID NO: 1621999 - RNA, 18 nt, Human
cucccgaauagcugggac

SEQ ID NO: 1622000 - RNA, 17 nt, Human
cucccgaauagcuggga

SEQ ID NO: 1622001 - RNA, 14 nt, Human
cuccccugcugggu

SEQ ID NO: 1622002 - RNA, 13 nt, Human
cuccccugcuggg

SEQ ID NO: 1622003 - RNA, 18 nt, Human
cucccgaguagcugggac

SEQ ID NO: 1622004 - RNA, 19 nt, Human
cucccgaauagcugggacu

SEQ ID NO: 1622005 - RNA, 20 nt, Human
cucccggcuaugggggcacu

SEQ ID NO: 1622006 - RNA, 15 nt, Human
cucccuccaccuccc

SEQ ID NO: 1622007 - RNA, 17 nt, Human
cucccuccaccucccug

SEQ ID NO: 1622008 - RNA, 13 nt, Human
cucccucauucca

SEQ ID NO: 1622009 - RNA, 15 nt, Human
cuccgaccagacacc

SEQ ID NO: 1622010 - RNA, 20 nt, Human
cucccuuuuaauccuggcug

SEQ ID NO: 1622011 - RNA, 19 nt, Human
cucccuuuuaauccuggcu

SEQ ID NO: 1622012 - RNA, 15 nt, Human
cuccgccucccgggu

SEQ ID NO: 1622013 - RNA, 22 nt, Human
cuccucuccccagcaagugaga

SEQ ID NO: 1622014 - RNA, 14 nt, Human
cuccucccggugcc

SEQ ID NO: 1622015 - RNA, 17 nt, Human
cuccucccggugcccaa

SEQ ID NO: 1622016 - RNA, 15 nt, Human
cuccucccggugccc

SEQ ID NO: 1622017 - RNA, 11 nt, Human
cuccugcccuu

SEQ ID NO: 1622018 - RNA, 14 nt, Human
cuccugccucagcc

SEQ ID NO: 1622019 - RNA, 13 nt, Human
cuccugccucagc

SEQ ID NO: 1622020 - RNA, 20 nt, Human
cuccugcaggcagccaggcc

SEQ ID NO: 1622021 - RNA, 18 nt, Human
cuccugcaggcagccagg

SEQ ID NO: 1622022 - RNA, 17 nt, Human
cuccugcaggcagccag

SEQ ID NO: 1622023 - RNA, 12 nt, Human
cuccugcaggca

SEQ ID NO: 1622024 - RNA, 11 nt, Human
cuccugcaggc

SEQ ID NO: 1622025 - RNA, 19 nt, Human
cuccugugugugcgccuac

SEQ ID NO: 1622026 - RNA, 16 nt, Human
cuccugugugugcgcc

SEQ ID NO: 1622027 - RNA, 15 nt, Human
cuccugccucagccu

SEQ ID NO: 1622028 - RNA, 16 nt, Human
cuccugccucagccuc

SEQ ID NO: 1622029 - RNA, 17 nt, Human
cugacucuuaagaagac

SEQ ID NO: 1622030 - RNA, 16 nt, Human
cugacuguuuucucuu

SEQ ID NO: 1622031 - RNA, 15 nt, Human
cugacuucuaaguaa

SEQ ID NO: 1622032 - RNA, 13 nt, Human
cugacuucuaagu

SEQ ID NO: 1622033 - RNA, 18 nt, Human
cugacuguuuucucuuga

SEQ ID NO: 1622034 - RNA, 16 nt, Human
cugacuucuaaguaaa

SEQ ID NO: 1622035 - RNA, 23 nt, Human
cugagaaagacuauucaaacagu

SEQ ID NO: 1622036 - RNA, 22 nt, Human
cugagaaagacuauucaaacag

SEQ ID NO: 1622037 - RNA, 14 nt, Human
cugagaaauuuaua

SEQ ID NO: 1622038 - RNA, 11 nt, Human
cugagaaauuu

SEQ ID NO: 1622039 - RNA, 15 nt, Human
cugagacagcccggg

SEQ ID NO: 1622040 - RNA, 14 nt, Human
cugagacagcccgg

SEQ ID NO: 1622041 - RNA, 19 nt, Human
cugaagacucauucuucug

SEQ ID NO: 1622042 - RNA, 22 nt, Human
cugacauuguuggccaaagcca

SEQ ID NO: 1622043 - RNA, 14 nt, Human
cugacccacugcuu

SEQ ID NO: 1622044 - RNA, 13 nt, Human
cugacccacugcu

SEQ ID NO: 1622045 - RNA, 13 nt, Human
cugacccaugcug

SEQ ID NO: 1622046 - RNA, 15 nt, Human
cugacccaugcugcc

SEQ ID NO: 1622047 - RNA, 14 nt, Human
cugacccaugcugc

SEQ ID NO: 1622048 - RNA, 16 nt, Human
cugacccaugcugccc

SEQ ID NO: 1622049 - RNA, 20 nt, Human
cugagcgacagugagacucu

SEQ ID NO: 1622050 - RNA, 16 nt, Human
cugagcgacagugaga

SEQ ID NO: 1622051 - RNA, 22 nt, Human
cugagccucagucucccucccu

SEQ ID NO: 1622052 - RNA, 21 nt, Human
cugagccagauuucacucucc

SEQ ID NO: 1622053 - RNA, 20 nt, Human
cugagccagauuucacucuc

SEQ ID NO: 1622054 - RNA, 19 nt, Human
cugagccagauuucacucu

SEQ ID NO: 1622055 - RNA, 18 nt, Human
cugagccagauuucacuc

SEQ ID NO: 1622056 - RNA, 17 nt, Human
cugagccagauuucacu

SEQ ID NO: 1622057 - RNA, 18 nt, Human
cugagacagcccgggcuc

SEQ ID NO: 1622058 - RNA, 17 nt, Human
cugagacagcccgggcu

SEQ ID NO: 1622059 - RNA, 16 nt, Human
cugagacagcccgggc

SEQ ID NO: 1622060 - RNA, 21 nt, Human
cugagccucagucucccuccc

SEQ ID NO: 1622061 - RNA, 16 nt, Human
cugagccucagucucc

SEQ ID NO: 1622062 - RNA, 20 nt, Human
cugaggcccuucucuccagc

SEQ ID NO: 1622063 - RNA, 19 nt, Human
cugaggcccuucucuccag

SEQ ID NO: 1622064 - RNA, 18 nt, Human
cugaggcccuucucucca

SEQ ID NO: 1622065 - RNA, 15 nt, Human
cugaggcccuucucu

SEQ ID NO: 1622066 - RNA, 14 nt, Human
cugaggcccuucuc

SEQ ID NO: 1622067 - RNA, 23 nt, Human
cugaggcccagagggccugcaag

SEQ ID NO: 1622068 - RNA, 21 nt, Human
cugaggcccagagggccugca

SEQ ID NO: 1622069 - RNA, 19 nt, Human
cugaggcccagagggccug

SEQ ID NO: 1622070 - RNA, 18 nt, Human
cugaggcccagagggccu

SEQ ID NO: 1622071 - RNA, 17 nt, Human
cugaggcccagagggcc

SEQ ID NO: 1622072 - RNA, 16 nt, Human
cugaggcccagagggc

SEQ ID NO: 1622073 - RNA, 15 nt, Human
cugaggcccagaggg

SEQ ID NO: 1622074 - RNA, 14 nt, Human
cugaggcccagagg

SEQ ID NO: 1622075 - RNA, 13 nt, Human
cugaggcccagag

SEQ ID NO: 1622076 - RNA, 12 nt, Human
cugaggcccaga

SEQ ID NO: 1622077 - RNA, 19 nt, Human
cugaggaucagaguaaucc

SEQ ID NO: 1622078 - RNA, 17 nt, Human
cugaggaucagaguaau

SEQ ID NO: 1622079 - RNA, 12 nt, Human
cucugcuugcca

SEQ ID NO: 1622080 - RNA, 14 nt, Human
cucugcuugccauc

SEQ ID NO: 1622081 - RNA, 17 nt, Human
cucugcuugccaucccu

SEQ ID NO: 1622082 - RNA, 20 nt, Human
cucugcuugccaucccuccc

SEQ ID NO: 1622083 - RNA, 15 nt, Human
cucuggacaggcaug

SEQ ID NO: 1622084 - RNA, 22 nt, Human
cucugccugaagucacacagug

SEQ ID NO: 1622085 - RNA, 21 nt, Human
cucugccugaagucacacagu

SEQ ID NO: 1622086 - RNA, 13 nt, Human
cucucuccucccu

SEQ ID NO: 1622087 - RNA, 19 nt, Human
cucuggccuucggccucca

SEQ ID NO: 1622088 - RNA, 16 nt, Human
cucuggcuccagcugg

SEQ ID NO: 1622089 - RNA, 15 nt, Human
cucuggcuccagcug

SEQ ID NO: 1622090 - RNA, 12 nt, Human
cucuggccuucg

SEQ ID NO: 1622091 - RNA, 16 nt, Human
cucuggcagcucagag

SEQ ID NO: 1622092 - RNA, 15 nt, Human
cucuggcagcucaga

SEQ ID NO: 1622093 - RNA, 14 nt, Human
cucuggcagcucag

SEQ ID NO: 1622094 - RNA, 12 nt, Human
cucuggcagcuc

SEQ ID NO: 1622095 - RNA, 22 nt, Human
cucuggacaggcauguucucug

SEQ ID NO: 1622096 - RNA, 16 nt, Human
cucuggacaggcaugu

SEQ ID NO: 1622097 - RNA, 15 nt, Human
cucuuccaggcuggg

SEQ ID NO: 1622098 - RNA, 14 nt, Human
cucuuccaggcugg

SEQ ID NO: 1622099 - RNA, 13 nt, Human
cucuuccaggcug

SEQ ID NO: 1622100 - RNA, 15 nt, Human
cucuuagaaaaacca

SEQ ID NO: 1622101 - RNA, 13 nt, Human
cucuuagaaaaac

SEQ ID NO: 1622102 - RNA, 15 nt, Human
cucugugucaggugg

SEQ ID NO: 1622103 - RNA, 19 nt, Human
cucugugucagguggggca

SEQ ID NO: 1622104 - RNA, 22 nt, Human
cucuggcuccagcuggccggga

SEQ ID NO: 1622105 - RNA, 23 nt, Human
cugaagaagcaccaaucaugaau

SEQ ID NO: 1622106 - RNA, 19 nt, Human
cugaagaauugaaaaacca

SEQ ID NO: 1622107 - RNA, 17 nt, Human
cugaacucugacaacag

SEQ ID NO: 1622108 - RNA, 16 nt, Human
cugaacucugacaaca

SEQ ID NO: 1622109 - RNA, 16 nt, Human
cugaaauuuccuggga

SEQ ID NO: 1622110 - RNA, 23 nt, Human
cugaaauuuccugggagcuuuug

SEQ ID NO: 1622111 - RNA, 13 nt, Human
cugaaauuuccug

SEQ ID NO: 1622112 - RNA, 15 nt, Human
cugaaagcccugagc

SEQ ID NO: 1622113 - RNA, 17 nt, Human
cucuuucuauuguuucu

SEQ ID NO: 1622114 - RNA, 19 nt, Human
cugaaagcccugagcuuuc

SEQ ID NO: 1622115 - RNA, 18 nt, Human
cugaaagcccugagcuuu

SEQ ID NO: 1622116 - RNA, 17 nt, Human
cugaaagcccugagcuu

SEQ ID NO: 1622117 - RNA, 16 nt, Human
cugaaagcccugagcu

SEQ ID NO: 1622118 - RNA, 23 nt, Human
cugaaagcccugagcuuucugcu

SEQ ID NO: 1622119 - RNA, 21 nt, Human
cugaaauaaacgucuuaaaua

SEQ ID NO: 1622120 - RNA, 22 nt, Human
cugaaauagacccacaagaggc

SEQ ID NO: 1622121 - RNA, 22 nt, Human
cucuucuuuaaagggauggcaa

SEQ ID NO: 1622122 - RNA, 22 nt, Human
cucuugaaauauaggaacuuaa

SEQ ID NO: 1622123 - RNA, 19 nt, Human
cucuuggguucaagcgauu

SEQ ID NO: 1622124 - RNA, 15 nt, Human
cucuugaacuccuga

SEQ ID NO: 1622125 - RNA, 21 nt, Human
cucuuggguucaagcgauucu

SEQ ID NO: 1622126 - RNA, 23 nt, Human
cucuuuaaugucacaggcagguc

SEQ ID NO: 1622127 - RNA, 22 nt, Human
cucuuuaaugucacaggcaggu

SEQ ID NO: 1622128 - RNA, 21 nt, Human
cucuuuaaugucacaggcagg

SEQ ID NO: 1622129 - RNA, 20 nt, Human
cucuuuaaugucacaggcag

SEQ ID NO: 1622130 - RNA, 17 nt, Human
cucuuucccucccuucc

SEQ ID NO: 1622131 - RNA, 17 nt, Human
cucuugguccugcugca

SEQ ID NO: 1622132 - RNA, 16 nt, Human
cucuugguccugcugc

SEQ ID NO: 1622133 - RNA, 15 nt, Human
cucuugguccugcug

SEQ ID NO: 1622134 - RNA, 13 nt, Human
cucuugguccugc

SEQ ID NO: 1622135 - RNA, 18 nt, Human
cucuuuaaugucacaggc

SEQ ID NO: 1622136 - RNA, 18 nt, Human
cugucucuacuaaaaaua

SEQ ID NO: 1622137 - RNA, 22 nt, Human
cugucucaaaaaaagaaaaaga

SEQ ID NO: 1622138 - RNA, 21 nt, Human
cuguccuacucugugucaggu

SEQ ID NO: 1622139 - RNA, 14 nt, Human
cuguccgagcuuug

SEQ ID NO: 1622140 - RNA, 21 nt, Human
cugucucaagagggcacuggu

SEQ ID NO: 1622141 - RNA, 20 nt, Human
cugucucaagagggcacugg

SEQ ID NO: 1622142 - RNA, 19 nt, Human
cugucucaagagggcacug

SEQ ID NO: 1622143 - RNA, 18 nt, Human
cugucucaagagggcacu

SEQ ID NO: 1622144 - RNA, 20 nt, Human
cuguccuacucugugucagg

SEQ ID NO: 1622145 - RNA, 18 nt, Human
cuguccuacucuguguca

SEQ ID NO: 1622146 - RNA, 17 nt, Human
cuguccuacucuguguc

SEQ ID NO: 1622147 - RNA, 16 nt, Human
cuguccuacucugugu

SEQ ID NO: 1622148 - RNA, 17 nt, Human
cuguccccgcacugggc

SEQ ID NO: 1622149 - RNA, 14 nt, Human
cugucccccugaca

SEQ ID NO: 1622150 - RNA, 13 nt, Human
cugucccccugac

SEQ ID NO: 1622151 - RNA, 19 nt, Human
cuguauuuuaaaagaauga

SEQ ID NO: 1622152 - RNA, 16 nt, Human
cuguauuuuaaaagaa

SEQ ID NO: 1622153 - RNA, 13 nt, Human
cuguauuuuaaaa

SEQ ID NO: 1622154 - RNA, 22 nt, Human
cugucccagugccgagaaggaa

SEQ ID NO: 1622155 - RNA, 19 nt, Human
cuguccaggcacugcugcc

SEQ ID NO: 1622156 - RNA, 18 nt, Human
cuguccaggcacugcugc

SEQ ID NO: 1622157 - RNA, 23 nt, Human
cuguccaggcacugcugcccagc

SEQ ID NO: 1622158 - RNA, 22 nt, Human
cuguccaggcacugcugcccag

SEQ ID NO: 1622159 - RNA, 21 nt, Human
cuguccaggcacugcugccca

SEQ ID NO: 1622160 - RNA, 20 nt, Human
cuguccaggcacugcugccc

SEQ ID NO: 1622161 - RNA, 15 nt, Human
cuguaugauucccag

SEQ ID NO: 1622162 - RNA, 18 nt, Human
cuguaucccaugagccuc

SEQ ID NO: 1622163 - RNA, 19 nt, Human
cuguaucccaugagccuca

SEQ ID NO: 1622164 - RNA, 15 nt, Human
cuguaucccaugagc

SEQ ID NO: 1622165 - RNA, 22 nt, Human
cuguaccucuugagccuugaac

SEQ ID NO: 1622166 - RNA, 16 nt, Human
cuguauagauuagaga

SEQ ID NO: 1622167 - RNA, 15 nt, Human
cuguauagauuagag

SEQ ID NO: 1622168 - RNA, 13 nt, Human
cuggucccacuca

SEQ ID NO: 1622169 - RNA, 14 nt, Human
cuggucccacucag

SEQ ID NO: 1622170 - RNA, 23 nt, Human
cuggucucaaacucuugaccuca

SEQ ID NO: 1622171 - RNA, 23 nt, Human
cuggucacaggacucugccuccu

SEQ ID NO: 1622172 - RNA, 22 nt, Human
cuggucacaggacucugccucc

SEQ ID NO: 1622173 - RNA, 21 nt, Human
cuggucacaggacucugccuc

SEQ ID NO: 1622174 - RNA, 20 nt, Human
cuggucacaggacucugccu

SEQ ID NO: 1622175 - RNA, 16 nt, Human
cuggguacuuguggac

SEQ ID NO: 1622176 - RNA, 18 nt, Human
cuggguacuuguggacac

SEQ ID NO: 1622177 - RNA, 19 nt, Human
cuggguacuuguggacaca

SEQ ID NO: 1622178 - RNA, 22 nt, Human
cugggcucccuucccaccucuc

SEQ ID NO: 1622179 - RNA, 21 nt, Human
cugggcucccuucccaccucu

SEQ ID NO: 1622180 - RNA, 20 nt, Human
cugggcucccuucccaccuc

SEQ ID NO: 1622181 - RNA, 15 nt, Human
cuggguuggagggug

SEQ ID NO: 1622182 - RNA, 22 nt, Human
cugggucgcccuggacugugug

SEQ ID NO: 1622183 - RNA, 18 nt, Human
cugggucgcccuggacug

SEQ ID NO: 1622184 - RNA, 17 nt, Human
cugggucgcccuggacu

SEQ ID NO: 1622185 - RNA, 21 nt, Human
cuguaccucuugagccuugaa

SEQ ID NO: 1622186 - RNA, 22 nt, Human
cuguacaugaaaacacauuuuu

SEQ ID NO: 1622187 - RNA, 23 nt, Human
cuguacaugaaaacacauuuuuc

SEQ ID NO: 1622188 - RNA, 23 nt, Human
cuguacagagcccacgcccccac

SEQ ID NO: 1622189 - RNA, 21 nt, Human
cuguaauuugugauacaaugc

SEQ ID NO: 1622190 - RNA, 22 nt, Human
cuguaauuugugauacaaugcu

SEQ ID NO: 1622191 - RNA, 18 nt, Human
cuguaauuugugauacaa

SEQ ID NO: 1622192 - RNA, 17 nt, Human
cuguaauuugugauaca

SEQ ID NO: 1622193 - RNA, 14 nt, Human
cugguggcagcuca

SEQ ID NO: 1622194 - RNA, 13 nt, Human
cugguggcagcuc

SEQ ID NO: 1622195 - RNA, 16 nt, Human
cugguggcagcucacc

SEQ ID NO: 1622196 - RNA, 12 nt, Human
cugguggcagcu

SEQ ID NO: 1622197 - RNA, 21 nt, Human
cuggucucgaacuccugaccu

SEQ ID NO: 1622198 - RNA, 16 nt, Human
cuggucucgaacuccu

SEQ ID NO: 1622199 - RNA, 20 nt, Human
cugguucaggguuggccccu

SEQ ID NO: 1622200 - RNA, 23 nt, Human
cugguuaauauuuauaggucacu

SEQ ID NO: 1622201 - RNA, 16 nt, Human
cugguuccauggccuc

SEQ ID NO: 1622202 - RNA, 18 nt, Human
cuguaaggcaaucauggu

SEQ ID NO: 1622203 - RNA, 15 nt, Human
cuggccuucggccuc

SEQ ID NO: 1622204 - RNA, 19 nt, Human
cuggccuggccccucaggg

SEQ ID NO: 1622205 - RNA, 17 nt, Human
cuggccuggccccucag

SEQ ID NO: 1622206 - RNA, 16 nt, Human
cuggccuggccccuca

SEQ ID NO: 1622207 - RNA, 21 nt, Human
cuggccuucggccuccauccu

SEQ ID NO: 1622208 - RNA, 18 nt, Human
cuggccuucggccuccau

SEQ ID NO: 1622209 - RNA, 17 nt, Human
cuggccuucggccucca

SEQ ID NO: 1622210 - RNA, 16 nt, Human
cuggccuucggccucc

SEQ ID NO: 1622211 - RNA, 16 nt, Human
cuggccugagcuggga

SEQ ID NO: 1622212 - RNA, 16 nt, Human
cuggccucugcacucc

SEQ ID NO: 1622213 - RNA, 14 nt, Human
cuggccucugcacu

SEQ ID NO: 1622214 - RNA, 13 nt, Human
cuggccucugcac

SEQ ID NO: 1622215 - RNA, 18 nt, Human
cuggccugagcugggaug

SEQ ID NO: 1622216 - RNA, 14 nt, Human
cuggccuggccccu

SEQ ID NO: 1622217 - RNA, 23 nt, Human
cuggccucaagugauucuccugc

SEQ ID NO: 1622218 - RNA, 12 nt, Human
cuggccucugca

SEQ ID NO: 1622219 - RNA, 22 nt, Human
cuggcaugggaaugaaugucag

SEQ ID NO: 1622220 - RNA, 19 nt, Human
cuggcaugggaaugaaugu

SEQ ID NO: 1622221 - RNA, 18 nt, Human
cuggcaugggaaugaaug

SEQ ID NO: 1622222 - RNA, 16 nt, Human
cuggcaugggaaugaa

SEQ ID NO: 1622223 - RNA, 22 nt, Human
cuggcacuauaauguaagcucu

SEQ ID NO: 1622224 - RNA, 16 nt, Human
cuggcacuauaaugua

SEQ ID NO: 1622225 - RNA, 15 nt, Human
cuggcacuauaaugu

SEQ ID NO: 1622226 - RNA, 24 nt, Human
cuggcaugggaaugaaugucagug

SEQ ID NO: 1622227 - RNA, 19 nt, Human
cuggcacccggccccugcu

SEQ ID NO: 1622228 - RNA, 18 nt, Human
cuggcacccggccccugc

SEQ ID NO: 1622229 - RNA, 17 nt, Human
cuggcacccggccccug

SEQ ID NO: 1622230 - RNA, 16 nt, Human
cuggcacccggccccu

SEQ ID NO: 1622231 - RNA, 16 nt, Human
cuggcacagggcagug

SEQ ID NO: 1622232 - RNA, 15 nt, Human
cuggcacagggcagu

SEQ ID NO: 1622233 - RNA, 14 nt, Human
cuggaaugcagugg

SEQ ID NO: 1622234 - RNA, 14 nt, Human
cuggcaagaaugug

SEQ ID NO: 1622235 - RNA, 18 nt, Human
cuggaauauauaaccagu

SEQ ID NO: 1622236 - RNA, 20 nt, Human
cuggaagugcuaauuuugaa

SEQ ID NO: 1622237 - RNA, 20 nt, Human
cugggagagccuuccagggg

SEQ ID NO: 1622238 - RNA, 19 nt, Human
cugggagagccuuccaggg

SEQ ID NO: 1622239 - RNA, 21 nt, Human
cugggagagccuuccaggggu

SEQ ID NO: 1622240 - RNA, 18 nt, Human
cugggagagccuuccagg

SEQ ID NO: 1622241 - RNA, 17 nt, Human
cugggagagccuuccag

SEQ ID NO: 1622242 - RNA, 18 nt, Human
cuggcuguuggcuggggg

SEQ ID NO: 1622243 - RNA, 23 nt, Human
cuggcuuuucacugcuggcugcc

SEQ ID NO: 1622244 - RNA, 20 nt, Human
cuggcugguuagagguuccc

SEQ ID NO: 1622245 - RNA, 17 nt, Human
cuggcuguuggcugggg

SEQ ID NO: 1622246 - RNA, 16 nt, Human
cuggcuguuggcuggg

SEQ ID NO: 1622247 - RNA, 13 nt, Human
cuggcugucgaga

SEQ ID NO: 1622248 - RNA, 17 nt, Human
cugggauuacaggugug

SEQ ID NO: 1622249 - RNA, 20 nt, Human
cugggauuacaggugugaac

SEQ ID NO: 1622250 - RNA, 18 nt, Human
cugggauuacagguguga

SEQ ID NO: 1622251 - RNA, 16 nt, Human
cugggauuacaggugu

SEQ ID NO: 1622252 - RNA, 18 nt, Human
cugggaugauuggagggg

SEQ ID NO: 1622253 - RNA, 20 nt, Human
cugggaucccucauccucau

SEQ ID NO: 1622254 - RNA, 12 nt, Human
cugggagugagc

SEQ ID NO: 1622255 - RNA, 19 nt, Human
cugggccccaguuguauuu

SEQ ID NO: 1622256 - RNA, 15 nt, Human
cugggccccaguugu

SEQ ID NO: 1622257 - RNA, 21 nt, Human
cugggaggucaaggcugcagu

SEQ ID NO: 1622258 - RNA, 19 nt, Human
cugggaggucaaggcugca

SEQ ID NO: 1622259 - RNA, 22 nt, Human
cugggaggcucuggagcccacu

SEQ ID NO: 1622260 - RNA, 17 nt, Human
cugggaggcucuggagc

SEQ ID NO: 1622261 - RNA, 21 nt, Human
cugggaggcucuggagcccac

SEQ ID NO: 1622262 - RNA, 20 nt, Human
cugggaggcucuggagccca

SEQ ID NO: 1622263 - RNA, 18 nt, Human
cugggaggcucuggagcc

SEQ ID NO: 1622264 - RNA, 14 nt, Human
cugggaggcaguga

SEQ ID NO: 1622265 - RNA, 18 nt, Human
cugcuugccaucccuccc

SEQ ID NO: 1622266 - RNA, 19 nt, Human
cugcuugccaucccucccu

SEQ ID NO: 1622267 - RNA, 20 nt, Human
cugcuugccaucccucccuc

SEQ ID NO: 1622268 - RNA, 22 nt, Human
cugcuugccaucccucccucca

SEQ ID NO: 1622269 - RNA, 20 nt, Human
cugcuugcuugcuuuuuaau

SEQ ID NO: 1622270 - RNA, 16 nt, Human
cugcuugccaucccuc

SEQ ID NO: 1622271 - RNA, 15 nt, Human
cugcuugccaucccu

SEQ ID NO: 1622272 - RNA, 22 nt, Human
cugcuugaggcaacucaucuua

SEQ ID NO: 1622273 - RNA, 18 nt, Human
cugcuugggcuucauccu

SEQ ID NO: 1622274 - RNA, 17 nt, Human
cugcuugggcuucaucc

SEQ ID NO: 1622275 - RNA, 15 nt, Human
cugcuugggcuucau

SEQ ID NO: 1622276 - RNA, 13 nt, Human
cugcuugggcuuc

SEQ ID NO: 1622277 - RNA, 19 nt, Human
cugcuugugaaaggaaaga

SEQ ID NO: 1622278 - RNA, 19 nt, Human
cugcuugggcuucauccuc

SEQ ID NO: 1622279 - RNA, 15 nt, Human
cugcuuuuggucugu

SEQ ID NO: 1622280 - RNA, 17 nt, Human
cugcuuugggcugcccu

SEQ ID NO: 1622281 - RNA, 13 nt, Human
cugcuuuggaaau

SEQ ID NO: 1622282 - RNA, 16 nt, Human
cugcuuugggcugccc

SEQ ID NO: 1622283 - RNA, 16 nt, Human
cugcuuucagauacug

SEQ ID NO: 1622284 - RNA, 15 nt, Human
cugcuuucagauacu

SEQ ID NO: 1622285 - RNA, 12 nt, Human
cugcuuucagau

SEQ ID NO: 1622286 - RNA, 17 nt, Human
cugcuuuuggucugugu

SEQ ID NO: 1622287 - RNA, 19 nt, Human
cugcuuuugucuaugggac

SEQ ID NO: 1622288 - RNA, 17 nt, Human
cugcuggguguggcgca

SEQ ID NO: 1622289 - RNA, 15 nt, Human
cugcuggguguggcg

SEQ ID NO: 1622290 - RNA, 14 nt, Human
cugcuggguguggc

SEQ ID NO: 1622291 - RNA, 14 nt, Human
cugcugcuggcugg

SEQ ID NO: 1622292 - RNA, 13 nt, Human
cugcuggcugccu

SEQ ID NO: 1622293 - RNA, 15 nt, Human
cugcuggcugccuua

SEQ ID NO: 1622294 - RNA, 14 nt, Human
cugcuggcugccuu

SEQ ID NO: 1622295 - RNA, 13 nt, Human
cugcugcuggcug

SEQ ID NO: 1622296 - RNA, 12 nt, Human
cugcugcuggcu

SEQ ID NO: 1622297 - RNA, 21 nt, Human
cugcuugaggcaacucaucuu

SEQ ID NO: 1622298 - RNA, 20 nt, Human
cugcuugaggcaacucaucu

SEQ ID NO: 1622299 - RNA, 13 nt, Human
cugcuugaggcaa

SEQ ID NO: 1622300 - RNA, 12 nt, Human
cugcccucuccu

SEQ ID NO: 1622301 - RNA, 13 nt, Human
cugcccucuccug

SEQ ID NO: 1622302 - RNA, 14 nt, Human
cugcccucuccugg

SEQ ID NO: 1622303 - RNA, 20 nt, Human
cugcccugcccaccuggccu

SEQ ID NO: 1622304 - RNA, 15 nt, Human
cugcccucuccuggg

SEQ ID NO: 1622305 - RNA, 21 nt, Human
cugcccugcccaccuggccuc

SEQ ID NO: 1622306 - RNA, 16 nt, Human
cugccugaagucacac

SEQ ID NO: 1622307 - RNA, 18 nt, Human
cugccugaagucacacag

SEQ ID NO: 1622308 - RNA, 19 nt, Human
cugccugaagucacacagu

SEQ ID NO: 1622309 - RNA, 23 nt, Human
cugccugaagucacacagugagu

SEQ ID NO: 1622310 - RNA, 21 nt, Human
cugccugcaguacuuuaccuc

SEQ ID NO: 1622311 - RNA, 20 nt, Human
cugccugcaguacuuuaccu

SEQ ID NO: 1622312 - RNA, 19 nt, Human
cugcggugcuaucuccccc

SEQ ID NO: 1622313 - RNA, 18 nt, Human
cugcggugcuaucucccc

SEQ ID NO: 1622314 - RNA, 23 nt, Human
cugcgguccacccaggagccccg

SEQ ID NO: 1622315 - RNA, 23 nt, Human
cugcgggucacaggagggagggg

SEQ ID NO: 1622316 - RNA, 22 nt, Human
cugcgggucacaggagggaggg

SEQ ID NO: 1622317 - RNA, 21 nt, Human
cugcgggucacaggagggagg

SEQ ID NO: 1622318 - RNA, 15 nt, Human
cugcgggucacagga

SEQ ID NO: 1622319 - RNA, 22 nt, Human
cugccugcuuuuuauggccugu

SEQ ID NO: 1622320 - RNA, 19 nt, Human
cugcucuccgaccagacac

SEQ ID NO: 1622321 - RNA, 15 nt, Human
cugcucuccgaccag

SEQ ID NO: 1622322 - RNA, 20 nt, Human
cugcuccucuccccagcaag

SEQ ID NO: 1622323 - RNA, 19 nt, Human
cugcuccucuccccagcaa

SEQ ID NO: 1622324 - RNA, 23 nt, Human
cugcuccucuccccagcaaguga

SEQ ID NO: 1622325 - RNA, 23 nt, Human
cugcggugcuaucucccccagcc

SEQ ID NO: 1622326 - RNA, 22 nt, Human
cugcggugcuaucucccccagc

SEQ ID NO: 1622327 - RNA, 21 nt, Human
cugcggugcuaucucccccag

SEQ ID NO: 1622328 - RNA, 20 nt, Human
cugcggugcuaucuccccca

SEQ ID NO: 1622329 - RNA, 12 nt, Human
cugcucugguua

SEQ ID NO: 1622330 - RNA, 19 nt, Human
cugcucuugaacuccugac

SEQ ID NO: 1622331 - RNA, 18 nt, Human
cugcucuugaacuccuga

SEQ ID NO: 1622332 - RNA, 16 nt, Human
cugcucuugaacuccu

SEQ ID NO: 1622333 - RNA, 13 nt, Human
cugcugcaguugc

SEQ ID NO: 1622334 - RNA, 10 nt, Human
cugcugcagu

SEQ ID NO: 1622335 - RNA, 14 nt, Human
cugcugcaguugcc

SEQ ID NO: 1622336 - RNA, 15 nt, Human
cugcugcaguugcca

SEQ ID NO: 1622337 - RNA, 23 nt, Human
cugcugccugcuuuuuauggccu

SEQ ID NO: 1622338 - RNA, 14 nt, Human
cugcugccugcuuu

SEQ ID NO: 1622339 - RNA, 20 nt, Human
cugcaucagcugcugaaaca

SEQ ID NO: 1622340 - RNA, 20 nt, Human
cugcaucaagaugugacaug

SEQ ID NO: 1622341 - RNA, 15 nt, Human
cugcauaugaaagga

SEQ ID NO: 1622342 - RNA, 14 nt, Human
cugccacccugggg

SEQ ID NO: 1622343 - RNA, 12 nt, Human
cugccacccugg

SEQ ID NO: 1622344 - RNA, 21 nt, Human
cugccacccuggggagaaagu

SEQ ID NO: 1622345 - RNA, 15 nt, Human
cugccagcaacgcag

SEQ ID NO: 1622346 - RNA, 21 nt, Human
cugccaggaagccagcaggcu

SEQ ID NO: 1622347 - RNA, 20 nt, Human
cugccaggaagccagcaggc

SEQ ID NO: 1622348 - RNA, 14 nt, Human
cugccaggaagcca

SEQ ID NO: 1622349 - RNA, 13 nt, Human
cugccaggaagcc

SEQ ID NO: 1622350 - RNA, 15 nt, Human
cugccauccucccaa

SEQ ID NO: 1622351 - RNA, 21 nt, Human
cugccauccagguucagcuug

SEQ ID NO: 1622352 - RNA, 22 nt, Human
cugccaggaagccagcaggcuc

SEQ ID NO: 1622353 - RNA, 20 nt, Human
cugccaucucaccuccugcu

SEQ ID NO: 1622354 - RNA, 20 nt, Human
cugcccaggccccugccacc

SEQ ID NO: 1622355 - RNA, 19 nt, Human
cugcccaggccccugccac

SEQ ID NO: 1622356 - RNA, 18 nt, Human
cugcccaggccccugcca

SEQ ID NO: 1622357 - RNA, 16 nt, Human
cugcccaggccccugc

SEQ ID NO: 1622358 - RNA, 17 nt, Human
cugcccaggccugccug

SEQ ID NO: 1622359 - RNA, 15 nt, Human
cugcccaggccccug

SEQ ID NO: 1622360 - RNA, 14 nt, Human
cugcccaggccccu

SEQ ID NO: 1622361 - RNA, 13 nt, Human
cugcccaccuggc

SEQ ID NO: 1622362 - RNA, 12 nt, Human
cugcccaccugg

SEQ ID NO: 1622363 - RNA, 15 nt, Human
cugccauuucugaga

SEQ ID NO: 1622364 - RNA, 20 nt, Human
cugcccggcaggguccuaga

SEQ ID NO: 1622365 - RNA, 13 nt, Human
cugcccggcaggg

SEQ ID NO: 1622366 - RNA, 18 nt, Human
cugccccuggcagccccu

SEQ ID NO: 1622367 - RNA, 19 nt, Human
cugccccuggcagccccug

SEQ ID NO: 1622368 - RNA, 22 nt, Human
cugcccuaaugcgcaggcuggc

SEQ ID NO: 1622369 - RNA, 21 nt, Human
cugcccuaaugcgcaggcugg

SEQ ID NO: 1622370 - RNA, 20 nt, Human
cugcccuaaugcgcaggcug

SEQ ID NO: 1622371 - RNA, 12 nt, Human
cugcacugucaa

SEQ ID NO: 1622372 - RNA, 21 nt, Human
cugcacuccccugcugggugu

SEQ ID NO: 1622373 - RNA, 13 nt, Human
cugcagagggcac

SEQ ID NO: 1622374 - RNA, 15 nt, Human
cugcagcaauaaagc

SEQ ID NO: 1622375 - RNA, 16 nt, Human
cugcagcaauaaagca

SEQ ID NO: 1622376 - RNA, 10 nt, Human
cugcagaggg

SEQ ID NO: 1622377 - RNA, 20 nt, Human
cugcacuccccugcugggug

SEQ ID NO: 1622378 - RNA, 19 nt, Human
cugcacuccccugcugggu

SEQ ID NO: 1622379 - RNA, 13 nt, Human
cugcacuccccug

SEQ ID NO: 1622380 - RNA, 14 nt, Human
cugcacuccccugc

SEQ ID NO: 1622381 - RNA, 20 nt, Human
cugcaccgggccacagagaa

SEQ ID NO: 1622382 - RNA, 18 nt, Human
cugcaccgggccacagag

SEQ ID NO: 1622383 - RNA, 20 nt, Human
cugcacuccagccuggguga

SEQ ID NO: 1622384 - RNA, 15 nt, Human
cugcaccgggccaca

SEQ ID NO: 1622385 - RNA, 14 nt, Human
cugcaccgggccac

SEQ ID NO: 1622386 - RNA, 16 nt, Human
cugcaccggcuggccu

SEQ ID NO: 1622387 - RNA, 15 nt, Human
cugcaccggcuggcc

SEQ ID NO: 1622388 - RNA, 23 nt, Human
cugaggcccuucucuccagcccc

SEQ ID NO: 1622389 - RNA, 22 nt, Human
cugaggcccuucucuccagccc

SEQ ID NO: 1622390 - RNA, 14 nt, Human
cugcaccggcuggc

SEQ ID NO: 1622391 - RNA, 17 nt, Human
cugcagcaauaaagcag

SEQ ID NO: 1622392 - RNA, 18 nt, Human
cugcaggucccuaauaaa

SEQ ID NO: 1622393 - RNA, 17 nt, Human
cugcaggucccuaauaa

SEQ ID NO: 1622394 - RNA, 16 nt, Human
cugcaggucccuaaua

SEQ ID NO: 1622395 - RNA, 15 nt, Human
cugcaggucccuaau

SEQ ID NO: 1622396 - RNA, 14 nt, Human
cugcaggucccuaa

SEQ ID NO: 1622397 - RNA, 13 nt, Human
cugcaggucccua

SEQ ID NO: 1622398 - RNA, 12 nt, Human
cugcaggucccu

SEQ ID NO: 1622399 - RNA, 11 nt, Human
cugcagguccc

SEQ ID NO: 1622400 - RNA, 16 nt, Human
cugcaguugccaguca

SEQ ID NO: 1622401 - RNA, 13 nt, Human
cugcaguugccag

SEQ ID NO: 1622402 - RNA, 17 nt, Human
cugcaguugccagucac

SEQ ID NO: 1622403 - RNA, 23 nt, Human
cugcaggucccuaauaaagcugu

SEQ ID NO: 1622404 - RNA, 22 nt, Human
cugcaggucccuaauaaagcug

SEQ ID NO: 1622405 - RNA, 21 nt, Human
cugcaggucccuaauaaagcu

SEQ ID NO: 1622406 - RNA, 20 nt, Human
cugcaggucccuaauaaagc

SEQ ID NO: 1622407 - RNA, 19 nt, Human
cugcaggucccuaauaaag

SEQ ID NO: 1622408 - RNA, 14 nt, Human
cuuuggauaauaag

SEQ ID NO: 1622409 - RNA, 18 nt, Human
cuuuuaaaacacuuccau

SEQ ID NO: 1622410 - RNA, 15 nt, Human
cuuuuaauccuggcu

SEQ ID NO: 1622411 - RNA, 21 nt, Human
cuuuucgcaggauucuuccuc

SEQ ID NO: 1622412 - RNA, 20 nt, Human
cuuuucgcaggauucuuccu

SEQ ID NO: 1622413 - RNA, 14 nt, Human
cuuuucccuucuuu

SEQ ID NO: 1622414 - RNA, 16 nt, Human
cuuuucacugcuggcu

SEQ ID NO: 1622415 - RNA, 23 nt, Human
cuuuuccaacccucaucaccaac

SEQ ID NO: 1622416 - RNA, 13 nt, Human
cuuuuccaacccu

SEQ ID NO: 1622417 - RNA, 22 nt, Human
cuuuucauuuaggugaggaagc

SEQ ID NO: 1622418 - RNA, 12 nt, Human
cuuuucacugcu

SEQ ID NO: 1622419 - RNA, 17 nt, Human
cuuuucuuucagccaag

SEQ ID NO: 1622420 - RNA, 13 nt, Human
cuuuucuuuucuu

SEQ ID NO: 1622421 - RNA, 22 nt, Human
cuuuuuaauauugauaugcuua

SEQ ID NO: 1622422 - RNA, 16 nt, Human
cuuuuuuauacauaaa

SEQ ID NO: 1622423 - RNA, 17 nt, Human
cuuuuuuauacauaaac

SEQ ID NO: 1622424 - RNA, 15 nt, Human
cuuuuuuauacauaa

SEQ ID NO: 1622425 - RNA, 18 nt, Human
cuuuuuuauacauaaaca

SEQ ID NO: 1622426 - RNA, 19 nt, Human
cuuuuuuaucaugugaaau

SEQ ID NO: 1622427 - RNA, 16 nt, Human
gaaaaagaaaaaauau

SEQ ID NO: 1622428 - RNA, 11 nt, Human
gaaaaagaaaa

SEQ ID NO: 1622429 - RNA, 15 nt, Human
cuuuuuucacuacau

SEQ ID NO: 1622430 - RNA, 19 nt, Human
cuuuccucaaaacuucaga

SEQ ID NO: 1622431 - RNA, 21 nt, Human
cuuuccgguguuuaagacauu

SEQ ID NO: 1622432 - RNA, 15 nt, Human
cuuuccaggaaggcu

SEQ ID NO: 1622433 - RNA, 21 nt, Human
cuuuccccaugucucgacuca

SEQ ID NO: 1622434 - RNA, 20 nt, Human
cuuuccccaugucucgacuc

SEQ ID NO: 1622435 - RNA, 15 nt, Human
cuuuccccaugucuc

SEQ ID NO: 1622436 - RNA, 14 nt, Human
cuuuccaggaaggc

SEQ ID NO: 1622437 - RNA, 16 nt, Human
cuuuccaaaguacacu

SEQ ID NO: 1622438 - RNA, 16 nt, Human
cuuuccaaaugcccag

SEQ ID NO: 1622439 - RNA, 22 nt, Human
cuuuccaaaguacacuguuuca

SEQ ID NO: 1622440 - RNA, 21 nt, Human
cuuguggacacagcucuucuc

SEQ ID NO: 1622441 - RNA, 20 nt, Human
cuuguguguuuauugucaaa

SEQ ID NO: 1622442 - RNA, 19 nt, Human
cuuuauuuuguguuuagga

SEQ ID NO: 1622443 - RNA, 15 nt, Human
cuuugcagacaggca

SEQ ID NO: 1622444 - RNA, 14 nt, Human
cuuugcagacaggc

SEQ ID NO: 1622445 - RNA, 23 nt, Human
cuuuggaaagaguaggaagacuu

SEQ ID NO: 1622446 - RNA, 19 nt, Human
cuuuggaaagaguaggaag

SEQ ID NO: 1622447 - RNA, 16 nt, Human
cuuugcagacaggcaa

SEQ ID NO: 1622448 - RNA, 21 nt, Human
cuuuccugaggcugggcuccc

SEQ ID NO: 1622449 - RNA, 20 nt, Human
cuuuccugaggcugggcucc

SEQ ID NO: 1622450 - RNA, 16 nt, Human
cuuuccugaggcuggg

SEQ ID NO: 1622451 - RNA, 17 nt, Human
cuuuccugaggcugggc

SEQ ID NO: 1622452 - RNA, 23 nt, Human
cuugcaucaauuuuucuuauuuc

SEQ ID NO: 1622453 - RNA, 21 nt, Human
cuugcaugaggcuaguguggu

SEQ ID NO: 1622454 - RNA, 21 nt, Human
cuugcaugguuuagaaagcuu

SEQ ID NO: 1622455 - RNA, 18 nt, Human
cuugcagacucuacagag

SEQ ID NO: 1622456 - RNA, 20 nt, Human
cuugcagacucuacagaggc

SEQ ID NO: 1622457 - RNA, 14 nt, Human
cuugcaauggcagc

SEQ ID NO: 1622458 - RNA, 22 nt, Human
cuugcaaaguaucccuacugua

SEQ ID NO: 1622459 - RNA, 21 nt, Human
cuugaccauucuccaccugcc

SEQ ID NO: 1622460 - RNA, 14 nt, Human
cuugagagggugga

SEQ ID NO: 1622461 - RNA, 20 nt, Human
cuugaccauucuccaccugc

SEQ ID NO: 1622462 - RNA, 17 nt, Human
cuugaccauucuccacc

SEQ ID NO: 1622463 - RNA, 19 nt, Human
cuugagccuugaacuuuga

SEQ ID NO: 1622464 - RNA, 20 nt, Human
cuugagccuugaacuuugac

SEQ ID NO: 1622465 - RNA, 22 nt, Human
cuugagccuugaacuuugaccu

SEQ ID NO: 1622466 - RNA, 13 nt, Human
cuugagcucagga

SEQ ID NO: 1622467 - RNA, 20 nt, Human
cuugaacccgggaggcagag

SEQ ID NO: 1622468 - RNA, 19 nt, Human
cuugaacccgggaggcaga

SEQ ID NO: 1622469 - RNA, 20 nt, Human
cuugaaauuugaauuuugug

SEQ ID NO: 1622470 - RNA, 19 nt, Human
cuugaaauuugaauuuugu

SEQ ID NO: 1622471 - RNA, 14 nt, Human
cuugaacccgggag

SEQ ID NO: 1622472 - RNA, 18 nt, Human
cuugaacuccuggccuca

SEQ ID NO: 1622473 - RNA, 17 nt, Human
cuugaacuccuggccuc

SEQ ID NO: 1622474 - RNA, 15 nt, Human
cuugaacuccuggcc

SEQ ID NO: 1622475 - RNA, 14 nt, Human
cuugaacuccuggc

SEQ ID NO: 1622476 - RNA, 20 nt, Human
cuugaacuggguacuugugg

SEQ ID NO: 1622477 - RNA, 18 nt, Human
cuugaacuggguacuugu

SEQ ID NO: 1622478 - RNA, 15 nt, Human
cuugaacuuugaccu

SEQ ID NO: 1622479 - RNA, 16 nt, Human
cuugaacuggguacuu

SEQ ID NO: 1622480 - RNA, 19 nt, Human
cuugaacuccuggccucaa

SEQ ID NO: 1622481 - RNA, 19 nt, Human
cuucuuuccacagaagcuc

SEQ ID NO: 1622482 - RNA, 13 nt, Human
cuucuuuccacag

SEQ ID NO: 1622483 - RNA, 19 nt, Human
cuugaaauauaggaacuua

SEQ ID NO: 1622484 - RNA, 17 nt, Human
cuucuuuuuuugugaug

SEQ ID NO: 1622485 - RNA, 17 nt, Human
cuugccaaauauaaaua

SEQ ID NO: 1622486 - RNA, 13 nt, Human
cuugcuugcuuuu

SEQ ID NO: 1622487 - RNA, 15 nt, Human
cuugcuuuuaaaauc

SEQ ID NO: 1622488 - RNA, 13 nt, Human
cuuggcugcaggg

SEQ ID NO: 1622489 - RNA, 12 nt, Human
cuuggcugcagg

SEQ ID NO: 1622490 - RNA, 14 nt, Human
cuuggauugucccc

SEQ ID NO: 1622491 - RNA, 13 nt, Human
cuuggauuguccc

SEQ ID NO: 1622492 - RNA, 23 nt, Human
cuuggcucaaguccucuuuucug

SEQ ID NO: 1622493 - RNA, 18 nt, Human
cuuguaaaggaauuuaaa

SEQ ID NO: 1622494 - RNA, 18 nt, Human
cuuguaaaaauuaaaagu

SEQ ID NO: 1622495 - RNA, 15 nt, Human
cuuggggccuaugca

SEQ ID NO: 1622496 - RNA, 19 nt, Human
cuuggggaccagagcugcc

SEQ ID NO: 1622497 - RNA, 18 nt, Human
cuuggggaccagagcugc

SEQ ID NO: 1622498 - RNA, 17 nt, Human
cuuggggaccagagcug

SEQ ID NO: 1622499 - RNA, 14 nt, Human
cuuggcugcaggga

SEQ ID NO: 1622500 - RNA, 18 nt, Human
cuuguggacacagcucuu

SEQ ID NO: 1622501 - RNA, 17 nt, Human
cuuguggacacagcucu

SEQ ID NO: 1622502 - RNA, 18 nt, Human
cuuguauuauguguguuu

SEQ ID NO: 1622503 - RNA, 13 nt, Human
cuuguauuaugug

SEQ ID NO: 1622504 - RNA, 21 nt, Human
cuuguaugaaagauggcugug

SEQ ID NO: 1622505 - RNA, 23 nt, Human
gaagagcuguucacagccagacu

SEQ ID NO: 1622506 - RNA, 20 nt, Human
gaagagcuguucacagccag

SEQ ID NO: 1622507 - RNA, 15 nt, Human
gaagagcuguucaca

SEQ ID NO: 1622508 - RNA, 13 nt, Human
gaagagcuguuca

SEQ ID NO: 1622509 - RNA, 19 nt, Human
gaagacuucaucccucugg

SEQ ID NO: 1622510 - RNA, 17 nt, Human
gaagacuucaucccucu

SEQ ID NO: 1622511 - RNA, 12 nt, Human
gaagagccuugc

SEQ ID NO: 1622512 - RNA, 16 nt, Human
gaagacuucaucccuc

SEQ ID NO: 1622513 - RNA, 15 nt, Human
gaagacuucaucccu

SEQ ID NO: 1622514 - RNA, 17 nt, Human
gaagauguagaggagaa

SEQ ID NO: 1622515 - RNA, 23 nt, Human
gaagauuuugaaauuuuuauuaa

SEQ ID NO: 1622516 - RNA, 22 nt, Human
gaagauugagauguguucacaa

SEQ ID NO: 1622517 - RNA, 17 nt, Human
gaagauugagauguguu

SEQ ID NO: 1622518 - RNA, 22 nt, Human
gaacuuguaaaggaauuuaaaa

SEQ ID NO: 1622519 - RNA, 17 nt, Human
gaacuugggccacugug

SEQ ID NO: 1622520 - RNA, 18 nt, Human
gaacuuggcgcugccccu

SEQ ID NO: 1622521 - RNA, 15 nt, Human
gaacuuguuuucugg

SEQ ID NO: 1622522 - RNA, 12 nt, Human
gaacuugguucc

SEQ ID NO: 1622523 - RNA, 17 nt, Human
gaacuuuccaggaaggc

SEQ ID NO: 1622524 - RNA, 16 nt, Human
gaacuuugaccucugc

SEQ ID NO: 1622525 - RNA, 22 nt, Human
gaacuuugaccucugcagcaau

SEQ ID NO: 1622526 - RNA, 16 nt, Human
gaacucccuuucaaca

SEQ ID NO: 1622527 - RNA, 15 nt, Human
gaacuccuaaaucaa

SEQ ID NO: 1622528 - RNA, 13 nt, Human
gaacuccugaccu

SEQ ID NO: 1622529 - RNA, 16 nt, Human
gaacuccuaaaucaag

SEQ ID NO: 1622530 - RNA, 15 nt, Human
gaaccacaagacugc

SEQ ID NO: 1622531 - RNA, 14 nt, Human
gaaccacaagacug

SEQ ID NO: 1622532 - RNA, 18 nt, Human
gaaccacaucuugcucug

SEQ ID NO: 1622533 - RNA, 20 nt, Human
gaaccacaucuugcucugcu

SEQ ID NO: 1622534 - RNA, 14 nt, Human
gaacuuaaauaaug

SEQ ID NO: 1622535 - RNA, 17 nt, Human
gaacuuaaauaauguga

SEQ ID NO: 1622536 - RNA, 22 nt, Human
gaacuugaaauuugaauuuugu

SEQ ID NO: 1622537 - RNA, 15 nt, Human
gaacuugaaauuuga

SEQ ID NO: 1622538 - RNA, 13 nt, Human
gaacuugaaauuu

SEQ ID NO: 1622539 - RNA, 12 nt, Human
gaacuugaaauu

SEQ ID NO: 1622540 - RNA, 23 nt, Human
gaaguccaagcauuuagauguau

SEQ ID NO: 1622541 - RNA, 20 nt, Human
gaagucacauuccugaacag

SEQ ID NO: 1622542 - RNA, 16 nt, Human
gaagucacauuccuga

SEQ ID NO: 1622543 - RNA, 21 nt, Human
gaagucacauuccugaacagg

SEQ ID NO: 1622544 - RNA, 15 nt, Human
gaagucacugcacag

SEQ ID NO: 1622545 - RNA, 14 nt, Human
gaagucagaucugc

SEQ ID NO: 1622546 - RNA, 23 nt, Human
gaagucagaucugccuaaggacu

SEQ ID NO: 1622547 - RNA, 22 nt, Human
gaagucagaucugccuaaggac

SEQ ID NO: 1622548 - RNA, 21 nt, Human
gaaggugaggagcuugaaacc

SEQ ID NO: 1622549 - RNA, 19 nt, Human
gaaguaauaugcacacauu

SEQ ID NO: 1622550 - RNA, 20 nt, Human
gaaguaauaugcacacauuu

SEQ ID NO: 1622551 - RNA, 13 nt, Human
gaagucacacagu

SEQ ID NO: 1622552 - RNA, 21 nt, Human
gaaguaauaugcacacauuuu

SEQ ID NO: 1622553 - RNA, 15 nt, Human
gaagggggcugggac

SEQ ID NO: 1622554 - RNA, 13 nt, Human
gaagggggcuggg

SEQ ID NO: 1622555 - RNA, 18 nt, Human
gaaggcagggagggccug

SEQ ID NO: 1622556 - RNA, 23 nt, Human
gaaggcagggagggccugggccc

SEQ ID NO: 1622557 - RNA, 22 nt, Human
gaaggcagggagggccugggcc

SEQ ID NO: 1622558 - RNA, 20 nt, Human
gaaggcagggagggccuggg

SEQ ID NO: 1622559 - RNA, 21 nt, Human
gaagccgcuggggccaguugg

SEQ ID NO: 1622560 - RNA, 20 nt, Human
gaagccgcuggggccaguug

SEQ ID NO: 1622561 - RNA, 18 nt, Human
gaagccgcuggggccagu

SEQ ID NO: 1622562 - RNA, 14 nt, Human
gaagccgcuggggc

SEQ ID NO: 1622563 - RNA, 20 nt, Human
gaaggaaacccagcucuggu

SEQ ID NO: 1622564 - RNA, 19 nt, Human
gaaggaaacccagcucugg

SEQ ID NO: 1622565 - RNA, 21 nt, Human
gaaggacauugcggacagcca

SEQ ID NO: 1622566 - RNA, 20 nt, Human
gaaggacauugcggacagcc

SEQ ID NO: 1622567 - RNA, 19 nt, Human
gaaggacauugcggacagc

SEQ ID NO: 1622568 - RNA, 22 nt, Human
gaaggaauaaauugcuccuuga

SEQ ID NO: 1622569 - RNA, 23 nt, Human
gaaggacccggaggggccuggca

SEQ ID NO: 1622570 - RNA, 22 nt, Human
gaaggacccggaggggccuggc

SEQ ID NO: 1622571 - RNA, 15 nt, Human
gaaggaacguccccu

SEQ ID NO: 1622572 - RNA, 22 nt, Human
gaaggaaacccagcucuggucc

SEQ ID NO: 1622573 - RNA, 21 nt, Human
gaaggaaacccagcucugguc

SEQ ID NO: 1622574 - RNA, 19 nt, Human
gaaggaagacuucaucccu

SEQ ID NO: 1622575 - RNA, 13 nt, Human
gaaaguucaugcu

SEQ ID NO: 1622576 - RNA, 16 nt, Human
gaaaguuuacaggaaa

SEQ ID NO: 1622577 - RNA, 14 nt, Human
gaaaguuuacagga

SEQ ID NO: 1622578 - RNA, 16 nt, Human
gaaaggaaagaggcuc

SEQ ID NO: 1622579 - RNA, 11 nt, Human
gaaaggaaaga

SEQ ID NO: 1622580 - RNA, 14 nt, Human
gaaagcagaacagu

SEQ ID NO: 1622581 - RNA, 13 nt, Human
gaaagcagaacag

SEQ ID NO: 1622582 - RNA, 23 nt, Human
gaaagauggcugugccucugccu

SEQ ID NO: 1622583 - RNA, 16 nt, Human
gaaagaucaaaagguu

SEQ ID NO: 1622584 - RNA, 22 nt, Human
gaaagauggcugugccucugcc

SEQ ID NO: 1622585 - RNA, 23 nt, Human
gaaagacuauucaaacagucuca

SEQ ID NO: 1622586 - RNA, 22 nt, Human
gaaagacuauucaaacagucuc

SEQ ID NO: 1622587 - RNA, 19 nt, Human
gaaagacuauucaaacagu

SEQ ID NO: 1622588 - RNA, 17 nt, Human
gaaagacuguacaaagu

SEQ ID NO: 1622589 - RNA, 15 nt, Human
gaaacugccagcaac

SEQ ID NO: 1622590 - RNA, 13 nt, Human
gaaacugccagca

SEQ ID NO: 1622591 - RNA, 20 nt, Human
gaaacuaggugcauauuuau

SEQ ID NO: 1622592 - RNA, 16 nt, Human
gaaacggaugauuucu

SEQ ID NO: 1622593 - RNA, 16 nt, Human
gaaaaaugagccuggc

SEQ ID NO: 1622594 - RNA, 22 nt, Human
gaacagacuggaagcacagcuu

SEQ ID NO: 1622595 - RNA, 17 nt, Human
gaacaggauauucucac

SEQ ID NO: 1622596 - RNA, 24 nt, Human
gaacaguuaccucugccucagaaa

SEQ ID NO: 1622597 - RNA, 20 nt, Human
gaacaguuguguuugaagca

SEQ ID NO: 1622598 - RNA, 22 nt, Human
gaacaguuguguuugaagcaca

SEQ ID NO: 1622599 - RNA, 23 nt, Human
gaaauuaguacuccccuccuuga

SEQ ID NO: 1622600 - RNA, 20 nt, Human
gaacagacuggaagcacagc

SEQ ID NO: 1622601 - RNA, 17 nt, Human
gaacacuccuucacaga

SEQ ID NO: 1622602 - RNA, 16 nt, Human
gaacacuccuucacag

SEQ ID NO: 1622603 - RNA, 15 nt, Human
gaacacuccuucaca

SEQ ID NO: 1622604 - RNA, 21 nt, Human
gaaauuuccugggagcuuuug

SEQ ID NO: 1622605 - RNA, 13 nt, Human
gaaauuugaauuu

SEQ ID NO: 1622606 - RNA, 24 nt, Human
gaaauuugaauuuuguguuagaga

SEQ ID NO: 1622607 - RNA, 16 nt, Human
gaaauuugaauuuugu

SEQ ID NO: 1622608 - RNA, 13 nt, Human
gaaauauuuauuu

SEQ ID NO: 1622609 - RNA, 20 nt, Human
gaaauaucugaaaauguaug

SEQ ID NO: 1622610 - RNA, 19 nt, Human
gaaauaucugaaaauguau

SEQ ID NO: 1622611 - RNA, 18 nt, Human
gaaauaucugaaaaugua

SEQ ID NO: 1622612 - RNA, 16 nt, Human
gaaauauuuauuuuaa

SEQ ID NO: 1622613 - RNA, 15 nt, Human
gaaauauuuauuuua

SEQ ID NO: 1622614 - RNA, 21 nt, Human
gaaauaaacgucuuaaauauu

SEQ ID NO: 1622615 - RNA, 18 nt, Human
gaaauaaacgucuuaaau

SEQ ID NO: 1622616 - RNA, 17 nt, Human
gaaauaaacgucuuaaa

SEQ ID NO: 1622617 - RNA, 16 nt, Human
gaaauaaacgucuuaa

SEQ ID NO: 1622618 - RNA, 14 nt, Human
gaaauaaacgucuu

SEQ ID NO: 1622619 - RNA, 19 nt, Human
gaaaugggcagagcagaga

SEQ ID NO: 1622620 - RNA, 17 nt, Human
gaaaugggcagagcaga

SEQ ID NO: 1622621 - RNA, 17 nt, Human
gaaauguacagcaagga

SEQ ID NO: 1622622 - RNA, 15 nt, Human
gaaaugggcagagca

SEQ ID NO: 1622623 - RNA, 16 nt, Human
gaaaugggcagagcag

SEQ ID NO: 1622624 - RNA, 18 nt, Human
gaaaugaggucagagccu

SEQ ID NO: 1622625 - RNA, 11 nt, Human
gaaaugagcug

SEQ ID NO: 1622626 - RNA, 18 nt, Human
gagcugcccucuccuggg

SEQ ID NO: 1622627 - RNA, 19 nt, Human
gagcugcccucuccugggc

SEQ ID NO: 1622628 - RNA, 21 nt, Human
gagcugcccucuccugggcag

SEQ ID NO: 1622629 - RNA, 23 nt, Human
gagcugcccucuccugggcagcu

SEQ ID NO: 1622630 - RNA, 22 nt, Human
gagcuuucugcuaucaaagagg

SEQ ID NO: 1622631 - RNA, 20 nt, Human
gagcuuugaaaauucagugg

SEQ ID NO: 1622632 - RNA, 17 nt, Human
gaggaaagcaaaggaga

SEQ ID NO: 1622633 - RNA, 16 nt, Human
gaggaaagcaaaggag

SEQ ID NO: 1622634 - RNA, 14 nt, Human
gagcuuuuguagaa

SEQ ID NO: 1622635 - RNA, 23 nt, Human
gaggaaaaccaagccguggcuuc

SEQ ID NO: 1622636 - RNA, 21 nt, Human
gaggaaaaccaagccguggcu

SEQ ID NO: 1622637 - RNA, 20 nt, Human
gaggaaaaccaagccguggc

SEQ ID NO: 1622638 - RNA, 16 nt, Human
gaggaacaaggcaagg

SEQ ID NO: 1622639 - RNA, 14 nt, Human
gaggaacaaggcaa

SEQ ID NO: 1622640 - RNA, 17 nt, Human
gaggaagccgcuggggc

SEQ ID NO: 1622641 - RNA, 14 nt, Human
gaggaagccgcugg

SEQ ID NO: 1622642 - RNA, 18 nt, Human
gaggaagccgcuggggcc

SEQ ID NO: 1622643 - RNA, 19 nt, Human
gaggaagccugauuaaaga

SEQ ID NO: 1622644 - RNA, 18 nt, Human
gaggaagccugauuaaag

SEQ ID NO: 1622645 - RNA, 13 nt, Human
gaggaagccgcug

SEQ ID NO: 1622646 - RNA, 17 nt, Human
gaggaagagaaaaaaua

SEQ ID NO: 1622647 - RNA, 16 nt, Human
gagcucgugggacagu

SEQ ID NO: 1622648 - RNA, 15 nt, Human
gagcugaguggggga

SEQ ID NO: 1622649 - RNA, 17 nt, Human
gagcuagcagcagggag

SEQ ID NO: 1622650 - RNA, 15 nt, Human
gagcuagcagcaggg

SEQ ID NO: 1622651 - RNA, 15 nt, Human
gagccugcaguuauu

SEQ ID NO: 1622652 - RNA, 20 nt, Human
gagccgagaucacgccacug

SEQ ID NO: 1622653 - RNA, 19 nt, Human
gagccgagaucacgccacu

SEQ ID NO: 1622654 - RNA, 11 nt, Human
gagcccacgcc

SEQ ID NO: 1622655 - RNA, 21 nt, Human
gagcccacuguacuugcucuu

SEQ ID NO: 1622656 - RNA, 18 nt, Human
gagcccacuguacuugcu

SEQ ID NO: 1622657 - RNA, 22 nt, Human
gagccgagaucacgccacugca

SEQ ID NO: 1622658 - RNA, 21 nt, Human
gagccgagaucacgccacugc

SEQ ID NO: 1622659 - RNA, 15 nt, Human
gagccucagcauccu

SEQ ID NO: 1622660 - RNA, 14 nt, Human
gagccucagcaucc

SEQ ID NO: 1622661 - RNA, 17 nt, Human
gagccucagcauccugg

SEQ ID NO: 1622662 - RNA, 19 nt, Human
gagccucagucucccuccc

SEQ ID NO: 1622663 - RNA, 13 nt, Human
gagccucagcauc

SEQ ID NO: 1622664 - RNA, 13 nt, Human
gagccuccugccc

SEQ ID NO: 1622665 - RNA, 12 nt, Human
gagccugcaguu

SEQ ID NO: 1622666 - RNA, 16 nt, Human
gagcagagaccauccc

SEQ ID NO: 1622667 - RNA, 18 nt, Human
gagcagagaccaucccug

SEQ ID NO: 1622668 - RNA, 17 nt, Human
gagcagagaccaucccu

SEQ ID NO: 1622669 - RNA, 21 nt, Human
gagauagccaaggccaaagga

SEQ ID NO: 1622670 - RNA, 20 nt, Human
gagauagccaaggccaaagg

SEQ ID NO: 1622671 - RNA, 21 nt, Human
gagcagagaccaucccugaag

SEQ ID NO: 1622672 - RNA, 19 nt, Human
gagcagagaccaucccuga

SEQ ID NO: 1622673 - RNA, 23 nt, Human
gagcagagaccaucccugaaggc

SEQ ID NO: 1622674 - RNA, 22 nt, Human
gagcagccacauuccugaugcu

SEQ ID NO: 1622675 - RNA, 21 nt, Human
gagcagccacauuccugaugc

SEQ ID NO: 1622676 - RNA, 19 nt, Human
gagccagauuucacucucc

SEQ ID NO: 1622677 - RNA, 18 nt, Human
gagccagauuucacucuc

SEQ ID NO: 1622678 - RNA, 15 nt, Human
gagccagauuucacu

SEQ ID NO: 1622679 - RNA, 20 nt, Human
gagccacugcaccgggccac

SEQ ID NO: 1622680 - RNA, 19 nt, Human
gagccacugcaccgggcca

SEQ ID NO: 1622681 - RNA, 18 nt, Human
gagccacugcaccgggcc

SEQ ID NO: 1622682 - RNA, 17 nt, Human
gagcccaccuuggcuca

SEQ ID NO: 1622683 - RNA, 15 nt, Human
gagcccaccuuggcu

SEQ ID NO: 1622684 - RNA, 13 nt, Human
gagcccaccuugg

SEQ ID NO: 1622685 - RNA, 20 nt, Human
gagccagauuucacucuccu

SEQ ID NO: 1622686 - RNA, 13 nt, Human
gagacagcucugc

SEQ ID NO: 1622687 - RNA, 24 nt, Human
gagacagcccgggcucugccuccc

SEQ ID NO: 1622688 - RNA, 18 nt, Human
gagacagcucugcauacu

SEQ ID NO: 1622689 - RNA, 15 nt, Human
gagacagcucugcau

SEQ ID NO: 1622690 - RNA, 23 nt, Human
gagacagcccgggcucugccucc

SEQ ID NO: 1622691 - RNA, 22 nt, Human
gagacagcccgggcucugccuc

SEQ ID NO: 1622692 - RNA, 21 nt, Human
gagacagcccgggcucugccu

SEQ ID NO: 1622693 - RNA, 20 nt, Human
gagacagcccgggcucugcc

SEQ ID NO: 1622694 - RNA, 19 nt, Human
gagacagcccgggcucugc

SEQ ID NO: 1622695 - RNA, 18 nt, Human
gagacagcccgggcucug

SEQ ID NO: 1622696 - RNA, 17 nt, Human
gagacagcccgggcucu

SEQ ID NO: 1622697 - RNA, 14 nt, Human
gagacagcccgggc

SEQ ID NO: 1622698 - RNA, 14 nt, Human
gagacucugucuca

SEQ ID NO: 1622699 - RNA, 22 nt, Human
gagacugucucaagagggcacu

SEQ ID NO: 1622700 - RNA, 13 nt, Human
gagacuuguauga

SEQ ID NO: 1622701 - RNA, 23 nt, Human
gagacugucucaagagggcacug

SEQ ID NO: 1622702 - RNA, 18 nt, Human
gagacucgcgacaaugca

SEQ ID NO: 1622703 - RNA, 16 nt, Human
gagacucgcgacaaug

SEQ ID NO: 1622704 - RNA, 12 nt, Human
gagaccaucccu

SEQ ID NO: 1622705 - RNA, 15 nt, Human
gagagugaacaaauu

SEQ ID NO: 1622706 - RNA, 19 nt, Human
gagagugaacaaauuuaca

SEQ ID NO: 1622707 - RNA, 13 nt, Human
gagaguggcuccu

SEQ ID NO: 1622708 - RNA, 17 nt, Human
gagauacagaauuuuau

SEQ ID NO: 1622709 - RNA, 14 nt, Human
gagagccuuccagg

SEQ ID NO: 1622710 - RNA, 13 nt, Human
gagagccuuccag

SEQ ID NO: 1622711 - RNA, 18 nt, Human
gagaggggaacagacugg

SEQ ID NO: 1622712 - RNA, 13 nt, Human
gagaggggaacag

SEQ ID NO: 1622713 - RNA, 21 nt, Human
gagagggugggagugggccca

SEQ ID NO: 1622714 - RNA, 19 nt, Human
gagagacacacugaagaag

SEQ ID NO: 1622715 - RNA, 17 nt, Human
gagagaagagaaugcac

SEQ ID NO: 1622716 - RNA, 18 nt, Human
gagaaagacuauucaaac

SEQ ID NO: 1622717 - RNA, 17 nt, Human
gagaaagacuauucaaa

SEQ ID NO: 1622718 - RNA, 15 nt, Human
gagaaagacuauuca

SEQ ID NO: 1622719 - RNA, 13 nt, Human
gagaaagacuauu

SEQ ID NO: 1622720 - RNA, 16 nt, Human
gagaaacagccugugu

SEQ ID NO: 1622721 - RNA, 23 nt, Human
gagaaaguacuucuccacccugc

SEQ ID NO: 1622722 - RNA, 12 nt, Human
gagaaaugaaaa

SEQ ID NO: 1622723 - RNA, 18 nt, Human
gacucgcgacaaugcaaa

SEQ ID NO: 1622724 - RNA, 17 nt, Human
gacuccugcaggcagcc

SEQ ID NO: 1622725 - RNA, 19 nt, Human
gacucgcgacaaugcaaac

SEQ ID NO: 1622726 - RNA, 16 nt, Human
gacuuggaagcuccgc

SEQ ID NO: 1622727 - RNA, 15 nt, Human
gacuuggaagcuccg

SEQ ID NO: 1622728 - RNA, 14 nt, Human
gacuuggaagcucc

SEQ ID NO: 1622729 - RNA, 21 nt, Human
gagaaaauggacguguuauga

SEQ ID NO: 1622730 - RNA, 19 nt, Human
gacuugugacgguguaccu

SEQ ID NO: 1622731 - RNA, 12 nt, Human
gacuuguuagau

SEQ ID NO: 1622732 - RNA, 18 nt, Human
gagacacacugaagaagc

SEQ ID NO: 1622733 - RNA, 17 nt, Human
gagacacaagccuucgg

SEQ ID NO: 1622734 - RNA, 15 nt, Human
gagacacaagccuuc

SEQ ID NO: 1622735 - RNA, 19 nt, Human
gagacagaguuuucacucu

SEQ ID NO: 1622736 - RNA, 12 nt, Human
gagacagcccgg

SEQ ID NO: 1622737 - RNA, 16 nt, Human
gagacagccaacuaug

SEQ ID NO: 1622738 - RNA, 22 nt, Human
gagaagagcuguucacagccag

SEQ ID NO: 1622739 - RNA, 15 nt, Human
gagaagagcuguuca

SEQ ID NO: 1622740 - RNA, 16 nt, Human
gagaagaacugaaauc

SEQ ID NO: 1622741 - RNA, 14 nt, Human
gagaagaacugaaa

SEQ ID NO: 1622742 - RNA, 13 nt, Human
gagaagaacugaa

SEQ ID NO: 1622743 - RNA, 21 nt, Human
gagaaugcacaaacagaggcc

SEQ ID NO: 1622744 - RNA, 20 nt, Human
gagaaugcacaaacagaggc

SEQ ID NO: 1622745 - RNA, 22 nt, Human
gagaaugcacaaacagaggccg

SEQ ID NO: 1622746 - RNA, 23 nt, Human
gaccugauuucugagcauuuaau

SEQ ID NO: 1622747 - RNA, 15 nt, Human
gaccugccucggccu

SEQ ID NO: 1622748 - RNA, 21 nt, Human
gaccugccccuccucucugcc

SEQ ID NO: 1622749 - RNA, 15 nt, Human
gaccugaggcccuuc

SEQ ID NO: 1622750 - RNA, 13 nt, Human
gaccucaggccug

SEQ ID NO: 1622751 - RNA, 12 nt, Human
gaccucaggccu

SEQ ID NO: 1622752 - RNA, 11 nt, Human
gaccucaggcc

SEQ ID NO: 1622753 - RNA, 21 nt, Human
gaccugaggcccuucucucca

SEQ ID NO: 1622754 - RNA, 18 nt, Human
gaccugaggcccuucucu

SEQ ID NO: 1622755 - RNA, 17 nt, Human
gacccugcccugugggc

SEQ ID NO: 1622756 - RNA, 15 nt, Human
gaccgugaggccaga

SEQ ID NO: 1622757 - RNA, 14 nt, Human
gaccgugaggccag

SEQ ID NO: 1622758 - RNA, 17 nt, Human
gacccaugcugcccugu

SEQ ID NO: 1622759 - RNA, 16 nt, Human
gacccaugcugcccug

SEQ ID NO: 1622760 - RNA, 15 nt, Human
gacccaugcugcccu

SEQ ID NO: 1622761 - RNA, 14 nt, Human
gacccaugcugccc

SEQ ID NO: 1622762 - RNA, 12 nt, Human
gacccacugcuu

SEQ ID NO: 1622763 - RNA, 11 nt, Human
gacccacugcu

SEQ ID NO: 1622764 - RNA, 13 nt, Human
gaccccuccaugu

SEQ ID NO: 1622765 - RNA, 23 nt, Human
gaccccucauagcccucacccug

SEQ ID NO: 1622766 - RNA, 22 nt, Human
gaccccucauagcccucacccu

SEQ ID NO: 1622767 - RNA, 23 nt, Human
gacccugucucaaaaaaagaaaa

SEQ ID NO: 1622768 - RNA, 16 nt, Human
gacccugcccuguggg

SEQ ID NO: 1622769 - RNA, 15 nt, Human
gacccugcccugugg

SEQ ID NO: 1622770 - RNA, 13 nt, Human
gacccugcccugu

SEQ ID NO: 1622771 - RNA, 21 nt, Human
gacccugaggcccagagggcc

SEQ ID NO: 1622772 - RNA, 20 nt, Human
gacccugaggcccagagggc

SEQ ID NO: 1622773 - RNA, 19 nt, Human
gacccugaggcccagaggg

SEQ ID NO: 1622774 - RNA, 16 nt, Human
gacuccugcaggcagc

SEQ ID NO: 1622775 - RNA, 15 nt, Human
gacuccugcaggcag

SEQ ID NO: 1622776 - RNA, 14 nt, Human
gacuccugcaggca

SEQ ID NO: 1622777 - RNA, 15 nt, Human
gacucagguugucug

SEQ ID NO: 1622778 - RNA, 15 nt, Human
gacucaguggggagg

SEQ ID NO: 1622779 - RNA, 22 nt, Human
gacguguuaugacuccagaauu

SEQ ID NO: 1622780 - RNA, 17 nt, Human
gacuacucccccaggug

SEQ ID NO: 1622781 - RNA, 12 nt, Human
gacuacaggcac

SEQ ID NO: 1622782 - RNA, 21 nt, Human
gaccuuucaauaggaaaaacu

SEQ ID NO: 1622783 - RNA, 22 nt, Human
gaccuuuaagagaaaugagcug

SEQ ID NO: 1622784 - RNA, 23 nt, Human
gaccuugaacuggguacuugugg

SEQ ID NO: 1622785 - RNA, 19 nt, Human
gaccugccucggccuccca

SEQ ID NO: 1622786 - RNA, 20 nt, Human
gacguguuaugacuccagaa

SEQ ID NO: 1622787 - RNA, 17 nt, Human
gacguguuaugacucca

SEQ ID NO: 1622788 - RNA, 18 nt, Human
gacggagucccaccuugg

SEQ ID NO: 1622789 - RNA, 21 nt, Human
gacggagucccaccuuggcug

SEQ ID NO: 1622790 - RNA, 23 nt, Human
gacggagucccaccuuggcugca

SEQ ID NO: 1622791 - RNA, 17 nt, Human
gacgggguuucaccaug

SEQ ID NO: 1622792 - RNA, 22 nt, Human
gacaugggacauuugcucaugg

SEQ ID NO: 1622793 - RNA, 17 nt, Human
gacaugggacauuugcu

SEQ ID NO: 1622794 - RNA, 17 nt, Human
gacaugucuuuucuugc

SEQ ID NO: 1622795 - RNA, 21 nt, Human
gacaugucuuuucuugcauga

SEQ ID NO: 1622796 - RNA, 20 nt, Human
gaccaaaaaccaguauugua

SEQ ID NO: 1622797 - RNA, 19 nt, Human
gaccaaaaaccaguauugu

SEQ ID NO: 1622798 - RNA, 13 nt, Human
gaccaaaaaccag

SEQ ID NO: 1622799 - RNA, 14 nt, Human
gacaucaacagaua

SEQ ID NO: 1622800 - RNA, 23 nt, Human
gacauacuaaccagcagaaaugc

SEQ ID NO: 1622801 - RNA, 16 nt, Human
gacauagucuggcugu

SEQ ID NO: 1622802 - RNA, 15 nt, Human
gacauacuaaccagc

SEQ ID NO: 1622803 - RNA, 16 nt, Human
gacauacuaaccagca

SEQ ID NO: 1622804 - RNA, 20 nt, Human
gacaggcauguucucugagg

SEQ ID NO: 1622805 - RNA, 16 nt, Human
gacagacacaggcccg

SEQ ID NO: 1622806 - RNA, 15 nt, Human
gacagacacaggccc

SEQ ID NO: 1622807 - RNA, 23 nt, Human
gacagaucucugcuuuggaaauc

SEQ ID NO: 1622808 - RNA, 21 nt, Human
gacagaucucugcuuuggaaa

SEQ ID NO: 1622809 - RNA, 19 nt, Human
gacagaucucugcuuugga

SEQ ID NO: 1622810 - RNA, 21 nt, Human
gacacuaaccacgcuggaccu

SEQ ID NO: 1622811 - RNA, 20 nt, Human
gacacuaaccacgcuggacc

SEQ ID NO: 1622812 - RNA, 14 nt, Human
gacagacacaggcc

SEQ ID NO: 1622813 - RNA, 13 nt, Human
gacagcugccugg

SEQ ID NO: 1622814 - RNA, 12 nt, Human
gacagcugccug

SEQ ID NO: 1622815 - RNA, 13 nt, Human
gacagccacggcc

SEQ ID NO: 1622816 - RNA, 22 nt, Human
gacagccaacuauggccugugg

SEQ ID NO: 1622817 - RNA, 19 nt, Human
gacagccaacuauggccug

SEQ ID NO: 1622818 - RNA, 15 nt, Human
gacagcugccuggga

SEQ ID NO: 1622819 - RNA, 14 nt, Human
gacagcugccuggg

SEQ ID NO: 1622820 - RNA, 19 nt, Human
gacaggcauguucucugag

SEQ ID NO: 1622821 - RNA, 18 nt, Human
gacaggcauguucucuga

SEQ ID NO: 1622822 - RNA, 18 nt, Human
gacaggcaaugcuggcug

SEQ ID NO: 1622823 - RNA, 17 nt, Human
gacaggcaaugcuggcu

SEQ ID NO: 1622824 - RNA, 16 nt, Human
gacaggcaaugcuggc

SEQ ID NO: 1622825 - RNA, 14 nt, Human
gacaggcaaugcug

SEQ ID NO: 1622826 - RNA, 15 nt, Human
gacaagcucacagac

SEQ ID NO: 1622827 - RNA, 22 nt, Human
gacaaggauugcuacuguccua

SEQ ID NO: 1622828 - RNA, 16 nt, Human
gaagucuuuguacaga

SEQ ID NO: 1622829 - RNA, 14 nt, Human
gaagucuuuguaca

SEQ ID NO: 1622830 - RNA, 16 nt, Human
gacaaugacccagugg

SEQ ID NO: 1622831 - RNA, 17 nt, Human
gacacaggcccggcucc

SEQ ID NO: 1622832 - RNA, 15 nt, Human
gacacaggcccggcu

SEQ ID NO: 1622833 - RNA, 13 nt, Human
gacacacagcucu

SEQ ID NO: 1622834 - RNA, 13 nt, Human
gacaauuuauuau

SEQ ID NO: 1622835 - RNA, 19 nt, Human
gacaauuuauuauggcaca

SEQ ID NO: 1622836 - RNA, 17 nt, Human
gacaaugacuuacugua

SEQ ID NO: 1622837 - RNA, 20 nt, Human
gacaaugacuuacuguacau

SEQ ID NO: 1622838 - RNA, 12 nt, Human
gacaaugcaaac

SEQ ID NO: 1622839 - RNA, 21 nt, Human
gacaaugacuuacuguacaug

SEQ ID NO: 1622840 - RNA, 18 nt, Human
gacaaugcaaaccaucau

SEQ ID NO: 1622841 - RNA, 16 nt, Human
gacaaugcaaaccauc

SEQ ID NO: 1622842 - RNA, 12 nt, Human
gacaauuuauua

SEQ ID NO: 1622843 - RNA, 18 nt, Human
gacacuaaccacgcugga

SEQ ID NO: 1622844 - RNA, 17 nt, Human
gacacuaaccacgcugg

SEQ ID NO: 1622845 - RNA, 16 nt, Human
gacacuaaccacgcug

SEQ ID NO: 1622846 - RNA, 15 nt, Human
gacacuaaccacgcu

SEQ ID NO: 1622847 - RNA, 18 nt, Human
gacacgaauauugcugau

SEQ ID NO: 1622848 - RNA, 17 nt, Human
gacacgaauauugcuga

SEQ ID NO: 1622849 - RNA, 19 nt, Human
gacacgaauauugcugaug

SEQ ID NO: 1622850 - RNA, 17 nt, Human
gacaccuugacagggca

SEQ ID NO: 1622851 - RNA, 15 nt, Human
gacaccuugacaggg

SEQ ID NO: 1622852 - RNA, 20 nt, Human
gacaccuugacagggcacac

SEQ ID NO: 1622853 - RNA, 18 nt, Human
gacaccuugacagggcac

SEQ ID NO: 1622854 - RNA, 15 nt, Human
gacacgaauauugcu

SEQ ID NO: 1622855 - RNA, 18 nt, Human
gacacaggcccggcucca

SEQ ID NO: 1622856 - RNA, 17 nt, Human
gacacagugaccauacu

SEQ ID NO: 1622857 - RNA, 13 nt, Human
gacacccugugau

SEQ ID NO: 1622858 - RNA, 12 nt, Human
gacacccuguga

SEQ ID NO: 1622859 - RNA, 23 nt, Human
gacacccugugauggggcccugc

SEQ ID NO: 1622860 - RNA, 22 nt, Human
gacacccugugauggggcccug

SEQ ID NO: 1622861 - RNA, 17 nt, Human
gacaccuacugaguggc

SEQ ID NO: 1622862 - RNA, 15 nt, Human
gcaguugaaaagacu

SEQ ID NO: 1622863 - RNA, 17 nt, Human
gcauagguuuaauaauu

SEQ ID NO: 1622864 - RNA, 16 nt, Human
gcaguucagagcugcc

SEQ ID NO: 1622865 - RNA, 17 nt, Human
gcaguuauuaacacuaa

SEQ ID NO: 1622866 - RNA, 15 nt, Human
gcaguucugaagaag

SEQ ID NO: 1622867 - RNA, 17 nt, Human
gcaguucagagcugccc

SEQ ID NO: 1622868 - RNA, 18 nt, Human
gcaguucagagcugcccu

SEQ ID NO: 1622869 - RNA, 17 nt, Human
gcaguucugaagaagau

SEQ ID NO: 1622870 - RNA, 13 nt, Human
gcauagaaguaaa

SEQ ID NO: 1622871 - RNA, 15 nt, Human
gcagugggagcugcc

SEQ ID NO: 1622872 - RNA, 14 nt, Human
gcagugggagcugc

SEQ ID NO: 1622873 - RNA, 13 nt, Human
gcagugggagcug

SEQ ID NO: 1622874 - RNA, 23 nt, Human
gcaguggugguuuucuguucuuu

SEQ ID NO: 1622875 - RNA, 21 nt, Human
gcagggcucagcggggacagc

SEQ ID NO: 1622876 - RNA, 19 nt, Human
gcagggcucagcggggaca

SEQ ID NO: 1622877 - RNA, 16 nt, Human
gcaggcagccaggcca

SEQ ID NO: 1622878 - RNA, 15 nt, Human
gcaggcagccaggcc

SEQ ID NO: 1622879 - RNA, 17 nt, Human
gcaggcagccaggccac

SEQ ID NO: 1622880 - RNA, 18 nt, Human
gcagggucucacucuguc

SEQ ID NO: 1622881 - RNA, 17 nt, Human
gcagggucucacucugu

SEQ ID NO: 1622882 - RNA, 22 nt, Human
gcagggcucagcggggacagcu

SEQ ID NO: 1622883 - RNA, 20 nt, Human
gcaggucuugaacuccuggc

SEQ ID NO: 1622884 - RNA, 19 nt, Human
gcaggucuugaacuccugg

SEQ ID NO: 1622885 - RNA, 22 nt, Human
gcagguccaggguuugaguuca

SEQ ID NO: 1622886 - RNA, 16 nt, Human
gcagugcaugcugucc

SEQ ID NO: 1622887 - RNA, 15 nt, Human
gcagugcaugcuguc

SEQ ID NO: 1622888 - RNA, 13 nt, Human
gcauuauauuuau

SEQ ID NO: 1622889 - RNA, 22 nt, Human
gcauguucucugaggacacuaa

SEQ ID NO: 1622890 - RNA, 21 nt, Human
gcauguucucugaggacacua

SEQ ID NO: 1622891 - RNA, 15 nt, Human
gcauguucucugagg

SEQ ID NO: 1622892 - RNA, 20 nt, Human
gcauggcaaggacugcaggg

SEQ ID NO: 1622893 - RNA, 18 nt, Human
gcaugcgggcuuccuccu

SEQ ID NO: 1622894 - RNA, 12 nt, Human
gcaucagcugcu

SEQ ID NO: 1622895 - RNA, 16 nt, Human
gcaucugaaaauugau

SEQ ID NO: 1622896 - RNA, 18 nt, Human
gcaugaaguaauaugcac

SEQ ID NO: 1622897 - RNA, 12 nt, Human
gccaaaggaagc

SEQ ID NO: 1622898 - RNA, 22 nt, Human
gccaaagcuaggccuggccaga

SEQ ID NO: 1622899 - RNA, 16 nt, Human
gccaaagcuaggccug

SEQ ID NO: 1622900 - RNA, 19 nt, Human
gccaaagccuccuccagcc

SEQ ID NO: 1622901 - RNA, 16 nt, Human
gccaaagccuccucca

SEQ ID NO: 1622902 - RNA, 20 nt, Human
gccaaagccaaagcuaggcc

SEQ ID NO: 1622903 - RNA, 19 nt, Human
gccaaacucaccugccccu

SEQ ID NO: 1622904 - RNA, 16 nt, Human
gccaaacucaccugcc

SEQ ID NO: 1622905 - RNA, 14 nt, Human
gccaaacucaccug

SEQ ID NO: 1622906 - RNA, 18 nt, Human
gcauuuguuugaacugau

SEQ ID NO: 1622907 - RNA, 13 nt, Human
gcauuugcugaau

SEQ ID NO: 1622908 - RNA, 17 nt, Human
gcauuugcugaauacag

SEQ ID NO: 1622909 - RNA, 14 nt, Human
gcauuugcugaaua

SEQ ID NO: 1622910 - RNA, 16 nt, Human
gcauuuguuugaacug

SEQ ID NO: 1622911 - RNA, 16 nt, Human
gcauuuguguugaaga

SEQ ID NO: 1622912 - RNA, 17 nt, Human
gcauuaucuagauacug

SEQ ID NO: 1622913 - RNA, 19 nt, Human
gcauuaucuagauacugua

SEQ ID NO: 1622914 - RNA, 19 nt, Human
gcauucaaauguauuacag

SEQ ID NO: 1622915 - RNA, 20 nt, Human
gcagccccgugggguuccuc

SEQ ID NO: 1622916 - RNA, 21 nt, Human
gcagccccuguucuggcagag

SEQ ID NO: 1622917 - RNA, 20 nt, Human
gcagccccuguucuggcaga

SEQ ID NO: 1622918 - RNA, 13 nt, Human
gcagcccugcaga

SEQ ID NO: 1622919 - RNA, 24 nt, Human
gcagccccauucugccugcccagg

SEQ ID NO: 1622920 - RNA, 21 nt, Human
gcagccccauucugccugccc

SEQ ID NO: 1622921 - RNA, 19 nt, Human
gcagccccauucugccugc

SEQ ID NO: 1622922 - RNA, 18 nt, Human
gcagccccauucugccug

SEQ ID NO: 1622923 - RNA, 16 nt, Human
gcagcaauaaagcagc

SEQ ID NO: 1622924 - RNA, 23 nt, Human
gcagcaauaaagcagcguuucua

SEQ ID NO: 1622925 - RNA, 17 nt, Human
gcagccccauucugccu

SEQ ID NO: 1622926 - RNA, 18 nt, Human
gcagauaaacaguaguga

SEQ ID NO: 1622927 - RNA, 21 nt, Human
gcagaguugaagacagagcua

SEQ ID NO: 1622928 - RNA, 17 nt, Human
gcagacaguuaagagaa

SEQ ID NO: 1622929 - RNA, 22 nt, Human
gcagauacaggaaaagcugcug

SEQ ID NO: 1622930 - RNA, 18 nt, Human
gcagauuauucacugauu

SEQ ID NO: 1622931 - RNA, 14 nt, Human
gcaggcagccaggc

SEQ ID NO: 1622932 - RNA, 13 nt, Human
gcaggcagccagg

SEQ ID NO: 1622933 - RNA, 12 nt, Human
gcaggcagccag

SEQ ID NO: 1622934 - RNA, 23 nt, Human
gcaggaggaucacuugaguccag

SEQ ID NO: 1622935 - RNA, 20 nt, Human
gcaggaaggcugagaggaga

SEQ ID NO: 1622936 - RNA, 14 nt, Human
gcagcucaccucuc

SEQ ID NO: 1622937 - RNA, 15 nt, Human
gcagccuuggcaaac

SEQ ID NO: 1622938 - RNA, 15 nt, Human
gcagcucaccucucc

SEQ ID NO: 1622939 - RNA, 17 nt, Human
gcagcccugcagagggc

SEQ ID NO: 1622940 - RNA, 16 nt, Human
gcagcccugcagaggg

SEQ ID NO: 1622941 - RNA, 15 nt, Human
gcagcccugcagagg

SEQ ID NO: 1622942 - RNA, 14 nt, Human
gcagcccugcagag

SEQ ID NO: 1622943 - RNA, 13 nt, Human
gcagcccugcuuu

SEQ ID NO: 1622944 - RNA, 20 nt, Human
gcacugcuuccagugaggcu

SEQ ID NO: 1622945 - RNA, 22 nt, Human
gcacugcuuccagugaggcucu

SEQ ID NO: 1622946 - RNA, 12 nt, Human
gcacugcugccc

SEQ ID NO: 1622947 - RNA, 24 nt, Human
gcacugguggcccgacagccuggc

SEQ ID NO: 1622948 - RNA, 23 nt, Human
gcacugguggcccgacagccugg

SEQ ID NO: 1622949 - RNA, 22 nt, Human
gcacugguggcccgacagccug

SEQ ID NO: 1622950 - RNA, 18 nt, Human
gcacugcuuccagugagg

SEQ ID NO: 1622951 - RNA, 16 nt, Human
gcacugcuuccaguga

SEQ ID NO: 1622952 - RNA, 15 nt, Human
gcagacaggaccagg

SEQ ID NO: 1622953 - RNA, 13 nt, Human
gcagacaggacca

SEQ ID NO: 1622954 - RNA, 12 nt, Human
gcagacaggacc

SEQ ID NO: 1622955 - RNA, 19 nt, Human
gcagacaggcaagcaccuc

SEQ ID NO: 1622956 - RNA, 18 nt, Human
gcagacaggaccagggau

SEQ ID NO: 1622957 - RNA, 23 nt, Human
gcagacaggcaagcaccuccugc

SEQ ID NO: 1622958 - RNA, 14 nt, Human
gcaauggcagccuu

SEQ ID NO: 1622959 - RNA, 13 nt, Human
gcaauggcagccu

SEQ ID NO: 1622960 - RNA, 12 nt, Human
gcaauggcagcc

SEQ ID NO: 1622961 - RNA, 22 nt, Human
gcaccacugcacuccagccugg

SEQ ID NO: 1622962 - RNA, 21 nt, Human
gcaccacugcacuccagccug

SEQ ID NO: 1622963 - RNA, 15 nt, Human
gcaccagcagccugg

SEQ ID NO: 1622964 - RNA, 19 nt, Human
gcacccggccccugcuggu

SEQ ID NO: 1622965 - RNA, 22 nt, Human
gcacccaccaucaugucuggcu

SEQ ID NO: 1622966 - RNA, 16 nt, Human
gcaccagcagccugga

SEQ ID NO: 1622967 - RNA, 17 nt, Human
gcaccuuagacaguccc

SEQ ID NO: 1622968 - RNA, 14 nt, Human
gcaccuuagacagu

SEQ ID NO: 1622969 - RNA, 22 nt, Human
gcaccuggaauauauaaccagu

SEQ ID NO: 1622970 - RNA, 15 nt, Human
gcacccucaggcagg

SEQ ID NO: 1622971 - RNA, 18 nt, Human
gcaccuggaauauauaac

SEQ ID NO: 1622972 - RNA, 21 nt, Human
gcaccuggaauauauaaccag

SEQ ID NO: 1622973 - RNA, 18 nt, Human
gcaccuuagacagucccu

SEQ ID NO: 1622974 - RNA, 19 nt, Human
gcaccuuagacagucccug

SEQ ID NO: 1622975 - RNA, 12 nt, Human
gcacgauuucug

SEQ ID NO: 1622976 - RNA, 18 nt, Human
gcacggugaauggcuuug

SEQ ID NO: 1622977 - RNA, 22 nt, Human
gaugcacagaguuguuacauuu

SEQ ID NO: 1622978 - RNA, 13 nt, Human
gaugcaccagccc

SEQ ID NO: 1622979 - RNA, 14 nt, Human
gaugcaccagcccu

SEQ ID NO: 1622980 - RNA, 12 nt, Human
gaugcagccuca

SEQ ID NO: 1622981 - RNA, 14 nt, Human
gaugcagccucaca

SEQ ID NO: 1622982 - RNA, 19 nt, Human
gaugcagccucacaguccu

SEQ ID NO: 1622983 - RNA, 21 nt, Human
gauggcuaguaucaaaagaaa

SEQ ID NO: 1622984 - RNA, 19 nt, Human
gauggcugugccucugccu

SEQ ID NO: 1622985 - RNA, 18 nt, Human
gauggcugugccucugcc

SEQ ID NO: 1622986 - RNA, 17 nt, Human
gauggcugugccucugc

SEQ ID NO: 1622987 - RNA, 13 nt, Human
gauggcugugccu

SEQ ID NO: 1622988 - RNA, 22 nt, Human
gauggggcccugccuccuuugu

SEQ ID NO: 1622989 - RNA, 14 nt, Human
gauggggcccugcc

SEQ ID NO: 1622990 - RNA, 13 nt, Human
gauggggcccugc

SEQ ID NO: 1622991 - RNA, 20 nt, Human
gauggcugugccucugccug

SEQ ID NO: 1622992 - RNA, 19 nt, Human
gaugccugguggcagcugc

SEQ ID NO: 1622993 - RNA, 18 nt, Human
gaugccugguggcagcug

SEQ ID NO: 1622994 - RNA, 20 nt, Human
gaugccugguggcagcugcg

SEQ ID NO: 1622995 - RNA, 22 nt, Human
gauggauuuccagccaaagccu

SEQ ID NO: 1622996 - RNA, 14 nt, Human
gaugaaaauauuug

SEQ ID NO: 1622997 - RNA, 18 nt, Human
gaucuuugcagacaggca

SEQ ID NO: 1622998 - RNA, 13 nt, Human
gauccuggaaauc

SEQ ID NO: 1622999 - RNA, 22 nt, Human
gauccugagccagauuucacuc

SEQ ID NO: 1623000 - RNA, 21 nt, Human
gauccugagccagauuucacu

SEQ ID NO: 1623001 - RNA, 16 nt, Human
gaucccucauccucau

SEQ ID NO: 1623002 - RNA, 15 nt, Human
gaucccucauccuca

SEQ ID NO: 1623003 - RNA, 22 nt, Human
gauaaauaguuuaugauuccac

SEQ ID NO: 1623004 - RNA, 21 nt, Human
gaggaaggaaacccagcucug

SEQ ID NO: 1623005 - RNA, 20 nt, Human
gaggaaggaaacccagcucu

SEQ ID NO: 1623006 - RNA, 19 nt, Human
gaggaaggaaacccagcuc

SEQ ID NO: 1623007 - RNA, 13 nt, Human
gaggaaggaaacc

SEQ ID NO: 1623008 - RNA, 19 nt, Human
gauaaaguugguaaaccuu

SEQ ID NO: 1623009 - RNA, 13 nt, Human
gauagcagggcau

SEQ ID NO: 1623010 - RNA, 22 nt, Human
gauagcacagacccugcccugu

SEQ ID NO: 1623011 - RNA, 21 nt, Human
gauagcacagacccugcccug

SEQ ID NO: 1623012 - RNA, 19 nt, Human
gauacaggaaaagcugcug

SEQ ID NO: 1623013 - RNA, 18 nt, Human
gauacaggaaaagcugcu

SEQ ID NO: 1623014 - RNA, 23 nt, Human
gauagauaggucagugcaaauac

SEQ ID NO: 1623015 - RNA, 11 nt, Human
gauacagaaaa

SEQ ID NO: 1623016 - RNA, 19 nt, Human
gauacaccgggccuggaga

SEQ ID NO: 1623017 - RNA, 18 nt, Human
gauaauacaccacuacau

SEQ ID NO: 1623018 - RNA, 21 nt, Human
gauaauacaccacuacauucu

SEQ ID NO: 1623019 - RNA, 22 nt, Human
gauaauacaccacuacauucug

SEQ ID NO: 1623020 - RNA, 18 nt, Human
gaucacgccacugcacua

SEQ ID NO: 1623021 - RNA, 21 nt, Human
gaucaaguuauuuuuaauuug

SEQ ID NO: 1623022 - RNA, 15 nt, Human
gaucagccugggcaa

SEQ ID NO: 1623023 - RNA, 12 nt, Human
gaucagccuggg

SEQ ID NO: 1623024 - RNA, 22 nt, Human
gaucagucugauucccaagcuc

SEQ ID NO: 1623025 - RNA, 12 nt, Human
gaucacggcuca

SEQ ID NO: 1623026 - RNA, 21 nt, Human
gaucauccacugugccaugug

SEQ ID NO: 1623027 - RNA, 19 nt, Human
gaucauccacugugccaug

SEQ ID NO: 1623028 - RNA, 17 nt, Human
gaucauccacugugcca

SEQ ID NO: 1623029 - RNA, 20 nt, Human
gauccccaagccuggcaagg

SEQ ID NO: 1623030 - RNA, 20 nt, Human
gaucauugugaaauuauuca

SEQ ID NO: 1623031 - RNA, 14 nt, Human
gaucauugugaaau

SEQ ID NO: 1623032 - RNA, 13 nt, Human
gcaaagcccagcu

SEQ ID NO: 1623033 - RNA, 21 nt, Human
gcaaagcccagcuugaaaccu

SEQ ID NO: 1623034 - RNA, 16 nt, Human
gcaaaguaucccuacu

SEQ ID NO: 1623035 - RNA, 22 nt, Human
gcaagacgcugugcugcccugc

SEQ ID NO: 1623036 - RNA, 21 nt, Human
gcaagacgcugugcugcccug

SEQ ID NO: 1623037 - RNA, 20 nt, Human
gcaagacgcugugcugcccu

SEQ ID NO: 1623038 - RNA, 14 nt, Human
gcaagacgcugugc

SEQ ID NO: 1623039 - RNA, 23 nt, Human
gcaagacgcugugcugcccugcc

SEQ ID NO: 1623040 - RNA, 17 nt, Human
gcaagaauugaagcagg

SEQ ID NO: 1623041 - RNA, 10 nt, Human
gcaagccaga

SEQ ID NO: 1623042 - RNA, 18 nt, Human
gcaaggagauuuacaacu

SEQ ID NO: 1623043 - RNA, 14 nt, Human
gcaagggugauggg

SEQ ID NO: 1623044 - RNA, 13 nt, Human
gcaaggcugucaa

SEQ ID NO: 1623045 - RNA, 11 nt, Human
gcaaggcuguc

SEQ ID NO: 1623046 - RNA, 23 nt, Human
gcaaugcuggcuguuggcugggg

SEQ ID NO: 1623047 - RNA, 22 nt, Human
gcaaugcuggcuguuggcuggg

SEQ ID NO: 1623048 - RNA, 14 nt, Human
gcaaugcuggcugu

SEQ ID NO: 1623049 - RNA, 13 nt, Human
gcaaugcuggcug

SEQ ID NO: 1623050 - RNA, 23 nt, Human
gcaaugaccuuucaauaggaaaa

SEQ ID NO: 1623051 - RNA, 22 nt, Human
gcaaugaccuuucaauaggaaa

SEQ ID NO: 1623052 - RNA, 20 nt, Human
gcaaugaccuuucaauagga

SEQ ID NO: 1623053 - RNA, 17 nt, Human
gcaaugaccuuucaaua

SEQ ID NO: 1623054 - RNA, 17 nt, Human
gcaaucaaaucugcuuu

SEQ ID NO: 1623055 - RNA, 15 nt, Human
gcaaucaaaucugcu

SEQ ID NO: 1623056 - RNA, 14 nt, Human
gcaaggucauuuuu

SEQ ID NO: 1623057 - RNA, 15 nt, Human
gauuuuccugaaaac

SEQ ID NO: 1623058 - RNA, 19 nt, Human
gauuuguuaaugauagcua

SEQ ID NO: 1623059 - RNA, 23 nt, Human
gauuuuauuauguaaaucccauu

SEQ ID NO: 1623060 - RNA, 20 nt, Human
gauuuuauuauguaaauccc

SEQ ID NO: 1623061 - RNA, 19 nt, Human
gauuuuauuauguaaaucc

SEQ ID NO: 1623062 - RNA, 18 nt, Human
gauuuuauuauguaaauc

SEQ ID NO: 1623063 - RNA, 15 nt, Human
gauuuuauuauguaa

SEQ ID NO: 1623064 - RNA, 13 nt, Human
gauuuuauuaugu

SEQ ID NO: 1623065 - RNA, 11 nt, Human
gauuucuguuu

SEQ ID NO: 1623066 - RNA, 19 nt, Human
gauuucuguuuagauaaua

SEQ ID NO: 1623067 - RNA, 22 nt, Human
gauuuggucaacacuaacauga

SEQ ID NO: 1623068 - RNA, 15 nt, Human
gauuuccguuaaaau

SEQ ID NO: 1623069 - RNA, 18 nt, Human
gauuuccguuaaaauacc

SEQ ID NO: 1623070 - RNA, 20 nt, Human
gauugcaacaggcugggcuu

SEQ ID NO: 1623071 - RNA, 18 nt, Human
gauucuuuccugaggcug

SEQ ID NO: 1623072 - RNA, 17 nt, Human
gauucuuuccugaggcu

SEQ ID NO: 1623073 - RNA, 16 nt, Human
gauucuuuccugaggc

SEQ ID NO: 1623074 - RNA, 23 nt, Human
gauugcaccacugcacuccagcc

SEQ ID NO: 1623075 - RNA, 16 nt, Human
gauugcaccacugcac

SEQ ID NO: 1623076 - RNA, 21 nt, Human
gauugcaacaggcugggcuuc

SEQ ID NO: 1623077 - RNA, 20 nt, Human
gauucccaagcucugcuccu

SEQ ID NO: 1623078 - RNA, 19 nt, Human
gauucccaagcucugcucc

SEQ ID NO: 1623079 - RNA, 21 nt, Human
gauucccaagcucugcuccuc

SEQ ID NO: 1623080 - RNA, 23 nt, Human
gauggggcugcaccggcuggccu

SEQ ID NO: 1623081 - RNA, 15 nt, Human
gauucagcucugcaa

SEQ ID NO: 1623082 - RNA, 13 nt, Human
gauucagcucugc

SEQ ID NO: 1623083 - RNA, 19 nt, Human
gauucagacagcugccugg

SEQ ID NO: 1623084 - RNA, 19 nt, Human
gauucauauuuacuucuua

SEQ ID NO: 1623085 - RNA, 18 nt, Human
gauucauauuuacuucuu

SEQ ID NO: 1623086 - RNA, 17 nt, Human
gauucauauuuacuucu

SEQ ID NO: 1623087 - RNA, 22 nt, Human
gauuccagagaguggcuccucc

SEQ ID NO: 1623088 - RNA, 20 nt, Human
gauuccagagaguggcuccu

SEQ ID NO: 1623089 - RNA, 19 nt, Human
gauuccagagaguggcucc

SEQ ID NO: 1623090 - RNA, 22 nt, Human
gccugggggcugggcagaggaa

SEQ ID NO: 1623091 - RNA, 21 nt, Human
gccugguggcagcugcggucc

SEQ ID NO: 1623092 - RNA, 19 nt, Human
gccugguggcagcugcggu

SEQ ID NO: 1623093 - RNA, 18 nt, Human
gccugguggcagcugcgg

SEQ ID NO: 1623094 - RNA, 14 nt, Human
gccugguggcagcu

SEQ ID NO: 1623095 - RNA, 13 nt, Human
gccugguggcagc

SEQ ID NO: 1623096 - RNA, 14 nt, Human
gccuuauggaacac

SEQ ID NO: 1623097 - RNA, 10 nt, Human
gccuuaugga

SEQ ID NO: 1623098 - RNA, 18 nt, Human
gccuuagaagucacacag

SEQ ID NO: 1623099 - RNA, 17 nt, Human
gccuuagaagucacaca

SEQ ID NO: 1623100 - RNA, 19 nt, Human
gccuuagaagucacacagu

SEQ ID NO: 1623101 - RNA, 19 nt, Human
gccuuacccucauguucuu

SEQ ID NO: 1623102 - RNA, 20 nt, Human
gccuuacacaaugguuuucu

SEQ ID NO: 1623103 - RNA, 21 nt, Human
gccuuacacaaugguuuucuu

SEQ ID NO: 1623104 - RNA, 18 nt, Human
gccuuacccucauguucu

SEQ ID NO: 1623105 - RNA, 13 nt, Human
gccuguuuaagag

SEQ ID NO: 1623106 - RNA, 12 nt, Human
gccuguuuaaga

SEQ ID NO: 1623107 - RNA, 20 nt, Human
gccuuauggaacacucugag

SEQ ID NO: 1623108 - RNA, 19 nt, Human
gccuuauggaacacucuga

SEQ ID NO: 1623109 - RNA, 18 nt, Human
gccuuauggaacacucug

SEQ ID NO: 1623110 - RNA, 16 nt, Human
gccuuauggaacacuc

SEQ ID NO: 1623111 - RNA, 12 nt, Human
gccuuccagggg

SEQ ID NO: 1623112 - RNA, 13 nt, Human
gccuucaucuccc

SEQ ID NO: 1623113 - RNA, 21 nt, Human
gccuucagggagugagggauu

SEQ ID NO: 1623114 - RNA, 13 nt, Human
gccuucagggagu

SEQ ID NO: 1623115 - RNA, 21 nt, Human
gccuuccaggggugggacacc

SEQ ID NO: 1623116 - RNA, 16 nt, Human
gccuuccagggguggg

SEQ ID NO: 1623117 - RNA, 15 nt, Human
gccuuccaggggugg

SEQ ID NO: 1623118 - RNA, 22 nt, Human
gccuucgauacaccgggccugg

SEQ ID NO: 1623119 - RNA, 18 nt, Human
gccuucgauacaccgggc

SEQ ID NO: 1623120 - RNA, 23 nt, Human
gccuucgauacaccgggccugga

SEQ ID NO: 1623121 - RNA, 23 nt, Human
gcgacaaugcaaaccaucauuga

SEQ ID NO: 1623122 - RNA, 13 nt, Human
gccuuuggcuuca

SEQ ID NO: 1623123 - RNA, 22 nt, Human
gccuuuggaaacagcucgacuu

SEQ ID NO: 1623124 - RNA, 12 nt, Human
gcgacagugaga

SEQ ID NO: 1623125 - RNA, 22 nt, Human
gcgacagugagacucugucuca

SEQ ID NO: 1623126 - RNA, 15 nt, Human
gcgccuacaggagug

SEQ ID NO: 1623127 - RNA, 18 nt, Human
gcgccuacaggagugagc

SEQ ID NO: 1623128 - RNA, 13 nt, Human
gcggacagccacg

SEQ ID NO: 1623129 - RNA, 11 nt, Human
gcggacagcca

SEQ ID NO: 1623130 - RNA, 19 nt, Human
gcgucucauacucaccuca

SEQ ID NO: 1623131 - RNA, 20 nt, Human
gcgggucacaggagggaggg

SEQ ID NO: 1623132 - RNA, 19 nt, Human
gcgggucacaggagggagg

SEQ ID NO: 1623133 - RNA, 15 nt, Human
gcggacagccacggc

SEQ ID NO: 1623134 - RNA, 16 nt, Human
gcggacagccacggcc

SEQ ID NO: 1623135 - RNA, 15 nt, Human
gcgggucacaggagg

SEQ ID NO: 1623136 - RNA, 13 nt, Human
gcgggucacagga

SEQ ID NO: 1623137 - RNA, 13 nt, Human
gcuauaggugcua

SEQ ID NO: 1623138 - RNA, 16 nt, Human
gcuaggaacacuccuu

SEQ ID NO: 1623139 - RNA, 22 nt, Human
gcuaggaaauccaggguggugg

SEQ ID NO: 1623140 - RNA, 15 nt, Human
gcuaggaacacuccu

SEQ ID NO: 1623141 - RNA, 19 nt, Human
gcuaggaaauccagggugg

SEQ ID NO: 1623142 - RNA, 19 nt, Human
gcuagaacucccuuucaac

SEQ ID NO: 1623143 - RNA, 16 nt, Human
gcuaccuuuguauucu

SEQ ID NO: 1623144 - RNA, 20 nt, Human
gcuaccuuuguauucucucc

SEQ ID NO: 1623145 - RNA, 13 nt, Human
gcuaagagggagg

SEQ ID NO: 1623146 - RNA, 17 nt, Human
gcuaaacuuuucugaua

SEQ ID NO: 1623147 - RNA, 15 nt, Human
gcuaaacuuuucuga

SEQ ID NO: 1623148 - RNA, 13 nt, Human
gcuaaacuuuucu

SEQ ID NO: 1623149 - RNA, 14 nt, Human
gcuacacaggggaa

SEQ ID NO: 1623150 - RNA, 22 nt, Human
gcuacacaggggaaaagaggag

SEQ ID NO: 1623151 - RNA, 13 nt, Human
gcuacacacugca

SEQ ID NO: 1623152 - RNA, 20 nt, Human
gcuacacacugcauguuugu

SEQ ID NO: 1623153 - RNA, 20 nt, Human
gcuaagagggagggagggcu

SEQ ID NO: 1623154 - RNA, 21 nt, Human
gcuaagagggagggagggcuc

SEQ ID NO: 1623155 - RNA, 17 nt, Human
gccuccccuccucugcu

SEQ ID NO: 1623156 - RNA, 19 nt, Human
gccuccccuccucugcuug

SEQ ID NO: 1623157 - RNA, 17 nt, Human
gccucccaucacccgcu

SEQ ID NO: 1623158 - RNA, 20 nt, Human
gccuccccuccucugcuugc

SEQ ID NO: 1623159 - RNA, 22 nt, Human
gccuccccuccucugcuugcca

SEQ ID NO: 1623160 - RNA, 23 nt, Human
gccuccccuccucugcuugccau

SEQ ID NO: 1623161 - RNA, 19 nt, Human
gccucccgaguagcuggga

SEQ ID NO: 1623162 - RNA, 18 nt, Human
gccucccgaguagcuggg

SEQ ID NO: 1623163 - RNA, 20 nt, Human
gccucccgaguagcugggac

SEQ ID NO: 1623164 - RNA, 19 nt, Human
gccucccaacucaccccag

SEQ ID NO: 1623165 - RNA, 18 nt, Human
gccucccaacucacccca

SEQ ID NO: 1623166 - RNA, 17 nt, Human
gccucccaacucacccc

SEQ ID NO: 1623167 - RNA, 16 nt, Human
gccucccaacucaccc

SEQ ID NO: 1623168 - RNA, 16 nt, Human
gccucccaucacccgc

SEQ ID NO: 1623169 - RNA, 14 nt, Human
gccucccaucaccc

SEQ ID NO: 1623170 - RNA, 13 nt, Human
gccucccaacuca

SEQ ID NO: 1623171 - RNA, 19 nt, Human
gccucccaaagugcuggga

SEQ ID NO: 1623172 - RNA, 18 nt, Human
gccucccaaagugcuggg

SEQ ID NO: 1623173 - RNA, 17 nt, Human
gccucagcauccuggca

SEQ ID NO: 1623174 - RNA, 16 nt, Human
gccucagcauccuggc

SEQ ID NO: 1623175 - RNA, 15 nt, Human
gccucagcauccugg

SEQ ID NO: 1623176 - RNA, 18 nt, Human
gccucacaguccuuacca

SEQ ID NO: 1623177 - RNA, 21 nt, Human
gccucacaguccuuaccagca

SEQ ID NO: 1623178 - RNA, 15 nt, Human
gccugcaagggagug

SEQ ID NO: 1623179 - RNA, 13 nt, Human
gccugcaagggag

SEQ ID NO: 1623180 - RNA, 13 nt, Human
gccucugccucug

SEQ ID NO: 1623181 - RNA, 12 nt, Human
gccucugccucu

SEQ ID NO: 1623182 - RNA, 15 nt, Human
gccucugcacucccc

SEQ ID NO: 1623183 - RNA, 18 nt, Human
gccucugccucugacaca

SEQ ID NO: 1623184 - RNA, 21 nt, Human
gccucugacacacagcucugu

SEQ ID NO: 1623185 - RNA, 20 nt, Human
gccucugacacacagcucug

SEQ ID NO: 1623186 - RNA, 19 nt, Human
gccucugacacacagcucu

SEQ ID NO: 1623187 - RNA, 14 nt, Human
gccucugcacuccc

SEQ ID NO: 1623188 - RNA, 18 nt, Human
gccucugacacacagcuc

SEQ ID NO: 1623189 - RNA, 17 nt, Human
gccucugacacacagcu

SEQ ID NO: 1623190 - RNA, 16 nt, Human
gccucucucaggccaa

SEQ ID NO: 1623191 - RNA, 14 nt, Human
gccucucucaggcc

SEQ ID NO: 1623192 - RNA, 13 nt, Human
gccucucucaggc

SEQ ID NO: 1623193 - RNA, 20 nt, Human
gccgggcgugguggugagug

SEQ ID NO: 1623194 - RNA, 21 nt, Human
gccgggcgcgguggcucacgc

SEQ ID NO: 1623195 - RNA, 13 nt, Human
gccgcagcccugc

SEQ ID NO: 1623196 - RNA, 12 nt, Human
gccgcagcccug

SEQ ID NO: 1623197 - RNA, 11 nt, Human
gccgcagcccu

SEQ ID NO: 1623198 - RNA, 21 nt, Human
gccgagaucacgccacugcac

SEQ ID NO: 1623199 - RNA, 20 nt, Human
gccgagaucacgccacugca

SEQ ID NO: 1623200 - RNA, 22 nt, Human
gccgagaucacgccacugcacu

SEQ ID NO: 1623201 - RNA, 19 nt, Human
gcccugcuuugggcugccc

SEQ ID NO: 1623202 - RNA, 18 nt, Human
gcccuucucuccagcccc

SEQ ID NO: 1623203 - RNA, 17 nt, Human
gcccuucucuccagccc

SEQ ID NO: 1623204 - RNA, 16 nt, Human
gcccuucucuccagcc

SEQ ID NO: 1623205 - RNA, 14 nt, Human
gcccuucucuccag

SEQ ID NO: 1623206 - RNA, 18 nt, Human
gcccugcuuugggcugcc

SEQ ID NO: 1623207 - RNA, 16 nt, Human
gcccugcuuugggcug

SEQ ID NO: 1623208 - RNA, 16 nt, Human
gcccugcuuucagaua

SEQ ID NO: 1623209 - RNA, 14 nt, Human
gcccugcuuucaga

SEQ ID NO: 1623210 - RNA, 21 nt, Human
gccuaaauccauuuggaaauc

SEQ ID NO: 1623211 - RNA, 19 nt, Human
gccuaaauccauuuggaaa

SEQ ID NO: 1623212 - RNA, 13 nt, Human
gccuaaauccauu

SEQ ID NO: 1623213 - RNA, 12 nt, Human
gccuaaauccau

SEQ ID NO: 1623214 - RNA, 23 nt, Human
gccuaaauccauuuggaaaucuu

SEQ ID NO: 1623215 - RNA, 22 nt, Human
gccuaaauccauuuggaaaucu

SEQ ID NO: 1623216 - RNA, 17 nt, Human
gccucacaguccuuacc

SEQ ID NO: 1623217 - RNA, 13 nt, Human
gccucacaguccu

SEQ ID NO: 1623218 - RNA, 19 nt, Human
gccucaaccuccugggcua

SEQ ID NO: 1623219 - RNA, 18 nt, Human
gccucaaccuccugggcu

SEQ ID NO: 1623220 - RNA, 22 nt, Human
gccuaugugcaugcagcaucua

SEQ ID NO: 1623221 - RNA, 20 nt, Human
gccguguaaccauggaccca

SEQ ID NO: 1623222 - RNA, 22 nt, Human
gccguggcuucccgcucagccc

SEQ ID NO: 1623223 - RNA, 21 nt, Human
gccguggcuucccgcucagcc

SEQ ID NO: 1623224 - RNA, 19 nt, Human
gccguggcuucccgcucag

SEQ ID NO: 1623225 - RNA, 19 nt, Human
gccgugccuucagcucuac

SEQ ID NO: 1623226 - RNA, 17 nt, Human
gccgugccuucagcucu

SEQ ID NO: 1623227 - RNA, 15 nt, Human
gccgugccuucagcu

SEQ ID NO: 1623228 - RNA, 14 nt, Human
gccgugccuucagc

SEQ ID NO: 1623229 - RNA, 17 nt, Human
gccgucuaccugagggg

SEQ ID NO: 1623230 - RNA, 16 nt, Human
gccgucuaccugaggg

SEQ ID NO: 1623231 - RNA, 15 nt, Human
gccgucuaccugagg

SEQ ID NO: 1623232 - RNA, 18 nt, Human
gccaucccucccuccacc

SEQ ID NO: 1623233 - RNA, 23 nt, Human
gccaucccucccuccaccucccu

SEQ ID NO: 1623234 - RNA, 14 nt, Human
gccauccagguuca

SEQ ID NO: 1623235 - RNA, 14 nt, Human
gccaugcuccuggc

SEQ ID NO: 1623236 - RNA, 23 nt, Human
gccaguaaaugggggugcauuug

SEQ ID NO: 1623237 - RNA, 15 nt, Human
gccaggcuggucuca

SEQ ID NO: 1623238 - RNA, 13 nt, Human
gccaggcuggucu

SEQ ID NO: 1623239 - RNA, 23 nt, Human
gccaggcugggucgcccuggacu

SEQ ID NO: 1623240 - RNA, 17 nt, Human
gccaggcugggucgccc

SEQ ID NO: 1623241 - RNA, 17 nt, Human
gcccaccuuggcucaag

SEQ ID NO: 1623242 - RNA, 16 nt, Human
gcccaccuuggcucaa

SEQ ID NO: 1623243 - RNA, 15 nt, Human
gcccaccuuggcuca

SEQ ID NO: 1623244 - RNA, 13 nt, Human
gcccaccuuggcu

SEQ ID NO: 1623245 - RNA, 14 nt, Human
gcccacuucugcca

SEQ ID NO: 1623246 - RNA, 24 nt, Human
gcccaccuggccucugcacucccc

SEQ ID NO: 1623247 - RNA, 21 nt, Human
gcccaccuggccucugcacuc

SEQ ID NO: 1623248 - RNA, 20 nt, Human
gcccaccuggccucugcacu

SEQ ID NO: 1623249 - RNA, 17 nt, Human
gcccaccuggccucugc

SEQ ID NO: 1623250 - RNA, 16 nt, Human
gcccaccuggccucug

SEQ ID NO: 1623251 - RNA, 15 nt, Human
gcccaccuggccucu

SEQ ID NO: 1623252 - RNA, 16 nt, Human
gccaugggccuccugu

SEQ ID NO: 1623253 - RNA, 15 nt, Human
gccaugggccuccug

SEQ ID NO: 1623254 - RNA, 24 nt, Human
gccaugcuccuggcccacugcauc

SEQ ID NO: 1623255 - RNA, 24 nt, Human
gcccaaccugcucuccucuugcca

SEQ ID NO: 1623256 - RNA, 22 nt, Human
gcccaagaauagaugcugacug

SEQ ID NO: 1623257 - RNA, 21 nt, Human
gcccaagaauagaugcugacu

SEQ ID NO: 1623258 - RNA, 20 nt, Human
gcccacauagugaugguucc

SEQ ID NO: 1623259 - RNA, 21 nt, Human
gccagagacacaagccuucgg

SEQ ID NO: 1623260 - RNA, 22 nt, Human
gccacugcaccgggccacagag

SEQ ID NO: 1623261 - RNA, 22 nt, Human
gccagagacacaagccuucggc

SEQ ID NO: 1623262 - RNA, 21 nt, Human
gccacugcaccgggccacaga

SEQ ID NO: 1623263 - RNA, 20 nt, Human
gccacugcaccgggccacag

SEQ ID NO: 1623264 - RNA, 22 nt, Human
gccacuccagaccccuggcuuu

SEQ ID NO: 1623265 - RNA, 24 nt, Human
gccaaggccaaaggaagcacaugc

SEQ ID NO: 1623266 - RNA, 20 nt, Human
gccacuccagaccccuggcu

SEQ ID NO: 1623267 - RNA, 21 nt, Human
gccacuccagaccccuggcuu

SEQ ID NO: 1623268 - RNA, 20 nt, Human
gccaaggccaaaggaagcac

SEQ ID NO: 1623269 - RNA, 13 nt, Human
gccagauuucacu

SEQ ID NO: 1623270 - RNA, 24 nt, Human
gccagauucuuuccugaggcuggg

SEQ ID NO: 1623271 - RNA, 20 nt, Human
gccagauucuuuccugaggc

SEQ ID NO: 1623272 - RNA, 15 nt, Human
gccagaugcaccagc

SEQ ID NO: 1623273 - RNA, 22 nt, Human
gccagccgagauagccaaggcc

SEQ ID NO: 1623274 - RNA, 17 nt, Human
gccagagggagugacag

SEQ ID NO: 1623275 - RNA, 14 nt, Human
gccagaugcaccag

SEQ ID NO: 1623276 - RNA, 14 nt, Human
gccaggaagccagc

SEQ ID NO: 1623277 - RNA, 13 nt, Human
gccaggaagccag

SEQ ID NO: 1623278 - RNA, 12 nt, Human
gccaggaagcca

SEQ ID NO: 1623279 - RNA, 20 nt, Human
gccagcugcuugggcuucau

SEQ ID NO: 1623280 - RNA, 18 nt, Human
gccagcugcuugggcuuc

SEQ ID NO: 1623281 - RNA, 17 nt, Human
gccagcugcuugggcuu

SEQ ID NO: 1623282 - RNA, 15 nt, Human
gccaggaagccagca

SEQ ID NO: 1623283 - RNA, 16 nt, Human
gccaggagccuccugc

SEQ ID NO: 1623284 - RNA, 14 nt, Human
gccaggagccuccu

SEQ ID NO: 1623285 - RNA, 20 nt, Human
gccaggagccuccugcccuu

SEQ ID NO: 1623286 - RNA, 19 nt, Human
gccaggagccuccugcccu

SEQ ID NO: 1623287 - RNA, 12 nt, Human
gcccaggcuggc

SEQ ID NO: 1623288 - RNA, 23 nt, Human
gcccaggccccugccacccuggg

SEQ ID NO: 1623289 - RNA, 21 nt, Human
gcccagagaggguggugaccu

SEQ ID NO: 1623290 - RNA, 13 nt, Human
gcccaggccuccu

SEQ ID NO: 1623291 - RNA, 20 nt, Human
gcccaggcuggagugcaaug

SEQ ID NO: 1623292 - RNA, 12 nt, Human
gccccagugccc

SEQ ID NO: 1623293 - RNA, 18 nt, Human
gccccaucccaaacccuu

SEQ ID NO: 1623294 - RNA, 21 nt, Human
gccccauaauuuuuuuuuucc

SEQ ID NO: 1623295 - RNA, 19 nt, Human
gccccaguuguauuuauuu

SEQ ID NO: 1623296 - RNA, 14 nt, Human
gccccagugcccac

SEQ ID NO: 1623297 - RNA, 13 nt, Human
gccccagugccca

SEQ ID NO: 1623298 - RNA, 15 nt, Human
gccccagugcccaca

SEQ ID NO: 1623299 - RNA, 22 nt, Human
gccccauccucuguacagagcc

SEQ ID NO: 1623300 - RNA, 14 nt, Human
gccccauccucugu

SEQ ID NO: 1623301 - RNA, 13 nt, Human
gccccauccucug

SEQ ID NO: 1623302 - RNA, 14 nt, Human
gccccauucugccu

SEQ ID NO: 1623303 - RNA, 15 nt, Human
gccccauucugccug

SEQ ID NO: 1623304 - RNA, 14 nt, Human
gcccugcagagggc

SEQ ID NO: 1623305 - RNA, 13 nt, Human
gcccugcagaggg

SEQ ID NO: 1623306 - RNA, 15 nt, Human
gcccugcagagggca

SEQ ID NO: 1623307 - RNA, 16 nt, Human
gcccugcagagggcac

SEQ ID NO: 1623308 - RNA, 14 nt, Human
gcccugagcuuucu

SEQ ID NO: 1623309 - RNA, 19 nt, Human
gcccucugcccacucccug

SEQ ID NO: 1623310 - RNA, 18 nt, Human
gcccucugcccacucccu

SEQ ID NO: 1623311 - RNA, 16 nt, Human
gcccucugcccacucc

SEQ ID NO: 1623312 - RNA, 13 nt, Human
gcccucugcccac

SEQ ID NO: 1623313 - RNA, 21 nt, Human
gcccucccugccccucccuuc

SEQ ID NO: 1623314 - RNA, 23 nt, Human
gcccuccaagaccuucuccuuca

SEQ ID NO: 1623315 - RNA, 22 nt, Human
gcccuccaagaccuucuccuuc

SEQ ID NO: 1623316 - RNA, 21 nt, Human
gcccuccaucuaaacugcccc

SEQ ID NO: 1623317 - RNA, 20 nt, Human
gcccuccaucuaaacugccc

SEQ ID NO: 1623318 - RNA, 21 nt, Human
gcccuccaagaccuucuccuu

SEQ ID NO: 1623319 - RNA, 19 nt, Human
gcccuccaagaccuucucc

SEQ ID NO: 1623320 - RNA, 12 nt, Human
gcccgggcucug

SEQ ID NO: 1623321 - RNA, 22 nt, Human
gccccgaggccuucucugaagg

SEQ ID NO: 1623322 - RNA, 18 nt, Human
gccccgaggccuucucug

SEQ ID NO: 1623323 - RNA, 14 nt, Human
gccccucagggucc

SEQ ID NO: 1623324 - RNA, 15 nt, Human
gccccgaggccuucu

SEQ ID NO: 1623325 - RNA, 18 nt, Human
gccccucagggucccugg

SEQ ID NO: 1623326 - RNA, 16 nt, Human
gccccucagggucccu

SEQ ID NO: 1623327 - RNA, 17 nt, Human
gccccuguucuggcaga

SEQ ID NO: 1623328 - RNA, 15 nt, Human
gcccgacagccuggc

SEQ ID NO: 1623329 - RNA, 14 nt, Human
gcccgacagccugg

SEQ ID NO: 1623330 - RNA, 12 nt, Human
gcccgacagccu

SEQ ID NO: 1623331 - RNA, 19 nt, Human
uuuuguagagccagggucu

SEQ ID NO: 1623332 - RNA, 18 nt, Human
uuuuuaaaaaagaaacau

SEQ ID NO: 1623333 - RNA, 16 nt, Human
uuuugucauauaagau

SEQ ID NO: 1623334 - RNA, 18 nt, Human
uuuuuaaagacuuuuaug

SEQ ID NO: 1623335 - RNA, 13 nt, Human
uuuuuaaagacuu

SEQ ID NO: 1623336 - RNA, 12 nt, Human
uuuuuaaagacu

SEQ ID NO: 1623337 - RNA, 20 nt, Human
uuuugacaaggggcaguggu

SEQ ID NO: 1623338 - RNA, 21 nt, Human
uuuuggcauaacauaaaucug

SEQ ID NO: 1623339 - RNA, 18 nt, Human
uuuuggucuggagggaag

SEQ ID NO: 1623340 - RNA, 15 nt, Human
uuuuggucuguguga

SEQ ID NO: 1623341 - RNA, 14 nt, Human
uuuuggcugcugaa

SEQ ID NO: 1623342 - RNA, 14 nt, Human
uuuuccugaaaacc

SEQ ID NO: 1623343 - RNA, 18 nt, Human
uuuucuaaaguaaaaaca

SEQ ID NO: 1623344 - RNA, 19 nt, Human
uuuuucucuaggaaauauu

SEQ ID NO: 1623345 - RNA, 23 nt, Human
uuuuucucugauacagaaaaguu

SEQ ID NO: 1623346 - RNA, 19 nt, Human
uuuuuccuucagugccuua

SEQ ID NO: 1623347 - RNA, 11 nt, Human
uuuuuccuuuu

SEQ ID NO: 1623348 - RNA, 11 nt, Human
uuuuuaaaugc

SEQ ID NO: 1623349 - RNA, 11 nt, Human
uuuuuccuuca

SEQ ID NO: 1623350 - RNA, 18 nt, Human
uuugaaucaucaagucuu

SEQ ID NO: 1623351 - RNA, 22 nt, Human
uuugaagaugccgcauuuggau

SEQ ID NO: 1623352 - RNA, 14 nt, Human
uuugaacucuucaa

SEQ ID NO: 1623353 - RNA, 15 nt, Human
uuugaacugauaaag

SEQ ID NO: 1623354 - RNA, 17 nt, Human
uuugaacugauaaagau

SEQ ID NO: 1623355 - RNA, 19 nt, Human
uuugaacugauaaagauga

SEQ ID NO: 1623356 - RNA, 17 nt, Human
uuucuuauuucauuucu

SEQ ID NO: 1623357 - RNA, 18 nt, Human
uuucuuagggaaggauac

SEQ ID NO: 1623358 - RNA, 23 nt, Human
uuucuuagggaaggauacaaaag

SEQ ID NO: 1623359 - RNA, 12 nt, Human
uuucuucucccu

SEQ ID NO: 1623360 - RNA, 16 nt, Human
uuucuuccucugcuga

SEQ ID NO: 1623361 - RNA, 14 nt, Human
uuucuuccucugcu

SEQ ID NO: 1623362 - RNA, 13 nt, Human
uuucuucucccuc

SEQ ID NO: 1623363 - RNA, 13 nt, Human
uuucuuccucugc

SEQ ID NO: 1623364 - RNA, 11 nt, Human
uuucuuccucu

SEQ ID NO: 1623365 - RNA, 13 nt, Human
uuucugagaaaga

SEQ ID NO: 1623366 - RNA, 15 nt, Human
uuucugagaaagacu

SEQ ID NO: 1623367 - RNA, 20 nt, Human
uuucuguucuuucuggcuau

SEQ ID NO: 1623368 - RNA, 21 nt, Human
uuucugaaauuuccugggagc

SEQ ID NO: 1623369 - RNA, 18 nt, Human
uuucucugauacagaaaa

SEQ ID NO: 1623370 - RNA, 17 nt, Human
uuucucugauacagaaa

SEQ ID NO: 1623371 - RNA, 16 nt, Human
uuucucugauacagaa

SEQ ID NO: 1623372 - RNA, 15 nt, Human
uuucucugauacaga

SEQ ID NO: 1623373 - RNA, 20 nt, Human
uuucuaaaggcuaccuuugu

SEQ ID NO: 1623374 - RNA, 21 nt, Human
uuucuaaaggcuaccuuugua

SEQ ID NO: 1623375 - RNA, 14 nt, Human
uuucuaaaguaaaa

SEQ ID NO: 1623376 - RNA, 12 nt, Human
uuucuaaaguaa

SEQ ID NO: 1623377 - RNA, 23 nt, Human
uuucuacucgaguuacagacaaa

SEQ ID NO: 1623378 - RNA, 16 nt, Human
uuuccugaggcugggc

SEQ ID NO: 1623379 - RNA, 13 nt, Human
uuuccugcccugg

SEQ ID NO: 1623380 - RNA, 12 nt, Human
uuuccugcccug

SEQ ID NO: 1623381 - RNA, 14 nt, Human
uuaccacagacaua

SEQ ID NO: 1623382 - RNA, 17 nt, Human
uuaccacagacauacua

SEQ ID NO: 1623383 - RNA, 20 nt, Human
uuuuaauaauguuucaaaca

SEQ ID NO: 1623384 - RNA, 11 nt, Human
uuuuaaaugca

SEQ ID NO: 1623385 - RNA, 12 nt, Human
uuuuaaaugcac

SEQ ID NO: 1623386 - RNA, 21 nt, Human
uuuuaaaugcaccuggaauau

SEQ ID NO: 1623387 - RNA, 21 nt, Human
uuuuaaaagaaugauuaugaa

SEQ ID NO: 1623388 - RNA, 17 nt, Human
uuuuaaagaaugcucuu

SEQ ID NO: 1623389 - RNA, 18 nt, Human
uuuuaaagacuuuuauga

SEQ ID NO: 1623390 - RNA, 21 nt, Human
uuuguucuggcucuuccaggc

SEQ ID NO: 1623391 - RNA, 16 nt, Human
uuuguauaaaauaauu

SEQ ID NO: 1623392 - RNA, 14 nt, Human
uuuguauaaaauaa

SEQ ID NO: 1623393 - RNA, 13 nt, Human
uuuguauaaaaua

SEQ ID NO: 1623394 - RNA, 19 nt, Human
uuuggugguuucagaaaug

SEQ ID NO: 1623395 - RNA, 19 nt, Human
uuugguuuucacauuggaa

SEQ ID NO: 1623396 - RNA, 21 nt, Human
uuuggaauuuugugcccccau

SEQ ID NO: 1623397 - RNA, 19 nt, Human
uuuggacaaaauggaauac

SEQ ID NO: 1623398 - RNA, 16 nt, Human
uuuggauaauaaggaa

SEQ ID NO: 1623399 - RNA, 20 nt, Human
uuuggagucagacagaugug

SEQ ID NO: 1623400 - RNA, 15 nt, Human
uuugcuuugugauuu

SEQ ID NO: 1623401 - RNA, 16 nt, Human
uuugcuuugugauuuu

SEQ ID NO: 1623402 - RNA, 14 nt, Human
uuuggaauuuugug

SEQ ID NO: 1623403 - RNA, 12 nt, Human
uuuggaaaauaa

SEQ ID NO: 1623404 - RNA, 22 nt, Human
uuuggaauuuuccuccuuucuc

SEQ ID NO: 1623405 - RNA, 15 nt, Human
uuugcaucugaaaau

SEQ ID NO: 1623406 - RNA, 16 nt, Human
guagcauccuggaaua

SEQ ID NO: 1623407 - RNA, 18 nt, Human
gcuauaggugcuacaaaa

SEQ ID NO: 1623408 - RNA, 15 nt, Human
guagagugugccuga

SEQ ID NO: 1623409 - RNA, 19 nt, Human
gcuauaggugcuacaaaaa

SEQ ID NO: 1623410 - RNA, 16 nt, Human
guagggcgggaggaug

SEQ ID NO: 1623411 - RNA, 22 nt, Human
guagggcgggaggauguucugg

SEQ ID NO: 1623412 - RNA, 21 nt, Human
guagggcgggaggauguucug

SEQ ID NO: 1623413 - RNA, 23 nt, Human
guagggcgggaggauguucuggg

SEQ ID NO: 1623414 - RNA, 21 nt, Human
guagcauuuguguugaagagg

SEQ ID NO: 1623415 - RNA, 17 nt, Human
guaguguuggagaagaa

SEQ ID NO: 1623416 - RNA, 14 nt, Human
guauaauuaacaug

SEQ ID NO: 1623417 - RNA, 13 nt, Human
guauaauuaacau

SEQ ID NO: 1623418 - RNA, 15 nt, Human
guaguguuggagaag

SEQ ID NO: 1623419 - RNA, 14 nt, Human
guaguguuggagaa

SEQ ID NO: 1623420 - RNA, 17 nt, Human
guauaauucacauugua

SEQ ID NO: 1623421 - RNA, 23 nt, Human
guauaauuaacauguuaaaccau

SEQ ID NO: 1623422 - RNA, 22 nt, Human
guauaauuaacauguuaaacca

SEQ ID NO: 1623423 - RNA, 19 nt, Human
guauaauuaacauguuaaa

SEQ ID NO: 1623424 - RNA, 17 nt, Human
guauaauuaacauguua

SEQ ID NO: 1623425 - RNA, 15 nt, Human
guauaauuaacaugu

SEQ ID NO: 1623426 - RNA, 16 nt, Human
guaggguuauaauaau

SEQ ID NO: 1623427 - RNA, 22 nt, Human
guagggugggccuucagggagu

SEQ ID NO: 1623428 - RNA, 17 nt, Human
guagggugggccuucag

SEQ ID NO: 1623429 - RNA, 14 nt, Human
guagggugggccuu

SEQ ID NO: 1623430 - RNA, 14 nt, Human
guagucaggugccu

SEQ ID NO: 1623431 - RNA, 19 nt, Human
guaugaauaaagacaccua

SEQ ID NO: 1623432 - RNA, 18 nt, Human
guaugaauaaagacaccu

SEQ ID NO: 1623433 - RNA, 13 nt, Human
guaugaggcauuu

SEQ ID NO: 1623434 - RNA, 15 nt, Human
guaugaggcauuugu

SEQ ID NO: 1623435 - RNA, 19 nt, Human
guaucuggugacuuuccuc

SEQ ID NO: 1623436 - RNA, 12 nt, Human
guaucuggugac

SEQ ID NO: 1623437 - RNA, 12 nt, Human
guaucugagcag

SEQ ID NO: 1623438 - RNA, 23 nt, Human
guaugaaagauggcugugccucu

SEQ ID NO: 1623439 - RNA, 22 nt, Human
guaugaaagauggcugugccuc

SEQ ID NO: 1623440 - RNA, 17 nt, Human
guauguuagugcaaauu

SEQ ID NO: 1623441 - RNA, 21 nt, Human
guaugaucacggcucacugca

SEQ ID NO: 1623442 - RNA, 22 nt, Human
guaugaucacggcucacugcag

SEQ ID NO: 1623443 - RNA, 20 nt, Human
guaugaucacggcucacugc

SEQ ID NO: 1623444 - RNA, 17 nt, Human
guaugaggcauuuguuu

SEQ ID NO: 1623445 - RNA, 20 nt, Human
guaugaggcauuuguuugaa

SEQ ID NO: 1623446 - RNA, 17 nt, Human
guauguugaagccuuug

SEQ ID NO: 1623447 - RNA, 22 nt, Human
guauaugucaagccauaauugu

SEQ ID NO: 1623448 - RNA, 16 nt, Human
guauauguugggugca

SEQ ID NO: 1623449 - RNA, 21 nt, Human
guauaugucucaggucccugc

SEQ ID NO: 1623450 - RNA, 15 nt, Human
guauaugucucaggu

SEQ ID NO: 1623451 - RNA, 13 nt, Human
guauaugucucag

SEQ ID NO: 1623452 - RNA, 14 nt, Human
guauagauuagaau

SEQ ID NO: 1623453 - RNA, 19 nt, Human
guauagaaccucuuugucu

SEQ ID NO: 1623454 - RNA, 15 nt, Human
gucaaugcagccccc

SEQ ID NO: 1623455 - RNA, 22 nt, Human
gucaauaaaauccauacauuug

SEQ ID NO: 1623456 - RNA, 15 nt, Human
gucaagugaaaaagg

SEQ ID NO: 1623457 - RNA, 23 nt, Human
gucaauaaaauccauacauuugu

SEQ ID NO: 1623458 - RNA, 19 nt, Human
guauuuuguuuuugucuua

SEQ ID NO: 1623459 - RNA, 13 nt, Human
guauuuuaaucac

SEQ ID NO: 1623460 - RNA, 20 nt, Human
guauuuuaaaagaaugauua

SEQ ID NO: 1623461 - RNA, 21 nt, Human
guauuaagcauauauuuuuau

SEQ ID NO: 1623462 - RNA, 18 nt, Human
guauuaagcauauauuuu

SEQ ID NO: 1623463 - RNA, 15 nt, Human
guauuaagcauauau

SEQ ID NO: 1623464 - RNA, 17 nt, Human
guauuaagcauauauuu

SEQ ID NO: 1623465 - RNA, 16 nt, Human
guauuaagcauauauu

SEQ ID NO: 1623466 - RNA, 14 nt, Human
guauuuuacuaaua

SEQ ID NO: 1623467 - RNA, 19 nt, Human
gucagcuccccucggagaa

SEQ ID NO: 1623468 - RNA, 22 nt, Human
gucagaugcugugcaaauguua

SEQ ID NO: 1623469 - RNA, 21 nt, Human
gucagaucugccuaaggacuu

SEQ ID NO: 1623470 - RNA, 20 nt, Human
gucagaucugccuaaggacu

SEQ ID NO: 1623471 - RNA, 19 nt, Human
gucagaucugccuaaggac

SEQ ID NO: 1623472 - RNA, 18 nt, Human
gucagaucugccuaagga

SEQ ID NO: 1623473 - RNA, 16 nt, Human
gucagaucugccuaag

SEQ ID NO: 1623474 - RNA, 14 nt, Human
gucagagccugcag

SEQ ID NO: 1623475 - RNA, 16 nt, Human
gucagagccugcaguu

SEQ ID NO: 1623476 - RNA, 15 nt, Human
gucagagccugcagu

SEQ ID NO: 1623477 - RNA, 16 nt, Human
gucacucuggcagcuc

SEQ ID NO: 1623478 - RNA, 14 nt, Human
gucacucuggcagc

SEQ ID NO: 1623479 - RNA, 13 nt, Human
gucacucuggcag

SEQ ID NO: 1623480 - RNA, 12 nt, Human
gucacucuggca

SEQ ID NO: 1623481 - RNA, 19 nt, Human
gucacucuggcagcucaga

SEQ ID NO: 1623482 - RNA, 17 nt, Human
gucacucuggcagcuca

SEQ ID NO: 1623483 - RNA, 22 nt, Human
gucacucuggcagcucagagag

SEQ ID NO: 1623484 - RNA, 18 nt, Human
gucaccccggccaccugc

SEQ ID NO: 1623485 - RNA, 17 nt, Human
gucaccccggccaccug

SEQ ID NO: 1623486 - RNA, 22 nt, Human
gucaccccggccaccugcggug

SEQ ID NO: 1623487 - RNA, 23 nt, Human
gucagcuccccucggagaagagc

SEQ ID NO: 1623488 - RNA, 22 nt, Human
gucagcuccccucggagaagag

SEQ ID NO: 1623489 - RNA, 21 nt, Human
gucagcuccccucggagaaga

SEQ ID NO: 1623490 - RNA, 13 nt, Human
gucaggaaagaga

SEQ ID NO: 1623491 - RNA, 21 nt, Human
gucauucagauaugauucaaa

SEQ ID NO: 1623492 - RNA, 21 nt, Human
gucccaccuuggcugcaggga

SEQ ID NO: 1623493 - RNA, 23 nt, Human
guccacccaggagccccgaggcc

SEQ ID NO: 1623494 - RNA, 12 nt, Human
guccacccagga

SEQ ID NO: 1623495 - RNA, 13 nt, Human
guccacccaggag

SEQ ID NO: 1623496 - RNA, 23 nt, Human
gucccaccuuggcugcagggagu

SEQ ID NO: 1623497 - RNA, 17 nt, Human
gucccaggcugagccuc

SEQ ID NO: 1623498 - RNA, 16 nt, Human
gucccaggcugagccu

SEQ ID NO: 1623499 - RNA, 15 nt, Human
gucccaggcugagcc

SEQ ID NO: 1623500 - RNA, 21 nt, Human
gucccaggcugagccucaguc

SEQ ID NO: 1623501 - RNA, 19 nt, Human
gucccaggcugagccucag

SEQ ID NO: 1623502 - RNA, 18 nt, Human
gucccaggcugagccuca

SEQ ID NO: 1623503 - RNA, 17 nt, Human
guccccaccgcagacag

SEQ ID NO: 1623504 - RNA, 17 nt, Human
gucccuaauaaagcugu

SEQ ID NO: 1623505 - RNA, 16 nt, Human
gucccuaauaaagcug

SEQ ID NO: 1623506 - RNA, 21 nt, Human
gucccugcacuugcagacucu

SEQ ID NO: 1623507 - RNA, 19 nt, Human
gucccugcacuugcagacu

SEQ ID NO: 1623508 - RNA, 16 nt, Human
gucccugcacuugcag

SEQ ID NO: 1623509 - RNA, 20 nt, Human
gucccuaauaaagcugugug

SEQ ID NO: 1623510 - RNA, 18 nt, Human
gucccuaauaaagcugug

SEQ ID NO: 1623511 - RNA, 23 nt, Human
gucccuaccgagucucuucucca

SEQ ID NO: 1623512 - RNA, 22 nt, Human
gucccuaccgagucucuucucc

SEQ ID NO: 1623513 - RNA, 21 nt, Human
gucccuaccgagucucuucuc

SEQ ID NO: 1623514 - RNA, 19 nt, Human
gucucacuauguugcccag

SEQ ID NO: 1623515 - RNA, 18 nt, Human
gucucacuauguugccca

SEQ ID NO: 1623516 - RNA, 18 nt, Human
gucgucaaagcugaaaug

SEQ ID NO: 1623517 - RNA, 23 nt, Human
gucggguuuuauuguuuaaaauc

SEQ ID NO: 1623518 - RNA, 16 nt, Human
gucgggcaugacacga

SEQ ID NO: 1623519 - RNA, 21 nt, Human
gucggaaaacaugcuacacac

SEQ ID NO: 1623520 - RNA, 19 nt, Human
guccuuaccagcagagcac

SEQ ID NO: 1623521 - RNA, 21 nt, Human
guccuuaccagcagagcaccu

SEQ ID NO: 1623522 - RNA, 14 nt, Human
gucccugccaaugg

SEQ ID NO: 1623523 - RNA, 11 nt, Human
gucccugccaa

SEQ ID NO: 1623524 - RNA, 15 nt, Human
gucccugccaaugga

SEQ ID NO: 1623525 - RNA, 13 nt, Human
gucucuugguccu

SEQ ID NO: 1623526 - RNA, 13 nt, Human
gucugacuguuuc

SEQ ID NO: 1623527 - RNA, 21 nt, Human
gucucuggauuauauuaugaa

SEQ ID NO: 1623528 - RNA, 18 nt, Human
gucucuucuccacuggau

SEQ ID NO: 1623529 - RNA, 17 nt, Human
gucucugguuccucccc

SEQ ID NO: 1623530 - RNA, 16 nt, Human
gucucugguuccuccc

SEQ ID NO: 1623531 - RNA, 17 nt, Human
gucucuggaauuugaaa

SEQ ID NO: 1623532 - RNA, 13 nt, Human
gucucugagcauu

SEQ ID NO: 1623533 - RNA, 19 nt, Human
gucucacucugucgcccag

SEQ ID NO: 1623534 - RNA, 18 nt, Human
gucucacucugucgccca

SEQ ID NO: 1623535 - RNA, 16 nt, Human
gucucacucugucgcc

SEQ ID NO: 1623536 - RNA, 15 nt, Human
gucucacucugucgc

SEQ ID NO: 1623537 - RNA, 22 nt, Human
gucucacucugucgcccagucu

SEQ ID NO: 1623538 - RNA, 14 nt, Human
gucucagauuuuau

SEQ ID NO: 1623539 - RNA, 16 nt, Human
gucucagauuuuauua

SEQ ID NO: 1623540 - RNA, 15 nt, Human
gucucagauuuuauu

SEQ ID NO: 1623541 - RNA, 21 nt, Human
gucucagauuuuauuauguaa

SEQ ID NO: 1623542 - RNA, 17 nt, Human
gucucagauuuuauuau

SEQ ID NO: 1623543 - RNA, 21 nt, Human
gucugugagaugcuagaacuc

SEQ ID NO: 1623544 - RNA, 17 nt, Human
gucugugagaugcuaga

SEQ ID NO: 1623545 - RNA, 16 nt, Human
gucugugagaugcuag

SEQ ID NO: 1623546 - RNA, 15 nt, Human
gucugugagaugcua

SEQ ID NO: 1623547 - RNA, 23 nt, Human
gucugugagaugcuagaacuccc

SEQ ID NO: 1623548 - RNA, 22 nt, Human
gucugugagaugcuagaacucc

SEQ ID NO: 1623549 - RNA, 18 nt, Human
gucugugccauuuuguau

SEQ ID NO: 1623550 - RNA, 14 nt, Human
gucuguucuuucca

SEQ ID NO: 1623551 - RNA, 17 nt, Human
gucuguucuuuccaaag

SEQ ID NO: 1623552 - RNA, 21 nt, Human
gucuugcaauggcagccuugg

SEQ ID NO: 1623553 - RNA, 20 nt, Human
gucuugcaauggcagccuug

SEQ ID NO: 1623554 - RNA, 23 nt, Human
gucuugcaauggcagccuuggca

SEQ ID NO: 1623555 - RNA, 20 nt, Human
gucuugccuuuuucauuauu

SEQ ID NO: 1623556 - RNA, 18 nt, Human
gucuugccuuuuucauua

SEQ ID NO: 1623557 - RNA, 17 nt, Human
gucuugccuuuuucauu

SEQ ID NO: 1623558 - RNA, 16 nt, Human
gucuugccuuuuucau

SEQ ID NO: 1623559 - RNA, 15 nt, Human
gucuugccuuuuuca

SEQ ID NO: 1623560 - RNA, 22 nt, Human
gucuugucucagauuuuauuau

SEQ ID NO: 1623561 - RNA, 20 nt, Human
gucuugucucagauuuuauu

SEQ ID NO: 1623562 - RNA, 15 nt, Human
gucuugucucagauu

SEQ ID NO: 1623563 - RNA, 17 nt, Human
gucuugaacuccuggcc

SEQ ID NO: 1623564 - RNA, 16 nt, Human
gucuugaacuccuggc

SEQ ID NO: 1623565 - RNA, 21 nt, Human
gucuuaaaaaguggaaaaaua

SEQ ID NO: 1623566 - RNA, 19 nt, Human
gucuugcaauggcagccuu

SEQ ID NO: 1623567 - RNA, 18 nt, Human
gucuugcaauggcagccu

SEQ ID NO: 1623568 - RNA, 17 nt, Human
gucuugcaauggcagcc

SEQ ID NO: 1623569 - RNA, 16 nt, Human
gucuugcaauggcagc

SEQ ID NO: 1623570 - RNA, 20 nt, Human
gucuugaacuccuggccuca

SEQ ID NO: 1623571 - RNA, 18 nt, Human
gucuugaacuccuggccu

SEQ ID NO: 1623572 - RNA, 21 nt, Human
gucuugaacuccuggccucaa

SEQ ID NO: 1623573 - RNA, 20 nt, Human
gugacaaggauugcuacugu

SEQ ID NO: 1623574 - RNA, 21 nt, Human
gugaaugaugauccuaggcau

SEQ ID NO: 1623575 - RNA, 13 nt, Human
gugaacacaucag

SEQ ID NO: 1623576 - RNA, 21 nt, Human
gugaacaaauuuacagagaca

SEQ ID NO: 1623577 - RNA, 15 nt, Human
gugaccucugccuga

SEQ ID NO: 1623578 - RNA, 14 nt, Human
gugaccucugccug

SEQ ID NO: 1623579 - RNA, 13 nt, Human
gugaccucugccu

SEQ ID NO: 1623580 - RNA, 15 nt, Human
gugacagaggcagcc

SEQ ID NO: 1623581 - RNA, 14 nt, Human
gugacagaggcagc

SEQ ID NO: 1623582 - RNA, 13 nt, Human
gugacagaggcag

SEQ ID NO: 1623583 - RNA, 12 nt, Human
gugacagaggca

SEQ ID NO: 1623584 - RNA, 14 nt, Human
gugagcuacaaaug

SEQ ID NO: 1623585 - RNA, 19 nt, Human
gugagccgagaucacgcca

SEQ ID NO: 1623586 - RNA, 17 nt, Human
gugaggaugaaaaaaua

SEQ ID NO: 1623587 - RNA, 18 nt, Human
gugaggagcuugaaaccc

SEQ ID NO: 1623588 - RNA, 20 nt, Human
gugagccacugcaccgggcc

SEQ ID NO: 1623589 - RNA, 15 nt, Human
gugagccacugcacc

SEQ ID NO: 1623590 - RNA, 19 nt, Human
gugauauaaguguguguuu

SEQ ID NO: 1623591 - RNA, 17 nt, Human
gugaguugauagcacag

SEQ ID NO: 1623592 - RNA, 15 nt, Human
gugauacaaugcugu

SEQ ID NO: 1623593 - RNA, 17 nt, Human
gugauacaaugcugugc

SEQ ID NO: 1623594 - RNA, 22 nt, Human
gugcauaccacuuuuguucuug

SEQ ID NO: 1623595 - RNA, 14 nt, Human
gugcaucucagccc

SEQ ID NO: 1623596 - RNA, 13 nt, Human
gugcaucucagcc

SEQ ID NO: 1623597 - RNA, 23 nt, Human
gugcaguggugcgaucuggguuc

SEQ ID NO: 1623598 - RNA, 20 nt, Human
gugcaguggugcgaucuggg

SEQ ID NO: 1623599 - RNA, 12 nt, Human
gugauuuucauu

SEQ ID NO: 1623600 - RNA, 13 nt, Human
gugauuuuuguaa

SEQ ID NO: 1623601 - RNA, 18 nt, Human
gugauuuuuguaauuuuu

SEQ ID NO: 1623602 - RNA, 24 nt, Human
gugauccacccaccucagccuccc

SEQ ID NO: 1623603 - RNA, 23 nt, Human
gugauccacccaccucagccucc

SEQ ID NO: 1623604 - RNA, 22 nt, Human
gugcacuaauguguaagacaaa

SEQ ID NO: 1623605 - RNA, 14 nt, Human
gugcggccuuuggc

SEQ ID NO: 1623606 - RNA, 14 nt, Human
gugcgccuacagga

SEQ ID NO: 1623607 - RNA, 17 nt, Human
gugcgcuaaacuuuucu

SEQ ID NO: 1623608 - RNA, 21 nt, Human
gugcgcuaaacuuuucugaua

SEQ ID NO: 1623609 - RNA, 12 nt, Human
gugcuaaggacu

SEQ ID NO: 1623610 - RNA, 20 nt, Human
gugcuaaggacuuguuagau

SEQ ID NO: 1623611 - RNA, 14 nt, Human
gugcuaaggacuug

SEQ ID NO: 1623612 - RNA, 13 nt, Human
gugcuaaggacuu

SEQ ID NO: 1623613 - RNA, 21 nt, Human
gugcgaucuggguucacugca

SEQ ID NO: 1623614 - RNA, 15 nt, Human
gugccuucagcucua

SEQ ID NO: 1623615 - RNA, 16 nt, Human
gugccaugugccaggu

SEQ ID NO: 1623616 - RNA, 14 nt, Human
gugccaugugccag

SEQ ID NO: 1623617 - RNA, 20 nt, Human
gugcccaagaauagaugcug

SEQ ID NO: 1623618 - RNA, 23 nt, Human
gugcccaagaauagaugcugacu

SEQ ID NO: 1623619 - RNA, 22 nt, Human
guguacauggaauaacauguaa

SEQ ID NO: 1623620 - RNA, 17 nt, Human
guguacauggaauaaca

SEQ ID NO: 1623621 - RNA, 18 nt, Human
gugucccugcacuugcag

SEQ ID NO: 1623622 - RNA, 16 nt, Human
gugucccugcacuugc

SEQ ID NO: 1623623 - RNA, 13 nt, Human
gugucccugcacu

SEQ ID NO: 1623624 - RNA, 21 nt, Human
guguaaguagauaggccaugg

SEQ ID NO: 1623625 - RNA, 21 nt, Human
guguaaguauucuuauuuaau

SEQ ID NO: 1623626 - RNA, 16 nt, Human
guggugacuuuggaua

SEQ ID NO: 1623627 - RNA, 19 nt, Human
guggugcgaucuggguuca

SEQ ID NO: 1623628 - RNA, 17 nt, Human
guguaagacaaaaagcu

SEQ ID NO: 1623629 - RNA, 17 nt, Human
guggugaccucugccug

SEQ ID NO: 1623630 - RNA, 14 nt, Human
guggugaccucugc

SEQ ID NO: 1623631 - RNA, 21 nt, Human
guggugagaggcauccaguau

SEQ ID NO: 1623632 - RNA, 15 nt, Human
guggugacuuuggau

SEQ ID NO: 1623633 - RNA, 13 nt, Human
guggugacuuugg

SEQ ID NO: 1623634 - RNA, 17 nt, Human
gugguagagugugccug

SEQ ID NO: 1623635 - RNA, 19 nt, Human
gugguaugaucacggcuca

SEQ ID NO: 1623636 - RNA, 18 nt, Human
gugguccuaaucuucuga

SEQ ID NO: 1623637 - RNA, 17 nt, Human
guggucccaccccacac

SEQ ID NO: 1623638 - RNA, 16 nt, Human
guggucccaccccaca

SEQ ID NO: 1623639 - RNA, 15 nt, Human
guggucccaccccac

SEQ ID NO: 1623640 - RNA, 14 nt, Human
guggucccacccca

SEQ ID NO: 1623641 - RNA, 21 nt, Human
gugcuacaaaaacacagcaag

SEQ ID NO: 1623642 - RNA, 14 nt, Human
guggcucacgccug

SEQ ID NO: 1623643 - RNA, 20 nt, Human
gugcuacaaaaacacagcaa

SEQ ID NO: 1623644 - RNA, 15 nt, Human
gugcuacaaaaacac

SEQ ID NO: 1623645 - RNA, 15 nt, Human
gugcuaauuuugaaa

SEQ ID NO: 1623646 - RNA, 13 nt, Human
gugcuaauuuuga

SEQ ID NO: 1623647 - RNA, 14 nt, Human
guggcugcuucaag

SEQ ID NO: 1623648 - RNA, 12 nt, Human
guggcugcuuca

SEQ ID NO: 1623649 - RNA, 20 nt, Human
guggcuccucccggugccca

SEQ ID NO: 1623650 - RNA, 13 nt, Human
guggcuccucccg

SEQ ID NO: 1623651 - RNA, 22 nt, Human
guggcuuaaaacaacacucaca

SEQ ID NO: 1623652 - RNA, 20 nt, Human
guggcuucccgcucagcccu

SEQ ID NO: 1623653 - RNA, 19 nt, Human
guggcuucccgcucagccc

SEQ ID NO: 1623654 - RNA, 18 nt, Human
guggcuucccgcucagcc

SEQ ID NO: 1623655 - RNA, 22 nt, Human
guggcugcuucaaggauccuga

SEQ ID NO: 1623656 - RNA, 19 nt, Human
guggcugcuucaaggaucc

SEQ ID NO: 1623657 - RNA, 16 nt, Human
guggcugcuucaagga

SEQ ID NO: 1623658 - RNA, 15 nt, Human
guggcugcuucaagg

SEQ ID NO: 1623659 - RNA, 23 nt, Human
guggcugcuucaaggauccugag

SEQ ID NO: 1623660 - RNA, 19 nt, Human
guggcuggguuggagggug

SEQ ID NO: 1623661 - RNA, 17 nt, Human
guggggcagcuugaggg

SEQ ID NO: 1623662 - RNA, 13 nt, Human
guggggcagcuug

SEQ ID NO: 1623663 - RNA, 23 nt, Human
guggguuucuaaagcugccagcc

SEQ ID NO: 1623664 - RNA, 18 nt, Human
guggggaccucaggccug

SEQ ID NO: 1623665 - RNA, 15 nt, Human
guggggaccucaggc

SEQ ID NO: 1623666 - RNA, 13 nt, Human
guggggaggggcu

SEQ ID NO: 1623667 - RNA, 15 nt, Human
gugggcuaguugggc

SEQ ID NO: 1623668 - RNA, 19 nt, Human
gugggccuucagggaguga

SEQ ID NO: 1623669 - RNA, 22 nt, Human
gugggcgugagaccugccccuc

SEQ ID NO: 1623670 - RNA, 21 nt, Human
gugggcgugagaccugccccu

SEQ ID NO: 1623671 - RNA, 18 nt, Human
gugggcgugagaccugcc

SEQ ID NO: 1623672 - RNA, 17 nt, Human
gugggcccaaugcacuu

SEQ ID NO: 1623673 - RNA, 15 nt, Human
gugggcauucaaaug

SEQ ID NO: 1623674 - RNA, 16 nt, Human
guuaaaagaugaaaau

SEQ ID NO: 1623675 - RNA, 14 nt, Human
guuaaaagaugaaa

SEQ ID NO: 1623676 - RNA, 20 nt, Human
guuaaaagaugaaaauauuu

SEQ ID NO: 1623677 - RNA, 22 nt, Human
guuaaaauaccagccaguaaau

SEQ ID NO: 1623678 - RNA, 18 nt, Human
guuaaaccaugggauaaa

SEQ ID NO: 1623679 - RNA, 21 nt, Human
guuaaaccaugggauaaaugc

SEQ ID NO: 1623680 - RNA, 16 nt, Human
guuacacuaaaaggug

SEQ ID NO: 1623681 - RNA, 15 nt, Human
guuacacuaaaaggu

SEQ ID NO: 1623682 - RNA, 18 nt, Human
guuaacugagugccuuuu

SEQ ID NO: 1623683 - RNA, 13 nt, Human
guuacagacaaag

SEQ ID NO: 1623684 - RNA, 13 nt, Human
guuacagaagccc

SEQ ID NO: 1623685 - RNA, 14 nt, Human
guguuacuaaguuu

SEQ ID NO: 1623686 - RNA, 12 nt, Human
guguuacuaagu

SEQ ID NO: 1623687 - RNA, 18 nt, Human
guguuaugacuccagaau

SEQ ID NO: 1623688 - RNA, 14 nt, Human
guguguuuuucaua

SEQ ID NO: 1623689 - RNA, 19 nt, Human
guguguuuuaaaaugagaa

SEQ ID NO: 1623690 - RNA, 16 nt, Human
guguguuuuaaaauga

SEQ ID NO: 1623691 - RNA, 13 nt, Human
guguguuuuaaaa

SEQ ID NO: 1623692 - RNA, 18 nt, Human
guguuuuucauaaagcag

SEQ ID NO: 1623693 - RNA, 13 nt, Human
guguucugugaua

SEQ ID NO: 1623694 - RNA, 14 nt, Human
guguccggucccug

SEQ ID NO: 1623695 - RNA, 23 nt, Human
gugucccugcacuugcagacucu

SEQ ID NO: 1623696 - RNA, 15 nt, Human
gugucgggcaugaca

SEQ ID NO: 1623697 - RNA, 14 nt, Human
gugucucuuggucc

SEQ ID NO: 1623698 - RNA, 17 nt, Human
gugucucccuucauccu

SEQ ID NO: 1623699 - RNA, 21 nt, Human
gugucucuugguccugcugca

SEQ ID NO: 1623700 - RNA, 20 nt, Human
gugucucuugguccugcugc

SEQ ID NO: 1623701 - RNA, 19 nt, Human
gugucucuugguccugcug

SEQ ID NO: 1623702 - RNA, 18 nt, Human
gugucucuugguccugcu

SEQ ID NO: 1623703 - RNA, 22 nt, Human
gugucucuugguccugcugcag

SEQ ID NO: 1623704 - RNA, 13 nt, Human
guguggagaagcg

SEQ ID NO: 1623705 - RNA, 21 nt, Human
guguggagaagcggcuggcag

SEQ ID NO: 1623706 - RNA, 12 nt, Human
guguguuuuaaa

SEQ ID NO: 1623707 - RNA, 15 nt, Human
guguguuucugaucu

SEQ ID NO: 1623708 - RNA, 22 nt, Human
gugugcucugaucauccacugu

SEQ ID NO: 1623709 - RNA, 15 nt, Human
gugugcucugaucau

SEQ ID NO: 1623710 - RNA, 12 nt, Human
gugugcucugau

SEQ ID NO: 1623711 - RNA, 19 nt, Human
gugugcucaggagcccugg

SEQ ID NO: 1623712 - RNA, 18 nt, Human
gugugcucaggagcccug

SEQ ID NO: 1623713 - RNA, 17 nt, Human
gugugcucaggagcccu

SEQ ID NO: 1623714 - RNA, 16 nt, Human
gugugcucaggagccc

SEQ ID NO: 1623715 - RNA, 23 nt, Human
guucaagugauucucaugccuca

SEQ ID NO: 1623716 - RNA, 20 nt, Human
guucaagcgauucuucugcu

SEQ ID NO: 1623717 - RNA, 16 nt, Human
guucaauucucauuug

SEQ ID NO: 1623718 - RNA, 23 nt, Human
guucaauucucauuugucacaca

SEQ ID NO: 1623719 - RNA, 17 nt, Human
guuauuauauuuacaaa

SEQ ID NO: 1623720 - RNA, 19 nt, Human
guucaagcgauucuucugc

SEQ ID NO: 1623721 - RNA, 19 nt, Human
guuauuaaaaaucucaaau

SEQ ID NO: 1623722 - RNA, 21 nt, Human
guuaugacuccagaauuuccc

SEQ ID NO: 1623723 - RNA, 19 nt, Human
guuaucugaagucagaucu

SEQ ID NO: 1623724 - RNA, 23 nt, Human
guuaccucugccucagaaaacaa

SEQ ID NO: 1623725 - RNA, 21 nt, Human
guuacauuuuuaagugcugca

SEQ ID NO: 1623726 - RNA, 23 nt, Human
guuaccauuuugggguacccacu

SEQ ID NO: 1623727 - RNA, 16 nt, Human
guuacccaaauuaaga

SEQ ID NO: 1623728 - RNA, 19 nt, Human
guuacauaagauaaaugug

SEQ ID NO: 1623729 - RNA, 18 nt, Human
guuacauaagauaaaugu

SEQ ID NO: 1623730 - RNA, 17 nt, Human
guuacagacaaagcgug

SEQ ID NO: 1623731 - RNA, 15 nt, Human
guuacagacaaagcg

SEQ ID NO: 1623732 - RNA, 19 nt, Human
guuaguuucuccaagcagg

SEQ ID NO: 1623733 - RNA, 16 nt, Human
guuaguuucuccaagc

SEQ ID NO: 1623734 - RNA, 22 nt, Human
guuaguuucuccaagcaggaca

SEQ ID NO: 1623735 - RNA, 15 nt, Human
guuacucagaauucu

SEQ ID NO: 1623736 - RNA, 22 nt, Human
guuacuaaguuuuuauggcuuu

SEQ ID NO: 1623737 - RNA, 13 nt, Human
guucagagcugcc

SEQ ID NO: 1623738 - RNA, 14 nt, Human
guucagagcugccc

SEQ ID NO: 1623739 - RNA, 23 nt, Human
guucagagcugcccucuccuggg

SEQ ID NO: 1623740 - RNA, 20 nt, Human
guucagagcugcccucuccu

SEQ ID NO: 1623741 - RNA, 22 nt, Human
guucagagcugcccucuccugg

SEQ ID NO: 1623742 - RNA, 15 nt, Human
guucagagcugcccu

SEQ ID NO: 1623743 - RNA, 16 nt, Human
guucagagcugcccuc

SEQ ID NO: 1623744 - RNA, 17 nt, Human
guucagagcugcccucu

SEQ ID NO: 1623745 - RNA, 19 nt, Human
guucagagcugcccucucc

SEQ ID NO: 1623746 - RNA, 19 nt, Human
guucacugcaaccuccgcc

SEQ ID NO: 1623747 - RNA, 19 nt, Human
guucacucuccauuuaaua

SEQ ID NO: 1623748 - RNA, 24 nt, Human
guucacucuacuuagcaugucccu

SEQ ID NO: 1623749 - RNA, 16 nt, Human
guucaucaaugaauga

SEQ ID NO: 1623750 - RNA, 17 nt, Human
guucaucauccuaagcu

SEQ ID NO: 1623751 - RNA, 13 nt, Human
guucaucuugaau

SEQ ID NO: 1623752 - RNA, 12 nt, Human
guucaucuugaa

SEQ ID NO: 1623753 - RNA, 18 nt, Human
guucaucuugaauuguaa

SEQ ID NO: 1623754 - RNA, 12 nt, Human
guucaugaaaga

SEQ ID NO: 1623755 - RNA, 23 nt, Human
guucauggaacgcguugaaauug

SEQ ID NO: 1623756 - RNA, 22 nt, Human
guucauggaacgcguugaaauu

SEQ ID NO: 1623757 - RNA, 14 nt, Human
guuccuaauccucu

SEQ ID NO: 1623758 - RNA, 22 nt, Human
guuccucauuagcauuuugcua

SEQ ID NO: 1623759 - RNA, 23 nt, Human
guuccuccccuccuccuggacuc

SEQ ID NO: 1623760 - RNA, 20 nt, Human
guuccaccaucaagccacca

SEQ ID NO: 1623761 - RNA, 17 nt, Human
guuccaccaucaagcca

SEQ ID NO: 1623762 - RNA, 21 nt, Human
guuccagcaauucuccugccu

SEQ ID NO: 1623763 - RNA, 20 nt, Human
guuccagcaauucuccugcc

SEQ ID NO: 1623764 - RNA, 23 nt, Human
guuccagcaauucuccugccuca

SEQ ID NO: 1623765 - RNA, 21 nt, Human
guugauggugguauguuuuca

SEQ ID NO: 1623766 - RNA, 20 nt, Human
guugauggugguauguuuuc

SEQ ID NO: 1623767 - RNA, 22 nt, Human
guugaauuuauuggcuuuucug

SEQ ID NO: 1623768 - RNA, 21 nt, Human
guugaauuuauuggcuuuucu

SEQ ID NO: 1623769 - RNA, 14 nt, Human
guugaagccuuugu

SEQ ID NO: 1623770 - RNA, 13 nt, Human
guugaagccuuug

SEQ ID NO: 1623771 - RNA, 14 nt, Human
guugaauuuauugg

SEQ ID NO: 1623772 - RNA, 16 nt, Human
guugaagacagagcua

SEQ ID NO: 1623773 - RNA, 18 nt, Human
guugaagagguuuuaaag

SEQ ID NO: 1623774 - RNA, 15 nt, Human
guugaaauuguaauu

SEQ ID NO: 1623775 - RNA, 20 nt, Human
guugaaauuguaauuauauc

SEQ ID NO: 1623776 - RNA, 16 nt, Human
guugaaauuguaauua

SEQ ID NO: 1623777 - RNA, 22 nt, Human
guugaaacggaugauuucuaug

SEQ ID NO: 1623778 - RNA, 21 nt, Human
guugaaacggaugauuucuau

SEQ ID NO: 1623779 - RNA, 15 nt, Human
guugcaggaccucag

SEQ ID NO: 1623780 - RNA, 14 nt, Human
guugcaacuuugua

SEQ ID NO: 1623781 - RNA, 16 nt, Human
guugcaacuuuguaua

SEQ ID NO: 1623782 - RNA, 18 nt, Human
guuggcaaaaaggcagga

SEQ ID NO: 1623783 - RNA, 14 nt, Human
guuggcaaaaaggc

SEQ ID NO: 1623784 - RNA, 23 nt, Human
guuggccaaagccaaagcuaggc

SEQ ID NO: 1623785 - RNA, 14 nt, Human
guuggccaguguga

SEQ ID NO: 1623786 - RNA, 19 nt, Human
guuggccaggcuggucuca

SEQ ID NO: 1623787 - RNA, 17 nt, Human
guuggccaggcuggucu

SEQ ID NO: 1623788 - RNA, 18 nt, Human
guuggccaggcuggucuc

SEQ ID NO: 1623789 - RNA, 19 nt, Human
guuggccaggcugcucuug

SEQ ID NO: 1623790 - RNA, 14 nt, Human
guuggccaggcugg

SEQ ID NO: 1623791 - RNA, 15 nt, Human
guuggccaggcuggu

SEQ ID NO: 1623792 - RNA, 13 nt, Human
guuggccaggcug

SEQ ID NO: 1623793 - RNA, 14 nt, Human
guuggccaggcugc

SEQ ID NO: 1623794 - RNA, 23 nt, Human
guugccagucaccccggccaccu

SEQ ID NO: 1623795 - RNA, 18 nt, Human
guugccagucaccccggc

SEQ ID NO: 1623796 - RNA, 17 nt, Human
guugccagucaccccgg

SEQ ID NO: 1623797 - RNA, 16 nt, Human
guugccagucaccccg

SEQ ID NO: 1623798 - RNA, 14 nt, Human
guugccagucaccc

SEQ ID NO: 1623799 - RNA, 13 nt, Human
guugccagucacc

SEQ ID NO: 1623800 - RNA, 14 nt, Human
guugcccaggcagg

SEQ ID NO: 1623801 - RNA, 15 nt, Human
guugcccaggcaggu

SEQ ID NO: 1623802 - RNA, 12 nt, Human
guugcccaggca

SEQ ID NO: 1623803 - RNA, 22 nt, Human
guugaaaagacuccaaagaaau

SEQ ID NO: 1623804 - RNA, 17 nt, Human
guugaaaagacuccaaa

SEQ ID NO: 1623805 - RNA, 23 nt, Human
guugaaaagacuccaaagaaaug

SEQ ID NO: 1623806 - RNA, 17 nt, Human
guugaaaaacagcugag

SEQ ID NO: 1623807 - RNA, 13 nt, Human
guucuuuccaaag

SEQ ID NO: 1623808 - RNA, 14 nt, Human
guucuuuccaaagu

SEQ ID NO: 1623809 - RNA, 18 nt, Human
guucuuuccaaaguacac

SEQ ID NO: 1623810 - RNA, 20 nt, Human
guucuuuccaaaguacacug

SEQ ID NO: 1623811 - RNA, 15 nt, Human
guucuuucuuccucu

SEQ ID NO: 1623812 - RNA, 14 nt, Human
guucuuucuuccuc

SEQ ID NO: 1623813 - RNA, 19 nt, Human
guucuuucuuccucugcug

SEQ ID NO: 1623814 - RNA, 18 nt, Human
guucuuucuuccucugcu

SEQ ID NO: 1623815 - RNA, 17 nt, Human
guucuuucuuccucugc

SEQ ID NO: 1623816 - RNA, 16 nt, Human
guucuuucuuccucug

SEQ ID NO: 1623817 - RNA, 18 nt, Human
guucuuucacccuuuucu

SEQ ID NO: 1623818 - RNA, 23 nt, Human
guucugggacacaguucaauucu

SEQ ID NO: 1623819 - RNA, 16 nt, Human
guucugggacacaguu

SEQ ID NO: 1623820 - RNA, 15 nt, Human
guucugggacacagu

SEQ ID NO: 1623821 - RNA, 14 nt, Human
guucugggacacag

SEQ ID NO: 1623822 - RNA, 12 nt, Human
guucugggacac

SEQ ID NO: 1623823 - RNA, 11 nt, Human
guucugggaca

SEQ ID NO: 1623824 - RNA, 20 nt, Human
guucuggcucuuccaggcug

SEQ ID NO: 1623825 - RNA, 16 nt, Human
guucuggcucuuccag

SEQ ID NO: 1623826 - RNA, 12 nt, Human
guucuggcucuu

SEQ ID NO: 1623827 - RNA, 23 nt, Human
guucuggcagaguugaagacaga

SEQ ID NO: 1623828 - RNA, 15 nt, Human
guucugaagaagaug

SEQ ID NO: 1623829 - RNA, 14 nt, Human
guucugaagaagau

SEQ ID NO: 1623830 - RNA, 13 nt, Human
guucugaagaaga

SEQ ID NO: 1623831 - RNA, 12 nt, Human
guucugaagaag

SEQ ID NO: 1623832 - RNA, 19 nt, Human
guucugauccuaguuccac

SEQ ID NO: 1623833 - RNA, 16 nt, Human
guucugcacacagcac

SEQ ID NO: 1623834 - RNA, 15 nt, Human
guucugcacacagca

SEQ ID NO: 1623835 - RNA, 17 nt, Human
guuccuuccucugagcc

SEQ ID NO: 1623836 - RNA, 19 nt, Human
guuccuuccucugagccuu

SEQ ID NO: 1623837 - RNA, 18 nt, Human
guuccuuccucugagccu

SEQ ID NO: 1623838 - RNA, 19 nt, Human
guugucugcaacucugaag

SEQ ID NO: 1623839 - RNA, 22 nt, Human
guugucugaagucacugcacag

SEQ ID NO: 1623840 - RNA, 19 nt, Human
guugucugaagucacugca

SEQ ID NO: 1623841 - RNA, 14 nt, Human
guugugguuaaucu

SEQ ID NO: 1623842 - RNA, 22 nt, Human
guuguggauuuaacagaaaugu

SEQ ID NO: 1623843 - RNA, 14 nt, Human
guuggccccugccc

SEQ ID NO: 1623844 - RNA, 13 nt, Human
guuggccccugcc

SEQ ID NO: 1623845 - RNA, 20 nt, Human
guuggccccugcccggcugc

SEQ ID NO: 1623846 - RNA, 12 nt, Human
guuggcuggggg

SEQ ID NO: 1623847 - RNA, 19 nt, Human
guuggcugggggccucagu

SEQ ID NO: 1623848 - RNA, 23 nt, Human
guuggcugggggccucagugcca

SEQ ID NO: 1623849 - RNA, 12 nt, Human
guugucagcuga

SEQ ID NO: 1623850 - RNA, 20 nt, Human
guuuauauaagcuuguauuc

SEQ ID NO: 1623851 - RNA, 20 nt, Human
guuuaggauguugaaaaagu

SEQ ID NO: 1623852 - RNA, 19 nt, Human
guuuaggaacuacugagga

SEQ ID NO: 1623853 - RNA, 21 nt, Human
guuuagcuggaaaaguauguu

SEQ ID NO: 1623854 - RNA, 20 nt, Human
guuuagcuggaaaaguaugu

SEQ ID NO: 1623855 - RNA, 20 nt, Human
guuguuugauucagacagcu

SEQ ID NO: 1623856 - RNA, 14 nt, Human
guuguuacauuuuu

SEQ ID NO: 1623857 - RNA, 15 nt, Human
guuguuacauuuuua

SEQ ID NO: 1623858 - RNA, 14 nt, Human
guuuagauaauaca

SEQ ID NO: 1623859 - RNA, 15 nt, Human
guuuagauaauacac

SEQ ID NO: 1623860 - RNA, 21 nt, Human
guuugauucagacagcugccu

SEQ ID NO: 1623861 - RNA, 20 nt, Human
guuugauucagacagcugcc

SEQ ID NO: 1623862 - RNA, 16 nt, Human
guuugauucagacagc

SEQ ID NO: 1623863 - RNA, 18 nt, Human
guuugagaucagccuggg

SEQ ID NO: 1623864 - RNA, 23 nt, Human
guuugauuaaauucuugcaaagu

SEQ ID NO: 1623865 - RNA, 17 nt, Human
guuugagaucagccugg

SEQ ID NO: 1623866 - RNA, 19 nt, Human
guuucuuuguaaugaaaac

SEQ ID NO: 1623867 - RNA, 18 nt, Human
guuucuuuguaaugaaaa

SEQ ID NO: 1623868 - RNA, 20 nt, Human
guuuuccaugaguccccugu

SEQ ID NO: 1623869 - RNA, 19 nt, Human
guuuuccaugaguccccug

SEQ ID NO: 1623870 - RNA, 13 nt, Human
guuuuccugaaga

SEQ ID NO: 1623871 - RNA, 20 nt, Human
guuuguuucugaaagggacg

SEQ ID NO: 1623872 - RNA, 16 nt, Human
guuuuaaaaugagaaa

SEQ ID NO: 1623873 - RNA, 15 nt, Human
guuuuaaaaugagaa

SEQ ID NO: 1623874 - RNA, 12 nt, Human
guuuucacucuu

SEQ ID NO: 1623875 - RNA, 11 nt, Human
guuuucacucu

SEQ ID NO: 1623876 - RNA, 17 nt, Human
guuuucaaaauaaaaau

SEQ ID NO: 1623877 - RNA, 20 nt, Human
guuuucaaaauuguuacaaa

SEQ ID NO: 1623878 - RNA, 17 nt, Human
guuuuaaaaugagaaau

SEQ ID NO: 1623879 - RNA, 21 nt, Human
uaaaaacaaagaaauuaugug

SEQ ID NO: 1623880 - RNA, 21 nt, Human
guuuuuaaggguuuguggaaa

SEQ ID NO: 1623881 - RNA, 18 nt, Human
uaaaaaugguuuaaaugg

SEQ ID NO: 1623882 - RNA, 19 nt, Human
uaaaaaugguuuaaauggu

SEQ ID NO: 1623883 - RNA, 22 nt, Human
uaaaacaagcacuaaacaaaga

SEQ ID NO: 1623884 - RNA, 15 nt, Human
uaaaacaacacucac

SEQ ID NO: 1623885 - RNA, 23 nt, Human
uaaaacacaacaucuuuuucuac

SEQ ID NO: 1623886 - RNA, 22 nt, Human
uaaaacacaacaucuuuuucua

SEQ ID NO: 1623887 - RNA, 17 nt, Human
uaaaacacaacaucuuu

SEQ ID NO: 1623888 - RNA, 19 nt, Human
uaaaacacuuccauaaucu

SEQ ID NO: 1623889 - RNA, 13 nt, Human
uaaaaccacagca

SEQ ID NO: 1623890 - RNA, 17 nt, Human
uaaaagauacaguuacu

SEQ ID NO: 1623891 - RNA, 20 nt, Human
uaaaagauacaguuacucag

SEQ ID NO: 1623892 - RNA, 14 nt, Human
uaaaagauacaguu

SEQ ID NO: 1623893 - RNA, 21 nt, Human
uaaaagauacaguuacucaga

SEQ ID NO: 1623894 - RNA, 13 nt, Human
uaaaaucauuucu

SEQ ID NO: 1623895 - RNA, 10 nt, Human
uaaaaucauu

SEQ ID NO: 1623896 - RNA, 12 nt, Human
uaaaaggugacc

SEQ ID NO: 1623897 - RNA, 19 nt, Human
uaaaaggugaccaaugaug

SEQ ID NO: 1623898 - RNA, 22 nt, Human
uaaaaucauuucugcaucagcu

SEQ ID NO: 1623899 - RNA, 18 nt, Human
uaaaaucauuucugcauc

SEQ ID NO: 1623900 - RNA, 17 nt, Human
uaaaauccauacauuug

SEQ ID NO: 1623901 - RNA, 15 nt, Human
uaaaauccauacauu

SEQ ID NO: 1623902 - RNA, 21 nt, Human
uaaaagguaugcaaucaaauc

SEQ ID NO: 1623903 - RNA, 12 nt, Human
uaaaaggagcca

SEQ ID NO: 1623904 - RNA, 14 nt, Human
uaaaguguuugaaa

SEQ ID NO: 1623905 - RNA, 17 nt, Human
uaaaggcuaccuuugua

SEQ ID NO: 1623906 - RNA, 14 nt, Human
uaaaggaauuuaaa

SEQ ID NO: 1623907 - RNA, 15 nt, Human
uaaaggcuaccuuug

SEQ ID NO: 1623908 - RNA, 20 nt, Human
uaaagccugaguuugcuuuc

SEQ ID NO: 1623909 - RNA, 14 nt, Human
uaaagcugaaaacu

SEQ ID NO: 1623910 - RNA, 12 nt, Human
uaaagaaaacug

SEQ ID NO: 1623911 - RNA, 16 nt, Human
uaaagcagcguuucua

SEQ ID NO: 1623912 - RNA, 17 nt, Human
uaaagcagcguuucuau

SEQ ID NO: 1623913 - RNA, 19 nt, Human
uaaagcagcguuucuauga

SEQ ID NO: 1623914 - RNA, 18 nt, Human
uaaagcaggcagaacuca

SEQ ID NO: 1623915 - RNA, 20 nt, Human
uaaagccauguuuauuacag

SEQ ID NO: 1623916 - RNA, 15 nt, Human
uaaagccauguuuau

SEQ ID NO: 1623917 - RNA, 13 nt, Human
uaaagccauguuu

SEQ ID NO: 1623918 - RNA, 11 nt, Human
uaaagccaugu

SEQ ID NO: 1623919 - RNA, 22 nt, Human
uaaacuugguuuuuaaaaaacu

SEQ ID NO: 1623920 - RNA, 13 nt, Human
uaaacuuaaucua

SEQ ID NO: 1623921 - RNA, 21 nt, Human
uaaacaagaccacguuucuaa

SEQ ID NO: 1623922 - RNA, 22 nt, Human
uaaacaagaccacguuucuaaa

SEQ ID NO: 1623923 - RNA, 20 nt, Human
uaaacaagaccacguuucua

SEQ ID NO: 1623924 - RNA, 16 nt, Human
uaaaaucuugaaaaug

SEQ ID NO: 1623925 - RNA, 18 nt, Human
uaaacacucuugaaaaau

SEQ ID NO: 1623926 - RNA, 17 nt, Human
uaaacacucuugaaaaa

SEQ ID NO: 1623927 - RNA, 15 nt, Human
uaaacacucuugaaa

SEQ ID NO: 1623928 - RNA, 23 nt, Human
uaaauugacacuuaaaaaugguu

SEQ ID NO: 1623929 - RNA, 22 nt, Human
uaaauuuaguauuuuguuucag

SEQ ID NO: 1623930 - RNA, 20 nt, Human
uaaauugacacuuaaaaaug

SEQ ID NO: 1623931 - RNA, 13 nt, Human
uaaauucuuucau

SEQ ID NO: 1623932 - RNA, 18 nt, Human
uaacaccaugauuaacca

SEQ ID NO: 1623933 - RNA, 16 nt, Human
uaaaugugcuuuuaaa

SEQ ID NO: 1623934 - RNA, 11 nt, Human
uaaauuauuuu

SEQ ID NO: 1623935 - RNA, 16 nt, Human
uaaaugugccuucauu

SEQ ID NO: 1623936 - RNA, 17 nt, Human
uaaauucuugcaaagua

SEQ ID NO: 1623937 - RNA, 18 nt, Human
uaaauucuugcaaaguau

SEQ ID NO: 1623938 - RNA, 22 nt, Human
uaaauucuugcaaaguaucccu

SEQ ID NO: 1623939 - RNA, 16 nt, Human
uaaauucuugcaaagu

SEQ ID NO: 1623940 - RNA, 20 nt, Human
uaaauggcuuccuggcaaua

SEQ ID NO: 1623941 - RNA, 14 nt, Human
uaaaugggggugca

SEQ ID NO: 1623942 - RNA, 17 nt, Human
uaaaugggggugcauuu

SEQ ID NO: 1623943 - RNA, 18 nt, Human
uaaaugggggugcauuug

SEQ ID NO: 1623944 - RNA, 19 nt, Human
uaaaugggggugcauuuga

SEQ ID NO: 1623945 - RNA, 22 nt, Human
uaaaugucucuuuaaugucaca

SEQ ID NO: 1623946 - RNA, 20 nt, Human
uaaaugucuaguuguaacac

SEQ ID NO: 1623947 - RNA, 17 nt, Human
uaaaugcccagccccuu

SEQ ID NO: 1623948 - RNA, 16 nt, Human
uaaaugcccagccccu

SEQ ID NO: 1623949 - RNA, 15 nt, Human
uaaaugcccagcccc

SEQ ID NO: 1623950 - RNA, 14 nt, Human
uaaaugcccagccc

SEQ ID NO: 1623951 - RNA, 16 nt, Human
uaaauggaaccacucu

SEQ ID NO: 1623952 - RNA, 11 nt, Human
uaaaugcugcu

SEQ ID NO: 1623953 - RNA, 17 nt, Human
uaaaugcugcuuuuucu

SEQ ID NO: 1623954 - RNA, 13 nt, Human
uaaaugcccagcc

SEQ ID NO: 1623955 - RNA, 23 nt, Human
uaaaugccaucaauaaaaaauua

SEQ ID NO: 1623956 - RNA, 16 nt, Human
uaaaugccaucaauaa

SEQ ID NO: 1623957 - RNA, 17 nt, Human
uaaaguugguaaaccuu

SEQ ID NO: 1623958 - RNA, 16 nt, Human
uaaaguugguaaaccu

SEQ ID NO: 1623959 - RNA, 15 nt, Human
uaacuggaaacuuca

SEQ ID NO: 1623960 - RNA, 19 nt, Human
uaagaaaaaggaugcacag

SEQ ID NO: 1623961 - RNA, 23 nt, Human
uaagaaaaaggaugcacagaguu

SEQ ID NO: 1623962 - RNA, 16 nt, Human
uaagaaaaaggaugca

SEQ ID NO: 1623963 - RNA, 18 nt, Human
uaagaaaaaggaugcaca

SEQ ID NO: 1623964 - RNA, 21 nt, Human
uaagaaaauaucacuugucaa

SEQ ID NO: 1623965 - RNA, 24 nt, Human
uaagaaagacuaucuaaauguuga

SEQ ID NO: 1623966 - RNA, 13 nt, Human
uaagagagaauga

SEQ ID NO: 1623967 - RNA, 19 nt, Human
uaagaaccuuuugagugcc

SEQ ID NO: 1623968 - RNA, 23 nt, Human
uaagagagaaugagagacacacu

SEQ ID NO: 1623969 - RNA, 14 nt, Human
uaagagagaaugag

SEQ ID NO: 1623970 - RNA, 17 nt, Human
uaaccaggggccaugaa

SEQ ID NO: 1623971 - RNA, 23 nt, Human
uaaccaguguuguggauuuaaca

SEQ ID NO: 1623972 - RNA, 16 nt, Human
uaaccacuucagcuga

SEQ ID NO: 1623973 - RNA, 13 nt, Human
uaaccagaucauu

SEQ ID NO: 1623974 - RNA, 11 nt, Human
uaacagaaaug

SEQ ID NO: 1623975 - RNA, 12 nt, Human
uaacagaaaugu

SEQ ID NO: 1623976 - RNA, 16 nt, Human
uaacuauguugauaaa

SEQ ID NO: 1623977 - RNA, 18 nt, Human
uaauaaggaaaaguuuaa

SEQ ID NO: 1623978 - RNA, 16 nt, Human
uaauaaggaaaaguuu

SEQ ID NO: 1623979 - RNA, 12 nt, Human
uaauaaagcugu

SEQ ID NO: 1623980 - RNA, 16 nt, Human
uaagugguguguguau

SEQ ID NO: 1623981 - RNA, 15 nt, Human
uaaguggugugugua

SEQ ID NO: 1623982 - RNA, 15 nt, Human
uaagugcugcauuua

SEQ ID NO: 1623983 - RNA, 16 nt, Human
uaagugcugcauuuaa

SEQ ID NO: 1623984 - RNA, 18 nt, Human
uaagugcugcauuuaaaa

SEQ ID NO: 1623985 - RNA, 22 nt, Human
uaagugcugcauuuaaaagaua

SEQ ID NO: 1623986 - RNA, 13 nt, Human
uaagugaaauaag

SEQ ID NO: 1623987 - RNA, 14 nt, Human
uaagugcugcauuu

SEQ ID NO: 1623988 - RNA, 23 nt, Human
uaagugaggaugaaaaaauaaca

SEQ ID NO: 1623989 - RNA, 12 nt, Human
uaagugagagag

SEQ ID NO: 1623990 - RNA, 22 nt, Human
uaagugauugcugguuuuaguu

SEQ ID NO: 1623991 - RNA, 20 nt, Human
uaagguggguacgggagggu

SEQ ID NO: 1623992 - RNA, 15 nt, Human
uaaggugugcucuga

SEQ ID NO: 1623993 - RNA, 17 nt, Human
uaaggguaucuggugac

SEQ ID NO: 1623994 - RNA, 15 nt, Human
uaagaggcagggucu

SEQ ID NO: 1623995 - RNA, 12 nt, Human
uaagaggcaggg

SEQ ID NO: 1623996 - RNA, 22 nt, Human
uaagaggcagggucucacucug

SEQ ID NO: 1623997 - RNA, 14 nt, Human
uaagcuauucagua

SEQ ID NO: 1623998 - RNA, 14 nt, Human
uaaggcaaucaugg

SEQ ID NO: 1623999 - RNA, 22 nt, Human
uaauguuucaaacauauauaac

SEQ ID NO: 1624000 - RNA, 20 nt, Human
uaauuaaguacuauguauca

SEQ ID NO: 1624001 - RNA, 17 nt, Human
uaauuaaguacuaugua

SEQ ID NO: 1624002 - RNA, 14 nt, Human
uaauuaaguacuau

SEQ ID NO: 1624003 - RNA, 21 nt, Human
uaauuaacauguuaaaccaug

SEQ ID NO: 1624004 - RNA, 23 nt, Human
uaaugauaacuggaaacuucagc

SEQ ID NO: 1624005 - RNA, 15 nt, Human
uaaugcgugcauacc

SEQ ID NO: 1624006 - RNA, 22 nt, Human
uaaugauaacuggaaacuucag

SEQ ID NO: 1624007 - RNA, 17 nt, Human
uaaugauaacuggaaac

SEQ ID NO: 1624008 - RNA, 19 nt, Human
uaaugcgugcauaccacuu

SEQ ID NO: 1624009 - RNA, 22 nt, Human
uaaugcgugcauaccacuuuug

SEQ ID NO: 1624010 - RNA, 23 nt, Human
uaaugcgugcauaccacuuuugu

SEQ ID NO: 1624011 - RNA, 15 nt, Human
uaauggggcggugag

SEQ ID NO: 1624012 - RNA, 14 nt, Human
uaauaauguuucaa

SEQ ID NO: 1624013 - RNA, 19 nt, Human
uaauaugcacacauuuuuu

SEQ ID NO: 1624014 - RNA, 16 nt, Human
uaauauuaaagccaug

SEQ ID NO: 1624015 - RNA, 15 nt, Human
uaauaugcacacauu

SEQ ID NO: 1624016 - RNA, 16 nt, Human
uaauaugcacacauuu

SEQ ID NO: 1624017 - RNA, 17 nt, Human
uaauaugcacacauuuu

SEQ ID NO: 1624018 - RNA, 18 nt, Human
uaauaugcacacauuuuu

SEQ ID NO: 1624019 - RNA, 20 nt, Human
uaauauuaaggaagacaaug

SEQ ID NO: 1624020 - RNA, 21 nt, Human
uaauauuaaagccauguuuau

SEQ ID NO: 1624021 - RNA, 20 nt, Human
uaauauuaaagccauguuua

SEQ ID NO: 1624022 - RNA, 17 nt, Human
uaauauuaaagccaugu

SEQ ID NO: 1624023 - RNA, 20 nt, Human
uaauccucuaggaggucucu

SEQ ID NO: 1624024 - RNA, 13 nt, Human
uaaucuaaaugga

SEQ ID NO: 1624025 - RNA, 23 nt, Human
uaaucugggccagaauuucaaac

SEQ ID NO: 1624026 - RNA, 18 nt, Human
uaaucugggccagaauuu

SEQ ID NO: 1624027 - RNA, 22 nt, Human
uaaucuggacuccucuguccag

SEQ ID NO: 1624028 - RNA, 21 nt, Human
uaaucuggacuccucugucca

SEQ ID NO: 1624029 - RNA, 20 nt, Human
uaaucuggacuccucugucc

SEQ ID NO: 1624030 - RNA, 19 nt, Human
uaaucuggacuccucuguc

SEQ ID NO: 1624031 - RNA, 15 nt, Human
uaaucuggacuccuc

SEQ ID NO: 1624032 - RNA, 18 nt, Human
uaaucuggacuccucugu

SEQ ID NO: 1624033 - RNA, 17 nt, Human
uaaucuggacuccucug

SEQ ID NO: 1624034 - RNA, 23 nt, Human
uauaucugaggaauucuguauag

SEQ ID NO: 1624035 - RNA, 19 nt, Human
uauauaacaaugcuguauu

SEQ ID NO: 1624036 - RNA, 17 nt, Human
uauauaacaaugcugua

SEQ ID NO: 1624037 - RNA, 21 nt, Human
uauagaaccucuuugucuaca

SEQ ID NO: 1624038 - RNA, 20 nt, Human
uauagaaccucuuugucuac

SEQ ID NO: 1624039 - RNA, 14 nt, Human
uaucaaaagaaaga

SEQ ID NO: 1624040 - RNA, 19 nt, Human
uaucaggugcugccaucca

SEQ ID NO: 1624041 - RNA, 20 nt, Human
uaucaggugcugccauccag

SEQ ID NO: 1624042 - RNA, 16 nt, Human
uauaugcuucuguuuu

SEQ ID NO: 1624043 - RNA, 14 nt, Human
uauaugcuucuguu

SEQ ID NO: 1624044 - RNA, 20 nt, Human
uauauuugaaauauugacuu

SEQ ID NO: 1624045 - RNA, 21 nt, Human
uauauuuuuuguuaaaugauu

SEQ ID NO: 1624046 - RNA, 20 nt, Human
uauauuuuuuucugaaauuu

SEQ ID NO: 1624047 - RNA, 19 nt, Human
uauauuuuuuucugaaauu

SEQ ID NO: 1624048 - RNA, 16 nt, Human
uauauuuuuuucugaa

SEQ ID NO: 1624049 - RNA, 16 nt, Human
uauauuuucauucucc

SEQ ID NO: 1624050 - RNA, 17 nt, Human
uaggugugggggaagca

SEQ ID NO: 1624051 - RNA, 13 nt, Human
uagguguggggga

SEQ ID NO: 1624052 - RNA, 19 nt, Human
uaggugugacugaauuucu

SEQ ID NO: 1624053 - RNA, 21 nt, Human
uaggugugacugaauuucuuu

SEQ ID NO: 1624054 - RNA, 23 nt, Human
uaggugugacugaauuucuuuug

SEQ ID NO: 1624055 - RNA, 17 nt, Human
uaguaugaggcauuugu

SEQ ID NO: 1624056 - RNA, 18 nt, Human
uaguaugaggcauuuguu

SEQ ID NO: 1624057 - RNA, 22 nt, Human
uaggugcuacaaaaacacagca

SEQ ID NO: 1624058 - RNA, 20 nt, Human
uaggugcuacaaaaacacag

SEQ ID NO: 1624059 - RNA, 23 nt, Human
uaggugcuacaaaaacacagcaa

SEQ ID NO: 1624060 - RNA, 16 nt, Human
uaggugacagagugag

SEQ ID NO: 1624061 - RNA, 11 nt, Human
uaggugacaga

SEQ ID NO: 1624062 - RNA, 11 nt, Human
uagggaaaaac

SEQ ID NO: 1624063 - RNA, 22 nt, Human
uagcuggucuuauuuguaaagc

SEQ ID NO: 1624064 - RNA, 17 nt, Human
uaguauuguccaggucu

SEQ ID NO: 1624065 - RNA, 16 nt, Human
uaguaugguggcuggg

SEQ ID NO: 1624066 - RNA, 20 nt, Human
uaguggcuuaaaacaacacu

SEQ ID NO: 1624067 - RNA, 22 nt, Human
uaguuguuugauucagacagcu

SEQ ID NO: 1624068 - RNA, 21 nt, Human
uaguuguuugauucagacagc

SEQ ID NO: 1624069 - RNA, 20 nt, Human
uaguuguuugauucagacag

SEQ ID NO: 1624070 - RNA, 16 nt, Human
uaguuugauuaaauuc

SEQ ID NO: 1624071 - RNA, 21 nt, Human
uaguuugauuaaauucuugca

SEQ ID NO: 1624072 - RNA, 15 nt, Human
uaguuugauuaaauu

SEQ ID NO: 1624073 - RNA, 15 nt, Human
uauaaacuuuaccuu

SEQ ID NO: 1624074 - RNA, 16 nt, Human
uauaaacuuuaccuuu

SEQ ID NO: 1624075 - RNA, 17 nt, Human
uauaaacuuuaccuuuu

SEQ ID NO: 1624076 - RNA, 18 nt, Human
uauaaacuuuaccuuuuu

SEQ ID NO: 1624077 - RNA, 13 nt, Human
uauaaacuuuacc

SEQ ID NO: 1624078 - RNA, 14 nt, Human
uauaaacuuuaccu

SEQ ID NO: 1624079 - RNA, 11 nt, Human
uauaaacuuua

SEQ ID NO: 1624080 - RNA, 18 nt, Human
uauaaaccgaacugaugu

SEQ ID NO: 1624081 - RNA, 16 nt, Human
uagccuaggugacaga

SEQ ID NO: 1624082 - RNA, 16 nt, Human
uagccccucuccugga

SEQ ID NO: 1624083 - RNA, 19 nt, Human
uagcugggacuacaggcac

SEQ ID NO: 1624084 - RNA, 17 nt, Human
uagcugggacuacaggc

SEQ ID NO: 1624085 - RNA, 15 nt, Human
uagcugggacuacag

SEQ ID NO: 1624086 - RNA, 21 nt, Human
uagcucaggugucccugcacu

SEQ ID NO: 1624087 - RNA, 20 nt, Human
uagcucaggugucccugcac

SEQ ID NO: 1624088 - RNA, 12 nt, Human
uagcucauucuc

SEQ ID NO: 1624089 - RNA, 20 nt, Human
uagccugugccucugggacu

SEQ ID NO: 1624090 - RNA, 18 nt, Human
uagccugugccucuggga

SEQ ID NO: 1624091 - RNA, 14 nt, Human
uagauaggccaugg

SEQ ID NO: 1624092 - RNA, 16 nt, Human
uagauacuguaucaug

SEQ ID NO: 1624093 - RNA, 15 nt, Human
uagauuagaauucug

SEQ ID NO: 1624094 - RNA, 14 nt, Human
uagauuagaauucu

SEQ ID NO: 1624095 - RNA, 20 nt, Human
uagauuagaauucuguauag

SEQ ID NO: 1624096 - RNA, 19 nt, Human
uagauuagaauucuguaua

SEQ ID NO: 1624097 - RNA, 17 nt, Human
uagauuagaauucugua

SEQ ID NO: 1624098 - RNA, 16 nt, Human
uagauuagaauucugu

SEQ ID NO: 1624099 - RNA, 20 nt, Human
uagauuagagaguguugaaa

SEQ ID NO: 1624100 - RNA, 11 nt, Human
uagcagggaaa

SEQ ID NO: 1624101 - RNA, 16 nt, Human
uagcauacguacacau

SEQ ID NO: 1624102 - RNA, 17 nt, Human
uagcauacguacacauu

SEQ ID NO: 1624103 - RNA, 18 nt, Human
uagcauacguacacauuu

SEQ ID NO: 1624104 - RNA, 19 nt, Human
uagcauacguacacauuuu

SEQ ID NO: 1624105 - RNA, 18 nt, Human
uagcauccuggaauaucu

SEQ ID NO: 1624106 - RNA, 16 nt, Human
uagcauccuggaauau

SEQ ID NO: 1624107 - RNA, 15 nt, Human
uagcauccuggaaua

SEQ ID NO: 1624108 - RNA, 13 nt, Human
uagcauccuggaa

SEQ ID NO: 1624109 - RNA, 18 nt, Human
uagaauuaacacaugauc

SEQ ID NO: 1624110 - RNA, 23 nt, Human
uagaauuaguggcacuugcuuuu

SEQ ID NO: 1624111 - RNA, 16 nt, Human
uagaauuaacacauga

SEQ ID NO: 1624112 - RNA, 15 nt, Human
uagaauuaacacaug

SEQ ID NO: 1624113 - RNA, 23 nt, Human
uagaauaccacaggaaccacaag

SEQ ID NO: 1624114 - RNA, 14 nt, Human
uacuuguggacaca

SEQ ID NO: 1624115 - RNA, 14 nt, Human
uagaguugauacua

SEQ ID NO: 1624116 - RNA, 17 nt, Human
uagaguugauacuacag

SEQ ID NO: 1624117 - RNA, 12 nt, Human
uagagugggagc

SEQ ID NO: 1624118 - RNA, 14 nt, Human
uagagguucaaaga

SEQ ID NO: 1624119 - RNA, 15 nt, Human
uagagguucaaagau

SEQ ID NO: 1624120 - RNA, 11 nt, Human
uagagacaggg

SEQ ID NO: 1624121 - RNA, 22 nt, Human
uagagaaggacccggaggggcc

SEQ ID NO: 1624122 - RNA, 13 nt, Human
uagagaaggaccc

SEQ ID NO: 1624123 - RNA, 20 nt, Human
uagacccacuggacucaccu

SEQ ID NO: 1624124 - RNA, 21 nt, Human
uagaauucuguauagauuaga

SEQ ID NO: 1624125 - RNA, 16 nt, Human
uagaauucuguauaga

SEQ ID NO: 1624126 - RNA, 15 nt, Human
uagaauucuguauag

SEQ ID NO: 1624127 - RNA, 14 nt, Human
uagaauucuguaua

SEQ ID NO: 1624128 - RNA, 13 nt, Human
uagaauucuguau

SEQ ID NO: 1624129 - RNA, 11 nt, Human
uagaauucugu

SEQ ID NO: 1624130 - RNA, 20 nt, Human
uagacuggugacugauucuu

SEQ ID NO: 1624131 - RNA, 23 nt, Human
uagacuggugacugauucuucag

SEQ ID NO: 1624132 - RNA, 21 nt, Human
uagacuggugacugauucuuc

SEQ ID NO: 1624133 - RNA, 22 nt, Human
uaccaaaaaucucaauauuuca

SEQ ID NO: 1624134 - RNA, 23 nt, Human
uacauuuuuaagugcugcauuua

SEQ ID NO: 1624135 - RNA, 22 nt, Human
uaccuaacgaaguauccuucag

SEQ ID NO: 1624136 - RNA, 22 nt, Human
uaccgagucucuucuccacugg

SEQ ID NO: 1624137 - RNA, 16 nt, Human
uacccagcgagcccug

SEQ ID NO: 1624138 - RNA, 17 nt, Human
uaccgagucucuucucc

SEQ ID NO: 1624139 - RNA, 21 nt, Human
uaccgagucucuucuccacug

SEQ ID NO: 1624140 - RNA, 18 nt, Human
uaccgagucucuucucca

SEQ ID NO: 1624141 - RNA, 16 nt, Human
uaccuaucaucuuaag

SEQ ID NO: 1624142 - RNA, 15 nt, Human
uaccuacauacaauu

SEQ ID NO: 1624143 - RNA, 17 nt, Human
uacuaaccagcagaaau

SEQ ID NO: 1624144 - RNA, 23 nt, Human
uacuaaaauggacuguggugacu

SEQ ID NO: 1624145 - RNA, 22 nt, Human
uacuaauaaaauuuaaaagucu

SEQ ID NO: 1624146 - RNA, 21 nt, Human
uacuaauagacaauuuauuau

SEQ ID NO: 1624147 - RNA, 14 nt, Human
uacuaaggaaucuu

SEQ ID NO: 1624148 - RNA, 21 nt, Human
uacgaaaagaggggaagagac

SEQ ID NO: 1624149 - RNA, 18 nt, Human
uacgaaaagaggggaaga

SEQ ID NO: 1624150 - RNA, 17 nt, Human
uacuaaaauggacugug

SEQ ID NO: 1624151 - RNA, 13 nt, Human
uaccuuuuuuaua

SEQ ID NO: 1624152 - RNA, 16 nt, Human
uaccuuuuuuauacau

SEQ ID NO: 1624153 - RNA, 17 nt, Human
uaccuuuuuuauacaua

SEQ ID NO: 1624154 - RNA, 13 nt, Human
uaccuuuuuuaga

SEQ ID NO: 1624155 - RNA, 19 nt, Human
uaccuuuuuuagaguugau

SEQ ID NO: 1624156 - RNA, 22 nt, Human
uaccuuuuuuagaguugauacu

SEQ ID NO: 1624157 - RNA, 21 nt, Human
uaccucuugagccuugaacuu

SEQ ID NO: 1624158 - RNA, 18 nt, Human
uaccucggugccuuccuc

SEQ ID NO: 1624159 - RNA, 13 nt, Human
uacuuguggacac

SEQ ID NO: 1624160 - RNA, 20 nt, Human
uacuugcucuugaugccugg

SEQ ID NO: 1624161 - RNA, 19 nt, Human
uacuugcucuugaugccug

SEQ ID NO: 1624162 - RNA, 18 nt, Human
uacuugcucuugaugccu

SEQ ID NO: 1624163 - RNA, 14 nt, Human
uacuugcucuugau

SEQ ID NO: 1624164 - RNA, 13 nt, Human
uacuugcucuuga

SEQ ID NO: 1624165 - RNA, 23 nt, Human
uacugucagcuccccucggagaa

SEQ ID NO: 1624166 - RNA, 16 nt, Human
uacuguccuacccacc

SEQ ID NO: 1624167 - RNA, 21 nt, Human
uacugucuucaguaagccgug

SEQ ID NO: 1624168 - RNA, 22 nt, Human
uacuacaguccucccaucucac

SEQ ID NO: 1624169 - RNA, 13 nt, Human
uacuacaguuugu

SEQ ID NO: 1624170 - RNA, 14 nt, Human
uacuacaguuuguu

SEQ ID NO: 1624171 - RNA, 20 nt, Human
uacuacaguuuguuaguaug

SEQ ID NO: 1624172 - RNA, 18 nt, Human
uacucgaguuacagacaa

SEQ ID NO: 1624173 - RNA, 22 nt, Human
uacucgaguuacagacaaagcg

SEQ ID NO: 1624174 - RNA, 12 nt, Human
uacuccucccag

SEQ ID NO: 1624175 - RNA, 12 nt, Human
uacucccaucug

SEQ ID NO: 1624176 - RNA, 15 nt, Human
uacuccccuccuuga

SEQ ID NO: 1624177 - RNA, 16 nt, Human
uacucuacccucuuag

SEQ ID NO: 1624178 - RNA, 21 nt, Human
uacugccuauuuuaauaaaca

SEQ ID NO: 1624179 - RNA, 14 nt, Human
uacugccuauuuua

SEQ ID NO: 1624180 - RNA, 22 nt, Human
uacugcccaggccugccuguuc

SEQ ID NO: 1624181 - RNA, 21 nt, Human
uacugcccaggccugccuguu

SEQ ID NO: 1624182 - RNA, 20 nt, Human
uacugcccaggccugccugu

SEQ ID NO: 1624183 - RNA, 19 nt, Human
uacugcccaggccugccug

SEQ ID NO: 1624184 - RNA, 14 nt, Human
uacaggauuugaaa

SEQ ID NO: 1624185 - RNA, 20 nt, Human
uacaggaugaugacuaugga

SEQ ID NO: 1624186 - RNA, 23 nt, Human
uacaguucggugagcuacaaaug

SEQ ID NO: 1624187 - RNA, 15 nt, Human
uacaggagugagcac

SEQ ID NO: 1624188 - RNA, 22 nt, Human
uacaggaaguacuggagaaaau

SEQ ID NO: 1624189 - RNA, 15 nt, Human
uacaggaaguacugg

SEQ ID NO: 1624190 - RNA, 14 nt, Human
uacaggaaguacug

SEQ ID NO: 1624191 - RNA, 19 nt, Human
uacaguugaaaaacagcug

SEQ ID NO: 1624192 - RNA, 17 nt, Human
uacaguugaaaaacagc

SEQ ID NO: 1624193 - RNA, 21 nt, Human
uacagcuugaccgugaggcca

SEQ ID NO: 1624194 - RNA, 20 nt, Human
uacaguugaaaaacagcuga

SEQ ID NO: 1624195 - RNA, 18 nt, Human
uacaguuuguuaguauga

SEQ ID NO: 1624196 - RNA, 13 nt, Human
uacagcugccugc

SEQ ID NO: 1624197 - RNA, 14 nt, Human
uacagcugccugca

SEQ ID NO: 1624198 - RNA, 13 nt, Human
uacaggaaguacu

SEQ ID NO: 1624199 - RNA, 18 nt, Human
uacaggaagguagaaaua

SEQ ID NO: 1624200 - RNA, 20 nt, Human
uacagcuugaccgugaggcc

SEQ ID NO: 1624201 - RNA, 23 nt, Human
uacacugugcugagucugaaggc

SEQ ID NO: 1624202 - RNA, 22 nt, Human
uacacugugcugagucugaagg

SEQ ID NO: 1624203 - RNA, 20 nt, Human
uacacuguuucaaacuuuac

SEQ ID NO: 1624204 - RNA, 16 nt, Human
uacacuuacacuuuau

SEQ ID NO: 1624205 - RNA, 22 nt, Human
uacacuguuucaaacuuuacua

SEQ ID NO: 1624206 - RNA, 18 nt, Human
uacagcuaaucagcauuc

SEQ ID NO: 1624207 - RNA, 16 nt, Human
uacagcuaaucagcau

SEQ ID NO: 1624208 - RNA, 17 nt, Human
uacauaagauaaaugug

SEQ ID NO: 1624209 - RNA, 16 nt, Human
uacauaagauaaaugu

SEQ ID NO: 1624210 - RNA, 16 nt, Human
uacaugaaaacacauu

SEQ ID NO: 1624211 - RNA, 17 nt, Human
uacaugaaaacacauuu

SEQ ID NO: 1624212 - RNA, 18 nt, Human
uacaugaaaacacauuuu

SEQ ID NO: 1624213 - RNA, 19 nt, Human
uacaugaaaacacauuuuu

SEQ ID NO: 1624214 - RNA, 23 nt, Human
uacaugaaaacacauuuuucuua

SEQ ID NO: 1624215 - RNA, 19 nt, Human
uacaguuuguuaguaugag

SEQ ID NO: 1624216 - RNA, 21 nt, Human
uacaguuuguuaguaugaggc

SEQ ID NO: 1624217 - RNA, 16 nt, Human
uacauaaacaaguccu

SEQ ID NO: 1624218 - RNA, 22 nt, Human
uacauggaauaacauguaauua

SEQ ID NO: 1624219 - RNA, 19 nt, Human
uacauggaauaacauguaa

SEQ ID NO: 1624220 - RNA, 18 nt, Human
uacauggaauaacaugua

SEQ ID NO: 1624221 - RNA, 14 nt, Human
uacauggaauaaca

SEQ ID NO: 1624222 - RNA, 19 nt, Human
uacauuuuuaagugcugca

SEQ ID NO: 1624223 - RNA, 22 nt, Human
uacauuuuuaagugcugcauuu

SEQ ID NO: 1624224 - RNA, 14 nt, Human
uacauuuuuaagug

SEQ ID NO: 1624225 - RNA, 21 nt, Human
uacauggcuggagcuagaauu

SEQ ID NO: 1624226 - RNA, 13 nt, Human
uaauuuugugaag

SEQ ID NO: 1624227 - RNA, 17 nt, Human
uaauuuuuauauuugaa

SEQ ID NO: 1624228 - RNA, 16 nt, Human
uaauuuuuauauuuga

SEQ ID NO: 1624229 - RNA, 12 nt, Human
uaauuuuuauau

SEQ ID NO: 1624230 - RNA, 18 nt, Human
uaauuuugugaagcaaaa

SEQ ID NO: 1624231 - RNA, 18 nt, Human
uacaaaguagaagucuua

SEQ ID NO: 1624232 - RNA, 14 nt, Human
uacaaaguagaagu

SEQ ID NO: 1624233 - RNA, 12 nt, Human
uacaaaguauua

SEQ ID NO: 1624234 - RNA, 14 nt, Human
uacaaaguauuaag

SEQ ID NO: 1624235 - RNA, 13 nt, Human
uacaaaguauuaa

SEQ ID NO: 1624236 - RNA, 19 nt, Human
uacaaaguauuaagcauau

SEQ ID NO: 1624237 - RNA, 18 nt, Human
uacaaaguauuaagcaua

SEQ ID NO: 1624238 - RNA, 16 nt, Human
uacaaaguauuaagca

SEQ ID NO: 1624239 - RNA, 15 nt, Human
uacaaaguauuaagc

SEQ ID NO: 1624240 - RNA, 16 nt, Human
uacacacucaaaucaa

SEQ ID NO: 1624241 - RNA, 17 nt, Human
uacacacucaaaucaag

SEQ ID NO: 1624242 - RNA, 15 nt, Human
uacacacugcauguu

SEQ ID NO: 1624243 - RNA, 17 nt, Human
uacacacugcauguuug

SEQ ID NO: 1624244 - RNA, 21 nt, Human
uacacugugcugagucugaag

SEQ ID NO: 1624245 - RNA, 11 nt, Human
uacacacacac

SEQ ID NO: 1624246 - RNA, 17 nt, Human
uacaauuuuguuucugu

SEQ ID NO: 1624247 - RNA, 16 nt, Human
uacaauuuuguuucug

SEQ ID NO: 1624248 - RNA, 15 nt, Human
uacaauuuuguuucu

SEQ ID NO: 1624249 - RNA, 12 nt, Human
uacaauuuuguu

SEQ ID NO: 1624250 - RNA, 18 nt, Human
ugaaggccccgcccaggc

SEQ ID NO: 1624251 - RNA, 16 nt, Human
ugaagcuuuuauguga

SEQ ID NO: 1624252 - RNA, 21 nt, Human
ugaagcuuuuaugugaaacau

SEQ ID NO: 1624253 - RNA, 20 nt, Human
ugaaggccccgcccaggcuu

SEQ ID NO: 1624254 - RNA, 19 nt, Human
ugaaggccccgcccaggcu

SEQ ID NO: 1624255 - RNA, 19 nt, Human
ugaagagguuuuaaagcuu

SEQ ID NO: 1624256 - RNA, 21 nt, Human
ugaagagguuuuaaagcuucc

SEQ ID NO: 1624257 - RNA, 20 nt, Human
ugaagagguuuuaaagcuuc

SEQ ID NO: 1624258 - RNA, 20 nt, Human
ugaagacucauucuucugua

SEQ ID NO: 1624259 - RNA, 19 nt, Human
ugaagacucauucuucugu

SEQ ID NO: 1624260 - RNA, 18 nt, Human
ugaacuugaaauuugaau

SEQ ID NO: 1624261 - RNA, 14 nt, Human
ugaacuugaaauuu

SEQ ID NO: 1624262 - RNA, 13 nt, Human
ugaacuugaaauu

SEQ ID NO: 1624263 - RNA, 13 nt, Human
ugaaacauguuuc

SEQ ID NO: 1624264 - RNA, 16 nt, Human
ugaaacacuuugcaua

SEQ ID NO: 1624265 - RNA, 16 nt, Human
ugaaucuuggugucua

SEQ ID NO: 1624266 - RNA, 20 nt, Human
ugaaugaauggcuaagcaaa

SEQ ID NO: 1624267 - RNA, 15 nt, Human
ugaaugaauggcuaa

SEQ ID NO: 1624268 - RNA, 14 nt, Human
ugaaugcauaaaau

SEQ ID NO: 1624269 - RNA, 21 nt, Human
ugaaggcuggguucugauccu

SEQ ID NO: 1624270 - RNA, 20 nt, Human
ugaaggcuggguucugaucc

SEQ ID NO: 1624271 - RNA, 23 nt, Human
ugacaaggauugcuacuguccua

SEQ ID NO: 1624272 - RNA, 13 nt, Human
ugacagacacagg

SEQ ID NO: 1624273 - RNA, 16 nt, Human
ugacagacacaggccc

SEQ ID NO: 1624274 - RNA, 14 nt, Human
ugacagacacaggc

SEQ ID NO: 1624275 - RNA, 15 nt, Human
ugacacacagcucug

SEQ ID NO: 1624276 - RNA, 14 nt, Human
ugacacacagcucu

SEQ ID NO: 1624277 - RNA, 14 nt, Human
ugaauuacauuugu

SEQ ID NO: 1624278 - RNA, 13 nt, Human
ugaauuguaagga

SEQ ID NO: 1624279 - RNA, 21 nt, Human
ugaauuguaaggaaugauuaa

SEQ ID NO: 1624280 - RNA, 13 nt, Human
ugaauuacauuug

SEQ ID NO: 1624281 - RNA, 14 nt, Human
ugaauuaaguuuuu

SEQ ID NO: 1624282 - RNA, 23 nt, Human
ugacaacacucauugaccugagg

SEQ ID NO: 1624283 - RNA, 15 nt, Human
ugacaacagacuucu

SEQ ID NO: 1624284 - RNA, 19 nt, Human
ugacaacagacuucugaaa

SEQ ID NO: 1624285 - RNA, 18 nt, Human
ugacaacagacuucugaa

SEQ ID NO: 1624286 - RNA, 13 nt, Human
ugacaacacucau

SEQ ID NO: 1624287 - RNA, 16 nt, Human
ugaauuuaaauagcuu

SEQ ID NO: 1624288 - RNA, 20 nt, Human
ugacaaagguaaaucagacu

SEQ ID NO: 1624289 - RNA, 18 nt, Human
ugacagacacaggcccgg

SEQ ID NO: 1624290 - RNA, 17 nt, Human
ugacagacacaggcccg

SEQ ID NO: 1624291 - RNA, 23 nt, Human
ugacaucaacugcaucaagaugu

SEQ ID NO: 1624292 - RNA, 22 nt, Human
ugacagagcaagugagacccug

SEQ ID NO: 1624293 - RNA, 13 nt, Human
ugacagaggcagc

SEQ ID NO: 1624294 - RNA, 15 nt, Human
ugacauauuuuugcu

SEQ ID NO: 1624295 - RNA, 18 nt, Human
ugaccacugcagaagaca

SEQ ID NO: 1624296 - RNA, 13 nt, Human
ugacauguuuuau

SEQ ID NO: 1624297 - RNA, 17 nt, Human
ugaccacugcagaagac

SEQ ID NO: 1624298 - RNA, 16 nt, Human
ugaccacugcagaaga

SEQ ID NO: 1624299 - RNA, 23 nt, Human
ugaccagccuccaugcugccucc

SEQ ID NO: 1624300 - RNA, 22 nt, Human
ugaccagccuccaugcugccuc

SEQ ID NO: 1624301 - RNA, 21 nt, Human
ugaccagccuccaugcugccu

SEQ ID NO: 1624302 - RNA, 19 nt, Human
ugacauguguuggcagccu

SEQ ID NO: 1624303 - RNA, 15 nt, Human
ugagcaggauuuuaa

SEQ ID NO: 1624304 - RNA, 20 nt, Human
ugagcaggauuuuaaucuuu

SEQ ID NO: 1624305 - RNA, 14 nt, Human
ugagaggggaacag

SEQ ID NO: 1624306 - RNA, 18 nt, Human
ugagaggggaacagacug

SEQ ID NO: 1624307 - RNA, 19 nt, Human
ugagaggggaacagacugg

SEQ ID NO: 1624308 - RNA, 14 nt, Human
ugagaccaaccugg

SEQ ID NO: 1624309 - RNA, 12 nt, Human
ugagaccugccc

SEQ ID NO: 1624310 - RNA, 22 nt, Human
ugagaccugccccuccucucug

SEQ ID NO: 1624311 - RNA, 15 nt, Human
ugagaccugccccuc

SEQ ID NO: 1624312 - RNA, 14 nt, Human
ugagaccugccccu

SEQ ID NO: 1624313 - RNA, 13 nt, Human
ugagaccugcccc

SEQ ID NO: 1624314 - RNA, 15 nt, Human
ugagaaagacuauuc

SEQ ID NO: 1624315 - RNA, 15 nt, Human
ugagaaauaaaguuu

SEQ ID NO: 1624316 - RNA, 22 nt, Human
ugacuuuucuguccgagcuuug

SEQ ID NO: 1624317 - RNA, 16 nt, Human
ugacucuuaagaagac

SEQ ID NO: 1624318 - RNA, 15 nt, Human
ugacucuuaagaaga

SEQ ID NO: 1624319 - RNA, 14 nt, Human
ugacucuuaagaag

SEQ ID NO: 1624320 - RNA, 13 nt, Human
ugaccauucucca

SEQ ID NO: 1624321 - RNA, 14 nt, Human
ugaccauucuccac

SEQ ID NO: 1624322 - RNA, 21 nt, Human
ugacucuuucuauuguuucuu

SEQ ID NO: 1624323 - RNA, 16 nt, Human
ugacuuuccucuuugg

SEQ ID NO: 1624324 - RNA, 22 nt, Human
ugacuuuggauaauaaggaaaa

SEQ ID NO: 1624325 - RNA, 20 nt, Human
ugacuuuggauaauaaggaa

SEQ ID NO: 1624326 - RNA, 16 nt, Human
ugacuuuggauaauaa

SEQ ID NO: 1624327 - RNA, 15 nt, Human
ugacuuuggauaaua

SEQ ID NO: 1624328 - RNA, 14 nt, Human
ugacuuuggauaau

SEQ ID NO: 1624329 - RNA, 13 nt, Human
ugacuuuggauaa

SEQ ID NO: 1624330 - RNA, 12 nt, Human
ugacuuuggaua

SEQ ID NO: 1624331 - RNA, 19 nt, Human
ugagcucaggaguuugaga

SEQ ID NO: 1624332 - RNA, 11 nt, Human
ugagcucagga

SEQ ID NO: 1624333 - RNA, 12 nt, Human
ugagcucagccc

SEQ ID NO: 1624334 - RNA, 11 nt, Human
ugagcucagcc

SEQ ID NO: 1624335 - RNA, 20 nt, Human
ugagcucagcccuggugggc

SEQ ID NO: 1624336 - RNA, 22 nt, Human
ugagccgagaucacgccacugc

SEQ ID NO: 1624337 - RNA, 23 nt, Human
ugagcagggcucagcggggacag

SEQ ID NO: 1624338 - RNA, 22 nt, Human
ugagcagggcucagcggggaca

SEQ ID NO: 1624339 - RNA, 20 nt, Human
ugagcagggcucagcgggga

SEQ ID NO: 1624340 - RNA, 23 nt, Human
ugagccgagaucacgccacugca

SEQ ID NO: 1624341 - RNA, 22 nt, Human
ugaggaugaaaaaauaacacug

SEQ ID NO: 1624342 - RNA, 19 nt, Human
ugaggaucagaguaaucca

SEQ ID NO: 1624343 - RNA, 17 nt, Human
ugaggaucagaguaauc

SEQ ID NO: 1624344 - RNA, 13 nt, Human
ugaggaucagagu

SEQ ID NO: 1624345 - RNA, 23 nt, Human
ugagcuuaagaauuuugagcagg

SEQ ID NO: 1624346 - RNA, 19 nt, Human
ugaggucagagccugcagu

SEQ ID NO: 1624347 - RNA, 18 nt, Human
ugaggucagagccugcag

SEQ ID NO: 1624348 - RNA, 21 nt, Human
ugaggcugggcucccuuccca

SEQ ID NO: 1624349 - RNA, 15 nt, Human
ugaggugcuauguuc

SEQ ID NO: 1624350 - RNA, 21 nt, Human
ugagucccaggcugagccuca

SEQ ID NO: 1624351 - RNA, 20 nt, Human
ugagucccaggcugagccuc

SEQ ID NO: 1624352 - RNA, 16 nt, Human
ugaggcugggcucccu

SEQ ID NO: 1624353 - RNA, 15 nt, Human
ugaggcugggcuccc

SEQ ID NO: 1624354 - RNA, 18 nt, Human
ugaggcucugcccuuggu

SEQ ID NO: 1624355 - RNA, 16 nt, Human
ugaggcucugcccuug

SEQ ID NO: 1624356 - RNA, 23 nt, Human
ucuugcauggcaaggacugcagg

SEQ ID NO: 1624357 - RNA, 19 nt, Human
ucuugccaaauauaaauaa

SEQ ID NO: 1624358 - RNA, 14 nt, Human
ucuugcucugcuga

SEQ ID NO: 1624359 - RNA, 17 nt, Human
ucuugccacugccucuu

SEQ ID NO: 1624360 - RNA, 16 nt, Human
ucuugccacugccucu

SEQ ID NO: 1624361 - RNA, 23 nt, Human
ucuugcucugcugacagacacag

SEQ ID NO: 1624362 - RNA, 15 nt, Human
ucuugcucugcugac

SEQ ID NO: 1624363 - RNA, 16 nt, Human
ucuucuuggucucagu

SEQ ID NO: 1624364 - RNA, 20 nt, Human
ucuugaaauauaggaacuua

SEQ ID NO: 1624365 - RNA, 21 nt, Human
ucuugaaauauaggaacuuaa

SEQ ID NO: 1624366 - RNA, 22 nt, Human
ucuugaagacuuuucuuucagc

SEQ ID NO: 1624367 - RNA, 13 nt, Human
ucuugaagacuuu

SEQ ID NO: 1624368 - RNA, 13 nt, Human
ucuuauaauuuaa

SEQ ID NO: 1624369 - RNA, 14 nt, Human
ucuuauaauuuaaa

SEQ ID NO: 1624370 - RNA, 23 nt, Human
ucuuagguuggcaaaaaggcagg

SEQ ID NO: 1624371 - RNA, 20 nt, Human
ucuuagguuggcaaaaaggc

SEQ ID NO: 1624372 - RNA, 22 nt, Human
ucuuaggguuaugauuaaguaa

SEQ ID NO: 1624373 - RNA, 15 nt, Human
ucuuagauguauaua

SEQ ID NO: 1624374 - RNA, 20 nt, Human
ucugugucagguggggcagc

SEQ ID NO: 1624375 - RNA, 17 nt, Human
ucugugucagguggggc

SEQ ID NO: 1624376 - RNA, 22 nt, Human
ucugugucagguggggcagcuu

SEQ ID NO: 1624377 - RNA, 22 nt, Human
ucuuauccaacaucaacaucuu

SEQ ID NO: 1624378 - RNA, 14 nt, Human
ucuuauacauuuga

SEQ ID NO: 1624379 - RNA, 21 nt, Human
ucuucagagacuccugcaggc

SEQ ID NO: 1624380 - RNA, 14 nt, Human
ucuucagaucucua

SEQ ID NO: 1624381 - RNA, 15 nt, Human
ucuucagaucucuaa

SEQ ID NO: 1624382 - RNA, 20 nt, Human
ucuucaguuaagccuuugga

SEQ ID NO: 1624383 - RNA, 19 nt, Human
ucuucaguuaagccuuugg

SEQ ID NO: 1624384 - RNA, 22 nt, Human
ucuucaguuaagccuuuggaaa

SEQ ID NO: 1624385 - RNA, 15 nt, Human
ugaaacacuuugcau

SEQ ID NO: 1624386 - RNA, 12 nt, Human
ugaaaauuuuga

SEQ ID NO: 1624387 - RNA, 14 nt, Human
ugaaaauucagugg

SEQ ID NO: 1624388 - RNA, 20 nt, Human
ugaaaauuaggauuucauga

SEQ ID NO: 1624389 - RNA, 22 nt, Human
ugaaaagaaaaaugagccuggc

SEQ ID NO: 1624390 - RNA, 20 nt, Human
ugaaaagaaaaaugagccug

SEQ ID NO: 1624391 - RNA, 19 nt, Human
ugaaaagaaaaaugagccu

SEQ ID NO: 1624392 - RNA, 18 nt, Human
ugaaaaccacauuggaga

SEQ ID NO: 1624393 - RNA, 23 nt, Human
ugaaaacacuguucucugcccuc

SEQ ID NO: 1624394 - RNA, 22 nt, Human
ugaaaacacuguucucugcccu

SEQ ID NO: 1624395 - RNA, 21 nt, Human
ugaaaacacuguucucugccc

SEQ ID NO: 1624396 - RNA, 20 nt, Human
ugaaaacacuguucucugcc

SEQ ID NO: 1624397 - RNA, 17 nt, Human
ugaaaacacuguucucu

SEQ ID NO: 1624398 - RNA, 21 nt, Human
ugaaaacacauuuuucuuagg

SEQ ID NO: 1624399 - RNA, 17 nt, Human
ucuuuccacagaagcuc

SEQ ID NO: 1624400 - RNA, 12 nt, Human
ucuuucccuccc

SEQ ID NO: 1624401 - RNA, 23 nt, Human
ucuuucccucccuuccucuuucc

SEQ ID NO: 1624402 - RNA, 13 nt, Human
ucuuucccucccu

SEQ ID NO: 1624403 - RNA, 13 nt, Human
ucuuguguguuua

SEQ ID NO: 1624404 - RNA, 23 nt, Human
ucuuuccaaaguacacuguuuca

SEQ ID NO: 1624405 - RNA, 12 nt, Human
ucuugucucaga

SEQ ID NO: 1624406 - RNA, 15 nt, Human
ucuugucucagauuu

SEQ ID NO: 1624407 - RNA, 14 nt, Human
ucuugucucagauu

SEQ ID NO: 1624408 - RNA, 17 nt, Human
ucuugucucagauuuua

SEQ ID NO: 1624409 - RNA, 13 nt, Human
ucuuuggacccug

SEQ ID NO: 1624410 - RNA, 15 nt, Human
ucuuuggacccugag

SEQ ID NO: 1624411 - RNA, 14 nt, Human
ucuuuggacccuga

SEQ ID NO: 1624412 - RNA, 16 nt, Human
ucuuuggacccugagg

SEQ ID NO: 1624413 - RNA, 13 nt, Human
ucuuugcagacag

SEQ ID NO: 1624414 - RNA, 23 nt, Human
ucuuugagugaagcugggagaac

SEQ ID NO: 1624415 - RNA, 17 nt, Human
ucuuugcagacaggcaa

SEQ ID NO: 1624416 - RNA, 14 nt, Human
ucuuugcagacagg

SEQ ID NO: 1624417 - RNA, 23 nt, Human
ucugacccaugcugcccugugag

SEQ ID NO: 1624418 - RNA, 22 nt, Human
ucugacccaugcugcccuguga

SEQ ID NO: 1624419 - RNA, 20 nt, Human
ucugacccaugcugcccugu

SEQ ID NO: 1624420 - RNA, 24 nt, Human
ucugagaucaaaacgguuuuacug

SEQ ID NO: 1624421 - RNA, 18 nt, Human
ucugagaggacuuuucuu

SEQ ID NO: 1624422 - RNA, 21 nt, Human
ucugaggaauccagacccggc

SEQ ID NO: 1624423 - RNA, 18 nt, Human
ucugaggaauccagaccc

SEQ ID NO: 1624424 - RNA, 22 nt, Human
ucugaggaauccagacccggcu

SEQ ID NO: 1624425 - RNA, 23 nt, Human
ucugaggaauccagacccggcug

SEQ ID NO: 1624426 - RNA, 13 nt, Human
ucugcacuccccu

SEQ ID NO: 1624427 - RNA, 20 nt, Human
ucugccugaagucacacagu

SEQ ID NO: 1624428 - RNA, 19 nt, Human
ucugccugaagucacacag

SEQ ID NO: 1624429 - RNA, 22 nt, Human
ucugccucugacacacagcucu

SEQ ID NO: 1624430 - RNA, 21 nt, Human
ucugccucugacacacagcuc

SEQ ID NO: 1624431 - RNA, 23 nt, Human
ucugccucugacacacagcucug

SEQ ID NO: 1624432 - RNA, 21 nt, Human
ucugccucccaucacccgcua

SEQ ID NO: 1624433 - RNA, 20 nt, Human
ucugccucccaucacccgcu

SEQ ID NO: 1624434 - RNA, 17 nt, Human
ucugccucccaucaccc

SEQ ID NO: 1624435 - RNA, 16 nt, Human
ucugccucccaucacc

SEQ ID NO: 1624436 - RNA, 18 nt, Human
ucugccucugacacacag

SEQ ID NO: 1624437 - RNA, 15 nt, Human
ucugccucugacaca

SEQ ID NO: 1624438 - RNA, 15 nt, Human
ucugccuccucuuca

SEQ ID NO: 1624439 - RNA, 14 nt, Human
ucugcccacucccu

SEQ ID NO: 1624440 - RNA, 13 nt, Human
ucugcccacuccc

SEQ ID NO: 1624441 - RNA, 16 nt, Human
ucugcccacucccugc

SEQ ID NO: 1624442 - RNA, 21 nt, Human
ucugccuaaggacuucuuuaa

SEQ ID NO: 1624443 - RNA, 20 nt, Human
ucugccuaaggacuucuuua

SEQ ID NO: 1624444 - RNA, 15 nt, Human
ucugccucccaucac

SEQ ID NO: 1624445 - RNA, 13 nt, Human
ucugccucccauc

SEQ ID NO: 1624446 - RNA, 12 nt, Human
ucugccucccau

SEQ ID NO: 1624447 - RNA, 23 nt, Human
ucugccuaaggacuucuuuaauu

SEQ ID NO: 1624448 - RNA, 23 nt, Human
ucugccauauucuguuggccagu

SEQ ID NO: 1624449 - RNA, 22 nt, Human
ucugccauauucuguuggccag

SEQ ID NO: 1624450 - RNA, 12 nt, Human
ucugcccacucc

SEQ ID NO: 1624451 - RNA, 14 nt, Human
ucugucucagucca

SEQ ID NO: 1624452 - RNA, 21 nt, Human
ucuguccugggagugagcugg

SEQ ID NO: 1624453 - RNA, 13 nt, Human
ucugucuaggaau

SEQ ID NO: 1624454 - RNA, 17 nt, Human
ucugucgcccagucugg

SEQ ID NO: 1624455 - RNA, 12 nt, Human
ucuguccuggga

SEQ ID NO: 1624456 - RNA, 15 nt, Human
ucuguacagagccca

SEQ ID NO: 1624457 - RNA, 23 nt, Human
ucuguacagagcccacgccccca

SEQ ID NO: 1624458 - RNA, 14 nt, Human
ucuguacagagccc

SEQ ID NO: 1624459 - RNA, 16 nt, Human
ucuggugacuuuccuc

SEQ ID NO: 1624460 - RNA, 22 nt, Human
ucuggagcccacuguacuugcu

SEQ ID NO: 1624461 - RNA, 16 nt, Human
ucuggagcccacugua

SEQ ID NO: 1624462 - RNA, 12 nt, Human
ucuggagcccac

SEQ ID NO: 1624463 - RNA, 20 nt, Human
ucugccugcccaggccccug

SEQ ID NO: 1624464 - RNA, 18 nt, Human
ucugccugcccaggcccc

SEQ ID NO: 1624465 - RNA, 17 nt, Human
ucugccugcccaggccc

SEQ ID NO: 1624466 - RNA, 13 nt, Human
ucugccugcccag

SEQ ID NO: 1624467 - RNA, 13 nt, Human
ucugcugcuggcu

SEQ ID NO: 1624468 - RNA, 11 nt, Human
ucugcugcugg

SEQ ID NO: 1624469 - RNA, 17 nt, Human
ucugcugacagacacag

SEQ ID NO: 1624470 - RNA, 13 nt, Human
ucugcugaaggaa

SEQ ID NO: 1624471 - RNA, 15 nt, Human
ucugcugcuggcugg

SEQ ID NO: 1624472 - RNA, 14 nt, Human
ucugcugcuggcug

SEQ ID NO: 1624473 - RNA, 17 nt, Human
ucugcugcuggcugguu

SEQ ID NO: 1624474 - RNA, 14 nt, Human
ucuggaauuugaaa

SEQ ID NO: 1624475 - RNA, 18 nt, Human
ucuggacuccucugucca

SEQ ID NO: 1624476 - RNA, 16 nt, Human
ucuggacuccucuguc

SEQ ID NO: 1624477 - RNA, 15 nt, Human
ucuggacuccucugu

SEQ ID NO: 1624478 - RNA, 22 nt, Human
ucuggacuccucuguccaggca

SEQ ID NO: 1624479 - RNA, 16 nt, Human
ucagcugcugaaacaa

SEQ ID NO: 1624480 - RNA, 15 nt, Human
ucagcugcuacuacu

SEQ ID NO: 1624481 - RNA, 22 nt, Human
ucagcuccccucggagaagagc

SEQ ID NO: 1624482 - RNA, 22 nt, Human
ucagcuccagcucaccagcccc

SEQ ID NO: 1624483 - RNA, 21 nt, Human
ucagcuccagcucaccagccc

SEQ ID NO: 1624484 - RNA, 18 nt, Human
ucagcuccagcucaccag

SEQ ID NO: 1624485 - RNA, 16 nt, Human
ucagccugcuccagcu

SEQ ID NO: 1624486 - RNA, 20 nt, Human
ucagccucccgaauagcugg

SEQ ID NO: 1624487 - RNA, 12 nt, Human
ucagccucccga

SEQ ID NO: 1624488 - RNA, 22 nt, Human
ucagccucccaaagugcuggga

SEQ ID NO: 1624489 - RNA, 18 nt, Human
ucagcauccuggcacccg

SEQ ID NO: 1624490 - RNA, 17 nt, Human
ucagcauccuggcaccc

SEQ ID NO: 1624491 - RNA, 16 nt, Human
ucagcauccuggcacc

SEQ ID NO: 1624492 - RNA, 15 nt, Human
ucagcauccuggcac

SEQ ID NO: 1624493 - RNA, 13 nt, Human
ucagccucccaaa

SEQ ID NO: 1624494 - RNA, 12 nt, Human
ucagccucccaa

SEQ ID NO: 1624495 - RNA, 15 nt, Human
ucagcacgauuucug

SEQ ID NO: 1624496 - RNA, 16 nt, Human
ucagcacgauuucugu

SEQ ID NO: 1624497 - RNA, 17 nt, Human
ucagcacgauuucuguu

SEQ ID NO: 1624498 - RNA, 18 nt, Human
ucagcacgauuucuguuu

SEQ ID NO: 1624499 - RNA, 15 nt, Human
ucagaucucuaacuu

SEQ ID NO: 1624500 - RNA, 18 nt, Human
ucagauaugauucaaaug

SEQ ID NO: 1624501 - RNA, 16 nt, Human
ucagauaugauucaaa

SEQ ID NO: 1624502 - RNA, 17 nt, Human
ucagauaugauucaaau

SEQ ID NO: 1624503 - RNA, 20 nt, Human
ucagauacuggauuguacuu

SEQ ID NO: 1624504 - RNA, 19 nt, Human
ucagauacuggauuguacu

SEQ ID NO: 1624505 - RNA, 16 nt, Human
ucagauacuggauugu

SEQ ID NO: 1624506 - RNA, 15 nt, Human
ucagauacuggauug

SEQ ID NO: 1624507 - RNA, 14 nt, Human
ucagauacuggauu

SEQ ID NO: 1624508 - RNA, 18 nt, Human
ucagugugacugaucucu

SEQ ID NO: 1624509 - RNA, 19 nt, Human
ucagucugauucccaagcu

SEQ ID NO: 1624510 - RNA, 17 nt, Human
ucagucugauucccaag

SEQ ID NO: 1624511 - RNA, 17 nt, Human
ucaguuaagccuuugga

SEQ ID NO: 1624512 - RNA, 16 nt, Human
ucaguuaagccuuugg

SEQ ID NO: 1624513 - RNA, 18 nt, Human
ucaguccaugaagaugua

SEQ ID NO: 1624514 - RNA, 15 nt, Human
ucaguccauagcaga

SEQ ID NO: 1624515 - RNA, 18 nt, Human
ucaguccccgugaaggag

SEQ ID NO: 1624516 - RNA, 20 nt, Human
ucagguggggucacucuggc

SEQ ID NO: 1624517 - RNA, 17 nt, Human
ucagguggggucacucu

SEQ ID NO: 1624518 - RNA, 21 nt, Human
ucagguggggucacucuggca

SEQ ID NO: 1624519 - RNA, 17 nt, Human
ucagguggggcagcuug

SEQ ID NO: 1624520 - RNA, 21 nt, Human
ucagguggggcagcuugaggg

SEQ ID NO: 1624521 - RNA, 16 nt, Human
ucagguggggcagcuu

SEQ ID NO: 1624522 - RNA, 15 nt, Human
ucagguggggcagcu

SEQ ID NO: 1624523 - RNA, 20 nt, Human
ucaggugcugccauccaggu

SEQ ID NO: 1624524 - RNA, 18 nt, Human
ucaggugcugccauccag

SEQ ID NO: 1624525 - RNA, 14 nt, Human
ucagguggggcagc

SEQ ID NO: 1624526 - RNA, 19 nt, Human
ucauggaauuggagcucgu

SEQ ID NO: 1624527 - RNA, 13 nt, Human
ucaugaaagauuc

SEQ ID NO: 1624528 - RNA, 21 nt, Human
ucauggaauuggagcucgugg

SEQ ID NO: 1624529 - RNA, 15 nt, Human
ucaugaaagauucaa

SEQ ID NO: 1624530 - RNA, 24 nt, Human
ucauggacuucugccagcauaaua

SEQ ID NO: 1624531 - RNA, 14 nt, Human
ucaucauccuaagc

SEQ ID NO: 1624532 - RNA, 12 nt, Human
uccauacauuug

SEQ ID NO: 1624533 - RNA, 17 nt, Human
uccauagagagcaagac

SEQ ID NO: 1624534 - RNA, 23 nt, Human
uccauaaucuggacuccucuguc

SEQ ID NO: 1624535 - RNA, 20 nt, Human
uccauagagagcaagacgcu

SEQ ID NO: 1624536 - RNA, 21 nt, Human
ucccaacucaccccagcccca

SEQ ID NO: 1624537 - RNA, 19 nt, Human
ucccaacucaccccagccc

SEQ ID NO: 1624538 - RNA, 14 nt, Human
ucccaacuuguaaa

SEQ ID NO: 1624539 - RNA, 18 nt, Human
ucccaacucaccccagcc

SEQ ID NO: 1624540 - RNA, 17 nt, Human
ucccaacucaccccagc

SEQ ID NO: 1624541 - RNA, 16 nt, Human
uccaugucgccucugc

SEQ ID NO: 1624542 - RNA, 19 nt, Human
uccaugucgccucugcauu

SEQ ID NO: 1624543 - RNA, 18 nt, Human
uccaugucgccucugcau

SEQ ID NO: 1624544 - RNA, 17 nt, Human
uccaugucgccucugca

SEQ ID NO: 1624545 - RNA, 14 nt, Human
ucccacucagucca

SEQ ID NO: 1624546 - RNA, 21 nt, Human
ucccaccuuggcugcagggag

SEQ ID NO: 1624547 - RNA, 19 nt, Human
ucccaccuuggcugcaggg

SEQ ID NO: 1624548 - RNA, 20 nt, Human
ucccaccucucucacuccuu

SEQ ID NO: 1624549 - RNA, 18 nt, Human
ucccaccucagccucccg

SEQ ID NO: 1624550 - RNA, 16 nt, Human
ucccaccucagccucc

SEQ ID NO: 1624551 - RNA, 18 nt, Human
ucccaccucucucacucc

SEQ ID NO: 1624552 - RNA, 17 nt, Human
ucccaccucucucacuc

SEQ ID NO: 1624553 - RNA, 14 nt, Human
ucccaccucucuca

SEQ ID NO: 1624554 - RNA, 16 nt, Human
ucccaugagccucagc

SEQ ID NO: 1624555 - RNA, 15 nt, Human
ucccaugagccucag

SEQ ID NO: 1624556 - RNA, 19 nt, Human
ucccaggcauuccccagga

SEQ ID NO: 1624557 - RNA, 19 nt, Human
ucccaggcugagccucagu

SEQ ID NO: 1624558 - RNA, 18 nt, Human
ucccaggcauuccccagg

SEQ ID NO: 1624559 - RNA, 17 nt, Human
ucccaggcauuccccag

SEQ ID NO: 1624560 - RNA, 18 nt, Human
uccagcaauucuccugcc

SEQ ID NO: 1624561 - RNA, 21 nt, Human
uccagcaauucuccugccuca

SEQ ID NO: 1624562 - RNA, 20 nt, Human
uccagcaauucuccugccuc

SEQ ID NO: 1624563 - RNA, 19 nt, Human
uccagcaauucuccugccu

SEQ ID NO: 1624564 - RNA, 22 nt, Human
uccagauuuuuuacagcugccu

SEQ ID NO: 1624565 - RNA, 19 nt, Human
uccagcuggguuggaaaac

SEQ ID NO: 1624566 - RNA, 22 nt, Human
uccagcuggccgggagccugau

SEQ ID NO: 1624567 - RNA, 21 nt, Human
uccagcuggccgggagccuga

SEQ ID NO: 1624568 - RNA, 15 nt, Human
uccagcuggccggga

SEQ ID NO: 1624569 - RNA, 14 nt, Human
uccacccugcucuc

SEQ ID NO: 1624570 - RNA, 21 nt, Human
uccacccugcucuccgaccag

SEQ ID NO: 1624571 - RNA, 22 nt, Human
uccacugugccaugugccaggu

SEQ ID NO: 1624572 - RNA, 15 nt, Human
uccacuuuaucuuga

SEQ ID NO: 1624573 - RNA, 23 nt, Human
uccacuuagaaauugcauuuccu

SEQ ID NO: 1624574 - RNA, 21 nt, Human
uccacuuagaaauugcauuuc

SEQ ID NO: 1624575 - RNA, 14 nt, Human
uccacuuucuagcc

SEQ ID NO: 1624576 - RNA, 17 nt, Human
uccacuuuaucuugaau

SEQ ID NO: 1624577 - RNA, 19 nt, Human
uccacuuucuagccagagg

SEQ ID NO: 1624578 - RNA, 19 nt, Human
uccagagaguggcuccucc

SEQ ID NO: 1624579 - RNA, 22 nt, Human
uccagagaguggcuccucccgg

SEQ ID NO: 1624580 - RNA, 20 nt, Human
uccacaagagcccaggccuc

SEQ ID NO: 1624581 - RNA, 21 nt, Human
uccacaagagcccaggccucc

SEQ ID NO: 1624582 - RNA, 16 nt, Human
uccaagaagcccagga

SEQ ID NO: 1624583 - RNA, 15 nt, Human
uccaagaagcccagg

SEQ ID NO: 1624584 - RNA, 14 nt, Human
uccaagaagcccag

SEQ ID NO: 1624585 - RNA, 20 nt, Human
uccaagaccuucuccuucac

SEQ ID NO: 1624586 - RNA, 19 nt, Human
uccaagaagcccaggaaag

SEQ ID NO: 1624587 - RNA, 22 nt, Human
uccaagcaggacauggacaagg

SEQ ID NO: 1624588 - RNA, 14 nt, Human
uccaagcaggacau

SEQ ID NO: 1624589 - RNA, 17 nt, Human
uccaagcaaaugugaau

SEQ ID NO: 1624590 - RNA, 15 nt, Human
uccaagcaaauguga

SEQ ID NO: 1624591 - RNA, 13 nt, Human
ucucagauuuuau

SEQ ID NO: 1624592 - RNA, 15 nt, Human
ucucagauuuuauua

SEQ ID NO: 1624593 - RNA, 14 nt, Human
ucucagauuuuauu

SEQ ID NO: 1624594 - RNA, 19 nt, Human
ucucagauuuuauuaugua

SEQ ID NO: 1624595 - RNA, 18 nt, Human
ucucagauuuuauuaugu

SEQ ID NO: 1624596 - RNA, 17 nt, Human
ucucagauuuuauuaug

SEQ ID NO: 1624597 - RNA, 16 nt, Human
ucucagauuuuauuau

SEQ ID NO: 1624598 - RNA, 15 nt, Human
ucucacuguugccca

SEQ ID NO: 1624599 - RNA, 14 nt, Human
ucucacuguugccc

SEQ ID NO: 1624600 - RNA, 17 nt, Human
ucucacuguugcccagg

SEQ ID NO: 1624601 - RNA, 13 nt, Human
ucucaaauuucua

SEQ ID NO: 1624602 - RNA, 22 nt, Human
ucuaucuuugagcgcccacuag

SEQ ID NO: 1624603 - RNA, 14 nt, Human
ucucaaauuucuaa

SEQ ID NO: 1624604 - RNA, 16 nt, Human
ucucaaauuucuaaau

SEQ ID NO: 1624605 - RNA, 19 nt, Human
ucuauauuuucauucuccu

SEQ ID NO: 1624606 - RNA, 16 nt, Human
ucuauauuuucauucu

SEQ ID NO: 1624607 - RNA, 15 nt, Human
ucuauauuuucauuc

SEQ ID NO: 1624608 - RNA, 23 nt, Human
ucucacucugucgcccagucugg

SEQ ID NO: 1624609 - RNA, 21 nt, Human
ucucacacaugagcaucaggc

SEQ ID NO: 1624610 - RNA, 20 nt, Human
ucucacugccaugccagcuu

SEQ ID NO: 1624611 - RNA, 23 nt, Human
ucucacacaugagcaucaggcca

SEQ ID NO: 1624612 - RNA, 16 nt, Human
ucucacacaugagcau

SEQ ID NO: 1624613 - RNA, 18 nt, Human
ucucaaauuucuaaaucu

SEQ ID NO: 1624614 - RNA, 19 nt, Human
ucuacuaaaaauacaaaaa

SEQ ID NO: 1624615 - RNA, 15 nt, Human
ucuacuaaaaauaca

SEQ ID NO: 1624616 - RNA, 14 nt, Human
ucuacuauuuaugu

SEQ ID NO: 1624617 - RNA, 12 nt, Human
ucuacuaaaaau

SEQ ID NO: 1624618 - RNA, 21 nt, Human
ucuacucgaguuacagacaaa

SEQ ID NO: 1624619 - RNA, 20 nt, Human
ucuacucgaguuacagacaa

SEQ ID NO: 1624620 - RNA, 18 nt, Human
ucuacucuagggaaaaac

SEQ ID NO: 1624621 - RNA, 19 nt, Human
ucuagggaaaaaccagcgu

SEQ ID NO: 1624622 - RNA, 12 nt, Human
ucuagggaaaaa

SEQ ID NO: 1624623 - RNA, 15 nt, Human
ucuagguaaauuaca

SEQ ID NO: 1624624 - RNA, 13 nt, Human
ucuauauuuuaca

SEQ ID NO: 1624625 - RNA, 14 nt, Human
ucuauauuuucauu

SEQ ID NO: 1624626 - RNA, 13 nt, Human
ucuauauuuucau

SEQ ID NO: 1624627 - RNA, 17 nt, Human
uccuugcaucaauuuuu

SEQ ID NO: 1624628 - RNA, 21 nt, Human
uccuuggugucgggcaugaca

SEQ ID NO: 1624629 - RNA, 18 nt, Human
uccuuggugucgggcaug

SEQ ID NO: 1624630 - RNA, 22 nt, Human
uccuuugugaggaagccgcugg

SEQ ID NO: 1624631 - RNA, 18 nt, Human
uccuuugugaggaagccg

SEQ ID NO: 1624632 - RNA, 17 nt, Human
uccuuugugaggaagcc

SEQ ID NO: 1624633 - RNA, 22 nt, Human
uccuuggugucgggcaugacac

SEQ ID NO: 1624634 - RNA, 21 nt, Human
uccuuaccagcagagcaccuu

SEQ ID NO: 1624635 - RNA, 23 nt, Human
uccuugaaaacacuguucucugc

SEQ ID NO: 1624636 - RNA, 22 nt, Human
uccuugaaaacacuguucucug

SEQ ID NO: 1624637 - RNA, 17 nt, Human
uccuuaucaaaggacac

SEQ ID NO: 1624638 - RNA, 15 nt, Human
uccuuaucaaaggac

SEQ ID NO: 1624639 - RNA, 14 nt, Human
uccuuaucaaagga

SEQ ID NO: 1624640 - RNA, 17 nt, Human
ucggccuccauccugag

SEQ ID NO: 1624641 - RNA, 16 nt, Human
ucggccuccauccuga

SEQ ID NO: 1624642 - RNA, 15 nt, Human
ucggccuccauccug

SEQ ID NO: 1624643 - RNA, 15 nt, Human
ucggaaaacaugcua

SEQ ID NO: 1624644 - RNA, 18 nt, Human
ucggaaaacaugcuacac

SEQ ID NO: 1624645 - RNA, 23 nt, Human
ucgcccagucuggaaugcagugg

SEQ ID NO: 1624646 - RNA, 19 nt, Human
ucgcccagucuggaaugca

SEQ ID NO: 1624647 - RNA, 14 nt, Human
ucgcccagucugga

SEQ ID NO: 1624648 - RNA, 22 nt, Human
uccuuuucgcaggauucuuccu

SEQ ID NO: 1624649 - RNA, 23 nt, Human
ucgcaggauucuuccucccuccc

SEQ ID NO: 1624650 - RNA, 21 nt, Human
ucgcaggauucuuccucccuc

SEQ ID NO: 1624651 - RNA, 17 nt, Human
ucgcaggauucuuccuc

SEQ ID NO: 1624652 - RNA, 20 nt, Human
uccucaaaacuucagacaua

SEQ ID NO: 1624653 - RNA, 13 nt, Human
uccuccaggugca

SEQ ID NO: 1624654 - RNA, 12 nt, Human
uccuccaggugc

SEQ ID NO: 1624655 - RNA, 22 nt, Human
uccuccaggugcacaagcucca

SEQ ID NO: 1624656 - RNA, 20 nt, Human
uccuccaggugcacaagcuc

SEQ ID NO: 1624657 - RNA, 18 nt, Human
uccuccaggugcacaagc

SEQ ID NO: 1624658 - RNA, 14 nt, Human
uccuccaggugcac

SEQ ID NO: 1624659 - RNA, 12 nt, Human
uccuccucagau

SEQ ID NO: 1624660 - RNA, 17 nt, Human
uccuaguuccaccauca

SEQ ID NO: 1624661 - RNA, 14 nt, Human
uccuaguuccacca

SEQ ID NO: 1624662 - RNA, 18 nt, Human
uccuaagcuauucaguaa

SEQ ID NO: 1624663 - RNA, 16 nt, Human
uccuaagcuauucagu

SEQ ID NO: 1624664 - RNA, 21 nt, Human
uccuaguuccaccaucaagcc

SEQ ID NO: 1624665 - RNA, 22 nt, Human
uccuaguuccaccaucaagcca

SEQ ID NO: 1624666 - RNA, 17 nt, Human
uccugaggcuccacuug

SEQ ID NO: 1624667 - RNA, 16 nt, Human
uccugaggcuccacuu

SEQ ID NO: 1624668 - RNA, 12 nt, Human
uccugaggcugg

SEQ ID NO: 1624669 - RNA, 19 nt, Human
uccugaggcugggcucccu

SEQ ID NO: 1624670 - RNA, 17 nt, Human
uccugaggcugggcucc

SEQ ID NO: 1624671 - RNA, 16 nt, Human
uccugaggcugggcuc

SEQ ID NO: 1624672 - RNA, 15 nt, Human
uccugaggcugggcu

SEQ ID NO: 1624673 - RNA, 15 nt, Human
uccugaggcuccacu

SEQ ID NO: 1624674 - RNA, 21 nt, Human
uccugagccagauuucacucu

SEQ ID NO: 1624675 - RNA, 22 nt, Human
uccucuguccaggcacugcugc

SEQ ID NO: 1624676 - RNA, 19 nt, Human
uccugagccagauuucacu

SEQ ID NO: 1624677 - RNA, 18 nt, Human
uccugagccagauuucac

SEQ ID NO: 1624678 - RNA, 23 nt, Human
uccucuguacagagcccacgccc

SEQ ID NO: 1624679 - RNA, 17 nt, Human
uccugagccagauuuca

SEQ ID NO: 1624680 - RNA, 17 nt, Human
uccucuguccaggcacu

SEQ ID NO: 1624681 - RNA, 19 nt, Human
uccucugcuugccaucccu

SEQ ID NO: 1624682 - RNA, 15 nt, Human
uccucuggccugugu

SEQ ID NO: 1624683 - RNA, 13 nt, Human
uccucuguacaga

SEQ ID NO: 1624684 - RNA, 15 nt, Human
uccucuguacagagc

SEQ ID NO: 1624685 - RNA, 14 nt, Human
uccucugcuugcca

SEQ ID NO: 1624686 - RNA, 15 nt, Human
uccucugcuugccau

SEQ ID NO: 1624687 - RNA, 16 nt, Human
uccucugcuugccauc

SEQ ID NO: 1624688 - RNA, 17 nt, Human
uccucugcuugccaucc

SEQ ID NO: 1624689 - RNA, 21 nt, Human
uccuccuuuucacaguucucu

SEQ ID NO: 1624690 - RNA, 13 nt, Human
uccuccuggacuc

SEQ ID NO: 1624691 - RNA, 21 nt, Human
uccucuaggaggucucuaaga

SEQ ID NO: 1624692 - RNA, 21 nt, Human
ucccuucccacuggaggcaug

SEQ ID NO: 1624693 - RNA, 17 nt, Human
ucccuucccaccucucu

SEQ ID NO: 1624694 - RNA, 16 nt, Human
ucccuucccaccucuc

SEQ ID NO: 1624695 - RNA, 14 nt, Human
ucccugccccuccc

SEQ ID NO: 1624696 - RNA, 16 nt, Human
ucccugccccccagcc

SEQ ID NO: 1624697 - RNA, 19 nt, Human
ucccugccccucccuucaa

SEQ ID NO: 1624698 - RNA, 18 nt, Human
ucccugccccucccuuca

SEQ ID NO: 1624699 - RNA, 21 nt, Human
uccgcuuucuacccagcgagc

SEQ ID NO: 1624700 - RNA, 21 nt, Human
uccgaaagggacuuggaagcu

SEQ ID NO: 1624701 - RNA, 17 nt, Human
ucccuucuuuuucuucu

SEQ ID NO: 1624702 - RNA, 22 nt, Human
uccgaaagggacuuggaagcuc

SEQ ID NO: 1624703 - RNA, 13 nt, Human
ucccucuggggcu

SEQ ID NO: 1624704 - RNA, 17 nt, Human
ucccucuggggcuguuc

SEQ ID NO: 1624705 - RNA, 20 nt, Human
ucccugcacuugcagacucu

SEQ ID NO: 1624706 - RNA, 16 nt, Human
ucccugccaauggacu

SEQ ID NO: 1624707 - RNA, 14 nt, Human
ucccugccaaugga

SEQ ID NO: 1624708 - RNA, 18 nt, Human
ucccucccuuccucuuuc

SEQ ID NO: 1624709 - RNA, 17 nt, Human
ucccuacuuccugugac

SEQ ID NO: 1624710 - RNA, 14 nt, Human
ucccucccuugggg

SEQ ID NO: 1624711 - RNA, 13 nt, Human
ucccucccuuggg

SEQ ID NO: 1624712 - RNA, 22 nt, Human
ucccaugagccucagcauccug

SEQ ID NO: 1624713 - RNA, 17 nt, Human
ucccaugagccucagca

SEQ ID NO: 1624714 - RNA, 12 nt, Human
ucccaugcccug

SEQ ID NO: 1624715 - RNA, 23 nt, Human
ucccuaccgagucucuucuccac

SEQ ID NO: 1624716 - RNA, 22 nt, Human
ucccuaccgagucucuucucca

SEQ ID NO: 1624717 - RNA, 21 nt, Human
ucccuaccgagucucuucucc

SEQ ID NO: 1624718 - RNA, 19 nt, Human
ucccuaccgagucucuucu

SEQ ID NO: 1624719 - RNA, 19 nt, Human
uggacaugcacagcuaaca

SEQ ID NO: 1624720 - RNA, 13 nt, Human
uggacaugcacag

SEQ ID NO: 1624721 - RNA, 20 nt, Human
uggacucaccucccccaucu

SEQ ID NO: 1624722 - RNA, 18 nt, Human
uggacucaccucccccau

SEQ ID NO: 1624723 - RNA, 22 nt, Human
uggaauaauccuaaacauauga

SEQ ID NO: 1624724 - RNA, 17 nt, Human
uggaauaaggagaauga

SEQ ID NO: 1624725 - RNA, 15 nt, Human
uggaauauauaacca

SEQ ID NO: 1624726 - RNA, 16 nt, Human
uggaauauauaaccag

SEQ ID NO: 1624727 - RNA, 16 nt, Human
uggaauaucuccguca

SEQ ID NO: 1624728 - RNA, 19 nt, Human
uggaauaacauguaauuaa

SEQ ID NO: 1624729 - RNA, 15 nt, Human
uggaauaacauguaa

SEQ ID NO: 1624730 - RNA, 14 nt, Human
uggaauaacaugua

SEQ ID NO: 1624731 - RNA, 18 nt, Human
uggaacgcguugaaauug

SEQ ID NO: 1624732 - RNA, 19 nt, Human
uggaacgcguugaaauugu

SEQ ID NO: 1624733 - RNA, 21 nt, Human
uggaacauaaaauacaauguu

SEQ ID NO: 1624734 - RNA, 20 nt, Human
uggaacauaaaauacaaugu

SEQ ID NO: 1624735 - RNA, 20 nt, Human
uggaaagaguaggaagacuu

SEQ ID NO: 1624736 - RNA, 14 nt, Human
uggaaagaguacuc

SEQ ID NO: 1624737 - RNA, 23 nt, Human
uggaaacuucagcgguuuauaua

SEQ ID NO: 1624738 - RNA, 22 nt, Human
uggaaacagcucgacuuuaaaa

SEQ ID NO: 1624739 - RNA, 21 nt, Human
uggaaagacuuuuccaacccu

SEQ ID NO: 1624740 - RNA, 17 nt, Human
uggaaacaagucaguca

SEQ ID NO: 1624741 - RNA, 17 nt, Human
uggaaacagcucgacuu

SEQ ID NO: 1624742 - RNA, 20 nt, Human
uggaaaaauagccugccucu

SEQ ID NO: 1624743 - RNA, 11 nt, Human
uggagggaagc

SEQ ID NO: 1624744 - RNA, 18 nt, Human
uggaggaaggaaacccag

SEQ ID NO: 1624745 - RNA, 12 nt, Human
uggaggaaggaa

SEQ ID NO: 1624746 - RNA, 20 nt, Human
uggaggaaggaaacccagcu

SEQ ID NO: 1624747 - RNA, 15 nt, Human
uggacuccugcacac

SEQ ID NO: 1624748 - RNA, 15 nt, Human
uggacuccucugucc

SEQ ID NO: 1624749 - RNA, 20 nt, Human
uggauuuaacagaaauguac

SEQ ID NO: 1624750 - RNA, 24 nt, Human
uggauuuaacagaaauguacagca

SEQ ID NO: 1624751 - RNA, 21 nt, Human
uggccagaugcaccagcccuu

SEQ ID NO: 1624752 - RNA, 20 nt, Human
uggccacuccagaccccugg

SEQ ID NO: 1624753 - RNA, 17 nt, Human
uggccacuccagacccc

SEQ ID NO: 1624754 - RNA, 21 nt, Human
uggcacccggccccugcuggu

SEQ ID NO: 1624755 - RNA, 13 nt, Human
uggcagcugcuuu

SEQ ID NO: 1624756 - RNA, 19 nt, Human
uggcaggaguuggaagugu

SEQ ID NO: 1624757 - RNA, 13 nt, Human
uggcagugggagc

SEQ ID NO: 1624758 - RNA, 21 nt, Human
uggcuugaguuuaaauuguaa

SEQ ID NO: 1624759 - RNA, 14 nt, Human
uggcuuuugugcau

SEQ ID NO: 1624760 - RNA, 19 nt, Human
uggcuuuucugauccaguu

SEQ ID NO: 1624761 - RNA, 18 nt, Human
uggcuuuucugauccagu

SEQ ID NO: 1624762 - RNA, 17 nt, Human
uggcuuuucugauccag

SEQ ID NO: 1624763 - RNA, 14 nt, Human
uggcuuuucugauc

SEQ ID NO: 1624764 - RNA, 16 nt, Human
uggcuuccuggcaaua

SEQ ID NO: 1624765 - RNA, 21 nt, Human
uggcugcuucaaggauccuga

SEQ ID NO: 1624766 - RNA, 21 nt, Human
uggcugggggccucagugcca

SEQ ID NO: 1624767 - RNA, 14 nt, Human
ugggagcugccugu

SEQ ID NO: 1624768 - RNA, 13 nt, Human
ugggagcugccug

SEQ ID NO: 1624769 - RNA, 12 nt, Human
ugggagcugccu

SEQ ID NO: 1624770 - RNA, 13 nt, Human
ugggagcaaaaga

SEQ ID NO: 1624771 - RNA, 13 nt, Human
ugggacacccugu

SEQ ID NO: 1624772 - RNA, 15 nt, Human
uggcuuuugugcauu

SEQ ID NO: 1624773 - RNA, 12 nt, Human
ugggacacccug

SEQ ID NO: 1624774 - RNA, 16 nt, Human
ugggauuacaggugug

SEQ ID NO: 1624775 - RNA, 18 nt, Human
ugggauuacaggcuccug

SEQ ID NO: 1624776 - RNA, 13 nt, Human
ugggauccuggag

SEQ ID NO: 1624777 - RNA, 18 nt, Human
ugggauccuccaggugca

SEQ ID NO: 1624778 - RNA, 15 nt, Human
ugggcagaggaaagc

SEQ ID NO: 1624779 - RNA, 17 nt, Human
ugggauuacagguguga

SEQ ID NO: 1624780 - RNA, 23 nt, Human
ugggagcugccuguucagcucca

SEQ ID NO: 1624781 - RNA, 22 nt, Human
ugggagcugccuguucagcucc

SEQ ID NO: 1624782 - RNA, 21 nt, Human
ugggagcugccuguucagcuc

SEQ ID NO: 1624783 - RNA, 17 nt, Human
ugggagcugccuguuca

SEQ ID NO: 1624784 - RNA, 15 nt, Human
ugggauccuccaggu

SEQ ID NO: 1624785 - RNA, 15 nt, Human
ugggagugagcuggu

SEQ ID NO: 1624786 - RNA, 18 nt, Human
ugggggcugggcagagga

SEQ ID NO: 1624787 - RNA, 17 nt, Human
ugggggcugggcagagg

SEQ ID NO: 1624788 - RNA, 19 nt, Human
ugggggcugggcagaggaa

SEQ ID NO: 1624789 - RNA, 12 nt, Human
ugggggugcauu

SEQ ID NO: 1624790 - RNA, 15 nt, Human
ugggggugcauuuga

SEQ ID NO: 1624791 - RNA, 21 nt, Human
ugggggaucacagccucugaa

SEQ ID NO: 1624792 - RNA, 20 nt, Human
ugggggaucacagccucuga

SEQ ID NO: 1624793 - RNA, 20 nt, Human
uggggauucuuaaaguugaa

SEQ ID NO: 1624794 - RNA, 18 nt, Human
uggggauucuuaaaguug

SEQ ID NO: 1624795 - RNA, 16 nt, Human
uggggauucuuaaagu

SEQ ID NO: 1624796 - RNA, 13 nt, Human
uggggauucuuaa

SEQ ID NO: 1624797 - RNA, 12 nt, Human
uggggauucuua

SEQ ID NO: 1624798 - RNA, 17 nt, Human
ugggcuucaguggcagc

SEQ ID NO: 1624799 - RNA, 15 nt, Human
ugggcuucaguggca

SEQ ID NO: 1624800 - RNA, 17 nt, Human
ugggcuggugucaccug

SEQ ID NO: 1624801 - RNA, 16 nt, Human
ugggcuaguugggcuu

SEQ ID NO: 1624802 - RNA, 22 nt, Human
ugggcuaagugauccucccacc

SEQ ID NO: 1624803 - RNA, 20 nt, Human
ugggcgugagaccugccccu

SEQ ID NO: 1624804 - RNA, 16 nt, Human
ugggcagaggaaagca

SEQ ID NO: 1624805 - RNA, 18 nt, Human
uggguuucuaaagcugcc

SEQ ID NO: 1624806 - RNA, 17 nt, Human
uggguuucuaaagcugc

SEQ ID NO: 1624807 - RNA, 21 nt, Human
uggguuucuaaagcugccagc

SEQ ID NO: 1624808 - RNA, 18 nt, Human
ugguaugaucacggcuca

SEQ ID NO: 1624809 - RNA, 23 nt, Human
ugguauuggcuagagguucaaag

SEQ ID NO: 1624810 - RNA, 16 nt, Human
uggguaacuagggaag

SEQ ID NO: 1624811 - RNA, 19 nt, Human
ugggguuuaucagaauucu

SEQ ID NO: 1624812 - RNA, 16 nt, Human
uggguucuacccaggu

SEQ ID NO: 1624813 - RNA, 15 nt, Human
uggguucuacccagg

SEQ ID NO: 1624814 - RNA, 22 nt, Human
uggguucuacccaggugcuagg

SEQ ID NO: 1624815 - RNA, 14 nt, Human
uggguuaguggaug

SEQ ID NO: 1624816 - RNA, 17 nt, Human
ugccuucucaacuccaa

SEQ ID NO: 1624817 - RNA, 15 nt, Human
ugccuucucaacucc

SEQ ID NO: 1624818 - RNA, 21 nt, Human
ugccugugaacugaacucuga

SEQ ID NO: 1624819 - RNA, 18 nt, Human
ugccugugaacugaacuc

SEQ ID NO: 1624820 - RNA, 17 nt, Human
ugccugugaacugaacu

SEQ ID NO: 1624821 - RNA, 21 nt, Human
ugcgaucuggguucacugcaa

SEQ ID NO: 1624822 - RNA, 20 nt, Human
ugcgaucuggguucacugca

SEQ ID NO: 1624823 - RNA, 19 nt, Human
ugcgaucuggguucacugc

SEQ ID NO: 1624824 - RNA, 15 nt, Human
ugcgaucuggguuca

SEQ ID NO: 1624825 - RNA, 14 nt, Human
ugcgaucuggguuc

SEQ ID NO: 1624826 - RNA, 15 nt, Human
ugcuaaaugugaaug

SEQ ID NO: 1624827 - RNA, 22 nt, Human
ugcgccuacaggagugagcacu

SEQ ID NO: 1624828 - RNA, 16 nt, Human
ugcgccuacaggagug

SEQ ID NO: 1624829 - RNA, 14 nt, Human
ugcgccuacaggag

SEQ ID NO: 1624830 - RNA, 18 nt, Human
ugccuguaaucacagcua

SEQ ID NO: 1624831 - RNA, 16 nt, Human
ugccugguggcagcug

SEQ ID NO: 1624832 - RNA, 15 nt, Human
ugccugguggcagcu

SEQ ID NO: 1624833 - RNA, 14 nt, Human
ugccugguggcagc

SEQ ID NO: 1624834 - RNA, 14 nt, Human
ugccugugaacuga

SEQ ID NO: 1624835 - RNA, 18 nt, Human
ugccugggcagaaggaag

SEQ ID NO: 1624836 - RNA, 21 nt, Human
ugccugggaucccucauccuc

SEQ ID NO: 1624837 - RNA, 19 nt, Human
ugccucgaacuggcugcaa

SEQ ID NO: 1624838 - RNA, 18 nt, Human
ugccucgaacuggcugca

SEQ ID NO: 1624839 - RNA, 20 nt, Human
ugccucgaacuggcugcaaa

SEQ ID NO: 1624840 - RNA, 18 nt, Human
ugccccuggcagccccug

SEQ ID NO: 1624841 - RNA, 17 nt, Human
ugccugaagucacacag

SEQ ID NO: 1624842 - RNA, 9 nt, Human
ugccucucu

SEQ ID NO: 1624843 - RNA, 19 nt, Human
ugcuaagcauuccaacuau

SEQ ID NO: 1624844 - RNA, 15 nt, Human
ugcuaagcauuccaa

SEQ ID NO: 1624845 - RNA, 16 nt, Human
ugcucacauaucuguc

SEQ ID NO: 1624846 - RNA, 15 nt, Human
ugcucacauaucugu

SEQ ID NO: 1624847 - RNA, 17 nt, Human
ugcucagagcaguguuu

SEQ ID NO: 1624848 - RNA, 14 nt, Human
ugcuccucucccca

SEQ ID NO: 1624849 - RNA, 18 nt, Human
ugcuccucuccccagcaa

SEQ ID NO: 1624850 - RNA, 17 nt, Human
ugcuccucuccccagca

SEQ ID NO: 1624851 - RNA, 18 nt, Human
ugcuccuuucuuguuuua

SEQ ID NO: 1624852 - RNA, 22 nt, Human
ugcucuccucuugccacugccu

SEQ ID NO: 1624853 - RNA, 21 nt, Human
ugcucuccucuugccacugcc

SEQ ID NO: 1624854 - RNA, 18 nt, Human
ugcucuccucuugccacu

SEQ ID NO: 1624855 - RNA, 16 nt, Human
ugcucuccucuugcca

SEQ ID NO: 1624856 - RNA, 23 nt, Human
ugcugacagacacaggcccggcu

SEQ ID NO: 1624857 - RNA, 22 nt, Human
ugcugacagacacaggcccggc

SEQ ID NO: 1624858 - RNA, 21 nt, Human
ugcugaaggcucgagcaugcc

SEQ ID NO: 1624859 - RNA, 13 nt, Human
ugcugaaggcucg

SEQ ID NO: 1624860 - RNA, 12 nt, Human
ugcugaaggcuc

SEQ ID NO: 1624861 - RNA, 23 nt, Human
ugcugaaggaauaaauugcuccu

SEQ ID NO: 1624862 - RNA, 17 nt, Human
ugcugauggugcaauga

SEQ ID NO: 1624863 - RNA, 15 nt, Human
ugcugauggugcaau

SEQ ID NO: 1624864 - RNA, 13 nt, Human
ugcugauggugca

SEQ ID NO: 1624865 - RNA, 18 nt, Human
ugcugauggugcaaugac

SEQ ID NO: 1624866 - RNA, 14 nt, Human
ugcugcauuuaaaa

SEQ ID NO: 1624867 - RNA, 18 nt, Human
ugcugcaguugccaguca

SEQ ID NO: 1624868 - RNA, 23 nt, Human
ugcugcaguugccagucaccccg

SEQ ID NO: 1624869 - RNA, 13 nt, Human
ugcugcuggcugg

SEQ ID NO: 1624870 - RNA, 22 nt, Human
ugcaguucugaagaagauggua

SEQ ID NO: 1624871 - RNA, 19 nt, Human
ugcaguucugaagaagaug

SEQ ID NO: 1624872 - RNA, 14 nt, Human
ugcaguugccaguc

SEQ ID NO: 1624873 - RNA, 13 nt, Human
ugcaguugccagu

SEQ ID NO: 1624874 - RNA, 15 nt, Human
ugcaguugccaguca

SEQ ID NO: 1624875 - RNA, 18 nt, Human
ugcaguucugaagaagau

SEQ ID NO: 1624876 - RNA, 17 nt, Human
ugcaguucugaagaaga

SEQ ID NO: 1624877 - RNA, 16 nt, Human
ugcaguucugaagaag

SEQ ID NO: 1624878 - RNA, 15 nt, Human
ugcaguucugaagaa

SEQ ID NO: 1624879 - RNA, 20 nt, Human
ugcaguggugcgaucugggu

SEQ ID NO: 1624880 - RNA, 22 nt, Human
ugcagugguaugaucacggcuc

SEQ ID NO: 1624881 - RNA, 16 nt, Human
ugcagugcuuccaagg

SEQ ID NO: 1624882 - RNA, 14 nt, Human
ugcaggcagccagg

SEQ ID NO: 1624883 - RNA, 13 nt, Human
ugcaggcagccag

SEQ ID NO: 1624884 - RNA, 15 nt, Human
ugcaggcagccaggc

SEQ ID NO: 1624885 - RNA, 16 nt, Human
ugcacugucaagauga

SEQ ID NO: 1624886 - RNA, 14 nt, Human
ugcacuuuguucug

SEQ ID NO: 1624887 - RNA, 12 nt, Human
ugcacuuuguuc

SEQ ID NO: 1624888 - RNA, 23 nt, Human
ugcagcaauaaagcagcguuucu

SEQ ID NO: 1624889 - RNA, 21 nt, Human
ugcagagcaggaaacaugacu

SEQ ID NO: 1624890 - RNA, 15 nt, Human
ugcaccgggccacag

SEQ ID NO: 1624891 - RNA, 14 nt, Human
ugcaccgggccaca

SEQ ID NO: 1624892 - RNA, 23 nt, Human
ugcaccggcuggccuggccccuc

SEQ ID NO: 1624893 - RNA, 19 nt, Human
ugaguccccuguuuguuuc

SEQ ID NO: 1624894 - RNA, 22 nt, Human
ugcaccgggccacagagaaagu

SEQ ID NO: 1624895 - RNA, 17 nt, Human
ugcaccgggccacagag

SEQ ID NO: 1624896 - RNA, 20 nt, Human
ugaguccccuguuuguuucu

SEQ ID NO: 1624897 - RNA, 19 nt, Human
ugcacggugaauggcuuug

SEQ ID NO: 1624898 - RNA, 18 nt, Human
ugcacggugaauggcuuu

SEQ ID NO: 1624899 - RNA, 14 nt, Human
ugcacggugaaugg

SEQ ID NO: 1624900 - RNA, 14 nt, Human
ugccaucccucccu

SEQ ID NO: 1624901 - RNA, 11 nt, Human
ugccaucccuc

SEQ ID NO: 1624902 - RNA, 12 nt, Human
ugccaucccucc

SEQ ID NO: 1624903 - RNA, 21 nt, Human
ugccauccagguucagcuugu

SEQ ID NO: 1624904 - RNA, 24 nt, Human
ugccagguuuuuggucugacccac

SEQ ID NO: 1624905 - RNA, 14 nt, Human
ugcccaccuggccu

SEQ ID NO: 1624906 - RNA, 13 nt, Human
ugcccaccuggcc

SEQ ID NO: 1624907 - RNA, 13 nt, Human
ugcccaggcuggc

SEQ ID NO: 1624908 - RNA, 21 nt, Human
ugcccacucccugcaaccuga

SEQ ID NO: 1624909 - RNA, 11 nt, Human
ugcccaggcug

SEQ ID NO: 1624910 - RNA, 16 nt, Human
ugcccacucccugcaa

SEQ ID NO: 1624911 - RNA, 15 nt, Human
ugcccacucccugca

SEQ ID NO: 1624912 - RNA, 14 nt, Human
ugcccacucccugc

SEQ ID NO: 1624913 - RNA, 23 nt, Human
ugccccucaacucuccuccagag

SEQ ID NO: 1624914 - RNA, 15 nt, Human
ugccccagggcuccc

SEQ ID NO: 1624915 - RNA, 13 nt, Human
ugccccucccuuc

SEQ ID NO: 1624916 - RNA, 19 nt, Human
ugccaaauauaaauaaaaa

SEQ ID NO: 1624917 - RNA, 22 nt, Human
ugccaaauauaaauaaaaauaa

SEQ ID NO: 1624918 - RNA, 14 nt, Human
ugcaucaagaugug

SEQ ID NO: 1624919 - RNA, 19 nt, Human
ugcaucaagaugugacaug

SEQ ID NO: 1624920 - RNA, 17 nt, Human
ugccaaauauaaauaaa

SEQ ID NO: 1624921 - RNA, 18 nt, Human
ugccaaauauaaauaaaa

SEQ ID NO: 1624922 - RNA, 21 nt, Human
ugcauauuuauaaaaauaaaa

SEQ ID NO: 1624923 - RNA, 20 nt, Human
ugcauauuuauaaaaauaaa

SEQ ID NO: 1624924 - RNA, 20 nt, Human
ugccacuaaauugacacuua

SEQ ID NO: 1624925 - RNA, 19 nt, Human
ugccacccuggggagaaag

SEQ ID NO: 1624926 - RNA, 22 nt, Human
ugccacuacggaauaguuggcu

SEQ ID NO: 1624927 - RNA, 20 nt, Human
ugccacccuggggagaaagu

SEQ ID NO: 1624928 - RNA, 22 nt, Human
ugccagguuuuuggucugaccc

SEQ ID NO: 1624929 - RNA, 19 nt, Human
ugccagguuuuuggucuga

SEQ ID NO: 1624930 - RNA, 18 nt, Human
ugccagguuuuuggucug

SEQ ID NO: 1624931 - RNA, 10 nt, Human
ugccaggcau

SEQ ID NO: 1624932 - RNA, 15 nt, Human
uguacgucugacagg

SEQ ID NO: 1624933 - RNA, 16 nt, Human
uguacgucugacaggc

SEQ ID NO: 1624934 - RNA, 18 nt, Human
uguagcauccuggaauau

SEQ ID NO: 1624935 - RNA, 17 nt, Human
uguagcauccuggaaua

SEQ ID NO: 1624936 - RNA, 16 nt, Human
uguagcauccuggaau

SEQ ID NO: 1624937 - RNA, 14 nt, Human
uguagcauccugga

SEQ ID NO: 1624938 - RNA, 22 nt, Human
uguaguguuggagaagaacuga

SEQ ID NO: 1624939 - RNA, 18 nt, Human
uguagccccucuccugga

SEQ ID NO: 1624940 - RNA, 16 nt, Human
uguaccgcaaugugac

SEQ ID NO: 1624941 - RNA, 21 nt, Human
uguacagagcccacgccccca

SEQ ID NO: 1624942 - RNA, 18 nt, Human
uguacagagcccacgccc

SEQ ID NO: 1624943 - RNA, 17 nt, Human
uguacagagcccacgcc

SEQ ID NO: 1624944 - RNA, 16 nt, Human
uguacagagcccacgc

SEQ ID NO: 1624945 - RNA, 17 nt, Human
uguaauuaaguacuaug

SEQ ID NO: 1624946 - RNA, 23 nt, Human
uguacaaggacagccccuccucc

SEQ ID NO: 1624947 - RNA, 20 nt, Human
uguacaaggacagccccucc

SEQ ID NO: 1624948 - RNA, 16 nt, Human
uguacaaggacagccc

SEQ ID NO: 1624949 - RNA, 17 nt, Human
uggucacaggaaguaga

SEQ ID NO: 1624950 - RNA, 14 nt, Human
uguaaucacagcua

SEQ ID NO: 1624951 - RNA, 16 nt, Human
uguaugauucccagcc

SEQ ID NO: 1624952 - RNA, 22 nt, Human
uguauucucuccuguaccucuu

SEQ ID NO: 1624953 - RNA, 21 nt, Human
uguauugugcgcuaaacuuuu

SEQ ID NO: 1624954 - RNA, 15 nt, Human
uguaugauucccagc

SEQ ID NO: 1624955 - RNA, 22 nt, Human
uguauaaaagggacugagaaau

SEQ ID NO: 1624956 - RNA, 17 nt, Human
ugucacacacuuuggcu

SEQ ID NO: 1624957 - RNA, 12 nt, Human
ugucacaggcag

SEQ ID NO: 1624958 - RNA, 13 nt, Human
ugucacaggcagg

SEQ ID NO: 1624959 - RNA, 20 nt, Human
uguauuuauuuaguauuuau

SEQ ID NO: 1624960 - RNA, 22 nt, Human
uguccccaccgcagacaggacc

SEQ ID NO: 1624961 - RNA, 19 nt, Human
uguccccaccgcagacagg

SEQ ID NO: 1624962 - RNA, 18 nt, Human
uguccccaccgcagacag

SEQ ID NO: 1624963 - RNA, 20 nt, Human
uguccuacccacccuccuuu

SEQ ID NO: 1624964 - RNA, 17 nt, Human
uguccccgacccuugcc

SEQ ID NO: 1624965 - RNA, 16 nt, Human
uguccccgacccuugc

SEQ ID NO: 1624966 - RNA, 17 nt, Human
uguccuacucuguguca

SEQ ID NO: 1624967 - RNA, 12 nt, Human
uguccuacucug

SEQ ID NO: 1624968 - RNA, 16 nt, Human
ugucauuugagcaggg

SEQ ID NO: 1624969 - RNA, 19 nt, Human
ugucauuugagcagggcuc

SEQ ID NO: 1624970 - RNA, 16 nt, Human
ugucccaacuuguaaa

SEQ ID NO: 1624971 - RNA, 13 nt, Human
ugucaccugaaga

SEQ ID NO: 1624972 - RNA, 20 nt, Human
ugugaggaagccgcuggggc

SEQ ID NO: 1624973 - RNA, 18 nt, Human
ugugaggaagccgcuggg

SEQ ID NO: 1624974 - RNA, 13 nt, Human
ugugaggaagccg

SEQ ID NO: 1624975 - RNA, 21 nt, Human
ugugagucaccaagcccaguu

SEQ ID NO: 1624976 - RNA, 19 nt, Human
ugugagucaccaagcccag

SEQ ID NO: 1624977 - RNA, 17 nt, Human
ugugagucaccaagccc

SEQ ID NO: 1624978 - RNA, 16 nt, Human
ugugauauaagugugu

SEQ ID NO: 1624979 - RNA, 16 nt, Human
ugucugaagucacugc

SEQ ID NO: 1624980 - RNA, 18 nt, Human
ugucugaagucacugcac

SEQ ID NO: 1624981 - RNA, 17 nt, Human
ugucugaagucacugca

SEQ ID NO: 1624982 - RNA, 20 nt, Human
ugucugaagucacugcacag

SEQ ID NO: 1624983 - RNA, 19 nt, Human
ugucugaagucacugcaca

SEQ ID NO: 1624984 - RNA, 21 nt, Human
ugucuuuucuugcaugaggcu

SEQ ID NO: 1624985 - RNA, 16 nt, Human
ugucuuuggacccuga

SEQ ID NO: 1624986 - RNA, 14 nt, Human
ugucuuuggacccu

SEQ ID NO: 1624987 - RNA, 17 nt, Human
ugucuuuggacccugag

SEQ ID NO: 1624988 - RNA, 23 nt, Human
ugucuuuucuugcaugaggcuag

SEQ ID NO: 1624989 - RNA, 23 nt, Human
ugugaaaagaaaaaugagccugg

SEQ ID NO: 1624990 - RNA, 16 nt, Human
ugucuuuuuucacuac

SEQ ID NO: 1624991 - RNA, 16 nt, Human
ugugaaaaugugugug

SEQ ID NO: 1624992 - RNA, 17 nt, Human
ugugaaaaugugugugu

SEQ ID NO: 1624993 - RNA, 19 nt, Human
ugugcuaguaauuggaaag

SEQ ID NO: 1624994 - RNA, 19 nt, Human
ugugcgccuacaggaguga

SEQ ID NO: 1624995 - RNA, 14 nt, Human
ugugcgccuacagg

SEQ ID NO: 1624996 - RNA, 16 nt, Human
ugugcucaggagcccu

SEQ ID NO: 1624997 - RNA, 15 nt, Human
ugugcucaggagccc

SEQ ID NO: 1624998 - RNA, 17 nt, Human
ugugcucaggagcccug

SEQ ID NO: 1624999 - RNA, 20 nt, Human
ugugcucaggagcccuggga

SEQ ID NO: 1625000 - RNA, 14 nt, Human
ugugcuuguuaacu

SEQ ID NO: 1625001 - RNA, 14 nt, Human
ugugcauuaucuag

SEQ ID NO: 1625002 - RNA, 16 nt, Human
ugugcauuaucuagau

SEQ ID NO: 1625003 - RNA, 19 nt, Human
ugugcauuaucuagauacu

SEQ ID NO: 1625004 - RNA, 16 nt, Human
ugugcacaugcacgug

SEQ ID NO: 1625005 - RNA, 20 nt, Human
ugugcauuaucuagauacug

SEQ ID NO: 1625006 - RNA, 21 nt, Human
ugugcauuaucuagauacugu

SEQ ID NO: 1625007 - RNA, 23 nt, Human
ugugcauuaucuagauacuguau

SEQ ID NO: 1625008 - RNA, 23 nt, Human
ugugcauuuggugguuucagaaa

SEQ ID NO: 1625009 - RNA, 12 nt, Human
uguguagggcgg

SEQ ID NO: 1625010 - RNA, 16 nt, Human
uguguagggcgggagg

SEQ ID NO: 1625011 - RNA, 22 nt, Human
ugugggcuaguugggcuuccuc

SEQ ID NO: 1625012 - RNA, 22 nt, Human
ugugggcgugagaccugccccu

SEQ ID NO: 1625013 - RNA, 21 nt, Human
ugugggcgugagaccugcccc

SEQ ID NO: 1625014 - RNA, 20 nt, Human
ugugggcgugagaccugccc

SEQ ID NO: 1625015 - RNA, 23 nt, Human
uguggcgcagcauauucaggaag

SEQ ID NO: 1625016 - RNA, 10 nt, Human
uguggcucac

SEQ ID NO: 1625017 - RNA, 19 nt, Human
uguggacacagcucuucuc

SEQ ID NO: 1625018 - RNA, 13 nt, Human
uguggacacagcu

SEQ ID NO: 1625019 - RNA, 18 nt, Human
uguggacacagcucuucu

SEQ ID NO: 1625020 - RNA, 17 nt, Human
uguucauaaauaaaguu

SEQ ID NO: 1625021 - RNA, 22 nt, Human
uguucagcuccagcucaccagc

SEQ ID NO: 1625022 - RNA, 21 nt, Human
uguucagcuccagcucaccag

SEQ ID NO: 1625023 - RNA, 20 nt, Human
uguucagcuccagcucacca

SEQ ID NO: 1625024 - RNA, 14 nt, Human
uguuagugcaaauu

SEQ ID NO: 1625025 - RNA, 17 nt, Human
uguuaguaugaggcauu

SEQ ID NO: 1625026 - RNA, 19 nt, Human
uguuaguaugaggcauuug

SEQ ID NO: 1625027 - RNA, 20 nt, Human
uguuaguaugaggcauuugu

SEQ ID NO: 1625028 - RNA, 21 nt, Human
uguuaaaagaugaaaauauuu

SEQ ID NO: 1625029 - RNA, 16 nt, Human
uguuaaaccaugggau

SEQ ID NO: 1625030 - RNA, 14 nt, Human
uguuacuaaguuuu

SEQ ID NO: 1625031 - RNA, 17 nt, Human
uguuagccccauaauuu

SEQ ID NO: 1625032 - RNA, 19 nt, Human
uguguuuugcaagccagau

SEQ ID NO: 1625033 - RNA, 13 nt, Human
uguguuuugcaag

SEQ ID NO: 1625034 - RNA, 13 nt, Human
uguguuugaagca

SEQ ID NO: 1625035 - RNA, 18 nt, Human
uguguuuuucauaaagca

SEQ ID NO: 1625036 - RNA, 15 nt, Human
uguguuuuucauaaa

SEQ ID NO: 1625037 - RNA, 16 nt, Human
uguguuuauugucaaa

SEQ ID NO: 1625038 - RNA, 19 nt, Human
ugugugugcuuauguauga

SEQ ID NO: 1625039 - RNA, 20 nt, Human
ugugugugcuuauguaugag

SEQ ID NO: 1625040 - RNA, 17 nt, Human
ugugugugaaaaugugu

SEQ ID NO: 1625041 - RNA, 22 nt, Human
ugugugaaagguacuucaaauc

SEQ ID NO: 1625042 - RNA, 21 nt, Human
ugugugaaagguacuucaaau

SEQ ID NO: 1625043 - RNA, 18 nt, Human
uguguaugcgugugugug

SEQ ID NO: 1625044 - RNA, 19 nt, Human
ugugugcacguacacacac

SEQ ID NO: 1625045 - RNA, 15 nt, Human
ugugugcuuauguau

SEQ ID NO: 1625046 - RNA, 20 nt, Human
uguuggagaagaacugaaau

SEQ ID NO: 1625047 - RNA, 19 nt, Human
uguuggagaagaacugaaa

SEQ ID NO: 1625048 - RNA, 16 nt, Human
uguuggccaggcuggu

SEQ ID NO: 1625049 - RNA, 15 nt, Human
uguuggccaggcugg

SEQ ID NO: 1625050 - RNA, 15 nt, Human
uguuggccaaagcca

SEQ ID NO: 1625051 - RNA, 14 nt, Human
uguuggcagccucu

SEQ ID NO: 1625052 - RNA, 17 nt, Human
uguuggagaagaacuga

SEQ ID NO: 1625053 - RNA, 16 nt, Human
uguuggagaagaacug

SEQ ID NO: 1625054 - RNA, 14 nt, Human
uguuggagaagaac

SEQ ID NO: 1625055 - RNA, 18 nt, Human
uguuuaaaaucauuucug

SEQ ID NO: 1625056 - RNA, 17 nt, Human
uguuuaaaaucauuucu

SEQ ID NO: 1625057 - RNA, 19 nt, Human
uguuggcugggggccucag

SEQ ID NO: 1625058 - RNA, 17 nt, Human
uguuggcugggggccuc

SEQ ID NO: 1625059 - RNA, 12 nt, Human
uguuuaagagac

SEQ ID NO: 1625060 - RNA, 20 nt, Human
uguugacaugggacauuugc

SEQ ID NO: 1625061 - RNA, 15 nt, Human
uguugaagccuuugu

SEQ ID NO: 1625062 - RNA, 20 nt, Human
uguucuggcucuuccaggcu

SEQ ID NO: 1625063 - RNA, 17 nt, Human
uguucuggcucuuccag

SEQ ID NO: 1625064 - RNA, 21 nt, Human
uguucuggcucuuccaggcug

SEQ ID NO: 1625065 - RNA, 12 nt, Human
uguucugggaca

SEQ ID NO: 1625066 - RNA, 15 nt, Human
uguucugcuuuccuc

SEQ ID NO: 1625067 - RNA, 23 nt, Human
uguucuuucuggcuaugcauuug

SEQ ID NO: 1625068 - RNA, 16 nt, Human
uguucuggcucuucca

SEQ ID NO: 1625069 - RNA, 13 nt, Human
uguucuggcucuu

SEQ ID NO: 1625070 - RNA, 12 nt, Human
uguucuggcucu

SEQ ID NO: 1625071 - RNA, 13 nt, Human
uguucucugagga

SEQ ID NO: 1625072 - RNA, 16 nt, Human
uguucucugcccucca

SEQ ID NO: 1625073 - RNA, 15 nt, Human
uguucucugcccucc

SEQ ID NO: 1625074 - RNA, 14 nt, Human
uguucucugcccuc

SEQ ID NO: 1625075 - RNA, 13 nt, Human
uguucucugcccu

SEQ ID NO: 1625076 - RNA, 16 nt, Human
uguucucucuucucca

SEQ ID NO: 1625077 - RNA, 15 nt, Human
uguucucucuucucc

SEQ ID NO: 1625078 - RNA, 19 nt, Human
uguucaucauccuaagcua

SEQ ID NO: 1625079 - RNA, 14 nt, Human
uguucaugaaagau

SEQ ID NO: 1625080 - RNA, 13 nt, Human
uguucaugaaaga

SEQ ID NO: 1625081 - RNA, 15 nt, Human
uguuuccuggcacug

SEQ ID NO: 1625082 - RNA, 16 nt, Human
uguuuuaagaggcagg

SEQ ID NO: 1625083 - RNA, 16 nt, Human
uguuuguugucagcug

SEQ ID NO: 1625084 - RNA, 23 nt, Human
uguuucuguacuuuuuggcauaa

SEQ ID NO: 1625085 - RNA, 22 nt, Human
uguuucuguacuuuuuggcaua

SEQ ID NO: 1625086 - RNA, 11 nt, Human
uguuucuguac

SEQ ID NO: 1625087 - RNA, 22 nt, Human
uuaaaaaaaaaccugagcccca

SEQ ID NO: 1625088 - RNA, 15 nt, Human
uuaaaaaaaaaauug

SEQ ID NO: 1625089 - RNA, 17 nt, Human
uguuuuaagaggcaggg

SEQ ID NO: 1625090 - RNA, 22 nt, Human
uguuuuaaggaugcuuguacau

SEQ ID NO: 1625091 - RNA, 23 nt, Human
uguuuuaaggaugcuuguacaua

SEQ ID NO: 1625092 - RNA, 19 nt, Human
uuaaaauacacacucaaau

SEQ ID NO: 1625093 - RNA, 18 nt, Human
uuaaaauacacacucaaa

SEQ ID NO: 1625094 - RNA, 14 nt, Human
uuaaaacccaagug

SEQ ID NO: 1625095 - RNA, 20 nt, Human
uuaaagccauguuuauuaca

SEQ ID NO: 1625096 - RNA, 18 nt, Human
uuaaagccauguuuauua

SEQ ID NO: 1625097 - RNA, 14 nt, Human
uuaaagccauguuu

SEQ ID NO: 1625098 - RNA, 12 nt, Human
uuaaagccaugu

SEQ ID NO: 1625099 - RNA, 16 nt, Human
uuaaaugcccagcccc

SEQ ID NO: 1625100 - RNA, 15 nt, Human
uuaaaugcccagccc

SEQ ID NO: 1625101 - RNA, 14 nt, Human
uuaaaugcccagcc

SEQ ID NO: 1625102 - RNA, 11 nt, Human
uuaaaugcacc

SEQ ID NO: 1625103 - RNA, 22 nt, Human
uuaauuaaaacacaacaucuuu

SEQ ID NO: 1625104 - RNA, 20 nt, Human
uuaauauuaaagccauguuu

SEQ ID NO: 1625105 - RNA, 19 nt, Human
uuaauauuaaagccauguu

SEQ ID NO: 1625106 - RNA, 18 nt, Human
uuaauauuaaagccaugu

SEQ ID NO: 1625107 - RNA, 20 nt, Human
uuacagagacagaaagcaga

SEQ ID NO: 1625108 - RNA, 20 nt, Human
uuacauuuguauaaaauaau

SEQ ID NO: 1625109 - RNA, 12 nt, Human
uuacauuuuuaa

SEQ ID NO: 1625110 - RNA, 17 nt, Human
uuacauuuuuaagugcu

SEQ ID NO: 1625111 - RNA, 20 nt, Human
uuacacuuuaugcacaaaau

SEQ ID NO: 1625112 - RNA, 13 nt, Human
uuacacuuuaugc

SEQ ID NO: 1625113 - RNA, 12 nt, Human
uuacagaagccc

SEQ ID NO: 1625114 - RNA, 16 nt, Human
uuaauaauguuucaaa

SEQ ID NO: 1625115 - RNA, 11 nt, Human
uuaauauuaaa

SEQ ID NO: 1625116 - RNA, 17 nt, Human
uuaauauuaaagccaug

SEQ ID NO: 1625117 - RNA, 16 nt, Human
uuaauauuaaagccau

SEQ ID NO: 1625118 - RNA, 14 nt, Human
uuaauauuaaagcc

SEQ ID NO: 1625119 - RNA, 13 nt, Human
uuaauauuaaagc

SEQ ID NO: 1625120 - RNA, 14 nt, Human
uuaacuuuuauaaa

SEQ ID NO: 1625121 - RNA, 12 nt, Human
uuaagaguaaaa

SEQ ID NO: 1625122 - RNA, 17 nt, Human
uuaaaugcccagccccu

SEQ ID NO: 1625123 - RNA, 12 nt, Human
uuaacuuuuaua

SEQ ID NO: 1625124 - RNA, 13 nt, Human
uuaacuuuuauaa

SEQ ID NO: 1625125 - RNA, 12 nt, Human
aaaaacacagca

SEQ ID NO: 1625126 - RNA, 14 nt, Human
aaaaacacaaaagu

SEQ ID NO: 1625127 - RNA, 14 nt, Human
aaaacaaggaugaa

SEQ ID NO: 1625128 - RNA, 13 nt, Human
aaaacacagcaag

SEQ ID NO: 1625129 - RNA, 12 nt, Human
aaaacacagcaa

SEQ ID NO: 1625130 - RNA, 18 nt, Human
aaaacacagcaaggguga

SEQ ID NO: 1625131 - RNA, 12 nt, Human
aaaacacauuuu

SEQ ID NO: 1625132 - RNA, 17 nt, Human
aaaacaaggaugaauua

SEQ ID NO: 1625133 - RNA, 12 nt, Human
aaaaagaggcua

SEQ ID NO: 1625134 - RNA, 20 nt, Human
aaaaauuggggauucuuaaa

SEQ ID NO: 1625135 - RNA, 19 nt, Human
aaaaauuggggauucuuaa

SEQ ID NO: 1625136 - RNA, 18 nt, Human
aaaaauuggggauucuua

SEQ ID NO: 1625137 - RNA, 17 nt, Human
aaaaauuggggauucuu

SEQ ID NO: 1625138 - RNA, 13 nt, Human
aaaaacugauuuu

SEQ ID NO: 1625139 - RNA, 18 nt, Human
aaaaaccaguauuguaca

SEQ ID NO: 1625140 - RNA, 16 nt, Human
aaaaaccaguauugua

SEQ ID NO: 1625141 - RNA, 14 nt, Human
aaaaacauggccuu

SEQ ID NO: 1625142 - RNA, 15 nt, Human
aaaaacugauuuuuu

SEQ ID NO: 1625143 - RNA, 20 nt, Human
aaaaaccaguauuguacaaa

SEQ ID NO: 1625144 - RNA, 18 nt, Human
aauuaaaacacaacaucu

SEQ ID NO: 1625145 - RNA, 19 nt, Human
aauguuugccucugccucu

SEQ ID NO: 1625146 - RNA, 18 nt, Human
aauguuugccucugccuc

SEQ ID NO: 1625147 - RNA, 13 nt, Human
aaugggcagagca

SEQ ID NO: 1625148 - RNA, 15 nt, Human
aaugggcagagcaga

SEQ ID NO: 1625149 - RNA, 13 nt, Human
aauggcuuuguau

SEQ ID NO: 1625150 - RNA, 18 nt, Human
aauggcuuuguauagaac

SEQ ID NO: 1625151 - RNA, 16 nt, Human
aauggcuuuguauaga

SEQ ID NO: 1625152 - RNA, 15 nt, Human
aauggcuuuguauag

SEQ ID NO: 1625153 - RNA, 21 nt, Human
aaugucagugugacugaucuc

SEQ ID NO: 1625154 - RNA, 17 nt, Human
aaugucagugugacuga

SEQ ID NO: 1625155 - RNA, 22 nt, Human
aaugucuaguuguaacaccaug

SEQ ID NO: 1625156 - RNA, 20 nt, Human
aaugucucuuuaaugucaca

SEQ ID NO: 1625157 - RNA, 13 nt, Human
aaugucaguguga

SEQ ID NO: 1625158 - RNA, 16 nt, Human
aaugucagugugacug

SEQ ID NO: 1625159 - RNA, 15 nt, Human
aaugucagugugacu

SEQ ID NO: 1625160 - RNA, 22 nt, Human
aauggucuuucuaaugugugaa

SEQ ID NO: 1625161 - RNA, 20 nt, Human
aauuaguuuuauaugcuucu

SEQ ID NO: 1625162 - RNA, 17 nt, Human
aauuaguuuuauaugcu

SEQ ID NO: 1625163 - RNA, 14 nt, Human
aauuaguuuuauau

SEQ ID NO: 1625164 - RNA, 18 nt, Human
aauuaguggcacuugcuu

SEQ ID NO: 1625165 - RNA, 17 nt, Human
aaugaagauacugaaau

SEQ ID NO: 1625166 - RNA, 20 nt, Human
aaugauaacuggaaacuuca

SEQ ID NO: 1625167 - RNA, 21 nt, Human
aaugaugauccuaggcauuug

SEQ ID NO: 1625168 - RNA, 17 nt, Human
aaugauaacuggaaacu

SEQ ID NO: 1625169 - RNA, 12 nt, Human
aaugaagauacu

SEQ ID NO: 1625170 - RNA, 22 nt, Human
aaucugcuuuuuaaagaaugcu

SEQ ID NO: 1625171 - RNA, 23 nt, Human
aaugaaccacaucuugcucugcu

SEQ ID NO: 1625172 - RNA, 17 nt, Human
aaugaaccacaucuugc

SEQ ID NO: 1625173 - RNA, 16 nt, Human
aaugaaccacaucuug

SEQ ID NO: 1625174 - RNA, 13 nt, Human
aaucuccaaaaua

SEQ ID NO: 1625175 - RNA, 14 nt, Human
aaucuccaaaauaa

SEQ ID NO: 1625176 - RNA, 18 nt, Human
aaucuccaaaauaaaacu

SEQ ID NO: 1625177 - RNA, 22 nt, Human
aauccauuuggaaaucuuuaaa

SEQ ID NO: 1625178 - RNA, 18 nt, Human
aauccauuuggaaaucuu

SEQ ID NO: 1625179 - RNA, 17 nt, Human
aauccauuuggaaaucu

SEQ ID NO: 1625180 - RNA, 15 nt, Human
aauccauuuggaaau

SEQ ID NO: 1625181 - RNA, 14 nt, Human
aauccauuuggaaa

SEQ ID NO: 1625182 - RNA, 14 nt, Human
aauccauacauuug

SEQ ID NO: 1625183 - RNA, 13 nt, Human
aauccauacauuu

SEQ ID NO: 1625184 - RNA, 18 nt, Human
aauccaggguggugguga

SEQ ID NO: 1625185 - RNA, 19 nt, Human
aaugaugccaugaggaaca

SEQ ID NO: 1625186 - RNA, 16 nt, Human
aauauuauguuaaaac

SEQ ID NO: 1625187 - RNA, 15 nt, Human
aaucaagaaacuuaa

SEQ ID NO: 1625188 - RNA, 13 nt, Human
aaucacaauacau

SEQ ID NO: 1625189 - RNA, 18 nt, Human
aauauaggaacuuaaaua

SEQ ID NO: 1625190 - RNA, 20 nt, Human
aauauaggaacuuaaauaau

SEQ ID NO: 1625191 - RNA, 21 nt, Human
aauauaggaacuuaaauaaug

SEQ ID NO: 1625192 - RNA, 23 nt, Human
aaguccaggcuuuuuuaucaugu

SEQ ID NO: 1625193 - RNA, 16 nt, Human
aaguaucccuacugua

SEQ ID NO: 1625194 - RNA, 11 nt, Human
aaguacuucuu

SEQ ID NO: 1625195 - RNA, 15 nt, Human
aaguacuuuuggcau

SEQ ID NO: 1625196 - RNA, 14 nt, Human
aaguacuuuuggca

SEQ ID NO: 1625197 - RNA, 11 nt, Human
aaggugggagg

SEQ ID NO: 1625198 - RNA, 20 nt, Human
aagguuaauguucaucaucc

SEQ ID NO: 1625199 - RNA, 16 nt, Human
aagguuaauaaaguaa

SEQ ID NO: 1625200 - RNA, 15 nt, Human
aagguuaauaaagua

SEQ ID NO: 1625201 - RNA, 16 nt, Human
aagucuuagauguaua

SEQ ID NO: 1625202 - RNA, 17 nt, Human
aagucuuagauguauau

SEQ ID NO: 1625203 - RNA, 19 nt, Human
aagucucuggaauuugaaa

SEQ ID NO: 1625204 - RNA, 21 nt, Human
aauaauccuaaacauaugaau

SEQ ID NO: 1625205 - RNA, 16 nt, Human
aauaaugugaaacugg

SEQ ID NO: 1625206 - RNA, 19 nt, Human
aauaauguaagacaaauau

SEQ ID NO: 1625207 - RNA, 12 nt, Human
aauaauguaaga

SEQ ID NO: 1625208 - RNA, 19 nt, Human
aauaaaauggguuuuacug

SEQ ID NO: 1625209 - RNA, 23 nt, Human
aauaaaauuaaagcugaaaacug

SEQ ID NO: 1625210 - RNA, 16 nt, Human
aauaaacgucuuaaau

SEQ ID NO: 1625211 - RNA, 17 nt, Human
aauaaacgucuuaaaua

SEQ ID NO: 1625212 - RNA, 19 nt, Human
aauaaacuauuuguaaagu

SEQ ID NO: 1625213 - RNA, 14 nt, Human
aauaaaauggguuu

SEQ ID NO: 1625214 - RNA, 13 nt, Human
aagccagauuuuc

SEQ ID NO: 1625215 - RNA, 21 nt, Human
aagcagaggaaggagaggaga

SEQ ID NO: 1625216 - RNA, 14 nt, Human
aagcagaggaagga

SEQ ID NO: 1625217 - RNA, 16 nt, Human
aagauuuaccacuugu

SEQ ID NO: 1625218 - RNA, 22 nt, Human
aagaaauuaugugccagauuua

SEQ ID NO: 1625219 - RNA, 13 nt, Human
aagaaauuaugug

SEQ ID NO: 1625220 - RNA, 13 nt, Human
aagccauguuuau

SEQ ID NO: 1625221 - RNA, 18 nt, Human
aaggcaaggcugucaauu

SEQ ID NO: 1625222 - RNA, 17 nt, Human
aaggcaaggcugucaau

SEQ ID NO: 1625223 - RNA, 12 nt, Human
aagcguggugga

SEQ ID NO: 1625224 - RNA, 20 nt, Human
aagcugcacccucaggcagg

SEQ ID NO: 1625225 - RNA, 21 nt, Human
aagcugcacccucaggcaggu

SEQ ID NO: 1625226 - RNA, 22 nt, Human
aagcugcacccucaggcaggug

SEQ ID NO: 1625227 - RNA, 18 nt, Human
aaggacauugcggacagc

SEQ ID NO: 1625228 - RNA, 13 nt, Human
aagcugggcaggu

SEQ ID NO: 1625229 - RNA, 15 nt, Human
aagcugggcagguug

SEQ ID NO: 1625230 - RNA, 11 nt, Human
aagcugggcag

SEQ ID NO: 1625231 - RNA, 20 nt, Human
aaggacuaggguccugggga

SEQ ID NO: 1625232 - RNA, 18 nt, Human
aaggacuaggguccuggg

SEQ ID NO: 1625233 - RNA, 21 nt, Human
aaggacccggaggggccuggc

SEQ ID NO: 1625234 - RNA, 18 nt, Human
aaggacccggaggggccu

SEQ ID NO: 1625235 - RNA, 16 nt, Human
aaauaguaaaaauaaa

SEQ ID NO: 1625236 - RNA, 13 nt, Human
aaauaguaaaaau

SEQ ID NO: 1625237 - RNA, 14 nt, Human
aaauauaauugaca

SEQ ID NO: 1625238 - RNA, 14 nt, Human
aaauauuuuaugau

SEQ ID NO: 1625239 - RNA, 19 nt, Human
aaauauuuuaugauccagc

SEQ ID NO: 1625240 - RNA, 18 nt, Human
aaauauuuuaugauccag

SEQ ID NO: 1625241 - RNA, 22 nt, Human
aaauacuguuuuuaacaacuau

SEQ ID NO: 1625242 - RNA, 19 nt, Human
aaaucaaauaugcaaagca

SEQ ID NO: 1625243 - RNA, 18 nt, Human
aaaucaaauaugcaaagc

SEQ ID NO: 1625244 - RNA, 18 nt, Human
aaauggaagacagcucuu

SEQ ID NO: 1625245 - RNA, 16 nt, Human
aaauggaaaugggcag

SEQ ID NO: 1625246 - RNA, 22 nt, Human
aaauggacguguuaugacucca

SEQ ID NO: 1625247 - RNA, 21 nt, Human
aaauggacguguuaugacucc

SEQ ID NO: 1625248 - RNA, 20 nt, Human
aaauggacguguuaugacuc

SEQ ID NO: 1625249 - RNA, 18 nt, Human
aaauggcuuccuggcaau

SEQ ID NO: 1625250 - RNA, 20 nt, Human
aaauggacuguggugacuuu

SEQ ID NO: 1625251 - RNA, 19 nt, Human
aaauggacuguggugacuu

SEQ ID NO: 1625252 - RNA, 12 nt, Human
aaauaacaauga

SEQ ID NO: 1625253 - RNA, 22 nt, Human
aaauaaaauuaaagcugaaaac

SEQ ID NO: 1625254 - RNA, 14 nt, Human
aaagugcugggauu

SEQ ID NO: 1625255 - RNA, 11 nt, Human
aaagugcuggg

SEQ ID NO: 1625256 - RNA, 22 nt, Human
aaagucucuggaauuugaaaca

SEQ ID NO: 1625257 - RNA, 20 nt, Human
aaagucucuggaauuugaaa

SEQ ID NO: 1625258 - RNA, 19 nt, Human
aaagucucuggaauuugaa

SEQ ID NO: 1625259 - RNA, 16 nt, Human
aaagggacugagaaau

SEQ ID NO: 1625260 - RNA, 20 nt, Human
aaagggacugagaaauuuau

SEQ ID NO: 1625261 - RNA, 13 nt, Human
aaaacacauuuuu

SEQ ID NO: 1625262 - RNA, 15 nt, Human
aaaacacauuuuucu

SEQ ID NO: 1625263 - RNA, 13 nt, Human
aaaauucagugga

SEQ ID NO: 1625264 - RNA, 18 nt, Human
aaacacuguucucugccc

SEQ ID NO: 1625265 - RNA, 17 nt, Human
aaacacucuugaaaaau

SEQ ID NO: 1625266 - RNA, 14 nt, Human
aaacacucuugaaa

SEQ ID NO: 1625267 - RNA, 13 nt, Human
aaacacucuugaa

SEQ ID NO: 1625268 - RNA, 19 nt, Human
aaaauuggggauucuuaaa

SEQ ID NO: 1625269 - RNA, 18 nt, Human
aaaauuggggauucuuaa

SEQ ID NO: 1625270 - RNA, 17 nt, Human
aaaauuggggauucuua

SEQ ID NO: 1625271 - RNA, 22 nt, Human
aaacacuguucucugcccucca

SEQ ID NO: 1625272 - RNA, 19 nt, Human
aaacacuguucucugcccu

SEQ ID NO: 1625273 - RNA, 16 nt, Human
aaagaugaaaauauuu

SEQ ID NO: 1625274 - RNA, 13 nt, Human
aaagaugaaaaua

SEQ ID NO: 1625275 - RNA, 17 nt, Human
aaagaugaaaauauuug

SEQ ID NO: 1625276 - RNA, 15 nt, Human
aaacugccagcaacg

SEQ ID NO: 1625277 - RNA, 14 nt, Human
aaacugccagcaac

SEQ ID NO: 1625278 - RNA, 17 nt, Human
aaacugacucuuaagaa

SEQ ID NO: 1625279 - RNA, 16 nt, Human
aaacugacucuuaaga

SEQ ID NO: 1625280 - RNA, 19 nt, Human
aaacugccagcaacgcagg

SEQ ID NO: 1625281 - RNA, 11 nt, Human
aaacugccccc

SEQ ID NO: 1625282 - RNA, 20 nt, Human
aaagaaaacuuguauuaugu

SEQ ID NO: 1625283 - RNA, 12 nt, Human
aaagaaaacuug

SEQ ID NO: 1625284 - RNA, 11 nt, Human
aaagaacaucc

SEQ ID NO: 1625285 - RNA, 15 nt, Human
aaagaaauuaugugc

SEQ ID NO: 1625286 - RNA, 13 nt, Human
aaagaaauuaugu

SEQ ID NO: 1625287 - RNA, 12 nt, Human
aaagaguacucu

SEQ ID NO: 1625288 - RNA, 17 nt, Human
aaagaguacucuuguuu

SEQ ID NO: 1625289 - RNA, 19 nt, Human
aacuuugaccucugcagca

SEQ ID NO: 1625290 - RNA, 20 nt, Human
aacuuugaccucugcagcaa

SEQ ID NO: 1625291 - RNA, 12 nt, Human
aacuuuuauaaa

SEQ ID NO: 1625292 - RNA, 15 nt, Human
aacuuuuauaaacuu

SEQ ID NO: 1625293 - RNA, 13 nt, Human
aacuuugaccucu

SEQ ID NO: 1625294 - RNA, 14 nt, Human
aacuuugaccucug

SEQ ID NO: 1625295 - RNA, 17 nt, Human
aacuuugaccucugcag

SEQ ID NO: 1625296 - RNA, 14 nt, Human
aagaaauguaaggg

SEQ ID NO: 1625297 - RNA, 13 nt, Human
aagaaauguaagg

SEQ ID NO: 1625298 - RNA, 16 nt, Human
aacuuuuauaaacuuu

SEQ ID NO: 1625299 - RNA, 19 nt, Human
aacuuuuauaaacuuuacc

SEQ ID NO: 1625300 - RNA, 12 nt, Human
aacuuuucugau

SEQ ID NO: 1625301 - RNA, 14 nt, Human
aacuuuucugauag

SEQ ID NO: 1625302 - RNA, 13 nt, Human
aacuuuucugaua

SEQ ID NO: 1625303 - RNA, 13 nt, Human
aacuucacauauu

SEQ ID NO: 1625304 - RNA, 16 nt, Human
aacucaccugccccuc

SEQ ID NO: 1625305 - RNA, 15 nt, Human
aacucaccugccccu

SEQ ID NO: 1625306 - RNA, 15 nt, Human
aacucaccccagccc

SEQ ID NO: 1625307 - RNA, 12 nt, Human
aacucaccccag

SEQ ID NO: 1625308 - RNA, 16 nt, Human
aacugaacucugacaa

SEQ ID NO: 1625309 - RNA, 20 nt, Human
aacugaacucugacaacaga

SEQ ID NO: 1625310 - RNA, 19 nt, Human
aacugaacucugacaacag

SEQ ID NO: 1625311 - RNA, 23 nt, Human
aacugaacucugacaacagacuu

SEQ ID NO: 1625312 - RNA, 19 nt, Human
aacuuaaauaaugugaaac

SEQ ID NO: 1625313 - RNA, 17 nt, Human
aacuuaaauaaugugaa

SEQ ID NO: 1625314 - RNA, 19 nt, Human
aacugauuuuuuuuuccuu

SEQ ID NO: 1625315 - RNA, 20 nt, Human
aacugauuuuuuuuuccuuc

SEQ ID NO: 1625316 - RNA, 17 nt, Human
aacugauuuuuuuuucc

SEQ ID NO: 1625317 - RNA, 19 nt, Human
aacugaccagccuccaugc

SEQ ID NO: 1625318 - RNA, 14 nt, Human
aacugaccagccuc

SEQ ID NO: 1625319 - RNA, 15 nt, Human
aacacgagcaggcua

SEQ ID NO: 1625320 - RNA, 19 nt, Human
aacacauuuuucuuaggga

SEQ ID NO: 1625321 - RNA, 17 nt, Human
aacaaagaaauuaugug

SEQ ID NO: 1625322 - RNA, 15 nt, Human
aacaaagaaauuaug

SEQ ID NO: 1625323 - RNA, 17 nt, Human
aaauuggggauucuuaa

SEQ ID NO: 1625324 - RNA, 16 nt, Human
aaauuggggauucuua

SEQ ID NO: 1625325 - RNA, 18 nt, Human
aaauugcauuuccugaca

SEQ ID NO: 1625326 - RNA, 22 nt, Human
aaccacuggaaaguuuaugguu

SEQ ID NO: 1625327 - RNA, 14 nt, Human
aaccagaucauugu

SEQ ID NO: 1625328 - RNA, 21 nt, Human
aacauguaauuaaguacuaug

SEQ ID NO: 1625329 - RNA, 14 nt, Human
aacauguaauuaag

SEQ ID NO: 1625330 - RNA, 23 nt, Human
aacauguaauuaaguacuaugua

SEQ ID NO: 1625331 - RNA, 22 nt, Human
aaccacucuaucaaguauuaua

SEQ ID NO: 1625332 - RNA, 17 nt, Human
aaccaguguuguggauu

SEQ ID NO: 1625333 - RNA, 22 nt, Human
aaccaguauuguacaaaguauu

SEQ ID NO: 1625334 - RNA, 21 nt, Human
aaccaguauuguacaaaguau

SEQ ID NO: 1625335 - RNA, 20 nt, Human
aaccaguauuguacaaagua

SEQ ID NO: 1625336 - RNA, 22 nt, Human
aacaugcuacacacugcauguu

SEQ ID NO: 1625337 - RNA, 13 nt, Human
aacaugauuuggg

SEQ ID NO: 1625338 - RNA, 17 nt, Human
aacagcuggugcccugc

SEQ ID NO: 1625339 - RNA, 13 nt, Human
aacagcucgacuu

SEQ ID NO: 1625340 - RNA, 14 nt, Human
aacccuggugacca

SEQ ID NO: 1625341 - RNA, 14 nt, Human
acucccccaggugg

SEQ ID NO: 1625342 - RNA, 17 nt, Human
acuccccugcugggugu

SEQ ID NO: 1625343 - RNA, 13 nt, Human
acuccccugcugg

SEQ ID NO: 1625344 - RNA, 12 nt, Human
acuccccuccuu

SEQ ID NO: 1625345 - RNA, 14 nt, Human
acucaguggggagg

SEQ ID NO: 1625346 - RNA, 14 nt, Human
acucaaaucaagaa

SEQ ID NO: 1625347 - RNA, 11 nt, Human
acuauaaugua

SEQ ID NO: 1625348 - RNA, 16 nt, Human
acucaaacucuuaaaa

SEQ ID NO: 1625349 - RNA, 17 nt, Human
acucaaacucuuaaaac

SEQ ID NO: 1625350 - RNA, 14 nt, Human
acuagcuauggugu

SEQ ID NO: 1625351 - RNA, 15 nt, Human
acuaggguccugggg

SEQ ID NO: 1625352 - RNA, 16 nt, Human
acuaggguccugggga

SEQ ID NO: 1625353 - RNA, 13 nt, Human
acucccuuucaac

SEQ ID NO: 1625354 - RNA, 12 nt, Human
acucccuuucaa

SEQ ID NO: 1625355 - RNA, 18 nt, Human
acucuacccucuuagaaa

SEQ ID NO: 1625356 - RNA, 21 nt, Human
acucuacccucuuagaaaaac

SEQ ID NO: 1625357 - RNA, 14 nt, Human
acucuaucaaguau

SEQ ID NO: 1625358 - RNA, 16 nt, Human
acucuaucaaguauua

SEQ ID NO: 1625359 - RNA, 21 nt, Human
acucuaucaaguauuauaccu

SEQ ID NO: 1625360 - RNA, 16 nt, Human
acucugugucaggugg

SEQ ID NO: 1625361 - RNA, 19 nt, Human
acucugugucagguggggc

SEQ ID NO: 1625362 - RNA, 18 nt, Human
acucuuaaaacccaagug

SEQ ID NO: 1625363 - RNA, 11 nt, Human
acucuuaaaac

SEQ ID NO: 1625364 - RNA, 16 nt, Human
acuaagagagaaugag

SEQ ID NO: 1625365 - RNA, 17 nt, Human
acguggcugcuucaagg

SEQ ID NO: 1625366 - RNA, 15 nt, Human
acguggcugcuucaa

SEQ ID NO: 1625367 - RNA, 14 nt, Human
acguggcugcuuca

SEQ ID NO: 1625368 - RNA, 13 nt, Human
acguggcugcuuc

SEQ ID NO: 1625369 - RNA, 18 nt, Human
acgcugugcugcccugcc

SEQ ID NO: 1625370 - RNA, 17 nt, Human
acgcugugcugcccugc

SEQ ID NO: 1625371 - RNA, 16 nt, Human
acgcugugcugcccug

SEQ ID NO: 1625372 - RNA, 17 nt, Human
acgccagauucuuuccu

SEQ ID NO: 1625373 - RNA, 15 nt, Human
acuaaguuuuuaugg

SEQ ID NO: 1625374 - RNA, 22 nt, Human
acuaaguuuuuauggcuuuugu

SEQ ID NO: 1625375 - RNA, 12 nt, Human
acgauuucuguu

SEQ ID NO: 1625376 - RNA, 13 nt, Human
acgauuucuguuu

SEQ ID NO: 1625377 - RNA, 14 nt, Human
acgauuucuguuua

SEQ ID NO: 1625378 - RNA, 17 nt, Human
acgauuucuguuuagau

SEQ ID NO: 1625379 - RNA, 18 nt, Human
acgccacugcacuauagc

SEQ ID NO: 1625380 - RNA, 18 nt, Human
accucugcacaagcugca

SEQ ID NO: 1625381 - RNA, 16 nt, Human
accucugcacaagcug

SEQ ID NO: 1625382 - RNA, 21 nt, Human
accucugcacaagcugcaccc

SEQ ID NO: 1625383 - RNA, 15 nt, Human
accucugcagcaaua

SEQ ID NO: 1625384 - RNA, 23 nt, Human
accugccccucaacucuccucca

SEQ ID NO: 1625385 - RNA, 18 nt, Human
accugccccuccucucug

SEQ ID NO: 1625386 - RNA, 14 nt, Human
accugccccuccuc

SEQ ID NO: 1625387 - RNA, 21 nt, Human
accugcccaaccugcucuccu

SEQ ID NO: 1625388 - RNA, 23 nt, Human
accuuucaauaggaaaaacugau

SEQ ID NO: 1625389 - RNA, 21 nt, Human
accuuucaauaggaaaaacug

SEQ ID NO: 1625390 - RNA, 17 nt, Human
accuuucaauaggaaaa

SEQ ID NO: 1625391 - RNA, 14 nt, Human
accuuggcugcagg

SEQ ID NO: 1625392 - RNA, 16 nt, Human
accuuucaauaggaaa

SEQ ID NO: 1625393 - RNA, 13 nt, Human
accuuuauucugg

SEQ ID NO: 1625394 - RNA, 12 nt, Human
accuuuauucug

SEQ ID NO: 1625395 - RNA, 12 nt, Human
accuuggcugca

SEQ ID NO: 1625396 - RNA, 14 nt, Human
accuuggcucaagu

SEQ ID NO: 1625397 - RNA, 22 nt, Human
accugccccuccucucugcccu

SEQ ID NO: 1625398 - RNA, 20 nt, Human
accugccccuccucucugcc

SEQ ID NO: 1625399 - RNA, 23 nt, Human
acuuauuguagcauccuggaaua

SEQ ID NO: 1625400 - RNA, 20 nt, Human
acuuauuguagcauccugga

SEQ ID NO: 1625401 - RNA, 19 nt, Human
acuucacauauugauuucc

SEQ ID NO: 1625402 - RNA, 13 nt, Human
acuguuucaaacu

SEQ ID NO: 1625403 - RNA, 21 nt, Human
acuuggucugugagaugcuag

SEQ ID NO: 1625404 - RNA, 18 nt, Human
acuuguaaaugugguaaa

SEQ ID NO: 1625405 - RNA, 20 nt, Human
acuuguaaaugugguaaaga

SEQ ID NO: 1625406 - RNA, 15 nt, Human
acuuggucugugaga

SEQ ID NO: 1625407 - RNA, 14 nt, Human
acuuggucugugag

SEQ ID NO: 1625408 - RNA, 19 nt, Human
acuuguaaaggaauuuaaa

SEQ ID NO: 1625409 - RNA, 20 nt, Human
acuuguaaaggaauuuaaaa

SEQ ID NO: 1625410 - RNA, 19 nt, Human
acuucugccauauucuguu

SEQ ID NO: 1625411 - RNA, 21 nt, Human
acuucuuuaauuuuggaauuu

SEQ ID NO: 1625412 - RNA, 23 nt, Human
acuucacauauugauuuccguua

SEQ ID NO: 1625413 - RNA, 18 nt, Human
acuucugccauauucugu

SEQ ID NO: 1625414 - RNA, 22 nt, Human
acuucugccagcauaauacuug

SEQ ID NO: 1625415 - RNA, 12 nt, Human
acugucuucagu

SEQ ID NO: 1625416 - RNA, 16 nt, Human
acugugccaugugcca

SEQ ID NO: 1625417 - RNA, 23 nt, Human
acugguggcccgacagccuggca

SEQ ID NO: 1625418 - RNA, 22 nt, Human
acugguggcccgacagccuggc

SEQ ID NO: 1625419 - RNA, 21 nt, Human
acugguggcccgacagccugg

SEQ ID NO: 1625420 - RNA, 19 nt, Human
acugucucaagagggcacu

SEQ ID NO: 1625421 - RNA, 14 nt, Human
acuggaagcacagc

SEQ ID NO: 1625422 - RNA, 15 nt, Human
acuggaagcacagcu

SEQ ID NO: 1625423 - RNA, 16 nt, Human
acuggaagcacagcuu

SEQ ID NO: 1625424 - RNA, 20 nt, Human
acugcccccucugcccugcg

SEQ ID NO: 1625425 - RNA, 18 nt, Human
acugcccccucugcccug

SEQ ID NO: 1625426 - RNA, 19 nt, Human
acugcccccucugcccugc

SEQ ID NO: 1625427 - RNA, 14 nt, Human
acuggagaaaaugg

SEQ ID NO: 1625428 - RNA, 23 nt, Human
agaaaauggacguguuaugacuc

SEQ ID NO: 1625429 - RNA, 22 nt, Human
agaaaauggacguguuaugacu

SEQ ID NO: 1625430 - RNA, 14 nt, Human
agaaaauaacaaua

SEQ ID NO: 1625431 - RNA, 20 nt, Human
agaaaauggacguguuauga

SEQ ID NO: 1625432 - RNA, 15 nt, Human
agaaaauggacgugu

SEQ ID NO: 1625433 - RNA, 23 nt, Human
agaaaauggaagacagcucuuau

SEQ ID NO: 1625434 - RNA, 19 nt, Human
acuuuuauaaacuuuaccu

SEQ ID NO: 1625435 - RNA, 22 nt, Human
acuuuuauaaacuuuaccuuuu

SEQ ID NO: 1625436 - RNA, 12 nt, Human
acuuuucugaua

SEQ ID NO: 1625437 - RNA, 21 nt, Human
agaaaaguugaauuuuacaug

SEQ ID NO: 1625438 - RNA, 18 nt, Human
agaaaaguugaauuuuac

SEQ ID NO: 1625439 - RNA, 23 nt, Human
acuuuagggaaguacuuuuggca

SEQ ID NO: 1625440 - RNA, 23 nt, Human
acuuuccuucauucaacccaccu

SEQ ID NO: 1625441 - RNA, 23 nt, Human
acuuuguucuggcucuuccaggc

SEQ ID NO: 1625442 - RNA, 16 nt, Human
acuuucuagccagagg

SEQ ID NO: 1625443 - RNA, 23 nt, Human
agaaaggaggggauagagagaga

SEQ ID NO: 1625444 - RNA, 20 nt, Human
agaaaggaggggauagagag

SEQ ID NO: 1625445 - RNA, 18 nt, Human
agaaauaaaguuucuguu

SEQ ID NO: 1625446 - RNA, 15 nt, Human
agaaauaaaguuucu

SEQ ID NO: 1625447 - RNA, 16 nt, Human
agaaaggauaaaguug

SEQ ID NO: 1625448 - RNA, 20 nt, Human
acaagucagucauucagaua

SEQ ID NO: 1625449 - RNA, 23 nt, Human
acaaguaugaauaaagacaccua

SEQ ID NO: 1625450 - RNA, 21 nt, Human
acaaguaugaauaaagacacc

SEQ ID NO: 1625451 - RNA, 13 nt, Human
aauuuugaaaaac

SEQ ID NO: 1625452 - RNA, 19 nt, Human
acaaaauggaauacucuua

SEQ ID NO: 1625453 - RNA, 15 nt, Human
acaaaauggaauacu

SEQ ID NO: 1625454 - RNA, 20 nt, Human
acaaaauguaggguuauaau

SEQ ID NO: 1625455 - RNA, 20 nt, Human
acaaaauggaauacucuuau

SEQ ID NO: 1625456 - RNA, 13 nt, Human
acaacuauauugu

SEQ ID NO: 1625457 - RNA, 18 nt, Human
acaacuaugauuuggaaa

SEQ ID NO: 1625458 - RNA, 13 nt, Human
acaaagacugagu

SEQ ID NO: 1625459 - RNA, 15 nt, Human
acaaacgggcucagc

SEQ ID NO: 1625460 - RNA, 21 nt, Human
acaaaccuguuucugcagcca

SEQ ID NO: 1625461 - RNA, 18 nt, Human
acacaaacgggcucagca

SEQ ID NO: 1625462 - RNA, 18 nt, Human
acaauuuuguuucuguac

SEQ ID NO: 1625463 - RNA, 17 nt, Human
acaauuuuguuucugua

SEQ ID NO: 1625464 - RNA, 15 nt, Human
acaauuuuguuucug

SEQ ID NO: 1625465 - RNA, 14 nt, Human
acaauuuuguuucu

SEQ ID NO: 1625466 - RNA, 16 nt, Human
acaauuuauuauggca

SEQ ID NO: 1625467 - RNA, 15 nt, Human
acaauuuauuauggc

SEQ ID NO: 1625468 - RNA, 14 nt, Human
acaccacuacauuc

SEQ ID NO: 1625469 - RNA, 13 nt, Human
acaccagagccca

SEQ ID NO: 1625470 - RNA, 12 nt, Human
acaccagagccc

SEQ ID NO: 1625471 - RNA, 19 nt, Human
acacgcuccuuccucugag

SEQ ID NO: 1625472 - RNA, 17 nt, Human
acacgcuccuuccucug

SEQ ID NO: 1625473 - RNA, 12 nt, Human
acacagcucugu

SEQ ID NO: 1625474 - RNA, 11 nt, Human
acacagcucug

SEQ ID NO: 1625475 - RNA, 14 nt, Human
acacagcucugucc

SEQ ID NO: 1625476 - RNA, 15 nt, Human
acacuaaccacgcug

SEQ ID NO: 1625477 - RNA, 14 nt, Human
acacuaaccacgcu

SEQ ID NO: 1625478 - RNA, 15 nt, Human
acacggacacucaaa

SEQ ID NO: 1625479 - RNA, 14 nt, Human
acagagucucacug

SEQ ID NO: 1625480 - RNA, 12 nt, Human
acagagucucac

SEQ ID NO: 1625481 - RNA, 22 nt, Human
acagaggggguggccucccaac

SEQ ID NO: 1625482 - RNA, 18 nt, Human
acagcaguugaaaagacu

SEQ ID NO: 1625483 - RNA, 15 nt, Human
acagcaguugaaaag

SEQ ID NO: 1625484 - RNA, 23 nt, Human
acagagucucacuguugcccagg

SEQ ID NO: 1625485 - RNA, 19 nt, Human
acagagucucacuguugcc

SEQ ID NO: 1625486 - RNA, 17 nt, Human
acagagucucacuguug

SEQ ID NO: 1625487 - RNA, 15 nt, Human
acagccagacuggca

SEQ ID NO: 1625488 - RNA, 13 nt, Human
acagccagacugg

SEQ ID NO: 1625489 - RNA, 16 nt, Human
acagccagacuggcac

SEQ ID NO: 1625490 - RNA, 15 nt, Human
acagccaugauucuu

SEQ ID NO: 1625491 - RNA, 17 nt, Human
acacugugcugagucug

SEQ ID NO: 1625492 - RNA, 21 nt, Human
acagaacacauaauucaggaa

SEQ ID NO: 1625493 - RNA, 23 nt, Human
acaggugugaaccaccacaccca

SEQ ID NO: 1625494 - RNA, 20 nt, Human
acaggugugaaccaccacac

SEQ ID NO: 1625495 - RNA, 21 nt, Human
acaggugugagccaccacgcc

SEQ ID NO: 1625496 - RNA, 22 nt, Human
acaggugugagccaccacgccc

SEQ ID NO: 1625497 - RNA, 16 nt, Human
acaggcaagcaccucc

SEQ ID NO: 1625498 - RNA, 15 nt, Human
acaggcaagcaccuc

SEQ ID NO: 1625499 - RNA, 18 nt, Human
acaggcaagcaccuccug

SEQ ID NO: 1625500 - RNA, 19 nt, Human
acaggcaagcaccuccugc

SEQ ID NO: 1625501 - RNA, 21 nt, Human
acagcugcucaauaaaguaca

SEQ ID NO: 1625502 - RNA, 20 nt, Human
acagcucugcauacucauua

SEQ ID NO: 1625503 - RNA, 15 nt, Human
acagcuccuucuguc

SEQ ID NO: 1625504 - RNA, 14 nt, Human
acagcugccuggga

SEQ ID NO: 1625505 - RNA, 13 nt, Human
acagcucuguccu

SEQ ID NO: 1625506 - RNA, 23 nt, Human
acagcugccugggaucccucauc

SEQ ID NO: 1625507 - RNA, 14 nt, Human
acagcuccuucugu

SEQ ID NO: 1625508 - RNA, 13 nt, Human
acagcuccuucug

SEQ ID NO: 1625509 - RNA, 12 nt, Human
acagcuccuucu

SEQ ID NO: 1625510 - RNA, 15 nt, Human
acccacaagaaauga

SEQ ID NO: 1625511 - RNA, 16 nt, Human
acccaaguccaagcau

SEQ ID NO: 1625512 - RNA, 16 nt, Human
acccaagggccuggcc

SEQ ID NO: 1625513 - RNA, 13 nt, Human
acccaagggccug

SEQ ID NO: 1625514 - RNA, 18 nt, Human
acccaugcugcccuguga

SEQ ID NO: 1625515 - RNA, 17 nt, Human
acccaugcugcccugug

SEQ ID NO: 1625516 - RNA, 19 nt, Human
acccaugcugcccugugag

SEQ ID NO: 1625517 - RNA, 18 nt, Human
accccgaccaccugccca

SEQ ID NO: 1625518 - RNA, 15 nt, Human
accccggccaccugc

SEQ ID NO: 1625519 - RNA, 22 nt, Human
accccuaaagagauacuuugau

SEQ ID NO: 1625520 - RNA, 18 nt, Human
accaucccugaaggcccc

SEQ ID NO: 1625521 - RNA, 12 nt, Human
accaucauugaa

SEQ ID NO: 1625522 - RNA, 17 nt, Human
accaucaugucuggcua

SEQ ID NO: 1625523 - RNA, 16 nt, Human
accaucaugucuggcu

SEQ ID NO: 1625524 - RNA, 22 nt, Human
accaucccugaaggccccgccc

SEQ ID NO: 1625525 - RNA, 21 nt, Human
accaucccugaaggccccgcc

SEQ ID NO: 1625526 - RNA, 14 nt, Human
accaucaugucugg

SEQ ID NO: 1625527 - RNA, 20 nt, Human
accccucaacaccucugcac

SEQ ID NO: 1625528 - RNA, 14 nt, Human
acauuuguauaaaa

SEQ ID NO: 1625529 - RNA, 18 nt, Human
acauuugcucauggaauu

SEQ ID NO: 1625530 - RNA, 17 nt, Human
accagcagccuggaccc

SEQ ID NO: 1625531 - RNA, 14 nt, Human
accagcagccugga

SEQ ID NO: 1625532 - RNA, 15 nt, Human
accacuacauucugu

SEQ ID NO: 1625533 - RNA, 15 nt, Human
accacguuucuaaag

SEQ ID NO: 1625534 - RNA, 19 nt, Human
accacguuucuaaaggcua

SEQ ID NO: 1625535 - RNA, 14 nt, Human
accacuacauucug

SEQ ID NO: 1625536 - RNA, 14 nt, Human
accacgcccggcua

SEQ ID NO: 1625537 - RNA, 20 nt, Human
accacgcccggcuaauuuuu

SEQ ID NO: 1625538 - RNA, 13 nt, Human
acauguuacaaca

SEQ ID NO: 1625539 - RNA, 21 nt, Human
acauguuuuucuucucccuca

SEQ ID NO: 1625540 - RNA, 23 nt, Human
acaugcacagcuaacauggaagu

SEQ ID NO: 1625541 - RNA, 20 nt, Human
acaugcacagcuaacaugga

SEQ ID NO: 1625542 - RNA, 19 nt, Human
acaugcaaggucauuuuuu

SEQ ID NO: 1625543 - RNA, 20 nt, Human
acaucagcacgauuucuguu

SEQ ID NO: 1625544 - RNA, 21 nt, Human
acaucagcacgauuucuguuu

SEQ ID NO: 1625545 - RNA, 22 nt, Human
acaucagcacgauuucuguuua

SEQ ID NO: 1625546 - RNA, 20 nt, Human
acauaaauuuaguauuuugu

SEQ ID NO: 1625547 - RNA, 18 nt, Human
acauaaaucugugaacuu

SEQ ID NO: 1625548 - RNA, 15 nt, Human
acauaaaucugugaa

SEQ ID NO: 1625549 - RNA, 14 nt, Human
acauaaaucuguga

SEQ ID NO: 1625550 - RNA, 23 nt, Human
acauaaacaagaccacguuucua

SEQ ID NO: 1625551 - RNA, 22 nt, Human
auaugccugggcagaaggaaga

SEQ ID NO: 1625552 - RNA, 14 nt, Human
auaugcuauuucua

SEQ ID NO: 1625553 - RNA, 19 nt, Human
auaugcuuauacacuuaca

SEQ ID NO: 1625554 - RNA, 23 nt, Human
auaugcuucuguuuuauaauuuu

SEQ ID NO: 1625555 - RNA, 16 nt, Human
auaugcuuauacacuu

SEQ ID NO: 1625556 - RNA, 14 nt, Human
auaugcuuauacac

SEQ ID NO: 1625557 - RNA, 21 nt, Human
auaugcuuauacacuuacacu

SEQ ID NO: 1625558 - RNA, 18 nt, Human
auaucacuugucaauaaa

SEQ ID NO: 1625559 - RNA, 22 nt, Human
auauuuauuacuguaagaaaau

SEQ ID NO: 1625560 - RNA, 18 nt, Human
auauuuauuuuaauaaug

SEQ ID NO: 1625561 - RNA, 19 nt, Human
auauuuauuacuguaagaa

SEQ ID NO: 1625562 - RNA, 14 nt, Human
auauuuauuacugu

SEQ ID NO: 1625563 - RNA, 16 nt, Human
auauuuauaaaaauaa

SEQ ID NO: 1625564 - RNA, 18 nt, Human
auauuuaguguucauaaa

SEQ ID NO: 1625565 - RNA, 13 nt, Human
auauucaggaagc

SEQ ID NO: 1625566 - RNA, 16 nt, Human
auauucaggaagcuca

SEQ ID NO: 1625567 - RNA, 14 nt, Human
auauucaggaagcu

SEQ ID NO: 1625568 - RNA, 17 nt, Human
auauucaggaagcucag

SEQ ID NO: 1625569 - RNA, 23 nt, Human
auauuucagauaaucacaauaca

SEQ ID NO: 1625570 - RNA, 16 nt, Human
auaguaugguggcugg

SEQ ID NO: 1625571 - RNA, 15 nt, Human
auauaagugauugcu

SEQ ID NO: 1625572 - RNA, 15 nt, Human
auauaaguguguguu

SEQ ID NO: 1625573 - RNA, 15 nt, Human
auaguaugguggcug

SEQ ID NO: 1625574 - RNA, 19 nt, Human
auacuugaaaauuaacaug

SEQ ID NO: 1625575 - RNA, 16 nt, Human
auacuugaaaauuaac

SEQ ID NO: 1625576 - RNA, 15 nt, Human
auacuugaaaauuaa

SEQ ID NO: 1625577 - RNA, 16 nt, Human
auauaggaacuuaaau

SEQ ID NO: 1625578 - RNA, 14 nt, Human
auaauuacuauguc

SEQ ID NO: 1625579 - RNA, 20 nt, Human
auacaauuuuguuucuguac

SEQ ID NO: 1625580 - RNA, 19 nt, Human
auacaauuuuguuucugua

SEQ ID NO: 1625581 - RNA, 22 nt, Human
auacccccugcaaagcccagcu

SEQ ID NO: 1625582 - RNA, 12 nt, Human
auaccugucccc

SEQ ID NO: 1625583 - RNA, 13 nt, Human
auaccuguccccc

SEQ ID NO: 1625584 - RNA, 19 nt, Human
auaaugugaaacuggauua

SEQ ID NO: 1625585 - RNA, 21 nt, Human
auaaugugaaacuggauuaaa

SEQ ID NO: 1625586 - RNA, 22 nt, Human
auaauuaacauguuaaaccaug

SEQ ID NO: 1625587 - RNA, 21 nt, Human
auaauuaacauguuaaaccau

SEQ ID NO: 1625588 - RNA, 20 nt, Human
auaauuaacauguuaaacca

SEQ ID NO: 1625589 - RNA, 18 nt, Human
auaaugugaaacuggauu

SEQ ID NO: 1625590 - RNA, 22 nt, Human
auaaguguguguuuuucauaaa

SEQ ID NO: 1625591 - RNA, 19 nt, Human
auaaguguguguuuuucau

SEQ ID NO: 1625592 - RNA, 19 nt, Human
auaaguauuuaauucaugu

SEQ ID NO: 1625593 - RNA, 13 nt, Human
agucaaauugugu

SEQ ID NO: 1625594 - RNA, 17 nt, Human
agucaaauugugugaaa

SEQ ID NO: 1625595 - RNA, 15 nt, Human
agucaaauuguguga

SEQ ID NO: 1625596 - RNA, 16 nt, Human
agucaagugaaaaagg

SEQ ID NO: 1625597 - RNA, 18 nt, Human
agucaaggguaggguggg

SEQ ID NO: 1625598 - RNA, 20 nt, Human
agucaagugaaaaaggagga

SEQ ID NO: 1625599 - RNA, 21 nt, Human
aguccaagcauuuagauguau

SEQ ID NO: 1625600 - RNA, 16 nt, Human
aguccaagcauuuaga

SEQ ID NO: 1625601 - RNA, 23 nt, Human
agucauucagauaugauucaaau

SEQ ID NO: 1625602 - RNA, 20 nt, Human
agucauucagauaugauuca

SEQ ID NO: 1625603 - RNA, 15 nt, Human
agucauucagauaug

SEQ ID NO: 1625604 - RNA, 13 nt, Human
agugauccuccca

SEQ ID NO: 1625605 - RNA, 18 nt, Human
agugauuaccagggacug

SEQ ID NO: 1625606 - RNA, 19 nt, Human
agugauucucaugccucag

SEQ ID NO: 1625607 - RNA, 18 nt, Human
agugauucucaugccuca

SEQ ID NO: 1625608 - RNA, 23 nt, Human
agugugacaaggauugcuacugu

SEQ ID NO: 1625609 - RNA, 18 nt, Human
aguuguaccgcaauguga

SEQ ID NO: 1625610 - RNA, 15 nt, Human
aguugaauuuuacau

SEQ ID NO: 1625611 - RNA, 20 nt, Human
aguugaauuuauuggcuuuu

SEQ ID NO: 1625612 - RNA, 19 nt, Human
aguuguaccgcaaugugac

SEQ ID NO: 1625613 - RNA, 18 nt, Human
aguuacagacaaagcgug

SEQ ID NO: 1625614 - RNA, 19 nt, Human
aguugaauuuauuggcuuu

SEQ ID NO: 1625615 - RNA, 17 nt, Human
aguugaauuuauuggcu

SEQ ID NO: 1625616 - RNA, 13 nt, Human
aguugaauuuauu

SEQ ID NO: 1625617 - RNA, 11 nt, Human
aguugaauuua

SEQ ID NO: 1625618 - RNA, 19 nt, Human
aguuguuacauuuuuaagu

SEQ ID NO: 1625619 - RNA, 16 nt, Human
aguuguuacauuuuua

SEQ ID NO: 1625620 - RNA, 13 nt, Human
aguuguuacauuu

SEQ ID NO: 1625621 - RNA, 15 nt, Human
aguuguuacauuuuu

SEQ ID NO: 1625622 - RNA, 16 nt, Human
auguaaguaaacgguc

SEQ ID NO: 1625623 - RNA, 20 nt, Human
auguaagggaaacugccagc

SEQ ID NO: 1625624 - RNA, 17 nt, Human
auguaagcucuacugag

SEQ ID NO: 1625625 - RNA, 22 nt, Human
auguaagggaaacugccagcaa

SEQ ID NO: 1625626 - RNA, 21 nt, Human
auguaagggaaacugccagca

SEQ ID NO: 1625627 - RNA, 16 nt, Human
augucaaucagccuag

SEQ ID NO: 1625628 - RNA, 17 nt, Human
auguacauguacugauu

SEQ ID NO: 1625629 - RNA, 17 nt, Human
augucacaggcaggucc

SEQ ID NO: 1625630 - RNA, 16 nt, Human
augucacaggcagguc

SEQ ID NO: 1625631 - RNA, 15 nt, Human
augucacaggcaggu

SEQ ID NO: 1625632 - RNA, 14 nt, Human
auguguaaguauuc

SEQ ID NO: 1625633 - RNA, 13 nt, Human
auuaaauucuugc

SEQ ID NO: 1625634 - RNA, 16 nt, Human
auuaaaugcccagccc

SEQ ID NO: 1625635 - RNA, 15 nt, Human
auuaaaugcccagcc

SEQ ID NO: 1625636 - RNA, 14 nt, Human
auuaaaugcccagc

SEQ ID NO: 1625637 - RNA, 18 nt, Human
auguuuuaagaggcaggg

SEQ ID NO: 1625638 - RNA, 16 nt, Human
auguuuuaagaggcag

SEQ ID NO: 1625639 - RNA, 14 nt, Human
auguuugccucugc

SEQ ID NO: 1625640 - RNA, 18 nt, Human
auguucucugaggacacu

SEQ ID NO: 1625641 - RNA, 22 nt, Human
auguucugacccugcuucaaau

SEQ ID NO: 1625642 - RNA, 20 nt, Human
auguucuuaguggauguucu

SEQ ID NO: 1625643 - RNA, 15 nt, Human
auguucuuaauucuu

SEQ ID NO: 1625644 - RNA, 20 nt, Human
auguucuuucacccuuuucu

SEQ ID NO: 1625645 - RNA, 18 nt, Human
auguuucuuuguaaugaa

SEQ ID NO: 1625646 - RNA, 14 nt, Human
augccuuuucccaa

SEQ ID NO: 1625647 - RNA, 21 nt, Human
augccuuuguacuuuagggaa

SEQ ID NO: 1625648 - RNA, 16 nt, Human
augaugugugaaaacu

SEQ ID NO: 1625649 - RNA, 23 nt, Human
augauguauguugaagccuuugu

SEQ ID NO: 1625650 - RNA, 17 nt, Human
augcacacauuuuuuaa

SEQ ID NO: 1625651 - RNA, 19 nt, Human
augcacacauuuuuuaaau

SEQ ID NO: 1625652 - RNA, 22 nt, Human
augcacacauuuuuuaaaugca

SEQ ID NO: 1625653 - RNA, 14 nt, Human
augcacagcuaaca

SEQ ID NO: 1625654 - RNA, 23 nt, Human
augcacacauuuuuuaaaugcac

SEQ ID NO: 1625655 - RNA, 21 nt, Human
augcacagcuaacauggaagu

SEQ ID NO: 1625656 - RNA, 18 nt, Human
augccugguggcagcugc

SEQ ID NO: 1625657 - RNA, 17 nt, Human
augccugguggcagcug

SEQ ID NO: 1625658 - RNA, 16 nt, Human
augccugguggcagcu

SEQ ID NO: 1625659 - RNA, 15 nt, Human
augccugguggcagc

SEQ ID NO: 1625660 - RNA, 11 nt, Human
augccuggugg

SEQ ID NO: 1625661 - RNA, 17 nt, Human
augccugggcagaagga

SEQ ID NO: 1625662 - RNA, 23 nt, Human
augccuggauggggcugcaccgg

SEQ ID NO: 1625663 - RNA, 21 nt, Human
augccuggauggggcugcacc

SEQ ID NO: 1625664 - RNA, 10 nt, Human
augcauuuga

SEQ ID NO: 1625665 - RNA, 12 nt, Human
augcauuugaaa

SEQ ID NO: 1625666 - RNA, 18 nt, Human
augcauuugaaaauuuug

SEQ ID NO: 1625667 - RNA, 23 nt, Human
augcaugaaguaauaugcacaca

SEQ ID NO: 1625668 - RNA, 20 nt, Human
auggaaaugggcagagcaga

SEQ ID NO: 1625669 - RNA, 19 nt, Human
auggaaaugggcagagcag

SEQ ID NO: 1625670 - RNA, 13 nt, Human
auggaaauguuua

SEQ ID NO: 1625671 - RNA, 22 nt, Human
auggagccugcacggugaaugg

SEQ ID NO: 1625672 - RNA, 18 nt, Human
auggagccugcacgguga

SEQ ID NO: 1625673 - RNA, 16 nt, Human
auggaggaaaaccaag

SEQ ID NO: 1625674 - RNA, 15 nt, Human
augggaaugaauguc

SEQ ID NO: 1625675 - RNA, 21 nt, Human
augggaaugaaugucagugug

SEQ ID NO: 1625676 - RNA, 23 nt, Human
auggcugccaaugggagcucaug

SEQ ID NO: 1625677 - RNA, 18 nt, Human
auggcuggagcuagaauu

SEQ ID NO: 1625678 - RNA, 23 nt, Human
augaaaaaauauauaucaaauau

SEQ ID NO: 1625679 - RNA, 22 nt, Human
augaaaaaauauauaucaaaua

SEQ ID NO: 1625680 - RNA, 17 nt, Human
augaaaaaauauauauc

SEQ ID NO: 1625681 - RNA, 14 nt, Human
augaaaaaauauau

SEQ ID NO: 1625682 - RNA, 16 nt, Human
augacuccagaauuuc

SEQ ID NO: 1625683 - RNA, 12 nt, Human
augacuccagaa

SEQ ID NO: 1625684 - RNA, 17 nt, Human
augacuccagaauuucc

SEQ ID NO: 1625685 - RNA, 12 nt, Human
augacccagugg

SEQ ID NO: 1625686 - RNA, 21 nt, Human
augaagcuuuuaugugaaaca

SEQ ID NO: 1625687 - RNA, 20 nt, Human
augaagcuuuuaugugaaac

SEQ ID NO: 1625688 - RNA, 19 nt, Human
augaagcuuuuaugugaaa

SEQ ID NO: 1625689 - RNA, 18 nt, Human
augaagcuuuuaugugaa

SEQ ID NO: 1625690 - RNA, 14 nt, Human
augagccuggcaag

SEQ ID NO: 1625691 - RNA, 13 nt, Human
augagccuggcaa

SEQ ID NO: 1625692 - RNA, 22 nt, Human
aucuuauaauuuaaaauaugcu

SEQ ID NO: 1625693 - RNA, 17 nt, Human
aucugggccagaauuuc

SEQ ID NO: 1625694 - RNA, 15 nt, Human
aucugggccagaauu

SEQ ID NO: 1625695 - RNA, 19 nt, Human
aucuuccaacucaaacucu

SEQ ID NO: 1625696 - RNA, 22 nt, Human
aucucucgugauugauaagaac

SEQ ID NO: 1625697 - RNA, 17 nt, Human
aucuucuuuauaauucu

SEQ ID NO: 1625698 - RNA, 22 nt, Human
aucuucugaacuuggcgcugcc

SEQ ID NO: 1625699 - RNA, 17 nt, Human
aucuugaagacuuuucu

SEQ ID NO: 1625700 - RNA, 14 nt, Human
auccuccucagauc

SEQ ID NO: 1625701 - RNA, 13 nt, Human
aucgaugcagugc

SEQ ID NO: 1625702 - RNA, 22 nt, Human
auccuccaggugcacaagcucc

SEQ ID NO: 1625703 - RNA, 19 nt, Human
auccuccaggugcacaagc

SEQ ID NO: 1625704 - RNA, 14 nt, Human
auccuccaggugca

SEQ ID NO: 1625705 - RNA, 11 nt, Human
auccuccucag

SEQ ID NO: 1625706 - RNA, 23 nt, Human
auccucauacccacccccaccca

SEQ ID NO: 1625707 - RNA, 22 nt, Human
auccucauacccacccccaccc

SEQ ID NO: 1625708 - RNA, 19 nt, Human
auccucauacccaccccca

SEQ ID NO: 1625709 - RNA, 18 nt, Human
auccucauacccaccccc

SEQ ID NO: 1625710 - RNA, 13 nt, Human
aucccucauccuc

SEQ ID NO: 1625711 - RNA, 15 nt, Human
aucccuacuguaauu

SEQ ID NO: 1625712 - RNA, 14 nt, Human
aucccggcugcccu

SEQ ID NO: 1625713 - RNA, 20 nt, Human
auccacccaccucagccucc

SEQ ID NO: 1625714 - RNA, 18 nt, Human
auccacccaccucagccu

SEQ ID NO: 1625715 - RNA, 17 nt, Human
aucagcugcugaaacaa

SEQ ID NO: 1625716 - RNA, 23 nt, Human
aucagcugcuacuacuccuguag

SEQ ID NO: 1625717 - RNA, 13 nt, Human
aucagcugcuacu

SEQ ID NO: 1625718 - RNA, 12 nt, Human
aucagcugcuac

SEQ ID NO: 1625719 - RNA, 21 nt, Human
aucagccugggcaaugugaua

SEQ ID NO: 1625720 - RNA, 20 nt, Human
aucagccugggcaaugugau

SEQ ID NO: 1625721 - RNA, 11 nt, Human
aucagccuggg

SEQ ID NO: 1625722 - RNA, 22 nt, Human
aucaccugucuugccuuuuuca

SEQ ID NO: 1625723 - RNA, 21 nt, Human
aucaccugucuugccuuuuuc

SEQ ID NO: 1625724 - RNA, 12 nt, Human
aucaccugucuu

SEQ ID NO: 1625725 - RNA, 13 nt, Human
aucaccugcccug

SEQ ID NO: 1625726 - RNA, 12 nt, Human
aucaccugcccu

SEQ ID NO: 1625727 - RNA, 17 nt, Human
agacagcccgggcucug

SEQ ID NO: 1625728 - RNA, 20 nt, Human
agacagcccgggcucugccu

SEQ ID NO: 1625729 - RNA, 18 nt, Human
agacagcccgggcucugc

SEQ ID NO: 1625730 - RNA, 21 nt, Human
agacagcccgggcucugccuc

SEQ ID NO: 1625731 - RNA, 21 nt, Human
agaccaucccugaaggccccg

SEQ ID NO: 1625732 - RNA, 18 nt, Human
agaccaucccugaaggcc

SEQ ID NO: 1625733 - RNA, 17 nt, Human
agaccaucccugaaggc

SEQ ID NO: 1625734 - RNA, 14 nt, Human
agaccaucccugaa

SEQ ID NO: 1625735 - RNA, 13 nt, Human
agaccaucccuga

SEQ ID NO: 1625736 - RNA, 18 nt, Human
agacgggggcagagaggg

SEQ ID NO: 1625737 - RNA, 19 nt, Human
agacggagucccaccuugg

SEQ ID NO: 1625738 - RNA, 13 nt, Human
agacaaugacuua

SEQ ID NO: 1625739 - RNA, 17 nt, Human
agacaaugacuuacugu

SEQ ID NO: 1625740 - RNA, 19 nt, Human
agacaaugacuuacuguac

SEQ ID NO: 1625741 - RNA, 15 nt, Human
agacaauuuauuaug

SEQ ID NO: 1625742 - RNA, 21 nt, Human
agacaauuuauuauggcacau

SEQ ID NO: 1625743 - RNA, 17 nt, Human
agacugcauuauauuua

SEQ ID NO: 1625744 - RNA, 21 nt, Human
agagaagagauugugguuuca

SEQ ID NO: 1625745 - RNA, 10 nt, Human
agagaagaga

SEQ ID NO: 1625746 - RNA, 18 nt, Human
agagaaaguacuucucca

SEQ ID NO: 1625747 - RNA, 16 nt, Human
agagagcuucuguugc

SEQ ID NO: 1625748 - RNA, 23 nt, Human
agagagcuucuguugcugccuca

SEQ ID NO: 1625749 - RNA, 20 nt, Human
agagagcuucuguugcugcc

SEQ ID NO: 1625750 - RNA, 16 nt, Human
agagaguggcuccucc

SEQ ID NO: 1625751 - RNA, 14 nt, Human
agagaguggcuccu

SEQ ID NO: 1625752 - RNA, 15 nt, Human
agagcccuucauuug

SEQ ID NO: 1625753 - RNA, 21 nt, Human
agauaggucagugcaaauacu

SEQ ID NO: 1625754 - RNA, 16 nt, Human
agauagccaaggccaa

SEQ ID NO: 1625755 - RNA, 15 nt, Human
agauagccaaggcca

SEQ ID NO: 1625756 - RNA, 14 nt, Human
agaucuucuguggg

SEQ ID NO: 1625757 - RNA, 23 nt, Human
agauggcugugccucugccuguc

SEQ ID NO: 1625758 - RNA, 22 nt, Human
agaggggaacagacuggaagca

SEQ ID NO: 1625759 - RNA, 16 nt, Human
agaggggaagagacuu

SEQ ID NO: 1625760 - RNA, 13 nt, Human
agaggagaggggc

SEQ ID NO: 1625761 - RNA, 22 nt, Human
agauacuuggggggcugaggug

SEQ ID NO: 1625762 - RNA, 13 nt, Human
agauagccaaggc

SEQ ID NO: 1625763 - RNA, 14 nt, Human
agaguguugaaacg

SEQ ID NO: 1625764 - RNA, 19 nt, Human
agccagauuuuccugaaaa

SEQ ID NO: 1625765 - RNA, 15 nt, Human
agccagauuuuccug

SEQ ID NO: 1625766 - RNA, 22 nt, Human
agccauguuuauuacaguauaa

SEQ ID NO: 1625767 - RNA, 23 nt, Human
agccaaggccaaaggaagcacau

SEQ ID NO: 1625768 - RNA, 22 nt, Human
agccaaggccaaaggaagcaca

SEQ ID NO: 1625769 - RNA, 20 nt, Human
agccagaggagagaggaccc

SEQ ID NO: 1625770 - RNA, 23 nt, Human
agccaaagcuaggccuggccaga

SEQ ID NO: 1625771 - RNA, 20 nt, Human
agccaaagcuaggccuggcc

SEQ ID NO: 1625772 - RNA, 19 nt, Human
agccaaagcuaggccuggc

SEQ ID NO: 1625773 - RNA, 20 nt, Human
agcaugccuggauggggcug

SEQ ID NO: 1625774 - RNA, 12 nt, Human
agcaugccugga

SEQ ID NO: 1625775 - RNA, 14 nt, Human
agcaugcacaaauu

SEQ ID NO: 1625776 - RNA, 20 nt, Human
agcaguucagagcugcccuc

SEQ ID NO: 1625777 - RNA, 19 nt, Human
agcaguucagagcugcccu

SEQ ID NO: 1625778 - RNA, 21 nt, Human
agaugggagaaucacuugaac

SEQ ID NO: 1625779 - RNA, 14 nt, Human
agauguagaggaga

SEQ ID NO: 1625780 - RNA, 21 nt, Human
agcaguugaaaagacuccaaa

SEQ ID NO: 1625781 - RNA, 23 nt, Human
agcaguugaaaagacuccaaaga

SEQ ID NO: 1625782 - RNA, 16 nt, Human
agcaguucagagcugc

SEQ ID NO: 1625783 - RNA, 15 nt, Human
agcaguucagagcug

SEQ ID NO: 1625784 - RNA, 17 nt, Human
agcaguucagagcugcc

SEQ ID NO: 1625785 - RNA, 18 nt, Human
agcaguucagagcugccc

SEQ ID NO: 1625786 - RNA, 19 nt, Human
agcacuaaggugugcucug

SEQ ID NO: 1625787 - RNA, 20 nt, Human
agcacuaaggugugcucuga

SEQ ID NO: 1625788 - RNA, 21 nt, Human
agcagccacauuccugaugcu

SEQ ID NO: 1625789 - RNA, 20 nt, Human
agccgagaucacgccacugc

SEQ ID NO: 1625790 - RNA, 19 nt, Human
agccgagaucacgccacug

SEQ ID NO: 1625791 - RNA, 15 nt, Human
agcccugagcuuucu

SEQ ID NO: 1625792 - RNA, 11 nt, Human
agccccauccu

SEQ ID NO: 1625793 - RNA, 20 nt, Human
agccccaucccaaacccuuc

SEQ ID NO: 1625794 - RNA, 16 nt, Human
agccccagugcccaca

SEQ ID NO: 1625795 - RNA, 23 nt, Human
agccccauaauuuuuuuuuuccu

SEQ ID NO: 1625796 - RNA, 19 nt, Human
agccgagauugcaccacug

SEQ ID NO: 1625797 - RNA, 21 nt, Human
agccgagaucacgccacugca

SEQ ID NO: 1625798 - RNA, 20 nt, Human
agccgagauugcaccacugc

SEQ ID NO: 1625799 - RNA, 22 nt, Human
agccgcuggggccaguuggucc

SEQ ID NO: 1625800 - RNA, 14 nt, Human
agccgcuggggcca

SEQ ID NO: 1625801 - RNA, 19 nt, Human
agccucccaaagugcuggg

SEQ ID NO: 1625802 - RNA, 18 nt, Human
agccucccaaagugcugg

SEQ ID NO: 1625803 - RNA, 17 nt, Human
agccucccgaguagcug

SEQ ID NO: 1625804 - RNA, 22 nt, Human
agccucccgaauagcugggacu

SEQ ID NO: 1625805 - RNA, 20 nt, Human
agccucccgaauagcuggga

SEQ ID NO: 1625806 - RNA, 19 nt, Human
agccucccgaauagcuggg

SEQ ID NO: 1625807 - RNA, 18 nt, Human
agccucccgaauagcugg

SEQ ID NO: 1625808 - RNA, 20 nt, Human
agccucccaaagugcuggga

SEQ ID NO: 1625809 - RNA, 14 nt, Human
agguuaauguucau

SEQ ID NO: 1625810 - RNA, 17 nt, Human
agguucaaagauauuuu

SEQ ID NO: 1625811 - RNA, 13 nt, Human
agguucccuuuga

SEQ ID NO: 1625812 - RNA, 13 nt, Human
agguucagcuugu

SEQ ID NO: 1625813 - RNA, 17 nt, Human
agguucaugcaaacuuu

SEQ ID NO: 1625814 - RNA, 17 nt, Human
aggugcugccauccagg

SEQ ID NO: 1625815 - RNA, 16 nt, Human
aggugcugccauccag

SEQ ID NO: 1625816 - RNA, 14 nt, Human
aggucgaggcagga

SEQ ID NO: 1625817 - RNA, 15 nt, Human
agguggaaauaaacu

SEQ ID NO: 1625818 - RNA, 17 nt, Human
agguaaggaauaccugu

SEQ ID NO: 1625819 - RNA, 17 nt, Human
agguaaucgaccugccu

SEQ ID NO: 1625820 - RNA, 19 nt, Human
agguaaucgaccugccucg

SEQ ID NO: 1625821 - RNA, 18 nt, Human
agguaaucgaccugccuc

SEQ ID NO: 1625822 - RNA, 22 nt, Human
agguacgaaaagaggggaagag

SEQ ID NO: 1625823 - RNA, 23 nt, Human
aggucccuaauaaagcugugugg

SEQ ID NO: 1625824 - RNA, 20 nt, Human
aggucccuaauaaagcugug

SEQ ID NO: 1625825 - RNA, 19 nt, Human
aggucccuaauaaagcugu

SEQ ID NO: 1625826 - RNA, 18 nt, Human
aggucccuaauaaagcug

SEQ ID NO: 1625827 - RNA, 17 nt, Human
aggucccuaauaaagcu

SEQ ID NO: 1625828 - RNA, 20 nt, Human
agggacagaggggguggccu

SEQ ID NO: 1625829 - RNA, 13 nt, Human
agggacagagggg

SEQ ID NO: 1625830 - RNA, 12 nt, Human
agggacagaggg

SEQ ID NO: 1625831 - RNA, 21 nt, Human
agggacgcuacccgggaaggg

SEQ ID NO: 1625832 - RNA, 18 nt, Human
aggcugccucucccauca

SEQ ID NO: 1625833 - RNA, 23 nt, Human
aggcuagugugguguuuccuggc

SEQ ID NO: 1625834 - RNA, 21 nt, Human
aggcugaacuuguuuucuggg

SEQ ID NO: 1625835 - RNA, 20 nt, Human
aggcugaacuuguuuucugg

SEQ ID NO: 1625836 - RNA, 17 nt, Human
agggccuggccugagcu

SEQ ID NO: 1625837 - RNA, 16 nt, Human
agggccuggccugagc

SEQ ID NO: 1625838 - RNA, 15 nt, Human
agggccuggccugag

SEQ ID NO: 1625839 - RNA, 21 nt, Human
agggcacaccgggcacucaga

SEQ ID NO: 1625840 - RNA, 20 nt, Human
agggcacaccgggcacucag

SEQ ID NO: 1625841 - RNA, 22 nt, Human
agggcacagaaaauggaagaca

SEQ ID NO: 1625842 - RNA, 17 nt, Human
agggcacaccgggcacu

SEQ ID NO: 1625843 - RNA, 18 nt, Human
agggccuggccugagcug

SEQ ID NO: 1625844 - RNA, 19 nt, Human
agggcgggaggauguucug

SEQ ID NO: 1625845 - RNA, 21 nt, Human
aggggauagagagagaccacu

SEQ ID NO: 1625846 - RNA, 15 nt, Human
aggggcacagggucu

SEQ ID NO: 1625847 - RNA, 22 nt, Human
agcuucuguugcugccucaugc

SEQ ID NO: 1625848 - RNA, 21 nt, Human
agcuucuguugcugccucaug

SEQ ID NO: 1625849 - RNA, 15 nt, Human
aggaaaaacugauuu

SEQ ID NO: 1625850 - RNA, 13 nt, Human
aggaaaaacugau

SEQ ID NO: 1625851 - RNA, 15 nt, Human
agcuuuucccuuuuu

SEQ ID NO: 1625852 - RNA, 16 nt, Human
agcuuuucccuucuuu

SEQ ID NO: 1625853 - RNA, 13 nt, Human
agcuuuucccuuc

SEQ ID NO: 1625854 - RNA, 23 nt, Human
agcuucuguugcugccucaugcu

SEQ ID NO: 1625855 - RNA, 17 nt, Human
aggaaauccaggguggu

SEQ ID NO: 1625856 - RNA, 22 nt, Human
aggaacguaaucguguccccua

SEQ ID NO: 1625857 - RNA, 14 nt, Human
agcuguaugauucc

SEQ ID NO: 1625858 - RNA, 21 nt, Human
agcuggucccacucaguccau

SEQ ID NO: 1625859 - RNA, 14 nt, Human
agcuggguuggaaa

SEQ ID NO: 1625860 - RNA, 14 nt, Human
agcuggugcccugc

SEQ ID NO: 1625861 - RNA, 22 nt, Human
agcugggugucaagagggucug

SEQ ID NO: 1625862 - RNA, 17 nt, Human
agcugggugucaagagg

SEQ ID NO: 1625863 - RNA, 14 nt, Human
aggauguugaaaaa

SEQ ID NO: 1625864 - RNA, 20 nt, Human
aggauguucugggacacagu

SEQ ID NO: 1625865 - RNA, 17 nt, Human
aggauguugaaaaaguu

SEQ ID NO: 1625866 - RNA, 17 nt, Human
aggaggggauagagaga

SEQ ID NO: 1625867 - RNA, 12 nt, Human
aggauucuuccu

SEQ ID NO: 1625868 - RNA, 16 nt, Human
aggauucuuccucccu

SEQ ID NO: 1625869 - RNA, 22 nt, Human
aggcacugcugcccagccucca

SEQ ID NO: 1625870 - RNA, 16 nt, Human
aggcacugcugcccag

SEQ ID NO: 1625871 - RNA, 14 nt, Human
aggcacugcugccc

SEQ ID NO: 1625872 - RNA, 17 nt, Human
aggacccggaggggccu

SEQ ID NO: 1625873 - RNA, 20 nt, Human
aggaccucaggugagaagca

SEQ ID NO: 1625874 - RNA, 14 nt, Human
aggaccucagguga

SEQ ID NO: 1625875 - RNA, 18 nt, Human
aggagaggggcacagggu

SEQ ID NO: 1625876 - RNA, 16 nt, Human
aggagaggggcacagg

SEQ ID NO: 1625877 - RNA, 15 nt, Human
aggagaggagagggg

SEQ ID NO: 1625878 - RNA, 15 nt, Human
aggagagcuagcagc

SEQ ID NO: 1625879 - RNA, 20 nt, Human
aggaccccuccaugugggcu

SEQ ID NO: 1625880 - RNA, 15 nt, Human
aggaacuacugagga

SEQ ID NO: 1625881 - RNA, 16 nt, Human
cuucuuauacauuuga

SEQ ID NO: 1625882 - RNA, 13 nt, Human
cuucuuauacauu

SEQ ID NO: 1625883 - RNA, 17 nt, Human
cuucugacccaugcugc

SEQ ID NO: 1625884 - RNA, 16 nt, Human
cuucugacccaugcug

SEQ ID NO: 1625885 - RNA, 18 nt, Human
cuucugacccaugcugcc

SEQ ID NO: 1625886 - RNA, 23 nt, Human
cuucugaacuuggcgcugccccu

SEQ ID NO: 1625887 - RNA, 18 nt, Human
cuuccucccucccucuuu

SEQ ID NO: 1625888 - RNA, 14 nt, Human
cuuccucccucccu

SEQ ID NO: 1625889 - RNA, 13 nt, Human
cuuccucccuccc

SEQ ID NO: 1625890 - RNA, 12 nt, Human
cuuccucccucc

SEQ ID NO: 1625891 - RNA, 21 nt, Human
cuuccucuuuccaucuacccu

SEQ ID NO: 1625892 - RNA, 13 nt, Human
cuuccucugcuga

SEQ ID NO: 1625893 - RNA, 12 nt, Human
cuuccucugcug

SEQ ID NO: 1625894 - RNA, 11 nt, Human
cuuccucugcu

SEQ ID NO: 1625895 - RNA, 21 nt, Human
cuuccucuccacugccuucga

SEQ ID NO: 1625896 - RNA, 19 nt, Human
cuuccucuccacugccuuc

SEQ ID NO: 1625897 - RNA, 17 nt, Human
cuuccucuccacugccu

SEQ ID NO: 1625898 - RNA, 16 nt, Human
cuuccucuccacugcc

SEQ ID NO: 1625899 - RNA, 22 nt, Human
cuucugaacuuggcgcugcccc

SEQ ID NO: 1625900 - RNA, 19 nt, Human
cuucugaacuuggcgcugc

SEQ ID NO: 1625901 - RNA, 20 nt, Human
cuuacauuagcaguuugcuu

SEQ ID NO: 1625902 - RNA, 15 nt, Human
cuugauguguuaucu

SEQ ID NO: 1625903 - RNA, 19 nt, Human
cuugauucauaaugacuua

SEQ ID NO: 1625904 - RNA, 18 nt, Human
cuugccgucuaccugagg

SEQ ID NO: 1625905 - RNA, 19 nt, Human
cuugccgucuaccugaggg

SEQ ID NO: 1625906 - RNA, 15 nt, Human
cuuggauuguccccg

SEQ ID NO: 1625907 - RNA, 20 nt, Human
cuuggauuguccccgacccu

SEQ ID NO: 1625908 - RNA, 18 nt, Human
cuuggauuguccccgacc

SEQ ID NO: 1625909 - RNA, 22 nt, Human
cuuggauuguccccgacccuug

SEQ ID NO: 1625910 - RNA, 23 nt, Human
cuuggcgcugccccuggcagccc

SEQ ID NO: 1625911 - RNA, 22 nt, Human
cuuggcgcugccccuggcagcc

SEQ ID NO: 1625912 - RNA, 21 nt, Human
cuuggcgcugccccuggcagc

SEQ ID NO: 1625913 - RNA, 18 nt, Human
cuuucaauaggaaaaacu

SEQ ID NO: 1625914 - RNA, 17 nt, Human
cuuucaauaggaaaaac

SEQ ID NO: 1625915 - RNA, 20 nt, Human
cuuuaaugucacaggcaggu

SEQ ID NO: 1625916 - RNA, 19 nt, Human
cuuuaaugucacaggcagg

SEQ ID NO: 1625917 - RNA, 18 nt, Human
cuuuaaugucacaggcag

SEQ ID NO: 1625918 - RNA, 17 nt, Human
cuuuaaugucacaggca

SEQ ID NO: 1625919 - RNA, 15 nt, Human
cuuucaauaggaaaa

SEQ ID NO: 1625920 - RNA, 14 nt, Human
cuuucaauaggaaa

SEQ ID NO: 1625921 - RNA, 22 nt, Human
cuuuaaugucacaggcaggucc

SEQ ID NO: 1625922 - RNA, 22 nt, Human
cuugucuuuggacccugaggcc

SEQ ID NO: 1625923 - RNA, 21 nt, Human
cuugucuuuggacccugaggc

SEQ ID NO: 1625924 - RNA, 15 nt, Human
cuugguccugcugca

SEQ ID NO: 1625925 - RNA, 20 nt, Human
cuugguccugcugcaguugc

SEQ ID NO: 1625926 - RNA, 18 nt, Human
cuugguccugcugcaguu

SEQ ID NO: 1625927 - RNA, 17 nt, Human
cuugguccugcugcagu

SEQ ID NO: 1625928 - RNA, 16 nt, Human
cuugguccugcugcag

SEQ ID NO: 1625929 - RNA, 23 nt, Human
cuuggucucagugucaaugcagc

SEQ ID NO: 1625930 - RNA, 22 nt, Human
cuugguccugcugcaguugcca

SEQ ID NO: 1625931 - RNA, 16 nt, Human
cuugguucccauuugc

SEQ ID NO: 1625932 - RNA, 20 nt, Human
cuugguucccauuugcuccu

SEQ ID NO: 1625933 - RNA, 13 nt, Human
cuugucuguagau

SEQ ID NO: 1625934 - RNA, 20 nt, Human
cuugucuuuggacccugagg

SEQ ID NO: 1625935 - RNA, 21 nt, Human
cuugucucagauuuuauuaug

SEQ ID NO: 1625936 - RNA, 19 nt, Human
cuuuuaugugaaacauguu

SEQ ID NO: 1625937 - RNA, 18 nt, Human
gaaaauuuugauguuuua

SEQ ID NO: 1625938 - RNA, 21 nt, Human
gaaaagacuccaaagaaaugu

SEQ ID NO: 1625939 - RNA, 20 nt, Human
gaaaagacuccaaagaaaug

SEQ ID NO: 1625940 - RNA, 18 nt, Human
gaaaacuuguauuaugug

SEQ ID NO: 1625941 - RNA, 19 nt, Human
gaaaacugcaacuuguaaa

SEQ ID NO: 1625942 - RNA, 22 nt, Human
gaaaauuaggauuucaugauuu

SEQ ID NO: 1625943 - RNA, 18 nt, Human
gaaaauuaggauuucaug

SEQ ID NO: 1625944 - RNA, 14 nt, Human
gaaaauuaacauga

SEQ ID NO: 1625945 - RNA, 18 nt, Human
cuuuugccguuauuaaaa

SEQ ID NO: 1625946 - RNA, 17 nt, Human
cuuuugucuaugggacu

SEQ ID NO: 1625947 - RNA, 16 nt, Human
cuuuuggucuguguga

SEQ ID NO: 1625948 - RNA, 15 nt, Human
cuuuuggucugugug

SEQ ID NO: 1625949 - RNA, 14 nt, Human
cuuuugugcauuau

SEQ ID NO: 1625950 - RNA, 18 nt, Human
cuuuugugcauuaucuag

SEQ ID NO: 1625951 - RNA, 21 nt, Human
cuuuuuuuuuuuuuuugacaa

SEQ ID NO: 1625952 - RNA, 19 nt, Human
gaaaaaauauuuuccugcc

SEQ ID NO: 1625953 - RNA, 14 nt, Human
gaaaaaauauauau

SEQ ID NO: 1625954 - RNA, 21 nt, Human
gaacaaggcaaggcugucaau

SEQ ID NO: 1625955 - RNA, 18 nt, Human
gaacaaggcaaggcuguc

SEQ ID NO: 1625956 - RNA, 17 nt, Human
gaacaaggcaaggcugu

SEQ ID NO: 1625957 - RNA, 15 nt, Human
gaacaaggcaaggcu

SEQ ID NO: 1625958 - RNA, 14 nt, Human
gaacaaggcaaggc

SEQ ID NO: 1625959 - RNA, 23 nt, Human
gaaacuucagcgguuuauauaag

SEQ ID NO: 1625960 - RNA, 18 nt, Human
gaaagaaguggggacaga

SEQ ID NO: 1625961 - RNA, 20 nt, Human
gaaacuuguguaaauacaau

SEQ ID NO: 1625962 - RNA, 16 nt, Human
gaaacuuguguaaaua

SEQ ID NO: 1625963 - RNA, 14 nt, Human
gaaacuuguguaaa

SEQ ID NO: 1625964 - RNA, 23 nt, Human
gaacaaauuuacagagacagaaa

SEQ ID NO: 1625965 - RNA, 18 nt, Human
gaacaaauuuacagagac

SEQ ID NO: 1625966 - RNA, 17 nt, Human
gaacaaauuuacagaga

SEQ ID NO: 1625967 - RNA, 19 nt, Human
gaaauuuuuauuaaauuau

SEQ ID NO: 1625968 - RNA, 18 nt, Human
gaaaugaaagcagggacu

SEQ ID NO: 1625969 - RNA, 18 nt, Human
gaaauuuuuauuaaauua

SEQ ID NO: 1625970 - RNA, 23 nt, Human
gaaaucaaauaugcaaagcacug

SEQ ID NO: 1625971 - RNA, 19 nt, Human
gaaaucaccgaaaacgugg

SEQ ID NO: 1625972 - RNA, 17 nt, Human
gaaaucaccgaaaacgu

SEQ ID NO: 1625973 - RNA, 16 nt, Human
gaaaucaaauaugcaa

SEQ ID NO: 1625974 - RNA, 17 nt, Human
gaaaucaaauaugcaaa

SEQ ID NO: 1625975 - RNA, 21 nt, Human
gaaaguacuucuccacccugc

SEQ ID NO: 1625976 - RNA, 22 nt, Human
gaaaguacuucuccacccugcu

SEQ ID NO: 1625977 - RNA, 20 nt, Human
gaaaggcuccaggagcagcc

SEQ ID NO: 1625978 - RNA, 19 nt, Human
gaaaggcuccaggagcagc

SEQ ID NO: 1625979 - RNA, 18 nt, Human
gaaaggcuccaggagcag

SEQ ID NO: 1625980 - RNA, 17 nt, Human
gaaaggcuccaggagca

SEQ ID NO: 1625981 - RNA, 18 nt, Human
gaaagacuaucuaaaugu

SEQ ID NO: 1625982 - RNA, 22 nt, Human
cuggcagaguugaagacagagc

SEQ ID NO: 1625983 - RNA, 23 nt, Human
cuggcagccccuguucuggcaga

SEQ ID NO: 1625984 - RNA, 13 nt, Human
cuggcagccgugc

SEQ ID NO: 1625985 - RNA, 21 nt, Human
cuggcagaguugaagacagag

SEQ ID NO: 1625986 - RNA, 20 nt, Human
cuggcagaguugaagacaga

SEQ ID NO: 1625987 - RNA, 17 nt, Human
cugggacuacaggugug

SEQ ID NO: 1625988 - RNA, 21 nt, Human
cugggacuacaggcacccacc

SEQ ID NO: 1625989 - RNA, 17 nt, Human
cugggacuacaggcacc

SEQ ID NO: 1625990 - RNA, 15 nt, Human
cuggcucuuccaggc

SEQ ID NO: 1625991 - RNA, 14 nt, Human
cuggcucuuccagg

SEQ ID NO: 1625992 - RNA, 13 nt, Human
cuggcucuuccag

SEQ ID NO: 1625993 - RNA, 22 nt, Human
cuggcucccacaggcccuuccu

SEQ ID NO: 1625994 - RNA, 19 nt, Human
cuggcucccacaggcccuu

SEQ ID NO: 1625995 - RNA, 19 nt, Human
cuggcagcucagagagggu

SEQ ID NO: 1625996 - RNA, 17 nt, Human
cuggcagcucagagagg

SEQ ID NO: 1625997 - RNA, 16 nt, Human
cuggcagcucagagag

SEQ ID NO: 1625998 - RNA, 18 nt, Human
cuggcagccgugccuuca

SEQ ID NO: 1625999 - RNA, 17 nt, Human
cuggcagccgugccuuc

SEQ ID NO: 1626000 - RNA, 19 nt, Human
cuggcagccgugccuucag

SEQ ID NO: 1626001 - RNA, 22 nt, Human
cuggaugcagccucacaguccu

SEQ ID NO: 1626002 - RNA, 18 nt, Human
cuggaugcagccucacag

SEQ ID NO: 1626003 - RNA, 17 nt, Human
cuggaugcagccucaca

SEQ ID NO: 1626004 - RNA, 16 nt, Human
cuggaugcagccucac

SEQ ID NO: 1626005 - RNA, 20 nt, Human
cuggaucuccauucucucag

SEQ ID NO: 1626006 - RNA, 19 nt, Human
cuggauccaucaggccacu

SEQ ID NO: 1626007 - RNA, 23 nt, Human
cuggaaaaguauguuagugcaaa

SEQ ID NO: 1626008 - RNA, 14 nt, Human
cugcuuccagugag

SEQ ID NO: 1626009 - RNA, 20 nt, Human
cugcuucaaggauccugagc

SEQ ID NO: 1626010 - RNA, 19 nt, Human
cugcuucaaggauccugag

SEQ ID NO: 1626011 - RNA, 16 nt, Human
cugcuucaaggauccu

SEQ ID NO: 1626012 - RNA, 14 nt, Human
cugcuucaaggauc

SEQ ID NO: 1626013 - RNA, 17 nt, Human
cuggauccaucaggcca

SEQ ID NO: 1626014 - RNA, 15 nt, Human
cuggagaacuagaga

SEQ ID NO: 1626015 - RNA, 14 nt, Human
cuggagaacuagag

SEQ ID NO: 1626016 - RNA, 21 nt, Human
cuggagaaaauggacguguua

SEQ ID NO: 1626017 - RNA, 23 nt, Human
cuggacuccucuguccaggcacu

SEQ ID NO: 1626018 - RNA, 22 nt, Human
cuggacuccucuguccaggcac

SEQ ID NO: 1626019 - RNA, 23 nt, Human
cugcccuuaccugccaggaagcc

SEQ ID NO: 1626020 - RNA, 22 nt, Human
cugcccuuaccugccaggaagc

SEQ ID NO: 1626021 - RNA, 12 nt, Human
cugcccuguggg

SEQ ID NO: 1626022 - RNA, 11 nt, Human
cugcccugugg

SEQ ID NO: 1626023 - RNA, 19 nt, Human
cugcccuuaccugccagga

SEQ ID NO: 1626024 - RNA, 14 nt, Human
cugcccugugggcc

SEQ ID NO: 1626025 - RNA, 20 nt, Human
cugcccugguuuccugcccu

SEQ ID NO: 1626026 - RNA, 24 nt, Human
cugcccugugaguacuacaguccu

SEQ ID NO: 1626027 - RNA, 21 nt, Human
cugcccugguuuccugcccug

SEQ ID NO: 1626028 - RNA, 19 nt, Human
cugcccugguuuccugccc

SEQ ID NO: 1626029 - RNA, 18 nt, Human
cugcccugguuuccugcc

SEQ ID NO: 1626030 - RNA, 17 nt, Human
cugcccugguuuccugc

SEQ ID NO: 1626031 - RNA, 23 nt, Human
cugcccuggugcugccacacuuc

SEQ ID NO: 1626032 - RNA, 16 nt, Human
cugcccuggugcugcc

SEQ ID NO: 1626033 - RNA, 15 nt, Human
cugcccuggugcugc

SEQ ID NO: 1626034 - RNA, 14 nt, Human
cugcccuggugcug

SEQ ID NO: 1626035 - RNA, 13 nt, Human
cugcccuggugcu

SEQ ID NO: 1626036 - RNA, 12 nt, Human
cugcccuggugc

SEQ ID NO: 1626037 - RNA, 21 nt, Human
cugccuccccuccucugcuug

SEQ ID NO: 1626038 - RNA, 19 nt, Human
cugccuccccuccucugcu

SEQ ID NO: 1626039 - RNA, 20 nt, Human
cugccuccccuccucugcuu

SEQ ID NO: 1626040 - RNA, 14 nt, Human
cugccuccuuugug

SEQ ID NO: 1626041 - RNA, 14 nt, Human
cugccucgaacugg

SEQ ID NO: 1626042 - RNA, 23 nt, Human
cugccuccuuugugaggaagccg

SEQ ID NO: 1626043 - RNA, 21 nt, Human
cugccuccuuugugaggaagc

SEQ ID NO: 1626044 - RNA, 17 nt, Human
cugccuccuuugugagg

SEQ ID NO: 1626045 - RNA, 20 nt, Human
cugccucgaacuggcugcaa

SEQ ID NO: 1626046 - RNA, 17 nt, Human
cugccuccccuccucug

SEQ ID NO: 1626047 - RNA, 18 nt, Human
cugccuccccuccucugc

SEQ ID NO: 1626048 - RNA, 23 nt, Human
cugccuguucagcuccagcucac

SEQ ID NO: 1626049 - RNA, 20 nt, Human
cugccuguucagcuccagcu

SEQ ID NO: 1626050 - RNA, 14 nt, Human
cugccuguugggcc

SEQ ID NO: 1626051 - RNA, 19 nt, Human
cugccuguucccauucuug

SEQ ID NO: 1626052 - RNA, 15 nt, Human
cugccuguucccauu

SEQ ID NO: 1626053 - RNA, 18 nt, Human
cugcugaaggcucgagca

SEQ ID NO: 1626054 - RNA, 23 nt, Human
cugcugaaggcucgagcaugccu

SEQ ID NO: 1626055 - RNA, 24 nt, Human
cugcugaaggcucgagcaugccug

SEQ ID NO: 1626056 - RNA, 14 nt, Human
cugcucacauaucu

SEQ ID NO: 1626057 - RNA, 20 nt, Human
cuguaagaaaauaucacuug

SEQ ID NO: 1626058 - RNA, 15 nt, Human
cuguagagugggagc

SEQ ID NO: 1626059 - RNA, 21 nt, Human
cuguacuugcucuugaugccu

SEQ ID NO: 1626060 - RNA, 20 nt, Human
cuguacuugcucuugaugcc

SEQ ID NO: 1626061 - RNA, 19 nt, Human
cuguacuugcucuugaugc

SEQ ID NO: 1626062 - RNA, 16 nt, Human
cuguacuugcucuuga

SEQ ID NO: 1626063 - RNA, 22 nt, Human
cugucuaaugaaaccugugucu

SEQ ID NO: 1626064 - RNA, 21 nt, Human
cuguccugggagugagcuggu

SEQ ID NO: 1626065 - RNA, 16 nt, Human
cugucauuugagcagg

SEQ ID NO: 1626066 - RNA, 20 nt, Human
cuguccugggagugagcugg

SEQ ID NO: 1626067 - RNA, 14 nt, Human
cuguccugggagug

SEQ ID NO: 1626068 - RNA, 13 nt, Human
cuguccugggagu

SEQ ID NO: 1626069 - RNA, 14 nt, Human
cugucauuugagca

SEQ ID NO: 1626070 - RNA, 18 nt, Human
cuguaggaagguuaaugu

SEQ ID NO: 1626071 - RNA, 12 nt, Human
cuggugccucac

SEQ ID NO: 1626072 - RNA, 23 nt, Human
cuggugcccugcuuucagauacu

SEQ ID NO: 1626073 - RNA, 21 nt, Human
cuggugcccugcuuucagaua

SEQ ID NO: 1626074 - RNA, 19 nt, Human
cuggugcccugcuuucaga

SEQ ID NO: 1626075 - RNA, 16 nt, Human
cuggugcccugcuuuc

SEQ ID NO: 1626076 - RNA, 15 nt, Human
cuggugcccugcuuu

SEQ ID NO: 1626077 - RNA, 18 nt, Human
cuggugacugauucuuca

SEQ ID NO: 1626078 - RNA, 18 nt, Human
cuggucuuauuuguaaag

SEQ ID NO: 1626079 - RNA, 17 nt, Human
cuggugacugauucuuc

SEQ ID NO: 1626080 - RNA, 15 nt, Human
cuggugacugauucu

SEQ ID NO: 1626081 - RNA, 14 nt, Human
cuggugacugauuc

SEQ ID NO: 1626082 - RNA, 13 nt, Human
cuggugacugauu

SEQ ID NO: 1626083 - RNA, 20 nt, Human
cuuaaaaaugguuuaaaugg

SEQ ID NO: 1626084 - RNA, 13 nt, Human
cuuaaaaaugguu

SEQ ID NO: 1626085 - RNA, 21 nt, Human
cuuaaaaaugguuuaaauggu

SEQ ID NO: 1626086 - RNA, 14 nt, Human
cuuaaauaauguga

SEQ ID NO: 1626087 - RNA, 16 nt, Human
cuuaaauaaugugaaa

SEQ ID NO: 1626088 - RNA, 19 nt, Human
cuuaaauaaugugaaacug

SEQ ID NO: 1626089 - RNA, 15 nt, Human
cuguuggccagugug

SEQ ID NO: 1626090 - RNA, 12 nt, Human
cuguuggccagu

SEQ ID NO: 1626091 - RNA, 14 nt, Human
cuguugcugccuca

SEQ ID NO: 1626092 - RNA, 23 nt, Human
cugugagaugcuagaacucccuu

SEQ ID NO: 1626093 - RNA, 17 nt, Human
cugugcucuggacaggc

SEQ ID NO: 1626094 - RNA, 18 nt, Human
cugugaacuugaaauuug

SEQ ID NO: 1626095 - RNA, 17 nt, Human
cugugaacuugaaauuu

SEQ ID NO: 1626096 - RNA, 16 nt, Human
cugugaacuugaaauu

SEQ ID NO: 1626097 - RNA, 15 nt, Human
cugugaacugaacuc

SEQ ID NO: 1626098 - RNA, 13 nt, Human
cugugaacugaac

SEQ ID NO: 1626099 - RNA, 16 nt, Human
cugugaacugaacucu

SEQ ID NO: 1626100 - RNA, 15 nt, Human
cugugaacuugaaau

SEQ ID NO: 1626101 - RNA, 22 nt, Human
cuguucacagccagacuggcac

SEQ ID NO: 1626102 - RNA, 15 nt, Human
cuguucagcuccagc

SEQ ID NO: 1626103 - RNA, 13 nt, Human
cuguucacucuac

SEQ ID NO: 1626104 - RNA, 19 nt, Human
cuguucacagccagacugg

SEQ ID NO: 1626105 - RNA, 18 nt, Human
cuguucagcugguugagg

SEQ ID NO: 1626106 - RNA, 12 nt, Human
cuguucagcugg

SEQ ID NO: 1626107 - RNA, 22 nt, Human
cuguucagcuccagcucaccag

SEQ ID NO: 1626108 - RNA, 19 nt, Human
cuguucagcuccagcucac

SEQ ID NO: 1626109 - RNA, 18 nt, Human
cuguucagcuccagcuca

SEQ ID NO: 1626110 - RNA, 16 nt, Human
cuguucagcuccagcu

SEQ ID NO: 1626111 - RNA, 17 nt, Human
cuguuacugucuucagu

SEQ ID NO: 1626112 - RNA, 19 nt, Human
cugugcucuggacaggcau

SEQ ID NO: 1626113 - RNA, 18 nt, Human
cugugcucuggacaggca

SEQ ID NO: 1626114 - RNA, 21 nt, Human
gagggccugcaagggagugag

SEQ ID NO: 1626115 - RNA, 17 nt, Human
gagggccugcaagggag

SEQ ID NO: 1626116 - RNA, 14 nt, Human
gagggccugcaagg

SEQ ID NO: 1626117 - RNA, 12 nt, Human
gagggccugggc

SEQ ID NO: 1626118 - RNA, 15 nt, Human
gaggcuccacuuggu

SEQ ID NO: 1626119 - RNA, 17 nt, Human
gaggccaaggugggagg

SEQ ID NO: 1626120 - RNA, 21 nt, Human
gaggcauuuguuugaacugau

SEQ ID NO: 1626121 - RNA, 21 nt, Human
gaggcaugugaugagaggaaa

SEQ ID NO: 1626122 - RNA, 20 nt, Human
gaggcaugugaugagaggaa

SEQ ID NO: 1626123 - RNA, 22 nt, Human
gaggcaugugaugagaggaaau

SEQ ID NO: 1626124 - RNA, 19 nt, Human
gaggcauuuguuugaacug

SEQ ID NO: 1626125 - RNA, 18 nt, Human
gaggcuccacuuggucug

SEQ ID NO: 1626126 - RNA, 17 nt, Human
gaggcuccacuuggucu

SEQ ID NO: 1626127 - RNA, 18 nt, Human
gaggcugagaugggagaa

SEQ ID NO: 1626128 - RNA, 20 nt, Human
gaggcucuggagcccacugu

SEQ ID NO: 1626129 - RNA, 14 nt, Human
gaggagaaacugga

SEQ ID NO: 1626130 - RNA, 12 nt, Human
gaggagaaacug

SEQ ID NO: 1626131 - RNA, 15 nt, Human
gaggagagaggaccc

SEQ ID NO: 1626132 - RNA, 14 nt, Human
gaggagagaggacc

SEQ ID NO: 1626133 - RNA, 12 nt, Human
gaggagagagga

SEQ ID NO: 1626134 - RNA, 20 nt, Human
gaggcagggucucacucugu

SEQ ID NO: 1626135 - RNA, 19 nt, Human
gaggcagggucucacucug

SEQ ID NO: 1626136 - RNA, 22 nt, Human
gaggcagggucucacucugucg

SEQ ID NO: 1626137 - RNA, 21 nt, Human
gaggacgcucucuggccuucg

SEQ ID NO: 1626138 - RNA, 23 nt, Human
gaggacuuuucuuuguggcuucc

SEQ ID NO: 1626139 - RNA, 20 nt, Human
gaggacuuuucuuuguggcu

SEQ ID NO: 1626140 - RNA, 16 nt, Human
gaggacuuuucuuugu

SEQ ID NO: 1626141 - RNA, 14 nt, Human
gagcagucaggaaa

SEQ ID NO: 1626142 - RNA, 14 nt, Human
gagcaucaggccag

SEQ ID NO: 1626143 - RNA, 13 nt, Human
gagcaugccugga

SEQ ID NO: 1626144 - RNA, 21 nt, Human
gagcaugccuggauggggcug

SEQ ID NO: 1626145 - RNA, 16 nt, Human
gagcaucaggccaggc

SEQ ID NO: 1626146 - RNA, 15 nt, Human
gagcaucaggccagg

SEQ ID NO: 1626147 - RNA, 17 nt, Human
gagcaucaggccaggcc

SEQ ID NO: 1626148 - RNA, 17 nt, Human
gagccccgaggccuucu

SEQ ID NO: 1626149 - RNA, 14 nt, Human
gagccccgaggccu

SEQ ID NO: 1626150 - RNA, 20 nt, Human
gagcccugggaggcucugga

SEQ ID NO: 1626151 - RNA, 19 nt, Human
gagcccugggaggcucugg

SEQ ID NO: 1626152 - RNA, 18 nt, Human
gagcccugggaggcucug

SEQ ID NO: 1626153 - RNA, 16 nt, Human
gagcccugggaggcuc

SEQ ID NO: 1626154 - RNA, 12 nt, Human
gagcccugggag

SEQ ID NO: 1626155 - RNA, 20 nt, Human
gagcuguucacagccagacu

SEQ ID NO: 1626156 - RNA, 14 nt, Human
gagcccugguggca

SEQ ID NO: 1626157 - RNA, 13 nt, Human
gagcccugguggc

SEQ ID NO: 1626158 - RNA, 22 nt, Human
gagcuguucacagccagacugg

SEQ ID NO: 1626159 - RNA, 23 nt, Human
gagaaugaaagggcccagagagg

SEQ ID NO: 1626160 - RNA, 15 nt, Human
gagaaugaaagggcc

SEQ ID NO: 1626161 - RNA, 14 nt, Human
gagacggaguccca

SEQ ID NO: 1626162 - RNA, 19 nt, Human
gagacggagucccaccuug

SEQ ID NO: 1626163 - RNA, 16 nt, Human
gagacggagucccacc

SEQ ID NO: 1626164 - RNA, 18 nt, Human
gagacgggggcagagagg

SEQ ID NO: 1626165 - RNA, 22 nt, Human
gacuuuuuauggcacuaguauu

SEQ ID NO: 1626166 - RNA, 19 nt, Human
gacuuuuccaacccucauc

SEQ ID NO: 1626167 - RNA, 14 nt, Human
gacuuuuccaaccc

SEQ ID NO: 1626168 - RNA, 18 nt, Human
gacuuuuauuuccaguga

SEQ ID NO: 1626169 - RNA, 20 nt, Human
gacuuuuccaacccucauca

SEQ ID NO: 1626170 - RNA, 16 nt, Human
gagaugcuagaacucc

SEQ ID NO: 1626171 - RNA, 20 nt, Human
gagaugcuagaacucccuuu

SEQ ID NO: 1626172 - RNA, 15 nt, Human
gagauuauguucuuu

SEQ ID NO: 1626173 - RNA, 21 nt, Human
gagauugugccccugcacucc

SEQ ID NO: 1626174 - RNA, 14 nt, Human
gagauuggaaggaa

SEQ ID NO: 1626175 - RNA, 20 nt, Human
gagagcugggugucaagagg

SEQ ID NO: 1626176 - RNA, 12 nt, Human
gagaggaaauca

SEQ ID NO: 1626177 - RNA, 22 nt, Human
gagagcuucuguugcugccuca

SEQ ID NO: 1626178 - RNA, 15 nt, Human
gagaggacccccuga

SEQ ID NO: 1626179 - RNA, 20 nt, Human
gagagccuuccagggguggg

SEQ ID NO: 1626180 - RNA, 18 nt, Human
gagagccuuccaggggug

SEQ ID NO: 1626181 - RNA, 21 nt, Human
gagagcuagcagcagggaggg

SEQ ID NO: 1626182 - RNA, 15 nt, Human
gagagcuagcagcag

SEQ ID NO: 1626183 - RNA, 13 nt, Human
gagagcugggugu

SEQ ID NO: 1626184 - RNA, 16 nt, Human
gagagccuuccagggg

SEQ ID NO: 1626185 - RNA, 15 nt, Human
gagagccuuccaggg

SEQ ID NO: 1626186 - RNA, 14 nt, Human
gagacuccugcagg

SEQ ID NO: 1626187 - RNA, 13 nt, Human
gagacuccugcag

SEQ ID NO: 1626188 - RNA, 23 nt, Human
gacauugcggacagccacggcca

SEQ ID NO: 1626189 - RNA, 19 nt, Human
gacauuguagagcuucugg

SEQ ID NO: 1626190 - RNA, 12 nt, Human
gacagcucugca

SEQ ID NO: 1626191 - RNA, 19 nt, Human
gacagcuccuucuguccua

SEQ ID NO: 1626192 - RNA, 10 nt, Human
gacagcucuu

SEQ ID NO: 1626193 - RNA, 18 nt, Human
gacagucaccucauggaa

SEQ ID NO: 1626194 - RNA, 11 nt, Human
gacagcucuua

SEQ ID NO: 1626195 - RNA, 12 nt, Human
gacagucccugc

SEQ ID NO: 1626196 - RNA, 20 nt, Human
gacagucccugccaauggac

SEQ ID NO: 1626197 - RNA, 16 nt, Human
gacagucccugccaau

SEQ ID NO: 1626198 - RNA, 15 nt, Human
gacagucccugccaa

SEQ ID NO: 1626199 - RNA, 14 nt, Human
gacagucccugcca

SEQ ID NO: 1626200 - RNA, 18 nt, Human
gacagcuccuucuguccu

SEQ ID NO: 1626201 - RNA, 17 nt, Human
gacagcuccuucugucc

SEQ ID NO: 1626202 - RNA, 16 nt, Human
gacagcccgggcucug

SEQ ID NO: 1626203 - RNA, 14 nt, Human
gacagcccgggcuc

SEQ ID NO: 1626204 - RNA, 14 nt, Human
gacgcucucuggcc

SEQ ID NO: 1626205 - RNA, 23 nt, Human
gacgcuacccgggaagggggcug

SEQ ID NO: 1626206 - RNA, 22 nt, Human
gacgcuacccgggaagggggcu

SEQ ID NO: 1626207 - RNA, 21 nt, Human
gacgcugugcugcccugccca

SEQ ID NO: 1626208 - RNA, 18 nt, Human
gacgcugugcugcccugc

SEQ ID NO: 1626209 - RNA, 17 nt, Human
gacgcugugcugcccug

SEQ ID NO: 1626210 - RNA, 16 nt, Human
gacgcugugcugcccu

SEQ ID NO: 1626211 - RNA, 13 nt, Human
gacgccaucccag

SEQ ID NO: 1626212 - RNA, 12 nt, Human
gacgccauccca

SEQ ID NO: 1626213 - RNA, 13 nt, Human
gaccucugccuga

SEQ ID NO: 1626214 - RNA, 21 nt, Human
gacgccaucccagccccaaug

SEQ ID NO: 1626215 - RNA, 15 nt, Human
gacgccaucccagcc

SEQ ID NO: 1626216 - RNA, 16 nt, Human
gaccucugcagcaaua

SEQ ID NO: 1626217 - RNA, 18 nt, Human
gaccucugcagcaauaaa

SEQ ID NO: 1626218 - RNA, 22 nt, Human
gaccucugcagcaauaaagcag

SEQ ID NO: 1626219 - RNA, 17 nt, Human
gacccggaggggccugg

SEQ ID NO: 1626220 - RNA, 16 nt, Human
gaccccugagcuugca

SEQ ID NO: 1626221 - RNA, 20 nt, Human
gacccggaggggccuggcag

SEQ ID NO: 1626222 - RNA, 19 nt, Human
gacccggaggggccuggca

SEQ ID NO: 1626223 - RNA, 18 nt, Human
gacccggaggggccuggc

SEQ ID NO: 1626224 - RNA, 21 nt, Human
gaccucaggugauccacccac

SEQ ID NO: 1626225 - RNA, 20 nt, Human
gaccucaggugauccaccca

SEQ ID NO: 1626226 - RNA, 19 nt, Human
gaccucaggugauccaccc

SEQ ID NO: 1626227 - RNA, 21 nt, Human
gaccucaggugagaagcagag

SEQ ID NO: 1626228 - RNA, 19 nt, Human
gaccucaggugagaagcag

SEQ ID NO: 1626229 - RNA, 18 nt, Human
gaccucaggugagaagca

SEQ ID NO: 1626230 - RNA, 19 nt, Human
gaccucaggccugggggcu

SEQ ID NO: 1626231 - RNA, 23 nt, Human
gaccucagguaaucgaccugccu

SEQ ID NO: 1626232 - RNA, 22 nt, Human
gaccucagguaaucgaccugcc

SEQ ID NO: 1626233 - RNA, 14 nt, Human
gaccucaggccugg

SEQ ID NO: 1626234 - RNA, 10 nt, Human
gacccugagg

SEQ ID NO: 1626235 - RNA, 14 nt, Human
gaaugaauggcuaa

SEQ ID NO: 1626236 - RNA, 24 nt, Human
gaauauugcugauggugcaaugac

SEQ ID NO: 1626237 - RNA, 23 nt, Human
gaauauugcugauggugcaauga

SEQ ID NO: 1626238 - RNA, 22 nt, Human
gaauauugcugauggugcaaug

SEQ ID NO: 1626239 - RNA, 15 nt, Human
gaauauauaaccagu

SEQ ID NO: 1626240 - RNA, 13 nt, Human
gaauauugcugau

SEQ ID NO: 1626241 - RNA, 12 nt, Human
gaauauugcuga

SEQ ID NO: 1626242 - RNA, 11 nt, Human
gaauauugcug

SEQ ID NO: 1626243 - RNA, 22 nt, Human
gaauaucuccgucaacucauau

SEQ ID NO: 1626244 - RNA, 13 nt, Human
gacacagcucuuc

SEQ ID NO: 1626245 - RNA, 21 nt, Human
gacacagcucuucuccaggcu

SEQ ID NO: 1626246 - RNA, 20 nt, Human
gacacagcucuucuccaggc

SEQ ID NO: 1626247 - RNA, 19 nt, Human
gacacagcucuucuccagg

SEQ ID NO: 1626248 - RNA, 12 nt, Human
gacacagcucuu

SEQ ID NO: 1626249 - RNA, 14 nt, Human
gaauuaugaaacuu

SEQ ID NO: 1626250 - RNA, 14 nt, Human
gacaaaaagcuacu

SEQ ID NO: 1626251 - RNA, 20 nt, Human
gaaugaauggcuaagcaaaa

SEQ ID NO: 1626252 - RNA, 15 nt, Human
gaaugaauggcuaag

SEQ ID NO: 1626253 - RNA, 14 nt, Human
gaaugauuaugaau

SEQ ID NO: 1626254 - RNA, 14 nt, Human
gaaugauuaauuaa

SEQ ID NO: 1626255 - RNA, 14 nt, Human
gaaugaugccauga

SEQ ID NO: 1626256 - RNA, 20 nt, Human
gaaugaugauccuaggcauu

SEQ ID NO: 1626257 - RNA, 22 nt, Human
gaaugauuaugaauuacauuug

SEQ ID NO: 1626258 - RNA, 18 nt, Human
gaaugcacaaacagaggc

SEQ ID NO: 1626259 - RNA, 17 nt, Human
gaauguuugccucugcc

SEQ ID NO: 1626260 - RNA, 16 nt, Human
gaauguuugccucugc

SEQ ID NO: 1626261 - RNA, 19 nt, Human
gaaugcacaaacagaggcc

SEQ ID NO: 1626262 - RNA, 15 nt, Human
gaauuaacacaugau

SEQ ID NO: 1626263 - RNA, 14 nt, Human
gaauuaacacauga

SEQ ID NO: 1626264 - RNA, 19 nt, Human
gaauguuugccucugccuc

SEQ ID NO: 1626265 - RNA, 18 nt, Human
gaauguuugccucugccu

SEQ ID NO: 1626266 - RNA, 20 nt, Human
gaauuacauuuguauaaaau

SEQ ID NO: 1626267 - RNA, 18 nt, Human
gaauuacauuuguauaaa

SEQ ID NO: 1626268 - RNA, 15 nt, Human
gaauuacauuuguau

SEQ ID NO: 1626269 - RNA, 13 nt, Human
gaauuacauuugu

SEQ ID NO: 1626270 - RNA, 16 nt, Human
gauacaguuacucaga

SEQ ID NO: 1626271 - RNA, 19 nt, Human
gauacaguuacucagaauu

SEQ ID NO: 1626272 - RNA, 23 nt, Human
gauacaguuacucagaauucucu

SEQ ID NO: 1626273 - RNA, 17 nt, Human
gauacuguaucaugaca

SEQ ID NO: 1626274 - RNA, 20 nt, Human
gauacuggauuguacuuugu

SEQ ID NO: 1626275 - RNA, 16 nt, Human
gauacuggauuguacu

SEQ ID NO: 1626276 - RNA, 21 nt, Human
gauacuguaucaugacaaaga

SEQ ID NO: 1626277 - RNA, 12 nt, Human
gauacugaaaua

SEQ ID NO: 1626278 - RNA, 18 nt, Human
gauacuuugauauuuuca

SEQ ID NO: 1626279 - RNA, 19 nt, Human
gauauuuucaacgcagccc

SEQ ID NO: 1626280 - RNA, 20 nt, Human
gaucaaaagguuaauaaagu

SEQ ID NO: 1626281 - RNA, 15 nt, Human
gauauuuugcuuugu

SEQ ID NO: 1626282 - RNA, 23 nt, Human
gauauuuucaacgcagcccugcu

SEQ ID NO: 1626283 - RNA, 22 nt, Human
gauauuuucaacgcagcccugc

SEQ ID NO: 1626284 - RNA, 21 nt, Human
gauauuuucaacgcagcccug

SEQ ID NO: 1626285 - RNA, 22 nt, Human
gaucaaaccccgaccaccugcc

SEQ ID NO: 1626286 - RNA, 23 nt, Human
gaucaaaagguuaauaaaguaau

SEQ ID NO: 1626287 - RNA, 19 nt, Human
gauccaagcuggucccacu

SEQ ID NO: 1626288 - RNA, 17 nt, Human
gauccaagcugguccca

SEQ ID NO: 1626289 - RNA, 16 nt, Human
gauccaagcugguccc

SEQ ID NO: 1626290 - RNA, 12 nt, Human
gauccaagcugg

SEQ ID NO: 1626291 - RNA, 21 nt, Human
gaucaaccccuucgcuccugu

SEQ ID NO: 1626292 - RNA, 19 nt, Human
gauccacccaccucagccu

SEQ ID NO: 1626293 - RNA, 18 nt, Human
gauccacccaccucagcc

SEQ ID NO: 1626294 - RNA, 21 nt, Human
gauccaagcuggucccacuca

SEQ ID NO: 1626295 - RNA, 21 nt, Human
gauccacccaccucagccucc

SEQ ID NO: 1626296 - RNA, 20 nt, Human
gauccacccaccucagccuc

SEQ ID NO: 1626297 - RNA, 22 nt, Human
gauccacccaccucagccuccc

SEQ ID NO: 1626298 - RNA, 14 nt, Human
gaugauccuaggca

SEQ ID NO: 1626299 - RNA, 13 nt, Human
gaugauccuaggc

SEQ ID NO: 1626300 - RNA, 22 nt, Human
gaugauuggaggggggaggugg

SEQ ID NO: 1626301 - RNA, 21 nt, Human
gaugcuucuucagagacuccu

SEQ ID NO: 1626302 - RNA, 20 nt, Human
gaugcuucuucagagacucc

SEQ ID NO: 1626303 - RNA, 17 nt, Human
gaugcuucuucagagac

SEQ ID NO: 1626304 - RNA, 12 nt, Human
gaugauuucuau

SEQ ID NO: 1626305 - RNA, 23 nt, Human
gaugauuucuaugcugaguuugu

SEQ ID NO: 1626306 - RNA, 13 nt, Human
gaugauuucuaug

SEQ ID NO: 1626307 - RNA, 15 nt, Human
gaucugccuaaggac

SEQ ID NO: 1626308 - RNA, 12 nt, Human
gaucugccuaag

SEQ ID NO: 1626309 - RNA, 17 nt, Human
gaucugccuaaggacuu

SEQ ID NO: 1626310 - RNA, 16 nt, Human
gaucugccuaaggacu

SEQ ID NO: 1626311 - RNA, 19 nt, Human
gaucucuugagccugggag

SEQ ID NO: 1626312 - RNA, 17 nt, Human
gaucugaugcaagcaag

SEQ ID NO: 1626313 - RNA, 18 nt, Human
gauccagcagauuauuca

SEQ ID NO: 1626314 - RNA, 19 nt, Human
gauccagcagauuauucac

SEQ ID NO: 1626315 - RNA, 15 nt, Human
gauucuucugcuuca

SEQ ID NO: 1626316 - RNA, 13 nt, Human
gauucuucugcuu

SEQ ID NO: 1626317 - RNA, 19 nt, Human
gauuuaacagaaauguaca

SEQ ID NO: 1626318 - RNA, 20 nt, Human
gauucuucugcuucagccuc

SEQ ID NO: 1626319 - RNA, 16 nt, Human
gauuuaacagaaaugu

SEQ ID NO: 1626320 - RNA, 17 nt, Human
gauuuaacagaaaugua

SEQ ID NO: 1626321 - RNA, 18 nt, Human
gauuuaacagaaauguac

SEQ ID NO: 1626322 - RNA, 18 nt, Human
gauuuuuuuuuccuucag

SEQ ID NO: 1626323 - RNA, 17 nt, Human
gauuuuuuuuuccuuca

SEQ ID NO: 1626324 - RNA, 12 nt, Human
gauuucacucuc

SEQ ID NO: 1626325 - RNA, 16 nt, Human
gauuuuuuuuuccuuc

SEQ ID NO: 1626326 - RNA, 11 nt, Human
gauuucacucu

SEQ ID NO: 1626327 - RNA, 21 nt, Human
gauuuuuuuuuccuucagugc

SEQ ID NO: 1626328 - RNA, 14 nt, Human
gcaaaaaggcagga

SEQ ID NO: 1626329 - RNA, 22 nt, Human
gcaaaagaugcuucucacugcc

SEQ ID NO: 1626330 - RNA, 17 nt, Human
gcaaaagaugcuucuca

SEQ ID NO: 1626331 - RNA, 16 nt, Human
gcaagugagagcuggg

SEQ ID NO: 1626332 - RNA, 13 nt, Human
gcaacaggcuggg

SEQ ID NO: 1626333 - RNA, 15 nt, Human
gcaacaggcugggcu

SEQ ID NO: 1626334 - RNA, 14 nt, Human
gcaacaggcugggc

SEQ ID NO: 1626335 - RNA, 18 nt, Human
gcaaccaccaccaaccac

SEQ ID NO: 1626336 - RNA, 16 nt, Human
gcaaccaccaccaacc

SEQ ID NO: 1626337 - RNA, 13 nt, Human
gcaaccaccacca

SEQ ID NO: 1626338 - RNA, 19 nt, Human
gcaacaggcugggcuucag

SEQ ID NO: 1626339 - RNA, 16 nt, Human
gcaacaggcugggcuu

SEQ ID NO: 1626340 - RNA, 20 nt, Human
gcaaccuucgccaccugggu

SEQ ID NO: 1626341 - RNA, 20 nt, Human
gcaaccuccgccucuugggu

SEQ ID NO: 1626342 - RNA, 17 nt, Human
gcaacccccagccugcu

SEQ ID NO: 1626343 - RNA, 16 nt, Human
gcaacccccagccugc

SEQ ID NO: 1626344 - RNA, 15 nt, Human
gcaacccccagccug

SEQ ID NO: 1626345 - RNA, 14 nt, Human
gcaacccccagccu

SEQ ID NO: 1626346 - RNA, 18 nt, Human
gcagcccaccccucaaca

SEQ ID NO: 1626347 - RNA, 15 nt, Human
gcagccacauuccug

SEQ ID NO: 1626348 - RNA, 22 nt, Human
gcagaacagugauuaccaggga

SEQ ID NO: 1626349 - RNA, 18 nt, Human
gcagaacagugauuacca

SEQ ID NO: 1626350 - RNA, 20 nt, Human
gcagaggaaagcaaaggaga

SEQ ID NO: 1626351 - RNA, 18 nt, Human
gcagaggaaagcaaagga

SEQ ID NO: 1626352 - RNA, 14 nt, Human
gcagaggaaagcaa

SEQ ID NO: 1626353 - RNA, 13 nt, Human
gcagaggaaagca

SEQ ID NO: 1626354 - RNA, 21 nt, Human
gcagaggaaagcaaaggagau

SEQ ID NO: 1626355 - RNA, 23 nt, Human
gcagcauauucaggaagcucagg

SEQ ID NO: 1626356 - RNA, 19 nt, Human
gcagcauauucaggaagcu

SEQ ID NO: 1626357 - RNA, 18 nt, Human
gcagcauauucaggaagc

SEQ ID NO: 1626358 - RNA, 17 nt, Human
gcagcauauucaggaag

SEQ ID NO: 1626359 - RNA, 14 nt, Human
gcagagggcacaga

SEQ ID NO: 1626360 - RNA, 13 nt, Human
gcagaacagugau

SEQ ID NO: 1626361 - RNA, 12 nt, Human
gcagaacaguga

SEQ ID NO: 1626362 - RNA, 22 nt, Human
gcacuuuguucuggcucuucca

SEQ ID NO: 1626363 - RNA, 15 nt, Human
gcacuccagccuggg

SEQ ID NO: 1626364 - RNA, 14 nt, Human
gcacuccagccugg

SEQ ID NO: 1626365 - RNA, 14 nt, Human
gcacuccccugcug

SEQ ID NO: 1626366 - RNA, 13 nt, Human
gcacuccccugcu

SEQ ID NO: 1626367 - RNA, 19 nt, Human
gcacuuuguucuggcucuu

SEQ ID NO: 1626368 - RNA, 18 nt, Human
gcacuuuguucuggcucu

SEQ ID NO: 1626369 - RNA, 16 nt, Human
gcacuccccugcuggg

SEQ ID NO: 1626370 - RNA, 15 nt, Human
gcacuccccugcugg

SEQ ID NO: 1626371 - RNA, 19 nt, Human
gcaagugagagcugggugu

SEQ ID NO: 1626372 - RNA, 18 nt, Human
gcaagugagagcugggug

SEQ ID NO: 1626373 - RNA, 20 nt, Human
gcacucagaagacacugaug

SEQ ID NO: 1626374 - RNA, 13 nt, Human
gcagugaugucac

SEQ ID NO: 1626375 - RNA, 22 nt, Human
gcaguuguugcccacagcugua

SEQ ID NO: 1626376 - RNA, 15 nt, Human
gcauacguacacauu

SEQ ID NO: 1626377 - RNA, 16 nt, Human
gcauacguacacauuu

SEQ ID NO: 1626378 - RNA, 17 nt, Human
gcauacguacacauuuu

SEQ ID NO: 1626379 - RNA, 18 nt, Human
gcauacguacacauuuua

SEQ ID NO: 1626380 - RNA, 11 nt, Human
gcagcugccuc

SEQ ID NO: 1626381 - RNA, 20 nt, Human
gcaucuagcaugucgucaaa

SEQ ID NO: 1626382 - RNA, 13 nt, Human
gcauccuggcacc

SEQ ID NO: 1626383 - RNA, 17 nt, Human
gcauccuccgccucccg

SEQ ID NO: 1626384 - RNA, 14 nt, Human
gcauccuggcaccc

SEQ ID NO: 1626385 - RNA, 13 nt, Human
gcaugggaaugaa

SEQ ID NO: 1626386 - RNA, 21 nt, Human
gcauggcugccaaugggagcu

SEQ ID NO: 1626387 - RNA, 15 nt, Human
gcauuuacuuugugu

SEQ ID NO: 1626388 - RNA, 18 nt, Human
gcauuuaaaagauacagu

SEQ ID NO: 1626389 - RNA, 22 nt, Human
gcauuuaaaagauacaguuacu

SEQ ID NO: 1626390 - RNA, 18 nt, Human
gcauugugggaaggggag

SEQ ID NO: 1626391 - RNA, 16 nt, Human
gcauugugggaagggg

SEQ ID NO: 1626392 - RNA, 16 nt, Human
gcauuuaaaagauaca

SEQ ID NO: 1626393 - RNA, 17 nt, Human
gcauuuaaaagauacag

SEQ ID NO: 1626394 - RNA, 15 nt, Human
gcauugugggaaggg

SEQ ID NO: 1626395 - RNA, 13 nt, Human
gcauugugggaag

SEQ ID NO: 1626396 - RNA, 21 nt, Human
gcaugugaugagaggaaauca

SEQ ID NO: 1626397 - RNA, 19 nt, Human
gcaugugaugagaggaaau

SEQ ID NO: 1626398 - RNA, 17 nt, Human
gcauccaguaucuugaa

SEQ ID NO: 1626399 - RNA, 14 nt, Human
gcauccaguaucuu

SEQ ID NO: 1626400 - RNA, 18 nt, Human
gcauccaguaucuugaag

SEQ ID NO: 1626401 - RNA, 20 nt, Human
gcucagggccuggcucaggu

SEQ ID NO: 1626402 - RNA, 19 nt, Human
gcucagggccuggcucagg

SEQ ID NO: 1626403 - RNA, 18 nt, Human
gcucagggccuggcucag

SEQ ID NO: 1626404 - RNA, 13 nt, Human
gcucaggaguuug

SEQ ID NO: 1626405 - RNA, 23 nt, Human
gcucaggagcccugggaggcucu

SEQ ID NO: 1626406 - RNA, 22 nt, Human
gcucaggagcccugggaggcuc

SEQ ID NO: 1626407 - RNA, 16 nt, Human
gcucagagcaguguuu

SEQ ID NO: 1626408 - RNA, 20 nt, Human
gcuaggaccccuccaugugg

SEQ ID NO: 1626409 - RNA, 22 nt, Human
gcuaggaccccuccaugugggc

SEQ ID NO: 1626410 - RNA, 21 nt, Human
gcuaggaauuguguuuauaau

SEQ ID NO: 1626411 - RNA, 16 nt, Human
gcuaguugggcuuccu

SEQ ID NO: 1626412 - RNA, 14 nt, Human
gcuaguugggcuuc

SEQ ID NO: 1626413 - RNA, 21 nt, Human
gcuaguugggcuuccucauag

SEQ ID NO: 1626414 - RNA, 18 nt, Human
gcuauucaguaauaacuc

SEQ ID NO: 1626415 - RNA, 16 nt, Human
gcuauuucuauauuuu

SEQ ID NO: 1626416 - RNA, 15 nt, Human
gcuauuucuauauuu

SEQ ID NO: 1626417 - RNA, 13 nt, Human
gcuauuucuauau

SEQ ID NO: 1626418 - RNA, 11 nt, Human
gcuauuucuau

SEQ ID NO: 1626419 - RNA, 22 nt, Human
gcuauuucuauauuuucauucu

SEQ ID NO: 1626420 - RNA, 20 nt, Human
gcuauuucuauauuuucauu

SEQ ID NO: 1626421 - RNA, 19 nt, Human
gcuauuucuauauuuucau

SEQ ID NO: 1626422 - RNA, 18 nt, Human
gcuauuucuauauuuuca

SEQ ID NO: 1626423 - RNA, 22 nt, Human
gcuaagugauccucccaccuca

SEQ ID NO: 1626424 - RNA, 18 nt, Human
gcuaagugauccucccac

SEQ ID NO: 1626425 - RNA, 16 nt, Human
gcgcaggcuggcccug

SEQ ID NO: 1626426 - RNA, 15 nt, Human
gcgcaggcuggcccu

SEQ ID NO: 1626427 - RNA, 23 nt, Human
gcgauucuucugcuucagccucc

SEQ ID NO: 1626428 - RNA, 21 nt, Human
gcgcagcauauucaggaagcu

SEQ ID NO: 1626429 - RNA, 14 nt, Human
gcgcaggcuggccc

SEQ ID NO: 1626430 - RNA, 23 nt, Human
gccuugaccauucuccaccugcc

SEQ ID NO: 1626431 - RNA, 22 nt, Human
gcgauucuucugcuucagccuc

SEQ ID NO: 1626432 - RNA, 22 nt, Human
gccuugaccauucuccaccugc

SEQ ID NO: 1626433 - RNA, 16 nt, Human
gccuugaccauucucc

SEQ ID NO: 1626434 - RNA, 23 nt, Human
gccuugaacuuugaccucugcag

SEQ ID NO: 1626435 - RNA, 19 nt, Human
gccugugccucugggacug

SEQ ID NO: 1626436 - RNA, 11 nt, Human
gccugggcaga

SEQ ID NO: 1626437 - RNA, 23 nt, Human
gccugggaucccucauccucaua

SEQ ID NO: 1626438 - RNA, 17 nt, Human
gccuguucagcuccagc

SEQ ID NO: 1626439 - RNA, 16 nt, Human
gccuguucagcuccag

SEQ ID NO: 1626440 - RNA, 15 nt, Human
gccuguucagcucca

SEQ ID NO: 1626441 - RNA, 16 nt, Human
gccuucucugaaggac

SEQ ID NO: 1626442 - RNA, 15 nt, Human
gccuucucugaagga

SEQ ID NO: 1626443 - RNA, 14 nt, Human
gccuugaacuuuga

SEQ ID NO: 1626444 - RNA, 21 nt, Human
gccuucuuuucucccuuuuaa

SEQ ID NO: 1626445 - RNA, 15 nt, Human
gcggcuggcagccca

SEQ ID NO: 1626446 - RNA, 20 nt, Human
gcgggaggauguucugggac

SEQ ID NO: 1626447 - RNA, 22 nt, Human
gcguucauggaacgcguugaaa

SEQ ID NO: 1626448 - RNA, 23 nt, Human
gcuaaggacuuguuagaucuagu

SEQ ID NO: 1626449 - RNA, 12 nt, Human
gcguugaaauug

SEQ ID NO: 1626450 - RNA, 12 nt, Human
gcuaaggacuug

SEQ ID NO: 1626451 - RNA, 18 nt, Human
gcguugaaauuguaauua

SEQ ID NO: 1626452 - RNA, 17 nt, Human
gccccuggcagccccug

SEQ ID NO: 1626453 - RNA, 16 nt, Human
gccccuggcagccccu

SEQ ID NO: 1626454 - RNA, 21 nt, Human
gccccugcugguucaggguug

SEQ ID NO: 1626455 - RNA, 22 nt, Human
gcccuuaccugccaggaagcca

SEQ ID NO: 1626456 - RNA, 17 nt, Human
gcccugugggcccccaa

SEQ ID NO: 1626457 - RNA, 16 nt, Human
gcccugugggccccca

SEQ ID NO: 1626458 - RNA, 21 nt, Human
gcccugugggcccccaaaugg

SEQ ID NO: 1626459 - RNA, 23 nt, Human
gcccuuaccugccaggaagccag

SEQ ID NO: 1626460 - RNA, 19 nt, Human
gcccuuagcagggaaacag

SEQ ID NO: 1626461 - RNA, 15 nt, Human
gcccugcccaccugg

SEQ ID NO: 1626462 - RNA, 14 nt, Human
gcccugcccaccug

SEQ ID NO: 1626463 - RNA, 20 nt, Human
gcccugcgggucacaggagg

SEQ ID NO: 1626464 - RNA, 13 nt, Human
gcccugugcucca

SEQ ID NO: 1626465 - RNA, 16 nt, Human
gccuacaggagugagc

SEQ ID NO: 1626466 - RNA, 21 nt, Human
gcccuuccaugucgccucugc

SEQ ID NO: 1626467 - RNA, 12 nt, Human
gcccuuccaugu

SEQ ID NO: 1626468 - RNA, 12 nt, Human
gcccuuccucuc

SEQ ID NO: 1626469 - RNA, 22 nt, Human
gcccuuccaugucgccucugca

SEQ ID NO: 1626470 - RNA, 15 nt, Human
gcccuuccucuccac

SEQ ID NO: 1626471 - RNA, 14 nt, Human
gcccuuccucucca

SEQ ID NO: 1626472 - RNA, 12 nt, Human
gccuagcauacg

SEQ ID NO: 1626473 - RNA, 19 nt, Human
gccuagcauacguacacau

SEQ ID NO: 1626474 - RNA, 17 nt, Human
gccuacaggagugagca

SEQ ID NO: 1626475 - RNA, 22 nt, Human
gccucauguccacugguucuuc

SEQ ID NO: 1626476 - RNA, 19 nt, Human
gccucaugcuaagacucag

SEQ ID NO: 1626477 - RNA, 15 nt, Human
gccuccauccugagg

SEQ ID NO: 1626478 - RNA, 14 nt, Human
gccuccauccugag

SEQ ID NO: 1626479 - RNA, 13 nt, Human
gccuccauccuga

SEQ ID NO: 1626480 - RNA, 18 nt, Human
gccuccugcccuuaccug

SEQ ID NO: 1626481 - RNA, 19 nt, Human
gccuccugaguagcuggga

SEQ ID NO: 1626482 - RNA, 13 nt, Human
gccucgaacuggc

SEQ ID NO: 1626483 - RNA, 22 nt, Human
gccuccuuugugaggaagccgc

SEQ ID NO: 1626484 - RNA, 16 nt, Human
gccucgaacuggcugc

SEQ ID NO: 1626485 - RNA, 11 nt, Human
gccccaaaagg

SEQ ID NO: 1626486 - RNA, 21 nt, Human
gccccaaaacucuccucugcu

SEQ ID NO: 1626487 - RNA, 20 nt, Human
gccccaaaacucuccucugc

SEQ ID NO: 1626488 - RNA, 15 nt, Human
gccccuggcagcccc

SEQ ID NO: 1626489 - RNA, 12 nt, Human
gccccuggcagc

SEQ ID NO: 1626490 - RNA, 16 nt, Human
gccccugcugguucag

SEQ ID NO: 1626491 - RNA, 15 nt, Human
gccccugcugguuca

SEQ ID NO: 1626492 - RNA, 17 nt, Human
gcccccucugcccugcg

SEQ ID NO: 1626493 - RNA, 12 nt, Human
gccccugcuggu

SEQ ID NO: 1626494 - RNA, 16 nt, Human
gcccccucugcccugc

SEQ ID NO: 1626495 - RNA, 15 nt, Human
gcccccucugcccug

SEQ ID NO: 1626496 - RNA, 22 nt, Human
gcccaggccccugccacccugg

SEQ ID NO: 1626497 - RNA, 21 nt, Human
gcccaggccccugccacccug

SEQ ID NO: 1626498 - RNA, 20 nt, Human
gcccaggccccugccacccu

SEQ ID NO: 1626499 - RNA, 12 nt, Human
gcccaggccccu

SEQ ID NO: 1626500 - RNA, 11 nt, Human
gcccaggcccc

SEQ ID NO: 1626501 - RNA, 11 nt, Human
gcccaggcagg

SEQ ID NO: 1626502 - RNA, 12 nt, Human
gcccaggcaggu

SEQ ID NO: 1626503 - RNA, 12 nt, Human
gcauuuagaugu

SEQ ID NO: 1626504 - RNA, 18 nt, Human
gcauuuacuuuguguuca

SEQ ID NO: 1626505 - RNA, 19 nt, Human
gcauuuaggccaugggaca

SEQ ID NO: 1626506 - RNA, 13 nt, Human
gcauuuagaugua

SEQ ID NO: 1626507 - RNA, 22 nt, Human
gccauguuuauuacaguauaau

SEQ ID NO: 1626508 - RNA, 18 nt, Human
gccauguuuauuacagua

SEQ ID NO: 1626509 - RNA, 14 nt, Human
gccauguuuauuac

SEQ ID NO: 1626510 - RNA, 13 nt, Human
gccauguuuauua

SEQ ID NO: 1626511 - RNA, 21 nt, Human
gcccacgcccccacuggugac

SEQ ID NO: 1626512 - RNA, 17 nt, Human
gcccacgcccccacugg

SEQ ID NO: 1626513 - RNA, 16 nt, Human
gcccacgcccccacug

SEQ ID NO: 1626514 - RNA, 17 nt, Human
gccauugacuucuuccc

SEQ ID NO: 1626515 - RNA, 23 nt, Human
gcccaggaaaggcuccaggagca

SEQ ID NO: 1626516 - RNA, 22 nt, Human
gcccaggaaaggcuccaggagc

SEQ ID NO: 1626517 - RNA, 24 nt, Human
gcccaggaaaggcuccaggagcag

SEQ ID NO: 1626518 - RNA, 13 nt, Human
gcccacuucugcc

SEQ ID NO: 1626519 - RNA, 21 nt, Human
gcccacgcuggagugcaguga

SEQ ID NO: 1626520 - RNA, 19 nt, Human
gcccacgcuggagugcagu

SEQ ID NO: 1626521 - RNA, 23 nt, Human
gcccacgcuggagugcagugagc

SEQ ID NO: 1626522 - RNA, 22 nt, Human
gcccacuguacuugcucuugau

SEQ ID NO: 1626523 - RNA, 20 nt, Human
gcccacuguacuugcucuug

SEQ ID NO: 1626524 - RNA, 15 nt, Human
gcccacuguacuugc

SEQ ID NO: 1626525 - RNA, 16 nt, Human
gcuuggggaccagagc

SEQ ID NO: 1626526 - RNA, 23 nt, Human
gcuugggcuucauccuccucaga

SEQ ID NO: 1626527 - RNA, 19 nt, Human
gcuugaccgugaggccaga

SEQ ID NO: 1626528 - RNA, 18 nt, Human
gcuugaccgugaggccag

SEQ ID NO: 1626529 - RNA, 17 nt, Human
gcuugaccgugaggcca

SEQ ID NO: 1626530 - RNA, 23 nt, Human
gcuucuucagagacuccugcagg

SEQ ID NO: 1626531 - RNA, 21 nt, Human
gcuucuucagagacuccugca

SEQ ID NO: 1626532 - RNA, 19 nt, Human
gcuucuucagagacuccug

SEQ ID NO: 1626533 - RNA, 16 nt, Human
gcuuaacuucacauau

SEQ ID NO: 1626534 - RNA, 17 nt, Human
gcuuaacuucacauauu

SEQ ID NO: 1626535 - RNA, 16 nt, Human
gcuucuucagagacuc

SEQ ID NO: 1626536 - RNA, 23 nt, Human
gcuuucuacccagcgagcccugg

SEQ ID NO: 1626537 - RNA, 22 nt, Human
gcuuucuacccagcgagcccug

SEQ ID NO: 1626538 - RNA, 19 nt, Human
gcuuucuacccagcgagcc

SEQ ID NO: 1626539 - RNA, 13 nt, Human
gcuuucuacccag

SEQ ID NO: 1626540 - RNA, 21 nt, Human
gcuuggggaccagagcugcca

SEQ ID NO: 1626541 - RNA, 20 nt, Human
gcuuggggaccagagcugcc

SEQ ID NO: 1626542 - RNA, 18 nt, Human
gcuuggggaccagagcug

SEQ ID NO: 1626543 - RNA, 17 nt, Human
gcuuggggaccagagcu

SEQ ID NO: 1626544 - RNA, 22 nt, Human
gcuuggggaccagagcugccac

SEQ ID NO: 1626545 - RNA, 20 nt, Human
gcuugaccgugaggccagag

SEQ ID NO: 1626546 - RNA, 13 nt, Human
ggaaacugccagc

SEQ ID NO: 1626547 - RNA, 20 nt, Human
ggaaacagcuaaugggacac

SEQ ID NO: 1626548 - RNA, 15 nt, Human
ggaaacccagcucug

SEQ ID NO: 1626549 - RNA, 16 nt, Human
ggaaaaaauaacaaug

SEQ ID NO: 1626550 - RNA, 15 nt, Human
gcuuuuuaauauuga

SEQ ID NO: 1626551 - RNA, 13 nt, Human
gcuuuugugcauu

SEQ ID NO: 1626552 - RNA, 19 nt, Human
gcuuuugugcauuaucuag

SEQ ID NO: 1626553 - RNA, 17 nt, Human
ggaaagaguaggaagac

SEQ ID NO: 1626554 - RNA, 16 nt, Human
ggaaagaguaggaaga

SEQ ID NO: 1626555 - RNA, 19 nt, Human
ggaaagcaaaggagauugg

SEQ ID NO: 1626556 - RNA, 14 nt, Human
ggaaagaggcucug

SEQ ID NO: 1626557 - RNA, 20 nt, Human
ggaaagacuuuuccaacccu

SEQ ID NO: 1626558 - RNA, 16 nt, Human
ggaaagcccugugcuc

SEQ ID NO: 1626559 - RNA, 20 nt, Human
gcuuuucccuuuuuuuaagu

SEQ ID NO: 1626560 - RNA, 21 nt, Human
gcuuuucccuuuuuuuaagua

SEQ ID NO: 1626561 - RNA, 21 nt, Human
ggaagccagcaggcucucagg

SEQ ID NO: 1626562 - RNA, 23 nt, Human
ggaagccagcaggcucucaggcc

SEQ ID NO: 1626563 - RNA, 22 nt, Human
ggaagccagcaggcucucaggc

SEQ ID NO: 1626564 - RNA, 18 nt, Human
ggaagccgcuggggccag

SEQ ID NO: 1626565 - RNA, 19 nt, Human
ggaaaucaggguuaguauu

SEQ ID NO: 1626566 - RNA, 23 nt, Human
ggaaaucaccgaaaacguggcug

SEQ ID NO: 1626567 - RNA, 13 nt, Human
ggaaaucuuuaaa

SEQ ID NO: 1626568 - RNA, 16 nt, Human
ggaaauccaggguggu

SEQ ID NO: 1626569 - RNA, 21 nt, Human
ggacagucaccucauggaauu

SEQ ID NO: 1626570 - RNA, 18 nt, Human
ggacagucaccucaugga

SEQ ID NO: 1626571 - RNA, 17 nt, Human
ggacagucaccucaugg

SEQ ID NO: 1626572 - RNA, 15 nt, Human
ggacagggcauggcc

SEQ ID NO: 1626573 - RNA, 22 nt, Human
ggacagggcauggccagguggc

SEQ ID NO: 1626574 - RNA, 17 nt, Human
ggacagggaggugaccc

SEQ ID NO: 1626575 - RNA, 23 nt, Human
ggacacccugugauggggcccug

SEQ ID NO: 1626576 - RNA, 13 nt, Human
ggacacccuguga

SEQ ID NO: 1626577 - RNA, 14 nt, Human
ggacauggacaagg

SEQ ID NO: 1626578 - RNA, 13 nt, Human
ggacauggacaag

SEQ ID NO: 1626579 - RNA, 12 nt, Human
ggacacagcucu

SEQ ID NO: 1626580 - RNA, 14 nt, Human
ggaaugauuaauua

SEQ ID NO: 1626581 - RNA, 19 nt, Human
ggaaugaaugucaguguga

SEQ ID NO: 1626582 - RNA, 13 nt, Human
ggacacagcucuu

SEQ ID NO: 1626583 - RNA, 14 nt, Human
ggacacagcucuuc

SEQ ID NO: 1626584 - RNA, 12 nt, Human
ggacacccugug

SEQ ID NO: 1626585 - RNA, 15 nt, Human
ggaauaccugucccc

SEQ ID NO: 1626586 - RNA, 21 nt, Human
ggaagcucagggccuggcuca

SEQ ID NO: 1626587 - RNA, 22 nt, Human
ggaagcucagggccuggcucag

SEQ ID NO: 1626588 - RNA, 17 nt, Human
ggaagcucagggccugg

SEQ ID NO: 1626589 - RNA, 16 nt, Human
ggaagcucagggccug

SEQ ID NO: 1626590 - RNA, 15 nt, Human
ggaagccugauuaaa

SEQ ID NO: 1626591 - RNA, 16 nt, Human
ggaauauauaaccagu

SEQ ID NO: 1626592 - RNA, 19 nt, Human
ggaauaccugucccccuga

SEQ ID NO: 1626593 - RNA, 16 nt, Human
ggaauaccuguccccc

SEQ ID NO: 1626594 - RNA, 19 nt, Human
ggaauacucuuauaucuau

SEQ ID NO: 1626595 - RNA, 21 nt, Human
gcuguauuuuaaaagaaugau

SEQ ID NO: 1626596 - RNA, 18 nt, Human
gcuguauuuuaaaagaau

SEQ ID NO: 1626597 - RNA, 20 nt, Human
gcuguauuuuaaaagaauga

SEQ ID NO: 1626598 - RNA, 19 nt, Human
gcuguaucccaugagccuc

SEQ ID NO: 1626599 - RNA, 17 nt, Human
gcuguaucccaugagcc

SEQ ID NO: 1626600 - RNA, 15 nt, Human
gcuguuggcuggggg

SEQ ID NO: 1626601 - RNA, 17 nt, Human
gcugugcugcccugccc

SEQ ID NO: 1626602 - RNA, 16 nt, Human
gcugugcugcccugcc

SEQ ID NO: 1626603 - RNA, 15 nt, Human
gcugugcugcccugc

SEQ ID NO: 1626604 - RNA, 20 nt, Human
gcuguuggcugggggccuca

SEQ ID NO: 1626605 - RNA, 16 nt, Human
gcuguuggcugggggc

SEQ ID NO: 1626606 - RNA, 13 nt, Human
gcugugcucugga

SEQ ID NO: 1626607 - RNA, 16 nt, Human
gcugugccucugccug

SEQ ID NO: 1626608 - RNA, 15 nt, Human
gcugugccucugccu

SEQ ID NO: 1626609 - RNA, 14 nt, Human
gcugugccucugcc

SEQ ID NO: 1626610 - RNA, 16 nt, Human
gcugugcucuggacag

SEQ ID NO: 1626611 - RNA, 15 nt, Human
gcugugcucuggaca

SEQ ID NO: 1626612 - RNA, 18 nt, Human
gcugugcucuggacaggc

SEQ ID NO: 1626613 - RNA, 13 nt, Human
gcugcugaaacaa

SEQ ID NO: 1626614 - RNA, 12 nt, Human
gcugcugaaggc

SEQ ID NO: 1626615 - RNA, 14 nt, Human
gcuggcgugcagug

SEQ ID NO: 1626616 - RNA, 19 nt, Human
gcuggcuguuggcuggggg

SEQ ID NO: 1626617 - RNA, 18 nt, Human
gcuggcuguuggcugggg

SEQ ID NO: 1626618 - RNA, 11 nt, Human
gcuggcugccu

SEQ ID NO: 1626619 - RNA, 20 nt, Human
gcuggcugccuuagaaccuu

SEQ ID NO: 1626620 - RNA, 14 nt, Human
gcuggcugccuuag

SEQ ID NO: 1626621 - RNA, 18 nt, Human
gcuggcgugcaguggugc

SEQ ID NO: 1626622 - RNA, 15 nt, Human
gcuggcgugcagugg

SEQ ID NO: 1626623 - RNA, 20 nt, Human
gcuggcgugcaguggugcga

SEQ ID NO: 1626624 - RNA, 21 nt, Human
gcuggguucuacccaggugcu

SEQ ID NO: 1626625 - RNA, 20 nt, Human
gcuggguucuacccaggugc

SEQ ID NO: 1626626 - RNA, 18 nt, Human
gcuggguucuacccaggu

SEQ ID NO: 1626627 - RNA, 23 nt, Human
gcugggguggggaccucaggccu

SEQ ID NO: 1626628 - RNA, 22 nt, Human
gcugggguggggaccucaggcc

SEQ ID NO: 1626629 - RNA, 19 nt, Human
gcugggguggggaccucag

SEQ ID NO: 1626630 - RNA, 17 nt, Human
gcugggguggggaccuc

SEQ ID NO: 1626631 - RNA, 20 nt, Human
gcugggccccugccucucug

SEQ ID NO: 1626632 - RNA, 18 nt, Human
gcugggccccugccucuc

SEQ ID NO: 1626633 - RNA, 14 nt, Human
gcugggccccugcc

SEQ ID NO: 1626634 - RNA, 13 nt, Human
gcugggccccugc

SEQ ID NO: 1626635 - RNA, 12 nt, Human
gcugggccccug

SEQ ID NO: 1626636 - RNA, 23 nt, Human
gcuggcuguuggcugggggccuc

SEQ ID NO: 1626637 - RNA, 20 nt, Human
gcuggcuguuggcugggggc

SEQ ID NO: 1626638 - RNA, 15 nt, Human
gcugaggugggagga

SEQ ID NO: 1626639 - RNA, 14 nt, Human
gcugaggugggagg

SEQ ID NO: 1626640 - RNA, 23 nt, Human
gcugagggugagugggugaauaa

SEQ ID NO: 1626641 - RNA, 14 nt, Human
gcugcaccggcugg

SEQ ID NO: 1626642 - RNA, 13 nt, Human
gcugcaccggcug

SEQ ID NO: 1626643 - RNA, 19 nt, Human
gcugcacccucaggcaggu

SEQ ID NO: 1626644 - RNA, 18 nt, Human
gcugcacccucaggcagg

SEQ ID NO: 1626645 - RNA, 14 nt, Human
gcugccuccccucc

SEQ ID NO: 1626646 - RNA, 13 nt, Human
gcugccucaugcu

SEQ ID NO: 1626647 - RNA, 16 nt, Human
gcugccucucccauca

SEQ ID NO: 1626648 - RNA, 20 nt, Human
gcugccugggaucccucauc

SEQ ID NO: 1626649 - RNA, 13 nt, Human
gcugccuguucag

SEQ ID NO: 1626650 - RNA, 12 nt, Human
gcugccuguuca

SEQ ID NO: 1626651 - RNA, 17 nt, Human
gcugccuguucagcucc

SEQ ID NO: 1626652 - RNA, 23 nt, Human
gcugcucuugaacuccugaccuc

SEQ ID NO: 1626653 - RNA, 21 nt, Human
gcugccugggaucccucaucc

SEQ ID NO: 1626654 - RNA, 19 nt, Human
gcugccccuggcagccccu

SEQ ID NO: 1626655 - RNA, 18 nt, Human
gcugccccuggcagcccc

SEQ ID NO: 1626656 - RNA, 20 nt, Human
gcugccccuggcagccccug

SEQ ID NO: 1626657 - RNA, 10 nt, Human
ggcaaaauaa

SEQ ID NO: 1626658 - RNA, 15 nt, Human
ggcaaaaaggcagga

SEQ ID NO: 1626659 - RNA, 18 nt, Human
ggcacaccgggcacucag

SEQ ID NO: 1626660 - RNA, 16 nt, Human
ggcacugcuuccagug

SEQ ID NO: 1626661 - RNA, 18 nt, Human
ggcacaucagcacgauuu

SEQ ID NO: 1626662 - RNA, 21 nt, Human
ggcagccccauucugccugcc

SEQ ID NO: 1626663 - RNA, 20 nt, Human
ggcagccccauucugccugc

SEQ ID NO: 1626664 - RNA, 16 nt, Human
ggcagccccauucugc

SEQ ID NO: 1626665 - RNA, 22 nt, Human
ggcagccccauucugccugccc

SEQ ID NO: 1626666 - RNA, 23 nt, Human
ggcagccccauucugccugccca

SEQ ID NO: 1626667 - RNA, 16 nt, Human
ggcagccucuucaaaa

SEQ ID NO: 1626668 - RNA, 20 nt, Human
ggcacugcuuccagugaggc

SEQ ID NO: 1626669 - RNA, 22 nt, Human
ggcacugcuuccagugaggcuc

SEQ ID NO: 1626670 - RNA, 13 nt, Human
ggcagccaggcca

SEQ ID NO: 1626671 - RNA, 14 nt, Human
ggcagccaggccac

SEQ ID NO: 1626672 - RNA, 18 nt, Human
ggcaggaggaucacuuga

SEQ ID NO: 1626673 - RNA, 10 nt, Human
ggcagggagg

SEQ ID NO: 1626674 - RNA, 18 nt, Human
ggcagggagggccugggc

SEQ ID NO: 1626675 - RNA, 17 nt, Human
ggcagggagggccuggg

SEQ ID NO: 1626676 - RNA, 20 nt, Human
ggcagggagggccugggccc

SEQ ID NO: 1626677 - RNA, 19 nt, Human
ggcagggagggccugggcc

SEQ ID NO: 1626678 - RNA, 14 nt, Human
ggcauuugcugaau

SEQ ID NO: 1626679 - RNA, 20 nt, Human
ggcaucgcaauguaagacuc

SEQ ID NO: 1626680 - RNA, 19 nt, Human
ggccaaaggaagcacaugc

SEQ ID NO: 1626681 - RNA, 21 nt, Human
ggccaaaggaagcacaugccu

SEQ ID NO: 1626682 - RNA, 16 nt, Human
ggccaaaggaagcaca

SEQ ID NO: 1626683 - RNA, 14 nt, Human
ggccaaaggaagca

SEQ ID NO: 1626684 - RNA, 17 nt, Human
ggcauuuguuugaacug

SEQ ID NO: 1626685 - RNA, 18 nt, Human
ggcauuuuacuguacaga

SEQ ID NO: 1626686 - RNA, 19 nt, Human
ggccagagggagugacaga

SEQ ID NO: 1626687 - RNA, 17 nt, Human
ggccagagggagugaca

SEQ ID NO: 1626688 - RNA, 18 nt, Human
ggccagagacacaagccu

SEQ ID NO: 1626689 - RNA, 17 nt, Human
ggccagagacacaagcc

SEQ ID NO: 1626690 - RNA, 15 nt, Human
ggaggcucuggagcc

SEQ ID NO: 1626691 - RNA, 14 nt, Human
ggaggggggaggug

SEQ ID NO: 1626692 - RNA, 13 nt, Human
ggaggggggaggu

SEQ ID NO: 1626693 - RNA, 23 nt, Human
ggaggugggauccuccaggugca

SEQ ID NO: 1626694 - RNA, 22 nt, Human
ggaggugggauccuccaggugc

SEQ ID NO: 1626695 - RNA, 21 nt, Human
ggagggugacgggggugaacu

SEQ ID NO: 1626696 - RNA, 22 nt, Human
ggagguaaggaauaccuguccc

SEQ ID NO: 1626697 - RNA, 15 nt, Human
ggaguggccacagaa

SEQ ID NO: 1626698 - RNA, 22 nt, Human
ggagugggcccaaugcacuuug

SEQ ID NO: 1626699 - RNA, 12 nt, Human
ggagugggccca

SEQ ID NO: 1626700 - RNA, 16 nt, Human
ggaguggccacagaaa

SEQ ID NO: 1626701 - RNA, 18 nt, Human
ggaucucuugagccuggg

SEQ ID NO: 1626702 - RNA, 23 nt, Human
ggauccugagccagauuucacuc

SEQ ID NO: 1626703 - RNA, 20 nt, Human
ggauccugagccagauuuca

SEQ ID NO: 1626704 - RNA, 19 nt, Human
ggauccugagccagauuuc

SEQ ID NO: 1626705 - RNA, 18 nt, Human
ggauccugagccagauuu

SEQ ID NO: 1626706 - RNA, 16 nt, Human
ggauccugagccagau

SEQ ID NO: 1626707 - RNA, 15 nt, Human
ggauccugagccaga

SEQ ID NO: 1626708 - RNA, 16 nt, Human
ggaguucaucuugaau

SEQ ID NO: 1626709 - RNA, 20 nt, Human
ggauuguccccgacccuugc

SEQ ID NO: 1626710 - RNA, 16 nt, Human
ggauuguccccgaccc

SEQ ID NO: 1626711 - RNA, 12 nt, Human
ggauuuaacaga

SEQ ID NO: 1626712 - RNA, 22 nt, Human
ggauuuaacagaaauguacagc

SEQ ID NO: 1626713 - RNA, 16 nt, Human
ggauuuaacagaaaug

SEQ ID NO: 1626714 - RNA, 17 nt, Human
ggauuuaacagaaaugu

SEQ ID NO: 1626715 - RNA, 14 nt, Human
ggaugaaaaaauaa

SEQ ID NO: 1626716 - RNA, 13 nt, Human
ggauuguccccga

SEQ ID NO: 1626717 - RNA, 14 nt, Human
ggauuguaguccca

SEQ ID NO: 1626718 - RNA, 15 nt, Human
ggcucacugcagccu

SEQ ID NO: 1626719 - RNA, 14 nt, Human
ggcucacugcagcc

SEQ ID NO: 1626720 - RNA, 13 nt, Human
ggcucacugcagc

SEQ ID NO: 1626721 - RNA, 20 nt, Human
ggcucuuccaggcugggaga

SEQ ID NO: 1626722 - RNA, 18 nt, Human
ggcucuuccaggcuggga

SEQ ID NO: 1626723 - RNA, 17 nt, Human
ggcucuuccaggcuggg

SEQ ID NO: 1626724 - RNA, 15 nt, Human
ggcucuuccaggcug

SEQ ID NO: 1626725 - RNA, 13 nt, Human
ggcucccuuccca

SEQ ID NO: 1626726 - RNA, 18 nt, Human
ggcugcccuuucugggca

SEQ ID NO: 1626727 - RNA, 14 nt, Human
ggcugcccuuucug

SEQ ID NO: 1626728 - RNA, 11 nt, Human
ggcugcccuuu

SEQ ID NO: 1626729 - RNA, 10 nt, Human
ggcugcccuu

SEQ ID NO: 1626730 - RNA, 12 nt, Human
ggcugcccuggu

SEQ ID NO: 1626731 - RNA, 15 nt, Human
ggcuggccuggcccc

SEQ ID NO: 1626732 - RNA, 14 nt, Human
ggcuggccuggccc

SEQ ID NO: 1626733 - RNA, 13 nt, Human
ggcuggccuggcc

SEQ ID NO: 1626734 - RNA, 22 nt, Human
aaaaaacugcugacuguuuucu

SEQ ID NO: 1626735 - RNA, 14 nt, Human
aaaaaggaggaaga

SEQ ID NO: 1626736 - RNA, 12 nt, Human
aaaaaggcagga

SEQ ID NO: 1626737 - RNA, 21 nt, Human
aaaaaggaugcacagaguugu

SEQ ID NO: 1626738 - RNA, 14 nt, Human
aaaaauaaaaaaca

SEQ ID NO: 1626739 - RNA, 13 nt, Human
aaaaauacaaaaa

SEQ ID NO: 1626740 - RNA, 14 nt, Human
ggcuggguuggagg

SEQ ID NO: 1626741 - RNA, 16 nt, Human
ggccuucggccuccau

SEQ ID NO: 1626742 - RNA, 22 nt, Human
ggccuucggccuccauccugag

SEQ ID NO: 1626743 - RNA, 18 nt, Human
ggccuucggccuccaucc

SEQ ID NO: 1626744 - RNA, 20 nt, Human
ggcuaagcuucacuguaaaa

SEQ ID NO: 1626745 - RNA, 14 nt, Human
ggcgugcaguggug

SEQ ID NO: 1626746 - RNA, 18 nt, Human
ggcgugagaccugccccu

SEQ ID NO: 1626747 - RNA, 17 nt, Human
ggcgugagaccugcccc

SEQ ID NO: 1626748 - RNA, 16 nt, Human
ggcgugagaccugccc

SEQ ID NO: 1626749 - RNA, 14 nt, Human
ggcgugagaccugc

SEQ ID NO: 1626750 - RNA, 16 nt, Human
ggcuaauguacugcau

SEQ ID NO: 1626751 - RNA, 20 nt, Human
ggcuaagugauccucccacc

SEQ ID NO: 1626752 - RNA, 18 nt, Human
ggcuaauuuuuguuuugu

SEQ ID NO: 1626753 - RNA, 13 nt, Human
ggcuaccuuugua

SEQ ID NO: 1626754 - RNA, 22 nt, Human
ggcuacaccuuagccugcccuc

SEQ ID NO: 1626755 - RNA, 23 nt, Human
ggcuacaccuuagccugcccucc

SEQ ID NO: 1626756 - RNA, 14 nt, Human
ggcuaccuuuguau

SEQ ID NO: 1626757 - RNA, 16 nt, Human
ggcuagagguucaaag

SEQ ID NO: 1626758 - RNA, 16 nt, Human
ggccugcaagggagug

SEQ ID NO: 1626759 - RNA, 11 nt, Human
ggccugccugu

SEQ ID NO: 1626760 - RNA, 15 nt, Human
ggccuggccagaugc

SEQ ID NO: 1626761 - RNA, 12 nt, Human
ggccuggccaga

SEQ ID NO: 1626762 - RNA, 15 nt, Human
ggccuggcagccgug

SEQ ID NO: 1626763 - RNA, 14 nt, Human
ggccuggcagccgu

SEQ ID NO: 1626764 - RNA, 16 nt, Human
ggccuggccagaugca

SEQ ID NO: 1626765 - RNA, 17 nt, Human
ggccuucagggagugag

SEQ ID NO: 1626766 - RNA, 19 nt, Human
ggccucccaacucacccca

SEQ ID NO: 1626767 - RNA, 18 nt, Human
ggccucccaacucacccc

SEQ ID NO: 1626768 - RNA, 17 nt, Human
ggccucccaacucaccc

SEQ ID NO: 1626769 - RNA, 13 nt, Human
ggccucagugcca

SEQ ID NO: 1626770 - RNA, 22 nt, Human
ggccucccaacucaccccagcc

SEQ ID NO: 1626771 - RNA, 20 nt, Human
ggccucccaacucaccccag

SEQ ID NO: 1626772 - RNA, 23 nt, Human
ggccucccaacucaccccagccc

SEQ ID NO: 1626773 - RNA, 16 nt, Human
ggccagaugcaccagc

SEQ ID NO: 1626774 - RNA, 15 nt, Human
ggccagaugcaccag

SEQ ID NO: 1626775 - RNA, 22 nt, Human
ggccagagggagugacagaggc

SEQ ID NO: 1626776 - RNA, 17 nt, Human
ggccagaugcaccagcc

SEQ ID NO: 1626777 - RNA, 21 nt, Human
ggccccugccucucugcaggu

SEQ ID NO: 1626778 - RNA, 19 nt, Human
ggccccugccucucugcag

SEQ ID NO: 1626779 - RNA, 18 nt, Human
ggccccugccucucugca

SEQ ID NO: 1626780 - RNA, 17 nt, Human
ggccccugccucucugc

SEQ ID NO: 1626781 - RNA, 13 nt, Human
ggccccugccucu

SEQ ID NO: 1626782 - RNA, 15 nt, Human
aaaauauuccugcau

SEQ ID NO: 1626783 - RNA, 22 nt, Human
aaaauaugaccacacuccagcu

SEQ ID NO: 1626784 - RNA, 16 nt, Human
aaaauauuuuccugcc

SEQ ID NO: 1626785 - RNA, 18 nt, Human
aaaauauuuuaugaucca

SEQ ID NO: 1626786 - RNA, 15 nt, Human
aaaauauuuuaugau

SEQ ID NO: 1626787 - RNA, 20 nt, Human
aaaauggaagacagcucuua

SEQ ID NO: 1626788 - RNA, 23 nt, Human
aaaaugcuguauuagucacagag

SEQ ID NO: 1626789 - RNA, 12 nt, Human
aaaaugagaaau

SEQ ID NO: 1626790 - RNA, 11 nt, Human
aaaaugagaaa

SEQ ID NO: 1626791 - RNA, 14 nt, Human
aaaauacacacuca

SEQ ID NO: 1626792 - RNA, 20 nt, Human
aaaauaauuuuuauauuuga

SEQ ID NO: 1626793 - RNA, 17 nt, Human
aaaauaauuuuuauauu

SEQ ID NO: 1626794 - RNA, 16 nt, Human
aaaauaauuuuuauau

SEQ ID NO: 1626795 - RNA, 13 nt, Human
aaaauaccaagga

SEQ ID NO: 1626796 - RNA, 14 nt, Human
aaaauaccaaggaa

SEQ ID NO: 1626797 - RNA, 11 nt, Human
aaaauaauuuu

SEQ ID NO: 1626798 - RNA, 11 nt, Human
aaaaggcagga

SEQ ID NO: 1626799 - RNA, 17 nt, Human
aaaagguuaauaaagua

SEQ ID NO: 1626800 - RNA, 16 nt, Human
aaaagguuaauaaagu

SEQ ID NO: 1626801 - RNA, 14 nt, Human
aaaaggaugcacag

SEQ ID NO: 1626802 - RNA, 15 nt, Human
aaaaggaugcacaga

SEQ ID NO: 1626803 - RNA, 19 nt, Human
aaaaggaugcacagaguug

SEQ ID NO: 1626804 - RNA, 22 nt, Human
aaaaggaugcacagaguuguua

SEQ ID NO: 1626805 - RNA, 22 nt, Human
aaaaggagccaauuuaaagaaa

SEQ ID NO: 1626806 - RNA, 13 nt, Human
aaaaggaugcaca

SEQ ID NO: 1626807 - RNA, 15 nt, Human
gggcgugguggugag

SEQ ID NO: 1626808 - RNA, 21 nt, Human
gggcggugagaggggaacaga

SEQ ID NO: 1626809 - RNA, 19 nt, Human
gggcgugagaccugccccu

SEQ ID NO: 1626810 - RNA, 18 nt, Human
gggcgugagaccugcccc

SEQ ID NO: 1626811 - RNA, 22 nt, Human
gggccucgguguggagaagcgg

SEQ ID NO: 1626812 - RNA, 18 nt, Human
gggccucuuaugggcugg

SEQ ID NO: 1626813 - RNA, 19 nt, Human
gggccucuuaugggcuggg

SEQ ID NO: 1626814 - RNA, 14 nt, Human
gggccucagugcca

SEQ ID NO: 1626815 - RNA, 13 nt, Human
gggccucagugcc

SEQ ID NO: 1626816 - RNA, 15 nt, Human
gggccucagugccac

SEQ ID NO: 1626817 - RNA, 14 nt, Human
gggccaggagccuc

SEQ ID NO: 1626818 - RNA, 13 nt, Human
gggccaggagccu

SEQ ID NO: 1626819 - RNA, 16 nt, Human
aaaauggguuuuacug

SEQ ID NO: 1626820 - RNA, 17 nt, Human
gggcuggguucuaccca

SEQ ID NO: 1626821 - RNA, 18 nt, Human
aaaaugguuuaaaugguc

SEQ ID NO: 1626822 - RNA, 16 nt, Human
aaaaugguuuaaaugg

SEQ ID NO: 1626823 - RNA, 15 nt, Human
gggcugggcagagga

SEQ ID NO: 1626824 - RNA, 21 nt, Human
gggcugcaccggcuggccugg

SEQ ID NO: 1626825 - RNA, 20 nt, Human
gggcugcaccggcuggccug

SEQ ID NO: 1626826 - RNA, 19 nt, Human
gggcucagcggggacagcu

SEQ ID NO: 1626827 - RNA, 17 nt, Human
gggcucagcggggacag

SEQ ID NO: 1626828 - RNA, 22 nt, Human
gggcucagcaaaagaugcuucu

SEQ ID NO: 1626829 - RNA, 18 nt, Human
gggcuaguugggcuuccu

SEQ ID NO: 1626830 - RNA, 15 nt, Human
gggcuaguugggcuu

SEQ ID NO: 1626831 - RNA, 20 nt, Human
gggcuaggaaauccagggug

SEQ ID NO: 1626832 - RNA, 13 nt, Human
gggcuccagacac

SEQ ID NO: 1626833 - RNA, 10 nt, Human
gggcuccaga

SEQ ID NO: 1626834 - RNA, 21 nt, Human
gggcucagcggggacagcucc

SEQ ID NO: 1626835 - RNA, 19 nt, Human
gggcugcaccggcuggccu

SEQ ID NO: 1626836 - RNA, 14 nt, Human
ggucagugcaaaua

SEQ ID NO: 1626837 - RNA, 19 nt, Human
gguaucaggugcugccauc

SEQ ID NO: 1626838 - RNA, 22 nt, Human
aaacuugauguguuaucucuua

SEQ ID NO: 1626839 - RNA, 20 nt, Human
gguaaggaauaccugucccc

SEQ ID NO: 1626840 - RNA, 20 nt, Human
gguaggguaagugagagagg

SEQ ID NO: 1626841 - RNA, 23 nt, Human
gguagggugggccuucagggagu

SEQ ID NO: 1626842 - RNA, 11 nt, Human
gguaggguggg

SEQ ID NO: 1626843 - RNA, 14 nt, Human
gguaucaggugcug

SEQ ID NO: 1626844 - RNA, 19 nt, Human
aaacuucagacauagaauu

SEQ ID NO: 1626845 - RNA, 18 nt, Human
gggugggacacccuguga

SEQ ID NO: 1626846 - RNA, 15 nt, Human
gggugggacacccug

SEQ ID NO: 1626847 - RNA, 14 nt, Human
aaacuuaaucuaaa

SEQ ID NO: 1626848 - RNA, 21 nt, Human
aaacguggcugcuucaaggau

SEQ ID NO: 1626849 - RNA, 20 nt, Human
ggguuuugccauguuggcca

SEQ ID NO: 1626850 - RNA, 23 nt, Human
ggguuuugccauguuggccaggc

SEQ ID NO: 1626851 - RNA, 19 nt, Human
gggugggacacccugugau

SEQ ID NO: 1626852 - RNA, 15 nt, Human
gggugguggugauag

SEQ ID NO: 1626853 - RNA, 13 nt, Human
gguaacaggcaga

SEQ ID NO: 1626854 - RNA, 22 nt, Human
gguaaaucagacuaugaaguuu

SEQ ID NO: 1626855 - RNA, 19 nt, Human
aaacauuuugucauauaag

SEQ ID NO: 1626856 - RNA, 20 nt, Human
gggucacucuggcagcucag

SEQ ID NO: 1626857 - RNA, 14 nt, Human
gggucacucuggca

SEQ ID NO: 1626858 - RNA, 22 nt, Human
gggucacucuggcagcucagag

SEQ ID NO: 1626859 - RNA, 22 nt, Human
aaaccugugucucugagaguag

SEQ ID NO: 1626860 - RNA, 17 nt, Human
aaaccuucacuuaggaa

SEQ ID NO: 1626861 - RNA, 15 nt, Human
ggggaccagagcugc

SEQ ID NO: 1626862 - RNA, 14 nt, Human
ggggaccagagcug

SEQ ID NO: 1626863 - RNA, 13 nt, Human
ggggaccagagcu

SEQ ID NO: 1626864 - RNA, 12 nt, Human
ggggaccagagc

SEQ ID NO: 1626865 - RNA, 18 nt, Human
aaaauguauguguaagua

SEQ ID NO: 1626866 - RNA, 15 nt, Human
gggggcugggcagag

SEQ ID NO: 1626867 - RNA, 13 nt, Human
ggggguggccucc

SEQ ID NO: 1626868 - RNA, 21 nt, Human
ggggucacucuggcagcucag

SEQ ID NO: 1626869 - RNA, 15 nt, Human
ggggcccugccuccu

SEQ ID NO: 1626870 - RNA, 11 nt, Human
gggggcuggga

SEQ ID NO: 1626871 - RNA, 18 nt, Human
aaauauaugcuaagucuu

SEQ ID NO: 1626872 - RNA, 14 nt, Human
aaauauauaucaaa

SEQ ID NO: 1626873 - RNA, 22 nt, Human
aaauauauuuuaagacgaaaca

SEQ ID NO: 1626874 - RNA, 16 nt, Human
aaauauauuuuaagac

SEQ ID NO: 1626875 - RNA, 22 nt, Human
aaauaucacuugucaauaaaau

SEQ ID NO: 1626876 - RNA, 21 nt, Human
aaauaccaugccauuuaaagc

SEQ ID NO: 1626877 - RNA, 20 nt, Human
aaauaccagccaguaaaugg

SEQ ID NO: 1626878 - RNA, 21 nt, Human
aaauaccagccaguaaauggg

SEQ ID NO: 1626879 - RNA, 16 nt, Human
guacacacacauacac

SEQ ID NO: 1626880 - RNA, 19 nt, Human
aaauaccagccaguaaaug

SEQ ID NO: 1626881 - RNA, 15 nt, Human
aaauauaggaacuua

SEQ ID NO: 1626882 - RNA, 21 nt, Human
aaauacgugggcauucaaaug

SEQ ID NO: 1626883 - RNA, 20 nt, Human
aaauacgugggcauucaaau

SEQ ID NO: 1626884 - RNA, 23 nt, Human
aaaucagccugcuccagcuguuc

SEQ ID NO: 1626885 - RNA, 21 nt, Human
aaaucagccugcuccagcugu

SEQ ID NO: 1626886 - RNA, 19 nt, Human
aaaucagccugcuccagcu

SEQ ID NO: 1626887 - RNA, 19 nt, Human
aaauauuaagaaagacuau

SEQ ID NO: 1626888 - RNA, 20 nt, Human
aaauauuccugcauuuguga

SEQ ID NO: 1626889 - RNA, 17 nt, Human
aaauaugcaaagcacug

SEQ ID NO: 1626890 - RNA, 16 nt, Human
aaauaugcaaagcacu

SEQ ID NO: 1626891 - RNA, 15 nt, Human
aaauaugcaaagcac

SEQ ID NO: 1626892 - RNA, 13 nt, Human
aaauaugcaaagc

SEQ ID NO: 1626893 - RNA, 23 nt, Human
aaauaucugaaaauguaugugua

SEQ ID NO: 1626894 - RNA, 22 nt, Human
aaauaucugaaaauguaugugu

SEQ ID NO: 1626895 - RNA, 21 nt, Human
aaauaucugaaaauguaugug

SEQ ID NO: 1626896 - RNA, 19 nt, Human
aaauaucugaaaauguaug

SEQ ID NO: 1626897 - RNA, 18 nt, Human
aaauaucugaaaauguau

SEQ ID NO: 1626898 - RNA, 17 nt, Human
aaauaucugaaaaugua

SEQ ID NO: 1626899 - RNA, 14 nt, Human
aaauaucugaaaau

SEQ ID NO: 1626900 - RNA, 12 nt, Human
aaauaucugaaa

SEQ ID NO: 1626901 - RNA, 23 nt, Human
guaauccuagcacuuugggaggc

SEQ ID NO: 1626902 - RNA, 15 nt, Human
guaaucgaccugccu

SEQ ID NO: 1626903 - RNA, 15 nt, Human
guaauuugugauaca

SEQ ID NO: 1626904 - RNA, 17 nt, Human
guaaucgaccugccucg

SEQ ID NO: 1626905 - RNA, 17 nt, Human
guaauuugugauacaau

SEQ ID NO: 1626906 - RNA, 20 nt, Human
guaauuugugauacaaugcu

SEQ ID NO: 1626907 - RNA, 22 nt, Human
guaauuugugauacaaugcugu

SEQ ID NO: 1626908 - RNA, 21 nt, Human
guacaaaguauuaagcauaua

SEQ ID NO: 1626909 - RNA, 20 nt, Human
guacaaaguauuaagcauau

SEQ ID NO: 1626910 - RNA, 22 nt, Human
guacaaccuguucugcuuuccu

SEQ ID NO: 1626911 - RNA, 12 nt, Human
aaaguggugaga

SEQ ID NO: 1626912 - RNA, 22 nt, Human
aaaguguauuuuuuuacuaaua

SEQ ID NO: 1626913 - RNA, 22 nt, Human
aaauaaugugaaacuggauuaa

SEQ ID NO: 1626914 - RNA, 13 nt, Human
guaaaccuuuuau

SEQ ID NO: 1626915 - RNA, 20 nt, Human
guaacaggaaaauuuuaaaa

SEQ ID NO: 1626916 - RNA, 19 nt, Human
guaacaggaaaauuuuaaa

SEQ ID NO: 1626917 - RNA, 16 nt, Human
guaacaagccacccca

SEQ ID NO: 1626918 - RNA, 17 nt, Human
gguucccauuugcuccu

SEQ ID NO: 1626919 - RNA, 19 nt, Human
gguguuuccuggcacugcu

SEQ ID NO: 1626920 - RNA, 17 nt, Human
gguguuuccuggcacug

SEQ ID NO: 1626921 - RNA, 20 nt, Human
gguguuguacucaauuuuaa

SEQ ID NO: 1626922 - RNA, 19 nt, Human
gguguuguacucaauuuua

SEQ ID NO: 1626923 - RNA, 22 nt, Human
gguucccuuuuuuggcugcuga

SEQ ID NO: 1626924 - RNA, 23 nt, Human
gguucccuuugacgccaucccag

SEQ ID NO: 1626925 - RNA, 23 nt, Human
gguguggagaagcggcuggcagc

SEQ ID NO: 1626926 - RNA, 14 nt, Human
gguguggagaagcg

SEQ ID NO: 1626927 - RNA, 13 nt, Human
ggugggggccucg

SEQ ID NO: 1626928 - RNA, 13 nt, Human
ggugugggggaag

SEQ ID NO: 1626929 - RNA, 11 nt, Human
gguguggggga

SEQ ID NO: 1626930 - RNA, 17 nt, Human
aaaguauguuagugcaa

SEQ ID NO: 1626931 - RNA, 14 nt, Human
aaaguguauuuuuu

SEQ ID NO: 1626932 - RNA, 21 nt, Human
aaaguguauuuuuuuacuaau

SEQ ID NO: 1626933 - RNA, 19 nt, Human
aaaguacacuguuucaaac

SEQ ID NO: 1626934 - RNA, 18 nt, Human
aaaguacacuguuucaaa

SEQ ID NO: 1626935 - RNA, 22 nt, Human
aaaguagaagucuuagauguau

SEQ ID NO: 1626936 - RNA, 20 nt, Human
aaaguagaagucuuagaugu

SEQ ID NO: 1626937 - RNA, 21 nt, Human
aaaguaucccuacuguaauuu

SEQ ID NO: 1626938 - RNA, 19 nt, Human
gguuuuauuguuuaaaauc

SEQ ID NO: 1626939 - RNA, 17 nt, Human
gguuuucacauuggaaa

SEQ ID NO: 1626940 - RNA, 20 nt, Human
gguuuguaaauuaacuuuua

SEQ ID NO: 1626941 - RNA, 16 nt, Human
gguuucuaaagcugcc

SEQ ID NO: 1626942 - RNA, 19 nt, Human
gguuuccugcccugggagg

SEQ ID NO: 1626943 - RNA, 16 nt, Human
gguuuccugcccuggg

SEQ ID NO: 1626944 - RNA, 22 nt, Human
gguuucuaaagcugccagccga

SEQ ID NO: 1626945 - RNA, 15 nt, Human
gguuuccugcccugg

SEQ ID NO: 1626946 - RNA, 13 nt, Human
gguuuccugcccu

SEQ ID NO: 1626947 - RNA, 12 nt, Human
gguuuccugccc

SEQ ID NO: 1626948 - RNA, 19 nt, Human
aaacuuuaugcuaagugaa

SEQ ID NO: 1626949 - RNA, 12 nt, Human
aaacuuuaugcu

SEQ ID NO: 1626950 - RNA, 16 nt, Human
aaagcagaacagugau

SEQ ID NO: 1626951 - RNA, 20 nt, Human
gguggcaccagcagccugga

SEQ ID NO: 1626952 - RNA, 14 nt, Human
gguggcaccagcag

SEQ ID NO: 1626953 - RNA, 16 nt, Human
aaagcuaggccuggcc

SEQ ID NO: 1626954 - RNA, 14 nt, Human
aaagcuaggccugg

SEQ ID NO: 1626955 - RNA, 16 nt, Human
aaagcagugcaugcug

SEQ ID NO: 1626956 - RNA, 13 nt, Human
aaagcagugcaug

SEQ ID NO: 1626957 - RNA, 15 nt, Human
aaagcagcguuucua

SEQ ID NO: 1626958 - RNA, 13 nt, Human
aaagcugccagcc

SEQ ID NO: 1626959 - RNA, 12 nt, Human
aaagcugccagc

SEQ ID NO: 1626960 - RNA, 17 nt, Human
aaagcuaggccuggcca

SEQ ID NO: 1626961 - RNA, 22 nt, Human
aaagcugccagccgagauagcc

SEQ ID NO: 1626962 - RNA, 14 nt, Human
aaagcuguguggca

SEQ ID NO: 1626963 - RNA, 13 nt, Human
aaagcuuauuaaa

SEQ ID NO: 1626964 - RNA, 20 nt, Human
aaagggcccagagagggugg

SEQ ID NO: 1626965 - RNA, 22 nt, Human
aaagggcuguuauaaucuuuca

SEQ ID NO: 1626966 - RNA, 20 nt, Human
aaagggcuguuauaaucuuu

SEQ ID NO: 1626967 - RNA, 18 nt, Human
aaagguucaugcaaacuu

SEQ ID NO: 1626968 - RNA, 20 nt, Human
ggugggaggaucucuugagc

SEQ ID NO: 1626969 - RNA, 17 nt, Human
ggugggacacccuguga

SEQ ID NO: 1626970 - RNA, 16 nt, Human
ggugggacacccugug

SEQ ID NO: 1626971 - RNA, 13 nt, Human
ggugggacacccu

SEQ ID NO: 1626972 - RNA, 19 nt, Human
gguggggaccucaggccug

SEQ ID NO: 1626973 - RNA, 18 nt, Human
gguggcuggguuggaggg

SEQ ID NO: 1626974 - RNA, 21 nt, Human
aaaguaaaaacaaagaaauua

SEQ ID NO: 1626975 - RNA, 15 nt, Human
auuauguguguuuua

SEQ ID NO: 1626976 - RNA, 21 nt, Human
auuauguguguuuuaaaauga

SEQ ID NO: 1626977 - RNA, 20 nt, Human
auuauguguguuuuaaaaug

SEQ ID NO: 1626978 - RNA, 20 nt, Human
auuaaauucuugcaaaguau

SEQ ID NO: 1626979 - RNA, 14 nt, Human
auuaaauucuugca

SEQ ID NO: 1626980 - RNA, 18 nt, Human
auuaaauucuugcaaagu

SEQ ID NO: 1626981 - RNA, 18 nt, Human
auucacaagacccaaaag

SEQ ID NO: 1626982 - RNA, 19 nt, Human
auucauauuuacuucuuau

SEQ ID NO: 1626983 - RNA, 18 nt, Human
auucauauuuacuucuua

SEQ ID NO: 1626984 - RNA, 20 nt, Human
auucauauuuacuucuuaua

SEQ ID NO: 1626985 - RNA, 17 nt, Human
auucuugccaaauauaa

SEQ ID NO: 1626986 - RNA, 21 nt, Human
auuccugaugcuucuucagag

SEQ ID NO: 1626987 - RNA, 19 nt, Human
auucucuccuguaccucuu

SEQ ID NO: 1626988 - RNA, 21 nt, Human
auucucuccuguaccucuuga

SEQ ID NO: 1626989 - RNA, 13 nt, Human
auuccugaacagg

SEQ ID NO: 1626990 - RNA, 22 nt, Human
auucuuuccugaggcugggcuc

SEQ ID NO: 1626991 - RNA, 17 nt, Human
auucuuuccugaggcug

SEQ ID NO: 1626992 - RNA, 17 nt, Human
auugauccagaaagaaa

SEQ ID NO: 1626993 - RNA, 16 nt, Human
auugauccagaaagaa

SEQ ID NO: 1626994 - RNA, 16 nt, Human
auuucagcagcugcag

SEQ ID NO: 1626995 - RNA, 15 nt, Human
auuuaaugaaagacu

SEQ ID NO: 1626996 - RNA, 14 nt, Human
auuuaaugaaagac

SEQ ID NO: 1626997 - RNA, 20 nt, Human
auuucuaugaaauauuaugu

SEQ ID NO: 1626998 - RNA, 18 nt, Human
auuucuaugaaauauuau

SEQ ID NO: 1626999 - RNA, 15 nt, Human
auuucuaugaaauau

SEQ ID NO: 1627000 - RNA, 12 nt, Human
auuucuguuuag

SEQ ID NO: 1627001 - RNA, 14 nt, Human
auuucuguuuagau

SEQ ID NO: 1627002 - RNA, 16 nt, Human
auuucuguuuagauaa

SEQ ID NO: 1627003 - RNA, 19 nt, Human
auuguuuaaaaucauuucu

SEQ ID NO: 1627004 - RNA, 22 nt, Human
auuguacaaaguauuaagcaua

SEQ ID NO: 1627005 - RNA, 23 nt, Human
auuguacaaaguauuaagcauau

SEQ ID NO: 1627006 - RNA, 19 nt, Human
auuguucuuaguuugcagu

SEQ ID NO: 1627007 - RNA, 17 nt, Human
auuguaaaugugcuuuu

SEQ ID NO: 1627008 - RNA, 15 nt, Human
auuguaaaugugcuu

SEQ ID NO: 1627009 - RNA, 14 nt, Human
auuguaaaugugcu

SEQ ID NO: 1627010 - RNA, 23 nt, Human
auuguaauaggcguaacuaauuu

SEQ ID NO: 1627011 - RNA, 16 nt, Human
auuguaaggaaugauu

SEQ ID NO: 1627012 - RNA, 15 nt, Human
auuguaaggaaugau

SEQ ID NO: 1627013 - RNA, 13 nt, Human
auuguaaaauggu

SEQ ID NO: 1627014 - RNA, 18 nt, Human
auugaugggauuugguca

SEQ ID NO: 1627015 - RNA, 22 nt, Human
auugauccagaaagaaaacuug

SEQ ID NO: 1627016 - RNA, 19 nt, Human
auugauccagaaagaaaac

SEQ ID NO: 1627017 - RNA, 18 nt, Human
auugauccagaaagaaaa

SEQ ID NO: 1627018 - RNA, 17 nt, Human
auuuuuuuuuccuucag

SEQ ID NO: 1627019 - RNA, 13 nt, Human
auuuuuaagugcu

SEQ ID NO: 1627020 - RNA, 16 nt, Human
auuuuuuuuuccuuca

SEQ ID NO: 1627021 - RNA, 13 nt, Human
auuuuuuuuuccu

SEQ ID NO: 1627022 - RNA, 12 nt, Human
auuuuuuuuucc

SEQ ID NO: 1627023 - RNA, 19 nt, Human
caaaagcugggcagguugg

SEQ ID NO: 1627024 - RNA, 15 nt, Human
caaaagcugggcagg

SEQ ID NO: 1627025 - RNA, 17 nt, Human
auuuuauagcuacuaau

SEQ ID NO: 1627026 - RNA, 20 nt, Human
auuuguuugaacugauaaag

SEQ ID NO: 1627027 - RNA, 14 nt, Human
auuuguuugaacug

SEQ ID NO: 1627028 - RNA, 16 nt, Human
auuuguuugaacugau

SEQ ID NO: 1627029 - RNA, 13 nt, Human
auuuguuugaacu

SEQ ID NO: 1627030 - RNA, 18 nt, Human
auuuugauccaagcuggu

SEQ ID NO: 1627031 - RNA, 19 nt, Human
caacccaaauguucaucaa

SEQ ID NO: 1627032 - RNA, 14 nt, Human
caaccauuccccau

SEQ ID NO: 1627033 - RNA, 21 nt, Human
caacuaucucauuuccaagca

SEQ ID NO: 1627034 - RNA, 17 nt, Human
caacuaugauuuggaaa

SEQ ID NO: 1627035 - RNA, 22 nt, Human
caacuaugauuuggaaaauaaa

SEQ ID NO: 1627036 - RNA, 19 nt, Human
caacuaugauuuggaaaau

SEQ ID NO: 1627037 - RNA, 18 nt, Human
caacuaugauuuggaaaa

SEQ ID NO: 1627038 - RNA, 17 nt, Human
caacccccagccugcua

SEQ ID NO: 1627039 - RNA, 16 nt, Human
caacccccagccugcu

SEQ ID NO: 1627040 - RNA, 15 nt, Human
caacccccagccugc

SEQ ID NO: 1627041 - RNA, 15 nt, Human
caacucaccccagcc

SEQ ID NO: 1627042 - RNA, 13 nt, Human
caacucaccccag

SEQ ID NO: 1627043 - RNA, 16 nt, Human
caacucaccccagccc

SEQ ID NO: 1627044 - RNA, 17 nt, Human
caacucaccccagcccc

SEQ ID NO: 1627045 - RNA, 19 nt, Human
caagacccuugugguccca

SEQ ID NO: 1627046 - RNA, 18 nt, Human
caagacccuugugguccc

SEQ ID NO: 1627047 - RNA, 22 nt, Human
caagacccuuguggucccaccc

SEQ ID NO: 1627048 - RNA, 23 nt, Human
caagacccuuguggucccacccc

SEQ ID NO: 1627049 - RNA, 23 nt, Human
caagaauuucuaggacugaauua

SEQ ID NO: 1627050 - RNA, 13 nt, Human
caagacacaguga

SEQ ID NO: 1627051 - RNA, 18 nt, Human
caaccacugcgaccacaa

SEQ ID NO: 1627052 - RNA, 15 nt, Human
caacacgagcaggcu

SEQ ID NO: 1627053 - RNA, 20 nt, Human
caacaccuuguuucccucuc

SEQ ID NO: 1627054 - RNA, 22 nt, Human
caacaccucugcacaagcugca

SEQ ID NO: 1627055 - RNA, 23 nt, Human
caacaaaccuguuucugcagcca

SEQ ID NO: 1627056 - RNA, 21 nt, Human
caaaucugcuuuuuaaagaau

SEQ ID NO: 1627057 - RNA, 13 nt, Human
caaaugcagcuuu

SEQ ID NO: 1627058 - RNA, 14 nt, Human
caaagaugcagccg

SEQ ID NO: 1627059 - RNA, 13 nt, Human
caaagaugcagcc

SEQ ID NO: 1627060 - RNA, 21 nt, Human
caaaguacacuguuucaaacu

SEQ ID NO: 1627061 - RNA, 15 nt, Human
caaaguauuaagcau

SEQ ID NO: 1627062 - RNA, 14 nt, Human
caaaguauuaagca

SEQ ID NO: 1627063 - RNA, 16 nt, Human
caaaguacacuguuuc

SEQ ID NO: 1627064 - RNA, 20 nt, Human
caaaguacacuguuucaaac

SEQ ID NO: 1627065 - RNA, 17 nt, Human
caaaucagcugcuacua

SEQ ID NO: 1627066 - RNA, 21 nt, Human
caaaguauuaagcauauauuu

SEQ ID NO: 1627067 - RNA, 19 nt, Human
caaaguauuaagcauauau

SEQ ID NO: 1627068 - RNA, 17 nt, Human
caaaguauuaagcauau

SEQ ID NO: 1627069 - RNA, 16 nt, Human
caaaguauuaagcaua

SEQ ID NO: 1627070 - RNA, 22 nt, Human
caaauccagccugcugccugcu

SEQ ID NO: 1627071 - RNA, 22 nt, Human
cagaauauuagugaccucagcu

SEQ ID NO: 1627072 - RNA, 21 nt, Human
cagaaguuucugccgcagccc

SEQ ID NO: 1627073 - RNA, 20 nt, Human
cagaaguuucugccgcagcc

SEQ ID NO: 1627074 - RNA, 22 nt, Human
cagaaguuucugccgcagcccu

SEQ ID NO: 1627075 - RNA, 23 nt, Human
cagaaguuucugccgcagcccug

SEQ ID NO: 1627076 - RNA, 15 nt, Human
cagaacacauaauuc

SEQ ID NO: 1627077 - RNA, 20 nt, Human
cacuuggucugugagaugcu

SEQ ID NO: 1627078 - RNA, 20 nt, Human
cacuuagaaauugcauuucc

SEQ ID NO: 1627079 - RNA, 19 nt, Human
cacuguuucaaacuuuacu

SEQ ID NO: 1627080 - RNA, 17 nt, Human
cacuguugcccaggcug

SEQ ID NO: 1627081 - RNA, 19 nt, Human
cacuuagaaauugcauuuc

SEQ ID NO: 1627082 - RNA, 17 nt, Human
cacuuagaaauugcauu

SEQ ID NO: 1627083 - RNA, 22 nt, Human
cacugggcuuggggaccagagc

SEQ ID NO: 1627084 - RNA, 23 nt, Human
cacugggcuuggggaccagagcu

SEQ ID NO: 1627085 - RNA, 16 nt, Human
cacuguugcccaggcu

SEQ ID NO: 1627086 - RNA, 15 nt, Human
cacuguugcccaggc

SEQ ID NO: 1627087 - RNA, 22 nt, Human
cacugguggcccgacagccugg

SEQ ID NO: 1627088 - RNA, 21 nt, Human
cacugguggcccgacagccug

SEQ ID NO: 1627089 - RNA, 13 nt, Human
cacugguggcccg

SEQ ID NO: 1627090 - RNA, 17 nt, Human
cacuggugacaugucuu

SEQ ID NO: 1627091 - RNA, 23 nt, Human
caccucaaaauaccaugccauuu

SEQ ID NO: 1627092 - RNA, 16 nt, Human
caccugccagggacag

SEQ ID NO: 1627093 - RNA, 14 nt, Human
caccugccagggac

SEQ ID NO: 1627094 - RNA, 20 nt, Human
caccuaccaccacgcccggc

SEQ ID NO: 1627095 - RNA, 21 nt, Human
caccuacaugagguacugaga

SEQ ID NO: 1627096 - RNA, 13 nt, Human
caccuuggcucaa

SEQ ID NO: 1627097 - RNA, 14 nt, Human
caccuuggcucaag

SEQ ID NO: 1627098 - RNA, 19 nt, Human
caccuugacagggcacacc

SEQ ID NO: 1627099 - RNA, 17 nt, Human
caccugccagggacaga

SEQ ID NO: 1627100 - RNA, 15 nt, Human
caccuuuguccccac

SEQ ID NO: 1627101 - RNA, 14 nt, Human
caccuuugucccca

SEQ ID NO: 1627102 - RNA, 17 nt, Human
caccuuuguccccaccg

SEQ ID NO: 1627103 - RNA, 14 nt, Human
caccuuuauucugg

SEQ ID NO: 1627104 - RNA, 11 nt, Human
cacugaagaag

SEQ ID NO: 1627105 - RNA, 23 nt, Human
cacuacggaauaguuggcuagga

SEQ ID NO: 1627106 - RNA, 17 nt, Human
cacggccaggccagagg

SEQ ID NO: 1627107 - RNA, 20 nt, Human
cacggagggugacgggggug

SEQ ID NO: 1627108 - RNA, 16 nt, Human
cacggccaggccagag

SEQ ID NO: 1627109 - RNA, 15 nt, Human
cacggccaggccaga

SEQ ID NO: 1627110 - RNA, 14 nt, Human
cacggccaggccag

SEQ ID NO: 1627111 - RNA, 19 nt, Human
cacucuuauugcccacgcu

SEQ ID NO: 1627112 - RNA, 18 nt, Human
cacucuuauugcccacgc

SEQ ID NO: 1627113 - RNA, 17 nt, Human
cacucuuauugcccacg

SEQ ID NO: 1627114 - RNA, 17 nt, Human
cacucuugaaaaaugca

SEQ ID NO: 1627115 - RNA, 23 nt, Human
caaugcuguauuuuaaaagaaug

SEQ ID NO: 1627116 - RNA, 14 nt, Human
caaugcuguauuuu

SEQ ID NO: 1627117 - RNA, 23 nt, Human
caaugcuggcuguuggcuggggg

SEQ ID NO: 1627118 - RNA, 22 nt, Human
caaugcuggcuguuggcugggg

SEQ ID NO: 1627119 - RNA, 21 nt, Human
caauauuucagauaaucacaa

SEQ ID NO: 1627120 - RNA, 20 nt, Human
caauauuucagauaaucaca

SEQ ID NO: 1627121 - RNA, 12 nt, Human
caauauuucaga

SEQ ID NO: 1627122 - RNA, 22 nt, Human
caaugcugugcccuaaagugua

SEQ ID NO: 1627123 - RNA, 17 nt, Human
caauucuccugccucag

SEQ ID NO: 1627124 - RNA, 19 nt, Human
caauucuccugccucagcc

SEQ ID NO: 1627125 - RNA, 12 nt, Human
caauuuaaaaaa

SEQ ID NO: 1627126 - RNA, 16 nt, Human
cacaagacccuugugg

SEQ ID NO: 1627127 - RNA, 14 nt, Human
cacaagacccuugu

SEQ ID NO: 1627128 - RNA, 16 nt, Human
cacaagacugcacauc

SEQ ID NO: 1627129 - RNA, 14 nt, Human
cacaagccuucggc

SEQ ID NO: 1627130 - RNA, 20 nt, Human
caaguauuagaauaccacag

SEQ ID NO: 1627131 - RNA, 13 nt, Human
caaguauuauacc

SEQ ID NO: 1627132 - RNA, 14 nt, Human
caaguauuagaaua

SEQ ID NO: 1627133 - RNA, 17 nt, Human
caauaaaaaauuaugac

SEQ ID NO: 1627134 - RNA, 16 nt, Human
caauaaaaaauuauga

SEQ ID NO: 1627135 - RNA, 13 nt, Human
caauaaaaaauua

SEQ ID NO: 1627136 - RNA, 22 nt, Human
cacaucagcacgauuucuguuu

SEQ ID NO: 1627137 - RNA, 17 nt, Human
cacaucuugcucugcug

SEQ ID NO: 1627138 - RNA, 20 nt, Human
cacaucagcacgauuucugu

SEQ ID NO: 1627139 - RNA, 21 nt, Human
cacaucagcacgauuucuguu

SEQ ID NO: 1627140 - RNA, 21 nt, Human
caccaacauacucccaucugu

SEQ ID NO: 1627141 - RNA, 20 nt, Human
caccaacauacucccaucug

SEQ ID NO: 1627142 - RNA, 13 nt, Human
cacauuuuucuua

SEQ ID NO: 1627143 - RNA, 14 nt, Human
cacauuuuucuuag

SEQ ID NO: 1627144 - RNA, 17 nt, Human
cacauuuuuuaaaugca

SEQ ID NO: 1627145 - RNA, 21 nt, Human
cacauuuuuuaaaugcaccug

SEQ ID NO: 1627146 - RNA, 18 nt, Human
cacaucuugcucugcuga

SEQ ID NO: 1627147 - RNA, 19 nt, Human
cacaucuugcucugcugac

SEQ ID NO: 1627148 - RNA, 15 nt, Human
cacauuuuauuuuau

SEQ ID NO: 1627149 - RNA, 23 nt, Human
cacccaggagccccgaggccuuc

SEQ ID NO: 1627150 - RNA, 20 nt, Human
cacccaggagccccgaggcc

SEQ ID NO: 1627151 - RNA, 19 nt, Human
cacccagcccacuucugcc

SEQ ID NO: 1627152 - RNA, 24 nt, Human
cacccaggagccccgaggccuucu

SEQ ID NO: 1627153 - RNA, 15 nt, Human
caccagcagccugga

SEQ ID NO: 1627154 - RNA, 14 nt, Human
caccagcagccugg

SEQ ID NO: 1627155 - RNA, 23 nt, Human
caccaacauacucccaucuguga

SEQ ID NO: 1627156 - RNA, 17 nt, Human
cacccagcccacuucug

SEQ ID NO: 1627157 - RNA, 19 nt, Human
cacaguauuacuucugcua

SEQ ID NO: 1627158 - RNA, 18 nt, Human
cacaguauuacuucugcu

SEQ ID NO: 1627159 - RNA, 16 nt, Human
cacaguauuacuucug

SEQ ID NO: 1627160 - RNA, 16 nt, Human
cacagcuaacauggaa

SEQ ID NO: 1627161 - RNA, 15 nt, Human
cacagcuaacaugga

SEQ ID NO: 1627162 - RNA, 22 nt, Human
cacagacccugcccugugggcc

SEQ ID NO: 1627163 - RNA, 18 nt, Human
cacagacauacuaaccag

SEQ ID NO: 1627164 - RNA, 21 nt, Human
cacagacccugcccugugggc

SEQ ID NO: 1627165 - RNA, 20 nt, Human
cacagacccugcccuguggg

SEQ ID NO: 1627166 - RNA, 19 nt, Human
cacagacccugcccugugg

SEQ ID NO: 1627167 - RNA, 10 nt, Human
cacagcucuu

SEQ ID NO: 1627168 - RNA, 23 nt, Human
cacagcucuguccugggagugag

SEQ ID NO: 1627169 - RNA, 20 nt, Human
cacagcucuguccugggagu

SEQ ID NO: 1627170 - RNA, 22 nt, Human
cacagcuaacauggaaguacua

SEQ ID NO: 1627171 - RNA, 18 nt, Human
cauauucuguuggccagu

SEQ ID NO: 1627172 - RNA, 17 nt, Human
cauauucuguuggccag

SEQ ID NO: 1627173 - RNA, 16 nt, Human
cauauuaccacagaca

SEQ ID NO: 1627174 - RNA, 19 nt, Human
caguggugguuuucuguuc

SEQ ID NO: 1627175 - RNA, 20 nt, Human
caguggugguuuucuguucu

SEQ ID NO: 1627176 - RNA, 21 nt, Human
caguggugguuuucuguucuu

SEQ ID NO: 1627177 - RNA, 22 nt, Human
caguggugguuuucuguucuuu

SEQ ID NO: 1627178 - RNA, 14 nt, Human
caucacuucccuac

SEQ ID NO: 1627179 - RNA, 12 nt, Human
caucacuucccu

SEQ ID NO: 1627180 - RNA, 15 nt, Human
cauccuggcacccgg

SEQ ID NO: 1627181 - RNA, 22 nt, Human
cauccuggcacccggccccugc

SEQ ID NO: 1627182 - RNA, 23 nt, Human
cauccuggcacccggccccugcu

SEQ ID NO: 1627183 - RNA, 12 nt, Human
cauccuggaaua

SEQ ID NO: 1627184 - RNA, 16 nt, Human
cauucuccaccugcca

SEQ ID NO: 1627185 - RNA, 14 nt, Human
cauucuccaccugc

SEQ ID NO: 1627186 - RNA, 13 nt, Human
cauucuccaccug

SEQ ID NO: 1627187 - RNA, 15 nt, Human
cauguuggccaggcu

SEQ ID NO: 1627188 - RNA, 14 nt, Human
cauguuggccaggc

SEQ ID NO: 1627189 - RNA, 16 nt, Human
cauguuggccaggcug

SEQ ID NO: 1627190 - RNA, 20 nt, Human
cauguuggccaggcugcucu

SEQ ID NO: 1627191 - RNA, 23 nt, Human
caugucccuaccgagucucuucu

SEQ ID NO: 1627192 - RNA, 19 nt, Human
caugucaaacgugaaaaug

SEQ ID NO: 1627193 - RNA, 14 nt, Human
caugucaaacguga

SEQ ID NO: 1627194 - RNA, 22 nt, Human
caugucccuaccgagucucuuc

SEQ ID NO: 1627195 - RNA, 16 nt, Human
caugucccuaccgagu

SEQ ID NO: 1627196 - RNA, 14 nt, Human
caugauguuuagaa

SEQ ID NO: 1627197 - RNA, 13 nt, Human
caugauguuuucc

SEQ ID NO: 1627198 - RNA, 20 nt, Human
caugcuacacacugcauguu

SEQ ID NO: 1627199 - RNA, 23 nt, Human
caugcuacacacugcauguuugu

SEQ ID NO: 1627200 - RNA, 14 nt, Human
caugcuacacacug

SEQ ID NO: 1627201 - RNA, 17 nt, Human
caugggaaugaauguca

SEQ ID NO: 1627202 - RNA, 16 nt, Human
caugggaaugaauguc

SEQ ID NO: 1627203 - RNA, 15 nt, Human
caugggaaugaaugu

SEQ ID NO: 1627204 - RNA, 14 nt, Human
caugggaaugaaug

SEQ ID NO: 1627205 - RNA, 17 nt, Human
cauggcugccaauggga

SEQ ID NO: 1627206 - RNA, 17 nt, Human
ccaaauguucaucaaug

SEQ ID NO: 1627207 - RNA, 14 nt, Human
ccaacucaccccag

SEQ ID NO: 1627208 - RNA, 23 nt, Human
ccaaauggaaaugggcagagcag

SEQ ID NO: 1627209 - RNA, 18 nt, Human
ccaaauguucaucaauga

SEQ ID NO: 1627210 - RNA, 18 nt, Human
ccaacucaccccagcccc

SEQ ID NO: 1627211 - RNA, 17 nt, Human
ccaacucaccccagccc

SEQ ID NO: 1627212 - RNA, 16 nt, Human
ccaacucaccccagcc

SEQ ID NO: 1627213 - RNA, 13 nt, Human
ccaagcucugcuc

SEQ ID NO: 1627214 - RNA, 12 nt, Human
ccaagcucugcu

SEQ ID NO: 1627215 - RNA, 18 nt, Human
ccaagcucugcuccucuc

SEQ ID NO: 1627216 - RNA, 14 nt, Human
ccaaugcacuuugu

SEQ ID NO: 1627217 - RNA, 15 nt, Human
ccaaugauggucacc

SEQ ID NO: 1627218 - RNA, 17 nt, Human
ccaauauuuaccagacc

SEQ ID NO: 1627219 - RNA, 17 nt, Human
ccaaugggagcucaugg

SEQ ID NO: 1627220 - RNA, 20 nt, Human
cauuuguauaaaauaauuuu

SEQ ID NO: 1627221 - RNA, 19 nt, Human
cauuuguauaaaauaauuu

SEQ ID NO: 1627222 - RNA, 20 nt, Human
cauuuguguugaagagguuu

SEQ ID NO: 1627223 - RNA, 16 nt, Human
cauuuguguugaagag

SEQ ID NO: 1627224 - RNA, 21 nt, Human
ccaaaacucuccucugcugcu

SEQ ID NO: 1627225 - RNA, 22 nt, Human
cauuuuuuuuaagaaaaaggau

SEQ ID NO: 1627226 - RNA, 12 nt, Human
ccacagcaguug

SEQ ID NO: 1627227 - RNA, 18 nt, Human
ccacagcaguugaaaaga

SEQ ID NO: 1627228 - RNA, 17 nt, Human
ccacagcaguugaaaag

SEQ ID NO: 1627229 - RNA, 23 nt, Human
ccacagcaguugaaaagacucca

SEQ ID NO: 1627230 - RNA, 15 nt, Human
ccaccaucaagccac

SEQ ID NO: 1627231 - RNA, 14 nt, Human
ccaccaucaagcca

SEQ ID NO: 1627232 - RNA, 13 nt, Human
ccaccaucaagcc

SEQ ID NO: 1627233 - RNA, 14 nt, Human
ccacagcugcucaa

SEQ ID NO: 1627234 - RNA, 17 nt, Human
ccaccacacccagccca

SEQ ID NO: 1627235 - RNA, 17 nt, Human
ccacgcccccacuggug

SEQ ID NO: 1627236 - RNA, 16 nt, Human
ccacgcccccacuggu

SEQ ID NO: 1627237 - RNA, 19 nt, Human
ccacgcccccacuggugac

SEQ ID NO: 1627238 - RNA, 18 nt, Human
ccacgcccccacugguga

SEQ ID NO: 1627239 - RNA, 13 nt, Human
ccacgcccggcua

SEQ ID NO: 1627240 - RNA, 21 nt, Human
ccaccuuugaagaaguaagga

SEQ ID NO: 1627241 - RNA, 22 nt, Human
ccaccgcagacaggaccaggga

SEQ ID NO: 1627242 - RNA, 13 nt, Human
ccaccgcagacag

SEQ ID NO: 1627243 - RNA, 17 nt, Human
ccacucccugcaaccug

SEQ ID NO: 1627244 - RNA, 20 nt, Human
cagucugacuguuuccauca

SEQ ID NO: 1627245 - RNA, 18 nt, Human
cagucuggaaugcagugg

SEQ ID NO: 1627246 - RNA, 12 nt, Human
cagugcaucuca

SEQ ID NO: 1627247 - RNA, 17 nt, Human
cagucuggaaugcagug

SEQ ID NO: 1627248 - RNA, 15 nt, Human
cagucuggaaugcag

SEQ ID NO: 1627249 - RNA, 14 nt, Human
cagugcaugcuguc

SEQ ID NO: 1627250 - RNA, 13 nt, Human
cagugcaugcugu

SEQ ID NO: 1627251 - RNA, 18 nt, Human
cagugcaucucagcccac

SEQ ID NO: 1627252 - RNA, 17 nt, Human
cagugcaucucagccca

SEQ ID NO: 1627253 - RNA, 16 nt, Human
cagugcaucucagccc

SEQ ID NO: 1627254 - RNA, 15 nt, Human
cagugcaucucagcc

SEQ ID NO: 1627255 - RNA, 18 nt, Human
cagugcccacaggaucag

SEQ ID NO: 1627256 - RNA, 23 nt, Human
cagugggagcugccuguucagcu

SEQ ID NO: 1627257 - RNA, 20 nt, Human
cagugggagcugccuguuca

SEQ ID NO: 1627258 - RNA, 17 nt, Human
cagugcccacaggauca

SEQ ID NO: 1627259 - RNA, 15 nt, Human
cagugcccacaggau

SEQ ID NO: 1627260 - RNA, 13 nt, Human
cagugcccacagg

SEQ ID NO: 1627261 - RNA, 17 nt, Human
cagugcaugcugucccu

SEQ ID NO: 1627262 - RNA, 16 nt, Human
cagugcaugcuguccc

SEQ ID NO: 1627263 - RNA, 21 nt, Human
caguggugcgaucuggguuca

SEQ ID NO: 1627264 - RNA, 18 nt, Human
caguggugguuuucuguu

SEQ ID NO: 1627265 - RNA, 20 nt, Human
caguggggaggggcuguggg

SEQ ID NO: 1627266 - RNA, 14 nt, Human
caguggggaaugaa

SEQ ID NO: 1627267 - RNA, 19 nt, Human
caggugccaguuauggcua

SEQ ID NO: 1627268 - RNA, 21 nt, Human
caggugcacaagcuccaagcu

SEQ ID NO: 1627269 - RNA, 22 nt, Human
caggugcacaagcuccaagcuc

SEQ ID NO: 1627270 - RNA, 23 nt, Human
cagguugucugaagucacugcac

SEQ ID NO: 1627271 - RNA, 22 nt, Human
cagguugucugaagucacugca

SEQ ID NO: 1627272 - RNA, 16 nt, Human
cagguuuuccugaaga

SEQ ID NO: 1627273 - RNA, 12 nt, Human
cagguuuuccug

SEQ ID NO: 1627274 - RNA, 14 nt, Human
cagguuuaagcugu

SEQ ID NO: 1627275 - RNA, 23 nt, Human
caguaaagaacaucccuccuggg

SEQ ID NO: 1627276 - RNA, 20 nt, Human
caggugcacaagcuccaagc

SEQ ID NO: 1627277 - RNA, 19 nt, Human
caggugcacaagcuccaag

SEQ ID NO: 1627278 - RNA, 18 nt, Human
caggugcacaagcuccaa

SEQ ID NO: 1627279 - RNA, 17 nt, Human
caggugcacaagcucca

SEQ ID NO: 1627280 - RNA, 23 nt, Human
caggugauccacccaccucagcc

SEQ ID NO: 1627281 - RNA, 22 nt, Human
caggugauccacccaccucagc

SEQ ID NO: 1627282 - RNA, 15 nt, Human
caggugcacaagcuc

SEQ ID NO: 1627283 - RNA, 21 nt, Human
caggugauccacccaccucag

SEQ ID NO: 1627284 - RNA, 19 nt, Human
cagucaccucauggaauug

SEQ ID NO: 1627285 - RNA, 14 nt, Human
cagucaccccggcc

SEQ ID NO: 1627286 - RNA, 15 nt, Human
cagucacauuccaag

SEQ ID NO: 1627287 - RNA, 16 nt, Human
cagucaccucauggaa

SEQ ID NO: 1627288 - RNA, 20 nt, Human
caggcugggcuucaguggca

SEQ ID NO: 1627289 - RNA, 15 nt, Human
caggcugggagagcc

SEQ ID NO: 1627290 - RNA, 14 nt, Human
caggcugggagagc

SEQ ID NO: 1627291 - RNA, 12 nt, Human
caggcugggaga

SEQ ID NO: 1627292 - RNA, 22 nt, Human
caggcugggcuucaguggcagc

SEQ ID NO: 1627293 - RNA, 21 nt, Human
caggcugggcuucaguggcag

SEQ ID NO: 1627294 - RNA, 23 nt, Human
cagggcucagcggggacagcucc

SEQ ID NO: 1627295 - RNA, 21 nt, Human
cagggcucagcggggacagcu

SEQ ID NO: 1627296 - RNA, 19 nt, Human
caggggaaaaucagccugc

SEQ ID NO: 1627297 - RNA, 20 nt, Human
caggggaaaaucagccugcu

SEQ ID NO: 1627298 - RNA, 20 nt, Human
caggccaggcccucugccca

SEQ ID NO: 1627299 - RNA, 16 nt, Human
caggccagagggagug

SEQ ID NO: 1627300 - RNA, 19 nt, Human
caggccaggcccucugccc

SEQ ID NO: 1627301 - RNA, 18 nt, Human
caggccaggcccucugcc

SEQ ID NO: 1627302 - RNA, 17 nt, Human
caggccaggcccucugc

SEQ ID NO: 1627303 - RNA, 23 nt, Human
caggccagcugcuugggcuucau

SEQ ID NO: 1627304 - RNA, 21 nt, Human
caggccagcugcuugggcuuc

SEQ ID NO: 1627305 - RNA, 19 nt, Human
caggccagcugcuugggcu

SEQ ID NO: 1627306 - RNA, 17 nt, Human
caggccagcugcuuggg

SEQ ID NO: 1627307 - RNA, 15 nt, Human
caggccagagggagu

SEQ ID NO: 1627308 - RNA, 13 nt, Human
caggccagaggga

SEQ ID NO: 1627309 - RNA, 18 nt, Human
caggcagauacaggaaaa

SEQ ID NO: 1627310 - RNA, 15 nt, Human
caggccacuugauga

SEQ ID NO: 1627311 - RNA, 22 nt, Human
cagcuccccucggagaagagcu

SEQ ID NO: 1627312 - RNA, 21 nt, Human
cagcuccccucggagaagagc

SEQ ID NO: 1627313 - RNA, 14 nt, Human
cagcugccugggau

SEQ ID NO: 1627314 - RNA, 13 nt, Human
cagcugccuggga

SEQ ID NO: 1627315 - RNA, 12 nt, Human
cagcugccuggg

SEQ ID NO: 1627316 - RNA, 20 nt, Human
cagcugugcucuggacaggc

SEQ ID NO: 1627317 - RNA, 15 nt, Human
cagcugccugggauc

SEQ ID NO: 1627318 - RNA, 24 nt, Human
cagcugugcucuggacaggcaugu

SEQ ID NO: 1627319 - RNA, 16 nt, Human
caggaaaagcugcuga

SEQ ID NO: 1627320 - RNA, 15 nt, Human
caggaaaagcugcug

SEQ ID NO: 1627321 - RNA, 18 nt, Human
caggaaaagcugcugaca

SEQ ID NO: 1627322 - RNA, 21 nt, Human
cagcggggacagcuccuucug

SEQ ID NO: 1627323 - RNA, 19 nt, Human
cagcggggacagcuccuuc

SEQ ID NO: 1627324 - RNA, 18 nt, Human
cagcggggacagcuccuu

SEQ ID NO: 1627325 - RNA, 12 nt, Human
cagccugcucca

SEQ ID NO: 1627326 - RNA, 15 nt, Human
cagccugcuccagcu

SEQ ID NO: 1627327 - RNA, 19 nt, Human
cagccugcuaauuccccag

SEQ ID NO: 1627328 - RNA, 20 nt, Human
cagccgagauagccaaggcc

SEQ ID NO: 1627329 - RNA, 19 nt, Human
cagccgagauagccaaggc

SEQ ID NO: 1627330 - RNA, 13 nt, Human
cagcaguucagag

SEQ ID NO: 1627331 - RNA, 17 nt, Human
cagcauagaaguaacuu

SEQ ID NO: 1627332 - RNA, 13 nt, Human
cagcauaauacuu

SEQ ID NO: 1627333 - RNA, 22 nt, Human
cagauucuuuccugaggcuggg

SEQ ID NO: 1627334 - RNA, 20 nt, Human
cagauucuuuccugaggcug

SEQ ID NO: 1627335 - RNA, 17 nt, Human
cagauugcaacaggcug

SEQ ID NO: 1627336 - RNA, 16 nt, Human
cagcacgauuucuguu

SEQ ID NO: 1627337 - RNA, 18 nt, Human
cagcacgauuucuguuua

SEQ ID NO: 1627338 - RNA, 19 nt, Human
cagcacgauuucuguuuag

SEQ ID NO: 1627339 - RNA, 20 nt, Human
cagcacgauuucuguuuaga

SEQ ID NO: 1627340 - RNA, 13 nt, Human
cagccaguaaaug

SEQ ID NO: 1627341 - RNA, 20 nt, Human
cagcaucauggagguuugaa

SEQ ID NO: 1627342 - RNA, 17 nt, Human
cagagguugcagugagc

SEQ ID NO: 1627343 - RNA, 20 nt, Human
cagagguccacaacacacag

SEQ ID NO: 1627344 - RNA, 15 nt, Human
cagagguccacaaca

SEQ ID NO: 1627345 - RNA, 21 nt, Human
cagaguaauccaagcaaaugu

SEQ ID NO: 1627346 - RNA, 23 nt, Human
cagaggggguggccucccaacuc

SEQ ID NO: 1627347 - RNA, 22 nt, Human
cagaggggguggccucccaacu

SEQ ID NO: 1627348 - RNA, 12 nt, Human
cagauccuggaa

SEQ ID NO: 1627349 - RNA, 13 nt, Human
cagauccuggaaa

SEQ ID NO: 1627350 - RNA, 19 nt, Human
cagauccccaagccuggca

SEQ ID NO: 1627351 - RNA, 19 nt, Human
cagauucuuuccugaggcu

SEQ ID NO: 1627352 - RNA, 18 nt, Human
cagauucuuuccugaggc

SEQ ID NO: 1627353 - RNA, 17 nt, Human
cagauucuuuccugagg

SEQ ID NO: 1627354 - RNA, 15 nt, Human
cagauucuuuccuga

SEQ ID NO: 1627355 - RNA, 22 nt, Human
ccauuuaaagcuuauuaaaacu

SEQ ID NO: 1627356 - RNA, 15 nt, Human
ccaugggccuccugu

SEQ ID NO: 1627357 - RNA, 14 nt, Human
ccaugggccuccug

SEQ ID NO: 1627358 - RNA, 17 nt, Human
ccaugggccuccugugu

SEQ ID NO: 1627359 - RNA, 14 nt, Human
ccauacauuugugu

SEQ ID NO: 1627360 - RNA, 13 nt, Human
ccauacauuugug

SEQ ID NO: 1627361 - RNA, 20 nt, Human
ccauaauuuuuuuuuuccuu

SEQ ID NO: 1627362 - RNA, 13 nt, Human
ccaucccagcccc

SEQ ID NO: 1627363 - RNA, 12 nt, Human
ccaucccagccc

SEQ ID NO: 1627364 - RNA, 23 nt, Human
ccaucccaaacccuucagugcca

SEQ ID NO: 1627365 - RNA, 19 nt, Human
ccaguuuuguuuggaccaa

SEQ ID NO: 1627366 - RNA, 16 nt, Human
ccaguuuuguuuggac

SEQ ID NO: 1627367 - RNA, 13 nt, Human
ccaugggccuccu

SEQ ID NO: 1627368 - RNA, 16 nt, Human
ccaugaguccccuguu

SEQ ID NO: 1627369 - RNA, 15 nt, Human
ccaugaguccccugu

SEQ ID NO: 1627370 - RNA, 14 nt, Human
ccaugaguccccug

SEQ ID NO: 1627371 - RNA, 19 nt, Human
ccaugagccucagcauccu

SEQ ID NO: 1627372 - RNA, 18 nt, Human
ccaugagccucagcaucc

SEQ ID NO: 1627373 - RNA, 14 nt, Human
ccaugagccucagc

SEQ ID NO: 1627374 - RNA, 22 nt, Human
ccauccccuguagagugggagc

SEQ ID NO: 1627375 - RNA, 16 nt, Human
ccauccccuguagagu

SEQ ID NO: 1627376 - RNA, 22 nt, Human
ccaggauguacaaggacagccc

SEQ ID NO: 1627377 - RNA, 14 nt, Human
ccaggcugggagag

SEQ ID NO: 1627378 - RNA, 13 nt, Human
ccaggcugggaga

SEQ ID NO: 1627379 - RNA, 17 nt, Human
ccaggcaacuugggaac

SEQ ID NO: 1627380 - RNA, 22 nt, Human
ccaggcugggagagccuuccag

SEQ ID NO: 1627381 - RNA, 23 nt, Human
ccaggcugggagagccuuccagg

SEQ ID NO: 1627382 - RNA, 21 nt, Human
ccaggcugggagagccuucca

SEQ ID NO: 1627383 - RNA, 18 nt, Human
ccaggcugggagagccuu

SEQ ID NO: 1627384 - RNA, 17 nt, Human
ccaggcugggagagccu

SEQ ID NO: 1627385 - RNA, 15 nt, Human
ccaggcugggagagc

SEQ ID NO: 1627386 - RNA, 21 nt, Human
ccagucaccccggccaccugc

SEQ ID NO: 1627387 - RNA, 20 nt, Human
ccagucaccccggccaccug

SEQ ID NO: 1627388 - RNA, 13 nt, Human
ccagucaccccgg

SEQ ID NO: 1627389 - RNA, 12 nt, Human
ccagucaccccg

SEQ ID NO: 1627390 - RNA, 22 nt, Human
ccaguauuguacaaaguauuaa

SEQ ID NO: 1627391 - RNA, 20 nt, Human
ccaguauuguacaaaguauu

SEQ ID NO: 1627392 - RNA, 14 nt, Human
ccagucccccugcc

SEQ ID NO: 1627393 - RNA, 19 nt, Human
ccagcagagcaccuuagac

SEQ ID NO: 1627394 - RNA, 23 nt, Human
ccagcagagcaccuuagacaguc

SEQ ID NO: 1627395 - RNA, 23 nt, Human
ccaggaaaggcuccaggagcagc

SEQ ID NO: 1627396 - RNA, 22 nt, Human
ccaggaaaggcuccaggagcag

SEQ ID NO: 1627397 - RNA, 21 nt, Human
ccaggaaaggcuccaggagca

SEQ ID NO: 1627398 - RNA, 20 nt, Human
ccagcuugaaaccuucacuu

SEQ ID NO: 1627399 - RNA, 18 nt, Human
ccagcuugaaaccuucac

SEQ ID NO: 1627400 - RNA, 20 nt, Human
ccagcagccuggacccugug

SEQ ID NO: 1627401 - RNA, 19 nt, Human
ccagcagccuggacccugu

SEQ ID NO: 1627402 - RNA, 15 nt, Human
ccagcagccuggacc

SEQ ID NO: 1627403 - RNA, 16 nt, Human
ccagcagauuauucac

SEQ ID NO: 1627404 - RNA, 10 nt, Human
ccagccccuu

SEQ ID NO: 1627405 - RNA, 21 nt, Human
ccagccccuggaugcagccuc

SEQ ID NO: 1627406 - RNA, 15 nt, Human
ccagcagauuauuca

SEQ ID NO: 1627407 - RNA, 18 nt, Human
ccccugcacuccagccug

SEQ ID NO: 1627408 - RNA, 17 nt, Human
ccccugcaaagcccagc

SEQ ID NO: 1627409 - RNA, 16 nt, Human
ccccugcaaagcccag

SEQ ID NO: 1627410 - RNA, 15 nt, Human
ccccugcaaagccca

SEQ ID NO: 1627411 - RNA, 17 nt, Human
ccccuucgcuccugugu

SEQ ID NO: 1627412 - RNA, 15 nt, Human
ccccuucgcuccugu

SEQ ID NO: 1627413 - RNA, 14 nt, Human
ccccuucgcuccug

SEQ ID NO: 1627414 - RNA, 19 nt, Human
ccccuucgcuccugugucu

SEQ ID NO: 1627415 - RNA, 14 nt, Human
ccccauucugccug

SEQ ID NO: 1627416 - RNA, 13 nt, Human
ccccauucugccu

SEQ ID NO: 1627417 - RNA, 15 nt, Human
ccccauucugccugc

SEQ ID NO: 1627418 - RNA, 12 nt, Human
cccggcugcgga

SEQ ID NO: 1627419 - RNA, 13 nt, Human
cccggcugcccuu

SEQ ID NO: 1627420 - RNA, 12 nt, Human
cccggcugcccu

SEQ ID NO: 1627421 - RNA, 12 nt, Human
cccgggaagggg

SEQ ID NO: 1627422 - RNA, 17 nt, Human
ccccuucugacccaugc

SEQ ID NO: 1627423 - RNA, 13 nt, Human
cccucagagccac

SEQ ID NO: 1627424 - RNA, 20 nt, Human
cccaggcuuagucacugaga

SEQ ID NO: 1627425 - RNA, 15 nt, Human
cccaggcuuagucac

SEQ ID NO: 1627426 - RNA, 22 nt, Human
cccaggaauggagccugcacgg

SEQ ID NO: 1627427 - RNA, 20 nt, Human
cccaggaauggagccugcac

SEQ ID NO: 1627428 - RNA, 19 nt, Human
cccaggaauggagccugca

SEQ ID NO: 1627429 - RNA, 18 nt, Human
cccaggaauggagccugc

SEQ ID NO: 1627430 - RNA, 23 nt, Human
cccagcugugcucuggacaggca

SEQ ID NO: 1627431 - RNA, 21 nt, Human
cccagcugugcucuggacagg

SEQ ID NO: 1627432 - RNA, 19 nt, Human
cccaggaaaggcuccagga

SEQ ID NO: 1627433 - RNA, 22 nt, Human
cccagcuuaaaggggcuagagu

SEQ ID NO: 1627434 - RNA, 22 nt, Human
cccaggaaaggcuccaggagca

SEQ ID NO: 1627435 - RNA, 21 nt, Human
cccaggaaaggcuccaggagc

SEQ ID NO: 1627436 - RNA, 23 nt, Human
cccaggaaaggcuccaggagcag

SEQ ID NO: 1627437 - RNA, 14 nt, Human
cccagcccacuucu

SEQ ID NO: 1627438 - RNA, 17 nt, Human
cccagcccacuucugcc

SEQ ID NO: 1627439 - RNA, 22 nt, Human
cccauucugccugcccaggccc

SEQ ID NO: 1627440 - RNA, 21 nt, Human
cccauucugccugcccaggcc

SEQ ID NO: 1627441 - RNA, 21 nt, Human
ccccagcaagugagagcuggg

SEQ ID NO: 1627442 - RNA, 20 nt, Human
ccccagcaagugagagcugg

SEQ ID NO: 1627443 - RNA, 19 nt, Human
ccccagcaagugagagcug

SEQ ID NO: 1627444 - RNA, 21 nt, Human
ccccauccucuguacagagcc

SEQ ID NO: 1627445 - RNA, 19 nt, Human
ccccauccucuguacagag

SEQ ID NO: 1627446 - RNA, 22 nt, Human
ccccauccucuguacagagccc

SEQ ID NO: 1627447 - RNA, 17 nt, Human
ccccagcaagugagagc

SEQ ID NO: 1627448 - RNA, 23 nt, Human
ccccagauugcaacaggcugggc

SEQ ID NO: 1627449 - RNA, 22 nt, Human
ccccagauugcaacaggcuggg

SEQ ID NO: 1627450 - RNA, 21 nt, Human
ccccagauugcaacaggcugg

SEQ ID NO: 1627451 - RNA, 23 nt, Human
cccauucugccugcccaggcccc

SEQ ID NO: 1627452 - RNA, 22 nt, Human
cccauaauuuuuuuuuuccuuu

SEQ ID NO: 1627453 - RNA, 23 nt, Human
cccauaauuuuuuuuuuccuuuu

SEQ ID NO: 1627454 - RNA, 23 nt, Human
ccucauggaauuggagcucgugg

SEQ ID NO: 1627455 - RNA, 17 nt, Human
ccucccaccucagccuc

SEQ ID NO: 1627456 - RNA, 15 nt, Human
ccucccaccucagcc

SEQ ID NO: 1627457 - RNA, 23 nt, Human
ccucauuuuugaauacaggcaua

SEQ ID NO: 1627458 - RNA, 13 nt, Human
ccucccaucucac

SEQ ID NO: 1627459 - RNA, 16 nt, Human
ccucccaucucacaca

SEQ ID NO: 1627460 - RNA, 14 nt, Human
ccggccccugcugg

SEQ ID NO: 1627461 - RNA, 15 nt, Human
ccggccccugcuggu

SEQ ID NO: 1627462 - RNA, 22 nt, Human
cccuucucuccagccccuggau

SEQ ID NO: 1627463 - RNA, 21 nt, Human
cccuucucuccagccccugga

SEQ ID NO: 1627464 - RNA, 15 nt, Human
cccuucgcuccugug

SEQ ID NO: 1627465 - RNA, 14 nt, Human
cccuucgcuccugu

SEQ ID NO: 1627466 - RNA, 13 nt, Human
ccggccccugcug

SEQ ID NO: 1627467 - RNA, 23 nt, Human
cccugucucaaaaaaagaaaaag

SEQ ID NO: 1627468 - RNA, 20 nt, Human
cccugucucaaaaaaagaaa

SEQ ID NO: 1627469 - RNA, 16 nt, Human
cccugucuaaugaaac

SEQ ID NO: 1627470 - RNA, 13 nt, Human
cccuucgcuccug

SEQ ID NO: 1627471 - RNA, 20 nt, Human
cccugugauggggcccugcc

SEQ ID NO: 1627472 - RNA, 19 nt, Human
cccugugauggggcccugc

SEQ ID NO: 1627473 - RNA, 18 nt, Human
cccugugauggggcccug

SEQ ID NO: 1627474 - RNA, 17 nt, Human
cccugugauggggcccu

SEQ ID NO: 1627475 - RNA, 15 nt, Human
ccuguaaucacagcu

SEQ ID NO: 1627476 - RNA, 17 nt, Human
ccuguccugccuaaggc

SEQ ID NO: 1627477 - RNA, 19 nt, Human
ccuguccugccuaaggcug

SEQ ID NO: 1627478 - RNA, 15 nt, Human
ccugguuuccugccc

SEQ ID NO: 1627479 - RNA, 16 nt, Human
ccugguuuccugcccu

SEQ ID NO: 1627480 - RNA, 14 nt, Human
ccugguuuccugcc

SEQ ID NO: 1627481 - RNA, 13 nt, Human
ccugguuuccugc

SEQ ID NO: 1627482 - RNA, 21 nt, Human
ccugguggcagugggagcugc

SEQ ID NO: 1627483 - RNA, 18 nt, Human
ccugggggcugggcagag

SEQ ID NO: 1627484 - RNA, 22 nt, Human
ccugucuaaugaaaccuguguc

SEQ ID NO: 1627485 - RNA, 15 nt, Human
ccugucuaaugaaac

SEQ ID NO: 1627486 - RNA, 17 nt, Human
ccugucuugccuuuuuc

SEQ ID NO: 1627487 - RNA, 20 nt, Human
ccugucuugccuuuuucauu

SEQ ID NO: 1627488 - RNA, 19 nt, Human
ccugucuugccuuuuucau

SEQ ID NO: 1627489 - RNA, 18 nt, Human
ccugugacuucagcucug

SEQ ID NO: 1627490 - RNA, 17 nt, Human
ccugugaacugaacucu

SEQ ID NO: 1627491 - RNA, 16 nt, Human
ccugugaacugaacuc

SEQ ID NO: 1627492 - RNA, 22 nt, Human
ccuggccucugcacuccccugc

SEQ ID NO: 1627493 - RNA, 20 nt, Human
ccugggccccaguuguauuu

SEQ ID NO: 1627494 - RNA, 21 nt, Human
ccuggccucugcacuccccug

SEQ ID NO: 1627495 - RNA, 20 nt, Human
ccuggccucugcacuccccu

SEQ ID NO: 1627496 - RNA, 22 nt, Human
ccuggccucaagugauucuccu

SEQ ID NO: 1627497 - RNA, 22 nt, Human
ccuggccuagcauacguacaca

SEQ ID NO: 1627498 - RNA, 13 nt, Human
ccucuuucccucc

SEQ ID NO: 1627499 - RNA, 16 nt, Human
ccucuuucccucccuu

SEQ ID NO: 1627500 - RNA, 21 nt, Human
ccugaguagcugggauuacag

SEQ ID NO: 1627501 - RNA, 19 nt, Human
ccugcacuugcagacucua

SEQ ID NO: 1627502 - RNA, 18 nt, Human
ccugcacuugcagacucu

SEQ ID NO: 1627503 - RNA, 17 nt, Human
ccugcacuugcagacuc

SEQ ID NO: 1627504 - RNA, 16 nt, Human
ccugcacuugcagacu

SEQ ID NO: 1627505 - RNA, 20 nt, Human
ccugcccaccuggccucugc

SEQ ID NO: 1627506 - RNA, 14 nt, Human
ccugcccaccuggc

SEQ ID NO: 1627507 - RNA, 13 nt, Human
ccugcccaccugg

SEQ ID NO: 1627508 - RNA, 12 nt, Human
ccugcccaccug

SEQ ID NO: 1627509 - RNA, 17 nt, Human
ccugccccagggcuccc

SEQ ID NO: 1627510 - RNA, 13 nt, Human
ccugcccaggccc

SEQ ID NO: 1627511 - RNA, 20 nt, Human
ccugcugcaguugccaguca

SEQ ID NO: 1627512 - RNA, 21 nt, Human
ccugcugcaguugccagucac

SEQ ID NO: 1627513 - RNA, 19 nt, Human
ccugcugcaguugccaguc

SEQ ID NO: 1627514 - RNA, 17 nt, Human
ccugcugcaguugccag

SEQ ID NO: 1627515 - RNA, 23 nt, Human
ccugccucgaacuggcugcaaag

SEQ ID NO: 1627516 - RNA, 21 nt, Human
ccugccucgaacuggcugcaa

SEQ ID NO: 1627517 - RNA, 19 nt, Human
ccugccucgaacuggcugc

SEQ ID NO: 1627518 - RNA, 11 nt, Human
ccucuuucccu

SEQ ID NO: 1627519 - RNA, 17 nt, Human
cgccagauucuuuccug

SEQ ID NO: 1627520 - RNA, 13 nt, Human
cgccucugcauuc

SEQ ID NO: 1627521 - RNA, 18 nt, Human
cgcaggcccccaggugcc

SEQ ID NO: 1627522 - RNA, 22 nt, Human
cgcaggauucuuccucccuccc

SEQ ID NO: 1627523 - RNA, 13 nt, Human
cgcaggcuggccc

SEQ ID NO: 1627524 - RNA, 14 nt, Human
cgauagugguggug

SEQ ID NO: 1627525 - RNA, 16 nt, Human
cgagucucuucuccac

SEQ ID NO: 1627526 - RNA, 17 nt, Human
ccuuuugagugccuuac

SEQ ID NO: 1627527 - RNA, 15 nt, Human
ccuuuugagugccuu

SEQ ID NO: 1627528 - RNA, 21 nt, Human
ccuuucaauaggaaaaacuga

SEQ ID NO: 1627529 - RNA, 15 nt, Human
ccuuucacaaccuuc

SEQ ID NO: 1627530 - RNA, 17 nt, Human
ccuugccgucuaccuga

SEQ ID NO: 1627531 - RNA, 16 nt, Human
ccuugccgucuaccug

SEQ ID NO: 1627532 - RNA, 12 nt, Human
cgacaaugcaaa

SEQ ID NO: 1627533 - RNA, 13 nt, Human
cgacaaugcaaac

SEQ ID NO: 1627534 - RNA, 13 nt, Human
cgacagccuggca

SEQ ID NO: 1627535 - RNA, 12 nt, Human
cgacagccuggc

SEQ ID NO: 1627536 - RNA, 14 nt, Human
cgacagccuggcac

SEQ ID NO: 1627537 - RNA, 21 nt, Human
ccuuuuuuagaguugauacua

SEQ ID NO: 1627538 - RNA, 16 nt, Human
ccuuuuuuaaauaaau

SEQ ID NO: 1627539 - RNA, 15 nt, Human
ccuuuuucauuauuu

SEQ ID NO: 1627540 - RNA, 17 nt, Human
cgacugcccggcagggu

SEQ ID NO: 1627541 - RNA, 20 nt, Human
cgacccuugccgucuaccug

SEQ ID NO: 1627542 - RNA, 19 nt, Human
cgacccuugccgucuaccu

SEQ ID NO: 1627543 - RNA, 16 nt, Human
cgguuuuacugcagcu

SEQ ID NO: 1627544 - RNA, 23 nt, Human
cgguguuuaagacauuuuuggaa

SEQ ID NO: 1627545 - RNA, 14 nt, Human
cguaaaauuaagaa

SEQ ID NO: 1627546 - RNA, 16 nt, Human
cgugaguccuggcaug

SEQ ID NO: 1627547 - RNA, 17 nt, Human
cgugaggccagagacac

SEQ ID NO: 1627548 - RNA, 17 nt, Human
cgugaguccuggcaugg

SEQ ID NO: 1627549 - RNA, 18 nt, Human
cgugaguccuggcauggg

SEQ ID NO: 1627550 - RNA, 20 nt, Human
cguguaaccauggacccaau

SEQ ID NO: 1627551 - RNA, 14 nt, Human
cgugcacacaccag

SEQ ID NO: 1627552 - RNA, 12 nt, Human
cggcuccaggcu

SEQ ID NO: 1627553 - RNA, 17 nt, Human
cggcucacugcagccuc

SEQ ID NO: 1627554 - RNA, 16 nt, Human
cggcucacugcagccu

SEQ ID NO: 1627555 - RNA, 15 nt, Human
cggcucacugcagcc

SEQ ID NO: 1627556 - RNA, 20 nt, Human
cggagucccaccuuggcugc

SEQ ID NO: 1627557 - RNA, 18 nt, Human
cggagucccaccuuggcu

SEQ ID NO: 1627558 - RNA, 16 nt, Human
cggcuccaggcuccuu

SEQ ID NO: 1627559 - RNA, 15 nt, Human
cggcuccaggcuccu

SEQ ID NO: 1627560 - RNA, 14 nt, Human
cggcuccaggcucc

SEQ ID NO: 1627561 - RNA, 13 nt, Human
cggcuccaggcuc

SEQ ID NO: 1627562 - RNA, 14 nt, Human
cgggccacagagaa

SEQ ID NO: 1627563 - RNA, 12 nt, Human
cgggccacagag

SEQ ID NO: 1627564 - RNA, 16 nt, Human
cgggcucugccuccca

SEQ ID NO: 1627565 - RNA, 14 nt, Human
cgggcucugccucc

SEQ ID NO: 1627566 - RNA, 15 nt, Human
cgggcucagcaaaag

SEQ ID NO: 1627567 - RNA, 11 nt, Human
cgggcucagca

SEQ ID NO: 1627568 - RNA, 17 nt, Human
cgggccacagagaaagu

SEQ ID NO: 1627569 - RNA, 18 nt, Human
cgguguggagaagcggcu

SEQ ID NO: 1627570 - RNA, 15 nt, Human
cggggacagcuccuu

SEQ ID NO: 1627571 - RNA, 17 nt, Human
cgggcucugccucccau

SEQ ID NO: 1627572 - RNA, 14 nt, Human
cggggacagcuccu

SEQ ID NO: 1627573 - RNA, 13 nt, Human
cgcugccccuggc

SEQ ID NO: 1627574 - RNA, 16 nt, Human
cggagucccaccuugg

SEQ ID NO: 1627575 - RNA, 17 nt, Human
cuacaaaaacacagcaa

SEQ ID NO: 1627576 - RNA, 16 nt, Human
cuacaaaaacacagca

SEQ ID NO: 1627577 - RNA, 18 nt, Human
cuacaaaaacacagcaag

SEQ ID NO: 1627578 - RNA, 19 nt, Human
cuacaguccucccaucuca

SEQ ID NO: 1627579 - RNA, 18 nt, Human
cuacauacuauggaauuu

SEQ ID NO: 1627580 - RNA, 22 nt, Human
cuacaguugaaaaacagcugag

SEQ ID NO: 1627581 - RNA, 21 nt, Human
cuacaguugaaaaacagcuga

SEQ ID NO: 1627582 - RNA, 20 nt, Human
cuacaguccucccaucucac

SEQ ID NO: 1627583 - RNA, 20 nt, Human
cuacaugagguacugagagu

SEQ ID NO: 1627584 - RNA, 17 nt, Human
cuaccuuuguauucucu

SEQ ID NO: 1627585 - RNA, 17 nt, Human
cuacguuaccaggcagg

SEQ ID NO: 1627586 - RNA, 20 nt, Human
cuaaguaaaaccacagcagu

SEQ ID NO: 1627587 - RNA, 11 nt, Human
cgugugugugu

SEQ ID NO: 1627588 - RNA, 23 nt, Human
cuaaguaaaaccacagcaguuga

SEQ ID NO: 1627589 - RNA, 22 nt, Human
cuaaguaaaaccacagcaguug

SEQ ID NO: 1627590 - RNA, 23 nt, Human
cuaagugauccucccaccucagc

SEQ ID NO: 1627591 - RNA, 21 nt, Human
cuaagugguacuaacuuuccu

SEQ ID NO: 1627592 - RNA, 20 nt, Human
cuaaguuuuuauggcuuuug

SEQ ID NO: 1627593 - RNA, 23 nt, Human
cuaaguuuuuauggcuuuugugc

SEQ ID NO: 1627594 - RNA, 13 nt, Human
cuagaacucccuu

SEQ ID NO: 1627595 - RNA, 12 nt, Human
cuagaacucccu

SEQ ID NO: 1627596 - RNA, 22 nt, Human
cuagaagauuuugaaauuuuua

SEQ ID NO: 1627597 - RNA, 21 nt, Human
cuagcauacguacacauuuua

SEQ ID NO: 1627598 - RNA, 23 nt, Human
cuagcauacguacacauuuuauu

SEQ ID NO: 1627599 - RNA, 23 nt, Human
cuagaauuugauaugugaacagu

SEQ ID NO: 1627600 - RNA, 23 nt, Human
cucaaaauaccaugccauuuaaa

SEQ ID NO: 1627601 - RNA, 18 nt, Human
cucaaaagcugggcaggu

SEQ ID NO: 1627602 - RNA, 17 nt, Human
cucaaaaaaagaaaaag

SEQ ID NO: 1627603 - RNA, 17 nt, Human
cuaucucccccagcccc

SEQ ID NO: 1627604 - RNA, 16 nt, Human
cuaucucccccagccc

SEQ ID NO: 1627605 - RNA, 18 nt, Human
cuaucucccccagcccca

SEQ ID NO: 1627606 - RNA, 15 nt, Human
cucaaugcacugaca

SEQ ID NO: 1627607 - RNA, 13 nt, Human
cucaaugcacuga

SEQ ID NO: 1627608 - RNA, 11 nt, Human
cucacaaaaga

SEQ ID NO: 1627609 - RNA, 20 nt, Human
cucaaacucuugaccucagg

SEQ ID NO: 1627610 - RNA, 14 nt, Human
cucaauaaaguaca

SEQ ID NO: 1627611 - RNA, 15 nt, Human
cuagccagaggagag

SEQ ID NO: 1627612 - RNA, 13 nt, Human
cuagccagaggag

SEQ ID NO: 1627613 - RNA, 12 nt, Human
cuagccagagga

SEQ ID NO: 1627614 - RNA, 23 nt, Human
cuaguuguuugauucagacagcu

SEQ ID NO: 1627615 - RNA, 22 nt, Human
cuaguuguuugauucagacagc

SEQ ID NO: 1627616 - RNA, 13 nt, Human
cuaguuugauuaa

SEQ ID NO: 1627617 - RNA, 15 nt, Human
cuaguuugauuaaau

SEQ ID NO: 1627618 - RNA, 22 nt, Human
cuaguuugauuaaauucuugca

SEQ ID NO: 1627619 - RNA, 15 nt, Human
cuaucucccccagcc

SEQ ID NO: 1627620 - RNA, 14 nt, Human
cuaucuaaauguug

SEQ ID NO: 1627621 - RNA, 17 nt, Human
cuaucguaaaauuaaga

SEQ ID NO: 1627622 - RNA, 18 nt, Human
cuaucguaaaauuaagaa

SEQ ID NO: 1627623 - RNA, 23 nt, Human
cuccacuuggucugugagaugcu

SEQ ID NO: 1627624 - RNA, 19 nt, Human
cuccacuuucuagccagag

SEQ ID NO: 1627625 - RNA, 16 nt, Human
cuccacuuucuagcca

SEQ ID NO: 1627626 - RNA, 20 nt, Human
cuccacuuucuagccagagg

SEQ ID NO: 1627627 - RNA, 22 nt, Human
cuccacuuggucugugagaugc

SEQ ID NO: 1627628 - RNA, 21 nt, Human
cuccacuuggucugugagaug

SEQ ID NO: 1627629 - RNA, 17 nt, Human
cuccacuuggucuguga

SEQ ID NO: 1627630 - RNA, 16 nt, Human
cuccacuuggucugug

SEQ ID NO: 1627631 - RNA, 15 nt, Human
cuccacuuggucugu

SEQ ID NO: 1627632 - RNA, 13 nt, Human
cuccacuuggucu

SEQ ID NO: 1627633 - RNA, 17 nt, Human
cuccaagcucccaggca

SEQ ID NO: 1627634 - RNA, 16 nt, Human
cuccacuggauggagg

SEQ ID NO: 1627635 - RNA, 16 nt, Human
cuccaagcucccaggc

SEQ ID NO: 1627636 - RNA, 15 nt, Human
cuccaagcucccagg

SEQ ID NO: 1627637 - RNA, 14 nt, Human
cuccaagcucccag

SEQ ID NO: 1627638 - RNA, 13 nt, Human
cuccaagcuccca

SEQ ID NO: 1627639 - RNA, 14 nt, Human
cuccaagcuccauc

SEQ ID NO: 1627640 - RNA, 19 nt, Human
cuccaagcuccaucuccac

SEQ ID NO: 1627641 - RNA, 18 nt, Human
cuccaagcuccaucucca

SEQ ID NO: 1627642 - RNA, 24 nt, Human
cuccaagcaggacauggacaagga

SEQ ID NO: 1627643 - RNA, 22 nt, Human
cuccaagcaggacauggacaag

SEQ ID NO: 1627644 - RNA, 14 nt, Human
cuccaagcaggaca

SEQ ID NO: 1627645 - RNA, 13 nt, Human
cuccaagcaggac

SEQ ID NO: 1627646 - RNA, 22 nt, Human
cuccaagaccuucuccuucacc

SEQ ID NO: 1627647 - RNA, 15 nt, Human
cuccaagaccuucuc

SEQ ID NO: 1627648 - RNA, 14 nt, Human
cuccaagaauuucu

SEQ ID NO: 1627649 - RNA, 13 nt, Human
cuccaagaauuuc

SEQ ID NO: 1627650 - RNA, 12 nt, Human
cucaugccucag

SEQ ID NO: 1627651 - RNA, 16 nt, Human
cucaugccucagccuc

SEQ ID NO: 1627652 - RNA, 17 nt, Human
cucagucucccucccuu

SEQ ID NO: 1627653 - RNA, 16 nt, Human
cucagucucccucccu

SEQ ID NO: 1627654 - RNA, 15 nt, Human
cucagucucccuccc

SEQ ID NO: 1627655 - RNA, 13 nt, Human
cucagucucccuc

SEQ ID NO: 1627656 - RNA, 12 nt, Human
cuccucugcuug

SEQ ID NO: 1627657 - RNA, 14 nt, Human
cuccucugcuugcc

SEQ ID NO: 1627658 - RNA, 18 nt, Human
cuccucugcugcuggcug

SEQ ID NO: 1627659 - RNA, 16 nt, Human
cuccucugcugcuggc

SEQ ID NO: 1627660 - RNA, 19 nt, Human
cuccucucugcccuaaugc

SEQ ID NO: 1627661 - RNA, 15 nt, Human
cuccucucugcccua

SEQ ID NO: 1627662 - RNA, 14 nt, Human
cuccucucugcccu

SEQ ID NO: 1627663 - RNA, 13 nt, Human
cuccucucugccc

SEQ ID NO: 1627664 - RNA, 12 nt, Human
cuccugggcagc

SEQ ID NO: 1627665 - RNA, 18 nt, Human
cuccuggcccacugcauc

SEQ ID NO: 1627666 - RNA, 16 nt, Human
cuccuggcccacugca

SEQ ID NO: 1627667 - RNA, 14 nt, Human
cuccugggcagcug

SEQ ID NO: 1627668 - RNA, 15 nt, Human
cuccugggcagcugc

SEQ ID NO: 1627669 - RNA, 16 nt, Human
cuccugggcagcugcc

SEQ ID NO: 1627670 - RNA, 17 nt, Human
cuccugggcagcugccu

SEQ ID NO: 1627671 - RNA, 18 nt, Human
cuccugggcagcugccuc

SEQ ID NO: 1627672 - RNA, 19 nt, Human
cuccugggcagcugccucc

SEQ ID NO: 1627673 - RNA, 22 nt, Human
cuccugggcagcugccuccccu

SEQ ID NO: 1627674 - RNA, 21 nt, Human
cuccucugcuugccaucccuc

SEQ ID NO: 1627675 - RNA, 22 nt, Human
cuccucugcuugccaucccucc

SEQ ID NO: 1627676 - RNA, 15 nt, Human
cuccucugcuugcca

SEQ ID NO: 1627677 - RNA, 16 nt, Human
cuccucugcuugccau

SEQ ID NO: 1627678 - RNA, 17 nt, Human
cuccucugcuugccauc

SEQ ID NO: 1627679 - RNA, 20 nt, Human
cuccucugcuugccaucccu

SEQ ID NO: 1627680 - RNA, 15 nt, Human
cuccuggacuccugc

SEQ ID NO: 1627681 - RNA, 23 nt, Human
cuccucuucaacugaccagccuc

SEQ ID NO: 1627682 - RNA, 18 nt, Human
cuccucuucaacugacca

SEQ ID NO: 1627683 - RNA, 20 nt, Human
cucccccagccccauccucu

SEQ ID NO: 1627684 - RNA, 15 nt, Human
cucccccagccccau

SEQ ID NO: 1627685 - RNA, 22 nt, Human
cucccccagccccauccucugu

SEQ ID NO: 1627686 - RNA, 13 nt, Human
cucccccaucucu

SEQ ID NO: 1627687 - RNA, 14 nt, Human
cucguuaauuugua

SEQ ID NO: 1627688 - RNA, 15 nt, Human
cucuaucaccaagga

SEQ ID NO: 1627689 - RNA, 16 nt, Human
cucgaacuggcugcaa

SEQ ID NO: 1627690 - RNA, 15 nt, Human
cucgaacuggcugca

SEQ ID NO: 1627691 - RNA, 14 nt, Human
cucgaacuggcugc

SEQ ID NO: 1627692 - RNA, 13 nt, Human
cucgaacuggcug

SEQ ID NO: 1627693 - RNA, 23 nt, Human
cuccuggggguucuuucuuccuc

SEQ ID NO: 1627694 - RNA, 18 nt, Human
cuccuggggguucuuucu

SEQ ID NO: 1627695 - RNA, 22 nt, Human
cuccuggggguucuuucuuccu

SEQ ID NO: 1627696 - RNA, 20 nt, Human
cuccuggggguucuuucuuc

SEQ ID NO: 1627697 - RNA, 15 nt, Human
cugagcuuucugcua

SEQ ID NO: 1627698 - RNA, 14 nt, Human
cugagcuuucugcu

SEQ ID NO: 1627699 - RNA, 21 nt, Human
cugagaucaaaacgguuuuac

SEQ ID NO: 1627700 - RNA, 20 nt, Human
cugaggaauccagacccggc

SEQ ID NO: 1627701 - RNA, 17 nt, Human
cugaggaauccagaccc

SEQ ID NO: 1627702 - RNA, 20 nt, Human
cugaggacacuaaccacgcu

SEQ ID NO: 1627703 - RNA, 21 nt, Human
cugaggaauccagacccggcu

SEQ ID NO: 1627704 - RNA, 23 nt, Human
cugaggacacuaaccacgcugga

SEQ ID NO: 1627705 - RNA, 12 nt, Human
cugaggugggag

SEQ ID NO: 1627706 - RNA, 21 nt, Human
cugaguacguugugcauuugg

SEQ ID NO: 1627707 - RNA, 18 nt, Human
cugaguacguugugcauu

SEQ ID NO: 1627708 - RNA, 17 nt, Human
cugaguacguugugcau

SEQ ID NO: 1627709 - RNA, 19 nt, Human
cugaguacguugugcauuu

SEQ ID NO: 1627710 - RNA, 20 nt, Human
cugaguacguugugcauuug

SEQ ID NO: 1627711 - RNA, 14 nt, Human
cugaggaccagcca

SEQ ID NO: 1627712 - RNA, 22 nt, Human
cugaggacuuaaaauauuccug

SEQ ID NO: 1627713 - RNA, 20 nt, Human
cugaguagcugggauuacag

SEQ ID NO: 1627714 - RNA, 15 nt, Human
cugaguagcugggau

SEQ ID NO: 1627715 - RNA, 14 nt, Human
cugaguagcuggga

SEQ ID NO: 1627716 - RNA, 19 nt, Human
cugacaacagacuucugaa

SEQ ID NO: 1627717 - RNA, 18 nt, Human
cugacaacagacuucuga

SEQ ID NO: 1627718 - RNA, 15 nt, Human
cugacaacagacuuc

SEQ ID NO: 1627719 - RNA, 22 nt, Human
cugacccaugcugcccugugag

SEQ ID NO: 1627720 - RNA, 21 nt, Human
cugacccaugcugcccuguga

SEQ ID NO: 1627721 - RNA, 23 nt, Human
cugagacagcccgggcucugccu

SEQ ID NO: 1627722 - RNA, 21 nt, Human
cugagacucgcgacaaugcaa

SEQ ID NO: 1627723 - RNA, 22 nt, Human
cugagacucgcgacaaugcaaa

SEQ ID NO: 1627724 - RNA, 22 nt, Human
cugagaggacuuuucuuugugg

SEQ ID NO: 1627725 - RNA, 21 nt, Human
cugagaggacuuuucuuugug

SEQ ID NO: 1627726 - RNA, 17 nt, Human
cugagaguagagucacu

SEQ ID NO: 1627727 - RNA, 22 nt, Human
cucuuagaugcaguucugaaga

SEQ ID NO: 1627728 - RNA, 13 nt, Human
cucuuauugccca

SEQ ID NO: 1627729 - RNA, 20 nt, Human
cucuuauugcccacgcugga

SEQ ID NO: 1627730 - RNA, 19 nt, Human
cucuuauugcccacgcugg

SEQ ID NO: 1627731 - RNA, 15 nt, Human
cucuuauugcccacg

SEQ ID NO: 1627732 - RNA, 14 nt, Human
cucuuauugcccac

SEQ ID NO: 1627733 - RNA, 18 nt, Human
cucuucagaucucuaacu

SEQ ID NO: 1627734 - RNA, 19 nt, Human
cucuucagaucucuaacuu

SEQ ID NO: 1627735 - RNA, 14 nt, Human
cucuucaaucucuu

SEQ ID NO: 1627736 - RNA, 20 nt, Human
cucuucaacugaccagccuc

SEQ ID NO: 1627737 - RNA, 17 nt, Human
cucuucaacugaccagc

SEQ ID NO: 1627738 - RNA, 16 nt, Human
cucuucaacugaccag

SEQ ID NO: 1627739 - RNA, 15 nt, Human
cucugguccauagag

SEQ ID NO: 1627740 - RNA, 15 nt, Human
cucugguuaucuaau

SEQ ID NO: 1627741 - RNA, 12 nt, Human
cucuguccaggc

SEQ ID NO: 1627742 - RNA, 16 nt, Human
cucugcugacagacac

SEQ ID NO: 1627743 - RNA, 14 nt, Human
cucugcugacagac

SEQ ID NO: 1627744 - RNA, 13 nt, Human
cucugcugacaga

SEQ ID NO: 1627745 - RNA, 14 nt, Human
cucugguccauaga

SEQ ID NO: 1627746 - RNA, 20 nt, Human
cucugcacuccccugcuggg

SEQ ID NO: 1627747 - RNA, 21 nt, Human
cucugcacuccccugcugggu

SEQ ID NO: 1627748 - RNA, 13 nt, Human
cucugcagcaaua

SEQ ID NO: 1627749 - RNA, 20 nt, Human
cucugcuccucuccccagca

SEQ ID NO: 1627750 - RNA, 18 nt, Human
cucugcuccucuccccag

SEQ ID NO: 1627751 - RNA, 13 nt, Human
cucugcuccucuc

SEQ ID NO: 1627752 - RNA, 18 nt, Human
cucugcaggucccuaaua

SEQ ID NO: 1627753 - RNA, 17 nt, Human
cucugcaggucccuaau

SEQ ID NO: 1627754 - RNA, 16 nt, Human
cucugcaggucccuaa

SEQ ID NO: 1627755 - RNA, 15 nt, Human
cucugcaggucccua

SEQ ID NO: 1627756 - RNA, 14 nt, Human
cucugcaggucccu

SEQ ID NO: 1627757 - RNA, 15 nt, Human
cugaaacaacaaaua

SEQ ID NO: 1627758 - RNA, 22 nt, Human
cugaaaauugaugggauuuggu

SEQ ID NO: 1627759 - RNA, 21 nt, Human
cucuugaugccuggcggggug

SEQ ID NO: 1627760 - RNA, 16 nt, Human
cucuugaugccuggcg

SEQ ID NO: 1627761 - RNA, 15 nt, Human
cucuugaugccuggc

SEQ ID NO: 1627762 - RNA, 13 nt, Human
cucuugaugccug

SEQ ID NO: 1627763 - RNA, 21 nt, Human
cugaaggccccgcccaggcuu

SEQ ID NO: 1627764 - RNA, 17 nt, Human
cugaaggcuggguucug

SEQ ID NO: 1627765 - RNA, 19 nt, Human
cugaaggccccgcccaggc

SEQ ID NO: 1627766 - RNA, 23 nt, Human
cugacaacacucauugaccugag

SEQ ID NO: 1627767 - RNA, 22 nt, Human
cugacaacacucauugaccuga

SEQ ID NO: 1627768 - RNA, 23 nt, Human
cugaaggacauugcggacagcca

SEQ ID NO: 1627769 - RNA, 22 nt, Human
cugaagcuaucguaaaauuaag

SEQ ID NO: 1627770 - RNA, 21 nt, Human
cugaagcuaucguaaaauuaa

SEQ ID NO: 1627771 - RNA, 16 nt, Human
cucuugagccuugaac

SEQ ID NO: 1627772 - RNA, 17 nt, Human
cucuugagccuugaacu

SEQ ID NO: 1627773 - RNA, 18 nt, Human
cucuugagccuugaacuu

SEQ ID NO: 1627774 - RNA, 23 nt, Human
cucuugagccuugaacuuugacc

SEQ ID NO: 1627775 - RNA, 22 nt, Human
guguaaauacaauuuuguuucu

SEQ ID NO: 1627776 - RNA, 21 nt, Human
guguaaauacaauuuuguuuc

SEQ ID NO: 1627777 - RNA, 18 nt, Human
guguaaauacaauuuugu

SEQ ID NO: 1627778 - RNA, 15 nt, Human
gugguuucagaaaug

SEQ ID NO: 1627779 - RNA, 23 nt, Human
gugcugcccugcccaccuggccu

SEQ ID NO: 1627780 - RNA, 18 nt, Human
gugcugcccugcccaccu

SEQ ID NO: 1627781 - RNA, 15 nt, Human
aagauagcagggcau

SEQ ID NO: 1627782 - RNA, 22 nt, Human
aagagggagggagggcuccaga

SEQ ID NO: 1627783 - RNA, 21 nt, Human
aagagggagggagggcuccag

SEQ ID NO: 1627784 - RNA, 14 nt, Human
aagaggcagggucu

SEQ ID NO: 1627785 - RNA, 11 nt, Human
aagaggcaggg

SEQ ID NO: 1627786 - RNA, 22 nt, Human
gugucuuaauuaaaagaauauu

SEQ ID NO: 1627787 - RNA, 19 nt, Human
gugucagguggggcagcuu

SEQ ID NO: 1627788 - RNA, 20 nt, Human
gugucagguggggcagcuug

SEQ ID NO: 1627789 - RNA, 23 nt, Human
gugugaaccaccacacccagccc

SEQ ID NO: 1627790 - RNA, 18 nt, Human
gugucagguggggcagcu

SEQ ID NO: 1627791 - RNA, 14 nt, Human
gugucagguggggc

SEQ ID NO: 1627792 - RNA, 22 nt, Human
gugucaccugaagacucauucu

SEQ ID NO: 1627793 - RNA, 14 nt, Human
gugucaccugaaga

SEQ ID NO: 1627794 - RNA, 17 nt, Human
aagcaacccaaauguuc

SEQ ID NO: 1627795 - RNA, 13 nt, Human
aagcaaaauguga

SEQ ID NO: 1627796 - RNA, 20 nt, Human
aagaucaaaagguuaauaaa

SEQ ID NO: 1627797 - RNA, 23 nt, Human
aagaucaaaagguuaauaaagua

SEQ ID NO: 1627798 - RNA, 18 nt, Human
aagauggcugugccucug

SEQ ID NO: 1627799 - RNA, 16 nt, Human
aagauggcugugccuc

SEQ ID NO: 1627800 - RNA, 19 nt, Human
aagcauuguaaaugugcuu

SEQ ID NO: 1627801 - RNA, 16 nt, Human
aagcauuuacuuugug

SEQ ID NO: 1627802 - RNA, 20 nt, Human
aagccaaagcuaggccuggc

SEQ ID NO: 1627803 - RNA, 18 nt, Human
aagccaaagcuaggccug

SEQ ID NO: 1627804 - RNA, 17 nt, Human
aagccaaagcuaggccu

SEQ ID NO: 1627805 - RNA, 17 nt, Human
aagccauguuuauuaca

SEQ ID NO: 1627806 - RNA, 16 nt, Human
aagccauguuuauuac

SEQ ID NO: 1627807 - RNA, 15 nt, Human
aagccauguuuauua

SEQ ID NO: 1627808 - RNA, 20 nt, Human
aagcacugacuucuaaguaa

SEQ ID NO: 1627809 - RNA, 19 nt, Human
aagcacugacuucuaagua

SEQ ID NO: 1627810 - RNA, 23 nt, Human
aagcauauauuuuuauauuuacu

SEQ ID NO: 1627811 - RNA, 12 nt, Human
aagcaugugaga

SEQ ID NO: 1627812 - RNA, 23 nt, Human
aagcaugcacaaauucugucucu

SEQ ID NO: 1627813 - RNA, 17 nt, Human
aagcacugacuucuaag

SEQ ID NO: 1627814 - RNA, 16 nt, Human
aagcacugacuucuaa

SEQ ID NO: 1627815 - RNA, 16 nt, Human
aagcacuaaacaaaga

SEQ ID NO: 1627816 - RNA, 17 nt, Human
aagcaccuccugccucg

SEQ ID NO: 1627817 - RNA, 16 nt, Human
aagcaccuccugccuc

SEQ ID NO: 1627818 - RNA, 15 nt, Human
aagcaccuccugccu

SEQ ID NO: 1627819 - RNA, 14 nt, Human
aagcaccuccugcc

SEQ ID NO: 1627820 - RNA, 13 nt, Human
aagcaccuccugc

SEQ ID NO: 1627821 - RNA, 21 nt, Human
aagcacaugccucucucaggc

SEQ ID NO: 1627822 - RNA, 20 nt, Human
aagcacaugccucucucagg

SEQ ID NO: 1627823 - RNA, 19 nt, Human
aagcacaugccucucucag

SEQ ID NO: 1627824 - RNA, 16 nt, Human
aagcacaugccucucu

SEQ ID NO: 1627825 - RNA, 15 nt, Human
aagcacaugccucuc

SEQ ID NO: 1627826 - RNA, 14 nt, Human
aagcacaugccucu

SEQ ID NO: 1627827 - RNA, 16 nt, Human
aagcacacuugacauc

SEQ ID NO: 1627828 - RNA, 12 nt, Human
guguuugaagca

SEQ ID NO: 1627829 - RNA, 20 nt, Human
guuauuauauuuacaaaugg

SEQ ID NO: 1627830 - RNA, 19 nt, Human
guuauuauauuuacaaaug

SEQ ID NO: 1627831 - RNA, 19 nt, Human
guuagagguucccuuugac

SEQ ID NO: 1627832 - RNA, 18 nt, Human
guuagagauuuuuuuguu

SEQ ID NO: 1627833 - RNA, 18 nt, Human
guuaaucauuagguguga

SEQ ID NO: 1627834 - RNA, 19 nt, Human
guuaauauuuauaggucac

SEQ ID NO: 1627835 - RNA, 23 nt, Human
guuacucuucaguuaagccuuug

SEQ ID NO: 1627836 - RNA, 23 nt, Human
aagccauguuuauuacaguauaa

SEQ ID NO: 1627837 - RNA, 22 nt, Human
aagccauguuuauuacaguaua

SEQ ID NO: 1627838 - RNA, 21 nt, Human
aagccauguuuauuacaguau

SEQ ID NO: 1627839 - RNA, 20 nt, Human
aagccauguuuauuacagua

SEQ ID NO: 1627840 - RNA, 13 nt, Human
aagcccagcuuga

SEQ ID NO: 1627841 - RNA, 21 nt, Human
aagccuuggggcugaugcagu

SEQ ID NO: 1627842 - RNA, 19 nt, Human
aagccuccuccagccgcca

SEQ ID NO: 1627843 - RNA, 15 nt, Human
aagccuccuccagcc

SEQ ID NO: 1627844 - RNA, 16 nt, Human
aagccucccacgacug

SEQ ID NO: 1627845 - RNA, 18 nt, Human
aagccuguuuaagagaca

SEQ ID NO: 1627846 - RNA, 15 nt, Human
aagccuguuuaagag

SEQ ID NO: 1627847 - RNA, 23 nt, Human
guucagcuuguaaauagcucagg

SEQ ID NO: 1627848 - RNA, 22 nt, Human
guucaggguuggccccugcccg

SEQ ID NO: 1627849 - RNA, 21 nt, Human
guucaggguuggccccugccc

SEQ ID NO: 1627850 - RNA, 20 nt, Human
guucaggguuggccccugcc

SEQ ID NO: 1627851 - RNA, 21 nt, Human
aagccgugauuuucauugcug

SEQ ID NO: 1627852 - RNA, 15 nt, Human
aagccguggcuuccc

SEQ ID NO: 1627853 - RNA, 14 nt, Human
aagccguggcuucc

SEQ ID NO: 1627854 - RNA, 13 nt, Human
aagccguggcuuc

SEQ ID NO: 1627855 - RNA, 18 nt, Human
guucagguaacaggcaga

SEQ ID NO: 1627856 - RNA, 17 nt, Human
guucagguaacaggcag

SEQ ID NO: 1627857 - RNA, 22 nt, Human
guucccuuuuuuggcugcugaa

SEQ ID NO: 1627858 - RNA, 21 nt, Human
guucccuuuuuuggcugcuga

SEQ ID NO: 1627859 - RNA, 18 nt, Human
guucccuugaugaagaag

SEQ ID NO: 1627860 - RNA, 21 nt, Human
aagcuuuuaugugaaacaugu

SEQ ID NO: 1627861 - RNA, 19 nt, Human
aagcuuuuaugugaaacau

SEQ ID NO: 1627862 - RNA, 15 nt, Human
guuccccaagacauu

SEQ ID NO: 1627863 - RNA, 18 nt, Human
aagcuuauuaaaacucau

SEQ ID NO: 1627864 - RNA, 23 nt, Human
aagcuuguauuccuuuuucucuc

SEQ ID NO: 1627865 - RNA, 14 nt, Human
guucuuaauucuua

SEQ ID NO: 1627866 - RNA, 17 nt, Human
guucuuaauucuuagcu

SEQ ID NO: 1627867 - RNA, 18 nt, Human
guucucugcccuccaaga

SEQ ID NO: 1627868 - RNA, 17 nt, Human
guucucugcccuccaag

SEQ ID NO: 1627869 - RNA, 13 nt, Human
guucuuaauucuu

SEQ ID NO: 1627870 - RNA, 15 nt, Human
guucucugcccucca

SEQ ID NO: 1627871 - RNA, 14 nt, Human
guucucugaggaca

SEQ ID NO: 1627872 - RNA, 12 nt, Human
guucucugagga

SEQ ID NO: 1627873 - RNA, 15 nt, Human
guucucucuucucca

SEQ ID NO: 1627874 - RNA, 19 nt, Human
guucuagcauggcugccaa

SEQ ID NO: 1627875 - RNA, 14 nt, Human
guucuugguuugua

SEQ ID NO: 1627876 - RNA, 15 nt, Human
guucuugguuuguaa

SEQ ID NO: 1627877 - RNA, 18 nt, Human
guucuugguuuguaaauu

SEQ ID NO: 1627878 - RNA, 19 nt, Human
guugauagcacagacccug

SEQ ID NO: 1627879 - RNA, 14 nt, Human
guugauagcacaga

SEQ ID NO: 1627880 - RNA, 22 nt, Human
guugauagcacagacccugccc

SEQ ID NO: 1627881 - RNA, 15 nt, Human
aaguauuauaccuuu

SEQ ID NO: 1627882 - RNA, 19 nt, Human
aaguauguuagugcaaauu

SEQ ID NO: 1627883 - RNA, 18 nt, Human
aaguauguuagugcaaau

SEQ ID NO: 1627884 - RNA, 20 nt, Human
aaguacuucuccacccugcu

SEQ ID NO: 1627885 - RNA, 19 nt, Human
aaguacuucuccacccugc

SEQ ID NO: 1627886 - RNA, 18 nt, Human
aaguacuucuccacccug

SEQ ID NO: 1627887 - RNA, 15 nt, Human
aaguacuauguauca

SEQ ID NO: 1627888 - RNA, 13 nt, Human
aaguacuauguau

SEQ ID NO: 1627889 - RNA, 17 nt, Human
aaguacuauaauuuacc

SEQ ID NO: 1627890 - RNA, 14 nt, Human
aaguacuauaauuu

SEQ ID NO: 1627891 - RNA, 21 nt, Human
aaguauucuuauuuaaugaaa

SEQ ID NO: 1627892 - RNA, 16 nt, Human
aaguauuauaccuuuu

SEQ ID NO: 1627893 - RNA, 19 nt, Human
aaguauuauaccuuuuuua

SEQ ID NO: 1627894 - RNA, 23 nt, Human
aaguauucuuauuuaaugaaaga

SEQ ID NO: 1627895 - RNA, 22 nt, Human
aagucagaucugccuaaggacu

SEQ ID NO: 1627896 - RNA, 21 nt, Human
aagucagaucugccuaaggac

SEQ ID NO: 1627897 - RNA, 18 nt, Human
aagucagaucugccuaag

SEQ ID NO: 1627898 - RNA, 22 nt, Human
aagucacugcacagugcaucuc

SEQ ID NO: 1627899 - RNA, 22 nt, Human
guuuuaaggaugcuuguacaua

SEQ ID NO: 1627900 - RNA, 14 nt, Human
guuuucuguucuuu

SEQ ID NO: 1627901 - RNA, 15 nt, Human
guuuucuguucuuuc

SEQ ID NO: 1627902 - RNA, 16 nt, Human
guuuucuguucuuucu

SEQ ID NO: 1627903 - RNA, 19 nt, Human
guuuucuguucuuucuggc

SEQ ID NO: 1627904 - RNA, 21 nt, Human
aaguaauaugcacacauuuuu

SEQ ID NO: 1627905 - RNA, 17 nt, Human
aaguaauaugcacacau

SEQ ID NO: 1627906 - RNA, 18 nt, Human
aaguaauaugcacacauu

SEQ ID NO: 1627907 - RNA, 20 nt, Human
aaguaauaugcacacauuuu

SEQ ID NO: 1627908 - RNA, 15 nt, Human
guuuuaaagcuucca

SEQ ID NO: 1627909 - RNA, 19 nt, Human
guuuggacaaaauggaaua

SEQ ID NO: 1627910 - RNA, 20 nt, Human
guuugcuuuguaugcacuuu

SEQ ID NO: 1627911 - RNA, 13 nt, Human
guuuggagacaga

SEQ ID NO: 1627912 - RNA, 18 nt, Human
guuuggaccaaaaaccag

SEQ ID NO: 1627913 - RNA, 14 nt, Human
guuuaugauuccac

SEQ ID NO: 1627914 - RNA, 19 nt, Human
guuuaauauuaaagccaug

SEQ ID NO: 1627915 - RNA, 18 nt, Human
guuuaauauuaaagccau

SEQ ID NO: 1627916 - RNA, 15 nt, Human
guuuaauauuaaagc

SEQ ID NO: 1627917 - RNA, 14 nt, Human
guuuaauauuaaag

SEQ ID NO: 1627918 - RNA, 13 nt, Human
guuuaauauuaaa

SEQ ID NO: 1627919 - RNA, 17 nt, Human
guuuauuacaguauaau

SEQ ID NO: 1627920 - RNA, 13 nt, Human
guuuauuacagua

SEQ ID NO: 1627921 - RNA, 23 nt, Human
guuguuugauucagacagcugcc

SEQ ID NO: 1627922 - RNA, 22 nt, Human
aaggaaacccagcucuggucca

SEQ ID NO: 1627923 - RNA, 17 nt, Human
aaggaaacccagcucug

SEQ ID NO: 1627924 - RNA, 12 nt, Human
aaggaaaaguuu

SEQ ID NO: 1627925 - RNA, 21 nt, Human
guuuaagugacugauggcuaa

SEQ ID NO: 1627926 - RNA, 12 nt, Human
guuguuuguuua

SEQ ID NO: 1627927 - RNA, 23 nt, Human
aagguuucagaaagaagugggga

SEQ ID NO: 1627928 - RNA, 23 nt, Human
aagggggcugggacaugggaaag

SEQ ID NO: 1627929 - RNA, 12 nt, Human
aagggggcuggg

SEQ ID NO: 1627930 - RNA, 13 nt, Human
aaggggagaguaa

SEQ ID NO: 1627931 - RNA, 17 nt, Human
aaggggaauugaggaca

SEQ ID NO: 1627932 - RNA, 17 nt, Human
aagggcuguuauaaucu

SEQ ID NO: 1627933 - RNA, 15 nt, Human
aagggcuguuauaau

SEQ ID NO: 1627934 - RNA, 20 nt, Human
aaggcugucaauuacaggaa

SEQ ID NO: 1627935 - RNA, 22 nt, Human
aaggcugggggaagaagcucuc

SEQ ID NO: 1627936 - RNA, 19 nt, Human
aaggcugggggaagaagcu

SEQ ID NO: 1627937 - RNA, 11 nt, Human
guuucagaaau

SEQ ID NO: 1627938 - RNA, 13 nt, Human
guuucagaaaugu

SEQ ID NO: 1627939 - RNA, 16 nt, Human
aaggcugggggaagaa

SEQ ID NO: 1627940 - RNA, 9 nt, Human
uaaaauggu

SEQ ID NO: 1627941 - RNA, 20 nt, Human
aaguuugagaucagccuggg

SEQ ID NO: 1627942 - RNA, 21 nt, Human
aaguuucugccgcagcccugc

SEQ ID NO: 1627943 - RNA, 19 nt, Human
aaguuucugccgcagcccu

SEQ ID NO: 1627944 - RNA, 19 nt, Human
aaguuauuuuuaauuuggu

SEQ ID NO: 1627945 - RNA, 20 nt, Human
aaguucccuacuuccuguga

SEQ ID NO: 1627946 - RNA, 17 nt, Human
aaguucccuacuuccug

SEQ ID NO: 1627947 - RNA, 14 nt, Human
aaguucccuacuuc

SEQ ID NO: 1627948 - RNA, 23 nt, Human
aaguguauuuuuuuacuaauaga

SEQ ID NO: 1627949 - RNA, 13 nt, Human
aagugugguagag

SEQ ID NO: 1627950 - RNA, 12 nt, Human
aaguguguguuu

SEQ ID NO: 1627951 - RNA, 21 nt, Human
aaguguguguuuuucauaaag

SEQ ID NO: 1627952 - RNA, 16 nt, Human
aaguguguguuuuuca

SEQ ID NO: 1627953 - RNA, 11 nt, Human
aaguuaagaau

SEQ ID NO: 1627954 - RNA, 23 nt, Human
aaguuaagaauguucuuauguug

SEQ ID NO: 1627955 - RNA, 22 nt, Human
uaaaaagcuccaaaugcagcuu

SEQ ID NO: 1627956 - RNA, 21 nt, Human
uaaaaaaaaaccugagcccca

SEQ ID NO: 1627957 - RNA, 18 nt, Human
uaaaaaaaaaauugggga

SEQ ID NO: 1627958 - RNA, 14 nt, Human
uaaaaaaaaaauug

SEQ ID NO: 1627959 - RNA, 23 nt, Human
aagucagaucugccuaaggacuu

SEQ ID NO: 1627960 - RNA, 23 nt, Human
uaaaaaucucaaauuucuaaauc

SEQ ID NO: 1627961 - RNA, 15 nt, Human
uaaaaaugagguacu

SEQ ID NO: 1627962 - RNA, 14 nt, Human
uaaaaccacagcag

SEQ ID NO: 1627963 - RNA, 22 nt, Human
uaaaaaugagguacucuccugg

SEQ ID NO: 1627964 - RNA, 15 nt, Human
uaaaaccacagcagu

SEQ ID NO: 1627965 - RNA, 12 nt, Human
uaaaacuuuuua

SEQ ID NO: 1627966 - RNA, 15 nt, Human
uaaaacuuuuuaaaa

SEQ ID NO: 1627967 - RNA, 13 nt, Human
uaaaacccaagug

SEQ ID NO: 1627968 - RNA, 16 nt, Human
uaaaagaauauuuuaa

SEQ ID NO: 1627969 - RNA, 13 nt, Human
uaaaagaauauuu

SEQ ID NO: 1627970 - RNA, 13 nt, Human
uaaaagucuugug

SEQ ID NO: 1627971 - RNA, 21 nt, Human
uaaaauacacacucaaaucaa

SEQ ID NO: 1627972 - RNA, 22 nt, Human
uaaaauaauuuuuauauuugaa

SEQ ID NO: 1627973 - RNA, 23 nt, Human
aagugauccucccaccucagccu

SEQ ID NO: 1627974 - RNA, 19 nt, Human
aagugauucucaugccuca

SEQ ID NO: 1627975 - RNA, 16 nt, Human
aagugauucucaugcc

SEQ ID NO: 1627976 - RNA, 13 nt, Human
aagugauucucau

SEQ ID NO: 1627977 - RNA, 17 nt, Human
aagugauucucaugccu

SEQ ID NO: 1627978 - RNA, 20 nt, Human
aagugauccucccaccucag

SEQ ID NO: 1627979 - RNA, 19 nt, Human
aagugauccucccaccuca

SEQ ID NO: 1627980 - RNA, 13 nt, Human
aagugauccuccc

SEQ ID NO: 1627981 - RNA, 21 nt, Human
uaaaauaccagccaguaaaug

SEQ ID NO: 1627982 - RNA, 18 nt, Human
guauucucuccuguaccu

SEQ ID NO: 1627983 - RNA, 21 nt, Human
guauucucuccuguaccucuu

SEQ ID NO: 1627984 - RNA, 11 nt, Human
aaaucauuucu

SEQ ID NO: 1627985 - RNA, 16 nt, Human
aaaucauucauuuucu

SEQ ID NO: 1627986 - RNA, 23 nt, Human
guauuguacaaaguauuaagcau

SEQ ID NO: 1627987 - RNA, 22 nt, Human
guauuguacaaaguauuaagca

SEQ ID NO: 1627988 - RNA, 21 nt, Human
guauuguacaaaguauuaagc

SEQ ID NO: 1627989 - RNA, 19 nt, Human
guauuguacaaaguauuaa

SEQ ID NO: 1627990 - RNA, 21 nt, Human
aaaugucucuuuaaugucaca

SEQ ID NO: 1627991 - RNA, 14 nt, Human
aaaugucuuccugg

SEQ ID NO: 1627992 - RNA, 11 nt, Human
guauuuauuca

SEQ ID NO: 1627993 - RNA, 17 nt, Human
aaauuccaagugauuga

SEQ ID NO: 1627994 - RNA, 16 nt, Human
aaauuccccacccuga

SEQ ID NO: 1627995 - RNA, 17 nt, Human
aaauuguauuacaaauc

SEQ ID NO: 1627996 - RNA, 18 nt, Human
aaauugucagaugcugug

SEQ ID NO: 1627997 - RNA, 15 nt, Human
aaaugugcuuuuaaa

SEQ ID NO: 1627998 - RNA, 18 nt, Human
aaaugugccuucauuuuu

SEQ ID NO: 1627999 - RNA, 14 nt, Human
aaauuaaucugggc

SEQ ID NO: 1628000 - RNA, 15 nt, Human
aaauguggcuccugg

SEQ ID NO: 1628001 - RNA, 23 nt, Human
aaauuaugugccagauuuaugca

SEQ ID NO: 1628002 - RNA, 19 nt, Human
aaauuaggauuucaugauu

SEQ ID NO: 1628003 - RNA, 18 nt, Human
aaauuaggauuucaugau

SEQ ID NO: 1628004 - RNA, 14 nt, Human
gucaggaaagagaa

SEQ ID NO: 1628005 - RNA, 21 nt, Human
gucagaaguuucugccgcagc

SEQ ID NO: 1628006 - RNA, 23 nt, Human
gucagaaguuucugccgcagccc

SEQ ID NO: 1628007 - RNA, 17 nt, Human
gucacuuuguuuuacug

SEQ ID NO: 1628008 - RNA, 15 nt, Human
gucacugcuuaacuu

SEQ ID NO: 1628009 - RNA, 21 nt, Human
gucacugcuuaacuucacaua

SEQ ID NO: 1628010 - RNA, 22 nt, Human
gucagguggggcagcuugaggg

SEQ ID NO: 1628011 - RNA, 18 nt, Human
gucagguggggcagcuug

SEQ ID NO: 1628012 - RNA, 17 nt, Human
gucagguggggcagcuu

SEQ ID NO: 1628013 - RNA, 16 nt, Human
gucagguggggcagcu

SEQ ID NO: 1628014 - RNA, 15 nt, Human
gucagugugacugau

SEQ ID NO: 1628015 - RNA, 13 nt, Human
aaauuucuaaauc

SEQ ID NO: 1628016 - RNA, 15 nt, Human
aaauuucuaaaucuc

SEQ ID NO: 1628017 - RNA, 15 nt, Human
gucacaggaaguaga

SEQ ID NO: 1628018 - RNA, 13 nt, Human
gucacaggaagua

SEQ ID NO: 1628019 - RNA, 21 nt, Human
gucaauuuuguuauguauauu

SEQ ID NO: 1628020 - RNA, 22 nt, Human
gucaauuacaggaaguacugga

SEQ ID NO: 1628021 - RNA, 20 nt, Human
gucacaggaaguagaggagg

SEQ ID NO: 1628022 - RNA, 18 nt, Human
gucacaggacucugccuc

SEQ ID NO: 1628023 - RNA, 17 nt, Human
gucacaggacucugccu

SEQ ID NO: 1628024 - RNA, 12 nt, Human
gucacaggcagg

SEQ ID NO: 1628025 - RNA, 16 nt, Human
gucacaggagggaggg

SEQ ID NO: 1628026 - RNA, 19 nt, Human
gucacaggacucugccucc

SEQ ID NO: 1628027 - RNA, 22 nt, Human
gucaccaaaucagcugcuacua

SEQ ID NO: 1628028 - RNA, 18 nt, Human
gucacauuccugaacagg

SEQ ID NO: 1628029 - RNA, 23 nt, Human
gucacucuggcagcucagagagg

SEQ ID NO: 1628030 - RNA, 15 nt, Human
gucaccaagcccagu

SEQ ID NO: 1628031 - RNA, 12 nt, Human
gucaccaagccc

SEQ ID NO: 1628032 - RNA, 16 nt, Human
gucacugagacagccc

SEQ ID NO: 1628033 - RNA, 15 nt, Human
gucacugagacagcc

SEQ ID NO: 1628034 - RNA, 14 nt, Human
gucacugagacagc

SEQ ID NO: 1628035 - RNA, 23 nt, Human
gucacugagacagcccgggcucu

SEQ ID NO: 1628036 - RNA, 21 nt, Human
gucacugagacagcccgggcu

SEQ ID NO: 1628037 - RNA, 18 nt, Human
gucacugagacagcccgg

SEQ ID NO: 1628038 - RNA, 17 nt, Human
gucacugagacagcccg

SEQ ID NO: 1628039 - RNA, 10 nt, Human
gucacugcuu

SEQ ID NO: 1628040 - RNA, 23 nt, Human
gucacugcacagugcaucucagc

SEQ ID NO: 1628041 - RNA, 20 nt, Human
gucacugcacagugcaucuc

SEQ ID NO: 1628042 - RNA, 23 nt, Human
guccaugaagauguagaggagaa

SEQ ID NO: 1628043 - RNA, 22 nt, Human
guccaugaagauguagaggaga

SEQ ID NO: 1628044 - RNA, 19 nt, Human
gucauuugagcagggcuca

SEQ ID NO: 1628045 - RNA, 18 nt, Human
guccccaccgcagacagg

SEQ ID NO: 1628046 - RNA, 20 nt, Human
gucccaccccacacacgcca

SEQ ID NO: 1628047 - RNA, 22 nt, Human
guccccaccgcagacaggacca

SEQ ID NO: 1628048 - RNA, 15 nt, Human
gucccaccccacaca

SEQ ID NO: 1628049 - RNA, 18 nt, Human
guccccuguuuguuucug

SEQ ID NO: 1628050 - RNA, 22 nt, Human
guccccuguuuguuucugaaag

SEQ ID NO: 1628051 - RNA, 12 nt, Human
gucccuaauaaa

SEQ ID NO: 1628052 - RNA, 19 nt, Human
gucccuuacgugaguccug

SEQ ID NO: 1628053 - RNA, 18 nt, Human
gucccuuacgugaguccu

SEQ ID NO: 1628054 - RNA, 19 nt, Human
gucccugguggcagcucac

SEQ ID NO: 1628055 - RNA, 18 nt, Human
gucccugguggcagcuca

SEQ ID NO: 1628056 - RNA, 15 nt, Human
gucccuaauaaagcu

SEQ ID NO: 1628057 - RNA, 20 nt, Human
aacacagcaagggugauggg

SEQ ID NO: 1628058 - RNA, 18 nt, Human
aacacagcaagggugaug

SEQ ID NO: 1628059 - RNA, 19 nt, Human
aaauuucuaaaucuccaaa

SEQ ID NO: 1628060 - RNA, 12 nt, Human
aaauuugaauuu

SEQ ID NO: 1628061 - RNA, 19 nt, Human
aacacaaacgggcucagca

SEQ ID NO: 1628062 - RNA, 22 nt, Human
aaauuugaauuuuguguuagag

SEQ ID NO: 1628063 - RNA, 15 nt, Human
aaauuugaauuuugu

SEQ ID NO: 1628064 - RNA, 18 nt, Human
aacacuguucucugcccu

SEQ ID NO: 1628065 - RNA, 17 nt, Human
aacacuguucucugccc

SEQ ID NO: 1628066 - RNA, 16 nt, Human
aacacuguucucugcc

SEQ ID NO: 1628067 - RNA, 19 nt, Human
aacacuguucucugcccuc

SEQ ID NO: 1628068 - RNA, 17 nt, Human
gucauuugagcagggcu

SEQ ID NO: 1628069 - RNA, 21 nt, Human
aacacucacauuuauucugcu

SEQ ID NO: 1628070 - RNA, 17 nt, Human
aacacucauugaccuga

SEQ ID NO: 1628071 - RNA, 21 nt, Human
aacacugggagaaaugaaaaa

SEQ ID NO: 1628072 - RNA, 13 nt, Human
aacagucucagga

SEQ ID NO: 1628073 - RNA, 18 nt, Human
aacaguccauugaaaggg

SEQ ID NO: 1628074 - RNA, 15 nt, Human
guccgugcuaaggac

SEQ ID NO: 1628075 - RNA, 17 nt, Human
guccgugcuaaggacuu

SEQ ID NO: 1628076 - RNA, 16 nt, Human
guccgugcuaaggacu

SEQ ID NO: 1628077 - RNA, 12 nt, Human
aacauauauaac

SEQ ID NO: 1628078 - RNA, 14 nt, Human
aacagucucaggaa

SEQ ID NO: 1628079 - RNA, 14 nt, Human
aacauaaaauacaa

SEQ ID NO: 1628080 - RNA, 15 nt, Human
aacauguuaaaccau

SEQ ID NO: 1628081 - RNA, 14 nt, Human
aacauguuaaacca

SEQ ID NO: 1628082 - RNA, 16 nt, Human
aacauguuaaaccaug

SEQ ID NO: 1628083 - RNA, 22 nt, Human
gucuaugggacucaaugcacug

SEQ ID NO: 1628084 - RNA, 20 nt, Human
gucuauuuacggaacucaaa

SEQ ID NO: 1628085 - RNA, 16 nt, Human
gucuaccugaggggcc

SEQ ID NO: 1628086 - RNA, 15 nt, Human
gucuaccugaggggc

SEQ ID NO: 1628087 - RNA, 14 nt, Human
gucuaccugagggg

SEQ ID NO: 1628088 - RNA, 12 nt, Human
gucgccucugca

SEQ ID NO: 1628089 - RNA, 16 nt, Human
guccuggcaugggaau

SEQ ID NO: 1628090 - RNA, 19 nt, Human
guccugcugcaguugccag

SEQ ID NO: 1628091 - RNA, 14 nt, Human
guccucuuuucuga

SEQ ID NO: 1628092 - RNA, 12 nt, Human
gucgaggcagga

SEQ ID NO: 1628093 - RNA, 16 nt, Human
gucgaggacagggagg

SEQ ID NO: 1628094 - RNA, 24 nt, Human
aacucauuuuuguuuucauuaucu

SEQ ID NO: 1628095 - RNA, 21 nt, Human
aacucauuuuuguuuucauua

SEQ ID NO: 1628096 - RNA, 15 nt, Human
aacuauguugauaaa

SEQ ID NO: 1628097 - RNA, 12 nt, Human
aacuauggccug

SEQ ID NO: 1628098 - RNA, 13 nt, Human
aacguggcugcuu

SEQ ID NO: 1628099 - RNA, 12 nt, Human
aacguggcugcu

SEQ ID NO: 1628100 - RNA, 17 nt, Human
aacuagggaagauaaua

SEQ ID NO: 1628101 - RNA, 21 nt, Human
aacuaggugcauauuuauaaa

SEQ ID NO: 1628102 - RNA, 23 nt, Human
aaccuggucacaggacucugccu

SEQ ID NO: 1628103 - RNA, 15 nt, Human
aacgucuuaaauauu

SEQ ID NO: 1628104 - RNA, 12 nt, Human
aacgugaaaaug

SEQ ID NO: 1628105 - RNA, 14 nt, Human
aacgucuuaaauau

SEQ ID NO: 1628106 - RNA, 12 nt, Human
aacgucuuaaau

SEQ ID NO: 1628107 - RNA, 21 nt, Human
aaccuucgccaccuggguucc

SEQ ID NO: 1628108 - RNA, 14 nt, Human
gucuuaauuaaaag

SEQ ID NO: 1628109 - RNA, 16 nt, Human
gucuggaaugcagugg

SEQ ID NO: 1628110 - RNA, 15 nt, Human
gucuggaaugcagug

SEQ ID NO: 1628111 - RNA, 18 nt, Human
gucuggaaugcaguggua

SEQ ID NO: 1628112 - RNA, 13 nt, Human
gucuucacaacag

SEQ ID NO: 1628113 - RNA, 23 nt, Human
gucuugucucagauuuuauuaug

SEQ ID NO: 1628114 - RNA, 22 nt, Human
gucuuguuuuuuuuuuccacuu

SEQ ID NO: 1628115 - RNA, 14 nt, Human
gucugacaggcaau

SEQ ID NO: 1628116 - RNA, 13 nt, Human
gucugacaggcaa

SEQ ID NO: 1628117 - RNA, 12 nt, Human
gucugacaggca

SEQ ID NO: 1628118 - RNA, 18 nt, Human
gucugacaggcaaugcug

SEQ ID NO: 1628119 - RNA, 15 nt, Human
gucugacaggcaaug

SEQ ID NO: 1628120 - RNA, 20 nt, Human
gucugacaggcaaugcuggc

SEQ ID NO: 1628121 - RNA, 19 nt, Human
gucucaaaaaaagaaaaag

SEQ ID NO: 1628122 - RNA, 17 nt, Human
gucucaaaaaaagaaaa

SEQ ID NO: 1628123 - RNA, 14 nt, Human
gucucaaaaaaaca

SEQ ID NO: 1628124 - RNA, 14 nt, Human
gucugaaggcuggg

SEQ ID NO: 1628125 - RNA, 23 nt, Human
gugaauaauacaguaucucaggg

SEQ ID NO: 1628126 - RNA, 12 nt, Human
aacuccuggccu

SEQ ID NO: 1628127 - RNA, 14 nt, Human
aacuccugaccuca

SEQ ID NO: 1628128 - RNA, 12 nt, Human
aacuccugaccu

SEQ ID NO: 1628129 - RNA, 22 nt, Human
gugacagagugagacucugucu

SEQ ID NO: 1628130 - RNA, 20 nt, Human
gugacagagugagacucugu

SEQ ID NO: 1628131 - RNA, 19 nt, Human
gugacaugucuuuucuugc

SEQ ID NO: 1628132 - RNA, 22 nt, Human
gugacauguguuggcagccucu

SEQ ID NO: 1628133 - RNA, 15 nt, Human
gugacuuuggauaau

SEQ ID NO: 1628134 - RNA, 12 nt, Human
gugacuuuggau

SEQ ID NO: 1628135 - RNA, 16 nt, Human
gugacuucagcucugu

SEQ ID NO: 1628136 - RNA, 16 nt, Human
gugagacucugucuca

SEQ ID NO: 1628137 - RNA, 14 nt, Human
gugagacucugucu

SEQ ID NO: 1628138 - RNA, 23 nt, Human
gugagaccugccccuccucucug

SEQ ID NO: 1628139 - RNA, 16 nt, Human
gugagaccugccccuc

SEQ ID NO: 1628140 - RNA, 22 nt, Human
gugagacccugucucaaaaaaa

SEQ ID NO: 1628141 - RNA, 15 nt, Human
gugagaccugccccu

SEQ ID NO: 1628142 - RNA, 14 nt, Human
gugagaccugcccc

SEQ ID NO: 1628143 - RNA, 13 nt, Human
gugagaccugccc

SEQ ID NO: 1628144 - RNA, 16 nt, Human
aacugcauuggcuuug

SEQ ID NO: 1628145 - RNA, 23 nt, Human
aacugauuuuuuuuuccuucagu

SEQ ID NO: 1628146 - RNA, 22 nt, Human
aacugauuuuuuuuuccuucag

SEQ ID NO: 1628147 - RNA, 21 nt, Human
aacugauuuuuuuuuccuuca

SEQ ID NO: 1628148 - RNA, 23 nt, Human
aacucuccucugcugcuggcugg

SEQ ID NO: 1628149 - RNA, 22 nt, Human
aacucuccucugcugcuggcug

SEQ ID NO: 1628150 - RNA, 16 nt, Human
aacucugacaacagac

SEQ ID NO: 1628151 - RNA, 17 nt, Human
gugaggcucugcccuug

SEQ ID NO: 1628152 - RNA, 16 nt, Human
gugaggcucugcccuu

SEQ ID NO: 1628153 - RNA, 15 nt, Human
gugaggcucugcccu

SEQ ID NO: 1628154 - RNA, 14 nt, Human
gugaggcucugccc

SEQ ID NO: 1628155 - RNA, 13 nt, Human
gugaggcucugcc

SEQ ID NO: 1628156 - RNA, 12 nt, Human
gugaggcucugc

SEQ ID NO: 1628157 - RNA, 18 nt, Human
gugagacucugucucaaa

SEQ ID NO: 1628158 - RNA, 21 nt, Human
aacucuccucugcugcuggcu

SEQ ID NO: 1628159 - RNA, 19 nt, Human
aacucuccucugcugcugg

SEQ ID NO: 1628160 - RNA, 19 nt, Human
gugagucaccaagcccagu

SEQ ID NO: 1628161 - RNA, 17 nt, Human
gugagucaccaagccca

SEQ ID NO: 1628162 - RNA, 23 nt, Human
gugaguacuacaguccucccauc

SEQ ID NO: 1628163 - RNA, 18 nt, Human
gugaggcucugcccuugg

SEQ ID NO: 1628164 - RNA, 14 nt, Human
aacuucacauauug

SEQ ID NO: 1628165 - RNA, 22 nt, Human
aacuucacauauugauuuccgu

SEQ ID NO: 1628166 - RNA, 22 nt, Human
aacuucaccauauuaccacaga

SEQ ID NO: 1628167 - RNA, 17 nt, Human
aacugcccccucugccc

SEQ ID NO: 1628168 - RNA, 16 nt, Human
aacugcccccucugcc

SEQ ID NO: 1628169 - RNA, 21 nt, Human
aacugcccccucugcccugcg

SEQ ID NO: 1628170 - RNA, 20 nt, Human
aacugcccccucugcccugc

SEQ ID NO: 1628171 - RNA, 19 nt, Human
aacugcccccucugcccug

SEQ ID NO: 1628172 - RNA, 18 nt, Human
aacugcccccucugcccu

SEQ ID NO: 1628173 - RNA, 23 nt, Human
aacuuccuuggacucauuuuaaa

SEQ ID NO: 1628174 - RNA, 21 nt, Human
aacuucagcgguuuauauaag

SEQ ID NO: 1628175 - RNA, 13 nt, Human
aacuucagacaua

SEQ ID NO: 1628176 - RNA, 18 nt, Human
aacuucagcgguuuauau

SEQ ID NO: 1628177 - RNA, 22 nt, Human
aacuuccuuggacucauuuuaa

SEQ ID NO: 1628178 - RNA, 12 nt, Human
aacuugaaauuu

SEQ ID NO: 1628179 - RNA, 19 nt, Human
aacuugaaauuugaauuuu

SEQ ID NO: 1628180 - RNA, 18 nt, Human
aacuugaaauuugaauuu

SEQ ID NO: 1628181 - RNA, 13 nt, Human
aacuugaaauuug

SEQ ID NO: 1628182 - RNA, 17 nt, Human
gugauuaccagggacug

SEQ ID NO: 1628183 - RNA, 16 nt, Human
gugauuaccagggacu

SEQ ID NO: 1628184 - RNA, 11 nt, Human
gugauuaccag

SEQ ID NO: 1628185 - RNA, 23 nt, Human
gugaugguuccccuguucacucu

SEQ ID NO: 1628186 - RNA, 17 nt, Human
gugcauuugaggucugu

SEQ ID NO: 1628187 - RNA, 19 nt, Human
gugcauuugaggucuguuc

SEQ ID NO: 1628188 - RNA, 23 nt, Human
gugccaaaaacaacaacaaaaug

SEQ ID NO: 1628189 - RNA, 21 nt, Human
gugcauuuggugguuucagaa

SEQ ID NO: 1628190 - RNA, 20 nt, Human
gugcauuugaggucuguucu

SEQ ID NO: 1628191 - RNA, 21 nt, Human
gugcacaagcuccaagcuccc

SEQ ID NO: 1628192 - RNA, 16 nt, Human
gugcacaagcuccaag

SEQ ID NO: 1628193 - RNA, 13 nt, Human
gugcacaagcucc

SEQ ID NO: 1628194 - RNA, 18 nt, Human
gugcaaugaccuuucaau

SEQ ID NO: 1628195 - RNA, 21 nt, Human
gugcacaugcacgugugugca

SEQ ID NO: 1628196 - RNA, 23 nt, Human
gugcacaagcuccaagcucccag

SEQ ID NO: 1628197 - RNA, 22 nt, Human
gugcaaugaccuuucaauagga

SEQ ID NO: 1628198 - RNA, 18 nt, Human
aagaaaaaugagccuggc

SEQ ID NO: 1628199 - RNA, 17 nt, Human
aagaaaaaugagccugg

SEQ ID NO: 1628200 - RNA, 18 nt, Human
aagaaaaagaaaaagaaa

SEQ ID NO: 1628201 - RNA, 13 nt, Human
aagaaaaagaaaa

SEQ ID NO: 1628202 - RNA, 19 nt, Human
aagaaaaaauauuuucccu

SEQ ID NO: 1628203 - RNA, 21 nt, Human
aacuuuaccuuuuuuauacau

SEQ ID NO: 1628204 - RNA, 22 nt, Human
aacuuuaccuuuuuuauacaua

SEQ ID NO: 1628205 - RNA, 23 nt, Human
aacuuuaccuuuuuuauacauaa

SEQ ID NO: 1628206 - RNA, 19 nt, Human
gugccagauuuaugcauau

SEQ ID NO: 1628207 - RNA, 11 nt, Human
aagaaacauuu

SEQ ID NO: 1628208 - RNA, 15 nt, Human
aagaaaauaguggug

SEQ ID NO: 1628209 - RNA, 21 nt, Human
aagaaaauaguggugugauuu

SEQ ID NO: 1628210 - RNA, 22 nt, Human
aagaaaauaguggugugauuug

SEQ ID NO: 1628211 - RNA, 16 nt, Human
aagaaagaaaaucagg

SEQ ID NO: 1628212 - RNA, 14 nt, Human
aagaaagaaaauca

SEQ ID NO: 1628213 - RNA, 22 nt, Human
gugcuacaaaaacacagcaagg

SEQ ID NO: 1628214 - RNA, 18 nt, Human
gugcuaucucccccagcc

SEQ ID NO: 1628215 - RNA, 15 nt, Human
gugcuaucuccccca

SEQ ID NO: 1628216 - RNA, 17 nt, Human
gugcuaggaacacuccu

SEQ ID NO: 1628217 - RNA, 15 nt, Human
gugcugcccugccca

SEQ ID NO: 1628218 - RNA, 14 nt, Human
gugcugcccugccc

SEQ ID NO: 1628219 - RNA, 13 nt, Human
gugcugcccugcc

SEQ ID NO: 1628220 - RNA, 14 nt, Human
gugcucuggacagg

SEQ ID NO: 1628221 - RNA, 13 nt, Human
gugcucuggacag

SEQ ID NO: 1628222 - RNA, 16 nt, Human
gugcucugaucaucca

SEQ ID NO: 1628223 - RNA, 19 nt, Human
gugcuaucucccccagccc

SEQ ID NO: 1628224 - RNA, 18 nt, Human
gugcucaggagcccuggg

SEQ ID NO: 1628225 - RNA, 19 nt, Human
gugcucaggagcccuggga

SEQ ID NO: 1628226 - RNA, 18 nt, Human
gugcuccauggcugccau

SEQ ID NO: 1628227 - RNA, 22 nt, Human
gugcuccauggcugccaucuca

SEQ ID NO: 1628228 - RNA, 23 nt, Human
uagagauuuuuuuguuguuuguu

SEQ ID NO: 1628229 - RNA, 22 nt, Human
uagaggagaaacuggaacucuc

SEQ ID NO: 1628230 - RNA, 15 nt, Human
uagauauaugcucug

SEQ ID NO: 1628231 - RNA, 19 nt, Human
uagauauaugcucugcaug

SEQ ID NO: 1628232 - RNA, 18 nt, Human
acaaaaggauaaugaaua

SEQ ID NO: 1628233 - RNA, 11 nt, Human
acaaaagcaug

SEQ ID NO: 1628234 - RNA, 22 nt, Human
acaaaagcaugugagacugguu

SEQ ID NO: 1628235 - RNA, 16 nt, Human
aauuguuacaaauugu

SEQ ID NO: 1628236 - RNA, 21 nt, Human
aauuguguuuauaauuuuaaa

SEQ ID NO: 1628237 - RNA, 22 nt, Human
acaaaggaugcccaaagaugca

SEQ ID NO: 1628238 - RNA, 19 nt, Human
uagcauggcugccaauggg

SEQ ID NO: 1628239 - RNA, 15 nt, Human
uagaugcaguucuga

SEQ ID NO: 1628240 - RNA, 14 nt, Human
uagaugcugacugu

SEQ ID NO: 1628241 - RNA, 23 nt, Human
uagaugcugacuguacuccuccc

SEQ ID NO: 1628242 - RNA, 18 nt, Human
uagcaugucgucaaagcu

SEQ ID NO: 1628243 - RNA, 16 nt, Human
uagcauuuugcuaaau

SEQ ID NO: 1628244 - RNA, 22 nt, Human
uagcauuuugcuaaaugugaau

SEQ ID NO: 1628245 - RNA, 21 nt, Human
uagccaaggccaaaggaagca

SEQ ID NO: 1628246 - RNA, 20 nt, Human
acaagacccaaaaggcagaa

SEQ ID NO: 1628247 - RNA, 19 nt, Human
acaagacccuugugguccc

SEQ ID NO: 1628248 - RNA, 19 nt, Human
acaagaccacguuucuaaa

SEQ ID NO: 1628249 - RNA, 21 nt, Human
acaacacucauugaccugagg

SEQ ID NO: 1628250 - RNA, 23 nt, Human
acaacacucauugaccugaggcc

SEQ ID NO: 1628251 - RNA, 18 nt, Human
acaaauuuacagagacag

SEQ ID NO: 1628252 - RNA, 19 nt, Human
acaaauuuacagagacaga

SEQ ID NO: 1628253 - RNA, 15 nt, Human
uagccagaggagaga

SEQ ID NO: 1628254 - RNA, 11 nt, Human
uagccagagga

SEQ ID NO: 1628255 - RNA, 22 nt, Human
uagcuagacuggugacugauuc

SEQ ID NO: 1628256 - RNA, 21 nt, Human
uagcuagacuggugacugauu

SEQ ID NO: 1628257 - RNA, 12 nt, Human
acaaugacuuac

SEQ ID NO: 1628258 - RNA, 17 nt, Human
acaaugacuuacuguac

SEQ ID NO: 1628259 - RNA, 18 nt, Human
acaaugacuuacuguaca

SEQ ID NO: 1628260 - RNA, 19 nt, Human
acaaugacuuacuguacau

SEQ ID NO: 1628261 - RNA, 23 nt, Human
acaauacaucccuuaccugggaa

SEQ ID NO: 1628262 - RNA, 14 nt, Human
acaagacugcacau

SEQ ID NO: 1628263 - RNA, 13 nt, Human
acaagacugcaca

SEQ ID NO: 1628264 - RNA, 19 nt, Human
acaaggacuaggguccugg

SEQ ID NO: 1628265 - RNA, 18 nt, Human
acaaggacuaggguccug

SEQ ID NO: 1628266 - RNA, 21 nt, Human
acaaggacagccccuccucca

SEQ ID NO: 1628267 - RNA, 22 nt, Human
acaaggacagccccuccuccau

SEQ ID NO: 1628268 - RNA, 15 nt, Human
uagggagagaagaua

SEQ ID NO: 1628269 - RNA, 14 nt, Human
uagggagagaagau

SEQ ID NO: 1628270 - RNA, 20 nt, Human
uaggcauuugcugaauacag

SEQ ID NO: 1628271 - RNA, 16 nt, Human
uaggcauuugcugaau

SEQ ID NO: 1628272 - RNA, 14 nt, Human
uaggcauuguggga

SEQ ID NO: 1628273 - RNA, 18 nt, Human
uaggaaauauuuauuuua

SEQ ID NO: 1628274 - RNA, 19 nt, Human
uaggaaauauuuauuuuaa

SEQ ID NO: 1628275 - RNA, 16 nt, Human
uaggaaauccagggug

SEQ ID NO: 1628276 - RNA, 18 nt, Human
acacaugauccugcaauu

SEQ ID NO: 1628277 - RNA, 21 nt, Human
acacaugagcaucaggccagg

SEQ ID NO: 1628278 - RNA, 15 nt, Human
acacaucagcuugcc

SEQ ID NO: 1628279 - RNA, 15 nt, Human
acacaugaaguccaa

SEQ ID NO: 1628280 - RNA, 18 nt, Human
acacaugcaaggucauuu

SEQ ID NO: 1628281 - RNA, 14 nt, Human
acacauuuuauuuu

SEQ ID NO: 1628282 - RNA, 19 nt, Human
acacauuuuauuuuauuau

SEQ ID NO: 1628283 - RNA, 20 nt, Human
acacauuuuauuuuauuaug

SEQ ID NO: 1628284 - RNA, 21 nt, Human
acacauuuuauuuuauuaugc

SEQ ID NO: 1628285 - RNA, 21 nt, Human
acaccauuaugugcgcugaua

SEQ ID NO: 1628286 - RNA, 17 nt, Human
acaccauuaugugcgcu

SEQ ID NO: 1628287 - RNA, 20 nt, Human
uaguuccaccaucaagccac

SEQ ID NO: 1628288 - RNA, 22 nt, Human
uauaaaagggacugagaaauuu

SEQ ID NO: 1628289 - RNA, 20 nt, Human
uauaaaagccuguuuaagag

SEQ ID NO: 1628290 - RNA, 19 nt, Human
uauaaaaauaaaaaacacu

SEQ ID NO: 1628291 - RNA, 19 nt, Human
acacucaaaucaagaaacu

SEQ ID NO: 1628292 - RNA, 15 nt, Human
acacucaaaagcugg

SEQ ID NO: 1628293 - RNA, 14 nt, Human
acacuaagagagaa

SEQ ID NO: 1628294 - RNA, 13 nt, Human
acacuaagagaga

SEQ ID NO: 1628295 - RNA, 22 nt, Human
acacucacauuuauucugcuca

SEQ ID NO: 1628296 - RNA, 20 nt, Human
acacucacauuuauucugcu

SEQ ID NO: 1628297 - RNA, 15 nt, Human
uauaaguguguguuu

SEQ ID NO: 1628298 - RNA, 16 nt, Human
acaccgggcacucaga

SEQ ID NO: 1628299 - RNA, 14 nt, Human
acaccgggccugga

SEQ ID NO: 1628300 - RNA, 21 nt, Human
acaccucugcacaagcugcac

SEQ ID NO: 1628301 - RNA, 16 nt, Human
acaccgggccuggaga

SEQ ID NO: 1628302 - RNA, 12 nt, Human
acacgaauauug

SEQ ID NO: 1628303 - RNA, 21 nt, Human
acaccuuagccugcccuccuu

SEQ ID NO: 1628304 - RNA, 23 nt, Human
uaguguuggagaagaacugaaau

SEQ ID NO: 1628305 - RNA, 22 nt, Human
uagugaaacucguuaauuugua

SEQ ID NO: 1628306 - RNA, 18 nt, Human
acacaguauuacuucugc

SEQ ID NO: 1628307 - RNA, 22 nt, Human
acacaguauuacuucugcuaca

SEQ ID NO: 1628308 - RNA, 19 nt, Human
acacaguauuacuucugcu

SEQ ID NO: 1628309 - RNA, 22 nt, Human
acaaugcuguauuuuaaaagaa

SEQ ID NO: 1628310 - RNA, 21 nt, Human
acaaugcugugcccuaaagug

SEQ ID NO: 1628311 - RNA, 22 nt, Human
acaaugcugugcccuaaagugu

SEQ ID NO: 1628312 - RNA, 23 nt, Human
acaaugcugugcccuaaagugua

SEQ ID NO: 1628313 - RNA, 24 nt, Human
acaaugcugugcccuaaaguguau

SEQ ID NO: 1628314 - RNA, 19 nt, Human
acaauggauaggcacagga

SEQ ID NO: 1628315 - RNA, 17 nt, Human
acaaugugaaaagaaaa

SEQ ID NO: 1628316 - RNA, 19 nt, Human
acaaugugaaaagaaaaau

SEQ ID NO: 1628317 - RNA, 15 nt, Human
acacacucaaaucaa

SEQ ID NO: 1628318 - RNA, 20 nt, Human
acacacucaaaucaagaaac

SEQ ID NO: 1628319 - RNA, 21 nt, Human
acacacugcauguuugugauu

SEQ ID NO: 1628320 - RNA, 21 nt, Human
acacacgcgugcacacaccag

SEQ ID NO: 1628321 - RNA, 20 nt, Human
acacaccagagcccaccuug

SEQ ID NO: 1628322 - RNA, 15 nt, Human
acacaccagagccca

SEQ ID NO: 1628323 - RNA, 14 nt, Human
acacaccagagccc

SEQ ID NO: 1628324 - RNA, 22 nt, Human
acacacacgcgugcacacacca

SEQ ID NO: 1628325 - RNA, 14 nt, Human
acacacagcucugu

SEQ ID NO: 1628326 - RNA, 13 nt, Human
acacacagcucug

SEQ ID NO: 1628327 - RNA, 17 nt, Human
acacacagcucuguccu

SEQ ID NO: 1628328 - RNA, 19 nt, Human
acacacagcucuguccugg

SEQ ID NO: 1628329 - RNA, 18 nt, Human
acagccguuuguucccca

SEQ ID NO: 1628330 - RNA, 18 nt, Human
acagcaagggugauggga

SEQ ID NO: 1628331 - RNA, 17 nt, Human
acagcccgggcucugcc

SEQ ID NO: 1628332 - RNA, 21 nt, Human
acagcaaggagauuuacaacu

SEQ ID NO: 1628333 - RNA, 20 nt, Human
acagcccgggcucugccucc

SEQ ID NO: 1628334 - RNA, 19 nt, Human
acagcccgggcucugccuc

SEQ ID NO: 1628335 - RNA, 18 nt, Human
acagcccgggcucugccu

SEQ ID NO: 1628336 - RNA, 17 nt, Human
acagcaaggagauuuac

SEQ ID NO: 1628337 - RNA, 15 nt, Human
acagauuugagcuca

SEQ ID NO: 1628338 - RNA, 14 nt, Human
acagauuugagcuc

SEQ ID NO: 1628339 - RNA, 19 nt, Human
acagagcccacgcccccac

SEQ ID NO: 1628340 - RNA, 18 nt, Human
acagagcccacgccccca

SEQ ID NO: 1628341 - RNA, 15 nt, Human
acagagcccacgccc

SEQ ID NO: 1628342 - RNA, 20 nt, Human
acagagcccacgcccccacu

SEQ ID NO: 1628343 - RNA, 17 nt, Human
acagauccccaagccug

SEQ ID NO: 1628344 - RNA, 18 nt, Human
acagauccccaagccugg

SEQ ID NO: 1628345 - RNA, 22 nt, Human
acagaucucugcuuuggaaauc

SEQ ID NO: 1628346 - RNA, 21 nt, Human
uaugauuaaguaaugauaacu

SEQ ID NO: 1628347 - RNA, 11 nt, Human
uaugcauuuga

SEQ ID NO: 1628348 - RNA, 23 nt, Human
uaugcauuugaaaauuuugaugu

SEQ ID NO: 1628349 - RNA, 24 nt, Human
uaugcauuugaaaauuuugauguu

SEQ ID NO: 1628350 - RNA, 20 nt, Human
uaugauuaaguaaugauaac

SEQ ID NO: 1628351 - RNA, 16 nt, Human
uaugauuaaguaauga

SEQ ID NO: 1628352 - RNA, 19 nt, Human
uaugccccauucaacaucu

SEQ ID NO: 1628353 - RNA, 17 nt, Human
uaugccugggcagaagg

SEQ ID NO: 1628354 - RNA, 16 nt, Human
acagccucuuagaugc

SEQ ID NO: 1628355 - RNA, 12 nt, Human
acagccuggcac

SEQ ID NO: 1628356 - RNA, 23 nt, Human
uauggcuuuugugcauuaucuag

SEQ ID NO: 1628357 - RNA, 15 nt, Human
uaugcuuauacacuu

SEQ ID NO: 1628358 - RNA, 18 nt, Human
uauggcuuuugugcauua

SEQ ID NO: 1628359 - RNA, 21 nt, Human
uauggcuuuugugcauuaucu

SEQ ID NO: 1628360 - RNA, 17 nt, Human
uauggcuuuugugcauu

SEQ ID NO: 1628361 - RNA, 18 nt, Human
uaucaaguauuauaccuu

SEQ ID NO: 1628362 - RNA, 17 nt, Human
uaucucaaaacugcacu

SEQ ID NO: 1628363 - RNA, 23 nt, Human
uaucuauauuuuacauaaauuua

SEQ ID NO: 1628364 - RNA, 14 nt, Human
uaucucccccagcc

SEQ ID NO: 1628365 - RNA, 16 nt, Human
uaucucccccagcccc

SEQ ID NO: 1628366 - RNA, 13 nt, Human
uaucucccccagc

SEQ ID NO: 1628367 - RNA, 18 nt, Human
acagagaaaguacuucuc

SEQ ID NO: 1628368 - RNA, 11 nt, Human
acagagaaagu

SEQ ID NO: 1628369 - RNA, 15 nt, Human
uauauuguuugcuaa

SEQ ID NO: 1628370 - RNA, 16 nt, Human
uauauuuaguaucuuu

SEQ ID NO: 1628371 - RNA, 21 nt, Human
uauauuuacuaaaauggacug

SEQ ID NO: 1628372 - RNA, 20 nt, Human
uauauuuacuaaaauggacu

SEQ ID NO: 1628373 - RNA, 15 nt, Human
acagacccugcccug

SEQ ID NO: 1628374 - RNA, 14 nt, Human
acagacccugcccu

SEQ ID NO: 1628375 - RNA, 13 nt, Human
acagacccugccc

SEQ ID NO: 1628376 - RNA, 18 nt, Human
acagaaaauucuucucca

SEQ ID NO: 1628377 - RNA, 17 nt, Human
acagaaaauucuucucc

SEQ ID NO: 1628378 - RNA, 20 nt, Human
acagaaaauggaagacagcu

SEQ ID NO: 1628379 - RNA, 14 nt, Human
acagaaauguacag

SEQ ID NO: 1628380 - RNA, 16 nt, Human
acagaaauguacagca

SEQ ID NO: 1628381 - RNA, 17 nt, Human
acagaaauguacagcaa

SEQ ID NO: 1628382 - RNA, 23 nt, Human
uauaaguguguguuuuucauaaa

SEQ ID NO: 1628383 - RNA, 17 nt, Human
uauaaguguguguuuuu

SEQ ID NO: 1628384 - RNA, 17 nt, Human
acaggaaguagaggagg

SEQ ID NO: 1628385 - RNA, 13 nt, Human
acaggaaguacug

SEQ ID NO: 1628386 - RNA, 18 nt, Human
acaggaaaagcugcugac

SEQ ID NO: 1628387 - RNA, 17 nt, Human
acaggaaaagcugcuga

SEQ ID NO: 1628388 - RNA, 16 nt, Human
acaggaaaagcugcug

SEQ ID NO: 1628389 - RNA, 15 nt, Human
acaggaaaagcugcu

SEQ ID NO: 1628390 - RNA, 13 nt, Human
acagcuaacaugg

SEQ ID NO: 1628391 - RNA, 11 nt, Human
acagccuggca

SEQ ID NO: 1628392 - RNA, 23 nt, Human
acaggaccagggauuuccaugau

SEQ ID NO: 1628393 - RNA, 14 nt, Human
acaggacucugccu

SEQ ID NO: 1628394 - RNA, 15 nt, Human
acaggaucagucuga

SEQ ID NO: 1628395 - RNA, 14 nt, Human
acaggaucagucug

SEQ ID NO: 1628396 - RNA, 16 nt, Human
acaggagugagcacua

SEQ ID NO: 1628397 - RNA, 16 nt, Human
acaggcagguccaggg

SEQ ID NO: 1628398 - RNA, 14 nt, Human
acaggcagguccag

SEQ ID NO: 1628399 - RNA, 14 nt, Human
acaggcauguucuc

SEQ ID NO: 1628400 - RNA, 20 nt, Human
acaggcauguucucugagga

SEQ ID NO: 1628401 - RNA, 19 nt, Human
acaggcauguucucugagg

SEQ ID NO: 1628402 - RNA, 18 nt, Human
acaggcauguucucugag

SEQ ID NO: 1628403 - RNA, 15 nt, Human
acaggcauguucucu

SEQ ID NO: 1628404 - RNA, 22 nt, Human
acaggcauguucucugaggaca

SEQ ID NO: 1628405 - RNA, 14 nt, Human
uaugugaaacaugu

SEQ ID NO: 1628406 - RNA, 20 nt, Human
uauguggaguucaucuugaa

SEQ ID NO: 1628407 - RNA, 23 nt, Human
uaugugccagauuuaugcauauu

SEQ ID NO: 1628408 - RNA, 22 nt, Human
uaugugaacaguuguguuugaa

SEQ ID NO: 1628409 - RNA, 12 nt, Human
uaugugaacagu

SEQ ID NO: 1628410 - RNA, 17 nt, Human
uaugugaaacauguuuc

SEQ ID NO: 1628411 - RNA, 12 nt, Human
uaugugugaagu

SEQ ID NO: 1628412 - RNA, 14 nt, Human
uaugugugaaguga

SEQ ID NO: 1628413 - RNA, 21 nt, Human
acagggaggacgcucucuggc

SEQ ID NO: 1628414 - RNA, 20 nt, Human
acagggaggacgcucucugg

SEQ ID NO: 1628415 - RNA, 23 nt, Human
acaggcugggcuucaguggcagc

SEQ ID NO: 1628416 - RNA, 22 nt, Human
acaggcugggcuucaguggcag

SEQ ID NO: 1628417 - RNA, 12 nt, Human
acaggcugggcu

SEQ ID NO: 1628418 - RNA, 22 nt, Human
acaggcuccugccaccacgccc

SEQ ID NO: 1628419 - RNA, 21 nt, Human
acaggcuccugccaccacgcc

SEQ ID NO: 1628420 - RNA, 15 nt, Human
acaggcuccugccac

SEQ ID NO: 1628421 - RNA, 13 nt, Human
acaggcuccugcc

SEQ ID NO: 1628422 - RNA, 18 nt, Human
acagucaccucauggaau

SEQ ID NO: 1628423 - RNA, 17 nt, Human
acagucaccucauggaa

SEQ ID NO: 1628424 - RNA, 16 nt, Human
acagucaccucaugga

SEQ ID NO: 1628425 - RNA, 20 nt, Human
acaguauaauuaacauguua

SEQ ID NO: 1628426 - RNA, 15 nt, Human
acaguauaauuaaca

SEQ ID NO: 1628427 - RNA, 13 nt, Human
acaguauaauuaa

SEQ ID NO: 1628428 - RNA, 20 nt, Human
acagggcacaccgggcacuc

SEQ ID NO: 1628429 - RNA, 12 nt, Human
acagggcacacc

SEQ ID NO: 1628430 - RNA, 14 nt, Human
uauuacuguaagaa

SEQ ID NO: 1628431 - RNA, 13 nt, Human
uauuacuucugcu

SEQ ID NO: 1628432 - RNA, 14 nt, Human
uauuacuucugcua

SEQ ID NO: 1628433 - RNA, 15 nt, Human
uauuagaauaccaca

SEQ ID NO: 1628434 - RNA, 15 nt, Human
uauucaaacagucuc

SEQ ID NO: 1628435 - RNA, 19 nt, Human
uauuagugaccucagcuuu

SEQ ID NO: 1628436 - RNA, 23 nt, Human
uauucaaacagucucaggaaauc

SEQ ID NO: 1628437 - RNA, 21 nt, Human
uauuagugaccucagcuuuga

SEQ ID NO: 1628438 - RNA, 20 nt, Human
uauucaguaauaacucuacc

SEQ ID NO: 1628439 - RNA, 14 nt, Human
uauucaggaagcuc

SEQ ID NO: 1628440 - RNA, 16 nt, Human
uauucaggaagcucag

SEQ ID NO: 1628441 - RNA, 14 nt, Human
uauucauaauuauu

SEQ ID NO: 1628442 - RNA, 22 nt, Human
acaggcgugagccaccgugccu

SEQ ID NO: 1628443 - RNA, 12 nt, Human
acaggcuccugc

SEQ ID NO: 1628444 - RNA, 21 nt, Human
uauucagcucauggacuucug

SEQ ID NO: 1628445 - RNA, 16 nt, Human
uauucaaaguugccua

SEQ ID NO: 1628446 - RNA, 13 nt, Human
uauucaaaguugc

SEQ ID NO: 1628447 - RNA, 12 nt, Human
uauucaaaguug

SEQ ID NO: 1628448 - RNA, 16 nt, Human
uacaggugugagucac

SEQ ID NO: 1628449 - RNA, 23 nt, Human
uacauaaugcgugcauaccacuu

SEQ ID NO: 1628450 - RNA, 24 nt, Human
uacauaaugcgugcauaccacuuu

SEQ ID NO: 1628451 - RNA, 20 nt, Human
uacaucccuuaccugggaaa

SEQ ID NO: 1628452 - RNA, 15 nt, Human
aaugugaaacuggau

SEQ ID NO: 1628453 - RNA, 19 nt, Human
aaugugaaaagaaaaauga

SEQ ID NO: 1628454 - RNA, 14 nt, Human
aaugugaaacugga

SEQ ID NO: 1628455 - RNA, 11 nt, Human
aaugugugugu

SEQ ID NO: 1628456 - RNA, 20 nt, Human
aauguauguguaaguauucu

SEQ ID NO: 1628457 - RNA, 22 nt, Human
aauguauuacaguggggaauga

SEQ ID NO: 1628458 - RNA, 19 nt, Human
aauguauguguaaguauuc

SEQ ID NO: 1628459 - RNA, 13 nt, Human
uacauucuguuaa

SEQ ID NO: 1628460 - RNA, 15 nt, Human
aauuaagagagucua

SEQ ID NO: 1628461 - RNA, 21 nt, Human
aauuaagaaaggauaaaguug

SEQ ID NO: 1628462 - RNA, 22 nt, Human
aauuaaucugggccagaauuuc

SEQ ID NO: 1628463 - RNA, 11 nt, Human
aauuaacuuuu

SEQ ID NO: 1628464 - RNA, 19 nt, Human
aauuaacauguuaaaccau

SEQ ID NO: 1628465 - RNA, 20 nt, Human
aauuaacauguuaaaccaug

SEQ ID NO: 1628466 - RNA, 16 nt, Human
aaugcuguauuuuaaa

SEQ ID NO: 1628467 - RNA, 22 nt, Human
aaugcuguauuagucacagaga

SEQ ID NO: 1628468 - RNA, 12 nt, Human
aaugcccagccc

SEQ ID NO: 1628469 - RNA, 11 nt, Human
aaugcccagcc

SEQ ID NO: 1628470 - RNA, 13 nt, Human
aaugcccagcccc

SEQ ID NO: 1628471 - RNA, 20 nt, Human
aauggacuaacuugucuuug

SEQ ID NO: 1628472 - RNA, 23 nt, Human
aauggacguguuaugacuccaga

SEQ ID NO: 1628473 - RNA, 14 nt, Human
aauggaaccacucu

SEQ ID NO: 1628474 - RNA, 21 nt, Human
aauggaaaugggcagagcaga

SEQ ID NO: 1628475 - RNA, 20 nt, Human
aauggaaaugggcagagcag

SEQ ID NO: 1628476 - RNA, 16 nt, Human
aaugcuucaucccuuu

SEQ ID NO: 1628477 - RNA, 21 nt, Human
aaugcacuuuguucuggcucu

SEQ ID NO: 1628478 - RNA, 20 nt, Human
aaugaccuuucaauaggaaa

SEQ ID NO: 1628479 - RNA, 17 nt, Human
aaugaccuuucaauagg

SEQ ID NO: 1628480 - RNA, 16 nt, Human
aaugaccuuucaauag

SEQ ID NO: 1628481 - RNA, 18 nt, Human
aaugaccuuucaauagga

SEQ ID NO: 1628482 - RNA, 21 nt, Human
uacaaugcugugcccuaaagu

SEQ ID NO: 1628483 - RNA, 22 nt, Human
aaugcacuuuguucuggcucuu

SEQ ID NO: 1628484 - RNA, 23 nt, Human
aaugccaucaauaaaaaauuaug

SEQ ID NO: 1628485 - RNA, 21 nt, Human
aaugccaucaauaaaaaauua

SEQ ID NO: 1628486 - RNA, 16 nt, Human
aaugccaucaauaaaa

SEQ ID NO: 1628487 - RNA, 18 nt, Human
uacacuaagagagaauga

SEQ ID NO: 1628488 - RNA, 14 nt, Human
uacacuaagagaga

SEQ ID NO: 1628489 - RNA, 15 nt, Human
uacacuaaaagguga

SEQ ID NO: 1628490 - RNA, 23 nt, Human
uacacauuuuauuuuauuaugca

SEQ ID NO: 1628491 - RNA, 21 nt, Human
uacacauuuuauuuuauuaug

SEQ ID NO: 1628492 - RNA, 22 nt, Human
uacacauuuuauuuuauuaugc

SEQ ID NO: 1628493 - RNA, 19 nt, Human
uacacauuuuauuuuauua

SEQ ID NO: 1628494 - RNA, 22 nt, Human
uacagacaacaaaccuguuucu

SEQ ID NO: 1628495 - RNA, 20 nt, Human
uacagauccccaagccuggc

SEQ ID NO: 1628496 - RNA, 12 nt, Human
aauggcagccuu

SEQ ID NO: 1628497 - RNA, 16 nt, Human
aauggcagccuuggca

SEQ ID NO: 1628498 - RNA, 16 nt, Human
aauggacuguggugac

SEQ ID NO: 1628499 - RNA, 23 nt, Human
aauggcacaaucucggcucacug

SEQ ID NO: 1628500 - RNA, 19 nt, Human
aauugaugggauuugguca

SEQ ID NO: 1628501 - RNA, 21 nt, Human
aauugacccacaagaaaugaa

SEQ ID NO: 1628502 - RNA, 22 nt, Human
aauugacccacaagaaaugaaa

SEQ ID NO: 1628503 - RNA, 23 nt, Human
uacuguaauuugugauacaaugc

SEQ ID NO: 1628504 - RNA, 21 nt, Human
uacuguacaugaaaacacauu

SEQ ID NO: 1628505 - RNA, 22 nt, Human
uacuguacaugaaaacacauuu

SEQ ID NO: 1628506 - RNA, 14 nt, Human
uacuguaagaaaau

SEQ ID NO: 1628507 - RNA, 18 nt, Human
uacuguaaggcaaucaug

SEQ ID NO: 1628508 - RNA, 19 nt, Human
uacuguaauuugugauaca

SEQ ID NO: 1628509 - RNA, 20 nt, Human
uacuguaauuugugauacaa

SEQ ID NO: 1628510 - RNA, 18 nt, Human
uacuguaauuugugauac

SEQ ID NO: 1628511 - RNA, 19 nt, Human
uacuguaaggcaaucaugg

SEQ ID NO: 1628512 - RNA, 16 nt, Human
uacuggagaaaaugga

SEQ ID NO: 1628513 - RNA, 14 nt, Human
uacuggauuguacu

SEQ ID NO: 1628514 - RNA, 12 nt, Human
uacucuguguca

SEQ ID NO: 1628515 - RNA, 21 nt, Human
uacucugugucagguggggca

SEQ ID NO: 1628516 - RNA, 22 nt, Human
uacgccaggggaaaaucagccu

SEQ ID NO: 1628517 - RNA, 12 nt, Human
uacguacacauu

SEQ ID NO: 1628518 - RNA, 13 nt, Human
uacguacacauuu

SEQ ID NO: 1628519 - RNA, 14 nt, Human
uacguacacauuuu

SEQ ID NO: 1628520 - RNA, 15 nt, Human
uacguugugcauuug

SEQ ID NO: 1628521 - RNA, 16 nt, Human
uacguugugcauuugg

SEQ ID NO: 1628522 - RNA, 23 nt, Human
uacucuccuggaaauauuaagaa

SEQ ID NO: 1628523 - RNA, 22 nt, Human
uacucuccuggaaauauuaaga

SEQ ID NO: 1628524 - RNA, 14 nt, Human
uacuauguaucaau

SEQ ID NO: 1628525 - RNA, 13 nt, Human
uacuauguaucaa

SEQ ID NO: 1628526 - RNA, 12 nt, Human
uacuauguauca

SEQ ID NO: 1628527 - RNA, 23 nt, Human
uacuauggcccuggccuagcaua

SEQ ID NO: 1628528 - RNA, 17 nt, Human
uacuacuccuguaggaa

SEQ ID NO: 1628529 - RNA, 20 nt, Human
uacuaucaugucaaacguga

SEQ ID NO: 1628530 - RNA, 20 nt, Human
uaccugccaggaagccagca

SEQ ID NO: 1628531 - RNA, 18 nt, Human
uaccugccaggaagccag

SEQ ID NO: 1628532 - RNA, 23 nt, Human
uaccugccaggaagccagcaggc

SEQ ID NO: 1628533 - RNA, 17 nt, Human
uaccugucccccugaca

SEQ ID NO: 1628534 - RNA, 16 nt, Human
uaccugucccccugac

SEQ ID NO: 1628535 - RNA, 14 nt, Human
uaccugucccccug

SEQ ID NO: 1628536 - RNA, 13 nt, Human
uaccugucccccu

SEQ ID NO: 1628537 - RNA, 10 nt, Human
uaccuguccc

SEQ ID NO: 1628538 - RNA, 15 nt, Human
aauuagccaagugug

SEQ ID NO: 1628539 - RNA, 11 nt, Human
aauuacaggaa

SEQ ID NO: 1628540 - RNA, 18 nt, Human
aauuccaagugauugaaa

SEQ ID NO: 1628541 - RNA, 22 nt, Human
aauuccacuuauaggaauugac

SEQ ID NO: 1628542 - RNA, 12 nt, Human
aauuccccagau

SEQ ID NO: 1628543 - RNA, 14 nt, Human
aauuccccacccug

SEQ ID NO: 1628544 - RNA, 16 nt, Human
aauuauuauuuggccc

SEQ ID NO: 1628545 - RNA, 17 nt, Human
aaugaaacauuuuguca

SEQ ID NO: 1628546 - RNA, 17 nt, Human
aaugaaaccugugucuc

SEQ ID NO: 1628547 - RNA, 17 nt, Human
aaugaaagacuguacaa

SEQ ID NO: 1628548 - RNA, 16 nt, Human
aaugaaagacuguaca

SEQ ID NO: 1628549 - RNA, 22 nt, Human
aaugaauggcuaagcaaaaugu

SEQ ID NO: 1628550 - RNA, 17 nt, Human
aaugaaugcauaaaaug

SEQ ID NO: 1628551 - RNA, 13 nt, Human
aaugaaugucagu

SEQ ID NO: 1628552 - RNA, 14 nt, Human
aaugaaugucagug

SEQ ID NO: 1628553 - RNA, 22 nt, Human
aaugaaugucagugugacugau

SEQ ID NO: 1628554 - RNA, 18 nt, Human
uaaugucacaggcagguc

SEQ ID NO: 1628555 - RNA, 13 nt, Human
uaauguacugcau

SEQ ID NO: 1628556 - RNA, 15 nt, Human
uaaugaaugcauaaa

SEQ ID NO: 1628557 - RNA, 16 nt, Human
aaucuuuaauuuuaca

SEQ ID NO: 1628558 - RNA, 15 nt, Human
aaucuuuaauuuuac

SEQ ID NO: 1628559 - RNA, 18 nt, Human
uaauagacaauuuauuau

SEQ ID NO: 1628560 - RNA, 22 nt, Human
uaauagacaauuuauuauggca

SEQ ID NO: 1628561 - RNA, 16 nt, Human
uaauacaccacuacau

SEQ ID NO: 1628562 - RNA, 18 nt, Human
uaauacaccacuacauuc

SEQ ID NO: 1628563 - RNA, 19 nt, Human
uaauacaccacuacauucu

SEQ ID NO: 1628564 - RNA, 21 nt, Human
uaauacaccacuacauucugu

SEQ ID NO: 1628565 - RNA, 16 nt, Human
uaauagacaauuuauu

SEQ ID NO: 1628566 - RNA, 17 nt, Human
uaaugaaugaaacauuu

SEQ ID NO: 1628567 - RNA, 16 nt, Human
uaaggaaaaguuuaau

SEQ ID NO: 1628568 - RNA, 19 nt, Human
uaaguaaugauaacuggaa

SEQ ID NO: 1628569 - RNA, 16 nt, Human
uaagcuuguauuccuu

SEQ ID NO: 1628570 - RNA, 19 nt, Human
uaaguauucuuauuuaaug

SEQ ID NO: 1628571 - RNA, 20 nt, Human
uaaguauucuuauuuaauga

SEQ ID NO: 1628572 - RNA, 21 nt, Human
uaaguauucuuauuuaaugaa

SEQ ID NO: 1628573 - RNA, 19 nt, Human
uaaguacuauguaucaaug

SEQ ID NO: 1628574 - RNA, 17 nt, Human
uaaguacuauguaucaa

SEQ ID NO: 1628575 - RNA, 16 nt, Human
uaaguacuauguauca

SEQ ID NO: 1628576 - RNA, 13 nt, Human
uaaguacuaugua

SEQ ID NO: 1628577 - RNA, 15 nt, Human
aaucaugaauuaguu

SEQ ID NO: 1628578 - RNA, 12 nt, Human
aaucaugaauua

SEQ ID NO: 1628579 - RNA, 18 nt, Human
uaauaaacacucuugaaa

SEQ ID NO: 1628580 - RNA, 12 nt, Human
uaauaaacacuc

SEQ ID NO: 1628581 - RNA, 19 nt, Human
aaucuacacuccagugaga

SEQ ID NO: 1628582 - RNA, 17 nt, Human
aaucugggccagaauuu

SEQ ID NO: 1628583 - RNA, 16 nt, Human
aaucugggccagaauu

SEQ ID NO: 1628584 - RNA, 18 nt, Human
aaucugggccagaauuuc

SEQ ID NO: 1628585 - RNA, 22 nt, Human
aaucugugaacuugaaauuuga

SEQ ID NO: 1628586 - RNA, 21 nt, Human
aaucugugaacuugaaauuug

SEQ ID NO: 1628587 - RNA, 20 nt, Human
aaucugugaacuugaaauuu

SEQ ID NO: 1628588 - RNA, 19 nt, Human
aaucuuauaauuuaaaaua

SEQ ID NO: 1628589 - RNA, 15 nt, Human
aaucauuagguguga

SEQ ID NO: 1628590 - RNA, 17 nt, Human
aaucauuaggugugacu

SEQ ID NO: 1628591 - RNA, 23 nt, Human
aaucauuaggugugacugaauuu

SEQ ID NO: 1628592 - RNA, 12 nt, Human
aauccgcccauc

SEQ ID NO: 1628593 - RNA, 15 nt, Human
aaucgaccugccucg

SEQ ID NO: 1628594 - RNA, 11 nt, Human
aauccuggcug

SEQ ID NO: 1628595 - RNA, 16 nt, Human
aauagucaaauugugu

SEQ ID NO: 1628596 - RNA, 16 nt, Human
aauaguggugugauuu

SEQ ID NO: 1628597 - RNA, 22 nt, Human
aauaguggugugauuuggggau

SEQ ID NO: 1628598 - RNA, 13 nt, Human
aauaguuggcuag

SEQ ID NO: 1628599 - RNA, 15 nt, Human
aauauauuuuaagac

SEQ ID NO: 1628600 - RNA, 14 nt, Human
aauauauuuuaaga

SEQ ID NO: 1628601 - RNA, 14 nt, Human
aauaguuguugauu

SEQ ID NO: 1628602 - RNA, 20 nt, Human
aauaucacuugucaauaaaa

SEQ ID NO: 1628603 - RNA, 18 nt, Human
aauauauuuuaagacgaa

SEQ ID NO: 1628604 - RNA, 22 nt, Human
aauaucacuugucaauaaaauc

SEQ ID NO: 1628605 - RNA, 17 nt, Human
uaacauguaauuaagua

SEQ ID NO: 1628606 - RNA, 23 nt, Human
uaacauggacaugaucuucuuua

SEQ ID NO: 1628607 - RNA, 18 nt, Human
uaacauggacaugaucuu

SEQ ID NO: 1628608 - RNA, 14 nt, Human
uaacauaaaucugu

SEQ ID NO: 1628609 - RNA, 12 nt, Human
uaacauaaaucu

SEQ ID NO: 1628610 - RNA, 18 nt, Human
uaagaagugaaaaucuac

SEQ ID NO: 1628611 - RNA, 16 nt, Human
uaacuuucugaaauaa

SEQ ID NO: 1628612 - RNA, 20 nt, Human
uaacgauaaaagacagugaa

SEQ ID NO: 1628613 - RNA, 21 nt, Human
uaacuucacauauugauuucc

SEQ ID NO: 1628614 - RNA, 17 nt, Human
uaacuuccaauuuacau

SEQ ID NO: 1628615 - RNA, 14 nt, Human
uaacuucaccauau

SEQ ID NO: 1628616 - RNA, 17 nt, Human
aauauugauaugcuuau

SEQ ID NO: 1628617 - RNA, 14 nt, Human
aauauuucagauaa

SEQ ID NO: 1628618 - RNA, 19 nt, Human
aauauuuauuuuaauaaug

SEQ ID NO: 1628619 - RNA, 18 nt, Human
aauauuuauuuuaauaau

SEQ ID NO: 1628620 - RNA, 12 nt, Human
aauauuuagugu

SEQ ID NO: 1628621 - RNA, 24 nt, Human
aauaugccccauucaacaucuagu

SEQ ID NO: 1628622 - RNA, 21 nt, Human
aauaugccccauucaacaucu

SEQ ID NO: 1628623 - RNA, 15 nt, Human
aauauuccugcauuu

SEQ ID NO: 1628624 - RNA, 22 nt, Human
aauaugcacacauuuuuuaaau

SEQ ID NO: 1628625 - RNA, 16 nt, Human
aauaugcacacauuuu

SEQ ID NO: 1628626 - RNA, 17 nt, Human
aauaugcacacauuuuu

SEQ ID NO: 1628627 - RNA, 15 nt, Human
uaagagaaaugagcu

SEQ ID NO: 1628628 - RNA, 22 nt, Human
uaagcuguuacugucuucagua

SEQ ID NO: 1628629 - RNA, 18 nt, Human
uaagcacacuugacauca

SEQ ID NO: 1628630 - RNA, 21 nt, Human
aaucaggguuaguauugucca

SEQ ID NO: 1628631 - RNA, 16 nt, Human
aaucaggguuaguauu

SEQ ID NO: 1628632 - RNA, 22 nt, Human
aaucaggguuaguauuguccag

SEQ ID NO: 1628633 - RNA, 14 nt, Human
uaagauuccagaga

SEQ ID NO: 1628634 - RNA, 21 nt, Human
uaagauuccagagaguggcuc

SEQ ID NO: 1628635 - RNA, 22 nt, Human
ucaccauguuggccaggcuggu

SEQ ID NO: 1628636 - RNA, 19 nt, Human
accacaucuugcucugcug

SEQ ID NO: 1628637 - RNA, 18 nt, Human
accacaucuugcucugcu

SEQ ID NO: 1628638 - RNA, 17 nt, Human
accacaucuugcucugc

SEQ ID NO: 1628639 - RNA, 18 nt, Human
accacaugugcacaugca

SEQ ID NO: 1628640 - RNA, 24 nt, Human
accacauuggagauguuuaguaau

SEQ ID NO: 1628641 - RNA, 20 nt, Human
accaccacacccagcccacu

SEQ ID NO: 1628642 - RNA, 15 nt, Human
accaccacacccagc

SEQ ID NO: 1628643 - RNA, 16 nt, Human
ucaauucuugccaaau

SEQ ID NO: 1628644 - RNA, 17 nt, Human
ucacaaaggaugcccaa

SEQ ID NO: 1628645 - RNA, 13 nt, Human
ucaauuuuaacaa

SEQ ID NO: 1628646 - RNA, 20 nt, Human
ucacaguucucuccuucuuc

SEQ ID NO: 1628647 - RNA, 16 nt, Human
ucacaguucucuccuu

SEQ ID NO: 1628648 - RNA, 13 nt, Human
ucacagccucuga

SEQ ID NO: 1628649 - RNA, 21 nt, Human
ucacagaugugugauucacag

SEQ ID NO: 1628650 - RNA, 23 nt, Human
ucacagaugugugauucacagug

SEQ ID NO: 1628651 - RNA, 20 nt, Human
ucacagaugggugcuuggag

SEQ ID NO: 1628652 - RNA, 14 nt, Human
ucacaaccuucugu

SEQ ID NO: 1628653 - RNA, 23 nt, Human
ucacuugaacccgggaggcagag

SEQ ID NO: 1628654 - RNA, 10 nt, Human
ucacuugagu

SEQ ID NO: 1628655 - RNA, 22 nt, Human
accaguauuguacaaaguauua

SEQ ID NO: 1628656 - RNA, 20 nt, Human
accaguauuguacaaaguau

SEQ ID NO: 1628657 - RNA, 15 nt, Human
accaguauuguacaa

SEQ ID NO: 1628658 - RNA, 14 nt, Human
accaguauuguaca

SEQ ID NO: 1628659 - RNA, 14 nt, Human
accagucugacugu

SEQ ID NO: 1628660 - RNA, 23 nt, Human
accaguauuguacaaaguauuaa

SEQ ID NO: 1628661 - RNA, 15 nt, Human
accaguguuguggau

SEQ ID NO: 1628662 - RNA, 17 nt, Human
accaguguuguggauuu

SEQ ID NO: 1628663 - RNA, 14 nt, Human
ucacugcagccuca

SEQ ID NO: 1628664 - RNA, 22 nt, Human
ucacugagacagcccgggcucu

SEQ ID NO: 1628665 - RNA, 21 nt, Human
ucacugagacagcccgggcuc

SEQ ID NO: 1628666 - RNA, 17 nt, Human
ucacugagacagcccgg

SEQ ID NO: 1628667 - RNA, 17 nt, Human
ucacuauguugcccagg

SEQ ID NO: 1628668 - RNA, 20 nt, Human
ucacuaucccggcugcccuu

SEQ ID NO: 1628669 - RNA, 19 nt, Human
ucacuaucccggcugcccu

SEQ ID NO: 1628670 - RNA, 15 nt, Human
ucacugcagccucaa

SEQ ID NO: 1628671 - RNA, 13 nt, Human
ucacugcauccuc

SEQ ID NO: 1628672 - RNA, 23 nt, Human
ucacuguugcccaggcuggcgug

SEQ ID NO: 1628673 - RNA, 14 nt, Human
ucaccucauggaau

SEQ ID NO: 1628674 - RNA, 13 nt, Human
ucaccucauggaa

SEQ ID NO: 1628675 - RNA, 12 nt, Human
ucaccucaugga

SEQ ID NO: 1628676 - RNA, 20 nt, Human
ucaccugucuugccuuuuuc

SEQ ID NO: 1628677 - RNA, 19 nt, Human
ucaccugucuugccuuuuu

SEQ ID NO: 1628678 - RNA, 16 nt, Human
ucacuaggcuucuggu

SEQ ID NO: 1628679 - RNA, 17 nt, Human
accacuacauucuguua

SEQ ID NO: 1628680 - RNA, 16 nt, Human
accacuacauucuguu

SEQ ID NO: 1628681 - RNA, 22 nt, Human
accagcgugugacuacuccccc

SEQ ID NO: 1628682 - RNA, 23 nt, Human
ucaaugaaugaaugaauggcuaa

SEQ ID NO: 1628683 - RNA, 19 nt, Human
ucaauauuucagauaauca

SEQ ID NO: 1628684 - RNA, 15 nt, Human
ucaauauuucagaua

SEQ ID NO: 1628685 - RNA, 22 nt, Human
ucaauaucuuuuuuuuaauaaa

SEQ ID NO: 1628686 - RNA, 18 nt, Human
acauuuuauuuuauuaug

SEQ ID NO: 1628687 - RNA, 14 nt, Human
acauuuuauuuuau

SEQ ID NO: 1628688 - RNA, 19 nt, Human
acauuuuauuuuauuaugc

SEQ ID NO: 1628689 - RNA, 20 nt, Human
acauuuuauuuuauuaugca

SEQ ID NO: 1628690 - RNA, 21 nt, Human
acauuuuuaagugcugcauuu

SEQ ID NO: 1628691 - RNA, 22 nt, Human
acauuuuuaagugcugcauuua

SEQ ID NO: 1628692 - RNA, 23 nt, Human
acauuuuuaagugcugcauuuaa

SEQ ID NO: 1628693 - RNA, 14 nt, Human
acauuuuuuaaaug

SEQ ID NO: 1628694 - RNA, 16 nt, Human
acauuuuuuaaaugca

SEQ ID NO: 1628695 - RNA, 17 nt, Human
acauuuuuuaaaugcac

SEQ ID NO: 1628696 - RNA, 21 nt, Human
acauuuuuuaaaugcaccugg

SEQ ID NO: 1628697 - RNA, 20 nt, Human
acaugagguacugagaguga

SEQ ID NO: 1628698 - RNA, 12 nt, Human
acagucccugcc

SEQ ID NO: 1628699 - RNA, 20 nt, Human
acaugaauauuuaguguuca

SEQ ID NO: 1628700 - RNA, 23 nt, Human
acaugagguacugagagugaaca

SEQ ID NO: 1628701 - RNA, 15 nt, Human
acaugcuacacacug

SEQ ID NO: 1628702 - RNA, 21 nt, Human
acaugcuacacacugcauguu

SEQ ID NO: 1628703 - RNA, 22 nt, Human
acaugcuacacacugcauguuu

SEQ ID NO: 1628704 - RNA, 14 nt, Human
acaugggacauuug

SEQ ID NO: 1628705 - RNA, 11 nt, Human
acaugggacau

SEQ ID NO: 1628706 - RNA, 14 nt, Human
acauggaaguacua

SEQ ID NO: 1628707 - RNA, 21 nt, Human
acaugggacauuugcucaugg

SEQ ID NO: 1628708 - RNA, 20 nt, Human
acaugggacauuugcucaug

SEQ ID NO: 1628709 - RNA, 15 nt, Human
acaugggacauuugc

SEQ ID NO: 1628710 - RNA, 22 nt, Human
acauguaauuaaguacuaugua

SEQ ID NO: 1628711 - RNA, 21 nt, Human
acauguaauuaaguacuaugu

SEQ ID NO: 1628712 - RNA, 19 nt, Human
acauguaauuaaguacuau

SEQ ID NO: 1628713 - RNA, 17 nt, Human
acauguaauuaaguacu

SEQ ID NO: 1628714 - RNA, 15 nt, Human
acauguaauuaagua

SEQ ID NO: 1628715 - RNA, 18 nt, Human
ucaaauugugugaaaggu

SEQ ID NO: 1628716 - RNA, 14 nt, Human
acauuccugaugcu

SEQ ID NO: 1628717 - RNA, 15 nt, Human
acauuccugaacagg

SEQ ID NO: 1628718 - RNA, 14 nt, Human
acauuccugaacag

SEQ ID NO: 1628719 - RNA, 23 nt, Human
acauguaauuaaguacuauguau

SEQ ID NO: 1628720 - RNA, 15 nt, Human
acauguccaagaagc

SEQ ID NO: 1628721 - RNA, 19 nt, Human
acauguccaagaagcccag

SEQ ID NO: 1628722 - RNA, 14 nt, Human
ucaaccagcagaug

SEQ ID NO: 1628723 - RNA, 18 nt, Human
ucaaccauuccccauggg

SEQ ID NO: 1628724 - RNA, 15 nt, Human
ucaaccauuccccau

SEQ ID NO: 1628725 - RNA, 20 nt, Human
ucaacugcaucaagauguga

SEQ ID NO: 1628726 - RNA, 14 nt, Human
ucaaauuucuaaau

SEQ ID NO: 1628727 - RNA, 13 nt, Human
ucaaauuucuaaa

SEQ ID NO: 1628728 - RNA, 15 nt, Human
accccugagcuugca

SEQ ID NO: 1628729 - RNA, 18 nt, Human
accccaucucuacaaaaa

SEQ ID NO: 1628730 - RNA, 23 nt, Human
ucagcggggacagcuccuucugu

SEQ ID NO: 1628731 - RNA, 21 nt, Human
ucagcggggacagcuccuucu

SEQ ID NO: 1628732 - RNA, 20 nt, Human
ucagcggggacagcuccuuc

SEQ ID NO: 1628733 - RNA, 19 nt, Human
ucagcggggacagcuccuu

SEQ ID NO: 1628734 - RNA, 12 nt, Human
ucagcuccagcu

SEQ ID NO: 1628735 - RNA, 21 nt, Human
accccuggcuuuucacugcug

SEQ ID NO: 1628736 - RNA, 20 nt, Human
accccuggcuuuucacugcu

SEQ ID NO: 1628737 - RNA, 19 nt, Human
accccuggcuuuucacugc

SEQ ID NO: 1628738 - RNA, 18 nt, Human
accccuggcuuuucacug

SEQ ID NO: 1628739 - RNA, 22 nt, Human
accccagccccaaaacucuccu

SEQ ID NO: 1628740 - RNA, 13 nt, Human
accccagccccaa

SEQ ID NO: 1628741 - RNA, 17 nt, Human
accccacacacgccaga

SEQ ID NO: 1628742 - RNA, 23 nt, Human
acccaggagccccgaggccuucu

SEQ ID NO: 1628743 - RNA, 19 nt, Human
acccaggagccccgaggcc

SEQ ID NO: 1628744 - RNA, 17 nt, Human
ucagcccucccugcccc

SEQ ID NO: 1628745 - RNA, 16 nt, Human
ucagcccucccugccc

SEQ ID NO: 1628746 - RNA, 15 nt, Human
ucagcccucccugcc

SEQ ID NO: 1628747 - RNA, 14 nt, Human
ucagcccucccugc

SEQ ID NO: 1628748 - RNA, 13 nt, Human
ucagcccucccug

SEQ ID NO: 1628749 - RNA, 15 nt, Human
ucagcaaaagaugcu

SEQ ID NO: 1628750 - RNA, 20 nt, Human
ucagcaaaaauauuuuauga

SEQ ID NO: 1628751 - RNA, 19 nt, Human
ucagcaaaaauauuuuaug

SEQ ID NO: 1628752 - RNA, 23 nt, Human
ucagauuuuauuauguaaauccc

SEQ ID NO: 1628753 - RNA, 18 nt, Human
accaguguuguggauuua

SEQ ID NO: 1628754 - RNA, 12 nt, Human
ucagauuugaac

SEQ ID NO: 1628755 - RNA, 21 nt, Human
ucagauuugaacucuucaauc

SEQ ID NO: 1628756 - RNA, 17 nt, Human
acccgggaggcagaggu

SEQ ID NO: 1628757 - RNA, 13 nt, Human
acccgggaagggg

SEQ ID NO: 1628758 - RNA, 12 nt, Human
acccgggaaggg

SEQ ID NO: 1628759 - RNA, 20 nt, Human
acccggccccugcugguuca

SEQ ID NO: 1628760 - RNA, 17 nt, Human
acccggccccugcuggu

SEQ ID NO: 1628761 - RNA, 22 nt, Human
acccggccccugcugguucagg

SEQ ID NO: 1628762 - RNA, 16 nt, Human
acccggccccugcugg

SEQ ID NO: 1628763 - RNA, 15 nt, Human
acccggccccugcug

SEQ ID NO: 1628764 - RNA, 14 nt, Human
acccggccccugcu

SEQ ID NO: 1628765 - RNA, 21 nt, Human
acccggaggggccuggcagcc

SEQ ID NO: 1628766 - RNA, 18 nt, Human
acccggaggggccuggca

SEQ ID NO: 1628767 - RNA, 22 nt, Human
ucagguaacaggcagauacagg

SEQ ID NO: 1628768 - RNA, 21 nt, Human
ucagguaacaggcagauacag

SEQ ID NO: 1628769 - RNA, 23 nt, Human
ucagguaacaggcagauacagga

SEQ ID NO: 1628770 - RNA, 17 nt, Human
ucaggguuggccccugc

SEQ ID NO: 1628771 - RNA, 16 nt, Human
ucaggguuggccccug

SEQ ID NO: 1628772 - RNA, 19 nt, Human
ucagggucccugguggcag

SEQ ID NO: 1628773 - RNA, 23 nt, Human
ucaggccaggcccucugcccacu

SEQ ID NO: 1628774 - RNA, 22 nt, Human
ucagcuuguaaauagcucaggu

SEQ ID NO: 1628775 - RNA, 21 nt, Human
ucagcuuguaaauagcucagg

SEQ ID NO: 1628776 - RNA, 15 nt, Human
ucagcuccagcucac

SEQ ID NO: 1628777 - RNA, 14 nt, Human
ucagcuccagcuca

SEQ ID NO: 1628778 - RNA, 22 nt, Human
ucaggccaggcccucugcccac

SEQ ID NO: 1628779 - RNA, 21 nt, Human
ucaggccaggcccucugccca

SEQ ID NO: 1628780 - RNA, 15 nt, Human
acccugcccuguggg

SEQ ID NO: 1628781 - RNA, 17 nt, Human
acccugaggcccagagg

SEQ ID NO: 1628782 - RNA, 16 nt, Human
acccugaggcccagag

SEQ ID NO: 1628783 - RNA, 15 nt, Human
acccugaggcccaga

SEQ ID NO: 1628784 - RNA, 22 nt, Human
acccugcccugugggcccccaa

SEQ ID NO: 1628785 - RNA, 17 nt, Human
acccugcccugugggcc

SEQ ID NO: 1628786 - RNA, 23 nt, Human
acccuuguggucccaccccacac

SEQ ID NO: 1628787 - RNA, 17 nt, Human
acccuugccgucuaccu

SEQ ID NO: 1628788 - RNA, 15 nt, Human
accgaaaacguggcu

SEQ ID NO: 1628789 - RNA, 14 nt, Human
acccugaggcccag

SEQ ID NO: 1628790 - RNA, 18 nt, Human
acccugaaagcccugagc

SEQ ID NO: 1628791 - RNA, 16 nt, Human
acccugaaagcccuga

SEQ ID NO: 1628792 - RNA, 16 nt, Human
accuagggugauauua

SEQ ID NO: 1628793 - RNA, 16 nt, Human
accgcagacaggacca

SEQ ID NO: 1628794 - RNA, 12 nt, Human
accgcagacagg

SEQ ID NO: 1628795 - RNA, 17 nt, Human
accgcagacaggaccag

SEQ ID NO: 1628796 - RNA, 20 nt, Human
accucccacaaaggagagcu

SEQ ID NO: 1628797 - RNA, 17 nt, Human
ucaugaaagauucaaug

SEQ ID NO: 1628798 - RNA, 16 nt, Human
ucaugaaagauucaau

SEQ ID NO: 1628799 - RNA, 14 nt, Human
ucaugcaaacuuua

SEQ ID NO: 1628800 - RNA, 11 nt, Human
ucaugauuuuu

SEQ ID NO: 1628801 - RNA, 13 nt, Human
ucaucuaggauuu

SEQ ID NO: 1628802 - RNA, 13 nt, Human
ucauccauccagg

SEQ ID NO: 1628803 - RNA, 23 nt, Human
ucaugcaaacuuuauuuuguguu

SEQ ID NO: 1628804 - RNA, 16 nt, Human
ucaugugaaaucauuc

SEQ ID NO: 1628805 - RNA, 17 nt, Human
ucaugugaaaucauuca

SEQ ID NO: 1628806 - RNA, 17 nt, Human
ucaguuuuugugaaaag

SEQ ID NO: 1628807 - RNA, 15 nt, Human
ucaguuuuugugaaa

SEQ ID NO: 1628808 - RNA, 20 nt, Human
ucaguggggcccauggaugu

SEQ ID NO: 1628809 - RNA, 11 nt, Human
ucaguggcagc

SEQ ID NO: 1628810 - RNA, 18 nt, Human
ucagugccuuauggaaca

SEQ ID NO: 1628811 - RNA, 16 nt, Human
ucagugccuuauggaa

SEQ ID NO: 1628812 - RNA, 13 nt, Human
ucaguggcagcug

SEQ ID NO: 1628813 - RNA, 12 nt, Human
ucaguggcagcu

SEQ ID NO: 1628814 - RNA, 16 nt, Human
ucaguggggaggggcu

SEQ ID NO: 1628815 - RNA, 15 nt, Human
ucagugccuuaugga

SEQ ID NO: 1628816 - RNA, 14 nt, Human
ucagugccuuaugg

SEQ ID NO: 1628817 - RNA, 12 nt, Human
ucagugccuuau

SEQ ID NO: 1628818 - RNA, 11 nt, Human
ucagugccuua

SEQ ID NO: 1628819 - RNA, 10 nt, Human
ucagugccuu

SEQ ID NO: 1628820 - RNA, 9 nt, Human
ucagugccu

SEQ ID NO: 1628821 - RNA, 20 nt, Human
ucagugcccuccaggauaga

SEQ ID NO: 1628822 - RNA, 19 nt, Human
accgaaaacguggcugcuu

SEQ ID NO: 1628823 - RNA, 17 nt, Human
accgaaaacguggcugc

SEQ ID NO: 1628824 - RNA, 12 nt, Human
ucagugccacua

SEQ ID NO: 1628825 - RNA, 19 nt, Human
ucauaguaugguggcuggg

SEQ ID NO: 1628826 - RNA, 18 nt, Human
ucauaguaugguggcugg

SEQ ID NO: 1628827 - RNA, 15 nt, Human
ucauaguaugguggc

SEQ ID NO: 1628828 - RNA, 14 nt, Human
ucauaaccuagccu

SEQ ID NO: 1628829 - RNA, 18 nt, Human
ucauauaagauucauauu

SEQ ID NO: 1628830 - RNA, 21 nt, Human
ucauaguaugguggcuggguu

SEQ ID NO: 1628831 - RNA, 23 nt, Human
ucauauuuacuucuuauacauuu

SEQ ID NO: 1628832 - RNA, 15 nt, Human
ucauauuuacuucuu

SEQ ID NO: 1628833 - RNA, 16 nt, Human
ucauauuuacuucuua

SEQ ID NO: 1628834 - RNA, 15 nt, Human
ucauauuuucaugcu

SEQ ID NO: 1628835 - RNA, 17 nt, Human
accgagucucuucucca

SEQ ID NO: 1628836 - RNA, 16 nt, Human
accgagucucuucucc

SEQ ID NO: 1628837 - RNA, 18 nt, Human
accuuuguccccaccgca

SEQ ID NO: 1628838 - RNA, 22 nt, Human
accuuuguuugcaucugaaaau

SEQ ID NO: 1628839 - RNA, 17 nt, Human
accuuuguccccaccgc

SEQ ID NO: 1628840 - RNA, 18 nt, Human
accuuugacaaagguaaa

SEQ ID NO: 1628841 - RNA, 17 nt, Human
accuuugacaaagguaa

SEQ ID NO: 1628842 - RNA, 19 nt, Human
accuugaaaacuuuaugcu

SEQ ID NO: 1628843 - RNA, 20 nt, Human
accuugaacuggguacuugu

SEQ ID NO: 1628844 - RNA, 22 nt, Human
uccacugguucuucuuggucuc

SEQ ID NO: 1628845 - RNA, 21 nt, Human
uccacugugccaugugccagg

SEQ ID NO: 1628846 - RNA, 18 nt, Human
uccagaauggucuuucua

SEQ ID NO: 1628847 - RNA, 20 nt, Human
accuuuuggucuggagggaa

SEQ ID NO: 1628848 - RNA, 13 nt, Human
accuuuuuuauac

SEQ ID NO: 1628849 - RNA, 21 nt, Human
uccaggcugggagagccuucc

SEQ ID NO: 1628850 - RNA, 20 nt, Human
uccaggcugggagagccuuc

SEQ ID NO: 1628851 - RNA, 22 nt, Human
uccaggcuccuuuagcgcccag

SEQ ID NO: 1628852 - RNA, 12 nt, Human
uccaggcuccuu

SEQ ID NO: 1628853 - RNA, 10 nt, Human
uccaggcucc

SEQ ID NO: 1628854 - RNA, 18 nt, Human
acgaauauugcugauggu

SEQ ID NO: 1628855 - RNA, 15 nt, Human
acgaauauugcugau

SEQ ID NO: 1628856 - RNA, 23 nt, Human
uccaggcugggagagccuuccag

SEQ ID NO: 1628857 - RNA, 14 nt, Human
uccaggcuguaucc

SEQ ID NO: 1628858 - RNA, 15 nt, Human
uccagaauuucccaa

SEQ ID NO: 1628859 - RNA, 14 nt, Human
uccagaauuuccca

SEQ ID NO: 1628860 - RNA, 16 nt, Human
uccagaauuucccaaa

SEQ ID NO: 1628861 - RNA, 13 nt, Human
uccagaccccugg

SEQ ID NO: 1628862 - RNA, 11 nt, Human
uccagccuggg

SEQ ID NO: 1628863 - RNA, 20 nt, Human
uccagccugcugccugcuuu

SEQ ID NO: 1628864 - RNA, 14 nt, Human
acgcucucuggccu

SEQ ID NO: 1628865 - RNA, 11 nt, Human
acgcucucugg

SEQ ID NO: 1628866 - RNA, 13 nt, Human
acgcuggaccuug

SEQ ID NO: 1628867 - RNA, 15 nt, Human
acgcuccuuccucug

SEQ ID NO: 1628868 - RNA, 14 nt, Human
acgcuccuuccucu

SEQ ID NO: 1628869 - RNA, 16 nt, Human
acgcuggagugcagug

SEQ ID NO: 1628870 - RNA, 15 nt, Human
acgcuggagugcagu

SEQ ID NO: 1628871 - RNA, 23 nt, Human
acgcuggaccuugaacuggguac

SEQ ID NO: 1628872 - RNA, 20 nt, Human
acgcuggaccuugaacuggg

SEQ ID NO: 1628873 - RNA, 18 nt, Human
acgcuggagugcagugag

SEQ ID NO: 1628874 - RNA, 17 nt, Human
acgcuggagugcaguga

SEQ ID NO: 1628875 - RNA, 23 nt, Human
acggagucccaccuuggcugcag

SEQ ID NO: 1628876 - RNA, 21 nt, Human
acgaauauugcugauggugca

SEQ ID NO: 1628877 - RNA, 21 nt, Human
acgcuacccgggaagggggcu

SEQ ID NO: 1628878 - RNA, 20 nt, Human
acgcgugcacacaccagagc

SEQ ID NO: 1628879 - RNA, 18 nt, Human
uccagugagacagcucug

SEQ ID NO: 1628880 - RNA, 15 nt, Human
uccagugaggcucug

SEQ ID NO: 1628881 - RNA, 17 nt, Human
uccagugaggcucugcc

SEQ ID NO: 1628882 - RNA, 16 nt, Human
uccagugaggcucugc

SEQ ID NO: 1628883 - RNA, 23 nt, Human
uccagugaggcucugcccuuggu

SEQ ID NO: 1628884 - RNA, 22 nt, Human
uccagugaggcucugcccuugg

SEQ ID NO: 1628885 - RNA, 18 nt, Human
uccaguaucuugaagacu

SEQ ID NO: 1628886 - RNA, 16 nt, Human
uccaguaucuugaaga

SEQ ID NO: 1628887 - RNA, 15 nt, Human
uccaguaucuugaag

SEQ ID NO: 1628888 - RNA, 14 nt, Human
uccaguaucuugaa

SEQ ID NO: 1628889 - RNA, 18 nt, Human
acggcuuuuacuuaaacc

SEQ ID NO: 1628890 - RNA, 18 nt, Human
acggcucacugcagccuc

SEQ ID NO: 1628891 - RNA, 17 nt, Human
acggcucacugcagccu

SEQ ID NO: 1628892 - RNA, 16 nt, Human
acggcucacugcagcc

SEQ ID NO: 1628893 - RNA, 13 nt, Human
acggccaggccag

SEQ ID NO: 1628894 - RNA, 12 nt, Human
acggccaggcca

SEQ ID NO: 1628895 - RNA, 14 nt, Human
acggaugauuucua

SEQ ID NO: 1628896 - RNA, 13 nt, Human
acggaugauuucu

SEQ ID NO: 1628897 - RNA, 15 nt, Human
acuaauuuuaaaaug

SEQ ID NO: 1628898 - RNA, 22 nt, Human
acguuucuaaaggcuaccuuug

SEQ ID NO: 1628899 - RNA, 18 nt, Human
ucccagauacuugggggg

SEQ ID NO: 1628900 - RNA, 16 nt, Human
ucccagauacuugggg

SEQ ID NO: 1628901 - RNA, 15 nt, Human
uccauccugaggcuc

SEQ ID NO: 1628902 - RNA, 12 nt, Human
uccauccugagg

SEQ ID NO: 1628903 - RNA, 19 nt, Human
uccauccugaggcuccacu

SEQ ID NO: 1628904 - RNA, 16 nt, Human
acggugaauggcuuug

SEQ ID NO: 1628905 - RNA, 20 nt, Human
acggugaauggcuuuguaua

SEQ ID NO: 1628906 - RNA, 19 nt, Human
acggugaauggcuuuguau

SEQ ID NO: 1628907 - RNA, 16 nt, Human
acguuucuaaaggcua

SEQ ID NO: 1628908 - RNA, 14 nt, Human
acguugugcauuug

SEQ ID NO: 1628909 - RNA, 15 nt, Human
acguugugcauuugg

SEQ ID NO: 1628910 - RNA, 13 nt, Human
acguugugcauuu

SEQ ID NO: 1628911 - RNA, 15 nt, Human
acguuaccaggcagg

SEQ ID NO: 1628912 - RNA, 21 nt, Human
acguggcugcuucaaggaucc

SEQ ID NO: 1628913 - RNA, 19 nt, Human
acguggcugcuucaaggau

SEQ ID NO: 1628914 - RNA, 18 nt, Human
acguggcugcuucaagga

SEQ ID NO: 1628915 - RNA, 22 nt, Human
acuauauuguuugcuaagcauu

SEQ ID NO: 1628916 - RNA, 17 nt, Human
acuauauuguuugcuaa

SEQ ID NO: 1628917 - RNA, 22 nt, Human
acuauagccuaggugacagagu

SEQ ID NO: 1628918 - RNA, 20 nt, Human
acuauagccuaggugacaga

SEQ ID NO: 1628919 - RNA, 15 nt, Human
acuaucucauuucca

SEQ ID NO: 1628920 - RNA, 21 nt, Human
acuaucuaaauguugaaagau

SEQ ID NO: 1628921 - RNA, 16 nt, Human
acuaucuaaauguuga

SEQ ID NO: 1628922 - RNA, 17 nt, Human
acuaucucauuuccaag

SEQ ID NO: 1628923 - RNA, 16 nt, Human
acuaucucauuuccaa

SEQ ID NO: 1628924 - RNA, 16 nt, Human
acucaaugcacugaca

SEQ ID NO: 1628925 - RNA, 15 nt, Human
acucaauuuuaacaa

SEQ ID NO: 1628926 - RNA, 12 nt, Human
acucaauuuuaa

SEQ ID NO: 1628927 - RNA, 14 nt, Human
acuauguugcccag

SEQ ID NO: 1628928 - RNA, 22 nt, Human
acuauggcccuggccuagcaua

SEQ ID NO: 1628929 - RNA, 16 nt, Human
acuauguugcccaggc

SEQ ID NO: 1628930 - RNA, 15 nt, Human
acuauguugcccagg

SEQ ID NO: 1628931 - RNA, 17 nt, Human
acuauguugcccaggca

SEQ ID NO: 1628932 - RNA, 18 nt, Human
uccccaggaggccagccu

SEQ ID NO: 1628933 - RNA, 16 nt, Human
uccccaccgcagacag

SEQ ID NO: 1628934 - RNA, 15 nt, Human
uccccaccgcagaca

SEQ ID NO: 1628935 - RNA, 23 nt, Human
uccccacccugaaagcccugagc

SEQ ID NO: 1628936 - RNA, 21 nt, Human
uccccaggaggccagccuuga

SEQ ID NO: 1628937 - RNA, 20 nt, Human
uccccaggaggccagccuug

SEQ ID NO: 1628938 - RNA, 23 nt, Human
uccccaggaggccagccuugacc

SEQ ID NO: 1628939 - RNA, 11 nt, Human
ucccccagccc

SEQ ID NO: 1628940 - RNA, 15 nt, Human
ucccccagccccauc

SEQ ID NO: 1628941 - RNA, 13 nt, Human
ucccccagcccca

SEQ ID NO: 1628942 - RNA, 16 nt, Human
ucccccagccccaucc

SEQ ID NO: 1628943 - RNA, 19 nt, Human
acuagacucccaagcugga

SEQ ID NO: 1628944 - RNA, 16 nt, Human
uccuggaaaucagggu

SEQ ID NO: 1628945 - RNA, 15 nt, Human
uccuggaaauauuaa

SEQ ID NO: 1628946 - RNA, 22 nt, Human
uccuggaauaucuccgucaacu

SEQ ID NO: 1628947 - RNA, 23 nt, Human
uccuggaagugcuaauuuugaaa

SEQ ID NO: 1628948 - RNA, 17 nt, Human
uccugggagugagcugg

SEQ ID NO: 1628949 - RNA, 14 nt, Human
uccugggagugagc

SEQ ID NO: 1628950 - RNA, 12 nt, Human
uccugggaguga

SEQ ID NO: 1628951 - RNA, 15 nt, Human
uccugggagcuuuug

SEQ ID NO: 1628952 - RNA, 15 nt, Human
uccugcaggcagcca

SEQ ID NO: 1628953 - RNA, 14 nt, Human
uccugcaggcagcc

SEQ ID NO: 1628954 - RNA, 13 nt, Human
uccugcaggcagc

SEQ ID NO: 1628955 - RNA, 12 nt, Human
uccugcaggcag

SEQ ID NO: 1628956 - RNA, 13 nt, Human
uccugcugggcag

SEQ ID NO: 1628957 - RNA, 20 nt, Human
acugcacuauagccuaggug

SEQ ID NO: 1628958 - RNA, 16 nt, Human
acugcaccgggccaca

SEQ ID NO: 1628959 - RNA, 14 nt, Human
acugcaccgggcca

SEQ ID NO: 1628960 - RNA, 23 nt, Human
acugcacagugcaucucagccca

SEQ ID NO: 1628961 - RNA, 13 nt, Human
acugauaaagaug

SEQ ID NO: 1628962 - RNA, 21 nt, Human
acugauaaagaugagugagca

SEQ ID NO: 1628963 - RNA, 20 nt, Human
acugcaacuuguaaaugugg

SEQ ID NO: 1628964 - RNA, 20 nt, Human
acugcacuccagccugggug

SEQ ID NO: 1628965 - RNA, 19 nt, Human
acugcacuccagccugggu

SEQ ID NO: 1628966 - RNA, 18 nt, Human
acugcacuccagccuggg

SEQ ID NO: 1628967 - RNA, 17 nt, Human
acugcacuccagccugg

SEQ ID NO: 1628968 - RNA, 14 nt, Human
acugcacuccagcc

SEQ ID NO: 1628969 - RNA, 21 nt, Human
acugcacuauagccuagguga

SEQ ID NO: 1628970 - RNA, 21 nt, Human
uccugaugcuucuucagagac

SEQ ID NO: 1628971 - RNA, 20 nt, Human
uccugaugcuucuucagaga

SEQ ID NO: 1628972 - RNA, 19 nt, Human
uccugaugcuucuucagag

SEQ ID NO: 1628973 - RNA, 13 nt, Human
acugcacuguuuu

SEQ ID NO: 1628974 - RNA, 22 nt, Human
uccugcacacgcuccuuccucu

SEQ ID NO: 1628975 - RNA, 21 nt, Human
uccugcacacgcuccuuccuc

SEQ ID NO: 1628976 - RNA, 14 nt, Human
uccugcacacgcuc

SEQ ID NO: 1628977 - RNA, 17 nt, Human
acugagaugugaacaca

SEQ ID NO: 1628978 - RNA, 22 nt, Human
acugagaugugaacacaucagc

SEQ ID NO: 1628979 - RNA, 18 nt, Human
acugagagugaacaaauu

SEQ ID NO: 1628980 - RNA, 23 nt, Human
acugagacagcccgggcucugcc

SEQ ID NO: 1628981 - RNA, 22 nt, Human
acugagacagcccgggcucugc

SEQ ID NO: 1628982 - RNA, 21 nt, Human
acugagacagcccgggcucug

SEQ ID NO: 1628983 - RNA, 18 nt, Human
acugagacagcccgggcu

SEQ ID NO: 1628984 - RNA, 15 nt, Human
acugagacagcccgg

SEQ ID NO: 1628985 - RNA, 21 nt, Human
acugagaaauuuauaaacuuu

SEQ ID NO: 1628986 - RNA, 17 nt, Human
acugagaaauuuauaaa

SEQ ID NO: 1628987 - RNA, 12 nt, Human
acugagaaauuu

SEQ ID NO: 1628988 - RNA, 22 nt, Human
acugacuucuaaguaaaaccac

SEQ ID NO: 1628989 - RNA, 16 nt, Human
acugacuucuaaguaa

SEQ ID NO: 1628990 - RNA, 15 nt, Human
acugacuucuaagua

SEQ ID NO: 1628991 - RNA, 13 nt, Human
acugacuucuaag

SEQ ID NO: 1628992 - RNA, 20 nt, Human
acugacucuuaagaagacug

SEQ ID NO: 1628993 - RNA, 18 nt, Human
acugacucuuaagaagac

SEQ ID NO: 1628994 - RNA, 17 nt, Human
acugacucuuaagaaga

SEQ ID NO: 1628995 - RNA, 16 nt, Human
acugacucuuaagaag

SEQ ID NO: 1628996 - RNA, 15 nt, Human
acugacucuuaagaa

SEQ ID NO: 1628997 - RNA, 14 nt, Human
acugacucuuaaga

SEQ ID NO: 1628998 - RNA, 13 nt, Human
acugacucuuaag

SEQ ID NO: 1628999 - RNA, 12 nt, Human
acugaagaagca

SEQ ID NO: 1629000 - RNA, 12 nt, Human
uccucuuuccau

SEQ ID NO: 1629001 - RNA, 11 nt, Human
uccucuuucca

SEQ ID NO: 1629002 - RNA, 14 nt, Human
uccucccucccucu

SEQ ID NO: 1629003 - RNA, 11 nt, Human
uccucccuccc

SEQ ID NO: 1629004 - RNA, 21 nt, Human
uccucuuuggucuacacugug

SEQ ID NO: 1629005 - RNA, 19 nt, Human
uccucuuuggucuacacug

SEQ ID NO: 1629006 - RNA, 19 nt, Human
uccucuuuccaucuacccu

SEQ ID NO: 1629007 - RNA, 23 nt, Human
uccucuuuggucuacacugugcu

SEQ ID NO: 1629008 - RNA, 22 nt, Human
uccucuuuggucuacacugugc

SEQ ID NO: 1629009 - RNA, 21 nt, Human
uccugaauuuuauuuuuuggg

SEQ ID NO: 1629010 - RNA, 19 nt, Human
acucuuucuauuguuucuu

SEQ ID NO: 1629011 - RNA, 15 nt, Human
acucuuguuuccuua

SEQ ID NO: 1629012 - RNA, 20 nt, Human
acugaacucugacaacagac

SEQ ID NO: 1629013 - RNA, 21 nt, Human
acucuuaagaagacugcauua

SEQ ID NO: 1629014 - RNA, 14 nt, Human
acucuugaccucag

SEQ ID NO: 1629015 - RNA, 22 nt, Human
acucuuauaucuauauuuuaca

SEQ ID NO: 1629016 - RNA, 18 nt, Human
acucuuauaucuauauuu

SEQ ID NO: 1629017 - RNA, 17 nt, Human
acucuuauaucuauauu

SEQ ID NO: 1629018 - RNA, 16 nt, Human
acucuuauaucuauau

SEQ ID NO: 1629019 - RNA, 16 nt, Human
acucuugaccucaggu

SEQ ID NO: 1629020 - RNA, 15 nt, Human
acucuugaccucagg

SEQ ID NO: 1629021 - RNA, 19 nt, Human
acucuuauaucuauauuuu

SEQ ID NO: 1629022 - RNA, 23 nt, Human
uccucauacccacccccacccaa

SEQ ID NO: 1629023 - RNA, 22 nt, Human
uccucauaguaugguggcuggg

SEQ ID NO: 1629024 - RNA, 13 nt, Human
uccucccaggcgc

SEQ ID NO: 1629025 - RNA, 21 nt, Human
uccucccaggcgccccuuccc

SEQ ID NO: 1629026 - RNA, 19 nt, Human
uccucccaggcgccccuuc

SEQ ID NO: 1629027 - RNA, 15 nt, Human
acucuccuugguguc

SEQ ID NO: 1629028 - RNA, 18 nt, Human
acucuccuggaaauauua

SEQ ID NO: 1629029 - RNA, 16 nt, Human
acucuccucugcugcu

SEQ ID NO: 1629030 - RNA, 14 nt, Human
acucuccucugcug

SEQ ID NO: 1629031 - RNA, 13 nt, Human
acucuccucugcu

SEQ ID NO: 1629032 - RNA, 12 nt, Human
acucuccucugc

SEQ ID NO: 1629033 - RNA, 17 nt, Human
acucuccuccagaguca

SEQ ID NO: 1629034 - RNA, 14 nt, Human
acucuccuccagag

SEQ ID NO: 1629035 - RNA, 24 nt, Human
acuccuugaaaacacuguucucug

SEQ ID NO: 1629036 - RNA, 23 nt, Human
acuccuugaaaacacuguucucu

SEQ ID NO: 1629037 - RNA, 15 nt, Human
acucuggcagcucag

SEQ ID NO: 1629038 - RNA, 13 nt, Human
acucuggcagcuc

SEQ ID NO: 1629039 - RNA, 16 nt, Human
acucugccuccucuuc

SEQ ID NO: 1629040 - RNA, 12 nt, Human
acucugccuccu

SEQ ID NO: 1629041 - RNA, 23 nt, Human
acucuccuuggugucgggcauga

SEQ ID NO: 1629042 - RNA, 16 nt, Human
acucuccuuggugucg

SEQ ID NO: 1629043 - RNA, 22 nt, Human
acucugagacucgcgacaaugc

SEQ ID NO: 1629044 - RNA, 11 nt, Human
acucugagacu

SEQ ID NO: 1629045 - RNA, 11 nt, Human
acuccuggccu

SEQ ID NO: 1629046 - RNA, 17 nt, Human
ucccugguggcagcuca

SEQ ID NO: 1629047 - RNA, 16 nt, Human
ucccugguggcagcuc

SEQ ID NO: 1629048 - RNA, 21 nt, Human
ucccugguggcagcucaccuc

SEQ ID NO: 1629049 - RNA, 20 nt, Human
ucccugguggcagcucaccu

SEQ ID NO: 1629050 - RNA, 19 nt, Human
ucccugguggcagcucacc

SEQ ID NO: 1629051 - RNA, 18 nt, Human
ucccugguggcagcucac

SEQ ID NO: 1629052 - RNA, 16 nt, Human
acuccugcaggcagcc

SEQ ID NO: 1629053 - RNA, 15 nt, Human
acuccugcaggcagc

SEQ ID NO: 1629054 - RNA, 22 nt, Human
acuccugcaggcagccaggcca

SEQ ID NO: 1629055 - RNA, 17 nt, Human
acuccugcaggcagcca

SEQ ID NO: 1629056 - RNA, 14 nt, Human
acuccugcaggcag

SEQ ID NO: 1629057 - RNA, 12 nt, Human
acuccucccagg

SEQ ID NO: 1629058 - RNA, 15 nt, Human
acucaccccagcccc

SEQ ID NO: 1629059 - RNA, 14 nt, Human
acucaccccagccc

SEQ ID NO: 1629060 - RNA, 16 nt, Human
acucaccccagcccca

SEQ ID NO: 1629061 - RNA, 15 nt, Human
acuccagaccccugg

SEQ ID NO: 1629062 - RNA, 13 nt, Human
acucaccccagcc

SEQ ID NO: 1629063 - RNA, 21 nt, Human
acuccagaccccuggcuuuuc

SEQ ID NO: 1629064 - RNA, 19 nt, Human
acuccagaccccuggcuuu

SEQ ID NO: 1629065 - RNA, 18 nt, Human
acuccagaccccuggcuu

SEQ ID NO: 1629066 - RNA, 14 nt, Human
acuccuggccucaa

SEQ ID NO: 1629067 - RNA, 13 nt, Human
acuccuggccuca

SEQ ID NO: 1629068 - RNA, 13 nt, Human
uccuaggcauuug

SEQ ID NO: 1629069 - RNA, 15 nt, Human
uccuacucuguguca

SEQ ID NO: 1629070 - RNA, 14 nt, Human
uccuacucuguguc

SEQ ID NO: 1629071 - RNA, 13 nt, Human
uccuacucugugu

SEQ ID NO: 1629072 - RNA, 21 nt, Human
ucccuuuuuuuaaguaaggaa

SEQ ID NO: 1629073 - RNA, 16 nt, Human
ucccuuuuuuuaagua

SEQ ID NO: 1629074 - RNA, 18 nt, Human
uccgguguuuaagacauu

SEQ ID NO: 1629075 - RNA, 20 nt, Human
ucccuuggauuguccccgac

SEQ ID NO: 1629076 - RNA, 19 nt, Human
ucccuuggauuguccccga

SEQ ID NO: 1629077 - RNA, 23 nt, Human
ucccugguggcagcucaccucuc

SEQ ID NO: 1629078 - RNA, 22 nt, Human
ucccugguggcagcucaccucu

SEQ ID NO: 1629079 - RNA, 18 nt, Human
ucccuuugacgccauccc

SEQ ID NO: 1629080 - RNA, 16 nt, Human
ucccuuugacgccauc

SEQ ID NO: 1629081 - RNA, 12 nt, Human
acuccuggccuc

SEQ ID NO: 1629082 - RNA, 19 nt, Human
ucccuuuuuuggcugcuga

SEQ ID NO: 1629083 - RNA, 17 nt, Human
ucccuuuuuuggcugcu

SEQ ID NO: 1629084 - RNA, 19 nt, Human
ucccuuugacgccauccca

SEQ ID NO: 1629085 - RNA, 21 nt, Human
ucccuuugacgccaucccagc

SEQ ID NO: 1629086 - RNA, 22 nt, Human
ucccuuuuuuggcugcugaagg

SEQ ID NO: 1629087 - RNA, 20 nt, Human
ucccuuuuuuggcugcugaa

SEQ ID NO: 1629088 - RNA, 23 nt, Human
ucccuuuuuuggcugcugaaggc

SEQ ID NO: 1629089 - RNA, 13 nt, Human
ucccuuuuuuuaa

SEQ ID NO: 1629090 - RNA, 16 nt, Human
agaauagaugcugacu

SEQ ID NO: 1629091 - RNA, 17 nt, Human
agaauaaaauuuuuaau

SEQ ID NO: 1629092 - RNA, 14 nt, Human
agaauaaaauuuuu

SEQ ID NO: 1629093 - RNA, 12 nt, Human
agaauaaaauuu

SEQ ID NO: 1629094 - RNA, 18 nt, Human
ucugcuuuccucuuccug

SEQ ID NO: 1629095 - RNA, 13 nt, Human
ucugcuuuccucu

SEQ ID NO: 1629096 - RNA, 12 nt, Human
ucugcuuuccuc

SEQ ID NO: 1629097 - RNA, 23 nt, Human
agaaguuucugccgcagcccugc

SEQ ID NO: 1629098 - RNA, 22 nt, Human
agaaguuucugccgcagcccug

SEQ ID NO: 1629099 - RNA, 21 nt, Human
agaaguuucugccgcagcccu

SEQ ID NO: 1629100 - RNA, 20 nt, Human
agaaguggggacagagcaga

SEQ ID NO: 1629101 - RNA, 15 nt, Human
agaauuaacacauga

SEQ ID NO: 1629102 - RNA, 23 nt, Human
agaauuaacacaugauccugcaa

SEQ ID NO: 1629103 - RNA, 23 nt, Human
agaaugguccgugcuaaggacuu

SEQ ID NO: 1629104 - RNA, 21 nt, Human
agaaugguccgugcuaaggac

SEQ ID NO: 1629105 - RNA, 15 nt, Human
ucugggccagaauuu

SEQ ID NO: 1629106 - RNA, 14 nt, Human
ucugggccagaauu

SEQ ID NO: 1629107 - RNA, 14 nt, Human
ucugugagaugcua

SEQ ID NO: 1629108 - RNA, 18 nt, Human
ucugugaacuugaaauuu

SEQ ID NO: 1629109 - RNA, 17 nt, Human
ucugugaacuugaaauu

SEQ ID NO: 1629110 - RNA, 14 nt, Human
ucugugaacuugaa

SEQ ID NO: 1629111 - RNA, 22 nt, Human
ucugugagaugcuagaacuccc

SEQ ID NO: 1629112 - RNA, 17 nt, Human
ucugugagaugcuagaa

SEQ ID NO: 1629113 - RNA, 23 nt, Human
ucugugagaugcuagaacucccu

SEQ ID NO: 1629114 - RNA, 13 nt, Human
ucuguuuagauaa

SEQ ID NO: 1629115 - RNA, 14 nt, Human
agaauucuguauag

SEQ ID NO: 1629116 - RNA, 17 nt, Human
ucuguuggccaguguga

SEQ ID NO: 1629117 - RNA, 12 nt, Human
ucuguuggccag

SEQ ID NO: 1629118 - RNA, 15 nt, Human
ucuguugcugccuca

SEQ ID NO: 1629119 - RNA, 22 nt, Human
ucuguucuuuccaaaguacacu

SEQ ID NO: 1629120 - RNA, 13 nt, Human
ucuguucuuucca

SEQ ID NO: 1629121 - RNA, 15 nt, Human
agacacacaugaagu

SEQ ID NO: 1629122 - RNA, 12 nt, Human
agacacacauga

SEQ ID NO: 1629123 - RNA, 16 nt, Human
agacacaggcccggcu

SEQ ID NO: 1629124 - RNA, 13 nt, Human
agacacaggcccg

SEQ ID NO: 1629125 - RNA, 12 nt, Human
agacacaggccc

SEQ ID NO: 1629126 - RNA, 21 nt, Human
agaauuugauaugugaacagu

SEQ ID NO: 1629127 - RNA, 22 nt, Human
agaauuugauaugugaacaguu

SEQ ID NO: 1629128 - RNA, 20 nt, Human
agacacauguccaagaagcc

SEQ ID NO: 1629129 - RNA, 16 nt, Human
agacacauguccaaga

SEQ ID NO: 1629130 - RNA, 17 nt, Human
agacaccuugacagggc

SEQ ID NO: 1629131 - RNA, 18 nt, Human
agacaccuugacagggca

SEQ ID NO: 1629132 - RNA, 19 nt, Human
agacaccuugacagggcac

SEQ ID NO: 1629133 - RNA, 13 nt, Human
agacagagcuaca

SEQ ID NO: 1629134 - RNA, 16 nt, Human
ucugcuugccaucccu

SEQ ID NO: 1629135 - RNA, 17 nt, Human
ucugcuugccaucccuc

SEQ ID NO: 1629136 - RNA, 20 nt, Human
ucugcuugccaucccucccu

SEQ ID NO: 1629137 - RNA, 23 nt, Human
ucugcuugccaucccucccucca

SEQ ID NO: 1629138 - RNA, 15 nt, Human
ucugcuucagccucc

SEQ ID NO: 1629139 - RNA, 14 nt, Human
ucugcuucagccuc

SEQ ID NO: 1629140 - RNA, 20 nt, Human
ucugcucacauaucugucau

SEQ ID NO: 1629141 - RNA, 19 nt, Human
ucugcucacauaucuguca

SEQ ID NO: 1629142 - RNA, 22 nt, Human
ucugccugcccaggccccugcc

SEQ ID NO: 1629143 - RNA, 21 nt, Human
ucugccugcccaggccccugc

SEQ ID NO: 1629144 - RNA, 22 nt, Human
ucugccgcagcccugcagaggg

SEQ ID NO: 1629145 - RNA, 23 nt, Human
ucugccgcagcccugcagagggc

SEQ ID NO: 1629146 - RNA, 19 nt, Human
ucugcccuccaagaccuuc

SEQ ID NO: 1629147 - RNA, 23 nt, Human
ucugcccacucccugcaaccuga

SEQ ID NO: 1629148 - RNA, 21 nt, Human
ucugcccacucccugcaaccu

SEQ ID NO: 1629149 - RNA, 18 nt, Human
ucugcccacucccugcaa

SEQ ID NO: 1629150 - RNA, 15 nt, Human
ucugccgcagcccug

SEQ ID NO: 1629151 - RNA, 14 nt, Human
ucugccgcagcccu

SEQ ID NO: 1629152 - RNA, 10 nt, Human
ucugcccugc

SEQ ID NO: 1629153 - RNA, 12 nt, Human
ucugcccugcgg

SEQ ID NO: 1629154 - RNA, 11 nt, Human
ucugcccugcg

SEQ ID NO: 1629155 - RNA, 19 nt, Human
agaagcaacccaaauguuc

SEQ ID NO: 1629156 - RNA, 18 nt, Human
agaagauuuugaaauuuu

SEQ ID NO: 1629157 - RNA, 17 nt, Human
ucugcccacucccugca

SEQ ID NO: 1629158 - RNA, 23 nt, Human
agaagcccaggaaaggcuccagg

SEQ ID NO: 1629159 - RNA, 22 nt, Human
agaagcccaggaaaggcuccag

SEQ ID NO: 1629160 - RNA, 21 nt, Human
agaagcccaggaaaggcucca

SEQ ID NO: 1629161 - RNA, 20 nt, Human
agaagcccaggaaaggcucc

SEQ ID NO: 1629162 - RNA, 18 nt, Human
agaagcccaggaaaggcu

SEQ ID NO: 1629163 - RNA, 16 nt, Human
agaagcccaggaaagg

SEQ ID NO: 1629164 - RNA, 12 nt, Human
agaagcccagga

SEQ ID NO: 1629165 - RNA, 14 nt, Human
agaagaacugaaau

SEQ ID NO: 1629166 - RNA, 13 nt, Human
agaagaacugaaa

SEQ ID NO: 1629167 - RNA, 18 nt, Human
agaagaugguaccaccag

SEQ ID NO: 1629168 - RNA, 20 nt, Human
agaaauugcauuuccugaca

SEQ ID NO: 1629169 - RNA, 17 nt, Human
agaaauugcauuuccug

SEQ ID NO: 1629170 - RNA, 18 nt, Human
ucugcagauaaacaguag

SEQ ID NO: 1629171 - RNA, 18 nt, Human
ucugcagcaauaaagcag

SEQ ID NO: 1629172 - RNA, 17 nt, Human
ucugcagcaauaaagca

SEQ ID NO: 1629173 - RNA, 15 nt, Human
ucugcacuccccugc

SEQ ID NO: 1629174 - RNA, 14 nt, Human
ucugcacuccccug

SEQ ID NO: 1629175 - RNA, 16 nt, Human
ucugcacuccccugcu

SEQ ID NO: 1629176 - RNA, 17 nt, Human
ucugcacuccccugcug

SEQ ID NO: 1629177 - RNA, 21 nt, Human
ucugaugcaagcaagaaacac

SEQ ID NO: 1629178 - RNA, 14 nt, Human
agaaauguacagca

SEQ ID NO: 1629179 - RNA, 15 nt, Human
agaaauguacagcaa

SEQ ID NO: 1629180 - RNA, 14 nt, Human
ucugcaggucccua

SEQ ID NO: 1629181 - RNA, 13 nt, Human
ucugcaggucccu

SEQ ID NO: 1629182 - RNA, 12 nt, Human
ucugcagguccc

SEQ ID NO: 1629183 - RNA, 11 nt, Human
ucugcaggucc

SEQ ID NO: 1629184 - RNA, 21 nt, Human
ucugaucauccacugugccau

SEQ ID NO: 1629185 - RNA, 11 nt, Human
ucugauccagu

SEQ ID NO: 1629186 - RNA, 17 nt, Human
ucugaucauccacugug

SEQ ID NO: 1629187 - RNA, 21 nt, Human
ucugauccaguuuuguuugga

SEQ ID NO: 1629188 - RNA, 14 nt, Human
ucugauccaguuuu

SEQ ID NO: 1629189 - RNA, 16 nt, Human
ucugaugcaagcaaga

SEQ ID NO: 1629190 - RNA, 21 nt, Human
ucugagacucgcgacaaugca

SEQ ID NO: 1629191 - RNA, 22 nt, Human
ucugagacucgcgacaaugcaa

SEQ ID NO: 1629192 - RNA, 21 nt, Human
ucugaaggacauugcggacag

SEQ ID NO: 1629193 - RNA, 22 nt, Human
ucugaaggacauugcggacagc

SEQ ID NO: 1629194 - RNA, 10 nt, Human
ucugaauuau

SEQ ID NO: 1629195 - RNA, 15 nt, Human
ucugacacacagcuc

SEQ ID NO: 1629196 - RNA, 14 nt, Human
ucugacacacagcu

SEQ ID NO: 1629197 - RNA, 13 nt, Human
ucugacacacagc

SEQ ID NO: 1629198 - RNA, 15 nt, Human
ucugaauuauuuucu

SEQ ID NO: 1629199 - RNA, 16 nt, Human
ucuccuuucacaaccu

SEQ ID NO: 1629200 - RNA, 13 nt, Human
ucuagauacugua

SEQ ID NO: 1629201 - RNA, 18 nt, Human
ucuagcauggcugccaau

SEQ ID NO: 1629202 - RNA, 16 nt, Human
acuucaucccucuggg

SEQ ID NO: 1629203 - RNA, 19 nt, Human
acuuccccuuccuaauucc

SEQ ID NO: 1629204 - RNA, 13 nt, Human
acuuccccuuccu

SEQ ID NO: 1629205 - RNA, 16 nt, Human
ucuaggaaauauuuau

SEQ ID NO: 1629206 - RNA, 13 nt, Human
ucuagccagagga

SEQ ID NO: 1629207 - RNA, 17 nt, Human
ucuaggaaauauuuauu

SEQ ID NO: 1629208 - RNA, 12 nt, Human
ucuaggaagacu

SEQ ID NO: 1629209 - RNA, 22 nt, Human
ucuaguuguuugauucagacag

SEQ ID NO: 1629210 - RNA, 22 nt, Human
ucuaguuugauuaaauucuugc

SEQ ID NO: 1629211 - RNA, 21 nt, Human
ucuaguuugauuaaauucuug

SEQ ID NO: 1629212 - RNA, 23 nt, Human
ucuaguuguuugauucagacagc

SEQ ID NO: 1629213 - RNA, 13 nt, Human
ucuauaaaccgaa

SEQ ID NO: 1629214 - RNA, 19 nt, Human
ucucacuauguugcccagg

SEQ ID NO: 1629215 - RNA, 17 nt, Human
ucucacuauguugccca

SEQ ID NO: 1629216 - RNA, 19 nt, Human
ucucaccuccugcugggca

SEQ ID NO: 1629217 - RNA, 17 nt, Human
ucucaccuccugcuggg

SEQ ID NO: 1629218 - RNA, 16 nt, Human
ucucaccuccugcugg

SEQ ID NO: 1629219 - RNA, 15 nt, Human
ucucaccuccugcug

SEQ ID NO: 1629220 - RNA, 14 nt, Human
ucucaccuccugcu

SEQ ID NO: 1629221 - RNA, 20 nt, Human
acuuaaauaaugugaaacug

SEQ ID NO: 1629222 - RNA, 13 nt, Human
acuuaagcacacu

SEQ ID NO: 1629223 - RNA, 17 nt, Human
acuuaaucuaaauggaa

SEQ ID NO: 1629224 - RNA, 19 nt, Human
acuuaaucuaaauggaacc

SEQ ID NO: 1629225 - RNA, 22 nt, Human
acuuaaucuaaauggaaccacu

SEQ ID NO: 1629226 - RNA, 16 nt, Human
acuuacacuuuaugca

SEQ ID NO: 1629227 - RNA, 22 nt, Human
acuuacuguacaugaaaacaca

SEQ ID NO: 1629228 - RNA, 14 nt, Human
acuuagcugggaga

SEQ ID NO: 1629229 - RNA, 17 nt, Human
acuuacacuuuaugcac

SEQ ID NO: 1629230 - RNA, 21 nt, Human
acuuacuguacaugaaaacac

SEQ ID NO: 1629231 - RNA, 15 nt, Human
acuuagguguggggg

SEQ ID NO: 1629232 - RNA, 15 nt, Human
ucuaaguaaaaccac

SEQ ID NO: 1629233 - RNA, 14 nt, Human
ucuaaguaaaacca

SEQ ID NO: 1629234 - RNA, 19 nt, Human
ucuaaguaaaaccacagca

SEQ ID NO: 1629235 - RNA, 20 nt, Human
ucuaaguaaaaccacagcag

SEQ ID NO: 1629236 - RNA, 12 nt, Human
uccugggcagcu

SEQ ID NO: 1629237 - RNA, 13 nt, Human
uccugggcagcug

SEQ ID NO: 1629238 - RNA, 14 nt, Human
uccugggcagcugc

SEQ ID NO: 1629239 - RNA, 18 nt, Human
uccugggagugagcuggu

SEQ ID NO: 1629240 - RNA, 21 nt, Human
ucuacagaggccaugggccuc

SEQ ID NO: 1629241 - RNA, 19 nt, Human
ucuacccagcgagcccugg

SEQ ID NO: 1629242 - RNA, 23 nt, Human
ucuacagcuaaucagcauucuca

SEQ ID NO: 1629243 - RNA, 20 nt, Human
ucuacagcuaaucagcauuc

SEQ ID NO: 1629244 - RNA, 18 nt, Human
acuguucucugcccucca

SEQ ID NO: 1629245 - RNA, 19 nt, Human
acuguucucugcccuccaa

SEQ ID NO: 1629246 - RNA, 17 nt, Human
acuguucucugcccucc

SEQ ID NO: 1629247 - RNA, 16 nt, Human
acuguucucugcccuc

SEQ ID NO: 1629248 - RNA, 19 nt, Human
ucuacccuggcacuauaau

SEQ ID NO: 1629249 - RNA, 14 nt, Human
ucuacccaggugcu

SEQ ID NO: 1629250 - RNA, 20 nt, Human
ucuacccagcgagcccuggu

SEQ ID NO: 1629251 - RNA, 21 nt, Human
ucuacccuggcacuauaaugu

SEQ ID NO: 1629252 - RNA, 15 nt, Human
acuugucaauaaaau

SEQ ID NO: 1629253 - RNA, 19 nt, Human
acuuguauuauguguguuu

SEQ ID NO: 1629254 - RNA, 18 nt, Human
acuuguauuauguguguu

SEQ ID NO: 1629255 - RNA, 14 nt, Human
acuugcuuuuaaaa

SEQ ID NO: 1629256 - RNA, 21 nt, Human
acuugucuuuggacccugagg

SEQ ID NO: 1629257 - RNA, 20 nt, Human
acuugucuuuggacccugag

SEQ ID NO: 1629258 - RNA, 22 nt, Human
acuuguggacacagcucuucuc

SEQ ID NO: 1629259 - RNA, 19 nt, Human
acuuguggacacagcucuu

SEQ ID NO: 1629260 - RNA, 13 nt, Human
acuuguguaaaua

SEQ ID NO: 1629261 - RNA, 18 nt, Human
ucucaccuccugcugggc

SEQ ID NO: 1629262 - RNA, 23 nt, Human
ucucacuauguugcccaggcagg

SEQ ID NO: 1629263 - RNA, 22 nt, Human
ucucacuauguugcccaggcag

SEQ ID NO: 1629264 - RNA, 21 nt, Human
ucucacuauguugcccaggca

SEQ ID NO: 1629265 - RNA, 20 nt, Human
ucucacuauguugcccaggc

SEQ ID NO: 1629266 - RNA, 22 nt, Human
acuugcagacucuacagaggcc

SEQ ID NO: 1629267 - RNA, 19 nt, Human
acuugcagacucuacagag

SEQ ID NO: 1629268 - RNA, 23 nt, Human
acuugcagacucuacagaggcca

SEQ ID NO: 1629269 - RNA, 16 nt, Human
acuugcucuugaugcc

SEQ ID NO: 1629270 - RNA, 20 nt, Human
acuugcucuugaugccuggc

SEQ ID NO: 1629271 - RNA, 18 nt, Human
acuugcucuugaugccug

SEQ ID NO: 1629272 - RNA, 17 nt, Human
acuugcucuugaugccu

SEQ ID NO: 1629273 - RNA, 21 nt, Human
ucucaggaaaucaaauaugca

SEQ ID NO: 1629274 - RNA, 14 nt, Human
ucucaggaaaucaa

SEQ ID NO: 1629275 - RNA, 23 nt, Human
ucucaggaaaucaaauaugcaaa

SEQ ID NO: 1629276 - RNA, 23 nt, Human
ucucagauuuuauuauguaaauc

SEQ ID NO: 1629277 - RNA, 22 nt, Human
ucucagauuuuauuauguaaau

SEQ ID NO: 1629278 - RNA, 13 nt, Human
ucucaggccagcu

SEQ ID NO: 1629279 - RNA, 12 nt, Human
ucucaggccagc

SEQ ID NO: 1629280 - RNA, 12 nt, Human
ucucaggccaaa

SEQ ID NO: 1629281 - RNA, 10 nt, Human
ucucaggcca

SEQ ID NO: 1629282 - RNA, 15 nt, Human
ucucauuuccaagca

SEQ ID NO: 1629283 - RNA, 14 nt, Human
ucucauuugucaca

SEQ ID NO: 1629284 - RNA, 19 nt, Human
ucucauuugccaauaauaa

SEQ ID NO: 1629285 - RNA, 16 nt, Human
ucuccaagcaggacau

SEQ ID NO: 1629286 - RNA, 13 nt, Human
ucuccaaaauaaa

SEQ ID NO: 1629287 - RNA, 16 nt, Human
ucucauuugucacaca

SEQ ID NO: 1629288 - RNA, 18 nt, Human
ucucaggccagcugcuug

SEQ ID NO: 1629289 - RNA, 17 nt, Human
ucucaggccagcugcuu

SEQ ID NO: 1629290 - RNA, 21 nt, Human
ucucaggccagcugcuugggc

SEQ ID NO: 1629291 - RNA, 20 nt, Human
ucucaugccucagccuccug

SEQ ID NO: 1629292 - RNA, 21 nt, Human
ucucaugccucagccuccuga

SEQ ID NO: 1629293 - RNA, 12 nt, Human
acuuugaccucu

SEQ ID NO: 1629294 - RNA, 13 nt, Human
acuuugaccucug

SEQ ID NO: 1629295 - RNA, 12 nt, Human
acuuuggauaau

SEQ ID NO: 1629296 - RNA, 19 nt, Human
acuuuggauaauaaggaaa

SEQ ID NO: 1629297 - RNA, 17 nt, Human
acuuuggauaauaagga

SEQ ID NO: 1629298 - RNA, 20 nt, Human
acuuuguuaguuucuccaag

SEQ ID NO: 1629299 - RNA, 14 nt, Human
acuuuguucuggcu

SEQ ID NO: 1629300 - RNA, 21 nt, Human
acuuuguuaguuucuccaagc

SEQ ID NO: 1629301 - RNA, 12 nt, Human
acuuuuguucuu

SEQ ID NO: 1629302 - RNA, 13 nt, Human
acuuuuguucuug

SEQ ID NO: 1629303 - RNA, 15 nt, Human
acuuuuguucuuggu

SEQ ID NO: 1629304 - RNA, 23 nt, Human
acuuuuguucuugguuuguaaau

SEQ ID NO: 1629305 - RNA, 15 nt, Human
ucuccuucaccuuug

SEQ ID NO: 1629306 - RNA, 14 nt, Human
ucuccuucaccuuu

SEQ ID NO: 1629307 - RNA, 17 nt, Human
agaaaaaauauuuuccc

SEQ ID NO: 1629308 - RNA, 18 nt, Human
ucuccuucaccuuugucc

SEQ ID NO: 1629309 - RNA, 16 nt, Human
ucuccuucaccuuugu

SEQ ID NO: 1629310 - RNA, 13 nt, Human
ucuccuuguguua

SEQ ID NO: 1629311 - RNA, 21 nt, Human
ucuccuuguguuacuaaguuu

SEQ ID NO: 1629312 - RNA, 23 nt, Human
ucuccgaccagacaccuugacag

SEQ ID NO: 1629313 - RNA, 17 nt, Human
ucuccgaccagacaccu

SEQ ID NO: 1629314 - RNA, 19 nt, Human
ucuccaagcaggacaugga

SEQ ID NO: 1629315 - RNA, 18 nt, Human
ucuccaagcaggacaugg

SEQ ID NO: 1629316 - RNA, 12 nt, Human
ucuccacccugc

SEQ ID NO: 1629317 - RNA, 23 nt, Human
ucuccccagcaagugagagcugg

SEQ ID NO: 1629318 - RNA, 16 nt, Human
ucuccucugcugcugg

SEQ ID NO: 1629319 - RNA, 15 nt, Human
ucuccuccagaguca

SEQ ID NO: 1629320 - RNA, 18 nt, Human
ucuccucugcugcuggcu

SEQ ID NO: 1629321 - RNA, 17 nt, Human
ucuccucugcugcuggc

SEQ ID NO: 1629322 - RNA, 20 nt, Human
acuuucugaaauaacauggc

SEQ ID NO: 1629323 - RNA, 12 nt, Human
acuuuaccuuuu

SEQ ID NO: 1629324 - RNA, 13 nt, Human
ugaccuuucaaua

SEQ ID NO: 1629325 - RNA, 12 nt, Human
ugaccuuucaau

SEQ ID NO: 1629326 - RNA, 21 nt, Human
ugacucguauaugucucaggu

SEQ ID NO: 1629327 - RNA, 17 nt, Human
agaugugaacacaucag

SEQ ID NO: 1629328 - RNA, 22 nt, Human
agauguauguacuucaugcugu

SEQ ID NO: 1629329 - RNA, 22 nt, Human
agaugugaacacaucagcuugc

SEQ ID NO: 1629330 - RNA, 15 nt, Human
ugaccuuuaagagaa

SEQ ID NO: 1629331 - RNA, 19 nt, Human
agauucauauuuacuucuu

SEQ ID NO: 1629332 - RNA, 21 nt, Human
agauuccagagaguggcuccu

SEQ ID NO: 1629333 - RNA, 22 nt, Human
agauuccagagaguggcuccuc

SEQ ID NO: 1629334 - RNA, 19 nt, Human
agauuucacucuccuuggu

SEQ ID NO: 1629335 - RNA, 16 nt, Human
agauucauauuuacuu

SEQ ID NO: 1629336 - RNA, 13 nt, Human
agauucauauuua

SEQ ID NO: 1629337 - RNA, 21 nt, Human
agauuagagaguguugaaacg

SEQ ID NO: 1629338 - RNA, 23 nt, Human
agauuagaauucuguauagauua

SEQ ID NO: 1629339 - RNA, 22 nt, Human
agauuagaauucuguauagauu

SEQ ID NO: 1629340 - RNA, 12 nt, Human
ugacuuacugua

SEQ ID NO: 1629341 - RNA, 20 nt, Human
ugacuuacuguacaugaaaa

SEQ ID NO: 1629342 - RNA, 16 nt, Human
agauuagaauucugua

SEQ ID NO: 1629343 - RNA, 15 nt, Human
agauuagaauucugu

SEQ ID NO: 1629344 - RNA, 16 nt, Human
ugacacuuaaaaaugg

SEQ ID NO: 1629345 - RNA, 15 nt, Human
ugacacuuaaaaaug

SEQ ID NO: 1629346 - RNA, 19 nt, Human
ugacacgaauauugcugau

SEQ ID NO: 1629347 - RNA, 16 nt, Human
ugacacgaauauugcu

SEQ ID NO: 1629348 - RNA, 22 nt, Human
ugacagggcacaccgggcacuc

SEQ ID NO: 1629349 - RNA, 19 nt, Human
ugacaggcaaugcuggcug

SEQ ID NO: 1629350 - RNA, 17 nt, Human
ugacaggcaaugcuggc

SEQ ID NO: 1629351 - RNA, 14 nt, Human
agauccuggaaauc

SEQ ID NO: 1629352 - RNA, 13 nt, Human
agauccuggaaau

SEQ ID NO: 1629353 - RNA, 18 nt, Human
agaucucuaacuucacca

SEQ ID NO: 1629354 - RNA, 18 nt, Human
agauccccaagccuggca

SEQ ID NO: 1629355 - RNA, 22 nt, Human
agaugcuagaacucccuuucaa

SEQ ID NO: 1629356 - RNA, 21 nt, Human
agaugcuagaacucccuuuca

SEQ ID NO: 1629357 - RNA, 22 nt, Human
agauguagccccucuccuggaa

SEQ ID NO: 1629358 - RNA, 19 nt, Human
agaugcuagaacucccuuu

SEQ ID NO: 1629359 - RNA, 21 nt, Human
agaugcaguucugaagaagau

SEQ ID NO: 1629360 - RNA, 16 nt, Human
agcaagggugauggga

SEQ ID NO: 1629361 - RNA, 17 nt, Human
agcaaggagauuuacaa

SEQ ID NO: 1629362 - RNA, 19 nt, Human
agcaaggagauuuacaacu

SEQ ID NO: 1629363 - RNA, 14 nt, Human
agcaaggagauuua

SEQ ID NO: 1629364 - RNA, 22 nt, Human
agcaagggugaugggaaagcau

SEQ ID NO: 1629365 - RNA, 20 nt, Human
agcaagggugaugggaaagc

SEQ ID NO: 1629366 - RNA, 15 nt, Human
agcaagucagaauag

SEQ ID NO: 1629367 - RNA, 16 nt, Human
agcaagugagagcugg

SEQ ID NO: 1629368 - RNA, 15 nt, Human
agcaagugagagcug

SEQ ID NO: 1629369 - RNA, 16 nt, Human
agcaagugagacccug

SEQ ID NO: 1629370 - RNA, 13 nt, Human
ugagccacugcac

SEQ ID NO: 1629371 - RNA, 12 nt, Human
ugagccacugca

SEQ ID NO: 1629372 - RNA, 14 nt, Human
ugagcauuagauuu

SEQ ID NO: 1629373 - RNA, 16 nt, Human
ugagcauuagauuucu

SEQ ID NO: 1629374 - RNA, 15 nt, Human
ugagcaaauguggcu

SEQ ID NO: 1629375 - RNA, 19 nt, Human
ugagccagauuucacucuc

SEQ ID NO: 1629376 - RNA, 18 nt, Human
ugagccagauuucacucu

SEQ ID NO: 1629377 - RNA, 18 nt, Human
ugagccacugcaccgggc

SEQ ID NO: 1629378 - RNA, 14 nt, Human
ugagccacugcacc

SEQ ID NO: 1629379 - RNA, 21 nt, Human
ugagccagauuucacucuccu

SEQ ID NO: 1629380 - RNA, 20 nt, Human
ugagccagauuucacucucc

SEQ ID NO: 1629381 - RNA, 18 nt, Human
agcaagugagagcugggu

SEQ ID NO: 1629382 - RNA, 17 nt, Human
agcaagugagagcuggg

SEQ ID NO: 1629383 - RNA, 21 nt, Human
agcacagcuucauuuccugug

SEQ ID NO: 1629384 - RNA, 22 nt, Human
agcacaugccucucucaggcca

SEQ ID NO: 1629385 - RNA, 21 nt, Human
agcacaugccucucucaggcc

SEQ ID NO: 1629386 - RNA, 20 nt, Human
agcacaugccucucucaggc

SEQ ID NO: 1629387 - RNA, 19 nt, Human
agcacaugccucucucagg

SEQ ID NO: 1629388 - RNA, 18 nt, Human
agcacaugccucucucag

SEQ ID NO: 1629389 - RNA, 16 nt, Human
agcaccaucucuccuc

SEQ ID NO: 1629390 - RNA, 23 nt, Human
agcacaugccucucucaggccaa

SEQ ID NO: 1629391 - RNA, 22 nt, Human
agcaccaaaagcuuaccaaggg

SEQ ID NO: 1629392 - RNA, 16 nt, Human
agcaccuccugccucg

SEQ ID NO: 1629393 - RNA, 14 nt, Human
agcaccuccugccu

SEQ ID NO: 1629394 - RNA, 13 nt, Human
agcaccuccugcc

SEQ ID NO: 1629395 - RNA, 17 nt, Human
agcaccuagccucgcuc

SEQ ID NO: 1629396 - RNA, 16 nt, Human
agauuuuccugaaaac

SEQ ID NO: 1629397 - RNA, 15 nt, Human
agauuuuccugaaaa

SEQ ID NO: 1629398 - RNA, 13 nt, Human
ugagacagcccgg

SEQ ID NO: 1629399 - RNA, 21 nt, Human
ugagacagaguuuucacucuu

SEQ ID NO: 1629400 - RNA, 11 nt, Human
ugagacagagu

SEQ ID NO: 1629401 - RNA, 20 nt, Human
ugagacagaaucucgcucug

SEQ ID NO: 1629402 - RNA, 12 nt, Human
ugagacagcucu

SEQ ID NO: 1629403 - RNA, 22 nt, Human
ugagacagcccgggcucugccu

SEQ ID NO: 1629404 - RNA, 20 nt, Human
ugagacucugucucagucca

SEQ ID NO: 1629405 - RNA, 20 nt, Human
ugagacucugucucaaaaaa

SEQ ID NO: 1629406 - RNA, 20 nt, Human
ugagacagcccgggcucugc

SEQ ID NO: 1629407 - RNA, 19 nt, Human
ugagacagcccgggcucug

SEQ ID NO: 1629408 - RNA, 18 nt, Human
ugagacagcccgggcucu

SEQ ID NO: 1629409 - RNA, 17 nt, Human
ugagacagcccgggcuc

SEQ ID NO: 1629410 - RNA, 20 nt, Human
ugagagacacacugaagaag

SEQ ID NO: 1629411 - RNA, 19 nt, Human
ugagagacacacugaagaa

SEQ ID NO: 1629412 - RNA, 17 nt, Human
ugagagacacacugaag

SEQ ID NO: 1629413 - RNA, 16 nt, Human
ugagagacacacugaa

SEQ ID NO: 1629414 - RNA, 13 nt, Human
ugagaugugaaca

SEQ ID NO: 1629415 - RNA, 23 nt, Human
ugagauguagccccucuccugga

SEQ ID NO: 1629416 - RNA, 23 nt, Human
ugagaggacuuuucuuuguggcu

SEQ ID NO: 1629417 - RNA, 17 nt, Human
ugagaggaaaucaccga

SEQ ID NO: 1629418 - RNA, 19 nt, Human
ugagaugugaacacaucag

SEQ ID NO: 1629419 - RNA, 18 nt, Human
ugagaugugaacacauca

SEQ ID NO: 1629420 - RNA, 24 nt, Human
ugagaugugaacacaucagcuugc

SEQ ID NO: 1629421 - RNA, 14 nt, Human
ugagauguguucac

SEQ ID NO: 1629422 - RNA, 22 nt, Human
ugagagacacacugaagaagca

SEQ ID NO: 1629423 - RNA, 21 nt, Human
ugagagacacacugaagaagc

SEQ ID NO: 1629424 - RNA, 14 nt, Human
ugagaggaaaucac

SEQ ID NO: 1629425 - RNA, 13 nt, Human
ugagaggaaauca

SEQ ID NO: 1629426 - RNA, 12 nt, Human
ugagaggaaauc

SEQ ID NO: 1629427 - RNA, 11 nt, Human
ugagaggaaau

SEQ ID NO: 1629428 - RNA, 10 nt, Human
ugagaggaaa

SEQ ID NO: 1629429 - RNA, 14 nt, Human
ugagagcugggugu

SEQ ID NO: 1629430 - RNA, 19 nt, Human
agagcugcccucuccuggg

SEQ ID NO: 1629431 - RNA, 20 nt, Human
agagcugcccucuccugggc

SEQ ID NO: 1629432 - RNA, 16 nt, Human
agagcugcccucuccu

SEQ ID NO: 1629433 - RNA, 17 nt, Human
agagcugcccucuccug

SEQ ID NO: 1629434 - RNA, 18 nt, Human
agagcugcccucuccugg

SEQ ID NO: 1629435 - RNA, 16 nt, Human
agagauugugguuuca

SEQ ID NO: 1629436 - RNA, 14 nt, Human
ugaaauaagccaga

SEQ ID NO: 1629437 - RNA, 16 nt, Human
ugaaauaacauggccu

SEQ ID NO: 1629438 - RNA, 17 nt, Human
ugaaauaacauggccuu

SEQ ID NO: 1629439 - RNA, 23 nt, Human
ugaaauaaacgucuuaaauauuc

SEQ ID NO: 1629440 - RNA, 22 nt, Human
ugaaauaaacgucuuaaauauu

SEQ ID NO: 1629441 - RNA, 18 nt, Human
ugaaauaaacgucuuaaa

SEQ ID NO: 1629442 - RNA, 13 nt, Human
ugaaauaaacguc

SEQ ID NO: 1629443 - RNA, 15 nt, Human
ugaaauuuccuggga

SEQ ID NO: 1629444 - RNA, 19 nt, Human
ugaaauuuuuauuaaauua

SEQ ID NO: 1629445 - RNA, 20 nt, Human
ugaaauuuuuauuaaauuau

SEQ ID NO: 1629446 - RNA, 21 nt, Human
ugaaauuuccugggagcuuuu

SEQ ID NO: 1629447 - RNA, 20 nt, Human
ugaaauuguaauuauaucug

SEQ ID NO: 1629448 - RNA, 19 nt, Human
ugaaauuguaauuauaucu

SEQ ID NO: 1629449 - RNA, 16 nt, Human
ugaaauuguaauuaua

SEQ ID NO: 1629450 - RNA, 15 nt, Human
ugaaauuguaauuau

SEQ ID NO: 1629451 - RNA, 14 nt, Human
ugaaauuguaauua

SEQ ID NO: 1629452 - RNA, 13 nt, Human
ugaaauuguaauu

SEQ ID NO: 1629453 - RNA, 23 nt, Human
ugaaauagacccacaagaggcag

SEQ ID NO: 1629454 - RNA, 13 nt, Human
ugaacaaauuuac

SEQ ID NO: 1629455 - RNA, 21 nt, Human
ugaaccaccacacccagccca

SEQ ID NO: 1629456 - RNA, 18 nt, Human
ugaacaaauuuacagaga

SEQ ID NO: 1629457 - RNA, 22 nt, Human
ugaaccaccacacccagcccac

SEQ ID NO: 1629458 - RNA, 18 nt, Human
ugaacccgggaggcagag

SEQ ID NO: 1629459 - RNA, 22 nt, Human
ugaacccauauuuguacaccaa

SEQ ID NO: 1629460 - RNA, 23 nt, Human
ugaacuagaguuuagcuggaaaa

SEQ ID NO: 1629461 - RNA, 22 nt, Human
ugaaccgaugagaaauaaaguu

SEQ ID NO: 1629462 - RNA, 11 nt, Human
ugaacuccugg

SEQ ID NO: 1629463 - RNA, 15 nt, Human
ugaacuccugaccuc

SEQ ID NO: 1629464 - RNA, 22 nt, Human
ugaagacaaugacuuacuguac

SEQ ID NO: 1629465 - RNA, 23 nt, Human
ugaagacaaugacuuacuguaca

SEQ ID NO: 1629466 - RNA, 13 nt, Human
ugaagacagagcu

SEQ ID NO: 1629467 - RNA, 20 nt, Human
ugaagauuuaccacuugugu

SEQ ID NO: 1629468 - RNA, 17 nt, Human
ugaagauuuaccacuug

SEQ ID NO: 1629469 - RNA, 15 nt, Human
ugaaguaauaugcac

SEQ ID NO: 1629470 - RNA, 14 nt, Human
ugaaguaagcaaag

SEQ ID NO: 1629471 - RNA, 13 nt, Human
ugaaguaagcaaa

SEQ ID NO: 1629472 - RNA, 16 nt, Human
ugaaguaauaugcaca

SEQ ID NO: 1629473 - RNA, 20 nt, Human
ugaaguaauaugcacacauu

SEQ ID NO: 1629474 - RNA, 21 nt, Human
ugaaguaauaugcacacauuu

SEQ ID NO: 1629475 - RNA, 22 nt, Human
ugaaguaauaugcacacauuuu

SEQ ID NO: 1629476 - RNA, 17 nt, Human
ugaaguacucauacaug

SEQ ID NO: 1629477 - RNA, 15 nt, Human
ugaaguaagcaaaga

SEQ ID NO: 1629478 - RNA, 12 nt, Human
ugaauaauacag

SEQ ID NO: 1629479 - RNA, 13 nt, Human
ugaagucacacag

SEQ ID NO: 1629480 - RNA, 13 nt, Human
ugaauaauacagu

SEQ ID NO: 1629481 - RNA, 23 nt, Human
ugaauaauguaagacaaauaugu

SEQ ID NO: 1629482 - RNA, 19 nt, Human
agagcuguucacagccaga

SEQ ID NO: 1629483 - RNA, 18 nt, Human
agagcuguucacagccag

SEQ ID NO: 1629484 - RNA, 23 nt, Human
agaggcagccccauucugccugc

SEQ ID NO: 1629485 - RNA, 22 nt, Human
agaggcagccccauucugccug

SEQ ID NO: 1629486 - RNA, 21 nt, Human
agaggcagccccauucugccu

SEQ ID NO: 1629487 - RNA, 24 nt, Human
agaggcagccccauucugccugcc

SEQ ID NO: 1629488 - RNA, 22 nt, Human
agaggcugccucucccaucacu

SEQ ID NO: 1629489 - RNA, 15 nt, Human
agagggagugacaga

SEQ ID NO: 1629490 - RNA, 20 nt, Human
agagggagugacagaggcag

SEQ ID NO: 1629491 - RNA, 13 nt, Human
agagguucaaaga

SEQ ID NO: 1629492 - RNA, 16 nt, Human
agagguucaaagauau

SEQ ID NO: 1629493 - RNA, 19 nt, Human
agagguucaaagauauuuu

SEQ ID NO: 1629494 - RNA, 20 nt, Human
agagguucaaagauauuuug

SEQ ID NO: 1629495 - RNA, 22 nt, Human
agaguaauccaagcaaauguga

SEQ ID NO: 1629496 - RNA, 20 nt, Human
agaguaauccaagcaaaugu

SEQ ID NO: 1629497 - RNA, 18 nt, Human
agaguaauccaagcaaau

SEQ ID NO: 1629498 - RNA, 17 nt, Human
ugaaagaggaaugaagu

SEQ ID NO: 1629499 - RNA, 22 nt, Human
ugaaagacuguacaaaguagaa

SEQ ID NO: 1629500 - RNA, 19 nt, Human
ugaaagacuguacaaagua

SEQ ID NO: 1629501 - RNA, 18 nt, Human
ugaaagacuguacaaagu

SEQ ID NO: 1629502 - RNA, 16 nt, Human
ugaaagacuguacaaa

SEQ ID NO: 1629503 - RNA, 22 nt, Human
ugaaagaaaauaccaaggaaca

SEQ ID NO: 1629504 - RNA, 18 nt, Human
ugaaagaggaaugaagua

SEQ ID NO: 1629505 - RNA, 21 nt, Human
agagaccaucccugaaggccc

SEQ ID NO: 1629506 - RNA, 19 nt, Human
agagaccaucccugaaggc

SEQ ID NO: 1629507 - RNA, 23 nt, Human
agagaccaucccugaaggccccg

SEQ ID NO: 1629508 - RNA, 22 nt, Human
agagaccaucccugaaggcccc

SEQ ID NO: 1629509 - RNA, 14 nt, Human
agagacuccugcag

SEQ ID NO: 1629510 - RNA, 13 nt, Human
agagacuccugca

SEQ ID NO: 1629511 - RNA, 12 nt, Human
agagacuccugc

SEQ ID NO: 1629512 - RNA, 15 nt, Human
agagacuccugcagg

SEQ ID NO: 1629513 - RNA, 15 nt, Human
agagaguguugaaac

SEQ ID NO: 1629514 - RNA, 17 nt, Human
agagaguggcuccuccc

SEQ ID NO: 1629515 - RNA, 16 nt, Human
agagaguguugaaacg

SEQ ID NO: 1629516 - RNA, 17 nt, Human
ugaaaauauuuguauca

SEQ ID NO: 1629517 - RNA, 15 nt, Human
ugaaaacacauuuuu

SEQ ID NO: 1629518 - RNA, 17 nt, Human
ugaaaacacauuuuucu

SEQ ID NO: 1629519 - RNA, 19 nt, Human
ugaaaacacauuuuucuua

SEQ ID NO: 1629520 - RNA, 20 nt, Human
ugaaaacacauuuuucuuag

SEQ ID NO: 1629521 - RNA, 14 nt, Human
ugaaaacacauuuu

SEQ ID NO: 1629522 - RNA, 12 nt, Human
ugaaaacacauu

SEQ ID NO: 1629523 - RNA, 13 nt, Human
ugaaaacacauuu

SEQ ID NO: 1629524 - RNA, 16 nt, Human
ucuuuuuuugugaugu

SEQ ID NO: 1629525 - RNA, 14 nt, Human
ucuuuuuuugugau

SEQ ID NO: 1629526 - RNA, 22 nt, Human
ugaaaauauuuguaucacaaau

SEQ ID NO: 1629527 - RNA, 21 nt, Human
ugaaaauauuuguaucacaaa

SEQ ID NO: 1629528 - RNA, 16 nt, Human
ugaaaaucgugacaac

SEQ ID NO: 1629529 - RNA, 13 nt, Human
ugaaagaaaauaa

SEQ ID NO: 1629530 - RNA, 17 nt, Human
ugaaacuggauuaaacu

SEQ ID NO: 1629531 - RNA, 18 nt, Human
ugaaacuggauuaaacuu

SEQ ID NO: 1629532 - RNA, 14 nt, Human
ugaaaauuaacaug

SEQ ID NO: 1629533 - RNA, 21 nt, Human
agacuggcacaguuuucugag

SEQ ID NO: 1629534 - RNA, 20 nt, Human
agacuggcacaguuuucuga

SEQ ID NO: 1629535 - RNA, 13 nt, Human
agacucugucuca

SEQ ID NO: 1629536 - RNA, 23 nt, Human
agacuggcacaguuuucugagaa

SEQ ID NO: 1629537 - RNA, 13 nt, Human
agacuccugcagg

SEQ ID NO: 1629538 - RNA, 21 nt, Human
agacuccagcuggguuggaaa

SEQ ID NO: 1629539 - RNA, 16 nt, Human
agacucccaagcugga

SEQ ID NO: 1629540 - RNA, 15 nt, Human
ucuuuaaugucacag

SEQ ID NO: 1629541 - RNA, 22 nt, Human
agacaggcaagcaccuccugcc

SEQ ID NO: 1629542 - RNA, 20 nt, Human
agacaggcaagcaccuccug

SEQ ID NO: 1629543 - RNA, 19 nt, Human
ucuuuaaugucacaggcag

SEQ ID NO: 1629544 - RNA, 18 nt, Human
ucuuuaaugucacaggca

SEQ ID NO: 1629545 - RNA, 12 nt, Human
ucuuuccugagg

SEQ ID NO: 1629546 - RNA, 22 nt, Human
agacuccaaagaaauguaaggg

SEQ ID NO: 1629547 - RNA, 15 nt, Human
agagacagaaagcag

SEQ ID NO: 1629548 - RNA, 14 nt, Human
agagacagaaagca

SEQ ID NO: 1629549 - RNA, 16 nt, Human
agagacacacugaaga

SEQ ID NO: 1629550 - RNA, 20 nt, Human
ucuuuguacagacaacaaac

SEQ ID NO: 1629551 - RNA, 15 nt, Human
ucuuuguacagacaa

SEQ ID NO: 1629552 - RNA, 14 nt, Human
ucuuuguacagaca

SEQ ID NO: 1629553 - RNA, 16 nt, Human
ucuuuguaaugaaaac

SEQ ID NO: 1629554 - RNA, 14 nt, Human
ucuuuguggcuucc

SEQ ID NO: 1629555 - RNA, 17 nt, Human
ucuuugucuacaccauu

SEQ ID NO: 1629556 - RNA, 22 nt, Human
ucuuuuuucuaaaguaaaaaca

SEQ ID NO: 1629557 - RNA, 21 nt, Human
ucuuuuuucuaaaguaaaaac

SEQ ID NO: 1629558 - RNA, 15 nt, Human
agacuuuggaaagag

SEQ ID NO: 1629559 - RNA, 17 nt, Human
agacuuuggaaagacuu

SEQ ID NO: 1629560 - RNA, 14 nt, Human
agacuguacaaagu

SEQ ID NO: 1629561 - RNA, 20 nt, Human
agacugguuccauggccucu

SEQ ID NO: 1629562 - RNA, 21 nt, Human
agacuggugacugauucuuca

SEQ ID NO: 1629563 - RNA, 20 nt, Human
agacuggugacugauucuuc

SEQ ID NO: 1629564 - RNA, 19 nt, Human
agagacacaagccuucggc

SEQ ID NO: 1629565 - RNA, 16 nt, Human
agagacacaagccuuc

SEQ ID NO: 1629566 - RNA, 19 nt, Human
agacuuuucuuucagccaa

SEQ ID NO: 1629567 - RNA, 19 nt, Human
agacuuuggaaagaguagg

SEQ ID NO: 1629568 - RNA, 12 nt, Human
agacuuuuauga

SEQ ID NO: 1629569 - RNA, 15 nt, Human
agacuuuuccaaccc

SEQ ID NO: 1629570 - RNA, 15 nt, Human
agacuuuuaugauac

SEQ ID NO: 1629571 - RNA, 20 nt, Human
agucagaucugccuaaggac

SEQ ID NO: 1629572 - RNA, 22 nt, Human
agucagaucugccuaaggacuu

SEQ ID NO: 1629573 - RNA, 21 nt, Human
agucagaucugccuaaggacu

SEQ ID NO: 1629574 - RNA, 21 nt, Human
agucagucauucagauaugau

SEQ ID NO: 1629575 - RNA, 15 nt, Human
agucagucauucaga

SEQ ID NO: 1629576 - RNA, 23 nt, Human
agucagaucugccuaaggacuuc

SEQ ID NO: 1629577 - RNA, 23 nt, Human
agucccaccuuggcugcagggag

SEQ ID NO: 1629578 - RNA, 21 nt, Human
agucccaccuuggcugcaggg

SEQ ID NO: 1629579 - RNA, 19 nt, Human
aguccccuguuuguuucug

SEQ ID NO: 1629580 - RNA, 14 nt, Human
aguccccuguuugu

SEQ ID NO: 1629581 - RNA, 21 nt, Human
ugucagcuccccucggagaag

SEQ ID NO: 1629582 - RNA, 20 nt, Human
ugucagcuccccucggagaa

SEQ ID NO: 1629583 - RNA, 23 nt, Human
ugucagcuccccucggagaagag

SEQ ID NO: 1629584 - RNA, 16 nt, Human
ugucagccauuccugu

SEQ ID NO: 1629585 - RNA, 18 nt, Human
agucacugagacagcccg

SEQ ID NO: 1629586 - RNA, 19 nt, Human
uguccaggcacugcugccc

SEQ ID NO: 1629587 - RNA, 21 nt, Human
uguccaggcacugcugcccag

SEQ ID NO: 1629588 - RNA, 20 nt, Human
uguccaggcacugcugccca

SEQ ID NO: 1629589 - RNA, 22 nt, Human
ugucccuaccgagucucuucuc

SEQ ID NO: 1629590 - RNA, 21 nt, Human
ugucccuaccgagucucuucu

SEQ ID NO: 1629591 - RNA, 20 nt, Human
ugucccuaccgagucucuuc

SEQ ID NO: 1629592 - RNA, 14 nt, Human
ugucccugcacuug

SEQ ID NO: 1629593 - RNA, 12 nt, Human
ugucccuuuucc

SEQ ID NO: 1629594 - RNA, 17 nt, Human
ugucccuuuuccuuuuu

SEQ ID NO: 1629595 - RNA, 21 nt, Human
aguauguuagugcaaauuguc

SEQ ID NO: 1629596 - RNA, 18 nt, Human
aguauguuagugcaaauu

SEQ ID NO: 1629597 - RNA, 21 nt, Human
aguauuagaauaccacaggaa

SEQ ID NO: 1629598 - RNA, 21 nt, Human
aguagcugggacuacaggcac

SEQ ID NO: 1629599 - RNA, 19 nt, Human
aguagcugggacuacaggc

SEQ ID NO: 1629600 - RNA, 22 nt, Human
aguagcugggacuacaggcacc

SEQ ID NO: 1629601 - RNA, 14 nt, Human
aguauuauaccuuu

SEQ ID NO: 1629602 - RNA, 15 nt, Human
aguauuauaccuuuu

SEQ ID NO: 1629603 - RNA, 11 nt, Human
aguauuguaca

SEQ ID NO: 1629604 - RNA, 23 nt, Human
aguauuguacaaaguauuaagca

SEQ ID NO: 1629605 - RNA, 22 nt, Human
aguauuguacaaaguauuaagc

SEQ ID NO: 1629606 - RNA, 20 nt, Human
aguauuguacaaaguauuaa

SEQ ID NO: 1629607 - RNA, 15 nt, Human
aguauuguacaaagu

SEQ ID NO: 1629608 - RNA, 20 nt, Human
agucacauuccaagccucau

SEQ ID NO: 1629609 - RNA, 15 nt, Human
ugucagcauagaagu

SEQ ID NO: 1629610 - RNA, 17 nt, Human
agucacugagacagccc

SEQ ID NO: 1629611 - RNA, 16 nt, Human
agucacugagacagcc

SEQ ID NO: 1629612 - RNA, 15 nt, Human
agucacugagacagc

SEQ ID NO: 1629613 - RNA, 16 nt, Human
aguauuguccaggucu

SEQ ID NO: 1629614 - RNA, 15 nt, Human
aguauuguccagguc

SEQ ID NO: 1629615 - RNA, 21 nt, Human
aguauuuaauucauguugccu

SEQ ID NO: 1629616 - RNA, 22 nt, Human
agucacagagauaauucuagcu

SEQ ID NO: 1629617 - RNA, 15 nt, Human
ugucaaaguggugag

SEQ ID NO: 1629618 - RNA, 14 nt, Human
ugucaaagugguga

SEQ ID NO: 1629619 - RNA, 11 nt, Human
uguauuaugug

SEQ ID NO: 1629620 - RNA, 15 nt, Human
uguauuagucacaga

SEQ ID NO: 1629621 - RNA, 19 nt, Human
ugucaaaguggugagaggc

SEQ ID NO: 1629622 - RNA, 16 nt, Human
ugucaaaguggugaga

SEQ ID NO: 1629623 - RNA, 14 nt, Human
aguagcugggacua

SEQ ID NO: 1629624 - RNA, 13 nt, Human
aguagcugggacu

SEQ ID NO: 1629625 - RNA, 14 nt, Human
uguauguguaagua

SEQ ID NO: 1629626 - RNA, 16 nt, Human
uguaucccaugagccu

SEQ ID NO: 1629627 - RNA, 15 nt, Human
uguaucccaugagcc

SEQ ID NO: 1629628 - RNA, 13 nt, Human
uguaugugugaag

SEQ ID NO: 1629629 - RNA, 12 nt, Human
uguaugugugaa

SEQ ID NO: 1629630 - RNA, 15 nt, Human
uguagagccaggguc

SEQ ID NO: 1629631 - RNA, 12 nt, Human
uguagagccagg

SEQ ID NO: 1629632 - RNA, 23 nt, Human
agguuuggacaaaauggaauacu

SEQ ID NO: 1629633 - RNA, 14 nt, Human
ugugaagcaaaauu

SEQ ID NO: 1629634 - RNA, 23 nt, Human
ugugaacugaacucugacaacag

SEQ ID NO: 1629635 - RNA, 14 nt, Human
ugugaacugaacuc

SEQ ID NO: 1629636 - RNA, 19 nt, Human
ugugagcacaaagguagcu

SEQ ID NO: 1629637 - RNA, 19 nt, Human
agucuccaaagucucugga

SEQ ID NO: 1629638 - RNA, 18 nt, Human
agucucccucccuugggg

SEQ ID NO: 1629639 - RNA, 14 nt, Human
agucucccucccuu

SEQ ID NO: 1629640 - RNA, 23 nt, Human
agugaaaaaggaggaagagaaaa

SEQ ID NO: 1629641 - RNA, 20 nt, Human
agugaaaaaggaggaagaga

SEQ ID NO: 1629642 - RNA, 17 nt, Human
agugaaaaaggaggaag

SEQ ID NO: 1629643 - RNA, 11 nt, Human
agugaaaaagg

SEQ ID NO: 1629644 - RNA, 16 nt, Human
agugaaagaggcagcu

SEQ ID NO: 1629645 - RNA, 22 nt, Human
agugaaagaggcagcuugaaac

SEQ ID NO: 1629646 - RNA, 14 nt, Human
agugagacagcucu

SEQ ID NO: 1629647 - RNA, 20 nt, Human
agugaaacucguuaauuugu

SEQ ID NO: 1629648 - RNA, 13 nt, Human
agugagacucugu

SEQ ID NO: 1629649 - RNA, 21 nt, Human
agugagacccugucucaaaaa

SEQ ID NO: 1629650 - RNA, 17 nt, Human
agugagacccugucuca

SEQ ID NO: 1629651 - RNA, 17 nt, Human
agugagacucugucuca

SEQ ID NO: 1629652 - RNA, 16 nt, Human
agugagacucugucuc

SEQ ID NO: 1629653 - RNA, 22 nt, Human
agugagacucugucucaaaaaa

SEQ ID NO: 1629654 - RNA, 16 nt, Human
agugagccgagauugu

SEQ ID NO: 1629655 - RNA, 16 nt, Human
ugugauggggcccugc

SEQ ID NO: 1629656 - RNA, 15 nt, Human
ugugauggggcccug

SEQ ID NO: 1629657 - RNA, 21 nt, Human
agugagcagucaggaaagaga

SEQ ID NO: 1629658 - RNA, 14 nt, Human
agugagagcugggu

SEQ ID NO: 1629659 - RNA, 18 nt, Human
ugugauggggcccugccu

SEQ ID NO: 1629660 - RNA, 17 nt, Human
ugugauggggcccugcc

SEQ ID NO: 1629661 - RNA, 14 nt, Human
ugucuucacaacag

SEQ ID NO: 1629662 - RNA, 21 nt, Human
ugucuugcaauggcagccuug

SEQ ID NO: 1629663 - RNA, 20 nt, Human
ugucuugcaauggcagccuu

SEQ ID NO: 1629664 - RNA, 18 nt, Human
ugucuugcaauggcagcc

SEQ ID NO: 1629665 - RNA, 17 nt, Human
ugucuugcaauggcagc

SEQ ID NO: 1629666 - RNA, 15 nt, Human
ugucuugcaauggca

SEQ ID NO: 1629667 - RNA, 23 nt, Human
ugugaaccaccacacccagccca

SEQ ID NO: 1629668 - RNA, 22 nt, Human
ugugaaccaccacacccagccc

SEQ ID NO: 1629669 - RNA, 17 nt, Human
ugugaaccaccacaccc

SEQ ID NO: 1629670 - RNA, 16 nt, Human
ugugaaccaccacacc

SEQ ID NO: 1629671 - RNA, 15 nt, Human
ugugaaccaccacac

SEQ ID NO: 1629672 - RNA, 22 nt, Human
ugugaacaguuguguuugaagc

SEQ ID NO: 1629673 - RNA, 17 nt, Human
ugucuuuaaaugcugcu

SEQ ID NO: 1629674 - RNA, 21 nt, Human
ugucuugccuuuuucauuauu

SEQ ID NO: 1629675 - RNA, 17 nt, Human
ugucuugccuuuuucau

SEQ ID NO: 1629676 - RNA, 16 nt, Human
ugucuugccuuuuuca

SEQ ID NO: 1629677 - RNA, 15 nt, Human
ugucuugccuuuuuc

SEQ ID NO: 1629678 - RNA, 14 nt, Human
ugucuuaauuaaaa

SEQ ID NO: 1629679 - RNA, 21 nt, Human
ugucucuuuaaugucacaggc

SEQ ID NO: 1629680 - RNA, 22 nt, Human
ugucucuugguccugcugcagu

SEQ ID NO: 1629681 - RNA, 22 nt, Human
ugucucuuuaaugucacaggca

SEQ ID NO: 1629682 - RNA, 21 nt, Human
ugucucuugguccugcugcag

SEQ ID NO: 1629683 - RNA, 20 nt, Human
ugucucuugguccugcugca

SEQ ID NO: 1629684 - RNA, 19 nt, Human
ugucucuugguccugcugc

SEQ ID NO: 1629685 - RNA, 18 nt, Human
ugucucuugguccugcug

SEQ ID NO: 1629686 - RNA, 17 nt, Human
ugucucuacuaaaaaua

SEQ ID NO: 1629687 - RNA, 13 nt, Human
ugucucugagagu

SEQ ID NO: 1629688 - RNA, 22 nt, Human
ugucucuggauuauauuaugaa

SEQ ID NO: 1629689 - RNA, 16 nt, Human
agucccugccaaugga

SEQ ID NO: 1629690 - RNA, 14 nt, Human
agucccugccaaug

SEQ ID NO: 1629691 - RNA, 13 nt, Human
agucccugccaau

SEQ ID NO: 1629692 - RNA, 23 nt, Human
aguccccuguuuguuucugaaag

SEQ ID NO: 1629693 - RNA, 17 nt, Human
uguacaugaaaacacau

SEQ ID NO: 1629694 - RNA, 18 nt, Human
uguacaugaaaacacauu

SEQ ID NO: 1629695 - RNA, 19 nt, Human
uguacaugaaaacacauuu

SEQ ID NO: 1629696 - RNA, 20 nt, Human
uguacaugaaaacacauuuu

SEQ ID NO: 1629697 - RNA, 21 nt, Human
uguagaagucacauuccugaa

SEQ ID NO: 1629698 - RNA, 19 nt, Human
uguacuugcucuugaugcc

SEQ ID NO: 1629699 - RNA, 15 nt, Human
uguacuugcucuuga

SEQ ID NO: 1629700 - RNA, 23 nt, Human
uguacaaaguagaagucuuagau

SEQ ID NO: 1629701 - RNA, 19 nt, Human
uguacaaaguagaagucuu

SEQ ID NO: 1629702 - RNA, 14 nt, Human
uguacaaaguauua

SEQ ID NO: 1629703 - RNA, 13 nt, Human
uguacaaaguauu

SEQ ID NO: 1629704 - RNA, 17 nt, Human
uguaauuugugauacaa

SEQ ID NO: 1629705 - RNA, 21 nt, Human
uguaauuugugauacaaugcu

SEQ ID NO: 1629706 - RNA, 18 nt, Human
uguaaggaaugauuaauu

SEQ ID NO: 1629707 - RNA, 16 nt, Human
uguaauuugugauaca

SEQ ID NO: 1629708 - RNA, 15 nt, Human
uguaaggcaaucaug

SEQ ID NO: 1629709 - RNA, 18 nt, Human
uguaagaaaauaucacuu

SEQ ID NO: 1629710 - RNA, 22 nt, Human
uguaagcucuacugaggugcua

SEQ ID NO: 1629711 - RNA, 15 nt, Human
uguaaggaaugauua

SEQ ID NO: 1629712 - RNA, 14 nt, Human
uguaaggaaugauu

SEQ ID NO: 1629713 - RNA, 13 nt, Human
uguaaggaaugau

SEQ ID NO: 1629714 - RNA, 20 nt, Human
agguugucugaagucacugc

SEQ ID NO: 1629715 - RNA, 16 nt, Human
agguugucugaaguca

SEQ ID NO: 1629716 - RNA, 20 nt, Human
aggugugagucaccaagccc

SEQ ID NO: 1629717 - RNA, 14 nt, Human
aggugugagucacc

SEQ ID NO: 1629718 - RNA, 20 nt, Human
aggugugacugaauuucuuu

SEQ ID NO: 1629719 - RNA, 20 nt, Human
aggugugagccaccacgccc

SEQ ID NO: 1629720 - RNA, 22 nt, Human
aggugugaaccaccacacccag

SEQ ID NO: 1629721 - RNA, 23 nt, Human
aggugugaaccaccacacccagc

SEQ ID NO: 1629722 - RNA, 18 nt, Human
aggugugacugaauuucu

SEQ ID NO: 1629723 - RNA, 13 nt, Human
agguggggcagcu

SEQ ID NO: 1629724 - RNA, 22 nt, Human
aggugauccacucgccuucauc

SEQ ID NO: 1629725 - RNA, 14 nt, Human
agguggggcagcuu

SEQ ID NO: 1629726 - RNA, 16 nt, Human
agguggggcagcuuga

SEQ ID NO: 1629727 - RNA, 16 nt, Human
uguaaaggaauuuaaa

SEQ ID NO: 1629728 - RNA, 19 nt, Human
uguaaauacaauuuuguuu

SEQ ID NO: 1629729 - RNA, 18 nt, Human
uguaaauacaauuuuguu

SEQ ID NO: 1629730 - RNA, 17 nt, Human
uguaaauacaauuuugu

SEQ ID NO: 1629731 - RNA, 16 nt, Human
uguaaauacaauuuug

SEQ ID NO: 1629732 - RNA, 13 nt, Human
ugguuuucuguuc

SEQ ID NO: 1629733 - RNA, 15 nt, Human
ugguuuucuguucuu

SEQ ID NO: 1629734 - RNA, 23 nt, Human
aggugauccacccaccucagccu

SEQ ID NO: 1629735 - RNA, 10 nt, Human
uguaaauccc

SEQ ID NO: 1629736 - RNA, 21 nt, Human
uguaaauacaauuuuguuucu

SEQ ID NO: 1629737 - RNA, 14 nt, Human
ugguuucagaaaug

SEQ ID NO: 1629738 - RNA, 15 nt, Human
ugguuucagaaaugu

SEQ ID NO: 1629739 - RNA, 12 nt, Human
ugguuuucuguu

SEQ ID NO: 1629740 - RNA, 18 nt, Human
ugguuuuaguugcaacuu

SEQ ID NO: 1629741 - RNA, 23 nt, Human
ugguucaggguuggccccugccc

SEQ ID NO: 1629742 - RNA, 22 nt, Human
ugguucaggguuggccccugcc

SEQ ID NO: 1629743 - RNA, 20 nt, Human
ugguucaggguuggccccug

SEQ ID NO: 1629744 - RNA, 17 nt, Human
ugguguuuccuggcacu

SEQ ID NO: 1629745 - RNA, 15 nt, Human
ugguguuuccuggca

SEQ ID NO: 1629746 - RNA, 13 nt, Human
ugguggcagcugc

SEQ ID NO: 1629747 - RNA, 12 nt, Human
ugguggcagcug

SEQ ID NO: 1629748 - RNA, 15 nt, Human
ugguguguguaugcg

SEQ ID NO: 1629749 - RNA, 23 nt, Human
ugguggcagcucaccucucccuu

SEQ ID NO: 1629750 - RNA, 20 nt, Human
ugguggcagcucaccucucc

SEQ ID NO: 1629751 - RNA, 19 nt, Human
ugguggcagcucaccucuc

SEQ ID NO: 1629752 - RNA, 16 nt, Human
ugguggcagcucaccu

SEQ ID NO: 1629753 - RNA, 12 nt, Human
ugguggcagcuc

SEQ ID NO: 1629754 - RNA, 15 nt, Human
ugguggcagagugga

SEQ ID NO: 1629755 - RNA, 17 nt, Human
agguccacaacacacag

SEQ ID NO: 1629756 - RNA, 21 nt, Human
aggucuugaacuccuggccuc

SEQ ID NO: 1629757 - RNA, 20 nt, Human
aggucuugaacuccuggccu

SEQ ID NO: 1629758 - RNA, 22 nt, Human
aggucuugaacuccuggccuca

SEQ ID NO: 1629759 - RNA, 15 nt, Human
aggucagugcaaaua

SEQ ID NO: 1629760 - RNA, 21 nt, Human
aggucaaggcugcagugagcc

SEQ ID NO: 1629761 - RNA, 22 nt, Human
aggucauuuuuuuuaagaaaaa

SEQ ID NO: 1629762 - RNA, 23 nt, Human
aggucauuuuuuuuaagaaaaag

SEQ ID NO: 1629763 - RNA, 20 nt, Human
aggguuuauguuuaggaugu

SEQ ID NO: 1629764 - RNA, 17 nt, Human
aggguugggcugguguc

SEQ ID NO: 1629765 - RNA, 17 nt, Human
agguaugcaaucaaauc

SEQ ID NO: 1629766 - RNA, 22 nt, Human
uggucugugagaugcuagaacu

SEQ ID NO: 1629767 - RNA, 12 nt, Human
uggucuguguga

SEQ ID NO: 1629768 - RNA, 16 nt, Human
uggucuuauuuguaaa

SEQ ID NO: 1629769 - RNA, 22 nt, Human
ugguccaugggccauaugaaaa

SEQ ID NO: 1629770 - RNA, 19 nt, Human
ugguccauagagagcaaga

SEQ ID NO: 1629771 - RNA, 13 nt, Human
uggucccacccca

SEQ ID NO: 1629772 - RNA, 19 nt, Human
uggucucgaacuccugacc

SEQ ID NO: 1629773 - RNA, 21 nt, Human
uggucucgaacuccugaccuu

SEQ ID NO: 1629774 - RNA, 20 nt, Human
uggucucgaacuccugaccu

SEQ ID NO: 1629775 - RNA, 15 nt, Human
aggguugggcuggug

SEQ ID NO: 1629776 - RNA, 17 nt, Human
aggguuggccccugccc

SEQ ID NO: 1629777 - RNA, 14 nt, Human
aggguuggccccug

SEQ ID NO: 1629778 - RNA, 13 nt, Human
aggguuggccccu

SEQ ID NO: 1629779 - RNA, 21 nt, Human
aggguggugaccucugccuga

SEQ ID NO: 1629780 - RNA, 19 nt, Human
aggguggugaccucugccu

SEQ ID NO: 1629781 - RNA, 18 nt, Human
aggguggugaccucugcc

SEQ ID NO: 1629782 - RNA, 17 nt, Human
aggguggugaccucugc

SEQ ID NO: 1629783 - RNA, 19 nt, Human
uggugaacagaacaaaagg

SEQ ID NO: 1629784 - RNA, 22 nt, Human
agggugaugggaaagcauugua

SEQ ID NO: 1629785 - RNA, 21 nt, Human
agggugaugggaaagcauugu

SEQ ID NO: 1629786 - RNA, 14 nt, Human
uggguggaugccug

SEQ ID NO: 1629787 - RNA, 22 nt, Human
ugggucuuguuuuuuuuuucca

SEQ ID NO: 1629788 - RNA, 23 nt, Human
uggguggaugccugguggcagcu

SEQ ID NO: 1629789 - RNA, 21 nt, Human
uggucaccaaaucagcugcua

SEQ ID NO: 1629790 - RNA, 23 nt, Human
uggucaccaaaucagcugcuacu

SEQ ID NO: 1629791 - RNA, 22 nt, Human
ugguaauuuaagauuccagaga

SEQ ID NO: 1629792 - RNA, 16 nt, Human
ugguccauagagagca

SEQ ID NO: 1629793 - RNA, 15 nt, Human
ugguccauagagagc

SEQ ID NO: 1629794 - RNA, 19 nt, Human
aggguacuaaggaaucuuu

SEQ ID NO: 1629795 - RNA, 16 nt, Human
aggguaucaggugcug

SEQ ID NO: 1629796 - RNA, 12 nt, Human
aggguagggugg

SEQ ID NO: 1629797 - RNA, 18 nt, Human
aggguaucaggugcugcc

SEQ ID NO: 1629798 - RNA, 16 nt, Human
aggggauagagagaga

SEQ ID NO: 1629799 - RNA, 15 nt, Human
agggggaaggcaggg

SEQ ID NO: 1629800 - RNA, 22 nt, Human
auaaguuaacuuccaauuuaca

SEQ ID NO: 1629801 - RNA, 23 nt, Human
auaauacaccacuacauucuguu

SEQ ID NO: 1629802 - RNA, 22 nt, Human
auaauaaggaaaaguuuaauau

SEQ ID NO: 1629803 - RNA, 19 nt, Human
auaauaaggaaaaguuuaa

SEQ ID NO: 1629804 - RNA, 18 nt, Human
auaauaaggaaaaguuua

SEQ ID NO: 1629805 - RNA, 17 nt, Human
auaauaaggaaaaguuu

SEQ ID NO: 1629806 - RNA, 16 nt, Human
auaauaaggaaaaguu

SEQ ID NO: 1629807 - RNA, 12 nt, Human
uuaccugggaaa

SEQ ID NO: 1629808 - RNA, 22 nt, Human
auaagaaccuuuugagugccuu

SEQ ID NO: 1629809 - RNA, 17 nt, Human
auaaguuaacuuccaau

SEQ ID NO: 1629810 - RNA, 23 nt, Human
auaagaaccuuuugagugccuua

SEQ ID NO: 1629811 - RNA, 21 nt, Human
auaaucuuucacaggggacag

SEQ ID NO: 1629812 - RNA, 19 nt, Human
auaauacaguaucucaggg

SEQ ID NO: 1629813 - RNA, 14 nt, Human
auaaugaauacuuu

SEQ ID NO: 1629814 - RNA, 19 nt, Human
auaauuauaugcuauuucu

SEQ ID NO: 1629815 - RNA, 17 nt, Human
auaauuauaugcuauuu

SEQ ID NO: 1629816 - RNA, 14 nt, Human
auaauucuacuuug

SEQ ID NO: 1629817 - RNA, 23 nt, Human
auaauuauaugcuauuucuauau

SEQ ID NO: 1629818 - RNA, 21 nt, Human
auaauuauaugcuauuucuau

SEQ ID NO: 1629819 - RNA, 22 nt, Human
uuagaugcaguucugaagaaga

SEQ ID NO: 1629820 - RNA, 23 nt, Human
uuagaugcaguucugaagaagau

SEQ ID NO: 1629821 - RNA, 16 nt, Human
uuacaggaaguacugg

SEQ ID NO: 1629822 - RNA, 15 nt, Human
uuacaggaaguacug

SEQ ID NO: 1629823 - RNA, 22 nt, Human
uuacaggaaguacuggagaaaa

SEQ ID NO: 1629824 - RNA, 18 nt, Human
uuacaggaaguacuggag

SEQ ID NO: 1629825 - RNA, 23 nt, Human
uuaccauuuugggguacccacug

SEQ ID NO: 1629826 - RNA, 12 nt, Human
auaacuggaaac

SEQ ID NO: 1629827 - RNA, 20 nt, Human
auaaccaguguuguggauuu

SEQ ID NO: 1629828 - RNA, 19 nt, Human
auaaaugugccuucauuuu

SEQ ID NO: 1629829 - RNA, 19 nt, Human
auaaauaaaguuuguugaa

SEQ ID NO: 1629830 - RNA, 13 nt, Human
auaaauaaaguuu

SEQ ID NO: 1629831 - RNA, 16 nt, Human
auaaaccgaacugaug

SEQ ID NO: 1629832 - RNA, 13 nt, Human
aguuuucugagaa

SEQ ID NO: 1629833 - RNA, 12 nt, Human
aguuuucugaga

SEQ ID NO: 1629834 - RNA, 17 nt, Human
aguuuucugagaaagac

SEQ ID NO: 1629835 - RNA, 14 nt, Human
aguuuucugagaaa

SEQ ID NO: 1629836 - RNA, 18 nt, Human
aguuuucugagaaagacu

SEQ ID NO: 1629837 - RNA, 23 nt, Human
auaaacacucuugaaaaaugcau

SEQ ID NO: 1629838 - RNA, 13 nt, Human
auaaacuuuaccu

SEQ ID NO: 1629839 - RNA, 15 nt, Human
auaaacuuuaccuuu

SEQ ID NO: 1629840 - RNA, 16 nt, Human
auaaacuuuaccuuuu

SEQ ID NO: 1629841 - RNA, 18 nt, Human
auaaacgucuuaaauauu

SEQ ID NO: 1629842 - RNA, 16 nt, Human
auaaacgucuuaaaua

SEQ ID NO: 1629843 - RNA, 15 nt, Human
auaaacgucuuaaau

SEQ ID NO: 1629844 - RNA, 18 nt, Human
uuauacccccugcaaagc

SEQ ID NO: 1629845 - RNA, 14 nt, Human
uuagccccauaauu

SEQ ID NO: 1629846 - RNA, 16 nt, Human
uuagcaguuugcuuug

SEQ ID NO: 1629847 - RNA, 18 nt, Human
uuauauaagcuuguauuc

SEQ ID NO: 1629848 - RNA, 22 nt, Human
uuauauauauuuuuuucugaaa

SEQ ID NO: 1629849 - RNA, 22 nt, Human
auacaaaaaaaaaaaaaaauua

SEQ ID NO: 1629850 - RNA, 12 nt, Human
auacaaaagcau

SEQ ID NO: 1629851 - RNA, 13 nt, Human
auacaaaagcaug

SEQ ID NO: 1629852 - RNA, 15 nt, Human
auacaaaagcaugug

SEQ ID NO: 1629853 - RNA, 22 nt, Human
auaauuuuuauauuugaaauau

SEQ ID NO: 1629854 - RNA, 21 nt, Human
auaauuuuuauauuugaaaua

SEQ ID NO: 1629855 - RNA, 19 nt, Human
auaauuuuuauauuugaaa

SEQ ID NO: 1629856 - RNA, 16 nt, Human
auaauuuuuauauuug

SEQ ID NO: 1629857 - RNA, 14 nt, Human
auaauuuuuauauu

SEQ ID NO: 1629858 - RNA, 20 nt, Human
auaauuuugugaagcaaaau

SEQ ID NO: 1629859 - RNA, 15 nt, Human
auaauuuugugaagc

SEQ ID NO: 1629860 - RNA, 14 nt, Human
auaauuuugugaag

SEQ ID NO: 1629861 - RNA, 13 nt, Human
auaauuuugugaa

SEQ ID NO: 1629862 - RNA, 22 nt, Human
uuaucaugugaaaucauucauu

SEQ ID NO: 1629863 - RNA, 20 nt, Human
uuaucaugugaaaucauuca

SEQ ID NO: 1629864 - RNA, 18 nt, Human
uuaucaugugaaaucauu

SEQ ID NO: 1629865 - RNA, 17 nt, Human
uuaucaugugaaaucau

SEQ ID NO: 1629866 - RNA, 22 nt, Human
auaccacaggaaccacaagacu

SEQ ID NO: 1629867 - RNA, 19 nt, Human
auaccagccaguaaauggg

SEQ ID NO: 1629868 - RNA, 21 nt, Human
auacuaaccagcagaaaugcc

SEQ ID NO: 1629869 - RNA, 13 nt, Human
auacuacaguuug

SEQ ID NO: 1629870 - RNA, 15 nt, Human
auacuacaguuuguu

SEQ ID NO: 1629871 - RNA, 16 nt, Human
auacuacaguuuguua

SEQ ID NO: 1629872 - RNA, 20 nt, Human
auacuacaguuuguuaguau

SEQ ID NO: 1629873 - RNA, 21 nt, Human
auacaguucggugagcuacaa

SEQ ID NO: 1629874 - RNA, 22 nt, Human
auacaggaaaagcugcugacag

SEQ ID NO: 1629875 - RNA, 20 nt, Human
auacaggaaaagcugcugac

SEQ ID NO: 1629876 - RNA, 19 nt, Human
auacaggaaaagcugcuga

SEQ ID NO: 1629877 - RNA, 14 nt, Human
auacaggaaaagcu

SEQ ID NO: 1629878 - RNA, 20 nt, Human
auacaucccuuaccugggaa

SEQ ID NO: 1629879 - RNA, 20 nt, Human
auacauaaacaagaccacgu

SEQ ID NO: 1629880 - RNA, 16 nt, Human
auacauuugauaaagu

SEQ ID NO: 1629881 - RNA, 19 nt, Human
aguuauggcuauaggugcu

SEQ ID NO: 1629882 - RNA, 20 nt, Human
aguuauuauauuuacaaaug

SEQ ID NO: 1629883 - RNA, 18 nt, Human
uguucuuuccaaaguaca

SEQ ID NO: 1629884 - RNA, 20 nt, Human
uguucuuuccaaaguacacu

SEQ ID NO: 1629885 - RNA, 18 nt, Human
aguuacccaaauuaagag

SEQ ID NO: 1629886 - RNA, 17 nt, Human
aguuacccaaauuaaga

SEQ ID NO: 1629887 - RNA, 16 nt, Human
uguugggccaggagcc

SEQ ID NO: 1629888 - RNA, 13 nt, Human
uguugggccagga

SEQ ID NO: 1629889 - RNA, 13 nt, Human
uguugucagcuga

SEQ ID NO: 1629890 - RNA, 21 nt, Human
uguuguacucaauuuuaacaa

SEQ ID NO: 1629891 - RNA, 15 nt, Human
aguucagagcugccc

SEQ ID NO: 1629892 - RNA, 16 nt, Human
aguucagagcugcccu

SEQ ID NO: 1629893 - RNA, 17 nt, Human
aguucagagcugcccuc

SEQ ID NO: 1629894 - RNA, 18 nt, Human
aguucagagcugcccucu

SEQ ID NO: 1629895 - RNA, 19 nt, Human
aguucagagcugcccucuc

SEQ ID NO: 1629896 - RNA, 21 nt, Human
aguuauuuuuauuuauuuaaa

SEQ ID NO: 1629897 - RNA, 17 nt, Human
aguucccuacuuccugu

SEQ ID NO: 1629898 - RNA, 22 nt, Human
aguguacauggaauaacaugua

SEQ ID NO: 1629899 - RNA, 21 nt, Human
aguguacauggaauaacaugu

SEQ ID NO: 1629900 - RNA, 19 nt, Human
agugggugaauaauacagu

SEQ ID NO: 1629901 - RNA, 21 nt, Human
agugguuccuaauccucuagg

SEQ ID NO: 1629902 - RNA, 16 nt, Human
aguggugcgaucuggg

SEQ ID NO: 1629903 - RNA, 13 nt, Human
aguggcagcugcu

SEQ ID NO: 1629904 - RNA, 12 nt, Human
aguggcagcugc

SEQ ID NO: 1629905 - RNA, 20 nt, Human
aguggcagcugcuuuugucu

SEQ ID NO: 1629906 - RNA, 14 nt, Human
aguggcagcugcuu

SEQ ID NO: 1629907 - RNA, 18 nt, Human
agugggugaauaauacag

SEQ ID NO: 1629908 - RNA, 13 nt, Human
agugggugaauaa

SEQ ID NO: 1629909 - RNA, 18 nt, Human
agugggggaucacagccu

SEQ ID NO: 1629910 - RNA, 20 nt, Human
agugggggaguggccacaga

SEQ ID NO: 1629911 - RNA, 19 nt, Human
agugggggaguggccacag

SEQ ID NO: 1629912 - RNA, 13 nt, Human
uguucugggacac

SEQ ID NO: 1629913 - RNA, 15 nt, Human
uguucugggacacag

SEQ ID NO: 1629914 - RNA, 14 nt, Human
uguucugggacaca

SEQ ID NO: 1629915 - RNA, 14 nt, Human
uguucuuaauucuu

SEQ ID NO: 1629916 - RNA, 16 nt, Human
uguucuuaauucuuag

SEQ ID NO: 1629917 - RNA, 19 nt, Human
uguucuugguuuguaaauu

SEQ ID NO: 1629918 - RNA, 13 nt, Human
uguucuuuccaaa

SEQ ID NO: 1629919 - RNA, 14 nt, Human
uguucuuuccaaag

SEQ ID NO: 1629920 - RNA, 17 nt, Human
uguucuugguuuguaaa

SEQ ID NO: 1629921 - RNA, 18 nt, Human
uguucuugguuuguaaau

SEQ ID NO: 1629922 - RNA, 23 nt, Human
aguguacauggaauaacauguaa

SEQ ID NO: 1629923 - RNA, 16 nt, Human
uguucccauucuugca

SEQ ID NO: 1629924 - RNA, 14 nt, Human
uuaaaaucauuucu

SEQ ID NO: 1629925 - RNA, 17 nt, Human
uuaaaccgccaaggcug

SEQ ID NO: 1629926 - RNA, 19 nt, Human
uuaaaauauuccugcauuu

SEQ ID NO: 1629927 - RNA, 16 nt, Human
uuaaaauauuccugca

SEQ ID NO: 1629928 - RNA, 15 nt, Human
uuaaauaaaucauaa

SEQ ID NO: 1629929 - RNA, 13 nt, Human
uuaaauaaaucau

SEQ ID NO: 1629930 - RNA, 20 nt, Human
uuaaauaaugugaaacugga

SEQ ID NO: 1629931 - RNA, 21 nt, Human
uuaaauaaugugaaacuggau

SEQ ID NO: 1629932 - RNA, 22 nt, Human
uuaaauaaugugaaacuggauu

SEQ ID NO: 1629933 - RNA, 18 nt, Human
uuaaaaaagaaacauuug

SEQ ID NO: 1629934 - RNA, 15 nt, Human
uuaaaaaagaaacau

SEQ ID NO: 1629935 - RNA, 20 nt, Human
aguugccagucaccccggcc

SEQ ID NO: 1629936 - RNA, 18 nt, Human
uuaaaaaguggaaaaaua

SEQ ID NO: 1629937 - RNA, 17 nt, Human
uuaaaacaacacucaca

SEQ ID NO: 1629938 - RNA, 19 nt, Human
aguuugugcugguguaugu

SEQ ID NO: 1629939 - RNA, 22 nt, Human
aguuuucacucuuauugcccac

SEQ ID NO: 1629940 - RNA, 13 nt, Human
uuaaauucuugca

SEQ ID NO: 1629941 - RNA, 16 nt, Human
uuaaauucuugcaaag

SEQ ID NO: 1629942 - RNA, 20 nt, Human
uuaaauucuugcaaaguauc

SEQ ID NO: 1629943 - RNA, 15 nt, Human
aguuucuccaagcag

SEQ ID NO: 1629944 - RNA, 13 nt, Human
aguuucuccaagc

SEQ ID NO: 1629945 - RNA, 21 nt, Human
aguuucuccaagcaggacaug

SEQ ID NO: 1629946 - RNA, 16 nt, Human
aguuucucagcuccca

SEQ ID NO: 1629947 - RNA, 16 nt, Human
aguuucguuuucaaaa

SEQ ID NO: 1629948 - RNA, 15 nt, Human
aguuucguuuucaaa

SEQ ID NO: 1629949 - RNA, 16 nt, Human
aguucugaagaagaug

SEQ ID NO: 1629950 - RNA, 15 nt, Human
aguucugaagaagau

SEQ ID NO: 1629951 - RNA, 14 nt, Human
aguucugaagaaga

SEQ ID NO: 1629952 - RNA, 13 nt, Human
aguucugaagaag

SEQ ID NO: 1629953 - RNA, 21 nt, Human
aguugauagcacagacccugc

SEQ ID NO: 1629954 - RNA, 20 nt, Human
aguugauagcacagacccug

SEQ ID NO: 1629955 - RNA, 19 nt, Human
aguugauagcacagacccu

SEQ ID NO: 1629956 - RNA, 15 nt, Human
aguugauagcacaga

SEQ ID NO: 1629957 - RNA, 21 nt, Human
aguugauaugccuuuucccaa

SEQ ID NO: 1629958 - RNA, 23 nt, Human
aguugauagcacagacccugccc

SEQ ID NO: 1629959 - RNA, 22 nt, Human
aguugauagcacagacccugcc

SEQ ID NO: 1629960 - RNA, 13 nt, Human
aguugauucagcu

SEQ ID NO: 1629961 - RNA, 18 nt, Human
aguugauucagcucugca

SEQ ID NO: 1629962 - RNA, 17 nt, Human
aguugauucagcucugc

SEQ ID NO: 1629963 - RNA, 15 nt, Human
aguugauucagcucu

SEQ ID NO: 1629964 - RNA, 14 nt, Human
aguugauucagcuc

SEQ ID NO: 1629965 - RNA, 23 nt, Human
aguugauucagcucugcaagaau

SEQ ID NO: 1629966 - RNA, 19 nt, Human
aguugcaacuuuguauaaa

SEQ ID NO: 1629967 - RNA, 15 nt, Human
uguuugcuaagcauu

SEQ ID NO: 1629968 - RNA, 16 nt, Human
uguuugccucugccuc

SEQ ID NO: 1629969 - RNA, 14 nt, Human
uguuugccucugcc

SEQ ID NO: 1629970 - RNA, 15 nt, Human
uguuugcaucugaaa

SEQ ID NO: 1629971 - RNA, 14 nt, Human
uguugucagcugaa

SEQ ID NO: 1629972 - RNA, 19 nt, Human
uguuugcuaagcauuccaa

SEQ ID NO: 1629973 - RNA, 15 nt, Human
uguuuggggaugaga

SEQ ID NO: 1629974 - RNA, 19 nt, Human
uguuuggggaugagaaagg

SEQ ID NO: 1629975 - RNA, 20 nt, Human
uguuuuauaauuuugugaag

SEQ ID NO: 1629976 - RNA, 13 nt, Human
uguuuuauaauuu

SEQ ID NO: 1629977 - RNA, 15 nt, Human
uguuuucaguguaca

SEQ ID NO: 1629978 - RNA, 17 nt, Human
uguuuucaguguacaug

SEQ ID NO: 1629979 - RNA, 15 nt, Human
uguuuucucuugaga

SEQ ID NO: 1629980 - RNA, 16 nt, Human
aguucucuccuucuuc

SEQ ID NO: 1629981 - RNA, 13 nt, Human
aguucucuccuuc

SEQ ID NO: 1629982 - RNA, 15 nt, Human
ugcagaagacaguau

SEQ ID NO: 1629983 - RNA, 22 nt, Human
ugcagacaggcaagcaccuccu

SEQ ID NO: 1629984 - RNA, 14 nt, Human
ugcagaagacagua

SEQ ID NO: 1629985 - RNA, 11 nt, Human
ugcacacauuu

SEQ ID NO: 1629986 - RNA, 12 nt, Human
ugcacacauuuu

SEQ ID NO: 1629987 - RNA, 13 nt, Human
ugcacacauuuuu

SEQ ID NO: 1629988 - RNA, 15 nt, Human
ugcacacauuuuuua

SEQ ID NO: 1629989 - RNA, 17 nt, Human
ugcacuccccugcuggg

SEQ ID NO: 1629990 - RNA, 16 nt, Human
ugcacuccccugcugg

SEQ ID NO: 1629991 - RNA, 19 nt, Human
ugcacuccccugcugggug

SEQ ID NO: 1629992 - RNA, 21 nt, Human
agcccugguggcagugggagc

SEQ ID NO: 1629993 - RNA, 17 nt, Human
agccgagaucacgccac

SEQ ID NO: 1629994 - RNA, 21 nt, Human
agccgagauagccaaggccaa

SEQ ID NO: 1629995 - RNA, 21 nt, Human
agcccuuagcagggaaacagc

SEQ ID NO: 1629996 - RNA, 16 nt, Human
agcccuuagcagggaa

SEQ ID NO: 1629997 - RNA, 17 nt, Human
ugcagacucuacagagg

SEQ ID NO: 1629998 - RNA, 16 nt, Human
ugcagacucuacagag

SEQ ID NO: 1629999 - RNA, 18 nt, Human
ugcagacucuacagaggc

SEQ ID NO: 1630000 - RNA, 23 nt, Human
agccucugaaaaccaauguucuc

SEQ ID NO: 1630001 - RNA, 21 nt, Human
agccuccaagcuccaucucca

SEQ ID NO: 1630002 - RNA, 17 nt, Human
agccuccaugcugccuc

SEQ ID NO: 1630003 - RNA, 23 nt, Human
ugcagccucaaccuccugggcua

SEQ ID NO: 1630004 - RNA, 22 nt, Human
ugcagccucaaccuccugggcu

SEQ ID NO: 1630005 - RNA, 21 nt, Human
ugcagccucaaccuccugggc

SEQ ID NO: 1630006 - RNA, 18 nt, Human
agccgagaucacgccacu

SEQ ID NO: 1630007 - RNA, 20 nt, Human
agccucaaccuccugggcua

SEQ ID NO: 1630008 - RNA, 18 nt, Human
agccucacaguccuuacc

SEQ ID NO: 1630009 - RNA, 17 nt, Human
agccucacaguccuuac

SEQ ID NO: 1630010 - RNA, 22 nt, Human
agccucagucucccucccuugg

SEQ ID NO: 1630011 - RNA, 20 nt, Human
agccucagucucccucccuu

SEQ ID NO: 1630012 - RNA, 19 nt, Human
agccucagucucccucccu

SEQ ID NO: 1630013 - RNA, 16 nt, Human
agccucagucucccuc

SEQ ID NO: 1630014 - RNA, 13 nt, Human
agccucagucucc

SEQ ID NO: 1630015 - RNA, 22 nt, Human
agccccauucugccugcccagg

SEQ ID NO: 1630016 - RNA, 21 nt, Human
agccccauucugccugcccag

SEQ ID NO: 1630017 - RNA, 18 nt, Human
agccccaaaacucuccuc

SEQ ID NO: 1630018 - RNA, 17 nt, Human
agccccaaaacucuccu

SEQ ID NO: 1630019 - RNA, 16 nt, Human
agccccaaaacucucc

SEQ ID NO: 1630020 - RNA, 21 nt, Human
ugcaaaccaucauugaaaucu

SEQ ID NO: 1630021 - RNA, 23 nt, Human
agccccauucugccugcccaggc

SEQ ID NO: 1630022 - RNA, 16 nt, Human
agcccugguggcagug

SEQ ID NO: 1630023 - RNA, 15 nt, Human
agcccugguggcagu

SEQ ID NO: 1630024 - RNA, 14 nt, Human
agcccugguggcag

SEQ ID NO: 1630025 - RNA, 18 nt, Human
ugcacacaccagagccca

SEQ ID NO: 1630026 - RNA, 17 nt, Human
ugcacacaccagagccc

SEQ ID NO: 1630027 - RNA, 21 nt, Human
ugcacacaccagagcccaccu

SEQ ID NO: 1630028 - RNA, 22 nt, Human
ugcacacaccagagcccaccuu

SEQ ID NO: 1630029 - RNA, 17 nt, Human
agcccugcuuugggcug

SEQ ID NO: 1630030 - RNA, 20 nt, Human
agcccugcuuugggcugccc

SEQ ID NO: 1630031 - RNA, 19 nt, Human
agcccugcuuugggcugcc

SEQ ID NO: 1630032 - RNA, 17 nt, Human
agccagcaguucagagc

SEQ ID NO: 1630033 - RNA, 19 nt, Human
agccagcaguucagagcug

SEQ ID NO: 1630034 - RNA, 15 nt, Human
agccagcaguucaga

SEQ ID NO: 1630035 - RNA, 11 nt, Human
agccagaggag

SEQ ID NO: 1630036 - RNA, 10 nt, Human
agccagagga

SEQ ID NO: 1630037 - RNA, 19 nt, Human
agccacugcaccgggccac

SEQ ID NO: 1630038 - RNA, 18 nt, Human
agccacugcaccgggcca

SEQ ID NO: 1630039 - RNA, 20 nt, Human
agccacugcaccgggccaca

SEQ ID NO: 1630040 - RNA, 22 nt, Human
agccagcaguucagagcugccc

SEQ ID NO: 1630041 - RNA, 20 nt, Human
agccagcaguucagagcugc

SEQ ID NO: 1630042 - RNA, 21 nt, Human
agccagcaguucagagcugcc

SEQ ID NO: 1630043 - RNA, 18 nt, Human
ugauuaaguaaugauaac

SEQ ID NO: 1630044 - RNA, 19 nt, Human
ugauuaaccacuucagcug

SEQ ID NO: 1630045 - RNA, 20 nt, Human
ugauuaaauucuugcaaagu

SEQ ID NO: 1630046 - RNA, 17 nt, Human
ugauggugaugaaaugu

SEQ ID NO: 1630047 - RNA, 13 nt, Human
ugauggugcaaug

SEQ ID NO: 1630048 - RNA, 16 nt, Human
ugauggugaugaaaug

SEQ ID NO: 1630049 - RNA, 15 nt, Human
ugauggugaugaaau

SEQ ID NO: 1630050 - RNA, 15 nt, Human
ugauggugcaaugac

SEQ ID NO: 1630051 - RNA, 19 nt, Human
ugauuaaauucuugcaaag

SEQ ID NO: 1630052 - RNA, 23 nt, Human
ugauuaaguaaugauaacuggaa

SEQ ID NO: 1630053 - RNA, 20 nt, Human
ugauuaaccacuucagcuga

SEQ ID NO: 1630054 - RNA, 15 nt, Human
ugauuaauuaaaaca

SEQ ID NO: 1630055 - RNA, 15 nt, Human
agccacgguguucug

SEQ ID NO: 1630056 - RNA, 17 nt, Human
ugauuaauggaaauguu

SEQ ID NO: 1630057 - RNA, 12 nt, Human
ugaugaagaagu

SEQ ID NO: 1630058 - RNA, 11 nt, Human
ugaugaagaag

SEQ ID NO: 1630059 - RNA, 21 nt, Human
ugauccucccaccucagccuc

SEQ ID NO: 1630060 - RNA, 16 nt, Human
ugauccucccaccuca

SEQ ID NO: 1630061 - RNA, 22 nt, Human
ugauccucccaccucagccucc

SEQ ID NO: 1630062 - RNA, 15 nt, Human
ugauccucccaccuc

SEQ ID NO: 1630063 - RNA, 16 nt, Human
ugauccuaguuccacc

SEQ ID NO: 1630064 - RNA, 19 nt, Human
ugaugggaaagcauuguaa

SEQ ID NO: 1630065 - RNA, 21 nt, Human
ugaugggcaacccccagccug

SEQ ID NO: 1630066 - RNA, 14 nt, Human
ugaugggauuuggu

SEQ ID NO: 1630067 - RNA, 19 nt, Human
ugauggggcccugccuccu

SEQ ID NO: 1630068 - RNA, 16 nt, Human
ugauggggcccugccu

SEQ ID NO: 1630069 - RNA, 15 nt, Human
ugauggggcccugcc

SEQ ID NO: 1630070 - RNA, 14 nt, Human
ugauggggcccugc

SEQ ID NO: 1630071 - RNA, 16 nt, Human
ugaugagaggaaauca

SEQ ID NO: 1630072 - RNA, 15 nt, Human
ugaugagaggaaauc

SEQ ID NO: 1630073 - RNA, 14 nt, Human
ugaugagaggaaau

SEQ ID NO: 1630074 - RNA, 13 nt, Human
ugaugagaggaaa

SEQ ID NO: 1630075 - RNA, 17 nt, Human
ugauuuggggauauuuu

SEQ ID NO: 1630076 - RNA, 16 nt, Human
ugauuucuaugcugag

SEQ ID NO: 1630077 - RNA, 15 nt, Human
ugauuucuaugcuga

SEQ ID NO: 1630078 - RNA, 12 nt, Human
ugauuucuaugc

SEQ ID NO: 1630079 - RNA, 22 nt, Human
ugauuuccguuaaaauaccagc

SEQ ID NO: 1630080 - RNA, 17 nt, Human
ugauuucagcucacugc

SEQ ID NO: 1630081 - RNA, 16 nt, Human
ugauucauaaugacuu

SEQ ID NO: 1630082 - RNA, 18 nt, Human
agcccaggaaaggcucca

SEQ ID NO: 1630083 - RNA, 21 nt, Human
ugauucauaaugacuuaagca

SEQ ID NO: 1630084 - RNA, 14 nt, Human
agcccaggaaaggc

SEQ ID NO: 1630085 - RNA, 23 nt, Human
agcccagcuugaaaccuucacuu

SEQ ID NO: 1630086 - RNA, 13 nt, Human
ugauucuccugcc

SEQ ID NO: 1630087 - RNA, 16 nt, Human
ugauucucaugccuca

SEQ ID NO: 1630088 - RNA, 15 nt, Human
ugauucucaugccuc

SEQ ID NO: 1630089 - RNA, 14 nt, Human
ugauucucaugccu

SEQ ID NO: 1630090 - RNA, 13 nt, Human
ugauucucaugcc

SEQ ID NO: 1630091 - RNA, 23 nt, Human
ugauucccaagcucugcuccucu

SEQ ID NO: 1630092 - RNA, 22 nt, Human
ugauucccaagcucugcuccuc

SEQ ID NO: 1630093 - RNA, 13 nt, Human
agccaguaaaugg

SEQ ID NO: 1630094 - RNA, 22 nt, Human
agccaguaaaugggggugcauu

SEQ ID NO: 1630095 - RNA, 21 nt, Human
agccaguaaaugggggugcau

SEQ ID NO: 1630096 - RNA, 22 nt, Human
agcccacuucugccauauucug

SEQ ID NO: 1630097 - RNA, 15 nt, Human
agcccacuucugcca

SEQ ID NO: 1630098 - RNA, 14 nt, Human
agcccacuucugcc

SEQ ID NO: 1630099 - RNA, 13 nt, Human
agcccacuucugc

SEQ ID NO: 1630100 - RNA, 16 nt, Human
agcccacuguacuugc

SEQ ID NO: 1630101 - RNA, 14 nt, Human
agcccacuguacuu

SEQ ID NO: 1630102 - RNA, 16 nt, Human
ugccccauucaacauc

SEQ ID NO: 1630103 - RNA, 23 nt, Human
ugccccgaacauguuuuucuucu

SEQ ID NO: 1630104 - RNA, 20 nt, Human
ugcccuaaaguguauuuuuu

SEQ ID NO: 1630105 - RNA, 18 nt, Human
ugcccccucugcccugcg

SEQ ID NO: 1630106 - RNA, 17 nt, Human
ugcccccucugcccugc

SEQ ID NO: 1630107 - RNA, 16 nt, Human
ugcccccucugcccug

SEQ ID NO: 1630108 - RNA, 15 nt, Human
ugcccccucugcccu

SEQ ID NO: 1630109 - RNA, 14 nt, Human
ugcccccucugccc

SEQ ID NO: 1630110 - RNA, 18 nt, Human
ugcccaggccccugccac

SEQ ID NO: 1630111 - RNA, 17 nt, Human
ugcccaggccccugcca

SEQ ID NO: 1630112 - RNA, 15 nt, Human
ugcccaggccccugc

SEQ ID NO: 1630113 - RNA, 20 nt, Human
ugcccagccccuucugaccc

SEQ ID NO: 1630114 - RNA, 17 nt, Human
ugcccagccccuucuga

SEQ ID NO: 1630115 - RNA, 16 nt, Human
ugcccagccccuucug

SEQ ID NO: 1630116 - RNA, 13 nt, Human
ugcccagccccuu

SEQ ID NO: 1630117 - RNA, 20 nt, Human
ugcccaaagaugcagccggu

SEQ ID NO: 1630118 - RNA, 17 nt, Human
ugcccaaagaugcagcc

SEQ ID NO: 1630119 - RNA, 22 nt, Human
ugccauuuaaagcuuauuaaaa

SEQ ID NO: 1630120 - RNA, 16 nt, Human
agcuccaagcucccag

SEQ ID NO: 1630121 - RNA, 15 nt, Human
agcuccaagcuccca

SEQ ID NO: 1630122 - RNA, 18 nt, Human
agcuccaagaauuucuag

SEQ ID NO: 1630123 - RNA, 17 nt, Human
agcucaggugucccugc

SEQ ID NO: 1630124 - RNA, 15 nt, Human
agcuccaagaauuuc

SEQ ID NO: 1630125 - RNA, 13 nt, Human
agcucagggccug

SEQ ID NO: 1630126 - RNA, 12 nt, Human
agcucagggccu

SEQ ID NO: 1630127 - RNA, 19 nt, Human
agcuauucaguaauaacuc

SEQ ID NO: 1630128 - RNA, 19 nt, Human
agcucagggccuggcucag

SEQ ID NO: 1630129 - RNA, 14 nt, Human
agcucagggccugg

SEQ ID NO: 1630130 - RNA, 20 nt, Human
agcucagggccuggcucagg

SEQ ID NO: 1630131 - RNA, 13 nt, Human
agcgugagccacu

SEQ ID NO: 1630132 - RNA, 21 nt, Human
agcuaggccuggccagaugca

SEQ ID NO: 1630133 - RNA, 17 nt, Human
agcuaucguaaaauuaa

SEQ ID NO: 1630134 - RNA, 20 nt, Human
agcggggacagcuccuucug

SEQ ID NO: 1630135 - RNA, 19 nt, Human
agcggggacagcuccuucu

SEQ ID NO: 1630136 - RNA, 23 nt, Human
agcggcuggcagcccaccccuca

SEQ ID NO: 1630137 - RNA, 22 nt, Human
agcggggacagcuccuucuguc

SEQ ID NO: 1630138 - RNA, 13 nt, Human
agcggcuggcagc

SEQ ID NO: 1630139 - RNA, 18 nt, Human
ugccagcuuaucucaggg

SEQ ID NO: 1630140 - RNA, 20 nt, Human
ugcauuugaggucuguucuu

SEQ ID NO: 1630141 - RNA, 21 nt, Human
ugcauuugaggucuguucuuu

SEQ ID NO: 1630142 - RNA, 17 nt, Human
ugccacugccucuuccu

SEQ ID NO: 1630143 - RNA, 13 nt, Human
ugccacugccucu

SEQ ID NO: 1630144 - RNA, 20 nt, Human
ugccacugccucuuccuccc

SEQ ID NO: 1630145 - RNA, 19 nt, Human
ugccacugccucuuccucc

SEQ ID NO: 1630146 - RNA, 18 nt, Human
ugccacugccucuuccuc

SEQ ID NO: 1630147 - RNA, 18 nt, Human
agccuuccagggguggga

SEQ ID NO: 1630148 - RNA, 15 nt, Human
agccuugaacuuuga

SEQ ID NO: 1630149 - RNA, 23 nt, Human
agccuugaacuuugaccucugca

SEQ ID NO: 1630150 - RNA, 16 nt, Human
agccuugaacuuugac

SEQ ID NO: 1630151 - RNA, 22 nt, Human
agccuugaacuuugaccucugc

SEQ ID NO: 1630152 - RNA, 22 nt, Human
agcgauucuucugcuucagccu

SEQ ID NO: 1630153 - RNA, 23 nt, Human
agccuugaccauucuccaccugc

SEQ ID NO: 1630154 - RNA, 20 nt, Human
ugcauuuaaaagauacaguu

SEQ ID NO: 1630155 - RNA, 19 nt, Human
ugcauuugaggucuguucu

SEQ ID NO: 1630156 - RNA, 13 nt, Human
ugcauuuccugac

SEQ ID NO: 1630157 - RNA, 23 nt, Human
agcucugcccauccugccccuga

SEQ ID NO: 1630158 - RNA, 21 nt, Human
agcucugcagagcaggaaaca

SEQ ID NO: 1630159 - RNA, 17 nt, Human
agcucuaucaccaagga

SEQ ID NO: 1630160 - RNA, 19 nt, Human
agcuccagcucaccagccc

SEQ ID NO: 1630161 - RNA, 18 nt, Human
agcuccagcucaccagcc

SEQ ID NO: 1630162 - RNA, 21 nt, Human
agcuccagcucaccagcccca

SEQ ID NO: 1630163 - RNA, 21 nt, Human
agcuccaucuccacuccagau

SEQ ID NO: 1630164 - RNA, 23 nt, Human
agcuccuucuguccuacucugug

SEQ ID NO: 1630165 - RNA, 12 nt, Human
ugcccucuccug

SEQ ID NO: 1630166 - RNA, 13 nt, Human
ugcccucuccugg

SEQ ID NO: 1630167 - RNA, 14 nt, Human
ugcccucuccuggg

SEQ ID NO: 1630168 - RNA, 15 nt, Human
ugcccucuccugggc

SEQ ID NO: 1630169 - RNA, 22 nt, Human
ugcccucuccugggcagcugcc

SEQ ID NO: 1630170 - RNA, 23 nt, Human
ugcccucuccugggcagcugccu

SEQ ID NO: 1630171 - RNA, 16 nt, Human
ugcccucuccugggca

SEQ ID NO: 1630172 - RNA, 17 nt, Human
ugcccucuccugggcag

SEQ ID NO: 1630173 - RNA, 18 nt, Human
ugcccucuccugggcagc

SEQ ID NO: 1630174 - RNA, 20 nt, Human
ugcccucuccugggcagcug

SEQ ID NO: 1630175 - RNA, 20 nt, Human
ugcccuaaugcgcaggcugg

SEQ ID NO: 1630176 - RNA, 23 nt, Human
ugcccuaaugcgcaggcuggccc

SEQ ID NO: 1630177 - RNA, 19 nt, Human
agcuccaagcucccaggca

SEQ ID NO: 1630178 - RNA, 18 nt, Human
agcuccaagcucccaggc

SEQ ID NO: 1630179 - RNA, 17 nt, Human
agcuccaagcucccagg

SEQ ID NO: 1630180 - RNA, 14 nt, Human
ugcccugcccaccu

SEQ ID NO: 1630181 - RNA, 17 nt, Human
agcuccagcucaccagc

SEQ ID NO: 1630182 - RNA, 13 nt, Human
agcuccagcucac

SEQ ID NO: 1630183 - RNA, 19 nt, Human
ugcccuguuaaaagaugaa

SEQ ID NO: 1630184 - RNA, 22 nt, Human
ugcccuuaccugccaggaagcc

SEQ ID NO: 1630185 - RNA, 18 nt, Human
ugcccugugggcccccaa

SEQ ID NO: 1630186 - RNA, 15 nt, Human
ugcccugugggcccc

SEQ ID NO: 1630187 - RNA, 17 nt, Human
agcucuucuccaggcug

SEQ ID NO: 1630188 - RNA, 16 nt, Human
agcucuucuccaggcu

SEQ ID NO: 1630189 - RNA, 15 nt, Human
agcucuucuccaggc

SEQ ID NO: 1630190 - RNA, 15 nt, Human
ugccucaccccuugc

SEQ ID NO: 1630191 - RNA, 20 nt, Human
ugccgcagcccugcagaggg

SEQ ID NO: 1630192 - RNA, 18 nt, Human
ugccucagaaaacaagga

SEQ ID NO: 1630193 - RNA, 15 nt, Human
ugccucagccucccg

SEQ ID NO: 1630194 - RNA, 15 nt, Human
ugccucagccuccug

SEQ ID NO: 1630195 - RNA, 22 nt, Human
ugccucccaucacccgcuaaga

SEQ ID NO: 1630196 - RNA, 16 nt, Human
ugccuccccuccucug

SEQ ID NO: 1630197 - RNA, 17 nt, Human
ugccucucucaggccaa

SEQ ID NO: 1630198 - RNA, 12 nt, Human
ugccucucugca

SEQ ID NO: 1630199 - RNA, 11 nt, Human
ugccucucugc

SEQ ID NO: 1630200 - RNA, 11 nt, Human
ugccuccccuc

SEQ ID NO: 1630201 - RNA, 12 nt, Human
ugccuccccucc

SEQ ID NO: 1630202 - RNA, 13 nt, Human
ugccuccccuccu

SEQ ID NO: 1630203 - RNA, 14 nt, Human
ugccuccccuccuc

SEQ ID NO: 1630204 - RNA, 15 nt, Human
ugccuccccuccucu

SEQ ID NO: 1630205 - RNA, 17 nt, Human
agcugcccucuccuggg

SEQ ID NO: 1630206 - RNA, 18 nt, Human
agcugcccucuccugggc

SEQ ID NO: 1630207 - RNA, 19 nt, Human
agcugcccucuccugggca

SEQ ID NO: 1630208 - RNA, 20 nt, Human
agcugcccucuccugggcag

SEQ ID NO: 1630209 - RNA, 21 nt, Human
agcugcccucuccugggcagc

SEQ ID NO: 1630210 - RNA, 13 nt, Human
agcugccuguuca

SEQ ID NO: 1630211 - RNA, 24 nt, Human
agcugcuuuugucuaugggacuca

SEQ ID NO: 1630212 - RNA, 23 nt, Human
agcugcuuuugucuaugggacuc

SEQ ID NO: 1630213 - RNA, 19 nt, Human
ugccugcccaggccccugc

SEQ ID NO: 1630214 - RNA, 18 nt, Human
ugccugcccaggccccug

SEQ ID NO: 1630215 - RNA, 17 nt, Human
ugccugcccaggccccu

SEQ ID NO: 1630216 - RNA, 12 nt, Human
ugccucugccuc

SEQ ID NO: 1630217 - RNA, 20 nt, Human
ugccugcccaggccccugcc

SEQ ID NO: 1630218 - RNA, 11 nt, Human
ugccucugccu

SEQ ID NO: 1630219 - RNA, 16 nt, Human
ugccucugacacacag

SEQ ID NO: 1630220 - RNA, 14 nt, Human
ugccucugacacac

SEQ ID NO: 1630221 - RNA, 23 nt, Human
ugccucucugcaggucccuaaua

SEQ ID NO: 1630222 - RNA, 15 nt, Human
ugccucucugcaggu

SEQ ID NO: 1630223 - RNA, 22 nt, Human
uggcacaguuuucugagaaaga

SEQ ID NO: 1630224 - RNA, 20 nt, Human
uggcacaucagcacgauuuc

SEQ ID NO: 1630225 - RNA, 12 nt, Human
uggauguucuga

SEQ ID NO: 1630226 - RNA, 22 nt, Human
uggauuaaacuuaaucuaaaug

SEQ ID NO: 1630227 - RNA, 22 nt, Human
uggcagaguugaagacagagcu

SEQ ID NO: 1630228 - RNA, 21 nt, Human
uggcagaguugaagacagagc

SEQ ID NO: 1630229 - RNA, 16 nt, Human
uggcacccggccccug

SEQ ID NO: 1630230 - RNA, 15 nt, Human
uggcacccggccccu

SEQ ID NO: 1630231 - RNA, 21 nt, Human
uggcacaucagcacgauuucu

SEQ ID NO: 1630232 - RNA, 12 nt, Human
uggcagccccug

SEQ ID NO: 1630233 - RNA, 16 nt, Human
uggcagccgugccuuc

SEQ ID NO: 1630234 - RNA, 20 nt, Human
aggccacaagacccuugugg

SEQ ID NO: 1630235 - RNA, 16 nt, Human
uggcagccucuucaaa

SEQ ID NO: 1630236 - RNA, 15 nt, Human
uggcagccucuucaa

SEQ ID NO: 1630237 - RNA, 23 nt, Human
uggcagccgugccuucagcucua

SEQ ID NO: 1630238 - RNA, 13 nt, Human
uggcagccuuggc

SEQ ID NO: 1630239 - RNA, 12 nt, Human
aggccagagaca

SEQ ID NO: 1630240 - RNA, 18 nt, Human
uggacgagaaaacaauaa

SEQ ID NO: 1630241 - RNA, 18 nt, Human
aggcauuuguuugaacug

SEQ ID NO: 1630242 - RNA, 16 nt, Human
aggccaaacucaccug

SEQ ID NO: 1630243 - RNA, 15 nt, Human
aggccaaaggaagca

SEQ ID NO: 1630244 - RNA, 14 nt, Human
aggccaaaggaagc

SEQ ID NO: 1630245 - RNA, 20 nt, Human
aggccaaacucaccugcccc

SEQ ID NO: 1630246 - RNA, 23 nt, Human
aggccaaaggaagcacaugccuc

SEQ ID NO: 1630247 - RNA, 20 nt, Human
uggaguucaucuugaauugu

SEQ ID NO: 1630248 - RNA, 17 nt, Human
uggaguucaucuugaau

SEQ ID NO: 1630249 - RNA, 16 nt, Human
uggaguucaucuugaa

SEQ ID NO: 1630250 - RNA, 19 nt, Human
uggaugccugguggcagcu

SEQ ID NO: 1630251 - RNA, 18 nt, Human
uggaugccugguggcagc

SEQ ID NO: 1630252 - RNA, 20 nt, Human
uggaugccugguggcagcug

SEQ ID NO: 1630253 - RNA, 16 nt, Human
aggccacaagacccuu

SEQ ID NO: 1630254 - RNA, 15 nt, Human
aggccacaagacccu

SEQ ID NO: 1630255 - RNA, 19 nt, Human
uggagucagacagaugugg

SEQ ID NO: 1630256 - RNA, 15 nt, Human
uggccgggagccuga

SEQ ID NO: 1630257 - RNA, 21 nt, Human
uggccccugcccggcugcgga

SEQ ID NO: 1630258 - RNA, 19 nt, Human
uggcccgacagccuggcac

SEQ ID NO: 1630259 - RNA, 18 nt, Human
uggcccgacagccuggca

SEQ ID NO: 1630260 - RNA, 17 nt, Human
uggcccgacagccuggc

SEQ ID NO: 1630261 - RNA, 16 nt, Human
uggcccgacagccugg

SEQ ID NO: 1630262 - RNA, 15 nt, Human
uggcccgacagccug

SEQ ID NO: 1630263 - RNA, 14 nt, Human
uggcccgacagccu

SEQ ID NO: 1630264 - RNA, 21 nt, Human
aggccuggccagaugcaccag

SEQ ID NO: 1630265 - RNA, 17 nt, Human
aggccuggccagaugca

SEQ ID NO: 1630266 - RNA, 16 nt, Human
aggccuggccagaugc

SEQ ID NO: 1630267 - RNA, 15 nt, Human
aggccuggccagaug

SEQ ID NO: 1630268 - RNA, 23 nt, Human
aggccuggccagaugcaccagcc

SEQ ID NO: 1630269 - RNA, 22 nt, Human
aggccuggccagaugcaccagc

SEQ ID NO: 1630270 - RNA, 23 nt, Human
aggccugggggcugggcagagga

SEQ ID NO: 1630271 - RNA, 12 nt, Human
uggccuggcccc

SEQ ID NO: 1630272 - RNA, 18 nt, Human
uggccucugcacuccccu

SEQ ID NO: 1630273 - RNA, 23 nt, Human
uggccgggcgcgguggcucacgc

SEQ ID NO: 1630274 - RNA, 17 nt, Human
uggccucugcacucccc

SEQ ID NO: 1630275 - RNA, 15 nt, Human
uggccucugcacucc

SEQ ID NO: 1630276 - RNA, 14 nt, Human
uggccucugcacuc

SEQ ID NO: 1630277 - RNA, 15 nt, Human
aggcccucugcccac

SEQ ID NO: 1630278 - RNA, 14 nt, Human
aggcccucugccca

SEQ ID NO: 1630279 - RNA, 13 nt, Human
aggcccucugccc

SEQ ID NO: 1630280 - RNA, 13 nt, Human
aggccugccuguu

SEQ ID NO: 1630281 - RNA, 15 nt, Human
uggcaugggaaugaa

SEQ ID NO: 1630282 - RNA, 12 nt, Human
uggcaugggaau

SEQ ID NO: 1630283 - RNA, 22 nt, Human
uggcaugggaaugaaugucagu

SEQ ID NO: 1630284 - RNA, 17 nt, Human
uggccaggcuggucuca

SEQ ID NO: 1630285 - RNA, 20 nt, Human
uggccaggcuggucucgaac

SEQ ID NO: 1630286 - RNA, 20 nt, Human
aggcucucaggccagcugcu

SEQ ID NO: 1630287 - RNA, 19 nt, Human
aggcucucaggccagcugc

SEQ ID NO: 1630288 - RNA, 18 nt, Human
aggcucucaggccagcug

SEQ ID NO: 1630289 - RNA, 16 nt, Human
aggcucucaggccagc

SEQ ID NO: 1630290 - RNA, 15 nt, Human
aggcucucaggccag

SEQ ID NO: 1630291 - RNA, 14 nt, Human
aggcucucaggcca

SEQ ID NO: 1630292 - RNA, 12 nt, Human
aggcucucaggc

SEQ ID NO: 1630293 - RNA, 11 nt, Human
aggcucucagg

SEQ ID NO: 1630294 - RNA, 15 nt, Human
aggcucugcccuugg

SEQ ID NO: 1630295 - RNA, 14 nt, Human
aggcucugcccuug

SEQ ID NO: 1630296 - RNA, 13 nt, Human
aggcucugcccuu

SEQ ID NO: 1630297 - RNA, 12 nt, Human
aggcucugcccu

SEQ ID NO: 1630298 - RNA, 11 nt, Human
aggcucugccc

SEQ ID NO: 1630299 - RNA, 21 nt, Human
aggcucucaggccagcugcuu

SEQ ID NO: 1630300 - RNA, 19 nt, Human
aggcucgagcaugccugga

SEQ ID NO: 1630301 - RNA, 18 nt, Human
aggcucgagcaugccugg

SEQ ID NO: 1630302 - RNA, 17 nt, Human
aggcucgagcaugccug

SEQ ID NO: 1630303 - RNA, 15 nt, Human
aggcucgagcaugcc

SEQ ID NO: 1630304 - RNA, 21 nt, Human
aggcucgagcaugccuggaug

SEQ ID NO: 1630305 - RNA, 12 nt, Human
aggcucgagcau

SEQ ID NO: 1630306 - RNA, 19 nt, Human
aggcuccuuuagcgcccag

SEQ ID NO: 1630307 - RNA, 20 nt, Human
aggcuccugccaccacgccc

SEQ ID NO: 1630308 - RNA, 14 nt, Human
aggcuccugccacc

SEQ ID NO: 1630309 - RNA, 17 nt, Human
aggcuggcgugcagugg

SEQ ID NO: 1630310 - RNA, 13 nt, Human
aggcuggcgugca

SEQ ID NO: 1630311 - RNA, 19 nt, Human
aggcuggcccugcccuggu

SEQ ID NO: 1630312 - RNA, 14 nt, Human
aggcuggcccugcc

SEQ ID NO: 1630313 - RNA, 12 nt, Human
aggcuggcccug

SEQ ID NO: 1630314 - RNA, 18 nt, Human
aggcuggcccugcccugg

SEQ ID NO: 1630315 - RNA, 17 nt, Human
aggcuggcccugcccug

SEQ ID NO: 1630316 - RNA, 16 nt, Human
aggcuggcccugcccu

SEQ ID NO: 1630317 - RNA, 15 nt, Human
aggcuggcccugccc

SEQ ID NO: 1630318 - RNA, 16 nt, Human
aggcucugcccuuggu

SEQ ID NO: 1630319 - RNA, 13 nt, Human
aggcucuggagcc

SEQ ID NO: 1630320 - RNA, 15 nt, Human
aggcucuggagccca

SEQ ID NO: 1630321 - RNA, 14 nt, Human
aggcucuggagccc

SEQ ID NO: 1630322 - RNA, 19 nt, Human
aggcucuggagcccacugu

SEQ ID NO: 1630323 - RNA, 18 nt, Human
aggcucuggagcccacug

SEQ ID NO: 1630324 - RNA, 23 nt, Human
aggcugcucuugaacuccugacc

SEQ ID NO: 1630325 - RNA, 11 nt, Human
uggcugcugaa

SEQ ID NO: 1630326 - RNA, 17 nt, Human
uggcuuaaaacaacacu

SEQ ID NO: 1630327 - RNA, 15 nt, Human
uggcuguuggcuggg

SEQ ID NO: 1630328 - RNA, 13 nt, Human
uggcuguuggcug

SEQ ID NO: 1630329 - RNA, 14 nt, Human
uggcugugucuccc

SEQ ID NO: 1630330 - RNA, 23 nt, Human
uggcuucacggaagagccuugcg

SEQ ID NO: 1630331 - RNA, 16 nt, Human
ugggaaaggggaaguu

SEQ ID NO: 1630332 - RNA, 16 nt, Human
uggcuucccgcucagc

SEQ ID NO: 1630333 - RNA, 15 nt, Human
uggcuucccgcucag

SEQ ID NO: 1630334 - RNA, 17 nt, Human
uggcuucccgcucagcc

SEQ ID NO: 1630335 - RNA, 18 nt, Human
uggcuucccgcucagccc

SEQ ID NO: 1630336 - RNA, 13 nt, Human
ugggaacuagacu

SEQ ID NO: 1630337 - RNA, 15 nt, Human
uggcuaugcauuuga

SEQ ID NO: 1630338 - RNA, 17 nt, Human
uggcuaugcauuugaaa

SEQ ID NO: 1630339 - RNA, 14 nt, Human
uggcuaugcauuug

SEQ ID NO: 1630340 - RNA, 19 nt, Human
uggcuaugcauuugaaaau

SEQ ID NO: 1630341 - RNA, 22 nt, Human
uggcuauuagagaucaaccccu

SEQ ID NO: 1630342 - RNA, 14 nt, Human
aggcugggagagcc

SEQ ID NO: 1630343 - RNA, 22 nt, Human
uggcuagagguucaaagauauu

SEQ ID NO: 1630344 - RNA, 20 nt, Human
aggcuggcgugcaguggugc

SEQ ID NO: 1630345 - RNA, 18 nt, Human
aggcuggcgugcaguggu

SEQ ID NO: 1630346 - RNA, 21 nt, Human
uggcucuuccaggcugggaga

SEQ ID NO: 1630347 - RNA, 20 nt, Human
uggcucuuccaggcugggag

SEQ ID NO: 1630348 - RNA, 18 nt, Human
uggcucaaguccucuuuu

SEQ ID NO: 1630349 - RNA, 12 nt, Human
uggcugcaaagg

SEQ ID NO: 1630350 - RNA, 14 nt, Human
uggcugcagggagu

SEQ ID NO: 1630351 - RNA, 13 nt, Human
uggcugcagggag

SEQ ID NO: 1630352 - RNA, 15 nt, Human
uggcugcagggaguc

SEQ ID NO: 1630353 - RNA, 20 nt, Human
uggcugccaaugggagcuca

SEQ ID NO: 1630354 - RNA, 18 nt, Human
uggcugccaaugggagcu

SEQ ID NO: 1630355 - RNA, 22 nt, Human
uggaauuucucccagucauuua

SEQ ID NO: 1630356 - RNA, 18 nt, Human
uggaauuggagcucgugg

SEQ ID NO: 1630357 - RNA, 19 nt, Human
aggcaacugcauuggcuuu

SEQ ID NO: 1630358 - RNA, 17 nt, Human
aggcaacucaucuuagg

SEQ ID NO: 1630359 - RNA, 19 nt, Human
aggauuuugauccaagcug

SEQ ID NO: 1630360 - RNA, 17 nt, Human
aggaugccccguccccc

SEQ ID NO: 1630361 - RNA, 14 nt, Human
aggaugcccaaaga

SEQ ID NO: 1630362 - RNA, 20 nt, Human
aggaugaucuaggaagacuu

SEQ ID NO: 1630363 - RNA, 19 nt, Human
aggaugcccaaagaugcag

SEQ ID NO: 1630364 - RNA, 13 nt, Human
uggacccugaggc

SEQ ID NO: 1630365 - RNA, 12 nt, Human
uggacccugagg

SEQ ID NO: 1630366 - RNA, 14 nt, Human
uggacccugaggcc

SEQ ID NO: 1630367 - RNA, 15 nt, Human
uggacccugaggccc

SEQ ID NO: 1630368 - RNA, 21 nt, Human
uggacacagcucuucuccagg

SEQ ID NO: 1630369 - RNA, 18 nt, Human
uggacacagcucuucucc

SEQ ID NO: 1630370 - RNA, 16 nt, Human
uggacacagcucuucu

SEQ ID NO: 1630371 - RNA, 15 nt, Human
uggacacagcucuuc

SEQ ID NO: 1630372 - RNA, 21 nt, Human
aggagggagcaucagugcccu

SEQ ID NO: 1630373 - RNA, 14 nt, Human
aggagggaggggga

SEQ ID NO: 1630374 - RNA, 16 nt, Human
aggauccugagccaga

SEQ ID NO: 1630375 - RNA, 15 nt, Human
aggauccugagccag

SEQ ID NO: 1630376 - RNA, 21 nt, Human
aggauacaaaagcaugugaga

SEQ ID NO: 1630377 - RNA, 17 nt, Human
aggaugaucuaggaaga

SEQ ID NO: 1630378 - RNA, 16 nt, Human
aggaugaucuaggaag

SEQ ID NO: 1630379 - RNA, 22 nt, Human
aggaucucuugagccugggagg

SEQ ID NO: 1630380 - RNA, 21 nt, Human
aggaucucuugagccugggag

SEQ ID NO: 1630381 - RNA, 18 nt, Human
aggauccugagccagauu

SEQ ID NO: 1630382 - RNA, 17 nt, Human
aggauccugagccagau

SEQ ID NO: 1630383 - RNA, 23 nt, Human
uggaaaugggcagagcagagacc

SEQ ID NO: 1630384 - RNA, 20 nt, Human
uggaaauauuaagaaagacu

SEQ ID NO: 1630385 - RNA, 13 nt, Human
uggaaaggcagcu

SEQ ID NO: 1630386 - RNA, 15 nt, Human
uggaaauauuaagaa

SEQ ID NO: 1630387 - RNA, 19 nt, Human
ugcuugggcuucauccucc

SEQ ID NO: 1630388 - RNA, 21 nt, Human
ugcuuugggcugcccuggugc

SEQ ID NO: 1630389 - RNA, 20 nt, Human
ugcuuugggcugcccuggug

SEQ ID NO: 1630390 - RNA, 19 nt, Human
ugcuuugggcugcccuggu

SEQ ID NO: 1630391 - RNA, 18 nt, Human
ugcuuugggcugcccugg

SEQ ID NO: 1630392 - RNA, 15 nt, Human
ugcuugccaucccuc

SEQ ID NO: 1630393 - RNA, 16 nt, Human
ugcuugccaucccucc

SEQ ID NO: 1630394 - RNA, 23 nt, Human
aggagcccugggaggcucuggag

SEQ ID NO: 1630395 - RNA, 19 nt, Human
aggagcccugggaggcucu

SEQ ID NO: 1630396 - RNA, 16 nt, Human
ugcuugggcuucaucc

SEQ ID NO: 1630397 - RNA, 12 nt, Human
ugcuugggcuuc

SEQ ID NO: 1630398 - RNA, 21 nt, Human
ugcuuggaggaaggaaaccca

SEQ ID NO: 1630399 - RNA, 17 nt, Human
aggagaaacuggaacuc

SEQ ID NO: 1630400 - RNA, 17 nt, Human
aggagauuggaaggaac

SEQ ID NO: 1630401 - RNA, 11 nt, Human
aggagaaacug

SEQ ID NO: 1630402 - RNA, 17 nt, Human
aggacuuguuagaucua

SEQ ID NO: 1630403 - RNA, 22 nt, Human
aggagccccgaggccuucucug

SEQ ID NO: 1630404 - RNA, 18 nt, Human
aggagcccugggaggcuc

SEQ ID NO: 1630405 - RNA, 18 nt, Human
aggacauugcggacagcc

SEQ ID NO: 1630406 - RNA, 17 nt, Human
aggacauugcggacagc

SEQ ID NO: 1630407 - RNA, 15 nt, Human
aggacauugcggaca

SEQ ID NO: 1630408 - RNA, 23 nt, Human
aggacauugcggacagccacggc

SEQ ID NO: 1630409 - RNA, 19 nt, Human
aggacauugcggacagcca

SEQ ID NO: 1630410 - RNA, 20 nt, Human
aggacugaauuaugaaacuu

SEQ ID NO: 1630411 - RNA, 19 nt, Human
aggacugaauuaugaaacu

SEQ ID NO: 1630412 - RNA, 16 nt, Human
aggacuuguuagaucu

SEQ ID NO: 1630413 - RNA, 14 nt, Human
aggacuuguuagau

SEQ ID NO: 1630414 - RNA, 11 nt, Human
aggaauuuaaa

SEQ ID NO: 1630415 - RNA, 23 nt, Human
aggaauugacccacaagaaauga

SEQ ID NO: 1630416 - RNA, 23 nt, Human
aggaauuguguuuauaauuuuaa

SEQ ID NO: 1630417 - RNA, 18 nt, Human
aggaagccagcaggcucu

SEQ ID NO: 1630418 - RNA, 17 nt, Human
aggaagccagcaggcuc

SEQ ID NO: 1630419 - RNA, 18 nt, Human
aggaaggaaacccagcuc

SEQ ID NO: 1630420 - RNA, 15 nt, Human
aggaaggagaggaga

SEQ ID NO: 1630421 - RNA, 19 nt, Human
aggaaggaaacccagcucu

SEQ ID NO: 1630422 - RNA, 19 nt, Human
aggaagacuucaucccucu

SEQ ID NO: 1630423 - RNA, 13 nt, Human
aggaagacuucau

SEQ ID NO: 1630424 - RNA, 23 nt, Human
ugcugagucugaaggcuggguuc

SEQ ID NO: 1630425 - RNA, 22 nt, Human
ugcugagucugaaggcuggguu

SEQ ID NO: 1630426 - RNA, 21 nt, Human
ugcugagucugaaggcugggu

SEQ ID NO: 1630427 - RNA, 18 nt, Human
ugcugagucugaaggcug

SEQ ID NO: 1630428 - RNA, 17 nt, Human
ugcugagucugaaggcu

SEQ ID NO: 1630429 - RNA, 16 nt, Human
ugcugagucugaaggc

SEQ ID NO: 1630430 - RNA, 24 nt, Human
aggaagcacaugccucucucaggc

SEQ ID NO: 1630431 - RNA, 23 nt, Human
aggaagcacaugccucucucagg

SEQ ID NO: 1630432 - RNA, 14 nt, Human
aggaagacuuugga

SEQ ID NO: 1630433 - RNA, 13 nt, Human
aggaagacuuugg

SEQ ID NO: 1630434 - RNA, 15 nt, Human
aggaagccagcaggc

SEQ ID NO: 1630435 - RNA, 14 nt, Human
aggaagccagcagg

SEQ ID NO: 1630436 - RNA, 15 nt, Human
ugcugagucugaagg

SEQ ID NO: 1630437 - RNA, 14 nt, Human
ugcugacuguacuc

SEQ ID NO: 1630438 - RNA, 22 nt, Human
ugcucugcugacagacacaggc

SEQ ID NO: 1630439 - RNA, 21 nt, Human
ugcucugcugacagacacagg

SEQ ID NO: 1630440 - RNA, 20 nt, Human
ugcuccagcuguucagcugg

SEQ ID NO: 1630441 - RNA, 19 nt, Human
ugcuccagcuguucagcug

SEQ ID NO: 1630442 - RNA, 16 nt, Human
ugcuccagcuguucag

SEQ ID NO: 1630443 - RNA, 18 nt, Human
agcugggacuacaggcac

SEQ ID NO: 1630444 - RNA, 16 nt, Human
agcugggacuacaggc

SEQ ID NO: 1630445 - RNA, 19 nt, Human
agcugggacuacaggcacc

SEQ ID NO: 1630446 - RNA, 13 nt, Human
ugcuauuucuaua

SEQ ID NO: 1630447 - RNA, 12 nt, Human
ugcuauuucuau

SEQ ID NO: 1630448 - RNA, 21 nt, Human
ugcuauuucuauauuuucauu

SEQ ID NO: 1630449 - RNA, 20 nt, Human
ugcuauuucuauauuuucau

SEQ ID NO: 1630450 - RNA, 14 nt, Human
ugcuauuucuauau

SEQ ID NO: 1630451 - RNA, 17 nt, Human
aggacacugauaugggu

SEQ ID NO: 1630452 - RNA, 22 nt, Human
aggacagggaggugaccccagg

SEQ ID NO: 1630453 - RNA, 14 nt, Human
aggacacugauaug

SEQ ID NO: 1630454 - RNA, 14 nt, Human
ugcuucaucccuuu

SEQ ID NO: 1630455 - RNA, 23 nt, Human
aggacacuaaccacgcuggaccu

SEQ ID NO: 1630456 - RNA, 13 nt, Human
ugcuuauacacuu

SEQ ID NO: 1630457 - RNA, 14 nt, Human
ugcuucagccuccc

SEQ ID NO: 1630458 - RNA, 13 nt, Human
ugcuucagccucc

SEQ ID NO: 1630459 - RNA, 20 nt, Human
ugcuucaaggauccugagcc

SEQ ID NO: 1630460 - RNA, 19 nt, Human
ugcuucaaggauccugagc

SEQ ID NO: 1630461 - RNA, 18 nt, Human
ugcuucaaggauccugag

SEQ ID NO: 1630462 - RNA, 16 nt, Human
ugcuucaaggauccug

SEQ ID NO: 1630463 - RNA, 14 nt, Human
ugcuggagcucugc

SEQ ID NO: 1630464 - RNA, 13 nt, Human
ugcuggagcucug

SEQ ID NO: 1630465 - RNA, 15 nt, Human
ugcugcccugugagu

SEQ ID NO: 1630466 - RNA, 20 nt, Human
aggaauuuuauuuuuuucug

SEQ ID NO: 1630467 - RNA, 14 nt, Human
ugcugcccugugag

SEQ ID NO: 1630468 - RNA, 13 nt, Human
ugcugcccuguga

SEQ ID NO: 1630469 - RNA, 18 nt, Human
ugcuggcuguuggcuggg

SEQ ID NO: 1630470 - RNA, 16 nt, Human
ugcuggcugguuagag

SEQ ID NO: 1630471 - RNA, 21 nt, Human
ugcuggcugccuuagaaccuu

SEQ ID NO: 1630472 - RNA, 14 nt, Human
ugcuggcugccuua

SEQ ID NO: 1630473 - RNA, 15 nt, Human
ugcuggcugccuuag

SEQ ID NO: 1630474 - RNA, 19 nt, Human
aucagucugauucccaagc

SEQ ID NO: 1630475 - RNA, 17 nt, Human
aucagugcccuccagga

SEQ ID NO: 1630476 - RNA, 15 nt, Human
aucagugcccuccag

SEQ ID NO: 1630477 - RNA, 13 nt, Human
aucagugcccucc

SEQ ID NO: 1630478 - RNA, 23 nt, Human
aucacuugaacccgggaggcaga

SEQ ID NO: 1630479 - RNA, 15 nt, Human
aucaggugcugccau

SEQ ID NO: 1630480 - RNA, 19 nt, Human
aucaggugcugccauccag

SEQ ID NO: 1630481 - RNA, 17 nt, Human
aucaggugcugccaucc

SEQ ID NO: 1630482 - RNA, 15 nt, Human
aucauaaaacuugau

SEQ ID NO: 1630483 - RNA, 23 nt, Human
aucauccacugugccaugugcca

SEQ ID NO: 1630484 - RNA, 21 nt, Human
aucauccacugugccaugugc

SEQ ID NO: 1630485 - RNA, 16 nt, Human
aucauuaggugugacu

SEQ ID NO: 1630486 - RNA, 16 nt, Human
uucugcaucagcugcu

SEQ ID NO: 1630487 - RNA, 21 nt, Human
uucucuaguuugauuaaauuc

SEQ ID NO: 1630488 - RNA, 22 nt, Human
uucuccuuucacaaccuucugu

SEQ ID NO: 1630489 - RNA, 18 nt, Human
uucuccuuucacaaccuu

SEQ ID NO: 1630490 - RNA, 12 nt, Human
aucauugaaauc

SEQ ID NO: 1630491 - RNA, 13 nt, Human
aucauugaaaucu

SEQ ID NO: 1630492 - RNA, 19 nt, Human
aucauugugaaauuauuca

SEQ ID NO: 1630493 - RNA, 15 nt, Human
aucauugugaaauua

SEQ ID NO: 1630494 - RNA, 13 nt, Human
aucauugugaaau

SEQ ID NO: 1630495 - RNA, 17 nt, Human
uucuguuuuauaauuuu

SEQ ID NO: 1630496 - RNA, 16 nt, Human
uucuguuuuauaauuu

SEQ ID NO: 1630497 - RNA, 13 nt, Human
uucuguuuagaua

SEQ ID NO: 1630498 - RNA, 18 nt, Human
uucuguuuagauaauaca

SEQ ID NO: 1630499 - RNA, 23 nt, Human
uucuuaaccagaucauugugaaa

SEQ ID NO: 1630500 - RNA, 22 nt, Human
uucuuaaccagaucauugugaa

SEQ ID NO: 1630501 - RNA, 13 nt, Human
uucuuaaaguuga

SEQ ID NO: 1630502 - RNA, 11 nt, Human
uucuucucccu

SEQ ID NO: 1630503 - RNA, 22 nt, Human
uucuucuccacuuucuagccag

SEQ ID NO: 1630504 - RNA, 17 nt, Human
uucuuucuggcuaugca

SEQ ID NO: 1630505 - RNA, 20 nt, Human
uucuuucuggcuaugcauuu

SEQ ID NO: 1630506 - RNA, 12 nt, Human
uucuuucuggcu

SEQ ID NO: 1630507 - RNA, 16 nt, Human
aucccucccuccaccu

SEQ ID NO: 1630508 - RNA, 17 nt, Human
aucccucccuccaccuc

SEQ ID NO: 1630509 - RNA, 18 nt, Human
aucccucccuccaccucc

SEQ ID NO: 1630510 - RNA, 18 nt, Human
aucccaugagccucagca

SEQ ID NO: 1630511 - RNA, 17 nt, Human
aucccaugagccucagc

SEQ ID NO: 1630512 - RNA, 20 nt, Human
aucccucccuccaccucccu

SEQ ID NO: 1630513 - RNA, 21 nt, Human
aucccucccuccaccucccug

SEQ ID NO: 1630514 - RNA, 17 nt, Human
aucccugaaggccccgc

SEQ ID NO: 1630515 - RNA, 22 nt, Human
aucccugaaggccccgcccagg

SEQ ID NO: 1630516 - RNA, 16 nt, Human
aucccaugagccucag

SEQ ID NO: 1630517 - RNA, 12 nt, Human
aucccagcccca

SEQ ID NO: 1630518 - RNA, 11 nt, Human
aucccagcccc

SEQ ID NO: 1630519 - RNA, 17 nt, Human
auccagguucagcuugu

SEQ ID NO: 1630520 - RNA, 15 nt, Human
auccaguaucuugaa

SEQ ID NO: 1630521 - RNA, 14 nt, Human
auccaguaucuuga

SEQ ID NO: 1630522 - RNA, 16 nt, Human
uucugccugcccaggc

SEQ ID NO: 1630523 - RNA, 15 nt, Human
uucugccugcccagg

SEQ ID NO: 1630524 - RNA, 16 nt, Human
auccaagcaaauguga

SEQ ID NO: 1630525 - RNA, 18 nt, Human
auccaagcaaaugugaau

SEQ ID NO: 1630526 - RNA, 15 nt, Human
aucuaaauguugaaa

SEQ ID NO: 1630527 - RNA, 15 nt, Human
aucuaaacugccccc

SEQ ID NO: 1630528 - RNA, 15 nt, Human
aucgugacaacacuu

SEQ ID NO: 1630529 - RNA, 14 nt, Human
aucgugacaacacu

SEQ ID NO: 1630530 - RNA, 18 nt, Human
aucgucacugcuuaacuu

SEQ ID NO: 1630531 - RNA, 14 nt, Human
aucgucacugcuua

SEQ ID NO: 1630532 - RNA, 17 nt, Human
uugacacuuaaaaaugg

SEQ ID NO: 1630533 - RNA, 16 nt, Human
uugaggucuguucuuu

SEQ ID NO: 1630534 - RNA, 15 nt, Human
uugagaucagccugg

SEQ ID NO: 1630535 - RNA, 12 nt, Human
uugauaaaguaa

SEQ ID NO: 1630536 - RNA, 14 nt, Human
uugacccacaagaa

SEQ ID NO: 1630537 - RNA, 24 nt, Human
uugaccauucuccaccugccaggg

SEQ ID NO: 1630538 - RNA, 19 nt, Human
uugacacuuaaaaaugguu

SEQ ID NO: 1630539 - RNA, 14 nt, Human
uugacauagucugg

SEQ ID NO: 1630540 - RNA, 19 nt, Human
uugaccauucuccaccugc

SEQ ID NO: 1630541 - RNA, 18 nt, Human
uugaccauucuccaccug

SEQ ID NO: 1630542 - RNA, 13 nt, Human
uugacaucaacug

SEQ ID NO: 1630543 - RNA, 17 nt, Human
uugacauagucuggcug

SEQ ID NO: 1630544 - RNA, 18 nt, Human
auccugaggcuccacuug

SEQ ID NO: 1630545 - RNA, 16 nt, Human
auccugaggcuccacu

SEQ ID NO: 1630546 - RNA, 13 nt, Human
auccugaggcucc

SEQ ID NO: 1630547 - RNA, 11 nt, Human
auccugaggcu

SEQ ID NO: 1630548 - RNA, 21 nt, Human
auccugagccagauuucacuc

SEQ ID NO: 1630549 - RNA, 17 nt, Human
auccugagccagauuuc

SEQ ID NO: 1630550 - RNA, 15 nt, Human
auccugagccagauu

SEQ ID NO: 1630551 - RNA, 14 nt, Human
auccugagccagau

SEQ ID NO: 1630552 - RNA, 13 nt, Human
auccugccccuga

SEQ ID NO: 1630553 - RNA, 22 nt, Human
auccugaggcuccacuuggucu

SEQ ID NO: 1630554 - RNA, 16 nt, Human
auccugcaauuccacu

SEQ ID NO: 1630555 - RNA, 20 nt, Human
uucuuuugccguuauuaaaa

SEQ ID NO: 1630556 - RNA, 20 nt, Human
auccucuguacagagcccac

SEQ ID NO: 1630557 - RNA, 18 nt, Human
auccucuguacagagccc

SEQ ID NO: 1630558 - RNA, 13 nt, Human
auccugagccaga

SEQ ID NO: 1630559 - RNA, 12 nt, Human
auccugagccag

SEQ ID NO: 1630560 - RNA, 11 nt, Human
auccugagcca

SEQ ID NO: 1630561 - RNA, 17 nt, Human
auccucuuugagugaag

SEQ ID NO: 1630562 - RNA, 23 nt, Human
auccuggcacccggccccugcug

SEQ ID NO: 1630563 - RNA, 22 nt, Human
auccuggcacccggccccugcu

SEQ ID NO: 1630564 - RNA, 20 nt, Human
auccuggcugucgagaaaca

SEQ ID NO: 1630565 - RNA, 21 nt, Human
auccuggcacccggccccugc

SEQ ID NO: 1630566 - RNA, 20 nt, Human
auccuggcacccggccccug

SEQ ID NO: 1630567 - RNA, 19 nt, Human
auccuggcacccggccccu

SEQ ID NO: 1630568 - RNA, 17 nt, Human
auccuggcacccggccc

SEQ ID NO: 1630569 - RNA, 15 nt, Human
auccuggaguucugg

SEQ ID NO: 1630570 - RNA, 17 nt, Human
aucguaaaauuaagaaa

SEQ ID NO: 1630571 - RNA, 14 nt, Human
aucguaaaauuaag

SEQ ID NO: 1630572 - RNA, 13 nt, Human
aucguaaaauuaa

SEQ ID NO: 1630573 - RNA, 12 nt, Human
aucguaaaauua

SEQ ID NO: 1630574 - RNA, 13 nt, Human
auauuuacaaaug

SEQ ID NO: 1630575 - RNA, 14 nt, Human
auauuguuugcuaa

SEQ ID NO: 1630576 - RNA, 17 nt, Human
auauuguuuucagugua

SEQ ID NO: 1630577 - RNA, 13 nt, Human
auauuguuuucag

SEQ ID NO: 1630578 - RNA, 22 nt, Human
auauugcugauggugcaaugac

SEQ ID NO: 1630579 - RNA, 15 nt, Human
auauugauaugcuua

SEQ ID NO: 1630580 - RNA, 21 nt, Human
auauucucacagcuccaagaa

SEQ ID NO: 1630581 - RNA, 19 nt, Human
auauuaccacagacauacu

SEQ ID NO: 1630582 - RNA, 21 nt, Human
auauuccugcauuugugaaau

SEQ ID NO: 1630583 - RNA, 18 nt, Human
auauucucacagcuccaa

SEQ ID NO: 1630584 - RNA, 22 nt, Human
auauuaagaaagacuaucuaaa

SEQ ID NO: 1630585 - RNA, 17 nt, Human
auauuaagaaagacuau

SEQ ID NO: 1630586 - RNA, 15 nt, Human
auauuaagaaagacu

SEQ ID NO: 1630587 - RNA, 16 nt, Human
auauuaagaaagacua

SEQ ID NO: 1630588 - RNA, 17 nt, Human
auauuaccacagacaua

SEQ ID NO: 1630589 - RNA, 14 nt, Human
auauuaaagccaug

SEQ ID NO: 1630590 - RNA, 12 nt, Human
auauuaaagcca

SEQ ID NO: 1630591 - RNA, 16 nt, Human
auauguucugacauaa

SEQ ID NO: 1630592 - RNA, 16 nt, Human
uuccagugaggcucug

SEQ ID NO: 1630593 - RNA, 15 nt, Human
uuccagugaggcucu

SEQ ID NO: 1630594 - RNA, 22 nt, Human
uuccagugaaaucaguuacucu

SEQ ID NO: 1630595 - RNA, 15 nt, Human
aucaaauaugcaaag

SEQ ID NO: 1630596 - RNA, 18 nt, Human
aucaaauaugcaaagcac

SEQ ID NO: 1630597 - RNA, 17 nt, Human
aucaaauaugcaaagca

SEQ ID NO: 1630598 - RNA, 16 nt, Human
aucaaauaugcaaagc

SEQ ID NO: 1630599 - RNA, 16 nt, Human
aucaaggguacacugc

SEQ ID NO: 1630600 - RNA, 21 nt, Human
aucaacugcaucaagauguga

SEQ ID NO: 1630601 - RNA, 13 nt, Human
aucaauuuaaaaa

SEQ ID NO: 1630602 - RNA, 21 nt, Human
aucaaggguacacugccuucu

SEQ ID NO: 1630603 - RNA, 19 nt, Human
aucaauuuuucuuauuuca

SEQ ID NO: 1630604 - RNA, 14 nt, Human
aucaauuuuucuua

SEQ ID NO: 1630605 - RNA, 17 nt, Human
aucacgccacugcacua

SEQ ID NO: 1630606 - RNA, 15 nt, Human
aucacgccacugcac

SEQ ID NO: 1630607 - RNA, 22 nt, Human
uuccuggcacugcuuccaguga

SEQ ID NO: 1630608 - RNA, 20 nt, Human
uuccuggcacugcuuccagu

SEQ ID NO: 1630609 - RNA, 22 nt, Human
uuccucuuuuuauuuaguuccu

SEQ ID NO: 1630610 - RNA, 12 nt, Human
uuccugaacagg

SEQ ID NO: 1630611 - RNA, 19 nt, Human
uuccuggcacugcuuccag

SEQ ID NO: 1630612 - RNA, 21 nt, Human
uuccuaaauauauuuuaagac

SEQ ID NO: 1630613 - RNA, 18 nt, Human
uuccucuccacugccuuc

SEQ ID NO: 1630614 - RNA, 19 nt, Human
uuccucuccacugccuucg

SEQ ID NO: 1630615 - RNA, 13 nt, Human
uuccucugagccu

SEQ ID NO: 1630616 - RNA, 15 nt, Human
uucccuuuuuuuaag

SEQ ID NO: 1630617 - RNA, 13 nt, Human
uucccuacuuccu

SEQ ID NO: 1630618 - RNA, 12 nt, Human
uucccgcucagc

SEQ ID NO: 1630619 - RNA, 15 nt, Human
uucccgcucagcccu

SEQ ID NO: 1630620 - RNA, 14 nt, Human
uucccgcucagccc

SEQ ID NO: 1630621 - RNA, 14 nt, Human
auaugcaaagcacu

SEQ ID NO: 1630622 - RNA, 13 nt, Human
auaugcaaagcac

SEQ ID NO: 1630623 - RNA, 15 nt, Human
auaugcaaagcacug

SEQ ID NO: 1630624 - RNA, 13 nt, Human
auauauuuuuaua

SEQ ID NO: 1630625 - RNA, 23 nt, Human
auauguaccuaacgaaguauccu

SEQ ID NO: 1630626 - RNA, 21 nt, Human
auauguggaguucaucuugaa

SEQ ID NO: 1630627 - RNA, 20 nt, Human
auauguggaguucaucuuga

SEQ ID NO: 1630628 - RNA, 22 nt, Human
uucaugcuguucaugaaagauu

SEQ ID NO: 1630629 - RNA, 20 nt, Human
uucauggaacgcguugaaau

SEQ ID NO: 1630630 - RNA, 19 nt, Human
uucauggaacgcguugaaa

SEQ ID NO: 1630631 - RNA, 22 nt, Human
uucauggaacgcguugaaauug

SEQ ID NO: 1630632 - RNA, 21 nt, Human
uucauggaacgcguugaaauu

SEQ ID NO: 1630633 - RNA, 14 nt, Human
uucauuaucucaaa

SEQ ID NO: 1630634 - RNA, 22 nt, Human
uucauuauuuuauuaugaaacu

SEQ ID NO: 1630635 - RNA, 22 nt, Human
uuccaauuuacauacucugcuu

SEQ ID NO: 1630636 - RNA, 21 nt, Human
uuccacaagagcccaggccuc

SEQ ID NO: 1630637 - RNA, 18 nt, Human
uuccaccaucaagccacc

SEQ ID NO: 1630638 - RNA, 15 nt, Human
uuccaccuucccaug

SEQ ID NO: 1630639 - RNA, 18 nt, Human
uuccagguuuaagcuguu

SEQ ID NO: 1630640 - RNA, 17 nt, Human
uuccaggcugggagagc

SEQ ID NO: 1630641 - RNA, 15 nt, Human
uuccaggcugggaga

SEQ ID NO: 1630642 - RNA, 22 nt, Human
auauauguuuuaagaggcaggg

SEQ ID NO: 1630643 - RNA, 21 nt, Human
auauauguuuuaagaggcagg

SEQ ID NO: 1630644 - RNA, 15 nt, Human
uucaucaaugaauga

SEQ ID NO: 1630645 - RNA, 13 nt, Human
auauaugcuaagu

SEQ ID NO: 1630646 - RNA, 16 nt, Human
uucagugccaaaaaca

SEQ ID NO: 1630647 - RNA, 14 nt, Human
uucaguaagccgug

SEQ ID NO: 1630648 - RNA, 17 nt, Human
uucagguaacaggcaga

SEQ ID NO: 1630649 - RNA, 17 nt, Human
uucagcgguuuauauaa

SEQ ID NO: 1630650 - RNA, 14 nt, Human
uucagccaagaauu

SEQ ID NO: 1630651 - RNA, 20 nt, Human
uucagccugccuucuuuucu

SEQ ID NO: 1630652 - RNA, 19 nt, Human
uucagcaaaaauauuuuau

SEQ ID NO: 1630653 - RNA, 16 nt, Human
uucagguaacaggcag

SEQ ID NO: 1630654 - RNA, 15 nt, Human
uucagguaacaggca

SEQ ID NO: 1630655 - RNA, 22 nt, Human
uucaggguuggccccugcccgg

SEQ ID NO: 1630656 - RNA, 19 nt, Human
uucaggguuggccccugcc

SEQ ID NO: 1630657 - RNA, 17 nt, Human
uucaggguuggccccug

SEQ ID NO: 1630658 - RNA, 16 nt, Human
uucaggguuggccccu

SEQ ID NO: 1630659 - RNA, 14 nt, Human
uucaggguuggccc

SEQ ID NO: 1630660 - RNA, 16 nt, Human
uucagaaauguguuau

SEQ ID NO: 1630661 - RNA, 19 nt, Human
uucagauaugauucaaaug

SEQ ID NO: 1630662 - RNA, 17 nt, Human
uucagcaaaaauauuuu

SEQ ID NO: 1630663 - RNA, 18 nt, Human
uucagauaugauucaaau

SEQ ID NO: 1630664 - RNA, 17 nt, Human
uucagauaugauucaaa

SEQ ID NO: 1630665 - RNA, 16 nt, Human
uucagauaugauucaa

SEQ ID NO: 1630666 - RNA, 19 nt, Human
uuuccagguuuaagcuguu

SEQ ID NO: 1630667 - RNA, 23 nt, Human
auggaauuggagcucgugggaca

SEQ ID NO: 1630668 - RNA, 12 nt, Human
uuucauaaagca

SEQ ID NO: 1630669 - RNA, 24 nt, Human
uuucacucuuauugcccacgcugg

SEQ ID NO: 1630670 - RNA, 15 nt, Human
uuucacucuccuugg

SEQ ID NO: 1630671 - RNA, 24 nt, Human
uuucacugcuggcugccuuagaac

SEQ ID NO: 1630672 - RNA, 14 nt, Human
uuucacucuccuug

SEQ ID NO: 1630673 - RNA, 17 nt, Human
uuuauuuuuuucugaau

SEQ ID NO: 1630674 - RNA, 16 nt, Human
uuuauuuuuugggaaa

SEQ ID NO: 1630675 - RNA, 19 nt, Human
uuuauuacuguaagaaaau

SEQ ID NO: 1630676 - RNA, 13 nt, Human
uuuauuaugaaac

SEQ ID NO: 1630677 - RNA, 22 nt, Human
augcuggcuguuggcugggggc

SEQ ID NO: 1630678 - RNA, 21 nt, Human
uuuauuaugaaacuuguguaa

SEQ ID NO: 1630679 - RNA, 23 nt, Human
augcugucuacacuaagagagaa

SEQ ID NO: 1630680 - RNA, 14 nt, Human
augcuguauuuuaa

SEQ ID NO: 1630681 - RNA, 14 nt, Human
augcuguauauguu

SEQ ID NO: 1630682 - RNA, 19 nt, Human
augcugugcccuaaagugu

SEQ ID NO: 1630683 - RNA, 16 nt, Human
auggaacauaaaauac

SEQ ID NO: 1630684 - RNA, 21 nt, Human
auggaaguacuauaauuuacc

SEQ ID NO: 1630685 - RNA, 17 nt, Human
auggaacacucugagac

SEQ ID NO: 1630686 - RNA, 18 nt, Human
auggaacacucugagacu

SEQ ID NO: 1630687 - RNA, 16 nt, Human
uuuauuuuaauaaugu

SEQ ID NO: 1630688 - RNA, 15 nt, Human
auggaauaacaugua

SEQ ID NO: 1630689 - RNA, 14 nt, Human
auggaauaacaugu

SEQ ID NO: 1630690 - RNA, 13 nt, Human
uuuauuuuuuggg

SEQ ID NO: 1630691 - RNA, 19 nt, Human
uuuauaugcuucuguuuua

SEQ ID NO: 1630692 - RNA, 17 nt, Human
uuuauaugcuucuguuu

SEQ ID NO: 1630693 - RNA, 19 nt, Human
uuuauuaaaugcccagccc

SEQ ID NO: 1630694 - RNA, 15 nt, Human
uuuaugugaaacaug

SEQ ID NO: 1630695 - RNA, 14 nt, Human
uuuaugugaaacau

SEQ ID NO: 1630696 - RNA, 15 nt, Human
uuuaguagagacagg

SEQ ID NO: 1630697 - RNA, 15 nt, Human
uuuagauaauacacc

SEQ ID NO: 1630698 - RNA, 18 nt, Human
uuuagaguugauacuaca

SEQ ID NO: 1630699 - RNA, 13 nt, Human
uuuagauaauaca

SEQ ID NO: 1630700 - RNA, 24 nt, Human
uuuaaagcuuauuaaaacucauuu

SEQ ID NO: 1630701 - RNA, 16 nt, Human
uuuaaagcuuccauug

SEQ ID NO: 1630702 - RNA, 16 nt, Human
augcgggccagugcuc

SEQ ID NO: 1630703 - RNA, 23 nt, Human
augcgcaggcuggcccugcccug

SEQ ID NO: 1630704 - RNA, 21 nt, Human
uuuaccuuuuuuauacauaaa

SEQ ID NO: 1630705 - RNA, 17 nt, Human
uuuacuaaaauggacug

SEQ ID NO: 1630706 - RNA, 15 nt, Human
uuuacuaaaauggac

SEQ ID NO: 1630707 - RNA, 14 nt, Human
uuuacuaauagaca

SEQ ID NO: 1630708 - RNA, 17 nt, Human
uuuacuaauagacaauu

SEQ ID NO: 1630709 - RNA, 18 nt, Human
uuuacuaauagacaauuu

SEQ ID NO: 1630710 - RNA, 14 nt, Human
uuuaccuuuuuuau

SEQ ID NO: 1630711 - RNA, 19 nt, Human
uuuaccuuuuuuauacaua

SEQ ID NO: 1630712 - RNA, 20 nt, Human
uuuaccuuuuuuauacauaa

SEQ ID NO: 1630713 - RNA, 17 nt, Human
augcuacacacugcaug

SEQ ID NO: 1630714 - RNA, 18 nt, Human
augcuacacacugcaugu

SEQ ID NO: 1630715 - RNA, 14 nt, Human
uuugaaauauugac

SEQ ID NO: 1630716 - RNA, 23 nt, Human
augggcuggguucuacccaggug

SEQ ID NO: 1630717 - RNA, 13 nt, Human
auggggcccugcc

SEQ ID NO: 1630718 - RNA, 14 nt, Human
auggggcccugccu

SEQ ID NO: 1630719 - RNA, 19 nt, Human
uuugaaacacuuugcauaa

SEQ ID NO: 1630720 - RNA, 17 nt, Human
uuugaaacacuuugcau

SEQ ID NO: 1630721 - RNA, 13 nt, Human
uuucuuuguggcu

SEQ ID NO: 1630722 - RNA, 14 nt, Human
uuucugcaucagcu

SEQ ID NO: 1630723 - RNA, 22 nt, Human
uuucucauuugccaauaauaau

SEQ ID NO: 1630724 - RNA, 16 nt, Human
uuucugccgcagcccu

SEQ ID NO: 1630725 - RNA, 14 nt, Human
uuucugccgcagcc

SEQ ID NO: 1630726 - RNA, 20 nt, Human
uuucuaugaaauauuauguu

SEQ ID NO: 1630727 - RNA, 14 nt, Human
uuucuaugaaauau

SEQ ID NO: 1630728 - RNA, 13 nt, Human
uuucuaugaaaua

SEQ ID NO: 1630729 - RNA, 21 nt, Human
uuucuaugcugaguuugugcu

SEQ ID NO: 1630730 - RNA, 15 nt, Human
uuucuaugacacaug

SEQ ID NO: 1630731 - RNA, 21 nt, Human
uuucuaugacacaugcaaggu

SEQ ID NO: 1630732 - RNA, 22 nt, Human
uuucuaggacugaauuaugaaa

SEQ ID NO: 1630733 - RNA, 17 nt, Human
uuucuaggacugaauua

SEQ ID NO: 1630734 - RNA, 21 nt, Human
uuucuaggacugaauuaugaa

SEQ ID NO: 1630735 - RNA, 13 nt, Human
uuucuauauuuuc

SEQ ID NO: 1630736 - RNA, 18 nt, Human
uuucuauauuuucauucu

SEQ ID NO: 1630737 - RNA, 15 nt, Human
uuucuauauuuucau

SEQ ID NO: 1630738 - RNA, 17 nt, Human
auggaauuucucccagu

SEQ ID NO: 1630739 - RNA, 21 nt, Human
auggacccaauauuuaccaga

SEQ ID NO: 1630740 - RNA, 19 nt, Human
auggcuauaggugcuacaa

SEQ ID NO: 1630741 - RNA, 16 nt, Human
auggcuauaggugcua

SEQ ID NO: 1630742 - RNA, 18 nt, Human
auggccucuucagaucuc

SEQ ID NO: 1630743 - RNA, 23 nt, Human
auggcuauaggugcuacaaaaac

SEQ ID NO: 1630744 - RNA, 21 nt, Human
auggcuauaggugcuacaaaa

SEQ ID NO: 1630745 - RNA, 21 nt, Human
augggacauuugcucauggaa

SEQ ID NO: 1630746 - RNA, 22 nt, Human
augggacauuugcucauggaau

SEQ ID NO: 1630747 - RNA, 15 nt, Human
augggccuccugugu

SEQ ID NO: 1630748 - RNA, 14 nt, Human
augggcagagcaga

SEQ ID NO: 1630749 - RNA, 13 nt, Human
augggcagagcag

SEQ ID NO: 1630750 - RNA, 15 nt, Human
augggcagagcagag

SEQ ID NO: 1630751 - RNA, 21 nt, Human
augggcaacccccagccugcu

SEQ ID NO: 1630752 - RNA, 19 nt, Human
augggcaacccccagccug

SEQ ID NO: 1630753 - RNA, 13 nt, Human
augggagcucaug

SEQ ID NO: 1630754 - RNA, 15 nt, Human
augggacuggccucu

SEQ ID NO: 1630755 - RNA, 18 nt, Human
uuucgcaggauucuuccu

SEQ ID NO: 1630756 - RNA, 22 nt, Human
uuucgcaggauucuuccucccu

SEQ ID NO: 1630757 - RNA, 21 nt, Human
uuuccuuuuaaaacacuucca

SEQ ID NO: 1630758 - RNA, 21 nt, Human
uuuccuucauucaacccaccu

SEQ ID NO: 1630759 - RNA, 22 nt, Human
uuuccuucagugccuuauggaa

SEQ ID NO: 1630760 - RNA, 21 nt, Human
uuuccuucagugccuuaugga

SEQ ID NO: 1630761 - RNA, 18 nt, Human
uuuccuucagugccuuau

SEQ ID NO: 1630762 - RNA, 23 nt, Human
uuuccuucauucaacccaccugc

SEQ ID NO: 1630763 - RNA, 12 nt, Human
uuuccugugucu

SEQ ID NO: 1630764 - RNA, 17 nt, Human
augggccuccugugugu

SEQ ID NO: 1630765 - RNA, 15 nt, Human
uuuccuucagugccu

SEQ ID NO: 1630766 - RNA, 12 nt, Human
uuuccuucagug

SEQ ID NO: 1630767 - RNA, 11 nt, Human
uuuccuucagu

SEQ ID NO: 1630768 - RNA, 13 nt, Human
augagaggaaauc

SEQ ID NO: 1630769 - RNA, 12 nt, Human
augagaggaaau

SEQ ID NO: 1630770 - RNA, 15 nt, Human
augagaggaaaucac

SEQ ID NO: 1630771 - RNA, 14 nt, Human
augagaggaaauca

SEQ ID NO: 1630772 - RNA, 16 nt, Human
augagaggaaaucacc

SEQ ID NO: 1630773 - RNA, 16 nt, Human
augagccucagcaucc

SEQ ID NO: 1630774 - RNA, 15 nt, Human
augagccucagcauc

SEQ ID NO: 1630775 - RNA, 12 nt, Human
augagccucagc

SEQ ID NO: 1630776 - RNA, 22 nt, Human
augagcaucaggccaggcccuc

SEQ ID NO: 1630777 - RNA, 21 nt, Human
augagcaucaggccaggcccu

SEQ ID NO: 1630778 - RNA, 20 nt, Human
augagcaucaggccaggccc

SEQ ID NO: 1630779 - RNA, 19 nt, Human
augagcaucaggccaggcc

SEQ ID NO: 1630780 - RNA, 18 nt, Human
augagcaucaggccaggc

SEQ ID NO: 1630781 - RNA, 17 nt, Human
augagcaucaggccagg

SEQ ID NO: 1630782 - RNA, 16 nt, Human
augagcaucaggccag

SEQ ID NO: 1630783 - RNA, 15 nt, Human
augagcaucaggcca

SEQ ID NO: 1630784 - RNA, 14 nt, Human
augauaacuggaaa

SEQ ID NO: 1630785 - RNA, 15 nt, Human
augauaaaacacaaa

SEQ ID NO: 1630786 - RNA, 19 nt, Human
augagccucagcauccugg

SEQ ID NO: 1630787 - RNA, 18 nt, Human
augagccucagcauccug

SEQ ID NO: 1630788 - RNA, 17 nt, Human
augagccucagcauccu

SEQ ID NO: 1630789 - RNA, 18 nt, Human
uugugaagcaaaauuuuu

SEQ ID NO: 1630790 - RNA, 18 nt, Human
uugugaagguggaaauaa

SEQ ID NO: 1630791 - RNA, 17 nt, Human
uugugaagguggaaaua

SEQ ID NO: 1630792 - RNA, 19 nt, Human
augaucacggcucacugca

SEQ ID NO: 1630793 - RNA, 18 nt, Human
augaucacggcucacugc

SEQ ID NO: 1630794 - RNA, 15 nt, Human
augaucacggcucac

SEQ ID NO: 1630795 - RNA, 14 nt, Human
augaucuucuuuau

SEQ ID NO: 1630796 - RNA, 15 nt, Human
augaucuaggaagac

SEQ ID NO: 1630797 - RNA, 15 nt, Human
augauccuaaugaau

SEQ ID NO: 1630798 - RNA, 16 nt, Human
augauccuaggcauuu

SEQ ID NO: 1630799 - RNA, 23 nt, Human
augaucacggcucacugcagccu

SEQ ID NO: 1630800 - RNA, 19 nt, Human
augcaccuggaauauauaa

SEQ ID NO: 1630801 - RNA, 18 nt, Human
uuguuuuuuuuuuccacu

SEQ ID NO: 1630802 - RNA, 21 nt, Human
uuuaaaaaauuaaucugggcc

SEQ ID NO: 1630803 - RNA, 17 nt, Human
uuuaaaaaauuaaucug

SEQ ID NO: 1630804 - RNA, 20 nt, Human
uuuaaaaaagaaacauuugg

SEQ ID NO: 1630805 - RNA, 19 nt, Human
uuguuuuuuuuuuccacuu

SEQ ID NO: 1630806 - RNA, 17 nt, Human
uuuaaaaaaaaaauugg

SEQ ID NO: 1630807 - RNA, 22 nt, Human
augcaaaccaucauugaaaucu

SEQ ID NO: 1630808 - RNA, 21 nt, Human
augcaaaccaucauugaaauc

SEQ ID NO: 1630809 - RNA, 20 nt, Human
augcaaaccaucauugaaau

SEQ ID NO: 1630810 - RNA, 19 nt, Human
augcaaaccaucauugaaa

SEQ ID NO: 1630811 - RNA, 18 nt, Human
augcaaaccaucauugaa

SEQ ID NO: 1630812 - RNA, 16 nt, Human
augcaaaccaucauug

SEQ ID NO: 1630813 - RNA, 18 nt, Human
augaucuucuuuauaauu

SEQ ID NO: 1630814 - RNA, 15 nt, Human
augaucuucuuuaua

SEQ ID NO: 1630815 - RNA, 22 nt, Human
augcaaggucauuuuuuuuaag

SEQ ID NO: 1630816 - RNA, 16 nt, Human
augcaccuggaauaua

SEQ ID NO: 1630817 - RNA, 14 nt, Human
augcaccuggaaua

SEQ ID NO: 1630818 - RNA, 14 nt, Human
augcaaggucauuu

SEQ ID NO: 1630819 - RNA, 16 nt, Human
augcaaggucauuuuu

SEQ ID NO: 1630820 - RNA, 22 nt, Human
augcaaacuuuauuuuguguuu

SEQ ID NO: 1630821 - RNA, 22 nt, Human
augaauuacauuuguauaaaau

SEQ ID NO: 1630822 - RNA, 19 nt, Human
augaauuacauuuguauaa

SEQ ID NO: 1630823 - RNA, 18 nt, Human
augaauuacauuuguaua

SEQ ID NO: 1630824 - RNA, 13 nt, Human
augaaccacaucu

SEQ ID NO: 1630825 - RNA, 22 nt, Human
augaaccacaucuugcucugcu

SEQ ID NO: 1630826 - RNA, 20 nt, Human
augaaccacaucuugcucug

SEQ ID NO: 1630827 - RNA, 17 nt, Human
uugggguacccacugcu

SEQ ID NO: 1630828 - RNA, 19 nt, Human
uuggggaagaacgaagcca

SEQ ID NO: 1630829 - RNA, 14 nt, Human
uuguaaggaaugau

SEQ ID NO: 1630830 - RNA, 22 nt, Human
uuguaaaaauuaaaaguuaugg

SEQ ID NO: 1630831 - RNA, 22 nt, Human
uugggguacccacugcucuggu

SEQ ID NO: 1630832 - RNA, 19 nt, Human
uugguuaggcauuguggga

SEQ ID NO: 1630833 - RNA, 23 nt, Human
augaauuaguuuuauaugcuucu

SEQ ID NO: 1630834 - RNA, 21 nt, Human
augaauuaguuuuauaugcuu

SEQ ID NO: 1630835 - RNA, 20 nt, Human
augacacgaauauugcugau

SEQ ID NO: 1630836 - RNA, 19 nt, Human
augacacgaauauugcuga

SEQ ID NO: 1630837 - RNA, 13 nt, Human
uuguauaaaauaa

SEQ ID NO: 1630838 - RNA, 19 nt, Human
uuguauaaaauaauuuuua

SEQ ID NO: 1630839 - RNA, 20 nt, Human
uuguaaggaaugauuaauua

SEQ ID NO: 1630840 - RNA, 13 nt, Human
uuguaaugaaaac

SEQ ID NO: 1630841 - RNA, 15 nt, Human
uuguaauuauaucug

SEQ ID NO: 1630842 - RNA, 20 nt, Human
augaaauauuauguuaaaac

SEQ ID NO: 1630843 - RNA, 21 nt, Human
augaaauauuauguuaaaacu

SEQ ID NO: 1630844 - RNA, 14 nt, Human
augaaaugagguca

SEQ ID NO: 1630845 - RNA, 20 nt, Human
augaaagacuguacaaagua

SEQ ID NO: 1630846 - RNA, 23 nt, Human
augaaagauggcugugccucugc

SEQ ID NO: 1630847 - RNA, 20 nt, Human
augaaagauggcugugccuc

SEQ ID NO: 1630848 - RNA, 19 nt, Human
augaaagauggcugugccu

SEQ ID NO: 1630849 - RNA, 16 nt, Human
uuggcugcugaaggcu

SEQ ID NO: 1630850 - RNA, 22 nt, Human
uuggcgcugccccuggcagccc

SEQ ID NO: 1630851 - RNA, 15 nt, Human
uuggcugcugaaggc

SEQ ID NO: 1630852 - RNA, 11 nt, Human
uuggcugcuga

SEQ ID NO: 1630853 - RNA, 14 nt, Human
uuggcugcagggag

SEQ ID NO: 1630854 - RNA, 23 nt, Human
uuggcuauuagagaucaaccccu

SEQ ID NO: 1630855 - RNA, 21 nt, Human
uuggcuagagguucaaagaua

SEQ ID NO: 1630856 - RNA, 22 nt, Human
uuggcuaggaccccuccaugug

SEQ ID NO: 1630857 - RNA, 22 nt, Human
uuggcuagagguucaaagauau

SEQ ID NO: 1630858 - RNA, 23 nt, Human
uuggaaagaguaggaagacuuug

SEQ ID NO: 1630859 - RNA, 18 nt, Human
uuggaaagaguaggaaga

SEQ ID NO: 1630860 - RNA, 12 nt, Human
uugcucauggaa

SEQ ID NO: 1630861 - RNA, 11 nt, Human
uugcucaugga

SEQ ID NO: 1630862 - RNA, 19 nt, Human
uugcugaauacagaggcaa

SEQ ID NO: 1630863 - RNA, 20 nt, Human
uugcuaagugaggaugaaaa

SEQ ID NO: 1630864 - RNA, 17 nt, Human
uuggaaagaguaggaag

SEQ ID NO: 1630865 - RNA, 19 nt, Human
uugcugauggugcaaugac

SEQ ID NO: 1630866 - RNA, 18 nt, Human
uugcugauggugcaauga

SEQ ID NO: 1630867 - RNA, 17 nt, Human
uugcugauggugcaaug

SEQ ID NO: 1630868 - RNA, 22 nt, Human
auuuucaguuauuauauuuaca

SEQ ID NO: 1630869 - RNA, 17 nt, Human
auuuuccuccuuucucu

SEQ ID NO: 1630870 - RNA, 13 nt, Human
auuuuccuccuuu

SEQ ID NO: 1630871 - RNA, 21 nt, Human
auuuuauuuuuuucugaauua

SEQ ID NO: 1630872 - RNA, 21 nt, Human
auuuuauuauguaaaucccau

SEQ ID NO: 1630873 - RNA, 20 nt, Human
auuuuauuauguaaauccca

SEQ ID NO: 1630874 - RNA, 19 nt, Human
auuuuauuauguaaauccc

SEQ ID NO: 1630875 - RNA, 18 nt, Human
auuuuauuauguaaaucc

SEQ ID NO: 1630876 - RNA, 17 nt, Human
auuuuauuauguaaauc

SEQ ID NO: 1630877 - RNA, 16 nt, Human
auuuuauuauguaaau

SEQ ID NO: 1630878 - RNA, 20 nt, Human
auuuucaacgcagcccugcu

SEQ ID NO: 1630879 - RNA, 18 nt, Human
auuuucaacgcagcccug

SEQ ID NO: 1630880 - RNA, 17 nt, Human
auuuuaaaagaaugauu

SEQ ID NO: 1630881 - RNA, 14 nt, Human
auuugugauacaau

SEQ ID NO: 1630882 - RNA, 15 nt, Human
auuugugauacaaug

SEQ ID NO: 1630883 - RNA, 21 nt, Human
auuuguauaaaauaauuuuua

SEQ ID NO: 1630884 - RNA, 19 nt, Human
auuuguauaaaauaauuuu

SEQ ID NO: 1630885 - RNA, 18 nt, Human
auuuguauaaaauaauuu

SEQ ID NO: 1630886 - RNA, 22 nt, Human
auuuuaaaagaaugauuaugaa

SEQ ID NO: 1630887 - RNA, 18 nt, Human
auuuuaaaagaaugauua

SEQ ID NO: 1630888 - RNA, 15 nt, Human
auuuuaauucaguug

SEQ ID NO: 1630889 - RNA, 17 nt, Human
auuuuacauaaauuuag

SEQ ID NO: 1630890 - RNA, 16 nt, Human
auuuuacauaaauuua

SEQ ID NO: 1630891 - RNA, 17 nt, Human
auuuuaccuuugacaaa

SEQ ID NO: 1630892 - RNA, 13 nt, Human
auuuagauguaua

SEQ ID NO: 1630893 - RNA, 18 nt, Human
auuuaguauuuuguuuca

SEQ ID NO: 1630894 - RNA, 20 nt, Human
auuuaguaucuuuuuauuca

SEQ ID NO: 1630895 - RNA, 13 nt, Human
auuuaguguucau

SEQ ID NO: 1630896 - RNA, 23 nt, Human
auuuauaaaaauaaaaaacacug

SEQ ID NO: 1630897 - RNA, 22 nt, Human
auuuauaaaaauaaaaaacacu

SEQ ID NO: 1630898 - RNA, 17 nt, Human
auuuauaaaaauaaaaa

SEQ ID NO: 1630899 - RNA, 15 nt, Human
auuuagaaauauaau

SEQ ID NO: 1630900 - RNA, 16 nt, Human
auuuacuucuuauaca

SEQ ID NO: 1630901 - RNA, 14 nt, Human
auuuacuucuuaua

SEQ ID NO: 1630902 - RNA, 17 nt, Human
auuuacuucuuauacau

SEQ ID NO: 1630903 - RNA, 15 nt, Human
auuuaacagaaaugu

SEQ ID NO: 1630904 - RNA, 14 nt, Human
auuuaacagaaaug

SEQ ID NO: 1630905 - RNA, 12 nt, Human
auuuaacagaaa

SEQ ID NO: 1630906 - RNA, 14 nt, Human
auuuauucugcuca

SEQ ID NO: 1630907 - RNA, 17 nt, Human
auuuauuuuaauaaugu

SEQ ID NO: 1630908 - RNA, 13 nt, Human
auuuauucugcuc

SEQ ID NO: 1630909 - RNA, 12 nt, Human
auuucauuucuu

SEQ ID NO: 1630910 - RNA, 16 nt, Human
auuucaaacggccuca

SEQ ID NO: 1630911 - RNA, 20 nt, Human
auuuauuuuaauaauguuuc

SEQ ID NO: 1630912 - RNA, 19 nt, Human
auuuauuuuaauaauguuu

SEQ ID NO: 1630913 - RNA, 17 nt, Human
auuuccagccaaagccu

SEQ ID NO: 1630914 - RNA, 22 nt, Human
auuucauuugugccagaaugcu

SEQ ID NO: 1630915 - RNA, 20 nt, Human
auuuccagugaaaucaguua

SEQ ID NO: 1630916 - RNA, 14 nt, Human
auuugaaauauuga

SEQ ID NO: 1630917 - RNA, 15 nt, Human
auuugaaaauuuuga

SEQ ID NO: 1630918 - RNA, 14 nt, Human
auuugaaaauuuug

SEQ ID NO: 1630919 - RNA, 15 nt, Human
auuuccguuaaaaua

SEQ ID NO: 1630920 - RNA, 16 nt, Human
auuuccguuaaaauac

SEQ ID NO: 1630921 - RNA, 17 nt, Human
auuuccguuaaaauacc

SEQ ID NO: 1630922 - RNA, 21 nt, Human
auugacccacaagaaaugaaa

SEQ ID NO: 1630923 - RNA, 18 nt, Human
auugacccacaagaaaug

SEQ ID NO: 1630924 - RNA, 13 nt, Human
auucuucuccacu

SEQ ID NO: 1630925 - RNA, 22 nt, Human
auucuuccucccucccucuuuc

SEQ ID NO: 1630926 - RNA, 13 nt, Human
auucuuauuuaau

SEQ ID NO: 1630927 - RNA, 18 nt, Human
auucuuaaaguugaauuu

SEQ ID NO: 1630928 - RNA, 18 nt, Human
auucuuauuuaaugaaag

SEQ ID NO: 1630929 - RNA, 14 nt, Human
auucuuauuuaaug

SEQ ID NO: 1630930 - RNA, 23 nt, Human
auucuucagcaaaaauauuuuau

SEQ ID NO: 1630931 - RNA, 15 nt, Human
auucuucagcaaaaa

SEQ ID NO: 1630932 - RNA, 17 nt, Human
auucuccuuguguuacu

SEQ ID NO: 1630933 - RNA, 24 nt, Human
auucugucucuggauuauauuaug

SEQ ID NO: 1630934 - RNA, 21 nt, Human
auucuguauagauuagaauuc

SEQ ID NO: 1630935 - RNA, 16 nt, Human
auucuuaaaguugaau

SEQ ID NO: 1630936 - RNA, 15 nt, Human
auucuuaaaguugaa

SEQ ID NO: 1630937 - RNA, 14 nt, Human
auucuuaaaguuga

SEQ ID NO: 1630938 - RNA, 13 nt, Human
auucuuaaaguug

SEQ ID NO: 1630939 - RNA, 14 nt, Human
auugugucucuugg

SEQ ID NO: 1630940 - RNA, 18 nt, Human
auugugucucuugguccu

SEQ ID NO: 1630941 - RNA, 20 nt, Human
auuguccccgacccuugccg

SEQ ID NO: 1630942 - RNA, 19 nt, Human
auuguccccgacccuugcc

SEQ ID NO: 1630943 - RNA, 17 nt, Human
auuguccccgacccuug

SEQ ID NO: 1630944 - RNA, 13 nt, Human
auuguauucagag

SEQ ID NO: 1630945 - RNA, 23 nt, Human
auugguguuguacucaauuuuaa

SEQ ID NO: 1630946 - RNA, 22 nt, Human
auugguguuguacucaauuuua

SEQ ID NO: 1630947 - RNA, 14 nt, Human
auugguguuguacu

SEQ ID NO: 1630948 - RNA, 20 nt, Human
auucuccaccugccagggac

SEQ ID NO: 1630949 - RNA, 19 nt, Human
auucuccaccugccaggga

SEQ ID NO: 1630950 - RNA, 15 nt, Human
auucucaugccucag

SEQ ID NO: 1630951 - RNA, 14 nt, Human
auucucaugccuca

SEQ ID NO: 1630952 - RNA, 21 nt, Human
auucuccaccugccagggaca

SEQ ID NO: 1630953 - RNA, 21 nt, Human
auucucaugccucagccuccu

SEQ ID NO: 1630954 - RNA, 21 nt, Human
auucuccuaucaccugucuug

SEQ ID NO: 1630955 - RNA, 13 nt, Human
auucuccugccuc

SEQ ID NO: 1630956 - RNA, 14 nt, Human
auucuccugccuca

SEQ ID NO: 1630957 - RNA, 11 nt, Human
auucuccugcc

SEQ ID NO: 1630958 - RNA, 12 nt, Human
auucuccugccu

SEQ ID NO: 1630959 - RNA, 16 nt, Human
auucuccuuguguuac

SEQ ID NO: 1630960 - RNA, 17 nt, Human
auucuccugccucagcc

SEQ ID NO: 1630961 - RNA, 15 nt, Human
auucuccugccucag

SEQ ID NO: 1630962 - RNA, 19 nt, Human
auucuccugccucagccuc

SEQ ID NO: 1630963 - RNA, 20 nt, Human
auucuccugccucagccucc

SEQ ID NO: 1630964 - RNA, 15 nt, Human
auucccaagcucugc

SEQ ID NO: 1630965 - RNA, 14 nt, Human
auucccaagcucug

SEQ ID NO: 1630966 - RNA, 16 nt, Human
auucccaagcucugcu

SEQ ID NO: 1630967 - RNA, 17 nt, Human
auucccaagcucugcuc

SEQ ID NO: 1630968 - RNA, 14 nt, Human
auucaggaagcuca

SEQ ID NO: 1630969 - RNA, 17 nt, Human
auucagaguugaugguu

SEQ ID NO: 1630970 - RNA, 19 nt, Human
auucaguaauaacucuacc

SEQ ID NO: 1630971 - RNA, 15 nt, Human
auucaguaauaacuc

SEQ ID NO: 1630972 - RNA, 19 nt, Human
auucaggaagcucagggcc

SEQ ID NO: 1630973 - RNA, 17 nt, Human
auucaggaagcucaggg

SEQ ID NO: 1630974 - RNA, 20 nt, Human
auucaggaagcucagggccu

SEQ ID NO: 1630975 - RNA, 18 nt, Human
auucagauaugauucaaa

SEQ ID NO: 1630976 - RNA, 12 nt, Human
auugaaaucuuu

SEQ ID NO: 1630977 - RNA, 20 nt, Human
auucagauaugauucaaaug

SEQ ID NO: 1630978 - RNA, 20 nt, Human
uuuucauuuaggugaggaag

SEQ ID NO: 1630979 - RNA, 18 nt, Human
uuuucugagaaagacuau

SEQ ID NO: 1630980 - RNA, 15 nt, Human
uuuucugagaaagac

SEQ ID NO: 1630981 - RNA, 15 nt, Human
uuuucugauccaguu

SEQ ID NO: 1630982 - RNA, 16 nt, Human
uuuucucuaggaaaua

SEQ ID NO: 1630983 - RNA, 14 nt, Human
uuuucucuaggaaa

SEQ ID NO: 1630984 - RNA, 13 nt, Human
uuuuauuaugcau

SEQ ID NO: 1630985 - RNA, 22 nt, Human
uuuuauuaugaaacuuguguaa

SEQ ID NO: 1630986 - RNA, 21 nt, Human
uuuuauuaugaaacuugugua

SEQ ID NO: 1630987 - RNA, 12 nt, Human
uuuuauuaugaa

SEQ ID NO: 1630988 - RNA, 11 nt, Human
uuuuauuuuau

SEQ ID NO: 1630989 - RNA, 15 nt, Human
auuaaaagaauauuu

SEQ ID NO: 1630990 - RNA, 15 nt, Human
auuaaaaaucucaaa

SEQ ID NO: 1630991 - RNA, 19 nt, Human
auuaaaaaucucaaauuuc

SEQ ID NO: 1630992 - RNA, 20 nt, Human
auuaaaaaucucaaauuucu

SEQ ID NO: 1630993 - RNA, 22 nt, Human
auuaaaaaucucaaauuucuaa

SEQ ID NO: 1630994 - RNA, 23 nt, Human
auuaaaacacaacaucuuuuucu

SEQ ID NO: 1630995 - RNA, 21 nt, Human
auguuuucaggcuagauguau

SEQ ID NO: 1630996 - RNA, 17 nt, Human
auguuuucaggcuagau

SEQ ID NO: 1630997 - RNA, 15 nt, Human
auguuuucaggcuag

SEQ ID NO: 1630998 - RNA, 17 nt, Human
auguuuaguaaucauau

SEQ ID NO: 1630999 - RNA, 18 nt, Human
auguucaucaaugaauga

SEQ ID NO: 1631000 - RNA, 18 nt, Human
auguugcauagaauaaaa

SEQ ID NO: 1631001 - RNA, 17 nt, Human
auguugcauagaauaaa

SEQ ID NO: 1631002 - RNA, 12 nt, Human
auguugcccagg

SEQ ID NO: 1631003 - RNA, 17 nt, Human
auguugcccaggcaggu

SEQ ID NO: 1631004 - RNA, 20 nt, Human
auguugcccaggcaggucuu

SEQ ID NO: 1631005 - RNA, 20 nt, Human
auguugcccuguugcugccu

SEQ ID NO: 1631006 - RNA, 20 nt, Human
auguuaaaccaugggauaaa

SEQ ID NO: 1631007 - RNA, 13 nt, Human
auguuaaaccaug

SEQ ID NO: 1631008 - RNA, 12 nt, Human
auguuaaaccau

SEQ ID NO: 1631009 - RNA, 14 nt, Human
uuuuaauaauguuu

SEQ ID NO: 1631010 - RNA, 13 nt, Human
uuuuaauaauguu

SEQ ID NO: 1631011 - RNA, 12 nt, Human
uuuuaauaaugu

SEQ ID NO: 1631012 - RNA, 12 nt, Human
auggggcugcac

SEQ ID NO: 1631013 - RNA, 20 nt, Human
auggggcccugccuccuuug

SEQ ID NO: 1631014 - RNA, 14 nt, Human
uuuuaauaaacacu

SEQ ID NO: 1631015 - RNA, 16 nt, Human
uuuuaauaauguuuca

SEQ ID NO: 1631016 - RNA, 22 nt, Human
augugccagguuuuuggucuga

SEQ ID NO: 1631017 - RNA, 19 nt, Human
augugcuaguaauuggaaa

SEQ ID NO: 1631018 - RNA, 20 nt, Human
augugcuaguaauuggaaag

SEQ ID NO: 1631019 - RNA, 20 nt, Human
auguggaguucaucuugaau

SEQ ID NO: 1631020 - RNA, 24 nt, Human
auguggaguucaucuugaauugua

SEQ ID NO: 1631021 - RNA, 23 nt, Human
auguguguuuuaaaaugagaaau

SEQ ID NO: 1631022 - RNA, 12 nt, Human
augugugugugc

SEQ ID NO: 1631023 - RNA, 23 nt, Human
auuaaguaaugauaacuggaaac

SEQ ID NO: 1631024 - RNA, 22 nt, Human
uuuuuguuccacaaguuaaaua

SEQ ID NO: 1631025 - RNA, 19 nt, Human
uuuuugugaaaagcuccau

SEQ ID NO: 1631026 - RNA, 20 nt, Human
uuuuuguagagccagggucu

SEQ ID NO: 1631027 - RNA, 19 nt, Human
uuuuuguagagccaggguc

SEQ ID NO: 1631028 - RNA, 20 nt, Human
uuuuuauggcuuuugugcau

SEQ ID NO: 1631029 - RNA, 21 nt, Human
uuuuuauggcuuuugugcauu

SEQ ID NO: 1631030 - RNA, 22 nt, Human
uuuuuauggcuuuugugcauua

SEQ ID NO: 1631031 - RNA, 20 nt, Human
auuacauuuguauaaaauaa

SEQ ID NO: 1631032 - RNA, 18 nt, Human
auuacauuuguauaaaau

SEQ ID NO: 1631033 - RNA, 17 nt, Human
auuacauuuguauaaaa

SEQ ID NO: 1631034 - RNA, 16 nt, Human
auuaaguacuauguau

SEQ ID NO: 1631035 - RNA, 14 nt, Human
auuaaguacuaugu

SEQ ID NO: 1631036 - RNA, 21 nt, Human
auuacaguggggaaugaagau

SEQ ID NO: 1631037 - RNA, 12 nt, Human
auuacuucugcu

SEQ ID NO: 1631038 - RNA, 12 nt, Human
auuagaauucug

SEQ ID NO: 1631039 - RNA, 14 nt, Human
auuagaauucugua

SEQ ID NO: 1631040 - RNA, 13 nt, Human
auuagaauucugu

SEQ ID NO: 1631041 - RNA, 18 nt, Human
auuagaauucuguauaga

SEQ ID NO: 1631042 - RNA, 17 nt, Human
auuagaauucuguauag

SEQ ID NO: 1631043 - RNA, 16 nt, Human
auuagaauucuguaua

SEQ ID NO: 1631044 - RNA, 15 nt, Human
auuagaauucuguau

SEQ ID NO: 1631045 - RNA, 21 nt, Human
auuagaauucuguauagauua

SEQ ID NO: 1631046 - RNA, 17 nt, Human
uuuugauccaagcuggu

SEQ ID NO: 1631047 - RNA, 17 nt, Human
uuuugagugccuuacac

SEQ ID NO: 1631048 - RNA, 11 nt, Human
auuaaagccau

SEQ ID NO: 1631049 - RNA, 21 nt, Human
auuaagcauauauuuuuauau

SEQ ID NO: 1631050 - RNA, 15 nt, Human
auuaagcauauauuu

SEQ ID NO: 1631051 - RNA, 14 nt, Human
auuaagcauauauu

SEQ ID NO: 1631052 - RNA, 23 nt, Human
uuuugccauguuggccaggcugg

SEQ ID NO: 1631053 - RNA, 23 nt, Human
uuuugugcauuaucuagauacug

SEQ ID NO: 1631054 - RNA, 17 nt, Human
uuuugugcauuaucuag

SEQ ID NO: 1631055 - RNA, 20 nt, Human
uuuugugcauuaucuagaua

SEQ ID NO: 1631056 - RNA, 21 nt, Human
uuuugugaugucccaacuugu

SEQ ID NO: 1631057 - RNA, 15 nt, Human
uuuuguuccacaagu

SEQ ID NO: 1631058 - RNA, 21 nt, Human
uuuuguuccacaaguuaaaua

SEQ ID NO: 1631059 - RNA, 18 nt, Human
uuuuguuguuuguuuagu

SEQ ID NO: 1631060 - RNA, 12 nt, Human
uuuuguuucugu

SEQ ID NO: 1631061 - RNA, 22 nt, Human
uuuuguuuggaccaaaaaccag

SEQ ID NO: 1631062 - RNA, 12 nt, Human
uuuuguuuggac

SEQ ID NO: 1631063 - RNA, 13 nt, Human
uuuuguuucugua

SEQ ID NO: 1631064 - RNA, 19 nt, Human
uuuuuauauuugaaauauu

SEQ ID NO: 1631065 - RNA, 23 nt, Human
uuuuuauacauaaacaagaccac

SEQ ID NO: 1631066 - RNA, 12 nt, Human
uuuuuauggcuu

SEQ ID NO: 1631067 - RNA, 20 nt, Human
uuuuuaucgucacugcuuaa

SEQ ID NO: 1631068 - RNA, 12 nt, Human
uuuuuaucaugu

SEQ ID NO: 1631069 - RNA, 11 nt, Human
uuuuuacuaau

SEQ ID NO: 1631070 - RNA, 23 nt, Human
uuuuguuuggaccaaaaaccagu

SEQ ID NO: 1631071 - RNA, 22 nt, Human
uuuuuagacagagucucacugu

SEQ ID NO: 1631072 - RNA, 19 nt, Human
caacugaccagccuccaug

SEQ ID NO: 1631073 - RNA, 17 nt, Human
caagacgcugugcugcc

SEQ ID NO: 1631074 - RNA, 16 nt, Human
caagacgcugugcugc

SEQ ID NO: 1631075 - RNA, 18 nt, Human
caagaccuucuccuucac

SEQ ID NO: 1631076 - RNA, 17 nt, Human
caagaccuucuccuuca

SEQ ID NO: 1631077 - RNA, 16 nt, Human
caagaccuucuccuuc

SEQ ID NO: 1631078 - RNA, 14 nt, Human
caagaccuucuccu

SEQ ID NO: 1631079 - RNA, 20 nt, Human
caagaacuuuccaggaaggc

SEQ ID NO: 1631080 - RNA, 19 nt, Human
caagacugcacaucaaaau

SEQ ID NO: 1631081 - RNA, 18 nt, Human
caagacucuuuggacacu

SEQ ID NO: 1631082 - RNA, 15 nt, Human
caagagcccaggccu

SEQ ID NO: 1631083 - RNA, 14 nt, Human
caagagcccaggcc

SEQ ID NO: 1631084 - RNA, 18 nt, Human
caagacgcugugcugccc

SEQ ID NO: 1631085 - RNA, 19 nt, Human
caagacgcugugcugcccu

SEQ ID NO: 1631086 - RNA, 17 nt, Human
caagcaccuccugccuc

SEQ ID NO: 1631087 - RNA, 16 nt, Human
caagcaccuccugccu

SEQ ID NO: 1631088 - RNA, 15 nt, Human
caagcaccuccugcc

SEQ ID NO: 1631089 - RNA, 15 nt, Human
caagagggcacuggu

SEQ ID NO: 1631090 - RNA, 14 nt, Human
caagagggcacugg

SEQ ID NO: 1631091 - RNA, 17 nt, Human
caagagcccaggccucc

SEQ ID NO: 1631092 - RNA, 16 nt, Human
caagagcccaggccuc

SEQ ID NO: 1631093 - RNA, 13 nt, Human
caagagggcacug

SEQ ID NO: 1631094 - RNA, 22 nt, Human
caacacucauugaccugaggcc

SEQ ID NO: 1631095 - RNA, 20 nt, Human
caacacucauugaccugagg

SEQ ID NO: 1631096 - RNA, 18 nt, Human
caacacucauugaccuga

SEQ ID NO: 1631097 - RNA, 18 nt, Human
caacccucagagccaccc

SEQ ID NO: 1631098 - RNA, 13 nt, Human
caacccucagagc

SEQ ID NO: 1631099 - RNA, 17 nt, Human
caacccuggcacccagg

SEQ ID NO: 1631100 - RNA, 14 nt, Human
caacgucugugcca

SEQ ID NO: 1631101 - RNA, 13 nt, Human
caacgucugugcc

SEQ ID NO: 1631102 - RNA, 17 nt, Human
caacugaccagccucca

SEQ ID NO: 1631103 - RNA, 15 nt, Human
caacugaccagccuc

SEQ ID NO: 1631104 - RNA, 19 nt, Human
caaccuucgccaccugggu

SEQ ID NO: 1631105 - RNA, 20 nt, Human
caaccuguucugcuuuccuc

SEQ ID NO: 1631106 - RNA, 14 nt, Human
caaccuccugggcu

SEQ ID NO: 1631107 - RNA, 15 nt, Human
caaccuccugggcua

SEQ ID NO: 1631108 - RNA, 17 nt, Human
caaggcugauuaaacca

SEQ ID NO: 1631109 - RNA, 22 nt, Human
caaggacugcagggacugccag

SEQ ID NO: 1631110 - RNA, 19 nt, Human
caagcuggucccacucagu

SEQ ID NO: 1631111 - RNA, 17 nt, Human
caagcuggucccacuca

SEQ ID NO: 1631112 - RNA, 15 nt, Human
caaggacugcaggga

SEQ ID NO: 1631113 - RNA, 18 nt, Human
caaggacagccccuccuc

SEQ ID NO: 1631114 - RNA, 21 nt, Human
caagccagauuuuccugaaaa

SEQ ID NO: 1631115 - RNA, 18 nt, Human
caagcaggacauggacaa

SEQ ID NO: 1631116 - RNA, 14 nt, Human
caagcaggacaugg

SEQ ID NO: 1631117 - RNA, 18 nt, Human
caagcaccuccugccucg

SEQ ID NO: 1631118 - RNA, 17 nt, Human
caagagggcacuggugg

SEQ ID NO: 1631119 - RNA, 22 nt, Human
caagcgauucuucugcuucagc

SEQ ID NO: 1631120 - RNA, 20 nt, Human
caagcgauucuucugcuuca

SEQ ID NO: 1631121 - RNA, 14 nt, Human
caagccuggcaagg

SEQ ID NO: 1631122 - RNA, 19 nt, Human
caagcgauucuucugcuuc

SEQ ID NO: 1631123 - RNA, 18 nt, Human
caagccguggcuucccgc

SEQ ID NO: 1631124 - RNA, 17 nt, Human
caagugagagcugggug

SEQ ID NO: 1631125 - RNA, 15 nt, Human
caagugagagcuggg

SEQ ID NO: 1631126 - RNA, 14 nt, Human
caagugagagcugg

SEQ ID NO: 1631127 - RNA, 21 nt, Human
caaguccucuuuucugagagg

SEQ ID NO: 1631128 - RNA, 18 nt, Human
caagugagagcugggugu

SEQ ID NO: 1631129 - RNA, 21 nt, Human
caagugauucucaugccucag

SEQ ID NO: 1631130 - RNA, 20 nt, Human
caagugauucucaugccuca

SEQ ID NO: 1631131 - RNA, 18 nt, Human
caagugauucucaugccu

SEQ ID NO: 1631132 - RNA, 17 nt, Human
caagugauucucaugcc

SEQ ID NO: 1631133 - RNA, 14 nt, Human
caaguuaaauaaau

SEQ ID NO: 1631134 - RNA, 19 nt, Human
caaguggcucccacacccu

SEQ ID NO: 1631135 - RNA, 23 nt, Human
caaggcugucaauuacaggaagu

SEQ ID NO: 1631136 - RNA, 15 nt, Human
caaggcugcagugag

SEQ ID NO: 1631137 - RNA, 12 nt, Human
caaggcugcagu

SEQ ID NO: 1631138 - RNA, 18 nt, Human
caaggggcccaaauucuu

SEQ ID NO: 1631139 - RNA, 14 nt, Human
caaggucauuuuuu

SEQ ID NO: 1631140 - RNA, 20 nt, Human
caaggucauuuuuuuuaaga

SEQ ID NO: 1631141 - RNA, 19 nt, Human
caaggguagggugggccuu

SEQ ID NO: 1631142 - RNA, 18 nt, Human
caaggguagggugggccu

SEQ ID NO: 1631143 - RNA, 14 nt, Human
caaguccucuuuuc

SEQ ID NO: 1631144 - RNA, 23 nt, Human
caauacaucccuuaccugggaaa

SEQ ID NO: 1631145 - RNA, 13 nt, Human
caauaggaaaaac

SEQ ID NO: 1631146 - RNA, 12 nt, Human
caauaggaaaaa

SEQ ID NO: 1631147 - RNA, 17 nt, Human
caauauucgcuguguca

SEQ ID NO: 1631148 - RNA, 15 nt, Human
caaugacuuacugua

SEQ ID NO: 1631149 - RNA, 17 nt, Human
caaugacuuacuguaca

SEQ ID NO: 1631150 - RNA, 18 nt, Human
caaugacuuacuguacau

SEQ ID NO: 1631151 - RNA, 23 nt, Human
caaugaccuuucaauaggaaaaa

SEQ ID NO: 1631152 - RNA, 21 nt, Human
caaugcacuuuguucuggcuc

SEQ ID NO: 1631153 - RNA, 20 nt, Human
caaugcacuuuguucuggcu

SEQ ID NO: 1631154 - RNA, 22 nt, Human
caaugcacuuuguucuggcucu

SEQ ID NO: 1631155 - RNA, 17 nt, Human
caaugcacuuuguucug

SEQ ID NO: 1631156 - RNA, 23 nt, Human
caauucucauuugucacacacuu

SEQ ID NO: 1631157 - RNA, 17 nt, Human
caauuacaggaaguacu

SEQ ID NO: 1631158 - RNA, 13 nt, Human
caauucuccugcc

SEQ ID NO: 1631159 - RNA, 16 nt, Human
caauuacaggaaguac

SEQ ID NO: 1631160 - RNA, 16 nt, Human
caauucuccugccuca

SEQ ID NO: 1631161 - RNA, 15 nt, Human
caauucuccugccuc

SEQ ID NO: 1631162 - RNA, 14 nt, Human
caauucuccugccu

SEQ ID NO: 1631163 - RNA, 17 nt, Human
caaugugauaaaacccc

SEQ ID NO: 1631164 - RNA, 15 nt, Human
caaugugauaaaacc

SEQ ID NO: 1631165 - RNA, 14 nt, Human
caauguucucucuu

SEQ ID NO: 1631166 - RNA, 14 nt, Human
caauaggaaaaacu

SEQ ID NO: 1631167 - RNA, 13 nt, Human
caaaggaagcaca

SEQ ID NO: 1631168 - RNA, 12 nt, Human
caaaggaagcac

SEQ ID NO: 1631169 - RNA, 15 nt, Human
caaagcuaggccugg

SEQ ID NO: 1631170 - RNA, 19 nt, Human
caaagcuaggccuggccag

SEQ ID NO: 1631171 - RNA, 14 nt, Human
caaagcuaggccug

SEQ ID NO: 1631172 - RNA, 13 nt, Human
caaagcuaggccu

SEQ ID NO: 1631173 - RNA, 18 nt, Human
caaaggguaucaggugcu

SEQ ID NO: 1631174 - RNA, 16 nt, Human
caaaggguaucaggug

SEQ ID NO: 1631175 - RNA, 14 nt, Human
caaaggaagcacau

SEQ ID NO: 1631176 - RNA, 17 nt, Human
caaacucaccugccccu

SEQ ID NO: 1631177 - RNA, 18 nt, Human
caaagccuccuccagccg

SEQ ID NO: 1631178 - RNA, 17 nt, Human
caaagccuccuccagcc

SEQ ID NO: 1631179 - RNA, 16 nt, Human
caaaauuguuacaaau

SEQ ID NO: 1631180 - RNA, 15 nt, Human
caaaauguaggguua

SEQ ID NO: 1631181 - RNA, 12 nt, Human
caaaauaaaacu

SEQ ID NO: 1631182 - RNA, 14 nt, Human
caaaauaaaacuuu

SEQ ID NO: 1631183 - RNA, 22 nt, Human
caaaauuuuuucucuaggaaau

SEQ ID NO: 1631184 - RNA, 21 nt, Human
caaaauuuuuucucuaggaaa

SEQ ID NO: 1631185 - RNA, 16 nt, Human
caaaauuuuuucucua

SEQ ID NO: 1631186 - RNA, 15 nt, Human
caaacacauacagga

SEQ ID NO: 1631187 - RNA, 20 nt, Human
caaacccuucagugccaaaa

SEQ ID NO: 1631188 - RNA, 15 nt, Human
caaauugugugaaag

SEQ ID NO: 1631189 - RNA, 21 nt, Human
caaauuguaagcaugcacaaa

SEQ ID NO: 1631190 - RNA, 11 nt, Human
caaauuucuaa

SEQ ID NO: 1631191 - RNA, 12 nt, Human
caaauuucuaaa

SEQ ID NO: 1631192 - RNA, 14 nt, Human
caaauuucuaaauc

SEQ ID NO: 1631193 - RNA, 14 nt, Human
caaaugucuauaaa

SEQ ID NO: 1631194 - RNA, 15 nt, Human
caaaugucuauaaac

SEQ ID NO: 1631195 - RNA, 21 nt, Human
caaauaugcaaagcacugacu

SEQ ID NO: 1631196 - RNA, 19 nt, Human
caaauaugcaaagcacuga

SEQ ID NO: 1631197 - RNA, 19 nt, Human
caaaggguaucaggugcug

SEQ ID NO: 1631198 - RNA, 19 nt, Human
caaagugcugggauuacag

SEQ ID NO: 1631199 - RNA, 23 nt, Human
caaagugcugggauuacaggugu

SEQ ID NO: 1631200 - RNA, 20 nt, Human
caaauacgugggcauucaaa

SEQ ID NO: 1631201 - RNA, 22 nt, Human
caaauacgugggcauucaaaug

SEQ ID NO: 1631202 - RNA, 21 nt, Human
caaauacgugggcauucaaau

SEQ ID NO: 1631203 - RNA, 13 nt, Human
auuuuccugaaaa

SEQ ID NO: 1631204 - RNA, 21 nt, Human
auuuugggguacccacugcuc

SEQ ID NO: 1631205 - RNA, 16 nt, Human
caaaaaaugcuugcuu

SEQ ID NO: 1631206 - RNA, 23 nt, Human
auuuugggguacccacugcucug

SEQ ID NO: 1631207 - RNA, 22 nt, Human
auuuugggguacccacugcucu

SEQ ID NO: 1631208 - RNA, 14 nt, Human
caaaaacacagcaa

SEQ ID NO: 1631209 - RNA, 13 nt, Human
caaaaacacagca

SEQ ID NO: 1631210 - RNA, 17 nt, Human
caaaaacacagcaaggg

SEQ ID NO: 1631211 - RNA, 15 nt, Human
caaaaacacagcaag

SEQ ID NO: 1631212 - RNA, 20 nt, Human
caaaaacauggccuuugcuu

SEQ ID NO: 1631213 - RNA, 13 nt, Human
caaaaaggcagga

SEQ ID NO: 1631214 - RNA, 18 nt, Human
caaaaaccaguauuguac

SEQ ID NO: 1631215 - RNA, 20 nt, Human
caaaaaccaguauuguacaa

SEQ ID NO: 1631216 - RNA, 19 nt, Human
caaaaaccaguauuguaca

SEQ ID NO: 1631217 - RNA, 23 nt, Human
caaaacuucagacauagaauuaa

SEQ ID NO: 1631218 - RNA, 17 nt, Human
caaaauaaaaaugaggu

SEQ ID NO: 1631219 - RNA, 21 nt, Human
caaaacucuccucugcugcug

SEQ ID NO: 1631220 - RNA, 20 nt, Human
caaaacucuccucugcugcu

SEQ ID NO: 1631221 - RNA, 22 nt, Human
caaaacucuccucugcugcugg

SEQ ID NO: 1631222 - RNA, 23 nt, Human
caaaacucuccucugcugcuggc

SEQ ID NO: 1631223 - RNA, 19 nt, Human
caaaaaucucaauauuuca

SEQ ID NO: 1631224 - RNA, 23 nt, Human
caaaaauauuuuaugauccagca

SEQ ID NO: 1631225 - RNA, 22 nt, Human
caaaaauauuuuaugauccagc

SEQ ID NO: 1631226 - RNA, 21 nt, Human
caaaaauauuuuaugauccag

SEQ ID NO: 1631227 - RNA, 17 nt, Human
caaaaauauuuuaugau

SEQ ID NO: 1631228 - RNA, 15 nt, Human
caaaaauauuuuaug

SEQ ID NO: 1631229 - RNA, 14 nt, Human
caaaaauauuuuau

SEQ ID NO: 1631230 - RNA, 20 nt, Human
cacaguuuucugagaaagac

SEQ ID NO: 1631231 - RNA, 19 nt, Human
cacaguuuucugagaaaga

SEQ ID NO: 1631232 - RNA, 17 nt, Human
cacaguuuucugagaaa

SEQ ID NO: 1631233 - RNA, 16 nt, Human
cacaguuuucugagaa

SEQ ID NO: 1631234 - RNA, 21 nt, Human
cacauagugaugguuccccug

SEQ ID NO: 1631235 - RNA, 23 nt, Human
cacagcugggguggggaccucag

SEQ ID NO: 1631236 - RNA, 22 nt, Human
cacagcugggguggggaccuca

SEQ ID NO: 1631237 - RNA, 22 nt, Human
cacagcuucauuuccugugucu

SEQ ID NO: 1631238 - RNA, 21 nt, Human
cacagcuucauuuccuguguc

SEQ ID NO: 1631239 - RNA, 15 nt, Human
cacaggcagguccag

SEQ ID NO: 1631240 - RNA, 14 nt, Human
cacaggcaggucca

SEQ ID NO: 1631241 - RNA, 11 nt, Human
cacaggcaggu

SEQ ID NO: 1631242 - RNA, 14 nt, Human
cacaggagggaggg

SEQ ID NO: 1631243 - RNA, 21 nt, Human
cacaggagggagggggaaggc

SEQ ID NO: 1631244 - RNA, 19 nt, Human
cacaggagggagggggaag

SEQ ID NO: 1631245 - RNA, 15 nt, Human
cacaguucucuccuu

SEQ ID NO: 1631246 - RNA, 14 nt, Human
cacaguucucuccu

SEQ ID NO: 1631247 - RNA, 17 nt, Human
cacagugcaucucagcc

SEQ ID NO: 1631248 - RNA, 22 nt, Human
cacaguccuuaccagcagagca

SEQ ID NO: 1631249 - RNA, 21 nt, Human
cacaguccuuaccagcagagc

SEQ ID NO: 1631250 - RNA, 15 nt, Human
cacaguccuuaccag

SEQ ID NO: 1631251 - RNA, 13 nt, Human
cacaguccuuacc

SEQ ID NO: 1631252 - RNA, 22 nt, Human
cacagugagucgaggacaggga

SEQ ID NO: 1631253 - RNA, 19 nt, Human
cacaggcagguccaggguu

SEQ ID NO: 1631254 - RNA, 19 nt, Human
cacagugaucaaguuauuu

SEQ ID NO: 1631255 - RNA, 14 nt, Human
cacagugcaucuca

SEQ ID NO: 1631256 - RNA, 20 nt, Human
cacucugucgcccagucugg

SEQ ID NO: 1631257 - RNA, 23 nt, Human
cacugacauuguuggccaaagcc

SEQ ID NO: 1631258 - RNA, 19 nt, Human
cacucugucgcccagucug

SEQ ID NO: 1631259 - RNA, 16 nt, Human
cacucugucgcccagu

SEQ ID NO: 1631260 - RNA, 15 nt, Human
cacucugucgcccag

SEQ ID NO: 1631261 - RNA, 19 nt, Human
cacucuggcagcucagaga

SEQ ID NO: 1631262 - RNA, 17 nt, Human
cacucuggcagcucaga

SEQ ID NO: 1631263 - RNA, 16 nt, Human
cacucuggcagcucag

SEQ ID NO: 1631264 - RNA, 15 nt, Human
cacucuggcagcuca

SEQ ID NO: 1631265 - RNA, 21 nt, Human
cacucuggcagcucagagagg

SEQ ID NO: 1631266 - RNA, 20 nt, Human
cacucuggcagcucagagag

SEQ ID NO: 1631267 - RNA, 23 nt, Human
cacucuggcagcucagagagggu

SEQ ID NO: 1631268 - RNA, 20 nt, Human
cacugacuucuaaguaaaac

SEQ ID NO: 1631269 - RNA, 16 nt, Human
cacugacuucuaagua

SEQ ID NO: 1631270 - RNA, 15 nt, Human
cacugacuucuaagu

SEQ ID NO: 1631271 - RNA, 14 nt, Human
cacugacuucuaag

SEQ ID NO: 1631272 - RNA, 21 nt, Human
cacugacuucuaaguaaaacc

SEQ ID NO: 1631273 - RNA, 13 nt, Human
cacugagacagcc

SEQ ID NO: 1631274 - RNA, 12 nt, Human
cacugagacagc

SEQ ID NO: 1631275 - RNA, 22 nt, Human
cacugagacagcccgggcucug

SEQ ID NO: 1631276 - RNA, 19 nt, Human
cacugagacagcccgggcu

SEQ ID NO: 1631277 - RNA, 17 nt, Human
cacugagacagcccggg

SEQ ID NO: 1631278 - RNA, 14 nt, Human
cacugagacagccc

SEQ ID NO: 1631279 - RNA, 23 nt, Human
cacugagacagcccgggcucugc

SEQ ID NO: 1631280 - RNA, 24 nt, Human
cacugaugggcaacccccagccug

SEQ ID NO: 1631281 - RNA, 18 nt, Human
cacugaugggcaaccccc

SEQ ID NO: 1631282 - RNA, 14 nt, Human
cacugaugggcaac

SEQ ID NO: 1631283 - RNA, 13 nt, Human
cacugcaaccucc

SEQ ID NO: 1631284 - RNA, 23 nt, Human
cacugauuugacauagucuggcu

SEQ ID NO: 1631285 - RNA, 21 nt, Human
cacugauuugacauagucugg

SEQ ID NO: 1631286 - RNA, 16 nt, Human
cacugcaaccuccgcc

SEQ ID NO: 1631287 - RNA, 14 nt, Human
cacugcaaccuccg

SEQ ID NO: 1631288 - RNA, 23 nt, Human
cacugcaaccuccgccucuuggg

SEQ ID NO: 1631289 - RNA, 22 nt, Human
cacugcacagugcaucucagcc

SEQ ID NO: 1631290 - RNA, 21 nt, Human
cacugcacagugcaucucagc

SEQ ID NO: 1631291 - RNA, 19 nt, Human
cacugcacagugcaucuca

SEQ ID NO: 1631292 - RNA, 18 nt, Human
cacugcacagugcaucuc

SEQ ID NO: 1631293 - RNA, 23 nt, Human
cacugcaaccuucgccaccuggg

SEQ ID NO: 1631294 - RNA, 22 nt, Human
cacugcaaccuucgccaccugg

SEQ ID NO: 1631295 - RNA, 14 nt, Human
cacugcaaccuucg

SEQ ID NO: 1631296 - RNA, 20 nt, Human
cacugccuucucaacuccaa

SEQ ID NO: 1631297 - RNA, 22 nt, Human
cacugccuucgauacaccgggc

SEQ ID NO: 1631298 - RNA, 20 nt, Human
cacugccuucgauacaccgg

SEQ ID NO: 1631299 - RNA, 12 nt, Human
cacugcucuggu

SEQ ID NO: 1631300 - RNA, 20 nt, Human
cacugcucugaugaagagga

SEQ ID NO: 1631301 - RNA, 17 nt, Human
cacugcugcccagccuc

SEQ ID NO: 1631302 - RNA, 15 nt, Human
cacugcugcccagcc

SEQ ID NO: 1631303 - RNA, 18 nt, Human
cacugcacuauagccuag

SEQ ID NO: 1631304 - RNA, 19 nt, Human
cacugcaccgggccacaga

SEQ ID NO: 1631305 - RNA, 18 nt, Human
cacugcaccgggccacag

SEQ ID NO: 1631306 - RNA, 16 nt, Human
cacugcaccgggccac

SEQ ID NO: 1631307 - RNA, 15 nt, Human
cacugcaccgggcca

SEQ ID NO: 1631308 - RNA, 14 nt, Human
cacugcaccgggcc

SEQ ID NO: 1631309 - RNA, 23 nt, Human
cacugcacagugcaucucagccc

SEQ ID NO: 1631310 - RNA, 19 nt, Human
cacugcacuauagccuagg

SEQ ID NO: 1631311 - RNA, 16 nt, Human
cacugccucuuccucc

SEQ ID NO: 1631312 - RNA, 16 nt, Human
cacugcuuccagugag

SEQ ID NO: 1631313 - RNA, 15 nt, Human
cacugcuuccaguga

SEQ ID NO: 1631314 - RNA, 14 nt, Human
cacugcuuccagug

SEQ ID NO: 1631315 - RNA, 13 nt, Human
cacugcuuaacuu

SEQ ID NO: 1631316 - RNA, 21 nt, Human
cacugcuggcugccuuagaac

SEQ ID NO: 1631317 - RNA, 16 nt, Human
cacugcuggcugccuu

SEQ ID NO: 1631318 - RNA, 15 nt, Human
cacugcuggcugccu

SEQ ID NO: 1631319 - RNA, 14 nt, Human
cacugcuggcugcc

SEQ ID NO: 1631320 - RNA, 13 nt, Human
cacugcuggcugc

SEQ ID NO: 1631321 - RNA, 12 nt, Human
cacugcuggcug

SEQ ID NO: 1631322 - RNA, 21 nt, Human
cacugcuuccagugaggcucu

SEQ ID NO: 1631323 - RNA, 20 nt, Human
cacugcuuccagugaggcuc

SEQ ID NO: 1631324 - RNA, 19 nt, Human
cacugcuuccagugaggcu

SEQ ID NO: 1631325 - RNA, 18 nt, Human
cacugcuuccagugaggc

SEQ ID NO: 1631326 - RNA, 20 nt, Human
cacugcuuuuggucugugug

SEQ ID NO: 1631327 - RNA, 22 nt, Human
cacugcuuccagugaggcucug

SEQ ID NO: 1631328 - RNA, 17 nt, Human
cacuggaacacuaauga

SEQ ID NO: 1631329 - RNA, 21 nt, Human
cacugcuuuuggucuguguga

SEQ ID NO: 1631330 - RNA, 15 nt, Human
cacuggacucaccuc

SEQ ID NO: 1631331 - RNA, 18 nt, Human
cacuggacucaccucccc

SEQ ID NO: 1631332 - RNA, 23 nt, Human
cacuugaacccgggaggcagagg

SEQ ID NO: 1631333 - RNA, 16 nt, Human
cacuugacaucaacug

SEQ ID NO: 1631334 - RNA, 21 nt, Human
cacuugaacccgggaggcaga

SEQ ID NO: 1631335 - RNA, 20 nt, Human
cacuugaacccgggaggcag

SEQ ID NO: 1631336 - RNA, 20 nt, Human
cacuugagaauuacccuuuu

SEQ ID NO: 1631337 - RNA, 17 nt, Human
cacuugagaauuacccu

SEQ ID NO: 1631338 - RNA, 19 nt, Human
cacuugacaucaacugcau

SEQ ID NO: 1631339 - RNA, 13 nt, Human
cacuugaguccag

SEQ ID NO: 1631340 - RNA, 19 nt, Human
cacuugaugacccccaacc

SEQ ID NO: 1631341 - RNA, 13 nt, Human
cacuugcagacuc

SEQ ID NO: 1631342 - RNA, 17 nt, Human
cacuuggucugugagau

SEQ ID NO: 1631343 - RNA, 15 nt, Human
cacuuggucugugag

SEQ ID NO: 1631344 - RNA, 20 nt, Human
cacuuucuagccagaggaga

SEQ ID NO: 1631345 - RNA, 19 nt, Human
cacuuucuagccagaggag

SEQ ID NO: 1631346 - RNA, 22 nt, Human
cacuugcagacucuacagaggc

SEQ ID NO: 1631347 - RNA, 19 nt, Human
cacuugcagacucuacaga

SEQ ID NO: 1631348 - RNA, 18 nt, Human
cacuugcagacucuacag

SEQ ID NO: 1631349 - RNA, 14 nt, Human
cacuugcagacucu

SEQ ID NO: 1631350 - RNA, 24 nt, Human
cacuugcagacucuacagaggcca

SEQ ID NO: 1631351 - RNA, 21 nt, Human
cacuucagcugacuuuucugu

SEQ ID NO: 1631352 - RNA, 12 nt, Human
cacuucagcuga

SEQ ID NO: 1631353 - RNA, 20 nt, Human
cacuucaggcucuucuccuu

SEQ ID NO: 1631354 - RNA, 16 nt, Human
cacuucaggcucuucu

SEQ ID NO: 1631355 - RNA, 15 nt, Human
cacuucaggcucuuc

SEQ ID NO: 1631356 - RNA, 14 nt, Human
cacuucaggcucuu

SEQ ID NO: 1631357 - RNA, 23 nt, Human
cacuucaggcucuucuccuuuca

SEQ ID NO: 1631358 - RNA, 14 nt, Human
cacuguugcccagg

SEQ ID NO: 1631359 - RNA, 16 nt, Human
cacuucccuacaugga

SEQ ID NO: 1631360 - RNA, 20 nt, Human
cacuuccauaaucuggacuc

SEQ ID NO: 1631361 - RNA, 23 nt, Human
cacuucgggaggucgaggcagga

SEQ ID NO: 1631362 - RNA, 21 nt, Human
cacuucgggaggucgaggcag

SEQ ID NO: 1631363 - RNA, 22 nt, Human
cacuucugccauauucuguugg

SEQ ID NO: 1631364 - RNA, 19 nt, Human
cacuguggguagacacaca

SEQ ID NO: 1631365 - RNA, 22 nt, Human
cacugugcugagucugaaggcu

SEQ ID NO: 1631366 - RNA, 21 nt, Human
cacugugcugagucugaaggc

SEQ ID NO: 1631367 - RNA, 20 nt, Human
cacugugcugagucugaagg

SEQ ID NO: 1631368 - RNA, 17 nt, Human
cacugugcugagucuga

SEQ ID NO: 1631369 - RNA, 15 nt, Human
cacugugcugagucu

SEQ ID NO: 1631370 - RNA, 13 nt, Human
cacugugcugagu

SEQ ID NO: 1631371 - RNA, 16 nt, Human
cacugugccaugugcc

SEQ ID NO: 1631372 - RNA, 15 nt, Human
cacugugccaugugc

SEQ ID NO: 1631373 - RNA, 18 nt, Human
cacugugccaugugccag

SEQ ID NO: 1631374 - RNA, 24 nt, Human
cacuguggguagacacacaugaag

SEQ ID NO: 1631375 - RNA, 22 nt, Human
cacuguggguagacacacauga

SEQ ID NO: 1631376 - RNA, 22 nt, Human
cacuguucucugcccuccaaga

SEQ ID NO: 1631377 - RNA, 21 nt, Human
cacuguucucugcccuccaag

SEQ ID NO: 1631378 - RNA, 19 nt, Human
cacuguucucugcccucca

SEQ ID NO: 1631379 - RNA, 17 nt, Human
cacuguucucugcccuc

SEQ ID NO: 1631380 - RNA, 16 nt, Human
cacuguucucugcccu

SEQ ID NO: 1631381 - RNA, 15 nt, Human
cacuguucucugccc

SEQ ID NO: 1631382 - RNA, 14 nt, Human
cacuguucucugcc

SEQ ID NO: 1631383 - RNA, 13 nt, Human
cacuguucucugc

SEQ ID NO: 1631384 - RNA, 14 nt, Human
cacugucaagauga

SEQ ID NO: 1631385 - RNA, 14 nt, Human
cacugugccaugug

SEQ ID NO: 1631386 - RNA, 13 nt, Human
cacugugaagaga

SEQ ID NO: 1631387 - RNA, 19 nt, Human
cacuguacuugcucuugau

SEQ ID NO: 1631388 - RNA, 18 nt, Human
cacuguacuugcucuuga

SEQ ID NO: 1631389 - RNA, 15 nt, Human
cacuguacuugcucu

SEQ ID NO: 1631390 - RNA, 22 nt, Human
cacgagcaggcuacugucagcu

SEQ ID NO: 1631391 - RNA, 20 nt, Human
cacgagcaggcuacugucag

SEQ ID NO: 1631392 - RNA, 19 nt, Human
cacgagcaggcuacuguca

SEQ ID NO: 1631393 - RNA, 17 nt, Human
cacgagcaggcuacugu

SEQ ID NO: 1631394 - RNA, 17 nt, Human
cacgcacuucgggaggu

SEQ ID NO: 1631395 - RNA, 12 nt, Human
cacgauuucugu

SEQ ID NO: 1631396 - RNA, 14 nt, Human
cacgauuucuguuu

SEQ ID NO: 1631397 - RNA, 16 nt, Human
cacgauuucuguuuag

SEQ ID NO: 1631398 - RNA, 18 nt, Human
cacgcccccacuggugac

SEQ ID NO: 1631399 - RNA, 17 nt, Human
cacgcccccacugguga

SEQ ID NO: 1631400 - RNA, 15 nt, Human
cacgcccccacuggu

SEQ ID NO: 1631401 - RNA, 13 nt, Human
cacgcccccacug

SEQ ID NO: 1631402 - RNA, 23 nt, Human
cacgccagauucuuuccugaggc

SEQ ID NO: 1631403 - RNA, 22 nt, Human
cacgccagauucuuuccugagg

SEQ ID NO: 1631404 - RNA, 20 nt, Human
cacgccagauucuuuccuga

SEQ ID NO: 1631405 - RNA, 19 nt, Human
cacgccagauucuuuccug

SEQ ID NO: 1631406 - RNA, 15 nt, Human
cacgccacugcacua

SEQ ID NO: 1631407 - RNA, 13 nt, Human
cacgccacugcac

SEQ ID NO: 1631408 - RNA, 22 nt, Human
cacgaauauugcugauggugca

SEQ ID NO: 1631409 - RNA, 19 nt, Human
cacgaauauugcugauggu

SEQ ID NO: 1631410 - RNA, 16 nt, Human
cacgaauauugcugau

SEQ ID NO: 1631411 - RNA, 17 nt, Human
cacgacugcccggcagg

SEQ ID NO: 1631412 - RNA, 16 nt, Human
cacgacugcccggcag

SEQ ID NO: 1631413 - RNA, 13 nt, Human
caccuugacaggg

SEQ ID NO: 1631414 - RNA, 14 nt, Human
caccuucccaugcc

SEQ ID NO: 1631415 - RNA, 13 nt, Human
caccuucccaugc

SEQ ID NO: 1631416 - RNA, 16 nt, Human
caccuugacagggcac

SEQ ID NO: 1631417 - RNA, 15 nt, Human
caccuugacagggca

SEQ ID NO: 1631418 - RNA, 18 nt, Human
caccuugacagggcacac

SEQ ID NO: 1631419 - RNA, 23 nt, Human
caccuuagacagucccugccaau

SEQ ID NO: 1631420 - RNA, 21 nt, Human
caccuuagacagucccugcca

SEQ ID NO: 1631421 - RNA, 22 nt, Human
caccuuagccugcccuccuuuc

SEQ ID NO: 1631422 - RNA, 19 nt, Human
caccuuagacagucccugc

SEQ ID NO: 1631423 - RNA, 18 nt, Human
caccuuagacagucccug

SEQ ID NO: 1631424 - RNA, 16 nt, Human
caccuuagacaguccc

SEQ ID NO: 1631425 - RNA, 14 nt, Human
caccuuagacaguc

SEQ ID NO: 1631426 - RNA, 17 nt, Human
caccugucuugccuuuu

SEQ ID NO: 1631427 - RNA, 20 nt, Human
caccugucuugccuuuuuca

SEQ ID NO: 1631428 - RNA, 22 nt, Human
cacguucuuacuaguuucccuu

SEQ ID NO: 1631429 - RNA, 19 nt, Human
cacgugguccuaaucuucu

SEQ ID NO: 1631430 - RNA, 16 nt, Human
cacgugguccuaaucu

SEQ ID NO: 1631431 - RNA, 13 nt, Human
cacuaaacaaaga

SEQ ID NO: 1631432 - RNA, 12 nt, Human
cacguuucuaaa

SEQ ID NO: 1631433 - RNA, 14 nt, Human
cacguuucuaaagg

SEQ ID NO: 1631434 - RNA, 23 nt, Human
cacguuucuaaaggcuaccuuug

SEQ ID NO: 1631435 - RNA, 14 nt, Human
cacguacacacaca

SEQ ID NO: 1631436 - RNA, 19 nt, Human
cacguacacacacauacac

SEQ ID NO: 1631437 - RNA, 18 nt, Human
cacguacacacacauaca

SEQ ID NO: 1631438 - RNA, 13 nt, Human
cacgugacagccg

SEQ ID NO: 1631439 - RNA, 20 nt, Human
cacggcucacugcagccuca

SEQ ID NO: 1631440 - RNA, 19 nt, Human
cacggcucacugcagccuc

SEQ ID NO: 1631441 - RNA, 17 nt, Human
cacggcucacugcagcc

SEQ ID NO: 1631442 - RNA, 16 nt, Human
cacggcucacugcagc

SEQ ID NO: 1631443 - RNA, 17 nt, Human
cacgcuggaccuugaac

SEQ ID NO: 1631444 - RNA, 14 nt, Human
cacgcuccuuccuc

SEQ ID NO: 1631445 - RNA, 20 nt, Human
cacgcuggaccuugaacugg

SEQ ID NO: 1631446 - RNA, 15 nt, Human
cacgggggccaagga

SEQ ID NO: 1631447 - RNA, 23 nt, Human
cacggugaauggcuuuguauaga

SEQ ID NO: 1631448 - RNA, 20 nt, Human
cacggugaauggcuuuguau

SEQ ID NO: 1631449 - RNA, 21 nt, Human
cacgcgugcacacaccagagc

SEQ ID NO: 1631450 - RNA, 16 nt, Human
cacgcgugcacacacc

SEQ ID NO: 1631451 - RNA, 15 nt, Human
cacgcgugcacacac

SEQ ID NO: 1631452 - RNA, 23 nt, Human
cacgcgugcacacaccagagccc

SEQ ID NO: 1631453 - RNA, 20 nt, Human
cacgccuguaauccuagcac

SEQ ID NO: 1631454 - RNA, 19 nt, Human
cacgccuguaauccuagca

SEQ ID NO: 1631455 - RNA, 16 nt, Human
cacucaaaucaagaaa

SEQ ID NO: 1631456 - RNA, 20 nt, Human
cacucaaaagcugggcaggu

SEQ ID NO: 1631457 - RNA, 19 nt, Human
cacucaaaagcugggcagg

SEQ ID NO: 1631458 - RNA, 18 nt, Human
cacucaaaagcugggcag

SEQ ID NO: 1631459 - RNA, 17 nt, Human
cacucaaaagcugggca

SEQ ID NO: 1631460 - RNA, 15 nt, Human
cacucaaaagcuggg

SEQ ID NO: 1631461 - RNA, 21 nt, Human
cacuauguugcccaggcaggu

SEQ ID NO: 1631462 - RNA, 20 nt, Human
cacuauguugcccaggcagg

SEQ ID NO: 1631463 - RNA, 17 nt, Human
cacucagaagacacuga

SEQ ID NO: 1631464 - RNA, 16 nt, Human
cacucagaagacacug

SEQ ID NO: 1631465 - RNA, 12 nt, Human
cacucagaagac

SEQ ID NO: 1631466 - RNA, 20 nt, Human
cacucacauuuauucugcuc

SEQ ID NO: 1631467 - RNA, 19 nt, Human
cacucacauuuauucugcu

SEQ ID NO: 1631468 - RNA, 19 nt, Human
cacucagaagacacugaug

SEQ ID NO: 1631469 - RNA, 18 nt, Human
cacucagaagacacugau

SEQ ID NO: 1631470 - RNA, 22 nt, Human
cacucagaagacacugaugggc

SEQ ID NO: 1631471 - RNA, 19 nt, Human
cacuaguauuucuaugaaa

SEQ ID NO: 1631472 - RNA, 14 nt, Human
cacuaguauuucua

SEQ ID NO: 1631473 - RNA, 14 nt, Human
cacuauaauguaag

SEQ ID NO: 1631474 - RNA, 21 nt, Human
cacuauagccuaggugacaga

SEQ ID NO: 1631475 - RNA, 14 nt, Human
cacuauagccuagg

SEQ ID NO: 1631476 - RNA, 18 nt, Human
cacuauaauguaagcucu

SEQ ID NO: 1631477 - RNA, 19 nt, Human
cacuauguugcccaggcag

SEQ ID NO: 1631478 - RNA, 18 nt, Human
cacuauguugcccaggca

SEQ ID NO: 1631479 - RNA, 17 nt, Human
cacuauguugcccaggc

SEQ ID NO: 1631480 - RNA, 16 nt, Human
cacuauguugcccagg

SEQ ID NO: 1631481 - RNA, 15 nt, Human
cacuauguugcccag

SEQ ID NO: 1631482 - RNA, 19 nt, Human
cacuaucccggcugcccuu

SEQ ID NO: 1631483 - RNA, 18 nt, Human
cacuaucccggcugcccu

SEQ ID NO: 1631484 - RNA, 21 nt, Human
cacuaaauugacacuuaaaaa

SEQ ID NO: 1631485 - RNA, 16 nt, Human
cacuaacaugauuugg

SEQ ID NO: 1631486 - RNA, 16 nt, Human
cacuaaccacgcugga

SEQ ID NO: 1631487 - RNA, 15 nt, Human
cacuaaccacgcugg

SEQ ID NO: 1631488 - RNA, 14 nt, Human
cacuaaccacgcug

SEQ ID NO: 1631489 - RNA, 17 nt, Human
cacuaagagagaaugag

SEQ ID NO: 1631490 - RNA, 18 nt, Human
cacuaaccacgcuggacc

SEQ ID NO: 1631491 - RNA, 18 nt, Human
cacuaaggugugcucuga

SEQ ID NO: 1631492 - RNA, 17 nt, Human
cacuaaggugugcucug

SEQ ID NO: 1631493 - RNA, 21 nt, Human
cacuccuucacagaugggugc

SEQ ID NO: 1631494 - RNA, 14 nt, Human
cacuccuucacaga

SEQ ID NO: 1631495 - RNA, 17 nt, Human
cacucccugcaaccuga

SEQ ID NO: 1631496 - RNA, 14 nt, Human
cacuccuaccuggu

SEQ ID NO: 1631497 - RNA, 13 nt, Human
cacuccuaccugg

SEQ ID NO: 1631498 - RNA, 16 nt, Human
cacucccugcaaccug

SEQ ID NO: 1631499 - RNA, 13 nt, Human
cacucccugcaac

SEQ ID NO: 1631500 - RNA, 12 nt, Human
cacucccugcaa

SEQ ID NO: 1631501 - RNA, 22 nt, Human
cacucauugaccugaggcccuu

SEQ ID NO: 1631502 - RNA, 20 nt, Human
cacucauugaccugaggccc

SEQ ID NO: 1631503 - RNA, 19 nt, Human
cacucauugaccugaggcc

SEQ ID NO: 1631504 - RNA, 18 nt, Human
cacucauugaccugaggc

SEQ ID NO: 1631505 - RNA, 16 nt, Human
cacucaguccauagca

SEQ ID NO: 1631506 - RNA, 15 nt, Human
cacucauugaccuga

SEQ ID NO: 1631507 - RNA, 14 nt, Human
cacucuggcagcuc

SEQ ID NO: 1631508 - RNA, 13 nt, Human
cacucuggcagcu

SEQ ID NO: 1631509 - RNA, 12 nt, Human
cacucuggcagc

SEQ ID NO: 1631510 - RNA, 23 nt, Human
cacucugagacucgcgacaaugc

SEQ ID NO: 1631511 - RNA, 12 nt, Human
cacucugagacu

SEQ ID NO: 1631512 - RNA, 12 nt, Human
cacucuccuugg

SEQ ID NO: 1631513 - RNA, 17 nt, Human
cacucuccauuuaauaa

SEQ ID NO: 1631514 - RNA, 15 nt, Human
cacucuccauuuaau

SEQ ID NO: 1631515 - RNA, 14 nt, Human
cacucuacuuagca

SEQ ID NO: 1631516 - RNA, 13 nt, Human
caccucccugcaa

SEQ ID NO: 1631517 - RNA, 14 nt, Human
caccucccugcaau

SEQ ID NO: 1631518 - RNA, 11 nt, Human
caccuccugcc

SEQ ID NO: 1631519 - RNA, 13 nt, Human
caccuccugccuc

SEQ ID NO: 1631520 - RNA, 14 nt, Human
caccuccugccucg

SEQ ID NO: 1631521 - RNA, 15 nt, Human
caccuccugcugggc

SEQ ID NO: 1631522 - RNA, 14 nt, Human
caccuccugcuggg

SEQ ID NO: 1631523 - RNA, 17 nt, Human
caccucucccuuggauu

SEQ ID NO: 1631524 - RNA, 14 nt, Human
caccucucccuugg

SEQ ID NO: 1631525 - RNA, 13 nt, Human
caccucucccuug

SEQ ID NO: 1631526 - RNA, 17 nt, Human
caccuccugcugggcag

SEQ ID NO: 1631527 - RNA, 14 nt, Human
caccucauggaauu

SEQ ID NO: 1631528 - RNA, 12 nt, Human
caccucauggaa

SEQ ID NO: 1631529 - RNA, 11 nt, Human
caccucaugga

SEQ ID NO: 1631530 - RNA, 10 nt, Human
caccucccug

SEQ ID NO: 1631531 - RNA, 21 nt, Human
caccucccccaucucuucugg

SEQ ID NO: 1631532 - RNA, 14 nt, Human
caccucccccaucu

SEQ ID NO: 1631533 - RNA, 18 nt, Human
caccgggccacagagaaa

SEQ ID NO: 1631534 - RNA, 15 nt, Human
caccgggccacagag

SEQ ID NO: 1631535 - RNA, 22 nt, Human
caccgggcacucagaagacacu

SEQ ID NO: 1631536 - RNA, 15 nt, Human
caccgggcacucaga

SEQ ID NO: 1631537 - RNA, 13 nt, Human
caccgggccugga

SEQ ID NO: 1631538 - RNA, 15 nt, Human
caccggggccucgga

SEQ ID NO: 1631539 - RNA, 20 nt, Human
caccgugccuggccacgccc

SEQ ID NO: 1631540 - RNA, 15 nt, Human
caccgugccuggcca

SEQ ID NO: 1631541 - RNA, 14 nt, Human
caccgggcacucag

SEQ ID NO: 1631542 - RNA, 20 nt, Human
caccggcuggccuggccccu

SEQ ID NO: 1631543 - RNA, 18 nt, Human
caccggcuggccuggccc

SEQ ID NO: 1631544 - RNA, 17 nt, Human
caccggcuggccuggcc

SEQ ID NO: 1631545 - RNA, 16 nt, Human
caccggcuggccuggc

SEQ ID NO: 1631546 - RNA, 15 nt, Human
caccggcuggccugg

SEQ ID NO: 1631547 - RNA, 14 nt, Human
caccggcuggccug

SEQ ID NO: 1631548 - RNA, 21 nt, Human
caccgcagacaggaccaggga

SEQ ID NO: 1631549 - RNA, 19 nt, Human
caccucugcacaagcugca

SEQ ID NO: 1631550 - RNA, 18 nt, Human
caccucugcacaagcugc

SEQ ID NO: 1631551 - RNA, 19 nt, Human
caccucucucacuccuuga

SEQ ID NO: 1631552 - RNA, 18 nt, Human
caccucucucacuccuug

SEQ ID NO: 1631553 - RNA, 17 nt, Human
caccucucucacuccuu

SEQ ID NO: 1631554 - RNA, 15 nt, Human
caccucucucacucc

SEQ ID NO: 1631555 - RNA, 15 nt, Human
caccugaagacucau

SEQ ID NO: 1631556 - RNA, 14 nt, Human
caccugaagacuca

SEQ ID NO: 1631557 - RNA, 23 nt, Human
caccugaagacucauucuucugu

SEQ ID NO: 1631558 - RNA, 23 nt, Human
caccugcggugcuaucuccccca

SEQ ID NO: 1631559 - RNA, 20 nt, Human
caccuggaauauauaaccag

SEQ ID NO: 1631560 - RNA, 15 nt, Human
caccuggccucugca

SEQ ID NO: 1631561 - RNA, 14 nt, Human
caccuggccucugc

SEQ ID NO: 1631562 - RNA, 13 nt, Human
caccuggccucug

SEQ ID NO: 1631563 - RNA, 12 nt, Human
caccuggccucu

SEQ ID NO: 1631564 - RNA, 20 nt, Human
caccuggccucugcacuccc

SEQ ID NO: 1631565 - RNA, 19 nt, Human
caccuggccucugcacucc

SEQ ID NO: 1631566 - RNA, 18 nt, Human
caccuggccucugcacuc

SEQ ID NO: 1631567 - RNA, 17 nt, Human
caccuggccucugcacu

SEQ ID NO: 1631568 - RNA, 23 nt, Human
caccuggccucugcacuccccug

SEQ ID NO: 1631569 - RNA, 20 nt, Human
cacauauugauuuccguuaa

SEQ ID NO: 1631570 - RNA, 20 nt, Human
caccccucaacaccucugca

SEQ ID NO: 1631571 - RNA, 13 nt, Human
cacauauugauuu

SEQ ID NO: 1631572 - RNA, 21 nt, Human
cacccggccccugcugguuca

SEQ ID NO: 1631573 - RNA, 18 nt, Human
cacccggccccugcuggu

SEQ ID NO: 1631574 - RNA, 17 nt, Human
cacccggccccugcugg

SEQ ID NO: 1631575 - RNA, 16 nt, Human
cacccggccccugcug

SEQ ID NO: 1631576 - RNA, 14 nt, Human
cacccggccccugc

SEQ ID NO: 1631577 - RNA, 13 nt, Human
cacccggccccug

SEQ ID NO: 1631578 - RNA, 12 nt, Human
cacccggccccu

SEQ ID NO: 1631579 - RNA, 19 nt, Human
cacccgcuaagagggaggg

SEQ ID NO: 1631580 - RNA, 23 nt, Human
cacccugugauggggcccugccu

SEQ ID NO: 1631581 - RNA, 22 nt, Human
cacccugugauggggcccugcc

SEQ ID NO: 1631582 - RNA, 21 nt, Human
cacccugugauggggcccugc

SEQ ID NO: 1631583 - RNA, 20 nt, Human
cacccugugauggggcccug

SEQ ID NO: 1631584 - RNA, 18 nt, Human
cacccugugauggggccc

SEQ ID NO: 1631585 - RNA, 15 nt, Human
cacccugugaugggg

SEQ ID NO: 1631586 - RNA, 12 nt, Human
cacccugugaug

SEQ ID NO: 1631587 - RNA, 11 nt, Human
cacccugugau

SEQ ID NO: 1631588 - RNA, 21 nt, Human
caccgaaaacguggcugcuuc

SEQ ID NO: 1631589 - RNA, 19 nt, Human
caccgaaaacguggcugcu

SEQ ID NO: 1631590 - RNA, 22 nt, Human
caccgaaaacguggcugcuuca

SEQ ID NO: 1631591 - RNA, 18 nt, Human
caccgaaaacguggcugc

SEQ ID NO: 1631592 - RNA, 15 nt, Human
caccgaaaacguggc

SEQ ID NO: 1631593 - RNA, 18 nt, Human
caccgcagacaggaccag

SEQ ID NO: 1631594 - RNA, 17 nt, Human
caccgcagacaggacca

SEQ ID NO: 1631595 - RNA, 15 nt, Human
caccgcagacaggac

SEQ ID NO: 1631596 - RNA, 14 nt, Human
caccgcagacagga

SEQ ID NO: 1631597 - RNA, 13 nt, Human
caccgcagacagg

SEQ ID NO: 1631598 - RNA, 12 nt, Human
caccgcagacag

SEQ ID NO: 1631599 - RNA, 16 nt, Human
cacgccagauucuuuc

SEQ ID NO: 1631600 - RNA, 14 nt, Human
cagauaaucacaau

SEQ ID NO: 1631601 - RNA, 14 nt, Human
cagauaaacaguag

SEQ ID NO: 1631602 - RNA, 23 nt, Human
cagauaaauaguuuaugauucca

SEQ ID NO: 1631603 - RNA, 22 nt, Human
cagauaaagguucaugcaaacu

SEQ ID NO: 1631604 - RNA, 15 nt, Human
cagaguuguuacauu

SEQ ID NO: 1631605 - RNA, 18 nt, Human
cagaguuguuacauuuuu

SEQ ID NO: 1631606 - RNA, 19 nt, Human
cagaguuguuacauuuuua

SEQ ID NO: 1631607 - RNA, 16 nt, Human
cagaguugaagacaga

SEQ ID NO: 1631608 - RNA, 15 nt, Human
cagaguugaagacag

SEQ ID NO: 1631609 - RNA, 14 nt, Human
cagaguugaagaca

SEQ ID NO: 1631610 - RNA, 20 nt, Human
cagaguugaagacagagcua

SEQ ID NO: 1631611 - RNA, 19 nt, Human
cagaguugaagacagagcu

SEQ ID NO: 1631612 - RNA, 18 nt, Human
cagaguugaagacagagc

SEQ ID NO: 1631613 - RNA, 17 nt, Human
cagaguugaagacagag

SEQ ID NO: 1631614 - RNA, 14 nt, Human
cagaguuguuacau

SEQ ID NO: 1631615 - RNA, 22 nt, Human
cagaguugaagacagagcuaca

SEQ ID NO: 1631616 - RNA, 14 nt, Human
cagauccuggaaau

SEQ ID NO: 1631617 - RNA, 20 nt, Human
cagaucucuaacuucaccau

SEQ ID NO: 1631618 - RNA, 22 nt, Human
cagauacaggaaaagcugcuga

SEQ ID NO: 1631619 - RNA, 21 nt, Human
cagauacaggaaaagcugcug

SEQ ID NO: 1631620 - RNA, 20 nt, Human
cagauacaggaaaagcugcu

SEQ ID NO: 1631621 - RNA, 14 nt, Human
cagaucugccuaag

SEQ ID NO: 1631622 - RNA, 17 nt, Human
cagaucugccuaaggac

SEQ ID NO: 1631623 - RNA, 16 nt, Human
cagaucugccuaagga

SEQ ID NO: 1631624 - RNA, 23 nt, Human
cagaucugccuaaggacuucuuu

SEQ ID NO: 1631625 - RNA, 21 nt, Human
cagaucugccuaaggacuucu

SEQ ID NO: 1631626 - RNA, 20 nt, Human
cagaucugccuaaggacuuc

SEQ ID NO: 1631627 - RNA, 19 nt, Human
cagaucugccuaaggacuu

SEQ ID NO: 1631628 - RNA, 16 nt, Human
cagaugcaccagcccu

SEQ ID NO: 1631629 - RNA, 14 nt, Human
cagaugcaccagcc

SEQ ID NO: 1631630 - RNA, 13 nt, Human
cagaugcaccagc

SEQ ID NO: 1631631 - RNA, 22 nt, Human
cagaugcaccagcccuuagcag

SEQ ID NO: 1631632 - RNA, 17 nt, Human
cagaugcaccagcccuu

SEQ ID NO: 1631633 - RNA, 20 nt, Human
cagagugagacucugucuca

SEQ ID NO: 1631634 - RNA, 19 nt, Human
cagagugagacucugucuc

SEQ ID NO: 1631635 - RNA, 18 nt, Human
cagagugagacucugucu

SEQ ID NO: 1631636 - RNA, 17 nt, Human
cagagugagacucuguc

SEQ ID NO: 1631637 - RNA, 16 nt, Human
cagagugagacucugu

SEQ ID NO: 1631638 - RNA, 23 nt, Human
cagagucucacuguugcccaggc

SEQ ID NO: 1631639 - RNA, 22 nt, Human
cagagucucacuguugcccagg

SEQ ID NO: 1631640 - RNA, 23 nt, Human
cagagggagugacagaggcagcc

SEQ ID NO: 1631641 - RNA, 22 nt, Human
cagagggagugacagaggcagc

SEQ ID NO: 1631642 - RNA, 21 nt, Human
cagagggagugacagaggcag

SEQ ID NO: 1631643 - RNA, 20 nt, Human
cagagggagugacagaggca

SEQ ID NO: 1631644 - RNA, 19 nt, Human
cagagggccugcaagggag

SEQ ID NO: 1631645 - RNA, 15 nt, Human
cagagggccugcaag

SEQ ID NO: 1631646 - RNA, 21 nt, Human
cagagucucacuguugcccag

SEQ ID NO: 1631647 - RNA, 20 nt, Human
cagagucucacuguugccca

SEQ ID NO: 1631648 - RNA, 19 nt, Human
cagagucucacuguugccc

SEQ ID NO: 1631649 - RNA, 17 nt, Human
cagagucucacuguugc

SEQ ID NO: 1631650 - RNA, 13 nt, Human
cagagucucacug

SEQ ID NO: 1631651 - RNA, 22 nt, Human
cagaggcagccccauucugccu

SEQ ID NO: 1631652 - RNA, 20 nt, Human
cagaggcagccccauucugc

SEQ ID NO: 1631653 - RNA, 19 nt, Human
cagaggcagccccauucug

SEQ ID NO: 1631654 - RNA, 18 nt, Human
cagaggcagccccauucu

SEQ ID NO: 1631655 - RNA, 15 nt, Human
cagaggcagccccau

SEQ ID NO: 1631656 - RNA, 14 nt, Human
cagaggcagcccca

SEQ ID NO: 1631657 - RNA, 13 nt, Human
cagaggcagcccc

SEQ ID NO: 1631658 - RNA, 12 nt, Human
cagaggcagccc

SEQ ID NO: 1631659 - RNA, 21 nt, Human
cagaggccaugggccuccugu

SEQ ID NO: 1631660 - RNA, 20 nt, Human
cagaggccaugggccuccug

SEQ ID NO: 1631661 - RNA, 19 nt, Human
cagaggccaugggccuccu

SEQ ID NO: 1631662 - RNA, 23 nt, Human
cagaggcagccccauucugccug

SEQ ID NO: 1631663 - RNA, 19 nt, Human
cagagggagugacagaggc

SEQ ID NO: 1631664 - RNA, 18 nt, Human
cagagggagugacagagg

SEQ ID NO: 1631665 - RNA, 16 nt, Human
cagagggagugacaga

SEQ ID NO: 1631666 - RNA, 14 nt, Human
cagagggagugaca

SEQ ID NO: 1631667 - RNA, 23 nt, Human
cagaggcugccucucccaucacu

SEQ ID NO: 1631668 - RNA, 13 nt, Human
cagaggcugccuc

SEQ ID NO: 1631669 - RNA, 23 nt, Human
cagaggcgcaugaauuugugaag

SEQ ID NO: 1631670 - RNA, 19 nt, Human
cagagacuccugcaggcag

SEQ ID NO: 1631671 - RNA, 18 nt, Human
cagagacuccugcaggca

SEQ ID NO: 1631672 - RNA, 17 nt, Human
cagagacuccugcaggc

SEQ ID NO: 1631673 - RNA, 16 nt, Human
cagagacuccugcagg

SEQ ID NO: 1631674 - RNA, 15 nt, Human
cagagacuccugcag

SEQ ID NO: 1631675 - RNA, 14 nt, Human
cagagacuccugca

SEQ ID NO: 1631676 - RNA, 13 nt, Human
cagagacuccugc

SEQ ID NO: 1631677 - RNA, 20 nt, Human
cagagaccaucccugaaggc

SEQ ID NO: 1631678 - RNA, 19 nt, Human
cagagaccaucccugaagg

SEQ ID NO: 1631679 - RNA, 18 nt, Human
cagagaccaucccugaag

SEQ ID NO: 1631680 - RNA, 17 nt, Human
cagagaccaucccugaa

SEQ ID NO: 1631681 - RNA, 21 nt, Human
cagagaccaucccugaaggcc

SEQ ID NO: 1631682 - RNA, 20 nt, Human
cagagcaagugagacccugu

SEQ ID NO: 1631683 - RNA, 14 nt, Human
cagagcaagugaga

SEQ ID NO: 1631684 - RNA, 16 nt, Human
cagagcaccuuagaca

SEQ ID NO: 1631685 - RNA, 18 nt, Human
cagagcacagcagccccu

SEQ ID NO: 1631686 - RNA, 18 nt, Human
cagagaguggcuccuccc

SEQ ID NO: 1631687 - RNA, 15 nt, Human
cagagaguggcuccu

SEQ ID NO: 1631688 - RNA, 14 nt, Human
cagagaguggcucc

SEQ ID NO: 1631689 - RNA, 13 nt, Human
cagagaguggcuc

SEQ ID NO: 1631690 - RNA, 16 nt, Human
cagagaccaucccuga

SEQ ID NO: 1631691 - RNA, 14 nt, Human
cagagaccaucccu

SEQ ID NO: 1631692 - RNA, 13 nt, Human
cagagaccauccc

SEQ ID NO: 1631693 - RNA, 15 nt, Human
cagagacacaagccu

SEQ ID NO: 1631694 - RNA, 14 nt, Human
cagagacacaagcc

SEQ ID NO: 1631695 - RNA, 17 nt, Human
cagagacacaagccuuc

SEQ ID NO: 1631696 - RNA, 16 nt, Human
cagagacacaagccuu

SEQ ID NO: 1631697 - RNA, 15 nt, Human
cagagaauucucuua

SEQ ID NO: 1631698 - RNA, 21 nt, Human
cagagaaugaaagggcccaga

SEQ ID NO: 1631699 - RNA, 20 nt, Human
cagagaaugaaagggcccag

SEQ ID NO: 1631700 - RNA, 19 nt, Human
cagagaaugaaagggccca

SEQ ID NO: 1631701 - RNA, 19 nt, Human
cagaggagagaggaccccc

SEQ ID NO: 1631702 - RNA, 15 nt, Human
cagaggagagaggac

SEQ ID NO: 1631703 - RNA, 13 nt, Human
cagaggagagagg

SEQ ID NO: 1631704 - RNA, 11 nt, Human
cagaggcagcc

SEQ ID NO: 1631705 - RNA, 20 nt, Human
cagaggagagaggacccccu

SEQ ID NO: 1631706 - RNA, 21 nt, Human
cagagcccacgcccccacugg

SEQ ID NO: 1631707 - RNA, 20 nt, Human
cagagcccacgcccccacug

SEQ ID NO: 1631708 - RNA, 19 nt, Human
cagagcccacgcccccacu

SEQ ID NO: 1631709 - RNA, 17 nt, Human
cagagcccacgccccca

SEQ ID NO: 1631710 - RNA, 23 nt, Human
cagagcccacgcccccacuggug

SEQ ID NO: 1631711 - RNA, 13 nt, Human
cagagccugcagu

SEQ ID NO: 1631712 - RNA, 13 nt, Human
cagaggaaggaga

SEQ ID NO: 1631713 - RNA, 12 nt, Human
cagagccugcag

SEQ ID NO: 1631714 - RNA, 21 nt, Human
cagagcagagaccaucccuga

SEQ ID NO: 1631715 - RNA, 19 nt, Human
cagagcagagaccaucccu

SEQ ID NO: 1631716 - RNA, 18 nt, Human
cagagcagagaccauccc

SEQ ID NO: 1631717 - RNA, 17 nt, Human
cagagcagagaccaucc

SEQ ID NO: 1631718 - RNA, 15 nt, Human
cagagcagagaccau

SEQ ID NO: 1631719 - RNA, 14 nt, Human
cagagcagagacca

SEQ ID NO: 1631720 - RNA, 13 nt, Human
cagagcagagacc

SEQ ID NO: 1631721 - RNA, 22 nt, Human
cagagcaccuuagacagucccu

SEQ ID NO: 1631722 - RNA, 21 nt, Human
cagagcaccuuagacaguccc

SEQ ID NO: 1631723 - RNA, 19 nt, Human
cagagcaccuuagacaguc

SEQ ID NO: 1631724 - RNA, 18 nt, Human
cagagcaccuuagacagu

SEQ ID NO: 1631725 - RNA, 12 nt, Human
cagagcagagac

SEQ ID NO: 1631726 - RNA, 11 nt, Human
cagagcagaga

SEQ ID NO: 1631727 - RNA, 23 nt, Human
cagagcaccuuagacagucccug

SEQ ID NO: 1631728 - RNA, 16 nt, Human
cagagcccacgccccc

SEQ ID NO: 1631729 - RNA, 20 nt, Human
cagagcccaccuuggcucaa

SEQ ID NO: 1631730 - RNA, 19 nt, Human
cagagcccaccuuggcuca

SEQ ID NO: 1631731 - RNA, 17 nt, Human
cagagcccaccuuggcu

SEQ ID NO: 1631732 - RNA, 15 nt, Human
cagagcccaccuugg

SEQ ID NO: 1631733 - RNA, 22 nt, Human
cagagccaccccuaaagagaua

SEQ ID NO: 1631734 - RNA, 16 nt, Human
cagaggccaugggccu

SEQ ID NO: 1631735 - RNA, 23 nt, Human
cagaaaauggaagacagcucuua

SEQ ID NO: 1631736 - RNA, 22 nt, Human
cagaaaauggaagacagcucuu

SEQ ID NO: 1631737 - RNA, 21 nt, Human
cagaaaauggaagacagcucu

SEQ ID NO: 1631738 - RNA, 20 nt, Human
cagaaaauggaagacagcuc

SEQ ID NO: 1631739 - RNA, 16 nt, Human
cagaaaauggaagaca

SEQ ID NO: 1631740 - RNA, 22 nt, Human
cagaaaaguugaauuuuacaug

SEQ ID NO: 1631741 - RNA, 20 nt, Human
cagaaaaguugaauuuuaca

SEQ ID NO: 1631742 - RNA, 17 nt, Human
cagaaaaguugaauuuu

SEQ ID NO: 1631743 - RNA, 21 nt, Human
cagaaaagaaaguucaugcuu

SEQ ID NO: 1631744 - RNA, 23 nt, Human
cagaacagugauuaccagggacu

SEQ ID NO: 1631745 - RNA, 19 nt, Human
cagaaagcagaacagugau

SEQ ID NO: 1631746 - RNA, 18 nt, Human
cagaaagcagaacaguga

SEQ ID NO: 1631747 - RNA, 24 nt, Human
cagaaagaaguggggacagagcag

SEQ ID NO: 1631748 - RNA, 22 nt, Human
cacuuuuguucuugguuuguaa

SEQ ID NO: 1631749 - RNA, 14 nt, Human
cacuuuuguucuug

SEQ ID NO: 1631750 - RNA, 18 nt, Human
cacuuuuauuuagcacca

SEQ ID NO: 1631751 - RNA, 23 nt, Human
cacuuuguucuggcucuuccagg

SEQ ID NO: 1631752 - RNA, 16 nt, Human
cacuuuguucuggcuc

SEQ ID NO: 1631753 - RNA, 14 nt, Human
cacuuuguucuggc

SEQ ID NO: 1631754 - RNA, 13 nt, Human
cacuuuguucugg

SEQ ID NO: 1631755 - RNA, 13 nt, Human
cacuuugggaggc

SEQ ID NO: 1631756 - RNA, 12 nt, Human
cacuuugggagg

SEQ ID NO: 1631757 - RNA, 16 nt, Human
cacuuugggaggccaa

SEQ ID NO: 1631758 - RNA, 22 nt, Human
cacuuucuagccagaggagaga

SEQ ID NO: 1631759 - RNA, 12 nt, Human
cacuuugcauaa

SEQ ID NO: 1631760 - RNA, 19 nt, Human
cagaaggaagacuucaucc

SEQ ID NO: 1631761 - RNA, 18 nt, Human
cagaaggaagacuucauc

SEQ ID NO: 1631762 - RNA, 17 nt, Human
cagaaggaagacuucau

SEQ ID NO: 1631763 - RNA, 16 nt, Human
cagaaggaagacuuca

SEQ ID NO: 1631764 - RNA, 18 nt, Human
cagaaucucaaauaacua

SEQ ID NO: 1631765 - RNA, 17 nt, Human
cagaaucucaaauaacu

SEQ ID NO: 1631766 - RNA, 20 nt, Human
cagaagcaacccaaauguuc

SEQ ID NO: 1631767 - RNA, 19 nt, Human
cagaagcaacccaaauguu

SEQ ID NO: 1631768 - RNA, 21 nt, Human
cagaagacacugaugggcaac

SEQ ID NO: 1631769 - RNA, 22 nt, Human
cagaacccuuggagccaaugga

SEQ ID NO: 1631770 - RNA, 19 nt, Human
cagacauagaauuaacaca

SEQ ID NO: 1631771 - RNA, 17 nt, Human
cagacauagaauuaaca

SEQ ID NO: 1631772 - RNA, 19 nt, Human
cagacauacuaaccagcag

SEQ ID NO: 1631773 - RNA, 22 nt, Human
cagacaccuugacagggcacac

SEQ ID NO: 1631774 - RNA, 20 nt, Human
cagacaccuugacagggcac

SEQ ID NO: 1631775 - RNA, 19 nt, Human
cagacaccuugacagggca

SEQ ID NO: 1631776 - RNA, 20 nt, Human
cagacaguuaagagaaauga

SEQ ID NO: 1631777 - RNA, 23 nt, Human
cagacacaggcccggcuccaggc

SEQ ID NO: 1631778 - RNA, 22 nt, Human
cagacacaggcccggcuccagg

SEQ ID NO: 1631779 - RNA, 21 nt, Human
cagacacaggcccggcuccag

SEQ ID NO: 1631780 - RNA, 18 nt, Human
cagacacaggcccggcuc

SEQ ID NO: 1631781 - RNA, 17 nt, Human
cagacacaggcccggcu

SEQ ID NO: 1631782 - RNA, 15 nt, Human
cagacacaggcccgg

SEQ ID NO: 1631783 - RNA, 14 nt, Human
cagacacaggcccg

SEQ ID NO: 1631784 - RNA, 13 nt, Human
cagacacaggccc

SEQ ID NO: 1631785 - RNA, 23 nt, Human
cagacacauguccaagaagccca

SEQ ID NO: 1631786 - RNA, 22 nt, Human
cagacacauguccaagaagccc

SEQ ID NO: 1631787 - RNA, 21 nt, Human
cagacacauguccaagaagcc

SEQ ID NO: 1631788 - RNA, 17 nt, Human
cagacacauguccaaga

SEQ ID NO: 1631789 - RNA, 14 nt, Human
cagacacaugucca

SEQ ID NO: 1631790 - RNA, 22 nt, Human
cagacaaagcgugguggacaug

SEQ ID NO: 1631791 - RNA, 20 nt, Human
cagacaacaaaccuguuucu

SEQ ID NO: 1631792 - RNA, 20 nt, Human
cagaauuucccaaagcagug

SEQ ID NO: 1631793 - RNA, 19 nt, Human
cagaauuucccaaagcagu

SEQ ID NO: 1631794 - RNA, 18 nt, Human
cagaauuucccaaagcag

SEQ ID NO: 1631795 - RNA, 17 nt, Human
cagaauuucccaaagca

SEQ ID NO: 1631796 - RNA, 12 nt, Human
cagacaaagcgu

SEQ ID NO: 1631797 - RNA, 24 nt, Human
cagaauuucccaaagcagugcaug

SEQ ID NO: 1631798 - RNA, 15 nt, Human
cagaauucucuaguu

SEQ ID NO: 1631799 - RNA, 18 nt, Human
cagaauucucuaguuuga

SEQ ID NO: 1631800 - RNA, 11 nt, Human
cagaauucuca

SEQ ID NO: 1631801 - RNA, 14 nt, Human
cagaauuucccaaa

SEQ ID NO: 1631802 - RNA, 15 nt, Human
cagaaucucgcucug

SEQ ID NO: 1631803 - RNA, 23 nt, Human
cagagaaaguacuucuccacccu

SEQ ID NO: 1631804 - RNA, 19 nt, Human
cagagaaaguacuucucca

SEQ ID NO: 1631805 - RNA, 20 nt, Human
cagacuuuuuuuaaauagua

SEQ ID NO: 1631806 - RNA, 21 nt, Human
cagacccugcccugugggccc

SEQ ID NO: 1631807 - RNA, 17 nt, Human
cagacccugcccugugg

SEQ ID NO: 1631808 - RNA, 16 nt, Human
cagacccugcccugug

SEQ ID NO: 1631809 - RNA, 15 nt, Human
cagacccugcccugu

SEQ ID NO: 1631810 - RNA, 22 nt, Human
cagacccugcccugugggcccc

SEQ ID NO: 1631811 - RNA, 14 nt, Human
cagacccggcugcg

SEQ ID NO: 1631812 - RNA, 12 nt, Human
cagacccggcug

SEQ ID NO: 1631813 - RNA, 23 nt, Human
cagaccccuggcuuuucacugcu

SEQ ID NO: 1631814 - RNA, 22 nt, Human
cagaccccuggcuuuucacugc

SEQ ID NO: 1631815 - RNA, 21 nt, Human
cagaccccuggcuuuucacug

SEQ ID NO: 1631816 - RNA, 12 nt, Human
cagacccugccc

SEQ ID NO: 1631817 - RNA, 16 nt, Human
cagacccggcugcgug

SEQ ID NO: 1631818 - RNA, 14 nt, Human
cagacccugcccug

SEQ ID NO: 1631819 - RNA, 13 nt, Human
cagacccugcccu

SEQ ID NO: 1631820 - RNA, 20 nt, Human
cagaccacaaaacuuuucua

SEQ ID NO: 1631821 - RNA, 14 nt, Human
cagaccacaaaacu

SEQ ID NO: 1631822 - RNA, 18 nt, Human
cagaccccuggcuuuuca

SEQ ID NO: 1631823 - RNA, 16 nt, Human
cagaccccuggcuuuu

SEQ ID NO: 1631824 - RNA, 15 nt, Human
cagaccccuggcuuu

SEQ ID NO: 1631825 - RNA, 14 nt, Human
cagaccccuggcuu

SEQ ID NO: 1631826 - RNA, 13 nt, Human
cagaccccuggcu

SEQ ID NO: 1631827 - RNA, 16 nt, Human
cagacaacaaaccugu

SEQ ID NO: 1631828 - RNA, 18 nt, Human
cagaugggugcuuggagg

SEQ ID NO: 1631829 - RNA, 15 nt, Human
cagaugcugugcaaa

SEQ ID NO: 1631830 - RNA, 23 nt, Human
cagaugggugcuuggaggaagga

SEQ ID NO: 1631831 - RNA, 23 nt, Human
cagauuauucacugauuugacau

SEQ ID NO: 1631832 - RNA, 18 nt, Human
cagauuauucacugauuu

SEQ ID NO: 1631833 - RNA, 12 nt, Human
cagauuauucac

SEQ ID NO: 1631834 - RNA, 15 nt, Human
cagauuuuccugaaa

SEQ ID NO: 1631835 - RNA, 14 nt, Human
cagauuuuccugaa

SEQ ID NO: 1631836 - RNA, 19 nt, Human
cagauuuuuuacagcugcc

SEQ ID NO: 1631837 - RNA, 22 nt, Human
cagauuuuuuacagcugccugc

SEQ ID NO: 1631838 - RNA, 17 nt, Human
cagcaaaaauauuuuau

SEQ ID NO: 1631839 - RNA, 14 nt, Human
cagauucuuuccug

SEQ ID NO: 1631840 - RNA, 22 nt, Human
cagauuuuauuauguaaauccc

SEQ ID NO: 1631841 - RNA, 21 nt, Human
cagauuuuauuauguaaaucc

SEQ ID NO: 1631842 - RNA, 20 nt, Human
cagauuuuauuauguaaauc

SEQ ID NO: 1631843 - RNA, 18 nt, Human
cagauuuuauuauguaaa

SEQ ID NO: 1631844 - RNA, 16 nt, Human
cagauuuuauuaugua

SEQ ID NO: 1631845 - RNA, 15 nt, Human
cagauuuuauuaugu

SEQ ID NO: 1631846 - RNA, 13 nt, Human
cagauuuuauuau

SEQ ID NO: 1631847 - RNA, 23 nt, Human
cagcaacgcaggcccccaggugc

SEQ ID NO: 1631848 - RNA, 18 nt, Human
cagcaaaagaugcuucuc

SEQ ID NO: 1631849 - RNA, 19 nt, Human
cagcaagggugaugggaaa

SEQ ID NO: 1631850 - RNA, 17 nt, Human
cagcaaggagauuuaca

SEQ ID NO: 1631851 - RNA, 18 nt, Human
cagcaaggagauuuacaa

SEQ ID NO: 1631852 - RNA, 23 nt, Human
cagcaagggugaugggaaagcau

SEQ ID NO: 1631853 - RNA, 22 nt, Human
cagcaagggugaugggaaagca

SEQ ID NO: 1631854 - RNA, 12 nt, Human
cagcaagugaga

SEQ ID NO: 1631855 - RNA, 17 nt, Human
cagcaagugagagcugg

SEQ ID NO: 1631856 - RNA, 16 nt, Human
cagcaagugagagcug

SEQ ID NO: 1631857 - RNA, 15 nt, Human
cagcaagugagagcu

SEQ ID NO: 1631858 - RNA, 14 nt, Human
cagcaagugagagc

SEQ ID NO: 1631859 - RNA, 21 nt, Human
cagcaagugagagcugggugu

SEQ ID NO: 1631860 - RNA, 19 nt, Human
cagcaagugagagcugggu

SEQ ID NO: 1631861 - RNA, 13 nt, Human
cagcaauaaagca

SEQ ID NO: 1631862 - RNA, 21 nt, Human
cagcaauaaagcagcguuucu

SEQ ID NO: 1631863 - RNA, 22 nt, Human
cagcaauaaagcagcguuucua

SEQ ID NO: 1631864 - RNA, 20 nt, Human
cagcaauucuccugccucag

SEQ ID NO: 1631865 - RNA, 19 nt, Human
cagcaauucuccugccuca

SEQ ID NO: 1631866 - RNA, 18 nt, Human
cagcaauucuccugccuc

SEQ ID NO: 1631867 - RNA, 17 nt, Human
cagcaauucuccugccu

SEQ ID NO: 1631868 - RNA, 16 nt, Human
cagcaauucuccugcc

SEQ ID NO: 1631869 - RNA, 15 nt, Human
cagcaauucuccugc

SEQ ID NO: 1631870 - RNA, 19 nt, Human
cagcagaaaugccuuaccc

SEQ ID NO: 1631871 - RNA, 22 nt, Human
cagcagaaaugccuuacccuca

SEQ ID NO: 1631872 - RNA, 13 nt, Human
cagcagagcaccu

SEQ ID NO: 1631873 - RNA, 11 nt, Human
cagcagagcac

SEQ ID NO: 1631874 - RNA, 15 nt, Human
cagcagaaaugccuu

SEQ ID NO: 1631875 - RNA, 17 nt, Human
cagcagaaaugccuuac

SEQ ID NO: 1631876 - RNA, 19 nt, Human
cagcagauuauucacugau

SEQ ID NO: 1631877 - RNA, 15 nt, Human
cagcagauuauucac

SEQ ID NO: 1631878 - RNA, 14 nt, Human
cagcagauuauuca

SEQ ID NO: 1631879 - RNA, 23 nt, Human
cagcagccccugcacaaagcccu

SEQ ID NO: 1631880 - RNA, 16 nt, Human
cagcagccccugcaca

SEQ ID NO: 1631881 - RNA, 13 nt, Human
cagcagccccugc

SEQ ID NO: 1631882 - RNA, 14 nt, Human
cagcauucucacuc

SEQ ID NO: 1631883 - RNA, 15 nt, Human
cagcauucucacucc

SEQ ID NO: 1631884 - RNA, 20 nt, Human
cagcauccuggcacccggcc

SEQ ID NO: 1631885 - RNA, 19 nt, Human
cagcauccuggcacccggc

SEQ ID NO: 1631886 - RNA, 21 nt, Human
cagcauccuggcacccggccc

SEQ ID NO: 1631887 - RNA, 16 nt, Human
cagccaaagccuccuc

SEQ ID NO: 1631888 - RNA, 15 nt, Human
cagccaaagccuccu

SEQ ID NO: 1631889 - RNA, 21 nt, Human
cagccaaagccuccuccagcc

SEQ ID NO: 1631890 - RNA, 18 nt, Human
cagccaaagccuccucca

SEQ ID NO: 1631891 - RNA, 18 nt, Human
cagccaacuauggccugu

SEQ ID NO: 1631892 - RNA, 15 nt, Human
cagcaggcucucagg

SEQ ID NO: 1631893 - RNA, 14 nt, Human
cagcaggcucucag

SEQ ID NO: 1631894 - RNA, 12 nt, Human
cagcaggcucuc

SEQ ID NO: 1631895 - RNA, 18 nt, Human
cagcagccuggacccugu

SEQ ID NO: 1631896 - RNA, 15 nt, Human
cagcagccuggaccc

SEQ ID NO: 1631897 - RNA, 14 nt, Human
cagcagccuggacc

SEQ ID NO: 1631898 - RNA, 12 nt, Human
cagcagccugga

SEQ ID NO: 1631899 - RNA, 22 nt, Human
cagcagccuggacccuguggau

SEQ ID NO: 1631900 - RNA, 19 nt, Human
cagcagccuggacccugug

SEQ ID NO: 1631901 - RNA, 18 nt, Human
cagcagggagggcuucug

SEQ ID NO: 1631902 - RNA, 22 nt, Human
cagcaggcucucaggccagcug

SEQ ID NO: 1631903 - RNA, 20 nt, Human
cagcaggcucucaggccagc

SEQ ID NO: 1631904 - RNA, 19 nt, Human
cagcaggcucucaggccag

SEQ ID NO: 1631905 - RNA, 18 nt, Human
cagcaggcucucaggcca

SEQ ID NO: 1631906 - RNA, 17 nt, Human
cagcaggcucucaggcc

SEQ ID NO: 1631907 - RNA, 16 nt, Human
cagcaggcucucaggc

SEQ ID NO: 1631908 - RNA, 17 nt, Human
cagcauccuggcacccg

SEQ ID NO: 1631909 - RNA, 16 nt, Human
cagcauccuggcaccc

SEQ ID NO: 1631910 - RNA, 15 nt, Human
cagcauccuggcacc

SEQ ID NO: 1631911 - RNA, 14 nt, Human
cagcauccuggcac

SEQ ID NO: 1631912 - RNA, 20 nt, Human
cagcagggagggcuucugcc

SEQ ID NO: 1631913 - RNA, 17 nt, Human
cagccacauuccugaug

SEQ ID NO: 1631914 - RNA, 15 nt, Human
cagccacauuccuga

SEQ ID NO: 1631915 - RNA, 19 nt, Human
cagccacauuccugaugcu

SEQ ID NO: 1631916 - RNA, 14 nt, Human
cagccacauuccug

SEQ ID NO: 1631917 - RNA, 22 nt, Human
cagccacggccaggccagaggg

SEQ ID NO: 1631918 - RNA, 21 nt, Human
cagccacggccaggccagagg

SEQ ID NO: 1631919 - RNA, 19 nt, Human
cagccacggccaggccaga

SEQ ID NO: 1631920 - RNA, 18 nt, Human
cagccacggccaggccag

SEQ ID NO: 1631921 - RNA, 17 nt, Human
cagccacggccaggcca

SEQ ID NO: 1631922 - RNA, 16 nt, Human
cagccacggccaggcc

SEQ ID NO: 1631923 - RNA, 15 nt, Human
cagccacggccaggc

SEQ ID NO: 1631924 - RNA, 14 nt, Human
cagccacggccagg

SEQ ID NO: 1631925 - RNA, 22 nt, Human
cagccaguaaaugggggugcau

SEQ ID NO: 1631926 - RNA, 23 nt, Human
cagccacggccaggccagaggga

SEQ ID NO: 1631927 - RNA, 18 nt, Human
cagcccacuucugccaua

SEQ ID NO: 1631928 - RNA, 21 nt, Human
cagccccaaaacucuccucug

SEQ ID NO: 1631929 - RNA, 20 nt, Human
cagccccaaaacucuccucu

SEQ ID NO: 1631930 - RNA, 22 nt, Human
cagccccaaaacucuccucugc

SEQ ID NO: 1631931 - RNA, 15 nt, Human
cagcccacuucugcc

SEQ ID NO: 1631932 - RNA, 15 nt, Human
cagcccaccccucaa

SEQ ID NO: 1631933 - RNA, 19 nt, Human
cagcccacauagugauggu

SEQ ID NO: 1631934 - RNA, 14 nt, Human
cagcucaccagccc

SEQ ID NO: 1631935 - RNA, 18 nt, Human
cagccuccaugcugccuc

SEQ ID NO: 1631936 - RNA, 15 nt, Human
caggaaguagaggag

SEQ ID NO: 1631937 - RNA, 20 nt, Human
caggaaguacuggagaaaau

SEQ ID NO: 1631938 - RNA, 18 nt, Human
caggaaguacuggagaaa

SEQ ID NO: 1631939 - RNA, 17 nt, Human
caggaaguacuggagaa

SEQ ID NO: 1631940 - RNA, 16 nt, Human
caggaaguagaggagg

SEQ ID NO: 1631941 - RNA, 15 nt, Human
caggaaggcuaaagg

SEQ ID NO: 1631942 - RNA, 19 nt, Human
caggaaggcugagaggaga

SEQ ID NO: 1631943 - RNA, 16 nt, Human
caggaaguacuggaga

SEQ ID NO: 1631944 - RNA, 14 nt, Human
caggaaguacugga

SEQ ID NO: 1631945 - RNA, 12 nt, Human
caggaaguacug

SEQ ID NO: 1631946 - RNA, 23 nt, Human
caggaauggagccugcacgguga

SEQ ID NO: 1631947 - RNA, 17 nt, Human
caggaauggagccugca

SEQ ID NO: 1631948 - RNA, 19 nt, Human
caggaagcucagggccugg

SEQ ID NO: 1631949 - RNA, 18 nt, Human
caggaagcucagggccug

SEQ ID NO: 1631950 - RNA, 17 nt, Human
caggaagcucagggccu

SEQ ID NO: 1631951 - RNA, 16 nt, Human
caggaagcucagggcc

SEQ ID NO: 1631952 - RNA, 15 nt, Human
caggaagcucagggc

SEQ ID NO: 1631953 - RNA, 14 nt, Human
caggaagcucaggg

SEQ ID NO: 1631954 - RNA, 13 nt, Human
caggaagcucagg

SEQ ID NO: 1631955 - RNA, 21 nt, Human
caggaagcucagggccuggcu

SEQ ID NO: 1631956 - RNA, 20 nt, Human
caggaagcucagggccuggc

SEQ ID NO: 1631957 - RNA, 23 nt, Human
caggaagcucagggccuggcuca

SEQ ID NO: 1631958 - RNA, 18 nt, Human
caggaagccagcaggcuc

SEQ ID NO: 1631959 - RNA, 17 nt, Human
caggaagccagcaggcu

SEQ ID NO: 1631960 - RNA, 16 nt, Human
caggaagccagcaggc

SEQ ID NO: 1631961 - RNA, 14 nt, Human
caggaagccagcag

SEQ ID NO: 1631962 - RNA, 21 nt, Human
caggaagccagcaggcucuca

SEQ ID NO: 1631963 - RNA, 19 nt, Human
caggaagccagcaggcucu

SEQ ID NO: 1631964 - RNA, 22 nt, Human
caggaagccagcaggcucucag

SEQ ID NO: 1631965 - RNA, 14 nt, Human
caggaagcagcuuu

SEQ ID NO: 1631966 - RNA, 23 nt, Human
cagcuuuccucaaaacuucagac

SEQ ID NO: 1631967 - RNA, 23 nt, Human
cagcuuuccccaugucucgacuc

SEQ ID NO: 1631968 - RNA, 22 nt, Human
cagcuuuaaaaaauuaaucugg

SEQ ID NO: 1631969 - RNA, 20 nt, Human
cagcuuguaaauagcucagg

SEQ ID NO: 1631970 - RNA, 19 nt, Human
cagcuuguaaauagcucag

SEQ ID NO: 1631971 - RNA, 18 nt, Human
cagcuuguaaauagcuca

SEQ ID NO: 1631972 - RNA, 22 nt, Human
cagcuuguaaauagcucaggug

SEQ ID NO: 1631973 - RNA, 21 nt, Human
cagcuuguaaauagcucaggu

SEQ ID NO: 1631974 - RNA, 18 nt, Human
caggaaccacaagacugc

SEQ ID NO: 1631975 - RNA, 23 nt, Human
cagcuuuguuuguugucagcuga

SEQ ID NO: 1631976 - RNA, 22 nt, Human
cagcuuuguuuguugucagcug

SEQ ID NO: 1631977 - RNA, 21 nt, Human
cagcuuuguuuguugucagcu

SEQ ID NO: 1631978 - RNA, 12 nt, Human
cagcuuuguuug

SEQ ID NO: 1631979 - RNA, 14 nt, Human
cagcuuugauauuu

SEQ ID NO: 1631980 - RNA, 18 nt, Human
cagcuugaaacugagaug

SEQ ID NO: 1631981 - RNA, 19 nt, Human
cagcuguaugauucccagc

SEQ ID NO: 1631982 - RNA, 21 nt, Human
cagcuucauuuccugugucuu

SEQ ID NO: 1631983 - RNA, 20 nt, Human
cagcuucauuuccugugucu

SEQ ID NO: 1631984 - RNA, 21 nt, Human
cagcuugaccgugaggccaga

SEQ ID NO: 1631985 - RNA, 20 nt, Human
cagcuugaccgugaggccag

SEQ ID NO: 1631986 - RNA, 19 nt, Human
cagcuugaccgugaggcca

SEQ ID NO: 1631987 - RNA, 18 nt, Human
cagcuugaccgugaggcc

SEQ ID NO: 1631988 - RNA, 15 nt, Human
cagcuugaggguugg

SEQ ID NO: 1631989 - RNA, 14 nt, Human
cagcuugaggguug

SEQ ID NO: 1631990 - RNA, 21 nt, Human
cagcuugaggguugggcuggu

SEQ ID NO: 1631991 - RNA, 20 nt, Human
cagcuugaggguugggcugg

SEQ ID NO: 1631992 - RNA, 19 nt, Human
cagcuugaggguugggcug

SEQ ID NO: 1631993 - RNA, 18 nt, Human
cagcuugaggguugggcu

SEQ ID NO: 1631994 - RNA, 21 nt, Human
cagcugcugaaacaacaaaua

SEQ ID NO: 1631995 - RNA, 20 nt, Human
cagcugcugaaacaacaaau

SEQ ID NO: 1631996 - RNA, 17 nt, Human
cagcugcuacuacuccu

SEQ ID NO: 1631997 - RNA, 21 nt, Human
cagcugcucaauaaaguacaa

SEQ ID NO: 1631998 - RNA, 22 nt, Human
cagcugcuugggcuucauccuc

SEQ ID NO: 1631999 - RNA, 21 nt, Human
cagcugcuugggcuucauccu

SEQ ID NO: 1632000 - RNA, 19 nt, Human
cagcugcuugggcuucauc

SEQ ID NO: 1632001 - RNA, 18 nt, Human
cagcugcuugggcuucau

SEQ ID NO: 1632002 - RNA, 16 nt, Human
cagcugcuugggcuuc

SEQ ID NO: 1632003 - RNA, 15 nt, Human
cagcugcuugggcuu

SEQ ID NO: 1632004 - RNA, 14 nt, Human
cagcugcuugggcu

SEQ ID NO: 1632005 - RNA, 13 nt, Human
cagcugcuugggc

SEQ ID NO: 1632006 - RNA, 24 nt, Human
cagcugcgguccacccaggagccc

SEQ ID NO: 1632007 - RNA, 23 nt, Human
cagcugcgguccacccaggagcc

SEQ ID NO: 1632008 - RNA, 22 nt, Human
cagcugcgguccacccaggagc

SEQ ID NO: 1632009 - RNA, 21 nt, Human
cagcugcgguccacccaggag

SEQ ID NO: 1632010 - RNA, 20 nt, Human
cagcugcgguccacccagga

SEQ ID NO: 1632011 - RNA, 19 nt, Human
cagcugcgguccacccagg

SEQ ID NO: 1632012 - RNA, 18 nt, Human
cagcugcgguccacccag

SEQ ID NO: 1632013 - RNA, 23 nt, Human
cagcugccugggaucccucaucc

SEQ ID NO: 1632014 - RNA, 18 nt, Human
cagcugccugggaucccu

SEQ ID NO: 1632015 - RNA, 18 nt, Human
cagcuguaugauucccag

SEQ ID NO: 1632016 - RNA, 18 nt, Human
cagcugguugagguuuca

SEQ ID NO: 1632017 - RNA, 16 nt, Human
cagcuggguuggaaaa

SEQ ID NO: 1632018 - RNA, 17 nt, Human
cagcuggguuggaaaac

SEQ ID NO: 1632019 - RNA, 18 nt, Human
cagcuggugcccugcuuu

SEQ ID NO: 1632020 - RNA, 23 nt, Human
cagcuggugcccugcuuucagau

SEQ ID NO: 1632021 - RNA, 21 nt, Human
cagcuggugcccugcuuucag

SEQ ID NO: 1632022 - RNA, 20 nt, Human
cagcuggugcccugcuuuca

SEQ ID NO: 1632023 - RNA, 19 nt, Human
cagcuggugcccugcuuuc

SEQ ID NO: 1632024 - RNA, 23 nt, Human
cagcugggguggggaccucaggc

SEQ ID NO: 1632025 - RNA, 22 nt, Human
cagcugggguggggaccucagg

SEQ ID NO: 1632026 - RNA, 21 nt, Human
cagcugggguggggaccucag

SEQ ID NO: 1632027 - RNA, 22 nt, Human
cagcuggggccaggcugggucg

SEQ ID NO: 1632028 - RNA, 21 nt, Human
cagcuggggccaggcuggguc

SEQ ID NO: 1632029 - RNA, 22 nt, Human
cagcugcuuuugucuaugggac

SEQ ID NO: 1632030 - RNA, 23 nt, Human
cagcugcuuuugucuaugggacu

SEQ ID NO: 1632031 - RNA, 19 nt, Human
cagcuggccgggagccuga

SEQ ID NO: 1632032 - RNA, 20 nt, Human
cagcuggggccaggcugggu

SEQ ID NO: 1632033 - RNA, 19 nt, Human
cagcuggggccaggcuggg

SEQ ID NO: 1632034 - RNA, 18 nt, Human
cagcuggggccaggcugg

SEQ ID NO: 1632035 - RNA, 23 nt, Human
cagcugggaucacauguggacuu

SEQ ID NO: 1632036 - RNA, 20 nt, Human
cagcucugcauacucauuag

SEQ ID NO: 1632037 - RNA, 21 nt, Human
cagcucugcaagaauugaagc

SEQ ID NO: 1632038 - RNA, 16 nt, Human
cagcucugcaagaauu

SEQ ID NO: 1632039 - RNA, 15 nt, Human
cagcucugcaagaau

SEQ ID NO: 1632040 - RNA, 23 nt, Human
cagcuccuucuguccuacucugu

SEQ ID NO: 1632041 - RNA, 21 nt, Human
cagcuccuucuguccuacucu

SEQ ID NO: 1632042 - RNA, 17 nt, Human
cagcuccuucuguccua

SEQ ID NO: 1632043 - RNA, 16 nt, Human
cagcuccuucuguccu

SEQ ID NO: 1632044 - RNA, 20 nt, Human
cagcucagagagggugggag

SEQ ID NO: 1632045 - RNA, 19 nt, Human
cagcucagagaggguggga

SEQ ID NO: 1632046 - RNA, 17 nt, Human
cagcucagagagggugg

SEQ ID NO: 1632047 - RNA, 13 nt, Human
cagcucagagagg

SEQ ID NO: 1632048 - RNA, 23 nt, Human
cagcucuucuccaggcuguaucc

SEQ ID NO: 1632049 - RNA, 19 nt, Human
cagcucuucuccaggcugu

SEQ ID NO: 1632050 - RNA, 18 nt, Human
cagcucuucuccaggcug

SEQ ID NO: 1632051 - RNA, 17 nt, Human
cagcucuucuccaggcu

SEQ ID NO: 1632052 - RNA, 16 nt, Human
cagcucuucuccaggc

SEQ ID NO: 1632053 - RNA, 15 nt, Human
cagcucuucuccagg

SEQ ID NO: 1632054 - RNA, 14 nt, Human
cagcucuucuccag

SEQ ID NO: 1632055 - RNA, 13 nt, Human
cagcucuucucca

SEQ ID NO: 1632056 - RNA, 21 nt, Human
cagcucuuauauugccauuuc

SEQ ID NO: 1632057 - RNA, 10 nt, Human
cagcucuuau

SEQ ID NO: 1632058 - RNA, 23 nt, Human
cagcucuguccugggagugagcu

SEQ ID NO: 1632059 - RNA, 18 nt, Human
cagcucuguccugggagu

SEQ ID NO: 1632060 - RNA, 17 nt, Human
cagcucuguccugggag

SEQ ID NO: 1632061 - RNA, 16 nt, Human
cagcucuguccuggga

SEQ ID NO: 1632062 - RNA, 14 nt, Human
cagcucuguccugg

SEQ ID NO: 1632063 - RNA, 13 nt, Human
cagcucuguccug

SEQ ID NO: 1632064 - RNA, 12 nt, Human
cagcucuguccu

SEQ ID NO: 1632065 - RNA, 23 nt, Human
cagcucugguccauagagagcaa

SEQ ID NO: 1632066 - RNA, 22 nt, Human
cagcucugguccauagagagca

SEQ ID NO: 1632067 - RNA, 21 nt, Human
cagcucugguccauagagagc

SEQ ID NO: 1632068 - RNA, 18 nt, Human
cagcucugguccauagag

SEQ ID NO: 1632069 - RNA, 17 nt, Human
cagcucugguccauaga

SEQ ID NO: 1632070 - RNA, 16 nt, Human
cagcucugguccauag

SEQ ID NO: 1632071 - RNA, 13 nt, Human
cagcucuggucca

SEQ ID NO: 1632072 - RNA, 10 nt, Human
cagcucuggu

SEQ ID NO: 1632073 - RNA, 22 nt, Human
caggaagcucagggccuggcuc

SEQ ID NO: 1632074 - RNA, 16 nt, Human
cagccuaguugaucag

SEQ ID NO: 1632075 - RNA, 18 nt, Human
cagccucaaccuccuggg

SEQ ID NO: 1632076 - RNA, 17 nt, Human
cagccucaaccuccugg

SEQ ID NO: 1632077 - RNA, 21 nt, Human
cagccucaaccuccugggcua

SEQ ID NO: 1632078 - RNA, 20 nt, Human
cagccucaaccuccugggcu

SEQ ID NO: 1632079 - RNA, 19 nt, Human
cagccucaaccuccugggc

SEQ ID NO: 1632080 - RNA, 20 nt, Human
cagccucacaguccuuacca

SEQ ID NO: 1632081 - RNA, 15 nt, Human
cagccucacaguccu

SEQ ID NO: 1632082 - RNA, 14 nt, Human
cagccucacagucc

SEQ ID NO: 1632083 - RNA, 20 nt, Human
cagccuccaagcuccaucuc

SEQ ID NO: 1632084 - RNA, 14 nt, Human
cagccuccaagcuc

SEQ ID NO: 1632085 - RNA, 22 nt, Human
cagccucccgaauagcugggac

SEQ ID NO: 1632086 - RNA, 21 nt, Human
cagccucccgaauagcuggga

SEQ ID NO: 1632087 - RNA, 20 nt, Human
cagccucccgaauagcuggg

SEQ ID NO: 1632088 - RNA, 23 nt, Human
cagccucccaaagugcugggauu

SEQ ID NO: 1632089 - RNA, 21 nt, Human
cagccucccaaagugcuggga

SEQ ID NO: 1632090 - RNA, 20 nt, Human
cagccucccaaagugcuggg

SEQ ID NO: 1632091 - RNA, 19 nt, Human
cagccucccaaagugcugg

SEQ ID NO: 1632092 - RNA, 14 nt, Human
cagccuccaugcug

SEQ ID NO: 1632093 - RNA, 20 nt, Human
cagccuccaugcugccucca

SEQ ID NO: 1632094 - RNA, 17 nt, Human
cagccuccaugcugccu

SEQ ID NO: 1632095 - RNA, 15 nt, Human
cagccuccaugcugc

SEQ ID NO: 1632096 - RNA, 21 nt, Human
cagccguguaaccauggaccc

SEQ ID NO: 1632097 - RNA, 20 nt, Human
cagccgugccuucagcucua

SEQ ID NO: 1632098 - RNA, 18 nt, Human
cagccgugccuucagcuc

SEQ ID NO: 1632099 - RNA, 16 nt, Human
cagccgugccuucagc

SEQ ID NO: 1632100 - RNA, 14 nt, Human
cagccgugccuuca

SEQ ID NO: 1632101 - RNA, 9 nt, Human
cagccgugc

SEQ ID NO: 1632102 - RNA, 23 nt, Human
cagcccugcuuugggcugcccug

SEQ ID NO: 1632103 - RNA, 22 nt, Human
cagcccugcuuugggcugcccu

SEQ ID NO: 1632104 - RNA, 21 nt, Human
cagcccugcuuugggcugccc

SEQ ID NO: 1632105 - RNA, 20 nt, Human
cagcccugcuuugggcugcc

SEQ ID NO: 1632106 - RNA, 19 nt, Human
cagcccugcuuugggcugc

SEQ ID NO: 1632107 - RNA, 13 nt, Human
cagcccugcuuug

SEQ ID NO: 1632108 - RNA, 11 nt, Human
cagcccugcuu

SEQ ID NO: 1632109 - RNA, 16 nt, Human
cagcccugcagagggc

SEQ ID NO: 1632110 - RNA, 15 nt, Human
cagcccugcagaggg

SEQ ID NO: 1632111 - RNA, 14 nt, Human
cagcccugcagagg

SEQ ID NO: 1632112 - RNA, 13 nt, Human
cagcccugcagag

SEQ ID NO: 1632113 - RNA, 20 nt, Human
cagcccugcagagggcacag

SEQ ID NO: 1632114 - RNA, 18 nt, Human
cagcccugcagagggcac

SEQ ID NO: 1632115 - RNA, 22 nt, Human
cagcccucccugccccucccuu

SEQ ID NO: 1632116 - RNA, 18 nt, Human
cagcccucccugccccuc

SEQ ID NO: 1632117 - RNA, 17 nt, Human
cagcccucccugccccu

SEQ ID NO: 1632118 - RNA, 16 nt, Human
cagcccucccugcccc

SEQ ID NO: 1632119 - RNA, 14 nt, Human
cagccccauucugc

SEQ ID NO: 1632120 - RNA, 13 nt, Human
cagccccauucug

SEQ ID NO: 1632121 - RNA, 22 nt, Human
cagccccauccucuguacagag

SEQ ID NO: 1632122 - RNA, 16 nt, Human
cagccccauccucugu

SEQ ID NO: 1632123 - RNA, 14 nt, Human
cagccccauccucu

SEQ ID NO: 1632124 - RNA, 13 nt, Human
cagccccauccuc

SEQ ID NO: 1632125 - RNA, 12 nt, Human
cagccccauccu

SEQ ID NO: 1632126 - RNA, 22 nt, Human
cagccccaucccaaacccuuca

SEQ ID NO: 1632127 - RNA, 23 nt, Human
cagccccuggaugcagccucaca

SEQ ID NO: 1632128 - RNA, 18 nt, Human
cagccccauucugccugc

SEQ ID NO: 1632129 - RNA, 17 nt, Human
cagccccauucugccug

SEQ ID NO: 1632130 - RNA, 16 nt, Human
cagccccauucugccu

SEQ ID NO: 1632131 - RNA, 21 nt, Human
cagccccuguucuggcagagu

SEQ ID NO: 1632132 - RNA, 20 nt, Human
cagccccuguucuggcagag

SEQ ID NO: 1632133 - RNA, 21 nt, Human
cagccccaucccaaacccuuc

SEQ ID NO: 1632134 - RNA, 11 nt, Human
cagccccaucc

SEQ ID NO: 1632135 - RNA, 18 nt, Human
cagccccagugcccacag

SEQ ID NO: 1632136 - RNA, 17 nt, Human
cagccccagugcccaca

SEQ ID NO: 1632137 - RNA, 16 nt, Human
cagccccagugcccac

SEQ ID NO: 1632138 - RNA, 15 nt, Human
cagccccagugccca

SEQ ID NO: 1632139 - RNA, 14 nt, Human
cagccccagugccc

SEQ ID NO: 1632140 - RNA, 13 nt, Human
cagccccagugcc

SEQ ID NO: 1632141 - RNA, 16 nt, Human
cagcccgggcucugcc

SEQ ID NO: 1632142 - RNA, 15 nt, Human
cagcccgggcucugc

SEQ ID NO: 1632143 - RNA, 14 nt, Human
cagcccgggcucug

SEQ ID NO: 1632144 - RNA, 13 nt, Human
cagcccgggcucu

SEQ ID NO: 1632145 - RNA, 21 nt, Human
cagccccuucugacccaugcu

SEQ ID NO: 1632146 - RNA, 19 nt, Human
cagccccuucugacccaug

SEQ ID NO: 1632147 - RNA, 17 nt, Human
cagccccuucugaccca

SEQ ID NO: 1632148 - RNA, 16 nt, Human
cagccccuucugaccc

SEQ ID NO: 1632149 - RNA, 23 nt, Human
cagccccuucugacccaugcugc

SEQ ID NO: 1632150 - RNA, 22 nt, Human
cagccccuucugacccaugcug

SEQ ID NO: 1632151 - RNA, 24 nt, Human
cagccccuucugacccaugcugcc

SEQ ID NO: 1632152 - RNA, 22 nt, Human
cagcccuccaucuaaacugccc

SEQ ID NO: 1632153 - RNA, 23 nt, Human
cagcccuccaucuaaacugcccc

SEQ ID NO: 1632154 - RNA, 15 nt, Human
cagcccucccugccc

SEQ ID NO: 1632155 - RNA, 13 nt, Human
cagcccucccugc

SEQ ID NO: 1632156 - RNA, 20 nt, Human
cagcccgggcucugccuccc

SEQ ID NO: 1632157 - RNA, 19 nt, Human
cagcccgggcucugccucc

SEQ ID NO: 1632158 - RNA, 18 nt, Human
cagcccgggcucugccuc

SEQ ID NO: 1632159 - RNA, 17 nt, Human
cagcccgggcucugccu

SEQ ID NO: 1632160 - RNA, 22 nt, Human
cagcccgggcucugccucccau

SEQ ID NO: 1632161 - RNA, 21 nt, Human
cagcccgggcucugccuccca

SEQ ID NO: 1632162 - RNA, 19 nt, Human
cagcuacuugggaggcuga

SEQ ID NO: 1632163 - RNA, 16 nt, Human
cagcuaaugggacacu

SEQ ID NO: 1632164 - RNA, 15 nt, Human
cagcuaaugggacac

SEQ ID NO: 1632165 - RNA, 19 nt, Human
cagcuaaucagcauucuca

SEQ ID NO: 1632166 - RNA, 20 nt, Human
cagcuaacauggaaguacua

SEQ ID NO: 1632167 - RNA, 20 nt, Human
cagcgagcccugguggcagu

SEQ ID NO: 1632168 - RNA, 19 nt, Human
cagcgagcccugguggcag

SEQ ID NO: 1632169 - RNA, 17 nt, Human
cagcgagcccugguggc

SEQ ID NO: 1632170 - RNA, 16 nt, Human
cagcgagcccuggugg

SEQ ID NO: 1632171 - RNA, 13 nt, Human
cagcgagcccugg

SEQ ID NO: 1632172 - RNA, 18 nt, Human
cagcuaacauggaaguac

SEQ ID NO: 1632173 - RNA, 19 nt, Human
cagcuaacauggaaguacu

SEQ ID NO: 1632174 - RNA, 21 nt, Human
cagcgagcccugguggcagug

SEQ ID NO: 1632175 - RNA, 19 nt, Human
cagcucaccagccccagug

SEQ ID NO: 1632176 - RNA, 17 nt, Human
cagcucaccagccccag

SEQ ID NO: 1632177 - RNA, 16 nt, Human
cagcucaccagcccca

SEQ ID NO: 1632178 - RNA, 15 nt, Human
cagcucaccagcccc

SEQ ID NO: 1632179 - RNA, 13 nt, Human
cagcucaccagcc

SEQ ID NO: 1632180 - RNA, 17 nt, Human
cagcucaccucucccuu

SEQ ID NO: 1632181 - RNA, 16 nt, Human
cagcucaccucucccu

SEQ ID NO: 1632182 - RNA, 15 nt, Human
cagcucaccucuccc

SEQ ID NO: 1632183 - RNA, 13 nt, Human
cagcucaccucuc

SEQ ID NO: 1632184 - RNA, 21 nt, Human
cagcucaccagccccagugcc

SEQ ID NO: 1632185 - RNA, 20 nt, Human
cagcucaccagccccagugc

SEQ ID NO: 1632186 - RNA, 22 nt, Human
cagcucaccagccccagugccc

SEQ ID NO: 1632187 - RNA, 20 nt, Human
cagcucaccucucccuugga

SEQ ID NO: 1632188 - RNA, 19 nt, Human
cagcucaccucucccuugg

SEQ ID NO: 1632189 - RNA, 14 nt, Human
cagcucacugcaac

SEQ ID NO: 1632190 - RNA, 12 nt, Human
cagcucacugca

SEQ ID NO: 1632191 - RNA, 12 nt, Human
cagcucagagag

SEQ ID NO: 1632192 - RNA, 15 nt, Human
cagcucacugcaacc

SEQ ID NO: 1632193 - RNA, 21 nt, Human
cagcucacugcaaccuucgcc

SEQ ID NO: 1632194 - RNA, 23 nt, Human
cagccucccgaguagcugggacu

SEQ ID NO: 1632195 - RNA, 22 nt, Human
cagccucccgaguagcugggac

SEQ ID NO: 1632196 - RNA, 21 nt, Human
cagccucccgaguagcuggga

SEQ ID NO: 1632197 - RNA, 20 nt, Human
cagccucccgaguagcuggg

SEQ ID NO: 1632198 - RNA, 19 nt, Human
cagccucccgaguagcugg

SEQ ID NO: 1632199 - RNA, 23 nt, Human
cagccucccgaauagcugggacu

SEQ ID NO: 1632200 - RNA, 20 nt, Human
cagccugcuccagcuguuca

SEQ ID NO: 1632201 - RNA, 15 nt, Human
cagccuccugaguag

SEQ ID NO: 1632202 - RNA, 19 nt, Human
cagccuggacccuguggau

SEQ ID NO: 1632203 - RNA, 15 nt, Human
cagccuggacccugu

SEQ ID NO: 1632204 - RNA, 10 nt, Human
cagccuggca

SEQ ID NO: 1632205 - RNA, 21 nt, Human
cagccuggcacagggcagugg

SEQ ID NO: 1632206 - RNA, 20 nt, Human
cagccuggcacagggcagug

SEQ ID NO: 1632207 - RNA, 13 nt, Human
cagccuggcacag

SEQ ID NO: 1632208 - RNA, 19 nt, Human
cagccugggcaaugugaua

SEQ ID NO: 1632209 - RNA, 16 nt, Human
cagccugggcaaugug

SEQ ID NO: 1632210 - RNA, 24 nt, Human
cagccuugaccauucuccaccugc

SEQ ID NO: 1632211 - RNA, 23 nt, Human
cagccuugaccauucuccaccug

SEQ ID NO: 1632212 - RNA, 22 nt, Human
cagccuugaccauucuccaccu

SEQ ID NO: 1632213 - RNA, 21 nt, Human
cagccuugaccauucuccacc

SEQ ID NO: 1632214 - RNA, 20 nt, Human
cagccuugaccauucuccac

SEQ ID NO: 1632215 - RNA, 17 nt, Human
cagccuugaccauucuc

SEQ ID NO: 1632216 - RNA, 14 nt, Human
cagccugugucuuu

SEQ ID NO: 1632217 - RNA, 23 nt, Human
cagccugugucuuuaaaugcugc

SEQ ID NO: 1632218 - RNA, 18 nt, Human
caggucccuaauaaagcu

SEQ ID NO: 1632219 - RNA, 17 nt, Human
caggucccuaauaaagc

SEQ ID NO: 1632220 - RNA, 16 nt, Human
caggucccuaauaaag

SEQ ID NO: 1632221 - RNA, 15 nt, Human
caggucccuaauaaa

SEQ ID NO: 1632222 - RNA, 14 nt, Human
caggucccuaauaa

SEQ ID NO: 1632223 - RNA, 13 nt, Human
caggucccuaaua

SEQ ID NO: 1632224 - RNA, 12 nt, Human
caggucccuaau

SEQ ID NO: 1632225 - RNA, 11 nt, Human
caggucccuaa

SEQ ID NO: 1632226 - RNA, 21 nt, Human
cagguaacaggcagauacagg

SEQ ID NO: 1632227 - RNA, 20 nt, Human
cagguaacaggcagauacag

SEQ ID NO: 1632228 - RNA, 20 nt, Human
cagguaaucgaccugccucg

SEQ ID NO: 1632229 - RNA, 19 nt, Human
cagguaaucgaccugccuc

SEQ ID NO: 1632230 - RNA, 18 nt, Human
cagguaaucgaccugccu

SEQ ID NO: 1632231 - RNA, 17 nt, Human
cagguaaucgaccugcc

SEQ ID NO: 1632232 - RNA, 20 nt, Human
caggugagaagcagaggaag

SEQ ID NO: 1632233 - RNA, 13 nt, Human
caggugagaagca

SEQ ID NO: 1632234 - RNA, 21 nt, Human
caggugagaagcagaggaagg

SEQ ID NO: 1632235 - RNA, 21 nt, Human
cagguggccacuccagacccc

SEQ ID NO: 1632236 - RNA, 19 nt, Human
cagguggccacuccagacc

SEQ ID NO: 1632237 - RNA, 16 nt, Human
cagguggccacuccag

SEQ ID NO: 1632238 - RNA, 15 nt, Human
cagguggccacucca

SEQ ID NO: 1632239 - RNA, 23 nt, Human
caggucuugaacuccuggccuca

SEQ ID NO: 1632240 - RNA, 22 nt, Human
caggucuugaacuccuggccuc

SEQ ID NO: 1632241 - RNA, 21 nt, Human
caggucuugaacuccuggccu

SEQ ID NO: 1632242 - RNA, 20 nt, Human
caggucuugaacuccuggcc

SEQ ID NO: 1632243 - RNA, 19 nt, Human
caggucuugaacuccuggc

SEQ ID NO: 1632244 - RNA, 18 nt, Human
caggucuugaacuccugg

SEQ ID NO: 1632245 - RNA, 22 nt, Human
caggucccuaauaaagcugugu

SEQ ID NO: 1632246 - RNA, 21 nt, Human
caggucccuaauaaagcugug

SEQ ID NO: 1632247 - RNA, 20 nt, Human
caggucccuaauaaagcugu

SEQ ID NO: 1632248 - RNA, 19 nt, Human
caggucccuaauaaagcug

SEQ ID NO: 1632249 - RNA, 22 nt, Human
cagggucccugguggcagcuca

SEQ ID NO: 1632250 - RNA, 19 nt, Human
cagggucccugguggcagc

SEQ ID NO: 1632251 - RNA, 18 nt, Human
cagggucccugguggcag

SEQ ID NO: 1632252 - RNA, 15 nt, Human
cagggucccuggugg

SEQ ID NO: 1632253 - RNA, 14 nt, Human
cagggucccuggug

SEQ ID NO: 1632254 - RNA, 12 nt, Human
cagggucccugg

SEQ ID NO: 1632255 - RNA, 20 nt, Human
caggguauuccagagugggg

SEQ ID NO: 1632256 - RNA, 21 nt, Human
caggguauuccagagugggga

SEQ ID NO: 1632257 - RNA, 15 nt, Human
cagggucucacucug

SEQ ID NO: 1632258 - RNA, 23 nt, Human
cagggucucacuauguugcccag

SEQ ID NO: 1632259 - RNA, 22 nt, Human
cagggucucacuauguugccca

SEQ ID NO: 1632260 - RNA, 21 nt, Human
cagggucucacuauguugccc

SEQ ID NO: 1632261 - RNA, 18 nt, Human
caggguccuguagcccua

SEQ ID NO: 1632262 - RNA, 23 nt, Human
cagggucccugguggcagcucac

SEQ ID NO: 1632263 - RNA, 17 nt, Human
cagguaacaggcagaua

SEQ ID NO: 1632264 - RNA, 16 nt, Human
cagguaacaggcagau

SEQ ID NO: 1632265 - RNA, 15 nt, Human
cagguaacaggcaga

SEQ ID NO: 1632266 - RNA, 14 nt, Human
cagguaacaggcag

SEQ ID NO: 1632267 - RNA, 16 nt, Human
cagggucucacucugu

SEQ ID NO: 1632268 - RNA, 17 nt, Human
cagggucucacucuguc

SEQ ID NO: 1632269 - RNA, 16 nt, Human
caggguuuugccaugu

SEQ ID NO: 1632270 - RNA, 21 nt, Human
caggggugggacacccuguga

SEQ ID NO: 1632271 - RNA, 20 nt, Human
caggggugggacacccugug

SEQ ID NO: 1632272 - RNA, 15 nt, Human
caggggugggacacc

SEQ ID NO: 1632273 - RNA, 14 nt, Human
caggggugggacac

SEQ ID NO: 1632274 - RNA, 14 nt, Human
caggugucccugca

SEQ ID NO: 1632275 - RNA, 11 nt, Human
caggugucccu

SEQ ID NO: 1632276 - RNA, 20 nt, Human
caggugguuauggagagggu

SEQ ID NO: 1632277 - RNA, 22 nt, Human
cagguggggucacucuggcagc

SEQ ID NO: 1632278 - RNA, 21 nt, Human
cagguggggucacucuggcag

SEQ ID NO: 1632279 - RNA, 20 nt, Human
cagguggggucacucuggca

SEQ ID NO: 1632280 - RNA, 19 nt, Human
cagguggggucacucuggc

SEQ ID NO: 1632281 - RNA, 18 nt, Human
caggugguuauggagagg

SEQ ID NO: 1632282 - RNA, 23 nt, Human
cagguggggucacucuggcagcu

SEQ ID NO: 1632283 - RNA, 18 nt, Human
cagguggggucacucugg

SEQ ID NO: 1632284 - RNA, 17 nt, Human
cagguggggcagcuuga

SEQ ID NO: 1632285 - RNA, 16 nt, Human
cagguggggcagcuug

SEQ ID NO: 1632286 - RNA, 15 nt, Human
cagguggggcagcuu

SEQ ID NO: 1632287 - RNA, 14 nt, Human
cagguggggcagcu

SEQ ID NO: 1632288 - RNA, 13 nt, Human
cagguggggcagc

SEQ ID NO: 1632289 - RNA, 12 nt, Human
caggugugaacc

SEQ ID NO: 1632290 - RNA, 19 nt, Human
caggugucccugcacuugc

SEQ ID NO: 1632291 - RNA, 18 nt, Human
caggugucccugcacuug

SEQ ID NO: 1632292 - RNA, 16 nt, Human
caggugucccugcacu

SEQ ID NO: 1632293 - RNA, 15 nt, Human
caggugucccugcac

SEQ ID NO: 1632294 - RNA, 23 nt, Human
caggugugaaccaccacacccag

SEQ ID NO: 1632295 - RNA, 22 nt, Human
caggugugaaccaccacaccca

SEQ ID NO: 1632296 - RNA, 19 nt, Human
caggugugaaccaccacac

SEQ ID NO: 1632297 - RNA, 16 nt, Human
caggugugaaccacca

SEQ ID NO: 1632298 - RNA, 21 nt, Human
caggugugagucaccaagccc

SEQ ID NO: 1632299 - RNA, 20 nt, Human
caggugugagucaccaagcc

SEQ ID NO: 1632300 - RNA, 16 nt, Human
caggugugagucacca

SEQ ID NO: 1632301 - RNA, 18 nt, Human
caggugugagccaccacg

SEQ ID NO: 1632302 - RNA, 23 nt, Human
caggugugagucaccaagcccag

SEQ ID NO: 1632303 - RNA, 22 nt, Human
caggugugagucaccaagccca

SEQ ID NO: 1632304 - RNA, 21 nt, Human
caggugugagccaccacgccc

SEQ ID NO: 1632305 - RNA, 13 nt, Human
caguaauaacucu

SEQ ID NO: 1632306 - RNA, 12 nt, Human
caguaauaacuc

SEQ ID NO: 1632307 - RNA, 13 nt, Human
cagguucagcuug

SEQ ID NO: 1632308 - RNA, 12 nt, Human
cagguucagcuu

SEQ ID NO: 1632309 - RNA, 22 nt, Human
caguaaaugggggugcauuuga

SEQ ID NO: 1632310 - RNA, 21 nt, Human
caguaaaugggggugcauuug

SEQ ID NO: 1632311 - RNA, 15 nt, Human
cagugagacagcucu

SEQ ID NO: 1632312 - RNA, 20 nt, Human
cagugaggcucugcccuugg

SEQ ID NO: 1632313 - RNA, 19 nt, Human
cagugaggcucugcccuug

SEQ ID NO: 1632314 - RNA, 18 nt, Human
cagugaggcucugcccuu

SEQ ID NO: 1632315 - RNA, 17 nt, Human
cagugaggcucugcccu

SEQ ID NO: 1632316 - RNA, 18 nt, Human
cagugagucgaggacagg

SEQ ID NO: 1632317 - RNA, 17 nt, Human
cagugagucgaggacag

SEQ ID NO: 1632318 - RNA, 21 nt, Human
cagugaggcucugcccuuggu

SEQ ID NO: 1632319 - RNA, 16 nt, Human
cagugaggcucugccc

SEQ ID NO: 1632320 - RNA, 15 nt, Human
cagugaggcucugcc

SEQ ID NO: 1632321 - RNA, 14 nt, Human
cagugaggcucugc

SEQ ID NO: 1632322 - RNA, 13 nt, Human
cagugaggcucug

SEQ ID NO: 1632323 - RNA, 12 nt, Human
cagugaggcucu

SEQ ID NO: 1632324 - RNA, 24 nt, Human
cagugagccgagauugcaccacug

SEQ ID NO: 1632325 - RNA, 16 nt, Human
cagugaaagaaaauaa

SEQ ID NO: 1632326 - RNA, 20 nt, Human
cagugaaagaaaauaacaau

SEQ ID NO: 1632327 - RNA, 19 nt, Human
cagucuggaaugcaguggu

SEQ ID NO: 1632328 - RNA, 21 nt, Human
caguccuuaccagcagagcac

SEQ ID NO: 1632329 - RNA, 20 nt, Human
caguccuuaccagcagagca

SEQ ID NO: 1632330 - RNA, 19 nt, Human
caguccuuaccagcagagc

SEQ ID NO: 1632331 - RNA, 18 nt, Human
caguccuuaccagcagag

SEQ ID NO: 1632332 - RNA, 15 nt, Human
caguccuuaccagca

SEQ ID NO: 1632333 - RNA, 17 nt, Human
caguccucccaucucac

SEQ ID NO: 1632334 - RNA, 16 nt, Human
caguccucccaucuca

SEQ ID NO: 1632335 - RNA, 18 nt, Human
cagugauuaccagggacu

SEQ ID NO: 1632336 - RNA, 17 nt, Human
cagugauuaccagggac

SEQ ID NO: 1632337 - RNA, 15 nt, Human
cagugcccuccagga

SEQ ID NO: 1632338 - RNA, 23 nt, Human
cagugagucgaggacagggaggu

SEQ ID NO: 1632339 - RNA, 22 nt, Human
cagugagucgaggacagggagg

SEQ ID NO: 1632340 - RNA, 20 nt, Human
cagugagucgaggacaggga

SEQ ID NO: 1632341 - RNA, 19 nt, Human
cagugagucgaggacaggg

SEQ ID NO: 1632342 - RNA, 22 nt, Human
cagugccuuauggaacacucug

SEQ ID NO: 1632343 - RNA, 21 nt, Human
cagugccuuauggaacacucu

SEQ ID NO: 1632344 - RNA, 20 nt, Human
cagugccuuauggaacacuc

SEQ ID NO: 1632345 - RNA, 19 nt, Human
cagugccuuauggaacacu

SEQ ID NO: 1632346 - RNA, 18 nt, Human
cagugccuuauggaacac

SEQ ID NO: 1632347 - RNA, 17 nt, Human
cagugccuuauggaaca

SEQ ID NO: 1632348 - RNA, 16 nt, Human
cagugccuuauggaac

SEQ ID NO: 1632349 - RNA, 15 nt, Human
cagugccuuauggaa

SEQ ID NO: 1632350 - RNA, 13 nt, Human
cagugccuuaugg

SEQ ID NO: 1632351 - RNA, 11 nt, Human
cagugccuuau

SEQ ID NO: 1632352 - RNA, 18 nt, Human
cagugccgagaaggaagc

SEQ ID NO: 1632353 - RNA, 15 nt, Human
cagugccgagaagga

SEQ ID NO: 1632354 - RNA, 23 nt, Human
cagugccuuauggaacacucuga

SEQ ID NO: 1632355 - RNA, 13 nt, Human
cagugcuccagcc

SEQ ID NO: 1632356 - RNA, 12 nt, Human
caguauggcagc

SEQ ID NO: 1632357 - RNA, 21 nt, Human
caguaucuugaagacuuuucu

SEQ ID NO: 1632358 - RNA, 18 nt, Human
caguaucuugaagacuuu

SEQ ID NO: 1632359 - RNA, 12 nt, Human
caguaucuugaa

SEQ ID NO: 1632360 - RNA, 15 nt, Human
caguaucucagggcc

SEQ ID NO: 1632361 - RNA, 13 nt, Human
caguaucucaggg

SEQ ID NO: 1632362 - RNA, 12 nt, Human
caguagugauag

SEQ ID NO: 1632363 - RNA, 21 nt, Human
caguauaauuaacauguuaaa

SEQ ID NO: 1632364 - RNA, 17 nt, Human
caguauaauuaacaugu

SEQ ID NO: 1632365 - RNA, 15 nt, Human
caguauaauuaacau

SEQ ID NO: 1632366 - RNA, 14 nt, Human
caguauaauuaaca

SEQ ID NO: 1632367 - RNA, 13 nt, Human
caguccaugaaga

SEQ ID NO: 1632368 - RNA, 14 nt, Human
caguccauugaaag

SEQ ID NO: 1632369 - RNA, 16 nt, Human
caguccauagcagaga

SEQ ID NO: 1632370 - RNA, 20 nt, Human
cagucauucagauaugauuc

SEQ ID NO: 1632371 - RNA, 17 nt, Human
cagucauucagauauga

SEQ ID NO: 1632372 - RNA, 22 nt, Human
cagucaggaaagagaacuucca

SEQ ID NO: 1632373 - RNA, 18 nt, Human
cagucaggaaagagaacu

SEQ ID NO: 1632374 - RNA, 15 nt, Human
cagucaggaaagaga

SEQ ID NO: 1632375 - RNA, 19 nt, Human
caguauuacuucugcuaca

SEQ ID NO: 1632376 - RNA, 18 nt, Human
caguauuacuucugcuac

SEQ ID NO: 1632377 - RNA, 16 nt, Human
caguauuacuucugcu

SEQ ID NO: 1632378 - RNA, 16 nt, Human
cagucccugccaaugg

SEQ ID NO: 1632379 - RNA, 15 nt, Human
cagucccugccaaug

SEQ ID NO: 1632380 - RNA, 14 nt, Human
cagucccugccaau

SEQ ID NO: 1632381 - RNA, 13 nt, Human
cagucccugccaa

SEQ ID NO: 1632382 - RNA, 12 nt, Human
cagucccugcca

SEQ ID NO: 1632383 - RNA, 15 nt, Human
caguccucccaucuc

SEQ ID NO: 1632384 - RNA, 14 nt, Human
caguccucccaucu

SEQ ID NO: 1632385 - RNA, 13 nt, Human
caguccucccauc

SEQ ID NO: 1632386 - RNA, 12 nt, Human
caguccucccau

SEQ ID NO: 1632387 - RNA, 17 nt, Human
cagucccugccaaugga

SEQ ID NO: 1632388 - RNA, 17 nt, Human
cagucccccugccccag

SEQ ID NO: 1632389 - RNA, 16 nt, Human
cagucccccugcccca

SEQ ID NO: 1632390 - RNA, 23 nt, Human
caguccccgugaaggagagcccu

SEQ ID NO: 1632391 - RNA, 16 nt, Human
caggacucugccuccu

SEQ ID NO: 1632392 - RNA, 15 nt, Human
caggacucugccucc

SEQ ID NO: 1632393 - RNA, 13 nt, Human
caggacucugccu

SEQ ID NO: 1632394 - RNA, 12 nt, Human
caggacucugcc

SEQ ID NO: 1632395 - RNA, 21 nt, Human
caggagcccugggaggcucug

SEQ ID NO: 1632396 - RNA, 17 nt, Human
caggagccuccugcccu

SEQ ID NO: 1632397 - RNA, 14 nt, Human
caggagccuccugc

SEQ ID NO: 1632398 - RNA, 20 nt, Human
caggagccuccugcccuuac

SEQ ID NO: 1632399 - RNA, 12 nt, Human
caggagugagca

SEQ ID NO: 1632400 - RNA, 19 nt, Human
caggagcagccacauuccu

SEQ ID NO: 1632401 - RNA, 14 nt, Human
caggagcagccaca

SEQ ID NO: 1632402 - RNA, 13 nt, Human
caggagcagccac

SEQ ID NO: 1632403 - RNA, 12 nt, Human
caggagcagcca

SEQ ID NO: 1632404 - RNA, 18 nt, Human
caggagccccgaggccuu

SEQ ID NO: 1632405 - RNA, 16 nt, Human
caggagccccgaggcc

SEQ ID NO: 1632406 - RNA, 15 nt, Human
caggagccccgaggc

SEQ ID NO: 1632407 - RNA, 22 nt, Human
caggagccccgaggccuucucu

SEQ ID NO: 1632408 - RNA, 20 nt, Human
caggagccccgaggccuucu

SEQ ID NO: 1632409 - RNA, 23 nt, Human
caggagccccgaggccuucucug

SEQ ID NO: 1632410 - RNA, 11 nt, Human
caggagcccug

SEQ ID NO: 1632411 - RNA, 19 nt, Human
caggagcccugggaggcuc

SEQ ID NO: 1632412 - RNA, 18 nt, Human
caggagcccugggaggcu

SEQ ID NO: 1632413 - RNA, 16 nt, Human
caggagcccugggagg

SEQ ID NO: 1632414 - RNA, 14 nt, Human
caggagcccuggga

SEQ ID NO: 1632415 - RNA, 23 nt, Human
caggaguuugagaccaaccuggg

SEQ ID NO: 1632416 - RNA, 22 nt, Human
caggaguuugagaccaaccugg

SEQ ID NO: 1632417 - RNA, 13 nt, Human
caggauagacuuu

SEQ ID NO: 1632418 - RNA, 21 nt, Human
caggaguuugagaccaaccug

SEQ ID NO: 1632419 - RNA, 19 nt, Human
caggaguuucguuuucaaa

SEQ ID NO: 1632420 - RNA, 16 nt, Human
caggaguuggaagugu

SEQ ID NO: 1632421 - RNA, 20 nt, Human
caggcccccaggugccaguu

SEQ ID NO: 1632422 - RNA, 13 nt, Human
caggccccugcca

SEQ ID NO: 1632423 - RNA, 19 nt, Human
caggcccccaggugccagu

SEQ ID NO: 1632424 - RNA, 14 nt, Human
caggcccccaggug

SEQ ID NO: 1632425 - RNA, 21 nt, Human
caggccauuccccgucucugg

SEQ ID NO: 1632426 - RNA, 22 nt, Human
caggccaggcccucugcccacu

SEQ ID NO: 1632427 - RNA, 21 nt, Human
caggccaggcccucugcccac

SEQ ID NO: 1632428 - RNA, 20 nt, Human
caggccacaagacccuugug

SEQ ID NO: 1632429 - RNA, 18 nt, Human
caggccauuccccgucuc

SEQ ID NO: 1632430 - RNA, 18 nt, Human
caggccacaagacccuug

SEQ ID NO: 1632431 - RNA, 17 nt, Human
caggccacaagacccuu

SEQ ID NO: 1632432 - RNA, 13 nt, Human
caggccacaagac

SEQ ID NO: 1632433 - RNA, 23 nt, Human
caggccaaacucaccugccccuc

SEQ ID NO: 1632434 - RNA, 18 nt, Human
caggccaaacucaccugc

SEQ ID NO: 1632435 - RNA, 16 nt, Human
caggcccggcuccagg

SEQ ID NO: 1632436 - RNA, 20 nt, Human
caggccccugccacccuggg

SEQ ID NO: 1632437 - RNA, 19 nt, Human
caggccccugccacccugg

SEQ ID NO: 1632438 - RNA, 17 nt, Human
caggccccugccacccu

SEQ ID NO: 1632439 - RNA, 15 nt, Human
caggccccugccacc

SEQ ID NO: 1632440 - RNA, 15 nt, Human
caggcccggcuccag

SEQ ID NO: 1632441 - RNA, 14 nt, Human
caggcccggcucca

SEQ ID NO: 1632442 - RNA, 13 nt, Human
caggcccggcucc

SEQ ID NO: 1632443 - RNA, 23 nt, Human
caggaugguucccuugaugaaga

SEQ ID NO: 1632444 - RNA, 21 nt, Human
caggaugguucccuugaugaa

SEQ ID NO: 1632445 - RNA, 18 nt, Human
caggauucuuccucccuc

SEQ ID NO: 1632446 - RNA, 17 nt, Human
caggauucuuccucccu

SEQ ID NO: 1632447 - RNA, 19 nt, Human
caggauguacaaggacagc

SEQ ID NO: 1632448 - RNA, 23 nt, Human
caggauggccgggcgcgguggcu

SEQ ID NO: 1632449 - RNA, 22 nt, Human
caggaugaugacuauggaaaga

SEQ ID NO: 1632450 - RNA, 20 nt, Human
caggaugaugacuauggaaa

SEQ ID NO: 1632451 - RNA, 18 nt, Human
caggaugaugacuaugga

SEQ ID NO: 1632452 - RNA, 14 nt, Human
caggaucagucuga

SEQ ID NO: 1632453 - RNA, 13 nt, Human
caggaucagucug

SEQ ID NO: 1632454 - RNA, 21 nt, Human
caggauauucucacagcucca

SEQ ID NO: 1632455 - RNA, 16 nt, Human
caggauuuuaaucuuu

SEQ ID NO: 1632456 - RNA, 20 nt, Human
caggauucuuccucccuccc

SEQ ID NO: 1632457 - RNA, 21 nt, Human
caggcaagcaccuccugccuc

SEQ ID NO: 1632458 - RNA, 16 nt, Human
caggcaagcaccuccu

SEQ ID NO: 1632459 - RNA, 15 nt, Human
caggcaagcaccucc

SEQ ID NO: 1632460 - RNA, 14 nt, Human
caggcaagcaccuc

SEQ ID NO: 1632461 - RNA, 15 nt, Human
caggcagccaggcca

SEQ ID NO: 1632462 - RNA, 14 nt, Human
caggcagccaggcc

SEQ ID NO: 1632463 - RNA, 14 nt, Human
caggcaaugcuggc

SEQ ID NO: 1632464 - RNA, 17 nt, Human
caggcagccaggccaca

SEQ ID NO: 1632465 - RNA, 16 nt, Human
caggcagccaggccac

SEQ ID NO: 1632466 - RNA, 20 nt, Human
caggcaggaaggcugagagg

SEQ ID NO: 1632467 - RNA, 13 nt, Human
caggcagguccag

SEQ ID NO: 1632468 - RNA, 17 nt, Human
caggcauuccccaggag

SEQ ID NO: 1632469 - RNA, 16 nt, Human
caggcauuccccagga

SEQ ID NO: 1632470 - RNA, 15 nt, Human
caggcauuccccagg

SEQ ID NO: 1632471 - RNA, 13 nt, Human
caggcauucccca

SEQ ID NO: 1632472 - RNA, 20 nt, Human
caggcauguucucugaggac

SEQ ID NO: 1632473 - RNA, 19 nt, Human
caggcauguucucugagga

SEQ ID NO: 1632474 - RNA, 18 nt, Human
caggcauguucucugagg

SEQ ID NO: 1632475 - RNA, 15 nt, Human
caggcauguucucug

SEQ ID NO: 1632476 - RNA, 21 nt, Human
caggcauuccccaggaggcca

SEQ ID NO: 1632477 - RNA, 20 nt, Human
caggcauuccccaggaggcc

SEQ ID NO: 1632478 - RNA, 19 nt, Human
caggcauuccccaggaggc

SEQ ID NO: 1632479 - RNA, 18 nt, Human
caggcauuccccaggagg

SEQ ID NO: 1632480 - RNA, 23 nt, Human
caggcauuccccaggaggccagc

SEQ ID NO: 1632481 - RNA, 22 nt, Human
caggcauuccccaggaggccag

SEQ ID NO: 1632482 - RNA, 24 nt, Human
caggcauuccccaggaggccagcc

SEQ ID NO: 1632483 - RNA, 15 nt, Human
caggcaggugggaug

SEQ ID NO: 1632484 - RNA, 23 nt, Human
caggcaggucuugaacuccuggc

SEQ ID NO: 1632485 - RNA, 22 nt, Human
caggcaggucuugaacuccugg

SEQ ID NO: 1632486 - RNA, 13 nt, Human
caggcaggucuug

SEQ ID NO: 1632487 - RNA, 12 nt, Human
caggcaggucuu

SEQ ID NO: 1632488 - RNA, 19 nt, Human
caggcagguccaggguuug

SEQ ID NO: 1632489 - RNA, 15 nt, Human
caggcagguccaggg

SEQ ID NO: 1632490 - RNA, 14 nt, Human
caggcagguccagg

SEQ ID NO: 1632491 - RNA, 17 nt, Human
caggcaugguggcccac

SEQ ID NO: 1632492 - RNA, 16 nt, Human
caggggacaggauggu

SEQ ID NO: 1632493 - RNA, 11 nt, Human
caggggacagg

SEQ ID NO: 1632494 - RNA, 15 nt, Human
cagggccuggcucag

SEQ ID NO: 1632495 - RNA, 14 nt, Human
cagggccuggcuca

SEQ ID NO: 1632496 - RNA, 13 nt, Human
cagggccuggcuc

SEQ ID NO: 1632497 - RNA, 19 nt, Human
cagggccuggcucaggugg

SEQ ID NO: 1632498 - RNA, 16 nt, Human
cagggccuggcucagg

SEQ ID NO: 1632499 - RNA, 19 nt, Human
caggggaggguagagcgga

SEQ ID NO: 1632500 - RNA, 17 nt, Human
cagggcauggcugggaa

SEQ ID NO: 1632501 - RNA, 20 nt, Human
cagggcauggccagguggcc

SEQ ID NO: 1632502 - RNA, 18 nt, Human
cagggacaggauaagagg

SEQ ID NO: 1632503 - RNA, 23 nt, Human
cagggacagaggggguggccucc

SEQ ID NO: 1632504 - RNA, 14 nt, Human
cagggcacaccggg

SEQ ID NO: 1632505 - RNA, 21 nt, Human
cagggcacaccgggcacucag

SEQ ID NO: 1632506 - RNA, 19 nt, Human
cagggcacaccgggcacuc

SEQ ID NO: 1632507 - RNA, 17 nt, Human
cagggcacaccgggcac

SEQ ID NO: 1632508 - RNA, 15 nt, Human
cagggcacaccgggc

SEQ ID NO: 1632509 - RNA, 23 nt, Human
cagggcacaccgggcacucagaa

SEQ ID NO: 1632510 - RNA, 22 nt, Human
cagggcacaccgggcacucaga

SEQ ID NO: 1632511 - RNA, 22 nt, Human
cagggaaacagcuaaugggaca

SEQ ID NO: 1632512 - RNA, 20 nt, Human
cagggacagaggggguggcc

SEQ ID NO: 1632513 - RNA, 14 nt, Human
cagggacagagggg

SEQ ID NO: 1632514 - RNA, 13 nt, Human
cagggacagaggg

SEQ ID NO: 1632515 - RNA, 17 nt, Human
cagggaaggggacaagg

SEQ ID NO: 1632516 - RNA, 15 nt, Human
cagggaaggggacaa

SEQ ID NO: 1632517 - RNA, 14 nt, Human
caggcuacugucag

SEQ ID NO: 1632518 - RNA, 19 nt, Human
caggcuagauguauguacu

SEQ ID NO: 1632519 - RNA, 13 nt, Human
caggcuagaugua

SEQ ID NO: 1632520 - RNA, 20 nt, Human
caggcuccuuuagcgcccag

SEQ ID NO: 1632521 - RNA, 19 nt, Human
caggcuccuuuagcgccca

SEQ ID NO: 1632522 - RNA, 14 nt, Human
caggcuccuuuagc

SEQ ID NO: 1632523 - RNA, 18 nt, Human
caggcuccugccaccacg

SEQ ID NO: 1632524 - RNA, 16 nt, Human
caggcuccugccacca

SEQ ID NO: 1632525 - RNA, 15 nt, Human
caggcuccugccacc

SEQ ID NO: 1632526 - RNA, 14 nt, Human
caggcuccugccac

SEQ ID NO: 1632527 - RNA, 13 nt, Human
caggcuccugcca

SEQ ID NO: 1632528 - RNA, 20 nt, Human
caggcucucaggccagcugc

SEQ ID NO: 1632529 - RNA, 19 nt, Human
caggcucucaggccagcug

SEQ ID NO: 1632530 - RNA, 18 nt, Human
caggcucucaggccagcu

SEQ ID NO: 1632531 - RNA, 17 nt, Human
caggcucucaggccagc

SEQ ID NO: 1632532 - RNA, 23 nt, Human
caggcucucaggccagcugcuug

SEQ ID NO: 1632533 - RNA, 21 nt, Human
caggcucucaggccagcugcu

SEQ ID NO: 1632534 - RNA, 16 nt, Human
caggcucucaggccag

SEQ ID NO: 1632535 - RNA, 15 nt, Human
caggcucucaggcca

SEQ ID NO: 1632536 - RNA, 14 nt, Human
caggcucucaggcc

SEQ ID NO: 1632537 - RNA, 13 nt, Human
caggcucucaggc

SEQ ID NO: 1632538 - RNA, 12 nt, Human
caggcucucagg

SEQ ID NO: 1632539 - RNA, 20 nt, Human
caggcucgggcuccccagcc

SEQ ID NO: 1632540 - RNA, 21 nt, Human
caggcuccuuuagcgcccagu

SEQ ID NO: 1632541 - RNA, 19 nt, Human
caggcccggcuccaggcuc

SEQ ID NO: 1632542 - RNA, 18 nt, Human
caggcccggcuccaggcu

SEQ ID NO: 1632543 - RNA, 17 nt, Human
caggcccggcuccaggc

SEQ ID NO: 1632544 - RNA, 15 nt, Human
caggcccucugccca

SEQ ID NO: 1632545 - RNA, 14 nt, Human
caggcccucugccc

SEQ ID NO: 1632546 - RNA, 13 nt, Human
caggcccucugcc

SEQ ID NO: 1632547 - RNA, 21 nt, Human
caggcccggcuccaggcuccu

SEQ ID NO: 1632548 - RNA, 20 nt, Human
caggcccggcuccaggcucc

SEQ ID NO: 1632549 - RNA, 22 nt, Human
caggcccggcuccaggcuccuu

SEQ ID NO: 1632550 - RNA, 22 nt, Human
caggcccucugcccacucccug

SEQ ID NO: 1632551 - RNA, 21 nt, Human
caggcccucugcccacucccu

SEQ ID NO: 1632552 - RNA, 20 nt, Human
caggcccucugcccacuccc

SEQ ID NO: 1632553 - RNA, 19 nt, Human
caggcccucugcccacucc

SEQ ID NO: 1632554 - RNA, 17 nt, Human
caggcccucugcccacu

SEQ ID NO: 1632555 - RNA, 16 nt, Human
caggcccucugcccac

SEQ ID NO: 1632556 - RNA, 15 nt, Human
caggcccuuccucuc

SEQ ID NO: 1632557 - RNA, 17 nt, Human
caggcccuuccucucca

SEQ ID NO: 1632558 - RNA, 16 nt, Human
caggcccuuccucucc

SEQ ID NO: 1632559 - RNA, 23 nt, Human
caggcccuuccucuccacugccu

SEQ ID NO: 1632560 - RNA, 21 nt, Human
caggcccuuccucuccacugc

SEQ ID NO: 1632561 - RNA, 20 nt, Human
caggcccuuccucuccacug

SEQ ID NO: 1632562 - RNA, 19 nt, Human
caggcccuuccucuccacu

SEQ ID NO: 1632563 - RNA, 23 nt, Human
caggcuuagucacugagacagcc

SEQ ID NO: 1632564 - RNA, 22 nt, Human
caggcuuagucacugagacagc

SEQ ID NO: 1632565 - RNA, 23 nt, Human
caggcuuuuuuaucaugugaaau

SEQ ID NO: 1632566 - RNA, 16 nt, Human
cagggaaacagcuaau

SEQ ID NO: 1632567 - RNA, 21 nt, Human
caggcuguaucccaugagccu

SEQ ID NO: 1632568 - RNA, 20 nt, Human
caggcuguaucccaugagcc

SEQ ID NO: 1632569 - RNA, 14 nt, Human
caggcuguauccca

SEQ ID NO: 1632570 - RNA, 23 nt, Human
caggcuggucucgaacuccugac

SEQ ID NO: 1632571 - RNA, 19 nt, Human
caggcuggucucaaacucu

SEQ ID NO: 1632572 - RNA, 22 nt, Human
caggcuggucucgaacuccuga

SEQ ID NO: 1632573 - RNA, 20 nt, Human
caggcuggucucgaacuccu

SEQ ID NO: 1632574 - RNA, 12 nt, Human
caggcuggucuc

SEQ ID NO: 1632575 - RNA, 21 nt, Human
caggcuuagucacugagacag

SEQ ID NO: 1632576 - RNA, 20 nt, Human
caggcuuagucacugagaca

SEQ ID NO: 1632577 - RNA, 17 nt, Human
caggcuuagucacugag

SEQ ID NO: 1632578 - RNA, 16 nt, Human
caggcuuagucacuga

SEQ ID NO: 1632579 - RNA, 23 nt, Human
caggcuguaucccaugagccuca

SEQ ID NO: 1632580 - RNA, 22 nt, Human
caggcuguaucccaugagccuc

SEQ ID NO: 1632581 - RNA, 14 nt, Human
caggcugugaguuu

SEQ ID NO: 1632582 - RNA, 21 nt, Human
caggcugggucgcccuggacu

SEQ ID NO: 1632583 - RNA, 23 nt, Human
caggcugggcuucaguggcagcu

SEQ ID NO: 1632584 - RNA, 23 nt, Human
caggcugggucgcccuggacugu

SEQ ID NO: 1632585 - RNA, 17 nt, Human
caggcuggcccugcccu

SEQ ID NO: 1632586 - RNA, 16 nt, Human
caggcuggcccugccc

SEQ ID NO: 1632587 - RNA, 15 nt, Human
caggcuggcccugcc

SEQ ID NO: 1632588 - RNA, 14 nt, Human
caggcuggcccugc

SEQ ID NO: 1632589 - RNA, 12 nt, Human
caggcuggcccu

SEQ ID NO: 1632590 - RNA, 20 nt, Human
caggcugcucuugaacuccu

SEQ ID NO: 1632591 - RNA, 12 nt, Human
caggcugcucuu

SEQ ID NO: 1632592 - RNA, 23 nt, Human
caggcugcucuugaacuccugac

SEQ ID NO: 1632593 - RNA, 21 nt, Human
caggcugagccucagucuccc

SEQ ID NO: 1632594 - RNA, 17 nt, Human
caggcugagccucaguc

SEQ ID NO: 1632595 - RNA, 16 nt, Human
caggcugagccucagu

SEQ ID NO: 1632596 - RNA, 15 nt, Human
caggcugagccucag

SEQ ID NO: 1632597 - RNA, 14 nt, Human
caggcugagccuca

SEQ ID NO: 1632598 - RNA, 13 nt, Human
caggcugagccuc

SEQ ID NO: 1632599 - RNA, 12 nt, Human
caggcucuucuc

SEQ ID NO: 1632600 - RNA, 15 nt, Human
caggcucuucuccuu

SEQ ID NO: 1632601 - RNA, 14 nt, Human
caggcucuucuccu

SEQ ID NO: 1632602 - RNA, 22 nt, Human
caggcucuucuccuuucacaac

SEQ ID NO: 1632603 - RNA, 18 nt, Human
caggcucuucuccuuuca

SEQ ID NO: 1632604 - RNA, 12 nt, Human
caggcugagccu

SEQ ID NO: 1632605 - RNA, 15 nt, Human
caucucuccuccuuu

SEQ ID NO: 1632606 - RNA, 16 nt, Human
caucucuacaaaaagc

SEQ ID NO: 1632607 - RNA, 19 nt, Human
cauccuacaagacacagug

SEQ ID NO: 1632608 - RNA, 18 nt, Human
cauccuacaagacacagu

SEQ ID NO: 1632609 - RNA, 21 nt, Human
caucuugaauuguaaggaaug

SEQ ID NO: 1632610 - RNA, 16 nt, Human
caucuugaauuguaag

SEQ ID NO: 1632611 - RNA, 17 nt, Human
caucuugcucugcugac

SEQ ID NO: 1632612 - RNA, 16 nt, Human
caucuugcucugcuga

SEQ ID NO: 1632613 - RNA, 19 nt, Human
caucuugcucugcugacag

SEQ ID NO: 1632614 - RNA, 19 nt, Human
caugaagauguagaggaga

SEQ ID NO: 1632615 - RNA, 18 nt, Human
caugaagauguagaggag

SEQ ID NO: 1632616 - RNA, 20 nt, Human
caugacucguauaugucuca

SEQ ID NO: 1632617 - RNA, 23 nt, Human
caugacucguauaugucucaggu

SEQ ID NO: 1632618 - RNA, 13 nt, Human
caugagcaucagg

SEQ ID NO: 1632619 - RNA, 21 nt, Human
caugagccucagcauccuggc

SEQ ID NO: 1632620 - RNA, 20 nt, Human
caugagccucagcauccugg

SEQ ID NO: 1632621 - RNA, 19 nt, Human
caugagccucagcauccug

SEQ ID NO: 1632622 - RNA, 18 nt, Human
caugagccucagcauccu

SEQ ID NO: 1632623 - RNA, 17 nt, Human
caugagccucagcaucc

SEQ ID NO: 1632624 - RNA, 15 nt, Human
caugagccucagcau

SEQ ID NO: 1632625 - RNA, 12 nt, Human
caugagccucag

SEQ ID NO: 1632626 - RNA, 23 nt, Human
caugagcaucaggccaggcccuc

SEQ ID NO: 1632627 - RNA, 22 nt, Human
caugagcaucaggccaggcccu

SEQ ID NO: 1632628 - RNA, 21 nt, Human
caugagcaucaggccaggccc

SEQ ID NO: 1632629 - RNA, 20 nt, Human
caugagcaucaggccaggcc

SEQ ID NO: 1632630 - RNA, 18 nt, Human
caugagcaucaggccagg

SEQ ID NO: 1632631 - RNA, 17 nt, Human
caugagcaucaggccag

SEQ ID NO: 1632632 - RNA, 16 nt, Human
caugagcaucaggcca

SEQ ID NO: 1632633 - RNA, 15 nt, Human
caugagcaucaggcc

SEQ ID NO: 1632634 - RNA, 16 nt, Human
caugagguacugagag

SEQ ID NO: 1632635 - RNA, 23 nt, Human
caugaggaacaaggcaaggcugu

SEQ ID NO: 1632636 - RNA, 21 nt, Human
caugaggaacaaggcaaggcu

SEQ ID NO: 1632637 - RNA, 20 nt, Human
caugaggaacaaggcaaggc

SEQ ID NO: 1632638 - RNA, 17 nt, Human
caugaggaacaaggcaa

SEQ ID NO: 1632639 - RNA, 16 nt, Human
caugaggaacaaggca

SEQ ID NO: 1632640 - RNA, 23 nt, Human
caugagccucagcauccuggcac

SEQ ID NO: 1632641 - RNA, 22 nt, Human
caugagccucagcauccuggca

SEQ ID NO: 1632642 - RNA, 19 nt, Human
caugagguacugagaguga

SEQ ID NO: 1632643 - RNA, 13 nt, Human
caugaguccccug

SEQ ID NO: 1632644 - RNA, 15 nt, Human
caugaguccccuguu

SEQ ID NO: 1632645 - RNA, 14 nt, Human
caugaguccccugu

SEQ ID NO: 1632646 - RNA, 23 nt, Human
caugaguccccuguuuguuucug

SEQ ID NO: 1632647 - RNA, 13 nt, Human
caugaaaacacau

SEQ ID NO: 1632648 - RNA, 14 nt, Human
caugaaaacacauu

SEQ ID NO: 1632649 - RNA, 15 nt, Human
caugaaaacacauuu

SEQ ID NO: 1632650 - RNA, 16 nt, Human
caugaaaacacauuuu

SEQ ID NO: 1632651 - RNA, 17 nt, Human
caugaaaacacauuuuu

SEQ ID NO: 1632652 - RNA, 12 nt, Human
caugaagacaga

SEQ ID NO: 1632653 - RNA, 19 nt, Human
caugaaaacacauuuuucu

SEQ ID NO: 1632654 - RNA, 21 nt, Human
caugaaaacacauuuuucuua

SEQ ID NO: 1632655 - RNA, 14 nt, Human
caugaaagauucaa

SEQ ID NO: 1632656 - RNA, 22 nt, Human
cauauucuguuggccaguguga

SEQ ID NO: 1632657 - RNA, 17 nt, Human
cauauugauuuccguua

SEQ ID NO: 1632658 - RNA, 21 nt, Human
cauauugauuuccguuaaaau

SEQ ID NO: 1632659 - RNA, 19 nt, Human
cauauuguuacugguacca

SEQ ID NO: 1632660 - RNA, 13 nt, Human
cauauuguuacug

SEQ ID NO: 1632661 - RNA, 22 nt, Human
cauauauuuuuauauuuacuaa

SEQ ID NO: 1632662 - RNA, 21 nt, Human
cauauauuuuuauauuuacua

SEQ ID NO: 1632663 - RNA, 20 nt, Human
cauauauuuuuauauuuacu

SEQ ID NO: 1632664 - RNA, 20 nt, Human
cauauauaacaaugcuguau

SEQ ID NO: 1632665 - RNA, 15 nt, Human
cauauauaacaaugc

SEQ ID NO: 1632666 - RNA, 18 nt, Human
cauauauuuuuauauuua

SEQ ID NO: 1632667 - RNA, 13 nt, Human
cauauauaacaau

SEQ ID NO: 1632668 - RNA, 23 nt, Human
cauauaagauucauauuuacuuc

SEQ ID NO: 1632669 - RNA, 16 nt, Human
cauauaagugauugcu

SEQ ID NO: 1632670 - RNA, 22 nt, Human
cauagugaugguuccccuguuc

SEQ ID NO: 1632671 - RNA, 19 nt, Human
cauagugaugguuccccug

SEQ ID NO: 1632672 - RNA, 18 nt, Human
cauagugaugguuccccu

SEQ ID NO: 1632673 - RNA, 19 nt, Human
cauagucuggcuguaccca

SEQ ID NO: 1632674 - RNA, 15 nt, Human
cauaguaugguggcu

SEQ ID NO: 1632675 - RNA, 17 nt, Human
cauaguaugguggcugg

SEQ ID NO: 1632676 - RNA, 16 nt, Human
cauaguaugguggcug

SEQ ID NO: 1632677 - RNA, 14 nt, Human
caucaacaucuugg

SEQ ID NO: 1632678 - RNA, 22 nt, Human
caucccucccuccaccucccug

SEQ ID NO: 1632679 - RNA, 23 nt, Human
caucccucccuccaccucccugc

SEQ ID NO: 1632680 - RNA, 13 nt, Human
caucccuccuggg

SEQ ID NO: 1632681 - RNA, 15 nt, Human
caucccucuggggcu

SEQ ID NO: 1632682 - RNA, 18 nt, Human
caucccuuaccugggaaa

SEQ ID NO: 1632683 - RNA, 23 nt, Human
cauccacugugccaugugccagg

SEQ ID NO: 1632684 - RNA, 17 nt, Human
cauccacugugccaugu

SEQ ID NO: 1632685 - RNA, 14 nt, Human
cauccacugugcca

SEQ ID NO: 1632686 - RNA, 12 nt, Human
cauccauccagg

SEQ ID NO: 1632687 - RNA, 12 nt, Human
caucacccgcua

SEQ ID NO: 1632688 - RNA, 20 nt, Human
caucaccaacgucugugcca

SEQ ID NO: 1632689 - RNA, 15 nt, Human
caucaugucuggcua

SEQ ID NO: 1632690 - RNA, 14 nt, Human
caucaugucuggcu

SEQ ID NO: 1632691 - RNA, 13 nt, Human
caucaugucuggc

SEQ ID NO: 1632692 - RNA, 16 nt, Human
caucauccuaagcuau

SEQ ID NO: 1632693 - RNA, 15 nt, Human
cauguuugugauuga

SEQ ID NO: 1632694 - RNA, 20 nt, Human
cauguuuuucuucucccuca

SEQ ID NO: 1632695 - RNA, 19 nt, Human
cauguuuuucuucucccuc

SEQ ID NO: 1632696 - RNA, 12 nt, Human
cauguuugugau

SEQ ID NO: 1632697 - RNA, 14 nt, Human
cauguuugugauug

SEQ ID NO: 1632698 - RNA, 20 nt, Human
cauguuucuuuguaaugaaa

SEQ ID NO: 1632699 - RNA, 20 nt, Human
caugugcuaguaauuggaaa

SEQ ID NO: 1632700 - RNA, 14 nt, Human
caugugcacaugca

SEQ ID NO: 1632701 - RNA, 18 nt, Human
cauguguuggcagccucu

SEQ ID NO: 1632702 - RNA, 13 nt, Human
cauguuaaaccau

SEQ ID NO: 1632703 - RNA, 23 nt, Human
cauguuuauuacaguauaauuaa

SEQ ID NO: 1632704 - RNA, 22 nt, Human
cauguuaaaccaugggauaaau

SEQ ID NO: 1632705 - RNA, 21 nt, Human
caugugaugagaggaaaucac

SEQ ID NO: 1632706 - RNA, 20 nt, Human
caugugaugagaggaaauca

SEQ ID NO: 1632707 - RNA, 18 nt, Human
caugugaugagaggaaau

SEQ ID NO: 1632708 - RNA, 17 nt, Human
caugugaugagaggaaa

SEQ ID NO: 1632709 - RNA, 16 nt, Human
caugugaugagaggaa

SEQ ID NO: 1632710 - RNA, 15 nt, Human
caugugaugagagga

SEQ ID NO: 1632711 - RNA, 12 nt, Human
caugucuggcua

SEQ ID NO: 1632712 - RNA, 14 nt, Human
caugucucgacuca

SEQ ID NO: 1632713 - RNA, 17 nt, Human
cauggucggaaaacaug

SEQ ID NO: 1632714 - RNA, 19 nt, Human
cauggucggaaaacaugcu

SEQ ID NO: 1632715 - RNA, 23 nt, Human
cauggucggaaaacaugcuacac

SEQ ID NO: 1632716 - RNA, 18 nt, Human
caugggccuccugugugu

SEQ ID NO: 1632717 - RNA, 17 nt, Human
caugggauaaaugccau

SEQ ID NO: 1632718 - RNA, 16 nt, Human
caugggauaaaugcca

SEQ ID NO: 1632719 - RNA, 23 nt, Human
caugggauaaaugccaucaauaa

SEQ ID NO: 1632720 - RNA, 18 nt, Human
caugggauaaaugccauc

SEQ ID NO: 1632721 - RNA, 20 nt, Human
cauggaauuggagcucgugg

SEQ ID NO: 1632722 - RNA, 18 nt, Human
caugcuguucaugaaaga

SEQ ID NO: 1632723 - RNA, 16 nt, Human
caugcuguucaugaaa

SEQ ID NO: 1632724 - RNA, 15 nt, Human
cauggacuuccacug

SEQ ID NO: 1632725 - RNA, 22 nt, Human
cauggacuucugccagcauaau

SEQ ID NO: 1632726 - RNA, 17 nt, Human
caugcgggcuuccuccu

SEQ ID NO: 1632727 - RNA, 15 nt, Human
caugcugucccuuac

SEQ ID NO: 1632728 - RNA, 13 nt, Human
caugcugucccuu

SEQ ID NO: 1632729 - RNA, 17 nt, Human
caugcugucccuuacgu

SEQ ID NO: 1632730 - RNA, 15 nt, Human
caugcuguucaugaa

SEQ ID NO: 1632731 - RNA, 14 nt, Human
caugcagcaucuaa

SEQ ID NO: 1632732 - RNA, 15 nt, Human
cauugugggaagggg

SEQ ID NO: 1632733 - RNA, 21 nt, Human
cauuguaaaugugcuuuuaaa

SEQ ID NO: 1632734 - RNA, 15 nt, Human
cauuuaaaaaaaauc

SEQ ID NO: 1632735 - RNA, 17 nt, Human
cauugaccugaggcccu

SEQ ID NO: 1632736 - RNA, 15 nt, Human
cauugaccugaggcc

SEQ ID NO: 1632737 - RNA, 14 nt, Human
cauugaccugaggc

SEQ ID NO: 1632738 - RNA, 18 nt, Human
cauugaccugaggcccuu

SEQ ID NO: 1632739 - RNA, 17 nt, Human
cauuugaaaauuuugau

SEQ ID NO: 1632740 - RNA, 19 nt, Human
cauuugaaaauuuugaugu

SEQ ID NO: 1632741 - RNA, 17 nt, Human
cauuuuuaguagagaca

SEQ ID NO: 1632742 - RNA, 18 nt, Human
cauuuuuaguagagacag

SEQ ID NO: 1632743 - RNA, 21 nt, Human
cauuuuuaagugcugcauuua

SEQ ID NO: 1632744 - RNA, 16 nt, Human
ccaaacccuucagugc

SEQ ID NO: 1632745 - RNA, 23 nt, Human
cauuuuauuuuauuaugcaugaa

SEQ ID NO: 1632746 - RNA, 23 nt, Human
cauuuuaccuuugacaaagguaa

SEQ ID NO: 1632747 - RNA, 22 nt, Human
cauuuggaaaucuuuaaaaaaa

SEQ ID NO: 1632748 - RNA, 11 nt, Human
cauuuggaaau

SEQ ID NO: 1632749 - RNA, 18 nt, Human
cauuuggaaaucuuuaaa

SEQ ID NO: 1632750 - RNA, 17 nt, Human
cauuuggaaaucuuuaa

SEQ ID NO: 1632751 - RNA, 22 nt, Human
cauuccaacuaucucauuucca

SEQ ID NO: 1632752 - RNA, 17 nt, Human
cauuccaccuucccaug

SEQ ID NO: 1632753 - RNA, 22 nt, Human
cauuccaccuucccaugcccug

SEQ ID NO: 1632754 - RNA, 19 nt, Human
cauucauuuucuggguguu

SEQ ID NO: 1632755 - RNA, 21 nt, Human
cauucagauaugauucaaaug

SEQ ID NO: 1632756 - RNA, 19 nt, Human
cauuccccaggaggccagc

SEQ ID NO: 1632757 - RNA, 18 nt, Human
cauuccccaggaggccag

SEQ ID NO: 1632758 - RNA, 20 nt, Human
cauuccccaggaggccagcc

SEQ ID NO: 1632759 - RNA, 13 nt, Human
cauuccccauggg

SEQ ID NO: 1632760 - RNA, 17 nt, Human
cauuccccgucucuggu

SEQ ID NO: 1632761 - RNA, 17 nt, Human
cauuccccaggaggcca

SEQ ID NO: 1632762 - RNA, 15 nt, Human
cauuccccaggaggc

SEQ ID NO: 1632763 - RNA, 13 nt, Human
cauuccccaggag

SEQ ID NO: 1632764 - RNA, 20 nt, Human
cauucaaauguauuacagug

SEQ ID NO: 1632765 - RNA, 22 nt, Human
cauuauucaaaguugccuaaau

SEQ ID NO: 1632766 - RNA, 21 nt, Human
cauuauucaaaguugccuaaa

SEQ ID NO: 1632767 - RNA, 18 nt, Human
cauuauucaaaguugccu

SEQ ID NO: 1632768 - RNA, 13 nt, Human
cauucuggaauaa

SEQ ID NO: 1632769 - RNA, 17 nt, Human
cauucuguuaaucauua

SEQ ID NO: 1632770 - RNA, 20 nt, Human
cauucugccugcccaggccc

SEQ ID NO: 1632771 - RNA, 19 nt, Human
cauucugccugcccaggcc

SEQ ID NO: 1632772 - RNA, 18 nt, Human
cauucugccugcccaggc

SEQ ID NO: 1632773 - RNA, 17 nt, Human
cauucugccugcccagg

SEQ ID NO: 1632774 - RNA, 16 nt, Human
cauucugccugcccag

SEQ ID NO: 1632775 - RNA, 15 nt, Human
cauucugccugccca

SEQ ID NO: 1632776 - RNA, 13 nt, Human
cauucugccugcc

SEQ ID NO: 1632777 - RNA, 12 nt, Human
cauucugccugc

SEQ ID NO: 1632778 - RNA, 23 nt, Human
cauuccugaugcuucuucagaga

SEQ ID NO: 1632779 - RNA, 22 nt, Human
cauuccugaugcuucuucagag

SEQ ID NO: 1632780 - RNA, 19 nt, Human
cauuccugaugcuucuuca

SEQ ID NO: 1632781 - RNA, 16 nt, Human
cauuccugaugcuucu

SEQ ID NO: 1632782 - RNA, 14 nt, Human
cauuccugaugcuu

SEQ ID NO: 1632783 - RNA, 14 nt, Human
cauuccugaacagg

SEQ ID NO: 1632784 - RNA, 23 nt, Human
cauucuucuguacgucugacagg

SEQ ID NO: 1632785 - RNA, 19 nt, Human
ccaugggacagggaggacg

SEQ ID NO: 1632786 - RNA, 16 nt, Human
ccaugggacagggagg

SEQ ID NO: 1632787 - RNA, 13 nt, Human
ccaugggauaaau

SEQ ID NO: 1632788 - RNA, 17 nt, Human
ccauguuggccaggcug

SEQ ID NO: 1632789 - RNA, 17 nt, Human
ccaugggauaaaugcca

SEQ ID NO: 1632790 - RNA, 18 nt, Human
ccauguuggccaggcugg

SEQ ID NO: 1632791 - RNA, 21 nt, Human
ccauguuggccaggcugcucu

SEQ ID NO: 1632792 - RNA, 18 nt, Human
ccauguuggccaggcugc

SEQ ID NO: 1632793 - RNA, 22 nt, Human
ccauuauucaaaguugccuaaa

SEQ ID NO: 1632794 - RNA, 17 nt, Human
ccauuauucaaaguugc

SEQ ID NO: 1632795 - RNA, 20 nt, Human
ccauguuuauuacaguauaa

SEQ ID NO: 1632796 - RNA, 13 nt, Human
ccauguuuauuac

SEQ ID NO: 1632797 - RNA, 14 nt, Human
ccauuauucaaagu

SEQ ID NO: 1632798 - RNA, 16 nt, Human
ccaucuaaacugcccc

SEQ ID NO: 1632799 - RNA, 15 nt, Human
ccaucuaaacugccc

SEQ ID NO: 1632800 - RNA, 21 nt, Human
ccaugggaaaugucaacaagu

SEQ ID NO: 1632801 - RNA, 14 nt, Human
ccaucuaaacugcc

SEQ ID NO: 1632802 - RNA, 22 nt, Human
cccaaauggaaaugggcagagc

SEQ ID NO: 1632803 - RNA, 18 nt, Human
cccaaauggaaaugggca

SEQ ID NO: 1632804 - RNA, 23 nt, Human
cccaaauggaaaugggcagagca

SEQ ID NO: 1632805 - RNA, 16 nt, Human
cccaaagugcugggau

SEQ ID NO: 1632806 - RNA, 15 nt, Human
cccaacccuggcacc

SEQ ID NO: 1632807 - RNA, 17 nt, Human
cccaaggcucugagcaa

SEQ ID NO: 1632808 - RNA, 18 nt, Human
cccaaaacucuccucugc

SEQ ID NO: 1632809 - RNA, 16 nt, Human
cccaaaacucuccucu

SEQ ID NO: 1632810 - RNA, 20 nt, Human
cccaaaacucuccucugcug

SEQ ID NO: 1632811 - RNA, 15 nt, Human
cccaaagugcuggga

SEQ ID NO: 1632812 - RNA, 13 nt, Human
cccaaagugcugg

SEQ ID NO: 1632813 - RNA, 14 nt, Human
ccauuuguguuuau

SEQ ID NO: 1632814 - RNA, 20 nt, Human
ccauucuccaccugccaggg

SEQ ID NO: 1632815 - RNA, 19 nt, Human
ccauucuccaccugccagg

SEQ ID NO: 1632816 - RNA, 14 nt, Human
ccaguuauggcuau

SEQ ID NO: 1632817 - RNA, 21 nt, Human
ccaguuauggcuauaggugcu

SEQ ID NO: 1632818 - RNA, 23 nt, Human
ccauauucuguuggccaguguga

SEQ ID NO: 1632819 - RNA, 21 nt, Human
ccauaguaugggacuggccuc

SEQ ID NO: 1632820 - RNA, 12 nt, Human
ccauaggucacc

SEQ ID NO: 1632821 - RNA, 22 nt, Human
ccaguguuguggauuuaacaga

SEQ ID NO: 1632822 - RNA, 17 nt, Human
ccagugaggcucugccc

SEQ ID NO: 1632823 - RNA, 20 nt, Human
ccagugccgagaaggaagcc

SEQ ID NO: 1632824 - RNA, 22 nt, Human
ccagugguuccuaauccucuag

SEQ ID NO: 1632825 - RNA, 15 nt, Human
ccagugaggcucugc

SEQ ID NO: 1632826 - RNA, 14 nt, Human
ccagugaggcucug

SEQ ID NO: 1632827 - RNA, 16 nt, Human
ccagugaggcucugcc

SEQ ID NO: 1632828 - RNA, 13 nt, Human
ccaucuacccucc

SEQ ID NO: 1632829 - RNA, 21 nt, Human
ccaggcccucugcccacuccc

SEQ ID NO: 1632830 - RNA, 23 nt, Human
ccaggcccucugcccacucccug

SEQ ID NO: 1632831 - RNA, 22 nt, Human
ccaggcccucugcccacucccu

SEQ ID NO: 1632832 - RNA, 24 nt, Human
ccaggcuguaucccaugagccuca

SEQ ID NO: 1632833 - RNA, 17 nt, Human
ccaggcuuagucacuga

SEQ ID NO: 1632834 - RNA, 19 nt, Human
ccaggcgccccuucccccu

SEQ ID NO: 1632835 - RNA, 18 nt, Human
ccaggcgccccuuccccc

SEQ ID NO: 1632836 - RNA, 21 nt, Human
ccaggcauuccccaggaggcc

SEQ ID NO: 1632837 - RNA, 19 nt, Human
ccaggcauuccccaggagg

SEQ ID NO: 1632838 - RNA, 22 nt, Human
ccaggcauuccccaggaggcca

SEQ ID NO: 1632839 - RNA, 18 nt, Human
ccaggcauuccccaggag

SEQ ID NO: 1632840 - RNA, 12 nt, Human
ccaggagccucc

SEQ ID NO: 1632841 - RNA, 20 nt, Human
ccaggagccccgaggccuuc

SEQ ID NO: 1632842 - RNA, 19 nt, Human
ccaggagccccgaggccuu

SEQ ID NO: 1632843 - RNA, 16 nt, Human
ccagccuccaugcugc

SEQ ID NO: 1632844 - RNA, 15 nt, Human
ccagccuccaugcug

SEQ ID NO: 1632845 - RNA, 22 nt, Human
ccagggacagaggggguggccu

SEQ ID NO: 1632846 - RNA, 21 nt, Human
ccagggacagaggggguggcc

SEQ ID NO: 1632847 - RNA, 15 nt, Human
ccagggacagagggg

SEQ ID NO: 1632848 - RNA, 14 nt, Human
ccagggacagaggg

SEQ ID NO: 1632849 - RNA, 20 nt, Human
ccaggcuuagucacugagac

SEQ ID NO: 1632850 - RNA, 20 nt, Human
ccaggugcacaagcuccaag

SEQ ID NO: 1632851 - RNA, 19 nt, Human
ccaggugcacaagcuccaa

SEQ ID NO: 1632852 - RNA, 21 nt, Human
ccagggcuggaaugauuucag

SEQ ID NO: 1632853 - RNA, 20 nt, Human
ccagucuggaaugcaguggu

SEQ ID NO: 1632854 - RNA, 19 nt, Human
ccagucuggaaugcagugg

SEQ ID NO: 1632855 - RNA, 18 nt, Human
ccagucuggaaugcagug

SEQ ID NO: 1632856 - RNA, 24 nt, Human
ccaggugcacaagcuccaagcucc

SEQ ID NO: 1632857 - RNA, 17 nt, Human
ccagguuuuuggucuga

SEQ ID NO: 1632858 - RNA, 23 nt, Human
ccagcaguucagagcugcccucu

SEQ ID NO: 1632859 - RNA, 23 nt, Human
ccagcauaauacuugcuuuggaa

SEQ ID NO: 1632860 - RNA, 13 nt, Human
ccagcaguucaga

SEQ ID NO: 1632861 - RNA, 18 nt, Human
ccagcaguucagagcugc

SEQ ID NO: 1632862 - RNA, 19 nt, Human
ccagcaguucagagcugcc

SEQ ID NO: 1632863 - RNA, 20 nt, Human
ccagcaguucagagcugccc

SEQ ID NO: 1632864 - RNA, 21 nt, Human
ccagcaguucagagcugcccu

SEQ ID NO: 1632865 - RNA, 22 nt, Human
ccagcaguucagagcugcccuc

SEQ ID NO: 1632866 - RNA, 22 nt, Human
ccagccagcaguucagagcugc

SEQ ID NO: 1632867 - RNA, 19 nt, Human
ccagccaaagccuccucca

SEQ ID NO: 1632868 - RNA, 18 nt, Human
ccagccaaagccuccucc

SEQ ID NO: 1632869 - RNA, 15 nt, Human
ccagccaaagccucc

SEQ ID NO: 1632870 - RNA, 15 nt, Human
ccagccccagugccc

SEQ ID NO: 1632871 - RNA, 13 nt, Human
ccagccccagugc

SEQ ID NO: 1632872 - RNA, 23 nt, Human
ccagccccaaaacucuccucugc

SEQ ID NO: 1632873 - RNA, 17 nt, Human
ccagcccuuagcaggga

SEQ ID NO: 1632874 - RNA, 16 nt, Human
ccagcccuuagcaggg

SEQ ID NO: 1632875 - RNA, 21 nt, Human
ccagcccuccuuaucaaagga

SEQ ID NO: 1632876 - RNA, 16 nt, Human
ccagccccagugccca

SEQ ID NO: 1632877 - RNA, 19 nt, Human
ccagccgccaugcuccugg

SEQ ID NO: 1632878 - RNA, 18 nt, Human
ccagccgccaugcuccug

SEQ ID NO: 1632879 - RNA, 14 nt, Human
ccagccgccaugcu

SEQ ID NO: 1632880 - RNA, 21 nt, Human
ccagccuccaagcuccaucuc

SEQ ID NO: 1632881 - RNA, 15 nt, Human
ccagauuucacucuc

SEQ ID NO: 1632882 - RNA, 15 nt, Human
ccagcaagugagagc

SEQ ID NO: 1632883 - RNA, 14 nt, Human
ccagauuucacucu

SEQ ID NO: 1632884 - RNA, 22 nt, Human
ccagcaagugagagcugggugu

SEQ ID NO: 1632885 - RNA, 21 nt, Human
ccagcaagugagagcugggug

SEQ ID NO: 1632886 - RNA, 16 nt, Human
ccagcaagugagagcu

SEQ ID NO: 1632887 - RNA, 18 nt, Human
ccagcaauucuccugccu

SEQ ID NO: 1632888 - RNA, 16 nt, Human
ccagcaauucuccugc

SEQ ID NO: 1632889 - RNA, 21 nt, Human
ccagcaauucuccugccucag

SEQ ID NO: 1632890 - RNA, 20 nt, Human
ccagcaauucuccugccuca

SEQ ID NO: 1632891 - RNA, 19 nt, Human
ccagcaauucuccugccuc

SEQ ID NO: 1632892 - RNA, 22 nt, Human
ccagauucuuuccugaggcugg

SEQ ID NO: 1632893 - RNA, 21 nt, Human
ccagauucuuuccugaggcug

SEQ ID NO: 1632894 - RNA, 20 nt, Human
ccagauucuuuccugaggcu

SEQ ID NO: 1632895 - RNA, 19 nt, Human
ccagauucuuuccugaggc

SEQ ID NO: 1632896 - RNA, 18 nt, Human
ccagauucuuuccugagg

SEQ ID NO: 1632897 - RNA, 23 nt, Human
ccagagggagugacagaggcagc

SEQ ID NO: 1632898 - RNA, 22 nt, Human
ccagagggagugacagaggcag

SEQ ID NO: 1632899 - RNA, 13 nt, Human
ccagagggccugc

SEQ ID NO: 1632900 - RNA, 16 nt, Human
ccagagggccugcaag

SEQ ID NO: 1632901 - RNA, 15 nt, Human
ccagagggccugcaa

SEQ ID NO: 1632902 - RNA, 20 nt, Human
ccagauugcaacaggcuggg

SEQ ID NO: 1632903 - RNA, 19 nt, Human
ccagauugcaacaggcugg

SEQ ID NO: 1632904 - RNA, 23 nt, Human
ccagauucuuuccugaggcuggg

SEQ ID NO: 1632905 - RNA, 21 nt, Human
ccagauugcaacaggcugggc

SEQ ID NO: 1632906 - RNA, 13 nt, Human
ccagauuuaugca

SEQ ID NO: 1632907 - RNA, 12 nt, Human
ccagauuucacu

SEQ ID NO: 1632908 - RNA, 22 nt, Human
ccagauuuaugcauauuauuuu

SEQ ID NO: 1632909 - RNA, 22 nt, Human
ccagaggagagaggacccccug

SEQ ID NO: 1632910 - RNA, 21 nt, Human
ccagaggagagaggacccccu

SEQ ID NO: 1632911 - RNA, 21 nt, Human
ccagagggagugacagaggca

SEQ ID NO: 1632912 - RNA, 20 nt, Human
ccagagggagugacagaggc

SEQ ID NO: 1632913 - RNA, 19 nt, Human
ccagagggagugacagagg

SEQ ID NO: 1632914 - RNA, 18 nt, Human
ccagagggagugacagag

SEQ ID NO: 1632915 - RNA, 17 nt, Human
ccagagggagugacaga

SEQ ID NO: 1632916 - RNA, 16 nt, Human
ccagagggagugacag

SEQ ID NO: 1632917 - RNA, 19 nt, Human
ccagagcugccaccugccu

SEQ ID NO: 1632918 - RNA, 16 nt, Human
ccagagcugccaccug

SEQ ID NO: 1632919 - RNA, 15 nt, Human
ccagagcugccaccu

SEQ ID NO: 1632920 - RNA, 14 nt, Human
ccagagcugccacc

SEQ ID NO: 1632921 - RNA, 13 nt, Human
ccagagcugccac

SEQ ID NO: 1632922 - RNA, 12 nt, Human
ccagagcugcca

SEQ ID NO: 1632923 - RNA, 11 nt, Human
ccagagcugcc

SEQ ID NO: 1632924 - RNA, 19 nt, Human
ccagacaccuugacagggc

SEQ ID NO: 1632925 - RNA, 17 nt, Human
ccagacaccuugacagg

SEQ ID NO: 1632926 - RNA, 20 nt, Human
ccacuguacuugcucuugau

SEQ ID NO: 1632927 - RNA, 19 nt, Human
ccacuguacuugcucuuga

SEQ ID NO: 1632928 - RNA, 18 nt, Human
ccacuguacuugcucuug

SEQ ID NO: 1632929 - RNA, 17 nt, Human
ccacuguacuugcucuu

SEQ ID NO: 1632930 - RNA, 14 nt, Human
ccagagaggguggu

SEQ ID NO: 1632931 - RNA, 23 nt, Human
ccagagaggguggugaccucugc

SEQ ID NO: 1632932 - RNA, 21 nt, Human
ccagagaggguggugaccucu

SEQ ID NO: 1632933 - RNA, 20 nt, Human
ccagacaccuugacagggca

SEQ ID NO: 1632934 - RNA, 14 nt, Human
ccaccucccugcaa

SEQ ID NO: 1632935 - RNA, 17 nt, Human
ccaccucccacaaagga

SEQ ID NO: 1632936 - RNA, 20 nt, Human
ccaccugccuguugggccag

SEQ ID NO: 1632937 - RNA, 17 nt, Human
ccaccugccuguugggc

SEQ ID NO: 1632938 - RNA, 12 nt, Human
ccaccugccagg

SEQ ID NO: 1632939 - RNA, 14 nt, Human
ccaccugcccaacc

SEQ ID NO: 1632940 - RNA, 15 nt, Human
ccacggccaggccag

SEQ ID NO: 1632941 - RNA, 14 nt, Human
ccacggccaggcca

SEQ ID NO: 1632942 - RNA, 13 nt, Human
ccacggccaggcc

SEQ ID NO: 1632943 - RNA, 12 nt, Human
ccacggccaggc

SEQ ID NO: 1632944 - RNA, 18 nt, Human
ccaccuggccucugcacu

SEQ ID NO: 1632945 - RNA, 17 nt, Human
ccaccuggccucugcac

SEQ ID NO: 1632946 - RNA, 16 nt, Human
ccaccuggccucugca

SEQ ID NO: 1632947 - RNA, 15 nt, Human
ccaccuggccucugc

SEQ ID NO: 1632948 - RNA, 22 nt, Human
ccaccugcggugcuaucucccc

SEQ ID NO: 1632949 - RNA, 14 nt, Human
ccacccaggagccc

SEQ ID NO: 1632950 - RNA, 12 nt, Human
ccacccaggagc

SEQ ID NO: 1632951 - RNA, 15 nt, Human
ccaccucagccuccc

SEQ ID NO: 1632952 - RNA, 14 nt, Human
ccaccucagccucc

SEQ ID NO: 1632953 - RNA, 13 nt, Human
ccaccucagccuc

SEQ ID NO: 1632954 - RNA, 12 nt, Human
ccaccucagccu

SEQ ID NO: 1632955 - RNA, 18 nt, Human
ccacccugaaagcccuga

SEQ ID NO: 1632956 - RNA, 17 nt, Human
ccacccugaaagcccug

SEQ ID NO: 1632957 - RNA, 16 nt, Human
ccacccugaaagcccu

SEQ ID NO: 1632958 - RNA, 19 nt, Human
ccaccccucaacaccucug

SEQ ID NO: 1632959 - RNA, 13 nt, Human
ccacguuucuaaa

SEQ ID NO: 1632960 - RNA, 22 nt, Human
ccacuacggaauaguuggcuag

SEQ ID NO: 1632961 - RNA, 18 nt, Human
ccacuacauucuguuaau

SEQ ID NO: 1632962 - RNA, 23 nt, Human
ccacuacggaauaguuggcuagg

SEQ ID NO: 1632963 - RNA, 13 nt, Human
ccacucccugcaa

SEQ ID NO: 1632964 - RNA, 12 nt, Human
ccacucccugca

SEQ ID NO: 1632965 - RNA, 20 nt, Human
ccacuccagaccccuggcuu

SEQ ID NO: 1632966 - RNA, 19 nt, Human
ccacuccagaccccuggcu

SEQ ID NO: 1632967 - RNA, 17 nt, Human
ccacuccagaccccugg

SEQ ID NO: 1632968 - RNA, 20 nt, Human
ccacugcacuccagccuggg

SEQ ID NO: 1632969 - RNA, 19 nt, Human
ccacugcacuccagccugg

SEQ ID NO: 1632970 - RNA, 15 nt, Human
ccacucccugcaacc

SEQ ID NO: 1632971 - RNA, 23 nt, Human
ccacugcacuccagccuggguga

SEQ ID NO: 1632972 - RNA, 11 nt, Human
ccacugcucug

SEQ ID NO: 1632973 - RNA, 16 nt, Human
ccacugcgaccacaag

SEQ ID NO: 1632974 - RNA, 11 nt, Human
ccacugccucu

SEQ ID NO: 1632975 - RNA, 21 nt, Human
ccacccaggagccccgaggcc

SEQ ID NO: 1632976 - RNA, 23 nt, Human
ccacaucuugcucugcugacaga

SEQ ID NO: 1632977 - RNA, 22 nt, Human
ccacaucuugcucugcugacag

SEQ ID NO: 1632978 - RNA, 17 nt, Human
ccacaucuugcucugcu

SEQ ID NO: 1632979 - RNA, 16 nt, Human
ccacaucuugcucugc

SEQ ID NO: 1632980 - RNA, 18 nt, Human
ccaccaacauacucccau

SEQ ID NO: 1632981 - RNA, 14 nt, Human
ccaccaacauacuc

SEQ ID NO: 1632982 - RNA, 14 nt, Human
ccacaucuugcucu

SEQ ID NO: 1632983 - RNA, 23 nt, Human
ccacauagugaugguuccccugu

SEQ ID NO: 1632984 - RNA, 22 nt, Human
ccacauagugaugguuccccug

SEQ ID NO: 1632985 - RNA, 21 nt, Human
ccacauagugaugguuccccu

SEQ ID NO: 1632986 - RNA, 19 nt, Human
ccacauagugaugguuccc

SEQ ID NO: 1632987 - RNA, 13 nt, Human
ccacccaccucag

SEQ ID NO: 1632988 - RNA, 22 nt, Human
ccacccaagggccuggccugag

SEQ ID NO: 1632989 - RNA, 21 nt, Human
ccacccaagggccuggccuga

SEQ ID NO: 1632990 - RNA, 20 nt, Human
ccacccaagggccuggccug

SEQ ID NO: 1632991 - RNA, 15 nt, Human
ccacccaccucagcc

SEQ ID NO: 1632992 - RNA, 14 nt, Human
ccacccaccucagc

SEQ ID NO: 1632993 - RNA, 16 nt, Human
ccacccaccucagccu

SEQ ID NO: 1632994 - RNA, 16 nt, Human
ccaccacacccagccc

SEQ ID NO: 1632995 - RNA, 14 nt, Human
ccaccacacccagc

SEQ ID NO: 1632996 - RNA, 20 nt, Human
ccaccaacauacucccaucu

SEQ ID NO: 1632997 - RNA, 19 nt, Human
ccacccaagggccuggccu

SEQ ID NO: 1632998 - RNA, 17 nt, Human
ccacccaagggccuggc

SEQ ID NO: 1632999 - RNA, 16 nt, Human
ccacccaagggccugg

SEQ ID NO: 1633000 - RNA, 14 nt, Human
ccacacccagccca

SEQ ID NO: 1633001 - RNA, 13 nt, Human
ccacacccagccc

SEQ ID NO: 1633002 - RNA, 15 nt, Human
ccacacccagcccac

SEQ ID NO: 1633003 - RNA, 13 nt, Human
ccacacuccagcu

SEQ ID NO: 1633004 - RNA, 17 nt, Human
ccacacuccagcuggga

SEQ ID NO: 1633005 - RNA, 14 nt, Human
ccacacuccagcug

SEQ ID NO: 1633006 - RNA, 12 nt, Human
ccacacccagcc

SEQ ID NO: 1633007 - RNA, 21 nt, Human
ccugcacggugaauggcuuug

SEQ ID NO: 1633008 - RNA, 20 nt, Human
ccugcacggugaauggcuuu

SEQ ID NO: 1633009 - RNA, 16 nt, Human
ccugcaauaaaauggg

SEQ ID NO: 1633010 - RNA, 14 nt, Human
ccugcaagaacaag

SEQ ID NO: 1633011 - RNA, 20 nt, Human
ccugcaguacuuuaccuccu

SEQ ID NO: 1633012 - RNA, 18 nt, Human
ccugcaguacuuuaccuc

SEQ ID NO: 1633013 - RNA, 15 nt, Human
ccugcagggccaagc

SEQ ID NO: 1633014 - RNA, 15 nt, Human
ccugauugugucucu

SEQ ID NO: 1633015 - RNA, 14 nt, Human
ccugaggcccuucu

SEQ ID NO: 1633016 - RNA, 22 nt, Human
ccugaugcuucuucagagacuc

SEQ ID NO: 1633017 - RNA, 21 nt, Human
ccugaugcuucuucagagacu

SEQ ID NO: 1633018 - RNA, 20 nt, Human
ccugaugcuucuucagagac

SEQ ID NO: 1633019 - RNA, 19 nt, Human
ccugaugcuucuucagaga

SEQ ID NO: 1633020 - RNA, 12 nt, Human
ccugaggcccuu

SEQ ID NO: 1633021 - RNA, 11 nt, Human
ccugaggcccu

SEQ ID NO: 1633022 - RNA, 21 nt, Human
ccugcaaccugauugugucuc

SEQ ID NO: 1633023 - RNA, 22 nt, Human
ccugcaaccugauugugucucu

SEQ ID NO: 1633024 - RNA, 19 nt, Human
ccugauugugucucuuggu

SEQ ID NO: 1633025 - RNA, 17 nt, Human
ccugauugugucucuug

SEQ ID NO: 1633026 - RNA, 22 nt, Human
ccugccaggaagccagcaggcu

SEQ ID NO: 1633027 - RNA, 21 nt, Human
ccugccaggaagccagcaggc

SEQ ID NO: 1633028 - RNA, 19 nt, Human
ccugccaggaagccagcag

SEQ ID NO: 1633029 - RNA, 18 nt, Human
ccugccaggaagccagca

SEQ ID NO: 1633030 - RNA, 11 nt, Human
ccugccaggga

SEQ ID NO: 1633031 - RNA, 16 nt, Human
ccugccaggcauggug

SEQ ID NO: 1633032 - RNA, 23 nt, Human
ccugccaggaagccagcaggcuc

SEQ ID NO: 1633033 - RNA, 15 nt, Human
ccugccagggacaga

SEQ ID NO: 1633034 - RNA, 14 nt, Human
ccugccagggacag

SEQ ID NO: 1633035 - RNA, 13 nt, Human
ccugccagggaca

SEQ ID NO: 1633036 - RNA, 12 nt, Human
ccugccagggac

SEQ ID NO: 1633037 - RNA, 16 nt, Human
ccugccagggacagag

SEQ ID NO: 1633038 - RNA, 22 nt, Human
ccugccagggacagagggggug

SEQ ID NO: 1633039 - RNA, 17 nt, Human
ccugccaggaagccagc

SEQ ID NO: 1633040 - RNA, 15 nt, Human
ccugccaggaagcca

SEQ ID NO: 1633041 - RNA, 14 nt, Human
ccugccaggaagcc

SEQ ID NO: 1633042 - RNA, 13 nt, Human
ccugccaggaagc

SEQ ID NO: 1633043 - RNA, 11 nt, Human
ccugagcccca

SEQ ID NO: 1633044 - RNA, 14 nt, Human
ccugagcuuucugc

SEQ ID NO: 1633045 - RNA, 12 nt, Human
ccugagccagau

SEQ ID NO: 1633046 - RNA, 16 nt, Human
ccugagcuuucugcua

SEQ ID NO: 1633047 - RNA, 21 nt, Human
ccugaggcccagagggccugc

SEQ ID NO: 1633048 - RNA, 16 nt, Human
ccugacagaaggacuc

SEQ ID NO: 1633049 - RNA, 23 nt, Human
ccuggaaaucaggguuaguauug

SEQ ID NO: 1633050 - RNA, 14 nt, Human
ccugcuucaaauau

SEQ ID NO: 1633051 - RNA, 15 nt, Human
ccugcugagucccag

SEQ ID NO: 1633052 - RNA, 23 nt, Human
ccugcuuugggcugcccuggugc

SEQ ID NO: 1633053 - RNA, 22 nt, Human
ccugcuuugggcugcccuggug

SEQ ID NO: 1633054 - RNA, 21 nt, Human
ccugcuuugggcugcccuggu

SEQ ID NO: 1633055 - RNA, 20 nt, Human
ccugcuuugggcugcccugg

SEQ ID NO: 1633056 - RNA, 22 nt, Human
ccugcucuccgaccagacaccu

SEQ ID NO: 1633057 - RNA, 21 nt, Human
ccugcucuccucuugccacug

SEQ ID NO: 1633058 - RNA, 19 nt, Human
ccugcucuccucuugccac

SEQ ID NO: 1633059 - RNA, 18 nt, Human
ccugcucuccucuugcca

SEQ ID NO: 1633060 - RNA, 16 nt, Human
ccugcucuccucuugc

SEQ ID NO: 1633061 - RNA, 22 nt, Human
ccugcucuccucuugccacugc

SEQ ID NO: 1633062 - RNA, 21 nt, Human
ccugcucuccgaccagacacc

SEQ ID NO: 1633063 - RNA, 22 nt, Human
ccugcggugcuaucucccccag

SEQ ID NO: 1633064 - RNA, 17 nt, Human
ccugcggugcuaucucc

SEQ ID NO: 1633065 - RNA, 16 nt, Human
ccugcggugcuaucuc

SEQ ID NO: 1633066 - RNA, 22 nt, Human
ccugcgggucacaggagggagg

SEQ ID NO: 1633067 - RNA, 18 nt, Human
ccugcgggucacaggagg

SEQ ID NO: 1633068 - RNA, 14 nt, Human
ccugccccccagcc

SEQ ID NO: 1633069 - RNA, 22 nt, Human
ccugccccucaacucuccucca

SEQ ID NO: 1633070 - RNA, 23 nt, Human
ccugccuguugggccaggagccu

SEQ ID NO: 1633071 - RNA, 11 nt, Human
ccugccucagc

SEQ ID NO: 1633072 - RNA, 21 nt, Human
ccuggucacaggacucugccu

SEQ ID NO: 1633073 - RNA, 23 nt, Human
ccuggucacaggacucugccucc

SEQ ID NO: 1633074 - RNA, 22 nt, Human
ccuggucacaggacucugccuc

SEQ ID NO: 1633075 - RNA, 18 nt, Human
ccuggggguucuuucuuc

SEQ ID NO: 1633076 - RNA, 23 nt, Human
ccuggggguucuuucuuccucug

SEQ ID NO: 1633077 - RNA, 22 nt, Human
ccuggggguucuuucuuccucu

SEQ ID NO: 1633078 - RNA, 21 nt, Human
ccuggggguucuuucuuccuc

SEQ ID NO: 1633079 - RNA, 24 nt, Human
ccuggcuuuucacugcuggcugcc

SEQ ID NO: 1633080 - RNA, 23 nt, Human
ccuggcuuuucacugcuggcugc

SEQ ID NO: 1633081 - RNA, 22 nt, Human
ccuggcuuuucacugcuggcug

SEQ ID NO: 1633082 - RNA, 21 nt, Human
ccuggcuuuucacugcuggcu

SEQ ID NO: 1633083 - RNA, 20 nt, Human
ccuggcuuuucacugcuggc

SEQ ID NO: 1633084 - RNA, 20 nt, Human
ccuggccagaugcaccagcc

SEQ ID NO: 1633085 - RNA, 15 nt, Human
ccuggccagaugcac

SEQ ID NO: 1633086 - RNA, 22 nt, Human
ccuggcagccgugccuucagcu

SEQ ID NO: 1633087 - RNA, 23 nt, Human
ccuggcucccacaggcccuuccu

SEQ ID NO: 1633088 - RNA, 17 nt, Human
ccuggcucccacaggcc

SEQ ID NO: 1633089 - RNA, 13 nt, Human
ccuggcagccccu

SEQ ID NO: 1633090 - RNA, 14 nt, Human
ccuggcagccccug

SEQ ID NO: 1633091 - RNA, 12 nt, Human
ccuggcagcccc

SEQ ID NO: 1633092 - RNA, 22 nt, Human
ccuggcacuauaauguaagcuc

SEQ ID NO: 1633093 - RNA, 23 nt, Human
ccuggcacccggccccugcuggu

SEQ ID NO: 1633094 - RNA, 22 nt, Human
ccuggcacccggccccugcugg

SEQ ID NO: 1633095 - RNA, 18 nt, Human
ccuggaauauauaaccag

SEQ ID NO: 1633096 - RNA, 14 nt, Human
cgaacuggcugcaa

SEQ ID NO: 1633097 - RNA, 12 nt, Human
cgaacuggcugc

SEQ ID NO: 1633098 - RNA, 14 nt, Human
cgaacuccugaccu

SEQ ID NO: 1633099 - RNA, 19 nt, Human
cgaaagggacuuggaagcu

SEQ ID NO: 1633100 - RNA, 20 nt, Human
cgaaaggaugaaagugacca

SEQ ID NO: 1633101 - RNA, 22 nt, Human
cgaaagggacuuggaagcuccg

SEQ ID NO: 1633102 - RNA, 12 nt, Human
cgaaagaacagu

SEQ ID NO: 1633103 - RNA, 21 nt, Human
cgaaagaacaguccauugaaa

SEQ ID NO: 1633104 - RNA, 19 nt, Human
cgaaaacguggcugcuuca

SEQ ID NO: 1633105 - RNA, 18 nt, Human
cgaaaacguggcugcuuc

SEQ ID NO: 1633106 - RNA, 15 nt, Human
cgaaaacguggcugc

SEQ ID NO: 1633107 - RNA, 20 nt, Human
cgaaaacguggcugcuucaa

SEQ ID NO: 1633108 - RNA, 21 nt, Human
ccuuugacgccaucccagccc

SEQ ID NO: 1633109 - RNA, 20 nt, Human
ccuuugacgccaucccagcc

SEQ ID NO: 1633110 - RNA, 22 nt, Human
ccuuugacgccaucccagcccc

SEQ ID NO: 1633111 - RNA, 23 nt, Human
ccuuugacgccaucccagcccca

SEQ ID NO: 1633112 - RNA, 18 nt, Human
cgagcaggcuacugucag

SEQ ID NO: 1633113 - RNA, 20 nt, Human
cgagcaggcuucuucccccc

SEQ ID NO: 1633114 - RNA, 17 nt, Human
cgagcaugccuggaugg

SEQ ID NO: 1633115 - RNA, 16 nt, Human
cgagcaugccuggaug

SEQ ID NO: 1633116 - RNA, 13 nt, Human
cgagcaugccugg

SEQ ID NO: 1633117 - RNA, 20 nt, Human
cgagauugcaccacugcacu

SEQ ID NO: 1633118 - RNA, 20 nt, Human
cgagaucacgccacugcacu

SEQ ID NO: 1633119 - RNA, 18 nt, Human
cgagaucacgccacugca

SEQ ID NO: 1633120 - RNA, 14 nt, Human
cgaauagcugggac

SEQ ID NO: 1633121 - RNA, 13 nt, Human
cgaauagcuggga

SEQ ID NO: 1633122 - RNA, 15 nt, Human
cgaauagcugggacu

SEQ ID NO: 1633123 - RNA, 17 nt, Human
cgagaaacagccugugu

SEQ ID NO: 1633124 - RNA, 17 nt, Human
cgagaucacgccacugc

SEQ ID NO: 1633125 - RNA, 18 nt, Human
cgagauagccaaggccaa

SEQ ID NO: 1633126 - RNA, 17 nt, Human
cgccaugcuccuggccc

SEQ ID NO: 1633127 - RNA, 14 nt, Human
cgcagcccugcaga

SEQ ID NO: 1633128 - RNA, 10 nt, Human
cgcagcccug

SEQ ID NO: 1633129 - RNA, 16 nt, Human
cgcagacaggaccagg

SEQ ID NO: 1633130 - RNA, 15 nt, Human
cgcagacaggaccag

SEQ ID NO: 1633131 - RNA, 21 nt, Human
cgccagauucuuuccugaggc

SEQ ID NO: 1633132 - RNA, 20 nt, Human
cgccagauucuuuccugagg

SEQ ID NO: 1633133 - RNA, 19 nt, Human
cgccagauucuuuccugag

SEQ ID NO: 1633134 - RNA, 15 nt, Human
cgcagcccugcagag

SEQ ID NO: 1633135 - RNA, 22 nt, Human
cgccaggggaaaaucagccugc

SEQ ID NO: 1633136 - RNA, 16 nt, Human
cgagcccugguggcag

SEQ ID NO: 1633137 - RNA, 15 nt, Human
cgagcccugguggca

SEQ ID NO: 1633138 - RNA, 18 nt, Human
cgagcaugccuggauggg

SEQ ID NO: 1633139 - RNA, 18 nt, Human
cgagcccugguggcagug

SEQ ID NO: 1633140 - RNA, 20 nt, Human
cgauuucuguuuagauaaua

SEQ ID NO: 1633141 - RNA, 14 nt, Human
cgagcaugccugga

SEQ ID NO: 1633142 - RNA, 14 nt, Human
ccuucuguggcuca

SEQ ID NO: 1633143 - RNA, 21 nt, Human
ccuucuguggcucacagaacc

SEQ ID NO: 1633144 - RNA, 16 nt, Human
ccuucggccuccaucc

SEQ ID NO: 1633145 - RNA, 15 nt, Human
ccuucggcgccuuaa

SEQ ID NO: 1633146 - RNA, 19 nt, Human
ccuucuccuucaccuuugu

SEQ ID NO: 1633147 - RNA, 15 nt, Human
ccuucuccuucaccu

SEQ ID NO: 1633148 - RNA, 13 nt, Human
ccuugacucuuuc

SEQ ID NO: 1633149 - RNA, 23 nt, Human
ccuugaccauucuccaccugcca

SEQ ID NO: 1633150 - RNA, 20 nt, Human
ccuugaguugauucagcucu

SEQ ID NO: 1633151 - RNA, 13 nt, Human
ccuugaacuagga

SEQ ID NO: 1633152 - RNA, 19 nt, Human
ccuuggggcugaugcaguu

SEQ ID NO: 1633153 - RNA, 22 nt, Human
ccuugguuaggcauugugggaa

SEQ ID NO: 1633154 - RNA, 21 nt, Human
ccuugguuaggcauuguggga

SEQ ID NO: 1633155 - RNA, 22 nt, Human
ccuuggugucgggcaugacacg

SEQ ID NO: 1633156 - RNA, 12 nt, Human
ccuugggacccc

SEQ ID NO: 1633157 - RNA, 18 nt, Human
ccuuugacgccaucccag

SEQ ID NO: 1633158 - RNA, 17 nt, Human
ccuuugacgccauccca

SEQ ID NO: 1633159 - RNA, 16 nt, Human
ccuuugacgccauccc

SEQ ID NO: 1633160 - RNA, 20 nt, Human
ccuucggccuccauccugag

SEQ ID NO: 1633161 - RNA, 19 nt, Human
ccuucggccuccauccuga

SEQ ID NO: 1633162 - RNA, 14 nt, Human
ccuucggccuccau

SEQ ID NO: 1633163 - RNA, 15 nt, Human
ccuucgauacaccgg

SEQ ID NO: 1633164 - RNA, 22 nt, Human
ccuucauuuggcauuccccacu

SEQ ID NO: 1633165 - RNA, 14 nt, Human
ccuuccucugaggc

SEQ ID NO: 1633166 - RNA, 13 nt, Human
ccuuccucugagg

SEQ ID NO: 1633167 - RNA, 20 nt, Human
ccuuccucugagccuuggga

SEQ ID NO: 1633168 - RNA, 21 nt, Human
ccuuccucuccacugccuucg

SEQ ID NO: 1633169 - RNA, 16 nt, Human
ccuuccucugagccuu

SEQ ID NO: 1633170 - RNA, 15 nt, Human
ccuuccucugagccu

SEQ ID NO: 1633171 - RNA, 12 nt, Human
ccuucagccuga

SEQ ID NO: 1633172 - RNA, 14 nt, Human
ccuucagugccaaa

SEQ ID NO: 1633173 - RNA, 11 nt, Human
ccuucagugcc

SEQ ID NO: 1633174 - RNA, 20 nt, Human
ccuucaccuuuguccccacc

SEQ ID NO: 1633175 - RNA, 19 nt, Human
ccuucaccuuuguccccac

SEQ ID NO: 1633176 - RNA, 17 nt, Human
ccuucacagaugggugc

SEQ ID NO: 1633177 - RNA, 14 nt, Human
ccuuagacaguccc

SEQ ID NO: 1633178 - RNA, 21 nt, Human
ccuucaccuuuguccccaccg

SEQ ID NO: 1633179 - RNA, 14 nt, Human
ccuucacuuaggaa

SEQ ID NO: 1633180 - RNA, 21 nt, Human
ccuguuaaaagaugaaaauau

SEQ ID NO: 1633181 - RNA, 20 nt, Human
ccuguuaaaagaugaaaaua

SEQ ID NO: 1633182 - RNA, 15 nt, Human
ccuguuuaagagaca

SEQ ID NO: 1633183 - RNA, 12 nt, Human
ccuguuuaagag

SEQ ID NO: 1633184 - RNA, 23 nt, Human
ccuguugggccaggagccuccug

SEQ ID NO: 1633185 - RNA, 18 nt, Human
ccuguuuguuucugaaag

SEQ ID NO: 1633186 - RNA, 14 nt, Human
ccuguuuguuucug

SEQ ID NO: 1633187 - RNA, 16 nt, Human
ccuguuucugcagcca

SEQ ID NO: 1633188 - RNA, 21 nt, Human
ccugugucuugcaauggcagc

SEQ ID NO: 1633189 - RNA, 19 nt, Human
ccugugucuugcaauggca

SEQ ID NO: 1633190 - RNA, 17 nt, Human
ccugugucuugcaaugg

SEQ ID NO: 1633191 - RNA, 22 nt, Human
ccugugucuugcaauggcagcc

SEQ ID NO: 1633192 - RNA, 22 nt, Human
ccugugucuuuaaaugcugcuu

SEQ ID NO: 1633193 - RNA, 21 nt, Human
ccugugugugcgccuacagga

SEQ ID NO: 1633194 - RNA, 20 nt, Human
ccugugugugcgccuacagg

SEQ ID NO: 1633195 - RNA, 20 nt, Human
ccuuaccagcagagcaccuu

SEQ ID NO: 1633196 - RNA, 20 nt, Human
ccuuaccacugcucugauga

SEQ ID NO: 1633197 - RNA, 15 nt, Human
ccuuacccucauguu

SEQ ID NO: 1633198 - RNA, 13 nt, Human
ccuuaccagcaga

SEQ ID NO: 1633199 - RNA, 17 nt, Human
ccuuaccacugcucuga

SEQ ID NO: 1633200 - RNA, 19 nt, Human
ccuuaccugccaggaagcc

SEQ ID NO: 1633201 - RNA, 19 nt, Human
ccuuacccucauguucuua

SEQ ID NO: 1633202 - RNA, 18 nt, Human
ccuuagaagucacacagu

SEQ ID NO: 1633203 - RNA, 17 nt, Human
ccuuagaagucacacag

SEQ ID NO: 1633204 - RNA, 20 nt, Human
ccuuacacaaugguuuucuu

SEQ ID NO: 1633205 - RNA, 14 nt, Human
ccuuacacaauggu

SEQ ID NO: 1633206 - RNA, 17 nt, Human
ccuuaaagaguguggca

SEQ ID NO: 1633207 - RNA, 12 nt, Human
ccuucagugccu

SEQ ID NO: 1633208 - RNA, 16 nt, Human
ccgggcguggugguga

SEQ ID NO: 1633209 - RNA, 20 nt, Human
ccgggcgcgguggcucacgc

SEQ ID NO: 1633210 - RNA, 13 nt, Human
ccgggcucugccu

SEQ ID NO: 1633211 - RNA, 19 nt, Human
ccgggcugggagcucugca

SEQ ID NO: 1633212 - RNA, 18 nt, Human
ccgggcugggagcucugc

SEQ ID NO: 1633213 - RNA, 13 nt, Human
ccgggcugggagc

SEQ ID NO: 1633214 - RNA, 16 nt, Human
ccgugcuaaggacuug

SEQ ID NO: 1633215 - RNA, 15 nt, Human
ccgugcuaaggacuu

SEQ ID NO: 1633216 - RNA, 12 nt, Human
ccgcuuucuacc

SEQ ID NO: 1633217 - RNA, 22 nt, Human
ccgcucagcccucccugccccu

SEQ ID NO: 1633218 - RNA, 21 nt, Human
ccgcucagcccucccugcccc

SEQ ID NO: 1633219 - RNA, 19 nt, Human
ccgcucagcccucccugcc

SEQ ID NO: 1633220 - RNA, 15 nt, Human
ccgcucagcccuccc

SEQ ID NO: 1633221 - RNA, 18 nt, Human
ccggcuggccuggccccu

SEQ ID NO: 1633222 - RNA, 17 nt, Human
ccggcuggccuggcccc

SEQ ID NO: 1633223 - RNA, 23 nt, Human
ccgcuuucuacccagcgagcccu

SEQ ID NO: 1633224 - RNA, 19 nt, Human
ccgcuuucuacccagcgag

SEQ ID NO: 1633225 - RNA, 20 nt, Human
ccgggaagggggcugggaca

SEQ ID NO: 1633226 - RNA, 19 nt, Human
ccgcacugggcuuggggac

SEQ ID NO: 1633227 - RNA, 14 nt, Human
ccgcacugggcuug

SEQ ID NO: 1633228 - RNA, 23 nt, Human
ccgcuaagagggagggagggcuc

SEQ ID NO: 1633229 - RNA, 13 nt, Human
ccgcucagcccuc

SEQ ID NO: 1633230 - RNA, 12 nt, Human
ccgcucagcccu

SEQ ID NO: 1633231 - RNA, 11 nt, Human
ccgcucagccc

SEQ ID NO: 1633232 - RNA, 21 nt, Human
ccgcuaagagggagggagggc

SEQ ID NO: 1633233 - RNA, 17 nt, Human
ccgaguagcugggacua

SEQ ID NO: 1633234 - RNA, 17 nt, Human
ccgaggccuucucugaa

SEQ ID NO: 1633235 - RNA, 20 nt, Human
ccgaguagcugggacuacag

SEQ ID NO: 1633236 - RNA, 17 nt, Human
cccugguuuccugcccu

SEQ ID NO: 1633237 - RNA, 16 nt, Human
cccugguuuccugccc

SEQ ID NO: 1633238 - RNA, 20 nt, Human
cccugguggcagcucaccuc

SEQ ID NO: 1633239 - RNA, 14 nt, Human
ccgaggccuucucu

SEQ ID NO: 1633240 - RNA, 19 nt, Human
cccugguuuccugcccugg

SEQ ID NO: 1633241 - RNA, 18 nt, Human
cccugguuuccugcccug

SEQ ID NO: 1633242 - RNA, 15 nt, Human
ccuaaaauucagugg

SEQ ID NO: 1633243 - RNA, 16 nt, Human
ccuaaauauauuuuaa

SEQ ID NO: 1633244 - RNA, 18 nt, Human
ccuaaauauauuuuaaga

SEQ ID NO: 1633245 - RNA, 12 nt, Human
ccuaaauccauu

SEQ ID NO: 1633246 - RNA, 15 nt, Human
ccuacaagacacagu

SEQ ID NO: 1633247 - RNA, 18 nt, Human
ccuaaauccauuuggaaa

SEQ ID NO: 1633248 - RNA, 17 nt, Human
ccuaaauccauuuggaa

SEQ ID NO: 1633249 - RNA, 18 nt, Human
ccuauauuguuuucagug

SEQ ID NO: 1633250 - RNA, 22 nt, Human
ccuauauuguuuucaguguaca

SEQ ID NO: 1633251 - RNA, 23 nt, Human
ccuaguuccaccaucaagccacc

SEQ ID NO: 1633252 - RNA, 21 nt, Human
ccuaguuccaccaucaagcca

SEQ ID NO: 1633253 - RNA, 13 nt, Human
ccuaguuccacca

SEQ ID NO: 1633254 - RNA, 15 nt, Human
ccuacuuccugugac

SEQ ID NO: 1633255 - RNA, 13 nt, Human
ccuacuuccugug

SEQ ID NO: 1633256 - RNA, 23 nt, Human
ccuaccgagucucuucuccacug

SEQ ID NO: 1633257 - RNA, 22 nt, Human
ccuaccgagucucuucuccacu

SEQ ID NO: 1633258 - RNA, 13 nt, Human
ccuccaccucccu

SEQ ID NO: 1633259 - RNA, 14 nt, Human
ccuccaccucccug

SEQ ID NO: 1633260 - RNA, 15 nt, Human
ccuccaccucccugc

SEQ ID NO: 1633261 - RNA, 17 nt, Human
ccuccaccucccugcaa

SEQ ID NO: 1633262 - RNA, 22 nt, Human
ccuccaccucccugcaauaaaa

SEQ ID NO: 1633263 - RNA, 21 nt, Human
ccuccaggugcacaagcucca

SEQ ID NO: 1633264 - RNA, 19 nt, Human
ccuccaggugcacaagcuc

SEQ ID NO: 1633265 - RNA, 22 nt, Human
ccuccaggugcacaagcuccaa

SEQ ID NO: 1633266 - RNA, 18 nt, Human
ccuccaucuaaacugccc

SEQ ID NO: 1633267 - RNA, 16 nt, Human
ccucccaaagugcugg

SEQ ID NO: 1633268 - RNA, 15 nt, Human
ccucccaaagugcug

SEQ ID NO: 1633269 - RNA, 16 nt, Human
ccuccaugcugccucc

SEQ ID NO: 1633270 - RNA, 15 nt, Human
ccuccaugcugccuc

SEQ ID NO: 1633271 - RNA, 23 nt, Human
ccuccaugugggcuaguugggcu

SEQ ID NO: 1633272 - RNA, 14 nt, Human
ccuccaugcugccu

SEQ ID NO: 1633273 - RNA, 14 nt, Human
ccucaucaccaacg

SEQ ID NO: 1633274 - RNA, 13 nt, Human
ccucaucaccaac

SEQ ID NO: 1633275 - RNA, 22 nt, Human
ccucauaguaugguggcugggu

SEQ ID NO: 1633276 - RNA, 21 nt, Human
ccucauaguaugguggcuggg

SEQ ID NO: 1633277 - RNA, 13 nt, Human
ccucauacccacc

SEQ ID NO: 1633278 - RNA, 18 nt, Human
ccucauagcccucacccu

SEQ ID NO: 1633279 - RNA, 17 nt, Human
ccucauagcccucaccc

SEQ ID NO: 1633280 - RNA, 20 nt, Human
ccucauaguaugguggcugg

SEQ ID NO: 1633281 - RNA, 22 nt, Human
ccucauagcccucacccugggg

SEQ ID NO: 1633282 - RNA, 21 nt, Human
ccucauagcccucacccuggg

SEQ ID NO: 1633283 - RNA, 11 nt, Human
ccucagugcca

SEQ ID NO: 1633284 - RNA, 20 nt, Human
ccucagucuggcccuuccuu

SEQ ID NO: 1633285 - RNA, 19 nt, Human
ccuaugcagagguccacaa

SEQ ID NO: 1633286 - RNA, 20 nt, Human
ccucauccucauacccaccc

SEQ ID NO: 1633287 - RNA, 13 nt, Human
ccucauccucaua

SEQ ID NO: 1633288 - RNA, 21 nt, Human
ccucaucuccccaucauuggu

SEQ ID NO: 1633289 - RNA, 23 nt, Human
ccuccaaucccaccaacccucag

SEQ ID NO: 1633290 - RNA, 17 nt, Human
ccucccuccaccucccu

SEQ ID NO: 1633291 - RNA, 10 nt, Human
ccucccuccc

SEQ ID NO: 1633292 - RNA, 20 nt, Human
ccucccuccaccucccugca

SEQ ID NO: 1633293 - RNA, 21 nt, Human
ccucccugccccucccuucaa

SEQ ID NO: 1633294 - RNA, 18 nt, Human
ccucccugccccucccuu

SEQ ID NO: 1633295 - RNA, 14 nt, Human
ccuccucagaucuu

SEQ ID NO: 1633296 - RNA, 24 nt, Human
ccucccugccccucccuucaacca

SEQ ID NO: 1633297 - RNA, 22 nt, Human
ccucccugccccucccuucaac

SEQ ID NO: 1633298 - RNA, 21 nt, Human
ccucccgaguagcugggacua

SEQ ID NO: 1633299 - RNA, 20 nt, Human
ccucccgaguagcugggacu

SEQ ID NO: 1633300 - RNA, 16 nt, Human
ccuccucugcuugcca

SEQ ID NO: 1633301 - RNA, 13 nt, Human
ccuccucugcuug

SEQ ID NO: 1633302 - RNA, 18 nt, Human
ccuccucugcuugccauc

SEQ ID NO: 1633303 - RNA, 14 nt, Human
ccuccugggcuaag

SEQ ID NO: 1633304 - RNA, 13 nt, Human
ccuccugcugggc

SEQ ID NO: 1633305 - RNA, 23 nt, Human
ccuccugccucgaacuggcugca

SEQ ID NO: 1633306 - RNA, 18 nt, Human
ccucgguguggagaagcg

SEQ ID NO: 1633307 - RNA, 14 nt, Human
ccucgguguggaga

SEQ ID NO: 1633308 - RNA, 16 nt, Human
ccucggugccuuccuc

SEQ ID NO: 1633309 - RNA, 16 nt, Human
ccucuaggaggucucu

SEQ ID NO: 1633310 - RNA, 17 nt, Human
ccucccgaauagcuggg

SEQ ID NO: 1633311 - RNA, 15 nt, Human
cccgugggguuccuc

SEQ ID NO: 1633312 - RNA, 22 nt, Human
cccgucucugguuccuccccuc

SEQ ID NO: 1633313 - RNA, 18 nt, Human
cccggugcccaagaauag

SEQ ID NO: 1633314 - RNA, 16 nt, Human
cccgggcucugccucc

SEQ ID NO: 1633315 - RNA, 20 nt, Human
cccuacaguugaaaaacagc

SEQ ID NO: 1633316 - RNA, 23 nt, Human
cccuaaugcgcaggcuggcccug

SEQ ID NO: 1633317 - RNA, 17 nt, Human
cccuaaugcgcaggcug

SEQ ID NO: 1633318 - RNA, 22 nt, Human
cccuaaugcgcaggcuggcccu

SEQ ID NO: 1633319 - RNA, 21 nt, Human
cccuaaugcgcaggcuggccc

SEQ ID NO: 1633320 - RNA, 18 nt, Human
cccuaccgagucucuucu

SEQ ID NO: 1633321 - RNA, 21 nt, Human
cccuaccgagucucuucucca

SEQ ID NO: 1633322 - RNA, 22 nt, Human
cccgaguagcugggacuacagg

SEQ ID NO: 1633323 - RNA, 20 nt, Human
cccgcugucagccauuccug

SEQ ID NO: 1633324 - RNA, 19 nt, Human
cccgcugucagccauuccu

SEQ ID NO: 1633325 - RNA, 15 nt, Human
cccgggcucugccuc

SEQ ID NO: 1633326 - RNA, 14 nt, Human
cccgggcucugccu

SEQ ID NO: 1633327 - RNA, 12 nt, Human
cccgggcucugc

SEQ ID NO: 1633328 - RNA, 21 nt, Human
cccgaguagcugggacuacag

SEQ ID NO: 1633329 - RNA, 18 nt, Human
cccgaguagcugggacua

SEQ ID NO: 1633330 - RNA, 17 nt, Human
cccgaguagcugggacu

SEQ ID NO: 1633331 - RNA, 16 nt, Human
cccgaguagcugggac

SEQ ID NO: 1633332 - RNA, 15 nt, Human
cccgaguagcuggga

SEQ ID NO: 1633333 - RNA, 14 nt, Human
cccgaguagcuggg

SEQ ID NO: 1633334 - RNA, 13 nt, Human
cccgaguagcugg

SEQ ID NO: 1633335 - RNA, 18 nt, Human
cccagagggccugcaagg

SEQ ID NO: 1633336 - RNA, 15 nt, Human
cccagagggccugca

SEQ ID NO: 1633337 - RNA, 14 nt, Human
cccagagggccugc

SEQ ID NO: 1633338 - RNA, 14 nt, Human
cccucuccugggca

SEQ ID NO: 1633339 - RNA, 15 nt, Human
cccucuccugggcag

SEQ ID NO: 1633340 - RNA, 11 nt, Human
cccucuccugg

SEQ ID NO: 1633341 - RNA, 12 nt, Human
cccucuccuggg

SEQ ID NO: 1633342 - RNA, 13 nt, Human
cccucuccugggc

SEQ ID NO: 1633343 - RNA, 14 nt, Human
cccuccaccucccu

SEQ ID NO: 1633344 - RNA, 12 nt, Human
cccuccaccucc

SEQ ID NO: 1633345 - RNA, 22 nt, Human
cccuauccuacuuccccuuccu

SEQ ID NO: 1633346 - RNA, 19 nt, Human
cccuccaccucccugcaau

SEQ ID NO: 1633347 - RNA, 15 nt, Human
cccuccaccucccug

SEQ ID NO: 1633348 - RNA, 17 nt, Human
cccuccaccucccugca

SEQ ID NO: 1633349 - RNA, 23 nt, Human
cccugaggcccagagggccugca

SEQ ID NO: 1633350 - RNA, 20 nt, Human
cccugaggcccagagggccu

SEQ ID NO: 1633351 - RNA, 19 nt, Human
cccugaggcccagagggcc

SEQ ID NO: 1633352 - RNA, 18 nt, Human
cccugaggcccagagggc

SEQ ID NO: 1633353 - RNA, 17 nt, Human
cccugaggcccagaggg

SEQ ID NO: 1633354 - RNA, 16 nt, Human
cccugaggcccagagg

SEQ ID NO: 1633355 - RNA, 15 nt, Human
cccugaggcccagag

SEQ ID NO: 1633356 - RNA, 14 nt, Human
cccugaggcccaga

SEQ ID NO: 1633357 - RNA, 16 nt, Human
cccugaaagcccugag

SEQ ID NO: 1633358 - RNA, 13 nt, Human
cccugaggcccag

SEQ ID NO: 1633359 - RNA, 15 nt, Human
cccugaaagcccuga

SEQ ID NO: 1633360 - RNA, 16 nt, Human
cccucuggggcuguuc

SEQ ID NO: 1633361 - RNA, 12 nt, Human
cccugcacuugc

SEQ ID NO: 1633362 - RNA, 19 nt, Human
cccugcacuugcagacucu

SEQ ID NO: 1633363 - RNA, 22 nt, Human
cccugcacuugcagacucuaca

SEQ ID NO: 1633364 - RNA, 15 nt, Human
cccugcaaagcccag

SEQ ID NO: 1633365 - RNA, 23 nt, Human
cccugcacaaagcccuuccaugu

SEQ ID NO: 1633366 - RNA, 20 nt, Human
cccugcaaagcccagcuuga

SEQ ID NO: 1633367 - RNA, 19 nt, Human
cccugcaaagcccagcuug

SEQ ID NO: 1633368 - RNA, 17 nt, Human
cccugcaaagcccagcu

SEQ ID NO: 1633369 - RNA, 16 nt, Human
cccugcaaagcccagc

SEQ ID NO: 1633370 - RNA, 17 nt, Human
cccugguggcagcucac

SEQ ID NO: 1633371 - RNA, 16 nt, Human
cccugguggcagcuca

SEQ ID NO: 1633372 - RNA, 15 nt, Human
cccugguggcagcuc

SEQ ID NO: 1633373 - RNA, 15 nt, Human
cccugggaggcucug

SEQ ID NO: 1633374 - RNA, 15 nt, Human
cccuggacugugugc

SEQ ID NO: 1633375 - RNA, 21 nt, Human
cccuggacugugugcucagga

SEQ ID NO: 1633376 - RNA, 18 nt, Human
cccuggcuuuucacugcu

SEQ ID NO: 1633377 - RNA, 18 nt, Human
cccugggaggcagugaug

SEQ ID NO: 1633378 - RNA, 22 nt, Human
cccuggcuuuucacugcuggcu

SEQ ID NO: 1633379 - RNA, 19 nt, Human
cccuggcuuuucacugcug

SEQ ID NO: 1633380 - RNA, 22 nt, Human
cccugcuggguguggcgcagca

SEQ ID NO: 1633381 - RNA, 19 nt, Human
cccugcuuugggcugcccu

SEQ ID NO: 1633382 - RNA, 18 nt, Human
cccugcuuugggcugccc

SEQ ID NO: 1633383 - RNA, 17 nt, Human
cccugcuuugggcugcc

SEQ ID NO: 1633384 - RNA, 17 nt, Human
cccugcuuucagauacu

SEQ ID NO: 1633385 - RNA, 22 nt, Human
cccugcuuugggcugcccuggu

SEQ ID NO: 1633386 - RNA, 20 nt, Human
cccugcuuugggcugcccug

SEQ ID NO: 1633387 - RNA, 17 nt, Human
cccugcccaccuggccu

SEQ ID NO: 1633388 - RNA, 14 nt, Human
cccugcccaccugg

SEQ ID NO: 1633389 - RNA, 21 nt, Human
cccugcuggguguggcgcagc

SEQ ID NO: 1633390 - RNA, 16 nt, Human
cccugcuggguguggc

SEQ ID NO: 1633391 - RNA, 18 nt, Human
cccugcccaccuggccuc

SEQ ID NO: 1633392 - RNA, 13 nt, Human
cccacaagaaaug

SEQ ID NO: 1633393 - RNA, 23 nt, Human
cccaaugcacuuuguucuggcuc

SEQ ID NO: 1633394 - RNA, 20 nt, Human
cccaaugcacuuuguucugg

SEQ ID NO: 1633395 - RNA, 16 nt, Human
cccaaugcacuuuguu

SEQ ID NO: 1633396 - RNA, 20 nt, Human
cccacaagaaaugaaagcag

SEQ ID NO: 1633397 - RNA, 21 nt, Human
cccacgacugcccggcagggu

SEQ ID NO: 1633398 - RNA, 20 nt, Human
cccacgacugcccggcaggg

SEQ ID NO: 1633399 - RNA, 21 nt, Human
cccaccuggccucugcacucc

SEQ ID NO: 1633400 - RNA, 19 nt, Human
cccaccuggccucugcacu

SEQ ID NO: 1633401 - RNA, 17 nt, Human
cccaccuggccucugca

SEQ ID NO: 1633402 - RNA, 12 nt, Human
cccacuucugcc

SEQ ID NO: 1633403 - RNA, 23 nt, Human
cccacuugagaauuacccuuuug

SEQ ID NO: 1633404 - RNA, 21 nt, Human
cccacgcuggagugcagugag

SEQ ID NO: 1633405 - RNA, 20 nt, Human
cccacgcuggagugcaguga

SEQ ID NO: 1633406 - RNA, 19 nt, Human
cccacgcuggagugcagug

SEQ ID NO: 1633407 - RNA, 20 nt, Human
cccaccgcagacaggaccag

SEQ ID NO: 1633408 - RNA, 19 nt, Human
cccaccgcagacaggacca

SEQ ID NO: 1633409 - RNA, 18 nt, Human
cccaccaucaugucuggc

SEQ ID NO: 1633410 - RNA, 22 nt, Human
cccaccucucucacuccuugaa

SEQ ID NO: 1633411 - RNA, 23 nt, Human
cccaccgggcugggagcucugca

SEQ ID NO: 1633412 - RNA, 22 nt, Human
cugugaaaggaaagagggaggu

SEQ ID NO: 1633413 - RNA, 16 nt, Human
cugugaaaggaaagag

SEQ ID NO: 1633414 - RNA, 21 nt, Human
cugugauggggcccugccucc

SEQ ID NO: 1633415 - RNA, 16 nt, Human
cugugauggggcccug

SEQ ID NO: 1633416 - RNA, 23 nt, Human
cugugauggggcccugccuccuu

SEQ ID NO: 1633417 - RNA, 15 nt, Human
cugugauggggcccu

SEQ ID NO: 1633418 - RNA, 15 nt, Human
cugugccaugugcca

SEQ ID NO: 1633419 - RNA, 19 nt, Human
cugugcccuaaaguguauu

SEQ ID NO: 1633420 - RNA, 14 nt, Human
cugugccaugugcc

SEQ ID NO: 1633421 - RNA, 18 nt, Human
cugucuucacaacagauu

SEQ ID NO: 1633422 - RNA, 18 nt, Human
cugucuucaguaagccgu

SEQ ID NO: 1633423 - RNA, 15 nt, Human
cugugaaaggaaaga

SEQ ID NO: 1633424 - RNA, 21 nt, Human
cugucuuuuuucuaaaguaaa

SEQ ID NO: 1633425 - RNA, 23 nt, Human
cugucuugccuuuuucauuauuu

SEQ ID NO: 1633426 - RNA, 21 nt, Human
cugucuugccuuuuucauuau

SEQ ID NO: 1633427 - RNA, 22 nt, Human
cugucauuugagcagggcucag

SEQ ID NO: 1633428 - RNA, 21 nt, Human
cugucauuugagcagggcuca

SEQ ID NO: 1633429 - RNA, 19 nt, Human
cugucaauuacaggaagua

SEQ ID NO: 1633430 - RNA, 18 nt, Human
cugucaauuacaggaagu

SEQ ID NO: 1633431 - RNA, 23 nt, Human
cugucauuugagcagggcucagc

SEQ ID NO: 1633432 - RNA, 16 nt, Human
cuguuaaaagaugaaa

SEQ ID NO: 1633433 - RNA, 15 nt, Human
cuguuaaaagaugaa

SEQ ID NO: 1633434 - RNA, 19 nt, Human
cuguuaaaagaugaaaaua

SEQ ID NO: 1633435 - RNA, 18 nt, Human
cugugugugcgccuacag

SEQ ID NO: 1633436 - RNA, 20 nt, Human
cugugucuuuuuucacuaca

SEQ ID NO: 1633437 - RNA, 21 nt, Human
cugugucuuuaaaugcugcuu

SEQ ID NO: 1633438 - RNA, 20 nt, Human
cugugucuuuaaaugcugcu

SEQ ID NO: 1633439 - RNA, 19 nt, Human
cugugucuuuaaaugcugc

SEQ ID NO: 1633440 - RNA, 14 nt, Human
cugugugcucagga

SEQ ID NO: 1633441 - RNA, 22 nt, Human
cuguggguuucuaaagcugcca

SEQ ID NO: 1633442 - RNA, 12 nt, Human
cuguggugacuu

SEQ ID NO: 1633443 - RNA, 14 nt, Human
cuguggugacuuug

SEQ ID NO: 1633444 - RNA, 13 nt, Human
cuguggugacuuu

SEQ ID NO: 1633445 - RNA, 23 nt, Human
cuguggugacuuuggauaauaag

SEQ ID NO: 1633446 - RNA, 20 nt, Human
cuguggugacuuuggauaau

SEQ ID NO: 1633447 - RNA, 18 nt, Human
cuguggugacuuuggaua

SEQ ID NO: 1633448 - RNA, 17 nt, Human
cuguggugacuuuggau

SEQ ID NO: 1633449 - RNA, 15 nt, Human
cuguggugacuuugg

SEQ ID NO: 1633450 - RNA, 21 nt, Human
cuguggguuucuaaagcugcc

SEQ ID NO: 1633451 - RNA, 17 nt, Human
cugugccucugccuguc

SEQ ID NO: 1633452 - RNA, 16 nt, Human
cugugccucugccugu

SEQ ID NO: 1633453 - RNA, 15 nt, Human
cugugccucugccug

SEQ ID NO: 1633454 - RNA, 14 nt, Human
cugugccucugccu

SEQ ID NO: 1633455 - RNA, 13 nt, Human
cugugccucugcc

SEQ ID NO: 1633456 - RNA, 12 nt, Human
cugugccucugc

SEQ ID NO: 1633457 - RNA, 24 nt, Human
cuguggaucaaauccagccugcug

SEQ ID NO: 1633458 - RNA, 14 nt, Human
cuguggaucaaauc

SEQ ID NO: 1633459 - RNA, 21 nt, Human
cugggauuacaagcgugagcc

SEQ ID NO: 1633460 - RNA, 18 nt, Human
cugggauuacaggcguga

SEQ ID NO: 1633461 - RNA, 23 nt, Human
cugggccccugccucucugcagg

SEQ ID NO: 1633462 - RNA, 20 nt, Human
cugggccccugccucucugc

SEQ ID NO: 1633463 - RNA, 20 nt, Human
cuggguaacuagggaagaua

SEQ ID NO: 1633464 - RNA, 13 nt, Human
cugggucgcccug

SEQ ID NO: 1633465 - RNA, 23 nt, Human
cuggggguucuuucuuccucugc

SEQ ID NO: 1633466 - RNA, 20 nt, Human
cuggggguucuuucuuccuc

SEQ ID NO: 1633467 - RNA, 14 nt, Human
cugggguuaucuga

SEQ ID NO: 1633468 - RNA, 16 nt, Human
cugggucgcccuggac

SEQ ID NO: 1633469 - RNA, 15 nt, Human
cugggucgcccugga

SEQ ID NO: 1633470 - RNA, 18 nt, Human
cugggcuugucuguagau

SEQ ID NO: 1633471 - RNA, 22 nt, Human
cugggcuuggggaccagagcug

SEQ ID NO: 1633472 - RNA, 15 nt, Human
cugggcuucaguggc

SEQ ID NO: 1633473 - RNA, 17 nt, Human
cugggcuucaguggcag

SEQ ID NO: 1633474 - RNA, 14 nt, Human
cugggggcugggca

SEQ ID NO: 1633475 - RNA, 18 nt, Human
cugggggcugggcagagg

SEQ ID NO: 1633476 - RNA, 16 nt, Human
cugggggccucuucug

SEQ ID NO: 1633477 - RNA, 18 nt, Human
cuguacgucugacaggca

SEQ ID NO: 1633478 - RNA, 16 nt, Human
cuguacgucugacagg

SEQ ID NO: 1633479 - RNA, 15 nt, Human
cuguacgucugacag

SEQ ID NO: 1633480 - RNA, 14 nt, Human
cuguacgucugaca

SEQ ID NO: 1633481 - RNA, 17 nt, Human
cuguacaugaaaacaca

SEQ ID NO: 1633482 - RNA, 20 nt, Human
cuguacaugaaaacacauuu

SEQ ID NO: 1633483 - RNA, 21 nt, Human
cuguacaugaaaacacauuuu

SEQ ID NO: 1633484 - RNA, 20 nt, Human
cuguacgucugacaggcaau

SEQ ID NO: 1633485 - RNA, 19 nt, Human
cuguacgucugacaggcaa

SEQ ID NO: 1633486 - RNA, 14 nt, Human
cuguacuccuccca

SEQ ID NO: 1633487 - RNA, 21 nt, Human
cuguacuccucccaggcgccc

SEQ ID NO: 1633488 - RNA, 19 nt, Human
cuguacuccucccaggcgc

SEQ ID NO: 1633489 - RNA, 16 nt, Human
cuguacuccucccagg

SEQ ID NO: 1633490 - RNA, 15 nt, Human
cuguacuccucccag

SEQ ID NO: 1633491 - RNA, 16 nt, Human
cugucaauuacaggaa

SEQ ID NO: 1633492 - RNA, 15 nt, Human
cugucaauuacagga

SEQ ID NO: 1633493 - RNA, 20 nt, Human
cuguauuuuguuuuugucuu

SEQ ID NO: 1633494 - RNA, 20 nt, Human
cuguaucccaugagccucag

SEQ ID NO: 1633495 - RNA, 22 nt, Human
cuguaucccaugagccucagca

SEQ ID NO: 1633496 - RNA, 21 nt, Human
cuguaucccaugagccucagc

SEQ ID NO: 1633497 - RNA, 19 nt, Human
cuguauuagucacagagau

SEQ ID NO: 1633498 - RNA, 17 nt, Human
cuguauuagucacagag

SEQ ID NO: 1633499 - RNA, 21 nt, Human
cugguuagagguucccuuuga

SEQ ID NO: 1633500 - RNA, 22 nt, Human
cugguuagagguucccuuugac

SEQ ID NO: 1633501 - RNA, 19 nt, Human
cuguaauccuagcacuuug

SEQ ID NO: 1633502 - RNA, 22 nt, Human
cuguacagagcccacgccccca

SEQ ID NO: 1633503 - RNA, 18 nt, Human
cuguacagagcccacgcc

SEQ ID NO: 1633504 - RNA, 15 nt, Human
cuguacagagcccac

SEQ ID NO: 1633505 - RNA, 14 nt, Human
cuguacagagccca

SEQ ID NO: 1633506 - RNA, 14 nt, Human
cuguaauuugugau

SEQ ID NO: 1633507 - RNA, 15 nt, Human
cuguaauuugugaua

SEQ ID NO: 1633508 - RNA, 19 nt, Human
cugguggcagugggagcug

SEQ ID NO: 1633509 - RNA, 21 nt, Human
cugguggcagcucaccucucc

SEQ ID NO: 1633510 - RNA, 15 nt, Human
cugguguauguguga

SEQ ID NO: 1633511 - RNA, 18 nt, Human
cugguggcagugggagcu

SEQ ID NO: 1633512 - RNA, 14 nt, Human
cugguggcaguggg

SEQ ID NO: 1633513 - RNA, 15 nt, Human
cugguggcagcugcg

SEQ ID NO: 1633514 - RNA, 20 nt, Human
cugguggcagcucaccucuc

SEQ ID NO: 1633515 - RNA, 18 nt, Human
cugguggcagcucaccuc

SEQ ID NO: 1633516 - RNA, 17 nt, Human
cugguggcagcucaccu

SEQ ID NO: 1633517 - RNA, 15 nt, Human
cuguuuuauaauuuu

SEQ ID NO: 1633518 - RNA, 14 nt, Human
cuguuuuauaauuu

SEQ ID NO: 1633519 - RNA, 22 nt, Human
cuguuuuacaaaaaagaaaaga

SEQ ID NO: 1633520 - RNA, 13 nt, Human
cuguuuucucuug

SEQ ID NO: 1633521 - RNA, 17 nt, Human
cuuaaaaaguggaaaaa

SEQ ID NO: 1633522 - RNA, 16 nt, Human
cuuaaaaaguggaaaa

SEQ ID NO: 1633523 - RNA, 19 nt, Human
cuguuugcuaagugaggau

SEQ ID NO: 1633524 - RNA, 17 nt, Human
cuguuugcuaagugagg

SEQ ID NO: 1633525 - RNA, 18 nt, Human
cuguuuagauaauacacc

SEQ ID NO: 1633526 - RNA, 15 nt, Human
cuguuucaaacuuua

SEQ ID NO: 1633527 - RNA, 17 nt, Human
cuguuucaaacuuuacu

SEQ ID NO: 1633528 - RNA, 17 nt, Human
cuguuuagauaauacac

SEQ ID NO: 1633529 - RNA, 17 nt, Human
cuguugcccaggcuggc

SEQ ID NO: 1633530 - RNA, 18 nt, Human
cuguugcccaggcuggcg

SEQ ID NO: 1633531 - RNA, 15 nt, Human
cuguucuuuccaaag

SEQ ID NO: 1633532 - RNA, 16 nt, Human
cuguucuuuccaaagu

SEQ ID NO: 1633533 - RNA, 19 nt, Human
cuguucuuuccaaaguaca

SEQ ID NO: 1633534 - RNA, 21 nt, Human
cuguucuuuccaaaguacacu

SEQ ID NO: 1633535 - RNA, 13 nt, Human
cuguucuuucugg

SEQ ID NO: 1633536 - RNA, 14 nt, Human
cuguucuuucuggc

SEQ ID NO: 1633537 - RNA, 21 nt, Human
cuguucuuucuggcuaugcau

SEQ ID NO: 1633538 - RNA, 16 nt, Human
cuguuaauaguucagg

SEQ ID NO: 1633539 - RNA, 16 nt, Human
cuguugcccaggcugg

SEQ ID NO: 1633540 - RNA, 15 nt, Human
cuguugcccaggcug

SEQ ID NO: 1633541 - RNA, 14 nt, Human
cuguugcccaggcu

SEQ ID NO: 1633542 - RNA, 13 nt, Human
cuguugcccaggc

SEQ ID NO: 1633543 - RNA, 12 nt, Human
cuguugcccagg

SEQ ID NO: 1633544 - RNA, 23 nt, Human
cuguucuuucuggcuaugcauuu

SEQ ID NO: 1633545 - RNA, 17 nt, Human
cuuaauuaaaagaauau

SEQ ID NO: 1633546 - RNA, 16 nt, Human
cuuaauuaaaagaaua

SEQ ID NO: 1633547 - RNA, 20 nt, Human
cuuaauuaaaagaauauuuu

SEQ ID NO: 1633548 - RNA, 19 nt, Human
cuuaauuaaaagaauauuu

SEQ ID NO: 1633549 - RNA, 20 nt, Human
cuuaauucuuagcucauucu

SEQ ID NO: 1633550 - RNA, 12 nt, Human
cuuaaaaauggu

SEQ ID NO: 1633551 - RNA, 23 nt, Human
cuuaagaagacugcauuauauuu

SEQ ID NO: 1633552 - RNA, 18 nt, Human
cuuaagaauuuugagcag

SEQ ID NO: 1633553 - RNA, 17 nt, Human
cuuaaccagaucauugu

SEQ ID NO: 1633554 - RNA, 20 nt, Human
cuuagaagucacacaguauu

SEQ ID NO: 1633555 - RNA, 17 nt, Human
cuuagaagucacacagu

SEQ ID NO: 1633556 - RNA, 16 nt, Human
cuuagaaauugcauuu

SEQ ID NO: 1633557 - RNA, 20 nt, Human
cuuagaaaaaccaccaccau

SEQ ID NO: 1633558 - RNA, 13 nt, Human
cuuacuguacaug

SEQ ID NO: 1633559 - RNA, 20 nt, Human
cuuaccugccaggaagccag

SEQ ID NO: 1633560 - RNA, 23 nt, Human
cuuagguuggcaaaaaggcagga

SEQ ID NO: 1633561 - RNA, 14 nt, Human
cuuagucacugaga

SEQ ID NO: 1633562 - RNA, 11 nt, Human
cuuagacaguc

SEQ ID NO: 1633563 - RNA, 19 nt, Human
cuuagaauuaguggcacuu

SEQ ID NO: 1633564 - RNA, 18 nt, Human
cuuagaaguuuguuguga

SEQ ID NO: 1633565 - RNA, 20 nt, Human
cuucggccuccauccugagg

SEQ ID NO: 1633566 - RNA, 19 nt, Human
cuucgggaggucgaggcag

SEQ ID NO: 1633567 - RNA, 21 nt, Human
cuucucacugccaugccagcu

SEQ ID NO: 1633568 - RNA, 16 nt, Human
cuucucacugccaugc

SEQ ID NO: 1633569 - RNA, 17 nt, Human
cuucgcuccugugucuu

SEQ ID NO: 1633570 - RNA, 15 nt, Human
cuucgccaccugggu

SEQ ID NO: 1633571 - RNA, 21 nt, Human
cuucgauacaccgggccugga

SEQ ID NO: 1633572 - RNA, 14 nt, Human
cuucgccaccuggg

SEQ ID NO: 1633573 - RNA, 16 nt, Human
cuuccacaagagccca

SEQ ID NO: 1633574 - RNA, 15 nt, Human
cuucccccuccaauc

SEQ ID NO: 1633575 - RNA, 12 nt, Human
cuucccccucca

SEQ ID NO: 1633576 - RNA, 16 nt, Human
cuuccugugacuucag

SEQ ID NO: 1633577 - RNA, 13 nt, Human
cuuccugugacuu

SEQ ID NO: 1633578 - RNA, 14 nt, Human
cuucacaacagauu

SEQ ID NO: 1633579 - RNA, 12 nt, Human
cuucacaacaga

SEQ ID NO: 1633580 - RNA, 22 nt, Human
cuucaaggauccugagccagau

SEQ ID NO: 1633581 - RNA, 21 nt, Human
cuucaaggauccugagccaga

SEQ ID NO: 1633582 - RNA, 23 nt, Human
cuucaaggauccugagccagauu

SEQ ID NO: 1633583 - RNA, 14 nt, Human
cuucacauauugau

SEQ ID NO: 1633584 - RNA, 23 nt, Human
cuucacauauugauuuccguuaa

SEQ ID NO: 1633585 - RNA, 17 nt, Human
cuucagcaaaaauauuu

SEQ ID NO: 1633586 - RNA, 17 nt, Human
cuucaaauccuugaaga

SEQ ID NO: 1633587 - RNA, 21 nt, Human
cuuagucacugagacagcccg

SEQ ID NO: 1633588 - RNA, 22 nt, Human
cuuagucacugagacagcccgg

SEQ ID NO: 1633589 - RNA, 20 nt, Human
cuucaaggauccugagccag

SEQ ID NO: 1633590 - RNA, 19 nt, Human
cuucaaggauccugagcca

SEQ ID NO: 1633591 - RNA, 18 nt, Human
cuucaaggauccugagcc

SEQ ID NO: 1633592 - RNA, 17 nt, Human
cuucaaggauccugagc

SEQ ID NO: 1633593 - RNA, 17 nt, Human
cuucaacugaccagccu

SEQ ID NO: 1633594 - RNA, 23 nt, Human
cuucaacugaccagccuccaugc

SEQ ID NO: 1633595 - RNA, 20 nt, Human
cuucaacugaccagccucca

SEQ ID NO: 1633596 - RNA, 15 nt, Human
cuucagccugaaaga

SEQ ID NO: 1633597 - RNA, 20 nt, Human
cuucagccucccgaguagcu

SEQ ID NO: 1633598 - RNA, 16 nt, Human
cuucagccucccgagu

SEQ ID NO: 1633599 - RNA, 14 nt, Human
cuucagccucccga

SEQ ID NO: 1633600 - RNA, 23 nt, Human
cuucagcaaaaauauuuuaugau

SEQ ID NO: 1633601 - RNA, 20 nt, Human
cuucagcaaaaauauuuuau

SEQ ID NO: 1633602 - RNA, 16 nt, Human
cuucagcgguuuauau

SEQ ID NO: 1633603 - RNA, 19 nt, Human
cuucagcugacuuuucugu

SEQ ID NO: 1633604 - RNA, 15 nt, Human
cuucagcugacuuuu

SEQ ID NO: 1633605 - RNA, 14 nt, Human
cuucaguaagccgu

SEQ ID NO: 1633606 - RNA, 15 nt, Human
cuuccacaagagccc

SEQ ID NO: 1633607 - RNA, 14 nt, Human
cuuccacaagagcc

SEQ ID NO: 1633608 - RNA, 13 nt, Human
cuuccacaagagc

SEQ ID NO: 1633609 - RNA, 20 nt, Human
cuucauucaacccaccugcg

SEQ ID NO: 1633610 - RNA, 15 nt, Human
cuucaguaagccgug

SEQ ID NO: 1633611 - RNA, 14 nt, Human
cuucagugccaaaa

SEQ ID NO: 1633612 - RNA, 21 nt, Human
cuuguguguuuauugucaaag

SEQ ID NO: 1633613 - RNA, 18 nt, Human
cuuuaaagggauggcaag

SEQ ID NO: 1633614 - RNA, 20 nt, Human
cuuuaaagggauggcaagau

SEQ ID NO: 1633615 - RNA, 14 nt, Human
cuuguuuucuggga

SEQ ID NO: 1633616 - RNA, 21 nt, Human
cuuguuuuuuuuuuccacuua

SEQ ID NO: 1633617 - RNA, 17 nt, Human
cuuuaaaaaaaaaauug

SEQ ID NO: 1633618 - RNA, 20 nt, Human
cuuguuuuuuuuuuccacuu

SEQ ID NO: 1633619 - RNA, 19 nt, Human
cuuguuuuuuuuuuccacu

SEQ ID NO: 1633620 - RNA, 21 nt, Human
cuuuauuuucuauaauuuaaa

SEQ ID NO: 1633621 - RNA, 13 nt, Human
cuuuauaauucua

SEQ ID NO: 1633622 - RNA, 20 nt, Human
cuuuauucuggcagaggagg

SEQ ID NO: 1633623 - RNA, 13 nt, Human
cuuuccacagaag

SEQ ID NO: 1633624 - RNA, 22 nt, Human
cuuuccaaaugcccagcuuaaa

SEQ ID NO: 1633625 - RNA, 19 nt, Human
cuuuccaaaugcccagcuu

SEQ ID NO: 1633626 - RNA, 18 nt, Human
cuuuccaaaugcccagcu

SEQ ID NO: 1633627 - RNA, 21 nt, Human
cuugccaucccucccuccacc

SEQ ID NO: 1633628 - RNA, 15 nt, Human
cuugccacugccucu

SEQ ID NO: 1633629 - RNA, 14 nt, Human
cuugccacugccuc

SEQ ID NO: 1633630 - RNA, 21 nt, Human
cuucuccacccugcucuccga

SEQ ID NO: 1633631 - RNA, 18 nt, Human
cuucuccacccugcucuc

SEQ ID NO: 1633632 - RNA, 17 nt, Human
cuucuccacccugcucu

SEQ ID NO: 1633633 - RNA, 22 nt, Human
cuugccaucccucccuccaccu

SEQ ID NO: 1633634 - RNA, 14 nt, Human
cuugcucugcugac

SEQ ID NO: 1633635 - RNA, 13 nt, Human
cuuggaggaagga

SEQ ID NO: 1633636 - RNA, 14 nt, Human
cuuggaagcuccgc

SEQ ID NO: 1633637 - RNA, 13 nt, Human
cuuggaagcuccg

SEQ ID NO: 1633638 - RNA, 16 nt, Human
cuuggaaaugggagac

SEQ ID NO: 1633639 - RNA, 20 nt, Human
cuugcuucaaccccaugaga

SEQ ID NO: 1633640 - RNA, 17 nt, Human
cuugcucugcugacaga

SEQ ID NO: 1633641 - RNA, 16 nt, Human
cuugcucugcugacag

SEQ ID NO: 1633642 - RNA, 19 nt, Human
cuuguaaaggaauuuaaaa

SEQ ID NO: 1633643 - RNA, 22 nt, Human
cuuggggggcugaggugggagg

SEQ ID NO: 1633644 - RNA, 16 nt, Human
cuuggggggcugaggu

SEQ ID NO: 1633645 - RNA, 15 nt, Human
cuuggggggcugagg

SEQ ID NO: 1633646 - RNA, 22 nt, Human
cuuggggaccagagcugccacc

SEQ ID NO: 1633647 - RNA, 16 nt, Human
cuuggggaccagagcu

SEQ ID NO: 1633648 - RNA, 22 nt, Human
cuugggcuucauccuccucaga

SEQ ID NO: 1633649 - RNA, 21 nt, Human
cuuggggaccagagcugccac

SEQ ID NO: 1633650 - RNA, 20 nt, Human
cuuggggaccagagcugcca

SEQ ID NO: 1633651 - RNA, 14 nt, Human
cuugggccacugug

SEQ ID NO: 1633652 - RNA, 13 nt, Human
cuugggcuucauc

SEQ ID NO: 1633653 - RNA, 18 nt, Human
cuugggccacugugaaga

SEQ ID NO: 1633654 - RNA, 17 nt, Human
cuuggcugcagggaguc

SEQ ID NO: 1633655 - RNA, 16 nt, Human
cuuggcugcagggagu

SEQ ID NO: 1633656 - RNA, 12 nt, Human
cuuggagggcau

SEQ ID NO: 1633657 - RNA, 23 nt, Human
cuuggagggcaugaagacagaua

SEQ ID NO: 1633658 - RNA, 22 nt, Human
cuuggaggaaggaaacccagcu

SEQ ID NO: 1633659 - RNA, 14 nt, Human
gaaaaucagccugc

SEQ ID NO: 1633660 - RNA, 12 nt, Human
gaaaauaucacu

SEQ ID NO: 1633661 - RNA, 19 nt, Human
gaaaaucuuauaauuuaaa

SEQ ID NO: 1633662 - RNA, 18 nt, Human
gaaaaucagccugcucca

SEQ ID NO: 1633663 - RNA, 16 nt, Human
gaaaaucagccugcuc

SEQ ID NO: 1633664 - RNA, 19 nt, Human
gaaaauaacgauaaaagac

SEQ ID NO: 1633665 - RNA, 17 nt, Human
gaaaagcugcugacagu

SEQ ID NO: 1633666 - RNA, 13 nt, Human
gaaaagcugcuga

SEQ ID NO: 1633667 - RNA, 19 nt, Human
gaaaagcugcugacagugu

SEQ ID NO: 1633668 - RNA, 20 nt, Human
gaaaaucuuauaauuuaaaa

SEQ ID NO: 1633669 - RNA, 22 nt, Human
gaaacacugggcuucuagaacc

SEQ ID NO: 1633670 - RNA, 18 nt, Human
gaaacagcuaaugggaca

SEQ ID NO: 1633671 - RNA, 20 nt, Human
gaaacagcucgacuuuaaaa

SEQ ID NO: 1633672 - RNA, 15 nt, Human
gaaacagcucgacuu

SEQ ID NO: 1633673 - RNA, 17 nt, Human
gaaacagccugugucuu

SEQ ID NO: 1633674 - RNA, 16 nt, Human
gaaacagccugugucu

SEQ ID NO: 1633675 - RNA, 16 nt, Human
gaaacacuuugcauaa

SEQ ID NO: 1633676 - RNA, 22 nt, Human
gaaaacaauaacgauaaaagac

SEQ ID NO: 1633677 - RNA, 13 nt, Human
gaaaacacauuuu

SEQ ID NO: 1633678 - RNA, 14 nt, Human
gaaaacacauuuuu

SEQ ID NO: 1633679 - RNA, 12 nt, Human
gaaaacaugcua

SEQ ID NO: 1633680 - RNA, 14 nt, Human
gaaaacaugcuaca

SEQ ID NO: 1633681 - RNA, 15 nt, Human
gaaaacaugcuacac

SEQ ID NO: 1633682 - RNA, 16 nt, Human
gaaaacaugcuacaca

SEQ ID NO: 1633683 - RNA, 19 nt, Human
gaaaaccaagccguggcuu

SEQ ID NO: 1633684 - RNA, 18 nt, Human
gaaaaccaagccguggcu

SEQ ID NO: 1633685 - RNA, 21 nt, Human
gaaaaccaagccguggcuucc

SEQ ID NO: 1633686 - RNA, 16 nt, Human
gaaaacguggcugcuu

SEQ ID NO: 1633687 - RNA, 15 nt, Human
gaaaacguggcugcu

SEQ ID NO: 1633688 - RNA, 18 nt, Human
gaaaacguggcugcuuca

SEQ ID NO: 1633689 - RNA, 19 nt, Human
gaaaacguggcugcuucaa

SEQ ID NO: 1633690 - RNA, 16 nt, Human
cuuuuuuggcugcuga

SEQ ID NO: 1633691 - RNA, 23 nt, Human
gaaaaaggaugcacagaguuguu

SEQ ID NO: 1633692 - RNA, 17 nt, Human
gaaaaaggaugcacaga

SEQ ID NO: 1633693 - RNA, 15 nt, Human
cuuuuuuggcugcug

SEQ ID NO: 1633694 - RNA, 14 nt, Human
cuuuuuuggcugcu

SEQ ID NO: 1633695 - RNA, 22 nt, Human
cuuuuuucucugauacagaaaa

SEQ ID NO: 1633696 - RNA, 21 nt, Human
cuuuugagugccuuacacaau

SEQ ID NO: 1633697 - RNA, 16 nt, Human
cuuuugagcauuuaga

SEQ ID NO: 1633698 - RNA, 20 nt, Human
cuuuuuucucugauacagaa

SEQ ID NO: 1633699 - RNA, 14 nt, Human
cuuuuuucuaaagu

SEQ ID NO: 1633700 - RNA, 15 nt, Human
cuuuguucuggcucu

SEQ ID NO: 1633701 - RNA, 14 nt, Human
cuuuguucuggcuc

SEQ ID NO: 1633702 - RNA, 17 nt, Human
cuuugugauuuuuguaa

SEQ ID NO: 1633703 - RNA, 18 nt, Human
cuuugugauuuuuguaau

SEQ ID NO: 1633704 - RNA, 19 nt, Human
cuuugugauuuuuguaauu

SEQ ID NO: 1633705 - RNA, 18 nt, Human
cuuuguccccaccgcaga

SEQ ID NO: 1633706 - RNA, 13 nt, Human
cuuugggaggcca

SEQ ID NO: 1633707 - RNA, 22 nt, Human
cuuuguccccaccgcagacagg

SEQ ID NO: 1633708 - RNA, 23 nt, Human
cuuugggaggccaaggugggagg

SEQ ID NO: 1633709 - RNA, 14 nt, Human
cuuugugauuuuug

SEQ ID NO: 1633710 - RNA, 16 nt, Human
cuuucccaucuuccaa

SEQ ID NO: 1633711 - RNA, 16 nt, Human
cuuuggacccugaggc

SEQ ID NO: 1633712 - RNA, 15 nt, Human
cuuuggacccugagg

SEQ ID NO: 1633713 - RNA, 18 nt, Human
cuuuggacccugaggccc

SEQ ID NO: 1633714 - RNA, 17 nt, Human
cuuuggacccugaggcc

SEQ ID NO: 1633715 - RNA, 19 nt, Human
cuuuggacccugaggccca

SEQ ID NO: 1633716 - RNA, 23 nt, Human
cuuuucuugcaugaggcuagugu

SEQ ID NO: 1633717 - RNA, 18 nt, Human
cuuuucuugcaugaggcu

SEQ ID NO: 1633718 - RNA, 16 nt, Human
cuuuucuuucagccaa

SEQ ID NO: 1633719 - RNA, 23 nt, Human
cuuuucuguccgagcuuugaaaa

SEQ ID NO: 1633720 - RNA, 18 nt, Human
cuuuucuguccgagcuuu

SEQ ID NO: 1633721 - RNA, 14 nt, Human
cuuuucugauagag

SEQ ID NO: 1633722 - RNA, 11 nt, Human
cuuuucugaua

SEQ ID NO: 1633723 - RNA, 20 nt, Human
cuuuucauaaccuagccuua

SEQ ID NO: 1633724 - RNA, 17 nt, Human
cuuuucacugcuggcug

SEQ ID NO: 1633725 - RNA, 20 nt, Human
cuuuucacugcuggcugccu

SEQ ID NO: 1633726 - RNA, 18 nt, Human
cuuuucacugcuggcugc

SEQ ID NO: 1633727 - RNA, 22 nt, Human
cuuuucauaaccuagccuuaga

SEQ ID NO: 1633728 - RNA, 20 nt, Human
cuuuguuuguugucagcuga

SEQ ID NO: 1633729 - RNA, 18 nt, Human
cuuuguuuguugucagcu

SEQ ID NO: 1633730 - RNA, 20 nt, Human
cuuuuacguccaucucuugu

SEQ ID NO: 1633731 - RNA, 18 nt, Human
gaaggaaacccagcucug

SEQ ID NO: 1633732 - RNA, 17 nt, Human
gaaggaaacccagcucu

SEQ ID NO: 1633733 - RNA, 14 nt, Human
gaaggaaacccagc

SEQ ID NO: 1633734 - RNA, 12 nt, Human
gaaggauacaaa

SEQ ID NO: 1633735 - RNA, 19 nt, Human
gaaggauacaaaagcaugu

SEQ ID NO: 1633736 - RNA, 21 nt, Human
gaaggauacaaaagcauguga

SEQ ID NO: 1633737 - RNA, 15 nt, Human
gaaggccccgcccag

SEQ ID NO: 1633738 - RNA, 14 nt, Human
gaaggccccgccca

SEQ ID NO: 1633739 - RNA, 16 nt, Human
gaaggccccgcccagg

SEQ ID NO: 1633740 - RNA, 17 nt, Human
gaaggccccgcccaggc

SEQ ID NO: 1633741 - RNA, 14 nt, Human
gaaggcagggaggg

SEQ ID NO: 1633742 - RNA, 13 nt, Human
gaaggcagggagg

SEQ ID NO: 1633743 - RNA, 21 nt, Human
gaagccuuggggcugaugcag

SEQ ID NO: 1633744 - RNA, 14 nt, Human
gaagcggcuggcag

SEQ ID NO: 1633745 - RNA, 11 nt, Human
gaagccuuugu

SEQ ID NO: 1633746 - RNA, 10 nt, Human
gaagccuuug

SEQ ID NO: 1633747 - RNA, 18 nt, Human
gaagcuuuuaugugaaac

SEQ ID NO: 1633748 - RNA, 22 nt, Human
gaagcccaggaaaggcuccagg

SEQ ID NO: 1633749 - RNA, 21 nt, Human
gaagcccaggaaaggcuccag

SEQ ID NO: 1633750 - RNA, 20 nt, Human
gaagcccaggaaaggcucca

SEQ ID NO: 1633751 - RNA, 23 nt, Human
gaagcccaggaaaggcuccagga

SEQ ID NO: 1633752 - RNA, 17 nt, Human
gaagacugcauuauauu

SEQ ID NO: 1633753 - RNA, 14 nt, Human
gaagaagcucucuc

SEQ ID NO: 1633754 - RNA, 21 nt, Human
gaagacucauucuucuguacg

SEQ ID NO: 1633755 - RNA, 19 nt, Human
gaagacucauucuucugua

SEQ ID NO: 1633756 - RNA, 16 nt, Human
gaagccagcaggcucu

SEQ ID NO: 1633757 - RNA, 15 nt, Human
gaagccagcaggcuc

SEQ ID NO: 1633758 - RNA, 22 nt, Human
gaagccacgguguucugugaua

SEQ ID NO: 1633759 - RNA, 23 nt, Human
gaagccagcaggcucucaggcca

SEQ ID NO: 1633760 - RNA, 19 nt, Human
gaagccagcaggcucucag

SEQ ID NO: 1633761 - RNA, 12 nt, Human
gaaguuucugcc

SEQ ID NO: 1633762 - RNA, 20 nt, Human
gaaguuucugccgcagcccu

SEQ ID NO: 1633763 - RNA, 12 nt, Human
gaauaaaauuuu

SEQ ID NO: 1633764 - RNA, 14 nt, Human
gaauaaagacaccu

SEQ ID NO: 1633765 - RNA, 20 nt, Human
gaauaauccuaaacauauga

SEQ ID NO: 1633766 - RNA, 14 nt, Human
gaauaacauguaau

SEQ ID NO: 1633767 - RNA, 15 nt, Human
gaauaaauugcuccu

SEQ ID NO: 1633768 - RNA, 14 nt, Human
gaauacuuuauaaa

SEQ ID NO: 1633769 - RNA, 16 nt, Human
gaaucucaaauaacua

SEQ ID NO: 1633770 - RNA, 21 nt, Human
gaaugaaagggcccagagagg

SEQ ID NO: 1633771 - RNA, 19 nt, Human
gaaugaaagggcccagaga

SEQ ID NO: 1633772 - RNA, 14 nt, Human
gaaugaaagggccc

SEQ ID NO: 1633773 - RNA, 14 nt, Human
gaauagcugggacu

SEQ ID NO: 1633774 - RNA, 15 nt, Human
gaauagaugcugacu

SEQ ID NO: 1633775 - RNA, 15 nt, Human
gaauagcugggacua

SEQ ID NO: 1633776 - RNA, 18 nt, Human
gaauccagacccggcugc

SEQ ID NO: 1633777 - RNA, 22 nt, Human
gaacuagaguuuagcuggaaaa

SEQ ID NO: 1633778 - RNA, 21 nt, Human
gaacuagaguuuagcuggaaa

SEQ ID NO: 1633779 - RNA, 16 nt, Human
gaacgcguugaaauug

SEQ ID NO: 1633780 - RNA, 11 nt, Human
gaaccugaccc

SEQ ID NO: 1633781 - RNA, 12 nt, Human
gaaccugacccc

SEQ ID NO: 1633782 - RNA, 17 nt, Human
gaaccaccacacccagc

SEQ ID NO: 1633783 - RNA, 16 nt, Human
gaaccaccacacccag

SEQ ID NO: 1633784 - RNA, 21 nt, Human
gaaccacaucuugcucugcug

SEQ ID NO: 1633785 - RNA, 19 nt, Human
gaacagacuggaagcacag

SEQ ID NO: 1633786 - RNA, 16 nt, Human
gaacagacuggaagca

SEQ ID NO: 1633787 - RNA, 15 nt, Human
gaacagacuggaagc

SEQ ID NO: 1633788 - RNA, 22 nt, Human
gaacuuccagauccuggaaauc

SEQ ID NO: 1633789 - RNA, 14 nt, Human
gaacucccuuucaa

SEQ ID NO: 1633790 - RNA, 15 nt, Human
gaacucccuuucaac

SEQ ID NO: 1633791 - RNA, 22 nt, Human
gaacuggguacuuguggacaca

SEQ ID NO: 1633792 - RNA, 21 nt, Human
gaacuuguaaaggaauuuaaa

SEQ ID NO: 1633793 - RNA, 23 nt, Human
gaacuugguucccauuugcuccu

SEQ ID NO: 1633794 - RNA, 17 nt, Human
gaacuuggcgcugcccc

SEQ ID NO: 1633795 - RNA, 16 nt, Human
gaacuuggcgcugccc

SEQ ID NO: 1633796 - RNA, 15 nt, Human
gaacuuggcgcugcc

SEQ ID NO: 1633797 - RNA, 13 nt, Human
gaacuuggcgcug

SEQ ID NO: 1633798 - RNA, 21 nt, Human
gaagaagcaccaaucaugaau

SEQ ID NO: 1633799 - RNA, 11 nt, Human
gaaacauuugg

SEQ ID NO: 1633800 - RNA, 20 nt, Human
gaaacaugacucguauaugu

SEQ ID NO: 1633801 - RNA, 20 nt, Human
gaaacagccugugucuuuaa

SEQ ID NO: 1633802 - RNA, 13 nt, Human
gaaauauaauuga

SEQ ID NO: 1633803 - RNA, 17 nt, Human
gaaauauaggaacuuaa

SEQ ID NO: 1633804 - RNA, 21 nt, Human
gaaauaucugaaaauguaugu

SEQ ID NO: 1633805 - RNA, 22 nt, Human
gaaauguaagggaaacugccag

SEQ ID NO: 1633806 - RNA, 16 nt, Human
gaaauauuauguuaaa

SEQ ID NO: 1633807 - RNA, 13 nt, Human
gaaauauuauguu

SEQ ID NO: 1633808 - RNA, 20 nt, Human
gaaaugggcagagcagagac

SEQ ID NO: 1633809 - RNA, 14 nt, Human
gaaaugggcagagc

SEQ ID NO: 1633810 - RNA, 17 nt, Human
gaaauuuguuauaauga

SEQ ID NO: 1633811 - RNA, 19 nt, Human
gaaauugcauuuccugaca

SEQ ID NO: 1633812 - RNA, 17 nt, Human
gaaauuguaauuauauc

SEQ ID NO: 1633813 - RNA, 22 nt, Human
cugcaauaaaauggguuuuacu

SEQ ID NO: 1633814 - RNA, 18 nt, Human
cugcaauaaggggagagu

SEQ ID NO: 1633815 - RNA, 15 nt, Human
cugcaauaaaauggg

SEQ ID NO: 1633816 - RNA, 17 nt, Human
cugcaaagcccagcuug

SEQ ID NO: 1633817 - RNA, 22 nt, Human
cugcacaagcugcacccucagg

SEQ ID NO: 1633818 - RNA, 13 nt, Human
cugcacacagcac

SEQ ID NO: 1633819 - RNA, 22 nt, Human
cugcacacgcuccuuccucuga

SEQ ID NO: 1633820 - RNA, 20 nt, Human
cugcacacgcuccuuccucu

SEQ ID NO: 1633821 - RNA, 14 nt, Human
cugcacacagcacg

SEQ ID NO: 1633822 - RNA, 15 nt, Human
cugcacuccccugcu

SEQ ID NO: 1633823 - RNA, 12 nt, Human
cugcaccgggcc

SEQ ID NO: 1633824 - RNA, 23 nt, Human
cugcaccggcuggccuggccccu

SEQ ID NO: 1633825 - RNA, 22 nt, Human
cugcaccggcuggccuggcccc

SEQ ID NO: 1633826 - RNA, 16 nt, Human
cugcacccucaggcag

SEQ ID NO: 1633827 - RNA, 14 nt, Human
cugcacccucaggc

SEQ ID NO: 1633828 - RNA, 13 nt, Human
cugcacccucagg

SEQ ID NO: 1633829 - RNA, 18 nt, Human
cugcacuccccugcuggg

SEQ ID NO: 1633830 - RNA, 17 nt, Human
cugcacuccccugcugg

SEQ ID NO: 1633831 - RNA, 16 nt, Human
cugcacuccccugcug

SEQ ID NO: 1633832 - RNA, 18 nt, Human
cugcacuugcagacucua

SEQ ID NO: 1633833 - RNA, 21 nt, Human
cugauggugcaaugaccuuuc

SEQ ID NO: 1633834 - RNA, 20 nt, Human
cugauggugcaaugaccuuu

SEQ ID NO: 1633835 - RNA, 19 nt, Human
cugauggugcaaugaccuu

SEQ ID NO: 1633836 - RNA, 17 nt, Human
cugauggugcaaugacc

SEQ ID NO: 1633837 - RNA, 17 nt, Human
cugauugugucucuugg

SEQ ID NO: 1633838 - RNA, 21 nt, Human
cugauugugucucuugguccu

SEQ ID NO: 1633839 - RNA, 21 nt, Human
cugauuugacauagucuggcu

SEQ ID NO: 1633840 - RNA, 23 nt, Human
cugauuugacauagucuggcugu

SEQ ID NO: 1633841 - RNA, 22 nt, Human
cugauuugacauagucuggcug

SEQ ID NO: 1633842 - RNA, 22 nt, Human
cugauuuuuuuuuccuucagug

SEQ ID NO: 1633843 - RNA, 21 nt, Human
cugauuuuuuuuuccuucagu

SEQ ID NO: 1633844 - RNA, 23 nt, Human
cugauuuuuuuuuccuucagugc

SEQ ID NO: 1633845 - RNA, 15 nt, Human
cugcaaagcccagcu

SEQ ID NO: 1633846 - RNA, 13 nt, Human
cugcaaagcccag

SEQ ID NO: 1633847 - RNA, 20 nt, Human
cugauuuuuuuuuccuucag

SEQ ID NO: 1633848 - RNA, 19 nt, Human
cugauuuuuuuuuccuuca

SEQ ID NO: 1633849 - RNA, 18 nt, Human
cugauuuuuuuuuccuuc

SEQ ID NO: 1633850 - RNA, 16 nt, Human
cugauuuuuuuuuccu

SEQ ID NO: 1633851 - RNA, 21 nt, Human
cugaggcuccacuuggucugu

SEQ ID NO: 1633852 - RNA, 15 nt, Human
cugaggcuccacuug

SEQ ID NO: 1633853 - RNA, 24 nt, Human
cugaggcccuucucuccagccccu

SEQ ID NO: 1633854 - RNA, 22 nt, Human
cugaggcugggcucccuuccca

SEQ ID NO: 1633855 - RNA, 17 nt, Human
cugaggcugggcucccu

SEQ ID NO: 1633856 - RNA, 16 nt, Human
cugaggcugggcuccc

SEQ ID NO: 1633857 - RNA, 15 nt, Human
cugaggcugggcucc

SEQ ID NO: 1633858 - RNA, 13 nt, Human
cugaggcugggcu

SEQ ID NO: 1633859 - RNA, 18 nt, Human
cugaguuugugcuggugu

SEQ ID NO: 1633860 - RNA, 13 nt, Human
cugaguuugugcu

SEQ ID NO: 1633861 - RNA, 19 nt, Human
cugagucugaaggcugggu

SEQ ID NO: 1633862 - RNA, 18 nt, Human
cugagucugaaggcuggg

SEQ ID NO: 1633863 - RNA, 20 nt, Human
cugagucccaggcugagccu

SEQ ID NO: 1633864 - RNA, 16 nt, Human
cugauggugcaaugac

SEQ ID NO: 1633865 - RNA, 15 nt, Human
cugauggugcaauga

SEQ ID NO: 1633866 - RNA, 14 nt, Human
cugauggugcaaug

SEQ ID NO: 1633867 - RNA, 21 nt, Human
cugauccuaguuccaccauca

SEQ ID NO: 1633868 - RNA, 20 nt, Human
cugauccuaguuccaccauc

SEQ ID NO: 1633869 - RNA, 22 nt, Human
cugauacagaaaaguugaauuu

SEQ ID NO: 1633870 - RNA, 15 nt, Human
cugaucaccugcccu

SEQ ID NO: 1633871 - RNA, 18 nt, Human
cugcgguccacccaggag

SEQ ID NO: 1633872 - RNA, 20 nt, Human
cugcgguccacccaggagcc

SEQ ID NO: 1633873 - RNA, 19 nt, Human
cugcgguccacccaggagc

SEQ ID NO: 1633874 - RNA, 22 nt, Human
cugccugcccaggccccugcca

SEQ ID NO: 1633875 - RNA, 21 nt, Human
cugccugcccaggccccugcc

SEQ ID NO: 1633876 - RNA, 21 nt, Human
cugccucugacacacagcucu

SEQ ID NO: 1633877 - RNA, 18 nt, Human
cugccucugacacacagc

SEQ ID NO: 1633878 - RNA, 17 nt, Human
cugccucugacacacag

SEQ ID NO: 1633879 - RNA, 19 nt, Human
cugccucucugcagguccc

SEQ ID NO: 1633880 - RNA, 22 nt, Human
cugccgcagcccugcagagggc

SEQ ID NO: 1633881 - RNA, 21 nt, Human
cugccgcagcccugcagaggg

SEQ ID NO: 1633882 - RNA, 20 nt, Human
cugccgcagcccugcagagg

SEQ ID NO: 1633883 - RNA, 19 nt, Human
cugccgcagcccugcagag

SEQ ID NO: 1633884 - RNA, 14 nt, Human
cugccgcagcccug

SEQ ID NO: 1633885 - RNA, 23 nt, Human
cugccgcagcccugcagagggca

SEQ ID NO: 1633886 - RNA, 13 nt, Human
cugccgcagcccu

SEQ ID NO: 1633887 - RNA, 12 nt, Human
cugccgcagccc

SEQ ID NO: 1633888 - RNA, 21 nt, Human
cugccccuccucucugcccua

SEQ ID NO: 1633889 - RNA, 19 nt, Human
cugccucagccucccaaag

SEQ ID NO: 1633890 - RNA, 17 nt, Human
cugccucagccucccga

SEQ ID NO: 1633891 - RNA, 15 nt, Human
cugccucagccuccc

SEQ ID NO: 1633892 - RNA, 13 nt, Human
cugccuauuuuaa

SEQ ID NO: 1633893 - RNA, 22 nt, Human
cugccuccagaauggucuuucu

SEQ ID NO: 1633894 - RNA, 14 nt, Human
cugccuccagaaug

SEQ ID NO: 1633895 - RNA, 18 nt, Human
cugccucucugcaggucc

SEQ ID NO: 1633896 - RNA, 17 nt, Human
cugccucucugcagguc

SEQ ID NO: 1633897 - RNA, 16 nt, Human
cugccucucugcaggu

SEQ ID NO: 1633898 - RNA, 15 nt, Human
cugccucucugcagg

SEQ ID NO: 1633899 - RNA, 19 nt, Human
cugcaguugccagucaccc

SEQ ID NO: 1633900 - RNA, 23 nt, Human
cugcacuugcagacucuacagag

SEQ ID NO: 1633901 - RNA, 22 nt, Human
cugcaguugccagucaccccgg

SEQ ID NO: 1633902 - RNA, 21 nt, Human
cugcaguugccagucaccccg

SEQ ID NO: 1633903 - RNA, 22 nt, Human
cugcaucguuucaucuuccaac

SEQ ID NO: 1633904 - RNA, 16 nt, Human
cugcaucguuucaucu

SEQ ID NO: 1633905 - RNA, 20 nt, Human
cugcauccuccgccucccgg

SEQ ID NO: 1633906 - RNA, 19 nt, Human
cugcauccuccgccucccg

SEQ ID NO: 1633907 - RNA, 22 nt, Human
cugcaugcgggcuuccuccugg

SEQ ID NO: 1633908 - RNA, 18 nt, Human
cugcaugcgggcuuccuc

SEQ ID NO: 1633909 - RNA, 19 nt, Human
cugccaaugggagcucaug

SEQ ID NO: 1633910 - RNA, 18 nt, Human
cugccaaugggagcucau

SEQ ID NO: 1633911 - RNA, 16 nt, Human
cugcccacucccugca

SEQ ID NO: 1633912 - RNA, 15 nt, Human
cugcccacucccugc

SEQ ID NO: 1633913 - RNA, 14 nt, Human
cugcccacucccug

SEQ ID NO: 1633914 - RNA, 22 nt, Human
cugcccaccuggccucugcacu

SEQ ID NO: 1633915 - RNA, 20 nt, Human
cugcccaccuggccucugca

SEQ ID NO: 1633916 - RNA, 19 nt, Human
cugcccaccuggccucugc

SEQ ID NO: 1633917 - RNA, 18 nt, Human
cugcccaccuggccucug

SEQ ID NO: 1633918 - RNA, 17 nt, Human
cugcccaccuggccucu

SEQ ID NO: 1633919 - RNA, 18 nt, Human
cugcccacucccugcaac

SEQ ID NO: 1633920 - RNA, 17 nt, Human
cugcccagccuccaagc

SEQ ID NO: 1633921 - RNA, 15 nt, Human
cugcccaccuggccu

SEQ ID NO: 1633922 - RNA, 14 nt, Human
cugcccaccuggcc

SEQ ID NO: 1633923 - RNA, 15 nt, Human
cugccaugccagcuu

SEQ ID NO: 1633924 - RNA, 14 nt, Human
cugccaugccagcu

SEQ ID NO: 1633925 - RNA, 21 nt, Human
cugccaucucaccuccugcug

SEQ ID NO: 1633926 - RNA, 23 nt, Human
cugccaucucaccuccugcuggg

SEQ ID NO: 1633927 - RNA, 13 nt, Human
cugccaggcaugg

SEQ ID NO: 1633928 - RNA, 11 nt, Human
cugccaggcau

SEQ ID NO: 1633929 - RNA, 14 nt, Human
cugaagaagauggu

SEQ ID NO: 1633930 - RNA, 17 nt, Human
cugaagucacacaguga

SEQ ID NO: 1633931 - RNA, 19 nt, Human
cugaagucacacagugagu

SEQ ID NO: 1633932 - RNA, 18 nt, Human
cugaagucacacagugag

SEQ ID NO: 1633933 - RNA, 21 nt, Human
cugaagucacacagugagucg

SEQ ID NO: 1633934 - RNA, 15 nt, Human
cugaagucacugcac

SEQ ID NO: 1633935 - RNA, 14 nt, Human
cugaagucacugca

SEQ ID NO: 1633936 - RNA, 13 nt, Human
cugaagucacugc

SEQ ID NO: 1633937 - RNA, 20 nt, Human
cugaagucuuuguacagaca

SEQ ID NO: 1633938 - RNA, 17 nt, Human
cugaagucuuuguacag

SEQ ID NO: 1633939 - RNA, 22 nt, Human
cugaagucccagauacuugggg

SEQ ID NO: 1633940 - RNA, 17 nt, Human
cugaaguucagcugcau

SEQ ID NO: 1633941 - RNA, 20 nt, Human
cugaaugguuuucaaaauaa

SEQ ID NO: 1633942 - RNA, 19 nt, Human
cugaaugguuuucaaaaua

SEQ ID NO: 1633943 - RNA, 12 nt, Human
cugaauuucuuu

SEQ ID NO: 1633944 - RNA, 12 nt, Human
cugaauuauuuu

SEQ ID NO: 1633945 - RNA, 15 nt, Human
cugaauuaugaaacu

SEQ ID NO: 1633946 - RNA, 14 nt, Human
cugaauuaugaaac

SEQ ID NO: 1633947 - RNA, 13 nt, Human
cugaauuaugaaa

SEQ ID NO: 1633948 - RNA, 23 nt, Human
cugaaagggacgcuacccgggaa

SEQ ID NO: 1633949 - RNA, 14 nt, Human
cucuuuucaaaaca

SEQ ID NO: 1633950 - RNA, 23 nt, Human
cucuuugucuacaccauuaugug

SEQ ID NO: 1633951 - RNA, 23 nt, Human
cucuuuggucuacacugugcuga

SEQ ID NO: 1633952 - RNA, 22 nt, Human
cucuuuggucuacacugugcug

SEQ ID NO: 1633953 - RNA, 16 nt, Human
cucuucuccaggcugu

SEQ ID NO: 1633954 - RNA, 20 nt, Human
cugaaauaaacgucuuaaau

SEQ ID NO: 1633955 - RNA, 20 nt, Human
cugagaugugaacacaucag

SEQ ID NO: 1633956 - RNA, 16 nt, Human
cugagaugugaacaca

SEQ ID NO: 1633957 - RNA, 22 nt, Human
cugagacagcccgggcucugcc

SEQ ID NO: 1633958 - RNA, 21 nt, Human
cugagacagcccgggcucugc

SEQ ID NO: 1633959 - RNA, 20 nt, Human
cugagaaagacuauucaaac

SEQ ID NO: 1633960 - RNA, 19 nt, Human
cugagaaagacuauucaaa

SEQ ID NO: 1633961 - RNA, 19 nt, Human
cugagacagcccgggcucu

SEQ ID NO: 1633962 - RNA, 20 nt, Human
cugagacagcccgggcucug

SEQ ID NO: 1633963 - RNA, 21 nt, Human
cugagaugugaacacaucagc

SEQ ID NO: 1633964 - RNA, 23 nt, Human
cugagauuauaggcaccuaccac

SEQ ID NO: 1633965 - RNA, 21 nt, Human
cugagcaaauguggcuccugg

SEQ ID NO: 1633966 - RNA, 20 nt, Human
cugagcaaauguggcuccug

SEQ ID NO: 1633967 - RNA, 17 nt, Human
cugagcaaauguggcuc

SEQ ID NO: 1633968 - RNA, 15 nt, Human
cugagcaaauguggc

SEQ ID NO: 1633969 - RNA, 16 nt, Human
cugagcaggauuuuaa

SEQ ID NO: 1633970 - RNA, 14 nt, Human
cugagccagauuuc

SEQ ID NO: 1633971 - RNA, 13 nt, Human
cugagccagauuu

SEQ ID NO: 1633972 - RNA, 15 nt, Human
cugagccagauuuca

SEQ ID NO: 1633973 - RNA, 18 nt, Human
cugagaaagacuauucaa

SEQ ID NO: 1633974 - RNA, 15 nt, Human
cugagaaagacuauu

SEQ ID NO: 1633975 - RNA, 13 nt, Human
cugagaaagacua

SEQ ID NO: 1633976 - RNA, 12 nt, Human
cugagaaagacu

SEQ ID NO: 1633977 - RNA, 17 nt, Human
cugacuguacuccuccc

SEQ ID NO: 1633978 - RNA, 18 nt, Human
cugacagacacaggcccg

SEQ ID NO: 1633979 - RNA, 17 nt, Human
cugacagacacaggccc

SEQ ID NO: 1633980 - RNA, 17 nt, Human
cugaccagccuccaugc

SEQ ID NO: 1633981 - RNA, 16 nt, Human
cugacagacacaggcc

SEQ ID NO: 1633982 - RNA, 14 nt, Human
cugaauuucuuuug

SEQ ID NO: 1633983 - RNA, 16 nt, Human
cugaauuaugaaacuu

SEQ ID NO: 1633984 - RNA, 23 nt, Human
cugaccagccuccaugcugccuc

SEQ ID NO: 1633985 - RNA, 21 nt, Human
cugaccagccuccaugcugcc

SEQ ID NO: 1633986 - RNA, 22 nt, Human
cucuggccuucggccuccaucc

SEQ ID NO: 1633987 - RNA, 21 nt, Human
cucuggccuucggccuccauc

SEQ ID NO: 1633988 - RNA, 23 nt, Human
cucuggcagcucagagagggugg

SEQ ID NO: 1633989 - RNA, 20 nt, Human
cucugccucugacacacagc

SEQ ID NO: 1633990 - RNA, 19 nt, Human
cucugccucugacacacag

SEQ ID NO: 1633991 - RNA, 21 nt, Human
cucugccucccaucacccgcu

SEQ ID NO: 1633992 - RNA, 10 nt, Human
cucugccuga

SEQ ID NO: 1633993 - RNA, 20 nt, Human
cucuggauuauauuaugaag

SEQ ID NO: 1633994 - RNA, 19 nt, Human
cucuggauuauauuaugaa

SEQ ID NO: 1633995 - RNA, 22 nt, Human
cucuguccugggagugagcugg

SEQ ID NO: 1633996 - RNA, 15 nt, Human
cucuguccugggagu

SEQ ID NO: 1633997 - RNA, 14 nt, Human
cucuguccugggag

SEQ ID NO: 1633998 - RNA, 13 nt, Human
cucugucgcccag

SEQ ID NO: 1633999 - RNA, 15 nt, Human
cucugucgcccaggc

SEQ ID NO: 1634000 - RNA, 17 nt, Human
cucugucgcccagucug

SEQ ID NO: 1634001 - RNA, 22 nt, Human
cucugucgcccaggcuggagug

SEQ ID NO: 1634002 - RNA, 18 nt, Human
cucugucgcccaggcugg

SEQ ID NO: 1634003 - RNA, 19 nt, Human
cucugucgcccagucugga

SEQ ID NO: 1634004 - RNA, 18 nt, Human
cucugucgcccagucugg

SEQ ID NO: 1634005 - RNA, 19 nt, Human
cucuuaagaagacugcauu

SEQ ID NO: 1634006 - RNA, 23 nt, Human
cucugugucagguggggcagcuu

SEQ ID NO: 1634007 - RNA, 22 nt, Human
cucugugucagguggggcagcu

SEQ ID NO: 1634008 - RNA, 21 nt, Human
cucugugucagguggggcagc

SEQ ID NO: 1634009 - RNA, 20 nt, Human
cucugugucagguggggcag

SEQ ID NO: 1634010 - RNA, 15 nt, Human
cucuucuccaggcug

SEQ ID NO: 1634011 - RNA, 13 nt, Human
cucuucuccacug

SEQ ID NO: 1634012 - RNA, 12 nt, Human
cucuucuccacu

SEQ ID NO: 1634013 - RNA, 21 nt, Human
cucugagacucgcgacaaugc

SEQ ID NO: 1634014 - RNA, 14 nt, Human
cucugaggacacua

SEQ ID NO: 1634015 - RNA, 12 nt, Human
cucugaggacac

SEQ ID NO: 1634016 - RNA, 16 nt, Human
cucugaggacacuaac

SEQ ID NO: 1634017 - RNA, 23 nt, Human
cucugagacucgcgacaaugcaa

SEQ ID NO: 1634018 - RNA, 23 nt, Human
cucugacagaagaaccccagggu

SEQ ID NO: 1634019 - RNA, 19 nt, Human
cucugacacacagcucugu

SEQ ID NO: 1634020 - RNA, 18 nt, Human
cucugacacacagcucug

SEQ ID NO: 1634021 - RNA, 17 nt, Human
cucugacacacagcucu

SEQ ID NO: 1634022 - RNA, 16 nt, Human
cucugacacacagcuc

SEQ ID NO: 1634023 - RNA, 15 nt, Human
cucugacacacagcu

SEQ ID NO: 1634024 - RNA, 14 nt, Human
cucugacacacagc

SEQ ID NO: 1634025 - RNA, 22 nt, Human
cucugacaacagacuucugaaa

SEQ ID NO: 1634026 - RNA, 21 nt, Human
cucugacaacagacuucugaa

SEQ ID NO: 1634027 - RNA, 22 nt, Human
cucugaaggacauugcggacag

SEQ ID NO: 1634028 - RNA, 16 nt, Human
cucugacaacagacuu

SEQ ID NO: 1634029 - RNA, 19 nt, Human
cucugaaggguaauuauau

SEQ ID NO: 1634030 - RNA, 17 nt, Human
cucugccucccaucacc

SEQ ID NO: 1634031 - RNA, 16 nt, Human
cucugccucccaucac

SEQ ID NO: 1634032 - RNA, 14 nt, Human
cucugccucccauc

SEQ ID NO: 1634033 - RNA, 13 nt, Human
cucugccucccau

SEQ ID NO: 1634034 - RNA, 20 nt, Human
cucugcccuaaugcgcaggc

SEQ ID NO: 1634035 - RNA, 22 nt, Human
cucugcccuaaugcgcaggcug

SEQ ID NO: 1634036 - RNA, 17 nt, Human
cucugcccacucccugc

SEQ ID NO: 1634037 - RNA, 16 nt, Human
cucugcccacucccug

SEQ ID NO: 1634038 - RNA, 15 nt, Human
cucugcccacucccu

SEQ ID NO: 1634039 - RNA, 13 nt, Human
cucugcccacucc

SEQ ID NO: 1634040 - RNA, 20 nt, Human
cucugcccacucccugcaac

SEQ ID NO: 1634041 - RNA, 18 nt, Human
cucugcccacucccugca

SEQ ID NO: 1634042 - RNA, 22 nt, Human
cucugcaggucccuaauaaagc

SEQ ID NO: 1634043 - RNA, 21 nt, Human
cucugcaggucccuaauaaag

SEQ ID NO: 1634044 - RNA, 15 nt, Human
cucugcacaagcugc

SEQ ID NO: 1634045 - RNA, 14 nt, Human
cucugcacaagcug

SEQ ID NO: 1634046 - RNA, 20 nt, Human
cucugcaggucccuaauaaa

SEQ ID NO: 1634047 - RNA, 19 nt, Human
cucugcaggucccuaauaa

SEQ ID NO: 1634048 - RNA, 13 nt, Human
cucugcacaagcu

SEQ ID NO: 1634049 - RNA, 15 nt, Human
cucugauacagaaaa

SEQ ID NO: 1634050 - RNA, 12 nt, Human
cucccuuucaac

SEQ ID NO: 1634051 - RNA, 19 nt, Human
cucccuuggggccuaugca

SEQ ID NO: 1634052 - RNA, 18 nt, Human
cuccucagaucuucugug

SEQ ID NO: 1634053 - RNA, 15 nt, Human
cuccuccagagucag

SEQ ID NO: 1634054 - RNA, 13 nt, Human
cuccuccagaguc

SEQ ID NO: 1634055 - RNA, 15 nt, Human
cuccuccagccgcca

SEQ ID NO: 1634056 - RNA, 22 nt, Human
cuccuccagccgccaugcuccu

SEQ ID NO: 1634057 - RNA, 23 nt, Human
cuccucccaggcgccccuucccc

SEQ ID NO: 1634058 - RNA, 22 nt, Human
cuccucccaggcgccccuuccc

SEQ ID NO: 1634059 - RNA, 17 nt, Human
cuccucccaggcgcccc

SEQ ID NO: 1634060 - RNA, 19 nt, Human
cuccuccuggacuccugca

SEQ ID NO: 1634061 - RNA, 15 nt, Human
cuccuccuggacucc

SEQ ID NO: 1634062 - RNA, 14 nt, Human
cuccuccuggacuc

SEQ ID NO: 1634063 - RNA, 20 nt, Human
cuccccuccucugcuugcca

SEQ ID NO: 1634064 - RNA, 13 nt, Human
cuccauccugagg

SEQ ID NO: 1634065 - RNA, 14 nt, Human
cuccauccugaggc

SEQ ID NO: 1634066 - RNA, 23 nt, Human
cuccccagcaagugagagcuggg

SEQ ID NO: 1634067 - RNA, 22 nt, Human
cuccccagcaagugagagcugg

SEQ ID NO: 1634068 - RNA, 11 nt, Human
cuccccuccuc

SEQ ID NO: 1634069 - RNA, 13 nt, Human
cuccccuccucug

SEQ ID NO: 1634070 - RNA, 20 nt, Human
cuccccuccuccuggacucc

SEQ ID NO: 1634071 - RNA, 12 nt, Human
cuccccuccucc

SEQ ID NO: 1634072 - RNA, 20 nt, Human
cucccgaguagcugggacua

SEQ ID NO: 1634073 - RNA, 19 nt, Human
cucccgaguagcugggacu

SEQ ID NO: 1634074 - RNA, 16 nt, Human
cucccgaauagcuggg

SEQ ID NO: 1634075 - RNA, 21 nt, Human
cucccggugcccaagaauaga

SEQ ID NO: 1634076 - RNA, 15 nt, Human
cucccggugcccaag

SEQ ID NO: 1634077 - RNA, 21 nt, Human
cucccugccccucccuucaac

SEQ ID NO: 1634078 - RNA, 20 nt, Human
cucccugccccucccuucaa

SEQ ID NO: 1634079 - RNA, 18 nt, Human
cucccugccccucccuuc

SEQ ID NO: 1634080 - RNA, 17 nt, Human
cucccugccccucccuu

SEQ ID NO: 1634081 - RNA, 14 nt, Human
cucccugccccucc

SEQ ID NO: 1634082 - RNA, 13 nt, Human
cucccugccccuc

SEQ ID NO: 1634083 - RNA, 23 nt, Human
cucccugccccccagcccuccuu

SEQ ID NO: 1634084 - RNA, 17 nt, Human
cucccugccccccagcc

SEQ ID NO: 1634085 - RNA, 21 nt, Human
cuccugccucgaacuggcugc

SEQ ID NO: 1634086 - RNA, 20 nt, Human
cuccugccucgaacuggcug

SEQ ID NO: 1634087 - RNA, 18 nt, Human
cuccugccucgaacuggc

SEQ ID NO: 1634088 - RNA, 19 nt, Human
cuccugccucagccucccg

SEQ ID NO: 1634089 - RNA, 22 nt, Human
cuccugccucgaacuggcugca

SEQ ID NO: 1634090 - RNA, 15 nt, Human
cuccucuccccagca

SEQ ID NO: 1634091 - RNA, 13 nt, Human
cuccucuccccag

SEQ ID NO: 1634092 - RNA, 11 nt, Human
cuccugccuca

SEQ ID NO: 1634093 - RNA, 12 nt, Human
cuccugccucag

SEQ ID NO: 1634094 - RNA, 17 nt, Human
cuccugccucagccucc

SEQ ID NO: 1634095 - RNA, 14 nt, Human
cuccuggaaauauu

SEQ ID NO: 1634096 - RNA, 13 nt, Human
cuccugcugggca

SEQ ID NO: 1634097 - RNA, 24 nt, Human
cuccugugugugcgccuacaggag

SEQ ID NO: 1634098 - RNA, 23 nt, Human
cuccugugugugcgccuacagga

SEQ ID NO: 1634099 - RNA, 21 nt, Human
cuccugugugugcgccuacag

SEQ ID NO: 1634100 - RNA, 11 nt, Human
cuccuggacuc

SEQ ID NO: 1634101 - RNA, 22 nt, Human
cuccuuaucaaaggacaccauu

SEQ ID NO: 1634102 - RNA, 17 nt, Human
cuccuuaucaaaggaca

SEQ ID NO: 1634103 - RNA, 12 nt, Human
cuccuggacucc

SEQ ID NO: 1634104 - RNA, 23 nt, Human
cuccuuggugucgggcaugacac

SEQ ID NO: 1634105 - RNA, 19 nt, Human
cucgagcaugccuggaugg

SEQ ID NO: 1634106 - RNA, 16 nt, Human
cucgagcaugccugga

SEQ ID NO: 1634107 - RNA, 15 nt, Human
cucgagcaugccugg

SEQ ID NO: 1634108 - RNA, 13 nt, Human
cucgagcaugccu

SEQ ID NO: 1634109 - RNA, 22 nt, Human
cucgagcaugccuggauggggc

SEQ ID NO: 1634110 - RNA, 13 nt, Human
cucgcgacaaugc

SEQ ID NO: 1634111 - RNA, 23 nt, Human
cucgcucugucgcccaggcugga

SEQ ID NO: 1634112 - RNA, 15 nt, Human
cucgccuucaucucc

SEQ ID NO: 1634113 - RNA, 12 nt, Human
cuccauccugag

SEQ ID NO: 1634114 - RNA, 23 nt, Human
cuccaggagcagccacauuccug

SEQ ID NO: 1634115 - RNA, 18 nt, Human
cuccaggagcagccacau

SEQ ID NO: 1634116 - RNA, 17 nt, Human
cuccaggagcagccaca

SEQ ID NO: 1634117 - RNA, 16 nt, Human
cuccaggagcagccac

SEQ ID NO: 1634118 - RNA, 15 nt, Human
cuccaggagcagcca

SEQ ID NO: 1634119 - RNA, 14 nt, Human
cuccaggagcagcc

SEQ ID NO: 1634120 - RNA, 13 nt, Human
cuccaggagcagc

SEQ ID NO: 1634121 - RNA, 11 nt, Human
cuccaggagca

SEQ ID NO: 1634122 - RNA, 12 nt, Human
cuccagccuggg

SEQ ID NO: 1634123 - RNA, 14 nt, Human
cuccagcucaccag

SEQ ID NO: 1634124 - RNA, 17 nt, Human
cuccagccccuggaugc

SEQ ID NO: 1634125 - RNA, 16 nt, Human
cuccagccccuggaug

SEQ ID NO: 1634126 - RNA, 20 nt, Human
cuccagccccuggaugcagc

SEQ ID NO: 1634127 - RNA, 13 nt, Human
cuccaccugccag

SEQ ID NO: 1634128 - RNA, 12 nt, Human
cuccaccugcca

SEQ ID NO: 1634129 - RNA, 14 nt, Human
cuccaccugccagg

SEQ ID NO: 1634130 - RNA, 15 nt, Human
cuccaccugccaggg

SEQ ID NO: 1634131 - RNA, 21 nt, Human
cucauuuccaagcaaguauua

SEQ ID NO: 1634132 - RNA, 17 nt, Human
cucauuugucacacacu

SEQ ID NO: 1634133 - RNA, 13 nt, Human
cuccaaagaaaug

SEQ ID NO: 1634134 - RNA, 18 nt, Human
cuccaaaauaaaacuuuu

SEQ ID NO: 1634135 - RNA, 12 nt, Human
cuccaaagaaau

SEQ ID NO: 1634136 - RNA, 21 nt, Human
cuccaaacugacucuuaagaa

SEQ ID NO: 1634137 - RNA, 18 nt, Human
cucauuugucacacacuu

SEQ ID NO: 1634138 - RNA, 15 nt, Human
cuccaaaauaaaacu

SEQ ID NO: 1634139 - RNA, 16 nt, Human
cuccaaaauaaaacuu

SEQ ID NO: 1634140 - RNA, 22 nt, Human
cuccaaucccaccaacccucag

SEQ ID NO: 1634141 - RNA, 13 nt, Human
cuccacccugcuc

SEQ ID NO: 1634142 - RNA, 15 nt, Human
cuccacccugcucuc

SEQ ID NO: 1634143 - RNA, 20 nt, Human
cucaggugagaagcagagga

SEQ ID NO: 1634144 - RNA, 19 nt, Human
cucaggugagaagcagagg

SEQ ID NO: 1634145 - RNA, 16 nt, Human
cucaggugagaagcag

SEQ ID NO: 1634146 - RNA, 18 nt, Human
cucagggucccugguggc

SEQ ID NO: 1634147 - RNA, 17 nt, Human
cucagggucccuggugg

SEQ ID NO: 1634148 - RNA, 16 nt, Human
cucagggucccuggug

SEQ ID NO: 1634149 - RNA, 15 nt, Human
cucagggucccuggu

SEQ ID NO: 1634150 - RNA, 15 nt, Human
cucagggccuggucg

SEQ ID NO: 1634151 - RNA, 16 nt, Human
cucagggccuggcuca

SEQ ID NO: 1634152 - RNA, 15 nt, Human
cucagggccuggcuc

SEQ ID NO: 1634153 - RNA, 14 nt, Human
cucagggccuggcu

SEQ ID NO: 1634154 - RNA, 18 nt, Human
cucagcauccuggcaccc

SEQ ID NO: 1634155 - RNA, 23 nt, Human
cucaggaguuugagaccaaccug

SEQ ID NO: 1634156 - RNA, 18 nt, Human
cucaggaguuugagacca

SEQ ID NO: 1634157 - RNA, 21 nt, Human
cucagcccacauagugauggu

SEQ ID NO: 1634158 - RNA, 19 nt, Human
cucagcccacauagugaug

SEQ ID NO: 1634159 - RNA, 15 nt, Human
cucauccucauaccc

SEQ ID NO: 1634160 - RNA, 23 nt, Human
cucauaguaugguggcuggguug

SEQ ID NO: 1634161 - RNA, 21 nt, Human
cucaucaccaacgucugugcc

SEQ ID NO: 1634162 - RNA, 22 nt, Human
cucaucaccaacgucugugcca

SEQ ID NO: 1634163 - RNA, 21 nt, Human
cucauacccacccccacccaa

SEQ ID NO: 1634164 - RNA, 19 nt, Human
cucauacccacccccaccc

SEQ ID NO: 1634165 - RNA, 18 nt, Human
cucauacccacccccacc

SEQ ID NO: 1634166 - RNA, 16 nt, Human
cucauacccaccccca

SEQ ID NO: 1634167 - RNA, 19 nt, Human
cucaggugauccacccacc

SEQ ID NO: 1634168 - RNA, 18 nt, Human
cucaggugauccacccac

SEQ ID NO: 1634169 - RNA, 20 nt, Human
cucaggugauccacccaccu

SEQ ID NO: 1634170 - RNA, 22 nt, Human
cucaggugauccacccaccuca

SEQ ID NO: 1634171 - RNA, 21 nt, Human
cucauaguaugguggcugggu

SEQ ID NO: 1634172 - RNA, 21 nt, Human
cucauagcccucacccugggg

SEQ ID NO: 1634173 - RNA, 20 nt, Human
cucauagcccucacccuggg

SEQ ID NO: 1634174 - RNA, 17 nt, Human
cucauagcccucacccu

SEQ ID NO: 1634175 - RNA, 13 nt, Human
cucauagcccuca

SEQ ID NO: 1634176 - RNA, 14 nt, Human
cucauacucaccuc

SEQ ID NO: 1634177 - RNA, 22 nt, Human
cucauacucaccucaccccacu

SEQ ID NO: 1634178 - RNA, 21 nt, Human
cuagugagcagucaggaaaga

SEQ ID NO: 1634179 - RNA, 19 nt, Human
cuagugaaagaggcagcuu

SEQ ID NO: 1634180 - RNA, 18 nt, Human
cuagugaaagaggcagcu

SEQ ID NO: 1634181 - RNA, 20 nt, Human
cuagugaaacucguuaauuu

SEQ ID NO: 1634182 - RNA, 16 nt, Human
cuaguaauuggaaagg

SEQ ID NO: 1634183 - RNA, 24 nt, Human
cuaggugacagagugagacucugu

SEQ ID NO: 1634184 - RNA, 18 nt, Human
cuaggugacagagugaga

SEQ ID NO: 1634185 - RNA, 14 nt, Human
cuaggugacagagu

SEQ ID NO: 1634186 - RNA, 22 nt, Human
cgcccaguuggguggaugccug

SEQ ID NO: 1634187 - RNA, 15 nt, Human
cgccaugcuccuggc

SEQ ID NO: 1634188 - RNA, 20 nt, Human
cgccaucccagccccaauga

SEQ ID NO: 1634189 - RNA, 23 nt, Human
cgcccaguuggguggaugccugg

SEQ ID NO: 1634190 - RNA, 22 nt, Human
cuagguaaauuacaguuccuag

SEQ ID NO: 1634191 - RNA, 22 nt, Human
cuauaggugcuacaaaaacaca

SEQ ID NO: 1634192 - RNA, 21 nt, Human
cuauaggugcuacaaaaacac

SEQ ID NO: 1634193 - RNA, 20 nt, Human
cuauaggugcuacaaaaaca

SEQ ID NO: 1634194 - RNA, 17 nt, Human
cuauagccuaggugaca

SEQ ID NO: 1634195 - RNA, 18 nt, Human
cuauauuguuugcuaagc

SEQ ID NO: 1634196 - RNA, 17 nt, Human
cuauauuuuacauaaau

SEQ ID NO: 1634197 - RNA, 15 nt, Human
cuauauuuucauucu

SEQ ID NO: 1634198 - RNA, 19 nt, Human
cuauauuuucauucuccua

SEQ ID NO: 1634199 - RNA, 16 nt, Human
cuauaauguaagcucu

SEQ ID NO: 1634200 - RNA, 22 nt, Human
cuauaauuuaccugaagucuuu

SEQ ID NO: 1634201 - RNA, 21 nt, Human
cuauaauguaagcucuacuga

SEQ ID NO: 1634202 - RNA, 16 nt, Human
cuauucaaacagucuc

SEQ ID NO: 1634203 - RNA, 18 nt, Human
cuauucaaacagucucag

SEQ ID NO: 1634204 - RNA, 23 nt, Human
cuauucaaacagucucaggaaau

SEQ ID NO: 1634205 - RNA, 15 nt, Human
cuauuagagaagaga

SEQ ID NO: 1634206 - RNA, 23 nt, Human
cuaugggacucaaugcacugaca

SEQ ID NO: 1634207 - RNA, 22 nt, Human
cuaugggacucaaugcacugac

SEQ ID NO: 1634208 - RNA, 18 nt, Human
cuaugggacucaaugcac

SEQ ID NO: 1634209 - RNA, 13 nt, Human
cuauggccugugg

SEQ ID NO: 1634210 - RNA, 20 nt, Human
cuaugcagagguccacaaca

SEQ ID NO: 1634211 - RNA, 21 nt, Human
cucacucugucgcccagucug

SEQ ID NO: 1634212 - RNA, 13 nt, Human
cucacucugucgc

SEQ ID NO: 1634213 - RNA, 22 nt, Human
cucacucugucgcccagucugg

SEQ ID NO: 1634214 - RNA, 12 nt, Human
cucacugcagcc

SEQ ID NO: 1634215 - RNA, 13 nt, Human
cucacugcagccu

SEQ ID NO: 1634216 - RNA, 14 nt, Human
cucacugcagccuc

SEQ ID NO: 1634217 - RNA, 12 nt, Human
cucacucugucg

SEQ ID NO: 1634218 - RNA, 11 nt, Human
cucacucuguc

SEQ ID NO: 1634219 - RNA, 13 nt, Human
cucacuccuugaa

SEQ ID NO: 1634220 - RNA, 19 nt, Human
cucacuccuaccugguaau

SEQ ID NO: 1634221 - RNA, 17 nt, Human
cucacuccuaccuggua

SEQ ID NO: 1634222 - RNA, 16 nt, Human
cucacuccuaccuggu

SEQ ID NO: 1634223 - RNA, 22 nt, Human
cucacuauguugcccaggcagg

SEQ ID NO: 1634224 - RNA, 21 nt, Human
cucacuauguugcccaggcag

SEQ ID NO: 1634225 - RNA, 23 nt, Human
cucacuauguugcccaggcaggu

SEQ ID NO: 1634226 - RNA, 15 nt, Human
cucacuccuaccugg

SEQ ID NO: 1634227 - RNA, 13 nt, Human
cucacuccuaccu

SEQ ID NO: 1634228 - RNA, 15 nt, Human
cucaccccagcccca

SEQ ID NO: 1634229 - RNA, 20 nt, Human
cucacuauguugcccaggca

SEQ ID NO: 1634230 - RNA, 19 nt, Human
cucacuauguugcccaggc

SEQ ID NO: 1634231 - RNA, 20 nt, Human
cucacuguugcccaggcugg

SEQ ID NO: 1634232 - RNA, 22 nt, Human
cucacugccaugccagcuuauc

SEQ ID NO: 1634233 - RNA, 19 nt, Human
cucacugccaugccagcuu

SEQ ID NO: 1634234 - RNA, 22 nt, Human
cucacuguugcccaggcuggcg

SEQ ID NO: 1634235 - RNA, 21 nt, Human
cucacuguugcccaggcuggc

SEQ ID NO: 1634236 - RNA, 14 nt, Human
cucagagagggugg

SEQ ID NO: 1634237 - RNA, 18 nt, Human
cucagagagggugggagu

SEQ ID NO: 1634238 - RNA, 17 nt, Human
cucagcauccuggcacc

SEQ ID NO: 1634239 - RNA, 16 nt, Human
cucagcauccuggcac

SEQ ID NO: 1634240 - RNA, 15 nt, Human
cucagaucuucugug

SEQ ID NO: 1634241 - RNA, 13 nt, Human
cucagauuuuauu

SEQ ID NO: 1634242 - RNA, 22 nt, Human
cucagauuuuauuauguaaauc

SEQ ID NO: 1634243 - RNA, 18 nt, Human
cucagauuuuauuaugua

SEQ ID NO: 1634244 - RNA, 17 nt, Human
cucagauuuuauuaugu

SEQ ID NO: 1634245 - RNA, 15 nt, Human
cucagauuuuauuau

SEQ ID NO: 1634246 - RNA, 23 nt, Human
cucacaguccuuaccagcagagc

SEQ ID NO: 1634247 - RNA, 22 nt, Human
cucacaguccuuaccagcagag

SEQ ID NO: 1634248 - RNA, 19 nt, Human
cucacaguccuuaccagca

SEQ ID NO: 1634249 - RNA, 17 nt, Human
cucacaguccuuaccag

SEQ ID NO: 1634250 - RNA, 19 nt, Human
cucacauuuauucugcuca

SEQ ID NO: 1634251 - RNA, 15 nt, Human
cucacauuuauucug

SEQ ID NO: 1634252 - RNA, 22 nt, Human
cucacauuuauucugcucacau

SEQ ID NO: 1634253 - RNA, 15 nt, Human
cucaccagccccagu

SEQ ID NO: 1634254 - RNA, 14 nt, Human
cucaccagccccag

SEQ ID NO: 1634255 - RNA, 13 nt, Human
cucaccagcccca

SEQ ID NO: 1634256 - RNA, 18 nt, Human
cucaccagccccagugcc

SEQ ID NO: 1634257 - RNA, 17 nt, Human
cucaccagccccagugc

SEQ ID NO: 1634258 - RNA, 15 nt, Human
cucacaguccuuacc

SEQ ID NO: 1634259 - RNA, 24 nt, Human
cucacacaugagcaucaggccagg

SEQ ID NO: 1634260 - RNA, 22 nt, Human
cucacacaugagcaucaggcca

SEQ ID NO: 1634261 - RNA, 21 nt, Human
cucaaguccucuuuucugaga

SEQ ID NO: 1634262 - RNA, 17 nt, Human
cucaagugauucuccug

SEQ ID NO: 1634263 - RNA, 18 nt, Human
cuauuguuagucucuuga

SEQ ID NO: 1634264 - RNA, 19 nt, Human
cuauugucaccagggcugg

SEQ ID NO: 1634265 - RNA, 22 nt, Human
cuauuuaugugauccuuuugga

SEQ ID NO: 1634266 - RNA, 17 nt, Human
cucaaccuccugggcua

SEQ ID NO: 1634267 - RNA, 15 nt, Human
cucaaccuccugggc

SEQ ID NO: 1634268 - RNA, 13 nt, Human
cucaaccuccugg

SEQ ID NO: 1634269 - RNA, 21 nt, Human
cucaacaccucugcacaagcu

SEQ ID NO: 1634270 - RNA, 23 nt, Human
cucaaauacgugggcauucaaau

SEQ ID NO: 1634271 - RNA, 18 nt, Human
cuauuucuauauuuucau

SEQ ID NO: 1634272 - RNA, 16 nt, Human
cuauuucuauauuuuc

SEQ ID NO: 1634273 - RNA, 14 nt, Human
cuauuucuauauuu

SEQ ID NO: 1634274 - RNA, 19 nt, Human
gagcaaaaucgaugcagug

SEQ ID NO: 1634275 - RNA, 23 nt, Human
gagcaagacgcugugcugcccug

SEQ ID NO: 1634276 - RNA, 22 nt, Human
gagcaagacgcugugcugcccu

SEQ ID NO: 1634277 - RNA, 18 nt, Human
gagcaagacgcugugcug

SEQ ID NO: 1634278 - RNA, 21 nt, Human
gagcaagacgcugugcugccc

SEQ ID NO: 1634279 - RNA, 17 nt, Human
gagcaccuuagacaguc

SEQ ID NO: 1634280 - RNA, 19 nt, Human
gagcaccuuagacaguccc

SEQ ID NO: 1634281 - RNA, 20 nt, Human
gagaucaaccccuucgcucc

SEQ ID NO: 1634282 - RNA, 16 nt, Human
gagaucagccugggca

SEQ ID NO: 1634283 - RNA, 14 nt, Human
gagaucagccuggg

SEQ ID NO: 1634284 - RNA, 13 nt, Human
gagaucagccugg

SEQ ID NO: 1634285 - RNA, 21 nt, Human
gagcaggcuacugucagcucc

SEQ ID NO: 1634286 - RNA, 13 nt, Human
gagccacugcacc

SEQ ID NO: 1634287 - RNA, 20 nt, Human
gagccaccgugccuggccac

SEQ ID NO: 1634288 - RNA, 14 nt, Human
gagccaccgugccu

SEQ ID NO: 1634289 - RNA, 18 nt, Human
gagcagccacauuccuga

SEQ ID NO: 1634290 - RNA, 12 nt, Human
gagcccaggccu

SEQ ID NO: 1634291 - RNA, 16 nt, Human
gagcccacgcccccac

SEQ ID NO: 1634292 - RNA, 15 nt, Human
gagcccacgccccca

SEQ ID NO: 1634293 - RNA, 12 nt, Human
gagcccacgccc

SEQ ID NO: 1634294 - RNA, 14 nt, Human
gagcccaggccucc

SEQ ID NO: 1634295 - RNA, 13 nt, Human
gagcccaggccuc

SEQ ID NO: 1634296 - RNA, 18 nt, Human
gagcccacgcccccacug

SEQ ID NO: 1634297 - RNA, 13 nt, Human
gagccagauuuca

SEQ ID NO: 1634298 - RNA, 22 nt, Human
gagccacugcaccgggccacag

SEQ ID NO: 1634299 - RNA, 12 nt, Human
gagcuacaaaug

SEQ ID NO: 1634300 - RNA, 13 nt, Human
gagcuacaaaugc

SEQ ID NO: 1634301 - RNA, 21 nt, Human
gagccugggaggucaaggcug

SEQ ID NO: 1634302 - RNA, 13 nt, Human
gagccugggaggu

SEQ ID NO: 1634303 - RNA, 10 nt, Human
gagccuggca

SEQ ID NO: 1634304 - RNA, 15 nt, Human
gagccuggcaagaau

SEQ ID NO: 1634305 - RNA, 17 nt, Human
gagcccugguggcagug

SEQ ID NO: 1634306 - RNA, 19 nt, Human
gagccucagcauccuggca

SEQ ID NO: 1634307 - RNA, 16 nt, Human
gagcccugguggcagu

SEQ ID NO: 1634308 - RNA, 15 nt, Human
gagcccugguggcag

SEQ ID NO: 1634309 - RNA, 21 nt, Human
gagccucagcauccuggcacc

SEQ ID NO: 1634310 - RNA, 20 nt, Human
gagccucagcauccuggcac

SEQ ID NO: 1634311 - RNA, 14 nt, Human
gagccuccugcccu

SEQ ID NO: 1634312 - RNA, 18 nt, Human
gagcccugguggcagugg

SEQ ID NO: 1634313 - RNA, 18 nt, Human
gagccucagucucccucc

SEQ ID NO: 1634314 - RNA, 22 nt, Human
gagccuccugcccuuaccugcc

SEQ ID NO: 1634315 - RNA, 20 nt, Human
gagccuccugcccuuaccug

SEQ ID NO: 1634316 - RNA, 22 nt, Human
gagccugcacggugaauggcuu

SEQ ID NO: 1634317 - RNA, 17 nt, Human
gagccugcacggugaau

SEQ ID NO: 1634318 - RNA, 23 nt, Human
gagccugcacggugaauggcuuu

SEQ ID NO: 1634319 - RNA, 14 nt, Human
gagcugcccucucc

SEQ ID NO: 1634320 - RNA, 16 nt, Human
gagcugccaccugccu

SEQ ID NO: 1634321 - RNA, 15 nt, Human
gagcugccaccugcc

SEQ ID NO: 1634322 - RNA, 13 nt, Human
gagcugccaccug

SEQ ID NO: 1634323 - RNA, 16 nt, Human
gagcucugcagagcag

SEQ ID NO: 1634324 - RNA, 15 nt, Human
gagcugcccucuccu

SEQ ID NO: 1634325 - RNA, 16 nt, Human
gagcugcccucuccug

SEQ ID NO: 1634326 - RNA, 17 nt, Human
gagcugcccucuccugg

SEQ ID NO: 1634327 - RNA, 15 nt, Human
gagcuuaacagugug

SEQ ID NO: 1634328 - RNA, 18 nt, Human
gagcuucuguugcugccu

SEQ ID NO: 1634329 - RNA, 14 nt, Human
gagcuucuggcacu

SEQ ID NO: 1634330 - RNA, 14 nt, Human
gagcuacaaaugca

SEQ ID NO: 1634331 - RNA, 23 nt, Human
gagcuacacaggggaaaagagga

SEQ ID NO: 1634332 - RNA, 19 nt, Human
gaggcccccaucuccuuaa

SEQ ID NO: 1634333 - RNA, 13 nt, Human
gaggcccggccuc

SEQ ID NO: 1634334 - RNA, 23 nt, Human
gaggcccuucucuccagccccug

SEQ ID NO: 1634335 - RNA, 14 nt, Human
gaggcccuucucuc

SEQ ID NO: 1634336 - RNA, 24 nt, Human
gaggcccuucucuccagccccugg

SEQ ID NO: 1634337 - RNA, 14 nt, Human
gaggccuucucuga

SEQ ID NO: 1634338 - RNA, 15 nt, Human
gaggcugggcucccu

SEQ ID NO: 1634339 - RNA, 16 nt, Human
gaggcugggcucccuu

SEQ ID NO: 1634340 - RNA, 14 nt, Human
gaggcugggcuccc

SEQ ID NO: 1634341 - RNA, 13 nt, Human
gaggcugggcucc

SEQ ID NO: 1634342 - RNA, 18 nt, Human
gaggcuacuguaaggcaa

SEQ ID NO: 1634343 - RNA, 16 nt, Human
gagggagugacagagg

SEQ ID NO: 1634344 - RNA, 16 nt, Human
gagggagggcuccaga

SEQ ID NO: 1634345 - RNA, 14 nt, Human
gagggagugacaga

SEQ ID NO: 1634346 - RNA, 13 nt, Human
gagggagugacag

SEQ ID NO: 1634347 - RNA, 22 nt, Human
gagggcacagaaaauggaagac

SEQ ID NO: 1634348 - RNA, 14 nt, Human
gagggcacagaaaa

SEQ ID NO: 1634349 - RNA, 23 nt, Human
gagggcacagaaaauggaagaca

SEQ ID NO: 1634350 - RNA, 12 nt, Human
gagggcacuggu

SEQ ID NO: 1634351 - RNA, 18 nt, Human
gagggcacugguggcccg

SEQ ID NO: 1634352 - RNA, 16 nt, Human
gagggcacugguggcc

SEQ ID NO: 1634353 - RNA, 22 nt, Human
gaggggccucuuaugggcuggg

SEQ ID NO: 1634354 - RNA, 20 nt, Human
gaggggccuggcagccgugc

SEQ ID NO: 1634355 - RNA, 18 nt, Human
gaggggccuggcagccgu

SEQ ID NO: 1634356 - RNA, 14 nt, Human
gaggggccuggcag

SEQ ID NO: 1634357 - RNA, 13 nt, Human
gaggggccuggca

SEQ ID NO: 1634358 - RNA, 15 nt, Human
gagggagggcuccag

SEQ ID NO: 1634359 - RNA, 15 nt, Human
gagggagggagggcu

SEQ ID NO: 1634360 - RNA, 14 nt, Human
gagggagggagggc

SEQ ID NO: 1634361 - RNA, 13 nt, Human
gaggccagccuug

SEQ ID NO: 1634362 - RNA, 12 nt, Human
gaggccagccuu

SEQ ID NO: 1634363 - RNA, 22 nt, Human
gaggcagccccauucugccugc

SEQ ID NO: 1634364 - RNA, 18 nt, Human
gaggcagccccauucugc

SEQ ID NO: 1634365 - RNA, 23 nt, Human
gaggcagccccauucugccugcc

SEQ ID NO: 1634366 - RNA, 13 nt, Human
gaggcagccccau

SEQ ID NO: 1634367 - RNA, 23 nt, Human
gaggaguuugggguaugggagag

SEQ ID NO: 1634368 - RNA, 16 nt, Human
gaggauugcuugagcu

SEQ ID NO: 1634369 - RNA, 20 nt, Human
gaggauguucugggacacag

SEQ ID NO: 1634370 - RNA, 17 nt, Human
gaggauguucugggaca

SEQ ID NO: 1634371 - RNA, 12 nt, Human
gaggauguucug

SEQ ID NO: 1634372 - RNA, 14 nt, Human
gaggaauccagacc

SEQ ID NO: 1634373 - RNA, 22 nt, Human
gaggaaggaaacccagcucugg

SEQ ID NO: 1634374 - RNA, 21 nt, Human
gagcuucuguugcugccucau

SEQ ID NO: 1634375 - RNA, 22 nt, Human
gagcuugaaacccguggcgcuu

SEQ ID NO: 1634376 - RNA, 15 nt, Human
gaggaauccagaccc

SEQ ID NO: 1634377 - RNA, 14 nt, Human
gaggaauucuguau

SEQ ID NO: 1634378 - RNA, 17 nt, Human
gaggaauucuguauaga

SEQ ID NO: 1634379 - RNA, 16 nt, Human
gaggaauucuguauag

SEQ ID NO: 1634380 - RNA, 23 nt, Human
gaggacagggaggugaccccagg

SEQ ID NO: 1634381 - RNA, 22 nt, Human
gaggacagggaggugaccccag

SEQ ID NO: 1634382 - RNA, 13 nt, Human
gaggacagggagg

SEQ ID NO: 1634383 - RNA, 14 nt, Human
gaucuuuaaaauac

SEQ ID NO: 1634384 - RNA, 16 nt, Human
gaucuuugcagacagg

SEQ ID NO: 1634385 - RNA, 15 nt, Human
gaugaaaaaauaaca

SEQ ID NO: 1634386 - RNA, 17 nt, Human
gaucuuugcagacaggc

SEQ ID NO: 1634387 - RNA, 17 nt, Human
gauccuuuuggagucag

SEQ ID NO: 1634388 - RNA, 15 nt, Human
gauccuuuuggaguc

SEQ ID NO: 1634389 - RNA, 19 nt, Human
gauccugagccagauuuca

SEQ ID NO: 1634390 - RNA, 15 nt, Human
gauccugagccagau

SEQ ID NO: 1634391 - RNA, 14 nt, Human
gauccugagccaga

SEQ ID NO: 1634392 - RNA, 21 nt, Human
gauccucccaccucagccucc

SEQ ID NO: 1634393 - RNA, 20 nt, Human
gauccucccaccucagccuc

SEQ ID NO: 1634394 - RNA, 19 nt, Human
gauccucccaccucagccu

SEQ ID NO: 1634395 - RNA, 12 nt, Human
gauccuccaggu

SEQ ID NO: 1634396 - RNA, 14 nt, Human
gaucacgccacugc

SEQ ID NO: 1634397 - RNA, 13 nt, Human
gaucacgccacug

SEQ ID NO: 1634398 - RNA, 23 nt, Human
gaucaaccccuucgcuccugugu

SEQ ID NO: 1634399 - RNA, 18 nt, Human
gauccuaguuccaccauc

SEQ ID NO: 1634400 - RNA, 15 nt, Human
gaucacgccacugca

SEQ ID NO: 1634401 - RNA, 11 nt, Human
gauccuccagg

SEQ ID NO: 1634402 - RNA, 16 nt, Human
gaucacgccacugcac

SEQ ID NO: 1634403 - RNA, 16 nt, Human
gaugggaaagcauugu

SEQ ID NO: 1634404 - RNA, 22 nt, Human
gaugggcaacccccagccugcu

SEQ ID NO: 1634405 - RNA, 14 nt, Human
gaugccugguggca

SEQ ID NO: 1634406 - RNA, 21 nt, Human
gaugccuggcgggguggggug

SEQ ID NO: 1634407 - RNA, 18 nt, Human
gaugcaguucugaagaag

SEQ ID NO: 1634408 - RNA, 21 nt, Human
gaugcacagaguuguuacauu

SEQ ID NO: 1634409 - RNA, 23 nt, Human
gaugagaaauaaaguuucuguug

SEQ ID NO: 1634410 - RNA, 22 nt, Human
gaugagaaagguugaagcacca

SEQ ID NO: 1634411 - RNA, 11 nt, Human
gaugagaaagg

SEQ ID NO: 1634412 - RNA, 14 nt, Human
gaugacuauggaaa

SEQ ID NO: 1634413 - RNA, 13 nt, Human
gauugugccccug

SEQ ID NO: 1634414 - RNA, 20 nt, Human
gauuguccccgacccuugcc

SEQ ID NO: 1634415 - RNA, 15 nt, Human
gauuguccccgaccc

SEQ ID NO: 1634416 - RNA, 23 nt, Human
gauugacgggacuguugguauug

SEQ ID NO: 1634417 - RNA, 22 nt, Human
gauucccaagcucugcuccucu

SEQ ID NO: 1634418 - RNA, 12 nt, Human
gauucagacagc

SEQ ID NO: 1634419 - RNA, 19 nt, Human
gauguugaaaaaguucugc

SEQ ID NO: 1634420 - RNA, 21 nt, Human
gauguucuuucacccuuuucu

SEQ ID NO: 1634421 - RNA, 14 nt, Human
gauguuuuccauga

SEQ ID NO: 1634422 - RNA, 23 nt, Human
gauguuuuccaugaguccccugu

SEQ ID NO: 1634423 - RNA, 15 nt, Human
gauguuuuccaugag

SEQ ID NO: 1634424 - RNA, 12 nt, Human
gauuaaauucuu

SEQ ID NO: 1634425 - RNA, 19 nt, Human
gauuaaauucuugcaaagu

SEQ ID NO: 1634426 - RNA, 21 nt, Human
gauuaaccacuucagcugacu

SEQ ID NO: 1634427 - RNA, 19 nt, Human
gauuaaccacuucagcuga

SEQ ID NO: 1634428 - RNA, 18 nt, Human
gauuaaccacuucagcug

SEQ ID NO: 1634429 - RNA, 19 nt, Human
gauucaacagguuuuccug

SEQ ID NO: 1634430 - RNA, 20 nt, Human
gauggugcaaugaccuuuca

SEQ ID NO: 1634431 - RNA, 23 nt, Human
gauggugcaaugaccuuucaaua

SEQ ID NO: 1634432 - RNA, 19 nt, Human
gaugugcuuguuaacugag

SEQ ID NO: 1634433 - RNA, 16 nt, Human
gauguucugggacaca

SEQ ID NO: 1634434 - RNA, 20 nt, Human
gaugugcuuguuaacugagu

SEQ ID NO: 1634435 - RNA, 14 nt, Human
gauagaggaagccu

SEQ ID NO: 1634436 - RNA, 13 nt, Human
gauacaaugcugu

SEQ ID NO: 1634437 - RNA, 18 nt, Human
gauacaaugcugugcccu

SEQ ID NO: 1634438 - RNA, 18 nt, Human
gauagcacagacccugcc

SEQ ID NO: 1634439 - RNA, 17 nt, Human
gauagcacagacccugc

SEQ ID NO: 1634440 - RNA, 22 nt, Human
gauagaggaagccugauuaaag

SEQ ID NO: 1634441 - RNA, 21 nt, Human
gauagaggaagccugauuaaa

SEQ ID NO: 1634442 - RNA, 15 nt, Human
gauagaggaagccug

SEQ ID NO: 1634443 - RNA, 23 nt, Human
gauauaugcucugcauguuacau

SEQ ID NO: 1634444 - RNA, 22 nt, Human
gaucaaccccuucgcuccugug

SEQ ID NO: 1634445 - RNA, 20 nt, Human
gauagcacagacccugcccu

SEQ ID NO: 1634446 - RNA, 19 nt, Human
gauagcacagacccugccc

SEQ ID NO: 1634447 - RNA, 12 nt, Human
gauagccaaggc

SEQ ID NO: 1634448 - RNA, 14 nt, Human
gauagccaaggcca

SEQ ID NO: 1634449 - RNA, 13 nt, Human
gauagccaaggcc

SEQ ID NO: 1634450 - RNA, 21 nt, Human
gauauaaguguguguuuuuca

SEQ ID NO: 1634451 - RNA, 19 nt, Human
gagugaacaaauuuacaga

SEQ ID NO: 1634452 - RNA, 23 nt, Human
gagugaacaaauuuacagagaca

SEQ ID NO: 1634453 - RNA, 22 nt, Human
gagugaacaaauuuacagagac

SEQ ID NO: 1634454 - RNA, 23 nt, Human
gagugggggaucacagccucuga

SEQ ID NO: 1634455 - RNA, 12 nt, Human
gagugggcccaa

SEQ ID NO: 1634456 - RNA, 15 nt, Human
gaguggcuccucccg

SEQ ID NO: 1634457 - RNA, 13 nt, Human
gaguggcuccucc

SEQ ID NO: 1634458 - RNA, 21 nt, Human
gaguugaaaaucuuauaauuu

SEQ ID NO: 1634459 - RNA, 14 nt, Human
gaguugaagacaga

SEQ ID NO: 1634460 - RNA, 23 nt, Human
gaguucaucuugaauuguaagga

SEQ ID NO: 1634461 - RNA, 17 nt, Human
gagugugccugaagucc

SEQ ID NO: 1634462 - RNA, 14 nt, Human
gaguagcugggacu

SEQ ID NO: 1634463 - RNA, 12 nt, Human
gaguagcuggga

SEQ ID NO: 1634464 - RNA, 12 nt, Human
gaguccccuguu

SEQ ID NO: 1634465 - RNA, 19 nt, Human
gagucccaggcugagccuc

SEQ ID NO: 1634466 - RNA, 18 nt, Human
gagucccaggcugagccu

SEQ ID NO: 1634467 - RNA, 23 nt, Human
gaguccccuguuuguuucugaaa

SEQ ID NO: 1634468 - RNA, 14 nt, Human
gaguccccuguuug

SEQ ID NO: 1634469 - RNA, 17 nt, Human
gagucgaggacagggag

SEQ ID NO: 1634470 - RNA, 21 nt, Human
gagucucacuguugcccaggc

SEQ ID NO: 1634471 - RNA, 20 nt, Human
gagucucacuguugcccagg

SEQ ID NO: 1634472 - RNA, 19 nt, Human
gagucucacuguugcccag

SEQ ID NO: 1634473 - RNA, 23 nt, Human
gagucucacuguugcccaggcug

SEQ ID NO: 1634474 - RNA, 22 nt, Human
gagucucacuguugcccaggcu

SEQ ID NO: 1634475 - RNA, 12 nt, Human
gagucucuucuc

SEQ ID NO: 1634476 - RNA, 23 nt, Human
gagucucgcuauugucaccaggg

SEQ ID NO: 1634477 - RNA, 21 nt, Human
gagucugaaggcuggguucug

SEQ ID NO: 1634478 - RNA, 18 nt, Human
gagucucuucuccacugg

SEQ ID NO: 1634479 - RNA, 17 nt, Human
gagucucuucuccacug

SEQ ID NO: 1634480 - RNA, 16 nt, Human
gagucucuucuccacu

SEQ ID NO: 1634481 - RNA, 15 nt, Human
gagucucuucuccac

SEQ ID NO: 1634482 - RNA, 14 nt, Human
gagucucuucucca

SEQ ID NO: 1634483 - RNA, 18 nt, Human
gaggugggauccuccagg

SEQ ID NO: 1634484 - RNA, 22 nt, Human
gaggugggauccuccaggugca

SEQ ID NO: 1634485 - RNA, 21 nt, Human
gaggugggauccuccaggugc

SEQ ID NO: 1634486 - RNA, 15 nt, Human
gaggggggagguggg

SEQ ID NO: 1634487 - RNA, 15 nt, Human
gaggggguggccucc

SEQ ID NO: 1634488 - RNA, 18 nt, Human
gagguccacaacacacag

SEQ ID NO: 1634489 - RNA, 22 nt, Human
gaggggggaggugggauccucc

SEQ ID NO: 1634490 - RNA, 19 nt, Human
gaguacuacaguccuccca

SEQ ID NO: 1634491 - RNA, 18 nt, Human
gaguacuacaguccuccc

SEQ ID NO: 1634492 - RNA, 17 nt, Human
gaguacguugugcauuu

SEQ ID NO: 1634493 - RNA, 18 nt, Human
gaguacguugugcauuug

SEQ ID NO: 1634494 - RNA, 15 nt, Human
gaguacuacaguccu

SEQ ID NO: 1634495 - RNA, 20 nt, Human
gaguacguugugcauuuggu

SEQ ID NO: 1634496 - RNA, 14 nt, Human
gagguucccuuuga

SEQ ID NO: 1634497 - RNA, 19 nt, Human
gagguucaaagauauuuug

SEQ ID NO: 1634498 - RNA, 19 nt, Human
gagguuuuaaaaaaauccc

SEQ ID NO: 1634499 - RNA, 16 nt, Human
gaguacguugugcauu

SEQ ID NO: 1634500 - RNA, 21 nt, Human
gcaguugaaaagacuccaaag

SEQ ID NO: 1634501 - RNA, 19 nt, Human
gcauacguacacauuuuau

SEQ ID NO: 1634502 - RNA, 19 nt, Human
gcaguugaaaagacuccaa

SEQ ID NO: 1634503 - RNA, 16 nt, Human
gcaguugaaaagacuc

SEQ ID NO: 1634504 - RNA, 22 nt, Human
gcaguggugguuuucuguucuu

SEQ ID NO: 1634505 - RNA, 19 nt, Human
gcaguucagagcugcccuc

SEQ ID NO: 1634506 - RNA, 20 nt, Human
gcaguucagagcugcccucu

SEQ ID NO: 1634507 - RNA, 22 nt, Human
gcaguucagagcugcccucucc

SEQ ID NO: 1634508 - RNA, 23 nt, Human
gcaguucagagcugcccucuccu

SEQ ID NO: 1634509 - RNA, 20 nt, Human
gcaguggugguuuucuguuc

SEQ ID NO: 1634510 - RNA, 21 nt, Human
gcaguggugguuuucuguucu

SEQ ID NO: 1634511 - RNA, 21 nt, Human
gcaguggugcgaucuggguuc

SEQ ID NO: 1634512 - RNA, 20 nt, Human
gcaguggugcgaucuggguu

SEQ ID NO: 1634513 - RNA, 22 nt, Human
gcaguggugcgaucuggguuca

SEQ ID NO: 1634514 - RNA, 19 nt, Human
gcaguggugguuuucuguu

SEQ ID NO: 1634515 - RNA, 19 nt, Human
gcaguggugcgaucugggu

SEQ ID NO: 1634516 - RNA, 18 nt, Human
gcaguggugcgaucuggg

SEQ ID NO: 1634517 - RNA, 12 nt, Human
gcagugggagcu

SEQ ID NO: 1634518 - RNA, 11 nt, Human
gcagugggagc

SEQ ID NO: 1634519 - RNA, 21 nt, Human
gcagugggacagggcauggcc

SEQ ID NO: 1634520 - RNA, 23 nt, Human
gcaggucccuaauaaagcugugu

SEQ ID NO: 1634521 - RNA, 21 nt, Human
gcaggucccuaauaaagcugu

SEQ ID NO: 1634522 - RNA, 20 nt, Human
gcaggucccuaauaaagcug

SEQ ID NO: 1634523 - RNA, 19 nt, Human
gcaggucccuaauaaagcu

SEQ ID NO: 1634524 - RNA, 18 nt, Human
gcaggucccuaauaaagc

SEQ ID NO: 1634525 - RNA, 17 nt, Human
gcaggucccuaauaaag

SEQ ID NO: 1634526 - RNA, 16 nt, Human
gcaggucccuaauaaa

SEQ ID NO: 1634527 - RNA, 22 nt, Human
gcaggggaggguagagcggaga

SEQ ID NO: 1634528 - RNA, 16 nt, Human
gcagggucucacucug

SEQ ID NO: 1634529 - RNA, 19 nt, Human
gcaggguccuagaaauucc

SEQ ID NO: 1634530 - RNA, 15 nt, Human
gcaggucccuaauaa

SEQ ID NO: 1634531 - RNA, 14 nt, Human
gcaggucccuaaua

SEQ ID NO: 1634532 - RNA, 18 nt, Human
gcaggcagccaggccaca

SEQ ID NO: 1634533 - RNA, 22 nt, Human
gcaucagcugcugaaacaacaa

SEQ ID NO: 1634534 - RNA, 23 nt, Human
gcaucagcugcugaaacaacaaa

SEQ ID NO: 1634535 - RNA, 12 nt, Human
gcaucaggccag

SEQ ID NO: 1634536 - RNA, 13 nt, Human
gcaucaggccagg

SEQ ID NO: 1634537 - RNA, 18 nt, Human
gcaucaggccaggcccuc

SEQ ID NO: 1634538 - RNA, 23 nt, Human
gcaucaggccaggcccucugccc

SEQ ID NO: 1634539 - RNA, 15 nt, Human
gcaucagugcccucc

SEQ ID NO: 1634540 - RNA, 23 nt, Human
gcaucagugcccuccaggauaga

SEQ ID NO: 1634541 - RNA, 14 nt, Human
gcaucucagcccac

SEQ ID NO: 1634542 - RNA, 13 nt, Human
gcaucucagccca

SEQ ID NO: 1634543 - RNA, 12 nt, Human
gcaucucagccc

SEQ ID NO: 1634544 - RNA, 22 nt, Human
gcaugacacgaauauugcugau

SEQ ID NO: 1634545 - RNA, 21 nt, Human
gcaugacacgaauauugcuga

SEQ ID NO: 1634546 - RNA, 23 nt, Human
gcaugaaguaauaugcacacauu

SEQ ID NO: 1634547 - RNA, 20 nt, Human
gcaugaaguaauaugcacac

SEQ ID NO: 1634548 - RNA, 21 nt, Human
gcaugaaguaauaugcacaca

SEQ ID NO: 1634549 - RNA, 22 nt, Human
gcaugaaguaauaugcacacau

SEQ ID NO: 1634550 - RNA, 15 nt, Human
gcaucucagcccaca

SEQ ID NO: 1634551 - RNA, 14 nt, Human
gcaugccuggaugg

SEQ ID NO: 1634552 - RNA, 14 nt, Human
gcauguucucugag

SEQ ID NO: 1634553 - RNA, 13 nt, Human
gcauguuacauaa

SEQ ID NO: 1634554 - RNA, 15 nt, Human
gcaugccuggauggg

SEQ ID NO: 1634555 - RNA, 22 nt, Human
gcauuaucuagauacuguauca

SEQ ID NO: 1634556 - RNA, 24 nt, Human
gcauuaucuagauacuguaucaug

SEQ ID NO: 1634557 - RNA, 21 nt, Human
gcauuccccaggaggccagcc

SEQ ID NO: 1634558 - RNA, 20 nt, Human
gcauuccccaggaggccagc

SEQ ID NO: 1634559 - RNA, 19 nt, Human
gcauuccccaggaggccag

SEQ ID NO: 1634560 - RNA, 18 nt, Human
gcauuccccaggaggcca

SEQ ID NO: 1634561 - RNA, 17 nt, Human
gcauuccccaggaggcc

SEQ ID NO: 1634562 - RNA, 16 nt, Human
gcauuccccaggaggc

SEQ ID NO: 1634563 - RNA, 15 nt, Human
gcauuccccaggagg

SEQ ID NO: 1634564 - RNA, 14 nt, Human
gcauuccccaggag

SEQ ID NO: 1634565 - RNA, 22 nt, Human
gcauuccccaggaggccagccu

SEQ ID NO: 1634566 - RNA, 18 nt, Human
gcauuugaggucuguucu

SEQ ID NO: 1634567 - RNA, 18 nt, Human
gcacagccucuuagaugc

SEQ ID NO: 1634568 - RNA, 23 nt, Human
gcacagcuucauuuccugugucu

SEQ ID NO: 1634569 - RNA, 16 nt, Human
gcacagggcaguggga

SEQ ID NO: 1634570 - RNA, 15 nt, Human
gcacagccucuuaga

SEQ ID NO: 1634571 - RNA, 20 nt, Human
gauugugucucuugguccug

SEQ ID NO: 1634572 - RNA, 15 nt, Human
gcaccaucucuccuc

SEQ ID NO: 1634573 - RNA, 14 nt, Human
gcaccaucucuccu

SEQ ID NO: 1634574 - RNA, 13 nt, Human
gcaccagcagccu

SEQ ID NO: 1634575 - RNA, 14 nt, Human
gcaccagcagccug

SEQ ID NO: 1634576 - RNA, 17 nt, Human
gcaccaucucuccuccu

SEQ ID NO: 1634577 - RNA, 20 nt, Human
gcacuaaggugugcucugau

SEQ ID NO: 1634578 - RNA, 14 nt, Human
gcacgugugugcac

SEQ ID NO: 1634579 - RNA, 19 nt, Human
gcacccucaggcagguggg

SEQ ID NO: 1634580 - RNA, 16 nt, Human
gcacccucaggcaggu

SEQ ID NO: 1634581 - RNA, 15 nt, Human
gcacugcuuccagug

SEQ ID NO: 1634582 - RNA, 14 nt, Human
gcacugcuuccagu

SEQ ID NO: 1634583 - RNA, 13 nt, Human
gcacugcuuccag

SEQ ID NO: 1634584 - RNA, 12 nt, Human
gcacugcuucca

SEQ ID NO: 1634585 - RNA, 15 nt, Human
gcacuauaauguaag

SEQ ID NO: 1634586 - RNA, 14 nt, Human
gcacuauaauguaa

SEQ ID NO: 1634587 - RNA, 20 nt, Human
gcacuauaauguaagcucua

SEQ ID NO: 1634588 - RNA, 22 nt, Human
gcacuauaauguaagcucuacu

SEQ ID NO: 1634589 - RNA, 14 nt, Human
gcacugggcuuggg

SEQ ID NO: 1634590 - RNA, 19 nt, Human
gcacuguuuuauuuuaauu

SEQ ID NO: 1634591 - RNA, 12 nt, Human
gcacugggcuug

SEQ ID NO: 1634592 - RNA, 18 nt, Human
gcagagguugcagugagc

SEQ ID NO: 1634593 - RNA, 21 nt, Human
gcagagguccacaacacacag

SEQ ID NO: 1634594 - RNA, 23 nt, Human
gcagagguugcagugagccgaga

SEQ ID NO: 1634595 - RNA, 18 nt, Human
gcagauggagaccccuug

SEQ ID NO: 1634596 - RNA, 18 nt, Human
gcagauguccuugaugcu

SEQ ID NO: 1634597 - RNA, 16 nt, Human
gcagauuauucacuga

SEQ ID NO: 1634598 - RNA, 13 nt, Human
gcagauuauucac

SEQ ID NO: 1634599 - RNA, 22 nt, Human
gcagacucuacagaggccaugg

SEQ ID NO: 1634600 - RNA, 19 nt, Human
gcagacucuacagaggcca

SEQ ID NO: 1634601 - RNA, 18 nt, Human
gcagacucuacagaggcc

SEQ ID NO: 1634602 - RNA, 17 nt, Human
gcagacucuacagaggc

SEQ ID NO: 1634603 - RNA, 16 nt, Human
gcacuugcagacucua

SEQ ID NO: 1634604 - RNA, 14 nt, Human
gcacuugcagacuc

SEQ ID NO: 1634605 - RNA, 22 nt, Human
gcacuucgggaggucgaggcag

SEQ ID NO: 1634606 - RNA, 21 nt, Human
gcagagaccaucccugaaggc

SEQ ID NO: 1634607 - RNA, 20 nt, Human
gcagagaccaucccugaagg

SEQ ID NO: 1634608 - RNA, 22 nt, Human
gcagagaccaucccugaaggcc

SEQ ID NO: 1634609 - RNA, 19 nt, Human
gcagccucacaguccuuac

SEQ ID NO: 1634610 - RNA, 17 nt, Human
gcagccucacaguccuu

SEQ ID NO: 1634611 - RNA, 15 nt, Human
gcagccucacagucc

SEQ ID NO: 1634612 - RNA, 19 nt, Human
gcagcagggagggcuucug

SEQ ID NO: 1634613 - RNA, 18 nt, Human
gcagcagggagggcuucu

SEQ ID NO: 1634614 - RNA, 20 nt, Human
gcagcagggagggcuucugc

SEQ ID NO: 1634615 - RNA, 14 nt, Human
gcagcccugcuuug

SEQ ID NO: 1634616 - RNA, 24 nt, Human
gcagcccugcuuugggcugcccug

SEQ ID NO: 1634617 - RNA, 14 nt, Human
gcagcucagagagg

SEQ ID NO: 1634618 - RNA, 21 nt, Human
gcagcucaccucucccuugga

SEQ ID NO: 1634619 - RNA, 20 nt, Human
gcagcucaccucucccuugg

SEQ ID NO: 1634620 - RNA, 17 nt, Human
gcagcucaccucucccu

SEQ ID NO: 1634621 - RNA, 16 nt, Human
gcagcucaccucuccc

SEQ ID NO: 1634622 - RNA, 19 nt, Human
gcagcucagagaggguggg

SEQ ID NO: 1634623 - RNA, 18 nt, Human
gcagcucagagagggugg

SEQ ID NO: 1634624 - RNA, 19 nt, Human
gccagauuuuccugaaaac

SEQ ID NO: 1634625 - RNA, 14 nt, Human
gccaggcugcucuu

SEQ ID NO: 1634626 - RNA, 13 nt, Human
gccaggcugcucu

SEQ ID NO: 1634627 - RNA, 13 nt, Human
gccaggcuggguc

SEQ ID NO: 1634628 - RNA, 22 nt, Human
gccaggcugcucuugaacuccu

SEQ ID NO: 1634629 - RNA, 21 nt, Human
gccagauuucacucuccuugg

SEQ ID NO: 1634630 - RNA, 18 nt, Human
gccagauuucacucuccu

SEQ ID NO: 1634631 - RNA, 16 nt, Human
gccagauuucacucuc

SEQ ID NO: 1634632 - RNA, 23 nt, Human
gccagggacagaggggguggccu

SEQ ID NO: 1634633 - RNA, 18 nt, Human
gccagggacagagggggu

SEQ ID NO: 1634634 - RNA, 16 nt, Human
gccagggacagagggg

SEQ ID NO: 1634635 - RNA, 13 nt, Human
gccagggacagag

SEQ ID NO: 1634636 - RNA, 22 nt, Human
gccaggcuggucucgaacuccu

SEQ ID NO: 1634637 - RNA, 18 nt, Human
gccagucaccccggccac

SEQ ID NO: 1634638 - RNA, 17 nt, Human
gccagucaccccggcca

SEQ ID NO: 1634639 - RNA, 20 nt, Human
gccagucaccccggccaccu

SEQ ID NO: 1634640 - RNA, 21 nt, Human
gccagucaccccggccaccug

SEQ ID NO: 1634641 - RNA, 17 nt, Human
gccagguuuuuggucug

SEQ ID NO: 1634642 - RNA, 12 nt, Human
gccaguaaaugg

SEQ ID NO: 1634643 - RNA, 23 nt, Human
gccaugggacagggaggacgcuc

SEQ ID NO: 1634644 - RNA, 19 nt, Human
gccaugggcacugugggua

SEQ ID NO: 1634645 - RNA, 15 nt, Human
gcccaaagaugcagc

SEQ ID NO: 1634646 - RNA, 14 nt, Human
gcccaaccugcucu

SEQ ID NO: 1634647 - RNA, 21 nt, Human
gccaucucaccuccugcuggg

SEQ ID NO: 1634648 - RNA, 20 nt, Human
gccaucucaccuccugcugg

SEQ ID NO: 1634649 - RNA, 19 nt, Human
gccaucucaccuccugcug

SEQ ID NO: 1634650 - RNA, 20 nt, Human
gccaugaggaacaaggcaag

SEQ ID NO: 1634651 - RNA, 18 nt, Human
gccaugaggaacaaggca

SEQ ID NO: 1634652 - RNA, 18 nt, Human
gccaugccagcuuaucuc

SEQ ID NO: 1634653 - RNA, 13 nt, Human
gccaugccagcuu

SEQ ID NO: 1634654 - RNA, 19 nt, Human
gccaugccagcuuaucuca

SEQ ID NO: 1634655 - RNA, 20 nt, Human
gcccagucuggaaugcagug

SEQ ID NO: 1634656 - RNA, 19 nt, Human
gcccagucuggaaugcagu

SEQ ID NO: 1634657 - RNA, 21 nt, Human
gcccaggcuuagucacugaga

SEQ ID NO: 1634658 - RNA, 19 nt, Human
gcccaggcuuagucacuga

SEQ ID NO: 1634659 - RNA, 23 nt, Human
gcccaggcuuagucacugagaca

SEQ ID NO: 1634660 - RNA, 21 nt, Human
gcccaggaaaggcuccaggag

SEQ ID NO: 1634661 - RNA, 20 nt, Human
gcccaggaaaggcuccagga

SEQ ID NO: 1634662 - RNA, 19 nt, Human
gcccaggaaaggcuccagg

SEQ ID NO: 1634663 - RNA, 18 nt, Human
gcccaggaaaggcuccag

SEQ ID NO: 1634664 - RNA, 20 nt, Human
gcccaggcuggcgugcagug

SEQ ID NO: 1634665 - RNA, 19 nt, Human
gcccaggcuggcgugcagu

SEQ ID NO: 1634666 - RNA, 22 nt, Human
gcccaggcuggcgugcaguggu

SEQ ID NO: 1634667 - RNA, 17 nt, Human
gcccagccccuucugac

SEQ ID NO: 1634668 - RNA, 16 nt, Human
gcccagccccuucuga

SEQ ID NO: 1634669 - RNA, 14 nt, Human
gcccagccccuucu

SEQ ID NO: 1634670 - RNA, 13 nt, Human
gcccagccccuuc

SEQ ID NO: 1634671 - RNA, 24 nt, Human
gcccagccccuucugacccaugcu

SEQ ID NO: 1634672 - RNA, 20 nt, Human
gcccagccccuucugaccca

SEQ ID NO: 1634673 - RNA, 21 nt, Human
gcccagcuugaaaccuucacu

SEQ ID NO: 1634674 - RNA, 12 nt, Human
gcccagccccuu

SEQ ID NO: 1634675 - RNA, 11 nt, Human
gcccagccccu

SEQ ID NO: 1634676 - RNA, 9 nt, Human
gcccagccc

SEQ ID NO: 1634677 - RNA, 21 nt, Human
gcccagagggccugcaaggga

SEQ ID NO: 1634678 - RNA, 20 nt, Human
gcccagagggccugcaaggg

SEQ ID NO: 1634679 - RNA, 22 nt, Human
gcccagagggccugcaagggag

SEQ ID NO: 1634680 - RNA, 19 nt, Human
gcccagagggccugcaagg

SEQ ID NO: 1634681 - RNA, 18 nt, Human
gcccagagggccugcaag

SEQ ID NO: 1634682 - RNA, 15 nt, Human
gcccagagggccugc

SEQ ID NO: 1634683 - RNA, 14 nt, Human
gcccagagggccug

SEQ ID NO: 1634684 - RNA, 12 nt, Human
gcccagagggcc

SEQ ID NO: 1634685 - RNA, 15 nt, Human
gcccagagagggugg

SEQ ID NO: 1634686 - RNA, 21 nt, Human
gcccaaugcacuuuguucugg

SEQ ID NO: 1634687 - RNA, 18 nt, Human
gccagacuggcacaguuu

SEQ ID NO: 1634688 - RNA, 15 nt, Human
gccagacuggcacag

SEQ ID NO: 1634689 - RNA, 20 nt, Human
gccacuauuguuagucucuu

SEQ ID NO: 1634690 - RNA, 19 nt, Human
gccagacuggcacaguuuu

SEQ ID NO: 1634691 - RNA, 16 nt, Human
gccagagacacaagcc

SEQ ID NO: 1634692 - RNA, 19 nt, Human
gccagagacacaagccuuc

SEQ ID NO: 1634693 - RNA, 17 nt, Human
gccagagacacaagccu

SEQ ID NO: 1634694 - RNA, 10 nt, Human
gccagaggag

SEQ ID NO: 1634695 - RNA, 20 nt, Human
gccagagacacaagccuucg

SEQ ID NO: 1634696 - RNA, 18 nt, Human
gccagaugcaccagcccu

SEQ ID NO: 1634697 - RNA, 17 nt, Human
gccagaugcaccagccc

SEQ ID NO: 1634698 - RNA, 16 nt, Human
gccagaugcaccagcc

SEQ ID NO: 1634699 - RNA, 23 nt, Human
gccagagggagugacagaggcag

SEQ ID NO: 1634700 - RNA, 22 nt, Human
gccagagggagugacagaggca

SEQ ID NO: 1634701 - RNA, 21 nt, Human
gccagagggagugacagaggc

SEQ ID NO: 1634702 - RNA, 22 nt, Human
gccagaggagagaggacccccu

SEQ ID NO: 1634703 - RNA, 19 nt, Human
gccagaggagagaggaccc

SEQ ID NO: 1634704 - RNA, 17 nt, Human
gccagaggagagaggac

SEQ ID NO: 1634705 - RNA, 15 nt, Human
gccagaggagagagg

SEQ ID NO: 1634706 - RNA, 13 nt, Human
gccagaggagaga

SEQ ID NO: 1634707 - RNA, 12 nt, Human
gccagaggagag

SEQ ID NO: 1634708 - RNA, 17 nt, Human
gccaccugccuguuggg

SEQ ID NO: 1634709 - RNA, 22 nt, Human
gccaccgugccuggccacgccc

SEQ ID NO: 1634710 - RNA, 17 nt, Human
gccaccgugccuggcca

SEQ ID NO: 1634711 - RNA, 18 nt, Human
gccacggccaggccagag

SEQ ID NO: 1634712 - RNA, 20 nt, Human
gccacgcccaacuaauuuuu

SEQ ID NO: 1634713 - RNA, 19 nt, Human
gccacggccaggccagagg

SEQ ID NO: 1634714 - RNA, 20 nt, Human
gccaccugcggugcuaucuc

SEQ ID NO: 1634715 - RNA, 14 nt, Human
gccaccugcggugc

SEQ ID NO: 1634716 - RNA, 22 nt, Human
gccaccugcggugcuaucuccc

SEQ ID NO: 1634717 - RNA, 11 nt, Human
gccaccugggu

SEQ ID NO: 1634718 - RNA, 21 nt, Human
gccaaggcugggggaagaagc

SEQ ID NO: 1634719 - RNA, 12 nt, Human
gcauuugugaaa

SEQ ID NO: 1634720 - RNA, 21 nt, Human
gcauuugaggucuguucuuuc

SEQ ID NO: 1634721 - RNA, 19 nt, Human
gcauuugaggucuguucuu

SEQ ID NO: 1634722 - RNA, 20 nt, Human
gcauuugaggucuguucuuu

SEQ ID NO: 1634723 - RNA, 22 nt, Human
gcauuuggugguuucagaaaug

SEQ ID NO: 1634724 - RNA, 23 nt, Human
gcauuuggugguuucagaaaugu

SEQ ID NO: 1634725 - RNA, 23 nt, Human
gccaaggugggaggauugcuuga

SEQ ID NO: 1634726 - RNA, 15 nt, Human
gccaaggugggagga

SEQ ID NO: 1634727 - RNA, 14 nt, Human
gccaaggugggagg

SEQ ID NO: 1634728 - RNA, 21 nt, Human
gccaauggagacugucucaag

SEQ ID NO: 1634729 - RNA, 19 nt, Human
gccaauggagacugucuca

SEQ ID NO: 1634730 - RNA, 16 nt, Human
gccaauggagacuguc

SEQ ID NO: 1634731 - RNA, 20 nt, Human
gccaauaauaauaccucccu

SEQ ID NO: 1634732 - RNA, 20 nt, Human
gccacagagaaaguacuucu

SEQ ID NO: 1634733 - RNA, 14 nt, Human
gccacagagaaagu

SEQ ID NO: 1634734 - RNA, 13 nt, Human
gccacagagaaag

SEQ ID NO: 1634735 - RNA, 23 nt, Human
gccacacuucaggcucuucuccu

SEQ ID NO: 1634736 - RNA, 22 nt, Human
gccacacuucaggcucuucucc

SEQ ID NO: 1634737 - RNA, 20 nt, Human
gccacacuucaggcucuucu

SEQ ID NO: 1634738 - RNA, 23 nt, Human
gccacagagaaaguacuucucca

SEQ ID NO: 1634739 - RNA, 22 nt, Human
gccacaagacccuugugguccc

SEQ ID NO: 1634740 - RNA, 16 nt, Human
gccacaagacccuugu

SEQ ID NO: 1634741 - RNA, 15 nt, Human
gcugugucucccuuc

SEQ ID NO: 1634742 - RNA, 16 nt, Human
gcuguguggcagucug

SEQ ID NO: 1634743 - RNA, 16 nt, Human
gcugucccuuuuccuu

SEQ ID NO: 1634744 - RNA, 23 nt, Human
gcugucccuuacgugaguccugg

SEQ ID NO: 1634745 - RNA, 15 nt, Human
gcuggugucaccuga

SEQ ID NO: 1634746 - RNA, 14 nt, Human
gcuggugucaccug

SEQ ID NO: 1634747 - RNA, 21 nt, Human
gcugguguaugugugaaguga

SEQ ID NO: 1634748 - RNA, 17 nt, Human
gcugucagccauuccug

SEQ ID NO: 1634749 - RNA, 16 nt, Human
gcuggugucaccugaa

SEQ ID NO: 1634750 - RNA, 13 nt, Human
gcugucaucucag

SEQ ID NO: 1634751 - RNA, 23 nt, Human
gcuggucccagccagcaguucag

SEQ ID NO: 1634752 - RNA, 14 nt, Human
gcuggucccacuca

SEQ ID NO: 1634753 - RNA, 23 nt, Human
gcuggucucgaacuccugaccuu

SEQ ID NO: 1634754 - RNA, 22 nt, Human
gcuggucucgaacuccugaccu

SEQ ID NO: 1634755 - RNA, 19 nt, Human
gcuggucucgaacuccuga

SEQ ID NO: 1634756 - RNA, 18 nt, Human
gcugggggccucagugcc

SEQ ID NO: 1634757 - RNA, 15 nt, Human
gcugggggccucagu

SEQ ID NO: 1634758 - RNA, 14 nt, Human
gcugggggccucag

SEQ ID NO: 1634759 - RNA, 15 nt, Human
gcuggccuggccccu

SEQ ID NO: 1634760 - RNA, 14 nt, Human
gcuggccuggcccc

SEQ ID NO: 1634761 - RNA, 13 nt, Human
gcuggccuggccc

SEQ ID NO: 1634762 - RNA, 21 nt, Human
gcugggcucccuucccaccuc

SEQ ID NO: 1634763 - RNA, 19 nt, Human
gcugggaugauuggagggg

SEQ ID NO: 1634764 - RNA, 20 nt, Human
gcugggcuucaguggcagcu

SEQ ID NO: 1634765 - RNA, 21 nt, Human
gcugggaugauuggagggggg

SEQ ID NO: 1634766 - RNA, 22 nt, Human
gcugggcuucaguggcagcugc

SEQ ID NO: 1634767 - RNA, 21 nt, Human
gcugggcuucaguggcagcug

SEQ ID NO: 1634768 - RNA, 15 nt, Human
gcuuuuaugugaaac

SEQ ID NO: 1634769 - RNA, 13 nt, Human
gcuuuuaugugaa

SEQ ID NO: 1634770 - RNA, 20 nt, Human
gcuuuguauagaaccucuuu

SEQ ID NO: 1634771 - RNA, 14 nt, Human
gcuuuguauagaac

SEQ ID NO: 1634772 - RNA, 19 nt, Human
gcuuugggcugcccuggug

SEQ ID NO: 1634773 - RNA, 13 nt, Human
gcuuuguauagaa

SEQ ID NO: 1634774 - RNA, 12 nt, Human
gcuuuguauaga

SEQ ID NO: 1634775 - RNA, 19 nt, Human
gcuucuguuuuauaauuuu

SEQ ID NO: 1634776 - RNA, 19 nt, Human
gcuucuguugcugccucau

SEQ ID NO: 1634777 - RNA, 18 nt, Human
gcuucuguugcugccuca

SEQ ID NO: 1634778 - RNA, 17 nt, Human
gcuucuguugcugccuc

SEQ ID NO: 1634779 - RNA, 22 nt, Human
gcuucucacugccaugccagcu

SEQ ID NO: 1634780 - RNA, 13 nt, Human
gcuuaucucaggg

SEQ ID NO: 1634781 - RNA, 20 nt, Human
gcuucaguggcagcugcuuu

SEQ ID NO: 1634782 - RNA, 19 nt, Human
gcuucaguggcagcugcuu

SEQ ID NO: 1634783 - RNA, 23 nt, Human
gcugcccucuccugggcagcugc

SEQ ID NO: 1634784 - RNA, 12 nt, Human
gcugcccugccc

SEQ ID NO: 1634785 - RNA, 14 nt, Human
gcugcccugcccac

SEQ ID NO: 1634786 - RNA, 13 nt, Human
gcugcccugccca

SEQ ID NO: 1634787 - RNA, 13 nt, Human
gcugcccucuccu

SEQ ID NO: 1634788 - RNA, 14 nt, Human
gcugcccucuccug

SEQ ID NO: 1634789 - RNA, 15 nt, Human
gcugcccucuccugg

SEQ ID NO: 1634790 - RNA, 16 nt, Human
gcugcccucuccuggg

SEQ ID NO: 1634791 - RNA, 17 nt, Human
gcugcccucuccugggc

SEQ ID NO: 1634792 - RNA, 18 nt, Human
gcugcccucuccugggca

SEQ ID NO: 1634793 - RNA, 20 nt, Human
gcugcccucuccugggcagc

SEQ ID NO: 1634794 - RNA, 22 nt, Human
gcugcccucuccugggcagcug

SEQ ID NO: 1634795 - RNA, 24 nt, Human
gcugcccugcccaccuggccucug

SEQ ID NO: 1634796 - RNA, 23 nt, Human
gcugcccugcccaccuggccucu

SEQ ID NO: 1634797 - RNA, 22 nt, Human
gcugcccugcccaccuggccuc

SEQ ID NO: 1634798 - RNA, 21 nt, Human
gcugcccugcccaccuggccu

SEQ ID NO: 1634799 - RNA, 20 nt, Human
gcugcccugcccaccuggcc

SEQ ID NO: 1634800 - RNA, 18 nt, Human
gcugcccugcccaccugg

SEQ ID NO: 1634801 - RNA, 16 nt, Human
gcugcccugcccaccu

SEQ ID NO: 1634802 - RNA, 21 nt, Human
gcugcgguccacccaggagcc

SEQ ID NO: 1634803 - RNA, 16 nt, Human
gcugcgguccacccag

SEQ ID NO: 1634804 - RNA, 22 nt, Human
gcugcgguccacccaggagccc

SEQ ID NO: 1634805 - RNA, 15 nt, Human
gcugcgguccaccca

SEQ ID NO: 1634806 - RNA, 14 nt, Human
gcugcgguccaccc

SEQ ID NO: 1634807 - RNA, 19 nt, Human
gcugccuguucagcuccag

SEQ ID NO: 1634808 - RNA, 18 nt, Human
gcugccuguucagcucca

SEQ ID NO: 1634809 - RNA, 15 nt, Human
gcugcccuggugcug

SEQ ID NO: 1634810 - RNA, 14 nt, Human
gcugcccuggugcu

SEQ ID NO: 1634811 - RNA, 13 nt, Human
gcugcccuggugc

SEQ ID NO: 1634812 - RNA, 12 nt, Human
gcugcccuggug

SEQ ID NO: 1634813 - RNA, 22 nt, Human
gcugccuguucagcuccagcuc

SEQ ID NO: 1634814 - RNA, 20 nt, Human
gcugccuguucagcuccagc

SEQ ID NO: 1634815 - RNA, 20 nt, Human
gcugccuuagaaccuuucuu

SEQ ID NO: 1634816 - RNA, 15 nt, Human
gcugccuuagaaccu

SEQ ID NO: 1634817 - RNA, 17 nt, Human
gcugcccuggugcugcc

SEQ ID NO: 1634818 - RNA, 23 nt, Human
gcuggaaaaguauguuagugcaa

SEQ ID NO: 1634819 - RNA, 21 nt, Human
gcuggaaaaguauguuagugc

SEQ ID NO: 1634820 - RNA, 23 nt, Human
gcuggaaugauuucagcucacug

SEQ ID NO: 1634821 - RNA, 22 nt, Human
gcugcuuuugucuaugggacuc

SEQ ID NO: 1634822 - RNA, 15 nt, Human
gcuggaccuugaacu

SEQ ID NO: 1634823 - RNA, 16 nt, Human
gcuggaccuugaacug

SEQ ID NO: 1634824 - RNA, 19 nt, Human
gcuggcccuggcucccaca

SEQ ID NO: 1634825 - RNA, 16 nt, Human
gcuggcccugcccugg

SEQ ID NO: 1634826 - RNA, 15 nt, Human
gcuggcccugcccug

SEQ ID NO: 1634827 - RNA, 14 nt, Human
gcuggcccugcccu

SEQ ID NO: 1634828 - RNA, 12 nt, Human
gcugcccucucc

SEQ ID NO: 1634829 - RNA, 13 nt, Human
gcugccaccugcc

SEQ ID NO: 1634830 - RNA, 12 nt, Human
gcugccaccugc

SEQ ID NO: 1634831 - RNA, 23 nt, Human
gcugccacacuucaggcucuucu

SEQ ID NO: 1634832 - RNA, 22 nt, Human
gcugccacacuucaggcucuuc

SEQ ID NO: 1634833 - RNA, 21 nt, Human
gcugccacacuucaggcucuu

SEQ ID NO: 1634834 - RNA, 18 nt, Human
gcugccacacuucaggcu

SEQ ID NO: 1634835 - RNA, 17 nt, Human
gcugccacacuucaggc

SEQ ID NO: 1634836 - RNA, 15 nt, Human
gcugccacacuucag

SEQ ID NO: 1634837 - RNA, 14 nt, Human
gcugcaguugccag

SEQ ID NO: 1634838 - RNA, 13 nt, Human
gcugcaguugcca

SEQ ID NO: 1634839 - RNA, 17 nt, Human
gcugcaguugccaguca

SEQ ID NO: 1634840 - RNA, 18 nt, Human
gcugcauuuaaaagauac

SEQ ID NO: 1634841 - RNA, 19 nt, Human
gcugcauuuaaaagauaca

SEQ ID NO: 1634842 - RNA, 21 nt, Human
gcugauuaaaccaaggcuaga

SEQ ID NO: 1634843 - RNA, 23 nt, Human
gcugcaaaggguaucaggugcug

SEQ ID NO: 1634844 - RNA, 22 nt, Human
gcugcaaaggguaucaggugcu

SEQ ID NO: 1634845 - RNA, 16 nt, Human
gcugagaggagagaga

SEQ ID NO: 1634846 - RNA, 19 nt, Human
gcugacagacacaggcccg

SEQ ID NO: 1634847 - RNA, 18 nt, Human
gcugacagacacaggccc

SEQ ID NO: 1634848 - RNA, 20 nt, Human
gcugacagacacaggcccgg

SEQ ID NO: 1634849 - RNA, 22 nt, Human
gcugacuguuuucucuugagag

SEQ ID NO: 1634850 - RNA, 21 nt, Human
gcucucaggccagcugcuugg

SEQ ID NO: 1634851 - RNA, 21 nt, Human
gcucuugaacuccugaccuca

SEQ ID NO: 1634852 - RNA, 19 nt, Human
gcucuugaacuccugaccu

SEQ ID NO: 1634853 - RNA, 16 nt, Human
gcucuugaacuccuga

SEQ ID NO: 1634854 - RNA, 14 nt, Human
gcucuugaacuccu

SEQ ID NO: 1634855 - RNA, 19 nt, Human
gcucuugaugccuggcggg

SEQ ID NO: 1634856 - RNA, 19 nt, Human
gcucuuggcagguacucag

SEQ ID NO: 1634857 - RNA, 20 nt, Human
gccugagcgacagugagacu

SEQ ID NO: 1634858 - RNA, 17 nt, Human
gccugagcgacagugag

SEQ ID NO: 1634859 - RNA, 18 nt, Human
gccugaagucacacagug

SEQ ID NO: 1634860 - RNA, 17 nt, Human
gccugaagucacacagu

SEQ ID NO: 1634861 - RNA, 16 nt, Human
gccugaagucacacag

SEQ ID NO: 1634862 - RNA, 22 nt, Human
gcccaguuggguggaugccugg

SEQ ID NO: 1634863 - RNA, 21 nt, Human
gcccaguuggguggaugccug

SEQ ID NO: 1634864 - RNA, 19 nt, Human
gcccaguuggguggaugcc

SEQ ID NO: 1634865 - RNA, 12 nt, Human
gccugagcuggg

SEQ ID NO: 1634866 - RNA, 20 nt, Human
gccuggauggggcugcaccg

SEQ ID NO: 1634867 - RNA, 14 nt, Human
gccuggcacagggc

SEQ ID NO: 1634868 - RNA, 13 nt, Human
gccuggcacaggg

SEQ ID NO: 1634869 - RNA, 18 nt, Human
gccuggauggggcugcac

SEQ ID NO: 1634870 - RNA, 16 nt, Human
gccuggauggggcugc

SEQ ID NO: 1634871 - RNA, 15 nt, Human
gccuguaauccuagc

SEQ ID NO: 1634872 - RNA, 20 nt, Human
gccuguaauccuagcacuuu

SEQ ID NO: 1634873 - RNA, 22 nt, Human
gccuggccagaugcaccagccc

SEQ ID NO: 1634874 - RNA, 21 nt, Human
gccuggccagaugcaccagcc

SEQ ID NO: 1634875 - RNA, 20 nt, Human
gccuggccagaugcaccagc

SEQ ID NO: 1634876 - RNA, 22 nt, Human
gccuggcagccgugccuucagc

SEQ ID NO: 1634877 - RNA, 21 nt, Human
gccuggcagccgugccuucag

SEQ ID NO: 1634878 - RNA, 20 nt, Human
gccuggcagccgugccuuca

SEQ ID NO: 1634879 - RNA, 12 nt, Human
gccuggcagccg

SEQ ID NO: 1634880 - RNA, 19 nt, Human
gccuggcacagggcagugg

SEQ ID NO: 1634881 - RNA, 18 nt, Human
gccuggcacagggcagug

SEQ ID NO: 1634882 - RNA, 14 nt, Human
gccuggccccucag

SEQ ID NO: 1634883 - RNA, 13 nt, Human
gccuggccccuca

SEQ ID NO: 1634884 - RNA, 21 nt, Human
gcgacaaugcaaaccaucauu

SEQ ID NO: 1634885 - RNA, 20 nt, Human
gcgacaaugcaaaccaucau

SEQ ID NO: 1634886 - RNA, 13 nt, Human
gcgacaaugcaaa

SEQ ID NO: 1634887 - RNA, 12 nt, Human
gcgacaaugcaa

SEQ ID NO: 1634888 - RNA, 22 nt, Human
gcgcaggcuggcccugcccugg

SEQ ID NO: 1634889 - RNA, 21 nt, Human
gcgcaggcuggcccugcccug

SEQ ID NO: 1634890 - RNA, 20 nt, Human
gcgcaggcuggcccugcccu

SEQ ID NO: 1634891 - RNA, 17 nt, Human
gcgcaggcuggcccugc

SEQ ID NO: 1634892 - RNA, 19 nt, Human
gcgcaggcuggcccugccc

SEQ ID NO: 1634893 - RNA, 18 nt, Human
gcgcaggcuggcccugcc

SEQ ID NO: 1634894 - RNA, 16 nt, Human
gccuuacacaaugguu

SEQ ID NO: 1634895 - RNA, 15 nt, Human
gccuuacacaauggu

SEQ ID NO: 1634896 - RNA, 14 nt, Human
gcgguccacccagg

SEQ ID NO: 1634897 - RNA, 13 nt, Human
gcgguccacccag

SEQ ID NO: 1634898 - RNA, 19 nt, Human
gcggugagaggggaacaga

SEQ ID NO: 1634899 - RNA, 17 nt, Human
gcggggacagcuccuuc

SEQ ID NO: 1634900 - RNA, 15 nt, Human
gcggggacagcuccu

SEQ ID NO: 1634901 - RNA, 18 nt, Human
gcggggacagcuccuucu

SEQ ID NO: 1634902 - RNA, 21 nt, Human
gcgcugccccuggcagccccu

SEQ ID NO: 1634903 - RNA, 18 nt, Human
gcgcugccccuggcagcc

SEQ ID NO: 1634904 - RNA, 14 nt, Human
gcggggacagcucc

SEQ ID NO: 1634905 - RNA, 19 nt, Human
gcggagacggagucccacc

SEQ ID NO: 1634906 - RNA, 16 nt, Human
gcggagaaaggaaggg

SEQ ID NO: 1634907 - RNA, 23 nt, Human
gcgcccaguuggguggaugccug

SEQ ID NO: 1634908 - RNA, 13 nt, Human
gcgccccuucccc

SEQ ID NO: 1634909 - RNA, 21 nt, Human
gcgccuuaaggauguucuagc

SEQ ID NO: 1634910 - RNA, 13 nt, Human
gcuagauguaugu

SEQ ID NO: 1634911 - RNA, 22 nt, Human
gcggugcuaucucccccagccc

SEQ ID NO: 1634912 - RNA, 19 nt, Human
gcggugcuaucucccccag

SEQ ID NO: 1634913 - RNA, 16 nt, Human
gcuagauguauguacu

SEQ ID NO: 1634914 - RNA, 14 nt, Human
gcuagauguaugua

SEQ ID NO: 1634915 - RNA, 21 nt, Human
gcuauaggugcuacaaaaaca

SEQ ID NO: 1634916 - RNA, 20 nt, Human
gcuauaacuauguugauaaa

SEQ ID NO: 1634917 - RNA, 22 nt, Human
gcucaaguccucuuuucugaga

SEQ ID NO: 1634918 - RNA, 19 nt, Human
gcucaaguccucuuuucug

SEQ ID NO: 1634919 - RNA, 15 nt, Human
gcuaucucccccagc

SEQ ID NO: 1634920 - RNA, 14 nt, Human
gcuaucucccccag

SEQ ID NO: 1634921 - RNA, 18 nt, Human
gcucaaguccucuuuucu

SEQ ID NO: 1634922 - RNA, 13 nt, Human
gcuaucuccccca

SEQ ID NO: 1634923 - RNA, 17 nt, Human
gcuaucguaaaauuaag

SEQ ID NO: 1634924 - RNA, 16 nt, Human
gcuaucguaaaauuaa

SEQ ID NO: 1634925 - RNA, 15 nt, Human
gcuaucguaaaauua

SEQ ID NO: 1634926 - RNA, 18 nt, Human
gcucaccagccccagugc

SEQ ID NO: 1634927 - RNA, 15 nt, Human
gcucaccagccccag

SEQ ID NO: 1634928 - RNA, 14 nt, Human
gcucaccagcccca

SEQ ID NO: 1634929 - RNA, 13 nt, Human
gcucaccagcccc

SEQ ID NO: 1634930 - RNA, 12 nt, Human
gcucaccagccc

SEQ ID NO: 1634931 - RNA, 16 nt, Human
gcucacauaucuguca

SEQ ID NO: 1634932 - RNA, 22 nt, Human
gcucacagaacccuuggagcca

SEQ ID NO: 1634933 - RNA, 18 nt, Human
gcucaccucucccuugga

SEQ ID NO: 1634934 - RNA, 17 nt, Human
gcucaccucucccuugg

SEQ ID NO: 1634935 - RNA, 16 nt, Human
gcucaccucucccuug

SEQ ID NO: 1634936 - RNA, 12 nt, Human
gcucagcccucc

SEQ ID NO: 1634937 - RNA, 16 nt, Human
gcucagcccucccugc

SEQ ID NO: 1634938 - RNA, 15 nt, Human
gcucagcccucccug

SEQ ID NO: 1634939 - RNA, 23 nt, Human
gcucagcggggacagcuccuucu

SEQ ID NO: 1634940 - RNA, 19 nt, Human
gcucagcggggacagcucc

SEQ ID NO: 1634941 - RNA, 18 nt, Human
gcucagcggggacagcuc

SEQ ID NO: 1634942 - RNA, 17 nt, Human
gcucagcggggacagcu

SEQ ID NO: 1634943 - RNA, 21 nt, Human
gcucagcccucccugccccuc

SEQ ID NO: 1634944 - RNA, 19 nt, Human
gcucagcccucccugcccc

SEQ ID NO: 1634945 - RNA, 18 nt, Human
gcucagcccucccugccc

SEQ ID NO: 1634946 - RNA, 17 nt, Human
gcucagcccucccugcc

SEQ ID NO: 1634947 - RNA, 18 nt, Human
gcucauggacuucugcca

SEQ ID NO: 1634948 - RNA, 23 nt, Human
gcuccgcuuucuacccagcgagc

SEQ ID NO: 1634949 - RNA, 22 nt, Human
gcuccgcuuucuacccagcgag

SEQ ID NO: 1634950 - RNA, 21 nt, Human
gcuccgcuuucuacccagcga

SEQ ID NO: 1634951 - RNA, 18 nt, Human
gcuccgcuuucuacccag

SEQ ID NO: 1634952 - RNA, 20 nt, Human
gcucccuucccaccucucuc

SEQ ID NO: 1634953 - RNA, 15 nt, Human
gcucccacaggcccu

SEQ ID NO: 1634954 - RNA, 13 nt, Human
gcuccaggcuccu

SEQ ID NO: 1634955 - RNA, 12 nt, Human
gcuccaggcucc

SEQ ID NO: 1634956 - RNA, 18 nt, Human
gcuccaggagcagccaca

SEQ ID NO: 1634957 - RNA, 17 nt, Human
gcuccaggagcagccac

SEQ ID NO: 1634958 - RNA, 16 nt, Human
gcuccaggagcagcca

SEQ ID NO: 1634959 - RNA, 15 nt, Human
gcuccaggagcagcc

SEQ ID NO: 1634960 - RNA, 21 nt, Human
gcuccagcuguucagcugguu

SEQ ID NO: 1634961 - RNA, 14 nt, Human
gcuccaggagcagc

SEQ ID NO: 1634962 - RNA, 12 nt, Human
gcuccaggagca

SEQ ID NO: 1634963 - RNA, 11 nt, Human
gcuccaggagc

SEQ ID NO: 1634964 - RNA, 21 nt, Human
gcucgagcaugccuggauggg

SEQ ID NO: 1634965 - RNA, 19 nt, Human
gcucgagcaugccuggaug

SEQ ID NO: 1634966 - RNA, 17 nt, Human
gcuccuuuagcgcccag

SEQ ID NO: 1634967 - RNA, 13 nt, Human
gcuccuucugucc

SEQ ID NO: 1634968 - RNA, 15 nt, Human
gcuccuucuguccua

SEQ ID NO: 1634969 - RNA, 13 nt, Human
gcuccugugucuu

SEQ ID NO: 1634970 - RNA, 12 nt, Human
gcuccugugucu

SEQ ID NO: 1634971 - RNA, 18 nt, Human
gcuccuuccucugaggcu

SEQ ID NO: 1634972 - RNA, 22 nt, Human
gcuccuuccucugaggcugaaa

SEQ ID NO: 1634973 - RNA, 20 nt, Human
gcuccuuccucugaggcuga

SEQ ID NO: 1634974 - RNA, 24 nt, Human
gcuccgcuuucuacccagcgagcc

SEQ ID NO: 1634975 - RNA, 16 nt, Human
gcuccucccggugccc

SEQ ID NO: 1634976 - RNA, 14 nt, Human
gcuccucccggugc

SEQ ID NO: 1634977 - RNA, 23 nt, Human
gcuccuggggguucuuucuuccu

SEQ ID NO: 1634978 - RNA, 21 nt, Human
gggacugaggggaggggagca

SEQ ID NO: 1634979 - RNA, 23 nt, Human
gggacucaaugcacugacauugu

SEQ ID NO: 1634980 - RNA, 15 nt, Human
gggacugagaaauuu

SEQ ID NO: 1634981 - RNA, 23 nt, Human
gggacugccagucccccugcccc

SEQ ID NO: 1634982 - RNA, 19 nt, Human
gggacucaaugcacugaca

SEQ ID NO: 1634983 - RNA, 17 nt, Human
gggacucaaugcacuga

SEQ ID NO: 1634984 - RNA, 14 nt, Human
gggaauugaggaca

SEQ ID NO: 1634985 - RNA, 21 nt, Human
gggaauguuugccucugccuc

SEQ ID NO: 1634986 - RNA, 19 nt, Human
gggaauguuugccucugcc

SEQ ID NO: 1634987 - RNA, 14 nt, Human
gggacacccuguga

SEQ ID NO: 1634988 - RNA, 15 nt, Human
ggcuuuguauagaac

SEQ ID NO: 1634989 - RNA, 13 nt, Human
ggcuuuucacugc

SEQ ID NO: 1634990 - RNA, 11 nt, Human
gggaggcagag

SEQ ID NO: 1634991 - RNA, 20 nt, Human
gggaggugggauccuccagg

SEQ ID NO: 1634992 - RNA, 23 nt, Human
gggaggauugcuugagcucagga

SEQ ID NO: 1634993 - RNA, 17 nt, Human
gggagugacagaggcag

SEQ ID NO: 1634994 - RNA, 21 nt, Human
gggagugaguugauagcacag

SEQ ID NO: 1634995 - RNA, 20 nt, Human
gggaggacgcucucuggccu

SEQ ID NO: 1634996 - RNA, 17 nt, Human
gggaggacgcucucugg

SEQ ID NO: 1634997 - RNA, 21 nt, Human
gggaggauugcuugagcucag

SEQ ID NO: 1634998 - RNA, 22 nt, Human
gggaggauguucugggacacag

SEQ ID NO: 1634999 - RNA, 23 nt, Human
gggaggaucucuugagccuggga

SEQ ID NO: 1635000 - RNA, 22 nt, Human
gggagcugccuguucagcucca

SEQ ID NO: 1635001 - RNA, 21 nt, Human
gggagcugccuguucagcucc

SEQ ID NO: 1635002 - RNA, 13 nt, Human
gggagcugccugu

SEQ ID NO: 1635003 - RNA, 12 nt, Human
gggagcucugca

SEQ ID NO: 1635004 - RNA, 21 nt, Human
gggagccugaucaccugcccu

SEQ ID NO: 1635005 - RNA, 12 nt, Human
ggcuucacagau

SEQ ID NO: 1635006 - RNA, 21 nt, Human
ggcuucacggaagagccuugc

SEQ ID NO: 1635007 - RNA, 20 nt, Human
ggcuucacggaagagccuug

SEQ ID NO: 1635008 - RNA, 15 nt, Human
ggcuuagucacugag

SEQ ID NO: 1635009 - RNA, 14 nt, Human
ggcuuagucacuga

SEQ ID NO: 1635010 - RNA, 19 nt, Human
ggcuuggggaccagagcug

SEQ ID NO: 1635011 - RNA, 18 nt, Human
ggcuuggggaccagagcu

SEQ ID NO: 1635012 - RNA, 17 nt, Human
ggcuuggggaccagagc

SEQ ID NO: 1635013 - RNA, 11 nt, Human
ggcuugcugcc

SEQ ID NO: 1635014 - RNA, 15 nt, Human
ggcuuaaaacaacac

SEQ ID NO: 1635015 - RNA, 20 nt, Human
ggcuguuggcugggggccuc

SEQ ID NO: 1635016 - RNA, 16 nt, Human
ggcuguuggcuggggg

SEQ ID NO: 1635017 - RNA, 15 nt, Human
ggcuguuggcugggg

SEQ ID NO: 1635018 - RNA, 14 nt, Human
ggcuguuggcuggg

SEQ ID NO: 1635019 - RNA, 16 nt, Human
ggcugugccucugccu

SEQ ID NO: 1635020 - RNA, 13 nt, Human
ggcugugccucug

SEQ ID NO: 1635021 - RNA, 19 nt, Human
ggcugcuucaaggauccug

SEQ ID NO: 1635022 - RNA, 15 nt, Human
ggcugcuucaaggau

SEQ ID NO: 1635023 - RNA, 17 nt, Human
ggcucugccucccauca

SEQ ID NO: 1635024 - RNA, 23 nt, Human
ggcucuggagcccacuguacuug

SEQ ID NO: 1635025 - RNA, 20 nt, Human
ggcugcuucaaggauccuga

SEQ ID NO: 1635026 - RNA, 21 nt, Human
ggcugcuucaaggauccugag

SEQ ID NO: 1635027 - RNA, 18 nt, Human
ggcuggagcuagaauuug

SEQ ID NO: 1635028 - RNA, 14 nt, Human
ggcugggggccuca

SEQ ID NO: 1635029 - RNA, 16 nt, Human
ggcugggggaagaagc

SEQ ID NO: 1635030 - RNA, 22 nt, Human
ggcugggcuucaguggcagcug

SEQ ID NO: 1635031 - RNA, 21 nt, Human
ggcugggcuucaguggcagcu

SEQ ID NO: 1635032 - RNA, 11 nt, Human
ggcugggcuuc

SEQ ID NO: 1635033 - RNA, 21 nt, Human
ggcugggcucccuucccaccu

SEQ ID NO: 1635034 - RNA, 20 nt, Human
ggcugggcucccuucccacc

SEQ ID NO: 1635035 - RNA, 15 nt, Human
ggcugggagcucugc

SEQ ID NO: 1635036 - RNA, 23 nt, Human
ggcuauaggugcuacaaaaacac

SEQ ID NO: 1635037 - RNA, 20 nt, Human
ggcuaguaucaaaagaaaga

SEQ ID NO: 1635038 - RNA, 11 nt, Human
ggcgcugcccc

SEQ ID NO: 1635039 - RNA, 17 nt, Human
ggcgcugccccuggcag

SEQ ID NO: 1635040 - RNA, 16 nt, Human
ggcuccacuuggucug

SEQ ID NO: 1635041 - RNA, 9 nt, Human
ggcuccaga

SEQ ID NO: 1635042 - RNA, 12 nt, Human
ggcuaugcauuu

SEQ ID NO: 1635043 - RNA, 13 nt, Human
ggcuaugcauuug

SEQ ID NO: 1635044 - RNA, 14 nt, Human
ggcuaugcauuuga

SEQ ID NO: 1635045 - RNA, 13 nt, Human
ggcuccaggcucc

SEQ ID NO: 1635046 - RNA, 12 nt, Human
ggcuccaggcuc

SEQ ID NO: 1635047 - RNA, 17 nt, Human
ggcuccaggagcagcca

SEQ ID NO: 1635048 - RNA, 18 nt, Human
ggcuccaggagcagccac

SEQ ID NO: 1635049 - RNA, 16 nt, Human
ggcuccaggagcagcc

SEQ ID NO: 1635050 - RNA, 14 nt, Human
ggcuccaggagcag

SEQ ID NO: 1635051 - RNA, 10 nt, Human
ggcuccagac

SEQ ID NO: 1635052 - RNA, 14 nt, Human
ggcuccaggcuccu

SEQ ID NO: 1635053 - RNA, 15 nt, Human
ggcuccaggcuccuu

SEQ ID NO: 1635054 - RNA, 16 nt, Human
ggcucucaggccagcu

SEQ ID NO: 1635055 - RNA, 15 nt, Human
ggcucucaggccagc

SEQ ID NO: 1635056 - RNA, 20 nt, Human
ggcucucaggccagcugcuu

SEQ ID NO: 1635057 - RNA, 19 nt, Human
ggcucucaggccagcugcu

SEQ ID NO: 1635058 - RNA, 18 nt, Human
ggcucucaggccagcugc

SEQ ID NO: 1635059 - RNA, 17 nt, Human
ggcucucaggccagcug

SEQ ID NO: 1635060 - RNA, 12 nt, Human
ggcucugcccuu

SEQ ID NO: 1635061 - RNA, 15 nt, Human
ggcucugccucccau

SEQ ID NO: 1635062 - RNA, 13 nt, Human
ggcucugccuccc

SEQ ID NO: 1635063 - RNA, 15 nt, Human
ggcucugcccuuggu

SEQ ID NO: 1635064 - RNA, 14 nt, Human
ggcucugcccuugg

SEQ ID NO: 1635065 - RNA, 16 nt, Human
ggcucugccucccauc

SEQ ID NO: 1635066 - RNA, 16 nt, Human
ggcucuggagcccacu

SEQ ID NO: 1635067 - RNA, 19 nt, Human
ggcucuggagcccacugua

SEQ ID NO: 1635068 - RNA, 17 nt, Human
ggcucuggagcccacug

SEQ ID NO: 1635069 - RNA, 24 nt, Human
ggcgcagcauauucaggaagcuca

SEQ ID NO: 1635070 - RNA, 23 nt, Human
ggcgcagcauauucaggaagcuc

SEQ ID NO: 1635071 - RNA, 23 nt, Human
ggccugggggcugggcagaggaa

SEQ ID NO: 1635072 - RNA, 11 nt, Human
ggccugggccc

SEQ ID NO: 1635073 - RNA, 16 nt, Human
ggccuggccugagcug

SEQ ID NO: 1635074 - RNA, 15 nt, Human
ggccuggccugagcu

SEQ ID NO: 1635075 - RNA, 19 nt, Human
ggccuggccugagcuggga

SEQ ID NO: 1635076 - RNA, 14 nt, Human
ggccuggccugagc

SEQ ID NO: 1635077 - RNA, 13 nt, Human
ggccuggccugag

SEQ ID NO: 1635078 - RNA, 10 nt, Human
ggccuggccu

SEQ ID NO: 1635079 - RNA, 23 nt, Human
ggccuggccccucagggucccug

SEQ ID NO: 1635080 - RNA, 18 nt, Human
ggccuggccccucagggu

SEQ ID NO: 1635081 - RNA, 17 nt, Human
ggccuggccccucaggg

SEQ ID NO: 1635082 - RNA, 15 nt, Human
ggccuggccccucag

SEQ ID NO: 1635083 - RNA, 14 nt, Human
ggccuggccccuca

SEQ ID NO: 1635084 - RNA, 19 nt, Human
ggccucugcacuccccugc

SEQ ID NO: 1635085 - RNA, 18 nt, Human
ggccucugcacuccccug

SEQ ID NO: 1635086 - RNA, 22 nt, Human
ggccucugcacuccccugcugg

SEQ ID NO: 1635087 - RNA, 13 nt, Human
ggccuggccccuc

SEQ ID NO: 1635088 - RNA, 12 nt, Human
ggccugagcugg

SEQ ID NO: 1635089 - RNA, 14 nt, Human
ggccuccugugugu

SEQ ID NO: 1635090 - RNA, 17 nt, Human
ggccucggacuuagcug

SEQ ID NO: 1635091 - RNA, 23 nt, Human
ggccucaagugauucuccugccu

SEQ ID NO: 1635092 - RNA, 22 nt, Human
ggccucaagugauucuccugcc

SEQ ID NO: 1635093 - RNA, 14 nt, Human
ggccucaagugauu

SEQ ID NO: 1635094 - RNA, 20 nt, Human
ggccuagcauacguacacau

SEQ ID NO: 1635095 - RNA, 22 nt, Human
ggccuagcauacguacacauuu

SEQ ID NO: 1635096 - RNA, 23 nt, Human
ggccuagcauacguacacauuuu

SEQ ID NO: 1635097 - RNA, 20 nt, Human
ggcccagagggccugcaagg

SEQ ID NO: 1635098 - RNA, 19 nt, Human
ggcccagagggccugcaag

SEQ ID NO: 1635099 - RNA, 17 nt, Human
ggcccagagggccugca

SEQ ID NO: 1635100 - RNA, 14 nt, Human
ggcccagagggccu

SEQ ID NO: 1635101 - RNA, 15 nt, Human
ggccgggagccugau

SEQ ID NO: 1635102 - RNA, 11 nt, Human
ggcagcugccu

SEQ ID NO: 1635103 - RNA, 12 nt, Human
ggcagcugccuc

SEQ ID NO: 1635104 - RNA, 13 nt, Human
ggcagcugccucc

SEQ ID NO: 1635105 - RNA, 21 nt, Human
ggcagaguugaagacagagcu

SEQ ID NO: 1635106 - RNA, 19 nt, Human
ggcagaguugaagacagag

SEQ ID NO: 1635107 - RNA, 17 nt, Human
ggcagaguugaagacag

SEQ ID NO: 1635108 - RNA, 16 nt, Human
ggcagcugccuccccu

SEQ ID NO: 1635109 - RNA, 22 nt, Human
ggcagcugcuuuugucuauggg

SEQ ID NO: 1635110 - RNA, 12 nt, Human
ggcaggguccua

SEQ ID NO: 1635111 - RNA, 24 nt, Human
ggcagcugcgguccacccaggagc

SEQ ID NO: 1635112 - RNA, 23 nt, Human
ggcagcugcgguccacccaggag

SEQ ID NO: 1635113 - RNA, 18 nt, Human
ggcagggucucacucugu

SEQ ID NO: 1635114 - RNA, 17 nt, Human
ggcagggucucacucug

SEQ ID NO: 1635115 - RNA, 23 nt, Human
ggcaugugaugagaggaaaucac

SEQ ID NO: 1635116 - RNA, 18 nt, Human
ggcaugugaugagaggaa

SEQ ID NO: 1635117 - RNA, 15 nt, Human
ggcaugaugcgggcc

SEQ ID NO: 1635118 - RNA, 22 nt, Human
ggcaugacacgaauauugcuga

SEQ ID NO: 1635119 - RNA, 16 nt, Human
ggccaggcccucugcc

SEQ ID NO: 1635120 - RNA, 15 nt, Human
ggccaggcccucugc

SEQ ID NO: 1635121 - RNA, 17 nt, Human
ggccaggcccucugccc

SEQ ID NO: 1635122 - RNA, 14 nt, Human
ggccaggcccucug

SEQ ID NO: 1635123 - RNA, 13 nt, Human
ggccaggagccuc

SEQ ID NO: 1635124 - RNA, 11 nt, Human
ggccaggagcc

SEQ ID NO: 1635125 - RNA, 20 nt, Human
ggccacugugaagagaacca

SEQ ID NO: 1635126 - RNA, 20 nt, Human
ggcauguucucugaggacac

SEQ ID NO: 1635127 - RNA, 22 nt, Human
ggccacagaaaauucuucucca

SEQ ID NO: 1635128 - RNA, 21 nt, Human
ggcagagguugcagugagccg

SEQ ID NO: 1635129 - RNA, 20 nt, Human
ggcacucagaagacacugau

SEQ ID NO: 1635130 - RNA, 19 nt, Human
ggcacucagaagacacuga

SEQ ID NO: 1635131 - RNA, 18 nt, Human
ggcacucagaagacacug

SEQ ID NO: 1635132 - RNA, 20 nt, Human
ggcacccggccccugcuggu

SEQ ID NO: 1635133 - RNA, 19 nt, Human
ggcacccggccccugcugg

SEQ ID NO: 1635134 - RNA, 18 nt, Human
ggcacccggccccugcug

SEQ ID NO: 1635135 - RNA, 20 nt, Human
ggcacccaccaucaugucug

SEQ ID NO: 1635136 - RNA, 19 nt, Human
ggcaagcaccuccugccuc

SEQ ID NO: 1635137 - RNA, 18 nt, Human
ggcaagcaccuccugccu

SEQ ID NO: 1635138 - RNA, 17 nt, Human
ggcaccagcagccugga

SEQ ID NO: 1635139 - RNA, 15 nt, Human
ggcaaggcugucaau

SEQ ID NO: 1635140 - RNA, 21 nt, Human
ggauucuuccucccucccucu

SEQ ID NO: 1635141 - RNA, 13 nt, Human
ggauucuuaaagu

SEQ ID NO: 1635142 - RNA, 17 nt, Human
ggcaagcaccuccugcc

SEQ ID NO: 1635143 - RNA, 23 nt, Human
ggagucccaccuuggcugcaggg

SEQ ID NO: 1635144 - RNA, 22 nt, Human
ggaugaucuaggaagacuuugg

SEQ ID NO: 1635145 - RNA, 18 nt, Human
ggaugaucuaggaagacu

SEQ ID NO: 1635146 - RNA, 16 nt, Human
ggaugaucuaggaaga

SEQ ID NO: 1635147 - RNA, 17 nt, Human
ggaugccugguggcagc

SEQ ID NO: 1635148 - RNA, 13 nt, Human
ggaugccuggugg

SEQ ID NO: 1635149 - RNA, 19 nt, Human
ggaugcccaaagaugcagc

SEQ ID NO: 1635150 - RNA, 17 nt, Human
ggaugccccgucccccu

SEQ ID NO: 1635151 - RNA, 18 nt, Human
ggaugcccaaagaugcag

SEQ ID NO: 1635152 - RNA, 18 nt, Human
ggaugaugacuauggaaa

SEQ ID NO: 1635153 - RNA, 21 nt, Human
ggaugccugguggcagcugcg

SEQ ID NO: 1635154 - RNA, 20 nt, Human
ggaugccugguggcagcugc

SEQ ID NO: 1635155 - RNA, 19 nt, Human
ggaugccugguggcagcug

SEQ ID NO: 1635156 - RNA, 18 nt, Human
ggaugccugguggcagcu

SEQ ID NO: 1635157 - RNA, 12 nt, Human
ggauuauauuau

SEQ ID NO: 1635158 - RNA, 20 nt, Human
ggacauuugcucauggaauu

SEQ ID NO: 1635159 - RNA, 14 nt, Human
ggaccaaaaaccag

SEQ ID NO: 1635160 - RNA, 17 nt, Human
ggacauuugcucaugga

SEQ ID NO: 1635161 - RNA, 19 nt, Human
ggaccagagcugccaccug

SEQ ID NO: 1635162 - RNA, 17 nt, Human
ggacagcuccuucuguc

SEQ ID NO: 1635163 - RNA, 16 nt, Human
ggacagcuccuucugu

SEQ ID NO: 1635164 - RNA, 15 nt, Human
ggacagcuccuucug

SEQ ID NO: 1635165 - RNA, 11 nt, Human
ggacagcuccu

SEQ ID NO: 1635166 - RNA, 20 nt, Human
ggacagaggggguggccucc

SEQ ID NO: 1635167 - RNA, 16 nt, Human
ggacagccccuccucc

SEQ ID NO: 1635168 - RNA, 15 nt, Human
ggacagccccuccuc

SEQ ID NO: 1635169 - RNA, 16 nt, Human
ggacagaggggguggc

SEQ ID NO: 1635170 - RNA, 21 nt, Human
gcuuuuaugugaaacauguuu

SEQ ID NO: 1635171 - RNA, 20 nt, Human
gcuuuuaugugaaacauguu

SEQ ID NO: 1635172 - RNA, 19 nt, Human
gcuuuuaugugaaacaugu

SEQ ID NO: 1635173 - RNA, 12 nt, Human
gcuuuucacugc

SEQ ID NO: 1635174 - RNA, 19 nt, Human
ggacgcucucuggccuucg

SEQ ID NO: 1635175 - RNA, 16 nt, Human
ggacgcucucuggccu

SEQ ID NO: 1635176 - RNA, 19 nt, Human
ggacugaauuaugaaacuu

SEQ ID NO: 1635177 - RNA, 17 nt, Human
ggacugaauuaugaaac

SEQ ID NO: 1635178 - RNA, 14 nt, Human
ggacugagaaauuu

SEQ ID NO: 1635179 - RNA, 18 nt, Human
ggaccuugaacuggguac

SEQ ID NO: 1635180 - RNA, 23 nt, Human
ggagaagagcuguucacagccag

SEQ ID NO: 1635181 - RNA, 15 nt, Human
ggagaagagcuguuc

SEQ ID NO: 1635182 - RNA, 14 nt, Human
ggagaagaacugaa

SEQ ID NO: 1635183 - RNA, 11 nt, Human
ggagaagaacu

SEQ ID NO: 1635184 - RNA, 18 nt, Human
ggacugagaaauuuauaa

SEQ ID NO: 1635185 - RNA, 19 nt, Human
ggaggggagcaugggaagu

SEQ ID NO: 1635186 - RNA, 13 nt, Human
ggagggccugggc

SEQ ID NO: 1635187 - RNA, 13 nt, Human
ggaggggccuggc

SEQ ID NO: 1635188 - RNA, 22 nt, Human
ggagucccaccuuggcugcagg

SEQ ID NO: 1635189 - RNA, 21 nt, Human
ggaggggccuggcagccgugc

SEQ ID NO: 1635190 - RNA, 18 nt, Human
ggaggggccuggcagccg

SEQ ID NO: 1635191 - RNA, 14 nt, Human
ggaggggccuggca

SEQ ID NO: 1635192 - RNA, 16 nt, Human
ggaggacgcucucugg

SEQ ID NO: 1635193 - RNA, 21 nt, Human
ggaggauguucugggacacag

SEQ ID NO: 1635194 - RNA, 18 nt, Human
ggaggauguucugggaca

SEQ ID NO: 1635195 - RNA, 16 nt, Human
ggagggagggcuccag

SEQ ID NO: 1635196 - RNA, 13 nt, Human
ggagggagggcuc

SEQ ID NO: 1635197 - RNA, 17 nt, Human
ggagggagggcuccaga

SEQ ID NO: 1635198 - RNA, 17 nt, Human
ggaggcaggaguuucgu

SEQ ID NO: 1635199 - RNA, 19 nt, Human
ggagcccugggaggcucug

SEQ ID NO: 1635200 - RNA, 16 nt, Human
ggagcccugggaggcu

SEQ ID NO: 1635201 - RNA, 14 nt, Human
ggagccuccugccc

SEQ ID NO: 1635202 - RNA, 20 nt, Human
ggagcccugggaggcucugg

SEQ ID NO: 1635203 - RNA, 15 nt, Human
ggagccuccugcccu

SEQ ID NO: 1635204 - RNA, 14 nt, Human
ggagcuagaauuug

SEQ ID NO: 1635205 - RNA, 19 nt, Human
ucaucuugaauuguaagga

SEQ ID NO: 1635206 - RNA, 23 nt, Human
ucaucuuagguuggcaaaaaggc

SEQ ID NO: 1635207 - RNA, 18 nt, Human
ucauaccuaucaucuuaa

SEQ ID NO: 1635208 - RNA, 15 nt, Human
ucaggugcugccauc

SEQ ID NO: 1635209 - RNA, 14 nt, Human
ucaggugcugccau

SEQ ID NO: 1635210 - RNA, 13 nt, Human
ucaggugcugcca

SEQ ID NO: 1635211 - RNA, 21 nt, Human
ucaggugagaagcagaggaag

SEQ ID NO: 1635212 - RNA, 21 nt, Human
ucaucaccaacgucugugcca

SEQ ID NO: 1635213 - RNA, 20 nt, Human
ucaucaccaacgucugugcc

SEQ ID NO: 1635214 - RNA, 19 nt, Human
ucaucaccaacgucugugc

SEQ ID NO: 1635215 - RNA, 15 nt, Human
ucauacucaccucac

SEQ ID NO: 1635216 - RNA, 21 nt, Human
ucauagcccucacccuggggc

SEQ ID NO: 1635217 - RNA, 16 nt, Human
ucauuuccaagcaagu

SEQ ID NO: 1635218 - RNA, 13 nt, Human
ucauuuccaagca

SEQ ID NO: 1635219 - RNA, 16 nt, Human
ucauuuccugugucuu

SEQ ID NO: 1635220 - RNA, 13 nt, Human
ucauuuccugugu

SEQ ID NO: 1635221 - RNA, 18 nt, Human
ucauugugaaauuauuca

SEQ ID NO: 1635222 - RNA, 17 nt, Human
ucauugugaaauuauuc

SEQ ID NO: 1635223 - RNA, 15 nt, Human
ucauugugaaauuau

SEQ ID NO: 1635224 - RNA, 12 nt, Human
ucauugugaaau

SEQ ID NO: 1635225 - RNA, 13 nt, Human
ucauuaucucaaa

SEQ ID NO: 1635226 - RNA, 20 nt, Human
ucauuaucucaaaacugcac

SEQ ID NO: 1635227 - RNA, 19 nt, Human
ucauuaucucaaaacugca

SEQ ID NO: 1635228 - RNA, 21 nt, Human
ucauucaacccaccugcgucu

SEQ ID NO: 1635229 - RNA, 23 nt, Human
ucauuauuuuauuaugaaacuug

SEQ ID NO: 1635230 - RNA, 23 nt, Human
ucauuccaccuucccaugcccug

SEQ ID NO: 1635231 - RNA, 20 nt, Human
uccaaaauaaaacuuuuuaa

SEQ ID NO: 1635232 - RNA, 18 nt, Human
uccaaaauaaaacuuuuu

SEQ ID NO: 1635233 - RNA, 18 nt, Human
uccaauuuacauacucug

SEQ ID NO: 1635234 - RNA, 17 nt, Human
uccaauuuacauacucu

SEQ ID NO: 1635235 - RNA, 19 nt, Human
uccacaagagcccaggccu

SEQ ID NO: 1635236 - RNA, 18 nt, Human
uccacaagagcccaggcc

SEQ ID NO: 1635237 - RNA, 17 nt, Human
uccacaagagcccaggc

SEQ ID NO: 1635238 - RNA, 16 nt, Human
uccacaagagcccagg

SEQ ID NO: 1635239 - RNA, 18 nt, Human
uccacaaguuaaauaaau

SEQ ID NO: 1635240 - RNA, 17 nt, Human
uccacaaguuaaauaaa

SEQ ID NO: 1635241 - RNA, 15 nt, Human
uccaccucccugcaa

SEQ ID NO: 1635242 - RNA, 16 nt, Human
uccaccucccugcaau

SEQ ID NO: 1635243 - RNA, 17 nt, Human
uccaccucccugcaaua

SEQ ID NO: 1635244 - RNA, 15 nt, Human
uccaccugccaggga

SEQ ID NO: 1635245 - RNA, 17 nt, Human
uccaccugccagggaca

SEQ ID NO: 1635246 - RNA, 21 nt, Human
uccaccugccagggacagagg

SEQ ID NO: 1635247 - RNA, 18 nt, Human
uccaccugccagggacag

SEQ ID NO: 1635248 - RNA, 13 nt, Human
uccaccucccugc

SEQ ID NO: 1635249 - RNA, 14 nt, Human
uccaccucccugca

SEQ ID NO: 1635250 - RNA, 13 nt, Human
uccacccugcucu

SEQ ID NO: 1635251 - RNA, 12 nt, Human
uccacccugcuc

SEQ ID NO: 1635252 - RNA, 19 nt, Human
uccacagaagcuccaggua

SEQ ID NO: 1635253 - RNA, 16 nt, Human
uccacuuggucuguga

SEQ ID NO: 1635254 - RNA, 15 nt, Human
uccacuuggucugug

SEQ ID NO: 1635255 - RNA, 15 nt, Human
uccaccuucccaugc

SEQ ID NO: 1635256 - RNA, 17 nt, Human
uccacuuggucugugag

SEQ ID NO: 1635257 - RNA, 17 nt, Human
uccagccacagaaaaga

SEQ ID NO: 1635258 - RNA, 16 nt, Human
uccaggagcagccaca

SEQ ID NO: 1635259 - RNA, 17 nt, Human
uccagcuguucagcugg

SEQ ID NO: 1635260 - RNA, 17 nt, Human
uccagcucaccagcccc

SEQ ID NO: 1635261 - RNA, 16 nt, Human
uccagcucaccagccc

SEQ ID NO: 1635262 - RNA, 18 nt, Human
uccagcucaccagcccca

SEQ ID NO: 1635263 - RNA, 22 nt, Human
uccaggugcacaagcuccaagc

SEQ ID NO: 1635264 - RNA, 21 nt, Human
uccaggugcacaagcuccaag

SEQ ID NO: 1635265 - RNA, 20 nt, Human
uccaggugcacaagcuccaa

SEQ ID NO: 1635266 - RNA, 18 nt, Human
uccaggugcacaagcucc

SEQ ID NO: 1635267 - RNA, 16 nt, Human
uccagguucagcuugu

SEQ ID NO: 1635268 - RNA, 15 nt, Human
uccagguucagcuug

SEQ ID NO: 1635269 - RNA, 11 nt, Human
uccaggguggu

SEQ ID NO: 1635270 - RNA, 18 nt, Human
uccaggagcagccacauu

SEQ ID NO: 1635271 - RNA, 17 nt, Human
uccaggagcagccacau

SEQ ID NO: 1635272 - RNA, 22 nt, Human
uccaggagcagccacauuccug

SEQ ID NO: 1635273 - RNA, 23 nt, Human
uccaggggugggacacccuguga

SEQ ID NO: 1635274 - RNA, 15 nt, Human
uccaggugcacaagc

SEQ ID NO: 1635275 - RNA, 17 nt, Human
ucaggcuagauguaugu

SEQ ID NO: 1635276 - RNA, 13 nt, Human
ucaggcuagaugu

SEQ ID NO: 1635277 - RNA, 23 nt, Human
ucaggagcccugggaggcucugg

SEQ ID NO: 1635278 - RNA, 20 nt, Human
ucaggagcccugggaggcuc

SEQ ID NO: 1635279 - RNA, 18 nt, Human
ucaggagcccugggaggc

SEQ ID NO: 1635280 - RNA, 19 nt, Human
ucaggagcccugggaggcu

SEQ ID NO: 1635281 - RNA, 16 nt, Human
ucaggugagaagcaga

SEQ ID NO: 1635282 - RNA, 15 nt, Human
ucaggugagaagcag

SEQ ID NO: 1635283 - RNA, 16 nt, Human
ucagggccuggcucag

SEQ ID NO: 1635284 - RNA, 14 nt, Human
ucagggccuggcuc

SEQ ID NO: 1635285 - RNA, 21 nt, Human
ucagcuccccucggagaagag

SEQ ID NO: 1635286 - RNA, 18 nt, Human
ucagcuccccucggagaa

SEQ ID NO: 1635287 - RNA, 16 nt, Human
ucagcugaaccugggu

SEQ ID NO: 1635288 - RNA, 15 nt, Human
ucagcugaaccuggg

SEQ ID NO: 1635289 - RNA, 17 nt, Human
ucagcuccccucggaga

SEQ ID NO: 1635290 - RNA, 19 nt, Human
ucagccugcuccagcuguu

SEQ ID NO: 1635291 - RNA, 18 nt, Human
ucagccugcuccagcugu

SEQ ID NO: 1635292 - RNA, 22 nt, Human
ucagccuccugaguagcuggga

SEQ ID NO: 1635293 - RNA, 22 nt, Human
ucagccucccgaguagcuggga

SEQ ID NO: 1635294 - RNA, 21 nt, Human
ucagccucccgaguagcuggg

SEQ ID NO: 1635295 - RNA, 20 nt, Human
ucagccuccugaguagcugg

SEQ ID NO: 1635296 - RNA, 21 nt, Human
ucagccucccaaagugcuggg

SEQ ID NO: 1635297 - RNA, 19 nt, Human
ucagccucccaaagugcug

SEQ ID NO: 1635298 - RNA, 14 nt, Human
ucagccucccaaag

SEQ ID NO: 1635299 - RNA, 23 nt, Human
ucagcauucucacuccuaccugg

SEQ ID NO: 1635300 - RNA, 22 nt, Human
ucagccucccgaauagcuggga

SEQ ID NO: 1635301 - RNA, 21 nt, Human
ucagccucccgaauagcuggg

SEQ ID NO: 1635302 - RNA, 18 nt, Human
ucagccucccgaguagcu

SEQ ID NO: 1635303 - RNA, 20 nt, Human
ucagccucccgaguagcugg

SEQ ID NO: 1635304 - RNA, 15 nt, Human
ucagauaugauucaa

SEQ ID NO: 1635305 - RNA, 20 nt, Human
ucagcauucucacuccuacc

SEQ ID NO: 1635306 - RNA, 17 nt, Human
ucagcauucucacuccu

SEQ ID NO: 1635307 - RNA, 22 nt, Human
ucagagcugcccucuccugggc

SEQ ID NO: 1635308 - RNA, 23 nt, Human
ucagagcugcccucuccugggca

SEQ ID NO: 1635309 - RNA, 22 nt, Human
ucagaguaauccaagcaaaugu

SEQ ID NO: 1635310 - RNA, 21 nt, Human
ucagaguaauccaagcaaaug

SEQ ID NO: 1635311 - RNA, 19 nt, Human
ucagagcugcccucuccug

SEQ ID NO: 1635312 - RNA, 20 nt, Human
ucagagcugcccucuccugg

SEQ ID NO: 1635313 - RNA, 21 nt, Human
ucagagcugcccucuccuggg

SEQ ID NO: 1635314 - RNA, 14 nt, Human
ucagacagcugccu

SEQ ID NO: 1635315 - RNA, 13 nt, Human
ucagacagcugcc

SEQ ID NO: 1635316 - RNA, 15 nt, Human
ucagaaauguguuau

SEQ ID NO: 1635317 - RNA, 23 nt, Human
ucagaauucucuaguuugauuaa

SEQ ID NO: 1635318 - RNA, 10 nt, Human
ucagaaaugu

SEQ ID NO: 1635319 - RNA, 20 nt, Human
ucacuuguuuuauuuaaccu

SEQ ID NO: 1635320 - RNA, 14 nt, Human
ucacugcuuaacuu

SEQ ID NO: 1635321 - RNA, 22 nt, Human
ucacugcuggcugccuuagaac

SEQ ID NO: 1635322 - RNA, 18 nt, Human
ucacugcuggcugccuua

SEQ ID NO: 1635323 - RNA, 17 nt, Human
ucacugcuggcugccuu

SEQ ID NO: 1635324 - RNA, 12 nt, Human
ucacugcuggcu

SEQ ID NO: 1635325 - RNA, 16 nt, Human
ucacugcuggcugccu

SEQ ID NO: 1635326 - RNA, 15 nt, Human
ucacugcuggcugcc

SEQ ID NO: 1635327 - RNA, 14 nt, Human
ucacugcuggcugc

SEQ ID NO: 1635328 - RNA, 13 nt, Human
ucacugcuggcug

SEQ ID NO: 1635329 - RNA, 16 nt, Human
ucaccagccccagugc

SEQ ID NO: 1635330 - RNA, 13 nt, Human
ucaccagccccag

SEQ ID NO: 1635331 - RNA, 17 nt, Human
ucacucuuauugcccac

SEQ ID NO: 1635332 - RNA, 18 nt, Human
ucacugccaugccagcuu

SEQ ID NO: 1635333 - RNA, 20 nt, Human
ucacucuuauugcccacgcu

SEQ ID NO: 1635334 - RNA, 18 nt, Human
ucacugcauccuccgccu

SEQ ID NO: 1635335 - RNA, 19 nt, Human
ucacugcauccuccgccuc

SEQ ID NO: 1635336 - RNA, 20 nt, Human
uauguugcccaggcaggucu

SEQ ID NO: 1635337 - RNA, 19 nt, Human
uauguugcccaggcagguc

SEQ ID NO: 1635338 - RNA, 16 nt, Human
uauguugcccaggcag

SEQ ID NO: 1635339 - RNA, 13 nt, Human
uauguugcccagg

SEQ ID NO: 1635340 - RNA, 16 nt, Human
uauguugcauagaaua

SEQ ID NO: 1635341 - RNA, 12 nt, Human
uauguugcauag

SEQ ID NO: 1635342 - RNA, 14 nt, Human
uauguugauaaaag

SEQ ID NO: 1635343 - RNA, 12 nt, Human
uauuaaauuaug

SEQ ID NO: 1635344 - RNA, 17 nt, Human
uauguacuucaugcugu

SEQ ID NO: 1635345 - RNA, 13 nt, Human
uauguacuucaug

SEQ ID NO: 1635346 - RNA, 15 nt, Human
gggaguggccacaga

SEQ ID NO: 1635347 - RNA, 13 nt, Human
gggaguggccaca

SEQ ID NO: 1635348 - RNA, 12 nt, Human
uauguaaauccc

SEQ ID NO: 1635349 - RNA, 23 nt, Human
uauguaaaucccauuauucaaag

SEQ ID NO: 1635350 - RNA, 21 nt, Human
uauguaaaucccauuauucaa

SEQ ID NO: 1635351 - RNA, 20 nt, Human
uauguaaaucccauuauuca

SEQ ID NO: 1635352 - RNA, 19 nt, Human
uauguaaaucccauuauuc

SEQ ID NO: 1635353 - RNA, 15 nt, Human
uauguaaaucccauu

SEQ ID NO: 1635354 - RNA, 21 nt, Human
uauuccugcauuugugaaaug

SEQ ID NO: 1635355 - RNA, 20 nt, Human
uauuccugcauuugugaaau

SEQ ID NO: 1635356 - RNA, 19 nt, Human
uauuccugcauuugugaaa

SEQ ID NO: 1635357 - RNA, 17 nt, Human
uauuccugcauuuguga

SEQ ID NO: 1635358 - RNA, 16 nt, Human
uauuauucccauucua

SEQ ID NO: 1635359 - RNA, 14 nt, Human
uauuacaguauaau

SEQ ID NO: 1635360 - RNA, 13 nt, Human
uauuacaguauaa

SEQ ID NO: 1635361 - RNA, 12 nt, Human
uauuacaguaua

SEQ ID NO: 1635362 - RNA, 22 nt, Human
uauuggaaauuuguuauaauga

SEQ ID NO: 1635363 - RNA, 22 nt, Human
uauugcugauggugcaaugacc

SEQ ID NO: 1635364 - RNA, 17 nt, Human
uauugcugauggugcaa

SEQ ID NO: 1635365 - RNA, 18 nt, Human
uauucucuccuguaccuc

SEQ ID NO: 1635366 - RNA, 17 nt, Human
uauucucuccuguaccu

SEQ ID NO: 1635367 - RNA, 12 nt, Human
uauuguuuucag

SEQ ID NO: 1635368 - RNA, 20 nt, Human
uauuguuuucaguguacaug

SEQ ID NO: 1635369 - RNA, 18 nt, Human
uauuguuuucaguguaca

SEQ ID NO: 1635370 - RNA, 22 nt, Human
uauuguuuucaguguacaugga

SEQ ID NO: 1635371 - RNA, 24 nt, Human
uauuuauaaaaauaaaaaacacug

SEQ ID NO: 1635372 - RNA, 16 nt, Human
ucacagucacauucca

SEQ ID NO: 1635373 - RNA, 19 nt, Human
ucacaguccuuaccagcag

SEQ ID NO: 1635374 - RNA, 23 nt, Human
ucacaguccuuaccagcagagca

SEQ ID NO: 1635375 - RNA, 22 nt, Human
ucacaguccuuaccagcagagc

SEQ ID NO: 1635376 - RNA, 19 nt, Human
ucacaggcagguccagggu

SEQ ID NO: 1635377 - RNA, 18 nt, Human
ucacaggcagguccaggg

SEQ ID NO: 1635378 - RNA, 17 nt, Human
ucacaggcagguccagg

SEQ ID NO: 1635379 - RNA, 16 nt, Human
ucacaggcagguccag

SEQ ID NO: 1635380 - RNA, 18 nt, Human
ucacaagacccaaaaggc

SEQ ID NO: 1635381 - RNA, 17 nt, Human
ucacaagacccaaaagg

SEQ ID NO: 1635382 - RNA, 13 nt, Human
ucacaagacccaa

SEQ ID NO: 1635383 - RNA, 14 nt, Human
ucaccaaggcugau

SEQ ID NO: 1635384 - RNA, 21 nt, Human
ucaccaaaucagcugcuacua

SEQ ID NO: 1635385 - RNA, 20 nt, Human
ucaccaaaucagcugcuacu

SEQ ID NO: 1635386 - RNA, 19 nt, Human
ucaccaaaucagcugcuac

SEQ ID NO: 1635387 - RNA, 16 nt, Human
ucaccacaugugcaca

SEQ ID NO: 1635388 - RNA, 17 nt, Human
ucacauuuauucugcuc

SEQ ID NO: 1635389 - RNA, 19 nt, Human
ucacauuuauucugcucac

SEQ ID NO: 1635390 - RNA, 18 nt, Human
ucacauuuauucugcuca

SEQ ID NO: 1635391 - RNA, 21 nt, Human
ucaauaaaauccauacauuug

SEQ ID NO: 1635392 - RNA, 21 nt, Human
ucaagugauucuccugccuca

SEQ ID NO: 1635393 - RNA, 20 nt, Human
ucaagugauucuccugccuc

SEQ ID NO: 1635394 - RNA, 18 nt, Human
ucaacgcagcccugcuuu

SEQ ID NO: 1635395 - RNA, 15 nt, Human
ucaacgcagcccugc

SEQ ID NO: 1635396 - RNA, 14 nt, Human
ucaacgcagcccug

SEQ ID NO: 1635397 - RNA, 23 nt, Human
ucaauuacaggaaguacuggaga

SEQ ID NO: 1635398 - RNA, 21 nt, Human
ucaauuacaggaaguacugga

SEQ ID NO: 1635399 - RNA, 22 nt, Human
ucaaugccccugaauuuaaaua

SEQ ID NO: 1635400 - RNA, 20 nt, Human
ucaaugccccugaauuuaaa

SEQ ID NO: 1635401 - RNA, 18 nt, Human
ucaaugccccugaauuua

SEQ ID NO: 1635402 - RNA, 17 nt, Human
ucaaugccccugaauuu

SEQ ID NO: 1635403 - RNA, 15 nt, Human
ucaaauugugugaaa

SEQ ID NO: 1635404 - RNA, 23 nt, Human
ucaaccccuucgcuccugugucu

SEQ ID NO: 1635405 - RNA, 14 nt, Human
ucaaauugugugaa

SEQ ID NO: 1635406 - RNA, 20 nt, Human
ucaaauuguaagcaugcaca

SEQ ID NO: 1635407 - RNA, 17 nt, Human
ucaaauuguaagcaugc

SEQ ID NO: 1635408 - RNA, 15 nt, Human
ucaaauccuugaaga

SEQ ID NO: 1635409 - RNA, 20 nt, Human
ucaaaucaagaaacuuaagg

SEQ ID NO: 1635410 - RNA, 14 nt, Human
ucaaauaugcaaag

SEQ ID NO: 1635411 - RNA, 16 nt, Human
ucaaauaugcaaagca

SEQ ID NO: 1635412 - RNA, 23 nt, Human
ucaaauauauucagccuggcuuc

SEQ ID NO: 1635413 - RNA, 22 nt, Human
ucaaauauauucagccuggcuu

SEQ ID NO: 1635414 - RNA, 21 nt, Human
ucaaauauauucagccuggcu

SEQ ID NO: 1635415 - RNA, 14 nt, Human
uauuuuauuaugca

SEQ ID NO: 1635416 - RNA, 17 nt, Human
uauuuuauuaugcauga

SEQ ID NO: 1635417 - RNA, 15 nt, Human
uauuuucauucuccu

SEQ ID NO: 1635418 - RNA, 19 nt, Human
uauuuucaacgcagcccug

SEQ ID NO: 1635419 - RNA, 17 nt, Human
uauuuuauguugcauag

SEQ ID NO: 1635420 - RNA, 13 nt, Human
uauuuuauuauga

SEQ ID NO: 1635421 - RNA, 23 nt, Human
uauuuuauuaugaaacuugugua

SEQ ID NO: 1635422 - RNA, 18 nt, Human
uauuuuauuaugaaacuu

SEQ ID NO: 1635423 - RNA, 15 nt, Human
ucaaaaaaagaaaaa

SEQ ID NO: 1635424 - RNA, 14 nt, Human
ucaaaaaaagaaaa

SEQ ID NO: 1635425 - RNA, 14 nt, Human
uauuuuuuuacuaa

SEQ ID NO: 1635426 - RNA, 17 nt, Human
uauuuuuuucuuuucuu

SEQ ID NO: 1635427 - RNA, 22 nt, Human
uauuuucccuauuagagaagag

SEQ ID NO: 1635428 - RNA, 17 nt, Human
ucuuccuggauuauuca

SEQ ID NO: 1635429 - RNA, 18 nt, Human
ucuucagaucucuaacuu

SEQ ID NO: 1635430 - RNA, 23 nt, Human
ucuucagaucucuaacuucacca

SEQ ID NO: 1635431 - RNA, 23 nt, Human
ucuucagcaaaaauauuuuauga

SEQ ID NO: 1635432 - RNA, 22 nt, Human
ucuucagcaaaaauauuuuaug

SEQ ID NO: 1635433 - RNA, 21 nt, Human
ucuucagcaaaaauauuuuau

SEQ ID NO: 1635434 - RNA, 12 nt, Human
ucuugaacuccu

SEQ ID NO: 1635435 - RNA, 19 nt, Human
ucuugaacuccugaccuca

SEQ ID NO: 1635436 - RNA, 17 nt, Human
ucuugaacuccugaccu

SEQ ID NO: 1635437 - RNA, 13 nt, Human
ucuugaaaaaugc

SEQ ID NO: 1635438 - RNA, 13 nt, Human
ucuucuccuuuca

SEQ ID NO: 1635439 - RNA, 14 nt, Human
ucuucuccuuucac

SEQ ID NO: 1635440 - RNA, 18 nt, Human
ucuucuuuuuuugugaug

SEQ ID NO: 1635441 - RNA, 17 nt, Human
ucuucuuuuuuugugau

SEQ ID NO: 1635442 - RNA, 16 nt, Human
ucuucuuuuuuuguga

SEQ ID NO: 1635443 - RNA, 12 nt, Human
ucuucuccacug

SEQ ID NO: 1635444 - RNA, 15 nt, Human
ucugucuucacaaca

SEQ ID NO: 1635445 - RNA, 13 nt, Human
ucuuaaaaagugg

SEQ ID NO: 1635446 - RNA, 12 nt, Human
ucuuaaaguuga

SEQ ID NO: 1635447 - RNA, 14 nt, Human
ucuuaaaguugaau

SEQ ID NO: 1635448 - RNA, 13 nt, Human
ucuuaaaguugaa

SEQ ID NO: 1635449 - RNA, 18 nt, Human
ucuuaagaagacugcauu

SEQ ID NO: 1635450 - RNA, 12 nt, Human
ucuuaagaagac

SEQ ID NO: 1635451 - RNA, 22 nt, Human
ucuuaaccagaucauugugaaa

SEQ ID NO: 1635452 - RNA, 22 nt, Human
ucuuaaauauguggaguucauc

SEQ ID NO: 1635453 - RNA, 17 nt, Human
ucuuaaccagaucauug

SEQ ID NO: 1635454 - RNA, 16 nt, Human
ucuuaaccagaucauu

SEQ ID NO: 1635455 - RNA, 22 nt, Human
ucuuaaaguugaauuuauuggc

SEQ ID NO: 1635456 - RNA, 21 nt, Human
ucuuaaaguugaauuuauugg

SEQ ID NO: 1635457 - RNA, 20 nt, Human
ucuuaaaguugaauuuauug

SEQ ID NO: 1635458 - RNA, 19 nt, Human
ucuuaaaguugaauuuauu

SEQ ID NO: 1635459 - RNA, 16 nt, Human
ucuuaaaguugaauuu

SEQ ID NO: 1635460 - RNA, 23 nt, Human
ucuggccuucggccuccauccug

SEQ ID NO: 1635461 - RNA, 18 nt, Human
ucuggccuucggccucca

SEQ ID NO: 1635462 - RNA, 17 nt, Human
ucuggccuucggccucc

SEQ ID NO: 1635463 - RNA, 19 nt, Human
ucuggcuaugcauuugaaa

SEQ ID NO: 1635464 - RNA, 22 nt, Human
ucuggcuaugcauuugaaaauu

SEQ ID NO: 1635465 - RNA, 15 nt, Human
ucuggcuccagcugg

SEQ ID NO: 1635466 - RNA, 14 nt, Human
ucugggacacaguu

SEQ ID NO: 1635467 - RNA, 23 nt, Human
ucuggugacuuuccucuuugguc

SEQ ID NO: 1635468 - RNA, 23 nt, Human
ucuggcucuuccaggcugggaga

SEQ ID NO: 1635469 - RNA, 18 nt, Human
ucuggcucuuccaggcug

SEQ ID NO: 1635470 - RNA, 19 nt, Human
ucuguccuacucuguguca

SEQ ID NO: 1635471 - RNA, 15 nt, Human
ucuguccuacucugu

SEQ ID NO: 1635472 - RNA, 20 nt, Human
ucuguccuacucugugucag

SEQ ID NO: 1635473 - RNA, 14 nt, Human
ucugucgcccaguc

SEQ ID NO: 1635474 - RNA, 16 nt, Human
ucugucgcccagucug

SEQ ID NO: 1635475 - RNA, 22 nt, Human
ucugucucuggauuauauuaug

SEQ ID NO: 1635476 - RNA, 13 nt, Human
ucugguuccuccc

SEQ ID NO: 1635477 - RNA, 21 nt, Human
ucugguuccuccccuccuccu

SEQ ID NO: 1635478 - RNA, 20 nt, Human
ucugguuccuccccuccucc

SEQ ID NO: 1635479 - RNA, 22 nt, Human
ucugcugacagacacaggcccg

SEQ ID NO: 1635480 - RNA, 21 nt, Human
ucugcugacagacacaggccc

SEQ ID NO: 1635481 - RNA, 20 nt, Human
ucugcugacagacacaggcc

SEQ ID NO: 1635482 - RNA, 19 nt, Human
ucugcugacagacacaggc

SEQ ID NO: 1635483 - RNA, 22 nt, Human
ucugcugauccucccaggcuuc

SEQ ID NO: 1635484 - RNA, 19 nt, Human
ucuggaauaaggagaauga

SEQ ID NO: 1635485 - RNA, 15 nt, Human
ucuggaaugcagugg

SEQ ID NO: 1635486 - RNA, 14 nt, Human
ucuggacaggcaug

SEQ ID NO: 1635487 - RNA, 16 nt, Human
ucuggaaugcaguggu

SEQ ID NO: 1635488 - RNA, 21 nt, Human
ucuggacaggcauguucucug

SEQ ID NO: 1635489 - RNA, 18 nt, Human
ucugcugacagacacagg

SEQ ID NO: 1635490 - RNA, 21 nt, Human
ucugcuccucuccccagcaag

SEQ ID NO: 1635491 - RNA, 18 nt, Human
ucugcuccucuccccagc

SEQ ID NO: 1635492 - RNA, 16 nt, Human
ucugccugcccaggcc

SEQ ID NO: 1635493 - RNA, 15 nt, Human
ucugccugcccaggc

SEQ ID NO: 1635494 - RNA, 14 nt, Human
ucugccugcccagg

SEQ ID NO: 1635495 - RNA, 18 nt, Human
ucugccauauucuguugg

SEQ ID NO: 1635496 - RNA, 21 nt, Human
ucugcaucagcugcugaaaca

SEQ ID NO: 1635497 - RNA, 19 nt, Human
ucugcaucagcugcugaaa

SEQ ID NO: 1635498 - RNA, 14 nt, Human
ucugcaucagcugc

SEQ ID NO: 1635499 - RNA, 17 nt, Human
ucugcauucaggaucaa

SEQ ID NO: 1635500 - RNA, 15 nt, Human
ucugacccacugcuu

SEQ ID NO: 1635501 - RNA, 14 nt, Human
ucugacccacugcu

SEQ ID NO: 1635502 - RNA, 14 nt, Human
ucugaggaauucug

SEQ ID NO: 1635503 - RNA, 19 nt, Human
ucugaggaauucuguauag

SEQ ID NO: 1635504 - RNA, 18 nt, Human
ucugaggaauucuguaua

SEQ ID NO: 1635505 - RNA, 17 nt, Human
ucugaggaauucuguau

SEQ ID NO: 1635506 - RNA, 16 nt, Human
ucugaggaauucugua

SEQ ID NO: 1635507 - RNA, 15 nt, Human
ucugaggaauucugu

SEQ ID NO: 1635508 - RNA, 21 nt, Human
ucugcaagaauugaagcagga

SEQ ID NO: 1635509 - RNA, 20 nt, Human
ucugcaagaauugaagcagg

SEQ ID NO: 1635510 - RNA, 14 nt, Human
ucugcacacagcac

SEQ ID NO: 1635511 - RNA, 15 nt, Human
ucugcaacucugaag

SEQ ID NO: 1635512 - RNA, 14 nt, Human
ucugcaacucugaa

SEQ ID NO: 1635513 - RNA, 23 nt, Human
ucugaggcugaaauucagaauau

SEQ ID NO: 1635514 - RNA, 11 nt, Human
ucugaggcuga

SEQ ID NO: 1635515 - RNA, 13 nt, Human
ucugaaaauguau

SEQ ID NO: 1635516 - RNA, 14 nt, Human
ucugaaaauugaug

SEQ ID NO: 1635517 - RNA, 14 nt, Human
ucugaaaauguaug

SEQ ID NO: 1635518 - RNA, 22 nt, Human
ucugaaaauugaugggauuugg

SEQ ID NO: 1635519 - RNA, 22 nt, Human
ucugacaggcaaugcuggcugu

SEQ ID NO: 1635520 - RNA, 21 nt, Human
ucugacaggcaaugcuggcug

SEQ ID NO: 1635521 - RNA, 12 nt, Human
ucugacaggcaa

SEQ ID NO: 1635522 - RNA, 13 nt, Human
ucugacccacugc

SEQ ID NO: 1635523 - RNA, 15 nt, Human
ucugacauaaguauu

SEQ ID NO: 1635524 - RNA, 19 nt, Human
ucugacacacagcucuguc

SEQ ID NO: 1635525 - RNA, 18 nt, Human
ucugacacacagcucugu

SEQ ID NO: 1635526 - RNA, 17 nt, Human
ucugacacacagcucug

SEQ ID NO: 1635527 - RNA, 16 nt, Human
ucugacacacagcucu

SEQ ID NO: 1635528 - RNA, 20 nt, Human
ucugaaauuuccugggagcu

SEQ ID NO: 1635529 - RNA, 18 nt, Human
ucugaaauuuccugggag

SEQ ID NO: 1635530 - RNA, 17 nt, Human
ucugaaauuuccuggga

SEQ ID NO: 1635531 - RNA, 19 nt, Human
ucucuaacuucaccauauu

SEQ ID NO: 1635532 - RNA, 12 nt, Human
ucucuaacuuca

SEQ ID NO: 1635533 - RNA, 22 nt, Human
ucucgugauugauaagaaccuu

SEQ ID NO: 1635534 - RNA, 14 nt, Human
ucucgugauugaua

SEQ ID NO: 1635535 - RNA, 19 nt, Human
ucuccuguaccucuugagc

SEQ ID NO: 1635536 - RNA, 16 nt, Human
ucuccuguaccucuug

SEQ ID NO: 1635537 - RNA, 17 nt, Human
ucuccuguaccucuuga

SEQ ID NO: 1635538 - RNA, 15 nt, Human
ucuccugccucagcc

SEQ ID NO: 1635539 - RNA, 17 nt, Human
ucuccugccucagccuc

SEQ ID NO: 1635540 - RNA, 19 nt, Human
ucuccugccucagccuccc

SEQ ID NO: 1635541 - RNA, 15 nt, Human
ucuccuguaccucuu

SEQ ID NO: 1635542 - RNA, 21 nt, Human
ucuccuggaaauauuaagaaa

SEQ ID NO: 1635543 - RNA, 21 nt, Human
ucuccuggaagugcuaauuuu

SEQ ID NO: 1635544 - RNA, 12 nt, Human
ucuccugccuca

SEQ ID NO: 1635545 - RNA, 18 nt, Human
ucucaagagggcacuggu

SEQ ID NO: 1635546 - RNA, 17 nt, Human
ucucaagagggcacugg

SEQ ID NO: 1635547 - RNA, 19 nt, Human
ucucaagagggcacuggug

SEQ ID NO: 1635548 - RNA, 16 nt, Human
ucucuaguuugauuaa

SEQ ID NO: 1635549 - RNA, 15 nt, Human
ucucuaguuugauua

SEQ ID NO: 1635550 - RNA, 17 nt, Human
ucucugaggacacuaac

SEQ ID NO: 1635551 - RNA, 15 nt, Human
ucucugauacagaaa

SEQ ID NO: 1635552 - RNA, 14 nt, Human
ucucugcagguccc

SEQ ID NO: 1635553 - RNA, 13 nt, Human
ucucugcaggucc

SEQ ID NO: 1635554 - RNA, 18 nt, Human
ucucugcaggucccuaau

SEQ ID NO: 1635555 - RNA, 16 nt, Human
ucucugcaggucccua

SEQ ID NO: 1635556 - RNA, 15 nt, Human
ucucugcaggucccu

SEQ ID NO: 1635557 - RNA, 22 nt, Human
ucgugggacagucaccucaugg

SEQ ID NO: 1635558 - RNA, 21 nt, Human
ucguggaacaguuaccucugc

SEQ ID NO: 1635559 - RNA, 18 nt, Human
ucggccuccauccugagg

SEQ ID NO: 1635560 - RNA, 16 nt, Human
ucgugauugauaagaa

SEQ ID NO: 1635561 - RNA, 22 nt, Human
ucggccucccaaagugcuggga

SEQ ID NO: 1635562 - RNA, 13 nt, Human
ucguuaauuugua

SEQ ID NO: 1635563 - RNA, 21 nt, Human
ucuaaaucuccaaaauaaaac

SEQ ID NO: 1635564 - RNA, 22 nt, Human
ucuaaaucuccaaaauaaaacu

SEQ ID NO: 1635565 - RNA, 17 nt, Human
ucuaugaaauauuaugu

SEQ ID NO: 1635566 - RNA, 14 nt, Human
ucuaugaaauauua

SEQ ID NO: 1635567 - RNA, 13 nt, Human
ucuaugaaauauu

SEQ ID NO: 1635568 - RNA, 21 nt, Human
ucuaucaaguauuauaccuuu

SEQ ID NO: 1635569 - RNA, 22 nt, Human
ucuaucaaguauuauaccuuuu

SEQ ID NO: 1635570 - RNA, 15 nt, Human
ucuaucaaguauuau

SEQ ID NO: 1635571 - RNA, 17 nt, Human
ucucaaauaacuaaaag

SEQ ID NO: 1635572 - RNA, 15 nt, Human
ucucaacuccaaacu

SEQ ID NO: 1635573 - RNA, 16 nt, Human
ucuaugcugaguuugu

SEQ ID NO: 1635574 - RNA, 20 nt, Human
ucuaugcugaguuugugcug

SEQ ID NO: 1635575 - RNA, 19 nt, Human
ucuagugagcagucaggaa

SEQ ID NO: 1635576 - RNA, 18 nt, Human
ucuaggaggucucuaaga

SEQ ID NO: 1635577 - RNA, 22 nt, Human
ucuagugagcagucaggaaaga

SEQ ID NO: 1635578 - RNA, 16 nt, Human
ucuaggacugaauuau

SEQ ID NO: 1635579 - RNA, 23 nt, Human
ucuaggacugaauuaugaaacuu

SEQ ID NO: 1635580 - RNA, 14 nt, Human
ucuaauauguaaca

SEQ ID NO: 1635581 - RNA, 14 nt, Human
ucuaaugugugaau

SEQ ID NO: 1635582 - RNA, 20 nt, Human
uccugccuaagugcagcccc

SEQ ID NO: 1635583 - RNA, 14 nt, Human
uccugagccagauu

SEQ ID NO: 1635584 - RNA, 14 nt, Human
uccugccucagccu

SEQ ID NO: 1635585 - RNA, 13 nt, Human
uccugagccagau

SEQ ID NO: 1635586 - RNA, 19 nt, Human
uccuggcacccggccccug

SEQ ID NO: 1635587 - RNA, 16 nt, Human
uccuggcacccggccc

SEQ ID NO: 1635588 - RNA, 14 nt, Human
uccuggcacccggc

SEQ ID NO: 1635589 - RNA, 15 nt, Human
uccugccucagccuc

SEQ ID NO: 1635590 - RNA, 13 nt, Human
uccugccucagcc

SEQ ID NO: 1635591 - RNA, 16 nt, Human
uccugccucagccucc

SEQ ID NO: 1635592 - RNA, 17 nt, Human
uccugccucagccuccc

SEQ ID NO: 1635593 - RNA, 22 nt, Human
uccuggcacccggccccugcug

SEQ ID NO: 1635594 - RNA, 21 nt, Human
uccuggcacccggccccugcu

SEQ ID NO: 1635595 - RNA, 20 nt, Human
uccuggcacccggccccugc

SEQ ID NO: 1635596 - RNA, 22 nt, Human
uccuggcacugcuuccagugag

SEQ ID NO: 1635597 - RNA, 18 nt, Human
uccuggcacugcuuccag

SEQ ID NO: 1635598 - RNA, 22 nt, Human
uccuguaccucuugagccuuga

SEQ ID NO: 1635599 - RNA, 20 nt, Human
uccuguaccucuugagccuu

SEQ ID NO: 1635600 - RNA, 16 nt, Human
uccuuggacucauuuu

SEQ ID NO: 1635601 - RNA, 23 nt, Human
uccuuuucacaguucucuccuuc

SEQ ID NO: 1635602 - RNA, 19 nt, Human
uccuuuuaaaacacuucca

SEQ ID NO: 1635603 - RNA, 18 nt, Human
uccuuuucgcaggauucu

SEQ ID NO: 1635604 - RNA, 13 nt, Human
ucgaacuggcugc

SEQ ID NO: 1635605 - RNA, 15 nt, Human
ucgaacuccugaccu

SEQ ID NO: 1635606 - RNA, 20 nt, Human
uccuucaccuuuguccccac

SEQ ID NO: 1635607 - RNA, 18 nt, Human
uccuucaccuuugucccc

SEQ ID NO: 1635608 - RNA, 20 nt, Human
uccuuaccagcagagcaccu

SEQ ID NO: 1635609 - RNA, 19 nt, Human
uccuucacagaugggugcu

SEQ ID NO: 1635610 - RNA, 18 nt, Human
uccuucacagaugggugc

SEQ ID NO: 1635611 - RNA, 18 nt, Human
uccuuaccagcagagcac

SEQ ID NO: 1635612 - RNA, 17 nt, Human
uccuuaccagcagagca

SEQ ID NO: 1635613 - RNA, 16 nt, Human
uccuuaccagcagagc

SEQ ID NO: 1635614 - RNA, 22 nt, Human
uccuucaccuuuguccccaccg

SEQ ID NO: 1635615 - RNA, 21 nt, Human
uccuucaccuuuguccccacc

SEQ ID NO: 1635616 - RNA, 20 nt, Human
uccucugcuugccaucccuc

SEQ ID NO: 1635617 - RNA, 17 nt, Human
uccucugcugcuggcug

SEQ ID NO: 1635618 - RNA, 21 nt, Human
uccucugcuugccaucccucc

SEQ ID NO: 1635619 - RNA, 22 nt, Human
uccucugcuugccaucccuccc

SEQ ID NO: 1635620 - RNA, 16 nt, Human
uccucugcugcuggcu

SEQ ID NO: 1635621 - RNA, 15 nt, Human
uccucugcugcuggc

SEQ ID NO: 1635622 - RNA, 14 nt, Human
uccucugcugcugg

SEQ ID NO: 1635623 - RNA, 17 nt, Human
uccucuaggaggucucu

SEQ ID NO: 1635624 - RNA, 19 nt, Human
uccucuguacagagcccac

SEQ ID NO: 1635625 - RNA, 18 nt, Human
uccucuguacagagccca

SEQ ID NO: 1635626 - RNA, 17 nt, Human
uccucuguacagagccc

SEQ ID NO: 1635627 - RNA, 16 nt, Human
uccucuguacagagcc

SEQ ID NO: 1635628 - RNA, 21 nt, Human
uccucuuccugaauuuuauuu

SEQ ID NO: 1635629 - RNA, 14 nt, Human
uccucuaggagguc

SEQ ID NO: 1635630 - RNA, 19 nt, Human
uccuccuuuucacaguucu

SEQ ID NO: 1635631 - RNA, 18 nt, Human
uccuauauuguuuucagu

SEQ ID NO: 1635632 - RNA, 21 nt, Human
uccuauauuguuuucagugua

SEQ ID NO: 1635633 - RNA, 17 nt, Human
uccucauuagcauuuug

SEQ ID NO: 1635634 - RNA, 18 nt, Human
uccuacccacccuccuuu

SEQ ID NO: 1635635 - RNA, 15 nt, Human
uccuacaagacacag

SEQ ID NO: 1635636 - RNA, 18 nt, Human
uccuaauuccacagcugc

SEQ ID NO: 1635637 - RNA, 17 nt, Human
uccuaauuccacagcug

SEQ ID NO: 1635638 - RNA, 16 nt, Human
uccuaauuccacagcu

SEQ ID NO: 1635639 - RNA, 15 nt, Human
uccuaauuccacagc

SEQ ID NO: 1635640 - RNA, 22 nt, Human
uccuaaugaaugcauaaaaugu

SEQ ID NO: 1635641 - RNA, 17 nt, Human
uccgaccagacaccuug

SEQ ID NO: 1635642 - RNA, 13 nt, Human
uccgaccagacac

SEQ ID NO: 1635643 - RNA, 16 nt, Human
uccuaaucuucugaac

SEQ ID NO: 1635644 - RNA, 16 nt, Human
ucccuugaugaagaag

SEQ ID NO: 1635645 - RNA, 15 nt, Human
ucccuugaugaagaa

SEQ ID NO: 1635646 - RNA, 13 nt, Human
ucccuucccaccu

SEQ ID NO: 1635647 - RNA, 14 nt, Human
ucccuucccaccuc

SEQ ID NO: 1635648 - RNA, 14 nt, Human
ucccugcacuugca

SEQ ID NO: 1635649 - RNA, 13 nt, Human
ucccugcacuugc

SEQ ID NO: 1635650 - RNA, 20 nt, Human
ucccugccccucccuucaac

SEQ ID NO: 1635651 - RNA, 21 nt, Human
uccccuguuuguuucugaaag

SEQ ID NO: 1635652 - RNA, 20 nt, Human
uccccuguuuguuucugaaa

SEQ ID NO: 1635653 - RNA, 18 nt, Human
uccagguuuaagcuguua

SEQ ID NO: 1635654 - RNA, 17 nt, Human
uccagguuuaagcuguu

SEQ ID NO: 1635655 - RNA, 15 nt, Human
ucccuaauaaagcug

SEQ ID NO: 1635656 - RNA, 16 nt, Human
ucccuauuagagaaga

SEQ ID NO: 1635657 - RNA, 16 nt, Human
ucccuaauaaagcugu

SEQ ID NO: 1635658 - RNA, 19 nt, Human
ucccuccugggaaugaagc

SEQ ID NO: 1635659 - RNA, 11 nt, Human
ucccuccuggg

SEQ ID NO: 1635660 - RNA, 17 nt, Human
uguaacaagccacccca

SEQ ID NO: 1635661 - RNA, 14 nt, Human
uguaacaagccacc

SEQ ID NO: 1635662 - RNA, 11 nt, Human
uguacagagcc

SEQ ID NO: 1635663 - RNA, 14 nt, Human
uguacagacaacaa

SEQ ID NO: 1635664 - RNA, 21 nt, Human
uguacaaaguauuaagcauau

SEQ ID NO: 1635665 - RNA, 17 nt, Human
uguaaugaaaaccacau

SEQ ID NO: 1635666 - RNA, 15 nt, Human
uguacaaaguauuaa

SEQ ID NO: 1635667 - RNA, 20 nt, Human
uguacaaaguauuaagcaua

SEQ ID NO: 1635668 - RNA, 19 nt, Human
uguacaaaguauuaagcau

SEQ ID NO: 1635669 - RNA, 18 nt, Human
uguacaaaguauuaagca

SEQ ID NO: 1635670 - RNA, 17 nt, Human
uguacaaaguauuaagc

SEQ ID NO: 1635671 - RNA, 13 nt, Human
uguaaugaaaacc

SEQ ID NO: 1635672 - RNA, 12 nt, Human
uguaaugaaaac

SEQ ID NO: 1635673 - RNA, 11 nt, Human
uguaaugaaaa

SEQ ID NO: 1635674 - RNA, 12 nt, Human
uguaaaauggug

SEQ ID NO: 1635675 - RNA, 11 nt, Human
uguaaaauggu

SEQ ID NO: 1635676 - RNA, 23 nt, Human
ugguuuuuaaaaaacugcugacu

SEQ ID NO: 1635677 - RNA, 21 nt, Human
ugguuuuuaaaaaacugcuga

SEQ ID NO: 1635678 - RNA, 19 nt, Human
ugguuuucuuguguguuua

SEQ ID NO: 1635679 - RNA, 16 nt, Human
ugguuuucuguucuuu

SEQ ID NO: 1635680 - RNA, 20 nt, Human
ugguuguacauauaagugau

SEQ ID NO: 1635681 - RNA, 13 nt, Human
ugguugcauccua

SEQ ID NO: 1635682 - RNA, 14 nt, Human
uggguagacacaca

SEQ ID NO: 1635683 - RNA, 23 nt, Human
uggguacuuguggacacagcucu

SEQ ID NO: 1635684 - RNA, 20 nt, Human
uggguacuuguggacacagc

SEQ ID NO: 1635685 - RNA, 14 nt, Human
uggugagaggcauc

SEQ ID NO: 1635686 - RNA, 23 nt, Human
uggugacuuuggauaauaaggaa

SEQ ID NO: 1635687 - RNA, 19 nt, Human
uggugacuuuggauaauaa

SEQ ID NO: 1635688 - RNA, 18 nt, Human
uggugacuuuggauaaua

SEQ ID NO: 1635689 - RNA, 16 nt, Human
uggugacuuuggauaa

SEQ ID NO: 1635690 - RNA, 20 nt, Human
uggugcaaugaccuuucaau

SEQ ID NO: 1635691 - RNA, 19 nt, Human
uggugcaaugaccuuucaa

SEQ ID NO: 1635692 - RNA, 14 nt, Human
uggugcaaugaccu

SEQ ID NO: 1635693 - RNA, 18 nt, Human
ugguggcagugggagcug

SEQ ID NO: 1635694 - RNA, 13 nt, Human
ugguggcaguggg

SEQ ID NO: 1635695 - RNA, 20 nt, Human
ugguggcagugggagcugcc

SEQ ID NO: 1635696 - RNA, 19 nt, Human
ugguggcccgacagccugg

SEQ ID NO: 1635697 - RNA, 18 nt, Human
uggugggggccucggugu

SEQ ID NO: 1635698 - RNA, 16 nt, Human
uggugggggccucggu

SEQ ID NO: 1635699 - RNA, 13 nt, Human
ugguggcuggguu

SEQ ID NO: 1635700 - RNA, 21 nt, Human
ugguggcccgacagccuggca

SEQ ID NO: 1635701 - RNA, 19 nt, Human
uggugguuuucuguucuuu

SEQ ID NO: 1635702 - RNA, 17 nt, Human
uggugguuucagaaaug

SEQ ID NO: 1635703 - RNA, 18 nt, Human
uggugguuucagaaaugu

SEQ ID NO: 1635704 - RNA, 20 nt, Human
ugguucccuugaugaagaag

SEQ ID NO: 1635705 - RNA, 17 nt, Human
ugguucccuugaugaag

SEQ ID NO: 1635706 - RNA, 16 nt, Human
ugguucccuugaugaa

SEQ ID NO: 1635707 - RNA, 23 nt, Human
ugguuccccuguucacucuacuu

SEQ ID NO: 1635708 - RNA, 23 nt, Human
ugguuccuccccuccuccuggac

SEQ ID NO: 1635709 - RNA, 18 nt, Human
ugguuccuccccuccucc

SEQ ID NO: 1635710 - RNA, 12 nt, Human
ugguuccucccc

SEQ ID NO: 1635711 - RNA, 18 nt, Human
ugguugaugaucuuugca

SEQ ID NO: 1635712 - RNA, 19 nt, Human
uggugucgggcaugacacg

SEQ ID NO: 1635713 - RNA, 18 nt, Human
uggugucgggcaugacac

SEQ ID NO: 1635714 - RNA, 20 nt, Human
ugguuccccuguucacucua

SEQ ID NO: 1635715 - RNA, 19 nt, Human
ugguuccccuguucacucu

SEQ ID NO: 1635716 - RNA, 18 nt, Human
ugguuccccuguucacuc

SEQ ID NO: 1635717 - RNA, 11 nt, Human
ugguuccccug

SEQ ID NO: 1635718 - RNA, 15 nt, Human
uggugucgggcauga

SEQ ID NO: 1635719 - RNA, 16 nt, Human
uggugucaccugaaga

SEQ ID NO: 1635720 - RNA, 23 nt, Human
uguacagcaaggagauuuacaac

SEQ ID NO: 1635721 - RNA, 12 nt, Human
uguacagagccc

SEQ ID NO: 1635722 - RNA, 13 nt, Human
uguacagagccca

SEQ ID NO: 1635723 - RNA, 22 nt, Human
uguacagcaaggagauuuacaa

SEQ ID NO: 1635724 - RNA, 13 nt, Human
uguauaaaauaau

SEQ ID NO: 1635725 - RNA, 18 nt, Human
uguaggaagguuaauguu

SEQ ID NO: 1635726 - RNA, 14 nt, Human
uguauaaaauaauu

SEQ ID NO: 1635727 - RNA, 19 nt, Human
uguaguguuggagaagaac

SEQ ID NO: 1635728 - RNA, 21 nt, Human
uguaguguuggagaagaacug

SEQ ID NO: 1635729 - RNA, 20 nt, Human
uguaguguuggagaagaacu

SEQ ID NO: 1635730 - RNA, 13 nt, Human
uguaucugagcag

SEQ ID NO: 1635731 - RNA, 22 nt, Human
uguaugaaagauggcugugccu

SEQ ID NO: 1635732 - RNA, 23 nt, Human
uguauagauuagagaguguugaa

SEQ ID NO: 1635733 - RNA, 21 nt, Human
uguauagauuagaauucugua

SEQ ID NO: 1635734 - RNA, 15 nt, Human
uguauagauuagaau

SEQ ID NO: 1635735 - RNA, 23 nt, Human
uguauagaaccucuuugucuaca

SEQ ID NO: 1635736 - RNA, 19 nt, Human
uguauuuuaaaagaaugau

SEQ ID NO: 1635737 - RNA, 18 nt, Human
uguauuuuaaaagaauga

SEQ ID NO: 1635738 - RNA, 19 nt, Human
uguauuuuacuaauaaaau

SEQ ID NO: 1635739 - RNA, 14 nt, Human
ugucacaggcaggu

SEQ ID NO: 1635740 - RNA, 13 nt, Human
ugucacacacuuu

SEQ ID NO: 1635741 - RNA, 21 nt, Human
ugucaauuacaggaaguacug

SEQ ID NO: 1635742 - RNA, 13 nt, Human
uguaugcgugugu

SEQ ID NO: 1635743 - RNA, 14 nt, Human
ugucagugugacug

SEQ ID NO: 1635744 - RNA, 15 nt, Human
ugucagugugacuga

SEQ ID NO: 1635745 - RNA, 19 nt, Human
ugucagugugacugaucuc

SEQ ID NO: 1635746 - RNA, 16 nt, Human
ugucagugugacugau

SEQ ID NO: 1635747 - RNA, 21 nt, Human
ugucacaggcagguccagggu

SEQ ID NO: 1635748 - RNA, 17 nt, Human
ugucacaggcaggucca

SEQ ID NO: 1635749 - RNA, 16 nt, Human
ugucacaggcaggucc

SEQ ID NO: 1635750 - RNA, 15 nt, Human
ugucacaggcagguc

SEQ ID NO: 1635751 - RNA, 12 nt, Human
ugucuuaauuaa

SEQ ID NO: 1635752 - RNA, 23 nt, Human
ugucuuuggacccugaggcccag

SEQ ID NO: 1635753 - RNA, 16 nt, Human
ugucuuuucuugcaug

SEQ ID NO: 1635754 - RNA, 21 nt, Human
ugucucaaaaaaagaaaaaga

SEQ ID NO: 1635755 - RNA, 18 nt, Human
ugucucaagagggcacug

SEQ ID NO: 1635756 - RNA, 17 nt, Human
ugucucaagagggcacu

SEQ ID NO: 1635757 - RNA, 22 nt, Human
ugucucagauuuuauuauguaa

SEQ ID NO: 1635758 - RNA, 19 nt, Human
ugucucaagagggcacugg

SEQ ID NO: 1635759 - RNA, 20 nt, Human
ugucucagauuuuauuaugu

SEQ ID NO: 1635760 - RNA, 16 nt, Human
ugucucagauuuuauu

SEQ ID NO: 1635761 - RNA, 23 nt, Human
ugucuaguuguuugauucagaca

SEQ ID NO: 1635762 - RNA, 15 nt, Human
ugucuaguuguuuga

SEQ ID NO: 1635763 - RNA, 16 nt, Human
ugucuaugggacucaa

SEQ ID NO: 1635764 - RNA, 15 nt, Human
ugucuaugggacuca

SEQ ID NO: 1635765 - RNA, 14 nt, Human
ugucuaugggacuc

SEQ ID NO: 1635766 - RNA, 22 nt, Human
ugucuacacuaagagagaauga

SEQ ID NO: 1635767 - RNA, 18 nt, Human
ugucuacaccauuaugug

SEQ ID NO: 1635768 - RNA, 17 nt, Human
ugucuacacuaagagag

SEQ ID NO: 1635769 - RNA, 17 nt, Human
ugucuacaccauuaugu

SEQ ID NO: 1635770 - RNA, 14 nt, Human
ugucuaaugaaacc

SEQ ID NO: 1635771 - RNA, 20 nt, Human
uguccugggagugagcuggu

SEQ ID NO: 1635772 - RNA, 19 nt, Human
uguccugggagugagcugg

SEQ ID NO: 1635773 - RNA, 12 nt, Human
uguccugggagu

SEQ ID NO: 1635774 - RNA, 22 nt, Human
uguccugccuaaggcugaacuu

SEQ ID NO: 1635775 - RNA, 19 nt, Human
uguccccgcacugggcuug

SEQ ID NO: 1635776 - RNA, 17 nt, Human
uguccccgcacugggcu

SEQ ID NO: 1635777 - RNA, 13 nt, Human
ugucaucucagcu

SEQ ID NO: 1635778 - RNA, 13 nt, Human
uguccccuauccu

SEQ ID NO: 1635779 - RNA, 18 nt, Human
ugcuugugaaaggaaaga

SEQ ID NO: 1635780 - RNA, 22 nt, Human
ugcuucuguuuuauaauuuugu

SEQ ID NO: 1635781 - RNA, 13 nt, Human
ugcuucuucagag

SEQ ID NO: 1635782 - RNA, 14 nt, Human
ugcuuguuaacuga

SEQ ID NO: 1635783 - RNA, 16 nt, Human
ugcuuguuaacugagu

SEQ ID NO: 1635784 - RNA, 17 nt, Human
ugcuuuggaaaacccag

SEQ ID NO: 1635785 - RNA, 13 nt, Human
ugcuuuggaaauc

SEQ ID NO: 1635786 - RNA, 22 nt, Human
uggaaaaguauguuagugcaaa

SEQ ID NO: 1635787 - RNA, 17 nt, Human
uggaacacucugagacu

SEQ ID NO: 1635788 - RNA, 15 nt, Human
uggaacacucugaga

SEQ ID NO: 1635789 - RNA, 17 nt, Human
uggaacgcguugaaauu

SEQ ID NO: 1635790 - RNA, 16 nt, Human
uggaacgcguugaaau

SEQ ID NO: 1635791 - RNA, 15 nt, Human
uggaacgcguugaaa

SEQ ID NO: 1635792 - RNA, 14 nt, Human
uggaacgcguugaa

SEQ ID NO: 1635793 - RNA, 17 nt, Human
ugcuucuguuuuauaau

SEQ ID NO: 1635794 - RNA, 23 nt, Human
ugcuuccagugaggcucugcccu

SEQ ID NO: 1635795 - RNA, 22 nt, Human
ugcuuccagugaggcucugccc

SEQ ID NO: 1635796 - RNA, 13 nt, Human
ugcuuaacuucac

SEQ ID NO: 1635797 - RNA, 14 nt, Human
ugcuuaacuucaca

SEQ ID NO: 1635798 - RNA, 17 nt, Human
ugcuuaacuucacauau

SEQ ID NO: 1635799 - RNA, 18 nt, Human
ugcuuaacuucacauauu

SEQ ID NO: 1635800 - RNA, 19 nt, Human
ugcuuaacuucacauauug

SEQ ID NO: 1635801 - RNA, 23 nt, Human
uggacaggcauguucucugagga

SEQ ID NO: 1635802 - RNA, 15 nt, Human
uggaccaaaaaccag

SEQ ID NO: 1635803 - RNA, 22 nt, Human
uggacaggcauguucucugagg

SEQ ID NO: 1635804 - RNA, 18 nt, Human
uggacaggcauguucucu

SEQ ID NO: 1635805 - RNA, 23 nt, Human
uggacguguuaugacuccagaau

SEQ ID NO: 1635806 - RNA, 19 nt, Human
uggacguguuaugacucca

SEQ ID NO: 1635807 - RNA, 17 nt, Human
uggaccaaaaaccagua

SEQ ID NO: 1635808 - RNA, 20 nt, Human
uggacuaacuugucuuugga

SEQ ID NO: 1635809 - RNA, 19 nt, Human
uggacuaacuugucuuugg

SEQ ID NO: 1635810 - RNA, 22 nt, Human
uggcacugcuuccagugaggcu

SEQ ID NO: 1635811 - RNA, 22 nt, Human
uggcacuauaauguaagcucua

SEQ ID NO: 1635812 - RNA, 19 nt, Human
uggcacugcuuccagugag

SEQ ID NO: 1635813 - RNA, 21 nt, Human
uggcacuauaauguaagcucu

SEQ ID NO: 1635814 - RNA, 15 nt, Human
uggauuuaacagaaa

SEQ ID NO: 1635815 - RNA, 17 nt, Human
uggauuuaacagaaaug

SEQ ID NO: 1635816 - RNA, 23 nt, Human
uggaggggggaggugggauccuc

SEQ ID NO: 1635817 - RNA, 21 nt, Human
uggaugcagccucacaguccu

SEQ ID NO: 1635818 - RNA, 13 nt, Human
uggaugcagccuc

SEQ ID NO: 1635819 - RNA, 22 nt, Human
uggaugcagccucacaguccuu

SEQ ID NO: 1635820 - RNA, 19 nt, Human
uggaucaaauccagccugc

SEQ ID NO: 1635821 - RNA, 22 nt, Human
uggccuucggccuccauccuga

SEQ ID NO: 1635822 - RNA, 23 nt, Human
uggccuucggccuccauccugag

SEQ ID NO: 1635823 - RNA, 13 nt, Human
uggccucugcacu

SEQ ID NO: 1635824 - RNA, 17 nt, Human
uggcuccagcuggccgg

SEQ ID NO: 1635825 - RNA, 16 nt, Human
uggcugcugaaggcuc

SEQ ID NO: 1635826 - RNA, 14 nt, Human
uggcugcugaaggc

SEQ ID NO: 1635827 - RNA, 13 nt, Human
uggcugcugaagg

SEQ ID NO: 1635828 - RNA, 22 nt, Human
uggcuuccuaaaauucagugga

SEQ ID NO: 1635829 - RNA, 22 nt, Human
uggcuucccgcucagcccuccc

SEQ ID NO: 1635830 - RNA, 21 nt, Human
uggcuucccgcucagcccucc

SEQ ID NO: 1635831 - RNA, 20 nt, Human
uggcuucccgcucagcccuc

SEQ ID NO: 1635832 - RNA, 19 nt, Human
uggcuucccgcucagcccu

SEQ ID NO: 1635833 - RNA, 13 nt, Human
uggcuuuucugau

SEQ ID NO: 1635834 - RNA, 14 nt, Human
ugggaaugaagcaa

SEQ ID NO: 1635835 - RNA, 22 nt, Human
uggcuuuucacugcuggcugcc

SEQ ID NO: 1635836 - RNA, 21 nt, Human
uggcuuuucacugcuggcugc

SEQ ID NO: 1635837 - RNA, 19 nt, Human
uggcuuuucacugcuggcu

SEQ ID NO: 1635838 - RNA, 18 nt, Human
uggcuuuucacugcuggc

SEQ ID NO: 1635839 - RNA, 16 nt, Human
uggcuuuucacugcug

SEQ ID NO: 1635840 - RNA, 22 nt, Human
uggccucccaacucaccccagc

SEQ ID NO: 1635841 - RNA, 21 nt, Human
uggccucccaacucaccccag

SEQ ID NO: 1635842 - RNA, 20 nt, Human
uggccucccaacucacccca

SEQ ID NO: 1635843 - RNA, 19 nt, Human
uggccucccaacucacccc

SEQ ID NO: 1635844 - RNA, 14 nt, Human
uggccucccaacuc

SEQ ID NO: 1635845 - RNA, 11 nt, Human
uggccucccaa

SEQ ID NO: 1635846 - RNA, 23 nt, Human
uggccucaagugauucuccugcc

SEQ ID NO: 1635847 - RNA, 18 nt, Human
uggccucaagugauucuc

SEQ ID NO: 1635848 - RNA, 23 nt, Human
uggccuagcauacguacacauuu

SEQ ID NO: 1635849 - RNA, 20 nt, Human
uggccccucagggucccugg

SEQ ID NO: 1635850 - RNA, 13 nt, Human
uggccccucaggg

SEQ ID NO: 1635851 - RNA, 19 nt, Human
uggcagcugcgguccaccc

SEQ ID NO: 1635852 - RNA, 17 nt, Human
uggcagcugcgguccac

SEQ ID NO: 1635853 - RNA, 22 nt, Human
uggccccucagggucccuggug

SEQ ID NO: 1635854 - RNA, 21 nt, Human
uggccccucagggucccuggu

SEQ ID NO: 1635855 - RNA, 14 nt, Human
uggccccugcccgg

SEQ ID NO: 1635856 - RNA, 20 nt, Human
uggccuagcauacguacaca

SEQ ID NO: 1635857 - RNA, 14 nt, Human
ugggacagggagga

SEQ ID NO: 1635858 - RNA, 16 nt, Human
ugggaggaucucuuga

SEQ ID NO: 1635859 - RNA, 15 nt, Human
ugggacacccuguga

SEQ ID NO: 1635860 - RNA, 14 nt, Human
ugggacacccugug

SEQ ID NO: 1635861 - RNA, 21 nt, Human
ugggaaugaaugucaguguga

SEQ ID NO: 1635862 - RNA, 16 nt, Human
ugggaaugaaugucag

SEQ ID NO: 1635863 - RNA, 18 nt, Human
ugggaugauuggaggggg

SEQ ID NO: 1635864 - RNA, 18 nt, Human
ugggaggaucucuugagc

SEQ ID NO: 1635865 - RNA, 12 nt, Human
ugggauaaaugc

SEQ ID NO: 1635866 - RNA, 14 nt, Human
ugggauaaaugcca

SEQ ID NO: 1635867 - RNA, 13 nt, Human
ugggauaaaugcc

SEQ ID NO: 1635868 - RNA, 12 nt, Human
ugggcagcugcc

SEQ ID NO: 1635869 - RNA, 20 nt, Human
ugggcagcugccuccccucc

SEQ ID NO: 1635870 - RNA, 22 nt, Human
ugggcagcugccuccccuccuc

SEQ ID NO: 1635871 - RNA, 23 nt, Human
ugggcagcugccuccccuccucu

SEQ ID NO: 1635872 - RNA, 17 nt, Human
ugggcagagcagagacc

SEQ ID NO: 1635873 - RNA, 15 nt, Human
ugggcagagcagaga

SEQ ID NO: 1635874 - RNA, 14 nt, Human
ugggcagagcagag

SEQ ID NO: 1635875 - RNA, 18 nt, Human
ugggcagagcagagacca

SEQ ID NO: 1635876 - RNA, 21 nt, Human
ugggcuugucuguagauuuua

SEQ ID NO: 1635877 - RNA, 17 nt, Human
ugggcuugucuguagau

SEQ ID NO: 1635878 - RNA, 23 nt, Human
ugggcuuggggaccagagcugcc

SEQ ID NO: 1635879 - RNA, 13 nt, Human
uggggcagcuuga

SEQ ID NO: 1635880 - RNA, 22 nt, Human
ugggcuucaguggcagcugcuu

SEQ ID NO: 1635881 - RNA, 15 nt, Human
ugggcuucauccucc

SEQ ID NO: 1635882 - RNA, 22 nt, Human
ugggcuucauccuccucagauc

SEQ ID NO: 1635883 - RNA, 16 nt, Human
ugggggccucagugcc

SEQ ID NO: 1635884 - RNA, 20 nt, Human
uggggccaggcugggucgcc

SEQ ID NO: 1635885 - RNA, 17 nt, Human
uggggccaggcuggguc

SEQ ID NO: 1635886 - RNA, 19 nt, Human
uggggggcugaggugggag

SEQ ID NO: 1635887 - RNA, 23 nt, Human
ugggguuaucugaagucagaucu

SEQ ID NO: 1635888 - RNA, 23 nt, Human
ugaugcuucuucagagacuccug

SEQ ID NO: 1635889 - RNA, 13 nt, Human
ugauguacaugua

SEQ ID NO: 1635890 - RNA, 22 nt, Human
ugaugcuucuucagagacuccu

SEQ ID NO: 1635891 - RNA, 21 nt, Human
ugaugcuucuucagagacucc

SEQ ID NO: 1635892 - RNA, 19 nt, Human
ugaugcuucuucagagacu

SEQ ID NO: 1635893 - RNA, 20 nt, Human
ugaucuuugcagacaggcaa

SEQ ID NO: 1635894 - RNA, 19 nt, Human
ugaucuuugcagacaggca

SEQ ID NO: 1635895 - RNA, 21 nt, Human
ugaucugaugcaagcaagaaa

SEQ ID NO: 1635896 - RNA, 23 nt, Human
ugaucuuugcagacaggcaagca

SEQ ID NO: 1635897 - RNA, 21 nt, Human
ugaucuuugcagacaggcaag

SEQ ID NO: 1635898 - RNA, 14 nt, Human
ugaugccaugagga

SEQ ID NO: 1635899 - RNA, 20 nt, Human
ugaugaugaaaugaggucag

SEQ ID NO: 1635900 - RNA, 23 nt, Human
ugaugaucuuugcagacaggcaa

SEQ ID NO: 1635901 - RNA, 22 nt, Human
ugaugaucuuugcagacaggca

SEQ ID NO: 1635902 - RNA, 24 nt, Human
ugauaguuguaccgcaaugugacu

SEQ ID NO: 1635903 - RNA, 23 nt, Human
ugauauaaguguguguuuuucau

SEQ ID NO: 1635904 - RNA, 17 nt, Human
ugauauaaguguguguu

SEQ ID NO: 1635905 - RNA, 22 nt, Human
ugaucacggcucacugcagccu

SEQ ID NO: 1635906 - RNA, 20 nt, Human
ugauccacccaccucagccu

SEQ ID NO: 1635907 - RNA, 16 nt, Human
ugauccacccaccuca

SEQ ID NO: 1635908 - RNA, 15 nt, Human
ugauccacccaccuc

SEQ ID NO: 1635909 - RNA, 21 nt, Human
ugauccaagcuggucccacuc

SEQ ID NO: 1635910 - RNA, 24 nt, Human
ugaucauccacugugccaugugcc

SEQ ID NO: 1635911 - RNA, 13 nt, Human
ugaucauccacug

SEQ ID NO: 1635912 - RNA, 21 nt, Human
ugaucuaggaagacuuuggaa

SEQ ID NO: 1635913 - RNA, 19 nt, Human
ugaucuaggaagacuuugg

SEQ ID NO: 1635914 - RNA, 22 nt, Human
ugauccacccaccucagccucc

SEQ ID NO: 1635915 - RNA, 21 nt, Human
ugauccacccaccucagccuc

SEQ ID NO: 1635916 - RNA, 20 nt, Human
ugaucugaugcaagcaagaa

SEQ ID NO: 1635917 - RNA, 16 nt, Human
ugaggugcuauguucu

SEQ ID NO: 1635918 - RNA, 21 nt, Human
ugaguccccuguuuguuucug

SEQ ID NO: 1635919 - RNA, 19 nt, Human
ugagguuucaaaccucccu

SEQ ID NO: 1635920 - RNA, 18 nt, Human
ugaguccuggcaugggaa

SEQ ID NO: 1635921 - RNA, 11 nt, Human
ugaguccuggc

SEQ ID NO: 1635922 - RNA, 22 nt, Human
ugaguccuggcaugggaaugaa

SEQ ID NO: 1635923 - RNA, 19 nt, Human
ugaguccuggcaugggaau

SEQ ID NO: 1635924 - RNA, 14 nt, Human
ugagucgaggacag

SEQ ID NO: 1635925 - RNA, 20 nt, Human
ugaggucuguucuuuccaaa

SEQ ID NO: 1635926 - RNA, 14 nt, Human
ugaggucuguucuu

SEQ ID NO: 1635927 - RNA, 15 nt, Human
ugaggucuguucuuu

SEQ ID NO: 1635928 - RNA, 11 nt, Human
ugaggcugggc

SEQ ID NO: 1635929 - RNA, 23 nt, Human
ugaggacuuaaaauauuccugca

SEQ ID NO: 1635930 - RNA, 21 nt, Human
ugauagcacagacccugcccu

SEQ ID NO: 1635931 - RNA, 20 nt, Human
ugauagcacagacccugccc

SEQ ID NO: 1635932 - RNA, 18 nt, Human
ugauagcacagacccugc

SEQ ID NO: 1635933 - RNA, 17 nt, Human
ugauagcacagacccug

SEQ ID NO: 1635934 - RNA, 16 nt, Human
ugauagcacagacccu

SEQ ID NO: 1635935 - RNA, 15 nt, Human
ugauagcacagaccc

SEQ ID NO: 1635936 - RNA, 23 nt, Human
ugauagcacagacccugcccugu

SEQ ID NO: 1635937 - RNA, 22 nt, Human
ugauagcacagacccugcccug

SEQ ID NO: 1635938 - RNA, 18 nt, Human
ugauagguauaaguggug

SEQ ID NO: 1635939 - RNA, 18 nt, Human
ugagucgaggacagggag

SEQ ID NO: 1635940 - RNA, 19 nt, Human
ugaguugauucagcucugc

SEQ ID NO: 1635941 - RNA, 16 nt, Human
ugaguugauucagcuc

SEQ ID NO: 1635942 - RNA, 23 nt, Human
ugaguugauagcacagacccugc

SEQ ID NO: 1635943 - RNA, 16 nt, Human
ugagucgaggacaggg

SEQ ID NO: 1635944 - RNA, 15 nt, Human
ugagucgaggacagg

SEQ ID NO: 1635945 - RNA, 12 nt, Human
ugacucuuaaga

SEQ ID NO: 1635946 - RNA, 13 nt, Human
ugacugaauuucu

SEQ ID NO: 1635947 - RNA, 13 nt, Human
ugacucuuaagaa

SEQ ID NO: 1635948 - RNA, 14 nt, Human
ugacugaauuucuu

SEQ ID NO: 1635949 - RNA, 15 nt, Human
ugacugaauuucuuu

SEQ ID NO: 1635950 - RNA, 17 nt, Human
ugacugauucuucagca

SEQ ID NO: 1635951 - RNA, 16 nt, Human
ugacugauucuucagc

SEQ ID NO: 1635952 - RNA, 15 nt, Human
ugacugauucuucag

SEQ ID NO: 1635953 - RNA, 14 nt, Human
ugacugauucuuca

SEQ ID NO: 1635954 - RNA, 13 nt, Human
ugacugauucuuc

SEQ ID NO: 1635955 - RNA, 20 nt, Human
ugacgccaucccagccccaa

SEQ ID NO: 1635956 - RNA, 19 nt, Human
ugacgccaucccagcccca

SEQ ID NO: 1635957 - RNA, 18 nt, Human
ugacgccaucccagcccc

SEQ ID NO: 1635958 - RNA, 17 nt, Human
ugacgccaucccagccc

SEQ ID NO: 1635959 - RNA, 16 nt, Human
ugacgccaucccagcc

SEQ ID NO: 1635960 - RNA, 15 nt, Human
ugacgccaucccagc

SEQ ID NO: 1635961 - RNA, 14 nt, Human
ugacgccaucccag

SEQ ID NO: 1635962 - RNA, 13 nt, Human
ugacgccauccca

SEQ ID NO: 1635963 - RNA, 22 nt, Human
ugaccuuucaauaggaaaaacu

SEQ ID NO: 1635964 - RNA, 18 nt, Human
ugaccuuucaauaggaaa

SEQ ID NO: 1635965 - RNA, 16 nt, Human
ugaccuuucaauagga

SEQ ID NO: 1635966 - RNA, 15 nt, Human
ugaccuuucaauagg

SEQ ID NO: 1635967 - RNA, 14 nt, Human
ugaccuuucaauag

SEQ ID NO: 1635968 - RNA, 18 nt, Human
ugaccucugcagcaauaa

SEQ ID NO: 1635969 - RNA, 21 nt, Human
ugaccucugcagcaauaaagc

SEQ ID NO: 1635970 - RNA, 12 nt, Human
ugaccucugccu

SEQ ID NO: 1635971 - RNA, 23 nt, Human
ugaccucugcagcaauaaagcag

SEQ ID NO: 1635972 - RNA, 22 nt, Human
ugaccucaggugauccacccac

SEQ ID NO: 1635973 - RNA, 16 nt, Human
ugaccucagcuuugau

SEQ ID NO: 1635974 - RNA, 13 nt, Human
ugaccucugcagc

SEQ ID NO: 1635975 - RNA, 16 nt, Human
ugaccucugcagcaau

SEQ ID NO: 1635976 - RNA, 23 nt, Human
ugaccauucuccaccugccaggg

SEQ ID NO: 1635977 - RNA, 22 nt, Human
ugaccauucuccaccugccagg

SEQ ID NO: 1635978 - RNA, 21 nt, Human
ugaccauucuccaccugccag

SEQ ID NO: 1635979 - RNA, 20 nt, Human
ugaccauucuccaccugcca

SEQ ID NO: 1635980 - RNA, 17 nt, Human
ucuugaauuguaaggaa

SEQ ID NO: 1635981 - RNA, 15 nt, Human
ucuugaacuccuggc

SEQ ID NO: 1635982 - RNA, 16 nt, Human
ucuugaauaauguaag

SEQ ID NO: 1635983 - RNA, 16 nt, Human
ugagacagcucugcau

SEQ ID NO: 1635984 - RNA, 14 nt, Human
ugagacagcucugc

SEQ ID NO: 1635985 - RNA, 12 nt, Human
ugagacccuguc

SEQ ID NO: 1635986 - RNA, 17 nt, Human
ugagaaagacuauucaa

SEQ ID NO: 1635987 - RNA, 16 nt, Human
ugagaaagacuauuca

SEQ ID NO: 1635988 - RNA, 22 nt, Human
ugacuguacuccucccaggcgc

SEQ ID NO: 1635989 - RNA, 18 nt, Human
ugacuguacuccucccag

SEQ ID NO: 1635990 - RNA, 17 nt, Human
ugacuguacuccuccca

SEQ ID NO: 1635991 - RNA, 16 nt, Human
ugacuguacuccuccc

SEQ ID NO: 1635992 - RNA, 18 nt, Human
ugagaaagacuauucaaa

SEQ ID NO: 1635993 - RNA, 20 nt, Human
ugagaaagacuauucaaaca

SEQ ID NO: 1635994 - RNA, 13 nt, Human
ugagaaaucuaaa

SEQ ID NO: 1635995 - RNA, 17 nt, Human
ugagaaaucuaaaaaac

SEQ ID NO: 1635996 - RNA, 17 nt, Human
ugagaguagagucacug

SEQ ID NO: 1635997 - RNA, 22 nt, Human
ugagaggcauccaguaucuuga

SEQ ID NO: 1635998 - RNA, 23 nt, Human
ugagaggcauccaguaucuugaa

SEQ ID NO: 1635999 - RNA, 14 nt, Human
ugagacucugucuc

SEQ ID NO: 1636000 - RNA, 13 nt, Human
ugagacucugucu

SEQ ID NO: 1636001 - RNA, 12 nt, Human
ugagacucuguc

SEQ ID NO: 1636002 - RNA, 13 nt, Human
ugagccccaaaag

SEQ ID NO: 1636003 - RNA, 15 nt, Human
ugagcaucaggccag

SEQ ID NO: 1636004 - RNA, 14 nt, Human
ugagcaucaggcca

SEQ ID NO: 1636005 - RNA, 16 nt, Human
ugagcaucaggccagg

SEQ ID NO: 1636006 - RNA, 20 nt, Human
ugagaugcuagaacucccuu

SEQ ID NO: 1636007 - RNA, 16 nt, Human
ugagaugcuagaacuc

SEQ ID NO: 1636008 - RNA, 14 nt, Human
ugagaugcuagaac

SEQ ID NO: 1636009 - RNA, 20 nt, Human
ugagcagucaggaaagagaa

SEQ ID NO: 1636010 - RNA, 13 nt, Human
ugagcaucaggcc

SEQ ID NO: 1636011 - RNA, 15 nt, Human
ugagcagucaggaaa

SEQ ID NO: 1636012 - RNA, 17 nt, Human
ugagcagucaggaaaga

SEQ ID NO: 1636013 - RNA, 15 nt, Human
ugagccucagcaucc

SEQ ID NO: 1636014 - RNA, 13 nt, Human
ugagccucagcau

SEQ ID NO: 1636015 - RNA, 16 nt, Human
ugcacaaacagaggcc

SEQ ID NO: 1636016 - RNA, 15 nt, Human
ugcacaaacagaggc

SEQ ID NO: 1636017 - RNA, 19 nt, Human
ugcacaaacagaggccgcc

SEQ ID NO: 1636018 - RNA, 17 nt, Human
ugcacaaacagaggccg

SEQ ID NO: 1636019 - RNA, 20 nt, Human
ugcacaaacagaggccgcca

SEQ ID NO: 1636020 - RNA, 17 nt, Human
ugcacagaguuguuaca

SEQ ID NO: 1636021 - RNA, 17 nt, Human
ugcacaaagcccuucca

SEQ ID NO: 1636022 - RNA, 15 nt, Human
ugcacaaagcccuuc

SEQ ID NO: 1636023 - RNA, 18 nt, Human
ugcacagaguuguuacau

SEQ ID NO: 1636024 - RNA, 19 nt, Human
ugcacagaguuguuacauu

SEQ ID NO: 1636025 - RNA, 23 nt, Human
ugcaaugaccuuucaauaggaaa

SEQ ID NO: 1636026 - RNA, 22 nt, Human
ugcaaugaccuuucaauaggaa

SEQ ID NO: 1636027 - RNA, 19 nt, Human
ugcaaugaccuuucaauag

SEQ ID NO: 1636028 - RNA, 17 nt, Human
ugcaaugaccuuucaau

SEQ ID NO: 1636029 - RNA, 16 nt, Human
ugcaaugaccuuucaa

SEQ ID NO: 1636030 - RNA, 13 nt, Human
ugcaaugaccuuu

SEQ ID NO: 1636031 - RNA, 16 nt, Human
ugcaauggcagccuug

SEQ ID NO: 1636032 - RNA, 15 nt, Human
ugcaauggcagccuu

SEQ ID NO: 1636033 - RNA, 14 nt, Human
ugcaauggcagccu

SEQ ID NO: 1636034 - RNA, 13 nt, Human
ugcaauggcagcc

SEQ ID NO: 1636035 - RNA, 16 nt, Human
ugcacuugcagacucu

SEQ ID NO: 1636036 - RNA, 19 nt, Human
ugcagagguccacaacaca

SEQ ID NO: 1636037 - RNA, 21 nt, Human
ugcacugacauuguuggccaa

SEQ ID NO: 1636038 - RNA, 18 nt, Human
ugcacugacauuguuggc

SEQ ID NO: 1636039 - RNA, 21 nt, Human
ugcaccggcuggccuggcccc

SEQ ID NO: 1636040 - RNA, 17 nt, Human
ugcaccuggaauauaua

SEQ ID NO: 1636041 - RNA, 20 nt, Human
ugcaccuggaauauauaacc

SEQ ID NO: 1636042 - RNA, 22 nt, Human
ugcaccuggaauauauaaccag

SEQ ID NO: 1636043 - RNA, 20 nt, Human
ugcaccggcuggccuggccc

SEQ ID NO: 1636044 - RNA, 19 nt, Human
ugcaccggcuggccuggcc

SEQ ID NO: 1636045 - RNA, 17 nt, Human
ugcacagugcaucucag

SEQ ID NO: 1636046 - RNA, 16 nt, Human
ugcacagugcaucuca

SEQ ID NO: 1636047 - RNA, 20 nt, Human
ugcacagaguuguuacauuu

SEQ ID NO: 1636048 - RNA, 15 nt, Human
ugcacagugcaucuc

SEQ ID NO: 1636049 - RNA, 17 nt, Human
ugcaacaggcugggcuu

SEQ ID NO: 1636050 - RNA, 16 nt, Human
ugcaacaggcugggcu

SEQ ID NO: 1636051 - RNA, 15 nt, Human
ugcaacaggcugggc

SEQ ID NO: 1636052 - RNA, 14 nt, Human
ugcaacaggcuggg

SEQ ID NO: 1636053 - RNA, 20 nt, Human
ugcaacaggcugggcuucag

SEQ ID NO: 1636054 - RNA, 19 nt, Human
ugcaacaggcugggcuuca

SEQ ID NO: 1636055 - RNA, 14 nt, Human
ugcaaccuccgccu

SEQ ID NO: 1636056 - RNA, 13 nt, Human
ugcaaccuccgcc

SEQ ID NO: 1636057 - RNA, 21 nt, Human
ugcaaccuccgccucuugggu

SEQ ID NO: 1636058 - RNA, 20 nt, Human
ugcaaccuccgccucuuggg

SEQ ID NO: 1636059 - RNA, 18 nt, Human
ugcaaccuccgccucuug

SEQ ID NO: 1636060 - RNA, 20 nt, Human
ugcaaccugauugugucucu

SEQ ID NO: 1636061 - RNA, 19 nt, Human
ugcaaccugauugugucuc

SEQ ID NO: 1636062 - RNA, 22 nt, Human
ugcaaccugauugugucucuug

SEQ ID NO: 1636063 - RNA, 21 nt, Human
ugcaaccuucgccaccugggu

SEQ ID NO: 1636064 - RNA, 18 nt, Human
ugcaaccuucgccaccug

SEQ ID NO: 1636065 - RNA, 22 nt, Human
ugcaacucugaaggguaauuau

SEQ ID NO: 1636066 - RNA, 18 nt, Human
ugcaacuuuguauaaaag

SEQ ID NO: 1636067 - RNA, 18 nt, Human
ugcaacuuguaaaugugg

SEQ ID NO: 1636068 - RNA, 16 nt, Human
ugcaacuuguaaaugu

SEQ ID NO: 1636069 - RNA, 13 nt, Human
ugauuuucauugc

SEQ ID NO: 1636070 - RNA, 15 nt, Human
ugauuuucauugcug

SEQ ID NO: 1636071 - RNA, 20 nt, Human
ugauuuuuuuuuccuucagu

SEQ ID NO: 1636072 - RNA, 19 nt, Human
ugauuuuuuuuuccuucag

SEQ ID NO: 1636073 - RNA, 17 nt, Human
ugauuuuuuuuuccuuc

SEQ ID NO: 1636074 - RNA, 16 nt, Human
ugauuuuuuuuuccuu

SEQ ID NO: 1636075 - RNA, 23 nt, Human
ugauuuuuuuuuccuucagugcc

SEQ ID NO: 1636076 - RNA, 22 nt, Human
ugauuuuuuuuuccuucagugc

SEQ ID NO: 1636077 - RNA, 16 nt, Human
ugauuuuuuuuuuuca

SEQ ID NO: 1636078 - RNA, 14 nt, Human
ugcauuauauuuau

SEQ ID NO: 1636079 - RNA, 12 nt, Human
ugcauuaucuag

SEQ ID NO: 1636080 - RNA, 17 nt, Human
ugcauuaucuagauacu

SEQ ID NO: 1636081 - RNA, 18 nt, Human
ugcauuaucuagauacug

SEQ ID NO: 1636082 - RNA, 15 nt, Human
ugccaccacgcccgg

SEQ ID NO: 1636083 - RNA, 19 nt, Human
ugcagauaaacaguaguga

SEQ ID NO: 1636084 - RNA, 14 nt, Human
ugcauccuccgccu

SEQ ID NO: 1636085 - RNA, 15 nt, Human
ugcauguuugugauu

SEQ ID NO: 1636086 - RNA, 15 nt, Human
ugcauccuccgccuc

SEQ ID NO: 1636087 - RNA, 12 nt, Human
ugccauccaggu

SEQ ID NO: 1636088 - RNA, 20 nt, Human
ugccauccagguucagcuug

SEQ ID NO: 1636089 - RNA, 15 nt, Human
ugccauccagguuca

SEQ ID NO: 1636090 - RNA, 17 nt, Human
ugccagguuuuuggucu

SEQ ID NO: 1636091 - RNA, 19 nt, Human
ugccaggaagccagcaggc

SEQ ID NO: 1636092 - RNA, 18 nt, Human
ugccaggaagccagcagg

SEQ ID NO: 1636093 - RNA, 16 nt, Human
ugccaggaagccagca

SEQ ID NO: 1636094 - RNA, 12 nt, Human
ugccaggaagcc

SEQ ID NO: 1636095 - RNA, 20 nt, Human
ugcccaccuggccucugcac

SEQ ID NO: 1636096 - RNA, 16 nt, Human
ugccauguuggccagg

SEQ ID NO: 1636097 - RNA, 15 nt, Human
ugccauguuggccag

SEQ ID NO: 1636098 - RNA, 12 nt, Human
ugccauguuggc

SEQ ID NO: 1636099 - RNA, 13 nt, Human
ugcccacucccug

SEQ ID NO: 1636100 - RNA, 18 nt, Human
ugcccacgcuggagugca

SEQ ID NO: 1636101 - RNA, 20 nt, Human
ugccaugaggaacaaggcaa

SEQ ID NO: 1636102 - RNA, 23 nt, Human
ugccaugaggaacaaggcaaggc

SEQ ID NO: 1636103 - RNA, 15 nt, Human
ugccaugugccaggu

SEQ ID NO: 1636104 - RNA, 14 nt, Human
ugccaugugccagg

SEQ ID NO: 1636105 - RNA, 19 nt, Human
ugccgucuaccugaggggc

SEQ ID NO: 1636106 - RNA, 17 nt, Human
ugccgucuaccugaggg

SEQ ID NO: 1636107 - RNA, 16 nt, Human
ugccgucuaccugagg

SEQ ID NO: 1636108 - RNA, 15 nt, Human
ugccgucuaccugag

SEQ ID NO: 1636109 - RNA, 15 nt, Human
ugcccugguuuccug

SEQ ID NO: 1636110 - RNA, 18 nt, Human
ugcccuggauccaucagg

SEQ ID NO: 1636111 - RNA, 17 nt, Human
ugcccugcuuucagaua

SEQ ID NO: 1636112 - RNA, 16 nt, Human
ugcccugcuuucagau

SEQ ID NO: 1636113 - RNA, 12 nt, Human
ugcccugcuuuc

SEQ ID NO: 1636114 - RNA, 18 nt, Human
ugcccuggugcugccaca

SEQ ID NO: 1636115 - RNA, 20 nt, Human
ugcccuggugcugccacacu

SEQ ID NO: 1636116 - RNA, 21 nt, Human
ugcccuggugcugccacacuu

SEQ ID NO: 1636117 - RNA, 23 nt, Human
ugcccugcccaccuggccucugc

SEQ ID NO: 1636118 - RNA, 22 nt, Human
ugcccugcccaccuggccucug

SEQ ID NO: 1636119 - RNA, 17 nt, Human
ugcccuaaaguguauuu

SEQ ID NO: 1636120 - RNA, 19 nt, Human
ugcccuaaaguguauuuuu

SEQ ID NO: 1636121 - RNA, 23 nt, Human
ugcccugcugagucccaggcuga

SEQ ID NO: 1636122 - RNA, 22 nt, Human
ugcccugcugagucccaggcug

SEQ ID NO: 1636123 - RNA, 18 nt, Human
ugcccugcugagucccag

SEQ ID NO: 1636124 - RNA, 19 nt, Human
ugcccugcgggucacagga

SEQ ID NO: 1636125 - RNA, 13 nt, Human
ugccucugggacu

SEQ ID NO: 1636126 - RNA, 14 nt, Human
ugccucugggacug

SEQ ID NO: 1636127 - RNA, 18 nt, Human
ugccucugccugucuccc

SEQ ID NO: 1636128 - RNA, 14 nt, Human
ugccucugccuguc

SEQ ID NO: 1636129 - RNA, 13 nt, Human
ugccucugccugu

SEQ ID NO: 1636130 - RNA, 20 nt, Human
ugccuccuuugugaggaagc

SEQ ID NO: 1636131 - RNA, 21 nt, Human
ugccuccuuugugaggaagcc

SEQ ID NO: 1636132 - RNA, 22 nt, Human
ugccuccuuugugaggaagccg

SEQ ID NO: 1636133 - RNA, 21 nt, Human
ugccuaaggacuucuuuaauu

SEQ ID NO: 1636134 - RNA, 13 nt, Human
ugccuaaggacuu

SEQ ID NO: 1636135 - RNA, 12 nt, Human
ugccuaaggacu

SEQ ID NO: 1636136 - RNA, 20 nt, Human
ugccuaaggacuucuuuaau

SEQ ID NO: 1636137 - RNA, 16 nt, Human
ugccuaaggacuucuu

SEQ ID NO: 1636138 - RNA, 15 nt, Human
ugccuaaggacuucu

SEQ ID NO: 1636139 - RNA, 14 nt, Human
ugccuaaggacuuc

SEQ ID NO: 1636140 - RNA, 19 nt, Human
ugccugguggcagcugcgg

SEQ ID NO: 1636141 - RNA, 18 nt, Human
ugccugguggcagcugcg

SEQ ID NO: 1636142 - RNA, 17 nt, Human
ugccugguggcagcugc

SEQ ID NO: 1636143 - RNA, 13 nt, Human
ugccugcccaggc

SEQ ID NO: 1636144 - RNA, 21 nt, Human
ugccucuucucuacucuaggg

SEQ ID NO: 1636145 - RNA, 13 nt, Human
ugccucuuccucc

SEQ ID NO: 1636146 - RNA, 16 nt, Human
uuuucacauuggaaac

SEQ ID NO: 1636147 - RNA, 21 nt, Human
uuuucaaaauuguuacaaauu

SEQ ID NO: 1636148 - RNA, 22 nt, Human
uuuucccuauuagagaagagau

SEQ ID NO: 1636149 - RNA, 18 nt, Human
uuuucccuauuagagaag

SEQ ID NO: 1636150 - RNA, 13 nt, Human
uuuucuuauuuca

SEQ ID NO: 1636151 - RNA, 23 nt, Human
uuuucuacucgaguuacagacaa

SEQ ID NO: 1636152 - RNA, 22 nt, Human
uuuucuacucgaguuacagaca

SEQ ID NO: 1636153 - RNA, 20 nt, Human
uuuucuacucgaguuacaga

SEQ ID NO: 1636154 - RNA, 13 nt, Human
uuuucuacucgag

SEQ ID NO: 1636155 - RNA, 13 nt, Human
uuuucuucucccu

SEQ ID NO: 1636156 - RNA, 22 nt, Human
uuuucuuguguguuuauuguca

SEQ ID NO: 1636157 - RNA, 14 nt, Human
uuuucuucucccuc

SEQ ID NO: 1636158 - RNA, 16 nt, Human
uuuucuuucagccaag

SEQ ID NO: 1636159 - RNA, 21 nt, Human
uuuuauaauuuugugaagcaa

SEQ ID NO: 1636160 - RNA, 15 nt, Human
uuuuacuaauagaca

SEQ ID NO: 1636161 - RNA, 23 nt, Human
uuuuauaauuuugugaagcaaaa

SEQ ID NO: 1636162 - RNA, 19 nt, Human
uuuuacguccaucucuugu

SEQ ID NO: 1636163 - RNA, 21 nt, Human
uuuuaaaguaacccuacaaaa

SEQ ID NO: 1636164 - RNA, 17 nt, Human
uuuuacaauaaaaucuu

SEQ ID NO: 1636165 - RNA, 19 nt, Human
uuuuacaaaaaagaaaaga

SEQ ID NO: 1636166 - RNA, 18 nt, Human
uuuuauauuugaaauauu

SEQ ID NO: 1636167 - RNA, 13 nt, Human
uuuuauauuugaa

SEQ ID NO: 1636168 - RNA, 13 nt, Human
uuuuauauuuacu

SEQ ID NO: 1636169 - RNA, 13 nt, Human
uuuuauacauaaa

SEQ ID NO: 1636170 - RNA, 21 nt, Human
uuuuauacauaaacaagacca

SEQ ID NO: 1636171 - RNA, 18 nt, Human
uuuuauuuuuagacagag

SEQ ID NO: 1636172 - RNA, 17 nt, Human
uuuucaaaauaaaaaug

SEQ ID NO: 1636173 - RNA, 21 nt, Human
uuugagugccuuacacaaugg

SEQ ID NO: 1636174 - RNA, 15 nt, Human
uuuccacagaagcuc

SEQ ID NO: 1636175 - RNA, 15 nt, Human
uuuccguuaaaauac

SEQ ID NO: 1636176 - RNA, 17 nt, Human
uuuccguuaaaauacca

SEQ ID NO: 1636177 - RNA, 13 nt, Human
uuuggacccugag

SEQ ID NO: 1636178 - RNA, 22 nt, Human
uuuggaccaaaaaccaguauug

SEQ ID NO: 1636179 - RNA, 21 nt, Human
uuuggaccaaaaaccaguauu

SEQ ID NO: 1636180 - RNA, 18 nt, Human
uuuggaccaaaaaccagu

SEQ ID NO: 1636181 - RNA, 15 nt, Human
uuuggaaaucuuuaa

SEQ ID NO: 1636182 - RNA, 18 nt, Human
uuugcauaacguauaaaa

SEQ ID NO: 1636183 - RNA, 17 nt, Human
uuuguauaaaauaauuu

SEQ ID NO: 1636184 - RNA, 17 nt, Human
uuuggucuacacugugc

SEQ ID NO: 1636185 - RNA, 19 nt, Human
uuuguauaaaauaauuuuu

SEQ ID NO: 1636186 - RNA, 18 nt, Human
uuuguauaaaauaauuuu

SEQ ID NO: 1636187 - RNA, 15 nt, Human
uuuggucaacacuaa

SEQ ID NO: 1636188 - RNA, 24 nt, Human
uuuggaccaaaaaccaguauugua

SEQ ID NO: 1636189 - RNA, 14 nt, Human
uuuguauuuuuagu

SEQ ID NO: 1636190 - RNA, 22 nt, Human
uuuguuaguaugaggcauuugu

SEQ ID NO: 1636191 - RNA, 15 nt, Human
uuuguugucagcuga

SEQ ID NO: 1636192 - RNA, 16 nt, Human
uuuguugucagcugaa

SEQ ID NO: 1636193 - RNA, 14 nt, Human
uuuuaaaauccacu

SEQ ID NO: 1636194 - RNA, 23 nt, Human
uuuuaaaauccacuuuaucuuga

SEQ ID NO: 1636195 - RNA, 20 nt, Human
uuuuaaacccuauugguaaa

SEQ ID NO: 1636196 - RNA, 12 nt, Human
uuuuuaagaaaa

SEQ ID NO: 1636197 - RNA, 23 nt, Human
uuuuuaagaaaaaggaugcacag

SEQ ID NO: 1636198 - RNA, 16 nt, Human
uuuuuaagugcugcau

SEQ ID NO: 1636199 - RNA, 17 nt, Human
uuuuuaagugcugcauu

SEQ ID NO: 1636200 - RNA, 18 nt, Human
uuuuuaagugcugcauuu

SEQ ID NO: 1636201 - RNA, 19 nt, Human
uuuuuaagugcugcauuua

SEQ ID NO: 1636202 - RNA, 22 nt, Human
uuuuuaagugcugcauuuaaaa

SEQ ID NO: 1636203 - RNA, 23 nt, Human
uuuuuaagugcugcauuuaaaag

SEQ ID NO: 1636204 - RNA, 22 nt, Human
uuuuucauuauuuuauuaugaa

SEQ ID NO: 1636205 - RNA, 13 nt, Human
uuuuucauuauuu

SEQ ID NO: 1636206 - RNA, 13 nt, Human
uuuuuaaucuuua

SEQ ID NO: 1636207 - RNA, 11 nt, Human
uuuuuuuacua

SEQ ID NO: 1636208 - RNA, 17 nt, Human
uuuuuuccuucagugcc

SEQ ID NO: 1636209 - RNA, 13 nt, Human
uuuuuuccacuua

SEQ ID NO: 1636210 - RNA, 12 nt, Human
uuuuuuuuaaga

SEQ ID NO: 1636211 - RNA, 13 nt, Human
uuuuuuuugacaa

SEQ ID NO: 1636212 - RNA, 20 nt, Human
uuguguugaagagguuuuaa

SEQ ID NO: 1636213 - RNA, 21 nt, Human
uuguguuuauauauaagccaa

SEQ ID NO: 1636214 - RNA, 22 nt, Human
uuguggauuuaacagaaaugua

SEQ ID NO: 1636215 - RNA, 23 nt, Human
uuguggauuuaacagaaauguac

SEQ ID NO: 1636216 - RNA, 20 nt, Human
uuguggauuuaacagaaaug

SEQ ID NO: 1636217 - RNA, 21 nt, Human
uuguggauuuaacagaaaugu

SEQ ID NO: 1636218 - RNA, 16 nt, Human
uuguggacacagcucu

SEQ ID NO: 1636219 - RNA, 21 nt, Human
uuguggaaaaugaaaauuagg

SEQ ID NO: 1636220 - RNA, 17 nt, Human
uuguggacacagcucuu

SEQ ID NO: 1636221 - RNA, 12 nt, Human
uugugccccugc

SEQ ID NO: 1636222 - RNA, 21 nt, Human
uugugccagaaugcuuuagga

SEQ ID NO: 1636223 - RNA, 16 nt, Human
uugugccagaaugcuu

SEQ ID NO: 1636224 - RNA, 23 nt, Human
uugugcgcuaaacuuuucugaua

SEQ ID NO: 1636225 - RNA, 22 nt, Human
uugugcgcuaaacuuuucugau

SEQ ID NO: 1636226 - RNA, 19 nt, Human
uugugcugggguuaucuga

SEQ ID NO: 1636227 - RNA, 17 nt, Human
uugugcauuaucuagau

SEQ ID NO: 1636228 - RNA, 22 nt, Human
uugugcauuaucuagauacugu

SEQ ID NO: 1636229 - RNA, 23 nt, Human
uugugcauuaucuagauacugua

SEQ ID NO: 1636230 - RNA, 12 nt, Human
uugugcauuugg

SEQ ID NO: 1636231 - RNA, 14 nt, Human
uuguuuaaaaucau

SEQ ID NO: 1636232 - RNA, 20 nt, Human
uuguuagugugucuuagugu

SEQ ID NO: 1636233 - RNA, 22 nt, Human
uuguuaguaugaggcauuuguu

SEQ ID NO: 1636234 - RNA, 17 nt, Human
uuguuguuuguuuaguc

SEQ ID NO: 1636235 - RNA, 18 nt, Human
uuguguuuugcaagccag

SEQ ID NO: 1636236 - RNA, 19 nt, Human
uuguuaguaugaggcauuu

SEQ ID NO: 1636237 - RNA, 21 nt, Human
uuguuaguaugaggcauuugu

SEQ ID NO: 1636238 - RNA, 17 nt, Human
uuguuagaucuaguuca

SEQ ID NO: 1636239 - RNA, 14 nt, Human
uuguuacauuuuua

SEQ ID NO: 1636240 - RNA, 14 nt, Human
uuguacucaauuuu

SEQ ID NO: 1636241 - RNA, 15 nt, Human
uuguacucaauuuua

SEQ ID NO: 1636242 - RNA, 14 nt, Human
uuguauuacaaauc

SEQ ID NO: 1636243 - RNA, 21 nt, Human
uuguauucagaguugaugguu

SEQ ID NO: 1636244 - RNA, 15 nt, Human
uuguauucucuccug

SEQ ID NO: 1636245 - RNA, 16 nt, Human
uuguauucucuccugu

SEQ ID NO: 1636246 - RNA, 19 nt, Human
uuguauucucuccuguacc

SEQ ID NO: 1636247 - RNA, 19 nt, Human
uugucuacaccauuaugug

SEQ ID NO: 1636248 - RNA, 15 nt, Human
uugucuagugaaacu

SEQ ID NO: 1636249 - RNA, 20 nt, Human
uugucuacaccauuaugugc

SEQ ID NO: 1636250 - RNA, 13 nt, Human
uugucucagauuu

SEQ ID NO: 1636251 - RNA, 20 nt, Human
uugucucagauuuuauuaug

SEQ ID NO: 1636252 - RNA, 16 nt, Human
uugucucagauuuuau

SEQ ID NO: 1636253 - RNA, 15 nt, Human
uugucuuaaaaagug

SEQ ID NO: 1636254 - RNA, 21 nt, Human
uugucugaagucacugcacag

SEQ ID NO: 1636255 - RNA, 22 nt, Human
uugucucagauuuuauuaugua

SEQ ID NO: 1636256 - RNA, 22 nt, Human
uugucuuaaaaaguggaaaaau

SEQ ID NO: 1636257 - RNA, 20 nt, Human
uugugaaaggaaagaggcuc

SEQ ID NO: 1636258 - RNA, 16 nt, Human
uugugauuuuuguaau

SEQ ID NO: 1636259 - RNA, 17 nt, Human
uugugauuuuuguaauu

SEQ ID NO: 1636260 - RNA, 12 nt, Human
uugugauuuuug

SEQ ID NO: 1636261 - RNA, 13 nt, Human
uugugaaauuauu

SEQ ID NO: 1636262 - RNA, 14 nt, Human
uugugaaaugaugg

SEQ ID NO: 1636263 - RNA, 17 nt, Human
uuguaaauagcucaggu

SEQ ID NO: 1636264 - RNA, 21 nt, Human
uuguaaaugugguaaagaguu

SEQ ID NO: 1636265 - RNA, 16 nt, Human
uuguaaaugugguaaa

SEQ ID NO: 1636266 - RNA, 15 nt, Human
uuguaaauuaacuuu

SEQ ID NO: 1636267 - RNA, 16 nt, Human
uuguaaauuaacuuuu

SEQ ID NO: 1636268 - RNA, 18 nt, Human
uuguaaauuaacuuuuau

SEQ ID NO: 1636269 - RNA, 23 nt, Human
uuguaaauuaacuuuuauaaacu

SEQ ID NO: 1636270 - RNA, 18 nt, Human
uuguacauaaugcgugca

SEQ ID NO: 1636271 - RNA, 16 nt, Human
uuggucugugagaugc

SEQ ID NO: 1636272 - RNA, 13 nt, Human
uuggucuguguga

SEQ ID NO: 1636273 - RNA, 16 nt, Human
uuggucccccuuccau

SEQ ID NO: 1636274 - RNA, 22 nt, Human
uuggguucaagcgauucuucug

SEQ ID NO: 1636275 - RNA, 16 nt, Human
uuggguguauugugcg

SEQ ID NO: 1636276 - RNA, 15 nt, Human
uuggguguauugugc

SEQ ID NO: 1636277 - RNA, 13 nt, Human
uuggguguauugu

SEQ ID NO: 1636278 - RNA, 13 nt, Human
uuuaauaauguuu

SEQ ID NO: 1636279 - RNA, 20 nt, Human
uuuaagacgaaacauuuguu

SEQ ID NO: 1636280 - RNA, 22 nt, Human
uuuaagaaaaaggaugcacaga

SEQ ID NO: 1636281 - RNA, 19 nt, Human
uuuaagacauuuuuggaag

SEQ ID NO: 1636282 - RNA, 18 nt, Human
uuuaagaaaaaggaugca

SEQ ID NO: 1636283 - RNA, 19 nt, Human
uuuaacucuauaauguguu

SEQ ID NO: 1636284 - RNA, 18 nt, Human
uuuaacagaaauguacag

SEQ ID NO: 1636285 - RNA, 18 nt, Human
uuguuuggagacagaguc

SEQ ID NO: 1636286 - RNA, 21 nt, Human
uuguuuggaccaaaaaccagu

SEQ ID NO: 1636287 - RNA, 23 nt, Human
uuuaacaacuaugauuuggaaaa

SEQ ID NO: 1636288 - RNA, 16 nt, Human
uuuaacaacagcuggu

SEQ ID NO: 1636289 - RNA, 18 nt, Human
uuuaauaauuauaugcua

SEQ ID NO: 1636290 - RNA, 21 nt, Human
uuuaauaauuauaugcuauuu

SEQ ID NO: 1636291 - RNA, 21 nt, Human
uuuaauagguuuggacaaaau

SEQ ID NO: 1636292 - RNA, 13 nt, Human
uuuaccacuugug

SEQ ID NO: 1636293 - RNA, 16 nt, Human
uuuacagcugccugca

SEQ ID NO: 1636294 - RNA, 15 nt, Human
uuuacagcugccugc

SEQ ID NO: 1636295 - RNA, 22 nt, Human
uuuacuucuuauacauuugaua

SEQ ID NO: 1636296 - RNA, 19 nt, Human
uuuacuucuuauacauuug

SEQ ID NO: 1636297 - RNA, 14 nt, Human
uuuagaaauauaau

SEQ ID NO: 1636298 - RNA, 12 nt, Human
uuuagacagagu

SEQ ID NO: 1636299 - RNA, 23 nt, Human
uuuauaaaaauaaaaaacacugg

SEQ ID NO: 1636300 - RNA, 21 nt, Human
uuuauaaaaauaaaaaacacu

SEQ ID NO: 1636301 - RNA, 22 nt, Human
uuuauaauuuugugaagcaaaa

SEQ ID NO: 1636302 - RNA, 14 nt, Human
uuuauggcuuuugu

SEQ ID NO: 1636303 - RNA, 16 nt, Human
uuuauggcuuuugugc

SEQ ID NO: 1636304 - RNA, 20 nt, Human
uuuauggcuuuugugcauua

SEQ ID NO: 1636305 - RNA, 14 nt, Human
uuuauuauguaaau

SEQ ID NO: 1636306 - RNA, 17 nt, Human
uuuauuauguaaauccc

SEQ ID NO: 1636307 - RNA, 16 nt, Human
uuuauuauguaaaucc

SEQ ID NO: 1636308 - RNA, 13 nt, Human
uuuauuaugcaug

SEQ ID NO: 1636309 - RNA, 13 nt, Human
uuuauuauggcac

SEQ ID NO: 1636310 - RNA, 19 nt, Human
uuuauuuaguuccuugagu

SEQ ID NO: 1636311 - RNA, 21 nt, Human
uuucaacgcagcccugcuuug

SEQ ID NO: 1636312 - RNA, 20 nt, Human
uuucaacgcagcccugcuuu

SEQ ID NO: 1636313 - RNA, 16 nt, Human
uuucaacgcagcccug

SEQ ID NO: 1636314 - RNA, 15 nt, Human
uuucaacgcagcccu

SEQ ID NO: 1636315 - RNA, 19 nt, Human
uuucaauaggaaaaacuga

SEQ ID NO: 1636316 - RNA, 17 nt, Human
uuucaauaggaaaaacu

SEQ ID NO: 1636317 - RNA, 14 nt, Human
uuucaauaggaaaa

SEQ ID NO: 1636318 - RNA, 12 nt, Human
uuucaauaggaa

SEQ ID NO: 1636319 - RNA, 16 nt, Human
uuucacaaccuucugu

SEQ ID NO: 1636320 - RNA, 22 nt, Human
uuucacaaccuucuguggcuca

SEQ ID NO: 1636321 - RNA, 21 nt, Human
uuucagauacuggauuguacu

SEQ ID NO: 1636322 - RNA, 13 nt, Human
uuucagauacugg

SEQ ID NO: 1636323 - RNA, 14 nt, Human
uuucaguguacaug

SEQ ID NO: 1636324 - RNA, 13 nt, Human
uuucaguguacau

SEQ ID NO: 1636325 - RNA, 18 nt, Human
uuucauuuaggugaggaa

SEQ ID NO: 1636326 - RNA, 14 nt, Human
uuucauuuagguga

SEQ ID NO: 1636327 - RNA, 19 nt, Human
uucuacccagcgagcccug

SEQ ID NO: 1636328 - RNA, 12 nt, Human
uucuacccagcg

SEQ ID NO: 1636329 - RNA, 15 nt, Human
uucuacauacuaugg

SEQ ID NO: 1636330 - RNA, 23 nt, Human
uucuaaugugugaaucagagcac

SEQ ID NO: 1636331 - RNA, 13 nt, Human
uucuacgccaggg

SEQ ID NO: 1636332 - RNA, 13 nt, Human
uucuacuauuuau

SEQ ID NO: 1636333 - RNA, 21 nt, Human
uucuacccagcgagcccuggu

SEQ ID NO: 1636334 - RNA, 20 nt, Human
uucuacccagcgagcccugg

SEQ ID NO: 1636335 - RNA, 14 nt, Human
uucuacccaggugc

SEQ ID NO: 1636336 - RNA, 22 nt, Human
uucuacucgaguuacagacaaa

SEQ ID NO: 1636337 - RNA, 14 nt, Human
uucuauagcuuuuc

SEQ ID NO: 1636338 - RNA, 17 nt, Human
uuccuuggacucauuuu

SEQ ID NO: 1636339 - RNA, 18 nt, Human
uucggugagcuacaaaug

SEQ ID NO: 1636340 - RNA, 21 nt, Human
uuccuugaguugauucagcuc

SEQ ID NO: 1636341 - RNA, 15 nt, Human
uuccugcauuuguga

SEQ ID NO: 1636342 - RNA, 12 nt, Human
uuccauggccuc

SEQ ID NO: 1636343 - RNA, 16 nt, Human
uuccauggccucuuca

SEQ ID NO: 1636344 - RNA, 16 nt, Human
uuccaugucgccucug

SEQ ID NO: 1636345 - RNA, 15 nt, Human
uuccugaggcugggc

SEQ ID NO: 1636346 - RNA, 20 nt, Human
uuccugaggcugggcucccu

SEQ ID NO: 1636347 - RNA, 21 nt, Human
uucugagaaagacuauucaaa

SEQ ID NO: 1636348 - RNA, 16 nt, Human
uucugagaaagacuau

SEQ ID NO: 1636349 - RNA, 21 nt, Human
uucugacccugcuucaaauau

SEQ ID NO: 1636350 - RNA, 18 nt, Human
uucugacccugcuucaaa

SEQ ID NO: 1636351 - RNA, 22 nt, Human
uucugacccaugcugcccugug

SEQ ID NO: 1636352 - RNA, 23 nt, Human
uucugacccaugcugcccuguga

SEQ ID NO: 1636353 - RNA, 17 nt, Human
uucucugcccuccaaga

SEQ ID NO: 1636354 - RNA, 16 nt, Human
uucucugcccuccaag

SEQ ID NO: 1636355 - RNA, 21 nt, Human
uucugauagaggaagccugau

SEQ ID NO: 1636356 - RNA, 13 nt, Human
uucugauagagga

SEQ ID NO: 1636357 - RNA, 19 nt, Human
uucugauccuaguuccacc

SEQ ID NO: 1636358 - RNA, 19 nt, Human
uucugcucacauaucuguc

SEQ ID NO: 1636359 - RNA, 21 nt, Human
uucuaugaaauauuauguuaa

SEQ ID NO: 1636360 - RNA, 14 nt, Human
uucuaugaaauauu

SEQ ID NO: 1636361 - RNA, 20 nt, Human
uucucauuugccaauaauaa

SEQ ID NO: 1636362 - RNA, 15 nt, Human
uucuccaccugccag

SEQ ID NO: 1636363 - RNA, 14 nt, Human
uucuccaccugcca

SEQ ID NO: 1636364 - RNA, 12 nt, Human
uucuccaccugc

SEQ ID NO: 1636365 - RNA, 21 nt, Human
uucuccaccucccacaaagga

SEQ ID NO: 1636366 - RNA, 18 nt, Human
uucuccaccugccaggga

SEQ ID NO: 1636367 - RNA, 16 nt, Human
uucuccaccugccagg

SEQ ID NO: 1636368 - RNA, 20 nt, Human
uucuccaccugccagggaca

SEQ ID NO: 1636369 - RNA, 12 nt, Human
uucuccacugga

SEQ ID NO: 1636370 - RNA, 12 nt, Human
uucucugcccuc

SEQ ID NO: 1636371 - RNA, 11 nt, Human
uucucugcccu

SEQ ID NO: 1636372 - RNA, 20 nt, Human
uucucugaggacacuaacca

SEQ ID NO: 1636373 - RNA, 14 nt, Human
uucucugaggacac

SEQ ID NO: 1636374 - RNA, 22 nt, Human
uucucuccuguaccucuugagc

SEQ ID NO: 1636375 - RNA, 19 nt, Human
uucucuccuguaccucuug

SEQ ID NO: 1636376 - RNA, 16 nt, Human
uucucuccagccccug

SEQ ID NO: 1636377 - RNA, 15 nt, Human
uucucuccagccccu

SEQ ID NO: 1636378 - RNA, 14 nt, Human
uucucuccuguacc

SEQ ID NO: 1636379 - RNA, 18 nt, Human
uucucuccuguaccucuu

SEQ ID NO: 1636380 - RNA, 14 nt, Human
uucucuccagcccc

SEQ ID NO: 1636381 - RNA, 13 nt, Human
uucucuccagccc

SEQ ID NO: 1636382 - RNA, 21 nt, Human
uucuuauacauuugauaaagu

SEQ ID NO: 1636383 - RNA, 21 nt, Human
uucuuccacaagagcccaggc

SEQ ID NO: 1636384 - RNA, 21 nt, Human
uucuuguguguuuauugucaa

SEQ ID NO: 1636385 - RNA, 13 nt, Human
uucuuccucccuc

SEQ ID NO: 1636386 - RNA, 23 nt, Human
uucuuccucccucccucuuuccc

SEQ ID NO: 1636387 - RNA, 12 nt, Human
uucuuucagcca

SEQ ID NO: 1636388 - RNA, 14 nt, Human
uucuuuccaaagua

SEQ ID NO: 1636389 - RNA, 16 nt, Human
uugaaaagacuccaaa

SEQ ID NO: 1636390 - RNA, 16 nt, Human
uugaacuccuggccuc

SEQ ID NO: 1636391 - RNA, 15 nt, Human
uugaacuccuggccu

SEQ ID NO: 1636392 - RNA, 20 nt, Human
uugaaaaaccauuuugcugu

SEQ ID NO: 1636393 - RNA, 21 nt, Human
uucuuuccaaaguacacuguu

SEQ ID NO: 1636394 - RNA, 23 nt, Human
uugaaaacacuguucucugcccu

SEQ ID NO: 1636395 - RNA, 15 nt, Human
uugaaaaaugcaugu

SEQ ID NO: 1636396 - RNA, 19 nt, Human
uucugcuucagccucccga

SEQ ID NO: 1636397 - RNA, 16 nt, Human
uucugcuucagccucc

SEQ ID NO: 1636398 - RNA, 15 nt, Human
uucugcuucagccuc

SEQ ID NO: 1636399 - RNA, 14 nt, Human
uucugcuucagccu

SEQ ID NO: 1636400 - RNA, 18 nt, Human
uucugcuuuccucuuccu

SEQ ID NO: 1636401 - RNA, 17 nt, Human
uucugucuucacaacag

SEQ ID NO: 1636402 - RNA, 18 nt, Human
uucuguauuuuguuuuug

SEQ ID NO: 1636403 - RNA, 15 nt, Human
uucuggcagaggagg

SEQ ID NO: 1636404 - RNA, 23 nt, Human
uugaugaagaaguugauaugccu

SEQ ID NO: 1636405 - RNA, 14 nt, Human
uugaugaagaaguu

SEQ ID NO: 1636406 - RNA, 13 nt, Human
uugaugaagaagu

SEQ ID NO: 1636407 - RNA, 23 nt, Human
uugauauccucuuugagugaagc

SEQ ID NO: 1636408 - RNA, 15 nt, Human
uugaggucuguucuu

SEQ ID NO: 1636409 - RNA, 11 nt, Human
uugagccuggg

SEQ ID NO: 1636410 - RNA, 13 nt, Human
uugaggguugggc

SEQ ID NO: 1636411 - RNA, 14 nt, Human
uugagccugggagg

SEQ ID NO: 1636412 - RNA, 16 nt, Human
uugaggguugggcugg

SEQ ID NO: 1636413 - RNA, 16 nt, Human
uugaugaucuuugcag

SEQ ID NO: 1636414 - RNA, 17 nt, Human
uugaugacccccaacca

SEQ ID NO: 1636415 - RNA, 21 nt, Human
uugcaaaguaucccuacugua

SEQ ID NO: 1636416 - RNA, 17 nt, Human
uugacccacaagaaaug

SEQ ID NO: 1636417 - RNA, 17 nt, Human
uugaccgugaggccaga

SEQ ID NO: 1636418 - RNA, 14 nt, Human
uugaccucugcagc

SEQ ID NO: 1636419 - RNA, 15 nt, Human
uugaccucugcagca

SEQ ID NO: 1636420 - RNA, 20 nt, Human
uugacgccaucccagcccca

SEQ ID NO: 1636421 - RNA, 19 nt, Human
uugacgccaucccagcccc

SEQ ID NO: 1636422 - RNA, 18 nt, Human
uugacgccaucccagccc

SEQ ID NO: 1636423 - RNA, 17 nt, Human
uugacgccaucccagcc

SEQ ID NO: 1636424 - RNA, 16 nt, Human
uugaccucugcagcaa

SEQ ID NO: 1636425 - RNA, 18 nt, Human
uugaacuggguacuugug

SEQ ID NO: 1636426 - RNA, 17 nt, Human
uugaacuccugaccuca

SEQ ID NO: 1636427 - RNA, 13 nt, Human
uugaacuuugacc

SEQ ID NO: 1636428 - RNA, 22 nt, Human
uugaauuuauuggcuuuucuga

SEQ ID NO: 1636429 - RNA, 18 nt, Human
uugaauuuauuggcuuuu

SEQ ID NO: 1636430 - RNA, 15 nt, Human
uugaauuuauuggcu

SEQ ID NO: 1636431 - RNA, 12 nt, Human
uugaauuuuaca

SEQ ID NO: 1636432 - RNA, 21 nt, Human
uugaauuuuguguuagagauu

SEQ ID NO: 1636433 - RNA, 17 nt, Human
uugaauuuuguguuaga

SEQ ID NO: 1636434 - RNA, 15 nt, Human
uucaaccauucccca

SEQ ID NO: 1636435 - RNA, 18 nt, Human
uucaaauguauuacagug

SEQ ID NO: 1636436 - RNA, 18 nt, Human
uucaaaugcuguaacuuu

SEQ ID NO: 1636437 - RNA, 22 nt, Human
uuauuuuggaaaauaaauuauu

SEQ ID NO: 1636438 - RNA, 20 nt, Human
uuauuuuauuaugaaacuug

SEQ ID NO: 1636439 - RNA, 20 nt, Human
uuauuuuaauaauguuucaa

SEQ ID NO: 1636440 - RNA, 17 nt, Human
uuauuuuaauucaguug

SEQ ID NO: 1636441 - RNA, 18 nt, Human
uuauuuuauuaugcauga

SEQ ID NO: 1636442 - RNA, 16 nt, Human
uuauuuuauuaugaaa

SEQ ID NO: 1636443 - RNA, 15 nt, Human
uuauuuuauuaugaa

SEQ ID NO: 1636444 - RNA, 19 nt, Human
uuauuuuaauaauguuuca

SEQ ID NO: 1636445 - RNA, 15 nt, Human
uucagagcugcccuc

SEQ ID NO: 1636446 - RNA, 17 nt, Human
uucagagcugcccucuc

SEQ ID NO: 1636447 - RNA, 17 nt, Human
uucagacagcugccugg

SEQ ID NO: 1636448 - RNA, 18 nt, Human
uucagagcugcccucucc

SEQ ID NO: 1636449 - RNA, 19 nt, Human
uucagagcugcccucuccu

SEQ ID NO: 1636450 - RNA, 20 nt, Human
uucagagcugcccucuccug

SEQ ID NO: 1636451 - RNA, 20 nt, Human
uucagauacuggauuguacu

SEQ ID NO: 1636452 - RNA, 16 nt, Human
uucagauacuggauug

SEQ ID NO: 1636453 - RNA, 14 nt, Human
uucagcucacugca

SEQ ID NO: 1636454 - RNA, 16 nt, Human
uucagacagcugccug

SEQ ID NO: 1636455 - RNA, 15 nt, Human
uucagacagcugccu

SEQ ID NO: 1636456 - RNA, 17 nt, Human
uucacggaagagccuug

SEQ ID NO: 1636457 - RNA, 22 nt, Human
uucaccuuuguccccaccgcag

SEQ ID NO: 1636458 - RNA, 13 nt, Human
uucacggaagagc

SEQ ID NO: 1636459 - RNA, 22 nt, Human
uucacaagacccaaaaggcaga

SEQ ID NO: 1636460 - RNA, 21 nt, Human
uucacaaccuucuguggcuca

SEQ ID NO: 1636461 - RNA, 13 nt, Human
uucacccuuuucu

SEQ ID NO: 1636462 - RNA, 20 nt, Human
uucaccuuuguccccaccgc

SEQ ID NO: 1636463 - RNA, 19 nt, Human
uucaccuuuguccccaccg

SEQ ID NO: 1636464 - RNA, 14 nt, Human
uucaccuuuguccc

SEQ ID NO: 1636465 - RNA, 22 nt, Human
uucaauaggaaaaacugauuuu

SEQ ID NO: 1636466 - RNA, 21 nt, Human
uucaauaggaaaaacugauuu

SEQ ID NO: 1636467 - RNA, 13 nt, Human
uuccaaaguacac

SEQ ID NO: 1636468 - RNA, 16 nt, Human
uuccaaaguacacugu

SEQ ID NO: 1636469 - RNA, 20 nt, Human
uucaugcuguucaugaaaga

SEQ ID NO: 1636470 - RNA, 18 nt, Human
uuccagauccuggaaauc

SEQ ID NO: 1636471 - RNA, 19 nt, Human
uuccaacccucaucaccaa

SEQ ID NO: 1636472 - RNA, 15 nt, Human
uuccauggacuuugu

SEQ ID NO: 1636473 - RNA, 14 nt, Human
uuccauggacuuug

SEQ ID NO: 1636474 - RNA, 23 nt, Human
uucaguuauuauauuuacaaaug

SEQ ID NO: 1636475 - RNA, 20 nt, Human
uucauaaauaaaguuuguug

SEQ ID NO: 1636476 - RNA, 19 nt, Human
uucauccuccucagaucuu

SEQ ID NO: 1636477 - RNA, 15 nt, Human
uucauccuccucaga

SEQ ID NO: 1636478 - RNA, 15 nt, Human
uucauaaccuagccu

SEQ ID NO: 1636479 - RNA, 16 nt, Human
uucaguggcagcugcu

SEQ ID NO: 1636480 - RNA, 15 nt, Human
uucaguggcagcugc

SEQ ID NO: 1636481 - RNA, 17 nt, Human
uucaguggcagcugcuu

SEQ ID NO: 1636482 - RNA, 12 nt, Human
uucaguguacau

SEQ ID NO: 1636483 - RNA, 13 nt, Human
uucaguguacaug

SEQ ID NO: 1636484 - RNA, 15 nt, Human
uucagcuccagcuca

SEQ ID NO: 1636485 - RNA, 12 nt, Human
uucagcuccagc

SEQ ID NO: 1636486 - RNA, 22 nt, Human
uucagcuccagcucaccagccc

SEQ ID NO: 1636487 - RNA, 14 nt, Human
uucaguggcagcug

SEQ ID NO: 1636488 - RNA, 22 nt, Human
uucagcuuguaaauagcucagg

SEQ ID NO: 1636489 - RNA, 18 nt, Human
uuauaauuuugugaagca

SEQ ID NO: 1636490 - RNA, 17 nt, Human
uuauaauuuugugaagc

SEQ ID NO: 1636491 - RNA, 16 nt, Human
uuauaauuuugugaag

SEQ ID NO: 1636492 - RNA, 11 nt, Human
uuauacauaaa

SEQ ID NO: 1636493 - RNA, 13 nt, Human
uuauacauaaaca

SEQ ID NO: 1636494 - RNA, 23 nt, Human
uuauaucuauauuuuacauaaau

SEQ ID NO: 1636495 - RNA, 19 nt, Human
uuauaucuauauuuuacau

SEQ ID NO: 1636496 - RNA, 16 nt, Human
uuauaugcuauuucua

SEQ ID NO: 1636497 - RNA, 18 nt, Human
uuauaugcuauuucuaua

SEQ ID NO: 1636498 - RNA, 23 nt, Human
uuauaucugaggaauucuguaua

SEQ ID NO: 1636499 - RNA, 22 nt, Human
uuauaucugaggaauucuguau

SEQ ID NO: 1636500 - RNA, 14 nt, Human
uuauaucugaggaa

SEQ ID NO: 1636501 - RNA, 21 nt, Human
uuauaucugaggaauucugua

SEQ ID NO: 1636502 - RNA, 20 nt, Human
uuauaucugaggaauucugu

SEQ ID NO: 1636503 - RNA, 16 nt, Human
uuauauuaugaagcuu

SEQ ID NO: 1636504 - RNA, 11 nt, Human
uuauaaucuuu

SEQ ID NO: 1636505 - RNA, 15 nt, Human
uuauaaugaaugaaa

SEQ ID NO: 1636506 - RNA, 15 nt, Human
uuauaauaauguuaa

SEQ ID NO: 1636507 - RNA, 18 nt, Human
uuauaauaauguuaacau

SEQ ID NO: 1636508 - RNA, 15 nt, Human
uuauaauuuugugaa

SEQ ID NO: 1636509 - RNA, 14 nt, Human
uuauaauuuuguga

SEQ ID NO: 1636510 - RNA, 21 nt, Human
uuauaauuuuaaauguuuuuu

SEQ ID NO: 1636511 - RNA, 17 nt, Human
uuauaauuuuaaauguu

SEQ ID NO: 1636512 - RNA, 12 nt, Human
uuauaauuuaaa

SEQ ID NO: 1636513 - RNA, 12 nt, Human
uuauaauuuuaa

SEQ ID NO: 1636514 - RNA, 15 nt, Human
ugugaaaagaaaaau

SEQ ID NO: 1636515 - RNA, 13 nt, Human
ugugaaaagaaaa

SEQ ID NO: 1636516 - RNA, 17 nt, Human
ugugaaaagaaaaauga

SEQ ID NO: 1636517 - RNA, 21 nt, Human
ugugaaaagaaaaaugagccu

SEQ ID NO: 1636518 - RNA, 19 nt, Human
uuagugaccucagcuuuga

SEQ ID NO: 1636519 - RNA, 18 nt, Human
uuauggcuauaggugcua

SEQ ID NO: 1636520 - RNA, 16 nt, Human
uuauggcuuuugugca

SEQ ID NO: 1636521 - RNA, 14 nt, Human
uuauggcacaucag

SEQ ID NO: 1636522 - RNA, 17 nt, Human
uuauguugcauagaaua

SEQ ID NO: 1636523 - RNA, 18 nt, Human
uuauggcuuuugugcauu

SEQ ID NO: 1636524 - RNA, 17 nt, Human
uuauggcuuuugugcau

SEQ ID NO: 1636525 - RNA, 20 nt, Human
uuauggaacacucugagacu

SEQ ID NO: 1636526 - RNA, 18 nt, Human
uuauggaacacucugaga

SEQ ID NO: 1636527 - RNA, 21 nt, Human
uuauggacaaugacccagugg

SEQ ID NO: 1636528 - RNA, 17 nt, Human
uuauggaacacucugag

SEQ ID NO: 1636529 - RNA, 16 nt, Human
uuauuacaguauaauu

SEQ ID NO: 1636530 - RNA, 21 nt, Human
uuauuaaaugcccagccccuu

SEQ ID NO: 1636531 - RNA, 19 nt, Human
uuauuaaaugcccagcccc

SEQ ID NO: 1636532 - RNA, 23 nt, Human
uuauuaaaaaucucaaauuucua

SEQ ID NO: 1636533 - RNA, 11 nt, Human
uuaucucaaaa

SEQ ID NO: 1636534 - RNA, 14 nt, Human
uuaucuugaauaau

SEQ ID NO: 1636535 - RNA, 16 nt, Human
uuaucuugaauaaugu

SEQ ID NO: 1636536 - RNA, 14 nt, Human
uuaucuagauacug

SEQ ID NO: 1636537 - RNA, 15 nt, Human
uuauauuugaaauau

SEQ ID NO: 1636538 - RNA, 13 nt, Human
uuauauuugaaau

SEQ ID NO: 1636539 - RNA, 12 nt, Human
uuauauuugaaa

SEQ ID NO: 1636540 - RNA, 20 nt, Human
uuauauuuauuacuguaaga

SEQ ID NO: 1636541 - RNA, 16 nt, Human
uuauauuuacaaaugg

SEQ ID NO: 1636542 - RNA, 15 nt, Human
aaaaaauauuuuccu

SEQ ID NO: 1636543 - RNA, 18 nt, Human
aaaaacacagcaagggug

SEQ ID NO: 1636544 - RNA, 23 nt, Human
aaaaaauuggggauucuuaaagu

SEQ ID NO: 1636545 - RNA, 13 nt, Human
aaaaacacagcaa

SEQ ID NO: 1636546 - RNA, 18 nt, Human
aaaaaauuggggauucuu

SEQ ID NO: 1636547 - RNA, 21 nt, Human
acuauucaaacagucucagga

SEQ ID NO: 1636548 - RNA, 20 nt, Human
acuaguauuucuaugaaaua

SEQ ID NO: 1636549 - RNA, 18 nt, Human
acucaaaagcugggcagg

SEQ ID NO: 1636550 - RNA, 13 nt, Human
acucaaaagcugg

SEQ ID NO: 1636551 - RNA, 19 nt, Human
acucaguccauagcagaga

SEQ ID NO: 1636552 - RNA, 17 nt, Human
acucuauguucuaagaa

SEQ ID NO: 1636553 - RNA, 23 nt, Human
acucuaucaaguauuauaccuuu

SEQ ID NO: 1636554 - RNA, 19 nt, Human
acucugucgcccagucugg

SEQ ID NO: 1636555 - RNA, 17 nt, Human
acucuagggaaaaacca

SEQ ID NO: 1636556 - RNA, 15 nt, Human
acucuagggaaaaac

SEQ ID NO: 1636557 - RNA, 15 nt, Human
acucauauuuucaug

SEQ ID NO: 1636558 - RNA, 15 nt, Human
acuaagagagaauga

SEQ ID NO: 1636559 - RNA, 13 nt, Human
acuaagagagaau

SEQ ID NO: 1636560 - RNA, 11 nt, Human
acgugaguccu

SEQ ID NO: 1636561 - RNA, 22 nt, Human
acgcaggcccccaggugccagu

SEQ ID NO: 1636562 - RNA, 14 nt, Human
acgcugugcugccc

SEQ ID NO: 1636563 - RNA, 12 nt, Human
acgcugugcugc

SEQ ID NO: 1636564 - RNA, 11 nt, Human
acgcugugcug

SEQ ID NO: 1636565 - RNA, 15 nt, Human
acgcugugcugcccu

SEQ ID NO: 1636566 - RNA, 15 nt, Human
acgucugacaggcaa

SEQ ID NO: 1636567 - RNA, 14 nt, Human
acgucugacaggca

SEQ ID NO: 1636568 - RNA, 13 nt, Human
acgucugacaggc

SEQ ID NO: 1636569 - RNA, 14 nt, Human
acggaacucaaaua

SEQ ID NO: 1636570 - RNA, 21 nt, Human
accucugcagcaauaaagcag

SEQ ID NO: 1636571 - RNA, 18 nt, Human
accucugcagcaauaaag

SEQ ID NO: 1636572 - RNA, 20 nt, Human
accucugcagcaauaaagca

SEQ ID NO: 1636573 - RNA, 15 nt, Human
accuuuaagagaaau

SEQ ID NO: 1636574 - RNA, 18 nt, Human
accuuucccaucuuccaa

SEQ ID NO: 1636575 - RNA, 13 nt, Human
accuuucccaucu

SEQ ID NO: 1636576 - RNA, 18 nt, Human
accuuggcugcagggagu

SEQ ID NO: 1636577 - RNA, 17 nt, Human
accuuggcugcagggag

SEQ ID NO: 1636578 - RNA, 15 nt, Human
accugucccccugac

SEQ ID NO: 1636579 - RNA, 12 nt, Human
accugucccccu

SEQ ID NO: 1636580 - RNA, 16 nt, Human
accugucccccugaca

SEQ ID NO: 1636581 - RNA, 20 nt, Human
accugcccugcugaguccca

SEQ ID NO: 1636582 - RNA, 23 nt, Human
acugucucaagagggcacuggug

SEQ ID NO: 1636583 - RNA, 21 nt, Human
acugucucaagagggcacugg

SEQ ID NO: 1636584 - RNA, 20 nt, Human
acugucucaagagggcacug

SEQ ID NO: 1636585 - RNA, 22 nt, Human
acuguaagaaaauaucacuugu

SEQ ID NO: 1636586 - RNA, 13 nt, Human
acuguaagaaaau

SEQ ID NO: 1636587 - RNA, 19 nt, Human
acuguaagaaaauaucacu

SEQ ID NO: 1636588 - RNA, 18 nt, Human
acugguuccauggccucu

SEQ ID NO: 1636589 - RNA, 16 nt, Human
acuggugacugauucu

SEQ ID NO: 1636590 - RNA, 14 nt, Human
acuggugacugauu

SEQ ID NO: 1636591 - RNA, 17 nt, Human
acuggaagcacagcuuc

SEQ ID NO: 1636592 - RNA, 17 nt, Human
acugcccccucugcccu

SEQ ID NO: 1636593 - RNA, 16 nt, Human
acugcccccucugccc

SEQ ID NO: 1636594 - RNA, 19 nt, Human
acuggaagcacagcuucau

SEQ ID NO: 1636595 - RNA, 15 nt, Human
acugcccccucugcc

SEQ ID NO: 1636596 - RNA, 14 nt, Human
acugcccccucugc

SEQ ID NO: 1636597 - RNA, 15 nt, Human
acuggagaaaaugga

SEQ ID NO: 1636598 - RNA, 18 nt, Human
acugguaggaaacuaggu

SEQ ID NO: 1636599 - RNA, 18 nt, Human
acucugucucaguccaug

SEQ ID NO: 1636600 - RNA, 20 nt, Human
acucugucucaguccaugaa

SEQ ID NO: 1636601 - RNA, 13 nt, Human
acugccagcaacg

SEQ ID NO: 1636602 - RNA, 21 nt, Human
acuucugucuucacaacagau

SEQ ID NO: 1636603 - RNA, 12 nt, Human
acuucagacaua

SEQ ID NO: 1636604 - RNA, 22 nt, Human
acuucugucuucacaacagauu

SEQ ID NO: 1636605 - RNA, 15 nt, Human
acuugggccacugug

SEQ ID NO: 1636606 - RNA, 14 nt, Human
acuugggccacugu

SEQ ID NO: 1636607 - RNA, 18 nt, Human
acuuguaaaggaauuuaa

SEQ ID NO: 1636608 - RNA, 16 nt, Human
acuugguuuuuaaaaa

SEQ ID NO: 1636609 - RNA, 20 nt, Human
acugugcugagucugaaggc

SEQ ID NO: 1636610 - RNA, 22 nt, Human
acugugcugagucugaaggcug

SEQ ID NO: 1636611 - RNA, 22 nt, Human
acuuuauuuucuauaauuuaaa

SEQ ID NO: 1636612 - RNA, 17 nt, Human
acuuuguucuggcucuu

SEQ ID NO: 1636613 - RNA, 16 nt, Human
acuuuguucuggcucu

SEQ ID NO: 1636614 - RNA, 22 nt, Human
acuuuaucuugaauaauguaag

SEQ ID NO: 1636615 - RNA, 19 nt, Human
acuuuguucuggcucuucc

SEQ ID NO: 1636616 - RNA, 20 nt, Human
acuuuguucuggcucuucca

SEQ ID NO: 1636617 - RNA, 13 nt, Human
acuuuuauaaacu

SEQ ID NO: 1636618 - RNA, 16 nt, Human
acuuuuaugauacuug

SEQ ID NO: 1636619 - RNA, 12 nt, Human
acuuuuaugaua

SEQ ID NO: 1636620 - RNA, 16 nt, Human
agaaaaucaggcuggc

SEQ ID NO: 1636621 - RNA, 15 nt, Human
agaaaauaccaagga

SEQ ID NO: 1636622 - RNA, 19 nt, Human
agaaaauaguggugugauu

SEQ ID NO: 1636623 - RNA, 14 nt, Human
acuuuucuuugugg

SEQ ID NO: 1636624 - RNA, 14 nt, Human
acuuuuggaaggua

SEQ ID NO: 1636625 - RNA, 16 nt, Human
acuuuucuuucagcca

SEQ ID NO: 1636626 - RNA, 20 nt, Human
acuuuucauaaccuagccuu

SEQ ID NO: 1636627 - RNA, 15 nt, Human
acuuuuauaaacuuu

SEQ ID NO: 1636628 - RNA, 23 nt, Human
acuuuuauuuccagugaaaucag

SEQ ID NO: 1636629 - RNA, 23 nt, Human
acuuuuaugauacuugaaaauua

SEQ ID NO: 1636630 - RNA, 14 nt, Human
agaaaguucaugcu

SEQ ID NO: 1636631 - RNA, 22 nt, Human
agaaaguacuucuccacccugc

SEQ ID NO: 1636632 - RNA, 23 nt, Human
agaaaguacuucuccacccugcu

SEQ ID NO: 1636633 - RNA, 21 nt, Human
acacgagcaggcuacugucag

SEQ ID NO: 1636634 - RNA, 17 nt, Human
acacgcgugcacacacc

SEQ ID NO: 1636635 - RNA, 15 nt, Human
acacgcgugcacaca

SEQ ID NO: 1636636 - RNA, 19 nt, Human
acacgagcaggcuacuguc

SEQ ID NO: 1636637 - RNA, 14 nt, Human
acacgagcaggcua

SEQ ID NO: 1636638 - RNA, 14 nt, Human
acacgcuccuuccu

SEQ ID NO: 1636639 - RNA, 16 nt, Human
acacgcuccuuccucu

SEQ ID NO: 1636640 - RNA, 13 nt, Human
acacagcucuucu

SEQ ID NO: 1636641 - RNA, 11 nt, Human
acacagcucuu

SEQ ID NO: 1636642 - RNA, 22 nt, Human
acacauuuuauuuuauuaugca

SEQ ID NO: 1636643 - RNA, 12 nt, Human
acacauuuuucu

SEQ ID NO: 1636644 - RNA, 20 nt, Human
acacauuuuuuaaaugcacc

SEQ ID NO: 1636645 - RNA, 22 nt, Human
acacauuuuuuaaaugcaccug

SEQ ID NO: 1636646 - RNA, 19 nt, Human
acacagaggcugccucucc

SEQ ID NO: 1636647 - RNA, 20 nt, Human
acacagcucuguccugggag

SEQ ID NO: 1636648 - RNA, 17 nt, Human
acacagauuugagcuca

SEQ ID NO: 1636649 - RNA, 13 nt, Human
acaagaaaugaaa

SEQ ID NO: 1636650 - RNA, 17 nt, Human
acaaggauugcuacugu

SEQ ID NO: 1636651 - RNA, 14 nt, Human
acaaggcaaggcug

SEQ ID NO: 1636652 - RNA, 12 nt, Human
acaaggcaaggc

SEQ ID NO: 1636653 - RNA, 22 nt, Human
acaaaauguaggguuauaauaa

SEQ ID NO: 1636654 - RNA, 15 nt, Human
aauuuuguuucugua

SEQ ID NO: 1636655 - RNA, 14 nt, Human
aauuuuguuucugu

SEQ ID NO: 1636656 - RNA, 15 nt, Human
acaaggcaaggcugu

SEQ ID NO: 1636657 - RNA, 13 nt, Human
aauuuugugaagc

SEQ ID NO: 1636658 - RNA, 13 nt, Human
aauuuuguuucug

SEQ ID NO: 1636659 - RNA, 23 nt, Human
acagcaguugaaaagacuccaaa

SEQ ID NO: 1636660 - RNA, 22 nt, Human
acagcaguugaaaagacuccaa

SEQ ID NO: 1636661 - RNA, 21 nt, Human
acagcaguugaaaagacucca

SEQ ID NO: 1636662 - RNA, 19 nt, Human
acagagugagacucugucu

SEQ ID NO: 1636663 - RNA, 15 nt, Human
acagagugagacucu

SEQ ID NO: 1636664 - RNA, 14 nt, Human
acagaggggguggc

SEQ ID NO: 1636665 - RNA, 17 nt, Human
acagccaacuauggccu

SEQ ID NO: 1636666 - RNA, 19 nt, Human
acagccaacuauggccugu

SEQ ID NO: 1636667 - RNA, 15 nt, Human
acagaggcagcccca

SEQ ID NO: 1636668 - RNA, 14 nt, Human
acagacacaggccc

SEQ ID NO: 1636669 - RNA, 13 nt, Human
acagacacaggcc

SEQ ID NO: 1636670 - RNA, 23 nt, Human
acagaggcagccccauucugccu

SEQ ID NO: 1636671 - RNA, 19 nt, Human
acagaggcagccccauucu

SEQ ID NO: 1636672 - RNA, 15 nt, Human
acagacacaggcccg

SEQ ID NO: 1636673 - RNA, 15 nt, Human
acacuguacugcaau

SEQ ID NO: 1636674 - RNA, 13 nt, Human
acagacaaagcgu

SEQ ID NO: 1636675 - RNA, 11 nt, Human
acagacacagg

SEQ ID NO: 1636676 - RNA, 14 nt, Human
acacugcauguuug

SEQ ID NO: 1636677 - RNA, 15 nt, Human
acacugcauguuugu

SEQ ID NO: 1636678 - RNA, 17 nt, Human
acagccacggccaggcc

SEQ ID NO: 1636679 - RNA, 16 nt, Human
acagccacggccaggc

SEQ ID NO: 1636680 - RNA, 15 nt, Human
acagccacggccagg

SEQ ID NO: 1636681 - RNA, 18 nt, Human
acagccacggccaggcca

SEQ ID NO: 1636682 - RNA, 19 nt, Human
acagccacggccaggccag

SEQ ID NO: 1636683 - RNA, 18 nt, Human
acagcucuucuccaggcu

SEQ ID NO: 1636684 - RNA, 17 nt, Human
acagcucuucuccaggc

SEQ ID NO: 1636685 - RNA, 16 nt, Human
acagcucuucuccagg

SEQ ID NO: 1636686 - RNA, 12 nt, Human
acaggcaagcac

SEQ ID NO: 1636687 - RNA, 21 nt, Human
acaggaugaugacuauggaaa

SEQ ID NO: 1636688 - RNA, 17 nt, Human
acccacaagaaaugaaa

SEQ ID NO: 1636689 - RNA, 23 nt, Human
acccaagggccuggccugagcug

SEQ ID NO: 1636690 - RNA, 21 nt, Human
acccacaagaaaugaaagcag

SEQ ID NO: 1636691 - RNA, 15 nt, Human
acccaccucagccuc

SEQ ID NO: 1636692 - RNA, 14 nt, Human
acccaccucagccu

SEQ ID NO: 1636693 - RNA, 13 nt, Human
acccaccucagcc

SEQ ID NO: 1636694 - RNA, 20 nt, Human
accauauuaccacagacaua

SEQ ID NO: 1636695 - RNA, 22 nt, Human
acccaagggccuggccugagcu

SEQ ID NO: 1636696 - RNA, 19 nt, Human
acccaagggccuggccuga

SEQ ID NO: 1636697 - RNA, 18 nt, Human
acccaagggccuggccug

SEQ ID NO: 1636698 - RNA, 11 nt, Human
acccccugaau

SEQ ID NO: 1636699 - RNA, 17 nt, Human
acccccugcaaagccca

SEQ ID NO: 1636700 - RNA, 14 nt, Human
acccccugcaaagc

SEQ ID NO: 1636701 - RNA, 22 nt, Human
acccccugcaaagcccagcuug

SEQ ID NO: 1636702 - RNA, 20 nt, Human
acccccugcaaagcccagcu

SEQ ID NO: 1636703 - RNA, 18 nt, Human
acccccugcaaagcccag

SEQ ID NO: 1636704 - RNA, 16 nt, Human
acccaccucagccucc

SEQ ID NO: 1636705 - RNA, 14 nt, Human
accauauuaccaca

SEQ ID NO: 1636706 - RNA, 16 nt, Human
accauauuaccacaga

SEQ ID NO: 1636707 - RNA, 19 nt, Human
accccuccaugugggcuag

SEQ ID NO: 1636708 - RNA, 16 nt, Human
accccuccaugugggc

SEQ ID NO: 1636709 - RNA, 17 nt, Human
accccucauagcccuca

SEQ ID NO: 1636710 - RNA, 18 nt, Human
acaugugcacaugcacgu

SEQ ID NO: 1636711 - RNA, 16 nt, Human
acaugugcacaugcac

SEQ ID NO: 1636712 - RNA, 15 nt, Human
acaucagcacgauuu

SEQ ID NO: 1636713 - RNA, 17 nt, Human
acaucagcacgauuucu

SEQ ID NO: 1636714 - RNA, 18 nt, Human
acaucagcacgauuucug

SEQ ID NO: 1636715 - RNA, 19 nt, Human
acaucagcacgauuucugu

SEQ ID NO: 1636716 - RNA, 22 nt, Human
acauguuucuuuguaaugaaaa

SEQ ID NO: 1636717 - RNA, 19 nt, Human
acauguuucuuuguaauga

SEQ ID NO: 1636718 - RNA, 23 nt, Human
acauguuucuuuguaaugaaaac

SEQ ID NO: 1636719 - RNA, 23 nt, Human
acauaaugcgugcauaccacuuu

SEQ ID NO: 1636720 - RNA, 22 nt, Human
acauaaugcgugcauaccacuu

SEQ ID NO: 1636721 - RNA, 19 nt, Human
acaggguuuugccauguug

SEQ ID NO: 1636722 - RNA, 23 nt, Human
acaggcaaugcuggcuguuggcu

SEQ ID NO: 1636723 - RNA, 19 nt, Human
acaggcaaugcuggcuguu

SEQ ID NO: 1636724 - RNA, 15 nt, Human
acauuuauucugcuc

SEQ ID NO: 1636725 - RNA, 19 nt, Human
acauuuguucuauagcuuu

SEQ ID NO: 1636726 - RNA, 12 nt, Human
accaagcccagu

SEQ ID NO: 1636727 - RNA, 17 nt, Human
accagccaguaaauggg

SEQ ID NO: 1636728 - RNA, 13 nt, Human
accagcagaaaug

SEQ ID NO: 1636729 - RNA, 13 nt, Human
accagaucauugu

SEQ ID NO: 1636730 - RNA, 21 nt, Human
aaaaucuacacuccagugaga

SEQ ID NO: 1636731 - RNA, 18 nt, Human
aaaaguucugcagauaaa

SEQ ID NO: 1636732 - RNA, 17 nt, Human
aaaauaaaacuuuuuaa

SEQ ID NO: 1636733 - RNA, 13 nt, Human
aaaaguugaauuu

SEQ ID NO: 1636734 - RNA, 19 nt, Human
aaaauaaaauuaaagcuga

SEQ ID NO: 1636735 - RNA, 16 nt, Human
aaaaagaaacauuugg

SEQ ID NO: 1636736 - RNA, 15 nt, Human
aaaaagaaaggaggg

SEQ ID NO: 1636737 - RNA, 21 nt, Human
aaacacugggagaaaugaaaa

SEQ ID NO: 1636738 - RNA, 16 nt, Human
aaacacuguucucugc

SEQ ID NO: 1636739 - RNA, 22 nt, Human
aaacacugggagaaaugaaaaa

SEQ ID NO: 1636740 - RNA, 21 nt, Human
aaaauugaugggauuugguca

SEQ ID NO: 1636741 - RNA, 17 nt, Human
aaaaucucaauauuuca

SEQ ID NO: 1636742 - RNA, 16 nt, Human
aaaaucucaauauuuc

SEQ ID NO: 1636743 - RNA, 19 nt, Human
aaaaucucaaauuucuaaa

SEQ ID NO: 1636744 - RNA, 22 nt, Human
aaaaucucaaauuucuaaaucu

SEQ ID NO: 1636745 - RNA, 15 nt, Human
aaagaaauguaaggg

SEQ ID NO: 1636746 - RNA, 14 nt, Human
aaagaguaggaaga

SEQ ID NO: 1636747 - RNA, 20 nt, Human
aaagaagguuucagaaagaa

SEQ ID NO: 1636748 - RNA, 19 nt, Human
aaagaguguggcaaaauaa

SEQ ID NO: 1636749 - RNA, 23 nt, Human
aaacugagaugugaacacaucag

SEQ ID NO: 1636750 - RNA, 21 nt, Human
aaacugagaugugaacacauc

SEQ ID NO: 1636751 - RNA, 17 nt, Human
aaagaaauauaccuaaa

SEQ ID NO: 1636752 - RNA, 15 nt, Human
aaagaaauauaccua

SEQ ID NO: 1636753 - RNA, 17 nt, Human
aaagauauuuugcuuug

SEQ ID NO: 1636754 - RNA, 20 nt, Human
aaagauauuuugcuuuguga

SEQ ID NO: 1636755 - RNA, 12 nt, Human
aaagauauuuug

SEQ ID NO: 1636756 - RNA, 16 nt, Human
aaagauauuuugcuuu

SEQ ID NO: 1636757 - RNA, 18 nt, Human
aaaccaucauugaaaucu

SEQ ID NO: 1636758 - RNA, 15 nt, Human
aaaccaugggauaaa

SEQ ID NO: 1636759 - RNA, 18 nt, Human
aaacucuccucugcugcu

SEQ ID NO: 1636760 - RNA, 20 nt, Human
aaaccaugggauaaaugcca

SEQ ID NO: 1636761 - RNA, 16 nt, Human
aaacccuauugguaaa

SEQ ID NO: 1636762 - RNA, 14 nt, Human
aaaggcagaagcaa

SEQ ID NO: 1636763 - RNA, 16 nt, Human
aaaggcuccaggagca

SEQ ID NO: 1636764 - RNA, 15 nt, Human
aaaggcuccaggagc

SEQ ID NO: 1636765 - RNA, 16 nt, Human
aaagccuccuccagcc

SEQ ID NO: 1636766 - RNA, 23 nt, Human
aaagcccuuccaugucgccucug

SEQ ID NO: 1636767 - RNA, 22 nt, Human
aaagcccuuccaugucgccucu

SEQ ID NO: 1636768 - RNA, 14 nt, Human
aaagcccugugcuc

SEQ ID NO: 1636769 - RNA, 13 nt, Human
aaagcccugugcu

SEQ ID NO: 1636770 - RNA, 13 nt, Human
aaaguggaaaaau

SEQ ID NO: 1636771 - RNA, 20 nt, Human
aaaggcuccaggagcagcca

SEQ ID NO: 1636772 - RNA, 19 nt, Human
aaaggcuccaggagcagcc

SEQ ID NO: 1636773 - RNA, 13 nt, Human
aaauaaaacuuuu

SEQ ID NO: 1636774 - RNA, 16 nt, Human
aaauaaaacuuuuuaa

SEQ ID NO: 1636775 - RNA, 19 nt, Human
aaauaaaacuuuuuaaaau

SEQ ID NO: 1636776 - RNA, 10 nt, Human
aaauaaauaa

SEQ ID NO: 1636777 - RNA, 16 nt, Human
aaaucaaauaugcaaa

SEQ ID NO: 1636778 - RNA, 15 nt, Human
aaaucaaauaugcaa

SEQ ID NO: 1636779 - RNA, 14 nt, Human
aaaucaaauaugca

SEQ ID NO: 1636780 - RNA, 12 nt, Human
aaaucaaauaug

SEQ ID NO: 1636781 - RNA, 20 nt, Human
aaauauuuauuuuaauaaug

SEQ ID NO: 1636782 - RNA, 13 nt, Human
aaauauuuauuuu

SEQ ID NO: 1636783 - RNA, 15 nt, Human
aaauauuuauuuuaa

SEQ ID NO: 1636784 - RNA, 19 nt, Human
aaaucaaugcuauaacuau

SEQ ID NO: 1636785 - RNA, 19 nt, Human
aaaucugugaacuugaaau

SEQ ID NO: 1636786 - RNA, 18 nt, Human
aaaucugugaacuugaaa

SEQ ID NO: 1636787 - RNA, 16 nt, Human
aaaucugugaacuuga

SEQ ID NO: 1636788 - RNA, 15 nt, Human
aaaucugugaacuug

SEQ ID NO: 1636789 - RNA, 24 nt, Human
aaauagcucaggugucccugcacu

SEQ ID NO: 1636790 - RNA, 18 nt, Human
aaauagcuagacugguga

SEQ ID NO: 1636791 - RNA, 20 nt, Human
aaauagcuuuuuucucugau

SEQ ID NO: 1636792 - RNA, 17 nt, Human
aaauagcuuuuuucucu

SEQ ID NO: 1636793 - RNA, 19 nt, Human
aaauaguggugugauuugg

SEQ ID NO: 1636794 - RNA, 20 nt, Human
aacuuuaugcuaagugaaau

SEQ ID NO: 1636795 - RNA, 21 nt, Human
aacuuuaugcuaagugaaaua

SEQ ID NO: 1636796 - RNA, 20 nt, Human
aacugagaugugaacacauc

SEQ ID NO: 1636797 - RNA, 20 nt, Human
aacugacucuuaagaagacu

SEQ ID NO: 1636798 - RNA, 19 nt, Human
aacugacucuuaagaagac

SEQ ID NO: 1636799 - RNA, 18 nt, Human
aacugacucuuaagaaga

SEQ ID NO: 1636800 - RNA, 15 nt, Human
aacugacucuuaaga

SEQ ID NO: 1636801 - RNA, 16 nt, Human
aacugagugccuuuug

SEQ ID NO: 1636802 - RNA, 14 nt, Human
aacugauaaagaug

SEQ ID NO: 1636803 - RNA, 18 nt, Human
aacuuaaucuaaauggaa

SEQ ID NO: 1636804 - RNA, 15 nt, Human
aacuuaaucuaaaug

SEQ ID NO: 1636805 - RNA, 16 nt, Human
aacuuaaucuaaaugg

SEQ ID NO: 1636806 - RNA, 17 nt, Human
aacggaugauuucuaug

SEQ ID NO: 1636807 - RNA, 16 nt, Human
aacggaugauuucuau

SEQ ID NO: 1636808 - RNA, 15 nt, Human
aacggaugauuucua

SEQ ID NO: 1636809 - RNA, 14 nt, Human
aacggaugauuucu

SEQ ID NO: 1636810 - RNA, 11 nt, Human
aacgcagcccu

SEQ ID NO: 1636811 - RNA, 19 nt, Human
aaauugacacuuaaaaaug

SEQ ID NO: 1636812 - RNA, 22 nt, Human
aaauugacacuuaaaaaugguu

SEQ ID NO: 1636813 - RNA, 14 nt, Human
aaauugcuccuuga

SEQ ID NO: 1636814 - RNA, 13 nt, Human
aaauugcuccuug

SEQ ID NO: 1636815 - RNA, 21 nt, Human
aaauucuugcaaaguaucccu

SEQ ID NO: 1636816 - RNA, 13 nt, Human
aaauucuuucauu

SEQ ID NO: 1636817 - RNA, 17 nt, Human
aaauuaaagcugaaaac

SEQ ID NO: 1636818 - RNA, 13 nt, Human
aaauuaaagcuga

SEQ ID NO: 1636819 - RNA, 22 nt, Human
aaauguuguucucuucuuuaaa

SEQ ID NO: 1636820 - RNA, 17 nt, Human
aaaucuuauaauuuaaa

SEQ ID NO: 1636821 - RNA, 15 nt, Human
aaaugccuuuguacu

SEQ ID NO: 1636822 - RNA, 18 nt, Human
aacaaauuuacagagaca

SEQ ID NO: 1636823 - RNA, 16 nt, Human
aacacaucagcuugcc

SEQ ID NO: 1636824 - RNA, 17 nt, Human
aaccuagggugauauua

SEQ ID NO: 1636825 - RNA, 21 nt, Human
aaccgaacugauguaaguaaa

SEQ ID NO: 1636826 - RNA, 21 nt, Human
aacccuuggagccaauggaga

SEQ ID NO: 1636827 - RNA, 12 nt, Human
aacccucagagc

SEQ ID NO: 1636828 - RNA, 15 nt, Human
aacccuauugguaaa

SEQ ID NO: 1636829 - RNA, 12 nt, Human
aaccagaucauu

SEQ ID NO: 1636830 - RNA, 15 nt, Human
aaccacuucagcuga

SEQ ID NO: 1636831 - RNA, 13 nt, Human
aaccacgcuggac

SEQ ID NO: 1636832 - RNA, 15 nt, Human
aacaucccuccuggg

SEQ ID NO: 1636833 - RNA, 21 nt, Human
aacagcuggugcccugcuuuc

SEQ ID NO: 1636834 - RNA, 20 nt, Human
aacagcuggugcccugcuuu

SEQ ID NO: 1636835 - RNA, 19 nt, Human
aacagcuggugcccugcuu

SEQ ID NO: 1636836 - RNA, 14 nt, Human
aagcagcguuucua

SEQ ID NO: 1636837 - RNA, 17 nt, Human
aagcagcguuucuauga

SEQ ID NO: 1636838 - RNA, 20 nt, Human
aagcagcguuucuaugacac

SEQ ID NO: 1636839 - RNA, 21 nt, Human
aagcagcguuucuaugacaca

SEQ ID NO: 1636840 - RNA, 22 nt, Human
aagcagcguuucuaugacacau

SEQ ID NO: 1636841 - RNA, 23 nt, Human
aagccagcaggcucucaggccag

SEQ ID NO: 1636842 - RNA, 20 nt, Human
aagccagcaggcucucaggc

SEQ ID NO: 1636843 - RNA, 14 nt, Human
aagauaaaugugcu

SEQ ID NO: 1636844 - RNA, 13 nt, Human
aagauaaaugugc

SEQ ID NO: 1636845 - RNA, 12 nt, Human
aagauaaaugug

SEQ ID NO: 1636846 - RNA, 13 nt, Human
aagauacugaaau

SEQ ID NO: 1636847 - RNA, 20 nt, Human
aaggcagcucuaaaugucaa

SEQ ID NO: 1636848 - RNA, 12 nt, Human
aaggcagggagg

SEQ ID NO: 1636849 - RNA, 15 nt, Human
aaggauugcuacugu

SEQ ID NO: 1636850 - RNA, 15 nt, Human
aaggauguucuagca

SEQ ID NO: 1636851 - RNA, 23 nt, Human
aaggacuucuuuaauuuuggaau

SEQ ID NO: 1636852 - RNA, 21 nt, Human
aagcuggucccacucagucca

SEQ ID NO: 1636853 - RNA, 18 nt, Human
aagcuggucccacucagu

SEQ ID NO: 1636854 - RNA, 18 nt, Human
aagcuguguggcagucug

SEQ ID NO: 1636855 - RNA, 21 nt, Human
aaggacuucuuuaauuuugga

SEQ ID NO: 1636856 - RNA, 20 nt, Human
aaggacuucuuuaauuuugg

SEQ ID NO: 1636857 - RNA, 15 nt, Human
aaggacuucuuuaau

SEQ ID NO: 1636858 - RNA, 14 nt, Human
aaggacuucuuuaa

SEQ ID NO: 1636859 - RNA, 19 nt, Human
aaggacagccccuccucca

SEQ ID NO: 1636860 - RNA, 13 nt, Human
aaggacagccccu

SEQ ID NO: 1636861 - RNA, 21 nt, Human
aagcgauucuucugcuucagc

SEQ ID NO: 1636862 - RNA, 17 nt, Human
aagggaaacugccagca

SEQ ID NO: 1636863 - RNA, 16 nt, Human
aagggaaacugccagc

SEQ ID NO: 1636864 - RNA, 23 nt, Human
aagggaaacugccagcaacgcag

SEQ ID NO: 1636865 - RNA, 18 nt, Human
aagggacgcuacccggga

SEQ ID NO: 1636866 - RNA, 18 nt, Human
aaggucauuuuuuuuaag

SEQ ID NO: 1636867 - RNA, 19 nt, Human
aaggucauuuuuuuuaaga

SEQ ID NO: 1636868 - RNA, 17 nt, Human
aaguccaagcauaccaa

SEQ ID NO: 1636869 - RNA, 18 nt, Human
aaguccaagcauuuagau

SEQ ID NO: 1636870 - RNA, 18 nt, Human
aaguccucuuuucugaga

SEQ ID NO: 1636871 - RNA, 22 nt, Human
aaguccucuuuucugagaggac

SEQ ID NO: 1636872 - RNA, 14 nt, Human
aagucuccaaaguc

SEQ ID NO: 1636873 - RNA, 21 nt, Human
aaguagggacuucugucuuca

SEQ ID NO: 1636874 - RNA, 21 nt, Human
aaguagaagucuuagauguau

SEQ ID NO: 1636875 - RNA, 18 nt, Human
aaguaucccuacuguaau

SEQ ID NO: 1636876 - RNA, 23 nt, Human
aaguaucccuacuguaauuugug

SEQ ID NO: 1636877 - RNA, 17 nt, Human
aaguaucccuacuguaa

SEQ ID NO: 1636878 - RNA, 20 nt, Human
aaguagaagucuuagaugua

SEQ ID NO: 1636879 - RNA, 19 nt, Human
aaguagaagucuuagaugu

SEQ ID NO: 1636880 - RNA, 20 nt, Human
aaggugaggagcuugaaacc

SEQ ID NO: 1636881 - RNA, 19 nt, Human
aaguggaaaaauagccugc

SEQ ID NO: 1636882 - RNA, 21 nt, Human
aaguggaaaaauagccugccu

SEQ ID NO: 1636883 - RNA, 12 nt, Human
aaguugaauuuu

SEQ ID NO: 1636884 - RNA, 12 nt, Human
aaguugccuaaa

SEQ ID NO: 1636885 - RNA, 15 nt, Human
aagucuccaaagucu

SEQ ID NO: 1636886 - RNA, 23 nt, Human
aaugcuauaacuauguugauaaa

SEQ ID NO: 1636887 - RNA, 23 nt, Human
aauguuucaaacauauauaacaa

SEQ ID NO: 1636888 - RNA, 22 nt, Human
aauguuuacagauccccaagcc

SEQ ID NO: 1636889 - RNA, 16 nt, Human
aauguuugccucugcc

SEQ ID NO: 1636890 - RNA, 15 nt, Human
aauguuugccucugc

SEQ ID NO: 1636891 - RNA, 15 nt, Human
aaugugaaaagaaaa

SEQ ID NO: 1636892 - RNA, 17 nt, Human
aaugugaaaagaaaaau

SEQ ID NO: 1636893 - RNA, 19 nt, Human
aaugcgugcauaccacuuu

SEQ ID NO: 1636894 - RNA, 18 nt, Human
aaugcgugcauaccacuu

SEQ ID NO: 1636895 - RNA, 22 nt, Human
aaugcgcaggcuggcccugccc

SEQ ID NO: 1636896 - RNA, 23 nt, Human
aaugccuuacccucauguucuua

SEQ ID NO: 1636897 - RNA, 20 nt, Human
aauguuuuuuuuuaaagacu

SEQ ID NO: 1636898 - RNA, 15 nt, Human
aauguuuuuuuuuaa

SEQ ID NO: 1636899 - RNA, 22 nt, Human
aauguuuuuuuuuaaagacuuu

SEQ ID NO: 1636900 - RNA, 13 nt, Human
aauagacaauuua

SEQ ID NO: 1636901 - RNA, 14 nt, Human
aaucaccgaaaacg

SEQ ID NO: 1636902 - RNA, 23 nt, Human
aaucaaguuggcuucuaaucaaa

SEQ ID NO: 1636903 - RNA, 19 nt, Human
aaucacauucgaguguuuc

SEQ ID NO: 1636904 - RNA, 15 nt, Human
aaucaccgaaaacgu

SEQ ID NO: 1636905 - RNA, 12 nt, Human
aauauuaaagcc

SEQ ID NO: 1636906 - RNA, 21 nt, Human
aauauuagugaccucagcuuu

SEQ ID NO: 1636907 - RNA, 22 nt, Human
aauacucuacccucuuagaaaa

SEQ ID NO: 1636908 - RNA, 20 nt, Human
aauacucuacccucuuagaa

SEQ ID NO: 1636909 - RNA, 13 nt, Human
aauacucuuauau

SEQ ID NO: 1636910 - RNA, 19 nt, Human
aaguugccuaaauccauuu

SEQ ID NO: 1636911 - RNA, 18 nt, Human
aaguugccuaaauccauu

SEQ ID NO: 1636912 - RNA, 17 nt, Human
aaguugccuaaauccau

SEQ ID NO: 1636913 - RNA, 16 nt, Human
aaguugccuaaaucca

SEQ ID NO: 1636914 - RNA, 15 nt, Human
aaguugccuaaaucc

SEQ ID NO: 1636915 - RNA, 15 nt, Human
aauccaaugaaauga

SEQ ID NO: 1636916 - RNA, 19 nt, Human
aauccagacccggcugcgu

SEQ ID NO: 1636917 - RNA, 16 nt, Human
aaucucaaauuucuaa

SEQ ID NO: 1636918 - RNA, 13 nt, Human
aauccagccugcu

SEQ ID NO: 1636919 - RNA, 17 nt, Human
aaucucaaauuucuaaa

SEQ ID NO: 1636920 - RNA, 18 nt, Human
aaucucaaauuucuaaau

SEQ ID NO: 1636921 - RNA, 15 nt, Human
aaugauuaugaauua

SEQ ID NO: 1636922 - RNA, 23 nt, Human
aaugauuaugaauuacauuugua

SEQ ID NO: 1636923 - RNA, 21 nt, Human
aaugauuaugaauuacauuug

SEQ ID NO: 1636924 - RNA, 18 nt, Human
aauccaagcaaaugugaa

SEQ ID NO: 1636925 - RNA, 17 nt, Human
aauccaagcaaauguga

SEQ ID NO: 1636926 - RNA, 16 nt, Human
agcacugacuucuaag

SEQ ID NO: 1636927 - RNA, 19 nt, Human
agcacagacccugcccugu

SEQ ID NO: 1636928 - RNA, 18 nt, Human
agcacagacccugcccug

SEQ ID NO: 1636929 - RNA, 20 nt, Human
agcacagacccugcccugug

SEQ ID NO: 1636930 - RNA, 12 nt, Human
agcacagacccu

SEQ ID NO: 1636931 - RNA, 17 nt, Human
agcacagacccugcccu

SEQ ID NO: 1636932 - RNA, 23 nt, Human
agcacacuugacaucaacugcau

SEQ ID NO: 1636933 - RNA, 20 nt, Human
agcagugcaugcugucccuu

SEQ ID NO: 1636934 - RNA, 19 nt, Human
agcagugcaugcugucccu

SEQ ID NO: 1636935 - RNA, 13 nt, Human
agcagcguuucua

SEQ ID NO: 1636936 - RNA, 18 nt, Human
agcagcguuucuaugaca

SEQ ID NO: 1636937 - RNA, 13 nt, Human
agcaguugaaaag

SEQ ID NO: 1636938 - RNA, 23 nt, Human
agcaguucagagcugcccucucc

SEQ ID NO: 1636939 - RNA, 16 nt, Human
agcaguugaaaagacu

SEQ ID NO: 1636940 - RNA, 23 nt, Human
agcauccuggcacccggccccug

SEQ ID NO: 1636941 - RNA, 22 nt, Human
agcauccuggcacccggccccu

SEQ ID NO: 1636942 - RNA, 23 nt, Human
agcaugccuggauggggcugcac

SEQ ID NO: 1636943 - RNA, 23 nt, Human
agccaagugugguagagugugcc

SEQ ID NO: 1636944 - RNA, 21 nt, Human
agccgggcgugguggugagug

SEQ ID NO: 1636945 - RNA, 16 nt, Human
agccgugccuucagcu

SEQ ID NO: 1636946 - RNA, 15 nt, Human
agccgugccuucagc

SEQ ID NO: 1636947 - RNA, 21 nt, Human
agccucccaaagugcugggau

SEQ ID NO: 1636948 - RNA, 13 nt, Human
agccguggcuucc

SEQ ID NO: 1636949 - RNA, 17 nt, Human
agccgugccuucagcuc

SEQ ID NO: 1636950 - RNA, 22 nt, Human
agccucccacgacugcccggca

SEQ ID NO: 1636951 - RNA, 14 nt, Human
agccuccuccagcc

SEQ ID NO: 1636952 - RNA, 19 nt, Human
agccucccgaguagcuggg

SEQ ID NO: 1636953 - RNA, 18 nt, Human
agccucccgaguagcugg

SEQ ID NO: 1636954 - RNA, 20 nt, Human
agccucccgaguagcuggga

SEQ ID NO: 1636955 - RNA, 22 nt, Human
agccucccgaguagcugggacu

SEQ ID NO: 1636956 - RNA, 21 nt, Human
agccgccaugcuccuggccca

SEQ ID NO: 1636957 - RNA, 13 nt, Human
agccgcuggggcc

SEQ ID NO: 1636958 - RNA, 20 nt, Human
agccagcaggcucucaggcc

SEQ ID NO: 1636959 - RNA, 19 nt, Human
agccagcaggcucucaggc

SEQ ID NO: 1636960 - RNA, 18 nt, Human
agccagcaggcucucagg

SEQ ID NO: 1636961 - RNA, 16 nt, Human
agccccauucugccug

SEQ ID NO: 1636962 - RNA, 13 nt, Human
agccccauucugc

SEQ ID NO: 1636963 - RNA, 17 nt, Human
agcccucacccuggggc

SEQ ID NO: 1636964 - RNA, 15 nt, Human
agccccagugcccac

SEQ ID NO: 1636965 - RNA, 14 nt, Human
agccccagugccca

SEQ ID NO: 1636966 - RNA, 13 nt, Human
agccccagugccc

SEQ ID NO: 1636967 - RNA, 21 nt, Human
agacugcauuauauuuauuac

SEQ ID NO: 1636968 - RNA, 17 nt, Human
agacuggaagcacagcu

SEQ ID NO: 1636969 - RNA, 19 nt, Human
agacuggaagcacagcuuc

SEQ ID NO: 1636970 - RNA, 17 nt, Human
agagaacuuccagaucc

SEQ ID NO: 1636971 - RNA, 21 nt, Human
agagaggguggugaccucugc

SEQ ID NO: 1636972 - RNA, 20 nt, Human
agagaggguggugaccucug

SEQ ID NO: 1636973 - RNA, 22 nt, Human
agagaggguggugaccucugcc

SEQ ID NO: 1636974 - RNA, 23 nt, Human
agagaggguggugaccucugccu

SEQ ID NO: 1636975 - RNA, 13 nt, Human
agagcccacgccc

SEQ ID NO: 1636976 - RNA, 19 nt, Human
agagcccaccuuggcucaa

SEQ ID NO: 1636977 - RNA, 16 nt, Human
agagcccacgccccca

SEQ ID NO: 1636978 - RNA, 17 nt, Human
agagcccacgcccccac

SEQ ID NO: 1636979 - RNA, 21 nt, Human
agacgcugugcugcccugccc

SEQ ID NO: 1636980 - RNA, 12 nt, Human
agacagcucuua

SEQ ID NO: 1636981 - RNA, 11 nt, Human
agacagcucuu

SEQ ID NO: 1636982 - RNA, 12 nt, Human
agacagcugccu

SEQ ID NO: 1636983 - RNA, 18 nt, Human
agacggagucccaccuug

SEQ ID NO: 1636984 - RNA, 22 nt, Human
agacgcugugcugcccugccca

SEQ ID NO: 1636985 - RNA, 15 nt, Human
agacagcccgggcuc

SEQ ID NO: 1636986 - RNA, 14 nt, Human
agacagcccgggcu

SEQ ID NO: 1636987 - RNA, 16 nt, Human
agacagcccgggcucu

SEQ ID NO: 1636988 - RNA, 21 nt, Human
agacagauacuccuccaaggu

SEQ ID NO: 1636989 - RNA, 22 nt, Human
agacagauacuccuccaagguu

SEQ ID NO: 1636990 - RNA, 15 nt, Human
agacagauacuccuc

SEQ ID NO: 1636991 - RNA, 14 nt, Human
agagcccaggccuc

SEQ ID NO: 1636992 - RNA, 13 nt, Human
agagcccaggccu

SEQ ID NO: 1636993 - RNA, 15 nt, Human
agagcccaggccucc

SEQ ID NO: 1636994 - RNA, 16 nt, Human
agaggaaggagaggag

SEQ ID NO: 1636995 - RNA, 16 nt, Human
agaggagagaggaccc

SEQ ID NO: 1636996 - RNA, 15 nt, Human
agaggagagaggacc

SEQ ID NO: 1636997 - RNA, 14 nt, Human
agaggacuuuucuu

SEQ ID NO: 1636998 - RNA, 22 nt, Human
agaggguggugaccucugccug

SEQ ID NO: 1636999 - RNA, 20 nt, Human
agaggguggugaccucugcc

SEQ ID NO: 1637000 - RNA, 12 nt, Human
agagggcacaga

SEQ ID NO: 1637001 - RNA, 14 nt, Human
agagugugccugaa

SEQ ID NO: 1637002 - RNA, 17 nt, Human
agaguguggcaaaauaa

SEQ ID NO: 1637003 - RNA, 13 nt, Human
agaguguugaaac

SEQ ID NO: 1637004 - RNA, 11 nt, Human
agagugggagc

SEQ ID NO: 1637005 - RNA, 23 nt, Human
agaggguggugaccucugccuga

SEQ ID NO: 1637006 - RNA, 19 nt, Human
agaguggcuccucccggug

SEQ ID NO: 1637007 - RNA, 19 nt, Human
agaguggggauaugauuua

SEQ ID NO: 1637008 - RNA, 23 nt, Human
agaguggcuccucccggugccca

SEQ ID NO: 1637009 - RNA, 19 nt, Human
agauauaugcucugcaugu

SEQ ID NO: 1637010 - RNA, 14 nt, Human
agauggcugugccu

SEQ ID NO: 1637011 - RNA, 17 nt, Human
aggcuagauguauguac

SEQ ID NO: 1637012 - RNA, 16 nt, Human
aggcuagauguaugua

SEQ ID NO: 1637013 - RNA, 15 nt, Human
aggcuagauguaugu

SEQ ID NO: 1637014 - RNA, 18 nt, Human
aggcuguaucccaugagc

SEQ ID NO: 1637015 - RNA, 13 nt, Human
aggcuguauccca

SEQ ID NO: 1637016 - RNA, 20 nt, Human
aggcugucaauuacaggaag

SEQ ID NO: 1637017 - RNA, 23 nt, Human
agggacagaggggguggccuccc

SEQ ID NO: 1637018 - RNA, 22 nt, Human
agggacagaggggguggccucc

SEQ ID NO: 1637019 - RNA, 21 nt, Human
aggcugucaauuacaggaagu

SEQ ID NO: 1637020 - RNA, 17 nt, Human
agggacgcuacccggga

SEQ ID NO: 1637021 - RNA, 21 nt, Human
aggcuagaaccaccugccuau

SEQ ID NO: 1637022 - RNA, 17 nt, Human
aggcuacugucagcucc

SEQ ID NO: 1637023 - RNA, 23 nt, Human
aggcuacuguaaggcaaucaugg

SEQ ID NO: 1637024 - RNA, 21 nt, Human
aggcgugagccaccgugccug

SEQ ID NO: 1637025 - RNA, 23 nt, Human
aggcccuucucuccagccccugg

SEQ ID NO: 1637026 - RNA, 22 nt, Human
aggcccuucucuccagccccug

SEQ ID NO: 1637027 - RNA, 19 nt, Human
aggcccuuccucuccacug

SEQ ID NO: 1637028 - RNA, 21 nt, Human
aggcccuucucuccagccccu

SEQ ID NO: 1637029 - RNA, 20 nt, Human
aggcccuucucuccagcccc

SEQ ID NO: 1637030 - RNA, 18 nt, Human
aggcccuuccucuccacu

SEQ ID NO: 1637031 - RNA, 17 nt, Human
aggcccuuccucuccac

SEQ ID NO: 1637032 - RNA, 15 nt, Human
aggcccuuccucucc

SEQ ID NO: 1637033 - RNA, 13 nt, Human
aggcccuuccucu

SEQ ID NO: 1637034 - RNA, 24 nt, Human
aggugcuacaaaaacacagcaagg

SEQ ID NO: 1637035 - RNA, 23 nt, Human
aggugcuacaaaaacacagcaag

SEQ ID NO: 1637036 - RNA, 22 nt, Human
aggugcuaggaacacuccuuca

SEQ ID NO: 1637037 - RNA, 19 nt, Human
aggugcuaggaacacuccu

SEQ ID NO: 1637038 - RNA, 23 nt, Human
aggugcuaggaacacuccuucac

SEQ ID NO: 1637039 - RNA, 15 nt, Human
agguuaauaaaguaa

SEQ ID NO: 1637040 - RNA, 23 nt, Human
agguucccuuugacgccauccca

SEQ ID NO: 1637041 - RNA, 22 nt, Human
agguucccuuugacgccauccc

SEQ ID NO: 1637042 - RNA, 14 nt, Human
agguucaaagauau

SEQ ID NO: 1637043 - RNA, 15 nt, Human
agguucaaagauauu

SEQ ID NO: 1637044 - RNA, 22 nt, Human
aggugcuacaaaaacacagcaa

SEQ ID NO: 1637045 - RNA, 21 nt, Human
aggugcuacaaaaacacagca

SEQ ID NO: 1637046 - RNA, 20 nt, Human
aggugcuacaaaaacacagc

SEQ ID NO: 1637047 - RNA, 19 nt, Human
aggugcuacaaaaacacag

SEQ ID NO: 1637048 - RNA, 18 nt, Human
aggugcuacaaaaacaca

SEQ ID NO: 1637049 - RNA, 22 nt, Human
aggucuguucuuuccaaaguac

SEQ ID NO: 1637050 - RNA, 23 nt, Human
aggucuguucuuuccaaaguaca

SEQ ID NO: 1637051 - RNA, 18 nt, Human
aggucuguucuuuccaaa

SEQ ID NO: 1637052 - RNA, 16 nt, Human
aggucccuaauaaagc

SEQ ID NO: 1637053 - RNA, 15 nt, Human
aggucccuaauaaag

SEQ ID NO: 1637054 - RNA, 13 nt, Human
aggucccuaauaa

SEQ ID NO: 1637055 - RNA, 20 nt, Human
agguaaaagcaucacaugaa

SEQ ID NO: 1637056 - RNA, 18 nt, Human
agguaaaucagacuauga

SEQ ID NO: 1637057 - RNA, 11 nt, Human
aggucccuaau

SEQ ID NO: 1637058 - RNA, 12 nt, Human
aggucccuaaua

SEQ ID NO: 1637059 - RNA, 17 nt, Human
agguacaaccuguucug

SEQ ID NO: 1637060 - RNA, 23 nt, Human
agguaaaucagacuaugaaguuu

SEQ ID NO: 1637061 - RNA, 21 nt, Human
agguaaucgaccugccucggc

SEQ ID NO: 1637062 - RNA, 11 nt, Human
agggucccugg

SEQ ID NO: 1637063 - RNA, 23 nt, Human
aggguccuggggaaccugacccc

SEQ ID NO: 1637064 - RNA, 21 nt, Human
aggguccuggggaaccugacc

SEQ ID NO: 1637065 - RNA, 15 nt, Human
aggguccuggggaac

SEQ ID NO: 1637066 - RNA, 12 nt, Human
aggguccugggg

SEQ ID NO: 1637067 - RNA, 21 nt, Human
aggggccucuuaugggcuggg

SEQ ID NO: 1637068 - RNA, 20 nt, Human
aggggccucuuaugggcugg

SEQ ID NO: 1637069 - RNA, 19 nt, Human
aggggccucuuaugggcug

SEQ ID NO: 1637070 - RNA, 15 nt, Human
aggguaucuggugac

SEQ ID NO: 1637071 - RNA, 21 nt, Human
aggguaucaggugcugccauc

SEQ ID NO: 1637072 - RNA, 19 nt, Human
aggguaucaggugcugcca

SEQ ID NO: 1637073 - RNA, 22 nt, Human
agcuccccucggagaagagcug

SEQ ID NO: 1637074 - RNA, 23 nt, Human
agcuccgcuuucuacccagcgag

SEQ ID NO: 1637075 - RNA, 21 nt, Human
agcuccgcuuucuacccagcg

SEQ ID NO: 1637076 - RNA, 20 nt, Human
agcuccgcuuucuacccagc

SEQ ID NO: 1637077 - RNA, 13 nt, Human
agcuccuucuguc

SEQ ID NO: 1637078 - RNA, 12 nt, Human
agcuccuucugu

SEQ ID NO: 1637079 - RNA, 23 nt, Human
agcugagauuauaggcaccuacc

SEQ ID NO: 1637080 - RNA, 23 nt, Human
agcugcgguccacccaggagccc

SEQ ID NO: 1637081 - RNA, 19 nt, Human
agcuucuguugcugccuca

SEQ ID NO: 1637082 - RNA, 23 nt, Human
aggaugguucccuugaugaagaa

SEQ ID NO: 1637083 - RNA, 16 nt, Human
aggauguucugggaca

SEQ ID NO: 1637084 - RNA, 15 nt, Human
aggauguucugggac

SEQ ID NO: 1637085 - RNA, 22 nt, Human
aggauguacaaggacagccccu

SEQ ID NO: 1637086 - RNA, 18 nt, Human
aggauguucugggacaca

SEQ ID NO: 1637087 - RNA, 14 nt, Human
aggauuaaauaaug

SEQ ID NO: 1637088 - RNA, 14 nt, Human
aggauuauuggaaa

SEQ ID NO: 1637089 - RNA, 20 nt, Human
aggauuaaauaauguaaaua

SEQ ID NO: 1637090 - RNA, 13 nt, Human
aggaccucaggug

SEQ ID NO: 1637091 - RNA, 21 nt, Human
aggaugcuuguacauaaugcg

SEQ ID NO: 1637092 - RNA, 23 nt, Human
aggaugcuuguacauaaugcgug

SEQ ID NO: 1637093 - RNA, 17 nt, Human
aggaauccagacccggc

SEQ ID NO: 1637094 - RNA, 21 nt, Human
aggaaucaugugccaagcaga

SEQ ID NO: 1637095 - RNA, 20 nt, Human
aggaauccagacccggcugc

SEQ ID NO: 1637096 - RNA, 21 nt, Human
agcuuuucccuuuuuuuaagu

SEQ ID NO: 1637097 - RNA, 20 nt, Human
agcuucuguugcugccucau

SEQ ID NO: 1637098 - RNA, 23 nt, Human
auguaauuaaguacuauguauca

SEQ ID NO: 1637099 - RNA, 19 nt, Human
auguaagggaaacugccag

SEQ ID NO: 1637100 - RNA, 17 nt, Human
auguaauuaaguacuau

SEQ ID NO: 1637101 - RNA, 15 nt, Human
auguaauuaaguacu

SEQ ID NO: 1637102 - RNA, 16 nt, Human
auguaagggaaacugc

SEQ ID NO: 1637103 - RNA, 14 nt, Human
auguaagggaaacu

SEQ ID NO: 1637104 - RNA, 15 nt, Human
auggucggaaaacau

SEQ ID NO: 1637105 - RNA, 19 nt, Human
auggucaccaaaucagcug

SEQ ID NO: 1637106 - RNA, 21 nt, Human
augguccgugcuaaggacuug

SEQ ID NO: 1637107 - RNA, 20 nt, Human
augguccgugcuaaggacuu

SEQ ID NO: 1637108 - RNA, 14 nt, Human
augucuuuucuugc

SEQ ID NO: 1637109 - RNA, 13 nt, Human
augucuuccugga

SEQ ID NO: 1637110 - RNA, 22 nt, Human
augugaaacuggauuaaacuua

SEQ ID NO: 1637111 - RNA, 14 nt, Human
augugaaaucauuc

SEQ ID NO: 1637112 - RNA, 15 nt, Human
augugaaacauguuu

SEQ ID NO: 1637113 - RNA, 23 nt, Human
augugaacaguuguguuugaagc

SEQ ID NO: 1637114 - RNA, 21 nt, Human
augugaacaguuguguuugaa

SEQ ID NO: 1637115 - RNA, 11 nt, Human
augugaacagu

SEQ ID NO: 1637116 - RNA, 13 nt, Human
auguucugggaca

SEQ ID NO: 1637117 - RNA, 19 nt, Human
auguuugccucugccucug

SEQ ID NO: 1637118 - RNA, 22 nt, Human
auguuugccucugccucugaca

SEQ ID NO: 1637119 - RNA, 17 nt, Human
auguucuaagaagugaa

SEQ ID NO: 1637120 - RNA, 18 nt, Human
augugggcagugauguca

SEQ ID NO: 1637121 - RNA, 20 nt, Human
augugggcuaguugggcuuc

SEQ ID NO: 1637122 - RNA, 13 nt, Human
augugugaaguga

SEQ ID NO: 1637123 - RNA, 12 nt, Human
auguucugggac

SEQ ID NO: 1637124 - RNA, 11 nt, Human
auguucuggga

SEQ ID NO: 1637125 - RNA, 16 nt, Human
auguucucucuucucc

SEQ ID NO: 1637126 - RNA, 17 nt, Human
augcacagaguuguuac

SEQ ID NO: 1637127 - RNA, 18 nt, Human
augcacagaguuguuaca

SEQ ID NO: 1637128 - RNA, 17 nt, Human
augcacaaacagaggcc

SEQ ID NO: 1637129 - RNA, 16 nt, Human
augcacaaacagaggc

SEQ ID NO: 1637130 - RNA, 16 nt, Human
augcacagaguuguua

SEQ ID NO: 1637131 - RNA, 19 nt, Human
augccucucucaggccaaa

SEQ ID NO: 1637132 - RNA, 16 nt, Human
augcaugaaguaauau

SEQ ID NO: 1637133 - RNA, 20 nt, Human
augcaugaaguaauaugcac

SEQ ID NO: 1637134 - RNA, 20 nt, Human
augcauauuauuuuauguug

SEQ ID NO: 1637135 - RNA, 16 nt, Human
augcauauuauuuuau

SEQ ID NO: 1637136 - RNA, 17 nt, Human
augaugccaugaggaac

SEQ ID NO: 1637137 - RNA, 16 nt, Human
augaugccaugaggaa

SEQ ID NO: 1637138 - RNA, 24 nt, Human
augauguuuuccaugaguccccug

SEQ ID NO: 1637139 - RNA, 15 nt, Human
augcacaaacagagg

SEQ ID NO: 1637140 - RNA, 11 nt, Human
augcugcccug

SEQ ID NO: 1637141 - RNA, 16 nt, Human
augcucuuuacuucau

SEQ ID NO: 1637142 - RNA, 15 nt, Human
auggauuuccagcca

SEQ ID NO: 1637143 - RNA, 22 nt, Human
auggaggaaaaccaagccgugg

SEQ ID NO: 1637144 - RNA, 12 nt, Human
augcugcccugu

SEQ ID NO: 1637145 - RNA, 12 nt, Human
augcuuguacau

SEQ ID NO: 1637146 - RNA, 13 nt, Human
augcuuguacaua

SEQ ID NO: 1637147 - RNA, 14 nt, Human
augcuuguacauaa

SEQ ID NO: 1637148 - RNA, 20 nt, Human
auggcugugccucugccugu

SEQ ID NO: 1637149 - RNA, 19 nt, Human
auggcugugccucugccug

SEQ ID NO: 1637150 - RNA, 23 nt, Human
aucagcugcugaaacaacaaaua

SEQ ID NO: 1637151 - RNA, 22 nt, Human
aucagcugcugaaacaacaaau

SEQ ID NO: 1637152 - RNA, 15 nt, Human
aucaugugaaaucau

SEQ ID NO: 1637153 - RNA, 16 nt, Human
aucaugugaaaucauu

SEQ ID NO: 1637154 - RNA, 21 nt, Human
aucagcugcugaaacaacaaa

SEQ ID NO: 1637155 - RNA, 18 nt, Human
aucagccugcuccagcug

SEQ ID NO: 1637156 - RNA, 17 nt, Human
aucagccugcuccagcu

SEQ ID NO: 1637157 - RNA, 19 nt, Human
aucagccugcuccagcugu

SEQ ID NO: 1637158 - RNA, 20 nt, Human
aucagccugcuccagcuguu

SEQ ID NO: 1637159 - RNA, 21 nt, Human
aucaccgaaaacguggcugcu

SEQ ID NO: 1637160 - RNA, 19 nt, Human
aucaccgaaaacguggcug

SEQ ID NO: 1637161 - RNA, 14 nt, Human
aucaccgaaaacgu

SEQ ID NO: 1637162 - RNA, 19 nt, Human
aucagcacgauuucuguuu

SEQ ID NO: 1637163 - RNA, 20 nt, Human
aucagcacgauuucuguuua

SEQ ID NO: 1637164 - RNA, 23 nt, Human
aucagcacgauuucuguuuagau

SEQ ID NO: 1637165 - RNA, 15 nt, Human
auauuuauuuuaaua

SEQ ID NO: 1637166 - RNA, 14 nt, Human
auauuuauuuuaau

SEQ ID NO: 1637167 - RNA, 17 nt, Human
auauuuauuuuaauaau

SEQ ID NO: 1637168 - RNA, 20 nt, Human
aucaccaacgucugugccau

SEQ ID NO: 1637169 - RNA, 19 nt, Human
aucaccaacgucugugcca

SEQ ID NO: 1637170 - RNA, 18 nt, Human
aucaccaacgucugugcc

SEQ ID NO: 1637171 - RNA, 15 nt, Human
aucacauguggacuu

SEQ ID NO: 1637172 - RNA, 21 nt, Human
aucacagccucugaaaaccaa

SEQ ID NO: 1637173 - RNA, 19 nt, Human
auccucccaccucagccuc

SEQ ID NO: 1637174 - RNA, 18 nt, Human
auccucccaccucagccu

SEQ ID NO: 1637175 - RNA, 20 nt, Human
auccucccaccucagccucc

SEQ ID NO: 1637176 - RNA, 12 nt, Human
auccucccaggc

SEQ ID NO: 1637177 - RNA, 15 nt, Human
auccucccaccucag

SEQ ID NO: 1637178 - RNA, 13 nt, Human
auccuccaggugc

SEQ ID NO: 1637179 - RNA, 23 nt, Human
auccuccaggugcacaagcucca

SEQ ID NO: 1637180 - RNA, 11 nt, Human
auccuccaggu

SEQ ID NO: 1637181 - RNA, 15 nt, Human
auccccuguagagug

SEQ ID NO: 1637182 - RNA, 16 nt, Human
auccccaagccuggca

SEQ ID NO: 1637183 - RNA, 15 nt, Human
aucccauuuaaaaaa

SEQ ID NO: 1637184 - RNA, 13 nt, Human
auccccaagccug

SEQ ID NO: 1637185 - RNA, 14 nt, Human
aucccauuuaaaaa

SEQ ID NO: 1637186 - RNA, 15 nt, Human
auccagacccggcug

SEQ ID NO: 1637187 - RNA, 18 nt, Human
auccagaaagaaaacuug

SEQ ID NO: 1637188 - RNA, 16 nt, Human
auccagaaagaaaacu

SEQ ID NO: 1637189 - RNA, 14 nt, Human
aucuucuuuauaau

SEQ ID NO: 1637190 - RNA, 18 nt, Human
aucuugaagacuuuucuu

SEQ ID NO: 1637191 - RNA, 17 nt, Human
aucuugaauuguaagga

SEQ ID NO: 1637192 - RNA, 18 nt, Human
aucuugaauaauguaaga

SEQ ID NO: 1637193 - RNA, 22 nt, Human
aucugcuuuuuaaagaaugcuc

SEQ ID NO: 1637194 - RNA, 22 nt, Human
aucuggacuccucuguccaggc

SEQ ID NO: 1637195 - RNA, 19 nt, Human
aucuggacuccucugucca

SEQ ID NO: 1637196 - RNA, 18 nt, Human
aucuggacuccucugucc

SEQ ID NO: 1637197 - RNA, 17 nt, Human
aucuggacuccucuguc

SEQ ID NO: 1637198 - RNA, 16 nt, Human
aucuggacuccucugu

SEQ ID NO: 1637199 - RNA, 15 nt, Human
aucuggacuccucug

SEQ ID NO: 1637200 - RNA, 17 nt, Human
aucucugcuuuggaaau

SEQ ID NO: 1637201 - RNA, 16 nt, Human
aucucggcucacugca

SEQ ID NO: 1637202 - RNA, 15 nt, Human
aucucggcucacugc

SEQ ID NO: 1637203 - RNA, 14 nt, Human
aucucggcucacug

SEQ ID NO: 1637204 - RNA, 21 nt, Human
aucuauauuuuacauaaauuu

SEQ ID NO: 1637205 - RNA, 17 nt, Human
aucuauauuuuacauaa

SEQ ID NO: 1637206 - RNA, 14 nt, Human
aucuauauuuuaca

SEQ ID NO: 1637207 - RNA, 19 nt, Human
augaaagacuguacaaagu

SEQ ID NO: 1637208 - RNA, 17 nt, Human
augaaagacuguacaaa

SEQ ID NO: 1637209 - RNA, 16 nt, Human
augaaagacuguacaa

SEQ ID NO: 1637210 - RNA, 13 nt, Human
augaaagacugua

SEQ ID NO: 1637211 - RNA, 22 nt, Human
augaagcuuuuaugugaaacau

SEQ ID NO: 1637212 - RNA, 19 nt, Human
augaaguuuuuuuuauaca

SEQ ID NO: 1637213 - RNA, 23 nt, Human
augaccuuucaauaggaaaaacu

SEQ ID NO: 1637214 - RNA, 22 nt, Human
augaccuuucaauaggaaaaac

SEQ ID NO: 1637215 - RNA, 21 nt, Human
augaccuuucaauaggaaaaa

SEQ ID NO: 1637216 - RNA, 23 nt, Human
augaaguuuuuuuuauacaggau

SEQ ID NO: 1637217 - RNA, 14 nt, Human
auagucaaauugug

SEQ ID NO: 1637218 - RNA, 18 nt, Human
auaguaugguggcugggu

SEQ ID NO: 1637219 - RNA, 17 nt, Human
auaguaugguggcuggg

SEQ ID NO: 1637220 - RNA, 15 nt, Human
auagguuuaauaauu

SEQ ID NO: 1637221 - RNA, 18 nt, Human
auagguuuggacaaaaug

SEQ ID NO: 1637222 - RNA, 14 nt, Human
auagguuuggacaa

SEQ ID NO: 1637223 - RNA, 21 nt, Human
auaggugcuacaaaaacacag

SEQ ID NO: 1637224 - RNA, 15 nt, Human
auaggugcuacaaaa

SEQ ID NO: 1637225 - RNA, 23 nt, Human
auaggugcuacaaaaacacagca

SEQ ID NO: 1637226 - RNA, 14 nt, Human
auaggugcuacaaa

SEQ ID NO: 1637227 - RNA, 21 nt, Human
auagguauaaguggugugugu

SEQ ID NO: 1637228 - RNA, 21 nt, Human
auagccaaggccaaaggaagc

SEQ ID NO: 1637229 - RNA, 15 nt, Human
auagccaaggccaaa

SEQ ID NO: 1637230 - RNA, 23 nt, Human
auauuaugaagcuuuuaugugaa

SEQ ID NO: 1637231 - RNA, 13 nt, Human
auauuuauuuuaa

SEQ ID NO: 1637232 - RNA, 19 nt, Human
auauuuacuucuuauacau

SEQ ID NO: 1637233 - RNA, 20 nt, Human
auauuuacuaaaauggacug

SEQ ID NO: 1637234 - RNA, 18 nt, Human
auauuuacuaaaauggac

SEQ ID NO: 1637235 - RNA, 14 nt, Human
auauuauuuuaugu

SEQ ID NO: 1637236 - RNA, 22 nt, Human
auaugcuucuguuuuauaauuu

SEQ ID NO: 1637237 - RNA, 20 nt, Human
auaugcuucuguuuuauaau

SEQ ID NO: 1637238 - RNA, 23 nt, Human
auaugcuauuucuauauuuucau

SEQ ID NO: 1637239 - RNA, 22 nt, Human
auaugcuauuucuauauuuuca

SEQ ID NO: 1637240 - RNA, 22 nt, Human
auauuaccacagacauacuaac

SEQ ID NO: 1637241 - RNA, 15 nt, Human
auaugcuauuucuau

SEQ ID NO: 1637242 - RNA, 21 nt, Human
auaugcuauuucuauauuuuc

SEQ ID NO: 1637243 - RNA, 19 nt, Human
auaugcuauuucuauauuu

SEQ ID NO: 1637244 - RNA, 18 nt, Human
auaugcuauuucuauauu

SEQ ID NO: 1637245 - RNA, 16 nt, Human
auaugcuauuucuaua

SEQ ID NO: 1637246 - RNA, 15 nt, Human
auaucaauuuaaaaa

SEQ ID NO: 1637247 - RNA, 19 nt, Human
auauauuuuuuucugaaau

SEQ ID NO: 1637248 - RNA, 16 nt, Human
auaucaaauauauuca

SEQ ID NO: 1637249 - RNA, 17 nt, Human
auaauuaacauguuaaa

SEQ ID NO: 1637250 - RNA, 15 nt, Human
auaauuaacauguua

SEQ ID NO: 1637251 - RNA, 23 nt, Human
auaauguuucaaacauauauaac

SEQ ID NO: 1637252 - RNA, 15 nt, Human
auaauguaagcucua

SEQ ID NO: 1637253 - RNA, 20 nt, Human
auacacacucaaaucaagaa

SEQ ID NO: 1637254 - RNA, 18 nt, Human
auacacacucaaaucaag

SEQ ID NO: 1637255 - RNA, 17 nt, Human
auacacacucaaaucaa

SEQ ID NO: 1637256 - RNA, 21 nt, Human
auacaccacuacauucuguua

SEQ ID NO: 1637257 - RNA, 19 nt, Human
auacaccacuacauucugu

SEQ ID NO: 1637258 - RNA, 20 nt, Human
auacaccacuacauucuguu

SEQ ID NO: 1637259 - RNA, 21 nt, Human
auaaugcgugcauaccacuuu

SEQ ID NO: 1637260 - RNA, 15 nt, Human
auaaggaaaaguuua

SEQ ID NO: 1637261 - RNA, 16 nt, Human
auaaggaaaaguuuaa

SEQ ID NO: 1637262 - RNA, 18 nt, Human
auaccugucccccugaca

SEQ ID NO: 1637263 - RNA, 11 nt, Human
auacccacccc

SEQ ID NO: 1637264 - RNA, 12 nt, Human
auacccaccccc

SEQ ID NO: 1637265 - RNA, 17 nt, Human
auaaaacuuuuuaaaau

SEQ ID NO: 1637266 - RNA, 21 nt, Human
auaaacuuuaccuuuuuuaua

SEQ ID NO: 1637267 - RNA, 24 nt, Human
auaaacuuuaccuuuuuuauacau

SEQ ID NO: 1637268 - RNA, 20 nt, Human
auaaacuuuuuucuuacugu

SEQ ID NO: 1637269 - RNA, 15 nt, Human
auaaaacuuuuuaaa

SEQ ID NO: 1637270 - RNA, 11 nt, Human
auaaaacuuuu

SEQ ID NO: 1637271 - RNA, 14 nt, Human
auaaagcagcguuu

SEQ ID NO: 1637272 - RNA, 18 nt, Human
auaaagcagcguuucuau

SEQ ID NO: 1637273 - RNA, 19 nt, Human
auaaagcagcguuucuaug

SEQ ID NO: 1637274 - RNA, 20 nt, Human
auaaagcagcguuucuauga

SEQ ID NO: 1637275 - RNA, 13 nt, Human
auaaagcagcguu

SEQ ID NO: 1637276 - RNA, 12 nt, Human
auaaagacaccu

SEQ ID NO: 1637277 - RNA, 18 nt, Human
auaaagcuguguggcagu

SEQ ID NO: 1637278 - RNA, 15 nt, Human
auaaagcaggcagaa

SEQ ID NO: 1637279 - RNA, 18 nt, Human
auaaaggauuaaugucaa

SEQ ID NO: 1637280 - RNA, 15 nt, Human
auaacauaaaucugu

SEQ ID NO: 1637281 - RNA, 14 nt, Human
auaacauaaaucug

SEQ ID NO: 1637282 - RNA, 19 nt, Human
auaacauaaaucugugaac

SEQ ID NO: 1637283 - RNA, 18 nt, Human
auaacauaaaucugugaa

SEQ ID NO: 1637284 - RNA, 17 nt, Human
auaacauaaaucuguga

SEQ ID NO: 1637285 - RNA, 16 nt, Human
aguaucuuuuuauuca

SEQ ID NO: 1637286 - RNA, 16 nt, Human
aguaugaauaaagaca

SEQ ID NO: 1637287 - RNA, 15 nt, Human
aguaugaggcauuug

SEQ ID NO: 1637288 - RNA, 16 nt, Human
aguaugaggcauuugu

SEQ ID NO: 1637289 - RNA, 17 nt, Human
aguaugaggcauuuguu

SEQ ID NO: 1637290 - RNA, 15 nt, Human
aguaucuugaagacu

SEQ ID NO: 1637291 - RNA, 12 nt, Human
aguaucuugaag

SEQ ID NO: 1637292 - RNA, 11 nt, Human
aguaucuugaa

SEQ ID NO: 1637293 - RNA, 19 nt, Human
agucaaauugugugaaagg

SEQ ID NO: 1637294 - RNA, 23 nt, Human
agucaaauugugugaaagguacu

SEQ ID NO: 1637295 - RNA, 14 nt, Human
aguaugguggcugg

SEQ ID NO: 1637296 - RNA, 20 nt, Human
aguaugggacuggccucugc

SEQ ID NO: 1637297 - RNA, 17 nt, Human
aguaugggacuggccuc

SEQ ID NO: 1637298 - RNA, 12 nt, Human
aguccuguaaug

SEQ ID NO: 1637299 - RNA, 15 nt, Human
agucugaaggcuggg

SEQ ID NO: 1637300 - RNA, 13 nt, Human
agucugaaggcug

SEQ ID NO: 1637301 - RNA, 16 nt, Human
agucugaaggcugggu

SEQ ID NO: 1637302 - RNA, 17 nt, Human
agucugaaggcuggguu

SEQ ID NO: 1637303 - RNA, 21 nt, Human
aguccuggcaugggaaugaau

SEQ ID NO: 1637304 - RNA, 20 nt, Human
aguccuggcaugggaaugaa

SEQ ID NO: 1637305 - RNA, 22 nt, Human
aguccuggcaugggaaugaaug

SEQ ID NO: 1637306 - RNA, 18 nt, Human
agucuggaaugcaguggu

SEQ ID NO: 1637307 - RNA, 17 nt, Human
agucuggaaugcagugg

SEQ ID NO: 1637308 - RNA, 18 nt, Human
agucugauucccaagcuc

SEQ ID NO: 1637309 - RNA, 16 nt, Human
agucugauucccaagc

SEQ ID NO: 1637310 - RNA, 20 nt, Human
agucugauucccaagcucug

SEQ ID NO: 1637311 - RNA, 14 nt, Human
agugaagacaauga

SEQ ID NO: 1637312 - RNA, 16 nt, Human
agugaagacaaugacu

SEQ ID NO: 1637313 - RNA, 18 nt, Human
agugaccauacuaauuau

SEQ ID NO: 1637314 - RNA, 22 nt, Human
aguugaaaaucuuauaauuuaa

SEQ ID NO: 1637315 - RNA, 19 nt, Human
aguucagguaacaggcaga

SEQ ID NO: 1637316 - RNA, 17 nt, Human
aguuacagacaaagcgu

SEQ ID NO: 1637317 - RNA, 20 nt, Human
aguucagguaacaggcagau

SEQ ID NO: 1637318 - RNA, 12 nt, Human
aguuaaauaaau

SEQ ID NO: 1637319 - RNA, 13 nt, Human
aguuaagccuuug

SEQ ID NO: 1637320 - RNA, 14 nt, Human
aguuaagccuuugg

SEQ ID NO: 1637321 - RNA, 16 nt, Human
aguuacagacaaagcg

SEQ ID NO: 1637322 - RNA, 14 nt, Human
aguuacagacaaag

SEQ ID NO: 1637323 - RNA, 22 nt, Human
aguugaaaagacuccaaagaaa

SEQ ID NO: 1637324 - RNA, 23 nt, Human
aguugaaaaucuuauaauuuaaa

SEQ ID NO: 1637325 - RNA, 14 nt, Human
aguugaagacagag

SEQ ID NO: 1637326 - RNA, 16 nt, Human
aguuguguuugaagca

SEQ ID NO: 1637327 - RNA, 20 nt, Human
aguuguuugauucagacagc

SEQ ID NO: 1637328 - RNA, 15 nt, Human
agugucuuaauuaaa

SEQ ID NO: 1637329 - RNA, 17 nt, Human
aguguauuuuuuuacua

SEQ ID NO: 1637330 - RNA, 18 nt, Human
aguguauuuuuuuacuaa

SEQ ID NO: 1637331 - RNA, 14 nt, Human
agugggagcugccu

SEQ ID NO: 1637332 - RNA, 15 nt, Human
agugggagcugccug

SEQ ID NO: 1637333 - RNA, 16 nt, Human
agugggagcugccugu

SEQ ID NO: 1637334 - RNA, 23 nt, Human
aguggcuuaaaacaacacucaca

SEQ ID NO: 1637335 - RNA, 21 nt, Human
aguggcuccucccggugccca

SEQ ID NO: 1637336 - RNA, 17 nt, Human
aguggcuccucccggug

SEQ ID NO: 1637337 - RNA, 13 nt, Human
aguggcuccuccc

SEQ ID NO: 1637338 - RNA, 18 nt, Human
agugucuuaauuaaaaga

SEQ ID NO: 1637339 - RNA, 17 nt, Human
agugucuuaauuaaaag

SEQ ID NO: 1637340 - RNA, 21 nt, Human
agugucuuaauuaaaagaaua

SEQ ID NO: 1637341 - RNA, 22 nt, Human
gcuuccucauaguaugguggcu

SEQ ID NO: 1637342 - RNA, 20 nt, Human
gcuuguaaauagcucaggug

SEQ ID NO: 1637343 - RNA, 14 nt, Human
gcuugagcucagga

SEQ ID NO: 1637344 - RNA, 12 nt, Human
gcuuguacauaa

SEQ ID NO: 1637345 - RNA, 17 nt, Human
gcuucacggaagagccu

SEQ ID NO: 1637346 - RNA, 21 nt, Human
gcuucaaggauccugagccag

SEQ ID NO: 1637347 - RNA, 20 nt, Human
gcuucaaggauccugagcca

SEQ ID NO: 1637348 - RNA, 19 nt, Human
gcuucaaggauccugagcc

SEQ ID NO: 1637349 - RNA, 12 nt, Human
gcuucagccucc

SEQ ID NO: 1637350 - RNA, 18 nt, Human
gcuucacggaagagccuu

SEQ ID NO: 1637351 - RNA, 19 nt, Human
gcuucacggaagagccuug

SEQ ID NO: 1637352 - RNA, 23 nt, Human
gcuggguggcaccagcagccugg

SEQ ID NO: 1637353 - RNA, 22 nt, Human
gcuggguggcaccagcagccug

SEQ ID NO: 1637354 - RNA, 21 nt, Human
gcuggguggcaccagcagccu

SEQ ID NO: 1637355 - RNA, 17 nt, Human
gcuggcuguuggcuggg

SEQ ID NO: 1637356 - RNA, 16 nt, Human
gcuggcuguuggcugg

SEQ ID NO: 1637357 - RNA, 15 nt, Human
gcuggcuguuggcug

SEQ ID NO: 1637358 - RNA, 12 nt, Human
gcugggcucccu

SEQ ID NO: 1637359 - RNA, 14 nt, Human
gcugggguuaucug

SEQ ID NO: 1637360 - RNA, 23 nt, Human
gcugggguuaucugaagucagau

SEQ ID NO: 1637361 - RNA, 22 nt, Human
gcugggguuaucugaagucaga

SEQ ID NO: 1637362 - RNA, 12 nt, Human
gcugggucgccc

SEQ ID NO: 1637363 - RNA, 23 nt, Human
gcugggccccugccucucugcag

SEQ ID NO: 1637364 - RNA, 22 nt, Human
gcugggccccugccucucugca

SEQ ID NO: 1637365 - RNA, 21 nt, Human
gcugggccccugccucucugc

SEQ ID NO: 1637366 - RNA, 20 nt, Human
gcuggccuggccccucaggg

SEQ ID NO: 1637367 - RNA, 22 nt, Human
gcuggagugcagugagccgaga

SEQ ID NO: 1637368 - RNA, 17 nt, Human
gcuggagugcagugagc

SEQ ID NO: 1637369 - RNA, 18 nt, Human
gcuggagugcagugagcc

SEQ ID NO: 1637370 - RNA, 13 nt, Human
gcugcuggcuggu

SEQ ID NO: 1637371 - RNA, 18 nt, Human
gcugcugaaggcucgagc

SEQ ID NO: 1637372 - RNA, 15 nt, Human
gcugcugaaggcucg

SEQ ID NO: 1637373 - RNA, 14 nt, Human
gcugcugaaggcuc

SEQ ID NO: 1637374 - RNA, 13 nt, Human
gcugcugaaggcu

SEQ ID NO: 1637375 - RNA, 23 nt, Human
gcucugguccauagagagcaaga

SEQ ID NO: 1637376 - RNA, 16 nt, Human
gcucugguccauagag

SEQ ID NO: 1637377 - RNA, 15 nt, Human
gcucugguccauaga

SEQ ID NO: 1637378 - RNA, 13 nt, Human
gcucugcccuugg

SEQ ID NO: 1637379 - RNA, 14 nt, Human
ggaacacucugaga

SEQ ID NO: 1637380 - RNA, 12 nt, Human
ggaacacucuga

SEQ ID NO: 1637381 - RNA, 16 nt, Human
ggaacacucugagacu

SEQ ID NO: 1637382 - RNA, 15 nt, Human
ggaacacucugagac

SEQ ID NO: 1637383 - RNA, 17 nt, Human
ggaacagacuggaagca

SEQ ID NO: 1637384 - RNA, 13 nt, Human
ggaagagaaaaaa

SEQ ID NO: 1637385 - RNA, 18 nt, Human
ggaagacuuuggaaagag

SEQ ID NO: 1637386 - RNA, 15 nt, Human
ggaagagaaaaaaua

SEQ ID NO: 1637387 - RNA, 14 nt, Human
ggaagacagcucuu

SEQ ID NO: 1637388 - RNA, 13 nt, Human
ggaagacagcucu

SEQ ID NO: 1637389 - RNA, 17 nt, Human
ggaagacuuuggaaaga

SEQ ID NO: 1637390 - RNA, 13 nt, Human
ggaagacuuugga

SEQ ID NO: 1637391 - RNA, 15 nt, Human
ggaagccgcuggggc

SEQ ID NO: 1637392 - RNA, 23 nt, Human
ggaagcucagggccuggcucagg

SEQ ID NO: 1637393 - RNA, 15 nt, Human
ggaagcucagggccu

SEQ ID NO: 1637394 - RNA, 11 nt, Human
ggaagcuccgc

SEQ ID NO: 1637395 - RNA, 16 nt, Human
ggaaggaaacccagcu

SEQ ID NO: 1637396 - RNA, 20 nt, Human
ggaaggaaacccagcucugg

SEQ ID NO: 1637397 - RNA, 19 nt, Human
ggaaggaaacccagcucug

SEQ ID NO: 1637398 - RNA, 20 nt, Human
ggacagcuccuucuguccua

SEQ ID NO: 1637399 - RNA, 19 nt, Human
ggacagcuccuucuguccu

SEQ ID NO: 1637400 - RNA, 22 nt, Human
ggacacuaaccacgcuggaccu

SEQ ID NO: 1637401 - RNA, 17 nt, Human
ggacacuaaccacgcug

SEQ ID NO: 1637402 - RNA, 18 nt, Human
ggacacagcucuucucca

SEQ ID NO: 1637403 - RNA, 15 nt, Human
ggacacagcucuucu

SEQ ID NO: 1637404 - RNA, 21 nt, Human
ggacacagcucuucuccaggc

SEQ ID NO: 1637405 - RNA, 19 nt, Human
ggacaaggacuaggguccu

SEQ ID NO: 1637406 - RNA, 18 nt, Human
ggaauaacauguaauuaa

SEQ ID NO: 1637407 - RNA, 16 nt, Human
ggaauccagacccggc

SEQ ID NO: 1637408 - RNA, 23 nt, Human
ggacaaggaugaucuaggaagac

SEQ ID NO: 1637409 - RNA, 22 nt, Human
ggacaaggaugaucuaggaaga

SEQ ID NO: 1637410 - RNA, 13 nt, Human
ggacaagagcagg

SEQ ID NO: 1637411 - RNA, 19 nt, Human
ggaaugaagauacugaaau

SEQ ID NO: 1637412 - RNA, 18 nt, Human
ggaaugaagcaaugcuuc

SEQ ID NO: 1637413 - RNA, 23 nt, Human
ggacaggcauguucucugaggac

SEQ ID NO: 1637414 - RNA, 22 nt, Human
ggacucauuuuaaaaaauggaa

SEQ ID NO: 1637415 - RNA, 18 nt, Human
ggacucaaugcacugaca

SEQ ID NO: 1637416 - RNA, 16 nt, Human
ggacucaaugcacuga

SEQ ID NO: 1637417 - RNA, 20 nt, Human
ggacuaacuugucuuuggac

SEQ ID NO: 1637418 - RNA, 14 nt, Human
ggacuacaggugug

SEQ ID NO: 1637419 - RNA, 24 nt, Human
ggacuaacuugucuuuggacccug

SEQ ID NO: 1637420 - RNA, 15 nt, Human
ggacucaaugcacug

SEQ ID NO: 1637421 - RNA, 13 nt, Human
ggagaaacuggaa

SEQ ID NO: 1637422 - RNA, 16 nt, Human
ggagaaaggaagggcu

SEQ ID NO: 1637423 - RNA, 9 nt, Human
ggacuuugu

SEQ ID NO: 1637424 - RNA, 18 nt, Human
ggagaaaugaaaaaauau

SEQ ID NO: 1637425 - RNA, 14 nt, Human
ggacuuggaagcuc

SEQ ID NO: 1637426 - RNA, 15 nt, Human
ggacuuguuagaucu

SEQ ID NO: 1637427 - RNA, 21 nt, Human
ggacuucuuuaauuuuggaau

SEQ ID NO: 1637428 - RNA, 22 nt, Human
ggacuucuuuaauuuuggaauu

SEQ ID NO: 1637429 - RNA, 12 nt, Human
ggacccccugaa

SEQ ID NO: 1637430 - RNA, 11 nt, Human
ggacccugagg

SEQ ID NO: 1637431 - RNA, 20 nt, Human
ggacguguuaugacuccaga

SEQ ID NO: 1637432 - RNA, 15 nt, Human
ggaccucaggccugg

SEQ ID NO: 1637433 - RNA, 14 nt, Human
ggaccucaggccug

SEQ ID NO: 1637434 - RNA, 20 nt, Human
ggaccucaggccugggggcu

SEQ ID NO: 1637435 - RNA, 13 nt, Human
ggaccucaggccu

SEQ ID NO: 1637436 - RNA, 13 nt, Human
ggacccugaggcc

SEQ ID NO: 1637437 - RNA, 12 nt, Human
ggacccugaggc

SEQ ID NO: 1637438 - RNA, 12 nt, Human
gcccccacuggu

SEQ ID NO: 1637439 - RNA, 16 nt, Human
gccccugccacccugg

SEQ ID NO: 1637440 - RNA, 17 nt, Human
gccccugccacccuggg

SEQ ID NO: 1637441 - RNA, 15 nt, Human
gcccucacccugggg

SEQ ID NO: 1637442 - RNA, 23 nt, Human
gcccuaaugcgcaggcuggcccu

SEQ ID NO: 1637443 - RNA, 20 nt, Human
gcccuaaugcgcaggcuggc

SEQ ID NO: 1637444 - RNA, 19 nt, Human
gcccuaaugcgcaggcugg

SEQ ID NO: 1637445 - RNA, 17 nt, Human
gcccuaaugcgcaggcu

SEQ ID NO: 1637446 - RNA, 16 nt, Human
gcccuaaugcgcaggc

SEQ ID NO: 1637447 - RNA, 23 nt, Human
gcccgggcucugccucccaucac

SEQ ID NO: 1637448 - RNA, 23 nt, Human
gccccugccucucugcagguccc

SEQ ID NO: 1637449 - RNA, 20 nt, Human
gccccugccucucugcaggu

SEQ ID NO: 1637450 - RNA, 20 nt, Human
gccuaggugacagagugaga

SEQ ID NO: 1637451 - RNA, 15 nt, Human
gccuaggugacagag

SEQ ID NO: 1637452 - RNA, 14 nt, Human
gccuaggugacaga

SEQ ID NO: 1637453 - RNA, 13 nt, Human
gccuaggugacag

SEQ ID NO: 1637454 - RNA, 20 nt, Human
gccuagcauacguacacauu

SEQ ID NO: 1637455 - RNA, 21 nt, Human
gccuagcauacguacacauuu

SEQ ID NO: 1637456 - RNA, 22 nt, Human
gccuagcauacguacacauuuu

SEQ ID NO: 1637457 - RNA, 23 nt, Human
gccuagcauacguacacauuuua

SEQ ID NO: 1637458 - RNA, 18 nt, Human
gcccugcagagggcacag

SEQ ID NO: 1637459 - RNA, 22 nt, Human
gcccugcccaccuggccucugc

SEQ ID NO: 1637460 - RNA, 21 nt, Human
gcccugcccaccuggccucug

SEQ ID NO: 1637461 - RNA, 20 nt, Human
gcccugcccaccuggccucu

SEQ ID NO: 1637462 - RNA, 17 nt, Human
gcccugcccaccuggcc

SEQ ID NO: 1637463 - RNA, 11 nt, Human
gcccugccucc

SEQ ID NO: 1637464 - RNA, 16 nt, Human
gcccugcccugguuuc

SEQ ID NO: 1637465 - RNA, 12 nt, Human
gcccugcccugg

SEQ ID NO: 1637466 - RNA, 11 nt, Human
gcccugcccug

SEQ ID NO: 1637467 - RNA, 13 nt, Human
gcccugccuccuu

SEQ ID NO: 1637468 - RNA, 12 nt, Human
gcccugccuccu

SEQ ID NO: 1637469 - RNA, 14 nt, Human
gcccugccuccuuu

SEQ ID NO: 1637470 - RNA, 18 nt, Human
gcccugcccugguuuccu

SEQ ID NO: 1637471 - RNA, 20 nt, Human
gcccuuagcagggaaacagc

SEQ ID NO: 1637472 - RNA, 22 nt, Human
gcccuguccugccuaaggcuga

SEQ ID NO: 1637473 - RNA, 20 nt, Human
gccgcagcccugcagagggc

SEQ ID NO: 1637474 - RNA, 22 nt, Human
gcccuuagcagggaaacagcua

SEQ ID NO: 1637475 - RNA, 17 nt, Human
gccugcccaggccccug

SEQ ID NO: 1637476 - RNA, 15 nt, Human
gccugcccaggcccc

SEQ ID NO: 1637477 - RNA, 22 nt, Human
gccugcccaggccccugccacc

SEQ ID NO: 1637478 - RNA, 12 nt, Human
gccuccauccug

SEQ ID NO: 1637479 - RNA, 17 nt, Human
gccucccaaagugcugg

SEQ ID NO: 1637480 - RNA, 16 nt, Human
gccucccaaagugcug

SEQ ID NO: 1637481 - RNA, 23 nt, Human
gccuccugugugugcgccuacag

SEQ ID NO: 1637482 - RNA, 19 nt, Human
gccuccugugugugcgccu

SEQ ID NO: 1637483 - RNA, 17 nt, Human
gccucgaacuggcugca

SEQ ID NO: 1637484 - RNA, 15 nt, Human
gccucuuagaugcag

SEQ ID NO: 1637485 - RNA, 16 nt, Human
gccucuuaugggcugg

SEQ ID NO: 1637486 - RNA, 18 nt, Human
gccucuuaugggcugggu

SEQ ID NO: 1637487 - RNA, 17 nt, Human
gccucuuaugggcuggg

SEQ ID NO: 1637488 - RNA, 22 nt, Human
gccucgaacuggcugcaaaggg

SEQ ID NO: 1637489 - RNA, 20 nt, Human
gccucgaacuggcugcaaag

SEQ ID NO: 1637490 - RNA, 14 nt, Human
gccugcccaggccc

SEQ ID NO: 1637491 - RNA, 13 nt, Human
gccugcccaggcc

SEQ ID NO: 1637492 - RNA, 21 nt, Human
gccucuuaugggcuggguucu

SEQ ID NO: 1637493 - RNA, 14 nt, Human
gccucuuggguuca

SEQ ID NO: 1637494 - RNA, 13 nt, Human
gccuggccugagc

SEQ ID NO: 1637495 - RNA, 18 nt, Human
gccuggccugagcuggga

SEQ ID NO: 1637496 - RNA, 14 nt, Human
gccuggccugagcu

SEQ ID NO: 1637497 - RNA, 20 nt, Human
gccuggccugagcugggaug

SEQ ID NO: 1637498 - RNA, 20 nt, Human
gccuguugggccaggagccu

SEQ ID NO: 1637499 - RNA, 18 nt, Human
gccuguugggccaggagc

SEQ ID NO: 1637500 - RNA, 16 nt, Human
gccuguugggccagga

SEQ ID NO: 1637501 - RNA, 15 nt, Human
gccuguugggccagg

SEQ ID NO: 1637502 - RNA, 14 nt, Human
gccuguugggccag

SEQ ID NO: 1637503 - RNA, 23 nt, Human
gccuguucccauucuugcauggc

SEQ ID NO: 1637504 - RNA, 19 nt, Human
gccuguucccauucuugca

SEQ ID NO: 1637505 - RNA, 17 nt, Human
gccugugccucugggac

SEQ ID NO: 1637506 - RNA, 16 nt, Human
gccugugccucuggga

SEQ ID NO: 1637507 - RNA, 13 nt, Human
gccuggcucaggu

SEQ ID NO: 1637508 - RNA, 18 nt, Human
gccugugccucugggacu

SEQ ID NO: 1637509 - RNA, 20 nt, Human
gccuucggccuccauccuga

SEQ ID NO: 1637510 - RNA, 21 nt, Human
gccuguugggccaggagccuc

SEQ ID NO: 1637511 - RNA, 23 nt, Human
gccuucggccuccauccugaggc

SEQ ID NO: 1637512 - RNA, 21 nt, Human
gccuucggccuccauccugag

SEQ ID NO: 1637513 - RNA, 21 nt, Human
gccuugaccauucuccaccug

SEQ ID NO: 1637514 - RNA, 20 nt, Human
gccuugaccauucuccaccu

SEQ ID NO: 1637515 - RNA, 19 nt, Human
gccuugaccauucuccacc

SEQ ID NO: 1637516 - RNA, 17 nt, Human
gccuugaccauucucca

SEQ ID NO: 1637517 - RNA, 17 nt, Human
gcgagcccugguggcag

SEQ ID NO: 1637518 - RNA, 20 nt, Human
gcgcagcauauucaggaagc

SEQ ID NO: 1637519 - RNA, 22 nt, Human
gcgaucuggguucacugcaacc

SEQ ID NO: 1637520 - RNA, 11 nt, Human
gcucugcccuu

SEQ ID NO: 1637521 - RNA, 17 nt, Human
gcucugaucauccacug

SEQ ID NO: 1637522 - RNA, 23 nt, Human
gcucugcaagaauugaagcagga

SEQ ID NO: 1637523 - RNA, 15 nt, Human
gcuccacuuggucug

SEQ ID NO: 1637524 - RNA, 21 nt, Human
gcuccccucggagaagagcug

SEQ ID NO: 1637525 - RNA, 18 nt, Human
gcuccugccaccacgccc

SEQ ID NO: 1637526 - RNA, 12 nt, Human
gcuccugccacc

SEQ ID NO: 1637527 - RNA, 19 nt, Human
gcuccuggcccacugcauc

SEQ ID NO: 1637528 - RNA, 18 nt, Human
gcuccuggcccacugcau

SEQ ID NO: 1637529 - RNA, 20 nt, Human
gcuccuggcccacugcaucg

SEQ ID NO: 1637530 - RNA, 15 nt, Human
gcuccuggcccacug

SEQ ID NO: 1637531 - RNA, 14 nt, Human
gcuccuggcccacu

SEQ ID NO: 1637532 - RNA, 21 nt, Human
gcuccugccaccacgcccggc

SEQ ID NO: 1637533 - RNA, 19 nt, Human
gcuccacuuggucugugag

SEQ ID NO: 1637534 - RNA, 18 nt, Human
gcuccacuuggucuguga

SEQ ID NO: 1637535 - RNA, 18 nt, Human
gcuccagcucaccagccc

SEQ ID NO: 1637536 - RNA, 21 nt, Human
gcuccagcucaccagccccag

SEQ ID NO: 1637537 - RNA, 20 nt, Human
gcuccagcucaccagcccca

SEQ ID NO: 1637538 - RNA, 21 nt, Human
gcucccacaggcccuuccucu

SEQ ID NO: 1637539 - RNA, 20 nt, Human
gcucccacaggcccuuccuc

SEQ ID NO: 1637540 - RNA, 17 nt, Human
gcucccacaggcccuuc

SEQ ID NO: 1637541 - RNA, 16 nt, Human
gcucccacaggcccuu

SEQ ID NO: 1637542 - RNA, 17 nt, Human
gcucccaggcauucccc

SEQ ID NO: 1637543 - RNA, 22 nt, Human
gcucccacaggcccuuccucuc

SEQ ID NO: 1637544 - RNA, 16 nt, Human
gcuaggccuggccaga

SEQ ID NO: 1637545 - RNA, 23 nt, Human
gcuaggccuggccagaugcacca

SEQ ID NO: 1637546 - RNA, 17 nt, Human
gcuaggccuggccagau

SEQ ID NO: 1637547 - RNA, 22 nt, Human
gcuagugugguguuuccuggca

SEQ ID NO: 1637548 - RNA, 21 nt, Human
gcuagugugguguuuccuggc

SEQ ID NO: 1637549 - RNA, 12 nt, Human
gcuaugcauuug

SEQ ID NO: 1637550 - RNA, 19 nt, Human
gcuauucaguaauaacucu

SEQ ID NO: 1637551 - RNA, 13 nt, Human
gcuaugcauuuga

SEQ ID NO: 1637552 - RNA, 17 nt, Human
gcucaggugucccugca

SEQ ID NO: 1637553 - RNA, 16 nt, Human
gcucaggugucccugc

SEQ ID NO: 1637554 - RNA, 14 nt, Human
gcucaggugucccu

SEQ ID NO: 1637555 - RNA, 23 nt, Human
gcucagguggggucacucuggca

SEQ ID NO: 1637556 - RNA, 13 nt, Human
gcucagagagggu

SEQ ID NO: 1637557 - RNA, 20 nt, Human
gcucacugcauccuccgccu

SEQ ID NO: 1637558 - RNA, 14 nt, Human
gcucagagagggug

SEQ ID NO: 1637559 - RNA, 20 nt, Human
gcuauucaguaauaacucua

SEQ ID NO: 1637560 - RNA, 14 nt, Human
gcucacugcagccu

SEQ ID NO: 1637561 - RNA, 13 nt, Human
gcucacugcagcc

SEQ ID NO: 1637562 - RNA, 12 nt, Human
gcucacugcagc

SEQ ID NO: 1637563 - RNA, 11 nt, Human
gcucacugcag

SEQ ID NO: 1637564 - RNA, 16 nt, Human
gcucacugcagccuca

SEQ ID NO: 1637565 - RNA, 15 nt, Human
gcucacugcagccuc

SEQ ID NO: 1637566 - RNA, 17 nt, Human
gcucacugcagccucaa

SEQ ID NO: 1637567 - RNA, 16 nt, Human
gcucacugcauccucc

SEQ ID NO: 1637568 - RNA, 15 nt, Human
gcuagaacucccuuu

SEQ ID NO: 1637569 - RNA, 14 nt, Human
gcuagaacucccuu

SEQ ID NO: 1637570 - RNA, 13 nt, Human
gcuagaacucccu

SEQ ID NO: 1637571 - RNA, 12 nt, Human
gcuagaacuccc

SEQ ID NO: 1637572 - RNA, 18 nt, Human
gcuagaacucccuuucaa

SEQ ID NO: 1637573 - RNA, 16 nt, Human
gcuagaacucccuuuc

SEQ ID NO: 1637574 - RNA, 20 nt, Human
gcgugcacacaccagagccc

SEQ ID NO: 1637575 - RNA, 22 nt, Human
gcgggaggauguucugggacac

SEQ ID NO: 1637576 - RNA, 21 nt, Human
gcgggaggauguucugggaca

SEQ ID NO: 1637577 - RNA, 23 nt, Human
gcgugcacacaccagagcccacc

SEQ ID NO: 1637578 - RNA, 18 nt, Human
gcguuucuaugacacaug

SEQ ID NO: 1637579 - RNA, 13 nt, Human
gcuaaugggacac

SEQ ID NO: 1637580 - RNA, 15 nt, Human
gcuaaugggacacua

SEQ ID NO: 1637581 - RNA, 23 nt, Human
gcuaagugauccucccaccucag

SEQ ID NO: 1637582 - RNA, 14 nt, Human
gcuaaucagcauuc

SEQ ID NO: 1637583 - RNA, 22 nt, Human
gcuaaucagcauucucacuccu

SEQ ID NO: 1637584 - RNA, 17 nt, Human
gcuaaucagcauucuca

SEQ ID NO: 1637585 - RNA, 16 nt, Human
gcuaaucagcauucuc

SEQ ID NO: 1637586 - RNA, 20 nt, Human
ggcaguggugguuuucuguu

SEQ ID NO: 1637587 - RNA, 21 nt, Human
ggcaguggugguuuucuguuc

SEQ ID NO: 1637588 - RNA, 22 nt, Human
ggcagccccuguucuggcagag

SEQ ID NO: 1637589 - RNA, 16 nt, Human
ggagagaagagaaugc

SEQ ID NO: 1637590 - RNA, 22 nt, Human
ggagacugcugagucaacccaa

SEQ ID NO: 1637591 - RNA, 21 nt, Human
ggcacaguuuucugagaaaga

SEQ ID NO: 1637592 - RNA, 23 nt, Human
ggcacagaaaauggaagacagcu

SEQ ID NO: 1637593 - RNA, 23 nt, Human
ggcacucagaagacacugauggg

SEQ ID NO: 1637594 - RNA, 13 nt, Human
ggcacaucagcac

SEQ ID NO: 1637595 - RNA, 19 nt, Human
ggcacagaaaauggaagac

SEQ ID NO: 1637596 - RNA, 21 nt, Human
ggcacagaaaauggaagacag

SEQ ID NO: 1637597 - RNA, 20 nt, Human
ggcacagaaaauggaagaca

SEQ ID NO: 1637598 - RNA, 11 nt, Human
ggcagccccug

SEQ ID NO: 1637599 - RNA, 15 nt, Human
ggcacugguggcccg

SEQ ID NO: 1637600 - RNA, 16 nt, Human
ggccuccauccugagg

SEQ ID NO: 1637601 - RNA, 15 nt, Human
ggccuccauccugag

SEQ ID NO: 1637602 - RNA, 14 nt, Human
ggccuccauccuga

SEQ ID NO: 1637603 - RNA, 23 nt, Human
ggcccuucucuccagccccugga

SEQ ID NO: 1637604 - RNA, 22 nt, Human
ggcccuucucuccagccccugg

SEQ ID NO: 1637605 - RNA, 19 nt, Human
ggccucacuaggcuucugg

SEQ ID NO: 1637606 - RNA, 23 nt, Human
ggccccugcugguucaggguugg

SEQ ID NO: 1637607 - RNA, 13 nt, Human
ggcccggcuccag

SEQ ID NO: 1637608 - RNA, 14 nt, Human
ggccccugcugguu

SEQ ID NO: 1637609 - RNA, 13 nt, Human
ggccccugcuggu

SEQ ID NO: 1637610 - RNA, 21 nt, Human
ggcccuucucuccagccccug

SEQ ID NO: 1637611 - RNA, 20 nt, Human
ggcccuucucuccagccccu

SEQ ID NO: 1637612 - RNA, 15 nt, Human
ggcccggcuccaggc

SEQ ID NO: 1637613 - RNA, 17 nt, Human
ggccaguuggucccccu

SEQ ID NO: 1637614 - RNA, 14 nt, Human
ggccaguugguccc

SEQ ID NO: 1637615 - RNA, 20 nt, Human
ggccagugugacaaggauug

SEQ ID NO: 1637616 - RNA, 17 nt, Human
ggcauaacauaaaucug

SEQ ID NO: 1637617 - RNA, 16 nt, Human
ggcauaacauaaaucu

SEQ ID NO: 1637618 - RNA, 18 nt, Human
ggcugggagagccuucca

SEQ ID NO: 1637619 - RNA, 16 nt, Human
ggcugggagagccuuc

SEQ ID NO: 1637620 - RNA, 15 nt, Human
ggcugggagagccuu

SEQ ID NO: 1637621 - RNA, 14 nt, Human
ggcugggagagccu

SEQ ID NO: 1637622 - RNA, 13 nt, Human
ggcugcugaaggc

SEQ ID NO: 1637623 - RNA, 11 nt, Human
ggcucucaggc

SEQ ID NO: 1637624 - RNA, 13 nt, Human
ggcucucaggcca

SEQ ID NO: 1637625 - RNA, 14 nt, Human
ggcucucaggccag

SEQ ID NO: 1637626 - RNA, 12 nt, Human
ggcucuuccagg

SEQ ID NO: 1637627 - RNA, 14 nt, Human
ggcucuuccaggcu

SEQ ID NO: 1637628 - RNA, 13 nt, Human
ggcucuucuccuu

SEQ ID NO: 1637629 - RNA, 12 nt, Human
ggcucuucuccu

SEQ ID NO: 1637630 - RNA, 20 nt, Human
ggcugccaaugggagcucau

SEQ ID NO: 1637631 - RNA, 19 nt, Human
ggcugccaaugggagcuca

SEQ ID NO: 1637632 - RNA, 16 nt, Human
ggcucuucuccuuuca

SEQ ID NO: 1637633 - RNA, 22 nt, Human
ggcugacagacagcccuccauc

SEQ ID NO: 1637634 - RNA, 23 nt, Human
ggcucuucuccuuucacaaccuu

SEQ ID NO: 1637635 - RNA, 15 nt, Human
ggcucuucuccuuuc

SEQ ID NO: 1637636 - RNA, 14 nt, Human
ggcucuucuccuuu

SEQ ID NO: 1637637 - RNA, 21 nt, Human
ggcugccaaugggagcucaug

SEQ ID NO: 1637638 - RNA, 13 nt, Human
ggcugcccuggug

SEQ ID NO: 1637639 - RNA, 19 nt, Human
ggcugcccuggugcugcca

SEQ ID NO: 1637640 - RNA, 16 nt, Human
ggcugcccuggugcug

SEQ ID NO: 1637641 - RNA, 15 nt, Human
ggcugcccuggugcu

SEQ ID NO: 1637642 - RNA, 14 nt, Human
ggcugcccuggugc

SEQ ID NO: 1637643 - RNA, 22 nt, Human
ggcugcggaaugaaccacaucu

SEQ ID NO: 1637644 - RNA, 16 nt, Human
ggcugccuuagaaccu

SEQ ID NO: 1637645 - RNA, 22 nt, Human
ggcugcccuggugcugccacac

SEQ ID NO: 1637646 - RNA, 14 nt, Human
ggcuccacuugguc

SEQ ID NO: 1637647 - RNA, 18 nt, Human
ggcucagcggggacagcu

SEQ ID NO: 1637648 - RNA, 19 nt, Human
ggcucagcaaaagaugcuu

SEQ ID NO: 1637649 - RNA, 20 nt, Human
ggcucagguggggucacucu

SEQ ID NO: 1637650 - RNA, 19 nt, Human
ggcucagguggggucacuc

SEQ ID NO: 1637651 - RNA, 20 nt, Human
ggcucagcggggacagcucc

SEQ ID NO: 1637652 - RNA, 19 nt, Human
ggcucagcggggacagcuc

SEQ ID NO: 1637653 - RNA, 15 nt, Human
aaaacuucagacaua

SEQ ID NO: 1637654 - RNA, 22 nt, Human
aaaacuugauguguuaucucuu

SEQ ID NO: 1637655 - RNA, 18 nt, Human
aaaacucuccucugcugc

SEQ ID NO: 1637656 - RNA, 17 nt, Human
aaaaaugguuuaaaugg

SEQ ID NO: 1637657 - RNA, 19 nt, Human
gggacauuugcucauggaa

SEQ ID NO: 1637658 - RNA, 20 nt, Human
gggaccagagcugccaccug

SEQ ID NO: 1637659 - RNA, 14 nt, Human
gggaccagagcugc

SEQ ID NO: 1637660 - RNA, 12 nt, Human
aaaacccaagug

SEQ ID NO: 1637661 - RNA, 17 nt, Human
aaaaccaguauuguaca

SEQ ID NO: 1637662 - RNA, 13 nt, Human
aaaacaugcuaca

SEQ ID NO: 1637663 - RNA, 14 nt, Human
aaaacaugcuacac

SEQ ID NO: 1637664 - RNA, 19 nt, Human
gggagagccuuccaggggu

SEQ ID NO: 1637665 - RNA, 15 nt, Human
gggagagccuuccag

SEQ ID NO: 1637666 - RNA, 23 nt, Human
gggagcaggcucgggcuccccag

SEQ ID NO: 1637667 - RNA, 16 nt, Human
gggagggagggcucca

SEQ ID NO: 1637668 - RNA, 15 nt, Human
gggagggagggcucc

SEQ ID NO: 1637669 - RNA, 18 nt, Human
gggaggucaaggcugcag

SEQ ID NO: 1637670 - RNA, 15 nt, Human
gggaggucgaggcag

SEQ ID NO: 1637671 - RNA, 23 nt, Human
gggacuuggaagcuccgcuuucu

SEQ ID NO: 1637672 - RNA, 18 nt, Human
gggacuuggaagcuccgc

SEQ ID NO: 1637673 - RNA, 17 nt, Human
gggacuuggaagcuccg

SEQ ID NO: 1637674 - RNA, 15 nt, Human
gggacuuggaagcuc

SEQ ID NO: 1637675 - RNA, 21 nt, Human
gggagaaccaaaaagaggcua

SEQ ID NO: 1637676 - RNA, 14 nt, Human
aaaaauaacaauga

SEQ ID NO: 1637677 - RNA, 19 nt, Human
ggcugggggccucagugcc

SEQ ID NO: 1637678 - RNA, 17 nt, Human
ggcugggggccucagug

SEQ ID NO: 1637679 - RNA, 16 nt, Human
ggcugggggccucagu

SEQ ID NO: 1637680 - RNA, 15 nt, Human
ggcugggggccucag

SEQ ID NO: 1637681 - RNA, 21 nt, Human
ggcuggguucuacccaggugc

SEQ ID NO: 1637682 - RNA, 19 nt, Human
ggcuggguucuacccaggu

SEQ ID NO: 1637683 - RNA, 19 nt, Human
ggcuggguggcaccagcag

SEQ ID NO: 1637684 - RNA, 20 nt, Human
ggcugggucgcccuggacug

SEQ ID NO: 1637685 - RNA, 17 nt, Human
ggcugggucgcccugga

SEQ ID NO: 1637686 - RNA, 14 nt, Human
ggcugggucgcccu

SEQ ID NO: 1637687 - RNA, 16 nt, Human
ggcuuccucauaguau

SEQ ID NO: 1637688 - RNA, 21 nt, Human
ggcuucccgcucagcccuccc

SEQ ID NO: 1637689 - RNA, 19 nt, Human
ggcuucccgcucagcccuc

SEQ ID NO: 1637690 - RNA, 18 nt, Human
ggcuucccgcucagcccu

SEQ ID NO: 1637691 - RNA, 17 nt, Human
ggcuucccgcucagccc

SEQ ID NO: 1637692 - RNA, 16 nt, Human
ggcuucccgcucagcc

SEQ ID NO: 1637693 - RNA, 15 nt, Human
ggcuucccgcucagc

SEQ ID NO: 1637694 - RNA, 18 nt, Human
ggcuucauccuccucaga

SEQ ID NO: 1637695 - RNA, 22 nt, Human
ggcuucauccuccucagaucuu

SEQ ID NO: 1637696 - RNA, 14 nt, Human
ggcuucccgcucag

SEQ ID NO: 1637697 - RNA, 20 nt, Human
ggcuucaguggcagcugcuu

SEQ ID NO: 1637698 - RNA, 19 nt, Human
ggcuucaguggcagcugcu

SEQ ID NO: 1637699 - RNA, 18 nt, Human
ggcuucaguggcagcugc

SEQ ID NO: 1637700 - RNA, 22 nt, Human
ggcuggguucuacccaggugcu

SEQ ID NO: 1637701 - RNA, 18 nt, Human
ggcuguaucccaugagcc

SEQ ID NO: 1637702 - RNA, 15 nt, Human
ggcuguacccaggaa

SEQ ID NO: 1637703 - RNA, 20 nt, Human
gggaacccaaguccaagcau

SEQ ID NO: 1637704 - RNA, 13 nt, Human
gggaaccugaccc

SEQ ID NO: 1637705 - RNA, 18 nt, Human
gggaagaagcucucuccu

SEQ ID NO: 1637706 - RNA, 21 nt, Human
ggcuuccuccugguguggaag

SEQ ID NO: 1637707 - RNA, 22 nt, Human
ggcuucccgcucagcccucccu

SEQ ID NO: 1637708 - RNA, 22 nt, Human
gggacagucaccucauggaauu

SEQ ID NO: 1637709 - RNA, 21 nt, Human
gggacagucaccucauggaau

SEQ ID NO: 1637710 - RNA, 20 nt, Human
gggacagucaccucauggaa

SEQ ID NO: 1637711 - RNA, 16 nt, Human
gggacagcuccuucug

SEQ ID NO: 1637712 - RNA, 15 nt, Human
gggacagcuccuucu

SEQ ID NO: 1637713 - RNA, 13 nt, Human
gggacagcuccuu

SEQ ID NO: 1637714 - RNA, 12 nt, Human
gggacagcuccu

SEQ ID NO: 1637715 - RNA, 13 nt, Human
gggacagagcaga

SEQ ID NO: 1637716 - RNA, 13 nt, Human
gggaagagacuug

SEQ ID NO: 1637717 - RNA, 20 nt, Human
ggucgcccuggacugugugc

SEQ ID NO: 1637718 - RNA, 13 nt, Human
ggugaacagaaca

SEQ ID NO: 1637719 - RNA, 13 nt, Human
ggucgaggcagga

SEQ ID NO: 1637720 - RNA, 14 nt, Human
ggucgcccuggacu

SEQ ID NO: 1637721 - RNA, 16 nt, Human
ggugcaaugaccuuuc

SEQ ID NO: 1637722 - RNA, 13 nt, Human
ggugcaaugaccu

SEQ ID NO: 1637723 - RNA, 12 nt, Human
ggugcaaugacc

SEQ ID NO: 1637724 - RNA, 24 nt, Human
ggugauccacccaccucagccucc

SEQ ID NO: 1637725 - RNA, 23 nt, Human
ggugauccacccaccucagccuc

SEQ ID NO: 1637726 - RNA, 18 nt, Human
ggugauccacccaccuca

SEQ ID NO: 1637727 - RNA, 21 nt, Human
ggugcauuugaggucuguucu

SEQ ID NO: 1637728 - RNA, 21 nt, Human
ggugcauauuuauaaaaauaa

SEQ ID NO: 1637729 - RNA, 16 nt, Human
ggugcugggccccugc

SEQ ID NO: 1637730 - RNA, 15 nt, Human
ggugcugggccccug

SEQ ID NO: 1637731 - RNA, 13 nt, Human
ggugcugggcccc

SEQ ID NO: 1637732 - RNA, 11 nt, Human
ggugcugggcc

SEQ ID NO: 1637733 - RNA, 13 nt, Human
gguggaugccugg

SEQ ID NO: 1637734 - RNA, 19 nt, Human
ggugcugggccccugccuc

SEQ ID NO: 1637735 - RNA, 14 nt, Human
aaagguacuucaaa

SEQ ID NO: 1637736 - RNA, 14 nt, Human
aaagguaaaucaga

SEQ ID NO: 1637737 - RNA, 20 nt, Human
aaagggauggcaagaugugg

SEQ ID NO: 1637738 - RNA, 22 nt, Human
aaagggacuuggaagcuccgcu

SEQ ID NO: 1637739 - RNA, 22 nt, Human
aaaggaaagagggagguaagga

SEQ ID NO: 1637740 - RNA, 21 nt, Human
aaaggagagcuagcagcaggg

SEQ ID NO: 1637741 - RNA, 17 nt, Human
aaaggagauuggaagga

SEQ ID NO: 1637742 - RNA, 21 nt, Human
aaagcacugacuucuaaguaa

SEQ ID NO: 1637743 - RNA, 17 nt, Human
aaagcacugacuucuaa

SEQ ID NO: 1637744 - RNA, 15 nt, Human
aaagcucacuuuacu

SEQ ID NO: 1637745 - RNA, 15 nt, Human
aaagcugaaaacugc

SEQ ID NO: 1637746 - RNA, 15 nt, Human
aaagcuuguuaagau

SEQ ID NO: 1637747 - RNA, 13 nt, Human
aaagcugcugaca

SEQ ID NO: 1637748 - RNA, 12 nt, Human
aaagcugaaaac

SEQ ID NO: 1637749 - RNA, 19 nt, Human
aaagacuauucaaacaguc

SEQ ID NO: 1637750 - RNA, 18 nt, Human
aaagacuauucaaacagu

SEQ ID NO: 1637751 - RNA, 21 nt, Human
aaagacuccaaagaaauguaa

SEQ ID NO: 1637752 - RNA, 15 nt, Human
aaagacuccaaagaa

SEQ ID NO: 1637753 - RNA, 21 nt, Human
aaagacuauucaaacagucuc

SEQ ID NO: 1637754 - RNA, 13 nt, Human
aaagacagugaaa

SEQ ID NO: 1637755 - RNA, 12 nt, Human
aaacuuuucuga

SEQ ID NO: 1637756 - RNA, 11 nt, Human
aaacuuuucug

SEQ ID NO: 1637757 - RNA, 23 nt, Human
aaacuucagcgguuuauauaagc

SEQ ID NO: 1637758 - RNA, 15 nt, Human
ggguggggggggugc

SEQ ID NO: 1637759 - RNA, 14 nt, Human
ggguggccucccaa

SEQ ID NO: 1637760 - RNA, 16 nt, Human
aaacuuguauuaugug

SEQ ID NO: 1637761 - RNA, 15 nt, Human
aaacuuguguaaaua

SEQ ID NO: 1637762 - RNA, 15 nt, Human
aaagaggcagcuuga

SEQ ID NO: 1637763 - RNA, 15 nt, Human
aaagaggaaugaagu

SEQ ID NO: 1637764 - RNA, 14 nt, Human
aaagaugcuucuca

SEQ ID NO: 1637765 - RNA, 17 nt, Human
aaagaugcuucucacug

SEQ ID NO: 1637766 - RNA, 19 nt, Human
aaagaugcuucucacugcc

SEQ ID NO: 1637767 - RNA, 13 nt, Human
aaagacuguacaa

SEQ ID NO: 1637768 - RNA, 23 nt, Human
aaagacugaguacguugugcauu

SEQ ID NO: 1637769 - RNA, 14 nt, Human
aaagacuguacaaa

SEQ ID NO: 1637770 - RNA, 14 nt, Human
gguccugcugcagu

SEQ ID NO: 1637771 - RNA, 12 nt, Human
gguccugcugca

SEQ ID NO: 1637772 - RNA, 11 nt, Human
gguccugcugc

SEQ ID NO: 1637773 - RNA, 23 nt, Human
aaagauggcugugccucugccug

SEQ ID NO: 1637774 - RNA, 22 nt, Human
aaagauggcugugccucugccu

SEQ ID NO: 1637775 - RNA, 21 nt, Human
aaagauggcugugccucugcc

SEQ ID NO: 1637776 - RNA, 15 nt, Human
aaacagucucaggaa

SEQ ID NO: 1637777 - RNA, 16 nt, Human
aaacauggccuuugcu

SEQ ID NO: 1637778 - RNA, 14 nt, Human
aaacaguagugaua

SEQ ID NO: 1637779 - RNA, 17 nt, Human
aaacauggccuuugcuu

SEQ ID NO: 1637780 - RNA, 19 nt, Human
ggggaauugaggacacuga

SEQ ID NO: 1637781 - RNA, 16 nt, Human
ggggaccagagcugcc

SEQ ID NO: 1637782 - RNA, 22 nt, Human
ggggaauguuugccucugccuc

SEQ ID NO: 1637783 - RNA, 18 nt, Human
ggggaauguuugccucug

SEQ ID NO: 1637784 - RNA, 13 nt, Human
ggggaaggcaggg

SEQ ID NO: 1637785 - RNA, 11 nt, Human
ggggagaaagu

SEQ ID NO: 1637786 - RNA, 18 nt, Human
gggggccucagugccacu

SEQ ID NO: 1637787 - RNA, 17 nt, Human
gggggccucagugccac

SEQ ID NO: 1637788 - RNA, 15 nt, Human
gggggccucagugcc

SEQ ID NO: 1637789 - RNA, 12 nt, Human
gggggccucagu

SEQ ID NO: 1637790 - RNA, 15 nt, Human
ggggccucagugcca

SEQ ID NO: 1637791 - RNA, 14 nt, Human
aaacacagcaaggg

SEQ ID NO: 1637792 - RNA, 12 nt, Human
aaacacagcaag

SEQ ID NO: 1637793 - RNA, 11 nt, Human
aaacacauuuu

SEQ ID NO: 1637794 - RNA, 12 nt, Human
aaacacauuuuu

SEQ ID NO: 1637795 - RNA, 11 nt, Human
aaacacagcaa

SEQ ID NO: 1637796 - RNA, 19 nt, Human
aaacacaaacgggcucagc

SEQ ID NO: 1637797 - RNA, 13 nt, Human
gggaugagaaagg

SEQ ID NO: 1637798 - RNA, 19 nt, Human
aaaauuuagaaauauaauu

SEQ ID NO: 1637799 - RNA, 20 nt, Human
aaaauuuugauguuuuaagg

SEQ ID NO: 1637800 - RNA, 15 nt, Human
aaaauuuuuaaucuu

SEQ ID NO: 1637801 - RNA, 15 nt, Human
aaacucguuaauuug

SEQ ID NO: 1637802 - RNA, 14 nt, Human
aaacgucuuaaaua

SEQ ID NO: 1637803 - RNA, 18 nt, Human
aaacuaggugcauauuua

SEQ ID NO: 1637804 - RNA, 13 nt, Human
aaacgucuuaaau

SEQ ID NO: 1637805 - RNA, 22 nt, Human
aaacuaggugcauauuuauaaa

SEQ ID NO: 1637806 - RNA, 13 nt, Human
aaacucuccucug

SEQ ID NO: 1637807 - RNA, 22 nt, Human
aaacugcccccucugcccugcg

SEQ ID NO: 1637808 - RNA, 19 nt, Human
aaacuguuaauaguucagg

SEQ ID NO: 1637809 - RNA, 16 nt, Human
aaacuuaaucuaaaug

SEQ ID NO: 1637810 - RNA, 17 nt, Human
aaacuuaaucuaaaugg

SEQ ID NO: 1637811 - RNA, 18 nt, Human
aaacuuaaucuaaaugga

SEQ ID NO: 1637812 - RNA, 19 nt, Human
aaacuuaaucuaaauggaa

SEQ ID NO: 1637813 - RNA, 12 nt, Human
aaaccacagcag

SEQ ID NO: 1637814 - RNA, 23 nt, Human
aaaccaagucaagugaaaaagga

SEQ ID NO: 1637815 - RNA, 15 nt, Human
aaacauuaugaugug

SEQ ID NO: 1637816 - RNA, 15 nt, Human
aaacgggcucagcaa

SEQ ID NO: 1637817 - RNA, 18 nt, Human
aaaccuuuuauauuuagu

SEQ ID NO: 1637818 - RNA, 18 nt, Human
aaaccuuuguuugcaucu

SEQ ID NO: 1637819 - RNA, 15 nt, Human
gggucgcccuggacu

SEQ ID NO: 1637820 - RNA, 13 nt, Human
gggucgcccugga

SEQ ID NO: 1637821 - RNA, 19 nt, Human
gggggugcugggccccugc

SEQ ID NO: 1637822 - RNA, 20 nt, Human
guaauaggcguaacuaauuu

SEQ ID NO: 1637823 - RNA, 14 nt, Human
guaauaugcacaca

SEQ ID NO: 1637824 - RNA, 16 nt, Human
guaauaugcacacauu

SEQ ID NO: 1637825 - RNA, 17 nt, Human
guaauaugcacacauuu

SEQ ID NO: 1637826 - RNA, 18 nt, Human
guaauaugcacacauuuu

SEQ ID NO: 1637827 - RNA, 21 nt, Human
guaauccaagcaaaugugaau

SEQ ID NO: 1637828 - RNA, 21 nt, Human
aaauaauuuuuauauuugaaa

SEQ ID NO: 1637829 - RNA, 23 nt, Human
guacacugccuucucaacuccaa

SEQ ID NO: 1637830 - RNA, 21 nt, Human
guaauuuuuuuaucgucacug

SEQ ID NO: 1637831 - RNA, 15 nt, Human
aaauacacacucaaa

SEQ ID NO: 1637832 - RNA, 22 nt, Human
aaauacaauuuuguuucuguac

SEQ ID NO: 1637833 - RNA, 21 nt, Human
aaauacaauuuuguuucugua

SEQ ID NO: 1637834 - RNA, 20 nt, Human
aaauacaauuuuguuucugu

SEQ ID NO: 1637835 - RNA, 18 nt, Human
aaauacaauuuuguuucu

SEQ ID NO: 1637836 - RNA, 17 nt, Human
aaauacaauuuuguuuc

SEQ ID NO: 1637837 - RNA, 14 nt, Human
aaauacaauuuugu

SEQ ID NO: 1637838 - RNA, 23 nt, Human
aaauaauuuuuauauuugaaaua

SEQ ID NO: 1637839 - RNA, 22 nt, Human
aaauaauuuuuauauuugaaau

SEQ ID NO: 1637840 - RNA, 13 nt, Human
aaauacaauuuug

SEQ ID NO: 1637841 - RNA, 19 nt, Human
aaauacacacucaaaucaa

SEQ ID NO: 1637842 - RNA, 17 nt, Human
aaauacagauagauaua

SEQ ID NO: 1637843 - RNA, 18 nt, Human
aaauaccagccaguaaau

SEQ ID NO: 1637844 - RNA, 22 nt, Human
aaauacgugggcauucaaaugu

SEQ ID NO: 1637845 - RNA, 17 nt, Human
aaaguugguaaaccuuu

SEQ ID NO: 1637846 - RNA, 23 nt, Human
aaaguugccuaaauccauuugga

SEQ ID NO: 1637847 - RNA, 16 nt, Human
aaaguugguaaaccuu

SEQ ID NO: 1637848 - RNA, 17 nt, Human
aaaguugccuaaaucca

SEQ ID NO: 1637849 - RNA, 16 nt, Human
aaaguugccuaaaucc

SEQ ID NO: 1637850 - RNA, 14 nt, Human
aaaguuuaauauua

SEQ ID NO: 1637851 - RNA, 12 nt, Human
aaaguuuaauau

SEQ ID NO: 1637852 - RNA, 23 nt, Human
aaaguucugcagauaaacaguag

SEQ ID NO: 1637853 - RNA, 12 nt, Human
aaaguugaauuu

SEQ ID NO: 1637854 - RNA, 14 nt, Human
aaaguugccuaaau

SEQ ID NO: 1637855 - RNA, 13 nt, Human
aaaguugccuaaa

SEQ ID NO: 1637856 - RNA, 20 nt, Human
aaaguauuaagcauauauuu

SEQ ID NO: 1637857 - RNA, 19 nt, Human
aaaguauuaagcauauauu

SEQ ID NO: 1637858 - RNA, 18 nt, Human
aaaguauuaagcauauau

SEQ ID NO: 1637859 - RNA, 13 nt, Human
aaaguauuaagca

SEQ ID NO: 1637860 - RNA, 20 nt, Human
aaagguauuuuaaucaccaa

SEQ ID NO: 1637861 - RNA, 20 nt, Human
aaaguacacuguuucaaacu

SEQ ID NO: 1637862 - RNA, 19 nt, Human
aaaguacuucuccacccug

SEQ ID NO: 1637863 - RNA, 18 nt, Human
aaaguauguuagugcaaa

SEQ ID NO: 1637864 - RNA, 18 nt, Human
aaaguaucccuacuguaa

SEQ ID NO: 1637865 - RNA, 21 nt, Human
aaaguacuucuccacccugcu

SEQ ID NO: 1637866 - RNA, 20 nt, Human
aaaguacuucuccacccugc

SEQ ID NO: 1637867 - RNA, 23 nt, Human
aaaguacuucuccacccugcucu

SEQ ID NO: 1637868 - RNA, 15 nt, Human
guacuucaugcuguc

SEQ ID NO: 1637869 - RNA, 22 nt, Human
guacuucaaauccuugaagauu

SEQ ID NO: 1637870 - RNA, 21 nt, Human
guacuucaaauccuugaagau

SEQ ID NO: 1637871 - RNA, 16 nt, Human
guacuggagaaaaugg

SEQ ID NO: 1637872 - RNA, 19 nt, Human
guacuacaguccucccauc

SEQ ID NO: 1637873 - RNA, 18 nt, Human
guacuacaguccucccau

SEQ ID NO: 1637874 - RNA, 14 nt, Human
guacccacugcucu

SEQ ID NO: 1637875 - RNA, 13 nt, Human
guacccacugcuc

SEQ ID NO: 1637876 - RNA, 13 nt, Human
guacuauguauca

SEQ ID NO: 1637877 - RNA, 17 nt, Human
guacuauguaucaauga

SEQ ID NO: 1637878 - RNA, 15 nt, Human
guacuauguaucaau

SEQ ID NO: 1637879 - RNA, 14 nt, Human
guacuccucccagg

SEQ ID NO: 1637880 - RNA, 23 nt, Human
guagaaauaucugaaaauguaug

SEQ ID NO: 1637881 - RNA, 21 nt, Human
guagaaauaucugaaaaugua

SEQ ID NO: 1637882 - RNA, 20 nt, Human
guagaaauaucugaaaaugu

SEQ ID NO: 1637883 - RNA, 18 nt, Human
guagaagcccuucuaccu

SEQ ID NO: 1637884 - RNA, 21 nt, Human
guagaagucuuagauguauau

SEQ ID NO: 1637885 - RNA, 11 nt, Human
guagagccagg

SEQ ID NO: 1637886 - RNA, 10 nt, Human
guagagccag

SEQ ID NO: 1637887 - RNA, 13 nt, Human
guagagacagggu

SEQ ID NO: 1637888 - RNA, 18 nt, Human
guagagccagggucucac

SEQ ID NO: 1637889 - RNA, 15 nt, Human
guagagccagggucu

SEQ ID NO: 1637890 - RNA, 12 nt, Human
guagagacaggg

SEQ ID NO: 1637891 - RNA, 11 nt, Human
guagagacagg

SEQ ID NO: 1637892 - RNA, 23 nt, Human
guaccaagacuacuagggaaaug

SEQ ID NO: 1637893 - RNA, 20 nt, Human
guaccaagacuacuagggaa

SEQ ID NO: 1637894 - RNA, 12 nt, Human
guacccacugcu

SEQ ID NO: 1637895 - RNA, 18 nt, Human
aaauccauacauuugugu

SEQ ID NO: 1637896 - RNA, 15 nt, Human
aaauccauacauuug

SEQ ID NO: 1637897 - RNA, 14 nt, Human
guacaugaaaacac

SEQ ID NO: 1637898 - RNA, 15 nt, Human
guacaugaaaacaca

SEQ ID NO: 1637899 - RNA, 16 nt, Human
guacaugaaaacacau

SEQ ID NO: 1637900 - RNA, 19 nt, Human
guacauggaauaacaugua

SEQ ID NO: 1637901 - RNA, 17 nt, Human
guacaugaaaacacauu

SEQ ID NO: 1637902 - RNA, 18 nt, Human
guacaugaaaacacauuu

SEQ ID NO: 1637903 - RNA, 19 nt, Human
guacaugaaaacacauuuu

SEQ ID NO: 1637904 - RNA, 20 nt, Human
guacaugaaaacacauuuuu

SEQ ID NO: 1637905 - RNA, 15 nt, Human
aaauauuccugcauu

SEQ ID NO: 1637906 - RNA, 21 nt, Human
aaaucagacuaugaaguuuuu

SEQ ID NO: 1637907 - RNA, 14 nt, Human
aaaucagacuauga

SEQ ID NO: 1637908 - RNA, 17 nt, Human
aaauauuauguuaaaac

SEQ ID NO: 1637909 - RNA, 12 nt, Human
aaaucauuucug

SEQ ID NO: 1637910 - RNA, 18 nt, Human
aaaucagccugcuccagc

SEQ ID NO: 1637911 - RNA, 16 nt, Human
aaaucagcugcuacua

SEQ ID NO: 1637912 - RNA, 12 nt, Human
aaaucagccugc

SEQ ID NO: 1637913 - RNA, 19 nt, Human
aaaucagccguguaaccau

SEQ ID NO: 1637914 - RNA, 23 nt, Human
aaaucauuucugcaucagcugcu

SEQ ID NO: 1637915 - RNA, 22 nt, Human
aaaucauuucugcaucagcugc

SEQ ID NO: 1637916 - RNA, 21 nt, Human
aaaucauuucugcaucagcug

SEQ ID NO: 1637917 - RNA, 19 nt, Human
aaaucauuucugcaucagc

SEQ ID NO: 1637918 - RNA, 15 nt, Human
aaauccacuuuaucu

SEQ ID NO: 1637919 - RNA, 17 nt, Human
gagaagcggcuggcagc

SEQ ID NO: 1637920 - RNA, 23 nt, Human
gacuuuucuguccgagcuuugaa

SEQ ID NO: 1637921 - RNA, 21 nt, Human
gacuuuucuguccgagcuuug

SEQ ID NO: 1637922 - RNA, 22 nt, Human
gacuuuguuaguuucuccaagc

SEQ ID NO: 1637923 - RNA, 19 nt, Human
gacuuuggauaauaaggaa

SEQ ID NO: 1637924 - RNA, 14 nt, Human
gacuuuggaaagag

SEQ ID NO: 1637925 - RNA, 14 nt, Human
gacuuuggaaagac

SEQ ID NO: 1637926 - RNA, 18 nt, Human
gacuguuuucucuugaga

SEQ ID NO: 1637927 - RNA, 16 nt, Human
gacuguuuucucuuga

SEQ ID NO: 1637928 - RNA, 22 nt, Human
gacuguacaaaguagaagucuu

SEQ ID NO: 1637929 - RNA, 17 nt, Human
gacuguacuccucccag

SEQ ID NO: 1637930 - RNA, 16 nt, Human
gacuguacuccuccca

SEQ ID NO: 1637931 - RNA, 17 nt, Human
gacucaaugcacugaca

SEQ ID NO: 1637932 - RNA, 14 nt, Human
gacucaaugcacug

SEQ ID NO: 1637933 - RNA, 20 nt, Human
gacugugugcucaggagccc

SEQ ID NO: 1637934 - RNA, 17 nt, Human
gacugugugcucaggag

SEQ ID NO: 1637935 - RNA, 16 nt, Human
gacugugugcucagga

SEQ ID NO: 1637936 - RNA, 14 nt, Human
gacugugugcucag

SEQ ID NO: 1637937 - RNA, 21 nt, Human
gacugucucaagagggcacug

SEQ ID NO: 1637938 - RNA, 23 nt, Human
gacugucucaagagggcacuggu

SEQ ID NO: 1637939 - RNA, 22 nt, Human
gacugucucaagagggcacugg

SEQ ID NO: 1637940 - RNA, 15 nt, Human
gacgcugugcugccc

SEQ ID NO: 1637941 - RNA, 13 nt, Human
gacgcugugcugc

SEQ ID NO: 1637942 - RNA, 12 nt, Human
gacgcugugcug

SEQ ID NO: 1637943 - RNA, 16 nt, Human
gacuauucaaacaguc

SEQ ID NO: 1637944 - RNA, 15 nt, Human
gacuauucaaacagu

SEQ ID NO: 1637945 - RNA, 22 nt, Human
gacuauucaaacagucucagga

SEQ ID NO: 1637946 - RNA, 14 nt, Human
gacagaaagcagaa

SEQ ID NO: 1637947 - RNA, 20 nt, Human
gacagaaagcagaacaguga

SEQ ID NO: 1637948 - RNA, 21 nt, Human
gacagcccuucuuuccacaga

SEQ ID NO: 1637949 - RNA, 15 nt, Human
gacagcuccuucugu

SEQ ID NO: 1637950 - RNA, 14 nt, Human
gacagcuccuucug

SEQ ID NO: 1637951 - RNA, 13 nt, Human
gacagcuccuucu

SEQ ID NO: 1637952 - RNA, 12 nt, Human
gacagccuggca

SEQ ID NO: 1637953 - RNA, 11 nt, Human
gacagccuggc

SEQ ID NO: 1637954 - RNA, 16 nt, Human
gacagcuccuucuguc

SEQ ID NO: 1637955 - RNA, 15 nt, Human
gaccaucccugaagg

SEQ ID NO: 1637956 - RNA, 13 nt, Human
gacccggcugcgu

SEQ ID NO: 1637957 - RNA, 12 nt, Human
gacccggcugcg

SEQ ID NO: 1637958 - RNA, 22 nt, Human
gaccccuggcuuuucacugcug

SEQ ID NO: 1637959 - RNA, 21 nt, Human
gaccccuggcuuuucacugcu

SEQ ID NO: 1637960 - RNA, 16 nt, Human
gacccuauugcugcuu

SEQ ID NO: 1637961 - RNA, 17 nt, Human
gaccauucuccaccugc

SEQ ID NO: 1637962 - RNA, 13 nt, Human
gaccccuggcuuu

SEQ ID NO: 1637963 - RNA, 16 nt, Human
gaccauucuccaccug

SEQ ID NO: 1637964 - RNA, 17 nt, Human
gaccaucccugaaggcc

SEQ ID NO: 1637965 - RNA, 16 nt, Human
gaccaucccugaaggc

SEQ ID NO: 1637966 - RNA, 20 nt, Human
gacaguauggcagcuuuccu

SEQ ID NO: 1637967 - RNA, 17 nt, Human
gacaggguuucaccaug

SEQ ID NO: 1637968 - RNA, 16 nt, Human
gaggugggauccucca

SEQ ID NO: 1637969 - RNA, 15 nt, Human
gaggugggauccucc

SEQ ID NO: 1637970 - RNA, 21 nt, Human
gagucacuggaacacuaauga

SEQ ID NO: 1637971 - RNA, 14 nt, Human
gagucacuggaaca

SEQ ID NO: 1637972 - RNA, 17 nt, Human
gaggugggauccuccag

SEQ ID NO: 1637973 - RNA, 18 nt, Human
gagugccuuacacaaugg

SEQ ID NO: 1637974 - RNA, 19 nt, Human
gaguugauacuacaguuug

SEQ ID NO: 1637975 - RNA, 21 nt, Human
gaguugauagcacagacccug

SEQ ID NO: 1637976 - RNA, 22 nt, Human
gaguugauacuacaguuuguua

SEQ ID NO: 1637977 - RNA, 18 nt, Human
gagugcagugagccgaga

SEQ ID NO: 1637978 - RNA, 24 nt, Human
gagugagcacuaaggugugcucug

SEQ ID NO: 1637979 - RNA, 18 nt, Human
gagugagacucugucuca

SEQ ID NO: 1637980 - RNA, 14 nt, Human
gagugagacucugu

SEQ ID NO: 1637981 - RNA, 18 nt, Human
gagucagaaguuucugcc

SEQ ID NO: 1637982 - RNA, 20 nt, Human
gaggccagagacacaagccu

SEQ ID NO: 1637983 - RNA, 14 nt, Human
gaggcucugcccuu

SEQ ID NO: 1637984 - RNA, 13 nt, Human
gaggcucugcccu

SEQ ID NO: 1637985 - RNA, 12 nt, Human
gaggcucugccc

SEQ ID NO: 1637986 - RNA, 17 nt, Human
gaggcucugcccuuggu

SEQ ID NO: 1637987 - RNA, 15 nt, Human
gaggcucugcccuug

SEQ ID NO: 1637988 - RNA, 19 nt, Human
gaggcucuggagcccacug

SEQ ID NO: 1637989 - RNA, 14 nt, Human
gaggcucuggagcc

SEQ ID NO: 1637990 - RNA, 14 nt, Human
gaggcugccucucc

SEQ ID NO: 1637991 - RNA, 15 nt, Human
gagggcuccagacac

SEQ ID NO: 1637992 - RNA, 14 nt, Human
gagggcuccagaca

SEQ ID NO: 1637993 - RNA, 13 nt, Human
gagggcuccagac

SEQ ID NO: 1637994 - RNA, 12 nt, Human
gagggcuccaga

SEQ ID NO: 1637995 - RNA, 12 nt, Human
gaggggaacaga

SEQ ID NO: 1637996 - RNA, 22 nt, Human
gagcaucaggccaggcccucug

SEQ ID NO: 1637997 - RNA, 20 nt, Human
gagcaucaggccaggcccuc

SEQ ID NO: 1637998 - RNA, 15 nt, Human
gagcgacagugagac

SEQ ID NO: 1637999 - RNA, 13 nt, Human
gagcgacagugag

SEQ ID NO: 1638000 - RNA, 13 nt, Human
gagccuuccaggg

SEQ ID NO: 1638001 - RNA, 12 nt, Human
gagccuuccagg

SEQ ID NO: 1638002 - RNA, 17 nt, Human
gagcuguucacagccag

SEQ ID NO: 1638003 - RNA, 19 nt, Human
gagcugccuguucagcucc

SEQ ID NO: 1638004 - RNA, 16 nt, Human
gagcugccuguucagc

SEQ ID NO: 1638005 - RNA, 15 nt, Human
gagcugccuguucag

SEQ ID NO: 1638006 - RNA, 17 nt, Human
gagcggagaaaggaagg

SEQ ID NO: 1638007 - RNA, 20 nt, Human
gagcugccuguucagcucca

SEQ ID NO: 1638008 - RNA, 12 nt, Human
gcaccuccugcc

SEQ ID NO: 1638009 - RNA, 16 nt, Human
gcaccggcuggccugg

SEQ ID NO: 1638010 - RNA, 15 nt, Human
gcaccggcuggccug

SEQ ID NO: 1638011 - RNA, 17 nt, Human
gcaccggcuggccuggc

SEQ ID NO: 1638012 - RNA, 18 nt, Human
gcaccggcuggccuggcc

SEQ ID NO: 1638013 - RNA, 18 nt, Human
gcaccuaccaccacgccc

SEQ ID NO: 1638014 - RNA, 17 nt, Human
gcaccuaccaccacgcc

SEQ ID NO: 1638015 - RNA, 14 nt, Human
gcacacauuuuuua

SEQ ID NO: 1638016 - RNA, 12 nt, Human
gcacacauuuuu

SEQ ID NO: 1638017 - RNA, 11 nt, Human
gcacacauuuu

SEQ ID NO: 1638018 - RNA, 20 nt, Human
gcacacaccagagcccaccu

SEQ ID NO: 1638019 - RNA, 23 nt, Human
gcacacagcacgggggccaagga

SEQ ID NO: 1638020 - RNA, 11 nt, Human
gcacacagcac

SEQ ID NO: 1638021 - RNA, 22 nt, Human
gcacuauagccuaggugacaga

SEQ ID NO: 1638022 - RNA, 12 nt, Human
gcacuccccugc

SEQ ID NO: 1638023 - RNA, 17 nt, Human
gcacuccagccugggug

SEQ ID NO: 1638024 - RNA, 16 nt, Human
gcaauaaaauggguuu

SEQ ID NO: 1638025 - RNA, 11 nt, Human
gcaauaaagca

SEQ ID NO: 1638026 - RNA, 18 nt, Human
gcaauagucaaauugugu

SEQ ID NO: 1638027 - RNA, 21 nt, Human
gcaauaaagcagcguuucuau

SEQ ID NO: 1638028 - RNA, 19 nt, Human
gcacacaccagagcccacc

SEQ ID NO: 1638029 - RNA, 18 nt, Human
gcacacaccagagcccac

SEQ ID NO: 1638030 - RNA, 17 nt, Human
gcacacaccagagccca

SEQ ID NO: 1638031 - RNA, 16 nt, Human
gcacacaccagagccc

SEQ ID NO: 1638032 - RNA, 15 nt, Human
gcacacaccagagcc

SEQ ID NO: 1638033 - RNA, 14 nt, Human
gcacacaccagagc

SEQ ID NO: 1638034 - RNA, 12 nt, Human
gcacacaccaga

SEQ ID NO: 1638035 - RNA, 19 nt, Human
gcaaccuccgccucuuggg

SEQ ID NO: 1638036 - RNA, 18 nt, Human
gcaaccuccgccucuugg

SEQ ID NO: 1638037 - RNA, 22 nt, Human
gcaacccuggugaccagcacca

SEQ ID NO: 1638038 - RNA, 16 nt, Human
gcaaaagaugcuucuc

SEQ ID NO: 1638039 - RNA, 18 nt, Human
gcaacccccagccugcua

SEQ ID NO: 1638040 - RNA, 15 nt, Human
gcaaaagaugcuucu

SEQ ID NO: 1638041 - RNA, 19 nt, Human
gauucuccugccucagccu

SEQ ID NO: 1638042 - RNA, 15 nt, Human
gauucuuaaaguuga

SEQ ID NO: 1638043 - RNA, 21 nt, Human
gauucuccugccucagccucc

SEQ ID NO: 1638044 - RNA, 20 nt, Human
gauucuccugccucagccuc

SEQ ID NO: 1638045 - RNA, 20 nt, Human
gauuuaacagaaauguacag

SEQ ID NO: 1638046 - RNA, 23 nt, Human
gauuuaacagaaauguacagcaa

SEQ ID NO: 1638047 - RNA, 23 nt, Human
gauucuuauggacaaugacccag

SEQ ID NO: 1638048 - RNA, 17 nt, Human
gauucuuaaaguugaau

SEQ ID NO: 1638049 - RNA, 16 nt, Human
gauucuuaaaguugaa

SEQ ID NO: 1638050 - RNA, 21 nt, Human
gauucuucugcuucagccucc

SEQ ID NO: 1638051 - RNA, 21 nt, Human
gauucuuaaaguugaauuuau

SEQ ID NO: 1638052 - RNA, 18 nt, Human
gauuucacucuccuuggu

SEQ ID NO: 1638053 - RNA, 17 nt, Human
gauuucacucuccuugg

SEQ ID NO: 1638054 - RNA, 20 nt, Human
gauuucagcucacugcaacc

SEQ ID NO: 1638055 - RNA, 17 nt, Human
gauuucagcucacugca

SEQ ID NO: 1638056 - RNA, 15 nt, Human
gauuucagcucacug

SEQ ID NO: 1638057 - RNA, 16 nt, Human
gauuucacucuccuug

SEQ ID NO: 1638058 - RNA, 13 nt, Human
gauuucacucucc

SEQ ID NO: 1638059 - RNA, 12 nt, Human
gauucuuuccug

SEQ ID NO: 1638060 - RNA, 23 nt, Human
gauuuuuuuuuccuucagugccu

SEQ ID NO: 1638061 - RNA, 22 nt, Human
gauuuuuuuuuccuucagugcc

SEQ ID NO: 1638062 - RNA, 16 nt, Human
gcaaaaauauuuuaug

SEQ ID NO: 1638063 - RNA, 23 nt, Human
gcaaaaauauuuuaugauccagc

SEQ ID NO: 1638064 - RNA, 22 nt, Human
gcaaaaauauuuuaugauccag

SEQ ID NO: 1638065 - RNA, 17 nt, Human
gcaaaaauauuuuauga

SEQ ID NO: 1638066 - RNA, 18 nt, Human
gaucuggguucacugcaa

SEQ ID NO: 1638067 - RNA, 22 nt, Human
gaguugauagcacagacccugc

SEQ ID NO: 1638068 - RNA, 20 nt, Human
gaucuggguucacugcaacc

SEQ ID NO: 1638069 - RNA, 17 nt, Human
gauguagaggagaaacu

SEQ ID NO: 1638070 - RNA, 17 nt, Human
gaugucccaacuuguaa

SEQ ID NO: 1638071 - RNA, 18 nt, Human
gaugucccaacuuguaaa

SEQ ID NO: 1638072 - RNA, 14 nt, Human
gaugcuuguacaua

SEQ ID NO: 1638073 - RNA, 16 nt, Human
gaugcuuguacauaau

SEQ ID NO: 1638074 - RNA, 23 nt, Human
gauggaggaaaaccaagccgugg

SEQ ID NO: 1638075 - RNA, 23 nt, Human
gaugcuucucacugccaugccag

SEQ ID NO: 1638076 - RNA, 14 nt, Human
gaugaugacuaugg

SEQ ID NO: 1638077 - RNA, 15 nt, Human
gcauaccacuuuugu

SEQ ID NO: 1638078 - RNA, 16 nt, Human
gcauaccacuuuuguu

SEQ ID NO: 1638079 - RNA, 23 nt, Human
gcaguugccagucaccccggcca

SEQ ID NO: 1638080 - RNA, 14 nt, Human
gcaguugccaguca

SEQ ID NO: 1638081 - RNA, 15 nt, Human
gcauaaaaauuagcc

SEQ ID NO: 1638082 - RNA, 15 nt, Human
gcauaacauaaaucu

SEQ ID NO: 1638083 - RNA, 13 nt, Human
gcauaacauaaau

SEQ ID NO: 1638084 - RNA, 22 nt, Human
gcaguugaaaagacuccaaaga

SEQ ID NO: 1638085 - RNA, 16 nt, Human
gcacuuuguucuggcu

SEQ ID NO: 1638086 - RNA, 15 nt, Human
gcagcuuauucacaa

SEQ ID NO: 1638087 - RNA, 16 nt, Human
gcagcuugaggguugg

SEQ ID NO: 1638088 - RNA, 20 nt, Human
gcagcugcuuuugucuaugg

SEQ ID NO: 1638089 - RNA, 13 nt, Human
gcagcugcuuuug

SEQ ID NO: 1638090 - RNA, 23 nt, Human
gcagcugcgguccacccaggagc

SEQ ID NO: 1638091 - RNA, 22 nt, Human
gcagcugcgguccacccaggag

SEQ ID NO: 1638092 - RNA, 16 nt, Human
gcaggcucucaggcca

SEQ ID NO: 1638093 - RNA, 15 nt, Human
gcaggcucucaggcc

SEQ ID NO: 1638094 - RNA, 14 nt, Human
gcaggcucucaggc

SEQ ID NO: 1638095 - RNA, 13 nt, Human
gcaggcucucagg

SEQ ID NO: 1638096 - RNA, 12 nt, Human
gcaggcucucag

SEQ ID NO: 1638097 - RNA, 22 nt, Human
gcaggcucgggcuccccagccc

SEQ ID NO: 1638098 - RNA, 21 nt, Human
gcagcuugaggguugggcugg

SEQ ID NO: 1638099 - RNA, 19 nt, Human
gcagcuugaggguugggcu

SEQ ID NO: 1638100 - RNA, 22 nt, Human
gcagggaaacagcuaaugggac

SEQ ID NO: 1638101 - RNA, 13 nt, Human
gcaggcuggcccu

SEQ ID NO: 1638102 - RNA, 17 nt, Human
gcaggcucucaggccag

SEQ ID NO: 1638103 - RNA, 18 nt, Human
gcaggcucucaggccagc

SEQ ID NO: 1638104 - RNA, 11 nt, Human
gccaaggccaa

SEQ ID NO: 1638105 - RNA, 17 nt, Human
gccaaggccaaaggaag

SEQ ID NO: 1638106 - RNA, 19 nt, Human
gccaaggccaaaggaagca

SEQ ID NO: 1638107 - RNA, 22 nt, Human
gccaagcaccuagccucgcucu

SEQ ID NO: 1638108 - RNA, 13 nt, Human
gcauggccaggug

SEQ ID NO: 1638109 - RNA, 17 nt, Human
gcauggccagguggcca

SEQ ID NO: 1638110 - RNA, 14 nt, Human
gcauggccaggugg

SEQ ID NO: 1638111 - RNA, 23 nt, Human
gcauccuggcacccggccccugc

SEQ ID NO: 1638112 - RNA, 22 nt, Human
gcauccuggcacccggccccug

SEQ ID NO: 1638113 - RNA, 13 nt, Human
gcaucgcaaugua

SEQ ID NO: 1638114 - RNA, 21 nt, Human
gcauccuggcacccggccccu

SEQ ID NO: 1638115 - RNA, 17 nt, Human
gcauccuggcacccggc

SEQ ID NO: 1638116 - RNA, 16 nt, Human
gcauuguaaaugugcu

SEQ ID NO: 1638117 - RNA, 18 nt, Human
gcaugugaugagaggaaa

SEQ ID NO: 1638118 - RNA, 17 nt, Human
gcaugugaugagaggaa

SEQ ID NO: 1638119 - RNA, 23 nt, Human
gcaugucccuaccgagucucuuc

SEQ ID NO: 1638120 - RNA, 16 nt, Human
gcaugggaaugaaugu

SEQ ID NO: 1638121 - RNA, 19 nt, Human
gcaugggaaugaaugucag

SEQ ID NO: 1638122 - RNA, 14 nt, Human
gcauuugaaaauuu

SEQ ID NO: 1638123 - RNA, 16 nt, Human
gcauuugaaaauuuug

SEQ ID NO: 1638124 - RNA, 12 nt, Human
gcauuuaaaaga

SEQ ID NO: 1638125 - RNA, 15 nt, Human
gcauuuaaaagauac

SEQ ID NO: 1638126 - RNA, 18 nt, Human
gccaagaauucuuaaaua

SEQ ID NO: 1638127 - RNA, 14 nt, Human
gccaagaauucuua

SEQ ID NO: 1638128 - RNA, 19 nt, Human
gccaacuauggccugugga

SEQ ID NO: 1638129 - RNA, 15 nt, Human
gccaacuauggccug

SEQ ID NO: 1638130 - RNA, 14 nt, Human
gccaacuauggccu

SEQ ID NO: 1638131 - RNA, 24 nt, Human
cuuggauuguccccgacccuugcc

SEQ ID NO: 1638132 - RNA, 23 nt, Human
cuuggauuguccccgacccuugc

SEQ ID NO: 1638133 - RNA, 12 nt, Human
cuugcaaaguau

SEQ ID NO: 1638134 - RNA, 12 nt, Human
cuugauucauaa

SEQ ID NO: 1638135 - RNA, 18 nt, Human
cuugauguguuaucucuu

SEQ ID NO: 1638136 - RNA, 17 nt, Human
cuugauauccucuuuga

SEQ ID NO: 1638137 - RNA, 22 nt, Human
cuugauauccucuuugagugaa

SEQ ID NO: 1638138 - RNA, 16 nt, Human
cuugacaucaacugca

SEQ ID NO: 1638139 - RNA, 18 nt, Human
cuugaauuguaaggaaug

SEQ ID NO: 1638140 - RNA, 13 nt, Human
cuuccuccuggug

SEQ ID NO: 1638141 - RNA, 22 nt, Human
cuuccucuuuccaucuacccuc

SEQ ID NO: 1638142 - RNA, 22 nt, Human
cuuccucugaggcugaaauuca

SEQ ID NO: 1638143 - RNA, 16 nt, Human
cuuccucugaggcuga

SEQ ID NO: 1638144 - RNA, 15 nt, Human
cuuccucugagccuu

SEQ ID NO: 1638145 - RNA, 14 nt, Human
cuuccucugagccu

SEQ ID NO: 1638146 - RNA, 15 nt, Human
cuuccucuccacugc

SEQ ID NO: 1638147 - RNA, 14 nt, Human
cuuccucuccacug

SEQ ID NO: 1638148 - RNA, 13 nt, Human
cuuccucuccacu

SEQ ID NO: 1638149 - RNA, 21 nt, Human
cuucuaaguaaaaccacagca

SEQ ID NO: 1638150 - RNA, 17 nt, Human
cuucuaaguaaaaccac

SEQ ID NO: 1638151 - RNA, 13 nt, Human
cuucuaaguaaaa

SEQ ID NO: 1638152 - RNA, 13 nt, Human
cuucucacauuua

SEQ ID NO: 1638153 - RNA, 20 nt, Human
cuucucacauuuauauuuuu

SEQ ID NO: 1638154 - RNA, 18 nt, Human
cuucuucagagacuccug

SEQ ID NO: 1638155 - RNA, 14 nt, Human
cuucuucagagacu

SEQ ID NO: 1638156 - RNA, 13 nt, Human
cuucuucagagac

SEQ ID NO: 1638157 - RNA, 15 nt, Human
cuucugacccaugcu

SEQ ID NO: 1638158 - RNA, 20 nt, Human
cuuuuauaaacuuuaccuuu

SEQ ID NO: 1638159 - RNA, 21 nt, Human
cuuuuauaaacuuuaccuuuu

SEQ ID NO: 1638160 - RNA, 22 nt, Human
cuuuguauucucuccuguaccu

SEQ ID NO: 1638161 - RNA, 17 nt, Human
cuuuguauucucuccug

SEQ ID NO: 1638162 - RNA, 12 nt, Human
cuuuguaugcac

SEQ ID NO: 1638163 - RNA, 16 nt, Human
cuuuguaaugaaaacc

SEQ ID NO: 1638164 - RNA, 15 nt, Human
cuuuguaaugaaaac

SEQ ID NO: 1638165 - RNA, 14 nt, Human
cuuuguaaugaaaa

SEQ ID NO: 1638166 - RNA, 16 nt, Human
cuuucuacccagcgag

SEQ ID NO: 1638167 - RNA, 15 nt, Human
cuuucuacccagcga

SEQ ID NO: 1638168 - RNA, 17 nt, Human
cuuucuacccagcgagc

SEQ ID NO: 1638169 - RNA, 17 nt, Human
cuuugacgccaucccag

SEQ ID NO: 1638170 - RNA, 16 nt, Human
cuuugacgccauccca

SEQ ID NO: 1638171 - RNA, 18 nt, Human
cuuugacgccaucccagc

SEQ ID NO: 1638172 - RNA, 22 nt, Human
cuuucagauacuggauuguacu

SEQ ID NO: 1638173 - RNA, 17 nt, Human
cuuucagauacuggauu

SEQ ID NO: 1638174 - RNA, 15 nt, Human
cuuucagauacugga

SEQ ID NO: 1638175 - RNA, 15 nt, Human
cuuucacccuuuucu

SEQ ID NO: 1638176 - RNA, 14 nt, Human
cuuucacccuuuuc

SEQ ID NO: 1638177 - RNA, 20 nt, Human
cuuucacccuuuucuguuug

SEQ ID NO: 1638178 - RNA, 14 nt, Human
cuuucagauacugg

SEQ ID NO: 1638179 - RNA, 23 nt, Human
cuuuaaugucacaggcaggucca

SEQ ID NO: 1638180 - RNA, 16 nt, Human
cuuggucugugagaug

SEQ ID NO: 1638181 - RNA, 14 nt, Human
cuugguccugcugc

SEQ ID NO: 1638182 - RNA, 19 nt, Human
cuuggucugugagaugcua

SEQ ID NO: 1638183 - RNA, 22 nt, Human
cuugguagaagcccuucuaccu

SEQ ID NO: 1638184 - RNA, 15 nt, Human
cuugucuuuggaccc

SEQ ID NO: 1638185 - RNA, 13 nt, Human
cuugucuuuggac

SEQ ID NO: 1638186 - RNA, 18 nt, Human
cuugucuuuggacccuga

SEQ ID NO: 1638187 - RNA, 19 nt, Human
cuugucuuuggacccugag

SEQ ID NO: 1638188 - RNA, 18 nt, Human
cuugucucagauuuuauu

SEQ ID NO: 1638189 - RNA, 20 nt, Human
cuuggugucgggcaugacac

SEQ ID NO: 1638190 - RNA, 19 nt, Human
cuuggugucgggcaugaca

SEQ ID NO: 1638191 - RNA, 13 nt, Human
cuugucucagauu

SEQ ID NO: 1638192 - RNA, 17 nt, Human
cuugucucagauuuuau

SEQ ID NO: 1638193 - RNA, 14 nt, Human
cuugucucagauuu

SEQ ID NO: 1638194 - RNA, 22 nt, Human
gaaccaccacacccagcccacu

SEQ ID NO: 1638195 - RNA, 21 nt, Human
gaaccaccacacccagcccac

SEQ ID NO: 1638196 - RNA, 20 nt, Human
gaaccaccacacccagccca

SEQ ID NO: 1638197 - RNA, 18 nt, Human
gaaccaccacacccagcc

SEQ ID NO: 1638198 - RNA, 23 nt, Human
gaaccaccacacccagcccacuu

SEQ ID NO: 1638199 - RNA, 22 nt, Human
gaaccauggucggaaaacaugc

SEQ ID NO: 1638200 - RNA, 17 nt, Human
gaacccaaguccaagca

SEQ ID NO: 1638201 - RNA, 16 nt, Human
gaacccaaguccaagc

SEQ ID NO: 1638202 - RNA, 19 nt, Human
gaacccgggaggcagaggu

SEQ ID NO: 1638203 - RNA, 17 nt, Human
gaacccgggaggcagag

SEQ ID NO: 1638204 - RNA, 13 nt, Human
gaacuccuggccu

SEQ ID NO: 1638205 - RNA, 14 nt, Human
gaacuccugaccuc

SEQ ID NO: 1638206 - RNA, 14 nt, Human
gaacuccuggccuc

SEQ ID NO: 1638207 - RNA, 15 nt, Human
gaacuccuggccuca

SEQ ID NO: 1638208 - RNA, 13 nt, Human
gaacugaaaucau

SEQ ID NO: 1638209 - RNA, 17 nt, Human
gaacugauguaaguaaa

SEQ ID NO: 1638210 - RNA, 15 nt, Human
gaagacagcucuuau

SEQ ID NO: 1638211 - RNA, 14 nt, Human
gaagacagcucuua

SEQ ID NO: 1638212 - RNA, 13 nt, Human
gaagacagcucuu

SEQ ID NO: 1638213 - RNA, 12 nt, Human
gaagacagcucu

SEQ ID NO: 1638214 - RNA, 15 nt, Human
gaagacagagcuaca

SEQ ID NO: 1638215 - RNA, 13 nt, Human
gaagacagagcua

SEQ ID NO: 1638216 - RNA, 16 nt, Human
gaagacacugaugggc

SEQ ID NO: 1638217 - RNA, 21 nt, Human
gaagacacugaugggcaaccc

SEQ ID NO: 1638218 - RNA, 16 nt, Human
gaagcaccauaacuuu

SEQ ID NO: 1638219 - RNA, 18 nt, Human
gaagacucauucuucugu

SEQ ID NO: 1638220 - RNA, 17 nt, Human
gaagacucauucuucug

SEQ ID NO: 1638221 - RNA, 16 nt, Human
gaagacucauucuucu

SEQ ID NO: 1638222 - RNA, 14 nt, Human
gaagcacagcuuca

SEQ ID NO: 1638223 - RNA, 13 nt, Human
gaagcacagcuuc

SEQ ID NO: 1638224 - RNA, 22 nt, Human
gaagcacaugccucucucaggc

SEQ ID NO: 1638225 - RNA, 14 nt, Human
gaagcacaugccuc

SEQ ID NO: 1638226 - RNA, 17 nt, Human
gaagcacagugaucaag

SEQ ID NO: 1638227 - RNA, 21 nt, Human
gaaacaagucagucauucaga

SEQ ID NO: 1638228 - RNA, 15 nt, Human
gaaaaugugugugug

SEQ ID NO: 1638229 - RNA, 12 nt, Human
gaaaaugugugu

SEQ ID NO: 1638230 - RNA, 17 nt, Human
gaaaagacuccaaagaa

SEQ ID NO: 1638231 - RNA, 16 nt, Human
gaaaagacuccaaaga

SEQ ID NO: 1638232 - RNA, 18 nt, Human
gaaaagacuccaaagaaa

SEQ ID NO: 1638233 - RNA, 14 nt, Human
gaaaagacuccaaa

SEQ ID NO: 1638234 - RNA, 21 nt, Human
gaaaacuuuaugcuaagugaa

SEQ ID NO: 1638235 - RNA, 23 nt, Human
gaaaagaaaaaugagccuggcaa

SEQ ID NO: 1638236 - RNA, 22 nt, Human
gaaaacuuguauuauguguguu

SEQ ID NO: 1638237 - RNA, 19 nt, Human
gaaaacuuguauuaugugu

SEQ ID NO: 1638238 - RNA, 18 nt, Human
gaaagaaaaucaggcugg

SEQ ID NO: 1638239 - RNA, 13 nt, Human
gaaacuggauuaa

SEQ ID NO: 1638240 - RNA, 17 nt, Human
gaaacuggauuaaacuu

SEQ ID NO: 1638241 - RNA, 15 nt, Human
gaaaggcuccaggag

SEQ ID NO: 1638242 - RNA, 14 nt, Human
gaaaggcuccagga

SEQ ID NO: 1638243 - RNA, 13 nt, Human
gaaaggcuccagg

SEQ ID NO: 1638244 - RNA, 16 nt, Human
gaaaggcuccaggagc

SEQ ID NO: 1638245 - RNA, 13 nt, Human
gaaagggcccaga

SEQ ID NO: 1638246 - RNA, 17 nt, Human
gaaaugaaagcagggac

SEQ ID NO: 1638247 - RNA, 11 nt, Human
gaaaugaaaaa

SEQ ID NO: 1638248 - RNA, 15 nt, Human
gaaaucuuuaaaaaa

SEQ ID NO: 1638249 - RNA, 12 nt, Human
gaaaucuuuaaa

SEQ ID NO: 1638250 - RNA, 16 nt, Human
gaaagggcccagagag

SEQ ID NO: 1638251 - RNA, 15 nt, Human
gaaagggcccagaga

SEQ ID NO: 1638252 - RNA, 20 nt, Human
gaacacauaauucaggaagc

SEQ ID NO: 1638253 - RNA, 17 nt, Human
gaacacauaauucagga

SEQ ID NO: 1638254 - RNA, 11 nt, Human
cugggacacag

SEQ ID NO: 1638255 - RNA, 22 nt, Human
cuggccccucagggucccuggu

SEQ ID NO: 1638256 - RNA, 14 nt, Human
cuggcccugcccug

SEQ ID NO: 1638257 - RNA, 13 nt, Human
cuggcccugcccu

SEQ ID NO: 1638258 - RNA, 11 nt, Human
cuggcccugcc

SEQ ID NO: 1638259 - RNA, 14 nt, Human
cuggccuagcauac

SEQ ID NO: 1638260 - RNA, 16 nt, Human
cuggccgggagccuga

SEQ ID NO: 1638261 - RNA, 15 nt, Human
cuggcccugcccugg

SEQ ID NO: 1638262 - RNA, 18 nt, Human
cuggcagaguugaagaca

SEQ ID NO: 1638263 - RNA, 17 nt, Human
cuggcagaguugaagac

SEQ ID NO: 1638264 - RNA, 13 nt, Human
cuggcagccccug

SEQ ID NO: 1638265 - RNA, 20 nt, Human
cuggcagccgugccuucagc

SEQ ID NO: 1638266 - RNA, 22 nt, Human
cuggcagccgugccuucagcuc

SEQ ID NO: 1638267 - RNA, 21 nt, Human
cuggcagccgugccuucagcu

SEQ ID NO: 1638268 - RNA, 12 nt, Human
cuggcagccccu

SEQ ID NO: 1638269 - RNA, 11 nt, Human
cuggcagccca

SEQ ID NO: 1638270 - RNA, 19 nt, Human
cuggcagaguugaagacag

SEQ ID NO: 1638271 - RNA, 14 nt, Human
cuggcagaggaggg

SEQ ID NO: 1638272 - RNA, 16 nt, Human
cugggcagaaggaaga

SEQ ID NO: 1638273 - RNA, 15 nt, Human
cugggcagaaggaag

SEQ ID NO: 1638274 - RNA, 12 nt, Human
cugggcagaagg

SEQ ID NO: 1638275 - RNA, 14 nt, Human
cugggccagaauuu

SEQ ID NO: 1638276 - RNA, 12 nt, Human
cugggccagaau

SEQ ID NO: 1638277 - RNA, 20 nt, Human
cuggguucacugcaaccucc

SEQ ID NO: 1638278 - RNA, 18 nt, Human
cuggguucacugcaaccu

SEQ ID NO: 1638279 - RNA, 15 nt, Human
cuggggccaggcugg

SEQ ID NO: 1638280 - RNA, 19 nt, Human
cugcuuuuuaaagaaugcu

SEQ ID NO: 1638281 - RNA, 21 nt, Human
cugcuuuugucuaugggacuc

SEQ ID NO: 1638282 - RNA, 14 nt, Human
cuggaagcacagcu

SEQ ID NO: 1638283 - RNA, 14 nt, Human
cuggagaaaaugga

SEQ ID NO: 1638284 - RNA, 14 nt, Human
cugcuucaaauauu

SEQ ID NO: 1638285 - RNA, 20 nt, Human
cugcuuuugucuaugggacu

SEQ ID NO: 1638286 - RNA, 23 nt, Human
cugcuucaaggauccugagccag

SEQ ID NO: 1638287 - RNA, 22 nt, Human
cugcuucaaggauccugagcca

SEQ ID NO: 1638288 - RNA, 21 nt, Human
cugcuucaaggauccugagcc

SEQ ID NO: 1638289 - RNA, 13 nt, Human
cugcuucaaggau

SEQ ID NO: 1638290 - RNA, 12 nt, Human
cugcuucaagga

SEQ ID NO: 1638291 - RNA, 19 nt, Human
cugcuucaaauauuucccu

SEQ ID NO: 1638292 - RNA, 20 nt, Human
cugaucugaugcaagcaaga

SEQ ID NO: 1638293 - RNA, 19 nt, Human
cugccuguucagcuccagc

SEQ ID NO: 1638294 - RNA, 20 nt, Human
cugccuguugggccaggagc

SEQ ID NO: 1638295 - RNA, 18 nt, Human
cugccuguucagcuccag

SEQ ID NO: 1638296 - RNA, 17 nt, Human
cugccuguucagcucca

SEQ ID NO: 1638297 - RNA, 22 nt, Human
cugccucucccaucacuucccu

SEQ ID NO: 1638298 - RNA, 15 nt, Human
cugccucucccauca

SEQ ID NO: 1638299 - RNA, 23 nt, Human
cugccucucccaucacuucccua

SEQ ID NO: 1638300 - RNA, 24 nt, Human
cugccuccucuucaacugaccagc

SEQ ID NO: 1638301 - RNA, 15 nt, Human
cugccuccucuucaa

SEQ ID NO: 1638302 - RNA, 14 nt, Human
cugccuccucuuca

SEQ ID NO: 1638303 - RNA, 13 nt, Human
cugccuccucuuc

SEQ ID NO: 1638304 - RNA, 21 nt, Human
cugcugacuguuuucucuuga

SEQ ID NO: 1638305 - RNA, 18 nt, Human
cugcugacuguuuucucu

SEQ ID NO: 1638306 - RNA, 17 nt, Human
cugcuaucaaagagguu

SEQ ID NO: 1638307 - RNA, 22 nt, Human
cugccuguugggccaggagccu

SEQ ID NO: 1638308 - RNA, 21 nt, Human
cugccuguugggccaggagcc

SEQ ID NO: 1638309 - RNA, 23 nt, Human
cugccuguugggccaggagccuc

SEQ ID NO: 1638310 - RNA, 12 nt, Human
cuguucacagcc

SEQ ID NO: 1638311 - RNA, 22 nt, Human
cuguuggcugggggccucagug

SEQ ID NO: 1638312 - RNA, 19 nt, Human
cuguuggcugggggccuca

SEQ ID NO: 1638313 - RNA, 14 nt, Human
cuguuggcuggggg

SEQ ID NO: 1638314 - RNA, 14 nt, Human
cuguuuaagagaca

SEQ ID NO: 1638315 - RNA, 12 nt, Human
cuguuuaagaga

SEQ ID NO: 1638316 - RNA, 15 nt, Human
cuuaccagcagagca

SEQ ID NO: 1638317 - RNA, 22 nt, Human
cuuacauuagcaguuugcuuug

SEQ ID NO: 1638318 - RNA, 21 nt, Human
cuuacauuagcaguuugcuuu

SEQ ID NO: 1638319 - RNA, 14 nt, Human
cuuaaaacaacacu

SEQ ID NO: 1638320 - RNA, 18 nt, Human
cuuaaaguugaauuuauu

SEQ ID NO: 1638321 - RNA, 15 nt, Human
cuuaaaguugaauuu

SEQ ID NO: 1638322 - RNA, 13 nt, Human
cuuaaauaaugug

SEQ ID NO: 1638323 - RNA, 22 nt, Human
cuuaaaguugaauuuauuggcu

SEQ ID NO: 1638324 - RNA, 21 nt, Human
cuuagggaaggauacaaaagc

SEQ ID NO: 1638325 - RNA, 19 nt, Human
cuuagggaaggauacaaaa

SEQ ID NO: 1638326 - RNA, 23 nt, Human
cuuagcucauucuccuuguguua

SEQ ID NO: 1638327 - RNA, 13 nt, Human
cuuagcugggaga

SEQ ID NO: 1638328 - RNA, 22 nt, Human
cuuagcucauucuccuuguguu

SEQ ID NO: 1638329 - RNA, 16 nt, Human
cuuaccagcagagcac

SEQ ID NO: 1638330 - RNA, 22 nt, Human
cuggugacaugucuuuucuugc

SEQ ID NO: 1638331 - RNA, 16 nt, Human
cugguuuccugcccug

SEQ ID NO: 1638332 - RNA, 14 nt, Human
cugguuuccugccc

SEQ ID NO: 1638333 - RNA, 13 nt, Human
cugguuuccugcc

SEQ ID NO: 1638334 - RNA, 13 nt, Human
cuguagaguggga

SEQ ID NO: 1638335 - RNA, 16 nt, Human
cugucgcccagucugg

SEQ ID NO: 1638336 - RNA, 23 nt, Human
cugucaauuacaggaaguacugg

SEQ ID NO: 1638337 - RNA, 20 nt, Human
cugucaauuacaggaaguac

SEQ ID NO: 1638338 - RNA, 14 nt, Human
cugugcugcccugc

SEQ ID NO: 1638339 - RNA, 13 nt, Human
cugugcugcccug

SEQ ID NO: 1638340 - RNA, 12 nt, Human
cugugcugcccu

SEQ ID NO: 1638341 - RNA, 19 nt, Human
cuguuauaaucuuucacag

SEQ ID NO: 1638342 - RNA, 13 nt, Human
cuguuauaaucuu

SEQ ID NO: 1638343 - RNA, 19 nt, Human
cugugcugcccugcccacc

SEQ ID NO: 1638344 - RNA, 18 nt, Human
cugugcugcccugcccac

SEQ ID NO: 1638345 - RNA, 17 nt, Human
cugugcugcccugccca

SEQ ID NO: 1638346 - RNA, 15 nt, Human
cugugcugcccugcc

SEQ ID NO: 1638347 - RNA, 19 nt, Human
cugugucagcauagaagua

SEQ ID NO: 1638348 - RNA, 17 nt, Human
cugugucagcauagaag

SEQ ID NO: 1638349 - RNA, 21 nt, Human
cugugcugcccugcccaccug

SEQ ID NO: 1638350 - RNA, 15 nt, Human
cauuuggauuggaug

SEQ ID NO: 1638351 - RNA, 17 nt, Human
cauuugucacacacuuu

SEQ ID NO: 1638352 - RNA, 16 nt, Human
cauuugugaaaugaug

SEQ ID NO: 1638353 - RNA, 14 nt, Human
cauuugugaaauga

SEQ ID NO: 1638354 - RNA, 15 nt, Human
cauuuauucugcuca

SEQ ID NO: 1638355 - RNA, 14 nt, Human
cauuuauucugcuc

SEQ ID NO: 1638356 - RNA, 19 nt, Human
cauuuuuuaaaugcaccug

SEQ ID NO: 1638357 - RNA, 15 nt, Human
cauuuuuuaaaugca

SEQ ID NO: 1638358 - RNA, 16 nt, Human
cauuuuuuaaaugcac

SEQ ID NO: 1638359 - RNA, 16 nt, Human
ccaaggccaaaggaag

SEQ ID NO: 1638360 - RNA, 18 nt, Human
ccaaaugcagcuuuaaaa

SEQ ID NO: 1638361 - RNA, 15 nt, Human
ccaaaugcagcuuua

SEQ ID NO: 1638362 - RNA, 13 nt, Human
ccaaaugcagcuu

SEQ ID NO: 1638363 - RNA, 13 nt, Human
ccaagaagcccag

SEQ ID NO: 1638364 - RNA, 16 nt, Human
ccaacgucugugccau

SEQ ID NO: 1638365 - RNA, 15 nt, Human
ccaacgucugugcca

SEQ ID NO: 1638366 - RNA, 13 nt, Human
ccaacgucugugc

SEQ ID NO: 1638367 - RNA, 22 nt, Human
ccaaauggaaaugggcagagca

SEQ ID NO: 1638368 - RNA, 19 nt, Human
ccaagcuggucccacucag

SEQ ID NO: 1638369 - RNA, 12 nt, Human
ccaagcuggucc

SEQ ID NO: 1638370 - RNA, 14 nt, Human
ccaagaagcccagg

SEQ ID NO: 1638371 - RNA, 20 nt, Human
ccaagcuggucccacucagu

SEQ ID NO: 1638372 - RNA, 18 nt, Human
ccaaggaugccccguccc

SEQ ID NO: 1638373 - RNA, 15 nt, Human
ccaaggccaaaggaa

SEQ ID NO: 1638374 - RNA, 18 nt, Human
ccacagaagcuccaggua

SEQ ID NO: 1638375 - RNA, 22 nt, Human
ccacagagaaaguacuucucca

SEQ ID NO: 1638376 - RNA, 18 nt, Human
ccaccagucugacuguuu

SEQ ID NO: 1638377 - RNA, 15 nt, Human
ccaccacgcccggcu

SEQ ID NO: 1638378 - RNA, 16 nt, Human
ccacagaagcuccagg

SEQ ID NO: 1638379 - RNA, 21 nt, Human
ccacacuucaggcucuucucc

SEQ ID NO: 1638380 - RNA, 20 nt, Human
ccacacuucaggcucuucuc

SEQ ID NO: 1638381 - RNA, 16 nt, Human
ccacacuucaggcucu

SEQ ID NO: 1638382 - RNA, 13 nt, Human
ccacgcccccacu

SEQ ID NO: 1638383 - RNA, 19 nt, Human
ccaccuuggcugcagggag

SEQ ID NO: 1638384 - RNA, 18 nt, Human
ccaccuuggcugcaggga

SEQ ID NO: 1638385 - RNA, 18 nt, Human
ccacgcuggaccuugaac

SEQ ID NO: 1638386 - RNA, 13 nt, Human
ccacgcuggagug

SEQ ID NO: 1638387 - RNA, 16 nt, Human
ccaccuuggcugcagg

SEQ ID NO: 1638388 - RNA, 15 nt, Human
ccaccuuggcugcag

SEQ ID NO: 1638389 - RNA, 14 nt, Human
ccaccuuggcugca

SEQ ID NO: 1638390 - RNA, 12 nt, Human
ccaccuuggcug

SEQ ID NO: 1638391 - RNA, 22 nt, Human
ccaccgggcugggagcucugca

SEQ ID NO: 1638392 - RNA, 19 nt, Human
ccaccaucaugucuggcua

SEQ ID NO: 1638393 - RNA, 18 nt, Human
ccaccaucaugucuggcu

SEQ ID NO: 1638394 - RNA, 19 nt, Human
ccaccgggcugggagcucu

SEQ ID NO: 1638395 - RNA, 15 nt, Human
cagugggagcugccu

SEQ ID NO: 1638396 - RNA, 22 nt, Human
cauagcagagaaugaaagggcc

SEQ ID NO: 1638397 - RNA, 19 nt, Human
cauagcagagaaugaaagg

SEQ ID NO: 1638398 - RNA, 15 nt, Human
cauauucaggaagcu

SEQ ID NO: 1638399 - RNA, 14 nt, Human
cauauucaggaagc

SEQ ID NO: 1638400 - RNA, 20 nt, Human
cauauucaggaagcucaggg

SEQ ID NO: 1638401 - RNA, 22 nt, Human
cauauucaggaagcucagggcc

SEQ ID NO: 1638402 - RNA, 20 nt, Human
cauaugccugggcagaagga

SEQ ID NO: 1638403 - RNA, 15 nt, Human
cauaugccugggcag

SEQ ID NO: 1638404 - RNA, 22 nt, Human
cauaugccugggcagaaggaag

SEQ ID NO: 1638405 - RNA, 15 nt, Human
caucaggccaggccc

SEQ ID NO: 1638406 - RNA, 19 nt, Human
caucaggccaggcccucug

SEQ ID NO: 1638407 - RNA, 16 nt, Human
caucaggccaggcccu

SEQ ID NO: 1638408 - RNA, 20 nt, Human
caucaggccaggcccucugc

SEQ ID NO: 1638409 - RNA, 19 nt, Human
caucccauaugccugggca

SEQ ID NO: 1638410 - RNA, 14 nt, Human
cauccccuguagag

SEQ ID NO: 1638411 - RNA, 21 nt, Human
cauccccuguagagugggagc

SEQ ID NO: 1638412 - RNA, 13 nt, Human
cauuaucucaaaa

SEQ ID NO: 1638413 - RNA, 12 nt, Human
cauuaucucaaa

SEQ ID NO: 1638414 - RNA, 23 nt, Human
cauuaucuagauacuguaucaug

SEQ ID NO: 1638415 - RNA, 22 nt, Human
cauuaggugugacugaauuucu

SEQ ID NO: 1638416 - RNA, 13 nt, Human
cauguuggccagg

SEQ ID NO: 1638417 - RNA, 12 nt, Human
cauguuggccag

SEQ ID NO: 1638418 - RNA, 20 nt, Human
cauguccaagaagcccagga

SEQ ID NO: 1638419 - RNA, 19 nt, Human
cauguccaagaagcccagg

SEQ ID NO: 1638420 - RNA, 18 nt, Human
cauguccaagaagcccag

SEQ ID NO: 1638421 - RNA, 12 nt, Human
cauuccuguucc

SEQ ID NO: 1638422 - RNA, 18 nt, Human
cauucuagguuugcaaga

SEQ ID NO: 1638423 - RNA, 13 nt, Human
cauucucacuccu

SEQ ID NO: 1638424 - RNA, 14 nt, Human
cauucucacuccua

SEQ ID NO: 1638425 - RNA, 16 nt, Human
caugcacgugugugca

SEQ ID NO: 1638426 - RNA, 13 nt, Human
caugcugcccugu

SEQ ID NO: 1638427 - RNA, 12 nt, Human
caugcugcccug

SEQ ID NO: 1638428 - RNA, 13 nt, Human
caugcuccuggcc

SEQ ID NO: 1638429 - RNA, 23 nt, Human
caugauuaaccacuucagcugac

SEQ ID NO: 1638430 - RNA, 22 nt, Human
caugauuaaccacuucagcuga

SEQ ID NO: 1638431 - RNA, 24 nt, Human
caugauuaaccacuucagcugacu

SEQ ID NO: 1638432 - RNA, 12 nt, Human
caugcacaaauu

SEQ ID NO: 1638433 - RNA, 15 nt, Human
caugaaguaauaugc

SEQ ID NO: 1638434 - RNA, 19 nt, Human
caugaaguaauaugcacac

SEQ ID NO: 1638435 - RNA, 22 nt, Human
caugaaguaauaugcacacauu

SEQ ID NO: 1638436 - RNA, 23 nt, Human
caugaaguaauaugcacacauuu

SEQ ID NO: 1638437 - RNA, 23 nt, Human
caugacacgaauauugcugaugg

SEQ ID NO: 1638438 - RNA, 21 nt, Human
caugacacgaauauugcugau

SEQ ID NO: 1638439 - RNA, 15 nt, Human
caugcugcccuguga

SEQ ID NO: 1638440 - RNA, 14 nt, Human
caugcugcccugug

SEQ ID NO: 1638441 - RNA, 13 nt, Human
cauggccaggugg

SEQ ID NO: 1638442 - RNA, 14 nt, Human
cauggccagguggc

SEQ ID NO: 1638443 - RNA, 15 nt, Human
cagucaccucaugga

SEQ ID NO: 1638444 - RNA, 22 nt, Human
cagucaccccggccaccugcgg

SEQ ID NO: 1638445 - RNA, 19 nt, Human
cagucaccccggccaccug

SEQ ID NO: 1638446 - RNA, 20 nt, Human
cagucaccccggccaccugc

SEQ ID NO: 1638447 - RNA, 21 nt, Human
caguauuguacaaaguauuaa

SEQ ID NO: 1638448 - RNA, 16 nt, Human
cagguuuaagcuguua

SEQ ID NO: 1638449 - RNA, 21 nt, Human
cagguuggugggggccucggu

SEQ ID NO: 1638450 - RNA, 18 nt, Human
cagguuuaagcuguuacu

SEQ ID NO: 1638451 - RNA, 13 nt, Human
caguauuguacaa

SEQ ID NO: 1638452 - RNA, 12 nt, Human
caguauuguaca

SEQ ID NO: 1638453 - RNA, 19 nt, Human
caguauuguacaaaguauu

SEQ ID NO: 1638454 - RNA, 18 nt, Human
caguauuguacaaaguau

SEQ ID NO: 1638455 - RNA, 17 nt, Human
caguauuguacaaagua

SEQ ID NO: 1638456 - RNA, 16 nt, Human
caguauuguacaaagu

SEQ ID NO: 1638457 - RNA, 18 nt, Human
cagggucucacucugucg

SEQ ID NO: 1638458 - RNA, 21 nt, Human
cagggucucacucugucgccc

SEQ ID NO: 1638459 - RNA, 22 nt, Human
cagggucucacucugucgccca

SEQ ID NO: 1638460 - RNA, 17 nt, Human
caggugauccacccacc

SEQ ID NO: 1638461 - RNA, 16 nt, Human
caggugauccacccac

SEQ ID NO: 1638462 - RNA, 12 nt, Human
caggguuggccc

SEQ ID NO: 1638463 - RNA, 14 nt, Human
caggguuggccccu

SEQ ID NO: 1638464 - RNA, 20 nt, Human
caggugauccacccaccuca

SEQ ID NO: 1638465 - RNA, 14 nt, Human
cagguugguggggg

SEQ ID NO: 1638466 - RNA, 20 nt, Human
caggugcuaggaacacuccu

SEQ ID NO: 1638467 - RNA, 18 nt, Human
caggugcuaggaacacuc

SEQ ID NO: 1638468 - RNA, 14 nt, Human
caggugcgaaagga

SEQ ID NO: 1638469 - RNA, 15 nt, Human
cagucucaggaaauc

SEQ ID NO: 1638470 - RNA, 14 nt, Human
cagucucccucccu

SEQ ID NO: 1638471 - RNA, 15 nt, Human
cagugccaaaaacaa

SEQ ID NO: 1638472 - RNA, 12 nt, Human
cagugcccacag

SEQ ID NO: 1638473 - RNA, 19 nt, Human
cagugggacagggcauggc

SEQ ID NO: 1638474 - RNA, 11 nt, Human
cagugggagcu

SEQ ID NO: 1638475 - RNA, 23 nt, Human
cagugcaugcugucccuuacgug

SEQ ID NO: 1638476 - RNA, 22 nt, Human
cagugcaugcugucccuuacgu

SEQ ID NO: 1638477 - RNA, 19 nt, Human
cagugcaugcugucccuua

SEQ ID NO: 1638478 - RNA, 20 nt, Human
cagucugauucccaagcucu

SEQ ID NO: 1638479 - RNA, 19 nt, Human
cagucugauucccaagcuc

SEQ ID NO: 1638480 - RNA, 22 nt, Human
cagugcacuaauguguaagaca

SEQ ID NO: 1638481 - RNA, 18 nt, Human
cagggaggacgcucucug

SEQ ID NO: 1638482 - RNA, 17 nt, Human
cagggaggacgcucucu

SEQ ID NO: 1638483 - RNA, 19 nt, Human
caggcugggcuucaguggc

SEQ ID NO: 1638484 - RNA, 17 nt, Human
caggcugggcuucagug

SEQ ID NO: 1638485 - RNA, 19 nt, Human
cagggaggacgcucucugg

SEQ ID NO: 1638486 - RNA, 13 nt, Human
cagggagggccug

SEQ ID NO: 1638487 - RNA, 12 nt, Human
cagggagggccu

SEQ ID NO: 1638488 - RNA, 16 nt, Human
caggcugggcuucagu

SEQ ID NO: 1638489 - RNA, 15 nt, Human
caggcuggcgugcag

SEQ ID NO: 1638490 - RNA, 20 nt, Human
caggcuggcccugcccuggu

SEQ ID NO: 1638491 - RNA, 17 nt, Human
caggcgccccuuccccc

SEQ ID NO: 1638492 - RNA, 19 nt, Human
caggcuggcccugcccugg

SEQ ID NO: 1638493 - RNA, 18 nt, Human
caggcuggcccugcccug

SEQ ID NO: 1638494 - RNA, 15 nt, Human
caggcgccccuuccc

SEQ ID NO: 1638495 - RNA, 20 nt, Human
caggccugccuguucccauu

SEQ ID NO: 1638496 - RNA, 18 nt, Human
cagggaggugaccccagg

SEQ ID NO: 1638497 - RNA, 16 nt, Human
cagggagggccugggc

SEQ ID NO: 1638498 - RNA, 14 nt, Human
cagggagggccugg

SEQ ID NO: 1638499 - RNA, 22 nt, Human
cagggaguccgaaagggacuug

SEQ ID NO: 1638500 - RNA, 17 nt, Human
cagggagggccugggcc

SEQ ID NO: 1638501 - RNA, 15 nt, Human
caggagggaggggga

SEQ ID NO: 1638502 - RNA, 17 nt, Human
caggaggccagccuuga

SEQ ID NO: 1638503 - RNA, 23 nt, Human
caggagggagggggaaggcaggg

SEQ ID NO: 1638504 - RNA, 23 nt, Human
caggcacccaccaucaugucugg

SEQ ID NO: 1638505 - RNA, 22 nt, Human
caggcacccaccaucaugucug

SEQ ID NO: 1638506 - RNA, 18 nt, Human
caggcacccaccaucaug

SEQ ID NO: 1638507 - RNA, 16 nt, Human
caggaggccagccuug

SEQ ID NO: 1638508 - RNA, 15 nt, Human
caggaggccagccuu

SEQ ID NO: 1638509 - RNA, 21 nt, Human
caggccagagggagugacaga

SEQ ID NO: 1638510 - RNA, 19 nt, Human
caggccagagggagugaca

SEQ ID NO: 1638511 - RNA, 23 nt, Human
caggccagagggagugacagagg

SEQ ID NO: 1638512 - RNA, 17 nt, Human
cagagcugcccucuccu

SEQ ID NO: 1638513 - RNA, 13 nt, Human
cagagcugcccuc

SEQ ID NO: 1638514 - RNA, 15 nt, Human
cagagcugcccucuc

SEQ ID NO: 1638515 - RNA, 18 nt, Human
cagagcugccaccugccu

SEQ ID NO: 1638516 - RNA, 23 nt, Human
cagaaguuugagaucagccuggg

SEQ ID NO: 1638517 - RNA, 22 nt, Human
cagaaguuugagaucagccugg

SEQ ID NO: 1638518 - RNA, 20 nt, Human
cagaaguuugagaucagccu

SEQ ID NO: 1638519 - RNA, 19 nt, Human
cagaaguuucugccgcagc

SEQ ID NO: 1638520 - RNA, 22 nt, Human
cagagggccugcaagggaguga

SEQ ID NO: 1638521 - RNA, 20 nt, Human
cagaggggguggccucccaa

SEQ ID NO: 1638522 - RNA, 19 nt, Human
cagaggggguggccuccca

SEQ ID NO: 1638523 - RNA, 18 nt, Human
cagaggggguggccuccc

SEQ ID NO: 1638524 - RNA, 20 nt, Human
cagagucagaaguuucugcc

SEQ ID NO: 1638525 - RNA, 19 nt, Human
cagauaugauucaaauguc

SEQ ID NO: 1638526 - RNA, 17 nt, Human
cagauaugauucaaaug

SEQ ID NO: 1638527 - RNA, 16 nt, Human
cagauaugauucaaau

SEQ ID NO: 1638528 - RNA, 15 nt, Human
cagauaugauucaaa

SEQ ID NO: 1638529 - RNA, 21 nt, Human
cagcaguugaaaagacuccaa

SEQ ID NO: 1638530 - RNA, 20 nt, Human
cagcaguugaaaagacucca

SEQ ID NO: 1638531 - RNA, 17 nt, Human
cagcaguugaaaagacu

SEQ ID NO: 1638532 - RNA, 22 nt, Human
cagcaguugaaaagacuccaaa

SEQ ID NO: 1638533 - RNA, 23 nt, Human
cagcauauucaggaagcucaggg

SEQ ID NO: 1638534 - RNA, 22 nt, Human
cagcauauucaggaagcucagg

SEQ ID NO: 1638535 - RNA, 19 nt, Human
cagcauauucaggaagcuc

SEQ ID NO: 1638536 - RNA, 22 nt, Human
cagccagcaguucagagcugcc

SEQ ID NO: 1638537 - RNA, 15 nt, Human
cagccagcaguucag

SEQ ID NO: 1638538 - RNA, 21 nt, Human
cagccagcaguucagagcugc

SEQ ID NO: 1638539 - RNA, 14 nt, Human
cagccagcaguuca

SEQ ID NO: 1638540 - RNA, 13 nt, Human
cagccaggccaca

SEQ ID NO: 1638541 - RNA, 12 nt, Human
cagccaggccac

SEQ ID NO: 1638542 - RNA, 22 nt, Human
cagccaggccacaagacccuug

SEQ ID NO: 1638543 - RNA, 22 nt, Human
cagcacagccucuuagaugcag

SEQ ID NO: 1638544 - RNA, 22 nt, Human
cagccugagcgacagugagacu

SEQ ID NO: 1638545 - RNA, 19 nt, Human
cagccugagcgacagugag

SEQ ID NO: 1638546 - RNA, 18 nt, Human
cagccugagcgacaguga

SEQ ID NO: 1638547 - RNA, 17 nt, Human
cagcggggacagcuccu

SEQ ID NO: 1638548 - RNA, 16 nt, Human
cagcggggacagcucc

SEQ ID NO: 1638549 - RNA, 15 nt, Human
cagcggggacagcuc

SEQ ID NO: 1638550 - RNA, 20 nt, Human
cagcccuucuuuccacagaa

SEQ ID NO: 1638551 - RNA, 19 nt, Human
cagcccuucuuuccacaga

SEQ ID NO: 1638552 - RNA, 15 nt, Human
cagcccuucuuucca

SEQ ID NO: 1638553 - RNA, 21 nt, Human
cagccgagauagccaaggcca

SEQ ID NO: 1638554 - RNA, 21 nt, Human
cagccccuggaugcagccuca

SEQ ID NO: 1638555 - RNA, 19 nt, Human
cagccccuggaugcagccu

SEQ ID NO: 1638556 - RNA, 18 nt, Human
cagccccuggaugcagcc

SEQ ID NO: 1638557 - RNA, 17 nt, Human
cagccccuggaugcagc

SEQ ID NO: 1638558 - RNA, 21 nt, Human
cagcccuuagcagggaaacag

SEQ ID NO: 1638559 - RNA, 16 nt, Human
cagcccuuagcaggga

SEQ ID NO: 1638560 - RNA, 22 nt, Human
cagccccuggaugcagccucac

SEQ ID NO: 1638561 - RNA, 14 nt, Human
cagccccuggaugc

SEQ ID NO: 1638562 - RNA, 13 nt, Human
cagccccuggaug

SEQ ID NO: 1638563 - RNA, 12 nt, Human
cagccccuggau

SEQ ID NO: 1638564 - RNA, 23 nt, Human
caggaaaucaaauaugcaaagca

SEQ ID NO: 1638565 - RNA, 15 nt, Human
caggaaaggcuccag

SEQ ID NO: 1638566 - RNA, 14 nt, Human
caggaaaggcucca

SEQ ID NO: 1638567 - RNA, 19 nt, Human
cagcuucauuuccuguguc

SEQ ID NO: 1638568 - RNA, 18 nt, Human
cagcuucauuuccugugu

SEQ ID NO: 1638569 - RNA, 15 nt, Human
cagcuucauuuccug

SEQ ID NO: 1638570 - RNA, 18 nt, Human
cagcugugcucuggacag

SEQ ID NO: 1638571 - RNA, 19 nt, Human
cagcugugcucuggacagg

SEQ ID NO: 1638572 - RNA, 12 nt, Human
cagcugccugca

SEQ ID NO: 1638573 - RNA, 20 nt, Human
cagcuccccucggagaagag

SEQ ID NO: 1638574 - RNA, 18 nt, Human
cagcuccccucggagaag

SEQ ID NO: 1638575 - RNA, 17 nt, Human
cagcuccccucggagaa

SEQ ID NO: 1638576 - RNA, 16 nt, Human
cagcuccccucggaga

SEQ ID NO: 1638577 - RNA, 23 nt, Human
cagcugccuccccuccucugcuu

SEQ ID NO: 1638578 - RNA, 24 nt, Human
cagcugccuccccuccucugcuug

SEQ ID NO: 1638579 - RNA, 21 nt, Human
cagcugccuccccuccucugc

SEQ ID NO: 1638580 - RNA, 22 nt, Human
cagcugccuccccuccucugcu

SEQ ID NO: 1638581 - RNA, 20 nt, Human
cagcuccagcucaccagccc

SEQ ID NO: 1638582 - RNA, 18 nt, Human
cagcuccagcucaccagc

SEQ ID NO: 1638583 - RNA, 17 nt, Human
cagcuccagcucaccag

SEQ ID NO: 1638584 - RNA, 16 nt, Human
cagcuccagcucacca

SEQ ID NO: 1638585 - RNA, 22 nt, Human
cagcuccagcucaccagcccca

SEQ ID NO: 1638586 - RNA, 21 nt, Human
cagcucccaaggcucugagca

SEQ ID NO: 1638587 - RNA, 15 nt, Human
cagcuccagcucacc

SEQ ID NO: 1638588 - RNA, 14 nt, Human
cagcuccagcucac

SEQ ID NO: 1638589 - RNA, 13 nt, Human
cagcuccagcuca

SEQ ID NO: 1638590 - RNA, 19 nt, Human
cagcuccaagaauuucuag

SEQ ID NO: 1638591 - RNA, 16 nt, Human
cagcuccaagaauuuc

SEQ ID NO: 1638592 - RNA, 20 nt, Human
auuguacaaaguauuaagca

SEQ ID NO: 1638593 - RNA, 19 nt, Human
auuguacaaaguauuaagc

SEQ ID NO: 1638594 - RNA, 17 nt, Human
auuguacaaaguauuaa

SEQ ID NO: 1638595 - RNA, 16 nt, Human
auuguacaaaguauua

SEQ ID NO: 1638596 - RNA, 21 nt, Human
auuguaauuauaucugaggaa

SEQ ID NO: 1638597 - RNA, 18 nt, Human
auuguaagcaugcacaaa

SEQ ID NO: 1638598 - RNA, 15 nt, Human
auuguaauuauaucu

SEQ ID NO: 1638599 - RNA, 17 nt, Human
auuguaauuauaucuga

SEQ ID NO: 1638600 - RNA, 16 nt, Human
auuguaauuauaucug

SEQ ID NO: 1638601 - RNA, 16 nt, Human
auuguugucugcaacu

SEQ ID NO: 1638602 - RNA, 15 nt, Human
auuguuuaaaaucau

SEQ ID NO: 1638603 - RNA, 16 nt, Human
auuucuauauuuucau

SEQ ID NO: 1638604 - RNA, 15 nt, Human
auuucuauauuuuca

SEQ ID NO: 1638605 - RNA, 14 nt, Human
auuucuaugaaaua

SEQ ID NO: 1638606 - RNA, 18 nt, Human
auuucuauauuuucauuc

SEQ ID NO: 1638607 - RNA, 17 nt, Human
auuucuauauuuucauu

SEQ ID NO: 1638608 - RNA, 20 nt, Human
auuucauaccuaucaucuua

SEQ ID NO: 1638609 - RNA, 22 nt, Human
auuucuaugcugaguuugugcu

SEQ ID NO: 1638610 - RNA, 21 nt, Human
auuucuaugcugaguuugugc

SEQ ID NO: 1638611 - RNA, 19 nt, Human
auuucuaugcugaguuugu

SEQ ID NO: 1638612 - RNA, 19 nt, Human
auuucuauauuuucauucu

SEQ ID NO: 1638613 - RNA, 16 nt, Human
auuuaauaaaugugcc

SEQ ID NO: 1638614 - RNA, 21 nt, Human
auuuaaugaaagacuguacaa

SEQ ID NO: 1638615 - RNA, 20 nt, Human
auuuaaugaaagacuguaca

SEQ ID NO: 1638616 - RNA, 16 nt, Human
auuuaaugaaagacug

SEQ ID NO: 1638617 - RNA, 13 nt, Human
auuuaauaauuau

SEQ ID NO: 1638618 - RNA, 22 nt, Human
auuuaugcauauuauuuuaugu

SEQ ID NO: 1638619 - RNA, 16 nt, Human
auuuaugcauauuauu

SEQ ID NO: 1638620 - RNA, 22 nt, Human
auuaugaauuacauuuguauaa

SEQ ID NO: 1638621 - RNA, 20 nt, Human
auuaugaauuacauuuguau

SEQ ID NO: 1638622 - RNA, 19 nt, Human
auuaugaauuacauuugua

SEQ ID NO: 1638623 - RNA, 20 nt, Human
auuaguacuccccuccuuga

SEQ ID NO: 1638624 - RNA, 19 nt, Human
auuaaaugcccagccccuu

SEQ ID NO: 1638625 - RNA, 17 nt, Human
auuaaaugcccagcccc

SEQ ID NO: 1638626 - RNA, 11 nt, Human
auuaaauuaug

SEQ ID NO: 1638627 - RNA, 16 nt, Human
auuaggauuucaugau

SEQ ID NO: 1638628 - RNA, 14 nt, Human
auuaggauuucaug

SEQ ID NO: 1638629 - RNA, 18 nt, Human
auucaacagguuuuccug

SEQ ID NO: 1638630 - RNA, 16 nt, Human
auucaaaugucuauaa

SEQ ID NO: 1638631 - RNA, 12 nt, Human
auuauguaaauc

SEQ ID NO: 1638632 - RNA, 15 nt, Human
auucuugcaaaguau

SEQ ID NO: 1638633 - RNA, 16 nt, Human
auucuugcaaaguauc

SEQ ID NO: 1638634 - RNA, 14 nt, Human
auucuugcaaagua

SEQ ID NO: 1638635 - RNA, 22 nt, Human
auucuucuguacgucugacagg

SEQ ID NO: 1638636 - RNA, 20 nt, Human
auucuucugcuucagccucc

SEQ ID NO: 1638637 - RNA, 19 nt, Human
auucuucugcuucagccuc

SEQ ID NO: 1638638 - RNA, 19 nt, Human
auucucuaguuugauuaaa

SEQ ID NO: 1638639 - RNA, 18 nt, Human
auucuccuuguguuacua

SEQ ID NO: 1638640 - RNA, 19 nt, Human
auucuccuuguguuacuaa

SEQ ID NO: 1638641 - RNA, 21 nt, Human
auucuccuuguguuacuaagu

SEQ ID NO: 1638642 - RNA, 22 nt, Human
auucuccuuguguuacuaaguu

SEQ ID NO: 1638643 - RNA, 17 nt, Human
auucucuaguuugauua

SEQ ID NO: 1638644 - RNA, 18 nt, Human
auucucuaguuugauuaa

SEQ ID NO: 1638645 - RNA, 15 nt, Human
auuccugcauuugug

SEQ ID NO: 1638646 - RNA, 18 nt, Human
auuccugcauuugugaaa

SEQ ID NO: 1638647 - RNA, 19 nt, Human
caagacccaaaaggcagaa

SEQ ID NO: 1638648 - RNA, 20 nt, Human
caagaauuucuaggacugaa

SEQ ID NO: 1638649 - RNA, 17 nt, Human
caagaccacguuucuaa

SEQ ID NO: 1638650 - RNA, 18 nt, Human
caagaccacguuucuaaa

SEQ ID NO: 1638651 - RNA, 14 nt, Human
caacucuccuccag

SEQ ID NO: 1638652 - RNA, 22 nt, Human
caagaauugaagcaggacuaaa

SEQ ID NO: 1638653 - RNA, 18 nt, Human
caacucaccccagcccca

SEQ ID NO: 1638654 - RNA, 17 nt, Human
caacucauauuuucaug

SEQ ID NO: 1638655 - RNA, 18 nt, Human
caacuaauuuuuguauuu

SEQ ID NO: 1638656 - RNA, 22 nt, Human
caaagcagugcaugcugucccu

SEQ ID NO: 1638657 - RNA, 18 nt, Human
caaagauauuuugcuuug

SEQ ID NO: 1638658 - RNA, 21 nt, Human
caaagcagugcaugcuguccc

SEQ ID NO: 1638659 - RNA, 18 nt, Human
caaagcagugcaugcugu

SEQ ID NO: 1638660 - RNA, 14 nt, Human
caaagauauuuugc

SEQ ID NO: 1638661 - RNA, 16 nt, Human
caaagauauuuugcuu

SEQ ID NO: 1638662 - RNA, 19 nt, Human
caaaguaucccuacuguaa

SEQ ID NO: 1638663 - RNA, 21 nt, Human
caaaguaucccuacuguaauu

SEQ ID NO: 1638664 - RNA, 22 nt, Human
caaaguagaagucuuagaugua

SEQ ID NO: 1638665 - RNA, 22 nt, Human
caaagguaaaucagacuaugaa

SEQ ID NO: 1638666 - RNA, 14 nt, Human
caaagguaaaucag

SEQ ID NO: 1638667 - RNA, 21 nt, Human
caaaucuuaacuugaaggagu

SEQ ID NO: 1638668 - RNA, 23 nt, Human
caaaugcuguaacuuucugaaau

SEQ ID NO: 1638669 - RNA, 22 nt, Human
caacacacagauuugagcucag

SEQ ID NO: 1638670 - RNA, 21 nt, Human
caacacacagauuugagcuca

SEQ ID NO: 1638671 - RNA, 14 nt, Human
auuuuauguugcau

SEQ ID NO: 1638672 - RNA, 21 nt, Human
auuuuauaucaauuuaaaaaa

SEQ ID NO: 1638673 - RNA, 19 nt, Human
auuuuagggguagcauuug

SEQ ID NO: 1638674 - RNA, 16 nt, Human
auuuuuaagugcugca

SEQ ID NO: 1638675 - RNA, 18 nt, Human
auuuuuaagugcugcauu

SEQ ID NO: 1638676 - RNA, 19 nt, Human
auuuuuaagugcugcauuu

SEQ ID NO: 1638677 - RNA, 14 nt, Human
auuuuuagacagag

SEQ ID NO: 1638678 - RNA, 14 nt, Human
caaacccuucagug

SEQ ID NO: 1638679 - RNA, 21 nt, Human
caaaccccgaccaccugccca

SEQ ID NO: 1638680 - RNA, 18 nt, Human
caaaccccgaccaccugc

SEQ ID NO: 1638681 - RNA, 17 nt, Human
caaacagucucaggaaa

SEQ ID NO: 1638682 - RNA, 16 nt, Human
caaacagucucaggaa

SEQ ID NO: 1638683 - RNA, 17 nt, Human
caaacauauauaacaau

SEQ ID NO: 1638684 - RNA, 21 nt, Human
caaaaggauaaugaauacuuu

SEQ ID NO: 1638685 - RNA, 16 nt, Human
auuuuuauauuugaaa

SEQ ID NO: 1638686 - RNA, 15 nt, Human
auuuuuauauuugaa

SEQ ID NO: 1638687 - RNA, 16 nt, Human
auuuuuauauuuacua

SEQ ID NO: 1638688 - RNA, 15 nt, Human
auuuuuauauuuacu

SEQ ID NO: 1638689 - RNA, 16 nt, Human
auuuuuuugagacaga

SEQ ID NO: 1638690 - RNA, 18 nt, Human
auuuuuuuuuccuucagu

SEQ ID NO: 1638691 - RNA, 13 nt, Human
auuuuuuuguugu

SEQ ID NO: 1638692 - RNA, 22 nt, Human
auuuuuuuuuccuucagugccu

SEQ ID NO: 1638693 - RNA, 20 nt, Human
auuuuuuuuuccuucagugc

SEQ ID NO: 1638694 - RNA, 23 nt, Human
auuuuuuuuuccuucagugccuu

SEQ ID NO: 1638695 - RNA, 18 nt, Human
auuuuuuuguuguuuguu

SEQ ID NO: 1638696 - RNA, 15 nt, Human
cacuuaaaaaugguu

SEQ ID NO: 1638697 - RNA, 23 nt, Human
cacuguugcccaggcuggcgugc

SEQ ID NO: 1638698 - RNA, 19 nt, Human
cacuguugcccaggcuggc

SEQ ID NO: 1638699 - RNA, 18 nt, Human
cacuguugcccaggcugg

SEQ ID NO: 1638700 - RNA, 20 nt, Human
cacugggcuuggggaccaga

SEQ ID NO: 1638701 - RNA, 13 nt, Human
cacugggcuucua

SEQ ID NO: 1638702 - RNA, 19 nt, Human
cacugggagaaaugaaaaa

SEQ ID NO: 1638703 - RNA, 14 nt, Human
cacugcagccucaa

SEQ ID NO: 1638704 - RNA, 19 nt, Human
cacugcagccucaaccucc

SEQ ID NO: 1638705 - RNA, 23 nt, Human
cacugcagccucaaccuccuggg

SEQ ID NO: 1638706 - RNA, 22 nt, Human
cacugcagccucaaccuccugg

SEQ ID NO: 1638707 - RNA, 21 nt, Human
cacugcagccucaaccuccug

SEQ ID NO: 1638708 - RNA, 20 nt, Human
cacugcagccucaaccuccu

SEQ ID NO: 1638709 - RNA, 17 nt, Human
cacugccaugccagcuu

SEQ ID NO: 1638710 - RNA, 17 nt, Human
cacuuguguuuugcaag

SEQ ID NO: 1638711 - RNA, 18 nt, Human
cacuuguguuaugaagca

SEQ ID NO: 1638712 - RNA, 19 nt, Human
cacuuguugauuaauggaa

SEQ ID NO: 1638713 - RNA, 17 nt, Human
cacuuucuagccagagg

SEQ ID NO: 1638714 - RNA, 16 nt, Human
cacuuucuagccagag

SEQ ID NO: 1638715 - RNA, 18 nt, Human
cacuuucuagccagagga

SEQ ID NO: 1638716 - RNA, 13 nt, Human
cacuuucuagcca

SEQ ID NO: 1638717 - RNA, 18 nt, Human
cagaacagugauuaccag

SEQ ID NO: 1638718 - RNA, 19 nt, Human
cagaaguuucucagcuccc

SEQ ID NO: 1638719 - RNA, 15 nt, Human
cagaaguuucucagc

SEQ ID NO: 1638720 - RNA, 16 nt, Human
cagaaguuucugccgc

SEQ ID NO: 1638721 - RNA, 14 nt, Human
cagaaguuucugcc

SEQ ID NO: 1638722 - RNA, 17 nt, Human
cagaacagugauuacca

SEQ ID NO: 1638723 - RNA, 12 nt, Human
cagaacagugau

SEQ ID NO: 1638724 - RNA, 11 nt, Human
cagaacaguga

SEQ ID NO: 1638725 - RNA, 16 nt, Human
cagaaauguacagcaa

SEQ ID NO: 1638726 - RNA, 17 nt, Human
cagaaauguguuaucac

SEQ ID NO: 1638727 - RNA, 12 nt, Human
cacuccagccug

SEQ ID NO: 1638728 - RNA, 13 nt, Human
cacuccagccuga

SEQ ID NO: 1638729 - RNA, 21 nt, Human
cacuacauucuguuaaucauu

SEQ ID NO: 1638730 - RNA, 21 nt, Human
cacuacauuauaaaugucucu

SEQ ID NO: 1638731 - RNA, 16 nt, Human
cacuacauucuguuaa

SEQ ID NO: 1638732 - RNA, 17 nt, Human
cacuacauucuguuaau

SEQ ID NO: 1638733 - RNA, 23 nt, Human
cacuccagccugagcgacaguga

SEQ ID NO: 1638734 - RNA, 14 nt, Human
cacuccagccuggg

SEQ ID NO: 1638735 - RNA, 13 nt, Human
cacuccagccugg

SEQ ID NO: 1638736 - RNA, 13 nt, Human
cacggccaggcca

SEQ ID NO: 1638737 - RNA, 12 nt, Human
cacggccaggcc

SEQ ID NO: 1638738 - RNA, 14 nt, Human
cacggcucacugca

SEQ ID NO: 1638739 - RNA, 15 nt, Human
cacggcucacugcag

SEQ ID NO: 1638740 - RNA, 22 nt, Human
cacucuuauugcccacgcugga

SEQ ID NO: 1638741 - RNA, 21 nt, Human
cacucuuauugcccacgcugg

SEQ ID NO: 1638742 - RNA, 20 nt, Human
cacucuuauugcccacgcug

SEQ ID NO: 1638743 - RNA, 16 nt, Human
caccuuggcugcaggg

SEQ ID NO: 1638744 - RNA, 15 nt, Human
caccuuggcugcagg

SEQ ID NO: 1638745 - RNA, 18 nt, Human
caccuuggcugcagggag

SEQ ID NO: 1638746 - RNA, 23 nt, Human
caccuuuauucuggcagaggagg

SEQ ID NO: 1638747 - RNA, 13 nt, Human
caccugcccaacc

SEQ ID NO: 1638748 - RNA, 19 nt, Human
caccugcccaaccugcucu

SEQ ID NO: 1638749 - RNA, 18 nt, Human
caccugcccaaccugcuc

SEQ ID NO: 1638750 - RNA, 14 nt, Human
caccuuucccaucu

SEQ ID NO: 1638751 - RNA, 14 nt, Human
caccuuugaagaag

SEQ ID NO: 1638752 - RNA, 12 nt, Human
caccucagccuc

SEQ ID NO: 1638753 - RNA, 12 nt, Human
caccuacugagu

SEQ ID NO: 1638754 - RNA, 23 nt, Human
caauaaaauccauacauuugugu

SEQ ID NO: 1638755 - RNA, 20 nt, Human
caauaaaauccauacauuug

SEQ ID NO: 1638756 - RNA, 21 nt, Human
caagucagucauucagauaug

SEQ ID NO: 1638757 - RNA, 15 nt, Human
caaggcucugagcaa

SEQ ID NO: 1638758 - RNA, 20 nt, Human
caaggccaaaggaagcacau

SEQ ID NO: 1638759 - RNA, 19 nt, Human
caaggccaaaggaagcaca

SEQ ID NO: 1638760 - RNA, 21 nt, Human
caaggccaaaggaagcacaug

SEQ ID NO: 1638761 - RNA, 18 nt, Human
caaggcaaggcugucaau

SEQ ID NO: 1638762 - RNA, 17 nt, Human
caaggcaaggcugucaa

SEQ ID NO: 1638763 - RNA, 15 nt, Human
caauaaaauggguuu

SEQ ID NO: 1638764 - RNA, 20 nt, Human
caauaaaaucuugaaaaugc

SEQ ID NO: 1638765 - RNA, 21 nt, Human
cacaagcuccaagcucccagg

SEQ ID NO: 1638766 - RNA, 20 nt, Human
cacaagcuccaagcucccag

SEQ ID NO: 1638767 - RNA, 21 nt, Human
caaugcuggcuguuggcuggg

SEQ ID NO: 1638768 - RNA, 20 nt, Human
caaugcuggcuguuggcugg

SEQ ID NO: 1638769 - RNA, 13 nt, Human
caaugcuggcugu

SEQ ID NO: 1638770 - RNA, 23 nt, Human
caaucccaccaacccucagagcc

SEQ ID NO: 1638771 - RNA, 22 nt, Human
caaucccaccaacccucagagc

SEQ ID NO: 1638772 - RNA, 17 nt, Human
caaucccaccaacccuc

SEQ ID NO: 1638773 - RNA, 16 nt, Human
caaucccaccaacccu

SEQ ID NO: 1638774 - RNA, 19 nt, Human
cacaagcuccaagcuccca

SEQ ID NO: 1638775 - RNA, 18 nt, Human
cacaagcuccaagcuccc

SEQ ID NO: 1638776 - RNA, 20 nt, Human
cacaagagcccaggccuccu

SEQ ID NO: 1638777 - RNA, 19 nt, Human
cacaagagcccaggccucc

SEQ ID NO: 1638778 - RNA, 18 nt, Human
cacaagagcccaggccuc

SEQ ID NO: 1638779 - RNA, 15 nt, Human
caaugggagcucaug

SEQ ID NO: 1638780 - RNA, 17 nt, Human
cacagacccugcccugu

SEQ ID NO: 1638781 - RNA, 16 nt, Human
cacagacccugcccug

SEQ ID NO: 1638782 - RNA, 14 nt, Human
cacagacccugccc

SEQ ID NO: 1638783 - RNA, 14 nt, Human
cacagcucuguccu

SEQ ID NO: 1638784 - RNA, 11 nt, Human
cacagcucugu

SEQ ID NO: 1638785 - RNA, 18 nt, Human
cacagacccugcccugug

SEQ ID NO: 1638786 - RNA, 19 nt, Human
cacagcucuguccugggag

SEQ ID NO: 1638787 - RNA, 18 nt, Human
cacagcucuguccuggga

SEQ ID NO: 1638788 - RNA, 16 nt, Human
cacagcucuguccugg

SEQ ID NO: 1638789 - RNA, 15 nt, Human
cacagcucuguccug

SEQ ID NO: 1638790 - RNA, 15 nt, Human
cacagcucuucucca

SEQ ID NO: 1638791 - RNA, 14 nt, Human
cacagcucuucucc

SEQ ID NO: 1638792 - RNA, 17 nt, Human
cacagcucuucuccagg

SEQ ID NO: 1638793 - RNA, 18 nt, Human
cacagcucuucuccaggc

SEQ ID NO: 1638794 - RNA, 12 nt, Human
cacacauuuuuu

SEQ ID NO: 1638795 - RNA, 16 nt, Human
cacacauuuuuuaaau

SEQ ID NO: 1638796 - RNA, 19 nt, Human
cacacauuuuuuaaaugca

SEQ ID NO: 1638797 - RNA, 20 nt, Human
cacacauuuuuuaaaugcac

SEQ ID NO: 1638798 - RNA, 10 nt, Human
cacacauuuu

SEQ ID NO: 1638799 - RNA, 11 nt, Human
cacacauuuuu

SEQ ID NO: 1638800 - RNA, 13 nt, Human
cacagaacccuug

SEQ ID NO: 1638801 - RNA, 23 nt, Human
cacagaaaagaaaguucaugcuu

SEQ ID NO: 1638802 - RNA, 16 nt, Human
cacccaggagccccga

SEQ ID NO: 1638803 - RNA, 18 nt, Human
cacccaccucagccuccc

SEQ ID NO: 1638804 - RNA, 16 nt, Human
caccagccccagugcc

SEQ ID NO: 1638805 - RNA, 13 nt, Human
caccagccccagu

SEQ ID NO: 1638806 - RNA, 17 nt, Human
cacccaccucagccucc

SEQ ID NO: 1638807 - RNA, 13 nt, Human
caccagggaaggg

SEQ ID NO: 1638808 - RNA, 21 nt, Human
caccagggaaggggacaagga

SEQ ID NO: 1638809 - RNA, 18 nt, Human
caccagggaaggggacaa

SEQ ID NO: 1638810 - RNA, 14 nt, Human
caccaacgucugug

SEQ ID NO: 1638811 - RNA, 13 nt, Human
caccaacccucag

SEQ ID NO: 1638812 - RNA, 16 nt, Human
caccaacgucugugcc

SEQ ID NO: 1638813 - RNA, 17 nt, Human
caccaacauacucccau

SEQ ID NO: 1638814 - RNA, 17 nt, Human
cacauuuuauuuuauua

SEQ ID NO: 1638815 - RNA, 19 nt, Human
cacauuuuauuuuauuaug

SEQ ID NO: 1638816 - RNA, 20 nt, Human
cacauuuuauuuuauuaugc

SEQ ID NO: 1638817 - RNA, 21 nt, Human
cacauuuuauuuuauuaugca

SEQ ID NO: 1638818 - RNA, 17 nt, Human
ccugucucuacuaaaaa

SEQ ID NO: 1638819 - RNA, 22 nt, Human
ccugguuuccugcccugggagg

SEQ ID NO: 1638820 - RNA, 15 nt, Human
ccuggauggggcugc

SEQ ID NO: 1638821 - RNA, 18 nt, Human
ccuggauggggcugcacc

SEQ ID NO: 1638822 - RNA, 17 nt, Human
ccuggauggggcugcac

SEQ ID NO: 1638823 - RNA, 18 nt, Human
ccuggccccucagggucc

SEQ ID NO: 1638824 - RNA, 21 nt, Human
ccuggccccucagggucccug

SEQ ID NO: 1638825 - RNA, 20 nt, Human
ccuggccccucagggucccu

SEQ ID NO: 1638826 - RNA, 15 nt, Human
ccuggggagaaagua

SEQ ID NO: 1638827 - RNA, 18 nt, Human
ccuggggaaccugacccc

SEQ ID NO: 1638828 - RNA, 13 nt, Human
ccugguguggaag

SEQ ID NO: 1638829 - RNA, 21 nt, Human
ccugguuuccugcccugggag

SEQ ID NO: 1638830 - RNA, 20 nt, Human
ccugguuuccugcccuggga

SEQ ID NO: 1638831 - RNA, 19 nt, Human
ccugguuuccugcccuggg

SEQ ID NO: 1638832 - RNA, 18 nt, Human
ccugguuuccugcccugg

SEQ ID NO: 1638833 - RNA, 19 nt, Human
ccugguggcagugggagcu

SEQ ID NO: 1638834 - RNA, 18 nt, Human
ccugguggcagugggagc

SEQ ID NO: 1638835 - RNA, 20 nt, Human
ccugguggcagugggagcug

SEQ ID NO: 1638836 - RNA, 13 nt, Human
ccugcaggcagcc

SEQ ID NO: 1638837 - RNA, 12 nt, Human
ccugcaggcagc

SEQ ID NO: 1638838 - RNA, 14 nt, Human
ccugcaggcagcca

SEQ ID NO: 1638839 - RNA, 15 nt, Human
ccugcaggcagccag

SEQ ID NO: 1638840 - RNA, 18 nt, Human
ccugaccccucauagccc

SEQ ID NO: 1638841 - RNA, 19 nt, Human
ccucuuucccucccuuccu

SEQ ID NO: 1638842 - RNA, 15 nt, Human
ccucuuugagugaag

SEQ ID NO: 1638843 - RNA, 22 nt, Human
ccucuugccacugccucuuccu

SEQ ID NO: 1638844 - RNA, 23 nt, Human
ccucuugccacugccucuuccuc

SEQ ID NO: 1638845 - RNA, 17 nt, Human
ccugcccaccuggccuc

SEQ ID NO: 1638846 - RNA, 15 nt, Human
ccugcccaccuggcc

SEQ ID NO: 1638847 - RNA, 19 nt, Human
ccugcccaggccccugcca

SEQ ID NO: 1638848 - RNA, 19 nt, Human
ccugcccaccuggccucug

SEQ ID NO: 1638849 - RNA, 18 nt, Human
ccugcccaccuggccucu

SEQ ID NO: 1638850 - RNA, 22 nt, Human
ccugcccaggccccugccaccc

SEQ ID NO: 1638851 - RNA, 21 nt, Human
ccugcccaggccccugccacc

SEQ ID NO: 1638852 - RNA, 15 nt, Human
ccugccucagccucc

SEQ ID NO: 1638853 - RNA, 16 nt, Human
ccugccucagccuccc

SEQ ID NO: 1638854 - RNA, 15 nt, Human
ccugccucucugcag

SEQ ID NO: 1638855 - RNA, 14 nt, Human
ccugccucucugca

SEQ ID NO: 1638856 - RNA, 20 nt, Human
ccugcugagucccaggcuga

SEQ ID NO: 1638857 - RNA, 19 nt, Human
ccugcugagucccaggcug

SEQ ID NO: 1638858 - RNA, 18 nt, Human
ccugcugagucccaggcu

SEQ ID NO: 1638859 - RNA, 13 nt, Human
ccugccucucugc

SEQ ID NO: 1638860 - RNA, 17 nt, Human
ccugccucagccucccg

SEQ ID NO: 1638861 - RNA, 16 nt, Human
ccucccuucucuucac

SEQ ID NO: 1638862 - RNA, 20 nt, Human
ccucccuuggggccuaugca

SEQ ID NO: 1638863 - RNA, 14 nt, Human
ccuccgccucuugg

SEQ ID NO: 1638864 - RNA, 14 nt, Human
ccucggagaagagc

SEQ ID NO: 1638865 - RNA, 12 nt, Human
ccucggagaaga

SEQ ID NO: 1638866 - RNA, 20 nt, Human
ccucggacuuagcugggaga

SEQ ID NO: 1638867 - RNA, 19 nt, Human
ccucggacuuagcugggag

SEQ ID NO: 1638868 - RNA, 18 nt, Human
ccuccuuuucacaguucu

SEQ ID NO: 1638869 - RNA, 23 nt, Human
ccuccuuugugaggaagccgcug

SEQ ID NO: 1638870 - RNA, 19 nt, Human
ccuccuaucagaaguuucu

SEQ ID NO: 1638871 - RNA, 19 nt, Human
ccuccaagaccuucuccuu

SEQ ID NO: 1638872 - RNA, 17 nt, Human
ccuccaagaccuucucc

SEQ ID NO: 1638873 - RNA, 16 nt, Human
ccuccaagaccuucuc

SEQ ID NO: 1638874 - RNA, 12 nt, Human
ccucccaucacc

SEQ ID NO: 1638875 - RNA, 20 nt, Human
ccuccaagaccuucuccuuc

SEQ ID NO: 1638876 - RNA, 17 nt, Human
ccucccaucacccgcua

SEQ ID NO: 1638877 - RNA, 18 nt, Human
ccucaggcaggugggaug

SEQ ID NO: 1638878 - RNA, 12 nt, Human
ccucaggcaggu

SEQ ID NO: 1638879 - RNA, 10 nt, Human
ccucaggccu

SEQ ID NO: 1638880 - RNA, 21 nt, Human
ccucauuccaccuucccaugc

SEQ ID NO: 1638881 - RNA, 20 nt, Human
ccucaagugauucuccugcc

SEQ ID NO: 1638882 - RNA, 16 nt, Human
ccucaaccuccugggc

SEQ ID NO: 1638883 - RNA, 23 nt, Human
ccucaagugauucuccugccuca

SEQ ID NO: 1638884 - RNA, 23 nt, Human
ccucaacucuccuccagagucag

SEQ ID NO: 1638885 - RNA, 21 nt, Human
ccucaacucuccuccagaguc

SEQ ID NO: 1638886 - RNA, 15 nt, Human
ccucaaccuccuggg

SEQ ID NO: 1638887 - RNA, 19 nt, Human
ccucaacucuccuccagag

SEQ ID NO: 1638888 - RNA, 16 nt, Human
ccucaacaccucugca

SEQ ID NO: 1638889 - RNA, 12 nt, Human
ccgacagccugg

SEQ ID NO: 1638890 - RNA, 14 nt, Human
ccgacagccuggca

SEQ ID NO: 1638891 - RNA, 13 nt, Human
ccgacagccuggc

SEQ ID NO: 1638892 - RNA, 22 nt, Human
ccgacagccuggcacagggcag

SEQ ID NO: 1638893 - RNA, 15 nt, Human
ccgacagccuggcac

SEQ ID NO: 1638894 - RNA, 23 nt, Human
cccuuuuuuggcugcugaaggcu

SEQ ID NO: 1638895 - RNA, 22 nt, Human
cccuuuuuuggcugcugaaggc

SEQ ID NO: 1638896 - RNA, 21 nt, Human
cccuuuuuuggcugcugaagg

SEQ ID NO: 1638897 - RNA, 19 nt, Human
cccuucucuccagccccug

SEQ ID NO: 1638898 - RNA, 14 nt, Human
cccuucucuccagc

SEQ ID NO: 1638899 - RNA, 15 nt, Human
cccugugauggggcc

SEQ ID NO: 1638900 - RNA, 23 nt, Human
cccugugaguacuacaguccucc

SEQ ID NO: 1638901 - RNA, 21 nt, Human
cccugugaguacuacaguccu

SEQ ID NO: 1638902 - RNA, 14 nt, Human
cccuccuuucacca

SEQ ID NO: 1638903 - RNA, 15 nt, Human
cccugugggccccca

SEQ ID NO: 1638904 - RNA, 23 nt, Human
ccgcagcccugcagagggcacag

SEQ ID NO: 1638905 - RNA, 18 nt, Human
ccgcagcccugcagaggg

SEQ ID NO: 1638906 - RNA, 14 nt, Human
ccgcagcccugcag

SEQ ID NO: 1638907 - RNA, 18 nt, Human
ccggccaccugcggugcu

SEQ ID NO: 1638908 - RNA, 18 nt, Human
ccggcaggguccuagaaa

SEQ ID NO: 1638909 - RNA, 17 nt, Human
ccggccaccugcggugc

SEQ ID NO: 1638910 - RNA, 14 nt, Human
ccgucccccucugg

SEQ ID NO: 1638911 - RNA, 19 nt, Human
ccuagccuuagaagucaca

SEQ ID NO: 1638912 - RNA, 23 nt, Human
ccuagccugugccucugggacug

SEQ ID NO: 1638913 - RNA, 22 nt, Human
ccuagccuuagaagucacacag

SEQ ID NO: 1638914 - RNA, 13 nt, Human
ccuaauaaagcug

SEQ ID NO: 1638915 - RNA, 12 nt, Human
ccuaauaaagcu

SEQ ID NO: 1638916 - RNA, 13 nt, Human
ccuaauuccacag

SEQ ID NO: 1638917 - RNA, 21 nt, Human
ccuaaugcgcaggcuggcccu

SEQ ID NO: 1638918 - RNA, 13 nt, Human
ccccugcacucca

SEQ ID NO: 1638919 - RNA, 21 nt, Human
ccccugcaaagcccagcuuga

SEQ ID NO: 1638920 - RNA, 17 nt, Human
ccccugaauuuaaauag

SEQ ID NO: 1638921 - RNA, 20 nt, Human
ccccugcaaagcccagcuug

SEQ ID NO: 1638922 - RNA, 18 nt, Human
ccccugcaaagcccagcu

SEQ ID NO: 1638923 - RNA, 15 nt, Human
ccccugacaacacuc

SEQ ID NO: 1638924 - RNA, 13 nt, Human
ccccugaauuuaa

SEQ ID NO: 1638925 - RNA, 18 nt, Human
ccccucuggcuccagcug

SEQ ID NO: 1638926 - RNA, 16 nt, Human
ccccucuggcuccagc

SEQ ID NO: 1638927 - RNA, 16 nt, Human
ccccugccacccuggg

SEQ ID NO: 1638928 - RNA, 14 nt, Human
ccccugccacccug

SEQ ID NO: 1638929 - RNA, 23 nt, Human
ccccucugcccugcgggucacag

SEQ ID NO: 1638930 - RNA, 20 nt, Human
ccccucugcccugcggguca

SEQ ID NO: 1638931 - RNA, 15 nt, Human
ccccucugcccugcg

SEQ ID NO: 1638932 - RNA, 16 nt, Human
cccggccccugcuggu

SEQ ID NO: 1638933 - RNA, 15 nt, Human
cccggccccugcugg

SEQ ID NO: 1638934 - RNA, 15 nt, Human
cccgggaagggggcu

SEQ ID NO: 1638935 - RNA, 11 nt, Human
cccggcuccag

SEQ ID NO: 1638936 - RNA, 20 nt, Human
cccggcuaauuuuuguauuu

SEQ ID NO: 1638937 - RNA, 22 nt, Human
cccgaauagcugggacuacagg

SEQ ID NO: 1638938 - RNA, 18 nt, Human
cccgaauagcugggacua

SEQ ID NO: 1638939 - RNA, 17 nt, Human
cccgaauagcugggacu

SEQ ID NO: 1638940 - RNA, 16 nt, Human
cccgaauagcugggac

SEQ ID NO: 1638941 - RNA, 16 nt, Human
ccccuucugacccaug

SEQ ID NO: 1638942 - RNA, 14 nt, Human
ccccuucugaccca

SEQ ID NO: 1638943 - RNA, 13 nt, Human
ccccuucugaccc

SEQ ID NO: 1638944 - RNA, 21 nt, Human
cccgggaagggggcugggaca

SEQ ID NO: 1638945 - RNA, 18 nt, Human
cccgggaagggggcuggg

SEQ ID NO: 1638946 - RNA, 16 nt, Human
cccucaacaccucugc

SEQ ID NO: 1638947 - RNA, 22 nt, Human
cccgggaagggggcugggacau

SEQ ID NO: 1638948 - RNA, 20 nt, Human
cccucaacucuccuccagag

SEQ ID NO: 1638949 - RNA, 16 nt, Human
cccucacccuggggcu

SEQ ID NO: 1638950 - RNA, 16 nt, Human
cccucaacucuccucc

SEQ ID NO: 1638951 - RNA, 13 nt, Human
cccuccucugcuu

SEQ ID NO: 1638952 - RNA, 22 nt, Human
cccuccucugcuugccaucccu

SEQ ID NO: 1638953 - RNA, 15 nt, Human
cccuccucucugccc

SEQ ID NO: 1638954 - RNA, 16 nt, Human
cccuccucucugcccu

SEQ ID NO: 1638955 - RNA, 14 nt, Human
ccccgcacugggcu

SEQ ID NO: 1638956 - RNA, 15 nt, Human
cccauucugccugcc

SEQ ID NO: 1638957 - RNA, 14 nt, Human
cccauucugccugc

SEQ ID NO: 1638958 - RNA, 19 nt, Human
cccauucugccugcccagg

SEQ ID NO: 1638959 - RNA, 20 nt, Human
cccauucugccugcccaggc

SEQ ID NO: 1638960 - RNA, 15 nt, Human
cccauuugcuccuuu

SEQ ID NO: 1638961 - RNA, 10 nt, Human
ccccagcccc

SEQ ID NO: 1638962 - RNA, 20 nt, Human
ccccagauugcaacaggcug

SEQ ID NO: 1638963 - RNA, 15 nt, Human
ccccagauugcaaca

SEQ ID NO: 1638964 - RNA, 17 nt, Human
ccccagaggcuggguga

SEQ ID NO: 1638965 - RNA, 22 nt, Human
cccauccucuguacagagccca

SEQ ID NO: 1638966 - RNA, 21 nt, Human
cccauccucuguacagagccc

SEQ ID NO: 1638967 - RNA, 18 nt, Human
cccaggaaaggcuccagg

SEQ ID NO: 1638968 - RNA, 17 nt, Human
cccaggaaaggcuccag

SEQ ID NO: 1638969 - RNA, 17 nt, Human
cccaggcugagccucag

SEQ ID NO: 1638970 - RNA, 16 nt, Human
cccaggcugagccuca

SEQ ID NO: 1638971 - RNA, 22 nt, Human
cccaggcuuagucacugagaca

SEQ ID NO: 1638972 - RNA, 18 nt, Human
cccaggcugagccucagu

SEQ ID NO: 1638973 - RNA, 13 nt, Human
cccaggcuggagu

SEQ ID NO: 1638974 - RNA, 16 nt, Human
cccacuggacucaccu

SEQ ID NO: 1638975 - RNA, 16 nt, Human
cccaggaaaggcucca

SEQ ID NO: 1638976 - RNA, 20 nt, Human
cccagcuggggccaggcugg

SEQ ID NO: 1638977 - RNA, 14 nt, Human
ccaucccucccucc

SEQ ID NO: 1638978 - RNA, 15 nt, Human
ccaucccucccucca

SEQ ID NO: 1638979 - RNA, 20 nt, Human
ccaugaggaacaaggcaagg

SEQ ID NO: 1638980 - RNA, 23 nt, Human
ccaugaggaacaaggcaaggcug

SEQ ID NO: 1638981 - RNA, 18 nt, Human
ccaugaguccccuguuug

SEQ ID NO: 1638982 - RNA, 13 nt, Human
ccaugaguccccu

SEQ ID NO: 1638983 - RNA, 12 nt, Human
ccaugucgccuc

SEQ ID NO: 1638984 - RNA, 19 nt, Human
ccaugucgccucugcauuc

SEQ ID NO: 1638985 - RNA, 17 nt, Human
ccaugucgccucugcau

SEQ ID NO: 1638986 - RNA, 16 nt, Human
ccaugucgccucugca

SEQ ID NO: 1638987 - RNA, 15 nt, Human
ccaugucgccucugc

SEQ ID NO: 1638988 - RNA, 13 nt, Human
ccaucccucccuc

SEQ ID NO: 1638989 - RNA, 21 nt, Human
ccaucccauaugccugggcag

SEQ ID NO: 1638990 - RNA, 20 nt, Human
ccaucccauaugccugggca

SEQ ID NO: 1638991 - RNA, 19 nt, Human
ccaucccauaugccugggc

SEQ ID NO: 1638992 - RNA, 20 nt, Human
ccaucccaaacccuucagug

SEQ ID NO: 1638993 - RNA, 19 nt, Human
ccauccagguucagcuugu

SEQ ID NO: 1638994 - RNA, 18 nt, Human
ccauccagguucagcuug

SEQ ID NO: 1638995 - RNA, 21 nt, Human
ccauaaucuggacuccucugu

SEQ ID NO: 1638996 - RNA, 14 nt, Human
ccauaaucuggacu

SEQ ID NO: 1638997 - RNA, 20 nt, Human
ccaguuggucccccuuccau

SEQ ID NO: 1638998 - RNA, 18 nt, Human
ccaguuggucccccuucc

SEQ ID NO: 1638999 - RNA, 13 nt, Human
ccaguuggucccc

SEQ ID NO: 1639000 - RNA, 13 nt, Human
cccaacuccagaa

SEQ ID NO: 1639001 - RNA, 20 nt, Human
cccaacuaauuuuuguauuu

SEQ ID NO: 1639002 - RNA, 20 nt, Human
cccaacucaccccagcccca

SEQ ID NO: 1639003 - RNA, 17 nt, Human
cccaacucaccccagcc

SEQ ID NO: 1639004 - RNA, 15 nt, Human
cccaagcucugcucc

SEQ ID NO: 1639005 - RNA, 14 nt, Human
cccaagcucugcuc

SEQ ID NO: 1639006 - RNA, 13 nt, Human
cccaagcucugcu

SEQ ID NO: 1639007 - RNA, 23 nt, Human
cccacugcuuuuggucuguguga

SEQ ID NO: 1639008 - RNA, 13 nt, Human
cccacucccugca

SEQ ID NO: 1639009 - RNA, 12 nt, Human
cccacccccacc

SEQ ID NO: 1639010 - RNA, 16 nt, Human
cccaacucaccccagc

SEQ ID NO: 1639011 - RNA, 15 nt, Human
cccaacucaccccag

SEQ ID NO: 1639012 - RNA, 22 nt, Human
ccauuucauuugugccagaaug

SEQ ID NO: 1639013 - RNA, 21 nt, Human
ccauuucauuugugccagaau

SEQ ID NO: 1639014 - RNA, 17 nt, Human
ccagccccagugcccac

SEQ ID NO: 1639015 - RNA, 14 nt, Human
ccagcagagcaccu

SEQ ID NO: 1639016 - RNA, 13 nt, Human
ccagcagagcacc

SEQ ID NO: 1639017 - RNA, 12 nt, Human
ccagcagagcac

SEQ ID NO: 1639018 - RNA, 17 nt, Human
ccagccccauccucugu

SEQ ID NO: 1639019 - RNA, 15 nt, Human
ccagccccauccucu

SEQ ID NO: 1639020 - RNA, 18 nt, Human
ccagccccauccucugua

SEQ ID NO: 1639021 - RNA, 12 nt, Human
ccagcagaaaug

SEQ ID NO: 1639022 - RNA, 24 nt, Human
ccagccccuucugacccaugcugc

SEQ ID NO: 1639023 - RNA, 23 nt, Human
ccagccccuucugacccaugcug

SEQ ID NO: 1639024 - RNA, 16 nt, Human
ccaggcuggcgugcag

SEQ ID NO: 1639025 - RNA, 12 nt, Human
ccaggcuggcgu

SEQ ID NO: 1639026 - RNA, 21 nt, Human
ccaggggaaaaucagccugcu

SEQ ID NO: 1639027 - RNA, 14 nt, Human
ccaggcaggucuug

SEQ ID NO: 1639028 - RNA, 12 nt, Human
ccaggcaggucu

SEQ ID NO: 1639029 - RNA, 23 nt, Human
ccaggcaggucuugaacuccugg

SEQ ID NO: 1639030 - RNA, 21 nt, Human
ccaggcugcucuugaacuccu

SEQ ID NO: 1639031 - RNA, 18 nt, Human
ccagucccccugccccag

SEQ ID NO: 1639032 - RNA, 23 nt, Human
cucagaaaacaaggaugaauuaa

SEQ ID NO: 1639033 - RNA, 19 nt, Human
cucagaaaacaaggaugaa

SEQ ID NO: 1639034 - RNA, 18 nt, Human
cucacuuguuuuauuuaa

SEQ ID NO: 1639035 - RNA, 17 nt, Human
cucaccucucccuugga

SEQ ID NO: 1639036 - RNA, 16 nt, Human
cucaccucucccuugg

SEQ ID NO: 1639037 - RNA, 15 nt, Human
cucaccucucccuug

SEQ ID NO: 1639038 - RNA, 14 nt, Human
cucaccucucccuu

SEQ ID NO: 1639039 - RNA, 13 nt, Human
cucaccucucccu

SEQ ID NO: 1639040 - RNA, 16 nt, Human
cucaccucccccaucu

SEQ ID NO: 1639041 - RNA, 13 nt, Human
cucaccuccugcu

SEQ ID NO: 1639042 - RNA, 16 nt, Human
cucaccugccccucaa

SEQ ID NO: 1639043 - RNA, 14 nt, Human
cucaccugccccuc

SEQ ID NO: 1639044 - RNA, 18 nt, Human
cucaccugccccucaacu

SEQ ID NO: 1639045 - RNA, 13 nt, Human
cucaccugccccu

SEQ ID NO: 1639046 - RNA, 14 nt, Human
cucaccuccugcug

SEQ ID NO: 1639047 - RNA, 14 nt, Human
cucacccuggggcu

SEQ ID NO: 1639048 - RNA, 23 nt, Human
cuaugucauuugcuggagcucug

SEQ ID NO: 1639049 - RNA, 15 nt, Human
cuauguugcccaggc

SEQ ID NO: 1639050 - RNA, 22 nt, Human
cuauguguagggcgggaggaug

SEQ ID NO: 1639051 - RNA, 20 nt, Human
cuaucucccccagccccauc

SEQ ID NO: 1639052 - RNA, 19 nt, Human
cuauguaucaaugaguaac

SEQ ID NO: 1639053 - RNA, 13 nt, Human
cucaaaacugcac

SEQ ID NO: 1639054 - RNA, 17 nt, Human
cucaaaacugcacuguc

SEQ ID NO: 1639055 - RNA, 17 nt, Human
cuauguugcccaggcag

SEQ ID NO: 1639056 - RNA, 16 nt, Human
cuauguugcccaggca

SEQ ID NO: 1639057 - RNA, 18 nt, Human
cucaaaaaaagaaaaaga

SEQ ID NO: 1639058 - RNA, 21 nt, Human
cucacacaugagcaucaggcc

SEQ ID NO: 1639059 - RNA, 14 nt, Human
cucacacaugagca

SEQ ID NO: 1639060 - RNA, 12 nt, Human
cucaaauaacua

SEQ ID NO: 1639061 - RNA, 14 nt, Human
cucacaaaggaugc

SEQ ID NO: 1639062 - RNA, 16 nt, Human
cuagcauacguacaca

SEQ ID NO: 1639063 - RNA, 18 nt, Human
cuagcauacguacacauu

SEQ ID NO: 1639064 - RNA, 19 nt, Human
cuagcauacguacacauuu

SEQ ID NO: 1639065 - RNA, 20 nt, Human
cuagcauacguacacauuuu

SEQ ID NO: 1639066 - RNA, 21 nt, Human
cuagacccacuggacucaccu

SEQ ID NO: 1639067 - RNA, 13 nt, Human
cuaggccuggcca

SEQ ID NO: 1639068 - RNA, 17 nt, Human
cuagccagaggagagag

SEQ ID NO: 1639069 - RNA, 19 nt, Human
cuagccagaggagagagga

SEQ ID NO: 1639070 - RNA, 19 nt, Human
cuaggccuggccagaugca

SEQ ID NO: 1639071 - RNA, 18 nt, Human
cuaggccuggccagaugc

SEQ ID NO: 1639072 - RNA, 15 nt, Human
cuaggccuggccaga

SEQ ID NO: 1639073 - RNA, 14 nt, Human
cuaggccuggccag

SEQ ID NO: 1639074 - RNA, 13 nt, Human
cuaggccugggga

SEQ ID NO: 1639075 - RNA, 12 nt, Human
cuaggccugggg

SEQ ID NO: 1639076 - RNA, 20 nt, Human
cuaguuugauuaaauucuug

SEQ ID NO: 1639077 - RNA, 21 nt, Human
cuaguuugauuaaauucuugc

SEQ ID NO: 1639078 - RNA, 17 nt, Human
cuaguuugauuaaauuc

SEQ ID NO: 1639079 - RNA, 19 nt, Human
cuaguuugauuaaauucuu

SEQ ID NO: 1639080 - RNA, 15 nt, Human
cuaggguccugggga

SEQ ID NO: 1639081 - RNA, 14 nt, Human
cuaggguccugggg

SEQ ID NO: 1639082 - RNA, 13 nt, Human
cuaggguccuggg

SEQ ID NO: 1639083 - RNA, 14 nt, Human
cuagggaagauaau

SEQ ID NO: 1639084 - RNA, 23 nt, Human
cuaccugaggggccucuuauggg

SEQ ID NO: 1639085 - RNA, 19 nt, Human
cuaccugaggggccucuua

SEQ ID NO: 1639086 - RNA, 16 nt, Human
cuaccugaggggccuc

SEQ ID NO: 1639087 - RNA, 18 nt, Human
cuaccuuccaguuccuca

SEQ ID NO: 1639088 - RNA, 20 nt, Human
cuacuagggaaaugccuuug

SEQ ID NO: 1639089 - RNA, 14 nt, Human
cuaacuggacuggu

SEQ ID NO: 1639090 - RNA, 22 nt, Human
cguguccccuauccuacuuccc

SEQ ID NO: 1639091 - RNA, 13 nt, Human
cguuaaaauacca

SEQ ID NO: 1639092 - RNA, 16 nt, Human
cuaaacuuuucugaua

SEQ ID NO: 1639093 - RNA, 14 nt, Human
cguuaccaggcagg

SEQ ID NO: 1639094 - RNA, 22 nt, Human
cuaaaguguauuuuuuuacuaa

SEQ ID NO: 1639095 - RNA, 17 nt, Human
cuaaaggcuaccuuugu

SEQ ID NO: 1639096 - RNA, 19 nt, Human
cuaaaggcuaccuuuguau

SEQ ID NO: 1639097 - RNA, 14 nt, Human
cuaaagcugccagc

SEQ ID NO: 1639098 - RNA, 21 nt, Human
cuaaagaagguuucagaaaga

SEQ ID NO: 1639099 - RNA, 15 nt, Human
cuaaaggcuaccuuu

SEQ ID NO: 1639100 - RNA, 16 nt, Human
cuaaaggcuaccuuug

SEQ ID NO: 1639101 - RNA, 15 nt, Human
cuaaagcugccagcc

SEQ ID NO: 1639102 - RNA, 24 nt, Human
cggagaagagcuguucacagccag

SEQ ID NO: 1639103 - RNA, 23 nt, Human
cggagaagagcuguucacagcca

SEQ ID NO: 1639104 - RNA, 15 nt, Human
cggagacggaguccc

SEQ ID NO: 1639105 - RNA, 15 nt, Human
cgguuuauauaagcu

SEQ ID NO: 1639106 - RNA, 13 nt, Human
cgguguggagaag

SEQ ID NO: 1639107 - RNA, 13 nt, Human
cguacacauuuua

SEQ ID NO: 1639108 - RNA, 16 nt, Human
cguacacauuuuauuu

SEQ ID NO: 1639109 - RNA, 17 nt, Human
cgcugccccuggcagcc

SEQ ID NO: 1639110 - RNA, 16 nt, Human
cgcugccccuggcagc

SEQ ID NO: 1639111 - RNA, 23 nt, Human
cgcuggaccuugaacuggguacu

SEQ ID NO: 1639112 - RNA, 19 nt, Human
cgcuggaccuugaacuggg

SEQ ID NO: 1639113 - RNA, 18 nt, Human
cgcugccccuggcagccc

SEQ ID NO: 1639114 - RNA, 16 nt, Human
cgccuuaaggauguuc

SEQ ID NO: 1639115 - RNA, 20 nt, Human
cgcuggggccaguugguccc

SEQ ID NO: 1639116 - RNA, 17 nt, Human
cgcuggggccaguuggu

SEQ ID NO: 1639117 - RNA, 13 nt, Human
cgaguagcuggga

SEQ ID NO: 1639118 - RNA, 19 nt, Human
cgaguagcugagauuauag

SEQ ID NO: 1639119 - RNA, 21 nt, Human
cgauacaccgggccuggagaa

SEQ ID NO: 1639120 - RNA, 20 nt, Human
cgauacaccgggccuggaga

SEQ ID NO: 1639121 - RNA, 18 nt, Human
cgauacaccgggccugga

SEQ ID NO: 1639122 - RNA, 17 nt, Human
cugaaagaggaaugaag

SEQ ID NO: 1639123 - RNA, 13 nt, Human
cugaaagaggaau

SEQ ID NO: 1639124 - RNA, 24 nt, Human
cucuugauucauaaugacuuaagc

SEQ ID NO: 1639125 - RNA, 14 nt, Human
cucuugagccuggg

SEQ ID NO: 1639126 - RNA, 16 nt, Human
cucuugagccugggag

SEQ ID NO: 1639127 - RNA, 15 nt, Human
cucuugagccuggga

SEQ ID NO: 1639128 - RNA, 22 nt, Human
cucuugauucauaaugacuuaa

SEQ ID NO: 1639129 - RNA, 19 nt, Human
cucugcacaagcugcaccc

SEQ ID NO: 1639130 - RNA, 18 nt, Human
cucugcacaagcugcacc

SEQ ID NO: 1639131 - RNA, 17 nt, Human
cucugcacaagcugcac

SEQ ID NO: 1639132 - RNA, 17 nt, Human
cugaccccucauagccc

SEQ ID NO: 1639133 - RNA, 21 nt, Human
cugaccccucauagcccucac

SEQ ID NO: 1639134 - RNA, 20 nt, Human
cugaccccucauagcccuca

SEQ ID NO: 1639135 - RNA, 23 nt, Human
cugacacacagcucuguccuggg

SEQ ID NO: 1639136 - RNA, 22 nt, Human
cugacacacagcucuguccugg

SEQ ID NO: 1639137 - RNA, 21 nt, Human
cugacacacagcucuguccug

SEQ ID NO: 1639138 - RNA, 20 nt, Human
cugacacacagcucuguccu

SEQ ID NO: 1639139 - RNA, 19 nt, Human
cugacacacagcucugucc

SEQ ID NO: 1639140 - RNA, 18 nt, Human
cugacacacagcucuguc

SEQ ID NO: 1639141 - RNA, 17 nt, Human
cugacacacagcucugu

SEQ ID NO: 1639142 - RNA, 16 nt, Human
cugacacacagcucug

SEQ ID NO: 1639143 - RNA, 15 nt, Human
cugacacacagcucu

SEQ ID NO: 1639144 - RNA, 13 nt, Human
cugacacacagcu

SEQ ID NO: 1639145 - RNA, 14 nt, Human
cugaaaauguaugu

SEQ ID NO: 1639146 - RNA, 23 nt, Human
cugaggaauccagacccggcugc

SEQ ID NO: 1639147 - RNA, 16 nt, Human
cugaggaauucuguau

SEQ ID NO: 1639148 - RNA, 15 nt, Human
cugaggaauucugua

SEQ ID NO: 1639149 - RNA, 19 nt, Human
cugaggaauucuguauaga

SEQ ID NO: 1639150 - RNA, 18 nt, Human
cugaggaauucuguauag

SEQ ID NO: 1639151 - RNA, 14 nt, Human
cugaggggccucuu

SEQ ID NO: 1639152 - RNA, 22 nt, Human
cugaggugggaggaucucuuga

SEQ ID NO: 1639153 - RNA, 13 nt, Human
cugaggugggagg

SEQ ID NO: 1639154 - RNA, 14 nt, Human
cugaggaauccaga

SEQ ID NO: 1639155 - RNA, 22 nt, Human
cugagcuugcagagaugaggcc

SEQ ID NO: 1639156 - RNA, 22 nt, Human
cugagcugggaugauuggaggg

SEQ ID NO: 1639157 - RNA, 12 nt, Human
cugagcugggau

SEQ ID NO: 1639158 - RNA, 23 nt, Human
cugacccugcuucaaauauuucc

SEQ ID NO: 1639159 - RNA, 19 nt, Human
cugacccugcuucaaauau

SEQ ID NO: 1639160 - RNA, 18 nt, Human
cugaucucucgugauuga

SEQ ID NO: 1639161 - RNA, 17 nt, Human
cugaucucucgugauug

SEQ ID NO: 1639162 - RNA, 19 nt, Human
cuccccaugauguuuagaa

SEQ ID NO: 1639163 - RNA, 16 nt, Human
cucccucccucuuucc

SEQ ID NO: 1639164 - RNA, 15 nt, Human
cucccucuuucccuc

SEQ ID NO: 1639165 - RNA, 19 nt, Human
cucccucuuucccucccuu

SEQ ID NO: 1639166 - RNA, 21 nt, Human
cuccgcuuucuacccagcgag

SEQ ID NO: 1639167 - RNA, 22 nt, Human
cuccgcuuucuacccagcgagc

SEQ ID NO: 1639168 - RNA, 23 nt, Human
cuccgcuuucuacccagcgagcc

SEQ ID NO: 1639169 - RNA, 14 nt, Human
cuccgucaacucau

SEQ ID NO: 1639170 - RNA, 17 nt, Human
cucagaaucucaaauaa

SEQ ID NO: 1639171 - RNA, 16 nt, Human
cucagaaucucaaaua

SEQ ID NO: 1639172 - RNA, 11 nt, Human
cuccagacaca

SEQ ID NO: 1639173 - RNA, 22 nt, Human
cuccagaauuucccaaagcagu

SEQ ID NO: 1639174 - RNA, 16 nt, Human
cuccagacacaugucc

SEQ ID NO: 1639175 - RNA, 23 nt, Human
cuccaggcuguaucccaugagcc

SEQ ID NO: 1639176 - RNA, 22 nt, Human
cuccaggugcacaagcuccaag

SEQ ID NO: 1639177 - RNA, 20 nt, Human
cuccaggugcacaagcucca

SEQ ID NO: 1639178 - RNA, 19 nt, Human
cuccaggugcacaagcucc

SEQ ID NO: 1639179 - RNA, 18 nt, Human
cuccaggugcacaagcuc

SEQ ID NO: 1639180 - RNA, 17 nt, Human
cucccaccucagccucc

SEQ ID NO: 1639181 - RNA, 16 nt, Human
cucccaccucagccuc

SEQ ID NO: 1639182 - RNA, 14 nt, Human
cucccaccucagcc

SEQ ID NO: 1639183 - RNA, 17 nt, Human
cucucuggccuucggcc

SEQ ID NO: 1639184 - RNA, 10 nt, Human
cucuccucug

SEQ ID NO: 1639185 - RNA, 22 nt, Human
cucucuggccuucggccuccau

SEQ ID NO: 1639186 - RNA, 19 nt, Human
cucucuggccuucggccuc

SEQ ID NO: 1639187 - RNA, 20 nt, Human
cucuccuccuuuucacaguu

SEQ ID NO: 1639188 - RNA, 13 nt, Human
cucuccuccuuuu

SEQ ID NO: 1639189 - RNA, 16 nt, Human
cucuccgaccagacac

SEQ ID NO: 1639190 - RNA, 21 nt, Human
cucuccgaccagacaccuuga

SEQ ID NO: 1639191 - RNA, 13 nt, Human
cucucccuuggau

SEQ ID NO: 1639192 - RNA, 16 nt, Human
cucugcacaagcugca

SEQ ID NO: 1639193 - RNA, 11 nt, Human
cucggugccuu

SEQ ID NO: 1639194 - RNA, 18 nt, Human
cucguauaugucucaggu

SEQ ID NO: 1639195 - RNA, 20 nt, Human
cucguauaugucucaggucc

SEQ ID NO: 1639196 - RNA, 17 nt, Human
cucgaacuccugaccuu

SEQ ID NO: 1639197 - RNA, 16 nt, Human
cucgaacuccugaccu

SEQ ID NO: 1639198 - RNA, 24 nt, Human
cuccuuuucacaguucucuccuuc

SEQ ID NO: 1639199 - RNA, 13 nt, Human
cucgaacuccuga

SEQ ID NO: 1639200 - RNA, 17 nt, Human
cuccuuuagcgcccagu

SEQ ID NO: 1639201 - RNA, 16 nt, Human
cuccuuuagcgcccag

SEQ ID NO: 1639202 - RNA, 22 nt, Human
cuccuagccugugccucuggga

SEQ ID NO: 1639203 - RNA, 22 nt, Human
cuccuuuagcgcccaguugggu

SEQ ID NO: 1639204 - RNA, 13 nt, Human
cuccuuucucuuu

SEQ ID NO: 1639205 - RNA, 14 nt, Human
gugaagugaagaca

SEQ ID NO: 1639206 - RNA, 23 nt, Human
aacuaucucauuuccaagcaagu

SEQ ID NO: 1639207 - RNA, 20 nt, Human
aacuaucucauuuccaagca

SEQ ID NO: 1639208 - RNA, 13 nt, Human
aacuauauuguuu

SEQ ID NO: 1639209 - RNA, 23 nt, Human
gugaagacaaugacuuacuguac

SEQ ID NO: 1639210 - RNA, 19 nt, Human
gugacagaggcagccccau

SEQ ID NO: 1639211 - RNA, 18 nt, Human
gugacagaggcagcccca

SEQ ID NO: 1639212 - RNA, 16 nt, Human
gugacagaggcagccc

SEQ ID NO: 1639213 - RNA, 14 nt, Human
gugacaugucuuuu

SEQ ID NO: 1639214 - RNA, 23 nt, Human
gugacagaggcagccccauucug

SEQ ID NO: 1639215 - RNA, 21 nt, Human
gugaccagcaccaucucuccu

SEQ ID NO: 1639216 - RNA, 18 nt, Human
gugaccagcaccaucucu

SEQ ID NO: 1639217 - RNA, 18 nt, Human
gugaccauguuuuguuua

SEQ ID NO: 1639218 - RNA, 17 nt, Human
gugaccaaugaugguca

SEQ ID NO: 1639219 - RNA, 20 nt, Human
aacugaaaucauacuucuua

SEQ ID NO: 1639220 - RNA, 14 nt, Human
aacugaacucugac

SEQ ID NO: 1639221 - RNA, 21 nt, Human
gugaguacuacaguccuccca

SEQ ID NO: 1639222 - RNA, 19 nt, Human
gugaguacuacaguccucc

SEQ ID NO: 1639223 - RNA, 17 nt, Human
gugaguccuggcauggg

SEQ ID NO: 1639224 - RNA, 15 nt, Human
gugagucgaggacag

SEQ ID NO: 1639225 - RNA, 20 nt, Human
gugaguccuggcaugggaau

SEQ ID NO: 1639226 - RNA, 16 nt, Human
gugagaggggaacaga

SEQ ID NO: 1639227 - RNA, 13 nt, Human
gugagagcugggu

SEQ ID NO: 1639228 - RNA, 17 nt, Human
gugaguacuacaguccu

SEQ ID NO: 1639229 - RNA, 15 nt, Human
gugagcaggcuguga

SEQ ID NO: 1639230 - RNA, 21 nt, Human
gugagcacuaaggugugcucu

SEQ ID NO: 1639231 - RNA, 12 nt, Human
gugaccccaggu

SEQ ID NO: 1639232 - RNA, 12 nt, Human
gugagagcuggg

SEQ ID NO: 1639233 - RNA, 23 nt, Human
gucugacaggcaaugcuggcugu

SEQ ID NO: 1639234 - RNA, 22 nt, Human
gucugacaggcaaugcuggcug

SEQ ID NO: 1639235 - RNA, 21 nt, Human
gucugacaggcaaugcuggcu

SEQ ID NO: 1639236 - RNA, 19 nt, Human
gucugaagucacugcacag

SEQ ID NO: 1639237 - RNA, 17 nt, Human
gucugaagucacugcac

SEQ ID NO: 1639238 - RNA, 19 nt, Human
gucucuugguccugcugca

SEQ ID NO: 1639239 - RNA, 18 nt, Human
gucucuugguccugcugc

SEQ ID NO: 1639240 - RNA, 20 nt, Human
gucucuugguccugcugcag

SEQ ID NO: 1639241 - RNA, 17 nt, Human
gucucuugguccugcug

SEQ ID NO: 1639242 - RNA, 23 nt, Human
gucucuuuaaugucacaggcagg

SEQ ID NO: 1639243 - RNA, 22 nt, Human
gucucuuuaaugucacaggcag

SEQ ID NO: 1639244 - RNA, 19 nt, Human
gucugaaggcuggguucug

SEQ ID NO: 1639245 - RNA, 16 nt, Human
gucugaagucacugca

SEQ ID NO: 1639246 - RNA, 20 nt, Human
gucucuuuaaugucacaggc

SEQ ID NO: 1639247 - RNA, 19 nt, Human
gucucuuuaaugucacagg

SEQ ID NO: 1639248 - RNA, 18 nt, Human
gucucuuuaaugucacag

SEQ ID NO: 1639249 - RNA, 16 nt, Human
gucuucaguaagccgu

SEQ ID NO: 1639250 - RNA, 16 nt, Human
gucuuuguacagacaa

SEQ ID NO: 1639251 - RNA, 15 nt, Human
gucuuuguacagaca

SEQ ID NO: 1639252 - RNA, 18 nt, Human
aaccugauugugucucuu

SEQ ID NO: 1639253 - RNA, 19 nt, Human
aaccugauugugucucuug

SEQ ID NO: 1639254 - RNA, 17 nt, Human
aaccuguucugcuuucc

SEQ ID NO: 1639255 - RNA, 13 nt, Human
aaccuguucugcu

SEQ ID NO: 1639256 - RNA, 23 nt, Human
aacguggcugcuucaaggauccu

SEQ ID NO: 1639257 - RNA, 20 nt, Human
aacauacucccaucugugaa

SEQ ID NO: 1639258 - RNA, 18 nt, Human
aacauacucccaucugug

SEQ ID NO: 1639259 - RNA, 14 nt, Human
aacauaaaucugug

SEQ ID NO: 1639260 - RNA, 12 nt, Human
aacauaaaucug

SEQ ID NO: 1639261 - RNA, 15 nt, Human
aacauaaaucuguga

SEQ ID NO: 1639262 - RNA, 16 nt, Human
aacauauauaacaaug

SEQ ID NO: 1639263 - RNA, 14 nt, Human
aacaucaacaucuu

SEQ ID NO: 1639264 - RNA, 22 nt, Human
aacauguuuuucuucucccuca

SEQ ID NO: 1639265 - RNA, 23 nt, Human
aacauguuaaaccaugggauaaa

SEQ ID NO: 1639266 - RNA, 19 nt, Human
aacagauuauuaccuuaca

SEQ ID NO: 1639267 - RNA, 16 nt, Human
aacagauaaauaguuu

SEQ ID NO: 1639268 - RNA, 15 nt, Human
guccuacccacccuc

SEQ ID NO: 1639269 - RNA, 13 nt, Human
guccuacccaccc

SEQ ID NO: 1639270 - RNA, 17 nt, Human
aacagucucaggaaauc

SEQ ID NO: 1639271 - RNA, 19 nt, Human
aacagguuuuccugaagaa

SEQ ID NO: 1639272 - RNA, 19 nt, Human
aacagucucaggaaaucaa

SEQ ID NO: 1639273 - RNA, 23 nt, Human
guccccuguuuguuucugaaagg

SEQ ID NO: 1639274 - RNA, 16 nt, Human
guccccgcacugggcu

SEQ ID NO: 1639275 - RNA, 15 nt, Human
guccccgcacugggc

SEQ ID NO: 1639276 - RNA, 13 nt, Human
gucccccugacaa

SEQ ID NO: 1639277 - RNA, 18 nt, Human
gucccccugacaacacuc

SEQ ID NO: 1639278 - RNA, 21 nt, Human
guccgaaagggacuuggaagc

SEQ ID NO: 1639279 - RNA, 13 nt, Human
gucccuuuuccuu

SEQ ID NO: 1639280 - RNA, 22 nt, Human
guccgaaagggacuuggaagcu

SEQ ID NO: 1639281 - RNA, 13 nt, Human
guccgagcuuuga

SEQ ID NO: 1639282 - RNA, 18 nt, Human
gucccaccuuggcugcag

SEQ ID NO: 1639283 - RNA, 17 nt, Human
gucccaccuuggcugca

SEQ ID NO: 1639284 - RNA, 20 nt, Human
gucccaccuuggcugcaggg

SEQ ID NO: 1639285 - RNA, 19 nt, Human
gucccaccuuggcugcagg

SEQ ID NO: 1639286 - RNA, 14 nt, Human
gucccccucuggcu

SEQ ID NO: 1639287 - RNA, 12 nt, Human
gucccccucugg

SEQ ID NO: 1639288 - RNA, 22 nt, Human
guagcucuaggagggcuggcaa

SEQ ID NO: 1639289 - RNA, 23 nt, Human
gucucaguccaugaagauguaga

SEQ ID NO: 1639290 - RNA, 16 nt, Human
gucucaggucccugca

SEQ ID NO: 1639291 - RNA, 15 nt, Human
gucucaggucccugc

SEQ ID NO: 1639292 - RNA, 15 nt, Human
gucuaugggacucaa

SEQ ID NO: 1639293 - RNA, 14 nt, Human
gucuaugggacuca

SEQ ID NO: 1639294 - RNA, 22 nt, Human
gucucaaacucuugaccucagg

SEQ ID NO: 1639295 - RNA, 17 nt, Human
gucucaagagggcacug

SEQ ID NO: 1639296 - RNA, 15 nt, Human
gucucaagagggcac

SEQ ID NO: 1639297 - RNA, 22 nt, Human
gucucaagagggcacugguggc

SEQ ID NO: 1639298 - RNA, 20 nt, Human
gucucaagagggcacuggug

SEQ ID NO: 1639299 - RNA, 16 nt, Human
aacauuuugucauaua

SEQ ID NO: 1639300 - RNA, 13 nt, Human
gucuccauguuug

SEQ ID NO: 1639301 - RNA, 18 nt, Human
aaccacaucuugcucugc

SEQ ID NO: 1639302 - RNA, 13 nt, Human
aaccacaucuugc

SEQ ID NO: 1639303 - RNA, 16 nt, Human
aaccaagccguggcuu

SEQ ID NO: 1639304 - RNA, 16 nt, Human
guccugcugcaguugc

SEQ ID NO: 1639305 - RNA, 13 nt, Human
guccugcugcagu

SEQ ID NO: 1639306 - RNA, 17 nt, Human
guccugcugcaguugcc

SEQ ID NO: 1639307 - RNA, 14 nt, Human
gucgaggacaggga

SEQ ID NO: 1639308 - RNA, 14 nt, Human
gucgcccagucugg

SEQ ID NO: 1639309 - RNA, 13 nt, Human
gucgcccagucug

SEQ ID NO: 1639310 - RNA, 14 nt, Human
gucgcccaggcugg

SEQ ID NO: 1639311 - RNA, 20 nt, Human
gucgcccaggcuggagugca

SEQ ID NO: 1639312 - RNA, 15 nt, Human
gucgcccaggcugga

SEQ ID NO: 1639313 - RNA, 23 nt, Human
gucgcccagucuggaaugcagug

SEQ ID NO: 1639314 - RNA, 14 nt, Human
gucgcccuggacug

SEQ ID NO: 1639315 - RNA, 20 nt, Human
gucuaccugaggggccucuu

SEQ ID NO: 1639316 - RNA, 18 nt, Human
gucgcccuggacugugug

SEQ ID NO: 1639317 - RNA, 16 nt, Human
aagcaaguauuagaau

SEQ ID NO: 1639318 - RNA, 20 nt, Human
gugucccaaaaagaaaggag

SEQ ID NO: 1639319 - RNA, 19 nt, Human
gugucuugcaauggcagcc

SEQ ID NO: 1639320 - RNA, 19 nt, Human
gugucuuuaaaugcugcuu

SEQ ID NO: 1639321 - RNA, 18 nt, Human
gugucuuuaaaugcugcu

SEQ ID NO: 1639322 - RNA, 21 nt, Human
gugucuugcaauggcagccuu

SEQ ID NO: 1639323 - RNA, 18 nt, Human
gugugagucaccaagccc

SEQ ID NO: 1639324 - RNA, 13 nt, Human
gugugagucacca

SEQ ID NO: 1639325 - RNA, 15 nt, Human
gugugguguuuccug

SEQ ID NO: 1639326 - RNA, 20 nt, Human
gugugagucaccaagcccag

SEQ ID NO: 1639327 - RNA, 19 nt, Human
gugugguguuuccuggcac

SEQ ID NO: 1639328 - RNA, 19 nt, Human
guguguguaugcgugugug

SEQ ID NO: 1639329 - RNA, 14 nt, Human
guguuuaagacauu

SEQ ID NO: 1639330 - RNA, 13 nt, Human
guguuuaagacau

SEQ ID NO: 1639331 - RNA, 23 nt, Human
guguugaaacggaugauuucuau

SEQ ID NO: 1639332 - RNA, 21 nt, Human
guguugaaacggaugauuucu

SEQ ID NO: 1639333 - RNA, 19 nt, Human
aagcaaaauuuuuucucua

SEQ ID NO: 1639334 - RNA, 20 nt, Human
aagcaaaugugaaucauuuu

SEQ ID NO: 1639335 - RNA, 14 nt, Human
aagcaaaugugaau

SEQ ID NO: 1639336 - RNA, 13 nt, Human
aagcaaaugugaa

SEQ ID NO: 1639337 - RNA, 12 nt, Human
aagcaaaugucu

SEQ ID NO: 1639338 - RNA, 22 nt, Human
aagauguagaggagaaacugga

SEQ ID NO: 1639339 - RNA, 18 nt, Human
gugguuauggagagggug

SEQ ID NO: 1639340 - RNA, 19 nt, Human
gugguguuuccuggcacug

SEQ ID NO: 1639341 - RNA, 15 nt, Human
aagauauuuugcuuu

SEQ ID NO: 1639342 - RNA, 19 nt, Human
aagaguaggaagacuuugg

SEQ ID NO: 1639343 - RNA, 18 nt, Human
aagaguaggaagacuuug

SEQ ID NO: 1639344 - RNA, 16 nt, Human
aagaguaggaagacuu

SEQ ID NO: 1639345 - RNA, 17 nt, Human
aagauauuuugcuuugu

SEQ ID NO: 1639346 - RNA, 20 nt, Human
aagauauuuugcuuugugau

SEQ ID NO: 1639347 - RNA, 20 nt, Human
aagaguaggaagacuuugga

SEQ ID NO: 1639348 - RNA, 22 nt, Human
aagauauuuugcuuugugauuu

SEQ ID NO: 1639349 - RNA, 14 nt, Human
aagacuauucaaac

SEQ ID NO: 1639350 - RNA, 23 nt, Human
aagacgcugugcugcccugccca

SEQ ID NO: 1639351 - RNA, 22 nt, Human
aagacgcugugcugcccugccc

SEQ ID NO: 1639352 - RNA, 21 nt, Human
aagacgcugugcugcccugcc

SEQ ID NO: 1639353 - RNA, 12 nt, Human
aagaccagucca

SEQ ID NO: 1639354 - RNA, 23 nt, Human
aagaccccuuaccacugcucuga

SEQ ID NO: 1639355 - RNA, 17 nt, Human
aagacuccaaagaaaug

SEQ ID NO: 1639356 - RNA, 16 nt, Human
aagacuccaaagaaau

SEQ ID NO: 1639357 - RNA, 14 nt, Human
aagacuccaaagaa

SEQ ID NO: 1639358 - RNA, 17 nt, Human
aagacucauucuucugu

SEQ ID NO: 1639359 - RNA, 19 nt, Human
aagagcuguucacagccag

SEQ ID NO: 1639360 - RNA, 16 nt, Human
guggcccgacagccug

SEQ ID NO: 1639361 - RNA, 18 nt, Human
aagagcuguucacagcca

SEQ ID NO: 1639362 - RNA, 19 nt, Human
aagagauugugguuucauu

SEQ ID NO: 1639363 - RNA, 16 nt, Human
aagagauugugguuuc

SEQ ID NO: 1639364 - RNA, 16 nt, Human
aagacuguacaaagua

SEQ ID NO: 1639365 - RNA, 14 nt, Human
aagagcccaggccu

SEQ ID NO: 1639366 - RNA, 12 nt, Human
aagagcccaggc

SEQ ID NO: 1639367 - RNA, 16 nt, Human
aagagcccaggccucc

SEQ ID NO: 1639368 - RNA, 14 nt, Human
guggccucccaacu

SEQ ID NO: 1639369 - RNA, 13 nt, Human
guggccucccaac

SEQ ID NO: 1639370 - RNA, 17 nt, Human
guggcccgacagccugg

SEQ ID NO: 1639371 - RNA, 15 nt, Human
guggccucccaacuc

SEQ ID NO: 1639372 - RNA, 21 nt, Human
guggcuucccgcucagcccuc

SEQ ID NO: 1639373 - RNA, 18 nt, Human
gugggauccuccaggugc

SEQ ID NO: 1639374 - RNA, 15 nt, Human
gugggauccuccagg

SEQ ID NO: 1639375 - RNA, 12 nt, Human
gugggagcugag

SEQ ID NO: 1639376 - RNA, 16 nt, Human
gugguguuuccuggca

SEQ ID NO: 1639377 - RNA, 15 nt, Human
gugguguuuccuggc

SEQ ID NO: 1639378 - RNA, 18 nt, Human
guggggggggugcugggc

SEQ ID NO: 1639379 - RNA, 22 nt, Human
aagaagcaccaaucaugaauua

SEQ ID NO: 1639380 - RNA, 17 nt, Human
aagaagcccaggaaagg

SEQ ID NO: 1639381 - RNA, 16 nt, Human
aagaagcccaggaaag

SEQ ID NO: 1639382 - RNA, 14 nt, Human
aagaagcucucucc

SEQ ID NO: 1639383 - RNA, 15 nt, Human
aagaagcucucuccu

SEQ ID NO: 1639384 - RNA, 13 nt, Human
aagaaaauaucac

SEQ ID NO: 1639385 - RNA, 16 nt, Human
aagaaaauaccaagga

SEQ ID NO: 1639386 - RNA, 22 nt, Human
aagaaaaaggaugcacagaguu

SEQ ID NO: 1639387 - RNA, 19 nt, Human
aagaaaaaggaugcacaga

SEQ ID NO: 1639388 - RNA, 20 nt, Human
aagaaaaaggaugcacagag

SEQ ID NO: 1639389 - RNA, 13 nt, Human
aacuuguuuucug

SEQ ID NO: 1639390 - RNA, 20 nt, Human
aacuuguguaaauacaauuu

SEQ ID NO: 1639391 - RNA, 15 nt, Human
aacuuguguaaauac

SEQ ID NO: 1639392 - RNA, 14 nt, Human
aacuuguguaaaua

SEQ ID NO: 1639393 - RNA, 15 nt, Human
gugccucugggacug

SEQ ID NO: 1639394 - RNA, 16 nt, Human
gugccuggccacgccc

SEQ ID NO: 1639395 - RNA, 23 nt, Human
aacuugguucccauuugcuccuu

SEQ ID NO: 1639396 - RNA, 17 nt, Human
aacuuggcgcugccccu

SEQ ID NO: 1639397 - RNA, 15 nt, Human
aacuuguaaaugugg

SEQ ID NO: 1639398 - RNA, 14 nt, Human
aacuuggcgcugcc

SEQ ID NO: 1639399 - RNA, 17 nt, Human
gugcacacaccagagcc

SEQ ID NO: 1639400 - RNA, 18 nt, Human
gugcacguacacacacau

SEQ ID NO: 1639401 - RNA, 14 nt, Human
gugcacacaccaga

SEQ ID NO: 1639402 - RNA, 12 nt, Human
gugcacacacca

SEQ ID NO: 1639403 - RNA, 14 nt, Human
gugccaagcagagg

SEQ ID NO: 1639404 - RNA, 15 nt, Human
gugcauuuggugguu

SEQ ID NO: 1639405 - RNA, 21 nt, Human
gugcauuugaggucuguucuu

SEQ ID NO: 1639406 - RNA, 22 nt, Human
gugcauuugaggucuguucuuu

SEQ ID NO: 1639407 - RNA, 20 nt, Human
gugcacuaauguguaagaca

SEQ ID NO: 1639408 - RNA, 13 nt, Human
aagaauauuuuaa

SEQ ID NO: 1639409 - RNA, 17 nt, Human
guggcagcugcggucca

SEQ ID NO: 1639410 - RNA, 19 nt, Human
guggcagcugcgguccacc

SEQ ID NO: 1639411 - RNA, 13 nt, Human
aagacccaaaagg

SEQ ID NO: 1639412 - RNA, 16 nt, Human
aagacaaaaagcuacu

SEQ ID NO: 1639413 - RNA, 24 nt, Human
aagaauuucuaggacugaauuaug

SEQ ID NO: 1639414 - RNA, 21 nt, Human
guggauuuaacagaaauguac

SEQ ID NO: 1639415 - RNA, 23 nt, Human
guggauuuaacagaaauguacag

SEQ ID NO: 1639416 - RNA, 14 nt, Human
guggcagcugcggu

SEQ ID NO: 1639417 - RNA, 22 nt, Human
guggcagcucaccucucccuug

SEQ ID NO: 1639418 - RNA, 14 nt, Human
guggcaccagcagc

SEQ ID NO: 1639419 - RNA, 13 nt, Human
guggcaccagcag

SEQ ID NO: 1639420 - RNA, 18 nt, Human
guggcaccagcagccugg

SEQ ID NO: 1639421 - RNA, 20 nt, Human
gugcugcccugcccaccugg

SEQ ID NO: 1639422 - RNA, 19 nt, Human
gugcugcccugcccaccug

SEQ ID NO: 1639423 - RNA, 21 nt, Human
gugcugcccugcccaccuggc

SEQ ID NO: 1639424 - RNA, 23 nt, Human
aagaagguuucagaaagaagugg

SEQ ID NO: 1639425 - RNA, 19 nt, Human
gugcugggccccugccucu

SEQ ID NO: 1639426 - RNA, 22 nt, Human
gugcugggguuaucugaaguca

SEQ ID NO: 1639427 - RNA, 19 nt, Human
gugcugguguaugugugaa

SEQ ID NO: 1639428 - RNA, 16 nt, Human
gugcugggccccugcc

SEQ ID NO: 1639429 - RNA, 24 nt, Human
guggacacagcucuucuccaggcu

SEQ ID NO: 1639430 - RNA, 17 nt, Human
guggacacagcucuucu

SEQ ID NO: 1639431 - RNA, 15 nt, Human
guggacacagcucuu

SEQ ID NO: 1639432 - RNA, 14 nt, Human
guggacacagcucu

SEQ ID NO: 1639433 - RNA, 12 nt, Human
aauaaaaauaau

SEQ ID NO: 1639434 - RNA, 22 nt, Human
aauaaaauccauacauuugugu

SEQ ID NO: 1639435 - RNA, 16 nt, Human
aauaaaaucuugaaaa

SEQ ID NO: 1639436 - RNA, 14 nt, Human
aauaaaguaauuau

SEQ ID NO: 1639437 - RNA, 16 nt, Human
aauaaaguacaagagc

SEQ ID NO: 1639438 - RNA, 14 nt, Human
uaaaguguauuuuu

SEQ ID NO: 1639439 - RNA, 15 nt, Human
uaaaguguauuuuuu

SEQ ID NO: 1639440 - RNA, 19 nt, Human
uaaaguguauuuuuuuacu

SEQ ID NO: 1639441 - RNA, 20 nt, Human
uaaaguguauuuuuuuacua

SEQ ID NO: 1639442 - RNA, 14 nt, Human
aauaaaaaauuaug

SEQ ID NO: 1639443 - RNA, 16 nt, Human
aauaaaaaauuaugac

SEQ ID NO: 1639444 - RNA, 15 nt, Human
aauaaaaaauuauga

SEQ ID NO: 1639445 - RNA, 13 nt, Human
uaaagucaggggu

SEQ ID NO: 1639446 - RNA, 21 nt, Human
aauaaaugugccuucauuuuu

SEQ ID NO: 1639447 - RNA, 12 nt, Human
aauaaaugugcc

SEQ ID NO: 1639448 - RNA, 12 nt, Human
aauaaauuauuu

SEQ ID NO: 1639449 - RNA, 21 nt, Human
aauaaauagcuagacugguga

SEQ ID NO: 1639450 - RNA, 15 nt, Human
aauaacaauaaaaga

SEQ ID NO: 1639451 - RNA, 22 nt, Human
aauaacauguaauuaaguacua

SEQ ID NO: 1639452 - RNA, 19 nt, Human
aauaacauguaauuaagua

SEQ ID NO: 1639453 - RNA, 12 nt, Human
aauaacauguaa

SEQ ID NO: 1639454 - RNA, 15 nt, Human
aauaacuaaaaggua

SEQ ID NO: 1639455 - RNA, 15 nt, Human
aauaaggaaaaguuu

SEQ ID NO: 1639456 - RNA, 13 nt, Human
aauaaggaaaagu

SEQ ID NO: 1639457 - RNA, 22 nt, Human
aauaaggaaaaguuuaauauua

SEQ ID NO: 1639458 - RNA, 19 nt, Human
aauaaggaaaaguuuaaua

SEQ ID NO: 1639459 - RNA, 16 nt, Human
aauaaggaaaaguuua

SEQ ID NO: 1639460 - RNA, 23 nt, Human
aauaauuauaugcuauuucuaua

SEQ ID NO: 1639461 - RNA, 22 nt, Human
aauaauuauaugcuauuucuau

SEQ ID NO: 1639462 - RNA, 21 nt, Human
aauaauuauaugcuauuucua

SEQ ID NO: 1639463 - RNA, 20 nt, Human
aauaauuauaugcuauuucu

SEQ ID NO: 1639464 - RNA, 15 nt, Human
aauaauuauaugcua

SEQ ID NO: 1639465 - RNA, 14 nt, Human
aauaauuauaugcu

SEQ ID NO: 1639466 - RNA, 23 nt, Human
uaaaucccauuauucaaaguugc

SEQ ID NO: 1639467 - RNA, 19 nt, Human
uaaaucuccaaaauaaaac

SEQ ID NO: 1639468 - RNA, 12 nt, Human
uaaauagcuuuu

SEQ ID NO: 1639469 - RNA, 23 nt, Human
uaaauagcuagacuggugacuga

SEQ ID NO: 1639470 - RNA, 20 nt, Human
uaaauaguaaaaauaaaauu

SEQ ID NO: 1639471 - RNA, 19 nt, Human
uaaauaguaaaaauaaaau

SEQ ID NO: 1639472 - RNA, 23 nt, Human
uaaauacaauuuuguuucuguac

SEQ ID NO: 1639473 - RNA, 22 nt, Human
uaaauacaauuuuguuucugua

SEQ ID NO: 1639474 - RNA, 15 nt, Human
uaaauacaauuuugu

SEQ ID NO: 1639475 - RNA, 13 nt, Human
uaaauacaauuuu

SEQ ID NO: 1639476 - RNA, 14 nt, Human
aauacacacucaaa

SEQ ID NO: 1639477 - RNA, 23 nt, Human
aauacaauuuuguuucuguacuu

SEQ ID NO: 1639478 - RNA, 22 nt, Human
aauacaauuuuguuucuguacu

SEQ ID NO: 1639479 - RNA, 15 nt, Human
aauacaccacuacau

SEQ ID NO: 1639480 - RNA, 13 nt, Human
aauacaauuuugu

SEQ ID NO: 1639481 - RNA, 12 nt, Human
aauacaauuuug

SEQ ID NO: 1639482 - RNA, 20 nt, Human
aauacaauuuuguuucugua

SEQ ID NO: 1639483 - RNA, 18 nt, Human
aauacaauuuuguuucug

SEQ ID NO: 1639484 - RNA, 17 nt, Human
aauacaauuuuguuucu

SEQ ID NO: 1639485 - RNA, 15 nt, Human
aauacaauuuuguuu

SEQ ID NO: 1639486 - RNA, 16 nt, Human
aauacaccacuacauu

SEQ ID NO: 1639487 - RNA, 18 nt, Human
aauacaccacuacauucu

SEQ ID NO: 1639488 - RNA, 20 nt, Human
aauacaccacuacauucugu

SEQ ID NO: 1639489 - RNA, 21 nt, Human
aauacaccacuacauucuguu

SEQ ID NO: 1639490 - RNA, 16 nt, Human
uaacaacagcuggugc

SEQ ID NO: 1639491 - RNA, 17 nt, Human
uaacaaugcuguauuuu

SEQ ID NO: 1639492 - RNA, 15 nt, Human
uaacaaugcuguauu

SEQ ID NO: 1639493 - RNA, 13 nt, Human
uaacaagccaccc

SEQ ID NO: 1639494 - RNA, 22 nt, Human
uaacaacuaugauuuggaaaau

SEQ ID NO: 1639495 - RNA, 21 nt, Human
uaacaacuaugauuuggaaaa

SEQ ID NO: 1639496 - RNA, 16 nt, Human
uaacaacuaugauuug

SEQ ID NO: 1639497 - RNA, 17 nt, Human
uaaaugauuucauucaa

SEQ ID NO: 1639498 - RNA, 22 nt, Human
uaaaucuccaaaauaaaacuuu

SEQ ID NO: 1639499 - RNA, 20 nt, Human
uaaaucuccaaaauaaaacu

SEQ ID NO: 1639500 - RNA, 21 nt, Human
uaaaucuccaaaauaaaacuu

SEQ ID NO: 1639501 - RNA, 23 nt, Human
uaaauguuuuuuuuuaaagacuu

SEQ ID NO: 1639502 - RNA, 20 nt, Human
uaaauguuuuuuuuuaaaga

SEQ ID NO: 1639503 - RNA, 18 nt, Human
uaaaccgccaaggcuggg

SEQ ID NO: 1639504 - RNA, 16 nt, Human
uaaaccgccaaggcug

SEQ ID NO: 1639505 - RNA, 22 nt, Human
uaaaccaugggauaaaugccau

SEQ ID NO: 1639506 - RNA, 21 nt, Human
uaaaccaugggauaaaugcca

SEQ ID NO: 1639507 - RNA, 20 nt, Human
uaaaccaugggauaaaugcc

SEQ ID NO: 1639508 - RNA, 18 nt, Human
uaaaccaugggauaaaug

SEQ ID NO: 1639509 - RNA, 17 nt, Human
uaaacgucuuaaauauu

SEQ ID NO: 1639510 - RNA, 13 nt, Human
uaaacgucuuaaa

SEQ ID NO: 1639511 - RNA, 12 nt, Human
uaaacugccccc

SEQ ID NO: 1639512 - RNA, 21 nt, Human
uaaaggcuaccuuuguauucu

SEQ ID NO: 1639513 - RNA, 19 nt, Human
uaaaggcuaccuuuguauu

SEQ ID NO: 1639514 - RNA, 14 nt, Human
uaaagaguguggca

SEQ ID NO: 1639515 - RNA, 18 nt, Human
uaaagaguuaguuugagu

SEQ ID NO: 1639516 - RNA, 16 nt, Human
uaaagacuuuuaugau

SEQ ID NO: 1639517 - RNA, 15 nt, Human
uaaagacaccuacug

SEQ ID NO: 1639518 - RNA, 14 nt, Human
uaaagaagguuuca

SEQ ID NO: 1639519 - RNA, 17 nt, Human
aaguucaugcuuuguuc

SEQ ID NO: 1639520 - RNA, 17 nt, Human
aaguucugcagauaaac

SEQ ID NO: 1639521 - RNA, 21 nt, Human
aaguuuaauauuaaagccaug

SEQ ID NO: 1639522 - RNA, 20 nt, Human
aaguuuaauauuaaagccau

SEQ ID NO: 1639523 - RNA, 19 nt, Human
aaguuuaauauuaaagcca

SEQ ID NO: 1639524 - RNA, 14 nt, Human
aaguuaaauaaauc

SEQ ID NO: 1639525 - RNA, 12 nt, Human
aaguuaaauaaa

SEQ ID NO: 1639526 - RNA, 17 nt, Human
guuuuuuuuuaaagacu

SEQ ID NO: 1639527 - RNA, 19 nt, Human
uaaaauuuuuaaucuuuaa

SEQ ID NO: 1639528 - RNA, 19 nt, Human
uaaaccaaggcuagaacca

SEQ ID NO: 1639529 - RNA, 17 nt, Human
uaaaauuuuuaaucuuu

SEQ ID NO: 1639530 - RNA, 19 nt, Human
uaaaauuaaagcugaaaac

SEQ ID NO: 1639531 - RNA, 18 nt, Human
uaaaauuaaagcugaaaa

SEQ ID NO: 1639532 - RNA, 16 nt, Human
uaaaauuaaagcugaa

SEQ ID NO: 1639533 - RNA, 18 nt, Human
aaguaaaaccacagcagu

SEQ ID NO: 1639534 - RNA, 17 nt, Human
aaguaaaaccacagcag

SEQ ID NO: 1639535 - RNA, 21 nt, Human
aagggugaugggaaagcauug

SEQ ID NO: 1639536 - RNA, 16 nt, Human
aaguaaaaccacagca

SEQ ID NO: 1639537 - RNA, 15 nt, Human
aaguaaaaccacagc

SEQ ID NO: 1639538 - RNA, 14 nt, Human
aaguaaaaccacag

SEQ ID NO: 1639539 - RNA, 13 nt, Human
aagggccuggccu

SEQ ID NO: 1639540 - RNA, 14 nt, Human
aaggcugggggaag

SEQ ID NO: 1639541 - RNA, 16 nt, Human
aaggguaucuggugac

SEQ ID NO: 1639542 - RNA, 19 nt, Human
aaggguaucaggugcugcc

SEQ ID NO: 1639543 - RNA, 14 nt, Human
aaggggcaguggug

SEQ ID NO: 1639544 - RNA, 17 nt, Human
aaggggcaguggugguu

SEQ ID NO: 1639545 - RNA, 13 nt, Human
aagggcccagaga

SEQ ID NO: 1639546 - RNA, 15 nt, Human
aagggcccagagagg

SEQ ID NO: 1639547 - RNA, 19 nt, Human
aaggcugagaggagagaga

SEQ ID NO: 1639548 - RNA, 22 nt, Human
guuuuauaauuuugugaagcaa

SEQ ID NO: 1639549 - RNA, 15 nt, Human
guuuuauaauuuugu

SEQ ID NO: 1639550 - RNA, 18 nt, Human
guuuuacugcagcuuugu

SEQ ID NO: 1639551 - RNA, 16 nt, Human
guuuuacugcagcuuu

SEQ ID NO: 1639552 - RNA, 16 nt, Human
guuuuaagaggcaggg

SEQ ID NO: 1639553 - RNA, 18 nt, Human
guuuuaaggaugcuugua

SEQ ID NO: 1639554 - RNA, 14 nt, Human
guuuuaagaggcag

SEQ ID NO: 1639555 - RNA, 22 nt, Human
guuucuaugacacaugcaaggu

SEQ ID NO: 1639556 - RNA, 14 nt, Human
guuucucagcuccc

SEQ ID NO: 1639557 - RNA, 22 nt, Human
guuucugccgcagcccugcaga

SEQ ID NO: 1639558 - RNA, 10 nt, Human
guuucuguac

SEQ ID NO: 1639559 - RNA, 13 nt, Human
guuugcuaaguga

SEQ ID NO: 1639560 - RNA, 17 nt, Human
guuugccucugccucug

SEQ ID NO: 1639561 - RNA, 19 nt, Human
guuugcaucugaaaauuga

SEQ ID NO: 1639562 - RNA, 15 nt, Human
guuucuguacuuuuu

SEQ ID NO: 1639563 - RNA, 14 nt, Human
aaguauuaagcaua

SEQ ID NO: 1639564 - RNA, 13 nt, Human
aaguauuaagcau

SEQ ID NO: 1639565 - RNA, 21 nt, Human
aaguauguuagugcaaauugu

SEQ ID NO: 1639566 - RNA, 23 nt, Human
aaguauguuagugcaaauuguca

SEQ ID NO: 1639567 - RNA, 23 nt, Human
aaguacuucuccacccugcucuc

SEQ ID NO: 1639568 - RNA, 22 nt, Human
aaguacuucuccacccugcucu

SEQ ID NO: 1639569 - RNA, 22 nt, Human
guuuucugagaaagacuauuca

SEQ ID NO: 1639570 - RNA, 17 nt, Human
guuuucugagaaagacu

SEQ ID NO: 1639571 - RNA, 16 nt, Human
guuuucugagaaagac

SEQ ID NO: 1639572 - RNA, 21 nt, Human
aaguacuucuccacccugcuc

SEQ ID NO: 1639573 - RNA, 15 nt, Human
aaguacuggagaaaa

SEQ ID NO: 1639574 - RNA, 16 nt, Human
aaguacuauguaucaa

SEQ ID NO: 1639575 - RNA, 19 nt, Human
aaguauucuuauuuaauga

SEQ ID NO: 1639576 - RNA, 18 nt, Human
aaguauucuuauuuaaug

SEQ ID NO: 1639577 - RNA, 21 nt, Human
aagucaagugaaaaaggagga

SEQ ID NO: 1639578 - RNA, 24 nt, Human
aagucacacaguauuacuucugcu

SEQ ID NO: 1639579 - RNA, 19 nt, Human
aagucaaggguaggguggg

SEQ ID NO: 1639580 - RNA, 13 nt, Human
aagucacacagug

SEQ ID NO: 1639581 - RNA, 20 nt, Human
aagucacauuccugaacagg

SEQ ID NO: 1639582 - RNA, 12 nt, Human
aagucacugcac

SEQ ID NO: 1639583 - RNA, 14 nt, Human
aagucacugcacag

SEQ ID NO: 1639584 - RNA, 23 nt, Human
guuuuuuuuuaaaaaagaaacau

SEQ ID NO: 1639585 - RNA, 15 nt, Human
guuuuuuuuuaaaga

SEQ ID NO: 1639586 - RNA, 16 nt, Human
guuuuugucuuaaaaa

SEQ ID NO: 1639587 - RNA, 22 nt, Human
aagucuuauauauuguagauaa

SEQ ID NO: 1639588 - RNA, 19 nt, Human
aagucuuagauguauauau

SEQ ID NO: 1639589 - RNA, 18 nt, Human
aagucuuagauguauaua

SEQ ID NO: 1639590 - RNA, 18 nt, Human
guuuuucuaggccugggg

SEQ ID NO: 1639591 - RNA, 13 nt, Human
guguuuauuguca

SEQ ID NO: 1639592 - RNA, 11 nt, Human
aagcucccagg

SEQ ID NO: 1639593 - RNA, 22 nt, Human
guguuuaagacauuuuuggaag

SEQ ID NO: 1639594 - RNA, 22 nt, Human
aagcucccaggcauuccccagg

SEQ ID NO: 1639595 - RNA, 12 nt, Human
aagcucccaggc

SEQ ID NO: 1639596 - RNA, 23 nt, Human
aagcucccaggcauuccccagga

SEQ ID NO: 1639597 - RNA, 16 nt, Human
aaggaaaaaauaacaa

SEQ ID NO: 1639598 - RNA, 19 nt, Human
aaggaaaaaauaacaauga

SEQ ID NO: 1639599 - RNA, 17 nt, Human
guuccccuguucacucu

SEQ ID NO: 1639600 - RNA, 15 nt, Human
guuccccuguucacu

SEQ ID NO: 1639601 - RNA, 16 nt, Human
aagcuuuuaugugaaa

SEQ ID NO: 1639602 - RNA, 18 nt, Human
aagcuguuacugucuuca

SEQ ID NO: 1639603 - RNA, 13 nt, Human
aagcucugcuccu

SEQ ID NO: 1639604 - RNA, 17 nt, Human
aagcucugcuccucucc

SEQ ID NO: 1639605 - RNA, 23 nt, Human
guugauagcacagacccugcccu

SEQ ID NO: 1639606 - RNA, 13 nt, Human
guugaauuuuaca

SEQ ID NO: 1639607 - RNA, 18 nt, Human
guuccccuguucacucua

SEQ ID NO: 1639608 - RNA, 12 nt, Human
guucucugcccu

SEQ ID NO: 1639609 - RNA, 13 nt, Human
guucucugcccuc

SEQ ID NO: 1639610 - RNA, 11 nt, Human
guucucugccc

SEQ ID NO: 1639611 - RNA, 16 nt, Human
guucucugaggacacu

SEQ ID NO: 1639612 - RNA, 15 nt, Human
aaggaaacccagcuc

SEQ ID NO: 1639613 - RNA, 16 nt, Human
aaggaaacccagcucu

SEQ ID NO: 1639614 - RNA, 18 nt, Human
aaggagauuuacaacugg

SEQ ID NO: 1639615 - RNA, 22 nt, Human
aaggagcaagucagaauagaaa

SEQ ID NO: 1639616 - RNA, 22 nt, Human
aaggauccugagccagauuuca

SEQ ID NO: 1639617 - RNA, 13 nt, Human
aaggauccugagc

SEQ ID NO: 1639618 - RNA, 12 nt, Human
aaggauccugag

SEQ ID NO: 1639619 - RNA, 11 nt, Human
aaggauccuga

SEQ ID NO: 1639620 - RNA, 13 nt, Human
aaggauaaugaau

SEQ ID NO: 1639621 - RNA, 23 nt, Human
aaggauaaaguugguaaaccuuu

SEQ ID NO: 1639622 - RNA, 21 nt, Human
aaggauaaaguugguaaaccu

SEQ ID NO: 1639623 - RNA, 20 nt, Human
aaggaggaagagaaaaaaua

SEQ ID NO: 1639624 - RNA, 17 nt, Human
guugggcuggugucacc

SEQ ID NO: 1639625 - RNA, 17 nt, Human
guugcccaggcuggcgu

SEQ ID NO: 1639626 - RNA, 16 nt, Human
guugcccaggcuggcg

SEQ ID NO: 1639627 - RNA, 15 nt, Human
guugcccaggcuggc

SEQ ID NO: 1639628 - RNA, 12 nt, Human
guugcugccuca

SEQ ID NO: 1639629 - RNA, 19 nt, Human
aaggaugcccaaagaugca

SEQ ID NO: 1639630 - RNA, 14 nt, Human
aaggaugcccaaag

SEQ ID NO: 1639631 - RNA, 24 nt, Human
aaggaugcacagaguuguuacauu

SEQ ID NO: 1639632 - RNA, 16 nt, Human
aaggccccgcccaggc

SEQ ID NO: 1639633 - RNA, 14 nt, Human
aaggccccgcccag

SEQ ID NO: 1639634 - RNA, 19 nt, Human
aaggccccgcccaggcuua

SEQ ID NO: 1639635 - RNA, 13 nt, Human
aaggcuaccuuug

SEQ ID NO: 1639636 - RNA, 15 nt, Human
aaggcuaccuuugua

SEQ ID NO: 1639637 - RNA, 20 nt, Human
uacauuagcaguuugcuuug

SEQ ID NO: 1639638 - RNA, 19 nt, Human
uacauuagcaguuugcuuu

SEQ ID NO: 1639639 - RNA, 13 nt, Human
aauuaaguacuau

SEQ ID NO: 1639640 - RNA, 18 nt, Human
aauuaacauguuaaacca

SEQ ID NO: 1639641 - RNA, 23 nt, Human
uacauggcuggagcuagaauuug

SEQ ID NO: 1639642 - RNA, 17 nt, Human
uacauguacugauuacu

SEQ ID NO: 1639643 - RNA, 18 nt, Human
aauguugacaugggacau

SEQ ID NO: 1639644 - RNA, 15 nt, Human
aaugucacaggcagg

SEQ ID NO: 1639645 - RNA, 18 nt, Human
aauuaacuuuuauaaacu

SEQ ID NO: 1639646 - RNA, 20 nt, Human
aauuaacuuuuauaaacuuu

SEQ ID NO: 1639647 - RNA, 22 nt, Human
aauuaacuuuuauaaacuuuac

SEQ ID NO: 1639648 - RNA, 20 nt, Human
aauuaagaaaggauaaaguu

SEQ ID NO: 1639649 - RNA, 19 nt, Human
aauuaacaugaauauuuag

SEQ ID NO: 1639650 - RNA, 14 nt, Human
aauuaacauguuaa

SEQ ID NO: 1639651 - RNA, 13 nt, Human
aauuaacauguua

SEQ ID NO: 1639652 - RNA, 16 nt, Human
uaccaugccauuuaaa

SEQ ID NO: 1639653 - RNA, 17 nt, Human
uaccauccccuguagag

SEQ ID NO: 1639654 - RNA, 17 nt, Human
uaccacuuuuguucuug

SEQ ID NO: 1639655 - RNA, 22 nt, Human
uacccuggcacuauaauguaag

SEQ ID NO: 1639656 - RNA, 20 nt, Human
uacccuggcacuauaaugua

SEQ ID NO: 1639657 - RNA, 16 nt, Human
uacccucauguucuua

SEQ ID NO: 1639658 - RNA, 20 nt, Human
uacccgggaagggggcuggg

SEQ ID NO: 1639659 - RNA, 20 nt, Human
uacaguggggaaugaagaua

SEQ ID NO: 1639660 - RNA, 15 nt, Human
uacauaaugcgugca

SEQ ID NO: 1639661 - RNA, 18 nt, Human
uacaguccucccaucuca

SEQ ID NO: 1639662 - RNA, 17 nt, Human
uacaguccucccaucuc

SEQ ID NO: 1639663 - RNA, 15 nt, Human
uacaguccucccauc

SEQ ID NO: 1639664 - RNA, 12 nt, Human
uacaguccuccc

SEQ ID NO: 1639665 - RNA, 18 nt, Human
uacaguaucucagggccu

SEQ ID NO: 1639666 - RNA, 13 nt, Human
aaugucacaggca

SEQ ID NO: 1639667 - RNA, 14 nt, Human
aaugucacaggcag

SEQ ID NO: 1639668 - RNA, 22 nt, Human
aaugugaaacuggauuaaacuu

SEQ ID NO: 1639669 - RNA, 16 nt, Human
aaugguuuaaaugguc

SEQ ID NO: 1639670 - RNA, 22 nt, Human
aaugguuuucuuguguguuuau

SEQ ID NO: 1639671 - RNA, 18 nt, Human
aaugguuuucuugugugu

SEQ ID NO: 1639672 - RNA, 17 nt, Human
aaugguuuucuugugug

SEQ ID NO: 1639673 - RNA, 15 nt, Human
aauguaagcucuacu

SEQ ID NO: 1639674 - RNA, 13 nt, Human
aauguaagcucua

SEQ ID NO: 1639675 - RNA, 13 nt, Human
aauguaagacaaa

SEQ ID NO: 1639676 - RNA, 22 nt, Human
uacagcaaggagauuuacaacu

SEQ ID NO: 1639677 - RNA, 21 nt, Human
aauguacagcaaggagauuua

SEQ ID NO: 1639678 - RNA, 23 nt, Human
aauguacagcaaggagauuuaca

SEQ ID NO: 1639679 - RNA, 15 nt, Human
uaaugucacaggcag

SEQ ID NO: 1639680 - RNA, 17 nt, Human
uaaugucacaggcaggu

SEQ ID NO: 1639681 - RNA, 16 nt, Human
uaaugucacaggcagg

SEQ ID NO: 1639682 - RNA, 12 nt, Human
uaaugugaaacu

SEQ ID NO: 1639683 - RNA, 20 nt, Human
uaaugugaaacuggauuaaa

SEQ ID NO: 1639684 - RNA, 22 nt, Human
uaaugugaaacuggauuaaacu

SEQ ID NO: 1639685 - RNA, 23 nt, Human
uaaugugaaacuggauuaaacuu

SEQ ID NO: 1639686 - RNA, 17 nt, Human
uaauguaagcucuacug

SEQ ID NO: 1639687 - RNA, 16 nt, Human
uaauguaagcucuacu

SEQ ID NO: 1639688 - RNA, 15 nt, Human
uaauguaagacaaau

SEQ ID NO: 1639689 - RNA, 15 nt, Human
aaugaaugaaugaau

SEQ ID NO: 1639690 - RNA, 14 nt, Human
aaugaaugaaacau

SEQ ID NO: 1639691 - RNA, 15 nt, Human
aaugaaugucagugu

SEQ ID NO: 1639692 - RNA, 23 nt, Human
aaucuucugaacuuggcgcugcc

SEQ ID NO: 1639693 - RNA, 13 nt, Human
aaucuugaaaaug

SEQ ID NO: 1639694 - RNA, 13 nt, Human
uaaucuuucacag

SEQ ID NO: 1639695 - RNA, 17 nt, Human
uaaucuuuaauuuuaca

SEQ ID NO: 1639696 - RNA, 22 nt, Human
uaauccaagcaaaugugaauca

SEQ ID NO: 1639697 - RNA, 14 nt, Human
uaauagacaauuua

SEQ ID NO: 1639698 - RNA, 21 nt, Human
uaauauugauaugcuuauaca

SEQ ID NO: 1639699 - RNA, 19 nt, Human
uaacaaugcuguauuuuaa

SEQ ID NO: 1639700 - RNA, 20 nt, Human
aauacaguaucucagggccu

SEQ ID NO: 1639701 - RNA, 22 nt, Human
uaauacaccacuacauucuguu

SEQ ID NO: 1639702 - RNA, 23 nt, Human
uaauacaccacuacauucuguua

SEQ ID NO: 1639703 - RNA, 18 nt, Human
uaauacuugcuuuggaaa

SEQ ID NO: 1639704 - RNA, 13 nt, Human
uaauaccucccuu

SEQ ID NO: 1639705 - RNA, 18 nt, Human
uacaaaaacacagcaagg

SEQ ID NO: 1639706 - RNA, 17 nt, Human
uacaaaaacacagcaag

SEQ ID NO: 1639707 - RNA, 16 nt, Human
uacaaaaacauggccu

SEQ ID NO: 1639708 - RNA, 15 nt, Human
uacaaaaagcauaaa

SEQ ID NO: 1639709 - RNA, 20 nt, Human
uacaagcgugagccacugca

SEQ ID NO: 1639710 - RNA, 19 nt, Human
uacaagcgugagccacugc

SEQ ID NO: 1639711 - RNA, 18 nt, Human
uacaagcgugagccacug

SEQ ID NO: 1639712 - RNA, 16 nt, Human
uacaagcgugagccac

SEQ ID NO: 1639713 - RNA, 21 nt, Human
uacaagcgugagccacugcac

SEQ ID NO: 1639714 - RNA, 20 nt, Human
uacaauaaaaucuugaaaau

SEQ ID NO: 1639715 - RNA, 21 nt, Human
uaauuuuuguauuuuuaguag

SEQ ID NO: 1639716 - RNA, 18 nt, Human
uaauuuaccugaagucuu

SEQ ID NO: 1639717 - RNA, 17 nt, Human
uaauuuaccugaagucu

SEQ ID NO: 1639718 - RNA, 13 nt, Human
uaauucauguugc

SEQ ID NO: 1639719 - RNA, 16 nt, Human
aaugcaaaccaucauu

SEQ ID NO: 1639720 - RNA, 15 nt, Human
aaugaccuuucaaua

SEQ ID NO: 1639721 - RNA, 14 nt, Human
aaugaccuuucaau

SEQ ID NO: 1639722 - RNA, 13 nt, Human
aaugaccuuucaa

SEQ ID NO: 1639723 - RNA, 21 nt, Human
aaugaaugucagugugacuga

SEQ ID NO: 1639724 - RNA, 20 nt, Human
aaugaaugucagugugacug

SEQ ID NO: 1639725 - RNA, 18 nt, Human
aaugcacaaacagaggcc

SEQ ID NO: 1639726 - RNA, 23 nt, Human
aaugcaaaccaucauugaaaucu

SEQ ID NO: 1639727 - RNA, 22 nt, Human
aaugcaaaccaucauugaaauc

SEQ ID NO: 1639728 - RNA, 16 nt, Human
aaugcacuuuguucug

SEQ ID NO: 1639729 - RNA, 13 nt, Human
aaugcacuuuguu

SEQ ID NO: 1639730 - RNA, 20 nt, Human
aaugcacaaacagaggccgc

SEQ ID NO: 1639731 - RNA, 19 nt, Human
aaugcacaaacagaggccg

SEQ ID NO: 1639732 - RNA, 20 nt, Human
aaugcacuuuguucuggcuc

SEQ ID NO: 1639733 - RNA, 19 nt, Human
aaugcacuuuguucuggcu

SEQ ID NO: 1639734 - RNA, 23 nt, Human
uaauuaguuccucauuagcauuu

SEQ ID NO: 1639735 - RNA, 20 nt, Human
uaauuauacccccugcaaag

SEQ ID NO: 1639736 - RNA, 17 nt, Human
uaauuauaucugaggaa

SEQ ID NO: 1639737 - RNA, 13 nt, Human
uaauuauaucuga

SEQ ID NO: 1639738 - RNA, 21 nt, Human
uaauuauaugcuauuucuaua

SEQ ID NO: 1639739 - RNA, 17 nt, Human
aauuuuuuugagacaga

SEQ ID NO: 1639740 - RNA, 13 nt, Human
acaaaaacauggc

SEQ ID NO: 1639741 - RNA, 19 nt, Human
aauuuuuucucuaggaaau

SEQ ID NO: 1639742 - RNA, 14 nt, Human
aauuuuuguauuuu

SEQ ID NO: 1639743 - RNA, 19 nt, Human
aauuuuuauauuugaaaua

SEQ ID NO: 1639744 - RNA, 18 nt, Human
aauuuuuauuaaauuaug

SEQ ID NO: 1639745 - RNA, 17 nt, Human
aauuuuuauuaaauuau

SEQ ID NO: 1639746 - RNA, 14 nt, Human
uagacagucccugc

SEQ ID NO: 1639747 - RNA, 12 nt, Human
uagacagucccu

SEQ ID NO: 1639748 - RNA, 15 nt, Human
uagaacucccuuuca

SEQ ID NO: 1639749 - RNA, 14 nt, Human
uagaaccucuuugu

SEQ ID NO: 1639750 - RNA, 16 nt, Human
uacuucaugcugucua

SEQ ID NO: 1639751 - RNA, 21 nt, Human
uacuucaaauccuugaagauu

SEQ ID NO: 1639752 - RNA, 15 nt, Human
uagaagucacacagu

SEQ ID NO: 1639753 - RNA, 16 nt, Human
uagacaauuuauuaug

SEQ ID NO: 1639754 - RNA, 19 nt, Human
uagaauuugauaugugaac

SEQ ID NO: 1639755 - RNA, 19 nt, Human
uagaagucuuagauguaua

SEQ ID NO: 1639756 - RNA, 18 nt, Human
uagaagucuuagauguau

SEQ ID NO: 1639757 - RNA, 20 nt, Human
uagaagucuuagauguauau

SEQ ID NO: 1639758 - RNA, 17 nt, Human
uagaagucuuagaugua

SEQ ID NO: 1639759 - RNA, 16 nt, Human
uagaagucuuagaugu

SEQ ID NO: 1639760 - RNA, 16 nt, Human
uagaagucacacagua

SEQ ID NO: 1639761 - RNA, 23 nt, Human
uagaagucacauuccugaacagg

SEQ ID NO: 1639762 - RNA, 19 nt, Human
uagaggagaaacuggaacu

SEQ ID NO: 1639763 - RNA, 21 nt, Human
uagaggaagccugauuaaaga

SEQ ID NO: 1639764 - RNA, 16 nt, Human
uagaugcaguucugaa

SEQ ID NO: 1639765 - RNA, 19 nt, Human
uagaugcaguucugaagaa

SEQ ID NO: 1639766 - RNA, 17 nt, Human
uagaugcaguucugaag

SEQ ID NO: 1639767 - RNA, 16 nt, Human
acaaaaagcauaaaaa

SEQ ID NO: 1639768 - RNA, 15 nt, Human
uagagcuucuggcac

SEQ ID NO: 1639769 - RNA, 21 nt, Human
uagcaugucgucaaagcugaa

SEQ ID NO: 1639770 - RNA, 16 nt, Human
uagcaccagggaaggg

SEQ ID NO: 1639771 - RNA, 14 nt, Human
uagcaccagggaag

SEQ ID NO: 1639772 - RNA, 13 nt, Human
uagcaccagggaa

SEQ ID NO: 1639773 - RNA, 19 nt, Human
uagcacagacccugcccug

SEQ ID NO: 1639774 - RNA, 18 nt, Human
uagcacagacccugcccu

SEQ ID NO: 1639775 - RNA, 17 nt, Human
uagcacagacccugccc

SEQ ID NO: 1639776 - RNA, 16 nt, Human
uagcacagacccugcc

SEQ ID NO: 1639777 - RNA, 22 nt, Human
uagauuuuagacccuauugcug

SEQ ID NO: 1639778 - RNA, 18 nt, Human
acaagcacuaaacaaaga

SEQ ID NO: 1639779 - RNA, 18 nt, Human
acaagagcccaggccucc

SEQ ID NO: 1639780 - RNA, 17 nt, Human
acaagagcccaggccuc

SEQ ID NO: 1639781 - RNA, 21 nt, Human
acaagcgugagccacugcacc

SEQ ID NO: 1639782 - RNA, 20 nt, Human
acaagcgugagccacugcac

SEQ ID NO: 1639783 - RNA, 13 nt, Human
acaagcugcaccc

SEQ ID NO: 1639784 - RNA, 12 nt, Human
acaagccacccc

SEQ ID NO: 1639785 - RNA, 12 nt, Human
acaacacucaca

SEQ ID NO: 1639786 - RNA, 15 nt, Human
acaacaacaaaauga

SEQ ID NO: 1639787 - RNA, 18 nt, Human
acaaauucugucucugga

SEQ ID NO: 1639788 - RNA, 15 nt, Human
acaacaaccugguca

SEQ ID NO: 1639789 - RNA, 19 nt, Human
uagcauuuguguugaagag

SEQ ID NO: 1639790 - RNA, 22 nt, Human
aauucuucuccacuuucuagcc

SEQ ID NO: 1639791 - RNA, 21 nt, Human
aauucuugccaaauauaaaua

SEQ ID NO: 1639792 - RNA, 14 nt, Human
aauucuugcaaagu

SEQ ID NO: 1639793 - RNA, 20 nt, Human
aauucuugcaaaguaucccu

SEQ ID NO: 1639794 - RNA, 19 nt, Human
aauugacccacaagaaaug

SEQ ID NO: 1639795 - RNA, 16 nt, Human
aauugacccacaagaa

SEQ ID NO: 1639796 - RNA, 15 nt, Human
uacguacacauuuua

SEQ ID NO: 1639797 - RNA, 14 nt, Human
aauucuuucauuuu

SEQ ID NO: 1639798 - RNA, 14 nt, Human
uacgucugacaggc

SEQ ID NO: 1639799 - RNA, 14 nt, Human
uacguuaccaggca

SEQ ID NO: 1639800 - RNA, 13 nt, Human
uacguugugcauu

SEQ ID NO: 1639801 - RNA, 14 nt, Human
uacguugugcauuu

SEQ ID NO: 1639802 - RNA, 16 nt, Human
uacuauguaucaauga

SEQ ID NO: 1639803 - RNA, 16 nt, Human
uacuauaauuuaccug

SEQ ID NO: 1639804 - RNA, 22 nt, Human
uacucuuauaucuauauuuuac

SEQ ID NO: 1639805 - RNA, 22 nt, Human
uacucuucaguuaagccuuugg

SEQ ID NO: 1639806 - RNA, 20 nt, Human
uacucuuauaucuauauuuu

SEQ ID NO: 1639807 - RNA, 18 nt, Human
uacucuuauagacaacau

SEQ ID NO: 1639808 - RNA, 14 nt, Human
uacucaauuuuaac

SEQ ID NO: 1639809 - RNA, 13 nt, Human
uacucaauuuuaa

SEQ ID NO: 1639810 - RNA, 12 nt, Human
uacucaauuuua

SEQ ID NO: 1639811 - RNA, 20 nt, Human
aauuucucccagucauuuaa

SEQ ID NO: 1639812 - RNA, 13 nt, Human
aauuucuaaaucu

SEQ ID NO: 1639813 - RNA, 21 nt, Human
aauuucuaaaucuccaaaaua

SEQ ID NO: 1639814 - RNA, 15 nt, Human
aauuuaccugaaguc

SEQ ID NO: 1639815 - RNA, 17 nt, Human
aauuuagaaauauaauu

SEQ ID NO: 1639816 - RNA, 19 nt, Human
uacuucaaauccuugaaga

SEQ ID NO: 1639817 - RNA, 14 nt, Human
uacuucaaauccuu

SEQ ID NO: 1639818 - RNA, 19 nt, Human
aauuugauaugugaacagu

SEQ ID NO: 1639819 - RNA, 18 nt, Human
aauuugauaugugaacag

SEQ ID NO: 1639820 - RNA, 16 nt, Human
aauuugauaugugaac

SEQ ID NO: 1639821 - RNA, 15 nt, Human
aauuugauaugugaa

SEQ ID NO: 1639822 - RNA, 18 nt, Human
aauuugaauuuuguguua

SEQ ID NO: 1639823 - RNA, 16 nt, Human
aauuugaauuuugugu

SEQ ID NO: 1639824 - RNA, 13 nt, Human
aauuugaauuuug

SEQ ID NO: 1639825 - RNA, 20 nt, Human
aauuugaaacacuuugcaua

SEQ ID NO: 1639826 - RNA, 13 nt, Human
uacuguaagaaaa

SEQ ID NO: 1639827 - RNA, 12 nt, Human
aauugcuccuug

SEQ ID NO: 1639828 - RNA, 23 nt, Human
aauugugugaaagguacuucaaa

SEQ ID NO: 1639829 - RNA, 22 nt, Human
aauuguuuggggaugagaaagg

SEQ ID NO: 1639830 - RNA, 20 nt, Human
aauuguguuuauaauuuuaa

SEQ ID NO: 1639831 - RNA, 19 nt, Human
aauuuacauacucugcuua

SEQ ID NO: 1639832 - RNA, 16 nt, Human
aauuuaaauagcuuuu

SEQ ID NO: 1639833 - RNA, 15 nt, Human
aauuuaaauagcuuu

SEQ ID NO: 1639834 - RNA, 13 nt, Human
aauuuaaaagucu

SEQ ID NO: 1639835 - RNA, 22 nt, Human
uauucaggaagcucagggccug

SEQ ID NO: 1639836 - RNA, 18 nt, Human
uauucaggaagcucaggg

SEQ ID NO: 1639837 - RNA, 23 nt, Human
uauucauagcagcuuauucacaa

SEQ ID NO: 1639838 - RNA, 15 nt, Human
uauucagcucaugga

SEQ ID NO: 1639839 - RNA, 22 nt, Human
uauucacugauuugacauaguc

SEQ ID NO: 1639840 - RNA, 19 nt, Human
uauucacugauuugacaua

SEQ ID NO: 1639841 - RNA, 13 nt, Human
uauucacugauuu

SEQ ID NO: 1639842 - RNA, 23 nt, Human
uauucaaaguugccuaaauccau

SEQ ID NO: 1639843 - RNA, 22 nt, Human
uauucaaaguugccuaaaucca

SEQ ID NO: 1639844 - RNA, 21 nt, Human
uauucaaaguugccuaaaucc

SEQ ID NO: 1639845 - RNA, 18 nt, Human
uauucaaaguugccuaaa

SEQ ID NO: 1639846 - RNA, 12 nt, Human
uauuagagaaga

SEQ ID NO: 1639847 - RNA, 16 nt, Human
uauuaccacagacaua

SEQ ID NO: 1639848 - RNA, 16 nt, Human
uauuaaaacucauuuu

SEQ ID NO: 1639849 - RNA, 12 nt, Human
uauuaaaacuca

SEQ ID NO: 1639850 - RNA, 23 nt, Human
uauuaaaaaucucaaauuucuaa

SEQ ID NO: 1639851 - RNA, 12 nt, Human
uauuaaagccau

SEQ ID NO: 1639852 - RNA, 14 nt, Human
uauuaaagccaugu

SEQ ID NO: 1639853 - RNA, 13 nt, Human
uauuaaagccaug

SEQ ID NO: 1639854 - RNA, 23 nt, Human
uauuacaguggggaaugaagaua

SEQ ID NO: 1639855 - RNA, 21 nt, Human
uauuacaguauaauuaacaug

SEQ ID NO: 1639856 - RNA, 20 nt, Human
uauuacaguauaauuaacau

SEQ ID NO: 1639857 - RNA, 18 nt, Human
uauuacaguauaauuaac

SEQ ID NO: 1639858 - RNA, 16 nt, Human
uauuacaguauaauua

SEQ ID NO: 1639859 - RNA, 20 nt, Human
uauuaaagccauguuuauua

SEQ ID NO: 1639860 - RNA, 18 nt, Human
uauuaaagccauguuuau

SEQ ID NO: 1639861 - RNA, 17 nt, Human
uauuaaagccauguuua

SEQ ID NO: 1639862 - RNA, 21 nt, Human
uauguuuucaggcuagaugua

SEQ ID NO: 1639863 - RNA, 19 nt, Human
uauguuuuaagaggcaggg

SEQ ID NO: 1639864 - RNA, 17 nt, Human
uauguuuuaagaggcag

SEQ ID NO: 1639865 - RNA, 16 nt, Human
uauuaaaaaucucaaa

SEQ ID NO: 1639866 - RNA, 18 nt, Human
uauuaaaaaucucaaauu

SEQ ID NO: 1639867 - RNA, 20 nt, Human
uauuaaaaaucucaaauuuc

SEQ ID NO: 1639868 - RNA, 22 nt, Human
uauuaaaaaucucaaauuucua

SEQ ID NO: 1639869 - RNA, 20 nt, Human
acagcuggugcccugcuuuc

SEQ ID NO: 1639870 - RNA, 17 nt, Human
acagcuggugcccugcu

SEQ ID NO: 1639871 - RNA, 21 nt, Human
acaguauggcagcuuuccuca

SEQ ID NO: 1639872 - RNA, 23 nt, Human
acaguauaauuaacauguuaaac

SEQ ID NO: 1639873 - RNA, 21 nt, Human
acaguauaauuaacauguuaa

SEQ ID NO: 1639874 - RNA, 22 nt, Human
acagggcacaccgggcacucag

SEQ ID NO: 1639875 - RNA, 22 nt, Human
acagguuuuccugaagaauuga

SEQ ID NO: 1639876 - RNA, 17 nt, Human
acaggcugggcuucagu

SEQ ID NO: 1639877 - RNA, 14 nt, Human
acaggcugggcuuc

SEQ ID NO: 1639878 - RNA, 21 nt, Human
acaggcugggcuucaguggca

SEQ ID NO: 1639879 - RNA, 19 nt, Human
acaguauuacuucugcuac

SEQ ID NO: 1639880 - RNA, 17 nt, Human
acaguauuacuucugcu

SEQ ID NO: 1639881 - RNA, 16 nt, Human
acaguauuacuucugc

SEQ ID NO: 1639882 - RNA, 15 nt, Human
acaguauuacuucug

SEQ ID NO: 1639883 - RNA, 13 nt, Human
acagucccugcca

SEQ ID NO: 1639884 - RNA, 15 nt, Human
acaguccucccaucu

SEQ ID NO: 1639885 - RNA, 14 nt, Human
acaguccucccauc

SEQ ID NO: 1639886 - RNA, 13 nt, Human
acaguccucccau

SEQ ID NO: 1639887 - RNA, 15 nt, Human
acagucccugccaau

SEQ ID NO: 1639888 - RNA, 20 nt, Human
acaguccuuaccagcagagc

SEQ ID NO: 1639889 - RNA, 18 nt, Human
acaguccuuaccagcaga

SEQ ID NO: 1639890 - RNA, 17 nt, Human
acaguccucccaucuca

SEQ ID NO: 1639891 - RNA, 16 nt, Human
acagucucaggaaauc

SEQ ID NO: 1639892 - RNA, 15 nt, Human
acagucucaggaaau

SEQ ID NO: 1639893 - RNA, 14 nt, Human
acagucucaggaaa

SEQ ID NO: 1639894 - RNA, 13 nt, Human
acagucucaggaa

SEQ ID NO: 1639895 - RNA, 22 nt, Human
acaguccuuaccagcagagcac

SEQ ID NO: 1639896 - RNA, 21 nt, Human
acaguccuuaccagcagagca

SEQ ID NO: 1639897 - RNA, 17 nt, Human
acagucucaggaaauca

SEQ ID NO: 1639898 - RNA, 20 nt, Human
acagugaaagaaaauaacaa

SEQ ID NO: 1639899 - RNA, 18 nt, Human
acagugagacucugucuc

SEQ ID NO: 1639900 - RNA, 14 nt, Human
acagugagacucug

SEQ ID NO: 1639901 - RNA, 21 nt, Human
acaguuaccucugccucagaa

SEQ ID NO: 1639902 - RNA, 15 nt, Human
acaguuaagagaaau

SEQ ID NO: 1639903 - RNA, 23 nt, Human
uauuuaauuuuuuugagacagag

SEQ ID NO: 1639904 - RNA, 14 nt, Human
uauuuaauucaugu

SEQ ID NO: 1639905 - RNA, 18 nt, Human
uauuuacuucuuauacau

SEQ ID NO: 1639906 - RNA, 20 nt, Human
uauuuagcaccagggaaggg

SEQ ID NO: 1639907 - RNA, 18 nt, Human
uauuuacuaaaauggacu

SEQ ID NO: 1639908 - RNA, 18 nt, Human
uauuuauuuuaauaaugu

SEQ ID NO: 1639909 - RNA, 16 nt, Human
uauuuauuuuaauaau

SEQ ID NO: 1639910 - RNA, 14 nt, Human
uauuuauuuuaaua

SEQ ID NO: 1639911 - RNA, 14 nt, Human
uauuuauuuaaauu

SEQ ID NO: 1639912 - RNA, 14 nt, Human
uauuuauuuaguau

SEQ ID NO: 1639913 - RNA, 13 nt, Human
uauuuauuuaaau

SEQ ID NO: 1639914 - RNA, 19 nt, Human
uauuuaguguucauaaaua

SEQ ID NO: 1639915 - RNA, 17 nt, Human
uauugucuagugaaacu

SEQ ID NO: 1639916 - RNA, 18 nt, Human
uauuuaaccucuaaauuc

SEQ ID NO: 1639917 - RNA, 17 nt, Human
uauuuaaccucuaaauu

SEQ ID NO: 1639918 - RNA, 21 nt, Human
uauuuaaugaaagacuguaca

SEQ ID NO: 1639919 - RNA, 15 nt, Human
uauuuaaugaaagac

SEQ ID NO: 1639920 - RNA, 14 nt, Human
uauuuaauagguuu

SEQ ID NO: 1639921 - RNA, 17 nt, Human
uauugucaaagugguga

SEQ ID NO: 1639922 - RNA, 13 nt, Human
uauugucaaagug

SEQ ID NO: 1639923 - RNA, 21 nt, Human
uauuguagcauccuggaauau

SEQ ID NO: 1639924 - RNA, 20 nt, Human
uauuguagcauccuggaaua

SEQ ID NO: 1639925 - RNA, 18 nt, Human
uauuguagcauccuggaa

SEQ ID NO: 1639926 - RNA, 17 nt, Human
uauuguagcauccugga

SEQ ID NO: 1639927 - RNA, 23 nt, Human
uauuguacaaaguauuaagcaua

SEQ ID NO: 1639928 - RNA, 22 nt, Human
uauuguacaaaguauuaagcau

SEQ ID NO: 1639929 - RNA, 21 nt, Human
uauuguacaaaguauuaagca

SEQ ID NO: 1639930 - RNA, 16 nt, Human
uauuguacaaaguauu

SEQ ID NO: 1639931 - RNA, 15 nt, Human
uauuguacaaaguau

SEQ ID NO: 1639932 - RNA, 23 nt, Human
acaguucggugagcuacaaaugc

SEQ ID NO: 1639933 - RNA, 16 nt, Human
acaguucucuccuucu

SEQ ID NO: 1639934 - RNA, 19 nt, Human
acaguucggugagcuacaa

SEQ ID NO: 1639935 - RNA, 22 nt, Human
acaguucggugagcuacaaaug

SEQ ID NO: 1639936 - RNA, 13 nt, Human
acaguuacucaga

SEQ ID NO: 1639937 - RNA, 20 nt, Human
acaguuacucagaauucucu

SEQ ID NO: 1639938 - RNA, 20 nt, Human
acaguucaauucucauuugu

SEQ ID NO: 1639939 - RNA, 16 nt, Human
uauucuguuggccagu

SEQ ID NO: 1639940 - RNA, 15 nt, Human
uauucuuauuuaaug

SEQ ID NO: 1639941 - RNA, 20 nt, Human
uauucucuccuguaccucuu

SEQ ID NO: 1639942 - RNA, 24 nt, Human
uauucucuccuguaccucuugagc

SEQ ID NO: 1639943 - RNA, 17 nt, Human
acaguucucuccuucuu

SEQ ID NO: 1639944 - RNA, 22 nt, Human
uauuggcuuuucugauccaguu

SEQ ID NO: 1639945 - RNA, 21 nt, Human
uauuggcuuuucugauccagu

SEQ ID NO: 1639946 - RNA, 14 nt, Human
uauuggcuuuucug

SEQ ID NO: 1639947 - RNA, 18 nt, Human
uauuggcuuuucugaucc

SEQ ID NO: 1639948 - RNA, 17 nt, Human
uauuggcuuuucugauc

SEQ ID NO: 1639949 - RNA, 16 nt, Human
uauuggcuuuucugau

SEQ ID NO: 1639950 - RNA, 15 nt, Human
uauuggcuuuucuga

SEQ ID NO: 1639951 - RNA, 23 nt, Human
acacucauugaccugaggcccuu

SEQ ID NO: 1639952 - RNA, 21 nt, Human
acacucauugaccugaggccc

SEQ ID NO: 1639953 - RNA, 23 nt, Human
uauauauuuuuuucugaaauuuc

SEQ ID NO: 1639954 - RNA, 20 nt, Human
uauauauuuuuuucugaaau

SEQ ID NO: 1639955 - RNA, 22 nt, Human
uauauauuuuuuucugaaauuu

SEQ ID NO: 1639956 - RNA, 21 nt, Human
uauauauuuuuuucugaaauu

SEQ ID NO: 1639957 - RNA, 13 nt, Human
uauauaucaaaua

SEQ ID NO: 1639958 - RNA, 19 nt, Human
uauaggaauugacccacaa

SEQ ID NO: 1639959 - RNA, 14 nt, Human
uauaggaauugacc

SEQ ID NO: 1639960 - RNA, 13 nt, Human
uauaggaauugac

SEQ ID NO: 1639961 - RNA, 20 nt, Human
uauagccuaggugacagagu

SEQ ID NO: 1639962 - RNA, 20 nt, Human
uauaggugcuacaaaaacac

SEQ ID NO: 1639963 - RNA, 21 nt, Human
uauaggugcuacaaaaacaca

SEQ ID NO: 1639964 - RNA, 23 nt, Human
uauaggugcuacaaaaacacagc

SEQ ID NO: 1639965 - RNA, 19 nt, Human
uauaauuuugugaagcaaa

SEQ ID NO: 1639966 - RNA, 21 nt, Human
uauacacuuacacuuuaugca

SEQ ID NO: 1639967 - RNA, 13 nt, Human
uauacauaaacaa

SEQ ID NO: 1639968 - RNA, 14 nt, Human
uauacauaaacaag

SEQ ID NO: 1639969 - RNA, 14 nt, Human
uauacauuugauaa

SEQ ID NO: 1639970 - RNA, 20 nt, Human
uauagauuagaauucuguau

SEQ ID NO: 1639971 - RNA, 22 nt, Human
uauagauuagagaguguugaaa

SEQ ID NO: 1639972 - RNA, 19 nt, Human
uauagauuagagaguguug

SEQ ID NO: 1639973 - RNA, 14 nt, Human
uauaauuuugugaa

SEQ ID NO: 1639974 - RNA, 20 nt, Human
uauaaccaguguuguggauu

SEQ ID NO: 1639975 - RNA, 23 nt, Human
uauaaaauaauuuuuauauuuga

SEQ ID NO: 1639976 - RNA, 22 nt, Human
acacaucagcuugcccuguuaa

SEQ ID NO: 1639977 - RNA, 19 nt, Human
uauaaaagccuguuuaaga

SEQ ID NO: 1639978 - RNA, 19 nt, Human
acacaugcaaggucauuuu

SEQ ID NO: 1639979 - RNA, 20 nt, Human
acacaugcaaggucauuuuu

SEQ ID NO: 1639980 - RNA, 22 nt, Human
uauaaaauaauuuuuauauuug

SEQ ID NO: 1639981 - RNA, 21 nt, Human
uauaaaauaauuuuuauauuu

SEQ ID NO: 1639982 - RNA, 17 nt, Human
uauaaaagccuguuuaa

SEQ ID NO: 1639983 - RNA, 14 nt, Human
uauaaaagccuguu

SEQ ID NO: 1639984 - RNA, 12 nt, Human
uauaaaagccug

SEQ ID NO: 1639985 - RNA, 21 nt, Human
acacaugcaaggucauuuuuu

SEQ ID NO: 1639986 - RNA, 21 nt, Human
acacccagcccacuucugcca

SEQ ID NO: 1639987 - RNA, 20 nt, Human
acacccagcccacuucugcc

SEQ ID NO: 1639988 - RNA, 19 nt, Human
acacccagcccacuucugc

SEQ ID NO: 1639989 - RNA, 18 nt, Human
acacccugugauggggcc

SEQ ID NO: 1639990 - RNA, 12 nt, Human
acacccugugau

SEQ ID NO: 1639991 - RNA, 11 nt, Human
acacccuguga

SEQ ID NO: 1639992 - RNA, 19 nt, Human
acacccugugauggggccc

SEQ ID NO: 1639993 - RNA, 22 nt, Human
uagugagcagucaggaaagaga

SEQ ID NO: 1639994 - RNA, 23 nt, Human
acaagcugcacccucaggcaggu

SEQ ID NO: 1639995 - RNA, 22 nt, Human
acaagcugcacccucaggcagg

SEQ ID NO: 1639996 - RNA, 21 nt, Human
acaagcugcacccucaggcag

SEQ ID NO: 1639997 - RNA, 19 nt, Human
acaagcugcacccucaggc

SEQ ID NO: 1639998 - RNA, 21 nt, Human
uagucaggugccucaagagaa

SEQ ID NO: 1639999 - RNA, 16 nt, Human
uaguuuuauaugcuuc

SEQ ID NO: 1640000 - RNA, 20 nt, Human
uaguuccucauuagcauuuu

SEQ ID NO: 1640001 - RNA, 13 nt, Human
uagugaugguucc

SEQ ID NO: 1640002 - RNA, 19 nt, Human
uaucuagauacuguaucau

SEQ ID NO: 1640003 - RNA, 17 nt, Human
uaucucccccagcccca

SEQ ID NO: 1640004 - RNA, 18 nt, Human
uaucucccccagccccau

SEQ ID NO: 1640005 - RNA, 10 nt, Human
uaucagaauu

SEQ ID NO: 1640006 - RNA, 15 nt, Human
uaucuagauacugua

SEQ ID NO: 1640007 - RNA, 16 nt, Human
uaucuagauacuguau

SEQ ID NO: 1640008 - RNA, 16 nt, Human
acagagcuacacaggg

SEQ ID NO: 1640009 - RNA, 18 nt, Human
acagagcuacacagggga

SEQ ID NO: 1640010 - RNA, 21 nt, Human
acagagugagacucugucuca

SEQ ID NO: 1640011 - RNA, 14 nt, Human
acagacuucugaaa

SEQ ID NO: 1640012 - RNA, 13 nt, Human
acagacuucugaa

SEQ ID NO: 1640013 - RNA, 15 nt, Human
uauauuuacaaaugg

SEQ ID NO: 1640014 - RNA, 21 nt, Human
uaucaaguauuauaccuuuuu

SEQ ID NO: 1640015 - RNA, 19 nt, Human
uauauuuacuaaaauggac

SEQ ID NO: 1640016 - RNA, 14 nt, Human
uauauuuacaaaug

SEQ ID NO: 1640017 - RNA, 18 nt, Human
uaucacccagaagaaaau

SEQ ID NO: 1640018 - RNA, 20 nt, Human
uaucaccugucuugccuuuu

SEQ ID NO: 1640019 - RNA, 23 nt, Human
acagacacaggcccggcuccagg

SEQ ID NO: 1640020 - RNA, 13 nt, Human
acacuccuucaca

SEQ ID NO: 1640021 - RNA, 11 nt, Human
acacuccuuca

SEQ ID NO: 1640022 - RNA, 16 nt, Human
acagacccugcccugu

SEQ ID NO: 1640023 - RNA, 17 nt, Human
acagacccugcccugug

SEQ ID NO: 1640024 - RNA, 15 nt, Human
acagacagcccucca

SEQ ID NO: 1640025 - RNA, 13 nt, Human
acagacagcccuc

SEQ ID NO: 1640026 - RNA, 20 nt, Human
acagacccugcccugugggc

SEQ ID NO: 1640027 - RNA, 18 nt, Human
acagacccugcccugugg

SEQ ID NO: 1640028 - RNA, 14 nt, Human
acagacuggaagca

SEQ ID NO: 1640029 - RNA, 17 nt, Human
acagacuggaagcacag

SEQ ID NO: 1640030 - RNA, 16 nt, Human
uauauugauccagaaa

SEQ ID NO: 1640031 - RNA, 15 nt, Human
uaucuugaagacuuu

SEQ ID NO: 1640032 - RNA, 15 nt, Human
uaucuugaauaaugu

SEQ ID NO: 1640033 - RNA, 13 nt, Human
uaugaggcauuug

SEQ ID NO: 1640034 - RNA, 23 nt, Human
uaugaucacggcucacugcagcc

SEQ ID NO: 1640035 - RNA, 21 nt, Human
uaugaucacggcucacugcag

SEQ ID NO: 1640036 - RNA, 10 nt, Human
uaugauccag

SEQ ID NO: 1640037 - RNA, 19 nt, Human
uaugauccagcagauuauu

SEQ ID NO: 1640038 - RNA, 11 nt, Human
uaugauccagc

SEQ ID NO: 1640039 - RNA, 18 nt, Human
acagaguuuucacucuua

SEQ ID NO: 1640040 - RNA, 15 nt, Human
acagaguuguuacau

SEQ ID NO: 1640041 - RNA, 20 nt, Human
acagaguuuucacucuuauu

SEQ ID NO: 1640042 - RNA, 18 nt, Human
acagcagccccugcacaa

SEQ ID NO: 1640043 - RNA, 16 nt, Human
uauggcuauaggugcu

SEQ ID NO: 1640044 - RNA, 14 nt, Human
uauggccuguggau

SEQ ID NO: 1640045 - RNA, 22 nt, Human
uauggccugugagcuaggaauu

SEQ ID NO: 1640046 - RNA, 15 nt, Human
uaugcugaguuugug

SEQ ID NO: 1640047 - RNA, 19 nt, Human
uaugcucugcauguuacau

SEQ ID NO: 1640048 - RNA, 18 nt, Human
uaugcucugcauguuaca

SEQ ID NO: 1640049 - RNA, 22 nt, Human
uaugauccagcagauuauucac

SEQ ID NO: 1640050 - RNA, 21 nt, Human
uaugauccagcagauuauuca

SEQ ID NO: 1640051 - RNA, 20 nt, Human
uaugauccagcagauuauuc

SEQ ID NO: 1640052 - RNA, 17 nt, Human
uauggcuauaggugcua

SEQ ID NO: 1640053 - RNA, 16 nt, Human
uauggcuuuugugcau

SEQ ID NO: 1640054 - RNA, 15 nt, Human
acagccuggcacagg

SEQ ID NO: 1640055 - RNA, 14 nt, Human
acagccuggcacag

SEQ ID NO: 1640056 - RNA, 15 nt, Human
acagcuaacauggaa

SEQ ID NO: 1640057 - RNA, 14 nt, Human
acagcuaacaugga

SEQ ID NO: 1640058 - RNA, 23 nt, Human
acagccugugucuuuaaaugcug

SEQ ID NO: 1640059 - RNA, 18 nt, Human
acagccugugucuuuaaa

SEQ ID NO: 1640060 - RNA, 14 nt, Human
acagccugugucuu

SEQ ID NO: 1640061 - RNA, 17 nt, Human
acagcuaacauggaagu

SEQ ID NO: 1640062 - RNA, 22 nt, Human
acagcuaaucagcauucucacu

SEQ ID NO: 1640063 - RNA, 20 nt, Human
acagcuaaucagcauucuca

SEQ ID NO: 1640064 - RNA, 15 nt, Human
acagcuccaagaauu

SEQ ID NO: 1640065 - RNA, 12 nt, Human
uccccuccucug

SEQ ID NO: 1640066 - RNA, 16 nt, Human
ucccgaauagcuggga

SEQ ID NO: 1640067 - RNA, 15 nt, Human
ucccgaauagcuggg

SEQ ID NO: 1640068 - RNA, 18 nt, Human
ucccgaauagcugggacu

SEQ ID NO: 1640069 - RNA, 20 nt, Human
ucccgcucagcccucccugc

SEQ ID NO: 1640070 - RNA, 16 nt, Human
ucccgcucagcccucc

SEQ ID NO: 1640071 - RNA, 15 nt, Human
ucccgcucagcccuc

SEQ ID NO: 1640072 - RNA, 14 nt, Human
ucccgcucagcccu

SEQ ID NO: 1640073 - RNA, 13 nt, Human
ucccgcucagccc

SEQ ID NO: 1640074 - RNA, 18 nt, Human
ucccuauuagagaagaga

SEQ ID NO: 1640075 - RNA, 18 nt, Human
acuauguugcccaggcag

SEQ ID NO: 1640076 - RNA, 22 nt, Human
acuaugaaguuuuuuuuauaca

SEQ ID NO: 1640077 - RNA, 18 nt, Human
acuaucccggcugcccuu

SEQ ID NO: 1640078 - RNA, 17 nt, Human
acuaucccggcugcccu

SEQ ID NO: 1640079 - RNA, 16 nt, Human
acuaucccggcugccc

SEQ ID NO: 1640080 - RNA, 22 nt, Human
acuaucaugucaaacgugaaaa

SEQ ID NO: 1640081 - RNA, 23 nt, Human
acuauguugcccaggcaggucuu

SEQ ID NO: 1640082 - RNA, 20 nt, Human
acuauguugcccaggcaggu

SEQ ID NO: 1640083 - RNA, 19 nt, Human
acuauguugcccaggcagg

SEQ ID NO: 1640084 - RNA, 18 nt, Human
acuauagccuaggugaca

SEQ ID NO: 1640085 - RNA, 17 nt, Human
acuauagccuaggugac

SEQ ID NO: 1640086 - RNA, 23 nt, Human
acuauaauuuaccugaagucuuu

SEQ ID NO: 1640087 - RNA, 24 nt, Human
uccccaccgcagacaggaccaggg

SEQ ID NO: 1640088 - RNA, 22 nt, Human
ucccagugccgagaaggaagcc

SEQ ID NO: 1640089 - RNA, 19 nt, Human
ucccagugccgagaaggaa

SEQ ID NO: 1640090 - RNA, 16 nt, Human
acuacaguccucccau

SEQ ID NO: 1640091 - RNA, 17 nt, Human
acuacaguccucccauc

SEQ ID NO: 1640092 - RNA, 19 nt, Human
ucccaucucacacaugagc

SEQ ID NO: 1640093 - RNA, 14 nt, Human
ucccaucucacaca

SEQ ID NO: 1640094 - RNA, 13 nt, Human
ucccaucucacac

SEQ ID NO: 1640095 - RNA, 16 nt, Human
ucccauaugccugggc

SEQ ID NO: 1640096 - RNA, 15 nt, Human
ucccauaugccuggg

SEQ ID NO: 1640097 - RNA, 15 nt, Human
uccccaagccuggca

SEQ ID NO: 1640098 - RNA, 13 nt, Human
acuaaaaauacaa

SEQ ID NO: 1640099 - RNA, 15 nt, Human
acguuucuaaaggcu

SEQ ID NO: 1640100 - RNA, 14 nt, Human
acguuucuaaaggc

SEQ ID NO: 1640101 - RNA, 12 nt, Human
acguuucuaaag

SEQ ID NO: 1640102 - RNA, 14 nt, Human
uccagcucaccagc

SEQ ID NO: 1640103 - RNA, 15 nt, Human
uccagcucaccagcc

SEQ ID NO: 1640104 - RNA, 24 nt, Human
uccagccugggugacagagcaagu

SEQ ID NO: 1640105 - RNA, 13 nt, Human
uccagccugggug

SEQ ID NO: 1640106 - RNA, 15 nt, Human
acuacaguccuccca

SEQ ID NO: 1640107 - RNA, 17 nt, Human
acuaaccagcagaaaug

SEQ ID NO: 1640108 - RNA, 23 nt, Human
acuacaggugugagucaccaagc

SEQ ID NO: 1640109 - RNA, 13 nt, Human
acuaaccacgcug

SEQ ID NO: 1640110 - RNA, 16 nt, Human
acuaaccagcagaaau

SEQ ID NO: 1640111 - RNA, 20 nt, Human
acucauuuuaaaaaauggaa

SEQ ID NO: 1640112 - RNA, 20 nt, Human
acuccagcuggguuggaaaa

SEQ ID NO: 1640113 - RNA, 19 nt, Human
acuccagugagacagcucu

SEQ ID NO: 1640114 - RNA, 14 nt, Human
acuccuaccuggua

SEQ ID NO: 1640115 - RNA, 21 nt, Human
ucccucagucuggcccuuccu

SEQ ID NO: 1640116 - RNA, 22 nt, Human
ucccucauccucauacccaccc

SEQ ID NO: 1640117 - RNA, 18 nt, Human
acucaucuagguaaauua

SEQ ID NO: 1640118 - RNA, 16 nt, Human
acucaucuagguaaau

SEQ ID NO: 1640119 - RNA, 23 nt, Human
ucccucauuccaccuucccaugc

SEQ ID NO: 1640120 - RNA, 21 nt, Human
acucaucuagguaaauuacag

SEQ ID NO: 1640121 - RNA, 23 nt, Human
ucccuuugacgccaucccagccc

SEQ ID NO: 1640122 - RNA, 22 nt, Human
ucccuuugacgccaucccagcc

SEQ ID NO: 1640123 - RNA, 18 nt, Human
ucccuuuuaauccuggcu

SEQ ID NO: 1640124 - RNA, 19 nt, Human
ucccuuuuaauccuggcug

SEQ ID NO: 1640125 - RNA, 16 nt, Human
uccgugcuaaggacuu

SEQ ID NO: 1640126 - RNA, 15 nt, Human
uccgugcuaaggacu

SEQ ID NO: 1640127 - RNA, 14 nt, Human
uccgugcuaaggac

SEQ ID NO: 1640128 - RNA, 14 nt, Human
uccuaggcauuugc

SEQ ID NO: 1640129 - RNA, 20 nt, Human
uccuagcacuuugggaggcc

SEQ ID NO: 1640130 - RNA, 22 nt, Human
ucccuuacgugaguccuggcau

SEQ ID NO: 1640131 - RNA, 18 nt, Human
ucccuuacgugaguccug

SEQ ID NO: 1640132 - RNA, 22 nt, Human
ucccuucaaccauuccccaugg

SEQ ID NO: 1640133 - RNA, 21 nt, Human
ucccuucaaccauuccccaug

SEQ ID NO: 1640134 - RNA, 11 nt, Human
ucccuucaacc

SEQ ID NO: 1640135 - RNA, 22 nt, Human
ucccuuuccaaaugcccagcuu

SEQ ID NO: 1640136 - RNA, 12 nt, Human
acuccugcaggc

SEQ ID NO: 1640137 - RNA, 23 nt, Human
acuccugcacacgcuccuuccuc

SEQ ID NO: 1640138 - RNA, 19 nt, Human
uccucccucccucuuuccc

SEQ ID NO: 1640139 - RNA, 15 nt, Human
uccucccucccucuu

SEQ ID NO: 1640140 - RNA, 17 nt, Human
uccucccucccucuuuc

SEQ ID NO: 1640141 - RNA, 12 nt, Human
uccucuccccag

SEQ ID NO: 1640142 - RNA, 16 nt, Human
uccucuccacugccuu

SEQ ID NO: 1640143 - RNA, 15 nt, Human
uccucuccacugccu

SEQ ID NO: 1640144 - RNA, 14 nt, Human
uccucuccacugcc

SEQ ID NO: 1640145 - RNA, 13 nt, Human
uccucuccacugc

SEQ ID NO: 1640146 - RNA, 12 nt, Human
uccucuccacug

SEQ ID NO: 1640147 - RNA, 18 nt, Human
uccucauacccaccccca

SEQ ID NO: 1640148 - RNA, 14 nt, Human
uccucauacccacc

SEQ ID NO: 1640149 - RNA, 22 nt, Human
uccucauacccacccccaccca

SEQ ID NO: 1640150 - RNA, 16 nt, Human
uccuccccuccuccug

SEQ ID NO: 1640151 - RNA, 20 nt, Human
uccuccccuccuccuggacu

SEQ ID NO: 1640152 - RNA, 18 nt, Human
uccuccccuccuccugga

SEQ ID NO: 1640153 - RNA, 22 nt, Human
uccuccccuccuccuggacucc

SEQ ID NO: 1640154 - RNA, 19 nt, Human
acucuuauugcccacgcug

SEQ ID NO: 1640155 - RNA, 16 nt, Human
acucuuauugcccacg

SEQ ID NO: 1640156 - RNA, 20 nt, Human
uccucagaucuucugugggu

SEQ ID NO: 1640157 - RNA, 17 nt, Human
acucuccucugcugcug

SEQ ID NO: 1640158 - RNA, 22 nt, Human
acucuccauuuaauaauuauau

SEQ ID NO: 1640159 - RNA, 23 nt, Human
acucgcgacaaugcaaaccauca

SEQ ID NO: 1640160 - RNA, 20 nt, Human
acucgcgacaaugcaaacca

SEQ ID NO: 1640161 - RNA, 19 nt, Human
uccuaggcauuugcugaau

SEQ ID NO: 1640162 - RNA, 18 nt, Human
acucgcgacaaugcaaac

SEQ ID NO: 1640163 - RNA, 19 nt, Human
acucuccucugcugcuggc

SEQ ID NO: 1640164 - RNA, 18 nt, Human
acucuccucugcugcugg

SEQ ID NO: 1640165 - RNA, 21 nt, Human
acucuccucugcugcuggcug

SEQ ID NO: 1640166 - RNA, 13 nt, Human
acucugacaacag

SEQ ID NO: 1640167 - RNA, 23 nt, Human
acucuuauaucuauauuuuacau

SEQ ID NO: 1640168 - RNA, 15 nt, Human
ucgaacuggcugcaa

SEQ ID NO: 1640169 - RNA, 14 nt, Human
ucgaacuggcugca

SEQ ID NO: 1640170 - RNA, 15 nt, Human
uccuuucaccacaug

SEQ ID NO: 1640171 - RNA, 20 nt, Human
uccuuucacaaccuucugug

SEQ ID NO: 1640172 - RNA, 19 nt, Human
uccuuucacaaccuucugu

SEQ ID NO: 1640173 - RNA, 18 nt, Human
uccuuucacaaccuucug

SEQ ID NO: 1640174 - RNA, 16 nt, Human
uccuuucacaaccuuc

SEQ ID NO: 1640175 - RNA, 13 nt, Human
ucgcgacaaugca

SEQ ID NO: 1640176 - RNA, 14 nt, Human
ucgcgacaaugcaa

SEQ ID NO: 1640177 - RNA, 17 nt, Human
ucgaggacagggaggug

SEQ ID NO: 1640178 - RNA, 14 nt, Human
ucgaggacagggag

SEQ ID NO: 1640179 - RNA, 15 nt, Human
ucgagcaugccugga

SEQ ID NO: 1640180 - RNA, 14 nt, Human
ucgagcaugccugg

SEQ ID NO: 1640181 - RNA, 13 nt, Human
ucgaccugccucg

SEQ ID NO: 1640182 - RNA, 23 nt, Human
acuguacaugaaaacacauuuuu

SEQ ID NO: 1640183 - RNA, 13 nt, Human
acuguacaugaaa

SEQ ID NO: 1640184 - RNA, 14 nt, Human
acuguacaugaaaa

SEQ ID NO: 1640185 - RNA, 15 nt, Human
acuguacuccuccca

SEQ ID NO: 1640186 - RNA, 14 nt, Human
acuguacuccuccc

SEQ ID NO: 1640187 - RNA, 13 nt, Human
acuguacuccucc

SEQ ID NO: 1640188 - RNA, 15 nt, Human
acuguacaaaguaga

SEQ ID NO: 1640189 - RNA, 14 nt, Human
acuguacaaaguag

SEQ ID NO: 1640190 - RNA, 20 nt, Human
acuguacagacagaaaaaac

SEQ ID NO: 1640191 - RNA, 13 nt, Human
acuguacaaagua

SEQ ID NO: 1640192 - RNA, 19 nt, Human
acuguaauuugugauacaa

SEQ ID NO: 1640193 - RNA, 14 nt, Human
ucgcuccugugucu

SEQ ID NO: 1640194 - RNA, 13 nt, Human
ucgcuccuguguc

SEQ ID NO: 1640195 - RNA, 12 nt, Human
ucgcuccugugu

SEQ ID NO: 1640196 - RNA, 19 nt, Human
acuggguacuuguggacac

SEQ ID NO: 1640197 - RNA, 23 nt, Human
acuggguacuuguggacacagcu

SEQ ID NO: 1640198 - RNA, 20 nt, Human
acuggguacuuguggacaca

SEQ ID NO: 1640199 - RNA, 16 nt, Human
acuguaaggcaaucau

SEQ ID NO: 1640200 - RNA, 22 nt, Human
acugccuucucaacuccaaacu

SEQ ID NO: 1640201 - RNA, 12 nt, Human
acugcucugaug

SEQ ID NO: 1640202 - RNA, 23 nt, Human
acugcuuccagugaggcucugcc

SEQ ID NO: 1640203 - RNA, 22 nt, Human
acugcuuccagugaggcucugc

SEQ ID NO: 1640204 - RNA, 21 nt, Human
acugcuuccagugaggcucug

SEQ ID NO: 1640205 - RNA, 18 nt, Human
acugcuuccagugaggcu

SEQ ID NO: 1640206 - RNA, 21 nt, Human
acugcugcccagccuccaagc

SEQ ID NO: 1640207 - RNA, 18 nt, Human
acugcugcccagccucca

SEQ ID NO: 1640208 - RNA, 16 nt, Human
acugcugcccagccuc

SEQ ID NO: 1640209 - RNA, 12 nt, Human
acugcuggcugc

SEQ ID NO: 1640210 - RNA, 21 nt, Human
acugcuugugaaaggaaagag

SEQ ID NO: 1640211 - RNA, 13 nt, Human
acuggauuguacu

SEQ ID NO: 1640212 - RNA, 16 nt, Human
acuggauuguacuuug

SEQ ID NO: 1640213 - RNA, 13 nt, Human
acugcuggcugcc

SEQ ID NO: 1640214 - RNA, 22 nt, Human
acuggcacaguuuucugagaaa

SEQ ID NO: 1640215 - RNA, 23 nt, Human
acuggccucugcugauccuccca

SEQ ID NO: 1640216 - RNA, 22 nt, Human
acuggcugcaaaggguaucagg

SEQ ID NO: 1640217 - RNA, 13 nt, Human
uccuucagccuga

SEQ ID NO: 1640218 - RNA, 11 nt, Human
uccuucagugc

SEQ ID NO: 1640219 - RNA, 12 nt, Human
uccuucagugcc

SEQ ID NO: 1640220 - RNA, 13 nt, Human
uccuucagugccu

SEQ ID NO: 1640221 - RNA, 22 nt, Human
uccuucagugccuuauggaaca

SEQ ID NO: 1640222 - RNA, 14 nt, Human
uccuucagugccuu

SEQ ID NO: 1640223 - RNA, 16 nt, Human
uccuuccucugaggcu

SEQ ID NO: 1640224 - RNA, 17 nt, Human
uccuuccucugagccuu

SEQ ID NO: 1640225 - RNA, 16 nt, Human
uccuuccucugagccu

SEQ ID NO: 1640226 - RNA, 22 nt, Human
acugaggggaggggagcauggg

SEQ ID NO: 1640227 - RNA, 17 nt, Human
acugaggggaggggagc

SEQ ID NO: 1640228 - RNA, 14 nt, Human
acugaggaucagag

SEQ ID NO: 1640229 - RNA, 15 nt, Human
acugaggaccagcca

SEQ ID NO: 1640230 - RNA, 15 nt, Human
uccucuccccagcaa

SEQ ID NO: 1640231 - RNA, 18 nt, Human
acugaguacguugugcau

SEQ ID NO: 1640232 - RNA, 19 nt, Human
acugaguacguugugcauu

SEQ ID NO: 1640233 - RNA, 21 nt, Human
acugaguacguugugcauuug

SEQ ID NO: 1640234 - RNA, 22 nt, Human
acugaguacguugugcauuugg

SEQ ID NO: 1640235 - RNA, 23 nt, Human
acugaguacguugugcauuuggu

SEQ ID NO: 1640236 - RNA, 16 nt, Human
acugagugccuuuugg

SEQ ID NO: 1640237 - RNA, 14 nt, Human
acugcaaccuccgc

SEQ ID NO: 1640238 - RNA, 13 nt, Human
acugcaaccuccg

SEQ ID NO: 1640239 - RNA, 22 nt, Human
acugcaaccuccgccucuuggg

SEQ ID NO: 1640240 - RNA, 16 nt, Human
acugcaaccuccgccu

SEQ ID NO: 1640241 - RNA, 23 nt, Human
acugcaaccuucgccaccugggu

SEQ ID NO: 1640242 - RNA, 20 nt, Human
acugcaaccuucgccaccug

SEQ ID NO: 1640243 - RNA, 22 nt, Human
acugcacagugcaucucagccc

SEQ ID NO: 1640244 - RNA, 18 nt, Human
acugcacagugcaucuca

SEQ ID NO: 1640245 - RNA, 16 nt, Human
acugcacagugcaucu

SEQ ID NO: 1640246 - RNA, 20 nt, Human
uccugaguagcugggauuac

SEQ ID NO: 1640247 - RNA, 20 nt, Human
uccugccucgaacuggcugc

SEQ ID NO: 1640248 - RNA, 21 nt, Human
uccugccucgaacuggcugca

SEQ ID NO: 1640249 - RNA, 20 nt, Human
uccugcaggcagccaggcca

SEQ ID NO: 1640250 - RNA, 19 nt, Human
uccugcaggcagccaggcc

SEQ ID NO: 1640251 - RNA, 17 nt, Human
uccugcaggcagccagg

SEQ ID NO: 1640252 - RNA, 16 nt, Human
uccugcaggcagccag

SEQ ID NO: 1640253 - RNA, 19 nt, Human
uccugccucagccucccaa

SEQ ID NO: 1640254 - RNA, 22 nt, Human
uccugcaggcagccaggccaca

SEQ ID NO: 1640255 - RNA, 15 nt, Human
uccugggcagcugcc

SEQ ID NO: 1640256 - RNA, 21 nt, Human
uccugcugcaguugccaguca

SEQ ID NO: 1640257 - RNA, 16 nt, Human
uccugggcagcugccu

SEQ ID NO: 1640258 - RNA, 17 nt, Human
uccugggcagcugccuc

SEQ ID NO: 1640259 - RNA, 13 nt, Human
uccugcugcaguu

SEQ ID NO: 1640260 - RNA, 18 nt, Human
uccugggcagcugccucc

SEQ ID NO: 1640261 - RNA, 19 nt, Human
uccugggcagcugccuccc

SEQ ID NO: 1640262 - RNA, 22 nt, Human
uccugggcagcugccuccccuc

SEQ ID NO: 1640263 - RNA, 23 nt, Human
uccugggcagcugccuccccucc

SEQ ID NO: 1640264 - RNA, 19 nt, Human
uccuggggaaccugacccc

SEQ ID NO: 1640265 - RNA, 18 nt, Human
uccuggggaaccugaccc

SEQ ID NO: 1640266 - RNA, 23 nt, Human
uccuggggguucuuucuuccucu

SEQ ID NO: 1640267 - RNA, 22 nt, Human
uccuggggguucuuucuuccuc

SEQ ID NO: 1640268 - RNA, 21 nt, Human
uccuggggguucuuucuuccu

SEQ ID NO: 1640269 - RNA, 18 nt, Human
uccugugacuucagcucu

SEQ ID NO: 1640270 - RNA, 22 nt, Human
acugcagccucaaccuccuggg

SEQ ID NO: 1640271 - RNA, 21 nt, Human
acugcagccucaaccuccugg

SEQ ID NO: 1640272 - RNA, 19 nt, Human
acugcagccucaaccuccu

SEQ ID NO: 1640273 - RNA, 17 nt, Human
uccuuaaagaguguggc

SEQ ID NO: 1640274 - RNA, 18 nt, Human
uccuuaaagaguguggca

SEQ ID NO: 1640275 - RNA, 23 nt, Human
uccuuaaagaguguggcaaaaua

SEQ ID NO: 1640276 - RNA, 23 nt, Human
acugcagccucaaccuccugggc

SEQ ID NO: 1640277 - RNA, 16 nt, Human
acugcagggacugcca

SEQ ID NO: 1640278 - RNA, 18 nt, Human
acugcagggacugccagu

SEQ ID NO: 1640279 - RNA, 17 nt, Human
acugcagggacugccag

SEQ ID NO: 1640280 - RNA, 24 nt, Human
uccugugucuugcaauggcagccu

SEQ ID NO: 1640281 - RNA, 23 nt, Human
uccugugucuugcaauggcagcc

SEQ ID NO: 1640282 - RNA, 14 nt, Human
uccugugugugcgc

SEQ ID NO: 1640283 - RNA, 13 nt, Human
uccugugugugcg

SEQ ID NO: 1640284 - RNA, 18 nt, Human
uccugugugugcgccuac

SEQ ID NO: 1640285 - RNA, 19 nt, Human
uccuguucccaugagauga

SEQ ID NO: 1640286 - RNA, 10 nt, Human
acccuuuucu

SEQ ID NO: 1640287 - RNA, 18 nt, Human
accgagucucuucuccac

SEQ ID NO: 1640288 - RNA, 22 nt, Human
ucauauuuacuucuuauacauu

SEQ ID NO: 1640289 - RNA, 21 nt, Human
ucauauuuacuucuuauacau

SEQ ID NO: 1640290 - RNA, 20 nt, Human
ucauauuuacuucuuauaca

SEQ ID NO: 1640291 - RNA, 20 nt, Human
accgcagacaggaccaggga

SEQ ID NO: 1640292 - RNA, 24 nt, Human
accgagucucuucuccacuggaug

SEQ ID NO: 1640293 - RNA, 21 nt, Human
accgagucucuucuccacugg

SEQ ID NO: 1640294 - RNA, 20 nt, Human
accgagucucuucuccacug

SEQ ID NO: 1640295 - RNA, 17 nt, Human
accgccaaggcuggggg

SEQ ID NO: 1640296 - RNA, 20 nt, Human
accuccgccucuuggguuca

SEQ ID NO: 1640297 - RNA, 11 nt, Human
accucagccuc

SEQ ID NO: 1640298 - RNA, 13 nt, Human
accuagccuuaga

SEQ ID NO: 1640299 - RNA, 22 nt, Human
ucaugaauuaguuuuauaugcu

SEQ ID NO: 1640300 - RNA, 23 nt, Human
ucauccacugugccaugugccag

SEQ ID NO: 1640301 - RNA, 21 nt, Human
ucauccacugugccaugugcc

SEQ ID NO: 1640302 - RNA, 19 nt, Human
ucauccacugugccaugug

SEQ ID NO: 1640303 - RNA, 19 nt, Human
ucaugacaaagacugagua

SEQ ID NO: 1640304 - RNA, 11 nt, Human
ucauguucuua

SEQ ID NO: 1640305 - RNA, 17 nt, Human
ucauguucuuaauucuu

SEQ ID NO: 1640306 - RNA, 13 nt, Human
ucaugucuggcua

SEQ ID NO: 1640307 - RNA, 14 nt, Human
ucaugugaaaucau

SEQ ID NO: 1640308 - RNA, 22 nt, Human
ucauugaccugaggcccuucuc

SEQ ID NO: 1640309 - RNA, 21 nt, Human
ucauucuccuuguguuacuaa

SEQ ID NO: 1640310 - RNA, 17 nt, Human
accucggugccuuccuc

SEQ ID NO: 1640311 - RNA, 18 nt, Human
accucuaaauucuuucau

SEQ ID NO: 1640312 - RNA, 19 nt, Human
accucucucacuccuugaa

SEQ ID NO: 1640313 - RNA, 14 nt, Human
accucucucacucc

SEQ ID NO: 1640314 - RNA, 23 nt, Human
accucucccuuggauuguccccg

SEQ ID NO: 1640315 - RNA, 12 nt, Human
accucugcacaa

SEQ ID NO: 1640316 - RNA, 15 nt, Human
accucucccuuggau

SEQ ID NO: 1640317 - RNA, 14 nt, Human
accucucccuugga

SEQ ID NO: 1640318 - RNA, 13 nt, Human
accucucccuugg

SEQ ID NO: 1640319 - RNA, 21 nt, Human
accucuaaauucuuucauuuu

SEQ ID NO: 1640320 - RNA, 21 nt, Human
uccaacuaucucauuuccaag

SEQ ID NO: 1640321 - RNA, 13 nt, Human
uccaagcucccag

SEQ ID NO: 1640322 - RNA, 12 nt, Human
uccaagcuccca

SEQ ID NO: 1640323 - RNA, 15 nt, Human
uccaagcucccaggc

SEQ ID NO: 1640324 - RNA, 14 nt, Human
uccaagcucccagg

SEQ ID NO: 1640325 - RNA, 16 nt, Human
uccaagcucccaggca

SEQ ID NO: 1640326 - RNA, 18 nt, Human
uccaagcuccaucuccac

SEQ ID NO: 1640327 - RNA, 15 nt, Human
uccaaaugcagcuuu

SEQ ID NO: 1640328 - RNA, 14 nt, Human
uccaaaugcagcuu

SEQ ID NO: 1640329 - RNA, 11 nt, Human
uccaagcuggu

SEQ ID NO: 1640330 - RNA, 16 nt, Human
uccaagcuggucccac

SEQ ID NO: 1640331 - RNA, 21 nt, Human
ucauuugagcagggcucagcg

SEQ ID NO: 1640332 - RNA, 18 nt, Human
ucauuugugccagaaugc

SEQ ID NO: 1640333 - RNA, 20 nt, Human
ucauuuuagggguagcauuu

SEQ ID NO: 1640334 - RNA, 13 nt, Human
ucauuuuuuuuaa

SEQ ID NO: 1640335 - RNA, 17 nt, Human
ucauuuuuuuuaagaaa

SEQ ID NO: 1640336 - RNA, 23 nt, Human
uccaaagucucuggaauuugaaa

SEQ ID NO: 1640337 - RNA, 14 nt, Human
accuggaauauaua

SEQ ID NO: 1640338 - RNA, 17 nt, Human
accuggaauauauaacc

SEQ ID NO: 1640339 - RNA, 19 nt, Human
ucauuugagcagggcucag

SEQ ID NO: 1640340 - RNA, 19 nt, Human
accugcucuccucuugcca

SEQ ID NO: 1640341 - RNA, 22 nt, Human
accugcggugcuaucuccccca

SEQ ID NO: 1640342 - RNA, 19 nt, Human
accugcggugcuaucuccc

SEQ ID NO: 1640343 - RNA, 23 nt, Human
accugcggugcuaucucccccag

SEQ ID NO: 1640344 - RNA, 17 nt, Human
accugcucuccucuugc

SEQ ID NO: 1640345 - RNA, 18 nt, Human
accugcucuccucuugcc

SEQ ID NO: 1640346 - RNA, 22 nt, Human
accugaagucuuuguacagaca

SEQ ID NO: 1640347 - RNA, 15 nt, Human
accugaagucuuugu

SEQ ID NO: 1640348 - RNA, 20 nt, Human
uccagccugagcgacaguga

SEQ ID NO: 1640349 - RNA, 22 nt, Human
uccagccccuggaugcagccuc

SEQ ID NO: 1640350 - RNA, 23 nt, Human
uccagaccccuggcuuuucacug

SEQ ID NO: 1640351 - RNA, 21 nt, Human
uccagccugagcgacagugag

SEQ ID NO: 1640352 - RNA, 21 nt, Human
uccagccccuggaugcagccu

SEQ ID NO: 1640353 - RNA, 19 nt, Human
uccagccccuggaugcagc

SEQ ID NO: 1640354 - RNA, 17 nt, Human
uccagccccuggaugca

SEQ ID NO: 1640355 - RNA, 16 nt, Human
uccagccccuggaugc

SEQ ID NO: 1640356 - RNA, 15 nt, Human
uccagccccuggaug

SEQ ID NO: 1640357 - RNA, 14 nt, Human
uccagacccggcug

SEQ ID NO: 1640358 - RNA, 18 nt, Human
uccagaccccuggcuuuu

SEQ ID NO: 1640359 - RNA, 17 nt, Human
uccagaccccuggcuuu

SEQ ID NO: 1640360 - RNA, 16 nt, Human
uccagaccccuggcuu

SEQ ID NO: 1640361 - RNA, 15 nt, Human
uccagaccccuggcu

SEQ ID NO: 1640362 - RNA, 23 nt, Human
accuuuguauucucuccuguacc

SEQ ID NO: 1640363 - RNA, 15 nt, Human
accuuuguauucucu

SEQ ID NO: 1640364 - RNA, 19 nt, Human
accuuuguauucucuccug

SEQ ID NO: 1640365 - RNA, 22 nt, Human
uccagaaguuugagaucagccu

SEQ ID NO: 1640366 - RNA, 18 nt, Human
uccaccaucaagccacca

SEQ ID NO: 1640367 - RNA, 15 nt, Human
uccaccaucaagcca

SEQ ID NO: 1640368 - RNA, 23 nt, Human
accuggucacaggacucugccuc

SEQ ID NO: 1640369 - RNA, 22 nt, Human
accuggucacaggacucugccu

SEQ ID NO: 1640370 - RNA, 17 nt, Human
accuuagacagucccug

SEQ ID NO: 1640371 - RNA, 14 nt, Human
accuuagccugccc

SEQ ID NO: 1640372 - RNA, 13 nt, Human
accuucuccuuca

SEQ ID NO: 1640373 - RNA, 14 nt, Human
accuucuccuucac

SEQ ID NO: 1640374 - RNA, 12 nt, Human
accuucuguggc

SEQ ID NO: 1640375 - RNA, 16 nt, Human
accuucuguggcucac

SEQ ID NO: 1640376 - RNA, 15 nt, Human
accuucuguggcuca

SEQ ID NO: 1640377 - RNA, 13 nt, Human
accuucuguggcu

SEQ ID NO: 1640378 - RNA, 14 nt, Human
accuugacagggca

SEQ ID NO: 1640379 - RNA, 15 nt, Human
accuugaaugaugcc

SEQ ID NO: 1640380 - RNA, 15 nt, Human
accuugacagggcac

SEQ ID NO: 1640381 - RNA, 16 nt, Human
accuugacagggcaca

SEQ ID NO: 1640382 - RNA, 12 nt, Human
accuucuccuuc

SEQ ID NO: 1640383 - RNA, 12 nt, Human
uauuucauuucu

SEQ ID NO: 1640384 - RNA, 11 nt, Human
accacagcagu

SEQ ID NO: 1640385 - RNA, 14 nt, Human
accacaucuugcuc

SEQ ID NO: 1640386 - RNA, 21 nt, Human
accacagacauacuaaccagc

SEQ ID NO: 1640387 - RNA, 22 nt, Human
accacagacauacuaaccagca

SEQ ID NO: 1640388 - RNA, 19 nt, Human
accacugcagaagacagua

SEQ ID NO: 1640389 - RNA, 14 nt, Human
accacugcagaaga

SEQ ID NO: 1640390 - RNA, 14 nt, Human
accacuucagcuga

SEQ ID NO: 1640391 - RNA, 13 nt, Human
accacuucagcug

SEQ ID NO: 1640392 - RNA, 15 nt, Human
accacuucagcugac

SEQ ID NO: 1640393 - RNA, 24 nt, Human
accacaucuugcucugcugacaga

SEQ ID NO: 1640394 - RNA, 21 nt, Human
accacaucuugcucugcugac

SEQ ID NO: 1640395 - RNA, 20 nt, Human
accacaucuugcucugcuga

SEQ ID NO: 1640396 - RNA, 16 nt, Human
accacaucuugcucug

SEQ ID NO: 1640397 - RNA, 20 nt, Human
accacucuaucaaguauuau

SEQ ID NO: 1640398 - RNA, 23 nt, Human
accacuuguguuuugcaagccag

SEQ ID NO: 1640399 - RNA, 19 nt, Human
accacuuguguuuugcaag

SEQ ID NO: 1640400 - RNA, 12 nt, Human
accacuuuuguu

SEQ ID NO: 1640401 - RNA, 23 nt, Human
accagacaccuugacagggcaca

SEQ ID NO: 1640402 - RNA, 22 nt, Human
accagacaccuugacagggcac

SEQ ID NO: 1640403 - RNA, 11 nt, Human
accagacaggu

SEQ ID NO: 1640404 - RNA, 22 nt, Human
accagagcccaccuuggcucaa

SEQ ID NO: 1640405 - RNA, 19 nt, Human
accagagcccaccuuggcu

SEQ ID NO: 1640406 - RNA, 12 nt, Human
accagagcugcc

SEQ ID NO: 1640407 - RNA, 23 nt, Human
ucaccugaagacucauucuucug

SEQ ID NO: 1640408 - RNA, 19 nt, Human
ucaccugaagacucauucu

SEQ ID NO: 1640409 - RNA, 17 nt, Human
ucaccuccugcugggca

SEQ ID NO: 1640410 - RNA, 15 nt, Human
ucaccuccugcuggg

SEQ ID NO: 1640411 - RNA, 14 nt, Human
ucaccuccugcugg

SEQ ID NO: 1640412 - RNA, 13 nt, Human
ucaccuccugcug

SEQ ID NO: 1640413 - RNA, 12 nt, Human
ucaccuccugcu

SEQ ID NO: 1640414 - RNA, 15 nt, Human
ucaccucccccaucu

SEQ ID NO: 1640415 - RNA, 13 nt, Human
ucaccucccccau

SEQ ID NO: 1640416 - RNA, 19 nt, Human
accaggcaacuugggaacu

SEQ ID NO: 1640417 - RNA, 15 nt, Human
acccaaaaggcagaa

SEQ ID NO: 1640418 - RNA, 13 nt, Human
acccaaaaggcag

SEQ ID NO: 1640419 - RNA, 23 nt, Human
accauuuugggguacccacugcu

SEQ ID NO: 1640420 - RNA, 16 nt, Human
accauucuccaccugc

SEQ ID NO: 1640421 - RNA, 13 nt, Human
accauucuccacc

SEQ ID NO: 1640422 - RNA, 18 nt, Human
accauucuccaccugcca

SEQ ID NO: 1640423 - RNA, 22 nt, Human
accaugauuaaccacuucagcu

SEQ ID NO: 1640424 - RNA, 23 nt, Human
accaugauuaaccacuucagcug

SEQ ID NO: 1640425 - RNA, 15 nt, Human
accauuccccauggg

SEQ ID NO: 1640426 - RNA, 18 nt, Human
acccaaaaggcagaagca

SEQ ID NO: 1640427 - RNA, 21 nt, Human
acccaaauguucaucaaugaa

SEQ ID NO: 1640428 - RNA, 16 nt, Human
acccagaagaaaauag

SEQ ID NO: 1640429 - RNA, 19 nt, Human
acccacuugcuuuuaaaau

SEQ ID NO: 1640430 - RNA, 18 nt, Human
acccagcccacuucugcc

SEQ ID NO: 1640431 - RNA, 17 nt, Human
acccagcccacuucugc

SEQ ID NO: 1640432 - RNA, 16 nt, Human
acccagcccacuucug

SEQ ID NO: 1640433 - RNA, 12 nt, Human
ucacugcagccu

SEQ ID NO: 1640434 - RNA, 13 nt, Human
ucacugcagccuc

SEQ ID NO: 1640435 - RNA, 16 nt, Human
ucacugagacagcccg

SEQ ID NO: 1640436 - RNA, 24 nt, Human
ucacugcacagugcaucucagccc

SEQ ID NO: 1640437 - RNA, 22 nt, Human
ucacugcacagugcaucucagc

SEQ ID NO: 1640438 - RNA, 20 nt, Human
ucacugcacagugcaucuca

SEQ ID NO: 1640439 - RNA, 15 nt, Human
ucacugagacagccc

SEQ ID NO: 1640440 - RNA, 14 nt, Human
ucacugagacagcc

SEQ ID NO: 1640441 - RNA, 13 nt, Human
ucacugagacagc

SEQ ID NO: 1640442 - RNA, 21 nt, Human
accaguguuguggauuuaaca

SEQ ID NO: 1640443 - RNA, 18 nt, Human
ucacuguugcccaggcug

SEQ ID NO: 1640444 - RNA, 17 nt, Human
ucacuguugcccaggcu

SEQ ID NO: 1640445 - RNA, 19 nt, Human
ucacuguugcccaggcugg

SEQ ID NO: 1640446 - RNA, 15 nt, Human
acccccagccugcua

SEQ ID NO: 1640447 - RNA, 12 nt, Human
accccuggcuuu

SEQ ID NO: 1640448 - RNA, 12 nt, Human
ucagccugggca

SEQ ID NO: 1640449 - RNA, 10 nt, Human
ucagccuggg

SEQ ID NO: 1640450 - RNA, 19 nt, Human
ucagccuggcuucaaauug

SEQ ID NO: 1640451 - RNA, 17 nt, Human
accccuggcuuuucacu

SEQ ID NO: 1640452 - RNA, 15 nt, Human
accccuggcuuuuca

SEQ ID NO: 1640453 - RNA, 13 nt, Human
ucagaagacacug

SEQ ID NO: 1640454 - RNA, 13 nt, Human
ucagaucuucugu

SEQ ID NO: 1640455 - RNA, 13 nt, Human
ucagauuuuauua

SEQ ID NO: 1640456 - RNA, 15 nt, Human
ucagauuuuauuaug

SEQ ID NO: 1640457 - RNA, 14 nt, Human
ucagauuuuauuau

SEQ ID NO: 1640458 - RNA, 15 nt, Human
acccagcucuggucc

SEQ ID NO: 1640459 - RNA, 13 nt, Human
acccagcucuggu

SEQ ID NO: 1640460 - RNA, 19 nt, Human
ucagcccucccugccccuc

SEQ ID NO: 1640461 - RNA, 18 nt, Human
ucagcccucccugccccu

SEQ ID NO: 1640462 - RNA, 22 nt, Human
ucagauuuuauuauguaaaucc

SEQ ID NO: 1640463 - RNA, 20 nt, Human
ucagauuuuauuauguaaau

SEQ ID NO: 1640464 - RNA, 19 nt, Human
ucagauuuuauuauguaaa

SEQ ID NO: 1640465 - RNA, 16 nt, Human
ucagauuuuauuaugu

SEQ ID NO: 1640466 - RNA, 14 nt, Human
acccucuuagaaaa

SEQ ID NO: 1640467 - RNA, 12 nt, Human
acccugcccugu

SEQ ID NO: 1640468 - RNA, 11 nt, Human
acccugcccug

SEQ ID NO: 1640469 - RNA, 13 nt, Human
acccugcccugug

SEQ ID NO: 1640470 - RNA, 14 nt, Human
acccugcccugugg

SEQ ID NO: 1640471 - RNA, 20 nt, Human
acccuuguggucccacccca

SEQ ID NO: 1640472 - RNA, 19 nt, Human
acccuuguggucccacccc

SEQ ID NO: 1640473 - RNA, 17 nt, Human
acccuuguggucccacc

SEQ ID NO: 1640474 - RNA, 16 nt, Human
acccuuguggucccac

SEQ ID NO: 1640475 - RNA, 20 nt, Human
accccuucgcuccugugucu

SEQ ID NO: 1640476 - RNA, 19 nt, Human
accccuucgcuccuguguc

SEQ ID NO: 1640477 - RNA, 16 nt, Human
ucagguaacaggcaga

SEQ ID NO: 1640478 - RNA, 15 nt, Human
ucagguaacaggcag

SEQ ID NO: 1640479 - RNA, 13 nt, Human
ucagguaacaggc

SEQ ID NO: 1640480 - RNA, 18 nt, Human
ucagggucccugguggca

SEQ ID NO: 1640481 - RNA, 14 nt, Human
ucagggucccuggu

SEQ ID NO: 1640482 - RNA, 13 nt, Human
ucagggucccugg

SEQ ID NO: 1640483 - RNA, 12 nt, Human
ucaggccaggcc

SEQ ID NO: 1640484 - RNA, 11 nt, Human
ucaggccaggc

SEQ ID NO: 1640485 - RNA, 20 nt, Human
ucaggccagcugcuugggcu

SEQ ID NO: 1640486 - RNA, 15 nt, Human
ucaggccagcugcuu

SEQ ID NO: 1640487 - RNA, 20 nt, Human
ucaggaagcucagggccugg

SEQ ID NO: 1640488 - RNA, 19 nt, Human
ucaggaagcucagggccug

SEQ ID NO: 1640489 - RNA, 17 nt, Human
ucaggaagcucagggcc

SEQ ID NO: 1640490 - RNA, 12 nt, Human
ucaggaagcuca

SEQ ID NO: 1640491 - RNA, 23 nt, Human
ucaggccaaacucaccugccccu

SEQ ID NO: 1640492 - RNA, 20 nt, Human
ucaggccaaacucaccugcc

SEQ ID NO: 1640493 - RNA, 17 nt, Human
ucagcggggacagcucc

SEQ ID NO: 1640494 - RNA, 16 nt, Human
ucagcggggacagcuc

SEQ ID NO: 1640495 - RNA, 15 nt, Human
ucagcggggacagcu

SEQ ID NO: 1640496 - RNA, 18 nt, Human
ucagcggggacagcuccu

SEQ ID NO: 1640497 - RNA, 14 nt, Human
agcagauuauucac

SEQ ID NO: 1640498 - RNA, 16 nt, Human
agcagauuauucacug

SEQ ID NO: 1640499 - RNA, 15 nt, Human
agcagauuauucacu

SEQ ID NO: 1640500 - RNA, 19 nt, Human
agcagauggagaccccuug

SEQ ID NO: 1640501 - RNA, 20 nt, Human
agcagauuauucacugauuu

SEQ ID NO: 1640502 - RNA, 19 nt, Human
agcagauuauucacugauu

SEQ ID NO: 1640503 - RNA, 17 nt, Human
agcagaggaaggagagg

SEQ ID NO: 1640504 - RNA, 22 nt, Human
ugagguacugagagugaacaaa

SEQ ID NO: 1640505 - RNA, 13 nt, Human
ugaggucagagcc

SEQ ID NO: 1640506 - RNA, 16 nt, Human
ugaggucagagccugc

SEQ ID NO: 1640507 - RNA, 14 nt, Human
ugaggucagagccu

SEQ ID NO: 1640508 - RNA, 17 nt, Human
ugagguacugagaguga

SEQ ID NO: 1640509 - RNA, 20 nt, Human
ugaggguugggcugguguca

SEQ ID NO: 1640510 - RNA, 19 nt, Human
agcagagaccaucccugaa

SEQ ID NO: 1640511 - RNA, 18 nt, Human
agcagagaccaucccuga

SEQ ID NO: 1640512 - RNA, 17 nt, Human
ugaggucagagccugca

SEQ ID NO: 1640513 - RNA, 20 nt, Human
agcagagcaccuuagacagu

SEQ ID NO: 1640514 - RNA, 20 nt, Human
agcagagaccaucccugaag

SEQ ID NO: 1640515 - RNA, 19 nt, Human
ugagguacaaccuguucug

SEQ ID NO: 1640516 - RNA, 13 nt, Human
ugaggggccucuu

SEQ ID NO: 1640517 - RNA, 12 nt, Human
ugaggggccucu

SEQ ID NO: 1640518 - RNA, 24 nt, Human
ugaggcccuucucuccagccccug

SEQ ID NO: 1640519 - RNA, 23 nt, Human
ugaggcccuucucuccagccccu

SEQ ID NO: 1640520 - RNA, 22 nt, Human
ugaggcccuucucuccagcccc

SEQ ID NO: 1640521 - RNA, 20 nt, Human
ugaggcccuucucuccagcc

SEQ ID NO: 1640522 - RNA, 19 nt, Human
ugaggcccuucucuccagc

SEQ ID NO: 1640523 - RNA, 18 nt, Human
ugaggcccuucucuccag

SEQ ID NO: 1640524 - RNA, 16 nt, Human
ugaggcccuucucucc

SEQ ID NO: 1640525 - RNA, 19 nt, Human
ugagggauacccaucccau

SEQ ID NO: 1640526 - RNA, 15 nt, Human
ugagggauuaucuuu

SEQ ID NO: 1640527 - RNA, 15 nt, Human
ugaggacacugauau

SEQ ID NO: 1640528 - RNA, 21 nt, Human
ugaggacacuaaccacgcugg

SEQ ID NO: 1640529 - RNA, 12 nt, Human
ugaggccagaga

SEQ ID NO: 1640530 - RNA, 22 nt, Human
ugaggaauccagacccggcugc

SEQ ID NO: 1640531 - RNA, 21 nt, Human
ugaggaauccagacccggcug

SEQ ID NO: 1640532 - RNA, 16 nt, Human
ugaggaauucuguaua

SEQ ID NO: 1640533 - RNA, 15 nt, Human
ugaggaauucuguau

SEQ ID NO: 1640534 - RNA, 14 nt, Human
ugaggaauucugua

SEQ ID NO: 1640535 - RNA, 19 nt, Human
ugaggaauucuguauagau

SEQ ID NO: 1640536 - RNA, 18 nt, Human
ugaggaauucuguauaga

SEQ ID NO: 1640537 - RNA, 20 nt, Human
ugaggcccagagggccugca

SEQ ID NO: 1640538 - RNA, 18 nt, Human
ugaggcccagagggccug

SEQ ID NO: 1640539 - RNA, 17 nt, Human
ugaggcccagagggccu

SEQ ID NO: 1640540 - RNA, 15 nt, Human
ugaggcccagagggc

SEQ ID NO: 1640541 - RNA, 22 nt, Human
ugaggcccagagggccugcaag

SEQ ID NO: 1640542 - RNA, 21 nt, Human
ugaggcccagagggccugcaa

SEQ ID NO: 1640543 - RNA, 23 nt, Human
ugaggcccagagggccugcaagg

SEQ ID NO: 1640544 - RNA, 13 nt, Human
ugaggcccagagg

SEQ ID NO: 1640545 - RNA, 12 nt, Human
ugaggcccagag

SEQ ID NO: 1640546 - RNA, 16 nt, Human
ugaggccagagacaca

SEQ ID NO: 1640547 - RNA, 14 nt, Human
ugaggccagagaca

SEQ ID NO: 1640548 - RNA, 20 nt, Human
ugaggccagagacacaagcc

SEQ ID NO: 1640549 - RNA, 13 nt, Human
ugagcuacaaaug

SEQ ID NO: 1640550 - RNA, 14 nt, Human
ugagcuacaaaugc

SEQ ID NO: 1640551 - RNA, 16 nt, Human
ugagcuacaaaugcau

SEQ ID NO: 1640552 - RNA, 14 nt, Human
ugagcuaggaauug

SEQ ID NO: 1640553 - RNA, 21 nt, Human
ugaggaagccgcuggggccag

SEQ ID NO: 1640554 - RNA, 19 nt, Human
ugaggaagccgcuggggcc

SEQ ID NO: 1640555 - RNA, 18 nt, Human
ugaggaagccgcuggggc

SEQ ID NO: 1640556 - RNA, 17 nt, Human
ugaggaagccgcugggg

SEQ ID NO: 1640557 - RNA, 14 nt, Human
ugaggaagccgcug

SEQ ID NO: 1640558 - RNA, 22 nt, Human
ugaggaagcaaaagcaucuaug

SEQ ID NO: 1640559 - RNA, 15 nt, Human
ugaggaagcaaaagc

SEQ ID NO: 1640560 - RNA, 20 nt, Human
ugagcgacagugagacucug

SEQ ID NO: 1640561 - RNA, 16 nt, Human
ugagcgacagugagac

SEQ ID NO: 1640562 - RNA, 14 nt, Human
ugagcgacagugag

SEQ ID NO: 1640563 - RNA, 13 nt, Human
ugagcgacaguga

SEQ ID NO: 1640564 - RNA, 15 nt, Human
ugagccuugaacuuu

SEQ ID NO: 1640565 - RNA, 17 nt, Human
ugagccuugaacuuuga

SEQ ID NO: 1640566 - RNA, 18 nt, Human
ugagccuugaacuuugac

SEQ ID NO: 1640567 - RNA, 19 nt, Human
ugagccuugaacuuugacc

SEQ ID NO: 1640568 - RNA, 14 nt, Human
ugagccuugaacuu

SEQ ID NO: 1640569 - RNA, 22 nt, Human
ugagccugggaggucaaggcug

SEQ ID NO: 1640570 - RNA, 19 nt, Human
ugagccugggaggucaagg

SEQ ID NO: 1640571 - RNA, 14 nt, Human
ugagccugggaggu

SEQ ID NO: 1640572 - RNA, 16 nt, Human
ugagccuggcaagaau

SEQ ID NO: 1640573 - RNA, 11 nt, Human
ugagccuggca

SEQ ID NO: 1640574 - RNA, 10 nt, Human
ugagccuggc

SEQ ID NO: 1640575 - RNA, 17 nt, Human
agcagagaccaucccug

SEQ ID NO: 1640576 - RNA, 16 nt, Human
agcagagaccaucccu

SEQ ID NO: 1640577 - RNA, 15 nt, Human
agcagagaccauccc

SEQ ID NO: 1640578 - RNA, 21 nt, Human
agcagagaauucucuuaucca

SEQ ID NO: 1640579 - RNA, 14 nt, Human
agcagagaauucuc

SEQ ID NO: 1640580 - RNA, 23 nt, Human
agcagagaaugaaagggcccaga

SEQ ID NO: 1640581 - RNA, 22 nt, Human
agcagagaaugaaagggcccag

SEQ ID NO: 1640582 - RNA, 21 nt, Human
agcagagaaugaaagggccca

SEQ ID NO: 1640583 - RNA, 14 nt, Human
agcagaacagugau

SEQ ID NO: 1640584 - RNA, 19 nt, Human
agcagaaaugccuuacccu

SEQ ID NO: 1640585 - RNA, 12 nt, Human
agcagaaaugcc

SEQ ID NO: 1640586 - RNA, 13 nt, Human
agcagaaaugccu

SEQ ID NO: 1640587 - RNA, 23 nt, Human
agcacuuugggaggccaaggugg

SEQ ID NO: 1640588 - RNA, 22 nt, Human
agcacuuugggaggccaaggug

SEQ ID NO: 1640589 - RNA, 16 nt, Human
agcacgauuucuguuu

SEQ ID NO: 1640590 - RNA, 14 nt, Human
agcacgauuucugu

SEQ ID NO: 1640591 - RNA, 15 nt, Human
agcacgauuucuguu

SEQ ID NO: 1640592 - RNA, 13 nt, Human
agcacgauuucug

SEQ ID NO: 1640593 - RNA, 23 nt, Human
agcaccuuagacagucccugcca

SEQ ID NO: 1640594 - RNA, 22 nt, Human
agcaccuuagacagucccugcc

SEQ ID NO: 1640595 - RNA, 21 nt, Human
agcaccuuagacagucccugc

SEQ ID NO: 1640596 - RNA, 20 nt, Human
agcaccuuagacagucccug

SEQ ID NO: 1640597 - RNA, 19 nt, Human
agcaccuuagacagucccu

SEQ ID NO: 1640598 - RNA, 13 nt, Human
agcaccagggaag

SEQ ID NO: 1640599 - RNA, 12 nt, Human
agcaccagggaa

SEQ ID NO: 1640600 - RNA, 10 nt, Human
agcaccaggg

SEQ ID NO: 1640601 - RNA, 14 nt, Human
agcaacgcaggccc

SEQ ID NO: 1640602 - RNA, 15 nt, Human
ugagcaauccugcaa

SEQ ID NO: 1640603 - RNA, 19 nt, Human
ugagcaaauguggcuccug

SEQ ID NO: 1640604 - RNA, 18 nt, Human
ugagcaaauguggcuccu

SEQ ID NO: 1640605 - RNA, 16 nt, Human
ugagcaaauguggcuc

SEQ ID NO: 1640606 - RNA, 23 nt, Human
ugagcacuaaggugugcucugau

SEQ ID NO: 1640607 - RNA, 22 nt, Human
ugagcacuaaggugugcucuga

SEQ ID NO: 1640608 - RNA, 21 nt, Human
ugagcacuaaggugugcucug

SEQ ID NO: 1640609 - RNA, 20 nt, Human
ugagcacuaaggugugcucu

SEQ ID NO: 1640610 - RNA, 16 nt, Human
ugagccagauuucacu

SEQ ID NO: 1640611 - RNA, 14 nt, Human
ugagccagauuuca

SEQ ID NO: 1640612 - RNA, 13 nt, Human
ugagccagauuuc

SEQ ID NO: 1640613 - RNA, 23 nt, Human
ugagccacugcaccgggccacag

SEQ ID NO: 1640614 - RNA, 21 nt, Human
ugagccacugcaccgggccac

SEQ ID NO: 1640615 - RNA, 21 nt, Human
ugagccaccgugccuggccac

SEQ ID NO: 1640616 - RNA, 20 nt, Human
ugagccaccgugccuggcca

SEQ ID NO: 1640617 - RNA, 19 nt, Human
ugagccaccgugccuggcc

SEQ ID NO: 1640618 - RNA, 18 nt, Human
ugagccaccgugccuggc

SEQ ID NO: 1640619 - RNA, 24 nt, Human
ugagcaucaggccaggcccucugc

SEQ ID NO: 1640620 - RNA, 22 nt, Human
ugagcaucaggccaggcccucu

SEQ ID NO: 1640621 - RNA, 14 nt, Human
ugagccaccgugcc

SEQ ID NO: 1640622 - RNA, 15 nt, Human
ugagccaccacgccc

SEQ ID NO: 1640623 - RNA, 21 nt, Human
ugagcaucaggccaggcccuc

SEQ ID NO: 1640624 - RNA, 16 nt, Human
agcaccaaucaugaau

SEQ ID NO: 1640625 - RNA, 16 nt, Human
agcacaugccucucuc

SEQ ID NO: 1640626 - RNA, 14 nt, Human
agcacaugccucuc

SEQ ID NO: 1640627 - RNA, 13 nt, Human
agcacaugccucu

SEQ ID NO: 1640628 - RNA, 22 nt, Human
agcacagccucuuagaugcagu

SEQ ID NO: 1640629 - RNA, 16 nt, Human
agcacagcuucauuuc

SEQ ID NO: 1640630 - RNA, 15 nt, Human
agcacagugaucaag

SEQ ID NO: 1640631 - RNA, 13 nt, Human
agcaagugagagc

SEQ ID NO: 1640632 - RNA, 20 nt, Human
agcaagugagacccugucuc

SEQ ID NO: 1640633 - RNA, 22 nt, Human
ugagccagauuucacucuccuu

SEQ ID NO: 1640634 - RNA, 17 nt, Human
ugagccagauuucacuc

SEQ ID NO: 1640635 - RNA, 14 nt, Human
agcaagugagagcu

SEQ ID NO: 1640636 - RNA, 22 nt, Human
agcaagugagagcuggguguca

SEQ ID NO: 1640637 - RNA, 21 nt, Human
agcacagcagccccugcacaa

SEQ ID NO: 1640638 - RNA, 14 nt, Human
agauuuuccugaaa

SEQ ID NO: 1640639 - RNA, 22 nt, Human
agauuuuauuauguaaauccca

SEQ ID NO: 1640640 - RNA, 21 nt, Human
agauuuuauuauguaaauccc

SEQ ID NO: 1640641 - RNA, 23 nt, Human
agcaaaaauauuuuaugauccag

SEQ ID NO: 1640642 - RNA, 19 nt, Human
agcaaaaauauuuuaugau

SEQ ID NO: 1640643 - RNA, 18 nt, Human
agcaaaaauauuuuauga

SEQ ID NO: 1640644 - RNA, 17 nt, Human
agcaaaaauauuuuaug

SEQ ID NO: 1640645 - RNA, 15 nt, Human
agcaaaaauauuuua

SEQ ID NO: 1640646 - RNA, 21 nt, Human
agauugugccccugcacucca

SEQ ID NO: 1640647 - RNA, 16 nt, Human
agauugugccccugca

SEQ ID NO: 1640648 - RNA, 16 nt, Human
agauuuaccacuugug

SEQ ID NO: 1640649 - RNA, 14 nt, Human
agauuuaugcauau

SEQ ID NO: 1640650 - RNA, 17 nt, Human
agauuucacucuccuug

SEQ ID NO: 1640651 - RNA, 14 nt, Human
agauuucacucucc

SEQ ID NO: 1640652 - RNA, 13 nt, Human
agauuucacucuc

SEQ ID NO: 1640653 - RNA, 15 nt, Human
ugacuguuuccauca

SEQ ID NO: 1640654 - RNA, 21 nt, Human
ugacuguuuucucuugagagg

SEQ ID NO: 1640655 - RNA, 23 nt, Human
ugacuccagaauuucccaaagca

SEQ ID NO: 1640656 - RNA, 20 nt, Human
ugacuccagaauuucccaaa

SEQ ID NO: 1640657 - RNA, 19 nt, Human
ugacuccagaauuucccaa

SEQ ID NO: 1640658 - RNA, 17 nt, Human
ugacuccagaauuuccc

SEQ ID NO: 1640659 - RNA, 15 nt, Human
ugaccugaggcccuu

SEQ ID NO: 1640660 - RNA, 14 nt, Human
ugaccugaggcccu

SEQ ID NO: 1640661 - RNA, 17 nt, Human
ugaccugaggcccuucu

SEQ ID NO: 1640662 - RNA, 22 nt, Human
agauucaaugccccugaauuua

SEQ ID NO: 1640663 - RNA, 21 nt, Human
agauucaaugccccugaauuu

SEQ ID NO: 1640664 - RNA, 16 nt, Human
agauucaaucccagga

SEQ ID NO: 1640665 - RNA, 16 nt, Human
agauuauucacugauu

SEQ ID NO: 1640666 - RNA, 23 nt, Human
agauuauauauauuuuuuucuga

SEQ ID NO: 1640667 - RNA, 20 nt, Human
agauuauaggcaccuaccac

SEQ ID NO: 1640668 - RNA, 23 nt, Human
agaugcuagaacucccuuucaac

SEQ ID NO: 1640669 - RNA, 18 nt, Human
agaugcuucucacugcca

SEQ ID NO: 1640670 - RNA, 12 nt, Human
ugaccugaggcc

SEQ ID NO: 1640671 - RNA, 14 nt, Human
ugaccucugccuga

SEQ ID NO: 1640672 - RNA, 23 nt, Human
ugaccccucauagcccucacccu

SEQ ID NO: 1640673 - RNA, 13 nt, Human
ugaccucugccug

SEQ ID NO: 1640674 - RNA, 20 nt, Human
ugaccccucauagcccucac

SEQ ID NO: 1640675 - RNA, 19 nt, Human
ugaccccucauagcccuca

SEQ ID NO: 1640676 - RNA, 22 nt, Human
ugacccccaaccaaguggcucc

SEQ ID NO: 1640677 - RNA, 17 nt, Human
ugaccccucauagcccu

SEQ ID NO: 1640678 - RNA, 12 nt, Human
ugacccaugcug

SEQ ID NO: 1640679 - RNA, 18 nt, Human
agauguguucacaaugga

SEQ ID NO: 1640680 - RNA, 15 nt, Human
agauguguucacaau

SEQ ID NO: 1640681 - RNA, 21 nt, Human
agaucauugugaaauuauuca

SEQ ID NO: 1640682 - RNA, 20 nt, Human
ugaccacacuccagcuggga

SEQ ID NO: 1640683 - RNA, 19 nt, Human
ugaccacacuccagcuggg

SEQ ID NO: 1640684 - RNA, 17 nt, Human
ugaccacacuccagcug

SEQ ID NO: 1640685 - RNA, 12 nt, Human
ugaccacacucc

SEQ ID NO: 1640686 - RNA, 22 nt, Human
ugacauuguagagcuucuggca

SEQ ID NO: 1640687 - RNA, 18 nt, Human
ugacauuguagagcuucu

SEQ ID NO: 1640688 - RNA, 17 nt, Human
ugaauuuauuggcuuuu

SEQ ID NO: 1640689 - RNA, 16 nt, Human
ugaauuuauuggcuuu

SEQ ID NO: 1640690 - RNA, 15 nt, Human
ugaauuuauuggcuu

SEQ ID NO: 1640691 - RNA, 12 nt, Human
ugaauuuauugg

SEQ ID NO: 1640692 - RNA, 18 nt, Human
agauaauacaccacuaca

SEQ ID NO: 1640693 - RNA, 18 nt, Human
agauaauucuagcuuuga

SEQ ID NO: 1640694 - RNA, 19 nt, Human
agauaaggguaucugguga

SEQ ID NO: 1640695 - RNA, 19 nt, Human
agagugagacucugucuca

SEQ ID NO: 1640696 - RNA, 19 nt, Human
agauacaggaaaagcugcu

SEQ ID NO: 1640697 - RNA, 22 nt, Human
agauauuuugcuuugugauuuu

SEQ ID NO: 1640698 - RNA, 19 nt, Human
agaucaaccccuucgcucc

SEQ ID NO: 1640699 - RNA, 14 nt, Human
agaucaaccccuuc

SEQ ID NO: 1640700 - RNA, 21 nt, Human
agaucaaccccuucgcuccug

SEQ ID NO: 1640701 - RNA, 22 nt, Human
agagugaacaaauuuacagaga

SEQ ID NO: 1640702 - RNA, 18 nt, Human
agagucuauuuacggaac

SEQ ID NO: 1640703 - RNA, 16 nt, Human
agagugagacucuguc

SEQ ID NO: 1640704 - RNA, 15 nt, Human
agagugagacucugu

SEQ ID NO: 1640705 - RNA, 22 nt, Human
agagucucacuguugcccaggc

SEQ ID NO: 1640706 - RNA, 20 nt, Human
agagucucacuguugcccag

SEQ ID NO: 1640707 - RNA, 18 nt, Human
ugaaugucagugugacug

SEQ ID NO: 1640708 - RNA, 15 nt, Human
ugaaugucaguguga

SEQ ID NO: 1640709 - RNA, 14 nt, Human
ugaaugucagugug

SEQ ID NO: 1640710 - RNA, 11 nt, Human
ugaauggcuuu

SEQ ID NO: 1640711 - RNA, 18 nt, Human
ugaagguggaaauaaacu

SEQ ID NO: 1640712 - RNA, 16 nt, Human
ugaaugcauaaaaugu

SEQ ID NO: 1640713 - RNA, 15 nt, Human
ugaaugcauaaaaug

SEQ ID NO: 1640714 - RNA, 20 nt, Human
ugaagaagcaccaaucauga

SEQ ID NO: 1640715 - RNA, 14 nt, Human
ugaagaagauggua

SEQ ID NO: 1640716 - RNA, 16 nt, Human
ugaacuuugaccucug

SEQ ID NO: 1640717 - RNA, 17 nt, Human
ugaacuuugaccucugc

SEQ ID NO: 1640718 - RNA, 22 nt, Human
ugaagaagcaccaaucaugaau

SEQ ID NO: 1640719 - RNA, 11 nt, Human
ugaagacaaug

SEQ ID NO: 1640720 - RNA, 13 nt, Human
ugaagacaaugac

SEQ ID NO: 1640721 - RNA, 17 nt, Human
ugaagacaaugacuuac

SEQ ID NO: 1640722 - RNA, 21 nt, Human
ucuuuggucuacacugugcug

SEQ ID NO: 1640723 - RNA, 14 nt, Human
ucuuuggucuacac

SEQ ID NO: 1640724 - RNA, 12 nt, Human
ucuuuguaauga

SEQ ID NO: 1640725 - RNA, 11 nt, Human
ugaacuuugac

SEQ ID NO: 1640726 - RNA, 15 nt, Human
ucuuuguaaugaaaa

SEQ ID NO: 1640727 - RNA, 13 nt, Human
ucuuuguaaugaa

SEQ ID NO: 1640728 - RNA, 18 nt, Human
agaggcaacugcauuggc

SEQ ID NO: 1640729 - RNA, 21 nt, Human
agaggaaaucaccgaaaacgu

SEQ ID NO: 1640730 - RNA, 12 nt, Human
agaggaaaucac

SEQ ID NO: 1640731 - RNA, 11 nt, Human
agaggaaauca

SEQ ID NO: 1640732 - RNA, 19 nt, Human
agaggaaagcaaaggagau

SEQ ID NO: 1640733 - RNA, 18 nt, Human
agaggaaagcaaaggaga

SEQ ID NO: 1640734 - RNA, 16 nt, Human
agaggaaagcaaagga

SEQ ID NO: 1640735 - RNA, 12 nt, Human
agaggaaagcaa

SEQ ID NO: 1640736 - RNA, 19 nt, Human
agagcugggugucaagagg

SEQ ID NO: 1640737 - RNA, 21 nt, Human
ugaagacaaugacuuacugua

SEQ ID NO: 1640738 - RNA, 15 nt, Human
agagcuucuggcacu

SEQ ID NO: 1640739 - RNA, 22 nt, Human
agagcuucuguugcugccucau

SEQ ID NO: 1640740 - RNA, 21 nt, Human
agagcuucuguugcugccuca

SEQ ID NO: 1640741 - RNA, 20 nt, Human
agagcuucuguugcugccuc

SEQ ID NO: 1640742 - RNA, 19 nt, Human
agagcuucuguugcugccu

SEQ ID NO: 1640743 - RNA, 18 nt, Human
ugaagauguagaggagaa

SEQ ID NO: 1640744 - RNA, 22 nt, Human
agagggagggagggcuccagac

SEQ ID NO: 1640745 - RNA, 15 nt, Human
agagggagguaagga

SEQ ID NO: 1640746 - RNA, 21 nt, Human
agagggagggagggcuccaga

SEQ ID NO: 1640747 - RNA, 17 nt, Human
agaggcuaugugagcac

SEQ ID NO: 1640748 - RNA, 21 nt, Human
agaggcgcaugaauuugugaa

SEQ ID NO: 1640749 - RNA, 18 nt, Human
ucuguuuuauaauuuugu

SEQ ID NO: 1640750 - RNA, 20 nt, Human
ucuguuuuauaauuuuguga

SEQ ID NO: 1640751 - RNA, 18 nt, Human
agaauuucccaaagcagu

SEQ ID NO: 1640752 - RNA, 17 nt, Human
agaauuucccaaagcag

SEQ ID NO: 1640753 - RNA, 23 nt, Human
agaauuucccaaagcagugcaug

SEQ ID NO: 1640754 - RNA, 21 nt, Human
agaauuucuaggacugaauua

SEQ ID NO: 1640755 - RNA, 13 nt, Human
agaauuucuagga

SEQ ID NO: 1640756 - RNA, 21 nt, Human
ucugugaaaggaaagagggag

SEQ ID NO: 1640757 - RNA, 15 nt, Human
ucugugaaaggaaag

SEQ ID NO: 1640758 - RNA, 24 nt, Human
ucuguccaggcacugcugcccagc

SEQ ID NO: 1640759 - RNA, 22 nt, Human
ucugugaaaggaaagagggagg

SEQ ID NO: 1640760 - RNA, 20 nt, Human
ucuguuggccagugugacaa

SEQ ID NO: 1640761 - RNA, 19 nt, Human
ucuguuggccagugugaca

SEQ ID NO: 1640762 - RNA, 18 nt, Human
ucuguuggccagugugac

SEQ ID NO: 1640763 - RNA, 17 nt, Human
ucuguauagauuagaau

SEQ ID NO: 1640764 - RNA, 23 nt, Human
ucugucauuugagcagggcucag

SEQ ID NO: 1640765 - RNA, 20 nt, Human
ucugucauuugagcagggcu

SEQ ID NO: 1640766 - RNA, 15 nt, Human
ucugucauuugagca

SEQ ID NO: 1640767 - RNA, 16 nt, Human
ucuguauagauuagag

SEQ ID NO: 1640768 - RNA, 16 nt, Human
ucuggguucacugcaa

SEQ ID NO: 1640769 - RNA, 14 nt, Human
ucuggguucacugc

SEQ ID NO: 1640770 - RNA, 11 nt, Human
ucuggggcugu

SEQ ID NO: 1640771 - RNA, 18 nt, Human
ucugguccauagagagca

SEQ ID NO: 1640772 - RNA, 16 nt, Human
ucuggguuccuuccuc

SEQ ID NO: 1640773 - RNA, 21 nt, Human
ucuuaauuaaaagaauauuuu

SEQ ID NO: 1640774 - RNA, 18 nt, Human
ucuuaauuaaaagaauau

SEQ ID NO: 1640775 - RNA, 22 nt, Human
ucuuagaugcaguucugaagaa

SEQ ID NO: 1640776 - RNA, 14 nt, Human
ucuuaugggcuggg

SEQ ID NO: 1640777 - RNA, 16 nt, Human
ucuuaugggcuggguu

SEQ ID NO: 1640778 - RNA, 15 nt, Human
ucuuaugggcugggu

SEQ ID NO: 1640779 - RNA, 22 nt, Human
ucuuauugcccacgcuggagug

SEQ ID NO: 1640780 - RNA, 18 nt, Human
ucuuauugcccacgcugg

SEQ ID NO: 1640781 - RNA, 18 nt, Human
ucuuaugggcuggguucu

SEQ ID NO: 1640782 - RNA, 14 nt, Human
ucuuauugcccacg

SEQ ID NO: 1640783 - RNA, 17 nt, Human
ucuuauuuaaugaaaga

SEQ ID NO: 1640784 - RNA, 17 nt, Human
ucuucaaaaugagcccu

SEQ ID NO: 1640785 - RNA, 22 nt, Human
ucuuccaggcugggagagccuu

SEQ ID NO: 1640786 - RNA, 23 nt, Human
agacaggcaagcaccuccugccu

SEQ ID NO: 1640787 - RNA, 16 nt, Human
agacaggaccagggau

SEQ ID NO: 1640788 - RNA, 15 nt, Human
agacaggaccaggga

SEQ ID NO: 1640789 - RNA, 21 nt, Human
agacaggguuuugccauguug

SEQ ID NO: 1640790 - RNA, 17 nt, Human
agacagucccugccaau

SEQ ID NO: 1640791 - RNA, 16 nt, Human
agacagucccugccaa

SEQ ID NO: 1640792 - RNA, 15 nt, Human
agacagucccugcca

SEQ ID NO: 1640793 - RNA, 19 nt, Human
agacagucccugccaaugg

SEQ ID NO: 1640794 - RNA, 20 nt, Human
agaauuugauaugugaacag

SEQ ID NO: 1640795 - RNA, 19 nt, Human
agaauuugauaugugaaca

SEQ ID NO: 1640796 - RNA, 18 nt, Human
agaauuugauaugugaac

SEQ ID NO: 1640797 - RNA, 17 nt, Human
agaauuugauaugugaa

SEQ ID NO: 1640798 - RNA, 22 nt, Human
agacagaaucucgcucugucgc

SEQ ID NO: 1640799 - RNA, 18 nt, Human
agacagaaucucgcucug

SEQ ID NO: 1640800 - RNA, 15 nt, Human
agacuggcacaguuu

SEQ ID NO: 1640801 - RNA, 14 nt, Human
agacuggcacaguu

SEQ ID NO: 1640802 - RNA, 18 nt, Human
agacuggcacaguuuucu

SEQ ID NO: 1640803 - RNA, 17 nt, Human
agacuucaucccucugg

SEQ ID NO: 1640804 - RNA, 14 nt, Human
agacuucaucccuc

SEQ ID NO: 1640805 - RNA, 15 nt, Human
agagaaugagagaca

SEQ ID NO: 1640806 - RNA, 15 nt, Human
agacuuuggaaagac

SEQ ID NO: 1640807 - RNA, 17 nt, Human
agagacacacugaagaa

SEQ ID NO: 1640808 - RNA, 18 nt, Human
agagaaugaaagggccca

SEQ ID NO: 1640809 - RNA, 14 nt, Human
agacuuuggaaaga

SEQ ID NO: 1640810 - RNA, 12 nt, Human
agacuuuggaaa

SEQ ID NO: 1640811 - RNA, 20 nt, Human
agagacacacugaagaagca

SEQ ID NO: 1640812 - RNA, 18 nt, Human
agagacacacugaagaag

SEQ ID NO: 1640813 - RNA, 14 nt, Human
agagaccaucccug

SEQ ID NO: 1640814 - RNA, 13 nt, Human
agagaccaucccu

SEQ ID NO: 1640815 - RNA, 15 nt, Human
agagaccaucccuga

SEQ ID NO: 1640816 - RNA, 18 nt, Human
agagaccaucccugaagg

SEQ ID NO: 1640817 - RNA, 21 nt, Human
ucuuuaaagggauggcaagau

SEQ ID NO: 1640818 - RNA, 13 nt, Human
ucuuuaauuuugg

SEQ ID NO: 1640819 - RNA, 17 nt, Human
ucuuuaaaauacacacu

SEQ ID NO: 1640820 - RNA, 15 nt, Human
ucuuuacuucaugga

SEQ ID NO: 1640821 - RNA, 18 nt, Human
ucuuuaauuuuggaauuu

SEQ ID NO: 1640822 - RNA, 17 nt, Human
ucuuuaauuuuggaauu

SEQ ID NO: 1640823 - RNA, 16 nt, Human
ucuuuaauuuuggaau

SEQ ID NO: 1640824 - RNA, 15 nt, Human
ucuuuaauuuuggaa

SEQ ID NO: 1640825 - RNA, 14 nt, Human
ucuuuaauuuugga

SEQ ID NO: 1640826 - RNA, 17 nt, Human
agacuccugcaggcagc

SEQ ID NO: 1640827 - RNA, 16 nt, Human
agacuccugcaggcag

SEQ ID NO: 1640828 - RNA, 15 nt, Human
agacuccugcaggca

SEQ ID NO: 1640829 - RNA, 14 nt, Human
agacuccugcaggc

SEQ ID NO: 1640830 - RNA, 16 nt, Human
ucuuuccugaggcugg

SEQ ID NO: 1640831 - RNA, 15 nt, Human
ucuuuccugaggcug

SEQ ID NO: 1640832 - RNA, 14 nt, Human
ucuuuccugaggcu

SEQ ID NO: 1640833 - RNA, 13 nt, Human
ucuuuccugaggc

SEQ ID NO: 1640834 - RNA, 23 nt, Human
agacuccugcaggcagccaggcc

SEQ ID NO: 1640835 - RNA, 20 nt, Human
agacuccugcaggcagccag

SEQ ID NO: 1640836 - RNA, 19 nt, Human
agacuccugcaggcagcca

SEQ ID NO: 1640837 - RNA, 18 nt, Human
agacuccugcaggcagcc

SEQ ID NO: 1640838 - RNA, 17 nt, Human
agacucuacagaggcca

SEQ ID NO: 1640839 - RNA, 21 nt, Human
agacucgcgacaaugcaaacc

SEQ ID NO: 1640840 - RNA, 19 nt, Human
agacucuacagaggccaug

SEQ ID NO: 1640841 - RNA, 14 nt, Human
agacuccaaagaaa

SEQ ID NO: 1640842 - RNA, 13 nt, Human
agacuccaaagaa

SEQ ID NO: 1640843 - RNA, 12 nt, Human
agacuccaaaga

SEQ ID NO: 1640844 - RNA, 18 nt, Human
agacucauucuucuguac

SEQ ID NO: 1640845 - RNA, 20 nt, Human
agacuauucaaacagucuca

SEQ ID NO: 1640846 - RNA, 18 nt, Human
agacuauucaaacagucu

SEQ ID NO: 1640847 - RNA, 21 nt, Human
agacuauucaaacagucucag

SEQ ID NO: 1640848 - RNA, 17 nt, Human
agacucauucuucugua

SEQ ID NO: 1640849 - RNA, 18 nt, Human
agacuaucuaaauguuga

SEQ ID NO: 1640850 - RNA, 17 nt, Human
agacuaucuaaauguug

SEQ ID NO: 1640851 - RNA, 19 nt, Human
agacuaucuaaauguugaa

SEQ ID NO: 1640852 - RNA, 12 nt, Human
agaccugccccu

SEQ ID NO: 1640853 - RNA, 13 nt, Human
agaccugccccuc

SEQ ID NO: 1640854 - RNA, 19 nt, Human
agacuccaaagaaauguaa

SEQ ID NO: 1640855 - RNA, 16 nt, Human
agacuccaaagaaaug

SEQ ID NO: 1640856 - RNA, 23 nt, Human
agacuauucaaacagucucagga

SEQ ID NO: 1640857 - RNA, 20 nt, Human
ucuugaugccuggcggggug

SEQ ID NO: 1640858 - RNA, 14 nt, Human
ucuugaugccuggc

SEQ ID NO: 1640859 - RNA, 16 nt, Human
ucuugcaauggcagcc

SEQ ID NO: 1640860 - RNA, 13 nt, Human
ucuugcaauggca

SEQ ID NO: 1640861 - RNA, 17 nt, Human
ucuugcaauggcagccu

SEQ ID NO: 1640862 - RNA, 14 nt, Human
agacccugcccugu

SEQ ID NO: 1640863 - RNA, 13 nt, Human
agacccugcccug

SEQ ID NO: 1640864 - RNA, 12 nt, Human
agacccugcccu

SEQ ID NO: 1640865 - RNA, 23 nt, Human
agacccugcccugugggccccca

SEQ ID NO: 1640866 - RNA, 21 nt, Human
agacccugcccugugggcccc

SEQ ID NO: 1640867 - RNA, 19 nt, Human
agacccugcccugugggcc

SEQ ID NO: 1640868 - RNA, 16 nt, Human
agacccugcccugugg

SEQ ID NO: 1640869 - RNA, 15 nt, Human
agacccuuguggucc

SEQ ID NO: 1640870 - RNA, 13 nt, Human
agacccuuguggu

SEQ ID NO: 1640871 - RNA, 23 nt, Human
agacccuuguggucccaccccac

SEQ ID NO: 1640872 - RNA, 22 nt, Human
agacccuuguggucccacccca

SEQ ID NO: 1640873 - RNA, 20 nt, Human
agacccuuguggucccaccc

SEQ ID NO: 1640874 - RNA, 19 nt, Human
agacccuuguggucccacc

SEQ ID NO: 1640875 - RNA, 17 nt, Human
ucucuggccuucggccu

SEQ ID NO: 1640876 - RNA, 16 nt, Human
ucucuggccuucggcc

SEQ ID NO: 1640877 - RNA, 13 nt, Human
ucucuggccuucg

SEQ ID NO: 1640878 - RNA, 22 nt, Human
ucucugcccuaaugcgcaggcu

SEQ ID NO: 1640879 - RNA, 11 nt, Human
ucucugcccua

SEQ ID NO: 1640880 - RNA, 13 nt, Human
ucucuucuuuaaa

SEQ ID NO: 1640881 - RNA, 14 nt, Human
ucucuugagagggu

SEQ ID NO: 1640882 - RNA, 12 nt, Human
ucucuucuuuaa

SEQ ID NO: 1640883 - RNA, 21 nt, Human
ucucuucuggguuccuuccuc

SEQ ID NO: 1640884 - RNA, 20 nt, Human
ucucuucuggguuccuuccu

SEQ ID NO: 1640885 - RNA, 19 nt, Human
ucucuucuggguuccuucc

SEQ ID NO: 1640886 - RNA, 18 nt, Human
ucucuucuggguuccuuc

SEQ ID NO: 1640887 - RNA, 20 nt, Human
ucuccuucaccuuugucccc

SEQ ID NO: 1640888 - RNA, 14 nt, Human
ucucuccagccccu

SEQ ID NO: 1640889 - RNA, 13 nt, Human
ucucuccagcccc

SEQ ID NO: 1640890 - RNA, 15 nt, Human
ucucuccagccccug

SEQ ID NO: 1640891 - RNA, 16 nt, Human
ucucuccagccccugg

SEQ ID NO: 1640892 - RNA, 20 nt, Human
ucucuccuguaccucuugag

SEQ ID NO: 1640893 - RNA, 22 nt, Human
ucucuccuguaccucuugagcc

SEQ ID NO: 1640894 - RNA, 19 nt, Human
agaaaacaaggaugaauua

SEQ ID NO: 1640895 - RNA, 17 nt, Human
agaaaaaugagccuggc

SEQ ID NO: 1640896 - RNA, 19 nt, Human
agaaaaauaugaccacacu

SEQ ID NO: 1640897 - RNA, 14 nt, Human
ucucuugagccugg

SEQ ID NO: 1640898 - RNA, 13 nt, Human
ucucuugagccug

SEQ ID NO: 1640899 - RNA, 15 nt, Human
ucucuugagccuggg

SEQ ID NO: 1640900 - RNA, 17 nt, Human
ucucuugagccugggag

SEQ ID NO: 1640901 - RNA, 22 nt, Human
ucucuuuaaugucacaggcagg

SEQ ID NO: 1640902 - RNA, 15 nt, Human
agaaacuggaacucu

SEQ ID NO: 1640903 - RNA, 13 nt, Human
agaaacuggaacu

SEQ ID NO: 1640904 - RNA, 19 nt, Human
agaaaacuuguauuaugug

SEQ ID NO: 1640905 - RNA, 15 nt, Human
ucucccagucauuua

SEQ ID NO: 1640906 - RNA, 18 nt, Human
ucucccuuggauuguccc

SEQ ID NO: 1640907 - RNA, 11 nt, Human
ucucccuugga

SEQ ID NO: 1640908 - RNA, 18 nt, Human
ucucccaaagugcuggga

SEQ ID NO: 1640909 - RNA, 19 nt, Human
ucuccauuuaauaauuaua

SEQ ID NO: 1640910 - RNA, 16 nt, Human
ucuccauuuaauaauu

SEQ ID NO: 1640911 - RNA, 12 nt, Human
ucuccauuuaau

SEQ ID NO: 1640912 - RNA, 21 nt, Human
ucucccuuggauuguccccga

SEQ ID NO: 1640913 - RNA, 19 nt, Human
ucucccuuggauugucccc

SEQ ID NO: 1640914 - RNA, 12 nt, Human
ucuccucugcug

SEQ ID NO: 1640915 - RNA, 14 nt, Human
ucuccucugcugcu

SEQ ID NO: 1640916 - RNA, 13 nt, Human
ucuccucugcugc

SEQ ID NO: 1640917 - RNA, 15 nt, Human
ucuccucugcugcug

SEQ ID NO: 1640918 - RNA, 23 nt, Human
acuuguguaaauacaauuuuguu

SEQ ID NO: 1640919 - RNA, 22 nt, Human
acuuguguaaauacaauuuugu

SEQ ID NO: 1640920 - RNA, 21 nt, Human
acuuguguaaauacaauuuug

SEQ ID NO: 1640921 - RNA, 21 nt, Human
acuuguugauuaauggaaaug

SEQ ID NO: 1640922 - RNA, 19 nt, Human
acuuguugauuaauggaaa

SEQ ID NO: 1640923 - RNA, 18 nt, Human
acuuuaccuuuuuuauac

SEQ ID NO: 1640924 - RNA, 19 nt, Human
acuuuaccuuuuuuauaca

SEQ ID NO: 1640925 - RNA, 22 nt, Human
acuuuaccuuuuuuauacauaa

SEQ ID NO: 1640926 - RNA, 23 nt, Human
acuuuaccuuuuuuauacauaaa

SEQ ID NO: 1640927 - RNA, 19 nt, Human
acuuugaccucugcagcaa

SEQ ID NO: 1640928 - RNA, 23 nt, Human
acuuugaccucugcagcaauaaa

SEQ ID NO: 1640929 - RNA, 14 nt, Human
acuuuggaaagacu

SEQ ID NO: 1640930 - RNA, 13 nt, Human
acuuuggaaagac

SEQ ID NO: 1640931 - RNA, 17 nt, Human
acuuuggaaagacuuuu

SEQ ID NO: 1640932 - RNA, 23 nt, Human
acuuuggaaagacuuuuccaacc

SEQ ID NO: 1640933 - RNA, 22 nt, Human
acuuuuuuuuuuuaagaguaaa

SEQ ID NO: 1640934 - RNA, 14 nt, Human
acuuuuggcauuuu

SEQ ID NO: 1640935 - RNA, 22 nt, Human
acuuuuuauggcacuaguauuu

SEQ ID NO: 1640936 - RNA, 15 nt, Human
agaacucccuuucaa

SEQ ID NO: 1640937 - RNA, 14 nt, Human
agaacucccuuuca

SEQ ID NO: 1640938 - RNA, 22 nt, Human
agaaccucuuugucuacaccau

SEQ ID NO: 1640939 - RNA, 15 nt, Human
ucugcagauaaacag

SEQ ID NO: 1640940 - RNA, 12 nt, Human
ucugcagagcag

SEQ ID NO: 1640941 - RNA, 11 nt, Human
agaaauguguu

SEQ ID NO: 1640942 - RNA, 17 nt, Human
agaaauguacagcaagg

SEQ ID NO: 1640943 - RNA, 16 nt, Human
agaaauguacagcaag

SEQ ID NO: 1640944 - RNA, 23 nt, Human
agaaagacuauucaaacagucuc

SEQ ID NO: 1640945 - RNA, 20 nt, Human
agaaagacuauucaaacagu

SEQ ID NO: 1640946 - RNA, 19 nt, Human
agaaagacuauucaaacag

SEQ ID NO: 1640947 - RNA, 19 nt, Human
ucugacccugcuucaaaua

SEQ ID NO: 1640948 - RNA, 20 nt, Human
ucugagaaagacuauucaaa

SEQ ID NO: 1640949 - RNA, 19 nt, Human
ucugagaaagacuauucaa

SEQ ID NO: 1640950 - RNA, 15 nt, Human
ucugagaaagacuau

SEQ ID NO: 1640951 - RNA, 14 nt, Human
ucugagaaagacua

SEQ ID NO: 1640952 - RNA, 21 nt, Human
ucugacuguuuccaucaaggg

SEQ ID NO: 1640953 - RNA, 22 nt, Human
ucugagaaagacuauucaaaca

SEQ ID NO: 1640954 - RNA, 21 nt, Human
ucugagaaagacuauucaaac

SEQ ID NO: 1640955 - RNA, 23 nt, Human
ucugagaaagacuauucaaacag

SEQ ID NO: 1640956 - RNA, 21 nt, Human
ucugauucccaagcucugcuc

SEQ ID NO: 1640957 - RNA, 20 nt, Human
ucugauucccaagcucugcu

SEQ ID NO: 1640958 - RNA, 19 nt, Human
ucugauucccaagcucugc

SEQ ID NO: 1640959 - RNA, 17 nt, Human
ucugauacagaaaaguu

SEQ ID NO: 1640960 - RNA, 16 nt, Human
ucugauacagaaaagu

SEQ ID NO: 1640961 - RNA, 11 nt, Human
ucugcuugcca

SEQ ID NO: 1640962 - RNA, 13 nt, Human
ucugcuucagccu

SEQ ID NO: 1640963 - RNA, 16 nt, Human
ucugcucacauaucug

SEQ ID NO: 1640964 - RNA, 17 nt, Human
ucugcucacauaucugu

SEQ ID NO: 1640965 - RNA, 21 nt, Human
agaagaacugaaaucauacuu

SEQ ID NO: 1640966 - RNA, 18 nt, Human
ucugcccuccaagaccuu

SEQ ID NO: 1640967 - RNA, 14 nt, Human
ucugcccuccaaga

SEQ ID NO: 1640968 - RNA, 13 nt, Human
ucugccuaaggac

SEQ ID NO: 1640969 - RNA, 16 nt, Human
ucugccuaaggacuuc

SEQ ID NO: 1640970 - RNA, 15 nt, Human
ucugccuaaggacuu

SEQ ID NO: 1640971 - RNA, 14 nt, Human
ucugccuaaggacu

SEQ ID NO: 1640972 - RNA, 12 nt, Human
ucugcuugccau

SEQ ID NO: 1640973 - RNA, 14 nt, Human
ucugcuugccaucc

SEQ ID NO: 1640974 - RNA, 15 nt, Human
ucuggcagcucagag

SEQ ID NO: 1640975 - RNA, 14 nt, Human
ucuggcagcucaga

SEQ ID NO: 1640976 - RNA, 18 nt, Human
ucuggauuauauuaugaa

SEQ ID NO: 1640977 - RNA, 12 nt, Human
ucuggauuauau

SEQ ID NO: 1640978 - RNA, 14 nt, Human
agaagcuccaggua

SEQ ID NO: 1640979 - RNA, 16 nt, Human
agaagcggcuggcagc

SEQ ID NO: 1640980 - RNA, 15 nt, Human
agaagcggcuggcag

SEQ ID NO: 1640981 - RNA, 16 nt, Human
ucuggcagcucagaga

SEQ ID NO: 1640982 - RNA, 19 nt, Human
agccugaucaccugcccug

SEQ ID NO: 1640983 - RNA, 14 nt, Human
agccugauuaaaga

SEQ ID NO: 1640984 - RNA, 16 nt, Human
ugcaugcugucccuua

SEQ ID NO: 1640985 - RNA, 18 nt, Human
agccugaucaccugcccu

SEQ ID NO: 1640986 - RNA, 16 nt, Human
agccugcacggugaau

SEQ ID NO: 1640987 - RNA, 18 nt, Human
agccugcacggugaaugg

SEQ ID NO: 1640988 - RNA, 23 nt, Human
agccugcaguuauuaacacuaac

SEQ ID NO: 1640989 - RNA, 19 nt, Human
agccugccucuucucuacu

SEQ ID NO: 1640990 - RNA, 16 nt, Human
agccugccucuucucu

SEQ ID NO: 1640991 - RNA, 12 nt, Human
agccugcccucc

SEQ ID NO: 1640992 - RNA, 22 nt, Human
ugcauaccacuuuuguucuugg

SEQ ID NO: 1640993 - RNA, 15 nt, Human
ugcaugcugucccuu

SEQ ID NO: 1640994 - RNA, 14 nt, Human
ugcaugcugucccu

SEQ ID NO: 1640995 - RNA, 13 nt, Human
ugcaugcuguccc

SEQ ID NO: 1640996 - RNA, 21 nt, Human
ugcaugaggcuaguguggugu

SEQ ID NO: 1640997 - RNA, 22 nt, Human
ugcaugaaguaauaugcacaca

SEQ ID NO: 1640998 - RNA, 20 nt, Human
ugcaugaaguaauaugcaca

SEQ ID NO: 1640999 - RNA, 19 nt, Human
ugcagugagccgagauugu

SEQ ID NO: 1641000 - RNA, 11 nt, Human
ugcauaaaaug

SEQ ID NO: 1641001 - RNA, 15 nt, Human
ugcauaauggucaga

SEQ ID NO: 1641002 - RNA, 22 nt, Human
ugcauaacguauaaaagccugu

SEQ ID NO: 1641003 - RNA, 14 nt, Human
ugcagugagccgag

SEQ ID NO: 1641004 - RNA, 21 nt, Human
ugcaggucccuaauaaagcug

SEQ ID NO: 1641005 - RNA, 20 nt, Human
ugcaggucccuaauaaagcu

SEQ ID NO: 1641006 - RNA, 19 nt, Human
ugcaggucccuaauaaagc

SEQ ID NO: 1641007 - RNA, 18 nt, Human
ugcaggucccuaauaaag

SEQ ID NO: 1641008 - RNA, 18 nt, Human
agccugagcgacagugag

SEQ ID NO: 1641009 - RNA, 19 nt, Human
agccucaaccuccugggcu

SEQ ID NO: 1641010 - RNA, 15 nt, Human
agccucagcauccug

SEQ ID NO: 1641011 - RNA, 16 nt, Human
agccucagcauccugg

SEQ ID NO: 1641012 - RNA, 14 nt, Human
agccucagcauccu

SEQ ID NO: 1641013 - RNA, 13 nt, Human
agccucagcaucc

SEQ ID NO: 1641014 - RNA, 18 nt, Human
agccucaaccuccugggc

SEQ ID NO: 1641015 - RNA, 17 nt, Human
agccucaaccuccuggg

SEQ ID NO: 1641016 - RNA, 19 nt, Human
agccugagcgacagugaga

SEQ ID NO: 1641017 - RNA, 19 nt, Human
ugcagccucaaccuccugg

SEQ ID NO: 1641018 - RNA, 18 nt, Human
ugcagccucaaccuccug

SEQ ID NO: 1641019 - RNA, 20 nt, Human
ugcagccucaaccuccuggg

SEQ ID NO: 1641020 - RNA, 19 nt, Human
agcccuucuuuccacagaa

SEQ ID NO: 1641021 - RNA, 18 nt, Human
agcccuucuuuccacaga

SEQ ID NO: 1641022 - RNA, 23 nt, Human
agccguuuguuccccaagacauu

SEQ ID NO: 1641023 - RNA, 15 nt, Human
agccucaaccuccug

SEQ ID NO: 1641024 - RNA, 17 nt, Human
agccuaggugacagagu

SEQ ID NO: 1641025 - RNA, 15 nt, Human
agccuaggugacaga

SEQ ID NO: 1641026 - RNA, 22 nt, Human
ugcagacucuacagaggccaug

SEQ ID NO: 1641027 - RNA, 14 nt, Human
agcccuucauuugg

SEQ ID NO: 1641028 - RNA, 13 nt, Human
agcccuucauuug

SEQ ID NO: 1641029 - RNA, 23 nt, Human
agcccuuccaugucgccucugca

SEQ ID NO: 1641030 - RNA, 22 nt, Human
agcccuuccaugucgccucugc

SEQ ID NO: 1641031 - RNA, 19 nt, Human
agcccuuccaugucgccuc

SEQ ID NO: 1641032 - RNA, 15 nt, Human
ugcacuccccugcug

SEQ ID NO: 1641033 - RNA, 20 nt, Human
ugcagacucuacagaggcca

SEQ ID NO: 1641034 - RNA, 19 nt, Human
ugcagacucuacagaggcc

SEQ ID NO: 1641035 - RNA, 13 nt, Human
ugcacuccccugc

SEQ ID NO: 1641036 - RNA, 12 nt, Human
ugcacuccccug

SEQ ID NO: 1641037 - RNA, 22 nt, Human
ugcacuauagccuaggugacag

SEQ ID NO: 1641038 - RNA, 15 nt, Human
ugcaccacugcacuc

SEQ ID NO: 1641039 - RNA, 14 nt, Human
ugcaccacugcacu

SEQ ID NO: 1641040 - RNA, 23 nt, Human
ugcacaagcuccaagcucccagg

SEQ ID NO: 1641041 - RNA, 22 nt, Human
ugcacaagcuccaagcucccag

SEQ ID NO: 1641042 - RNA, 20 nt, Human
ugcacaagcuccaagcuccc

SEQ ID NO: 1641043 - RNA, 18 nt, Human
ugcacaagcuccaagcuc

SEQ ID NO: 1641044 - RNA, 16 nt, Human
ugcacaagcuccaagc

SEQ ID NO: 1641045 - RNA, 15 nt, Human
ugcacaagcuccaag

SEQ ID NO: 1641046 - RNA, 15 nt, Human
ugcacacaccagagc

SEQ ID NO: 1641047 - RNA, 14 nt, Human
ugcacaagcugcac

SEQ ID NO: 1641048 - RNA, 19 nt, Human
agcuauggugucauaggcu

SEQ ID NO: 1641049 - RNA, 19 nt, Human
ugccauguuggccaggcug

SEQ ID NO: 1641050 - RNA, 18 nt, Human
ugccauguuggccaggcu

SEQ ID NO: 1641051 - RNA, 17 nt, Human
ugccauguuggccaggc

SEQ ID NO: 1641052 - RNA, 17 nt, Human
agcucagggccuggcuc

SEQ ID NO: 1641053 - RNA, 16 nt, Human
agcucagggccuggcu

SEQ ID NO: 1641054 - RNA, 15 nt, Human
agcucagggccuggc

SEQ ID NO: 1641055 - RNA, 21 nt, Human
ugccauguuggccaggcuggu

SEQ ID NO: 1641056 - RNA, 20 nt, Human
ugccauguuggccaggcugg

SEQ ID NO: 1641057 - RNA, 18 nt, Human
agcucagggccuggcuca

SEQ ID NO: 1641058 - RNA, 22 nt, Human
ugcccaaccugcucuccucuug

SEQ ID NO: 1641059 - RNA, 18 nt, Human
ugcccaaccugcucuccu

SEQ ID NO: 1641060 - RNA, 24 nt, Human
ugcccaaccugcucuccucuugcc

SEQ ID NO: 1641061 - RNA, 23 nt, Human
ugcccaaccugcucuccucuugc

SEQ ID NO: 1641062 - RNA, 11 nt, Human
ugcccaggccc

SEQ ID NO: 1641063 - RNA, 20 nt, Human
ugcccaggcaggucuugaac

SEQ ID NO: 1641064 - RNA, 17 nt, Human
ugcccaggcaggucuug

SEQ ID NO: 1641065 - RNA, 16 nt, Human
ugcccaggcaggucuu

SEQ ID NO: 1641066 - RNA, 15 nt, Human
ugcccaggcaggucu

SEQ ID NO: 1641067 - RNA, 14 nt, Human
ugcccacaggauca

SEQ ID NO: 1641068 - RNA, 22 nt, Human
ugcccaggccccugccacccug

SEQ ID NO: 1641069 - RNA, 20 nt, Human
ugcccaggccccugccaccc

SEQ ID NO: 1641070 - RNA, 14 nt, Human
ugcccaggccccug

SEQ ID NO: 1641071 - RNA, 16 nt, Human
ugcccacaggaucagu

SEQ ID NO: 1641072 - RNA, 12 nt, Human
ugcccaggcccc

SEQ ID NO: 1641073 - RNA, 17 nt, Human
ugcccaggccugccugu

SEQ ID NO: 1641074 - RNA, 15 nt, Human
ugcccaggccugccu

SEQ ID NO: 1641075 - RNA, 12 nt, Human
ugccccccagcc

SEQ ID NO: 1641076 - RNA, 19 nt, Human
ugccccucaacucuccucc

SEQ ID NO: 1641077 - RNA, 18 nt, Human
ugccccgucccccucugg

SEQ ID NO: 1641078 - RNA, 16 nt, Human
ugccccgucccccucu

SEQ ID NO: 1641079 - RNA, 23 nt, Human
agcgugguggacaugcacagcua

SEQ ID NO: 1641080 - RNA, 17 nt, Human
agcgugagccacugcac

SEQ ID NO: 1641081 - RNA, 16 nt, Human
agcgugagccacugca

SEQ ID NO: 1641082 - RNA, 20 nt, Human
agcgugguggacaugcacag

SEQ ID NO: 1641083 - RNA, 21 nt, Human
ugccauauucuguuggccagu

SEQ ID NO: 1641084 - RNA, 20 nt, Human
ugccauauucuguuggccag

SEQ ID NO: 1641085 - RNA, 15 nt, Human
agcggggacagcucc

SEQ ID NO: 1641086 - RNA, 17 nt, Human
agcggggacagcuccuu

SEQ ID NO: 1641087 - RNA, 16 nt, Human
agcggggacagcuccu

SEQ ID NO: 1641088 - RNA, 15 nt, Human
agcgugagccacugc

SEQ ID NO: 1641089 - RNA, 17 nt, Human
ugccauauucuguuggc

SEQ ID NO: 1641090 - RNA, 16 nt, Human
ugccauauucuguugg

SEQ ID NO: 1641091 - RNA, 15 nt, Human
ugccauauucuguug

SEQ ID NO: 1641092 - RNA, 23 nt, Human
ugccagucaccccggccaccugc

SEQ ID NO: 1641093 - RNA, 22 nt, Human
ugccagucaccccggccaccug

SEQ ID NO: 1641094 - RNA, 17 nt, Human
ugccagucccccugccc

SEQ ID NO: 1641095 - RNA, 20 nt, Human
ugccagucccccugccccag

SEQ ID NO: 1641096 - RNA, 19 nt, Human
ugccagucccccugcccca

SEQ ID NO: 1641097 - RNA, 20 nt, Human
ugccagucaccccggccacc

SEQ ID NO: 1641098 - RNA, 18 nt, Human
ugccagucaccccggcca

SEQ ID NO: 1641099 - RNA, 16 nt, Human
ugccagucaccccggc

SEQ ID NO: 1641100 - RNA, 15 nt, Human
ugccagucaccccgg

SEQ ID NO: 1641101 - RNA, 12 nt, Human
ugccacacuuca

SEQ ID NO: 1641102 - RNA, 23 nt, Human
ugccacugccucuuccucccuca

SEQ ID NO: 1641103 - RNA, 22 nt, Human
agcgcccaguuggguggaugcc

SEQ ID NO: 1641104 - RNA, 14 nt, Human
agcgcccaguuggg

SEQ ID NO: 1641105 - RNA, 14 nt, Human
agccugcuccagcu

SEQ ID NO: 1641106 - RNA, 20 nt, Human
agcgcccacuagacccacug

SEQ ID NO: 1641107 - RNA, 19 nt, Human
ugcauuugaaaauuuugau

SEQ ID NO: 1641108 - RNA, 23 nt, Human
ugcauuugaaaauuuugauguuu

SEQ ID NO: 1641109 - RNA, 14 nt, Human
ugcauuuccugaca

SEQ ID NO: 1641110 - RNA, 18 nt, Human
ugcauuugaggucuguuc

SEQ ID NO: 1641111 - RNA, 13 nt, Human
agcuggaaaagua

SEQ ID NO: 1641112 - RNA, 10 nt, Human
agcugccugu

SEQ ID NO: 1641113 - RNA, 19 nt, Human
agcugccugggaucccuca

SEQ ID NO: 1641114 - RNA, 13 nt, Human
agcugccugggau

SEQ ID NO: 1641115 - RNA, 21 nt, Human
agcugccugggaucccucauc

SEQ ID NO: 1641116 - RNA, 18 nt, Human
agcugccuccccuccucu

SEQ ID NO: 1641117 - RNA, 19 nt, Human
agcugccuccccuccucug

SEQ ID NO: 1641118 - RNA, 20 nt, Human
agcugccuccccuccucugc

SEQ ID NO: 1641119 - RNA, 22 nt, Human
ugccucugacacacagcucugu

SEQ ID NO: 1641120 - RNA, 21 nt, Human
ugccucucugcaggucccuaa

SEQ ID NO: 1641121 - RNA, 23 nt, Human
agcugccuccccuccucugcuug

SEQ ID NO: 1641122 - RNA, 21 nt, Human
agcugccuccccuccucugcu

SEQ ID NO: 1641123 - RNA, 22 nt, Human
agcugccuccccuccucugcuu

SEQ ID NO: 1641124 - RNA, 23 nt, Human
agcugggaugauuggagggggga

SEQ ID NO: 1641125 - RNA, 21 nt, Human
agcugggauuacaggcuccug

SEQ ID NO: 1641126 - RNA, 18 nt, Human
agcugggauuacaggcuc

SEQ ID NO: 1641127 - RNA, 22 nt, Human
agcugggaucacauguggacuu

SEQ ID NO: 1641128 - RNA, 19 nt, Human
agcugggacuacaggugug

SEQ ID NO: 1641129 - RNA, 17 nt, Human
agcugggacuacaggug

SEQ ID NO: 1641130 - RNA, 14 nt, Human
agcugggcagguug

SEQ ID NO: 1641131 - RNA, 23 nt, Human
agcugggauuacaggcuccugcc

SEQ ID NO: 1641132 - RNA, 22 nt, Human
agcugggauuacaggcuccugc

SEQ ID NO: 1641133 - RNA, 17 nt, Human
agcuggggccaggcugg

SEQ ID NO: 1641134 - RNA, 18 nt, Human
ugcggacagccacggcca

SEQ ID NO: 1641135 - RNA, 19 nt, Human
ugcgaaaggaugaaaguga

SEQ ID NO: 1641136 - RNA, 13 nt, Human
ugcgaaaggauga

SEQ ID NO: 1641137 - RNA, 21 nt, Human
ugccuuuuucauuauuuuauu

SEQ ID NO: 1641138 - RNA, 17 nt, Human
ugccuuuuucauuauuu

SEQ ID NO: 1641139 - RNA, 16 nt, Human
ugccuuuuucauuauu

SEQ ID NO: 1641140 - RNA, 15 nt, Human
ugccuuuuucauuau

SEQ ID NO: 1641141 - RNA, 14 nt, Human
ugccuuuuucauua

SEQ ID NO: 1641142 - RNA, 13 nt, Human
ugccuuuuucauu

SEQ ID NO: 1641143 - RNA, 17 nt, Human
ugccuguucagcuccag

SEQ ID NO: 1641144 - RNA, 16 nt, Human
ugccuguucagcucca

SEQ ID NO: 1641145 - RNA, 15 nt, Human
ugccuguucagcucc

SEQ ID NO: 1641146 - RNA, 17 nt, Human
ugccuuagaaccuuucu

SEQ ID NO: 1641147 - RNA, 14 nt, Human
ugccuuagaaccuu

SEQ ID NO: 1641148 - RNA, 21 nt, Human
ugccuuagaaccuuucuuaca

SEQ ID NO: 1641149 - RNA, 20 nt, Human
agcuggggccaggcuggguc

SEQ ID NO: 1641150 - RNA, 14 nt, Human
agcucuguccuggg

SEQ ID NO: 1641151 - RNA, 12 nt, Human
agcucuguccug

SEQ ID NO: 1641152 - RNA, 18 nt, Human
agcucuucuccaggcugu

SEQ ID NO: 1641153 - RNA, 22 nt, Human
agcugcacccucaggcaggugg

SEQ ID NO: 1641154 - RNA, 20 nt, Human
agcugcacccucaggcaggu

SEQ ID NO: 1641155 - RNA, 19 nt, Human
agcugcacccucaggcagg

SEQ ID NO: 1641156 - RNA, 18 nt, Human
agcugcacccucaggcag

SEQ ID NO: 1641157 - RNA, 17 nt, Human
agcugcacccucaggca

SEQ ID NO: 1641158 - RNA, 13 nt, Human
agcugcacccuca

SEQ ID NO: 1641159 - RNA, 12 nt, Human
agcucugcuccu

SEQ ID NO: 1641160 - RNA, 22 nt, Human
agcucugcuccucuccccagca

SEQ ID NO: 1641161 - RNA, 16 nt, Human
agcucucuccucccuu

SEQ ID NO: 1641162 - RNA, 20 nt, Human
ugcccuccaagaccuucucc

SEQ ID NO: 1641163 - RNA, 19 nt, Human
ugcccuccaagaccuucuc

SEQ ID NO: 1641164 - RNA, 22 nt, Human
ugcccuccaagaccuucuccuu

SEQ ID NO: 1641165 - RNA, 22 nt, Human
agcucuaucaccaaggagccaa

SEQ ID NO: 1641166 - RNA, 13 nt, Human
agcugccaccugc

SEQ ID NO: 1641167 - RNA, 14 nt, Human
agcugccagccgag

SEQ ID NO: 1641168 - RNA, 18 nt, Human
agcugcauacaguuugca

SEQ ID NO: 1641169 - RNA, 15 nt, Human
ugcccuuucugggca

SEQ ID NO: 1641170 - RNA, 14 nt, Human
ugccucucucaggc

SEQ ID NO: 1641171 - RNA, 13 nt, Human
ugccucucucagg

SEQ ID NO: 1641172 - RNA, 19 nt, Human
ugccucccaucacccgcua

SEQ ID NO: 1641173 - RNA, 14 nt, Human
ugccucccaucacc

SEQ ID NO: 1641174 - RNA, 13 nt, Human
ugccucccaucac

SEQ ID NO: 1641175 - RNA, 15 nt, Human
ugccucucucaggcc

SEQ ID NO: 1641176 - RNA, 16 nt, Human
ugccucucucaggcca

SEQ ID NO: 1641177 - RNA, 18 nt, Human
ugccucucugcagguccc

SEQ ID NO: 1641178 - RNA, 16 nt, Human
ugccucucugcagguc

SEQ ID NO: 1641179 - RNA, 21 nt, Human
ugccucugacacacagcucug

SEQ ID NO: 1641180 - RNA, 20 nt, Human
ugccucugacacacagcucu

SEQ ID NO: 1641181 - RNA, 20 nt, Human
ugccucucugcaggucccua

SEQ ID NO: 1641182 - RNA, 19 nt, Human
ugccucucugcaggucccu

SEQ ID NO: 1641183 - RNA, 14 nt, Human
ugcuaguaauugga

SEQ ID NO: 1641184 - RNA, 19 nt, Human
aggaaagcaaaggagauug

SEQ ID NO: 1641185 - RNA, 17 nt, Human
aggaaagcaaaggagau

SEQ ID NO: 1641186 - RNA, 16 nt, Human
aggaaagaggcucugg

SEQ ID NO: 1641187 - RNA, 16 nt, Human
ugcuaguaauuggaaa

SEQ ID NO: 1641188 - RNA, 21 nt, Human
ugcuauaacuauguugauaaa

SEQ ID NO: 1641189 - RNA, 19 nt, Human
aggaaagagaacuuccaga

SEQ ID NO: 1641190 - RNA, 13 nt, Human
aggaaagagaacu

SEQ ID NO: 1641191 - RNA, 13 nt, Human
aggaaagaggcuc

SEQ ID NO: 1641192 - RNA, 12 nt, Human
aggaaagaggcu

SEQ ID NO: 1641193 - RNA, 17 nt, Human
aggaaacccagcucugg

SEQ ID NO: 1641194 - RNA, 16 nt, Human
aggaaacccagcucug

SEQ ID NO: 1641195 - RNA, 15 nt, Human
aggaaacccagcucu

SEQ ID NO: 1641196 - RNA, 20 nt, Human
aggaaacccagcucuggucc

SEQ ID NO: 1641197 - RNA, 18 nt, Human
aggaaacccagcucuggu

SEQ ID NO: 1641198 - RNA, 21 nt, Human
aggaaacccagcucuggucca

SEQ ID NO: 1641199 - RNA, 19 nt, Human
agcuuugaaaauucagugg

SEQ ID NO: 1641200 - RNA, 18 nt, Human
agcuuugaaaauucagug

SEQ ID NO: 1641201 - RNA, 16 nt, Human
agcuuugaaaauucag

SEQ ID NO: 1641202 - RNA, 12 nt, Human
agcuuugaaaau

SEQ ID NO: 1641203 - RNA, 21 nt, Human
aggaaaaguuuaauauuaaag

SEQ ID NO: 1641204 - RNA, 24 nt, Human
aggaaaaguuuaauauuaaagcca

SEQ ID NO: 1641205 - RNA, 23 nt, Human
aggaaaaguuuaauauuaaagcc

SEQ ID NO: 1641206 - RNA, 20 nt, Human
agcuuauuaaaacucauuuu

SEQ ID NO: 1641207 - RNA, 15 nt, Human
agcuuauuaaaacuc

SEQ ID NO: 1641208 - RNA, 21 nt, Human
agcuuauugucuagugaaacu

SEQ ID NO: 1641209 - RNA, 21 nt, Human
agcuuguaaauagcucaggug

SEQ ID NO: 1641210 - RNA, 20 nt, Human
agcuuguaaauagcucaggu

SEQ ID NO: 1641211 - RNA, 19 nt, Human
agcuuguaaauagcucagg

SEQ ID NO: 1641212 - RNA, 21 nt, Human
ugcggacagccacggccaggc

SEQ ID NO: 1641213 - RNA, 20 nt, Human
ugcggacagccacggccagg

SEQ ID NO: 1641214 - RNA, 15 nt, Human
agcuuaucucagggg

SEQ ID NO: 1641215 - RNA, 14 nt, Human
agcuuaucucaggg

SEQ ID NO: 1641216 - RNA, 12 nt, Human
agcuuaucucag

SEQ ID NO: 1641217 - RNA, 20 nt, Human
agcuuaaaggggcuagagug

SEQ ID NO: 1641218 - RNA, 23 nt, Human
aggaauucuguauagauuagaau

SEQ ID NO: 1641219 - RNA, 19 nt, Human
aggaauugacccacaagaa

SEQ ID NO: 1641220 - RNA, 16 nt, Human
aggaauucuguauaga

SEQ ID NO: 1641221 - RNA, 22 nt, Human
aggaauucuguauagauuagaa

SEQ ID NO: 1641222 - RNA, 17 nt, Human
aggaauucuguauagau

SEQ ID NO: 1641223 - RNA, 23 nt, Human
aggaauccagacccggcugcgug

SEQ ID NO: 1641224 - RNA, 19 nt, Human
aggaaaucaaauaugcaaa

SEQ ID NO: 1641225 - RNA, 15 nt, Human
aggaagacuuuggaa

SEQ ID NO: 1641226 - RNA, 14 nt, Human
aggaagagaaaaaa

SEQ ID NO: 1641227 - RNA, 22 nt, Human
aggaagcucagggccuggcuca

SEQ ID NO: 1641228 - RNA, 18 nt, Human
aggaagcucagggccugg

SEQ ID NO: 1641229 - RNA, 17 nt, Human
aggaagcucagggccug

SEQ ID NO: 1641230 - RNA, 15 nt, Human
ugcugccauccaggu

SEQ ID NO: 1641231 - RNA, 14 nt, Human
ugcugccauccagg

SEQ ID NO: 1641232 - RNA, 13 nt, Human
ugcugccauccag

SEQ ID NO: 1641233 - RNA, 12 nt, Human
ugcugccaucca

SEQ ID NO: 1641234 - RNA, 22 nt, Human
ugcugccauccagguucagcuu

SEQ ID NO: 1641235 - RNA, 21 nt, Human
ugcugccauccagguucagcu

SEQ ID NO: 1641236 - RNA, 16 nt, Human
ugcugcccagccucca

SEQ ID NO: 1641237 - RNA, 14 nt, Human
ugcugcccagccuc

SEQ ID NO: 1641238 - RNA, 11 nt, Human
ugcugccaucc

SEQ ID NO: 1641239 - RNA, 22 nt, Human
ugcugccacacuucaggcucuu

SEQ ID NO: 1641240 - RNA, 19 nt, Human
ugcugccacacuucaggcu

SEQ ID NO: 1641241 - RNA, 16 nt, Human
ugcugccacacuucag

SEQ ID NO: 1641242 - RNA, 15 nt, Human
ugcugccacacuuca

SEQ ID NO: 1641243 - RNA, 22 nt, Human
aggaauuuuauuuuuuucugaa

SEQ ID NO: 1641244 - RNA, 18 nt, Human
aggaaauauuuauuuuaa

SEQ ID NO: 1641245 - RNA, 14 nt, Human
aggaaauauuuauu

SEQ ID NO: 1641246 - RNA, 23 nt, Human
aggaaaggcuccaggagcagcca

SEQ ID NO: 1641247 - RNA, 22 nt, Human
aggaaaggcuccaggagcagcc

SEQ ID NO: 1641248 - RNA, 20 nt, Human
aggaaaggcuccaggagcag

SEQ ID NO: 1641249 - RNA, 18 nt, Human
aggaaaggcuccaggagc

SEQ ID NO: 1641250 - RNA, 14 nt, Human
ugcugagucugaag

SEQ ID NO: 1641251 - RNA, 22 nt, Human
ugcugagucccaggcugagccu

SEQ ID NO: 1641252 - RNA, 18 nt, Human
ugcugagucccaggcuga

SEQ ID NO: 1641253 - RNA, 15 nt, Human
ugcugagucccaggc

SEQ ID NO: 1641254 - RNA, 24 nt, Human
ugcugacuguuuucucuugagagg

SEQ ID NO: 1641255 - RNA, 21 nt, Human
ugcugacuguuuucucuugag

SEQ ID NO: 1641256 - RNA, 18 nt, Human
ugcucugcauguuacaua

SEQ ID NO: 1641257 - RNA, 15 nt, Human
ugcucugcauguuac

SEQ ID NO: 1641258 - RNA, 17 nt, Human
ugcugacuguuuucucu

SEQ ID NO: 1641259 - RNA, 22 nt, Human
ugcucugaucauccacugugcc

SEQ ID NO: 1641260 - RNA, 19 nt, Human
ugcucugaugaagaggagu

SEQ ID NO: 1641261 - RNA, 18 nt, Human
ugcucugaugaagaggag

SEQ ID NO: 1641262 - RNA, 23 nt, Human
agggacuucugucuucacaacag

SEQ ID NO: 1641263 - RNA, 15 nt, Human
agggacuuggaagcu

SEQ ID NO: 1641264 - RNA, 19 nt, Human
agggacuuggaagcuccgc

SEQ ID NO: 1641265 - RNA, 18 nt, Human
agggacuuggaagcuccg

SEQ ID NO: 1641266 - RNA, 13 nt, Human
agggaaauuucag

SEQ ID NO: 1641267 - RNA, 14 nt, Human
agggagagaagaua

SEQ ID NO: 1641268 - RNA, 13 nt, Human
agggagagaagau

SEQ ID NO: 1641269 - RNA, 20 nt, Human
agggacuuggaagcuccgcu

SEQ ID NO: 1641270 - RNA, 16 nt, Human
ugggacuacaggugug

SEQ ID NO: 1641271 - RNA, 18 nt, Human
ugggacucaaugcacuga

SEQ ID NO: 1641272 - RNA, 13 nt, Human
ugggacuggccuc

SEQ ID NO: 1641273 - RNA, 15 nt, Human
ugggagaaaugaaaa

SEQ ID NO: 1641274 - RNA, 16 nt, Human
ugggacuggccucugc

SEQ ID NO: 1641275 - RNA, 14 nt, Human
ugggacuggccucu

SEQ ID NO: 1641276 - RNA, 18 nt, Human
ugggacuacaggcaccca

SEQ ID NO: 1641277 - RNA, 18 nt, Human
agggagcaucagugcccu

SEQ ID NO: 1641278 - RNA, 19 nt, Human
ugggaggcugagaugggag

SEQ ID NO: 1641279 - RNA, 23 nt, Human
ugggaggcucuggagcccacugu

SEQ ID NO: 1641280 - RNA, 17 nt, Human
ugggaggcucuggagcc

SEQ ID NO: 1641281 - RNA, 14 nt, Human
ugggaggcucugga

SEQ ID NO: 1641282 - RNA, 21 nt, Human
ugggaggauugcuugagcuca

SEQ ID NO: 1641283 - RNA, 18 nt, Human
ugggaggauugcuugagc

SEQ ID NO: 1641284 - RNA, 22 nt, Human
ugggaggauugcuugagcucag

SEQ ID NO: 1641285 - RNA, 22 nt, Human
ugggagaaccaaaaagaggcua

SEQ ID NO: 1641286 - RNA, 21 nt, Human
ugggagaaccaaaaagaggcu

SEQ ID NO: 1641287 - RNA, 16 nt, Human
ugggagaaaugaaaaa

SEQ ID NO: 1641288 - RNA, 17 nt, Human
ugggaggucaaggcugc

SEQ ID NO: 1641289 - RNA, 13 nt, Human
ugggcagaaggaa

SEQ ID NO: 1641290 - RNA, 20 nt, Human
ugggcagaaggaagacuuca

SEQ ID NO: 1641291 - RNA, 16 nt, Human
ugggcagaaggaagac

SEQ ID NO: 1641292 - RNA, 23 nt, Human
ugggcagaaggaagacuucaucc

SEQ ID NO: 1641293 - RNA, 13 nt, Human
ugggcauucaaau

SEQ ID NO: 1641294 - RNA, 14 nt, Human
ugggcauucaaaug

SEQ ID NO: 1641295 - RNA, 22 nt, Human
agggcuguuauaaucuuucaca

SEQ ID NO: 1641296 - RNA, 15 nt, Human
ugggcucccuuccca

SEQ ID NO: 1641297 - RNA, 14 nt, Human
ugggcucccuuccc

SEQ ID NO: 1641298 - RNA, 18 nt, Human
agggcccagagagggugg

SEQ ID NO: 1641299 - RNA, 14 nt, Human
agggcccagagagg

SEQ ID NO: 1641300 - RNA, 20 nt, Human
agggcuccagacacaugucc

SEQ ID NO: 1641301 - RNA, 16 nt, Human
agggauacccauccca

SEQ ID NO: 1641302 - RNA, 17 nt, Human
agggcacugguggcccg

SEQ ID NO: 1641303 - RNA, 13 nt, Human
agggcccagagag

SEQ ID NO: 1641304 - RNA, 12 nt, Human
agggcccagaga

SEQ ID NO: 1641305 - RNA, 20 nt, Human
agggagugaguugauagcac

SEQ ID NO: 1641306 - RNA, 23 nt, Human
agggaguccgaaagggacuugga

SEQ ID NO: 1641307 - RNA, 20 nt, Human
agggaguccgaaagggacuu

SEQ ID NO: 1641308 - RNA, 22 nt, Human
agggagggcuccagacacaugu

SEQ ID NO: 1641309 - RNA, 19 nt, Human
agggagggcuccagacaca

SEQ ID NO: 1641310 - RNA, 13 nt, Human
agggagggcucca

SEQ ID NO: 1641311 - RNA, 12 nt, Human
agggagggcucc

SEQ ID NO: 1641312 - RNA, 15 nt, Human
agggagggccugggc

SEQ ID NO: 1641313 - RNA, 13 nt, Human
agggagggccugg

SEQ ID NO: 1641314 - RNA, 23 nt, Human
agggaaacugccagcaacgcagg

SEQ ID NO: 1641315 - RNA, 21 nt, Human
agggaaacugccagcaacgca

SEQ ID NO: 1641316 - RNA, 19 nt, Human
agggaaacugccagcaacg

SEQ ID NO: 1641317 - RNA, 16 nt, Human
agggaaacugccagca

SEQ ID NO: 1641318 - RNA, 15 nt, Human
agggaaacugccagc

SEQ ID NO: 1641319 - RNA, 14 nt, Human
agggaaacugccag

SEQ ID NO: 1641320 - RNA, 21 nt, Human
aggcuuuuuuaucaugugaaa

SEQ ID NO: 1641321 - RNA, 18 nt, Human
aggcuuuuuuaucaugug

SEQ ID NO: 1641322 - RNA, 15 nt, Human
aggcuuuuuuaucau

SEQ ID NO: 1641323 - RNA, 22 nt, Human
aggcuuagucacugagacagcc

SEQ ID NO: 1641324 - RNA, 23 nt, Human
aggcuuagucacugagacagccc

SEQ ID NO: 1641325 - RNA, 23 nt, Human
aggcuucugguugaugccuguga

SEQ ID NO: 1641326 - RNA, 20 nt, Human
ugggaacccaaguccaagca

SEQ ID NO: 1641327 - RNA, 16 nt, Human
aggcugggagagccuu

SEQ ID NO: 1641328 - RNA, 19 nt, Human
aggcugggagagccuucca

SEQ ID NO: 1641329 - RNA, 21 nt, Human
aggcugggagagccuuccagg

SEQ ID NO: 1641330 - RNA, 20 nt, Human
aggcugggagagccuuccag

SEQ ID NO: 1641331 - RNA, 22 nt, Human
aggcugggagagccuuccaggg

SEQ ID NO: 1641332 - RNA, 23 nt, Human
aggcugggcucccuucccaccuc

SEQ ID NO: 1641333 - RNA, 21 nt, Human
aggcugggcucccuucccacc

SEQ ID NO: 1641334 - RNA, 14 nt, Human
aggcugggcuucag

SEQ ID NO: 1641335 - RNA, 18 nt, Human
aggcugggcucccuuccc

SEQ ID NO: 1641336 - RNA, 14 nt, Human
aggcugggcucccu

SEQ ID NO: 1641337 - RNA, 13 nt, Human
aggcugggcuccc

SEQ ID NO: 1641338 - RNA, 17 nt, Human
aggcugggggaagaagc

SEQ ID NO: 1641339 - RNA, 23 nt, Human
aggcugggcuucaguggcagcug

SEQ ID NO: 1641340 - RNA, 22 nt, Human
aggcugggcuucaguggcagcu

SEQ ID NO: 1641341 - RNA, 21 nt, Human
aggcugggcuucaguggcagc

SEQ ID NO: 1641342 - RNA, 20 nt, Human
aggcugggcuucaguggcag

SEQ ID NO: 1641343 - RNA, 19 nt, Human
aggcugggcuucaguggca

SEQ ID NO: 1641344 - RNA, 18 nt, Human
aggcugggcuucaguggc

SEQ ID NO: 1641345 - RNA, 22 nt, Human
aggcugggggaagaagcucucu

SEQ ID NO: 1641346 - RNA, 10 nt, Human
aggcuggguc

SEQ ID NO: 1641347 - RNA, 18 nt, Human
aggcugggucgcccugga

SEQ ID NO: 1641348 - RNA, 15 nt, Human
aggcugggucgcccu

SEQ ID NO: 1641349 - RNA, 17 nt, Human
aggcuggguucugaucc

SEQ ID NO: 1641350 - RNA, 14 nt, Human
aggcuggguucuga

SEQ ID NO: 1641351 - RNA, 21 nt, Human
aggcugggucgcccuggacug

SEQ ID NO: 1641352 - RNA, 20 nt, Human
aggcugggucgcccuggacu

SEQ ID NO: 1641353 - RNA, 19 nt, Human
uggcuauaggugcuacaaa

SEQ ID NO: 1641354 - RNA, 15 nt, Human
uggcuauaggugcua

SEQ ID NO: 1641355 - RNA, 19 nt, Human
uggcuaauguacugcauau

SEQ ID NO: 1641356 - RNA, 17 nt, Human
uggcuaauguacugcau

SEQ ID NO: 1641357 - RNA, 18 nt, Human
uggcuaagcaaaauguga

SEQ ID NO: 1641358 - RNA, 13 nt, Human
aggcuccugccac

SEQ ID NO: 1641359 - RNA, 23 nt, Human
aggcuccaggagcagccacauuc

SEQ ID NO: 1641360 - RNA, 19 nt, Human
aggcuccaggagcagccac

SEQ ID NO: 1641361 - RNA, 18 nt, Human
aggcuccaggagcagcca

SEQ ID NO: 1641362 - RNA, 17 nt, Human
aggcuccaggagcagcc

SEQ ID NO: 1641363 - RNA, 23 nt, Human
uggcuauaggugcuacaaaaaca

SEQ ID NO: 1641364 - RNA, 13 nt, Human
uggcucacgccug

SEQ ID NO: 1641365 - RNA, 18 nt, Human
ugggaaagcauuguaaau

SEQ ID NO: 1641366 - RNA, 17 nt, Human
ugggaaagcauuguaaa

SEQ ID NO: 1641367 - RNA, 21 nt, Human
ugggaaagcauuguaaaugug

SEQ ID NO: 1641368 - RNA, 20 nt, Human
ugggaacaccauaggucacc

SEQ ID NO: 1641369 - RNA, 16 nt, Human
ugggaaagcauuguaa

SEQ ID NO: 1641370 - RNA, 14 nt, Human
ugggaaagcauugu

SEQ ID NO: 1641371 - RNA, 18 nt, Human
ugggaaacaaaaggauaa

SEQ ID NO: 1641372 - RNA, 21 nt, Human
uggcuuuugugcauuaucuag

SEQ ID NO: 1641373 - RNA, 20 nt, Human
uggcuucacggaagagccuu

SEQ ID NO: 1641374 - RNA, 17 nt, Human
uggcuucacggaagagc

SEQ ID NO: 1641375 - RNA, 22 nt, Human
uggcuucacggaagagccuugc

SEQ ID NO: 1641376 - RNA, 16 nt, Human
uggcuuuugugcauua

SEQ ID NO: 1641377 - RNA, 23 nt, Human
uggcugcaaaggguaucaggugc

SEQ ID NO: 1641378 - RNA, 17 nt, Human
uggcugugccucugccu

SEQ ID NO: 1641379 - RNA, 16 nt, Human
uggcugugccucugcc

SEQ ID NO: 1641380 - RNA, 15 nt, Human
uggcugugccucugc

SEQ ID NO: 1641381 - RNA, 14 nt, Human
uggcugugccucug

SEQ ID NO: 1641382 - RNA, 14 nt, Human
uggcuucacggaag

SEQ ID NO: 1641383 - RNA, 23 nt, Human
uggcuguuggcugggggccucag

SEQ ID NO: 1641384 - RNA, 18 nt, Human
uggcuguuggcugggggc

SEQ ID NO: 1641385 - RNA, 16 nt, Human
uggcuguuggcugggg

SEQ ID NO: 1641386 - RNA, 19 nt, Human
uggcugugccucugccugu

SEQ ID NO: 1641387 - RNA, 18 nt, Human
uggcugugccucugccug

SEQ ID NO: 1641388 - RNA, 22 nt, Human
uggcugugccucugccugucuc

SEQ ID NO: 1641389 - RNA, 22 nt, Human
aggcuccacuuggucugugaga

SEQ ID NO: 1641390 - RNA, 21 nt, Human
aggcuccacuuggucugugag

SEQ ID NO: 1641391 - RNA, 17 nt, Human
aggcuccacuuggucug

SEQ ID NO: 1641392 - RNA, 11 nt, Human
aggcuccacuu

SEQ ID NO: 1641393 - RNA, 16 nt, Human
aggcuccaggagcagc

SEQ ID NO: 1641394 - RNA, 14 nt, Human
aggcuccaggagca

SEQ ID NO: 1641395 - RNA, 13 nt, Human
aggcuccaggagc

SEQ ID NO: 1641396 - RNA, 18 nt, Human
aggccuucucugaaggac

SEQ ID NO: 1641397 - RNA, 17 nt, Human
aggccuucucugaagga

SEQ ID NO: 1641398 - RNA, 14 nt, Human
aggcgccccuuccc

SEQ ID NO: 1641399 - RNA, 14 nt, Human
uggcccacugcauc

SEQ ID NO: 1641400 - RNA, 13 nt, Human
uggcccacugcau

SEQ ID NO: 1641401 - RNA, 19 nt, Human
uggcccacgcacuucggga

SEQ ID NO: 1641402 - RNA, 12 nt, Human
uggcccugcccu

SEQ ID NO: 1641403 - RNA, 19 nt, Human
uggccucugcacuccccug

SEQ ID NO: 1641404 - RNA, 20 nt, Human
uggccucugcacuccccugc

SEQ ID NO: 1641405 - RNA, 21 nt, Human
uggccucugcugauccuccca

SEQ ID NO: 1641406 - RNA, 13 nt, Human
uggcccugcccug

SEQ ID NO: 1641407 - RNA, 18 nt, Human
aggccagagacacaagcc

SEQ ID NO: 1641408 - RNA, 13 nt, Human
aggccagagacac

SEQ ID NO: 1641409 - RNA, 18 nt, Human
uggcagcucagagagggu

SEQ ID NO: 1641410 - RNA, 16 nt, Human
uggcagcucagagagg

SEQ ID NO: 1641411 - RNA, 15 nt, Human
uggcagcucagagag

SEQ ID NO: 1641412 - RNA, 14 nt, Human
uggcagcucagaga

SEQ ID NO: 1641413 - RNA, 21 nt, Human
uggcagccgugccuucagcuc

SEQ ID NO: 1641414 - RNA, 20 nt, Human
uggcagccgugccuucagcu

SEQ ID NO: 1641415 - RNA, 19 nt, Human
uggcagccgugccuucagc

SEQ ID NO: 1641416 - RNA, 18 nt, Human
uggcagccgugccuucag

SEQ ID NO: 1641417 - RNA, 18 nt, Human
aggccaugggccuccugu

SEQ ID NO: 1641418 - RNA, 23 nt, Human
aggccagagacacaagccuucgg

SEQ ID NO: 1641419 - RNA, 22 nt, Human
uggcagccgugccuucagcucu

SEQ ID NO: 1641420 - RNA, 16 nt, Human
aggcccagagggccug

SEQ ID NO: 1641421 - RNA, 15 nt, Human
aggcccagagggccu

SEQ ID NO: 1641422 - RNA, 20 nt, Human
aggccauuccccgucucugg

SEQ ID NO: 1641423 - RNA, 15 nt, Human
uggcacagggcagug

SEQ ID NO: 1641424 - RNA, 16 nt, Human
uggcacagggcagugg

SEQ ID NO: 1641425 - RNA, 17 nt, Human
uggcaccagcagccugg

SEQ ID NO: 1641426 - RNA, 16 nt, Human
uggcaccagcagccug

SEQ ID NO: 1641427 - RNA, 18 nt, Human
uggcaccagcagccugga

SEQ ID NO: 1641428 - RNA, 17 nt, Human
uggcagccgugccuuca

SEQ ID NO: 1641429 - RNA, 21 nt, Human
aggccccugccacccugggga

SEQ ID NO: 1641430 - RNA, 18 nt, Human
aggccccugccacccugg

SEQ ID NO: 1641431 - RNA, 17 nt, Human
aggccccugccacccug

SEQ ID NO: 1641432 - RNA, 15 nt, Human
aggccccugccaccc

SEQ ID NO: 1641433 - RNA, 13 nt, Human
aggccccugccac

SEQ ID NO: 1641434 - RNA, 20 nt, Human
aggcccagagggccugcaag

SEQ ID NO: 1641435 - RNA, 19 nt, Human
aggcccagagggccugcaa

SEQ ID NO: 1641436 - RNA, 16 nt, Human
aggcccggcuccaggc

SEQ ID NO: 1641437 - RNA, 15 nt, Human
aggcccggcuccagg

SEQ ID NO: 1641438 - RNA, 14 nt, Human
aggcccggcuccag

SEQ ID NO: 1641439 - RNA, 17 nt, Human
aggcccggcuccaggcu

SEQ ID NO: 1641440 - RNA, 12 nt, Human
aggccuggccag

SEQ ID NO: 1641441 - RNA, 13 nt, Human
aggccuggccaga

SEQ ID NO: 1641442 - RNA, 12 nt, Human
ugcugcccugcc

SEQ ID NO: 1641443 - RNA, 10 nt, Human
ugcugcccug

SEQ ID NO: 1641444 - RNA, 12 nt, Human
uggaacacucug

SEQ ID NO: 1641445 - RNA, 14 nt, Human
uggaacacucugag

SEQ ID NO: 1641446 - RNA, 13 nt, Human
uggaagcuccgcu

SEQ ID NO: 1641447 - RNA, 20 nt, Human
uggaaguacuauaauuuacc

SEQ ID NO: 1641448 - RNA, 21 nt, Human
aggaguuugagaccaaccugg

SEQ ID NO: 1641449 - RNA, 19 nt, Human
aggaguuucguuuucaaaa

SEQ ID NO: 1641450 - RNA, 15 nt, Human
aggaggccagccuug

SEQ ID NO: 1641451 - RNA, 14 nt, Human
uggaagugcuaauu

SEQ ID NO: 1641452 - RNA, 12 nt, Human
aggaucucuuga

SEQ ID NO: 1641453 - RNA, 15 nt, Human
aggaugcuuguacau

SEQ ID NO: 1641454 - RNA, 16 nt, Human
aggaugcuuguacaua

SEQ ID NO: 1641455 - RNA, 21 nt, Human
aggauccugagccagauuuca

SEQ ID NO: 1641456 - RNA, 12 nt, Human
aggaucagucug

SEQ ID NO: 1641457 - RNA, 18 nt, Human
aggaugcuuguacauaau

SEQ ID NO: 1641458 - RNA, 14 nt, Human
aggcaagcaccucc

SEQ ID NO: 1641459 - RNA, 16 nt, Human
aggcaacuugggaacu

SEQ ID NO: 1641460 - RNA, 17 nt, Human
aggcaagcaccuccugc

SEQ ID NO: 1641461 - RNA, 14 nt, Human
uggaauuugaaaca

SEQ ID NO: 1641462 - RNA, 21 nt, Human
uggaauuuuccuccuuucucu

SEQ ID NO: 1641463 - RNA, 17 nt, Human
uggaauuuuccuccuuu

SEQ ID NO: 1641464 - RNA, 15 nt, Human
uggacaccggaaaca

SEQ ID NO: 1641465 - RNA, 14 nt, Human
uggacaaaauggaa

SEQ ID NO: 1641466 - RNA, 17 nt, Human
uggacaaaauggaauac

SEQ ID NO: 1641467 - RNA, 20 nt, Human
aggcagcucuaaaugucaau

SEQ ID NO: 1641468 - RNA, 22 nt, Human
aggcagccccauucugccugcc

SEQ ID NO: 1641469 - RNA, 21 nt, Human
aggcagccccauucugccugc

SEQ ID NO: 1641470 - RNA, 20 nt, Human
aggcagccccauucugccug

SEQ ID NO: 1641471 - RNA, 19 nt, Human
aggcagccccauucugccu

SEQ ID NO: 1641472 - RNA, 15 nt, Human
aggcacccaccauca

SEQ ID NO: 1641473 - RNA, 12 nt, Human
aggcaggauggc

SEQ ID NO: 1641474 - RNA, 20 nt, Human
aggcaggaguuucguuuuca

SEQ ID NO: 1641475 - RNA, 16 nt, Human
aggcagggagggccug

SEQ ID NO: 1641476 - RNA, 21 nt, Human
aggcagggucucacucugucg

SEQ ID NO: 1641477 - RNA, 20 nt, Human
aggcagggucucacucuguc

SEQ ID NO: 1641478 - RNA, 19 nt, Human
aggcagggucucacucugu

SEQ ID NO: 1641479 - RNA, 14 nt, Human
aggcagguccaggg

SEQ ID NO: 1641480 - RNA, 22 nt, Human
aggcagggucucacucugucgc

SEQ ID NO: 1641481 - RNA, 21 nt, Human
aggcaggucuugaacuccugg

SEQ ID NO: 1641482 - RNA, 16 nt, Human
uggagaagaacugaaa

SEQ ID NO: 1641483 - RNA, 14 nt, Human
uggagaaaauggac

SEQ ID NO: 1641484 - RNA, 24 nt, Human
uggacuuuguuaguuucuccaagc

SEQ ID NO: 1641485 - RNA, 16 nt, Human
uggagcccacuguacu

SEQ ID NO: 1641486 - RNA, 23 nt, Human
uggagcccacuguacuugcucuu

SEQ ID NO: 1641487 - RNA, 19 nt, Human
uggagcccacuguacuugc

SEQ ID NO: 1641488 - RNA, 11 nt, Human
uggacuuuguu

SEQ ID NO: 1641489 - RNA, 22 nt, Human
uggacuuuguuaguuucuccaa

SEQ ID NO: 1641490 - RNA, 23 nt, Human
uggagccugcacggugaauggcu

SEQ ID NO: 1641491 - RNA, 16 nt, Human
aggcaaugcuggcugu

SEQ ID NO: 1641492 - RNA, 15 nt, Human
aggcaaugcuggcug

SEQ ID NO: 1641493 - RNA, 23 nt, Human
uggaggaaaaccaagccguggcu

SEQ ID NO: 1641494 - RNA, 21 nt, Human
uggaggaaaaccaagccgugg

SEQ ID NO: 1641495 - RNA, 16 nt, Human
uguaguguuggagaag

SEQ ID NO: 1641496 - RNA, 17 nt, Human
uguaggguuauaauaau

SEQ ID NO: 1641497 - RNA, 16 nt, Human
uguaggguuauaauaa

SEQ ID NO: 1641498 - RNA, 22 nt, Human
uguauauauuuccuauauuguu

SEQ ID NO: 1641499 - RNA, 18 nt, Human
uguauauauuuccuauau

SEQ ID NO: 1641500 - RNA, 18 nt, Human
uguaguguuggagaagaa

SEQ ID NO: 1641501 - RNA, 17 nt, Human
uguaguguuggagaaga

SEQ ID NO: 1641502 - RNA, 20 nt, Human
aguaaaaccacagcaguuga

SEQ ID NO: 1641503 - RNA, 19 nt, Human
aguaaaaccacagcaguug

SEQ ID NO: 1641504 - RNA, 17 nt, Human
aguaaaaccacagcagu

SEQ ID NO: 1641505 - RNA, 16 nt, Human
aguaaaaccacagcag

SEQ ID NO: 1641506 - RNA, 21 nt, Human
uguacauggaauaacauguaa

SEQ ID NO: 1641507 - RNA, 23 nt, Human
aguaaaaacaaagaaauuaugug

SEQ ID NO: 1641508 - RNA, 16 nt, Human
aguaaaaacaaagaaa

SEQ ID NO: 1641509 - RNA, 13 nt, Human
aguaauuggaaag

SEQ ID NO: 1641510 - RNA, 12 nt, Human
aguaauuggaaa

SEQ ID NO: 1641511 - RNA, 13 nt, Human
aguaaugauaacu

SEQ ID NO: 1641512 - RNA, 23 nt, Human
aguacacuguuucaaacuuuacu

SEQ ID NO: 1641513 - RNA, 21 nt, Human
aguacacuguuucaaacuuua

SEQ ID NO: 1641514 - RNA, 19 nt, Human
uguaagggaaacugccagc

SEQ ID NO: 1641515 - RNA, 18 nt, Human
uguaauuaaguacuaugu

SEQ ID NO: 1641516 - RNA, 21 nt, Human
uguaauuaaguacuauguauc

SEQ ID NO: 1641517 - RNA, 19 nt, Human
uguaauuaaguacuaugua

SEQ ID NO: 1641518 - RNA, 23 nt, Human
uguaauuaaguacuauguaucaa

SEQ ID NO: 1641519 - RNA, 18 nt, Human
uguaagggaaacugccag

SEQ ID NO: 1641520 - RNA, 13 nt, Human
uguaagggaaacu

SEQ ID NO: 1641521 - RNA, 20 nt, Human
agguuggcaaaaaggcagga

SEQ ID NO: 1641522 - RNA, 20 nt, Human
uguaauuuuuuuaucgucac

SEQ ID NO: 1641523 - RNA, 19 nt, Human
uguacauaaugcgugcaua

SEQ ID NO: 1641524 - RNA, 20 nt, Human
uguacauaaugcgugcauac

SEQ ID NO: 1641525 - RNA, 16 nt, Human
uguacaugaaaacaca

SEQ ID NO: 1641526 - RNA, 14 nt, Human
uguacaugaaaaca

SEQ ID NO: 1641527 - RNA, 14 nt, Human
uguacauauaagug

SEQ ID NO: 1641528 - RNA, 16 nt, Human
aggugcuacaaaaaca

SEQ ID NO: 1641529 - RNA, 12 nt, Human
aggugggaggau

SEQ ID NO: 1641530 - RNA, 16 nt, Human
ugggcugcccuggugc

SEQ ID NO: 1641531 - RNA, 15 nt, Human
ugggcugcccuggug

SEQ ID NO: 1641532 - RNA, 14 nt, Human
ugggcugcccuggu

SEQ ID NO: 1641533 - RNA, 13 nt, Human
ugggcugcccugg

SEQ ID NO: 1641534 - RNA, 22 nt, Human
aggugugagucaccaagcccag

SEQ ID NO: 1641535 - RNA, 21 nt, Human
aggugugagucaccaagccca

SEQ ID NO: 1641536 - RNA, 20 nt, Human
aggugucccugcacuugcag

SEQ ID NO: 1641537 - RNA, 16 nt, Human
aggugucccugcacuu

SEQ ID NO: 1641538 - RNA, 14 nt, Human
agguugaagcacca

SEQ ID NO: 1641539 - RNA, 12 nt, Human
aggugugcucug

SEQ ID NO: 1641540 - RNA, 16 nt, Human
agucucaggaaaucaa

SEQ ID NO: 1641541 - RNA, 13 nt, Human
agucucaggaaau

SEQ ID NO: 1641542 - RNA, 23 nt, Human
agucucacuguugcccaggcugg

SEQ ID NO: 1641543 - RNA, 20 nt, Human
agucuauuuacggaacucaa

SEQ ID NO: 1641544 - RNA, 15 nt, Human
agucuauuuacggaa

SEQ ID NO: 1641545 - RNA, 16 nt, Human
aguccucccaucucac

SEQ ID NO: 1641546 - RNA, 14 nt, Human
aguccucccaucuc

SEQ ID NO: 1641547 - RNA, 16 nt, Human
agucccccugccccag

SEQ ID NO: 1641548 - RNA, 14 nt, Human
agucaggaaagaga

SEQ ID NO: 1641549 - RNA, 22 nt, Human
agucagaaguuucugccgcagc

SEQ ID NO: 1641550 - RNA, 23 nt, Human
ugucccuuacgugaguccuggca

SEQ ID NO: 1641551 - RNA, 19 nt, Human
ugucccuuacgugaguccu

SEQ ID NO: 1641552 - RNA, 14 nt, Human
ugucgccucugcau

SEQ ID NO: 1641553 - RNA, 16 nt, Human
agucccaccuuggcug

SEQ ID NO: 1641554 - RNA, 15 nt, Human
agucccaccuuggcu

SEQ ID NO: 1641555 - RNA, 20 nt, Human
agucccaccuuggcugcagg

SEQ ID NO: 1641556 - RNA, 19 nt, Human
agucccaccuuggcugcag

SEQ ID NO: 1641557 - RNA, 18 nt, Human
agucccaccuuggcugca

SEQ ID NO: 1641558 - RNA, 20 nt, Human
agucccaggcugagccucag

SEQ ID NO: 1641559 - RNA, 19 nt, Human
agucccaggcugagccuca

SEQ ID NO: 1641560 - RNA, 18 nt, Human
agucccaggcugagccuc

SEQ ID NO: 1641561 - RNA, 17 nt, Human
agucccaggcugagccu

SEQ ID NO: 1641562 - RNA, 23 nt, Human
ugucccugcacuugcagacucua

SEQ ID NO: 1641563 - RNA, 22 nt, Human
ugucccugcacuugcagacucu

SEQ ID NO: 1641564 - RNA, 20 nt, Human
ugucccugcacuugcagacu

SEQ ID NO: 1641565 - RNA, 22 nt, Human
uguccaagaagcccaggaaagg

SEQ ID NO: 1641566 - RNA, 18 nt, Human
uguccaagaagcccagga

SEQ ID NO: 1641567 - RNA, 17 nt, Human
uguccaagaagcccagg

SEQ ID NO: 1641568 - RNA, 16 nt, Human
uguccaagaagcccag

SEQ ID NO: 1641569 - RNA, 22 nt, Human
ugucauuugagcagggcucagc

SEQ ID NO: 1641570 - RNA, 21 nt, Human
ugucauuugagcagggcucag

SEQ ID NO: 1641571 - RNA, 20 nt, Human
ugucauuugagcagggcuca

SEQ ID NO: 1641572 - RNA, 20 nt, Human
ugucagguggggcagcuuga

SEQ ID NO: 1641573 - RNA, 18 nt, Human
ugucagguggggcagcuu

SEQ ID NO: 1641574 - RNA, 17 nt, Human
ugucagguggggcagcu

SEQ ID NO: 1641575 - RNA, 15 nt, Human
uguccaagaagccca

SEQ ID NO: 1641576 - RNA, 14 nt, Human
uguccaagaagccc

SEQ ID NO: 1641577 - RNA, 14 nt, Human
aguauuaagcauau

SEQ ID NO: 1641578 - RNA, 12 nt, Human
aguauuaagcau

SEQ ID NO: 1641579 - RNA, 23 nt, Human
aguauaauuaacauguuaaacca

SEQ ID NO: 1641580 - RNA, 16 nt, Human
aguauaauuaacaugu

SEQ ID NO: 1641581 - RNA, 14 nt, Human
aguauaauuaacau

SEQ ID NO: 1641582 - RNA, 13 nt, Human
aguauaauuaaca

SEQ ID NO: 1641583 - RNA, 19 nt, Human
aguauucuuauuuaaugaa

SEQ ID NO: 1641584 - RNA, 15 nt, Human
agucaccaagcccag

SEQ ID NO: 1641585 - RNA, 17 nt, Human
agucaccccggccaccu

SEQ ID NO: 1641586 - RNA, 22 nt, Human
uguuaacugagugccuuuuggu

SEQ ID NO: 1641587 - RNA, 16 nt, Human
uguuaacugagugccu

SEQ ID NO: 1641588 - RNA, 23 nt, Human
uguguuaucacccagaagaaaau

SEQ ID NO: 1641589 - RNA, 16 nt, Human
uguguuagagauuuuu

SEQ ID NO: 1641590 - RNA, 22 nt, Human
uguguuaucacccagaagaaaa

SEQ ID NO: 1641591 - RNA, 19 nt, Human
uguuacauaagauaaaugu

SEQ ID NO: 1641592 - RNA, 18 nt, Human
uguuacaaauuguagaag

SEQ ID NO: 1641593 - RNA, 17 nt, Human
uguuacaaauuguagaa

SEQ ID NO: 1641594 - RNA, 22 nt, Human
uguuaaguugauggugaugaaa

SEQ ID NO: 1641595 - RNA, 11 nt, Human
aguggcagcug

SEQ ID NO: 1641596 - RNA, 16 nt, Human
aguggggaaugaagau

SEQ ID NO: 1641597 - RNA, 14 nt, Human
aguggggaggggcu

SEQ ID NO: 1641598 - RNA, 15 nt, Human
aguggggacagagca

SEQ ID NO: 1641599 - RNA, 17 nt, Human
aguggauggaaggggcu

SEQ ID NO: 1641600 - RNA, 16 nt, Human
agugcccuccaggaua

SEQ ID NO: 1641601 - RNA, 11 nt, Human
uguguguuuau

SEQ ID NO: 1641602 - RNA, 20 nt, Human
ugugucuugcaauggcagcc

SEQ ID NO: 1641603 - RNA, 22 nt, Human
uguugcccacagcuguaugauu

SEQ ID NO: 1641604 - RNA, 20 nt, Human
uguugcccaggcuggcgugc

SEQ ID NO: 1641605 - RNA, 23 nt, Human
uguugcccaggcuggcgugcagu

SEQ ID NO: 1641606 - RNA, 12 nt, Human
uguugcccaggc

SEQ ID NO: 1641607 - RNA, 15 nt, Human
uguucuaagaaguga

SEQ ID NO: 1641608 - RNA, 15 nt, Human
uguugcauagaauaa

SEQ ID NO: 1641609 - RNA, 19 nt, Human
aguguuguggauuuaacag

SEQ ID NO: 1641610 - RNA, 20 nt, Human
aguguuguggauuuaacaga

SEQ ID NO: 1641611 - RNA, 13 nt, Human
aguuacucagaau

SEQ ID NO: 1641612 - RNA, 23 nt, Human
aguuacuaucaugucaaacguga

SEQ ID NO: 1641613 - RNA, 16 nt, Human
aguguuguggauuuaa

SEQ ID NO: 1641614 - RNA, 19 nt, Human
aguguguguuuuucauaaa

SEQ ID NO: 1641615 - RNA, 18 nt, Human
aguguguguuuuucauaa

SEQ ID NO: 1641616 - RNA, 20 nt, Human
agugugacugaucucucgug

SEQ ID NO: 1641617 - RNA, 21 nt, Human
agugugccugaagucccagau

SEQ ID NO: 1641618 - RNA, 15 nt, Human
aguguggcaaaauaa

SEQ ID NO: 1641619 - RNA, 19 nt, Human
uguuccacaaguuaaauaa

SEQ ID NO: 1641620 - RNA, 22 nt, Human
agugugguguuuccuggcacug

SEQ ID NO: 1641621 - RNA, 17 nt, Human
uguuaugacuccagaau

SEQ ID NO: 1641622 - RNA, 13 nt, Human
uguuaugacucca

SEQ ID NO: 1641623 - RNA, 23 nt, Human
agugaacaaauuuacagagacag

SEQ ID NO: 1641624 - RNA, 22 nt, Human
agugaacaaauuuacagagaca

SEQ ID NO: 1641625 - RNA, 16 nt, Human
agugaacuugggccac

SEQ ID NO: 1641626 - RNA, 21 nt, Human
agugacugauggcuaauguac

SEQ ID NO: 1641627 - RNA, 20 nt, Human
agugaacuugggccacugug

SEQ ID NO: 1641628 - RNA, 16 nt, Human
agucuuucacauuuaa

SEQ ID NO: 1641629 - RNA, 21 nt, Human
agucuugucucagauuuuauu

SEQ ID NO: 1641630 - RNA, 20 nt, Human
agucuugucucagauuuuau

SEQ ID NO: 1641631 - RNA, 21 nt, Human
agugaacaaauuuacagagac

SEQ ID NO: 1641632 - RNA, 18 nt, Human
agucuuucacauuuaaau

SEQ ID NO: 1641633 - RNA, 12 nt, Human
agugagcugguu

SEQ ID NO: 1641634 - RNA, 19 nt, Human
ugugaugagaggaaaucac

SEQ ID NO: 1641635 - RNA, 22 nt, Human
ugugaugaugaaaugaggucag

SEQ ID NO: 1641636 - RNA, 22 nt, Human
agugagcacuaaggugugcucu

SEQ ID NO: 1641637 - RNA, 14 nt, Human
agugagcacuaagg

SEQ ID NO: 1641638 - RNA, 12 nt, Human
ugugaggaagcc

SEQ ID NO: 1641639 - RNA, 11 nt, Human
ugugaggaagc

SEQ ID NO: 1641640 - RNA, 19 nt, Human
ugugacuucagcucuguuu

SEQ ID NO: 1641641 - RNA, 18 nt, Human
ugugacuucagcucuguu

SEQ ID NO: 1641642 - RNA, 17 nt, Human
agucucuugauucauaa

SEQ ID NO: 1641643 - RNA, 16 nt, Human
agucucuugauucaua

SEQ ID NO: 1641644 - RNA, 21 nt, Human
agucucuucuccacuggaugg

SEQ ID NO: 1641645 - RNA, 19 nt, Human
agucucuucuccacuggau

SEQ ID NO: 1641646 - RNA, 16 nt, Human
agucuuagauguauau

SEQ ID NO: 1641647 - RNA, 14 nt, Human
agucuuagauguau

SEQ ID NO: 1641648 - RNA, 23 nt, Human
agucuuagauguauauauuuccu

SEQ ID NO: 1641649 - RNA, 16 nt, Human
agucuugucucagauu

SEQ ID NO: 1641650 - RNA, 19 nt, Human
agucuugucucagauuuua

SEQ ID NO: 1641651 - RNA, 17 nt, Human
agucuugucucagauuu

SEQ ID NO: 1641652 - RNA, 13 nt, Human
agucuuagaugua

SEQ ID NO: 1641653 - RNA, 12 nt, Human
agucugaaggcu

SEQ ID NO: 1641654 - RNA, 14 nt, Human
agugcaaauuguca

SEQ ID NO: 1641655 - RNA, 12 nt, Human
agugaggcucug

SEQ ID NO: 1641656 - RNA, 13 nt, Human
agugaggcucugc

SEQ ID NO: 1641657 - RNA, 14 nt, Human
agugaggcucugcc

SEQ ID NO: 1641658 - RNA, 21 nt, Human
agugaguuggguguauugugc

SEQ ID NO: 1641659 - RNA, 16 nt, Human
agugaggaugaaaaaa

SEQ ID NO: 1641660 - RNA, 17 nt, Human
agugcagugagccgaga

SEQ ID NO: 1641661 - RNA, 21 nt, Human
agugcacuaauguguaagaca

SEQ ID NO: 1641662 - RNA, 17 nt, Human
agugcacuaauguguaa

SEQ ID NO: 1641663 - RNA, 16 nt, Human
agugcaugcugucccu

SEQ ID NO: 1641664 - RNA, 14 nt, Human
agugccaaaaacaa

SEQ ID NO: 1641665 - RNA, 21 nt, Human
ugugcugcccugcccaccugg

SEQ ID NO: 1641666 - RNA, 20 nt, Human
ugugcugcccugcccaccug

SEQ ID NO: 1641667 - RNA, 19 nt, Human
ugugcugcccugcccaccu

SEQ ID NO: 1641668 - RNA, 18 nt, Human
ugugcugcccugcccacc

SEQ ID NO: 1641669 - RNA, 20 nt, Human
ugugcugguguaugugugaa

SEQ ID NO: 1641670 - RNA, 19 nt, Human
ugugcugggguuaucugaa

SEQ ID NO: 1641671 - RNA, 19 nt, Human
uguggauuuaacagaaaug

SEQ ID NO: 1641672 - RNA, 20 nt, Human
uguggauuuaacagaaaugu

SEQ ID NO: 1641673 - RNA, 23 nt, Human
agugagcugguuuuuagcggaga

SEQ ID NO: 1641674 - RNA, 22 nt, Human
uguggauuuaacagaaauguac

SEQ ID NO: 1641675 - RNA, 14 nt, Human
uguggaugauaaaa

SEQ ID NO: 1641676 - RNA, 21 nt, Human
uguggaucaaauccagccugc

SEQ ID NO: 1641677 - RNA, 12 nt, Human
ugugcugcccug

SEQ ID NO: 1641678 - RNA, 19 nt, Human
ugugcugagucugaaggcu

SEQ ID NO: 1641679 - RNA, 18 nt, Human
ugugcugagucugaaggc

SEQ ID NO: 1641680 - RNA, 12 nt, Human
ugugcucugauc

SEQ ID NO: 1641681 - RNA, 21 nt, Human
ugugcucaggagcccugggag

SEQ ID NO: 1641682 - RNA, 18 nt, Human
auagauaggucagugcaa

SEQ ID NO: 1641683 - RNA, 22 nt, Human
auagaggaagccugauuaaaga

SEQ ID NO: 1641684 - RNA, 21 nt, Human
auagaggaagccugauuaaag

SEQ ID NO: 1641685 - RNA, 14 nt, Human
auagagagagacca

SEQ ID NO: 1641686 - RNA, 18 nt, Human
auagacccacaagaggca

SEQ ID NO: 1641687 - RNA, 21 nt, Human
auagauuagagaguguugaaa

SEQ ID NO: 1641688 - RNA, 16 nt, Human
auagauuagaauucug

SEQ ID NO: 1641689 - RNA, 15 nt, Human
auagauuagaauucu

SEQ ID NO: 1641690 - RNA, 13 nt, Human
auagauuagaauu

SEQ ID NO: 1641691 - RNA, 22 nt, Human
auagauuagagaguguugaaac

SEQ ID NO: 1641692 - RNA, 17 nt, Human
auagaauuaacacauga

SEQ ID NO: 1641693 - RNA, 22 nt, Human
auagaauaaaauuuuuaaucuu

SEQ ID NO: 1641694 - RNA, 19 nt, Human
auagaauaaaauuuuuaau

SEQ ID NO: 1641695 - RNA, 14 nt, Human
auagaauaaaauuu

SEQ ID NO: 1641696 - RNA, 16 nt, Human
auagacaauuuauuau

SEQ ID NO: 1641697 - RNA, 22 nt, Human
auagacaauuuauuauggcaca

SEQ ID NO: 1641698 - RNA, 23 nt, Human
auagacaauuuauuauggcacau

SEQ ID NO: 1641699 - RNA, 13 nt, Human
auagaaguaaaaa

SEQ ID NO: 1641700 - RNA, 20 nt, Human
auagaaccucuuugucuaca

SEQ ID NO: 1641701 - RNA, 14 nt, Human
auagaaccucuuug

SEQ ID NO: 1641702 - RNA, 15 nt, Human
uuauuauauuuacaa

SEQ ID NO: 1641703 - RNA, 11 nt, Human
uuauuaugaaa

SEQ ID NO: 1641704 - RNA, 12 nt, Human
uuauuaugcaug

SEQ ID NO: 1641705 - RNA, 23 nt, Human
uuauuaugaaacuuguguaaaua

SEQ ID NO: 1641706 - RNA, 22 nt, Human
uuauuaugaaacuuguguaaau

SEQ ID NO: 1641707 - RNA, 21 nt, Human
uuauuaugaaacuuguguaaa

SEQ ID NO: 1641708 - RNA, 20 nt, Human
uuauuaugaaacuuguguaa

SEQ ID NO: 1641709 - RNA, 17 nt, Human
uuauuaugaaacuugug

SEQ ID NO: 1641710 - RNA, 19 nt, Human
uuauguuaaaacugggaca

SEQ ID NO: 1641711 - RNA, 14 nt, Human
uuauuauauuuaca

SEQ ID NO: 1641712 - RNA, 13 nt, Human
uuauuaugcauga

SEQ ID NO: 1641713 - RNA, 14 nt, Human
uuauuauguaaauc

SEQ ID NO: 1641714 - RNA, 13 nt, Human
uuauuauguaaau

SEQ ID NO: 1641715 - RNA, 22 nt, Human
uuauuauguaaaucccauuauu

SEQ ID NO: 1641716 - RNA, 16 nt, Human
uuauuauguaaauccc

SEQ ID NO: 1641717 - RNA, 19 nt, Human
uuauucaaaguugccuaaa

SEQ ID NO: 1641718 - RNA, 15 nt, Human
uuauucaaaguugcc

SEQ ID NO: 1641719 - RNA, 13 nt, Human
uuauucaaaguug

SEQ ID NO: 1641720 - RNA, 12 nt, Human
uuauucauaauu

SEQ ID NO: 1641721 - RNA, 14 nt, Human
uuauucacugauuu

SEQ ID NO: 1641722 - RNA, 20 nt, Human
uuauucacuuuuauuuagca

SEQ ID NO: 1641723 - RNA, 16 nt, Human
auacucauuaggaugg

SEQ ID NO: 1641724 - RNA, 11 nt, Human
auacucccauc

SEQ ID NO: 1641725 - RNA, 14 nt, Human
auacucccaucugu

SEQ ID NO: 1641726 - RNA, 17 nt, Human
auacuccuccaagguua

SEQ ID NO: 1641727 - RNA, 16 nt, Human
auacucugcuuagaau

SEQ ID NO: 1641728 - RNA, 18 nt, Human
auacucuuauaucuauau

SEQ ID NO: 1641729 - RNA, 14 nt, Human
auacucuuauaucu

SEQ ID NO: 1641730 - RNA, 18 nt, Human
auacucuuauagacaaca

SEQ ID NO: 1641731 - RNA, 15 nt, Human
auacuggauuguacu

SEQ ID NO: 1641732 - RNA, 13 nt, Human
auacguacacauu

SEQ ID NO: 1641733 - RNA, 14 nt, Human
auacguacacauuu

SEQ ID NO: 1641734 - RNA, 15 nt, Human
auacguacacauuuu

SEQ ID NO: 1641735 - RNA, 16 nt, Human
auacguacacauuuua

SEQ ID NO: 1641736 - RNA, 19 nt, Human
auacgugggcauucaaaug

SEQ ID NO: 1641737 - RNA, 18 nt, Human
auacgugggcauucaaau

SEQ ID NO: 1641738 - RNA, 17 nt, Human
auaccacuuuuguucuu

SEQ ID NO: 1641739 - RNA, 18 nt, Human
auaccacuuuuguucuug

SEQ ID NO: 1641740 - RNA, 17 nt, Human
auaccagccaguaaaug

SEQ ID NO: 1641741 - RNA, 14 nt, Human
auaccuuuuuuaga

SEQ ID NO: 1641742 - RNA, 17 nt, Human
auacuauggaauuucuc

SEQ ID NO: 1641743 - RNA, 13 nt, Human
auacuaaccagca

SEQ ID NO: 1641744 - RNA, 19 nt, Human
auacuaaccagcagaaaug

SEQ ID NO: 1641745 - RNA, 20 nt, Human
auacuaaccagcagaaaugc

SEQ ID NO: 1641746 - RNA, 19 nt, Human
uuauauuugaaauauugac

SEQ ID NO: 1641747 - RNA, 17 nt, Human
auacagaggcaacugca

SEQ ID NO: 1641748 - RNA, 16 nt, Human
auacagaggcaacugc

SEQ ID NO: 1641749 - RNA, 17 nt, Human
uuauaaacuuuaccuuu

SEQ ID NO: 1641750 - RNA, 18 nt, Human
uuauaaacuuuaccuuuu

SEQ ID NO: 1641751 - RNA, 16 nt, Human
uuauaaacuuuuuucu

SEQ ID NO: 1641752 - RNA, 12 nt, Human
uuauaaacuuuu

SEQ ID NO: 1641753 - RNA, 22 nt, Human
uuauaaacuuuuuucuuacugu

SEQ ID NO: 1641754 - RNA, 20 nt, Human
auacaguuacucagaauucu

SEQ ID NO: 1641755 - RNA, 23 nt, Human
auacaggaaaagcugcugacagu

SEQ ID NO: 1641756 - RNA, 23 nt, Human
auacagauagauauaugcucugc

SEQ ID NO: 1641757 - RNA, 18 nt, Human
auacaguuacucagaauu

SEQ ID NO: 1641758 - RNA, 21 nt, Human
auacaggaugaugacuaugga

SEQ ID NO: 1641759 - RNA, 21 nt, Human
uuaugaauuacauuuguauaa

SEQ ID NO: 1641760 - RNA, 11 nt, Human
uuaugacucca

SEQ ID NO: 1641761 - RNA, 17 nt, Human
uuaugaauuacauuugu

SEQ ID NO: 1641762 - RNA, 16 nt, Human
uuaugaauuacauuug

SEQ ID NO: 1641763 - RNA, 14 nt, Human
uuaugaauuacauu

SEQ ID NO: 1641764 - RNA, 20 nt, Human
uuaugauacuugaaaauuaa

SEQ ID NO: 1641765 - RNA, 18 nt, Human
uuaugauccagcagauua

SEQ ID NO: 1641766 - RNA, 13 nt, Human
uuaugauccagca

SEQ ID NO: 1641767 - RNA, 17 nt, Human
uuaucacccagaagaaa

SEQ ID NO: 1641768 - RNA, 18 nt, Human
uuaucacccagaagaaaa

SEQ ID NO: 1641769 - RNA, 19 nt, Human
uuaucacccagaagaaaau

SEQ ID NO: 1641770 - RNA, 21 nt, Human
uuaucacccagaagaaaauag

SEQ ID NO: 1641771 - RNA, 19 nt, Human
uuaugaaacuuuuggaagg

SEQ ID NO: 1641772 - RNA, 20 nt, Human
uuaugaagcuuuuaugugaa

SEQ ID NO: 1641773 - RNA, 18 nt, Human
uuaugaaacuuuuggaag

SEQ ID NO: 1641774 - RNA, 17 nt, Human
uuaugaaacuuuuggaa

SEQ ID NO: 1641775 - RNA, 14 nt, Human
uuaugaaacuuuug

SEQ ID NO: 1641776 - RNA, 19 nt, Human
uuaugaaacuuguguaaau

SEQ ID NO: 1641777 - RNA, 13 nt, Human
uuaugaaacuugu

SEQ ID NO: 1641778 - RNA, 18 nt, Human
uuaugaaacuuguguaaa

SEQ ID NO: 1641779 - RNA, 16 nt, Human
uuaugaaacuugugua

SEQ ID NO: 1641780 - RNA, 22 nt, Human
uuaugauuaaguaaugauaacu

SEQ ID NO: 1641781 - RNA, 19 nt, Human
uuauggcuuuugugcauua

SEQ ID NO: 1641782 - RNA, 13 nt, Human
uuaugggcugggu

SEQ ID NO: 1641783 - RNA, 19 nt, Human
uuaugauuaaguaaugaua

SEQ ID NO: 1641784 - RNA, 23 nt, Human
uuaugauccagcagauuauucac

SEQ ID NO: 1641785 - RNA, 22 nt, Human
uuaugauccagcagauuauuca

SEQ ID NO: 1641786 - RNA, 22 nt, Human
uuaugggcuggguucuacccag

SEQ ID NO: 1641787 - RNA, 23 nt, Human
uuauguaaaucccauuauucaaa

SEQ ID NO: 1641788 - RNA, 22 nt, Human
uuauguaaaucccauuauucaa

SEQ ID NO: 1641789 - RNA, 21 nt, Human
uuauguaaaucccauuauuca

SEQ ID NO: 1641790 - RNA, 19 nt, Human
uuauguaaaucccauuauu

SEQ ID NO: 1641791 - RNA, 13 nt, Human
uuauguaaauccc

SEQ ID NO: 1641792 - RNA, 12 nt, Human
uuauguaaaucc

SEQ ID NO: 1641793 - RNA, 11 nt, Human
uuauguaaauc

SEQ ID NO: 1641794 - RNA, 13 nt, Human
uuaugugaaacau

SEQ ID NO: 1641795 - RNA, 16 nt, Human
uuaugugcgcugauaa

SEQ ID NO: 1641796 - RNA, 22 nt, Human
uuaugugccagauuuaugcaua

SEQ ID NO: 1641797 - RNA, 15 nt, Human
uuaugugaaacaugu

SEQ ID NO: 1641798 - RNA, 23 nt, Human
uuaaaccaugggauaaaugccau

SEQ ID NO: 1641799 - RNA, 22 nt, Human
uuaaaccaugggauaaaugcca

SEQ ID NO: 1641800 - RNA, 21 nt, Human
uuaaaccaugggauaaaugcc

SEQ ID NO: 1641801 - RNA, 22 nt, Human
uuaaaguugaauuuauuggcuu

SEQ ID NO: 1641802 - RNA, 17 nt, Human
uuaaaguugaauuuauu

SEQ ID NO: 1641803 - RNA, 16 nt, Human
uuaaaguugaauuuau

SEQ ID NO: 1641804 - RNA, 13 nt, Human
uuaaaguugaauu

SEQ ID NO: 1641805 - RNA, 12 nt, Human
uuaacagaaaug

SEQ ID NO: 1641806 - RNA, 13 nt, Human
uuaacagaaaugu

SEQ ID NO: 1641807 - RNA, 14 nt, Human
uuaacagaaaugua

SEQ ID NO: 1641808 - RNA, 16 nt, Human
uuaacagaaauguaca

SEQ ID NO: 1641809 - RNA, 14 nt, Human
aguuucucuuuuca

SEQ ID NO: 1641810 - RNA, 15 nt, Human
aguuucucagcuccc

SEQ ID NO: 1641811 - RNA, 13 nt, Human
aguuucucagcuc

SEQ ID NO: 1641812 - RNA, 15 nt, Human
aguuucugccgcagc

SEQ ID NO: 1641813 - RNA, 22 nt, Human
aguuuguuaguaugaggcauuu

SEQ ID NO: 1641814 - RNA, 19 nt, Human
aguuucugccgcagcccug

SEQ ID NO: 1641815 - RNA, 15 nt, Human
aguuuguugaaacac

SEQ ID NO: 1641816 - RNA, 17 nt, Human
aguuuaaauuguaauag

SEQ ID NO: 1641817 - RNA, 20 nt, Human
aguuuaaauuguaauaggcg

SEQ ID NO: 1641818 - RNA, 15 nt, Human
aguuuagcuggaaaa

SEQ ID NO: 1641819 - RNA, 16 nt, Human
aguuuagcuggaaaag

SEQ ID NO: 1641820 - RNA, 19 nt, Human
uuaaaaaagaaacauuugg

SEQ ID NO: 1641821 - RNA, 22 nt, Human
uuaaaaucauuucugcaucagc

SEQ ID NO: 1641822 - RNA, 20 nt, Human
uuaaaaaugguuuaaauggu

SEQ ID NO: 1641823 - RNA, 16 nt, Human
uuaaaaaauggaacau

SEQ ID NO: 1641824 - RNA, 19 nt, Human
uuaaaaaucucaaauuucu

SEQ ID NO: 1641825 - RNA, 20 nt, Human
uuaaaaaucucaaauuucua

SEQ ID NO: 1641826 - RNA, 19 nt, Human
uuaaaaugagaaaucuaaa

SEQ ID NO: 1641827 - RNA, 12 nt, Human
uuaaaaugagaa

SEQ ID NO: 1641828 - RNA, 17 nt, Human
uuaaaccaugggauaaa

SEQ ID NO: 1641829 - RNA, 16 nt, Human
aguuuuauaugcuucu

SEQ ID NO: 1641830 - RNA, 12 nt, Human
aguuuuguuugg

SEQ ID NO: 1641831 - RNA, 16 nt, Human
aguuuuguuuggacca

SEQ ID NO: 1641832 - RNA, 14 nt, Human
aguuuuguuuggac

SEQ ID NO: 1641833 - RNA, 15 nt, Human
aguuuuuuuuauaca

SEQ ID NO: 1641834 - RNA, 18 nt, Human
aguuuuguuuggaccaaa

SEQ ID NO: 1641835 - RNA, 19 nt, Human
uuaagaaaaaggaugcaca

SEQ ID NO: 1641836 - RNA, 19 nt, Human
uuaagacgaaacauuuguu

SEQ ID NO: 1641837 - RNA, 18 nt, Human
uuaagacauuuuuggaag

SEQ ID NO: 1641838 - RNA, 23 nt, Human
uuaagacauuuuuggaaggggac

SEQ ID NO: 1641839 - RNA, 23 nt, Human
uuaacuuuuauaaacuuuaccuu

SEQ ID NO: 1641840 - RNA, 22 nt, Human
uuaacuuuuauaaacuuuaccu

SEQ ID NO: 1641841 - RNA, 22 nt, Human
auaaaagggacugagaaauuua

SEQ ID NO: 1641842 - RNA, 20 nt, Human
auaaaagccuguuuaagaga

SEQ ID NO: 1641843 - RNA, 19 nt, Human
auaaaagccuguuuaagag

SEQ ID NO: 1641844 - RNA, 15 nt, Human
uuaaucuaaauggaa

SEQ ID NO: 1641845 - RNA, 22 nt, Human
uuaagagagucuauuuacggaa

SEQ ID NO: 1641846 - RNA, 22 nt, Human
uuaagacgaaacauuuguucua

SEQ ID NO: 1641847 - RNA, 16 nt, Human
uuaauuugguuuucac

SEQ ID NO: 1641848 - RNA, 13 nt, Human
uuaauuuuggaau

SEQ ID NO: 1641849 - RNA, 15 nt, Human
uuaauuuuggaauuu

SEQ ID NO: 1641850 - RNA, 14 nt, Human
uuaauuuuggaauu

SEQ ID NO: 1641851 - RNA, 17 nt, Human
uuaaucuuuaauuuuac

SEQ ID NO: 1641852 - RNA, 13 nt, Human
uuaaucuuuaauu

SEQ ID NO: 1641853 - RNA, 14 nt, Human
auaauuuuaaaugu

SEQ ID NO: 1641854 - RNA, 13 nt, Human
auaauuuuaaaug

SEQ ID NO: 1641855 - RNA, 12 nt, Human
auaauuuuaaau

SEQ ID NO: 1641856 - RNA, 20 nt, Human
auaauucaggaagcagcuuu

SEQ ID NO: 1641857 - RNA, 14 nt, Human
auaaucuuucacag

SEQ ID NO: 1641858 - RNA, 23 nt, Human
auaauucacauuguauucagagu

SEQ ID NO: 1641859 - RNA, 14 nt, Human
auaagccagacauc

SEQ ID NO: 1641860 - RNA, 22 nt, Human
auaagccaaaaaaugcuugcuu

SEQ ID NO: 1641861 - RNA, 21 nt, Human
auaagauucauauuuacuucu

SEQ ID NO: 1641862 - RNA, 15 nt, Human
uuagggagagaagau

SEQ ID NO: 1641863 - RNA, 16 nt, Human
uuaggguuaugauuaa

SEQ ID NO: 1641864 - RNA, 14 nt, Human
uuaggguuaugauu

SEQ ID NO: 1641865 - RNA, 15 nt, Human
uuaggugaggaagca

SEQ ID NO: 1641866 - RNA, 19 nt, Human
uuaggugugggggaagcac

SEQ ID NO: 1641867 - RNA, 18 nt, Human
uuagguuggcaaaaaggc

SEQ ID NO: 1641868 - RNA, 13 nt, Human
uuaguaaucauau

SEQ ID NO: 1641869 - RNA, 14 nt, Human
uuaguaaucauauu

SEQ ID NO: 1641870 - RNA, 14 nt, Human
uuaguagagacagg

SEQ ID NO: 1641871 - RNA, 17 nt, Human
uuaguagagacaggguu

SEQ ID NO: 1641872 - RNA, 15 nt, Human
uuauaaaaauaaaaa

SEQ ID NO: 1641873 - RNA, 13 nt, Human
uuaguagagacag

SEQ ID NO: 1641874 - RNA, 19 nt, Human
uuaguacuccccuccuuga

SEQ ID NO: 1641875 - RNA, 13 nt, Human
uuauaaacuuuac

SEQ ID NO: 1641876 - RNA, 22 nt, Human
uuauaaaaauaaaaaacacugg

SEQ ID NO: 1641877 - RNA, 21 nt, Human
uuauaaaaauaaaaaacacug

SEQ ID NO: 1641878 - RNA, 18 nt, Human
auaaauugcuccuugaca

SEQ ID NO: 1641879 - RNA, 15 nt, Human
auaacuauguugaua

SEQ ID NO: 1641880 - RNA, 14 nt, Human
uuacaggugugaac

SEQ ID NO: 1641881 - RNA, 20 nt, Human
uuacauaagauaaaugugcu

SEQ ID NO: 1641882 - RNA, 19 nt, Human
uuaccagcagagcaccuua

SEQ ID NO: 1641883 - RNA, 17 nt, Human
uuacaguggggaaugaa

SEQ ID NO: 1641884 - RNA, 18 nt, Human
auaaaugccaucaauaaa

SEQ ID NO: 1641885 - RNA, 17 nt, Human
auaaaugccaucaauaa

SEQ ID NO: 1641886 - RNA, 19 nt, Human
auaaaucugugaacuugaa

SEQ ID NO: 1641887 - RNA, 16 nt, Human
auaaaucugugaacuu

SEQ ID NO: 1641888 - RNA, 15 nt, Human
auaaaucugugaacu

SEQ ID NO: 1641889 - RNA, 16 nt, Human
auaaauugcuccuuga

SEQ ID NO: 1641890 - RNA, 13 nt, Human
auaaauugcuccu

SEQ ID NO: 1641891 - RNA, 14 nt, Human
auaagauucauauu

SEQ ID NO: 1641892 - RNA, 17 nt, Human
uuagaauucuguauaga

SEQ ID NO: 1641893 - RNA, 15 nt, Human
uuagaauucuguaua

SEQ ID NO: 1641894 - RNA, 14 nt, Human
uuagaauucuguau

SEQ ID NO: 1641895 - RNA, 16 nt, Human
uuagaagucacacagu

SEQ ID NO: 1641896 - RNA, 15 nt, Human
uuacugcagcuuugu

SEQ ID NO: 1641897 - RNA, 13 nt, Human
uuacuguacauga

SEQ ID NO: 1641898 - RNA, 14 nt, Human
uuacuguacaugaa

SEQ ID NO: 1641899 - RNA, 22 nt, Human
uuacuguacaugaaaacacauu

SEQ ID NO: 1641900 - RNA, 23 nt, Human
uuacuguacaugaaaacacauuu

SEQ ID NO: 1641901 - RNA, 12 nt, Human
uuacuguacaug

SEQ ID NO: 1641902 - RNA, 23 nt, Human
uuacuguacagacagaaaaaacu

SEQ ID NO: 1641903 - RNA, 20 nt, Human
aucuuggucagauuugaacu

SEQ ID NO: 1641904 - RNA, 13 nt, Human
aucuugcucugcu

SEQ ID NO: 1641905 - RNA, 14 nt, Human
aucuuauaauuuaa

SEQ ID NO: 1641906 - RNA, 18 nt, Human
aucugugaaaggaaagag

SEQ ID NO: 1641907 - RNA, 23 nt, Human
aucugugaaaggaaagagggagg

SEQ ID NO: 1641908 - RNA, 12 nt, Human
uugcuccuugac

SEQ ID NO: 1641909 - RNA, 17 nt, Human
aucugugaaaggaaaga

SEQ ID NO: 1641910 - RNA, 17 nt, Human
aucuggugacuuuccuc

SEQ ID NO: 1641911 - RNA, 16 nt, Human
aucuggugacuuuccu

SEQ ID NO: 1641912 - RNA, 10 nt, Human
aucuggugac

SEQ ID NO: 1641913 - RNA, 23 nt, Human
aucugccuaaggacuucuuuaau

SEQ ID NO: 1641914 - RNA, 22 nt, Human
aucugccuaaggacuucuuuaa

SEQ ID NO: 1641915 - RNA, 21 nt, Human
aucugccuaaggacuucuuua

SEQ ID NO: 1641916 - RNA, 11 nt, Human
aucugccuaag

SEQ ID NO: 1641917 - RNA, 19 nt, Human
augaaagggcccagagagg

SEQ ID NO: 1641918 - RNA, 18 nt, Human
augaacuuguaaaggaau

SEQ ID NO: 1641919 - RNA, 16 nt, Human
augaauauuuaguguu

SEQ ID NO: 1641920 - RNA, 11 nt, Human
augaagaggag

SEQ ID NO: 1641921 - RNA, 17 nt, Human
augaauuacauuuguau

SEQ ID NO: 1641922 - RNA, 16 nt, Human
augaauuacauuugua

SEQ ID NO: 1641923 - RNA, 18 nt, Human
uuggggaccagagcugcc

SEQ ID NO: 1641924 - RNA, 23 nt, Human
augaauggcuaagcaaaauguga

SEQ ID NO: 1641925 - RNA, 21 nt, Human
augaauauuuaguguucauaa

SEQ ID NO: 1641926 - RNA, 15 nt, Human
augaauuacauuugu

SEQ ID NO: 1641927 - RNA, 11 nt, Human
uuggagacaga

SEQ ID NO: 1641928 - RNA, 14 nt, Human
uugcuugaaagaaa

SEQ ID NO: 1641929 - RNA, 18 nt, Human
uuggccccugcccggcug

SEQ ID NO: 1641930 - RNA, 16 nt, Human
uuggagggugucccaa

SEQ ID NO: 1641931 - RNA, 18 nt, Human
augaaagggcccagagag

SEQ ID NO: 1641932 - RNA, 17 nt, Human
aucuuugcagacaggca

SEQ ID NO: 1641933 - RNA, 22 nt, Human
aucuuuucauuuaggugaggaa

SEQ ID NO: 1641934 - RNA, 18 nt, Human
aucuuugcagacaggcaa

SEQ ID NO: 1641935 - RNA, 16 nt, Human
uugagaucagccuggg

SEQ ID NO: 1641936 - RNA, 16 nt, Human
uugagauguguucaca

SEQ ID NO: 1641937 - RNA, 19 nt, Human
aucuacacuccagugagac

SEQ ID NO: 1641938 - RNA, 18 nt, Human
aucuacacuccagugaga

SEQ ID NO: 1641939 - RNA, 20 nt, Human
aucuaauauguaacaagcca

SEQ ID NO: 1641940 - RNA, 18 nt, Human
aucuaauauguaacaagc

SEQ ID NO: 1641941 - RNA, 15 nt, Human
uugauacuacaguuu

SEQ ID NO: 1641942 - RNA, 11 nt, Human
uugagugccuu

SEQ ID NO: 1641943 - RNA, 20 nt, Human
uugagugaagcugggagaac

SEQ ID NO: 1641944 - RNA, 20 nt, Human
uugaguugauucagcucugc

SEQ ID NO: 1641945 - RNA, 13 nt, Human
uugaaucacagua

SEQ ID NO: 1641946 - RNA, 17 nt, Human
uugaagggaaauuucag

SEQ ID NO: 1641947 - RNA, 13 nt, Human
uugaagccuuugu

SEQ ID NO: 1641948 - RNA, 13 nt, Human
aucuaaauggaac

SEQ ID NO: 1641949 - RNA, 17 nt, Human
aucuaaauggaaccacu

SEQ ID NO: 1641950 - RNA, 18 nt, Human
aucuaaauggaaccacuc

SEQ ID NO: 1641951 - RNA, 19 nt, Human
aucuaaauggaaccacucu

SEQ ID NO: 1641952 - RNA, 17 nt, Human
auccucuguacagagcc

SEQ ID NO: 1641953 - RNA, 16 nt, Human
auccucuguacagagc

SEQ ID NO: 1641954 - RNA, 13 nt, Human
uugcaucaauuuu

SEQ ID NO: 1641955 - RNA, 18 nt, Human
uugcaccacugcacucca

SEQ ID NO: 1641956 - RNA, 16 nt, Human
uugcaccacugcacuc

SEQ ID NO: 1641957 - RNA, 15 nt, Human
uugcaccacugcacu

SEQ ID NO: 1641958 - RNA, 19 nt, Human
uugcaauggcagccuuggc

SEQ ID NO: 1641959 - RNA, 17 nt, Human
uugcaauggcagccuug

SEQ ID NO: 1641960 - RNA, 16 nt, Human
uugcaauggcagccuu

SEQ ID NO: 1641961 - RNA, 14 nt, Human
uugauuaaauucuu

SEQ ID NO: 1641962 - RNA, 13 nt, Human
uugauuaaauucu

SEQ ID NO: 1641963 - RNA, 23 nt, Human
uugauguuuuaaggaugcuugua

SEQ ID NO: 1641964 - RNA, 23 nt, Human
aucugaaaauguauguguaagua

SEQ ID NO: 1641965 - RNA, 14 nt, Human
aucucauuuccaag

SEQ ID NO: 1641966 - RNA, 14 nt, Human
aucuccaaaauaaa

SEQ ID NO: 1641967 - RNA, 17 nt, Human
aucuccaaaauaaaacu

SEQ ID NO: 1641968 - RNA, 20 nt, Human
aucuccaaaauaaaacuuuu

SEQ ID NO: 1641969 - RNA, 21 nt, Human
aucuccaaaauaaaacuuuuu

SEQ ID NO: 1641970 - RNA, 16 nt, Human
aucucagggccugguc

SEQ ID NO: 1641971 - RNA, 17 nt, Human
aucucccccagccccau

SEQ ID NO: 1641972 - RNA, 16 nt, Human
aucucccccagcccca

SEQ ID NO: 1641973 - RNA, 21 nt, Human
aucucccccagccccauccuc

SEQ ID NO: 1641974 - RNA, 15 nt, Human
aucuccacuccagau

SEQ ID NO: 1641975 - RNA, 21 nt, Human
aucucuucuggguuccuuccu

SEQ ID NO: 1641976 - RNA, 15 nt, Human
aucucccccagcccc

SEQ ID NO: 1641977 - RNA, 22 nt, Human
aucugaaaauguauguguaagu

SEQ ID NO: 1641978 - RNA, 20 nt, Human
aucugaaaauguauguguaa

SEQ ID NO: 1641979 - RNA, 19 nt, Human
aucugaaaauguaugugua

SEQ ID NO: 1641980 - RNA, 16 nt, Human
aucugaaaauguaugu

SEQ ID NO: 1641981 - RNA, 14 nt, Human
aucugaaaauguau

SEQ ID NO: 1641982 - RNA, 18 nt, Human
aucucuugagccugggag

SEQ ID NO: 1641983 - RNA, 15 nt, Human
aucucuugagccugg

SEQ ID NO: 1641984 - RNA, 16 nt, Human
uucuagcauggcugcc

SEQ ID NO: 1641985 - RNA, 23 nt, Human
uucuaagaagugaaaaucuacac

SEQ ID NO: 1641986 - RNA, 16 nt, Human
uucuaaguaaaaccac

SEQ ID NO: 1641987 - RNA, 15 nt, Human
uucuaaguaaaacca

SEQ ID NO: 1641988 - RNA, 14 nt, Human
uucggccuccaucc

SEQ ID NO: 1641989 - RNA, 19 nt, Human
uucgcuccugugucuugca

SEQ ID NO: 1641990 - RNA, 15 nt, Human
uucgcuccugugucu

SEQ ID NO: 1641991 - RNA, 15 nt, Human
uucggccuccauccu

SEQ ID NO: 1641992 - RNA, 20 nt, Human
uucuaaaggcuaccuuugua

SEQ ID NO: 1641993 - RNA, 21 nt, Human
uucuaaaggcuaccuuuguau

SEQ ID NO: 1641994 - RNA, 21 nt, Human
uucuaaaucuccaaaauaaaa

SEQ ID NO: 1641995 - RNA, 13 nt, Human
uucuaaaguaaaa

SEQ ID NO: 1641996 - RNA, 22 nt, Human
aucacuugucaauaaaauccau

SEQ ID NO: 1641997 - RNA, 11 nt, Human
aucagaauucu

SEQ ID NO: 1641998 - RNA, 18 nt, Human
aucagaaguuucucagcu

SEQ ID NO: 1641999 - RNA, 23 nt, Human
uucuaggacugaauuaugaaacu

SEQ ID NO: 1642000 - RNA, 16 nt, Human
uucuaggacugaauua

SEQ ID NO: 1642001 - RNA, 14 nt, Human
uucuaggacugaau

SEQ ID NO: 1642002 - RNA, 13 nt, Human
uucuaggacugaa

SEQ ID NO: 1642003 - RNA, 16 nt, Human
uucucacuccuaccug

SEQ ID NO: 1642004 - RNA, 18 nt, Human
uucucacuccuaccuggu

SEQ ID NO: 1642005 - RNA, 17 nt, Human
aucaggguuaguauugu

SEQ ID NO: 1642006 - RNA, 20 nt, Human
aucaggccaggcccucugcc

SEQ ID NO: 1642007 - RNA, 12 nt, Human
aucagaauucuc

SEQ ID NO: 1642008 - RNA, 18 nt, Human
aucaggccaggcccucug

SEQ ID NO: 1642009 - RNA, 16 nt, Human
aucaggccaggcccuc

SEQ ID NO: 1642010 - RNA, 15 nt, Human
aucaggccaggcccu

SEQ ID NO: 1642011 - RNA, 13 nt, Human
aucagcacgauuu

SEQ ID NO: 1642012 - RNA, 11 nt, Human
uuccugugucu

SEQ ID NO: 1642013 - RNA, 18 nt, Human
auauuuuuuguuaaauga

SEQ ID NO: 1642014 - RNA, 20 nt, Human
auauuuuuuguuaaaugauu

SEQ ID NO: 1642015 - RNA, 14 nt, Human
aucaacagauaaau

SEQ ID NO: 1642016 - RNA, 15 nt, Human
aucacggcucacugc

SEQ ID NO: 1642017 - RNA, 14 nt, Human
aucacgccacugca

SEQ ID NO: 1642018 - RNA, 13 nt, Human
aucacgccacugc

SEQ ID NO: 1642019 - RNA, 19 nt, Human
aucacggcucacugcagcc

SEQ ID NO: 1642020 - RNA, 18 nt, Human
aucacggcucacugcagc

SEQ ID NO: 1642021 - RNA, 14 nt, Human
aucaaugaguaaca

SEQ ID NO: 1642022 - RNA, 23 nt, Human
aucaccugucuugccuuuuucau

SEQ ID NO: 1642023 - RNA, 19 nt, Human
uuccguagguuauuuucag

SEQ ID NO: 1642024 - RNA, 14 nt, Human
uuccguuaaaauac

SEQ ID NO: 1642025 - RNA, 16 nt, Human
uuccguuaaaauacca

SEQ ID NO: 1642026 - RNA, 20 nt, Human
uucccucaccuuucccaucu

SEQ ID NO: 1642027 - RNA, 22 nt, Human
uucccgcucagcccucccugcc

SEQ ID NO: 1642028 - RNA, 21 nt, Human
uucccgcucagcccucccugc

SEQ ID NO: 1642029 - RNA, 18 nt, Human
uucccgcucagcccuccc

SEQ ID NO: 1642030 - RNA, 16 nt, Human
uucccgcucagcccuc

SEQ ID NO: 1642031 - RNA, 22 nt, Human
uuccucuuuccaucuacccucc

SEQ ID NO: 1642032 - RNA, 17 nt, Human
uuccucuuuccaucuac

SEQ ID NO: 1642033 - RNA, 13 nt, Human
uuccucuuuccau

SEQ ID NO: 1642034 - RNA, 18 nt, Human
uuccugaagaauugaaaa

SEQ ID NO: 1642035 - RNA, 15 nt, Human
uuccugaacaggaua

SEQ ID NO: 1642036 - RNA, 14 nt, Human
uuccugaaccgaug

SEQ ID NO: 1642037 - RNA, 14 nt, Human
uuccugaacaggau

SEQ ID NO: 1642038 - RNA, 20 nt, Human
uuccuaaauauauuuuaaga

SEQ ID NO: 1642039 - RNA, 18 nt, Human
uuccuaauuccacagcug

SEQ ID NO: 1642040 - RNA, 17 nt, Human
uuccuaauuccacagcu

SEQ ID NO: 1642041 - RNA, 16 nt, Human
uuccuaauuccacagc

SEQ ID NO: 1642042 - RNA, 21 nt, Human
uuccucugaggcugaaauuca

SEQ ID NO: 1642043 - RNA, 17 nt, Human
uuccucugagccuuggg

SEQ ID NO: 1642044 - RNA, 14 nt, Human
uuccucugagccuu

SEQ ID NO: 1642045 - RNA, 19 nt, Human
uugaacccgggaggcagag

SEQ ID NO: 1642046 - RNA, 17 nt, Human
uugaaauuguauuacaa

SEQ ID NO: 1642047 - RNA, 17 nt, Human
uugaaauuguaauuaua

SEQ ID NO: 1642048 - RNA, 15 nt, Human
uugaaauuguaauua

SEQ ID NO: 1642049 - RNA, 14 nt, Human
uugaaauuguaauu

SEQ ID NO: 1642050 - RNA, 13 nt, Human
uugaaauuguaau

SEQ ID NO: 1642051 - RNA, 12 nt, Human
auccuaagcuau

SEQ ID NO: 1642052 - RNA, 21 nt, Human
auccuaagcuauucaguaaua

SEQ ID NO: 1642053 - RNA, 19 nt, Human
auccuacaagacacaguga

SEQ ID NO: 1642054 - RNA, 18 nt, Human
auccuacaagacacagug

SEQ ID NO: 1642055 - RNA, 16 nt, Human
auccuaggcauuugcu

SEQ ID NO: 1642056 - RNA, 16 nt, Human
auccuccucagaucuu

SEQ ID NO: 1642057 - RNA, 23 nt, Human
aucccucauccucauacccaccc

SEQ ID NO: 1642058 - RNA, 21 nt, Human
aucccucauccucauacccac

SEQ ID NO: 1642059 - RNA, 14 nt, Human
aucccucauccuca

SEQ ID NO: 1642060 - RNA, 13 nt, Human
aucccaugagccu

SEQ ID NO: 1642061 - RNA, 24 nt, Human
aucccauaugccugggcagaagga

SEQ ID NO: 1642062 - RNA, 13 nt, Human
uucuucucccuca

SEQ ID NO: 1642063 - RNA, 15 nt, Human
uucuucugcuucagc

SEQ ID NO: 1642064 - RNA, 13 nt, Human
uucuucugcuuca

SEQ ID NO: 1642065 - RNA, 14 nt, Human
uucuucucccucag

SEQ ID NO: 1642066 - RNA, 20 nt, Human
uucuucugcuucagccuccc

SEQ ID NO: 1642067 - RNA, 16 nt, Human
uucuuuguaaugaaaa

SEQ ID NO: 1642068 - RNA, 15 nt, Human
uucuuuguaaugaaa

SEQ ID NO: 1642069 - RNA, 14 nt, Human
uucuuuuuuuguga

SEQ ID NO: 1642070 - RNA, 12 nt, Human
uucucuaggaaa

SEQ ID NO: 1642071 - RNA, 17 nt, Human
uucuccuuucacaaccu

SEQ ID NO: 1642072 - RNA, 15 nt, Human
uucucuaguuugauu

SEQ ID NO: 1642073 - RNA, 17 nt, Human
uucucuaguuugauuaa

SEQ ID NO: 1642074 - RNA, 20 nt, Human
uucucuaguuugauuaaauu

SEQ ID NO: 1642075 - RNA, 21 nt, Human
uucuccuuguguuacuaaguu

SEQ ID NO: 1642076 - RNA, 14 nt, Human
aucaggugcugcca

SEQ ID NO: 1642077 - RNA, 17 nt, Human
uucuggcucuuccaggc

SEQ ID NO: 1642078 - RNA, 16 nt, Human
uucuggcucuuccagg

SEQ ID NO: 1642079 - RNA, 18 nt, Human
uucugccugcccaggccc

SEQ ID NO: 1642080 - RNA, 17 nt, Human
uucugccugcccaggcc

SEQ ID NO: 1642081 - RNA, 21 nt, Human
uucugccugcccaggccccug

SEQ ID NO: 1642082 - RNA, 22 nt, Human
uucugaacuuggcgcugccccu

SEQ ID NO: 1642083 - RNA, 19 nt, Human
uucugaacuuggcgcugcc

SEQ ID NO: 1642084 - RNA, 15 nt, Human
uucugccauauucug

SEQ ID NO: 1642085 - RNA, 23 nt, Human
uucugaacuuggcgcugccccug

SEQ ID NO: 1642086 - RNA, 20 nt, Human
aucccaaacccuucagugcc

SEQ ID NO: 1642087 - RNA, 19 nt, Human
aucccaaacccuucagugc

SEQ ID NO: 1642088 - RNA, 18 nt, Human
aucccauaugccugggca

SEQ ID NO: 1642089 - RNA, 21 nt, Human
auccaguaucuugaagacuuu

SEQ ID NO: 1642090 - RNA, 17 nt, Human
auccaguuuuguuugga

SEQ ID NO: 1642091 - RNA, 13 nt, Human
auccaucaggcca

SEQ ID NO: 1642092 - RNA, 21 nt, Human
auccauuuggaaaucuuuaaa

SEQ ID NO: 1642093 - RNA, 16 nt, Human
auccaguaucuugaag

SEQ ID NO: 1642094 - RNA, 16 nt, Human
auccacccaccucagc

SEQ ID NO: 1642095 - RNA, 15 nt, Human
auccacccaccucag

SEQ ID NO: 1642096 - RNA, 13 nt, Human
auccacccaccuc

SEQ ID NO: 1642097 - RNA, 21 nt, Human
auccaagcuggucccacucag

SEQ ID NO: 1642098 - RNA, 18 nt, Human
auccaagcuggucccacu

SEQ ID NO: 1642099 - RNA, 20 nt, Human
aucauuuuaccuuugacaaa

SEQ ID NO: 1642100 - RNA, 18 nt, Human
uuuaucaugugaaaucau

SEQ ID NO: 1642101 - RNA, 17 nt, Human
uuuaucaugugaaauca

SEQ ID NO: 1642102 - RNA, 13 nt, Human
augcuaagugaaa

SEQ ID NO: 1642103 - RNA, 16 nt, Human
augcuaagacucagug

SEQ ID NO: 1642104 - RNA, 13 nt, Human
uuuauauuuacua

SEQ ID NO: 1642105 - RNA, 16 nt, Human
uuuauauuuacuaaaa

SEQ ID NO: 1642106 - RNA, 11 nt, Human
augcuauuucu

SEQ ID NO: 1642107 - RNA, 20 nt, Human
augcuauuucuauauuuuca

SEQ ID NO: 1642108 - RNA, 15 nt, Human
augcuauuucuauau

SEQ ID NO: 1642109 - RNA, 14 nt, Human
augcuauuucuaua

SEQ ID NO: 1642110 - RNA, 13 nt, Human
augcuauuucuau

SEQ ID NO: 1642111 - RNA, 23 nt, Human
augcuauuucuauauuuucauuc

SEQ ID NO: 1642112 - RNA, 22 nt, Human
augcuauuucuauauuuucauu

SEQ ID NO: 1642113 - RNA, 21 nt, Human
augcuauuucuauauuuucau

SEQ ID NO: 1642114 - RNA, 22 nt, Human
augcuagaacucccuuucaaca

SEQ ID NO: 1642115 - RNA, 21 nt, Human
augcuagaacucccuuucaac

SEQ ID NO: 1642116 - RNA, 20 nt, Human
augcuagaacucccuuucaa

SEQ ID NO: 1642117 - RNA, 18 nt, Human
uuuauuacaguauaauua

SEQ ID NO: 1642118 - RNA, 14 nt, Human
uuuauuacaguaua

SEQ ID NO: 1642119 - RNA, 17 nt, Human
uuucaaacauauauaac

SEQ ID NO: 1642120 - RNA, 16 nt, Human
uuucaaacuuuacuau

SEQ ID NO: 1642121 - RNA, 22 nt, Human
uuucaaacuuuacuauggcccu

SEQ ID NO: 1642122 - RNA, 16 nt, Human
uuucaaacauauauaa

SEQ ID NO: 1642123 - RNA, 22 nt, Human
uuucaaaauuguuacaaauugu

SEQ ID NO: 1642124 - RNA, 16 nt, Human
uuuauuuuguguuuag

SEQ ID NO: 1642125 - RNA, 23 nt, Human
auggaacgcguugaaauuguaau

SEQ ID NO: 1642126 - RNA, 20 nt, Human
uuuauuuuguguuuaggaac

SEQ ID NO: 1642127 - RNA, 19 nt, Human
auggaacgcguugaaauug

SEQ ID NO: 1642128 - RNA, 18 nt, Human
auggaacgcguugaaauu

SEQ ID NO: 1642129 - RNA, 13 nt, Human
augcuucucacug

SEQ ID NO: 1642130 - RNA, 17 nt, Human
auggaacgcguugaaau

SEQ ID NO: 1642131 - RNA, 16 nt, Human
auggaacgcguugaaa

SEQ ID NO: 1642132 - RNA, 15 nt, Human
auggaacgcguugaa

SEQ ID NO: 1642133 - RNA, 19 nt, Human
augcuguucaugaaagauu

SEQ ID NO: 1642134 - RNA, 23 nt, Human
augcuguucaugaaagauucaau

SEQ ID NO: 1642135 - RNA, 22 nt, Human
augcugugcccuaaaguguauu

SEQ ID NO: 1642136 - RNA, 17 nt, Human
augcuguucaugaaaga

SEQ ID NO: 1642137 - RNA, 13 nt, Human
augcugcuuuuuc

SEQ ID NO: 1642138 - RNA, 15 nt, Human
uuucauuauuuuauu

SEQ ID NO: 1642139 - RNA, 13 nt, Human
uuucauuauuuua

SEQ ID NO: 1642140 - RNA, 18 nt, Human
uuuccaugaguccccugu

SEQ ID NO: 1642141 - RNA, 17 nt, Human
uuuccaugaguccccug

SEQ ID NO: 1642142 - RNA, 20 nt, Human
uuucauuauuuuauuaugaa

SEQ ID NO: 1642143 - RNA, 19 nt, Human
uuucauuauuuuauuauga

SEQ ID NO: 1642144 - RNA, 12 nt, Human
auggacuuuguu

SEQ ID NO: 1642145 - RNA, 11 nt, Human
auggacuuugu

SEQ ID NO: 1642146 - RNA, 22 nt, Human
auggacuguggugacuuuggau

SEQ ID NO: 1642147 - RNA, 17 nt, Human
auggacuguggugacuu

SEQ ID NO: 1642148 - RNA, 16 nt, Human
auggacuguggugacu

SEQ ID NO: 1642149 - RNA, 16 nt, Human
auggcacuaguauuuc

SEQ ID NO: 1642150 - RNA, 14 nt, Human
auggcacuaguauu

SEQ ID NO: 1642151 - RNA, 18 nt, Human
auggagacugucucaaga

SEQ ID NO: 1642152 - RNA, 19 nt, Human
auggcuaagcaaaauguga

SEQ ID NO: 1642153 - RNA, 18 nt, Human
auggcuaauguacugcau

SEQ ID NO: 1642154 - RNA, 15 nt, Human
augggagagaagaga

SEQ ID NO: 1642155 - RNA, 19 nt, Human
augggagagaagagaaugc

SEQ ID NO: 1642156 - RNA, 14 nt, Human
augggauaaaugcc

SEQ ID NO: 1642157 - RNA, 15 nt, Human
augauaacuggaaac

SEQ ID NO: 1642158 - RNA, 21 nt, Human
uuguuccacaaguuaaauaaa

SEQ ID NO: 1642159 - RNA, 13 nt, Human
uuguguucaccuu

SEQ ID NO: 1642160 - RNA, 13 nt, Human
uuguguuacuaag

SEQ ID NO: 1642161 - RNA, 15 nt, Human
uuguguuacuaaguu

SEQ ID NO: 1642162 - RNA, 20 nt, Human
uuguguuacuaaguuuuuau

SEQ ID NO: 1642163 - RNA, 18 nt, Human
augauuaaguaaugauaa

SEQ ID NO: 1642164 - RNA, 14 nt, Human
augauuaaguaaug

SEQ ID NO: 1642165 - RNA, 20 nt, Human
augaucuaggaagacuuugg

SEQ ID NO: 1642166 - RNA, 17 nt, Human
augaucuaggaagacuu

SEQ ID NO: 1642167 - RNA, 22 nt, Human
augauccagcagauuauucacu

SEQ ID NO: 1642168 - RNA, 21 nt, Human
augauacuugaaaauuaacau

SEQ ID NO: 1642169 - RNA, 17 nt, Human
augauacuugaaaauua

SEQ ID NO: 1642170 - RNA, 20 nt, Human
augauccagcagauuauuca

SEQ ID NO: 1642171 - RNA, 19 nt, Human
augauccagcagauuauuc

SEQ ID NO: 1642172 - RNA, 10 nt, Human
augauccagc

SEQ ID NO: 1642173 - RNA, 21 nt, Human
augcacuuuguucuggcucuu

SEQ ID NO: 1642174 - RNA, 13 nt, Human
uuuaaagaaugcu

SEQ ID NO: 1642175 - RNA, 22 nt, Human
augcaccagcccuuagcaggga

SEQ ID NO: 1642176 - RNA, 13 nt, Human
augcaccuggaau

SEQ ID NO: 1642177 - RNA, 20 nt, Human
augcacuuuguucuggcucu

SEQ ID NO: 1642178 - RNA, 19 nt, Human
augcacuuuguucuggcuc

SEQ ID NO: 1642179 - RNA, 17 nt, Human
augcacuuuguucuggc

SEQ ID NO: 1642180 - RNA, 21 nt, Human
augccauuuaaagcuuauuaa

SEQ ID NO: 1642181 - RNA, 17 nt, Human
augccauuuaaagcuua

SEQ ID NO: 1642182 - RNA, 13 nt, Human
augcaguucugaa

SEQ ID NO: 1642183 - RNA, 23 nt, Human
augcagugguaugaucacggcuc

SEQ ID NO: 1642184 - RNA, 13 nt, Human
augcagugcuucc

SEQ ID NO: 1642185 - RNA, 21 nt, Human
augcgggccagugcuccagcc

SEQ ID NO: 1642186 - RNA, 20 nt, Human
augcgugcauaccacuuuug

SEQ ID NO: 1642187 - RNA, 15 nt, Human
augcccagccccuuc

SEQ ID NO: 1642188 - RNA, 14 nt, Human
augcccagccccuu

SEQ ID NO: 1642189 - RNA, 13 nt, Human
augcccagccccu

SEQ ID NO: 1642190 - RNA, 12 nt, Human
augcccagcccc

SEQ ID NO: 1642191 - RNA, 16 nt, Human
augccucagccuccug

SEQ ID NO: 1642192 - RNA, 14 nt, Human
augcccuggaucca

SEQ ID NO: 1642193 - RNA, 18 nt, Human
uuuaaauauaugcuaagu

SEQ ID NO: 1642194 - RNA, 21 nt, Human
uuuaaauaaauaaauagcuag

SEQ ID NO: 1642195 - RNA, 12 nt, Human
uuuaauucaguu

SEQ ID NO: 1642196 - RNA, 18 nt, Human
augcagccucacaguccu

SEQ ID NO: 1642197 - RNA, 17 nt, Human
augcagcaucuaaguaa

SEQ ID NO: 1642198 - RNA, 18 nt, Human
uuugaccucugcagcaau

SEQ ID NO: 1642199 - RNA, 12 nt, Human
uuugaccucugc

SEQ ID NO: 1642200 - RNA, 19 nt, Human
auguagccccucuccugga

SEQ ID NO: 1642201 - RNA, 13 nt, Human
auguagaggagaa

SEQ ID NO: 1642202 - RNA, 12 nt, Human
auguagaggaga

SEQ ID NO: 1642203 - RNA, 19 nt, Human
auguagaggagaaacugga

SEQ ID NO: 1642204 - RNA, 17 nt, Human
auguagaggagaaacug

SEQ ID NO: 1642205 - RNA, 16 nt, Human
auguacuucaugcugu

SEQ ID NO: 1642206 - RNA, 14 nt, Human
uuugcaagccagau

SEQ ID NO: 1642207 - RNA, 15 nt, Human
uuugccguuauuaaa

SEQ ID NO: 1642208 - RNA, 22 nt, Human
uuugauucagacagcugccugg

SEQ ID NO: 1642209 - RNA, 13 nt, Human
uuugccucugccu

SEQ ID NO: 1642210 - RNA, 22 nt, Human
uuugauguucuuucacccuuuu

SEQ ID NO: 1642211 - RNA, 13 nt, Human
uuugauuaaauuc

SEQ ID NO: 1642212 - RNA, 18 nt, Human
uuugauuaaauucuugca

SEQ ID NO: 1642213 - RNA, 21 nt, Human
uuugauuaaauucuugcaaag

SEQ ID NO: 1642214 - RNA, 21 nt, Human
uuugauucagacagcugccug

SEQ ID NO: 1642215 - RNA, 23 nt, Human
uuugauuaaauucuugcaaagua

SEQ ID NO: 1642216 - RNA, 19 nt, Human
uuugacgccaucccagccc

SEQ ID NO: 1642217 - RNA, 16 nt, Human
uuugacgccaucccag

SEQ ID NO: 1642218 - RNA, 14 nt, Human
uuugacgccauccc

SEQ ID NO: 1642219 - RNA, 13 nt, Human
uuugacgccaucc

SEQ ID NO: 1642220 - RNA, 20 nt, Human
uuugacgccaucccagcccc

SEQ ID NO: 1642221 - RNA, 17 nt, Human
uuugugaagcaaaauuu

SEQ ID NO: 1642222 - RNA, 22 nt, Human
uuugugaaaugauggugaaagu

SEQ ID NO: 1642223 - RNA, 20 nt, Human
uuugugaagguggaaauaaa

SEQ ID NO: 1642224 - RNA, 19 nt, Human
uuugugcugguguaugugu

SEQ ID NO: 1642225 - RNA, 21 nt, Human
uuuguaguguuggagaagaac

SEQ ID NO: 1642226 - RNA, 19 nt, Human
uuuguaguguuggagaaga

SEQ ID NO: 1642227 - RNA, 12 nt, Human
uuuguauaaaag

SEQ ID NO: 1642228 - RNA, 14 nt, Human
uuuguaaugaaaac

SEQ ID NO: 1642229 - RNA, 13 nt, Human
uuuguaaugaaaa

SEQ ID NO: 1642230 - RNA, 23 nt, Human
augugcacaugcacgugugugca

SEQ ID NO: 1642231 - RNA, 19 nt, Human
augugaugagaggaaauca

SEQ ID NO: 1642232 - RNA, 17 nt, Human
augugaugagaggaaau

SEQ ID NO: 1642233 - RNA, 16 nt, Human
augugaugagaggaaa

SEQ ID NO: 1642234 - RNA, 23 nt, Human
augucucuuuaaugucacaggca

SEQ ID NO: 1642235 - RNA, 17 nt, Human
auguccacugguucuuc

SEQ ID NO: 1642236 - RNA, 13 nt, Human
augucagugugac

SEQ ID NO: 1642237 - RNA, 12 nt, Human
augucaguguga

SEQ ID NO: 1642238 - RNA, 17 nt, Human
augucucugagcauuag

SEQ ID NO: 1642239 - RNA, 14 nt, Human
augucgccucugca

SEQ ID NO: 1642240 - RNA, 13 nt, Human
augucgccucugc

SEQ ID NO: 1642241 - RNA, 15 nt, Human
augucgccucugcau

SEQ ID NO: 1642242 - RNA, 22 nt, Human
augucucaggucccugcagggc

SEQ ID NO: 1642243 - RNA, 17 nt, Human
augucucaggucccugc

SEQ ID NO: 1642244 - RNA, 16 nt, Human
auguauguguaaguau

SEQ ID NO: 1642245 - RNA, 22 nt, Human
auguauuacaguggggaaugaa

SEQ ID NO: 1642246 - RNA, 20 nt, Human
uuuggcauaacauaaaucug

SEQ ID NO: 1642247 - RNA, 21 nt, Human
uuuggcauaacauaaaucugu

SEQ ID NO: 1642248 - RNA, 18 nt, Human
auguaugagguacaaccu

SEQ ID NO: 1642249 - RNA, 21 nt, Human
augguucccuugaugaagaag

SEQ ID NO: 1642250 - RNA, 20 nt, Human
augguuccccuguucacucu

SEQ ID NO: 1642251 - RNA, 19 nt, Human
augguuccccuguucacuc

SEQ ID NO: 1642252 - RNA, 13 nt, Human
augguuguacaua

SEQ ID NO: 1642253 - RNA, 15 nt, Human
augguuuucaaaaua

SEQ ID NO: 1642254 - RNA, 14 nt, Human
augguuuucaaaau

SEQ ID NO: 1642255 - RNA, 14 nt, Human
augguuuucuugug

SEQ ID NO: 1642256 - RNA, 16 nt, Human
augguuuucaaaauaa

SEQ ID NO: 1642257 - RNA, 23 nt, Human
auguaaaucccauuauucaaagu

SEQ ID NO: 1642258 - RNA, 22 nt, Human
auguaaaucccauuauucaaag

SEQ ID NO: 1642259 - RNA, 20 nt, Human
auguaaaucccauuauucaa

SEQ ID NO: 1642260 - RNA, 14 nt, Human
auguaaaucccauu

SEQ ID NO: 1642261 - RNA, 17 nt, Human
augguggcuggguugga

SEQ ID NO: 1642262 - RNA, 15 nt, Human
augguggcuggguug

SEQ ID NO: 1642263 - RNA, 13 nt, Human
augguggcugggu

SEQ ID NO: 1642264 - RNA, 12 nt, Human
augguggcuggg

SEQ ID NO: 1642265 - RNA, 15 nt, Human
auggugcaaugaccu

SEQ ID NO: 1642266 - RNA, 13 nt, Human
auggugcaaugac

SEQ ID NO: 1642267 - RNA, 12 nt, Human
auggugcaauga

SEQ ID NO: 1642268 - RNA, 20 nt, Human
augggugcuuggaggaagga

SEQ ID NO: 1642269 - RNA, 20 nt, Human
auggugagggauacccaucc

SEQ ID NO: 1642270 - RNA, 15 nt, Human
augggugcuuggagg

SEQ ID NO: 1642271 - RNA, 14 nt, Human
auggugaugaaaug

SEQ ID NO: 1642272 - RNA, 17 nt, Human
auggugaugaaauguaa

SEQ ID NO: 1642273 - RNA, 16 nt, Human
auggugaugaaaugua

SEQ ID NO: 1642274 - RNA, 17 nt, Human
auggugcaaugaccuuu

SEQ ID NO: 1642275 - RNA, 16 nt, Human
auggugcaaugaccuu

SEQ ID NO: 1642276 - RNA, 19 nt, Human
auggugcaaugaccuuuca

SEQ ID NO: 1642277 - RNA, 18 nt, Human
uuucucccagucauuuaa

SEQ ID NO: 1642278 - RNA, 17 nt, Human
uuucucccagucauuua

SEQ ID NO: 1642279 - RNA, 18 nt, Human
augggcaacccccagccu

SEQ ID NO: 1642280 - RNA, 15 nt, Human
augggauccuggagu

SEQ ID NO: 1642281 - RNA, 20 nt, Human
augggauaaaugccaucaau

SEQ ID NO: 1642282 - RNA, 16 nt, Human
augggauaaaugccau

SEQ ID NO: 1642283 - RNA, 15 nt, Human
augggauaaaugcca

SEQ ID NO: 1642284 - RNA, 19 nt, Human
uuucugcagccacuauugu

SEQ ID NO: 1642285 - RNA, 15 nt, Human
uuucuggcuaugcau

SEQ ID NO: 1642286 - RNA, 16 nt, Human
uuucuggcuaugcauu

SEQ ID NO: 1642287 - RNA, 18 nt, Human
uuucuggcuaugcauuug

SEQ ID NO: 1642288 - RNA, 19 nt, Human
uuucuggcuaugcauuuga

SEQ ID NO: 1642289 - RNA, 21 nt, Human
uuucugcagccacuauuguua

SEQ ID NO: 1642290 - RNA, 23 nt, Human
uuucugggcaccggggccucgga

SEQ ID NO: 1642291 - RNA, 19 nt, Human
uuucuguacuuuuuggcau

SEQ ID NO: 1642292 - RNA, 20 nt, Human
uuucuguacuuuuuggcaua

SEQ ID NO: 1642293 - RNA, 24 nt, Human
auggggcugcaccggcuggccugg

SEQ ID NO: 1642294 - RNA, 14 nt, Human
augggggugcauuu

SEQ ID NO: 1642295 - RNA, 17 nt, Human
augggggcacugaggac

SEQ ID NO: 1642296 - RNA, 15 nt, Human
augggggugcauuug

SEQ ID NO: 1642297 - RNA, 15 nt, Human
uuugaaauauugacu

SEQ ID NO: 1642298 - RNA, 20 nt, Human
augggcuggguucuacccag

SEQ ID NO: 1642299 - RNA, 18 nt, Human
augggccuccugugugug

SEQ ID NO: 1642300 - RNA, 20 nt, Human
auucacauuguauucagagu

SEQ ID NO: 1642301 - RNA, 13 nt, Human
auucacauuguau

SEQ ID NO: 1642302 - RNA, 11 nt, Human
auucagacagc

SEQ ID NO: 1642303 - RNA, 13 nt, Human
auucagacagcug

SEQ ID NO: 1642304 - RNA, 12 nt, Human
auucagacagcu

SEQ ID NO: 1642305 - RNA, 17 nt, Human
auucagacagcugccug

SEQ ID NO: 1642306 - RNA, 16 nt, Human
auucagacagcugccu

SEQ ID NO: 1642307 - RNA, 15 nt, Human
auucagacagcugcc

SEQ ID NO: 1642308 - RNA, 14 nt, Human
auucagacagcugc

SEQ ID NO: 1642309 - RNA, 12 nt, Human
auucaggaagcu

SEQ ID NO: 1642310 - RNA, 22 nt, Human
auucaggaagcagcuuucccca

SEQ ID NO: 1642311 - RNA, 18 nt, Human
auucagacagcugccugg

SEQ ID NO: 1642312 - RNA, 22 nt, Human
auuccccacccugaaagcccug

SEQ ID NO: 1642313 - RNA, 23 nt, Human
auuccccgucucugguuccuccc

SEQ ID NO: 1642314 - RNA, 13 nt, Human
auucaggaagcuc

SEQ ID NO: 1642315 - RNA, 19 nt, Human
auuccagagaguggcuccu

SEQ ID NO: 1642316 - RNA, 21 nt, Human
auuccagagaguggcuccucc

SEQ ID NO: 1642317 - RNA, 18 nt, Human
auucaaacagucucagga

SEQ ID NO: 1642318 - RNA, 16 nt, Human
auucaaacagucucag

SEQ ID NO: 1642319 - RNA, 20 nt, Human
auucaaacagucucaggaaa

SEQ ID NO: 1642320 - RNA, 19 nt, Human
auucaaacagucucaggaa

SEQ ID NO: 1642321 - RNA, 13 nt, Human
auuauucaaaguu

SEQ ID NO: 1642322 - RNA, 15 nt, Human
auuauucaaaguugc

SEQ ID NO: 1642323 - RNA, 14 nt, Human
auuauucaaaguug

SEQ ID NO: 1642324 - RNA, 17 nt, Human
auuauucaaaguugccu

SEQ ID NO: 1642325 - RNA, 21 nt, Human
auuauguuaaaacugggacag

SEQ ID NO: 1642326 - RNA, 14 nt, Human
auuaucuagauacu

SEQ ID NO: 1642327 - RNA, 18 nt, Human
auuaucuagauacuguau

SEQ ID NO: 1642328 - RNA, 18 nt, Human
auuauauuuauuacugua

SEQ ID NO: 1642329 - RNA, 15 nt, Human
auuauauuuauuacu

SEQ ID NO: 1642330 - RNA, 15 nt, Human
auuauuauuuggccc

SEQ ID NO: 1642331 - RNA, 15 nt, Human
auuauauuuacaaau

SEQ ID NO: 1642332 - RNA, 14 nt, Human
auuauauuaugaag

SEQ ID NO: 1642333 - RNA, 19 nt, Human
auuauacccccugcaaagc

SEQ ID NO: 1642334 - RNA, 11 nt, Human
uuuguggaaaa

SEQ ID NO: 1642335 - RNA, 19 nt, Human
auucagacagcugccuggg

SEQ ID NO: 1642336 - RNA, 15 nt, Human
auucuagcuuugagc

SEQ ID NO: 1642337 - RNA, 17 nt, Human
auucucauuugucacac

SEQ ID NO: 1642338 - RNA, 22 nt, Human
auucucaugccucagccuccug

SEQ ID NO: 1642339 - RNA, 19 nt, Human
auucugccugcccaggccc

SEQ ID NO: 1642340 - RNA, 18 nt, Human
auucugccugcccaggcc

SEQ ID NO: 1642341 - RNA, 17 nt, Human
auucugccugcccaggc

SEQ ID NO: 1642342 - RNA, 16 nt, Human
auucugccugcccagg

SEQ ID NO: 1642343 - RNA, 15 nt, Human
auucugccugcccag

SEQ ID NO: 1642344 - RNA, 14 nt, Human
auucugccugccca

SEQ ID NO: 1642345 - RNA, 13 nt, Human
auucugccugccc

SEQ ID NO: 1642346 - RNA, 11 nt, Human
auucugccugc

SEQ ID NO: 1642347 - RNA, 22 nt, Human
auucugcucacauaucugucau

SEQ ID NO: 1642348 - RNA, 21 nt, Human
auucugcucacauaucuguca

SEQ ID NO: 1642349 - RNA, 20 nt, Human
auucugcucacauaucuguc

SEQ ID NO: 1642350 - RNA, 19 nt, Human
auucugcucacauaucugu

SEQ ID NO: 1642351 - RNA, 21 nt, Human
auucugccugcccaggccccu

SEQ ID NO: 1642352 - RNA, 20 nt, Human
auucugccugcccaggcccc

SEQ ID NO: 1642353 - RNA, 18 nt, Human
auucugcucacauaucug

SEQ ID NO: 1642354 - RNA, 21 nt, Human
auucuguuggccagugugaca

SEQ ID NO: 1642355 - RNA, 19 nt, Human
auucuguuggccaguguga

SEQ ID NO: 1642356 - RNA, 14 nt, Human
auucuguuggccag

SEQ ID NO: 1642357 - RNA, 13 nt, Human
auucuguauagau

SEQ ID NO: 1642358 - RNA, 12 nt, Human
auucuguauaga

SEQ ID NO: 1642359 - RNA, 11 nt, Human
auucuguauag

SEQ ID NO: 1642360 - RNA, 19 nt, Human
auugacacuuaaaaauggu

SEQ ID NO: 1642361 - RNA, 11 nt, Human
auugacuucuu

SEQ ID NO: 1642362 - RNA, 17 nt, Human
auugacacuuaaaaaug

SEQ ID NO: 1642363 - RNA, 15 nt, Human
auugacacuuaaaaa

SEQ ID NO: 1642364 - RNA, 18 nt, Human
auugaaaucuuuuugcuu

SEQ ID NO: 1642365 - RNA, 17 nt, Human
auugaaaucuuuuugcu

SEQ ID NO: 1642366 - RNA, 20 nt, Human
auugaaaucuuuuugcuuug

SEQ ID NO: 1642367 - RNA, 15 nt, Human
auugaaaaaccauuu

SEQ ID NO: 1642368 - RNA, 14 nt, Human
auucuuaaauaugu

SEQ ID NO: 1642369 - RNA, 20 nt, Human
auucuuaaaguugaauuuau

SEQ ID NO: 1642370 - RNA, 19 nt, Human
auucuuaaaguugaauuua

SEQ ID NO: 1642371 - RNA, 15 nt, Human
auucuguauagauua

SEQ ID NO: 1642372 - RNA, 21 nt, Human
auucuuaaaguugaauuuauu

SEQ ID NO: 1642373 - RNA, 13 nt, Human
auucuuccucccu

SEQ ID NO: 1642374 - RNA, 19 nt, Human
auuuuuguagagccagggu

SEQ ID NO: 1642375 - RNA, 12 nt, Human
auuuuuguaauu

SEQ ID NO: 1642376 - RNA, 22 nt, Human
auuuuugugauuuugugauuga

SEQ ID NO: 1642377 - RNA, 21 nt, Human
auuuuuguuuucauuaucuca

SEQ ID NO: 1642378 - RNA, 13 nt, Human
auuuuuuaaaugc

SEQ ID NO: 1642379 - RNA, 14 nt, Human
auuuuuuaaaugca

SEQ ID NO: 1642380 - RNA, 18 nt, Human
auuuuuuaaauugaauuc

SEQ ID NO: 1642381 - RNA, 18 nt, Human
auuuuuuguuaaaugauu

SEQ ID NO: 1642382 - RNA, 23 nt, Human
auuuuuucucuaggaaauauuua

SEQ ID NO: 1642383 - RNA, 20 nt, Human
auuuuuucucuaggaaauau

SEQ ID NO: 1642384 - RNA, 19 nt, Human
auuuuuuacagcugccugc

SEQ ID NO: 1642385 - RNA, 20 nt, Human
auuuuucuuauuucauuucu

SEQ ID NO: 1642386 - RNA, 19 nt, Human
auuuuucuuauuucauuuc

SEQ ID NO: 1642387 - RNA, 15 nt, Human
auuuuucuuauuuca

SEQ ID NO: 1642388 - RNA, 22 nt, Human
auuuuucuuagggaaggauaca

SEQ ID NO: 1642389 - RNA, 21 nt, Human
auuuuucuuagggaaggauac

SEQ ID NO: 1642390 - RNA, 21 nt, Human
auuuuguuuuugucuuaaaaa

SEQ ID NO: 1642391 - RNA, 15 nt, Human
auuuuguuucuguac

SEQ ID NO: 1642392 - RNA, 14 nt, Human
auuuuguuucugua

SEQ ID NO: 1642393 - RNA, 17 nt, Human
auuuuguguuuaggaac

SEQ ID NO: 1642394 - RNA, 16 nt, Human
auuuuguuucagugca

SEQ ID NO: 1642395 - RNA, 11 nt, Human
auuuuguuucu

SEQ ID NO: 1642396 - RNA, 23 nt, Human
auuuugucauauaagauucauau

SEQ ID NO: 1642397 - RNA, 19 nt, Human
auuuugugcccccauguaa

SEQ ID NO: 1642398 - RNA, 19 nt, Human
auuuuggaaaauaaauuau

SEQ ID NO: 1642399 - RNA, 14 nt, Human
auuuuggaaaauaa

SEQ ID NO: 1642400 - RNA, 20 nt, Human
auuuuggaaaauaaauuauu

SEQ ID NO: 1642401 - RNA, 12 nt, Human
auuuuggaauuu

SEQ ID NO: 1642402 - RNA, 12 nt, Human
auuuugcuuugu

SEQ ID NO: 1642403 - RNA, 18 nt, Human
auuuugcuuugugauuuu

SEQ ID NO: 1642404 - RNA, 20 nt, Human
auuuugcuuugugauuuuug

SEQ ID NO: 1642405 - RNA, 14 nt, Human
auuuuccugaaaac

SEQ ID NO: 1642406 - RNA, 19 nt, Human
auuuucccuauuagagaag

SEQ ID NO: 1642407 - RNA, 16 nt, Human
auuuuccugccaggca

SEQ ID NO: 1642408 - RNA, 14 nt, Human
auuuucuauaauuu

SEQ ID NO: 1642409 - RNA, 15 nt, Human
auuuucuauaauuua

SEQ ID NO: 1642410 - RNA, 12 nt, Human
auuuuaauaaug

SEQ ID NO: 1642411 - RNA, 17 nt, Human
auuuuaauaaacacucu

SEQ ID NO: 1642412 - RNA, 16 nt, Human
auuuuaauaaacacuc

SEQ ID NO: 1642413 - RNA, 15 nt, Human
auuuuaauaaacacu

SEQ ID NO: 1642414 - RNA, 15 nt, Human
auuuugauguuuuaa

SEQ ID NO: 1642415 - RNA, 17 nt, Human
auuuugauguuuuaagg

SEQ ID NO: 1642416 - RNA, 19 nt, Human
auuuugauccaagcugguc

SEQ ID NO: 1642417 - RNA, 20 nt, Human
auuuugcuaaaugugaauga

SEQ ID NO: 1642418 - RNA, 21 nt, Human
auuuugcugucccuuuuccuu

SEQ ID NO: 1642419 - RNA, 18 nt, Human
auuuugccagugggaacu

SEQ ID NO: 1642420 - RNA, 21 nt, Human
auugauuuccguuaaaauacc

SEQ ID NO: 1642421 - RNA, 18 nt, Human
auugacuuuuuauggcac

SEQ ID NO: 1642422 - RNA, 13 nt, Human
auugacuuuuuau

SEQ ID NO: 1642423 - RNA, 19 nt, Human
auuggagcucgugggacag

SEQ ID NO: 1642424 - RNA, 19 nt, Human
auuggacaguaaaauccac

SEQ ID NO: 1642425 - RNA, 18 nt, Human
auugguaaagaauggaag

SEQ ID NO: 1642426 - RNA, 20 nt, Human
auuggcuuuucugauccagu

SEQ ID NO: 1642427 - RNA, 19 nt, Human
auuggcuuuucugauccag

SEQ ID NO: 1642428 - RNA, 16 nt, Human
auuggcuuuucugauc

SEQ ID NO: 1642429 - RNA, 15 nt, Human
auuggcuuuucugau

SEQ ID NO: 1642430 - RNA, 13 nt, Human
auuggcuuuucug

SEQ ID NO: 1642431 - RNA, 16 nt, Human
auugucaaagugguga

SEQ ID NO: 1642432 - RNA, 23 nt, Human
auugucaaaguggugagaggcau

SEQ ID NO: 1642433 - RNA, 13 nt, Human
auugucuagugaa

SEQ ID NO: 1642434 - RNA, 13 nt, Human
auugugggaaggg

SEQ ID NO: 1642435 - RNA, 14 nt, Human
auugugggaagggg

SEQ ID NO: 1642436 - RNA, 14 nt, Human
auuuaaaagauaca

SEQ ID NO: 1642437 - RNA, 16 nt, Human
auuuaaaagauacagu

SEQ ID NO: 1642438 - RNA, 17 nt, Human
auuuaaaagauacaguu

SEQ ID NO: 1642439 - RNA, 21 nt, Human
auuguuuggggaugagaaagg

SEQ ID NO: 1642440 - RNA, 14 nt, Human
auuuauuuuaauaa

SEQ ID NO: 1642441 - RNA, 14 nt, Human
auuuauuuaaauuu

SEQ ID NO: 1642442 - RNA, 12 nt, Human
auuuauuuaaau

SEQ ID NO: 1642443 - RNA, 19 nt, Human
auuucccaaagcagugcau

SEQ ID NO: 1642444 - RNA, 20 nt, Human
auuucuugagguaaaagcau

SEQ ID NO: 1642445 - RNA, 16 nt, Human
auuugaaaauuuugau

SEQ ID NO: 1642446 - RNA, 18 nt, Human
auuugaaacacuuugcau

SEQ ID NO: 1642447 - RNA, 21 nt, Human
auuugacauagucuggcugua

SEQ ID NO: 1642448 - RNA, 17 nt, Human
auuugacauagucuggc

SEQ ID NO: 1642449 - RNA, 16 nt, Human
auuugacauagucugg

SEQ ID NO: 1642450 - RNA, 23 nt, Human
auuucuuccacaagagcccaggc

SEQ ID NO: 1642451 - RNA, 20 nt, Human
auuucuuccacaagagccca

SEQ ID NO: 1642452 - RNA, 23 nt, Human
auuucuaggacugaauuaugaaa

SEQ ID NO: 1642453 - RNA, 20 nt, Human
auuucuaggacugaauuaug

SEQ ID NO: 1642454 - RNA, 18 nt, Human
auuucuaggacugaauua

SEQ ID NO: 1642455 - RNA, 17 nt, Human
auuucuaggacugaauu

SEQ ID NO: 1642456 - RNA, 16 nt, Human
auuuuaaaagaaugau

SEQ ID NO: 1642457 - RNA, 22 nt, Human
auuuuaaaaauacagauagaua

SEQ ID NO: 1642458 - RNA, 23 nt, Human
auuugugaagguggaaauaaacu

SEQ ID NO: 1642459 - RNA, 23 nt, Human
auuugugaaaugauggugaaagu

SEQ ID NO: 1642460 - RNA, 21 nt, Human
auuugugaagguggaaauaaa

SEQ ID NO: 1642461 - RNA, 18 nt, Human
auuugugaagguggaaau

SEQ ID NO: 1642462 - RNA, 23 nt, Human
auuuuaaaagaaugauuaugaau

SEQ ID NO: 1642463 - RNA, 15 nt, Human
auuuguauaaaauaa

SEQ ID NO: 1642464 - RNA, 14 nt, Human
auuuguauaaaaua

SEQ ID NO: 1642465 - RNA, 22 nt, Human
auuuguaguguuggagaagaac

SEQ ID NO: 1642466 - RNA, 22 nt, Human
cacagcaguugaaaagacucca

SEQ ID NO: 1642467 - RNA, 18 nt, Human
cacagaugggugcuugga

SEQ ID NO: 1642468 - RNA, 14 nt, Human
cacagaugggugcu

SEQ ID NO: 1642469 - RNA, 20 nt, Human
cacagaguuguuacauuuuu

SEQ ID NO: 1642470 - RNA, 21 nt, Human
cacagaguuguuacauuuuua

SEQ ID NO: 1642471 - RNA, 20 nt, Human
cacagaugggugcuuggagg

SEQ ID NO: 1642472 - RNA, 20 nt, Human
cacagcacgggggccaagga

SEQ ID NO: 1642473 - RNA, 16 nt, Human
cacagcagccccugca

SEQ ID NO: 1642474 - RNA, 23 nt, Human
cacagaugggugcuuggaggaag

SEQ ID NO: 1642475 - RNA, 17 nt, Human
cacauacacacacacgc

SEQ ID NO: 1642476 - RNA, 14 nt, Human
cacaguuuucugag

SEQ ID NO: 1642477 - RNA, 15 nt, Human
cacaguuuucugaga

SEQ ID NO: 1642478 - RNA, 22 nt, Human
cacauaauucaggaagcagcuu

SEQ ID NO: 1642479 - RNA, 23 nt, Human
cacaggcccggcuccaggcuccu

SEQ ID NO: 1642480 - RNA, 20 nt, Human
cacaggcccggcuccaggcu

SEQ ID NO: 1642481 - RNA, 18 nt, Human
cacagugagucgaggaca

SEQ ID NO: 1642482 - RNA, 15 nt, Human
cacaggcccuuccuc

SEQ ID NO: 1642483 - RNA, 20 nt, Human
cacagugagucgaggacagg

SEQ ID NO: 1642484 - RNA, 19 nt, Human
cacagugagucgaggacag

SEQ ID NO: 1642485 - RNA, 15 nt, Human
cacaggaaguagagg

SEQ ID NO: 1642486 - RNA, 20 nt, Human
cacaggaaccacaagacugc

SEQ ID NO: 1642487 - RNA, 19 nt, Human
cacaggaaccacaagacug

SEQ ID NO: 1642488 - RNA, 16 nt, Human
cacaggaucagucuga

SEQ ID NO: 1642489 - RNA, 15 nt, Human
cacaggaucagucug

SEQ ID NO: 1642490 - RNA, 12 nt, Human
cacaggaucagu

SEQ ID NO: 1642491 - RNA, 19 nt, Human
cacaggcccggcuccaggc

SEQ ID NO: 1642492 - RNA, 18 nt, Human
cacaggcccggcuccagg

SEQ ID NO: 1642493 - RNA, 17 nt, Human
cacaggcccggcuccag

SEQ ID NO: 1642494 - RNA, 16 nt, Human
cacaggcccggcucca

SEQ ID NO: 1642495 - RNA, 10 nt, Human
cacaggcagg

SEQ ID NO: 1642496 - RNA, 17 nt, Human
cacaggaucagucugau

SEQ ID NO: 1642497 - RNA, 21 nt, Human
cacagugagucgaggacaggg

SEQ ID NO: 1642498 - RNA, 19 nt, Human
caccacuacauucuguuaa

SEQ ID NO: 1642499 - RNA, 20 nt, Human
caccacuacauucuguuaau

SEQ ID NO: 1642500 - RNA, 14 nt, Human
caccaccucuuugg

SEQ ID NO: 1642501 - RNA, 16 nt, Human
caccacuacauucugu

SEQ ID NO: 1642502 - RNA, 17 nt, Human
caccacuacauucuguu

SEQ ID NO: 1642503 - RNA, 18 nt, Human
caccacuacauucuguua

SEQ ID NO: 1642504 - RNA, 18 nt, Human
caccacaugugcacaugc

SEQ ID NO: 1642505 - RNA, 15 nt, Human
caccacaugugcaca

SEQ ID NO: 1642506 - RNA, 19 nt, Human
caccacaugugcacaugca

SEQ ID NO: 1642507 - RNA, 17 nt, Human
caccacacccagcccac

SEQ ID NO: 1642508 - RNA, 15 nt, Human
caccacacccagccc

SEQ ID NO: 1642509 - RNA, 13 nt, Human
caccacacccagc

SEQ ID NO: 1642510 - RNA, 17 nt, Human
cacauuggaaacaaguc

SEQ ID NO: 1642511 - RNA, 18 nt, Human
cacauuggagauguuuag

SEQ ID NO: 1642512 - RNA, 20 nt, Human
cacauugguguuguacucaa

SEQ ID NO: 1642513 - RNA, 18 nt, Human
cacaugccucucucaggc

SEQ ID NO: 1642514 - RNA, 17 nt, Human
cacaugccucucucagg

SEQ ID NO: 1642515 - RNA, 13 nt, Human
cacaugccucucu

SEQ ID NO: 1642516 - RNA, 19 nt, Human
cacaucagcacgauuucug

SEQ ID NO: 1642517 - RNA, 14 nt, Human
cacauaucugucau

SEQ ID NO: 1642518 - RNA, 12 nt, Human
cacauaucuguc

SEQ ID NO: 1642519 - RNA, 18 nt, Human
cacaucagcacgauuucu

SEQ ID NO: 1642520 - RNA, 19 nt, Human
cacaugccucucucaggcc

SEQ ID NO: 1642521 - RNA, 15 nt, Human
cacaugugcacaugc

SEQ ID NO: 1642522 - RNA, 14 nt, Human
cacaugugcacaug

SEQ ID NO: 1642523 - RNA, 17 nt, Human
cacaugugcacaugcac

SEQ ID NO: 1642524 - RNA, 13 nt, Human
cacauguggacuu

SEQ ID NO: 1642525 - RNA, 16 nt, Human
cacauuccugaugcuu

SEQ ID NO: 1642526 - RNA, 16 nt, Human
cacauuccugaacagg

SEQ ID NO: 1642527 - RNA, 13 nt, Human
cacaacuauauug

SEQ ID NO: 1642528 - RNA, 14 nt, Human
cacacaccagagcc

SEQ ID NO: 1642529 - RNA, 12 nt, Human
cacacagcucug

SEQ ID NO: 1642530 - RNA, 21 nt, Human
cacacagaggcugccucuccc

SEQ ID NO: 1642531 - RNA, 19 nt, Human
cacacagaggcugccucuc

SEQ ID NO: 1642532 - RNA, 17 nt, Human
cacaccgggcacucaga

SEQ ID NO: 1642533 - RNA, 14 nt, Human
cacacccuguuuua

SEQ ID NO: 1642534 - RNA, 13 nt, Human
cacaccagagccc

SEQ ID NO: 1642535 - RNA, 12 nt, Human
cacaccagagcc

SEQ ID NO: 1642536 - RNA, 15 nt, Human
cacaccagagcccac

SEQ ID NO: 1642537 - RNA, 13 nt, Human
cacacccagccca

SEQ ID NO: 1642538 - RNA, 19 nt, Human
cacacucaaaucaagaaac

SEQ ID NO: 1642539 - RNA, 17 nt, Human
cacacuucaggcucuuc

SEQ ID NO: 1642540 - RNA, 14 nt, Human
cacacuucaggcuc

SEQ ID NO: 1642541 - RNA, 22 nt, Human
cacacuucaggcucuucuccuu

SEQ ID NO: 1642542 - RNA, 21 nt, Human
cacacuucaggcucuucuccu

SEQ ID NO: 1642543 - RNA, 20 nt, Human
cacacuucaggcucuucucc

SEQ ID NO: 1642544 - RNA, 18 nt, Human
cacacuucaggcucuucu

SEQ ID NO: 1642545 - RNA, 16 nt, Human
cacagaguuguuacau

SEQ ID NO: 1642546 - RNA, 17 nt, Human
cacagaguuguuacauu

SEQ ID NO: 1642547 - RNA, 12 nt, Human
cacagagaaagu

SEQ ID NO: 1642548 - RNA, 21 nt, Human
cacacuugacaucaacugcau

SEQ ID NO: 1642549 - RNA, 11 nt, Human
cacaacagauu

SEQ ID NO: 1642550 - RNA, 21 nt, Human
cacaaauucugucucuggauu

SEQ ID NO: 1642551 - RNA, 22 nt, Human
cacaacacacagauuugagcuc

SEQ ID NO: 1642552 - RNA, 23 nt, Human
cacaaccuucuguggcucacaga

SEQ ID NO: 1642553 - RNA, 19 nt, Human
cacaaccuucuguggcuca

SEQ ID NO: 1642554 - RNA, 18 nt, Human
cacaaccuucuguggcuc

SEQ ID NO: 1642555 - RNA, 17 nt, Human
cacaaccuucuguggcu

SEQ ID NO: 1642556 - RNA, 18 nt, Human
cacaaaaguuucucuuuu

SEQ ID NO: 1642557 - RNA, 16 nt, Human
cacaaaaguuucucuu

SEQ ID NO: 1642558 - RNA, 22 nt, Human
caaugaaugaaugaauggcuaa

SEQ ID NO: 1642559 - RNA, 13 nt, Human
caaugaccuuuca

SEQ ID NO: 1642560 - RNA, 18 nt, Human
caaugcaaaccaucauug

SEQ ID NO: 1642561 - RNA, 17 nt, Human
caaugcaaaccaucauu

SEQ ID NO: 1642562 - RNA, 20 nt, Human
caaugcaaaccaucauugaa

SEQ ID NO: 1642563 - RNA, 19 nt, Human
caaugcaaaccaucauuga

SEQ ID NO: 1642564 - RNA, 23 nt, Human
caaugcacuuuguucuggcucuu

SEQ ID NO: 1642565 - RNA, 20 nt, Human
caauaggaaaaacugauuuu

SEQ ID NO: 1642566 - RNA, 21 nt, Human
caauaggaaaaacugauuuuu

SEQ ID NO: 1642567 - RNA, 19 nt, Human
caaugugaaaagaaaaaug

SEQ ID NO: 1642568 - RNA, 12 nt, Human
caacuuuguaua

SEQ ID NO: 1642569 - RNA, 11 nt, Human
caacuuuguau

SEQ ID NO: 1642570 - RNA, 20 nt, Human
caacucuccuccagagucag

SEQ ID NO: 1642571 - RNA, 21 nt, Human
caacucugaaggguaauuaua

SEQ ID NO: 1642572 - RNA, 15 nt, Human
caacccucaucacca

SEQ ID NO: 1642573 - RNA, 12 nt, Human
caacccucauca

SEQ ID NO: 1642574 - RNA, 16 nt, Human
caaccugauugugucu

SEQ ID NO: 1642575 - RNA, 19 nt, Human
caacucuccuccagaguca

SEQ ID NO: 1642576 - RNA, 18 nt, Human
caacgcagcccugcuuug

SEQ ID NO: 1642577 - RNA, 15 nt, Human
caacgcagcccugcu

SEQ ID NO: 1642578 - RNA, 13 nt, Human
caacgcagcccug

SEQ ID NO: 1642579 - RNA, 12 nt, Human
caacgcagcccu

SEQ ID NO: 1642580 - RNA, 15 nt, Human
caaauuuacagagac

SEQ ID NO: 1642581 - RNA, 23 nt, Human
caacaggcugggcuucaguggca

SEQ ID NO: 1642582 - RNA, 16 nt, Human
caaauuuacagagaca

SEQ ID NO: 1642583 - RNA, 24 nt, Human
caacaggcugggcuucaguggcag

SEQ ID NO: 1642584 - RNA, 14 nt, Human
caaauuuacagaga

SEQ ID NO: 1642585 - RNA, 18 nt, Human
caaauucugucucuggau

SEQ ID NO: 1642586 - RNA, 15 nt, Human
caaauucugucucug

SEQ ID NO: 1642587 - RNA, 15 nt, Human
caacagguuuuccug

SEQ ID NO: 1642588 - RNA, 18 nt, Human
caacaggguuuuuuucca

SEQ ID NO: 1642589 - RNA, 19 nt, Human
caacagguuuuccugaaga

SEQ ID NO: 1642590 - RNA, 22 nt, Human
caacaucuuggucagauuugaa

SEQ ID NO: 1642591 - RNA, 19 nt, Human
caaccccuucgcuccugug

SEQ ID NO: 1642592 - RNA, 18 nt, Human
caaccccuucgcuccugu

SEQ ID NO: 1642593 - RNA, 21 nt, Human
caaccccuucgcuccuguguc

SEQ ID NO: 1642594 - RNA, 22 nt, Human
caaccccuucgcuccugugucu

SEQ ID NO: 1642595 - RNA, 21 nt, Human
caacccucagagccaccccua

SEQ ID NO: 1642596 - RNA, 22 nt, Human
caagccaccaacauacucccau

SEQ ID NO: 1642597 - RNA, 17 nt, Human
caagcacuaaacaaaga

SEQ ID NO: 1642598 - RNA, 16 nt, Human
caagcgugagccacug

SEQ ID NO: 1642599 - RNA, 17 nt, Human
caagccguggcuucccg

SEQ ID NO: 1642600 - RNA, 16 nt, Human
caagccguggcuuccc

SEQ ID NO: 1642601 - RNA, 15 nt, Human
caagccguggcuucc

SEQ ID NO: 1642602 - RNA, 14 nt, Human
caagccguggcuuc

SEQ ID NO: 1642603 - RNA, 21 nt, Human
caagccaccaacauacuccca

SEQ ID NO: 1642604 - RNA, 18 nt, Human
caagcgugagccacugca

SEQ ID NO: 1642605 - RNA, 17 nt, Human
caagcgugagccacugc

SEQ ID NO: 1642606 - RNA, 21 nt, Human
caaggaugaucuaggaagacu

SEQ ID NO: 1642607 - RNA, 19 nt, Human
caaggaugccccguccccc

SEQ ID NO: 1642608 - RNA, 13 nt, Human
caaggauccugag

SEQ ID NO: 1642609 - RNA, 14 nt, Human
caaggacuaggguc

SEQ ID NO: 1642610 - RNA, 23 nt, Human
caaggugggaggauugcuugagc

SEQ ID NO: 1642611 - RNA, 12 nt, Human
caaggugggagg

SEQ ID NO: 1642612 - RNA, 19 nt, Human
caagggccuggccugagcu

SEQ ID NO: 1642613 - RNA, 19 nt, Human
caaggauugcuacuguccu

SEQ ID NO: 1642614 - RNA, 15 nt, Human
caaggauugcuacug

SEQ ID NO: 1642615 - RNA, 17 nt, Human
caagugauucuccugcc

SEQ ID NO: 1642616 - RNA, 16 nt, Human
caagugauucuccugc

SEQ ID NO: 1642617 - RNA, 19 nt, Human
caagugaaaaaggaggaag

SEQ ID NO: 1642618 - RNA, 22 nt, Human
caagugauucucaugccucagc

SEQ ID NO: 1642619 - RNA, 22 nt, Human
caagugugguagagugugccug

SEQ ID NO: 1642620 - RNA, 22 nt, Human
caagugauucuccugccucagc

SEQ ID NO: 1642621 - RNA, 18 nt, Human
caagugauucuccugccu

SEQ ID NO: 1642622 - RNA, 18 nt, Human
auuuuuuuacuaauagac

SEQ ID NO: 1642623 - RNA, 18 nt, Human
caaagcuaggccuggcca

SEQ ID NO: 1642624 - RNA, 17 nt, Human
caaagcuaggccuggcc

SEQ ID NO: 1642625 - RNA, 16 nt, Human
caaagcuaggccuggc

SEQ ID NO: 1642626 - RNA, 22 nt, Human
caaagccaaagcuaggccuggc

SEQ ID NO: 1642627 - RNA, 21 nt, Human
caaagccaaagcuaggccugg

SEQ ID NO: 1642628 - RNA, 20 nt, Human
caaagccaaagcuaggccug

SEQ ID NO: 1642629 - RNA, 16 nt, Human
caaagcuuguuaagau

SEQ ID NO: 1642630 - RNA, 21 nt, Human
caaauguucaucaaugaauga

SEQ ID NO: 1642631 - RNA, 14 nt, Human
caaauguggcuccu

SEQ ID NO: 1642632 - RNA, 22 nt, Human
caaauucugcuugcuugcuuuu

SEQ ID NO: 1642633 - RNA, 17 nt, Human
caaauaugcaaagcacu

SEQ ID NO: 1642634 - RNA, 16 nt, Human
caaauaugcaaagcac

SEQ ID NO: 1642635 - RNA, 18 nt, Human
caaauaugcaaagcacug

SEQ ID NO: 1642636 - RNA, 16 nt, Human
caaaucagcugcuacu

SEQ ID NO: 1642637 - RNA, 18 nt, Human
caaaugucuuccuggauu

SEQ ID NO: 1642638 - RNA, 15 nt, Human
caaaugucuuccugg

SEQ ID NO: 1642639 - RNA, 13 nt, Human
caaaucagcugcu

SEQ ID NO: 1642640 - RNA, 21 nt, Human
caaaggaugcccaaagaugca

SEQ ID NO: 1642641 - RNA, 19 nt, Human
caaaguugccuaaauccau

SEQ ID NO: 1642642 - RNA, 12 nt, Human
caaauauauuca

SEQ ID NO: 1642643 - RNA, 22 nt, Human
cacccccacccaagggccuggc

SEQ ID NO: 1642644 - RNA, 17 nt, Human
caccccggccaccugcg

SEQ ID NO: 1642645 - RNA, 16 nt, Human
caccccggccaccugc

SEQ ID NO: 1642646 - RNA, 15 nt, Human
caccccggccaccug

SEQ ID NO: 1642647 - RNA, 14 nt, Human
caccccggccaccu

SEQ ID NO: 1642648 - RNA, 14 nt, Human
caccccuaaagaga

SEQ ID NO: 1642649 - RNA, 13 nt, Human
caccccagcccca

SEQ ID NO: 1642650 - RNA, 16 nt, Human
cacccaccucagccuc

SEQ ID NO: 1642651 - RNA, 14 nt, Human
cacccaccucagcc

SEQ ID NO: 1642652 - RNA, 13 nt, Human
cacccaccucagc

SEQ ID NO: 1642653 - RNA, 12 nt, Human
cacccaccucag

SEQ ID NO: 1642654 - RNA, 22 nt, Human
cacccaccaucaugucuggcua

SEQ ID NO: 1642655 - RNA, 20 nt, Human
cacccaccaucaugucuggc

SEQ ID NO: 1642656 - RNA, 15 nt, Human
cacccacccuuuuuu

SEQ ID NO: 1642657 - RNA, 18 nt, Human
cacccaagggccuggccu

SEQ ID NO: 1642658 - RNA, 17 nt, Human
cacccaagggccuggcc

SEQ ID NO: 1642659 - RNA, 16 nt, Human
cacccaagggccuggc

SEQ ID NO: 1642660 - RNA, 23 nt, Human
cacccaagggccuggccugagcu

SEQ ID NO: 1642661 - RNA, 21 nt, Human
cacccaagggccuggccugag

SEQ ID NO: 1642662 - RNA, 20 nt, Human
cacccaagggccuggccuga

SEQ ID NO: 1642663 - RNA, 19 nt, Human
cacccaagggccuggccug

SEQ ID NO: 1642664 - RNA, 15 nt, Human
caccccuaaagagau

SEQ ID NO: 1642665 - RNA, 23 nt, Human
ccaguaaaugggggugcauuuga

SEQ ID NO: 1642666 - RNA, 13 nt, Human
ccagugaggcucu

SEQ ID NO: 1642667 - RNA, 13 nt, Human
ccaggugccaguu

SEQ ID NO: 1642668 - RNA, 12 nt, Human
ccaggugccagu

SEQ ID NO: 1642669 - RNA, 21 nt, Human
ccagguggccacuccagaccc

SEQ ID NO: 1642670 - RNA, 16 nt, Human
ccagguggccacucca

SEQ ID NO: 1642671 - RNA, 16 nt, Human
ccagguuucuaugugu

SEQ ID NO: 1642672 - RNA, 13 nt, Human
ccagguuuaagcu

SEQ ID NO: 1642673 - RNA, 20 nt, Human
ccaguaaaugggggugcauu

SEQ ID NO: 1642674 - RNA, 21 nt, Human
ccaguaaaugggggugcauuu

SEQ ID NO: 1642675 - RNA, 22 nt, Human
ccaguaaaugggggugcauuug

SEQ ID NO: 1642676 - RNA, 18 nt, Human
ccauccugaggcuccacu

SEQ ID NO: 1642677 - RNA, 17 nt, Human
ccaucauugaaaucuuu

SEQ ID NO: 1642678 - RNA, 16 nt, Human
ccaucauugaaaucuu

SEQ ID NO: 1642679 - RNA, 14 nt, Human
ccaucauugaaauc

SEQ ID NO: 1642680 - RNA, 20 nt, Human
ccauccugaggcuccacuug

SEQ ID NO: 1642681 - RNA, 15 nt, Human
ccaucucuccuccuu

SEQ ID NO: 1642682 - RNA, 17 nt, Human
ccaucucaccuccugcu

SEQ ID NO: 1642683 - RNA, 21 nt, Human
ccaucucacacaugagcauca

SEQ ID NO: 1642684 - RNA, 20 nt, Human
ccaucucacacaugagcauc

SEQ ID NO: 1642685 - RNA, 18 nt, Human
ccaucucacacaugagca

SEQ ID NO: 1642686 - RNA, 17 nt, Human
ccaucucacacaugagc

SEQ ID NO: 1642687 - RNA, 15 nt, Human
ccaucucacacauga

SEQ ID NO: 1642688 - RNA, 14 nt, Human
ccaucucacacaug

SEQ ID NO: 1642689 - RNA, 23 nt, Human
ccagugugacaaggauugcuacu

SEQ ID NO: 1642690 - RNA, 14 nt, Human
ccagugugacaagg

SEQ ID NO: 1642691 - RNA, 13 nt, Human
ccauaugccuggg

SEQ ID NO: 1642692 - RNA, 15 nt, Human
ccauaugccugggca

SEQ ID NO: 1642693 - RNA, 12 nt, Human
ccaucauugaaa

SEQ ID NO: 1642694 - RNA, 13 nt, Human
ccaucaugucugg

SEQ ID NO: 1642695 - RNA, 12 nt, Human
ccaucaugucug

SEQ ID NO: 1642696 - RNA, 14 nt, Human
ccaucaagccacca

SEQ ID NO: 1642697 - RNA, 13 nt, Human
ccaucaagccacc

SEQ ID NO: 1642698 - RNA, 16 nt, Human
ccaucaagccaccaac

SEQ ID NO: 1642699 - RNA, 19 nt, Human
ccauauuaccacagacaua

SEQ ID NO: 1642700 - RNA, 18 nt, Human
ccaucucaccuccugcug

SEQ ID NO: 1642701 - RNA, 20 nt, Human
ccagguagaggguguguaag

SEQ ID NO: 1642702 - RNA, 23 nt, Human
ccagugcccacaggaucagucug

SEQ ID NO: 1642703 - RNA, 20 nt, Human
ccaggaggccagccuugacc

SEQ ID NO: 1642704 - RNA, 18 nt, Human
ccaggaggccagccuuga

SEQ ID NO: 1642705 - RNA, 15 nt, Human
ccaggaggccagccu

SEQ ID NO: 1642706 - RNA, 16 nt, Human
ccaggccccugccacc

SEQ ID NO: 1642707 - RNA, 15 nt, Human
ccaggccccugccac

SEQ ID NO: 1642708 - RNA, 14 nt, Human
ccaggccccugcca

SEQ ID NO: 1642709 - RNA, 12 nt, Human
ccaggccagagg

SEQ ID NO: 1642710 - RNA, 14 nt, Human
ccaggcccucugcc

SEQ ID NO: 1642711 - RNA, 13 nt, Human
ccaggcccucugc

SEQ ID NO: 1642712 - RNA, 19 nt, Human
ccaggccccugccacccug

SEQ ID NO: 1642713 - RNA, 23 nt, Human
ccaggcuuagucacugagacagc

SEQ ID NO: 1642714 - RNA, 22 nt, Human
ccaggcuuagucacugagacag

SEQ ID NO: 1642715 - RNA, 21 nt, Human
ccaggcuuagucacugagaca

SEQ ID NO: 1642716 - RNA, 14 nt, Human
ccaggcuggucuca

SEQ ID NO: 1642717 - RNA, 16 nt, Human
ccaggcccucugccca

SEQ ID NO: 1642718 - RNA, 15 nt, Human
ccaggcccucugccc

SEQ ID NO: 1642719 - RNA, 16 nt, Human
ccaggcugggucgccc

SEQ ID NO: 1642720 - RNA, 12 nt, Human
ccaggcuggguc

SEQ ID NO: 1642721 - RNA, 24 nt, Human
ccaggcugggucgcccuggacugu

SEQ ID NO: 1642722 - RNA, 23 nt, Human
ccaggcugggucgcccuggacug

SEQ ID NO: 1642723 - RNA, 22 nt, Human
ccaggcugggucgcccuggacu

SEQ ID NO: 1642724 - RNA, 21 nt, Human
ccaggcugggucgcccuggac

SEQ ID NO: 1642725 - RNA, 15 nt, Human
ccauucugccugccc

SEQ ID NO: 1642726 - RNA, 16 nt, Human
ccauucugccugccca

SEQ ID NO: 1642727 - RNA, 13 nt, Human
ccauuugcuccuu

SEQ ID NO: 1642728 - RNA, 13 nt, Human
ccauuuggaaauc

SEQ ID NO: 1642729 - RNA, 14 nt, Human
ccauucuccaccug

SEQ ID NO: 1642730 - RNA, 18 nt, Human
ccauguuuuguuuacggu

SEQ ID NO: 1642731 - RNA, 11 nt, Human
ccauuauucaa

SEQ ID NO: 1642732 - RNA, 13 nt, Human
cccacaggaucag

SEQ ID NO: 1642733 - RNA, 17 nt, Human
cccacaggaucagucug

SEQ ID NO: 1642734 - RNA, 18 nt, Human
cccacaggcccuuccucu

SEQ ID NO: 1642735 - RNA, 16 nt, Human
cccacaggcccuuccu

SEQ ID NO: 1642736 - RNA, 19 nt, Human
cccacauagugaugguucc

SEQ ID NO: 1642737 - RNA, 16 nt, Human
cccaagggccuggccu

SEQ ID NO: 1642738 - RNA, 17 nt, Human
cccaagggccuggccug

SEQ ID NO: 1642739 - RNA, 14 nt, Human
cccaagggccuggc

SEQ ID NO: 1642740 - RNA, 12 nt, Human
cccaagggccug

SEQ ID NO: 1642741 - RNA, 21 nt, Human
ccauuuuguauuuuacuaaua

SEQ ID NO: 1642742 - RNA, 20 nt, Human
ccauuuugcugucccuuuuc

SEQ ID NO: 1642743 - RNA, 17 nt, Human
cccaccucucucacucc

SEQ ID NO: 1642744 - RNA, 14 nt, Human
cccaccucucucac

SEQ ID NO: 1642745 - RNA, 13 nt, Human
cccaccucucuca

SEQ ID NO: 1642746 - RNA, 21 nt, Human
cccaccucagccucccaaagu

SEQ ID NO: 1642747 - RNA, 12 nt, Human
cccaccuuggcu

SEQ ID NO: 1642748 - RNA, 19 nt, Human
cccaccucucucacuccuu

SEQ ID NO: 1642749 - RNA, 17 nt, Human
cccaccucagccucccg

SEQ ID NO: 1642750 - RNA, 15 nt, Human
cccaccucagccucc

SEQ ID NO: 1642751 - RNA, 14 nt, Human
cccaccucagccuc

SEQ ID NO: 1642752 - RNA, 12 nt, Human
cccaccucagcc

SEQ ID NO: 1642753 - RNA, 15 nt, Human
cccaccuuggcugca

SEQ ID NO: 1642754 - RNA, 14 nt, Human
cccaccuuggcugc

SEQ ID NO: 1642755 - RNA, 22 nt, Human
cccaccuuggcucaaguccucu

SEQ ID NO: 1642756 - RNA, 15 nt, Human
cccaccuuggcucaa

SEQ ID NO: 1642757 - RNA, 19 nt, Human
cccacgcccccacugguga

SEQ ID NO: 1642758 - RNA, 17 nt, Human
cccacgcccccacuggu

SEQ ID NO: 1642759 - RNA, 16 nt, Human
cccaccuuggcugcag

SEQ ID NO: 1642760 - RNA, 14 nt, Human
cccacgcuggagug

SEQ ID NO: 1642761 - RNA, 15 nt, Human
ccaccucccugcaau

SEQ ID NO: 1642762 - RNA, 12 nt, Human
ccacccugcucu

SEQ ID NO: 1642763 - RNA, 11 nt, Human
ccacccugcuc

SEQ ID NO: 1642764 - RNA, 19 nt, Human
ccaccucccugcaauaaaa

SEQ ID NO: 1642765 - RNA, 21 nt, Human
ccaccucccugcaauaaaaug

SEQ ID NO: 1642766 - RNA, 20 nt, Human
ccaccucucucacuccuuga

SEQ ID NO: 1642767 - RNA, 19 nt, Human
ccaccucucucacuccuug

SEQ ID NO: 1642768 - RNA, 16 nt, Human
ccaccucucucacucc

SEQ ID NO: 1642769 - RNA, 14 nt, Human
ccaccucucucacu

SEQ ID NO: 1642770 - RNA, 16 nt, Human
ccaccugccagggaca

SEQ ID NO: 1642771 - RNA, 15 nt, Human
ccaccugccagggac

SEQ ID NO: 1642772 - RNA, 14 nt, Human
ccaccugccaggga

SEQ ID NO: 1642773 - RNA, 13 nt, Human
ccaccugccaggg

SEQ ID NO: 1642774 - RNA, 20 nt, Human
ccaccuggccucugcacucc

SEQ ID NO: 1642775 - RNA, 13 nt, Human
ccaccuggccucu

SEQ ID NO: 1642776 - RNA, 14 nt, Human
ccaccuggccucug

SEQ ID NO: 1642777 - RNA, 19 nt, Human
ccacccccacccaagggcc

SEQ ID NO: 1642778 - RNA, 14 nt, Human
ccacccuccuuuca

SEQ ID NO: 1642779 - RNA, 13 nt, Human
ccaccuuggcuca

SEQ ID NO: 1642780 - RNA, 15 nt, Human
ccacugguucuucuu

SEQ ID NO: 1642781 - RNA, 23 nt, Human
ccacuggugacaugucuuuucuu

SEQ ID NO: 1642782 - RNA, 15 nt, Human
ccacugugaagagaa

SEQ ID NO: 1642783 - RNA, 14 nt, Human
ccacugugaagaga

SEQ ID NO: 1642784 - RNA, 15 nt, Human
ccacugcucugguua

SEQ ID NO: 1642785 - RNA, 13 nt, Human
ccacugcucuggu

SEQ ID NO: 1642786 - RNA, 12 nt, Human
ccacugcucugg

SEQ ID NO: 1642787 - RNA, 20 nt, Human
ccacugcuuuuggucugugu

SEQ ID NO: 1642788 - RNA, 21 nt, Human
ccacugccuucgauacaccgg

SEQ ID NO: 1642789 - RNA, 22 nt, Human
ccacugcuuuuggucuguguga

SEQ ID NO: 1642790 - RNA, 23 nt, Human
ccacugcaucguuucaucuucca

SEQ ID NO: 1642791 - RNA, 21 nt, Human
ccacugcaucguuucaucuuc

SEQ ID NO: 1642792 - RNA, 14 nt, Human
ccaccuucccaugc

SEQ ID NO: 1642793 - RNA, 16 nt, Human
ccacugccucuuccuc

SEQ ID NO: 1642794 - RNA, 13 nt, Human
ccacugccucuuc

SEQ ID NO: 1642795 - RNA, 16 nt, Human
ccacugugccaugugc

SEQ ID NO: 1642796 - RNA, 15 nt, Human
ccacugugccaugug

SEQ ID NO: 1642797 - RNA, 19 nt, Human
ccacugugccaugugccag

SEQ ID NO: 1642798 - RNA, 22 nt, Human
ccagaagaaaauagugguguga

SEQ ID NO: 1642799 - RNA, 18 nt, Human
ccagaaaccuuuguuugc

SEQ ID NO: 1642800 - RNA, 14 nt, Human
ccagacaucaacag

SEQ ID NO: 1642801 - RNA, 24 nt, Human
ccagaccccuggcuuuucacugcu

SEQ ID NO: 1642802 - RNA, 20 nt, Human
ccagacacauguccaagaag

SEQ ID NO: 1642803 - RNA, 17 nt, Human
ccagacacauguccaag

SEQ ID NO: 1642804 - RNA, 22 nt, Human
ccagacacauguccaagaagcc

SEQ ID NO: 1642805 - RNA, 15 nt, Human
ccagacccggcugcg

SEQ ID NO: 1642806 - RNA, 14 nt, Human
ccagacccggcugc

SEQ ID NO: 1642807 - RNA, 16 nt, Human
ccagacccggcugcgu

SEQ ID NO: 1642808 - RNA, 14 nt, Human
ccagagaguggcuc

SEQ ID NO: 1642809 - RNA, 16 nt, Human
ccagagaguggcuccu

SEQ ID NO: 1642810 - RNA, 15 nt, Human
ccagagaguggcucc

SEQ ID NO: 1642811 - RNA, 22 nt, Human
ccagagaguggcuccucccggu

SEQ ID NO: 1642812 - RNA, 18 nt, Human
ccagagaguggcuccucc

SEQ ID NO: 1642813 - RNA, 19 nt, Human
ccagauuucacucuccuug

SEQ ID NO: 1642814 - RNA, 18 nt, Human
ccagauuucacucuccuu

SEQ ID NO: 1642815 - RNA, 22 nt, Human
ccagauugcaacaggcugggcu

SEQ ID NO: 1642816 - RNA, 18 nt, Human
ccagauugcaacaggcug

SEQ ID NO: 1642817 - RNA, 23 nt, Human
ccagauugcaacaggcugggcuu

SEQ ID NO: 1642818 - RNA, 16 nt, Human
ccagauugcaacaggc

SEQ ID NO: 1642819 - RNA, 14 nt, Human
ccagauugcaacag

SEQ ID NO: 1642820 - RNA, 14 nt, Human
ccagagcccaccuu

SEQ ID NO: 1642821 - RNA, 20 nt, Human
ccagcaagugagagcugggu

SEQ ID NO: 1642822 - RNA, 19 nt, Human
ccagcaagugagagcuggg

SEQ ID NO: 1642823 - RNA, 18 nt, Human
ccagcaagugagagcugg

SEQ ID NO: 1642824 - RNA, 17 nt, Human
ccagcaagugagagcug

SEQ ID NO: 1642825 - RNA, 18 nt, Human
ccagcaggcucucaggcc

SEQ ID NO: 1642826 - RNA, 17 nt, Human
ccagcaggcucucaggc

SEQ ID NO: 1642827 - RNA, 16 nt, Human
ccagcaggcucucagg

SEQ ID NO: 1642828 - RNA, 18 nt, Human
ccagcaccaucucuccuc

SEQ ID NO: 1642829 - RNA, 17 nt, Human
ccagcaccaucucuccu

SEQ ID NO: 1642830 - RNA, 24 nt, Human
ccagauuuuuuacagcugccugca

SEQ ID NO: 1642831 - RNA, 19 nt, Human
ccagccccaaaacucuccu

SEQ ID NO: 1642832 - RNA, 23 nt, Human
ccagccgagauagccaaggccaa

SEQ ID NO: 1642833 - RNA, 22 nt, Human
ccagccgagauagccaaggcca

SEQ ID NO: 1642834 - RNA, 20 nt, Human
ccagccgagauagccaaggc

SEQ ID NO: 1642835 - RNA, 17 nt, Human
ccagccgagauagccaa

SEQ ID NO: 1642836 - RNA, 17 nt, Human
ccagcccacuucugcca

SEQ ID NO: 1642837 - RNA, 16 nt, Human
ccagcccacuucugcc

SEQ ID NO: 1642838 - RNA, 23 nt, Human
ccagcaggcucucaggccagcug

SEQ ID NO: 1642839 - RNA, 21 nt, Human
ccagcaggcucucaggccagc

SEQ ID NO: 1642840 - RNA, 20 nt, Human
ccagcaggcucucaggccag

SEQ ID NO: 1642841 - RNA, 19 nt, Human
ccagcaggcucucaggcca

SEQ ID NO: 1642842 - RNA, 13 nt, Human
ccagccuggguga

SEQ ID NO: 1642843 - RNA, 13 nt, Human
ccagcgagcccug

SEQ ID NO: 1642844 - RNA, 23 nt, Human
ccagccuugaccauucuccaccu

SEQ ID NO: 1642845 - RNA, 19 nt, Human
ccagccugagcgacaguga

SEQ ID NO: 1642846 - RNA, 15 nt, Human
ccuaacgaaguaucc

SEQ ID NO: 1642847 - RNA, 11 nt, Human
ccguggcuucc

SEQ ID NO: 1642848 - RNA, 21 nt, Human
ccuacaguugaaaaacagcug

SEQ ID NO: 1642849 - RNA, 17 nt, Human
ccuaccgagucucuucu

SEQ ID NO: 1642850 - RNA, 16 nt, Human
ccuaccgagucucuuc

SEQ ID NO: 1642851 - RNA, 21 nt, Human
ccuaccgagucucuucuccac

SEQ ID NO: 1642852 - RNA, 20 nt, Human
ccuaccgagucucuucucca

SEQ ID NO: 1642853 - RNA, 19 nt, Human
ccuaccgagucucuucucc

SEQ ID NO: 1642854 - RNA, 14 nt, Human
ccguggcuucccgc

SEQ ID NO: 1642855 - RNA, 13 nt, Human
ccgggccacagag

SEQ ID NO: 1642856 - RNA, 22 nt, Human
ccgggcacucagaagacacuga

SEQ ID NO: 1642857 - RNA, 21 nt, Human
ccggcuccaggcuccuuuagc

SEQ ID NO: 1642858 - RNA, 16 nt, Human
ccggcuccaggcuccu

SEQ ID NO: 1642859 - RNA, 15 nt, Human
ccgggcucugccucc

SEQ ID NO: 1642860 - RNA, 14 nt, Human
ccgggcucugccuc

SEQ ID NO: 1642861 - RNA, 18 nt, Human
ccgggcucugccucccau

SEQ ID NO: 1642862 - RNA, 22 nt, Human
ccgggcucugccucccaucacc

SEQ ID NO: 1642863 - RNA, 18 nt, Human
ccgugaggccagagacac

SEQ ID NO: 1642864 - RNA, 11 nt, Human
ccgcuggggcc

SEQ ID NO: 1642865 - RNA, 14 nt, Human
ccgcuggggccagu

SEQ ID NO: 1642866 - RNA, 14 nt, Human
ccggaggggccugg

SEQ ID NO: 1642867 - RNA, 16 nt, Human
ccggaggggccuggca

SEQ ID NO: 1642868 - RNA, 15 nt, Human
ccggaggggccuggc

SEQ ID NO: 1642869 - RNA, 16 nt, Human
ccgaguagcugggacu

SEQ ID NO: 1642870 - RNA, 14 nt, Human
ccgaguagcuggga

SEQ ID NO: 1642871 - RNA, 18 nt, Human
ccgagucucuucuccacu

SEQ ID NO: 1642872 - RNA, 16 nt, Human
ccgagucucuucucca

SEQ ID NO: 1642873 - RNA, 14 nt, Human
ccgagucucuucuc

SEQ ID NO: 1642874 - RNA, 20 nt, Human
ccgaguagcugagauuauag

SEQ ID NO: 1642875 - RNA, 19 nt, Human
ccgagcuuugaaaauucag

SEQ ID NO: 1642876 - RNA, 23 nt, Human
ccgcacugggcuuggggaccaga

SEQ ID NO: 1642877 - RNA, 21 nt, Human
ccgagucucuucuccacugga

SEQ ID NO: 1642878 - RNA, 20 nt, Human
ccgagucucuucuccacugg

SEQ ID NO: 1642879 - RNA, 19 nt, Human
ccgagucucuucuccacug

SEQ ID NO: 1642880 - RNA, 15 nt, Human
ccgcagacaggacca

SEQ ID NO: 1642881 - RNA, 19 nt, Human
ccgagauugcaccacugca

SEQ ID NO: 1642882 - RNA, 15 nt, Human
ccgagauugcaccac

SEQ ID NO: 1642883 - RNA, 21 nt, Human
ccgagauugcaccacugcacu

SEQ ID NO: 1642884 - RNA, 18 nt, Human
ccgagauagccaaggcca

SEQ ID NO: 1642885 - RNA, 23 nt, Human
cccucuccugggcagcugccucc

SEQ ID NO: 1642886 - RNA, 11 nt, Human
cccucugccca

SEQ ID NO: 1642887 - RNA, 18 nt, Human
cccucugcccacucccug

SEQ ID NO: 1642888 - RNA, 15 nt, Human
cccucugcccacucc

SEQ ID NO: 1642889 - RNA, 19 nt, Human
cccucugcccacucccugc

SEQ ID NO: 1642890 - RNA, 14 nt, Human
cccucugcccugcg

SEQ ID NO: 1642891 - RNA, 13 nt, Human
cccucugcccugc

SEQ ID NO: 1642892 - RNA, 12 nt, Human
cccucugcccug

SEQ ID NO: 1642893 - RNA, 20 nt, Human
cccucuccugggcagcugcc

SEQ ID NO: 1642894 - RNA, 21 nt, Human
cccucuccugggcagcugccu

SEQ ID NO: 1642895 - RNA, 22 nt, Human
cccucuccugggcagcugccuc

SEQ ID NO: 1642896 - RNA, 12 nt, Human
cccucuggggcu

SEQ ID NO: 1642897 - RNA, 21 nt, Human
cccucuguucugcacacagca

SEQ ID NO: 1642898 - RNA, 20 nt, Human
cccucuguucugcacacagc

SEQ ID NO: 1642899 - RNA, 22 nt, Human
cccucuggcuccagcuggccgg

SEQ ID NO: 1642900 - RNA, 17 nt, Human
cccucuggcuccagcug

SEQ ID NO: 1642901 - RNA, 16 nt, Human
cccucuggcuccagcu

SEQ ID NO: 1642902 - RNA, 12 nt, Human
cccucuggcucc

SEQ ID NO: 1642903 - RNA, 20 nt, Human
cccucuuucccucccuuccu

SEQ ID NO: 1642904 - RNA, 17 nt, Human
cccucuuucccucccuu

SEQ ID NO: 1642905 - RNA, 12 nt, Human
cccucuuucccu

SEQ ID NO: 1642906 - RNA, 14 nt, Human
cccucccugccccu

SEQ ID NO: 1642907 - RNA, 23 nt, Human
cccucccucuuucccucccuucc

SEQ ID NO: 1642908 - RNA, 14 nt, Human
cccgcucagcccuc

SEQ ID NO: 1642909 - RNA, 13 nt, Human
cccgcucagcccu

SEQ ID NO: 1642910 - RNA, 12 nt, Human
cccgcucagccc

SEQ ID NO: 1642911 - RNA, 15 nt, Human
cccgcucagcccucc

SEQ ID NO: 1642912 - RNA, 15 nt, Human
cccuugaugaagaag

SEQ ID NO: 1642913 - RNA, 17 nt, Human
cccuuacgugaguccug

SEQ ID NO: 1642914 - RNA, 15 nt, Human
cccuuacgugagucc

SEQ ID NO: 1642915 - RNA, 14 nt, Human
cccuuagcagggaa

SEQ ID NO: 1642916 - RNA, 20 nt, Human
cccuuagaaguuuguuguga

SEQ ID NO: 1642917 - RNA, 23 nt, Human
cccuuagcagggaaacagcuaau

SEQ ID NO: 1642918 - RNA, 12 nt, Human
cccuuccaugga

SEQ ID NO: 1642919 - RNA, 20 nt, Human
cccuuccaugucgccucugc

SEQ ID NO: 1642920 - RNA, 18 nt, Human
cccuucaaccauucccca

SEQ ID NO: 1642921 - RNA, 14 nt, Human
cccuucaaccauuc

SEQ ID NO: 1642922 - RNA, 15 nt, Human
cccugguggcagugg

SEQ ID NO: 1642923 - RNA, 14 nt, Human
cccugguggcagug

SEQ ID NO: 1642924 - RNA, 13 nt, Human
cccugguggcagu

SEQ ID NO: 1642925 - RNA, 21 nt, Human
cccugguggcagcucaccucu

SEQ ID NO: 1642926 - RNA, 14 nt, Human
cccuggugcugcca

SEQ ID NO: 1642927 - RNA, 13 nt, Human
cccuggugcugcc

SEQ ID NO: 1642928 - RNA, 21 nt, Human
cccuggugaccagcaccaucu

SEQ ID NO: 1642929 - RNA, 14 nt, Human
cccugcuuucagau

SEQ ID NO: 1642930 - RNA, 23 nt, Human
cccuuaccugccaggaagccagc

SEQ ID NO: 1642931 - RNA, 20 nt, Human
cccuuaccugccaggaagcc

SEQ ID NO: 1642932 - RNA, 17 nt, Human
cccuuaccugccaggaa

SEQ ID NO: 1642933 - RNA, 19 nt, Human
cccuguuuguuucugaaag

SEQ ID NO: 1642934 - RNA, 14 nt, Human
cccuguucuggcag

SEQ ID NO: 1642935 - RNA, 13 nt, Human
cccuguucuggca

SEQ ID NO: 1642936 - RNA, 15 nt, Human
cccuggugcugccac

SEQ ID NO: 1642937 - RNA, 21 nt, Human
cccugcucuccgaccagacac

SEQ ID NO: 1642938 - RNA, 22 nt, Human
cccugcucuccgaccagacacc

SEQ ID NO: 1642939 - RNA, 21 nt, Human
cccugcugagucccaggcuga

SEQ ID NO: 1642940 - RNA, 23 nt, Human
cccugcugagucccaggcugagc

SEQ ID NO: 1642941 - RNA, 16 nt, Human
cccugccucucugcag

SEQ ID NO: 1642942 - RNA, 15 nt, Human
cccugccucucugca

SEQ ID NO: 1642943 - RNA, 21 nt, Human
cccugcgggucacaggaggga

SEQ ID NO: 1642944 - RNA, 19 nt, Human
cccugcgggucacaggagg

SEQ ID NO: 1642945 - RNA, 12 nt, Human
cccugaggccca

SEQ ID NO: 1642946 - RNA, 11 nt, Human
cccugccuccu

SEQ ID NO: 1642947 - RNA, 14 nt, Human
cccugccuccuuug

SEQ ID NO: 1642948 - RNA, 14 nt, Human
cccugccucucugc

SEQ ID NO: 1642949 - RNA, 13 nt, Human
cccugccucucug

SEQ ID NO: 1642950 - RNA, 16 nt, Human
cccuggugcugccaca

SEQ ID NO: 1642951 - RNA, 15 nt, Human
ccccucggagaagag

SEQ ID NO: 1642952 - RNA, 13 nt, Human
ccccuccucugcu

SEQ ID NO: 1642953 - RNA, 14 nt, Human
ccccuccucugcuu

SEQ ID NO: 1642954 - RNA, 17 nt, Human
ccccuccucugcuugcc

SEQ ID NO: 1642955 - RNA, 17 nt, Human
ccccuccucucugcccu

SEQ ID NO: 1642956 - RNA, 15 nt, Human
ccccuccucucugcc

SEQ ID NO: 1642957 - RNA, 18 nt, Human
ccccuccuccuggacucc

SEQ ID NO: 1642958 - RNA, 22 nt, Human
ccccuccuccuggacuccugca

SEQ ID NO: 1642959 - RNA, 12 nt, Human
ccccuccaugug

SEQ ID NO: 1642960 - RNA, 15 nt, Human
ccccucccuucaacc

SEQ ID NO: 1642961 - RNA, 16 nt, Human
ccccucagggucccug

SEQ ID NO: 1642962 - RNA, 23 nt, Human
ccccuccaaucccaccaacccuc

SEQ ID NO: 1642963 - RNA, 20 nt, Human
ccccucauagcccucacccu

SEQ ID NO: 1642964 - RNA, 19 nt, Human
cccccugacaacacucauu

SEQ ID NO: 1642965 - RNA, 19 nt, Human
cccccugcaaagcccagcu

SEQ ID NO: 1642966 - RNA, 18 nt, Human
cccccugcaaagcccagc

SEQ ID NO: 1642967 - RNA, 21 nt, Human
cccccugcaaagcccagcuug

SEQ ID NO: 1642968 - RNA, 17 nt, Human
cccccugacaacacuca

SEQ ID NO: 1642969 - RNA, 21 nt, Human
cccccucuggcuccagcuggc

SEQ ID NO: 1642970 - RNA, 19 nt, Human
cccccucuggcuccagcug

SEQ ID NO: 1642971 - RNA, 12 nt, Human
cccccucuggcu

SEQ ID NO: 1642972 - RNA, 12 nt, Human
cccccagccugc

SEQ ID NO: 1642973 - RNA, 23 nt, Human
ccccucaacucuccuccagaguc

SEQ ID NO: 1642974 - RNA, 16 nt, Human
ccccucaacaccucug

SEQ ID NO: 1642975 - RNA, 15 nt, Human
ccccucaacaccucu

SEQ ID NO: 1642976 - RNA, 20 nt, Human
ccccagugcccacaggauca

SEQ ID NO: 1642977 - RNA, 16 nt, Human
ccccagugcccacagg

SEQ ID NO: 1642978 - RNA, 15 nt, Human
ccccagugcccacag

SEQ ID NO: 1642979 - RNA, 14 nt, Human
ccccagugcccaca

SEQ ID NO: 1642980 - RNA, 22 nt, Human
ccccauaauuuuuuuuuuccuu

SEQ ID NO: 1642981 - RNA, 13 nt, Human
cccccacccaagg

SEQ ID NO: 1642982 - RNA, 17 nt, Human
ccccauccucuguacag

SEQ ID NO: 1642983 - RNA, 24 nt, Human
cccccacccaagggccuggccuga

SEQ ID NO: 1642984 - RNA, 14 nt, Human
ccccauccucugua

SEQ ID NO: 1642985 - RNA, 17 nt, Human
ccccaucauugguaccc

SEQ ID NO: 1642986 - RNA, 13 nt, Human
cccccacugguga

SEQ ID NO: 1642987 - RNA, 11 nt, Human
cccccacuggu

SEQ ID NO: 1642988 - RNA, 15 nt, Human
cccccacuggugaca

SEQ ID NO: 1642989 - RNA, 19 nt, Human
ccccuggaugcagccucac

SEQ ID NO: 1642990 - RNA, 18 nt, Human
ccccuggaugcagccuca

SEQ ID NO: 1642991 - RNA, 15 nt, Human
ccccuggaugcagcc

SEQ ID NO: 1642992 - RNA, 20 nt, Human
ccccugcugguucaggguug

SEQ ID NO: 1642993 - RNA, 15 nt, Human
ccccugcugguucag

SEQ ID NO: 1642994 - RNA, 13 nt, Human
ccccugcugguuc

SEQ ID NO: 1642995 - RNA, 11 nt, Human
ccccugcuggu

SEQ ID NO: 1642996 - RNA, 17 nt, Human
ccccugcuggguguggc

SEQ ID NO: 1642997 - RNA, 14 nt, Human
ccccugcugggugu

SEQ ID NO: 1642998 - RNA, 19 nt, Human
ccccugcccggcugcggaa

SEQ ID NO: 1642999 - RNA, 17 nt, Human
ccccugcccggcugcgg

SEQ ID NO: 1643000 - RNA, 12 nt, Human
ccccucugcccu

SEQ ID NO: 1643001 - RNA, 14 nt, Human
ccccucugcccugc

SEQ ID NO: 1643002 - RNA, 13 nt, Human
ccccucugcccug

SEQ ID NO: 1643003 - RNA, 19 nt, Human
ccccugccucucugcaggu

SEQ ID NO: 1643004 - RNA, 17 nt, Human
ccccugccucucugcag

SEQ ID NO: 1643005 - RNA, 16 nt, Human
ccccugccucucugca

SEQ ID NO: 1643006 - RNA, 15 nt, Human
ccccugccucucugc

SEQ ID NO: 1643007 - RNA, 14 nt, Human
ccccugccucucug

SEQ ID NO: 1643008 - RNA, 23 nt, Human
cccgcuaagagggagggagggcu

SEQ ID NO: 1643009 - RNA, 22 nt, Human
cccgcccaggcuuagucacuga

SEQ ID NO: 1643010 - RNA, 20 nt, Human
cccgcccaggcuuagucacu

SEQ ID NO: 1643011 - RNA, 18 nt, Human
cccgacagccuggcacag

SEQ ID NO: 1643012 - RNA, 15 nt, Human
cccgacagccuggca

SEQ ID NO: 1643013 - RNA, 20 nt, Human
ccccuuccauggacuuuguu

SEQ ID NO: 1643014 - RNA, 13 nt, Human
ccccuuccaugga

SEQ ID NO: 1643015 - RNA, 14 nt, Human
cccgacagccuggc

SEQ ID NO: 1643016 - RNA, 15 nt, Human
ccccuguucacucua

SEQ ID NO: 1643017 - RNA, 18 nt, Human
ccccuggcuuuucacugc

SEQ ID NO: 1643018 - RNA, 22 nt, Human
ccccuggcuuuucacugcuggc

SEQ ID NO: 1643019 - RNA, 20 nt, Human
ccccuggcuuuucacugcug

SEQ ID NO: 1643020 - RNA, 19 nt, Human
ccccaccgcagacaggacc

SEQ ID NO: 1643021 - RNA, 15 nt, Human
ccccaccgcagacag

SEQ ID NO: 1643022 - RNA, 16 nt, Human
ccccacccugccucac

SEQ ID NO: 1643023 - RNA, 23 nt, Human
cccauuauucaaaguugccuaaa

SEQ ID NO: 1643024 - RNA, 18 nt, Human
cccauuauucaaaguugc

SEQ ID NO: 1643025 - RNA, 14 nt, Human
cccaugagccucag

SEQ ID NO: 1643026 - RNA, 12 nt, Human
cccaucugugaa

SEQ ID NO: 1643027 - RNA, 19 nt, Human
cccaucucuacaaaaagca

SEQ ID NO: 1643028 - RNA, 14 nt, Human
cccaguugggugga

SEQ ID NO: 1643029 - RNA, 13 nt, Human
cccaguuguauuu

SEQ ID NO: 1643030 - RNA, 14 nt, Human
cccaucucuucugg

SEQ ID NO: 1643031 - RNA, 23 nt, Human
cuaagagggagggagggcuccag

SEQ ID NO: 1643032 - RNA, 22 nt, Human
cuaagagggagggagggcucca

SEQ ID NO: 1643033 - RNA, 15 nt, Human
cuaagagggagggag

SEQ ID NO: 1643034 - RNA, 13 nt, Human
cuaagagggaggg

SEQ ID NO: 1643035 - RNA, 15 nt, Human
cuaagagagaaugag

SEQ ID NO: 1643036 - RNA, 14 nt, Human
cuaagagagaauga

SEQ ID NO: 1643037 - RNA, 19 nt, Human
cuaaauugacacuuaaaaa

SEQ ID NO: 1643038 - RNA, 19 nt, Human
cuaaauucuuucauuuuag

SEQ ID NO: 1643039 - RNA, 14 nt, Human
cuaaccacgcugga

SEQ ID NO: 1643040 - RNA, 12 nt, Human
cuaaccacgcug

SEQ ID NO: 1643041 - RNA, 20 nt, Human
cgggaggcagagguugcagu

SEQ ID NO: 1643042 - RNA, 23 nt, Human
cgggaggauguucugggacacag

SEQ ID NO: 1643043 - RNA, 20 nt, Human
cguuuguuccccaagacauu

SEQ ID NO: 1643044 - RNA, 22 nt, Human
cuaaaugaaaaucgugacaaca

SEQ ID NO: 1643045 - RNA, 21 nt, Human
cuaaaucuccaaaauaaaacu

SEQ ID NO: 1643046 - RNA, 17 nt, Human
cuaaauauauuuuaaga

SEQ ID NO: 1643047 - RNA, 21 nt, Human
cuaaacugcccccucugcccu

SEQ ID NO: 1643048 - RNA, 21 nt, Human
cuaaaauggacuguggugacu

SEQ ID NO: 1643049 - RNA, 22 nt, Human
cuaaaauggacuguggugacuu

SEQ ID NO: 1643050 - RNA, 13 nt, Human
cuaaacugccccc

SEQ ID NO: 1643051 - RNA, 12 nt, Human
cuaaacugcccc

SEQ ID NO: 1643052 - RNA, 13 nt, Human
cguuuucaaaauu

SEQ ID NO: 1643053 - RNA, 14 nt, Human
cuacacuaagagag

SEQ ID NO: 1643054 - RNA, 23 nt, Human
cuacacgagauacagaauuuuau

SEQ ID NO: 1643055 - RNA, 21 nt, Human
cuacacaggggaaaagaggag

SEQ ID NO: 1643056 - RNA, 14 nt, Human
cuaauuccacagcu

SEQ ID NO: 1643057 - RNA, 16 nt, Human
cuaauuccacagcugc

SEQ ID NO: 1643058 - RNA, 15 nt, Human
cuaauuccacagcug

SEQ ID NO: 1643059 - RNA, 18 nt, Human
cuaauauguaacaagcca

SEQ ID NO: 1643060 - RNA, 21 nt, Human
cuaaucagcauucucacuccu

SEQ ID NO: 1643061 - RNA, 20 nt, Human
cuaaucagcauucucacucc

SEQ ID NO: 1643062 - RNA, 20 nt, Human
cuaaugcgcaggcuggcccu

SEQ ID NO: 1643063 - RNA, 19 nt, Human
cuaaugcgcaggcuggccc

SEQ ID NO: 1643064 - RNA, 16 nt, Human
cuaaugcgcaggcugg

SEQ ID NO: 1643065 - RNA, 15 nt, Human
cuaaugcgcaggcug

SEQ ID NO: 1643066 - RNA, 13 nt, Human
cuaaugggacacu

SEQ ID NO: 1643067 - RNA, 12 nt, Human
cuaaugggacac

SEQ ID NO: 1643068 - RNA, 23 nt, Human
cuaaugcgcaggcuggcccugcc

SEQ ID NO: 1643069 - RNA, 22 nt, Human
cuaaugcgcaggcuggcccugc

SEQ ID NO: 1643070 - RNA, 22 nt, Human
cuaauuauacccccugcaaagc

SEQ ID NO: 1643071 - RNA, 21 nt, Human
cuaagcuucacuguaaaauaa

SEQ ID NO: 1643072 - RNA, 22 nt, Human
cuaagcuauucaguaauaacuc

SEQ ID NO: 1643073 - RNA, 22 nt, Human
cuaaggacuucuuuaauuuugg

SEQ ID NO: 1643074 - RNA, 16 nt, Human
cuaaggacuucuuuaa

SEQ ID NO: 1643075 - RNA, 15 nt, Human
cuaaggacuucuuua

SEQ ID NO: 1643076 - RNA, 14 nt, Human
cuaaggacuucuuu

SEQ ID NO: 1643077 - RNA, 18 nt, Human
cuaaguaaaaccacagca

SEQ ID NO: 1643078 - RNA, 14 nt, Human
cuaaguaaaaccac

SEQ ID NO: 1643079 - RNA, 19 nt, Human
cuaaguaaaaccacagcag

SEQ ID NO: 1643080 - RNA, 14 nt, Human
cuaauaaagcugug

SEQ ID NO: 1643081 - RNA, 17 nt, Human
cuaauagacaauuuauu

SEQ ID NO: 1643082 - RNA, 19 nt, Human
cuaauagacaauuuauuau

SEQ ID NO: 1643083 - RNA, 23 nt, Human
cuaauagacaauuuauuauggca

SEQ ID NO: 1643084 - RNA, 22 nt, Human
cuaggaaauauuuauuuuaaua

SEQ ID NO: 1643085 - RNA, 18 nt, Human
cuacacugugcugagucu

SEQ ID NO: 1643086 - RNA, 17 nt, Human
cuacacugugcugaguc

SEQ ID NO: 1643087 - RNA, 14 nt, Human
cuacacugugcuga

SEQ ID NO: 1643088 - RNA, 13 nt, Human
cuacacugugcug

SEQ ID NO: 1643089 - RNA, 20 nt, Human
cuacagaggccaugggccuc

SEQ ID NO: 1643090 - RNA, 18 nt, Human
cuacagaggccaugggcc

SEQ ID NO: 1643091 - RNA, 22 nt, Human
cuacagaggccaugggccuccu

SEQ ID NO: 1643092 - RNA, 22 nt, Human
cuacagcuugaccgugaggcca

SEQ ID NO: 1643093 - RNA, 19 nt, Human
cuacagcuugaccgugagg

SEQ ID NO: 1643094 - RNA, 23 nt, Human
cuacagcuugaccgugaggccag

SEQ ID NO: 1643095 - RNA, 19 nt, Human
cuacagcuaaucagcauuc

SEQ ID NO: 1643096 - RNA, 18 nt, Human
cuacagcuaaucagcauu

SEQ ID NO: 1643097 - RNA, 22 nt, Human
cuacagcuaaucagcauucuca

SEQ ID NO: 1643098 - RNA, 21 nt, Human
cuacagcuaaucagcauucuc

SEQ ID NO: 1643099 - RNA, 20 nt, Human
cuacauggaguauaugucaa

SEQ ID NO: 1643100 - RNA, 18 nt, Human
cuacauggaguauauguc

SEQ ID NO: 1643101 - RNA, 13 nt, Human
cuacaguccuccc

SEQ ID NO: 1643102 - RNA, 16 nt, Human
cuacaggugugaguca

SEQ ID NO: 1643103 - RNA, 14 nt, Human
cuacaggugugagu

SEQ ID NO: 1643104 - RNA, 16 nt, Human
cuacaggagugagcac

SEQ ID NO: 1643105 - RNA, 15 nt, Human
cuacaggagugagca

SEQ ID NO: 1643106 - RNA, 14 nt, Human
cuacaggagugagc

SEQ ID NO: 1643107 - RNA, 17 nt, Human
cuacaggcacccaccau

SEQ ID NO: 1643108 - RNA, 15 nt, Human
cuacaggcacccacc

SEQ ID NO: 1643109 - RNA, 17 nt, Human
cuacccagcgagcccug

SEQ ID NO: 1643110 - RNA, 15 nt, Human
cuacccagcgagccc

SEQ ID NO: 1643111 - RNA, 13 nt, Human
cuacccacccucc

SEQ ID NO: 1643112 - RNA, 13 nt, Human
cuacccaggugcu

SEQ ID NO: 1643113 - RNA, 18 nt, Human
cuacccagcgagcccugg

SEQ ID NO: 1643114 - RNA, 19 nt, Human
cuacccagcgagcccuggu

SEQ ID NO: 1643115 - RNA, 17 nt, Human
cuacccucuuagaaaaa

SEQ ID NO: 1643116 - RNA, 22 nt, Human
cuacauuauaaaugucucuuua

SEQ ID NO: 1643117 - RNA, 13 nt, Human
cuacauucuguua

SEQ ID NO: 1643118 - RNA, 14 nt, Human
cuacauucuguuaa

SEQ ID NO: 1643119 - RNA, 23 nt, Human
cuagccuuagaagucacacagua

SEQ ID NO: 1643120 - RNA, 22 nt, Human
cuagccuuagaagucacacagu

SEQ ID NO: 1643121 - RNA, 21 nt, Human
cuagccuuagaagucacacag

SEQ ID NO: 1643122 - RNA, 22 nt, Human
cuagccugugccucugggacug

SEQ ID NO: 1643123 - RNA, 19 nt, Human
cuagccugugccucuggga

SEQ ID NO: 1643124 - RNA, 21 nt, Human
cuagccugugccucugggacu

SEQ ID NO: 1643125 - RNA, 24 nt, Human
cuagauacuguaucaugacaaaga

SEQ ID NO: 1643126 - RNA, 13 nt, Human
cuagauacuguau

SEQ ID NO: 1643127 - RNA, 16 nt, Human
cuagauacuguaucau

SEQ ID NO: 1643128 - RNA, 20 nt, Human
cuaggaaauauuuauuuuaa

SEQ ID NO: 1643129 - RNA, 19 nt, Human
cuaggaaauauuuauuuua

SEQ ID NO: 1643130 - RNA, 15 nt, Human
cuaggaaauauuuau

SEQ ID NO: 1643131 - RNA, 14 nt, Human
cuaggaaauauuua

SEQ ID NO: 1643132 - RNA, 15 nt, Human
cuauaggugcuacaa

SEQ ID NO: 1643133 - RNA, 19 nt, Human
cuagaguuuagcuggaaaa

SEQ ID NO: 1643134 - RNA, 18 nt, Human
cuagaguuuagcuggaaa

SEQ ID NO: 1643135 - RNA, 17 nt, Human
cuagagguucaaagaua

SEQ ID NO: 1643136 - RNA, 18 nt, Human
cuagagguucaaagauau

SEQ ID NO: 1643137 - RNA, 21 nt, Human
cuagagguucaaagauauuuu

SEQ ID NO: 1643138 - RNA, 20 nt, Human
cuacuguccuacccacccuc

SEQ ID NO: 1643139 - RNA, 22 nt, Human
cuacuuagcaugucccuaccga

SEQ ID NO: 1643140 - RNA, 17 nt, Human
cuacuuagcaugucccu

SEQ ID NO: 1643141 - RNA, 23 nt, Human
cuagacuggugacugauucuuca

SEQ ID NO: 1643142 - RNA, 22 nt, Human
cuagacuggugacugauucuuc

SEQ ID NO: 1643143 - RNA, 19 nt, Human
cuagacuggugacugauuc

SEQ ID NO: 1643144 - RNA, 18 nt, Human
cuagacuggugacugauu

SEQ ID NO: 1643145 - RNA, 17 nt, Human
cuagacuggugacugau

SEQ ID NO: 1643146 - RNA, 15 nt, Human
cuagacuggugacug

SEQ ID NO: 1643147 - RNA, 14 nt, Human
cuagacuggugacu

SEQ ID NO: 1643148 - RNA, 19 nt, Human
cuacucgaguuacagacaa

SEQ ID NO: 1643149 - RNA, 16 nt, Human
cuacucgaguuacaga

SEQ ID NO: 1643150 - RNA, 15 nt, Human
cuacucgaguuacag

SEQ ID NO: 1643151 - RNA, 19 nt, Human
cuaccgagucucuucucca

SEQ ID NO: 1643152 - RNA, 17 nt, Human
cuaccgagucucuucuc

SEQ ID NO: 1643153 - RNA, 23 nt, Human
cuaccgagucucuucuccacugg

SEQ ID NO: 1643154 - RNA, 22 nt, Human
cuaccgagucucuucuccacug

SEQ ID NO: 1643155 - RNA, 21 nt, Human
cuaccgagucucuucuccacu

SEQ ID NO: 1643156 - RNA, 19 nt, Human
cuacuguccuacccacccu

SEQ ID NO: 1643157 - RNA, 13 nt, Human
cuacucuguguca

SEQ ID NO: 1643158 - RNA, 12 nt, Human
cuacucuguguc

SEQ ID NO: 1643159 - RNA, 17 nt, Human
cuauucaguaauaacuc

SEQ ID NO: 1643160 - RNA, 16 nt, Human
cuauguaucaaugagu

SEQ ID NO: 1643161 - RNA, 13 nt, Human
cuauguaucaaug

SEQ ID NO: 1643162 - RNA, 19 nt, Human
cuaugggggcacugaggac

SEQ ID NO: 1643163 - RNA, 13 nt, Human
cuaugcugaguuu

SEQ ID NO: 1643164 - RNA, 15 nt, Human
cuaugcugaguuugu

SEQ ID NO: 1643165 - RNA, 14 nt, Human
cuaugcugaguuug

SEQ ID NO: 1643166 - RNA, 18 nt, Human
cuaugcugaguuugugcu

SEQ ID NO: 1643167 - RNA, 23 nt, Human
cuauucaguaauaacucuacccu

SEQ ID NO: 1643168 - RNA, 12 nt, Human
cuauaauuuaaa

SEQ ID NO: 1643169 - RNA, 13 nt, Human
cuauaauuuaaau

SEQ ID NO: 1643170 - RNA, 17 nt, Human
cuaggaagacuuuggaa

SEQ ID NO: 1643171 - RNA, 15 nt, Human
cuaggaagacuuugg

SEQ ID NO: 1643172 - RNA, 20 nt, Human
cuaggaacacuccuucacag

SEQ ID NO: 1643173 - RNA, 21 nt, Human
cuauagccuaggugacagagu

SEQ ID NO: 1643174 - RNA, 20 nt, Human
cuauagccuaggugacagag

SEQ ID NO: 1643175 - RNA, 18 nt, Human
cuauagccuaggugacag

SEQ ID NO: 1643176 - RNA, 19 nt, Human
cuauagccuaggugacaga

SEQ ID NO: 1643177 - RNA, 19 nt, Human
cuaugaaauauuauguuaa

SEQ ID NO: 1643178 - RNA, 22 nt, Human
cuaugaaguuuuuuuuauacag

SEQ ID NO: 1643179 - RNA, 15 nt, Human
cuaugauuuggaaaa

SEQ ID NO: 1643180 - RNA, 19 nt, Human
cuaugauuuggaaaauaaa

SEQ ID NO: 1643181 - RNA, 15 nt, Human
cucaaauuucuaaau

SEQ ID NO: 1643182 - RNA, 17 nt, Human
cucaaauuucuaaaucu

SEQ ID NO: 1643183 - RNA, 14 nt, Human
cucaacucuccucc

SEQ ID NO: 1643184 - RNA, 14 nt, Human
cucaaauuucuaaa

SEQ ID NO: 1643185 - RNA, 20 nt, Human
cuauuucuauauuuucauuc

SEQ ID NO: 1643186 - RNA, 19 nt, Human
cuauuucuauauuuucauu

SEQ ID NO: 1643187 - RNA, 18 nt, Human
cucaacucuccuccagag

SEQ ID NO: 1643188 - RNA, 16 nt, Human
cucaacucuccuccag

SEQ ID NO: 1643189 - RNA, 19 nt, Human
cucaacucuccuccagagu

SEQ ID NO: 1643190 - RNA, 23 nt, Human
cucacacggacacucaaaagcug

SEQ ID NO: 1643191 - RNA, 14 nt, Human
cucaaguccucuuu

SEQ ID NO: 1643192 - RNA, 17 nt, Human
cucacagaacccuugga

SEQ ID NO: 1643193 - RNA, 16 nt, Human
cuauugcugcuugagg

SEQ ID NO: 1643194 - RNA, 11 nt, Human
cuauugguaaa

SEQ ID NO: 1643195 - RNA, 21 nt, Human
cucauugaccugaggcccuuc

SEQ ID NO: 1643196 - RNA, 19 nt, Human
cucauugaccugaggcccu

SEQ ID NO: 1643197 - RNA, 17 nt, Human
cucauugaccugaggcc

SEQ ID NO: 1643198 - RNA, 12 nt, Human
cucauucuucug

SEQ ID NO: 1643199 - RNA, 18 nt, Human
cucauucuccuuguguua

SEQ ID NO: 1643200 - RNA, 22 nt, Human
cucauucuccuuguguuacuaa

SEQ ID NO: 1643201 - RNA, 17 nt, Human
cucauuuccaagcaagu

SEQ ID NO: 1643202 - RNA, 21 nt, Human
cucauuugucacacacuuugg

SEQ ID NO: 1643203 - RNA, 14 nt, Human
cucauuuccaagca

SEQ ID NO: 1643204 - RNA, 13 nt, Human
cucauuuccaagc

SEQ ID NO: 1643205 - RNA, 12 nt, Human
cucauuuccaag

SEQ ID NO: 1643206 - RNA, 16 nt, Human
cuccagagucagaagu

SEQ ID NO: 1643207 - RNA, 14 nt, Human
cuccacuggaugga

SEQ ID NO: 1643208 - RNA, 18 nt, Human
cuccagcucaccagcccc

SEQ ID NO: 1643209 - RNA, 16 nt, Human
cuccagcucaccagcc

SEQ ID NO: 1643210 - RNA, 15 nt, Human
cuccagcucaccagc

SEQ ID NO: 1643211 - RNA, 15 nt, Human
cuccagccccuggau

SEQ ID NO: 1643212 - RNA, 14 nt, Human
cuccagccccugga

SEQ ID NO: 1643213 - RNA, 13 nt, Human
cuccagccccugg

SEQ ID NO: 1643214 - RNA, 11 nt, Human
cuccagccccu

SEQ ID NO: 1643215 - RNA, 13 nt, Human
cuccacugccuuc

SEQ ID NO: 1643216 - RNA, 13 nt, Human
cuccacuggaugg

SEQ ID NO: 1643217 - RNA, 16 nt, Human
cuccacugccuucgau

SEQ ID NO: 1643218 - RNA, 15 nt, Human
cuccacugccuucga

SEQ ID NO: 1643219 - RNA, 14 nt, Human
cuccacugccuucg

SEQ ID NO: 1643220 - RNA, 14 nt, Human
cuccccucggagaa

SEQ ID NO: 1643221 - RNA, 20 nt, Human
cuccccagccccaucccaaa

SEQ ID NO: 1643222 - RNA, 23 nt, Human
cuccccugcuggguguggcgcag

SEQ ID NO: 1643223 - RNA, 21 nt, Human
cuccccugcuggguguggcgc

SEQ ID NO: 1643224 - RNA, 18 nt, Human
cucccucagucuggcccu

SEQ ID NO: 1643225 - RNA, 15 nt, Human
cucccuucauccuuc

SEQ ID NO: 1643226 - RNA, 23 nt, Human
cucccuucaaccauuccccaugg

SEQ ID NO: 1643227 - RNA, 22 nt, Human
cucccuucaaccauuccccaug

SEQ ID NO: 1643228 - RNA, 21 nt, Human
cucccuucaaccauuccccau

SEQ ID NO: 1643229 - RNA, 23 nt, Human
cucccgaauagcugggacuacag

SEQ ID NO: 1643230 - RNA, 20 nt, Human
cucccgaauagcugggacua

SEQ ID NO: 1643231 - RNA, 15 nt, Human
cucccgaguagcugg

SEQ ID NO: 1643232 - RNA, 16 nt, Human
cucccaucacuucccu

SEQ ID NO: 1643233 - RNA, 22 nt, Human
cucccaggcgccccuucccccu

SEQ ID NO: 1643234 - RNA, 20 nt, Human
cucccaggcgccccuucccc

SEQ ID NO: 1643235 - RNA, 19 nt, Human
cucccaggcgccccuuccc

SEQ ID NO: 1643236 - RNA, 17 nt, Human
cucccaggcgccccuuc

SEQ ID NO: 1643237 - RNA, 15 nt, Human
cucccaacucacccc

SEQ ID NO: 1643238 - RNA, 14 nt, Human
cucccaacucaccc

SEQ ID NO: 1643239 - RNA, 15 nt, Human
cucccacaaaggaga

SEQ ID NO: 1643240 - RNA, 16 nt, Human
cucccaacucacccca

SEQ ID NO: 1643241 - RNA, 23 nt, Human
cucccaaagugcugggauuacag

SEQ ID NO: 1643242 - RNA, 16 nt, Human
cucccaaagugcuggg

SEQ ID NO: 1643243 - RNA, 20 nt, Human
cuccauuuaauaauuauaug

SEQ ID NO: 1643244 - RNA, 13 nt, Human
cuccauuuaauaa

SEQ ID NO: 1643245 - RNA, 17 nt, Human
cuccaugcugccuccag

SEQ ID NO: 1643246 - RNA, 16 nt, Human
cuccaugcugccucca

SEQ ID NO: 1643247 - RNA, 15 nt, Human
cuccaugcugccucc

SEQ ID NO: 1643248 - RNA, 14 nt, Human
cuccaugcugccuc

SEQ ID NO: 1643249 - RNA, 19 nt, Human
cuccagcuggguuggaaaa

SEQ ID NO: 1643250 - RNA, 23 nt, Human
cuccagcuggccgggagccugau

SEQ ID NO: 1643251 - RNA, 22 nt, Human
cuccagcuggccgggagccuga

SEQ ID NO: 1643252 - RNA, 22 nt, Human
cucaggaaaucaaauaugcaaa

SEQ ID NO: 1643253 - RNA, 23 nt, Human
cucaggagcccugggaggcucug

SEQ ID NO: 1643254 - RNA, 22 nt, Human
cucaggagcccugggaggcucu

SEQ ID NO: 1643255 - RNA, 21 nt, Human
cucaggagcccugggaggcuc

SEQ ID NO: 1643256 - RNA, 20 nt, Human
cucaggagcccugggaggcu

SEQ ID NO: 1643257 - RNA, 17 nt, Human
cucaggagcccugggag

SEQ ID NO: 1643258 - RNA, 16 nt, Human
cucaggagcccuggga

SEQ ID NO: 1643259 - RNA, 15 nt, Human
cucaggagcccuggg

SEQ ID NO: 1643260 - RNA, 14 nt, Human
cucaggagcccugg

SEQ ID NO: 1643261 - RNA, 13 nt, Human
cucaggagcccug

SEQ ID NO: 1643262 - RNA, 12 nt, Human
cucaggagcccu

SEQ ID NO: 1643263 - RNA, 24 nt, Human
cucaggagcccugggaggcucugg

SEQ ID NO: 1643264 - RNA, 18 nt, Human
cucaggcaggugggaugg

SEQ ID NO: 1643265 - RNA, 15 nt, Human
cucaggcagguggga

SEQ ID NO: 1643266 - RNA, 20 nt, Human
cucagggccuggcucaggug

SEQ ID NO: 1643267 - RNA, 19 nt, Human
cucagggccuggcucaggu

SEQ ID NO: 1643268 - RNA, 18 nt, Human
cucagggccuggcucagg

SEQ ID NO: 1643269 - RNA, 13 nt, Human
cucagggccuggc

SEQ ID NO: 1643270 - RNA, 22 nt, Human
cucagggucccugguggcagcu

SEQ ID NO: 1643271 - RNA, 21 nt, Human
cucagggucccugguggcagc

SEQ ID NO: 1643272 - RNA, 20 nt, Human
cucagggucccugguggcag

SEQ ID NO: 1643273 - RNA, 14 nt, Human
cucagggccugguc

SEQ ID NO: 1643274 - RNA, 24 nt, Human
cucagggucccugguggcagcuca

SEQ ID NO: 1643275 - RNA, 24 nt, Human
cucagguaaucgaccugccucggc

SEQ ID NO: 1643276 - RNA, 22 nt, Human
cucagguaaucgaccugccucg

SEQ ID NO: 1643277 - RNA, 20 nt, Human
cucagguaaucgaccugccu

SEQ ID NO: 1643278 - RNA, 21 nt, Human
cucagguggggucacucuggc

SEQ ID NO: 1643279 - RNA, 20 nt, Human
cucagguggggucacucugg

SEQ ID NO: 1643280 - RNA, 19 nt, Human
cucagguggggucacucug

SEQ ID NO: 1643281 - RNA, 23 nt, Human
cucaggugauccacccaccucag

SEQ ID NO: 1643282 - RNA, 16 nt, Human
cucacugcagccucaa

SEQ ID NO: 1643283 - RNA, 15 nt, Human
cucacugcagccuca

SEQ ID NO: 1643284 - RNA, 20 nt, Human
cucacugcauccuccgccuc

SEQ ID NO: 1643285 - RNA, 15 nt, Human
cucacuguugcccag

SEQ ID NO: 1643286 - RNA, 14 nt, Human
cucacuguugccca

SEQ ID NO: 1643287 - RNA, 19 nt, Human
cucacuguugcccaggcug

SEQ ID NO: 1643288 - RNA, 18 nt, Human
cucacuguugcccaggcu

SEQ ID NO: 1643289 - RNA, 17 nt, Human
cucacuguugcccaggc

SEQ ID NO: 1643290 - RNA, 16 nt, Human
cucacuguugcccagg

SEQ ID NO: 1643291 - RNA, 19 nt, Human
cucagagagggugggagug

SEQ ID NO: 1643292 - RNA, 23 nt, Human
cucagagagggugggagugggcc

SEQ ID NO: 1643293 - RNA, 15 nt, Human
cucagagccaccccu

SEQ ID NO: 1643294 - RNA, 16 nt, Human
cucagaucuucugugg

SEQ ID NO: 1643295 - RNA, 22 nt, Human
cucagcauccuggcacccggcc

SEQ ID NO: 1643296 - RNA, 21 nt, Human
cucagcauccuggcacccggc

SEQ ID NO: 1643297 - RNA, 13 nt, Human
cucagcauccugg

SEQ ID NO: 1643298 - RNA, 20 nt, Human
cucagcaaaagaugcuucuc

SEQ ID NO: 1643299 - RNA, 19 nt, Human
cucagcaaaagaugcuucu

SEQ ID NO: 1643300 - RNA, 16 nt, Human
cucagcaggggagggu

SEQ ID NO: 1643301 - RNA, 21 nt, Human
cucagcaaaagaugcuucuca

SEQ ID NO: 1643302 - RNA, 23 nt, Human
cucagauuuuauuauguaaaucc

SEQ ID NO: 1643303 - RNA, 15 nt, Human
cucagcauccuggca

SEQ ID NO: 1643304 - RNA, 21 nt, Human
cucagcccucccugccccucc

SEQ ID NO: 1643305 - RNA, 20 nt, Human
cucagcccucccugccccuc

SEQ ID NO: 1643306 - RNA, 19 nt, Human
cucagcccucccugccccu

SEQ ID NO: 1643307 - RNA, 14 nt, Human
cucagcccucccug

SEQ ID NO: 1643308 - RNA, 21 nt, Human
cucagcggggacagcuccuuc

SEQ ID NO: 1643309 - RNA, 20 nt, Human
cucagcggggacagcuccuu

SEQ ID NO: 1643310 - RNA, 19 nt, Human
cucagcggggacagcuccu

SEQ ID NO: 1643311 - RNA, 18 nt, Human
cucagcggggacagcucc

SEQ ID NO: 1643312 - RNA, 16 nt, Human
cucagcggggacagcu

SEQ ID NO: 1643313 - RNA, 15 nt, Human
cucagcggggacagc

SEQ ID NO: 1643314 - RNA, 14 nt, Human
cucagcggggacag

SEQ ID NO: 1643315 - RNA, 23 nt, Human
cucagcggggacagcuccuucug

SEQ ID NO: 1643316 - RNA, 15 nt, Human
cucagcucccaaggc

SEQ ID NO: 1643317 - RNA, 19 nt, Human
cucagcucccaaggcucug

SEQ ID NO: 1643318 - RNA, 15 nt, Human
ccuuggacucauuuu

SEQ ID NO: 1643319 - RNA, 15 nt, Human
ccuuggauugucccc

SEQ ID NO: 1643320 - RNA, 22 nt, Human
ccuuggcucaaguccucuuuuc

SEQ ID NO: 1643321 - RNA, 19 nt, Human
ccuuggauuguccccgacc

SEQ ID NO: 1643322 - RNA, 21 nt, Human
ccuugacagggcacaccgggc

SEQ ID NO: 1643323 - RNA, 18 nt, Human
ccuugacagggcacaccg

SEQ ID NO: 1643324 - RNA, 18 nt, Human
ccuucucuccagccccug

SEQ ID NO: 1643325 - RNA, 17 nt, Human
ccuucucuccagccccu

SEQ ID NO: 1643326 - RNA, 23 nt, Human
ccuugacauuguagagcuucugg

SEQ ID NO: 1643327 - RNA, 16 nt, Human
ccuuggcugcagggag

SEQ ID NO: 1643328 - RNA, 14 nt, Human
ccuuggggagcagg

SEQ ID NO: 1643329 - RNA, 20 nt, Human
ccuuggugucgggcaugaca

SEQ ID NO: 1643330 - RNA, 19 nt, Human
ccuuggugucgggcaugac

SEQ ID NO: 1643331 - RNA, 21 nt, Human
ccuuggugucgggcaugacac

SEQ ID NO: 1643332 - RNA, 19 nt, Human
ccuucucuccagccccugg

SEQ ID NO: 1643333 - RNA, 18 nt, Human
ccuucggccuccauccug

SEQ ID NO: 1643334 - RNA, 17 nt, Human
ccuucggccuccauccu

SEQ ID NO: 1643335 - RNA, 13 nt, Human
ccuuccaggggug

SEQ ID NO: 1643336 - RNA, 18 nt, Human
ccuuccaugucgccucug

SEQ ID NO: 1643337 - RNA, 17 nt, Human
ccuuccauggacuuugu

SEQ ID NO: 1643338 - RNA, 16 nt, Human
ccuucucuccagcccc

SEQ ID NO: 1643339 - RNA, 15 nt, Human
ccuucucuccagccc

SEQ ID NO: 1643340 - RNA, 13 nt, Human
ccuucucuccagc

SEQ ID NO: 1643341 - RNA, 12 nt, Human
ccuucucuccag

SEQ ID NO: 1643342 - RNA, 19 nt, Human
ccuucauuuggcauucccc

SEQ ID NO: 1643343 - RNA, 20 nt, Human
ccugugccucugggacugga

SEQ ID NO: 1643344 - RNA, 20 nt, Human
ccugugggcccccaaaugga

SEQ ID NO: 1643345 - RNA, 20 nt, Human
ccuguggaugauaaaacaca

SEQ ID NO: 1643346 - RNA, 18 nt, Human
ccuguggaucaaauccag

SEQ ID NO: 1643347 - RNA, 23 nt, Human
cgaacauguuuuucuucucccuc

SEQ ID NO: 1643348 - RNA, 21 nt, Human
cgaacauguuuuucuucuccc

SEQ ID NO: 1643349 - RNA, 22 nt, Human
ccuuuuuuggcugcugaaggcu

SEQ ID NO: 1643350 - RNA, 20 nt, Human
ccuuuuuuggcugcugaagg

SEQ ID NO: 1643351 - RNA, 18 nt, Human
ccuuuuuuggcugcugaa

SEQ ID NO: 1643352 - RNA, 17 nt, Human
ccuuuuuuggcugcuga

SEQ ID NO: 1643353 - RNA, 23 nt, Human
cgaaagggacuuggaagcuccgc

SEQ ID NO: 1643354 - RNA, 14 nt, Human
cgaauauugcugau

SEQ ID NO: 1643355 - RNA, 12 nt, Human
cgaauauugcug

SEQ ID NO: 1643356 - RNA, 11 nt, Human
cgaauauugcu

SEQ ID NO: 1643357 - RNA, 16 nt, Human
cgaauagcugggacua

SEQ ID NO: 1643358 - RNA, 17 nt, Human
cgaauauugcugauggu

SEQ ID NO: 1643359 - RNA, 15 nt, Human
cgaauauugcugaug

SEQ ID NO: 1643360 - RNA, 23 nt, Human
ccuuugugaggaagccgcugggg

SEQ ID NO: 1643361 - RNA, 17 nt, Human
ccuuugugaggaagccg

SEQ ID NO: 1643362 - RNA, 16 nt, Human
ccuuugugaggaagcc

SEQ ID NO: 1643363 - RNA, 15 nt, Human
ccuuugugaggaagc

SEQ ID NO: 1643364 - RNA, 23 nt, Human
ccuuuguccccaccgcagacagg

SEQ ID NO: 1643365 - RNA, 22 nt, Human
ccuuuguccccaccgcagacag

SEQ ID NO: 1643366 - RNA, 14 nt, Human
ccuuugugaggaag

SEQ ID NO: 1643367 - RNA, 15 nt, Human
ccuuuuuuggcugcu

SEQ ID NO: 1643368 - RNA, 14 nt, Human
ccuuuguccccacc

SEQ ID NO: 1643369 - RNA, 18 nt, Human
ccuuuguccccaccgcag

SEQ ID NO: 1643370 - RNA, 16 nt, Human
ccuuuguccccaccgc

SEQ ID NO: 1643371 - RNA, 24 nt, Human
ccuuuguauucucuccuguaccuc

SEQ ID NO: 1643372 - RNA, 23 nt, Human
ccuuuguaaauugucagaugcug

SEQ ID NO: 1643373 - RNA, 22 nt, Human
ccuuuguauucucuccuguacc

SEQ ID NO: 1643374 - RNA, 23 nt, Human
ccuuuguauucucuccuguaccu

SEQ ID NO: 1643375 - RNA, 21 nt, Human
ccuuuguaaauugucagaugc

SEQ ID NO: 1643376 - RNA, 19 nt, Human
cgcugugcugcccugccca

SEQ ID NO: 1643377 - RNA, 23 nt, Human
cgcugugcugcccugcccaccug

SEQ ID NO: 1643378 - RNA, 21 nt, Human
cgcugugcugcccugcccacc

SEQ ID NO: 1643379 - RNA, 14 nt, Human
cgcugugcugcccu

SEQ ID NO: 1643380 - RNA, 13 nt, Human
cgcugugcugccc

SEQ ID NO: 1643381 - RNA, 11 nt, Human
cgcugugcugc

SEQ ID NO: 1643382 - RNA, 17 nt, Human
cggaauaguuggcuagg

SEQ ID NO: 1643383 - RNA, 16 nt, Human
cggaauaguuggcuag

SEQ ID NO: 1643384 - RNA, 14 nt, Human
cgcuuucuacccag

SEQ ID NO: 1643385 - RNA, 16 nt, Human
cgcuuucuacccagcg

SEQ ID NO: 1643386 - RNA, 17 nt, Human
cggagaaaggaagggcu

SEQ ID NO: 1643387 - RNA, 15 nt, Human
cggagaaaggaaggg

SEQ ID NO: 1643388 - RNA, 17 nt, Human
cggacuuagcugggaga

SEQ ID NO: 1643389 - RNA, 22 nt, Human
cggacagccacggccaggccag

SEQ ID NO: 1643390 - RNA, 21 nt, Human
cggacagccacggccaggcca

SEQ ID NO: 1643391 - RNA, 16 nt, Human
cggacuuagcugggag

SEQ ID NO: 1643392 - RNA, 21 nt, Human
cgcccagucuggaaugcagug

SEQ ID NO: 1643393 - RNA, 18 nt, Human
cgcccggcuaauuuuugu

SEQ ID NO: 1643394 - RNA, 19 nt, Human
cgcccagucuggaaugcag

SEQ ID NO: 1643395 - RNA, 13 nt, Human
cgcccagucugga

SEQ ID NO: 1643396 - RNA, 18 nt, Human
cgcccaacuaauuuuugu

SEQ ID NO: 1643397 - RNA, 19 nt, Human
cgcagcccugcagagggca

SEQ ID NO: 1643398 - RNA, 18 nt, Human
cgcagcccugcagagggc

SEQ ID NO: 1643399 - RNA, 24 nt, Human
cgcagcccugcuuugggcugcccu

SEQ ID NO: 1643400 - RNA, 15 nt, Human
cgcagcccugcuuug

SEQ ID NO: 1643401 - RNA, 13 nt, Human
cgcagcccugcuu

SEQ ID NO: 1643402 - RNA, 24 nt, Human
cgcuacccgggaagggggcuggga

SEQ ID NO: 1643403 - RNA, 21 nt, Human
cgcuacccgggaagggggcug

SEQ ID NO: 1643404 - RNA, 18 nt, Human
cgcuacccgggaaggggg

SEQ ID NO: 1643405 - RNA, 24 nt, Human
cgcguugaaauuguaauuauaucu

SEQ ID NO: 1643406 - RNA, 19 nt, Human
cgcuaaacuuuucugauag

SEQ ID NO: 1643407 - RNA, 18 nt, Human
cgcuaaacuuuucugaua

SEQ ID NO: 1643408 - RNA, 17 nt, Human
cgcuaaacuuuucugau

SEQ ID NO: 1643409 - RNA, 14 nt, Human
cgcgacaaugcaaa

SEQ ID NO: 1643410 - RNA, 15 nt, Human
cgcgacaaugcaaac

SEQ ID NO: 1643411 - RNA, 19 nt, Human
cgcgguggcucacgccugu

SEQ ID NO: 1643412 - RNA, 20 nt, Human
cggccaggccagagggagug

SEQ ID NO: 1643413 - RNA, 12 nt, Human
cggccaggccag

SEQ ID NO: 1643414 - RNA, 11 nt, Human
cggccaggcca

SEQ ID NO: 1643415 - RNA, 14 nt, Human
cggcuggcagccca

SEQ ID NO: 1643416 - RNA, 13 nt, Human
cggcuggccuggc

SEQ ID NO: 1643417 - RNA, 23 nt, Human
cggcuggcagcccaccccucaac

SEQ ID NO: 1643418 - RNA, 14 nt, Human
cggcuggccuggcc

SEQ ID NO: 1643419 - RNA, 20 nt, Human
cgggaagggggcugggacau

SEQ ID NO: 1643420 - RNA, 19 nt, Human
cgggaagggggcugggaca

SEQ ID NO: 1643421 - RNA, 16 nt, Human
cgggaagggggcuggg

SEQ ID NO: 1643422 - RNA, 18 nt, Human
cgggaauuuucaucuagg

SEQ ID NO: 1643423 - RNA, 20 nt, Human
cgggaauuuucaucuaggau

SEQ ID NO: 1643424 - RNA, 16 nt, Human
cgaggacagggaggug

SEQ ID NO: 1643425 - RNA, 19 nt, Human
cgagcccugguggcagugg

SEQ ID NO: 1643426 - RNA, 17 nt, Human
cgcagcccugcagaggg

SEQ ID NO: 1643427 - RNA, 20 nt, Human
cgcagcauauucaggaagcu

SEQ ID NO: 1643428 - RNA, 19 nt, Human
cgcagcauauucaggaagc

SEQ ID NO: 1643429 - RNA, 17 nt, Human
cgcacugggcuugggga

SEQ ID NO: 1643430 - RNA, 23 nt, Human
cgcacuucgggaggucgaggcag

SEQ ID NO: 1643431 - RNA, 13 nt, Human
cgcacugggcuug

SEQ ID NO: 1643432 - RNA, 13 nt, Human
ccugggcagcugc

SEQ ID NO: 1643433 - RNA, 14 nt, Human
ccugggcagcugcc

SEQ ID NO: 1643434 - RNA, 19 nt, Human
ccugggggcugggcagagg

SEQ ID NO: 1643435 - RNA, 21 nt, Human
ccugggggcugggcagaggaa

SEQ ID NO: 1643436 - RNA, 20 nt, Human
ccugggggcugggcagagga

SEQ ID NO: 1643437 - RNA, 16 nt, Human
ccugggcagaaggaag

SEQ ID NO: 1643438 - RNA, 18 nt, Human
ccugggagugagcugguu

SEQ ID NO: 1643439 - RNA, 16 nt, Human
ccugggagugagcugg

SEQ ID NO: 1643440 - RNA, 22 nt, Human
ccugggaggucaaggcugcagu

SEQ ID NO: 1643441 - RNA, 16 nt, Human
ccuggcccacugcauc

SEQ ID NO: 1643442 - RNA, 16 nt, Human
ccuggcuuuucacugc

SEQ ID NO: 1643443 - RNA, 18 nt, Human
ccuggcuuuucacugcug

SEQ ID NO: 1643444 - RNA, 17 nt, Human
ccuggcuuuucacugcu

SEQ ID NO: 1643445 - RNA, 23 nt, Human
ccuggccagaugcaccagcccuu

SEQ ID NO: 1643446 - RNA, 21 nt, Human
ccuggccagaugcaccagccc

SEQ ID NO: 1643447 - RNA, 14 nt, Human
ccuggcccacugca

SEQ ID NO: 1643448 - RNA, 13 nt, Human
ccuggcccacugc

SEQ ID NO: 1643449 - RNA, 13 nt, Human
ccuggccacgccc

SEQ ID NO: 1643450 - RNA, 13 nt, Human
ccuggcaugggaa

SEQ ID NO: 1643451 - RNA, 16 nt, Human
ccuggcacugcuucca

SEQ ID NO: 1643452 - RNA, 13 nt, Human
ccuggcacugcuu

SEQ ID NO: 1643453 - RNA, 17 nt, Human
ccuggcacugcuuccag

SEQ ID NO: 1643454 - RNA, 12 nt, Human
ccuggcacugcu

SEQ ID NO: 1643455 - RNA, 21 nt, Human
ccuggcacccggccccugcug

SEQ ID NO: 1643456 - RNA, 20 nt, Human
ccuggcacccggccccugcu

SEQ ID NO: 1643457 - RNA, 19 nt, Human
ccuggcacccggccccugc

SEQ ID NO: 1643458 - RNA, 16 nt, Human
ccuggagaacuagaga

SEQ ID NO: 1643459 - RNA, 13 nt, Human
ccuggagaacuag

SEQ ID NO: 1643460 - RNA, 12 nt, Human
ccuggagaacua

SEQ ID NO: 1643461 - RNA, 21 nt, Human
ccugcuaauuccccagauugc

SEQ ID NO: 1643462 - RNA, 20 nt, Human
ccugccuguugggccaggag

SEQ ID NO: 1643463 - RNA, 19 nt, Human
ccugccuguugggccagga

SEQ ID NO: 1643464 - RNA, 18 nt, Human
ccugccuguugggccagg

SEQ ID NO: 1643465 - RNA, 14 nt, Human
ccuggcaugggaau

SEQ ID NO: 1643466 - RNA, 18 nt, Human
ccugguggcagcugcggu

SEQ ID NO: 1643467 - RNA, 17 nt, Human
ccugguggcagcugcgg

SEQ ID NO: 1643468 - RNA, 16 nt, Human
ccugguggcagcugcg

SEQ ID NO: 1643469 - RNA, 15 nt, Human
ccugguggcagcugc

SEQ ID NO: 1643470 - RNA, 14 nt, Human
ccugguggcagcug

SEQ ID NO: 1643471 - RNA, 22 nt, Human
ccugguggcagcucaccucucc

SEQ ID NO: 1643472 - RNA, 21 nt, Human
ccugguggcagcucaccucuc

SEQ ID NO: 1643473 - RNA, 19 nt, Human
ccugguggcagcucaccuc

SEQ ID NO: 1643474 - RNA, 16 nt, Human
ccugucccccugacaa

SEQ ID NO: 1643475 - RNA, 15 nt, Human
ccugucccccugaca

SEQ ID NO: 1643476 - RNA, 14 nt, Human
ccugucccccugac

SEQ ID NO: 1643477 - RNA, 13 nt, Human
ccugucccccuga

SEQ ID NO: 1643478 - RNA, 12 nt, Human
ccugucccccug

SEQ ID NO: 1643479 - RNA, 16 nt, Human
ccuguagagugggagc

SEQ ID NO: 1643480 - RNA, 15 nt, Human
ccuguagagugggag

SEQ ID NO: 1643481 - RNA, 19 nt, Human
ccuguagagugggagcuga

SEQ ID NO: 1643482 - RNA, 13 nt, Human
ccuguagcccuaa

SEQ ID NO: 1643483 - RNA, 14 nt, Human
ccugguggcagugg

SEQ ID NO: 1643484 - RNA, 13 nt, Human
ccugguggcagug

SEQ ID NO: 1643485 - RNA, 15 nt, Human
ccugguggcaguggg

SEQ ID NO: 1643486 - RNA, 10 nt, Human
ccuguaccuc

SEQ ID NO: 1643487 - RNA, 12 nt, Human
ccuguaccucuu

SEQ ID NO: 1643488 - RNA, 14 nt, Human
ccugaggcuccacu

SEQ ID NO: 1643489 - RNA, 13 nt, Human
ccugaggcuccac

SEQ ID NO: 1643490 - RNA, 17 nt, Human
ccugaggcuccacuugg

SEQ ID NO: 1643491 - RNA, 16 nt, Human
ccugaggcugggcucc

SEQ ID NO: 1643492 - RNA, 15 nt, Human
ccugaggcugggcuc

SEQ ID NO: 1643493 - RNA, 14 nt, Human
ccugaggcugggcu

SEQ ID NO: 1643494 - RNA, 13 nt, Human
ccugaggcugggc

SEQ ID NO: 1643495 - RNA, 18 nt, Human
ccugaggcccagagggcc

SEQ ID NO: 1643496 - RNA, 17 nt, Human
ccugaggcccagagggc

SEQ ID NO: 1643497 - RNA, 16 nt, Human
ccugaggcccagaggg

SEQ ID NO: 1643498 - RNA, 15 nt, Human
ccugaggcccagagg

SEQ ID NO: 1643499 - RNA, 12 nt, Human
ccugagcuggga

SEQ ID NO: 1643500 - RNA, 18 nt, Human
ccugagccagauuucacu

SEQ ID NO: 1643501 - RNA, 16 nt, Human
ccugagccagauuuca

SEQ ID NO: 1643502 - RNA, 15 nt, Human
ccugagccagauuuc

SEQ ID NO: 1643503 - RNA, 20 nt, Human
ccugaagucacacagugagu

SEQ ID NO: 1643504 - RNA, 22 nt, Human
ccugaagucuuuguacagacaa

SEQ ID NO: 1643505 - RNA, 19 nt, Human
ccugaaguaagcaaagacu

SEQ ID NO: 1643506 - RNA, 20 nt, Human
ccugagccagauuucacucu

SEQ ID NO: 1643507 - RNA, 19 nt, Human
ccugccaauggacuaacuu

SEQ ID NO: 1643508 - RNA, 19 nt, Human
ccugccaccacgcccggcu

SEQ ID NO: 1643509 - RNA, 15 nt, Human
ccugccaccacgccc

SEQ ID NO: 1643510 - RNA, 23 nt, Human
ccugcauuugugaaaugauggug

SEQ ID NO: 1643511 - RNA, 13 nt, Human
ccugccacccugg

SEQ ID NO: 1643512 - RNA, 12 nt, Human
ccugccacccug

SEQ ID NO: 1643513 - RNA, 14 nt, Human
ccugccacccuggg

SEQ ID NO: 1643514 - RNA, 22 nt, Human
ccugccacccuggggagaaagu

SEQ ID NO: 1643515 - RNA, 16 nt, Human
ccugccacccugggga

SEQ ID NO: 1643516 - RNA, 21 nt, Human
ccugcacacgcuccuuccucu

SEQ ID NO: 1643517 - RNA, 19 nt, Human
ccugcaaagcccagcuuga

SEQ ID NO: 1643518 - RNA, 23 nt, Human
ccugcacaaagcccuuccauguc

SEQ ID NO: 1643519 - RNA, 14 nt, Human
ccugcaaagcccag

SEQ ID NO: 1643520 - RNA, 16 nt, Human
ccugcaaagcccagcu

SEQ ID NO: 1643521 - RNA, 15 nt, Human
ccugcaaagcccagc

SEQ ID NO: 1643522 - RNA, 20 nt, Human
ccugcacaaagcccuuccau

SEQ ID NO: 1643523 - RNA, 22 nt, Human
ccugcacaaagcccuuccaugu

SEQ ID NO: 1643524 - RNA, 18 nt, Human
ccugcaaagcccagcuug

SEQ ID NO: 1643525 - RNA, 17 nt, Human
ccugcaaagcccagcuu

SEQ ID NO: 1643526 - RNA, 13 nt, Human
ccugaaagaggaa

SEQ ID NO: 1643527 - RNA, 14 nt, Human
ccugaaagcccuga

SEQ ID NO: 1643528 - RNA, 13 nt, Human
ccugaaagcccug

SEQ ID NO: 1643529 - RNA, 18 nt, Human
ccugaaagcccugagcuu

SEQ ID NO: 1643530 - RNA, 21 nt, Human
ccugaaggccccgcccaggcu

SEQ ID NO: 1643531 - RNA, 20 nt, Human
ccugaaggccccgcccaggc

SEQ ID NO: 1643532 - RNA, 22 nt, Human
ccugaaggccccgcccaggcuu

SEQ ID NO: 1643533 - RNA, 19 nt, Human
ccugaaggccccgcccagg

SEQ ID NO: 1643534 - RNA, 18 nt, Human
ccugaaggccccgcccag

SEQ ID NO: 1643535 - RNA, 11 nt, Human
ccucuuccuga

SEQ ID NO: 1643536 - RNA, 15 nt, Human
ccugagcugggauga

SEQ ID NO: 1643537 - RNA, 17 nt, Human
ccugccccugagcccau

SEQ ID NO: 1643538 - RNA, 22 nt, Human
ccugccccuccucucugcccua

SEQ ID NO: 1643539 - RNA, 21 nt, Human
ccugccccuccucucugcccu

SEQ ID NO: 1643540 - RNA, 20 nt, Human
ccugccccuccucucugccc

SEQ ID NO: 1643541 - RNA, 19 nt, Human
ccugccccuccucucugcc

SEQ ID NO: 1643542 - RNA, 14 nt, Human
ccugccccucccuu

SEQ ID NO: 1643543 - RNA, 18 nt, Human
ccugccccuccucucugc

SEQ ID NO: 1643544 - RNA, 18 nt, Human
ccugccccucccuucaac

SEQ ID NO: 1643545 - RNA, 16 nt, Human
ccugccccucccuuca

SEQ ID NO: 1643546 - RNA, 15 nt, Human
ccugccccucccuuc

SEQ ID NO: 1643547 - RNA, 16 nt, Human
ccugcccggcugcgga

SEQ ID NO: 1643548 - RNA, 14 nt, Human
ccugcccggcugcg

SEQ ID NO: 1643549 - RNA, 15 nt, Human
ccugccaggcauggu

SEQ ID NO: 1643550 - RNA, 12 nt, Human
ccugccaggcau

SEQ ID NO: 1643551 - RNA, 14 nt, Human
ccugccuguugggc

SEQ ID NO: 1643552 - RNA, 22 nt, Human
ccugccuguucccauucuugca

SEQ ID NO: 1643553 - RNA, 14 nt, Human
ccugccucagccuc

SEQ ID NO: 1643554 - RNA, 13 nt, Human
ccugccucagccu

SEQ ID NO: 1643555 - RNA, 12 nt, Human
ccugccucagcc

SEQ ID NO: 1643556 - RNA, 22 nt, Human
ccugcccuuaccugccaggaag

SEQ ID NO: 1643557 - RNA, 21 nt, Human
ccugcccuuaccugccaggaa

SEQ ID NO: 1643558 - RNA, 19 nt, Human
ccugcccuuaccugccagg

SEQ ID NO: 1643559 - RNA, 15 nt, Human
ccugcccugugggcc

SEQ ID NO: 1643560 - RNA, 14 nt, Human
ccugcccugugggc

SEQ ID NO: 1643561 - RNA, 12 nt, Human
ccugcccugugg

SEQ ID NO: 1643562 - RNA, 11 nt, Human
ccugcccugug

SEQ ID NO: 1643563 - RNA, 23 nt, Human
ccugcccugguuuccugcccugg

SEQ ID NO: 1643564 - RNA, 22 nt, Human
ccugcccugguuuccugcccug

SEQ ID NO: 1643565 - RNA, 21 nt, Human
ccugcccugguuuccugcccu

SEQ ID NO: 1643566 - RNA, 20 nt, Human
ccugcccugguuuccugccc

SEQ ID NO: 1643567 - RNA, 19 nt, Human
ccugcccugguuuccugcc

SEQ ID NO: 1643568 - RNA, 14 nt, Human
ccugcccugguuuc

SEQ ID NO: 1643569 - RNA, 22 nt, Human
ccugcccugggaggcagugaug

SEQ ID NO: 1643570 - RNA, 20 nt, Human
ccugcccugggaggcaguga

SEQ ID NO: 1643571 - RNA, 15 nt, Human
ccugcccugggaggc

SEQ ID NO: 1643572 - RNA, 14 nt, Human
ccugcccugggagg

SEQ ID NO: 1643573 - RNA, 12 nt, Human
ccugcccuggga

SEQ ID NO: 1643574 - RNA, 10 nt, Human
ccugcccugg

SEQ ID NO: 1643575 - RNA, 22 nt, Human
ccugccuguugggccaggagcc

SEQ ID NO: 1643576 - RNA, 18 nt, Human
gaaaauauuuguaucaca

SEQ ID NO: 1643577 - RNA, 23 nt, Human
gaaaaguuuaauauuaaagccau

SEQ ID NO: 1643578 - RNA, 22 nt, Human
gaaaaucuacacuccagugaga

SEQ ID NO: 1643579 - RNA, 22 nt, Human
gaaaaucagccugcuccagcug

SEQ ID NO: 1643580 - RNA, 20 nt, Human
gaaaaucagccugcuccagc

SEQ ID NO: 1643581 - RNA, 18 nt, Human
gaaaaucuuauaauuuaa

SEQ ID NO: 1643582 - RNA, 22 nt, Human
gaaaacguggcugcuucaagga

SEQ ID NO: 1643583 - RNA, 20 nt, Human
gaaaacguggcugcuucaag

SEQ ID NO: 1643584 - RNA, 24 nt, Human
gaaaacacuguucucugcccucca

SEQ ID NO: 1643585 - RNA, 15 nt, Human
gaaaaguugaauuuu

SEQ ID NO: 1643586 - RNA, 15 nt, Human
gaaaaguuuaauauu

SEQ ID NO: 1643587 - RNA, 14 nt, Human
gaaaaguugaauuu

SEQ ID NO: 1643588 - RNA, 22 nt, Human
gaaaaguuuaauauuaaagcca

SEQ ID NO: 1643589 - RNA, 21 nt, Human
gaaaaguuuaauauuaaagcc

SEQ ID NO: 1643590 - RNA, 20 nt, Human
gaaaaguuuaauauuaaagc

SEQ ID NO: 1643591 - RNA, 19 nt, Human
gaaaaguuuaauauuaaag

SEQ ID NO: 1643592 - RNA, 22 nt, Human
cuuuuuuggcugcugaaggcuc

SEQ ID NO: 1643593 - RNA, 20 nt, Human
cuuuuuuggcugcugaaggc

SEQ ID NO: 1643594 - RNA, 17 nt, Human
cuuuuuuggcugcugaa

SEQ ID NO: 1643595 - RNA, 22 nt, Human
cuuuuuggcauaacauaaaucu

SEQ ID NO: 1643596 - RNA, 20 nt, Human
cuuuuuggcauaacauaaau

SEQ ID NO: 1643597 - RNA, 16 nt, Human
cuuuuuggcauaacau

SEQ ID NO: 1643598 - RNA, 18 nt, Human
gaaaacacuguucucugc

SEQ ID NO: 1643599 - RNA, 19 nt, Human
gaaaacacauuuuucuuag

SEQ ID NO: 1643600 - RNA, 18 nt, Human
gaaaacacauuuuucuua

SEQ ID NO: 1643601 - RNA, 15 nt, Human
gaaaaaggaggaaga

SEQ ID NO: 1643602 - RNA, 12 nt, Human
gaaaaaggagga

SEQ ID NO: 1643603 - RNA, 11 nt, Human
cuuuuguucuu

SEQ ID NO: 1643604 - RNA, 12 nt, Human
cuuuuguucuug

SEQ ID NO: 1643605 - RNA, 15 nt, Human
cuuuguucagccugc

SEQ ID NO: 1643606 - RNA, 18 nt, Human
cuuuguuaguuucuccaa

SEQ ID NO: 1643607 - RNA, 20 nt, Human
cuuuuguucuugguuuguaa

SEQ ID NO: 1643608 - RNA, 17 nt, Human
cuuuuuauggccuguga

SEQ ID NO: 1643609 - RNA, 16 nt, Human
gaaacacaacuauauu

SEQ ID NO: 1643610 - RNA, 19 nt, Human
gaaacccagcucuggucca

SEQ ID NO: 1643611 - RNA, 18 nt, Human
gaaacccagcucuggucc

SEQ ID NO: 1643612 - RNA, 16 nt, Human
gaaacccagcucuggu

SEQ ID NO: 1643613 - RNA, 15 nt, Human
gaaacccagcucugg

SEQ ID NO: 1643614 - RNA, 14 nt, Human
gaaacccagcucug

SEQ ID NO: 1643615 - RNA, 13 nt, Human
gaaacccagcucu

SEQ ID NO: 1643616 - RNA, 14 nt, Human
gaaacccugucucu

SEQ ID NO: 1643617 - RNA, 23 nt, Human
gaaacccagcucugguccauaga

SEQ ID NO: 1643618 - RNA, 23 nt, Human
gaaacucguuaauuuguaguguu

SEQ ID NO: 1643619 - RNA, 19 nt, Human
gaaacuaggugcauauuua

SEQ ID NO: 1643620 - RNA, 18 nt, Human
gaaacggaugauuucuau

SEQ ID NO: 1643621 - RNA, 17 nt, Human
gaaacggaugauuucua

SEQ ID NO: 1643622 - RNA, 17 nt, Human
gaaagagaacuuccaga

SEQ ID NO: 1643623 - RNA, 19 nt, Human
gaaagacuuuuccaacccu

SEQ ID NO: 1643624 - RNA, 21 nt, Human
gaaagaggaaugaaguacuca

SEQ ID NO: 1643625 - RNA, 20 nt, Human
gaaagaggcagcuugaaacu

SEQ ID NO: 1643626 - RNA, 17 nt, Human
gaaagcagaacagugau

SEQ ID NO: 1643627 - RNA, 22 nt, Human
gaaagcagaacagugauuacca

SEQ ID NO: 1643628 - RNA, 16 nt, Human
gaaagaguaggaagac

SEQ ID NO: 1643629 - RNA, 15 nt, Human
gaaagaguaggaaga

SEQ ID NO: 1643630 - RNA, 21 nt, Human
gaaagaguacucuuguuuccu

SEQ ID NO: 1643631 - RNA, 14 nt, Human
gaaagcagggacuu

SEQ ID NO: 1643632 - RNA, 22 nt, Human
gaaagcccugagcuuucugcua

SEQ ID NO: 1643633 - RNA, 21 nt, Human
gaaagcccugagcuuucugcu

SEQ ID NO: 1643634 - RNA, 17 nt, Human
gaaagcccugagcuuuc

SEQ ID NO: 1643635 - RNA, 21 nt, Human
gaaagcuugcccuggugccuc

SEQ ID NO: 1643636 - RNA, 17 nt, Human
gaaagcccugugcucca

SEQ ID NO: 1643637 - RNA, 19 nt, Human
cuuuauaauucuacuuuga

SEQ ID NO: 1643638 - RNA, 15 nt, Human
cuuuagcgcccaguu

SEQ ID NO: 1643639 - RNA, 14 nt, Human
cuuuagcgcccagu

SEQ ID NO: 1643640 - RNA, 15 nt, Human
cuuuaugcacaaaau

SEQ ID NO: 1643641 - RNA, 23 nt, Human
cuuuaucuugaauaauguaagac

SEQ ID NO: 1643642 - RNA, 21 nt, Human
cuuuaucuugaauaauguaag

SEQ ID NO: 1643643 - RNA, 18 nt, Human
cuuuaucuugaauaaugu

SEQ ID NO: 1643644 - RNA, 13 nt, Human
cuuuacuauggcc

SEQ ID NO: 1643645 - RNA, 22 nt, Human
cuuuaccuuuuuuauacauaaa

SEQ ID NO: 1643646 - RNA, 22 nt, Human
cuuguuagaucuaguucacucu

SEQ ID NO: 1643647 - RNA, 19 nt, Human
cuugaguuuaaauuguaau

SEQ ID NO: 1643648 - RNA, 23 nt, Human
cuuggggggcugaggugggagga

SEQ ID NO: 1643649 - RNA, 16 nt, Human
cuuguaaauagcucag

SEQ ID NO: 1643650 - RNA, 21 nt, Human
cuuguaaauagcucagguguc

SEQ ID NO: 1643651 - RNA, 22 nt, Human
cuuguacauaaugcgugcauac

SEQ ID NO: 1643652 - RNA, 19 nt, Human
cuuguacauaaugcgugca

SEQ ID NO: 1643653 - RNA, 21 nt, Human
cuuguacauaaugcgugcaua

SEQ ID NO: 1643654 - RNA, 18 nt, Human
cuuguaaauagcucaggu

SEQ ID NO: 1643655 - RNA, 17 nt, Human
cuuguaaauagcucagg

SEQ ID NO: 1643656 - RNA, 15 nt, Human
cuuguacauaaugcg

SEQ ID NO: 1643657 - RNA, 12 nt, Human
cuuguacauaau

SEQ ID NO: 1643658 - RNA, 23 nt, Human
cuugucaauaaaauccauacauu

SEQ ID NO: 1643659 - RNA, 17 nt, Human
cuuguacuuuauuuucu

SEQ ID NO: 1643660 - RNA, 12 nt, Human
cuuguguaaaua

SEQ ID NO: 1643661 - RNA, 21 nt, Human
cuuguguaaauacaauuuugu

SEQ ID NO: 1643662 - RNA, 16 nt, Human
cuuguguaaauacaau

SEQ ID NO: 1643663 - RNA, 14 nt, Human
cuuguguaaauaca

SEQ ID NO: 1643664 - RNA, 16 nt, Human
cuuucucuuucguuac

SEQ ID NO: 1643665 - RNA, 15 nt, Human
cuuuccugaggcugg

SEQ ID NO: 1643666 - RNA, 13 nt, Human
cuuuccugaggcu

SEQ ID NO: 1643667 - RNA, 17 nt, Human
cuuucuggcuaugcauu

SEQ ID NO: 1643668 - RNA, 18 nt, Human
cuuucuggcuaugcauuu

SEQ ID NO: 1643669 - RNA, 19 nt, Human
cuuucuggcuaugcauuug

SEQ ID NO: 1643670 - RNA, 20 nt, Human
cuuucuggcuaugcauuuga

SEQ ID NO: 1643671 - RNA, 20 nt, Human
cuuucugggcaccggggccu

SEQ ID NO: 1643672 - RNA, 11 nt, Human
cuuucuuccuc

SEQ ID NO: 1643673 - RNA, 16 nt, Human
cuuucccucccuuccu

SEQ ID NO: 1643674 - RNA, 14 nt, Human
cuuucccucccuuc

SEQ ID NO: 1643675 - RNA, 13 nt, Human
cuuucccucccuu

SEQ ID NO: 1643676 - RNA, 11 nt, Human
cuuucccuccc

SEQ ID NO: 1643677 - RNA, 12 nt, Human
cuuuccugaggc

SEQ ID NO: 1643678 - RNA, 15 nt, Human
cuuuccaucuacccu

SEQ ID NO: 1643679 - RNA, 14 nt, Human
cuuugaccucugca

SEQ ID NO: 1643680 - RNA, 15 nt, Human
cuuugaccucugcag

SEQ ID NO: 1643681 - RNA, 15 nt, Human
cuuucuuccucugcu

SEQ ID NO: 1643682 - RNA, 14 nt, Human
cuuucuuccucugc

SEQ ID NO: 1643683 - RNA, 13 nt, Human
cuuucuuccucug

SEQ ID NO: 1643684 - RNA, 12 nt, Human
cuuucuuccucu

SEQ ID NO: 1643685 - RNA, 17 nt, Human
cuuugaccucugcagca

SEQ ID NO: 1643686 - RNA, 18 nt, Human
cuuugaccucugcagcaa

SEQ ID NO: 1643687 - RNA, 20 nt, Human
cuuugaccucugcagcaaua

SEQ ID NO: 1643688 - RNA, 24 nt, Human
cuuugaccucugcagcaauaaagc

SEQ ID NO: 1643689 - RNA, 20 nt, Human
cuuugcagacaggcaagcac

SEQ ID NO: 1643690 - RNA, 22 nt, Human
cuuugcauaacguauaaaagcc

SEQ ID NO: 1643691 - RNA, 15 nt, Human
cuuuguccccaccgc

SEQ ID NO: 1643692 - RNA, 20 nt, Human
cuuugucuacaccauuaugu

SEQ ID NO: 1643693 - RNA, 23 nt, Human
cuuugucuacaccauuaugugcg

SEQ ID NO: 1643694 - RNA, 15 nt, Human
cuuugugaggaagcc

SEQ ID NO: 1643695 - RNA, 19 nt, Human
cuuugugaggaagccgcug

SEQ ID NO: 1643696 - RNA, 22 nt, Human
cuuugugcugggguuaucugaa

SEQ ID NO: 1643697 - RNA, 20 nt, Human
cuuugugcugggguuaucug

SEQ ID NO: 1643698 - RNA, 15 nt, Human
cuuugugcugggguu

SEQ ID NO: 1643699 - RNA, 19 nt, Human
cuuuggcuauuagagauca

SEQ ID NO: 1643700 - RNA, 14 nt, Human
cuuuguccccaccg

SEQ ID NO: 1643701 - RNA, 17 nt, Human
cuucccuacaguugaaa

SEQ ID NO: 1643702 - RNA, 23 nt, Human
cuucccgcucagcccucccugcc

SEQ ID NO: 1643703 - RNA, 19 nt, Human
cuucccgcucagcccuccc

SEQ ID NO: 1643704 - RNA, 19 nt, Human
cuuccuaauuccacagcug

SEQ ID NO: 1643705 - RNA, 18 nt, Human
cuuccuaauuccacagcu

SEQ ID NO: 1643706 - RNA, 17 nt, Human
cuuccuaauuccacagc

SEQ ID NO: 1643707 - RNA, 13 nt, Human
cuuccuaauucca

SEQ ID NO: 1643708 - RNA, 13 nt, Human
cuuccucccucau

SEQ ID NO: 1643709 - RNA, 21 nt, Human
cuuccaggggugggacacccu

SEQ ID NO: 1643710 - RNA, 17 nt, Human
cuuccaggggugggaca

SEQ ID NO: 1643711 - RNA, 15 nt, Human
cuuccagggguggga

SEQ ID NO: 1643712 - RNA, 14 nt, Human
cuuccagggguggg

SEQ ID NO: 1643713 - RNA, 19 nt, Human
cuuccaggcugggagagcc

SEQ ID NO: 1643714 - RNA, 16 nt, Human
cuuccaggcugggaga

SEQ ID NO: 1643715 - RNA, 15 nt, Human
cuuccaggcugggag

SEQ ID NO: 1643716 - RNA, 16 nt, Human
cuucaguggcagcugc

SEQ ID NO: 1643717 - RNA, 15 nt, Human
cuucaguggcagcug

SEQ ID NO: 1643718 - RNA, 14 nt, Human
cuucaguggcagcu

SEQ ID NO: 1643719 - RNA, 13 nt, Human
cuucaguggcagc

SEQ ID NO: 1643720 - RNA, 22 nt, Human
cuucagugccuuauggaacacu

SEQ ID NO: 1643721 - RNA, 18 nt, Human
cuucagugccuuauggaa

SEQ ID NO: 1643722 - RNA, 23 nt, Human
cuucaguaagccgugauuuucau

SEQ ID NO: 1643723 - RNA, 16 nt, Human
cuucaguaagccguga

SEQ ID NO: 1643724 - RNA, 15 nt, Human
cuucagggagugagg

SEQ ID NO: 1643725 - RNA, 22 nt, Human
cuucaggcucuucuccuuucac

SEQ ID NO: 1643726 - RNA, 19 nt, Human
cuucaggcucuucuccuuu

SEQ ID NO: 1643727 - RNA, 21 nt, Human
cuuccacaagagcccaggccu

SEQ ID NO: 1643728 - RNA, 19 nt, Human
cuuccacaagagcccaggc

SEQ ID NO: 1643729 - RNA, 17 nt, Human
cuuccacaagagcccag

SEQ ID NO: 1643730 - RNA, 17 nt, Human
cuucaguggcagcugcu

SEQ ID NO: 1643731 - RNA, 14 nt, Human
cuuccaggcuggga

SEQ ID NO: 1643732 - RNA, 12 nt, Human
cuuccaggcugg

SEQ ID NO: 1643733 - RNA, 22 nt, Human
cuuccacaagagcccaggccuc

SEQ ID NO: 1643734 - RNA, 15 nt, Human
cuuauuucauuucuu

SEQ ID NO: 1643735 - RNA, 15 nt, Human
cuucaaauauuuccc

SEQ ID NO: 1643736 - RNA, 17 nt, Human
cuucaaagcaaaugucu

SEQ ID NO: 1643737 - RNA, 14 nt, Human
cuuauuucauuucu

SEQ ID NO: 1643738 - RNA, 18 nt, Human
cuuauuuaaugaaagacu

SEQ ID NO: 1643739 - RNA, 17 nt, Human
cuuauuuaaugaaagac

SEQ ID NO: 1643740 - RNA, 23 nt, Human
cuucacagaugggugcuuggagg

SEQ ID NO: 1643741 - RNA, 16 nt, Human
cuucaaggauccugag

SEQ ID NO: 1643742 - RNA, 15 nt, Human
cuucaaggauccuga

SEQ ID NO: 1643743 - RNA, 13 nt, Human
cuucaaggauccu

SEQ ID NO: 1643744 - RNA, 10 nt, Human
cuucaaggau

SEQ ID NO: 1643745 - RNA, 16 nt, Human
cuucaacucccugccc

SEQ ID NO: 1643746 - RNA, 20 nt, Human
cuucaaccauuccccauggg

SEQ ID NO: 1643747 - RNA, 16 nt, Human
cuucaaccauucccca

SEQ ID NO: 1643748 - RNA, 22 nt, Human
cuuagaugcaguucugaagaag

SEQ ID NO: 1643749 - RNA, 13 nt, Human
cuuagauguauau

SEQ ID NO: 1643750 - RNA, 16 nt, Human
cuuagucacugagaca

SEQ ID NO: 1643751 - RNA, 19 nt, Human
cuuagauguauauauuucc

SEQ ID NO: 1643752 - RNA, 16 nt, Human
cuguucuggcagaguu

SEQ ID NO: 1643753 - RNA, 16 nt, Human
cuguucugcacacagc

SEQ ID NO: 1643754 - RNA, 19 nt, Human
cuuagucacugagacagcc

SEQ ID NO: 1643755 - RNA, 18 nt, Human
cuuagucacugagacagc

SEQ ID NO: 1643756 - RNA, 20 nt, Human
cuuagucacugagacagccc

SEQ ID NO: 1643757 - RNA, 19 nt, Human
cuuauaggaauugacccac

SEQ ID NO: 1643758 - RNA, 14 nt, Human
cuuauagacaacau

SEQ ID NO: 1643759 - RNA, 19 nt, Human
cuuauaucuauauuuuaca

SEQ ID NO: 1643760 - RNA, 13 nt, Human
cuuauauuaugga

SEQ ID NO: 1643761 - RNA, 13 nt, Human
cuucuguggcuca

SEQ ID NO: 1643762 - RNA, 21 nt, Human
cuucuguggguuucuaaagcu

SEQ ID NO: 1643763 - RNA, 14 nt, Human
cuucuguggguuuc

SEQ ID NO: 1643764 - RNA, 13 nt, Human
cuucuguggguuu

SEQ ID NO: 1643765 - RNA, 22 nt, Human
cuucuguggcucacagaacccu

SEQ ID NO: 1643766 - RNA, 15 nt, Human
cuucuguggcucaca

SEQ ID NO: 1643767 - RNA, 15 nt, Human
cuucuguugcugccu

SEQ ID NO: 1643768 - RNA, 18 nt, Human
cuucuuuaauuuuggaau

SEQ ID NO: 1643769 - RNA, 17 nt, Human
cuucuuuaauuuuggaa

SEQ ID NO: 1643770 - RNA, 16 nt, Human
cuucuuuaauuuugga

SEQ ID NO: 1643771 - RNA, 15 nt, Human
cuucuuuaauuuugg

SEQ ID NO: 1643772 - RNA, 23 nt, Human
cuugaaaacacuguucucugccc

SEQ ID NO: 1643773 - RNA, 14 nt, Human
cuugaaaacacugu

SEQ ID NO: 1643774 - RNA, 22 nt, Human
cuucuuuauaauucuacuuuga

SEQ ID NO: 1643775 - RNA, 19 nt, Human
cuucuuuaauuuuggaauu

SEQ ID NO: 1643776 - RNA, 18 nt, Human
cuugaaaaaugcauguug

SEQ ID NO: 1643777 - RNA, 12 nt, Human
cuugaaaaaugc

SEQ ID NO: 1643778 - RNA, 18 nt, Human
cuugaaaauuaacaugaa

SEQ ID NO: 1643779 - RNA, 13 nt, Human
cuugaaaauuaac

SEQ ID NO: 1643780 - RNA, 12 nt, Human
cuugaaaauuaa

SEQ ID NO: 1643781 - RNA, 13 nt, Human
cuugaacuccugg

SEQ ID NO: 1643782 - RNA, 16 nt, Human
cuugaacuccugaccu

SEQ ID NO: 1643783 - RNA, 13 nt, Human
cuugaacuccuga

SEQ ID NO: 1643784 - RNA, 17 nt, Human
cuugaacuuugaccucu

SEQ ID NO: 1643785 - RNA, 21 nt, Human
cuugaacuuugaccucugcag

SEQ ID NO: 1643786 - RNA, 18 nt, Human
cuugaacuccugaccuca

SEQ ID NO: 1643787 - RNA, 13 nt, Human
cuugaccucaggu

SEQ ID NO: 1643788 - RNA, 21 nt, Human
cuugaccgugaggccagagac

SEQ ID NO: 1643789 - RNA, 20 nt, Human
cuugaccgugaggccagaga

SEQ ID NO: 1643790 - RNA, 18 nt, Human
cuugaccgugaggccaga

SEQ ID NO: 1643791 - RNA, 23 nt, Human
cuugaccauucuccaccugccag

SEQ ID NO: 1643792 - RNA, 22 nt, Human
cuugaccauucuccaccugcca

SEQ ID NO: 1643793 - RNA, 17 nt, Human
cuugaccgugaggccag

SEQ ID NO: 1643794 - RNA, 16 nt, Human
cuugaagacuuuucuu

SEQ ID NO: 1643795 - RNA, 20 nt, Human
cuugaggguugggcuggugu

SEQ ID NO: 1643796 - RNA, 19 nt, Human
cuugaggguugggcuggug

SEQ ID NO: 1643797 - RNA, 21 nt, Human
cuugaggguugggcugguguc

SEQ ID NO: 1643798 - RNA, 15 nt, Human
cuugagccuugaacu

SEQ ID NO: 1643799 - RNA, 17 nt, Human
cuugagccuugaacuuu

SEQ ID NO: 1643800 - RNA, 18 nt, Human
cuugagccuugaacuuug

SEQ ID NO: 1643801 - RNA, 22 nt, Human
cuucugucuucacaacagauua

SEQ ID NO: 1643802 - RNA, 21 nt, Human
cuucugucuucacaacagauu

SEQ ID NO: 1643803 - RNA, 18 nt, Human
cuucugucuucacaacag

SEQ ID NO: 1643804 - RNA, 21 nt, Human
cuucuguccuacucuguguca

SEQ ID NO: 1643805 - RNA, 19 nt, Human
cuucuguccuacucugugu

SEQ ID NO: 1643806 - RNA, 18 nt, Human
cuucuguccuacucugug

SEQ ID NO: 1643807 - RNA, 17 nt, Human
cuucuguccuacucugu

SEQ ID NO: 1643808 - RNA, 16 nt, Human
cuucuguccuacucug

SEQ ID NO: 1643809 - RNA, 20 nt, Human
cuucuguacgucugacaggc

SEQ ID NO: 1643810 - RNA, 18 nt, Human
cuucuguacgucugacag

SEQ ID NO: 1643811 - RNA, 15 nt, Human
cuucuguacgucuga

SEQ ID NO: 1643812 - RNA, 14 nt, Human
cuucuguacgucug

SEQ ID NO: 1643813 - RNA, 21 nt, Human
cuucuguacgucugacaggca

SEQ ID NO: 1643814 - RNA, 13 nt, Human
cuucugcuucagc

SEQ ID NO: 1643815 - RNA, 23 nt, Human
cuucuggguuccuuccucugagc

SEQ ID NO: 1643816 - RNA, 17 nt, Human
cuucuggguuccuuccu

SEQ ID NO: 1643817 - RNA, 16 nt, Human
cuucuggguuccuucc

SEQ ID NO: 1643818 - RNA, 14 nt, Human
cuucugguugaugc

SEQ ID NO: 1643819 - RNA, 20 nt, Human
cuucuccacuuucuagccag

SEQ ID NO: 1643820 - RNA, 11 nt, Human
cuucuccacuu

SEQ ID NO: 1643821 - RNA, 13 nt, Human
cuucuccacugga

SEQ ID NO: 1643822 - RNA, 15 nt, Human
cuucuccacuggaug

SEQ ID NO: 1643823 - RNA, 14 nt, Human
cuucuccacuggau

SEQ ID NO: 1643824 - RNA, 15 nt, Human
cuuccucccucauuc

SEQ ID NO: 1643825 - RNA, 14 nt, Human
cuucuccaggcugu

SEQ ID NO: 1643826 - RNA, 13 nt, Human
cuucuccaggcug

SEQ ID NO: 1643827 - RNA, 12 nt, Human
cuucuccaggcu

SEQ ID NO: 1643828 - RNA, 17 nt, Human
cuucuccacuggaugga

SEQ ID NO: 1643829 - RNA, 19 nt, Human
cuucucuccagccccugga

SEQ ID NO: 1643830 - RNA, 17 nt, Human
cuucucuccagccccug

SEQ ID NO: 1643831 - RNA, 15 nt, Human
cuucucuccagcccc

SEQ ID NO: 1643832 - RNA, 13 nt, Human
cuucucuccagcc

SEQ ID NO: 1643833 - RNA, 19 nt, Human
cuucuccuucaccuuuguc

SEQ ID NO: 1643834 - RNA, 13 nt, Human
cuucucugaagga

SEQ ID NO: 1643835 - RNA, 20 nt, Human
cuguuaaaagaugaaaauau

SEQ ID NO: 1643836 - RNA, 23 nt, Human
cuguuaaaagaugaaaauauuug

SEQ ID NO: 1643837 - RNA, 21 nt, Human
cuguuaaaagaugaaaauauu

SEQ ID NO: 1643838 - RNA, 20 nt, Human
cugugugugcgccuacagga

SEQ ID NO: 1643839 - RNA, 23 nt, Human
cugugucuugcaauggcagccuu

SEQ ID NO: 1643840 - RNA, 22 nt, Human
cugugucuugcaauggcagccu

SEQ ID NO: 1643841 - RNA, 21 nt, Human
cugugucuugcaauggcagcc

SEQ ID NO: 1643842 - RNA, 23 nt, Human
cugugggcgugagaccugccccu

SEQ ID NO: 1643843 - RNA, 15 nt, Human
cuguguggcagucug

SEQ ID NO: 1643844 - RNA, 23 nt, Human
cugugugcucaggagcccuggga

SEQ ID NO: 1643845 - RNA, 21 nt, Human
cugugugcucaggagcccugg

SEQ ID NO: 1643846 - RNA, 20 nt, Human
cugugugcucaggagcccug

SEQ ID NO: 1643847 - RNA, 16 nt, Human
cugugugcucaggagc

SEQ ID NO: 1643848 - RNA, 19 nt, Human
cugugugcucaggagcccu

SEQ ID NO: 1643849 - RNA, 13 nt, Human
cuguucucugccc

SEQ ID NO: 1643850 - RNA, 17 nt, Human
cuguucucugcccucca

SEQ ID NO: 1643851 - RNA, 16 nt, Human
cuguucucugcccucc

SEQ ID NO: 1643852 - RNA, 15 nt, Human
cuguucucugcccuc

SEQ ID NO: 1643853 - RNA, 14 nt, Human
cuguucucugcccu

SEQ ID NO: 1643854 - RNA, 19 nt, Human
cuguucucugcccuccaag

SEQ ID NO: 1643855 - RNA, 18 nt, Human
cuguucucugcccuccaa

SEQ ID NO: 1643856 - RNA, 20 nt, Human
cuguucucugcccuccaaga

SEQ ID NO: 1643857 - RNA, 21 nt, Human
cuguucagcugguugagguuu

SEQ ID NO: 1643858 - RNA, 19 nt, Human
cuguucagcugguugaggu

SEQ ID NO: 1643859 - RNA, 13 nt, Human
cuguuacugucuu

SEQ ID NO: 1643860 - RNA, 23 nt, Human
cuguucaugaaagauucaaugcc

SEQ ID NO: 1643861 - RNA, 18 nt, Human
cuguucaugaaagauuca

SEQ ID NO: 1643862 - RNA, 17 nt, Human
cuguucaugaaagauuc

SEQ ID NO: 1643863 - RNA, 18 nt, Human
cuguucccauucuugcau

SEQ ID NO: 1643864 - RNA, 18 nt, Human
cugugccaugugccaggu

SEQ ID NO: 1643865 - RNA, 16 nt, Human
cugugccaugugccag

SEQ ID NO: 1643866 - RNA, 14 nt, Human
cugugccauuuugu

SEQ ID NO: 1643867 - RNA, 22 nt, Human
cugugccauuuuguauuuuacu

SEQ ID NO: 1643868 - RNA, 20 nt, Human
cugugauggggcccugccuc

SEQ ID NO: 1643869 - RNA, 19 nt, Human
cugugauggggcccugccu

SEQ ID NO: 1643870 - RNA, 17 nt, Human
cugugauggggcccugc

SEQ ID NO: 1643871 - RNA, 18 nt, Human
cugugauggggcccugcc

SEQ ID NO: 1643872 - RNA, 21 nt, Human
cugugaguacuacaguccucc

SEQ ID NO: 1643873 - RNA, 20 nt, Human
cugugaguacuacaguccuc

SEQ ID NO: 1643874 - RNA, 23 nt, Human
cugugaguacuacaguccuccca

SEQ ID NO: 1643875 - RNA, 23 nt, Human
cugucucaagagggcacuggugg

SEQ ID NO: 1643876 - RNA, 18 nt, Human
cugucuccauguuugaug

SEQ ID NO: 1643877 - RNA, 18 nt, Human
cugugccucugggacugg

SEQ ID NO: 1643878 - RNA, 17 nt, Human
cugugccucugggacug

SEQ ID NO: 1643879 - RNA, 22 nt, Human
cugugcugcccugcccaccugg

SEQ ID NO: 1643880 - RNA, 16 nt, Human
cugugccucugggacu

SEQ ID NO: 1643881 - RNA, 14 nt, Human
cugugccucuggga

SEQ ID NO: 1643882 - RNA, 11 nt, Human
cugugccucug

SEQ ID NO: 1643883 - RNA, 14 nt, Human
cugugggcccccaa

SEQ ID NO: 1643884 - RNA, 22 nt, Human
cugugggcgugagaccugcccc

SEQ ID NO: 1643885 - RNA, 21 nt, Human
cugugggcgugagaccugccc

SEQ ID NO: 1643886 - RNA, 17 nt, Human
cuguggaugauaaaaca

SEQ ID NO: 1643887 - RNA, 20 nt, Human
cuguauuuuaaaagaaugau

SEQ ID NO: 1643888 - RNA, 22 nt, Human
cuguauuuuaaaagaaugauua

SEQ ID NO: 1643889 - RNA, 23 nt, Human
cuguaucccaugagccucagcau

SEQ ID NO: 1643890 - RNA, 14 nt, Human
cuguaucccaugag

SEQ ID NO: 1643891 - RNA, 13 nt, Human
cugucaauuacag

SEQ ID NO: 1643892 - RNA, 17 nt, Human
cuguccaggcacugcug

SEQ ID NO: 1643893 - RNA, 20 nt, Human
cuguauagauuagaauucug

SEQ ID NO: 1643894 - RNA, 16 nt, Human
cuguauagauuagaau

SEQ ID NO: 1643895 - RNA, 13 nt, Human
cuguacagagccc

SEQ ID NO: 1643896 - RNA, 20 nt, Human
cugucccuuacgugaguccu

SEQ ID NO: 1643897 - RNA, 22 nt, Human
cuguccccgcacugggcuuggg

SEQ ID NO: 1643898 - RNA, 19 nt, Human
cuguccccgcacugggcuu

SEQ ID NO: 1643899 - RNA, 18 nt, Human
cuguccccgcacugggcu

SEQ ID NO: 1643900 - RNA, 16 nt, Human
cugucucaaaaaaaga

SEQ ID NO: 1643901 - RNA, 23 nt, Human
cugucucaaaaaaacacaaaagu

SEQ ID NO: 1643902 - RNA, 18 nt, Human
cugucucaaaaaaagaaa

SEQ ID NO: 1643903 - RNA, 22 nt, Human
cugucucaagagggcacuggug

SEQ ID NO: 1643904 - RNA, 15 nt, Human
cuguccgagcuuuga

SEQ ID NO: 1643905 - RNA, 22 nt, Human
cugucccuuacgugaguccugg

SEQ ID NO: 1643906 - RNA, 14 nt, Human
cuguccuacccacc

SEQ ID NO: 1643907 - RNA, 20 nt, Human
cugucuacacuaagagagaa

SEQ ID NO: 1643908 - RNA, 23 nt, Human
cuguaaucacagcuacuugggag

SEQ ID NO: 1643909 - RNA, 13 nt, Human
cugguuccucccc

SEQ ID NO: 1643910 - RNA, 12 nt, Human
cugguuccuccc

SEQ ID NO: 1643911 - RNA, 15 nt, Human
cuguacaaaguagaa

SEQ ID NO: 1643912 - RNA, 13 nt, Human
cuguacaaaguag

SEQ ID NO: 1643913 - RNA, 20 nt, Human
cuguaauccuagcacuuugg

SEQ ID NO: 1643914 - RNA, 19 nt, Human
cuggucacaggacucugcc

SEQ ID NO: 1643915 - RNA, 18 nt, Human
cuggucacaggacucugc

SEQ ID NO: 1643916 - RNA, 14 nt, Human
cugguggcagcugc

SEQ ID NO: 1643917 - RNA, 13 nt, Human
cugguggcagcug

SEQ ID NO: 1643918 - RNA, 23 nt, Human
cugguggcccgacagccuggcac

SEQ ID NO: 1643919 - RNA, 22 nt, Human
cugguggcccgacagccuggca

SEQ ID NO: 1643920 - RNA, 21 nt, Human
cugguggcccgacagccuggc

SEQ ID NO: 1643921 - RNA, 23 nt, Human
cugguggcagcucaccucucccu

SEQ ID NO: 1643922 - RNA, 22 nt, Human
cuggugcugccacacuucaggc

SEQ ID NO: 1643923 - RNA, 20 nt, Human
cuggugcugccacacuucag

SEQ ID NO: 1643924 - RNA, 13 nt, Human
cuggugcugccac

SEQ ID NO: 1643925 - RNA, 12 nt, Human
cuggugcugcca

SEQ ID NO: 1643926 - RNA, 22 nt, Human
cugggggggauuguaaaauggu

SEQ ID NO: 1643927 - RNA, 19 nt, Human
cugggggcugggcagagga

SEQ ID NO: 1643928 - RNA, 15 nt, Human
cugggggaagaagcu

SEQ ID NO: 1643929 - RNA, 13 nt, Human
cugggggaagaag

SEQ ID NO: 1643930 - RNA, 24 nt, Human
cugggcuucaguggcagcugcuuu

SEQ ID NO: 1643931 - RNA, 17 nt, Human
cuggguucuacccaggu

SEQ ID NO: 1643932 - RNA, 16 nt, Human
cuggguucuacccagg

SEQ ID NO: 1643933 - RNA, 15 nt, Human
cuggguucuacccag

SEQ ID NO: 1643934 - RNA, 14 nt, Human
cuggguacuugugg

SEQ ID NO: 1643935 - RNA, 19 nt, Human
cuggguucuacccaggugc

SEQ ID NO: 1643936 - RNA, 22 nt, Human
cuggguaacuagggaagauaau

SEQ ID NO: 1643937 - RNA, 14 nt, Human
cugccuccccuccu

SEQ ID NO: 1643938 - RNA, 15 nt, Human
cugccucuucucuac

SEQ ID NO: 1643939 - RNA, 17 nt, Human
cugccugcccaggcccc

SEQ ID NO: 1643940 - RNA, 16 nt, Human
cugccugcccaggccc

SEQ ID NO: 1643941 - RNA, 15 nt, Human
cugccugaagucaca

SEQ ID NO: 1643942 - RNA, 20 nt, Human
cugccugcccaggccccugc

SEQ ID NO: 1643943 - RNA, 22 nt, Human
cugccugggaucccucauccuc

SEQ ID NO: 1643944 - RNA, 21 nt, Human
cugccugggaucccucauccu

SEQ ID NO: 1643945 - RNA, 13 nt, Human
cugccuccccucc

SEQ ID NO: 1643946 - RNA, 21 nt, Human
cugccucucugcaggucccua

SEQ ID NO: 1643947 - RNA, 20 nt, Human
cugccucucugcaggucccu

SEQ ID NO: 1643948 - RNA, 23 nt, Human
cugccucugacacacagcucugu

SEQ ID NO: 1643949 - RNA, 22 nt, Human
cugccucugacacacagcucug

SEQ ID NO: 1643950 - RNA, 15 nt, Human
cugccucugacacac

SEQ ID NO: 1643951 - RNA, 22 nt, Human
cugccucucugcaggucccuaa

SEQ ID NO: 1643952 - RNA, 19 nt, Human
cugccucccaucacccgcu

SEQ ID NO: 1643953 - RNA, 16 nt, Human
cugccucccaucaccc

SEQ ID NO: 1643954 - RNA, 14 nt, Human
cugccucccaucac

SEQ ID NO: 1643955 - RNA, 12 nt, Human
cugccucccauc

SEQ ID NO: 1643956 - RNA, 11 nt, Human
cugccucccau

SEQ ID NO: 1643957 - RNA, 19 nt, Human
cugccuaaggacuucuuua

SEQ ID NO: 1643958 - RNA, 15 nt, Human
cugccuaaggacuuc

SEQ ID NO: 1643959 - RNA, 14 nt, Human
cugccuaaggacuu

SEQ ID NO: 1643960 - RNA, 13 nt, Human
cugccuaaggacu

SEQ ID NO: 1643961 - RNA, 12 nt, Human
cugccuaaggac

SEQ ID NO: 1643962 - RNA, 16 nt, Human
cugcccucuccugggc

SEQ ID NO: 1643963 - RNA, 19 nt, Human
cugcccuccaagaccuucu

SEQ ID NO: 1643964 - RNA, 18 nt, Human
cugcccucuccugggcag

SEQ ID NO: 1643965 - RNA, 19 nt, Human
cugcccucuccugggcagc

SEQ ID NO: 1643966 - RNA, 20 nt, Human
cugcccucuccugggcagcu

SEQ ID NO: 1643967 - RNA, 21 nt, Human
cugcccucuccugggcagcug

SEQ ID NO: 1643968 - RNA, 20 nt, Human
cugcccugcgggucacagga

SEQ ID NO: 1643969 - RNA, 22 nt, Human
cugcccugcugagucccaggcu

SEQ ID NO: 1643970 - RNA, 17 nt, Human
cucccuucccaccucuc

SEQ ID NO: 1643971 - RNA, 16 nt, Human
cucccuucccaccucu

SEQ ID NO: 1643972 - RNA, 15 nt, Human
cucccuucccaccuc

SEQ ID NO: 1643973 - RNA, 14 nt, Human
cucccuucccaccu

SEQ ID NO: 1643974 - RNA, 12 nt, Human
cugcccuccaag

SEQ ID NO: 1643975 - RNA, 23 nt, Human
cucccuucccaccucucucacuc

SEQ ID NO: 1643976 - RNA, 18 nt, Human
cugccgcagcccugcaga

SEQ ID NO: 1643977 - RNA, 17 nt, Human
cugccgcagcccugcag

SEQ ID NO: 1643978 - RNA, 15 nt, Human
cugccgcagcccugc

SEQ ID NO: 1643979 - RNA, 21 nt, Human
cugcccuuucugggcaccggg

SEQ ID NO: 1643980 - RNA, 20 nt, Human
cugcuccagcuguucagcug

SEQ ID NO: 1643981 - RNA, 19 nt, Human
cugcuccagcuguucagcu

SEQ ID NO: 1643982 - RNA, 19 nt, Human
cugcgaccacaagaaggau

SEQ ID NO: 1643983 - RNA, 20 nt, Human
cugcucuccucuugccacug

SEQ ID NO: 1643984 - RNA, 14 nt, Human
cugcucuccucuug

SEQ ID NO: 1643985 - RNA, 12 nt, Human
cugcugaaggcu

SEQ ID NO: 1643986 - RNA, 11 nt, Human
cugcugaaggc

SEQ ID NO: 1643987 - RNA, 21 nt, Human
cugcucuccucuugccacugc

SEQ ID NO: 1643988 - RNA, 18 nt, Human
cugcugaaggaauaaauu

SEQ ID NO: 1643989 - RNA, 17 nt, Human
cugcugaaggaauaaau

SEQ ID NO: 1643990 - RNA, 22 nt, Human
cugcugcccagccuccaagcuc

SEQ ID NO: 1643991 - RNA, 15 nt, Human
cugcugcccagccuc

SEQ ID NO: 1643992 - RNA, 12 nt, Human
cugcugcccagc

SEQ ID NO: 1643993 - RNA, 23 nt, Human
cugcuuccagugaggcucugccc

SEQ ID NO: 1643994 - RNA, 21 nt, Human
cugcuuccagugaggcucugc

SEQ ID NO: 1643995 - RNA, 20 nt, Human
cugcuuccagugaggcucug

SEQ ID NO: 1643996 - RNA, 19 nt, Human
cugcuuccagugaggcucu

SEQ ID NO: 1643997 - RNA, 18 nt, Human
cugcuuccagugaggcuc

SEQ ID NO: 1643998 - RNA, 16 nt, Human
cugcuuccagugaggc

SEQ ID NO: 1643999 - RNA, 15 nt, Human
cugcuuccagugagg

SEQ ID NO: 1644000 - RNA, 23 nt, Human
cugcugguucaggguuggccccu

SEQ ID NO: 1644001 - RNA, 15 nt, Human
cugcugguucagggu

SEQ ID NO: 1644002 - RNA, 13 nt, Human
cugcugguucagg

SEQ ID NO: 1644003 - RNA, 12 nt, Human
cugcuggcugcc

SEQ ID NO: 1644004 - RNA, 15 nt, Human
cugcugcuggcuggu

SEQ ID NO: 1644005 - RNA, 13 nt, Human
cuggagcucugcc

SEQ ID NO: 1644006 - RNA, 12 nt, Human
cuggagcucugc

SEQ ID NO: 1644007 - RNA, 16 nt, Human
cuggagcucugcccau

SEQ ID NO: 1644008 - RNA, 17 nt, Human
cuggagugcagugagcc

SEQ ID NO: 1644009 - RNA, 16 nt, Human
cuggagugcagugagc

SEQ ID NO: 1644010 - RNA, 15 nt, Human
cuggagugcagugag

SEQ ID NO: 1644011 - RNA, 14 nt, Human
cuggagugcaguga

SEQ ID NO: 1644012 - RNA, 22 nt, Human
cuggagguacgaaaagagggga

SEQ ID NO: 1644013 - RNA, 17 nt, Human
cuggagguacgaaaaga

SEQ ID NO: 1644014 - RNA, 21 nt, Human
cuggaccuugaacuggguacu

SEQ ID NO: 1644015 - RNA, 20 nt, Human
cuggaccuugaacuggguac

SEQ ID NO: 1644016 - RNA, 17 nt, Human
cuggaccuugaacuggg

SEQ ID NO: 1644017 - RNA, 20 nt, Human
cuggacuccucuguccaggc

SEQ ID NO: 1644018 - RNA, 19 nt, Human
cuggacuccucuguccagg

SEQ ID NO: 1644019 - RNA, 18 nt, Human
cuggacuccucuguccag

SEQ ID NO: 1644020 - RNA, 17 nt, Human
cuggacuccucugucca

SEQ ID NO: 1644021 - RNA, 14 nt, Human
cuggacuccucugu

SEQ ID NO: 1644022 - RNA, 15 nt, Human
cuggacccuguggau

SEQ ID NO: 1644023 - RNA, 16 nt, Human
cuggaccuugaacugg

SEQ ID NO: 1644024 - RNA, 17 nt, Human
cuggacaggcauguucu

SEQ ID NO: 1644025 - RNA, 14 nt, Human
cuggacaggcaugu

SEQ ID NO: 1644026 - RNA, 23 nt, Human
cuggacaggcauguucucugagg

SEQ ID NO: 1644027 - RNA, 13 nt, Human
cuggaauuugaaa

SEQ ID NO: 1644028 - RNA, 23 nt, Human
cuggccuucggccuccauccuga

SEQ ID NO: 1644029 - RNA, 14 nt, Human
cuggccugugucua

SEQ ID NO: 1644030 - RNA, 15 nt, Human
cuggcgugcaguggu

SEQ ID NO: 1644031 - RNA, 14 nt, Human
cuggcgugcagugg

SEQ ID NO: 1644032 - RNA, 24 nt, Human
cuggcucuuccaggcugggagagc

SEQ ID NO: 1644033 - RNA, 22 nt, Human
cuggcucuuccaggcugggaga

SEQ ID NO: 1644034 - RNA, 21 nt, Human
cuggcucuuccaggcugggag

SEQ ID NO: 1644035 - RNA, 22 nt, Human
cuggccuucggccuccauccug

SEQ ID NO: 1644036 - RNA, 24 nt, Human
cuggccuggccccucagggucccu

SEQ ID NO: 1644037 - RNA, 13 nt, Human
cuggccuggcccc

SEQ ID NO: 1644038 - RNA, 20 nt, Human
cuggccucugcacuccccug

SEQ ID NO: 1644039 - RNA, 18 nt, Human
cuggccucugcacucccc

SEQ ID NO: 1644040 - RNA, 21 nt, Human
cuggccucugcacuccccugc

SEQ ID NO: 1644041 - RNA, 22 nt, Human
cuggcacaguuuucugagaaag

SEQ ID NO: 1644042 - RNA, 21 nt, Human
cuggcacaguuuucugagaaa

SEQ ID NO: 1644043 - RNA, 20 nt, Human
cuggagugcagugagccgag

SEQ ID NO: 1644044 - RNA, 21 nt, Human
cuggcacccggccccugcugg

SEQ ID NO: 1644045 - RNA, 20 nt, Human
cuggcacccggccccugcug

SEQ ID NO: 1644046 - RNA, 23 nt, Human
cuggcacugcuuccagugaggcu

SEQ ID NO: 1644047 - RNA, 20 nt, Human
cuggcacugcuuccagugag

SEQ ID NO: 1644048 - RNA, 19 nt, Human
cuggcacugcuuccaguga

SEQ ID NO: 1644049 - RNA, 22 nt, Human
cuggcacccggccccugcuggu

SEQ ID NO: 1644050 - RNA, 21 nt, Human
cuggcacuuggagacuuguau

SEQ ID NO: 1644051 - RNA, 14 nt, Human
cuggcacuuggaga

SEQ ID NO: 1644052 - RNA, 15 nt, Human
cuggcccacugcauc

SEQ ID NO: 1644053 - RNA, 14 nt, Human
cuggccagaugcac

SEQ ID NO: 1644054 - RNA, 21 nt, Human
gagaguggcuccucccggugc

SEQ ID NO: 1644055 - RNA, 16 nt, Human
gagaguggcuccuccc

SEQ ID NO: 1644056 - RNA, 13 nt, Human
gagaguguugaaa

SEQ ID NO: 1644057 - RNA, 16 nt, Human
gagagggugggagugg

SEQ ID NO: 1644058 - RNA, 20 nt, Human
gagagggugggagugggccc

SEQ ID NO: 1644059 - RNA, 14 nt, Human
gagagggugggagu

SEQ ID NO: 1644060 - RNA, 19 nt, Human
gagaggggaacagacugga

SEQ ID NO: 1644061 - RNA, 13 nt, Human
gagaggggcacag

SEQ ID NO: 1644062 - RNA, 16 nt, Human
gagagcccuucauuug

SEQ ID NO: 1644063 - RNA, 22 nt, Human
gagagagcuucuguugcugccu

SEQ ID NO: 1644064 - RNA, 19 nt, Human
gagagagcuucuguugcug

SEQ ID NO: 1644065 - RNA, 20 nt, Human
gagacagcucugcauacuca

SEQ ID NO: 1644066 - RNA, 21 nt, Human
gagaaugagagacacacugaa

SEQ ID NO: 1644067 - RNA, 20 nt, Human
gagaaugagagacacacuga

SEQ ID NO: 1644068 - RNA, 23 nt, Human
gagaaugcacaaacagaggccgc

SEQ ID NO: 1644069 - RNA, 22 nt, Human
gagacaggguuuugccauguug

SEQ ID NO: 1644070 - RNA, 21 nt, Human
gagaccaucccugaaggcccc

SEQ ID NO: 1644071 - RNA, 18 nt, Human
gagaccaucccugaaggc

SEQ ID NO: 1644072 - RNA, 14 nt, Human
gagaccaucccuga

SEQ ID NO: 1644073 - RNA, 13 nt, Human
gagacucugucuc

SEQ ID NO: 1644074 - RNA, 22 nt, Human
gagacuccugcaggcagccagg

SEQ ID NO: 1644075 - RNA, 21 nt, Human
gagacucgcgacaaugcaaac

SEQ ID NO: 1644076 - RNA, 20 nt, Human
gagacucgcgacaaugcaaa

SEQ ID NO: 1644077 - RNA, 21 nt, Human
gagacuccugcaggcagccag

SEQ ID NO: 1644078 - RNA, 20 nt, Human
gagacuccugcaggcagcca

SEQ ID NO: 1644079 - RNA, 19 nt, Human
gagacuccugcaggcagcc

SEQ ID NO: 1644080 - RNA, 19 nt, Human
gagccagggucucacuaug

SEQ ID NO: 1644081 - RNA, 23 nt, Human
gagcccacuguacuugcucuuga

SEQ ID NO: 1644082 - RNA, 23 nt, Human
gagccagauuucacucuccuugg

SEQ ID NO: 1644083 - RNA, 14 nt, Human
gagccagggucuca

SEQ ID NO: 1644084 - RNA, 16 nt, Human
gagcagagaauucucu

SEQ ID NO: 1644085 - RNA, 12 nt, Human
gagcagagacca

SEQ ID NO: 1644086 - RNA, 19 nt, Human
gagccaauuuaaagaaaac

SEQ ID NO: 1644087 - RNA, 21 nt, Human
gagcauuagauuucucauuug

SEQ ID NO: 1644088 - RNA, 15 nt, Human
gagcauuagauuucu

SEQ ID NO: 1644089 - RNA, 22 nt, Human
gagcaccuuagacagucccugc

SEQ ID NO: 1644090 - RNA, 21 nt, Human
gagcaccuuagacagucccug

SEQ ID NO: 1644091 - RNA, 15 nt, Human
gagcacuaaggugug

SEQ ID NO: 1644092 - RNA, 21 nt, Human
gagcacuaaggugugcucuga

SEQ ID NO: 1644093 - RNA, 20 nt, Human
gagcaccuuagacagucccu

SEQ ID NO: 1644094 - RNA, 23 nt, Human
gagaucaaccccuucgcuccugu

SEQ ID NO: 1644095 - RNA, 16 nt, Human
gagauagccaaggcca

SEQ ID NO: 1644096 - RNA, 14 nt, Human
gagauagccaaggc

SEQ ID NO: 1644097 - RNA, 19 nt, Human
gagaucacgccacugcacu

SEQ ID NO: 1644098 - RNA, 18 nt, Human
gagaucacgccacugcac

SEQ ID NO: 1644099 - RNA, 19 nt, Human
gagauagccaaggccaaag

SEQ ID NO: 1644100 - RNA, 17 nt, Human
gagaugaggccgccaug

SEQ ID NO: 1644101 - RNA, 15 nt, Human
gacuccaaagaaaug

SEQ ID NO: 1644102 - RNA, 12 nt, Human
gacuccaaagaa

SEQ ID NO: 1644103 - RNA, 11 nt, Human
gacuccaaaga

SEQ ID NO: 1644104 - RNA, 21 nt, Human
gacucauuuuaaaaaauggaa

SEQ ID NO: 1644105 - RNA, 18 nt, Human
gacuccaaagaaauguaa

SEQ ID NO: 1644106 - RNA, 16 nt, Human
gacuccaaagaaaugu

SEQ ID NO: 1644107 - RNA, 13 nt, Human
gacucgcgacaau

SEQ ID NO: 1644108 - RNA, 13 nt, Human
gacuccugcaggc

SEQ ID NO: 1644109 - RNA, 23 nt, Human
gacuccugcacacgcuccuuccu

SEQ ID NO: 1644110 - RNA, 12 nt, Human
gacuccugcagg

SEQ ID NO: 1644111 - RNA, 14 nt, Human
gacuccucugucca

SEQ ID NO: 1644112 - RNA, 11 nt, Human
gacuccucugu

SEQ ID NO: 1644113 - RNA, 13 nt, Human
gacuacaggugug

SEQ ID NO: 1644114 - RNA, 21 nt, Human
gacuacaggugugagucacca

SEQ ID NO: 1644115 - RNA, 18 nt, Human
gacuacaggugugaguca

SEQ ID NO: 1644116 - RNA, 15 nt, Human
gacucauucuucugu

SEQ ID NO: 1644117 - RNA, 14 nt, Human
gacucauucuucug

SEQ ID NO: 1644118 - RNA, 16 nt, Human
gacugcauuauauuua

SEQ ID NO: 1644119 - RNA, 14 nt, Human
gacugcauuauauu

SEQ ID NO: 1644120 - RNA, 23 nt, Human
gacugaguacguugugcauuugg

SEQ ID NO: 1644121 - RNA, 13 nt, Human
gacugcccggcag

SEQ ID NO: 1644122 - RNA, 15 nt, Human
gacugcccggcaggg

SEQ ID NO: 1644123 - RNA, 21 nt, Human
gacugaguacguugugcauuu

SEQ ID NO: 1644124 - RNA, 22 nt, Human
gacugaguacguugugcauuug

SEQ ID NO: 1644125 - RNA, 17 nt, Human
gacucgcgacaaugcaa

SEQ ID NO: 1644126 - RNA, 18 nt, Human
gacuggaagcacagcuuc

SEQ ID NO: 1644127 - RNA, 16 nt, Human
gacuggaagcacagcu

SEQ ID NO: 1644128 - RNA, 15 nt, Human
gacuggaagcacagc

SEQ ID NO: 1644129 - RNA, 14 nt, Human
gacuggaagcacag

SEQ ID NO: 1644130 - RNA, 23 nt, Human
gacuucugucuucacaacagauu

SEQ ID NO: 1644131 - RNA, 20 nt, Human
gacuucugucuucacaacag

SEQ ID NO: 1644132 - RNA, 23 nt, Human
gacuucuaaguaaaaccacagca

SEQ ID NO: 1644133 - RNA, 19 nt, Human
gacuucuaaguaaaaccac

SEQ ID NO: 1644134 - RNA, 24 nt, Human
gacuucuaaguaaaaccacagcag

SEQ ID NO: 1644135 - RNA, 18 nt, Human
gacuucuaaguaaaacca

SEQ ID NO: 1644136 - RNA, 17 nt, Human
gacuucuaaguaaaacc

SEQ ID NO: 1644137 - RNA, 16 nt, Human
gacuucuaaguaaaac

SEQ ID NO: 1644138 - RNA, 19 nt, Human
gacuuaagcacacuugaca

SEQ ID NO: 1644139 - RNA, 19 nt, Human
gacuuaaaauauuccugca

SEQ ID NO: 1644140 - RNA, 21 nt, Human
gacuucuuuaauuuuggaauu

SEQ ID NO: 1644141 - RNA, 20 nt, Human
gacuucuuuaauuuuggaau

SEQ ID NO: 1644142 - RNA, 19 nt, Human
gacuucuuuaauuuuggaa

SEQ ID NO: 1644143 - RNA, 18 nt, Human
gacuucuuuaauuuugga

SEQ ID NO: 1644144 - RNA, 17 nt, Human
gacuucuuuaauuuugg

SEQ ID NO: 1644145 - RNA, 16 nt, Human
gacuucuuuaauuuug

SEQ ID NO: 1644146 - RNA, 13 nt, Human
gacuuggaagcuc

SEQ ID NO: 1644147 - RNA, 22 nt, Human
gagaaccuagggugauauuaac

SEQ ID NO: 1644148 - RNA, 21 nt, Human
gagaaccuagggugauauuaa

SEQ ID NO: 1644149 - RNA, 14 nt, Human
gagaaauuuauaaa

SEQ ID NO: 1644150 - RNA, 14 nt, Human
gagaaaugagcuug

SEQ ID NO: 1644151 - RNA, 21 nt, Human
gagaaaugaaaaaauauauau

SEQ ID NO: 1644152 - RNA, 16 nt, Human
gagaaagguugaagca

SEQ ID NO: 1644153 - RNA, 22 nt, Human
gagaaaguacuucuccacccug

SEQ ID NO: 1644154 - RNA, 23 nt, Human
gagaacuuccagauccuggaaau

SEQ ID NO: 1644155 - RNA, 22 nt, Human
gagaacuuccagauccuggaaa

SEQ ID NO: 1644156 - RNA, 14 nt, Human
gagaagagaaugca

SEQ ID NO: 1644157 - RNA, 13 nt, Human
gagaagagcuguu

SEQ ID NO: 1644158 - RNA, 16 nt, Human
gagaagcagaggaagg

SEQ ID NO: 1644159 - RNA, 16 nt, Human
gagaagagaaugcaca

SEQ ID NO: 1644160 - RNA, 17 nt, Human
gagaaugagagacacac

SEQ ID NO: 1644161 - RNA, 21 nt, Human
gaauugacccacaagaaauga

SEQ ID NO: 1644162 - RNA, 16 nt, Human
gaauugacccacaaga

SEQ ID NO: 1644163 - RNA, 16 nt, Human
gaauuggagcucgugg

SEQ ID NO: 1644164 - RNA, 15 nt, Human
gaauguuugccucug

SEQ ID NO: 1644165 - RNA, 13 nt, Human
gaauucuguauag

SEQ ID NO: 1644166 - RNA, 22 nt, Human
gaauucuguauagauuagaauu

SEQ ID NO: 1644167 - RNA, 21 nt, Human
gaauucuguauagauuagaau

SEQ ID NO: 1644168 - RNA, 14 nt, Human
gaauucuguauaga

SEQ ID NO: 1644169 - RNA, 13 nt, Human
gaaugucagugug

SEQ ID NO: 1644170 - RNA, 16 nt, Human
gaauggcuuuguauag

SEQ ID NO: 1644171 - RNA, 14 nt, Human
gaauggcuuuguau

SEQ ID NO: 1644172 - RNA, 21 nt, Human
gaauggcuuuguauagaaccu

SEQ ID NO: 1644173 - RNA, 17 nt, Human
gaauggcuuuguauaga

SEQ ID NO: 1644174 - RNA, 20 nt, Human
gaaugcacaaacagaggccg

SEQ ID NO: 1644175 - RNA, 15 nt, Human
gaaugcuguauaugu

SEQ ID NO: 1644176 - RNA, 21 nt, Human
gaaugcacaaacagaggccgc

SEQ ID NO: 1644177 - RNA, 18 nt, Human
gaaugaaccacaucuugc

SEQ ID NO: 1644178 - RNA, 11 nt, Human
gaaugcagugg

SEQ ID NO: 1644179 - RNA, 20 nt, Human
gaauccagacccggcugcgu

SEQ ID NO: 1644180 - RNA, 12 nt, Human
gaaaggcuccag

SEQ ID NO: 1644181 - RNA, 22 nt, Human
gacacaagccuucggcgccuua

SEQ ID NO: 1644182 - RNA, 19 nt, Human
gacacaggcccggcuccag

SEQ ID NO: 1644183 - RNA, 16 nt, Human
gacacaagccuucggc

SEQ ID NO: 1644184 - RNA, 21 nt, Human
gacacaggcccggcuccaggc

SEQ ID NO: 1644185 - RNA, 20 nt, Human
gacacaggcccggcuccagg

SEQ ID NO: 1644186 - RNA, 14 nt, Human
gacacaugcaaggu

SEQ ID NO: 1644187 - RNA, 23 nt, Human
gacacauguccaagaagcccagg

SEQ ID NO: 1644188 - RNA, 20 nt, Human
gacacauguccaagaagccc

SEQ ID NO: 1644189 - RNA, 15 nt, Human
gacacauguccaaga

SEQ ID NO: 1644190 - RNA, 19 nt, Human
gacacaugcaaggucauuu

SEQ ID NO: 1644191 - RNA, 16 nt, Human
gacaaggaaaaaauaa

SEQ ID NO: 1644192 - RNA, 21 nt, Human
gacaaggauugcuacuguccu

SEQ ID NO: 1644193 - RNA, 19 nt, Human
gacaaggauugcuacuguc

SEQ ID NO: 1644194 - RNA, 18 nt, Human
gacaaggauugcuacugu

SEQ ID NO: 1644195 - RNA, 21 nt, Human
gacaaggaugaucuaggaaga

SEQ ID NO: 1644196 - RNA, 18 nt, Human
gacaaugugaaaagaaaa

SEQ ID NO: 1644197 - RNA, 12 nt, Human
gacaaugugaaa

SEQ ID NO: 1644198 - RNA, 22 nt, Human
gacaaugcaaaccaucauugaa

SEQ ID NO: 1644199 - RNA, 20 nt, Human
gacaaugugaaaagaaaaau

SEQ ID NO: 1644200 - RNA, 19 nt, Human
gacaaugugaaaagaaaaa

SEQ ID NO: 1644201 - RNA, 23 nt, Human
gacaacacucauugaccugaggc

SEQ ID NO: 1644202 - RNA, 22 nt, Human
gacaacacucauugaccugagg

SEQ ID NO: 1644203 - RNA, 16 nt, Human
gacaacagacuucuga

SEQ ID NO: 1644204 - RNA, 15 nt, Human
gaauuguaaggaaug

SEQ ID NO: 1644205 - RNA, 20 nt, Human
gaauuucuaggacugaauua

SEQ ID NO: 1644206 - RNA, 19 nt, Human
gaauuucuaggacugaauu

SEQ ID NO: 1644207 - RNA, 22 nt, Human
gaauuucuuuugccguuauuaa

SEQ ID NO: 1644208 - RNA, 21 nt, Human
gaauuucuucaacucccugcc

SEQ ID NO: 1644209 - RNA, 20 nt, Human
gaauuugauaugugaacagu

SEQ ID NO: 1644210 - RNA, 20 nt, Human
gaauuugugaagguggaaau

SEQ ID NO: 1644211 - RNA, 17 nt, Human
gacagggaggacgcucu

SEQ ID NO: 1644212 - RNA, 23 nt, Human
gacaggaccagggauuuccauga

SEQ ID NO: 1644213 - RNA, 15 nt, Human
gacaggaccagggau

SEQ ID NO: 1644214 - RNA, 14 nt, Human
gacaggaccaggga

SEQ ID NO: 1644215 - RNA, 18 nt, Human
gacagggaggacgcucuc

SEQ ID NO: 1644216 - RNA, 16 nt, Human
gacagggaggugaccc

SEQ ID NO: 1644217 - RNA, 23 nt, Human
gacagggcacaccgggcacucag

SEQ ID NO: 1644218 - RNA, 24 nt, Human
gacagggcacaccgggcacucaga

SEQ ID NO: 1644219 - RNA, 14 nt, Human
gacaguuaagagaa

SEQ ID NO: 1644220 - RNA, 20 nt, Human
gacauagaauuaacacauga

SEQ ID NO: 1644221 - RNA, 22 nt, Human
gacaguuaagagaaaugagcuu

SEQ ID NO: 1644222 - RNA, 14 nt, Human
gacaugggaaaggg

SEQ ID NO: 1644223 - RNA, 14 nt, Human
gacaugaucuucuu

SEQ ID NO: 1644224 - RNA, 14 nt, Human
gacagagucucacu

SEQ ID NO: 1644225 - RNA, 23 nt, Human
gacagaggggguggccucccaac

SEQ ID NO: 1644226 - RNA, 22 nt, Human
gacagaggggguggccucccaa

SEQ ID NO: 1644227 - RNA, 21 nt, Human
gacagaggggguggccuccca

SEQ ID NO: 1644228 - RNA, 19 nt, Human
gacagaggggguggccucc

SEQ ID NO: 1644229 - RNA, 18 nt, Human
gacagaggggguggccuc

SEQ ID NO: 1644230 - RNA, 15 nt, Human
gacagaggggguggc

SEQ ID NO: 1644231 - RNA, 17 nt, Human
gacagaggcagccccau

SEQ ID NO: 1644232 - RNA, 16 nt, Human
gacagaggcagcccca

SEQ ID NO: 1644233 - RNA, 14 nt, Human
gacagaggcagccc

SEQ ID NO: 1644234 - RNA, 21 nt, Human
gacagagcaagugagacccug

SEQ ID NO: 1644235 - RNA, 19 nt, Human
gacagccacggccaggcca

SEQ ID NO: 1644236 - RNA, 18 nt, Human
gacagccacggccaggcc

SEQ ID NO: 1644237 - RNA, 17 nt, Human
gacagccacggccaggc

SEQ ID NO: 1644238 - RNA, 14 nt, Human
gacagccacggcca

SEQ ID NO: 1644239 - RNA, 22 nt, Human
gacagagugagacucugucuca

SEQ ID NO: 1644240 - RNA, 20 nt, Human
gacagagugagacucugucu

SEQ ID NO: 1644241 - RNA, 17 nt, Human
gacagcugccugggauc

SEQ ID NO: 1644242 - RNA, 16 nt, Human
gacagcugccugggau

SEQ ID NO: 1644243 - RNA, 21 nt, Human
gacagccacggccaggccaga

SEQ ID NO: 1644244 - RNA, 20 nt, Human
gacagccacggccaggccag

SEQ ID NO: 1644245 - RNA, 21 nt, Human
gacagcugccugggaucccuc

SEQ ID NO: 1644246 - RNA, 18 nt, Human
gacagcugccugggaucc

SEQ ID NO: 1644247 - RNA, 22 nt, Human
gacccacaagaaaugaaagcag

SEQ ID NO: 1644248 - RNA, 15 nt, Human
gacccacaagaaaug

SEQ ID NO: 1644249 - RNA, 16 nt, Human
gacccaaaaggcagaa

SEQ ID NO: 1644250 - RNA, 21 nt, Human
gacccccaaccaaguggcucc

SEQ ID NO: 1644251 - RNA, 12 nt, Human
gacccccaacca

SEQ ID NO: 1644252 - RNA, 12 nt, Human
gacccugcccug

SEQ ID NO: 1644253 - RNA, 23 nt, Human
gacccugaggcccagagggccug

SEQ ID NO: 1644254 - RNA, 22 nt, Human
gacccugaggcccagagggccu

SEQ ID NO: 1644255 - RNA, 21 nt, Human
gaccccuccaugugggcuagu

SEQ ID NO: 1644256 - RNA, 18 nt, Human
gaccccuccaugugggcu

SEQ ID NO: 1644257 - RNA, 14 nt, Human
gaccccuccaugug

SEQ ID NO: 1644258 - RNA, 17 nt, Human
gaccgugaggccagaga

SEQ ID NO: 1644259 - RNA, 16 nt, Human
gaccgugaggccagag

SEQ ID NO: 1644260 - RNA, 18 nt, Human
gaccgugaggccagagac

SEQ ID NO: 1644261 - RNA, 19 nt, Human
gaccgugaggccagagaca

SEQ ID NO: 1644262 - RNA, 21 nt, Human
gacccuuguggucccacccca

SEQ ID NO: 1644263 - RNA, 20 nt, Human
gacccuuguggucccacccc

SEQ ID NO: 1644264 - RNA, 19 nt, Human
gacccuuguggucccaccc

SEQ ID NO: 1644265 - RNA, 12 nt, Human
gacccugucuca

SEQ ID NO: 1644266 - RNA, 21 nt, Human
gaccacugcagaagacaguau

SEQ ID NO: 1644267 - RNA, 16 nt, Human
gaccacguuucuaaag

SEQ ID NO: 1644268 - RNA, 14 nt, Human
gaccacguuucuaa

SEQ ID NO: 1644269 - RNA, 11 nt, Human
gaccagagcug

SEQ ID NO: 1644270 - RNA, 21 nt, Human
gaccagacaccuugacagggc

SEQ ID NO: 1644271 - RNA, 16 nt, Human
gacaugggacauuugc

SEQ ID NO: 1644272 - RNA, 18 nt, Human
gacaugggaaaggggaag

SEQ ID NO: 1644273 - RNA, 14 nt, Human
gaccaccugcccaa

SEQ ID NO: 1644274 - RNA, 13 nt, Human
gaccaccugccca

SEQ ID NO: 1644275 - RNA, 17 nt, Human
gaccagagcugccaccu

SEQ ID NO: 1644276 - RNA, 15 nt, Human
gaccagagcugccac

SEQ ID NO: 1644277 - RNA, 14 nt, Human
gaccagagcugcca

SEQ ID NO: 1644278 - RNA, 13 nt, Human
gaccagagcugcc

SEQ ID NO: 1644279 - RNA, 19 nt, Human
gaccagagcugccaccugc

SEQ ID NO: 1644280 - RNA, 18 nt, Human
gaccagagcugccaccug

SEQ ID NO: 1644281 - RNA, 20 nt, Human
gaccagccuccaugcugccu

SEQ ID NO: 1644282 - RNA, 22 nt, Human
gaccagccuccaugcugccucc

SEQ ID NO: 1644283 - RNA, 21 nt, Human
gaccagccuccaugcugccuc

SEQ ID NO: 1644284 - RNA, 22 nt, Human
gaccauucuccaccugccaggg

SEQ ID NO: 1644285 - RNA, 21 nt, Human
gaccauucuccaccugccagg

SEQ ID NO: 1644286 - RNA, 20 nt, Human
gaccauucuccaccugccag

SEQ ID NO: 1644287 - RNA, 19 nt, Human
gaccauucuccaccugcca

SEQ ID NO: 1644288 - RNA, 23 nt, Human
gcaaagcacugacuucuaaguaa

SEQ ID NO: 1644289 - RNA, 15 nt, Human
gcaaaccaucauuga

SEQ ID NO: 1644290 - RNA, 16 nt, Human
gcaaauugucacagga

SEQ ID NO: 1644291 - RNA, 15 nt, Human
gcaaauguggcuccu

SEQ ID NO: 1644292 - RNA, 19 nt, Human
gauuuugauccaagcuggu

SEQ ID NO: 1644293 - RNA, 21 nt, Human
gauuuugaaauuuuuauuaaa

SEQ ID NO: 1644294 - RNA, 12 nt, Human
gcaaaccaucau

SEQ ID NO: 1644295 - RNA, 15 nt, Human
gauuuaacagaaaug

SEQ ID NO: 1644296 - RNA, 22 nt, Human
gauuuccguuaaaauaccagcc

SEQ ID NO: 1644297 - RNA, 16 nt, Human
gauuugagcucagccc

SEQ ID NO: 1644298 - RNA, 13 nt, Human
gauuuaacagaaa

SEQ ID NO: 1644299 - RNA, 14 nt, Human
gauuuaacagaaau

SEQ ID NO: 1644300 - RNA, 15 nt, Human
gauugcaacaggcug

SEQ ID NO: 1644301 - RNA, 14 nt, Human
gauucuccugccuc

SEQ ID NO: 1644302 - RNA, 16 nt, Human
gauucucaugccucag

SEQ ID NO: 1644303 - RNA, 20 nt, Human
gauucaaugccccugaauuu

SEQ ID NO: 1644304 - RNA, 19 nt, Human
gauucaaugccccugaauu

SEQ ID NO: 1644305 - RNA, 21 nt, Human
gauuacaggcuccugccacca

SEQ ID NO: 1644306 - RNA, 18 nt, Human
gauuacaggcuccugcca

SEQ ID NO: 1644307 - RNA, 21 nt, Human
gauucaaugccccugaauuua

SEQ ID NO: 1644308 - RNA, 22 nt, Human
gaugguucccuugaugaagaag

SEQ ID NO: 1644309 - RNA, 21 nt, Human
gaugguuccccuguucacucu

SEQ ID NO: 1644310 - RNA, 18 nt, Human
gaugguuccccuguucac

SEQ ID NO: 1644311 - RNA, 13 nt, Human
gaugguuccccug

SEQ ID NO: 1644312 - RNA, 16 nt, Human
gauggugcaaugaccu

SEQ ID NO: 1644313 - RNA, 15 nt, Human
gauggugcaaugacc

SEQ ID NO: 1644314 - RNA, 17 nt, Human
gauggugcaaugaccuu

SEQ ID NO: 1644315 - RNA, 14 nt, Human
gauggugcaaugac

SEQ ID NO: 1644316 - RNA, 12 nt, Human
gauggugcaaug

SEQ ID NO: 1644317 - RNA, 22 nt, Human
gauuacaagcgugagccacugc

SEQ ID NO: 1644318 - RNA, 15 nt, Human
gauuaaacuuaaucu

SEQ ID NO: 1644319 - RNA, 23 nt, Human
gauuacaagcgugagccacugca

SEQ ID NO: 1644320 - RNA, 17 nt, Human
gauuacaggcuccugcc

SEQ ID NO: 1644321 - RNA, 20 nt, Human
gauuacaggcgugagccacc

SEQ ID NO: 1644322 - RNA, 16 nt, Human
gauguuuaguaaucau

SEQ ID NO: 1644323 - RNA, 22 nt, Human
gaugcuagaacucccuuucaac

SEQ ID NO: 1644324 - RNA, 20 nt, Human
gaugcuagaacucccuuuca

SEQ ID NO: 1644325 - RNA, 18 nt, Human
gaugcuagaacucccuuu

SEQ ID NO: 1644326 - RNA, 16 nt, Human
gaugccccgucccccu

SEQ ID NO: 1644327 - RNA, 21 nt, Human
gaugccccgucccccucuggc

SEQ ID NO: 1644328 - RNA, 20 nt, Human
gaugcugacuguacuccucc

SEQ ID NO: 1644329 - RNA, 17 nt, Human
gaugcugacuguacucc

SEQ ID NO: 1644330 - RNA, 19 nt, Human
gaugcccaaagaugcagcc

SEQ ID NO: 1644331 - RNA, 20 nt, Human
gaugcccaaagaugcagccg

SEQ ID NO: 1644332 - RNA, 24 nt, Human
gauggggcccugccuccuuuguga

SEQ ID NO: 1644333 - RNA, 21 nt, Human
gaugggcaacccccagccugc

SEQ ID NO: 1644334 - RNA, 20 nt, Human
gaugggcaacccccagccug

SEQ ID NO: 1644335 - RNA, 22 nt, Human
gauggccgggcgcgguggcuca

SEQ ID NO: 1644336 - RNA, 15 nt, Human
gauggggcugcaccg

SEQ ID NO: 1644337 - RNA, 19 nt, Human
gauggggcugcaccggcug

SEQ ID NO: 1644338 - RNA, 13 nt, Human
gauggggcugcac

SEQ ID NO: 1644339 - RNA, 19 nt, Human
gaugggugcuuggaggaag

SEQ ID NO: 1644340 - RNA, 20 nt, Human
gcaauucuccugccucagcc

SEQ ID NO: 1644341 - RNA, 19 nt, Human
gcaauucuccugccucagc

SEQ ID NO: 1644342 - RNA, 18 nt, Human
gcaauucuccugccucag

SEQ ID NO: 1644343 - RNA, 17 nt, Human
gcaauucuccugccuca

SEQ ID NO: 1644344 - RNA, 16 nt, Human
gcaauucuccugccuc

SEQ ID NO: 1644345 - RNA, 15 nt, Human
gcaauucuccugccu

SEQ ID NO: 1644346 - RNA, 14 nt, Human
gcaauucuccugcc

SEQ ID NO: 1644347 - RNA, 14 nt, Human
gcacaaacagaggc

SEQ ID NO: 1644348 - RNA, 16 nt, Human
gcacaaacagaggccg

SEQ ID NO: 1644349 - RNA, 15 nt, Human
gcacaaacagaggcc

SEQ ID NO: 1644350 - RNA, 14 nt, Human
gcaaugugauaaaa

SEQ ID NO: 1644351 - RNA, 14 nt, Human
gcaacucaucuuag

SEQ ID NO: 1644352 - RNA, 15 nt, Human
gcaauggcagccuug

SEQ ID NO: 1644353 - RNA, 13 nt, Human
gcaacucugaagg

SEQ ID NO: 1644354 - RNA, 17 nt, Human
gcacagacccugcccug

SEQ ID NO: 1644355 - RNA, 16 nt, Human
gcacagacccugcccu

SEQ ID NO: 1644356 - RNA, 15 nt, Human
gcacagacccugccc

SEQ ID NO: 1644357 - RNA, 14 nt, Human
gcacagacccugcc

SEQ ID NO: 1644358 - RNA, 23 nt, Human
gcacagaaaauggaagacagcuc

SEQ ID NO: 1644359 - RNA, 22 nt, Human
gcacagaaaauggaagacagcu

SEQ ID NO: 1644360 - RNA, 21 nt, Human
gcacagaaaauggaagacagc

SEQ ID NO: 1644361 - RNA, 21 nt, Human
gcacagacccugcccuguggg

SEQ ID NO: 1644362 - RNA, 20 nt, Human
gcacagacccugcccugugg

SEQ ID NO: 1644363 - RNA, 19 nt, Human
gcacagacccugcccugug

SEQ ID NO: 1644364 - RNA, 18 nt, Human
gcacagacccugcccugu

SEQ ID NO: 1644365 - RNA, 22 nt, Human
gcacagacccugcccugugggc

SEQ ID NO: 1644366 - RNA, 15 nt, Human
gcacagaguuguuac

SEQ ID NO: 1644367 - RNA, 20 nt, Human
gcacagaaaauggaagacag

SEQ ID NO: 1644368 - RNA, 17 nt, Human
gcacaagcuccaagcuc

SEQ ID NO: 1644369 - RNA, 15 nt, Human
gcacaagcuccaagc

SEQ ID NO: 1644370 - RNA, 18 nt, Human
gcacaagcuccaagcucc

SEQ ID NO: 1644371 - RNA, 21 nt, Human
gcacaagcuccaagcucccag

SEQ ID NO: 1644372 - RNA, 23 nt, Human
gcacaaauucugucucuggauua

SEQ ID NO: 1644373 - RNA, 18 nt, Human
gcacugacuucuaaguaa

SEQ ID NO: 1644374 - RNA, 15 nt, Human
gcacugacuucuaag

SEQ ID NO: 1644375 - RNA, 16 nt, Human
gcacgauuucuguuua

SEQ ID NO: 1644376 - RNA, 20 nt, Human
gcacugcugcccagccucca

SEQ ID NO: 1644377 - RNA, 18 nt, Human
gcacugcugcccagccuc

SEQ ID NO: 1644378 - RNA, 15 nt, Human
gcacugcugcccagc

SEQ ID NO: 1644379 - RNA, 14 nt, Human
gcacugcugcccag

SEQ ID NO: 1644380 - RNA, 23 nt, Human
gcacugcuuccagugaggcucug

SEQ ID NO: 1644381 - RNA, 19 nt, Human
gcacugguggcccgacagc

SEQ ID NO: 1644382 - RNA, 14 nt, Human
gcacugguggcccg

SEQ ID NO: 1644383 - RNA, 19 nt, Human
gcacuguggguagacacac

SEQ ID NO: 1644384 - RNA, 14 nt, Human
gcagacaggcaagc

SEQ ID NO: 1644385 - RNA, 13 nt, Human
gcagacaggcaag

SEQ ID NO: 1644386 - RNA, 12 nt, Human
gcagacaggcaa

SEQ ID NO: 1644387 - RNA, 22 nt, Human
gcacagaguuguuacauuuuua

SEQ ID NO: 1644388 - RNA, 16 nt, Human
gcacagaguuguuaca

SEQ ID NO: 1644389 - RNA, 18 nt, Human
gcacagaguuguuacauu

SEQ ID NO: 1644390 - RNA, 19 nt, Human
gcacagaguuguuacauuu

SEQ ID NO: 1644391 - RNA, 21 nt, Human
gcacagaguuguuacauuuuu

SEQ ID NO: 1644392 - RNA, 13 nt, Human
gcacagugcaucu

SEQ ID NO: 1644393 - RNA, 18 nt, Human
gcacagugcaucucagcc

SEQ ID NO: 1644394 - RNA, 15 nt, Human
gcacagugcaucuca

SEQ ID NO: 1644395 - RNA, 13 nt, Human
gcacgauuucugu

SEQ ID NO: 1644396 - RNA, 15 nt, Human
gcacgauuucuguuu

SEQ ID NO: 1644397 - RNA, 21 nt, Human
gcaccuuagacagucccugcc

SEQ ID NO: 1644398 - RNA, 20 nt, Human
gcaccuuagacagucccugc

SEQ ID NO: 1644399 - RNA, 12 nt, Human
gcaccauaacuu

SEQ ID NO: 1644400 - RNA, 22 nt, Human
gcaccccagcuggggccaggcu

SEQ ID NO: 1644401 - RNA, 17 nt, Human
gagugacagaggcagcc

SEQ ID NO: 1644402 - RNA, 13 nt, Human
gagugggugaaua

SEQ ID NO: 1644403 - RNA, 19 nt, Human
gagugucuuaauuaaaaga

SEQ ID NO: 1644404 - RNA, 20 nt, Human
gagugugccugaagucccag

SEQ ID NO: 1644405 - RNA, 12 nt, Human
gaguuacagaca

SEQ ID NO: 1644406 - RNA, 16 nt, Human
gaguguugaaacggau

SEQ ID NO: 1644407 - RNA, 22 nt, Human
gauaaauggcuuccuggcaaua

SEQ ID NO: 1644408 - RNA, 20 nt, Human
gauaaaugccaucaauaaaa

SEQ ID NO: 1644409 - RNA, 15 nt, Human
gauaaaugccaucaa

SEQ ID NO: 1644410 - RNA, 11 nt, Human
gauaaaugcca

SEQ ID NO: 1644411 - RNA, 21 nt, Human
gaguugaagacagagcuacac

SEQ ID NO: 1644412 - RNA, 17 nt, Human
gaguugaagacagagcu

SEQ ID NO: 1644413 - RNA, 15 nt, Human
gaguugaagacagag

SEQ ID NO: 1644414 - RNA, 20 nt, Human
gaguucaucuugaauuguaa

SEQ ID NO: 1644415 - RNA, 19 nt, Human
gaguucaucuugaauugua

SEQ ID NO: 1644416 - RNA, 14 nt, Human
gaguucaucuugaa

SEQ ID NO: 1644417 - RNA, 15 nt, Human
gaguuacagacaaag

SEQ ID NO: 1644418 - RNA, 13 nt, Human
gaguuacagacaa

SEQ ID NO: 1644419 - RNA, 22 nt, Human
gauagccaaggccaaaggaagc

SEQ ID NO: 1644420 - RNA, 15 nt, Human
gauagcacagacccu

SEQ ID NO: 1644421 - RNA, 16 nt, Human
gauagcacagacccug

SEQ ID NO: 1644422 - RNA, 20 nt, Human
gauacaggaaaagcugcuga

SEQ ID NO: 1644423 - RNA, 22 nt, Human
gauaagaaccuuuugagugccu

SEQ ID NO: 1644424 - RNA, 23 nt, Human
gauacaggaaaagcugcugacag

SEQ ID NO: 1644425 - RNA, 21 nt, Human
gauacaggaaaagcugcugac

SEQ ID NO: 1644426 - RNA, 16 nt, Human
gaucacggcucacugc

SEQ ID NO: 1644427 - RNA, 15 nt, Human
gaucacggcucacug

SEQ ID NO: 1644428 - RNA, 20 nt, Human
gaucacggcucacugcagcc

SEQ ID NO: 1644429 - RNA, 14 nt, Human
gaucacagccucug

SEQ ID NO: 1644430 - RNA, 18 nt, Human
gaucacggcucacugcag

SEQ ID NO: 1644431 - RNA, 24 nt, Human
gauaugauucaaaugucuauaaac

SEQ ID NO: 1644432 - RNA, 22 nt, Human
gauaugauucaaaugucuauaa

SEQ ID NO: 1644433 - RNA, 14 nt, Human
gauaugauucaaau

SEQ ID NO: 1644434 - RNA, 17 nt, Human
gauauaaguguguguuu

SEQ ID NO: 1644435 - RNA, 15 nt, Human
gauauaagugugugu

SEQ ID NO: 1644436 - RNA, 16 nt, Human
gagguuucaaaccucc

SEQ ID NO: 1644437 - RNA, 17 nt, Human
gagguugggaggccauu

SEQ ID NO: 1644438 - RNA, 15 nt, Human
gagguugggaggcca

SEQ ID NO: 1644439 - RNA, 20 nt, Human
gaggucagagccugcaguua

SEQ ID NO: 1644440 - RNA, 17 nt, Human
gaggucagagccugcag

SEQ ID NO: 1644441 - RNA, 17 nt, Human
gaguaggaagacuuugg

SEQ ID NO: 1644442 - RNA, 13 nt, Human
gaguaggaagacu

SEQ ID NO: 1644443 - RNA, 12 nt, Human
gaguaggaagac

SEQ ID NO: 1644444 - RNA, 22 nt, Human
gaguagcugggacuacaggcac

SEQ ID NO: 1644445 - RNA, 19 nt, Human
gaguagcugggacuacagg

SEQ ID NO: 1644446 - RNA, 23 nt, Human
gaguacuacaguccucccaucuc

SEQ ID NO: 1644447 - RNA, 21 nt, Human
gaguacuacaguccucccauc

SEQ ID NO: 1644448 - RNA, 20 nt, Human
gaguacuacaguccucccau

SEQ ID NO: 1644449 - RNA, 22 nt, Human
gaguaauccaagcaaaugugaa

SEQ ID NO: 1644450 - RNA, 14 nt, Human
gagucgaggacagg

SEQ ID NO: 1644451 - RNA, 19 nt, Human
gaguccgaaagggacuugg

SEQ ID NO: 1644452 - RNA, 16 nt, Human
gagucgaggacaggga

SEQ ID NO: 1644453 - RNA, 15 nt, Human
gagucgaggacaggg

SEQ ID NO: 1644454 - RNA, 19 nt, Human
gaguaggaagacuuuggaa

SEQ ID NO: 1644455 - RNA, 18 nt, Human
gaguaggaagacuuugga

SEQ ID NO: 1644456 - RNA, 11 nt, Human
gaguauauguc

SEQ ID NO: 1644457 - RNA, 16 nt, Human
gagugacagaggcagc

SEQ ID NO: 1644458 - RNA, 15 nt, Human
gagugacagaggcag

SEQ ID NO: 1644459 - RNA, 14 nt, Human
gagugacagaggca

SEQ ID NO: 1644460 - RNA, 17 nt, Human
gagugaagcugggagaa

SEQ ID NO: 1644461 - RNA, 14 nt, Human
gagucugaaggcug

SEQ ID NO: 1644462 - RNA, 15 nt, Human
gagucugaaggcugg

SEQ ID NO: 1644463 - RNA, 13 nt, Human
gagucugaaggcu

SEQ ID NO: 1644464 - RNA, 12 nt, Human
gagucugaaggc

SEQ ID NO: 1644465 - RNA, 21 nt, Human
gagucuauuuacggaacucaa

SEQ ID NO: 1644466 - RNA, 19 nt, Human
gaggcagagguugcaguga

SEQ ID NO: 1644467 - RNA, 19 nt, Human
gaggcagccccauucugcc

SEQ ID NO: 1644468 - RNA, 9 nt, Human
gaggcaggg

SEQ ID NO: 1644469 - RNA, 20 nt, Human
gaggcagccccauucugccu

SEQ ID NO: 1644470 - RNA, 21 nt, Human
gaggcagccccauucugccug

SEQ ID NO: 1644471 - RNA, 23 nt, Human
gaggccaugggccuccugugugu

SEQ ID NO: 1644472 - RNA, 21 nt, Human
gaggccaugggccuccugugu

SEQ ID NO: 1644473 - RNA, 20 nt, Human
gaggccaugggccuccugug

SEQ ID NO: 1644474 - RNA, 18 nt, Human
gaggccaugggccuccug

SEQ ID NO: 1644475 - RNA, 17 nt, Human
gaggccaugggccuccu

SEQ ID NO: 1644476 - RNA, 14 nt, Human
gaggccaugggccu

SEQ ID NO: 1644477 - RNA, 19 nt, Human
gaggaucucuugagccugg

SEQ ID NO: 1644478 - RNA, 16 nt, Human
gaggaucucuugagcc

SEQ ID NO: 1644479 - RNA, 22 nt, Human
gaggaucucuugagccugggag

SEQ ID NO: 1644480 - RNA, 13 nt, Human
gaggaucucuuga

SEQ ID NO: 1644481 - RNA, 22 nt, Human
gagcccuguccugccuaaggcu

SEQ ID NO: 1644482 - RNA, 20 nt, Human
gaggauugcuugagcucagg

SEQ ID NO: 1644483 - RNA, 20 nt, Human
gaggcccuucucuccagccc

SEQ ID NO: 1644484 - RNA, 15 nt, Human
gaggcccuucucucc

SEQ ID NO: 1644485 - RNA, 21 nt, Human
gaggcccuucucuccagcccc

SEQ ID NO: 1644486 - RNA, 22 nt, Human
gaggcccuucucuccagccccu

SEQ ID NO: 1644487 - RNA, 16 nt, Human
gaggcccagagggccu

SEQ ID NO: 1644488 - RNA, 15 nt, Human
gaggcccagagggcc

SEQ ID NO: 1644489 - RNA, 19 nt, Human
gaggcccagagggccugca

SEQ ID NO: 1644490 - RNA, 14 nt, Human
gaggcccagagggc

SEQ ID NO: 1644491 - RNA, 13 nt, Human
gaggcccagaggg

SEQ ID NO: 1644492 - RNA, 11 nt, Human
gaggcccagag

SEQ ID NO: 1644493 - RNA, 19 nt, Human
gaggccuucucugaaggac

SEQ ID NO: 1644494 - RNA, 18 nt, Human
gaggccuucucugaagga

SEQ ID NO: 1644495 - RNA, 16 nt, Human
gaggccuucucugaag

SEQ ID NO: 1644496 - RNA, 21 nt, Human
gaggcgcaugaauuugugaag

SEQ ID NO: 1644497 - RNA, 14 nt, Human
gagggucugaggaa

SEQ ID NO: 1644498 - RNA, 13 nt, Human
gagggucugagga

SEQ ID NO: 1644499 - RNA, 21 nt, Human
gagggugaagugaagacaaug

SEQ ID NO: 1644500 - RNA, 12 nt, Human
gaggguggaaua

SEQ ID NO: 1644501 - RNA, 22 nt, Human
gagggugucccaaaaagaaagg

SEQ ID NO: 1644502 - RNA, 21 nt, Human
gaggguggugaccucugccug

SEQ ID NO: 1644503 - RNA, 14 nt, Human
gaggguggugaccu

SEQ ID NO: 1644504 - RNA, 15 nt, Human
gagggugggaguggg

SEQ ID NO: 1644505 - RNA, 13 nt, Human
gaggucagagccu

SEQ ID NO: 1644506 - RNA, 12 nt, Human
gaggucagagcc

SEQ ID NO: 1644507 - RNA, 17 nt, Human
gaggucaaggcugcagu

SEQ ID NO: 1644508 - RNA, 15 nt, Human
gaggguugggcuggu

SEQ ID NO: 1644509 - RNA, 14 nt, Human
gaggguugggcugg

SEQ ID NO: 1644510 - RNA, 21 nt, Human
gagguaaggaauaccuguccc

SEQ ID NO: 1644511 - RNA, 24 nt, Human
gagguaaggaauaccugucccccu

SEQ ID NO: 1644512 - RNA, 13 nt, Human
gaggguaaggcug

SEQ ID NO: 1644513 - RNA, 17 nt, Human
gaggggguggccuccca

SEQ ID NO: 1644514 - RNA, 17 nt, Human
gaggggcugugggcgug

SEQ ID NO: 1644515 - RNA, 18 nt, Human
gagggagugacagaggca

SEQ ID NO: 1644516 - RNA, 14 nt, Human
gagggagguaagga

SEQ ID NO: 1644517 - RNA, 20 nt, Human
gagggagggcuccagacaca

SEQ ID NO: 1644518 - RNA, 20 nt, Human
gagggagggggaaggcaggg

SEQ ID NO: 1644519 - RNA, 22 nt, Human
gagggagugacagaggcagccc

SEQ ID NO: 1644520 - RNA, 21 nt, Human
gagggagugacagaggcagcc

SEQ ID NO: 1644521 - RNA, 19 nt, Human
gagggagggcuccagacac

SEQ ID NO: 1644522 - RNA, 20 nt, Human
gaggcugggcucccuuccca

SEQ ID NO: 1644523 - RNA, 12 nt, Human
ggaaugcagugg

SEQ ID NO: 1644524 - RNA, 24 nt, Human
ggaaugauuaauuaaaacacaaca

SEQ ID NO: 1644525 - RNA, 17 nt, Human
ggaauucuguauagauu

SEQ ID NO: 1644526 - RNA, 15 nt, Human
ggaauucuguauaga

SEQ ID NO: 1644527 - RNA, 12 nt, Human
ggaauucuguau

SEQ ID NO: 1644528 - RNA, 19 nt, Human
ggaauguuugccucugccu

SEQ ID NO: 1644529 - RNA, 23 nt, Human
ggaauuucucccagucauuuaau

SEQ ID NO: 1644530 - RNA, 22 nt, Human
ggaauuggagcucgugggacag

SEQ ID NO: 1644531 - RNA, 16 nt, Human
ggaauuggagcucgug

SEQ ID NO: 1644532 - RNA, 12 nt, Human
ggaauuguguuu

SEQ ID NO: 1644533 - RNA, 17 nt, Human
ggacaaaauggaauacu

SEQ ID NO: 1644534 - RNA, 16 nt, Human
ggacaaaauggaauac

SEQ ID NO: 1644535 - RNA, 19 nt, Human
ggaauuuucaucuaggauu

SEQ ID NO: 1644536 - RNA, 20 nt, Human
ggaagugacgguuuaauggg

SEQ ID NO: 1644537 - RNA, 18 nt, Human
ggaagugcuaauuuugaa

SEQ ID NO: 1644538 - RNA, 16 nt, Human
ggaaguacuggagaaa

SEQ ID NO: 1644539 - RNA, 12 nt, Human
ggaaguacugga

SEQ ID NO: 1644540 - RNA, 18 nt, Human
ggaaguacuggagaaaau

SEQ ID NO: 1644541 - RNA, 23 nt, Human
ggaaggggagauaaggguaucug

SEQ ID NO: 1644542 - RNA, 17 nt, Human
ggaaggcugagaggaga

SEQ ID NO: 1644543 - RNA, 16 nt, Human
ggaacgcguugaaauu

SEQ ID NO: 1644544 - RNA, 14 nt, Human
ggaaggcagggagg

SEQ ID NO: 1644545 - RNA, 13 nt, Human
ggaaccugacccc

SEQ ID NO: 1644546 - RNA, 16 nt, Human
ggacauuugcucaugg

SEQ ID NO: 1644547 - RNA, 23 nt, Human
ggaccaaaaaccaguauuguaca

SEQ ID NO: 1644548 - RNA, 16 nt, Human
ggaccaaaaaccagua

SEQ ID NO: 1644549 - RNA, 20 nt, Human
ggacauugcggacagccacg

SEQ ID NO: 1644550 - RNA, 22 nt, Human
ggacagccacggccaggccaga

SEQ ID NO: 1644551 - RNA, 21 nt, Human
ggacagccacggccaggccag

SEQ ID NO: 1644552 - RNA, 20 nt, Human
ggacagccacggccaggcca

SEQ ID NO: 1644553 - RNA, 19 nt, Human
ggacagccacggccaggcc

SEQ ID NO: 1644554 - RNA, 15 nt, Human
ggacagccacggcca

SEQ ID NO: 1644555 - RNA, 22 nt, Human
ggacacucaaaagcugggcagg

SEQ ID NO: 1644556 - RNA, 17 nt, Human
ggacacucaaaagcugg

SEQ ID NO: 1644557 - RNA, 17 nt, Human
ggaccuugaacugggua

SEQ ID NO: 1644558 - RNA, 15 nt, Human
ggaccuugaacuggg

SEQ ID NO: 1644559 - RNA, 20 nt, Human
ggacgcuacccgggaagggg

SEQ ID NO: 1644560 - RNA, 19 nt, Human
ggacgcuacccgggaaggg

SEQ ID NO: 1644561 - RNA, 17 nt, Human
ggacgcuacccgggaag

SEQ ID NO: 1644562 - RNA, 23 nt, Human
ggaccucaggugagaagcagagg

SEQ ID NO: 1644563 - RNA, 19 nt, Human
ggaccucaggugagaagca

SEQ ID NO: 1644564 - RNA, 14 nt, Human
ggaccagagcugcc

SEQ ID NO: 1644565 - RNA, 13 nt, Human
ggaccagagcugc

SEQ ID NO: 1644566 - RNA, 14 nt, Human
ggacgcucucuggc

SEQ ID NO: 1644567 - RNA, 13 nt, Human
ggacgcucucugg

SEQ ID NO: 1644568 - RNA, 15 nt, Human
ggacgcucucuggcc

SEQ ID NO: 1644569 - RNA, 14 nt, Human
ggacuguggugacu

SEQ ID NO: 1644570 - RNA, 18 nt, Human
ggacuggccucugcugau

SEQ ID NO: 1644571 - RNA, 19 nt, Human
ggagaaucacuugaacccg

SEQ ID NO: 1644572 - RNA, 15 nt, Human
ggagaaucacuugaa

SEQ ID NO: 1644573 - RNA, 18 nt, Human
ggagaagcggcuggcagc

SEQ ID NO: 1644574 - RNA, 17 nt, Human
ggagaagcggcuggcag

SEQ ID NO: 1644575 - RNA, 17 nt, Human
ggacugugugcucagga

SEQ ID NO: 1644576 - RNA, 22 nt, Human
ggacuguggugacuuuggauaa

SEQ ID NO: 1644577 - RNA, 21 nt, Human
ggacuguggugacuuuggaua

SEQ ID NO: 1644578 - RNA, 17 nt, Human
ggacuguggugacuuug

SEQ ID NO: 1644579 - RNA, 15 nt, Human
ggacuguggugacuu

SEQ ID NO: 1644580 - RNA, 20 nt, Human
gcuugaggguugggcuggug

SEQ ID NO: 1644581 - RNA, 18 nt, Human
gcuugaggguugggcugg

SEQ ID NO: 1644582 - RNA, 22 nt, Human
gcuugaggguugggcugguguc

SEQ ID NO: 1644583 - RNA, 15 nt, Human
gcuuugugauuuuug

SEQ ID NO: 1644584 - RNA, 23 nt, Human
gcuuucagauacuggauuguacu

SEQ ID NO: 1644585 - RNA, 15 nt, Human
gcuuuguaugcacuu

SEQ ID NO: 1644586 - RNA, 18 nt, Human
gcuuucagauacuggauu

SEQ ID NO: 1644587 - RNA, 14 nt, Human
gcuuucagauacug

SEQ ID NO: 1644588 - RNA, 13 nt, Human
gcuuuucacugcu

SEQ ID NO: 1644589 - RNA, 18 nt, Human
gcuuuucacugcuggcug

SEQ ID NO: 1644590 - RNA, 14 nt, Human
gcuuuucacugcug

SEQ ID NO: 1644591 - RNA, 21 nt, Human
gcuuuguuuguugucagcuga

SEQ ID NO: 1644592 - RNA, 18 nt, Human
ggaaaacaugcuacacac

SEQ ID NO: 1644593 - RNA, 23 nt, Human
gcuuuucacugcuggcugccuua

SEQ ID NO: 1644594 - RNA, 22 nt, Human
gcuuuucacugcuggcugccuu

SEQ ID NO: 1644595 - RNA, 20 nt, Human
ggaaaagcugcugacagugu

SEQ ID NO: 1644596 - RNA, 18 nt, Human
ggaaaagcugcugacagu

SEQ ID NO: 1644597 - RNA, 14 nt, Human
ggaaaagcugcuga

SEQ ID NO: 1644598 - RNA, 21 nt, Human
ggaaaaccaagccguggcuuc

SEQ ID NO: 1644599 - RNA, 17 nt, Human
ggaaaucaaauaugcaa

SEQ ID NO: 1644600 - RNA, 14 nt, Human
ggaaaucaccgaaa

SEQ ID NO: 1644601 - RNA, 21 nt, Human
ggaaaucaccgaaaacguggc

SEQ ID NO: 1644602 - RNA, 16 nt, Human
ggaacaggaaacugau

SEQ ID NO: 1644603 - RNA, 21 nt, Human
ggaaaggcuccaggagcagcc

SEQ ID NO: 1644604 - RNA, 20 nt, Human
ggaaaggcuccaggagcagc

SEQ ID NO: 1644605 - RNA, 19 nt, Human
ggaaaggcuccaggagcag

SEQ ID NO: 1644606 - RNA, 17 nt, Human
ggaaaggcuccaggagc

SEQ ID NO: 1644607 - RNA, 22 nt, Human
ggaaaggcuccaggagcagcca

SEQ ID NO: 1644608 - RNA, 23 nt, Human
ggaaaaucagccugcuccagcug

SEQ ID NO: 1644609 - RNA, 19 nt, Human
ggaaaaucagccugcucca

SEQ ID NO: 1644610 - RNA, 18 nt, Human
ggaaaaguuuaauauuaa

SEQ ID NO: 1644611 - RNA, 14 nt, Human
ggaaaaguuuaaua

SEQ ID NO: 1644612 - RNA, 14 nt, Human
ggaaaggcuccagg

SEQ ID NO: 1644613 - RNA, 13 nt, Human
ggaaaggcuccag

SEQ ID NO: 1644614 - RNA, 12 nt, Human
ggaaaggcucca

SEQ ID NO: 1644615 - RNA, 20 nt, Human
gcugucuacacuaagagaga

SEQ ID NO: 1644616 - RNA, 20 nt, Human
gcugccaaugggagcucaug

SEQ ID NO: 1644617 - RNA, 19 nt, Human
gcugccaaugggagcucau

SEQ ID NO: 1644618 - RNA, 16 nt, Human
gcugccaaugggagcu

SEQ ID NO: 1644619 - RNA, 15 nt, Human
gcugccaaugggagc

SEQ ID NO: 1644620 - RNA, 17 nt, Human
gcugucuccauguuuga

SEQ ID NO: 1644621 - RNA, 20 nt, Human
gcugugggcgugagaccugc

SEQ ID NO: 1644622 - RNA, 22 nt, Human
gcugugggcgugagaccugccc

SEQ ID NO: 1644623 - RNA, 21 nt, Human
gcugugggcgugagaccugcc

SEQ ID NO: 1644624 - RNA, 14 nt, Human
gcuguucagcuggu

SEQ ID NO: 1644625 - RNA, 12 nt, Human
gcuguucaugaa

SEQ ID NO: 1644626 - RNA, 21 nt, Human
gcuguucaugaaagauucaau

SEQ ID NO: 1644627 - RNA, 17 nt, Human
gcuuagucacugagaca

SEQ ID NO: 1644628 - RNA, 15 nt, Human
gcuuagucacugaga

SEQ ID NO: 1644629 - RNA, 20 nt, Human
gcuuagucacugagacagcc

SEQ ID NO: 1644630 - RNA, 19 nt, Human
gcuuagucacugagacagc

SEQ ID NO: 1644631 - RNA, 21 nt, Human
gcuuagucacugagacagccc

SEQ ID NO: 1644632 - RNA, 16 nt, Human
gcuugaggguugggcu

SEQ ID NO: 1644633 - RNA, 15 nt, Human
gcuuccagugaggcu

SEQ ID NO: 1644634 - RNA, 18 nt, Human
gcuucauuuccugugucu

SEQ ID NO: 1644635 - RNA, 21 nt, Human
gcuucauccuccucagaucuu

SEQ ID NO: 1644636 - RNA, 17 nt, Human
gcuucauuuccuguguc

SEQ ID NO: 1644637 - RNA, 18 nt, Human
gcuuccagugaggcucug

SEQ ID NO: 1644638 - RNA, 16 nt, Human
gcuuccagugaggcuc

SEQ ID NO: 1644639 - RNA, 16 nt, Human
gcuucauuuccugugu

SEQ ID NO: 1644640 - RNA, 13 nt, Human
gcuucauuuccug

SEQ ID NO: 1644641 - RNA, 15 nt, Human
gcuucauccuccuca

SEQ ID NO: 1644642 - RNA, 12 nt, Human
gcuucauccucc

SEQ ID NO: 1644643 - RNA, 18 nt, Human
gcuucaguggcagcugcu

SEQ ID NO: 1644644 - RNA, 17 nt, Human
gcuucaguggcagcugc

SEQ ID NO: 1644645 - RNA, 19 nt, Human
gcuuaucucaggggugugc

SEQ ID NO: 1644646 - RNA, 20 nt, Human
gcuuauacacuuacacuuua

SEQ ID NO: 1644647 - RNA, 12 nt, Human
gcuuauacacuu

SEQ ID NO: 1644648 - RNA, 16 nt, Human
gcuucaguggcagcug

SEQ ID NO: 1644649 - RNA, 14 nt, Human
ggcauggcugggaa

SEQ ID NO: 1644650 - RNA, 18 nt, Human
ggcaugggaaugaauguc

SEQ ID NO: 1644651 - RNA, 17 nt, Human
ggcauuccccaggaggc

SEQ ID NO: 1644652 - RNA, 22 nt, Human
ggcaugggaaugaaugucagug

SEQ ID NO: 1644653 - RNA, 19 nt, Human
ggcauuccccaggaggcca

SEQ ID NO: 1644654 - RNA, 18 nt, Human
ggcauuccccaggaggcc

SEQ ID NO: 1644655 - RNA, 17 nt, Human
ggccacuccagaccccu

SEQ ID NO: 1644656 - RNA, 17 nt, Human
ggccagcugcuugggcu

SEQ ID NO: 1644657 - RNA, 22 nt, Human
ggccagccuugaccauucucca

SEQ ID NO: 1644658 - RNA, 20 nt, Human
ggccagccuugaccauucuc

SEQ ID NO: 1644659 - RNA, 18 nt, Human
ggccaggcccucugccca

SEQ ID NO: 1644660 - RNA, 23 nt, Human
ggccagcugcuugggcuucaucc

SEQ ID NO: 1644661 - RNA, 16 nt, Human
ggccaugggccuccug

SEQ ID NO: 1644662 - RNA, 16 nt, Human
ggccaggcugcucuug

SEQ ID NO: 1644663 - RNA, 11 nt, Human
ggccaggcugc

SEQ ID NO: 1644664 - RNA, 15 nt, Human
ggccaggcugcucuu

SEQ ID NO: 1644665 - RNA, 14 nt, Human
ggccaggcugcucu

SEQ ID NO: 1644666 - RNA, 21 nt, Human
ggcagcucagagaggguggga

SEQ ID NO: 1644667 - RNA, 16 nt, Human
ggcagcucaccucucc

SEQ ID NO: 1644668 - RNA, 17 nt, Human
ggcagcuugaggguugg

SEQ ID NO: 1644669 - RNA, 14 nt, Human
ggcagcucaccucu

SEQ ID NO: 1644670 - RNA, 12 nt, Human
ggcagcucaccu

SEQ ID NO: 1644671 - RNA, 16 nt, Human
ggcagugggagcugcc

SEQ ID NO: 1644672 - RNA, 21 nt, Human
ggcagugggacagggcauggc

SEQ ID NO: 1644673 - RNA, 14 nt, Human
ggcagugggagcug

SEQ ID NO: 1644674 - RNA, 13 nt, Human
ggcagugggagcu

SEQ ID NO: 1644675 - RNA, 20 nt, Human
ggcagggucucacucugucg

SEQ ID NO: 1644676 - RNA, 19 nt, Human
ggcagggucucacucuguc

SEQ ID NO: 1644677 - RNA, 18 nt, Human
ggcaugacacgaauauug

SEQ ID NO: 1644678 - RNA, 15 nt, Human
ggcaugaagacagau

SEQ ID NO: 1644679 - RNA, 18 nt, Human
ggcauggccagguggcca

SEQ ID NO: 1644680 - RNA, 17 nt, Human
ggcauggccagguggcc

SEQ ID NO: 1644681 - RNA, 15 nt, Human
ggauuguaaaauggu

SEQ ID NO: 1644682 - RNA, 17 nt, Human
ggcaacccccagccugc

SEQ ID NO: 1644683 - RNA, 16 nt, Human
ggcaacccccagccug

SEQ ID NO: 1644684 - RNA, 17 nt, Human
ggauugcuacuguccua

SEQ ID NO: 1644685 - RNA, 17 nt, Human
ggauuagggagagaaga

SEQ ID NO: 1644686 - RNA, 16 nt, Human
ggauucuuaaaguuga

SEQ ID NO: 1644687 - RNA, 19 nt, Human
ggauucuuaaaguugaauu

SEQ ID NO: 1644688 - RNA, 18 nt, Human
ggauucuuaaaguugaau

SEQ ID NO: 1644689 - RNA, 23 nt, Human
ggauuacaagcgugagccacugc

SEQ ID NO: 1644690 - RNA, 19 nt, Human
ggauuacaggcuccugcca

SEQ ID NO: 1644691 - RNA, 16 nt, Human
ggauucuuccucccuc

SEQ ID NO: 1644692 - RNA, 16 nt, Human
ggauucuuauggacaa

SEQ ID NO: 1644693 - RNA, 20 nt, Human
ggauucuuaaaguugaauuu

SEQ ID NO: 1644694 - RNA, 23 nt, Human
ggcacccaccaucaugucuggcu

SEQ ID NO: 1644695 - RNA, 22 nt, Human
ggcacccggccccugcugguuc

SEQ ID NO: 1644696 - RNA, 18 nt, Human
ggcaccggggccucggac

SEQ ID NO: 1644697 - RNA, 23 nt, Human
ggcaaugcuggcuguuggcuggg

SEQ ID NO: 1644698 - RNA, 15 nt, Human
ggcaaugcuggcugu

SEQ ID NO: 1644699 - RNA, 14 nt, Human
ggcaaugcuggcug

SEQ ID NO: 1644700 - RNA, 19 nt, Human
ggcaacccccagccugcua

SEQ ID NO: 1644701 - RNA, 18 nt, Human
ggcaacccccagccugcu

SEQ ID NO: 1644702 - RNA, 19 nt, Human
ggcaaucauggugcucaga

SEQ ID NO: 1644703 - RNA, 19 nt, Human
ggauuacaagcgugagcca

SEQ ID NO: 1644704 - RNA, 15 nt, Human
ggaugcuuguacaua

SEQ ID NO: 1644705 - RNA, 19 nt, Human
ggaugcagccucacagucc

SEQ ID NO: 1644706 - RNA, 13 nt, Human
ggauccuccaggu

SEQ ID NO: 1644707 - RNA, 12 nt, Human
ggauccuccagg

SEQ ID NO: 1644708 - RNA, 17 nt, Human
ggaugcagccucacagu

SEQ ID NO: 1644709 - RNA, 16 nt, Human
ggaugcagccucacag

SEQ ID NO: 1644710 - RNA, 21 nt, Human
ggaugauuggaggggggaggu

SEQ ID NO: 1644711 - RNA, 23 nt, Human
ggaugcacagaguuguuacauuu

SEQ ID NO: 1644712 - RNA, 17 nt, Human
ggaucccucauccucau

SEQ ID NO: 1644713 - RNA, 13 nt, Human
ggaucccucaucc

SEQ ID NO: 1644714 - RNA, 22 nt, Human
ggaucccucauccucauaccca

SEQ ID NO: 1644715 - RNA, 22 nt, Human
ggaucaaaccccgaccaccugc

SEQ ID NO: 1644716 - RNA, 18 nt, Human
ggauacaaaagcauguga

SEQ ID NO: 1644717 - RNA, 15 nt, Human
ggagugcagugagcc

SEQ ID NO: 1644718 - RNA, 14 nt, Human
ggagugcagugagc

SEQ ID NO: 1644719 - RNA, 12 nt, Human
ggagugcaguga

SEQ ID NO: 1644720 - RNA, 17 nt, Human
ggcccucugcccacucc

SEQ ID NO: 1644721 - RNA, 16 nt, Human
ggcccucugcccacuc

SEQ ID NO: 1644722 - RNA, 15 nt, Human
ggcccucugcccacu

SEQ ID NO: 1644723 - RNA, 13 nt, Human
ggcccucugccca

SEQ ID NO: 1644724 - RNA, 20 nt, Human
ggcccucugcccacucccug

SEQ ID NO: 1644725 - RNA, 19 nt, Human
ggcccucugcccacucccu

SEQ ID NO: 1644726 - RNA, 21 nt, Human
ggcccucugcccacucccugc

SEQ ID NO: 1644727 - RNA, 12 nt, Human
ggcccagagagg

SEQ ID NO: 1644728 - RNA, 11 nt, Human
ggcccagagag

SEQ ID NO: 1644729 - RNA, 15 nt, Human
ggcccugccuccuuu

SEQ ID NO: 1644730 - RNA, 14 nt, Human
ggcccugccuccuu

SEQ ID NO: 1644731 - RNA, 22 nt, Human
ggcccugcccugguuuccugcc

SEQ ID NO: 1644732 - RNA, 22 nt, Human
ggcccuggcucccacaggcccu

SEQ ID NO: 1644733 - RNA, 13 nt, Human
ggcccuggcuccc

SEQ ID NO: 1644734 - RNA, 13 nt, Human
ggcccugccuccu

SEQ ID NO: 1644735 - RNA, 20 nt, Human
ggcccugcccugguuuccug

SEQ ID NO: 1644736 - RNA, 13 nt, Human
ggcccugcccugg

SEQ ID NO: 1644737 - RNA, 12 nt, Human
ggcccugcccug

SEQ ID NO: 1644738 - RNA, 11 nt, Human
ggcccugcccu

SEQ ID NO: 1644739 - RNA, 16 nt, Human
ggccucugcacucccc

SEQ ID NO: 1644740 - RNA, 15 nt, Human
ggccucugcacuccc

SEQ ID NO: 1644741 - RNA, 14 nt, Human
ggccucugcacucc

SEQ ID NO: 1644742 - RNA, 13 nt, Human
ggccucugcacuc

SEQ ID NO: 1644743 - RNA, 17 nt, Human
ggccucuuaugggcugg

SEQ ID NO: 1644744 - RNA, 20 nt, Human
ggccucgguguggagaagcg

SEQ ID NO: 1644745 - RNA, 18 nt, Human
ggccucuuaugggcuggg

SEQ ID NO: 1644746 - RNA, 20 nt, Human
ggccucggacuuagcuggga

SEQ ID NO: 1644747 - RNA, 22 nt, Human
ggccucggacuuagcugggaga

SEQ ID NO: 1644748 - RNA, 16 nt, Human
ggcuccaggcuccuuu

SEQ ID NO: 1644749 - RNA, 19 nt, Human
ggcucccacaggcccuucc

SEQ ID NO: 1644750 - RNA, 18 nt, Human
ggcucccacaggcccuuc

SEQ ID NO: 1644751 - RNA, 17 nt, Human
ggcucccacaggcccuu

SEQ ID NO: 1644752 - RNA, 11 nt, Human
ggcuccaggcu

SEQ ID NO: 1644753 - RNA, 21 nt, Human
ggcucaaguccucuuuucuga

SEQ ID NO: 1644754 - RNA, 15 nt, Human
ggcucaaguccucuu

SEQ ID NO: 1644755 - RNA, 19 nt, Human
ggcuccaggagcagccaca

SEQ ID NO: 1644756 - RNA, 13 nt, Human
ggcuccaggagca

SEQ ID NO: 1644757 - RNA, 12 nt, Human
ggcuccaggagc

SEQ ID NO: 1644758 - RNA, 12 nt, Human
ggcuccagcugg

SEQ ID NO: 1644759 - RNA, 15 nt, Human
ggcuaugcauuugaa

SEQ ID NO: 1644760 - RNA, 19 nt, Human
ggcuaugggggcacugagg

SEQ ID NO: 1644761 - RNA, 15 nt, Human
ggcuaguugggcuuc

SEQ ID NO: 1644762 - RNA, 23 nt, Human
ggcuagugugguguuuccuggca

SEQ ID NO: 1644763 - RNA, 16 nt, Human
ggcuaguugggcuucc

SEQ ID NO: 1644764 - RNA, 17 nt, Human
ggcuagagguucaaaga

SEQ ID NO: 1644765 - RNA, 22 nt, Human
ggcuagagguucaaagauauuu

SEQ ID NO: 1644766 - RNA, 16 nt, Human
ggcuaggaccccucca

SEQ ID NO: 1644767 - RNA, 22 nt, Human
ggcuaggaccccuccauguggg

SEQ ID NO: 1644768 - RNA, 22 nt, Human
ggccugggggcugggcagagga

SEQ ID NO: 1644769 - RNA, 20 nt, Human
ggccugggggcugggcagag

SEQ ID NO: 1644770 - RNA, 14 nt, Human
ggccugggggcugg

SEQ ID NO: 1644771 - RNA, 11 nt, Human
ggccugugagc

SEQ ID NO: 1644772 - RNA, 15 nt, Human
ggcgcgguggcucac

SEQ ID NO: 1644773 - RNA, 23 nt, Human
ggcgcugccccuggcagccccug

SEQ ID NO: 1644774 - RNA, 21 nt, Human
ggcgcugccccuggcagcccc

SEQ ID NO: 1644775 - RNA, 19 nt, Human
ggcgcugccccuggcagcc

SEQ ID NO: 1644776 - RNA, 18 nt, Human
ggcgcugccccuggcagc

SEQ ID NO: 1644777 - RNA, 20 nt, Human
gcucucuggccuucggccuc

SEQ ID NO: 1644778 - RNA, 19 nt, Human
gcucucuggccuucggccu

SEQ ID NO: 1644779 - RNA, 15 nt, Human
gcucucuggccuucg

SEQ ID NO: 1644780 - RNA, 14 nt, Human
gcucucuggccuuc

SEQ ID NO: 1644781 - RNA, 11 nt, Human
gcucugccucc

SEQ ID NO: 1644782 - RNA, 23 nt, Human
gcucugcccuugguuaggcauug

SEQ ID NO: 1644783 - RNA, 14 nt, Human
gcucugcccuuggu

SEQ ID NO: 1644784 - RNA, 14 nt, Human
gcucugcuccucuc

SEQ ID NO: 1644785 - RNA, 13 nt, Human
gcucugcuccucu

SEQ ID NO: 1644786 - RNA, 22 nt, Human
gcucugccucccaucacccgcu

SEQ ID NO: 1644787 - RNA, 15 nt, Human
gcucugccucccauc

SEQ ID NO: 1644788 - RNA, 14 nt, Human
gcucugccucccau

SEQ ID NO: 1644789 - RNA, 13 nt, Human
gcucugccuccca

SEQ ID NO: 1644790 - RNA, 23 nt, Human
gcucugcugacagacacaggccc

SEQ ID NO: 1644791 - RNA, 20 nt, Human
gcucugcugacagacacagg

SEQ ID NO: 1644792 - RNA, 19 nt, Human
gcucugcugacagacacag

SEQ ID NO: 1644793 - RNA, 18 nt, Human
gcucugcugacagacaca

SEQ ID NO: 1644794 - RNA, 14 nt, Human
gcucugcugacaga

SEQ ID NO: 1644795 - RNA, 13 nt, Human
gcucugcugacag

SEQ ID NO: 1644796 - RNA, 21 nt, Human
gcucugcuccucuccccagca

SEQ ID NO: 1644797 - RNA, 19 nt, Human
gcucugcuccucuccccag

SEQ ID NO: 1644798 - RNA, 22 nt, Human
gcucuggacaggcauguucucu

SEQ ID NO: 1644799 - RNA, 21 nt, Human
gcucuggacaggcauguucuc

SEQ ID NO: 1644800 - RNA, 16 nt, Human
gcucuggacaggcaug

SEQ ID NO: 1644801 - RNA, 15 nt, Human
gcucuggacaggcau

SEQ ID NO: 1644802 - RNA, 14 nt, Human
gcucuggacaggca

SEQ ID NO: 1644803 - RNA, 13 nt, Human
gcucucuggccuu

SEQ ID NO: 1644804 - RNA, 12 nt, Human
gcucucuggccu

SEQ ID NO: 1644805 - RNA, 11 nt, Human
gcucucuggcc

SEQ ID NO: 1644806 - RNA, 17 nt, Human
gcucuccgaccagacac

SEQ ID NO: 1644807 - RNA, 13 nt, Human
gcucuccgaccag

SEQ ID NO: 1644808 - RNA, 19 nt, Human
gcucuccgaccagacaccu

SEQ ID NO: 1644809 - RNA, 15 nt, Human
gcucuccucuugcca

SEQ ID NO: 1644810 - RNA, 22 nt, Human
gcucuccucuugccacugccuc

SEQ ID NO: 1644811 - RNA, 19 nt, Human
gcucuccucuugccacugc

SEQ ID NO: 1644812 - RNA, 17 nt, Human
gcucgagcaugccugga

SEQ ID NO: 1644813 - RNA, 16 nt, Human
gcucgagcaugccugg

SEQ ID NO: 1644814 - RNA, 21 nt, Human
gcuccuucuguccuacucugu

SEQ ID NO: 1644815 - RNA, 19 nt, Human
gcucccuucccaccucucu

SEQ ID NO: 1644816 - RNA, 18 nt, Human
gcucccuucccaccucuc

SEQ ID NO: 1644817 - RNA, 16 nt, Human
gcucccuucccaccuc

SEQ ID NO: 1644818 - RNA, 15 nt, Human
gcucccuucccaccu

SEQ ID NO: 1644819 - RNA, 12 nt, Human
gcucuucuccag

SEQ ID NO: 1644820 - RNA, 22 nt, Human
gcucuuccaggcugggagagcc

SEQ ID NO: 1644821 - RNA, 18 nt, Human
gcucuuccaggcugggag

SEQ ID NO: 1644822 - RNA, 19 nt, Human
gcucuuccaggcugggaga

SEQ ID NO: 1644823 - RNA, 16 nt, Human
gcucuucuccaggcug

SEQ ID NO: 1644824 - RNA, 14 nt, Human
gcucuucuccaggc

SEQ ID NO: 1644825 - RNA, 13 nt, Human
gcucuucuccuuu

SEQ ID NO: 1644826 - RNA, 21 nt, Human
gcucuucuccuuucacaaccu

SEQ ID NO: 1644827 - RNA, 17 nt, Human
gcucuucuccuuucaca

SEQ ID NO: 1644828 - RNA, 16 nt, Human
gcucuugaugccuggc

SEQ ID NO: 1644829 - RNA, 15 nt, Human
gcucuugaugccugg

SEQ ID NO: 1644830 - RNA, 14 nt, Human
gcucuugaugccug

SEQ ID NO: 1644831 - RNA, 23 nt, Human
gcucuucuccuuucacaaccuuc

SEQ ID NO: 1644832 - RNA, 21 nt, Human
gcugacagacacaggcccggc

SEQ ID NO: 1644833 - RNA, 17 nt, Human
gcugacagacagcccuc

SEQ ID NO: 1644834 - RNA, 17 nt, Human
gcucuugaugccuggcg

SEQ ID NO: 1644835 - RNA, 19 nt, Human
gcugacuguacuccuccca

SEQ ID NO: 1644836 - RNA, 18 nt, Human
gcugacuguacuccuccc

SEQ ID NO: 1644837 - RNA, 21 nt, Human
gcugauggugcaaugaccuuu

SEQ ID NO: 1644838 - RNA, 18 nt, Human
gcugauggugcaaugacc

SEQ ID NO: 1644839 - RNA, 20 nt, Human
gcugcaguugccagucaccc

SEQ ID NO: 1644840 - RNA, 18 nt, Human
gcugcaguugccagucac

SEQ ID NO: 1644841 - RNA, 21 nt, Human
gcugcaguugccagucacccc

SEQ ID NO: 1644842 - RNA, 17 nt, Human
gcugcauuuaaaagaua

SEQ ID NO: 1644843 - RNA, 19 nt, Human
gcugagucugaaggcuggg

SEQ ID NO: 1644844 - RNA, 18 nt, Human
gcugagucugaaggcugg

SEQ ID NO: 1644845 - RNA, 16 nt, Human
gcugagucugaaggcu

SEQ ID NO: 1644846 - RNA, 15 nt, Human
gcugagucugaaggc

SEQ ID NO: 1644847 - RNA, 22 nt, Human
gcugagucccaggcugagccuc

SEQ ID NO: 1644848 - RNA, 21 nt, Human
gcugagucccaggcugagccu

SEQ ID NO: 1644849 - RNA, 17 nt, Human
gcugagucccaggcuga

SEQ ID NO: 1644850 - RNA, 21 nt, Human
gcugacuguacuccucccagg

SEQ ID NO: 1644851 - RNA, 23 nt, Human
gcugagugggggaucacagccuc

SEQ ID NO: 1644852 - RNA, 22 nt, Human
gcugagugggggaucacagccu

SEQ ID NO: 1644853 - RNA, 16 nt, Human
gcugauggugcaauga

SEQ ID NO: 1644854 - RNA, 15 nt, Human
gcugauggugcaaug

SEQ ID NO: 1644855 - RNA, 17 nt, Human
gcuaagcaaaaugugau

SEQ ID NO: 1644856 - RNA, 23 nt, Human
gcuaagagggagggagggcucca

SEQ ID NO: 1644857 - RNA, 14 nt, Human
gcuaagcauuccaa

SEQ ID NO: 1644858 - RNA, 15 nt, Human
gcuacccgggaaggg

SEQ ID NO: 1644859 - RNA, 14 nt, Human
gcuacccgggaagg

SEQ ID NO: 1644860 - RNA, 11 nt, Human
gcuaaggacuu

SEQ ID NO: 1644861 - RNA, 18 nt, Human
gcuagagguucaaagaua

SEQ ID NO: 1644862 - RNA, 19 nt, Human
gcuagagguucaaagauau

SEQ ID NO: 1644863 - RNA, 21 nt, Human
gcuagagguucaaagauauuu

SEQ ID NO: 1644864 - RNA, 21 nt, Human
gcuacccgggaagggggcugg

SEQ ID NO: 1644865 - RNA, 18 nt, Human
gcuaucucccccagcccc

SEQ ID NO: 1644866 - RNA, 17 nt, Human
gcuaucucccccagccc

SEQ ID NO: 1644867 - RNA, 16 nt, Human
gcuaucucccccagcc

SEQ ID NO: 1644868 - RNA, 22 nt, Human
gcuaucucccccagccccaucc

SEQ ID NO: 1644869 - RNA, 21 nt, Human
gcuaucucccccagccccauc

SEQ ID NO: 1644870 - RNA, 20 nt, Human
gcuaucucccccagccccau

SEQ ID NO: 1644871 - RNA, 19 nt, Human
gcuaucucccccagcccca

SEQ ID NO: 1644872 - RNA, 23 nt, Human
gcuaucucccccagccccauccu

SEQ ID NO: 1644873 - RNA, 22 nt, Human
gcuaagagggagggagggcucc

SEQ ID NO: 1644874 - RNA, 14 nt, Human
gcuaacauggaagu

SEQ ID NO: 1644875 - RNA, 16 nt, Human
gcuaaaugugaaugau

SEQ ID NO: 1644876 - RNA, 13 nt, Human
gcuaaaugugaau

SEQ ID NO: 1644877 - RNA, 23 nt, Human
gcgugagccacugcaccgggcca

SEQ ID NO: 1644878 - RNA, 18 nt, Human
gcgugagccacugcaccg

SEQ ID NO: 1644879 - RNA, 15 nt, Human
gcgugagaccugccc

SEQ ID NO: 1644880 - RNA, 19 nt, Human
gcgguccacccaggagccc

SEQ ID NO: 1644881 - RNA, 18 nt, Human
gcgguccacccaggagcc

SEQ ID NO: 1644882 - RNA, 20 nt, Human
gcgguccacccaggagcccc

SEQ ID NO: 1644883 - RNA, 16 nt, Human
gcgguccacccaggag

SEQ ID NO: 1644884 - RNA, 13 nt, Human
gcggggacagcuc

SEQ ID NO: 1644885 - RNA, 12 nt, Human
gcggggacagcu

SEQ ID NO: 1644886 - RNA, 15 nt, Human
gcgggcuuccuccug

SEQ ID NO: 1644887 - RNA, 23 nt, Human
gccugugagcuaggaauuguguu

SEQ ID NO: 1644888 - RNA, 17 nt, Human
gccugugaacugaacuc

SEQ ID NO: 1644889 - RNA, 20 nt, Human
gcuccauuuuuagugaaaua

SEQ ID NO: 1644890 - RNA, 23 nt, Human
gcuccaggcuccuuuagcgccca

SEQ ID NO: 1644891 - RNA, 16 nt, Human
gcuccaggcuccuuua

SEQ ID NO: 1644892 - RNA, 11 nt, Human
gcuccagcugu

SEQ ID NO: 1644893 - RNA, 24 nt, Human
gcuccaggcuccuuuagcgcccag

SEQ ID NO: 1644894 - RNA, 20 nt, Human
gcuccagcuguucagcuggu

SEQ ID NO: 1644895 - RNA, 14 nt, Human
gcuccaucuccacu

SEQ ID NO: 1644896 - RNA, 15 nt, Human
gcuccauggcugcca

SEQ ID NO: 1644897 - RNA, 19 nt, Human
gcuccaagcucccaggcau

SEQ ID NO: 1644898 - RNA, 18 nt, Human
gcuccaagcucccaggca

SEQ ID NO: 1644899 - RNA, 17 nt, Human
gcuccaagcucccaggc

SEQ ID NO: 1644900 - RNA, 16 nt, Human
gcuccaagcucccagg

SEQ ID NO: 1644901 - RNA, 21 nt, Human
gcuccaagcucccaggcauuc

SEQ ID NO: 1644902 - RNA, 23 nt, Human
gcuccagcuggccgggagccuga

SEQ ID NO: 1644903 - RNA, 17 nt, Human
gcuccagcuggccggga

SEQ ID NO: 1644904 - RNA, 15 nt, Human
gcuccaagcucccag

SEQ ID NO: 1644905 - RNA, 14 nt, Human
gcuccaagcuccca

SEQ ID NO: 1644906 - RNA, 13 nt, Human
gcuccaagcuccc

SEQ ID NO: 1644907 - RNA, 14 nt, Human
gcuccaagaauuuc

SEQ ID NO: 1644908 - RNA, 16 nt, Human
gcuccaaaugcagcuu

SEQ ID NO: 1644909 - RNA, 18 nt, Human
gcucaggugucccugcac

SEQ ID NO: 1644910 - RNA, 22 nt, Human
gcucagcggggacagcuccuuc

SEQ ID NO: 1644911 - RNA, 21 nt, Human
gcucagcggggacagcuccuu

SEQ ID NO: 1644912 - RNA, 20 nt, Human
gcucagcggggacagcuccu

SEQ ID NO: 1644913 - RNA, 16 nt, Human
gcucagcggggacagc

SEQ ID NO: 1644914 - RNA, 15 nt, Human
gcucagcggggacag

SEQ ID NO: 1644915 - RNA, 19 nt, Human
gcucaggugucccugcacu

SEQ ID NO: 1644916 - RNA, 23 nt, Human
gcucagcaaaagaugcuucucac

SEQ ID NO: 1644917 - RNA, 22 nt, Human
gcucagcaaaagaugcuucuca

SEQ ID NO: 1644918 - RNA, 20 nt, Human
gcucagcaaaagaugcuucu

SEQ ID NO: 1644919 - RNA, 17 nt, Human
gcucagcaaaagaugcu

SEQ ID NO: 1644920 - RNA, 19 nt, Human
gcucaccagccccagugcc

SEQ ID NO: 1644921 - RNA, 23 nt, Human
gcucaccagccccagugcccaca

SEQ ID NO: 1644922 - RNA, 20 nt, Human
gcucaccagccccagugccc

SEQ ID NO: 1644923 - RNA, 14 nt, Human
gcucaccucucccu

SEQ ID NO: 1644924 - RNA, 12 nt, Human
gcccucuccugg

SEQ ID NO: 1644925 - RNA, 13 nt, Human
gcccucuccuggg

SEQ ID NO: 1644926 - RNA, 14 nt, Human
gcccucuccugggc

SEQ ID NO: 1644927 - RNA, 22 nt, Human
gcccucuccugggcagcugccu

SEQ ID NO: 1644928 - RNA, 23 nt, Human
gcccucuccugggcagcugccuc

SEQ ID NO: 1644929 - RNA, 16 nt, Human
gcccugagcuuucugc

SEQ ID NO: 1644930 - RNA, 12 nt, Human
gcccucugccca

SEQ ID NO: 1644931 - RNA, 18 nt, Human
gcccggcuccaggcuccu

SEQ ID NO: 1644932 - RNA, 17 nt, Human
gcccggcuccaggcucc

SEQ ID NO: 1644933 - RNA, 22 nt, Human
gcccuggacugugugcucagga

SEQ ID NO: 1644934 - RNA, 16 nt, Human
gcccuggacugugugc

SEQ ID NO: 1644935 - RNA, 12 nt, Human
gcccuggacugu

SEQ ID NO: 1644936 - RNA, 23 nt, Human
gcccugcuuugggcugcccuggu

SEQ ID NO: 1644937 - RNA, 22 nt, Human
gcccugcuuugggcugcccugg

SEQ ID NO: 1644938 - RNA, 21 nt, Human
gcccugcuuugggcugcccug

SEQ ID NO: 1644939 - RNA, 20 nt, Human
gcccugcuuugggcugcccu

SEQ ID NO: 1644940 - RNA, 16 nt, Human
gcccggcuccaggcuc

SEQ ID NO: 1644941 - RNA, 12 nt, Human
gcccggcuccag

SEQ ID NO: 1644942 - RNA, 19 nt, Human
gcccgacagccuggcacag

SEQ ID NO: 1644943 - RNA, 17 nt, Human
gcccgacagccuggcac

SEQ ID NO: 1644944 - RNA, 16 nt, Human
gcccgacagccuggca

SEQ ID NO: 1644945 - RNA, 12 nt, Human
gccccuuccccc

SEQ ID NO: 1644946 - RNA, 21 nt, Human
gccccuguucuggcagaguug

SEQ ID NO: 1644947 - RNA, 15 nt, Human
gccccugccacccug

SEQ ID NO: 1644948 - RNA, 14 nt, Human
gccccugccacccu

SEQ ID NO: 1644949 - RNA, 13 nt, Human
gccccugccaccc

SEQ ID NO: 1644950 - RNA, 15 nt, Human
gcagacucuacagag

SEQ ID NO: 1644951 - RNA, 19 nt, Human
gccccuccucucugcccua

SEQ ID NO: 1644952 - RNA, 18 nt, Human
gccccuccucucugcccu

SEQ ID NO: 1644953 - RNA, 15 nt, Human
gccccucccuucaac

SEQ ID NO: 1644954 - RNA, 14 nt, Human
gccccucccuucaa

SEQ ID NO: 1644955 - RNA, 12 nt, Human
gccccucccuuc

SEQ ID NO: 1644956 - RNA, 19 nt, Human
gcccuucucuccagccccu

SEQ ID NO: 1644957 - RNA, 21 nt, Human
gcccuuccucuccacugccuu

SEQ ID NO: 1644958 - RNA, 19 nt, Human
gcccuuccucuccacugcc

SEQ ID NO: 1644959 - RNA, 18 nt, Human
gcccuuccucuccacugc

SEQ ID NO: 1644960 - RNA, 16 nt, Human
gcccuuccucuccacu

SEQ ID NO: 1644961 - RNA, 17 nt, Human
gcccuuccucuccacug

SEQ ID NO: 1644962 - RNA, 22 nt, Human
gcccuucucuccagccccugga

SEQ ID NO: 1644963 - RNA, 21 nt, Human
gcccuucucuccagccccugg

SEQ ID NO: 1644964 - RNA, 23 nt, Human
gcccuucucuccagccccuggau

SEQ ID NO: 1644965 - RNA, 20 nt, Human
gcccuuccucuccacugccu

SEQ ID NO: 1644966 - RNA, 17 nt, Human
gccgagauugcaccacu

SEQ ID NO: 1644967 - RNA, 18 nt, Human
gccgagauugcaccacug

SEQ ID NO: 1644968 - RNA, 19 nt, Human
gccgagaucacgccacugc

SEQ ID NO: 1644969 - RNA, 18 nt, Human
gccgagaucacgccacug

SEQ ID NO: 1644970 - RNA, 16 nt, Human
gccgagaucacgccac

SEQ ID NO: 1644971 - RNA, 23 nt, Human
gcccugguggcagugggagcugc

SEQ ID NO: 1644972 - RNA, 22 nt, Human
gcccugguggcagugggagcug

SEQ ID NO: 1644973 - RNA, 21 nt, Human
gcccugguggcagugggagcu

SEQ ID NO: 1644974 - RNA, 20 nt, Human
gcccugguggcagugggagc

SEQ ID NO: 1644975 - RNA, 19 nt, Human
gcccugguggcagugggag

SEQ ID NO: 1644976 - RNA, 18 nt, Human
gcccugguggcaguggga

SEQ ID NO: 1644977 - RNA, 17 nt, Human
gcccugguggcaguggg

SEQ ID NO: 1644978 - RNA, 14 nt, Human
gcccugguggcagu

SEQ ID NO: 1644979 - RNA, 15 nt, Human
gcccugguuuccugc

SEQ ID NO: 1644980 - RNA, 14 nt, Human
gcccugguuuccug

SEQ ID NO: 1644981 - RNA, 23 nt, Human
gcccugguuuccugcccugggag

SEQ ID NO: 1644982 - RNA, 21 nt, Human
gcccugguuuccugcccuggg

SEQ ID NO: 1644983 - RNA, 20 nt, Human
gcccugguuuccugcccugg

SEQ ID NO: 1644984 - RNA, 19 nt, Human
gcccugguuuccugcccug

SEQ ID NO: 1644985 - RNA, 18 nt, Human
gcccugguuuccugcccu

SEQ ID NO: 1644986 - RNA, 17 nt, Human
gcccugguuuccugccc

SEQ ID NO: 1644987 - RNA, 21 nt, Human
gcccugggaggcucuggagcc

SEQ ID NO: 1644988 - RNA, 19 nt, Human
gcccugggaggcucuggag

SEQ ID NO: 1644989 - RNA, 18 nt, Human
gcccugggaggcucugga

SEQ ID NO: 1644990 - RNA, 17 nt, Human
gcccugggaggcucugg

SEQ ID NO: 1644991 - RNA, 23 nt, Human
gcccugggaggcucuggagccca

SEQ ID NO: 1644992 - RNA, 16 nt, Human
gcccugggaggcagug

SEQ ID NO: 1644993 - RNA, 21 nt, Human
gcccuggugcugccacacuuc

SEQ ID NO: 1644994 - RNA, 17 nt, Human
gcccuggugcugccaca

SEQ ID NO: 1644995 - RNA, 16 nt, Human
gcccuggugcugccac

SEQ ID NO: 1644996 - RNA, 15 nt, Human
gcccuggugcugcca

SEQ ID NO: 1644997 - RNA, 16 nt, Human
gcccugggaggcucug

SEQ ID NO: 1644998 - RNA, 15 nt, Human
gcccugggaggcucu

SEQ ID NO: 1644999 - RNA, 14 nt, Human
gcccugggaggcuc

SEQ ID NO: 1645000 - RNA, 13 nt, Human
gcccugggaggcu

SEQ ID NO: 1645001 - RNA, 14 nt, Human
gcccugggaggcag

SEQ ID NO: 1645002 - RNA, 11 nt, Human
gcccugggagg

SEQ ID NO: 1645003 - RNA, 20 nt, Human
gcccuggcucccacaggccc

SEQ ID NO: 1645004 - RNA, 19 nt, Human
gcccuggcucccacaggcc

SEQ ID NO: 1645005 - RNA, 15 nt, Human
gcccuggcucccaca

SEQ ID NO: 1645006 - RNA, 17 nt, Human
gccuaagugcagccccg

SEQ ID NO: 1645007 - RNA, 16 nt, Human
gccuaaggcugaacuu

SEQ ID NO: 1645008 - RNA, 22 nt, Human
gccuauauuuuuuguuaaauga

SEQ ID NO: 1645009 - RNA, 21 nt, Human
gccucaagugauucuccugcc

SEQ ID NO: 1645010 - RNA, 20 nt, Human
gccucaagugauucuccugc

SEQ ID NO: 1645011 - RNA, 19 nt, Human
gccucaagugauucuccug

SEQ ID NO: 1645012 - RNA, 17 nt, Human
gccucaaccuccugggc

SEQ ID NO: 1645013 - RNA, 16 nt, Human
gccucaaccuccuggg

SEQ ID NO: 1645014 - RNA, 14 nt, Human
gccucaaccuccug

SEQ ID NO: 1645015 - RNA, 14 nt, Human
gccucagugccacu

SEQ ID NO: 1645016 - RNA, 12 nt, Human
gccucagugcca

SEQ ID NO: 1645017 - RNA, 18 nt, Human
gccucagucucccucccu

SEQ ID NO: 1645018 - RNA, 15 nt, Human
gccucagucucccuc

SEQ ID NO: 1645019 - RNA, 23 nt, Human
gccucagccucccaaagugcugg

SEQ ID NO: 1645020 - RNA, 14 nt, Human
gccucagccucccg

SEQ ID NO: 1645021 - RNA, 14 nt, Human
gccucccacgacug

SEQ ID NO: 1645022 - RNA, 21 nt, Human
gccucccacgacugcccggca

SEQ ID NO: 1645023 - RNA, 23 nt, Human
gccucccaacucaccccagcccc

SEQ ID NO: 1645024 - RNA, 22 nt, Human
gccucccaacucaccccagccc

SEQ ID NO: 1645025 - RNA, 15 nt, Human
gccucagugccacua

SEQ ID NO: 1645026 - RNA, 21 nt, Human
gccucccaacucaccccagcc

SEQ ID NO: 1645027 - RNA, 15 nt, Human
gccucccgaguagcu

SEQ ID NO: 1645028 - RNA, 23 nt, Human
gccucccgaauagcugggacuac

SEQ ID NO: 1645029 - RNA, 17 nt, Human
gccucccgaguagcugg

SEQ ID NO: 1645030 - RNA, 21 nt, Human
gccucggacuuagcugggaga

SEQ ID NO: 1645031 - RNA, 20 nt, Human
gccucggacuuagcugggag

SEQ ID NO: 1645032 - RNA, 19 nt, Human
gccucucugcaggucccua

SEQ ID NO: 1645033 - RNA, 15 nt, Human
gccuggccagaugca

SEQ ID NO: 1645034 - RNA, 14 nt, Human
gccuggccagaugc

SEQ ID NO: 1645035 - RNA, 16 nt, Human
gccuggccagaugcac

SEQ ID NO: 1645036 - RNA, 15 nt, Human
gccugggcagaagga

SEQ ID NO: 1645037 - RNA, 15 nt, Human
gccuggauggggcug

SEQ ID NO: 1645038 - RNA, 14 nt, Human
gccuggauggggcu

SEQ ID NO: 1645039 - RNA, 13 nt, Human
gccuggccacgcc

SEQ ID NO: 1645040 - RNA, 17 nt, Human
gccugggcagaaggaag

SEQ ID NO: 1645041 - RNA, 16 nt, Human
gccugggcagaaggaa

SEQ ID NO: 1645042 - RNA, 18 nt, Human
gccugggcagaaggaaga

SEQ ID NO: 1645043 - RNA, 20 nt, Human
gccugggggcugggcagagg

SEQ ID NO: 1645044 - RNA, 21 nt, Human
gccugggggcugggcagagga

SEQ ID NO: 1645045 - RNA, 15 nt, Human
gccugcuccagcugu

SEQ ID NO: 1645046 - RNA, 23 nt, Human
gccugcacggugaauggcuuugu

SEQ ID NO: 1645047 - RNA, 16 nt, Human
gccugauuaaagaaug

SEQ ID NO: 1645048 - RNA, 13 nt, Human
gccugauuaaaga

SEQ ID NO: 1645049 - RNA, 18 nt, Human
gccugcuccagcuguuca

SEQ ID NO: 1645050 - RNA, 16 nt, Human
gccugcuccagcuguu

SEQ ID NO: 1645051 - RNA, 22 nt, Human
gccugcuuuuuauggccuguga

SEQ ID NO: 1645052 - RNA, 19 nt, Human
gccugcuuuuuauggccug

SEQ ID NO: 1645053 - RNA, 18 nt, Human
gccugcuuuuuauggccu

SEQ ID NO: 1645054 - RNA, 22 nt, Human
gccugaagucacacagugaguc

SEQ ID NO: 1645055 - RNA, 19 nt, Human
gccucugcugauccuccca

SEQ ID NO: 1645056 - RNA, 13 nt, Human
gccucugccuguc

SEQ ID NO: 1645057 - RNA, 18 nt, Human
gccucugcugauccuccc

SEQ ID NO: 1645058 - RNA, 21 nt, Human
gccucucugcaggucccuaau

SEQ ID NO: 1645059 - RNA, 20 nt, Human
gccucucugcaggucccuaa

SEQ ID NO: 1645060 - RNA, 23 nt, Human
gccucucugcaggucccuaauaa

SEQ ID NO: 1645061 - RNA, 12 nt, Human
gccucugccugu

SEQ ID NO: 1645062 - RNA, 15 nt, Human
guacgucugacaggc

SEQ ID NO: 1645063 - RNA, 14 nt, Human
guacgucugacagg

SEQ ID NO: 1645064 - RNA, 17 nt, Human
guacgucugacaggcaa

SEQ ID NO: 1645065 - RNA, 14 nt, Human
guacguugugcauu

SEQ ID NO: 1645066 - RNA, 15 nt, Human
guacguugugcauuu

SEQ ID NO: 1645067 - RNA, 16 nt, Human
guacguugugcauuug

SEQ ID NO: 1645068 - RNA, 23 nt, Human
guacuaaggaaucuuucugcuuu

SEQ ID NO: 1645069 - RNA, 15 nt, Human
guacuaaggaaucuu

SEQ ID NO: 1645070 - RNA, 17 nt, Human
guacguugugcauuugg

SEQ ID NO: 1645071 - RNA, 15 nt, Human
guacuucuccacccu

SEQ ID NO: 1645072 - RNA, 14 nt, Human
guacuucuccaccc

SEQ ID NO: 1645073 - RNA, 17 nt, Human
guacuacaguccuccca

SEQ ID NO: 1645074 - RNA, 15 nt, Human
guaccgcaaugugac

SEQ ID NO: 1645075 - RNA, 16 nt, Human
guacccacugcucugg

SEQ ID NO: 1645076 - RNA, 13 nt, Human
guaccucuugagc

SEQ ID NO: 1645077 - RNA, 21 nt, Human
guaccucuugagccuugaacu

SEQ ID NO: 1645078 - RNA, 22 nt, Human
guaccucuugagccuugaacuu

SEQ ID NO: 1645079 - RNA, 15 nt, Human
guagaggagaaacug

SEQ ID NO: 1645080 - RNA, 16 nt, Human
guagagcggagaaagg

SEQ ID NO: 1645081 - RNA, 21 nt, Human
guacuuuuuggcauaacauaa

SEQ ID NO: 1645082 - RNA, 12 nt, Human
guacuuuuuggc

SEQ ID NO: 1645083 - RNA, 23 nt, Human
guacuuuauuuucuauaauuuaa

SEQ ID NO: 1645084 - RNA, 21 nt, Human
guacuuguggacacagcucuu

SEQ ID NO: 1645085 - RNA, 19 nt, Human
guacuucuccacccugcuc

SEQ ID NO: 1645086 - RNA, 18 nt, Human
guacuucuccacccugcu

SEQ ID NO: 1645087 - RNA, 17 nt, Human
guacuucuccacccugc

SEQ ID NO: 1645088 - RNA, 16 nt, Human
guacuucuccacccug

SEQ ID NO: 1645089 - RNA, 21 nt, Human
guacuucuccacccugcucuc

SEQ ID NO: 1645090 - RNA, 20 nt, Human
guacuucuccacccugcucu

SEQ ID NO: 1645091 - RNA, 14 nt, Human
guacuugcucuuga

SEQ ID NO: 1645092 - RNA, 20 nt, Human
guacuuguggacacagcucu

SEQ ID NO: 1645093 - RNA, 16 nt, Human
guacuuguggacacag

SEQ ID NO: 1645094 - RNA, 22 nt, Human
guacuugcucuugaugccuggc

SEQ ID NO: 1645095 - RNA, 19 nt, Human
guacuugcucuugaugccu

SEQ ID NO: 1645096 - RNA, 18 nt, Human
guacuugcucuugaugcc

SEQ ID NO: 1645097 - RNA, 16 nt, Human
guacuugcucuugaug

SEQ ID NO: 1645098 - RNA, 15 nt, Human
guacuugcucuugau

SEQ ID NO: 1645099 - RNA, 15 nt, Human
guaauuggaaaggca

SEQ ID NO: 1645100 - RNA, 18 nt, Human
guacacuguuucaaacuu

SEQ ID NO: 1645101 - RNA, 20 nt, Human
guaauuaaguacuauguauc

SEQ ID NO: 1645102 - RNA, 17 nt, Human
guaauuaaguacuaugu

SEQ ID NO: 1645103 - RNA, 14 nt, Human
guaauuaaguacua

SEQ ID NO: 1645104 - RNA, 21 nt, Human
guaauuaaguacuauguauca

SEQ ID NO: 1645105 - RNA, 13 nt, Human
guaauuauaucug

SEQ ID NO: 1645106 - RNA, 19 nt, Human
guaaugauaacuggaaacu

SEQ ID NO: 1645107 - RNA, 18 nt, Human
guaaugaugucguuugaa

SEQ ID NO: 1645108 - RNA, 13 nt, Human
guaaugaaaacca

SEQ ID NO: 1645109 - RNA, 11 nt, Human
guaaugaaaac

SEQ ID NO: 1645110 - RNA, 15 nt, Human
guaaucguguccccu

SEQ ID NO: 1645111 - RNA, 15 nt, Human
guacccacugcucug

SEQ ID NO: 1645112 - RNA, 20 nt, Human
guacauaaugcgugcauacc

SEQ ID NO: 1645113 - RNA, 20 nt, Human
guacagcaaggagauuuaca

SEQ ID NO: 1645114 - RNA, 22 nt, Human
guacagagcccacgcccccacu

SEQ ID NO: 1645115 - RNA, 18 nt, Human
guacagagcccacgcccc

SEQ ID NO: 1645116 - RNA, 12 nt, Human
guacagagccca

SEQ ID NO: 1645117 - RNA, 19 nt, Human
guacacuguuucaaacuuu

SEQ ID NO: 1645118 - RNA, 20 nt, Human
guacacuguuucaaacuuua

SEQ ID NO: 1645119 - RNA, 21 nt, Human
guacacuguuucaaacuuuac

SEQ ID NO: 1645120 - RNA, 16 nt, Human
guacagacaacaaacc

SEQ ID NO: 1645121 - RNA, 15 nt, Human
guacagacagaaaaa

SEQ ID NO: 1645122 - RNA, 23 nt, Human
guaaauacaauuuuguuucugua

SEQ ID NO: 1645123 - RNA, 22 nt, Human
guaaauacaauuuuguuucugu

SEQ ID NO: 1645124 - RNA, 15 nt, Human
guaaaucccauuauu

SEQ ID NO: 1645125 - RNA, 21 nt, Human
guaaauacaauuuuguuucug

SEQ ID NO: 1645126 - RNA, 15 nt, Human
guaaauuaacuuuua

SEQ ID NO: 1645127 - RNA, 16 nt, Human
guaaauuaacuuuuau

SEQ ID NO: 1645128 - RNA, 17 nt, Human
guaaauuaacuuuuaua

SEQ ID NO: 1645129 - RNA, 21 nt, Human
guaaauuaacuuuuauaaacu

SEQ ID NO: 1645130 - RNA, 22 nt, Human
guaaauuaacuuuuauaaacuu

SEQ ID NO: 1645131 - RNA, 18 nt, Human
guaaaugggggugcauuu

SEQ ID NO: 1645132 - RNA, 19 nt, Human
guaaaugggggugcauuug

SEQ ID NO: 1645133 - RNA, 20 nt, Human
guaaaugggggugcauuuga

SEQ ID NO: 1645134 - RNA, 21 nt, Human
guaaaucccauuauucaaagu

SEQ ID NO: 1645135 - RNA, 20 nt, Human
guaaaucccauuauucaaag

SEQ ID NO: 1645136 - RNA, 19 nt, Human
guaaaucccauuauucaaa

SEQ ID NO: 1645137 - RNA, 18 nt, Human
guaaaucccauuauucaa

SEQ ID NO: 1645138 - RNA, 17 nt, Human
guaaaucccauuauuca

SEQ ID NO: 1645139 - RNA, 16 nt, Human
guaaaucccauuauuc

SEQ ID NO: 1645140 - RNA, 18 nt, Human
guaagggaaacugccagc

SEQ ID NO: 1645141 - RNA, 17 nt, Human
guaagggaaacugccag

SEQ ID NO: 1645142 - RNA, 22 nt, Human
guaaguauucuuauuuaaugaa

SEQ ID NO: 1645143 - RNA, 13 nt, Human
guaaggaaugauu
